United States Patent Application Publication US 2004/0214272 A1 - sequence listing, part 54

SEQ ID NO: 285745 - protein, 1127 aa, Zea mays
  unsure (1)..(1127): unsure at all Xaa locations
  Clone ID: MRT4577_236C.1.pep
MSKLDDEEEQALLVPPPGRATDPMKAIYFISTGSVFGINLQQLHLYDLVLVVPQPILPDEQPIQQDELQLSNQHSGLSFDSSIGAGQLAPLSNGHFVENGHVLLGDGFAINAAPFNGPQEVDGPMFEERKRSAQFSRLWAKYFAPAGLADHSVDIPKKWAPFFLSNLLQPDAFNWSKTFLLSEIPPTLQEPGLKSLPFVVPKECPNDSSLEDVLSGISKDTDSCGGPTPIIVESELRRSKRLKESRAGFRHGACPKRNCLMCQHNFDGPHAILQGAAESGLQWSVLSHNVRGINSTTKWNAIRCSIRDAGCEVICLQETKKEFFDSAYLKNFCPAQFDSFAFVPSVGNSGGSAIIWKSSRLSGNVIFQNNYAQSVEFTSNLSACSWIITNVYAPCTPHGKIDFLNWLHNISMPSDKLWLLIGDFNLIRRPEDRNRIGGDINLMLKFNEAISNLDLIEIPLHGLTIPKPKLFRFENFWLELDGFMNLFQTTWNGLPSIPDKAKNLTAKFKYVRKVLKDWQRSLPKIDKTVKNIKLLIELIDNMEEHRDLSIEEWNFREILQQKCAAIKWVTDGDICSRFFHAHATIKHRKNSIATLTDDNGITLLELEHKSGLLWDAFKCRLGSSDFSGIDFDLSELLTSNEQLHKLDSPFTKLEIDSIIKLLPSDKSPGPDGFNTNFIKKCWHVIAPDFYDLCDKFYQGEVCLRSINGSFIVLIPKMENPQKVGDYRPISLLNNSMKILTKLLENRLQPFMSRLIHKNQYGFIKGRSIQDCLAWAFEYIHLCHSSKKEIIVLKLDFEKAFDTVEHELIIQVLTHKGFGPRWINWIRSILLSGTSSVLLNGVPGKPFHCKRGVRQGDPLSPLLFVLAADLLQSIINKARLWNLLKLPLPDIGDQDFPIVQYADDTLLILEACPKQLFFLKAILNSFASSTGLKVNYNKSNMYPINVPSDKMEILSRTLNCQIGEMPFTYLGLPLGLAKPRKEHFLPLIQRIEKRLSCSSNFLSQAGRLELVNSVFSALPTFFMCTLKIPKTIIKEIDMFRKHCLWRRNDISSKKPPLIAWNAVTQRKVNGGLGVLRLETQNEALLIKFLHKFFNNSDLPWVHLVWNKYFCPXGLPGHRNIGSFWWKSM

SEQ ID NO: 285746 - protein, 114 aa, Zea mays
  unsure (1)..(114): unsure at all Xaa locations
  Clone ID: MRT4577_23700C.1.pep
MKGVGGGAVLGDYXYXKXXXLFHKICIGXKMWRYYDFGPKVVTAVVCIXGIVGTVDVYYKXIMIICMKGYXVIYIDVAEVWNDYEWIYLFEKFLDXMNMYDVNIYGICIGGFME

SEQ ID NO: 285747 - protein, 62 aa, Zea mays
  Clone ID: MRT4577_23701C.1.pep
TKTFVPKRKGHKKQGPLKCILLGGLGNGSRPTVHGVCSKQVVYKFKNGLGSGNNFVCVGATL

SEQ ID NO: 285748 - protein, 105 aa, Zea mays
  Clone ID: MRT4577_23702C.1.pep
RPRSSPPSGRATLSAANANASSPAGSERSKRRGSRSGRGIRWRNATGLAAESQSQHTRKGDASSSYNSRPPTRAAGCWSAPRPRRSPTAARSLASIVAGLVALAF

SEQ ID NO: 285749 - protein, 235 aa, Zea mays
  Clone ID: MRT4577_23703C.1.pep
MVADALVYHPSVAHYLRFVATTLGRDKALRTIQYFARFYSWYLFRTNNPTSAIAPWDAVKKQFGLTRKILRFGKFVEHIKAAAVAFDNKAPADAVLRNLTVGRQLGYAGYLSLDAITLFDALGFKKFDSAKKLQEYAYRAWLSGLVCSAVAGVYTLYRLQEREKAVNRKEGEGVVEAKKIERERVAARIQLVSDLCDLTVPLSALGYAKLDDGLVGIAGTISSLIGVWSAWKKTA

SEQ ID NO: 285750 - protein, 144 aa, Zea mays
  unsure (1)..(144): unsure at all Xaa locations
  Clone ID: MRT4577_23704C.1.pep
LGNFGKKVPLWWLXVXARANNKFSXGWVIXPPLEVVVPAKGPPWPETPPQLPPGFLVSHPNPEDWRLSKTHKSFWPRGPPKRKGAPQGQNNLCRTAWPCDVFFPPRQNPVASLSCLSGGVWLNFFFFSEGFAPVAMGPPWVCFL

SEQ ID NO: 285751 - protein, 61 aa, Zea mays
  Clone ID: MRT4577_23705C.1.pep
NARAFTCSDVRRVHALRLFQHILYDGLGQLHICIWLASSFLCLEQGQCVLCFPLLVYITLG

SEQ ID NO: 285752 - protein, 80 aa, Zea mays
  Clone ID: MRT4577_23706C.1.pep
MVDAPPAAARCPPLQQAAMELALAPMFFLFFHGARPFPLLLHAGNQPIFLPKLGSPSLSLSLLQQQPSQGISVREQQQSI

SEQ ID NO: 285753 - protein, 164 aa, Zea mays
  Clone ID: MRT4577_23707C.1.pep
PTSEPRTSNRLPTCWTKFSVEITVTGVCRDAAFDYRRDVDLLRHCFHVGIPGQLGHAVQELHKHWVLHRRGLHAANPLNADLLHAPSARSIRPLHRETAGAPLHAVNDLVSRWIHLHQRVQLSRSQISNAKQEIKQTTLSFASATRNKTNDVVICICVLCARMK

SEQ ID NO: 285754 - protein, 52 aa, Zea mays
  Clone ID: MRT4577_23708C.1.pep
LESLGSRLFYRSQVILQVVLESRSTGSPFYETRTSPLIWLGKFFTRRRTTAS

SEQ ID NO: 285755 - protein, 70 aa, Zea mays
  Clone ID: MRT4577_23709C.1.pep
PAGDPCLFDLSSGQKKSDRFISNDRDAPESVGLRGGLSSLVDYPREALQCLHLPPSRCHQHSFFLMQMMP

SEQ ID NO: 285756 - protein, 41 aa, Zea mays
  unsure (1)..(41): unsure at all Xaa locations
  Clone ID: MRT4577_2370C.1.pep
XXMXSYHCALLXXRGLHXFRRXXSRXXKGLXPXGGQQPPXS

SEQ ID NO: 285757 - protein, 116 aa, Zea mays
  Clone ID: MRT4577_23710C.1.pep
VLLPIASKAVLSSTPQSQLHAQRFFRNLCHHGVLPQILPTSYTRHGVLQTSLMEICHCNSSRNKNHRFLIFPCLSVIPKTVFRLRLRLLLHILFRHPIIILHLHYGQALIKWPVLH

SEQ ID NO: 285758 - protein, 67 aa, Zea mays
  Clone ID: MRT4577_23711C.1.pep
IKKKKIRKHRFESFKNQVFCLKRGSSQVNLALNPTKYFTATVRVSKLKKWTVIVCKHEGPRKNFANF

SEQ ID NO: 285759 - protein, 420 aa, Zea mays
  unsure (1)..(420): unsure at all Xaa locations
  Clone ID: MRT4577_23712C.1.pep
METISSCPICNRQVLTVFLEWHADSHFDDDQLQMDMELAHQMSVAESSTDANAMNDPKHYSGSFTSDSNALGALSSHSGYSHHYSELLDEQISCLVRAQIRSQIQEVEGGILSLLRSCLESEAGSSTSMISCYIDHHQILSSEDKGWXCGXRNIQMLSSHLLEAGREAXKYIWSGFVPDIPSLQSLRLAWDKKFDTIGSSHFHNKIYGAKKWIGTTECAALFRSFGLRARIVDFDSTESSDLHSNNGSRAASQVRGPMDKFLIKNKPPKSSSELCREDAESTRGQQALVDWVWNYFASERSDRLATQRVTVSNKTLTKEVPFXPLYFQHQGHSRTIVGIQKKPDRRGSQEQYSLLILDPGHRTADLERCLRSKKGWQRLVKRGVHTLRKPQYQLCYVDPGIASSEEVERLKTIDGTLVRF

SEQ ID NO: 285760 - protein, 87 aa, Zea mays
  Clone ID: MRT4577_23713C.1.pep
DIQLSFTFLPRVAHRSDSTVPQGVVAREPSVSGPRARSGAHVRRWNSTVVASTSSYGHHRCDHVSLWATVMMDSAALCVSVRLGSFV

SEQ ID NO: 285761 - protein, 66 aa, Zea mays
  unsure (1)..(66): unsure at all Xaa locations
  Clone ID: MRT4577_23714C.1.pep
CRRASGGRTEEAGEEADAGWEKEKADGVEEKDERAVSTRSRAAETEESPLWAGMXGRDLAWSALLP

SEQ ID NO: 285762 - protein, 135 aa, Zea mays
  Clone ID: MRT4577_23715C.1.pep
PFLKPFFAKNLWAQPGFFWGFHPTHYFPQGFWLKPWHFPLGPSFNKGPRCSWGWFFPGPPFGGQFLPVLVPSPKFSPPPCGGFFFIFEPPFSFFFCPPANPLGAWFFFFWQPSPPAWGFNLSLIFPASCGPAPSF

SEQ ID NO: 285763 - protein, 75 aa, Zea mays
  Clone ID: MRT4577_23716C.1.pep
GPTTPFRPLFCGPVPVFSKLFSKKPFAGYSIILGRPSNQLICFFQSKSTGTCFLFFNLFHLKPIPYFFFNFFHLK

SEQ ID NO: 285764 - protein, 56 aa, Zea mays
  Clone ID: MRT4577_23717C.1.pep
FLSHRQSHCSMAVFLPCQTWGGALDGRTRIMYPEYPVRGARRGQLLLLRLAEQRLP

SEQ ID NO: 285765 - protein, 68 aa, Zea mays
  unsure (1)..(68): unsure at all Xaa locations
  Clone ID: MRT4577_23718C.1.pep
IGDPLVECCGGYVPYHTXCSANGTAQLWYAPHPFVNCDGMHMHRQACNIIMEGELNCPFDDPPFPISC

SEQ ID NO: 285766 - protein, 119 aa, Zea mays
  unsure (1)..(119): unsure at all Xaa locations
  Clone ID: MRT4577_23719C.1.pep
GXGGWGRXERXXGLGVGXRRRWRLAVAAPEHXXRXSALGQPPRAAHPTXAPSLELGATXPEMAIFAVPPPPASLPSSKKKKKGAGAVALDKPTASLSSSAATIGDGGLAGGVEISPPPS

SEQ ID NO: 285767 - protein, 59 aa, Zea mays
  Clone ID: MRT4577_2371C.1.pep
SVFSAGIQLHGGISVAQRSRPSLRHPCCSSSILRSVTPAPLCSRTHRAFHPCVLSALSS

SEQ ID NO: 285768 - protein, 76 aa, Zea mays
  Clone ID: MRT4577_23720C.1.pep
QRPTLHGPRTEKKKRKKKKKTKKKKKKKKKKENDEMDPIQSKKHNDNTNYLRVFTYPPKGVARHREDSQRIHRQAK

SEQ ID NO: 285769 - protein, 37 aa, Zea mays
  Clone ID: MRT4577_23721C.1.pep
PSYDGPLRRSVSAAVMASSYCLVCICASVPCICRSTL

SEQ ID NO: 285770 - protein, 48 aa, Zea mays
  Clone ID: MRT4577_23722C.1.pep
VCTRDHFMRIRLSLFRSTWFQQDPHKKNNGGLQDFSKKEKKGTQKFVA

SEQ ID NO: 285771 - protein, 143 aa, Zea mays
  unsure (1)..(143): unsure at all Xaa locations
  Clone ID: MRT4577_23723C.1.pep
AILSRKRRAAEMQRAVLLARADAAELCLATLAKLASNTRRGWARDSYSNYAQFRYSXAANVVGFLYSVNQNCALAELMRRNKHLIPHAKRDLFDLTMDQVVAYLLISSWSSATARASDLIDKQESDFFPSMVNGYIVIYLAAF

SEQ ID NO: 285772 - protein, 68 aa, Zea mays
  Clone ID: MRT4577_23724C.1.pep
KCKSDPRVITIQREQYGVTGHLFISTWRSPDKITFMSLIFTDNHKGGFQGLKSFSPLGRVHFPPSLLF

SEQ ID NO: 285773 - protein, 60 aa, Zea mays
  Clone ID: MRT4577_23725C.1.pep
MSLDVASHCLHLHSSVVRGSESHKMIDLSGNPVLRIYYTSRPALFTLCAGNELFYCLLYL

SEQ ID NO: 285774 - protein, 37 aa, Zea mays
  Clone ID: MRT4577_23726C.1.pep
IRLERGCNQPPREWTDSSIWGLFKYLRRFLESYYPLA

SEQ ID NO: 285775 - protein, 166 aa, Zea mays
  unsure (1)..(166): unsure at all Xaa locations
  Clone ID: MRT4577_23727C.1.pep
MNEATHPIRARADVCESKHKATAYAPMESQVDAILSPRRCTXPRGLSRACCCYIMWAGRVTVKGIQPEKVTYHVVQPINGDPLIARLETPVTSSPLVAWYLSKLPAYRTAVSPLLRGVEVGLAHGYLLVGTFSLXTGPLRSTPVHGQARALRAAELVDILNVCLTM

SEQ ID NO: 285776 - protein, 76 aa, Zea mays
  Clone ID: MRT4577_23728C.1.pep
ISLFFLCFFFFFFFIFFPNGTGTDQSHTFLKRCGFTKHLPAKFLFGGAKPKILAKMPCPTKEQKNFANRYTPWINW

SEQ ID NO: 285777 - protein, 59 aa, Zea mays
  Clone ID: MRT4577_23729C.1.pep
SRTSAKKQKAQTLCRSPSKHPKFRQSVPGSCVHPSFFPLSINFVLWFLGPCLEIRTVFK

SEQ ID NO: 285778 - protein, 64 aa, Zea mays
  Clone ID: MRT4577_2372C.1.pep
YKYHSIRPSHRLSLFFLFPFHLSANGACFWCTCFSHFNLGIVYKLYNSLSLSFFYQQECNMYTS

SEQ ID NO: 285779 - protein, 70 aa, Zea mays
  Clone ID: MRT4577_23730C.1.pep
APHKKNITNNFSIPPNITPKQTTTSTINTTIQQQPIPIQIHTINSKTSYNHNATTTIQSTPTLKTKSFTH

SEQ ID NO: 285780 - protein, 107 aa, Zea mays
  Clone ID: MRT4577_23731C.1.pep
AHASAHASDRDPNLLKTLEVYDETARFLRELELDDDALTKAIIGTIGDVDAYQLPDAKGYSRYVSLCLCWCSCPAQINQQLMVQINQQLMICLTIGGFDRNIYSDQR

SEQ ID NO: 285781 - protein, 359 aa, Zea mays
  unsure (1)..(359): unsure at all Xaa locations
  Clone ID: MRT4577_23732C.1.pep
VDFAFLGGGSPPPLHPPCDKQPPPATRRRRQLLPPHHHXYYGGMPPMGDAMXLDGLLDLSTLFAGAHEFFPTAAAATDKGHHYIRARGEPSFARXGVDICTSCLXSVAIQLMIQTEEAAELEWLSKFVDDSYSDMPNYSSATHAAMAAAAAAAANAAGNGGGTTSAGQDSGVAAAPGRGARSRRSRATAAAAAAWHSLVPRPPSQSSPSSSSCSSSDFPSSNKPARPNGGGGSRGKKVPGPPGGGPAGGEAGLEGGGVRRCTHCASEKTPQWRTGPLGPKTLCNACGVRFKSGRLMPEYRPAASPTFVLTQHSNSHRKVMELRRQKELILIRGSHRDAAAGSPPGGPRPELMFRDYGVC

SEQ ID NO: 285782 - protein, 46 aa, Zea mays
  Clone ID: MRT4577_23733C.1.pep
PYVSSNSARGPDEHFTFSLTTLLDTGSDTMAFGYLNPEPYPSTPPH

SEQ ID NO: 285783 - protein, 35 aa, Zea mays
  Clone ID: MRT4577_23734C.1.pep
RSLLNLVLKITNKFNFHLQSLPLQDLPHLEVSVTH

SEQ ID NO: 285784 - protein, 78 aa, Zea mays
  Clone ID: MRT4577_23735C.1.pep
PTDSSPEVINYLGNKACECYISIADWAAVQEWQNAIHDLKKSTSSTSLNLKAVFNYIKSLSSFESGKFVECTEQLELL

SEQ ID NO: 285785 - protein, 287 aa, Zea mays
  unsure (1)..(287): unsure at all Xaa locations
  Clone ID: MRT4577_23736C.1.pep
PRVRRAEQVVVAFEAFQQLSSVRVRAMTAISDLDTIHRDVIDSAADKRAAIVVMPYHRALGHDGSFASLGSAYHAVNKRVLREAPCSVAILVDRGLGGHAQVSAKNVSFSVAVLFFGGPDDREALAYATRMAEHPGVAVTLARLXEPTAAAGXAESAADEAAVEAFKARVGAVKDGSVRFEEPEACTREQVLETIESLSGFNVFVVGRMAAXVAPLVERPDELGPVGSYLVSPEFRTSASVLVIKRYDPATNPKSKRFDPKAGPPVATEEDVLDEEMGMGRATVVPV

SEQ ID NO: 285786 - protein, 71 aa, Zea mays
  Clone ID: MRT4577_23737C.1.pep
MCCTFSFQRCWNLASEARSFTLSGVCACPHALGVWDLECLPWLCGLLNANHFFTSLGHPGRLLTSVEKLLI

SEQ ID NO: 285787 - protein, 63 aa, Zea mays
  Clone ID: MRT4577_23738C.1.pep
RNKNRRRHWILEHRKILPLQKSSQEETSLSLRWSIIYLRSFPPPSFMSLPTSTHILKMRMKRT

SEQ ID NO: 285788 - protein, 118 aa, Zea mays
  Clone ID: MRT4577_23739C.1.pep
TGLHHKMDAIEKAMHYDDEFNSFSTRISTSIPDRTTSGASVSLGSSTGNLDKLGVNKCLNGNRDQPSPTSVLDAPSEDSSCYEPETLGTTTSKNAILRSSAIETVARFLSLPRISYGE

SEQ ID NO: 285789 - protein, 73 aa, Zea mays
  unsure (1)..(73): unsure at all Xaa locations
  Clone ID: MRT4577_2373C.1.pep
ATLPTRPPPRYFALKEQPTTAAAARSKAARGAAPFLMSSPSAPSEAGGITRGASPWRPPAYWYGSPAXWVPPP

SEQ ID NO: 285790 - protein, 56 aa, Zea mays
  unsure (1)..(56): unsure at all Xaa locations
  Clone ID: MRT4577_23740C.1.pep
VPEGLCASSPTLTSPMEYPSPVNSLHTPPLHRHNVFKRHSMREEDFIRXSSREEAS

SEQ ID NO: 285791 - protein, 114 aa, Zea mays
  unsure (1)..(114): unsure at all Xaa locations
  Clone ID: MRT4577_23741C.1.pep
FEWYLIETSGGNWGGFEPIHXINDEQRSLFVGSLSHTNNSTSSISLASPQILERHATITCKNKTFYLTDLGSEHSTYITDNKRRLYHVPPNFPVQVHPYNVIEFRFNKKGMFMM

SEQ ID NO: 285792 - protein, 103 aa, Zea mays
  Clone ID: MRT4577_23742C.1.pep
FNGNGEGEKKKQAMGGESIENRPKKRVPGGLIISKIYRGGQKIGQKEKSWAKKGPWGPGIVCLGLTGQKKTGGGKKGPKCLKQTRAGAVFFGLAKFPPKNSPG

SEQ ID NO: 285793 - protein, 305 aa, Zea mays
  Clone ID: MRT4577_23743C.1.pep
EGEAEGAARRGTDRAMAVAPPTAAALEQLSSSKMFDGFNLRFRHQSATLGCAMTFSIYLPPSPASNLPVLYWLSGLTCTDENFIIKSGAQRAAAAHGIALVAPDTSPRGLNIEGESDSYDFGVGAGFYLNATNEKWKNWRMYDYIVKELPKVLSDNFEQLNTSQASIFGHSMGGHGALTIYLKNTDKYKSVSAFAPIANPINCPWGQKAFSNYLGSTKSDWEEYDATCLIKKNSKVPTTILIDQGEADKFLAEQQLLPHKFEEACKAAGAALTLRMQPGYDHSYYFIATFVDDHIAHHAQFLKSA

SEQ ID NO: 285794 - protein, 106 aa, Zea mays
  Clone ID: MRT4577_23744C.1.pep
KQQPKIRNKKNNRRHQRRLLGHLWLCPRIAPDPSRPAAPPRSQSRSSVLPWTPSSFTTFTDLPDYEPEPDGIDASRGTELAALSCSAARAHSRTLGVLPHDTGVVV

SEQ ID NO: 285795 - protein, 49 aa, Zea mays
  Clone ID: MRT4577_23745C.1.pep
EKKNSQLPLVPPKEGVPIFYRCENTHQRGPGRETLYVPKGTRHKPCLIT

SEQ ID NO: 285796 - protein, 63 aa, Zea mays
  Clone ID: MRT4577_23746C.1.pep
RACAQETETHAYIKLAVTANLVITDQPRLGRKYWTSTSLVTGNTHCSYILGSSLGPTLHSMAP

SEQ ID NO: 285797 - protein, 101 aa, Zea mays
  Clone ID: MRT4577_23747C.1.pep
WALRSQLETKEKEKGDECGCGRDSVRPPIRPRGSLWLTPLRTQLETEEKEKGKHRVRGRYRLGRTQINGNSSPDIAFRREVAPLCGQARHQANRGYATGYG

SEQ ID NO: 285798 - protein, 139 aa, Zea mays
  Clone ID: MRT4577_23748C.1.pep
GKAYPLSSCSSPVEAASHSTVQPGGRVEGQVTPSTISCSVPSKAEAARRSSVAGSGVGSWASFWTAPCSGMSTHSPSARLKSAIGLMTSLSTERSDFTTESNVRRGIAVDLSPSEAIPSPHPMLSLLFFLGLELGAQRC

SEQ ID NO: 285799 - protein, 72 aa, Zea mays
  Clone ID: MRT4577_23749C.1.pep
FFYFTASIDSNSHDDDQAFSTKTPNFSVGLVKRFLPEHWYLFIGPSVLLTLNTQLPVHRMAPKYFYDGRGQQ

SEQ ID NO: 285800 - protein, 126 aa, Zea mays
  Clone ID: MRT4577_2374C.1.pep
TLGGGGKKKKKPGEKLNPPGGTGTLVLSIQRGPWGKLKAKKKKGGVPGNPRGGGPPFKGTPSPGTRGGAKNPREWTPFCRGGRQFPTPGGAPPTGKPTLLAGKKMGQKNFSNPPPFGAGGEKAPFP

SEQ ID NO: 285801 - protein, 93 aa, Zea mays
  unsure (1)..(93): unsure at all Xaa locations
  Clone ID: MRT4577_23750C.1.pep
HTVHGQCKHHEVNEKDSKPLLFGEKEGAVFVCENPEEIPCSSLVAEXYADESNVVFTDQDKAVLHSKGGAYIVGISTPSKDAPMFDAMVNDNE

SEQ ID NO: 285802 - protein, 140 aa, Zea mays
  unsure (1)..(140): unsure at all Xaa locations
  Clone ID: MRT4577_23751C.1.pep
AVLETSCLFLRIFCAXAKGESKRSDSLFNKLLLENPLSCRKQGDHNSEDFGHLLLSLQKDYXLTTHNIKGILGNMGEALIETLXLVLEYCMSELMNNRHELAKLQNEVRTATPDGRMVKEEDLGPIAYLKVTIKEYMLMH

SEQ ID NO: 285803 - protein, 69 aa, Zea mays
  Clone ID: MRT4577_23752C.1.pep
VLKTFCSKCYTLYMRMSRRTMWYFHLKMNLERSPKSSNPGCSNVQERIPKGQDKPTRANAWVGRAINSG

SEQ ID NO: 285804 - protein, 100 aa, Zea mays
  Clone ID: MRT4577_23753C.1.pep
MAMTVEVLAALAFMFSTSILLQILACALYSNWWPMLAALMWINAAKFLTGASAMGSLAIPAILRHAGLIETGAMFIEFTSFFILVCTVLCFHRATLDEDW

SEQ ID NO: 285805 - protein, 86 aa, Zea mays
  Clone ID: MRT4577_23754C.1.pep
NLLVGSSRGGNFILGGLVFFSPVCLCIGQPFTKKKPPFPKICTSQFFFENFFPPGGPKKKKKKKKKKKKKKKKKKKKKKKKKKKKK

SEQ ID NO: 285806 - protein, 70 aa, Zea mays
  Clone ID: MRT4577_23755C.1.pep
VNPKACDRIRSQVGRALTMVYTDDSFLHHRTCDDKVKVKVITSALPHDHIICTKKRISSVAVADVLCRHL

SEQ ID NO: 285807 - protein, 149 aa, Zea mays
  unsure (1)..(149): unsure at all Xaa locations
  Clone ID: MRT4577_23756C.1.pep
MAMTVEVLAALAFMFSTSILLQILXQHEVAMLLLFVASSMLDFILWXACALYSNWWPMLAALMYVLVPMPCLFFGGGSTHFLTSREGGGWINAAKFLTGASAMGSLAIPAILRHAGLIETGAMFIEFTSFFILVCTVLCFHRATLDEDW

SEQ ID NO: 285808 - protein, 93 aa, Zea mays
  Clone ID: MRT4577_23757C.1.pep
NKTASNSGCWRQGKHGKNEAESIPRSRATRTTFILLYGGGEEELWQSRGSARWQEGGCRYMSLPDRLISYTGHIGAQARNLACSTTGSHASDR

SEQ ID NO: 285809 - protein, 87 aa, Zea mays
  unsure (1)..(87): unsure at all Xaa locations
  Clone ID: MRT4577_23758C.1.pep
MKVLIVALALLALAASAAFSTSGGCGCQTPPFHLPPSFYLPPSIYLPSHHHSQPWQYPTQPPLLIPCQQFXSCGVRSVRSPFLGLER

SEQ ID NO: 285810 - protein, 519 aa, Zea mays
  Clone ID: MRT4577_23759C.1.pep
MDVNDVLLVVLAAALAAMWWRRCSKTGGVDGLPPGPPGWPVVGNLFQVILQRRPFMYVVRDLREKYGPIFTMRMGQRTLIVVTSAELIHEALVKQGPMFASRPEDSPTRLLFSVGKCTVNSAPYGPLWRALRRNFVAEIVSPHRVKGFSWIREWAVDAHLRRLCAELAADGAVRVMASCRLTICSILICICFGAKIPDELIREIEEVLKDVMMMTMPKLPDFLPLLTPLFRKQLTEARGLRRRQLNCLVPLVRARRDFLRDGTAAAADGVEMMSGPGEAYVDSLFDLEPPGRGKRLGEEELVTLCSEVMSAGTDTSATALEWAMMHLVLDPAAQERLYDEVVAKVGKTARITEADVEAMPYLQAVVKETFRRHPPSHFVLSHAATRDTELGGYRVPADASVEFYTAWVTENPATWPDPDAWRPERFLEGGEGFDTDITGTRALRMMPFGAGRRICPAATLGVLHIQLMLANMVREFRWLPPAGEGPPDPTETFAFTVVMKNPLRAAFVERATTETATTA

SEQ ID NO: 285811 - protein, 974 aa, Zea mays
  Clone ID: MRT4577_2375C.1.pep
MTLLPSSAAYSLSVRISSRLEDNVWDLTGVYGPQLENEKMIFLSELRYIQSMVRPEWILLGDFNTIRRAREKNKGSINRRVMRQFNNTIDDLHLLELELTDRAFTWSNEQMSPTMTRIDRFFATTEWHDLFPSADIHSMCTMTSDHCPLLLQSHSSGTFYQGFRFESFWPKIEGFNEVVHQAWNSTVTSNDAILRLHVKMARTAKALSAWRHNTVGNFKVKMAIIQITITLLDKAQENRQLSSEEFDFRRTLKSKILDITSAQRASARQHSRLTWMRLGDANTKFFHLTANNRRRKNLIRSLIKDDTLLTSQEDKLSEVQLHFDQMLGTTGRRSSAVHWDHLGYAPFELSELDNSIEDNEIKDVVMGLHSEKAPGPDGLAPRMNDIISSAQNAFIQNRSIHDNFLYVQRVIMNLHKNGRNWVADILGSSSSRIIINGQRSNAIKHMRGVRQGDPLSPFLFILAMDPLHRMIEKAADEGLLGQVLPRGAKLRCSLYADDAGVFIKADKSDLEVLKGILNAFEGCSGLKINYDKTEIYPIRYPAALWPALSEVFPGKYSSLPGKYLGLPLHFKKVKRNDLQPLIDKINNRLAGWKGKMLSKAGRETLVKAVLSAQPIYHLTVFPPQKWLLQTIDRMRRNFLWKGSNPEVCSGGHCLVNWTLTCLPKDKGGLGILDLDRFVRGLRLRWLWLRWKSKDRVWTALQLPCDKTDEDLFNASTIVTVGNGKMAEFWNSSWVQGQAPKNIAPSLFKKTKRKNITVAKALNNNNWIRLCSPYSGEGEFGELISLWRALGDMQELNGLEDNIAWRWTADGQYSASSAYKIQFASNFSIMNLCPIWKAKVEPKCRFFAWTLLHKRILTADNLQKRGWPCNPVCCLCNSAPETILHLCKDCPFSREVWIKVWNGANVPLLTGSTNDISLYDWWMDLRSLCSRQTRRGFDGLLILFWWNLWLERNNRIFQRQHRSVDQVALAVKDFG

SEQ ID NO: 285812 - protein, 67 aa, Zea mays
  Clone ID: MRT4577_23761C.1.pep
GAFFFFFFIFFFFFFFFFFFFFSVVIISPTPHKTRGASEDNRIESRKSSRGGKAIRILRVGSVQALY

SEQ ID NO: 285813 - protein, 65 aa, Zea mays
  Clone ID: MRT4577_23762C.1.pep
LATLCLTFLAKVSSSIRTTNFRQSVTQLATNQTCPLFPKYQDTKQATEGDRCCRVGCLPLDDERV

SEQ ID NO: 285814 - protein, 119 aa, Zea mays
  Clone ID: MRT4577_23763C.1.pep
GSSAQMSTEKRHLDQVECLSARRLLFDHLFFSFNELLLSYLYLLNLRFHSDLLVCNELLLSYLYLLNLSFHSGLLVNGRPRADDAGPRGGAELACSDTAASNSPTAPTHDSNRRRWRKP

SEQ ID NO: 285815 - protein, 83 aa, Zea mays
  Clone ID: MRT4577_23764C.1.pep
ARNSARDSAMPISFDGMADEDAQRISPDLALNDTTTVGIDGRVPHIKFRKASWLCTGMLSYFHQTVLGQPTTGPLGNPNEVSS

SEQ ID NO: 285816 - protein, 827 aa, Zea mays
  unsure (1)..(827): unsure at all Xaa locations
  Clone ID: MRT4577_23765C.1.pep
DVVQDTSVKKWKDVANDSRKQLHDKEKEVLDLRQEVIGLKHSLKEANDQCILLXFNEVQKAWRVSSSLQADLKSENLMLAXRHQTENVQNHQLGDQISHLLKVEQEQNLKMQERDLTIQSLQTKLKSIESQLNEALNASDARSTIGSESASVISSPKITESTADSSSVTKRLEEELAKRDALIEKLHEENEKLFDRLTEKSGLGSAPQASSPSANKPANGQGREIGRSDSSKSRSPDVFASPVSQDKTGNSGAIVKSSNELAKTTPAGEYLTSALMDFDPDQFEGFAAIADGANKLLMLVLAAVIKAGAAREHEILAEIRDAVFSFIRKMEPKKVMDTMLVSRVKILYIRSLLAKSPELQSIKVSPVERFLEKSNTGRSRSSSRGSSPGRSPVHHHGHGSRTALVDEHVHGFKVNIKQEKKSKFSSIVLKLRGIEEETWRQHVTGGKLREITEEAKAFSIGNKALAALFVHTPAGELQRQIRAWLAENFEFLSVTGADAAGGAAGQLELLSTAIMDGWMAGLGTAQPPTTDALGQLLSEYTKRVYTSQLQHLKDIAGTLATEEADDPAHVSKLRSALESVDHKRRKIMQQMRTDTALLTKEEGGSPIRNPLTAAEDARLASLISLDNILKQVKEVIRQSSTGPMRKSKRKALLELLDDLLTQMPSLLDIDHPCAQKQIMEARKVVESLQEDPDDPAPQSNALGEGEVSQWNVLQFNTGTTAPFIIKCGANSSGELVIKADLRVQEPKGGEVIRVVPRPTVLADLSFEEIKGVFEQLPEAVSLLALARTADGTRARYSRLYRTLASKVTALKETVAEMERGGVFKDVR

SEQ ID NO: 285817 - protein, 194 aa, Zea mays
  Clone ID: MRT4577_23766C.1.pep
LRYASVLVVQTALRAMAARNEFRFKKQATGAVTIQARYRCYRAHKYHKKLKCAAIVAQCRWRGRIARKELKKLKMEARETGALKEAKDKLEKKVEELTWRVQLEKRLRTDLEEAKAQEVSKLQNSMEALQAKLDETNTKLAKEREAAKTKKEAPPVVQETQVLVQDTEKIDSLTAEVQDLKTSLQSEKERAGDL

SEQ ID NO: 285818 - protein, 52 aa, Zea mays
  Clone ID: MRT4577_23767C.1.pep
YLSSGRDANSVSSQLPLSGSCPARARRPPAARLPLAPTMPPPMALLPLYYAS

SEQ ID NO: 285819 - protein, 975 aa, Zea mays
  Clone ID: MRT4577_23768C.1.pep
MWRRLPTRRLASALLSSSPLQRATATHAPPLERHFPTTASGLLPPSLLPPWQQEPRWFSSSAAAEAVSSEDAEELHHAIEEIVRPQPSPNLPQPQAVAEEYQAPGRDHRSRHRRSGRGRHAEVLAAEHGMTYHRYTSLRRRQIRIETEAWEQAANEYRELLADMCEQKLAPNLPYVKSLFLGWFEPLRDQIATEQELVADPGSRASHGPFFSMLPADMMAVITMHKLMGLLMTGSGDGSVRVIQAACQIGEAIEHEVRINRFLEKTRKKNNKEMENEEEAGDTNIAVEQQRLRKKVTDLMKKQKLRQVRNIVKNQDKSRPWGQDAHAKVGSRLIDLFIGTAHIQPPASQSSDGLPDIRPAFRHEMRTMVKEQQKSSRRYGVIKCDPLVRQGLDRTAKHMVIPYMPMLIPPICWTGYDKGAHLFLPSYVMRTHGARQQRDAVKRAPREQMQFVFEALNTLGSTKWRVNKRVLSIVDRIWSNGGRLADLVDRTDVPVPEKPDTEDETLLKNWKWHLRAAKKKNSERHSQRCDVELKLAVARKMKDEEGFYYPHNLDFRGRAYPMHPYLNHLGSDLCRGVLEFAEGRPLGKSGLRWLKIHLANLYAAGVDKLSYDGRIAFAENHLEEIFDSADRPLEGRRWRLGAEDPFQCLAVCMNLTEALRSSSPETTISHIPVHQDGSCNGLQHYAALGKDKLGAIAVNLVAGEKPADVYTGIANRVMEIMRMDAQKDPSVEPDAARARLIVDQVDRKLVKQTVMTSVYGVTYIGAREQIRRRLKERGVIPNDSELFGASCYAAKVTLTALGEMFQAARSIMNWLGDCAKVIACENEPVRWTTPLGLPVVQPYRKLGRHLIKTSLQVLTLQRETDKVMVKRQKTAFPPNFVHSLDGSHMMMTAVACKRQGLNFAGVHDSYWTHASDVDTMNKILREKFVELYDTPILENLLESFEKSFPKLKFPPLPERGDFDMKEVLESTYFFN

SEQ ID NO: 285820 - protein, 136 aa, Zea mays
  Clone ID: MRT4577_23769C.1.pep
HLTIDANPGHAEHQLFVAGQGSSCYCPVDTLASCYTLCGTSVQYSHQFYQRRVVDEGCSLDMGAFDATFGIFSSYIISMYDFFGSFSSSLRPLAEEDRILHCRNLVVGEVVIPADRESLEKNDVTTFRCSGDSPDR

SEQ ID NO: 285821 - protein, 63 aa, Zea mays
  Clone ID: MRT4577_2376C.1.pep
IYVSLAHNYVGQFIRGGNPDISSLEEVTATLCARGCSYIVHAPRNKLSLVHLIDHASAIVAYK

SEQ ID NO: 285822 - protein, 129 aa, Zea mays
  Clone ID: MRT4577_23770C.1.pep
MGKSWALISHLHTVAGPSITLLYPLYASVCAMESPSKADDEQWLSYWIIHSFVTLLEMLAEPLLHWVPVWYPAKVLFAAWLALPQFKGASFVYEKLVREQLRNYRARYPRKGAAAAVVDDDDHKVHIAK

SEQ ID NO: 285823 - protein, 81 aa, Zea mays
  unsure (1)..(81): unsure at all Xaa locations
  Clone ID: MRT4577_23771C.1.pep
GVGFVGGVFGRFWMVWMCALFGGMCMWAVTESGGMRRSWLLVLGASCFLSAKSVRVSAVCGVGWAKAREXFWASVCERRGV

SEQ ID NO: 285824 - protein, 179 aa, Zea mays
  Clone ID: MRT4577_23772C.1.pep
PTTVHGVRELRAYVLGHACRWWCCRYASVCAMESPSKADDEQWLSYWIIHSFVTLLEMLAEPLLHWVPVWYPAKVLFAAWLALPQFKGASFVYEKLVREQLRNYRARYPRKGAAAAAVGGDDDDHKVHIAKLCARMNSCIVPIPTQGLDSSQLHAMHYNKHLLLAQMDKWHKGNKNWAR

SEQ ID NO: 285825 - protein, 138 aa, Zea mays
  Clone ID: MRT4577_23773C.1.pep
MGKSWSLISHLHTVAGPSITLLYPLYASVCAMESPSKADDEQWLSYWIIHSFVTLLEMLAEPLLHWVPVWYPAKVLFAAWLALPQFKGASFVYEKLVREQLRNYRARYPRKGAAAAAVGGDDDDHKVHIAKVGKDRTR

SEQ ID NO: 285826 - protein, 322 aa, Zea mays
  Clone ID: MRT4577_23774C.1.pep
MSKKNVESLAERHIMPSFSNCLSSYRHLLPESQLENSYSGWPWDAMTNYAEELSPVSEHQNELFTFLAEVSWNAFLVIHQAGGQGVTLRELSQALHPLAMQLVLIIVDTLKRFQLAVKVNAYDGVQIVDSLHSSKYHIATLAECDSCCCTDPPTSQFVDNENTKNLLKEKHTKPINFPGPIKMLGDGHTVTVINVQSKLSPPYMHSKDPGDAERLSTPGENNKESSFYHNCERHCYQPILPWINGDGSTNSTLYEGLSRRVIGYVMHYPGLSEEDVIRRMDVLNPQTCRTLLEKLTLDGNLHVRVFEEPVPMAPTTLQDPDL

SEQ ID NO: 285827 - protein, 247 aa, Zea mays
  Clone ID: MRT4577_23775C.1.pep
MQLVLIIVDTLKRFQLAVKVNAYDGVQIVDSLHSSKYHIATLAECDSCCCTDPPTSQFVDNENTKNLLKEKHTKPINFPGPIKMLGDGHTVTVINVQSKLSPPYMHSKDPGDAERLSTPGENNKESSFYHNCERHCYQPILPWINGDGSTNSTLYEGLSRRVIGYVMHYPGLSEEDVIRRMDVLNPQTCRTLLEKLTLDGNLHVRVFEEPVPMAPTTLQGMFKQHSSKEPSKCVKRYFANPMSTLQL

SEQ ID NO: 285828 - protein, 117 aa, Zea mays
  Clone ID: MRT4577_23776C.1.pep
PDVSSRTVNRAIMAELVRLYRSSDLGMRLPAYDGRKNLYTAGTLPFDAREFVVRLTDEDDGTGVPPREREYRVAIKFAARADLHHLRQFIAGRQADAPQEALQVLDIVLRELANQRY

SEQ ID NO: 285829 - protein, 197 aa, Zea mays
  Clone ID: MRT4577_23777C.1.pep
MTMARSGAALPLLLVVVGACCARLAAAVHLSALGRTLIVEASPKAGQVLHAGEDTITVTWHLNASASSVGYKALEVTLCYAPASQEDRGWRKANDDLSKDKACQFRIARHAYAGGQGTLRYRVARDVPTASYHVRAYALDASGAPVGYGQTAPAYYFHVAGVSGVHASLRVAAAVLSAFSIAALAFFVVVEKRRKDE

SEQ ID NO: 285830 - protein, 45 aa, Zea mays
  Clone ID: MRT4577_23778C.1.pep
LHGTSHPTNNLVKLKCYYVTSILEQLQIYQPINSLDTDHKKNKPS

SEQ ID NO: 285831 - protein, 94 aa, Zea mays
  Clone ID: MRT4577_23779C.1.pep
FQKTQIPLQNNRLLTNIHDMAHLNPAFQVQPFLSHIKNPLETKPTGWMALVLLKRKNHCLNKNTINTAFSCSCSPKGGENRRFFHRNLVPCKPG

SEQ ID NO: 285832 - protein, 90 aa, Zea mays
  unsure (1)..(90): unsure at all Xaa locations
  Clone ID: MRT4577_2377C.1.pep
HHDYICHVRLLNNPDAVCAEIQHSRDRCRVPLTLRGGINHSGVRYGGPISFLRKEPLXTCSKLLRAYDLYNETSDNSQACKQTFSRSLFF

SEQ ID NO: 285833 - protein, 60 aa, Zea mays
  Clone ID: MRT4577_23780C.1.pep
AVTRPPARQSGEGPAYPPFEAPLLSHRSRPHPLVGSATSMLTIGMLCYSRKKRSCSKKPG

SEQ ID NO: 285834 - protein, 75 aa, Zea mays
  Clone ID: MRT4577_23781C.1.pep
PPFNVGGPPPWAPRAFLFLLPGAACGGEMGGGYLFPTGPPFTLLAPRLGGGRGPLVRPPRGGGFAPRGVPARGLL

SEQ ID NO: 285835 - protein, 37 aa, Zea mays
  Clone ID: MRT4577_23782C.1.pep
MFYSQFILAKKGPLGTIWIAAHLERKLRKNQVADTDI

SEQ ID NO: 285836 - protein, 189 aa, Zea mays
  unsure (1)..(189): unsure at all Xaa locations
  Clone ID: MRT4577_23783C.1.pep
LAAKCCRSSPEHGIVDSAMKKMMAHRIDGKKAVARVKELLKRAXQAKPHSVTVSGKKWKKVLSFHARDSAAATKGGRQQKQQEEAISCSSGKLSFKWDVGSCSSASSVAYSPLSLMSAPAKSSEQTLLTPLRKDYCMSRLSSISQQSMLKNMEGDEEEEEACCCRTAQWITTDSDCELCRLHCLFCLYI

SEQ ID NO: 285837 - protein, 190 aa, Zea mays
  Clone ID: MRT4577_23784C.1.pep
RGSDCVKAVYGFTSLGEKRSSSEPTGTVVIGCKVLPIFTEHGGVDSAMKKMMAHRIDGKKAVARVKELLKRAAQAKPHSVTVSGKKWKKVLSFHARDSAAATKGGRQQKQQEEAISCSSGKLSFKWDVGSCSSASSVAYSPLSLMSAPAKSSEQTLLTPRMRDYRMSALSCSGHCELCRLALVNFVWIYS

SEQ ID NO: 285838 - protein, 64 aa, Zea mays
  Clone ID: MRT4577_23785C.1.pep
LAAGTGTGTDQDLLFQQVRYCGGVTYSYPRSSLLSDPGLALRKACMNCGAAGNEQEHARRAEPA

SEQ ID NO: 285839 - protein, 48 aa, Zea mays
  Clone ID: MRT4577_23786C.1.pep
RNVKFCEALLPLHCAALIWGLQGQELSAFSLSLVLSTWSTEEKLHKCS

SEQ ID NO: 285840 - protein, 77 aa, Zea mays
  Clone ID: MRT4577_23787C.1.pep
TQQLDRMSVVQNLRCGVASQIMELEYGRCLAWRLARALGIQFKRVLWELSSVLCFCMYAILMHLSIYAFVNDKCSFG

SEQ ID NO: 285841 - protein, 115 aa, Zea mays
  unsure (1)..(115): unsure at all Xaa locations
  Clone ID: MRT4577_23788C.1.pep
TGNHFDFDFFITKIKFLGVEFDPNRGNVXXWGKKAIPSLTLLSQPLHFFGGFYTGSKKKIIELRDTLHFWGGRRQDMGRIHIRTGDRIPWGVLGLVGGNHRWEFMLDEGGIPWPF

SEQ ID NO: 285842 - protein, 318 aa, Zea mays
  Clone ID: MRT4577_23789C.1.pep
IGYLEAGRVCFRITVSSSHSGKEDLKAACSDLEMIRRLKKEAELLEASFLAKAEYLEADASSGSLSPAEEGPVKTSSRTNDTSAPQKTGSRVDNKRRPFWDFFGRSLKVDPALADQDLITVANVEKEGMESNDILRFEQLRRELIELEKRVQKSADEAQKEEEMVVAEKTTAPSPGSSVSSRQTTKKENVITKSVEKVKETTTTVLQGTQLLAIDTGAAMGLLKRALIGDELTQKEKQALQRTLTDLASVVPIGILMLLPLTAVGHAAILAFIQRYVPSMIPSTYAPGRLDLLRQIEKVKEMEVAEGSSEDILEELNK

SEQ ID NO: 285843 - protein, 392 aa, Zea mays
  Clone ID: MRT4577_2378C.1.pep
MALRASPVSHGTAAAPLPPFARRRMARGVVVAMASTINRVKTVKEPYTPPREVHRQITHSLPPQKREIFDSLQPWAKDNLLNLLKPVEKSWQPQDFLPEPSSDGFYDEVKELRERANEIPDEYFVCLVGDMVTEEALPTYQTMLNTLDGVRDETGASPTTWAVWTRAWTAEENRHGDLLNKYMYLTGRVDMKQIEKTIQYLIGSGMDPGTENNPYLGFLYTSFQERATFVSHGNTARHAKEYGDLKLAQICGTIAADEKRHETAYTKIVEKLFEMDPDYTVLAFADMMRKKITMPAHLMYDGKDDNLFEHFSAVAQRLGVYTAKDYADILEFLVQRWKVAELTGLSGEGRRAQDFVCTLAPRIRRLDDRAQARAKQAPVIPFSWVYDRKVQL

SEQ ID NO: 285844 - protein, 34 aa, Zea mays
  Clone ID: MRT4577_23790C.1.pep
DACVEHHTNFLTNMIIWDYALFNHKQMFLPMKTA

SEQ ID NO: 285845 - protein, 66 aa, Zea mays
  Clone ID: MRT4577_23791C.1.pep
MVLGVFGYGSLIWNPGFDFDDEMLEFIKGYKLTFNLAGIDHRCTPDHPSRTCTLDTDDEAICWRIA

SEQ ID NO: 285846 - protein, 118 aa, Zea mays
  unsure (1)..(118): unsure at all Xaa locations
  Clone ID: MRT4577_23792C.1.pep
VGCCGACNENYCLMITFAIFLSLIMLVELAAAIAGYVFTDKVMSAFNNNFRQQMENYPTNNHTASILDRMQAHFKCCGAANYTDWXEKIPSMSKNRVPDSCCMNVPLGCGINFNPEAI

SEQ ID NO: 285847 - protein, 162 aa, Zea mays
  Clone ID: MRT4577_23793C.1.pep
LRFRLPPSTTTTHLALPTHRARWNGPRRRHDPDLPLRRLLALLLRPRHRGNSSPSPKFMGLLGSHFLFAWLTRPDMLVMDDVSLSCVCVCVGWGRQSTGSFFPDRSTTLGTLMGVSAFGGRRAPAAGEGSAEGPQRAALGHGEEARGAGVRRRRRRRRRRSA

SEQ ID NO: 285848 - protein, 77 aa, Zea mays
  Clone ID: MRT4577_23794C.1.pep
TTASSCIYLYTLVPPTIISPIIFSYLWCIYWHKTSGHNNYNRLVLSKTYACPTSSANNQVVFPFQTNVACKLNLLLP

SEQ ID NO: 285849 - protein, 92 aa, Zea mays
  Clone ID: MRT4577_23795C.1.pep
ATPEVLRKTQSKSFLLQSTPHKHGIRTMTLPIADHNTQEPILSNFLLHLHIYLNHAYSNTRQADEATGTHKATRGKHAEHNGLLDIRSLTRR

SEQ ID NO: 285850 - protein, 149 aa, Zea mays
  unsure (1)..(149): unsure at all Xaa locations
  Clone ID: MRT4577_23796C.1.pep
RPRTRGLRCPSCRQPFLAKEVQKPPAGNVVQDSNISGANQNTTTNRNLQWRPFSRAAGASSATASSAAAAQAANVVHQTYEKARREREEAQAPSRMEEAIRPMSXARERHASMSGNVNLGPGDATSGKKTRTMTKDAEGGSSSTIFSPG

SEQ ID NO: 285851 - protein, 94 aa, Zea mays
  Clone ID: MRT4577_23797C.1.pep
ATPEVLRKTQSKSFLLQSTPHKHGIRTMTLPIADHNTQEPILSNFLLHLHIYLNHAYSNTRQADEATGTHKATRRKHAEHNGLLDIRSCRRRRH

SEQ ID NO: 285852 - protein, 179 aa, Zea mays
  Clone ID: MRT4577_23798C.1.pep
HHLQASYQQPAAASPATCYGPRPRNALTEAEKEAKRLRRVLANRESARQTILRRQAIRDELARKVADLSSQNENMKKEKDVVMQEYLSLKEANKQLKEQVARTTAKKAPAGSLAAAASPPATPPRPGLSAAPPPVPVWGSWPPAAAVAGFELLGRPPPPPLCLLPCAWSFPVVAAAPRG

SEQ ID NO: 285853 - protein, 61 aa, Zea mays
  Clone ID: MRT4577_23799C.1.pep
AFSPPLLILLPSLFKSPVLVVQPGYFFVPFTASTVVSYGYACSCLGPMSMYSCISVLFICM

SEQ ID NO: 285854 - protein, 58 aa, Zea mays
  Clone ID: MRT4577_2379C.1.pep
AVPKSPFCFFSTLTHSTHIHTTTNNACECIFLLAGFTCDVLVLLQVQFVSSCMKDCGG

SEQ ID NO: 285855 - protein, 210 aa, Zea mays
  Clone ID: MRT4577_237C.1.pep
MPRDISDHVPCLVSFKSRIPKPKLFRFENFWLELDGFMNLFQTTWNALPSIPDKAKNLTAKFKYVRKVLKDWQRSLPKIDKTVKNIKLLIELIDNMEEHRDLSIEEWNFREILRQKVTELLNIQKIYWKQRAAIRWVTDGDICSRFFHAHATIRHRKNSIACWNYQRYAEKEKHGAGFLFLRELSMAKRGDSIICSSDAISRKPAGIQLA

SEQ ID NO: 285856 - protein, 105 aa, Zea mays
  unsure (1)..(105): unsure at all Xaa locations
  Clone ID: MRT4577_23800C.1.pep
MAATLDGAAGCRKRKRAAPGLADLHDDMLERVLARLPPASYFRLRGVSRRWRAAAESRSFRAGCARVTDRDPWXLMLEDCDHQDQDERWPRPAAVFDSAERAWAR

SEQ ID NO: 285857 - protein, 53 aa, Zea mays
  Clone ID: MRT4577_23801C.1.pep
NDARTPIIQLLLWHTMLLIRPYVVNIGDRSADKLYKYHALVLYKSQCIWAELA

SEQ ID NO: 285858 - protein, 187 aa, Zea mays
  unsure (1)..(187): unsure at all Xaa locations
  Clone ID: MRT4577_23802C.1.pep
NTVAAASKLFESNYDNYINLPAEGTRGRIIVTWKXRCVKPSPVEWINTQPXIQFAEQDGRNXWFTXVYVPQLETELQIKSFFLQELCDIRALHSGPWLLVGDYNLIYQAXDKSNXNLNRVXLMGRFRCFLWCSAGAKDLQVILVEAMSERYVRHLKVLSRLVLFPVIKFLLCIVQGLDPFYTSFLIK

SEQ ID NO: 285859 - protein, 110 aa, Zea mays
  unsure (1)..(110): unsure at all Xaa locations
  Clone ID: MRT4577_23803C.1.pep
LCQTEKKESRHELLRRVAAGGGVFRTIRGXKCQIPEANRNDIANQADDLVESMESRDTIPDRKLLARLVIVREEARNMMGGGLLDERNDRGLTNLPEAEVNFLSKLVALK

SEQ ID NO: 285860 - protein, 94 aa, Zea mays
  unsure (1)..(94): unsure at all Xaa locations
  Clone ID: MRT4577_23804C.1.pep
VLVTEVPAEVPAGQVAEAPKAKKAPXEKKAPRGGXVXRVKKPEXHPPYAEMIVEAIAXLKERKGSSXRGIRGXXQGKHGGKVPTGGGGKNNSHF

SEQ ID NO: 285861 - protein, 90 aa, Zea mays
  unsure (1)..(90): unsure at all Xaa locations
  Clone ID: MRT4577_23805C.1.pep
PAGDPTVTVTERGGKDKHEDGGDKEQGGGGFIDKVKDFIHDIGEEIEGXSXFGKATADVCGIHIPAXSLHRAHLVGDVLXIKNPDPVPIP

SEQ ID NO: 285862 - protein, 62 aa, Zea mays
  unsure (1)..(62): unsure at all Xaa locations
  Clone ID: MRT4577_23806C.1.pep
TNHPKIYQTISSRQKFKKTVIGTAQPTQVNHPEKGGQALKGKNFNLPEGLAEGCGRPGDFXP

SEQ ID NO: 285863 - protein, 114 aa, Zea mays
  Clone ID: MRT4577_23807C.1.pep
MQFRMAQKRRAYSPGASQSQPSSGRRKKRNAVVRLGGQGRRKGRFFGALRLRLRLRWPWLASVYRRALRRLRTSYEQALRELVDGSMLVGALHAPIGVDCAHAASFGPMATVGF

SEQ ID NO: 285864 - protein, 86 aa, Zea mays
  Clone ID: MRT4577_23808C.1.pep
GSNMHYYCHEDPLTAACNPRLSMMHTCWLSVYRHLDYNLSHDMNAFHKLVIDDQQLLRTSSSTPRWLSWPLTYEHLLFTIRDLRSL

SEQ ID NO: 285865 - protein, 221 aa, Zea mays
  unsure (1)..(221): unsure at all Xaa locations
  Clone ID: MRT4577_23809C.1.pep
ATGKFYKIRDIFGIIKGQEEPDRYVILGNHRDAWTYGAVDPNSGTAALLDIARRLGIMLQSGWKPRRSIILCSWDGEEFGMIGSTEWVEDNLEDLHSKAVAYLNVDCAVQGVGFFAGSTPQLDKLLVDITRQVRDPDVTGKMVHDTWNEMSGGIKIERLARTDSDFAPFLHHAGIPSVDLYYGEEFPGYHTALDTYNWMEKHGDPFFLRHLAITEXLGLLA

SEQ ID NO: 285866 - protein, 295 aa, Zea mays
  Clone ID: MRT4577_2380C.1.pep
MEEEQSPRLGRDPATEPSPAPEWPDSDSKNDDSANDPEDPAGGSGSGSGNGISSLEQPLLKRSTTLTASHLAIVGAKVSHIESLDYEIIENDLFKHDWRSRSNVEVLQYIFLKWAMAFLVGLLTGVIASLINLAIENISGLKMLQMVNLVRGKRYWAGFLYFAGVNFALTFVAAVLCVVFAPTAAGPGIPEIKAYLNGVDTPNMFGAPQLIVKIIGSIGAVSSGMDLGKEGPLVHIGACLANLLSQGGEGRWRLRWRWLRYFNNDRDRRDLITCGASSGVCAAFRAPVGGVLFAL

SEQ ID NO: 285867 - protein, 119 aa, Zea mays
  Clone ID: MRT4577_23810C.1.pep
RDPPARHPLTHPHLISSLRFSPRNGSHSLHYRKDGCYVHDFRPPGRIARSCDCYARHHIHRCCALDGRKEGRGLHYASYQCEEQRRGELCQGVRQEGRRQGLRKINKRTVSTARGKIWQ

SEQ ID NO: 285868 - protein, 45 aa, Zea mays
  Clone ID: MRT4577_23811C.1.pep
SFFFFQKKKKKKKKKKKKKKKKKKKKKPKKKKKKKKKSTLRCYPC

SEQ ID NO: 285869 - protein, 102 aa, Zea mays
  unsure (1)..(102): unsure at all Xaa locations
  Clone ID: MRT4577_23812C.1.pep
RVGGGPLGEGLDKVYPGGAFDPVGXLADDPXTXTDRAARVRGRLQXTGQLCXCLFHSIGVXRSMAHTLTRRRSPIXNLLDHVADPVXANNGWAYATNSVPDN

SEQ ID NO: 285870 - protein, 101 aa, Zea mays
  Clone ID: MRT4577_23813C.1.pep
CRDSQKAVHISKLHQCFPTLSSSSLLVDHLMRGMDNKCKMDAAPLTRLGVQERLHELGGLSRLFLLVDRPSGVSIASFDGTKCWGKTSIRPYTSSIQICKC

SEQ ID NO: 285871 - protein, 233 aa, Zea mays
  Clone ID: MRT4577_23814C.1.pep
METPDGLSTSKNSLDSPPSSCKRSWTPRRVKGAASILHLLSIPRIRWSTSNEDDDKIELSRAEVETLRTEIAGAEERESHLKARLENIDEVLRYARLSGYLYIRSRWTQLPGEPPILDDADVDDWLPRFVVLQGQCLYYYLKCTDLSPQESTLLCDVVEVGQLPDFVPEDEKTRYAFYLLTRQGLRFECSSTSEIQVDSWVRALSSDCKLQDGAGDDKMMNTRSSQVEAGSSW

SEQ ID NO: 285872 - protein, 145 aa, Zea mays
  Clone ID: MRT4577_23815C.1.pep
HHHSSWCLLLLPCMSQVRLHRSWLHGSSISATVTLHNRTIAFSSAVAIFSPSKITRTSKKTTLPISRLSFLTTSVSFLPLVRLHLSGDHTDAASASSGDPTPTPVPPARPRLCSVVTVSLVTLAAGPPPPPTTLPPPLSAAAPSM

SEQ ID NO: 285873 - protein, 208 aa, Zea mays
  Clone ID: MRT4577_23816C.1.pep
MDDVYGRIEVFPQHFVPSKEAMETPDGLSTSKNSLDSPPSSCKRSWTPRRVKGAASILHLLSIPRIRWSTSNEDDDKIELSRAEVETLRTEIAGAEERESHLKARLENIDEVLRYARLSGYLYIRSRWTQLPGEPPILDDADVDDWLPRFVVLQGQCLYYYLKCTDLSPQESTLLCDVVEVGQLPDFVPEDEKTRYAFYLLTRQGLRV

SEQ ID NO: 285874 - protein, 47 aa, Zea mays
  Clone ID: MRT4577_23817C.1.pep
ILTDVAGRWIDIPDVAHVINLRCLVQLTHTHIGLEEQVVLERKGAET

SEQ ID NO: 285875 - protein, 649 aa, Zea mays
  Clone ID: MRT4577_23818C.1.pep
MDSAAARPDEEEARRRRSTDCIYFLASPLTCKKGSECEYRHSDAARMNPRDCWYWFHGNCANPKCSFRHPPLDNMAGAPTTPRPAQQSVPHQASASVPAQPQGSVPATAKQGVPCYYFQKGMCTKGDRGAFLHAPRSAGNPAPQPPAKVFTTPALQPNLHPPLNNSWTKPNLSAPAVAVVDKPKASTHHDGKPLHHKENLTSRTENPSRVVYQNHSSSYAQPGAPKRYQPQPSARDGLTDNGMEAGEFAREPSAGSCVTAGFNGAGGMTRQTHGGYEPERSYRNSAERSSSEKRIPQREHIPSVAAGSSDLRHRLLKQRKSNNNSRSAEALGRHDTHLEDERNDQHRPRGEQQDGLSRSRLHDRIRLPGETAFDSLGSRSEEWDRGSRARLSPPKSSDLRGRLHERLKGRLGEEIPGSSAKGLAVKASSSEDTESLNFAGPKSLAELKAKKGVGRSGEDAVVKGLGSSRMTSEIVWSREAASFEGPKPLSAILKRKREPASEIPAAQPGITQEADNYAAGAEEEIQTLANDTVGENMEGIGEEEEEEEAFHPEDDVAYDDNANEAAVAQELDEYEDADAAAQDYDDEAAAAQEVEEHQDGEAAAEDYDYEEADVNAEEENEYQDYQDEDDDDLEDGDDDFARKVSVMIS

SEQ ID NO: 285876 - protein, 51 aa, Zea mays
  Clone ID: MRT4577_23819C.1.pep
HLLSPNLNFSFLFIPSSHTRVGVLFNTGFHRLLSKLTIPSSLSTSTYSHSY

SEQ ID NO: 285877 - protein, 184 aa, Zea mays
  Clone ID: MRT4577_2381C.1.pep
MSMLTSILGRKHQQPPQQQQQQKGGGARTGTGAGAGTEAAAVEPVSIDIAEQGPLVDAITLAAFAAPALGLPPFATASMDWKETPTAHVFMADLPGLRRDEVKVEVEEERLLRISGQRQRAAEEKGDRWHRVERSSDRFVRTVRLPPNANTDGAQAALQDGVLTVTVPKDNDRKAYGRLITITN

SEQ ID NO: 285878 - protein, 156 aa, Zea mays
  Clone ID: MRT4577_23820C.1.pep
MVPARARHIDRSASDQQQGPAPAGAATLLVRHLPEAITQEMLSRLFSHYGATSVRPCSGGKLRNCAFVDFRDEAAANHAHSLLNRLRFLGKVLTVERANCPNANESHLKHQDQLGHGASQVPSISSQTQKDHTSIAEPICPKLSVDYPFSPHLEYS

SEQ ID NO: 285879 - protein, 108 aa, Zea mays
  Clone ID: MRT4577_23821C.1.pep
NMSLPLKNVQQFSLIFSTIHARSGRCQRSTMHFTEHLWREVIHDGSSRTPRSSVNTRHEHRVLEVLPDIQDHRLVINDREGAQCDVFVSGERHHHMKQFIDGNAHVCT

SEQ ID NO: 285880 - protein, 79 aa, Zea mays
  Clone ID: MRT4577_23822C.1.pep
PTRSKGSETLALSDRIGSQALLLVPPMALLADAVVAAQESPLTLWFCPSPQVRNCDPPVSAPTASMKAGLRRKNASTHQ

SEQ ID NO: 285881 - protein, 50 aa, Zea mays
  Clone ID: MRT4577_23823C.1.pep
QMLQSTNLRANALPKKRWLIHLKSKIPISQVLKIQEDVLLKPISNNTLIH

SEQ ID NO: 285882 - protein, 111 aa, Zea mays
  Clone ID: MRT4577_23825C.1.pep
MGEVYLDRSVKPEPADVGIAQGNQVTNLMSAGWTDERHTDYISSMEASFINRLYNQGHNANKKDPGTNGFKVLQGGAAVWKKVEFERPNACAQVGAQQSLPANPWIQISDR

SEQ ID NO: 285883 - protein, 53 aa, Zea mays
  Clone ID: MRT4577_23826C.1.pep
SSREESDTTLCFVTHRKSRGVGIKGKPATGKLHPDGRVCTLQTEHNLDEDQLG

SEQ ID NO: 285884 - protein, 142 aa, Zea mays
  unsure (1)..(142): unsure at all Xaa locations
  Clone ID: MRT4577_23827C.1.pep
RSSPAAPSARGRRNDKNVIFKVDDLFVRCFKRYPDLAYPGGKPMSVHATLWDGSYWATQQGKVKVDWSAAPFAVSYRGYXADGVPDGDAAXCPAGTDRWMSRQLDAAEWGTVAWARQNYMHYNYCDDGWRFPQGFPAECSRN

SEQ ID NO: 285885 - protein, 99 aa, Zea mays
  Clone ID: MRT4577_23828C.1.pep
SGLVAVREVHDGGQRARGRQRAGAAGDVSYRGYSADACVPDGDGRPLSCPAGTDRWMSRQLDAAEWGTVAWARQNYMHYNYCDDGWRFPQGFPAECSRN

SEQ ID NO: 285886 - protein, 133 aa, Zea mays
  unsure (1)..(133): unsure at all Xaa locations
  Clone ID: MRT4577_23829C.1.pep
MANPRVFFDMTVGGAAGGRIGMELYANEVPKTAENFGALGTXEKGVDKSGKPLHYKGSTFDRDIPQFMCQGXGDFTRGDGTGGESIYGEKFPDEKSXRKHTGXGMLFMANAXPNTNXSXFVICTXGEPPRWDG

SEQ ID NO: 285887 - protein, 44 aa, Zea mays
  unsure (1)..(44): unsure at all Xaa locations
  Clone ID: MRT4577_2382C.1.pep
XKFYFIXXKEXQGTLGNKQSKLRVKTTXQLNLNMINSNTSNKTA

SEQ ID NO: 285888 - protein, 69 aa, Zea mays
  Clone ID: MRT4577_23830C.1.pep
KRKYDHYSQNMNSFKTNSIWMWEKSHPLLAIIICMHPQFSQILIITCRLISNTKLPQNVSEIHFLILHQ

SEQ ID NO: 285889 - protein, 145 aa, Zea mays
  Clone ID: MRT4577_23831C.1.pep
WVPRGRPGTLSTRRPSRLFAPRKGASLEKHLQHRPEPQDLKNRHILLDTTTAPALQAKALELERQRATDNLKRGLNSRPERAELVDRNILPNSTAAPALQGHQKELEMHMRADSLEKGLQNRPSPEELVKKGILDEDENPAKNIA

SEQ ID NO: 285890 - protein, 286 aa, Zea mays
  unsure (1)..(286): unsure at all Xaa locations
  Clone ID: MRT4577_23832C.1.pep
MSMDRMARRSVSLLLALALLAAAASADSWLYEKFTTEGNVRADYNAQGQQVTSLILTQQSGGAFSSRQKYLYGEFSIQMRLIPGNSAGTVTSFYLSSGDGPGHDEIDMEFMGNASGQPVVLNTNVWANGDGXREHQFYLWFDPAADFHTYTIIWNDKNVIFKVDDLFVRCFKRYPDLAYPGGKPMSVHATLWDGSYWATQQGKVKVDWSAAPFAVSYRGYSADACVPDGDGRPLSCPAGTDRWMSRQLDAAEWGTVAWARQNYMHYNYCDDGWRFPQGFPAECSRN

SEQ ID NO: 285891 - protein, 154 aa, Zea mays
  Clone ID: MRT4577_23833C.1.pep
MRLGTQKGEGKKSRGAEHARTRMGGDGDKIWFHRSIAGTVQAAGSGDGDEAEEEKAFLVPSAAAFPHGMSAAAAGPSLAVAKKEEFSKSPSNSPASSGGTDGGSSAVPWPEQIHAQNSSPTLLEPSRQAIPLEWVFFAIMVLLLTCFSIIVLRK

SEQ ID NO: 285892 - protein, 616 aa, Zea mays
  unsure (1)..(616): unsure at all Xaa locations
  Clone ID: MRT4577_23834C.1.pep
MLAGCSFSSSRHQMSTAQRFDILPYGFSKRASNRGDGSGAAPRVAAPDARSGGGGGTCSFRAHPAPPVTQAVSWGAKPEPGGNGAAWERSRAVKRAHEEDAGEEYGGPVVRAKRTRMGGDGDKVWFHRSIAGTVQAAGSGDGHEAEEEKAFLVPSAAAFPHGMSAAAAGPSLAVAKKEEFSKSPSNSPASSGGTDGGSSAVPWPEQLHAQNGAAARVEAMELVVALTACADSVAACNHDAANYYLVGLGEMVSPAGITPXHRXSAYSSEALTLLRMXQRSLRLSXRRSVITLKYQXTSYNVPILRIIKDLHPIPPILHFNLNERGGRAFDGHDRVHVIDFDIKQGLQWPGLLQSLATRVAPPAHVRITGVGESRQELQEXTGARLGRVVAALGLAFEFHAVVDRLEDVRLWMLHVKRGECVAVNCVLGAHRPLRDETGAXWPNFVGVTRSTGAAILLLGEHEDALNSGRWEARFARALRYYAAAFDAVEAAGLADASPARAKAEEMFAREIRNAVAFEAADRFERHETFTGWRQRMQEGGFQNAGIGDREALQGRMIARMFAPGNYSVQVQGDGEGLTLRWMDQAMYTVSAWTPVSDGGSTVSASVSTTASHSQHS

SEQ ID NO: 285893 - protein, 129 aa, Zea mays
  unsure (1)..(129): unsure at all Xaa locations
  Clone ID: MRT4577_23835C.1.pep
SGLRRTLELYRYDPWELPSMAAIGEKEGXFYVPRDRKYRNGDRPNRVTASGYWKATGADRTIKADNSXPIGLKKTLVFYSGKAPKGXRSSWIMNEYRLPPDDTDRYHKTEISFCRVYKRTGIDNGGHGH

SEQ ID NO: 285894 - protein, 193 aa, Zea mays
  Clone ID: MRT4577_23836C.1.pep
MASPAPVPASPGSSSQKKRGATESIGLYAVQCCECHKWRTVSTKDEFETIRENFTEDPWFCSKRPECSCEDPPDIEYDSSRIWVIDKPNIPKPPPKTERLVIMRGDLSKMDIYYVLPNGKRARGIGDVQKFLDTNPEYKDRISAESFSFTVPKIVEETVSQSSLWKTKKAKKQDKINASSSKKDKANASSSEN

SEQ ID NO: 285895 - protein, 343 aa, Zea mays
  unsure (1)..(343): unsure at all Xaa locations
  Clone ID: MRT4577_23837C.1.pep
MAAAAPSYSATTTEFGATRSLSPATVPESPRFGSMEAQITASATDPKSPPRPSFARCSPSPAVLLLEAPPTCASVSTPTPPPVSSISTAYGHANSFGVGLEIDWDSIQLDPRWEEEDYKKLLTXEVVYDTLGLTNEVMGGTNCDGWQNDYGDAGAAIECKDIDDDIVMFDMKNPVMRLGXYIYSSMKEFRLAMIQYAINKEFELGIEATSTRRYRGYCKGDDCPWSIHARKEVEESPIIIVTAMTDIHTCTSSGRXRTKTPTSGWVAAQAIPLLKKKPGMGAKELQNALHDTYNVQIAYLTLWRGREKALYELFGSXEDSFQLXFSWKEAVLEKSLRKLTREE

SEQ ID NO: 285896 - protein, 84 aa, Zea mays
  unsure (1)..(84): unsure at all Xaa locations
  Clone ID: MRT4577_23838C.1.pep
YIQGDNPRGSSYMVGYGASFPRQVHHRGASIESVRTDPSFVSCQEGDYAXDPEQAGNPNVLEGAIVGGPDEYDDFGDERNNFEQ

SEQ ID NO: 285897 - protein, 63 aa, Zea mays
  Clone ID: MRT4577_23839C.1.pep
RVGVGVLKGAIGDLEKKDFLEGGIYCAQEKGVLKKWCGQDVGEKGECEWIHDHLNPRPKGSLI

SEQ ID NO: 285898 - protein, 86 aa, Zea mays
  Clone ID: MRT4577_2383C.1.pep
NKIPFFFIRSDRSRRPHGGPPRDKTHGWGGAWGYTNTTHLRDRLKVTERRELFWPTATKAQIKRKNPGMGPAQIKPFLHAGPWMLV

SEQ ID NO: 285899 - protein, 128 aa, Zea mays
  unsure (1)..(128): unsure at all Xaa locations
  Clone ID: MRT4577_23840C.1.pep
PAKEAASFTSQVIIMNHXGQIGNGYAPVLDCHTSHIAVKFAELITKXIDMRSGKELEMEPKFLEVGFPGMVKMIPHRPMVVXAFSQSRLLGRFAARDMRHTAAVGVIYCVEYKVPAGTKVSNFSINFD

SEQ ID NO: 285900 - protein, 145 aa, Zea mays
  Clone ID: MRT4577_23841C.1.pep
MSFKWHEEEACVLCVDLCSCFLFCFFFQKLTAGVYSYRPRKQRHNSTQKWFYVLIFVPVSCSVFFKNLQLVCILIGQGSSDITQKWFPRDDRFTQEPRTPHFDKVIQDPGTPHEQPSSSQPLPRVLIKKITPRKRKSVPLSMDEM

SEQ ID NO: 285901 - protein, 130 aa, Zea mays
  Clone ID: MRT4577_23842C.1.pep
MQYAAAEQAWYMPATTTMMAESAVARVERLASESAVVVFSVSSCCMCHAVKRLFCGMGVHPTVHELDLDPRGRELEHALARLIGYGPAGAPVVPVVFIGGKLVGAMDRVMAAHINGSLVPLLKEAGALWL

SEQ ID NO: 285902 - protein, 113 aa, Zea mays
  Clone ID: MRT4577_23843C.1.pep
MAKYRQQQSQKQDMEAKPSSNDEEVRAMDGNVTMHQKDDNGSSSTGNDKAENKHDSSEVFDGKTDFYVGKSPAQNETPTSTGAGTDNRTINVSSLGEGSPNSERSTDQFCDDN

SEQ ID NO: 285903 - protein, 109 aa, Zea mays
  Clone ID: MRT4577_23844C.1.pep
KKKKKKKKKKKKKKKKKKKKKKKKKKKGRGGSNFSGSYFSRPGACQLFWLLFSLPLIFLGLGLFFWVALELTLPVAVLNLLCRGGPPPLSPVLFYLAGPPPFFPLLTFA

SEQ ID NO: 285904 - protein, 60 aa, Zea mays
  Clone ID: MRT4577_23845C.1.pep
ELACLSAAQSNAPDSLGVHASRSRKHRSMTGHWLLHGCPSLVSSTSCSLATVRSIERNYA

SEQ ID NO: 285905 - protein, 127 aa, Zea mays
  Clone ID: MRT4577_23846C.1.pep
MAPFRVIILSVHTSISIVAAAPAALVVAVHVQCIRHIFDSQDIPDKNNFDVLVHHVVVYELLRFSTLSLAHALPVLALHHVCRVLTIHFEVPGQIVVKREVVRADMILDATVDHVRLFGAGAPCRPD

SEQ ID NO: 285906 - protein, 202 aa, Zea mays
  Clone ID: MRT4577_23847C.1.pep
MENGEDTFASPTAAAADFSTNGGDGTPKLHDAADEIESLRAAKRDLEEKLDAVRHENQFLSSESRRLEVLVSQAREEVAAAEQGAATNESEAATLRSEVERLQDLLAAEKASHEEEMRRGARLGDQLQTAYQEKAALEEEIETLKGSATAEGKGVEEGCDSIAARAGTPKDQGVVPPALVAAAAAGAAATAGIAVVLFNLKR

SEQ ID NO: 285907 - protein, 111 aa, Zea mays
  unsure (1)..(111): unsure at all Xaa locations
  Clone ID: MRT4577_23848C.1.pep
MGRRPGPSRHPHTLHAYLRRAALCSADSWTRSLEMYLSDSSKAVVGQTTTTGSLAGSLARHGLPACIVDAGLLNLDLLLGLKNRVHLTAGTVLVGDXHSARALGCHDALQD

SEQ ID NO: 285908 - protein, 1079 aa, Zea mays
  Clone ID: MRT4577_23849C.1.pep
MEGDADGVKSGRRGGGQVCQICGDGVGTTAEGDVFTACDVCGFPVCRPCYEYERKDGTQACPQCKNKYKRHKGSPAIRGEEGDDTDADDASDFNYPASGNDDQKQKIADRMRSWRMNAGGSGDVGRPKYDSGEIGLTKYDSGEIPRGYIPSVTNSQISGEIPGASPDHHMMSPTGNIGRRAPFPYMNHSSNPSREFSGSVGNVAWKERVDGWKMKQDKGTIPMTNGTSIAPSEGRGVGDIDASTDYNMEDALLNDETRQPLSRKVPLPSSRINPYRMVIVLRLIVLSIFLHYRITNPVRNAYPLWLLSVICEIWFALSWILDQFPKWFPINRETYLDRLALRYDREGEPSQLAAVDIFVSTVDPMKEPPLVTANTVLSILAVDYPVDKVSCYVSDDGAAMLTFDALAETSEFARKWVPFVKKYNIEPRAPEWYFSQKIDYLKDKVHPSFVKDRRAMKREYEEFKIRVNGLVAKAQKVPEEGWIMQDGTPWPGNNTRDHPGMIQVFLGHSGGLDTEGNELPRLVYVSREKRPGFQHHKKAGAMNALVRVSAVLTNGQYMLNLDCDHYINNSKALREAMCFLMDPNLGRSVCYVQFPQRFDGIDRNDRYANRNTVFFDINLRGLDGIQGPVYVGTGCVFNRTALYGYEPPIKQKKGGFLSSLCGGRKKGSKSKKGSDKKKSQKHVDSSVPVFNLEDIEEGVEGAGFDDEKSLLMSQMSLEKRFGQSAAFVASTLMEYGGVPQSATPESLLKEAIHVISCGYEDKIEWGTEIGWIYGSVTEDILTGFKMHARGWRSIYCMPKRPAFKGSAPINLSDRLNQVLRWALGSVEILFSRHCPLWYGYGGRLKFLERFAYINTTIYPLTSLPLLIYCILPAICLLTGKFIIPEISNFASIWFISLFISIFATGILEMRWSGVGIDEWWRNEQFWVIGGISAHLFAVFQGLLKVLAGIDTNFTVTSKASDEDGDFAELYMFKWTTLLIPPTTILIINLVGVVAGISYAINSGYQSWGPLFGKLFFAFWVIVHLYPFLKGLMGRQNRTPTIVVVWAILLASIFSLLWVRIDPFTTRVTGPDTRTCGINC

SEQ ID NO: 285909 - protein, 188 aa, Zea mays
  Clone ID: MRT4577_2384C.1.pep
MSMLTSILGRKHQQPPPPPQQQQQQQKGGGARTGTGAGAGTEAAAVEPVSIDIAEQGPLVDAITLAAFAAPALGLPPFATASMDWKETPTAHVFMADLPGLRRDEVKVEVEEERLLRISGQRQRAAEEKGDRWHRVERSSDRFVRTVRLPPNANTDGAQAALQDGVLTVTVPKDNDRKAYGRLITITN

SEQ ID NO: 285910 - protein, 77 aa, Zea mays
  Clone ID: MRT4577_23850C.1.pep
WLDPWGGGWQKKAEDPGAARALVGGGIISYQPAIWFNSNTIGGGGPPWRGPPTKGEFFTPLKRGGLFREPLTPPGPI

SEQ ID NO: 285911 - protein, 57 aa, Zea mays
  Clone ID: MRT4577_23851C.1.pep
SRVRYTIDIGQNDVSAYMRRGYEQVLAKIPGFGAQIKCTIDTLYSHGARKFWIHSTG

SEQ ID NO: 285912 - protein, 170 aa, Zea mays
  unsure (1)..(170): unsure at all Xaa locations
  Clone ID: MRT4577_23852C.1.pep
KRVGPPLPRKKFFWFFNGPKGNLSGKQALLRGKNPEKFPGGEKKKTRGQNLWFLKLISQLNNKKTGAPLFPRFFFPGKIFLGKKNPPYQKKKGSPSFIGPFRLKWGGKEPFKGTPKILGEKGQAGINRGEKAYTEGGGGPXXVLTQGGGKLIQGGRFWGHLGAPKGGQPP

SEQ ID NO: 285913 - protein, 127 aa, Zea mays
  Clone ID: MRT4577_23853C.1.pep
MATELAYAPPMKSGRLGFEGTQEVQHRIRITLSSKSVKNLEKVCSDLVKGAKEKQLKVKGPVRMPTKVLNITTRKSPCGEGTNTWDRFEMRVHKRVIDLVSSPDVVKQITSITIEPGVEVEVTISDQ

SEQ ID NO: 285914 - protein, 134 aa, Zea mays
  unsure (1)..(134): unsure at all Xaa locations
  Clone ID: MRT4577_23854C.1.pep
PPLGAHPTSSSSSQRPDQPSPXATSRRSIPLIREEGPWITCGLDTPFATSFSAALLTTSLAATPPLLWFGSAGHVSLELALSVAESCPGSEFEPGSCMSGEPTCSEEASESEVCNPEGRGPCLGGNIPWVGGGC

SEQ ID NO: 285915 - protein, 593 aa, Zea mays
  unsure (1)..(593): unsure at all Xaa locations
  Clone ID: MRT4577_23855C.1.pep
MGTSSGANFHQQPPPTQGMLPPRHGPRPSGLQTSLSLASSEQVGSPDMQEPGSNSEPGHDSATESASSKDTWPAEPNQSNGGVAASDVVSKAAEKEVANGVSKPQVIHGPSSRVSGMLLREVARERVDLVAEKMKMMSDEHLEEVKNELRSILEGTGGSHHIEEFLYLQKLVQDRHDLTPSMLSVAHHVQLEILVAIKTGIQXFLHPRXSVTLCXLVDFFEQRCNEIVACQSALPAEECRCNVCASRNGFCNLCMCVICNKFDFEVNTCRWIGCDFCSHWTHTDCAIHNGQIGMGQSVKSSIGHAEMLFRCRACQRTSELLGWVKDVFQQCAPGWDRDALLRELEFVCKIFRLSEDAKGRVLFRKCLDLIERLRNTPADSINPRMILQALQELEMDSPKISENEDVGHLITPQEACNRIAEVVQEAVRKMELVAEEKMRLYKKARLAVEACDRELEEKVREAQELKAERQRKKQQVEELESIVRLKQAEAEMFQLKANEARQEAERLQSIALTKSKTAEQDYASMYLKRRLEEAEAEKQFLFEKIKLQENQRPTVGVGSSSGAGGDSTPTMMLSKIQDLLKNVRSMPAKSEGH

SEQ ID NO: 285916 - protein, 52 aa, Zea mays
  unsure (1)..(52): unsure at all Xaa locations
  Clone ID: MRT4577_23856C.1.pep
MGPPLSPTKPCTCTGGVPLPRAKPARTFCLKMPRRGSSTXSKEDVKSNLEFK

SEQ ID NO: 285917 - protein, 53 aa, Zea mays
  Clone ID: MRT4577_23857C.1.pep
MEHGLRYLLKKKKKKKKKKKKKKKKKKKKKKKKKKKKKKKKKKKKKKKKWGGL

SEQ ID NO: 285918 - protein, 171 aa, Zea mays
  Clone ID: MRT4577_23858C.1.pep
YANQQQGMKQTISMRIRRMHKVLHIVDDARLEAFAAGQDTTLPPVHAIPERRVQVQNVHFYVLHGWTVVVPLSVVECGLPTVSPSPPVPVGDAGSSTSAPMDVDLVVPPPPRPTTTTVACRSPSPPTLVVVGTSCARRGQLLAPLMPRATASSSLATAQTRKPHLPPQMVK

SEQ ID NO: 285919 - protein, 142 aa, Zea mays
  unsure (1)..(142): unsure at all Xaa locations
  Clone ID: MRT4577_23859C.1.pep
STIYQRLSEREQSHCTQLARSSSSGGDGGLHDLLAALAVAPQGLPPLGRRASFFAVVCFXXKIKTDKPYGIGGGLSFTLIPFLESAFMLLMISFISIYLNLTPIQLTNYFSLFSYTILFLSYGHHFFFVFNLTFSFLYFYSS

SEQ ID NO: 285920 - protein, 52 aa, Zea mays
  Clone ID: MRT4577_2385C.1.pep
GFSFFDVFCMLFIRALTTYKIVVILGDHNWLKCHLNLHIDLHFLTLAPYRSA

SEQ ID NO: 285921 - protein, 203 aa, Zea mays
  Clone ID: MRT4577_23860C.1.pep
TAEPAGVGLADVLRDHGDAKVAGGKVVLGSQLRVQVPSGRAVELLSSPIEFGAKNRDAQLAALSPARRLLPEVVSSPSARVFAAGGVAVVPPGEMAMSEDYTCVISRGPNPRTTHIFDDCIVESCGDLLADKPAAGGAAAAACGFFSSCHACNKQLGHGNDILIYRGHKAFCSSECRYQETLLDEAVDGQFALGDGGKGGGRC

SEQ ID NO: 285922 - protein, 72 aa, Zea mays
  Clone ID: MRT4577_23861C.1.pep
MTKNEYLEKGKAQVLQNQEEMIHYLENEKRLVEREAPQSQKMMQEQQKAMIESLKSMIKMSGMQPKDSRDKK

SEQ ID NO: 285923 - protein, 127 aa, Zea mays
  unsure (1)..(127): unsure at all Xaa locations
  Clone ID: MRT4577_23862C.1.pep
PTRPPTRPPSPPISTRSPCASLSDPHRGXXLTNFRKIMELKGLRKAEQTQLLDLFSAFKASPNHAGLVDNSPFLTPISLQAPPSSTGGLGGNVSSVMGNMGTPGLAAGRFDAAGLGNMLVNASRDWV

SEQ ID NO: 285924 - protein, 64 aa, Zea mays
  unsure (1)..(64): unsure at all Xaa locations
  Clone ID: MRT4577_23863C.1.pep
XSSGRXXXXLVPXLSTSPSPSRARLPXERAGXLXSFXXGRXKXKGXXEKXXHELKXXYHLAXSK

SEQ ID NO: 285925 - protein, 170 aa, Zea mays
  unsure (1)..(170): unsure at all Xaa locations
  Clone ID: MRT4577_23864C.1.pep
MEGLIPFIYKAIKERRARSYYYSRCNSTGSSRGRLGARVEDSAWDLQQKQWESAAGGGKAGGGXAEREMAQAHRRHRSLDELAGEXAPRXVAPPPPGRAAQGPQRQDLLLHRRRVMCGCTGRVACIVPQGLDGGGFVWTRRARARRACAQGVVCSCFFFFCFDPRWAAKE

SEQ ID NO: 285926 - protein, 133 aa, Zea mays
  Clone ID: MRT4577_23865C.1.pep
MASTTPGGVLLVGAASGAPARSCLTCDLEALLSVKQALGNPSTVATWTPTLADWWLWDHLRCYHPRRLNNVFIDRADHVRRPIPGAVGGLTELMFLTLFRLAGLTGPIPGWLGALCKLQLLTVSHTNVFGAIP

SEQ ID NO: 285927 - protein, 79 aa, Zea mays
  Clone ID: MRT4577_23866C.1.pep
QWLTANDGSAMCRHARWTRKAYGGSPQAISPRSSSQCSQTISVASTVVRKEGNAKVLGDHSSCIVSLPVSRLSNSPFGV

SEQ ID NO: 285928 - protein, 86 aa, Zea mays
  unsure (1)..(86): unsure at all Xaa locations
  Clone ID: MRT4577_23867C.1.pep
VLHVFRIFAIFYATISIXSLAHFVEVDEATLRSILMTCGRSMHADVTDGKIRSSAYFYCYIDEDDIHVVDTKPTKQNGDYSMRQIL

SEQ ID NO: 285929 - protein, 44 aa, Zea mays
  unsure (1)..(44): unsure at all Xaa locations
  Clone ID: MRT4577_23868C.1.pep
YTLNRXKTGVEQSIRPTNXXXXEPTDKIKYHPSKRTNSIPTKKK

SEQ ID NO: 285930 - protein, 50 aa, Zea mays
  Clone ID: MRT4577_23869C.1.pep
TSKAFFYSCLSKTGRQPEQLIVNNEETFQNNNWCPTPTPTPKKRLKNETI

SEQ ID NO: 285931 - protein, 230 aa, Zea mays
  unsure (1)..(230): unsure at all Xaa locations
  Clone ID: MRT4577_23870C.1.pep
MACVSTFQSCPIARRAKINTRSRGCSSSVAKGSSPPAFQFQCRASTFAADTSLRLELDENPEAIISGAWPGNCSLLSYDDLRAYLESQETAAQADGQQRGVALLSETMSTPVLVATADQTLEDVECHFEAVSGLPVVDSGLRCVGVIVKNDRARASHGANKNDVRPFXYRSVSTCDXKTKISEVMTSPAITLSSDKTVMDAAVLMLKKKIHRLPVGNQDEKVIGIVTRAD

SEQ ID NO: 285932 - protein, 71 aa, Zea mays
  Clone ID: MRT4577_23871C.1.pep
MDMSKVVFRKKKKKKKNKKKKKKKKKKKKKKKKKKKKKKKKKKKKKKKKKKKKKSQGTPSQVPYCLRDQML

SEQ ID NO: 285933 - protein, 148 aa, Zea mays
  unsure (1)..(148): unsure at all Xaa locations
  Clone ID: MRT4577_23872C.1.pep
KWDPPHGKDMAFSLMYRGDXVPKNVNLFLAPIKTKGPIQFVDWGPPGFKCGIKYHPPRVVPGGDLAKVQRPVCIISHPPSVVEVFFPLGPKFALIFPKGAFLPWXFGKGMKKGEFSQALEDLAALQKEYKKVGFXFFKGEGGPKGDKY

SEQ ID NO: 285934 - protein, 96 aa, Zea mays
  unsure (1)..(96): unsure at all Xaa locations
  Clone ID: MRT4577_23873C.1.pep
PFNQLAPLNPPAFLQQQILLPFNKLAAASGASFLTQQQXLAFVSQCWANPAPLWFVPICAPFVRLGFCYPTASYPRXLIGGALFKLICCGARFSLF

SEQ ID NO: 285935 - protein, 98 aa, Zea mays
  Clone ID: MRT4577_23874C.1.pep
LSPLDSLSPIGAKAVSAPPGDPGASPHRTALCLLLLVIPHRAVSAPSSSAATLSAGARACLPTRGPTISSMRTRCSPCTGTGRRSSWLSRRIGLPMRP

SEQ ID NO: 285936 - protein, 174 aa, Zea mays
  Clone ID: MRT4577_23875C.1.pep
MDLGLSVAGRTGSGGGRGGWRGSGGGASAAAWTRLVSSGVEDELVAASGGGGGGGGGRAGARAGGLPLGHFLEACFLCRKPLPSNRDIFMYRLLLRVNQLNSWDPKLVRLFMAMPGDIPFCTEDCRREQIEMDEEMERKESKPKNVAPRGAPSPKDVDSPPRPPKARAGSILAG

SEQ ID NO: 285937 - protein, 137 aa, Zea mays
  Clone ID: MRT4577_23876C.1.pep
KRWYNSKHEKFLSTLRILLDSPATDLGHGLMGSPIRLDNQEDLLPVPVQGEHRVRMDEIVGPRVGRHALAPALSVAAEEDGADTARCGITRRSRHSAVRRGLAPGSPGGADTAFAPRGESESRGESRGGGCDGREEP

SEQ ID NO: 285938 - protein, 46 aa, Zea mays
  unsure (1)..(46): unsure at all Xaa locations
  Clone ID: MRT4577_23877C.1.pep
GRVGFYKKYICILLLAGWLKYLCAGXLHKGVSPXTSYKLQIRNIVC

SEQ ID NO: 285939 - protein, 49 aa, Zea mays
  Clone ID: MRT4577_23878C.1.pep
MSTYPRTYDLIHADSVFTLYRNREKILLVVKTYWTTHEAMTKISSRTVK

SEQ ID NO: 285940 - protein, 35 aa, Zea mays
  Clone ID: MRT4577_23879C.1.pep
SMFPCDCIRKKLIHRPTTTPCTAKSYFYKRKSLTK

SEQ ID NO: 285941 - protein, 289 aa, Zea mays
  unsure (1)..(289): unsure at all Xaa locations
  Clone ID: MRT4577_2387C.1.pep
MALADATAFPYGLRVLVVDDDPTWLKILEKMLRKCSYEVTTCGLASVALQILRERRNKFDIVISDVNMPDMDGFKLLELIGLEMDLPVIMMSIDGETSRVMKGVHHGACDYLLKPVRMKELRNIWQHVYRKKMHEVKEIEGNDSCDDLPIFRNGLDGLDERGLFMRADTDTMRKRKDVDKDHADQDSSDGATAKKARVVWSVDLHQKFVNAVNQIGFDSECSLKFDKFATPFICFFFKKKLHXQFKICNYGSLAEVGPKKILDLMNVPGLTRENVASHLQVWQKKNPPP

SEQ ID NO: 285942 - protein, 50 aa, Zea mays
  Clone ID: MRT4577_23880C.1.pep
PTRPATSASKPWPPILHVVPAEPLRPAGRARGISLPGMIYLVARGVERDA

SEQ ID NO: 285943 - protein, 54 aa, Zea mays
  Clone ID: MRT4577_23881C.1.pep
VPRGRPGLSSVTRPVLELHASVLPLFADLHLRLERNPLGEMSDHITVQGPHAPV

SEQ ID NO: 285944 - protein, 40 aa, Zea mays
  Clone ID: MRT4577_23882C.1.pep
HQTSAMRPIAVAAMESTFYHESCLTASRGVSLARASDVLR

SEQ ID NO: 285945 - protein, 109 aa, Zea mays
  Clone ID: MRT4577_23883C.1.pep
QGAQREHAAELQVLVADHALQAPGEDGRQYAEERSALRHCRLSALGRDEHGSSHLLGVSQNQDGQDREHGDRHRRQPRVRNRCCMMMMIFHGPISWAWLRVRTAAARVG

SEQ ID NO: 285946 - protein, 58 aa, Zea mays
  Clone ID: MRT4577_23884C.1.pep
WNPLSEMGSISLYATTPPAGGADETDRYCIGSILPGMTGRQTGGGFTASETFLAKTMV

SEQ ID NO: 285947 - protein, 44 aa, Zea mays
  unsure (1)..(44): unsure at all Xaa locations
  Clone ID: MRT4577_23885C.1.pep
PAAVLTWSANEADAVVSVVDSDDPLYRTGAHARPIXSHVPRPRF

SEQ ID NO: 285948 - protein, 113 aa, Zea mays
  Clone ID: MRT4577_23886C.1.pep
PKLWIPPVVSPVLVSRVQISWPGRLFSPGRGQRIFCLLPGPKGVFFLGPSLVRVKALFPFFLVPPKKKVFLGNGFSRASWVFSQGGRFWFFKLGGFFKIPFFSGLFRGFYQPR

SEQ ID NO: 285949 - protein, 213 aa, Zea mays
  unsure (1)..(213): unsure at all Xaa locations
  Clone ID: MRT4577_23887C.1.pep
STTPFATATITATATASHLKTLTLNPLRGSAHGETPAPGPSTHPSRGPAPRPHPPANRPNPRPSAPXXAPAXAAAASXASXPXPSXGXGGXAXXXVSXXXRAARXRXXRAVXXLLXRRRAFAXAXPXXXSAVRARLRRLGXPFXLFGXRXLXRRXRLXALXVRLXAXGXVXRLLRAXXGPAARLGGGGLFAFPFFPGSAGLLARLALARSLPR

SEQ ID NO: 285950 - protein, 41 aa, Zea mays
  unsure (1)..(41): unsure at all Xaa locations
  Clone ID: MRT4577_23888C.1.pep
WARRRLTSPSWSLVMWILXGCSATGHLIYRLGGVDQRVTAR

SEQ ID NO: 285951 - protein, 94 aa, Zea mays
  unsure (1)..(94): unsure at all Xaa locations
  Clone ID: MRT4577_23889C.1.pep
RLKKNGLTHDEVXEPYFDLLIKEALRRXLPKEVIESRIQPLRAAMDLAMRNKYLPXTSRHTYGPFRGYLSDMLXLGKQENAEPRTTXALPLYQR

SEQ ID NO: 285952 - protein, 315 aa, Zea mays
  Clone ID: MRT4577_2388C.1.pep
MIMLAVRGLNSKMLEKRLHGCLLLLVFLLADVSASHRARFLQRAGSRAETAVDLGPDSEDGSKRRSLATTMFCVAKQGADATALQAGLNWACGQGRANCAPIQPGGPCYKQNDLEALASYAYNDYYQKNFATGGSCGFNGTATTTTSDPNHTDISPDNILKPDVESLTADEQQQYEDYMRQPSSEGEILITIHGGSSPESCQTWRERLPICFIFASSPQHQQQNQMKQQIGGLEELIRKLMRTLEKSVDETSNRISMFNTSATNGDSQPQPLYGIADELMSRANTTTAVVPLRNIATPGPCQTVGAVMRTTSAFS

SEQ ID NO: 285953 - protein, 85 aa, Zea mays
  unsure (1)..(85): unsure at all Xaa locations
  Clone ID: MRT4577_23890C.1.pep
IHVFLHHAISQKILIANNFFCNDQLFPSVTRSLIANLSAANCYKSEHLKRPENWALVEXAKYIYIAXGFFFTVSXDSIQLVAEHA

SEQ ID NO: 285954 - protein, 40 aa, Zea mays
  Clone ID: MRT4577_23891C.1.pep
TSANVPLFVFPWCDLISENRTSMHHPHVFPWCISHVYLFN

SEQ ID NO: 285955 - protein, 82 aa, Zea mays
  unsure (1)..(82): unsure at all Xaa locations
  Clone ID: MRT4577_23892C.1.pep
LLNHIGAHKKEIXSQILWHTLXXEPXIYINCLPFVLRYFXKPFSNLXYTLINPYRVLQMXFLLNEDILXEASIYGNNILVTY

SEQ ID NO: 285956 - protein, 97 aa, Zea mays
  Clone ID: MRT4577_23893C.1.pep
APFFFFFFFFFFFFFFFEPKSCKATEYSSPPALPYSLKRDRKKKLRKKQCLYNSHSRQTAQTNHQYHKYALYNLLEQQYIATHAPTSSLSFFSGGAE

SEQ ID NO: 285957 - protein, 797 aa, Zea mays
  unsure (1)..(797): unsure at all Xaa locations
  Clone ID: MRT4577_23894C.1.pep
MTQTAEVRIPKIDPWRPSHSVFGKSTIGQSHLENMRGRYFRDISIVRADVGEKTVPTPEDNEVVIFRSFFKAGLRFPLSSFGARSGSSCPVPTFRKRWPGEWMKEWFYVKNDLKVREDIKDIIMCPIWQRFGLQKPKVEMDEVAEECQRAFGVVCSFIGTRDLIQEHIVFRVWPLADNWEMPKETVRETDEGGLVRLKYTFKYGDKFVEPDDDWLKSIETVSDELLGVYSKAEDTALSAAFGGRKKKRLNRVFDAIGFVYPDYRYPARGQKRKNITSTKETASAAPSEPAPKRKRIKVLTHRPRYIEPATVPEFAGETSSATEAKDSTLLPEIKELAEVPAIEKMEEPRSEEAKTSEVSDVLETIKSSSITPKKTLETSGVSTEAFVAEASKQQPEAEAEAGPSEPTKEQPLETEEKATKAALEAEKMSEPTLVEEIDTAAPEASSSIRDYIVRHASGKKLSEEEIYEANHYARELKYPKGALXFNGPDEDAFLYCLPDNKELSVCREMARSMGFPKLEAGLCAMTKDDLADSLAYNSLKGLILSNALRAQKNAEDESYEIAFNNLRSEVIKLRNEALEKDKILLTLVDKIKEDESTSKAQAEAQKCEIKDLQKQLARAKEERILEETKRELSDQWANHLEINVKELRASQRRCYDKSIVCVQKIKSSFANVGAFSSEENFSRGNLEATLSSEDIKDPSAEASMIGGKFFTDIWDNGGREMAQEIIQKSEKGIHDARKVAEAAEKSTEPEGQIEPAEVSPGPHSKGDDEIREMAEAIMDKVVDQLLNEAAEIVLMED

SEQ ID NO: 285958 - protein, 191 aa, Zea mays
  unsure (1)..(191): unsure at all Xaa locations
  Clone ID: MRT4577_23895C.1.pep
VICSRTMCMAFQSXQIIYCYIRTSPLYFYSTTFPNRIKYNYDMLDXLPLIIHTLIIYPMNLKHLILXLYSKNNAKRPTSSLYSLISRYAKMRMISYSDAENSMPPNDTIEAPTSHMKRTECVKQNLESSIVYKIXIFTLTIXLDFLMTMNKXTFKTSISVMAAPSEIKEKATKLTXTEVVXISLAILFMVF

SEQ ID NO: 285959 - protein, 131 aa, Zea mays
  unsure (1)..(131): unsure at all Xaa locations
  Clone ID: MRT4577_23896C.1.pep
PTKGADDTAGKAEAEHAARAAGAQRRGAREAAAGGRQSAHATGNGGGDAXGTKGGARGHGNRDSTGDGTSTAAQSTARDNDGGASGXGXERRGDNDGRRGPPGTNTGTGTKXSAPKNGXPSDDGRRGKRPR

SEQ ID NO: 285960 - protein, 53 aa, Zea mays
  Clone ID: MRT4577_23897C.1.pep
GVGFERPPVHVPIKLWCLSIGYITPGRIIFICMFMPFISYHYCNHRLLKHTYQ

SEQ ID NO: 285961 - protein, 105 aa, Zea mays
  Clone ID: MRT4577_23898C.1.pep
GGSRFFNPKRNFFFGMVKKSIWVFLRTPGGCPPIFGYRTLGYKGPFSPWEGQKKVFPPPPNFWGPQGNPKGPKKIPPPQGLAIWGQSILKGASPPTILTGPAPPR

SEQ ID NO: 285962 - protein, 124 aa, Zea mays
  Clone ID: MRT4577_23899C.1.pep
KKKFFFFPGGKIPPNPRGEPLPFPYRARNQHLWGGGGRFFWRKTKTPPFPWVFLRGPNIKTPGIFLAPLGKGLNVNFLWPQKTKKNPSQEPRFQKKGLKHVFVGGENRVLISFLAQEANSWGNL

SEQ ID NO: 285963 - protein, 135 aa, Zea mays
  Clone ID: MRT4577_2389C.1.pep
MEDHHMDRRISKEAGEETKLTRSFRYEDYSTRRVFLRSYPLQWDWSPSRDDDDDDKQDGQDAADGDECCGSRRWKSKMVAAVTEWGEDKLLLLRRAKKRLALYLIGCHHHGRRALPFPSASPAGSCTVAMMLASR

SEQ ID NO: 285964 - protein, 72 aa, Zea mays
  Clone ID: MRT4577_238C.1.pep
NLGSYCGLAFNIRDHLAKELPNFSFSLFFGCEYAPYFMVEEKELCQTIAKYSEHILLYEAPINLKEIHGSYP

SEQ ID NO: 285965 - protein, 69 aa, Zea mays
  Clone ID: MRT4577_23900C.1.pep
FGWVPKAQRNQEKLDLGAPPGLNEQKLSWGSNLYSGMQKYFWVQPFHNSYPVSLFRSLREETGPPGRNL

SEQ ID NO: 285966 - protein, 82 aa, Zea mays
  Clone ID: MRT4577_23901C.1.pep
RHHSGLLKKNRTRVHKLFCSNKIRVVVATMAFRMSLDKSDVEWVVHCISPESVEEYIQCISHAVSPPLPFLFFFQDTLQGSF

SEQ ID NO: 285967 - protein, 157 aa, Zea mays
  Clone ID: MRT4577_23902C.1.pep
AVCDAVVARLPYLQRVVKETLRVHPPGPLLSWARLAVRDAVVGGHVVPAGTTAMVNMWAIAHDPAVWPEPSAFRPERFEEEDVSVLGGDLRLAPFGAGRRVCPGKTLALATVHLWLAQLLHRFRWAPADGRGFDLAERLGMSLEMEKPLVCKPTPRW

SEQ ID NO: 285968 - protein, 122 aa, Zea mays
  Clone ID: MRT4577_23903C.1.pep
PETILGLDSGVWPSGCWCSSAAIASCGCCPSVWPALRVAGSWQPECWTPVAGSLGSAPWPAPTLVARYLCWWLDGAWTWMQPHRTLDAYYVLHRSRRGARGCRTAVVGSSHVGCGRHFRTRG

SEQ ID NO: 285969 - protein, 87 aa, Zea mays
  unsure (1)..(87): unsure at all Xaa locations
  Clone ID: MRT4577_23904C.1.pep
PEWTSRSILCRISTRMPPESTDLCSLFSQGVHELWIREAGGNRGPLRTKHQYRIHXXCTHXKNXQGRSVLYVAILMDLSKNTWQDIN

SEQ ID NO: 285970 - protein, 81 aa, Zea mays
  Clone ID: MRT4577_23905C.1.pep
SRSSTQHRLSSLSPQTKSSRSRGSPARHEATGLDPVSPPACLEDPYTSLRASGKSYCPVYVLGSSLPCQSCRGWLCSPPDS

SEQ ID NO: 285971 - protein, 365 aa, Zea mays
  Clone ID: MRT4577_23906C.1.pep
MGILEKISDIEAEISRTQKNKATEHHLGLLKAKLAKFRAQLLEPSKTPGQKGDGFEVSKSGDGRIALIGFPSVGKSTILTELTDTESAQAAYEFTTLTCIPGVIQYNGAKIQLLDMPGIIEGAAQGKGRGKQVVAAARTADLILMMLDATKGETQKRLLENELHSVGLRLNKQPPNISLKVKSGGGLSFNSTIPLTHMDEKLVRGILHEYKIHNAQVLFREDATVDDFIDVIEARNRSYLPCLYVYNKIDQITIEEVDSLARLPHSVVISCNLHLNLDYLLEKIWEYLSLVRVYTKRRGEQPMFEGALIMRKGALVLDICRAIHRDWEHQFKYALVWGRSAKHSPQRVGLNHELLDEDVIQLVKK

SEQ ID NO: 285972 - protein, 109 aa, Zea mays
  unsure (1)..(109): unsure at all Xaa locations
  Clone ID: MRT4577_23907C.1.pep
MKMPINXIALSSHHEVYHPLALKASFVEFISTLIFFFAGQGSDMAFSKLTGGGPTTPSDLIAAAVAHAFALFVALSVFTNISFGHVNPSVTFCAFLGGNITLFRVLLYW

SEQ ID NO: 285973 - protein, 183 aa, Zea mays
  unsure (1)..(183): unsure at all Xaa locations
  Clone ID: MRT4577_23908C.1.pep
GPESQPPLHAPGPPXNGPERQGAPKESGPPKGPPKPPQXPPGGPPGGPRGGPAXPGGQRGGKKNPERDPPGXPRTNLGPRGEPPKKPPPGPXQGPIKGPPGQGAPQKKAGGDPRRGPRSAPTEGLRGGKRKDPGGPPAGQKRNKKRTPRANQKKKKKKSLFKLFFFFFFFFFFFFFFFFFFFF

SEQ ID NO: 285974 - protein, 41 aa, Zea mays
  Clone ID: MRT4577_23909C.1.pep
SAISNSSSPQAAPAAASYSSEIRPSSGIQSTFKNTAHYRQR

SEQ ID NO: 285975 - protein, 260 aa, Zea mays
  Clone ID: MRT4577_2390C.1.pep
MALVSASSSSTTAVTALPRNGQRASSSFLGGKTLLRQAEAARPSFAVRAAADPNRPIWFPGSTPPPWLDGSLPGDFGFDPWGLGSDPESLRWNVQAELVHCRWAMLGAAGIFIPEFLTKIGVLNTPFWYTAGEQQYFTDTTTLFIIELILIGWAEGRRWADIIKPGSVNTDPIFPSNKLTGTDVGYPGGLWFDPLGWGSGSPEKIKELRTKEIKNGRLAMLAVMGAWFQAEYTGTGPIDNLFAHLADPGHATIFQAFTPK

SEQ ID NO: 285976 - protein, 87 aa, Zea mays
  unsure (1)..(87): unsure at all Xaa locations
  Clone ID: MRT4577_23910C.1.pep
MGDFFWLTGVGFLFLTFNSGMGIYWSNGDAGFVAFVVGFYFDLVGLFAWLRYYEQVXSRTSKRAXVKGGVWXXIXXFTIMFSYKEGE

SEQ ID NO: 285977 - protein, 54 aa, Zea mays
  Clone ID: MRT4577_23911C.1.pep
MKYLLMTGGLVSGLSNGITAISICVTLKACSLRVTTIKIDPYLNTDAQTMYPFE

SEQ ID NO: 285978 - protein, 88 aa, Zea mays
  Clone ID: MRT4577_23912C.1.pep
GRPGKIHLIGFFSNGKVCSFFPSKIFKRVMGSLNQITFASNSGKICFVSLCFQGGIIKPFQIQEKATFLGFHLFFGEKKGPPPMFFDC

SEQ ID NO: 285979 - protein, 50 aa, Zea mays
  Clone ID: MRT4577_23913C.1.pep
NPNTTRARQTYTTAQAMDSPAAQMMENSYTRLDNTRAVISCRDMAAASSL

SEQ ID NO: 285980 - protein, 87 aa, Zea mays
  Clone ID: MRT4577_23914C.1.pep
EWQCWADCNEQGIGGARELGNRMRTRGCSDARFGAEDPGALESGTRRKYAGSFSPEMDYIADGVVAAVDGGCEDPLFYRRSVSCFIA

SEQ ID NO: 285981 - protein, 120 aa, Zea mays
  Clone ID: MRT4577_23915C.1.pep
MDIFSYHLDDRYAQNRECLLHLYALSTAVRITSGRANYRPLKLELHDHYTYSADDIMSEAHIDLQPMITCSISFGDTSRLDYMHIGRCFMTKYNSLIKDSTVNVATNKVKHDVHLKLHNV

SEQ ID NO: 285982 - protein, 64 aa, Zea mays
  Clone ID: MRT4577_23916C.1.pep
RRYWLLRRFCARIPRFGTSIFELGACCNSCSVILLGDVDIMIYVSVWHFFMGNIGSKMRGRKRV

SEQ ID NO: 285983 - protein, 160 aa, Zea mays
  unsure (1)..(160): unsure at all Xaa locations
  Clone ID: MRT4577_23917C.1.pep
SXGLIEYLRNDTVSEEAAGALALLMKQPSIVHLVGSSETVITSLVGLMRRGTPKGKENAVSALYEICRRGGSTLAQRVARIPGLNTVMQNITLTGTKRAKKKASLIVKMCQRSQMPSALALGSTLAVVDHSLVGNSRLRRAPSFGSGELSNPVSISVPVP

SEQ ID NO: 285984 - protein, 72 aa, Zea mays
  Clone ID: MRT4577_23918C.1.pep
IILAFDISYSCIHNLCIPLIARLLIALYPYEALFTYRSIHFLSSQYSCPFISYKYPTPTNIMRKPGHVQIKA

SEQ ID NO: 285985 - protein, 368 aa, Zea mays
  unsure (1)..(368): unsure at all Xaa locations
  Clone ID: MRT4577_23919C.1.pep
PRQFRHGYLLHHRAPLAVPATAARSPPSPSASTLVFLLLPHSRLRSXVRASAASASAPAQREIAAGVPWGCEIESLESAASLERWLIDSGLPEQRLAIQRVDIGERGLVALKNIRKGEKLLFVPPSLVITADSEWGRPEVGDVMKRNSVPDWPLIATYLISEASLEGSSRWISYIAALPRQPYSLLYWTRAELDAYLVASPIRKRAIQRITDVIGTYNDLRDRIFSRHPDLFPEEVYNIETFLWSFGILFSRLVRLPSMDGRVALVPWADMLNHSPEVETFLDFDKSSRGIVFTTDRSYQPGXFISYGKKSSGELLLSYGFVPKEGTNPNDSVELLVSLDKSDNCYKEKLQALKRNGLSESESFPLRV

SEQ ID NO: 285986 - protein, 107 aa, Zea mays
  Clone ID: MRT4577_2391C.1.pep
KIAAYSRVEVNPPSPFPTRLFGTITKLFGCNCVIHSDSRNYICSNEQLISYEVGERVEFSVIRQDNAFRADRIISCQRSNNDLNKLDKCNVLKYNPCSYDRVIQRGF

SEQ ID NO: 285987 - protein, 127 aa, Zea mays
  Clone ID: MRT4577_23920C.1.pep
YHSVQYVTSEIVEEKRKLGTYIMSSQNPFMIQYYRHLGKVIRLGTDNTPSEDDTHKTPSEDPISKTKLNECPVDANRMFPRPSRPGDKVLRPSGPPGLFRPLIASTPEDKVLRPSGPPGHSCGLLDL

SEQ ID NO: 285988 - protein, 100 aa, Zea mays
  Clone ID: MRT4577_23921C.1.pep
FTQLPAASSPDGKRDYPGIEMKVHRSVTVRVVTKHKQVNLLIQRALRRPLQLLVVAGPLVVAARAAGTCGYVRVRAVVSAARARCCAGAALLRLLRAAAK

SEQ ID NO: 285989 - protein, 108 aa, Zea mays
  Clone ID: MRT4577_23922C.1.pep
SSGRRFDGGADPPAVDERLLAVALARVQELERVIHESECHVGGEVEFRAAANAPCRPAWSALGASTREAALGGERVALHLVGADQAERIHCLHLLEGTTVGGSPLVYQ

SEQ ID NO: 285990 - protein, 75 aa, Zea mays
  Clone ID: MRT4577_23923C.1.pep
GRKQKAFLGKKKKPPLAPKIFTRKISKKRGSQNTYNPLGNLKGPYFLTPQNLGLKKSPPPLLKSPLSFPGNSLFL

SEQ ID NO: 285991 - protein, 79 aa, Zea mays
  Clone ID: MRT4577_23924C.1.pep
HHSRSGILLGVQLHIDRHRLRQTVLFLWLSGSGSRTWNGLSVQGDQSTNVSIYVVQAVVVKVKPIHIDGLSASEGSIAF

SEQ ID NO: 285992 - protein, 100 aa, Zea mays
  unsure (1)..(100): unsure at all Xaa locations
  Clone ID: MRT4577_23925C.1.pep
TFLVKRTSINRSALFTKILALLTLLALLVSATNAFIIPQSLLAPSAIIPQLLPPVTSMGFEHSAVQAYRLQXLALAVSVLQQPIAQLQQQSLAHLNLQTI

SEQ ID NO: 285993 - protein, 68 aa, Zea mays
  unsure (1)..(68): unsure at all Xaa locations
  Clone ID: MRT4577_23926C.1.pep
NLVRWHHSMGGAGCXFGWXVFVQSLFGFNGXQLLGGLYGAIICLPHFCGVCXGCYCCLFACRLLMFSH

SEQ ID NO: 285994 - protein, 119 aa, Zea mays
  unsure (1)..(119): unsure at all Xaa locations
  Clone ID: MRT4577_23927C.1.pep
NPLYAGFEPKVEVVSCRQFSSQKSGSATSAPWKAGFASVPKVSCLQESPWFATLILHPLVHTTAKWPPTEGSTWTWPRNGTEPGSAXVSVASGKRWVLGTATIHCTVLNHCMPVMISAK

SEQ ID NO: 285995 - protein, 174 aa, Zea mays
  unsure (1)..(174): unsure at all Xaa locations
  Clone ID: MRT4577_23928C.1.pep
MTIHLSAVARNKNTXRTAPNPYHVYLKLLAQLYRCLPTRTTTNLHAGILNRLFMTKTNRPPDLHAAALIKFMEGDENNIAVIVGTLTDDKRIQEVPAMNATALTFTETARNSIDNADAESLTYDQLDLRAPLAXNTALVRGPNNVREAQENFIKAPEKPHRHNEPYALSERSNS

SEQ ID NO: 285996 - protein, 201 aa, Zea mays
  Clone ID: MRT4577_23929C.1.pep
MSSSRVLLVSAVLVALVTLSSCRSLGELSEQKTYSSAPSYGGSPTPTYGSGEGHEPTPTPSHHGTTPTPSYGTTPSTPAHGVPEIPKHGFVGSCDYWKSHPDMIIAVVGSLGNIGKTFGAACSLLVGKKLENLHEALSNTRTDGVGALLREGSAAFLNSIVNKKFPFTTQQVKDCIAVSVTSDDAASAQAGIFKKANEYHY

SEQ ID NO: 285997 - protein, 54 aa, Zea mays
  Clone ID: MRT4577_2392C.1.pep
PPALLVFCAFGSLFDRFDQMVQISAHSFLFPTAPPFMVRQNLNPFIFGPKAKLS

SEQ ID NO: 285998 - protein, 87 aa, Zea mays
  Clone ID: MRT4577_23930C.1.pep
SMGRGSWEAVWRWVDPNLRPPLCCCAWRSTYGIRSATSGGADPCRAPFQPTFAQCLKGGVSFSPHPIHGRGPAPDFLKCVPRRGIRA

SEQ ID NO: 285999 - protein, 194 aa, Zea mays
  Clone ID: MRT4577_23931C.1.pep
PRGRPGSVPFSLWIFFTVPIFFSLIPPRPLAIGLIPLRLVLLFSGALVSSMPHAWEQSVPFLYTWSSSHPLLPSFSCDRPPFSCDAGHRLSSPSIHHCSARVSFPCALAVGAACRAPLLPPRPSSSSIQATAPSSLYVAPTPSSVSSSLVRGSLCSLDSAPCASVCALQRPAHRFHAILAASSIVGEESWGLMV

SEQ ID NO: 286000 - protein, 136 aa, Zea mays
  Clone ID: MRT4577_23932C.1.pep
DSRSQAPYKSSSFSPATTRDEGGGRTREVDRNFSLGALRDKRDLPYGGSREQSIREEDEQEGGGDHGAARGGGEGPGSVGGGCGEPDLAALSAEVDAFLAGQDEGTPVSVTEATLDKFASAVELLVARSEGAEEKW

SEQ ID NO: 286001 - protein, 218 aa, Zea mays
  unsure (1)..(218): unsure at all Xaa locations
  Clone ID: MRT4577_23933C.1.pep
MVSPDAIRTVIGVIGNGTALVLFLSPVPTFISIWKKKTVEQYSAVPYLATLLNCMMWVLYGLPLVHPHSMLVITINGTGMLIELTYIALFLTFSVGAARRRVLLLLVAEVAFVAGVAALVLSLAHTHDRRSMVVGILCVLFGTGMYAAPLSVMKMVIQTKSVEYMPLFLSVASLVNGICWTAYALIRXDLYITIPNGLGVMFAVGQIILYGIYYXSTQ

SEQ ID NO: 286002 - protein, 116 aa, Zea mays
  Clone ID: MRT4577_23934C.1.pep
MASRLLPLVAALLLLLLLTAASSEATLHPVDYLALQAVRRALSDLPGSRFFASWDFTGDPCSFAGVSCTADGARVETLALGDPRAGAPGLRGRVPVRGRRQAAALTSLSLVPGRVT

SEQ ID NO: 286003 - protein, 78 aa, Zea mays
  Clone ID: MRT4577_23935C.1.pep
VVTSLEKDIGHELSDGPPGIHCTVQSTRNDLLTMATSASIPSATDASAIAATILTDRPRDRRCFLGAWARPLLCSCAM

SEQ ID NO: 286004 - protein, 74 aa, Zea mays
  unsure (1)..(74): unsure at all Xaa locations
  Clone ID: MRT4577_23936C.1.pep
QVHAFPPDTXGTGAHFRGSATPXTAXPYYADSITYSTDPTEATPTLPAPPNCPTSAASPSHYKIKTNLYCNTIK

SEQ ID NO: 286005 - protein, 51 aa, Zea mays
  Clone ID: MRT4577_23937C.1.pep
RGVLMIINISFMVSISFLGCSAPFFLAVEEKCVGAEVICFSPLFFFGFRLF

SEQ ID NO: 286006 - protein, 1162 aa, Zea mays
  unsure (1)..(1162): unsure at all Xaa locations
  Clone ID: MRT4577_23938C.1.pep
MVINCSVAGWDLHKVLVDNGSQTDIIFLHAFDHMGISHNFLKPSNNPLYGFGGKGTFPVGKIELPLSFGVAPNTQSEQVTFDIVDMVYLYNAIMGRGSINKFEAAIHGLYLCMKILGPQGAITVYGNQQAMRNIERDFVPGQRNVHCLTTQREVLEXPPQPPKSXKAQLQSNDGIKTVPLDQATPKQTDVFAWSALDLVGVSHTIIEHSLGIDPSVRPKKQRLRKMSDEKTEAAKAEVHRLLEANFIELVAYPTWLANVVMVQKKSNKWRMCIDFTSLNKACPKDNFPLPRIDKIVDSAAGCEVMSLLDCFSGYHQIYMKEEDKANTSFITPFGTYCFIRMPEGLKNAGSTFSRLTKTVLESQVGGNVFIYVDDIVVTSKSKEDHLADLVETFANMRDARLRLNPEKCVFGVRQGKILGYLVSHRGIEANPTKIQAIINMTPPQSARDVQRLTGRLAALNRFISKSTELSLPFLKTLRDAKDFAWGPEQAVAFASLKQHLSELATLTSPNPSLPLLLYIAASPHAVSAALVQEQDREGTTRQCPVYYISEILTTSKCNMTELEKIAYAVVMASRKLCHYFEAFKVRVTSDRGLGGLFRNLEATVRIAKWAAELFGYHITFEPRTAIKSQVLADFIVDWTGPTTQPDTSAEKLRALGVTTCIIRTDSKVVAGQVEKDYAAKGPALMQYLAAVRGLERQFKGFTLQHVDRAKNEEADALAKAAARGEALLSDVFYHVIGTPAVRSPEGLQITNDIEGHRIVNLIMTEHWRAPITLFLQGYYHPNDINEAKRLKHRSRDFTLIEGQLYKKGVSQPMLKCVTATEGVQILRKVHSGTCGSHAGPRALAAKVIRQGFYWPALICAANRVTRSCEACQKFSSRSRNPSQFTKLIAHTWPLQRWGLDIVGPLTTAQGNLKFTFVAIEYFTKWIEARAVSTITSKTAQKFFWQNIVCRFGVPSELTVDNGKQFDSQDFRDFCFSIGTKLAFASVYHPQSNGVVEGANGKIFTAIKKMLLDDKKGKWADLQPEAVWALNTTECRATGFTPFRLLYGSEAMTPQEIKHGSPRTSASAVPDVDEPTSKDLIDGDRVFALQALNKYQAQTKAWRDHTVVPREFNEGDLVLVRTTRIESQGKLEPKWEGPFIVKTKVSPSAYRLTTSSGEDLEHS

SEQ ID NO: 286007 - protein, 160 aa, Zea mays
  Clone ID: MRT4577_23939C.1.pep
RRLFFFFWIIPIFCAPAIITATWTLSCVIQKKSVPTTLTRRQGAPPKPYSCPVATHNLEHSMLQPPLQSIQNLRTQHLLPHDPPCREGSQWPPNHCSNYANTLTGTKGRVETDHDLDFCSKPYPLEGDKTCCQFCTILLKENISVHKTSHGRPALRAPPS

SEQ ID NO: 286008 - protein, 158 aa, Zea mays
  Clone ID: MRT4577_2393C.1.pep
MALVSASSSSTTAVAALPRNGQQRASSSLFSSSSSSSFLVGKTLLRQAEAARPSFAVRAAADSDRPIWFPGSTPPPWLDGSLPGDFGFDPWGLGSDPESLRWNVQAELVHCRWAMLGAAGIFIPEFLTKIGVLNTPSWYTAGEQQYFTDTTTLFIIEL

SEQ ID NO: 286009 - protein, 194 aa, Zea mays
  unsure (1)..(194): unsure at all Xaa locations
  Clone ID: MRT4577_23940C.1.pep
VLWRQAKKLVTTALLSARKCSAXRAAREEEVGAVIAKIHGAAGAHAAVDMSELLSSFTNDMVWGAVAGRSFRADDGRNKVFRDAGTAVVGGFNPENLYPRLAKVAGGVLTWPARRRAERLRSQWDKVFDALIDEHAREMAGGAGGGDLEETDFIHVLLSVQEEYGLTRNSIKGILADMFTAGTDTSYAALEFAM

SEQ ID NO: 286010 - protein, 84 aa, Zea mays
  Clone ID: MRT4577_23941C.1.pep
VAIENPQDIIVQSARPYGQRAVLKFRSVTLGAHAHSLGRHTPGYLSLNQAPTSFQSGLASLYRTPKDPFRPNLKGSGFLGGNNS

SEQ ID NO: 286011 - protein, 68 aa, Zea mays
  unsure (1)..(68): unsure at all Xaa locations
  Clone ID: MRT4577_23942C.1.pep
VIGYEPPFKVKGVWFFRGQHVPKFVMXEVYHMXLFEWKKVIMYEEAFKERVNTRVEIRKPFQGKALLD

SEQ ID NO: 286012 - protein, 183 aa, Zea mays
  unsure (1)..(183): unsure at all Xaa locations
  Clone ID: MRT4577_23943C.1.pep
MIRKGNGTQIGIDLIKTYYCFCEWHYHRHEIIANEPGXRTHTPLTGGFTRLSSASLRDDWQLTKHVTEPLLTADFDAKXRIIGSEXSDVXSRLILELWTFKEIAGPDEKPMIDVQHKGEEKQSAXEEIYSMGLIKMREIAEAYLDSTIKSDGVTAPVYFNYSQRQATKDAWVIAGLNVLRIIN

SEQ ID NO: 286013 - protein, 125 aa, Zea mays
  Clone ID: MRT4577_23944C.1.pep
SRSTPRPKKKKKNKKKNLIKKKKKKKKRRNKKKKKKKKKKKTPTYLTIPSFHTHPSNFNPLYYSPLYPIPFPPLNNLPISKPLPFPNLTSFSSQPLFSTYHLTINPPTYLPSNLFLIPNPQFNPP

SEQ ID NO: 286014 - protein, 91 aa, Zea mays
  Clone ID: MRT4577_23945C.1.pep
NKKYKVYETKLDKHRVHHIIPSTNPQDLAHHLRSRPLSTKTQNEKDINRTSIASNPRLALVLALCPLPNRCPTVSSSSLAAPRVLCVVTTA

SEQ ID NO: 286015 - protein, 40 aa, Zea mays
  Clone ID: MRT4577_23946C.1.pep
VPRSVGQHQCWLTPLPFRKPKFNWSKFISFFPVYSKQYKN

SEQ ID NO: 286016 - protein, 98 aa, Zea mays
  Clone ID: MRT4577_23947C.1.pep
SPMGEWFPGFLFEPVVILMDLLVGGISKRRISPSVPAGFYKGVPVGKHLDPGATPTQKVGGKGFLGGFIFDFDPLQSPGLGLPKGPDIFFKAIPLFSV

SEQ ID NO: 286017 - protein, 58 aa, Zea mays
  Clone ID: MRT4577_23948C.1.pep
VADPTTAQVALPGKVRHSPAFPVATRLHLWLAGDGLTGILWRAQTHPHTTQAPGFTDA

SEQ ID NO: 286018 - protein, 106 aa, Zea mays
  unsure (1)..(106): unsure at all Xaa locations
  Clone ID: MRT4577_23949C.1.pep
SHVPIXXVNXXTLGEFCFTRXXKTDIEGSKSDVAXNALPPQXSYPCGXFSDTSCLXXQKSEDREAPLSRSVFVLKIKIKRAFALLLHGRFLSSVSSXLGHLRYRST

SEQ ID NO: 286019 - protein, 98 aa, Zea mays
  Clone ID: MRT4577_2394C.1.pep
PTKPWDRGGGGGPPIHRSIVVQPSRGRFKYFQRSGRLKTGSSNSGRNWGNNNGVTADKISGLGVGPQPGLGGRVDLQRRRLPQHHLVFRLEVPPDRRG

SEQ ID NO: 286020 - protein, 247 aa, Zea mays
  unsure (1)..(247): unsure at all Xaa locations
  Clone ID: MRT4577_23950C.1.pep
QVLDEFVIRLLQDVAGFAGGGEASCPLPSSSYCSKTTSSNPNPSVFVSSEEHHNELKNDFQKLLQIMDQRCKQCLDEIQNAASKYGSLVRPGGGGGALSTLFAQRAVSATHRRLRARITGEIAAXRGEVISRXSSSLSLADRERSWESAFIQKHWALRQLRRGDQQSWRPQRGLPEKSVAVLKAWMFENFLRPYPRDKEKEMLAARSGLSRSQVSNWFINARVRLWKPMIEEMYEDLKKASAGIMEA

SEQ ID NO: 286021 - protein, 62 aa, Zea mays
  Clone ID: MRT4577_23951C.1.pep
VLAHATHSRRPSNAKARLSINSWATIYLLPMIKPPYYSWQPTDFLPYSSSKMIYLEVRELLT

SEQ ID NO: 286022 - protein, 117 aa, Zea mays
  unsure (1)..(117): unsure at all Xaa locations
  Clone ID: MRT4577_23952C.1.pep
MPAGHGLRSRTRDLFARPFRKKGYIPFTTYLRTYKIGDYVDVKVNGAVDKGMPNKLYHGRTGRVWNVTNRAIVVXINKQVNGYIMRKRIHVXLEHAQASGXTRPMXLRKVNNDQEKA

SEQ ID NO: 286023 - protein, 112 aa, Zea mays
  Clone ID: MRT4577_23953C.1.pep
ALEWQCACAQSIMQHVILGARCSTMRPTRDEDNSLFVIYHRSIPRTSMAALSTMDYPPLCTLSSPPVTSCSAPRLVPWGTPWSASSRILRKLASCLAAEVRLVNCHRGRTYN

SEQ ID NO: 286024 - protein, 275 aa, Zea mays
  unsure (1)..(275): unsure at all Xaa locations
  Clone ID: MRT4577_23954C.1.pep
VPSGLAGKSSGSLRDSEVMLDQLSLLGKKITISLVHELVGSVSDDELIELLDLALSSDTTNTVRRARELMGSAIDPLQLVSQLANLIMDILSGRCQSAVSEVSKSFLGRYALSEVGIKKLRHALKILSETEKQLRTSRNQATWVTVALLQFGTNEPNLIAEPNDMHSHSXLDIQMTXSKVHSNTNFCQACNSSKSNCSERHCRRLKLENIWRRAIGKCRSRSAKSFLRKEGFLSSVHVTEELAIAEVGFGHPDHLSRAEKMQSLIECSLQHVLGC

SEQ ID NO: 286025 - protein, 106 aa, Zea mays
  unsure (1)..(106): unsure at all Xaa locations
  Clone ID: MRT4577_23955C.1.pep
RTHIVWMVDRLLKHGLAHPSVCLLCDQEDESAQHILVSCVFSWETWTKILCYVGLHXTAPQTERNXLLXWWGSAVNKVPXVXRKGFNSLVILVAWTIWKHRNACVV

SEQ ID NO: 286026 - protein, 48 aa, Zea mays
  Clone ID: MRT4577_23956C.1.pep
GVVKPSPIPRVGSRLVQTLDWIALVQIKVGWLVFKHGSCLTLPSRFFC

SEQ ID NO: 286027 - protein, 132 aa, Zea mays
  Clone ID: MRT4577_23957C.1.pep
PTACVDSWADLCSDRLPRLHQFRSRAAVAGASRAGARPVGSAGAKINDADVAKQIQQMVRLIRHEADKKANENSVFGYEEYNIEKLQLVEAEKTTIRPDYERREKHVEIRKKNEHSMQMNASRIKSLQAHDD

SEQ ID NO: 286028 - protein, 70 aa, Zea mays
  Clone ID: MRT4577_23958C.1.pep
DTQSVTKERGCAPNQSAQLELEKKLYPATPWYSRARCLGCIDYKLPYAPPGAQLYLREEKSRAREWHMLS

SEQ ID NO: 286029 - protein, 70 aa, Zea mays
  Clone ID: MRT4577_23959C.1.pep
GDGPECGRCGGIEGLPPRRLAEIRRFFEDCEKNESEAAAVNDFLPASAACEAVRRSVGLCAACVVEGLRR

SEQ ID NO: 286030 - protein, 267 aa, Zea mays
  Clone ID: MRT4577_2395C.1.pep
MALVSASSSSTTAVAALPRNGQQRASSSLFSSSSSSSFLVGKTLLRQAEAARPSFAVRAAADSDRPIWFPGSTPPPWLDGSLPGDFGFDPWGLGSDPESLRWNVQAELVHCRWAMLGAAGIFIPEFLTKIGVLNTPFWYTAGEQQYFTDTTTLFIIELILIGWAEGRRWADIIKPGSVNTDPIFPSNKLTGTDVGYPGGLWFDPLGWGSGSPEKIKELRTKEIKNGRLAMLAVMGAWFQAEYTGTGPIDNLFAHLADPGHATIFQVT

SEQ ID NO: 286031 - protein, 183 aa, Zea mays
  unsure (1)..(183): unsure at all Xaa locations
  Clone ID: MRT4577_23960C.1.pep
MAEHLASIFGTEKDRVNCPFYFKIGACRHGDRCSRLHNRPTISPTLVLANMYQRPDITPGVDAQGQPIDPEKXRSRSPPPQRRGHRDRDDYHHRDRDDYRGGGGGGRGRGSRYDRYDDGAGRGGRHARYDDGAGRGGRHDRYDDGGRRRHGSPSRRARSPVRESSEERRAKIEQWNREREGKQ

SEQ ID NO: 286032 - protein, 103 aa, Zea mays
  Clone ID: MRT4577_23961C.1.pep
GTRVFPKVPRAGHKKIGGAPPFFFFKPKVGGGGVPPFFKLMGGSRWPLKGVRRRGPTPPVSQFKVCLLERGVPPLFWAGVFFFPPSVFLGPCFLFPRAGGGLC

SEQ ID NO: 286033 - protein, 51 aa, Zea mays
  Clone ID: MRT4577_23962C.1.pep
MCACTWHFFYNSESLEVLVALQGALTVVGNITMCIAAYRIFKASQEGSKTS

SEQ ID NO: 286034 - protein, 307 aa, Zea mays
  Clone ID: MRT4577_23963C.1.pep
MAEHLASIFGTEKDRVNCPFYFKIGACRHGDRCSRLHNRPTISPTLVLANMYQRPDMITPGVDAQGQPIDPEKMQEHFEDFYEDIYEELGKFGEIENLNVCDNLADHMIGNVYVQFREEEQAAAAYNALQGRFYSGRPIIVEYSPVTDFREATCRQFEENSCNRGGYCNFMHVKQIGRDLRRKLYGRSASRRYHGRSRSRSPPPQRRGHRDRDDYHHRDRDDYRGGGGGGRGRGSRYDRYDDGAGRGGRHDRYDDGAGRGGRHDRYDDGGRRRHGSPPRRARSPVRESSEERRAKIEQWNREREGKQ

SEQ ID NO: 286035 - protein, 307 aa, Zea mays
  Clone ID: MRT4577_23964C.1.pep
MAEHLASIFGTEKDRVNCPFYFKIGACRHGDRCSRLHNRPTISPTLVLANMYQRPDMITPGVDAQGQPIDPEKMQEHFEDFYEDIYEELGKFGEIENLNVCDNLADHMIGNVYVQFREEEQAAAAYNALQGRFYSGRPIIVEYSPVTDFREATCRQFEENSCNRGGYCNFMHVKQIGRDLRRKLYGRSASRRYHGRSRSRSPPPQRRGHRDRDDYHHRDRDDYRGGGGGGRGRGSRYDRYDDGAGRGGRHGRYDDGAGRGGRHDRYDDGGRRRHGSPSRRARSPVRESSEERRAKIEQWNREREGKQ

SEQ ID NO: 286036 - protein, 305 aa, Zea mays
  Clone ID: MRT4577_23965C.1.pep
MAEHLASIFGTEKDRVNCPFYFKIGACRHGDRCSRLHNRPTISPTLVLANMYQRPDMITPGVDAQGQPIDPEKMQEHFEDFYEDIYEELGKFGEIENLNVCDNLADHMIGNVYVQFREEEQAAAAYNALQGRFYSGRPIIVEYSPVTDFREATCRQFEENSCNRGGYCNFMHVKQIGRDLRRKLYGRSASRRYHARSRSPPPQRRGYREDYHHRDRDEYRGGGGGGGGRGRGSRHDRYDDGAGRGGRHDRYDDGAGRGGRYERYDDGGRRRHGSPPRRGRSPVRESSEERRAKIEQWNRERESKQ

SEQ ID NO: 286037 - protein, 299 aa, Zea mays
  unsure (1)..(299): unsure at all Xaa locations
  Clone ID: MRT4577_23966C.1.pep
MAEHLASIFDTEKDRVNCPFYFKIVAYRHGDHCSRLHXRPTISPTLVFANMYQRPDMITPRVDAQGQPIDLEKMQEHFEDFYEDIYEELGKFGEIENLNVCDNLADHMIGNVYVQFREEEQAAAAYNALQGRFYSSRPIIVEYSPVTDFREATYKQFEENSCNCGGYCNFMHVKQIGRDLRRKLYGRSASRRYHGRSRSPKPAXQRRGHRDRDDYRGGGGGGRGRGSRYDRYDDGAGRGGRHDRYDDGAGRGGRHDRYDDGGRRRHGSPPRRARSPVRESSEERRAKIEQWNREREGKQ

SEQ ID NO: 286038 - protein, 307 aa, Zea mays
  Clone ID: MRT4577_23967C.1.pep
MAEHLASIFGTEKDRVNCPFYFKIGACRHGDRCSRLHNRPTISPTLVLANMYQRPDMITPGVDAQGQPIDPEKMQEHFEDFYEDIYEELGKFGEIENLNVCDNLADHMIGNVYVQFREEEQAAAAYNALQGRFYSGRPIIVEYSPVTDFREATCRQFEENSCNRGGYCNFMHVKQIGRDLRRKLYGRSASRRYHGRSRSRSPPPQRRGHRDRDDYHHRDRDDYRGGGGGGRGRGSRYDRYDDGAGRGGRHARYDDGAGRGGRHDRYDDGGRRRHGSPSRRARSPVRESSEERRAKIEQWNREREGKQ

SEQ ID NO: 286039 - protein, 61 aa, Zea mays
  Clone ID: MRT4577_23968C.1.pep
NRQHTEKGKGGEGRAPRHVRTVAATLWNTPSISADLRIALDTMQYIESAAKIKGRRRRTKG

SEQ ID NO: 286040 - protein, 98 aa, Zea mays
  Clone ID: MRT4577_23969C.1.pep
MRRRQRTRIWTGTGAASTRKTPMTGSTCEEEAKELKAAASSRGIITWPCYPYRRLMSSMREADERLEYWRLKYGLADEDLDRYRRRLNEEDADDWFDM

SEQ ID NO: 286041 - protein, 78 aa, Zea mays
  Clone ID: MRT4577_2396C.1.pep
TVYRLSFRITLVFEYIKLIQHHHVVLFERHGTYLCFLSDKQRRIHARDLNPHCDMQYITHWLVHFAVQEINFSSSPDS

SEQ ID NO: 286042 - protein, 117 aa, Zea mays
  Clone ID: MRT4577_23970C.1.pep
TFPPLLWGIPGNPKLSQKEKKTFFKLGALWGKNTASLKKKKKPFFFFFKKKKGVFKGGGGEKQGGPPPPQKKFFWGGGGGPPPPPPPAEGIFFFLPRGGGPPPPPPPPLFFFFFFSQ

SEQ ID NO: 286043 - protein, 47 aa, Zea mays
  Clone ID: MRT4577_23971C.1.pep
MQRLMSSMREADERLEYWRLKYGLADEDLDRYRRRLNEEDADDWFDM

SEQ ID NO: 286044 - protein, 33 aa, Zea mays
  Clone ID: MRT4577_23972C.1.pep
ESRSCIWVISQVGEHMPSTGLSRRNGLPVTMLI

SEQ ID NO: 286045 - protein, 75 aa, Zea mays
  Clone ID: MRT4577_23973C.1.pep
MLSRKGRLISVSLSTAPTVQLIINSRVDKSKAEQYRGQILQAFESVLPSTIKLDIRYESKDDLAASHAPVISAYP

SEQ ID NO: 286046 - protein, 49 aa, Zea mays
  Clone ID: MRT4577_23974C.1.pep
MERIRRAAQPSPDYSTDYPVSIPEFGHPSPASSASSVERDDRRHRGGRR

SEQ ID NO: 286047 - protein, 76 aa, Zea mays
  Clone ID: MRT4577_23975C.1.pep
GAFFFFFFPSPRVSGTMSLTSSSSSRSLRAVAGRFDGLQGDGAEPDATAGSRSFSGTPVVITNPLQPHHAYARLSG

SEQ ID NO: 286048 - protein, 97 aa, Zea mays
  Clone ID: MRT4577_23976C.1.pep
RIQRFRTRDHDPNTQRLCHLLSRGRQRSRHGRLWTLRPCSRASTFMRTSACGSSGYAKQLDDGAGGHAQLHRHVNQHMPVLMKVHAKVTNIKSTLAE

SEQ ID NO: 286049 - protein, 126 aa, Zea mays
  Clone ID: MRT4577_23977C.1.pep
ASEETKPYHHGRARVECAGARQGAHSGCYLEDRHAPALRSYVHTVIPQPPSPVRNAIGDGMLKCVRKLLAGSNLWRIPWRRALGCIYLARSGTQHRALTDACMQVELDITPPGQRTMTAAPNDTDS

SEQ ID NO: 286050 - protein, 55 aa, Zea mays
  Clone ID: MRT4577_23978C.1.pep
MAAAAEVVLLDFLVSPFGQHCQIALADKGLAYEYREQDLLDKGELLLRSNPIHKK

SEQ ID NO: 286051 - protein, 123 aa, Zea mays
  Clone ID: MRT4577_23979C.1.pep
MSDLKYSSYTRLGLRRWRRTARGVRLSPTRITVRRLRAKLWTLLGMLGRCVRNLRLLTKGRMAAAAGAEKASSPPAAATGSRRFLVAGQKRSLAGGKTGLQAAGDGGSSSSKPPRRPAFFFFF

SEQ ID NO: 286052 - protein, 194 aa, Zea mays
  unsure (1)..(194): unsure at all Xaa locations
  Clone ID: MRT4577_2397C.1.pep
MCLLQPRTKATKNYNLLVLLALRASATDANMIPQCXSLDHSYIIAQTLHEGTXMALEHADVQAYXLQQAIAASEIQQPNEQXEQQSHXHVTIQTXIVTQQKQQXLPALSHLAMVNPIHYLQQDLLAYNPLGVADVVANQLQQQLKQIVSALSQLDMVNPGAXYLQEEHLLSYSPLAVANAPTYLQQDMXQQIVP

SEQ ID NO: 286053 - protein, 94 aa, Zea mays
  Clone ID: MRT4577_23980C.1.pep
LPRVRPRVRGRVGKKKKKKKKKKKKKKKMKNKRPGARFGGPPLPSACMGPPFFWIQSSISNSRAVYLHLRGSQNPVIAHLIPPAELGKPAGCRN

SEQ ID NO: 286054 - protein, 168 aa, Zea mays
  unsure (1)..(168): unsure at all Xaa locations
  Clone ID: MRT4577_23981C.1.pep
KNPPPLPRGQPGQGPPGPPGGGGPPRPPGPGRGEPXPSRGAGPGPQTRKPGPGPPPPQGRXSHPPGGRPKGTPPGPQAGGXRGKPAPGGKGETGHNAAQQAGRKQKGXPGGXRGGPPRGNGXGGPRPAYQPGTRGGPRDKGTGQPPGRGGLGKGRASAAWDTDPLRPA

SEQ ID NO: 286055 - protein, 109 aa, Zea mays
  Clone ID: MRT4577_23982C.1.pep
MWGHLIFPRYLKQPHLIPFTPIVGVNPPPFLKTPQFLPFTHPRGPKGGPLLKRHQFGPTTPLVLTNPTGFPPHPPFGGPLLFKFPWGKRPKKKFFAQRLGPPPKKKGPF

SEQ ID NO: 286056 - protein, 157 aa, Zea mays
  unsure (1)..(157): unsure at all Xaa locations
  Clone ID: MRT4577_23983C.1.pep
MEXIAKPNXATEDGASKLNXAMEDTASKLTXADTAAVEPTLLETTIAAGSTVVAGNEQCXNSNSSXASLQQQAVDNVLMSTAMLAEDAATXXAAAELKPARAFTRXLLKNHEPDKEESXXCXXQATPDGSKDXSFDFALLLGEASXKXHKXVAQDKG

SEQ ID NO: 286057 - protein, 58 aa, Zea mays
  Clone ID: MRT4577_23984C.1.pep
APWPRVERTTGRFLPRFPLPENPKTDQFPPPLENGVFTVLVPKEAPKNPKVKPLQFPG

SEQ ID NO: 286058 - protein, 179 aa, Zea mays
  unsure (1)..(179): unsure at all Xaa locations
  Clone ID: MRT4577_23985C.1.pep
MTEKDQKPGKDRRLLVGPSFTRALDEDGPAKIEADMHTSCHVVSEEADNHADKRMLPWQPNIEKEXGPYLRKAYPEIHHQLLQPRSRLQKLRLQPLLPLVIYXENCPQEILPMHACNGYRLLCDPLHHTLRARADDYIIDHDEIDDVFIQDKKLQDTLSTNCRPAKRIKALSAVTTSTT

SEQ ID NO: 286059 - protein, 205 aa, Zea mays
  Clone ID: MRT4577_23986C.1.pep
MDNHIHSQPAANLYYQFGMGTEQQYPPPFASLLGASSPPSTNISHMDWNPATMLDNLTFIEEKIQQVKDVIRTMVDNAGQVQCHHQAGELLAQKQKQQVVNADLTCLIVQLISTAGSLLPSLKNSSFLSHPHPGGHVDMANHVGPSSSLVPNAMTVSEDYEELFKGWTDGAMEERGIEVDDDGVLVEEQETRTETASRTSCCSWR

SEQ ID NO: 286060 - protein, 142 aa, Zea mays
  Clone ID: MRT4577_23987C.1.pep
MDNHIHSQPAANLYYQFGMGTEQQYPPPFASLLGASPPSTNIPHMDWNPATMLDNLTFIEEKIQQVKDVIRTMVDNAGQVQCHHQAGELLAQKQKQQVVNADLTCLIVQLISTAGSLLPSLKNSSFLSHHPAGHVDMANHVG

SEQ ID NO: 286061 - protein, 315 aa, Zea mays
  unsure (1)..(315): unsure at all Xaa locations
  Clone ID: MRT4577_23988C.1.pep
MDNHIHSQPAANLYYQFGMGTEQQYPPPFASPPSTNIPHMDWNPATMLDNLTFIEEKIQQVKDVIRTMVDNAGQVXCHHQAGELLAQKQKQQVVNADLTCLIVQLISTAGSLLPSLKNSSFLSHPHPAGHVDMANHVGPSSSLVPNAMTVSEDYEELFKGWTDGGIEVDDDGVLVEEQEITKDGDSLSYELLQLEEDEILAPHTHFCTICGKGFKRDANLRMHMRGHGDEYKSPAALAKPPRDPGAEQEPAKRRYSCPFAGCKRNKLHKSFQPLKTILCVKNHYRRSHCEKSHTCGRCHAKKFSIVADLRTHEKH

SEQ ID NO: 286062 - protein, 93 aa, Zea mays
  Clone ID: MRT4577_23989C.1.pep
SLADPEGLAWWVINAAWHHGLPLCIESALTCRSGEAYSTMLDTENPKDDPDRYHAAFIDYRQQKQSTLREPSLSEQCTFLKCMHGEAPHRVEG

SEQ ID NO: 286063 - protein, 303 aa, Zea mays
  unsure (1)..(303): unsure at all Xaa locations
  Clone ID: MRT4577_2398C.1.pep
MALVSASSSSTTAVTALPRNGQRASSSFLGGKTLLRQAEAARPSFAVRAAADPNRPIWFPGSTPPPWLDGXWWLILGVVFGSLVKASQVVLLSCXVTSESLTXCSCCLVDACXSLPGDFGFDPWGLGSDPESLRWNVQAELVHCRWAMLGAAGIFIPEFLTKIGVLNTPFWYTAGEQQYFTDTTTLFIIELILIGWAEGRRWADIIKPGSVNTDPIFPSNKLTGTDVGYPGGLWFDPLGWGSGSPEKIKELRTKEIKNGRLAMLAVMGAWFQAEYTGTGPIDNLFAHLADPGHATIFQAFTPK

SEQ ID NO: 286064 - protein, 112 aa, Zea mays
  Clone ID: MRT4577_23990C.1.pep
MVVAGTTPGADRAIGASGCQLQRAIRATYVAGGYAIEGTRLACRKQIQAATGLASSLICLYHTARRMLLCDAEDGASTGPAGEGQPHGLAEGYQVSRDRMRHAFAVFSEWNI

SEQ ID NO: 286065 - protein, 106 aa, Zea mays
  Clone ID: MRT4577_23991C.1.pep
NVPGKAHVAWPTKEGKQTKGAGGRGKTSGRAACREHTTPAGINGAGRDPPHFQSGSPTESKGHPGWPTWLKSQQSERGSAQQGKLRKGTTRVYSNTRRSPPPRHGI

SEQ ID NO: 286066 - protein, 104 aa, Zea mays
  Clone ID: MRT4577_23992C.1.pep
WLLLPLRFGFGFVRFSGVRFVGERIEMAVDVEYRVVALLAGRHSQRLDTGLATLRTKRLFIYGERASCEAARHTTASPRSGVGAGGTGPMGYGGRRVRGVGTGS

SEQ ID NO: 286067 - protein, 50 aa, Zea mays
  Clone ID: MRT4577_23993C.1.pep
LLSFCRVIWYWCVWGTPTCISIINLSPAGYYTSFLREREDFLPYRPPLTK

SEQ ID NO: 286068 - protein, 131 aa, Zea mays
  Clone ID: MRT4577_23994C.1.pep
FFKGKERPFDFNPEGEESGTNLDRPLNKYWTGPSPQTTHGPISYTLETPGGGFKRFFCIRGGGLLRGLLFPAGHAFYGVTFSTRKGLPPEEAKRLPIMGFDWAKKATFIWARVRNKNPFELSMGPPPKTPL

SEQ ID NO: 286069 - protein, 66 aa, Zea mays
  Clone ID: MRT4577_23995C.1.pep
ELVRVGAFVAVDLRRPAAKNRSARAPAIEPAGRPGSSVLPSPYPYVVSLRTRGRTRGRTSGRMRVS

SEQ ID NO: 286070 - protein, 111 aa, Zea mays
  Clone ID: MRT4577_23996C.1.pep
PRGFRFLDSLKPNLKFPKWYRPGFLPVEMPGPWIPPGLLGGPGSGRPFPFHCIYVFAVNYLFPKVRDYCPPRFVLVPKFSWRMFSLGFPLNVFGRSVAIYLILKIDSTMHF

SEQ ID NO: 286071 - protein, 54 aa, Zea mays
  Clone ID: MRT4577_23997C.1.pep
FFSSCRSSVLACKALGSCCHFKRRCALNYPCLSPSPQLLRHRSGRRHHRQLHCS

SEQ ID NO: 286072 - protein, 616 aa, Zea mays
  Clone ID: MRT4577_23998C.1.pep
PRGRPGGDNAEDGDSDATADPSRALESFRLLCGEADYHALRGFLERVSEGGDGYLSPIILSADADKAHRSEVHEFIKRNFKFLNTDTVEHNDGIQKCIRVRLGSGPRCGRGRNRRGMDTSGWRDDKPFDSRGSTFWPYHLGKFLRFHLYKENKDTHEALGVIGKLAGVQPRSFGFAGTKDKRAVTTQQVTVFKVHASRLAALNSKLTGIRVGDFSYVKEGLVLGRLRGNHFAITLRNVIAESADVINAAVNGLSKNGFINYYGLQRFGSGSVPTHFVGAALLRGEWRHAVSLILGTRVHYKWHVDVDAALRGMPRHLTVERAILQRLKNYPGNYLQALMAIPKALRLMYVNSYQSYLWNHAASMRVEKYGISQVVEGDLVYKTGSSLGEAITTDTFDDDDSHVNSPEMEMSCETLTEEMIQSVKVVDSEDLLKAVYSFEDVVLPLPGSETLFPGNEVTMIYHEIAKKDGISLIESAHGIKDFSITSMKGGYRRVLQRPIDFEWDLMTYTDDNTPLVPTDLDVLSETQLSETNEPLSDGTCSCPSSDSRLQVLLDTSGPTIEASSVETKSIGISDLSPEKLAVKLEFTLPASSYATMAIRELTKTSTSVACQKTLNG

SEQ ID NO: 286073 - protein, 688 aa, Zea mays
  Clone ID: MRT4577_23999C.1.pep
MPVLLNTTPSRPPAAHFRVRDAARPPAPLAEPDVGISRFASSIPGFRGALKQRYSDFIVHEVACDGALVRLTSFDLPDIEESGDNAEDGDSDATADPSRALESFRLLCGEADYHALRGFLERVSEGGDGYLSPIILSADADKAHRSEVHEFIKRNFKFLNTDTVEHNDGIQKCIRLVTISNVTRFHLYKENKDTHEALGVIGKLAGVQPRSFGFAGTKDKRAVTTQQVTVFKVHASRLAALNSKLTGIRVGDFSYVKEGLVLGRLRGNHFAITLRNVIAESADVINAAVNGLSKNGFINYYGLQRFGSGSVPTHFVGAALLRGEWRHAVSLILGTRVHYKWHVDVDAALRGMPRHLTVARAILQRLKNYPGNYLQALMAIPKALRLMAFRIYFVLWYSNGSMLCRYVHSYQSYLWNHAASMRVEKYGISQVVEGDLVYKTGSSLGEAITTDTFDDDDSHVNSPEMEMSCETLTEEMIQSVKVVDSEDLLKAVYSFEDVVLPLPGSETLFPGNEVTMIYHEIAKKVMGFVMNFSVIQEDGISLIESAHGIKDFSITSMKGGYRRVLQRPIDFEWDLMTYTDDNTPLVPTDLDVLSETQLSETNEPLSDGTCSCPSSDSRLQVLLDTSGLTIEASSVETKSIGISDLSPEKLAVKLEFTLPASSYATMAIRELTKTSTSVTSCSILFLVL

SEQ ID NO: 286074 - protein, 270 aa, Zea mays
  Clone ID: MRT4577_2399C.1.pep
MALVSASSSSTTAVAALPRNGQQRASSSLFSSSSSSSFLVGKTLLKQAEAARPSFAVRAAADSDRPIWFPGSTPPPWLDGSLPGDFGFDPWGLGSDPESLRWNVQAELVHCRWAMLSAAGIFIPEFLTKIGVLNTPSWYTAGEQQYFTDTTTLFIIELILIGWAEGRRWADIIKPGSVNTDPIFPSNKLTGTDVGYPGGLWFDPLGWGSGSPEKIKELRTKEIKNGRLAMLAVMGAWFQAEYTGTGPIDNLFAHLADPGHATIFQAFTPK

SEQ ID NO: 286075 - protein, 83 aa, Zea mays
  Clone ID: MRT4577_239C.1.pep
GPPSKGPPPQWGINSKKPGPHSQPLKGPQKGGPPPPWDWDPEKGFEGVSPPPPPPPPLFFGAKKQIWEPSPGVLLPPPMVFFS

SEQ ID NO: 286076 - protein, 52 aa, Zea mays
  Clone ID: MRT4577_23C.1.pep
MNKNINTMLVLSFYLAIRLLNDSIYLFTHYVPNLLYNDRLSYINNRKLYAIS

SEQ ID NO: 286077 - protein, 44 aa, Zea mays
  Clone ID: MRT4577_24000C.1.pep
SGPAAYSPVCTPQAPCAIFNQSAHLASDRYTRDSIKLFHQCRAT

SEQ ID NO: 286078 - protein, 72 aa, Zea mays
  Clone ID: MRT4577_24001C.1.pep
KIQNGILLQKQRERRRITTRTPNTSQTEGGGAHTTTRNQSPENKGKKRLLTQETDRRNSRFPAPQRRQEQHR

SEQ ID NO: 286079 - protein, 109 aa, Zea mays
  Clone ID: MRT4577_24002C.1.pep
GLGTVFFPGIPPLWAHLWALHIFLVWGIRAQGCGVDGICWFLASPPPPVSQWSEFAPPPPLFRVGPPLFPPPFEWDICLFPLFVFQKKKKKKKKKKKKKKKKKKTPPPP

SEQ ID NO: 286080 - protein, 90 aa, Zea mays
  Clone ID: MRT4577_24003C.1.pep
MTSLPPSTADFALPYRVRSQPSSSPVRDHKQLLDASEETRYPTDKDVDLPLFELEVILAATDNFAGHKRIGAGGFGPVYMGVLEDGQQVA

SEQ ID NO: 286081 - protein, 234 aa, Zea mays
  Clone ID: MRT4577_24004C.1.pep
LCYATEGVRDTIYLPDETADFRSPETDAPLRGNRPHPRAGLEPGSQQRTTRRIDGALARHVVVPSLAHQPVVSCCRIGYAELRDPCVTYSCVPRRAMWRLRRSPQLGKHSTVHINSRKTIDRHEAAARAQRHFSPRCLHCTSSDLPAAARLTGHGPLIQTLQGLGRVLFCSVLFAFSEHVQCGSWNVRPAPRAGSKREELRFRRQELRQRSLRHTHTRKGDGDDGDGVILQRCR

SEQ ID NO: 286082 - protein, 62 aa, Zea mays
  unsure (1)..(62): unsure at all Xaa locations
  Clone ID: MRT4577_24005C.1.pep
RLGVWWQIFLGTSWMVRSGSYVIRGGTVQTCKSMTVCLSFCGGLEQXXYRDXTCVNNHNLGE

SEQ ID NO: 286083 - protein, 67 aa, Zea mays
  Clone ID: MRT4577_24006C.1.pep
AESVARSKADQGWGALVVSELKPRVLPTRRRPRQRRRHVRRPHVSAAHVAPNKVPISPYWPHDYGNL

SEQ ID NO: 286084 - protein, 58 aa, Zea mays
  Clone ID: MRT4577_24007C.1.pep
VQCTVCPALRMLPHVLYLKNIIHFSLIKKKSSSNINLFHLIFYFNLLSFFIFYKFIIY

SEQ ID NO: 286085 - protein, 38 aa, Zea mays
  Clone ID: MRT4577_24008C.1.pep
RAGSKTLDWRKRFNTIERVARGCEYLQENAQSKRAQPE

SEQ ID NO: 286086 - protein, 134 aa, Zea mays
  Clone ID: MRT4577_24009C.1.pep
VTGHATAAGCALALAHDAALMRASRGLLYMSEVDVGIKFVDLVAAVLRDKVPDAAARRDLVLRGDRVAAAEAVRRGLVDAAVDGGPEDVVAAAVAEAERLAARGWDGEAVAEIRKAAWPQLWSQVKDQGTGPAP

SEQ ID NO: 286087 - protein, 270 aa, Zea mays
  Clone ID: MRT4577_2400C.1.pep
MALVSASSSSTTAVAALPRNGQQRASSSLFSSSSSSSFLVGKTLLRQAEAARPSFAVRAAADSDRPIWFPGSTPPPWLDGSLPGDFGFDPWGLGSDPESLRWNVQAELVHCRWAMLGAAGIFIPEFLTKIGVLNTPFWYTAGEQQYFTDTTTLFIIELILIGWAEGRRWADIIKPGSVNTDPIFPSNKLTGTDVGYPGGLWFDPLGWGSGSPEKIKELRTKEIKNGRLAMLAVMGAWFQAEYTGTGPIDNLFAHLADPGHATIFQAFTPK

SEQ ID NO: 286088 - protein, 199 aa, Zea mays
  unsure (1)..(199): unsure at all Xaa locations
  Clone ID: MRT4577_24010C.1.pep
MNNMLPIQVNEWWNPIDAKICATARDEHGFDPTXAHLLTPTFSTKRASAYYNERSCGRFVPRTVLMDPETDTMYRGPIVPYTKIIRPDNFSSGKSDAGINXSKGHYTKAAVLFDXSALYGAHKDDDNCDCLPGFRVCHSLGSXHGSEMVTLTIYQXRGTLPDLMMPTFSXISSLEVSDSALEPNHVSPSAHHMXENADE

SEQ ID NO: 286089 - protein, 63 aa, Zea mays
  Clone ID: MRT4577_24011C.1.pep
VNNLLHLLRKCHDRIQKVSIMCRSDSKSLLLALDLAQWLTNRSSLASRSCITYEHLLTSPDAW

SEQ ID NO: 286090 - protein, 145 aa, Zea mays
  unsure (1)..(145): unsure at all Xaa locations
  Clone ID: MRT4577_24012C.1.pep
VFDIIPVLTHRFVKLPNANQTHVKIASNPWFMPFFQNCIGAIDGTHNPIPIIEDRATPFRNRKGTLSQNVMWACDFDLNFTFISCGXEGSASDAGVLCSAFRLGFHVPMGKFYFIDSRYANSPSFIAPYRGVRYPISEFKRHGSP

SEQ ID NO: 286091 - protein, 101 aa, Zea mays
  unsure (1)..(101): unsure at all Xaa locations
  Clone ID: MRT4577_24013C.1.pep
MGALARGHHKSFRLPFTLGPGGTRPPAPRRTHLPAAKGRPERPGGGAPGARPGWNRRPKPPCPPGAPPGXAGPGHPLGPPGPGGRKXSCPXWPGGPGTSGP

SEQ ID NO: 286092 - protein, 25 aa, Zea mays
  Clone ID: MRT4577_24014C.1.pep
FWKGWHNLVECLNLRLLNQQFQANI

SEQ ID NO: 286093 - protein, 44 aa, Zea mays
  Clone ID: MRT4577_24015C.1.pep
HGDVTGDHYDGCLHQIIRDCVRAALQFVTLALVDGIVAVNARVA

SEQ ID NO: 286094 - protein, 61 aa, Zea mays
  Clone ID: MRT4577_24016C.1.pep
YSHSVIHMKLYLFVTQNLLKQMFHLLLPPSIAEVKIVPPLFVTAIAYETTSQLTKKKKKGG

SEQ ID NO: 286095 - protein, 116 aa, Zea mays
  Clone ID: MRT4577_24017C.1.pep
MAIPSPAEDEAADPGLTECLRLLEAVPAAADSSPAFRRHWPSISASLAALSASLASPAFPPSAPLLAPLAAALHALLSSAGDAPRLGHLHTVSLLSPRPPRSPSSPPTRASSPSPC

SEQ ID NO: 286096 - protein, 193 aa, Zea mays
  Clone ID: MRT4577_24018C.1.pep
PPHLILGFSPRSFFNVVCSLCVYAAICRKEGVALRWPGCLGSWESFSNASDADLIAEQHIWAAVDPMAKNQAFNCNNGDLYNWKTLWPVLAARFGLEWTGYDGEEKQFKVSEAMAGKEAVWAEIVRENGLVETCLRGVADWWLIDVVVYEHGANWKLLDSMNKSKEHGFLGFRDTVKSFNKWIDKMKAYKIVP

SEQ ID NO: 286097 - protein, 51 aa, Zea mays
  Clone ID: MRT4577_24019C.1.pep
LSRSWKLTKMVDISGGFKKIPQREKNPVLFTKRFPQHTLPNCTVKYTWMYC

SEQ ID NO: 286098 - protein, 261 aa, Zea mays
  unsure (1)..(261): unsure at all Xaa locations
  Clone ID: MRT4577_2401C.1.pep
MALVSASSSSTTAVTALPRNGQRASSSFLGGKTLLRQAEAARPSFAVRAAADPNRPIWFPGSTPPPWLDGSLPGDFGFDPWGLGSDPESLRWNVQAELVHCRWAMLGAAGIFIPEFLTKIGVLNTPFWYTAGEQQYFTDTTTLFIIELILIGWAEGRRWADIIKPGSVNTDPIFPSNKLTGTRRXGYPGGLWFDPLGWGSGSPEKIKELRTKEIKNGRLAMLAVMGAWFQAEYTGTGPIDNLFAHLADPGHATIFQAFTPK

SEQ ID NO: 286099 - protein, 60 aa, Zea mays
  Clone ID: MRT4577_24020C.1.pep
MEVERLVMELGALPEEKDMQPFHAGKEEIVLFKELEDHKMKVEEVTQDTTKGFGDGEMIA

SEQ ID NO: 286100 - protein, 36 aa, Zea mays
  unsure (1)..(36): unsure at all Xaa locations
  Clone ID: MRT4577_24021C.1.pep
ETLELLKDVHLGLAVPCQDPVRXALLSGHYLYYHYG

SEQ ID NO: 286101 - protein, 97 aa, Zea mays
  Clone ID: MRT4577_24022C.1.pep
HTLYLHIPWRPTESTKCTSCKNISLIGGMAYFRGPRIISQCGTCGKPGTKAKPSITAHLSTPATRTIRRMLDNASYQRGGFPRPGNNHPCRSGYFFL

SEQ ID NO: 286102 - protein, 51 aa, Zea mays
  Clone ID: MRT4577_24023C.1.pep
KDKHCLISSVSIFFKLVLILTCMMIKCFSPFYVTSFICLLILIHSLRTMHS

SEQ ID NO: 286103 - protein, 45 aa, Zea mays
  unsure (1)..(45): unsure at all Xaa locations
  Clone ID: MRT4577_24025C.1.pep
IDHASGPAFDPTDNGYQCITLXPAGGACSRSVRFPCSRNSATPTS

SEQ ID NO: 286104 - protein, 229 aa, Zea mays
  unsure (1)..(229): unsure at all Xaa locations
  Clone ID: MRT4577_24026C.1.pep
VLQCRSGMTRKRRRXLPREAKXVTWLLFQGAGNDGKKAVSKELARLVFGSYSKFTAISLSEFTHVHSDSSSGEITLKRQRSLDTGRSYVQRLYDAILENPHRVIMIDGVEQLDYESEIGIRNAITNGRIRGCNGDEISLGDAIIVLNCEALRSMSNASSPRLKQRVIEKDGKEGNDMNMENGMESSGFTLDLNACAEDCEGNYEESVSDNARIVNIVDGVFFFQLMEHS

SEQ ID NO: 286105 - protein, 153 aa, Zea mays
  unsure (1)..(153): unsure at all Xaa locations
  Clone ID: MRT4577_24027C.1.pep
MINLFRSQNLSTRMRIVYLMGSPAIMNYWRECLVTVLSDDVFITSLFNLYINFFFFYKYYXIYFFYFLFXFLFLIFVLYFFKLNFFYIFYXYFLYLFNMLVLXLIYFIFLFYFYYKLYYFFYLSFFXFIIFIIFFFYFYFNIYIIIYYYFLYF

SEQ ID NO: 286106 - protein, 131 aa, Zea mays
  unsure (1)..(131): unsure at all Xaa locations
  Clone ID: MRT4577_24028C.1.pep
IVQSFFXAWGYASTEFIHTFILFISFLYRHPMFVGTSHFLKHRGYMKSKKRGGEEPKKNHVHGKQKKPFFLFGRFYFKKKISLGGEKFLKTENALNQVYWAFGGQKKNRGPKSLCGAKKKKQGAYLNACSF

SEQ ID NO: 286107 - protein, 72 aa, Zea mays
  Clone ID: MRT4577_24029C.1.pep
MQQGLCEQTVNVLQLMEEEGFEPNLVMLNSLINAFGTAGRHLEALAVFQHIKDSGMSPDVVTYTTLMKTFMR

SEQ ID NO: 286108 - protein, 70 aa, Zea mays
  unsure (1)..(70): unsure at all Xaa locations
  Clone ID: MRT4577_2402C.1.pep
MKFVAAYLLAVLAGNSSPSAEDLTAILESVGCEVDNEKVEVGVSQLSXKDITXLIGEGRENFFXXPCGXG

SEQ ID NO: 286109 - protein, 75 aa, Zea mays
  Clone ID: MRT4577_24030C.1.pep
RETKIQIKLPKNTNRRREESPALLTFPLTGPRPAKFNNSLKAFYSRVLPRATTNFFERGPPWFLPGRLGSTRKSG

SEQ ID NO: 286110 - protein, 60 aa, Zea mays
  Clone ID: MRT4577_24031C.1.pep
RTPSLQLSAFLAGTACLGAGDLPSADAHGPDRQRGLTAYSAFAKHQRGWEANDHASHDLN

SEQ ID NO: 286111 - protein, 111 aa, Zea mays
  Clone ID: MRT4577_24032C.1.pep
LVFLTLNNKTRKKQNPEKTNRAKNMARGKPKKVLWGGHHTKQAPKRAGAPGLEGETQPGHQKKKHKKPAPWVPPKSKHRAKKTPPASCYPKHPPFIFGQVQSPPPAANHLG

SEQ ID NO: 286112 - protein, 446 aa, Zea mays
  Clone ID: MRT4577_24033C.1.pep
MDGQGTKHRILMVSDFFFPNFGGVESHIYYLSQCLLKLGHKVVVMTHAYGNRSGVRYVTNGLKVYYVPWRPFLMQNTLPTLSLTFPIVRTIIIREKISVVHGHQAFSTLCHEALMHARTMGYKVVFTDHSLYGFADAGSIHMNKVLQFTLADIDQAICVSHTSKENTVLRSGISPEKVFMVPNAVDTAMFTPSPKRLNCDEIVIVVVSRLVYRKGADLLVEVIPEVCRLFPKVRFIVGGDGPKRVRLEEMREKFSLQDRVEMLGAVPHAQVRSVLISGHIFLNSSLTEAFCIAILEAASCGLLTVSTRVGGVPEVLPDDMIVLAEPAPGDMVRAVKKAIDMLPGIDPQIMHLRMKELYSWDDVAKRTEIVYDRAMESPTTNLLDRLPRYLTCGSWAGKLFCLVMIINYLLWRLLEFLQPAVGIEEVPDIGPLHAHLGSRNDEAQEK

SEQ ID NO: 286113 - protein, 44 aa, Zea mays
  Clone ID: MRT4577_24034C.1.pep
LYNVSYSYTYCPSIYTSFYCEITGKTHVNRILIHLAFHHLFVLP

SEQ ID NO: 286114 - protein, 97 aa, Zea mays
  unsure (1)..(97): unsure at all Xaa locations
  Clone ID: MRT4577_24035C.1.pep
MHLRMKELYSWDDVAKRTEIAYDRAMDSPTTSLLDRLPRYLTXGSWAGKLVCLDMIINYLLWRLLEFLQPAVGIEEVPDIGPLHAHLGSRNDEAQEK

SEQ ID NO: 286115 - protein, 49 aa, Zea mays
  Clone ID: MRT4577_24036C.1.pep
QTAIHSLRLCNSRSSTLISSKFYVNKNCRGSLNFISKENLKQGFPCNSL

SEQ ID NO: 286116 - protein, 62 aa, Zea mays
  Clone ID: MRT4577_24037C.1.pep
PASPRVRKKKKKKKKKKKKKKKKKKKKKKKKKKQKKKKGAGRFYGTQVSLRLGVPTFLHSFL

SEQ ID NO: 286117 - protein, 66 aa, Zea mays
  unsure (1)..(66): unsure at all Xaa locations
  Clone ID: MRT4577_24038C.1.pep
YERATSTAGLPSAWLEVSLXISGNMPRSKTTMAXVTKAHAKSLMPSFSIGRDDIRAIEVLTHEVAD

SEQ ID NO: 286118 - protein, 81 aa, Zea mays
  Clone ID: MRT4577_24039C.1.pep
DDFGLIRIRVMYPSRSIVSGSYPGDLLSKFGLYVMVVTVVMTWFGYDVIYIETSLGGTGKLYLWNVCMGKSFMRLYSVPST

SEQ ID NO: 286119 - protein, 141 aa, Zea mays
  unsure (1)..(141): unsure at all Xaa locations
  Clone ID: MRT4577_2403C.1.pep
KAPRAGTLMDNPGGEPRPFRKAFKWGTPTGLPLHXGKNSRQKVFKGPPKRGREGLDCPSHGHPKGKGISKKPPKGRGRARAQQMSSSTPPPSGKGNKHKLSPLGAVPGTSPNFFFIFFINYLYKFYFFFFFFFFFFFFFFF

SEQ ID NO: 286120 - protein, 555 aa, Zea mays
  Clone ID: MRT4577_24040C.1.pep
MAPSKLRQAMGAAKDQTTIALARASAVDEVASDVEASIVRATAHGESVPADERHAAEILTLTRYSRARVAACVASVSRRLGRARAWPVAVKALALVHRLLAEGDPAYEQEVFLATRRGRRMLDLSRFRDRDRDRARCRDWCFAAFVHAYATYLDDRLKHRMQARGACGASPGKWHVDGDPDAMACEVAEAAWELVPRGRSASATETAAAEDVVGKAQQLKHLLGRFIQCRPTGKARTNPVVTAALYRLVKESAAMYCELTEVMVVLLDRFADLGTPACVRVHSIFTSLAKLVDELDDFYSWCKATDVCRPSDIPEIQRVKQTNLDLMDEFIRDRQASASPWGRSPPTPIKKNDVRGTEPTPKQQQGVAPKENSAGKAAPAEPATSPVVVDVVHDDKTADFLNLGEDASPSSGEEEHGMNLTLALFEGNSAEAAPKWVAFDDSEADWETALVQSTSTQRSELGGGFNTTTVTSTRAFTGSASSMATQPLGATVLALPPPLGASTARADPFAASLAVPPPICVQMTDLQTRQRLLMQEQNSWHQYEMHRAAWSYNLL

SEQ ID NO: 286121 - protein, 134 aa, Zea mays
  unsure (1)..(134): unsure at all Xaa locations
  Clone ID: MRT4577_24041C.1.pep
MLRASNRRRVYGRIRLPSIDNSXFIVSSSRDRALLVWDLTNPVHSTPESGATDDYGVPLRLLTGHSHLVQDVVLSTYGHIALYGSXDGELLLWDLCTGLTTRRFVCHTXDGLSGAFCADNRQIGCAFRDMTIKL

SEQ ID NO: 286122 - protein, 343 aa, Zea mays
  Clone ID: MRT4577_24042C.1.pep
MAAAACNPVAPSGPVPFKDVDDGSVPEHTPKEEFGDLVAALPSRQQSILELRLYQGFWLPEHWVPGTIVFQRRFTPRPDDVILASYPKCGTTWLKALAFATAARTAYPPGGARHPLRRLNPHDCVPFIDEIFASGEEAKLEALPSPRLMNTHLPYALLPAPVTATATGCRVAYVCRDPKDMVVSLWHFLRRAKPDLLFADTFESVCDGTVVAGPVWDHVLSYWRASVAAPDRALFLRYEDMLRDPGGNVRRLAEFMGRPFSAAEEAAGDVAAVVELCSFDEMKGLEVNRPGSGTAGRYRPMPRDAFFRKGVAGDWANHMTPEMAARLDGIFREKLQGTGLIFS

SEQ ID NO: 286123 - protein, 273 aa, Zea mays
  Clone ID: MRT4577_24043C.1.pep
MRGSSRRPVAVVMAWVRRQPPKVKAFLAVVAGMAALVFIRFIVHDHDNLFVAAEAAHALGIAVLIYKLTKEKTCAGLSLKSQDLTALFLAVRLYCSFVMEYDIHTILDTAALAATLFVIYMIRFKLRSTYMLDKDNFALYYVVLPCAGLALLVHPSTSHNIVNRISWAFCVYLEAVSVLPQLRLMQNTKIVEPFTAHYVFALGVARFLSCAHWVLQVLDTRGRLLTALGYGLWPSMVLFSEIVQTFILADFCYYYVKSLVGGQLVLRLPSGVV

SEQ ID NO: 286124 - protein, 390 aa, Zea mays
  unsure (1)..(390): unsure at all Xaa locations
  Clone ID: MRT4577_24044C.1.pep
CQPPGTARFSRREPELQEREGGSEEAGRGSALLQRGRTGAAAAPVARRAQGDPARDHGGPGAATWGQSGPDYAPAGFVHRLRQRCGADELFPCLPLQSSPRVCCSLLSVISAAKPAIANYPFTTLLPNLGVVSLDFDATMVVSDLPGLLEGTHRGYGLGHEFLRHSERCSVLVHVVDGSAQQPEYEXEAVRLELELFSPSLVDKPYVVVYNKMDLPEASDRWNTFRERLQSEGIEPFCISAINRQGTQDVIHAAYKLLQKERQRMKETEGWSGTENLNHVSEAIKKERRAPMNEFEVFHDKGTNTWNVVGAGIQRFVQMTNWQYSDSLKRFQHALEACGVNRALMKQGVKEGDTVIIGEMEMVWNNETDRARPSKTMNTQDDAVRWPEFG

SEQ ID NO: 286125 - protein, 335 aa, Zea mays
  unsure (1)..(335): unsure at all Xaa locations
  Clone ID: MRT4577_24045C.1.pep
RTVANNTQPRTPPHPQRRHSERAAAGAGAEARGTKTASMQSWRKAYGAIKDTTTXSLANINSDFKDLDVAIVKATNHVECPPKERHLRKIAAATSIARPRADIAYCIHALSRRLSKTRNWIVALKTLVVVHRLLREGDPTFREELLNFTQRGRILQLSNFKDDSSPIAWDCSAWVRTYGQFLEERLECFRILKYDVEAERLSKQGQGPEKGHSRTRDLDSQDLLEQLPALQQLLYRLVGCRPEGAANNNYLVQYALALVLKESFKIYCAINDGIINLVDKVKASFHVGISCTPXMCTYDGFHFVQFFEMPRHEAHKALEIYRRAGQQVTPESRRR

SEQ ID NO: 286126 - protein, 273 aa, Zea mays
  Clone ID: MRT4577_24046C.1.pep
MRGSSRRPVAVVMAWVRRQPPKVKAFLAVVAGMAALVFIRFIVHDHDNLFVAAEAAHALGIAVLIYKLTKEKTCAGLSLKSQDLTALFLAVRLYCSFVMEYDIHTILDTAALAATLFVIYMIRFKLRSTYMLDKDNFALYYVILPCAVLALLVHPSTSHNIVNRICWGFCVYLEAVSVLPQLRLMQNTKIVEPFTAHYVFALGVARFLSCAHWVLQVLDTRGRLLTALGYGLWPSMVLLSEIVQTFILADFCYYYVKSLVGGQLVLRLPSGVV

SEQ ID NO: 286127 - protein, 56 aa, Zea mays
  unsure (1)..(56): unsure at all Xaa locations
  Clone ID: MRT4577_24047C.1.pep
IALPYCSMVAMRVRLYSLPAESTTKAEAPAAIGSRRRSRGSRYRRRGMLRREXGGS

SEQ ID NO: 286128 - protein, 32 aa, Zea mays
  Clone ID: MRT4577_24048C.1.pep
FQNITNRLLYEKKKLNLEQHIQGVYALAEFWA

SEQ ID NO: 286129 - protein, 124 aa, Zea mays
  unsure (1)..(124): unsure at all Xaa locations
  Clone ID: MRT4577_24049C.1.pep
RRTPHRNASITSVLTANPVSYATTRASDYAATRARRSPGPWPPLRAHGLTRWPSRAPQEQQPAPRRPAPGDQQEQEPPARPRRAPREQQPLPRRQDRXRRAHWNPHQPPQEXLVGECQMLDXRS

SEQ ID NO: 286130 - protein, 50 aa, Zea mays
  Clone ID: MRT4577_2404C.1.pep
RIVLFHNRPFYMGLLGSSLISSHHPDKLDNCILALRQLYPTTPSILNYHM

SEQ ID NO: 286131 - protein, 70 aa, Zea mays
  unsure (1)..(70): unsure at all Xaa locations
  Clone ID: MRT4577_24050C.1.pep
MAANIKDVPALDLMHXSLPWMNDGCKPDKHLILIGPPGIXKGSKLPVXKEEYCLCHXSTAKMLMAAEAGK

SEQ ID NO: 286132 - protein, 103 aa, Zea mays
  unsure (1)..(103): unsure at all Xaa locations
  Clone ID: MRT4577_24051C.1.pep
MPLSNPEQYPMPYLLLMLPSRLSWLPPRPPTLLYQEHMQCPLPPPRPSPPPIPPPLTNPAPMPCPLPPPRPPPPPAPXPQPPPRPPPPLPNGLRGLYPDPSGS

SEQ ID NO: 286133 - protein, 70 aa, Zea mays
  unsure (1)..(70): unsure at all Xaa locations
  Clone ID: MRT4577_24052C.1.pep
FFYWCPXAFKGGRGGEAPPVVPGAYLTKVQRAECMISNYTIFLQVNSHINSXFDLMYPKRAGGARFFFLG

SEQ ID NO: 286134 - protein, 131 aa, Zea mays
  unsure (1)..(131): unsure at all Xaa locations
  Clone ID: MRT4577_24053C.1.pep
HGRQGPRLXGARQGVPPRRGLEHRRPWEKPSRQRAGAQEEMETPSRARAQRAMANQRRAYRNSTADSGHRRSAARTGEQQGDGASSRVSRGAGDRDAGSRGLDSGGLGELHGRRLSRREQQGAPAGSELRK

SEQ ID NO: 286135 - protein, 231 aa, Zea mays
  Clone ID: MRT4577_24054C.1.pep
MAAERQRQQQQHEGAVAAAEPSVARRLWRVVRAVLYMLRRGLPSGRKLGMDLQLLLHRGKVAGGRFLASAQHGRHAATFSSHAGAGAGAGGSFSCGALDPSVAVHEPSRRRREVEFSCSNTPSSASGVGGLGLLGAARRRRRRRRQQQQQQRDEPEPAAGGSGYLMQYYSYDAAEVARVFEMLSDEDEDEDEDVVDVDDRGRLFGGDAVRVPVPGASSATPSPAQAQLLRL

SEQ ID NO: 286136 - protein, 59 aa, Zea mays
  Clone ID: MRT4577_24056C.1.pep
LKKIYKKKKKKKKKKKNKKKGNPFKKIHTLLTHPFNIITFSIILPKFNLLALLLQHLNL

SEQ ID NO: 286137 - protein, 54 aa, Zea mays
  Clone ID: MRT4577_24057C.1.pep
QLSFKLNESFLSTIYHERINQLLHYDHIPTPCFKDARKNTQAEDILYPQQTGNP

SEQ ID NO: 286138 - protein, 103 aa, Zea mays
  Clone ID: MRT4577_24058C.1.pep
EALVSPANAGRLRFRSALELKPVAFGDQRLASPRYLNLNLGGADDALFRCSSPTFSPSFGFYSSPSPLATSSVSLSPTSSAFLADDGWNGAGTDADADATGHT

SEQ ID NO: 286139 - protein, 60 aa, Zea mays
  Clone ID: MRT4577_24059C.1.pep
ARIRSRVRNTPADYNIQKEFLKDLEPTLLGGIIEPSLQALARKLQPGQDDQPQMQFTTAP

SEQ ID NO: 286140 - protein, 87 aa, Zea mays
  Clone ID: MRT4577_2405C.1.pep
AFWNKPPEAVFRRGLTASRDKSLELQWPPAPLPAASYYLALYFQDNRGPSALSWRVFDVAVNGQPFFAGLNVSTAGCMVYGVDWPLS

SEQ ID NO: 286141 - protein, 94 aa, Zea mays
  unsure (1)..(94): unsure at all Xaa locations
  Clone ID: MRT4577_24060C.1.pep
LPTAAGAGVISSSADQLILVNSGRRPVATIGARAQLSKRRLGMPFSEFLSLFIYYLFGGGAYHPFIXIPFXXXVNVLLVVRXRIERRLXEPVRT

SEQ ID NO: 286142 - protein, 175 aa, Zea mays
  Clone ID: MRT4577_24061C.1.pep
KCLHTTQSSPSQKRTTDRRNNHHAQHSQPNLTDCNCRRRPLRIPRRTRPTPRCATGTSSLTWRPRRSSTIIRIAHDIAWPSSILHETRLQLANRLLDAQTVVSAGAVEFLDGCGFAASGEDVGGVGGYAADAADGAGGVARWELGEVCLSACCCAGAGARGAGCGGGCEGHFFCS

SEQ ID NO: 286143 - protein, 413 aa, Zea mays
  unsure (1)..(413): unsure at all Xaa locations
  Clone ID: MRT4577_24062C.1.pep
MASRGSPSSYSSPRTPTSSTANPWPAPSAPPLYPTLSMADLAPVEIGPASSPTASDDYNAPPPSEDVLLRVPGARLHLVDRSRSHPLAAGDLSLLRIRSGDTSLAAIALLGPVQWPLARDVAAVKLDPCHYAFSLTVPASADDPSPDPLHYGLTLSRPDVRLDGVLAAYTSFSVHAVVGAGQLEARVRDEAEAAAYWTAVAPNVEAYGGAVARTIATGAEHLGXLWCGEVTVESLRWGNEVLKRRMQPGDANAEVSPEMLRRIKRAKRVSQISEKVATGILSGVVKVTGYFTSSLANSKAGKKFFNMLPGEIVLASLDGFGKICDAVEVAGKNVLSTSSTVTTGLVSHRYGDKAAAATNEGLDAAGHAIGTAWAVFKIRQALNPKSVLKPTALATSTIRANVAELRAMHGSSK

SEQ ID NO: 286144 - protein, 79 aa, Zea mays
  Clone ID: MRT4577_24063C.1.pep
ILTWLEPGNGVYLFWLPNQTNWPKVSLFHSFRSIPFPERGDPIPAFNFLFLGGGTGGDLPEGRIVGQVNFTINFFAGGV

SEQ ID NO: 286145 - protein, 78 aa, Zea mays
  unsure (1)..(78): unsure at all Xaa locations
  Clone ID: MRT4577_24064C.1.pep
VEMVWFMEIKVGWDYGALIWRLGSECVRVFKESKDDXQXLTRPVFYLIQPGVLCGRLKKKSVIGGIAEGYQGAFLFLL

SEQ ID NO: 286146 - protein, 75 aa, Zea mays
  Clone ID: MRT4577_24065C.1.pep
DLGILQRIVTPMLPVVLGIGLQDTWLIFTLFGLEEVVSICRSDVASGFQVSLAVIVGAYNQGLRSSNLYRKCISV

SEQ ID NO: 286147 - protein, 48 aa, Zea mays
  unsure (1)..(48): unsure at all Xaa locations
  Clone ID: MRT4577_24066C.1.pep
MAAAXDVEYRCWAGGRVWGTSTESLENALTSDGEMLGSRAITGRETRR

SEQ ID NO: 286148 - protein, 98 aa, Zea mays
  Clone ID: MRT4577_24067C.1.pep
LREQGDRRTYWWSSRRCARRQLLASSQHHHEDHRRKPPAATRPRRRRYPHRHTAIRHMGRIPPKTRRAIYKTTPCTSPFSAPAGYAIGKIGDRVGSVT

SEQ ID NO: 286149 - protein, 57 aa, Zea mays
  Clone ID: MRT4577_24068C.1.pep
FISINWLQNLNNKHISRRLLDDWSTCKPSCNSTYTSRIPTTSKKSIAIFPPACSPSF

SEQ ID NO: 286150 - protein, 114 aa, Zea mays
  unsure (1)..(114): unsure at all Xaa locations
  Clone ID: MRT4577_24069C.1.pep
MATMILLLVALVALSVTATNAYIILQCSLATSDIIPQFLPPVTXLGFEHAYVLAYTLQLALAESALQQPIDQLQQQFLVHITVQTIAPQQQQLQQLMPLLSQLAVVNPVNYLQQ

SEQ ID NO: 286151 - protein, 54 aa, Zea mays
  Clone ID: MRT4577_2406C.1.pep
FNVPIRIIGREHLNTVKGIWFRRLLCQFVQIYPIKENLVVAINLLKGLLIFKYL

SEQ ID NO: 286152 - protein, 330 aa, Zea mays
  unsure (1)..(330): unsure at all Xaa locations
  Clone ID: MRT4577_24070C.1.pep
TLAPRERERLLLLLPLEALLALGLDQRTAENALVNAKVTANLASVIAEAGIKECDKSVGNLLYAVATRYPTNALVHRPVLISYVLSTKIKNPAQLDAALSFLTNTGPDSLDVDKFEEACGVGVVVSIEEIKSTVTDILEENMEAIKEQRYHINVGMLCGQVRKRHPWGDAKAVKEEIDKRLAEILGPKTEADSIKPVKKKKEKTAKVEEKKVAVATTAPPSEEELNPYTIFPQPEENFKVHTEIFFSDGNIWRAHNTKEILEKHLKATXGGKVMTRFPPEPNGYLHIGHAKAMFXIDFGLAKERNGHCYXLRFDDTNPEAEKKEYIDHIQ

SEQ ID NO: 286153 - protein, 90 aa, Zea mays
  Clone ID: MRT4577_24071C.1.pep
AKVKILQECLSTHIAQQRVVANSLQEYEHVAYDKITLKRILRHDSNRPRTLPLIQSRQKLASFDKGKLLYPEALAPILSRKGRSDAWAHA

SEQ ID NO: 286154 - protein, 152 aa, Zea mays
  Clone ID: MRT4577_24072C.1.pep
MGCCFSKERKTRPVAGASAFPHRCEPEDRDPPSPEEETVKEVLSETPSTKPRAESKLVGNGVVPAADERELEKAKKQDSVDAAVSDLGSCVSLSLATDERSEAVSESSVATSSVTGPERSPGRKPARRRPVSVDLGPARRAHAAALYGVRSR

SEQ ID NO: 286155 - protein, 148 aa, Zea mays
  Clone ID: MRT4577_24073C.1.pep
MGTGGDGSKAGPALPLEALLALGLDQRTAENALVNAKVTANLASVIAEAGIKECDKSVGNLLYAVATKYPTNALVHRPVLISYVLSTKIKNPAQLDAALSFLTNTGPDSLDVVKFEEACGVGVVVSIEEIKSTVTDVLEENMEAIKEG

SEQ ID NO: 286156 - protein, 43 aa, Zea mays
  Clone ID: MRT4577_24074C.1.pep
MRNTNEKTAVATFRLQSLIFNYICSLEFLINSTKILVVVHWSR

SEQ ID NO: 286157 - protein, 33 aa, Zea mays
  Clone ID: MRT4577_24075C.1.pep
HHSKKTHWVFHGTGSQCRLFPNLPHYKFKSLTV

SEQ ID NO: 286158 - protein, 87 aa, Zea mays
  Clone ID: MRT4577_24076C.1.pep
ESFSFFLSFSFHFFSFFFLLFSTFDQPIKSGKPTSLLWGAPFFYLKNIFCGVNPNKHFKKGPPPLRACWYGAPWFTKTSWTKGNNSY

SEQ ID NO: 286159 - protein, 82 aa, Zea mays
  unsure (1)..(82): unsure at all Xaa locations
  Clone ID: MRT4577_24077C.1.pep
NPPVYLQQQILLPFSQXTAANRASFLTHHQWLPFYQQCSANPAPLSHKQHKWPPVPLVLRDTQAPHKQPQHRGGAAFRGQLS

SEQ ID NO: 286160 - protein, 82 aa, Zea mays
  Clone ID: MRT4577_24078C.1.pep
PSPVGSRVSPLTSTTLAPSSPTVLHDRVCIDFILYDYLDCVAVFVYGALLCHHQPGASWCAAGLNAISSHHHAQYTQSLLPT

SEQ ID NO: 286161 - protein, 100 aa, Zea mays
  unsure (1)..(100): unsure at all Xaa locations
  Clone ID: MRT4577_24079C.1.pep
ASPRKFFPFNQMEXLELPSFFPEADIFPFYPIXGFTPSPFLKHPHFFPFSQHVGPKVGPLLHIQHFLPFNPLXLXNPKSFFQHPIFGGALFLIFKGFNFN

SEQ ID NO: 286162 - protein, 198 aa, Zea mays
  Clone ID: MRT4577_2407C.1.pep
MLQLAARSLLLFLLLVSPAVASAGIAKLNSSSPLFGIEFPPFNTAVADTGCDSKLGAAEDAADEQKPASPSSSLKLHMTHRRGAEGGRTRKGSFLDLAEKDAVRIEAMHRRAASSSSSPRRGRALSESERVVATVESGVAVGSAEYLMDVYVGTPPRRFQMIMDTGSDLNWLQCAPCLDCFEQRGPVFDPAASSSYRN

SEQ ID NO: 286163 - protein, 67 aa, Zea mays
  Clone ID: MRT4577_24080C.1.pep
YWLITLHRCHFLALSFYSNVACPTQCIFYFPSVRSGTVPDTHSGHRHSCTSRQRPRLLAVSCWPPAR

SEQ ID NO: 286164 - protein, 112 aa, Zea mays
  unsure (1)..(112): unsure at all Xaa locations
  Clone ID: MRT4577_24081C.1.pep
MDNGHPLRDAYRYGVLPGGQGDLFFLLELLLGPPLTLPMEDQEFYQSXMPWTLPLXFVETLPLQXVVCLYPEPYPEANGVFLRPHGIKLFKFDMXGXKEPFVSLPEHGIREA

SEQ ID NO: 286165 - protein, 61 aa, Zea mays
  Clone ID: MRT4577_24082C.1.pep
MKALLTGLRCSLRLSLPNLLAKVSNPTNSANNGCIWRCVLRPSLCPSLSSRGHWLSDCCKH

SEQ ID NO: 286166 - protein, 77 aa, Zea mays
  Clone ID: MRT4577_24083C.1.pep
MGGRVDHEYSYLFKMVLIGDSGVGKSNIPSRFTRNHFSLDSKSTIGVEFATKSLQIDGKTISIDSNAGNTKKACCST

SEQ ID NO: 286167 - protein, 74 aa, Zea mays
  Clone ID: MRT4577_24084C.1.pep
PCVVEVGSPGGELLLQRSVALLGALLAGVEAAARLAVGLHAQIGRRAAGACACLRLRLGYDTPRVRPRVSPTVR

SEQ ID NO: 286168 - protein, 217 aa, Zea mays
  Clone ID: MRT4577_24085C.1.pep
MGGRVDHEYSYLFKMVLIGDSGVGKSNILSRFTRNHFSLDSKSTIGVEFATKSLQIDGKTIKAQIWDTAGQERYRAITSAYYRGAVAALLVYDITKRQSFDNVHRWLRELRDHADSSIVIMMVGNKSDLIHLRAISEDEGKALAEKEGLFFLETSAMEAINVEEAFQTIITEVYGIVNRKALAAKEAAATAAPLPSQGKTISIDSNAGNTKKACCST

SEQ ID NO: 286169 - protein, 79 aa, Zea mays
  Clone ID: MRT4577_24086C.1.pep
GGGGVFLFFFFFFFFFFFFFFFFFFFFFFFFFFFWGKGELKFFFSPNPKWAVGVSKWVISLPLHLKKNFLTTPLRANLG

SEQ ID NO: 286170 - protein, 93 aa, Zea mays
  Clone ID: MRT4577_24087C.1.pep
KGERGPCLKKPPGAGGGPLKVVKTKGKTRIGVLGNTQKIPLFKKKTPWEILNCVKKKKKRGWGLGLFPPQKGKNVFFLIKWKTRAPPLKLGPP

SEQ ID NO: 286171 - protein, 87 aa, Zea mays
  Clone ID: MRT4577_24088C.1.pep
SARTSADGRRGANKRSRAGWVYQMLILTSVALQERTRIAFWMLYKKVEYMLDALADIICTPHLRMTDKMPITLAGDLGHGVTHAASS

SEQ ID NO: 286172 - protein, 65 aa, Zea mays
  Clone ID: MRT4577_24089C.1.pep
VSLPHNFPTPRYFIPPSKEIYYSSTQHTQFFLDKPPGATFFLLNRPPLFFFFFFAKTPPQYNVQI

SEQ ID NO: 286173 - protein, 55 aa, Zea mays
  Clone ID: MRT4577_2408C.1.pep
RQYFKASPLEKTMCCRKAAGELACLVVEPQCLSSVVSRSPVGLTGLVWLAPDVFF

SEQ ID NO: 286174 - protein, 115 aa, Zea mays
  Clone ID: MRT4577_24090C.1.pep
LSGAHAVGVGHCSSFRARLSAPPAQIVPAYRDLLSAKCGAEGPGADPVVPNNVRDEDPRAVADAFPPFLGKMRRTRDLLDNSYYHNNLARVVTFNSDWQLLTEKECEDGCTKARR

SEQ ID NO: 286175 - protein, 74 aa, Zea mays
  unsure (1)..(74): unsure at all Xaa locations
  Clone ID: MRT4577_24091C.1.pep
RQSAAVGGRIGSAQQGFFRXNIGGTGQYLYKCYVENTGQFLKKGSMGKPCQVCKMDTRAHAGQVDNLESYAFFA

SEQ ID NO: 286176 - protein, 230 aa, Zea mays
  Clone ID: MRT4577_24092C.1.pep
MDDSQGLDKLGESASEEGRTMLDTTYSVYQHHDGEHMIRTEKYSLPRNLHHHIELIQPTTMFGRLQKQRSAARVIEQLPSAKHEVLINPNIPNTCTDPSSVTNDCLRQLYKTAGYKVQAPQTNMIGITGYLEEVGNFKDAQMFLQTQRRDQVGGKFELVKVNDGKDFQELDQDQVDRQLGVEANLDTQTALGFTLPTRNIFLVYWGGGPFTPFKYLQYQRAVSRVVEIHP

SEQ ID NO: 286177 - protein, 96 aa, Zea mays
  Clone ID: MRT4577_24093C.1.pep
PTLHVWCLRLWSLQHNKMYTATSCTHNLVACNCIICMTGPQVSNSNYPGTHAIPYSLQARQKACIQYACFAESSCNHLPPRQPHPVYLNAQSAIQC

SEQ ID NO: 286178 - protein, 143 aa, Zea mays
  Clone ID: MRT4577_24094C.1.pep
MEVEDDDNTAAASAWPSSSRRSHLIQFLLHASMRLDLRPIVKYAALTFFAGRFLPALPRKMGFCGARSGRIVRSWLLEPLRDSNLELFALVAVWIASKIHNQKPMSVKSLKALCDRIIADQHFMCRDFASAELVFLEVVEHNI

SEQ ID NO: 286179 - protein, 414 aa, Zea mays
  Clone ID: MRT4577_24095C.1.pep
MGPTAGSGEDKAMLELRKKHRVDLERLTITSRPFKTLSFFVLAIAQNLERTCSSVLKKGYQLKTAMLLVVATWVLLMFTDGLNEKHLQELLWYVRFGLWWIILGVASSIGLGSGLHTFIMYLAPHVALFTIKAVQCGRVDLKSAPYDTLLLERRPSWLEKDCLQFGPPIYHETIPFSKILHEVYLEAILWGIGTALGELPPYFLSRTASMSGRIIDELEDLDASISEGFLSSALRQAKRWLMSHSQYLSFTLILLLASVPNPLFDLAGILCGQFNIPFWKFFLATLIGKAIVKVCIQTTLVITLCNNQLLDLVEKRLIWAFSNVPGVASVLPSFVSKLKMAKNKFLSAHVAASASTSVKGKKWNLSFSLVWNTLVWLMVANFIIQIVTSTAQGYLRTQQEREISKKLETELSAS

SEQ ID NO: 286180 - protein, 67 aa, Zea mays
  Clone ID: MRT4577_24096C.1.pep
AKIWPLVEKFPPEYNPGRFSAPGRRGSFPQRLEFATQVALAQEVLRLQVILPPPRVPPAAFQAMLHL

SEQ ID NO: 286181 - protein, 92 aa, Zea mays
  Clone ID: MRT4577_24097C.1.pep
FALGIDLVSSIFYILISSLERNINMNNVVTDWEIQTVFTNYLLLLFFRKVQSYIVHNHASTISSRLKALLQYCGALTIDLFLSKERERKAIS

SEQ ID NO: 286182 - protein, 108 aa, Zea mays
  Clone ID: MRT4577_24098C.1.pep
MAALKIAAVCVLLLFVGSDLARCVASSASPGDEDQAAAGALLLREFLELELSLLAEQHGGVGEFCPPACQNCLIICGITCVLNPNPATCFVNCTTTNGCFSKTLPVVA

SEQ ID NO: 286183 - protein, 226 aa, Zea mays
  Clone ID: MRT4577_24099C.1.pep
MDLPPLSHQALFAAVRSADAPAVRALLVDAEASGTSLAALAAAQTDAGETALYVAAEAGSEEVVRLLLPLYDFEAATVRSRLDLDAFHVAAKQGHTGVVKEFLGRWPGLCSVCDSSNTSPLYSAAVKDHLDVVNAILDTDDSCIKIVRKNGKTSLHTAARIGYHRIVKALIERDPGIVPINDRKGQTVLHMAVKGKNTDVMEELLMDDAFIRHVRDKKRNTAFAIA

SEQ ID NO: 286184 - protein, 125 aa, Zea mays
  Clone ID: MRT4577_2409C.1.pep
NPKESKPQAGTTRSQDVNRRDPQKSPGTSTTPSRPNPGGVQDTEMGPCRRHLDSVLQQLQTEVFRGAHTLYVPNCDPRGFYRKRQCRSSQGQRRGPCWCVDRMGQPLAGSPDGDGNAPCPSGSSG

SEQ ID NO: 286185 - protein, 99 aa, Zea mays
  Clone ID: MRT4577_240C.1.pep
PMMYVDKLLDVTDEERIPMFTDASPELAPICDLGTEGANRLHKVDTQRYDTPSTILGPHASGVHAIYSMPSCENPAYTGIIAVLMRCEVDLSGARRIHT

SEQ ID NO: 286186 - protein, 33 aa, Zea mays
  Clone ID: MRT4577_24100C.1.pep
AAGRAGTAFIYPFGRSDPRWLFAAADSIYHLAR

SEQ ID NO: 286187 - protein, 61 aa, Zea mays
  Clone ID: MRT4577_24101C.1.pep
CLIFLKFIFLFFDQYLFLNRKTFHIIPNFCLGSKPYSLPFLKKTLPLLCWGVCPFPFVKGN

SEQ ID NO: 286188 - protein, 53 aa, Zea mays
  unsure (1)..(53): unsure at all Xaa locations
  Clone ID: MRT4577_24102C.1.pep
RVIQSQINPDSIWLGKYGCFIVXSCLVFQIVFFYVPSHSXPWYERQYWLLGDS

SEQ ID NO: 286189 - protein, 158 aa, Zea mays
  Clone ID: MRT4577_24103C.1.pep
PHVFCFPIVSWKLVTPKVPYLGLSPLHSPVGFRDELRPGLPTSKQPEVLVFFLPAWVPDPFSLPAFSFFLPVREDLFSLVPGPPGSSAHAPSPNSNLEPYPPSPLSSRFSFFSVQSCSVFDSLVPPVMQHRAFFFFLRFSVCPFNPPSSGLVFNCNHN

SEQ ID NO: 286190 - protein, 193 aa, Zea mays
  Clone ID: MRT4577_24104C.1.pep
MMRGGGGKGAATANASGRHQHRRQRYGVGAPWREEIAGLAGRPELAAWLRSVRRRIHERPELAYEEVETSRLVRDELGALGVGFRHPVARTGVVATLGTGRPPVVALRADMDALPIQEAVEWEHRSRVPGKMHACGHDAHVAMLLGAASILKAREHQLKVRIISLRRPAYDAIRCPPSFRFQARSLLSYSLLL

SEQ ID NO: 286191 - protein, 146 aa, Zea mays
  Clone ID: MRT4577_24105C.1.pep
IRNEAKMRRERLEQSRLVIPKSYKEKQALAARQKYKQAVIRVEFPDRMILQGVFLPGEATGSLYEFVTSALKQPGLEFELISPAIPKPRVVPHFPNPGERARTLQEEELVPSALLKFIPRETDSVVFTGLLDELLEASEPLPAASQ

SEQ ID NO: 286192 - protein, 107 aa, Zea mays
  unsure (1)..(107): unsure at all Xaa locations
  Clone ID: MRT4577_24106C.1.pep
SXXGHKXXRSXXAXXXPETRXEHXKAXXSXXEXXAXRGATXXGSRRGXAXXXXXDTXNRKGXRGXQKEXQKGXRNAHHXKXRXKEAGXGAXPNEXXSTGXXERPKGE

SEQ ID NO: 286193 - protein, 84 aa, Zea mays
  Clone ID: MRT4577_24107C.1.pep
FNLLIGSQKWGPHPRRTFKWHRRHITQPKGTTQHTTSIRANTWHRESRCQTWRNISYKKRAQASCLIMTTRENSQCTADRSNNC

SEQ ID NO: 286194 - protein, 48 aa, Zea mays
  Clone ID: MRT4577_24108C.1.pep
PWTLIPRWPALSVLASVSAVRLPHQLAAPHTIVPRWPVFRSCTSTVRH

SEQ ID NO: 286195 - protein, 47 aa, Zea mays
  Clone ID: MRT4577_24109C.1.pep
VDVWSLKLNRGTPVDYSPSKRGARDYQFGQPVGGKGANKARLGLDNP

SEQ ID NO: 286196 - protein, 246 aa, Zea mays
  Clone ID: MRT4577_2410C.1.pep
AALYQGDKGNKKVRKIPSVAANVNDSKEPLSDPTLLCCAFKKHRIYLFSRREPEEPEDATKGRDVFNEKPPPEELLSASDLGKTATTSLPDNLVLHTSMGDIHLRLYPEECPKTGENFTTHCRNGYYDNLIFHRVIKGFMIQTGDPLGDGTGGQSIWGTEFEDEFHKSLRHDRPFTLSMANAGPNTNGSQFFFTTVATPWLDNKHTVFGRVVKGMDVVQQIEKVKTDKNDKPYQDVKILNVTVPKT

SEQ ID NO: 286197 - protein, 286 aa, Zea mays
  unsure (1)..(286): unsure at all Xaa locations
  Clone ID: MRT4577_24110C.1.pep
MKPRHERSRSTTSTFVSQVQQDQDGGDANGSATDQEVMAQPENGVWSPLPPTDMEESPRVSDGSATKERVRLLEREVASAKQTEMKMLESLVQQTKELEQTKIALEEASLEVATLRQXSSSSSSRARAAPLLSRXAQAQQWSVMDLMFGGVDEEINGLRAKLRAAQQAEERSRKAADELAAALSAVTVEAKQVKAWLSGAQAEVEASNAEADRLRGLLQGAEAELWSATEQVGALTSNWKDAAAGWRAREKALVARARAAEEDAAAARRDNAGLRRALEQAVEEAN

SEQ ID NO: 286198 - protein, 63 aa, Zea mays
  Clone ID: MRT4577_24111C.1.pep
SQKKTPGMVIFLNVNPSLHHILLLKHYIQLISSCHNCLYIYIKSYTTNFYISKSIELFYSIKH

SEQ ID NO: 286199 - protein, 56 aa, Zea mays
  Clone ID: MRT4577_24112C.1.pep
EAKHRGTTWTITHFWETKIYVKIGTKPVVNFSAPHLKALGTNYPKGLALKTSWTLS

SEQ ID NO: 286200 - protein, 172 aa, Zea mays
  unsure (1)..(172): unsure at all Xaa locations
  Clone ID: MRT4577_24113C.1.pep
PATVPAQVWPVALGSLSMAGRMRMMEDTISLHPDLCTWADGSPVHFFAVFDGHVGSHVSALCRDRMHEFVAEELGKEGAAFLRRRQEWLAWGDGAGAETSAAAFVRGPRGAWPEREEEERAWRSALRRSFRRADAMAALACACGRVARPSCRCPIYQXVSGIVGSTAVVALL

SEQ ID NO: 286201 - protein, 104 aa, Zea mays
  Clone ID: MRT4577_24114C.1.pep
GGPWIPTHLKIRILELLKPLPKGHVFFMGPTPKKTCYFRAWGPLPVPNMVGRTMTSFPRPPFQKRGFPPMLAPINQSKLKSCGTRGLQSCQFETMFFEKNPPLI

SEQ ID NO: 286202 - protein, 49 aa, Zea mays
  Clone ID: MRT4577_24115C.1.pep
YLYGTRGAGPTERPARRFKAKKEPKAIPIGPPGPGVMPEGPRRHRKLRG

SEQ ID NO: 286203 - protein, 68 aa, Zea mays
  Clone ID: MRT4577_24116C.1.pep
VRNSRVAPGVPGVWVECLQNRRGQAFLIPKNHVWFALIKGDPRFFGPKIGKGFRLLSPGKRGFLRPLF

SEQ ID NO: 286204 - protein, 83 aa, Zea mays
  Clone ID: MRT4577_24117C.1.pep
PLLCLTNGMFKVNNGHATRFWEDKWLGNFTLQYKYPSLYNIVRYKHTTVATVLGSVPLNVSFRRGLQGENLGRWYALVNRVAG

SEQ ID NO: 286205 - protein, 136 aa, Zea mays
  Clone ID: MRT4577_24118C.1.pep
GLESFSRATQEPAGGGEELGRLLEHHNELSPVGGKEVPMVNSVPWRGAYEREQERRESSVAALAHRGARAGCLPRYSVDRVVVRRGARPPPWRRRGRTQHPRYGGGGGVLLAKELRHSQVLGFGRAGLWLDPARPA

SEQ ID NO: 286206 - protein, 52 aa, Zea mays
  Clone ID: MRT4577_24119C.1.pep
AYAATCPSSSSPRPIRPSPTTAVRSCIQYQGDYMLVRQAYFGKTDFVGIFYT

SEQ ID NO: 286207 - protein, 67 aa, Zea mays
  Clone ID: MRT4577_2411C.1.pep
GGYLAKVKGPLCIFSNPPSVVGVFSRIAPKFAFFYPKGAFLHWYVGKGMKKGNFFKVFKDLAAPKKD

SEQ ID NO: 286208 - protein, 101 aa, Zea mays
  Clone ID: MRT4577_24120C.1.pep
LCVRAQSPTHRRFSSRFAMVTTAVPPRVCESCLAPVPSSLGRGSNFESRRQFIPGPPTRKAYLSIGDGDWPQRRMATSHDDTTVVLQFFCVGGASSASSNQ

SEQ ID NO: 286209 - protein, 51 aa, Zea mays
  Clone ID: MRT4577_24121C.1.pep
LPLISSDNPQSIFVPILPTGQISIYYLALQVEIIIDNSEPCVIFISTVNSI

SEQ ID NO: 286210 - protein, 39 aa, Zea mays
  Clone ID: MRT4577_24122C.1.pep
LPSAELLTIARLTWRCRPSLRPGRPAVAPRSAAGCPWFR

SEQ ID NO: 286211 - protein, 61 aa, Zea mays
  Clone ID: MRT4577_24123C.1.pep
NFFFWGGGELKNFKKSKMGFQQPKKVNGYTPISNQKKTGTHIYRLIYQKKKKKKMYVDMWG

SEQ ID NO: 286212 - protein, 58 aa, Zea mays
  unsure (1)..(58): unsure at all Xaa locations
  Clone ID: MRT4577_24124C.1.pep
MASEKKQSNPMREIKVQKLMLNISVGESGDRLTRAAKVLEXQFNGQSPMFSKARYTVR

SEQ ID NO: 286213 - protein, 149 aa, Zea mays
  Clone ID: MRT4577_24125C.1.pep
HVSSRGFYVAKSSAHGGGNSSNAGDELRQQRMPNAPGKTTYGSGEHRRCPRTRRRGQSNEEDADQWWRQPLCSISLPWIRSAIWITAATNPLGEHTMAASIGHWTKVRASGYAAAVRSSNGARRWVSSRDFSLLCSCDHGGPRRSFPGR

SEQ ID NO: 286214 - protein, 51 aa, Zea mays
  Clone ID: MRT4577_24126C.1.pep
RPRSRADHHGLNHRSWELQRTRTQYLHCSPSNLRRLILRLSTSLGSSRLPH

SEQ ID NO: 286215 - protein, 202 aa, Zea mays
  unsure (1)..(202): unsure at all Xaa locations
  Clone ID: MRT4577_24127C.1.pep
MMAEAARVQPRQQDGWVDEFEGVMYDIFLRLPPKSVVRCRAVCRSWLRVASDRRFLLDHHRRQPSLPLLYFXRRPPRPGGQPXEYRLEVLDLRANDNKLQTVLGFSSHVNWLMIPHDHERRLALHGSCNGVLLLSSDDRQLSSVDRLYLYNPTTRHWGCLPPLHSDNTIAGLYWHRISDDYRVLYFRLHEDGKYCYYVMEAG

SEQ ID NO: 286216 - protein, 96 aa, Zea mays
  Clone ID: MRT4577_24128C.1.pep
PPPFLSAKKVAKHSVTQKKVAHRPRSRSKQASSIEMKYVANERTKPNPPKPRTAFFPGRRNRLWATRRWATAPEVASLECASGAFHDRRRRRSAPR

SEQ ID NO: 286217 - protein, 285 aa, Zea mays
  unsure (1)..(285): unsure at all Xaa locations
  Clone ID: MRT4577_24129C.1.pep
HGVDSLRKKQNVSLSGYLHGWSSETSAPDLPYSLSMLLDLVADENGSVVLGVAGKSYRDMLMSWACRLRRLRVTNFLVCALDHETYEFSILQGLPVFRDPLSPTNVSFDDCHFGTKCFQQVTKVKSRIVLEILRLGYNVLLSDVDVYWFGNPMPLLYSLGLATFGAQSDEYNETGPINLPRRLNSGFYFAXXDNATIIAMEMIVKHAASSGLSEQPSFYDVLCGENGTNRIGEDRCLEPNTNLTVVFLDRDLFPNGAYKGLWEKRDVRATCKELGCXIIHNNWIN

SEQ ID NO: 286218 - protein, 72 aa, Zea mays
  Clone ID: MRT4577_2412C.1.pep
ALLLPLAVLPALGDCRPGFSVCGAPLGALPWAGAGSVCPRARGSLFSPPPLVWVASRLSGVCRKLRAEFRAY

SEQ ID NO: 286219 - protein, 89 aa, Zea mays
  Clone ID: MRT4577_24130C.1.pep
IHGDARPGAVCPRATAGGRCTRGGESRRQSPATRCMGNLAPRLLTDHSCLESCGGIRQYGVSPCRLHRSSSAFSRAPVDGGASRAWARG

SEQ ID NO: 286220 - protein, 199 aa, Zea mays
  Clone ID: MRT4577_24131C.1.pep
MFLPIFFSSQLTPTSEPRVNFNVHDKKFLANVHVTQTSTCKYIYCCLFTGPINLPRRLNSGFYFARSDNATIIAMEMIVNHAASSGLSEQPSFYDVLCGENGTNRIGEDRCLEPNTNLTVVFLDRDLFPNGAYKGLWEKRDVRATCKELGCFIIHNNWINKRRKKVHRQMVSGLWDYDPTSRQCLQEWSAQNDGAIPFV

SEQ ID NO: 286221 - protein, 27 aa, Zea mays
  Clone ID: MRT4577_24132C.1.pep
FSLMALWPLCLELNKSLSNFIDCLEFY

SEQ ID NO: 286222 - protein, 67 aa, Zea mays
  unsure (1)..(67): unsure at all Xaa locations
  Clone ID: MRT4577_24133C.1.pep
RATVDGWGQQMNRKXAAVPVSSLAFCCQFSSADEGGLHAATGTDYRVQYRNVLLMMGNRIMNDMLVG

SEQ ID NO: 286223 - protein, 111 aa, Zea mays
  Clone ID: MRT4577_24134C.1.pep
RTRGNAPASGGSTLVEGSILKLALMYLLAGTAGYTGGASCAGSALARHMLERGAYCLGCRVATTMHKGATSTAGGIAGGLTGTWTSNWLISMRTRMDPAFETPNKPSRTLF

SEQ ID NO: 286224 - protein, 97 aa, Zea mays
  Clone ID: MRT4577_24135C.1.pep
EHGRIEHTLGCSRAQGIQSQQKAGPMVLQGCEDIMLIRKNNRAWCRSSRAYQIMLSRTCLIAESAARSASAVNSVWFWALKWPSLQLVGQRNVRPVE

SEQ ID NO: 286225 - protein, 138 aa, Zea mays
  unsure (1)..(138): unsure at all Xaa locations
  Clone ID: MRT4577_24136C.1.pep
MTAAEVEAAKDIAEEKAVVPLPPSPAKPADDDSKAIVALVVKDAYLAKIVSEKRLSLITAWEESQKARADNXEQLQKKKAAYEEKLKNKLAMLXXXXXXXXXXXEARPGEETILAEEMAAKYRAKGEGPTKLFGLLKA

SEQ ID NO: 286226 - protein, 94 aa, Zea mays
  Clone ID: MRT4577_24137C.1.pep
TERGEFHLCSSRAPPQPCRPSPARAVCFYHSDSLFFFPLREWAKHLAGHIALLWTFVVIPGEPFHRRPAYCTNATPIPQQGQFSDAQVPHPTTT

SEQ ID NO: 286227 - protein, 183 aa, Zea mays
  Clone ID: MRT4577_24138C.1.pep
MTAAEVEAAKDIAEEKAVVPLPPSPAKPADDDSKAIVALVVKDAAAGKPSTAIIGGSTERDAYLAKIVSEKRLSLITAWEESQKARADNRAAKKLAFITSWENAKKAEMEAELRKIEEQLQKKKAAYEEKLKNKLAMLHRTAEERRAQTEARRGEETILAEEMAAKYRAKGEGPTKLFGLLKA

SEQ ID NO: 286228 - protein, 154 aa, Zea mays
  Clone ID: MRT4577_24139C.1.pep
DDDSKAIVALVVKDAAAGKPSTAIIGGSTERDAYLAKIVSEKRLSLITAWEESQKARADNRAAKKLAFITSWENAKKAEMEAELRKIEEQLQKKKAAYEEKLKNKLAMLHRTAEERRAQTEARRGEETILAEEMAAKYRAKGEGPTKLFGLLKA

SEQ ID NO: 286229 - protein, 215 aa, Zea mays
  Clone ID: MRT4577_2413C.1.pep
LLAYFFWRCSGKGKGGRRRHRRGGSESGGGEDGSWWTERLRAAHNRLAPVSLFQKPIVKVKLADLMAATQDFSSSHIVVAGSSRAGTAYRAVLRDGSALTVKRLHSCPLSEKAFRAEMCRIGQLRHPNIVPLLGFCVVEDERLLVYKHMESGALSSVMKKKPGEEAPLLDWATRLRIAVGAARGLAWLHHGFQVPQIHQNLSSSAVLLDEDYEAR

SEQ ID NO: 286230 - protein, 182 aa, Zea mays
  Clone ID: MRT4577_24140C.1.pep
MAAEVEAAKDIAEEKAVVPLPPSPAKPADDDSKAIVALVVKDAAAGKPSTAIIGGSTERDAYLAKIVSEKRLSLITAWEESQKARADNRAAKKLAFITSWENAKKAEMEAELRKIEEQLEKKKAAYEEKLKNKLAMLHRTAEERRAQTEARRGEETILAEEMAAKYRAKGEGPTKLFGLLKA

SEQ ID NO: 286231 - protein, 83 aa, Zea mays
  unsure (1)..(83): unsure at all Xaa locations
  Clone ID: MRT4577_24141C.1.pep
MAPRLACLLSLDMAAIVGPPCTAQNSPQDYVHPHNTASAHVGVGPASCHDTAAAYPQSYSAHPQGDCKLIHSGGSYXENLLWG

SEQ ID NO: 286232 - protein, 90 aa, Zea mays
  Clone ID: MRT4577_24142C.1.pep
AASKRHCPITTRTSGRWRCFRPGTQSRQIEPLSMRRRGMGGCTPEGPPADRWRYQWLGLQALLLLPGSRTAESHGNPRKAKRTFGPGSSR

SEQ ID NO: 286233 - protein, 199 aa, Zea mays
  unsure (1)..(199): unsure at all Xaa locations
  Clone ID: MRT4577_24143C.1.pep
IISFNNNLNCFNLITYIYILQEQRLPERKQNTEYSTKKKRHAKKKKKRGGPRGLFKXEKKKPRKKTXKTKKQTSWEKKTRGPNTSYREGNYKSLHNDKKRGDWEKPKLNQQKGRDKKKKXQRPLLEKRTKRMRGQRKAGRERKTGAPLKKTLKKKKLLDTGGGKKKKAQKTTPTKIGENKKKKKKTSGGRPTKGGKGGG

SEQ ID NO: 286234 - protein, 102 aa, Zea mays
  Clone ID: MRT4577_24144C.1.pep
MEILGRDWVDLYCRTPNGSSLFRVPRDCAYWELIHEALRDFWWGNVVPARELALLGKDDEARSFEPQPKHRLTNLVLYRSRKLASEAKLLCMDVGGHVEFFQ

SEQ ID NO: 286235 - protein, 57 aa, Zea mays
  Clone ID: MRT4577_24145C.1.pep
DPCMAGPLSAQIYSMLLLRDGKENYRLVLYVDSGDEDGERGGAPFFCIDGAAKQGAN

SEQ ID NO: 286236 - protein, 95 aa, Zea mays
  Clone ID: MRT4577_24146C.1.pep
KHAAYAWPLYKPVDVEALGLHDYCDIIKHPMDMSTIKSNLEAREYRDAQEFGADVRLMFSNCYKYNPPDHEVVAMARKLQDVFEMRFAKMPDEPE

SEQ ID NO: 286237 - protein, 250 aa, Zea mays
  Clone ID: MRT4577_24147C.1.pep
MAGEDCRSGAEMDALVRRLKLHRPSPSPYDPDPAAAPVPATAGDGELFRPRRAAVLVCLFRGDGGELRVILTKRSSSLSTHSGEVSLPGGKVEEGDADDVATALRESKEEIGLDPALVTVVASLEHFLSKHLLVVVPVVGILLDRQAFKPALNIAEVDEIFDVPLEMFLKDENRTSEEREKMGQTFTVHYFTYENGIQKYLIWGLTARILIHAASVVYERPPDFTERRAHFKLPKFTKDCSSMLAGPAKH

SEQ ID NO: 286238 - protein, 100 aa, Zea mays
  Clone ID: MRT4577_24148C.1.pep
AVIFQFHSLKTFPISLSCKCKGFQNMRHMSFIPTRLLWLSESAQVANQAGSGRPLSTFPGDSETTQVRGNKTHSSTCYPLVIQKLEPLFHASMKARTGQV

SEQ ID NO: 286239 - protein, 55 aa, Zea mays
  Clone ID: MRT4577_24149C.1.pep
ISPASWSKTPSVYLQGGGVPISPKGRATGVDPARRTAPCKSGFMLKQGRSLVLLE

SEQ ID NO: 286240 - protein, 78 aa, Zea mays
  Clone ID: MRT4577_2414C.1.pep
MFYGNLSCCYLIDQLTMVPHYLKKKKKKKKKKKKKKKKKKKKKKKKKKKKKKKKKKKKIKKKKKKKKKKGGAVLRDQI

SEQ ID NO: 286241 - protein, 91 aa, Zea mays
  Clone ID: MRT4577_24150C.1.pep
GKTKKLIDRWGFPHFQLGEIGRGKNNNLGKGLNTAFKILVLTCPPHQRGGGSPSCPREKKLLRTSSFKTKPAGQIGARGVHMAIKTICRKF

SEQ ID NO: 286242 - protein, 85 aa, Zea mays
  Clone ID: MRT4577_24151C.1.pep
TKAPSSWPVLLNWNHRLGILETTAKHKRKIKPHIYVLGDTALRRVGLQLNINTIGLHNVQRKPRMSGGNYSHGHDPTEYTGSDLR

SEQ ID NO: 286243 - protein, 92 aa, Zea mays
  unsure (1)..(92): unsure at all Xaa locations
  Clone ID: MRT4577_24152C.1.pep
IGPTRGRIRRRSQQGMVIRRGRGRGRSKDDSRERRVGINIVGGRNVAMAPLLRGSFRCRVVEWMMWINWMMIRISXGRVPSPRELXXEYLKA

SEQ ID NO: 286244 - protein, 42 aa, Zea mays
  unsure (1)..(42): unsure at all Xaa locations
  Clone ID: MRT4577_24153C.1.pep
ALFAASCGCLCALAYRSVVSPPXPPXLSPLLPPXSPLAVXRV

SEQ ID NO: 286245 - protein, 123 aa, Zea mays
  unsure (1)..(123): unsure at all Xaa locations
  Clone ID: MRT4577_24154C.1.pep
PAYASARPPRRQAXEYXGSEREELEYQTDGEDFEHSPASGKREDQLDEEEEYEEDVEEEEEAPLSDEKMEAPKRKRKSGGGGQKPEELVFEEEDQDHHDSPAKKQAGVPDCKKAVVFDDSDQD

SEQ ID NO: 286246 - protein, 106 aa, Zea mays
  unsure (1)..(106): unsure at all Xaa locations
  Clone ID: MRT4577_24155C.1.pep
NSXLYATHPDSVHIXNVLSIINPKPPDIKACFIFSPGAPTATCGSSIFDRPPYYDYPMVTMNSPSHHISSVMLHKVYNIFTTILHLADCTVLVEQRSWNLLDFALL

SEQ ID NO: 286247 - protein, 47 aa, Zea mays
  unsure (1)..(47): unsure at all Xaa locations
  Clone ID: MRT4577_24156C.1.pep
XAXXXXPXPFXSGEWXEWSSQXGLXAPXXAVRLXGNLRNAKLDGGVL

SEQ ID NO: 286248 - protein, 100 aa, Zea mays
  unsure (1)..(100): unsure at all Xaa locations
  Clone ID: MRT4577_24157C.1.pep
FIAHRQKFCIRHSCQPSNTHQYSLNTFSEPSLLSLILYPPLGTIFVEAVSNQTSLVPYGYCISAINWTQQNKEALLLLASSFRTSQFTDSPCIAXLFXPP

SEQ ID NO: 286249 - protein, 135 aa, Zea mays
  Clone ID: MRT4577_24158C.1.pep
GGARKENEGAPTPEKQKKEAKHKEIKRGRHPGGSTRGGTTPRTGRGTGPNQNQPRPPQPPGPIKVWGSSKPPETAGAASTAESDKKRWGPRQARGGRGGKQAGATRRPEHKQGSDPAGTGNREAHGKKKKKYPPT

SEQ ID NO: 286250 - protein, 77 aa, Zea mays
  Clone ID: MRT4577_24159C.1.pep
VIRTRLMPVGSFCCFRARPHATSTYVIVVDHPVECSLCQHVPAALHYCALQIERVVLSAHHVRTAVRSFPVVAHNGL

SEQ ID NO: 286251 - protein, 170 aa, Zea mays
  unsure (1)..(170): unsure at all Xaa locations
  Clone ID: MRT4577_2415C.1.pep
MALAAIYNLFIINKSGGLIYYKDYGSAGRMDTNDSLRLASLWHSMHAISQQLSPTTGCTGIDLLQAHNFDLHCFQSLTXKYILWGRLIVNICSRNIELTYAVIIEXTKFFVVCETGAPNMEMLLKAIYELYTDFDLKNPFYEMEMPIRCELFDHNLXQVIQKDRVALLRR

SEQ ID NO: 286252 - protein, 68 aa, Zea mays
  Clone ID: MRT4577_24160C.1.pep
WENAPRCWGISPGWWVQNFVPNMGSGWLLPPPRAVLAQGFSMLIPSIFYGPEQTIGQPSFWQANSFKS

SEQ ID NO: 286253 - protein, 75 aa, Zea mays
  Clone ID: MRT4577_24161C.1.pep
FYYLDIFFHNFTSFYYKELLQKIKISIFEKYIPLHRLQRNNAAKRHGPSCCCHSHTEHHQSSLRAKVIYPNMCLQ

SEQ ID NO: 286254 - protein, 355 aa, Zea mays
  Clone ID: MRT4577_24162C.1.pep
MRRPSPLNLAMVRGGSRRSNTVKTLQAPGASTSGAESSAVEMGTEKSEVYSTNMTQAMGAALTYRHELGMNYNFIRPDLIVGSCLQSPLDVDKLRKIGVKTVFCLQQDSDLEYFGVDIRAIQDYSLQFKDIVHCRAEIRDFDAFDLRLRLPAVVSKLHKLINCNGGVTYIHCTAGLGRAPAVALAYMFWILGYSLNEGHRLLQSKRACFPKLEAIKLATADILTGLSKNTITLKWEADGSSSVEISGLDIGWGQRIPLTYDEEKGAWFLEKELPEGRYEYKYVVDGKWLCNEHELITKPNADGHVNNYVQVSRDGTSDEEKELRERLTGRDPDLTDQERLMIREYLEQYADAAER

SEQ ID NO: 286255 - protein, 119 aa, Zea mays
  unsure (1)..(119): unsure at all Xaa locations
  Clone ID: MRT4577_24163C.1.pep
ADGPPSVEILGLDIXWGQRIPLTYDEEKGAWXLEKELPEGRYEYKYVVDGKWLCNEHELITKPNADGHVNNYVQVSRDGTSDEEKELRERLTGPDPDLTDQERLMIREYLEQYADAAER

SEQ ID NO: 286256 - protein, 119 aa, Zea mays
  Clone ID: MRT4577_24164C.1.pep
IIIIIIHSQEGAYSSNIMVSTVVLRYYLCYFCTAAVQQYVQFAPSSSFSKYASRTCPFARLSYEYLIDKRGEARPLRKGRCGQVGFGPSSHGVSLLFLSHHHSSAVHVIRIYLLVPSTT

SEQ ID NO: 286257 - protein, 81 aa, Zea mays
  Clone ID: MRT4577_24165C.1.pep
SFFSQPAQPACPAREPAHARVRAPFLRAAQPAAAPRPTIARRRSLRNRSPTRLLAAAAVSQPARGGGGQPACSQRLWPARH

SEQ ID NO: 286258 - protein, 328 aa, Zea mays
  unsure (1)..(328): unsure at all Xaa locations
  Clone ID: MRT4577_24166C.1.pep
MDKGKSVVAELAASFSDVRVTPRQNPKTKSFLPSPSFSLSPNIDFKIVLQILPRRKLTIMSIARRRRLLNDEVLTSLAENSWEILDISGSDVTDAGLATVANVCSNLRAVDISRCEKITTAGCXEIVCHCPSLEILRCGGCPRSEVTARRCLNLLKPKLNALEEDSWEELDTLDIGGGAESLRWLVWPMIDDKSKVTLAVECPRVTVNPQPSLFDLSGYSKVPIEALSSVPLDHSVVEDIDPKTWAVSAAPPRAVAPANPNVPSAPPEIPMAERFRLAYVEREARLAPKRAKRERQRRRRAERDYMMVDIDARSVALAAQASRNLRKS

SEQ ID NO: 286259 - protein, 338 aa, Zea mays
  Clone ID: MRT4577_24167C.1.pep
TNVVGCQLQAPGASTSGAESSAVEMGTEKSEVYSTNMTQAMGAALTYRHELGMNYNFIRPDLIVGSCLQSPLDVDKLRKIGVKIVFCLQQDSDLEYFGVDIRAIQDYSLQFKDIVHCRAEIRDFDAFDLRLRLPAVVSKLHKLINCNGGVTYIHCTAGLGRAPAVALAYMFWILGYSLNEGHRLLQSKRACFPKLEAIKLATADILTGLSKNTITLKWEADGSSSVEISGLDIGWGQRIPLTYDEEKGAWFLEKELPEGRYEYKYVVDGKWLCNEHELITKPNADGHVNNYVQVSRDGTSDEEKELRERLTGPDPDLTDQERLMIREYLEQYADAAER

SEQ ID NO: 286260 - protein, 79 aa, Zea mays
  Clone ID: MRT4577_24168C.1.pep
SPSNPKNLIFIAFPQQKHILNNCFLLKHFIQTAHQQFSCHPDPLTPLKGDPLNLSIHYHIPHQVYLFLHPFQSHFTYYY

SEQ ID NO: 286261 - protein, 72 aa, Zea mays
  unsure (1)..(72): unsure at all Xaa locations
  Clone ID: MRT4577_24169C.1.pep
LRTMITCSFPLMVFHTHSASXECPPMWNPEYWQHTRYDPSSGANIDFSSSPLTIPSISREQYVVGGLAHMGP

SEQ ID NO: 286262 - protein, 84 aa, Zea mays
  Clone ID: MRT4577_2416C.1.pep
RFGLLGYDNPPQFIPPKGLPKSPLVVCVARYQAFFSWVRSGFEGLNYGALFSSFLPQSESIQCKRTEAFKKKKKKKKRARAAEN

SEQ ID NO: 286263 - protein, 119 aa, Zea mays
  Clone ID: MRT4577_24170C.1.pep
FLARRRPWWLDASSEKELGLVRRQRVQPHSTATASSFFGFRRNESIRRRAGGRQIQIFGMTGMLPCRSRRLTSELRRWNQGCVVAVFRILYGRTFHRKPRIGTDRCCARVNVGSVPLHQ

SEQ ID NO: 286264 - protein, 89 aa, Zea mays
  unsure (1)..(89): unsure at all Xaa locations
  Clone ID: MRT4577_24171C.1.pep
RCPSDRSSRIKRSPLTGDGGDTYIHVDRYVRMYALHCLRCEELIFSGAPRFLEAXALRVCSCXCXAVSFXVGFPPCXCVCCPFLRRCPS

SEQ ID NO: 286265 - protein, 69 aa, Zea mays
  Clone ID: MRT4577_24172C.1.pep
MAAMPAPAAGLSFLVLFVFAAALPALSADDLNTDAQALQALRSAVGRSALPSWNSSTPTCQWQGVTCES

SEQ ID NO: 286266 - protein, 141 aa, Zea mays
  unsure (1)..(141): unsure at all Xaa locations
  Clone ID: MRT4577_24173C.1.pep
CLLSQPTVYRFLAGALQYLGVTRPDISYAVQQVCLFMHAPRDTHMSLLKRILRYVRGTLDYGLHIYRSSSLDLLAYSDADWAGCPDTRRSTSGYCVFLGANLVAWSSKRQHTVSRSSAEAKYRGVXNAVAEICWLRQLLTE

SEQ ID NO: 286267 - protein, 85 aa, Zea mays
  unsure (1)..(85): unsure at all Xaa locations
  Clone ID: MRT4577_24174C.1.pep
QHSKAHIVYPTDGSAKYFSLLMLLWCLLQVPATGDLFSRNAHNAPIXFPCFPRTLSASGCTYGIVKYPGWCEPYSDTKQEQSAAW

SEQ ID NO: 286268 - protein, 174 aa, Zea mays
  Clone ID: MRT4577_24175C.1.pep
QLLQWSDDTWQSDGGPNWSDASPRWKGPIEIPKEMFLFSVQWGTGPVRSACVVHNSNSFLIGYLGAWVYKYTPISTPSQHQVTQEQVLHSYALEKHVKVIRAPIIVRLSCVVVMQLCSFFEVLFLCFCVCSTRPSCCSLELLLTSTVYGCKRLRSVEILVRRIYKEESWPQVDH

SEQ ID NO: 286269 - protein, 150 aa, Zea mays
  Clone ID: MRT4577_24176C.1.pep
MGSDTETEKKKTPVALAPIAKPLAGKKLSKKTLKLVRRASEAKCLKRGVKEVVKSIRRGSKGLCVIAGNISPIDVITHLPILCEEANVPYIYVTSKEELATAGTTKRPTCCVLVMTKPAKGEITEEVKEKLESEYKQVVTEVAEVTSSMF

SEQ ID NO: 286270 - protein, 220 aa, Zea mays
  Clone ID: MRT4577_24177C.1.pep
IAGLPVRFLPRHGRGHPVPPTAINFRANIDALKRAGVTDLVSISACGSLREDLAPGHFVLVDQFVDRTFAREKSFFGPGLVAHVSVADPVSPLLVDAIEKAVQAEGIVYTRGGTYLVMEGPQFSTRAESNLYRSWGMDVIGMTNMPEAKLAREAEICYATVAMVTDYDCWHDDHADVDVASIITIMNDNTEKAQRLVLRLARDFPREHPPCPGRPAPDCR

SEQ ID NO: 286271 - protein, 31 aa, Zea mays
  Clone ID: MRT4577_24178C.1.pep
MTWAHVALGEHFRNFYVKKKGFSACFPFLAA

SEQ ID NO: 286272 - protein, 221 aa, Zea mays
  unsure (1)..(221): unsure at all Xaa locations
  Clone ID: MRT4577_24179C.1.pep
TPAGFGPEFPGRPTRPLPLSKGDVHKKKEIXQDVTLHDLDVANARPQGGQDILSMMGQLMKPKKTEITDKLRGEINKVVNKYIDQGVAELVPGVLFVDEVHMLDIECFTYLHRALESSIAPIVIFASNRGNCVIRGTEDITSPHGIPLDLLDRVMIIRTMLYTPQEMKQIIKIRAQTEGINISEEALNHLXEIGTKTTLRYSVQLLTPANLLAKINGKDSI

SEQ ID NO: 286273 - protein, 78 aa, Zea mays
  Clone ID: MRT4577_2417C.1.pep
KSDGGKNVFLPKMPTYGTCEKGSSQNSLKRGGLKNNRWFVWWFLKAVQKAIEVWNPKKKGSVKTPKLSLGQVAKIYSP

SEQ ID NO: 286274 - protein, 59 aa, Zea mays
  Clone ID: MRT4577_24180C.1.pep
HVMSCHVLMSHHCNKVWVIHVLKNCFSSSTTQNNSNMVQYYRVLPLLTRVTPWSTINQF

SEQ ID NO: 286275 - protein, 449 aa, Zea mays
  Clone ID: MRT4577_24181C.1.pep
MSASVGRTRVGRYELGRTLGEGTFAKVKFARNVETGENVAIKILDKEKVLKHKMIAQIKREISTMKLIRHPNVIRMYEVMASKTKIYIVMELVTGGELFDKIASRGRLKEDDARKYFQQLINAVDYCHSRGVYHRDLKPENLLLDASGTLKVSDFGLSALSQQVREDGLLHTTCGTPNYVAPEVINNKGYDGAKADLWSCGVILFVLMAGYLPFEDSNLMSLYKKIFKADFSCPSWFSTSAKKLIKKILEPNANNRITIAELINNEWFKKGYQPPRFETADVNLDDVNSIFDESGEPAQLVVERREERPSVMNAFELISTSQGLNLGTLFEKQTGSVKRETRFASRLPANEILSKIEAAAGPMGFNVQKRNYKLKLQGENPGRKGQLAIATEVFEVTPSLYMVELRKSNGDTLEFHKFYHNISNGLKDVMWKPESGIVEGDEARQRRSP

SEQ ID NO: 286276 - protein, 49 aa, Zea mays
  Clone ID: MRT4577_24182C.1.pep
EVVRKVESTKTDSRDKPLKDVIIADCGKIEVEKPFAIAKEYGTGTSFFE

SEQ ID NO: 286277 - protein, 84 aa, Zea mays
  Clone ID: MRT4577_24183C.1.pep
TSKAYCRITSTWPSPACHALRESYYSYAPRRICRCCSRRPPSGVSAINIYYFPSKIFIVLLVLISRFSEVFLVSHIDQGMHGHG

SEQ ID NO: 286278 - protein, 808 aa, Zea mays
  Clone ID: MRT4577_24184C.1.pep
MAVPIQRPSARHVSEIGHVGVRCGAPAPEETDTAPTLASQPHARKSKWPPQARNQHQRFARLLRCPLPSASDRNQRWIRRPRLPEEMNGRGTGGGGGGEDEMEEDSGPSCAQGEGAGNKERVVLMWGYLPGVSPQRSPLLGPVPVRLPPTAATAAGDGWRDVCGGGCGFAMAISESGKLLTWGSADDMGQSYVTAGKHEETPEAFPLPSSVVIVRADAGWAHCVAITDEYDVYTWGWKECVPTGRVIGDQSSVGTMEKDERQMAMATDQGVSPRSQVSRTSSGAAAGSSESRGTDDSTKRRKLSLAKHGPESSTSSDESLSAPPCVVTFSTGVKIVAVAAGGRHTLALSDLGQVWGWGYGGEGQLGLGSRIRTVSSPHPVPCIESALYTKDSPSAMKGNKAAEGHVSKVLGNCVRAIACGGRHSAVVTDSGALLTFGWGLYGQPQSVGDCSSAAGCRTPGEGAGTQGAVPPPAGVQDCKGGAREERQGRCKRGEERTEETCKEPVLAARCGQGNTDDVLSPTCVSSILGIKMQDVAADGDVYSFGGNQFGQLGTGSDQAETLPKLVDATSLENKNARSVSCGARHSAIITDEGEVFCWGWNKYGQLGLGDSMDRNVPCSNCIGAIDGSASDAGVLRSALGRGFHVPEGKFYLVDGGYANTTSFIAPYRGVRYQLSEFRSRRSYANYKELVRHRHASLRNHIERAIGFLKERFPILKFGTLKPIQSQVKIPAGAAVFHNVIKEHHGQEEWLDHLPSNIEPSQYVDVPEGEVNYPTGSESVDGNNLRDDIAMQMWVGQNGWNSDGWRSIN

SEQ ID NO: 286279 - protein, 79 aa, Zea mays
  Clone ID: MRT4577_24185C.1.pep
TPRSCTRARRWRLPRWPPVRRGKGTAAAAAAAEGARPTCTSPMAASHKYYIVPFPSIIHRQDDLSSSSSVGLDLCETMV

SEQ ID NO: 286280 - protein, 42 aa, Zea mays
  Clone ID: MRT4577_24186C.1.pep
QKDDLYYKESLISTPNPETQISRFYRKKGVLPCCQFQSTITS

SEQ ID NO: 286281 - protein, 132 aa, Zea mays
  Clone ID: MRT4577_24187C.1.pep
HASGIARGDMSFTSTEPVLHVASVDEPMLHVPRAGSEINVAGPSVGSETNVVGLTLDREACEVQSPPSGTSVHGSGKKRKKSQVASVLDDYLEHKMNQTDKTVEAFLEKKTRGEESMDRCIHIFEAMEDLTD

SEQ ID NO: 286282 - protein, 122 aa, Zea mays
  unsure (1)..(122): unsure at all Xaa locations
  Clone ID: MRT4577_24188C.1.pep
NPGDQSSREQRRVHXTCAVNVSPGTCELVASVALYLRLAGKRTTTDGVELVKRVMGGCQFREEQAGVELLARCREDDDATGLVVVKPVHLRLRLVCGDHPAGATNKETISTESSLKINVTLD

SEQ ID NO: 286283 - protein, 529 aa, Zea mays
  Clone ID: MRT4577_24189C.1.pep
MNGSGGGGEGGGGAEEMEEDGVPGCAKGAGAGNKERVVLMWGYLPGVSQQRSPLLGPVPVRLPPAAAAAAGDGWRDVCGGGCGFAMAISESGKLLTWGSADDMGQSYVTAGKHEETPEAFPLPRGVAIVRADAGWAHCVAITDEGDVYTWGWKECVPTGRVIGDQSSVGTKEKDERQMAMATDQGVSPRSQVSRTSSGAASGPSESRGTDDSTKRRRLSSAKHGPESSTSSDESLSAPPCVVTFNTGVKIVSVAAGGRHTLALSDLGQVWGWGYGGEGQLGLGSRIRTVSSPHPVPCIESALYSKDRPSAMKGNKAAEGHVSKVLGNCVRAIACGGRHSAAVTDSGALLTFGWGLYGQCGQGNTDDVLSPTCVSSILGSKMQDVAAGLWHTVCTSVDGDVYSFGGNQFGQLGTGSDQAETVPKLVDATSLENKNARSVSCGARHSAIITGISIVSSCTPIYLLTRPRYLYMLMQDEGEVFCWGWNKYGQLGLGDSMDRNVPCSVRVDAYHPLNVSCGWWHTLVLAESPT

SEQ ID NO: 286284 - protein, 90 aa, Zea mays
  Clone ID: MRT4577_2418C.1.pep
QASRERTAIGVLENQHRGGETGDGALRPAAAAAHSSSFPHFPSSGQEGYSASSVTSPQPTYHRHHGLRLRLPQPSRARKRRNLCLLPARG

SEQ ID NO: 286285 - protein, 164 aa, Zea mays
  Clone ID: MRT4577_24190C.1.pep
AVTDSGALLTFGWGLYGQCGQGNTDDVLSPTCVSSILGSKMQDVAAGLWHTVCTSVDGDVYSFGGNQFGQLGTGSDQAETLPKLVDATSLENKNARSVSCGARHSAIITDEGEVFCWGWNKYGQLGLGDSMDRNVPCSVRVDAYHPLNVSCGWWHTLVLAESPA

SEQ ID NO: 286286 - protein, 135 aa, Zea mays
  Clone ID: MRT4577_24191C.1.pep
SLAVTHAPDFKHPDHSVNGDSLTLDDPQSFIANFGSVRLSGIGGHTVIGEDVAISQDAEQSVNPNTQAEHEVCKDHPEIDLDESELSGTGPDQGQRMRKQPRDHRGRWSRLSILCFPQPSWRSGHLRSQRLHLPG

SEQ ID NO: 286287 - protein, 56 aa, Zea mays
  Clone ID: MRT4577_24192C.1.pep
QRRQRRPPQLLLASLLAGVVVVVFFEVCERRDWSARQCSCAAHLRISVLTQAPDLI

SEQ ID NO: 286288 - protein, 98 aa, Zea mays
  Clone ID: MRT4577_24193C.1.pep
PYERSGADIVPAGYELDDLMVYGQWLKDAGQHSVRAEDLAQLVLNVLQMAIGEAERNTDDLLDQLTELDYLLLVLHLITNLLLNSLIEQIRLLLMVPD

SEQ ID NO: 286289 - protein, 93 aa, Zea mays
  unsure (1)..(93): unsure at all Xaa locations
  Clone ID: MRT4577_24194C.1.pep
FKAASDDLMMLKNASLEEIQTIQRLKEERDTVLHQNHXMHREXLDVLSXRRNPHRRXAGFSLXTFAAFXAGLIXVLLXGLLXMALILPRPAPG

SEQ ID NO: 286290 - protein, 66 aa, Zea mays
  unsure (1)..(66): unsure at all Xaa locations
  Clone ID: MRT4577_24195C.1.pep
MLPPLSHLQRRLLAADPKXLLRPFSAHSPAPXPAARKPTTAVAVLWDLAASHPPSTLPLYDAVVRL

SEQ ID NO: 286291 - protein, 74 aa, Zea mays
  Clone ID: MRT4577_24196C.1.pep
PRTGAQMLEIPRLQALIMSRKSQFILLIGPTFLSFNGLEPCKQRSSMPYQLRQEHSLARVAWPTAARPRRRSIR

SEQ ID NO: 286292 - protein, 69 aa, Zea mays
  Clone ID: MRT4577_24197C.1.pep
MDAVDSVVDPLREFAKDSVRLVKRCHKPDRKEFTKVAARTAIGFVVMGFVGFFVKLIFIPINNIIVGSG

SEQ ID NO: 286293 - protein, 165 aa, Zea mays
  unsure (1)..(165): unsure at all Xaa locations
  Clone ID: MRT4577_24198C.1.pep
MVKXSXEXXXPTKXXKGMXRDLRXXFKKXRETXFALXKLSLXKXKRYLEDVIAXKXXIPFRRYCXGVGXTGKGKFXHFNGXXRWXVKXXGXILDLLKNVESXVDVKRVXVDNLXYFSHIQVNKAQKQRXRTYRXHGXRINPDMSSPCQIEHXSLKEKEEXVKKKA

SEQ ID NO: 286294 - protein, 194 aa, Zea mays
  unsure (1)..(194): unsure at all Xaa locations
  Clone ID: MRT4577_24199C.1.pep
MMLSGHGGGRRLFTASQXQELEHQALIFKYMASGAPVPHDLVLPLRLATGVDTAPSLAFPPQPSPSLAYWGCYGAGAPFGRKAEDPEPGRCRRTDGKKWRCSREAHGDSKYCEKHIHRGKSRSRKPVEVTSPAAYRPSAFSISPPRAADAPPPPPGLGHPQQQHLRHGALSPAGRAHAAGALQLHLDSSLHAAS

SEQ ID NO: 286295 - protein, 117 aa, Zea mays
  Clone ID: MRT4577_2419C.1.pep
NQADPSRRSEVVFGAGGRASSKVSWQAYVDDHLLCDIEGQHLSAAAIVGHDCSVWSQSENLIELKPEEVADMIKDFDEPVNYRPTWSKGKRYPVHRDPCLDHNNHAKGESFDLGKYI

SEQ ID NO: 286296 - protein, 664 aa, Zea mays
  Clone ID: MRT4577_241C.1.pep
MAKCLLFAKFLKSIAQEDTISSSSEQDVAVKISCELAQKHWQSALEGLGDTILVNQETQFWQVASAMLDYIMGIPNVLAWGNVLNATCSAVKHFCSHAPRLSWRLQTDKWLSLLVSGGIEGFKNSEICLIDLFCTMLNHSEPEQRFVAVQQLGRIINSTSSTEADLKYPNYDQNFLISVSTVTSLLVTHTWDSVAALALHDSSMLLRNHAMALLTEYVPFVDRKHLQSFLSSSNGILTGLGQLSGVIEEGYFTRMSLLLFSKACLYSNPEDIALIPECVWQKLENMQTSTGGFGYMEKDLCLALCQLKSESDATTVAKVLSGCNSQPVSPDFKSIRESILQVMSSLSSIEAYFEFFAARSAQEHEELEEAEIELELIEKEKSVPNFVEHTNDTMVLAMPSYDRDGSEVNKRLQQIRENIRSLERSRLKEEITARRQKKLLLRHAREKYLEETCSRETELMQELDRERALEMEREVERQRQLDIERAKSRELQFNIDLEKEKQTQRELQRELEQVELGRSSRREFSANPNSRSRERYRERDGGGRAQQEAGSLRSSSSRGQEGGSAQAPAPAGPGPTVMLAGSRTFSGANLPTILQPRERAADEDSAWAEDASSNGDPELDGVRPHGPRGSRSSSSRQVAERRERDGTAAGTGRREGKWERKQHP

SEQ ID NO: 286297 - protein, 65 aa, Zea mays
  Clone ID: MRT4577_24200C.1.pep
MPQASSPPEPAMPHEAHEPFRLRCSRCPDKCTWSGVCRVRLGHSVIGLTALGAMRAAHRSMRFTL

SEQ ID NO: 286298 - protein, 66 aa, Zea mays
  Clone ID: MRT4577_24201C.1.pep
FPWHSGLEPSCQALGRPQVFFFLWNNFINNGQVFWTCCVFQRPNTCLPRGKRDFSQMVNSFLRTLI

SEQ ID NO: 286299 - protein, 119 aa, Zea mays
  Clone ID: MRT4577_24202C.1.pep
SFSADAHRKQQKDKQEKSETEDAAPKNMAASSNQDQRQTLKFGFSKMAPSKVDISRIPFNLFAFQDFARNVGSMTYKLLRCSLLIGKSCSAVEFLWPQATAASSCRIRLHISFPRTSNI

SEQ ID NO: 286300 - protein, 212 aa, Zea mays
  unsure (1)..(212): unsure at all Xaa locations
  Clone ID: MRT4577_24203C.1.pep
ERKCLIWCETHAGSAGTECTREILLGWDPKYEHDQTSCTGRPVIXIQRFDAXPQNLXTHPTHANPTTIGRFSPNGKXVTYGDASGCVRVXRRYGHRAXKAELSPLSRRVXDLRWTSDGLHIGDSGDGKGTAFGQEFVWDSATTAXEIDDHVRRVVXARDVHPTPPLHIPTXNEDCLANYYEGPAFKDKHSLKDRSNFVNCIREAPXGSKLIT

SEQ ID NO: 286301 - protein, 49 aa, Zea mays
  Clone ID: MRT4577_24204C.1.pep
RIVGTLAVYKGFFFLNATGPHTIVDGKEVVNFASAKYLGLIGNEKIIDS

SEQ ID NO: 286302 - protein, 137 aa, Zea mays
  Clone ID: MRT4577_24205C.1.pep
KGGEGRAPRRVPSLPPPPPPLSNTPSISAALRIALDPIQYIDSPPKIKGRRRKKVYNFGPSRFPAPTPVISTGRAQPIAVPAIHLEELKEITKNFSSDALIGEGSYARVYFGVLKDGTKSAVKKLDSSKQPDQEFLV

SEQ ID NO: 286303 - protein, 82 aa, Zea mays
  Clone ID: MRT4577_24206C.1.pep
TTTILGQGTKTRTQKGHPKQPFCRQTNTKGASFPSNNPPMPDRTRKMHPNNPPLNSHAREKKNPLAPPRTPNPHALNNAIHQ

SEQ ID NO: 286304 - protein, 377 aa, Zea mays
  Clone ID: MRT4577_24207C.1.pep
MGCFSCCCVADDDNVGRRKKHDDPYVPIPAHVYNFGPSRFPAPTPVISTGRAQPIAVPAIHLEELKEITKNFSSDALIGEGSYARVYFGVLKDGTKSAVKKLDSSKQPDQEFLVQVSAVSRLKHENVVQLVGYCAEGSTRVLAYEYATRGSLHDILHGKKGVKGAQPGPVLSWMQRARIAVCAARGLEFLHEKADPRVVHRDIKSSNILLFDHDVAKIGDFDISNQAPDMAARLHSTRVLGTFGYHAPEYAMTGQLSTKSDVYSFGVVLLELLTGRKPVDHTLPRGQQSLVTWATPRLSEDKVRQCVDPRLGDEYPPKAVAKMAAVAALCVQYEGEFRPNMSIVVKALNPLLHSRSGNRPTASSASHAAAAAERSGL

SEQ ID NO: 286305 - protein, 75 aa, Zea mays
  unsure (1)..(75): unsure at all Xaa locations
  Clone ID: MRT4577_24208C.1.pep
GRSAHASERIEWPAYDAVDIANGFEIRRYTDAMWLTSAPSEDMSCVAARRSGFLELVDYIQRKTAXKQTIDMTAP

SEQ ID NO: 286306 - protein, 76 aa, Zea mays
  Clone ID: MRT4577_24209C.1.pep
YIAFPQMSDGPGGGKGRSSMNITESQRRNCPSKESTLFDRHRRTSIQDFRRTLPSVKEEVCHKRKIKTEHLKKTIF

SEQ ID NO: 286307 - protein, 29 aa, Zea mays
  Clone ID: MRT4577_2420C.1.pep
IFFFFLRQQIRRLITTLNMNYFFSKMERW

SEQ ID NO: 286308 - protein, 289 aa, Zea mays
  Clone ID: MRT4577_24210C.1.pep
MDSLRGAKLPGVPKGGSALVKVALLGGAGLYAVLNSFYNVEGGHRAIVFNRLEGIKDKVYPEGTHLMIPWIERPIIYDVRARPNLVESTSGSRDLQMVRIGLRVLTRPMPDQLPKIYRNLGENFNERVLPSIIHETLKAVVAQYNASQLITQREAVSREIRKILTERANNFNIALDDVSITSLSFGKEFTHAIEAKQVAAQEAERAKFIVEKAEQDKRSAVIRAQGEAKSAELIGQAIANNPAFLALRQIEAAREISHTMAASSNKVFLDSRDLLLGLQQLNVGAKQKK

SEQ ID NO: 286309 - protein, 52 aa, Zea mays
  unsure (1)..(52): unsure at all Xaa locations
  Clone ID: MRT4577_24211C.1.pep
HPRHWHSGSIHHTTPKNSAERALKPSPFVQKFRTNHQRHICLWYSNMHYPXR

SEQ ID NO: 286310 - protein, 93 aa, Zea mays
  unsure (1)..(93): unsure at all Xaa locations
  Clone ID: MRT4577_24212C.1.pep
PGHPPSLSPIQFRDGRGVNQVHVLVARLAFVLALPAAIIRVGRFFSFVACVLLWGGGGVSSXLLLGLLCLLLLGSVSFSGFSFSVWPRCPFWS

SEQ ID NO: 286311 - protein, 96 aa, Zea mays
  Clone ID: MRT4577_24213C.1.pep
FMMALSPPTKESKAQVYKTPSCGCGLVARRKHKYMQLGEGTQGRRTAAQFHAIWILTAFLQQLLCRQLLFGHFGSPFLISTLMKAPFFKYFTFGHF

SEQ ID NO: 286312 - protein, 175 aa, Zea mays
  unsure (1)..(175): unsure at all Xaa locations
  Clone ID: MRT4577_24214C.1.pep
LPTASLMGDGDYALHPEPGADDVGVCWPGELDEQLVTELLCDDSLLLGALQQVPAAVDSEPQYCSRDTGASSSAPAACTSGGGGTVAEHQELLPQPEAVSRALCSVYTGPTIRDIEKALSTSRPPYPWSSRRYSPMHLFGAAGRAPERHTTKVRSCGGKTPSDGYRXRKYGQKSI

SEQ ID NO: 286313 - protein, 46 aa, Zea mays
  Clone ID: MRT4577_24215C.1.pep
PPHHFRIESIKQHCGNKEASGALKISSEKPPPVWRQVYYRTHSFYL

SEQ ID NO: 286314 - protein, 85 aa, Zea mays
  Clone ID: MRT4577_24216C.1.pep
PQVQPNRHSPLSKESLGKLVSSLRLRGRTVRGRRITSSRSCYVFFTCLWSYERLHCVKYDSRSLSRPGPCITRSLRTRPEGTRLR

SEQ ID NO: 286315 - protein, 153 aa, Zea mays
  Clone ID: MRT4577_24217C.1.pep
MAPPRAAAGVSIPADPAADSPEAESESKLRQGAADARWLETLSEPELDVLVSLREVAVTRASDAGHPGLADTVFHLRALRALGVVLLEELKERLRQSSADANVLDRSALLDDPEASQDHQMPAPNGIHKKRKNQTQDGWDGDGAQSPKRRKTT

SEQ ID NO: 286316 - protein, 69 aa, Zea mays
  Clone ID: MRT4577_24218C.1.pep
WFAPFVVSLLKWHQFYGGNVSLFGTSIYISVAILVPLWCIHTHLCFHKILYFFSMLLVNVANIRSICNQ

SEQ ID NO: 286317 - protein, 118 aa, Zea mays
  Clone ID: MRT4577_24219C.1.pep
NNLNHSMHKYLVSNSPSCSCSIAKQSQSLLAPRARSARRWKTVSARPGWPASEARVTATSLRLTSTSSSGSERVSSHRASAAPCRSLLSDSASGLAAAGSAGIDTPAAARGGAIKTRE

SEQ ID NO: 286318 - protein, 47 aa, Zea mays
  Clone ID: MRT4577_2421C.1.pep
SFRAGVVAKTKWTKAMYMPHTNRPITTSGGVKTRIYTPYSNWTTLNS

SEQ ID NO: 286319 - protein, 761 aa, Zea mays
  Clone ID: MRT4577_24220C.1.pep
MTASITRSGEETENSALCVTYEEHLVPRCRVWLTLEAHPLQPGWCSLDFENIGFRADDTTEATAMKTLTTFYGYHPLEMVMHPLGLFPAEKRDDPMWCNRVSHVKDVWAMHPDQVGRITVQCMSALYRLQALQSDAMEHLTNLAQTTKLTLDSREDFVDDLSSELVEKDLQVEQLSQRIATLEQQVEIRDNTIDVLENQLCDVQEELEEAKDHVEMHHHDMEANEAKSEGEDAPKELEPAPGPNATPSGMPLHPHSVLPLPLRVDGWQLGSVAGRTSKFPPPPPAPTVQELMARQNEILRQLLQRQTHPQQGHHILAGILDRKLNEFLALTQGTRTVLQYAQAFNDLCHFISQKFNVKCQLPFYHAQGSFMIATPGGKIATNQLNQNVPISLGSKIFKTTLLILGLEGMDIILGADWMTQHRVVLDVAARAMEICSPTFGDLTLYLPNQEPTRSCAFAMIELPLNKILVVCEYADVFPDELPGMPPDRDIQFAIELQPGTAPISKRPYRMPPAELAELKKQLQELLNKGFIRPSTSPWGCPALFVKKKDESLRLCIDYRPLNAVTTKNKYPLPRIDVLFDQLVGAKVFSKIDLRFGYHQIKIRASDIPKTAFSTRYELYEYLVMSFGLTNAPTYFMYLMNSVFMPELDKFVVVFIDDILVYSRNEEEHADHKSLKYIFTQADLNMRQRRWLELIKDYDLEVHYHLGKANVVADALSRKSQCNCMMMDSRINTLCDKLSKMKIKVIPSGTLSHISIEPTLQD

SEQ ID NO: 286320 - protein, 62 aa, Zea mays
  unsure (1)..(62): unsure at all Xaa locations
  Clone ID: MRT4577_24221C.1.pep
QGLVEAXLEAFKKDYAEEQPRRARAILDGRIVCDNTLDARLSVSFRQKLPEIRKKLFSYQVS

SEQ ID NO: 286321 - protein, 217 aa, Zea mays
  Clone ID: MRT4577_24222C.1.pep
RLVVDTLSCFVASAKMTSFISNIIWNSVEGFVDAGKKSAGEFGGNALIKAGDMIENSGRSIGTGIEKKATSYGTAITGQPYKPSAKALPSTARKPAMKRSNSTPVNVKPPTSGIPLGAKKYPGGNQIQGAVGGAKKTAGGVNKAIGGVTGTASKATGGVVGRANSTIGTLSSTATKGPGSVVGGGRKALGGATKSIPPFQGPGPTSAAPNNSIPKPA

SEQ ID NO: 286322 - protein, 85 aa, Zea mays
  Clone ID: MRT4577_24223C.1.pep
GPPTAFFPTELRFLVSGGDMSQLDANRKKRGLLYGGINPWGHRSFYFIINIWWGRGQLGKVEGIREFLGAVKNGHHPPFIWCLPR

SEQ ID NO: 286323 - protein, 43 aa, Zea mays
  Clone ID: MRT4577_24224C.1.pep
MAVCFLTDLILQQFVLRAYLAETHDVPDFLLQIRKKLFSYQVS

SEQ ID NO: 286324 - protein, 50 aa, Zea mays
  Clone ID: MRT4577_24225C.1.pep
DLSNLGAELHQVLLLVLHEREATPHDTHVSTTTSRWRRRLFLRRPPIGTS

SEQ ID NO: 286325 - protein, 181 aa, Zea mays
  unsure (1)..(181): unsure at all Xaa locations
  Clone ID: MRT4577_24226C.1.pep
ASCRLLSSYLISLGKXLHSTFSQLMSPAGFIFAILLPMNIALYFITXSLSKPFYGQLFAYLCNVLAMGIGIKEDTETLXDHPFKNRTAFNGLRAGPFTFRAAVFCSERFIMTLALKPSMADQRKFRSELSQASAVIIALYVXSGDSAYLDYGEDTKNIITLNLPNNWXXATGNDGLCITLA

SEQ ID NO: 286326 - protein, 88 aa, Zea mays
  Clone ID: MRT4577_24227C.1.pep
LVIAGREEDQLGLCHSGERVLCACDLVTPTYHANCRSTTKPKRTHFGWDTRETYGQLLASVMHARSSSVYDTPGGLDVCWSLVLNCYT

SEQ ID NO: 286327 - protein, 78 aa, Zea mays
  unsure (1)..(78): unsure at all Xaa locations
  Clone ID: MRT4577_24228C.1.pep
FLELRAILETGQTPTMDVTAILSDANRVVCALRSVSSKLKDSCDHLEEXLNSXKAEKNELLVELRRLIAVKESLEQHI

SEQ ID NO: 286328 - protein, 76 aa, Zea mays
  unsure (1)..(76): unsure at all Xaa locations
  Clone ID: MRT4577_24229C.1.pep
VLPSLVSPLLSLPWSFFGFXRARVVEGGXVVGCAVCARLVGRXXXRKCCFGLGASFAFVPPGPPRXXVVKFVNXGG

SEQ ID NO: 286329 - protein, 59 aa, Zea mays
  Clone ID: MRT4577_2422C.1.pep
TFVRKPQAGLVVIVVEKVRQGLDHCGKMVLYLVEELLLGGLVQTGLFPNKDQILFYCIQ

SEQ ID NO: 286330 - protein, 41 aa, Zea mays
  Clone ID: MRT4577_24230C.1.pep
MFKKKKKKKKKKKKKKPKKKKKKKKKKKKKKKKVCPCPGGR

SEQ ID NO: 286331 - protein, 90 aa, Zea mays
  Clone ID: MRT4577_24231C.1.pep
KALPSIGRDVTYHHHHQLGPGKLWVVPCKDRALRGCRNHPRARGGGKLMSARGAPLGGRSILPMPGGGCPLGFETSYLLVLGALFASFPR

SEQ ID NO: 286332 - protein, 56 aa, Zea mays
  Clone ID: MRT4577_24232C.1.pep
VPSAQKENSAAAKAISFAGAPRGPPMAPPKRSSSSKMNKAWSTNPMLGANPNPRCG

SEQ ID NO: 286333 - protein, 35 aa, Zea mays
  Clone ID: MRT4577_24233C.1.pep
MSDSEEHHFESKADAGASKTYPREGDTVRENGFII

SEQ ID NO: 286334 - protein, 93 aa, Zea mays
  unsure (1)..(93): unsure at all Xaa locations
  Clone ID: MRT4577_24234C.1.pep
KTYFGKLGIANAWMDFRIEVTTEKIILGNGDALSTFSWLDTVTVTQTGLXVTIKRKKNMVVSFEDGISFVIVLHQVWKKHPVHQDFLGFYVVD

SEQ ID NO: 286335 - protein, 185 aa, Zea mays
  unsure (1)..(185): unsure at all Xaa locations
  Clone ID: MRT4577_24235C.1.pep
QRPGGIGXTVPVARVKTDVINCXMAATFGPTGFTTEVKSGEMHXHEAIQXALTRDNARLQAEREAALKDLNRRYLACNSKDDRANEATSFTWQVIIMNHPAQIGYGYTPVLDCHTSDIAVKFDELDTKIDRRFXMELYKEPIFIKNGDAAMANMALTKSIVVKTXYLEXASLGRYDDXDMRQTVA

SEQ ID NO: 286336 - protein, 82 aa, Zea mays
  Clone ID: MRT4577_24236C.1.pep
VWLLNQPSGPQTIQQFLRCRALAELTVPVTPYRSMRPVISSNSSNFRQCPGARRRRRSRIRKTWSLGVGRWQRRPPSRRHQR

SEQ ID NO: 286337 - protein, 50 aa, Zea mays
  Clone ID: MRT4577_24237C.1.pep
RMCVGLCVSWKGGGSNVFAEWCTFQSDAIHNILFCLENPWIKICKRHCLI

SEQ ID NO: 286338 - protein, 118 aa, Zea mays
  Clone ID: MRT4577_24238C.1.pep
PRRHLRRRRRRSSLEELLLLPLADTKANVEWELPVVRFFDSCDRAKARHIFKCNFTNYPKGEDFGEIFDVFGDGIFNDDGDSWRRQRAKSQLIMAGRRFRAFSARYSRRQGWRGDNLT

SEQ ID NO: 286339 - protein, 89 aa, Zea mays
  Clone ID: MRT4577_24239C.1.pep
MALMEYTGRQDQRLMVRHHIYLRMHRRMTCCTIYPLCNNMVNKAEIIAAKPDMKVCYDDENAKHNLPEYVLSETKNESIAMRGSESHRT

SEQ ID NO: 286340 - protein, 123 aa, Zea mays
  unsure (1)..(123): unsure at all Xaa locations
  Clone ID: MRT4577_2423C.1.pep
MKLSVAVLCALLADQAAVLLVTGPTYAXASELEVWYYSTKARALDNVVKWHAIIALKVRRRTGAGLVRLIFHDCFXGGSYGSELLDPFYDNPYTENEAPENTCLAPYYLLEEIKDPFQKRCPG

SEQ ID NO: 286341 - protein, 215 aa, Zea mays
  Clone ID: MRT4577_24240C.1.pep
IWMCMSRTASAGADRRKEVLQGMLMALGHEEDAILSMNGSDSLTELTIAVHEQLEGKRFLIVFDDVWHIDSWYSDVVGVGPQNAMRRADDLSVLSERLAFALPKGRGGLVIVTSRLEQAAEAMVRKSCLYRVRPLVDSASWAIFMDVVLSQPQEKKAVDLVTVNHMKQEILETCGGFPSAAKTMGDIFASSSVSPPASTSTSEELGKSDHIITAR

SEQ ID NO: 286342 - protein, 385 aa, Zea mays
  Clone ID: MRT4577_24241C.1.pep
LCDFSDFRSDICDLAGDVRMDANVSAFVVVVDPATSGSDQEEHKVRPYPRKGDETCMGRITEVTVRATGDAAGAPRCTETHGAPAVVFSIGGYTGNIFHDFSDVLVPLYNTARRYRGDVQLVMANAAPWWLVKYDRLLRALSRHAPLDLARAGAAREVHCFPRAVVSLRAHKELIIERDRSLDGLATPDFTRFLRRALSLPRDAPTRLGDGTGRKPRLLVISRHRTRLLLNLDAVVRAAEEVGFEAVVNESDVANDISQVGGLINSCDAMVGVHGAGLTNMMFLPPGAALVQIVPWGGLQWMARADYGDPAEAMGLKYIQYEIGVAESTLKDKFPSGHKIFTNPTALHKKGFMFIRQTLMDGQDITVDVGRFREVLLQVLNSLAQ

SEQ ID NO: 286343 - protein, 63 aa, Zea mays
  Clone ID: MRT4577_24242C.1.pep
KNNGKFGSIPLKDHHFGSIPLLSHLHVGPHESMTCGVHGIYLKFGSFNDIDPIVPRIILRIRW

SEQ ID NO: 286344 - protein, 125 aa, Zea mays
  unsure (1)..(125): unsure at all Xaa locations
  Clone ID: MRT4577_24243C.1.pep
GKLAGFDISAESKILVNAWFLAIDPXRWVRPDXFRLERFMEEDKSVLAHGQAFQFVPXGVVPRICPGIILALPILGISLGRVVQFFQPLRPPGAXNVDPAVKPGQFICQISLRKPPSVLQRPYEA

SEQ ID NO: 286345 - protein, 54 aa, Zea mays
  unsure (1)..(54): unsure at all Xaa locations
  Clone ID: MRT4577_24244C.1.pep
PLNVPLETPLDQLPPHPPWTTDELRRADEEAYFNGARGVRRGRRGRRIGGDXIP

SEQ ID NO: 286346 - protein, 184 aa, Zea mays
  Clone ID: MRT4577_24245C.1.pep
LPNPPLRLRSLRWDARERQPRGLPSLEPQIRCPLPKPFPRPRHQRKRAWPPSTSSTLPFMASALPQRRHLRPPPLLPVHRRRVCAIPPDGRVAASAARPVAVDPTQPCIWSLQCGDMIYPPDDEVGARMAREDLHWAYSTPLPVYRGRAHGGPAPLSGTPEPATTKSTLALYFTLHITICTLYM

SEQ ID NO: 286347 - protein, 123 aa, Zea mays
  Clone ID: MRT4577_24246C.1.pep
PFSIIPKANTYEFLTKKWSPPEIQECDLWQGNICGVRCMSVWSMINGHTTPIFVENSHERPFSIIPKANTYGLLTKKWSPPEIQECDLWQGNICGVRCMSLWSTINGHTTGFLSKIAMNDHFQ

SEQ ID NO: 286348 - protein, 51 aa, Zea mays
  Clone ID: MRT4577_24247C.1.pep
TTSTDVAQRPIVNIQTLKAKANEECLFYCRSVVTLNTNLYQIHRSLNLDMG

SEQ ID NO: 286349 - protein, 59 aa, Zea mays
  Clone ID: MRT4577_24248C.1.pep
PRLQPRVRRPVGCLHTRSFNVLPHIHASLKRDIDQTPALVISYIQPNPGIRTHRISPPP

SEQ ID NO: 286350 - protein, 64 aa, Zea mays
  Clone ID: MRT4577_24249C.1.pep
LYNSIGVIYIEYLISIDPTKISSQGLFFLSWIYSKRPSHQRLQKFRQVDKKQIRSRVLCVVTTA

SEQ ID NO: 286351 - protein, 36 aa, Zea mays
  Clone ID: MRT4577_2424C.1.pep
PPIFFFFKKKKKKKKKKKKKKKKKKKKKKKKKKKKK

SEQ ID NO: 286352 - protein, 457 aa, Zea mays
  Clone ID: MRT4577_24250C.1.pep
MAAPTSDATSGGGVEGRGGRPPLPSRGACRPRLTDPEPQGGLEDDSDTEGDGGADGDSESSQSDGGGTDEFMLVKLAEIRKEVQCPICLGIIRKTRTVMECLHRFCRDCIDKSMRLGNNECPACRTHCASRRSLRDDPNYDALIAALYPDIDKYEEEEFAFSEQERIRNKKIQETIEETFRRQSDAIGKKRSMAKATATAFARKYRRTRGRVRTIPPDIAPTGSSEEESGEGNSKETIREQSSADDHSPDLRQKRCRKRSGPQGSPAGTIGSIDYSFEENDELVGGKEILATSPLQGEMLAWGKNGARSQNRHGSVGSNGRTGRSGRIAKLVDYLHTADEMDKEFQLFLLLLPVDGQTIPNLEKPYLSCRPTLSIKHLAQFVALQLSCEVEELEMYIRMDRHRVSVGSRPSSTGEAKSRPFDDLERLNEEKLVSELHPSFVSSNGDMELRYALRTRE

SEQ ID NO: 286353 - protein, 76 aa, Zea mays
  unsure (1)..(76): unsure at all Xaa locations
  Clone ID: MRT4577_24251C.1.pep
WLLGLKNTFCEKIIIILFALWLPPPXLPRXRARATYQQHXTXPQXTYYLXTXTLXHFFWGGGXTIHPSXXXPXTEK

SEQ ID NO: 286354 - protein, 195 aa, Zea mays
  unsure (1)..(195): unsure at all Xaa locations
  Clone ID: MRT4577_24252C.1.pep
RPGWEQKKLKARSATRERIQQRNAAPWKTTTSPSPPLPARGARRRRSXPPRRRRPGAAPAPASPASQSXPSRGRPPLCGRSRAPLPRRRRXGRAAVVPARDRGGRRGQDGPAXGRARSPPGPSRQRRRRRRSQLGAPSAPTRGRRQSGARXRLVARRGAXRRGEDGQAVGELQRGPRRPAGXTSATEAAAPSPPP

SEQ ID NO: 286355 - protein, 207 aa, Zea mays
  unsure (1)..(207): unsure at all Xaa locations
  Clone ID: MRT4577_24253C.1.pep
MDSNANGGRSTMVGEMESSLERVRRQLSSTSTRHILQGPLLKRSDTLRKWNERWVILDPATGKMEYKVRRSDTTVRGIIVFDSTSTATLSPTNFHGLPKYEGCCVYIGTPQKKEYFLCAETPSAARAWVSTLHATQLVLQAHKQAVXXSLGGNGSAKLGTVATVXVAVANATTIEASKEVEAAMKISLRAALGSTTNKLSKGQLDDL

SEQ ID NO: 286356 - protein, 40 aa, Zea mays
  unsure (1)..(40): unsure at all Xaa locations
  Clone ID: MRT4577_24254C.1.pep
WPTMLGVDSILISCNIVCLRSNQCXLCKVHRIILGMRVRD

SEQ ID NO: 286357 - protein, 66 aa, Zea mays
  Clone ID: MRT4577_24255C.1.pep
LPFSFVSGKSLFSSYRSAPVSVAKTRSTLSDFSARSTTFASAPIALATSPRPFRPVSWARNTAHRS

SEQ ID NO: 286358 - protein, 215 aa, Zea mays
  Clone ID: MRT4577_24256C.1.pep
MPDRTGAAVLDDLPDDIIVGKILILLPPKDIGRCRMVRTSWRSATSTPEFMVEHRRRQPSLTIIDGKGQRASFVTLRDAAAAGATSQQLWPFLSRCRKSCCKIRLHASSDGFLIVSRGDRFYICNPTTRKHAHLPFPRPPLPRSSCINDIYIHGLYHHKSTGKYRLLLSNIHKKEATLYVLTLERANESRSIQIVMPTLPSPSLEQTCWLLYALC

SEQ ID NO: 286359 - protein, 73 aa, Zea mays
  Clone ID: MRT4577_24257C.1.pep
ADDLVTLSGAHSIGRSHCSSLAPARLYPQLDPAMNATLGARLRARCPAMVKMGSIEVLTGPPGEVRLKCNKVN

SEQ ID NO: 286360 - protein, 55 aa, Zea mays
  Clone ID: MRT4577_24258C.1.pep
SSNPDQQSGSAFRGSSNIDHEDGHKTRRVGGSVASHRLLQQICPDPTMLSMVLTP

SEQ ID NO: 286361 - protein, 195 aa, Zea mays
  unsure (1)..(195): unsure at all Xaa locations
  Clone ID: MRT4577_24259C.1.pep
MSAKTRAGAAHVRRQLVAAVAVTVACFYSSEATQLQVGYYNGSCPAAESLIETIVHAAVRKDAGNGPGLIRLFFHDCFVRGCDASVLLDDPTGSPGNRTVEKTSPPNFPSLRGFSVISRAKRVVERRCPGTVSCADIVAFAARDAARIMGGIRFAMPSGRLDGRVSNASEATANLPPASFTXTQLLGRFASKNLS

SEQ ID NO: 286362 - protein, 54 aa, Zea mays
  Clone ID: MRT4577_2425C.1.pep
SFTSRVGTRGSRGRRPNASNVRARTVKRIGPAGFKGSTLPRECERMWKKEERRC

SEQ ID NO: 286363 - protein, 360 aa, Zea mays
  unsure (1)..(360): unsure at all Xaa locations
  Clone ID: MRT4577_24260C.1.pep
MSAKTRAGAAHVRRQLVAAVAVTVACFYSSEATQLQVGYYNGSCPAAESLIETIVHAAVRKDAGNGPGLIRLFFHDCFVRVRRIIRCPAPAQSDNAIMQLSSLXGCDASVLLDDPTGSPGNRTVEKTSPPNFPSLRGFSVISRAKRVVERRCPGTVSCADIVAFAARDAARIMGGIRFAMPSGRLDGRVSNASEATANLPPASFNLTQLLGRFASKNLSADDLVTLSGAHSIGRSHCSSFAPARLYPQLDPAMNATLGARLRARCPAGGGGRRDRVVDLDFATPLQLDNQYYRNVVTHEAVFSSDQALAGRNDTAALVALYAANRTLWSQRFAAAMVKMGSIEVLTGPPGEVRLKCNKVN

SEQ ID NO: 286364 - protein, 93 aa, Zea mays
  Clone ID: MRT4577_24261C.1.pep
KPPLTQWFTQSQTGLGPTPPILSPPIKPKGYSKPLHFLSVRKGCPPVNYLILQKPWVSFVSRSIPKPSQNNNLALSPKITHVCPKGGVFFPPG

SEQ ID NO: 286365 - protein, 68 aa, Zea mays
  Clone ID: MRT4577_24262C.1.pep
NKAAGVATAEEIRKKSHSGGLRCWGDLHLHPPHTIKKRRHHLLQDCRSGCLVKTKDNESPLVTGCPPG

SEQ ID NO: 286366 - protein, 53 aa, Zea mays
  Clone ID: MRT4577_24263C.1.pep
INITITSISLMLQTILFLTNFLNFFIRIISTLYTKHIILFKIYSNFSLSLNSY

SEQ ID NO: 286367 - protein, 98 aa, Zea mays
  Clone ID: MRT4577_24264C.1.pep
EILLGLHGREPRFLQGAQTVQWPPLSGGSMDWPTCFWVCRNSPSTARLTGAIPRRASCCCPRSIWEYSVKNTPSYGKFPLERFFHRVIRIGMEWHKLG

SEQ ID NO: 286368 - protein, 76 aa, Zea mays
  Clone ID: MRT4577_24265C.1.pep
AAVCWRFALWRGRDIAGPSVFFFFVLFLQNILFPYYYSFPCQRFIRVIAHTWHPGRWVTLRALSWMNAVNWLRGSL

SEQ ID NO: 286369 - protein, 55 aa, Zea mays
  Clone ID: MRT4577_24266C.1.pep
VAHVLCDLFLPFWRFHPMKYFARPGEGKSCSARGTKNSVRRSRRRTIQIWADGDQ

SEQ ID NO: 286370 - protein, 87 aa, Zea mays
  Clone ID: MRT4577_24267C.1.pep
KPPPPPCNLTFQRFPRKVQAPQFLIKIGPPFPLGGIAPPHQFPLLPPEQYNFQIISPKKKKQKNKKKKKKKKRIARSNTKQQKKKLV

SEQ ID NO: 286371 - protein, 71 aa, Zea mays
  Clone ID: MRT4577_24268C.1.pep
RTARNHACHQRRASTGAILAPNPNALPRILAAVDADVQALHPRVERMAAAADLLGVSCGKSLLRLQRNLVG

SEQ ID NO: 286372 - protein, 91 aa, Zea mays
  Clone ID: MRT4577_24269C.1.pep
PAGSGDLTFPRVLRLLLATDTLRRRSKVPDQEKLEFQIVVRVNKLNLINLIKSSNKKTFHFPQKIVHLIFPLVYSVVFRRSYSSLLHLTHP

SEQ ID NO: 286373 - protein, 132 aa, Zea mays
  unsure (1)..(132): unsure at all Xaa locations
  Clone ID: MRT4577_2426C.1.pep
KKLDNGGSRVEIDREILXIWDRRGSLLAKASQGLNRLYVLHLELEVVRPLYLATRRDDEAXRWHELFSYLHFEDLQKLWKEKMVXELPLIGHVKQLCDTCVATKQRRXSFPCQALYRAQQQLELIHGDLCGP

SEQ ID NO: 286374 - protein, 100 aa, Zea mays
  Clone ID: MRT4577_24270C.1.pep
AALGIWATGTPTCQGAGGLTACDELMEPRPRALGSRLRVPQGSGPTAWPQPQGHARAQAGGTAPPGQWPQPPPRAGDVTPRQTCPPAVVGCQKMKTLVSR

SEQ ID NO: 286375 - protein, 123 aa, Zea mays
  Clone ID: MRT4577_24271C.1.pep
LRHEENPSLGGWRRVSPTPRPNKARGRDRRRWRPSPERRWRHLPLRAGCGCTGTYCCGPRTSDSERTTSSATSPAPPSPRAPPRPGPIRWAPCRTTVDGSTLMRRTSSSTGSASQNGSSTHGA

SEQ ID NO: 286376 - protein, 113 aa, Zea mays
  Clone ID: MRT4577_24272C.1.pep
DYGQHRAAAAGGGRAPRYVKFCTLEGCPRKYLPFLEALVLPMEPICLCSSRDTCELVTGIGPSWALDPYMEGFFCPIGGHKENLLRVLVSPPPPTNDLSKGHPRFWGESGPCK

SEQ ID NO: 286377 - protein, 217 aa, Zea mays
  unsure (1)..(217): unsure at all Xaa locations
  Clone ID: MRT4577_24273C.1.pep
KMIYGDWEEGYEKLSALFNAMKAKXTQCVETFKHCRPVLSIGGTFLLGKYKGTLLVAISCDADNTLVPLVFALVEXEVSVISDRHQGILSAVQERIPGYGPHXWCTRHLAENLLRKDRTKDNFLLFEEACSVVSFHERYTHGKAMQTRGWRFYLLDPHYDEHHSGQLTTEGRTHDQFEEILYDDRYTPHLQRVGMFAAGCPRSTLRRSRLWLTGSDR

SEQ ID NO: 286378 - protein, 102 aa, Zea mays
  unsure (1)..(102): unsure at all Xaa locations
  Clone ID: MRT4577_24274C.1.pep
SSGGVYLTTYQSENFGIFSCXRSLRHLPWIGVYNSHCKIVGQHFWYISSSLTSAKRHIFSTKQAEEGVQQAEEGGGAYSSSKQRRAALRAAAGREGGSAQSS

SEQ ID NO: 286379 - protein, 240 aa, Zea mays
  Clone ID: MRT4577_24275C.1.pep
MADAGNEAEGLTLLGLHVSPFALRVRMALSLKGLSYEYIEQDLFHKGELLLSSNPVHKKVPVLIHHGKPICESLAVVEYVDEVWPGAAATILPADPHGRATARFWAAYIDGKLFPAWTGIMKAATEEARADKLRETHAAVLNLEKAFAEISSSSSNDGAAFFGGDSVGYLDLALGCSLPWFGALRAMLGVEIIDAAQAPLLVAWAERFGETPVAKEVLPQPDEAVAYAKKIQAYWASAKN

SEQ ID NO: 286380 - protein, 85 aa, Zea mays
  Clone ID: MRT4577_24276C.1.pep
QKHNNQQKINLITTIIKKKKKKKKKKKKKNPPFKKTHFIKHSNLPTYSFQIKPKFKLPPNLIKIPNFLKPLNFQNSFFSQQNPLS

SEQ ID NO: 286381 - protein, 41 aa, Zea mays
  Clone ID: MRT4577_24277C.1.pep
PYKPDREMPLCARPHKLCRRDVPYSFDYVNRPTLKITSIIL

SEQ ID NO: 286382 - protein, 88 aa, Zea mays
  unsure (1)..(88): unsure at all Xaa locations
  Clone ID: MRT4577_24278C.1.pep
VWTVNQKETRWTRRITSISMFQTLKRNRLGEYAEALALTLIHQYNNKAGLVLLVSRFVRGGCSXPSVCFWSWAGRVILWMLRCFCGCG

SEQ ID NO: 286383 - protein, 41 aa, Zea mays
  Clone ID: MRT4577_24279C.1.pep
DICYSFLSLVLFFMGVVLVGQTTPIIVEHVSPYTHLKAELT

SEQ ID NO: 286384 - protein, 150 aa, Zea mays
  Clone ID: MRT4577_2427C.1.pep
MAGLQRSATTFRRSGSSGLVWDERFLTEAEAEAKAKAGGGAAAAEDPQPELRHSRSVGSIGMLLRGGDSDDGNKKAKEVEKARGGQQQRVFRTKDVAPDMDPPSPRVSGCILCAILGGGSGGGKARRRSKPKPKPKPKPKPRKDVATTAA

SEQ ID NO: 286385 - protein, 76 aa, Zea mays
  Clone ID: MRT4577_24280C.1.pep
GITIMPLIKVYNNDSDPYGLKGHSIFKSVRPFIFGYAIIPKLHEWYLQHHVRAASAEAVSFRRTFSDEAWSQHILV

SEQ ID NO: 286386 - protein, 404 aa, Zea mays
  unsure (1)..(404): unsure at all Xaa locations
  Clone ID: MRT4577_24281C.1.pep
AGLRLRGGLLAVGGRRWGPRAVEDGLNKYAVIFDAGSSGSRXHVYCFEKTWSNAHRGGGELFKQDMIXAHVATTTCLFKQKKPGLSAAKGPQEAAESLISLLEEAEKVVPAELREQTPVRVGATAGLRALGTQRSEEILQAVRELLHDSSFKSQPNWVTVLDGSQEGAFQWVTINYLLGKLGKPYSNTVGVVDLGGGSVQXLHYGLLAARGEILKAGEGSDYSDCMLEGHLGKYNYGGNTFEASGSPSGASYSKCRALAVRALKVDEPACTHMKCTFGGVWNGGGGDGQKNLFVASFFFDRAAEAGFVDPKAAVAKVKPSDFEETARRVCKLNLKDAHATYPDVSEENIPYLCIDLVYQYTLLVDGFGVDPYQDITLVKKVPYGDSYVEAAWPLGSAIEIASSS

SEQ ID NO: 286387 - protein, 140 aa, Zea mays
  Clone ID: MRT4577_24282C.1.pep
GDQSWGSPPGGAPFKIGGPPGRRNLAPGVFPKKNPPPAPVANINCLGPGSLPPRSWLNKGMGGPPPPRGGGSVPFVLPPEKKKLKPLPKKKGKKFGRVGFFPPKKKKKKKTGNYGFFFFPLAWGKGRKSRFFICFKACFF

SEQ ID NO: 286388 - protein, 304 aa, Zea mays
  Clone ID: MRT4577_24283C.1.pep
MASFFADDGADDLPRTTSHPFDSDDFGAAAADGAGADGYGGYASFAEGGVEEVDEEITVESDGVPIRHVSGGYSPSPFSPELEPNGGDGPILPPPTEMGRDEGILLREWRRKNAMELEKKEQKERELRAQIIAEAEEFKKAFFEKRIQNCASNMVNNREREKIFVASQEKFHAGADKQYWKSISDLIPHEIATIEKRGKKDKDKKPSITVVQGPKPGKPTDLSRMRHILVKLKHAPPPHMLQPPPAPAAKEGAKDGSKEGGKDGGAKDGAAAPANDAKQPAEGQETSTANGPSEAEKEQPAASE

SEQ ID NO: 286389 - protein, 291 aa, Zea mays
  Clone ID: MRT4577_24284C.1.pep
MASFFADDGADDLPRTTSHPFDSDDFGAAAADGYGGYASFAEGGVEEVDEEITVESDGVPIRHVSGGYSPSPFSPELEPNGGDGPILPPPTEMGRDEGILLREWRRKNAMELEKKEQKERELRAQIIAEAEEFKKAFFEKRIQNCASNMVNNREREKIFVASQEKFHAGADKQYWKSISDLIPHEIATIEKRGKKDKDKKPSVTVIQGPKPGKPTDLSRMRHILVKLKHAPPSHMLQPPPAPAAKEGAKDGGAKDGAAAPANDAKQPAESQETSTANGPSEAEKEQPAASE

SEQ ID NO: 286390 - protein, 155 aa, Zea mays
  Clone ID: MRT4577_24285C.1.pep
YASARPIAPRPQQPIAPRPVQRPIAPRPAPQPIAPRPAPRPIAPRPQQPLAPRPRPQQPIQPIPTRQESEQDEGEYDDGASNIEDQTVQTSTSQLQNVYAAPFAAASRTKFVVIPLGNRRPNNLNELLRAGATQSGVELNDQQIQNLMRMSTRVQ

SEQ ID NO: 286391 - protein, 259 aa, Zea mays
  unsure (1)..(259): unsure at all Xaa locations
  Clone ID: MRT4577_24286C.1.pep
MASFFADDGADDLPRATSHPFDSDDFGAAAADDASAGGYASFADGGVEEVDEEITVESYGVPIRHVSGGYSPSPFSPDLEPNGSDGPTLPPPTEMGREEGILLREWRRKNAMELEKKEQKEKELRAQIIAEAEEFKKAFFEKRIQNCASNMVNNREREKIFVASQEKFHANADKQYWKSISDLIPHEIATIEKRGKKDKDKKPSVTVIQGPKPGKPTDLXRMRHILVELKHAPPHICAASPPAPAAKEGTKDAAPWRRA

SEQ ID NO: 286392 - protein, 305 aa, Zea mays
  unsure (1)..(305): unsure at all Xaa locations
  Clone ID: MRT4577_24287C.1.pep
MASFFADDGTDDLPRTTSHPFDSDDFGAAAADVAAADGYGGYASFAEGGVEEVDEEITVESDGVPIRHVSGGYSPSPFSPELEPNGGDGPILPPPTEMGRDEGILLREWRRXNAMELEKKEQKERELRAQIIAEAEEFKKAFFEKRIQNCASNMVNNREREKIFVASQEKFHAGADKQYWKSISDLIPHEIATIEKRGXKDKDKKPSITVVQGPKPGKPTDLSRMRHILVKLKHAPPPHMLQPPPPAPAAKEGTKDGSAKGGGKDGAKEGGAAAPANGAKQPAESQETTANGPSEAEKEQPAASE

SEQ ID NO: 286393 - protein, 56 aa, Zea mays
  Clone ID: MRT4577_24288C.1.pep
PCYNPYAHLTRQQPTTKKLQQTLHALIESTQEPSTSANSDRTLTLRRTIQRHSMTP

SEQ ID NO: 286394 - protein, 199 aa, Zea mays
  unsure (1)..(199): unsure at all Xaa locations
  Clone ID: MRT4577_24289C.1.pep
RTDPALVALRDEVHAGSKALPWAIVDDLLQYSGRLYVPPASPLLQELLLAVHDAGHEGVQHTLHRIRRNFHFPNMKRIVQDFVRVCSTCQRYKSEHLHPVGLLLPLPVPXGVWTDVALDFVEALFKVRGKSVILTVVDRFNKYCHFLPLAHPYSAVSMAQAFFTDIVRLHGVPQSMVSDRDSVLTSRFLRELMRVRLGA

SEQ ID NO: 286395 - protein, 428 aa, Zea mays
  Clone ID: MRT4577_2428C.1.pep
DGLAGRRALRRGHPRDAIRSVRWRRRGVRHGWRADRGRGRGGAPGRAVCARVPYWRRVDASGIPVARVPAAQVRRRRRRSPVKDGPRVLLLPPGEVEKKNLTKAKELFELAAENKEAGGHYNLGVLYLKGIGVKRDVIRACNLLLHAVNAGQPKAIYQLAKLFQKGIGLKRNLHMATMLYKSVAERGPWSSLSRWALESYLKGDVGKALLLYSRMADLGYEVAQSNAAWILDRYGDQSICMGESSFCTDMERHLRAHALWWQASEQGNEHAALLIGDAYYYGRGVARDYERAAEAYMHARSQSNAQAIFNLGYMHEHGHGLPLDLHLAKRYYDQAVEVDSAAKLPVMLALTSLWLRKNYADSFLVRFIDSLPEIYPVVNKWVEDVLLDEGNATILTLFACLVTVLYLRERQRRQVAAANPQQPDDVVM

SEQ ID NO: 286396 - protein, 48 aa, Zea mays
  Clone ID: MRT4577_24290C.1.pep
GFLLLLLPSCRQEQLRKKAAAHMNQPYQASSNDELVLLVSLDSITKIG

SEQ ID NO: 286397 - protein, 366 aa, Zea mays
  Clone ID: MRT4577_24291C.1.pep
MVSVNLGLVHYVLDHIYGTLLHRTKLGTPFFSKGWGGTKLDLLEKMVKQLFPEARCQNWPPTAVQPMWKTVWETNNSCLREGVFRTTCDERLIDALPPESHNARVAFLTPKNVTPEKMSCVVHLAGTGDHTFERRLRLGGPLLKNNIATMVLESPYYGQRRPSMQRGAKLQCVSDLLLLGKATIDEARSLLYWLQNEAGYGKMGICGLSMGGVHAAMVGSLHPTPVATLPFLAPHSAVVPFCEGVYKYATAWDALRKDAAVLTQDVTLLAEDAAQKSGITIEQVRDRLRSVLSLTDVTRFPVPKNPQAVIFVGATDDGYIPRHSVMELQKAWPGSEVRWVTGGHVSSFFLHNDAFRKAIVDALDRL

SEQ ID NO: 286398 - protein, 321 aa, Zea mays
  unsure (1)..(321): unsure at all Xaa locations
  Clone ID: MRT4577_24292C.1.pep
MLASLRYLAGTAGPSGFGSRTTAEEAAAGDLRHVTAIITGATSGIGAETARVLAGRGARLVLPARSLKAAEEARARVRAECPGADVAVLPLDLSSLASVRRFVARFLDLGLPLNLLVXCVCPTFLLSFFILLLLHPSVSSPPAKAAAATTAANLHGLTHGSRACVRTCSNNAGKYADRFAVSEDGVEMTFATNYLGHFLLTRLLLDKMADTARATGVQGRIVNVSSTIHSWFPGDGDALGYLDRVTRRKIPYDPTRAYALSKLANVLHTRALADRLSEMGANVTANCVHPGIVRTRLIRDRDGLITNTVFFLASKLLKTIP

SEQ ID NO: 286399 - protein, 30 aa, Zea mays
  Clone ID: MRT4577_24293C.1.pep
CHRYGRDQLNARMPCSERPILVRLCSSLHT

SEQ ID NO: 286400 - protein, 96 aa, Zea mays
  Clone ID: MRT4577_24294C.1.pep
WYCLGPLNDLGLSGSSARRESRVAAIRRLSTYRVSGCFVSSVSGDEDGLETSPFRVSTTPGPSRSHPFPQTFIGGGSAYEMLISLFRSISRGPGGD

SEQ ID NO: 286401 - protein, 108 aa, Zea mays
  Clone ID: MRT4577_24295C.1.pep
RPGTPSLRSHHHHGEHTGGGGGAGHGAGGPAGGRAAEHPNPTSVARLPLCPYLSRGPLLFLEAPTAAHDPPTAQISQLAAFFILDAGVGAHFVASRVVTSPRFAIAQP

SEQ ID NO: 286402 - protein, 100 aa, Zea mays
  unsure (1)..(100): unsure at all Xaa locations
  Clone ID: MRT4577_24296C.1.pep
MDPVAAWGITPVEXLHAEIYDLLERDNRGRRLGIELIASENLPSFHGMEALGSAFTNKYSEGRPGARYYGGNDRIDQIETLCRPXRELAAFHLDAASWGP

SEQ ID NO: 286403 - protein, 104 aa, Zea mays
  Clone ID: MRT4577_24297C.1.pep
TQINGGFSFLKTPPALPQCFAVSRKRHRPMGGPTGAMPNFQAPGQFWGAPPSPRLKGCFHPGVKNPPGVGPREPPPRFFFRGLWKGQNLPFPPPFKKTQRGFFL

SEQ ID NO: 286404 - protein, 60 aa, Zea mays
  Clone ID: MRT4577_24298C.1.pep
FLFFFLILFYSFQILYNEHVLLFNIKRQKNWYVKRTSFPSSRSRLNADSCRKSSRIPRQE

SEQ ID NO: 286405 - protein, 70 aa, Zea mays
  Clone ID: MRT4577_24299C.1.pep
TCKGGNRIAGPTPGVSALANVNEKGGASKDLNANSMYILEGGLRAIEYKQFQGIKDKGYPWGTDYIRIWI

SEQ ID NO: 286406 - protein, 79 aa, Zea mays
  unsure (1)..(79): unsure at all Xaa locations
  Clone ID: MRT4577_2429C.1.pep
PTYLLCNASLRETDTSRIVAITHCVSHISPQAYXGVSAAGXAGGIDRPLXCMYKMSPQETELHLDDIANVTACAADLSH

SEQ ID NO: 286407 - protein, 79 aa, Zea mays
  Clone ID: MRT4577_242C.1.pep
FVRPNVIAEAAPVWLLTLGEVFEARVARVGTYLSVLYGSCERHPLPPFYEHRCPLRKEGPKASSFAESLLKKIPPVLVY

SEQ ID NO: 286408 - protein, 219 aa, Zea mays
  unsure (1)..(219): unsure at all Xaa locations
  Clone ID: MRT4577_24300C.1.pep
AGRFPNRTHSSRRSPPPHHFLSRATARSPALLGPTTVPSSPSLLTSAPCLAAARSAEVEDPTVMDGAAMSLTSYEGALRRDTDCDQILASPHTHRTLLGLFHSVVLAAAAADSDSSTKSSEAHSFSNSDVKTVLGSGTQYANGFAVADIERSSLILCGKAFADSAIVKGAITAMIALILSARGGLPXPGWILSFXXSIGLLVAPVXNHDVLRRNPHCSI

SEQ ID NO: 286409 - protein, 167 aa, Zea mays
  unsure (1)..(167): unsure at all Xaa locations
  Clone ID: MRT4577_24301C.1.pep
IASPXTLHGCNFVCLEIKCHRDTSCFTNTYSSALHVFSPVKKPGGSCENWPMVNFRPSFNLVRKALADVQAKSTLMVIPPPSRNQEYPCNYLELELDXLKDQHAYDEDIPFVVNVXIQEPEPFKQTPEPVEQXLLFXLFCRQGENRLRIXLEGCYDGESFYWGLXGF

SEQ ID NO: 286410 - protein, 65 aa, Zea mays
  Clone ID: MRT4577_24302C.1.pep
SPFVSPLYRSNHRRPKSSPPWPRRKHPQSRPSPPPPPPSLYSVGSRRPGRGVLRLWVFPSCSHKP

SEQ ID NO: 286411 - protein, 86 aa, Zea mays
  Clone ID: MRT4577_24303C.1.pep
LVSASLGFDLIPWLLLPISRRHPGNRRPHLHGPRRMSPSSHRPGNQRPHLHGLRRMPPSSRHPGNRCPHLHGQHRLPILSPHPECR

SEQ ID NO: 286412 - protein, 98 aa, Zea mays
  Clone ID: MRT4577_24304C.1.pep
TTLVRHPLLWQSTAAGAHFAQFCRAQSLVMENPIAYYNRTFVFLWRSYGRCTSYLQSWRCRSLVAQHDQLLLSYRGKPCCLLVATTSIFSMPVADSAA

SEQ ID NO: 286413 - protein, 88 aa, Zea mays
  Clone ID: MRT4577_24305C.1.pep
SLIRRVIRSVVPSTCCPTSQVYYFTLPAFYSNPILGSPILCSQSSSGLPKAVSSRSHHLQYKECRTARACECEDTVCDHVASEAGTSA

SEQ ID NO: 286414 - protein, 51 aa, Zea mays
  Clone ID: MRT4577_24306C.1.pep
TGKSIHTTPCFTCQTMSPSGRSTMSTGTRGSTPGKASIVLSRYERSHSYHG

SEQ ID NO: 286415 - protein, 76 aa, Zea mays
  Clone ID: MRT4577_24307C.1.pep
VSMTSLPVDVTHCLAYFVCILARSLEYFFFSNISVRMMIFHFRQDSLLTPESPFYLDGQGGLLQYVEKTLKENMHT

SEQ ID NO: 286416 - protein, 422 aa, Zea mays
  unsure (1)..(422): unsure at all Xaa locations
  Clone ID: MRT4577_24308C.1.pep
IGYLEAGREQTGXTKGRGIGLAQQSNPPKKASLKPLHWVKVTRAMQGSLWADAQKQGNQARSPDIDLSELESLFSTAVVTSTSEKGATRRGSAINKPEIVHLVDMRRANNCEIMLTKIKMPLPDMINAILALDTSVLDNDQVENLIKFCPTKEEIEMLKGYNGNKEMLGKCEQFFLELMKVPRVEAKLRVFAFRITFSTQVDELRTNLTTINDATKEVKESLKLRQIMKTILTLGNALNQGTARGSAVGFRLDSLLKLSDTRSRNNKMTLMHYLCKLLAEKMPELLDFDKDLIYLEAASKIQLKLLAEEMQAINKDLEKVEQELAASESDGAISVGFRKALKSFLDAAEAEVRSLISLYAEVGRNADSLAQYFGEDPARCPFEQVTSILVIFVNMFKKSRDENARNAEAEKKKLXKKKKKAP

SEQ ID NO: 286417 - protein, 240 aa, Zea mays
  Clone ID: MRT4577_24309C.1.pep
FAWAVIGQVSADTRVDMNMASHTSAPIHGDRRVDADIAPNAPALVHGDTMTSNTTALIHRDRRVEIKMPMTHLIHGEGRLDMNMTSPHLIQRERRVDMDMNMASPHLIQGGRRIDMNLSSPHFIHGDRRVDMNLASPHLIHGDRRVDMNMASPHLIQGDARVDMNMVSTSQNGMHTFDLVDINLESGSMPMAATDFMQMHPHPAVYHPKQLVMRDQVIDANKRPNMESDTYFMGGSMHVG

SEQ ID NO: 286418 - protein, 291 aa, Zea mays
  unsure (1)..(291): unsure at all Xaa locations
  Clone ID: MRT4577_2430C.1.pep
MPSPMARIFHRHLLLAVVTLAVAASLLRPAAAVRPFVLVLSGEDFLKDPAAHPSLPSADSDDDDGWDDFADDSPAADPLLSPSSWAPLLDPTISLPSGDETDSPADALFVAGARAMLSAASDGDDVAFTTAAAQIEASAEAGHPGAQSALAFLTGAGMTRPASRSLAFLLHKFAADAGDLQSKMALAYSYFRQEMYEEAVILYAELAEAALTSSLISKEPPVIEPIRLHSGTEENKEGLRKSRGEDDEDFQXTEYQAQRGNAANMYKLGLLYYIGLRGLRRDYGKAFHWFS

SEQ ID NO: 286419 - protein, 200 aa, Zea mays
  Clone ID: MRT4577_24310C.1.pep
MEPKSTTPPPPPVMGAPIAYPPPPGAAYPAGPYVHAPAAALYPPPPLPPAPPSSQQGAAAAHQQQLFWAEQYREIEATTDFKNHNLPLARIKKIMKADEDVRMIAAEAPVVFSRACEMFILELTHRGWAHAEENKRRTLQKSDIAAAVARTEVFDFLVDIVPRDEAKDADSAAMGAAGIPHPAAGLPAADPMGYYYVQPQ

SEQ ID NO: 286420 - protein, 44 aa, Zea mays
  Clone ID: MRT4577_24311C.1.pep
VPYDSCSGAGHTLWATGILISCSHSVPSNLLHMHKPSGNVLSQE

SEQ ID NO: 286421 - protein, 47 aa, Zea mays
  Clone ID: MRT4577_24312C.1.pep
RVQGGKPYRAGTFDADGGRLIIQVELQHAFHQGKFFAGIGKKLKGSD

SEQ ID NO: 286422 - protein, 66 aa, Zea mays
  Clone ID: MRT4577_24313C.1.pep
RVGPPFFFFFYFMAKPFIKAQVKNKTSSPYNTPIKNTTFPIYKYFRFVPYPKTKIYHILMNKKVFD

SEQ ID NO: 286423 - protein, 82 aa, Zea mays
  Clone ID: MRT4577_24314C.1.pep
NSVPSEQIMQCSKFPFFTTSLSARIYWLKCALAPCNGPAKKKKEGDGFSSKVLKFRCTHAFAADWFGPGQSSVGGQIPRLKI

SEQ ID NO: 286424 - protein, 57 aa, Zea mays
  Clone ID: MRT4577_24315C.1.pep
SLNNIVGIFRTKKSVNLNTGVHSIIRKYNYRVRPFNYPPVDKVLAGKHRIKRHNQHQ

SEQ ID NO: 286425 - protein, 120 aa, Zea mays
  Clone ID: MRT4577_24316C.1.pep
MNAPDRYERFVVPEGTKKVSFEKDTKIMNAASFTIEREDHTIGNILRMQLHRDPNVHFAGYKLPHPLQYKIIVRIHTASQSSPTQAYTQAINDLDKELENLKQAFEDEKTRFEERMKQGY

SEQ ID NO: 286426 - protein, 63 aa, Zea mays
  unsure (1)..(63): unsure at all Xaa locations
  Clone ID: MRT4577_24317C.1.pep
VLPQKHLSKXSDMQINEWXKPPLHAVNNIEEDLLRKQSLAAQKAYEKKYKIPAGAQIVQCAPQ

SEQ ID NO: 286427 - protein, 43 aa, Zea mays
  Clone ID: MRT4577_24318C.1.pep
ECLTSSICGRCASALICLSTLLAYASCFSASVSILKTCPPYSL

SEQ ID NO: 286428 - protein, 165 aa, Zea mays
  unsure (1)..(165): unsure at all Xaa locations
  Clone ID: MRT4577_24319C.1.pep
MARFCCFGAGCSELTGHASATSGKGKGCQGQVKVSYGFSLVRGKTNHPMEDFHVAELAEVKGNELGLFAIYDGHLGDTVPAYLQKNLFPNILNEEEFWTHPDRAITKAYEKTDKAILSHTPDLGQGGSTAVTAILINGSKLWVANVGDSRAVLLXGGEGIQMSID

SEQ ID NO: 286429 - protein, 85 aa, Zea mays
  Clone ID: MRT4577_2431C.1.pep
MDQRGKRADNIWPIYPPFKHDDQGLRRETRPNWGGSSSKGERTRGYPVFYSIPLGKKAPLVSWQLPFKQGVGFQHAVYPIAHTAF

SEQ ID NO: 286430 - protein, 288 aa, Zea mays
  unsure (1)..(288): unsure at all Xaa locations
  Clone ID: MRT4577_24320C.1.pep
MMASSLPLVTTGLRHPPPPQQSPRVVLQSEDPTEWCAWAHQGHRLWVAMPDFFWVYTYKXDRCPFRGNHVWTTCPYAHWGERARRRDPSRYAYAAATCPDYADSKRRNRLAGSSAPPTCARGLRCGFAHGVFETWLHPTRFRTRMCEAGAGCSRRVCFFAHCLAQRRREDDLVLPLVVFPAITMPPPLPLPLPLPPLAFVVPNNPLPPVPPALPCPRSVSVVAHQVDRVTQAMQQGRSVRLLTRADADAASSSSSYFSCSRAPASNADGATAPGDDEDTDNRGIVTGC

SEQ ID NO: 286431 - protein, 61 aa, Zea mays
  unsure (1)..(61): unsure at all Xaa locations
  Clone ID: MRT4577_24321C.1.pep
RVPLGENPVLFRGPKNPLQAVRPFGGAPGGPLTPPQPXVWSKARKFXEXARARKITRGFKV

SEQ ID NO: 286432 - protein, 60 aa, Zea mays
  Clone ID: MRT4577_24322C.1.pep
ALLHAHPERHAPFYQVLHCVDIEGGGVRVVSETYGPFCLRHIGLYAPGKKCPVDLSFSFG

SEQ ID NO: 286433 - protein, 73 aa, Zea mays
  Clone ID: MRT4577_24323C.1.pep
FGSSSIVSTPSTLLLFTSTQQLTRPVRTTLQDTPNQTTTTQPTTTSSTSLSISLYSSLTMYLWKQHHLDENIC

SEQ ID NO: 286434 - protein, 118 aa, Zea mays
  Clone ID: MRT4577_24324C.1.pep
MSSSTRFSAPSRTPRHAVVTTTRSSSSSMPRIWWVADLMRWMSRAKRRSAKRQHAATSAVGPQMEAAADPEERERKAAFERLDNLGRCIADVESSGEKVFRALVNTRVSLLNILSPAF

SEQ ID NO: 286435 - protein, 116 aa, Zea mays
  Clone ID: MRT4577_24325C.1.pep
PRGRPGLLIRHLASLRLEVHPRPRRFPAKRRRPSPSAQRRSVAVLHTHPPPWPAPASPGIAVLDPLPLSRYARVREGEKRRRVRQRHLCVPSSLAHSFSFVSLLLRGLTHSPIYVS

SEQ ID NO: 286436 - protein, 84 aa, Zea mays
  unsure (1)..(84): unsure at all Xaa locations
  Clone ID: MRT4577_24326C.1.pep
NQILKALTKEFYPIGSVVQDPXLDQVILQQGDQRNNVATFLVQTEIVQQDSYHILVFYTQHFKCLCVPIISIHMKTGIPPWAPC

SEQ ID NO: 286437 - protein, 102 aa, Zea mays
  unsure (1)..(102): unsure at all Xaa locations
  Clone ID: MRT4577_24327C.1.pep
RRGVPGCWLLCVLAGDSLNPLQAVAAVICTSISMQTTIGNCMIHVIIFLVSFLLLVIYQILEDSCDPFPCILFKKKKKKKXXXXXXXXXXXXXXXXXXXXXX

SEQ ID NO: 286438 - protein, 83 aa, Zea mays
  Clone ID: MRT4577_24328C.1.pep
IIQFPIGVCMLILVHITAATACRGFKLSPARTHNNQQPGTPRLQVILIQAHLRQPHPTVSFRRFALQQKIGDNHQVILILNLN

SEQ ID NO: 286439 - protein, 80 aa, Zea mays
  Clone ID: MRT4577_24329C.1.pep
PKDEAHFATQVIACRDGSGSFPRSRINDGYCDCGDGTDEPGVCLHLSWICPNLTGNWELNCGISGRFHQLLRDLVPVAIN

SEQ ID NO: 286440 - protein, 485 aa, Zea mays
  unsure (1)..(485): unsure at all Xaa locations
  Clone ID: MRT4577_2432C.1.pep
KLPARHAPPASIPCAVPTPNSLPCNGGEILCSRRLCLPRWLASCAAVSSSSPPSPSPWPLLSFVVAASLLRPAAAVRPFVLVLSGEDFLKDSAAHPSLPSADSTDDDGWDDFADDSPAADPLLSPSSWVPLLDPTSPPLSGDETDSSADALFVAGARAMLSAASDGDDAAFATAAAQIEAAAEAGHPGAQSALAFLTGAGMTRPASRSLAFLLHKFAADAGDLQSKMALAYSYFRQEMYEEAVILYAELAEAALTSSLISKEPPVIEPIRLHSGTXENKEALRKSRGEDDEDFQITEYQAQRGNAANMYKLGLLYYYGPRGLRRDYGKAFHWFSKAVEKGETRALELLGEIYARGAGVERNYTEAYKWLALAAKQQHYSAYNGLGYLYVKGYGVEKKNLTKAKELFELAAENKEAGGHYNLGVLYLKGIGVKRDVIRACNLLLHAVNAGQPKAIYQVAKLFQKGIGLKRNLHMATMLYKSVAERR

SEQ ID NO: 286441 - protein, 105 aa, Zea mays
  Clone ID: MRT4577_24330C.1.pep
PLRGARVGTCTSSGARLWPSTVTAPLCDNSANTRMKTLTTRLGNSTTGLATIRAANKAVSDETRARSSTMGQSRTVDHVNTDTRTNADVPENATVALAQATTTEP

SEQ ID NO: 286442 - protein, 46 aa, Zea mays
  Clone ID: MRT4577_24331C.1.pep
MGAGEVQVQTAVPDEEADQLAADSAYDTPNEETYAPAVETEVVVSK

SEQ ID NO: 286443 - protein, 131 aa, Zea mays
  Clone ID: MRT4577_24332C.1.pep
MAKGGLAKLRCMIKRWHSSSRIARAPPSPGPGEDDRCAARGASFHGADEVPEGLHPVYVGKSRRRYLVAEELVGHPLFQTLVDRIGGGTGAAAASTVVGCEVVLFEHLLWMLENADPPPESLDELVEYYAC

SEQ ID NO: 286444 - protein, 79 aa, Zea mays
  Clone ID: MRT4577_24333C.1.pep
PIAFSQTDTTRMCDDFMTFTTTGPALALDTHRALTVLDEQLDEKLFLRVLGEAQPHRCRWPGHVPLRARGPSRDFNDPR

SEQ ID NO: 286445 - protein, 137 aa, Zea mays
  Clone ID: MRT4577_24334C.1.pep
FFFFFFFFFFFFFWLVSFFPPWEREAAAPAWERGGDGVRSGKGTRGGVQGYPTPFGRFRQEEGFSLTTSLQTRFGWLPLRFGLVQMDPSRSNLAGGSNPSQFANVESWNFDGCYYNIMGDENLQHNANVHEGQGLPL

SEQ ID NO: 286446 - protein, 440 aa, Zea mays
  unsure (1)..(440): unsure at all Xaa locations
  Clone ID: MRT4577_24335C.1.pep
MRRLLQTLRPLQALPLNPAPGIPTPLRLLSTASSAASSDSDSAASPAVAPPPAADADFDSADYDLPTPGPAPSRKINNPAAALRKVRFDPSLRARADEALFGKGLGAAAVDEEDEDRSRDVALALLDAALEAPDEDEEDLGEVREEDQMSLSVGIVGAPNAGKSSLTNTMVGTKVAAVSRKTNTTTHEILGVLTKGNTQICFFDTPGLMLGHHAFPDWDVSILVEIVWSSLSLYDLPVVMLDVNRHLNLSDSRIIKLIKRLGTLVSQNYRRILWRNKVDLEEYKKNLLKVXKEYRDLPXGYERYFMVSGLKGKGVKDLVQYLMEQAVRRPWDEEPTVMTEEVMKTITLEVVREKMLHHIHQEIPYVIEHRLMGWKELKDGSLRVEQHFIAPKQSQRQILVGKNGSKIGRIGIEANEELRSIFKRDVHLILQVRVAKKRSA

SEQ ID NO: 286447 - protein, 88 aa, Zea mays
  Clone ID: MRT4577_24336C.1.pep
RTLHRNTSHLTTAALLTKKDAYHDVQCTYTRSTPPFPTTFAPSQYTYYHLSLRATHFTLLSPPTFHNQLTVSNSTAYLQHRPQTLNPL

SEQ ID NO: 286448 - protein, 59 aa, Zea mays
  Clone ID: MRT4577_24337C.1.pep
YIKFVAPFVIVNVKLKYPQQLRSHSVGIVARPDKKANDSDSYMDIFAASFLENVALEFP

SEQ ID NO: 286449 - protein, 435 aa, Zea mays
  unsure (1)..(435): unsure at all Xaa locations
  Clone ID: MRT4577_24338C.1.pep
VDFAAEGEAVSSTPQVPNHPVPGTAVVHAAQQHTAVQTSWSPSRATPGALSAARELLXHPPSSTASLGAMKQLRDDVDRLLGMAHSTSTRSRMRSSRRQHEASASVRSPSVRXTPMGTRSQTGVSLAGVGCAALVDHLRAXPPKFRPHLPEKYDRTSNPSEFLQVYVIAITAAGGNTAVMATYFHVALSGPARTWLMNLAPGSVYSWEELCARFVANFASAYQQHDVEAHLHAVRQEPWETFWKFISCFTKGVRDEKMLEKLATHDVETVPTLFSLADKCARVTEGRAWHSTPQTRATQSGGLGAVPRDGKKKKKKDHNYQKLRSTALVVAAATGGQGDRNKRPRPQRGISGSCSVHPNGRHIAAECREIIDLTKRVSERCEQSSKDVSPPRHRPGKEKVDDGEVAAAERDLGYQSPEGDLKDVFAGGSYSGGDN

SEQ ID NO: 286450 - protein, 132 aa, Zea mays
  unsure (1)..(132): unsure at all Xaa locations
  Clone ID: MRT4577_24339C.1.pep
GKWKALMIDNLDFKDXXYIYALDSLKXVGIEMWQVKXGSMFDNIIINDDHELAKSFAEETWGKYKEAEKDAFDEAEIKKEEEDAEKGGDDEDDDIEDEEKDXKEEEKKEEYNEKDKRNIIINRRKKRYKRKE

SEQ ID NO: 286451 - protein, 580 aa, Zea mays
  unsure (1)..(580): unsure at all Xaa locations
  Clone ID: MRT4577_2433C.1.pep
MAIRSKAWISLLLALAVALSARAEEEPAAAAEGEAVLTLDVDSFDEAVAKHPFMVVEFYAPWCGHCKKLAPEYENAAKALSKHDPPIVLAKVDANEEKNRPLATKYEIQGFPTIKIFRDQGKNIQEYKGPREADGIVDYLKKQVGPASKEIKSPEDATAXLIDDKKIYIVGIFAEFSGTEFTNFMEVAEKLRSDYDFGHTLHANHLPRGDAAVERPLVRLLKPFDELVVDSKDFDVAALMKFIDASTIPRVVTFDKNPDNHPYLMKFFQSSAPKAMLFLNFSTGPFDSFKSAYSAAAEEFKDKEIKFLIGDIEASQGAFQYFGLKEDQTPLILIQDGDSKKFLKVHVEADQIVAWLKEYFDGKLTPFRKSEPIPEVNNEPVKVVVADNVHDFVFKSGKNVLIEFYAPWCGHCKKLAPILDEAATTLQSDEEVVIAKMDATANDVPSEFDVQGYPTLYFVTPSGKVTSYDSGRTADDIVDFIKKSKETAAXRRHHHPGATGPFDSFKSAYSAAAEEFKDKEIKFLIGDIEASQGAFQYFGLKEDQTPLILIQDGDSKKFLKVHVEADQIVSWLKEYFVSAG

SEQ ID NO: 286452 - protein, 50 aa, Zea mays
  Clone ID: MRT4577_24340C.1.pep
SQMLHVWSLGLWSLGARNVFGGLMPPKPLKWRWPKERDEDNKNGRAAALE

SEQ ID NO: 286453 - protein, 90 aa, Zea mays
  Clone ID: MRT4577_24341C.1.pep
DRLRRVSHQGYSTEAEFEEPRVIDLWDLAQSANLTDKELEAFREELKHFEAKIEEHNHYQKQLEIAHEKLRHAESVGDGERVSRSREKHA

SEQ ID NO: 286454 - protein, 252 aa, Zea mays
  Clone ID: MRT4577_24342C.1.pep
MGIRSQTGVPLAGVSCAALADHLRAASWPPKFRPHLPEKYDGTSNPSEFLQVYVTAITAAGGNTIVMATYFHVALSGPARTWLMNLTPGSVYSWEELCARFVANFASDYQQHGVEAHLHAVRQEPGETLRKFISRFTKVRGTIPRISDASIITAFRQGVHDEKMLEKLATYDVETVPTLFALADKCARAAEGRAWHSTPQTGATQSRGSRAVPRDEKKKKKKDCDYQKPWSTALVVAAATGGQGDRNKRPRP

SEQ ID NO: 286455 - protein, 93 aa, Zea mays
  Clone ID: MRT4577_24343C.1.pep
GDAFFGALGGQDDATAEGDEQEMREAFKVFDVDGDGFISAAELQEVLKKLGLPEASNMGNVREMICNVDRDRDGRVDFNEVKCMMQGITGWGA

SEQ ID NO: 286456 - protein, 157 aa, Zea mays
  Clone ID: MRT4577_24344C.1.pep
YQPLKRNFPGPLFMGIFKIMPFKACSLFFIHLKRLLICSRLQGFPFICGSFWGGVPPRWFFFFSQETEPGGLGPSFKYFGGPLSANLRGDRVGFFFFFLKKNYLWGSRQVCFPPPKNLALQNFFVPSPPPAKCGGPPICSPFFLGGGLRMEFSWILV

SEQ ID NO: 286457 - protein, 151 aa, Zea mays
  Clone ID: MRT4577_24345C.1.pep
KLKYHAHLRKITRYNPTRGGPFHFRAPSRIFYKAVRGMIPHKTARGAAALERLKVFEGVPPPYDKTKKVVVPQALRVLRLQPGRKFCTVGRLSSEVGWKYEDVVARLEERRKAKGAAFYERKKIAARQLADAKKNASVKEETAKALANYGY

SEQ ID NO: 286458 - protein, 60 aa, Zea mays
  Clone ID: MRT4577_24346C.1.pep
FLFCNMAMYHKSVIVKFTLYYSIPSLKGKKERRECTVKEMKIYSRSLCAFILFALNCIYW

SEQ ID NO: 286459 - protein, 46 aa, Zea mays
  unsure (1)..(46): unsure at all Xaa locations
  Clone ID: MRT4577_24347C.1.pep
GAFXGEKPPGGGRETWSDSWNQNMRRAXCPIYXGSESPPAPGINFG

SEQ ID NO: 286460 - protein, 78 aa, Zea mays
  Clone ID: MRT4577_24348C.1.pep
AQGFPALEKRAREPPPQFNCEFSFPSLSAAPRSLTILCLSGLRDVRVGIVSGHPHFLPTESMLMAHGLTPKLIIRTQL

SEQ ID NO: 286461 - protein, 46 aa, Zea mays
  Clone ID: MRT4577_24349C.1.pep
KNLLYMSIIICNVCTTLERLLATRVDRSSQHYAQCKANSLPPDCLI

SEQ ID NO: 286462 - protein, 48 aa, Zea mays
  Clone ID: MRT4577_2434C.1.pep
RYKSCPRLIPRIEVLHDCACPNHQLVTEHGLQTGLTYILEKILGYLVH

SEQ ID NO: 286463 - protein, 76 aa, Zea mays
  Clone ID: MRT4577_24350C.1.pep
RLLIIPSNYLSLQHGLPASSDFLRGCRQRPSLFVLTCLLYGSWSYSNSIRAPHDFELPADRGKITEKEQIRSALAS

SEQ ID NO: 286464 - protein, 71 aa, Zea mays
  Clone ID: MRT4577_24351C.1.pep
NLRRCLVVSATFWHGVVQGASAHTAKDAVTREAQLWGALRPGCLVSMLLRCIALVYQGVRSWYCGPSSCTV

SEQ ID NO: 286465 - protein, 94 aa, Zea mays
  Clone ID: MRT4577_24352C.1.pep
FFFFFFFFFWGGVFFTLQPDLTQRGMEITLFIGKKNAEKLAFSNKKDKKPPTQKKIMGNKPQRKKKKPPKQTNKCRGKNPKWGTKTENSNPGGP

SEQ ID NO: 286466 - protein, 36 aa, Zea mays
  Clone ID: MRT4577_24353C.1.pep
PSTTTCLPSQSIDHPSQRPGVGHQRRRCRRSCCRWR

SEQ ID NO: 286467 - protein, 202 aa, Zea mays
  Clone ID: MRT4577_24354C.1.pep
MDIAKLAGVDAVKLVVMIVRAAQTVRRNKKTCRQLVHHVQIIGDLLEKLQTPAMMQHPETRNGLNDLEEILHEVYMFVTSCQNNKYLYHLFTGKKQADQLRILQKRMNSCLQVFPLISHIDTTDRLDKILEIIASTFTGCKMCQDCLQVAHPATPGLKCIGEVKRCSLQLNCADAFNFQFVPSGGATNNFSDRNLMKVALAA

SEQ ID NO: 286468 - protein, 45 aa, Zea mays
  Clone ID: MRT4577_24355C.1.pep
RADGTCDYAGRPSVAGDATDLLHRFPTRSHAHRQTAVQRLTRPWV

SEQ ID NO: 286469 - protein, 41 aa, Zea mays
  Clone ID: MRT4577_24356C.1.pep
RGRYNTCLNTNPTYKCFILYNIHRDFLKCTIVSSAQLIHLL

SEQ ID NO: 286470 - protein, 910 aa, Zea mays
  Clone ID: MRT4577_24357C.1.pep
YHQIWMKKEDEPKTSFITPSGTYCYLRMPEGLKNAGGSFSRMTAKVLQSQIGRNVLTYVDDIIVKSTKQEDHIADLQETFASFRQAGLKLNPEKCVFGVKKGKFLGCLVSTKGIEANPNKIEAILRMEPPTTRKGAQRLTGRLASLNRFISRSAERNLPFFEVLKSAEVFQWGPNQQKAFEELKQYLIDLTTLTPPTPGAPLLLYVAASHSAVSAALVQEKLYGQLKKQVPVYFVSEVLSVSKKNYTELEKVLYAVLMASRKLRHYFQAYNIIVPSSQPLKDIMRNKEATGRIGKWAAELNEFYIDYVHRSSIQSQALADFIADWTPGAQGEEVNKDAEAWTVFCDGSWGTFGAGAAAVLVSPSKVKTCYAAKLDFSCTNNIAEYEALLLGLRKLKAMGIRRAILKTDSQVVSGHVDKSCKAKDPKLEKYLDTVRRIEASFEGFSVKNIPRGQNEHADLLAKSAAQGLPLPSDVFFETIKAPSVELLERAVLNISPVYSEDWRTEIISYLQGNFLSDDEAYNKRIEARARPYIIIEGELYKHGVCAPLLKCLSRAEGIELMKEIHAGLCGSHIGSRPLLGKVFRQGFYWPKAASDAAELVQKCEGCQKCARDQKQPSSLTQLIQPIWPLQRWGLDLLGPLPPAQGNLKYVVVAVEYFSKWIEAKPLATITSATVQKFFWQSIVCHFGVPKAITVDNGTQFDSEAFRNFCNQIGTKIHFASVRHPESNGLVERANGIIMTGIMKLIFNQPRGKWPDQLIKVVWSHNTTTSRSTGFTPFKLLFGDEAITPEEAKAGSVRVVASAESGPEDACLVEKDALEGIRLQAVENINKYQAETVKWRDRKVRLKNIEPGHLVLRRVVNPDTVGKLQLKWEGPFLVVSSSRPGSYRLKDMDGNEIPRSWNADELRRYYV

SEQ ID NO: 286471 - protein, 112 aa, Zea mays
  unsure (1)..(112): unsure at all Xaa locations
  Clone ID: MRT4577_24358C.1.pep
MTTTRDRGAXGGATSRVGGXXIDLGEGWDWGAIPRLLSSACLLLCSGGCFGCCDKTVKQLGELSRNLITQDQITIGEPFWSTTTGAIPRLLSSACLFLCSGKLAVLVAAIRL

SEQ ID NO: 286472 - protein, 55 aa, Zea mays
  Clone ID: MRT4577_24359C.1.pep
NLLTTEVTRPISQVKSLTKNSQGWVQTHDRFFYAGRPMFYLFFRRKTPRSLCRAS

SEQ ID NO: 286473 - protein, 67 aa, Zea mays
  Clone ID: MRT4577_2435C.1.pep
TGLSSSTMGYLLSKFYPVHNQHKFFPTWSSYLRTYGVLSCDSPMNTQVGLTVLVSICTFFKQTNPKI

SEQ ID NO: 286474 - protein, 89 aa, Zea mays
  Clone ID: MRT4577_24360C.1.pep
PHERRGPDVAILHHVAQQQQAQLKRAPLPCSRVGYDAFRSITPVHHCARAVYRESTNSMVLFIGPAPRLLLTLQPQDRMQILLGASVRA

SEQ ID NO: 286475 - protein, 51 aa, Zea mays
  Clone ID: MRT4577_24361C.1.pep
SQMYLFWEFMREETAEQVSKEQSISAAGQFSFPGQAYMATKHVVRAVLRCI

SEQ ID NO: 286476 - protein, 135 aa, Zea mays
  unsure (1)..(135): unsure at all Xaa locations
  Clone ID: MRT4577_24362C.1.pep
HQVYHFYNLSTNATXIVTLVALIALIVTPTQAFIIPQCSLATSAITPQILPPVTSMPCXHPAEQAYMLQLPLASSVSQQPIAQLQQQSLSHLNLQTIATQQQQHILPSLSHLNQVNPVAYLQQQLLASNPLALAN

SEQ ID NO: 286477 - protein, 64 aa, Zea mays
  Clone ID: MRT4577_24363C.1.pep
KEQLRRSRHSYKHLSLYSARPLFFFFFFFFSRFFFFVVFFFFFFFSNFFFLKAKKPITKYIFYK

SEQ ID NO: 286478 - protein, 82 aa, Zea mays
  Clone ID: MRT4577_24364C.1.pep
PHNTRPTTVIGPTAPHTPSILNCPRQPPQALIYSSFSSLCAALVCNSVPCFMPISNRMQTSGSQKQKKKKKKKKYSALLPLL

SEQ ID NO: 286479 - protein, 71 aa, Zea mays
  Clone ID: MRT4577_24365C.1.pep
MYSDIVRLAAIYLVRGAAAGGRISQAVRCPGGVRRVSWFDGLRLVGGRHTHALNDVDTCRSRVRCHDDSGQ

SEQ ID NO: 286480 - protein, 156 aa, Zea mays
  Clone ID: MRT4577_24366C.1.pep
AHASALGFLASDIVPTALLQMYSGCGSPRDANQVFDEMMTPDVVAWNCVMHCNVRYDYLDRALRKFCRMVSTGLAPTESTLSSVLSGCGRSGDLHHGRALHGWVVKSEELDPDLPLHNALLDMYCCCGDLDTAVLVFRKIETPDLGAWNTIISGFS

SEQ ID NO: 286481 - protein, 46 aa, Zea mays
  Clone ID: MRT4577_24367C.1.pep
LWLSMKKGHFKNYILQNIEPCFYFATRDYGSNCKRIMVMIRFARNP

SEQ ID NO: 286482 - protein, 412 aa, Zea mays
  Clone ID: MRT4577_24368C.1.pep
MGSAHSSVSTAGGEDEEDDEDPSAAAVSSAGAQAPPPALSPSPVRVPPASASKVLEQEPEVLPCLAADSPLSPQPSAAGTPRLLAGPGIKVWDPCHVLLPPPPPSPHAGRQVDAAAIEVVVVSHGECAAAMRPDLVGGRWPATALTARGERQARALAVFLRSRGARLAAAYASPLDRARATAALVCRELDFPEEQIQLSDALTEMSQGQWEGCPKSEIYTPEMVNLMESTQPDFSAPSGESLRQVQFRMMEFLNRTVLRLPEKVAMGDTLSQQNELKGFSRQSSSNSVQDGPPWDSLYRLNRHSLQRKKSGKSRLQFVTSGDNEAEDDFSPKEVNQRHLLHEGSVGSSAATSIAIFSHVTPIRCLIAGLLDCNPIMSKRICIDDSSVTVLEHSLKTGWQIKRLNDTAHLRLL

SEQ ID NO: 286483 - protein, 134 aa, Zea mays
  Clone ID: MRT4577_24369C.1.pep
IFFFFFFFFFCFFFFFFGFFKREGNCHCNCPKNEIWSCFFQEVLKPFLKFFQLVLTWFGVKKLRNLEGNPLKRGGRSDHRGGSTHGSPGPGSALDAGRNLPCLFSGRQNRDALNALWAGGGGFKPGSWLKRGPP

SEQ ID NO: 286484 - protein, 86 aa, Zea mays
  unsure (1)..(86): unsure at all Xaa locations
  Clone ID: MRT4577_2436C.1.pep
IPFGFPPXELIKKGVLVLGKKFTLDVFFPFFFVASVSFFFSRRFPAVSNPNWFFEFPHFVFRVKLISKASRASPICCLVFFFSLAF

SEQ ID NO: 286485 - protein, 197 aa, Zea mays
  Clone ID: MRT4577_24370C.1.pep
MLKDRQSKMVKSAPPARFHGEAASSHAPTAPANPALSIRTHTNIETQQKTDATDTEESDEGAPTPPESPVGNRSRKVIRDAGVSDEIWDQLQKDRAEEERREAEYLKLKEAAQKVATEEARERIMRQLVEEEKRREEEAKRQEKLRALGACPVGYSWIKQADGYRCEGGSHWLSNGRLVHIWDRLRRLKLLISVSLT

SEQ ID NO: 286486 - protein, 54 aa, Zea mays
  Clone ID: MRT4577_24371C.1.pep
MLIKLLMIRTWAHVLPILFSIHYKDLVKIATRSWTRKDREGETAVRCGNSCTSD

SEQ ID NO: 286487 - protein, 265 aa, Zea mays
  Clone ID: MRT4577_24372C.1.pep
MSGEHAKREIVTGEKPTSSRRTLSRDSSNKNKEESSSSTKSLRRGDKKKKMKKVVYYETDSSSPSISSSESSVASKQHERKKYKEYNKVQGLKTAKKIWDVLKTAHEGDEVTKITKRETIEGELSRFVLDKGEEPQAMYNRLKTIVNQVRNLGSTKWDDHEMVKVILRSLVFRNPTQVQLIHEDPRYKLMSPEEVIVKFVSFELMIKDSKHIINLEQGTTSTPEVQPVTFKATEEDKRESTPSRLQIDASKLNNEEMALIIKSFC

SEQ ID NO: 286488 - protein, 58 aa, Zea mays
  Clone ID: MRT4577_24373C.1.pep
AICLTSLTPTSYSISPPIMGTVYSSSQTKIVDTPSIISTSLLLMTSRTPTSSISYELH

SEQ ID NO: 286489 - protein, 211 aa, Zea mays
  unsure (1)..(211): unsure at all Xaa locations
  Clone ID: MRT4577_24374C.1.pep
HVTRPPPPQPVSRPQQSVVWSSGSPCQRRTCFTTSSGVVNHHRSLSMARRISMTEKAMIRLCTLIVSSGVGICSVAGADFYVGFSCIRTSFARAVPILVLAFLSGRVASISILRRGGLRRLGGWWFVLGINNRGXQKKTXXPLAAXXXPCXRXPARPXRXGGCXLXWXPPPLXXASGVXXWXXAAARXALWRLPPAPPRGCPPTXXACVCR

SEQ ID NO: 286490 - protein, 105 aa, Zea mays
  Clone ID: MRT4577_24375C.1.pep
PGYRPKKLYARLLTSERVRPMTLKHTLYTFQISFESKTKRKEKSFFGICRARNMKTIYFVYMSYSFPFPQLFYILEIISEDEHHGSVLETTQFTKYDSGRLPFLN

SEQ ID NO: 286491 - protein, 83 aa, Zea mays
  Clone ID: MRT4577_24376C.1.pep
EMHQRYYQKLKSIFHKLEINISEIKLLHNNSKKKMHTCKQCHCAEKGLIGVAALKMMNLTKRLKLSVYYAPKILALINQPTRP

SEQ ID NO: 286492 - protein, 84 aa, Zea mays
  unsure (1)..(84): unsure at all Xaa locations
  Clone ID: MRT4577_24377C.1.pep
TKPNIITQCXSLTSNSIILHFLPPNSSMIFKHLTIQSNXQHQSLXLSFYKQPIFQLQQQTLSHLTIQSISTQHKQQYLPTLNHL

SEQ ID NO: 286493 - protein, 106 aa, Zea mays
  Clone ID: MRT4577_24379C.1.pep
GGNPGGPHVPTSPQKLTSWGGGRGGPRHMSRALSLNARSLPERPPSCQQRATRPKTEGRGTQQTRNEKTGAGSRRPGEGAARGRHAADLPGERGYYQNCENTGEEG

SEQ ID NO: 286494 - protein, 60 aa, Zea mays
  Clone ID: MRT4577_2437C.1.pep
RLAPPTCGTASSFWESPCPPGAWAPTCLTGLSPTPPLFRSGSSAPSPAASTVRSVEMDGQ

SEQ ID NO: 286495 - protein, 48 aa, Zea mays
  Clone ID: MRT4577_24380C.1.pep
KKKIKKKKKIKKNFLIKSVRSIVSKLTYTSLLLHTFFIVSPKLNSLSF

SEQ ID NO: 286496 - protein, 342 aa, Zea mays
  Clone ID: MRT4577_24382C.1.pep
MHRAGSTHRWSPGARAFSTAPATRTTVPLAHLAALPASLPESGYTVTPPVQPWPRRLTARSLSRLLLGAATPELAVLALRHALFHAAHPLPPSLPVFAAALSRLSHADAGAAARHLPPVLSLLRASRLPAFSDRPFLPLLRALRPLPSLRLFLSLPSFNSRPSTRSFNALLHSLVSARRRRLAAALFRAAPTKLYITPNLVSCNILLKGLVGIGDLDSALKVLDEMTGWGIVPDVVTYTTVLTAYCAKGDLEGAQQLFDDIIASGRRPDATMYTVLIDGYCHHRKLQDAARIMDEMGAAGVQPNEGTYSVVIEACSKEGKSTKARDLTREMLGARFVPDTPL

SEQ ID NO: 286497 - protein, 126 aa, Zea mays
  Clone ID: MRT4577_24383C.1.pep
YSLIPEYLNQPLARVLIIYAAFKFTSILYLLTFGQLLVLSIGMELPCFSCACFVSSWLCCTVRLTVSPALMHRASHGFPGCSSALQLRWHSIVGPMILIAWFVQLAKDRHQRPVFTRAYPPEFAPY

SEQ ID NO: 286498 - protein, 102 aa, Zea mays
  Clone ID: MRT4577_24384C.1.pep
IPNQLKKINNLQTKGILGAKDQRTVTSKARPRLLLQGAVQSYVQRVPDKLQVTKKAVLHVFPAALPQSIRLSCLCPRCQLSGLDVPFHAAPTSTHTPTVVTR

SEQ ID NO: 286499 - protein, 100 aa, Zea mays
  unsure (1)..(100): unsure at all Xaa locations
  Clone ID: MRT4577_24385C.1.pep
MVSFEMNDLNKNGLGQTSRGIFXITTGXVNFFDKGLIAMGNNQILTGVGKTIXGLKPTMQIFTKPKNYKGTISCRAGRLLVLIAWPVIGMHLEAYGLIVL

SEQ ID NO: 286500 - protein, 49 aa, Zea mays
  Clone ID: MRT4577_24386C.1.pep
ARNSARALDLYWLIENASTLLMHLSWYSHDTDSNFILILDDSKIHRLGR

SEQ ID NO: 286501 - protein, 97 aa, Zea mays
  Clone ID: MRT4577_24387C.1.pep
GIEALEVPVMTVEHGRGAYGAPDIVCASRLPEHRGGRRRRMPHSKRGPVDGPGEGVLDRPPVELALPDLSFGSRRDQVELGGRHIPIHRSIFSERPA

SEQ ID NO: 286502 - protein, 86 aa, Zea mays
  Clone ID: MRT4577_24388C.1.pep
RRMHAYVSSEFGSSSSRAYATTSSDRGLACLGSHVDTFIPSQVVPIHLSDFIANQPDFDVYQAVYIYSSSHRIALCDMLVAYHIIT

SEQ ID NO: 286503 - protein, 54 aa, Zea mays
  Clone ID: MRT4577_24389C.1.pep
IQHVSRDHNGTVLNRHRQDHYGLHDAHKSLPDLNFNSLFPSWIFLMTLSQIKHK

SEQ ID NO: 286504 - protein, 206 aa, Zea mays
  Clone ID: MRT4577_2438C.1.pep
PSGTKGKEERELKFGAPRKKIIRLVAQLTQTGTGIWTAWVWGAKTQPEGPSWGWPPGQGPKLGPTRSPQKGPRRGSPGAQAGTGNQGQDRWPTEKCPVALGPGPKGLRPMERKRKEVKQARSLCAREEASRAKCPPAMEAGKELGRAGGSFVWAPEEMGAERAEGRGHDAGSSAWAQERAQGEKSSAREELATGTWRAGRGTAAIP

SEQ ID NO: 286505 - protein, 1551 aa, Zea mays
  Clone ID: MRT4577_24390C.1.pep
MSQRPRKKNREKTHPEKQTKNPQSMKPTTSAAAAAVAAVTVTTDDPSPSPSDSTSATFTVDRRGDASASCRWTLPDFPRTRARTFYSRYFEVGGFDCRLLLYPRGDSQALPGYLSLYLQVLDPKAPVSSSSSTTTTTSSKWDCFLSYRLSVVHPTDPAKSLGRDSWHRFSSKKRSHGWCDFAPSSSAPFLFQPHDALVISADISVLSEAASFSDADGRFNWKVLNFGLFREMIRTQKIMSPAFFPASASAGGTDCGLRISVYQSNVSGAEHLSVCLESKEPVVQVASGSSALASGGTGSGVPDGDRGCWCLFRISILNQRSGGSHIHKDSYGRFGADSASLGWGEYIKMDEFLAADGGYLVDGAVVFSASVHVIKESNSFSRSLPMVPGICGAGGGRAGARKSDGHFGKFVWRIESFTRLKELLKKRKIAGLCIKSRRFQVGNRDCRLIVYPRGQSQPPCHLSVFLEVTDPRNTTTEWSCFVSHRLSVINQKVEEKSIMKESQNRYSKSAKDWGWREFVTLTSLFDQDAGFLVQDTVVFSAEVLILKETATMQELTDEDSETCSSTYGCQIEALPKRPSFTWKVENFVSFKEIMESRKIFSKFFQAGGCELRIGVYESFDTICIYLESDQSSGYDPDKNFWVHYKMAIVNQKNSAKTVCKESSICTKTWNNSVLQFMKTSDMVDTDAGFLVRDTVIFTCEIIDCCPWFDFSDLEVWASDDDQDELSTDPDELVDSEESEDMSGDEEDMFRNLLLRAGFCLTYKDNYTQPQVILREKIITDATAIAGFLTDLRVYLDNPAKVKRMLLPTKVSTKSGGTKDTSKCDSSSSSTSLITLLMGISALKQAIIDLLLDIMVECCQPSEESGSSASTKAFPDSNGASSPPELSVEGDLTEYACSDVYARVESNSDDIRDSPVICNAGLAATEIAVNNIEHSCFPPETSAADLPADEGSEQASWSKCPEQSEELLGLIVNSLRALDSTVPHGCCEPRRRPQAVRKIALVLEKAPKQLQQDLISLVPKLVDGSEHSLAACALLDHLQRPDAEPSLRLPVFGALSELELESDIWKQASVHALELLSDSNDEPLVAAITYVLKAASQCEHLSVAVRAVRWRLKDLGTEVPHCVLDFLSKTIQTQLDVAEAILKDIDSDCEPENNCLASTSPSSTCSTDGLSAEGMYSWQEQAVHGRSHLSDVFALIEMLSMPGLFVEVAQVIERALLRGSFGLQLVAMVLERRHSYRSSSKSGSVVNDSQNKEVLLDGQFEPLSVQENDFTSVLALGEVLSLSTETKVQDFVRMLYAIIFKIYAEDHHRYRILKGLVERATNTSDNCRAVDIDMDVLVFLVKEEYGIARPVLNMMCEVAEVAQADRANLWHQICATEDENIRLREDMEMEQTNFTNEKIALNQRLTELEATIGSLRSELKAERDRFTREKKALSDQMREIENQLEWVRSEKDDQIAKLSSEKRNLHDRLNDAESQLALVKARKREELKKVTKEKNTLAEQLKNAEASRKRFDDELKRYAAETQTREEIRKSLENEVRRLTQTVGQTEGEKRK

SEQ ID NO: 286506 - protein, 56 aa, Zea mays
  Clone ID: MRT4577_24391C.1.pep
YQAILGLVLQSILQQQPQKGQVSGLLAAQKAQHLTGMWGLQQQIPCPYDGAGGVPP

SEQ ID NO: 286507 - protein, 355 aa, Zea mays
  unsure (1)..(355): unsure at all Xaa locations
  Clone ID: MRT4577_24392C.1.pep
HDQHWRLHWRRRRRRGGLVQPVAGAGHDEHRVRGRLVEAVAGVGHDQHRARQIRASWGGLHWERQIXASASPRRRSAPGAPAGLSVLVTGTAGFVGAHCSLALRKRGDGVVGIDSFNSYYDPSLKKAQRALLGSHDXFVVEGDINDGRLLAKLFDVVPFTHVLHLAAQADVRYAMENPAAYVHSNVAGLVSLLEAAARHADPQPAVVWASSSSVYGLNTQAPFSEEHRTDRPASLYAATKKAGEAIAHAYNHIYGLSITGLRFFTVYGPWGRPDMAYFSFARSIVAGEPVTLFRAADGSDARRDFTYIDDVVRGCLGALDTVGRSTGSXGGRKRGPEPFRVYNLGNTSPVPVTRM

SEQ ID NO: 286508 - protein, 155 aa, Zea mays
  unsure (1)..(155): unsure at all Xaa locations
  Clone ID: MRT4577_24393C.1.pep
SLMHQSMGEGALERAIHSSFLVSADMAHALHPNYAEKHEECHRPELQKGLVIKHNANQRYATSAVTAFLFKEIARIHNLPIQEFVVRNDMGCGSTIGPILASGVGIRXVDCGIPQLSMHSVREMCGKEDVDTTYRHFKAFFEMFSDIDRKLNVDF

SEQ ID NO: 286509 - protein, 51 aa, Zea mays
  Clone ID: MRT4577_24394C.1.pep
SLRVGSGGVLSASGSRSGRRFGLSVGPAGPAVRWGFIPVVRCGPSRFPSFV

SEQ ID NO: 286510 - protein, 80 aa, Zea mays
  Clone ID: MRT4577_24395C.1.pep
ISFSFVSFDMFKPSQSILDKFFFQFILHLAYHIIHIHHHSKLDHFLYCKIQYNIYIYIYIYIYIYIYIYGGGGGGPPLFS

SEQ ID NO: 286511 - protein, 135 aa, Zea mays
  Clone ID: MRT4577_24396C.1.pep
QPRAVRENIQVYRHPSRTETALRVIWNHSKTVLGKQYSTMAKKHLLLFEAMRKEFPQARFLSIAQTQLLRAHDEIKMSISRLQLKEKEDDPSAANIVTREELIPYNVQFTSEEFMSLSSLARVRGQLRDLKVVFT

SEQ ID NO: 286512 - protein, 155 aa, Zea mays
  unsure (1)..(155): unsure at all Xaa locations
  Clone ID: MRT4577_24397C.1.pep
MSGAAGREFTGGGGGGSSSSFSSVSNASPTEVEEEFLRYHTNPLLGGPTTEMRDDGGPSDQPPLTVKKKRSLPGTPDPSAEVIALSPRTLMATNRFVCEICHKGFQRDQNLQLHRRGHNLPWKLRQRGGXXGGADCGGPSRKQVYVCXEASCVHH

SEQ ID NO: 286513 - protein, 48 aa, Zea mays
  Clone ID: MRT4577_24398C.1.pep
KINQTATNPPWGVIVHAKKSGGPCIKKNGLSRTHGVYGKGSLVDLPLL

SEQ ID NO: 286514 - protein, 97 aa, Zea mays
  unsure (1)..(97): unsure at all Xaa locations
  Clone ID: MRT4577_24399C.1.pep
TSKAYESSADSRYSSSRHQALSEFVHHKSCRLSFTHSSVGTCHSARRRTXXPPPNGIHDKPGWGAPRGRCEWTRILXRASPPGALPLASRRSRSRPR

SEQ ID NO: 286515 - protein, 73 aa, Zea mays
  Clone ID: MRT4577_2439C.1.pep
VVTQVAVHTNNTFECNVLSHKAPVSCVLFVSFLFGSIILNLYVFDAPAKRYQYQKGVTLKCDVSCIYCWVCML

SEQ ID NO: 286516 - protein, 129 aa, Zea mays
  Clone ID: MRT4577_243C.1.pep
CATPDGARVFYDGLNRAVNVYLKVHADLSEEENDKVSGLKHRLKVTLHACTHAGHNERMALQTVLLELFLLQLHLRRTIIQTIMANEGCADESGEEGGESACGVTWRVAELLNQMLQIVMDSMPNLVHE

SEQ ID NO: 286517 - protein, 173 aa, Zea mays
  unsure (1)..(173): unsure at all Xaa locations
  Clone ID: MRT4577_24400C.1.pep
DTNLLLPPKAANNFDVLVLPAFCISDATATILPQWSQQFRWAETAKQIGYPAIQAYRVQKAIXDAFXRGLRLTLQHXYALXLQQPSLLNVXLQKMVLQQLQQQLVSTIYQVVXRNLXVYLQRQQXLPXNELWEENPXAPYLHAQQLLPFNQLVRNPAGLLLQQQLLASHLQIV

SEQ ID NO: 286518 - protein, 156 aa, Zea mays
  unsure (1)..(156): unsure at all Xaa locations
  Clone ID: MRT4577_24401C.1.pep
MGKEGPCCHCGVTSTPLWRNGPPHKPVLCNACGSRWRTKGSLENYTPMHSRDDIDADQPRVSKLKPPTLRLKEQRQLKKKPSHSIRENGAFSDQNFWKMGDADPSRSSSGSALSYSESCAPYGSADASEMGSAQSHAWESWVPSKRRXCVTRTKSS

SEQ ID NO: 286519 - protein, 49 aa, Zea mays
  Clone ID: MRT4577_24402C.1.pep
SRPLGVLCVHDLVYVDEQPCTISSLENAQRAFSVLFVCENSLVVRPRAG

SEQ ID NO: 286520 - protein, 67 aa, Zea mays
  Clone ID: MRT4577_24403C.1.pep
HVMADCDLEFVHQVICGPTNYYCHLRVQSLQTLSYQVCYAESMSRKPRSIHTASNICRSLVYLYTKT

SEQ ID NO: 286521 - protein, 55 aa, Zea mays
  Clone ID: MRT4577_24404C.1.pep
KKKKKKNRFFIQIKKKKNKGAHVVGCLSSPTFFPRLALLVPPIFTHLPSLTTSDW

SEQ ID NO: 286522 - protein, 56 aa, Zea mays
  Clone ID: MRT4577_24405C.1.pep
AGKILGRAHNICWNDSHRYYRPMGAPHTPETPTPQGFCHTQTKKIRFPPGEPINMG

SEQ ID NO: 286523 - protein, 214 aa, Zea mays
  Clone ID: MRT4577_24406C.1.pep
KDGIKGTYRVDVDIPANDWINVTKFYDVLIFNTGHWWDRYKFPKDTPLVFYEGGKPIEPPLDIHNGLKVVLKSIASYIEREVPRKTLKLWRTQSPRHFYGGEWDHNGSCVSDRRLEEHELNSWFDPQFGGVNKEARTVNLAIQEALAGTEIQLLNLTYMSEFRADAHPAIWLGKKDAVAVYGQDCMHWCLPGVPDTWVDILAAQIMHHFKQEKG

SEQ ID NO: 286524 - protein, 145 aa, Zea mays
  Clone ID: MRT4577_24407C.1.pep
LFFFFFSFFFFFFFFFFFFFFFFLKFPGLPLFALPLTGATHKKIYREIQTGGSHNKNKVKPFRGQKKLPCINKIVLGLLKKGSDFKNKRDHFGRLFITSNLEHLPLCKQKEDSSRIFNLISHLEHMSLCKQTGTHIHKHEPTYER

SEQ ID NO: 286525 - protein, 83 aa, Zea mays
  Clone ID: MRT4577_24408C.1.pep
GGGPWDRGGGGALTGLKRTWGGQNHKTGGLPFGHGGAPHVYMPRGGNGAIFPKNKKSPLRGLKNRATWTPLGKKPPFTFKGKQ

SEQ ID NO: 286526 - protein, 99 aa, Zea mays
  Clone ID: MRT4577_24409C.1.pep
ILRPVHDLYPRSAVGAFGAAFPRLWRPLLPRFLHREEEILTEVHTPLRSRDSPWPATSDTPCPCEGTTHLKRKRYLQSQVTGEVQGGQVEPHHQELISI

SEQ ID NO: 286527 - protein, 169 aa, Zea mays
  unsure (1)..(169): unsure at all Xaa locations
  Clone ID: MRT4577_2440C.1.pep
FFTATVSRFYQSLDRYHPLGFAATFLYEPSSYCDVILHQEWQHAMDEEIVALECIDMWELVXLVHHVFALSHKWVYKVKACFDGSLERYKXHLITRGFQQEHYCDYDDTFAXVAQMTTVHTLLDVTSVREWSISKLDVNNVFLNGELHEEVYMHPPPGYYVTVGMVCRL

SEQ ID NO: 286528 - protein, 73 aa, Zea mays
  Clone ID: MRT4577_24410C.1.pep
PRVRPRVRKKKKKKKKKKRKRKKKKKKKEKKKKKKKKKKKKKKKKKKKKKKKKKKKKKRGGTLKKTKVHVHAT

SEQ ID NO: 286529 - protein, 181 aa, Zea mays
  Clone ID: MRT4577_24411C.1.pep
MKQRFPSSSTRSKSEAAVQTRASRAPSPKVNPATPGPGPGVKARPRSAAAATMAATRRQPAVPMPVWKSETAEEEVVRLRGEVDALQKEVQRLLRLNAELQTNHDAAASNRPQPPSKISASGGVGCTAAAAPAATATAPKAARSPFPFGSEHKPGEQGHCAGRHVQLAAGQQQGVKAHRQK

SEQ ID NO: 286530 - protein, 73 aa, Zea mays
  Clone ID: MRT4577_24412C.1.pep
WFRYIGGLECQKKKKKKKRAAALYFSFSFFFSFLLFQFFFMIFFLQILFSCRKKKRAPFFFCGKKKNFFFRLS

SEQ ID NO: 286531 - protein, 86 aa, Zea mays
  Clone ID: MRT4577_24413C.1.pep
GRGAFFREKWLLLPLRFGFGIVTFSPPHPRMIPGRSFTQTKKEEGYTPNSSDLHSPHLPSNFNNRPPHTPQSQKTTSSEHATSNPT

SEQ ID NO: 286532 - protein, 78 aa, Zea mays
  Clone ID: MRT4577_24414C.1.pep
DNLQCQSEALYMRSSPIINRVLGSVMSLPHSISSSHVRHCCSSLPSVHFIQEGNSLIPPLEIRDVQVHGPACVSRWFK

SEQ ID NO: 286533 - protein, 96 aa, Zea mays
  unsure (1)..(96): unsure at all Xaa locations
  Clone ID: MRT4577_24415C.1.pep
MKKRSMSSEQVLVIACHSKAAFDAHMTNAHXAGKLAPIDFTAAWCGPCRAIAPLFVEHSNKFTQVDFLKVDVDEVNEVTEAYEVDAMPTFHFVKNG

SEQ ID NO: 286534 - protein, 98 aa, Zea mays
  unsure (1)..(98): unsure at all Xaa locations
  Clone ID: MRT4577_24416C.1.pep
TVAVDVPXSRCGEARVTMRKSAAKAKPSASSGSPWYGSDLMLYLGPLSGSPPSYLTGEFPGDYGLDTAGLSADSDTFAKKRELEVSHSRWAMLGAFGC

SEQ ID NO: 286535 - protein, 59 aa, Zea mays
  Clone ID: MRT4577_24417C.1.pep
RTRRTGLWALVLEPDSEKLGGLMSCSPGHVVSNFNQRRGCIVIWNVFKVFEKPRKTPLK

SEQ ID NO: 286536 - protein, 187 aa, Zea mays
  unsure (1)..(187): unsure at all Xaa locations
  Clone ID: MRT4577_24418C.1.pep
MACTTNGMRALFFLALFXIEHDEKEKSKGLDAXAPGPVGSFDITKLGPSEIGKTNRTKAVQEAWASACGETEKQTILIPKGDFLAXQLNFTGPCKGNLTIQVDGNLLPTTGLSQNKAHGNWIEILRVDNLVITGTGNLDGQVPAVWTKNSCTKKFDCKILPNXLVMDLVNNGXVSVFTLFNSKFFHM

SEQ ID NO: 286537 - protein, 100 aa, Zea mays
  unsure (1)..(100): unsure at all Xaa locations
  Clone ID: MRT4577_24419C.1.pep
SKTGIVLLDSAELHXNSKADPGXSKTYPHQAGTGRKNGFLVINSRTCRXVRGPTSKTXKHGHAKCHFVSIYIXNGKKLEXIAASSHSCDIPHVEPYLPCR

SEQ ID NO: 286538 - protein, 174 aa, Zea mays
  Clone ID: MRT4577_2441C.1.pep
MAAQEAAAGGGSPQVVMRWRYGDVGDSNFAVHGRAVPLLVGLLCAVVFFVALCLYLRWRCHRHAPDDPEADASSPSSAAAASLPGLDADAIRGLPVTLYRPPASPRLRGEAGDDDPAAALCSICISALVAGEKVKVLPPCGHCFHPDCVDAWLRSQPSCPLCRCLLAAAAKDAV

SEQ ID NO: 286539 - protein, 75 aa, Zea mays
  Clone ID: MRT4577_24420C.1.pep
ESIQQINLSWQICHLITCLRKAIIAGRNCLRNSMQLLICYSCTVAIVRLSFTACPFTSYILNFTLLGYLQQKRIK

SEQ ID NO: 286540 - protein, 80 aa, Zea mays
  Clone ID: MRT4577_24421C.1.pep
ASSPTTILADMNKHMLNPLLRYHVAISDAHLGNMSALLRPTAPTVGLSCNAGPAKLRILTECVGYYMHFRESMDSHDPSQ

SEQ ID NO: 286541 - protein, 70 aa, Zea mays
  Clone ID: MRT4577_24422C.1.pep
KWIPFHQKFSVESCAFLHAKPFGDCFSWVRTTRIWCVLLSIRLSQIYHNWLAHKEDARFKFKHVPYCIIN

SEQ ID NO: 286542 - protein, 126 aa, Zea mays
  unsure (1)..(126): unsure at all Xaa locations
  Clone ID: MRT4577_24423C.1.pep
GLSGSRYDPVSLSTVSEVKTIRQRDERTPRXPNAHMAGHGYAVQPAHAXPNPQGTHKPCYYDMTVHMWDYRAKDAQVDKYNHHTASEAAIDKSAHVDGLNARTGGDETGYNRTFGTDAPATYRADA

SEQ ID NO: 286543 - protein, 23 aa, Zea mays
  Clone ID: MRT4577_24424C.1.pep
RFGKEDYIDETMVKIEDKLDEKV

SEQ ID NO: 286544 - protein, 147 aa, Zea mays
  Clone ID: MRT4577_24425C.1.pep
MVTAGFWVGESKPGCDLGPTLSFKDVHHPRWGGSHAEPALYLPRGFAGRPFPRRSGVEALAGPADGADLDNVGLIDGGRRYLQRVGVVGRASGGPSCRRVTAASCAREDHPRFRAPLGRRSCSGVALLLHWDGALAQRPAPHSSGRI

SEQ ID NO: 286545 - protein, 178 aa, Zea mays
  Clone ID: MRT4577_24426C.1.pep
MVAFRFHQYQVVGRALPTPGDEQPKIYRMKLWATNEVRAKSKFWYFLRKLKKVKKSNGQMLAINEIFEKNPTTIKNYGIWLRYQSRTGYHNMYKEYRDTTLNGAVEQMYTEMASRHRVRSPCIQIIKTATVNFKLCKRDNTKQFHNSKIKFPLVYQKVRPPTRKLKTTYKATRPNLFM

SEQ ID NO: 286546 - protein, 242 aa, Zea mays
  unsure (1)..(242): unsure at all Xaa locations
  Clone ID: MRT4577_24427C.1.pep
MAKPRKTRTSAPDPPVAAVRLPWHTPAPAVPTAVLISLAALLIRVLVSVGPYSGQGAAPKFGDYEAQRHWMELTLHLTPADWYRNTSDNDLAYWGLDYPPLSAYQSLLHGRIINTSLPEAVALRSSRGYESMESKLLMRWTVLSSDLLVFFPSALWFVWAYMKLGVGISGEERREGWMWLLALVLISPCLVLIDHGHFQYNCISLGLTLGAIAGVLSKNELVGASLFTLAXNHKQMSLYFAF

SEQ ID NO: 286547 - protein, 183 aa, Zea mays
  unsure (1)..(183): unsure at all Xaa locations
  Clone ID: MRT4577_24428C.1.pep
MTSSSTSATTSCCPLLLALLVLMAAHRGNAAAVFTGLVFESPGEAEAFEDALLRQACFNVSFFLSAGGRREACVSRLDTARGGAGSGPVPVLRAALRDTLGEAVGAAGAVRGLASLSNHAREEVALRDCVELLGYSVDELGWALDAMADDDTDAAAXGRXXXGAXDSPGXXAXSSRAENDIHA

SEQ ID NO: 286548 - protein, 86 aa, Zea mays
  Clone ID: MRT4577_24429C.1.pep
SRLSYGRLQAPRVVLPWGQCGPRLPSMVPGGRVPPLQMYSRRPAQLRHLERRPGRSATGWCCASCLWLMLVLVGQAFMGAYHGEEC

SEQ ID NO: 286549 - protein, 115 aa, Zea mays
  unsure (1)..(115): unsure at all Xaa locations
  Clone ID: MRT4577_2442C.1.pep
SSQKRTLKQELQHVPPPKSFNMFCSGGSRGKRRTRPDFDSKDEYNIPAGXRSPYLLCLEVEPPVCDSRRPHLTRVALVRLTGKHPFNLEPSVSWLMAHDFITPAPHHYHYWKNIG

SEQ ID NO: 286550 - protein, 218 aa, Zea mays
  unsure (1)..(218): unsure at all Xaa locations
  Clone ID: MRT4577_24430C.1.pep
SISLSTPPLRSHLTTCDNSRGDTPCEDQSPPEQRGLFFCGSHAFLXGPIAAYNLLKETTLHLVLLLMXDMMILVKTLTAMTITLQVDTSDTVDNXYDKIQDNEGIXHHHERLICCXSSLTTNXTLADYNIHNESTLHLVLRLRGCMXIFVKTLTGKTITLEVXSSDTIDNVKAKIQDXEGIPPDQQRVIFAGXQLDDERTLFDYYIQKESTLHLVLRL

SEQ ID NO: 286551 - protein, 175 aa, Zea mays
  Clone ID: MRT4577_24431C.1.pep
MAKNPKVFFDILIGKSKAGRVVMELFADKVPKTAENFRCLCTGEKGLGSAGKPLHYKGSAFHRVIPGFMCQGGDFTRGNGTGGESIYGARFADENFKLRHTGPGVLSMANAGPDTNGSQFFICTAQTPWLDGKHVVFGKVVDGYAVVDKMEAVGSQSGATAESVRIEDCGQLADD

SEQ ID NO: 286552 - protein, 52 aa, Zea mays
  Clone ID: MRT4577_24432C.1.pep
PATDFGLPLQRQYSLIQATISLDHRKSYQSMLEISLPRNRHRAEAIRHHILD

SEQ ID NO: 286553 - protein, 102 aa, Zea mays
  Clone ID: MRT4577_24433C.1.pep
SRTRWRRRSRRIRASSRCWWRRSRPSWGAAEPLLLKSDQDRRHMQHSLMQNIDRQGQIPVFDPTHRHAWIGGSCVIKNSIMVKFFFLFIGVLVVGRHGKWEQ

SEQ ID NO: 286554 - protein, 81 aa, Zea mays
  unsure (1)..(81): unsure at all Xaa locations
  Clone ID: MRT4577_24434C.1.pep
ASRRFVDICSYDLSLTXRHTCDAGVFMFDSWQRRCSQQGVTHVTYISGAAAMRTWRWSRRVGSREQRSGGGGKARGGDLNF

SEQ ID NO: 286555 - protein, 68 aa, Zea mays
  Clone ID: MRT4577_24435C.1.pep
TTSNGFQMKMLTVIPLETKGYVHFLIVACVFQMDMFTVQYLWKQKTRSAPGIYHENFHDFLSFVTRDF

SEQ ID NO: 286556 - protein, 167 aa, Zea mays
  Clone ID: MRT4577_24436C.1.pep
RTRGATMVGLSDQTVDTATSSLQTMYRLNVGGSYIAPTNDSGLSRDWYDDTPYLYGAAVGVTYKPDDNAQIKFPSPEAEYAAPASLYLSSRSMGPNPKVNQNYNLTWVFEVDSNFTYVVRLHFCELLLTKVNQRAFDIFVNNKTAQADADVIGWTSGKDVPVYKDYA

SEQ ID NO: 286557 - protein, 280 aa, Zea mays
  Clone ID: MRT4577_24437C.1.pep
RHFRGVINLEDCNLEDNLDDEDAPRSSKDSKKANMVDTGKDSSLMFKITHKIAYKNVLKAHSAVILKAESMSDKTEWIAKIKGIVDPKGLSAKKPSASEGGAPVRQSHPDGSLEPVLKKPVNHEEELRWISQEVRAYVEAVLNNLAGNVPKAVVLCQVEKAKEDMLSQLYTSISTQSLAKIEELIQEDHNVKRKREKFQLQSSLLSKVTRLLSIHDSRSGSAGLSTDSAGSESSPRNGGHSGDDWRSAFGAGSASWSTGAAIAGRRVPSRGPPPPPPNVG

SEQ ID NO: 286558 - protein, 78 aa, Zea mays
  Clone ID: MRT4577_24438C.1.pep
FILFPFSIFLGNPALPPPGRDITRFSYEDRKLNPQFFGLSDYSATSDGKLPPDDKPLLQAYVFCSFAANHTISHESFR

SEQ ID NO: 286559 - protein, 31 aa, Zea mays
  Clone ID: MRT4577_24439C.1.pep
PNKCNTYHISVRARERMRPGRACSHNLWLVG

SEQ ID NO: 286560 - protein, 115 aa, Zea mays
  unsure (1)..(115): unsure at all Xaa locations
  Clone ID: MRT4577_2443C.1.pep
PTGPKRVDHRVPANKNSYTARVSVNAFFNPDKKKTERVYGPISNPSKPPLXRRVKFPDFIAKFKSIGLDGRVVDHFRLEEEGPTCFGGGAHHVKFCFCLIEKTVLVVVSFIFPAI

SEQ ID NO: 286561 - protein, 127 aa, Zea mays
  unsure (1)..(127): unsure at all Xaa locations
  Clone ID: MRT4577_24440C.1.pep
KKKKNKKGXXGGGGGGAPLFFFLXGGVEKKKKNPSFFFFFFWGGGGGFFFFFGLKKKKKKRAEAAPQVFFPQKKRNFFLEGVKKKGVWPHLTPGKPNLNSLETHLVKNGKLMRVHKIEGLQLWKRYN

SEQ ID NO: 286562 - protein, 84 aa, Zea mays
  unsure (1)..(84): unsure at all Xaa locations
  Clone ID: MRT4577_24441C.1.pep
ETQIFCLFSGRLTRVDQMXVSRSSSVPSNTRDTLYQSLPPTIKSSLRSKLHSFGVKEELTVSQIKAEMEKTLRWLVPIASNTTK

SEQ ID NO: 286563 - protein, 84 aa, Zea mays
  Clone ID: MRT4577_24442C.1.pep
IPVLGGALLVPWVWFQKKELGAQWRLAGFLSFSPEENFGAPSARSLVLVPPLFLFVVGVPSPLGFWPFFFVPLCPEESLFSLDW

SEQ ID NO: 286564 - protein, 73 aa, Zea mays
  Clone ID: MRT4577_24443C.1.pep
QKPDFTINSHCKQATRQDKNIREHSSRSSWPCHKSLNNNKSLLIYLYIIIKLKSGNFFLQILIHHSLLVSLSL

SEQ ID NO: 286565 - protein, 36 aa, Zea mays
  Clone ID: MRT4577_24444C.1.pep
TIPDYIQTIVQSLATLTAYRASQFPQLSQDSRYLQL

SEQ ID NO: 286566 - protein, 107 aa, Zea mays
  unsure (1)..(107): unsure at all Xaa locations
  Clone ID: MRT4577_24445C.1.pep
DWDRQNPTQIVTEMCGFVAILSGTFLLHKTKDMVDGMSYIYAPFDLXTHVHNVLLVRVVTGLPPNLPIRLPKHADEDGYAAEGIPLRSAADGIPLRSPRATDSFRSS

SEQ ID NO: 286567 - protein, 389 aa, Zea mays
  Clone ID: MRT4577_24446C.1.pep
MHACGSSEFGIRPITRAPAPLTRPFPPHKTHTESRHPTSPTRTSIMAVASTSPLSAKPATAPSPPAPVSGFLALPARRGCATRLGSAAAWRRLRVEAIWKQQEKQRAEVSVEEPAPVREAAAPLDGVGADDPMVPSSDESWVVRLEQSVNIFLTESVIILLNTVYRDRNYARFFVLETIARVPYFAFISVLHMYETFGWWRRADYLKVHFAQSLNEFHHLLIMEELGGNAIWIDCFLARFMAFFYYFMTVAMYMLSPRMAYHFSECVERHAYSTYDKFLKLHEEELKTLPAPEAALNYYLNEDLYLFDEFQTTRIPCSRRPKIDNLYDVFVNIRDDEAEHCKTMKACQTHGTLRSPHSMPNCLEAATECVIPENDCEGIVDCVKKSLTK

SEQ ID NO: 286568 - protein, 107 aa, Zea mays
  unsure (1)..(107): unsure at all Xaa locations
  Clone ID: MRT4577_24447C.1.pep
FRSATATIGGFFSEDRGALSELAGKDQELIEATKEPGLTFMVANNDGILGLGCQEISDENASPVXNNMENQGLXSSTTESLXFNRHAKESEGDDKGQGSTTCIHERT

SEQ ID NO: 286569 - protein, 129 aa, Zea mays
  unsure (1)..(129): unsure at all Xaa locations
  Clone ID: MRT4577_24448C.1.pep
FKKGSHPQKNRPKTPNPFLKTXPLSLVPGLGSFLGPKKFFFKQMGGPPQNNGGSSRAKGWVWPWEFFLGGISLKETPRFGLFLRPFFGARGPFPPPKVVEPPQIQGDFFLGAPKKKKKNHPXEETDPIF

SEQ ID NO: 286570 - protein, 112 aa, Zea mays
  Clone ID: MRT4577_24449C.1.pep
RAFFSFFLRLQKTTIPSLTTDSQNKGPLIKKIPLNQIRRPLKRTRPNDPVKVQKLMDSIRVIRLQVPINVLEVDEVYYSFSGCHLYEAHQRLGLPTIHCKVRRGTKETLMHH

SEQ ID NO: 286571 - protein, 74 aa, Zea mays
  Clone ID: MRT4577_2444C.1.pep
GPSCHSTITPTSIFAADLTRPVNTASLPTVRRYHTLCFTPTAHCTTTIVPYYRASVQTTTSAKCDSGNDRYAHD

SEQ ID NO: 286572 - protein, 69 aa, Zea mays
  Clone ID: MRT4577_24450C.1.pep
WDRSLYGNRGGVRDSSSMCLARRICSERGCEGDVVDLVMEMSWKRRYEPEVEIAWCRLVKLDVDLSESC

SEQ ID NO: 286573 - protein, 31 aa, Zea mays
  Clone ID: MRT4577_24451C.1.pep
KFMVNVFSLKLNSYYVIHVDFIYRDWELAVL

SEQ ID NO: 286574 - protein, 97 aa, Zea mays
  unsure (1)..(97): unsure at all Xaa locations
  Clone ID: MRT4577_24452C.1.pep
KKKKKKKKKKKKKKKKKKKKKKNLFIKKKIILLLVTTFKVIILVMLHHTGGGGGACSLKGQIRSYTCGHLQLNGTXLYNFWAWKNHGGALFKFMGVE

SEQ ID NO: 286575 - protein, 74 aa, Zea mays
  Clone ID: MRT4577_24453C.1.pep
LDDVSVSTSDWHKPIPNAEVAHRTSNLVADQWTPSLSVVVVAPCRENFCVLLAPTAIYVLLLTSPPPLAFLQSL

SEQ ID NO: 286576 - protein, 53 aa, Zea mays
  Clone ID: MRT4577_24454C.1.pep
AGPGKKKKKKKKKKKKKKKKKKKKKRRKKNKRVPKGRRKPKKKKKKPLGPEAV

SEQ ID NO: 286577 - protein, 64 aa, Zea mays
  unsure (1)..(64): unsure at all Xaa locations
  Clone ID: MRT4577_24455C.1.pep
MKKKKKKKKSMKHXPLRKYIFRCQSTTKKKKKKKKKKKKKTKKKKKKKKKKKKKKKKKKRGGPF

SEQ ID NO: 286578 - protein, 91 aa, Zea mays
  Clone ID: MRT4577_24456C.1.pep
CPLRVAWLIDDNSQIVPVMLSKVHDRWCVLIHHPSMRIDMGELAHHGGQGPGDGEDREVVFVHGEPDHVGRRRRPWRMFRVRRRCTRRGVG

SEQ ID NO: 286579 - protein, 55 aa, Zea mays
  Clone ID: MRT4577_24457C.1.pep
LVGVQDLLVLHYADFVRPEEDDEIKAMCHYRSSKVDNIVYCLRDDVYVKRLSGTW

SEQ ID NO: 286580 - protein, 172 aa, Zea mays
  unsure (1)..(172): unsure at all Xaa locations
  Clone ID: MRT4577_24458C.1.pep
VEKSAKEGPKEKFXGLSKVPKEVLGPQVEKVGVSPRVGAPPPCLVPPESGWPPPLERFLKAPALRAPPLFGALSPQKPMGVPPRTPPMEGLPQRAEAAKNAKSVKAPFLLLFXTALPPFGFSPADPPPFGSRLPRMLKLGLSLPEGEGAPGAAPPLPPLEDAPGETKMGGVG

SEQ ID NO: 286581 - protein, 526 aa, Zea mays
  Clone ID: MRT4577_24459C.1.pep
MMGRKALGCAPLLLLLAAAVAPAELSVGAAAASGAVTRADFPAGFVFGVGSSAYQVEGAVAEDGRKPSIWDTFTHEGYSLDNATGDVTADQYHKYKDDVKLLHEMGVDAYRMSIAWPRLIPDGRGAVNPKGLEYYNNLIDELLSYGIQPHVTIYHFDFPQALQDEYSGLISPRFIEDFTAYADVCFSNFGDRVKYWSTVNEPNVETIGGYDQGILPPRRCSFPFGFGCEEGNSTTEPYVAAHHLLLAHASAVSLYRDRYQAAQGGRIGLTLLGWWYEPGTQTPDDVAAAARMNDFHIGWFMHPMVFGDYPPVMRRNVGSRLPTFTDEEAARVRGSFDFVGFNHYIVVYVKADLGRLDDQVRDYMGDAAVKYDMPFLKSRNQFPFGALTSDFMTSTPWALKKMLRHLRVTYKNPAVMIHENGAAGQPDPSGVNSYDDEFRSQFLQDYIEATLQSIRNGSNVQGYFVWSFLDVFEYLFGYRLRFGVYGVEFNSTARTRYQRHSAKWYASFLRGGELRPVALPDGAYSQ

SEQ ID NO: 286582 - protein, 89 aa, Zea mays
  unsure (1)..(89): unsure at all Xaa locations
  Clone ID: MRT4577_2445C.1.pep
MAGNGAIEESDPLNWGAAAAELAASHLDXVNRMAAQARQPRTKIDGSTLHVSQVDAVLFAKDAYGVFVNLDQEARPRVKDSNKWISNCI

SEQ ID NO: 286583 - protein, 112 aa, Zea mays
  Clone ID: MRT4577_24460C.1.pep
IGTSSRRESSDTRALLHALSWHSPLTSHGRNSQHRGWLSPVLGQLVVRPAQAPSQHSSSPSLRAVALPLVCASFSSAKRDIVPCCARPWCWPHDPRPARPRPRHRSLARCAP

SEQ ID NO: 286584 - protein, 27 aa, Zea mays
  Clone ID: MRT4577_24461C.1.pep
RSLLHRCIRRSASRRRRRTSRRLKPKP

SEQ ID NO: 286585 - protein, 66 aa, Zea mays
  Clone ID: MRT4577_24462C.1.pep
GMKFELRGAIVDGAVDSTLRSVTGEHQQRQTKSLDPFPELGRRQRLEVTTADLTFRGLGTSSDGLF

SEQ ID NO: 286586 - protein, 97 aa, Zea mays
  Clone ID: MRT4577_24463C.1.pep
MHLHQALTTTCAEADLTLIKAAYQKTNRVPMERACGQRTTRDYEDIMLALLGAERGGMPQLDLMCYYLVDGAKKLTRRGIHMGVAVNNNKPVTRSLH

SEQ ID NO: 286587 - protein, 112 aa, Zea mays
  Clone ID: MRT4577_24464C.1.pep
GQHGIAYLATTGGPSRASELASTPHHCRHRHGPLASGRHGACRGTGSAWACPPPASYSVPDTVLATASDCVTRRRSAPAAPGHRCSMGDVPTTVTPRARCVAGTSWARTAVV

SEQ ID NO: 286588 - protein, 70 aa, Zea mays
  Clone ID: MRT4577_24465C.1.pep
RARATGWSVCGTIRGQRWPAAAQYASRKAGLPIGHVLVGQSFRLWMWTVTLTGIIGVGPLLVYSTSALWG

SEQ ID NO: 286589 - protein, 133 aa, Zea mays
  Clone ID: MRT4577_24466C.1.pep
GGEDPVDGGRVGDYKQEMGDRRPCPRSVADPHRYLLVASTNTTRLLRRKPPAGCGPGAASHASAPWCPLLRSPGRLPGEARQAAAAAGQLPAAVGVGCVLSRWRRSCRPVTWERGRVCGLQTRGVWRRRGRRG

SEQ ID NO: 286590 - protein, 113 aa, Zea mays
  Clone ID: MRT4577_24467C.1.pep
PAGAVSIITLSLPGYQIIAATAAACRWVKVSGVCCSSVDSLGRNRPSPVPMQRISSLSFTRLKLAFHHSRRLSNNGEGRGIFVCSSHERSLHKIRVINLAVQRMLGLINQSTA

SEQ ID NO: 286591 - protein, 118 aa, Zea mays
  Clone ID: MRT4577_24468C.1.pep
ARSLYVEAQLWRDLARANEATANELRPELQQALDDQRTRGAPGAGADADDPGSCFPGGEDGGTGTSLARTCPVFGLSPADVLLLPCRPLCACAPCPGAARACPACGCAKNGSVCVNFS

SEQ ID NO: 286592 - protein, 118 aa, Zea mays
  unsure (1)..(118): unsure at all Xaa locations
  Clone ID: MRT4577_24469C.1.pep
MHAFYTDPPTRPPADRPLGLEAGTPNPAPPPPRVHPSSWRAPIQEIAVPLLTKKIVKKRIKHFKRPHLDRYKCLKPSWLTPKGLDFHVRRKFTXCTLIPXYWFRFIQIYQTLTLLKYI

SEQ ID NO: 286593 - protein, 82 aa, Zea mays
  unsure (1)..(82): unsure at all Xaa locations
  Clone ID: MRT4577_2446C.1.pep
EWGWXRREEHRAAAAAFLYALTVLGVLAGGAGVRAXEDGTAVYIVTMKQAPVSHRRLNLEKFGSSKAATAVGRGGSGKRGGG

SEQ ID NO: 286594 - protein, 146 aa, Zea mays
  unsure (1)..(146): unsure at all Xaa locations
  Clone ID: MRT4577_24470C.1.pep
GPVGGPAPEPGLTPRNKIPPVVGGPPFSFFGPPPGGKGXGQNFGGVPPGVLPIPPHPNFPRGSGPPAPIGVSEPPVGKGGPPLLGXVPPKPPQLGEFPRAPPNYLVEFPXGFFKGDPPGARKFSFPLCPTENXAFVPPPKKVPFFL

SEQ ID NO: 286595 - protein, 186 aa, Zea mays
  Clone ID: MRT4577_24471C.1.pep
SGTLPQESTPRLPTPPGAGHRTTKGPDPWVNTKKGTNGPKKGRPGAPAGSGRNGAAANNTAAKKKSKKAKTAEAAGANNNNNMGNTGGNGSGWPKTRAKKNFTTGPGKATNGRKTSSARLNGKAGRAGFTAGRGWPAGLMMAGNGAGPWNLVRELTGTNSLPEEIRTISPGPNKNSFEFLYPHHHA

SEQ ID NO: 286596 - protein, 56 aa, Zea mays
  Clone ID: MRT4577_24472C.1.pep
PAGPGSPSGADTCYSYRWRSGMTRTTIYISHLLFGGRIKVHELRGKSKTGPLGPLN

SEQ ID NO: 286597 - protein, 296 aa, Zea mays
  Clone ID: MRT4577_24473C.1.pep
VRPRVRSAMSTLLLLVLRNASVGRAEPEVVICGGAPKKSFRKGENNTFLPALRDCARINLGRPDARWEKEDMPVGRVMGDMLILPTGDLLLLSGAAKGCSGWGFGRQPVLTPVLYSPRKAQGPRFRALASSTIARMYHSTSAVLPDATVLVAGGNTNAAYNFSGVDFPTEVRVERFSPPYLSEGAAGNRPVLDAASLPAEGMQYGSPLTFRFSVPAEPVAEADVKTTMYAPPFTTHGCSMNQRLLILRVTAFVEEGRSYRVTVDAPRKPELAPRGYYLLFVVAKGVPSMGAWVKVR

SEQ ID NO: 286598 - protein, 54 aa, Zea mays
  Clone ID: MRT4577_24474C.1.pep
SFGPKHLIQADFHRRRGEDRIKIPPMAFPPILYHNGAPPLGHIPGKVPEPPPRL

SEQ ID NO: 286599 - protein, 205 aa, Zea mays
  Clone ID: MRT4577_24475C.1.pep
EFCGPLWSRRAPSQVLRLLAPDEPLPPMKMTRLAQHDTLLCGVPLRVGNPSFKGDLHCHEPHRTSHARMMSRLEDGIFLNGGRQARVLPLQCRQHPRGATLSPPVPFAVPPPSLRSCEKVPSEGDKVPRHRRLGNRDRISKPLSMHSMVSRITSAQSGVDSSRRHSSASALSPFTNPTGNMDPPGPWSALFAPKDGRTQGLAAHL

SEQ ID NO: 286600 - protein, 83 aa, Zea mays
  Clone ID: MRT4577_24476C.1.pep
MYTEVNIPHTYPGTNCINCQKKKKKKKKKKKKKKKKKKKKKKKKKKKKKKKISRPKMTVTLVTEMSTDPGFSGHIGWGTAWAV

SEQ ID NO: 286601 - protein, 53 aa, Zea mays
  Clone ID: MRT4577_24477C.1.pep
IVNNSFEQPTTYVGNMYVFPNKQYVIYLFSTLMTTTYIILLAIFGMVTCYFLI

SEQ ID NO: 286602 - protein, 212 aa, Zea mays
  Clone ID: MRT4577_24478C.1.pep
MEVATAAKAPSSRLARSLAAAAPCYKGVSVFFAAVVAGALVSACWMSVSARLQVTPITPAATPGIARNAATGPEAPAPGRPRSTGVGASTNQTPSAGAASSAPPPREVPDCPAYFRWIHEDLRPWRGTGVTRGAVEGARRFAPRLRVAVVAGRLYVARYGRRRCFQTRAAFTQWGILQLLRRYPGRVPDLDLMFDCEDLPVVGAGERHGAQP

SEQ ID NO: 286603 - protein, 57 aa, Zea mays
  Clone ID: MRT4577_24479C.1.pep
DFRGRAVQSIISLASSHVAINHQLVSLGHHVARRFLVVLDQGRFFVKPLPRKKYVFI

SEQ ID NO: 286604 - protein, 220 aa, Zea mays
  Clone ID: MRT4577_2447C.1.pep
MAEMTLSAAKRGAELTRHLLAFARGNPLDPKPKNINHLVEAMWGLIRRTLPENIELEFAPDPDLGIAEVDANELETALLNLVVNARDAMQDGGKLIIETSSAVLDNDYAALHCEVIPGDYVMICVSDTGIGMSADTVSHAFEPFFTTKPVGKGSGLGLSMVFGFTKQSGGHIKIYSELGEGTSIKLYFPKVKDAQRINYQPAKELIPKSGTEHILVVEDD

SEQ ID NO: 286605 - protein, 51 aa, Zea mays
  Clone ID: MRT4577_24480C.1.pep
VGEKKRKMGDPYMLRDWYLYVTHYVTNGYLTLIQCQENNGFIVEGKNIYSA

SEQ ID NO: 286606 - protein, 215 aa, Zea mays
  unsure (1)..(215): unsure at all Xaa locations
  Clone ID: MRT4577_24481C.1.pep
MAPPSRPVAVLAWGSGEDGQLGMGRCDEKDWARCIGALDAYAVSAVVAGSRNSLAICNDGSLFTWGWNQRGTLGHPPETKTESSPAHVDALIGVKIVQAAIGGWHCLAVDDKGRAYAWGGNEYGQCGEEPERKEDGTRALRRDIPIPQRCALKLKVRQVAAGGTHSVVLTQEGHVWTCGPPWPPGDIKKISTPVRAQGXLEQVSLIAVGAFPPLA

SEQ ID NO: 286607 - protein, 194 aa, Zea mays
  unsure (1)..(194): unsure at all Xaa locations
  Clone ID: MRT4577_24482C.1.pep
MAAKXFCSRLLLGLAASVGTVTILPQCSQAPIASLLTPYLLPAXSXMCETPIVQPLQIQHAIATCIXPLLPLLLQQPSDLLQLLPQLHLVEQIIRVQQLQQLELANLAQYSQQHQFIPFNQLAXALNYAAHLQQQLPFSQLDAVYLENLLXFNQLAALNYAAYVQQQQLLPFRQLADVSPSALFTQQQLLPFYL

SEQ ID NO: 286608 - protein, 95 aa, Zea mays
  unsure (1)..(95): unsure at all Xaa locations
  Clone ID: MRT4577_24483C.1.pep
MVELTLLTLEHLPTVLIQRVMMDHTNMLTRMDADYLERNRSDHADRNMCAYATGDDRLQSRXKAEMLLVRTDGXSCAREKVTESYVAFTHTSTQQ

SEQ ID NO: 286609 - protein, 103 aa, Zea mays
  unsure (1)..(103): unsure at all Xaa locations
  Clone ID: MRT4577_24484C.1.pep
SYRGDGFLRXGRGEYTGRYPTLPSRWMGLYENVADAINGKAELVVKPTQCRDVLRVIELARQSHEKPATHRSEVEGAVLLIWTSCPPTRSFMLRTQEDVCHAR

SEQ ID NO: 286610 - protein, 57 aa, Zea mays
  Clone ID: MRT4577_24485C.1.pep
RGSFSPRPQGEPCQIVRASRRRFRPSSEFQNPSGNLYRPSYGRLRVNEFRRGFLTAR

SEQ ID NO: 286611 - protein, 94 aa, Zea mays
  unsure (1)..(94): unsure at all Xaa locations
  Clone ID: MRT4577_24486C.1.pep
PSPRHRLRLSLPPRRAGRTPRCVTXSSPASFAAVAAAAFPTANTNNFPFFRAFSSSPSRASWTPKFRRSPAYPRFFFGWRAGTYYSFPFPANAL

SEQ ID NO: 286612 - protein, 56 aa, Zea mays
  Clone ID: MRT4577_24487C.1.pep
YTHWGGINKTLHTLQDTIYTHTIRSETTKIHHTVPFHEALITTVRATTCRHMALQA

SEQ ID NO: 286613 - protein, 93 aa, Zea mays
  unsure (1)..(93): unsure at all Xaa locations
  Clone ID: MRT4577_24488C.1.pep
GLVVRKDASSXDSLTPSDPSQGGTGGTGSCLCNPMEGEIRDEYRDRMTLAFSVIPSPDASDTVVEPYNATLSVHQLVENADECMVLDNELLYD

SEQ ID NO: 286614 - protein, 68 aa, Zea mays
  unsure (1)..(68): unsure at all Xaa locations
  Clone ID: MRT4577_24489C.1.pep
SPVNSGFRARSXYRXEFSRPTCYGGXXXXXELHGGXXXGPEPYYXDXXXGFXEFXNRXSXSXIXDEXX

SEQ ID NO: 286615 - protein, 68 aa, Zea mays
  Clone ID: MRT4577_2448C.1.pep
KKKNKNYQKKKKKKNKKKKREKLEKKKKREKKKNKKFPPFNKFQGHFPVPPPFYPFYNRLLIFFNNIT

SEQ ID NO: 286616 - protein, 76 aa, Zea mays
  Clone ID: MRT4577_24490C.1.pep
ILEFTLGAGQHQRGFKVQQSTKHKPGPRPSAAVYLLRASFSHRTQTGPKFLGTHSCQVTHSLLEIRIILKGTHSKL

SEQ ID NO: 286617 - protein, 159 aa, Zea mays
  unsure (1)..(159): unsure at all Xaa locations
  Clone ID: MRT4577_24491C.1.pep
LHSYGGPCSFPEIADAGAASSLPSSHRDVRASPSAHPSEIVRRQPSQSLICHTAGLKEEPLHSTMHFYGTAVGALLPYDFSKNPTFASVHRWLRKLHYRAFSNIVIMMDGNKSDLLHLMLAPXEHAHAFTEKEGLSFLDTSALKSLNSQNAILIGLSEI

SEQ ID NO: 286618 - protein, 104 aa, Zea mays
  unsure (1)..(104): unsure at all Xaa locations
  Clone ID: MRT4577_24492C.1.pep
MVAKILCHIMLFGLSELTAXTCILPHCSQAAIAFLVPQYLXPAMHLRCERSILIPYKSPQGISEGMLPLXNLRPPTXCVLLHELPLVHLLAQNIRVQHLQQLVL

SEQ ID NO: 286619 - protein, 119 aa, Zea mays
  Clone ID: MRT4577_24493C.1.pep
ASPRIRSYEIWKHLYVVGVVHRENCCEQRKHAHIDRLTLPTLPVMQSLLAYEDEQEYVSCVTTTGTSPTIGLSLYALTMTSQSDIVSATFSNTGTTLLLLIRSVHYCCSALRVLQLLLD

SEQ ID NO: 286620 - protein, 51 aa, Zea mays
  Clone ID: MRT4577_24494C.1.pep
KKKKKKKKKKKKKKKKKKKKKKKNKKKKKKKKKLVKKKKKKKKKRKKKKAL

SEQ ID NO: 286621 - protein, 200 aa, Zea mays
  Clone ID: MRT4577_24495C.1.pep
MVLELNSQAERVSSSRGDLVSVSGAAPCKVPEEQSLHKKSKCSPTSNKAKILLVEDNKVNIIVAKSMSQQLGHGIDIVNNGMQAIRAVQQHQYDLILMDVHMPEMDGLQATKLIRSFENTGCWDVSVKPEDNPMITDSAISSDSAHAKKQGQRVPIIAMTANSFAESAEECLAAGMDSYISKPVNFQNINECLQRYLVSQ

SEQ ID NO: 286622 - protein, 89 aa, Zea mays
  Clone ID: MRT4577_24496C.1.pep
SPEGPPKTPPPDPPFLALWRRPKGPKGKILRPKLLWAPPPSASPAKIKPKDRGAPPQKKKKKKKKKKKKKKKKKKKKKKKKKKKKKKNN

SEQ ID NO: 286623 - protein, 89 aa, Zea mays
  Clone ID: MRT4577_24497C.1.pep
EAGAQLLKPPLHLDSIQKWPILAPTHSLHFPSFPPPVHLRRFRRSGVVAMAQRWAEGVCPRRGGVQGQWRSAENPPEIHPREQGLDLSV

SEQ ID NO: 286624 - protein, 552 aa, Zea mays
  Clone ID: MRT4577_24498C.1.pep
MLRRGVLLLAAILIAVAHSPLAYASEAEHKYKTEEPVKLWVNKVLGGNELIDSQIDIKFIKNVDKGAICTIELDVQKVQQFANAIENSYWFELFIDDLPLWGFVGETDKNNEKKHYLYTHKNIVVKYNGNRIIHVNLTQESPKLLEAGKKLDMTYSVKWVQTNVAFARRFEVYLDYPFFEHQIHWFSIFNSFMMVIFLTGLVSMILMRTLRNDYAKYAREDDDLESLERDVNEESGWKLVHGDVFRPPRGQVFLSALVGIGTQLAALILLVIVLAIVVMLYVGRGAIITTFIVCYALTSFISGYVSGGLYSRNGGKNWIKAMILTASLFPFLCFSIGLLLNTIAIFYRSLAAIPFGTMVVMFILWAFISFPLVLLGTVVGRNWSGAPNNPCRVKTIPRPIPEKKWYLTPSVISLMGGLLPFGSIFIEMYFVFTSFWNYKVYYVYGFMLLVFVILIIVTICVTIVGTYFLLNAENYHWQWTSFFSAASTALYVYLYSIYYYHVKTKMSGFFQTSFYFGYTLMFCLGLGILCGAVGYLGSTLFVRRIYRNIKCD

SEQ ID NO: 286625 - protein, 175 aa, Zea mays
  unsure (1)..(175): unsure at all Xaa locations
  Clone ID: MRT4577_24499C.1.pep
NSVAVGRPPGRPPPGLRPRRLARLCSARNWXKAIRLLDSILARSPSSIHDLCNRAFCYSQLELHKHVVKDCDRALLLDPALLQAYILKGKALSSLDKKEDALAAWKQGYEIAVRDTTDLKQLLDLEELVSSVKICGTTQSADHVMDASTCDTKVVISEDRVADTSFAATTMADTK

SEQ ID NO: 286626 - protein, 62 aa, Zea mays
  Clone ID: MRT4577_2449C.1.pep
GVGVFFFLTTYTFGLLFLLVLSLAGGQKHFHGPMLANLTNSTESGCKVFNHWKKTQSDCTGG

SEQ ID NO: 286627 - protein, 166 aa, Zea mays
  unsure (1)..(166): unsure at all Xaa locations
  Clone ID: MRT4577_244C.1.pep
MRECISIHIGQTAIQVGNACWELHCLEHGIQADGQMPGDKTIAGGDDAFNTFFSETGAGKHVPRAVFVDPEPTVHDYPRHPPYRQLFHPEQLIHAKEXAANNFARGHYTIGKEIDDLXLDPIKKLADHXPGLQGXFIAFNAAGGGTGSGLGSXLLLKXLSDDYGKK

SEQ ID NO: 286628 - protein, 263 aa, Zea mays
  Clone ID: MRT4577_24500C.1.pep
MLRRSVLLLAAILIAVAHSPLAYASEAEHKYKTEEPVKLWVNKVGPYNNPQETYNYYSLPFCQPSENPAHKWGGLGEVLGGNELIDSQIDIKFIKNVDKGAICTIELDVQKVQQFANAIENSYWFELFIDDLPLWGFVGETDKNNEKKHYLYTHKNIVVKYNGNRIIHVNLTQESPKLLEAGKKLDMTYSVKWVQTNVAFARRFEVYLDYPFFEHQIHWFSIFNSFMMVIFLTGLVSMILMRTLRNDYAKYAREDDDLGSLER

SEQ ID NO: 286629 - protein, 93 aa, Zea mays
  unsure (1)..(93): unsure at all Xaa locations
  Clone ID: MRT4577_24501C.1.pep
ANVFAQTFFQPGASNLTGSFWLKKRNFLENLIPPWATKGYVFQKEIIFWAPRKGFPLXRVPKTFLAKVFGILKLGGAQKVXNFKGLFYFLPPP

SEQ ID NO: 286630 - protein, 66 aa, Zea mays
  Clone ID: MRT4577_24502C.1.pep
KHKFTMSGMAFDDSPAQVNVEGDVSEKKVEVQDQNEVGGMPSRQEEEAAIKKKYEGILPRKTRAYI

SEQ ID NO: 286631 - protein, 166 aa, Zea mays
  unsure (1)..(166): unsure at all Xaa locations
  Clone ID: MRT4577_24503C.1.pep
MSSLAIVEKKPPPFPGGGCTGGVLFHLLDWHRRLACKRRLFSPRRLLPSXPPLLVXRRLPCPPPAASPPPPTLPHPADGAAPGVVARLMGLESWPATATAAPPRPQKQRKVEASRADGADSAVVLVLPTTRSRRPPASAPVPTARSHHGADLPARSPRRTRLVHAA

SEQ ID NO: 286632 - protein, 251 aa, Zea mays
  Clone ID: MRT4577_24504C.1.pep
EPAGIVAGCPALPFPFRAPHHSVPSLACLRTGAPPVRRPRRAAPRRSAAPATALPSRARDRRLPHLLAPVPGSASGPSPSPTPFRSRRPAQHPETPAAPRTHKVIMSGMASDDSPAQVNVEGDVSEKKVELQDQNEVGGMPSRQEEEAAIKKKYGGILPRKTPLISKDHERAYFDSADWALGKQGGVPNKPKGPLEALRPKLQPTQQNARARRTSYASADSDETLNLSPEDLVPQGEPSQQGEPVEDKNKE

SEQ ID NO: 286633 - protein, 161 aa, Zea mays
  Clone ID: MRT4577_24505C.1.pep
PTTPFHPSPAFARVRRPLDGHATPRRAAQLPRHPPFLAELGIDVSRTSSRPFRAPHPAPPRPQPHSAAGDQHNIPNPPPRIRLAVAPPPRPAAPGTHKFTMSGMAFDDSPAQVNVEGDVSEKKVEVQDQNEVGGMPSRQEEEAAIKKKYEGILPRKTPAYI

SEQ ID NO: 286634 - protein, 162 aa, Zea mays
  unsure (1)..(162): unsure at all Xaa locations
  Clone ID: MRT4577_24506C.1.pep
VALFFFFLATDDXSYFIWTGKGHXINYTKQQQELAYWCGCVIVARRSVGGTWKDPSYVPLWRAAMVELDEYLENLARSVFGEEVATRVLNGPHVGGHGKAVLTGGGASREEVVAGPHERAIGALAAPAVVISGRPSRSLSTTAESRRHARTRIGYRVLVFIF

SEQ ID NO: 286635 - protein, 232 aa, Zea mays
  unsure (1)..(232): unsure at all Xaa locations
  Clone ID: MRT4577_24507C.1.pep
RPGLAPPTPFHPSPAFARVRRPLDGHATPRRAAQLPRHPPFLAELGIDVSRTSSRPFRAPHPAPPRPQPHSAAGDQHNIPNPPPRIRLAVAPPPRPAAPGTHKFTMSGMAFDDSPAQVNVEGDVSEKKVEVQDQNEVGGMPLRQEEEAAIKKKYEGILPKKTPXISKQHQSSAQVQMSVVISATSKDLLGFTCIYINPQALLCYSILELLGANKIGSLHFGKLEIKKKKKAG

SEQ ID NO: 286636 - protein, 77 aa, Zea mays
  Clone ID: MRT4577_24508C.1.pep
QIKKDYHTQLARSELLLVQDHKSFSQVLLTMLASSPHNKIKMQPKRPKLPKIEPIFCNARVLTMNNKGRVCGSYNGG

SEQ ID NO: 286637 - protein, 94 aa, Zea mays
  unsure (1)..(94): unsure at all Xaa locations
  Clone ID: MRT4577_24509C.1.pep
FGTRGGILWFXNLTEFPXGTLAPIFPILIAGLHYLNVQISFQGSQIKDHPGIFDLLTKDYRIYLNVLTMPLVLEEHGXAEGWLGYWTAMGDRLG

SEQ ID NO: 286638 - protein, 138 aa, Zea mays
  Clone ID: MRT4577_2450C.1.pep
NSARGESIVDHEGWQEGSGRCGGGHTAGSAAHGSSTDGHGRPLAARSRAGWLPRHDAQALVIASATSYLLLLLELRPFREATTLTCMRRPTTTTLPLVSFCSSDACFKASMDALRICVLISRVREPDRRGCCFIYVFW

SEQ ID NO: 286639 - protein, 285 aa, Zea mays
  Clone ID: MRT4577_24510C.1.pep
KKNRGASHEDPHATLGTVAVCPALPVPLPRSPPVRPIPRLPSHGCAARSTATPRRAAPLSCPAPALPRRARDRRLPHLLRARSGLRIRPLPRPQPHSAAGDQHNISNPPPRIRLAVAPPPRPATLRTHKFTMSGMASDDSPAQVNVEGDVSEKKVEVQDQNEVGGMPSRQEEEAAIKKKYGGILPRKTPLISKDHERAYFDSADWALGKQGGVPNKPKGPLEALRPKLQFPHQFRSQPTQQNARARRTSYASADSDDTLNLSPEDLVPQGEPSQQGEPVEDKNKE

SEQ ID NO: 286640 - protein, 74 aa, Zea mays
  unsure (1)..(74): unsure at all Xaa locations
  Clone ID: MRT4577_24511C.1.pep
MSSPKFAAGGGGPKTFWPXVVGFSVEDPKKVFLKANPDPDIVVLPVGSVVPPDFPPNRVRIFVDIVAQTPPIGL

SEQ ID NO: 286641 - protein, 79 aa, Zea mays
  Clone ID: MRT4577_24512C.1.pep
GILTSPFSCGGASWQVWASLTPPSSCTPATPPDSRIRPNFYLQGCEQHFLMLNRMRTYLSRMVNYKVTPLRLPLLSLWF

SEQ ID NO: 286642 - protein, 88 aa, Zea mays
  Clone ID: MRT4577_24513C.1.pep
EIKRPRRYESKTNEKKRKGGEAGPPNRCRGIMDEPRFPKKNADATSKAWGEGNDNWEVGGILLNKRNACSPQFNFSGSRLCPAQTRQI

SEQ ID NO: 286643 - protein, 80 aa, Zea mays
  Clone ID: MRT4577_24514C.1.pep
DLVSRAELAPAVVVVELLPPPLEARIELGGPRPCVVRDWLPEISLALSFLVQSAMAILSLRAGSLLFRNGGNTEAYSVRS

SEQ ID NO: 286644 - protein, 128 aa, Zea mays
  Clone ID: MRT4577_24515C.1.pep
MDGTTVCSMCGDVGFPDKLFRCARCRRRFQHSYCTNYYGAAAPAQAGAGVCDWCLSDDVVSGKKRQYSSASGCSKRHPQVEEADWSTQQPAFPPSSGCSKGAGKVTGSEQAEGGRRPRRYKLLKDVLC

SEQ ID NO: 286645 - protein, 104 aa, Zea mays
  Clone ID: MRT4577_24516C.1.pep
PCTPVARANLFLFGPRPPAGGGPNHVSMVPRGGPIPGRVGFLGAGLRALGWRGIYSGIGVPWFSRWPAGPFRFWGTPPFPVGGGLPPIACFFRSICLFLWAGHF

SEQ ID NO: 286646 - protein, 362 aa, Zea mays
  Clone ID: MRT4577_24517C.1.pep
MSCFACCGDEDTQVPDTRAQYPGHHPARADAYRPSDQPPKGPQPVKMQPIAVPAIPVDEIREVTKGFGDEALIGEGSFGRVYLGVLRNGRSAAVKKLDSNKQPDQEFLAQVSMVSRLKHENVVELLGYCADGTLRVLAYEFATMGSLHDMLHGRKGVKGAQPGPVLSWSQRVKIAVGAAKGLEYLHEKAQPHIIHRDIKSSNVLLFDDDVAKIADFDLSNQAPDMAARLHSTRVLGTFGYHAPEYAMTGQLSSKSDVYSFGVVLLELLTGRKPVDHTLPRGQQSLVTWATPRLSEDKVRQCVDSRLGGDYPPKAVAKFAAVAALCVQYEADFRPNMSIVVKALQPLLNAHARATNPGEHAGS

SEQ ID NO: 286647 - protein, 388 aa, Zea mays
  unsure (1)..(388): unsure at all Xaa locations
  Clone ID: MRT4577_24518C.1.pep
MSCFACCGDEDTQVPDTRAQYPGHHPARADAYRPSDQPPKGPQPVKMQPIAVPAIPVDEIREVTKGFGDEALIGEGSFGRVYLGVLRNGRSAAVKKLDSNKQPDQEFLAQVCLSLFMKCSASILSRGLKSTXIRLQVSMVSRLKHENVVELLGYCADGTLRVLAYEFATMGSLHDMLHGRKGVKGAQPGPVLSWSQRVKIAVGAAKGLEYLHEKAQPHIIHRDIKSSNVLLFDDDVAKIADFDLSNQAPDMAARLHSTRVLGTFGYHAPEYAMTGQLSSKSDVYSFGVVLLELLTGRKPVDHTLPRGQQSLVTWATPRLSEDKVRQCVDSRLGGDYPPKAVAKFAAVAALCVQYEADFRPNMSIVVKALQPLLNAHARATNPGEHAGS

SEQ ID NO: 286648 - protein, 122 aa, Zea mays
  Clone ID: MRT4577_24519C.1.pep
MGRKGKWFDTVQRILITSEPDPVETQNDDAAKDWLDHHEKAAKLRDNKSAIRRIWQFGKSNSSGASASATAPEDAEVLQFPKSPRSDNEYHVVQDLTEEVPFMETRGEEEEEEDGERMNPGD

SEQ ID NO: 286649 - protein, 90 aa, Zea mays
  Clone ID: MRT4577_2451C.1.pep
MKGGKKEVAGAVVAILLVLQLMAAPPTAMAARSPRGAVPDGSLATTPKVTMLSATLCYTGETCKYIGCLTPACSCNYSDRLCYIIFTPVA

SEQ ID NO: 286650 - protein, 249 aa, Zea mays
  unsure (1)..(249): unsure at all Xaa locations
  Clone ID: MRT4577_24520C.1.pep
PPPPPXPPAPPPRRPSSEPPSPPXPPPPPXPAPLPGAPXPSPRHGRPAPTPPGPGASPSGEPAPRPTPPXPPRPGAPPSGEPAPRPPRPRPAPARRPPASPRPGHPGSAAPGPPPXPPPSDEPTPRPPXARPPPARPAPPHAPPXSPSPPPPASPPPXPRSGEPAPPLPRAPARPPRAPARPPPSRPGSXPPAPAPXPCPRPTASSLARARLPRHACPLAPPCLARVVTVPAWPRARPSVPMARGLELG

SEQ ID NO: 286651 - protein, 76 aa, Zea mays
  Clone ID: MRT4577_24521C.1.pep
MSKPANQQSSHMHVYLSIAKEKPSIRFSINMLKLMTEAQIQHVLPQYHYTRNLRYCSARLRRLYKFIKFLHGRGKY

SEQ ID NO: 286652 - protein, 250 aa, Zea mays
  Clone ID: MRT4577_24522C.1.pep
GELKQIRYKPAIIYVYIGTTVKGAVDDLDLVIKTLEENGFKDRFYIHCDGALFGLMIPFVKKAPQVTFKKPIGSVSVSGHKFVGCPMPCGVQITRLEHINALSSNVEYLASRDATIMGSRNGHAPIFLWYTLNRKGYRGFQKEVQKCLRNAHYLKDRLKEAGIGAMLNELSSTVVFERPKDEEFVRRWQLACEGNIAHVVVMPSVNIDKLDYFLNELVDKRATWYQDGISQPPCIARDVGVENCLCGLHK

SEQ ID NO: 286653 - protein, 66 aa, Zea mays
  Clone ID: MRT4577_24523C.1.pep
FLSPGGPMRGLTSLYCFELTDPFSQGKPFLPPSFMNGPTPLGGPVWFLVPRGVFFSPIGPATLDFP

SEQ ID NO: 286654 - protein, 88 aa, Zea mays
  unsure (1)..(88): unsure at all Xaa locations
  Clone ID: MRT4577_24524C.1.pep
RDRYMXXNXXSNXNETPYSSLTTLLCSRCPIFSSFSTSFVPFLQFHYFSCSTXNFPPLSFFFFSSSSSFFPLYYPCYLFHIISFFFIF

SEQ ID NO: 286655 - protein, 60 aa, Zea mays
  unsure (1)..(60): unsure at all Xaa locations
  Clone ID: MRT4577_24525C.1.pep
XLFLLVWMGTWGATSKACYTQHMNEIINFLNIRQIIIKNIENNLNLMLHKKNLINTKTKI

SEQ ID NO: 286656 - protein, 117 aa, Zea mays
  unsure (1)..(117): unsure at all Xaa locations
  Clone ID: MRT4577_24526C.1.pep
GLYNETASLDASLASXLKPRXPGAAGSGDDNTSPLDPATSYVFDNFYYRNLLRNKGLLHSDQQLFSGGGSADAQTTAYASDMAGFFDDFRDAMVKMGAIGVVTGSGGHVRVNCRKTN

SEQ ID NO: 286657 - protein, 118 aa, Zea mays
  Clone ID: MRT4577_24527C.1.pep
AAASGGVPLVAPQLSEGGLEREQLQRLEVAVAAGAADALIRWPAGAVINGGRGLRVQHLRWGGGARGTARCCGLLERGGRWRRRLVLPDLHPCWVLLVHDCHLLLLLLRAVVGSRIIC

SEQ ID NO: 286658 - protein, 162 aa, Zea mays
  unsure (1)..(162): unsure at all Xaa locations
  Clone ID: MRT4577_24528C.1.pep
HSFVKTRGLGAGKAGDLTYWESAARMIADVSKSDKIVVEKYTAPVKTAVAIEKILTHIIKGINYQILSNPEFLARGTAIEDLFKPDRVLIVGRXRPXGRKACQALKDLYAHXPPWYRMLSTNLWSAELCKLCANAFLSQRICSXDTPSAXLCEATGSYVTDV

SEQ ID NO: 286659 - protein, 113 aa, Zea mays
  Clone ID: MRT4577_24529C.1.pep
HGRTGETAESEWSAAAGTARPTSPLSQWVTVPRLGIEGEGPDAIDRRGSTVTTNNNSLYCPRSNDFFGASVCRRQGARSTEPEDLAWQQRLTLEIENETDWPQKLVTTRTFKH

SEQ ID NO: 286660 - protein, 114 aa, Zea mays
  unsure (1)..(114): unsure at all Xaa locations
  Clone ID: MRT4577_2452C.1.pep
LLDCCRKGDYYRYLAEFSTGTEKKAASDQSLMAYQVXIFQMLYVGSNEPFGKAYPFLLKXKHLLQHAMVVASSELSPAHQIRLGLALNLSVFFYEIMNSHERSLIFNALFLPFY

SEQ ID NO: 286661 - protein, 84 aa, Zea mays
  Clone ID: MRT4577_24530C.1.pep
MPSAQFNTAAEEVKNLSKKPTDDQLLELYGLFKQATFGDNDTSKPTFDIKGRYKWDAWNKLKGMSQEEAEQKYIELVENLKASQ

SEQ ID NO: 286662 - protein, 116 aa, Zea mays
  unsure (1)..(116): unsure at all Xaa locations
  Clone ID: MRT4577_24531C.1.pep
SRYSRVGTEGGGRTHGTRRXARNIFHKGIELGKQLERMADGDRWKALQDFWAKTTIHAAKSHYTTKQHMQHLESGGEFLTHIWALLAHAGILYLNPVNNEDQEDQANLGSGPSAAA

SEQ ID NO: 286663 - protein, 201 aa, Zea mays
  Clone ID: MRT4577_24532C.1.pep
RCTGHHTPAGRTAHAIRARRGGLQKNLCHSPQPSRVFRRTGGGHSTHGQLKKPVAGNSGDQPNWESKRMSPVLRCWMEADPSPLPTSRPPTSPSPAPRAMGRGEERAADDCEPSLPWRRGGKGNAGGRSRGGRGRSRRHGGWGSTGRLDPSPPSRRRRQQGLDGKTLPSSRGAGGRLLQGGERRTQEEEEAPQGVPHLAAG

SEQ ID NO: 286664 - protein, 60 aa, Zea mays
  Clone ID: MRT4577_24533C.1.pep
ALALYYPAFNAVIIARAYHEWTASNSSASGPSRGNDITNACLLPYRCFIRGPKLNQLREA

SEQ ID NO: 286665 - protein, 62 aa, Zea mays
  Clone ID: MRT4577_24534C.1.pep
RIQGTITSRYKIHENDDDSGSDYPSNIKHAMNNVLPVIAQQLEFYFYHRPYNITQLNDIITG

SEQ ID NO: 286666 - protein, 67 aa, Zea mays
  Clone ID: MRT4577_24535C.1.pep
HASAHRVRKKKKKKKKKKKKKKKKKKKKKKKKKKKKKKKKKGGPVLGGSKFYVRRSCEGIIFFFGVP

SEQ ID NO: 286667 - protein, 183 aa, Zea mays
  unsure (1)..(183): unsure at all Xaa locations
  Clone ID: MRT4577_24536C.1.pep
MSPYAYKPQIKCTTLSSSSTSEYHHATARQRLRPILMKGHERPLTXLRYNRXGDLLFSCDKDHTPTVWYRDNDDRLVTYRAHHGAVWTCDVSHDSAGLINVSADHTDNVWDVSTENEIISFRFXDPVMSVQNDIEDANLVVTTEQLYGPRAHXQDQGIVDDIDDQKEDTALIINGIKGKNNRD

SEQ ID NO: 286668 - protein, 111 aa, Zea mays
  Clone ID: MRT4577_24537C.1.pep
MACTPYYNTCTARHATKNAPSFPRPPAPPQAPRAKEPQPHKMAVAPEPSKKRVAPGTGLEEWTETADSLYSVSPPPSSVPMPTSLLLTVTPPTACAVDVGATDELRRILKL

SEQ ID NO: 286669 - protein, 49 aa, Zea mays
  unsure (1)..(49): unsure at all Xaa locations
  Clone ID: MRT4577_24538C.1.pep
ESAADNAAMLARCIKDVPANENDLQLQELARFAVNEHNXXANALLGIEK

SEQ ID NO: 286670 - protein, 90 aa, Zea mays
  Clone ID: MRT4577_24539C.1.pep
RRGPSPPPPSPRALRPQFPRAQTRREGRGSDSQQPRRPAQAWPLPLPVATARPRAPLTSCPPPTPRQPYLLSLCSALLLSARSVPICRID

SEQ ID NO: 286671 - protein, 69 aa, Zea mays
  Clone ID: MRT4577_2453C.1.pep
MAAPPTDMADRSPHGDVPDGSLATTPKETMLPATLCYTGETCKYIGCLTPDCSCNYRDRLCYIIFTPVA

SEQ ID NO: 286672 - protein, 170 aa, Zea mays
  unsure (1)..(170): unsure at all Xaa locations
  Clone ID: MRT4577_24540C.1.pep
MTTPTPSGDGSPPGSSDLVPPSYPEMIVAAITALAEENGSSQAAIARRIEAQARGDLPASHPALVAAHLSRMSAAGELVAVAGGKYALPPPPAQPAPESPADXAKTTTTTTSAPTRXEEEEAPEPLLVPVPVPQPPAKRGRGRPPKPRPAGFPIGVPGAAASPAAAPRRR

SEQ ID NO: 286673 - protein, 150 aa, Zea mays
  Clone ID: MRT4577_24541C.1.pep
TPRPRTRGKKNKNKKKKKKLKNLKKKNKKEGVGGAFFVAPTLLARALLVVRFFLGGLIFSCLPGTFARPSWESPVVSTPFPLCWASPFSRLRLSHPASPRASFPKVAQPYCHLGRAVSRGLFRGGCGFFSQWDRCICQCRCIRSFRFFPS

SEQ ID NO: 286674 - protein, 170 aa, Zea mays
  Clone ID: MRT4577_24542C.1.pep
MATPTSSGDGSPPGSSDLVPPSYPEMIVAALAALAEENGSSQAAIARRIEAEARGDLPASHPALVAAHLSRMSAAGELVAVAGGKYALPPPVPPPPESPADDEEDDYADDEEEEEEAPEPEPLPQPPAKRGRGRPPKPRPTGFPAGVPGAAGPGPIGVPGAAAAAAAPRR

SEQ ID NO: 286675 - protein, 154 aa, Zea mays
  unsure (1)..(154): unsure at all Xaa locations
  Clone ID: MRT4577_24543C.1.pep
PVRLPWLLQMIVAAIAALAEENGSSQAAIARRIEAQARGDLPASHPALVAAHLSRMSAAGELVAVAGGKYALPPPPAQPAPESPXRRRRRRRRRRLRRRGGRGRGGAGASAXPVPVPQPPAKRGRGRPPKPRXPLAXPIGVPGAAASPAAAPRR

SEQ ID NO: 286676 - protein, 460 aa, Zea mays
  Clone ID: MRT4577_24544C.1.pep
MNSIEPFNRLVKLAARAFYDDVSMKGDNQPKTSRGDNRGMAVVVLDALTRRPWVREEDLAKALKLHSKQLRRILRFFEEEKLVTRDHRKESAKNAKAHNAAAANDGQTIAKEGEEKVKMHTHSYCCLDYAQICDVVRYRIHRMKKKLKDELDSRNTIQHYICPSCNKRYSAFDALQLVSYTDEYFHCETCNGELVAEDDKLASEEMGDGDDNVRKRRREKLKDMQQRIEEQLKPLVAQLDRVKNLPAPEFGSLQTWERANIGAFAIGDPAAADSSRNSQGQYGTPMPYLGQTKVEVDILSDGEKEGAESGKDGSELKVIPPWMIKDGMNLTKEQRGEKIESQKLEKSEAKDDKKHDLKDDQSVQEEYIKAYYEALRKKQEEEEAKNRMQQEGKISVPDSQTERQVGKKYKRDDDDDEDIEWEEHQPTAAGNATETYKLADLNAEAQESGDDEDDNVWEEG

SEQ ID NO: 286677 - protein, 457 aa, Zea mays
  Clone ID: MRT4577_24545C.1.pep
MNSIEPFNRLVRLAARAFYDDVSMKGDNQPKTSRGDNRGMAVVVLDALTRRPWVREEDLAKALKLHSKQLRRILRFFEEEKLVTRDHRKESAKNAKAHNAAAANDGQPIAKEGEEKVKLHTHSYCCLDYAQICDVVRYRIHRMKKKLKDELDSRNTIQHYICPSCNKRYSAFDALQLVSYTDEYFHCETCNGELVAESDKLASEEMGDGDDNVRKRRREKLKDMQQRIEEQLKPLVAQLDRVKNIPAPEFGSLQTWERANIGAFAIGDPAAADSSRNSQGQYGTPMPYIGETKVEVDLLSDGVKEGAESGKTDSELKVLPPWMIKDGMNLTKEQRGEIIAPQKLEKSDAKDDKKHDLKDDHSVQEEYIKAYYEALRKKQEEEEAKRRMQQEGKVFLPDFQTERQVGKKYKRDGDDEGIEWEEHQPTGYATETYKLADLNAEAQESGDDEDDNVWEEG

SEQ ID NO: 286678 - protein, 231 aa, Zea mays
  unsure (1)..(231): unsure at all Xaa locations
  Clone ID: MRT4577_24546C.1.pep
EQLKPLVAQLDRVKNIPAPEFGSLQTWERANIGAFAIGDPAAADSSRNSQGQYGTPMPYIGETKAEVDLLSDGVKKGAESGKTDSELKVLPPWMIKDGMNLTKEQRGEIIAPQKLEKSDAKDDKKHDLKDXHSVQEEYIKAYYEALRKKQEEEEAKNRMQQEGKISVPDSQTERQVGKKYKRDDDDDEDIEWEEHQPTAAGNATETYKLADLNAEAQESGDDEDDNVWEEG

SEQ ID NO: 286679 - protein, 87 aa, Zea mays
  Clone ID: MRT4577_24547C.1.pep
FVISIPFVVEQNKTPPQFKLNGPRPPKFQIPNLKIKGGPPPPFKKKKKNFPSKGPFNQPPLTYHNPPPPTLAHFFKLAFQEKKNSNF

SEQ ID NO: 286680 - protein, 123 aa, Zea mays
  unsure (1)..(123): unsure at all Xaa locations
  Clone ID: MRT4577_24548C.1.pep
MAAPPTRARADYYYLIKLILIGDRGLGKRRLPLQISNGPFTTSFITTMGIDCKIRTARTDGKRIKSQIWDTACHERLLTITIXYYRXHRCILLGCDVTYKSSLNNIRDWIRNNGQRASDNVNK

SEQ ID NO: 286681 - protein, 353 aa, Zea mays
  unsure (1)..(353): unsure at all Xaa locations
  Clone ID: MRT4577_24549C.1.pep
MDDTKLQLRKVNLQLDHAVLEAAGGDSSLLGKPDPSFGKSGSILHQEDPISEDFTLGAPIPGTSGAAKGMNSFTLPHPPPKFHGSLYDGHPFHPIAPELLGKLPKLPFPVFDGDNPRLWISRCETYFXMYFVDHVAWVRVAFMHLSPVVACWFQFVXASIWMCPSHXLCKLLNECFGRDQYQFLLRQLFRIRQSGTVAEYIERFSTLVDQLTAYEAAHDPLYFTTRFVDGLRGDIRAVVVIHXPTDLDTACTLALXRKKYLNQPIGKRCASLRXPWSKTTTSGPLSLPMPLGVDKGVRSPSQLEKPVGRPQRPAEDKMGALRAYRRARGLCDRCAEKCVTPGFGRQTECETCT

SEQ ID NO: 286682 - protein, 82 aa, Zea mays
  Clone ID: MRT4577_2454C.1.pep
PVRAWILTRRTPSASLFSPRRSFLTGGIKKTWDHTIVPLRPTHRYPSPTATPLLSPIQGPPPKKQLCTPVPAPLAPAAPHPA

SEQ ID NO: 286683 - protein, 107 aa, Zea mays
  unsure (1)..(107): unsure at all Xaa locations
  Clone ID: MRT4577_24550C.1.pep
PTKGYRFNFTQRPPKFFCDRRDLFGHFFGPRFFFINRGQHSAHNFKLWLSCFSVRGSLFVPGLXQILGLIFFWWGSLAGGFXSSHWXSSFFKSFCSSSSAGTCSNLG

SEQ ID NO: 286684 - protein, 362 aa, Zea mays
  Clone ID: MRT4577_24551C.1.pep
MGGVRSYFFIIAAAVVAVVLALLPAGATGAGLKVGFYSKTCPSAESLVQQAVAAAFKNNSGIAAGLIRLHFHDCFVRGCDGSVLIDSTANNTAEKDAVPNNPSLRGFEVIDAAKKAVEARCPKTVSCADILAFAARDSIALAGNNLTYKVPAGRRDGRVSRDTDANSNLPSPLSTAAELVGNFTRKNLTAEDMVVLSGAHTVGRSHCSSFTNRLYGFSNASDVDPTISSAYALLLRAICPSNTSQFFPNTTTDMDLITPALLDNRYYVGLANNLGLFTSDQALLTNATLKKSVDAFVKSESAWKTKFAKSMVKMGNIDVLTGTKGEIRLNCRVINSGSSSSGLFQLHTATASDEEFAHVATN

SEQ ID NO: 286685 - protein, 97 aa, Zea mays
  unsure (1)..(97): unsure at all Xaa locations
  Clone ID: MRT4577_24552C.1.pep
VALATHTLCFWRSCGFFSFLDPDLCFFFFFXXSNLSWGLYWGSXLFYILTLIQYTEPPFYNLXTAKTLAFPNLVPLLLIPVLPVGXVSIRPAPFALP

SEQ ID NO: 286686 - protein, 31 aa, Zea mays
  Clone ID: MRT4577_24553C.1.pep
ILVYLFYTILIKFKKVWMNIILELYLSNLKF

SEQ ID NO: 286687 - protein, 122 aa, Zea mays
  unsure (1)..(122): unsure at all Xaa locations
  Clone ID: MRT4577_24554C.1.pep
SGGAAPGCXCGXGCXCRPCXSXSCCVVSFAXCXPVPFFXXCLLCACGVSXXXXXAXVWSGSGSPXGXLPPRSVVLVLVPXXXWXRXXPCXSXLCAXVCVXXSLXXLAPSSPXLFSXXXPXXA

SEQ ID NO: 286688 - protein, 130 aa, Zea mays
  unsure (1)..(130): unsure at all Xaa locations
  Clone ID: MRT4577_24555C.1.pep
CSLRLLVCXACLSVXSFLAVVGVFVAVXSAVPLXLACAGRRVCLAPGVARLGGRRVPGGVGRARGLLRRRACRPGAVRGRRPPARRRXRRLVRRASRLALRPAAAWSLRCCGCRGRFGLWCGAGCCLRAG

SEQ ID NO: 286689 - protein, 77 aa, Zea mays
  Clone ID: MRT4577_24556C.1.pep
KLFFFLFFFCFFRTKTCGDLAVIMGYSRHKKVGRFTVLFHFYIYKGGMEEDYQIIKLGMTKNGCVAPTKVGVDVGQL

SEQ ID NO: 286690 - protein, 280 aa, Zea mays
  Clone ID: MRT4577_24557C.1.pep
VGKGLSKDEKAQKLALQHWLEAIDPRHRYGHNLHFYYHRWLHCQSKQPFFYWLDVGEGKDVNLEEHCPRFKLHKQCIKYLGPKERETYEVVVEDKRLMYKLSRQIVDTTRSVKGTKWIFVLSTCKTLYIGQKQKGVFQHSSFLAGGATSAAGRLVVEDGILKAVWPHSGHYRPTEQNFQEFMNFLKERNVDLNNVVLSPSEGEEDGDFSLASSYSQLDVTLLCQQEDSQEQEAQSARRHGQVEAEAKARTCSLEPSLPSTETCSTPATIRKSSSDNRLQG

SEQ ID NO: 286691 - protein, 57 aa, Zea mays
  unsure (1)..(57): unsure at all Xaa locations
  Clone ID: MRT4577_24558C.1.pep
SXYKTGGIFGTGRLEDPMSPRPAYLRGYTNTTRDNKKFAECTSVHDQIKGCRPFFRI

SEQ ID NO: 286692 - protein, 107 aa, Zea mays
  unsure (1)..(107): unsure at all Xaa locations
  Clone ID: MRT4577_24559C.1.pep
TAHPGQGAAQRAGAEPTRTRPTTGAGADXGAXXXXERXXXXPPPPPXXXGRKTSAARPETRRPPHREATPRTRQGKGRRRRRGRGGERGLCCVXLLLLRVGFGTPRL

SEQ ID NO: 286693 - protein, 92 aa, Zea mays
  Clone ID: MRT4577_2455C.1.pep
SIRERERAIVDHEGRREGRGRCGGGHTAGSAAHGSSTDGHGRPLAARRRAGWLPRHDAQGDDAGGHAALHGERHADTLDASLLLAPATIVIV

SEQ ID NO: 286694 - protein, 68 aa, Zea mays
  Clone ID: MRT4577_24560C.1.pep
DYAFCRARGVGPVAGGLAGTEEPPLEERHRGVPPRLHGFPCLLQFPSCLVSLRTDLDTFSHQSLCRAK

SEQ ID NO: 286695 - protein, 66 aa, Zea mays
  unsure (1)..(66): unsure at all Xaa locations
  Clone ID: MRT4577_24561C.1.pep
SGKDIPELISPGKKKFASVPFGGGGVAVSAGAPSSGGTAPPPXAKKKKKVEKKEKNHYYMGFTPFD

SEQ ID NO: 286696 - protein, 276 aa, Zea mays
  unsure (1)..(276): unsure at all Xaa locations
  Clone ID: MRT4577_24562C.1.pep
MSEDPACSRRSRCDLGGDERWLSGAAGDDQFDRLPDALLLVIFNRIGDVKALGRCSLVSRRFHELVPLVDSVLVRVDCVIPDEPPSSSSSSSTPSSPTASVRARGVFSQIARIVLGGIVKPIQALGQILSPANSASGFPASSASSLSSSSSSSSPLPAADVSHHSPSEVLRSFKELRHLRIEXLPAGELGMDDGVMLKWKADFGSTLGSCVILGASSASXRPPPPQLAQXPSAAPSDDSGHTEPDECDDSGSIPESFYTNGGFKLRVVWSISSLIA

SEQ ID NO: 286697 - protein, 57 aa, Zea mays
  Clone ID: MRT4577_24563C.1.pep
QSSSNTISKPIVYTRLVSLIYMQSEHPVQCAQQVKNHITKIKVRVDVEELAKVGCFV

SEQ ID NO: 286698 - protein, 223 aa, Zea mays
  Clone ID: MRT4577_24564C.1.pep
YVILGGRGSVLPTHTAPSAPAYHPSSTKPPPPRRRCLCLCVVVTLALLAALAITLLVLFLTVLKVRDPTTRLVSTRLAGIAPRLTFPAVSLQLNVTLLIVVAVHNPNPASFAYASGGHTDVTYRGAQVGDAEIEPGRVPSRGDANVSLALTLQADRFAAGLAQLVADVEAGAVELQASTRIPGEVAIFGVFRRHAVAYSDCTFVFAVPEMRVRSQQCRDRTKL

SEQ ID NO: 286699 - protein, 67 aa, Zea mays
  Clone ID: MRT4577_24565C.1.pep
DHQTPSITYLYSIKPRNAVSGTDQVPCHPQCSTATAWKPSHTRTGDSHPPTAPDHLQISRNLVQANH

SEQ ID NO: 286700 - protein, 107 aa, Zea mays
  Clone ID: MRT4577_24566C.1.pep
YDPDSCAGFGSTFLGSGGVHCAFVSWLIFLCSGSYLTPVGPPGLFCCSTGSFVVGFFYLLLFPALGLGSGVKGFTCRFHFASVSFSLASSRGWRTAAFAVSLVAFSF

SEQ ID NO: 286701 - protein, 84 aa, Zea mays
  Clone ID: MRT4577_24567C.1.pep
WVYLLQNAELPGLHHEGVARGPGSPGSRCERHLHAYNRRTAADSHRCRFIYRHTVHLASSWISWHIQCIYHRRSTRRRQHTCHH

SEQ ID NO: 286702 - protein, 37 aa, Zea mays
  Clone ID: MRT4577_24568C.1.pep
GGDIPQIHHHPQLVCPTIKDIVTRYYSSLGIFIWNKI

SEQ ID NO: 286703 - protein, 68 aa, Zea mays
  unsure (1)..(68): unsure at all Xaa locations
  Clone ID: MRT4577_24569C.1.pep
SIPXPXXLAXRIDHQFVXCGXLXLAXRGXXRRKXSXWXRPRKAKGKREPNQIREAGIENSPXRPRGTQ

SEQ ID NO: 286704 - protein, 89 aa, Zea mays
  Clone ID: MRT4577_2456C.1.pep
MITRSKLVEQLRDYQIRSQHKRDIIGAISWGLLCSFLIISSYMMLYFRHFWLSAIIISLGILFPAGLYILRQRKLAKKRERRLLLPLSM

SEQ ID NO: 286705 - protein, 123 aa, Zea mays
  unsure (1)..(123): unsure at all Xaa locations
  Clone ID: MRT4577_24570C.1.pep
RPGCSPVPPCHSXGDGLSELCGLRXSSASMPXRQNATFEDFMFVVSFMTHAVGTXGGPWRSPAEAKREVDINGIGRIGGNFLRSWHGRGEPLPLDVIGINDTESGKEASHLVQXTSRLGNIDA

SEQ ID NO: 286706 - protein, 117 aa, Zea mays
  Clone ID: MRT4577_24571C.1.pep
VESIIASHHTDCVTNPSVQRPAVALMEREYLSVVMFTWLAHGQFTPYLELARRFTSAKDAYIDLTVQLVSTPVNLSAITRYQTPRIRVAELHLPAAPDLPTELHTSNHLAARLMPAL

SEQ ID NO: 286707 - protein, 237 aa, Zea mays
  Clone ID: MRT4577_24572C.1.pep
ASARRCRRRAPRGRYARSPWAPGRTRGAGCSPTQPAAGRAGKRRRRSAGRRRRFFFLLDPFLGRVGGRVGGRVGGRVGGRVGGRVGESSLFIYPLKIVIKTCGTTKLLLTIPRILELAEELSMPLAAVKYSRGTFIFPGAQPAPHRSFSEEVAALNRYFGGLKSGGNAYVIGDPARPGQKWHVFYATEYPEQPMVNLEMCMTGLDKKKACVFFKTNADGNTTCAKEMTKLSGISEII

SEQ ID NO: 286708 - protein, 100 aa, Zea mays
  Clone ID: MRT4577_24573C.1.pep
LRSSLLTTRKERKKVYSNIIFFLTAGWLITNSILSRAARSIWWASDPSHHRTRRQKLEYHFDFDVFSKKKKKSQHVLEHFEYVTSLCFSLNDRSKDLKYT

SEQ ID NO: 286709 - protein, 87 aa, Zea mays
  unsure (1)..(87): unsure at all Xaa locations
  Clone ID: MRT4577_24574C.1.pep
SFLRSSFGCLLCCFXFFXVWACLSSRRAGFFLCLCAXSLLLAXXFCXPGLLVXRPPPPFFXSLSFAXAXRPLLAAGVGPSASAVRVG

SEQ ID NO: 286710 - protein, 211 aa, Zea mays
  unsure (1)..(211): unsure at all Xaa locations
  Clone ID: MRT4577_24575C.1.pep
MASGSLVCCLTPCLLAVVFPPACYIFEPXHXXXXXXXXPXPPPPPPPXPPPPPPPPPPPPPPPXXPPXXPXPPPPXXPPXPXPPPPPPPXPPPPPPPPPPPPPPPPPPPPPXPPXPPPPPPPPPXXXPPPPPPPPPPPPPPPPPPPPPPXPPPXPXPPPPXPPXPPPPPXPXPPPPPQXXXPXXPXPPPPXPPXPXPPPXPPPXPPPPPPP

SEQ ID NO: 286711 - protein, 34 aa, Zea mays
  Clone ID: MRT4577_24576C.1.pep
CSAANNTNHATTNLKYFIDHRGWETRREYWTLGY

SEQ ID NO: 286712 - protein, 245 aa, Zea mays
  Clone ID: MRT4577_24577C.1.pep
KRSRKRSGLRTQRRAPRQRFVPRRPCVARKFLDLDALLSHAYDTCKAGLKTKHLGFHKALCVLMGWNWHVAPDTSKSHHSIPSEEVNAMRGDLMLWPPVVVIHNSSTGHEAKDTDAKIVSIEEIEGVLADIGVAHEKARVSHGRSANQSVFLVKFQPTISGFQEAMRVHTHFSTRNHGKEEFQLMKGSKGKKATSTDSLEELLYAHIGVVEDLGLLDEGTKKRCKVMRKKEIEANAEATLNLEVY

SEQ ID NO: 286713 - protein, 70 aa, Zea mays
  Clone ID: MRT4577_24578C.1.pep
FKWMGCRPPHVNSPYCIQMQADSLIFEGIPGGSVVKTERNHRRVCGLRTVNINKILVQCRPQLFKTDKRN

SEQ ID NO: 286714 - protein, 88 aa, Zea mays
  Clone ID: MRT4577_24579C.1.pep
KLRWPFIRGLKPHMQENPTAKDRVLSTNTTIIALIRAEATALRSFFLKVARDWEACFICLKKLALSFPYLQLLLHGKELAIKLGDINT

SEQ ID NO: 286715 - protein, 91 aa, Zea mays
  Clone ID: MRT4577_2457C.1.pep
MKGGKKEVAGAVVAILLVLQLMAAPPTGMAARSPRGAVADGSLPTTPKVTMLAATPVLHGGDMEIHSPGSLLLAPAALVIALWYRIFTPVA

SEQ ID NO: 286716 - protein, 149 aa, Zea mays
  unsure (1)..(149): unsure at all Xaa locations
  Clone ID: MRT4577_24580C.1.pep
HGFGTKGPPTGSKSQESLEKLYVINYGISKETSKALFXLIPATXKLKVFHFPNNNTGNEGAMYNAXKVKRFPNVKSFRCSTTKIGFYGGVALFXALRTSTRLKKLDFKDHLFGVXAGLAFNKTPPKPPDPVXLYFSDLXLKNQGTIANA

SEQ ID NO: 286717 - protein, 199 aa, Zea mays
  Clone ID: MRT4577_24581C.1.pep
RPGQCLVLPDSDTSSPFRLVAPAASPRPGLPTVLPGTRPAGDLPPRSPSQVSTLSSSPAPGDLVVERCRAPLRDLPAPRRGRLRGPVEPCRAPLGGDLPAPPLCRELSRPPRRSYPRRALLRAPEGNPTLDPSTFASRKTPSTCSRAWGRPHSSTAPVRSSVAKVQIAPSFWLPASDSEHNNTPSLVLISPSINQRVIQ

SEQ ID NO: 286718 - protein, 107 aa, Zea mays
  unsure (1)..(107): unsure at all Xaa locations
  Clone ID: MRT4577_24582C.1.pep
CLPTPSPWGGGSDGAGLWPLEARWSRTRWGLVETLSARVGLLLDPRGGSVSDVEGERRVSIAAAGSSSRHGKEKSRSQYKQPSSPELLRRXTNSSKRSSRIPNFRSG

SEQ ID NO: 286719 - protein, 83 aa, Zea mays
  Clone ID: MRT4577_24583C.1.pep
QHLSLSFSICLTLFLSLTLWLSGNWLLSSNQIGSVPRLGVGAVSPGAQGWDGKGSQPIPQQQLRFASTPQDVQMSRSDRARSE

SEQ ID NO: 286720 - protein, 84 aa, Zea mays
  Clone ID: MRT4577_24584C.1.pep
ADADGSGVKDAGRGKGAGAPYPPPPPPPPPAHAAASRGRPWRGAPRRSCSPSSSPSPPSHRRWQRPPRSIRPPPPPPPPLRPPC

SEQ ID NO: 286721 - protein, 117 aa, Zea mays
  unsure (1)..(117): unsure at all Xaa locations
  Clone ID: MRT4577_24585C.1.pep
KKTPPLKNFRGKIFISQGAPAGEINKKCAXLGGGGENIFFLKKRTGDQAKPQQRAPLLFLLPKKKKIGGSPGAKTVFFKNPQQRELGRPPSASQKEKENFFRLKGGGEKKTPFGKIG

SEQ ID NO: 286722 - protein, 81 aa, Zea mays
  Clone ID: MRT4577_24586C.1.pep
LRRRWMRRWWWVWRWHKDLKLGAVAIQATHAVTIATAPKTTERANRAHSYTASHQFSVSYCHSDTYTAAQMISSCKHCSYH

SEQ ID NO: 286723 - protein, 108 aa, Zea mays
  Clone ID: MRT4577_24587C.1.pep
GPRAFRVSPGETPQGMPMGKGPMLALLFFHPPGWKAQSLVKPTNIFSPPPQPVFPPTFFYGVYALPCRLLNFEPNICGAPGFLNPIGPSNNRPGGNRLGFFSSITLKP

SEQ ID NO: 286724 - protein, 191 aa, Zea mays
  Clone ID: MRT4577_24588C.1.pep
MVTRRLPNPKQHIAPPPLRFSLDSVFPLPRFDKSRPPPLIPLRATPPAPPLLVGRAATAAAGGTYRLALRIQRRLIPPNHPRIRDFVYRYCLRRAPLSCVRAQDAVGHCQPNRISASSQCRHISYSYAPFPSVTARRKGVFREDIAQLMVGSTLFKILPLTSDMWTVAIPVLLYHQQWKFLRCQKSREVRT

SEQ ID NO: 286725 - protein, 43 aa, Zea mays
  Clone ID: MRT4577_24589C.1.pep
FVTYRIEKTLFVIENDDMLRVTAKVNFKDTMAARFGGENPEKF

SEQ ID NO: 286726 - protein, 159 aa, Zea mays
  Clone ID: MRT4577_2458C.1.pep
INRHSLLSGYVTRVSNTHIRKASMDALNHASLEQKLTRGSVVVVGRRMHVRVVASRNALNSSTRSKYDVSEAISKAAGASRSEAGSVFACLPSCSTVVSGQHRLLGRRGEGAIRHGSARRAGGHVRRWSCHELQNQQYGRHRAGHFLLATLHNRLSLSM

SEQ ID NO: 286727 - protein, 62 aa, Zea mays
  Clone ID: MRT4577_24590C.1.pep
SIIGTHIAGLNLKSPGLGLPGPQGDQPVFTQGSHLKAVLYCKSWCIYDLSFLDHLSEKMLGL

SEQ ID NO: 286728 - protein, 62 aa, Zea mays
  Clone ID: MRT4577_24591C.1.pep
VNRTKIIIHRRQQLTRRRHLHLVVVILFRWYLLFTFSELLLGIFNLLCSRLLGHLLVKDGGV

SEQ ID NO: 286729 - protein, 173 aa, Zea mays
  Clone ID: MRT4577_24592C.1.pep
MPMEVALAVASFSGHLEHDEQNSEDPFSNVQEALDVSEVAREVRRQKAIGSIVLICVGAIILICAVSVSFLPFYVQRIACTVGGLAVLGSSIVLLCIGQDKKFLGQTGGFMCPLVPFLPVCCIMVNLYLLMNVGSHTWIRVSIWLVAGALIYIFYGLKHSSLASMAYHRISPL

SEQ ID NO: 286730 - protein, 103 aa, Zea mays
  Clone ID: MRT4577_24593C.1.pep
SKTSQPSLLPSSSSWAMAPRPASSTLSASAVAAVAVALRREARAVKDLVVTTARAGPAVKERAVMAAEHMDAMVSQLASDRCIALRTYVRPGASYQSNRPAAS

SEQ ID NO: 286731 - protein, 235 aa, Zea mays
  unsure (1)..(235): unsure at all Xaa locations
  Clone ID: MRT4577_24594C.1.pep
PRSLAGPGSRHYSLCRIHTGDLRSPFGHACSPRDDQHTGSILSFCALFALATHADIIPQSYXLVQSASLTQVLAPVTLLGLGXPDWKGYRVQXQACLACALHQPVSQTXQQSLAYVXIPPVRNWNTHTHCTLPAVSHLCMVNRGGYSKQWSLASNRVALAYIXSKQPQHHLRXLVGAXLTQLSMVNPXVYLQEHHVLSSIQVAVDNAPRYLEQPLYEQXVPDLTHVAGAHPGDYL

SEQ ID NO: 286732 - protein, 258 aa, Zea mays
  Clone ID: MRT4577_24595C.1.pep
MPAAAVASPLLLSLSSSSSLFLSSSSTSFFPPSSAAVAPHAAVRTKAAVSVLRALRAEAATLPVLSFTGEKVGEVTLDLKSAPPSTARAVVHRAIITDRQNARRGTASTLTRGEVRGGGRKPYQQKKTGKARRGSQRTPLRPGGGVVFGPKPRDWSIKINRKEKRLAISTAIVSAAKDAFVVEEFEEAFASGPKTRDFVAALQRWGLDPKQKAMFFATDFDDNVRLSGRNIGSLKMLTPRTLNLYDILDARKLFLTPA

SEQ ID NO: 286733 - protein, 55 aa, Zea mays
  unsure (1)..(55): unsure at all Xaa locations
  Clone ID: MRT4577_24596C.1.pep
MLLEVSSSQLQQNHAXRSMDCGSMNAVTPVRLYSKLILRKKWASWCSKNPPTENN

SEQ ID NO: 286734 - protein, 156 aa, Zea mays
  unsure (1)..(156): unsure at all Xaa locations
  Clone ID: MRT4577_24597C.1.pep
GTSRPAGPGFRPPTAAGFLSSRPSRAAGAVLCKGLAARERAALPLSGLGKASSCLDRHGQDDDHTTAGLNKAHRYRPGTVALREIRKYQKSTELLIRKLPFQRLVREIAQDFKTDLRFQSXHAALALQEAAEAYLVGLPEDPHLRAIHDQRVTIMP

SEQ ID NO: 286735 - protein, 314 aa, Zea mays
  unsure (1)..(314): unsure at all Xaa locations
  Clone ID: MRT4577_24598C.1.pep
MPAAAVASPLLLSLSSSSSHFLSSSSTSFFPPSSAAVAPHAAVRTKAAVSVLRALRAEAATLPVLSFTGEKVGEVTLDLKSAPPSTARAVVHRAIITDRQNARRGTASTLTRXEVRGGGRKPYQQKKTGKARRGSQRTPLRPGGGVVFGPKPRDWSIKINRKEKRLAISTAIVSAAKDAFVVEEFEEAFASGPKTRDFVAALQRWGLDPKQKAMFFATDFDDNVRLSGRNIGSLKMLTPRTLNLYDILDARKLFFTPAAVDYLNSRYGASVSDDYYTDDEDDGEEELVEQEAEEGTTADAAPDATEEGEADSSS

SEQ ID NO: 286736 - protein, 133 aa, Zea mays
  Clone ID: MRT4577_24599C.1.pep
VSISRAESPSRRSFATNSAAFDAGHRRAHGSELPLLALMLPLHILLRSFDEPLEPPWWPRRSTSATTVRRAATARAPPSAQRTLADNDDITPFYVVASSGGRTPALLLRRTMALDHRYEDNNSPVRRNVSKAK

SEQ ID NO: 286737 - protein, 78 aa, Zea mays
  Clone ID: MRT4577_2459C.1.pep
MKGGKKEVAGALVAILLVLQLMAAPPTAMGARSPRGAVTDGSLATTPKVTMHGRHACATRVETCKIHSLLHSCLLLQL

SEQ ID NO: 286738 - protein, 107 aa, Zea mays
  Clone ID: MRT4577_245C.1.pep
KDCSSSLATRAATGPAPDSHLRRRESTQPHLASSPSATTMTIMVTSASTSVGATVLPPIIGGPPSGWLPSTSSLRTVQKGCGKVREEAGLWTPRVSPRVRPRVRPRD

SEQ ID NO: 286739 - protein, 101 aa, Zea mays
  unsure (1)..(101): unsure at all Xaa locations
  Clone ID: MRT4577_24600C.1.pep
PASGLXLXXPXXXLGXLRLAXXLXVVXWXFXXFPXXXAXXAXPPXCRGGXLXSXALXGCFLVVLXWWXSRAPPVXXXXGGXXLXXXXXSRFFPXGXCXCCS

SEQ ID NO: 286740 - protein, 77 aa, Zea mays
  Clone ID: MRT4577_24601C.1.pep
LRLDAYPEFAASGCDVQLAFHASAVCAWWWRSSARWMDGELRRPMKEPHMRRTSTSLTYSTLPVQPPSGSSALNVLY

SEQ ID NO: 286741 - protein, 225 aa, Zea mays
  unsure (1)..(225): unsure at all Xaa locations
  Clone ID: MRT4577_24602C.1.pep
MDATRYILEFLVLLLLLLLPTIAGASSDTKHLIAVRSALRDPTGALAGWDAANRRSSPCRWAHVSCANNSAPAAAVAGIDLYNLTLAGAFPTALCSLRSLEHLDLSANLLEGPLPACVAALPALRHLNLAGNNFSGHVPRSWGAGFRSLAVLNLVQNALSGEFPAFLANLTGXRELQLAYNPFAPSPLPADMLVNLANLRVLVVANCSLTGTIPSXIGKLKNLVN

SEQ ID NO: 286742 - protein, 91 aa, Zea mays
  Clone ID: MRT4577_24603C.1.pep
VLLVFQLCAMELGKHKIRVNAACRGLHLQDKFPVSVGKEKAEKATAEVMPLRRWLDPEKDLASTVLYLVGDESRYMTGTTIFVDGAQSRTL

SEQ ID NO: 286743 - protein, 255 aa, Zea mays
  Clone ID: MRT4577_24604C.1.pep
DLTWQKWTYKVGLKGEALSLHSLSGSSSVEWGEPVQKQPLSWYKAFFNAPDGDEPLALDMSSMGKGQIWINGQGIGRYWPGYKASGTCGICDYRGEYDEKKCQTNCGDSSQRWYHVPRSWLNPTGNLLVIFEEWGGDPTGISMVKRIAGSICADVSEWQPSMANWRTKGYEKAKVHLQCDHGRKMTHIKFASFGTPQGSCGSYSEGSCHAHKSYDIFWKSCIGQERCGVSVVPDAFGGDPCPGTMKRAVVEAICG

SEQ ID NO: 286744 - protein, 74 aa, Zea mays
  unsure (1)..(74): unsure at all Xaa locations
  Clone ID: MRT4577_24605C.1.pep
LAAAVSSGSGTEGSAPDSGHLLGELGAEITPLLSVAASKYTRRGHIFCGENGGDAAEKRRCXAWVLCRRPRLPA

SEQ ID NO: 286745 - protein, 203 aa, Zea mays
  unsure (1)..(203): unsure at all Xaa locations
  Clone ID: MRT4577_24606C.1.pep
MAQAARLNLRMQKEIKLLLDDPPHGVSLNLSEDKNVLSSLSSIEAKIEGPEGTVYAKGVFILKIQIPERYPFQPPNVTFVTPIYHPNIDNGGRICLDILNLPPKSREYKYNRQVFDTTAQLWTDKYASSAAVGASGWCSVDADVLAQNTQMEDTNNLGSLPNVSKKVCEGXQRKMRLLGQXLSLKYRSEESMKTGQQRPASYL

SEQ ID NO: 286746 - protein, 226 aa, Zea mays
  unsure (1)..(226): unsure at all Xaa locations
  Clone ID: MRT4577_24607C.1.pep
MAQAARLNLRMQKEIKLLLDDPPHGVSLNLSEDKNVLSSLSSIEAKIEGPEGTVYAKGVFILKIQIPERYPFQPPNVTFVTPIYHPNIDNGGRICLDILNLPPKGAWQPSLNIATVLTSIGLLLSEPNPDDGLMAEISREYKYNRQVFDTTAQLWTDKYASPAAVGASGWCSEDADVLAQNTQMEDTNNLGSLPNVSKKVCEGNXRKMRLLGXXLSLKYERSEESM

SEQ ID NO: 286747 - protein, 117 aa, Zea mays
  unsure (1)..(117): unsure at all Xaa locations
  Clone ID: MRT4577_24608C.1.pep
ASASCASSFAXSGXPFSSLVFFSLRALXALAGLXCALVLXFLALLSXCPSXPPPGRVPVXSPGXACAWCLCXGXRRCGPFPRXAXSGPCLXSPCPXPRPPPSSPAPPPLAARRXAAS

SEQ ID NO: 286748 - protein, 165 aa, Zea mays
  Clone ID: MRT4577_24609C.1.pep
RARNLLDVKLNGFTLGNASLHERPGGGTADHGHGSIRTELHLPFCAQCEHHLLPFYGVVHIGYLDKGSGEGIIDRSHFQALVHFYGCRLQVQERMTRQIAEAVHSVSHNGAMVVVEASHMCMISRGVEKIRSNTATVAVLGHFLTDPSAKARFLQNVLRTAGSAV

SEQ ID NO: 286749 - protein, 97 aa, Zea mays
  Clone ID: MRT4577_2460C.1.pep
MKGGKKEVAGAVVAILLVLQLMAAPPTGMDARSPRGAVPDGSLATTPKVTMLSGTLCYSWETCKLHSLLHSCLAPGGLLIDSATPYLLLELEWMPLL

SEQ ID NO: 286750 - protein, 50 aa, Zea mays
  Clone ID: MRT4577_24610C.1.pep
VLTTSCLHIASVVTVQLVEYHGQSAVQRVGSVNLELLQCTARCIVLAHVN

SEQ ID NO: 286751 - protein, 85 aa, Zea mays
  Clone ID: MRT4577_24611C.1.pep
SSTHLLGLLAELHMKRRLKYRHTLLSLAVIVITDNYKLSKLSLGKNILGPMYFTTGVSATSGNLDIHEHVNNNKYIVWITAESDR

SEQ ID NO: 286752 - protein, 157 aa, Zea mays
  Clone ID: MRT4577_24612C.1.pep
MANGDGAAATGTCQSTWATSPQPGDSGQGRSLSLAKRQRTPLDPPHPPSPLLGLGLSKATMEPPQATVRCSTSGAFTVSGLGSPRATMDPLHAVVFAAAQQVPSPPVGPRVFQLSYDTCGFDQGWVFYWGTTDWSAQQIWAVANCLNLIRPIIEQPE

SEQ ID NO: 286753 - protein, 53 aa, Zea mays
  Clone ID: MRT4577_24613C.1.pep
MGESDDDARTFKVVFTTTGEEQFRELVREKLRGFRRGLDDTLVVRFTSLTPAR

SEQ ID NO: 286754 - protein, 40 aa, Zea mays
  Clone ID: MRT4577_24614C.1.pep
EFGSSAALFFFFFFFFFFFFFEMFFFFFLKNFYAFIPNCL

SEQ ID NO: 286755 - protein, 33 aa, Zea mays
  Clone ID: MRT4577_24615C.1.pep
ALILYIPHSHYLLLYHPIITDRLHIKIPAVLIN

SEQ ID NO: 286756 - protein, 88 aa, Zea mays
  Clone ID: MRT4577_24616C.1.pep
FFPNLRGFSEDCLPPMIDDAPICPPFEGCLGSRLGLPLGTRKRCKTPFFCADKKGSLSHVPPWARLFCVTCFRPPPALKARGPFTCPA

SEQ ID NO: 286757 - protein, 176 aa, Zea mays
  unsure (1)..(176): unsure at all Xaa locations
  Clone ID: MRT4577_24617C.1.pep
MGLQQSKEELLYQQVNYGNVDGIRTLRGQGAGLEWIDKEGKTPLMLACMRPDLFDVAKVLIELGANVNAYRPGSHCGTALHHAAKKGLQQTVHLLLSHGEGRLCLFCGWMRENYAPAFLDAIAPQFMTRKIXAVVLPREVRTPTQASKVEIAIYPXIQASKPRSVLKLWKCPIEQP

SEQ ID NO: 286758 - protein, 519 aa, Zea mays
  unsure (1)..(519): unsure at all Xaa locations
  Clone ID: MRT4577_24618C.1.pep
MGLQQSKEELLYQQVNYGNVDGIRTLRGQGAGLEWIDKEGKTPLMLACMRPDLFDVAKVLIELGANVNAYRPGSHCGTALHHAAKKGLQQTVHLLLSHGANPFIPNDDCNTALELAREKGHVNVVRAIEGRLCLFCGWMRENYAPAFLDAIAPQFMTRKXWAXVVLPREVRTPTRPLKLEIAIYPELQASKPRSVLKLWKCQIEQPKLNQADPSIIIFDKGTKTRYKILPAYEGDKQQLQWFYNACCGMAQVLNTAPVAPANLPMPNPAPAISSVAPSEQSAPSKEDVELAMAINASIQSAIAEGVSVPNVQPNASTPNNNGWAAPPSNSHNGWGPPATPAPSKTSGQSQVRVDAPSSSTYNGWDVPGTSSSQSSSKPHQTQTNPPPVLIPQEALQALPTPTAPPFAEETFYNGPVHYPSIDSTPVDVTMPATTGGGSTTVIATAAPTEQLENEADASDSGKTPSGTCVICLDAPVEGACIPCGHMAGCMSCLKDIESKKWGCPICRATINQVVRLYAV

SEQ ID NO: 286759 - protein, 86 aa, Zea mays
  Clone ID: MRT4577_24619C.1.pep
LLIIRAHWEVPEGLMPGWLLPDQRGNRTLDDTLHFYYRQDRRHYPRIPRTYGDIFHTHLPLHHIHRHGTLVPARREAAYRTRPVSA

SEQ ID NO: 286760 - protein, 179 aa, Zea mays
  Clone ID: MRT4577_2461C.1.pep
FDHEGRKEGSVRCGGAHTAGSAFHGSSTDGHGRPLAVRSRAGWFPRHDAQGRRCCRTRCATRWRHGNTLAASLLLAPATIVIDYATSYLLLMLEAIPRSHNSYMHAPADDNAASRELVFKRCMMQGIHGCFMYMICVLLIKRVRQPGMKGGMFYSTSSGDQIERKYMLDEWKKKEKKRP

SEQ ID NO: 286761 - protein, 101 aa, Zea mays
  Clone ID: MRT4577_24620C.1.pep
MGLQQSKEELLYQQVNYGNVDGIRTLRGQGAGLEWIDKEGKTPLMLACMRPDLFDVAKVLIELGANVNAYRPGSHCGTALHHAAKKGLQQTVHLLLSHGGI

SEQ ID NO: 286762 - protein, 67 aa, Zea mays
  Clone ID: MRT4577_24621C.1.pep
LEKLHNRATLNVSCNFQQYPDFYRIVLYSADRASPLLGFYVLQTGHKGVSPHTLHGSHICSAVRSAK

SEQ ID NO: 286763 - protein, 75 aa, Zea mays
  Clone ID: MRT4577_24622C.1.pep
CLIIAAPSNQRDESEPGPTNQLTNCLMWRCMAVSKSINRPLTLPYPLLCYWYLALLLVSLLFELTAVLHHEPPHR

SEQ ID NO: 286764 - protein, 135 aa, Zea mays
  unsure (1)..(135): unsure at all Xaa locations
  Clone ID: MRT4577_24623C.1.pep
MGLQQSKEELLYQQVNYGNVDGIRTLRGQGAGLEWIDKEGKTPLMLACMRPDLFDVAKVLIELGANVNAYRPGSHCGTALHHAAKXGLQQTVHLLLSHGANPSIXNDDCNTALELAREKGHVNGVRAIEGRLCLF

SEQ ID NO: 286765 - protein, 274 aa, Zea mays
  unsure (1)..(274): unsure at all Xaa locations
  Clone ID: MRT4577_24624C.1.pep
RRRRRQDVVAPAGGAPRRWRRCSTRTPRGSATTRSPWRGCAPSAPAAGRRRGRCTRSCWRRGPSSGPCSPGLPRAPTSNAAAPRSGPAPERRHHPARRRATAARRRLPRSITATATATTAAGRRRPPCGAASXGEADGRGGARRRPAAQVLLRRDXGGTRHRRLPPRRRRSLCRRRRRRGGAPGXRRAGAEAEQQRPVGVGGADPGRHRLLQALAAAAGARQEERQRRRRLRAFLAGSIGRNSSSLLPLAVSPVTCATATSREPVTCGKTDLKK

SEQ ID NO: 286766 - protein, 97 aa, Zea mays
  unsure (1)..(97): unsure at all Xaa locations
  Clone ID: MRT4577_24625C.1.pep
RPGSAPPTPTARCCSASAPARRRRHHQPRSSSSPWTTTAASPSXRVPPXSRRRRTCAGGRRRAQRRPPRPSASPVRCCSAGCSAPPCRCRCGSRSRS

SEQ ID NO: 286767 - protein, 84 aa, Zea mays
  Clone ID: MRT4577_24626C.1.pep
WPPHDQDVPILYPFISHLQEQRPQSPKKTLTPTYGRKKKGGLEEGNGALVISKLKSVTSKHMGKQIYSWHRFYYTRRGGVLWGG

SEQ ID NO: 286768 - protein, 34 aa, Zea mays
  Clone ID: MRT4577_24627C.1.pep
PALNPTHGIVYGSAELHPYIQISEFRIPDNRSDR

SEQ ID NO: 286769 - protein, 128 aa, Zea mays
  Clone ID: MRT4577_24628C.1.pep
MASKQIGVLTCFIAITALAFRPCASAVPMDGGCSNGGATCSGPGRGAVSYGGACGYQGAVHQPPFSAMITVGSQFMFHVGQGCGPCYQIKPPGHEPFLLSTLTTHITYLLPGSPPTSGSPALLTFTAR

SEQ ID NO: 286770 - protein, 68 aa, Zea mays
  unsure (1)..(68): unsure at all Xaa locations
  Clone ID: MRT4577_24629C.1.pep
QFFFMGTXGGGXQKNNEGPGKXWPREDCSIVHPXXPVSSXLATRILDVFFHWIDENCGVWGLIFFPPP

SEQ ID NO: 286771 - protein, 153 aa, Zea mays
  Clone ID: MRT4577_2462C.1.pep
WFLAVKSSRFFFYRRPLCLFFPPSRGALPFFWWGPVSPETGNPPFGSVHAPVFAPLGAFRGFPFFCCRWVLGPQFAPPPLLGSFSRAPLAWRFSLFFFCFPLFLFCFCQRVWAFCVPRWFPPPPLLGFNPFFSGLTTLLLLLLIKHGLVYINH

SEQ ID NO: 286772 - protein, 74 aa, Zea mays
  Clone ID: MRT4577_24630C.1.pep
KMFSGFSTGKDGFFESPKEGENVFPSEAKDGDWMLVGDVPWEMFVDFFPRVGFLKGSNAIGLAPRAGFKSKNCH

SEQ ID NO: 286773 - protein, 218 aa, Zea mays
  unsure (1)..(218): unsure at all Xaa locations
  Clone ID: MRT4577_24631C.1.pep
MQRAFASRARTSALNSTSKLRTTSLSLQQQRFAHKELKFGVEARAGLLKGVDTLAKAVSTTLGPKGRNVLIESSYGSPKITKDGVTVAKAITQDKFENLGARLLQDVASKTNEAAGDGTTTATVLARAIFSETVKNVAAGCNPMDLRRGTQAAVEXAVVDYLKANKRDITTSEEIAQVATISANGDTHIGKLLSNAMEKVGKXXGVITVKEGKDYRDE

SEQ ID NO: 286774 - protein, 70 aa, Zea mays
  Clone ID: MRT4577_24632C.1.pep
FLTSTIVPSLYFLITQSFYLKIVSAKRSRQPMFSVCGAVADVCLRFFYYTKLVKSYLLSTTTTANLSSVT

SEQ ID NO: 286775 - protein, 49 aa, Zea mays
  unsure (1)..(49): unsure at all Xaa locations
  Clone ID: MRT4577_24633C.1.pep
PPXLPPQQQLMVLRHQLRARQVRGSDAPPSTDTGHRCLYLGVLMHVSAH

SEQ ID NO: 286776 - protein, 62 aa, Zea mays
  unsure (1)..(62): unsure at all Xaa locations
  Clone ID: MRT4577_24634C.1.pep
ISDCWIGDPMNVVEQPLPVSLSAAFXEPLXXXXXVVYPTRRLLVPYAXNWWVDGVALVRXXG

SEQ ID NO: 286777 - protein, 101 aa, Zea mays
  Clone ID: MRT4577_24635C.1.pep
LNISNKNTCAHTCTVKNQSVNHSIHSRFLSSHHYILKARRPDPTTIRCVAPTNASEVSLRLCQRPPSHSARSCTVLTPPSTSAIKCAAHRSLGLLHGVLAS

SEQ ID NO: 286778 - protein, 110 aa, Zea mays
  Clone ID: MRT4577_24636C.1.pep
PLFPQRTRRACRPLQWLGLQSPIHQIPARVAAGLASAYPSVLVSCRSGIRTDESFGPVSPAVRQGRPCEHRSILPYGYPSCRDKPVGLGRSGLWSGAPFAVGFVIPIIGR

SEQ ID NO: 286779 - protein, 110 aa, Zea mays
  unsure (1)..(110): unsure at all Xaa locations
  Clone ID: MRT4577_24637C.1.pep
PGGPTPLGHFFEKRVSGGPPRAPPWGPGQGGLPXTPGGXGPPGNLSGPPPPGGWAQSWNPSPPPPPKILISAGGFPPPPGGRGPQPKKPAFFKKLKFVFFFPQNQKILKV

SEQ ID NO: 286780 - protein, 212 aa, Zea mays
  Clone ID: MRT4577_24638C.1.pep
LRKPPHPQASFRAGFLPQPAPTQPHPASAPPVPPPLGNDLTVPSSSSSPWSWRHHVPSGALPQPGFASTAARSAFQPRPPYRNLHLAAGGGPADGNAPGGWSYIAPPTTLASRVPRLLPWRPLLCGTWTTPPPDPSRGGRGAPGRGAQSRHHRPHAVTTSVQGQIPRVLFPPIFTIVVLKRNRDSGGDLLPTPLLGFHGDEGQCWRRPPWSS

SEQ ID NO: 286781 - protein, 90 aa, Zea mays
  Clone ID: MRT4577_24639C.1.pep
QHPKMVKLPKPLTGRYLSSKCSFAGMKAVIALVLQDEHPRTAPIVHCARRQASPRTLERDTLGLQQEDCNERTGLVLRKARQVASPRAHP

SEQ ID NO: 286782 - protein, 50 aa, Zea mays
  Clone ID: MRT4577_2463C.1.pep
HEQLSADHGMRVAHWPDAVASSNGFNTRHPYNHPSPHGTQHRSPLVPFTA

SEQ ID NO: 286783 - protein, 125 aa, Zea mays
  Clone ID: MRT4577_24640C.1.pep
ESSRKEPEGALALSQEPGNLVKVKQESLENETEMSIFRENDKVSGKDHASAEFIIDPSNTDERRENDFGRSDESAKGCERLTSDSINTAHSKFVKSSNEKDKRTQNTRFADSKDIKEPLGRIRAE

SEQ ID NO: 286784 - protein, 88 aa, Zea mays
  unsure (1)..(88): unsure at all Xaa locations
  Clone ID: MRT4577_24641C.1.pep
LELPGGGVNWDPPAEEFGRASEGERRGGTVSEYGVPTAGAVARSRPDGSLADAQGTCCGPGYTGRHANTXPVTLLSDLGRLLDITLCW

SEQ ID NO: 286785 - protein, 78 aa, Zea mays
  Clone ID: MRT4577_24642C.1.pep
RKSPLLAAPSRGSHGIRRLSSPLAPAPAPPRRHIPPPQHPAPAGPPRRPQQLDPSSAPGPRSARLLLKLQQRCRGGSL

SEQ ID NO: 286786 - protein, 47 aa, Zea mays
  Clone ID: MRT4577_24643C.1.pep
QHRRHIFLPTMAAQNMGACPYCSLGSFSQSACLPANSFFPTKCFHKA

SEQ ID NO: 286787 - protein, 95 aa, Zea mays
  Clone ID: MRT4577_24644C.1.pep
LLFPANVVCMNNQFTLGREFPAGNGKRPEKVWFFTRLKNKGGFNKMGRGMFFCLKEFKPLCFFGRGSPPKKKKKKKKLPSQREKKKKKKKNRSTR

SEQ ID NO: 286788 - protein, 101 aa, Zea mays
  unsure (1)..(101): unsure at all Xaa locations
  Clone ID: MRT4577_24645C.1.pep
ARTLKPCKVTGMCSXVTERMVPVPSGPRIVDALVHTRVLQCAGIEHVFTSCRGSTXKTLPNXFVKPTXDSLSKTYXFLXPEFWRXTKYPKTMIQEDTDLLA

SEQ ID NO: 286789 - protein, 75 aa, Zea mays
  Clone ID: MRT4577_24646C.1.pep
VLFYLGRFNSRAAVAKGLDNIQAPLISPTYWVAGQIIYILATYVITLTGLYKSRHVLNVATKGATVSATFVMKAI

SEQ ID NO: 286790 - protein, 43 aa, Zea mays
  Clone ID: MRT4577_24647C.1.pep
LFLIYTHYPKTIYIQFSFNFQFHISKHYSSYYTIHKLFKQFFI

SEQ ID NO: 286791 - protein, 130 aa, Zea mays
  unsure (1)..(130): unsure at all Xaa locations
  Clone ID: MRT4577_24648C.1.pep
TGFILEVQKKSPILETTIFGDGGLFHTLKETLKIWNPQKNMTGLQPKGGKQHKKKLGTKKDTLTGNPQEKKTPRASRVWPKGSPLVNVRAKRVPGSPKGGPRGPPLKKEGFFFXXIIVHLFPTQTGPNEN

SEQ ID NO: 286792 - protein, 116 aa, Zea mays
  Clone ID: MRT4577_24649C.1.pep
LAPPSSPLIPRRACTRAPPCAHVARSPVDVAVSRSRRAHAPSPFPRRAPRPPDAHNCQHMAVSMAVAFTRYLWLSLPSTASTGSRSKASRGSPCPRRRPRTSRHCAPSDGKREPWK

SEQ ID NO: 286793 - protein, 178 aa, Zea mays
  Clone ID: MRT4577_2464C.1.pep
PVPNLHLPATARRALLHLPLCPWLLCWPLDARVPGSAPSSLVSLAHGLLFSPAPSPWSASSARPLLLPACVSLRTHRRRVPCCALSFLSHPGPNFLSISQPKRVPGPSVELASASLGSMCRDHLWSLLPSKPLSRRVMPRCARHQSSSCHCSLIRATSLVGLTLAFSVVPHPGSLAPF

SEQ ID NO: 286794 - protein, 77 aa, Zea mays
  Clone ID: MRT4577_24650C.1.pep
RPGRETSEMRATHRRTLLRRLWGPRTGQQSCRRQWTTRLTNPLGFIPNAHSSTRAENAPKAHAPAKFDLSLTPHQRR

SEQ ID NO: 286795 - protein, 96 aa, Zea mays
  unsure (1)..(96): unsure at all Xaa locations
  Clone ID: MRT4577_24651C.1.pep
TCNNRIHFQTIFLILVVFTSSSFTESVSAARPVSGYSNSEFIITSCKSTTYPNLCFISLSSRASGIGVSPXLLIHESLTVSLETSHSSSVTMVEMA

SEQ ID NO: 286796 - protein, 142 aa, Zea mays
  unsure (1)..(142): unsure at all Xaa locations
  Clone ID: MRT4577_24652C.1.pep
LPTPHRLAQLHLXQHLQQLALTHLGGLYEHQKLLTFNLIAGXHHASYKKHQQRPFTHITADYXTPYVALNQLTLLNSPXLVTGMQLLPLMQIGXVSPGTLLIQPQQLPLYQDAAPNTRTLLQLGQLLXFNQLAWTNTAAIYQ

SEQ ID NO: 286797 - protein, 91 aa, Zea mays
  Clone ID: MRT4577_24653C.1.pep
MDGGLERNGVSSVADILAQDVHELHTSSIVHEDGVENNLLAQIPSFTINVQNAWQSFVAYDACFRLCLNAWARNCMEAPDFLRDECMVLRS

SEQ ID NO: 286798 - protein, 82 aa, Zea mays
  Clone ID: MRT4577_24654C.1.pep
GDGPVIGMDLGTRYYCVGVGNDDRVKSIANDQGYRSTASYEAFTDCERLIGDAVKNQVAMNPINTVFDAKRIIGWRFSDASV

SEQ ID NO: 286799 - protein, 727 aa, Zea mays
  Clone ID: MRT4577_24655C.1.pep
IAAVMAAKVRTELDVGADGVAVITIYNPPVNSLSIDVLHSLKESYEEALRRNDVKAIVVTGKGGKFSGGFDISSFGGVQGGQTMQPKVGYIAIDILTDTVEAATKPSVAAIDGLALGGGLEVAMACHARIATPTAQLGLPELQLGIIPGFGGTQRLPRLVGLTKSLEMMLLSKPIKGGEAHQLGLVDALVSPNDLVNTARQWALDIYECRRPWIKSLYKTDKLEPLGEAREILKFARAQAQKQAANLHHPLVCIDVIEEGIVAGPRAGLWKEATSFQELLFSDTCKSLVHVFFSQRATSKIPGATDLGLMPRKITKVAILGGGLMGSGIATAMVLSNYPVLLKEVNEKFLTAGINRIQANLQSRVKKGKMTEERYEKAMSLVTGVLDYERFKDVDLVIEAVIENVKLKQQIFSDLEKYCPSHCILATNTSTIDLNLIGEKTKAQDRIAGAHFFSPAHVMPLLEIVRTQHTSPQVVVDLLDVGKKIKKTPIVVGNCTGFAVNRMFFPYTQSALFYVDLGMDVYKIDRACTKFGMPMGPFRLADLVGFGVAVATGMQYLENFPERVYKSMLLPLMMEGNRAGEATQKGFYKYEGKRKATPDPEIMKYIEKSRSMAGVTPDPELMKLSEKDIVEMVFFPVINEACRVLDEGIAVKASDLDIASIFGMGFPPYRGGVMHWADSIGAKYIHGKLEEWTKRYGGFFKPCSYLAERAAKGIPLSAPTKKVQARL

SEQ ID NO: 286800 - protein, 124 aa, Zea mays
  unsure (1)..(124): unsure at all Xaa locations
  Clone ID: MRT4577_24656C.1.pep
HPRPPATGPREKRKKPRRKGRRRRRRRKXRGXXRRRRITKRSRRRIKRRKAASRTRSSRRXRRRHGEKDRHSGPVVRRRPRAXARRRPKERPSSRXRREQGRVHEGRRQRRGRRQGGRGRQQGA

SEQ ID NO: 286801 - protein, 114 aa, Zea mays
  Clone ID: MRT4577_24657C.1.pep
NLWSLYQLMKLSEKDIVEMVFFPVINEACRVLDEGIAVKASDLDIASIFGMGFPPYRGGVMHWADSIGAKYIHGKLEEWTKRYGGFFKPCSYLAERAAKGIPLSAPTKKVQARL

SEQ ID NO: 286802 - protein, 193 aa, Zea mays
  unsure (1)..(193): unsure at all Xaa locations
  Clone ID: MRT4577_24658C.1.pep
SSIQMNDLVYLLQNRQLSADTLYAHVVELFDCEKIDVTRLYSELSRISAVTTFANAHDPGITSAFTERTFELLAQYRSTREPSFSLASLLECEFDHAEIQSPGFLSTIVVSSNGHRRGHTDDAIVSDLDSNSECSDIAYNANNTNLVDTKDVGDSESAASHVILSTKRDCTXPTSCRANGERAEIWNCSIAID

SEQ ID NO: 286803 - protein, 50 aa, Zea mays
  unsure (1)..(50): unsure at all Xaa locations
  Clone ID: MRT4577_24659C.1.pep
LVRDSNPPAFINMFFGGCFFERIQEKGVFYPPTNVFLFQFSGRASGFXPP

SEQ ID NO: 286804 - protein, 83 aa, Zea mays
  Clone ID: MRT4577_2465C.1.pep
VIISCVFLLLRYTMSLVYEVPADAVRPTSVQYPQVSIIELVILDVQRGRRRPGGNVISLAAISLLLRHRVEHHAAGIAFWFGL

SEQ ID NO: 286805 - protein, 34 aa, Zea mays
  Clone ID: MRT4577_24660C.1.pep
KLCSQARINRDIHNLNRENDFFIKINLGTCLIHS

SEQ ID NO: 286806 - protein, 117 aa, Zea mays
  unsure (1)..(117): unsure at all Xaa locations
  Clone ID: MRT4577_24662C.1.pep
MNEPRELANWRPVVDVKTNVVVIVVHAELPGVKKDDISIDLENGIMPISGNRSMEKKEESXKYYRSERFFGNFERSFAVPAAVTESDIKARLNDGALEITIPKPKEEMKTPKQIPIQ

SEQ ID NO: 286807 - protein, 93 aa, Zea mays
  Clone ID: MRT4577_24663C.1.pep
EHPKPYKFTQQGKQGVSMTQMEIRGAAGGLKPSTTTARTGFSWGKPRKQDLHCLSNMRGTGGVPPSIPAGGYTGTGGFTHLAIMTLTNSLEVI

SEQ ID NO: 286808 - protein, 60 aa, Zea mays
  Clone ID: MRT4577_24664C.1.pep
KQKSTLRWASKKKKLFPLDPRPKKTRAIRRGLPKPQLSFKTEREKKRQKYFPLRKDPSKA

SEQ ID NO: 286809 - protein, 56 aa, Zea mays
  Clone ID: MRT4577_24665C.1.pep
LGQSIDRGGPMYVINPPLSRRLGKLTNLLLEKLFEKSHVLFKNVFTFFFARCVMYP

SEQ ID NO: 286810 - protein, 53 aa, Zea mays
  Clone ID: MRT4577_24666C.1.pep
VPCYPGLNNIFCPILRVPLVSFFLPVLIWQFLAPPQKKNKEPPKKKKKKKKNI

SEQ ID NO: 286811 - protein, 61 aa, Zea mays
  Clone ID: MRT4577_24667C.1.pep
PRHRPEPEHRVSSSQSRLLMPLSPPAPRKTSRVTAGGHNGPVVVARSRCEKTWPPRAARAE

SEQ ID NO: 286812 - protein, 167 aa, Zea mays
  unsure (1)..(167): unsure at all Xaa locations
  Clone ID: MRT4577_24668C.1.pep
GTRRRLGGSSSYAAAGTTAXLQKNVSLXRRKRVQELNPSAVTCSCAEISEEIDEXGAPDRRIYQPDALWHRLXVPEHLIAHGPADYGXDPSAVRYKXQDFAKYQGCXLIXATCAMLDAAGGVIPEACKKFGANCXPTPSXFKTGRLLLDXNSFSYFRDSISINLWAA

SEQ ID NO: 286813 - protein, 177 aa, Zea mays
  Clone ID: MRT4577_24669C.1.pep
AHASAHASEPHKWKAWLSLAEFWYNTSYHTSLDCSPFKALYGYDPPFAAAPIIPSDTDHSVAQVLAERAHFTEMLKDQLAVAQNRMKLKADRLRSERQFQVGDLVLLKLQPYAQHSVVNRPCPKLAFKFFGPYKVLERIGSVAYRLDLPLSAQVHPVFHISQLKPFTANYSPVFSTL

SEQ ID NO: 286814 - protein, 68 aa, Zea mays
  Clone ID: MRT4577_2466C.1.pep
KGLAPDLPEDLYHLIKKAVAVRKHLERNRKDKDAKFRLILIESRIHRLARYYKTKRVLPPNWKYESST

SEQ ID NO: 286815 - protein, 75 aa, Zea mays
  unsure (1)..(75): unsure at all Xaa locations
  Clone ID: MRT4577_24670C.1.pep
RIPVAPVRRAXRRFKSLHLFARTATVASQPRAGTVMHTGRTTELTPDMINSRADGRTMTSGSSPHAPDEARSEGS

SEQ ID NO: 286816 - protein, 119 aa, Zea mays
  Clone ID: MRT4577_24671C.1.pep
RSWEELGSAMEDGWKRPWEQGRGWGHPLAAKRGGHCLLLVWGGGQHPCCRDKLGHGEGSGVGEAAMVGVSAWRRGSEQHRLGELEPGRDNGSCCSIAATREGDVMGRSKGHGHGQPGEG

SEQ ID NO: 286817 - protein, 44 aa, Zea mays
  Clone ID: MRT4577_24672C.1.pep
NLMAFPGWGIFCPMFFPLFFNRLKESKGVLKGQTGPFGNPRGFF

SEQ ID NO: 286818 - protein, 99 aa, Zea mays
  Clone ID: MRT4577_24673C.1.pep
WLGTFGLIYVLVGPHFLSALLVMVVGEGHLKVELNNRSSSWKYRFHRKVQDFRFPRIFHRGSSVHRPNLLPLPNNRLGYLRTNGKLRIRPPYLLQRDGP

SEQ ID NO: 286819 - protein, 145 aa, Zea mays
  Clone ID: MRT4577_24674C.1.pep
PQRHYGSNLFLAGGTASQAANGSVPAAGATPLADGATAFGGGAPPSAATSDSPAGASPSGNAVSATSKPARPLSDGSSSPNDPYGPSPSGTSTSPTDKPDSGKGGDHPDGGKNRDGGSGSFAATTFADVNIITGLFAAALAAITL

SEQ ID NO: 286820 - protein, 114 aa, Zea mays
  Clone ID: MRT4577_24675C.1.pep
CVIGQFSFGANPSSCMVRRPGCGNLMCNSPPHGFLSIIHSIWWIKEQVLAIRHLQTNNTRCKHINVSLAPVRGFMVDFRQRTIAALTLPPPAHTHYDDRWPCPPLQRAWTVGVI

SEQ ID NO: 286821 - protein, 142 aa, Zea mays
  unsure (1)..(142): unsure at all Xaa locations
  Clone ID: MRT4577_24676C.1.pep
MRPANGMLKADGMCMTHFLLIGCFWQMSXAXLLDACFKGLLIINLNKTRLDKEDTTDVKMANMESHVRRTEGXLECQCLXDDIVPLYNYLDTECLGQIRIGSPPQNVTVIFDTGSSNXGLPKTXCYFWLACYLHYTYKTNKA

SEQ ID NO: 286822 - protein, 100 aa, Zea mays
  Clone ID: MRT4577_24677C.1.pep
WRWRGRGAALFSLVMAVGAPLFDSQVVLPLSLYPAPLVDVFRWFDNYIVADRPPFFRGLVWLDIAFLWPVSLANLYDILARRRWSATTSLMAGVYMLTYL

SEQ ID NO: 286823 - protein, 157 aa, Zea mays
  Clone ID: MRT4577_24678C.1.pep
MASPLRRSFPSLGRALLTPAPARMLSAEASDALVEIKPREIGMVSGIPEEHLRRKVVIYSPARTASQQGSGKVGRWKINFLSTQKWENPLMGWTSTGDPYANVGEAGLTFNSAESAKAFAEKHGWNYVVRKRHTPLLKPKAYAENFKWKGPPKAEQA

SEQ ID NO: 286824 - protein, 46 aa, Zea mays
  Clone ID: MRT4577_24679C.1.pep
SNGKKIKKKKKTKPFKKSKHSYYFLSTSYFYFTITYFHLTTPAFST

SEQ ID NO: 286825 - protein, 39 aa, Zea mays
  Clone ID: MRT4577_2467C.1.pep
DNPTIIYSCSEHYPTLQVTVFKQTPSASRYLSLIKTTFV

SEQ ID NO: 286826 - protein, 159 aa, Zea mays
  Clone ID: MRT4577_24680C.1.pep
MASPLRRSFPSLGRALLTPAPAPARMLSAEASDALVEIKPGEIGMVSGIPEEHLRRKVVIYSPARTASQQGSGKVGRWKINFLSTQKWENPLMGWTSTGDPYANVGEAGLTFNSAESAKAFAEKHGWNYVVRKRHTPLLKPKAYAENFKWKGPPKAEQA

SEQ ID NO: 286827 - protein, 129 aa, Zea mays
  unsure (1)..(129): unsure at all Xaa locations
  Clone ID: MRT4577_24681C.1.pep
ETTEEQRGXXRKXTXXXXXTTKXAXXXSKDXXQARXAQXKREXXQTGGTXDXEKXAERXAKXXGGXAEEKGGAXTEAEXEDRKHRXEDAKXATXAAREEXXAPGGGAAQRAANDKRTRQQGRRGKTQRS

SEQ ID NO: 286828 - protein, 236 aa, Zea mays
  Clone ID: MRT4577_24682C.1.pep
MVVQEFTVDLNKPLVFQVGHLEERYQEWVHQPIVSKEGPRFFGNDVLEFLTRTKWWAVPTIWLPVVCCLLVKSILMGHTVQDVAMMALFGIFIWTLIEYTLHRFLFHIETKTYWWNTAHYLLHGCHHKHPMDSLRLVFPPTATAILCFPFWNLVAFFATPSTTPALFGGGLLGYVMYDCTHYYLHHGQPSKDPAKHLKRYHLNHHFRIQDKGFGITSSLWDAVFGTLPPSMTSGKN

SEQ ID NO: 286829 - protein, 55 aa, Zea mays
  Clone ID: MRT4577_24683C.1.pep
QLSLLKIFLQVMFTQFLEQHTFPENLTQGGVPCLGVPTYNNMLTRAPFKLSKKLT

SEQ ID NO: 286830 - protein, 153 aa, Zea mays
  unsure (1)..(153): unsure at all Xaa locations
  Clone ID: MRT4577_24684C.1.pep
HYNNLALGGPGVPXSQQQQXVPFNQLGAXNSAAYLXQQLPFSQLAAAFPSXFLPFNQLGGGGGAAYLQQXQLPPFSQLADVSPVAFLTQQQLLPFYLLAVPDAXAXLXLXQLLSFXQLGLAYPSTFFHHPILGGALFWIAYVLSVRVFWLLFV

SEQ ID NO: 286831 - protein, 138 aa, Zea mays
  Clone ID: MRT4577_24685C.1.pep
PTRPPGEISSFPCRYLGLPLSLHKLRREQVQPIVDKIADQLPGWKADLLTKAGRSVLVHSVVTGVLIYSAMAGDLPSTSLKDIDKIRRGFLWRGRKNAMGGHCAVAWGRVCRPRELGGLGIFSITELSWALKMRWAWL

SEQ ID NO: 286832 - protein, 71 aa, Zea mays
  Clone ID: MRT4577_24686C.1.pep
MEVLLCLYCPYKHIYMGIQHYVSYRRRRRLRINALATMKLDNIETGIYMLHCLPLRLVGAEGAPTRCILIK

SEQ ID NO: 286833 - protein, 229 aa, Zea mays
  Clone ID: MRT4577_24687C.1.pep
LLVPIVSHIIASAHASAVAWVGCHGGPFLVVVIGAYEEDTLRWASVYSSETGVWTTSSSIQIDAYVEQRPSLLAGDALYFSAQEGKIIVKYDLNGQSLHVINAPDMFEPTEGIAVTVEDGGLGLAGVKDGNLHLWSWQAGPGGIAEWVQGRIVKLRTLFPILKPLDSLDVIGFQEGTDTIFISIDMEVFAVTLRSEQVKKVGKTGSKYAMAPYVSFYTPDLAKGRLLSP

SEQ ID NO: 286834 - protein, 91 aa, Zea mays
  Clone ID: MRT4577_24688C.1.pep
DAWVERVNVYYNEASCGGFGARADLMDLEPGTMDSVRTGPYGQILRPDNYEFGQSGAGNNRANGHYTEGAELIDYALDDVRQEADNCDCLQ

SEQ ID NO: 286835 - protein, 43 aa, Zea mays
  Clone ID: MRT4577_24689C.1.pep
SIKQSKSSKKKKKKKKKKKKKKKKKKKKKKKKKKKKKKKNQNQ

SEQ ID NO: 286836 - protein, 50 aa, Zea mays
  Clone ID: MRT4577_2468C.1.pep
RWQKKACGFLQISCRGPPVVVLRICPLTRRPGKKITLCRLKSPRPGNQLT

SEQ ID NO: 286837 - protein, 146 aa, Zea mays
  Clone ID: MRT4577_24690C.1.pep
LPVFMGMFTFAGLAITSATEAIFGHVISDPIELLGRIGGPATTFLAIFGIGLATITTNIAANVVAPANALVSMSPRRFTFAKGAFVTALLGIAFQPWRLLSSSESFVYTWLLGYSALMGPIGGVVLADHYIVRRTALDVDALYSED

SEQ ID NO: 286838 - protein, 221 aa, Zea mays
  unsure (1)..(221): unsure at all Xaa locations
  Clone ID: MRT4577_24691C.1.pep
FTAIAAIIFGSIFWNVGMKRDTTEDLMLVMGSLYAACLFLGVNNASSVQPVVSTERTVYYRERAAKMYSSFPYAAAQXKLLLYLLFMFLTFTYFTFYGMVAVGLTPTQQVAAVVSSAFYSLWNLLSGFLIPQSRIPGWWIWFYYICPVAWTLRGIITSQLGDVQARIVGPGFDGTVQEFLEESLGFQQGMAGVTVAVLIGFSLFFFAVYATSIKVLNFQRR

SEQ ID NO: 286839 - protein, 105 aa, Zea mays
  Clone ID: MRT4577_24692C.1.pep
SRKGTQVPHKRISMPSMMSSCRLKCIATLNLLVIYFHRSNTFHNLNPVLCLSVLHLSPRAYIYVWHSIKAAEGVTYLSNAVRCIYVLYVYRFFLHLHPLLLIYHW

SEQ ID NO: 286840 - protein, 241 aa, Zea mays
  unsure (1)..(241): unsure at all Xaa locations
  Clone ID: MRT4577_24693C.1.pep
VRNSRVDPRVRVSKNKQEIAFYSLPEFEEWKSSTPNHKKWKVKYYKGLGTSTSKEAKEYFADMKRHRIQFKYSGPEDDAAISLAFSKKQVDDRKEWLTNFMEDRRQRKLLGLPEDYLYGQSTSYLTYNDFINKELILFSNSDNERSIPSMVDGLKPGQRKVLFTCFKRNDKREVKVAQLAXSVAEMSSYHHGEMSLMMTIINLXQNFVGSNNLNLLQPIGQFGXRLHGGKDSASPRYIFTM

SEQ ID NO: 286841 - protein, 72 aa, Zea mays
  Clone ID: MRT4577_24694C.1.pep
FELCSCCELSMLHLSSSLGLCACVVLRICVCCSQPYSCVYIVIFVVRARGSNVWRFLANGKRYKQRKAVVFK

SEQ ID NO: 286842 - protein, 82 aa, Zea mays
  unsure (1)..(82): unsure at all Xaa locations
  Clone ID: MRT4577_24695C.1.pep
KKETGGKGXGPAXGXXXGTTXXXXGXXQHDRXEXXANDQXNRTTGGGXAXTDXXRXXXXXXKNXXXXNPXNTXPXAKXXTGR

SEQ ID NO: 286843 - protein, 74 aa, Zea mays
  unsure (1)..(74): unsure at all Xaa locations
  Clone ID: MRT4577_24696C.1.pep
GPVVQVTHKRANSPAXIPLYKSWGPVXRIDPGHPLKAPLSVGVRSDSGKTLVAYEVIPINXRGNADSRTIAQFP

SEQ ID NO: 286844 - protein, 124 aa, Zea mays
  unsure (1)..(124): unsure at all Xaa locations
  Clone ID: MRT4577_24697C.1.pep
AYAYRSSRFTGPPLASETAARMPLKRHVVIGRVALVNYGIDYRRLVSIVXDVSDQSSALVDAPDLRXTQTNFKRVSLTDINKLIXQNRWAALTDFDRFKVMLARIKMGGSIRQQLAQLKNAFTA

SEQ ID NO: 286845 - protein, 96 aa, Zea mays
  Clone ID: MRT4577_24698C.1.pep
ILYTVQPSPFFFFFFFFFTLYTFFFFVYGYIYYIITHHIKLIPSKPKNYNQPFFFFFPNSLTTPLYTLKFLLHPNTFIKPLHNSYSPKFFCKNILS

SEQ ID NO: 286846 - protein, 72 aa, Zea mays
  unsure (1)..(72): unsure at all Xaa locations
  Clone ID: MRT4577_24699C.1.pep
KCMAKKKKKKKKKKKKKKKKKKKKKKKNKNKKKKKKKKKXFFVVTNVKGQILKKSIKLAALQPSIKRAQTPL

SEQ ID NO: 286847 - protein, 38 aa, Zea mays
  Clone ID: MRT4577_2469C.1.pep
RSFPLLLTFLYLTTSALEEHARLVYAARRVRIRLVDRP

SEQ ID NO: 286848 - protein, 125 aa, Zea mays
  unsure (1)..(125): unsure at all Xaa locations
  Clone ID: MRT4577_246C.1.pep
MRECISIHIGQAGIQVGNACWELYCLEHGIQADGQMPRDKTIGGGDDAFNTFFSETGAGKHVPRAGFGDLEPTALDEGRTGTYRQLFHPEQXLLSGKEHAAHXFAPGSPTPLGTEIRPPIALSRL

SEQ ID NO: 286849 - protein, 81 aa, Zea mays
  Clone ID: MRT4577_24700C.1.pep
LLHRRFNSTGTKLISYTHRGAPHGPNQPHRSAAKAGNGATEESDPLNRGAAAAELAGSHLDEEQRMAAHAQHPDSNTEEYN

SEQ ID NO: 286850 - protein, 110 aa, Zea mays
  unsure (1)..(110): unsure at all Xaa locations
  Clone ID: MRT4577_24701C.1.pep
AHSILAIWACQVVLMGLXRGYRLGGPLGXGSKVYPGGAFDPXGLAEXPGHAAYLRXNELKNXRLAMFSMLGFFVQAIPTGKDPIQNLFDHVADPVVNNPWAYPTNFFPRN

SEQ ID NO: 286851 - protein, 66 aa, Zea mays
  Clone ID: MRT4577_24702C.1.pep
FLTESGTQPYRSLNSLVCTQFEMSNADMAWARTRAGVHKYIYPPSIIPSPSCHKKTVLACILPCHA

SEQ ID NO: 286852 - protein, 155 aa, Zea mays
  unsure (1)..(155): unsure at all Xaa locations
  Clone ID: MRT4577_24703C.1.pep
EYKLFFFFFFLFFYCFFIFFFHQLLLLQNTTRQLPMMNQPMMPPITMMPMANHKPSTTGPTMKXPITIXSIKAHRGCMPNMXAPMKTQSMKPETMTPXMMPPKKMPSKIPPDXRPNMXSSQMLPNKMTEPQCDTDSITHIIQQQQXPFMYNPTNK

SEQ ID NO: 286853 - protein, 48 aa, Zea mays
  Clone ID: MRT4577_24704C.1.pep
NKDHLLLHIGQTMHFIPLPHPYVFIALKYICFLKRTKTILIKPRTLKF

SEQ ID NO: 286854 - protein, 53 aa, Zea mays
  Clone ID: MRT4577_24705C.1.pep
HSANIMNMGAHLRNQMANLRISYLIAPKHKTVSFKRQSQPRWYPRVRVRVGRN

SEQ ID NO: 286855 - protein, 84 aa, Zea mays
  Clone ID: MRT4577_24706C.1.pep
IQDDDSLRGHGLHRYQSGLLTRNADHHALRPMARPTDPSSDATASAPALYNNYDSTYVIPGVTIRTSTTAHRTRTNQDLSTKPT

SEQ ID NO: 286856 - protein, 220 aa, Zea mays
  Clone ID: MRT4577_24707C.1.pep
MVGGGGHSSMDHTGAKDLERGELRRGAPEFADGDDGDGEESQYFSDAEDRSWPSHSRHDSTAYEDYVSPCVSARASSVDADADADGEAVRQHCRKSSCVSEGSLDDVDLEAGLSEIIKASPEKAEQNCRICHLGLESTAAESGAGITLGCSCKGDLSYAHKQCADTWFKIRGNKCSTCKYVISSDDPEDWDYRQLDNPRHLLHGIVHDNGFGHLVRINVC

SEQ ID NO: 286857 - protein, 51 aa, Zea mays
  Clone ID: MRT4577_24708C.1.pep
QPKPSTNIISSNLVLIHMIINIYSICNLLRFTIKFVFSTLSVLRQPLVFEH

SEQ ID NO: 286858 - protein, 185 aa, Zea mays
  Clone ID: MRT4577_24709C.1.pep
MVGGGGHSSMDHPGAKDLERGELRRGAPEFADGDDGDGEESQYFSDAEDRSWPSHSRHDSTAYEDYVSLCVSARASSVDADADADGEAVRQHCRKSSCVSEGSLDDVDLEAGLSEIIKASPEKAEQNCRICHLGLESTAAESGAGITLDCSCKGDLSYAHKQCADTWFKIRGNKCQSVSKFYQTR

SEQ ID NO: 286859 - protein, 172 aa, Zea mays
  Clone ID: MRT4577_2470C.1.pep
RSPCCAPVWRFSLFQIPALRSHHRLGYLQGTGTGRGAAGQAMGVEAKRDAWCGAKKTLRCCIRTGWRCASQHWPLFSLVLLLYLLHRHAPGLFALLLSASPVIVCTGLLLAALLCHGSARLPEAREDGTAPEQVSAGRSSRNVDIREEQQRFFGAYVGEERSQGGKLWHKGL

SEQ ID NO: 286860 - protein, 81 aa, Zea mays
  Clone ID: MRT4577_24710C.1.pep
QSSNKFECSYRFSQWLCMLLSSPSGDPFITMLQYQELYWKNKIMPPMLLPRIRLLSIGNCSRSASFPSIKTQRKPTLCFQR

SEQ ID NO: 286861 - protein, 233 aa, Zea mays
  Clone ID: MRT4577_24711C.1.pep
MVIRVVNTNMRIIEFLSDLLSSCLGSFLILGRGGIWRAKGGAAAAGFSVGLDCFHRDGAMVGGGGHSSMDHPGAKDDGDGEESQYFSDAEDRSWPSHSRHDSTAYEDYVSLCVSARASSVDADADADGEAVRQHCRKSSCVSEGSLDDVDLEAGLSEIIKASPEKAEQNCRICHLGLESTAVESGAGITLGCSCKGDLSYAHKQCADTWFKIRGNKCQSAGVDTLFVEGGTIS

SEQ ID NO: 286862 - protein, 249 aa, Zea mays
  Clone ID: MRT4577_24712C.1.pep
MVGGGGHSSMDHPGAKDLERGELRRGAPEFADGDDGDGEESQYFSDAEDRSWPSHSRHDSTAYEDYVSLCVSARASSVDADADADGEAVRQHCRKSSCVSEGSLDDVDLEAGLSEIIKASPEKAEQNCRICHLGLESAAVESGAGITLGCSCKGDLSYAHKQCADTWFKIRGNKVCEICSSTASNVVVLGDPEFSDQWSETNSAAAAQAPPPPAEPRRFWQGHRFLNFLLACMVFAFVISWLFHFNVPG

SEQ ID NO: 286863 - protein, 336 aa, Zea mays
  Clone ID: MRT4577_24713C.1.pep
ARSSRPALRRPNRTVAFATLAWRARRSSPVPASRSAAPARGTYPTPTSSAPTPGSRSEATSWSRHPVCGRRYHFIIRNEYKTCKHCDHCGLMAQSFGTRCSTCKYVISSDDPEDWDYRQLDNPRHLLHGIVHDNGFGHLVRINGREGGSSLLTGIQLMGFWDWLCRYLRVRKVSLMDVSKKYGTDYRILHAITTGHSWYGQWGFKLNKGSFGITSEEYLKAMDNLSLTPLSHFFPHSRYPRNQLQDTISFYRSLSKQPLTTIRELFLYVLGLATSKSSNMHYGSMHKEHSHTHVQDTWPDEEIKRATEIAIKVLRAVEKTRWVSMRTLKAAMYHSI

SEQ ID NO: 286864 - protein, 45 aa, Zea mays
  Clone ID: MRT4577_24714C.1.pep
SRAVEDGLFVLALMHVLEEIYNSSGSISLPCPFKTACKQTPLEPN

SEQ ID NO: 286865 - protein, 59 aa, Zea mays
  Clone ID: MRT4577_24715C.1.pep
MRRTSSSRQRQGAASHSMLAAMARGLKKHLKRLNAPKHCMLDKLGGAFTPKASSGPDKC

SEQ ID NO: 286866 - protein, 96 aa, Zea mays
  Clone ID: MRT4577_24716C.1.pep
MMKGGIMVKGGSKKEVVVAILLVLQLMAAPPTAMAARSPRGAVPDGSLATTPKVTMLSATLCYTGETCKYITCLTPACSCNYDDRRCYIIFTPAAA

SEQ ID NO: 286867 - protein, 107 aa, Zea mays
  Clone ID: MRT4577_24717C.1.pep
GRAGDAGGSQYYAGERDRRTPGPRKPEDCKRSGRTTQKPPNSTTEPRSSSKEAQRAMEGRTQGLRLKIDQPRALRNEKRRLRTVRQAWWSPQHQTHSTNGDHQKLQG

SEQ ID NO: 286868 - protein, 95 aa, Zea mays
  Clone ID: MRT4577_24718C.1.pep
MMKGGSKKEVAGAAAVVAILLVLQLMAAPPTAMAARSPRGAVPDGSLATTPKVTMLSATLCYTGETCKYITCLTPACSCNYDDRRCYIIFTPAAA

SEQ ID NO: 286869 - protein, 72 aa, Zea mays
  Clone ID: MRT4577_24719C.1.pep
GLFYCYEGIAVDGSFSSAWVISTICELWPEGRVNVGRFSFLLKWFLTQMLKISELRLLKCVNLGFVKNMVCF

SEQ ID NO: 286870 - protein, 40 aa, Zea mays
  unsure (1)..(40): unsure at all Xaa locations
  Clone ID: MRT4577_2471C.1.pep
IIFFSYFLKWYELSRLLNISIYRCTIIXIIMFEASYLQEN

SEQ ID NO: 286871 - protein, 70 aa, Zea mays
  Clone ID: MRT4577_24720C.1.pep
PKGRRGSLYILILQGLANKPRKPELGGIGSNFSKKTWHQDTPQGGHLQGLFFKKGGKGPGKKRDPSFLGG

SEQ ID NO: 286872 - protein, 61 aa, Zea mays
  Clone ID: MRT4577_24721C.1.pep
VKGPVGIVVVLKGDRKGNTVVAHLLLLHPLKIKLSSQPWVGNKGGPFVAVPKSCVVPCCQI

SEQ ID NO: 286873 - protein, 142 aa, Zea mays
  unsure (1)..(142): unsure at all Xaa locations
  Clone ID: MRT4577_24722C.1.pep
HRFLPFKHLTAFNSSAFIQLPFSATQIVPAYPQQFLPFGQVTALHCAAYFQXHQLLPFIPLFNVRPTAMFRQQQLSPFYVYGMPNGGSLIQWQRSLSFRQHGLMQLTSVXRQSIVGGGLYEHACELLFCKEVLCKMYVESQK

SEQ ID NO: 286874 - protein, 54 aa, Zea mays
  Clone ID: MRT4577_24723C.1.pep
ILFLHQFLTFFTIKILYKPFIIFSSNSQLKNILFFPLIFKSQIPVPNYFPISLL

SEQ ID NO: 286875 - protein, 41 aa, Zea mays
  Clone ID: MRT4577_24724C.1.pep
ENKKKKKKKKKKKKKKKKKKKKKKKKKNKKKKKKKKRGGRQ

SEQ ID NO: 286876 - protein, 94 aa, Zea mays
  Clone ID: MRT4577_24725C.1.pep
NRPETESAPTHRRGGGAPPPGGGRRGRGGRGPGRTQVWGQKQKKKKKKKKKKKKKKKKKNKKKKTKQQKTKHPTPTHYKGNKQDKHNTTTQGNG

SEQ ID NO: 286877 - protein, 83 aa, Zea mays
  Clone ID: MRT4577_24726C.1.pep
GIHYSRPPFLSPSRHLVNWAVPPYALASCLDLITGALPVAAIAMAKMDKLSNARVKTAGSMAAWTAHTSLHVDTSGTYVDKLP

SEQ ID NO: 286878 - protein, 77 aa, Zea mays
  Clone ID: MRT4577_24727C.1.pep
MIESVKKKKKKKKKKKKKKKKKKKKRGGGKIFFFYKKKKKKNIKKGKKKKRGGPFLRVQILGPLLCTLSLFFRGPQN

SEQ ID NO: 286879 - protein, 87 aa, Zea mays
  Clone ID: MRT4577_24728C.1.pep
FFQVPRCLGRHDPKFAALAILFFNGRQLFGQPIKVNWAFTSTSREGPSGHFNIFGGDLCPEGTDATLVGFFFGYFTCSKAWVMGDPK

SEQ ID NO: 286880 - protein, 67 aa, Zea mays
  unsure (1)..(67): unsure at all Xaa locations
  Clone ID: MRT4577_24729C.1.pep
RFLAARGTAGCQFFWVLPAAVWFSELICWSLGVTSEPFACDKYLGCPVPGLLIKQLAPRXFLGLKKY

SEQ ID NO: 286881 - protein, 144 aa, Zea mays
  Clone ID: MRT4577_2472C.1.pep
VDPSTGETEDAGVEDEYQLEDLEIVSADYMLKVGVSNFRNAWENMDPETERVDEYGLGVRESLAEAVSAVISILGMQPCEGTDVVPSNSRSHTCLLSGVFLGNVKVLVRLSFGISAPKEVAMKLAVRSDDPEISDKIHEIVANG

SEQ ID NO: 286882 - protein, 80 aa, Zea mays
  Clone ID: MRT4577_24730C.1.pep
TISSRLPILLFILNFVLQTIQYIQYKIILCTIIHTRSPKDGIKVAVKRAARRFFAGSEYIFKLRKYICPARYFCSTPKPL

SEQ ID NO: 286883 - protein, 319 aa, Zea mays
  Clone ID: MRT4577_24731C.1.pep
MVGSNSSVHSGNHGDGEPPASRAELHHMADSLMEVMHRMFNEHLLVTGGRRLHHRDLEEFNHEESRDENSGSSHEFDPLGDGRRGYGDGRHANFDNLHGRHRAHGHRVRFEDEEFEDHDREEGSDENPFANDGMFGRHHHHRQANFENRDHYHGRHHRNDPDHIARVKLDIPKFTGKGSAYEYLNWAEHYQCDLRNRLQLLKQGKQSVDEYFKKMELLLVRTGIREDPESTMARFLGGHNEEISRFVKMFPYRTLQDLVDQAMRTERKIQQESGGKSYASHYNAVPWRKQQSSASFGGGRSQRNAVRLSHPVLGAKPNA

SEQ ID NO: 286884 - protein, 73 aa, Zea mays
  Clone ID: MRT4577_24732C.1.pep
GPPPGVQNGPLGGPPHVRRAPLLLEPLSPPVSFQGPQSDSKPFVPPVLFAFFFYYPPSSFGGQVFLLSPTRPP

SEQ ID NO: 286885 - protein, 35 aa, Zea mays
  Clone ID: MRT4577_24733C.1.pep
HSCAHSSCHSFFQTELSTHGHVITSESHRIIQQSI

SEQ ID NO: 286886 - protein, 23 aa, Zea mays
  Clone ID: MRT4577_24734C.1.pep
MAGLVLVGVPVGFGLLRVEAPVE

SEQ ID NO: 286887 - protein, 993 aa, Zea mays
  unsure (1)..(993): unsure at all Xaa locations
  Clone ID: MRT4577_24735C.1.pep
MAKSFIIALGGPALTWYTRLLLLSINSWKALRDKFLLNFQGKPKDPPQSSRTWTRPSQPDSRRDSRSQQQVHNIANQHPAGEATRRQEYPLPGPLSKEDFAEQPYRGVIHMITEGSSVDFETKRQKRDHYRSVNHVALTGPVVQTRWSHVPLTFDARDVDLRSTPHVDAMVINCSVAGWDLHKVLVDNGSQADIIFLHAFDRMGISHNLLKPSDNPLYGFGGKGTFPVSKIELPLSFGVAPNAWSEQVTFDIIDMVYLYNAIMGQGSINKLEMAIHGLYLCMTIPGPQGVITIYGNQQTARNIERDFVPGQRNVHCLXTTRSLRTDPPSRXEKVNAQLQSNSGTKAVPLDPAMPKQTVVISEDLTSRDEEKLISYLSRNKDVFAWSALDLVGVSCTIIAHGLGIDPLTEATKAEVHRLLEANFIEPIAYPTWLANVVVVQKKRDKWRMCIDFTSLDKAYPKDNFSLPRIDKIVDSAAGCEVMSLLDCFSGYQIYMKEEDKASTSFITPXFGTYCFIRMPEGFKNAGSTFSCLTKRVLEIQPRXCAVSAVLVQEQEQEGTTRQCPVYYVSKVLTASKCNMTELEKISYAVVMASRKLRHYFEAFKVEKEYSAKDPALMQYLTAIRNLEKQFKGFTLQHVDRAKNEEADALAKAVAKGEALPSDVFYHVIGTPVVRNPEGLQITNDVEGHHIVNLIMTEDCNPSQFTKLIAHTWPLQRWGLDIVGPLPTAQGNLKFTFVAVEYFTKWIEARAVSTITLKTAQKFFWQNIVYRFGVPSELTVDNGKQFDSQDFRDFCFSIGTKPVFASVYHPQSNGVVERANSKIFTAIKKRLLDDKKGKWADQLPEVVWALNTTECRATGFTPFCLLYGSEAMTLQEIKHGSPRTSTSAVLDVDEPTSKDLIDEDRVLALQALNKYKAQTKAWRDNAVVPREINKGDLVLVRTTRIESWGKLEPKWEGPFIVKSKASPSAYRLVTPSGEDLEHSWNIDNLQNFFV

SEQ ID NO: 286888 - protein, 139 aa, Zea mays
  unsure (1)..(139): unsure at all Xaa locations
  Clone ID: MRT4577_24736C.1.pep
ANTPHPPRLKRRYKGRPKAIQGGQKLGKTIGTDLLARTPTGEKGMCHKAKKEGKARGLPRQKXWKTTRQKKCKKNPPKGPKRDPPKSTPKKARQGGGNNRKKPPHREVPAKGRPKVQNFFFFIFFFFFFFFFFFFFFFF

SEQ ID NO: 286889 - protein, 36 aa, Zea mays
  Clone ID: MRT4577_24737C.1.pep
ILEALDKDSSPKDDVWDSVSIISFPEKEQEDVLQTL

SEQ ID NO: 286890 - protein, 66 aa, Zea mays
  Clone ID: MRT4577_24738C.1.pep
KKNLAGQLCIGGHSGAFSLAIRHVSLSRETLHLEGVVADETNQCPTEILRYKYTGSLSQKPPNIEL

SEQ ID NO: 286891 - protein, 59 aa, Zea mays
  Clone ID: MRT4577_24739C.1.pep
VIWGPSYPYAANWRPCGVGLLTMTCLTTAYDLYPLSSSAVRLLTSTYQVTAVLATRADS

SEQ ID NO: 286892 - protein, 97 aa, Zea mays
  Clone ID: MRT4577_2473C.1.pep
TLHLRENPEALRYNSPDCPVSQQGNDYFAPTVTYRDIKCAPERAEVRHAEVGRTGHSTVHVQCATGHPGGPSSQSSNGRNPTAWRRGWRTGHCQCAP

SEQ ID NO: 286893 - protein, 93 aa, Zea mays
  unsure (1)..(93): unsure at all Xaa locations
  Clone ID: MRT4577_24740C.1.pep
EQHRHGETAIPNAPIVPAXPGKDRPPLVDLRLRRRRHHSVPRHTCPEAQELRGARLRASDGQSRMELLRRADPRDLTLEESAANNEDIEQTEI

SEQ ID NO: 286894 - protein, 140 aa, Zea mays
  unsure (1)..(140): unsure at all Xaa locations
  Clone ID: MRT4577_24741C.1.pep
KAEIRIQFRRERFGHDIDLDTNELVLRDQPEEAILLKVNNKVPGLGLQLDASELNLLYRDRYSTEVPDSYEHLLLDVLDGDSHLFMRNDELAAAWNVLTPIIHEIDQNRVVPXLYEAGDRGPINAYHLAAKHGVRWDDDW

SEQ ID NO: 286895 - protein, 41 aa, Zea mays
  Clone ID: MRT4577_24742C.1.pep
AHAQLLFKCLEKTAPPIILMAENYYPHGQNKERDKRVPPIR

SEQ ID NO: 286896 - protein, 129 aa, Zea mays
  unsure (1)..(129): unsure at all Xaa locations
  Clone ID: MRT4577_24743C.1.pep
HLPRLRHYLSQPEPCPRSPSASPIHPPSSSSQPHVPQQQLHSPSPLGQAHXLEPSHFSSHNNLLLVHLRKQGVELLHLRLGSXPSLHPICALPTPIHXPXRRPLRALPPKNPPSPLIPPSWIAEPPTPS

SEQ ID NO: 286897 - protein, 243 aa, Zea mays
  unsure (1)..(243): unsure at all Xaa locations
  Clone ID: MRT4577_24744C.1.pep
MASNWLSNSLLFARRSEIWDSNPATAASSPATRSAAASASSAFARSCSESEPFSTIASXEAAXAASALAMASLAASAWTRSRDSCATAMRSSSAACSSSTALSWAEKAASSTALSPSASTAASAESSASRASSAATRSRSSEAVRMRMPLRSFSRAASPSPRSGDESRLGSSGSTTAVASPLAALASSVPSAEASGGSXMXSTQSASAEAMASLASSTEATAALRLPFLLPVPMVAGSRVPPI

SEQ ID NO: 286898 - protein, 42 aa, Zea mays
  Clone ID: MRT4577_24745C.1.pep
PSLQLVVSELASQRQLIWGYFLAPTSQLCVSKQALSVVKLWL

SEQ ID NO: 286899 - protein, 94 aa, Zea mays
  Clone ID: MRT4577_24746C.1.pep
RLRICIKSSIVSINPIILYHNWCSKGEKTSNPGTILARQLGLTANVAITCLPRLPPLMSAIVAGSQPSASFSSVSTITLVSSFHILHSGCNGFA

SEQ ID NO: 286900 - protein, 188 aa, Zea mays
  Clone ID: MRT4577_24747C.1.pep
HLKKKLAKTGARESGASAKTTKKSDRAAAPKGQWERRLQTNIHTARQALREALSMDDTAPPAIKPEPLPLPLPLGQLPAPASQAMYASSIDNIARLLEGWMRPSVSGNASAESMSSFSAFSGGGDGASASHIGTAHTPEGFTGTRKEEGAGPGPSSLPMFENWLLDDGMGSGDASLICVPLADPCEFF

SEQ ID NO: 286901 - protein, 76 aa, Zea mays
  unsure (1)..(76): unsure at all Xaa locations
  Clone ID: MRT4577_24748C.1.pep
NGRQFRTLKENALFIHAHNKLKNRPYRLHLNRFPDMHHEEFLYRFFHSRINNLRLXPTSAPLVPEFMYHDSTDLPR

SEQ ID NO: 286902 - protein, 46 aa, Zea mays
  Clone ID: MRT4577_24749C.1.pep
NSARGELSTWPFNYLHIIVYLCDIRYRRNARAPNLANSEAGLYKNK

SEQ ID NO: 286903 - protein, 75 aa, Zea mays
  Clone ID: MRT4577_2474C.1.pep
RPGRASHHFIPPLPIPDGASARAAAPRFLRSPSSSSHGGEQRRRGGAVHRHQRTLHAVERHNRHPAPPDLSQREE

SEQ ID NO: 286904 - protein, 44 aa, Zea mays
  unsure (1)..(44): unsure at all Xaa locations
  Clone ID: MRT4577_24750C.1.pep
XRCKHFELKFKPSASVELPSGWEPGPQEGLIEWDEDWDKFEDEG

SEQ ID NO: 286905 - protein, 178 aa, Zea mays
  unsure (1)..(178): unsure at all Xaa locations
  Clone ID: MRT4577_24751C.1.pep
ATTALTPGAXDLYARSFGAGLVAQNGDANGQKCKEDFLNADLTELCYIPNRGTPYQMVHKLKHGCLIRATEITGTDSDLTGRITXQVSQIVYESATGHLLVIPQTTELVGHYDNTVXIGQKIVLGFXRDIVLPNGFTLKRGGMAGTDPQEYTGCHDXVNRNWLQTFGLVMLIAVIGSG

SEQ ID NO: 286906 - protein, 94 aa, Zea mays
  Clone ID: MRT4577_24752C.1.pep
MNGVGDAHADVAAAAMVQQTLGMSLPMAAFVPEQGSANKLTRPPGLPPLPQAFVAHQRGDVCMEAVDPAAGPRKAHRRSRSDVPFGYFPPAVHH

SEQ ID NO: 286907 - protein, 261 aa, Zea mays
  unsure (1)..(261): unsure at all Xaa locations
  Clone ID: MRT4577_24753C.1.pep
MGRVIRAQRKGAGSVFKSHTHHRKGPARFRSLDFGERNGYLKGVVTDVIHDPGRGAPLAKVTFRHPFRYKHQKELFVAAEGMYTGQFVYCGRRATLSIGNVLPLRGIPEGXAVVCNVEHHVGDRGVFARASGDYAIVISHNPDNGTSRIKLPSGAKKIVPSSCRAMIGQVAGGGRTEKPMLKAGNAYHKYRVKRNSWPKVRGVAMNPVEHPHGGGNHQHIGHASTVRRDAPPGQKVGLIAARRTGRLRGQAAATAAKADKA

SEQ ID NO: 286908 - protein, 50 aa, Zea mays
  Clone ID: MRT4577_24754C.1.pep
KKKNKTKKKNLIKKKKKKKKRKNKKKKKKKKKKKKKKKKKKKIKKNGRPF

SEQ ID NO: 286909 - protein, 134 aa, Zea mays
  unsure (1)..(134): unsure at all Xaa locations
  Clone ID: MRT4577_24755C.1.pep
FCFFTFIAYPLSVNTISPPXSPPHGPADAPHPXRKSSLPXTPPPPPPXPVPPPXXPXARPPXPSSPPVPPPPGWFPPPPPPSSLPPLPRHPPXXPXXPPXPXXSPTPPXXPPPELQAGGRPGPDPXRSQIPPLG

SEQ ID NO: 286910 - protein, 187 aa, Zea mays
  unsure (1)..(187): unsure at all Xaa locations
  Clone ID: MRT4577_24756C.1.pep
MAPLLAVAMKHAADHPGLMSRLGGPNRESISREHLSSSSPQSRQRRRILICSTRSARGRRXDMEISGRVPRDSHYWFGLPSGFAFXGATSAYRIDIAWTSDVKGVKHLRALXHEHPVRILDGRNSDMGTNSQHMYNADRRLLKDLLMDAYMLSISWTRVLADVTGEXGVSPDVLQYYRKLVDLLLDD

SEQ ID NO: 286911 - protein, 58 aa, Zea mays
  Clone ID: MRT4577_24757C.1.pep
LPSLQQTMKSPSLPLTLSLFNLFYPRNQRLRKSSSIFTHLNLHILFKHLIIHSAHLFY

SEQ ID NO: 286912 - protein, 37 aa, Zea mays
  unsure (1)..(37): unsure at all Xaa locations
  Clone ID: MRT4577_24758C.1.pep
LXSEQIIIVQYVIICIRSLSWAIIRLCYDVTLSWGEI

SEQ ID NO: 286913 - protein, 246 aa, Zea mays
  Clone ID: MRT4577_24759C.1.pep
MIYDGQSSLSGATTPPQELCCPLSLKLMRDPVIITSGQTYERENIERWFSEGYDTCPRTNMKLKNFTVTPNTCMKAVIHNWLKDHELESTDLPKQFQNYYSVSSLHNISAPLIIEKNRDYTVDYSSSSFGLSGASYISSPMRETEQSKTSFDQFYSNANFQLYLSFCNFDKAMFLGFFHELSELPFELQRKAVRDLKTSLSGENEIWHSMVYNGFFEAFHEFLKNDSGIHTLQARRAGIQFFLAFL

SEQ ID NO: 286914 - protein, 152 aa, Zea mays
  unsure (1)..(152): unsure at all Xaa locations
  Clone ID: MRT4577_2475C.1.pep
ILKFIVKEVDPSTGETEDDGVEDEYQLEDLEIVSADYMLKVGVSNFRNAWENMDPETERVDEYGLGVGESLAEAVSAVISILGMQPCXGTDVVPSNSRSHTCLLSGVFLGNVKVLVRLSFGISAPKEVAIKLAVRSDDPEISGEIHEIVANG

SEQ ID NO: 286915 - protein, 67 aa, Zea mays
  Clone ID: MRT4577_24760C.1.pep
ANAIKQLFYWARITQRSPNNEMTEEHLRATRGLCIWHNYSYWHQRYTQPVYITRMPKWNIRILSDNK

SEQ ID NO: 286916 - protein, 152 aa, Zea mays
  Clone ID: MRT4577_24761C.1.pep
VGVPSQVQTPLFYQVQARWVAQALSGRRLLPPAEYMLRAAEEYHRAREKAGVPRRMSHAIFFDFDYCDEFGEKHVGLPRPPEWKKELMRAAVARLLQDTETFRDDYRDGDLVLESLRLEGWSSAPSPGTLNDKENGIAMHDMMHDRDGETLE

SEQ ID NO: 286917 - protein, 38 aa, Zea mays
  Clone ID: MRT4577_24762C.1.pep
EWLSCEYIDQWCTSQMVTEKNQGHNPIVKEKNKAGAQP

SEQ ID NO: 286918 - protein, 54 aa, Zea mays
  unsure (1)..(54): unsure at all Xaa locations
  Clone ID: MRT4577_24763C.1.pep
FGXXGACVRLNPTMWXXXXXWRRIPVAGKGMXXVSAWXGERXTAVSXXXXVGWX

SEQ ID NO: 286919 - protein, 90 aa, Zea mays
  Clone ID: MRT4577_24764C.1.pep
KGPRFRLRLSVAEALPFLRFLTNKDRPLIPLDSSVGPFKVGMPDGWTNHDHQWDGLFYLFALVQRLDGMLPRGRRFFLIIILDGPPLLVQ

SEQ ID NO: 286920 - protein, 94 aa, Zea mays
  unsure (1)..(94): unsure at all Xaa locations
  Clone ID: MRT4577_24766C.1.pep
KRTPPPPQKKRGXRXGTSTSPSHARQQKAMRSMTGSMDHAGRPPPPRVCVHERXLCIVVVLVVIYSDRALPGRSMMILHACLTSETLGPIFYPQ

SEQ ID NO: 286921 - protein, 89 aa, Zea mays
  unsure (1)..(89): unsure at all Xaa locations
  Clone ID: MRT4577_24767C.1.pep
HQCSPTATPYCSPKCPSVPQQRXQQLKHVEPHKPYQAIFSLALQSILQQQPQSGHVAGLFAAQIAQQLTAICGLHQSTACPYADVGSVP

SEQ ID NO: 286922 - protein, 49 aa, Zea mays
  Clone ID: MRT4577_24768C.1.pep
NRSIMIITLNGQDTLLTLQGSGLETREQVAIDDQILDVTRDFDLSHVKN

SEQ ID NO: 286923 - protein, 104 aa, Zea mays
  Clone ID: MRT4577_24769C.1.pep
QAFDSQTKPYRHQSLIPIFGENYNGRKQVGPALDDDPGKFDGSCTLSERCSFLQMSETDLQHGSTIRRCLLLLSRRQLLFDDAGLRTSLPLRQSFARPTKCKGS

SEQ ID NO: 286924 - protein, 209 aa, Zea mays
  unsure (1)..(209): unsure at all Xaa locations
  Clone ID: MRT4577_2476C.1.pep
PEQLLEQVIVLVDASEADEFLEVASKPLESLPYDSPGQTFVAFEKPEGVIATGKFSNILKFFXKEVDPSTGEAEDDGVEDEYQLEDLEIVSADYMLKVGVSNFRNAWENMDPETERVDEYGLGVREPLAEPVSAVISILGMQPCEGTDVVPSNSRSHTCLLSGVFIGNVKVLVRLSFGISAPKEVAMKLAVRSDDPEISDRIPEIVANG

SEQ ID NO: 286925 - protein, 81 aa, Zea mays
  Clone ID: MRT4577_24770C.1.pep
IPRIKGRNGGPPSTPKTRGCQIEGGPPVLNNPGTPLHEDPRLQGNTVPLHIVPLPRKMETPPREGFGNPNNAFANKLPRRW

SEQ ID NO: 286926 - protein, 92 aa, Zea mays
  Clone ID: MRT4577_24771C.1.pep
MVSPLGSRGPLPSRSQADHGFNTDPGSLGSCCCCCKGKPLPLVPPPGPLGPMAHCAGSTDMLGEAGTGSAPAPPFMGGGGNRITAMWCAGGT

SEQ ID NO: 286927 - protein, 563 aa, Zea mays
  Clone ID: MRT4577_24772C.1.pep
MNASQFMDKQILGLAASASPSGGGAGGGGGVDLSDLMIPIPQDDGENRLGRRRSSTSVNGTACDMLPSYDFQPIRTSDGAAAAAAPQASWGSLDSKAPSASYNLKSAGILEPHVLKKVSHEEDRSNFPTVTIADIDRTMKKYSDNLLHALEGVSSRLSQMEGRTHQLENSVDELKLTIGNYNGSTDGKLRNLENMLREVQAGVQILRDKQEIVETQLHLAKLQTNKTDGQSSENSGSGQAGLQQQPVVPPQAAIQPQQVLTPSQPPALPALPAPNAPPPPPTLQNQSSLQFPSHLQHSQVPSVPSVALAPTVPALPRDAYYAPSAQPTETMHQQYQAPPVPQPQAPPAPPQQYQSQTQFPQYAQPPQPANVNPSTPHVPHAPQQPEETMPYAPAQSYPPNATPPPYMQPPSGPAPPYYGQQNPSMYEPPAGRANPGPPSSYGSAGYGPQGGGSFSESYGYTGSPSHRGNAGMKQSSPFAQSSGGSGSYGSGKLPTAQMLPQAVPISSSSTSGSSGNRVPLDDVVEKVATMGFSREQVRATVRRLTENGQNVDLNVVLDKLMNG

SEQ ID NO: 286928 - protein, 163 aa, Zea mays
  unsure (1)..(163): unsure at all Xaa locations
  Clone ID: MRT4577_24773C.1.pep
PVGDALNQGSAVGSGVGFRLDSLLKLSHXRSRTNKMALMHYLRKLLAEKMPLFIDFDKDVIYMEPASKIWLCLLQEXMQAINEGLVKVKQELDASESDGAIPVGLGKALESFFYASXTQVRSLLPLNPEVARDADSLTQYFGEAYRARCPFFRLASLLVIVRE

SEQ ID NO: 286929 - protein, 92 aa, Zea mays
  Clone ID: MRT4577_24774C.1.pep
IQCGLSRTGTFWAHGNPAFTPKDGSKKAPHPDILTTAKALGNGIPIGATIVTENVSSAIKSGDHGTTFGGDPLVCRVAHHIVRRVAASRAPK

SEQ ID NO: 286930 - protein, 77 aa, Zea mays
  Clone ID: MRT4577_24775C.1.pep
TVLFHSRSNGVTHTIHGVLLSTFKEIDQLEYLIPEKSSLRQHIQCPDSEFVDFLPYLLQINPRKRPTADEALQHPWL

SEQ ID NO: 286931 - protein, 195 aa, Zea mays
  Clone ID: MRT4577_24776C.1.pep
QCLILYHAGIDATHPCLCYYGPKIDIGVFDALKRKFQCATLQLDFQLPIRFKLAYSAEDEAKIERPVMIHRAILGSVERMLAILLEHYNGKWPLWLSPRQAIVCSVSSGSVEYAKQVLAMLHEADFHVDIDVSDRTIQKKVREAQVAQFNYILVVGAQEAETGNVCVRVRDNADLATMSVDGLITRLREEIVAFK

SEQ ID NO: 286932 - protein, 739 aa, Zea mays
  Clone ID: MRT4577_24777C.1.pep
MLVFLRRGLLLVRQPTTRVLAKPSLRPACLFVHHFAVDTMGEGSAAGKDAKGKGKGKTKAAAADSALVVRDDSYLEAVTQKRIRFFEEIQARQAVERLNIGGEVIKVTLPDGAIKEGKKWITTPMDIAKEISSGFAASCLIAQVDETLWDMGRPLEGDCKLQMFKFDTNEGRDTFWHSSAHILGESIERAYGCKLCIGPCTTRGEGFYYDAYYNDQTLNEEHFGIIENQAKKAVAEKQPFERIEVSRAEALEMFAENEFKVEIINELPEDKTITVYRCGPLVDLCRGPHIPNTSFVKAFACLKASSSYWRGKVDRESLQRVYGISFPDSRRLTEYKHFLEEAKKRDHRILGKAQELFFFHELSPGSCFFLPHGARIYNKLMDFMRQQYRDRGYQEVLSPNIYNMQLWETSGHAANYKENMFVFEIEKQEFGLKPMNCPGHCLMFANRVRSYRELPLRMADFGVLHRNELSGALTGLTRVRRFQQDDAHIFCREDQIKDEVKAVLEFINYVYEIFGFKYELELSTRPEKYLGEVETWNKAEQQLTEALNEFGKPWKINEGDGAFYGPKIDIGVFDALKRKFQCATLQLDFQLPIRFKLAYSAEDEAKIERPVMIHRAILGSVERMLAILLEHYNGKWPLWLSPRQAIVCSVSSGSVEYAKQVLATLHEAGFHVDIDASDRTIQKKVREAQLAQFNYILVVGAQEAETGNICVRVRDNADLVTTSVDGFITRLREEIAAFK

SEQ ID NO: 286933 - protein, 96 aa, Zea mays
  Clone ID: MRT4577_24778C.1.pep
TRSLLSFFLMALLLDDALAVVDGIIVQCTAQDFHVRFKLSSMASVLTSYLEWFSILSGQIASAKKLAPPAGAMGWHPPKVLCHDGEHRRRVSGWIR

SEQ ID NO: 286934 - protein, 110 aa, Zea mays
  Clone ID: MRT4577_24779C.1.pep
SWFSGGYCNRTRPLEEGDLDPRSIGWELRRVQSQEVARVRETSGSTKFELLDVTKAMMLRADGHPGWHYDKRWVRNASDCLHWCLPGPVDTWNDMLLRRLTQISPQPLLR

SEQ ID NO: 286935 - protein, 226 aa, Zea mays
  unsure (1)..(226): unsure at all Xaa locations
  Clone ID: MRT4577_2477C.1.pep
HIFDRXVVLQYNCTNTIPEQLLEQVIVLVDASEADEFLEVASKPLESLPYDSPGQTFVAFENPEGVIATGKFSNILKFFVKEVDPSTGEAEDDGVEDEYQLEDLEIVSADYMLKVGVSNFRNAWENMDPETERVDEYGLGVRESLAEAVSAVISILGMQPCEGTDVVPSNSRSHTCLLSGVFIGNVKVLVRLSFGISAPKEVAMKLAVRSDDPEISDRIHEIVANG

SEQ ID NO: 286936 - protein, 212 aa, Zea mays
  Clone ID: MRT4577_24780C.1.pep
LGTSRPAGTTPLRNPSTKRYFTPSAFNMGIKTYFDVSWQGPEIQIDGNGAVTSTGAVKDQTGRINFELYDDVVPKTAENFRALCTGEKGFGYSGSKFHRVIPQFMLQGGDFTRGNGTGGKSIYGEKFSDENFTRKHDRPFLLSMANAGPNTNGSQFFVTTVVTSWLDGKHVVFGEVSDQESKRIVKSIEATGSNTGTIKFKNPPTITGAGVA

SEQ ID NO: 286937 - protein, 42 aa, Zea mays
  Clone ID: MRT4577_24781C.1.pep
DAGDVQEEHGLSHEHLVDLAVRILLLVVMSSTMLIFQCSKAT

SEQ ID NO: 286938 - protein, 74 aa, Zea mays
  unsure (1)..(74): unsure at all Xaa locations
  Clone ID: MRT4577_24782C.1.pep
QEWQVGSDRTPGYAVLCATDIALDHCRIPSLLRRSRVAASSAFXHCDSGSKDTTVMSTLCLTPPLAHTISPPEC

SEQ ID NO: 286939 - protein, 135 aa, Zea mays
  Clone ID: MRT4577_24783C.1.pep
MLIFAGRHSPVSKLLPLANHFTCCGSRPSIEIAMPHGHAAAVVDRLLRRLGSAACRLEVPPNIDGDLAHVWTTLARLQDMLVSLEIRPELQEWMGDIKQVAYDVEDLVDELEDHNSMESQMSGCVAVGEVWFIDP

SEQ ID NO: 286940 - protein, 79 aa, Zea mays
  Clone ID: MRT4577_24784C.1.pep
SGIPVDQRPPPSAHRRGPWRAEHDGQGRPQFRAPASRSTGHICKTQGSPAAGAAAYARCSDTTLPLIRRQRRLRRIIAP

SEQ ID NO: 286941 - protein, 64 aa, Zea mays
  Clone ID: MRT4577_24785C.1.pep
PLANTSAVKRRHTGARNTLITPSQSSRAKTLKHAHRHGRWHTVKDTRSYEQGAQLLLAHKIRYS

SEQ ID NO: 286942 - protein, 74 aa, Zea mays
  Clone ID: MRT4577_24786C.1.pep
GRCTAHCQGPARDPRPTSSRTAEYTAGLVLGQPLLGRAIRGCRVLPAFIRIHEHLGVMAVRSGPLLSSLSPLVN

SEQ ID NO: 286943 - protein, 119 aa, Zea mays
  unsure (1)..(119): unsure at all Xaa locations
  Clone ID: MRT4577_24787C.1.pep
KEYDIPXGHIVATSPSFANRLPHIYKNPDSYDPDRFGPGREEDKAAGAFSYISFGGGRHGCLGEPFAYLQIKAIWTHLLRNFEFELVSPFPENDWNAMVVGIKGEVMVNYKRRKLAVDN

SEQ ID NO: 286944 - protein, 131 aa, Zea mays
  unsure (1)..(131): unsure at all Xaa locations
  Clone ID: MRT4577_24788C.1.pep
MNALQWTIRTLLNERQCSLNTGDSRHTLLADINAGRRDAVLSQDAQHYVVPRMKLWDLYDQSEMXMSELXELDTVRAILRKTHGMGDMKHXQPERXLRLEHLHVRTYYDRNEELQESCNDKRWPMVVQAGA

SEQ ID NO: 286945 - protein, 127 aa, Zea mays
  Clone ID: MRT4577_24789C.1.pep
MGAVSCRRRTSRRRCHAAALLAAAIFAAALVVAAGRRPIRLPAAALARRRVDSSTAIAAAADEVLPAARRRWLLAGPGSSPPTCRARCGRCAPCRATRVAIQPGVGPQWEYYPEVWRCKCGNKLFMP

SEQ ID NO: 286946 - protein, 89 aa, Zea mays
  unsure (1)..(89): unsure at all Xaa locations
  Clone ID: MRT4577_2478C.1.pep
GREAAITCGQERGAMAPCLSYARGTGSAPSASCXSGVRNLKSAASTAADRRAACNXLNNATRGYEGXNAANSSRDLSKCGARIHYTISN

SEQ ID NO: 286947 - protein, 112 aa, Zea mays
  Clone ID: MRT4577_24790C.1.pep
PAAPTGPPPPARSCQLGVLPGWPSFLDGFGSFLGAGLLLPWALLPGACPQKFGVKSKKGPGGTKVWSVLGKCPAFIFFLFAEVFFPLGPPLFAKSTSKKKKQKKKKKKKKKT

SEQ ID NO: 286948 - protein, 59 aa, Zea mays
  Clone ID: MRT4577_24791C.1.pep
SRTWSHQILLHRTLQERRGAHVHSHLAYDGEFALPLHRTADVLITTAKERYAIHPEISY

SEQ ID NO: 286949 - protein, 89 aa, Zea mays
  Clone ID: MRT4577_24792C.1.pep
KKKGPCSSKFQKQLLEIHIVLLILRGRQIYLKWAIPILKTGGSHAALPQVGNITHNPWPNKQKLLFLAICGGGSWPGKRFTPIFFRGEP

SEQ ID NO: 286950 - protein, 36 aa, Zea mays
  Clone ID: MRT4577_24793C.1.pep
APQVFLHMLSARMLCVLLVAISMRAYGSYSYTNDKL

SEQ ID NO: 286951 - protein, 137 aa, Zea mays
  unsure (1)..(137): unsure at all Xaa locations
  Clone ID: MRT4577_24794C.1.pep
FMCLFMCLSRHMSPSIPPKLPMITTNYFVETANTSVKSSFGSVMPPSMPAVSKPPAGHGSESLCSAFSTTPYSKRKHSRKMEEEARVVRVLADSGHNIRALNDTSTVIAASRHLATVFPTTLPGAVHPVSGRSTVXN

SEQ ID NO: 286952 - protein, 103 aa, Zea mays
  Clone ID: MRT4577_24795C.1.pep
PRVRPRVRSRVRLLLHWRRWLHLDRWVSASHSHTRTATAMKHAAKLPYRGASTSQHRLSHAIPKTPTRKITIAHVLAPEVIKTRAPDFRKGVQTLTGMPSFQK

SEQ ID NO: 286953 - protein, 98 aa, Zea mays
  unsure (1)..(98): unsure at all Xaa locations
  Clone ID: MRT4577_24796C.1.pep
ALGPLVCGLCSCPFLPCCPLASLIFCWLRRRAVLGCPSLLFLVVFAFLCCWVSSCLRRWSCSPASVAVFRGPPLFILPPLGVXPAGLQTRVWFVPAVR

SEQ ID NO: 286954 - protein, 69 aa, Zea mays
  unsure (1)..(69): unsure at all Xaa locations
  Clone ID: MRT4577_24797C.1.pep
TVHPCDAALLSXLTAEVLVXQAAGHGAPLPVTLVSFSPWSTTVAAGADERRYQDHFALGNGGRTSGPGV

SEQ ID NO: 286955 - protein, 132 aa, Zea mays
  unsure (1)..(132): unsure at all Xaa locations
  Clone ID: MRT4577_24798C.1.pep
RGLFGCPXGPCLGPVRPXCXASPXXPGFLGFAFFWGLVPVXLVWVSPCGPSLXFCCGFSASSRSFFFAXFLSLPPWVWRVGFFWFPPFPLWGFSLXXFPVWSVVPLVQCVGFXFQTGPPPFXLXXGVTIKRX

SEQ ID NO: 286956 - protein, 131 aa, Zea mays
  Clone ID: MRT4577_24799C.1.pep
FCGQFFIGRRGSPGPPLGRRVFPVLTFVWVKNLFQFVYFFFPRFTGFFGPPKRLSPLVFSSPSLFGGRPFVFFPPVPVLFLLIIPGARLFRGKKKKKKKKKKKKKKKKKKKKPKKKKKKKKKKVLCVVTTA

SEQ ID NO: 286957 - protein, 888 aa, Zea mays
  Clone ID: MRT4577_2479C.1.pep
MAQPLVVKKDDDLDEEEYYSPFLGIEKGAVLQEARVFHDPQLDARRCCQVITKLLYLLNQGDTFTKVEATEVFFATTKLFQSKDAGLRRMVYLMIKELSPSADEVIIVTSSLMKDMNSKTDMYRANAIRVLCRIIDSTLLTQIERYLKQAIVDKNPVVASAALVSGIYLLQTSPEVVKRWSNEVQEAVQSRAALVQFHALALLHQIRQNDRLAVSKLVTSLTRGSVRSPLAQCLLIRYTSQVIRESGVYQGGDRPFFDFLESCLRNKAEMVILEAARAITELNGVTSRELTPAITVLQLFLSSSKPVLRFAAVRTLNKVASTHPLAVTNCNIDMESLISDQNRSIATLAITTLLKTGNESSVDRLMKQMTNFMSDIADEFKIVVVEAIRSLCLKFPLKYRSLMNFLSNILREEGGFEYKKAIVDSIIILIRDIPDAKESGLFHLCEFIEDCEFTYLSTQILHFLGNEGPKTSDPSKYIRYIYNRVILENATVRASAVSTLAKFGALVDSLKPRIFVLLRRCLFDGDDEVRDRATLYLKLLGGEATVGETEKDVNEFLFGSLDVPLVNLETSLRNYEPSDVPFDISSVPKETKSQPLAEKKSTGKKSAGPASAVSDPVSTVDASYEKLLSSIPEFADFGKLFKSSAPVELTEAETEYSVNVVKHIFDGHVVLQYNCTNTIPEQLLEQVIVFVDASEADEFLEVASKPLESLPYDSPGQTFVAFEKPEGVIATGKFSNILKFIVKEVDPSTGETEDDGVEDEYQLEDLEIVSADYMLKVGVSNFRNAWENMDPETERVDEYGLGVRESLAEAVSAVISILGMQPCEGTDVVPSNSRSHTCLLSGVFIGNVKVLVRLSFGISAPKEVAMKLAVRSDDPEISDRIHEIVANG

SEQ ID NO: 286958 - protein, 121 aa, Zea mays
  Clone ID: MRT4577_247C.1.pep
MRECISIHIGQAGIQVGNACWELYCLEHGIQAGGGMPGDKTIGGGDDAFNTFFSETGAGKHVPRAAFVELGPTGIDEVRTVTYPQVFHRGRGVAGKAGAAINVSGGLSPIGGAFVCVSFVR

SEQ ID NO: 286959 - protein, 70 aa, Zea mays
  unsure (1)..(70): unsure at all Xaa locations
  Clone ID: MRT4577_24800C.1.pep
ADTWVTKELVPSSHEMWTVRKGRYLGRLLRNTLRKTAQSLSYHKAASNAEYEDDXLDMLFVRGRGRPRFL

SEQ ID NO: 286960 - protein, 185 aa, Zea mays
  unsure (1)..(185): unsure at all Xaa locations
  Clone ID: MRT4577_24801C.1.pep
MRGAAQWLAFDFLCPYTLTNTKCICIVKNLFEKIMTLKAEPSDTIDNVKGHHTXKERILPEQHEDCLLGKRLHDGLTLAEYXIHKESTFQLGLRLRGGMNMLRETSDWKVLSPLYAESSDTIDXLKASILYNEGIPPDHQRIIFAGXQLDDXCTLADYYIQKEXTLXLELCHTCGMQIFEKTLTG

SEQ ID NO: 286961 - protein, 79 aa, Zea mays
  unsure (1)..(79): unsure at all Xaa locations
  Clone ID: MRT4577_24802C.1.pep
RTCSSRIFGLSSQAVKAIXTNSLAFSPARKGNTFLRLQPMPMRSVSCAAKKDTTDKVCEIVKKQLALPDHTEVCGESKF

SEQ ID NO: 286962 - protein, 49 aa, Zea mays
  unsure (1)..(49): unsure at all Xaa locations
  Clone ID: MRT4577_24803C.1.pep
MYLXAHHPDSLDHRINNIDQANKDPSRPPTKRSPSVRKEPAESQLEKRY

SEQ ID NO: 286963 - protein, 107 aa, Zea mays
  unsure (1)..(107): unsure at all Xaa locations
  Clone ID: MRT4577_24804C.1.pep
RRGGGGGVRGAGGEGRGVXIGPLQCHXYHNLSFLCQELDINTALKDVILCGALDSVCSAAVDDVNFSVELFKMIDKLYSAVVYFFMCPWDYAFPMFFIFPISLYPMV

SEQ ID NO: 286964 - protein, 145 aa, Zea mays
  unsure (1)..(145): unsure at all Xaa locations
  Clone ID: MRT4577_24805C.1.pep
MGKNPGSFPPLSPPPPXPGGPPIGXGPPHLTPPPGPPXIKMFLNPRNPPPPPHXAAPPPNPPPPXGPVPNPGPAHPXTPACIWGAKINPXPPPCKPPEPPPPCPPGRPPKAPPRGGAQTGRPQPPGGAPGIFKRGPPGPRPGCPP

SEQ ID NO: 286965 - protein, 78 aa, Zea mays
  Clone ID: MRT4577_24806C.1.pep
AHQLTKEQVQIQGCVQDNRAIPTCLTYRVSLLTCHFGIGLIRVSLPSPGNHILTRKAIETHLIRQIPNSTSTSMCLIK

SEQ ID NO: 286966 - protein, 719 aa, Zea mays
  Clone ID: MRT4577_24807C.1.pep
MDDDLTASPCPPPAYSTLHTPSLPPLGSIPSHPTKAPTAVAAPGHAMAMARAAVDVEDLLVRVKTGAEADLAAAAREVAALAADGRLGEDDDEDGLLVAALLARLAAAAATADARVSVMAALRRLAGCVAGESKERLASTEALSSIVRSLSRDADERREAIAVLLDLSDIPQVRQRIGRIKGCVVMLVTLRNAHEPGTGDDADKLLAILSSNPQNVLLMAEAGYFRPLIQYLKQGSDMNKVLMATAISKMFLSEHMKSSLGEDGAIEPLVDMFKHGNLEAKHSALGALCNLSSSLQNAELLINSGITGPLLQLLFSVTSALMALREPASAILAAIAQSERILLHKDVAPQMLSLLNLSSPVIQLHLLRALNSISGHANAKRARSKIRQNGGVQLLLPFLTEKNVGIKIAALHLMFHLSKDSSQELAEQFRETHLDIFVKIISSPTSRDEKAAAVGILSNLPATDKKATEILMRANLLPILITLFEANMAAAVTPQRMWLLEGIAGVFIRFTVTWDRKLQSSAVGHGVVPCLVKLLSEGSVDAKSKAATSLAQLSQSTMALRKSKTPRWLCVPPSAESYCTVHSCQCTVKSTFCLVKAGAVHPLVQTLEGEERGADGAALEALGTLMEDEVWENGSRVIERASGIHALLRIAEAGEPSSQDKAIWMLERMFRLEAHRERYGEIAQALLIDLAQKGDPALKPMIGKILAHLELLQTQSSYF

SEQ ID NO: 286967 - protein, 121 aa, Zea mays
  Clone ID: MRT4577_24808C.1.pep
RLKATLQYSYKRFVQYIYSNHDYQHMQQAVAQEPMSNNDFENTYGETETLTGVYSEDKKSSGKGCNLCWLKTNDKGSFLVSYSPFEQYAQFDGKEVIASGRHYTPGKFVQHIPSAHHFDVD

SEQ ID NO: 286968 - protein, 114 aa, Zea mays
  unsure (1)..(114): unsure at all Xaa locations
  Clone ID: MRT4577_24809C.1.pep
YPSSIPPIPLFYFSPHNPTTVTLTIQILPRPXNTHTLIHFHLQHSLLSDSASQTTSVSSPLPTLILLSTPSTLPSLTSSPLFTNTIPLLSFLPNYNSSSPIIPYFLTLTFNYSF

SEQ ID NO: 286969 - protein, 45 aa, Zea mays
  Clone ID: MRT4577_2480C.1.pep
LWLLESYDTSVILHVNVSSVRGDFCRNSSSTYSTSPALPCVRVIS

SEQ ID NO: 286970 - protein, 74 aa, Zea mays
  Clone ID: MRT4577_24810C.1.pep
IGLSQKSVVIIPNCHARDALFFFDPQFDGVFDPKTGRMRPVVSVRQMVVYNIRPGWFSERFIASNSCWFAKCPV

SEQ ID NO: 286971 - protein, 114 aa, Zea mays
  Clone ID: MRT4577_24811C.1.pep
MAWGMTKPWTVQICMFNSMSINFIHCNSLHANMVRAKLGWVCNTSIHCLSLAKCDKSLLSHFHLLSEPESVDSCFGAQPYYTKLFLQFDEQMNLCATLSKIQSPWRTMAYKNWL

SEQ ID NO: 286972 - protein, 49 aa, Zea mays
  Clone ID: MRT4577_24812C.1.pep
IAPRLMTKDAGCVQLRLRTSSVAAEDKQDRDVLSRPSNFEGQSKTIGII

SEQ ID NO: 286973 - protein, 104 aa, Zea mays
  Clone ID: MRT4577_24813C.1.pep
QSRVAGATERPFRNVGHKGPNERENNSGKKSTWDNRKKTLNPARSQNKSRPRGSVKGASSHRRISHHPPFTNHPLVAVRTSRHQELVNTMHAPTSPACSNPEER

SEQ ID NO: 286974 - protein, 106 aa, Zea mays
  Clone ID: MRT4577_24814C.1.pep
VVGLFFFEQGTTFFLMGGASLIQTRDTTNTNRGRGQTTYTGHVPTGGARTRGLQKHRQQKNFLPPHHARTNYWVTNWQDLYLYTMFRSLSSCLDPAINTHRFIRFS

SEQ ID NO: 286975 - protein, 91 aa, Zea mays
  unsure (1)..(91): unsure at all Xaa locations
  Clone ID: MRT4577_24815C.1.pep
MCNTYGTSRCALPKLKILYGHTNXYLIYVVIISQDEPRVLGHTTPCPYCPTEEFSREETNEIFAEKQETVEFYNTSRLRLCAPSQPYNITA

SEQ ID NO: 286976 - protein, 88 aa, Zea mays
  Clone ID: MRT4577_24816C.1.pep
MAEPKAWQSRTLGLGTRNSKAAVFVFESAAMKAAPAPAPGTLDAHFTPCADVKGLRFGAQLDHTAMLALPGQRSIDVAAAAAQVGVVH

SEQ ID NO: 286977 - protein, 53 aa, Zea mays
  Clone ID: MRT4577_24817C.1.pep
VYPVSVMGGEMYMSALKKPFPLVPMVASQGIKIGSIKGYMEAGASAVVLSDAI

SEQ ID NO: 286978 - protein, 187 aa, Zea mays
  Clone ID: MRT4577_24818C.1.pep
MAEPSPPPVSNAGLRILLSKDRPAPSPPPTAAVSSHADRDRIIGVFRSALSRSEPPETFSLQTVQEAIKPQKETVLVLEENQSLENALRTLLQELVSSAVQSDKKIMQYGNSLDSGESNCLITRLLDIVLYLCERGHVEGGMVFQLLEDLTEMSTIKDCKDIFGYIESQQDVLGKQELFGRGKLVML

SEQ ID NO: 286979 - protein, 34 aa, Zea mays
  Clone ID: MRT4577_24819C.1.pep
QTAPCVGHPGPQKAWNHLGLRCIDVTCSKPMRPC

SEQ ID NO: 286980 - protein, 168 aa, Zea mays
  Clone ID: MRT4577_2481C.1.pep
PSVSPACRCRPLCASYRRAPWPPLPCPGSHPCHRWTLWTAPCASSLCHGGWRAPPTGRTGTTPLGTRLHLRPPRRLRDAPNSPPPPPHSVSRNSASSAAKSSAGPDEPMPISSTGNVGRCPLKERKALPQALLRKQRWVAKSWVVSSPLLDARAHGGFGGKQSERARP

SEQ ID NO: 286981 - protein, 85 aa, Zea mays
  unsure (1)..(85): unsure at all Xaa locations
  Clone ID: MRT4577_24820C.1.pep
MATEAMDISKPTPVACGDEAAAAAKGRIGRVFLELDQDYLHVIHDLKLQXIRRLTSLTIIEAQLNGLNSRVTMLREELQLLQEPG

SEQ ID NO: 286982 - protein, 604 aa, Zea mays
  Clone ID: MRT4577_24821C.1.pep
MGRSPCTAQGVFRSALSRNEPPETFSLQTVQEAIKPQKETVLVLEENQSLENALRTLLQELVSSAVQSDKKIMQYGNSLDSGESNCLITRLLDIVLYLCERGHVEGGMVFQLLEDLTEMSTIKDCKDIFGYIESQQDVLGKQELFGRGKLVMLRTCNQLLRRLSKANDVVFCGRIIMFLAHFFPLSERSALNIKGVFNTSNVTKYEKDAMDGISVDFNFYKTLWSLQEHFSNPALTSTNPAKWQKFSSNLAVVLNTFEAQPLSDDDGKLNNLNEEEDAAFNIKYLTSSKLMGLELKDPSFRRHILVQCLIFFDYLKAPGKNDKEGPTGSMIEEIKSCEEHVKKLLEIIPPKGKEFLKSIEHILEREKNWVWWKRDGCLAFEKPPFEKKPGQAGARKRKPRWRLGSKELSQLWKWAEQNPNVLTDPDRVRMPSITEYWKPLAEDMDPSAGIEEEYHHKSNRVYCWKGLRFSARQDLDGFARFSDYGIEGVVPSELLPPEVNAKFSSKPAEKVKRTRKEDSKSVSAHQPREHQVAATPETDGGVDPEEGEGAAPMDSDNGAVGDSQKRSPGEVSGPESGQCEPEADGDDNVRTETTSRDARAGEMK

SEQ ID NO: 286983 - protein, 195 aa, Zea mays
  Clone ID: MRT4577_24822C.1.pep
MADTEATKPTVDATATEPTAEAEAENDPQFEPVIKLEQQVEVKTHEEDESVLFKMRAKLFRFDKEAKEWKERGTGDVRLLEHKETNKVRLVMRRDKTLKVCANHYVTSDMKLSPNVGSDRSWVYNVAADVADGEPTAETLAIRFANSENAQAFKTAFEEAQTKNAGSKSTDAPAQDAPAATEEKKDEAADEKKDE

SEQ ID NO: 286984 - protein, 143 aa, Zea mays
  Clone ID: MRT4577_24823C.1.pep
MTEMGEALRTCMERLVVAREEREQIIVEAANEISSKKKKVRELQLKLEDANKKIAKLAAENSNLCKAADVKDALIGEAEGVRSGHWGQARRRDGEARVGAETSRVVEVRGAMLRRSWRSGAGAGDDLSSTPRAGSRRSTRADR

SEQ ID NO: 286985 - protein, 82 aa, Zea mays
  Clone ID: MRT4577_24824C.1.pep
MAHRTVRFDIYILLSHTYKGVIFHILDKTVIPLLNLSIYEPNKTQIMEQVDCLQLTISVEEWLDDKGQGECCSYVIQFICGP

SEQ ID NO: 286986 - protein, 78 aa, Zea mays
  Clone ID: MRT4577_24825C.1.pep
WCCSPQLPWIGGGQIKNVIFLVMGIHVFSSKCNVSAQSVITFLYAKYMESDDSPGPASVQTVLCGIIMMASRHTSVSV

SEQ ID NO: 286987 - protein, 65 aa, Zea mays
  Clone ID: MRT4577_24826C.1.pep
GFKKEFRSPQIPKNFKKKFFSHGPGVPGPKLGRVFQLQGVQRKNLFNFLVPAGLVKKEPPQILGF

SEQ ID NO: 286988 - protein, 89 aa, Zea mays
  Clone ID: MRT4577_24827C.1.pep
MSNSELSKGTLVFGLHFWKLVAIGVGAEFVLFLVLLSLFCFFASRRRRRRRAAPVLHLPAVEPNAQPKHPTKPPKDIQEVPSRGTRDPA

SEQ ID NO: 286989 - protein, 278 aa, Zea mays
  unsure (1)..(278): unsure at all Xaa locations
  Clone ID: MRT4577_24828C.1.pep
GYLEAGHNRLFXWKGRLLSKAGRETLVKSVLTAQPIYHLTVFPVQKWLLKKIDKLRRGFLWKGNNPEACSGGHCLINWSTTCQPKNKGGLGILNLERFARALRIRWLWMRWKNRDKAWIGLQSPCDKIDEELFNASTVVNVGNGRTASFWKSSWIHGQAPKNIAPILFKKARKKNISVFHALRANSWIQLCLPCIREDEIKDFVTLWQAISSMHELNNLEDSISWRWTTDGQYSASSAYNIQFSTNFCTMKICSIWKAKTEPKXAFFAWTLLHNRVLT

SEQ ID NO: 286990 - protein, 178 aa, Zea mays
  Clone ID: MRT4577_24829C.1.pep
MPGIHRYTAELLVLLTIITRLLLLATAWPALPAPASLEPSLLFPSAGATSPTQTQSAGVASTIPAFPEQSEAAAAAATSVCQLTPSPPLLPAVLASCNANAGGSGVTLPPRLRCCPALAAWLYTAYAPTALSGSGVGEASVAASAEAAAVVDLPVLPDDAEECAGAADRALRAAGVAL

SEQ ID NO: 286991 - protein, 388 aa, Zea mays
  Clone ID: MRT4577_2482C.1.pep
MATPTAPSHLPLATASASTSFPDRFLRTPCALRPRSWPRLRAGSVKEWREFEDDAGAVKEWREFEDAVRRKDLPRALQFLQSVEPAAVQVAVPVPPGRDWEVLDACVDADDMRLVGRAYQFLVDRGVLASFGKCKNIVLEGPREVTPTVLKEMTGLEAEKLAPKKWGLSGSSPYVLIGFLGGVSFLLTQGVDLRPKLSAVLGLAAADAMLLGGTCLAQISCFWPPYKRRILVHEAGHLLTAYLMGCPIRGVILDPFVALRMGIQGQAGTQFWDEKMEKELAEGHLSSTAFDRYCMIMFAGIAAEALVYGEAEGGENDENLFRSLCILLNPPPAVAQMANRARWSVMQSYNLLKWHKKAHRAAVKALEDGHSLSVVIRRIEEAIASDSK

SEQ ID NO: 286992 - protein, 165 aa, Zea mays
  unsure (1)..(165): unsure at all Xaa locations
  Clone ID: MRT4577_24830C.1.pep
MHVEKLKKRAGAVRTGGKRTAAHEXKAVHKTTTTDDKRLPSTLKIIRVNSIPGIEDDCIFKDDVAIQFVNPIAQAAIAANTCEVSGTPHTKKLQDLLPSIIYQVGPDHLHNLRTLAEQFQKHASGASGAEAGASAEGVHDDDDDVPELDPAQTFQEAALEKKESS

SEQ ID NO: 286993 - protein, 57 aa, Zea mays
  Clone ID: MRT4577_24831C.1.pep
ASSTWLGAEPDMPTHTKGGGGVWMNFPLGPRCSMSHGVGFHNYLSHLAFLDIHHECI

SEQ ID NO: 286994 - protein, 45 aa, Zea mays
  Clone ID: MRT4577_24832C.1.pep
IFGGQKTFFWFPLKKKKKKKKKKKKKKKKKKKKKKKKKKKKKKAA

SEQ ID NO: 286995 - protein, 71 aa, Zea mays
  Clone ID: MRT4577_24833C.1.pep
RHFVTSAQICSCLVFFCWNLKQLLQRNQAVWYLGAYMVGFGNVEGLTPYSLEFESCEISLFDIWGSYICKP

SEQ ID NO: 286996 - protein, 62 aa, Zea mays
  Clone ID: MRT4577_24834C.1.pep
WIPIWLVYDAHVKLSVALDVAGSCSISVGGSWVPVKSLNGCMSVMQLTRASSINSQENVSES

SEQ ID NO: 286997 - protein, 72 aa, Zea mays
  Clone ID: MRT4577_24835C.1.pep
PTRLLYRQKSHFPNGIQPNPAAAAAAAMAAVTNADVEVVDFDLDHDDLMDEDPLPYSEPVPTLRLRSTIVGL

SEQ ID NO: 286998 - protein, 294 aa, Zea mays
  unsure (1)..(294): unsure at all Xaa locations
  Clone ID: MRT4577_24836C.1.pep
TSKAGSRGRGMPGPPALLFLAKFLALRRSIFDLAPLLRDLHARYGPVISVRLARTLVFVADRRLAHRLLVQGGATFADRPPPVDPNSLFSAGGRDVSSSPYGAYWRLVRRNLXAEALQPARVALFAPARRWACDGLVDNLLRRSRRSDAGAGXALPETXTTVTLRPFLRRAMFELLVYMCFGVRLGQDTLDEIEGLQHRALLTLTTFPIFAFFPAVTKRLFRSRWEANVAVRRRQDDLFVPLIHAKATRGNDDGDTSASTPSTSWRGWCGTWSGARRWTAWRWKWRKRWTSPSS

SEQ ID NO: 286999 - protein, 44 aa, Zea mays
  Clone ID: MRT4577_24837C.1.pep
APKAKNLSRFCFKEILILSCYMLCWVHFIVYKNSNCLPKHVFFG

SEQ ID NO: 287000 - protein, 147 aa, Zea mays
  unsure (1)..(147): unsure at all Xaa locations
  Clone ID: MRT4577_24838C.1.pep
IPRAVYADSQSSDLCHSKLAFYYISVAFEAYLXVSXFDGLASGVAALVRHLPAGSAAILFCIHSLADIATVLCATANVQNKSLSNKGPXNLSPLRMRGIGRXIAFPVATRISPQRLKELAQLVTLRPKESQDAVLDDMHTHVAESDV

SEQ ID NO: 287001 - protein, 106 aa, Zea mays
  Clone ID: MRT4577_24839C.1.pep
GQSGSSLCKPRRAGLADALSRAGSRLGQPLVKWRPWRPASDAAPPFRIRTGTPRAQVCGAGSQLGAPAGPKEIKRQLFFSRRRWTDPTALGETAGAARTPPNPRNR

SEQ ID NO: 287002 - protein, 80 aa, Zea mays
  unsure (1)..(80): unsure at all Xaa locations
  Clone ID: MRT4577_2483C.1.pep
RPMQSIYSXALHDLXVPQHLMRYNQTYQSDAVSDISWESVFDQIMEGFFCNEDRYTIYKACLTTLREHPDQYISAALNME

SEQ ID NO: 287003 - protein, 271 aa, Zea mays
  Clone ID: MRT4577_24840C.1.pep
HWVPRGRPGSPDCSVASDAGTVGSATDEETAAVTAERRRRATSWVSAALATDQSAFGIYDLKPVPATVSSPLAVVVVDESAKPATATATATKSSPSPKSRMSPAKGKARTGAAAAAAAALTKTSVPTEWERGEGAEERGELAKRLGEESRGWFLGFVERFLDADVAASAPWDRERAARMLPQLKRVNDWLGEIAKRGETQSLPPADADGEATTTSTAPVPPNDGCGVPEETIERLRKKIYEYLLTNVDSAAAMLGGGGGSAAAAPTNGKKG

SEQ ID NO: 287004 - protein, 94 aa, Zea mays
  Clone ID: MRT4577_24841C.1.pep
GYDFKRHFQDFENSPPVSNAFPLRLSTTYTGRMVSLKDLMCRELLPLNLCIQVMNICRLMYFRTCTVRGYKFYILNLGISRNVNIEQVPTERDI

SEQ ID NO: 287005 - protein, 148 aa, Zea mays
  Clone ID: MRT4577_24842C.1.pep
SPSPRRRRPLLLTGEISPNNCATPIANVERGDRSDILTLDSIRQVLIRLEDSIIFGLLERAQFCYNADTYDSNAFHMDGFGGSLVEYIARETEKLHAQVGRYKSPDEHPFFSKDLPEPRLPPMQYPRVLHPIADSININKEIWKMYFD

SEQ ID NO: 287006 - protein, 154 aa, Zea mays
  unsure (1)..(154): unsure at all Xaa locations
  Clone ID: MRT4577_24843C.1.pep
TDDVLKAYPRLRLSHGRKVLEVRPMVDWNKGKAVEFLLDSLGLADSDEVLPIYIGDDRTDEDAFKVRGQFGSFLVMLENGLRCFKTCXLRGNKRGLGILVSSVPKESQALYSLLDPPEVMDFLKRLVKWKEEEEAQRITVKQLLVSVDDFRVNL

SEQ ID NO: 287007 - protein, 222 aa, Zea mays
  unsure (1)..(222): unsure at all Xaa locations
  Clone ID: MRT4577_24844C.1.pep
VLHPIADSININKEIWKMYFDELLPRLVKEGSDGNAGSSALCDTTCLQALSRRIHYGKFVAEAKFQESPEAYTPAIIAQVCXVPTISISSTTIFIYFLFYFRVSEQNDISIHLKNISISRHIWQNSGXDQLMNLLTYETVERAIEHVVXHEAKXMQEGSVLLRHRVSHRSKIFGQXVNIGDKDNGSPPVXKIRPSLVAKLYSYRIMPLTKEVEVAYLLKRLD

SEQ ID NO: 287008 - protein, 100 aa, Zea mays
  Clone ID: MRT4577_24845C.1.pep
MARYVEMLDMGVRIAARFHSHCPQTARMYYKPPQTQTQTQSSSSSSADDAKATSSTLDAPSVRRPFALAAAAATEFRAGDRWGHQLHGLDTAQVVVYEVV

SEQ ID NO: 287009 - protein, 312 aa, Zea mays
  Clone ID: MRT4577_24846C.1.pep
MAFKLITKPAAASPAAAYWGDLARGPQGTSRVAFGPAPRNKGLRAANNSATPIAKVERVDRSDILTLDSIRQVLIRLEDSIIFGLLERAQFCYNADTYDSNAFHMDGFGGSLVEYIVRETEKLHAQVGRYKSPDEHPFFSKDLPEPRLPPMQYPRVLHPIADSININKEIWKMYFDELLPRLVKEGSDGNAGSSALCDTTCLQALSKRIHYGKFVAEAKFQESPEAYTPAIIAQDRDQLMNLLTYETVERAIEHRVEAKAKIFGQEVNIGAKDNGSPPVYKIRPSLVAELYSYRIMPLTKEVEVAYLLKRLD

SEQ ID NO: 287010 - protein, 312 aa, Zea mays
  Clone ID: MRT4577_24847C.1.pep
MAFKLATKAAAASPAAAHRGGLARGPEGTSRVAFGPAPRNKGLRAANNSATPVAKEERVDRSEILTLDSIRQVLIRLEDSIIFGLLERAQFCYNADTYDSNAFHMDGFGGSLVEYMVRETEKLHAQVGRYKSPDEHPFFPEDLPEPRLPPMQYPRVLHPIADSININKEIWKMYFDELLPRLVKEGSDGNAGSSALCDTTCLQALSRRIHYGKFVAEAKFQESPEAYTPAIIAQDRDQLMNLLTYETVERAIEHRVEAKAKIFGQEVNIGAKDNGSPPVYKIRPSLVAELYSYRIMPLTKEVEVAYLLKRLD

SEQ ID NO: 287011 - protein, 55 aa, Zea mays
  Clone ID: MRT4577_24848C.1.pep
LTPSLHPRIGSTASNTASPMTCQLWALQSVSLAREVMSPCASSALSFDIFLLVKA

SEQ ID NO: 287012 - protein, 312 aa, Zea mays
  Clone ID: MRT4577_24849C.1.pep
MAFKLVTKPAAASPAAAHWGDLARGPQGTSRVAFGPAPRNKGLRTANNSATPMAKEERVDRSEILTLDSIRQVLIRLEDSIIFGLLERAQFCYNADTYDSNAFHMDGFGGSLVEYMVRETEKLHAQVGRYKSPDEHPFFSKDLPEPQLPPMQYPRVLHPIADSININKEIWTMYFDELLPRLVKKGSDGNAGSSALCDTTCLQALSKRIHYGKFVAEAKFQESPEAYMPAIIAQDRDQLMHLLTYETVERAIEHRVEAKAKIFGQEVNIGVEDNGSPPVYKIVPSLVAELYSYRIMPLTKEVQIAYLLRRLD

SEQ ID NO: 287013 - protein, 110 aa, Zea mays
  Clone ID: MRT4577_2484C.1.pep
EGKPFPRTKRPRGGSHLMIKGKSPQNPSLFFFRGLAGYFKASGTKGFLPPKRAFRPPQLIRGGPPKRPPRLSPFWFGPPIWGEGAGIKISPSKQFFPYFPPAGPQVCFFF

SEQ ID NO: 287014 - protein, 241 aa, Zea mays
  Clone ID: MRT4577_24850C.1.pep
MAFKLATKAAATSPAAAHRGGLARGPEGTSRVAFGPAPRNKGLRAANNSATPVAKEERVDRSEILTLDSIRQGLIRLEDSIIFGLLERAQFCYNADTYDSNAFHMDGFGGSLAEYMRRETEKLHAQVGRYKSPDEHPFFPKDLPEPRLPPMQYPRVLHPIADSININKEIWKMYFDELLPRLVKEGSDGNAGSSALCDTTCLQALSRRIHYGKFVAEAKFQESPEAYTPAIIAQVCFCSNY

SEQ ID NO: 287015 - protein, 41 aa, Zea mays
  Clone ID: MRT4577_24851C.1.pep
YFTVKKASSTVLCRKINASSSLVDGVEESKRQMVFIATSVY

SEQ ID NO: 287016 - protein, 41 aa, Zea mays
  Clone ID: MRT4577_24852C.1.pep
LFLEHMPLEAHYRYSHMYLKRHLQRWVLPQQGRVSFKRKTG

SEQ ID NO: 287017 - protein, 119 aa, Zea mays
  Clone ID: MRT4577_24853C.1.pep
VLFFPSPVKKGPFSGNKPAFKPFFGRTFCSLLFSGPYFVPVQPWFFPCKVHSLFGAHVSFSVFLTRFFFFQLSFCFWLPPPPHLPVVVVLFTLGPFVCWPPFFVSVGVWVVHKKQQYNI

SEQ ID NO: 287018 - protein, 94 aa, Zea mays
  unsure (1)..(94): unsure at all Xaa locations
  Clone ID: MRT4577_24854C.1.pep
MAGEKAEKPDKKEQKPAAKKAGGDATAPRAXGRWCXVKKSSSKAKKLRKSKPHCSRNPVLVRGIGRYSRSAMYSRKALYKRKYSAAKTKVEKKK

SEQ ID NO: 287019 - protein, 107 aa, Zea mays
  Clone ID: MRT4577_24855C.1.pep
LFQFARKIEELMYNMSPGEMPFQVGMSKVDFRKMLKSSLTGLDKTINAMYRKLQKNMTAEELLPSLWEKCKKEFLDKYATFLKLISKIYPDEKVISVNEMRDTLASL

SEQ ID NO: 287020 - protein, 37 aa, Zea mays
  Clone ID: MRT4577_24856C.1.pep
RPKRSYQTQLTVKFHLWLCWDKARTHEQGVPVCPRVR

SEQ ID NO: 287021 - protein, 345 aa, Zea mays
  Clone ID: MRT4577_24857C.1.pep
MASFNPAGASAANHNPNKSFEVTPAPGDSVSSLSFSPKANHLVATSWDNQVRCWEVMAGGACQAKASISHDQPVLCSAWKDDGLTVFSGGCDKQVKMWPLLSGAQPTVFSGHEAPIKELAWVPQMNLLVSGSWDKTLRYWDIRQPQPVHVQQLPERCYALSLCYPLMVVGTADRNVIVFNLQNPQAEFKRITSPLKLQTRCLAAFPDQQGFLIGSIEGRVGVHHVEESQQGKNFPFKCPRDGNDIYAISSLNFHPVHGTFATTGFDGSFNFWDKDSKQRLKAYNRCPSPITCSAFNHDGSIFAYAVCYDWSKGAEKHNPSTAKTNIFLHSAQDSDVKGKPRAGKK

SEQ ID NO: 287022 - protein, 46 aa, Zea mays
  Clone ID: MRT4577_24858C.1.pep
NKNVLKSLFKAWLHHQRQPQTFYAFRCCNCFLSTFTFLYIYRLAVR

SEQ ID NO: 287023 - protein, 40 aa, Zea mays
  Clone ID: MRT4577_24859C.1.pep
SGRSSLEMLKMRTTNTTIGYLHIAYYQLKVSNGGVSGSHP

SEQ ID NO: 287024 - protein, 85 aa, Zea mays
  Clone ID: MRT4577_2485C.1.pep
QAGDKQEELGEYLQKKAPTPPTQVNTTSTYTWKRVCLPVTASELLGVWWLVEVTMMGGALMMDQSVLFPGVFFSWISCRRRGRRN

SEQ ID NO: 287025 - protein, 210 aa, Zea mays
  unsure (1)..(210): unsure at all Xaa locations
  Clone ID: MRT4577_24860C.1.pep
MEHSLYYYCRSWLLVCSSVLALCLGSRGQLTPGFYRSTCPQLYYTVQRHVFDAMRAETRMGASLLRLHFHDCFVNGCDASILLDGDDGEKFALPNRNSVRGFEVIDAIKADLESVCPEVVSCADIVALAASYGVLFSGGPYYDVLLGRRDGLVANQSGANSGLPSPFEPIDSIIHRFAAVDLNTPNVVVLSGAHTIGRARCALFSNXLST

SEQ ID NO: 287026 - protein, 72 aa, Zea mays
  Clone ID: MRT4577_24861C.1.pep
DETSHVYSSPQRTPVSSNLTSDHRDSLRQQLPLAIVFVLGSKSFIAIIPSISRRLSPRHLPVPGVGAVQERV

SEQ ID NO: 287027 - protein, 98 aa, Zea mays
  unsure (1)..(98): unsure at all Xaa locations
  Clone ID: MRT4577_24862C.1.pep
GPLDPAHYIYIYIYIYIYIXTDWLTHVYTFFDSQHTSDWLARCRTHQREGKKGFLFLIYSKIYILIYGRKFFSVSFCLYVRMFVCSLNYLNGRELYLF

SEQ ID NO: 287028 - protein, 80 aa, Zea mays
  Clone ID: MRT4577_24863C.1.pep
SGEELFALTKAERRLAKDEEAVVSLATELRCRVGGAEAAAFCSAAGSCDHIIFCALSLSCQRRRWEKSLLRYVRAQSSSQ

SEQ ID NO: 287029 - protein, 78 aa, Zea mays
  Clone ID: MRT4577_24864C.1.pep
TDTCAKPARDDTMSRSSRAQVMAGVNSSVFGLKPAAALRQASSAQRPGNLFNLAGPMGGYAPLLGLTAFFALTATTGS

SEQ ID NO: 287030 - protein, 94 aa, Zea mays
  Clone ID: MRT4577_24865C.1.pep
RHASRTWSPLGARRRSPLLYNKGHSHSSLANGAASMRRFQHRPISGRFFYQASRFLDVSALSAMCDQSSFVLLPSPSLTSCLSFVLAHEDLLSC

SEQ ID NO: 287031 - protein, 73 aa, Zea mays
  unsure (1)..(73): unsure at all Xaa locations
  Clone ID: MRT4577_24866C.1.pep
VFYEELRRVGLFDLGSPMLGLNFFVPPLGWVVSYCMVGWLSSQSYFFLACVKIPSQLKKTHTKKKKKKKKKXX

SEQ ID NO: 287032 - protein, 135 aa, Zea mays
  Clone ID: MRT4577_24867C.1.pep
TPRRRMSVTYTEESPLGGVSDVQVVEKAHERADKDPPKMRQKSSLAGGDCGWWCRHSCVTFLRSVSSWRRCHILVRSHRLTWVQWLVLETCTLVGHHMVVSSYIQSFVLRQIIHVVMRSYYDGALFAANIDLPIK

SEQ ID NO: 287033 - protein, 70 aa, Zea mays
  Clone ID: MRT4577_24868C.1.pep
IFFFFFFFFFVFFVVFFPFLVLRKAHMGQHIKTGVNFTYKEGPTKGALFNPNYHREHLSFLRCAVRAPFI

SEQ ID NO: 287034 - protein, 66 aa, Zea mays
  Clone ID: MRT4577_24869C.1.pep
NTQTSNRLPYSDLCHLSRVPCAASLRLINLVRQRCVKTVTRMLYVHDLLGSFSFLSRPLWIRIINR

SEQ ID NO: 287035 - protein, 63 aa, Zea mays
  Clone ID: MRT4577_2486C.1.pep
GGVNHSLFVSITYSLDFFLSLLKKDSYLLYYASYSTIFVRCITSYHFGSLYLIISVSYHDFFN

SEQ ID NO: 287036 - protein, 121 aa, Zea mays
  Clone ID: MRT4577_24870C.1.pep
MPRQFFVGGNFKMNGVTDSIKSIVSNINNSKRDPSTEVVIAPPAIYLALTRELADPSVGVSAQNVYDKPSGAYTGELSAEQLKDAKIDWTIVGHSERHVLLREDDDFVARKTKAAIDGRLS

SEQ ID NO: 287037 - protein, 102 aa, Zea mays
  unsure (1)..(102): unsure at all Xaa locations
  Clone ID: MRT4577_24871C.1.pep
GGLXXIGRGKXVPLLVLSSXLCPXGXAGAFYALLMSIAAIGSXTGSWVGXLLLXLWGGGGTEFKNLWAXVLMRGVMRLLPLALLSLAPEGIRIPLWSLPFCC

SEQ ID NO: 287038 - protein, 68 aa, Zea mays
  Clone ID: MRT4577_24872C.1.pep
AVLCERDKDNNTNPYSGCTVAYGSSTQQLAANGGSLRLACKTSLDVFFFCQFYFCNCACKASLNHWIC

SEQ ID NO: 287039 - protein, 80 aa, Zea mays
  Clone ID: MRT4577_24873C.1.pep
PGGTSFVGWFFLALGVFRFFFGTLQSVCFRVRFFPVCIPPQKVSDGFIPLLRHFTLFFVWCKKKKKKKKKKKKKKKKKKK

SEQ ID NO: 287040 - protein, 53 aa, Zea mays
  Clone ID: MRT4577_24874C.1.pep
LFPFCQRGGPNIGISLTNATIGHIQPTCFDKLAGVQPTTQLLVVPSFSISYEL

SEQ ID NO: 287041 - protein, 69 aa, Zea mays
  Clone ID: MRT4577_24875C.1.pep
KQPQGESWPFLIISNEHKPWFMAQFKGSCQNINLSFIFRDRDSAFCTLFTLISFFNEAKFLIFVTTQGC

SEQ ID NO: 287042 - protein, 98 aa, Zea mays
  Clone ID: MRT4577_24876C.1.pep
AGAPKGMAALGSLRLLQARAGAAAKCAAVGGRTSARRAPRPLFAVRASAADAANRDAVLKAFRENRALKIIPGLQNFDRISVASVATAADKGGATHVD

SEQ ID NO: 287043 - protein, 61 aa, Zea mays
  Clone ID: MRT4577_24877C.1.pep
WFFFGRRGKCTGCSIWAVGILCVQIGYKCTVSVLGLGESWTYYIKFLFFSMSTKARTCLWR

SEQ ID NO: 287044 - protein, 119 aa, Zea mays
  Clone ID: MRT4577_24878C.1.pep
IGYLEAGRGASFTGVTQPLAPSSCGVAVGPRVNCSPIIVSTAETQPAAVDSCLQRHPTVGGWPGSTPGVQGASLWLLRERWTTMETGILHRGFMDAADPRFTGDLVALCINFRARSRVT

SEQ ID NO: 287045 - protein, 133 aa, Zea mays
  unsure (1)..(133): unsure at all Xaa locations
  Clone ID: MRT4577_24879C.1.pep
KKTKTAGPRRKKKGRAAGSKDTSPESPATRHGHARDEGGNRATDTRXSHARHTDADDGRRXPSNEGAGGRSFYXMDSANKDASLTGRCCNPAEDKSSDDCQNCKATPPGERXECGDYNLNLTEPPDXTPRPGD

SEQ ID NO: 287046 - protein, 256 aa, Zea mays
  Clone ID: MRT4577_2487C.1.pep
MRLAAAKPAAITVAQRQPIPIPTCSSSRNQAKKSRRSAWRVAVASRDAADGDAEAGAGQGQGQAPTGRRARLSARRRQRVPLPDGVSGAGVGEFLRHPDAVESILNTGALESFAPAGPGTFTCALRRVGLLGFEVAPVLDLRVAPTSTDCTIEMLSCRFEGSEVLEQQNELFSAFMSNHITWSDDAEEPCLDIHVKLEVTLEVYTKPFSMLPLSAVEKPGNLLMQGLLDRLVPVLGEQLLRDYHSWAQAQQQHESS

SEQ ID NO: 287047 - protein, 109 aa, Zea mays
  Clone ID: MRT4577_24880C.1.pep
SMRRWLQSSGARSHGDDDQQDGDHRRAAHGSRTQPRHREQDRWQHPMNNIHCNKIAGESRDRQPPFICFLRCSPRIGKGKSRFPSYVAVQASRDRQQDRWQCKMATSVV

SEQ ID NO: 287048 - protein, 486 aa, Zea mays
  Clone ID: MRT4577_24881C.1.pep
MVAARLRLALLLSVCLCSAWARPRLEPAIRLPSQRAAAADETDDGAVGTRWAVLIAGSSGYYNYRHQADICHAYQIMKKGGLKDENIIVFMYDDIAHSPENPRPGVIINHPQGGDVYAGVPKDYTGRDVNVDNFFAVLLGNKTALRGGSGKVVDSGPDDHIFVFYSDHGGPGVLGMPTYPYLYGDDLVDVLKKKHAAGTYKSLVFYLEACESGSIFEGLLPNDINVYATTASNAEESSWGTYCPGEFPSPPPEYDTCLGDLYSVAWMEDSDFHNLRTESLKQQYKLVKDRTAVHDTFSYGSHVMQYGALELNVQRLFSYIGTDPANDGNTFIEDNSLPSFSKAVNQRDADLVYFWQKYRKLADSSPAKSEARKELLEVMAHRSHVDSSVELIGSLLFGSEDGPRVLKAVRAPGEPLVDDWSCLKSIVRTFEARCGSLAQYGMKHMRSFANMCNAGILPEAVSKVAAQACSSIPSNPWSSIHKGFSA

SEQ ID NO: 287049 - protein, 69 aa, Zea mays
  Clone ID: MRT4577_24882C.1.pep
PVDPASGFNWAHEQKVVTIFSAPNYCYRCGNMASILEVDDCREHTFIQFEPAPRRGEPDVTRRTPDYFL

SEQ ID NO: 287050 - protein, 29 aa, Zea mays
  Clone ID: MRT4577_24883C.1.pep
LYLIKKGNSSLKAINQIKTSLQILILGCG

SEQ ID NO: 287051 - protein, 307 aa, Zea mays
  Clone ID: MRT4577_24884C.1.pep
MSSPHGGLDDQIERLMQCKPLAEPEVRALCEKAKEILMEESNVQPVKSPVTICGDIHGQFHDLAELFRIGGKCPDTNYLFMGDYVDRGYYSVETVTLLVSLKVRYPQRITILRGNHESRQITQVYGFYDECLRKYGNANVWKTFTDLFDYFPLTALVESEIFCLHGGLSPSIETLDNIRNFDRVQEVPHEGPMCDLLWSDPDDRCGWGISPRGAGYTFGQDISEQFNHTNSLRLIARAHQLVMEGFNWAHEQKVVTIFSAPNYCYRCGNMASILEVDDCREHTFIQFEPAPRRGEPDVTRRTPDYFL

SEQ ID NO: 287052 - protein, 145 aa, Zea mays
  Clone ID: MRT4577_24885C.1.pep
HPLPCSPALCSCSPSPPHRHCSWPSAFEASLPTLRLLWWSPKIVAASPHLPRLGPALQHRFDLTGAPPAVVPHCPPSPPPQPPLLARSPHRHRSLGVHTAVPEARRPGHEGPRGVRAPGAGRPRSRGVPGPGVWAPPAFLIFPRG

SEQ ID NO: 287053 - protein, 73 aa, Zea mays
  Clone ID: MRT4577_24886C.1.pep
CNSQISRKLLQTTRLGPLTWPTLRTCARSKGRPDTSVTSSPAWDTLRSCSAAYGIERCTYDLDFMPWWSNRYN

SEQ ID NO: 287054 - protein, 49 aa, Zea mays
  Clone ID: MRT4577_24887C.1.pep
SLLHRQQETLGQRSIDRGGDVFQGEDGSGRGRRRRVRYHHLQFARHLPL

SEQ ID NO: 287055 - protein, 36 aa, Zea mays
  Clone ID: MRT4577_24888C.1.pep
FQDMCRVWSSRCIDRVSSFMAPGKVSGLHKRALAMN

SEQ ID NO: 287056 - protein, 196 aa, Zea mays
  unsure (1)..(196): unsure at all Xaa locations
  Clone ID: MRT4577_24889C.1.pep
MSNAKAVLEPAFQGAGHKPGTEIWRIEDFKPVPLPKSDYGKFYCGDSYIVLQTTCKGGAYLFDIHFWIGKDSSQDEAGTAAIKTVELDSMLGGRAVQHREPQCYESDKFLSYFKPCIIPMXGXGFASGFKKPEVDKFETRLHICKGKRAIRVKEVPFARSSLNQDDVFILDTEKXIYQFNGTNSHIXQERPKALGS

SEQ ID NO: 287057 - protein, 176 aa, Zea mays
  Clone ID: MRT4577_2488C.1.pep
SPTLATTMRSPLFEDVQRGAAALDRVQAMAAPELVEHSDACGHVILLPEVELAVAKLLHIIDEQRQRERLLVVNEGEDVEGRPQTGPTTVFTADSAASTPGRSGSVWSLARPQSTNVAHSFVAHVQASAFALTTDRGVRTASGGEATNAMGDSATRRATGVAPSTPAAVAHARSHQ

SEQ ID NO: 287058 - protein, 103 aa, Zea mays
  Clone ID: MRT4577_24890C.1.pep
ATKPKPTAKPKAVVKPKTPAKPKAKPAAKAKPKTAGAKPKPLAKKAGRPAKAAKTSAKDTPGKKAPVAKKSAAAAKKAPAKKVAPSKKAATPARKAPSRKAKK

SEQ ID NO: 287059 - protein, 115 aa, Zea mays
  Clone ID: MRT4577_24891C.1.pep
GAPLQEAEGGSPVSVVDYAVPSIMGGELGKVLDPRAPEPAAHEAEAVELVAYTAVHCVQLEGKDRPAMADIVANLETAFALCEGSDRDRGTGAFGNSSSSASLSVTSMDRSGALA

SEQ ID NO: 287060 - protein, 67 aa, Zea mays
  Clone ID: MRT4577_24892C.1.pep
FGSRGACLLAFQNGWGSMMDPEVEWIPLKTTLAANKITPCTTARLQLYERSGLTGVSFNTYEHRRLL

SEQ ID NO: 287061 - protein, 56 aa, Zea mays
  Clone ID: MRT4577_24893C.1.pep
NTCILKSKLWNCWWDLEEADAKGVSSRSRSWSRSWLSSTTEPPIREKRSGKRGRRQ

SEQ ID NO: 287062 - protein, 65 aa, Zea mays
  Clone ID: MRT4577_24894C.1.pep
HNPNFAFLSQMELRLFGLIRWMGVMMLAKPGMSIVFGFIDKSIPKQKNPTSMILIAKNICLCLKV

SEQ ID NO: 287063 - protein, 180 aa, Zea mays
  Clone ID: MRT4577_24895C.1.pep
MDEGYASLPTSHLLGSVPAVAVAPDERKPGAPAEVGNAAATSRLQQFPPAPAANGGGYQPPGSPLGGDVETQTNWKGYFNVASYTPYFNVDTDVVVDRLISSVYPMEGFFRKIDANPDMYGPLWITTTLIFMLAAFGNFATYLMQRKSDLNIWNFDVSYFSLAASVMYGYAIVVPVAFFF

SEQ ID NO: 287064 - protein, 51 aa, Zea mays
  Clone ID: MRT4577_24896C.1.pep
MQSHKNFRITMNLPKKMRDNRCIPYWIRMSTDNTIMYHAISLHWRCSSLCF

SEQ ID NO: 287065 - protein, 171 aa, Zea mays
  unsure (1)..(171): unsure at all Xaa locations
  Clone ID: MRT4577_24897C.1.pep
GVWHPDRVESFANDHGXNRTXTPSXFALQPNSEXRLIRKSRPKTQVAMXNPFNTVFDAKRLIXGRRFNDASVQNDIKLWPFKVISGPGEKPMIVVQHKGEEKQFAAEEXISSMVLIKMREIAEAYLGSTIKNXXVTVPAYFNDSQRQAKRMLGVIAALNGLRIINEPTAAA

SEQ ID NO: 287066 - protein, 150 aa, Zea mays
  unsure (1)..(150): unsure at all Xaa locations
  Clone ID: MRT4577_24898C.1.pep
LCVVLVVSPAFFVFLVVRXPSLLFCLCSSXSXGSXAFPCRPLLLXWVGPVLLFPAXLVLLLFFWLPRXLCLLFAFPVFACLFGXFGCGAPSLFGCFFFPSRPPFPVGFFFLRFLVVWXGFWPXXRPCCSSWTWALFSFCLPLSPVVCCRF

SEQ ID NO: 287067 - protein, 270 aa, Zea mays
  unsure (1)..(270): unsure at all Xaa locations
  Clone ID: MRT4577_24899C.1.pep
KKLQKKKKKKKKKKKKPSRNPRSPCSISQPAANSLSRGSRNPLEWRKKRWAGQGADGAGSNRLSISGTNVLLAVGVWAXHNRVEXILANEPGETGTXPSYXVPFTEXSKRLIXGDAAKNQVAMNPINTVFDAKRLIGRRFSDASVQSDIKLWPFKVISGPGEKPMIVVQHKGEEKQFAAEEISSMVLIKMREIAEAYLGSTIKNAVVTVPAYFNDSQRQATKDAGVIAGLNVLRIINEPTAAAIAYGLDKKATSVGEKNVLIFDLGGVPL

SEQ ID NO: 287068 - protein, 173 aa, Zea mays
  Clone ID: MRT4577_2489C.1.pep
KKKDRFYCQRAPAAAVKLYSRTAARAGEAWRGSGSRHRGYITGDSERVPPPRAWRAQHRWLYVLPLSPMPFVASPSLAVRTPLSVVTLYLPVLPPSVRSARSIDRCGNDRSRRRRRPGHEPRRSVPRSCFTTLPKDHTDPLRPGVDAAESAVKGVVGPVCGLPSTSSPSLTTR

SEQ ID NO: 287069 - protein, 238 aa, Zea mays
  unsure (1)..(238): unsure at all Xaa locations
  Clone ID: MRT4577_248C.1.pep
MRECISIHIGQAGIQVGNACWELYCLEHGIQPDGQMPGDKTVGGGDDAFNTFFSETGAGKHVPRAVFVDLEPTVIDEVRTGTYRQLFHPEQLISGKEDAANNFARGHYTIGKEIVDLCLDRIRKLADNCTGLQGFLVFNAVGGGTGSGLGSLLLERLSVDYGKKSKLGFTVYPSPQVSTSVVEPYNSVLSTHSLLEHTDVAVLLDNEAIYDICRRSLDIERPTYTNLXRLVSQVISSW

SEQ ID NO: 287070 - protein, 244 aa, Zea mays
  unsure (1)..(244): unsure at all Xaa locations
  Clone ID: MRT4577_24900C.1.pep
EEQIAGKGHGXPAIGIHLGTTYSCAGVCQHDRVKIIANDQGNRTTPSNVVFTDSXRLIADAVKNQVAMNPINTXIFDAKRVIGRRISDASVQSDIKLWPFKVISGPGEKPMIDVQDKGEEKQFAAEEISYMVLIKMREIAEAYLGSTIKNAAVTVPAYFNDSQGQATKDAGVIAGLNVLSIINEPTAAAIAYGLDKKATSVGEKNVLIFDLGGGTFDGSLLTIEEGIFEVKATAGDTHLGGEDF

SEQ ID NO: 287071 - protein, 102 aa, Zea mays
  Clone ID: MRT4577_24901C.1.pep
MDSTKLSALLALAVLTLYSTSLALAWEKAHPECHSCESCSPPSTGLPLPPISIPSVPLPSVIIPSVPLPTVSIPSVHIPPVTHLPTVLRLPPVTLPAIPIIG

SEQ ID NO: 287072 - protein, 205 aa, Zea mays
  unsure (1)..(205): unsure at all Xaa locations
  Clone ID: MRT4577_24902C.1.pep
GKNRRSALGRWRRVSCIYLVTTYSCVTEXYDDRVKIIGNDQXTRTTPXSSVRFTDXSRLIGDGGXKNHVDMNPINTELXAKRIIXGRRFSDASVQSDIKLWPFKVISGPGEKPMIVVQHKGEEKQLAAEEISSMGLIKMREIAEAYLGSTIKNAVDTGPAYFNDSQRQATKDAGVIAGLNVLRIINEPTAAAIAYGLDKKXTSVG

SEQ ID NO: 287073 - protein, 100 aa, Zea mays
  Clone ID: MRT4577_24903C.1.pep
QKGAPKKKGGPPPPLRTKKGGEKKRVRGGKIQNRGQNQKLRPLKKHWAPFFVYPKIYGGSPGLFFKGGDPRGRGAIRFLKLAPQSFFPFGGILKFWGTWG

SEQ ID NO: 287074 - protein, 88 aa, Zea mays
  Clone ID: MRT4577_24904C.1.pep
LIQRTAPEAPPGLTMPAIAWTAEGSSRSILAVRRTGRPCPMANCELSNWNNLNVRYGGWDYALCWHQTCPTMDPGRGIFIDLIAITIH

SEQ ID NO: 287075 - protein, 117 aa, Zea mays
  unsure (1)..(117): unsure at all Xaa locations
  Clone ID: MRT4577_24905C.1.pep
MGGKGDGPAIGIDLGTTYSCVGVWQHDRVEIIANDQGNRTTRGGGAFTDSYRLITYSXNNQVAMNPINTVFDAKRLIGTRFSDASVQSDIQLSPFKVISGPGEKPMIAAQHYGEEKQ

SEQ ID NO: 287076 - protein, 156 aa, Zea mays
  unsure (1)..(156): unsure at all Xaa locations
  Clone ID: MRT4577_24906C.1.pep
KKSPFTPGEDPAILAPHALLGNRWAGLSRLLPERSYNSAKNHFIWGGGLXRHRLGDLHRRGSADHPCKRSTPGPGSPSASDRNDLSHCCSTIHVFLPVPRALGFNAIIAENVRPLFSTAILDDDPLTILSLSLPELDHSPSGFHHYSARSHFQELS

SEQ ID NO: 287077 - protein, 206 aa, Zea mays
  unsure (1)..(206): unsure at all Xaa locations
  Clone ID: MRT4577_24907C.1.pep
MAGQGNGPGIAIYLGTTYSCVCWWQYGPADDYLATSQGNTDHDQLGVLSYSDRLIADEVKNYTLKNRINNVFDAKRFICRRVSDASGHSDIKLWPFKVISGPGEKPMIVGQHKGEEKQFAAEEIYSMVLIKMREIAEAYLGSTIKNAVVTVPAYFNDSQRQATKDAGVIAGLNVLRIINEPTAAAIAYGLDKKATSVGEKNXLIFD

SEQ ID NO: 287078 - protein, 208 aa, Zea mays
  unsure (1)..(208): unsure at all Xaa locations
  Clone ID: MRT4577_24908C.1.pep
SPAIPSRAPKPLSEKIRCAGKGNGXPIGLDLGTKHSCVGVWXHDRVEIIANDQGNRTTPLYVCFTDSXERLIADAGNNQGVMNPINTVFDAKRLIGRRFSDASVQSDIKLWPFKGISGPGEKPMIVVQHKGEEKQFAAEEISSMVLIKMREIAEAYLGSTIKNAVVTVPAYFNDSQRQATKDAGVIAGLNVLRIINEPTGAAIAXYGL

SEQ ID NO: 287079 - protein, 197 aa, Zea mays
  unsure (1)..(197): unsure at all Xaa locations
  Clone ID: MRT4577_24909C.1.pep
MDGNGDGPAIGIDLGTXTYSCLGAWQHDRVEIIANDQGNRNTXSYGPFTXDSERLXVGDGGKNQVAMXPINTGFDDQRLIGRRLRDASVQSDIKLRPFKDISEPGDNPMIVVQHKGEEKQFAAEEISSMDLIKMREIAEAYLGSTIKNAVVTVPAYFNDSQRQATKDAXGVIAGLNELRIINEPTAAAIAYGLDKKA

SEQ ID NO: 287080 - protein, 89 aa, Zea mays
  Clone ID: MRT4577_2490C.1.pep
MIRTTMSLTRRGDAVYVFSDDRWDLDDGIPLGSGSSSNNGLYPAVEGTNRFHTAAFAGARMYRQETPDAQVFTTNFTGLRNDDVKVHLE

SEQ ID NO: 287081 - protein, 171 aa, Zea mays
  Clone ID: MRT4577_24910C.1.pep
SVVDLGTTYSCVGVWQHDRVEIIANDQCNRTTPSYVGFTDSERLIGDAAKNQVAMNPINTVFDAKRLIGRRFSDASVQSDIKLWPFKVISGPGEKPMIVVQHKGEEKQLAAEEISSMVLIKMREIAEAYLGSTIKNAVVTVPAYFNDSQRQATKDAGVIAGLNVLSIINEP

SEQ ID NO: 287082 - protein, 72 aa, Zea mays
  Clone ID: MRT4577_24911C.1.pep
SGAPVAVPGDGAVPRRGGVHSVLWHGGERGELRRIPWEREQEGHGGVPVPFFLKGWKEPLVFNVEKGTNGTD

SEQ ID NO: 287083 - protein, 98 aa, Zea mays
  Clone ID: MRT4577_24912C.1.pep
MSQPAATVAAAAQPQGRGPAGRQGGLGQSIAGIARMAALWHFASKLFGPKRPPADPGMLMSNLFHKGEPMDMWMHLPHNEKLNDLANEDALLWHEANI

SEQ ID NO: 287084 - protein, 56 aa, Zea mays
  Clone ID: MRT4577_24913C.1.pep
IGTRPEALTMRQFYKQLHAKRARLRDAGAVMPQDYTKLGPHCEPEGDCFKTRHLLL

SEQ ID NO: 287085 - protein, 51 aa, Zea mays
  Clone ID: MRT4577_24914C.1.pep
VVSFYTLTAARGGCFWIQYLPSFNLHWGNASFFGVANSALLLLSASQLFRR

SEQ ID NO: 287086 - protein, 78 aa, Zea mays
  Clone ID: MRT4577_24915C.1.pep
MTAGYIVGSLVGSFAIAYLCDTFVSDKKAFGGSTPKTVSEKEWWQATDTKFQAWPRTAGPPVVMNPISRQNFIVKSTE

SEQ ID NO: 287087 - protein, 55 aa, Zea mays
  Clone ID: MRT4577_24916C.1.pep
IMICAKDCCCNSHIGCFKALPARACCCMLAYAPKCSDTLECRCKRGNRPGEHLTH

SEQ ID NO: 287088 - protein, 185 aa, Zea mays
  unsure (1)..(185): unsure at all Xaa locations
  Clone ID: MRT4577_24917C.1.pep
ACVYRAPITRSTSAFVHTNALPHFHPRVPKYSTAPPLVVLAASTGTDTLIPECXQQYLSAVAGRXLNCPTIQGXMVQRAVQARMLKXLPQTLQQPYAMLQHPYIEHVCLQRMWNRQLLQQLLPSIKATAXGNHGGYLQXQQFLALNPPAGGNPGINLRAQQLPPCYQLAXSPYAVLPEQQIVAFH

SEQ ID NO: 287089 - protein, 231 aa, Zea mays
  Clone ID: MRT4577_24918C.1.pep
MTSISTFNDTRQVVLITGCSSGLGRAMAVEFDSLPGYRVFATARNLDSIRDLPSGIERVQLDVTDRDSIDRAIANITNETRGRIDILINNAGTNTAVGPLIDVDVDRVRKTFEPNFFGLIMVTQAVSPYMIRRRSGVIVNIGSTAGLTALPFGATYSASKAAVHALSDALRLELRGFGVKVVVVAPGAIKSSIADAGSKDLDFPPRLLLWRPSRTSIEYRANFSQPGSPTP

SEQ ID NO: 287090 - protein, 142 aa, Zea mays
  unsure (1)..(142): unsure at all Xaa locations
  Clone ID: MRT4577_24919C.1.pep
MQIXVQTLTGMTXLNLQVQSSDTIDNVKAKIQDKEGINRDQHGLIFADKKLEDGLTLADYNIXKESNLYLVLRLKRCMXIFTKTLTGKTITLEEETSDTIDNVKDMIQDKEGISPDQDWFIYAGXQLEDGRTLAKYNIHNES

SEQ ID NO: 287091 - protein, 213 aa, Zea mays
  unsure (1)..(213): unsure at all Xaa locations
  Clone ID: MRT4577_2491C.1.pep
MDCATAQRSAAFQTEPNRPQHRSATQRARALGVEGMTEASAILSFSAAAVVEDVLRQHGCRLSERDLASRRAEEAAGRRNEAAGWLRRTVGAVAARDLPEEPSEEEFRLGLRNGQILCGALNRVHLXAVPKVVVNTAADSVLQADGAALSAFQYFENVRNFLVAAQEIGLPCFEASDLEXGGKSARVVNCVLALKSYCDWXQCRGTGPWKYGG

SEQ ID NO: 287092 - protein, 45 aa, Zea mays
  Clone ID: MRT4577_24920C.1.pep
KFPLISHREKRHILTHKKKKENSVLYMFESIKHNMLTSFNSLHIC

SEQ ID NO: 287093 - protein, 93 aa, Zea mays
  Clone ID: MRT4577_24921C.1.pep
EARNSARAGIRHRLNPSGAMVSGGHRITGGPDCRPDGMEQDTKQGACGPLRPEESRDGGGQPSVLRRLRALVQVQEPGRRRRRAAGAGVRGKG

SEQ ID NO: 287094 - protein, 53 aa, Zea mays
  Clone ID: MRT4577_24922C.1.pep
KHPLICHTPKHESKARPYSRSLSHGLRCCMCNGRVFANMSRHSDLQKLDSRIT

SEQ ID NO: 287095 - protein, 125 aa, Zea mays
  Clone ID: MRT4577_24923C.1.pep
MAAAVSFSRVRALPTWSSSVSGDDHHRSYSAALAMSVSVRPRCRARSPARMMGNVNAGKGLFAPLVVVARNIIGRKRFNQLRGKAIALHSQVITEFCKTIGADSKQRQGLIRLAKKNGEKLGFLA

SEQ ID NO: 287096 - protein, 272 aa, Zea mays
  Clone ID: MRT4577_24924C.1.pep
MEAWPPLAPAAAVAATPVAASDDAAVTPAGSGAWGPAATAQRKAVEQESAAQAVSRIVASCANSSGVAVAVVDANAVISGAPALSTSAGRLVTVPEVLEEVRDAAARRRLGLLPIPVETVDPAPEFVKKVTKFARETGDIQTLSDVDIKIIALAYMLEAEIHGSSHLREHPPPLLEVNVRKLSEAPLPGWGSNVPNLKEWEELDQMSEAGGDINSRILPLKDIENQDLPMSETNSVCEAQEDTEDQPSEKDAPVAWEEDENNVGWMPAVSRS

SEQ ID NO: 287097 - protein, 49 aa, Zea mays
  Clone ID: MRT4577_24925C.1.pep
LARLHAFRQVSECRRVGISFLLASRYTKHVRPKSAVHFFPCAPSPVHAS

SEQ ID NO: 287098 - protein, 570 aa, Zea mays
  Clone ID: MRT4577_24926C.1.pep
MEAWPPLAPAAATPACALAWGAAATAQRKAVEQESAAQAVSRIVASCANSSGVAVAVVDANAVISGGSALSTSAGRLVTVPEVLEEVRDATARRRLGLLPVPVETVEPAPEFVKKVTKFARETGDIQTLSDVDIKIIALAYMLEAEIHGTSHLREHPPPLHEVNVRKLSEAQMPGWGSNVPNLKEWEELDQMSEAGGDINSRILPLKDIENQDLLMSDTNSVCEAQEDTEDQPSEKDAPVAWEEDENNVGWMPAVSRSTHRRYLRRKARRDALKESGQSFETSSVAASIDSDKVLSENGGLEHGLTSTGGLSSVPEKISASSDGLELQADADPEIAGEQLHSDQLSYGDDTDACTKELDKLDIKGEDEGGDDAHSVDYESSEQSWALRSLSESTIACVTSDYAMQNVILQIGLRLIAPGGMQIRQMHRWVLRCHACYKVTQEVGKIFCPKCGNGGTLRKVSVTVGENGITMASRRPRVTLRGTKFSLPMPQGGRDAITKNPILREDQLPQKVLHPKLKKSSKADDFLGVEDIFSHSGDKKASLKPPVGKALAMFSGKRNPNDNHFSRKKH

SEQ ID NO: 287099 - protein, 47 aa, Zea mays
  Clone ID: MRT4577_24927C.1.pep
PTGTVGTGRCLRLAARPPFHGKAASSPSASARSLRSPDFFRSLTSSA

SEQ ID NO: 287100 - protein, 175 aa, Zea mays
  Clone ID: MRT4577_24928C.1.pep
KKKKKKKKKKKKKKKKKKKKKKKKKKNHKKKKKKKKKVFSFGRPPFWGVFWGFPSPWGPFGLPFWGPISPFWGSFSISLAGFFHLGAWETLGFPHFFPFGAFPLFPGWVFREGAPPVRLSHLLPTFFGNGPPLFRPLYPRGLWGFPPGGPFLLPGPFPPLFSFFPFLFFPLWRFF

SEQ ID NO: 287101 - protein, 169 aa, Zea mays
  unsure (1)..(169): unsure at all Xaa locations
  Clone ID: MRT4577_24929C.1.pep
MSRRLDIPEKLLHEAAVHEGTTQINTGYVQPXPWVHCHDKXNCQLENITFTAKDVKVPHLEHAFITLIRLRFMIIPDMLRNAPMLQRLEATIIXKDAAIVVVRGRAVAMRARPASVRDVAAAALGTAPPVRREILWRHVAFRVWLRMVQSDARTLSWQAKLPECIIQRS

SEQ ID NO: 287102 - protein, 55 aa, Zea mays
  Clone ID: MRT4577_2492C.1.pep
RPTRKPSFFSPLLFDSKSYISPLTRVNSITPAHTVHPNLYLHPLLNYYPIKIFDH

SEQ ID NO: 287103 - protein, 133 aa, Zea mays
  unsure (1)..(133): unsure at all Xaa locations
  Clone ID: MRT4577_24930C.1.pep
SGLHEQSIQLTPVEQKINPLPKGKLGGXFHPYTPSYYTQRHKHKGRGFLKFLKPPPCLMISLFLPCFLEGGKENAVLAYSGLQTSSAHRWFPWVPAAVPSCPLLPLGPCDPRGALPGRSFPPRNLLPRVGVLG

SEQ ID NO: 287104 - protein, 481 aa, Zea mays
  Clone ID: MRT4577_24931C.1.pep
MDFSAGSYFSSWPVNSASESYSLADGSVESYGGEGIMPPSSYFMTARSDHNLKFSVHEQDSTMLPNDQLTYAGARQTDLLPGETPSRDKLCENLLELQRLQNNSNLPSNLVPPGVLQHNSTPGAFHPQLNTPGLSELPHALSSSIDSNGSEVSAFLADLNAVSSASALCSTFQNASSFMEPVNLEAFSFQGAQSDSVLNKTTHPNGNISVFDSAALASLHDSKEFISGRLPSFASVQETNVAASGFKTQKQEQNAVCNVPIPTFTARNQIAVAAMPGSLIPQKIPSWINENKSEGPVSHPSDVQIQPNSVGNGVGVKPRVRARRGQATDPHSIAERLRREKISDRMKNLQDLVPNSNKADKASMLDEIIDYVKFLQLQVKVLSMSRLGAPGAVLPLLAESQTEGYRGQLLSAPTNAQGLLDTEESEDTFAFEEEVVKLMETSITSAMQYLQNKGLCLMPVALASAISTQKGVSAASIPPEQ

SEQ ID NO: 287105 - protein, 128 aa, Zea mays
  unsure (1)..(128): unsure at all Xaa locations
  Clone ID: MRT4577_24932C.1.pep
KKKKKKKKKKKQPTLPLPRLLSRASLTFIQEGGTLYSRLVRXPSDVTRXRPRRPCPPPLFXLSFVRGRRRGGRGRRGGFSSSSAPTXAVXLYIFFLFYNKNKNKKKKKKRKKKDNKNTTPPPPXPPPR

SEQ ID NO: 287106 - protein, 70 aa, Zea mays
  Clone ID: MRT4577_24933C.1.pep
VGLGSLKVSRLSLLAPPLLSSPSPGWCSLLYSSGISFLTGVSHGASSSMKGSSLSCGALASFRGPSPGFH

SEQ ID NO: 287107 - protein, 194 aa, Zea mays
  Clone ID: MRT4577_24934C.1.pep
LPTLYSIRALLHSSATLSFLSSAVTHGSSSMSLFHCSGGIDAAAALSHIWCGLERRKGESHYAPGHMEAQEVGHPCRERIESTMARIIRSPRNRAGSTEAAHGLRDFREDGADVLAPQRSVPTSLQSTQANVSPFGPTRQWPIARAAFSGPRVGKHEIGPKSREGAQLGSFSFLFFFYFSVFLTHKYFEFKFNF

SEQ ID NO: 287108 - protein, 93 aa, Zea mays
  Clone ID: MRT4577_24935C.1.pep
CGFPFPPGAGFGLGFALLGVGLGSFCFGRQCFGFPPWGGGGPGFFVLFPIFCCHALGCGSFFTIKQYSYNIFLKKKKKKKNKKKKKKKKKKSL

SEQ ID NO: 287109 - protein, 88 aa, Zea mays
  Clone ID: MRT4577_24936C.1.pep
FFCEQPGGHPGEHDVVCDSCDVPTTPLDRVRRKTIRRPPLRAGRKYHTGMGCNRGAIWDSESLIQESSQHKVLELIHMSKQRNLCRYL

SEQ ID NO: 287110 - protein, 55 aa, Zea mays
  Clone ID: MRT4577_24937C.1.pep
PPPPPFFFLVSSFATVGCFLGRFWCIIWTGYRFFSEGQNLIGPFPWCVLSAEHTL

SEQ ID NO: 287111 - protein, 119 aa, Zea mays
  Clone ID: MRT4577_24938C.1.pep
PQVPPAFGAELDSGVVQEDADRARKGPLSNHDKTSVCLSFAGLVGLVQNFRSRESYECDCREPEHLSAHGCRWSSVSGCIDRCLSPVTSYPSRMQILWRGNGTSLDQHKYPSNKTIKEP

SEQ ID NO: 287112 - protein, 75 aa, Zea mays
  Clone ID: MRT4577_24939C.1.pep
VILNVNYIHVIFYPGTNPYICGFQIKQQNPFGKHFYKKFSLNVKTGKTKFGAKKTITTIFLSIKLTPLAVSLFKL

SEQ ID NO: 287113 - protein, 34 aa, Zea mays
  Clone ID: MRT4577_2493C.1.pep
SEQRFKMTNAIKPSLLKEPKRPEPYYENSPPLKT

SEQ ID NO: 287114 - protein, 168 aa, Zea mays
  unsure (1)..(168): unsure at all Xaa locations
  Clone ID: MRT4577_24940C.1.pep
PSARVKPXTIXNIMDMKANFGSFAAALKRKXVWVMNVVPHDGPSTLKIIYDRGLIGSNHDWCEAFSTYPRTYDLLHAWAVFSDLDKRGCSAEDLLLEMDRILRPTGFAIVRDKGTVIEFIKKYLHALHWEALTVVDAEPSPESEESEMILIIRKKLWLPKAGPQDSGT

SEQ ID NO: 287115 - protein, 576 aa, Zea mays
  unsure (1)..(576): unsure at all Xaa locations
  Clone ID: MRT4577_24941C.1.pep
MAERLTRIAIVSEDKCKPKKCRQECKKSCPVVXIRKCPFDAIEIINLPKDLEKDTTHRYGPNTFKLHRLPVPRPGQVLGLVGTNGIGKSTALKVLAGKLKPNLGRFKNPPDWQEILTYFRGSELQNYFTRILEDNLKAIIKPQYVDHIPKAVQGNVGQVLEQKDERDMKSELCVDLELNQVIDRNVGDLSGGELQRFAIAVVAVQNAEIYMFDEPSSYLDVKQRLKAAQVVRSLLRPNSYVIVVEHDLSVLDYLSDFICCLYGKPGAYGVVTLPFSVREGINIFLAGFVPTENLRFRDESLTFKIAETQENAEEIETYQRYKYPTMSKTQGNFKLTVVEGEFTDSQIVVMLGENGTGKTTFIRMLAGLLKPDTVEGTDIEIPEFNVSYKPQKISPKFQNTVRHLLHQKIRDSYMHPQFVSDVMKPLQIEQLMDQEVVNLSGGELQRVAICLCLGKPADIYLIDEPSAYLDSEQRIVASKVIKRFILHAKKTAFIVEHDFIMATYLADKVIVYEGRPSIDCTANAPQSLVSGMNKFLSHLDITFRRDPTNYRPRINKLESTKDREQKSAGSYYYLDD

SEQ ID NO: 287116 - protein, 91 aa, Zea mays
  unsure (1)..(91): unsure at all Xaa locations
  Clone ID: MRT4577_24942C.1.pep
AEKPGRRRVRAVLHNIQRGGFTVAGIXPHRVVFLGKKRSLNKHHLTSIPIVLCGAAPLGKDLHDTLLARVAQDDFRQGYGMTEDRPWLFIC

SEQ ID NO: 287117 - protein, 604 aa, Zea mays
  Clone ID: MRT4577_24943C.1.pep
MAERLTRIAIVSEDKCKPKKCRQECKKSCPVVKTGKLCIEVTSASKLAFISEELCIGCGICVKKCPFDAIEIINLPKDLEKDTTHRYGPNTFKLHRLPVPRPGQVLGLVGTNGIGKSTALKVLAGKLKPNLGRFKNPPDWQEILTYFRGSELQNYFTRILEDNLKAIIKPQYVDHIPKAVQGNVGQVLEQKDERDMKSELCVDLELNQVIDRNVGDLSGGELQRFAIAVVAVQNAEIYMFDEPSSYLDVKQRLKAAQVVRSLLRPNSYVIVVEHDLSVLDYLSDFICCLYGKPGAYGVVTLPFSVREGINIFLAGFVPTENLRFRDESLTFKIAETQENAEEIETYQRYKYPTMSKTQGNFKLTVVEGEFTDSQIVVMLGENGTGKTTFIRMLAGLLKPDTVEGTDIEIPEFNVSYKPQKISPKFQNTVRHLLHQKIRDSYMHPQFVSDVMKPLQIEQLMDQEVVNLSGGELQRVAICLCLGKPADIYLIDEPSAYLDSEQRIVASKVIKRFILHAKKTAFIVEHDFIMATYLADKVIVYEGRPSIDCTANAPQSLVSGMNKFLSHLDITFRRDPTNYRPRINKLESTKDREQKSAGSYYYLDD

SEQ ID NO: 287118 - protein, 604 aa, Zea mays
  Clone ID: MRT4577_24944C.1.pep
MAERLTRIAIVSEDKCKPKKCRQECKKSCPVVKTGKLCIEVTSASKLAFISEELCIGCGICVKKCPFDAIEIINLPKDLEKDTTHRYGPNTFKLHRLPVPRPGQVLGLVGTNGIGKSTALKVLAGKLKPNLGRFKNPPDWQEILTYFRGSELQNYFTRILEDNLKAIIKPQYVDHIPKAVQGNVGQVLEQKDERDMKAELCVDLELNQVIDRNVGDLSGGELQRFAIAVVAVQNAEIYMFDEPSSYLDVKQRLKAAQVIRSLLRPNSYVIVVEHDLSVLDYLSDFICCLYGKPGAYGVVTLPFSVREGINIFLAGFVPTENLRFRDESLTFKIAETQESAEEIETYQRYKYPTMSKTQGNFKLTVVEGEFTDSQIVVMLGENGTGKTTFIRMLAGLLKPDTVEGTDIEIPEFNVSYKPQKISPKFKNTVRHLLHQKIRDSYMHPQFVSDVMKPLQIEQLMDQEVVNLSGGELQRVAICLCLGKPADIYLIDEPSAYLDSEQRIVASKVIKRFILHAKKTAFIVEHDFIMATYLADKVIVYEGRPSIDCSANAPQSLVSGMNKFLSHLDITFRRDPTNYRPRINKLDSTKDREQKSAGSYYYLDD

SEQ ID NO: 287119 - protein, 72 aa, Zea mays
  Clone ID: MRT4577_24945C.1.pep
IASGRPFFFFLFSFLGVFFGQRRGFFLLPTHTKKGLTFFYWFTSPFKGKNEWAEQECNCFVFISMLLPCAIR

SEQ ID NO: 287120 - protein, 93 aa, Zea mays
  Clone ID: MRT4577_24946C.1.pep
IRHEANFPLIRLPKPYNPSTAATMSSSPSSMNRRPPGPLALGLESLAKKKTHTGAPPLDLAVNSITRSFYGTSPSPPPSPPSPTASISPPLSL

SEQ ID NO: 287121 - protein, 107 aa, Zea mays
  unsure (1)..(107): unsure at all Xaa locations
  Clone ID: MRT4577_24947C.1.pep
EHPGAALQGVRIDWAAGADAGGGVSVXVTLPDWSLVHEQFGAPPVVPXTRTRRSPERGGGSATPGXVAGAFTVQGGGGLAGGLPDWPLDEFFGFSEYRAGLPFSEND

SEQ ID NO: 287122 - protein, 73 aa, Zea mays
  Clone ID: MRT4577_24948C.1.pep
NHRIGTIVIIRMVRGLDSLVFIISYYIKLNWTKCVHRVAIHLLCDVPNGLSMSNTASRLALLWRMCIWKTLGS

SEQ ID NO: 287123 - protein, 89 aa, Zea mays
  Clone ID: MRT4577_24949C.1.pep
RWGWSPWRRRRHIGRSSPQTSSRSSRCPPMVGYGTSCLFLWIQQPVLLLWIWRSTPSPAASMAPPLVPLHRRLHPPLLYRHLSHCRRRH

SEQ ID NO: 287124 - protein, 46 aa, Zea mays
  Clone ID: MRT4577_2494C.1.pep
CSIWTVSALIVHLFFNPIFVCVYRYRASTYGGTNDLRLIIIVSLEN

SEQ ID NO: 287125 - protein, 209 aa, Zea mays
  Clone ID: MRT4577_24950C.1.pep
MMVDRQRVRQCDIEVMKMAMLKHEETFRQQVHELHRLYRIQRELMTMTTSDDLTGAKPVTTPRRRSKQPRRALPLGLQLPADEYIASADEDEDAAAGTELELTLAVGGRCSPDGRRKSDRRRRRRQAAEPRDDAGAVSSPFGPDCSGASVLSSPSSAEYCSDDGPAAAFHAPPPPCQRAVAFDLEESMMMRQHAPWLLQCRQYLTLRMT

SEQ ID NO: 287126 - protein, 45 aa, Zea mays
  Clone ID: MRT4577_24951C.1.pep
FVVAALLGISRYAGCNTFFGFRICNLLKTYLDAVTELRNRWVPKF

SEQ ID NO: 287127 - protein, 86 aa, Zea mays
  Clone ID: MRT4577_24952C.1.pep
MARQRQVAFMLAAALLVATTFAYIPTTVHCIGVCYGTLGNNLPFIIDVGQLYRCKGMKGMRIYFADAKDLDNLRNYGIRLILNTVN

SEQ ID NO: 287128 - protein, 135 aa, Zea mays
  Clone ID: MRT4577_24953C.1.pep
VGSFQQIFCFPRPYRGQKALFPNKKKNPEPGLPTRKGGAPDRDLIDKTFFLAEGEIPHFWVPHTPNHGGGGEREINSATSLDRLTGAMEPPTKNPPPKQISVPPPQTEPSPPLVGRDLCRDIFRDLRFGPGTFLC

SEQ ID NO: 287129 - protein, 226 aa, Zea mays
  unsure (1)..(226): unsure at all Xaa locations
  Clone ID: MRT4577_24954C.1.pep
GFPNFLAAVAAFHHPQPSSRPSPSSILSRRRDLPPPAHVAVRRPILSYRRGSPSTAATVVTAFPHLSASPSAAVAFFCAPPSWSSLSHCRRHTADLCPRRRPPDFAQGGITDLCPRISARAAVRRTSRREAVADLHPPAPTVQGALQCSCRCRRYAAQGFLPLVAVADLCCRRTSAPLRHCPCPNSALMRSRCNDALLRSRCICCSTATLHVLXQNCSRRILYSSA

SEQ ID NO: 287130 - protein, 123 aa, Zea mays
  Clone ID: MRT4577_24955C.1.pep
GPRYSTQYHLPISSTVRLRIRTIVLRINSTTTTRPRKQHQQQPCTMQLPRRLRRQIPRSIHLRYRLVIPPNNTRSIRSRTLIKNSISINSLRSRINSKIRSLSGTPKPTLTRRLRRRLINPST

SEQ ID NO: 287131 - protein, 182 aa, Zea mays
  unsure (1)..(182): unsure at all Xaa locations
  Clone ID: MRT4577_24956C.1.pep
MYSLHNINYYSEFPLLSVVGKWAGALEVDLGSWTVSMLRAEVARRVGDGVEPECVGLIFGGRVLKDDPPASLREAGLKANAKVLSSLTSPDRAKEIDAQAAKAKAEEEHAAKLVRLWEAAKALSQRHTDGSYLAEEDYNLDLEDQSGQKVMFGSVDDKKAXATMSLILHQKSKTHINNVIYN

SEQ ID NO: 287132 - protein, 84 aa, Zea mays
  Clone ID: MRT4577_24957C.1.pep
PVLRAHEVPTTAQGGSVAVACLRREILDSPTVTSPESFPHTLLMFGQTSWLTSEARRRSERSSRSGDSSLSRSDGSTCVTALGA

SEQ ID NO: 287133 - protein, 66 aa, Zea mays
  Clone ID: MRT4577_24958C.1.pep
CKREKSSFSTKFLVEPKMPHLFRGVWFLKSHIINALDGKRKKCCSVNIKLGFSPKNDFYQAANFWS

SEQ ID NO: 287134 - protein, 196 aa, Zea mays
  unsure (1)..(196): unsure at all Xaa locations
  Clone ID: MRT4577_24959C.1.pep
CIRNAVRINQALCPQITESESLVESFLTAFPSVSPLSAHMILXXSGSLNGXFXXMVHMSXXXLRRVEKYHLPPQSISLFSALCKFGELGESKSVMTECSSVDSDISSTLLQSPRKKKRRAAQDFSVAVSNPAFPNPCTQLHGDCVENDKIFSPPNLRKFFHIEDTMSDLPEVFMIDQRLNMGSRCLVSQESMMWML

SEQ ID NO: 287135 - protein, 82 aa, Zea mays
  Clone ID: MRT4577_2495C.1.pep
PRVRKESAESTMVAYKAAQDIALAELPPIHPIRLGLALNFSVFYYEIQNSPDKACNLAKEVGVHLSFYCCTGFLSYNYLRCC

SEQ ID NO: 287136 - protein, 98 aa, Zea mays
  unsure (1)..(98): unsure at all Xaa locations
  Clone ID: MRT4577_24960C.1.pep
MASGQESMKELDRKGREGETVFPGGTGCKSVYAQXTSPKGASXGGHTCMEQLGQHGYSXIGKKGCLSTTDKSCGERALRDGVIIYEFKFTKYSYRVRA

SEQ ID NO: 287137 - protein, 100 aa, Zea mays
  Clone ID: MRT4577_24961C.1.pep
KGKKKFKKSVGPFKFSIFKVLNQGPPNMGIWSKAMSTMNPFIKDIFEKPPAESPKLARYNKKPPVPPRGVQTPGGLGPPGGLAKHPVSGGPKAGPRFPPF

SEQ ID NO: 287138 - protein, 145 aa, Zea mays
  Clone ID: MRT4577_24962C.1.pep
MGKGKPRGLNAARKLRNHRREGRWADLHYKKRLLGTAFKSSPFGGSSHAKGIVLEKVGVEAKQPNSAIRKCVRVQLIKNGKKVTAFVPNDGCLNFVDENDEVLLAGFGRKGKAKGDIPGVRFKVVKVSGVGLSALWKEKKEKPRS

SEQ ID NO: 287139 - protein, 611 aa, Zea mays
  unsure (1)..(611): unsure at all Xaa locations
  Clone ID: MRT4577_24963C.1.pep
MDLLDARHRHTPDLSSSQDAASNMGLPLAGAAYQPYVSELLSFSIERLHKEPELLRVDAERVRRQMQEVAVENYAAFIAASEALSFVRAQLESFDGHLEAMIEEIPNLTSGCTEFVESAQQILEERKLNQTLLANHTTLLDLLEIPQLMDTCIRNGNYDEALDLEAFVSKIXAAQGSPDLPKXQLGATEIKKSVXSALSQQSLXSNILSRVTWASDEHLRXIEVFSGSQLRLQFLRCREAWLSXIFIDXSPKARFGLAKKRXNSPKVYIIRDFYIVLFTXSNSVNKVTLDXYLTFFLTRAIQQVSNHLGYLQVMVPSITKGGSLFNILGVHHFCSMGLGLDGFDFRGLLSPILEEXWCLNYXFITDSKGALLLMLLSAFCSAVLNLFSKNMSTAVVNFQVVLDSHCWVPMPSVGFVANGVVDETSDDVTPPSVLMEHPPLAVFVNGVSAAMNELRPCAPLSLKVVLAQEVVKGLHAVSDSLVRYKAMRMLRGNESALFLSLCQAFIEVVHPYCAACFGRCYSNGATLISECQGTLDAVRQLLTIPARSNSSSIERKQSGAIERKQSVESSGTAVTDNELSADGPGLEINDAATTTTPPVEDDVSTHPPGSK

SEQ ID NO: 287140 - protein, 354 aa, Zea mays
  unsure (1)..(354): unsure at all Xaa locations
  Clone ID: MRT4577_24966C.1.pep
MGKEGVVAGPPAEGSKSRPECINSSNPYHECTDYCLRKIAEARQRLDDELPDSWQRPPEHRTVHRDCINASNPYHECSDYCFKRIADAKSGLERGXSNSHQLTWPPLPARLMXEQQQQLEDNDADGQEXQPRMTATXQMTEKQKKLFELRLKMNEARKANQQAMVAEKKRMEPRGESRGVSKQKWLDDRKKKIGKLLDSNGLDMKMAYMLDTQETAEAKYKKWEKEPAPYGWDVFNQKTLYDAYKKRTKNIEVDMEAYNKAKEADPEFYRDASSLQYGKVSNVPEENIDKMVKELKEREEKRKSFSRRRKFNEDKDIDSINDRNEHFNKKVERAFGKYTLEIKNNLERGTALPD

SEQ ID NO: 287141 - protein, 113 aa, Zea mays
  Clone ID: MRT4577_24967C.1.pep
CQAFIEVAYPYCAACLADATQNGATLISERQGTFDAVRQLLTVPARSNSSSIERRQSGGIERRQSGAIERKQSVESTGIAVTDNGLSADGPGLETNSSAATTTLTGRRRSTSE

SEQ ID NO: 287142 - protein, 358 aa, Zea mays
  Clone ID: MRT4577_24968C.1.pep
MGKEGVAAGPAAEGSKSRSECINSSNPYHECSDYCLRKIAEARQRLDDELPDSWKRPPEQRTVHPDCINASNPYHECSDYCFKRIADAKSPACGAGLEREERQPPADVFAAAGMSDAVEQHRPIDNDSDEQEGAGPDDGYPQMTEKQKKLFELRLKMNEARKANQQAMVAEKKRMEPRGESRGVSKQKWLDDRKKKIGKLLDSNGLDMKMAYMLDTQETAEAKYKKWEKEPAPYGWDVFNQKTLYDAYKKRTKNIEVDMESYNKAKEADPEFYRDASSLQYGKVSNVPEENIDKMVKELREREEKRKSFSRRRKFNEDKDIDSINDRNEHFNKKVERAFGKYTLEIKNNLERGTALPD

SEQ ID NO: 287143 - protein, 42 aa, Zea mays
  Clone ID: MRT4577_2496C.1.pep
VPANQNLYKLEKQGLGIVSYLNSRKKERSLSVLVFHSLYTLS

SEQ ID NO: 287144 - protein, 111 aa, Zea mays
  Clone ID: MRT4577_24970C.1.pep
KYQLGGHIPMFTHRVWRTHDGHCQRVGIAVFILVHCAGERIFIQHGLRTVGVDIRRQAQGAQEAMVVALITVPAGIPYHRASQVAARWLETASHPPPVLLPSGGAVRVGRP

SEQ ID NO: 287145 - protein, 104 aa, Zea mays
  Clone ID: MRT4577_24971C.1.pep
WFGRCYPDGATLISECQGTFDAVRQLLTVPARSNSSSIERRQSGGIERRQSGAIERKQSVESTGTAVTDNGLSADGPGLETNSSAATTTSPVDDGGSTHPPASK

SEQ ID NO: 287146 - protein, 82 aa, Zea mays
  Clone ID: MRT4577_24972C.1.pep
LFIISGVPKFVPANAASRLGFQDQKVALVNDLCHDAVLLVDFISLRCITSLQCNHYRLMLNSIKLRQCLVPLSTCQWSCCEL

SEQ ID NO: 287147 - protein, 37 aa, Zea mays
  Clone ID: MRT4577_24973C.1.pep
SKLLLFVVPILVSISVVACDLIYGHNYICHTNSVYDY

SEQ ID NO: 287148 - protein, 100 aa, Zea mays
  unsure (1)..(100): unsure at all Xaa locations
  Clone ID: MRT4577_24974C.1.pep
VFKPRKYAKKVDIFSFAMILYEMVEGDSPFSKYEPYEVVKYVANGHCPVFRKNHTPELKDLVXLCWFGEISFKPFFLEIPKRLXKLKEHFSPENPWHLFQ

SEQ ID NO: 287149 - protein, 324 aa, Zea mays
  unsure (1)..(324): unsure at all Xaa locations
  Clone ID: MRT4577_24975C.1.pep
MTTTLVTVDITRRTVLKPPPPASSRGGGGSLSRLTSFDRASTDGYIPTVFAWYAPAPDNEAIVDGLLAVVARYPHLSARMGVDDRGRKCFLLNDAGVLVVEATADADLADALVAHDVTAHINELYPKADKEREDEPLFQVQLTRYTCGGLVIGTVCQHLVADGQSMSSFYAAWATAVRSASAADLPSPFTDRAAIAVPRNPPVPRFDHRNIEFRGEHSPSRPYDVLPMDRIKNLGINFREQFIADLKARVGGRCTTFQCPLAHVWKXKVTAARDLAPEEFTQIRVAVNCRGRADPPVPMEYFGNMVLWAFPRMQARELLSSSYA

SEQ ID NO: 287150 - protein, 127 aa, Zea mays
  unsure (1)..(127): unsure at all Xaa locations
  Clone ID: MRT4577_24976C.1.pep
SGPAGPGTTNHCTNSADHMHQEEPPLFSQLCLRAYFSCRNKSLTFTQCAGVNPADNFQXQILPPGAQLDTTSLAFFLTQQTTXPSYQKFEVNPATLSQLQQSLPFXQLALTKPAAFYQQHIIGGALF

SEQ ID NO: 287151 - protein, 68 aa, Zea mays
  Clone ID: MRT4577_24977C.1.pep
SPHVFSVSGLIIYVYRVIILPWKLVSGCLHQWISQLCPPVQGPGGLPLNFGPVPASIPIFPIKSLIPG

SEQ ID NO: 287152 - protein, 88 aa, Zea mays
  Clone ID: MRT4577_24978C.1.pep
GKNTDGATPSHRGTTKPWPADLRWTRACTVLPPPTALSDPGALSSKRTLMISMADPLLMPCLRLSSTLSNMLALGCYNTNHCLRLDNG

SEQ ID NO: 287153 - protein, 57 aa, Zea mays
  Clone ID: MRT4577_24979C.1.pep
PARLHSPTTVTHHITATREREREKDGWFLHHLHFQHFHSMYNPNQILKITLQSNPNN

SEQ ID NO: 287154 - protein, 82 aa, Zea mays
  Clone ID: MRT4577_2497C.1.pep
LIPALVAPTAESFESLWTRIQVWAGARSRWAPGKLPVYAVRRPPRGVLSPGGGKTVARTKPPIVLFQGRRYTRRVDPPGIFR

SEQ ID NO: 287155 - protein, 74 aa, Zea mays
  Clone ID: MRT4577_24980C.1.pep
LGREGGFDRMRYREIEILFFPGEQDVCCYVLAGIGEGNLGLKTIWVVGVVVYICCRRCYVLESFRRTFETFVRL

SEQ ID NO: 287156 - protein, 38 aa, Zea mays
  Clone ID: MRT4577_24981C.1.pep
HADTNVGTHYIHDGGWSNILAIITLCRVRVLITLPLRS

SEQ ID NO: 287157 - protein, 168 aa, Zea mays
  unsure (1)..(168): unsure at all Xaa locations
  Clone ID: MRT4577_24982C.1.pep
MGQQSLIYAXVARGTVVLAEYTEFTGNFTTIAAQCLQKLPASNNKFTYNCXNSLKREFGPKLKEHMQYCXXHPEEVSKLAKVKAQVSEVKGVMMETXEKVLDRGEKIELLVDKTENLRSQAQDFRQQGTNXRRKMWLQNMKIKLIVXGLIIALTSSHSLSVCHGFKCA

SEQ ID NO: 287158 - protein, 175 aa, Zea mays
  Clone ID: MRT4577_24983C.1.pep
MGIGRSTVAAARMGQGCLYLPKIDLHMIGSKDHTDVSTTNIIKPTLEALLADDQQPFDDLVRRKEEEVLQQAEWRKKAKEKIPITLHGGSPLEDHPSRIACDLLWSTDTARLRRGTSGIFYRTIRLNIGSRADHPGKAIYGRPSRYNLGPFGQVTDHLTPYVRPSRYSYIEQGAA

SEQ ID NO: 287159 - protein, 222 aa, Zea mays
  Clone ID: MRT4577_24984C.1.pep
MGQQSLIYAFVARGTVVLAEYTEFTGNFTTIAAQCLQKLPASNNKFTYNCDGHTFNYLVEDGFTYCVVAVESVGRQIPIAFLDRVKEDFTKKYGGGKAATAAANSLKREFGPKLKEHMQYCVDHPEEVSKLAKVKAQVSEVKGVMMENIEKVLDRGEKIELLVDKTENLRSQAQDFRQQGTNVRRKMWLQNMKIKLIVLGIIIALILIIILSVCHGFKCGSK

SEQ ID NO: 287160 - protein, 51 aa, Zea mays
  Clone ID: MRT4577_24985C.1.pep
HELVKRCHKPDRKEFTKVAARTAIGFVVMGFVGFFVKLIFIPINNIIVGSG

SEQ ID NO: 287161 - protein, 67 aa, Zea mays
  Clone ID: MRT4577_24986C.1.pep
MGDVLWNLEYALQLQDANPPEGGDSDGNSDGATAEGGAIVPAGGAVPDASTAAAGELFQQLADMKGR

SEQ ID NO: 287162 - protein, 77 aa, Zea mays
  Clone ID: MRT4577_24987C.1.pep
SENIEKVLDRGEKIELLVDKTENLRSQAQDFRQQGTNVRRKMWLQNMKIKLIVLGIIIALILIIILSVCHGFKCGSK

SEQ ID NO: 287163 - protein, 223 aa, Zea mays
  Clone ID: MRT4577_24988C.1.pep
MGQQSLIYAFVARGTVVLAEYTEFTGNFTTIAAQCLQKLPASNNKFTYNCDGHTFNYLVEDGFTYCVVAVESVGRQIPIAFLDRVKEDFTKKYGGGKAATAAANSLKREFGPKLKEHMQYCVDHPEEVSKLAKVKAQVSEVKGVMMENIEKVLDRGEKIELLVDKTENLRSQAQDFRQQGTNVRRKMWLQNMKIKLIVLGIIIALILIIILSVCHGFIKGGSK

SEQ ID NO: 287164 - protein, 198 aa, Zea mays
  Clone ID: MRT4577_24989C.1.pep
MTSSASAPASNGPRYAPPDPTLPKPWRGLIDGNTGYLYFWNPETKVTQYERPVAAVPNSPPQPPGYSRPEERPRSSTPSERSSETTVSRPQYAPLSDNRARNDHSEAASGNQMSTEAYRAKHEITIIGNESPAPFMTFQSTCFPSDILREVLQAGFSAPTPIQAQSWPIAMKGRDIVPVAKTGSGNTLGYLLPGFILL

SEQ ID NO: 287165 - protein, 62 aa, Zea mays
  Clone ID: MRT4577_2498C.1.pep
NKVHQNLTLSNKRFKLFFLFTQIQLTILFGSSISSSPAIPLLPVSHFTLHASSSPPPHTRVA

SEQ ID NO: 287166 - protein, 75 aa, Zea mays
  Clone ID: MRT4577_24990C.1.pep
HGERDRLGTVTTYHSSGSPVVIVWVILVLVFLLQVLRRVGDDIEIVEFLHVLMSISFFSIVGSREAPYLIVAFGG

SEQ ID NO: 287167 - protein, 670 aa, Zea mays
  unsure (1)..(670): unsure at all Xaa locations
  Clone ID: MRT4577_24991C.1.pep
MASSASAPASTGPRYAPPDPTLPKPWRGLIDGNTGYLYFWNPETKVTQYERPVAAVPAPQSQPPVYSRPDDGPRSSAPAEQRSEAVVSRPQYVPPSDNRTRNDHSESSSASGVNLSQSALSTNQVSQDASGSQMSTEAYRAKHEITIIGNESPAPFMTFQSTCFPSDILREVLQAGFSAPTPIQAQSWPIAMKGRDIVAVAKTGSGKTLGYLLPGFILLKRLHHNSREGPTVLVLSPTRELATQIQDEAIKFGRSSRISSTCLYGGAPKGPQLRELERGADIVVATPGRLNDILEMNRVSLHQVSYLVLDEADRMLDMGFEPQIRKIVKQIPPKRQTLMYTATWPREVRKIASDLLANPVQVNIGNTDQLVANKSITQHVEVIPHMEKSRRLDQILRSQDPGSKSIIFCSTKRMCDQLARNLSRQYGASAIHGDKSQAERDSVLNDFRSGRCPVLVATDVAARGLDIKDIRIVVNYDFPTGVEDYVHRIGRTGRAGATGSAYTFFGDQDSKYASELVKILEGANQSVPPQLKEMALRGGYGGRSRRWASSDDSYGSQGYGAKRSTDSFNNSSFGNQAGGGSSFHSSFNTXSGNQFGDTTSFHGSNMSATIRRGTMRAFHXSSSNNQSGDGLSFHERFYGSRGRDQSRTSNDGFRARSRSPPGKPVEVSNW

SEQ ID NO: 287168 - protein, 89 aa, Zea mays
  Clone ID: MRT4577_24992C.1.pep
HIYKRSPAVIVERREDLVQTFLGWHLAVRRVAGLGRAPVGRRWGPVRPRRARRGSRSREPGTRPWEGDRDGVEEGAGEIHHRWLCSLVR

SEQ ID NO: 287169 - protein, 672 aa, Zea mays
  Clone ID: MRT4577_24993C.1.pep
MTSSASAPASNGPRYAPPDPTLPKPWRGLIDGNTGYLYFWNPETKVTQYERPVAAVPNSPPQPPGYSRPEERPRSSTPSERSSETTVSRPQYAPLSDNRARNDHSEPHYASGVNLSQSAPSTNQVSQAASGNQMSTEAYRAKHEITIIGNESPAPFMTFQSTCFPSDILREVLQAGFSAPTPIQAQSWPIAMKGRDIVAVAKTGSGKTLGYLLPGFILLKRLHHNSREGPTVLVLSPTRELATQIQDEAIKFGRSSRISSTCLYGGAPKGPQLRELERGADVVVATPGRLNDILEMNKVSLRQVSYLVLDEADRMLDMGFEPQIRKIVKQIPPRRQTLMYTATWPKEVRKIASDLLNNPVQVNIGNTDQLVANKSITQHVEVIPHMEKSRRLDQILRSQDPGSKIIIFCSTKRMCDQLARNLSRQYGASAIHGDKSQAERDSVLNHFRSGRCPVLVATDVAARGLDIKDIRIVVNYDFPTGVEDYVHRIGRTGRAGATGSAYTFFGDQDSKYASELVKILEGANQSVPPQLKEMALRGGYGGRSRRWASSDDSYGSQGYGAKRSTDSFKNSSFGNQAGGGSSFHSSFHNSSSGNQFGDTTSFHASYGNSSQNNQTGDNPSFPPSSSNNQSGDGLSFHERFYGSRGRDESRSNNDGFRARSRSPGKPVEVSNW

SEQ ID NO: 287170 - protein, 273 aa, Zea mays
  unsure (1)..(273): unsure at all Xaa locations
  Clone ID: MRT4577_24994C.1.pep
MAAPLLFYDLGLLASSSSGDGRDGNSSSSRLQLLAATARALELGYAGVALDHHHRGLLADSHVCRTDTFAPLSSLPLPSSAALHRRRLASPASEAFRQYTRITLSLDSAAATASALAPSAARLLRTYDLVAARPLTQAAFDHLCQTPLSAQHLDLISIDFSSHGKMPFRIKPPMLKLALQKGLHFEIAYSPLLSTDVNDKRNLIAQVKLLVDWTKGKNLIISSAAHTASQIRGPYDVINLSAYLLGIPIDRAKAAMSTSCRSLVXEAMRKKTF

SEQ ID NO: 287171 - protein, 68 aa, Zea mays
  Clone ID: MRT4577_24995C.1.pep
RANETRALKAPVQGPCKRVCRLSSCCEGRWARACSVLRERPTAACPSRELRSARTWFSQSCWCERTAS

SEQ ID NO: 287172 - protein, 227 aa, Zea mays
  unsure (1)..(227): unsure at all Xaa locations
  Clone ID: MRT4577_24996C.1.pep
MASSASAPASTGPRYAPPDPTLPKPWRGLIDGNTGYLYFWNPETKVTQYERPVAAVPAPQSQPLVYSRPDDVPRSSAPAEQRSEAAVSRPQFVPPSDNRTRIDHSESSSASGVNLSQSALSTNQVSQYANGSQMSTEAYRAKHEITIVGNEAPAPFMTFQSTGFPSEILREVLQAGFSAPTPIQAQSWPIALRGRDIVAVAKTGSGXTLGYLLPGFILLKPLQHNSG

SEQ ID NO: 287173 - protein, 98 aa, Zea mays
  Clone ID: MRT4577_24997C.1.pep
LQNLNRVEQVGSSDGETELKSAVESSRSRVGEDEADGIDAPAQLRCKAKKKEKQRDATEGAHTTKNPRPESARGRQGMEGRSNAEPGLEPTKGAAALA

SEQ ID NO: 287174 - protein, 63 aa, Zea mays
  Clone ID: MRT4577_24998C.1.pep
LAVAHESYSTIRSSLLLEAMPKNYPLANRQDRRGSENDSCQLQALIAHNSCVPLMLLLEGHSA

SEQ ID NO: 287175 - protein, 66 aa, Zea mays
  Clone ID: MRT4577_24999C.1.pep
LLKCSRLVLALALILVLESSVQGYPTQRARYQWVRCNPDSNSANCLERKGSMFELFPGESNKIPRL

SEQ ID NO: 287176 - protein, 87 aa, Zea mays
  Clone ID: MRT4577_2499C.1.pep
EREMLRHKVPLTGLKTPFRDGYVRDLAEEVLKLAKNGLERRGYKEVGFLREVDEVVRTGVTPAERLLHLYETKWQRNVDHVFEHLLY

SEQ ID NO: 287177 - protein, 129 aa, Zea mays
  Clone ID: MRT4577_249C.1.pep
PPSSSSCKRCFPVPYPRAGRPKKWFKPAGMCFLVWGGRAWYTRPVPPLWLWLQWRPVGCFFFVTKKKRYGLGWSPGRPPGVLIPFFYPYKGEGEGSPGFMAKKKKKKKKKKKKKNPKKKRERGGGGGGG

SEQ ID NO: 287178 - protein, 56 aa, Zea mays
  Clone ID: MRT4577_24C.1.pep
VLLATVCRRRRPPLPAEHAGVASPPCIMARVGNFLAQPHALGRDVPRKPPVRELLS

SEQ ID NO: 287179 - protein, 65 aa, Zea mays
  Clone ID: MRT4577_25000C.1.pep
LPPPVRGGRCTGINISTFGPDGSWIAAHVFLSVVVVNLSPPYKLQCVMEESHVVGSAKKKKKKAA

SEQ ID NO: 287180 - protein, 77 aa, Zea mays
  Clone ID: MRT4577_25001C.1.pep
DRVGDYTVFKAMRDTWGSHFLEQAIMFLPHQRLVSINLMLANIRNPILIEAKHIVIIWKLKIIVNSYIKENRLTKSS

SEQ ID NO: 287181 - protein, 53 aa, Zea mays
  Clone ID: MRT4577_25002C.1.pep
WFLSLKLVAHGMDQSAQQVSIDCTKHPIKEASISLIDRSTLLAVFKIKKYLNN

SEQ ID NO: 287182 - protein, 61 aa, Zea mays
  Clone ID: MRT4577_25004C.1.pep
SCRSSLAHSFGSVPSFVSLVLLHTVILTQVRRYLLMYYTPETSLNHVFEDLQKPKAPNNLL

SEQ ID NO: 287183 - protein, 68 aa, Zea mays
  Clone ID: MRT4577_25005C.1.pep
CKISSLFLCGGKSVDLSLHCYTMLFLNFRDYTKSVYRSMFRSGQDISLDDCSKPDTVETETCSMEKLV

SEQ ID NO: 287184 - protein, 227 aa, Zea mays
  unsure (1)..(227): unsure at all Xaa locations
  Clone ID: MRT4577_25006C.1.pep
RPGTTAMANRTVIVDNNTWNNTHIATVGTAMASPEKVAWEIFNSLDVKYVLVIFGGLIGYPSDDINKFLWMVRIGGGVFPQIKEADYLKDGNYRVDAHSTPTMLNXSLMYKLLLFTEFLPKIDGERAFFKRGEKIFKKGKKKFLKTFPSFWGGGFPNPPPWGGGGGFQTGKPPKKKKGSGGGTPNFLSPLFKKKSFFFCKKTGGEKKKTPPPEKKKKTKKRGGGGGG

SEQ ID NO: 287185 - protein, 139 aa, Zea mays
  Clone ID: MRT4577_25007C.1.pep
TGGLGVWTPKKKKGGFGPLFPSPPPFRFPKAPWFFSNPPLFLFLREFPPPPPLFIDLFWGKKKPPPLGALFRRKKKGASGVKQKKKRGPPGKLKVLGFRRRNGPSPMLVFPPLFFPPPGGAVYKFVFRPGFQKFPPVSP

SEQ ID NO: 287186 - protein, 145 aa, Zea mays
  Clone ID: MRT4577_25008C.1.pep
MSKSGSAMKDDSTKNVVQESPEMTCQESEHQAGERQMTNVAGNSKTGIEEQKNHEGEIAVVAHMQENMDTAEKNPSCHESEVSKANVHDSVLMTEQSEREHNQPKGEFANTHVPGSPVTIPVTVSTIDGNSSNSPKKPDSAEGFL

SEQ ID NO: 287187 - protein, 66 aa, Zea mays
  Clone ID: MRT4577_25009C.1.pep
VYCAPMLFYKLSCNCKRLGLRMTLEINLFRKRERVLYVDGAKGILQPIHDYIYIHRYFLCCFRLCN

SEQ ID NO: 287188 - protein, 97 aa, Zea mays
  Clone ID: MRT4577_2500C.1.pep
PGDNYPVLRAVPTNNFARDGSLLCLDFTTCVSLLEMEQIPVCTGPFLFLFSFKDGDAVWKISPSSVRWELFVFPPSFLSALFGCLSRVNMQNQLRVR

SEQ ID NO: 287189 - protein, 78 aa, Zea mays
  Clone ID: MRT4577_25010C.1.pep
KLQHKLKCLYRCGILKLSMLGHRSSSGESTECVTIHLKVPDSPPVNVWCARTMPYGSSCSTSDRPCSGGISMCRSVRT

SEQ ID NO: 287190 - protein, 78 aa, Zea mays
  Clone ID: MRT4577_25011C.1.pep
IVFVLRRPGKVGVDGKPQGASAYDMLCSKTEVELHLQKCLIEAPMHFRARSEMLPVVNKQTLILICDNQITILYLLSN

SEQ ID NO: 287191 - protein, 430 aa, Zea mays
  unsure (1)..(430): unsure at all Xaa locations
  Clone ID: MRT4577_25012C.1.pep
SPRSQGRPAGLSSPTAPLSPLHPPSPPWVHGLLSRWGGXVEAHKPQEYNWTGYRRLFQMIRELKLKLQVVMSFHECGGNVGDDISIPLPHWVIEIGRSNPDIYFTDRAGRRNTECLSWGVDKERVLQGRTAVEVYFDFMRSFRVEFDEYFEDGIISEIEIGLGACGELRYPSYPAKHGWKYPGIGEFQCYDRYLQKSLRKAAEARGHTIWARGPDNAGHYNSEPNLTGFFCDGGDYDSYYGRFFLSWYSQALVDHADRVLMLARLAFEGTNIAVKVSGVHWWYKTASHAAELTAGFYNPCNRDGYAPIAAVLKKYDAALNFTCVELRTMDQHEVYPEAFADPEGLVWQVLNAAWDAGIQVASENALPCYDRDGFNKILENAKPLNDPDGRHLLGFTYLRLGKDLFERPNFFEFERFIKRMHGEAVLDLQV

SEQ ID NO: 287192 - protein, 354 aa, Zea mays
  Clone ID: MRT4577_25013C.1.pep
FDFMRSFRVEFDEYFEDGIISEIEIGLGACGELRYPSYPAKHGWKYPGIGEFQCYDRYLQKSLRKAAEARGHTIWARGPDNAGHYNSEPNLTGFFCDGGDYDSYYGRFFLSWYSQALVDHADRVLMLARLAFEGTNIAVKVSGVHWWYKTASHAAELTAGFYNPCNRDGYAPIAAVLKKYDAALNFTCVELRTMDQHEVYPEAFADPEGLVWQVWIHCYIACFAFRSNSLLADVLYSLVSKHMLLFGRFSLNEWLTLSTTPYAFYLNLESIFQVLNAAWDAGIQVASENALPCYDRDGFNKILENAKPLNDPDGRHLLGFTYLRLGKDLFERPNFFEFERFIKRMHGKMYWQLE

SEQ ID NO: 287193 - protein, 77 aa, Zea mays
  Clone ID: MRT4577_25014C.1.pep
KFCSHAPRLMVYKHPRLIESLPLKERMVVYGAPLALCLSDFPPYFHPCYIYARFYSVQKKKKKKKKKKKKKKKKKKK

SEQ ID NO: 287194 - protein, 263 aa, Zea mays
  Clone ID: MRT4577_25015C.1.pep
VPLPLLSACAHRLPSPSSLLPPSASGRGRERGRERGRAGATRGSIVPSRQLWHSELLIKMPALRMKRKFDDDIFANEFDTKSMKSMKILNFQVDEFEQAFVLNSSYKDRQDEPESTTQLAGQDIRVTEFSGLHAVLGGTSVALLKDLISETVVPPNLEPDSLSNNDDGKSQSNVVNTGDKEFADEDVNSAAQDICAVNNHEKSLGSNLDCSLLDIYNPDDAFPFLFDVPTGLLASYSTFCDEFVPIDSLIDMSGICGVFPLNE

SEQ ID NO: 287195 - protein, 222 aa, Zea mays
  Clone ID: MRT4577_25016C.1.pep
LLPLLCACAHRLSSPSSLLPPSASGRGRERGRERGRAGATRGSIVPSRSALYSLTSYGFYQFKVRLISSLPSKTELRQLWHSELLIKMPALRMKRKFDDDIFGNEFDTKSMKSMKISNFQVDEFEQAFVLNSSYKDPQDEPESTTQLAGQDIRVTEFSGLHAILGGTSVALLKDLISETVVPPNLEPDSLSNNDDGKSQSNVENTGDKEFADEDVNSAAQDI

SEQ ID NO: 287196 - protein, 210 aa, Zea mays
  unsure (1)..(210): unsure at all Xaa locations
  Clone ID: MRT4577_25017C.1.pep
LGLSFISPSANQNVGGSPAVRRHLSAPPPPPFRTDPVHGIVGAAPAGGDRFGSGSVGRXAVTLSLLGLTGAVAASAVSDLSVFLSCSSQAIEKATQNQQIVNAIGKPIMRGPWYSASIAVNHAKHSVSCTFPVSGPQGNGLLKLKAVRLGDESWYSYVQPTEWEILIMDAILDVHTEDGKHTTMRVTIPDNTPAPPPADCTACKSHAAEK

SEQ ID NO: 287197 - protein, 59 aa, Zea mays
  Clone ID: MRT4577_25018C.1.pep
MVNDIHNRDGFVLGTSRGGHDTTKIIDCLQDRDTNQIYIIEDTMCNAKFLKHGFRKSGD

SEQ ID NO: 287198 - protein, 214 aa, Zea mays
  Clone ID: MRT4577_25019C.1.pep
MAALGPASVTSTGLALHTPAIPHRRRRHGNAVACASSSQHQRSLNGLAMSSSGTNNALPIKGTTTTRVPAVGRSVPAANPSPSGGNNLPVPKIPPWVKWVAGAVIFAVPMYRRFRALEDKIEKTAEVAIEVIDKVAEATEKVAGEVADEFPGNESIKEAASRIKKVMHVVEEDADKAEALIEKVDEIKKDVDSIVDPIIGKVAKDKSRRMNQKG

SEQ ID NO: 287199 - protein, 93 aa, Zea mays
  unsure (1)..(93): unsure at all Xaa locations
  Clone ID: MRT4577_2501C.1.pep
NXPADPTHPLMKTASKLFTLYTFKSQAAGFPFFFFGKITTPPTPTTTYTDTTPSPSTTCKFLILPSTHTPLHTSIHFTSPPSPQSTPLTLTFH

SEQ ID NO: 287200 - protein, 165 aa, Zea mays
  unsure (1)..(165): unsure at all Xaa locations
  Clone ID: MRT4577_25020C.1.pep
MAAPAYHFILPHRTCVAFRAGSNSAQQQGMHMDSPSQQFSIVIGIKTWNSRSAVFSVFSFSRNYIDHILYVVSIPPQRARKKRKSLIQEKSIVHDPLFGRRNSXVGPEVLVLGKVKEFNLSKTTIKPGKEILLTALQTHMCGISQSRGLACLPTRHKLSSSDHSP

SEQ ID NO: 287201 - protein, 49 aa, Zea mays
  Clone ID: MRT4577_25021C.1.pep
MERSVANILLVLSLVAALAVAGRPAGTSGEVGAIRLPSDGKGLGGDATA

SEQ ID NO: 287202 - protein, 54 aa, Zea mays
  Clone ID: MRT4577_25023C.1.pep
KLVQIHEQIYDIYSKTYSLSEQTHPTNSLHLTGSAYFRGPNDSSASSFFIIWPA

SEQ ID NO: 287203 - protein, 193 aa, Zea mays
  unsure (1)..(193): unsure at all Xaa locations
  Clone ID: MRT4577_25024C.1.pep
MTAGFQLGVIGSLTLSVASSVAIVICNKALISTLGFPFATTLTSWHLMVTFCTLHVAQRLRFFEPKAIDGQTVVLFGLLNGTSIGLLNLSLGFNSIGFYQMTKLAIIPFTVLLETIFLKKRFSETIKFSLLVLLLGVGIASVTDLKLNWXXSVLSGLAIXTTCVXQILTNTIQXKLKVSSTQLLYQSAPYQAA

SEQ ID NO: 287204 - protein, 180 aa, Zea mays
  Clone ID: MRT4577_25026C.1.pep
PKAQKRADKLSPKELKPLFKKDQGWLIANPPQFKVPNWFPNKKKYSKKGRFFQVVSNPPSKKPNLRNTLSLKKPRTPKVCPHWGLLVRGQKKKTSKKHGKTISVSQKKKKQIGAHPGKLLFVKKKNPFGLKKFFWVFQTGLNKFFKKKKKKKKKKKKKKKKKNKKKKKKKKKSTLRCYHC

SEQ ID NO: 287205 - protein, 89 aa, Zea mays
  Clone ID: MRT4577_25027C.1.pep
STIILVVLFRVFTGSMVKIRSIHVQAGSQGELNNFCALIWQAIVVRTHAMHGSLSRQKVLVGPPSCCAFARRCRPLGGLSASGNGLSVD

SEQ ID NO: 287206 - protein, 59 aa, Zea mays
  unsure (1)..(59): unsure at all Xaa locations
  Clone ID: MRT4577_25028C.1.pep
MESPNTWEDLRGDILNIHSRKMNLMRGFHLKKIAXNMNGALXAELNALFTDAGMVAFLL

SEQ ID NO: 287207 - protein, 133 aa, Zea mays
  Clone ID: MRT4577_25029C.1.pep
SSSSTAVLRASFSLVVRSSARARIRMNKSGWRLCRLRPWAARGRSGPHTVSRRARRAPGPRRSFRLSFSSARRSPSEKARERVHGGHSWGMFLLHPCLFFVLFLNYDYDAVCSSLKGITLICCLCLTSPLFII

SEQ ID NO: 287208 - protein, 60 aa, Zea mays
  Clone ID: MRT4577_2502C.1.pep
ESFVKSPESVSCKSMRNKYNVSCLVDHFTFTTGRQRQLYFEERPESDLTPPVRSRADSKL

SEQ ID NO: 287209 - protein, 80 aa, Zea mays
  unsure (1)..(80): unsure at all Xaa locations
  Clone ID: MRT4577_25030C.1.pep
SLENVDMHNXXPTTTGIILQLSQPACDRCASCVISGMQRFLKRHYDWLWDXXEAAELHRHVNIRYLYLXSVHNGTLVXSI

SEQ ID NO: 287210 - protein, 162 aa, Zea mays
  Clone ID: MRT4577_25031C.1.pep
MRHPLITPPPPAATAAAGRRKDDDGDEENPRPRPQAAAKAPVSVSATSPADLEQIGIKLTPSWTASFSDMGLEKGRLFVSRLTLAPLSLSDARAACLVNMAALEVCCASRFGDRAGAAAVCSYLALFAFLMAGPEDVRRLRALGLLHGPRGDGDTLAFLAPS

SEQ ID NO: 287211 - protein, 96 aa, Zea mays
  Clone ID: MRT4577_25032C.1.pep
YLVNHTKRSFLIYDFTTVATKILALLALFALFVSATNAFIIPQCSLATKGIIPQGCARTSMGFEHQPVQAYRLQQALGGSVLQGPVHQIGQQSLAH

SEQ ID NO: 287212 - protein, 460 aa, Zea mays
  Clone ID: MRT4577_25033C.1.pep
MPRESDLLFSDTTKQINPLYAAVDHSTNGGSDLTLSQVACRAIILDGTSMPPQAYESIITVFIIDSCGVRGIIPGTILGFLVEKLQEFAAKDINDFFLEHNPRILPPSSGGDLLGLFSTLLGPKHDDQYLHALVRELLDETRFIQALHNSINPNLVAMVTIVSTPSSTLIDAQVVFDEMQPRMNVNTGVARLNPQGSFQYGSINLSQVYKLGNEPHVIINGKKRTTLYFRPATPRSLGALYNKKNVFTLDFPTMPIDGPVIRTSVINSTYKNFLEIVFQNNDTSVQTYHVDGYAFWVVGMDYGEWTENSHGTYNKWDVVSRCTTRAFPGAWTAVTLSLDSPGFWNVRTEDLDTWYITKLTSASYMGVVLLGSSAIKFLCIMRGTQGVLIVASALQIIVTFSGLWRNVARYPSSLSAAPLVALVVFGLYELEIPSVTKCVEIGLPGLILLLIFAMYLPHTV

SEQ ID NO: 287213 - protein, 48 aa, Zea mays
  Clone ID: MRT4577_25034C.1.pep
MGKLPHTRLYKVDDRVRSTRSQGGPHPLHHFYARLYIALMLPPITVLR

SEQ ID NO: 287214 - protein, 86 aa, Zea mays
  unsure (1)..(86): unsure at all Xaa locations
  Clone ID: MRT4577_25035C.1.pep
TQRPHTLKEHTDEGEAGTXHATQKYFVTGAKDNTWCCYDIKTGTCLSQGGXASGQEGYTXAPEHPGGGILGTGTTEAGGKMWDGKT

SEQ ID NO: 287215 - protein, 66 aa, Zea mays
  Clone ID: MRT4577_25036C.1.pep
VFVSPDGATIRGSDVSFTVPEKRRSSMCEKISNSRLNRHSLWVLQTQTVILIRSVVAHFVPIACTC

SEQ ID NO: 287216 - protein, 86 aa, Zea mays
  Clone ID: MRT4577_25037C.1.pep
ISIFLFYFGFENFFLRVCYFFFKEKGGGGFWFFFLGVPPPPFLEFCVCVCKKKDLIFIYIFWFCVKKKKKKKKKKKKKKKKKIYFF

SEQ ID NO: 287217 - protein, 43 aa, Zea mays
  Clone ID: MRT4577_25038C.1.pep
HDDVELSALGMALATVVTVAEILQNHGFFVVKKIWTFSVVIND

SEQ ID NO: 287218 - protein, 64 aa, Zea mays
  unsure (1)..(64): unsure at all Xaa locations
  Clone ID: MRT4577_25039C.1.pep
RCHPRGWXGKQYYQHQRGWRRXGXXGDRGRAKAPSSSTAHLSPXRQXLYIXXKALXAWRPRXXG

SEQ ID NO: 287219 - protein, 130 aa, Zea mays
  Clone ID: MRT4577_2503C.1.pep
MVKTSVLNDALNAINNAEKAGKRQVLIRPSSKVIVKFLRVMQKHGYIGEFEEVDDHRNGKIVIQLIGRINKTGVISPRYNVQLRDMEKWVVKLLPSRQFGFIVLTTSAGIMDHEEARRKHVAGKILGFFY

SEQ ID NO: 287220 - protein, 50 aa, Zea mays
  Clone ID: MRT4577_25040C.1.pep
GFGCLRGPPKKMQKAPSRIGRLFFPKNGAPANLNPKPRGFALKPSGCPTF

SEQ ID NO: 287221 - protein, 92 aa, Zea mays
  unsure (1)..(92): unsure at all Xaa locations
  Clone ID: MRT4577_25041C.1.pep
LRNFSRSIQDPTRVCCFLPVLALFKPVICCIQQSDLSLLIMKQLDFLINQYEVALREHSRGKVLRRMAIQDLEHETPLGAGGXRVQKCEKRG

SEQ ID NO: 287222 - protein, 77 aa, Zea mays
  Clone ID: MRT4577_25042C.1.pep
PPPPPHTPRPPTPRALAHFRCPRALLCLCRARPRRDFRSPLGTCPAARACAGTRPSLLVLLNRGRLRSAPPPAIVEP

SEQ ID NO: 287223 - protein, 46 aa, Zea mays
  Clone ID: MRT4577_25043C.1.pep
LFGRFCQALNGGDLAPASGPRPVQILPHRLALAILTLANIRFWKWH

SEQ ID NO: 287224 - protein, 64 aa, Zea mays
  Clone ID: MRT4577_25044C.1.pep
KFYLQSYSLLSLIKENQHCMDRTYGSKGELIKIHIPETPEKKKGLSIKHGTIPGSEKKINSQNV

SEQ ID NO: 287225 - protein, 57 aa, Zea mays
  Clone ID: MRT4577_25045C.1.pep
CLDGVKHPPPGPFPKKKKKKKKKKKKKKKKKKKKKKKKKKKKKKKNKKKIKKRAGRL

SEQ ID NO: 287226 - protein, 67 aa, Zea mays
  Clone ID: MRT4577_25046C.1.pep
MADGGLSGGAAAFWATRALEVVKRNDSPGLLWKRIKLTTTRKNNAKKRLKRLWQPKDFLDRVDVSSL

SEQ ID NO: 287227 - protein, 94 aa, Zea mays
  Clone ID: MRT4577_25047C.1.pep
EKEQLPPRRASRCLLREKEKSPSDLQLPKSSGSSSQDTCRLLRGRRHRDRRPRTVLRPALKVCAVRLTGTARSRIINGGGKCPHLRQDHAPGPA

SEQ ID NO: 287228 - protein, 101 aa, Zea mays
  Clone ID: MRT4577_25048C.1.pep
PLFRAAQTAFVFLCRRPSFVSLAFPLSPSSPADSSPGGGTSRPPSSIGVFSRPPRRRNCGWSLPSVFCPSLFLCLPALCCGSAIKRPGKWARPCCNIKKKN

SEQ ID NO: 287229 - protein, 127 aa, Zea mays
  Clone ID: MRT4577_25049C.1.pep
FCLGPEPPEFVVYIKAFLLCPMHTFFFLEGITYFFWSPGFFFFLAGFPVFVACSRPPQYFLFVRTPPSVFCACPPLFFFFPAFSFFFCLRLVFFSRLWPVLGVFTTFLFVAGIFFVFLGAVLLLLEM

SEQ ID NO: 287230 - protein, 125 aa, Zea mays
  unsure (1)..(125): unsure at all Xaa locations
  Clone ID: MRT4577_2504C.1.pep
HPATKSLCGPSVXQVDAEPAKHAGEHNRLRPRQEHITPKAANQLAALPCSAHCAHACRQTRPSAAPTTPKKRAVSAPATTNSIFYPDYILLCVPLISGRTVLGIREVMSVEQGEPKSKTREQARA

SEQ ID NO: 287231 - protein, 96 aa, Zea mays
  Clone ID: MRT4577_25050C.1.pep
ECPEDPSFASTPLVSSPIHNESPLTTHRGRGTARMKPRRGSSPFSASLTTNDDWTHSIAFGQEHGGAGQGIFIQNTTTLTIPNAILAQYHGVVSYV

SEQ ID NO: 287232 - protein, 135 aa, Zea mays
  Clone ID: MRT4577_25051C.1.pep
MTSHPGHNETVRLANIAPGMNDKELKDIEFPAGWGVMVCPPAVHLNPVIYPDPLIFNPTRFKDKPEINRGSRHFMAFGGGLRSCVGADFSKLQMSIFLHFLVTRYRWRSLGGGKVVRNPGLEFPDGYHIQIRHWN

SEQ ID NO: 287233 - protein, 93 aa, Zea mays
  Clone ID: MRT4577_25052C.1.pep
GPSAAAGYPSWPGTCRRSLSWSGSVACASWLRFPCLAMAAGLAIGWHVSSARAPRGILIDGDQPVATRFSRLAPPRRSTRPPTRPPARLPTRR

SEQ ID NO: 287234 - protein, 62 aa, Zea mays
  Clone ID: MRT4577_25053C.1.pep
ERKLLGGVFFFFGGGFFFFLKKKKGPPLFFFKAWAFYLGFSNPINFQGVKPNFGGHWPGPTT

SEQ ID NO: 287235 - protein, 105 aa, Zea mays
  Clone ID: MRT4577_25054C.1.pep
MGYWWDRVVLPVRRAWLGVASRFGVRQTGLWRLRQEVSTCEYEDVHVMWEMLSRGAAGSVSAEASSAVAAVRGTSDSASFWLLSLSLVLWFSLLVCTVVVHPSWL

SEQ ID NO: 287236 - protein, 127 aa, Zea mays
  Clone ID: MRT4577_25055C.1.pep
KNWRGQSWNFSFWSLLQVLRGIQGMAQPTRNKGGLVPKKVHLKIMSFLPPKLKRPWGQVSKKKGEGGYERGFAPQIKVGAGFFFFPLGIILGGFWPPKKKLLPAGFVSGILGFVFPQPFNFARVGLR

SEQ ID NO: 287237 - protein, 147 aa, Zea mays
  unsure (1)..(147): unsure at all Xaa locations
  Clone ID: MRT4577_25056C.1.pep
MGYWWDRVVLPVRRAWLGVASRFGVRQTGLWRLRQEVSTCEYEDVHVMWEMLSRTTAPAPXAQPVRAAAAAVGQQVPSLPRLLVLLLRCGVLVIPLHFGFSLSLLFFGFRCLYVPSSSIPPGSEMYFHSSSCVSVSTRLLQMIYRGM

SEQ ID NO: 287238 - protein, 66 aa, Zea mays
  unsure (1)..(66): unsure at all Xaa locations
  Clone ID: MRT4577_25057C.1.pep
TIEGDGGGHCAAGLHRRHLRHARHRWVHRAGVAHVLHQEHRVRWCAAALKKGGEEVATMSPRPPGX

SEQ ID NO: 287239 - protein, 75 aa, Zea mays
  Clone ID: MRT4577_25058C.1.pep
FLLKCFHNRAKPLNFLRFNKCNYIFLACSLSILRCIMIFASTLLLPFSAYFLFVVLARSYITLDPPPVYSRNKKA

SEQ ID NO: 287240 - protein, 151 aa, Zea mays
  unsure (1)..(151): unsure at all Xaa locations
  Clone ID: MRT4577_25059C.1.pep
MGYWWDRVVLPVRRAWLGVASRFGVRQTGLWRLRQEVSTCEYEDVHVMWEMLSRTTAPAPXAQPVRAAAAAVGQQVPSLPRLLVLLLRCGVLVIPLHFGFSLSLLFFGFRCLYVPSSSIPPGSEMYFHSSSCIRLRPPAADDIPGHVNEQS

SEQ ID NO: 287241 - protein, 100 aa, Zea mays
  unsure (1)..(100): unsure at all Xaa locations
  Clone ID: MRT4577_25060C.1.pep
MGYWWDRVVLPVRRAWLGVASRFGVRQTGLWRLRQEVSTCEYEDVHVMWEMLSRTTAPAPXASAQAAQPVPAAAAAVGRQVPSLPRLLVVDQGRRARQLR

SEQ ID NO: 287242 - protein, 60 aa, Zea mays
  Clone ID: MRT4577_25061C.1.pep
VDCFCELQSVHWRVGASHYSDSGLQTSPRLQLRTGMSRLACVGVRYEPVMIGCAMTRRDM

SEQ ID NO: 287243 - protein, 120 aa, Zea mays
  unsure (1)..(120): unsure at all Xaa locations
  Clone ID: MRT4577_25062C.1.pep
GSSCPASRPPCCSPPPWRXSPPPDELWSSPCVATPPXATPPSAAPARPCCPPRWTPPSRPPRPAVPPPRGAPRAATPARWRRWLSRRPREGPTRRGSRSETSWLQLASVLAPVTRGRTRG

SEQ ID NO: 287244 - protein, 375 aa, Zea mays
  unsure (1)..(375): unsure at all Xaa locations
  Clone ID: MRT4577_25063C.1.pep
MAVNFLANELSDLCIGKPAVRSLPLSAATGDLAAALRRVSRSGAAACVAVTGPARAVVGRVGLADVLCFLCTDPEALARPAAVFSKPVSALLPKDGAGEVRRVDPRSSILEALDAVLSGAQVLAVPLRAGGRKKQLVGAADDGDFCWLTQEDLVRYFLNYICLVYNVAARSVSSLGLVRADFLSVRPGEAALSAVPLIRRAVATETAVAVVTEDGHLLGEISPALLAACDETAAAAIATLSAADLMAYVDHFGSPPEHILRAVKAGLKDKGLDALLALVEDETLSSFSSXSPASSSSDEEAGRAQLRRPSSGSYGRRAADEPVVCSPASSLVAVLVQALAHRVSYVWVLDEDNDCRLAGIVTFADVLRVFREQLL

SEQ ID NO: 287245 - protein, 175 aa, Zea mays
  Clone ID: MRT4577_25064C.1.pep
MAVSFLANEVSDLCIGKPAVRSLPLSAAAGDLAAALRRVARSGAPSCVAVTGPARAVVGRVGLADVLCFLCTDPEALARPAVVFSKPVSALLPKDGAGEVRRVDPRSSILEALDAVLSGAQVLAVPLRAGWRKKQLGGGGGSAAAGDFCWLTQEDLVRYFLNSIGLFYHVAARSC

SEQ ID NO: 287246 - protein, 78 aa, Zea mays
  Clone ID: MRT4577_25065C.1.pep
NWTPNPNPACGQLVPSWKRTQTNPIANRFQLGFLVLLSGETRRSLFFFPPKNKEGRRACFSPPRPAAVPPPGISFRTK

SEQ ID NO: 287247 - protein, 45 aa, Zea mays
  Clone ID: MRT4577_25066C.1.pep
MENLDMEKRIKIKKEDKKKKKKKKKKKKKKKKKEKKKAKKKKKKR

SEQ ID NO: 287248 - protein, 80 aa, Zea mays
  Clone ID: MRT4577_25067C.1.pep
VARWLAGQWAQLQHAVGDRFTDSRASALVWGSKPSCASSLGSFLKSVVFRLCSCLFRCSGVLGFVVSLRLLYFIQVQPWQ

SEQ ID NO: 287249 - protein, 89 aa, Zea mays
  Clone ID: MRT4577_25068C.1.pep
PRAADPCHPLKRQHRKLTEEGGRPKQQLTKHRYVTAEFVRPKLPTMAQNRMFISSERTTHHPAPLLYHLSTAGSKTTMSPTGPATATAP

SEQ ID NO: 287250 - protein, 455 aa, Zea mays
  Clone ID: MRT4577_25069C.1.pep
PRARPVYYMLASHGFGALWYILSIQREDTCWRQACINQTGCDPTSLYCGYHSLANNSFLQNACPTNSTANPDPIFGIFLPALQNVSQSTSFFEKLFYCFWWGLQNLSSLGQNMKTSTNTLENLFAVFVSTSGLVLFALLIGNVQTYLQSASVRIEEMRVKRRDTEQWMAHRLLPENLKDRIMRHEQYRWQETRGVDEEGLLKNLPKDLRREIKRHLCLSLLMKVPMFENMDEQLLDAMCDRLKPMLYTEGSCIIREGDPVNEMLFIMRGTLESTTTNGGQTGFFNSNVLKGGDFCGEELLTWALDPTSASNLPGSTRTVKTLSEVEAFALRADDLKFVATQFRRLHSKQLQHTFRFYSQQWRTWAACFIQAAWHRYCRKKLEEALYEKEKRLQAAIVSDGTTSLSLGAALYASRFAGNMMRILRRNATRKARLQERVPARLLQKPAEPNFFAEDS

SEQ ID NO: 287251 - protein, 132 aa, Zea mays
  Clone ID: MRT4577_2506C.1.pep
HRSAFHCRLFSPEASPRPIGSCHRFWCHGQCVNLNWLHGKIEKLFIYVFPLLLHEAQQVFLIERMSRTPICWPIFSRQMCLKYALIVLFASTLVCMGATGSIVQLVWCSLYLGHIIRALCLRPAPVPMFRFL

SEQ ID NO: 287252 - protein, 142 aa, Zea mays
  Clone ID: MRT4577_25070C.1.pep
GAGGGSTGDSANFEYPGDGWGDAPGDCGGGGVDYGGGGGPGGGDRDTPVASVSAASANPTVTVATDRWGPPEQVILFAAVMFTLVQRVYLRSSRLMLAMCVFHCKVAKKQLLVLCSSSAPAVPCINHACSVDRWMLLLQKEK

SEQ ID NO: 287253 - protein, 62 aa, Zea mays
  Clone ID: MRT4577_25071C.1.pep
LMMIHLTNTNVVFIPGYSFVLMTMVLSAGGLGLLIRTTSSLRFPSVLLETFLSNIQVKASVL

SEQ ID NO: 287254 - protein, 98 aa, Zea mays
  Clone ID: MRT4577_25072C.1.pep
AVSPITIYISFLFGRTKHIQLTTHHHWSKYYVQFHFLVLFANWCKVNKKQTRDLVQQTVQLRVQNCFVESLCLLKKLRLISRVADSIKKPGLLQDVSA

SEQ ID NO: 287255 - protein, 465 aa, Zea mays
  Clone ID: MRT4577_25073C.1.pep
SIVTRLLKAPANVGTRSVGATDAATASDERITVLVIGGGGREHALCYALNHSPSCAAVLCAPGNAGIAQSRDATCIPDLDISSSDDVISFCRKRGVGMVVVGPEAPLVAGLVNDLVKVGIPTFGPSSEAAALEGSKDFMKKLCDKYNIPTAKYRTFTDAVEAKKYVKNEGAPIVVKADGLAAGKGVVVAMTLDEAFEAIDSMLVEGSFGSAGSLVIIEEFLEGEEASFFALVDGTNALPLESAQDHKRVGDGDVGPNTGGMGAYSPAPIVTDELKRTVMESIIIPTVKGMSTEGCKFVGVLYAGLMIEKKSGLPKLIEYNVRFGDPECQVLMMRLESDLAQVLLSACQGELGNVSLTWSPEMAMVVVMASQGYPGPYKKGTVIKNVDKAEQVSPAVKIFHAGTALDGDGNLVAVGGRVLGVTAKGKDIEEARARAYGAVDAVEWPEGFFRHDIGWRALRQKQAAK

SEQ ID NO: 287256 - protein, 73 aa, Zea mays
  Clone ID: MRT4577_25074C.1.pep
AVRSMELSLLPEVIKAGVIKVTAVLVLQVCLVRASKTIVTISPCLIYLCNQGLMKPFALEASYPFHPGWFSGF

SEQ ID NO: 287257 - protein, 82 aa, Zea mays
  unsure (1)..(82): unsure at all Xaa locations
  Clone ID: MRT4577_25075C.1.pep
SARGHQLGIDKAAPKKILDLMNVENITRENVASHLQKYRLYLKRLSADPSQATSSIXYEHLNISNHGRACDXAFKQYNAYGR

SEQ ID NO: 287258 - protein, 89 aa, Zea mays
  unsure (1)..(89): unsure at all Xaa locations
  Clone ID: MRT4577_25076C.1.pep
MASSSSSSSSYMAYSDSCRLKLQVLMSXRNFPFITHKINGHTQQVPTDRLGHPGDTHDDLTGSMPHRQRRYAVFYXDFNTDVNWQKSKI

SEQ ID NO: 287259 - protein, 88 aa, Zea mays
  Clone ID: MRT4577_25077C.1.pep
GVGFFFFFFFFFFFLGAQTPGFGHSKLQPPRGTKQNLKPHGALDWKPNLVHYFTTQGRIHGDPSRFQSRSRARNTTQQGEFRGTPKGP

SEQ ID NO: 287260 - protein, 97 aa, Zea mays
  Clone ID: MRT4577_25078C.1.pep
QHYTQQPQDYMVSLHDQLLDTGIHMICRSDHCVVDRYLSVKEMYGCILLTESASSKAGIALPRDVALFSDQVATDTTDVLKRFLRNCDGTNSEAIPR

SEQ ID NO: 287261 - protein, 202 aa, Zea mays
  Clone ID: MRT4577_25079C.1.pep
LDCSALASTPSTGVREPACSDGGQAPQPLRRGAAPPPPPLRLQRHRRRVLQKGVGLPSEGEQRGGRPRSRRQGTAGHLQDFRLHRHWMLERKLADADVSEEEQNNILKDLEKKEAEYMRLRRHKMGVDDFELLTIIGRGAFGEVRLCREKTTSNVYAMKKLKKSKMLRTGQVFHDVYSCQETMYPSKKKSCHCFIVLLPCTI

SEQ ID NO: 287262 - protein, 91 aa, Zea mays
  Clone ID: MRT4577_2507C.1.pep
CAVHARTQCGTAQNVLANRAMAILLIITGDMAAEVDRGRCPTKGEKKSSLHVHQQQVTNSPVSTAFSSKHRVGCWMEIVLLVEIAKGLVSP

SEQ ID NO: 287263 - protein, 93 aa, Zea mays
  Clone ID: MRT4577_25080C.1.pep
MPYFKSDAFPLLGGDFEIFLLGALWGAFQSYSHSWIFHLLLGFQRQHSNLLPARMQLRTNRSYDLYALQLTTQVPDISVAMTTSCLLDRCCKI

SEQ ID NO: 287264 - protein, 143 aa, Zea mays
  Clone ID: MRT4577_25081C.1.pep
MEPNSSIPPPVMGAAVAYPPAAGAAYSAGPYAHAHAALGALYPPPPAPGPPSSHQGGAAAAQLQLFWAEQYREIEATTDFKNHNLPLARIKKIMKADEDVRMIAAEAPVVFARACEMFILELTHRGWAHAEENKRRTLQKSDI

SEQ ID NO: 287265 - protein, 102 aa, Zea mays
  unsure (1)..(102): unsure at all Xaa locations
  Clone ID: MRT4577_25082C.1.pep
ASRFSRGLNPTPTSXCTANRATALTNGRSSVSASAAPSPWRRHHRYTRGRQGTRRKPPALASSGFAFGQPSSSVSASEPQSSQRCRQRRRFKRPSARSASTT

SEQ ID NO: 287266 - protein, 55 aa, Zea mays
  unsure (1)..(55): unsure at all Xaa locations
  Clone ID: MRT4577_25083C.1.pep
KLRIEHKKIFTKKLKLSIKRIFIIRKHWFIEXFXIVAVEVDVTMRWCPSLTNSYS

SEQ ID NO: 287267 - protein, 87 aa, Zea mays
  Clone ID: MRT4577_25084C.1.pep
GAYVAVKQEMMQPTASIKDRPAYAMITDAEEKNLITPGKTTLIEPTSGNMGISMAFMAAMKGYKMVLTMPSYTSLERRVTIKVFGAA

SEQ ID NO: 287268 - protein, 60 aa, Zea mays
  Clone ID: MRT4577_25085C.1.pep
PSLQPFPHLNCQLDPSFYPLFNAAVVVTTIMITSIISNLLTTALFGFLPFFFTYFVCFSP

SEQ ID NO: 287269 - protein, 83 aa, Zea mays
  unsure (1)..(83): unsure at all Xaa locations
  Clone ID: MRT4577_25086C.1.pep
ELTEAQSAYYLXTXEAIMSLLMSQFMERPARLQPIGSPPVYNPRTQVRLLTAAIHTTPYTCSMLDNMEKTHTDHSSTTLNTLE

SEQ ID NO: 287270 - protein, 61 aa, Zea mays
  Clone ID: MRT4577_25087C.1.pep
HPIQPNHPQQAFQASHQRPLCRRPQTYINFPRSNLGALSIFTLPQNTLLNCEDDRGRLLNL

SEQ ID NO: 287271 - protein, 50 aa, Zea mays
  Clone ID: MRT4577_25088C.1.pep
CSSLTRFFITKGFTTDRAYHRDYAHVCLICGQTHLLGQIVRLTINSKLMD

SEQ ID NO: 287272 - protein, 54 aa, Zea mays
  Clone ID: MRT4577_25089C.1.pep
MKLIPLVQAWSLWNEGKAMNLVDSSLVKSCLPNEALRCIHIGLLCVQDNPNSRP

SEQ ID NO: 287273 - protein, 64 aa, Zea mays
  Clone ID: MRT4577_2508C.1.pep
CTTAGPPCGPVRQLGPRDRPWLLRGAARRRAGGTPTMMHRHYRPRCVVVRHPTSDLVEVQITSY

SEQ ID NO: 287274 - protein, 76 aa, Zea mays
  Clone ID: MRT4577_25090C.1.pep
RYPAKKTCYRNIACLLLCQAIRMVTGSRIVASSFDVGYNRSESVTAWAYIGTNLSLSPWIDASNLTCQQPLVTGLA

SEQ ID NO: 287275 - protein, 117 aa, Zea mays
  unsure (1)..(117): unsure at all Xaa locations
  Clone ID: MRT4577_25091C.1.pep
TIYRTEGLLGFYRGNGARGARIVPNAALHYMAYEEYRRWIILGFPNVEQGPXLDLAAGSIAGGTAXICTYPIDLVRTQLAYHVKCAVRVHYKESKPSEQVDNRIIDRVKTLYRPKAL

SEQ ID NO: 287276 - protein, 122 aa, Zea mays
  unsure (1)..(122): unsure at all Xaa locations
  Clone ID: MRT4577_25092C.1.pep
FGSRVDIINKISVDKTITEYRSRGLANLCRGPHMTTTLFVKAFYCXRPNNXYGQGKVNLLSLQREYGINVPDSGPMRAYKHFFEEAKKRDHTKLREGHVLFFFPXLKPGSXWFLSHRAMVYY

SEQ ID NO: 287277 - protein, 163 aa, Zea mays
  unsure (1)..(163): unsure at all Xaa locations
  Clone ID: MRT4577_25093C.1.pep
PTRLPTRPPTRPPTRPRTRGRAHTQTHTHTHTRRGTRQLAEHARSPQRTPSHRGGRPTPRRPXTSAAPRRRRRRRRRRRPSXRRRGPARPARXXPRTAPGARTGGXGXRRARRXGRTRRRRARRRPTAARGGSRRGPPASXARAXXXRTETSRRGXTRTTXPA

SEQ ID NO: 287278 - protein, 146 aa, Zea mays
  unsure (1)..(146): unsure at all Xaa locations
  Clone ID: MRT4577_25094C.1.pep
XFFXXFFXFFXFFFXFYNTRGGKTRKVHLPERVIPPYSLFITRNTIFLCFRVSSGCLFVFRHSITLAGCGIVDIRTEQSCDFYPGCDNSTIPYVRSLFLRCTSFFAMVLCPAVDHDRSRDIIFTLTGVQAKRNCEGIMPRNLWTKI

SEQ ID NO: 287279 - protein, 44 aa, Zea mays
  Clone ID: MRT4577_25095C.1.pep
PATAAAGVRVVERGFAAVKKEGATAVLVVVGGERYVVKVVVEVV

SEQ ID NO: 287280 - protein, 342 aa, Zea mays
  Clone ID: MRT4577_25096C.1.pep
IPNPIPFNPSVARSNHPHRFTARATQCQATATRAVALEADVRRLQASLHALDPSTLDKVEEELERARVAITDSDVASFLPSKRNGKFLKTFLGPVNVRVARKEDKLKIKDEYNNYRDRTAYKFLLFPSILLLLRWWIWDGCLPALAVQIYQAWLLYLYTSFALRENVLIANGSDIRPWWIYHHYLAMLMALISLTWEIKGQPDCSSKQRGVQLFLRWAIMQGIAMHLQNRYQRQRLRTRIALGKAKRMDVVAGETAGVEGQLLLLYPVLFILQGFEAYVGVLLLQTALHGLASEWQVLVCGILLVVMAVGNFVHTMETLVLKLRFKAKMKKAKSRQDRPHQN

SEQ ID NO: 287281 - protein, 103 aa, Zea mays
  Clone ID: MRT4577_25097C.1.pep
ISMETECQPFRSEIAETKSQSQHTWNEHALDSDLSLVPKSFICYMDFQLSTSIYLGQAERQRWKIKRGWRRAAGTRASAARPDGGHGSCREGDTFLVAAEVGR

SEQ ID NO: 287282 - protein, 52 aa, Zea mays
  Clone ID: MRT4577_25098C.1.pep
NHPCGQPYLNALGDKEFQLLGTGRKNWVRGLLPKNIEGTPYKGYIKTCPSYK

SEQ ID NO: 287283 - protein, 66 aa, Zea mays; identical to SEQ ID NO: 256447
  Clone ID: MRT4577_25099C.1.pep

SEQ ID NO: 287284 - protein, 82 aa, Zea mays
  Clone ID: MRT4577_2509C.1.pep
KVREPFSIMSLLKSPMGLMVGFMVLMVFVMPKMMENIGIFHLFYIEWIQAFSYYVSLKLATSKQQLLRAVLHDTMVEFSSIY

SEQ ID NO: 287285 - protein, 141 aa, Zea mays
  Clone ID: MRT4577_250C.1.pep
MRKCISIHIGQAGIQVENACWKLYCLKHGIQADGQMPGDKTIEGGDDAFNTFFSETGAGKHVPRAVFVDLEPTVIDEVRTGTNRQLFHPEQLISGKEDAANNFARGHYTIGKEIVDLCLDRIRNLADNCTGLQGFLVFNAV

SEQ ID NO: 287286 - protein, 90 aa, Zea mays
  unsure (1)..(90): unsure at all Xaa locations
  Clone ID: MRT4577_25100C.1.pep
XAVEIATLEHKILLRDHHCTSLSLPKICGYLTCHKANFCISLILLNHVTAKELFYDFFYFGSRMCASAQKHEKVIGLKSNRRGLLVEMKN

SEQ ID NO: 287287 - protein, 162 aa, Zea mays
  Clone ID: MRT4577_25101C.1.pep
FPILPADPLSLTAPSPMAVGPPRHGRRSSFLQYVSDLVSLPSRGRLLQELFLPCARLRWPDSPMMAFPCRCCSLAAMAVPPCSSPVTGPSPSHVMLVPCLLPHRPTSPATRKVPPSRQLPWPPSALAALALVPAARRQPLSIFHRCRSACPRYIDVDNWKSM

SEQ ID NO: 287288 - protein, 48 aa, Zea mays
  Clone ID: MRT4577_25102C.1.pep
NRAGFPRKYVEVTRAQWPDESVVLYLEEERTASLILPRIPSLIQYLSR

SEQ ID NO: 287289 - protein, 53 aa, Zea mays
  Clone ID: MRT4577_25103C.1.pep
PILVIIYFFKVDVSNVVMVTGGRNTGRVGVIKNWEKAQGSFEVIDVLLGGFCM

SEQ ID NO: 287290 - protein, 86 aa, Zea mays
  Clone ID: MRT4577_25104C.1.pep
RFYKAERTETSLFHVSPFTKHDIESCFDHNMLLLPLLATLCILPIITLPSIAPVVSLDHPCTWILVLMTSSGAHPGRRHHANGGTD

SEQ ID NO: 287291 - protein, 78 aa, Zea mays
  unsure (1)..(78): unsure at all Xaa locations
  Clone ID: MRT4577_25105C.1.pep
TICRLALDVVHFARYGSPLVITGIDHAYHICVTSMRSHLHLMDASPXFSSPSRAYWXASXRWAKRRDEPRGDXWAXWP

SEQ ID NO: 287292 - protein, 163 aa, Zea mays
  Clone ID: MRT4577_25106C.1.pep
AGRVPPADPLSLTVPSPMAVGPPRHGRRSSFLQYVSDLVSLPSRGRLLQELFLPCARLRWPDSPMMAFPCRCCSLAAMAVPPCSSPVTGPSPSHVMLVPCLLPHRPTSPATRKVPPSRQLPWPPSALAALALVPAARRQPLSIFHRCRSACPRYIDVDNWKSM

SEQ ID NO: 287293 - protein, 83 aa, Zea mays
  Clone ID: MRT4577_25107C.1.pep
ALSCYALTEALVFVRLVFLCSADHLAQVIGSSNVIMFGLRFLSVDGSSGLSMLLGASSGLSMFLRSRFCMCCRMLTIGNPCSK

SEQ ID NO: 287294 - protein, 48 aa, Zea mays
  unsure (1)..(48): unsure at all Xaa locations
  Clone ID: MRT4577_25108C.1.pep
EVSSASFILPVVALVVAGPRVSREAAAXSPGXPWMRKTAESSVPARPA

SEQ ID NO: 287295 - protein, 89 aa, Zea mays
  unsure (1)..(89): unsure at all Xaa locations
  Clone ID: MRT4577_25109C.1.pep
GRVGAWYLQQIRLITSTPLFVINGHTYLQQRMMKLSVXDLTELSVSKTDAYLQQMLAYNQXLVTKXAAFLQQTLQDLNTLRWSNKMDAA

SEQ ID NO: 287296 - protein, 157 aa, Zea mays
  unsure (1)..(157): unsure at all Xaa locations
  Clone ID: MRT4577_2510C.1.pep
SGGGRDPNIRSLLLSALRWYSSHNAILTLHTHYASQIELFLALSLIIXDASHGCKPYCPRRNMPTPSDLTSYSHXCWTIDAIKVYVCVNVIXTAMVGLPQHEQXCTLLQGLLHLHDGLCLMTXACKAKVXLGIQLKVTIXLNVMLNYCRKICPQDFT

SEQ ID NO: 287297 - protein, 123 aa, Zea mays
  Clone ID: MRT4577_25110C.1.pep
CIAPFPIFPADPLSLTAPSPMPVGPPRHGRRSSFLQYVSDLVSLSSRGRLLQEAVPPLRSPKMAGLAHDGFPLSMLFSSRHGSASLQCSSPVTGPSPSHVMLVPCLLPHRPTSPATRKVSPSR

SEQ ID NO: 287298 - protein, 118 aa, Zea mays
  Clone ID: MRT4577_25111C.1.pep
CSGRISCFKFKLCKVRSVQFGQKGIPYLNTYDGRTIRYPDPLKANDTIKIDLETNKIMDFFKFDVSNVVMVTDGRNTGRVGVIKNWEKHKGSFEVIDVLLGAFCMLCLVFSYLLYKKT

SEQ ID NO: 287299 - protein, 66 aa, Zea mays
  Clone ID: MRT4577_25112C.1.pep
LQFMRLDIKGFKSQVADRKHGSFNKASVFHLYESMFCTLPGLMLGSLAKPSPYSTFILCPYAWVDP

SEQ ID NO: 287300 - protein, 78 aa, Zea mays
  Clone ID: MRT4577_25113C.1.pep
GLKQLFHRMFRVVPQIMHTRSLQESSSKVATSLIDFTQKVLKSVSTKRHSRHRCFPQDQTIPTPGHRDQLILLGSVTL

SEQ ID NO: 287301 - protein, 30 aa, Zea mays
  Clone ID: MRT4577_25114C.1.pep
LYRYAAATLKNARKLRVVCYQEKGISSVIN

SEQ ID NO: 287302 - protein, 103 aa, Zea mays
  unsure (1)..(103): unsure at all Xaa locations
  Clone ID: MRT4577_25115C.1.pep
VGVRQSTQARERLSGGDPRATCHDGDKGFTRGRHAVLCVAEAALPIAQMIARRGLVRRPSSDTRTRRAEGAKARPSVRRDAGRSGGAAGRGAASXDTVPVIAA

SEQ ID NO: 287303 - protein, 54 aa, Zea mays
  Clone ID: MRT4577_25116C.1.pep
VSNQQVCAPSFSWLKAANSRLSWSRQCSSGSCVGGVGKADGWLPLLVPFPAAGG

SEQ ID NO: 287304 - protein, 174 aa, Zea mays
  Clone ID: MRT4577_25117C.1.pep
MSTEVTLNNSGGSESALLLLEQLAEVFGKLKTHTETFLQLQNGIKWEDIEGHFLSLDESYRSKFDELVEKEKALEEKKAEACRLIAEKEAKVSTKEHASLNQLQELRDAAVSSLAEVRQKYKVELAEILEASGSKDKKVSLRSWLSGTGKLMQFISYKLLGFRRHPPCTSADIC

SEQ ID NO: 287305 - protein, 117 aa, Zea mays
  unsure (1)..(117): unsure at all Xaa locations
  Clone ID: MRT4577_25118C.1.pep
LVAAAVLVAALLLLPASAVTASTAVSCGEATPSGAPRLGYTMGSARTPSATGCTGVRSLNSPASSAPHRQATCNCLKXMTNRLAGGASMANAANIPGKSGVSVGVPITPTANCTKID

SEQ ID NO: 287306 - protein, 70 aa, Zea mays
  Clone ID: MRT4577_25119C.1.pep
PLAAFPNFSAHSPSFLTSVYRRVLILKWLKTWLLPSPFTETALTNDFLTSKISGLICSSWRQALGPSLAD

SEQ ID NO: 287307 - protein, 168 aa, Zea mays
  Clone ID: MRT4577_2511C.1.pep
EKVSASPSHGAHRRRAPAIRAAVGVPGGREGGLPIIVPQIPAPLAPQPSQSQPSEPATAVQATRVSSVAVTETSTTSRIEVCMGGKCKKSGALALLQEFEKAVGTGGAVVGCKCLGKCGLGPNVRLRSGASAEGSAKGNPLCIGVGFEDVDTIVAGLFGGADLGMTPT

SEQ ID NO: 287308 - protein, 213 aa, Zea mays
  Clone ID: MRT4577_25120C.1.pep
LDESNFQDDPKSRELIALRAVIKCIEEHKLQKECSRGALQKRVSELKPKGEKRSSSDAGRTYAKKPRGPGISFPRRPGGSVGSAARRPPFPGYSWQRAPAPMPSHGPAPMPSRAPLPDGYGAADRYHYTPPALAYDAGAFSSYGEPFSTPKPFQYAPGSVAASYNSSPYKVTYGGPGAPAASAYAGYSGGSGPAASSSYANYLGSVYRPPQQP

SEQ ID NO: 287309 - protein, 623 aa, Zea mays
  unsure (1)..(623): unsure at all Xaa locations
  Clone ID: MRT4577_25121C.1.pep
MSTEVTLNNSGGSESALLLLEQLAEVFGKLKTHTETFLQLQNGIKWEDIEGHFLSLDESYRSKFDELVEKEKALEEKKAEACRLIAEKEAKVSTKEHASLNQLQELRDAAVSSLAEVRQKYKVELAEIXSKWKQXKKVSTSINDNNASRASEENTPASGSGEASEALPVETKPRPVLKQLCEQMDTKGLLKFLSENCRKLASFRDELSGALKCATDPARFVLNSLEGFFPPDQTNSPGSKHNALEVQRKSCILLMEAIAPALGMXRSLVATTLXSSEIKEQAKEIAEEWKSKLAEIDLDASNGYSLEAQAFLQLLTTFNVDSVLDEDELCKIVVAVSRRKQTAVSCRSLGLNEKVPGIIEELVKRHRQIDAVHFIQAFGLSETFPPAPLLKTYVEEQKDTIENNGDATAISLTDDPKSRELIALRAVIKCIEEHKLQKECSLGPLQKRVSELKPKGEKRPSSDAGRTYAKKPRGPGISFPRRPAGSVGSAARRPPFPGYTWQRAPAPMPSRGPAPVPSRAPLPAPLPDRYGAADRYHYTPPAPAYDSGAFSSYSEPFSAPKPFQYTPGSVAASYNSSPYKVAYGGPGAPVRSTYPGYAGASGPAASSSYANYMGSVYRPPQQP

SEQ ID NO: 287310 - protein, 51 aa, Zea mays
  Clone ID: MRT4577_25122C.1.pep
KKRLFVPQGGQIRKCECKLWGMCLGQVLKIVEPPFKVVKWVSGPLANPFAS

SEQ ID NO: 287311 - protein, 65 aa, Zea mays
  Clone ID: MRT4577_25123C.1.pep
MAEHLISTADHDRLPDSYVRPETQRPRLREVVPDAEIPVVDLADPDREAVVARVAEACRTHGFFQ

SEQ ID NO: 287312 - protein, 123 aa, Zea mays
  Clone ID: MRT4577_25124C.1.pep
WLEPGTEVDETGRKWTKRASLSSFFPCYTIDCATEIFVGRSVDSLKDRLEEVRRESSMQPGQIKEVDTVPKKDFAWAFNRSLQVANVRLRLRSLSSFYGRKELKECKRVLYKFINDCIYAANL

SEQ ID NO: 287313 - protein, 72 aa, Zea mays
  Clone ID: MRT4577_25125C.1.pep
MGQRQTDSGRGRGEGVLGRWKREAGPRDGGGGGGEDRGGRCVAVDDRERATLEERREVGDGVAGAGGWSRPG

SEQ ID NO: 287314 - protein, 57 aa, Zea mays
  Clone ID: MRT4577_25126C.1.pep
SPSPRLLVQGPVQVHPIGLLGIWYASGVLVSAVVRLMFIEEVPLQQILCDPLAVFGR

SEQ ID NO: 287315 - protein, 83 aa, Zea mays
  Clone ID: MRT4577_25127C.1.pep
KRIAEVLLDCLKVYLCEEDDEDDLFQSSPRLRNNYYCNYNADYSKKMLQYQILCKFITWIKKSQNRKKKKKKAKKKKKKAPRA

SEQ ID NO: 287316 - protein, 110 aa, Zea mays
  Clone ID: MRT4577_25128C.1.pep
SGPNFKWGENFVKKKTFFPKLATTTEKLFCPKKGGGNTFFPKLGKKKILGVKKFLLLKNLKISPHRVWEKWNLKLAQKGRGGSQHKISNQIRKACHLILGAPQKGPPGGH

SEQ ID NO: 287317 - protein, 88 aa, Zea mays
  Clone ID: MRT4577_25129C.1.pep
RTGCCPPAAGCRIRTSAPHPARFSPAPRRHRTDRLPEAAAPVATTRAAAKAQQAVPRVAPRRQLQRRLRLRRRCRNRLPVQTAGRCSR

SEQ ID NO: 287318 - protein, 1123 aa, Zea mays
  Clone ID: MRT4577_2512C.1.pep
MAKGDKVHLFNDDFINDDEEQLAMKNKMIKEFGLNGYNVITKLMEKLDKIKATLDAQEDLLILEKERNLELQELLSNKDEMLEVLTKEISLVKITIEDKEKEMTNVKTSIFSLAKEKDALESSLSCLTVENQELQVQLENCKNFNTSSLVEESKASFSNNNVCKHCTKYHASCCLTNHARKKSPQVYSSGGSSWVHDSGCTNHMTGEKDMFHSLQLTQEAQEIVFGDSGKSKVIGIGKILISDQQSLSNVLLVDSLSYNLTSVSQLCGMGYNCLFSVVDVKILRREDSSVAFTGRLKGKLYLVDLTTRKKHGVPHQSKNVVTTKRPLELLHMDLFGLVAYISIGGSKYGLVIVDDFSRFTWVFFLSDKGETQETLKKFMRRAQNEFELKIKKAEAVNTACHAINRLYLYKVYKKTAYELLTGNEEPPCEAIKKLAIGEVRPQEKDDEEGTLWMTNEVFDVGAKVVGDKSSTQANPSTSSHPILEEVHQPQKMPTMVEDEPEVVVDEVPLDQPLKVEEALGDPDWIIAMQEELNNFTRNEVWSLVQRPKQNVIGTKWVFRNKQDERGVVTRNKARLVSQGFTQVEGLDFGETYAPLARLESIRILIAYATNHDFKLYQMDVKSAFLNGPLQERVNVEQPPGFEDPRKPNHVYLLHKALYGLKQAPRACTNEKFCEEFSKVMTNRFDMSMMGELKYFLGFQVKQLKEGTFLCQTKYTQDMLKKFGMEKAKHAKTPMSSNRHLDLNEEGWCVVEIHRLLSPIQVTKPQKFVKTLLLGPDPSAGADLAMSCQVGLVLHEAQARHSANEHVIDFTTNGGSALLQDMRFQNPTFCVRDVRIDVMLPKKHQSILHQRFINWDGCEAIGDPEMTQALKACEQKRMKTIMTFQYDWNAEIIAQFYSTLWIKHADEERFTDEDISGDKIKIHDFRPPTRAEAKDLHISESDEYWKSTNLHKYYRYINSLCRMTLIPKGGNQMNILGESKVLLSFMKPNSIESLNVFDMIWQEIIHASGFPLKGCLHAPFIMKMIEVVTQFRYEKGTRHLSYTPFWIDPNNPVGRLRKAPASSHEQAAAGPSRPSPSRGSPTPRGHGRGRGRGRGMGAQLAHGIATFFSMCMNISSDVHELARR

SEQ ID NO: 287319 - protein, 122 aa, Zea mays
  unsure (1)..(122): unsure at all Xaa locations
  Clone ID: MRT4577_25130C.1.pep
PPNEAARYPSISAQKDNLGRAHQTPVXEPAAEHGATKLMNLTPAEVRRTXYLGLHRXRRALLTELLESAHEAPELPTRGMPDDFDWRDHGAVGPVKNQGSCGRSWSFSAYGALEGAHYLATG

SEQ ID NO: 287320 - protein, 100 aa, Zea mays
  Clone ID: MRT4577_25131C.1.pep
GPFVYILSLTIRGSREIESRVLFQSIESVLFPPRDPLALLVVTFAFGVWYHHTLAACAALQGTVSRPLVSELLLCSTSVAAMPESRPAFWAFCQRLMGLI

SEQ ID NO: 287321 - protein, 44 aa, Zea mays
  Clone ID: MRT4577_25132C.1.pep
MDRGNGKKFFKKKKKKKKKKKKKKKKKKKKKKKKKKKLKKPPHP

SEQ ID NO: 287322 - protein, 55 aa, Zea mays
  unsure (1)..(55): unsure at all Xaa locations
  Clone ID: MRT4577_25133C.1.pep
IPCARTGVPRVATXDDTLNQRTKLCWSPDDEAXRMXXAVHLLXCXLXXTHAXPRT

SEQ ID NO: 287323 - protein, 42 aa, Zea mays
  Clone ID: MRT4577_25134C.1.pep
RRKNQFCGHNERHNMSLHTGTVAHATDKDLHASQSKIARANY

SEQ ID NO: 287324 - protein, 73 aa, Zea mays
  Clone ID: MRT4577_25135C.1.pep
HNRMHDNVKGILNGNNGTEGQLEHVRGLTKENNVENISEVHVKEALRVQVDVVGDEVECPDQRHMNPLLLLGR

SEQ ID NO: 287325 - protein, 48 aa, Zea mays
  Clone ID: MRT4577_25136C.1.pep
YALLITCAHPCKVILHYKYQKPFLVTKLMNLFTCFLSKCIRKLMRNCG

SEQ ID NO: 287326 - protein, 70 aa, Zea mays
  unsure (1)..(70): unsure at all Xaa locations
  Clone ID: MRT4577_25137C.1.pep
DTLYRFVLXXPVKIFGFPSLIFTMVLPVYHDANWTFLEIFPDKLFCSYXXTLPSAILSPLLLSSSLPHXL

SEQ ID NO: 287327 - protein, 168 aa, Zea mays
  Clone ID: MRT4577_25138C.1.pep
KVAIFCFFPEDARLTTAPSAAVAPAAAGSTTTMAVAASAGGSYQQEASAAVVSADYLQYQMMLLQGATSGQGSSSHGGYPLYYDYGGHGGAGAGAGGGAMSSSYSFPASTVTVASVPSSSASSAPSYGEAAQWAGSWPESSAWSYPATTASWSGSSQYEYPPSTRPPQ

SEQ ID NO: 287328 - protein, 126 aa, Zea mays
  Clone ID: MRT4577_25139C.1.pep
LDMTSDGAQQGRIVMELNPNEVPKTADNFHALCTGKKDILKCRKPMNYNDYTLHRVIRQFMYQGGYFTRDSSTGHESIYDEKFPDETFEHKHTGRGVLPMTNAEPNTNGCQYCICTDETPGLDSKH

SEQ ID NO: 287329 - protein, 98 aa, Zea mays
  Clone ID: MRT4577_2513C.1.pep
MECDKAAVKAMKKMEMEQMKAMKKMEKEQNAAMKALKKQERRTKKTAIMMMKCEENGEGTNEGHEEDGEGTEEGCEEGHEDGEGSKEDGNGYTEWLQG

SEQ ID NO: 287330 - protein, 265 aa, Zea mays
  unsure (1)..(265): unsure at all Xaa locations
  Clone ID: MRT4577_25140C.1.pep
LVLCTVYSSHLYLSAHAGGEQAAHDVQGAAAMEGHYSPTASAAEAAGERRFRGVRQRPWGKWAAEIRDPHKAARVWLGTFDTAEAAARAYDEAALRFRGSRAKLNFPEDARLTTAPSTAXRAAAGSTTTMAVAASAGGRRPSXASAAVVSADYLQYQMMLLQGAATSGQGSSSSHGGYPLYYDYGGHGGAGAGAGGGAMSSFSGSYSFPASTVTVAFVPSSAPRYDEAAQWTSWPESSASAWSYPASTGSWSASSQYPPSTRPPQ

SEQ ID NO: 287331 - protein, 99 aa, Zea mays
  Clone ID: MRT4577_25141C.1.pep
KNFSKKLKKKNPCGTKITGPNFVNRHHGKRGDFYSFHKTVPNDLKNILIGGPLGFYFFCFFFIKNGFLLSFKEIFFPLLFSMFFPFSIFYIFFTIPFFF

SEQ ID NO: 287332 - protein, 60 aa, Zea mays
  Clone ID: MRT4577_25142C.1.pep
AAVCSSWPLPSACCSPAAAAYWSSDLTQMGTSRPAAGDQTGYSYAGGGADIYYFVPSSKE

SEQ ID NO: 287333 - protein, 106 aa, Zea mays
  Clone ID: MRT4577_25143C.1.pep
IPLTISKDSGDTGMQEDSRGAKENPNYPSSSRSSRRDDGGVPLTNVTTRYLSTSASEKCKHSLHDKHKQYHRVSSCDRRHRHSLRSKDNRHRIETSRSPDGITSLK

SEQ ID NO: 287334 - protein, 79 aa, Zea mays
  Clone ID: MRT4577_25144C.1.pep
IEWPRTNRALARQGLFYSVAMDATQLLPVTPTCHFKPAPRRELYRAQRARSGQNRNSLAETCSPFSTLFALGSVGRVDA

SEQ ID NO: 287335 - protein, 124 aa, Zea mays
  Clone ID: MRT4577_25145C.1.pep
MEKYKQPSSNIMKVANLAFSGDDGITKSTRRMELNLKEALAQRNKCMVLDEICYDCDWMAPRYTVVPSLADGMHVSEVRVKCPDFAMSITGDPCPTPHDARCSAAANMILELGKKAEEKEQHDN

SEQ ID NO: 287336 - protein, 79 aa, Zea mays
  Clone ID: MRT4577_25146C.1.pep
SLMISMMKGGEFYSWFKLELASEVRSGVCMCCPFLFHFMRKDCYLFLELYLVVLVNKYFSMVVRQLLKKKKKKKKTRGG

SEQ ID NO: 287337 - protein, 117 aa, Zea mays
  unsure (1)..(117): unsure at all Xaa locations
  Clone ID: MRT4577_25147C.1.pep
RRQFNTILGLMEXTSKPDYATYVKICTDASSIKEMIPWGALVMLTPSLMXNLFGIETLSGVFAGALVFGVQVRTLPSTLSVHFNVFACSRVYGDFCFGQIAISTSNTVLHRITQEVY

SEQ ID NO: 287338 - protein, 183 aa, Zea mays
  Clone ID: MRT4577_25148C.1.pep
LIAINRPSRSARTTSKSSDLKTLVWKATEDFSISIPQYQLLNFKLTCMFVISSRAGPRPHARVSRPTHTVPLPHARAGSRSSRRILPHAQAGNHGSRPLLSSHRGSRPCCAPDAWLLILLSESLPPSAFGTVHPPRLAWPPRGSAEAGGNTRAASGMRLRSFASASSHPLPSASSSRCSCLHL

SEQ ID NO: 287339 - protein, 113 aa, Zea mays
  Clone ID: MRT4577_25149C.1.pep
IKSLKSTFSQVTNDKNARALQHQQSVEQVSVMESQLSKLQSELDEAKHKVQLLTQDLEKKKEEAENIHFKLQDECHRSMLIKATLLMAKGLHSPLQKKKKKKKKKYSALLPLL

SEQ ID NO: 287340 - protein, 105 aa, Zea mays
  Clone ID: MRT4577_2514C.1.pep
SGKPPPVLVLIHLRVRLLVLVLLLLLVVPRALPLAADLPHHVVVVEVEVVAVGWVPAWPTGLRLSSPCAETLPPPQDPSGSAPPPAQSGEEHFASDLAHHLFAPH

SEQ ID NO: 287341 - protein, 173 aa, Zea mays
  unsure (1)..(173): unsure at all Xaa locations
  Clone ID: MRT4577_25150C.1.pep
NASPHVIFIHDSYSTRISHAKALGWLRPMVPGSMESNDNHPSTPPLDCVTPVGQFSSAVLEDAPHAIGAIDATPISEYNRRSNISLXDADDDPXYSAYESERKTIKGRXPDSGRDGSNVKVQRTKPTYDNFVAGKELAFLPDSSDTSDSRESRXMTFEALLQRHLQMVVTQYC

SEQ ID NO: 287342 - protein, 44 aa, Zea mays
  Clone ID: MRT4577_25151C.1.pep
MGSETFLEILLGILLSAVGVFLRYGIGVEFWIWLVLTILGYNSG

SEQ ID NO: 287343 - protein, 67 aa, Zea mays
  Clone ID: MRT4577_25152C.1.pep
RMSHYILVIQEADLTALVIFYYYLTKAGVNYSLADSEFKDLTYLELDYFVEDRLDCDHSTTKKWLQC

SEQ ID NO: 287344 - protein, 95 aa, Zea mays
  unsure (1)..(95): unsure at all Xaa locations
  Clone ID: MRT4577_25153C.1.pep
AVWFKTGALLLDCNTLNYFGNSVPINLVVAVIAEVILVGGAEYYRITNGLDLEDKLHPGGPFDPLGLASDPDQAAILKVKEIKNGXRLPMFSMFA

SEQ ID NO: 287345 - protein, 229 aa, Zea mays
  unsure (1)..(229): unsure at all Xaa locations
  Clone ID: MRT4577_25154C.1.pep
MSGARPLLSNRASSEISGGRDLAEEDALLTGRRTGYGQKGYSQSQKWREVGLFVWAVIATGAVVVLGILLQSSTDDSKTPQASGKRNLIFMVSDGMGPTSLSLTRSFMQFQNGAPFNEQLVLDQHLIGQSRTRSSSSLITDSAAGATAFSCAQKSYNGAISVTPDHEPCGTVLEAAKKAGYMTGLVVTTRITDATPACFAAHVNMRSEEDRIAEQMVGDXPLXRVXDLM

SEQ ID NO: 287346 - protein, 161 aa, Zea mays
  Clone ID: MRT4577_25155C.1.pep
WGGGFFFFFFFFFFLFFFFFFFFFIFFLFFFFFYLGALMVPADPRGKPGGGGGGAQRGPRKPRGKTRPCLSGEQLTLGAKRKQNASQGKNRGRQGGQKRDQPAKKGRPRRGRQGGGNPDQEDGQKQRAKHGKSRGELRQAGHPPLPQKAKTLLDGGNGGFN

SEQ ID NO: 287347 - protein, 55 aa, Zea mays
  Clone ID: MRT4577_25156C.1.pep
RPTLASSFFLFFFFFYFLCALCFFLFLIVFSSSGPWGSSRENLAPYLEGDQVSFY

SEQ ID NO: 287348 - protein, 78 aa, Zea mays
  Clone ID: MRT4577_25157C.1.pep
KNFKAVCSISYQFRMRTMKMPFFLVTSVYGPILSMHCIAFLQMRKHGNVCKQHFNVCASVKMLCVLDSIAPYTDVDKH

SEQ ID NO: 287349 - protein, 47 aa, Zea mays
  Clone ID: MRT4577_25158C.1.pep
PRIPKSTTPAVVHGYHMASITALLVNLCAILLHPSEWDTPDEIGPEP

SEQ ID NO: 287350 - protein, 88 aa, Zea mays
  unsure (1)..(88): unsure at all Xaa locations
  Clone ID: MRT4577_25159C.1.pep
SCRQLVAYXTGAVHVQCFGCLTINLVLEEHQVGKVYCGQCDTLLMYPFGAPAVKCSNCLFVTEIGERNVRPRILMEQSVSPAAQEEVH

SEQ ID NO: 287351 - protein, 411 aa, Zea mays
  Clone ID: MRT4577_2515C.1.pep
MELTGAALRRYALPSASPVAARVGRRRRPARVACVGGGGFAEEGHLRYYEAAPRRKAVEAVARDLGKLRAMGLVAGDAAKEKVLSEATDLLLQELSQMKDAEYKINKMEKEQNAAMKALKKQEKRTKKTAIMMMKCEEDESSESSESDCEDEATMNAEQDMVMSTAVPEVVASSISAVLAMECDKAAVKAMKKMEKEQMKAMKKMEKEQKKAAKKAMKMEKEAKKMAMATLNGCRDEDDSSCSSESSESECEGQVMRMSRCATITAPEMPPPSTGLPIIVPQIPAPLAPQPSQSQPSEPATAVQATRVSSVAVTETSTTSRIEVCMGGKCKKSGALALLQEFEKAVGTGGAVVGCKCLGKCGLGPNVRLRSGASAEGSAKGNPLCIGVGFEDVGTIVAGLFGGADLGMTPT

SEQ ID NO: 287352 - protein, 78 aa, Zea mays
  Clone ID: MRT4577_25160C.1.pep
GTIYKGVLDDGRAVAVKRLGYIRQHSREEFHDELHVIARINHMNLVRMYGFCSERSHRMLVLEYADRGSLADVLFRGR

SEQ ID NO: 287353 - protein, 84 aa, Zea mays
  Clone ID: MRT4577_25161C.1.pep
SKGVINGTAPNPVRLSELCERLGRIVGRPSWLPVPEFALKAVLGEGASVVLEGQKVLPAKAKHLGFSYRYPYVEDALKAIARDL

SEQ ID NO: 287354 - protein, 58 aa, Zea mays
  Clone ID: MRT4577_25162C.1.pep
KKNHVRKLSPAWSHYCVSVAVGESGLEWGQAAHEGPCSRHRVCAAHEPPSKSVWGSRP

SEQ ID NO: 287355 - protein, 160 aa, Zea mays
  unsure (1)..(160): unsure at all Xaa locations
  Clone ID: MRT4577_25163C.1.pep
QPTREDSGNMGKLANQARALTRXWIEFMXERVARSAMGNGRGEELSXEERNLLTISYNNVIRGRLASWRILSSIXQKDEGRGNEAHAASIRTYRSEIKIEVDHICDGILGLLDSHVIASDDADKTKVFYLKMKGDYRRYLGEIKSGEEMKDAAXSTMNGY

SEQ ID NO: 287356 - protein, 131 aa, Zea mays
  unsure (1)..(131): unsure at all Xaa locations
  Clone ID: MRT4577_25164C.1.pep
KKKKPPWGPPRPPXLAPRPGKPPTGLKPRGKKXPNPGPKXWGPLGPKKKVPPVPDPGGPPGNPDPDPEGDPLSPKGSRIKPGXTRAKAVPGGKWFPPTNPPXNNPKPKRENPGGPKGGPTPHKWGGPTGPF

SEQ ID NO: 287357 - protein, 70 aa, Zea mays
  Clone ID: MRT4577_25165C.1.pep
TLNYIGRVASFVCHIVIIFGVGMSVIQVENRESAAVSKLYADSGKYRLHQLANAQYDLQRYQFPLIRHLG

SEQ ID NO: 287358 - protein, 91 aa, Zea mays
  Clone ID: MRT4577_25166C.1.pep
KAGGDKLAGAPHPFLFAPGPGSAAPLWQVGPPRMGKWVRSSAPPCGPGSPSSLRQPWPESRPPFVVDSENRKLVGSVPSGGGLFFFSPLYI

SEQ ID NO: 287359 - protein, 99 aa, Zea mays
  Clone ID: MRT4577_25167C.1.pep
REREREKARQGPRRTSKMLTLMNRSQLSCLSRSISEWRQSEAGSADDDELETLSGWGLLLYILFFRTGDSTDAAVITIPVISWLSLLRGVNGIHSISAE

SEQ ID NO: 287360 - protein, 65 aa, Zea mays
  Clone ID: MRT4577_25168C.1.pep
KILRVGNEDWYVCPIPKGQGACSYKVPATDAVGAGDNDDANGSANPAQPNDDEWPFDVINDEIVP

SEQ ID NO: 287361 - protein, 352 aa, Zea mays
  unsure (1)..(352): unsure at all Xaa locations
  Clone ID: MRT4577_25169C.1.pep
KLSAXGNSSLTLPSTDNMPSWGRISLSSQVHDTKQSSGYPAITFFGXLKXAYAQDYSTNSDIFGRLRDTSEDSSKVEQSMYASTRDYGNAFNSSMIAGTVDHDTNVEITQTSADSTPVNSERQDPFLSSGYPTTYTRSRPSFLDMIGVQRAPLTTQASYREPAKANQLSSYSNYQSSFLQQSNQQSTGSNAADISFASESQEYSHEKGSYGSSTPPDFLLPKEERSIHHGNQTFQNFTTHGNDDDFAALEQLIEDLTKEKFSLQQTLQKSQELAETLATDNSALTDKFNQQAHVISQLTSDMERLQEEIQAQLLALESIRTEYANAQLECSAADERAKVLAAEVFYESVECQ

SEQ ID NO: 287362 - protein, 61 aa, Zea mays
  Clone ID: MRT4577_2516C.1.pep
PLTSSVPPDRQRHSPPPLPNDSRFHLGMADHANQCHCPSVSTDRQIPFWRSSHTRARMWRC

SEQ ID NO: 287363 - protein, 62 aa, Zea mays
  Clone ID: MRT4577_25170C.1.pep
NFNSKPYFTSLLHFYTKKTKKITHDLSHINFTIITFKTFSPPPTPYILFHTHLPSLNLYQLI

SEQ ID NO: 287364 - protein, 82 aa, Zea mays
  unsure (1)..(82): unsure at all Xaa locations
  Clone ID: MRT4577_25171C.1.pep
GAWTVYVTSLSLGRLAMLYTGSTNACVQMQSLAVPVDYADPVVTNWTXKHDGDYELYPPTNIGPKDSANPTTXIWIDPWDGS

SEQ ID NO: 287365 - protein, 94 aa, Zea mays
  Clone ID: MRT4577_25173C.1.pep
KQQATHYYIITRARAPALNIGPRIIIYIIYMVTDTLHDRQSKRHGTVTVDTHTLQILDRCGLVGPLKYYRPPPNGLPLLLIMRRILARGHHGDR

SEQ ID NO: 287366 - protein, 89 aa, Zea mays
  Clone ID: MRT4577_25174C.1.pep
MAESLRSPRRSLYKLVGSPPWKEAFRQRCLERMRNSRDRLLNRYRQAGSSGPGNSQNSFLVQEVMEEEWNALQSVENCPEDLAQLEELI

SEQ ID NO: 287367 - protein, 438 aa, Zea mays
  Clone ID: MRT4577_25175C.1.pep
MGEVHEADKNIEIWRVKKLIKALDAARGNGTSMISLIMPPRDQISRVTKMLGDEYGTASNIKSRVNRQSVLAAITSAQQRLKLYSRVPPNGLVLYTGTIVTDDGKEKKVTFDFEPFRPINASLYLCDNKFHTEALNELLTSDDKFGFIIIDGNGTLYGTLSGNSREVLYKFSVDLPKKHGRGGQSAVRFARLRMERRHNYLRKVAELATQYFINPGTNQPNIVGLILAGSADFKSELGKSEMFDPRLQAKVVKMIDVSYGGDSGFNQAIEMSAEVLSDVKFVQEKKLIGKYFEEISQDTGKYVLGIQDTITALEMGAVEILIVWENLDVRRYELKNSATGETVVKYLNPAQEADQSNFTDEATSGDLEVIDNTQLLEWFAENYHQFGCTLEFVTNKSQEGSQFCRGFGGIGGILRYPADVSAYQDGDLSDGEYDEDLE

SEQ ID NO: 287368 - protein, 47 aa, Zea mays
  Clone ID: MRT4577_25176C.1.pep
KQGASKPRTGARSVRIPPAARLCTAAAIRLTEPAHAAAPPKAGTETG

SEQ ID NO: 287369 - protein, 246 aa, Zea mays
  Clone ID: MRT4577_25177C.1.pep
ERRRRSQAEAAGGGDKEAVRAYFNSTGFERWRKIYGSATEGVNRVQLDIREGHAQTVAAALAMLRDSPLELSGATVCDAGCGTGSLAIPLAAAGADVLASDISAAMVSEAQRQAAAQSSSSSFRMPRFEVRDLESLEGRYDVVVCLDVLIHYPREEARAMIRHLASLADKRLLISFAPRTLYFDFLKRVGELFPGPSKATRAYLHAEADIEDALRQAGWRVANRGFISTQFYFAKLFDAVPVGSST

SEQ ID NO: 287370 - protein, 104 aa, Zea mays
  Clone ID: MRT4577_25178C.1.pep
LGFIKVLGVFKPQMQTHHIPFPMIFIRPQNTQRTVFFKEFLIEPPHHRGKKTTFYNTSWIHPGNAMKMNFPLLSDGKELFQRRLLGDQNYLLFSQMHPFHPLQI

SEQ ID NO: 287371 - protein, 309 aa, Zea mays
  unsure (1)..(309): unsure at all Xaa locations
  Clone ID: MRT4577_25179C.1.pep
MAPLANQKTYKLYNGVTIPAVGFGTFASEGASGETYAAVTTALKTGYRHLDCAWFYQNEEEVGAAVRDFLKENPSVTRKDLFICTKVWNHLHEPDQVKWSFNSSLTKLGMDYIDAFLVHWPIAAESDDNHMPKIGADGKYIIKKDLTENPEPTWHAMEEIYESGKAKSIGVSNWTIDGLKKLLSFAKVKPMMNQIEIHPFLPNSDLVXFCQDNDILVSAYSPLGSQNQVPSTGEKVRTNAKLNEVAQRSGYDLAQVLLAWGLQRGXTSSCPRAPPPRASRATGTFPSSAKRTLTLSRRLQGAGTRALLI

SEQ ID NO: 287372 - protein, 1276 aa, Zea mays
  Clone ID: MRT4577_2517C.1.pep
MSTQRDHVDPLLEEIPVTSSGEEVDPKVLDLAMKIAEKMFLKMKEEDARKKAEEEESRRKAEEDKCKGTFDYNDDLVDLLVSKVLSKVSLNTKGSSTKSRGNDFSKVQFDYSRNYIPNFSSAPLGKLPTLSELNYEEWADKMKSHLIGVHPSLWEIVHVGMYKPAQGEEMTPKMMQEVHRNAQAVSIIKGSLCPEEYRKVQGREDARDIWNILRMSHEGDPKAKRHRVEALESELARYDWTKGESLQSLFDRLMVLVNKIRVLGSEDWSDSKVTRLFMRAYKEKDKSLARMIRDRDDYEDMTPHQLFAKIQQHESEEAPIKTRDSHALITNEQDNLKKSKDHNAKKVVETSSDEDSSSDEDTAMFIKTFKKFVRKNDKFQRKGKKRACYECGQTGHFIADCPNKKEQEAKKEYKKDKFKRGGKTKGYFKKKKYGQAHIGEEWNSDDESSSSEEEEVVANVAIQSTSSAQLFTNLQDDSYTPTCLMAKGDKVTLFSNDFSNDDDDDQIAMKNKMIKEFGLNGYNVITKLMEKLDKRKATLDAQEDLLVLEKERNLELQELIHNKDKEVINMKTSIDNLANEKNALESSMLSLNIQNQELQVQLENCKNINASCLVLESKSRLNDNSCKHCAKYHASCCLTNHARKNSPQVKVKEIFKRCSSNDGLKKVEPKYKSLKPNNGRRGLGFNSSKENPSTVHKGWRSPKFIEGTTLYDALGRIHSSNDKSPQVYSSGGSSWVLDSGCTNHMTGEKDMFHTLQLTQEAQEIVFGDSGKSKVIGIGKIPISDQQSLSNVLLVDSLSYNLLSVSQLCGMGYNCLFSDVDVKILRREDSSVAFTGRLKGKLYLVDFTTSKVTPETCLVAKSDKGWLWHRRLAHVGMRNLAKLQKDNHIIGLTNVVFEKDRVCGACQAGKQHGVPHQSKNVVTTKRPLELLHMDLFGHVAYISIGGSKYGLVIVDDFSRFTWVFFLSDKGETQEILKKFMRRAQNEFELKIKKVRSDNGTEFKNTGVEEFLGEEGIKHEFSVPYTPQQNGVVERKNRTLIEAARTMLDEYKTPDNFWAEAVNTACHAINRLYLHKIYKKTAYELLTGNKPKVDYFRVFGCKCFILNKKVKSSKFASRVDEGFLLGYASNAHGYRVFNNSTGLVEIAIDVTFDESNGSQGHVSNDTAGNEELPCDAIKKLAIGEVRPQERDDEEGTLWMTNEVVDVGARVVSDNVSTQANPSTSSHPSLEQNHQRMPTVVEDEQENIDGEVPLDQITDEEEQIQRHPSVPHPRVHHTI

SEQ ID NO: 287373 - protein, 107 aa, Zea mays
  unsure (1)..(107): unsure at all Xaa locations
  Clone ID: MRT4577_25180C.1.pep
VPHPFCGFGGRQIVPLVKIPMPVTFGFINITTTEQAVFDIVDMDYPYNAIMGRGTLIAFKAILNPAYLGLKIPWDQGPILINGRQEAAKRAXGNWTDSKSFHILEWS

SEQ ID NO: 287374 - protein, 92 aa, Zea mays
  unsure (1)..(92): unsure at all Xaa locations
  Clone ID: MRT4577_25181C.1.pep
PGXXXLPLACRPSLVILMVRPLGLQLYWVFGALFVLRXXRSRVGHFGVCSRVKKSPLILEDHEGLGPSGNSMVSGKCVCSMGLCWAVLLPSN

SEQ ID NO: 287375 - protein, 364 aa, Zea mays
  Clone ID: MRT4577_25182C.1.pep
MAGDGNGRAELPRIAVIGAGIFARTQYIPRLREIAHLVVLKSIWSRTQESAKAAAELARDFAPDIECKWGDAGLEEIMGDSSIMGVAIVLAGQVQVELSLKMLKAGKHVIQEKPASGSTTEAETALSIYHSFQNLFPHKPIWAVGENYRFEPAFIESSKLINDIGDMMHIQVIIEGSMNSSNPYFNSTWRRNFVGGFILDMGVHFIAGLRMLVGSEITSVSSISRHVDMALPPPDNICSLFQLENGCAGVFVFAVNSRSPKILWRVDGTKGTIQVERGVDSGKHGYQVLFSGENGQCQKTFYPFCGVNEELKTFVHDMLEAGKDGDHKAAPRGSYVEGARDVAVLEAMLESSAKQGAPVQVKRF

SEQ ID NO: 287376 - protein, 276 aa, Zea mays
  unsure (1)..(276): unsure at all Xaa locations
  Clone ID: MRT4577_25183C.1.pep
MGRTPCCDSKGIKKGPWAPEEDKLLVDYVQANGPGNWRILPKLAGLNRCGKSCRLRWTNYLRPDIKRGPFTPEEHNSILQLHAVVGNKWSMIAAQMPGRTDNEIKNYWNTHMKKPPAPXARHTAQWETARLEAEARLSLLSSSAATTVTSATASSSSSTVAAEHAAPPDIFLRLWNSEVGDSFRGAAAQQGHGPEASAAGAGVPALLPELGGGGDDSSAASTYEAEAAADDGYQAFLDLAMEEFALLHGRLGAFSAFPQADVFAEAHCCLFAPFEE

SEQ ID NO: 287377 - protein, 89 aa, Zea mays
  Clone ID: MRT4577_25184C.1.pep
MTFQQAWRTLNVYVLTPYHLMHRLSASAFLLDFLYAAYLFTFTVTPNYTKILSTVIRIDLGTTYSSVGVYNNAHVYIIANDQANRITPS

SEQ ID NO: 287378 - protein, 67 aa, Zea mays
  Clone ID: MRT4577_25185C.1.pep
TSSVPPTWSYSISPLPHLLSRSIRLPALRNVCYYDHDQTRHEARRLSICLHDALRASFSSSFETCEC

SEQ ID NO: 287379 - protein, 69 aa, Zea mays
  Clone ID: MRT4577_25186C.1.pep
SPTHSIQFQSIAGHSGAGSLLSLLSHKGLVLFYLSSFPSIGLMAPPECFFVCIERERERRVTGEARQIY

SEQ ID NO: 287380 - protein, 332 aa, Zea mays
  Clone ID: MRT4577_25187C.1.pep
PRPPSVRPRVRIDARGGVVSASLRALGLDYLRDPSQDAQALGPALELWGRHLEFVVRRLLESERQLCAKVFGQHKDVASACFAEVAAQAGVLDFLRFGRAVADAKKDPIKLQRLLEVFDSLNKLRLDFNRLFGGKACAEIQSQTRDLVKLLIDGAVEIFEELIVQVELQRHMPPPVDGGVPRLVTFVVEYCNRLLGEQYRPVLGQVLTIHRSWRKEVFNDRMLVDVVLNIVKALEANFDVWSKAYDNATLSYLFMMNTHWHFFRHLKATKLGEILGDVWLREHEQYKDYYLSMFIRESWGALSPLLNREGLILFFKGQATGRDLVKQLLKTF

SEQ ID NO: 287381 - protein, 54 aa, Zea mays
  Clone ID: MRT4577_25188C.1.pep
LQILRRKILEMWPKELHHRRVTENAYVDVPMGIRHLHTQAKIELVMPTGLRTRG

SEQ ID NO: 287382 - protein, 71 aa, Zea mays
  Clone ID: MRT4577_25189C.1.pep
PHIRKKHQCYNIYKNKKTNRKTRAPSKGFKFLYPYLPGKIFSFGAPKINLMARVLKHIDLEKPPVTQIKCL

SEQ ID NO: 287383 - protein, 351 aa, Zea mays
  Clone ID: MRT4577_2518C.1.pep
MASGEGVVDQLYEAAGGEAVAKIEGEAKVEAEAKMTEEPVLYLDLTSYQLHDLSEVEIPPTLEEVDLTANRLSSVDPRIGQLPHLRKLSFRQNLLDDDAVAPLTSWEAIAGLKEFVLRDNKLTRIPDAGIFKDLLVFDVSFNEISSLTGLSKVSIKLKELYVSKNEVAKMEELEHFHALEILELGSNRLRVMENLETLTNLQELWLGRNRIRAVNLCGLKLIKKISLQSNRLTSMHGFQECAALEELYLSHNGIQKMEGLSTLHNLRILDVSANKLTTIENIETLTRLEDLWLNDNQIPSLEGIETALAGSREKLTTIYLERNPCAKTPDYSSTLRKIFPNLEQIDSDIIA

SEQ ID NO: 287384 - protein, 48 aa, Zea mays
  unsure (1)..(48): unsure at all Xaa locations
  Clone ID: MRT4577_25190C.1.pep
TTERXNGGSCKACGISIGASFSVPTPGGRIDDLRVLATAREPDGGRPG

SEQ ID NO: 287385 - protein, 181 aa, Zea mays
  unsure (1)..(181): unsure at all Xaa locations
  Clone ID: MRT4577_25191C.1.pep
PSSMAREWPVVRTXTPLHDEGRPSDEEPWHSSEARGDSTARPRSGSCGLARGGRAKPPHDRIRCGPDPRWRGEAAPRPPRAMRGVAPVRPVPKSAVVTTAAYVEAPISWIHIPSGDTPDLLLLDDVTRGGIRWICRGSEDDEHDGQRDRSRILGGRYPRRRTISPGATRRGQRKTLVRSKT

SEQ ID NO: 287386 - protein, 125 aa, Zea mays
  Clone ID: MRT4577_25192C.1.pep
GGFSKFRAAAGADNALIPSATPSRFRRRRAALRRCAPCQRRVGSGSGSGSGRQSPPCTAAGTCVGVRFVPPARARPRGSRQRLRCGFPKFQNSVVCSFRMERSISLSLTVFAPKQSSVRPSFLLF

SEQ ID NO: 287387 - protein, 187 aa, Zea mays
  unsure (1)..(187): unsure at all Xaa locations
  Clone ID: MRT4577_25193C.1.pep
RPGRDRDVXDXPAASLGGTTTWRSACSKSVDVLELGAADSCRTARGRSPWRCPVLVAGAPAPCAHEHRAVHVVPARGRPRRRTRRPSLHTLADTPSLFRTSCACAPTRTRQVCACTTSTPTAPWRLPAKCGLATPPDCYHCAATQAKRNAPGIATLYVSVSCICSTLHARGRTYESLSLSHLVAVPI

SEQ ID NO: 287388 - protein, 67 aa, Zea mays
  Clone ID: MRT4577_25194C.1.pep
SSSCQCLVVWVHGAYVAFCRRLSGSVIGYRPRLTISRSVYGRPMVRPSAHSMARLASTRHMPRACAV

SEQ ID NO: 287389 - protein, 46 aa, Zea mays
  Clone ID: MRT4577_25195C.1.pep
LRTPERKSSVWIGEYNAASHSAYQQTWISKAEYDATGPGIVHRKCF

SEQ ID NO: 287390 - protein, 88 aa, Zea mays
  Clone ID: MRT4577_25196C.1.pep
GLSSLRPVAGRYPPPPVPLCRDQPASCSESGGPTLSHDQSAGGTLIVATKAIPSIKYALVAPPLHSMSQWLLERSSNIIIYADSKRLP

SEQ ID NO: 287391 - protein, 66 aa, Zea mays
  Clone ID: MRT4577_25197C.1.pep
CHFLEEDEGNELGLLFPFPPTRLLWHLSFLPPGFTPLFMRQRYTGTTPYPGQDEWIKGVRMLENIL

SEQ ID NO: 287392 - protein, 44 aa, Zea mays
  Clone ID: MRT4577_25198C.1.pep
VRVAVHNGIDDNPIIINDKLYIMNLFCLTNSITFYESQWNSNRS

SEQ ID NO: 287393 - protein, 94 aa, Zea mays
  Clone ID: MRT4577_25199C.1.pep
AAPASTGSAYACRPMRSERQPFHILLKARVLAPIVCLLGDHYYHFLQLKSFPVRTGLVANESTTPPLLHFPTILVNIMPIKAQQNKGARHRFIA

SEQ ID NO: 287394 - protein, 78 aa, Zea mays
  unsure (1)..(78): unsure at all Xaa locations
  Clone ID: MRT4577_2519C.1.pep
GLTRRLDVAVRKGVESREQVAGFGKETTVCDECRVVVAWEFVGLAQSNKANMGLLVYSRGXRRGGSRELLXGGSAGVF

SEQ ID NO: 287395 - protein, 117 aa, Zea mays
  Clone ID: MRT4577_251C.1.pep
MRESISIHIGQAGIQVRNACWELYCLEHGIQADGQMPGDQTIGGGDDAFNTFFTENGAGKHVPPAVFVELETTVIDEVKTGTYRQTFHTEQLIIGKEDAGNNSARGHYTIGYEIVDL

SEQ ID NO: 287396 - protein, 75 aa, Zea mays
  Clone ID: MRT4577_25200C.1.pep
VPGSRKNGYAELLPPIFQILTGGGGVFVLSTPFRSEGLIRCWESVPPPLGEGGHYCVLGMPLFFSSPAKGLGFMV

SEQ ID NO: 287397 - protein, 103 aa, Zea mays
  Clone ID: MRT4577_25201C.1.pep
MAEDSPGSDSADGSLPTAPPPWSSSSLQRAEDDHEHGEVEPAAEAVDVDASSDAAGMGSGAAVVGRRSREKHPSIVLARSSATDFLALLLVGNGREGDVCSYS

SEQ ID NO: 287398 - protein, 99 aa, Zea mays
  Clone ID: MRT4577_25202C.1.pep
VGPPGGGVRHHGSPSVRALALPKEARGRSRMALNNTPPPRQKGPPPPPAGDPWAGGGQQGGTGRKPPPPGKPTSRGVKGFIEDCFPPLSCCWVCEIFCD

SEQ ID NO: 287399 - protein, 52 aa, Zea mays
  Clone ID: MRT4577_25203C.1.pep
LALYYKHSRPTLSLLFALLVQWCHKRMRVPPFFSHSISSYIRKGTCFSLIKS

SEQ ID NO: 287400 - protein, 71 aa, Zea mays
  unsure (1)..(71): unsure at all Xaa locations
  Clone ID: MRT4577_25204C.1.pep
RPHIHSHLHYSIHALYLFCSPAILSKNLFIHDPHIXKTLPSFSPLDCSSYAKLPALTFKVGTPPSFFTIIT

SEQ ID NO: 287401 - protein, 55 aa, Zea mays
  Clone ID: MRT4577_25205C.1.pep
YILLMTDDLHHISEAAPCKSKVIFSFQAMTLHSLNAPATNKHFFATFYSLNIHNT

SEQ ID NO: 287402 - protein, 113 aa, Zea mays
  unsure (1)..(113): unsure at all Xaa locations
  Clone ID: MRT4577_25206C.1.pep
GWGCETSLCACAKHLLSFPLVSLSDGGTKKEPKKQFGGLKSKTGEADITGAKVDIXGGLIIKAEKHPNADFLYVEEIDVGEDAPRTLISGLVKFIXPLEEMQSRKGCVLFILK

SEQ ID NO: 287403 - protein, 51 aa, Zea mays
  Clone ID: MRT4577_25207C.1.pep
CKCYSPCIISLISAGCSGYSHRDSYTIQHPISSSFQFLHYLSRHVRPLSPS

SEQ ID NO: 287404 - protein, 44 aa, Zea mays
  Clone ID: MRT4577_25208C.1.pep
QFVYRHRLSADVLNIYRDPCLQTQRINGIRRQMICVPRRLVDNA

SEQ ID NO: 287405 - protein, 39 aa, Zea mays
  Clone ID: MRT4577_25209C.1.pep
AVASPQCAHKKPQLAISWRSLSPPATPFGLWAKHQSQAR

SEQ ID NO: 287406 - protein, 325 aa, Zea mays
  unsure (1)..(325): unsure at all Xaa locations
  Clone ID: MRT4577_2520C.1.pep
VTPETCLVAKSDXGWLXHRRLAHVGMRNLAKLQNDSHIIGLTNVVFEKDRVCGACKAGKQHRVPHQSKNVVTTKRPLELLHMDLFGPVAYISIGGSKYGLVIVYDFXSRFTXIFFLSDKGETQETLKKFMRRAQNEFELKIKKVRSDNRTEFKNTCVEEFLGEEGIKHEFSVPYTPQQNGVVERKKRTLIEAARTMLDEYKTPDNFWAEAVNTACHAINRLYLHKIYKKTAYELLTGNKPKVDYFRVFGCKCFILNKKVKSSKFAPRVDEGFLLGYASNAHGYRVSNNSTGLVEIAIDVTFDESNGSQGHVSKDTACNENLPCEA

SEQ ID NO: 287407 - protein, 52 aa, Zea mays
  unsure (1)..(52): unsure at all Xaa locations
  Clone ID: MRT4577_25210C.1.pep
MNHKEAGCQTHEGPILCINNXGLLRSAATMIMCSRCHKEMITKXDHAKLAAF

SEQ ID NO: 287408 - protein, 822 aa, Zea mays
  unsure (1)..(822): unsure at all Xaa locations
  Clone ID: MRT4577_25211C.1.pep
LWDAETGACEATLHGHRSAASALRFGPSGAVLASGSKDCDVILWDVVAQAGLFRLRGHRDQVTDLVFLDAGVLRACCAWAWLLGVRGPPSHPSLPIVGRPRSEIWSMDVDPSERFLVSGSADPELQVSRLRRSVEEGGGRCERVLLSLLPGRPRQSKERVANVRFNRDGSLVVCQVAGKTADIYRVLDETEAARKAKRRVNRKKEKASAKSMIAEENGTIIDPLPVQNLQNPTVIVTDVFKLFQVLRASKKICSITFSPSNPPRGCLATLSLSLNNNMLETYSVDKEKVSKMYSVEMHGHRSDIRSVSLNSEDNLLMSTSHNAVKIWNPSTGECLRTIDSGYGLSSAFVGNRYALVGTKSXVPIPDEDGTVGARGFVTGSADHDVKFWEYQLVQKSDNDSKQLTVTNVRTLKMTEDVLAVSISPEGKHIAVALLDCHVKVFYMDTLKPSLNLYGHKLPVLCMDISSDGALLVTGSADKNLKIWGMDFGDCHRSIFAHSDSVMDVKFVYRTHYMFSVGKDRTMKYWDADKFELLLTLEGHHAEVWCLTLSSRGDFVVTGSHDRSIRRWDRTEEQLFIEEEKEKRLEETFEADLENDNDYRYGQKDDAPDEGSVGVPGRKTKETVTSADAIMDALDTAEEELKRINQHKMEEQITAKAAKFQPNVIMQGHSPSDYVLNVVSSIRPNDLEQALLALPFSDALKLMSYLKEWSLVPSKVELVCRVCLVLLQTHHNQLTATPAARSLLTELKDILYCRVKECKDTIGFNLAAMDHIKELLALRSDAPFRDAKAKLMEIKKEQSKRSSSRLDGDEKRKKKRKKASAES

SEQ ID NO: 287409 - protein, 58 aa, Zea mays
  Clone ID: MRT4577_25212C.1.pep
IRHEGRLGDYRCTSRTNKCRQWAKRGSEEWPPSCRSEVSTFICSTSRLGDYRCTPADG

SEQ ID NO: 287410 - protein, 58 aa, Zea mays
  Clone ID: MRT4577_25213C.1.pep
RQHERPKHIAGLVCLNDIDTAGLVGYTTLPTATNEGPLDDDSSNTSLIDHYSMGRMND

SEQ ID NO: 287411 - protein, 389 aa, Zea mays
  unsure (1)..(389): unsure at all Xaa locations
  Clone ID: MRT4577_25214C.1.pep
FLVSGSADPELQVFRIRQSVEEGEDWSKWDVLKLFGEIPRQSKERVANVRFNRDGSLVVCQVAGKTADIYRVLDETEAARKAKRRVNRKKEKASAKSMIAEENGTIIDPLPVQNLQNPTVIVTDVFKLFQVLRASKKICSITFSPSNPPRGCLATLSLSLNNNMLETYSVDKEKVSKMYSVEMHGHRSDIRSVSLNSEDNLLXMSTSHNAVKIWNPSTGECLRTIDSGYGLSSAFVGNRYALVGTKSGTLEIMDIASGSLTEAIEAHAGSIRSIVPIPDEDGTVGARGFVTGSADHDVKFWEYQLVQKSDNDSKQLTVTNVRTLKMTEDVLAVSISPEGKHIAVALLDCHVKVFHMDTLKPSXNLYGHKLPVLCMTYHSDGALLXTGSA

SEQ ID NO: 287412 - protein, 106 aa, Zea mays
  unsure (1)..(106): unsure at all Xaa locations
  Clone ID: MRT4577_25215C.1.pep
ACCRVCLVLLQTHHXQLTATPAARSLLTELKDILYCRVKECKDTIGFNLAAMDHIKELLALRSDAPFRDAKAKLMEIKKEQSKRSSSRLDGDEKRKKKRKKASAES

SEQ ID NO: 287413 - protein, 78 aa, Zea mays
  unsure (1)..(78): unsure at all Xaa locations
  Clone ID: MRT4577_25216C.1.pep
GELGNPNTVAQPMEKDQRGQLKNTEETGFGIPRLRWSKDKRYLEDDCAHKKAIGFRRYXGGVDVPGELGGRTAKRKAR

SEQ ID NO: 287414 - protein, 174 aa, Zea mays
  unsure (1)..(174): unsure at all Xaa locations
  Clone ID: MRT4577_25217C.1.pep
MDGRYLKLLTLRVLFARAENAYIKSEXDLLKVPILHMLLPPATSNGLKXHPLGQAYRHQHATAVSGXQQPIFQMQQQSLAHVTIQTIATNQQQRFLPALSHLAMVNPAAYXQQQVLAXNPLAMANVIANQPQQQMQQLLPALRQLSMENPXATDLXQQQLISSSSHRETNAPTY

SEQ ID NO: 287415 - protein, 85 aa, Zea mays
  unsure (1)..(85): unsure at all Xaa locations
  Clone ID: MRT4577_25218C.1.pep
KNKLYLXTSLIXNARPNCKALRLPTYIXISXNFSPNPYNKIXPPTSIPHYYIXLNKNPXSTKTFYQPFYTTKTFILNLPILIFYF

SEQ ID NO: 287416 - protein, 258 aa, Zea mays
  unsure (1)..(258): unsure at all Xaa locations
  Clone ID: MRT4577_25219C.1.pep
MSAAGGRTLGRSSFSRATSKLVASSSGSAGVKIGPNGASFVSSGIPDLDRILGGGFLLGSVVMIMEDTDAPHHLLLLRCFMSQGVVHKQPLLFSGAMKEPVLFLGTLPAPVSSSKEDGRHRAMGPAASSDGRANDEGLRIAWQYKKYFGDDKTSRAEHKDNKQEFSNDFDLRKPLERHLLNGQNIECVSTQDADTLSXSQDCCSAFLSKLPRKDGGSSTAGRIAIQSLXAPQCRYFEKDWDMVSFIRSLKAMVRSSNS

SEQ ID NO: 287417 - protein, 199 aa, Zea mays
  Clone ID: MRT4577_2521C.1.pep
WPEDHHITLNNNPTVLFHTMEKKIQATTVAKNKNNPKENTKEPQTRSWIFSPFLATSTKNGERDKDTRISILQEEDMTEDTMEDMKCSQGKSPHRVLLKSGVPRWLISRRESRCRRCTMIRRRWRVVVVTRAGWPRVTRNGSRTRVRRRRVGGGLTRIPMVGRRGKLLAIINIDFFIFIVCRHKRHPVGLLVPLIDLRR

SEQ ID NO: 287418 - protein, 73 aa, Zea mays
  Clone ID: MRT4577_25220C.1.pep
VLDRSQFDGSLLTILPHVTPLSTVLEPSKLVYFSGSCPSLLNCLEQVTKVWGFLVLSVPNDHVFCVERKWLSC

SEQ ID NO: 287419 - protein, 402 aa, Zea mays
  unsure (1)..(402): unsure at all Xaa locations
  Clone ID: MRT4577_25221C.1.pep
TKKKRNRNLSKNPSQPPSWPPPVAEPLVRSSFSRATSNLVASSSGAAGVKIGPNGASFVSSGIPDLDIXINVIWCSLAGILGGGFLLGSVVMIMEDTDAPYYLLHLRXYSQPLLFSGAMKEPVLFLXALPAPVSSSKEDGRHRAMGPAASSDGRANDEGLRICXQYKIYFGDDKTSRAEHKDNKQEFSNDYDLRKPLEWHILNGQXRNGQNTECGNTQDADTLSSLQDCCSAFLSKLPRKDGGSSTAGRIAIQSLCAPQCRYFEKDWDMVSFIRSLKAMVRSSNSVAVVTFPSTVLSNSFCKRWQHLADTLLSIKAIPDEDKDLAKLLTGYQDMVGFLHVHKVAQPNSQVPVILEASTLSLKLRKRRSLVLERLNQAPVDGSSGPSSAASSSCSSQGSQLDF

SEQ ID NO: 287420 - protein, 139 aa, Zea mays
  Clone ID: MRT4577_25222C.1.pep
RKKAELSQNEFVLTNERFLVPEMLFHPIDLGINQAGLAECIVRAVQACHPYLQPVLFESIILTGGSTLFPRFTERLERELRPLVPDDYKVKITRQENPIFGVWRGGSILASSPDFESMCITKSEYEEMGSARCRRRFFH

SEQ ID NO: 287421 - protein, 178 aa, Zea mays
  Clone ID: MRT4577_25223C.1.pep
TPGFWGPFLAGGSPPVPGFFFFPRVTGRWVSPFLVWGPPRPPAGGTRCSPKRGPLVSGVFTPPHRAFVFPLRAAGLRVCPLFVRVVNRCLLFSRFGGGPRPLCFLFPPVSPPGPFLKPFFAWPPTFFGGWGGCFMFLGVSFLVPFAPLVKKVDQYRRIIKTEHTGQSSNKNKTNQCAH

SEQ ID NO: 287422 - protein, 62 aa, Zea mays
  Clone ID: MRT4577_25224C.1.pep
ACKSREAKVYVPQAAAAEAVAAADGTPHPPSWSSSPASRWIDDDADITFRGQPRRPGQATAQ

SEQ ID NO: 287423 - protein, 57 aa, Zea mays
  unsure (1)..(57): unsure at all Xaa locations
  Clone ID: MRT4577_25225C.1.pep
XLLPSFQIVSSSTFSKYMTFTMLLVIYYIYICIVKELCIXKSQNDLEFGMKATQTRC

SEQ ID NO: 287424 - protein, 149 aa, Zea mays
  unsure (1)..(149): unsure at all Xaa locations
  Clone ID: MRT4577_25226C.1.pep
AYHIVNPSPXPLTGALSALLLTXXLRNXFHYNSTILLSLGLLTNILTIYQXXRDIIREGTYQGHHTPIVQKGLRYGIILFIVSEVFFFAGFFXAFYHSSLVPTHDLGGCXPPTGITPLNPLEVPLLNTSVLLASGVSITXAHHSLIERQ

SEQ ID NO: 287425 - protein, 83 aa, Zea mays
  Clone ID: MRT4577_25227C.1.pep
YCCMGIMLFVRKDHQFFFFLIPGAVSPLFSSCSNKVAGYFFQTSCLRQPVISSAFSCLYGTGFERCCWESSPGRMFCPVPNKK

SEQ ID NO: 287426 - protein, 56 aa, Zea mays
  Clone ID: MRT4577_25228C.1.pep
MENRMLRGECSEFEMAEKELRVKEQNLRLEIEMAQEQFKRLLGEYVSFSSMPTRKP

SEQ ID NO: 287427 - protein, 78 aa, Zea mays
  Clone ID: MRT4577_25229C.1.pep
RRRCNRLLCARVVRPSSSHLSALSEPSAAAHVHSSARSIGALAMIIGRRRMSQSAVTVPCGPSGGLRFNKDYVRRQQG

SEQ ID NO: 287428 - protein, 35 aa, Zea mays
  Clone ID: MRT4577_2522C.1.pep
IDIYSFILSNIHPQGTWQTEMIVQVSVCHATLESR

SEQ ID NO: 287429 - protein, 48 aa, Zea mays
  unsure (1)..(48): unsure at all Xaa locations
  Clone ID: MRT4577_25230C.1.pep
SINTTYCITMXQTNDHTSYILNQRVCSSHRHTSPGAAPPPSSGNQITT

SEQ ID NO: 287430 - protein, 46 aa, Zea mays
  Clone ID: MRT4577_25231C.1.pep
DHRFTFPQCPWSIFPWCFSDPNGRLSYSRPLQHAIKGGFSFLCLNN

SEQ ID NO: 287431 - protein, 70 aa, Zea mays
  Clone ID: MRT4577_25232C.1.pep
HTRAATSALFYFFFYLVFSFILTGAFFIFLCKINIPEQLYYMHYYKGPTYQFINVSNRTLLLYSVNLFNL

SEQ ID NO: 287432 - protein, 47 aa, Zea mays
  Clone ID: MRT4577_25233C.1.pep
SSKFGTTPGGQHFYEVLEIGCWPDLWCCCTEAENTFSFGSLDHLQTP

SEQ ID NO: 287433 - protein, 108 aa, Zea mays
  Clone ID: MRT4577_25234C.1.pep
TAHVSLARQIGASRRARSAWKTYKIYIFKVVKQVHPYILIYSNVLCIMNSFMNHIFNKLAADANKLERYNKKPTITYREIQTSVLLILPGELDEHTDCHGTKVRTMIS

SEQ ID NO: 287434 - protein, 626 aa, Zea mays
  Clone ID: MRT4577_25235C.1.pep
MASSLLSSPAKPTTATTTKTTPAPRPARSAHVLSAARCLRLRLRAVPARASSQHPPPPPTPRSRRPDYVPNRIDDPNYVRIFDTTLRDGEQSPGATMTSAQKLVVARQLARLGVDIIEAGFPASSPDDLDAVRSIAIEVGNPPPAGEETAHVPVICGLSRCNRKDIDAAWEAVRHARRPRIHTFIATSEIHMQHKLRKTPEQVVAIAREMVAYARSLGCPDVEFSPEDAGRSNREFLYHILEEVIKAGATTLNIPDTVGYTLPYEFGKLIADIKANTSGIENAIISTHCQNDLGLATANTLAGARSGARQLEVTINGIGERAGNASLEEVVMAIKCRGELLDGLYTGINSQHITLTSKMVQEHSGLHVQPHKAIVGANAFAHESGIHQDGMLKYKGTYEIISPDDIGLARANEFGIVLGKLSGRHAVRSKLVELGYEISDKEFEDFFKRYKEVAEKKKRVTDEDIEALLSDEIFQPKVIWSLADVQATCGTLGLSTATVKLIAPDGEERIACSVGTGPVDAAYKAIDQIIQIPTVLREYGMTSVTEGIDAIATTRVVVTGDVTNNSKHALTGRAFNRSFSGSGAAMDIVVSSVRAYLSALNKMCSFAGAAKASGEVPESASVQSAE

SEQ ID NO: 287435 - protein, 142 aa, Zea mays
  unsure (1)..(142): unsure at all Xaa locations
  Clone ID: MRT4577_25236C.1.pep
SFPPSLAWVLLSGPPXFFFFFFFFFLGFFFFFFFFWGEQLLEHFFFPGFQIFPLFFLNTTGRQPNYIMGLFTCSPSAFLVNNWKTHLFTKNGLFQTFPTKITGGGREHPANFFVSLLFRFFIPMILFFWAWLKKPLFPSRFF

SEQ ID NO: 287436 - protein, 259 aa, Zea mays
  Clone ID: MRT4577_25237C.1.pep
MASSLLSSPAKPTITTTTKTTPAPRPARSAHVHVLSAARCLRLRLRASSQHPPPPPTPRSRRPEYVPNRIDDPNYVRIFDTTLRDGEQSPGATMTSAQKLVVARQLARLGVDIIEAGFPASSPDDLDAVRSIAIEVGNPAPAGEDAAVHVPVICGLSRCNRRDIDAAWEAVRHARRPRIHTFIATSDIHMQHKLRKTPDQVVAIARGMVAYARSLGCTDVEFSPEDAGRSNREFLYHILGEVIGISLPEMCGETCIFHL

SEQ ID NO: 287437 - protein, 399 aa, Zea mays
  unsure (1)..(399): unsure at all Xaa locations
  Clone ID: MRT4577_25238C.1.pep
MAFNAKPYCSTTAKPPTPAAHRSPSGPSPCISVRAAAVSPRARHSAYGLSAAGNASSSTVRLRALAQRTRAQPQPPRRRPEYVPNRIDDPNYVRIFDTTLRDGEQSPGATMTSAEKLVVARQLARLGVDVIEAGFPASSPDDLDGVRSIAIXVGNPPPGDDGGAHVPVICGLSRCNRRDIDAAWEAVRHARRPRIHTFIATSEIHMQHKLRKTPDQVVAVAREMVAYARSLGCADVEFSPEDAGRSNREFLYHILEEVIKAGATTLNIPDTVGYTLPYEFGKLISDIKENTPGIENAIISTHCQNDLGLATANTLAGAHAGARQLEVTINGIGERAGNASLEEVVMAIKCRGELLNGLYTGINSQHITLTSKMPPEPSGLSCTPHKAIVGAXAFDHESA

SEQ ID NO: 287438 - protein, 276 aa, Zea mays
  unsure (1)..(276): unsure at all Xaa locations
  Clone ID: MRT4577_25239C.1.pep
TLQCRAARRSVVTAGEKRRRSSQRRSGGLPRTNYSCRKLVIPILNVMSERTRITYSRRAVSKNSEIKKDEQTVIEKEDDTESTLEIERIRGDPSMLQSMTVKELKELTRRMGVAARGNKKDLVSALMESLGEGVIGKEGASTIEQIGPSEVPSKRKGAASVVVEQKLETSEVISATPSKRSRTKQKSIKGTTPEENPVTTVKINKTSHKKETVVANGAIAKAXLGLNVDGAEPWTVLVHKKPQAEWIPYNPKVMRPPPLSKDTRALKILSWNVNGL

SEQ ID NO: 287439 - protein, 1773 aa, Zea mays
  Clone ID: MRT4577_2523C.1.pep
MWILSSRKSPSHLPVRKWTPRSSTDDLAMKIAERMFLKMKEEDAKKKAEEEESRRKAEEDKGKGTFDYNDDLVDLLVSKVLSKVSLNTKGSSTKSKGNDFSKVQFDYSRNYIPNFSSAPLGKLPTLSELNYDEWVDKMKSHLIGVHPSLWEIVNVGMYKPAQGEEMTPEMMQEVHRNAQAVSIIKGSLCPEEYRKVQGREDACDIWNILKMSHEGDPKAKRHRVEALESELARYDWTKGESLQSLFDRLMVLVNKIRVLGSEDWSDSKVTRLFMRAYKEKDKSLARMIRDRDDYEDMTPHQLFAKIQQHESEEAPIKTRDSHALITNEQDNLKKSKDHKAKKVVETSSDEDSSSDEDTAMFIKTFKKFVRKNDKFQRKGKKRACYECGQTGHFIADCPNKKEQEAKKEYKNDKFKKGGKTKGYFKKKKYGQAHIGEEWNSDEESSSSEEEEVVANVAIQSTSSAQLFTNLQDDSYTPTCLMAKGDKNVITKLMEKLDKRKATLDAQEDLLILEKERNLELQELIHNKDEMLDVLTKEVSLVKITIENKDKEVINMKTSIANLANEKNALETSMLSLNVQNQELQVQLENCKNINASSLVIESKSSSSNDNSCKHCAKYHASCCLTNHARKNSPQVKVKGILKRCSSNDGLKKVEPKYKSLKPNNGRRGLGFNSSKENPSTVHKGWRSPKFIEGTTLYDALGRIHSSNDKSPQVKVYSSGGSSWVLDSGCTNHMTGEEDMFHSLQLTQEAQEIVFGDSGKSKVIGIGKIPISDQQSLSNVLLVDSLSYNLLSVSQLCGMGYNCLFSDVDVKILRREDSSVAFTGRLKGKLYLVDFTTSKVTPETCLVAKSDKGWLWHRRLAHVGMRNLAKLQKDNHIIGLTNVVFEKDRVCGACQAGKQHGVPHQSKNVVTTKRPLELLHMDLFGPVAYISIGGSKYGLVIVDDFSRFTWVFFLSDKGETQGILKKFMRRAQNEFELKIKKVRSDNGTEFKNTGVEEFLGEEGIKHEFSVPYTPQQNGVVERKNRTLIEAARTMLDEYKTPHNFWAEAVNTACLAINRLYLHKIYKKTAYELLTGNKPKVDYFRVFGCKCFILNKKVKSSKFAPRVDEGFLLGYASNAHGYRVFNNTTGLVEIAIDVTFDESNGSQGHVSNDTAGNEELPCEAIKKLAIGEVRPQEKDDEEGTFWMINEVVDVGAKVVSDKVSTQANPSTSSHPSHEENHQRMPTVVEDEHESIDGEVPLDQVNDEEEQIQRQPSVPHPRVHHTIQRDHLVDNILGSIRRGVTTRSRLANFCEFYSFVSSLEPLKVEEALGDPYWIIAMQEELNNFTRNEVWSLVQKPKQNVIGTKWVFRNKQDEHGMVTRNKARLVAQGYTQVEGLDFGETYAPVARLESIRILIAYATNHDFKLYQMDVKSAFLNGPLQERVYVEQPPGFEDPKKPNHVYLLHKALYGLKQAPRAWYDCLKDFLIKNGFTIGKADSTLFTRKVDNELFVCQIYVDDIIFGSTNENFCEEFSKVMTNRFGMSMMGELKYFLGFQVKQLKEGTFLCQTKYTQDMLKKFGMEKAKHAKTPMSSNGHLDLNEEANPKYCHLVAVKRILRYLVHTQNLGLSYPKGSLFDLLGYSDSDYAGCKVDRKSTTGTCQFLGQSLVSWSSKKQNCVALSTAEAEYIAAGACCAQLLWMKQTLRDFGCEFNKIPLLCDNESAIKLANNPVQHSRTKHIDIRHHFLRDHEAKGDIELFHVSTENQLADIFTKPLDETRFCFLRSELNILDSRNVS

SEQ ID NO: 287440 - protein, 128 aa, Zea mays
  unsure (1)..(128): unsure at all Xaa locations
  Clone ID: MRT4577_25240C.1.pep
VKLIAPDGEEKIAWAGGAGPVXAAYKGVDKIIRVPTVLREYSMTSVTEGIDAIVTTRAGTTGDVRVNAKHALTGQSFNRSFSGSGASMDIVVSSVRAYLSALNKICSFAGAVKASSDVAETASVPSTE

SEQ ID NO: 287441 - protein, 108 aa, Zea mays
  unsure (1)..(108): unsure at all Xaa locations
  Clone ID: MRT4577_25241C.1.pep
RNAAYKAVDKIIQIPTXLREYSMTSGTEGIDAIAATRVVVTRDVSNNAKHALTGQSFYRSFSGSGASMDIVVSSVRAYLSALNKICSFAGAVKANSDVAETASVPSTE

SEQ ID NO: 287442 - protein, 284 aa, Zea mays
  unsure (1)..(284): unsure at all Xaa locations
  Clone ID: MRT4577_25242C.1.pep
LGTSRPAGDKVQGIPQNEALVFSVQENFHGRTFAAITMSTDPESRENYGPYLPGIGSVCPVTGKPIRYNNVDDVRETLEKHGKNTAAFLVEPIQGEAGIVVPDDSYLREVRALCDKHNVLLICDEIQTGIARTGKMLCHEWSGIKPDLVLLGKAISGGMYPVSCVLGSKEVMLTIEPGTHGSTYGGNPLGSAVAIRALELIEEENMIERAETLGNKFRQGLQDINNPMIKTIRGKGLLNAIVIDESRTNGHSAWDLCMLFKEKGLLAKPTHQNIIRLCPPXIIT

SEQ ID NO: 287443 - protein, 601 aa, Zea mays
  unsure (1)..(601): unsure at all Xaa locations
  Clone ID: MRT4577_25243C.1.pep
MRSAHVHVLSAARCLRLRLRASSQHPPPPPTPRSRRPDYVPNRIDDPNYVRIFDTTLRDGEQSPGATMTSAQKLVVARQLARLGVDIIEAGFPASSPDDLDAVRSIAIEVGNPAPGPAGEEDAVHVPVICGLSRCNRRDIDAAXWEAVRHARRPRIHTFIATSDIHMQHKLRKTPDQVVAIAREMGDYARSIRWTVIEFSPEDADRSNREFLYHILGEVIKAGATTLNIPDIDGYNLSYEFRKLIADVKANTPGIENAIISTHCQNDLGLATANTLAGARAGARQLEVTINGIGERAGNASLEEVVMAIKCRRELLDGLYTGIDSRHITLTSKMVQEHSGLHVQPHKAIVGANAFAHESGIHQDGMLKYKGTYEIISPDDIGLTRANEFGIVLGKLSGRHAVRSKLVELGYEIGDKEFEDFFKRYKEVAEKKKRVTDEDLEALLSDEIFQPKVIWSLADVQATCGTLALSTATVKLIAPDGEEKIACSVGTGPVDAAYKAVDKIIQIPTVLREYSMTSVTEGIDAIATTRVVVTGDVSNNAKHALTGQSFNRSFSGSGASMDIVVSSVRAYLSALNKICSFAGAVKASSDVAETASVPSTE

SEQ ID NO: 287444 - protein, 98 aa, Zea mays
  unsure (1)..(98): unsure at all Xaa locations
  Clone ID: MRT4577_25244C.1.pep
STLPPFRSHNSAVRKFLKXSRTTPFCHIILNDLFLVGASPSGNPMVSSGCGSWTSSCCSTFSCVSASKFRLCSLLCFIGITSFPTRLTFQITGDAKNY

SEQ ID NO: 287445 - protein, 86 aa, Zea mays
  Clone ID: MRT4577_25245C.1.pep
MKVLIVALALLALAASAASSTSGGCGCQTPPFHLPPPFYMPPPFYLPPQQQPQPWQYPTQPPQQPRKTLQEETRRATRLHVHPSKD

SEQ ID NO: 287446 - protein, 52 aa, Zea mays
  Clone ID: MRT4577_25246C.1.pep
GRRTRGYRASASCHDTRNRRFIMRYPRAHPGAALTQREIHETPAHHCTYPRA

SEQ ID NO: 287447 - protein, 694 aa, Zea mays
  unsure (1)..(694): unsure at all Xaa locations
  Clone ID: MRT4577_25247C.1.pep
LNQDSIAGFDSDQAESSPDASMTDIAPVLNEIDPLLRADSNRPDPVPNDDSDTDSHVSEDHQIDDDSNDEGDDIDAKDNVEGEKENDGKEAAFLWTADDEKNLMDLGYSEIERNRRLEILMARRRSRKNMAFEIDNNLIDVHSSGSGTSLDDLSRFRAQVPPIAVPRRNPFDLPYDSEEAAIPGSAPSILHARKNPFDLPLEQSNDSVVVHAHDILNSGEPATSRRDMIFRRHESFNFGRMDVIQEKRFSRLKPYFVPETVEWNASNFERQFNDKSESKMSSVTKSDIASSVADQEDHKDQDEKDLADVGSECSDGINSIDVELDHSDIDDREIALQQFVFERAQEREAHLVSTKGKGREEDYAPESAGSSTMPFHAVPDLLSWEDGDGDNSLGAKPSFQLNTEVKCSEWVSSSRPPVEGESDSGDLPEYLDTEVASSSNTAILGANNAAEKGGNVDRMSYSNGEQXSEXMISLFKDLTSEXHLWGSIVVEFHGLATVNILQTCKTQSSDVXFCECVCFFVFFNIVLRFWWVCFRLIPPRLAVXEEVSFAQTVRCGCRDMERYVMPXLEILLYCFELRRMALQEXTAIFGYLLDSDDEAGKICAEPMEGSGIDESFLSELDVVGDFGVEPMRLDQQVTDQASHGDXNTTDSVTADSVISPQTSDDVSLIMSKVGAEESREQSPLVDDLNGSELY

SEQ ID NO: 287448 - protein, 71 aa, Zea mays
  Clone ID: MRT4577_25248C.1.pep
VSMDWFLLFLSFSWFNWVSSLFLTAFRFEPYGRLTNWRSIIKPFRYLAFFQFCRLQLSAQTLCISASFLDR

SEQ ID NO: 287449 - protein, 114 aa, Zea mays
  unsure (1)..(114): unsure at all Xaa locations
  Clone ID: MRT4577_25249C.1.pep
GGAGKPHHGGGQKKKRRGGDGNPGXNQRGNQGAPKGGQKGPGGETGKADWGGKRGSAKKGQKKPPGRKRGKAGGGQGGGKGKLKAKRPRPNWGAKTGQGGGIKEPVNGREEGGR

SEQ ID NO: 287450 - protein, 93 aa, Zea mays
  unsure (1)..(93): unsure at all Xaa locations
  Clone ID: MRT4577_2524C.1.pep
PSRHQRPSXHSPPPPARAPPPTRAPPPTHGPPHATAPPLHSPQWSPPASTTQHPSTRHMCIPDSHGEQLTTPLIRTVSFVTQMHQLPESCMCM

SEQ ID NO: 287451 - protein, 120 aa, Zea mays
  unsure (1)..(120): unsure at all Xaa locations
  Clone ID: MRT4577_25250C.1.pep
PVRLPFLRLFCCVGVLAPVLVVLPLGLRVRVLVFPRFVLVGAPVGAPPAGGXVGARVVGPLPXXFLXRLRXLPFPPPXLSLSLSRARAPRXXXVGLPPSVAXXXXRLXXXGWLXAAVARP

SEQ ID NO: 287452 - protein, 107 aa, Zea mays
  unsure (1)..(107): unsure at all Xaa locations
  Clone ID: MRT4577_25251C.1.pep
KAPGFPFGMAQKSLKISPIAMVFRAPAGIKGSTLIXINKPGNPXNFVAESLEALLPAVKPALKQIKGGQRGKDPCPPPQSATGPVGQWERSFKTASFGNGGGGSCDP

SEQ ID NO: 287453 - protein, 156 aa, Zea mays
  Clone ID: MRT4577_25252C.1.pep
CGLRPFPPFFFFFFFFFFFLAQNKPMVELINPWISPQKAQTQNSIQPLITRFPPGGPLLILTGKPQKEPPGPAFGNPLLCRPPTLRNGKASQPFRKSSNHGSQILNRGLALFPIMGPPPSQVFLEKQKKTLMSLPCQKEKTPPFVSCIPKPYNQIF

SEQ ID NO: 287454 - protein, 243 aa, Zea mays
  Clone ID: MRT4577_25253C.1.pep
MAATKKTKIVLAQPAVGAPTSRLPFFSRAPGPVRGAGDEAAHRASLRYRSLLQDYQELIKETQAKKERLYMERLRKKRLLAEVKFLRKRYQSMAKNPSQTIACRVKNPALSSASWRAASVSDAQHQLVRAVGSSSRNQLVQPRRGGSPRVYPAIDLNEACEPGYEMEIVEERHGNRAPLGINKSKRYPMESDAAAGNNSKRYPMEMGSDVVAGPTQGRMPVFWDVQNPAGRSGKRKISCQDQR

SEQ ID NO: 287455 - protein, 52 aa, Zea mays
  Clone ID: MRT4577_25254C.1.pep
SQLPYVLIHFIFVLLATVLIEYKTYYGKKKKKKKKKKKKKKKKKKKKKKRGG

SEQ ID NO: 287456 - protein, 133 aa, Zea mays
  unsure (1)..(133): unsure at all Xaa locations
  Clone ID: MRT4577_25255C.1.pep
MGNDDVIESGAGGGEFSXAKDYTDPPPAPLIDADELGTWSLYRAAIAEFIXATLLFLYITVGTEIGYKHHTDASVSXGADAVCGGVGVMGIACDFGGMIFLLVYCTDYISGGHINPDVTVGLFLERNGSLGRA

SEQ ID NO: 287457 - protein, 103 aa, Zea mays
  Clone ID: MRT4577_25256C.1.pep
RINLGGPAGQRVPKTGELKPTEPKWGKTKGKKKIPCPEINPGQRQGGGGGVKTPPPGGGAFKAPWGFPPGQKKKNAPLPQWLGRGPGGARPKKRTPSGPRPKL

SEQ ID NO: 287458 - protein, 108 aa, Zea mays
  unsure (1)..(108): unsure at all Xaa locations
  Clone ID: MRT4577_25257C.1.pep
MTYIPNHLYHVGPSNSAHWTSFRHGNTNSTIARXXAYASSYTTTAKHTMIIPKVDLLAEPLSFTXPCHGYVTIHVDSNLLSTTALYQYRAHYHXNERLRLHNLCITCY

SEQ ID NO: 287459 - protein, 183 aa, Zea mays
  Clone ID: MRT4577_25258C.1.pep
LLAVILICPPPLLESLLPLPVSLADSAAVALLEASATLRLDPADAGWRRPRPPRHRAATTRVSPSLPCAAPSSRRWSPPAPPRLLGSGLRPSVSSSVEADEEDLGSLSERMARKLQTQCRWRGRRNSTFPSWAADDGGVEAASMGIMASSPSAASPAAIVSAFLAPPLSLLRHVASLLPGYLG

SEQ ID NO: 287460 - protein, 58 aa, Zea mays
  Clone ID: MRT4577_25259C.1.pep
AGAGPEYIAGSPSSLDGGRPLSSRRLGACVNHSRQSQIHGELAGLYGQLRCLHHIMEP

SEQ ID NO: 287461 - protein, 63 aa, Zea mays
  Clone ID: MRT4577_2525C.1.pep
LLFIFLTARLFFLILKLGFNTTGTRLFPRSRNGTNVPGTSNVAKFPVPGYYITVWVYPTTHAS

SEQ ID NO: 287462 - protein, 96 aa, Zea mays
  Clone ID: MRT4577_25260C.1.pep
SRPAAMEVPWGRRRRRLPALRLSLSTTASRRTPACSPTVGFPELFTLFTSIGRCSIYICMDDSSSSARGVSDMIKYRVYEIINIDIVGFPHSHRSG

SEQ ID NO: 287463 - protein, 52 aa, Zea mays
  Clone ID: MRT4577_25261C.1.pep
PSSSFFFFFFFFFFFFFFFFFFFFFFFFFFWEKRGYVIQGFPHLINPRTWPF

SEQ ID NO: 287464 - protein, 56 aa, Zea mays
  Clone ID: MRT4577_25262C.1.pep
WIERPTDGLRTQLDMTVASCHPHFLIWRRRSTWSRCGRLRGSVRQARPPRSETSSG

SEQ ID NO: 287465 - protein, 140 aa, Zea mays
  Clone ID: MRT4577_25263C.1.pep
SSRHHSRIYPTHTQNKKKSTFFPPKDLRHGAPKNRSRNPDSEPISGEGEQRFHPSPCGRSGVRGERQQCRRLAARNGFSWRASRSKFLRLRGSKDGSLPALLKNRSRGSPSANRYNYSSYLLLLLRSSRSPLLPVFAVDF

SEQ ID NO: 287466 - protein, 245 aa, Zea mays
  unsure (1)..(245): unsure at all Xaa locations
  Clone ID: MRT4577_25264C.1.pep
MWSPITARVPSVLLRPSSLLVFLDHSIRFGRTATASPTRRILKAEAKGEWLXSLPSPAYLEGRLPGDNEFHPLGLADDPEKLRCDEQRELVNVRRAMLGEAEMLIPDVLTKDELINEPLCYDAGKAYYFCVVXTLIAIEFILLXYVKIRRGYDIXNHASVNQEPIFKKYKLPTDECGYPGSVFNPLNLXPTLEXNANELANDRLAMLAFLIILMQHNVXARGSFDNLLQHLSRPWHNTIIQTLSG

SEQ ID NO: 287467 - protein, 112 aa, Zea mays
  unsure (1)..(112): unsure at all Xaa locations
  Clone ID: MRT4577_25265C.1.pep
MATAGADEMMGXDDMRDYNGYEDPVMKEYADNEVGEEGVKKKLHKEGQGWETPDVGDESEVNYTGXLLDATHTDSRRDRAEPSKTKLVTGQAKKGXNQRIKTMTTGEQCYSD

SEQ ID NO: 287468 - protein, 58 aa, Zea mays
  Clone ID: MRT4577_25266C.1.pep
WILHSGLARYAHPYLKIDVVYNLILLFDKIHIVLSVGFTFRNILIVIVFNNNIFSSFL

SEQ ID NO: 287469 - protein, 68 aa, Zea mays
  Clone ID: MRT4577_25267C.1.pep
SNHRPTRVRRICRGDFRPAARIAPCESAEKATSCTMAYRLLNRYIRHNRTVAADLGLAIRTESYAYRT

SEQ ID NO: 287470 - protein, 107 aa, Zea mays
  Clone ID: MRT4577_25268C.1.pep
PTHSTAPTTHLPHSQPTTERSVLHLHHSSPYLSLSYIPTSYLTTSTQLLILLIYTHCHCPFPHPNPISTTKTLTSNTLSPTTNPPDHTAPSSNPNPKLPNTPTYTKP

SEQ ID NO: 287471 - protein, 71 aa, Zea mays
  Clone ID: MRT4577_25269C.1.pep
QESNTLVRTLVMVSKTYQSAALTLPIMAINVKYLQLTATDLPRGGGAIDVAVKILCYSVCGEQPIFTVALA

SEQ ID NO: 287472 - protein, 108 aa, Zea mays
  Clone ID: MRT4577_2526C.1.pep
TRRLYFLAAVAVCFLLLLLPASSVATDVDYCSKKEYPVKVSGVQIVPDPVEPGKPATFKISASSGGAIPIFFLEIDVKYFLFYVHLETRHPCGEIFCPATGDLGLTHK

SEQ ID NO: 287473 - protein, 63 aa, Zea mays
  Clone ID: MRT4577_25270C.1.pep
ELKWYGKNGRGVLLDNGLELHVNSHAPRYGGGEPLNRPWVVHFDFSTGPYFNPGLVLNRDPCK

SEQ ID NO: 287474 - protein, 154 aa, Zea mays
  unsure (1)..(154): unsure at all Xaa locations
  Clone ID: MRT4577_25271C.1.pep
SPALPGPPPPLGGGGPIPLARGSPPTTWGNPGLAPXEPLSGRSPFPPLPHSQWGPPRAPSPFFPPPRGGLGPPPFPGPXPRGGGGFPPPGPLPFPPPWPPPLXFFPFPFSPFWPVFPXPPXSGAPPLGXPFWGFGAPPPQKPXXGGGGPLGAPA

SEQ ID NO: 287475 - protein, 142 aa, Zea mays
  unsure (1)..(142): unsure at all Xaa locations
  Clone ID: MRT4577_25272C.1.pep
REPSXGWGQYAXTMRFRRDNAXGVLYIRPTASSIXLLERVAGRCCREPQYATTAEVNEELLFPAHPGYEGLHACMRTMDNYLSMNRRALVMTEGKDAGPSKLRTVRVHXHYHRTKLERQKAHIESYANGTHDALYHSTDGTE

SEQ ID NO: 287476 - protein, 103 aa, Zea mays
  Clone ID: MRT4577_25273C.1.pep
EAVRPFCKGQDLVLGRGAHLTKAILLGLCNRREPHTAINLLASMISGGCLPNESTNTILVEGWPNEGWVKEAGELLAKLCSKGVVIKNLMKKGSIKLLNGPTQ

SEQ ID NO: 287477 - protein, 38 aa, Zea mays
  Clone ID: MRT4577_25274C.1.pep
GREDLICHQNKHVQLMPRAHAAIQLHKAWLWLTFHISF

SEQ ID NO: 287478 - protein, 87 aa, Zea mays
  Clone ID: MRT4577_25275C.1.pep
MRVMAPKPPSTDLFDGLNKGHVVTKKELPPRPSDRKGKTSKRVHFVRNLIREVAGFAPYEKRITELLKVGKDKRALKVAKRKLGTHK

SEQ ID NO: 287479 - protein, 84 aa, Zea mays
  Clone ID: MRT4577_25276C.1.pep
FGRASNSRRHFVCEGSTKTGERRVLDRGDPLSTRHWNLIHLYQVNKSRQFQTKLLLWFVWALVDQGGFKYGPVWAGETWLILGS

SEQ ID NO: 287480 - protein, 147 aa, Zea mays
  unsure (1)..(147): unsure at all Xaa locations
  Clone ID: MRT4577_25277C.1.pep
GGGGVLRSKLSVLAPGEELPTVSAEYSEAVEKARRKLSFFFSXKSCAPLVGRLAWHSAGTFDASGRTGGPFGTMXHXXELAHGANAGLDIAXRLLEPIKEESPILSXPAXYHLXGXAAXAATXGPXIPFPPXXEAXPEPPPXGPLPD

SEQ ID NO: 287481 - protein, 99 aa, Zea mays
  unsure (1)..(99): unsure at all Xaa locations
  Clone ID: MRT4577_25278C.1.pep
RRDDLAVEYGVAEVAGGLGAVDPPAAGGGRGVSSGGHPTASAAPRGGCHGYGRVLGYPSTAAAGASELRCSSSSSRSISSLRGLPLQQPELNXTKSSCT

SEQ ID NO: 287482 - protein, 66 aa, Zea mays
  Clone ID: MRT4577_25279C.1.pep
LYRFIERIVLAYAKNCGDYSGEGSQGDTHEAATRNCTNTQRTRHTKELMQLLSEGAAPPNKRLGRL

SEQ ID NO: 287483 - protein, 106 aa, Zea mays
  Clone ID: MRT4577_2527C.1.pep
KFNRGGHPHMGKKAQTSLHGGGGKPYSEKGRRLLARTGGESWNRVKTGFWDISPAQGISPINFQTMRNNNPKGRGPKMVLKKKKGTPKGGGAQKRGSTCQINPTWG

SEQ ID NO: 287484 - protein, 64 aa, Zea mays
  Clone ID: MRT4577_25280C.1.pep
GSFEAAPRGPWAGGANPMDRPLGPQPPNLGSGRPPTKAPVGNLDSYLKAFNHNSAHRNFAPLGF

SEQ ID NO: 287485 - protein, 106 aa, Zea mays
  Clone ID: MRT4577_25281C.1.pep
PSPSTSPRPCRPAVHPTAASSARGDRRTAGCRRRRDPRHPPETGYSDVLQRPPQACLHAPSYGSMCLRMALEALVVHQLVQSDAQLQGHLDHMVERASTRQRATLP

SEQ ID NO: 287486 - protein, 82 aa, Zea mays
  unsure (1)..(82): unsure at all Xaa locations
  Clone ID: MRT4577_25282C.1.pep
NNKKHREFPVYLKEQQLIPLKQQKGVNHGPFLKXPQLLPFXQQVGPKAGTLLIXQKLMPFNQLVFTNPTVFNQQTNIGGAPF

SEQ ID NO: 287487 - protein, 142 aa, Zea mays
  Clone ID: MRT4577_25283C.1.pep
FGTRRELACCFLWTCSSSNSSFLSVPNSERRRRAHQPSRPATPSPPTATTTSTRRSPFLGPFICHRRPLLSSAPSLLSVFPTASILVHSTQVPFVIQRRARSFTDPAAAATSLYFLLWPLPSSPPSLLLPHLNLRARRCFLL

SEQ ID NO: 287488 - protein, 115 aa, Zea mays
  Clone ID: MRT4577_25284C.1.pep
GPGRHQRRAGKRAGLSSSRLTGSGLGLCEGSRGGVALKRHERDQSTPPHAVPYLCFHSRLACDTADHCLHTLFRTYREVLDYTIILDRHTLTSHGFDYQTFSTADAIPNAIEDPN

SEQ ID NO: 287489 - protein, 52 aa, Zea mays
  Clone ID: MRT4577_25285C.1.pep
PARHASVRGDQNHYLLSTPEREKTPSRPSGGGSLPSLSCVSHWTPPARLHGG

SEQ ID NO: 287490 - protein, 36 aa, Zea mays
  Clone ID: MRT4577_25286C.1.pep
KNLFFFVSEFFLTKPSQKKCFGYTTKKFLLTFFKEI

SEQ ID NO: 287491 - protein, 104 aa, Zea mays
  unsure (1)..(104): unsure at all Xaa locations
  Clone ID: MRT4577_25287C.1.pep
MKSAQLPYSSVDEVVGELYHLAKDQNGCRFLQRIFIEGSREDARKVFDGVIEHIDELMVDPFGNYLIQKIFEKCXNDXQKMHILYEIPKXPGQLIEVAXHMHGT

SEQ ID NO: 287492 - protein, 47 aa, Zea mays
  Clone ID: MRT4577_25288C.1.pep
LYMHSYVVNGSLVTCLCVHAPSFGLSCDYKMVWLSLATTKKKKKKRP

SEQ ID NO: 287493 - protein, 47 aa, Zea mays
  Clone ID: MRT4577_25289C.1.pep
RGRVGPKYRLIRNGLATKGGRGCKHMKERKNRVKKIRGDKKTKAGDA

SEQ ID NO: 287494 - protein, 64 aa, Zea mays
  unsure (1)..(64): unsure at all Xaa locations
  Clone ID: MRT4577_2528C.1.pep
VGRXRGKKKKKKKKKKKKKKKKKKKKKKKKKKKKKKKKKKKKKKKKKKKKKKKKKKFFPSPGAL

SEQ ID NO: 287495 - protein, 404 aa, Zea mays
  Clone ID: MRT4577_25290C.1.pep
MASTSTQTSRRTPTTPSPSQPASKAERAIQSVKNKKETITATKPAIKGQEEKTKTATKTSRITKVSPSEEKSGVKTKQSLQKVSNKSSVVPLESKTLKKTTGISQSIRSGMVKNKVPQPNDFSKDTGSVNQAEDKEQSPVTTEPTTKVLEADLAQPAHDVDENLEISLDNDLNIEKTEKPASSLTATEMGSSIQVEPSTDELDEAIQPPDDDMGISSSAWVEVERQELEVTVSSENVVVEDVTSPGIAPLPSSSPRVRHSLSQMLQADSNEPEIIEWGNAENPPAIVFHKDSPKGFKRLLKFARKNKGDNNANGWASPSVVSEGEDELEEPRGTSDGTNSSRRTFDGSKTNSILSAQSTTGSFNSLNSDKLRERSGAATSTRASRSFFSLSNFRSSRSNESKLR

SEQ ID NO: 287496 - protein, 35 aa, Zea mays
  Clone ID: MRT4577_25291C.1.pep
MYLLSMCFACHYHCRRFECVGILASIINCIQLHHL

SEQ ID NO: 287497 - protein, 73 aa, Zea mays
  Clone ID: MRT4577_25292C.1.pep
LKPFRSSYFGTKQQQNWDRTALFYLTFQPNTTLNWRIRGNLLVRGMGSTGAAPPRSKIWPAYKHKLIFSLSLH

SEQ ID NO: 287498 - protein, 198 aa, Zea mays
  Clone ID: MRT4577_25293C.1.pep
GFKRLLKFARKNKGDHNANGWASPSVVSEGEDELEEPRGPSDGSNSSRRTFDGSKTNSIFSAQSTTGSFNSLNSDKLRERSGAAPSTKASRSFFSLSNFRSSRSNESKLRKGLPCLSTKNMGSSFPLPFRTFRLKNGFRFDCSGGATLLCFALVPCPFINKKLPPMGGPKKKKKKKKKKKKKKKKKKKKKKTRGGAGT

SEQ ID NO: 287499 - protein, 113 aa, Zea mays
  Clone ID: MRT4577_25294C.1.pep
GVGFRRSPGGADRTCHSVTAEITHALRRTVASVAVSRSGTRSNWCRWRWRGPASRLVDGAVQKLHLVFVRAGRDAEVWGFGRLYKVGDGSGIRERGNVWDACAGPPRPDPRVP

SEQ ID NO: 287500 - protein, 117 aa, Zea mays
  Clone ID: MRT4577_25295C.1.pep
SQDRWFTKSRSSIPRSSGTDCNQGEVAEYGVGCDGSAACTQGPRRPAWTPCMRARAPGRLPSHSQMAAWRGWGREREEKGDARVQPGRGGVPWGEDGEGRWLAALRVCDVGTEGNAG

SEQ ID NO: 287501 - protein, 200 aa, Zea mays
  unsure (1)..(200): unsure at all Xaa locations
  Clone ID: MRT4577_25296C.1.pep
MAKRLINNGDNIHSRPKTYCFIRTPWRKNGRHQRFVTWWPTLSPDLYMYMHANSREFKWPLSFARTTIISHQPIDMHAWTISFVLASLSLYPSPSPPPQRPXXSPPPWARPSPHRWQSFPLQGLMASPPRRQSSPQLLPPPPCSRARRRPPPXXSPHQPSARARQSLAAFAPPPPPPAPTPCPPPPPSQLPVQPQPQWGR

SEQ ID NO: 287502 - protein, 49 aa, Zea mays
  Clone ID: MRT4577_25297C.1.pep
PDMSCAPYAGHRRACRSTVTDHCAVCRTNHRARATISAPASLPCVIAHR

SEQ ID NO: 287503 - protein, 78 aa, Zea mays
  Clone ID: MRT4577_25298C.1.pep
FILDKRGVLLGRCALSGGRWDCITKPILVGSKMMSSCSPGCCWYHQQREEDFLAGGGGHNHQGGDCYHSQGHCPTRSS

SEQ ID NO: 287504 - protein, 125 aa, Zea mays
  unsure (1)..(125): unsure at all Xaa locations
  Clone ID: MRT4577_25299C.1.pep
AGPGFPNILLLLIYHCRLGRDHAIPFSVRRDSYFVSHSLMTPTRKLRIGLAALXYANSTDDDLEKFATDLAASIWKQMCXAEIKSIPSXTFSYYGQVPETTATIGGVPERYNXTERQTAFDTYIS

SEQ ID NO: 287505 - protein, 443 aa, Zea mays
  Clone ID: MRT4577_2529C.1.pep
MDSVMAAPDSPPQTVVLVSAGASHSVALLTGNVLCSWGRGEDGQLGHGDAEDRLVPTVLSGFDAPAITSVICGADHTTAYSEDELQVYSWGWGDFGRLGHGNSSDVFTPQPVKALQGLKIKQIACGDSHCLAVTMAGEVQSWGRNQNGQLGLGTTEDSLLPQKIQAFESVCVKMIAAGAEHTAAVTEDGDLYGWGWGRYGNLGLGDRNDRLLPEKVSSVEGEKMVLVACGWRHTITVSDSGNLYTYGWSKYGQLGHGDFEDHLVPHKVEALKDSTISQISGGWRHTMALTSEGKLYGWGWNKFGQVGVGNNDDHSSPGQVSFPEDQKISQVACGWRHTLALSEKKNVFSWGRGTSGQLGNGEIVDRNTPVLIDALSSDGSACKKLESSTAAPFAAKVWVSPSERYAIVPDENVRKAGGGTARGNGADANVPENDVKRMRVQSS

SEQ ID NO: 287506 - protein, 82 aa, Zea mays
  unsure (1)..(82): unsure at all Xaa locations
  Clone ID: MRT4577_252C.1.pep
SVVPGGDLAKVQRAVCMISNSTSVVEVFSXFDPKFALMYAKRAFVPWYVGEGMEQGKFSQAREDLFALEKDSQEVGAEFSQG

SEQ ID NO: 287507 - protein, 40 aa, Zea mays
  Clone ID: MRT4577_25300C.1.pep
NNLCDISGSLNKYQRDSLLTFKMKLFELVYNPRIVMRSDM

SEQ ID NO: 287508 - protein, 74 aa, Zea mays
  unsure (1)..(74): unsure at all Xaa locations
  Clone ID: MRT4577_25301C.1.pep
PNPGGAGVVFFGSGPLGGGGAYNAPARFKASGGGSARPPLGRGLRGGPPRGXGRAGWANGTGPWGATALSWVGA

SEQ ID NO: 287509 - protein, 41 aa, Zea mays
  Clone ID: MRT4577_25302C.1.pep
FPAWEVYYPSYSHKKNKGHINTSMPLVLQIVEDGKWFQEES

SEQ ID NO: 287510 - protein, 97 aa, Zea mays
  Clone ID: MRT4577_25303C.1.pep
PARGPCRAWTPSSRRYWMMGRTGREPAACHGRICPTTASAPGVSARCPGGYKRSRAAAHCERPQSCLQASQPLLDAGAKLQGNITKYVRTYVQYRER

SEQ ID NO: 287511 - protein, 125 aa, Zea mays
  Clone ID: MRT4577_25304C.1.pep
ESFVDAWQTIEGSSLALRSADASAERVLFHLLSKKRSARAAQCGSVWYHSWAGKSLGIILSFPCVSHIGARNEQDNQDMGMVGTLRADCDYLYVARNIIYAQFERCWVVWDASIAIPVLETDPAG

SEQ ID NO: 287512 - protein, 97 aa, Zea mays
  Clone ID: MRT4577_25305C.1.pep
VDFSDSASLAAALKLDQKVVKERPVRIRCAVPKKDDQKVNDNGNSDHLKSETRTCYECGTPGHSSSSCPNKKDSEARKSYECGTPVHLSCACPNNND

SEQ ID NO: 287513 - protein, 60 aa, Zea mays
  Clone ID: MRT4577_25306C.1.pep
IKVVCCCKKKKKKKKKKKKKKKKKKKKKKKKKKKKKKKKKGKKKKKKKISLGRNNLKGKF

SEQ ID NO: 287514 - protein, 60 aa, Zea mays
  Clone ID: MRT4577_25307C.1.pep
IKVVCCCKKKKKKKKKKKKKKKKKKKKKKKKKKKKKKKKKGKKKKKKKSSLARNNLKGKF

SEQ ID NO: 287515 - protein, 101 aa, Zea mays
  unsure (1)..(101): unsure at all Xaa locations
  Clone ID: MRT4577_25308C.1.pep
TNASYLKALNLDHVKRSLAGKQYSQLAYKPTFHHLLDYNISTPXIFIFSYAPILLTXRRKNKGPTNPLSYEPNTIPDHSAGYILKKIIHEKHTIESANKET

SEQ ID NO: 287516 - protein, 207 aa, Zea mays
  unsure (1)..(207): unsure at all Xaa locations
  Clone ID: MRT4577_25309C.1.pep
VFTIQSTSKIENRKAKKNCFSWFHQFFKNTTSSLLLLLPLQVTSQYLKQQVPYYSFWQERSDGRSVFQDEAMEVLLDSLSSQENSRVQALSACFLSNLGGTYSWSGESYTAAWLTKKAGLTSTSQRNTIRNIDWLDSCRXCLLCTAWLGSELAALGENAIRYSACEILLHDIASHLHPGNELDERVLACMCLYNYTSEPSPPPSAPP

SEQ ID NO: 287517 - protein, 39 aa, Zea mays
  Clone ID: MRT4577_2530C.1.pep
GSPCAMLNLGQEVQSLSHCFPVRAKQYQLETLLFMFQQI

SEQ ID NO: 287518 - protein, 85 aa, Zea mays
  Clone ID: MRT4577_25310C.1.pep
SDICQSVPQIVVGTHRHLVFRGCGHGRRGPGGSPLLSWHGVLYVGPRAVQSVACGQCITLYHSYRVMPSTRQVCMTRRSSCSTSA

SEQ ID NO: 287519 - protein, 114 aa, Zea mays
  Clone ID: MRT4577_25311C.1.pep
LRVSKAGVNLLLIKWMKELEKIFYGNIVKYDAAISPEARQDDLVNVIWRNIYAEEGSEVMDAAAAPAVQALARYTRREATCLSLTDKDSMFSGNFKFTTLLPATPSSSPKKPVR

SEQ ID NO: 287520 - protein, 111 aa, Zea mays
  unsure (1)..(111): unsure at all Xaa locations
  Clone ID: MRT4577_25312C.1.pep
NRRAKKGGVPIGETSVETSANSGAFRATSGYLERRVSSGELNEPAGDKAVXRLALGIKXTVRAGEISEEREVGLITDAAVVXIKVTVEKTKDRSNAASVHELARVTGIGKA

SEQ ID NO: 287521 - protein, 309 aa, Zea mays
  Clone ID: MRT4577_25313C.1.pep
MSRWRAAAYSISAAAASRNSAAEAGALSRALAKAPSPPSLPLQTLTRNFAKSAAAATATSPGPGASSPPAGPRPEIRLKSMFLSKPCSLALPPDSPHRAVDPQYKGIKRFLLTLLLFYSKQSKSIRGANVVYDRITSQVDAPTIYDVFQLEKTFKTTFSLLVLHMWLVLRRLKEEGKDGVKFGQYIYEMYNHDVELRVSKAGVNLLLTKWMKELEKIFYGNIVKYDAAISPEARQDDLVNVIWRNIYAEEGSEAMDVAAAPAVQALARYTRREATCLSLTGKDSMFSGNFKFTALLPATPSPSPKKPVR

SEQ ID NO: 287522 - protein, 71 aa, Zea mays
  Clone ID: MRT4577_25314C.1.pep
IVWLERIQCPSGQGICFVLSPYVLPVKKGGFFFNNGAVHPSRLQLQPLVLDWSFGSHLGCAIWESNPPLLS

SEQ ID NO: 287523 - protein, 75 aa, Zea mays
  Clone ID: MRT4577_25315C.1.pep
LSLHTGCWMYGEGPTILNIRELETQRPHRLGFVTFSTEEAMRNAIEGMNGKELGGRYISANVAHSRCGRGGCCSG

SEQ ID NO: 287524 - protein, 82 aa, Zea mays
  Clone ID: MRT4577_25316C.1.pep
ITITYNPSTLLFLQNNHSPHTTINTLIFFFHTSLTQLHLFHHNNFHHLFSIHQYFIKFHLLNNNLYPKNFLLLFNSLNLILH

SEQ ID NO: 287525 - protein, 34 aa, Zea mays
  unsure (1)..(34): unsure at all Xaa locations
  Clone ID: MRT4577_25317C.1.pep
XXNLQHRGGPFFRLQIYMMAFFIQYNFSKTINIY

SEQ ID NO: 287526 - protein, 96 aa, Zea mays
  Clone ID: MRT4577_25318C.1.pep
PLIVKVSGLDDSTLFVVTFTVKYGTIFSATTTEQEASISSCTERTVRIAANFPSMDIPILSDAEMSVPTGHSGASPPLADGPLLTPERIPKHINKH

SEQ ID NO: 287527 - protein, 132 aa, Zea mays
  Clone ID: MRT4577_25319C.1.pep
MAGGEGAAAVMCTPAFVGRVLRSRWYVVFASMVVMAASGSTYIFALYSKELRSVLGYNQQTLNTLGFFKDLGTNVGVVSGLVQQVAPTWAVLLIGAGMNLAGYLMVYLALTERTAAPPVWLMCIYMCVGANA

SEQ ID NO: 287528 - protein, 96 aa, Zea mays
  Clone ID: MRT4577_2531C.1.pep
GPASVAARWSACHCHGPTAPYRACTDRARYCTLLKDSERGLFLAFPSLASRVCPLLVDSLSLFFFVRSRENDTQTQHTPGAHDFILHACLTPRVAV

SEQ ID NO: 287529 - protein, 270 aa, Zea mays
  unsure (1)..(270): unsure at all Xaa locations
  Clone ID: MRT4577_25320C.1.pep
VSASASLWPWYXQMEQIMGNSPSPGTPKPPPATNDXSRGNSSSTATRGTLLXTGHATTMVPYSRSTPLSNPKWKRVLLKIGGTALAGEAPHNVDPKVIMLIAREVQVACRHGVEVAILMGGRNVFCADSWVAATGTDRASTHPIGMMAAVMNAVLLQASLEKIGVETRVQTALMMQEVAEPYIRRRAIRHLEKGRVVIFGGTGAGTGNPLFTTDTAAALRASEINADVVLKGVIGDDEYGCPPKSNGSAPFEHISFRELAARGTSQMDMT

SEQ ID NO: 287530 - protein, 61 aa, Zea mays
  Clone ID: MRT4577_25321C.1.pep
IEPTDYGGGVIYNLHIYPNQPLINLKLDFTLTQLTIYFGRNRAIHHLPFIEGLYQSCYKNS

SEQ ID NO: 287531 - protein, 102 aa, Zea mays
  unsure (1)..(102): unsure at all Xaa locations
  Clone ID: MRT4577_25322C.1.pep
MVSESNRGGADRTTAAGEERGQLLFDVPEIRFTKLFINGSFVDAVSGTCKTFETRDPRTGGVIASVAEADKEDVDLAVRAARARFDHGEWPRMSGSRRGXIM

SEQ ID NO: 287532 - protein, 84 aa, Zea mays
  Clone ID: MRT4577_25323C.1.pep
PLVRGMAVLPPLREVIPLTATHPPLPLSHSPRMRISPQYTTRLCGGAVQIINSEPPRREAPRKGINLSPIDPCVTFSGIAFGPP

SEQ ID NO: 287533 - protein, 96 aa, Zea mays
  Clone ID: MRT4577_25324C.1.pep
PPGIGIFFRFQGFFFFWVPCVGAFIRSPPGAEDPFSSLVSTRVIVTGFPFQTRTVGYFCSGKVEDLFSGPMVRKIFGNGASKFFFSQSLMGLSPRG

SEQ ID NO: 287534 - protein, 171 aa, Zea mays
  Clone ID: MRT4577_25325C.1.pep
MAAEAAAAGKEKMRTLVSSDFKKFDVEESVARESLIILNLMADCDDSDIPVFNVNAKILDKVIAYCRKHASAPRADGGDAEPSAASNKASADDLKSFDAEFVDVDLVTLLELIKAADYLEINGLLDLTCQAVADMIKGKTPEEIRETFDIENDFTPEEEAKVRRENQWAFE

SEQ ID NO: 287535 - protein, 270 aa, Zea mays
  Clone ID: MRT4577_25326C.1.pep
MNTVEGATAPRPGRHRPYRRDTRGSEPATGNSFLGRQPLPRRRRRHPPRLSGMPVRVVDTATPSSQPSPGQEANTGHPSPPRCSLLSAGRSFAGTQNVSSLQKDEAWKVNVRIHGCDLEQGYLCGTMEALNVPLADTPVVTFWEGEIVDAKNYTFFTGKWEASPEDDIRHWSKFPSFMPLLSQIETDGGKSLDFSNYPYIFMRWKEQYFVNVGVDCGLTIAGFYYVCFSCSDGSISGFYYDPNSSPFQKLELKCTNEKKSGFTFSSYELQ

SEQ ID NO: 287536 - protein, 88 aa, Zea mays
  unsure (1)..(88): unsure at all Xaa locations
  Clone ID: MRT4577_25327C.1.pep
GYPPQAKQXPGPSKTSPGRQNTTTWPLPPRYRPARQQWRPWPPRYNTTTATGLSASKKPEASSTIPEPRVPHDPGPVAPHHKCTSIKV

SEQ ID NO: 287537 - protein, 42 aa, Zea mays
  Clone ID: MRT4577_25328C.1.pep
GQGVNMCHGSTTTERIVRSVTYRRSLGHEQRQVCLEPNSELT

SEQ ID NO: 287538 - protein, 137 aa, Zea mays
  Clone ID: MRT4577_25329C.1.pep
GFCAPDPQPPYVGATASLPTDVSRRCISRAPHLSAHLGDSPSRTAARTSRLSVHGRHPLVNKAALQSLCAPSRPRSSLVGAPCSHPPASPSPPSSNSIAWIKESRVHLYFDCKPCVQKLNLDASFAAYASSSDIHPS

SEQ ID NO: 287539 - protein, 107 aa, Zea mays
  Clone ID: MRT4577_2532C.1.pep
RRKGPASHIRKPNRTTPWPQKPRKNRRALTRRTKGRGGARGEPNTRGGGLGAPKGNKKNIFEGRGGGQTPILRGKRRPKGARVTNTHRVRVGYCGRERGRPPGTTWW

SEQ ID NO: 287540 - protein, 135 aa, Zea mays
  Clone ID: MRT4577_25330C.1.pep
GFCAPDPQLPYVGATASLPTDVSRLRISRAPHLSAHLGDSPPRTAARTSRLSVHCRHPSVNKAALQSLRAPFRPRSSLVGAQGCHLVGAPCSHLLASPSLPSSNSIAWIKESRNSHERVVKLLAKHCHRCNSTRI

SEQ ID NO: 287541 - protein, 368 aa, Zea mays
  unsure (1)..(368): unsure at all Xaa locations
  Clone ID: MRT4577_25331C.1.pep
MASGGTFRNLLLVLPLYLALASLVGGEASRRFWIENDTFRKDGVPFQIVGGDVHYFRIVPEYWKDRLLRAKALGLNTIQTYVPWNLHEPEPQSWKFKGFTDIESYLRLAQELEMLVMLRVGPYICGEWDLGGFPPWLLTIEPXLXLRSSDSSYLFLVERWWGVLLLKVAPLLYNNGGPVIMVQIENEFGSFGDDKNYLHHLVQLARRYLGNDIILYTTDGGALGNLKNGSIPQDDVFAAVDFETGSNPWPIFKLQKKYNLPGKSVPLSSEFYTGWLTHWGERIATTDATSTAKALKTILCHNGSAVLYXVTGAHSSVHCICSLGLLILFLHEVVQMAHGGTNFGXYNGATLGSDXSDYXADLTFYDYD

SEQ ID NO: 287542 - protein, 218 aa, Zea mays
  Clone ID: MRT4577_25332C.1.pep
MPVRVVDTATPSSQPSPGQEANTGHPSPPRCSLLSAGRSFAGTQNVSSLQKDEAWKVNVRIHGCDLEQGYLCGTMEALNVPLADTPVVTFWEGEIVDAKNYTFFTGKWEASPEDDIRHWSKFPSFMPLLSQIETDGGKSLDFSNYPYIFMRWKEQYFVNVGVDCGLTIAGFYYVCFSCSDGSISGFYYDPNSSPFQKLELKCTNEKSSGFTFSSYELQ

SEQ ID NO: 287543 - protein, 200 aa, Zea mays
  unsure (1)..(200): unsure at all Xaa locations
  Clone ID: MRT4577_25333C.1.pep
MPVRVVDTATPSSQPSPGQEANTGHPSPPSCSLLSAGRSFAGTQNVSSLQKDEAWKVNVRIHGCDLDQGYLCGTMEALNVPLADTPVVTFWEGEIVDAKNYTFFTGKWEASPEDDIRHWSKFPSFTPLLXQIETDGGKSLDFSNYPYIFMRWKEQYFVNVGVDCGLTIAGFYYVCFSCSDGSINGFYYDPNSSPFQKLEL

SEQ ID NO: 287544 - protein, 36 aa, Zea mays
  unsure (1)..(36): unsure at all Xaa locations
  Clone ID: MRT4577_25334C.1.pep
AAREIAILTGSLSXLYARQELSSAAVLLGCQGEPAV

SEQ ID NO: 287545 - protein, 218 aa, Zea mays
  Clone ID: MRT4577_25335C.1.pep
MPVRVVDTATPSSQPSPGQEANTGHPSPPSCSLLSAGRSFAGTQNVSSLQKDEAWKVNVRIHGCDLEQGYLCGTMEALNVPLADTPVVTFWEGEIVDAKNYTFFTGKWEASPEDDIRHWSKFPSFTPLLGQIETDGGKSLDFSNYPYIFMRWKEQYFVNVGVDCGLTIAGFYYVCFSCSDGSISGFYYDPNSSPFQKLELKCTNEKNSGFTFSSYELQ

SEQ ID NO: 287546 - protein, 102 aa, Zea mays
  Clone ID: MRT4577_25336C.1.pep
KKKEQLEQRAGCAPVPSVQVISETLRVANLISGVFRRANTDIHFKGYVIPKGCKIFASFRAVHLSLDHYENARTFDPWRWQQVHSLENTICYVVACSCSSFL

SEQ ID NO: 287547 - protein, 199 aa, Zea mays
  unsure (1)..(199): unsure at all Xaa locations
  Clone ID: MRT4577_25337C.1.pep
LSSSSSSSWSLPQPVRLQQSLLFSYLLLICCLGYVIPKGCKIFASFRAVHLSLDHYENARTFDPWRWQQVHSXKTQFAMLWHAHALLFYEKIDXIYDRQENLGRRELMWLPXVSRVQGKSKLQSAEGASLFTPFGGGPRLCPGYELARVVVSFPVFLHHLVTRFSWEEAEEDRIVFFPTTRTLKGYPIILRRRPDCDDL

SEQ ID NO: 287548 - protein, 185 aa, Zea mays
  Clone ID: MRT4577_25338C.1.pep
AFNPRKKKNTLEEGWRQELWSSNSRRETGNREACGRTQTRPQFQPRIPRGHVLDPSSPPYCFAVLCCAAIWIWALAQRQRYATAYCSGRRVFGLLVLWSLALCCDCSARTRPADVSARVLRGLWMATAVPCRLLDHATLTLIRGSCVTSGIAVYRGRNCVQCKLSEAGIQEPLCSAPASLSIRRL

SEQ ID NO: 287549 - protein, 64 aa, Zea mays
  Clone ID: MRT4577_25339C.1.pep
SFHLVGLFCYKSAIIFSNRMHHVLEGDVVACSASANFTPPIIVVAPDEVWIYMLSMVCTAVVYT

SEQ ID NO: 287550 - protein, 110 aa, Zea mays
  Clone ID: MRT4577_2533C.1.pep
RRTCCPSHSRRERGREGEADHSLMYLGLSRGLGGRSRGEAWTRDARAWAWAMEMERGERLGCELGSGLECWRKWERGARRSRSRGDGDEEGSRRLRGQSVTLRGKRSEGC

SEQ ID NO: 287551 - protein, 105 aa, Zea mays
  Clone ID: MRT4577_25340C.1.pep
TRRLGKIEKQKLENMLNNNLGRKRPRNSWRKLLHPTEFHNSVGGRISHWAYWFQKAGLRNRLGAIPYGTRDKLKESLFRFPLSEAMTGTLQEIVSQSYFKNQHPP

SEQ ID NO: 287552 - protein, 282 aa, Zea mays
  unsure (1)..(282): unsure at all Xaa locations
  Clone ID: MRT4577_25341C.1.pep
MASPSRLLPPTPPSAAQPRGPRDRLALPRLRCLRLPNTRIKLAASASPTDGAVLLERGGSAAVAVREFVTLDELRAAVRLRVRTFHEXQTTPSEPSFXDHRKALADREFEALQDRISGKMINFRRVSCINGTVPLSPSLMSAEELCSMCKFVEDGKERLVVGSLDLNQCLWLPDELTGKRPGVNEDIQTRAYLSNVCVAKELQKKGLGYTLVDKSKKLALEWGITDLYVHVAINNVAGQKLYKKCGFVYEGEEPAWKGRFLGRPRRLLLWLDMSKVLVRSCM

SEQ ID NO: 287553 - protein, 90 aa, Zea mays
  unsure (1)..(90): unsure at all Xaa locations
  Clone ID: MRT4577_25342C.1.pep
HRPRKHRTAWQAYYLGFLPSEAIINHIPRLLGPGLNKACKFPTLVTHQESLXSKVNKTKATFKFQLKKVLCLDEVFGNFSMDDISIQLNF

SEQ ID NO: 287554 - protein, 86 aa, Zea mays
  Clone ID: MRT4577_25343C.1.pep
MANAGLRAYREVLRLVRRLPAETQPYYAKYARQNFVNYRDLAADDDLGALLRRAYTHSTWVLSKYSIDAGKVAVRLKDLTDGHAEM

SEQ ID NO: 287555 - protein, 71 aa, Zea mays
  Clone ID: MRT4577_25344C.1.pep
RGGTGPPVNVGIPPPKVMVPNLKLDKARKAFLYRKARGRPPPKAKGKFSAGDVLPTPAGGAATGASFQEIE

SEQ ID NO: 287556 - protein, 132 aa, Zea mays
  Clone ID: MRT4577_25346C.1.pep
MATAAATPPHGGLPEEIVIWEILVRLPPKSLLRCRAVCRAWRSATSARDFLAAHHARQPNLPIVFQEYHGGQSLLALDNRGAAAAQLQPVAQFDDDSSLEASCDGLLRLTDYGRGVPRFSVCNPVTRQFACL

SEQ ID NO: 287557 - protein, 89 aa, Zea mays
  Clone ID: MRT4577_25347C.1.pep
NACPLTWRPPPPTASRPWSLLGRPPRPAPGGLRRPPRAGAGIATPANWAPTAGGPVATANKPARPARRWGSKVERTPPPRGINIIKSRV

SEQ ID NO: 287558 - protein, 121 aa, Zea mays
  Clone ID: MRT4577_25348C.1.pep
THNDPDLVYTCLEGLENILHAGEAGKKGEESGTNPYAEFILECGGLEKLEDLQDVDSDRIYELAMKLLQSYWEEEVSESDDPNIPGSNDSSDTVEATSEDAAAAVQPPPVPPPPSAADEAE

SEQ ID NO: 287559 - protein, 264 aa, Zea mays
  Clone ID: MRT4577_2534C.1.pep
MHNRSSSSAAAASSLPLSPADGFLRVKDGVDGMIKYVANEPSVGLYFVQQHARASMPLLLDVKGKLVEKTREVTLHTEDMEDSICAVRSMADFGLPLADDMIKDINRSLQIMSKTQPKRGLIQNPSWGFQSRKSSGTWDKLGSTNGSSSRNYLSSMFNTAKQKASGLRWPQPDFATKDDTSENSASSSALESPQAGGQGASTPDTEKDELPISSRLSEGTAANRSLPATGVSETVEAYNKFKEEQELKLREWLRDSEEAVNDKD

SEQ ID NO: 287560 - protein, 59 aa, Zea mays
  Clone ID: MRT4577_25350C.1.pep
FCFFPSYWLVNVAVFFSFRRPSNLFFSFPPRARLGGRKGEEGRRSEEQQQRPDAWADAW

SEQ ID NO: 287561 - protein, 125 aa, Zea mays
  Clone ID: MRT4577_25351C.1.pep
CAALEAAGFRLFPFFFVNLSLNLNAGSTSARRNDERRSGDRRRARRADGAVLRLFAKKIRYEVRKLNAEKRPRMKGRFVKRATLPPLPRPPPPQQQQQQKQLPRAPPHVGMVLPPPPVSNGRLWF

SEQ ID NO: 287562 - protein, 72 aa, Zea mays
  Clone ID: MRT4577_25352C.1.pep
GVQSHNPPGQCRRPQLVAVAGCTWDVGQQQETEPRLHPRTDIIRTVYLHLDHQLSQPRSIDRPAMDTKLDTG

SEQ ID NO: 287563 - protein, 413 aa, Zea mays
  Clone ID: MRT4577_25353C.1.pep
MTSAGAATGAALGARTARSCDGCMRRRARWHCPADDAFLCQTCDVSVHSANPLARRHHRVRLPSASCSSPPRDPDAPTWLHGLKRRPRTPRSKPGGSKSNKHEATPSFIAAAASSAAVPDLEAEESGSGILGGNDDHHGFLQDDDEDLLYRVPVFDPMLAEFYNPVADEGEQKPACSLLMPSLAETSPEFASGGSAEADGLSVSFHVPDMELASFAADMESLLMGVDDDGFDCLGFLDEEKPQVNADLDAIVAPAPEPEDKKRKRPEMILKLNYEGVIASWVRDGGSPWFHGERPHLDCHELWSDDFTTGSRELLGGAVTPVTGGEREARVSRYREKRRTRLFAKKIRYEVRKLNAEKRPRMKGRFVKRATLPPLPRPPPPQQQQQQKQLPRAPPHVGMVLPPPPVSNGRLWF

SEQ ID NO: 287564 - protein, 178 aa, Zea mays
  unsure (1)..(178): unsure at all Xaa locations
  Clone ID: MRT4577_25354C.1.pep
ASFTADMESLLMGVDDDGFDCLGFWDEEKPQVNADLDAIVAPAPEPEDKKRKRPEMILKLNNEGVIASWVRDGGSPWFHGERPHLDCHELWSDXHGKHYGSSMRSTHALALSWDKXXRLSFXWIACMQTGDRELLGGAVTPVTGGEREARVSRYREKRRTRLFAKKIRYEVRKLNAEK

SEQ ID NO: 287565 - protein, 84 aa, Zea mays
  Clone ID: MRT4577_25355C.1.pep
LHLFQIKKKKKKKKKKKKKKKKTKKKKKKKKKKKKKKKKKKKKKKKKKKKKGKKKKKKKKKNLCPPTPLKGKNFEKFPKNWGAV

SEQ ID NO: 287566 - protein, 103 aa, Zea mays
  Clone ID: MRT4577_25356C.1.pep
PGWSPRRTSCPRCWPRGRPPGSGPTRPGPGRGRTRPSSPDGFGVFDGDGDGRISAGELRPVLPALGDPACSVEDCPRMMGRVDGDGDGFVCFHDFWGMMMQGG

SEQ ID NO: 287567 - protein, 73 aa, Zea mays
  unsure (1)..(73): unsure at all Xaa locations
  Clone ID: MRT4577_25357C.1.pep
FDMRVIIXPTSRDPRILPAALDIKNPQFNRKLDSMLDINQKIIADSYSDXITLLTNLKTIPFSPSIVSNIMIF

SEQ ID NO: 287568 - protein, 114 aa, Zea mays
  unsure (1)..(114): unsure at all Xaa locations
  Clone ID: MRT4577_25358C.1.pep
KRKKGPHPWGPPKWESYPRFPGPPKGXPGQSKRPXGRKGGPGAPPGPGGPQPPGGPPPQPPGPGGRRKPGGSPGPGGPPNRFGGGRGPGGAGRGSGGPDHRGGQGGGGLLAQPE

SEQ ID NO: 287569 - protein, 72 aa, Zea mays
  Clone ID: MRT4577_25359C.1.pep
ARPPAPAGPYLPDRPTRLFSDWEPSFCRVHRCSMRTLGERNVRLCTRSRTVHYIYEDCCCHRWPGSDQVNSG

SEQ ID NO: 287570 - protein, 61 aa, Zea mays
  Clone ID: MRT4577_2535C.1.pep
LSAPRYEWLWGQQGGSRSRAALSQPFQLAHLPLSTDFSQVIRLLSVTCFTSAQDGRPMSLR

SEQ ID NO: 287571 - protein, 89 aa, Zea mays
  Clone ID: MRT4577_25360C.1.pep
GLHSWCRGEPRDCNCPMEATSTELALVRDVLLLSSPIYESEVSVRLSEQQTPVLQKQTSHPCRQRRRSRLNPDPAKPNSGTVSTPAAPN

SEQ ID NO: 287572 - protein, 131 aa, Zea mays
  Clone ID: MRT4577_25361C.1.pep
HCWYAVVFTRVSRSVAVGHGVIGACLRVRHRVLDGHGRDCHCVLDGCHRVSRRLRHLLISMLNGAVRRGAPHAARCRPRLRRCRSWRRRWTETRPYIYTLSAPPGTRPGPAPDRPGRIARCLTLPLISTSW

SEQ ID NO: 287573 - protein, 70 aa, Zea mays
  Clone ID: MRT4577_25362C.1.pep
SLQPTQCMHVTTGPYKCGTYQFAKNRRIQRYMFVGIHCFVALMPTSMISWGAQCADNSHLLEAIVSRPVC

SEQ ID NO: 287574 - protein, 260 aa, Zea mays
  Clone ID: MRT4577_25363C.1.pep
MLRRIAAVAPRAFFSSSPPHAPSLPASGYIPRREYGLVPMVIEHTSRGERAYDIFSRLLKERIVCIHGPITDDTASLVVAQLLFLESENPAKPVHLYINSPGGVVTAGLAIYDTMQYIRSPVTTLCIGQAASMASLLLAAGASGERRALPNARVMIHQPSGGASGQASDIAIHAKEILKVRDRLNKIYAKHTGQAIDRIEQCMERDMFMDPEEAHEWGLIDEVIEHRPVSLVSDAVGSDPPNLGGGGTEVNKGTDEPSPA

SEQ ID NO: 287575 - protein, 115 aa, Zea mays
  Clone ID: MRT4577_25364C.1.pep
RLTLSSCRMLHAAASVSLSASLSIAVSRPSVSSEAHMAVCRRVAHRPVRHERSGTQRPAYRYWIYGSSLHACTPIGSPPPCSRPGLGWPWTRALLSSSPVRLRSSLPRRLELRLD

SEQ ID NO: 287576 - protein, 260 aa, Zea mays
  Clone ID: MRT4577_25365C.1.pep
MLRRIAAVAPRAFFSSYPPHAPSLPASGYIPRREYGLVPMVIEHTSRGERAYDIFSRLLKERIVCIHGPITDDTASLVVAQLLFLESENPAKPVHLYINSPGGVVTAGLAIYDTMQYIRSPVTTLCIGQAASMASLLLAAGASGERRALPNARVMIHQPSGGASGQASDIAIHAKEILKVRDRLNKIYAKHTGQAIDRIEQCMERDMFMDPEEAHEWGLIDEVIEHRPVSLVSDAVGSDPPNLGGGGTEVNKGTDEPSSA

SEQ ID NO: 287577 - protein, 259 aa, Zea mays
  Clone ID: MRT4577_25366C.1.pep
MLRRLAAVAQRTFSSSSPHAPPLAASGYTPRREYGLVPMVIEHTSRGERAYDIFSRLLKERIVCIHGPITDDTASLVVAQLLFLESENPAKPVHLYINSPGGVVTAGLAIYDTMQYIRSPVTTLCIGQAASMASLLLAAGASGERRALPNARVMIHQPSGGASGQASDIAIHAKEILKVRDRLNKIYAKHTGQAIDRIEQCMERDMFMDPEEAHDWGLIDEVIEHRPVSLVSDAVGSDSQNLGGGGAGVNKGADEPSSA

SEQ ID NO: 287578 - protein, 117 aa, Zea mays
  unsure (1)..(117): unsure at all Xaa locations
  Clone ID: MRT4577_25367C.1.pep
ELDEEFDTFPPSRPPDVVRMRYDRLRSVAGRIQTXVGDLATQGERLQSLLSWRDPRATALFVVFCFVAAIVLYVTPFRVVVFLAGLYMLRHPRFRHKMPSVPLNFFRRLPARTDSML

SEQ ID NO: 287579 - protein, 46 aa, Zea mays
  Clone ID: MRT4577_25368C.1.pep
NFIIFSSMLFGSCPRSIVFLFYNQIINLKEWPFDELKEPTQGTINN

SEQ ID NO: 287580 - protein, 77 aa, Zea mays
  unsure (1)..(77): unsure at all Xaa locations
  Clone ID: MRT4577_25369C.1.pep
QHRKHTSVPTLAAKIFCLLMLLGLPAGAVTATXFPAWLEGSNSFLFSPELLSIIALVXCETQIFKPIRFHQALTAGI

SEQ ID NO: 287581 - protein, 56 aa, Zea mays
  Clone ID: MRT4577_2536C.1.pep
FFFFFFFFFFFFFFFFFFKNQSKKILFKIEALKETNTPNKIIKQCHYRLNALKTNP

SEQ ID NO: 287582 - protein, 244 aa, Zea mays
  unsure (1)..(244): unsure at all Xaa locations
  Clone ID: MRT4577_25370C.1.pep
IILDCQQLGMNAPAEANVAQTPAASRGRGRGRGGGPAPRGKATQGRVSVPKAQNAKIGPNRLLEVEWVKDSILKGNCFVLFAGSGQPGDQQWTFHHPIGETPLDARDWVATPTRDISFLLQRRESEALVAWKRQSELAKRHAVLRSQVGRKLAGDGQTEIWAFQGAPAIQPTIQSCMTAAKAAGANESEWLSYADQAVRVAEQSFKEALRTQPIPAEWIRANPKPHHETMGGXSRGTPTEGYPP

SEQ ID NO: 287583 - protein, 182 aa, Zea mays
  Clone ID: MRT4577_25371C.1.pep
MAGAWALLIVLAAAVAVLAARPASAGGGAAAVAEICMKTPSPDLCTRTAGKHANKYKVVDAVTVLEMQVDAFKKRVKAARRLAKEEVKTAATPEARRALNLCKTYYLDAADNLGACKRAIGFRDAVTIRATMSMVAQDTQNCDEEFRKAVSKNPMEDHNRSLIEMSEICRTLSNMIPYEHVH

SEQ ID NO: 287584 - protein, 72 aa, Zea mays
  Clone ID: MRT4577_25372C.1.pep
PSKCDSACFASVSNGDKCRPDPGSSATSRPPVRIPASPRKNSVVRIAYGGLVFVMVCCPVALYSDMSVAIWR

SEQ ID NO: 287585 - protein, 112 aa, Zea mays
  unsure (1)..(112): unsure at all Xaa locations
  Clone ID: MRT4577_25373C.1.pep
LNGVSTPAASEDGTRGGAVVSASGVPRQEEEKSVSARKPWRPPKSAKQCLHCGSSWTPQWREGPLGRSTLCNACGVRYRQGRLLPEYRPLASPTFXVXEHANKHSQVMQFHR

SEQ ID NO: 287586 - protein, 79 aa, Zea mays
  Clone ID: MRT4577_25374C.1.pep
LNFGVVIRMVSNRESARRSRKRKQAHLTDLESQVSRLTSENASLLKRLADMTQKYKDASVDNKNLTVDVETMRRKVRSS

SEQ ID NO: 287587 - protein, 534 aa, Zea mays
  unsure (1)..(534): unsure at all Xaa locations
  Clone ID: MRT4577_25375C.1.pep
DVWHCEICNRKPGRGFGGYNCLLNISXRYFMFPCDYALLLFDVILPFIETTVEVLPRLCQIKYASGTLEELLYVDMPRESQNSSGQIVLDYTKAIQESVFEQLRVVREGHLRIVFNQDLKIASWEFCARRHEELIPRRSIIPQVSQLGAVVQKYQSSVQSSASLSSQDLQNNCNSFVACARQLAKALEVPLVNDLGYTKRYVRCLQIAEVVNCMKDLIDHSRQTGSGPIESLHKFPRRGNSGVSSVQAQQQSEGQKPVPQNSNQSGQNSAPATGMEASASGNGDATSNNSLNCAPSTSAPSXSVVGLLQGSVSYRQDHPTSSGNGLYNGGNSGPAAKANSTNSMQSNAPASFPLPAPSASNGNMMPAPQHSSQMNSPTMSSSLPPMQTPASRPQEPEPNESQSSVQRILQDLMMQSHINSVGPVGSNMKTANTVTPGLNGANSLAGNPMTNNPGIINGMGFGAMGGLGQQMRTAMGNNALAMNGRTGTMNHSAHDLAQLSHQQQQQRDLGNQLLGGLRAANSFNNLQYDWKPAQ

SEQ ID NO: 287588 - protein, 68 aa, Zea mays
  unsure (1)..(68): unsure at all Xaa locations
  Clone ID: MRT4577_25376C.1.pep
QLQQETARLFHNTKTYVTSCGHITKISVEVYLNALGYTYYVTLTVPXTYGFYCXPHHRAGMDSEITVY

SEQ ID NO: 287589 - protein, 52 aa, Zea mays
  Clone ID: MRT4577_25377C.1.pep
ILLLSPRNYYKNLKMKCLFSKYIEFSNNIVWFSLPKKTTKKKKKIKKKKKKS

SEQ ID NO: 287590 - protein, 78 aa, Zea mays
  Clone ID: MRT4577_25378C.1.pep
FFFRLIITPKATQVFKVLGGEFWEKKKDPRGTRPGTTLGGNLVYVHKIGGPFKQAPKGPSPPNREGELHSIARPLTPP

SEQ ID NO: 287591 - protein, 81 aa, Zea mays
  Clone ID: MRT4577_25379C.1.pep
SQIVLHEKTGICGFLENDQKYCINIYLGWRKPLQLLREENLGVFESGWRVDKRSLPMNSKSYLQHAWMEQCFMYSGVPLQL

SEQ ID NO: 287592 - protein, 82 aa, Zea mays
  Clone ID: MRT4577_2537C.1.pep
QTTTPRGGDLLRETKFNCGVGQGKNFFLGVEKNKEEERVKQQERRRNKGDDRIKEGSKEDEREREQEKEEKQKDRRSYVFDR

SEQ ID NO: 287593 - protein, 145 aa, Zea mays
  Clone ID: MRT4577_25380C.1.pep
FFFFFFLFFFFLFFFFFFFFFFFSFKFFKASKNPFIPFLYSRALQFAVFQALRHGRIANVLAPVKFIFHDARTFVKFSAAASHVVARRQQPRNVHARNTRCVDVLFGLPIYRHACTDKRGRPLKNHGKEPKSLDARALLALRNNG

SEQ ID NO: 287594 - protein, 97 aa, Zea mays
  unsure (1)..(97): unsure at all Xaa locations
  Clone ID: MRT4577_25381C.1.pep
RPRSPCPXALXALXPRGWGPXXPRPXACWGRCXPSXPAXXGRRXCRCSXAXXXXRAXXRXXGPXWSPPSRGRPAWXXPSPXSPXRRXRXLLGVSGSL

SEQ ID NO: 287595 - protein, 53 aa, Zea mays
  Clone ID: MRT4577_25382C.1.pep
YFTNIESLSFSVEHKFVCISSVDKLPLDTPLQECPPVRMQLANVFFLIVDKAR

SEQ ID NO: 287596 - protein, 122 aa, Zea mays
  Clone ID: MRT4577_25383C.1.pep
HCWLLPQEQGGPQPRSGDGDGILEGPFPPPEDPARQGRAVNPLGVGPLGYGAKEGGPKLGPTFLPSLRLLFFRGKRAKLKNGRGGFLGGFSLGRHACVSPLDFGPLPTKSGAFFVYFPRWLL

SEQ ID NO: 287597 - protein, 164 aa, Zea mays
  Clone ID: MRT4577_25384C.1.pep
MLAAATTTTRSTAPSVPNETASQPAPRENTQVERRKEQSKGTGPQGRVIDVSTPRKIQDAPAGIDMLPAGKVFPIQIGSELFRLSGASLSSDAPSYFSHFFGQQLHDNGGRAGDVRTLYIDRDPETFRDIALHLQGYHITPKDGEHFVKLYADAQVYSLPRLTK

SEQ ID NO: 287598 - protein, 47 aa, Zea mays
  Clone ID: MRT4577_25385C.1.pep
RHRAVSGAPPAALAYIVPLARGWAPWRPDAVMSTTGRGRNSDLRIFK

SEQ ID NO: 287599 - protein, 65 aa, Zea mays
  Clone ID: MRT4577_25386C.1.pep
MHPPASRTTRIAGPPDRLVARAYRAVHDYDYLFKVVLIWDSGVGKSNLLSRFTRNEFSLESKSTI

SEQ ID NO: 287600 - protein, 100 aa, Zea mays
  unsure (1)..(100): unsure at all Xaa locations
  Clone ID: MRT4577_25387C.1.pep
AFSAVAFVQVDLSLGAFAGGXSVLFGLAKLVPQMDLSRVALRFILSAVDLPEQLVSLAVSLYAVFGGIPAQVVNLSFLQLFIVCSGRLSGSVPGGVLMAC

SEQ ID NO: 287601 - protein, 61 aa, Zea mays
  Clone ID: MRT4577_25388C.1.pep
TGLQVYVMHRIAPTHMMNSHRQTGHTPSHWKPTDPDEALGHGPHALAHTAVRLRSPDHKTY

SEQ ID NO: 287602 - protein, 46 aa, Zea mays
  unsure (1)..(46): unsure at all Xaa locations
  Clone ID: MRT4577_25389C.1.pep
PSKSLNHSLVELNEKKXADPSQVENTPPASSKYVVVCTTRTTERVG

SEQ ID NO: 287603 - protein, 101 aa, Zea mays
  Clone ID: MRT4577_2538C.1.pep
RINSLINLRYIPHLPCPLHARSRSSVVCCPSACLPLPSRVTEIGLHRTDLRSSPSTGPARQLGQSIYVISPDEEGLDTSRPALLPHEICRVPWHYRDHTLP

SEQ ID NO: 287604 - protein, 114 aa, Zea mays
  Clone ID: MRT4577_25390C.1.pep
GSFGPFRYGWRLGALTLCCRVPFCSCCCSLSSVLVLLLGCTRHGFPGGSLPSPFVRRFLSLGYASGACLFLVSSPAVSLPVCVCSLLWLCCSVLPLFLRMRGSAWVVPAVPARF

SEQ ID NO: 287605 - protein, 137 aa, Zea mays
  Clone ID: MRT4577_25391C.1.pep
MPLTGSCMCGAIAYKSTTDPDVTALCHCTDCQKWTGGAFTSNAVVPEESFSITKGTPKQYDVTGASGKINHHFFCGDCGSSLYTRLDIMEGKIIIKAGGLDEGKANLDNKIGVEFYTRDRVPYIQPAQGAKQEQMFG

SEQ ID NO: 287606 - protein, 452 aa, Zea mays
  Clone ID: MRT4577_25392C.1.pep
MARGGGGRSKKEDEEELRGAKRGYKEASAEGNREEEARWANVIGDIYKRRCEYVEALRWLRADYEVSVKHLPQRHLLPSCQSLGEVYLRLGRFSEALTYQKKHLQLAKESDDLVEQQRATTQLGRTYHEILLRSENDHSAIRNAKKYFKSSMKLARILKERSPSQKSDFLKELIDAYNNMGMLELELDNFEEAEKLLIQGLKICDDEEVDSYDDARTRLHHNLGNVYTELQNWKKARGHIEKDIEICRKIRHLQGEAKGFINLGELHYRVQKYDNAKLCYNKALEVARSLEDEDALIEQIHQNIETVTKAVEVFEQLKEDELKLKKLIRDTSNARGTSKERKLLLDQHAWLDSLIEKARMICAWQKHKEFSKVNIGNVLDSCGDWAGALQAYEEGYRIAVEADLPNVQLSALENMHYSHMVRFDNIEEAKKMQEKIDNLKQTLNQCEAATAT

SEQ ID NO: 287607 - protein, 100 aa, Zea mays
  unsure (1)..(100): unsure at all Xaa locations
  Clone ID: MRT4577_25393C.1.pep
VDHILDRATIYHDFTNILPKNYXRFAIYHIYSVTANDVQTTTIFYILWSPSSTKVNSNMLYASSNHKFNIVLNGIHLELQSTYASEISLDEIKDLAHYAH

SEQ ID NO: 287608 - protein, 109 aa, Zea mays
  Clone ID: MRT4577_25394C.1.pep
PKRGKTWGDQNFPPKNARLSFKNPPVFGAKPERVFGPNLVRGVPGGLPVGPPFRGKLFFVGTRGVPPPVGGVFEQPGGDPFWGGPFFALVPRAAPGEIAFFGWGVAGGV

SEQ ID NO: 287609 - protein, 66 aa, Zea mays
  Clone ID: MRT4577_25395C.1.pep
TDFEHSKTLLVKRTSNNLAGDVYQYISPPCASCLICERNICDHNIHIAHLLLVPKNHIIFHHFFQR

SEQ ID NO: 287610 - protein, 128 aa, Zea mays
  Clone ID: MRT4577_25396C.1.pep
GTKKRGPTPGPRVKRKPRGGGGGGKKGVAKTKAGYEKTKPKGGEKPFFSGGKGERVIKGVQEITPPGAWTGGKRVGPGATLGRGPGLRGEMRKRRNPQEAAGGRPLSFKEEGEGGGGIEAKRKTLRGG

SEQ ID NO: 287611 - protein, 1079 aa, Zea mays
  unsure (1)..(1079): unsure at all Xaa locations
  Clone ID: MRT4577_25397C.1.pep
MEGDADGVKSGRRGGGQVCQICGDGVGTTAEGDVFAACDVCGFPVCRPCYEYERKDGTQACPQCKTKYKRHKGSPAIRGEEGDDTDADSDFNYPASGNEDQKQKIADRMRSWRMNAGGSGDVGRPKYDSGEIGLTKYDSGEIPRGYIPSVTNSQISGEIPGASPDHHMMSPTGNIGKRAPFPYVNHSPNPSREFSGSIGNVAWKERVDGWKMKQDKGTIPMTNGTSIAPSEGRGVGDIDASTDYNMEDALLNDETRQPLSRKVPLPSSRINPYRMVIVLRLIVLSIFLHYRITNPVRNAYPLWLLSVICEIWFALSWILDQFPKWFPINRETYLDRLALRYDREGEPSQLAAVDIFVSTVDPMKEPPLVTANTVLSILAVDYPVDKVSCYVSDDGAAMLTFDALAETSEFARKWVPFVKKYNIEPRAPEWYFSQKIDYLKDKVHPSFVKDRRAMKREYEEFKVRVNGLVAKAQKVPEEGWIMQDGTPWPGNNTRDHPGMIQVFLGHSGGLDTEGNELPRLVYVSREKRPXGFQHHKKAGAMNALVRVSAVLTNGQYMLNLDCDHYINNSKALREAMCFLMDPNLGRSVCYVQFPQRFDGIDRNDRYANRNTVFFDINLRGLDGIQGPVYVGTGCVFNRTALYGYEPPIKQKKGGFLSSLCGGRKKASKSKKKGSDKKKSQKHVDSSVPVFNLEDIEEGVEGAGFDDEKSLLMSQMSLEKRFGQSAAFVASTLMEYGGVPQSATPESLLKEAIHVISCGYEDKTEWGTEIGWIYGSVTEDILTGFKMHARGWRSIYCMPKRPAFKGSAPINLSDRLNQVLRWALGSVEILFSRHCPLWYGYGGRLKFLERFAYINTTIYPLTSIPLLIYCILPAICLLTGKFIIPEISNFASIWFISLFISIFATGILEMRWSGVGIDEWWRNEQFWVIGGISAHLFAVFQGLLKVLAGIDTNFTVTSKASDEDGDFAELYMFKWTTLLIPPTTILIINLVGVVAGISYAINSGYQSWGPLFGKLFFAFWVIVHLYPFLKGLMGRQNRTPTIVVVWAILLASIFSLLWVRIDPFTTRVTGPDTQTCGINC

SEQ ID NO: 287612 - protein, 38 aa, Zea mays
  Clone ID: MRT4577_25398C.1.pep
VQLIPQASHPLGLYQVGQFPPWNFGHSAIESIGDTVRH

SEQ ID NO: 287613 - protein, 133 aa, Zea mays
  Clone ID: MRT4577_25399C.1.pep
QGVSPPKKKSLFLFWGSPPGVPQPLSNHFGFPRFISAILAPPSGPGNSFYFLGPKSPPPRGPFLPPPPPGFFPLGGGFSLGQAKVFFRFSGPPFFFFPKPGFFFGGPQTFSPVLLGPGLPHSLLKESPVGLRA

SEQ ID NO: 287614 - protein, 351 aa, Zea mays
  Clone ID: MRT4577_2539C.1.pep
MDTPDRAAAQSAATRTEDSPVFSFLNNLSPIEPLRSSAYSTNSLQGFQSINITSISSIFTSPHDNVSKEPRFPKSPLGEISDKEVRADAAGTNEPPEPSNAARLFACTSTVTRETRTGTCTGVAGPPPTTGGPCDLALPRQFDNNGSPDHNTTPCHGVRSDLKQDKARKLLQAAQNAHDGAPSQRKCLFSTEVRLLDGGGGGGEPGSDSDGVLGCEWSDLVSPTSAKLLAFDATMDEHHRGVHLAAQNAESCGYLLSKLAGDGGVSDGAYPTASAQVYYQELVMGDDQSENAAPQMDAQETISAEEIQDNIYEADVCVPLEYKVVESQQQRGIRRRCLVFEAAGLGFLIAL

SEQ ID NO: 287615 - protein, 169 aa, Zea mays
  unsure (1)..(169): unsure at all Xaa locations
  Clone ID: MRT4577_253C.1.pep
MRECISIPXRANQRIHVXNACWELHCLQHGIQGDGQMPGDKTIGGGDDAFNTFFSETGAGKHGPRDGFAELEPTVIDEVRTGSYRQLFHPEQLISGKEDAANNFARGHYTIGKEIVDLCLDRIRKLADNCTGLQGFLVFNAVGGGTRSGLGSLLLERLSVDYGKKPKLG

SEQ ID NO: 287616 - protein, 57 aa, Zea mays
  Clone ID: MRT4577_25400C.1.pep
SRVGVAPHYPQTGIMVTHVIRMSSLTPHRMSILPLGLNDLVLPNYHCQIYAITDLCQ

SEQ ID NO: 287617 - protein, 120 aa, Zea mays
  Clone ID: MRT4577_25401C.1.pep
MASGEAEPLQYTTTALRVSIHCEGCRKKVKKVLHSIEGVYKVTVDAAQHKVTVTGSVEAAALVRRLHKAGKQAAPWPSPAPAPANVETNKSAPAALPARAAGGRRQGQGRRGHQAQGQGV

SEQ ID NO: 287618 - protein, 79 aa, Zea mays
  Clone ID: MRT4577_25402C.1.pep
ARLFDQTLNKSAFFSFLPPRPNGPFPPPGFGLVFTPLDPFPFRMATPKTPFPFPRVSGLAGFSPPAPPPPPEFFKNLFS

SEQ ID NO: 287619 - protein, 174 aa, Zea mays
  Clone ID: MRT4577_25403C.1.pep
SQFLPTKPYCSGYQQLSTASSAGSAVGAAVDHHHHQQQQQQAGTGAAAVSTSSSSSRNASYALATASTYSLLSLVNAASMGGSGSAAAIDELSALVGHVHGAPPYFNHQAAAAAGHGHGFVLPLPTTPSSQQPMAALGTLPLSLAAISDKIWDWNPVGPDAAARDYGSAAGGFK

SEQ ID NO: 287620 - protein, 49 aa, Zea mays
  Clone ID: MRT4577_25404C.1.pep
NLVIRFPLQKVCVKKKKKKKKKKKKKKKKKKKKKKKKKKKKKKKKGRPF

SEQ ID NO: 287621 - protein, 210 aa, Zea mays
  unsure (1)..(210): unsure at all Xaa locations
  Clone ID: MRT4577_25405C.1.pep
MASTASFLPLLALLLVATAHCSPLPQRCPQADRQALLRVKQALGSPATLKTWSPASADCCAWDHLTCNEAGRVNNVFIDGADDVRGQIPSALAGLTALMSLSLFRLPGLQGSIPACLTSLSKLEFLTVSHTNVSGSIPESLARLHSLDSVDLSNNKLTXSIPNSFADMPNLRSLDLRRNQLTGRIPASLVQGQFRSLVLSYKQLTGPIPR

SEQ ID NO: 287622 - protein, 118 aa, Zea mays
  unsure (1)..(118): unsure at all Xaa locations
  Clone ID: MRT4577_25406C.1.pep
LNPQXFVQALRKQYTGHITRGINLTRLDSITLLHDIQENHCEYYIIQSIRLINRSSEHIITNRSKNDDAFVGEAFCRAPGELHTNFIFCFYQTPLVTKPPPMQTNRPSRPSDAEQSSR

SEQ ID NO: 287623 - protein, 105 aa, Zea mays
  Clone ID: MRT4577_25407C.1.pep
VRFGLSCQSADQFYQGIIQHMRAQDNWGRGAFYQDQPLYCPCILLHSSLKTFTSITDIYIYRVLTSNIFLALELTDTCIIVHKIPIPLRGHITLKSIYLLMRRLT

SEQ ID NO: 287624 - protein, 60 aa, Zea mays
  Clone ID: MRT4577_25408C.1.pep
HTSEHFQSNITLYNHKKGDLSSFPSTRSFNQPKKEAFFIFPFALHISCLLYLSYYLLLLI

SEQ ID NO: 287625 - protein, 68 aa, Zea mays
  Clone ID: MRT4577_25409C.1.pep
FGILANSNLRGLVGVHTSRGKIAAQMCHELWSNCIPKSRNIVLSHPSTIKRNCPHKPKGTDEYSLVPN

SEQ ID NO: 287626 - protein, 40 aa, Zea mays
  Clone ID: MRT4577_2540C.1.pep
AGKKGLFSSGLLILGKTMVFQVTMFFLRQPNVFYLLFPYK

SEQ ID NO: 287627 - protein, 61 aa, Zea mays
  Clone ID: MRT4577_25410C.1.pep
LISRITVMDMFTHLLFTEKQVVTPTDNELIVVGDGHSGTISVRAAGNDLIRPFDVAVVVPT

SEQ ID NO: 287628 - protein, 88 aa, Zea mays
  Clone ID: MRT4577_25411C.1.pep
LGHARVVPGPCSCPLFQSRHQACCRIPRLIVAQHASRVGPGPCHGGVGSQLTSMLTERIPPAFLCQVIFGAPTTRAQAHSMASCSLHI

SEQ ID NO: 287629 - protein, 59 aa, Zea mays
  Clone ID: MRT4577_25412C.1.pep
LIFVVMDMFTHLLFTEKQVVTPTDNELIVVGDGHSGTISVRASGNDLIRPFDVAVVVPT

SEQ ID NO: 287630 - protein, 97 aa, Zea mays
  Clone ID: MRT4577_25413C.1.pep
APVAFLDSDLYAFSYNPVHGCFAPLFFQLCSMTNCVNQRILSYYVELLSLLGHYLGKSNLFYDCLNSSHVSYCCVNNPSLGVFIFNIILKFSSFYYL

SEQ ID NO: 287631 - protein, 279 aa, Zea mays
  Clone ID: MRT4577_25414C.1.pep
GPRFRLLSSMSLLSKLRLITVDVTGTLIAYKGHLGDYYCMAAKSAGMPCPDYNRMHEGFKLAYTEMARQYPCFGFAAKMPNIEWWRTCVKNSFVKAGYDYDEETFEKVFRRIYSAFGSSAPYSAFPDSQPFLRWAREKGLTVGIVSNAEYRYKDVILPALGLNQSSEWDFGVFSGVVGVEKPDPRIYKIALEMAGNVAPEEALHIGDSMRKDYTPARSIGMHALLLDRFKTADAESWRQSGATVLPDLVATQEWLTKDQNDEQEETVAARVLKRMSEKL

SEQ ID NO: 287632 - protein, 108 aa, Zea mays
  Clone ID: MRT4577_25415C.1.pep
EHTNREVLLWLKQWDSIVFGSHIRATGDDVLSALRRHSSTIQKNASNRNFFSKSKGGPVASQTGTPLNAQSSNPEGLGGSFSKKSSVDNAPEQKVLLLCGPPGLGKTT

SEQ ID NO: 287633 - protein, 72 aa, Zea mays
  Clone ID: MRT4577_25416C.1.pep
TTHSTVALADGRHAVLHSDHDYIHQHIGPRLAGLLITLANTAGVLATVVGAYITDYILQNGAWNRVVKVSIV

SEQ ID NO: 287634 - protein, 95 aa, Zea mays
  unsure (1)..(95): unsure at all Xaa locations
  Clone ID: MRT4577_25417C.1.pep
FYTLRVLLQMGXVLMFXGGQMPADKEQRIVDHLAKPWAEPYQEKDCIQLPSYRNHYVNGDNFTPKSHQQDPQRMTRAYTQTGATLNLLRAFTSGG

SEQ ID NO: 287635 - protein, 115 aa, Zea mays
  unsure (1)..(115): unsure at all Xaa locations
  Clone ID: MRT4577_25418C.1.pep
GRLRNPLDHLAVFPYFTNYLLVSQLEHGLVGRQVPGPXPPSRVALLGSGPFRLSSFGLAWGNFPAAALKNYKIWGDANNRARRFWRANAGLAGGMGFRTSDVAHVTRELAAYNVV

SEQ ID NO: 287636 - protein, 165 aa, Zea mays
  Clone ID: MRT4577_25419C.1.pep
GKNRGGEFSIFFFSGFFHPWAGVGFPTLGQSGPLLIPPLWGPTPQRGSKGITSPRFHKTKGGGPAPAIIATKYPPQYPIGGRGPKTWFPRFLGIGPLFGGGGLLPPPPPKKKFFSWDGFWVFLNIRSWSATFFILGRFFISIGKHLAGSSPIPSKIPKLVSFATF

SEQ ID NO: 287637 - protein, 76 aa, Zea mays
  Clone ID: MRT4577_2541C.1.pep
TAHCFDSRSEEGGSDGRDRSGRANRIYLSFSSRQIGGRSAAQSSRRWSGTMAIGKASLPFCPHCAVLPSSLLCHRP

SEQ ID NO: 287638 - protein, 102 aa, Zea mays
  unsure (1)..(102): unsure at all Xaa locations
  Clone ID: MRT4577_25420C.1.pep
GCCSFNGGGNGVRVRCQAKCKVCKCVLFAKSFGGPGLFNRQKTACKLKHGKKAFAQSLPPFNPNGSARLWETKADVARFXMCRLVSRLDPPICLAESSAFEE

SEQ ID NO: 287639 - protein, 88 aa, Zea mays
  Clone ID: MRT4577_25421C.1.pep
PNEPKAGGHLKKKRKGSKGPFREQKTRPPPTVRAKGGLDRPTKISKAGAWIGRGIGGKKRNGGPFQQEQKGKPLGQDPRRGGKTLAEP

SEQ ID NO: 287640 - protein, 97 aa, Zea mays
  unsure (1)..(97): unsure at all Xaa locations
  Clone ID: MRT4577_25422C.1.pep
NQCLETFPRCSVSSHPCHWTRWLPLAELWFNTSLHSSLGKSPFEVLYGRLPRTLGSLXDAAISRSDLQQWFXQRELMTQAVRSHLLRAQQRMKPHAS

SEQ ID NO: 287641 - protein, 66 aa, Zea mays
  unsure (1)..(66): unsure at all Xaa locations
  Clone ID: MRT4577_25423C.1.pep
IFYKNHKKNLYRSYKPILGTFSPFFSPNXXGQREFQLDTCFLMSSDVIDANYQQTGILVTSEPTRP

SEQ ID NO: 287642 - protein, 185 aa, Zea mays
  Clone ID: MRT4577_25424C.1.pep
PRRPGEAAAESRPGTRTAMNSPPGDDGGGSAHGLFGSGGIRGFGYGVGVSIGILLVASTIALAIYFCTRTSMPESAAALAPPRQGGDAGRGIDEATLEAFPAVAYAEARKAAANQACCCPVCLDCYGDGDVVRVLPDCGHLFHRACVDPWLRQRPTCPVCRTSPLPSPMPTPLAEVTPLASARPS

SEQ ID NO: 287643 - protein, 93 aa, Zea mays
  unsure (1)..(93): unsure at all Xaa locations
  Clone ID: MRT4577_25425C.1.pep
NFGNPLVPRGNPFCSGFNPFXXAPNSTKKRKKXGFFFFKTPPPRLWEKKKTPFFFLKKPFFFFWVQLGKIKKXFXXKSWVVLKRVXXSNRKGI

SEQ ID NO: 287644 - protein, 123 aa, Zea mays
  unsure (1)..(123): unsure at all Xaa locations
  Clone ID: MRT4577_25426C.1.pep
EESEGHIDHLDRIHINXVEKHQLLEDDKLSANHENXQLQTHVQDLEVHLQLAXQKLKVTEAQSICKEERSEPSVEALRSEICHLEQLLQLFSRRVTLLEGTLMHVTGHAESRFCRWSDKLDEL

SEQ ID NO: 287645 - protein, 140 aa, Zea mays
  Clone ID: MRT4577_25427C.1.pep
RCAVWRTPTTELSMTTHPSTTYMSSPQKGSGLLSTRLTTVSALHMPMTADKDLKPRPSGINRTPGVIFSAMRNDVDRATTTVYLHFITDAESRSRIATSTCNIPPSMKPTPRSMLSCAILTSANTMTTTDSSAPCTQSPR

SEQ ID NO: 287646 - protein, 81 aa, Zea mays
  Clone ID: MRT4577_25428C.1.pep
LITVTRHKPSRTLLLINHNTTYAYGHKQANGKSNHSIVMGCQLSRYLYYITAWSPRQRLQQLGKSTVRIVPPHIQADNGNA

SEQ ID NO: 287647 - protein, 125 aa, Zea mays
  Clone ID: MRT4577_25429C.1.pep
FAHVSKPAKVESDGSVENQGGAGPPPPSRKNQPPNCPIKDAPVPLAPQVFDPPWSLEHENPMPLAGPPLETQRYLGFKKKIEAPQVEVSMNPSQLPRKEKPVKPPSDGQASLLSYFPRNQGPPIK

SEQ ID NO: 287648 - protein, 208 aa, Zea mays
  Clone ID: MRT4577_2542C.1.pep
MEAAAIATTSRSLPLPFSSTQLQRRRRAAFLPIAASKRHEDDKETAKGSGSEPRREPTSLAPYGISISPLSKDAAMGLVVSAATGSGWTTGSGMEGPPTASKAGGAGRPEVSTLPWSLFTKSPRRRMRVAFTCNVCGQRTTRAINPHAYTDGTVFVQCCGCNVFHKLVDNLNLFHEMKCYVGPDFRYQGDAPFNYLDPNEDNDTTFPL

SEQ ID NO: 287649 - protein, 44 aa, Zea mays
  Clone ID: MRT4577_25430C.1.pep
GLIPMPMMMAQNMRAIGELYQYQYHLPSFRFNPCGVSTAIPPYY

SEQ ID NO: 287650 - protein, 86 aa, Zea mays
  Clone ID: MRT4577_25431C.1.pep
PSQYPFPCSHYVAPARLRNFAFESMIPSEFSVESLVRPWSPRFEPFFSESQWPTYPGPIYIFDPAPPWGKCGFRKRSPSPMVFRPF

SEQ ID NO: 287651 - protein, 50 aa, Zea mays
  Clone ID: MRT4577_25432C.1.pep
LSKLLWAVGLVHTLRGRWPLRGIYEFPPKKKGGRPPTRQLVAPVIMPGRS

SEQ ID NO: 287652 - protein, 165 aa, Zea mays
  Clone ID: MRT4577_25433C.1.pep
TPSSPSPSSSSSAGAAPGSSSSVFVPACPVPLLLRSRAQSAVRLAERLFHAHSSSAWSSSALPAGTPRATSQIPALPLTSPLLGDSSAERLLPSPGAGPCSSSLPVRACSGSSSRTIHGEQYMVFILLVTSIRRPAVSCSRPLDHRKHLVVHNTASNPRHPLSVV

SEQ ID NO: 287653 - protein, 72 aa, Zea mays
  Clone ID: MRT4577_25434C.1.pep
CDRFKELMDVCVSFVSSFESRDVIWGLIKPVLVVFHVGSVFTVSSFRSIWNGVAGILCWLCHQLVLEGYVEF

SEQ ID NO: 287654 - protein, 66 aa, Zea mays
  Clone ID: MRT4577_25435C.1.pep
LQHNSPLQKHAHRLIKYPITYLLFMPTTDEPTLSNKPTLLHILDYQDVLCNISLYHFIYASILQNF

SEQ ID NO: 287655 - protein, 75 aa, Zea mays
  unsure (1)..(75): unsure at all Xaa locations
  Clone ID: MRT4577_25436C.1.pep
RLDDGLARCVHILTVMADKVTSGPATPALQPILDVRCGSNCEPFYPLSNLIHHTTIPEHTSXSSLRLLAPSCPHG

SEQ ID NO: 287656 - protein, 66 aa, Zea mays
  Clone ID: MRT4577_25437C.1.pep
YGAGSAHAQIYPPLTDVFKPLIKEGNVYNVSYIQIKKANGMYKPVDNDIMIGFTKWILCCLDKPAV

SEQ ID NO: 287657 - protein, 113 aa, Zea mays
  Clone ID: MRT4577_25438C.1.pep
MMAEVLISNLMIGNCSDRLCVRVSRLLKFYDPEDEYKLFHAHMVLIDEEAGSAHAQIYPPLTDVFKPLIKESNVYNVSYIQIKKANRMYKPVDNDIMIGFTKWILCCLDKSVV

SEQ ID NO: 287658 - protein, 113 aa, Zea mays
  unsure (1)..(113): unsure at all Xaa locations
  Clone ID: MRT4577_25439C.1.pep
MMAEVLISNLMIGNCSDRLCVRVSRLXKFYDPEDEYKLFHAHMVLIDEEAGSAHAQIYPPLTDVFKPLIKEGNVYNVSYIQIKKANGMYKPVDNDIMIGFTKWILCCLDKPAV

SEQ ID NO: 287659 - protein, 94 aa, Zea mays
  Clone ID: MRT4577_2543C.1.pep
QNTHTACGCLSHRCPHLLGRGGRTGTRSCTSVGSRSAGCSTGSTCSIPACSTGTPRTRWSPKTWSSRTRATSRWTTSSDACSSSLMSERSTTGL

SEQ ID NO: 287660 - protein, 76 aa, Zea mays
  Clone ID: MRT4577_25440C.1.pep
KVAGGGHQTLTEILSFFFTFSKRPGIPSFCCSASRMIDSLPAPHATNARWWRRRPWLGRTSSRAHRRLSKDIATSC

SEQ ID NO: 287661 - protein, 252 aa, Zea mays
  Clone ID: MRT4577_25441C.1.pep
MSDSEEHHFESKADTRAYKTYTHWDPRGRPGRDGKTIEAATHAWKHLEAWHGSRRPPHQQRTASRCPRRRSTGERRRVKPMTPPMDPPDVEMEMEPAPQPPAPTAVGEGWSMLSRARGLLEEGKPSLALQAVLLAIRSQGGEQALMQTLNRARELYAQRLQASPSVDELASLLAQCAIAEAQSSNTNPPQGPGSDPVNMLNSDEACILAESGRKQIILDAFADGSSFICLKCGGLFSTSRKDEHLAYWCGTA

SEQ ID NO: 287662 - protein, 244 aa, Zea mays
  Clone ID: MRT4577_25442C.1.pep
AAAGFSFLRLRGLRALLRALRSTSDADADAGLFRDSQSIRDLQVIPVLFEHSLRKATGDAVLTVAQVLGMEPAAARLRNPATDSEVVLALRVLEGCCLLCPACAAAAHRYNAVKVVLNILMTRGILEQRACLDTLLALLVNCSGNLTDFKEQDGLNKIAVIVKDANRDDHVRLKCSEFLLLYSGNAKEKCGADSESNMREDLAKVFGEKCASFISSMNLFSSTLESQMRQSELSFLAEHVLDYM

SEQ ID NO: 287663 - protein, 164 aa, Zea mays
  Clone ID: MRT4577_25443C.1.pep
CCPSGSTRLVLLLGVYLGRRVGAAMANVLSQRTVSILLLRRARHQRAAWGALPAVRNRRSWGGGYSTCGACGFADRIVRRGRQEHVVLPPSCRRARRVRPSSASRPCRLSRQLTKLPAIRPHLGDSLLLPCKHRPFRVGPPAPHRRKSPNRQWTVVPSFLSRTP

SEQ ID NO: 287664 - protein, 124 aa, Zea mays
  unsure (1)..(124): unsure at all Xaa locations
  Clone ID: MRT4577_25444C.1.pep
ASERGTAAAAQAEGAGAGKAPNKGRGRXEXKRXENKXNRQXTGAKRRNGPHKKAXEXXGXXDAEGAPXXXXNRGKXNEXXSTQSXPKTXEKDQKXXXAGPETAXQNREXEQXKSSRKEDXKXKA

SEQ ID NO: 287665 - protein, 69 aa, Zea mays
  Clone ID: MRT4577_25445C.1.pep
LATWLHVGGGVGSRLVSLTGGIIKSFSFLYFSSIMCQSVCLTLIYINFYYSIIYTVFFVHINCSCSQPM

SEQ ID NO: 287666 - protein, 79 aa, Zea mays
  Clone ID: MRT4577_25446C.1.pep
VLDVRRKHEQNSLHLLVVVYKRIKAHREAVFSPACWARQDHLSYSLLRERAHPLRCDRKCRCDGERSIVFINECPLNPR

SEQ ID NO: 287667 - protein, 93 aa, Zea mays
  unsure (1)..(93): unsure at all Xaa locations
  Clone ID: MRT4577_25447C.1.pep
LGTSRPAGTIFNLGAYRSRIHPELKPSLKSAKKPNPTADPRLAQLSPPSHPSSSTPQIWIKQSWRACKRQCALGKQASCPLFLTAPXPXXNIL

SEQ ID NO: 287668 - protein, 74 aa, Zea mays
  Clone ID: MRT4577_25448C.1.pep
RRQRRRERRRAARRRRRRRSRTTSARRCARARRGRTWSCARSPARSPSSPTWCCTAGSSARASAPSRRASRRRP

SEQ ID NO: 287669 - protein, 50 aa, Zea mays
  Clone ID: MRT4577_25449C.1.pep
NRTRRGEGRLYSTPIRTPVTGITWSKRGCQRCTQSLPSNPPSRRPNTRTP

SEQ ID NO: 287670 - protein, 211 aa, Zea mays
  Clone ID: MRT4577_2544C.1.pep
MESVASAAIATTSRSLPLPFSSTPVHRRRRAAFLPVAASKRHDDDKEAAKGSGSEPRREPTSLAPYGLSISPLSKDAAMGLVVSAATGSGWTTGSGMESPPTASKAGGAGRPEVSTLPWSLFTKSPRRRMRVAFTCNVCGQRTTRAINPHAYTDGTVFVQCCGCNVFHKLVDNLNLFHEMKCYVGPDFRYEGDAPFNYLDRNEDGDSIFPR

SEQ ID NO: 287671 - protein, 52 aa, Zea mays
  Clone ID: MRT4577_25450C.1.pep
RADSIGAKYIHGKLEEWTKRYGGFFKPCSYLAERAAKGIPLSAPTKKVQARL

SEQ ID NO: 287672 - protein, 127 aa, Zea mays
  Clone ID: MRT4577_25451C.1.pep
CAALEPAGVNASSLSPILDLCTPSLGSRRAIQPAGAADASLCSPVAVSTSLAVYSNRSCPAVLPSQHPMDHVGLLCPLGSGNLRLQSNLAVLATTHGAHVQYAVGRAKAGAAVGVPCPGLSVIHYPV

SEQ ID NO: 287673 - protein, 70 aa, Zea mays
  Clone ID: MRT4577_25452C.1.pep
TDHEQDHHDEQKKHEQTFNEEAQKMIKSVKQALGNGEGCRVYGTLDVQRVAGNFHISVHGLNIFCAERIF

SEQ ID NO: 287674 - protein, 90 aa, Zea mays
  Clone ID: MRT4577_25453C.1.pep
MPSSTVVAAADQGHSSAANQGSTCSYGDDHQEGKLIGYDAAMVATAAGGDPYAAARNGYQFSQGSGSTVSIARANGYANNWSSPFNNGMG

SEQ ID NO: 287675 - protein, 37 aa, Zea mays
  Clone ID: MRT4577_25454C.1.pep
INHFFPVVLIHQKGFMGGNILQLAPQSMYYIESPLLL

SEQ ID NO: 287676 - protein, 140 aa, Zea mays
  unsure (1)..(140): unsure at all Xaa locations
  Clone ID: MRT4577_25455C.1.pep
VEVNQLQKTTTKIAQLSHDLRTEFLHKDSQLHRSHGTPPYVSIEETMHHEARRTPITFSHATIKRXRSPTMGSSQFTVITPLQHKLSHLLKPPGPGPLIPQVYILLPCHTHDIDKRTVLLQARGCVYGPGGTTDASGAAV

SEQ ID NO: 287677 - protein, 85 aa, Zea mays
  Clone ID: MRT4577_25456C.1.pep
FCFFLNGHAFLTQAKRATNIHHTRHQAGAARKLPIKVKTPAGTKVFGNQVHITAHTTNKHDRGETDRNASTTSPSRGCCTSYYPY

SEQ ID NO: 287678 - protein, 77 aa, Zea mays
  unsure (1)..(77): unsure at all Xaa locations
  Clone ID: MRT4577_25457C.1.pep
GETGPAPAGGLMAGQKMVAHRGDGGAFVNKIGISDLVFISISFXXEAVPDEGTVQQQDWISEAHSALSRGRNLNGAS

SEQ ID NO: 287679 - protein, 81 aa, Zea mays
  Clone ID: MRT4577_25458C.1.pep
GAGSTTEARHHLSSSGRKLTKLFSPPSDTNTPIIDGNGRPDSVQTERVHNDLQGHKLVHPTIHGASCSLLTNSPRYQCYYG

SEQ ID NO: 287680 - protein, 99 aa, Zea mays
  unsure (1)..(99): unsure at all Xaa locations
  Clone ID: MRT4577_25459C.1.pep
XLHAGVFSAAEQRRIVQCVYDLQARGQRGELGERTYTEPXKWMRGKGRVTIQFGCCYNYATDRKGNPPGIIRTIVSDPMPXLFXTLXLCLVXWLVLPAP

SEQ ID NO: 287681 - protein, 65 aa, Zea mays
  Clone ID: MRT4577_2545C.1.pep
PYHARMTRRRSRSPSSGEPSSRTSNTVRSPTPAKRHHQEDLDYRLYSQMDDFHQRRRQRKQELGA

SEQ ID NO: 287682 - protein, 36 aa, Zea mays
  Clone ID: MRT4577_25460C.1.pep
VIYTVAPSHSGPSIYCIVVPEAFELASFSADHLFII

SEQ ID NO: 287683 - protein, 91 aa, Zea mays
  unsure (1)..(91): unsure at all Xaa locations
  Clone ID: MRT4577_25461C.1.pep
QLLVHNQWVLHDWGDGDCXKILKNCKKAIPPMIAEGKMIILDMVVGGQLPNIKYKDIHVLFDLFIMYVXSVNGAERDEQQWKNIIFEAGFN

SEQ ID NO: 287684 - protein, 112 aa, Zea mays
  Clone ID: MRT4577_25462C.1.pep
QLNWALGSKQYCLWWAWFLKNKTRGFPNFPPGFPFLFKNHSPTQNTVQGELGHSSFTFLKGPVGPPVMFNGGFVLFPAPCKRGTFFDPMMGYLFLGPCPFVSSGFAIQRIFK

SEQ ID NO: 287685 - protein, 78 aa, Zea mays
  Clone ID: MRT4577_25463C.1.pep
ISFLSSSQRSISQQWRSRPLIRVGMRWRASTILIVAVVWPDQAQLETTEVCYDSAPVVAIGIRLKILSFEQPEGRTSA

SEQ ID NO: 287686 - protein, 138 aa, Zea mays
  Clone ID: MRT4577_25464C.1.pep
RSEVPESLPGGVPGDFGFAPFGLGKKPEVFAQFPAFELIPPQWALLGAPGAVIPRACPKFGPNCGPEAVWFKTGGLFLGGTPLNFLGNGIPLNLVVAVFPQRPPTLLGRAPPPPAMPSHGLLHPVFFFPGIKTCLLGF

SEQ ID NO: 287687 - protein, 78 aa, Zea mays
  Clone ID: MRT4577_25465C.1.pep
LSLYRPMDDDSMHAISCWICQAPRGADITAPVHVKPPTHEEIAERMKTPDLLTDSGHLPPEDHDPATIDTARGSMNYG

SEQ ID NO: 287688 - protein, 127 aa, Zea mays
  unsure (1)..(127): unsure at all Xaa locations
  Clone ID: MRT4577_25466C.1.pep
MTERISVHIGQVGIQDGNACWELYCLEHRIHADGQVPGDKTAGHHHDAFRTFVSQTDAGIHVPPAIFVDVQPTVIDEARTGTYRQLLDPEHLIIGTEDAADNFDRGHYTXLGRRLVDLCPDRMPQAW

SEQ ID NO: 287689 - protein, 473 aa, Zea mays
  unsure (1)..(473): unsure at all Xaa locations
  Clone ID: MRT4577_25467C.1.pep
GNPSLQPCGLSTLSSPLVNARALSEADNNPPADNTAPDDNGNGGGFSKIEIASITSASAIVAVLLALVILYIYTRKCASRPSRRSLRREVTVFVDIGAPLTYEAVLRASGSFNASNCIGSGGFGATYKAEVAPGKLVAIKRLAIGRFQGIQQFQAEVKTLGRCRHSNLVTLIGYHLSDSEMFLIYNFLPGGNLERFIQERTKRPIDWRMLHKIALDVARALAYLHDNCVPRILHRDVKPSNILLDNDYTAYLSDFGLARLLGNSETHATTGVAGTFGYVAPEYAMTCRVSDKADVYSYGVVLLELISDKKALDPSFSPYGNGFNIVAWACMLLQKGRAREFFIEGLWDVAPHDDLVEILHLGIKCTVDSLSSRPTMKQVXGDLRNSDHRLTRNSKQRLACFCIMRPRLLAVWVTATASNVPNKLVATGKQFKCHFSRDPQAGHSWYLIXLVVMXHCMEXDIASMPLQASIKDA

SEQ ID NO: 287690 - protein, 147 aa, Zea mays
  unsure (1)..(147): unsure at all Xaa locations
  Clone ID: MRT4577_25468C.1.pep
MKDCSNGCSAPFAGERGSEEVAETFRAKDLIVTPATVLKEKPDPDSLVFGATVTDHMLTVECSSASGWEKPDIKPFGNLPIHAAASVLRYAEEAAEGLTAFRGVANKIRLXRPDLSMDRMCRSAVRSTLPMFDKDELLKRILQLLXI

SEQ ID NO: 287691 - protein, 269 aa, Zea mays
  unsure (1)..(269): unsure at all Xaa locations
  Clone ID: MRT4577_25469C.1.pep
FIWLSWWGGGGADSNHWCGRQKALDPSFSPYGNGFNIVAWACMLLQKGRAREFFIEGLWDVAPHDDLVEILHLGIKCTVDSLSSRPTMKQVXGDLRNSDHRLTRNSKQRLVCFCIXTKTATASNVPNKLVATGKQFKCHFSRDPQAGHSWYLILXVVMATVWNADIASMPLQASIKDXEEVLLCLPXDDWIRHYRPSXGCIIYLAVQLLRRNLRRCSPDRRSTTLTHWNIAIYLAASIYLIKAKPYIWQFWGDPSVEKAWPLTCARTKQ

SEQ ID NO: 287692 - protein, 114 aa, Zea mays
  Clone ID: MRT4577_2546C.1.pep
SWLARSSEARANLLRVRSRGGRLVAEDDGAEAVRTVGLPALVREIQRIDTIRLYAEATLQLESLVGNLEDAAFFIVRQAPMSKLSSITRKSNETEWKQGKLLHAVDPGKDIGRE

SEQ ID NO: 287693 - protein, 280 aa, Zea mays
  unsure (1)..(280): unsure at all Xaa locations
  Clone ID: MRT4577_25470C.1.pep
RRGGRRSSSRRLHLLCWRRALASCRPRLLLCAPHSSSQAAPWRPSYFLVASLSLSRSSFSLPRAARSILPARIFLAPSSPASHGVRPQVRRGAPLQRPARPSGSLLASPAIGSSPRTAPCPSSLPSDFHVRVQLRLVPHGGRGASLPAGAFLSANYTHPCQSPFLGSIPSCSVSGCFFFVPWRPDFCSPQLAVVASSSSDFALSRSSAPAARPCCACHILXSARTKILCSQRRVKFPRRAPALNQASCCRIPVSVCRAAPSSLCRKLASHNYLDCVSTRL

SEQ ID NO: 287694 - protein, 78 aa, Zea mays
  Clone ID: MRT4577_25471C.1.pep
SHHPPRPIIRATNPPTQRLTKQVNAFTFKKSNFILHHRSHERLITLPNLPTYHSETKASSLHLKHSFYPTHVSRPSPL

SEQ ID NO: 287695 - protein, 60 aa, Zea mays
  Clone ID: MRT4577_25472C.1.pep
LRASIGTQLEEPRSYIEARGQPLKPISLSRTQAPEVFLHLQTSFNLKTRNMGFYQRPSTF

SEQ ID NO: 287696 - protein, 43 aa, Zea mays
  Clone ID: MRT4577_25473C.1.pep
YGTVTGMLPLSALFLQQPCALLQQLPFVHLVAQYIWGQQIPQL

SEQ ID NO: 287697 - protein, 81 aa, Zea mays
  Clone ID: MRT4577_25474C.1.pep
MISLAMILKKLAYEHNLAVLVTNHMGSAGNGAVKPALGESWKSVPHVRLMISREHSSKICPGTVLKHTLLASGRTAKFVLP

SEQ ID NO: 287698 - protein, 161 aa, Zea mays
  unsure (1)..(161): unsure at all Xaa locations
  Clone ID: MRT4577_25475C.1.pep
PCRQPRVKATIYVAEVLLPWVYHSSFADDDGITKACSCPLLPLKTHIKGPAPASDPDKADIVDEAITFFRANVFFKNFHVKSSADKXLEKVPVPGEPGFPFPGLFTLPQSQEEAELLRNYLKQIREETSGRLLNCAYRANGFPNKWWLAFAKRKFMNIVIL

SEQ ID NO: 287699 - protein, 207 aa, Zea mays
  unsure (1)..(207): unsure at all Xaa locations
  Clone ID: MRT4577_25476C.1.pep
MASPPPDLLIDDATAEILLRLPPDDPACLVRASLVCKAWRELLSSPIFLRRYRRFHGAPPLLGFLYNIYDERPCARFVVAADAATTFPFSAPAFDQFDLWFIECRHGRALLQTFERHAPARLVVWDLITGDQQHIPMPVPGYPYFCRTAAVLCAADGCDHLDCHXGPYLVVVIGAYEEDTLRWASVYSSETGVWTTSSSIQIDAYVE

SEQ ID NO: 287700 - protein, 203 aa, Zea mays
  Clone ID: MRT4577_25477C.1.pep
MAARHADVDACDHRSSIVHLHPLRWPIFSPVYHSSFADDDGITKACSCPLLPLKTHIKGPAPASDPDKADIVDEAITFFRANVFFKNFHVKSSADKLLIYLTFYINIALKRLEGCRTLAVGTKAIINLGLEKVPVPGEPGFPFPGLFTLPQSQEEAELLRNYLKQIREETSGRLLNCAYRANGFPNKWWLAFAKRKFMNIVIL

SEQ ID NO: 287701 - protein, 174 aa, Zea mays
  Clone ID: MRT4577_25478C.1.pep
MVYHSSFADDDGITKACSCPLLPLKTHIKGPAPASDPDKADIVDEAITFFRANVFFKNFHVKSSADKLLIYLTFYINIALKRLDGCRTLAVGTKAIINLGLEKVPVPGEPGFPFPGLFTLPQSQEEAELLRNYLKQIREETSGRLLNCAYRANGFPNKWWLAFAKRKFMNIVIL

SEQ ID NO: 287702 - protein, 105 aa, Zea mays
  Clone ID: MRT4577_25479C.1.pep
GPELPGRRTRPPTRPNNSAVVEYCRTSMAALSGSTAGLLGLTGFFGFGFYVFAVVGLWGLLMLKAGSQWKKYFVNRRVILTNGFFGGLFTYILFWTFIYGMVHVY

SEQ ID NO: 287703 - protein, 117 aa, Zea mays
  unsure (1)..(117): unsure at all Xaa locations
  Clone ID: MRT4577_2547C.1.pep
THIKHNTVPILAAKIARLLVLLGLPACAATATILPKSSQGSIDYLFPATVSPVEYPAFQNSMVQAYMHQRVLTACVLTLXQPYALQSQALLQHLPLQRILAQQLQXQQLPTLELADL

SEQ ID NO: 287704 - protein, 74 aa, Zea mays
  Clone ID: MRT4577_25480C.1.pep
MAKLEELVRSVQMEGLLWGASKLVPVGYGIKKLQIFLPIVGALVFVKTFIGDNLCVGPVYGEGQGWEKVPFNKI

SEQ ID NO: 287705 - protein, 195 aa, Zea mays
  unsure (1)..(195): unsure at all Xaa locations
  Clone ID: MRT4577_25481C.1.pep
LIFVSFLTPTPPHRLLHAHARGGGGGVGRGPWCCFSLNPYATPSSPYGFRRRGNPRLVPNRIPSPLAPTPLPAATCRRRRRRGMRAFDPDIRRAAAGPRARAGAXRARRCPPAARANVEHGGDGASGNGEPSSSSGDGDRDAAADSGGDTTGTSTTSAAQTPPPPSSKRGENKWRRRLTKGGGVGRWLWEPIVQG

SEQ ID NO: 287706 - protein, 98 aa, Zea mays
  unsure (1)..(98): unsure at all Xaa locations
  Clone ID: MRT4577_25482C.1.pep
VGPRFSMPHSVKVDKVGGANSLFGIVFSAVFWALFVVWRTPLVAPVGVFFPIPIPMVVGLSIGGRHFSAGKFFGSVRVFXGFVVGTPADSFSCFLGLS

SEQ ID NO: 287707 - protein, 56 aa, Zea mays
  Clone ID: MRT4577_25483C.1.pep
RPRVRSRLSITLCSWSMYLVRGCDYCTQNDCYSDCGFLPPLLPDQVQRLKHLISLT

SEQ ID NO: 287708 - protein, 68 aa, Zea mays
  Clone ID: MRT4577_25484C.1.pep
SHYKTYICCNLQFKRKSNNLHSKTQPLNIIELNPITSSLQISNYLTSFYYIHKDTCPIVAHKTKHGRT

SEQ ID NO: 287709 - protein, 63 aa, Zea mays
  unsure (1)..(63): unsure at all Xaa locations
  Clone ID: MRT4577_25485C.1.pep
RGKCLAGLWGQWAMGFITYTYKQHSHLMVTPGKELTNERDGAXILSLGKGESPDRSSTWPRIL

SEQ ID NO: 287710 - protein, 69 aa, Zea mays
  unsure (1)..(69): unsure at all Xaa locations
  Clone ID: MRT4577_25486C.1.pep
SVCHIRLMALCMVSKLKGNLSSISXMSRGVRCQFATMFRSKLFLHWYTVEGMYEMEFTESDRFMNVLVF

SEQ ID NO: 287711 - protein, 69 aa, Zea mays
  Clone ID: MRT4577_25487C.1.pep
GLRSTGLKPLQRGAGVKWALREQILACPHLELQQLSYNMAITIKRHGSSSSYIKRLGYFPATRPETERV

SEQ ID NO: 287712 - protein, 50 aa, Zea mays
  Clone ID: MRT4577_25488C.1.pep
SSQLKTSPLYHSSNSYNTIVYYTLVSCHMAPNSKVSLFLVAVYSIPYFAS

SEQ ID NO: 287713 - protein, 79 aa, Zea mays
  unsure (1)..(79): unsure at all Xaa locations
  Clone ID: MRT4577_25489C.1.pep
WHXTFGLFVNILTRAKAELGFLENLSFLKSSGFAIFGTEAFLVGLTALVVVLFGACVVVYPITPVRLTDSPGFDPFPGN

SEQ ID NO: 287714 - protein, 96 aa, Zea mays
  Clone ID: MRT4577_2548C.1.pep
PKAAGVPNPGLRSGSPNSTNTNTIDPPWMPSDGSFRSAGIHQCHPDGPYRELPNPPAPERPNIESPNATPERPNPDMPDPPPPERPKPPPPPRSSR

SEQ ID NO: 287715 - protein, 141 aa, Zea mays
  Clone ID: MRT4577_25490C.1.pep
AAHPSLPSADSTDDDGWDDFDDDSPAGDPLLYPCSWVPLRDPASPPLSGDDTDSSADALFIVGARAMLFAAFDGDDSAIATADAQIDDAGQAGHPGAQAVLAFLTGAGMTRPAIRSLTFLLHKFAVDAGDLQSKMAPPYYY

SEQ ID NO: 287716 - protein, 153 aa, Zea mays
  Clone ID: MRT4577_25491C.1.pep
PPGFPRSARFFSPPLSLLSPALLGGLGPLDAWPTGPPVYGYFPNFPFSRGYPPKFPGVFLFFHPRFGPRWRGLKGFGLVFPSNPPFFLPWVQLCPPPPFSASFLASFTPVPNHGLAGGRICCSPLLKKKKKKKKKGKKKKKKKKKSTLRCYHC

SEQ ID NO: 287717 - protein, 71 aa, Zea mays
  unsure (1)..(71): unsure at all Xaa locations
  Clone ID: MRT4577_25492C.1.pep
PPPPPNNKEEPAPPPPAKVEPPPKENPPPPAPKEEPKPAPAPAPPHNVVEVPXPWPYTCPYPYPAWPSADC

SEQ ID NO: 287718 - protein, 120 aa, Zea mays
  unsure (1)..(120): unsure at all Xaa locations
  Clone ID: MRT4577_25493C.1.pep
PVCCPCTYSLHIFVAQIVPALTQLVVAYPAAYLQQLLPFNLLTXSNSAAFLPQRLQFLNPLAVAHPLVAAFLPQHQLLPYNLFSLLNPVLSRPLPFVGGALFSLPYEMSVLVPSFRLVFP

SEQ ID NO: 287719 - protein, 64 aa, Zea mays
  Clone ID: MRT4577_25494C.1.pep
GRPEKRKTPWGYLPRKPTGEPNSGAGGGPPKNPGGPPGPGFHPGEPPPPLAGGKSMAGPAGGLN

SEQ ID NO: 287720 - protein, 127 aa, Zea mays
  unsure (1)..(127): unsure at all Xaa locations
  Clone ID: MRT4577_25495C.1.pep
MVSGLGVCAKRIVVDARHHMLGRFSWIIGKELLNGQKEVVVRCEEICMWGGLVREKMKYLRXLRKRMNTKPYHGXIHLRAPAKSPGRTIRGMIPHKTNRGEAVLARLNTYEGVPASYDKTKRMGIPD

SEQ ID NO: 287721 - protein, 79 aa, Zea mays
  Clone ID: MRT4577_25496C.1.pep
AHWGDTTLKFTMAPPLFSNSLLPHIGSLQKRKNKPIPYGKMLKYKLLPVLEKATSPPLIKGLEKILEKLPGMHNVLQKL

SEQ ID NO: 287722 - protein, 73 aa, Zea mays
  Clone ID: MRT4577_25497C.1.pep
FLFTAIIQFFYYVTINNKTGQPFSSKKVTQPWLSRFNIFPAQAFFVNKNNGEGGGSERHYQTRYILKGQRHPL

SEQ ID NO: 287723 - protein, 45 aa, Zea mays
  unsure (1)..(45): unsure at all Xaa locations
  Clone ID: MRT4577_25498C.1.pep
WFFFFFFFFFFFFFFFFFFFFFFFFFFFWETXKIFFFSGGGFKTP

SEQ ID NO: 287724 - protein, 109 aa, Zea mays
  Clone ID: MRT4577_25499C.1.pep
PRPDIPTTRLTAGGTAPTTFADLGLSHWLANACKALGMRCPTVVQERCISRALCCADVLRISETASGKTDAFALTILHRLGEDRYGMVELALSPTHELAAQICEHILAL

SEQ ID NO: 287725 - protein, 77 aa, Zea mays
  Clone ID: MRT4577_2549C.1.pep
IPSVLYSTVPSFERTVISGQAVHCGCANLMLSSAWDVAYGILAALDTMAVQPVHASIYTRLVYDWCVGSWLCHTSLC

SEQ ID NO: 287726 - protein, 101 aa, Zea mays
  unsure (1)..(101): unsure at all Xaa locations
  Clone ID: MRT4577_254C.1.pep
FKCGINYQPPSVVPGGDLAKVQRAVCMISNSPSVVEVFSRIAPKFALMFAKRAFVPWYVGEGMEEGEFFXAREDLAALEKDYKEVGPEFYKGEDGAEGAEY

SEQ ID NO: 287727 - protein, 143 aa, Zea mays
  Clone ID: MRT4577_25501C.1.pep
RLPGAWSRCPRPGGRAQWVSRLSRRVGPFFFPAGPRGLPVCLRPVGAPLFRLVGSLFGPPRFFPFGPPFGSSGFWFVLPVSPGCGLGPGLRLPWARGCVPCFRPPGCWLWPSRGGGQGDGNSPKKKKKKIKKKKKKKKKKKLV

SEQ ID NO: 287728 - protein, 131 aa, Zea mays
  Clone ID: MRT4577_25502C.1.pep
PMASSAVDLRSCPGIVAQRAPPWICAAPIHAVDLRSRGHDSSLASCIPPHRTRRARQNVAACCTLNCAVPIALSSPRNKIPGNLVEKKVQFNTPYVFDDMLKPLVVVVLAKKNQVGSGCGTLVDHVMRKSS

SEQ ID NO: 287729 - protein, 61 aa, Zea mays
  Clone ID: MRT4577_25503C.1.pep
GRPTRPLRLLPSSSYPLTYNGHRHFLSSNSLDRTPPMPGPCLILRIPVHPYPYLLPAPRRA

SEQ ID NO: 287730 - protein, 154 aa, Zea mays
  unsure (1)..(154): unsure at all Xaa locations
  Clone ID: MRT4577_25504C.1.pep
MEEEHEVCKKKDGLFGKLHRTMSISSSSSDEEEEAIDENGEIIKRKKKKVGLKEKIKEKLPGHKDGHHTVAPSPAXPGPVETHAHHQEDGHNRPNVGPGPGXWPQPYVKMHXPARARHXVSRQKVEADVKTGTPLHAPDEEKXGLLDKIKESSP

SEQ ID NO: 287731 - protein, 76 aa, Zea mays
  unsure (1)..(76): unsure at all Xaa locations
  Clone ID: MRT4577_25505C.1.pep
HISFVLLVDWWLXYGGRTIELYKXARRIVSXCASSSGCERNWSTFEFVSELVKLFNFYSPLLFYPQFFIGYFYLHL

SEQ ID NO: 287732 - protein, 44 aa, Zea mays
  Clone ID: MRT4577_25506C.1.pep
AAPFFPLPLDPVPVKPTVVSRLRFAVVGPHERPRVPVCVFERVS

SEQ ID NO: 287733 - protein, 258 aa, Zea mays
  Clone ID: MRT4577_25507C.1.pep
VAACGCGREAARARLPWRWRRRCPARVRGGPCWSRAGRATSVATPCCSSSSRASAPSSSTTSTALTVLGNDYATRDGTGVRDYIHVVDLADGHIAALQKLFENSSIGCEAYNLGTGRGTSVLEIVKAFEKASGKKIPLIFGERRPGDAEILFSETTKAERELNWKAKYGIEEMCRDQWNWASKNPYGYGSPDSIKQNGHQTNGSADSSKQNGHRTNGSTDSPKRNGHHAYGSADSPKRNGHCVFGSSDLKPNGNGHLR

SEQ ID NO: 287734 - protein, 64 aa, Zea mays
  Clone ID: MRT4577_25508C.1.pep
RPHYQGIASFQKMLPLQIPWTLTSTNLSSSIFFSTNNTPQNYTKKFIQLSHFRKSYFSVTHHIN

SEQ ID NO: 287735 - protein, 188 aa, Zea mays
  Clone ID: MRT4577_25509C.1.pep
KLVFSSSAAVYGSPKNSPCTENFPLTPNNPYGKTKLVVEDICRDIYRSDPEWKIILLRYFNPVGAHPSGYLGEDPRGIPNNLMPYVQQVAVGRRPALTVLGNDYATRDGTGKLFENSSIGCEAYNLGTGRGTSVLEIVKAFEKASGKKIPLIFGERRPGDAEILFSETTKAERELNWKAEWPPHKRFN

SEQ ID NO: 287736 - protein, 60 aa, Zea mays
  Clone ID: MRT4577_2550C.1.pep
RVSVRPGPLIGRNKPDQSTPPILDHNSSSHSHCKAKQPNVDCLTTRLGLIHSRKKHPLAT

SEQ ID NO: 287737 - protein, 316 aa, Zea mays
  unsure (1)..(316): unsure at all Xaa locations
  Clone ID: MRT4577_25510C.1.pep
LVFSSSAAVYGSPKNSPCTENXPLTPNNPYGKTKXLPLFQCENLLKIVSSLSXEKFQMVXLVVEDICRDIYRSDPEWKIILLRYFNPVGAHPSGYLGXEDPRGIPNDLMPYVQQVAVGRRPALTVLGNDYATRDGTGVRDYIHVVDLADGHIAALQKLFENSSIGCEAYNLGTGRGTSVLEIVKAFEKASGKKIPLIFGERRPGDAEILFSETTKAERELNWKAKYGIEEMCRDQWNWASKNPYGYGSPDSIKQNGHQTNGSADSSKQNGHRTNGSTDSPKRNGPHAYGSADSPKRNGHWVFGSSDPKPNGNGPLR

SEQ ID NO: 287738 - protein, 91 aa, Zea mays
  unsure (1)..(91): unsure at all Xaa locations
  Clone ID: MRT4577_25511C.1.pep
RVLKRPRTETXRGEVLEANSRFFSRKSTGGYTCIGHPWNRPCCNLRTDLYQLFNGSRTIRQYPVQSATRHVPGGDPNSGAARTADACSPLR

SEQ ID NO: 287739 - protein, 423 aa, Zea mays
  Clone ID: MRT4577_25512C.1.pep
MAVEKTLPGASAGRTVLVTGGAGYIGSHAVLQLLLAGFRAVVIDNLNNSSELAVRRVAALAGDHSRNLSFHKIDLRDKGALEMVFASTRFEAVIHFAGLKAVGESVQKPLLYYDNNVIGTINLLEVMSVHGCKKLVFSSSAAVYGSPKNSPCTENFPLTPNNPYGKTKLVVEDICRDIYRSDPEWKIILLRYFNPVGAHPSGYLGEDPRGIPNNLMPYVQQVAVGRRPALTVLGNDYATRDGTGVRDYIHVVDLADGHIAALQKLFENSSIGCEAYNLGTGRGTSVLEIVKAFEKASGKKIPLIFGERRPGDAEILFSETTKAERELNWKAKYGIEEMCRDQWNWASKNPYGYGSPDSIKQNGHQTNGSADSSKQNGHRTNGSTDSPKRNGHHAYGSADSPKRNGHCVFGSSDLKPNGNGHLR

SEQ ID NO: 287740 - protein, 66 aa, Zea mays
  Clone ID: MRT4577_25513C.1.pep
LFFFFFFFFLGFFLFFGAHGSSLIHKRGDLKREFTQRAILGLQHTRPHPKHIGTRSLNGFLGPCSS

SEQ ID NO: 287741 - protein, 116 aa, Zea mays
  unsure (1)..(116): unsure at all Xaa locations
  Clone ID: MRT4577_25514C.1.pep
LSPLSLSXFSLLGALHTSLTGRCACLGSHDESNPLINCRKKVSKNTQTLAPDFNATCSSSDLVNLVILSHVSKCVFQLFIIFWLASLAKNEEKYMYVCVCVCFSCRRGSDHDEFGG

SEQ ID NO: 287742 - protein, 83 aa, Zea mays
  Clone ID: MRT4577_25515C.1.pep
PCTALFGNTGKGRHARWLTHIQYTRPLLFLKTHRSDRGTTLRDDSTCCRAGPGSIYMAGRGARAERHTYQSFVRPYPPVHYYN

SEQ ID NO: 287743 - protein, 158 aa, Zea mays
  Clone ID: MRT4577_25516C.1.pep
CDSPLVPDNLYPDPSRLLWPVPPQSPRRPPACLSRPLPSHLHVRRSAGVRLLDALCQAPGGLHRALATASSTPRRPRSWPVLAVLKSIYTLSNNTYVQRSSRASSASRCTRGSGTGSTRSGWSSRSPSSSLRSLFVWGADSGVMGALAASCSSVSPPQ

SEQ ID NO: 287744 - protein, 137 aa, Zea mays
  unsure (1)..(137): unsure at all Xaa locations
  Clone ID: MRT4577_25517C.1.pep
RFWKNSRASRGDRXSCRLVTXATEERLGGRCGGLHRVGRSDFWDFFFWWPLVVGGEASXPLYLXSVPAGGVVTIREPCPVVXXGPRCXXRGGWGRVRXTRAGTLLGGGRGGGGVVWGVCVFVFGCVXXVGCVCCVGV

SEQ ID NO: 287745 - protein, 81 aa, Zea mays
  Clone ID: MRT4577_25518C.1.pep
IHHHPFEFRHKKQKLRRILFWDGGNITYERRIAIVLPCSMSTKLTLHILQKVNISQLYQNSVLIHQKDMYSSFYCWNRSLE

SEQ ID NO: 287746 - protein, 74 aa, Zea mays
  Clone ID: MRT4577_25519C.1.pep
LSFFGLFLPYLSSFFFFFFFGCFPAPQPGKPAVPITLMTRVASGVRRCALFRSLALSLHWLGALGGPVCASSLS

SEQ ID NO: 287747 - protein, 79 aa, Zea mays
  Clone ID: MRT4577_2551C.1.pep
RWRRRFLVPVAAAGLATRIGLLRWFQQWLLISRDGTRLWDPLRRRGAEGALPLVGYTAVPAAPLYARSNQPVIVPRRRR

SEQ ID NO: 287748 - protein, 92 aa, Zea mays
  Clone ID: MRT4577_25520C.1.pep
VVQPALGNFQAQQTEHTPHIRRGGSAQQREPFSRAEHSAKLPGMGAAHPWDKRWHRIINTPSLQVEKDEFRCPHGAHLNWAAVALGAPPPPQ

SEQ ID NO: 287749 - protein, 104 aa, Zea mays
  Clone ID: MRT4577_25521C.1.pep
KPTKKRPDNGYQPRRPPGGKRWEKHTDPSKTKPTLDGLGRGGEKGPGGSHDPGLLPADEPPGGAHGAPLGLAGGGQDPGRPLPLGHPNPGGAPQVGPKRDPGET

SEQ ID NO: 287750 - protein, 60 aa, Zea mays
  Clone ID: MRT4577_25522C.1.pep
LILIEVFHSGERSFHWKSYECLSWFLKTGFHMPSALGFGCRKKSLSLRQEEPYPGFALAA

SEQ ID NO: 287751 - protein, 58 aa, Zea mays
  unsure (1)..(58): unsure at all Xaa locations
  Clone ID: MRT4577_25523C.1.pep
LPEVXSRLRTSRRRRLYQYGGDDDDDESSEVDDMLLALHVLVDDQFVCCLSVSIHPIP

SEQ ID NO: 287752 - protein, 130 aa, Zea mays
  Clone ID: MRT4577_25524C.1.pep
RPDEQLHRRVVSALHCSAVGGHSGFPVTYSRVKHLFAWTKLKSFVQRFVQQCQICLQAKLGRSSYPGKLQPLEVPKSAWHTVSLDFVEGLPRLGTANCILVVVDKFTKFAHFIPMSHPYTVATVATLFLS

SEQ ID NO: 287753 - protein, 74 aa, Zea mays
  Clone ID: MRT4577_25525C.1.pep
NHDRPLANQRCQGFLPHVTRPRMVALEQGRWRHGRCCPHCALGPQAQIRMPAHGTGGSAAAPPGSATNSRRVPP

SEQ ID NO: 287754 - protein, 68 aa, Zea mays
  Clone ID: MRT4577_25526C.1.pep
ARETPPSLLSFAGVVTRLSMLKPEGLLGADRLRLPPNLANLAPESSNSSSWGSSTAAAAVPRGQSPSS

SEQ ID NO: 287755 - protein, 38 aa, Zea mays
  Clone ID: MRT4577_25527C.1.pep
LGKVQSEVTIVLAGVLGNINLVFLGNKVGEKVSTGGIK

SEQ ID NO: 287756 - protein, 95 aa, Zea mays
  Clone ID: MRT4577_25528C.1.pep
TPPWVPPLTRSPARAPPTSWPWSASQPLQQPTRVPLHPPPPWICSPPTTPPPPLWLRTVFSLPRPLGAPRASSPPLAPVSPSAMGPPTGRVGESV

SEQ ID NO: 287757 - protein, 72 aa, Zea mays
  Clone ID: MRT4577_25529C.1.pep
YEGKRRSKIQGIVYAMYIIWVNQHKTERSHERWWPKRIVVGSCPIMGGEGFHYIIYTHRANLEGVWFKRNNI

SEQ ID NO: 287758 - protein, 120 aa, Zea mays
  unsure (1)..(120): unsure at all Xaa locations
  Clone ID: MRT4577_2552C.1.pep
FGPGVLCXGRSLGCLAGWXXXXRGSPSVXGSXXXAXCCXRAGCRVWXXMWAWWWXXXLWGACGRLWVAAPSXLGCCXXXVXGPXVLXGGXVGFXXRPACFGAGXASQVPXWGLXXXXEEX

SEQ ID NO: 287759 - protein, 69 aa, Zea mays
  Clone ID: MRT4577_25530C.1.pep
RAKPFCSYLGLGGKHFKSWGAREGDTPFGFFSFFGGTNTQTSNKFSIRSCFQGGKVFYLSLGMAHMEKH

SEQ ID NO: 287760 - protein, 117 aa, Zea mays
  unsure (1)..(117): unsure at all Xaa locations
  Clone ID: MRT4577_25531C.1.pep
XXTTVYRAFVRKPFSPRRVHRRHSASQAKFXKDPRAHPRLRRRRQGPRPRRLQARRLLRIRHQQRQRVAVAHGAWPPQGRAVGHRTVHLQTILKSSCLCRLQLDGSRDMSHCICTTL

SEQ ID NO: 287761 - protein, 77 aa, Zea mays
  Clone ID: MRT4577_25532C.1.pep
PTRPPTRPPTRQPTRPPTRPRTRGLMYPAWHHPSTITYVVQRLSIRWVRNIYVNASSGYHTCVMCNRYIYKTAEAPT

SEQ ID NO: 287762 - protein, 47 aa, Zea mays
  Clone ID: MRT4577_25533C.1.pep
KRVVSISRLKLKHENFVMVSAHKCFKSSNLLSLLFYRILGYWTIFWV

SEQ ID NO: 287763 - protein, 349 aa, Zea mays
  Clone ID: MRT4577_25534C.1.pep
MARPRKPPPPPPPRAAAPSIAEALLMATICMVGLPVEVRVRDGSTYSGVLHTACVDAGYGVVLKKAKKIANGKGDANLSLGSFVDTLVVHPDDLVQVIAKGLSLPLKGVCKPLDSNVVAASGSLKPQISHANDPKMSNKTENMSPLMQAEKCTSVGQEKNTSVKRNGQDNGITTSLSSSTGHVGACLSNNWDSRSGSMVPKVDVITSSASAVPVVASGVKPSQPVNNSVAKIVMSSKTAAKEFKLNPSAKVFSPSFASSRQVLAAAAPVDTYYISHSAPEVPMGVPVYEPKSVSGVSPLSNKVYCSNLSPANYAISPQYVPSVSASIYSYVFLIASFISHSLDNTILSS

SEQ ID NO: 287764 - protein, 259 aa, Zea mays
  Clone ID: MRT4577_25535C.1.pep
MARPRKAKPPPPPPRAAAPSIAEALLMATICMVGLPVEVRVRDGSTYSGVLHTACVDAGYGVVLKKAKKIANGKGDANLSLGSFVDTLVVHPDDLVQVIAKGLSLPVKGVCKPLDSNVVASNGSLKRQNSHANDPKMSKPENISPLMQTEKCTSVGQGKNTSVKKNGQNSGSATSLSSSTGLMGPCFSMNGVSGSATMVPKVDAATSSAIAAPLVASDVKPSQPVSNSATKMIMSSKSTAKEFKLIPLCKGFLSIFCKF

SEQ ID NO: 287765 - protein, 227 aa, Zea mays
  Clone ID: MRT4577_25536C.1.pep
PGAHRTPRRPDTSVRAGLYLHTTPHHHPASPTMTAAAAPAVASRVWEWEGKVASAVAEATADEAWALLSDFLAFHRWHPRVAACRLASGTPRAPGCVRYCEGTATAAGGEPAPDWAHETLLEHDAERRFFRYEMNDNNMGFGLFFATFRVVPAAAAGPCPRWEFECEPVRGTPRDALVARLQAGLDGMAARVRDHVLAARAAAPAVVPAGAAGELVVVKLDSSIAAV

SEQ ID NO: 287766 - protein, 56 aa, Zea mays
  Clone ID: MRT4577_25537C.1.pep
FQKFRSFPILNNGVLVYIFLNQLITQVMSMSKILRVTVNYNVLFKSPSDHRRYYMK

SEQ ID NO: 287767 - protein, 164 aa, Zea mays
  Clone ID: MRT4577_25538C.1.pep
MPSSSLAFLMALLLLSCSTTMSSAARYLEEETKPAPHPTTTTVPELPKPELPPHPTVPELPKPELPPHPTTVPELPKPELPPHPAVPELPKPELPHPAVPEVPKPELPHPEPEVPKLELPPNPTVPEVPEHVPVVPKHEFPPLPEPELPPKPESHYPAVPDAKP

SEQ ID NO: 287768 - protein, 41 aa, Zea mays
  Clone ID: MRT4577_25539C.1.pep
RLEMDHHRYLGADGIYVYIPTDFEGWCFFTTLRKLVWVILQ

SEQ ID NO: 287769 - protein, 175 aa, Zea mays
  Clone ID: MRT4577_2553C.1.pep
MLAHRFLLLVAVAAAAASGIASAKPTAYEALADYDIPLGILPKGVVAYTVDNATAAFTATLDASASDAGSSICEFSIEGSYSLLYQTKITGKISPDHLTDLQGVSVKVLFFWLNIVEVTRHGDNLEFSVGIASADFGIDNFLKCPTCGCGFDCNDLLMLQKAGPSTSRLCLRGAF

SEQ ID NO: 287770 - protein, 797 aa, Zea mays
  unsure (1)..(797): unsure at all Xaa locations
  Clone ID: MRT4577_25540C.1.pep
EPTPKAAYREIMTKLLSENQHTDFDGRFSVYDDGDSLFTAGALPFDTKEFEXXXSAGGDEKMDRKYKVMINHAATISLLQLRMLLAGYPTDIPAQALVVLDTVLRDVFNERNDMECVVIDXXDRTLGVDAWKGLYLSIRPTQNCLSLIADVSSSVFVQPLLLIEFVQKILKIDAVDRNLTKPEYDKLLKALRGVRIQVTHRDNRRRVWXXXXXXXXQLSTYRVAGLSVNPTNDLSFESKVGVTTTVIDYFREIYGLELKYKYLPCVNAGSEQDPIYFPIEVCKIAPKQCYQKKLEGSQFSTPRKSAWIHPEAEQSCPQIVEQRQYKQTKRANEFDLEFDGNLTTVAARVLLPPNLKYDDSVSQKTWFPLDGYWNXXXXXXXXGAKIRNWACXXXXXXXXKEDIKKFCFKLAEMSRITGLDFADLKLPIFTARPDRVEDGIRRCYQEAKNKLRDQKIDLLLAILPDXXDSLYGNIKRICETDIGLVSQCCRRSRVLVNNNQILANIAIKINAKVGGRISVFDDVQKSLPVVSNKPTIIFGAHVSHPSVVDGSTGPSIASVVASQDWHEVSKYNGVVRAQGHTEEIGGLEDIVKELLHAFANESKEKLQQLIFYRDGISEGQFNRILEKEIPAIEKAWNALYDNEKPQITFVVVQKRHKLRLFPVDDNYKIRSAKKKIVEPGTVVDSEICHPAEFDFFLCSQSGVIKGPRRPVRYLVLRDDNNFTADELQALTNNLCYTYSGGNRSLSVAPPAYYAQKLAHRARVYLAKGSDNNAAAANGGRKQIPEIKNELKGSMFYC

SEQ ID NO: 287771 - protein, 143 aa, Zea mays
  Clone ID: MRT4577_25541C.1.pep
QDRLVSVCSQSAPARRRPEPLCSALHSMDLQSTLHSGSKAFCPSNRPARAVLASWIPLAPRRSTLPIPSMLVPALRDVGSYPVRRRRECAGSSSVRSGPEGLRAMRRWGFRLRHGRWAARSPFAPRERVSACFRTLGDPEVGP

SEQ ID NO: 287772 - protein, 155 aa, Zea mays
  unsure (1)..(155): unsure at all Xaa locations
  Clone ID: MRT4577_25542C.1.pep
MPPHECFFYLCSFVMYLVTRDGISEGQFNRILEKEIPAIEKAWNALYDNEKPQITFVVVQKRHKLRLFPVDDNYKIRSAKKKIVEPGTVVDSEICHPAEFDFFLCSQSGVIKGPRRPVRYLVLRDDXNFTADELXALTNNLCYTYLXXNCSLSVA

SEQ ID NO: 287773 - protein, 157 aa, Zea mays
  Clone ID: MRT4577_25543C.1.pep
PAGVSSHLRLLPSHLTGRARELLCSRSTPMLPPSSPAITFLAARAFSLRRTPLTLLQPRRRHLRPPTLIPTAPSSSPPQPHLLTLGLPLRERAELCLSYARLCRAPSAPASPASLCRRRVLVAEHRHQRSFLNFGSACSSPSRRSGSGVLGRLAPSR

SEQ ID NO: 287774 - protein, 73 aa, Zea mays
  Clone ID: MRT4577_25544C.1.pep
YYIQSICAFFLQAVQKQKQKHLQGTYIGKNLLKVATSHLALVLYLQKPQTSAKNYILELRKSFMGMNGLSCSV

SEQ ID NO: 287775 - protein, 130 aa, Zea mays
  Clone ID: MRT4577_25545C.1.pep
MVDVLSAFGFGNLCLAFTFLHISTFPDPQLAADSTAEAPLLHVAAEVLPSLASAAVLFLAAVPVAGAGNGRRRRSISGLLIFVLCVFDGTLELIVFGKAAVGGTAEARALGLPDLPALPAAATATFFFGM

SEQ ID NO: 287776 - protein, 215 aa, Zea mays
  Clone ID: MRT4577_25546C.1.pep
LVFVLTSYSTCNAAASSLISPALVVILHSNMQFGLVLLPSTDTSVVPFFLCLGRPPLLLPAAASLAQLGSRRPHVELPSAMVAGQPLRTASCAPGWLVSTDQGRLETAVAQLSTSYGGRRSLGPCRCSIHGCESTSAELPVLQLAPSSPSIPWSLRPSAREACCGGLVTRPRLHLQAATPSAPRPALTLSRPAASNPCSVSPHSTSSPSWFWSSS

SEQ ID NO: 287777 - protein, 177 aa, Zea mays
  Clone ID: MRT4577_25547C.1.pep
FFFFFFFFFFFFFFFFFFFFFFFFFSQQAKNFKTAQRQRGEFLGGAKKGGAGPWKAQKKNWGTKNGKKRGGGEGKNSPRRGTGGKKFPETQPGGTPPKTWGGWVPSPPDKPWERGPREKAGRKTCKPAWGKKGGGPKKRSHTGGGNPEGQPFFWRGRTGLAPPSPLGEKAAPPLVGP

SEQ ID NO: 287778 - protein, 108 aa, Zea mays
  Clone ID: MRT4577_25548C.1.pep
KKSPTELGGKAWEKKTGGFEQQFGPMGGSQQFFTKNKRGTPRTRPQGGGPIPGFLKITQPLTPRELIFNRVLNRNGPRNPCNLHPLGRLSKNPFKKQPNPYGPGKTHP

SEQ ID NO: 287779 - protein, 46 aa, Zea mays
  Clone ID: MRT4577_25549C.1.pep
MASGVFFPLLLALWVKPILRPAPPPSPLPDLARAPASERYGRWHDK

SEQ ID NO: 287780 - protein, 216 aa, Zea mays
  Clone ID: MRT4577_2554C.1.pep
MAELQMHCRSRAQKKSIRLIASACSPNKTEAALHRSPPQSAMLAHRFLLLIAVAAAAASGIASAKPTAYEALADYDFPPGILPKGVVAYTVDNATGAFTATLDASASGAGSSICEFSIEGSYSLRYQTKITGKISPDHLTDLQGVSVKVLFFWLNIVEVTRHGDNLEFSVGIAAADFGIDNFLECPTCGCGFDCNDLLMLQKAGAATARLRLRGAF

SEQ ID NO: 287781 - protein, 121 aa, Zea mays
  Clone ID: MRT4577_25550C.1.pep
LLVRPRWVGDRGLPGNHGPVPGGVPDFAIMMGITACCENRQTGYMCKIVLRRKFKTKNQGGLKSEKPEVNSEGLNAHLSGGKHGPLSRLKNWPTRWIRELANWPGEGVCFLPARGAIFYTT

SEQ ID NO: 287782 - protein, 49 aa, Zea mays
  Clone ID: MRT4577_25551C.1.pep
YLLYEIDQTVATLEVDSSRDGVCITVVLHRTLFQSASLVLIGNKELQTD

SEQ ID NO: 287783 - protein, 34 aa, Zea mays
  Clone ID: MRT4577_25552C.1.pep
KSTAIIFYSVEIRNPSRRSRTPSPQMAAWQSNTT

SEQ ID NO: 287784 - protein, 58 aa, Zea mays
  Clone ID: MRT4577_25553C.1.pep
VGVPLGALLGLFFKLGVRGILFGMIGCTCMQAIILVWVSLRADSLKELEHAQNRLHKW

SEQ ID NO: 287785 - protein, 93 aa, Zea mays
  Clone ID: MRT4577_25554C.1.pep
RYPRVRLLLHHSRLLQDCKLCLGLKKTRREFLNAVCSLFGSPAFLIFALSRYLLWTNSIPKYAFLYGGMGWNVFGSFVGVVSFKYTLPYKRPN

SEQ ID NO: 287786 - protein, 60 aa, Zea mays
  Clone ID: MRT4577_25555C.1.pep
IFVGKNIESRLALKKLSLFLKLALTPKNSRFLILFFFFKSFCSKKCLALFFFFFSIVQTV

SEQ ID NO: 287787 - protein, 127 aa, Zea mays
  unsure (1)..(127): unsure at all Xaa locations
  Clone ID: MRT4577_25556C.1.pep
SARGGLDSLSKRLSVGRAGSLYEPVEVLDPHSHGTCTARGRRSKSKSRAVEAWPGLAATHDAESSEVDATDKEDTSSTVTDPGPVAVWDSRPTWDDEPESDGXPNWQPVTVMELHRPGEDIELGLTK

SEQ ID NO: 287788 - protein, 48 aa, Zea mays
  Clone ID: MRT4577_25557C.1.pep
VLVLCEVTNLLYPPLFYLLDIALLFYAFLCFHMYVCIFIILLTCIFLM

SEQ ID NO: 287789 - protein, 822 aa, Zea mays
  Clone ID: MRT4577_25558C.1.pep
MTALQFLLLALVAVTQVASATTVTYNDRALVIDGQRRIILSGSIHYPRSTPQMWPDLINKAKEGGLNTIETYVFWNGHEPRRRQYNFEGSYDIIRFFKEIQNAGMHAILRIGPYICGEWNYGGLPAWLRDIPGMQFRLHNAPFEREMETFTTLIVNKMKDVNMFAGQGGPIILAQIENEYGNIMGQLKNNQSASQYIHWCADMANKQEVGVPWIMCQQDNDVPHNVINTCNGFYCHDWFPNRTGIPKIWTENWTGWFKAWDKPDFHRSAEDIAFAVAMFFQKRGSVHNYYMYHGGTNFGRTSGGPYITTSYDYDAPLDEYGNIRQPKYGHLKDLHDLIRSMEKILVHGKYNDTSYGKNVTVTKYMYGGSSVCFINNQFVDRDMKVTLGGETHLVPAWSVSILPNCKTVAYNTAKIKTQTSVMVKKANSVEKEPETMRWSWMPENLKPFMTDHRGSFRQSQLLEQIATSTDQSDYLWYRTSLEHKGEGSYTLYVNTSGHEMYAFVNGRLVGQNHSADGAFVFQLQSPVKLHSGKNYVSLLSGTVGLKNYGPSFELVPAGIAGGPVKLVGTNGTAIDLTKSSWSYKSGLAGELRQIHLDKPGYKWQSHNGTIPVNRPFTWYKTTFEAPAGEEAVVVDLLGLNKGVAWVNGNSLGRYWPSYTAAEMPGCHVCDYRGKFIAEGDGIRCLTGCGEPAQRFYHVPRSFLRAGEPNTLILFEEAGGDPTRAAFHTVAVGPVCVAAVELGDDVTLSCGGHGRVVASVDVASFGVARGSCGAYKGGCESKAALKAFTDACVGRESCTVKYTAAFAGAGCQSGALTVQATCS

SEQ ID NO: 287790 - protein, 110 aa, Zea mays
  Clone ID: MRT4577_25559C.1.pep
MTYSNHTMSVQKNRQEEIKFTFNVAKCDKIFDELIQSAINEDRLRFQEMQVDTELFSVNTIELACKKVLVRPEVANKGKCKNIVIGDPRTLNISQGGIAPKAPDGRLISL

SEQ ID NO: 287791 - protein, 142 aa, Zea mays
  Clone ID: MRT4577_2555C.1.pep
NKQTKGLRQGLALKQEKKGGPPQPGKHEGAPGEKRPPSSPRINPPPSPRVAGVHQKRGPPDPGTPTTGATSRGGGGGKIKLEPKPTNQPVPPHFFLVKYVKFPGPSPFALGQAKLQQQLAHFQRGLVLNTTPPKTRGGFPYW

SEQ ID NO: 287792 - protein, 96 aa, Zea mays
  Clone ID: MRT4577_25560C.1.pep
VRIPGRPASACCSSRRARAQTRAALPLLRHAPRLLRTDSRPGRDCSSARPFNTQHLPMPPATRGPRPTGHARSLARIVHLVSVPERLTRACLFGAP

SEQ ID NO: 287793 - protein, 51 aa, Zea mays
  Clone ID: MRT4577_25561C.1.pep
LAICHAIDQWLTDYLDLYYLNYSVLRADVELHAWCKDAREVVHAYLTTRPG

SEQ ID NO: 287794 - protein, 153 aa, Zea mays
  unsure (1)..(153): unsure at all Xaa locations
  Clone ID: MRT4577_25562C.1.pep
MFFTGIGLSIITGLVELMGGAINFVSRPHVGSTFTLTAVLKRCDRSAVGDSKPVMLHPMPCQFSKVLSALLVDGRPERATVTNYKLXRLGIVCDADATIELGVVVHVRRNGQSLTSMKQPCMXLIESDSWGYHIGGSLRSRLLEMKHSGYTHV

SEQ ID NO: 287795 - protein, 58 aa, Zea mays
  Clone ID: MRT4577_25563C.1.pep
WGGFFLLKGFLVFLTLSGWFFFSKKKKKKKKKKKKKKKKKKKKKKKKKKKKKKKKKGP

SEQ ID NO: 287796 - protein, 49 aa, Zea mays
  Clone ID: MRT4577_25564C.1.pep
ASVSSRIQPDHLGGRSSLPLFLKKKKKKKKKNQLKKKKKKNTEGRPRYP

SEQ ID NO: 287797 - protein, 89 aa, Zea mays
  Clone ID: MRT4577_25565C.1.pep
PQYCPSLAASSSTLVTSEVSFICRTRSLVNYRMQPVLLVAIRISLLEVWMRARRQRSIGVSTDVAPGTVHVRRPSPDAQAPRAGGARPA

SEQ ID NO: 287798 - protein, 57 aa, Zea mays
  Clone ID: MRT4577_25566C.1.pep
QHILPHDNFKNPVNIIYTQTLFLPSWIKQYNCFPRNNKYFGTITKTNFIKKIFQLQK

SEQ ID NO: 287799 - protein, 60 aa, Zea mays
  Clone ID: MRT4577_25567C.1.pep
YSYSGSCLAVVANPSHVSRQMFDMVNNVIYPSSAIIPVMPTNVIIIVITETLECKVIHGF

SEQ ID NO: 287800 - protein, 79 aa, Zea mays
  Clone ID: MRT4577_25568C.1.pep
LSDVVSPYNKSLVNEFMELIRAFICRLTTVQVLFKRAPKALTLYYRKSLKFDHPLRTCGAEWKYSERRMAGGFLLQRRE

SEQ ID NO: 287801 - protein, 84 aa, Zea mays
  Clone ID: MRT4577_25569C.1.pep
SHNGLILLFRMSKLVRPYINTERTNQTSLTLPPVNTIRPRLLRTWEVTRVPWHIRYTMKASTQGPNGSLLELMTCALCFEYNLK

SEQ ID NO: 287802 - protein, 162 aa, Zea mays
  unsure (1)..(162): unsure at all Xaa locations
  Clone ID: MRT4577_2556C.1.pep
AATTPHQDRQRADARKRQDETADKARTRPAAANAAAAAPPQPPGPETTTEDASTRGEGSPATATRHANARGTGPAPTATRRSDARNXKRNASTAADRRAARNRTKNAARGDSGRNAGNAASTPAKSAARNPHTNRTCTECTSGNQNRHHARRRPAGTTDQPD

SEQ ID NO: 287803 - protein, 381 aa, Zea mays
  Clone ID: MRT4577_25570C.1.pep
MATAAAASRVAVSAPVFGSDGGARSSGIKGNNNVSFGSKSWVGGTLAWESSCSVRPRHASKVLCMSVQQASRSKVSVAPLHLESAKEPPLNTYKPKEPFTATIVSVESLVGPKAPGETCHIVIDHGGNVPYWEGQSYGVIPPGENPKKPGAPQNVRLYSIASTRYGDNFDGRTGSLCVRRAVYYDPETGKEDPSKNGVCSNFLCNSKPGDKIQLTGPSGKIMLLPEEDPNATHIMIATGTGVAPFRGYLRRMFMEDVPNYRFGGLAWLFLGVANSDSLLYDEEFTSYLKQYPDNFRYDKALSREQKNRSGGKMYVQDKIEEYSDEIFKLLDGGAHIYFCGLKGMMPGIQDTLKKVAERRGESWDQKLAQLKKNKQWHVEVY

SEQ ID NO: 287804 - protein, 50 aa, Zea mays
  Clone ID: MRT4577_25571C.1.pep
DRLCRALGGAEKVEIEWGNHALSNRVQEAVVAIVDFVKREGPKGWDDPWS

SEQ ID NO: 287805 - protein, 92 aa, Zea mays
  Clone ID: MRT4577_25572C.1.pep
RPFPAGVGLIFFPFIAGEFHSSGTRGFLPPFCFGGSFNSPPPGVVPPGGGPGPPKPFLVPGSPLGLSAGPFFLRPRPLFYVPFWLRRPLREE

SEQ ID NO: 287806 - protein, 198 aa, Zea mays
  unsure (1)..(198): unsure at all Xaa locations
  Clone ID: MRT4577_25573C.1.pep
MAAVAAPAPPPPRQLSLEDLKVVSVLGRGAKGVVFHVVHAPGELDGEGEGGAAAAAMALKAVSREAARHKKAASGDGDGHRRIWFERDVLLALRHPLLPSLRGILATDAIVGFAMDRCGGGDLNSLRRRQTEKMFSDSVIRYIQRFINGLTEPGAAXNLVANLCPGRFFFCFNRRFYAGELVLALEYLHSLGVVYRDL

SEQ ID NO: 287807 - protein, 258 aa, Zea mays
  Clone ID: MRT4577_25574C.1.pep
GLLWLITTGGLLATDYLGSLSLALTVEKWSLVQPLLSSSYTGLPVSSSRLDPCVREQLISYLINKENSEGVILLGHSTGCQDIVHYMRTNFACSKAVSGVILQAPVSDREYRATLPETAEMIDLAAKLISEGRGMDLMPRKANSDAPITAYRYHSLCSYMGDDDMFSSDLSEDQLRQRLGHMSTTQCQVIFSMGDEYVPEYVDKRALVDRLCRALGGAEKVEIEWGNHALSNRVQEAVVAIVDFVKREGPKGWDDPWS

SEQ ID NO: 287808 - protein, 163 aa, Zea mays
  Clone ID: MRT4577_25575C.1.pep
LLSFSIPQAPVSDREYRATLPETAEMIDLAAKLISEGRGMDLMPRKANSDAPITAYRYHSLCSYMGDDDMFSSDLSEDQLRQRLGHMSTTQCQVIFSMGDEYVPEYVDKRALVDRLCRALGGAEKVEIEWGNHALSNRVQEAVVAIVDFVKREGPKGWDDPWS

SEQ ID NO: 287809 - protein, 51 aa, Zea mays
  unsure (1)..(51): unsure at all Xaa locations
  Clone ID: MRT4577_25576C.1.pep
PRSSAHFGVXINTSGPGATNLIFALANPLFNSVPIVAITGQGPQPIDWTDP

SEQ ID NO: 287810 - protein, 158 aa, Zea mays
  Clone ID: MRT4577_25577C.1.pep
LCHRTCTLWRTRVDLQVPMSLTSTAFTSTVSASLTPLRARAPPPCSVVPPPEPASGQGPRAPWTDLMHHVIGHSGCSVLVRKEPSRLDAADAGPAEERVVSSPAAPRLAPTRALLQARRTELRLGTAPSQLARAPDPEQGQLLASRATREKNNATPGR

SEQ ID NO: 287811 - protein, 115 aa, Zea mays
  Clone ID: MRT4577_25578C.1.pep
KTKKIKQKNSKKKPNKKNHKKTHHPRPTFHLQIPQGNVKQTILTTNAPPHLVPLQLPNTDGPSARRSIDPCNAPEPDWHAAPTRGQADPPPISRRRTAEQSGGDTSRAGQDEAEE

SEQ ID NO: 287812 - protein, 64 aa, Zea mays
  Clone ID: MRT4577_25579C.1.pep
YHPYLSSKYTSHLKKKKGEKISPYTNSYGRFQGNTWPVPLKVHFTQNQRKIVSRKYRTVYKNRD

SEQ ID NO: 287813 - protein, 99 aa, Zea mays
  Clone ID: MRT4577_2557C.1.pep
PPGFPQVVVGARSGKTRNAQPRHICESKGSKDGFSKGAPASPGTMGLPPLPPFREFLSPKGRVRAKCFSNFNGATPPFGFCRKFSGPVYKEEAPQGMKS

SEQ ID NO: 287814 - protein, 80 aa, Zea mays
  Clone ID: MRT4577_25580C.1.pep
MTPGRTRGEDFITFSGQHSSQSLQSLFNLRSDCKLRRLAVRNQRVQRFPEETMDMPEVLRSPKCKELNFEGMGPCDSCRA

SEQ ID NO: 287815 - protein, 60 aa, Zea mays
  Clone ID: MRT4577_25581C.1.pep
DLATTTARRRLNRTRACSRPRRATSTLTFDGAEGNERHDGDEPVDTTSSRDPCLPVRRQT

SEQ ID NO: 287816 - protein, 85 aa, Zea mays
  unsure (1)..(85): unsure at all Xaa locations
  Clone ID: MRT4577_25582C.1.pep
RAHARILYCGRPLXFXFFFFFFLQGEFEAYFGSKYTTHFRKENGGKISPYTNSHGRFQGNTWPVPLKVHFTQNQHKIVSRKYMTA

SEQ ID NO: 287817 - protein, 455 aa, Zea mays
  unsure (1)..(455): unsure at all Xaa locations
  Clone ID: MRT4577_25583C.1.pep
RVLHIKHYVPISLKHLGKLLHLKFLEIFDTTIDELPREIAHLRSLQTLVLVRTGLDELPLAVCSLTRLMCLIAYGFERFPADRMGNLTSLEELRLHRVVGRSATQALVAELGKLTRLRVVRITFSEQLEESLQEALVQSLSNLRLLQELALLCKMTRRGSDMWGDWEPPRQLRCLIIGAIGFSRQPRWINRSCLPRLCSLYLMVHALEAQDLDNLAGLPELQHLTLDGFSWPPRYTVGPDDFRNLRFCEVGTTFEFRKGAMPRLEVLRFGVYAGYWSWEEXCAVRAVPNEXVIEDLDLFLDNVLLLQQVIVKVNCLGATVTQVEEVEAVVMRAVENHANRPTIKMDRAYEENILSDEKLEALLQQHTKLQGGVLQLKDKPDAFFISQLRLYRHLQEAIIFIDCAGASMCEVQKVEAAFRHAAEVHPNHPSIELIRTNTDGMVSSSSDHPNTEPRN

SEQ ID NO: 287818 - protein, 94 aa, Zea mays
  Clone ID: MRT4577_25584C.1.pep
GRKRGDQQRTAARKETKAKQRKKRGTKRDKRNRKPNRKRGRKETPKPGKEKKRRKKKKKKQHKEATEPKPKREEARNNRTKNQNRQGTRNPRRK

SEQ ID NO: 287819 - protein, 714 aa, Zea mays
  Clone ID: MRT4577_25585C.1.pep
PRVRGRVGNSKKLFYKRIESQEGESLDGELSSKIIHKCGGIPLAIIAIASLLVERSREEWSEVYDKIGLGNEDNTAKIMSYSYYDLPPYLKPCLLQLSIFPEDHVIDIKSTIWKWIGEGLVHLEKQDVSLFEVGERYFKELVNRSMIQPTEDKYDRFVEGFRIHDIVFDLICKLSKDEDFITISGQHSSQDSLRREKKTGVPRSDCKLRRLVVRNQRVQRFPEETMDMPEVLRSLSIIGCTIAVMAPIDSFRVCRVLSIENNYVPISLKHKHLGKLLHLKFLEIFNTPIDELPKEIGHLRFLQTLILVRTGLDELPLAVCSLTRLMCLIAYGFERLPAEMMGNLTSLEELRLNSVVGRSATQALVAAELGKLRRLRVVSITFLEQLEESLQEAFVQSLSNLRGLQELMLSCKMPERGSDMWGDWEPPRQLRCLIIGAIIFSRQPRWINRSCLPRLCSLCLMVHALEAHDLDNLARLPELQYLTLYGISWPPRYTVGPDDFRNLRFCDVGTTFEFRKGAMPRLEVLRFGVYAGYCSWEQYGVPFEQFPTKDVIEDLDLDLDNVLLLQQVRVKVDCSGATAAQVEEVEAVVMRAVENHANRPTIKMNRVCEKNILSDEEREALLRRHIEKDCCVRTMKDKSDAFFISQLRRYRHLQKAIIFIDCSGASKCEVQKVEAAYRHAAEDHPNHPSIELIRTNTDGMASSSSDHPNTEPRN

SEQ ID NO: 287820 - protein, 186 aa, Zea mays
  Clone ID: MRT4577_25586C.1.pep
MADEDVQEFDHYYRHLAKRAAKLHAIYPPELPKPLSESEDEKAVQERFKEMANESIDLAAGAMRRIPAEKWRPLISVFAYVFLVFVRVRWYAERGCAKWWMAPQIIEGLQTVRRMVSSACGGTPLDIDKVFDRMVALSGVSVQAAPGGNGVVGSNDLSVVIFALIDNVFGNVKSDIYDMVSASTPC

SEQ ID NO: 287821 - protein, 109 aa, Zea mays
  Clone ID: MRT4577_25587C.1.pep
LHCILGAARQERRRRCCKHLLESSGTRRSGGDANADHPIRSRMPATVYLELLDRSAVGGIANISYSPRAQQGQPMTPTQIIPSDPVFLTKIPEDGKPTLLVQTPPVIPV

SEQ ID NO: 287822 - protein, 160 aa, Zea mays
  Clone ID: MRT4577_25588C.1.pep
LTATSISLANLYRFLYKMSWRFPLFGSQHQQADPSFQDIPTQSWYPPSVAGSSSRPSTPTSSSASLHQRASDSPQSSSRGQPSPAEAAGTIARLKDKSIVRVTNAIRKTERNILHSFNSLDQVKTPHTCALMSLKKETIATLQGQYLTNRSSRIFGTLGN

SEQ ID NO: 287823 - protein, 59 aa, Zea mays
  Clone ID: MRT4577_25589C.1.pep
SSCYMRGNRMPDIMAFYLRYGTLYFKDSYIPTCSKLRCNMCIGCERIYMHKVKKNDRPW

SEQ ID NO: 287824 - protein, 36 aa, Zea mays
  Clone ID: MRT4577_2558C.1.pep
VRLRALFRVVIHFYTCTIIFKFLRMVCAVHRWSQVR

SEQ ID NO: 287825 - protein, 123 aa, Zea mays
  Clone ID: MRT4577_25590C.1.pep
GPQGSRKGGLPMLAVMGVWFPAEYPGTGPIGTLLAPLAGPGHAPFFRAFPPKWGALMNLAVRGGLPPRQALLGLRAQMDLFLFVGGGPLGSLPPVMMMMIKCSGGEAGGPWTMWELREKCEGG

SEQ ID NO: 287826 - protein, 491 aa, Zea mays
  Clone ID: MRT4577_25591C.1.pep
MTQPGNLLLKLKREMVNYSRKSVTVTTGSSPGLLQDTVQKLQVDAISRLSSFVMEKQESDIAKRAVTEAHERNEDLLKRNEDLLKRNDDLIKKIEDSSKIVTQLQEALQRLEGKASNLEVENQVLRQQATSTPPTSAKSPASRAKISRIHRSPENGHILNGDIRQTEMKPSTGTSAAITSVANVPDLGDQKEFEHGEKLQRIPKQKYQPSHNQQPQDDQQWLVTCISQYLGFSGSKPVAALLIYQCLLHWKSFEAMKTGVFDSILHAINSATEAQNDMRTLAYWLSNLSTLTVLLQRSFKTTRTAISTPQRRRFSSERIFHGNQTSNAGLAYLSGQSVVGSAGLPQVEAKYPALLFKQQLVDLIEKVYGMISDSVKKELNPLLELCIQDPRTSHSSIAKGNLNGMGQQNQLTHWLGIVKILTSYLDVLRENHVPSILVHKLFTQMFSFIDVQLFNRLLLRRECCSFSNGEYIRAGLTELKHWSDNATREFA

SEQ ID NO: 287827 - protein, 232 aa, Zea mays
  Clone ID: MRT4577_25592C.1.pep
MSWRFPLFGSQQQQADPSFQDIPTQSWYPPSVVGSSSRPSTPTSSSASLHQRASDSPQSSSRGQPSPAEAAGIIARLKDKSIEELQRLLKDREAYNAFFNSLDQVKTQNNVRDELKKETLQLARENLEKEQRILELRNQCTIIRTTELAAAQDRLTDLERQKDDIMRSYSPAALLNKLQTSMAKLDEESEELHQKFLEKDIDLPTFVQKYKKLRTAYHKQALLHLAGQTSLR

SEQ ID NO: 287828 - protein, 78 aa, Zea mays
  Clone ID: MRT4577_25593C.1.pep
HTKSSIPSVHTLFRFRQISLQLPHSVHRIDLHASRRFYFRRRRARLFERRGGTCMSKYKSPFNIAASDPATSAKNFTA

SEQ ID NO: 287829 - protein, 88 aa, Zea mays
  Clone ID: MRT4577_25594C.1.pep
LASGSGHVSAAPPPPMGPHPPRRRGGGYGDRQRPSGERDNHLRDKVRPLEGVHMVTPEAPTDQIQDTWRLEIELATIWYVHLGSDFAY

SEQ ID NO: 287830 - protein, 154 aa, Zea mays
  unsure (1)..(154): unsure at all Xaa locations
  Clone ID: MRT4577_25595C.1.pep
HLATTLPHRQRRHALRLTACAAKRIVEDAGHHMLGRLSSIIGEELLTAQKAALVRCEDIXCMSXSSPPRQMMYLLFLRXRMNTXKPHHGAMHFRGPAKILLGTIRXMIPHNTXGGMLALPRXLSTYEGVPPGVPXTKRMGIPDTLRDMMLRPGH

SEQ ID NO: 287831 - protein, 193 aa, Zea mays
  unsure (1)..(193): unsure at all Xaa locations
  Clone ID: MRT4577_25596C.1.pep
AFRNHQARRTSNSLTTVATKILCLLALLARCASATDACIVPHCSLAPSSIIPQLLRGXASLAFEHPAVQAYRLHQAIAASVLQQPIAQLRHQCLAHLTLQTIASHQERQFLPAVSHLAMVNPVAYLQQQLLACNPLALADVVAIQRQQQLRQLLPALSRLAMVNPAGYLRQRQLLSSSPLAVGNAPTYLQQEL

SEQ ID NO: 287832 - protein, 115 aa, Zea mays
  unsure (1)..(115): unsure at all Xaa locations
  Clone ID: MRT4577_25597C.1.pep
LGSYTIRPPADIVVFIFCKESKALGEGXKNSNKKLTAWFKKYPPNSAPVLFINATIEKTKRRFENYSKFCLLCGADSLPYHIGSFDHVNWGEFLXTPGLLLLYIVRXIGWVGRSY

SEQ ID NO: 287833 - protein, 90 aa, Zea mays
  unsure (1)..(90): unsure at all Xaa locations
  Clone ID: MRT4577_25598C.1.pep
LXERSYRFRPPLQPLRMGNQGLTLVTEGNRLFLSHLPCAAMWGRILSPSDVGDGRATGLTGDTSLGCADVRHSYHGSPSVISHRGGLAGG

SEQ ID NO: 287834 - protein, 70 aa, Zea mays
  Clone ID: MRT4577_25599C.1.pep
ALMLQQRLSSWGGNGRRADIRKSTCDGNPYALDLTAYLATHTYSQQCKDQSHGKVVTIPRYHRFLICYKT

SEQ ID NO: 287835 - protein, 232 aa, Zea mays
  Clone ID: MRT4577_2559C.1.pep
LIVHFSVGIARSGTQVAFGQGNSYYARNFPMPKKDSSAGGASKLPKEYAEPWDYSHDYPVTLPLRKPYSGNPEILDEEEFGESSASRTQDDELSAAEQLGLMDMSSESQFLFFQLPSSLPLPRQPQSGADPNEVRDEKREDMRPSSHNGSKLKEVPEGYMGKMLVYKSGKVKMKIGDTLFDVSFGSNCMFSQEVAAINIREKHCCTVGEISKRAIITPDINYMLGSVDKMEE

SEQ ID NO: 287836 - protein, 154 aa, Zea mays
  unsure (1)..(154): unsure at all Xaa locations
  Clone ID: MRT4577_255C.1.pep
MRECISIHIGQGGMQVGKACWELDWLEHGIQADGQMPGDKTIGGGDDAFNTFFSETGAGKHVARAGFGDLETTGIGEVRTGTXRQVFHPEQLLHGKEDGNNHFARGHYTIGKEIGEPXLDRIRKLGDNWTGFQGFLVFNDVVGGTGSGLGFLHL

SEQ ID NO: 287837 - protein, 112 aa, Zea mays
  Clone ID: MRT4577_25600C.1.pep
VLRGRGQAQGVKAAVPSLASVLVVWRGLPGPSLREHGTPPLRWWSVLTSSGCGSGTPYGLPSPVGWAPAIPSISLVRLRVLPVPCLAVASRCVLDSPPLTFVLPVRKSPRPL

SEQ ID NO: 287838 - protein, 126 aa, Zea mays
  Clone ID: MRT4577_25601C.1.pep
GGPITPPVVCPQDLFFCGPKGGVPPLLEGRVCAPKQKPIFFLKKISQKGFFYPSNWPKKKKLLLPPQVAPSLRAPPFKGAGVLVPPPGQVLARPPKKHPPNAPGFPSPPPGFPPWGPLNGPPSPQL

SEQ ID NO: 287839 - protein, 37 aa, Zea mays
  Clone ID: MRT4577_25602C.1.pep
RRVHHAVRPSDTGPGDAGVRSSTSRLLQLGLDPSRSP

SEQ ID NO: 287840 - protein, 82 aa, Zea mays
  unsure (1)..(82): unsure at all Xaa locations
  Clone ID: MRT4577_25603C.1.pep
MGQLLVRLEVXTKVQAEGPFSGASMNTARSXSPALMPEVWPSHWVYWDGPHIGGPLAGLVXYTCLFMVQGVHVHLPMDDTHL

SEQ ID NO: 287841 - protein, 38 aa, Zea mays
  Clone ID: MRT4577_25604C.1.pep
PNAHYPGIPVLFRRLVGFCNQWLLFSLNGDAQICDWSC

SEQ ID NO: 287842 - protein, 93 aa, Zea mays
  Clone ID: MRT4577_25605C.1.pep
KKKKKKKKNKKKKKKKRPTHLKNPTFLTHPSLRHSSSILIPNFNSLPILLHCLNFKNLGITKLIPFPNYTPFHNFPISQNALTDKISQQFPIL

SEQ ID NO: 287843 - protein, 87 aa, Zea mays
  Clone ID: MRT4577_25606C.1.pep
KNRLNKSNLRLLIPKTLPPTSGTNGLLLTPSDANCRCLKTSQPGSGESAPHRGPLKDPKLPEADSPHLARGQGGANRKQRGDVYHLT

SEQ ID NO: 287844 - protein, 233 aa, Zea mays
  unsure (1)..(233): unsure at all Xaa locations
  Clone ID: MRT4577_25607C.1.pep
MSMEAAVGAEFGPHLHPALGFRHSQRRVFFCCWRLHPPRPASLGLCGGGGARPRGAIPVADGDQRRRLRELEAEAEAEAEAGSILGPPRSSPREVREEMARCFDLVRRLGRGAVYLGSSRVPPTHPHFLQTTELAREIARLLDCTTWTGAGPGLMDAAIQGAFEADKPVGGLRIAKEAGEWTSSXFHPYLPPEYYLTCXFFSAKKHAGWICVPNTLLTKPFVSCRRFGTLNNF

SEQ ID NO: 287845 - protein, 137 aa, Zea mays
  Clone ID: MRT4577_25608C.1.pep
LGGRHHCPLARAASTQAGISVRAINQPGRQRRRRFSASRAAASWQRHPRFGEGQDADAFRLDLVASPASSRRNDSQRHHTSQPKIASVASRRTNRQNGGAVLRCSGCAQPRSLVLSSQVAAPSPGPPPLVLGLLLFF

SEQ ID NO: 287846 - protein, 753 aa, Zea mays
  unsure (1)..(753): unsure at all Xaa locations
  Clone ID: MRT4577_25609C.1.pep
MAKVRSTARVESDGDETEATETVPISEAMRRSGLVSSEDTPAAEATPADVEEVGSEDEYSCGVPSKPSHLDFGKSTISEADLPKMVKLGYFSEAKKELIRFGGEETIPKPGKDEVVVFKSFLKAGLRFPLNKMIAIVLKKFGIYLHQLTPNAIVXVFPTLREWEMPKLEGEKKKGELVXLPYHYKFKKHFKAPCQEWLDTIEVMCNEILGNYSKKEDQLMTAAFGTRPKRRLNRVLDALNFDYPDYEQLRGDAEGQKRKRIASVLDKEGTKLAKKDKEISEKRKLSPEPKIAGPKKRKAASPKPKTSAQEEEAPATPSAAEVEEILKTPPPTSASKIPFIESAVTAETTATGVETTGAEATGAATEAEATRAETETTEDPNLETTLGDIDNMLLKMAEEEATAAAVDTTIEKGKEQIEDTLEEENFNFQDILGQELSETEKEELKKYAISCGYKPGSMLFGGVNEGKLRCLRNRTEAKVVRTFSKSVGLPKIEVDLCRYQRQHIAGSLLYANFKSILLSKVLRMQQDLEDEKNEATIKDLENKVESYEAALKKKDFVIHSMEGSLAEAQAKTEKLNSELLIKSEKYEQEKKNLETSLKTEIEKNSNLQKSLKELQEKCLDFGNRCVQRLKDVFYSIGASSDKFTPSAENLPSTFEYIEGEVDALDEVIAGHADFYALLASRGTTTAFLKAGCTHGKIVNRPNFSLSPADLVDIPSLARSIGNRFMTQIWINGGRKMAGDEARSHLKPDDEAEE

SEQ ID NO: 287847 - protein, 49 aa, Zea mays
  Clone ID: MRT4577_2560C.1.pep
LSFNPFCGLTFNSFYIYNFFLLFFLIFFPTRPRTRGRTRGRTSWVDACV

SEQ ID NO: 287848 - protein, 89 aa, Zea mays
  Clone ID: MRT4577_25610C.1.pep
SARGEWRTHLHTGASFSYARMHFARCWANPDDPRSMGDSSWSSQDYMTMVDYVNGNGISGNLIKADGMDTPGRDASVEDFCTYTEQEEP

SEQ ID NO: 287849 - protein, 32 aa, Zea mays
  Clone ID: MRT4577_25611C.1.pep
SVRQRSKVCVLLSLNKRFILPVYYRTINDVAL

SEQ ID NO: 287850 - protein, 661 aa, Zea mays
  unsure (1)..(661): unsure at all Xaa locations
  Clone ID: MRT4577_25612C.1.pep
MARVRSTARVERDGDETEAAETVPISEAMRRSGLVSLEDTPAAEATQADVEEVGSEDEYSCGVPSKPSHLDFGKSTISEADLPKMVKMGYFSEAKKELIRFGGEETIPKPGKDETTKFPVISYRSKWPAGWKSEWFYVKVDEGEDKLVQSPLELTFGETRPRCNMIMGSPSQTALAEFRVILDHIGTRDLVQEFLAFKVFPTLREWEMPKLVGEKKKGELVRLPYHYRFKKHFKAPCQEWLNTIEIMCSEILGNYSKKEDQLMTAAFGTRPKRRLNCVLDALNFDYPDYEQLVRGAEGQKRKRIASALDKEGTKLAKKELSQISKKLSPEPKVAAPKKRKVVSPKPKTSAREEEAPATPSAAKVEEILKTPPPTSTSKIXPLPKPQPPEPKSPEPKPPKLXTIGAEATGAEATGATTEAEATGAETGTTEDPNLETTLGDIDNILLRMAEEEAAAVAVNTTIEKGKEQIEDTLEEENFNFQDILGQELTDTEKEELKKYAISCGYKPVSLLFGGVNEEKLRCLRNRTEAKVVRTFSKSVGLPKIEADLCRYQRHHIAGSLLYANFKSILLSKVLRMQQDLEEEKNKATIKDLENKIENYEATLKKKDFVIQDLEIKVKDREAALEKKDFVIHSMEGSLVEAQAENDKLNNELLIKSEKSEQ

SEQ ID NO: 287851 - protein, 699 aa, Zea mays
  Clone ID: MRT4577_25613C.1.pep
MARVRSTAKVERDGDETKATETVPISEAMRRSGLVSSEDTPAAEATQANVEEAGSEDEYSCGTKARGDGLHENFGCYNFAYRKTTKFLVISYRSKWPAGWKSEWFYVKVDEDEDKLVQSPLELTFGETRPRCNMIMGSPSQIALAEFRVISNHIGTRDLVQEFLAFKVFLTLREWEMPKLEGEKKKGELVRLPYQYKFKKHFKTPCQECNYSKKEDQLMTAAFGTRPKRRLNRVLDALNFDYPDYEQLGGDAEGQKRKSIASVLDKEGTKLAKKDKEISEKRKLSPEPKIAAAKKRKVASPKPTTSAQEEEAPATPSAAEVEEILKTPPPTSASKIPFIESTVTAETTATGAEATGAGTEAEGAGAETEIAEDPNLETTLGSLLFSGVNEGKLRCLRNRTEAKVVRTFSKSVGLPKIEADLCRYQRQHIAGSLLYANFKSILLSKVLRMQQDLEDEKNEATIKDLENKVESYEAALKKKDLVIQDLENKVKDHEAALEKKDFIIHCVEGSLAEAQAETDKLNSELLIKSEKSKQEKKNLETNLKTEIEKNSILQKSLKELQKKCLDFGNRCMQRLKAVFHSIGASSDKFTPSTENLPSTFEYIEGKVDGLDEVIAGHADFCAMLDSRSTATAFLKAGCTHGKIVNRPNFSLSPADLVDIPSLARSIGNRFMTQIWINDGRKMAGDEARSHLKLDDEAEE

SEQ ID NO: 287852 - protein, 856 aa, Zea mays
  Clone ID: MRT4577_25614C.1.pep
MARVRSTARVERDGDETEATETVPISEAMRRSGLVSSEDTPAAEATQADAEEDEIEDEYGAMPSKPSHLEFGKSTITKGDMAKLLKLGYFSEDKKELIRFGGEEVTPKPEKDEVVVFKSFFKAGLRFPLHGMIAGVLEGFGIYLHQLTSNAIVRLSVYIWALRSQEAEPLAEGFCRAHELHYQTKAREDGLHDNFGCYNFAYRKDAKYPVISYRTKWPAGWKSEWFYVKVDVGVLGPTAHPGPTKERSYDLLGPWAFREIFYFFSGPGGYLSPTVDEKKEKLVQSPLRLTFGVTRPQCVMDLDSPCQIALGEFRVVAEHIGTRDLVQEFLAFRVFPTLKEWDMPKLKGEKKKKELVRLPYYFKFKKHFKAPCQEWLDTIEVMCNEILDNYSKKEDQLMTAAFGTRPKRRMNRVMDALNFDYPDYEQLGKVAEGQKRKRVASALDKEGTKLSKKDKEISKKRKLSPEAKIAAPKKRKAASPKPKTSGQEEEAPATPSAAEVEEILKENFNFQDILGQELSETEKEELKKYAVSCGYKPGALLFGGVNEGKLRCLRNRTEAKVVRTFLKNVGLPKIEADLCRYQRQHIAGSLFYANFKSILLSKVLRMQQDLEDEKNEATIKDLENKVESYEAALKKKDFVIQDLENKVKDHEAALEKKDFVIHSMEGSLAEAQAEIDKLNSELLIKLEKSEQEKKNLETSLKTEIEKNSNLQKSLKELQEKCLDFGKRCVQRLKDVFYLIGANSDKFTPSAENLPSTFEYIEGEVDALDEVIAGHADFCALLASRGTTTVFLKAGCTHGKIVNRPNFSLSPADLIDIPSLARSRGNRFMTQIWINDVRKMAGDEARSHLKPDDEAEE

SEQ ID NO: 287853 - protein, 429 aa, Zea mays
  Clone ID: MRT4577_25615C.1.pep
MTAAFGTRPKRRLNRVLDALNFDYPDYEQLGGDAEGQKRKRIASVLNKEGTKLAKKDKEISEKRKPSPEPKIVAPKKRKVASPKPKASDQEEEAPATPSAAEVEEILKNYPSGRCHSSDTATDIGVKIPFIESAGTAETAAIGAEATGAATEAEATGAETETAEDPNLETTLGDIDNILLKMAEEEADAAVVDTTIEKGKEQIEDTLEEENFNFQNILGQELSKTEKEELKKYAVSCGYKPGALLFGGVNEGKLRCLRNRIEAKVVRTFSKNVGLPKIEADLCRLFWQSILLSKVLRMQQDLEDEKNKATIKDLENKVESYEAALKKKDFVIQDLENKVKDHEAALEKKDFVITLWKKSLKELQEKCLDFGNRCVQRLKDVFYSIGASSDKFTPSAENLPSTFEYIEGEVDALDEVIAGHADFCALLAS

SEQ ID NO: 287854 - protein, 56 aa, Zea mays
  Clone ID: MRT4577_25616C.1.pep
IDRASAEFSRPKVSPCLRSHLSRDCTPCTLCFAEWFPLTCRSSFCVAHPRAYAFGL

SEQ ID NO: 287855 - protein, 686 aa, Zea mays
  Clone ID: MRT4577_25617C.1.pep
MARVRCTARVDREGDETEATETVPISEVMRRSGLATSENTSAAEAKQADVEEDEFEDEYGATPSKPSHLEFGKSTITEGDMAKLLKLGYFSEDKRELIRFGGEEVTLKPEKDEVVVFKSFFKAGLRFPLHGMIADVLERFGIHLHQLTPNAIVRLSVYIWALRSQEAEPLAEEHIGTRDLVQEFLAFRVFPTLKEWDMPKLKGEKKKKELVRLPYYYKFKKHFKAPCQEWLDTIEVMCNEILGNYSKKEDQLMTAAFSTCPKRRMNRVMDALNFDYPDYEQLGRGVEGQKRKRVASVLDKEATKLAKKDKEIFEKRKLSPEPKIATSKKRKATAPKPETSGQEEEAPATPSAADVEEILKVMTEPLPIKLSPLAPQLTKLFQKEKEPSATESPAKLKKRRIIQVADVIHQTPPPASTSKIPITEGAGAAKAEAAEAEGAKAETAEDSDLETTLGDIDNMLLKMAEEEVVVAAVDTTIEKGKEQIKDTLEEENFNFQDILGQELSETEKEELKKYDVSCGYKPGALLFGGVNEGKLRCLRNRTEAKVVRTFSKNVGLPNIEADLCKLFCQSILLSKVLRMQQDLEDEKNEATLKDLENKVKNHEAALEKKDFVIHSMEGSLAEAQAEIDSVGGLRLPKKSFGMIAERGTDLKMKRLFRPRRIIIELLPDVKGIGVILHGLRLVPINR

SEQ ID NO: 287856 - protein, 247 aa, Zea mays
  Clone ID: MRT4577_25618C.1.pep
MARVRSTARVERDGDETEATETVSISEAMRRSGLVSSEHTPAAEATQADVEEVGSEDDYSCGMPSKPSHLDFGKSTNSEADLPKMMKLGYFSEAKKELIRFGGEETIPKPGKDEVVVFKSFLKAGLRFPLNKMIAVVLKKFGIYLHQLTPNAIVRLSVYIWALRSQGVEPFGEGFYQVHELHYQTKGRGDGLHENFGCYNFDYRKTTKFPVISYRSKWPAGWKSEWFYVKVDEDEDKLVQSPLELTF

SEQ ID NO: 287857 - protein, 194 aa, Zea mays
  unsure (1)..(194): unsure at all Xaa locations
  Clone ID: MRT4577_25619C.1.pep
MARRSRGGGIVTEAALKAHAAAVRVVSRRGAVRLVLVSAIAWAMLGLVALAFHLRPCSSPVAFLSALCEKDSKVFSVLDSMGLSSKPLHRCPIPVANDPNAIAIPKRTPNTIVKKLSYITVDKQDKDPSPLFGGHQNWKQREESFKLNSTMKVHCGFMKNSGADMDTIDLKYIQKCRFVVASGXFDGYDIPHQP

SEQ ID NO: 287858 - protein, 186 aa, Zea mays
  Clone ID: MRT4577_2561C.1.pep
VPSYCFFYEGDCEMIELLLAKGAYVDPIAEEIGTPLHLATKEQQVGAMKTLLEHNADCNKTYMSYGLYPMTPLFQAVNVSSLQCVKLLVEAGAVINPDCIETVSLDSAMGNDSSTECLNFLLKAGAKRNASNDAAVHASARGRVAGTARRSGRGRGRDQGPRQQQEQHVACGEEVEVKVNPKVLIG

SEQ ID NO: 287859 - protein, 154 aa, Zea mays
  unsure (1)..(154): unsure at all Xaa locations
  Clone ID: MRT4577_25620C.1.pep
WSKILPAGEGKVNPHGLPSYNNXLINYLXLQQGITPYITLYHSDLAIALEKXLAGXFCTNIAHSLTDXADFCYKTYDDRVNHWSTFNEPKIXALLDYDTRLNPPHRCTRCAAGRNAATLPYIHAHNLLLRHATXAAPYRTTYHAVHTGKSGIDL

SEQ ID NO: 287860 - protein, 176 aa, Zea mays
  Clone ID: MRT4577_25621C.1.pep
MAASRSALITLLVFVSSVAAASATTFTVGDSSGWRRSVNYDNWASGKTFTDGDQLVFNFATGNHDVVEVDKSGYDGCSTTNAANTIQNGPATVNLTSGTHYYICGFTGHCSAGMKLAVTVGSGSGSGSPTPGGGSPSTPTPTTPSAPTPDTPASASVRLTAGPALAVAATVLVALF

SEQ ID NO: 287861 - protein, 89 aa, Zea mays
  unsure (1)..(89): unsure at all Xaa locations
  Clone ID: MRT4577_25622C.1.pep
RWRPRRESALNHLXNPGDAADGRASKKCEKAEEKAKEIAKMVEMLVELVRRIEKSESXRXARSAVSSQWILVNWWRLADTWRTETKEAL

SEQ ID NO: 287862 - protein, 61 aa, Zea mays
  Clone ID: MRT4577_25623C.1.pep
FIIFFFFFFFFWGFFFFFYQPKETFEGDKQIKYFVCGTALANKRNNKPVSAGTTRLVPLNF

SEQ ID NO: 287863 - protein, 176 aa, Zea mays
  Clone ID: MRT4577_25624C.1.pep
MKKFDDFQLVPTAELHPIMKPCPFRGWGLDFVVEIYPLSLKGYQFVLVATDYFTKWTKVIALKNMTHREISLNVIMFARQNNLAVSDYQDLMMDNIDEVTDKRLMALKEIEKDKIVVAKGYNKKVKAKSFHVGDLVWKTILTLRRRDQKFGKWSPSWEGPYRIIQVMVISGNAYML

SEQ ID NO: 287864 - protein, 48 aa, Zea mays
  Clone ID: MRT4577_25625C.1.pep
GTSRNQSVASQFTFESLEPINELASNKDPTTLFKPVLLVKPLYALPRK

SEQ ID NO: 287865 - protein, 83 aa, Zea mays
  Clone ID: MRT4577_25626C.1.pep
TTSSIYPYEQRYCPLSISQKMRWSKQTMLYMMGRFWPSYLSTPKSYFSAYPHAILYPWEKRRVKDNNMEASFHSCSLVFSPWA

SEQ ID NO: 287866 - protein, 142 aa, Zea mays
  Clone ID: MRT4577_25627C.1.pep
MAARLALLILATTFLLSAAADGGSTNCPSPPMTPTPTTPQPPPSDGGGGGGGNGSAGSCPIDALKLEVCANVLNLLRLNIGVPDDEQCCPLLQGLADLDAAVCLCLAIRANILGIVLNVPIDLTLLLNYCHKDRVASFTCPA

SEQ ID NO: 287867 - protein, 42 aa, Zea mays
  Clone ID: MRT4577_25628C.1.pep
WKFKLYWSIERLIILVNTWSEEPSENDKCVKSKLENGYARVI

SEQ ID NO: 287868 - protein, 85 aa, Zea mays
  Clone ID: MRT4577_25629C.1.pep
GPTSTLNSVLQQQQYRNNLRHNIPHPASRRSIELSRCLHHSTSLIRCYCRCSTSPIPSIYDRLRTCKRARLPVPARACSLRMPPT

SEQ ID NO: 287869 - protein, 54 aa, Zea mays
  Clone ID: MRT4577_2562C.1.pep
RKGIAADGFDVLSFHSCISSHAHKQFPSSLCIQTWFFCSLSQVVLFHSEFGFFS

SEQ ID NO: 287870 - protein, 78 aa, Zea mays
  Clone ID: MRT4577_25630C.1.pep
TKKKKGRGVCRSHVLKHPPSHAQANINLNAQFNSPSRSVKARAFQNPDGPNSYAFQQMPLSPKGPFPKRPQPNSPPTN

SEQ ID NO: 287871 - protein, 71 aa, Zea mays
  Clone ID: MRT4577_25631C.1.pep
RAAILGDLCSLTANTLIMASTEPTGLTCALTVYAPADSFRNTLTSEPNSICPCLLISCLTFLMIRDVPTVL

SEQ ID NO: 287872 - protein, 65 aa, Zea mays
  Clone ID: MRT4577_25632C.1.pep
SASYNYHTATSYLLIQPRPCIHSKQLFLITSLNLLITNTLAYIPTSLYKITHTSLTHTFTTYMTF

SEQ ID NO: 287873 - protein, 183 aa, Zea mays
  unsure (1)..(183): unsure at all Xaa locations
  Clone ID: MRT4577_25633C.1.pep
MIKASTPSRETVTSVWDQDMVVYPGFKVDIDLNDETVTTTFVKRHLTGELENKDDPNIGXEADTMEFPTRWVKSSVYCXDTSERSVNDVGPRNAYEIHAHGESILLSETYLITYKNVPTCDKKLCRYSEXIRIDLCFNKXDVXSWNVSCKLRSFHRHINLLYDELTVESNYNXFEIPFLYLAR

SEQ ID NO: 287874 - protein, 95 aa, Zea mays
  unsure (1)..(95): unsure at all Xaa locations
  Clone ID: MRT4577_25634C.1.pep
MMRALAXWWPCWPXAFFAVPARAEQCGSQAGGALCPNCLCCSQFGWCMSTSDYCASASQRQSRTCWGSAPNPPKNGMETSIIPXSLLHKMTAAHA

SEQ ID NO: 287875 - protein, 446 aa, Zea mays
  Clone ID: MRT4577_25635C.1.pep
MPLRGRSRCQGDFSQNMNTFHAQPSFPRSYDRNTQEVAGQRIRSDANSVMHHAGNVDNVKEENPDDFMTLVANCLGLGRERTKNRKRCRVPTSSRTLSTTTPDNIPIGLQKNPQEPPMSDYAGRAHILYPVLDSSKRSLDIPSSTSTLAQKMVKHPSSRWFNDCQPQLRLDMPVCQKMLIWARMMLVNHEDRSMLQKSDIYRSVLASLYCFQADPSLVAAFLTYWNVDGHTLVTSQGEMGYPLHTISNAMGIPISGRLYEEFIPPCFDVHGHLETLYTIYASLCPSELQPGLGLVSPTAWLDHFFDDKADSFGSSLLDGFANPKDPLLQKLRFHVAVQGDRLAAILGAETLSYRSIYPSTVYRAAFITAWLCTYCIPVEAGQYIRPGILHSFVIGFLCQLQSQQQSLPLQVTKLPRIVRVSKTRVTSYNDNQLLAYLMKVGGKPLM

SEQ ID NO: 287876 - protein, 158 aa, Zea mays
  unsure (1)..(158): unsure at all Xaa locations
  Clone ID: MRT4577_25636C.1.pep
MTYITKPFPPGGGEGKETSLTKKTDDIAAPPPKNSSRKKKKAPPPPAKKARTLMRGGPPQGGISRKTKRLVRGGKKKKCFRGGGGPPRAPHTRRSAPPPPRKKMGPPKGGGAGKKXVKEKKPPXGGRKNHRPKKTGPKRGGGQQRGKETRGPAGKKTP

SEQ ID NO: 287877 - protein, 57 aa, Zea mays
  Clone ID: MRT4577_25637C.1.pep
KKTRKKKKKKFQFQIKKLQKRGLYKIHTDNKSPALSLFTPHVYLHLIPTLYPFSTLT

SEQ ID NO: 287878 - protein, 39 aa, Zea mays [sequence omitted]

SEQ ID NO: 287879 - protein, 95 aa, Zea mays
  Clone ID: MRT4577_25639C.1.pep
LSAGVPRFHGLRGYAAPRSEEAALSSVRVSTKRSTSQGMLWDYMGSAINLIMVTTTTLMLFAERFGLALTGNRKATAVLKLEARDLGLHTGDAAW

SEQ ID NO: 287880 - protein, 88 aa, Zea mays
  Clone ID: MRT4577_2563C.1.pep
VQLSCYISFTIYAQQLILHWLTDLLTDYRASLSRVAKTNSLCSYGPTYCTGPSPSLGTANANATKASLSLYLACLIASHQPAGRPRGS

SEQ ID NO: 287881 - protein, 113 aa, Zea mays
  Clone ID: MRT4577_25640C.1.pep
AAFFFFFFLWFFFFFFFFFFFFFFFKKKIKARGHKRIMAQMDKIPGSPGEKKKHILFQKKKGGGKGTFMGQNNHGAGRAHPPTQGCGPNTESIYPGVPPPENPPQQGGKNPLS

SEQ ID NO: 287882 - protein, 34 aa, Zea mays
  Clone ID: MRT4577_25641C.1.pep
LVDALMLQCKSYKKPHTSLLRKGKANPYWSLRQN

SEQ ID NO: 287883 - protein, 83 aa, Zea mays
  Clone ID: MRT4577_25642C.1.pep
MLMGMILQRKSNQRSPLQMFSSNFKNIRAFVLAVKGYPLQWEEFQKCATECGVDTKVGLSIDVATRCHSTYCMLRDALHTRSA

SEQ ID NO: 287884 - protein, 103 aa, Zea mays
  Clone ID: MRT4577_25643C.1.pep
RHGGRNGRSFCPSDGSYTLGVEDGRGQSPEHTVHVRDLTWWYCGLAEHGHRSTTSGILEHFASRRSEGTSAHIPSRADTWHQRINLPPRIMRTMERPATARSC

SEQ ID NO: 287885 - protein, 47 aa, Zea mays
  Clone ID: MRT4577_25644C.1.pep
GGVGETYRRDLKLTNQRPSLVRLSTELTPRSVHDAWNGSWGRARYLA

SEQ ID NO: 287886 - protein, 236 aa, Zea mays
  unsure (1)..(236): unsure at all Xaa locations
  Clone ID: MRT4577_25645C.1.pep
MAGGFRVLHLVRPFLGFLPEVQSADRRIPFREKLIYTVISLFIFLVCSQLPLYGIHSTTGADPFYWLRAILASNRGTVMELGITPIVTSGMVMQLLVGSKIIEVDNSVREDRALLNGAQKLLGILIAIGEAVAYVLSGMYGSVSQLGTGNAILIILQLFFAGIIVICLDELLQKGYGXLGSGISLFIATNICEXIIWKAFSPTTINSGRGAEFXEGLVIGLVHLXITETDKXRALR

SEQ ID NO: 287887 - protein, 400 aa, Zea mays
  unsure (1)..(400): unsure at all Xaa locations
  Clone ID: MRT4577_25646C.1.pep
IEAGRAQVNAREERRGVESRGEQQPASSSSREPNPNSTSKDAVVFHLHPPPPPTNPTPPAPPAGPGLGGRHPPGLPAAVARTRPGGGGAPPRAAXRIRAVDAAQPFDYESRAAGLLEERQRLKIAIVGFGNFGQFLARTFARQGHTLLAHSRTDHTALATTLGATFFADPHDLCECHPDVVLLATSILSAEAVLRSLPVHRLRRNTLFADVLSVKEFPRNLLLSSLPPGFDVICTHPMFGPESARDGWDGLPLVFERVRVGDCPARRARADAFLGAFEREGCRMVEMSCAEHDAHAAETQFLTHTVGRMLATLELRSTPVDTRGYETLIRLVDNTCSDSFDLYNGLFMYNKNSTELLNRLEWAMDSVKKRLFDGLHDVLRKQLFEGSPHAPDVSSSNVRK

SEQ ID NO: 287888 - protein, 77 aa, Zea mays
  Clone ID: MRT4577_25647C.1.pep
MKRNFSNLIEHGIHEPLWLHRIRKGGRYGRHLSFECFPFRQPSPPHRASLVLLAICWNDCSIPYPLLAGPYNGATIC

SEQ ID NO: 287889 - protein, 136 aa, Zea mays
  Clone ID: MRT4577_25648C.1.pep
LRRPLCCPANFSTSVLDAARPPSRSPQLLRPLASCRRPRWPPRAAGGSSPSTSPLRSFCTACYRLPVALPVRRGSSVKLRLSGLTRIDLCSRGVFSASSMVAAMPFWSPSGDISWQGLGRVLCCAVESLMSGCVDM

SEQ ID NO: 287890 - protein, 73 aa, Zea mays
  Clone ID: MRT4577_25649C.1.pep
HQRWPGTRKHRTVPQGGRQLAPGRHAEDEHQGERDPEATCNSRQRTQEKCLRNHNGSRRMAHPKWDHGAQGEE

SEQ ID NO: 287891 - protein, 76 aa, Zea mays
  unsure (1)..(76): unsure at all Xaa locations
  Clone ID: MRT4577_2564C.1.pep
PPPPPHPTPHPPRPNTPKQARPPSPPPPPPAPKPTPATPPSPXPHPPQHTPHNLSPSRVSPPKAHSVLRVFQPMLL

SEQ ID NO: 287892 - protein, 120 aa, Zea mays
  Clone ID: MRT4577_25650C.1.pep
LGHHAAQESTGNRVRKKKSNFNARRRDRKVAKDKASSEFQPPTEAKLESLTHESRGRSEPIRIVGASLTTRAAPVEQQEAGNRQCRRSGEARSTAMNHPQLAAATEVDDRKQGDGGVGEI

SEQ ID NO: 287893 - protein, 320 aa, Zea mays
  unsure (1)..(320): unsure at all Xaa locations
  Clone ID: MRT4577_25651C.1.pep
PASVSICGTAPGSLALDLIEQAEVEVQRLDQLKYSKMKEIAFKKQNELEDIYAGAHIVIDTAAAHEKILALIEAGNIEPSELIADMDAQIAKAKEEALSRKDILDKVERWMSACEEESWLEDYNRDDNRYNSSRGAHLNLKRAEKARILVNKIPALVETLVAKTRAWEENRGLSFMYDGVPLLAMLDEYVMLRQEREEEKKRMREQKRYVEQQLNTDHEGPFGSRVSPNRPASSKKAIGPKLNGSVSNGTPPNRRLSISGQQNGGGHGVRSGGKDSKKDTAKTASPGNSAAATXLWGLTATAKEDAVSQISVTDPVPSTP

SEQ ID NO: 287894 - protein, 82 aa, Zea mays
  Clone ID: MRT4577_25652C.1.pep
PARRERLGRGIPVPGRLAVGPRTANFGQALGLGRVEVPQGRGMKPRLGKLNLGFGPPPHRCCGAPLGWGLGLKERVVVGGRL

SEQ ID NO: 287895 - protein, 660 aa, Zea mays
  unsure (1)..(660): unsure at all Xaa locations
  Clone ID: MRT4577_25653C.1.pep
SRLCGSGSSTASTAVPDSELSAVAAGDRRHPPVSTPVEWSVEPRCGPAFTTSVSFLRLLRLIWLLWSVVAGDITCGSLLQKLQFIWDEVGESEEDRDKVLYQLDQECLDVYKRKVDQATNSRDLLIQALDDSKIELARLLSALGEKAIARTPEKTTGTIKQQLAAIAPTLEQLTKQKNERKREFVNVQSQIDQICGEIAGTXEVGEQMTTPQVNEDDLTLERLEDFRSQLKDLEKEKSXRLEKVLDYVGIVHDLCXVLGMDFLSTVIEVHPSLDDSIGDNCKSISNDTLSKLDNTVATLNEDKKLRLSKLQELAGQLYDLWDLMDAPKEERRMFDHVTCNRSASVDEVTAPGSLALDLIEQAEVEVQRLDQLKYSKMKEIAFKKQNELEDIYAGAHIVIDTAAAHEKILALIEAGNIEPSELIADMDAQIAKAKEEALSRKDILDKVERWMSACEEESWLEDYNRDDNRYNSSRGAHLNLERAEEGEGXSKKDSAKTASPGNSAAATAPVGLTATAKEDAALLAMLDEYVMLRQEREEEKKRMREQKRYVEQQLNTDHEGPFGSRVSPNRPASSKKAIGPKLNGSVSNGTPPNRRLSISGQQNGGGHGVRSGGKDSKKDTAKTASPGNSAAATAPVGLTATAKEDAASQISVTDLVPSTP

SEQ ID NO: 287896 - protein, 110 aa, Zea mays
  unsure (1)..(110): unsure at all Xaa locations
  Clone ID: MRT4577_25654C.1.pep
LNNKGEQAVLLLFSLKKKKKKKKKPPRPALQRANPTPLGAVPRGPSPGPXWGKPXQSGSLGEMGIRPQSPPTXPETLKGKPXGPRGGQPPINGVAPPAPFPAGKPGGPPA

SEQ ID NO: 287897 - protein, 203 aa, Zea mays
  unsure (1)..(203): unsure at all Xaa locations
  Clone ID: MRT4577_25655C.1.pep
MTEKYTEGPRVTAMHKISKKIHWRGGSSASTWDXERRXCSSTTAGANAKTYRICSXRRPXHSAISGGKSADLIQRINKRMSGGMIAGATXFWMLIEAMNYHILTXVCXHCLVVALGMLIRCDTATNFIDKSRHSITEANISYDVDVNDRHPLRYDIQRRYATLTKSGQGHDLKKKLIVIAGLXILFVHRSCWNSLTLCNIALM

SEQ ID NO: 287898 - protein, 436 aa, Zea mays
  unsure (1)..(436): unsure at all Xaa locations
  Clone ID: MRT4577_25656C.1.pep
MASEKHFKYVILGGGVAAGYAAREFAKQGVKPGELAIISKEAVAPYERPALSKGYLFPTNAARLPGFYVCVGSGGEKLLPEWYSEKGIELILSTEIVKADLSTKTLTSAAGANFTYEILLIATGSSVIKLTDFGTQGADSNNILYLREIDDADKLVAAIQAKKGGKAVVVGGGYIGLELSAALKINDFDVTMVFPEPWCMPRXLFTADIAAFYEAYYTNKGVKILKGTLAVGFDADANGDVTAVKLKDGTVLEADIVVVGVGGRPLTTLFKGQVAEEKGGIKTDASFETSVPGVYAIGDVATFPLKMYNELRRVEHVDHSRKSAEQAVKAIKGKESGEPVPEYDYLPYFYSRSFDLAWQFYGDNVGETILFGDSDPTSSKPKFGSYWIKDGKVLGAFLEGGSPDENKVIAKVAKTQPPVANLEELKKDGLQFASKI

SEQ ID NO: 287899 - protein, 181 aa, Zea mays
  unsure (1)..(181): unsure at all Xaa locations
  Clone ID: MRT4577_25657C.1.pep
EHALCDTTNECMSIGPHYNTVSKEHVAPEDENRXGGDLVNLAAGPDGVGNINVSHSQIPLPWPNSIIDITDVVQAFHDPLKNRVHXLSNSTDNHGVHEACRPIGLQALKRSSYCRVRTRSVSDRPQQMSLIIPRHRKIRASLIREHGICLYAPAATNGVIWCWIIRLDPLSMCYSRFSCEQ

SEQ ID NO: 287900 - protein, 71 aa, Zea mays
  Clone ID: MRT4577_25658C.1.pep
NSVAHASFLSRGQSRWTGAAGERHRQSSTVPNGLHCRSRRDARNGCTALCLWRRSGNVTQKCRRFAESGSR

SEQ ID NO: 287901 - protein, 85 aa, Zea mays
  Clone ID: MRT4577_25659C.1.pep
CNSNPETTVSVPLTVKGHHRIMAVGLTTTMSTADLLISLMSIMIHVTAPENKQVILIDRIEELATTWDSLIIPAGMYLYLRLNMG

SEQ ID NO: 287902 - protein, 127 aa, Zea mays
  unsure (1)..(127): unsure at all Xaa locations
  Clone ID: MRT4577_2565C.1.pep
MPRRXSGRSAPRPAPRAAPGRNPPQPARQASSPAPVRDGGGSMLGGIGATIAQGMAFGTGSAMAHRAADAVLGPRTIQHETGASEAAAAAPAPPVMNADACSIHSKAFQDWLNNYGSEISKCQFYLD

SEQ ID NO: 287903 - protein, 292 aa, Zea mays
  unsure (1)..(292): unsure at all Xaa locations
  Clone ID: MRT4577_25660C.1.pep
IGYLEAGREKIALAHGGRDVRGKPMGIDYHDFVGIMLLLIINSTISFIEENNAGNAAAALMARLAPKSKVLRDGTWSEMDASLLVPGDIISIKLGDIIPADARLLEGDPLKIDQSALTGESLPVTKQPGDGIYSGSTCKQGEIEAVVIATGIHTFFGKAAHLVESTTHVGHFQKVLTSIGNFCICSIAAGMTIELIVMYAIHAREYRQIVDNLLVLLIGGIPIAMPTVLSVTMAIGSHKLAQQGAITKRMTAIEEMAWMDVLCSDKTGTLTLNKLSVDKNLIEVFXQGMEKD

SEQ ID NO: 287904 - protein, 102 aa, Zea mays
  unsure (1)..(102): unsure at all Xaa locations
  Clone ID: MRT4577_25661C.1.pep
MTGRGKGGKGPGKGGAKRHRKVRRDNIQGITKPAIRRLARRGGEKRKTGHNYEETRGAPKNFLEKXIRDADTYTEHARRKTDTAKDSDYAPKRQGRTPNGIG

SEQ ID NO: 287905 - protein, 412 aa, Zea mays
  unsure (1)..(412): unsure at all Xaa locations
  Clone ID: MRT4577_25662C.1.pep
MLSTLRVASRRAARPAQYNLAATRAASNWANVPQGPPDAILGITKAFKADKFDKKINLGVGAYRDDAGKPYVLPSVREAEMKVVESKLNKEYAGITGVPEFPPAAAKLAYGANSPALDRITITQTISGTGALRVGAAFLAKFFPGEKKISGRQPSWANHKAVFNHAGLEVEQYRYYDKKTIGLDFEGLIADVKSAPNGSVFLFHACAHNPTGVDPTQEQWKQISDVVKEKGHFAFFDMAYQGFASGDTDKDAFAVRYFVEQGHNIALCQSFAKNMGLYGERVGAFSMVCADADEKKRVDSQLKILIRPLYSNPPIHGARIAAEILNSPTLYKQWLGEVKEMADRIITMRALLKDNLEKLGSKHDWSHITSQIGMFAYTGLTSEEMTRLAEEFSVYXHQDXRISVAGITSENV

SEQ ID NO: 287906 - protein, 68 aa, Zea mays
  Clone ID: MRT4577_25663C.1.pep
YARRSWILSGARGGVCNNRSNFPVRDHIHTYYTESLKPKVQYYQAPTGKEEKKKTILGRGHKREQDTG

SEQ ID NO: 287907 - protein, 130 aa, Zea mays
  Clone ID: MRT4577_25664C.1.pep
QTTRNVKQSSYNQQHRSLLPYKKSAVQHELSKSNNAGRCSPDCWLPWYLCRLAGCWTAGYIGTSACLAPCLDGACTSVMCLLCCLPPVWLERGRVLHARTAVTTPLDMESWTGTAGRPDKENGIVVWREP

SEQ ID NO: 287908 - protein, 126 aa, Zea mays
  Clone ID: MRT4577_25665C.1.pep
PFPPCQKLIFFFPFPQFPPPGGSPYFKTAPPPGEPQIWVPLRGGKCPPGLIMGKTCSWGKLVSRPNSPQNTNRNQKRKTLGAPRGGPTPINWVGPTAPFPMGKPGWPPPFKNPPPPGERGAGEWAL

SEQ ID NO: 287909 - protein, 155 aa, Zea mays
  unsure (1)..(155): unsure at all Xaa locations
  Clone ID: MRT4577_25666C.1.pep
FGKEFFLDLHFCLILGFFPYLFIYDTLVVLCLFHVTCLFIFFIFIYLHFFLFFFISFFYSFLFFIFFIFILWLLCFLYIYIFFILIFFYFFYIXFLIFFLFVFFFIIIFFFXIFIFYVLYSFFLILFFHINFFVLSSLYIYSLFFIFLLISFLIF

SEQ ID NO: 287910 - protein, 164 aa, Zea mays
  unsure (1)..(164): unsure at all Xaa locations
  Clone ID: MRT4577_25667C.1.pep
MRAAVNTPPPRCYSRRRASATLLEARYVFDHVPQRRLPSLAAELRARPASVAARRPARRSAASAAAPTCGAASVTRLFRALLQIPTAYSSISRVRLAPAAFLPARYNFEGYIPRSCSSSLQIYSRSSMLNLPPSSAFSXGXSQLSPPSDVXXQRSEGXWFASFR

SEQ ID NO: 287911 - protein, 70 aa, Zea mays
  Clone ID: MRT4577_25668C.1.pep
LHAHASVGPLPRPPSFFFFFFFFFFFGLFFFISHFFFNISFPQNTIIPKFNISQTEKQEFLDYDAPPRAL

SEQ ID NO: 287912 - protein, 57 aa, Zea mays
  Clone ID: MRT4577_25669C.1.pep
WFTAHQPRGNARFQAIRLIGSIPEDETIPRRSSWSTLRESQMHALGSLYRRGRGEQT

SEQ ID NO: 287913 - protein, 139 aa, Zea mays
  Clone ID: MRT4577_2566C.1.pep
MAGRNSGWSAPRPAPRAATVRNPPQPARQAPPPAPVRDGGGSMFGGIGSTIAQGMAHGTDSAMAHRAVDAVLGPRTIQHETVASEAAAAAPAPPVMNADACSIHSKAFQDCLNNYGSEISKCQFYLDMLYECRRGGVSA

SEQ ID NO: 287914 - protein, 76 aa, Zea mays
  Clone ID: MRT4577_25670C.1.pep
TRARSPWPRCTRRRRRVGPPAATVRLTSGGVPPLPSSSPTAGPLAASSQTMVPCCPGALGAGASQKDSVPLRTRGP

SEQ ID NO: 287915 - protein, 121 aa, Zea mays
  unsure (1)..(121): unsure at all Xaa locations
  Clone ID: MRT4577_25671C.1.pep
PPQQPHPTQPPTKPIPPPPXQPPPPLPVKPHPYPRPSSPSSXGPNPXNVPVKCNASINPVQPVSPPVDRGPPPPPRQTAGLVGLSPPPPQCNEITRGPWARYVPDPIFSIPIITCSSIGPS

SEQ ID NO: 287916 - protein, 86 aa, Zea mays
  Clone ID: MRT4577_25672C.1.pep
PGPTHSCARSFSHSSSHSSSNATNRGIALIEPSSSPRQWNQIPTQHPSTQANQWATTKQDSPHTLTTLQITHQTQYNHLHTNNTYQ

SEQ ID NO: 287917 - protein, 58 aa, Zea mays
  Clone ID: MRT4577_25673C.1.pep
LYHELSFPLDVPSASSDRSRVELLEPRVHLASVQATSRPSKVRKASTLFMKCASALAY

SEQ ID NO: 287918 - protein, 154 aa, Zea mays
  Clone ID: MRT4577_25674C.1.pep
PPTRPSPLPAPTMPTSRTTKIPRTAEACPSSLSPHSEVVVSSHSMPQPREGKCTGSMPTPPSITRSPCRECRPISPRRRRCAPPRSHPLHDSPVLQVSGHVADPVQPTLGGAHRGLHALIHSYTCRRWRWPSCRMTRKTTTPTTTAPVTRRVPH

SEQ ID NO: 287919 - protein, 45 aa, Zea mays
  Clone ID: MRT4577_25675C.1.pep
MGLVLGVFLESSTQFSPEGSDQMELFPSPLFILIVINANVSLDDR

SEQ ID NO: 287920 - protein, 82 aa, Zea mays
  Clone ID: MRT4577_25676C.1.pep
PPVTDRCQRSKHRSRSLQRSASKKQRAQEEPRRRPFPRQKLSRHQPSPASMDFFRTGEETTLPEHFFSPTGQPLWTSSILSP

SEQ ID NO: 287921 - protein, 78 aa, Zea mays
  Clone ID: MRT4577_25677C.1.pep
TVLKREVQLPWWGLIFACGMAFLFTLPISIITATTNQSPGLNVITEYAMGLIMPGSPIAVVCFKVYGYMSMSQAVAFL

SEQ ID NO: 287922 - protein, 41 aa, Zea mays
  Clone ID: MRT4577_25678C.1.pep
ALDSGTRTSASAGEFASKRISFSASRSVRVLTGAPSLPTYA

SEQ ID NO: 287923 - protein, 63 aa, Zea mays
  Clone ID: MRT4577_25679C.1.pep
SHMEGELFSLGAERGIGAPVSGQEIQLCKQLITRHELPVTESMENPSNVYRSWWLTFCSMVSS

SEQ ID NO: 287924 - protein, 67 aa, Zea mays
  unsure (1)..(67): unsure at all Xaa locations
  Clone ID: MRT4577_2567C.1.pep
MSCSLRLRRSRAGTMYAARKKIQTEKALEPYKFMDSVAQXFXDLESGNQELMSDLKGLCINNAIQMD

SEQ ID NO: 287925 - protein, 63 aa, Zea mays
  unsure (1)..(63): unsure at all Xaa locations
  Clone ID: MRT4577_25680C.1.pep
LDPTPLPEGEEFXPKMKELETFCTPFFAKLSRGGGXNLGGLGGLEEFPPPGRGGPGPKFEEVA

SEQ ID NO: 287926 - protein, 83 aa, Zea mays
  unsure (1)..(83): unsure at all Xaa locations
  Clone ID: MRT4577_25681C.1.pep
RRSRSWSRPSASPSVAXLSASSLAAWRLVRCRARAVGFVLXRRWRFRRGVPCLRRLSXAPAASSCSAVDMVSFVRLEPDSELR

SEQ ID NO: 287927 - protein, 78 aa, Zea mays
  Clone ID: MRT4577_25682C.1.pep
FQTAANYGVLVLNPFKYFGLRFCAFQGNCPPFALYPRAKPVFFLFVIRPFFLVVTPRVFFFFPIPLIPVPLNLGPPGS

SEQ ID NO: 287928 - protein, 74 aa, Zea mays
  Clone ID: MRT4577_25683C.1.pep
ASSGDRVAAVARCRAKWCWLDEMRGGASVHALGSRGVRSTAFFLLLYYSLLFLDAVHSFSSVHIYDAPALINYK

SEQ ID NO: 287929 - protein, 99 aa, Zea mays
  Clone ID: MRT4577_25684C.1.pep
YSSPLPLRNLSRIQIQTCTPPNPAAHNQANKAHDSGIDKPNKAPTRPSTTVKDPIHLTNLRNSSYLNKDSYEDEADDDDRNYVFAASEYYLRSTSRTRW

SEQ ID NO: 287930 - protein, 488 aa, Zea mays
  Clone ID: MRT4577_25685C.1.pep
MVRLPYTTALTTLFSYGLLFAFGQLRDFFRKFVDWFKAKNVKGYAPICLGLEDFYVRRLYLRIQDCFGRPIASAPDSWFDVVERTSKDNNKTLQRTSNTTRCLNLGSYNYLGFAAADEYCTPRVIESLKKYSASTCSVRVDGGTTKLHNELEELAARFVGKPAAILFGMGYVTNSAIIPCLIGKGGLIISDSLNHNSIVNGARGSGATVRVFQHNSPAHLEEVLREQIAGGQPRTHRPWKKIIVIVEGIYSMEGELCKLPEIIAVAKKYKAYTYLDEAHSIGAVGQSGRGVCELLGVDPADVDIMMGTFTKSFGSCGGYIAASKEIIQHLKHSCPAHLYATSMSPPAVQQVISAIKVILGEDGSNRGAQKLARIRENSNFFRSELKKMGFEVLGDNDSPVMPIMLYNPAKIPAFSRECLRQKVAVVTVAFPATPLLLARARICISASHTREDLMKALDVISRVGDLVGIKYFPAEPPKIAGADHDKLE

SEQ ID NO: 287931 - protein, 488 aa, Zea mays
  Clone ID: MRT4577_25686C.1.pep
MVRLPYTTALTTLFSYGLLFAFGQLRDFFRKFVDWFKAKNVKGYAPICLGLEDFYVRRLYLRIQDCFGRPIASAPDSWFDVVERTSNDNNKTLQRTSNTTKCLNLGSYNYLGFAAADEYCTPRVIDSLKKYSASTCSVRVDGGTTKLHTELEELTARFVGKPAAILFGMGYVTNSAIIPCLIGKGGLIISDSLNHNSIVNGARGSGATVRVFQHNSPAHLEEVLREQIAGGQPRTHRPWKKIIVIVEGIYSMEGELCKLPEIIAVCKKYKAYTYLDEAHSIGAVGQSGRGVCELLGVDPADVDIMMGTFTKSFGSCGGYIAASKEIIKHLKHSCPAHLYATSMSPPAVQQVISAIKVILGEDGSSRGAQKLARIRENGNFFRSELKKMGFEVLGDNDSPVMPIMLYNPAKIPAFSRECLRQKVAVVTVAFPATPLLLARARICISASHTREDLMKALDVISRVGDLVGIKYFPAEPPKIAGADHDKLE

SEQ ID NO: 287932 - protein, 180 aa, Zea mays
  unsure (1)..(180): unsure at all Xaa locations
  Clone ID: MRT4577_25687C.1.pep
MSSPHGGLDDQIERLMQCKPLAEPEVRALCEKAKEILMEESNVQPVKSPVTICGDIRGQFHDLAELFRIGGKLLVALKVRYPQRITILRGNHESRQITQVYGFYDECLRKYGNANVWKTFTDLFDYFPLTALVESEIFCLHGGLSPSIETLDNIRNFDRVQEVPHEGPXLCDLLWADPDD

SEQ ID NO: 287933 - protein, 122 aa, Zea mays
  unsure (1)..(122): unsure at all Xaa locations
  Clone ID: MRT4577_25688C.1.pep
FPVPKVNKPEVRQNKEYGEWPAHTNPGPGTRGPWFQNIIKSPSYQGKWKALIIDTAAFKNVPYFCALDSLKYMAISMGQVKXGPLFWHIIIRYGPXALANIFAKKPWGKHKEATKAALDETE

SEQ ID NO: 287934 - protein, 223 aa, Zea mays
  Clone ID: MRT4577_25689C.1.pep
MSTAKVLDPAFQGAGQKVGTEIWRIEDFKPVPLPKSDYGKFYCGDSYIVLQTTCTKGGAYLYDIHFWIGKDSSQDEAGTAAIKTVELDAILGGRAIQHRELQGYESDKFLSYFKPCIIPLEGGFASGFKKPEEEKFETRLYICRGKRAIRVKEVPFARSSLNHDDVFVLDAENKIYQFNGANSNIQERAKALEVIQHLKEKYLDILNLFLSILNMLRSMQSDN

SEQ ID NO: 287935 - protein, 83 aa, Zea mays
  Clone ID: MRT4577_2568C.1.pep
NMEKRYGRRKHANARSSYLGEAIHAVESFLVGSLVVGAHIHVLVVLAAVLSVVIYERVATPQIDVVAEQMTSSGGVRSGDPGR

SEQ ID NO: 287936 - protein, 307 aa, Zea mays
  Clone ID: MRT4577_25690C.1.pep
MSSPHGGLDDQIERLMQCKPLAEPEVRALCEKAKEILMEESNVQPVKSPVTICGDIHGQFHDLAELFRIGGKCPDTNYLFMGDYVDRGYYSVETVTLLVALKVRYPQRITILRGNHESRQITQVYGFYDECLRKYGNANVWKTFTDLFDYFPLTALVESEIFCLHGGLSPSIETLDNIRNFDRVQEVPHEGPMCDLLWSDPDDRCGWGISPRGAGYTFGQDISEQFNHTNSLRLIARAHQLVMEGFNWAHEQKVVTIFSAPNYCYRCGNMASILEVDDCREHTFIQFEPAPRRGEPDVTRRTPDYFL

SEQ ID NO: 287937 - protein, 55 aa, Zea mays
  Clone ID: MRT4577_25691C.1.pep
SKRWNENNYDNEDRIVRGENRDKNGNGSVNVSVEHIHGVSYGMDNLKDVLGYVCR

SEQ ID NO: 287938 - protein, 76 aa, Zea mays
  unsure (1)..(76): unsure at all Xaa locations
  Clone ID: MRT4577_25692C.1.pep
MARTKHTARKSTGGKAPRKQLATKAVRKSAPTTGGVKNPHRYRPCTVALFEIRKFQKSTVLLIRKLPFXQCLVREI

SEQ ID NO: 287939 - protein, 216 aa, Zea mays
  Clone ID: MRT4577_25693C.1.pep
YNTCLTLSEVLCAVRSALNCFSSQPYVIKEGRIQGLLRADYVAANSISRYCAYLLVKEPDLLPDSYLAADDLFRSTIHEANSDVLSGCDTLQSIYRALIREGGDQRQQQGGSDSNTTTLEKAGQLAGSLIHQFTDEKARWKFLAEVWADILVHTAPSWNAAAHKKCLATGGEFITHIWAILSHCNVQSSRRWPRQESPQDDDEVVAENHALSQQVV

SEQ ID NO: 287940 - protein, 85 aa, Zea mays
  Clone ID: MRT4577_25694C.1.pep
CIERPCMVPGISLWIGLLNVTHRLGFMTLRISLQPRHRCCVPYGLQCYSRNFDSCCAPPIYILIYGRYTRPLYRSRRFLFCFGIS

SEQ ID NO: 287941 - protein, 114 aa, Zea mays
  unsure (1)..(114): unsure at all Xaa locations
  Clone ID: MRT4577_25695C.1.pep
MEKQEHLPRGERXYDINSQLLKERVXCIHGPITDXRDSLDAAQMLFLENENPAKPGHLYINSPGGDDTEGLDIYDTMQXIRSTATTLCIGHDAAMASDTPRRGAPAGRDRRLPN

SEQ ID NO: 287942 - protein, 474 aa, Zea mays
  unsure (1)..(474): unsure at all Xaa locations
  Clone ID: MRT4577_25696C.1.pep
MAKTPSFAVAAVAGGRGPVHNRTQLLLLLLVAVAASASTAGFLLRGALRDPCDGRGDPAALNTAVASGSPLGFMRSKLVLLVSHELSLSGGPLLLMELAFLLRHVGSQVVWITNQRSQETNDVTYSLEHRMLNHGVQVLPARGQEAVDIALKADLVILNTAVAGKWLDPVLKDHVPKVLPKILWWIHEMRGHYFKVEYVKHLPFVAGAMIDSHTTAEYWNSRTSDRLKIQMPQTYVVHLGNSKELMEVAEDNVARRVLREHIRESLGVRSEDLLFAIINSVSRGKGQDLFLQAFYQALQLIQHEKLKVPRIHAVVVGSDVNAQTKFETQLRDFVVKNTIHDRVHFVNKTLAVAPXYLAAIDVLVQNSQGRGECFERITIEAMAFKLPVLGTAAGGTTEIVLDGSTGLLHPAGKEGVAPLAKNIVRLASHAEQRVSMGEKGYGRVKEMFMEHHMAERIAAVLKDVLRKSQEHSRS

SEQ ID NO: 287943 - protein, 165 aa, Zea mays
  Clone ID: MRT4577_25697C.1.pep
IEARKGQARRYTGGGGKKKKGRWEGGRKQEEEGRPTITREESKRGSGREKGRAPTNKQAGCQGRGMHHGRTGVNRQTSEKKASREGRPDNGPARNKEASPLINAREAGTPCGASSHEKRSKNTPSRKEPTPPACPARREHAASTKEIGGPPLQQGFVEGSTTPPP

SEQ ID NO: 287944 - protein, 54 aa, Zea mays
  Clone ID: MRT4577_25698C.1.pep
CLYADTGGRSNMRGEGPTEPIKRSMTCHCMQNYTLLLGETPSVTRLNQRKESLL

SEQ ID NO: 287945 - protein, 161 aa, Zea mays
  Clone ID: MRT4577_25699C.1.pep
SPITASRLGGLLARVVKHIVGSDDVYPQGGAMSETPESDTPYAHRQGYLYNVQYFVKWGGDANVSYEDAHLAWVRGVHRFMTPYASARPRAAYVNFRDLDLGQNLEGETSYEAARAWGEMYFRGNFRRLAMVKAEVDPDQVFWSEQSIPPLLQTNGMLSDT

SEQ ID NO: 287946 - protein, 1118 aa, Zea mays
  Clone ID: MRT4577_2569C.1.pep
MTTSPPPAEQEQQEEEEVLVPHGPHQELPNGAQPMEVVPAEPAATVENQQIEDPPISRFTWTIENLSRVSTKKLYSEIFVVGGYKWRILIFPRGNNVEFLSMYLDVADSGVLPYGWTRYAQFSLSVVNQIHNKFTIRKETQHQFSARESDWGFTSFMPLGELYNPSRGYLVNDTCIVEAEVAVCKVVEYWSYDSKKETGYVGLKNQGATCYMNSLLQTLYHIPYFRKAVYHMPTTENDMPSGSIPLALQSLFYKLQYNDSSVSTKELTKSFGWDMHDSFMQHDVQELNRVLSEKLEDKMKGTVVEGTIQQLFEGHHMNYIECINVDFKSTRKESFYDLQLDVKGCQDVYASFDKYVEVEQLEGDNKYHADKHGLQDAKKGVLFIDFPPVLQLQLKRFEYDFMRDTMVKINDRYEFPLQLDLDRDNGKYLSPDADRNVRNLYTLHSVLVHSGGVHGGHYYAFIRPTLSDQWFKFDDERVTKEDAKRALEEQYGGEEELPQTNPGLNNTPFKFTKYSNAYPTVYIRESDKDKIICNVDEKDIAEHLRIRLENDREEKERRKKEKAEAHLYTIIKVARDDDLKTQIGKDIYFDLVDHDKVPSFRIQKQMAFAQFKEEVAKEFGIPTQFQRFWLWAKRQNHTYRPNRPLCPQDEAHTVGQLKELVNKAHNAELKLFLEVELGLDLKPLPLPDKTREDIFLLFKLYEPEKEQLRYVGRLFVKASGRPQDILPKLKMLAGFSQDDDIELYEEIKFEPNVMCEYIDNRLLFRSCQLEDGDIICFQKSSKADSADRYRFPDVPSFLTYIRNRQVVHFRSLEKPKEDDFFLEMSKIFTYDQVVEKVAEKLGVDDPSKIRLTSHNCYSQQPKPQPIKYRGVERLLDMLIHYNQTSDILYYEVLDIPLPELQALKTLKVTYHHATKDEVSVHSIRLPKNSTVGDVLNDIKTKVELSHPNAELRLLEVFYHKIYKVFAPNEKIENINDQYWTLRAEEVPDEEKNLGPFDRLIHVYHFTKDTQNQTQVQNFGEPFFMVIREDETLSSIKERIQRKLKIPDEDFSKWKFAYISLGRPDYFEDSDTVALKFQRNMYGAWEQYLGLEHPDTAPRKAHTINQNRHSFERPVKIYN

SEQ ID NO: 287947 - protein, 537 aa, Zea mays
  unsure (1)..(537): unsure at all Xaa locations
  Clone ID: MRT4577_256C.1.pep
MEAEDVAWICHLALPRLTLDLLPRLVVATCYTGGRRTSSAFLLLSRSRGGRSTVHLARRPKQPMSSSGPSPATGIHASPPLGLLPATGTHHTRSWGKTTSTSFTGSTTKHEQSLHGNVKPLQLAANESSRLAYRSPALKNQWNLPASSSSTNVVTTFDDNEHVSSSVIEEKVGVLLLNLGGPETLDDVQPFLFNLFADPDIIRLPRLFRFLQRPLAKLISTFRAPKSKEGYASIGGGSPLRKITDEQANALKIALEKKKLNANIYVGMRYWYPFTEEAIDQIKKDKITKLVVLPLYPQYSISTSGSSIRVLQDIVKEDSYFSGLPISIIESWYQRDGYVKSMSDLIEKELSAFSNPEEVMIFFSAHGVPLTYVEDAGDPYRDQMEDCIALIMGELRSRGILNSHTLAYQSRVGPVQWLKPYTDEVLVELGQKGVKSLLAVPVSFVSEHIETLEEIDMEYKELALESGIKNWGRVPALGITSTFLSPLADGVLAARPSASTPASRKPDDSPCCFVXSTLPFALLLWPKLGSSFRSTML

SEQ ID NO: 287948 - protein, 149 aa, Zea mays
  Clone ID: MRT4577_25700C.1.pep
MMMSAKKIAHLAKKWQRMAAQGRKRLTLGAAAAKEVDECCGSVASKGHCAVYTADGARFEVPLACLSTPVFRELLQMSQEEFGFAGGDGTGRITLACDAAVMEYAMCLLRRGASAELEQAFLSTMAMSCHCASYMAPYVGRARQHQIVV

SEQ ID NO: 287949 - protein, 166 aa, Zea mays
  Clone ID: MRT4577_25701C.1.pep
GDWDPRGRPGPASPPLAPALVPLTQPFAQTTHPLHLRASSSDLAACRPYDARHPHPGAWPCLRPPLPPPPVPLPHTPAPLSCPSPLAHPLPSTISMLGALTTSPTASELIAFPHSPNEIFASDPPIDVDAIMENELRKKDGGADVEHLRSVTLSPATWVGRGTSFM

SEQ ID NO: 287950 - protein, 45 aa, Zea mays
  Clone ID: MRT4577_25702C.1.pep
SKIINPTILQVFPGTWPNRILNTVTKHHTVLPIEFRLRLPTYSHA

SEQ ID NO: 287951 - protein, 202 aa, Zea mays
  unsure (1)..(202): unsure at all Xaa locations
  Clone ID: MRT4577_25703C.1.pep
MMEKRHGGDGGAGAGGFTVLHLLGAGVLAFLLPRAAGATDDAKWHAHAXPPLXQRRRHXVGHGAPAPHVHAAGLPPLSAPAPTAGADDLPPPPAPVPTSVSSPPSREPGPHFGFPLQPGPGTASAAAPGLGPGGEGYPFIGSNPTVPLPTGTTNTATVLPLTDTGDAAAATTKVVGLAASLGARVSMIGLGISLATLSLSKI

SEQ ID NO: 287952 - protein, 37 aa, Zea mays
  Clone ID: MRT4577_25704C.1.pep
TSTCQNPNMRRKLYIFFVSVCYFPLFSLNSPLFHFQT

SEQ ID NO: 287953 - protein, 138 aa, Zea mays
  unsure (1)..(138): unsure at all Xaa locations
  Clone ID: MRT4577_25705C.1.pep
KNRRRRGHETAGHGRXGKHRKHPAGXRHAGGTHHHRXPADKHXXGXYGEVVMRYFHKLRNKIYCSVXHIERLWSMVLTDKASEAGGYTAPHIDVPLVCFFKVLGKXLLLPANPIVAKAQLICNGAANKIKASGGARVL

SEQ ID NO: 287954 - protein, 59 aa, Zea mays
  Clone ID: MRT4577_25706C.1.pep
LFWSVKFGRCGNLGPRRGPFHCFWGGGFVFKPPPVKGPGFYQVPWEGFHFKTPKRKGPR

SEQ ID NO: 287955 - protein, 70 aa, Zea mays
  Clone ID: MRT4577_25707C.1.pep
PAGSICTGGSVFSTSMILVSSSRQRDMAESRCSSRFMNLPFLNKYKCLILVKGNSVSSMEPAMNIQEWLV

SEQ ID NO: 287956 - protein, 54 aa, Zea mays
  unsure (1)..(54): unsure at all Xaa locations
  Clone ID: MRT4577_25708C.1.pep
LILCQMVDPPRKATFSVCICINCTSLXSCQSYLXIIYIYIRTPKPGKFLKWQAE

SEQ ID NO: 287957 - protein, 50 aa, Zea mays
  Clone ID: MRT4577_25709C.1.pep
MRPVFVGNLDYDTRHSELDHLFYRYGRVERIDMKSGTTRAKHSSPGLLNS

SEQ ID NO: 287958 - protein, 61 aa, Zea mays
  unsure (1)..(61): unsure at all Xaa locations
  Clone ID: MRT4577_2570C.1.pep
CNPIAIDMQFKISLPSVHHFSYHSPPIFQVQRGGGVSYPLIXFXXLQXXTHPXXQQXSXHS

SEQ ID NO: 287959 - protein, 77 aa, Zea mays
  Clone ID: MRT4577_25710C.1.pep
HHYARPTPARNRNEYRACSLPTPVRISHGSADQLRGECIRAYLPTWWSRILLASCAWLAGLACVLELVLVARGSGIV

SEQ ID NO: 287960 - protein, 72 aa, Zea mays
  Clone ID: MRT4577_25711C.1.pep
PESPHTPTAATSLHQAPLPRAQPTQEQSQPPPIKNLSVKECALSPDSPFLIFNFNLNSVIQCMCVCVRLCDQ

SEQ ID NO: 287961 - protein, 51 aa, Zea mays
  Clone ID: MRT4577_25712C.1.pep
FITFCLSLILNLLIYSPASISSPPLLQLLFTHQHSTFHHIIITPFSILTSP

SEQ ID NO: 287962 - protein, 69 aa, Zea mays
  unsure (1)..(69): unsure at all Xaa locations
  Clone ID: MRT4577_25713C.1.pep
SGFSKDEDGILRRCLSEGTVLRGQLNSLEEPLLRLNLSXVCKFGFSLPGDNVMHIRSCYCYSHIKLLYT

SEQ ID NO: 287963 - protein, 81 aa, Zea mays
  Clone ID: MRT4577_25714C.1.pep
VHRSSAGVYIFVIVRFVRCGTKMVGWSAAKSFSGRWVPSPTPMLSPGRAVVGSVPPHFSLVLMVIRCVCRHRCCCFSDGAC

SEQ ID NO: 287964 - protein, 151 aa, Zea mays
  unsure (1)..(151): unsure at all Xaa locations
  Clone ID: MRT4577_25715C.1.pep
AAEPGPAAAATRDRRAGPGXAPASRPAPGATXXRTTAPPPAATAAPPEGTGSEXNSLPWTXPSPTTAPSAAAAXTASSPLRPTSPTPAPAARASSGPPAAGQQEPPXAPAATTTRAPTTAPAPPSGGTRPRCGPGRRASGPTRARTSAACT

SEQ ID NO: 287965 - protein, 84 aa, Zea mays
  Clone ID: MRT4577_25716C.1.pep
LDHCTSTMDAHCSNNGLLLFWIGTSNLAVSSTFHDALVGVDCILNCDSTSKLPASSSENSYLELSIVGSKDDRFSLMRNLPKAV

SEQ ID NO: 287966 - protein, 82 aa, Zea mays
  Clone ID: MRT4577_25717C.1.pep
GGKFLDYSRGMGEHIQKHTLGAQFTWQAGPKGVGIIRLQGKYKGGHTRSKQQFFFNIPGKGTFTNRGAQNMELDFEGDTTLL

SEQ ID NO: 287967 - protein, 66 aa, Zea mays
  Clone ID: MRT4577_25718C.1.pep
CPPHLWFWFQVDRCSTPINGAASLFVIKYTARLGMSWIHSRLSVVLDSWVCSINGLSLCYSICTCL

SEQ ID NO: 287968 - protein, 867 aa, Zea mays
  unsure (1)..(867): unsure at all Xaa locations
  Clone ID: MRT4577_2571C.1.pep
LQYNDSSVSTKELTKSFGWDMHDSFMQHDVQELNRVLSEKLEDKMKXTSGTVVEGTIQQLFEGHHMNYIECINVDFKSTRKESFYDLQLDVKGCQDVYASFDKYVEVERLEGDNKYHADKHGLQDAKKGVLFIDFPPVLQLQLKRFEYDFMRDTMVKINDRYEFPLQLDLDRDNGKYLSPDADRNVRNLYTLHSVLVHSGGVHGGHYYAFIRPTLSDQWFKFDDERVTKEDAKRALEEQYGGEEELPQTNPGLNNTPFKFTKYSNAYMLVYIRESDKDKIICNVDEKDIAEHLRIRLENDREEKERRKKEKAEAHLYTIIKVARDDDLKAQIGKDIYFDLVDHDKVPSFRIQKQMTFAQFKEEVAKEFGIPTQFQRFWLWAKRQNHTYRPNRPLCPQDEAHTVGQLKELVNKAHNAELKLFLEVELGLDLKPLPLPDKTREDIFLFFKLYEPEKEQLRYVGRLFVKASGRPQDILLKLRMLAGFSQDDDIELYEEIKFEPNVMCEYIDNRLLFRSCQLEDGDIICFQKPSKPDSADRYRFPDVPSFLTYIRNRQVVHFRSLEKPKDDEFCLEMSKIFTYDQVVEKVAEKLGVDDPSKIRLTSHNCYSQQPKPQPIKYRGVERLLDMLIHYNQTSDILYYEVLDIPLPELQALKTLKVTYHHATKDEVSVHSIRLPKNSTVGDVLNDIKTKVELSHTNAELRLLEVFYHKIYKVFAPNEKIENINDQYWTLRAEEVPEEEKNLGPFDRLIHVYHFTKDTQNQTQVQNFGEPFFMVIREDETLSSIKERIQKKLKVPDEDFSKWKFAYISLGRPDYFEDSDTVALKFQRNMYGAWEQYLGLEHPDTAPRKAHTANQNRHSFERPVKIYN

SEQ ID NO: 287969 - protein, 341 aa, Zea mays
  unsure (1)..(341): unsure at all Xaa locations
  Clone ID: MRT4577_25720C.1.pep
MDRADPARGRLAVLSSHLRGAGAEEAAGLERSPVSAPAPGPRAGALAVVDGRTGKRHEVKVSEDGTVRATDFKKITTGKDDKGLKIYDPGYLNTAPVRSSICYIDGDEGILRYRGYPIEELAESSSFVEVAYLLMYGNLPTQSQLAGWEFAISQHSAVPQGLLDIIQSMPHDAHPMGVLASAMSTLSVFHPDANPALQGQDLYKSKQVRDKQIVRVLGKAPTIAAAAYLRLAGRPPVLPLNTLSYSENFLYMLDSLXCFILNACFNYAMYDYFHAFKXKQFNCDCTLIYVFXNIKKNQFGRGDRTYKPNPRLARALDILFILHAEHEMNCSTAAXRHLASR

SEQ ID NO: 287970 - protein, 110 aa, Zea mays
  Clone ID: MRT4577_25721C.1.pep
MAGEGDVKLLGTVVSPFAIRVRMALHLKGVSYEYLEQDLFDKGELLLDSNPVHKKVPVLIHVGRPICESLAIVEYVDEVWADGASLLPADPYGRAVARFWAAYIDDKLFP

SEQ ID NO: 287971 - protein, 88 aa, Zea mays
  Clone ID: MRT4577_25722C.1.pep
FLGGQNKQKPAPASRVAKTTPQKPRLTDFRAPTGGTGALPLHFQFSATIRKERNISASSRNGTKNRPTKAAAWGPGRTPAPSPWRHQK

SEQ ID NO: 287972 - protein, 123 aa, Zea mays
  Clone ID: MRT4577_25723C.1.pep
MASEGDVKLLGTVVSPFAVRVRMALHLKGVSYEYLEQDLFDKGELLLASNPVHKKVPVLIHADRPVCESLAIVEYVDQVWTDAASILPADPYGRAVARFWAAYVDDKLFPAWIGILRAATEED

SEQ ID NO: 287973 - protein, 38 aa, Zea mays
  Clone ID: MRT4577_25724C.1.pep
FCSLGSRIDEERSSMLYLARGAHSRVYHSLCTQVDPQG

SEQ ID NO: 287974 - protein, 187 aa, Zea mays
  Clone ID: MRT4577_25725C.1.pep
TIVQSLYRKELQNEGGFTDIEKQVEKQFSSWFKNYIGTLWHERGEDLCSDLLALSCEPDLRIRVYSACIVDGVRYHTVDREKYRRTQNSGVMAQGTHNGEDIEFYGSLREIIQLQYNADKSGHRSVVIFRCDWFDTESKKGRIKDDGLLKSINRSSSWYKNDPFILAPQATMVFYLQDTQYGGSWSV

SEQ ID NO: 287975 - protein, 119 aa, Zea mays
  unsure (1)..(119): unsure at all Xaa locations
  Clone ID: MRT4577_25726C.1.pep
PLGHLWGQXMRAQQLRPLGLANLAAXCEQQQFLAFNQLGSLNSASYLQQQQLPFSQLPAAYPEQFVACNQLAAGNSPADVQAHQLLPFRQLAGVSPDPFLTNHGVXPVYPRGGPNAATL

SEQ ID NO: 287976 - protein, 110 aa, Zea mays
  unsure (1)..(110): unsure at all Xaa locations
  Clone ID: MRT4577_25727C.1.pep
QLAMVNPXSYVQQHQLLSSSPLAAGNAPTYLLQQLLQHIVPSLTQLAVANPVSYLQQLLAFNQLTLSKSAAYLQQLHQSLNPLLVAIPLIXAEYXLRQLLLPYKQFSMMN

SEQ ID NO: 287977 - protein, 112 aa, Zea mays
  unsure (1)..(112): unsure at all Xaa locations
  Clone ID: MRT4577_25728C.1.pep
CWSYADPQQQQLFIGXAALLVATAVLLKLILRYRSRGGKRLPPTIRGAWVDGGLVKFMRGPIGMIRQQHARLGSVFTGRIMTRRSTLLVGPEASAHSFNGNQAEMSQLEVYR

SEQ ID NO: 287978 - protein, 175 aa, Zea mays
  Clone ID: MRT4577_25729C.1.pep
DVQTQPNSAVNGVGVKPRVRARRGQATDPHSIAERLRREKISDRMKNLQDLVPNSNKADKASMLDEIIDYVKFLQLQVKVLSMSRVGAPGAVLPLLTESKTEGYHGQPLPQGLLDALDSEDSFVFEEEVVKLMETSITSAMQYLQSKGLCLMPVALASAISTQKGVSAAAVPPER

SEQ ID NO: 287979 - protein, 106 aa, Zea mays
  Clone ID: MRT4577_2572C.1.pep
EQARGLHACKSSRAGSGTPPLMPCVTTPDGPLLLGTVLLRNRIILMGHYIMCQVDQRVIVYLLTLAAIDEQADILTHLNCPGGSLYSTFTTYACISGVGTKASTVC

SEQ ID NO: 287980 - protein, 47 aa, Zea mays
  Clone ID: MRT4577_25730C.1.pep
SPFFPLGKMVFFKVHLGFNPNFCLWTFLIMEPLSVAFFGPFFYLNVP

SEQ ID NO: 287981 - protein, 82 aa, Zea mays
  unsure (1)..(82): unsure at all Xaa locations
  Clone ID: MRT4577_25731C.1.pep
AEGDRFHRERPCLSRRETVQEQISSSFMDXPPPADLDAXPYWATMLYSKDXLQRMRGRGHCPXGLEEEIRMFQTRVFLGGMN

SEQ ID NO: 287982 - protein, 90 aa, Zea mays
  unsure (1)..(90): unsure at all Xaa locations
  Clone ID: MRT4577_25732C.1.pep
AEKLGKVWQVRHQTKQALTSYAVLYGLCIAAFFSRLSSVICGCFLVLMGEERVFISPFRWDCSSGHTFLGGYXGSKGDWYKAEPLGLKVL

SEQ ID NO: 287983 - protein, 214 aa, Zea mays
  Clone ID: MRT4577_25733C.1.pep
MDMDSSSSWLHGYATTNGFMCGGYAASPAEVQCVEDEQQQFLISSQIQHHLNQISMRMNMDDEAAAAVDMHDLLEDLDDPRRAGAGACSFPSSSSSSSLSLSLPASASLSCGPESSSPSPHILGAVAAPASGGCNQQYPEVSSHVPLVPPPPTVLPSYSNLHAPAARATGGAFKHYARHLGPTRTPTKPGACGQKMFKTAMSVLSKMHVAARYS

SEQ ID NO: 287984 - protein, 129 aa, Zea mays
  unsure (1)..(129): unsure at all Xaa locations
  Clone ID: MRT4577_25734C.1.pep
MALAXEANDGSVVFGEEQEALVLKSWALMKNDIRNLCLRFLLKVFEIAPTAKXCPCCCADSDVPLEKNPKLKTHAMYDFVMTCEATAQLRKACKVTMRETTLNRLCATHLRLSVSDXHFEDTDFALLDT

SEQ ID NO: 287985 - protein, 179 aa, Zea mays
  unsure (1)..(179): unsure at all Xaa locations
  Clone ID: MRT4577_25735C.1.pep
QHITDLTARCSCLPRRWCPARISEEIGGAGPAERMWKVVLLRDNSLLXPXACAVYVNAVDDDGTAGPAVLXTMKLIPSIAXNKTLKSCLAPLDAAARVLRTYVLQGGTVSAQLRTHLGEISTDARGHGACPITVTGEYKSLKLASVTPEDEARHQQENDLLDVMETVYLELHASISSEA

SEQ ID NO: 287986 - protein, 82 aa, Zea mays
  unsure (1)..(82): unsure at all Xaa locations
  Clone ID: MRT4577_25736C.1.pep
VECLPSPSXTSASSTTSPKPXHPRLIRNAAAVFTTTPSTLVAMGDAVEHLKSGFQKFKTEVYDKKPELFEPLKAGQAPKVRD

SEQ ID NO: 287987 - protein, 133 aa, Zea mays
  Clone ID: MRT4577_25737C.1.pep
NITVTLFIKLTIMSDCFVGLTEFFFFGLHSCSVLSTVSASSRGQLLKSCEQDLVFDRGRRLAADRQRQENPGECCRRTPVCTTVPRLCGLWGQLGFCVQRRWNSLMCSDVQPCPQCMRVVHSRAAATWKSLSI

SEQ ID NO: 287988 - protein, 122 aa, Zea mays
  Clone ID: MRT4577_25738C.1.pep
CRIARQRGCDGAARGWTEPCCGLTARGMGACQGRRMHSNEKLRKKREEKMLIGDEEDDWRNAALMAKRWRTAMLRHTTSCAATRAAGCCCWIEDDGGARCEGAERAARRERGAWGSSAPDAW

SEQ ID NO: 287989 - protein, 429 aa, Zea mays
  Clone ID: MRT4577_25739C.1.pep
MAPSLVVSARHGHAHAVPHRRGRRQRVVVASSGGAGPPPKLVTFLGKGGSGKTTAATIAAQYYASEGFKTCLVVQSQDPTAEHLMGSKIGNSLTECVANLSAIKLETGKLLLEPLDRLKKVDAQVNFTQGILEGIVGEELGVLPGMDSICLVLALQKLLNFFSSGRSNSQSEFDVIVYDCNNTEEILRLIGAADRARSYLRYVRDLAEKTDIGRLASPSLLKLIYDSARPNGKISEGRLSTEIWNEIEQLLEKISVWFADPSKLACFLIMDPRTSISVSSALRYWGCTTQAGGQICGAFGYTEDPSEMHREVAQKFVPLSLSFLPFLPNDSSVDWSRALSSLSQNTKEQLRNASTWVYPSVSFDSVQKSVTLFMPGFDKSEIKLYQYRGGSELLIEAGDQRRVIKLPLTMQGKVQGAKFVDRNLVVSIR

SEQ ID NO: 287990 - protein, 68 aa, Zea mays
  Clone ID: MRT4577_2573C.1.pep
NCRTGHVPGVKHIKLYLDTGHDHSDQRSEELTHKEAVSPFVVLEPPKSWGTTKALPCCNICGYPKIWE

SEQ ID NO: 287991 - protein, 88 aa, Zea mays
  unsure (1)..(88): unsure at all Xaa locations
  Clone ID: MRT4577_25740C.1.pep
EAGIGGKYGTRDGASLRXSNKKMRXSQHSKYFCPVLXKFAGERKALXIWGCQDCGKGKAGGAFTMNTASAGTGRSTIPRLGGQDRSMI

SEQ ID NO: 287992 - protein, 51 aa, Zea mays
  Clone ID: MRT4577_25741C.1.pep
ENAERRSSYTADGLGTWRASPRLIRRRSSKHGTWTTVKRTRRFVIMVRPTN

SEQ ID NO: 287993 - protein, 503 aa, Zea mays
  Clone ID: MRT4577_25742C.1.pep
MSTTTLQLVPWPPEPARAAVLLVAAVVCLWVLLSRRRAAGGSKDKERAARLPPGSFGWPLVGETLDFVSCAYSSRPEAFVDKRRLLHGSAVFRSHLFGSATVVTSDAEVSRFVLHSDARAFVPWYPRSLTELMGESSILLINGSLQRRVHGLVGAFFKSPQLKAQVTADMQRRLAPALAAWKVRCASAPPLRIQDHAKTIVFEILVRGLIGLEAGPEMQQLKHQFQEFIVGLMSLPIKLPGTRLYRSLQAKKRMATLIQGIIQEKRRRRRAALEDGGEGEGEAGPPRDVIDVLISGGDELTDELISDNMIDLMIPAEDSVPVLITLAVKYLSECPLALQQLEEENMQLKRRKTDVGETLQWTDYMSLSFTQHVITETLRMGNIINGIMRKAVRDVEVKGHLIPKGWCVFVYFRSVHLDDKRYDEPYRFNPWRWKEKDTSTMGFTPFGGGQRLCPGLDLARLEASIFLHHLVTSFRWVAEEDHIVNFPTVRLKRGMPVRLTSKD

SEQ ID NO: 287994 - protein, 120 aa, Zea mays
  Clone ID: MRT4577_25743C.1.pep
TGFKYEENTVKAVQCLNDIVTNALIHAEECLQYMSALKNHAIFRFCAIPQIMAIGTCALCYNNVHVFRGVVRMRRGLTARIIDETNSMSDVYTAFYEFSSLIESKVQYMEHYCCCSLHGV

SEQ ID NO: 287995 - protein, 312 aa, Zea mays
  unsure (1)..(312): unsure at all Xaa locations
  Clone ID: MRT4577_25744C.1.pep
MNEFWCGQQIVFEILVRGLIGLEAGPEMQQLKHQFQEFIVGLMSLPIKLPGTRLYRSLQAKKRMATLIQGIIQEKRRRRRAALEDGGEGEGEAGPPRDVIDVLISRGRPGTVPSLFRFLSLQGPGEGGIXIELTISGRLLQRFTERRTAMXEENMQLKRRKTDVGETLQWTDYMSLSFTQHVITETLRMGNIINGIMRKAVRDVEVKGHLIPKGWCVFVYFRSVHLDDKRYDEPYRFNPWRWKEKDTSTMGFTPFGGGQRLCPGLDLARLEASIFLHHLVTSFRWVAEEDHIVNFPTVRLKRGMPVRLTSKD

SEQ ID NO: 287996 - protein, 63 aa, Zea mays
  Clone ID: MRT4577_25745C.1.pep
IDGTPLQQVPRPHPKYNRWMCRLHETVRTLIVLFATVILTFCSTGFLWLTFYKAFLKYYELGL

SEQ ID NO: 287997 - protein, 45 aa, Zea mays
  unsure (1)..(45): unsure at all Xaa locations
  Clone ID: MRT4577_25746C.1.pep
RVHGAVRRGRLRLPATXXPAXSPDXXXSXQIIHXRRQXXTKQXXV

SEQ ID NO: 287998 - protein, 112 aa, Zea mays
  Clone ID: MRT4577_25747C.1.pep
DTNSGKQNLLWGWGETTFDFNCNQNTTKGAIFTSSHETTVFKTHWGEEQSRNYIAFFSNYNLQNVSLKVDGIKRCFLTNLQGIIFFAFKLWFWGSLGHYDLDKLFVVDLAIT

SEQ ID NO: 287999 - protein, 166 aa, Zea mays
  Clone ID: MRT4577_25748C.1.pep
AGTFGYMAPEYIVHGQLTEKADIYSYGVLVLEIVTGRKSHNSVASSAEGLSLMALIWRHYTAGTLTELLDPNLREQCSEEDALRVFHVGLLCAQASPNLRPPMWKVVEMLSGRDHKAVALPRPTQPPFINVKGSSGKSDSSGGSASNSDKSPFSLNQLSVSGVQAR

SEQ ID NO: 288000 - protein, 60 aa, Zea mays
  Clone ID: MRT4577_25749C.1.pep
NGFSGKPPPGGGCLKGGFILKLKPAGGDFGVCFVREAVLARQVLDYARALFTDEGPKKIP

SEQ ID NO: 288001 - protein, 134 aa, Zea mays
  unsure (1)..(134): unsure at all Xaa locations
  Clone ID: MRT4577_2574C.1.pep
KGPTXXRGRNXGKTPGARTQGTRXAXGGPKHRGXEXXXAGRQXDQXQXXRKNRPRAEEXQGRXGPTNPXGXXXTTDKRRTXGKKXQTXREAHXEGKTTDNXXXRXXXXXXTKRRPNQGKRTXXXQAXPXRQKRR

SEQ ID NO: 288002 - protein, 55 aa, Zea mays
  Clone ID: MRT4577_25750C.1.pep
LLTWNKLWKRGAIPQGVSTLTIRTRAYPPTESILPEGRSEILAWSAARRHQAVTH

SEQ ID NO: 288003 - protein, 87 aa, Zea mays
  Clone ID: MRT4577_25751C.1.pep
LHTYAKTLLMLTTPPSSDMREEAMIKCISMWIFIQSHDYGRLRCSHKTRSTRELLHTRSNLPTQYHFISHMNSLLDHEEKRTTSYTN

SEQ ID NO: 288004 - protein, 124 aa, Zea mays
  Clone ID: MRT4577_25752C.1.pep
MLHGGRPLSLRGSLKALEADIHHANTLAHAIHRAYGGTCVQMRLSYSSMAPIILNLIQWMDCSCSLSYTLPSYLGLLEVLVYKVYVDGDASISTIERRASLKEFYAIIYPYLQQIEENVMARDC

SEQ ID NO: 288005 - protein, 176 aa, Zea mays
  Clone ID: MRT4577_25753C.1.pep
VVSAIRQEAGAKSPRHRHHHRRLRPARRRSGQPIACATSPSRDICRLSRVSLPGMRVAAASPPRAAARPVVHSATATPPQQQRSLSSSLSLYHLFGQQRRRSSSTPTVASTSLSILSVHVSCARSMSCSIPASSVGTPIVGLHHVRLRVLRQLQASSSRYSGAVEDLPTRRGSPAM

SEQ ID NO: 288006 - protein, 121 aa, Zea mays
  unsure (1)..(121): unsure at all Xaa locations
  Clone ID: MRT4577_25754C.1.pep
QKSTHEDKFILSNLFDTLTRLVRSYAYAFLYSFEDPXKILDHTXLEMNDYLTKMLHSTAHVLVFXKRLENKTKAAEQASVDWYRRAQLSLXKVDYDLAWDTLNLLKSYADNASSLRSYLEQ

SEQ ID NO: 288007 - protein, 34 aa, Zea mays
  Clone ID: MRT4577_25755C.1.pep
VISMLDKPGAWVLLADLCRDSNAVKGTSHYRPRL

SEQ ID NO: 288008 - protein, 66 aa, Zea mays
  Clone ID: MRT4577_25756C.1.pep
YNSMGGFGRSKIPYWLHLTHKSAEASNLSATNITNPVRKAMLYSACVGETASSRAVIHRGAKREDT

SEQ ID NO: 288009 - protein, 120 aa, Zea mays
  Clone ID: MRT4577_25757C.1.pep
LGTSRPAGAHNTSLFVLFRLCPRVIALVSPGLASCLPWLACYVVYTARGRRSKKRKKRERESRFLFSSLFHGDLFSQTGAGGGRPRRRRRRRRGRVAGVRSQGISPYLFFLVFIFTFWLT

SEQ ID NO: 288010 - protein, 59 aa, Zea mays
  Clone ID: MRT4577_25758C.1.pep
IKDAQGRKKKKKKNKKKKKKKKKKKKKKKKKKKKKKKKKKKKKKKKGGGPKLGSFSTRK

SEQ ID NO: 288011 - protein, 253 aa, Zea mays
  unsure (1)..(253): unsure at all Xaa locations
  Clone ID: MRT4577_25759C.1.pep
VPRGRPGRASQPPPVSAPTMPXRLKRRRDGSSSRPPIPHTSSHPRPXLPPHRASVPPASLSPPLPXPPPAPPPPHXYSSPPPSAAPTLXPPPRHELLLXAPPSLPPKGWSTRQLRPLQHRTPDPXTPETSPFPPSPLDPXGDPRRPPDTSPLPLSTPEXALHSKPSTPPPXLLLPPPPXMQPPRVAPSDGEEFDVEEATSNSPHSQVMKLLRSSMSQAVGSATSTPGADDLMTAAAAKAKSHWLKGHLEWVRR

SEQ ID NO: 288012 - protein, 58 aa, Zea mays
  Clone ID: MRT4577_2575C.1.pep
KKKNKKKGPPLKNNSTTQTPTCNYKTYSKAQPKHKQLKRRPSKRTQVKTPPLPNLNLF

SEQ ID NO: 288013 - protein, 461 aa, Zea mays
  Clone ID: MRT4577_25760C.1.pep
MASPYAGGVQPPSPAGAVQQQQQNHSLAFRVMRLSRPSLQPDLAALLRFDPRDVFLPEDALTGSDPSAAAKFLHGLLHPADSATAVPGDFTFRDRFLLRDPADALALPGLLVLPQSFGAIYLGETFCSYISINNSSSFEARDVVIKAEIQTERQRILLLDTSKSPVESIRSGGRYDFIVEHDVKELGAHTLVCTALYNDGDGERKYLPQFFKFSVSNPLSVRTKVRTIKDITYLEACIENHTKSNLYMDQVDFEPAQQWSATRLEADEHPSTVKSAIGDLCKQPILIRAGGGIYNYLYQLRSSSDEAGQTKSEGSSILGKFQITWRTNLGEPGRLQTQNIHSTPTASKDVNLRAVKVPPIIYVERAFMVNLCLTNQTDKTVGPFEVFLAPSMSGEDRAVLVNGPQKLILPLVEAFESIKFDLSMVTTQLGVQKISGITMYAVQEKKYYEPLPDIEIFVDAE

SEQ ID NO: 288014 - protein, 56 aa, Zea mays
  Clone ID: MRT4577_25761C.1.pep
KQLQKGTFISQTKYIQDILIKFGMKDVKPIKTLMETNVHLDLDTGGKSIDQTGKSG

SEQ ID NO: 288015 - protein, 337 aa, Zea mays
  Clone ID: MRT4577_25762C.1.pep
MVVLAKGELEQIALPAAEPPPADVRSVDLSAPAGPAREAAARALVAACEEHGFFRVTGHGVPARLVRAAEAAAAGFFARPQGEKEEEGPTLGYGSKRIGGNGDLGWVEYLLLGGTPAAAASSSALLPCAAAPSPSAPAGPLRDLLDEYTVAVRRMACAVLELMAEGLGIAGGAGDAVLARLVARADSDCMLRVNHYPPRPALNPSLTGFGEHTDPQIISVLRANGTSGLEIALRDGAWASVPPDGDAFFVNVGDTLQVLTNGRFRSVRHRVVVNSEKSRVSMVFFGGPPPGERLGPLPQLLGDGGRSRYRDFTWSEFKTSGCRTRLAEDRLSRFEKK

SEQ ID NO: 288016 - protein, 88 aa, Zea mays
  Clone ID: MRT4577_25763C.1.pep
GRHVILLLVRSRNYKRGKIVCVLCLKKKNKNLGNPPIVTFVTYSHGKCVPKIGAQICFFITRGRSKIFLLKKKKKKKKQKKKNPNQKV

SEQ ID NO: 288017 - protein, 43 aa, Zea mays
  Clone ID: MRT4577_25764C.1.pep
IIINKKNMHHKSEVTLCFMMIRGPINLGMKIEQCAANMDLITT

SEQ ID NO: 288018 - protein, 279 aa, Zea mays
  Clone ID: MRT4577_25765C.1.pep
MTMAGSCAAVPVAGLPSLRTPMPTHLRLGGFMPCSSAARSRGAAVLGCALGARKQTPGVLNQLLCRYMRRDGHEGDVSNQGRDGAVMFGPDDDGVKIPTQVETLVKGTAAVAEPEYKQIPDVDYLQELLAIQQQGPRAIGFFGTRNMGFMHQQLIEILSYAMVITKNHIFTSGASGTNAAVIRGALRAEKPELLTVILPQSLKKQPPESQELLSKVQNLLEKPQYDHLPLIEASRLCNMDIISKVQQVICFAFHDSKLLMETCQEAMNLRKIVTLFYLD

SEQ ID NO: 288019 - protein, 88 aa, Zea mays
  Clone ID: MRT4577_25766C.1.pep
ATARIRVEHIIREENMMAAQEILELFCELIAVRLPIIETQRFAPLALYLTSILQPVIAITVCLFMRPRPTGVLCCPWIWQTVLDHQLP

SEQ ID NO: 288020 - protein, 212 aa, Zea mays
  Clone ID: MRT4577_25767C.1.pep
MQRDGHEGDVSCQGRDDTVMFGPDDDGVKIPTQVETLVKGTAMVAEPEYKASPDLDYLQELLAIQQQGPRAIGFFGTRNMGFMHQQLIEILSYAMVITKNHIFTSGASGTNAAVIRGALRAEKPELLTVILPQSLKKQPPESQELLSKVQNLLEKPQYDHLPLIEASRLCNMDIISKVQQVICFAFHDSKLLMETCQEAMNLRKIVTLFYLD

SEQ ID NO: 288021 - protein, 279 aa, Zea mays
  unsure (1)..(279): unsure at all Xaa locations
  Clone ID: MRT4577_25768C.1.pep
MTMAGSCAAPPVACLPSLRTLPPTHVRLSGFLPCSSAARSRGAAVLGCALGTKRQTPGVLNRLFCGYMQRDGHEGDVSCQGRDDTVMFGPDDDGVKIPTQVETLVKGTAMVAEPEYKASPDLDYLQELLAIQQQGPRAIGFFGTRNMGFMHQQLIEILSYAMVITKNHIFTSGASGXNAAVIRGALRAEKXELLTVILPQSLKKQPPESQELLSKVQNLIEKPQYDHLPLIEASRLCNMDIISKVQQVICFAFHDSKLLMETCQEAKNLRKIVTLFYLD

SEQ ID NO: 288022 - protein, 101 aa, Zea mays
  Clone ID: MRT4577_25769C.1.pep
RSRALPTSSSAITSSSARVEVLGNQRAVRDLGEPLSCKDSAGLAGNFSLTQATAVDRALLWPERYATDPLVKSRWPRRNTTTRSLTRSRSHLPVDLMASRK

SEQ ID NO: 288023 - protein, 70 aa, Zea mays
  unsure (1)..(70): unsure at all Xaa locations
  Clone ID: MRT4577_2576C.1.pep
IPKPYLPIFIANPXVFFYMRVXGAPADLILIYLYSNYVPNTSDNFLSLCTGNNVLCNSFKPLHYKGFTFH

SEQ ID NO: 288024 - protein, 117 aa, Zea mays
  unsure (1)..(117): unsure at all Xaa locations
  Clone ID: MRT4577_25770C.1.pep
RAHQHLNGRKXLTTAXGMKNEFIYSKILKELKKEFCWNGTGVQDPELGHVFQLQGDHKKNVWSLLVQAGIVKKEHIKKHGILSYRQVHSKPTLHAGASLLYIKSGGGAYLSGRGDYK

SEQ ID NO: 288025 - protein, 71 aa, Zea mays
  Clone ID: MRT4577_25771C.1.pep
MTRGNQRDRDRERAAARKPNAKNPQDGLTPEQRRERDKKALEEKAAKKAQQAAAGGTGTSTDNKNKAGGKK

SEQ ID NO: 288026 - protein, 50 aa, Zea mays
  Clone ID: MRT4577_25772C.1.pep
RSLTFNDHGSLLTDGQCECCGYPVTSSSARVLLSWRAHWSYSCAVVTLKQ

SEQ ID NO: 288027 - protein, 192 aa, Zea mays
  Clone ID: MRT4577_25773C.1.pep
KKKKKKKDQQRLIFAGKQLEDGRTLADYNIQKESTLHLVLRLRGGMQIFVKTLTGKTITLEVESSDTIDNVKAKIQDKEGIPPDQQRLIFAGKQLEDGRTLADYNIQKESTLHLVLRLRGGMQIFVKTLTGKTITLEVESSDTIDNVKAKIQDKEGIPPDQQRLIFAGKQLEDGRTLADYNIQKESTLHLVL

SEQ ID NO: 288028 - protein, 678 aa, Zea mays
  Clone ID: MRT4577_25774C.1.pep
MVPRLPDSSSRNRATSDSAAPPVGERTPRACPRSLVVSRRCAPILIFPPFFYLLPPPSPHAPSDRTRPAIVVLFITSPKKRHRAPPGGSPSRRRRRRLAKMAEQFYTVASDSETTGEDKSQPSFPDVAVGIDIGTSKCSVAIWNGHQVELLKNTRNQKGMRSYVMFKDDTLSAGVTGGAAKENAHEERDILSGSAIFNMKRLIGRMDTDEVVQASKTLPFLVQTLGIGVRPFIAALVNNMWRSTTPEEVLAIFLLELKALVEMHLKHPVRNAVLTIPVAFSRFQQTRIERACAMAGLHVLRLMPEPTAVALLYAQQQQQLVHDNMGSGIEKIALIFNMGAGYCDVAVAATAGGVSQIRALSGCTAGGEDILQNIMRHVLPNFDGIYAGQTMDRIKSMSLLRIATQDAIHRLVSQESVEINIDLGNGHMVSKVLDHSEFEQVNRAIFDKCEKIINQCLADAKLVPEDINDVILVGGCSKIPRIRSLVLGLCKKEVSYKNIDALEAAVSGAALEGAIASGVNDPSGSLDLLTIQATPMNLGIRADGDSFAAIIPRNTTVPARRDMLFTTTHDKQTEALIAVYEGEGERAEDNHLLGYFKITGIPAAPKGAVDISVCMDIDAANVLRVFAGVVKPQGPAIPPFIEVRMPTLDDGHGWCGQALAKMYGRILDLAVLPKKLQP

SEQ ID NO: 288029 - protein, 84 aa, Zea mays
  Clone ID: MRT4577_25775C.1.pep
IMIYKYHRGIIIFLFILTAQVLDLFPFVVLCTKLFLCRSWLCTIVACNFAVRAFNRSFFMLLWSKFILVRTLLIWLKHIFLHRE

SEQ ID NO: 288030 - protein, 177 aa, Zea mays
  Clone ID: MRT4577_25776C.1.pep
GAPPAGNRCGGPGPTLGDSTTGHSIRSPLAPTHSHQRPQARSVARPGNLTIATLTSPASTIGRGKKGIDVRVKELGYSAGFLHEGTHLTVTIKCRKKGHTSAVSLCRQDMLGGVLTTDSGTRARGTPFRERWRAVTLESDLTLLHRRKDLRGSDQSNRSFFLTRRVCQSKMPLKRFH

SEQ ID NO: 288031 - protein, 35 aa, Zea mays
  unsure (1)..(35): unsure at all Xaa locations
  Clone ID: MRT4577_25777C.1.pep
TVLPLLSYYCCNNESFMQDDTCMAGGXNFLIKNKG

SEQ ID NO: 288032 - protein, 49 aa, Zea mays
  Clone ID: MRT4577_25778C.1.pep
KRHHAGREECRLKADRRGGCDYRSEPMINAHVALTSYHQLHPADSPFST

SEQ ID NO: 288033 - protein, 102 aa, Zea mays
  Clone ID: MRT4577_25779C.1.pep
KQKRAPPLGKFKGKPPNYEKGPHKKGEQWKIKGTKGALSPTGDPLAKKSPIFMGNWDGGEKTLRWGSTNPGKLWVGKAKKNQMGERGFSNQKRNFRGTLKKL

SEQ ID NO: 288034 - protein, 65 aa, Zea mays
  Clone ID: MRT4577_2577C.1.pep
CSSCLSGYNYPDLEDTSTVMQSNIILGVAPRKKAIPKFVNDFDHSRKGDHRCTFEIGLEFDPFNC

SEQ ID NO: 288035 - protein, 79 aa, Zea mays
  Clone ID: MRT4577_25780C.1.pep
QCHFFFLLSSVLGSLQKNAKVVAIASYEDVPANSEKSLQKAVANQPVSVAIEAGGRAFQLYNSVTDTNLAAGFICGPSR

SEQ ID NO: 288036 - protein, 167 aa, Zea mays
  unsure (1)..(167): unsure at all Xaa locations
  Clone ID: MRT4577_25781C.1.pep
TKDAVEAAAAARSSIAARAGVXPTGTIWFPGSTLPPWLDGKIPXDLSFDPWGLGSDPXEPVVXNVQAELVHCRRAMLSAAGIFIPAVTXTKIGFLNTPLWYTACYQQYLTDTTTLFIIXLNLMGWAEGLIYTDIINPXSINTDPMFPSNKLTGTDVWYPGGLWFDPL

SEQ ID NO: 288037 - protein, 138 aa, Zea mays
  unsure (1)..(138): unsure at all Xaa locations
  Clone ID: MRT4577_25782C.1.pep
AAVLDSRKTPHAEVDALAAAGLLASSAYAAITCGQLXSALAPCRGGATGKAIALPASRLNTLKSLNSAERTTADRQAACRFLKSLLNTVKXVNMGTVCTIPWTSGASVCFPMSMCTHCLKISCCTTHQANKPTERTQP

SEQ ID NO: 288038 - protein, 66 aa, Zea mays
  Clone ID: MRT4577_25783C.1.pep
KITNMSVCVVRMWETLTLIQGWEYYYIEKLDEPSPLQYGSSGIMYRCLTRSLTPPPRSLNSIMYRC

SEQ ID NO: 288039 - protein, 175 aa, Zea mays
  unsure (1)..(175): unsure at all Xaa locations
  Clone ID: MRT4577_25784C.1.pep
MPPKQPYLCRTQEDHNFKSLDCGVASXTYTIQCVTVLKNXLIRFKNRPCKVEEVSTSQTGNHEHALWHFVDIYIFHVKKIGHIAPSSNYCDIPHANRIEHQVIDISEDGFVSLLTSDGNTRDDLRLPTDETLVAHIKEGFESGKDLVVTVQSAMGDEQICPLKDGAPSHLPAVEY

SEQ ID NO: 288040 - protein, 6 aa, Zea mays
  unsure (1)..(6): unsure at all Xaa locations
  Clone ID: MRT4577_25785C.1.pep
QLXLIA

SEQ ID NO: 288041 - protein, 113 aa, Zea mays
  unsure (1)..(113): unsure at all Xaa locations
  Clone ID: MRT4577_25786C.1.pep
MRQLHTCTRXAADTXDYLLTLLSVAGARDHRPGVGRSSEAELRAPAPAPAQAGRSCEAQLQAQPDHAARSRNLSWATHPACAPRGYVHYLRLNYCAFRGAPWLGAAALALRLL

SEQ ID NO: 288042 - protein, 229 aa, Zea mays
  Clone ID: MRT4577_25787C.1.pep
HWDLEPASPSLSTDEHVLSSNSGSAEDHPQAAASGSVSASASGDTGEENERLRRENARLTRELGQMKKLCNNILLLMTKYASSQQLDASAALSSVVNCSGESSEAVPAPPPLPPAILELMPACPGLATAAAGLVAEADPDQASRLFGVSIGMKRMRDDDDTGEEQADHGAAADVKTEASDPQHRMEPSPESPDQHPWPIYRPTPVYHSMRPCNGPDQGAGSDQDGSNSR

SEQ ID NO: 288043 - protein, 120 aa, Zea mays
  Clone ID: MRT4577_25788C.1.pep
MDAAAKKMTRSISRQLSSGAARLWRQLSLDPHTPRRGGPGPVPAAGAGQTRFAIARQSSLDPTPRGGPDGSSAHQQLAVPENLDATMRLLFAACQGDAAGVEELLRSGVDVDSIDLDGRT

SEQ ID NO: 288044 - protein, 150 aa, Zea mays
  unsure (1)..(150): unsure at all Xaa locations
  Clone ID: MRT4577_25789C.1.pep
RVSSLPPPGPXGXGSAPAVAAPPSPVAVGFAGLLPRXARRSGPGLXXAPLFLAPGXAGXVXXVPPWPLVVGPFSXFPPLGRFAVRALGPPVAVGVLPGVGXPAPLXAPVXGAAXXPPPPVWLVLCLLALVSSSCSRPCLARPVCLVLLFS

SEQ ID NO: 288045 - protein, 61 aa, Zea mays
  Clone ID: MRT4577_2578C.1.pep
DFGGTPLKTSKNQPAFLQKKTPPSFGITWQAPQSFHGPHKTTHPFEVKTKFPQAAFFERIF

SEQ ID NO: 288046 - protein, 276 aa, Zea mays
  unsure (1)..(276): unsure at all Xaa locations
  Clone ID: MRT4577_25790C.1.pep
LVDRXDRVLEQXLEHGCMPDVITYTTVINGFCKEGLIDEAVMLLRSMAACGCRPNTVSYTIVLKGLCSAERWVDAEELMSQMIQQGCPPNPVTFNTLINFLCKKGIRLVEQAIELLKQMLVNGCSPDLISYSTVIDGLGKAGKTDEALELLNVMVNKGMSPNTIIYSSIASALSREGRINKVIQMFDNIQDTTIRSDAVLYNAVISSLCKRGETERAIEFLAYMVSSGCVPNESTYTILIRGLASEGFVKEAQEMLTELCSKGALRKHLMKHFGIV

SEQ ID NO: 288047 - protein, 143 aa, Zea mays
  unsure (1)..(143): unsure at all Xaa locations
  Clone ID: MRT4577_25791C.1.pep
QLLSCMSALDPSNSFASFDAHKVRKLADLYPNDMSSIDLLKLDLQLDNYIDGIREDDRFKDITNLVDLSVKLVETKRHKVFDMVYLLLKLVLLLPVATASVERAFSTMSLVKTKLRNMMCGSLLDDCXVTYIERDYFFEVNEE

SEQ ID NO: 288048 - protein, 60 aa, Zea mays
  unsure (1)..(60): unsure at all Xaa locations
  Clone ID: MRT4577_25792C.1.pep
PXLTRFYTGLGLDRKLITVNSFDTVRLPLILSNPLFCTKSYLLARFLARFFRAYQTGPAV

SEQ ID NO: 288049 - protein, 77 aa, Zea mays
  Clone ID: MRT4577_25793C.1.pep
TTWTDGKLDTPNDTAMGNRWPTPNYTVPKVVISVGATKTAVAKINQPNQSIPSGKKGENFAITSPEPGRRPNGSISI

SEQ ID NO: 288050 - protein, 65 aa, Zea mays
  Clone ID: MRT4577_25794C.1.pep
DEEVDGTEQQPSWSAIKLQLQESASFLSLVSYYRTCSLVETIVLVDIYSCSRLEAIGLFLSMFHV

SEQ ID NO: 288051 - protein, 53 aa, Zea mays
  Clone ID: MRT4577_25795C.1.pep
DALPKVAYDHNTSTSTVGLPRLSKIWRAITDWIVPAISESAPRASARRQIAWH

SEQ ID NO: 288052 - protein, 138 aa, Zea mays
  unsure (1)..(138): unsure at all Xaa locations
  Clone ID: MRT4577_25796C.1.pep
WQVQVSSVSCFTISNLTCAWAFDDAMVIKVDSVNSHDTLLAVVQFIADLNLIIYKAYFSSDGSWFMDVFNVTDREGNMVLDAXTIXYVQKTLEADDWYYLEARNTVGIVALEDYTSIDLTGTDPGLLFEVPRTCCMNQ

SEQ ID NO: 288053 - protein, 215 aa, Zea mays
  Clone ID: MRT4577_25797C.1.pep
MNVFRLAGDMTHLLSVVVLLLKIHTIKSCAGISLKTQELYALVFAARYLDLFVHFVSLYNTVMKLVFLASSFSIVWYMKRHKIVRRTYDKDHDTFRHYVLVLPCLLLALLINEKFTFREVMWAFSIYLEAVAIFPQLVLLQRTRNIDNLTGQYVFFLGAYRVLYILNWIYRYFTEPHFVHWISWMAGIVQTLLYADFFFYYIMSWKNNVKLELPA

SEQ ID NO: 288054 - protein, 130 aa, Zea mays
  unsure (1)..(130): unsure at all Xaa locations
  Clone ID: MRT4577_25798C.1.pep
IGYLEAGRGSFSIVWYMKRHKIVRRTYDKDHDTFRHYVLVLPCLLLALLINEKFTFREVMWAFSIYLEAVAIFPQLVLLQRTRNIDNLTGQYVFFLGXWMAGIVQTLLYADFFFYYIMSWKNNVKLELPA

SEQ ID NO: 288055 - protein, 158 aa, Zea mays
  Clone ID: MRT4577_25799C.1.pep
MNVFRLAGDMTHLLSVVVLLLKIHTIKSCAGISLKTQELYALVFAARYLDLFVHFVSLYNTVMKLVFLASSFSIVWYMKRHKIVRRTYDKDHDTFRHYVLVLPCLLLALLINEKFTFREVMWAFSIYLEAVAIFPQLVLLQRTRNIDNLTGQYVFFLG

SEQ ID NO: 288056 - protein, 261 aa, Zea mays
  unsure (1)..(261): unsure at all Xaa locations
  Clone ID: MRT4577_2579C.1.pep
IVFIPMNIENFHWYLAVLXCKKNEVHVLDSMGQQITDRRDLYTTLKGIERQIKLAAEHKELYQGKWSNLDVASWPVIEKITTQMQTDGVSCGLWMINYMEYWTGSSLSDNVTQDDITMFRFKLPAILWDSRLNTKKRHQNLDHNVDEDGESSSDVQIIDTPLTSTNTQELMFVLCTYIMGIDNDKYLKKHWIQSTKPYPISLSLQKLKDILDVNKPMDTDCFNMAVRMIACNDALFLLEDKYHYMDLQFCVYLYLRFSRKQ

SEQ ID NO: 288057 - protein, 76 aa, Zea mays
  unsure (1)..(76): unsure at all Xaa locations
  Clone ID: MRT4577_257C.1.pep
QEEAXXXXXTXXKNEXKXEXSKNXEXXKANGNDKXREXRKKXGXGXXGXKXQAKTKAREKXXAKEXAQXETQRGRT

SEQ ID NO: 288058 - protein, 148 aa, Zea mays
  Clone ID: MRT4577_25800C.1.pep
GPWGGTPLGNFFFAAFFSFRGFSGFSHWPNWPRFLCPLGRPPVVPPPGVFRGVILAVFSFGGIVRAGLLGPFWGPPVLPVSRCGWGSLLGPFSEGAVLPAGGAFGGPPWPPFSIPAFVPPPPPCLEGRFWGGPLWVVPVVGFFGVVGV

SEQ ID NO: 288059 - protein, 127 aa, Zea mays
  Clone ID: MRT4577_25801C.1.pep
RIFAALLQDDEKILESYAKSWTSGVLDKALQRDSMAFTLAKHHLSGFVFQSSDSGTMLRKKLVKSLIRCYAQKRHHEVMLKCFVQQGIAQDSKSSELDRRFEILKDACEMNSNLVGEVQRLKACLGQ

SEQ ID NO: 288060 - protein, 48 aa, Zea mays
  unsure (1)..(48): unsure at all Xaa locations
  Clone ID: MRT4577_25802C.1.pep
KRTXEQGSRATWRGTPEGERRLCFQCHERVGYIKALEIQIWADAPPSL

SEQ ID NO: 288061 - protein, 119 aa, Zea mays
  unsure (1)..(119): unsure at all Xaa locations
  Clone ID: MRT4577_25803C.1.pep
DHLLHRLAEVPPGVGRRLSPTAKLSARGVXGAGFVFRGDAPALVGLLFFLDLADASRGLLTRVLRRRPTDTDDRLGWPLLPCSEAELARVGDVSATSTCLSFGSYRTTSLNEGLDHDRA

SEQ ID NO: 288062 - protein, 113 aa, Zea mays
  unsure (1)..(113): unsure at all Xaa locations
  Clone ID: MRT4577_25804C.1.pep
VQCSSHSRCTGLVESIGPWDMAGSHSQGRATSARRFTYMFCTSSWRQGARQVLPAAGEVHAAVRRKPDPVNRGSRHLSPIIFPSDILRASGLDAAMFRRHAXRISSSLARWML

SEQ ID NO: 288063 - protein, 206 aa, Zea mays
  Clone ID: MRT4577_25805C.1.pep
SYDVACTFATRKSSDALTAELSDERQSHQDDLVKYRDLEEKMERYEMERSSMLVDGDPDTKSKQDKEIGAAAEKLAECQETILILGRQLQAMRPPAESLGSSPNRQGTENFLQDVVGTTAGEYSQKPSGQPDTDQDMLGTGNVSPVNGYKTHMIPSDADGSPFLSPNSSKRPKHRSRSSSSSSFTNHQLPDKQSRGFSRFFAKTKE

SEQ ID NO: 288064 - protein, 1031 aa, Zea mays
  unsure (1)..(1031): unsure at all Xaa locations
  Clone ID: MRT4577_25806C.1.pep
MDRRSWPWKKKSSDRSSNADALQNSNHAEQEDKAPKFVQISPQTYSHLTESEEKVKVLEENVKVLNEKLSAAQSEITTKDALVKQHAKVAEEAVSGWEKAEAEASALKLQLETVTLSKLAAEERGAHLDGALXECMKQVRTVKEEGEQKLXDVVFAKTKQWEKIKAEFEAKLLEFEQELIRAGAENDALTRSLQERAELLMKIDEEKGQAEAEIEILKSTIQSGEREINSLKYELHVVSKELEIRNEEKNMSVRSADVATKQHQEDVKKISKLEAECQRLRGLVRKKLPGPAALAQMKMEVESLGREYGDHRVRRSPAKNSSFHRPMSPVPDYAMENIHHMQRDNEFLTARLLTMEEETKMLKEALAKRNSELQSSRSMYAKTTGKLRSLEVQMLTGNKHKSPSTPNMDIHFDGAFSQNGSNPPSMTSMSEDGVDDEGSCTESWTNALVSEPCQFKKEKAAKSSTTESSNRLELMDDFLEMERLACLSSDVNGNGSTVDKMKVDDVGATLADFTERDGVKDLQSASPMSETPSNKQCLSEKSPLLNFQSRISFLLDSESPENNAGKVLDSIRNILKDIEDEADSVNVNGTHPSDGTLSSESKFAMDQDLKNAILKILDFVKLLDQEISKFQGQSPDYDGLCEKTQQFSALVDKVLSNVDVLNDIVIALSVILSETSQIKFTLLRDNSNEAESNNLDCVDKVTLLENKVQLEPVKDNVPGICPLLPHSSSDPEFEGPADARFDVKTAVKVYSPEEYEQLKSEKANLEGELAKCNKIIEETMARLSDMEKKLEDLTSKLADSEKSNSLNETQLKCMAESYKSLESRKIELENEIEALRSKIDALTAELFDERQSHQEDLVKYRDLEEKMERYEMERSSILVDEDPDNKSKQEREIAAAAEKLAECQETILILGRQLQAMRPPAESLGSSPNRQRMEEFLKDAAGTTAGEYFQKPSGQPDTDQDMLGTGNVSPISGYKTHMIPSDADVSPFPSPNTSKRPKHRSRSSSSSSFTNHQLPDKQNRGFSRFFAKSKE

SEQ ID NO: 288065 - protein, 105 aa, Zea mays
  unsure (1)..(105): unsure at all Xaa locations
  Clone ID: MRT4577_25807C.1.pep
PAPGRQCQGYTHSKAPRSLPVPRYQHRSFLGSPPHAAPTTVHVTPITRSAQGARLPAQDTTCAFSSREMHWLQATXINLSLYLAYLLFSLKLCCKYSLSCKGSYG

SEQ ID NO: 288066 - protein, 269 aa, Zea mays
  unsure (1)..(269): unsure at all Xaa locations
  Clone ID: MRT4577_25808C.1.pep
MTPAAPASAADALAQILQDLLPSVLLAAASVRALHSRWRALQASLLALQSSLVSAPASAPSHPLFADLVAALLPALRSLHALSVRCQDPGLPGGRLRLQSDLDMVASSLSLLLHDLSLLLRSGLLSVDSELSIPTDIVLQVPASAAPHADKSLFVRDAFARLQIGSLDLKLKALVSLLDLLGDDPTAEAAQIVATEGDVAALLRLLDASSHSALRDRAVTAVAHLATACAXSPGGWFFDEGGLGPLLRVLDSGSRPXRERSAAAIVAIT

SEQ ID NO: 288067 - protein, 58 aa, Zea mays
  Clone ID: MRT4577_25809C.1.pep
LSSTPWFVLSQRLACHVPACGDQIHLFLTSPWPGRFKEFHAEGNLFRDLHRTSRRSGI

SEQ ID NO: 288068 - protein, 77 aa, Zea mays
  Clone ID: MRT4577_2580C.1.pep
KKKGINFFDEMPSFTTFGSLPNPLFPFLSQKGSVFFNPMSVLVQYPSPCFTPKPYRFKATNQKPLPSPRHQVNHPTT

SEQ ID NO: 288069 - protein, 108 aa, Zea mays
  Clone ID: MRT4577_25810C.1.pep
LSNALMPISVSIPLHRPCARKNEKTRPIYKNITINGRGGDQPFFFTRTHPTKANWEWHSNMTPNRRASKAQSHSKTALTSCTHAKHIQRDTNDHTNTYPYPLYTHNKN

SEQ ID NO: 288070 - protein, 171 aa, Zea mays
  Clone ID: MRT4577_25811C.1.pep
ATSLRGAATLRGRRSGSGGHGQNERAEHAGPALSQDDLDFDFNHARSRAALAKGDEMFVAMPDGKWKLHTVSAASNKRGEIVLRIKKTNLVMAFSHAKESVIHDVQPCSPEKPSPHEGATYPVEVSTNKGKVELRTDDYGVYKRWVATLSHMLVMSTAVSVSTRHEPARRD

SEQ ID NO: 288071 - protein, 95 aa, Zea mays
  Clone ID: MRT4577_25812C.1.pep
RTLGDVRLLPGGGDALSAPKLRMILLEITFSGFRQGAGAYTAARAVFSEGALCCPYLFGNGGDPADPFPLWEGESDGLLAAHRRGNASTTGDWAE

SEQ ID NO: 288072 - protein, 87 aa, Zea mays
  unsure (1)..(87): unsure at all Xaa locations
  Clone ID: MRT4577_25813C.1.pep
MYYRAQNSPIDTIRELLAAVPLLSVAASATSTHTSGXCACHTPPPDHLPPTVHLTPDVYLPPRAHFPPLVHLAKAVQLLLPAHVLST

SEQ ID NO: 288073 - protein, 414 aa, Zea mays
  Clone ID: MRT4577_25814C.1.pep
MLVPAVAASRLVLVPFRLSAARRISSLKVPWKRDPALDAAIARDRRFLQASRLVREVLLSPGRRLLFRYLTKRRERIKLPVHVPTFLRRYPTLLAVSAPPEPVASPSPHLLAFLDFASRLYELHAPLLASRLTKLLMISSTRALPVTKIAAAKRYFGLPDDFLASLVPRYPGLFRLVGDPGPDASGNAFLELVAWDDELAKSVIEAKADKEADVVGIRPRPNFTVKLPKGFYLKKEMREWVRDWLESPYISPYADASGLHPASPEAEKRSIGVVHEVLSLTVERRMAVPIIGKFCDEYRLPNAFANAFTRHPGIFYVSLKGGIKTAVLREAYDENGELIDRDPMLELKERFVAIMEEGHKQYLEDLKRKREALQKDREDAGRQDAKAEIEDRVEEEWHSEASEGDDDTDDAYRQ

SEQ ID NO: 288074 - protein, 73 aa, Zea mays
  Clone ID: MRT4577_25815C.1.pep
EPCGLCWLWLHPSCLVCVVLISYWVRGVGLSHVLCLVERLQMCRGENGSVYPLSIEYSFFWKFRYFYTRALYR

SEQ ID NO: 288075 - protein, 85 aa, Zea mays
  Clone ID: MRT4577_25816C.1.pep
QNQRSGVAPAPDLAICVTAPVKMGAGVQFYMSYRVISRDQTLEFHGPGEFGTRRYTECRWLHRRLAGRYKGMDLPHTTEKNAFAE

SEQ ID NO: 288076 - protein, 47 aa, Zea mays
  Clone ID: MRT4577_25817C.1.pep
KKTENTKQPRWLSNRVEDEFGFGDVWSYAPKAPVGDLYLKVVSIYIK

SEQ ID NO: 288077 - protein, 42 aa, Zea mays
  Clone ID: MRT4577_25818C.1.pep
CVHPGFFLAYVNVLEEVDSNRVDTNRARTRSRAFESRTCTCH

SEQ ID NO: 288078 - protein, 46 aa, Zea mays
  unsure (1)..(46): unsure at all Xaa locations
  Clone ID: MRT4577_25819C.1.pep
RGSPPRWAPVWWLRQPRSGASPRPRSACGTPXSGTPARSPTCPASP

SEQ ID NO: 288079 - protein, 57 aa, Zea mays
  Clone ID: MRT4577_2581C.1.pep
TANAVVDTLSVIGTLAIALSLTPLALLLCFVETFHLSQSQALNYSLNLGITFKTLVT

SEQ ID NO: 288080 - protein, 89 aa, Zea mays
  unsure (1)..(89): unsure at all Xaa locations
  Clone ID: MRT4577_25820C.1.pep
NLWHLIHEGDXLLEDPANEPKEDMYMMSVSPENAPSKPEYLEIGIVAGVPTSINGKDLSPATLLAKLNEIGGKHGIGRIDMVENRLVGM

SEQ ID NO: 288081 - protein, 92 aa, Zea mays
  Clone ID: MRT4577_25821C.1.pep
PPKKKFFFCPPTFLGFCGPLFFSFRGRGGCNPPKFFFFSPPFFYPQNFFRGRLNLKQLGGSPQNVFLKQCFYFWSHPFLDPPRPPVPSKWKS

SEQ ID NO: 288082 - protein, 124 aa, Zea mays
  Clone ID: MRT4577_25822C.1.pep
QVLIRGSATDGRAHMTPHRAPDLQILDDMLTKQMLPMCSRAPETPNQSECCAKLSLDKLVQTGSRQQLLGEEHTRKEYKPEVRSWMTSAPTTSPASTSSTTPQRSRGNCIGGPHSSVLIAMIYS

SEQ ID NO: 288083 - protein, 65 aa, Zea mays
  Clone ID: MRT4577_25823C.1.pep
FEGGGEENGYNDRDRGRRCLRRRAPARAVGVQRHETGGERSGGLRRRSHPVHLPPPGGSPERHNF

SEQ ID NO: 288084 - protein, 60 aa, Zea mays
  Clone ID: MRT4577_25824C.1.pep
AKLLTASLNKGLLHWLLDQLHETVLCSVFILHLYMLLCTIFDLIYLILLIYSINVYISLM

SEQ ID NO: 288085 - protein, 46 aa, Zea mays
  unsure (1)..(46): unsure at all Xaa locations
  Clone ID: MRT4577_25825C.1.pep
QVMQLYEFYVICCNISGSPVAIVFVVHGVSLSTPPHGSARYKDTCX

SEQ ID NO: 288086 - protein, 92 aa, Zea mays
  Clone ID: MRT4577_25826C.1.pep
RDTFDGTSMGCFPFIDPMRSNTVLTNPTLPAGKPQGRNPHVVLSIRTTVLELQGRWREGERDAIARPLAVPPPIAYHREVHIMKLRPELAHP

SEQ ID NO: 288087 - protein, 104 aa, Zea mays
  Clone ID: MRT4577_25827C.1.pep
PFFFFFFFFFLFFFFFFFFFFFFFFFFRQKGFFFLQKMSMGAFARPEGKNPIQSLTKTIFWINRRANQIYFFVWPAPFFLHPTLGFYSRNYFLCSGGGFFLHNS

SEQ ID NO: 288088 - protein, 137 aa, Zea mays
  Clone ID: MRT4577_25828C.1.pep
MEAESSGAAVLCAVTGCDHRACHEGPFWVVFVYLDQDEGEGVCVASAAVLLSDSSKRSNGKWCEPCSRLDLVDDAFIEARPPVLIQDALHFMLRHYEDYRRVGILKYDLNSNCLSLIDAPLEGPVIDDAAVLMCDGG

SEQ ID NO: 288089 - protein, 69 aa, Zea mays
  Clone ID: MRT4577_25829C.1.pep
SKESLFRSNLVVIIPVPHQHPGTPWVHKRWRILFQIMPSTHSMFWWNVYISITRQNFNVLFSNTFLTHI

SEQ ID NO: 288090 - protein, 45 aa, Zea mays
  Clone ID: MRT4577_2582C.1.pep
LILYFEEHSATTCTGSQASVEALGSSSPPGDVPFFFPSGDVPVRF

SEQ ID NO: 288091 - protein, 272 aa, Zea mays
  Clone ID: MRT4577_25830C.1.pep
MPPKKTAGPGAALQPLDVNQETLHEARSQKRKATSPTPQEDELDQEIRDLEAIHQQRKIDEATEEMRHLTQDDQDRRPQHRELCQENSYNDDEWYGDFHHGNFAFDDASFLAVELQATPWPPSYKPPQLPMYDGHSDPKQFLMSYEATISLYGGNTAVMAKSFVMAVKSVAQTWYYSLRLGTITSWQKLKDMLVTSFQGFQTKPVTAQALFQCTQDHEEYLQAYVRRFLRLRAQAPTVPNEIVIEAMIKGLRPGPTAQYFARKPPQTLEKLL

SEQ ID NO: 288092 - protein, 82 aa, Zea mays
  unsure (1)..(82): unsure at all Xaa locations
  Clone ID: MRT4577_25831C.1.pep
GNGTAELLIRLLEGSMRQALARTKKKKKKRSCQLYSHTHVRVCMYAPPPLLEARSEVDRXXXGXXXIRRTQRRPGNSGGRRW

SEQ ID NO: 288093 - protein, 86 aa, Zea mays
  unsure (1)..(86): unsure at all Xaa locations
  Clone ID: MRT4577_25832C.1.pep
VGIGSTDEGGRHTAFFSNYKPQCHXRTADVTGKVELPENVNMVMPGDNVTAVCELISAVPLEAGQRCASREGGRTVGAGVVSKVLS

SEQ ID NO: 288094 - protein, 65 aa, Zea mays
  Clone ID: MRT4577_25833C.1.pep
TPSPNLIEVQSPKGSNAIYYLARENKRSIQVKIRLTCIRFGFHCFSSVLDLKDSPEKKKKKKKIT

SEQ ID NO: 288095 - protein, 66 aa, Zea mays
  Clone ID: MRT4577_25834C.1.pep
DLRHLLETYALYFVVPTLLYACYFHPCKWLVSSARATAVFDDSYVFCHSCPEPVVRRKCEGCKTII

SEQ ID NO: 288096 - protein, 64 aa, Zea mays
  Clone ID: MRT4577_25835C.1.pep
RRQIGTQSMLSNYDLRQRLHRVLELLKMAGRISVIYALHLKNYGRQLIIITFVLMILTCYMLTA

SEQ ID NO: 288097 - protein, 68 aa, Zea mays
  Clone ID: MRT4577_25836C.1.pep
LGDTKKKHILCQHAKENLRPLKEPPPNILIILYFFHCSIAFKFNDFLNFFYFFFFFFFFFFYLFFFFF

SEQ ID NO: 288098 - protein, 71 aa, Zea mays
  Clone ID: MRT4577_25838C.1.pep
ILCRFRFVEKCKYPEDGSPPRSLRYIGSMVADVHRTLLYGGIFLYPADQKSPNGKLRVLYEVFPMSFLMEQ

SEQ ID NO: 288099 - protein, 79 aa, Zea mays
  Clone ID: MRT4577_25839C.1.pep
GRTKFAPLKILAPNNFLGFGDGPPLVSPFNRKKSVSPKGFSRNIPLALNGFFYSVQRVSGVGPPPPFPYLGVPFGPRIF

SEQ ID NO: 288100 - protein, 51 aa, Zea mays
  Clone ID: MRT4577_2583C.1.pep
QGGSMGGHIGCVLIQECVRVIIRQCASSYPPQVNVSRCHSQPQCASSSHMS

SEQ ID NO: 288101 - protein, 49 aa, Zea mays
  unsure (1)..(49): unsure at all Xaa locations
  Clone ID: MRT4577_25840C.1.pep
PVAYPLRCARFLAQCGFTWPCRRWWSTXVVFPPVARPPGSAGSHFLGGA

SEQ ID NO: 288102 - protein, 80 aa, Zea mays
  unsure (1)..(80): unsure at all Xaa locations
  Clone ID: MRT4577_25841C.1.pep
GARAPGGGGRARRGLGRRVRRGGKEGEEEKAGREELQFHVTPVARNPWLQRSDLNLTNEELSPVRLEVPIGGPRESGXGG

SEQ ID NO: 288103 - protein, 129 aa, Zea mays
  Clone ID: MRT4577_25842C.1.pep
MRCTLVVWLSLVVMAAATAAGDGNTPEPRPVITPKPKPPRPYQPKPTPQPYQPKPTPQPYQPKPQPEPGHPKPTPQPNPTPEPTKPKPTPQPDPKPKPQPQPQPMPEPQPGPGKPKPKPPAYSPGTPGP

SEQ ID NO: 288104 - protein, 127 aa, Zea mays
  Clone ID: MRT4577_25843C.1.pep
MRCTLVVWLSLVVMAAVTAAGDDNTPEPRPVITPKPKPPRPYQPKPTPQPYQPKPTPQPYQPKPQPEPGHPKPTPQPNPTPEPTKPKPTPQPEPKPKPQPQPMPEPQPGHGKPKPKPPAYSPGTPGP

SEQ ID NO: 288105 - protein, 115 aa, Zea mays
  unsure (1)..(115): unsure at all Xaa locations
  Clone ID: MRT4577_25844C.1.pep
GAHWWYGCLWSSWPRPPPPAMXTPEPRPVITPKPTPQPYQPKPTPQPYQPKPQPEPGHPKPTPQPNPTPEPTKPKPTPQPDPKPKPQPQPMPEPQPGPGKPKPKPPAYSPGTPGP

SEQ ID NO: 288106 - protein, 78 aa, Zea mays
  Clone ID: MRT4577_25845C.1.pep
MEPPKNYQGTKYVRAGCSTFYPEFPDDWYNIEDPPMPKDTSRKKRNQTYRAHKPTRKLLFVLSKKVNVKACGTDSRNT

SEQ ID NO: 288107 - protein, 96 aa, Zea mays
  unsure (1)..(96): unsure at all Xaa locations
  Clone ID: MRT4577_25846C.1.pep
AGKKKKKKKTKPTPRXPTQPKPTPRXTQPKPQPQPEPGHPKPTPQPNPTPEPTKPKPTPQPEPKPKPQPQPMPEPQPGPGKPKPKPPAYSPGTPGP

SEQ ID NO: 288108 - protein, 61 aa, Zea mays
  Clone ID: MRT4577_25847C.1.pep
GAFFFFFFIFYFLFLLYLFGRAARTHTPSITNYDVHSPTWGDGKPTHPPSAMWAIGLGHEP

SEQ ID NO: 288109 - protein, 78 aa, Zea mays
  Clone ID: MRT4577_25848C.1.pep
LTISPSGRVDVIICGRGGTRSRGPCLKNKEKKKKKKKKKKKKKKKKKKKKKKKKKKKKKEPMQPPRKKKNWNPPYCKN

SEQ ID NO: 288110 - protein, 94 aa, Zea mays
  Clone ID: MRT4577_25849C.1.pep
NPAHRKLHQIWQGYSKYCVQQPRTKIKNFRFGRAARNTVYIKQGPKLIFLDLAGAARTRTPSITNYDVHSPTWGDGKPTHPPSAMWAIGLGHEP

SEQ ID NO: 288111 - protein, 95 aa, Zea mays
  Clone ID: MRT4577_2584C.1.pep
YTGPSSLHNMQGFTTALYSPYILKKHKIYLVRIDSATFLFQTDLGCIAWQRRIALVVQQQPKKKCRRLHCTMHAGRGVYLRLSFAPICCCCISPT

SEQ ID NO: 288112 - protein, 52 aa, Zea mays
  Clone ID: MRT4577_25850C.1.pep
SKQASYYANRVKDCGKDTSKNPSNISADPAWRSVGGELKDNLGSLRDGVLGE

SEQ ID NO: 288113 - protein, 71 aa, Zea mays
  unsure (1)..(71): unsure at all Xaa locations
  Clone ID: MRT4577_25851C.1.pep
IIHWARFTTPAGKSLRSQLNPFTHPFPRGWGGXXPPIPFQRSHLNGMGPPLRPLTGGWGTPRARHFHPYPL

SEQ ID NO: 288114 - protein, 98 aa, Zea mays
  Clone ID: MRT4577_25852C.1.pep
VGELHCYRSNLFGQKPYFFFWGHPLKTFGPPASHGNPLVKIFKTPNGLPSHDLQKFMPVASPGTKICPSNFFKGSNPRPTGPPLNNLVFWCEQTTPVG

SEQ ID NO: 288115 - protein, 39 aa, Zea mays
  Clone ID: MRT4577_25853C.1.pep
VLTLKGGLRKGGSLKISPGMPKTQAQINMNSYRKREAWN

SEQ ID NO: 288116 - protein, 78 aa, Zea mays
  Clone ID: MRT4577_25854C.1.pep
TVVELIPANGVEAMMATRFGGSDGGDTRPLPLMFALFVGDLLSCEFAIPLLSSFLLSHVYVLGFGFLARDGHNRPKRW

SEQ ID NO: 288117 - protein, 122 aa, Zea mays
  unsure (1)..(122): unsure at all Xaa locations
  Clone ID: MRT4577_25855C.1.pep
LGPPGVMALIKDSKAAPGVRALQDFFKMLTKKSARACYGPKHVXFALQQFAIQTFLKTETLFWNAAIFSRQRYVKLVXNVKKKSGPVPIFSSMHVSGEQLGQLTGKTGKLRFPLPEIKDMEL

SEQ ID NO: 288118 - protein, 50 aa, Zea mays
  Clone ID: MRT4577_25856C.1.pep
LAITQLISLVAGQTCILHSSYHGQRQTCGWPLALTDLWLYTQLISLCHIT

SEQ ID NO: 288119 - protein, 81 aa, Zea mays
  Clone ID: MRT4577_25857C.1.pep
CMPLRAQRGHNDGQCRSLHQALTRETHIHLRTLTLCCDHNRSASDEDIDYTTYKVRAAVYQELLFGLLFTWLSYLDCHYET

SEQ ID NO: 288120 - protein, 98 aa, Zea mays
  Clone ID: MRT4577_25858C.1.pep
AAGSALAGVAVAAAVVGVRFVAAGAVVGGRRVEYRGLDAAGVGGLHVWVDCSAVAWFSSGAAAPAPAFAPPVGGAVCGRRKEVWILIVLLPGRVGRPG

SEQ ID NO: 288121 - protein, 97 aa, Zea mays
  unsure (1)..(97): unsure at all Xaa locations
  Clone ID: MRT4577_25859C.1.pep
MAPAKSGTPKMPSPVAPNRRFAPALMNGKTCAPKVASNFVASANPLKGNGGFGTFRHLNFTSFMPFSFMKERLKFLDADKCKCKNTLIEGSGIXVAI

SEQ ID NO: 288122 - protein, 34 aa, Zea mays
  Clone ID: MRT4577_2585C.1.pep
AALWDPGPEAARLRFRCFRYEEATGTQQALAQLR

SEQ ID NO: 288123 - protein, 97 aa, Zea mays
  Clone ID: MRT4577_25860C.1.pep
GKIKGRFGKHRRQEPPPGGACFMRGPPQEPGNGPQKKPLQAFFPSTGLFGRAVKGDPGNPLNGADFYSKTSKRPGGKLGTKSGGFGLVASGGTKLNG

SEQ ID NO: 288124 - protein, 62 aa, Zea mays
  Clone ID: MRT4577_25861C.1.pep
VAASASQSKCQWSPGEQLVDLCFCDYFTGMTECVMCSQCCGLHLHAAFLSIFMLAPVKYSSC

SEQ ID NO: 288125 - protein, 58 aa, Zea mays
  Clone ID: MRT4577_25862C.1.pep
SFIYSERHYHGILIYSLKAVCLNQLCKLVYNTTIIYLMNILCHKNISHQCNMEDALYQ

SEQ ID NO: 288126 - protein, 89 aa, Zea mays
  Clone ID: MRT4577_25863C.1.pep
RVGLPPMAGVSIPTVWTAPRPAVHGWGEMTRAFRTGEPRLAPMRRVRACQPLGLGLLPQRIGARSVGAPPSHITLPPPGRGRDPGFSGP

SEQ ID NO: 288127 - protein, 163 aa, Zea mays
  unsure (1)..(163): unsure at all Xaa locations
  Clone ID: MRT4577_25864C.1.pep
WLSHSSPILFRNSDLMIFIDEKALSIDVVATPRLLSTYNEAGTMICGVIPTECHQRLACRXPAGRGRAHRACRLGRDRAGRWEPGTRRRDRAWATADDTGRWDRGTGAQQRTPLVCPQAAALGAWDTGRDRAWAVGHWARGAAQDAWPATRRGQRRRGGWRAG

SEQ ID NO: 288128 - protein, 73 aa, Zea mays
  Clone ID: MRT4577_25865C.1.pep
LHILSVYGRLTLKPAINLTLTKLHGDMKGTIILSLQVQLTHWPDGTALCMSFTRWRWRGIVAYTWAASAFHTL

SEQ ID NO: 288129 - protein, 132 aa, Zea mays
  unsure (1)..(132): unsure at all Xaa locations
  Clone ID: MRT4577_25866C.1.pep
FGTLLAPCSSLLTTTPQIKNFIXNSXLTLKVSIFFXFFYRVLFFFFLXXICKKFSXFYNNLPLFFLLLXNLFFFSFTFIFLFFFLXFFLFSSRRVWVIFIFSIFLLSLFFFFILYFXLFFFLFYFFFYLYFF

SEQ ID NO: 288130 - protein, 95 aa, Zea mays
  unsure (1)..(95): unsure at all Xaa locations
  Clone ID: MRT4577_25867C.1.pep
VYSPNINTFDVKLGTFVPXKMSSSKXRYVRKRFRAEPDSVRDLLKEPYFAAPVCISRSPXPTKPRPEPCTVLSEAAVFKQCEAIWKKIMXKCSNI

SEQ ID NO: 288131 - protein, 141 aa, Zea mays
  Clone ID: MRT4577_25868C.1.pep
RPSEVDLCRAVQCSGGIYARLPPPPTASPSCCHSGPTHSSDYGSESRSTPRHRHRSPSLGVAPHPPRPVGAPPNQSNLETPVSAPTFQPTMASVPLLLLDPSPLAWLDYRCFAPLALNNYLIFFQLLVGSCNFQMGRYELC

SEQ ID NO: 288132 - protein, 59 aa, Zea mays
  Clone ID: MRT4577_25869C.1.pep
LPQRKINNYYINYYHYTTSTTPYIYNPNILFFPTIFTIIFTYIYTLIKIFYIGNPIIFP

SEQ ID NO: 288133 - protein, 193 aa, Zea mays
  Clone ID: MRT4577_2586C.1.pep
MTGPLHSSSGHNAAAGGGGKTIEEMYQKKTQLEHILLRPDTYIGSVEKHTQTLWVYEDGAMVNRSVTYVPGLYKIFDEILVNAADNKQRDPKMDALRVEIDVDGCSISVYNNGDGIPVEVHQEEGVYVPEMIFGHLLTSSNYNDNEKKTTGGRNGYGAKLTNIFSTEFVIETADGRRQKKYKQVTCFGCILPF

SEQ ID NO: 288134 - protein, 63 aa, Zea mays
  unsure (1)..(63): unsure at all Xaa locations
  Clone ID: MRT4577_25870C.1.pep
VLQAHILDACYCYFVSVFIDFVFSCANNHLIALCHATPVLENMKIACLTSQTXXMFIXRNVLP

SEQ ID NO: 288135 - protein, 81 aa, Zea mays
  Clone ID: MRT4577_25871C.1.pep
DDDSAMGTERYCLQGPVMRYMCKMPPTSATRGVYASERYTCSLVCTGLKGSSMQHNYAYGHTDDHYMKLFERTLSMMDHYV

SEQ ID NO: 288136 - protein, 93 aa, Zea mays
  Clone ID: MRT4577_25872C.1.pep
FPIAAGFRLESLLVGSWSALLMSSPSCASLSVSCCWCRGPRRSFHSVVATFGTPVASSVACSCSAAVSGIRDPSREVVIISLSSPCSSNVAVG

SEQ ID NO: 288137 - protein, 122 aa, Zea mays
  Clone ID: MRT4577_25873C.1.pep
NPQWLFPQNFSLLEKPPRFFFFFWGFFTLFPAPKGLWVFFGPNPNKQKLSLRIWEPNPFTFGDLNLAGKFFLQEGVANRGGGLPQEGGMFLHPAFHFGPMFFQKIILHFLGPPCSSPHFFQS

SEQ ID NO: 288138 - protein, 90 aa, Zea mays
  Clone ID: MRT4577_25874C.1.pep
GPGPGFPGSPTASEAPMAIAIPVRGYLLIKGLRVYELSCQHLLGRDNYTDAVYYSVSNHPAHASTNILTLSGTPRLFKSLPSTHISTLHS

SEQ ID NO: 288139 - protein, 122 aa, Zea mays
  Clone ID: MRT4577_25875C.1.pep
TFIVVFNNQSYRFLEKALLIKGIVASYGRMTSLPRVQEKLDVHLPPNPAKNKLITTAAQSPSTVMSRLSTADSPSVSRKLTYSPAKDKPETNPLDADKNRAPATTLESPTKRIKQDPKNQQE

SEQ ID NO: 288140 - protein, 41 aa, Zea mays
  Clone ID: MRT4577_25876C.1.pep
VSPHRLFGRVECTEPDAHALARLFDLSSSSAQRDPTVTPDL

SEQ ID NO: 288141 - protein, 85 aa, Zea mays
  unsure (1)..(85): unsure at all Xaa locations
  Clone ID: MRT4577_25877C.1.pep
PRILKHVRASTANAKLQGFLIEVGAKIDAFDKTXQTPITHAFIXENKVVVLLLIRHXTNVDVYDRARYTGLRRTWDTLRPKLTHH

SEQ ID NO: 288142 - protein, 603 aa, Zea mays
  unsure (1)..(603): unsure at all Xaa locations
  Clone ID: MRT4577_25878C.1.pep
DRPPTPLLSSSSSSYTSHHHHHHPPSPRLPKKARHQKARERGTGTARLARLRTGFVAAAVVAAAAAWRGDVFALGVHGRREHRRRQQRGGRRRGAAGRAAQAGGGQRAHXSERPELHWGLFSQAKKGEDFTFLKPECERVPDVPSSSFSAFGLFDGHNGNGAAIYTKENLLNNILSAVPADLNREDWLAALPRALVAAFVKTDKDFQTKARSSGTTVTFVIIDGLVITVASVGDSRCVLQAEGSIYHLSSDHRFDASKEEWDGILVLSVLLRSRLRLHDCNCHLKXLSSSCDSSVXXLSCTMYKILLTRQICFVIRYNKINLHIXSQDCTYFALKSYALPFPXSPILLIKLQFLQVSPNMCSYSALCQYLQHSDRILPHNMXLSTAGGRLIIASDGVWDVLSPEVAFNCSRELPPVPAAEQIVKVTSFLCAAINLEXLLFTYLKLLQTAVQSKGLRDDTTCIVVDIIVEKNNSSMPLAKRQPGIGVFKNMFGKKKSSDSSSHSHSDREYMDPDNVEEIFEDGCALLSRRLDSEYPVRNMFKLFICAICQVELKPNQGISVHEDSSQPGSLRRWDGPFLCQSCQEKKEAMEGKRRSRDSSRNSG

SEQ ID NO: 288143 - protein, 102 aa, Zea mays
  Clone ID: MRT4577_25879C.1.pep
MKSSPHLVLILCLQAALVMGVFAALAKENALVESKAIDINPGQLKCCTNCNFSFSGLYTCDDVKKDCDPVCKKCVVAVHASYSGNNKFRCTDTFLGMCGPKC

SEQ ID NO: 288144 - protein, 86 aa, Zea mays
  Clone ID: MRT4577_2587C.1.pep
LDQTTEKGNTCLHIAALCGHQNFCSEVLAQESRLHRPGPSSLLSTTNDDGETPLLVAVKSGRVSLGLHLLDQHYSRHELLVEHLLK

SEQ ID NO: 288145 - protein, 57 aa, Zea mays
  Clone ID: MRT4577_25880C.1.pep
HASEKKKKKKKKKKKKKKKKRGKIKKKKKKKKKKKKKKKKIKKKRGEKIKNKRGGGF

SEQ ID NO: 288146 - protein, 121 aa, Zea mays
  unsure (1)..(121): unsure at all Xaa locations
  Clone ID: MRT4577_25881C.1.pep
FQVGQVTSPNHLQEKIELLXYTIINDKKLSHLPKLKQVLAQLCMQPTLINWAEXDQVFSMQMEHRLERHLGENSRLVVVKNVGHVASLEKSKVVCKSIISYFQEPASSASIGGKVGNGCNY

SEQ ID NO: 288147 - protein, 316 aa, Zea mays
  unsure (1)..(316): unsure at all Xaa locations
  Clone ID: MRT4577_25882C.1.pep
HGPENLIDIAEDLFTEMKRLGWGPYEFTYNLILDAXGKSMRGEEMXKVQKEMRRPGDESTYVTYNTIISGLVKSKRLEQAIDLYYNLMSEGFSPTPCTYGPLLDGLLKSGKMVDAENLFNEMLEYGCEPNCTIYNILLNGHRIAGNTENVCQLFEKMVEQGINPDIKSYTILIDTLCTAGRLNDGLCYFRQLHELGLEPDLIVYNLLIDGLGKSERIEEAVSLFNEMKKKGIIPNLYTYNSLILHLGKAGKAAEAAQMYEELLRKGWKPSVFTYNALIRGYSVSGSTDNAYAAYGQMIVGGCQPNSSTYMQLPNQL

SEQ ID NO: 288148 - protein, 95 aa, Zea mays
  unsure (1)..(95): unsure at all Xaa locations
  Clone ID: MRT4577_25883C.1.pep
HAHSRKGSGQLERLSAQDQQHATDYYSERNGREQGGKVKYYKGTRPAETRRAHKRTSDYERPLGAAGDLRESGLRRDARHRXMXRLTELCATRTE

SEQ ID NO: 288149 - protein, 142 aa, Zea mays
  unsure (1)..(142): unsure at all Xaa locations
  Clone ID: MRT4577_25884C.1.pep
MTRPLLLRVGGGKEEWVSGLPSLANPSATPHSLQPPPPRVRAGGDRMSPGHGLRSRTFDLFSRPFRKKGYIPLSTYLRTYKIGDYDDDLVNGSVHKEMTHKFYHDLFXRARNVANCVIGVVGIWHFSVRIIMKSIHVRVKHV

SEQ ID NO: 288150 - protein, 52 aa, Zea mays
  Clone ID: MRT4577_25885C.1.pep
CHHHTSMTQWHRYKPNLMFYISLTSQATLFCWTRVVINARIIGSLGYPRSKA

SEQ ID NO: 288151 - protein, 296 aa, Zea mays
  Clone ID: MRT4577_25886C.1.pep
EHNSIVNGARGSGATVRVFQHNNPAHLEEVLREQIAGGQPRTHRPWKKIIVIVEGIYSMEGELCKLPEVISVCKKYKAYTYLDEAHSIGAVGKTGRGVCELLGVDPADVDIMMGTFTKSFGSCGGYIAASNEIIHHLKHTCPAHIYATSMSPPAVQQVISAIKVILGEDGTNRGAKKLAQIRENSNFFRSELQKMGFEVLGDNDSPVMPIMLYNPAKIPAFSRECLRQAVAVVTVAFPATPLLLARARICISASHSREDLIKGLEVISKVGDLVGIKYFPVEQEKTTAVENLKKIQ

SEQ ID NO: 288152 - protein, 58 aa, Zea mays
  Clone ID: MRT4577_25887C.1.pep
NEPLLLFPLFLYPKWESINEDYLKGYALHPTQPIVHITLSSGTYSDPVMHMYSPNILF

SEQ ID NO: 288153 - protein, 385 aa, Zea mays
  unsure (1)..(385): unsure at all Xaa locations
  Clone ID: MRT4577_25888C.1.pep
PRVRTSLHTLHLPLPSSNQAYNIINMGVIEKLSRKAGVIVGDDVLRLFEYAQEKQFAIPAINVTSSSTVVAALEAARDQKSPIALQVSQGGAAFFAGKGVSNDGQAASIXVPSPLLTTSAPLPPPTAFPSSSTPITAPRSSSPGSTAXWMRMSATSSSTASPXFSSHMIDLSEEPVDWNISTTAAYLKRAAPMKQWLEMEIGITGGEEDGVNNEDVDNNSLYTQPXDILAIHNALSAISPYFSIAAGFGNVHGVYKPGNVRLHPELLKKHQAYVKEQTKSQKEKPVFFVFHGGSGSSKEEYKEAISYGVVKVNVDTDMQYAYLSGVRDYVLNKKDYLMSTVGNPDGEDKPNKKFFDPRVWVREGEKTMSKRTQVALEDFNCTNQL

SEQ ID NO: 288154 - protein, 130 aa, Zea mays
  Clone ID: MRT4577_25889C.1.pep
IWGVRKKGEITETTPSHWRGGEPRPDVVLLRDAALVRPSRGGPDAERVPTVQLDAALEPATADCALAKLGGSSDFVAQVGADNLGDMLGNILKRNPPKSDVCLLHNYASTWMPFRTLLHYGEREFMLYRY

SEQ ID NO: 288155 - protein, 75 aa, Zea mays
  Clone ID: MRT4577_2588C.1.pep
FRVGSRGELLELAPRRKLARKWPRKKQPTARRRRGAGAQHGLRRRRPDQARPHSGPDGRSHGEPGHRSGSVPKRR

SEQ ID NO: 288156 - protein, 55 aa, Zea mays
  Clone ID: MRT4577_25890C.1.pep
IENHFLLMRAYPETTRNENGIPRGILKPHSPKIRRQKCPYMNHNSVLWYYTYPQS

SEQ ID NO: 288157 - protein, 140 aa, Zea mays
  unsure (1)..(140): unsure at all Xaa locations
  Clone ID: MRT4577_25891C.1.pep
IPTVKTAPLTPXPCAPCAPRSSVHPLPNPLAPCAPLQTPAVTPHPTTLSPPSPPPRGPPSKSPQASPTSTTSRRRTSSAPTVALTPPRIWLSHSHTTSHTRSHSSRASPPLTASPCSRSIFADLGVLQEDGGVLLDGQGG

SEQ ID NO: 288158 - protein, 51 aa, Zea mays
  Clone ID: MRT4577_25892C.1.pep
MPRGSRTRTSRMAPPASRTPQMRAAPRPAPVAQPPAAAPQSAVGSSAAAPR

SEQ ID NO: 288159 - protein, 54 aa, Zea mays
  Clone ID: MRT4577_25893C.1.pep
VGASEPVRVISCPANLLYCDEIHAPGWSCSGDYTTSSHIYAGLQVYFLECLVIL

SEQ ID NO: 288160 - protein, 45 aa, Zea mays
  Clone ID: MRT4577_25894C.1.pep
HSFHRNMWLLMNLVVTYNYLSFWAGLVSQGRMNRVVNIIVLSCLE

SEQ ID NO: 288161 - protein, 114 aa, Zea mays
  Clone ID: MRT4577_25895C.1.pep
SSSQRLWLRPWCNKCNAWINLCHLLLDMHQHQMKGNRMVASPSPSAQRYDGSCRARYIRHVYTRRVEHTLQPLKVTHMVVDNLHLAKVTPRARVVHILRLILTPHKVTTPHEGA

SEQ ID NO: 288162 - protein, 68 aa, Zea mays
  Clone ID: MRT4577_25896C.1.pep
RRLPIRWWANVAALGIFLAGAASADAGFLSPVLINNAGAPILYWESITFIRPTVALICFETIGLLLND

SEQ ID NO: 288163 - protein, 67 aa, Zea mays
  Clone ID: MRT4577_25897C.1.pep
AFKAKSPDGYWGFNHGVMASYVKKMLAIYSMWNFGPSYCRHIPRDAILPGQLLFKQKKKKKKKKNIK

SEQ ID NO: 288164 - protein, 75 aa, Zea mays
  Clone ID: MRT4577_25898C.1.pep
GSGCGCRVTPRTGLMAAETGAVLLRSYSSSGPRDLWPGVSNCGLQVLSRGRRARGDGHDHDPALLMYFLESGGWS

SEQ ID NO: 288165 - protein, 44 aa, Zea mays
  Clone ID: MRT4577_25899C.1.pep
NTTGFIYASYVNACQACGTCSEPSRSKDATELITLILDGVESRS

SEQ ID NO: 288166 - protein, 208 aa, Zea mays
  Clone ID: MRT4577_2589C.1.pep
LSPKTISKARIRNAASNRKIRSVDHKSGDKFGKIGSAVKSETKAFSSNRTEGISCNISKVIADPDSEKSNKDVVREVSGLFCQDSCTIDKQGSYNSKLRSSTRNKAPTPDHEKENRLGSSDLNSKPNRTGSLRSKSDAKSIKKNTRVLSKHQRGNRSEPCTLITSKPALFILSGNSEQRRGYRSILRQLKERVCRDSHHWSYQATHFI

SEQ ID NO: 288167 - protein, 117 aa, Zea mays
  Clone ID: MRT4577_258C.1.pep
MDLSNNYLHDSIPYQLPSNLTYLNLAKNNFSGNLPYSISNLVSLEYLNLSHNSLFQEIGELFGSLSSLSELDISFNNLTGNLPSSMGFLSKLSSLYMQNNQLSGTVDVISNISLATL

SEQ ID NO: 288168 - protein, 82 aa, Zea mays
  Clone ID: MRT4577_25900C.1.pep
QTMIRLSLIISIKFLLMFLLACDFAHVEVHPCLVCNAVIGKGPQHMLIPPYYLCVVITCIIDPFLKLYCIFLKKLFDLCYYK

SEQ ID NO: 288169 - protein, 238 aa, Zea mays
  Clone ID: MRT4577_25901C.1.pep
MAVGKNKRLSKGKKGLKKKTVDPFSRKDWYSIKAPNPFNVRDVGKTLVNRTTGLKNANDALKGRILEVSLADLQKDEDHSFRKVRLRVDEVQGKNCLTAFHGLDFTSDKLRSLVRKWQTLIEANVTVKTTDDYLIRLFAIGFTKRRGNQVKKTTYAASSQIRAIRRKMTDIIQREASSCTLTQLTSKLIPEVIGREIEKSTQGIYPLQNVHIRKVKLLKAPKFDLGALMALHGESGTD

SEQ ID NO: 288170 - protein, 83 aa, Zea mays
  unsure (1)..(83): unsure at all Xaa locations
  Clone ID: MRT4577_25902C.1.pep
ALKSQLQGVSLRIQTLKSTQAMGEPMKCVTKAMWQMTSQMNLLALXKIMREFEMQNEKMEMVGELMNDAFDDALEGDEEEKME

SEQ ID NO: 288171 - protein, 50 aa, Zea mays
  Clone ID: MRT4577_25903C.1.pep
APEADTNRPPMKDDAGESKTEQVDKSGNRVKICGGACVCLTSASLQTSNV

SEQ ID NO: 288172 - protein, 90 aa, Zea mays
  unsure (1)..(90): unsure at all Xaa locations
  Clone ID: MRT4577_25904C.1.pep
STLALVVIWPRALTMLVVWAGLVILPSCGGHASCWESASGSSSCVAPLVGVRVVHGIRRHPSAMGPHCFGVPRAALLLRRGSGKNYNHXW

SEQ ID NO: 288173 - protein, 73 aa, Zea mays
  Clone ID: MRT4577_25905C.1.pep
FKASESKKSHLIQVNGLKISSRQGKRWLKNERLVFQKRNAGPCFLIEKEKTRYNLTVFAGKKEDTYKFNWKYT

SEQ ID NO: 288174 - protein, 47 aa, Zea mays
  unsure (1)..(47): unsure at all Xaa locations
  Clone ID: MRT4577_25906C.1.pep
LPNSYHXSKENPDHFSVQNLGLKQVNACIEQLSVHLCEQEKSVYDDL

SEQ ID NO: 288175 - protein, 82 aa, Zea mays
  unsure (1)..(82): unsure at all Xaa locations
  Clone ID: MRT4577_25907C.1.pep
MGREFGNLTRIRHAISYSLSPFEQRALPAXFSKGIPNVLRRTRERILRVAPPCVLFYLIYTWGNQEFAQSKRKNPAKYENDK

SEQ ID NO: 288176 - protein, 54 aa, Zea mays
  Clone ID: MRT4577_25908C.1.pep
PTAIRLLSAMIHAMLYCHKKKCTRCLSIQGVLCHPKDIAERKNYPNQRERFICY

SEQ ID NO: 288177 - protein, 131 aa, Zea mays
  unsure (1)..(131): unsure at all Xaa locations
  Clone ID: MRT4577_25909C.1.pep
MASEVVRPSDAELLKAQADIGRLSLSYLTPLSLRCAVELDIPTGIYRHGGAASAAELATGLVLPCTKLPLLRRVLGVLAAWXVVTGHKQSSEEERDRMSPVCYXLVDGIPHEDHMNHTXLVLTCTSTRYIE

SEQ ID NO: 288178 - protein, 175 aa, Zea mays
  Clone ID: MRT4577_2590C.1.pep
CCRAHSSGQWLRLLLYPKWKSRDKDELQGFAVDRPEPLVHFALSSGSYSDPVVRLYSPKSVFQQLEAAKEEYVRANVGVRGRGQHKIILPKALELYARDAGLGAQEVVAAVECHLPEGLRDAVRRSQQQAGRARAVEWKPHNLAFRYLLAKELVGGSPACSRQLEPVSAPLRAGP

SEQ ID NO: 288179 - protein, 75 aa, Zea mays
  Clone ID: MRT4577_25910C.1.pep
SLPATFFFFFSHEKTTTHPRSAGLCSSICHQLWCQLMYTDADIWRDIHFSVDLCEKGQRVSPCIGEHYESRGCFV

SEQ ID NO: 288180 - protein, 415 aa, Zea mays
  Clone ID: MRT4577_25911C.1.pep
VVGFARKLGRIARDDPRRVAHSIKVGLALTLVSVLYYVRPLFNNWGVSTMWAVLTVVVVMEYTVGGTLSKGLNRACGTLAAGFIAVGAHKVAYLCGDKAEPVLLAVFVFLLSSAATFSRFIPEVKARYDYGVTIFILTFSLVAVSSYRVDELIRLAHQRFSTIVVGVGTCLCTTVFVFPVWAGEDLHRLAIGNLNKLAEFFEGLESECFRENATFENLEAKPFLQVYKSVLNSKATEDSLCNFAKWEPCHGKFKFRHPWSQYQKLGALSRQCASSMEALASYVITLTRTEYPEARPELRSEVRTACRQMSLHSAKALRELSAAMRTMAVPPSPANAHMSAAAKAAKDLRDELEDADLAQAMHVAVVASLLSDLVTKAKQITESVGTLARLARFVKNNDHENNADDKDIAAIDAVS

SEQ ID NO: 288181 - protein, 148 aa, Zea mays
  Clone ID: MRT4577_25912C.1.pep
YAEPPGVTSHNIHTYMGERPKNLFFYVYPDRRKVCLPNTRKTKTGKKEETIHPSMGLGFHTGGKNLKKMPAQGRGCRPCVPRGRPKGNNFLPLPLPYSRKRLNPETSETPTMLRLAATEQATGPPAWAQKRLERGHVFIHWNWWNPYL

SEQ ID NO: 288182 - protein, 117 aa, Zea mays
  Clone ID: MRT4577_25913C.1.pep
RSEVRTAGRQMSLHSAKALRELSAAMRTMAVPPSPANAHMSAAAKAAKDLRVELEDADLAQAMHVAVVASLLSDLVTKAKQITESVGTLARLARFVKNNNHENNADDKDIAAIDAVS

SEQ ID NO: 288183 - protein, 81 aa, Zea mays
  Clone ID: MRT4577_25914C.1.pep
QKPIKGSPYPRGYYKYSTGRGCPPRKHVEGDPPDPSMLIVPYEGEHRQSPPSGQDPPPPSLAPLRELPTHKFGFRPALSCQ

SEQ ID NO: 288184 - protein, 82 aa, Zea mays
  Clone ID: MRT4577_25915C.1.pep
ILWIAGFSLYPYILPVKIIDSCETYVFPWCPNSFCYELLMIKSFSEKIVVSILTDGLHVLYNDDVYISPSKDVGVVNLVPYT

SEQ ID NO: 288185 - protein, 77 aa, Zea mays
  Clone ID: MRT4577_25916C.1.pep
WSVVEHPGAPANVACAIAKLGGSSAFVGKFGDDEFGHMLLNILKQNNVNSEGCLFNYNAPTSLGLLDTHARARRRMI

SEQ ID NO: 288186 - protein, 176 aa, Zea mays
  unsure (1)..(176): unsure at all Xaa locations
  Clone ID: MRT4577_25917C.1.pep
MFGKKKKKKKKKKKKKKIKKKKKKKKKIKKKKKKKKKKVPARPAPRPGTRFIPQFLPSVTXMGIKHPIGQPYRLQQALAGSVLQQPFAQLQQQSLAHLTIQTIATQLKQQFVPPLTQLAEGNPVSYLKQKLFASNPNALANTAAYQKQLQLQQFLPAFIQLPMGNPATYLKQKQLF

SEQ ID NO: 288187 - protein, 107 aa, Zea mays
  unsure (1)..(107): unsure at all Xaa locations
  Clone ID: MRT4577_25918C.1.pep
NTNKQHKKYHPIPPLEQQCVSYIFSLLMLLALSVSITNPTIFPQCSQSTIASLLPPYTISIIALLCXNPSLQPYKLQQVIAARYIPLSPLIQQLSHLFLVQSLLQTI

SEQ ID NO: 288188 - protein, 333 aa, Zea mays
  unsure (1)..(333): unsure at all Xaa locations
  Clone ID: MRT4577_25919C.1.pep
MAVDEVNSVYVGGLPYEANEEMLRDAFGYYGTIVSVKVINDHAVKGKCYGFVTFTHPRAAEQAIAGMDGKKLGNRIVRVNEVRTRGPRDFGRDGFRRDPRRYGRDPYWDRRDRERSYDRERDPYHDRDSDRSREHDRERDYEHGGFNREIDYPMDRDREGDERRPREHDRTAEMHNVDSDNDKDKEHVSRKGSARXKGHDSRDLSSSSDGLQNDGKHQLDKTIQMREDLENEVSQIKDKISAKGQHIADLQKKAQKLEDELAAARKVSSERQLAVTDIXMQLYKHFLQLQDYNDRVKTAEHRLQSLVDAAMAELDMAEDATTRDGSMYENGVV

SEQ ID NO: 288189 - protein, 65 aa, Zea mays
  Clone ID: MRT4577_2591C.1.pep
PVLTYTYTRRFGGVYWYAPSISGSSRLSLTRTCTITRAILHSILVFAFLPPPFIFFCCYAKPYSR

SEQ ID NO: 288190 - protein, 139 aa, Zea mays
  Clone ID: MRT4577_25920C.1.pep
CSLCSHPKGRDSKDLSSSSDLQNDGKHQLDKTIQMREDLENEVSQIKDKISAKGQHIADLQKKAQKLEDELAAARKVSSERQLAVTDLYKHFLQLQDYNDRVKTAEHRLQSLVDAAMAELDMAEDATTRDGSMYENGVV

SEQ ID NO: 288191 - protein, 115 aa, Zea mays
  Clone ID: MRT4577_25921C.1.pep
QPPSPRGLAFFFNLRAPPFSPFKSGRLGPPLYCGLAPSLGPPGFPLFASGSYFLGICWGITFSPGVRVFPLFPPIFFPLPFRKIWFPSGSRFGVLGVAPRFPGPLGGRVGIYLPR

SEQ ID NO: 288192 - protein, 51 aa, Zea mays
  Clone ID: MRT4577_25922C.1.pep
HRCQKAGSNIRLSQSFKSHALHGKIKLLKKQMVQASCHCRPYTGTRTHAPI

SEQ ID NO: 288193 - protein, 49 aa, Zea mays
  Clone ID: MRT4577_25923C.1.pep
IRLEFFYEARNTKRGGVVGRRRARKKKPITRADLKLTFANPKAAHFHNR

SEQ ID NO: 288194 - protein, 32 aa, Zea mays
  Clone ID: MRT4577_25924C.1.pep
SQVTICAFRAQDIRVFLYLLCSSRFRLTTFIE

SEQ ID NO: 288195 - protein, 138 aa, Zea mays
  Clone ID: MRT4577_25925C.1.pep
VHILFLMVLLTKRNDAPGEHIRALHMGRAFPRNQQQAYITTRSFQYRTLKRHSLQHGLCVPGPRPADHLIKSEHTHFTYVRTPIETYKKNRSFGPLTVPCWRRTLRHKQTCNETRRLLIDLDRLPQQITVLSICIRLT

SEQ ID NO: 288196 - protein, 60 aa, Zea mays
  unsure (1)..(60): unsure at all Xaa locations
  Clone ID: MRT4577_25926C.1.pep
VLDQPQVIGLDDTGLPETAYHSSMKSHVDLMKHLYLTILLSGXSTVFPIISLRLSTEITC

SEQ ID NO: 288197 - protein, 197 aa, Zea mays
  unsure (1)..(197): unsure at all Xaa locations
  Clone ID: MRT4577_25927C.1.pep
SCLARSRACAVPVRIIQNEEIVAGDDGPKLRRGQRETPAGXRYAKAKPRPSKWDDAQRWLSSSRAHDDDDRRRSSCADDRLLLPSASQKXTLVERRGRRRRPARGAGARRAGRXGAEAETKRVDSVLAYGQPPRCPSLRDVGTEMTPAGSKEPSRANTPRATLPATPPSTAGRAIHAPLRPPDLSTVDGGSPPGLAA

SEQ ID NO: 288198 - protein, 141 aa, Zea mays
  Clone ID: MRT4577_25928C.1.pep
GTQILGPNRDFFSFFQKNKKTEPRGGGRATKGGWIRQQGAKLPPQFRHYPPINIGRGGPPPFWNFENKKRINLPPPGGGHEPPGGSPKLIRGAGTNRGTFNFYAKGPGFGLGFCPPLAQKNHTFDHRPPPLQNQLMQPGLK

SEQ ID NO: 288199 - protein, 132 aa, Zea mays
  unsure (1)..(132): unsure at all Xaa locations
  Clone ID: MRT4577_25929C.1.pep
MKLGLVVIAGIGXLSSVTCTQTRSFMCSXHHNHEQHHHXQQHRTLIHPRQHTIHNYHXTASNYQQHTCHTMLPQQHQPLQERHVQQLHRQPQHQQLHALLQKQHHHHCQRHHQHYHQSQCTVQQHEQYHEQY

SEQ ID NO: 288200 - protein, 70 aa, Zea mays
  Clone ID: MRT4577_2592C.1.pep
GNVSHCFKTYPKLGPHWVKWAFKPNVKWPFLGGLKGLQTVKWAYRLGPGYWGKITLHGKPNQIYCPILFF

SEQ ID NO: 288201 - protein, 86 aa, Zea mays
  unsure (1)..(86): unsure at all Xaa locations
  Clone ID: MRT4577_25930C.1.pep
SLLHLIALIDPIVSSAAFNLDQCGVSVLGLQEILRVCPVINERRCVPLYIRCGIRVXEPLSSAMPSAEKTRTSLGFVVRLVPRRDA

SEQ ID NO: 288202 - protein, 82 aa, Zea mays
  Clone ID: MRT4577_25931C.1.pep
LRRMRIWINNPLKKPLRRTVRLDTVIVRLCARTVRPYGRTVRCCMRTVRHWMRTVRLDSLGFTQYVVARTQVSVIVIPNFGM

SEQ ID NO: 288203 - protein, 110 aa, Zea mays
  unsure (1)..(110): unsure at all Xaa locations
  Clone ID: MRT4577_25932C.1.pep
MVAHRFHQYQVVGRALPTPTDEHPKIYRMKLWGTNEVRAKAKFWYLLGKLKKEKKSNGHMLAINDSFEXNAATINSXGNXLRNHGRTGEHKKEMDDGETTLNGGGRQRYN

SEQ ID NO: 288204 - protein, 219 aa, Zea mays
  Clone ID: MRT4577_25933C.1.pep
KKAGSGGWGVQQTASEASEMGRGEIVSDASQAPAEKGWVEDGGRHRPRLEKPSALPRKKKDDRSLAFKRRAYGLCFRCLAEDQFVADCRVLVTCLGCSHSGHRERDCPGRLPASQGRHRCSMLPPSAPGLPNHQPPASSQQLQQRSWAAVVASLTWLVQEALCSNFGVSGSGLSDPGKTTFAADLGLQQSLFAAQTETLRAELQALVTAHVEEGVQPSP

SEQ ID NO: 288205 - protein, 122 aa, Zea mays
  Clone ID: MRT4577_25934C.1.pep
QGLSPQVPVDGCGMMGRFSTFVPGCTCDRPCEGRCVWVYPGRLAYCKWFLLTCKVGSLAFSIYGLWGSCLFNLSGGYRFIRTMRFHGGRNSSVIRSKKHREAKNPGCLQRPPIVLGRPWRPT

SEQ ID NO: 288206 - protein, 67 aa, Zea mays
  Clone ID: MRT4577_25935C.1.pep
GPCSRITRFKGWRPVKQKTCLKVRPLPVSMYFLASLSTAASRLGKSCPDSFSSNVCVRSIKQVSSVL

SEQ ID NO: 288207 - protein, 126 aa, Zea mays
  Clone ID: MRT4577_25936C.1.pep
RKLGIRLEAVGCFVSHCGWNSTIEAMASGGVPIVGVPDSFDQPTNAYLVEEEWGVAIRTGRNSDGVLSGTELARCIELVMGDGARAVAIRERMKGLKTMAQAAADTGGSVETNLRHFVKTFQALEL

SEQ ID NO: 288208 - protein, 391 aa, Zea mays
  Clone ID: MRT4577_25937C.1.pep
MVGPDKVRVSWITAADAPATIDYGTAPGQYPFSATGNTTAYSYVLYRSGSIHDAVIGPLQPSTTYYYRCSGSASRELSFRTPPAALPFRFVVAGDLGQTGWTESTLKHVAAADYDALLLPGDLSYADLVQPRWDSYGRLVEPLASARPWMVTQGNHEVERLPLLEPRPFKAYNARWRMPYDYAAADSVAAAPPSDDNLFYSFDVAGGAVHVLMLGSYADYAAGSAQLRWLRADLAALRRRGTPPAFVLALVHAPWYSSNKAHQGEGDAMRDAMEALLYHGARVDAVFAGHVHAYERFQRVYAGKEDPCGPVYVTIGDGGNREGLANKFIDPQPSISAFREASFGHGRLEVVNATHALWTWHRNDDDQPVVADQVWINSLAANPACNRSDKM

SEQ ID NO: 288209 - protein, 101 aa, Zea mays
  Clone ID: MRT4577_25938C.1.pep
ASRRWSSARPTFQIRTIRRYTGFTHGLSGWKSNYRLRRGARAPDDDRRARRRRRRRVRRGGKEGEEEKAGREELQLHGTPGARNPWMLRSDLNLMRRRLPA

SEQ ID NO: 288210 - protein, 66 aa, Zea mays
  Clone ID: MRT4577_25939C.1.pep
SLNLMQHTILGRLQDSNAVLSHFNDFSQHCFAEISGDIARNTRCLESVKSDLDYIFQKLRYSFLGG

SEQ ID NO: 288211 - protein, 109 aa, Zea mays
  unsure (1)..(109): unsure at all Xaa locations
  Clone ID: MRT4577_2593C.1.pep
WRHHHNLRKWRSRGTCPVSSTPSTPLLKNELDIVIPTIRNLYFLEMXSPSFRPXHLIIVQXSXPTYIFKMPEGFDYXLYNRKYINRILDTLASCMSFKDSTCPCLCYTA

SEQ ID NO: 288212 - protein, 39 aa, Zea mays
  Clone ID: MRT4577_25940C.1.pep
FMLLIIVTSPLICAYVWVQYWKHKYYYQKFMFKIICPFN

SEQ ID NO: 288213 - protein, 28 aa, Zea mays
  Clone ID: MRT4577_25941C.1.pep
TNYSLPVLRHLQYIKITWKLCVSDYFAL

SEQ ID NO: 288214 - protein, 319 aa, Zea mays
  Clone ID: MRT4577_25942C.1.pep
MELFPDGAFVRLQSRARRTYVHADGDWAGVSLRPNGPVPPLNAVWRVEHLVWSDQGDTFVLLQNAAYGRYLSFSIQEAPPGHRGRCTTQLDRNEPHALSPSSPWMWRVQRLDPPDHGYVRLRYFGCDLRANGRHRTWNTCVTVDVNRGRRVSTMMQWTAHVVAASSVPPPLPASPQPQLPRLSSRSNTFLSLNKVFQQIGVCCGLLFWRRTGVHQHPPRTIRHVRASDEGDFDQNPHNWPSFVSYDHSVMNLRIQLGQLQDDWDGEMFGFTLCMRPGSHGRLTPLVTDLPRSLDPMDIVVFRTGSPGDYSACTCYSFSI

SEQ ID NO: 288215 - protein, 109 aa, Zea mays
  unsure (1)..(109): unsure at all Xaa locations
  Clone ID: MRT4577_25943C.1.pep
SXXLGFGXKFTWRXXWRQLXXVLFHWVSGPREXRRXXLSPFFKLXITGSYHTARPVQQTFPASGSRPHAGNIVLLLGSDPSTGPTGYHILRRLTSLPSMDYASPSSSEF

SEQ ID NO: 288216 - protein, 58 aa, Zea mays
  Clone ID: MRT4577_25944C.1.pep
EKFIMRASRNLHSNPNLLEIDRYDTINIFLSPITTYIIKPSIEKVNRQSFHLKPFTKE

SEQ ID NO: 288217 - protein, 125 aa, Zea mays
  unsure (1)..(125): unsure at all Xaa locations
  Clone ID: MRT4577_25945C.1.pep
PPFPQGDPRKSAIPFFPKKYAKAVETXQGGFKPDPPNPELVYGVXRGVYQIPKAPQGEINPGELPKNPNQVLPGPEIPNLFSGPIMGQVLIDFPGNPRAAPGPLKNPGVFPKIPKPVNVGIVPIK

SEQ ID NO: 288218 - protein, 126 aa, Zea mays
  Clone ID: MRT4577_25946C.1.pep
DKDESSVKDDGERSHRGSRRDKDESSVKDDGERSHRGSRRDKDESSVKDDGERSHRGSRLDKDESSVKDDGERSHRGSRRDKDESSVKDDGERSHRGSRRDKDENSAKDDGERSHRSSRGDNDGRA

SEQ ID NO: 288219 - protein, 236 aa, Zea mays
  Clone ID: MRT4577_25947C.1.pep
MAAPKPIWVRQAEEAKLKSEAETAAAAKAAFEATFKALAAAPGDDDKDADPAPPSPAEPASPESDDDAPAPPGPVDPSKCSAAGPGIGGGSAGTPSTFTVVAKDRHSRRLTAGGALVRVRVSPAAAVGGDDLEGAVKDNGDGSYTVTYVVPKRGNYMVHVDLDGAPVMGSPFPVFFSGSTVTPSAAFPTALPAVSSAYPNMVNQTMPNMPNYTGAPSSAFPSLLGAMPVRQRFLEK

SEQ ID NO: 288220 - protein, 923 aa, Zea mays
  Clone ID: MRT4577_25948C.1.pep
MAAPKPIWVRQAEEAKLKSEAETAAAAKAAFDATFKALAAASGDDYNDVDPAPPSPAELTSTDSDDDAPALPGPVDPSKCSAAGPGIAGGSAGTPSTFTVVAKDRHSRRLTAGGARVHVRVSPAAGVGGDDLEGTVKDNGDGSYTVTYVVPKRGNYMVHVELDGVSVMGSPFPVFFSGSTATPSAAFPTALPAVSSAYPNMVNQTMPNMPNYTGAPSSAFPSLLGAMPSSTAGSSGGVILPGVGASLGEICRDYMNGRCTKVETDCKFTHPPQQLLMSLLAATTSVSALGHAPLAPSAAAMAAAQAIMAAQALQAHAAQAKAAGGTSGSTNKADEADALKRTVQISNLSPLLTVDYIKQLFGFCGKVVDCVMTDTKQIVYVEYSKPEEATAALELNSKSVGGRPLNVEMAKALPPKANNNLPMMMQQAVQLQQIQFQQALMMQQSIAAQQAAARAATMKSATEAAAARAAEISRKLKAEGFGGDNMEEKDAKGKSGSPSSPTRRSKSRSRSPIKYRRSRRSRSYSPPVGRSREHRSRSPSRSRHSKHGSDRSHRDDKDRYSRSGRRESERSRDHHSSRSRRNRSKSRSPRHKKPSRVDSRSPKKQRLESLSPSKSRSARAGSRSPRHHKGSKSSPTSDRHSRHSRHSRSRSLDRKHHHSDKKDRKSEIQDDRRSHRGSRRDKDESSVKDDGERSHRGSRRDKDESSVKDDGERSHRGSRRNKDESSVKDDGERSHRGSRRDKDESSVKDDGERSHRGSRRGKDESSVKDDGERSHRGSRLDKDESSVKDDGERSHRGSRRDKDESSVKDDGERSHRGSRRDKDENSVKDDGERSHRSSRGDNDGRSVKDPVEDKRVDSNAVAHKRSSEDEILNNNSSNHKKHRHEVGLEVDEGNDVCPAVADPNGKHETGVGGSLGGAAESAI

SEQ ID NO: 288221 - protein, 70 aa, Zea mays
  Clone ID: MRT4577_25949C.1.pep
RYRHQGAYWPHRHLKTEITHGSRGHDARRCEGACTALGYPSRSLGQLVQTDVRTIKMLIEDILEMTEIAI

SEQ ID NO: 288222 - protein, 54 aa, Zea mays
  Clone ID: MRT4577_2594C.1.pep
SRVALHVDPIRQASLDWKRRIKIVDGIAQGLLYLHNLSSVRITHRDFAAGNILL

SEQ ID NO: 288223 - protein, 120 aa, Zea mays
  unsure (1)..(120): unsure at all Xaa locations
  Clone ID: MRT4577_25950C.1.pep
SGGMDPLLLNGMYDQGVVRQHVSAQVTTGSASSVALPAPGQKTQMLALPAPDGSXADLEKKQQLLSQEQIMWQQYQRDGMQGQSSLNKLDQAYHNGFAPNPGMPYGMPAAYNTGYYYPTY

SEQ ID NO: 288224 - protein, 123 aa, Zea mays
  unsure (1)..(123): unsure at all Xaa locations
  Clone ID: MRT4577_25951C.1.pep
GTXRGRPGSTRRRYALSDCYVPGVCEVAHAALIYAATRWSAGPRHNPALQMLRCDDQQRLLRGLSSSANCNEARAIATFYGCAVAMRISLSTELVAQSSLTADNVALTYVLPLARLLFINRRG

SEQ ID NO: 288225 - protein, 40 aa, Zea mays
  Clone ID: MRT4577_25952C.1.pep
MANIDMAAVLADMERDAEADARSPRTKPAWTVGPDSWSAR

SEQ ID NO: 288226 - protein, 187 aa, Zea mays
  unsure (1)..(187): unsure at all Xaa locations
  Clone ID: MRT4577_25953C.1.pep
RFPSNGGNEVTSAWQNPAAEPGKADWELALVETASNLSMQKPAMSGGMDPLLLNGMYDQGVVRQHVSAQVTTGSASSVALPAPGQKTQMLALPAPDGSMQTVGGDPFAASLAVPPPXSYVQMADLEKKQQLLSQEQIMWQQYQRDGMQGQSSLNKLDQAYHNGFAPNPGMPYGMPAAYNTGYYYPTY

SEQ ID NO: 288227 - protein, 126 aa, Zea mays
  Clone ID: MRT4577_25954C.1.pep
TQASAHASAHASAHASVFWDLHLSADHMRCDGVVPDLVTHGCFVDAYLERRLARNLTFAFNRLDGDAEPVVATDPIVFEAFGKGGFHASSEVLLETTGGKGRWTYYKLLGVYLRKQHRRNQVFWNY

SEQ ID NO: 288228 - protein, 75 aa, Zea mays
  Clone ID: MRT4577_25955C.1.pep
SASSATSTSARPDGALNSSSGAQPTGLVVIADSAKRLGSALVDRSRESGLPVPTWVTLAVGLVRQAGIKGSPRPV

SEQ ID NO: 288229 - protein, 381 aa, Zea mays
  Clone ID: MRT4577_25956C.1.pep
MAGMQWGPQFTGKIGQYMHSMDMSDGGKKQEAAAERYGAAGYVYNVHAHGGAAAAGGGPPAYHHQSSAGGYAYKWSTPPRNHPPPAYGGAYDEYHAHQKPPAYGGDIGAGGGGGYPQNPPAYGGGGGGGYRQNPPAYGGGGGGYPQNPPAYGGGGDGGYPQNPPACGGGGGGYPAPERGGWDDGRPPPREQQPPPGYPPARPVECDERHPPSQQKPPPSCQEVDKKPQPAENQREPPPDHAGSKETNKQDVAAWKPKASPKHEGNKPPATDVPPQKQPPYGYPHPGWGGGEGGYYGGGGGGYPPPPYQGGYGGYHGGGGYGGAHMGWPAPAPPAGAYAGYGAYHGGYGGGHGGAGSYAGNGKYTLRNEGKFKHYAHLHGKF

SEQ ID NO: 288230 - protein, 90 aa, Zea mays
  Clone ID: MRT4577_25957C.1.pep
LYSGYTSLRFEIVQGMCGSYVAERSVLCASYESGKVFLRVLDVFLSFLIQRSGAALVKVGRGGKWVWVPRPQNLSVKKILAPCMGVLSLS

SEQ ID NO: 288231 - protein, 86 aa, Zea mays
  unsure (1)..(86): unsure at all Xaa locations
  Clone ID: MRT4577_25958C.1.pep
SISTSTKPVIEFCELKYXCTSQERVEPEAGPVAPVVPRHPKSYMEIMEMIQRGERPDDIQDINDDPXNXDQPISEPRMAPKPKPWE

SEQ ID NO: 288232 - protein, 272 aa, Zea mays
  Clone ID: MRT4577_25959C.1.pep
MAELSTSSDGLVDEEARQQEPGQGSAEGSHGLQDTKEQDIRKGKAALVSTELLREDLVQSAVSFLKHPKVVASSDGQRRSFLVNKGLTMDEIDEAFRRLQSPSSNSASSNMCTSQGMFDHSCRITEQEIEVDRKCMDGLERVEPEAGPVAPVVPRHPKSYMEIMEMIQRGERPDDIQDINDDPPNPDQPISEPRMAPKPKPWEKQGQGSLACDLKSPPRESDVLRSEVQHDGTNQVTESADGANQTHSLLQVGVAAGSESPGVPDDAASSLE

SEQ ID NO: 288233 - protein, 57 aa, Zea mays
  unsure (1)..(57): unsure at all Xaa locations
  Clone ID: MRT4577_2595C.1.pep
FFLKPTPIFIFFFNFILIYYFFFFIFFXFIFLYFFFFYFFYIFFFFFFFFFFFLFFF

SEQ ID NO: 288234 - protein, 237 aa, Zea mays
  Clone ID: MRT4577_25960C.1.pep
MHHSFGVQGRELLISSNTASSMSSHPVHAKAHTLLEESNACLPESSLVVEDPGELIFEYFETEQPSLRPPLFEKIKELVSSANVSDHRVFGDTEKLQNAKLCELHPASWFCVAWYPVYRVPRGNFRAAFLTYHSLGKLVHKKCSMDTNDGHTQVVSPVVGLQSYNDKGEQWFQLRCPDLKQLPIEDSLKTSPAEVHKERLRTLKMGALAMARAVVPKGSGESVNHHPDYEFFLSRCA

SEQ ID NO: 288235 - protein, 51 aa, Zea mays
  Clone ID: MRT4577_25962C.1.pep
LPRAVLNQGHHIPSNFNLHVMRNTILLHGSIILRGRESATAKVTWYYCSGN

SEQ ID NO: 288236 - protein, 94 aa, Zea mays
  Clone ID: MRT4577_25963C.1.pep
ARIIRRPLRRTRRFIFNHRQPKTRRHLINIKMNRITIITRLRKRNQLKNNRRTPRRLQHLHLKQQHPTTHHRRLHQRLRRLPTRRHRRLHSEAA

SEQ ID NO: 288237 - protein, 60 aa, Zea mays
  unsure (1)..(60): unsure at all Xaa locations
  Clone ID: MRT4577_25964C.1.pep
SIGGNKHVIIVNIPVLKGEVCSKSQXVILACLAFLVPRRPIGMIYPHHDEISQDYKGLSE

SEQ ID NO: 288238 - protein, 96 aa, Zea mays
  unsure (1)..(96): unsure at all Xaa locations
  Clone ID: MRT4577_25965C.1.pep
MANQANQPTVLHKLGXSLHLRSXISEGVRGRNICPSVSSYERRFATRNYMTHTLLGPSMSVSEGIDGPVMRNPFCVNDPDEKXDKNFXLDFMILGV

SEQ ID NO: 288239 - protein, 131 aa, Zea mays
  Clone ID: MRT4577_25966C.1.pep
MTTTTLPCAGAAAAFLLLVLFSSAAVSLATAAGRESKQGQQAAGASVYVVMVKPPAEGVDSKAYQMGILAAALGSEEKAKQALIYSYKAAASGFAAKLTPAQVAALQEHPDVLQALPDVKYTLQDSNHLNR

SEQ ID NO: 288240 - protein, 48 aa, Zea mays
  Clone ID: MRT4577_25967C.1.pep
QTPYLLQKKTFLSRRKDLPTLSTLKSSPNHHYISQLFKHPNNSPLYKS

SEQ ID NO: 288241 - protein, 78 aa, Zea mays
  Clone ID: MRT4577_25968C.1.pep
GISLELQLKFLLDEKGKVTQYLEHRKLSNDITFSANFLPEFRILFLVVTMSNIVSFINHMLVKILFLFSFNTDVVICS

SEQ ID NO: 288242 - protein, 65 aa, Zea mays
  Clone ID: MRT4577_25969C.1.pep
LLTKKKSRAKSKIFSKRALAKKPLGSVPPCRDFLSPKKKNGRKTLFCLKFGEFWSPLTQSKRGPS

SEQ ID NO: 288243 - protein, 66 aa, Zea mays
  Clone ID: MRT4577_2596C.1.pep
TPSLKVNNKYFATTHFTDLPQSWLCTVKQSTPENMFISVIRYPDVLQCICYTSSKISTPRVRPRVR

SEQ ID NO: 288244 - protein, 79 aa, Zea mays
  Clone ID: MRT4577_25970C.1.pep
SGWVFLENRPFPTPAWLLQKPLIRSQSFTPNFLSCWTILQHQMPKCPRTSYLRAKPLYLVAIPLTIPEPMYPSDKTWAP

SEQ ID NO: 288245 - protein, 37 aa, Zea mays
  Clone ID: MRT4577_25971C.1.pep
EWFFVFEPPNFIINQQYPTCFQYDGINSFFNHSKIIV

SEQ ID NO: 288246 - protein, 51 aa, Zea mays
  Clone ID: MRT4577_25972C.1.pep
TRAYDSGRHDGERQNCCHPRQTPMRCQHSRVVLGRTQPAPARGPQVRAVRA

SEQ ID NO: 288247 - protein, 63 aa, Zea mays
  unsure (1)..(63): unsure at all Xaa locations
  Clone ID: MRT4577_25973C.1.pep
QTFPSKERPRVFPLNKKKNKLSNKKFFFKKGRPRVFLLKKKKKKKKKKKKKKKKKKKKKKKKX

SEQ ID NO: 288248 - protein, 135 aa, Zea mays
  unsure (1)..(135): unsure at all Xaa locations
  Clone ID: MRT4577_25974C.1.pep
MQAYMEGGQLLGACCLPGFLVPDHYAAFPLPLPLQLPSQPNDNRLFQMPFDQEEAENHGGMLYSDQCGLYPLPAFGSCSAAAGATAKPTAGFMPSTIGAETKVCTSLTTKGCNESNSTWWKGAAATIAXRRGKMK

SEQ ID NO: 288249 - protein, 59 aa, Zea mays
  Clone ID: MRT4577_25975C.1.pep
ELAAAFNLCCIFVLSALYHTFVQLFLLLTWYAHYNSFFSSPCNKMEGAAQTTFLLNIPI

SEQ ID NO: 288250 - protein, 69 aa, Zea mays
  Clone ID: MRT4577_25976C.1.pep
SFSNGPTTTFHQPKKTKKFLCANPPPPFLQPTTPFPITVPNQTPPILLLLTRLPKTNHFTIKALLPRQV

SEQ ID NO: 288251 - protein, 104 aa, Zea mays
  Clone ID: MRT4577_25977C.1.pep
ANPPTMKKAGPQKEENDLFENKKGFASQDVFFRKKLGLFPAKNKVKGGAKGFGHPLGATRGRGGRTFFKKKKTPGKEFRVGGIFIGKRFGKGGASVFQRGNGVY

SEQ ID NO: 288252 - protein, 72 aa, Zea mays
  Clone ID: MRT4577_25978C.1.pep
SYPKNKQQGFTIERWAPNRHLWITRTQLTHTNQLNHHLRHKPYQHLQRNTIHQHRERHYITQKQLNFHGLMI

SEQ ID NO: 288253 - protein, 235 aa, Zea mays
  Clone ID: MRT4577_25979C.1.pep
DAKLSGTLDVVATMTGLQELWLHGNDFSGPVPDAIAGCKELYTVRLNNNQLLGLLPPGLAALPALRELKLDNNNLLGPVPALKAPTFTFSGNEFCAAKPGEACAPEVMALLHFLDDVQYPNRLVGTWSGNDPCAGWLGVTCVQGKVTMLNLPGYGLNGTVSQSLGNVTTFSEVNLAGNNLTGRVTDSLTRLASLQKLDLTMNDLYGPLPAFSLTVDVNVTGNLSFNTTDTQPTDA

SEQ ID NO: 288254 - protein, 67 aa, Zea mays
  unsure (1)..(67): unsure at all Xaa locations
  Clone ID: MRT4577_2597C.1.pep
DVKYRCFLAXLVWVXKDHSRQNTFKTYGEVLRSKIILDRETQRYRGFRLVTXSKEDAMPNKKKGMKL

SEQ ID NO: 288255 - protein, 107 aa, Zea mays
  unsure (1)..(107): unsure at all Xaa locations
  Clone ID: MRT4577_25980C.1.pep
KKEKEKRRGRNSKGGGHTWAKRKKSTGEGGGIVSMSHKKKGKGEKGGARKEVKGGRVENRNGGARXFGXLGLWGGGVFLAAGCWGRRGSGLGTSRASNDVAHTELLG

SEQ ID NO: 288256 - protein, 70 aa, Zea mays
  Clone ID: MRT4577_25981C.1.pep
DSPYRVLGGRAVAVGATARFTGHRCVGDGAVGEPEFLSRGLLDLVSPGALPGRQLRGFHGSQEMILSCST

SEQ ID NO: 288257 - protein, 66 aa, Zea mays
  unsure (1)..(66): unsure at all Xaa locations
  Clone ID: MRT4577_25982C.1.pep
TXAAGPNQRKKXGTHGRQRGIXXPXRXKEPXSQTIXXRSRXHKTAKXXXXTMXRXRQXTLRFIREQ

SEQ ID NO: 288258 - protein, 46 aa, Zea mays
  Clone ID: MRT4577_25983C.1.pep
YLSPKCTSVVREILCHVPKRLILMLHQMTPAEKEMFTLHGKLDFYT

SEQ ID NO: 288259 - protein, 149 aa, Zea mays
  Clone ID: MRT4577_25985C.1.pep
HSVPVPILVRWIHLCIYICAVAQLWRSGHCYCGVTMGVAPASHLYRGVAMHGCLYTSGETQGSGTQLAWSIALRLAGVPVPASAARRLWWVRASGTEEGVQAVTYRRQACNCIRAWGHAAANAFLPCTAGVYRTALTPRGATRSAFICC

SEQ ID NO: 288260 - protein, 402 aa, Zea mays
  Clone ID: MRT4577_25986C.1.pep
MAPGSIASRWRELQGADSWSGLLDPLDIDLRANLIAYGELTQATYDGFNQERRSPHAGACVFGYSDLLAGSGAAAAGSYAVTRFIYATSALPGVPEAFLLLPLPDLLPESWSRESNWMGYVAVATDDGVAALGRRDILVAWRGTMRGLEWVNDFDFTPVSAAPVLGPAAAANPFALVHRGFLSVYTSSNPDSKYNQTSARDQVLAEVSRLVALYKDEVTSITVCGHSLGASLATLNAVDLAANGVNAPPAGSSQPPCPVTALVFASPRVGDGNFKRAIASFPDLRALHVKNAGDIVPTYPPLGYVDVAVQLPIATGRSPYLRQPGTIATLHNLECYLHGVAGEQGSAGGFRLEVDRDVALVNKGEDALKDQYPVPAQWWVAKNKCMVKGADGHYALQDFEQI

SEQ ID NO: 288261 - protein, 138 aa, Zea mays
  unsure (1)..(138): unsure at all Xaa locations
  Clone ID: MRT4577_25987C.1.pep
PKGRFFKEEIXKIVPAPEKFKLGGQEPKKKVGSQNSLGKYAFNMGHPVKEKKIAFKMASPPKKKIKGALYPALNWVGPHHLPQGGEFFFKKKKVENLFNPLFSKMFQGGGAPNGGFRGKEKDPPAGKGGPGPKIKEGG

SEQ ID NO: 288262 - protein, 49 aa, Zea mays
  Clone ID: MRT4577_25988C.1.pep
WLGLHTLPFDMTSILLFISTSYIYIAHVLGVWTNGHPRSRRGGWIHGLD

SEQ ID NO: 288263 - protein, 72 aa, Zea mays
  Clone ID: MRT4577_25989C.1.pep
HNLECYLHGVAGEQGSAGGFRLEVDRDVALVNKGEDALKDQYPVPAQWWVAKNKCMVKGADGHYALQDFEQI

SEQ ID NO: 288264 - protein, 52 aa, Zea mays
  unsure (1)..(52): unsure at all Xaa locations
  Clone ID: MRT4577_2598C.1.pep
LNTXXSIYIPVSSLVVKSSATXXVCDVSTVLGFGIPIHGPYCHYYIXYTYYQ

SEQ ID NO: 288265 - protein, 104 aa, Zea mays
  Clone ID: MRT4577_25990C.1.pep
YEEGAPCGLFFFVGRGSASPWGESRGGFFYNRGFRVNMGLRCFFFLFPNWGVWFGFSVEETKPGFVLKIFCLGGCEPPKVAQGGSVLIIKNPPFRGPVVLLQIA

SEQ ID NO: 288266 - protein, 49 aa, Zea mays
  Clone ID: MRT4577_25991C.1.pep
SVNKPETKQSTQLVQLLGDLVSIGFWCMLWKRRCYIHSPTFALSRFILC

SEQ ID NO: 288267 - protein, 82 aa, Zea mays
  Clone ID: MRT4577_25992C.1.pep
PPSWCRWTGLRIRTGVPGSSFVWGGPGPSQRVPGCFLGGWAGASGLPSVFVSCGSEIAFASPSRFFKRSGRFFHVFVSSFVC

SEQ ID NO: 288268 - protein, 46 aa, Zea mays
  Clone ID: MRT4577_25993C.1.pep
SSGNNAEYFFFFFFFFFFLRGNDSLLAEHQQTQGVRSRVLCAVTTA

SEQ ID NO: 288269 - protein, 97 aa, Zea mays
  Clone ID: MRT4577_25994C.1.pep
LEAGRGLTSPPRISPSLACSGCFIPRVLRLLLATGTLCRRSKVPGQEKLEFQIVVRVNQLNLINLIKSSNKKRSGEAGVPNRSPCEPVESHQSYQVI

SEQ ID NO: 288270 - protein, 77 aa, Zea mays
  Clone ID: MRT4577_25995C.1.pep
RSISEKLQLQNHVLDVHELFIEDYYSYILCSHTCFTIILAAIQMLMPCTLYGGYKPYSQTYMCQVCKGFHGKSELYC

SEQ ID NO: 288271 - protein, 52 aa, Zea mays
  Clone ID: MRT4577_25996C.1.pep
IITSASTNDRQPDWTHKHWNLTAQAIHKSPLLNMVKSKDPGPARTAYKPQQT

SEQ ID NO: 288272 - protein, 73 aa, Zea mays
  Clone ID: MRT4577_25997C.1.pep
NLKININFFHKICFFFGRAPPRGDFCRFPSPWGGGLGMFLVWPGAPFSVLGPAIHRLGVLHSLFLERLGSFLT

SEQ ID NO: 288273 - protein, 41 aa, Zea mays
  Clone ID: MRT4577_25998C.1.pep
AYAKTDSIVPVNQLFQKPGVRLEANDPQALTVPPDFPPGYF

SEQ ID NO: 288274 - protein, 63 aa, Zea mays
  Clone ID: MRT4577_25999C.1.pep
QSLRCWGKGRCLNVLGVLQALSLKGLTYAYCPGNLCAMSEFLVNCNPVLKRVPVLIHHGKPVC

SEQ ID NO: 288275 - protein, 60 aa, Zea mays
  Clone ID: MRT4577_2599C.1.pep
APYINTSVVFQTEDLVVVHGVSRVLALISYRFMGALRASRCCLVFFPFIGVESPQSPPIS

SEQ ID NO: 288276 - protein, 262 aa, Zea mays
  unsure (1)..(262): unsure at all Xaa locations
  Clone ID: MRT4577_259C.1.pep
MSSSGPSPATGIHASPPLGLLPATGTHHTRSWGKTTSTSFTGSTTKHEQSLHGNVKPLQLAANESSRLAYRSPVLKNQWNLPASSSSTNVVTTFDDNEHVSSSVIEEKVGVLLLNLGGPETLDDVQPFLFNLFADPANALKIALEKKKLNANIYVGMRYWYPFTEEAIDQIKKDKITKLVVLPLYPQYSISTSGSSIRVLQDIVKEDSXFXGLPISTIESWYQRDGYVKSMSDLIEKELSXFSNPERVMIFFSAHGVPLTYX

SEQ ID NO: 288277 - protein, 88 aa, Zea mays
  Clone ID: MRT4577_25C.1.pep
MANAASGMAVHDDCKLKFMELKAKRTFRTIVYKIEDKQVIVEKLGEPEQSYDDFAASLPADDCRYCIYDFDFVTAENCQKSKIFFIAW

SEQ ID NO: 288278 - protein, 59 aa, Zea mays
  Clone ID: MRT4577_26000C.1.pep
THDFPHTLFFYFFFFFFFFFFFFFFFFFFFLMAKISYRYTNTLANSSSINYFFIKLANS

SEQ ID NO: 288279 - protein, 69 aa, Zea mays
  Clone ID: MRT4577_26001C.1.pep
KLFCICLVIIKHRNREQKLQGTENSKFRHKSGSPFLFSKNIKIFKDAESQQSEVRYDNICIIPSLSFPW

SEQ ID NO: 288280 - protein, 224 aa, Zea mays
  unsure (1)..(224): unsure at all Xaa locations
  Clone ID: MRT4577_26002C.1.pep
PAGTGQSQPSAHRGTASPASQKPEPAARRTRRHAARCGSTAAAMEPAAMDRIATRLSAVEDLYFPSSFLGPSPAGTGAAPPPSPPRRRAELRSLLARDAPLFLERYGAALSADELAAFDALSPDYEVDWHLRRLRAAAAGAPPPASRVRNRRRAFLDRLVREGEYFSEDAMREREPYLHHEYLGRFQDPLGRAMGRPGERXGRTLMRRAEEAVIVEKIPGSRLG

SEQ ID NO: 288281 - protein, 91 aa, Zea mays
  unsure (1)..(91): unsure at all Xaa locations
  Clone ID: MRT4577_26003C.1.pep
SAQPRLMEPIYLVEIQCPEQVVGGIYGVLNRKRGHVFEESQVTGTPMFVVKAYLPVNESFGFTADLRSNTGGQAFPQCVYEPWQXLPGDPL

SEQ ID NO: 288282 - protein, 63 aa, Zea mays
  unsure (1)..(63): unsure at all Xaa locations
  Clone ID: MRT4577_26004C.1.pep
PXVVVKQGQSAESPATEKTNHRASTDAAATSRSRPPARQALSLPLPFSTTGAQVPPIPTPPTA

SEQ ID NO: 288283 - protein, 48 aa, Zea mays
  Clone ID: MRT4577_26005C.1.pep
GRDYDFALPQTCILTWMHVEGKVLVWVRFFRHWPFIGRVIVCIVEPPY

SEQ ID NO: 288284 - protein, 160 aa, Zea mays
  unsure (1)..(160): unsure at all Xaa locations
  Clone ID: MRT4577_26006C.1.pep
LVLSFLWAGLCXGFPPFVXAGGRXFSARPGFPGXRRWWVPGGRLLVRXRXGLSSFVGLVAPGWFAWGVAFFFGVVLALCGGFSSLSCWVFVSSSPVSGPSCSGLLWSSVXFVGXXPVGWVVPAFVLLAXPSAFAPXXGEKVWAAALAGSLLRPACFFVLL

SEQ ID NO: 288285 - protein, 90 aa, Zea mays
  Clone ID: MRT4577_26007C.1.pep
QLLLGFRNCGFDVVPTRKLHLRIWGVLSCSVEVDHLTIGHPCGLQGVVVNPCLLSLCFCLALAHITEPQLCICSVVFSANLKSEVCSGFE

SEQ ID NO: 288286 - protein, 54 aa, Zea mays
  Clone ID: MRT4577_26008C.1.pep
TTSFHRDHLRLIFAGQQIGDGLTLADYKIHKESTLQLVLHLHGGQLAMLHLYCC

SEQ ID NO: 288287 - protein, 68 aa, Zea mays
  Clone ID: MRT4577_26009C.1.pep
HTRGISSSTHRFLVGTAETRRDLHRSGWGLVAISPERYTHICMYESLGVLSVARVEGAAVSSTLKRAQ

SEQ ID NO: 288288 - protein, 81 aa, Zea mays
  Clone ID: MRT4577_2600C.1.pep
MGRKAGALYINPKKFGAMAKPCMPEMVAFLNCLALNKQNDDKCIKQKDLLVACSQAQNGRPKNAAKTINYHLQRLGRGKFL

SEQ ID NO: 288289 - protein, 106 aa, Zea mays
  Clone ID: MRT4577_26010C.1.pep
PPAKPAPFQETPTGSLPFFSGFPFFPWFFWTPNHCSKLIRPPLPLVLPFFHPLANFPFYPLSWPPFPQKLLNGPRAPFPFSPPPFGVFSPPPLKLVKQVRNPFKPP

SEQ ID NO: 288290 - protein, 66 aa, Zea mays
  Clone ID: MRT4577_26011C.1.pep
SSFAPQKLYYSGGTPPLLLYLMEVSPPPNRKISCSPPGTKGGKICPYICNNPHPYGFCPVQFFVPL

SEQ ID NO: 288291 - protein, 59 aa, Zea mays
  Clone ID: MRT4577_26012C.1.pep
AGGRFWNAVRMNFSARVSPSSSSPVYHFVLIGDGNTRSLMALPWAGNTSPTPSSRKASS

SEQ ID NO: 288292 - protein, 107 aa, Zea mays
  unsure (1)..(107): unsure at all Xaa locations
  Clone ID: MRT4577_26013C.1.pep
GFLVLNCPMGKRKKPCLVCGLFGHNAKQCKQXSPLSPRDYHLVTWGQDCFICKKGGHMAKDCPDKHKRNDHQSTLCIRCGETGHDMFGCANDYPPDDIEQIRCYACN

SEQ ID NO: 288293 - protein, 77 aa, Zea mays
  Clone ID: MRT4577_26015C.1.pep
NQPFYINSFFGGTQPPVSPVALEAFYFRGERVDLKGLGVHVKNWACFWGRQAPPQLCEQEKKDHTNYRIALPKCPSP

SEQ ID NO: 288294 - protein, 62 aa, Zea mays
  Clone ID: MRT4577_26016C.1.pep
DVLGVNRGLSVLCASSHSPQSPLAFTAHVATAQPLPLSPWTLRSAISPRQIWRENDEHTLVE

SEQ ID NO: 288295 - protein, 121 aa, Zea mays
  unsure (1)..(121): unsure at all Xaa locations
  Clone ID: MRT4577_26017C.1.pep
MAPKRGGRAPIPPMKKTDKVTNPLFEKRPKQISISGALPSKKDLHPFVKWPTVMRIQRQRRMLKHTLNAPPXLNQLTTTLYKNLATNLHKMLLKYRPVEKAAKKRVACXTAQPENERNTVE

SEQ ID NO: 288296 - protein, 34 aa, Zea mays
  Clone ID: MRT4577_26018C.1.pep
TVTLHSTNVKPALPKALNNIFHSLHNHFNYIIYT

SEQ ID NO: 288297 - protein, 56 aa, Zea mays
  Clone ID: MRT4577_26019C.1.pep
RSPSIVRVATTWRAAVPSYARRPDHRPRRRRSRSPSIRSRITALGLTARWKALVRH

SEQ ID NO: 288298 - protein, 84 aa, Zea mays
  Clone ID: MRT4577_2601C.1.pep
SSRMGRKAGALYINPKKFGAMAKPCMPEMVAFLNCLALNKQNDDKCIKQKDLLVACSQAQNGRPKNAAKTINYHLQRLGRGKFL

SEQ ID NO: 288299 - protein, 64 aa, Zea mays
  Clone ID: MRT4577_26020C.1.pep
RILRPEGAVIIRDDVDVLTKVNSLALGMRWDTKMVDHEDGPLVREKILYAVKQYWVGGKQTAVA

SEQ ID NO: 288300 - protein, 60 aa, Zea mays
  Clone ID: MRT4577_26021C.1.pep
GTMFLHLTNEIQSNYNLSGDKNPTGFIPAGNGDGKEISPASIGEDPAGKKKLRGETEMGS

SEQ ID NO: 288301 - protein, 247 aa, Zea mays
  unsure (1)..(247): unsure at all Xaa locations
  Clone ID: MRT4577_26022C.1.pep
MHVTNAMALAVRLIGRRRFLPPPLAAAVAHLSAASQSPCHHHHPLPTPALPLPPRELHPFALHWRSFSWYSRSGSGSDSSPGTAAADARGEDVYIEKESVHLDGVTIVDDGGGVVSEAGAAADAVGDAAGATADGVGGVPELAVSTVLDLMDGIHSLTGLPWWMTISFSTVAMRLWILPVLIVQLQKTAXKIGEVFRKVSTSLPPPQPGSNFREQYTLFQKKKXELGCPSLSXKFCYFLVQFPCFIL

SEQ ID NO: 288302 - protein, 288 aa, Zea mays
  Clone ID: MRT4577_26023C.1.pep
MMEVDRVLRPGGYWVLSGPPINWKVNYKGWQRTKKDLEAEQNRIEEIADLLCWEKVSEKGEMAIWRKRVNTESCPSRQEESAVQMCESTNPDDVWYKKMKACVTPLPDVKDENDVAGGAIKPFPARLNAVPPRIANGLVPGVSSQAFQKDNKMWKKHVKSYSSVNKYLLTGRYRNIMDMNAQYGGFAAAIESPKSWVMNVVPTIAKMPTLGAVYERGLIGIYHDWCEAFSTYPRTYDLIHASGLFTLYKTKCSMEDVLLEMDRILRPEGAVIIRDDVDVLTKVNSLEA

SEQ ID NO: 288303 - protein, 99 aa, Zea mays
  Clone ID: MRT4577_26024C.1.pep
GNHRPCSSSLEAGRGSLHGRASNLPCVLSRTQVQGAPACSMAARAWPCHLWSSAAGAAYPPRLWSTGFASLIWREVTSHLKIIMVPRISSARSRTGTTG

SEQ ID NO: 288304 - protein, 81 aa, Zea mays
  Clone ID: MRT4577_26025C.1.pep
MASAQAPSSAAVPSRKDHLEAGKKRLEQFRKKKAAKKATAASAEQAKAPAPDVVENPPPIVNAGSLGDGLVSDVDPNQAST

SEQ ID NO: 288305 - protein, 100 aa, Zea mays
  Clone ID: MRT4577_26026C.1.pep
DQIKMRLGIGPPPTCGLPCVSAHPWRSRWRAIWRVEQRQPHQRDRQEQQHPRPRVHAAAPHRRAVAERVGRGRSSVPRRLLLLDRGREEEQDRSCDTGGG

SEQ ID NO: 288306 - protein, 41 aa, Zea mays
  unsure (1)..(41): unsure at all Xaa locations
  Clone ID: MRT4577_26027C.1.pep
GTSPLPLGMDWSPPPKRWEGRNTIWPHNPQTGXEFCVIILL

SEQ ID NO: 288307 - protein, 42 aa, Zea mays
  unsure (1)..(42): unsure at all Xaa locations
  Clone ID: MRT4577_26028C.1.pep
KFTPFLFISIIRQCHFLTQSILNYSLQLSAETXXTTRITQPL

SEQ ID NO: 288308 - protein, 67 aa, Zea mays
  unsure (1)..(67): unsure at all Xaa locations
  Clone ID: MRT4577_26029C.1.pep
RGRRCGVLWCSAVGAAGGAMGWIRQRRRLGPDGGERRASFCGSWGNSRRXAALMKCVPAGSEVPNRG

SEQ ID NO: 288309 - protein, 107 aa, Zea mays
  Clone ID: MRT4577_2602C.1.pep
HAPFCSALGYLLFIFRFLTFFLFPLTSPSPCMKKKKKPGTSSLHCSATRASRIGNLALLKLACASSSLRSPSWFRALRCWTVAPESPASQRKLMLQRDAVDVCCRTD

SEQ ID NO: 288310 - protein, 144 aa, Zea mays
  unsure (1)..(144): unsure at all Xaa locations
  Clone ID: MRT4577_26030C.1.pep
CVDAWYLSPDLSCRLNKCLYGLKQAPRVPYSRFATFLVSLRRGEDRSDACLLICHQGATVIYLLLHVDDIMSIGHTTSSSTLLHRTITALQRGLXEDLSQVHHCLGIVVEQRFVGLLLQQRHYTLDILDRAGMTDCKPCSTSVD

SEQ ID NO: 288311 - protein, 62 aa, Zea mays
  Clone ID: MRT4577_26031C.1.pep
SPLFLTSSALRIDDPTARFRCCSFVLSSGILKDLLKPDKDKETKSSWKVHRRNIFVVRAHAA

SEQ ID NO: 288312 - protein, 132 aa, Zea mays
  Clone ID: MRT4577_26032C.1.pep
PPGVQKVPGGKDFGQQFNPPEFVINSRGRGIIIVGRGVIKASGPFKKGWEFPFQGGQAYKNSFLLKKGGALSLPQDKGESRPFGEIRAFGKGFLPLSQGLIGLRFPAKGAPAPSSVLVQKIPLGLPRFFWVN

SEQ ID NO: 288313 - protein, 58 aa, Zea mays
  Clone ID: MRT4577_26033C.1.pep
KKKKRKKKREKNKKKRKRKKKEKNKKQWTKTSRCLKRGEKKRKMKVLQNNHYVEQKKK

SEQ ID NO: 288314 - protein, 214 aa, Zea mays
  Clone ID: MRT4577_26034C.1.pep
MASPDPGHTPAQGEESASPSSWPPRKLQSFTPGLWSQYKAYEDAVVENIKGTIADALVLVREHQAEAIGCATVAGFILFRGPRRFLYRNTFGRLKTEKDLLNDAEQSMMEYQTSIQNLKKESKYTLDKVAIGESDVQRGRTDLRSTGKQIQSLIGSIYKAESTAAGLMDRLRTIPTRQSLELRAEVASMASDLKNQRCALQERINKISEYGVRV

SEQ ID NO: 288315 - protein, 65 aa, Zea mays
  Clone ID: MRT4577_26035C.1.pep
SSSVCESVSQKYFQWQSLHTDQCPYISSSSMVVLVALCGGGGGFAFLGRAIEREMRGGGGRSPPP

SEQ ID NO: 288316 - protein, 51 aa, Zea mays
  Clone ID: MRT4577_26036C.1.pep
PEQYQSTSQTCGLVQCSASQWQNMSSSGLPLLDCRKSIGEPTSIISLGGNG

SEQ ID NO: 288317 - protein, 45 aa, Zea mays
  Clone ID: MRT4577_26037C.1.pep
VQKLHSDQGLMVVLAPSTLSTFKRRLYIISVKTTVPAGLEEPNRP

SEQ ID NO: 288318 - protein, 128 aa, Zea mays
  Clone ID: MRT4577_26038C.1.pep
AATMRRGGGCRIPKPSLVPFTADEDTPALDPSVIRNLDSALCRRDSDANSLCSRRPAFTVGAILNFSDRATQVVALRVVNTFLAPAVTLRGPLPAARDIQAALRLLDDRIHLPRNDATFDDDLIQDLR

SEQ ID NO: 288319 - protein, 87 aa, Zea mays
  Clone ID: MRT4577_26039C.1.pep
GGGGLPLKFLKPKVCSYYRSIDLTISQGPPVPHSKFQVLQVIPKHHRPFFCKKATRTNKKKLRPTVQFFFIFPSGKGHQKFFHTPFG

SEQ ID NO: 288320 - protein, 383 aa, Zea mays
  Clone ID: MRT4577_2603C.1.pep
MVAATIAGMFLVCFESLCTCFGTKRKDESEDHVLAEHSNSLSSYQMRSVSDRISASSLRAPASPSRFSLSSPPSRNEPLNISLEHVVKLTHNFAPTLMIGEGYFGKVYRATLRDGRVVAIKRAKKENFVSLRTEFSNEVALLKSIEHKNLVRLLGYIDKPNERILITEYVPNGNLREHLDGQHGLVLGFNQRLEIAIDVAHGLTYLHLYAEKPIIHRDVKSSNILLTEAFMAKVADFGFARTGPTEPDQSQIETDVRGTAGYLDPEYMGTSHLTIKSDVFSYGILLLEILSGRRPVERTRGPAERITVRWAFNKYRRGNVRGILDPMLTEAVNEDILNKIFDVAFQCVAPTREDRPSMKEVVERLWKIRRDHTKIQRIAELTL

SEQ ID NO: 288321 - protein, 81 aa, Zea mays
  Clone ID: MRT4577_26040C.1.pep
KRYIHIFAFIEQGLWFVYREQEFLGLFKRSWFWSQTNSCFSDFFDQGEQFGCSLSLQKLFCSMGLVPKQRGVVSKPRPYFW

SEQ ID NO: 288322 - protein, 53 aa, Zea mays
  unsure (1)..(53): unsure at all Xaa locations
  Clone ID: MRT4577_26041C.1.pep
KLHISPRPKTPSSCSGCGLLADLSHISPXSDPSSXDNFSAGKDHRGSARRLGT

SEQ ID NO: 288323 - protein, 121 aa, Zea mays
  unsure (1)..(121): unsure at all Xaa locations
  Clone ID: MRT4577_26042C.1.pep
GSTRKTKRPWFGGAMSIPPSKQGADRXLMLECNHYLFYLYGTLPCDYGLYPLGLSHPXGTWCFIDPKWLVYGEVINXRYSMLCSWGAIDPKILCMMGIIPTETMLXWIKTGVMPLTFTYNY

SEQ ID NO: 288324 - protein, 43 aa, Zea mays
  Clone ID: MRT4577_26043C.1.pep
FLFRTPPLLSFQHPTSITASRASSHLLCPVTNCKTCPNCVHQF

SEQ ID NO: 288325 - protein, 82 aa, Zea mays
  Clone ID: MRT4577_26044C.1.pep
LAFGWFRLRSCSFVPLPLCPWFLLSACPGRSLGVPPGGPSLGPASAFAFAPVCCLCSVLCVLGRPWSGFLSCPPPPACPVRA

SEQ ID NO: 288326 - protein, 156 aa, Zea mays
  Clone ID: MRT4577_26045C.1.pep
RRPASAHASEKKKYIFLKKKKKKKRKGKIKGGSFKNPGFLSRSYSLFPFLRVPPFYWVPPVFSFASAFPLRFPNSPAFPHFPFLQWAFLFPSSRLFALSSPFCPYHTNGAARRGGGLSPLWFFHSPSSGRFPPPGALTPFPFPFFPSFSPPSLLFP

SEQ ID NO: 288327 - protein, 126 aa, Zea mays
  unsure (1)..(126): unsure at all Xaa locations
  Clone ID: MRT4577_26046C.1.pep
TVNICSGIFHFLRPXVLPILFPXILSSSFSHNVXTXMSYAHIMGLSFSPLDFRHXXRSLWLLWFRLDYVDRXPCGIFLVNSISFAXSLNLXMIDGIXXLYLKKXSLCYLSRPVYPRALXXEFSFTF

SEQ ID NO: 288328 - protein, 136 aa, Zea mays
  unsure (1)..(136): unsure at all Xaa locations
  Clone ID: MRT4577_26047C.1.pep
RSHLTRTTRPDRGLXVGYKVKQAYTVYRVRNDHDGDKKTEPNSICCGQPNPQGITQIKCQREQDVVLVSRDXRKLGGLRVLNSYWENEDRTYKDFEIILEDVAHKSHLNXDPRINWLCNPWHKHRELRGLTLASKK

SEQ ID NO: 288329 - protein, 87 aa, Zea mays
  Clone ID: MRT4577_26048C.1.pep
RVPSVCGVASDTAMPLIEPLQRFLVVTLIPILELQTSYVLLMAVIDYDYCFAFDRVSNPQPVVCPLWSWISWYGVAIVESILNPPSC

SEQ ID NO: 288330 - protein, 58 aa, Zea mays
  Clone ID: MRT4577_26049C.1.pep
GRFCTWNVWLAFVGTIRQHLGLCTRYEYGCVTCVARRTPSRAMEISQADMTIPVKVAS

SEQ ID NO: 288331 - protein, 79 aa, Zea mays
  Clone ID: MRT4577_2604C.1.pep
KDPIKPVGATKIETSLFIFLTKRKETKFYLIRYRTAENYLNPKGQPGPKPKWIHRPGAPFKFFLTINRPQKWFGTKGHW

SEQ ID NO: 288332 - protein, 58 aa, Zea mays
  Clone ID: MRT4577_26050C.1.pep
HLSALRTEKRLDRTKAMPSLRMVVGSEVGTRRSKDGQARHVDGGPQGSGGQLRREGPL

SEQ ID NO: 288333 - protein, 111 aa, Zea mays
  Clone ID: MRT4577_26051C.1.pep
GSGDLVGGSGRLFGGVGFFWEVGVTFVRHWVRGIIFGWGGSLFWLDFGSMVDGGDFGFKRGLRGGDVCKFYFWWLCVFSWGGSFFGLMIWCENREKFKKNTKKKKKKKKNY

SEQ ID NO: 288334 - protein, 159 aa, Zea mays
  Clone ID: MRT4577_26052C.1.pep
KIQVPERPHPHVRGPVGGDRRASTLQATTKPAASAPTTPGAGPHNLRIHGRCRSPPPHPRTRELASSATSRGGLGFGGSCGALASGWSGARLIPHSSCGKRLGSRFSRGKGKQSCLADFGIKDRRKERERRDLFGRFCLSFQGLYRSLGQLRADGFLQD

SEQ ID NO: 288335 - protein, 53 aa, Zea mays
  Clone ID: MRT4577_26053C.1.pep
RGKTKGREKFTGCYKGVPTPGGWFYIRPCFKISREGHPAWGLNLGVFHVILGS

SEQ ID NO: 288336 - protein, 71 aa, Zea mays
  Clone ID: MRT4577_26054C.1.pep
KPHSSSRTAPFASFRQPQTSWPAAHQLFAAAATAPPGSQPAMDEDYDVIELSPELKEYILSSLLSVDSLKV

SEQ ID NO: 288337 - protein, 50 aa, Zea mays
  unsure (1)..(50): unsure at all Xaa locations
  Clone ID: MRT4577_26055C.1.pep
XLRTGNLKPYXEPFEVDHXTRIGRAYLKGSGVVRGQSXPCLYRDVKECSD

SEQ ID NO: 288338 - protein, 137 aa, Zea mays
  Clone ID: MRT4577_26056C.1.pep
APKVTGLSVAGCRFWSESSTNVRGSCLTFPPHTPMPSPMKVIKGTSLSHQGDQRRKKGNTGSLSQLANTTVSLWVKSEACGSLLGRERSTMPIVRASLTYLQHVILLLDLCLDTDFCSGDHNPSVLDNRKEKQTIQQ

SEQ ID NO: 288339 - protein, 92 aa, Zea mays
  Clone ID: MRT4577_26057C.1.pep
PPFADHTLLGKESWGWTAHLTVSYASLQSIFPGATSSFCEANICLSPSRRGSNSVATITQPENFPTTPMKEAAAPLYNQPHIISQESAPHQY

SEQ ID NO: 288340 - protein, 62 aa, Zea mays
  unsure (1)..(62): unsure at all Xaa locations
  Clone ID: MRT4577_26058C.1.pep
PTRPHTRPAADHLPTPVRMAPSVHVPPAVHXMTPLPYHYHTQPRQPQPHMQGHPCPYQQPHP

SEQ ID NO: 288341 - protein, 329 aa, Zea mays
  Clone ID: MRT4577_26059C.1.pep
MATIQHQAKPAVAAAPSTTTGGGQRAMDLYEKLEKVGEGTYGKVYRAREKATGRIVALKKTRLPEDDEGVPPTAMREVSLLRMLSQDPHVVRLLDLKQGVNKEGQTILYLVFEYMDTDLKKFIRGHRSNNEKIPAATVKILMYQLCKGVAFVHGRGVLHRDLKPHNLLMDRKTMALKIADLGLSRAITVPVKKYTHEILTLWYRAPEILLGATHYSTPVDIWSVGCIFAELVTNQPLFPGDSELQQLLHIFKLLGTPNEQVWPGVGKLPNWHEYPQWKPTKLSALVPGLDADGYDLLEKLLEYEPAKRIPAKKALEHPYFKDVRKGDAH

SEQ ID NO: 288342 - protein, 54 aa, Zea mays
  Clone ID: MRT4577_2605C.1.pep
FSNHAICSADRSYSLQSFYLCILLGLLKSIDHLPCSYLVQHLLTAAYKMLDLWV

SEQ ID NO: 288343 - protein, 67 aa, Zea mays
  Clone ID: MRT4577_26060C.1.pep
FLFSIPQKIKLNGYQVGGPKGTTKKSAQTGTKLPLLIYNFLKGAKQRGLKFKKKGRAPHFIINPWWG

SEQ ID NO: 288344 - protein, 233 aa, Zea mays
  Clone ID: MRT4577_26061C.1.pep
MGAGANNHEESSPLIPAAVAAPADEKPPQAPAPEAANYYADGVPVVMGEPVSAHAFGGVPRESWNSGILSCLGRNDEFCSSDVEVCLLGTVAPCVLYGSNVERLAAGQGTFANSCLPYTGLYLLGNSLFGWNCLAPWFSHPTRTAIRQRYNLEGSFEAFTRQCGCCGDLVEDEERREHLEAACDLATHYLCHPCALCQEGRELRRRVPHPGFNNGHSVFVMMPPMEQTMGRGM

SEQ ID NO: 288345 - protein, 132 aa, Zea mays
  unsure (1)..(132): unsure at all Xaa locations
  Clone ID: MRT4577_26062C.1.pep
MDPVAASIHGHHLPPPFNTRDFHHHLQQQQQQLKTEDDHGSGAPGLFGSRGTKGDHENNDQNSGNSNGSGGRGGGGGGDELALVPPSGAXPESGEPTLRRPKGRXXAXSKKQPKPPIIITRDSXHTLRTHVM

SEQ ID NO: 288346 - protein, 66 aa, Zea mays
  Clone ID: MRT4577_26063C.1.pep
ISWLDPTHLPKADEFYSKIKKLETLFTPIIPKMYQGPGPHMGGPAGMNKNPPPENGGPAPKIKEVA

SEQ ID NO: 288347 - protein, 99 aa, Zea mays
  Clone ID: MRT4577_26064C.1.pep
GRSQRSPLLHDPLGTGGRELPTSRYGARIRDDDVFQSHEAPPSSATTPMGAAPSSALWLTSPARTLKRRTTTCLNAQGAAPVLPITKWRLPGCRTVRND

SEQ ID NO: 288348 - protein, 112 aa, Zea mays
  unsure (1)..(112): unsure at all Xaa locations
  Clone ID: MRT4577_26065C.1.pep
EFPDPPKRSTRAYFVHLDSSGNADTLTRAWHSTHDYPHNPPTVLYVSNMIHPNIYTFGSIFLDILHNQWSPIYDVAAILTSIQYLLSDPNPNSSANSXTARLFIXNKHEYNR

SEQ ID NO: 288349 - protein, 54 aa, Zea mays
  Clone ID: MRT4577_26066C.1.pep
ESPSPGFYNLKLFYSKKKFKGFLAIIINPVGQWLSGILGGPQPYIMYLNPIVLL

SEQ ID NO: 288350 - protein, 65 aa, Zea mays
  Clone ID: MRT4577_26067C.1.pep
NIIALLMLFLNIQIRQVLFANNSLFLHSVVIRPTGGLKWKASIFFVISKFCPEGYVLILLTIKES

SEQ ID NO: 288351 - protein, 236 aa, Zea mays
  Clone ID: MRT4577_26068C.1.pep
LGTSRPAGSPLPDPASSTHAADPSALAPSAHGVRSHVGRSATACTSPPTRAHKNRPTASAAAPLGQLTPTSPPLSPISAALAACRVSPSRSPLSLHQAHRRTDVGHEPPSQDLRLLGNCRVHSPPCRSSVKPLPRHSPSRSVSRLRSVSKLQGIKDRALATKRSSFLRSTTLNTLSICLMKVAFGAIYAQVKKKASRRISRSSRASTSLRIRLATSPSQLPVVGLFTLAMFLFWVL

SEQ ID NO: 288352 - protein, 232 aa, Zea mays
  Clone ID: MRT4577_26069C.1.pep
RPAGPGSTPKRQRTAVPWPCICSMAILLRRGVACHLCPYPVTASPRTHKKPPSRASAAAPLGQLTPTSPPLSPISAALAACRVSPSRSPLSLHQAHRRTDVGHEPPSQELRLLGTAVFTPRRAGAPLSRCRDILRRDPFRELRSVSELQGIKDRALATKRSSFLSSMRLKTLSTCLVKVAFGAIYAQVKKASRRISRSSRTSTSSRSRLATTPSQLPVVGLFTFATFLFCVL

SEQ ID NO: 288353 - protein, 63 aa, Zea mays
  Clone ID: MRT4577_2606C.1.pep
PSKQAHSLTNYGWGPNQPPQAHFIIELVRTHNCKPALSVVAPIHHYKIFYCHGKYKSHVGDSA

SEQ ID NO: 288354 - protein, 72 aa, Zea mays
  unsure (1)..(72): unsure at all Xaa locations
  Clone ID: MRT4577_26070C.1.pep
SFCFFFVFCMLFFGLNIXTDISVRISACRCSIHSSXGGQGCSSLDSNGIIMVQITVSSSVAXLHGLEPHYRE

SEQ ID NO: 288355 - protein, 296 aa, Zea mays
  Clone ID: MRT4577_26071C.1.pep
MERTLITSNLSMSAHASRSSRRVHYISPAASAAAHNSSYRKKKKNAPSPPPSAAATDTVVISPPATDNVQSTAPKQAGRQELEELVAAKTNTSRIATARTSASSQSRAKLRRRPAPAITSLPMAFCSALEEAINTFVDPPVLRPSVDPRNVLSTNFAPVDELPPTPCPVVRGAIPRCLAGGAYIRNGPNPQHLPRGPHHLFDGDGMLHSLLLPTAGSPPSSDPVLCSRYVQTYKYLVERDAGAPVMPNVFSGFHGVAGLARGAVVAARVLTGQMNPAEGVGLANTSLVFFGGRREL

SEQ ID NO: 288356 - protein, 81 aa, Zea mays
  Clone ID: MRT4577_26072C.1.pep
KKITEYYAQLGVDSVEFFFAQFSEQDPSSLYTIIIGQCQLRANSILELFLSTGSNSRITTFRVTSPLETQDLHRRSISICR

SEQ ID NO: 288357 - protein, 77 aa, Zea mays
  Clone ID: MRT4577_26073C.1.pep
IKTTILHYFQNFLYTCIILMTFSDPPMHYTPEQPLQLTSGKPKTKPFRKLKKKNILKLPPFPQAKNKKENPHSHPQI

SEQ ID NO: 288358 - protein, 68 aa, Zea mays
  Clone ID: MRT4577_26074C.1.pep
FFFFFFNKSTQAMLIYQVKHFTPTNDILASSSPITSPRDDSQHLNGVMQYSSASNLKRVRLMASIFFC

SEQ ID NO: 288359 - protein, 73 aa, Zea mays
  unsure (1)..(73): unsure at all Xaa locations
  Clone ID: MRT4577_26075C.1.pep
VDRRSSAVVATKYTKSRVRYNPHTEKQSILQLIXSARMSARRCRGSRPEAVPRGSRSPGRAGAAAGRSRAHAS

SEQ ID NO: 288360 - protein, 79 aa, Zea mays
  Clone ID: MRT4577_26076C.1.pep
LLSDPEQEYLNTKRIAHQSVSSNIVPKQGIKEPANSWRGVPSICTLRRCNLCKENKTSQTMKTQELTIEQLRNTQGTPP

SEQ ID NO: 288361 - protein, 69 aa, Zea mays
  Clone ID: MRT4577_26077C.1.pep
PTPAVRRILLSAVGLHFFQQASGSDSVVQYSARLFKSAGITDDNKLLGVTCAVGVTKTFFILVELPSSK

SEQ ID NO: 288362 - protein, 134 aa, Zea mays
  Clone ID: MRT4577_26078C.1.pep
MASADLAEAIEPSRKKKSNVKYASICAILASMASVILGYDIGVMSGAAMYIKKDLKITDVQLEILIGILSLYSLIGSFAGARTSDRIGRRLTGVFPGVIFFAGALLMGFAGNYSMVMVGRFLAGIGVGYRGMIA

SEQ ID NO: 288363 - protein, 551 aa, Zea mays
  unsure (1)..(551): unsure at all Xaa locations
  Clone ID: MRT4577_26079C.1.pep
MASADLAEAIEPSRKKKSNVKYASICAILASMASVILGYGTQPIPSLLSKCFSFCSFQEFVGEVCVYRQPTNLSXDIGVMSGAAMYVKKDLKITDVQLEILIGILSLYSLIGSFAGARTSDRIGRRLTLVFAAVIFFAGALLMGFAVNYSMLMVGRFVAGVGVGYGGMIAPVYTAEISPAASRGFLTSFPEVFINVGILLGYLSNFAFARLPLRLXWRVMLGIGAVPSGLLALLVFCMPESPRWLVLKGRLADARAVLEKTSATPEEAAERLADIKAAAGIPKGLDGDVVTVPNKEQGGGELQVWKQLILSPTPAVRRILLSAVGLHFFQQASGSDSVVQYSARLFKSAGITDDNKLLGVTCAVGVTKTFFILVATFLLDRAGRRPLLLISTGGMIVSLICLGSGLTVAGHHPDTKVAWAVALCIASTLSYIAFFSIGLGPITGVYTSEIFPLQVRALGFAVGVASNRVTSAVISMTFLSLSKAITIGGSFFLYSGIAAVAWVFFFTCLPETRGRTLEEMGKLFGMPDTGMAEEAEDAAAKEKVVELPSSK

SEQ ID NO: 288364 - protein, 90 aa, Zea mays
  Clone ID: MRT4577_2607C.1.pep
PVLPSCNEPTPRSHMKNTALTCNNQPYNTLQLQRSFMFIILMMCIKRHVQYRYSSNTSYRNVPHTEALVKPSTPTCEHYDIIIFTNCDLL

SEQ ID NO: 288365 - protein, 76 aa, Zea mays
  unsure (1)..(76): unsure at all Xaa locations
  Clone ID: MRT4577_26080C.1.pep
SDKHRRTCLFRFSANPAEECPTLLHRGRGIFXQRHSRRRLFNQLLFFPFFSLFIKSTNKEMIIIYITRRGSRTIIS

SEQ ID NO: 288366 - protein, 79 aa, Zea mays
  Clone ID: MRT4577_26081C.1.pep
VVWKKLGSVRQKARGRARVSRRGKGCQPEAKGGWRGAGDGGGFFDGERRRRVSCGQSVARCERNVGRGDRLGRSRQCAA

SEQ ID NO: 288367 - protein, 51 aa, Zea mays
  unsure (1)..(51): unsure at all Xaa locations
  Clone ID: MRT4577_26082C.1.pep
MASPAMVPLRQLFVDGEWRPPAQGRHLPVVNPTTEDHICXIPAGTVKDLHS

SEQ ID NO: 288368 - protein, 81 aa, Zea mays
  Clone ID: MRT4577_26083C.1.pep
VCRASSLGGGLPGEGRPLLHYTINIGGVPLCLLCEIPPERSQPFESFAAFFFLQHWPTGDMSIKPETIQRGLCGTKLSSLD

SEQ ID NO: 288369 - protein, 121 aa, Zea mays
  unsure (1)..(121): unsure at all Xaa locations
  Clone ID: MRT4577_26084C.1.pep
KGRPASSHDTTXTTTNAGAXGRNDNEAPTEGPRGPTRREDHQGGEKEAHXARERNPEREEHARGAPAKGTDERTHDETTRTRADHPRAPGGRTPGSARGTTEKHERGNQETNRDPRGAPGE

SEQ ID NO: 288370 - protein, 89 aa, Zea mays
  Clone ID: MRT4577_26085C.1.pep
RIFILHSILFVYMGTHGYSHIALAITAYNKDLQVAVLQLLLVIELWWLPRVMELPCLLAVATTGFQKLPSPLRAIAFHQSPRCFLQPQS

SEQ ID NO: 288371 - protein, 75 aa, Zea mays
  Clone ID: MRT4577_26086C.1.pep
RETRGGRSLPSLVEDSRSVVGEHGGGPGDVRRHGLLTGETPLSSTAPMCATLNYVNSRVRVATLQLRCLPFPMDP

SEQ ID NO: 288372 - protein, 265 aa, Zea mays
  Clone ID: MRT4577_26087C.1.pep
RCGKSCRLRWLNYLRPELRHGGFTDEEDSLILSLYGEIGSKWSVIASRLPGRTDNDVKNYWNTKLKKRYLASSTSTGEARPPPPPPAPPSASGDDSSAAADSHQAQQDEPSLPLTPPAFSTDLDTTFAVVDDDMLLFKSDQLYAELVGLVEKKSQATAGPSTGGGGDEANSTATPSSSSYGTGTTNSPTVSSSSGSCALWPTDVHGTTLLSEPTSSSLFDDAYGVGDDAFGAAALPAYSFQDLLASSYDDATAAVVTQELMQYYQ

SEQ ID NO: 288373 - protein, 83 aa, Zea mays
  Clone ID: MRT4577_26088C.1.pep
CVGCTVLSFLMCYADNLGRYLLSILYDFDEYLRGGRAVLLNGLFTFLVTSQAHHHAHNQAHKEGDNQAHKQAHKQAHKPAQRS

SEQ ID NO: 288374 - protein, 33 aa, Zea mays
  Clone ID: MRT4577_26089C.1.pep
ASSNLHTYTTVWCAISYLLNHIVSSQKKKKKSG

SEQ ID NO: 288375 - protein, 68 aa, Zea mays
  Clone ID: MRT4577_2608C.1.pep
QCERSSFCLYLIPSIPSTGFLGTLASLACLSCNSVCTRLFICILPLSRFPLISTYSELIRPYCLSTTH

SEQ ID NO: 288376 - protein, 96 aa, Zea mays
  Clone ID: MRT4577_26090C.1.pep
VLGFSLASLGSLGSPGLVGPRVLYVLFGFAGSPGSRVFFPLAFGFGGGGYCVVFSFLCVGTVSSLCFAGFSFIDIREGWLARRGFSGVPWCVPRGS

SEQ ID NO: 288377 - protein, 66 aa, Zea mays
  Clone ID: MRT4577_26091C.1.pep
PGFLLQQCLNGTRCSTPPTPAGRFEPEPFATSSLRRSSVASAPRPAAIMTTASPSQVRPELPPGLG

SEQ ID NO: 288378 - protein, 142 aa, Zea mays
  unsure (1)..(142): unsure at all Xaa locations
  Clone ID: MRT4577_26092C.1.pep
VALKSFKSGATPILVATDVAXRGLDVPNVAHVINYDLPKSIDDYVHRIGRTGRAGKAGNATALFTDSNHHLAKDLLELMTGAKQDVPEWLVDYASRPCSGGSSYAGRGRKGGGSFGGRDYRLSSDYGYGGNGGVYSSSGSSY

SEQ ID NO: 288379 - protein, 85 aa, Zea mays
  Clone ID: MRT4577_26093C.1.pep
MGSSSGAPLLVAHPSRGKEDLGDQRRLRWCCGVSSEGRWAEATAEAGRLAALAAPMIAVALLQLMMQVISTIMVGHLGEVPLADA

SEQ ID NO: 288380 - protein, 203 aa, Zea mays
  Clone ID: MRT4577_26094C.1.pep
TKFQALSSLVWRSVTRARRMPLGQTTFCRAAINNRTRLRPQLPPEYFGNTIYAIATEAVTAGDLLERGHGWATAAVGRAVAAHTDDAIRARVAAWMANPVLYNLRFFDPNGIMMGSSPRFDMYGGCDFGWGPPLAPRSGRANKSDGKASLYPGREGAGSIAAELVLTSEHMTLLEQDDEFWAAVSSDRPFPPAALAAQPKSDE

SEQ ID NO: 288381 - protein, 103 aa, Zea mays
  unsure (1)..(103): unsure at all Xaa locations
  Clone ID: MRT4577_26095C.1.pep
PTRSPTRPRKLTMLILLKSKVTFCCILHLSDKLSMMQEVTQANGIAWACXTXXSIXHFIFLLSSEVSRIIQRLELLVLTVFYMKYHLKILLWNQQKKKKKGRP

SEQ ID NO: 288382 - protein, 126 aa, Zea mays
  Clone ID: MRT4577_26096C.1.pep
MASIIVQAVVILLDVIAFGLGVAAEQRRSRATVTPDAAKEYDYCVYDSDIATGYGVGALLLLAAAQVVLMVASRCFCCGRGLKPGGSRACALILLGEVYYLSYSKSRDAAGGAPYGGSSIGMGPYN

SEQ ID NO: 288383 - protein, 83 aa, Zea mays
  unsure (1)..(83): unsure at all Xaa locations
  Clone ID: MRT4577_26097C.1.pep
LKVQNKNWSYLVEWIPNRVESRVWDIPPGGLGMGSKLVGEXTWIQGRWGGVSERLRAMLGGKAFREWHTGEGMDYMEFAEPQR

SEQ ID NO: 288384 - protein, 61 aa, Zea mays
  Clone ID: MRT4577_26098C.1.pep
QNHFFYNILIGLNREGNGLPKHVFIVLRTPLSLLFPILQYINSLLPRKHKSPINGINNFIF

SEQ ID NO: 288385 - protein, 185 aa, Zea mays
  Clone ID: MRT4577_26099C.1.pep
MASIIVQAVVILLDVIAFGLGVAAEQRRSRATVTPDAAKEYDYCVYDSDIATGYGVGALLLLAAAQVVLMVASRCFCCGRGLKPGGSRACALILFLFTWVAFLIAEACLLAGSVRNAYHTRYRGIFYGDSLSCETVRKGVFAAGAAFTFFTAILGEVYYLSFSKSRDAAGGAPYGGSSIGMGPYN

SEQ ID NO: 288386 - protein, 61 aa, Zea mays
  Clone ID: MRT4577_2609C.1.pep
CLMSSVHLFSSSPSRFRYLRIGPQHRQLYLSFGVVITNLSFITSSHGLVIPPAQKNEWVDE

SEQ ID NO: 288387 - protein, 476 aa, Zea mays
  Clone ID: MRT4577_260C.1.pep
MERGILGSRGAVQILGSKTGAAMSCGKTTSTSFTCSTKHELNLHVNVKPLQLATDGSSRLAYKTPVLKNQWNLSASSSSANVVTTFDDDKGVPSSFAEEKIGVLLLNLGGPETLDDVQPFLFNLFADPDIIRLPRLFRFLQRPLAKLISTFRAPKSKEGYASIGGGSPLRKITDEQANALKIALEKKKLNANIYVGMRYWYPFTEEAIDQIKKDKITKLVVLPLYPQYSISTSGSSIRVLQDIVKEDSYFSGLPISIIESWYQRDGYVKSMSDLIEKELSAFSNPEEVMIFFSAHGVPLTYVEDAGDPYRDQMEDCISLIMGELRSRGILNGHTLAYQSRVGPVQWLKPYTDEVLVELGQKGVKSLLAVPVSFVSEHIETLEEIDMEYKELALESGIKNWGRVPALGCTSTFISDLADAVVEALPSASALATRKPDDIDSSMDLTHYLTKMLFGSILAFVLLLSPRLVSAFRSTML

SEQ ID NO: 288388 - protein, 149 aa, Zea mays
  Clone ID: MRT4577_26100C.1.pep
PTPPLLSYPLHLLPVLRRGPILAGFRTSSGNCTLFSWAFRAAPNRMHSLPLNPADLLTTPPPEREARASQPAPDRRYSSPWGAALSLLLAAAAGAMLTFIVLFLWYYATKRRPVAPVEYPMHPSHVVYEKIVLVGVKDDAAAADAAGNK

SEQ ID NO: 288389 - protein, 57 aa, Zea mays
  Clone ID: MRT4577_26101C.1.pep
ARVRPRFRLHRFSSITDTRPISKAHPPIHCDGSRRDLQPNWLDSYLILTLSLELYHY

SEQ ID NO: 288390 - protein, 107 aa, Zea mays
  unsure (1)..(107): unsure at all Xaa locations
  Clone ID: MRT4577_26102C.1.pep
QKTKDGRXVEDVLKEGGAPPRIKVDKGTIEVVGTDKETTTQGHDDLGKRCAKYYEAGARFAKWRAXVLKIGPNEPSQLAIYLNTYGLACFAIICQEXNGLVAKFVEP

SEQ ID NO: 288391 - protein, 221 aa, Zea mays
  Clone ID: MRT4577_26103C.1.pep
MAILYALVARGTVVLAEHSAAATNAGAIARQVLERLPDGGADSHVSYTQDRYVFHAKRTDGITALCMADDAAGRRIPFAFLEDIHGRFVKTYGRAALTALAYAMNDEFSRVLSQQMDYYSNDPSADRINRMRGEINQVRSVMIDNIDKVLERGDRLELLVDKTANMQGNTVRFKRQARRFRNTVWWRNVKLTAALILLLLVIIYVVLVFVCHGFTLPTCIR

SEQ ID NO: 288392 - protein, 52 aa, Zea mays
  Clone ID: MRT4577_26104C.1.pep
GGRSPSCTDSFNGLKLSSHNTVISCRSRPWHLMLLHSSLQPQAQWLALCLDQ

SEQ ID NO: 288393 - protein, 59 aa, Zea mays
  Clone ID: MRT4577_26105C.1.pep
EDANAHSNLMSLRGRSFIISKMMMHQCTTDDSWSILSAHCDIGLHTNLYHNASSKRRTR

SEQ ID NO: 288394 - protein, 60 aa, Zea mays
  Clone ID: MRT4577_26106C.1.pep
KGAIKNLPREKLYANSPPVRKKFLAKFPRVQHLKNLGSHHRAFKVQRKVRNNHFAIPSPS

SEQ ID NO: 288395 - protein, 73 aa, Zea mays
  Clone ID: MRT4577_26107C.1.pep
GRAILRLLGRRDLKQNNDATNGTLISTLHFNDTLLGSSFPSKILLKNIFDKMIQRITEATFSLDLSPQDEDSV

SEQ ID NO: 288396 - protein, 878 aa, Zea mays
  unsure (1)..(878): unsure at all Xaa locations
  Clone ID: MRT4577_26108C.1.pep
GSRFRLWHGALNFSALPFLRYIDLSYNSLRGEIPRSIASLPELSHLDLTGNRLHGHVPREMGSMGSLTVLLLSLNNLTGTIPASIGNLTRLVQLTIHKTSLIGSIPEELSKLTSLEYLQLSGDLLSGRIPESLGNLTKLSLLRLYDNQLSGPIPSTLGNLVELQSLQLSRNQLVGRIPPSLGNLSALYEIWMYENELAGSVPAEIGALAGLQTLHLAENLISGPVPETLTGLTNLNMLQIFSNKLSGPLPLGFSNLSKLEVLDLANNSFSGDLPSGFCNQGNLIQFTVSLNMFTGPIPRDIETCRSLHILDVASNQLSGDVSGLGPYPHLFFANLERNSLHGRLSAESWASSINLTIFDVASNMVTGSLPPELSRLVKLEELLLHDNNMTGSIPPELSNLTNLYSLSLSQNQFSGNIPPEFGRMSSLQYLDIQLNSLSGPIPQELGSCTQLLFLRINGNRLTGHLPVTLGSLWKLQIVLDVSSNELTGELPPQLGNLVMLELLNLSHNNFSGSIPSSFSSMASLSTLDVTYNDLEGPLPTGRLFSNASSPVTWFLHNNGLCGNLTGLPACSSPPTIGYHHNSRRRRTRILVATTISVPLCMLTVLFGIIVIIRRSDKPHKQATTTTTAGRGDVFSVWNFDGRLAFEDIVRATENFSERYVVGSGGCGTVYRVQLQGGRLVAVKKLHETGEGCVVSDEERFTGEIDVLTRIRHRSIVKLYGFCSHPRYRFLVYDYVDRGSLRASLENVEIAGELGWERRVAIARDVAQALYYLHHXVLLDTEFKAYVSDFGISKIXFGVVLLEIVMGRYPTELRSNNSLQGQHHQLATETLDKRPSSPTLAERHEISLLVQVALACLQPSPKSRPEMQEVYQKLTHDHT

SEQ ID NO: 288397 - protein, 43 aa, Zea mays
  Clone ID: MRT4577_26109C.1.pep
LGTLAIYLLINSFSNFPYLSLVGTRQRVISPIFNIPPPKFPKN

SEQ ID NO: 288398 - protein, 82 aa, Zea mays
  unsure (1)..(82): unsure at all Xaa locations
  Clone ID: MRT4577_2610C.1.pep
MAPLLAAAMNHAAAHPGLRSHLVGPNNERFSRDHLAAFFSQSNKRRGNLXFTPRXSGRVGRPKGVQMLSPXSEIPQRXDWVP

SEQ ID NO: 288399 - protein, 208 aa, Zea mays
  unsure (1)..(208): unsure at all Xaa locations
  Clone ID: MRT4577_26110C.1.pep
VSSEFGSSKLYGFCSHPRYRFLVYDYVDRGSLRASLENVEIAGELGWDXRRVAIARDVAQALYYLHHECTPPIIHRDITSNNILLDTEFKAYVSDFGIAKIVRPDSSNWSELAGTYGYIAPELSHTPAVTTKCDVYSFGVVLLEIVMGRYPTELRSNTSLQGQHHQLAMETLDSVHHRNISGEARVSCLSSSTACPHLPQIGAEIRRL

SEQ ID NO: 288400 - protein, 37 aa, Zea mays
  unsure (1)..(37): unsure at all Xaa locations
  Clone ID: MRT4577_26111C.1.pep
GFIELVCSGKDVHPARAFEGIRNSXSRMQWVVASRPA

SEQ ID NO: 288401 - protein, 32 aa, Zea mays
  Clone ID: MRT4577_26112C.1.pep
CLPLANLNVKFFRRVKTKPCKLANLKLGGRIW

SEQ ID NO: 288402 - protein, 78 aa, Zea mays
  Clone ID: MRT4577_26113C.1.pep
TNANDHASAFAHRTIVITTNNMAFRGASYDGRGGRISGRGGFTPRGGRGGMGASFGPPDTVIEMGKVAHYCLYFFFCE

SEQ ID NO: 288403 - protein, 128 aa, Zea mays
  Clone ID: MRT4577_26114C.1.pep
LVPRGGGITYLSDSPRLRLSTADAHRSSIPHSGHLSGCHGTSLNLTTEANAVDKDTDNNMNDSVSVTIVQVMIQCTTWSWKIYCLEHHYQSVALVIVDKINPTSQCLLAHLLSPTGADLPVPPACCLI

SEQ ID NO: 288404 - protein, 67 aa, Zea mays
  Clone ID: MRT4577_26115C.1.pep
SSPSIPQARASARRPSPPAARVADSLPCDDAHLTTIGRITCFSVQLRLATWHTGKGSLPGFTSPISN

SEQ ID NO: 288405 - protein, 85 aa, Zea mays
  Clone ID: MRT4577_26116C.1.pep
GALGYVHQTDPEKENRGNSPPGKGGKKLCSLSHGGPTKKNWGALVFGGQPGNHKNPLRTRLKKTTLFVTRGAGEGLTDLRGKQKQ

SEQ ID NO: 288406 - protein, 49 aa, Zea mays
  Clone ID: MRT4577_26117C.1.pep
RLPPFPATRRDHRFLSWVPASTSTSPSTPCLLAASFPHLPLTLLLYSIS

SEQ ID NO: 288407 - protein, 84 aa, Zea mays
  Clone ID: MRT4577_26118C.1.pep
APRAFHFILPIIKFFEIFREFHFLQGKTMAFFTPSFYFFPYKKTLFSSRDLFLITGFKFFSPQKSGFSFFKFKSVFFNFIFFFC

SEQ ID NO: 288408 - protein, 121 aa, Zea mays
  unsure (1)..(121): unsure at all Xaa locations
  Clone ID: MRT4577_26119C.1.pep
RPKFRADHTLPEFNGIELVKLLEKSTGLMTMEASLXGGGVNICLIPEVPLIVDGPNGVFRHFEHLLKTKGFVLVCVAEGPGQDYFKKXNATVAXGNMVFRDIGVHLKQKIKSHFKDIGVHF

SEQ ID NO: 288409 - protein, 61 aa, Zea mays
  Clone ID: MRT4577_2611C.1.pep
QDFGVFVSMLTPLLSHNTCAISIARDLIKHQLTKHIGVMPITHWHRFKMICLISLYVPSKR

SEQ ID NO: 288410 - protein, 50 aa, Zea mays
  Clone ID: MRT4577_26120C.1.pep
HLQFTLARSAPLLGYHIAQSVCSSLVYCGADVSNDLLQAPFPQFITPTEL

SEQ ID NO: 288411 - protein, 64 aa, Zea mays
  unsure (1)..(64): unsure at all Xaa locations
  Clone ID: MRT4577_26121C.1.pep
ARHLTQLTFCXLVQTGFHHVGQAAIEFLTXGDIPVSASKSAGITGVSHCARPYDCVLTTFYLYC

SEQ ID NO: 288412 - protein, 68 aa, Zea mays
  Clone ID: MRT4577_26122C.1.pep
GAAGRNRRFALAGAAEDFFFFLFFFVFFFFFFFFFFFFFFFSYQITYINNNKNTKKSTTKIRGGGTTI

SEQ ID NO: 288413 - protein, 59 aa, Zea mays
  Clone ID: MRT4577_26123C.1.pep
RVERLHDDYLCPAHERGISVSPVDCCIFWALLCEFVSPADVLRNERRALIKVVQGIGAS

SEQ ID NO: 288414 - protein, 137 aa, Zea mays
  Clone ID: MRT4577_26124C.1.pep
PTRPAMHADVMRNVLPQVESLLRSTARVLLYQGVRDLRDGVVSTEAWLGGVRWDGLRAFLDAERAVWRTAAEGGELAGYVQRSGSLTHVVVYAAGHLVPADNGRAAQEMIEGWVLGTGMFGRGCGDRVRDGVRSAAT

SEQ ID NO: 288415 - protein, 140 aa, Zea mays
  Clone ID: MRT4577_26125C.1.pep
PDSLFPLAPPLPVIPLCSRAPPCSSGWYPGGPRSSFPGSPFPPGLFPFFWGFPATPHGLFAFFIFHPVLPFLPFPPSFFSFPVFFFRPPFLFFRCVCCLPGFPTPLLRFASPPLLSPLSGLLSLPLFFVFDLSFPTPFLF

SEQ ID NO: 288416 - protein, 69 aa, Zea mays
  unsure (1)..(69): unsure at all Xaa locations
  Clone ID: MRT4577_26126C.1.pep
XSVXCLPVCPXVXLXXSXSXAXXXLRCLXXPAVXFXXCXPXVXPGXXXWPFXGXXCWPFAXLPCCXRVR

SEQ ID NO: 288417 - protein, 72 aa, Zea mays
  Clone ID: MRT4577_26127C.1.pep
CKQPFEALRTHESTIVVISALSFGVSRGRSVRKHLICVYSVIKVSNVNSCQLKLSRLIFSLQLLATLLLWVL

SEQ ID NO: 288418 - protein, 295 aa, Zea mays
  Clone ID: MRT4577_26128C.1.pep
MAGEDAAAARRPPKEEEEEEDDDDLDNVPLALSRAKKPGNASASKVKKEVEDDDDDLDNVPLALSRAKKGNEKQKGNNSNMKASSKVKKEVSSDDDFVMPTAQKKSAGAAGSNAKTSKVKKIKDEDLEDLKEDKKRKKRVGVKEEAKLALAIVKGEKVKKERKVYGLPGQKHDPPEERDPLRIFYESLYEQVPTSDMAATWLMEWGLLPVDVARKCFEKKQGQKVKSPVKAITAKRIPSSPAKTLPSSAKKLVMASNSAGKLKSQKKRKASDDTDDDDDDDDFVASKAKTKRHKA

SEQ ID NO: 288419 - protein, 75 aa, Zea mays
  Clone ID: MRT4577_26129C.1.pep
TLFSCHFESVVPKRLLALCWMSLAASRMTAVSGTGMVFSNSLMRRSRAQTSTVSSYLRLGFPSLWDLLVAGRVRS

SEQ ID NO: 288420 - protein, 76 aa, Zea mays
  Clone ID: MRT4577_2612C.1.pep
RNSTDRSRRPQQSHEMNEVIELAIKHAGLSERLALAQPKGVRLYGPTVTGSTLLARAVAHDTDCTLIRVSASELVH

SEQ ID NO: 288421 - protein, 259 aa, Zea mays
  Clone ID: MRT4577_26130C.1.pep
MAGEDAAAARRPPKEEEEEEDDDDLDNVPLALSRAKKPGNASASKVKKEEEDDDDDLDNVPLALSRAKKGNEKQKGNNSNMKASSKVKKEPTAQKKSAGAAGSNAKTPKVKKIKDEDLEDLKEDKKRKKRVGVKEEAKLALAIVKGEKVKKERKVYGLPGQKHDPPEERDPLRIFYESLYEQVPTSDMAATWLMEWGLLPVDVARKCFEKKQVRRLSHQSKQLWRREFLLLQRHCLHLQRSSYGFNSAGKLSLRRKGRQ

SEQ ID NO: 288422 - protein, 295 aa, Zea mays
  unsure (1)..(295): unsure at all Xaa locations
  Clone ID: MRT4577_26131C.1.pep
MAGEDAAAARRPPKEEEEEEDDDDLDNVPLALSRAKKPGNASASKVKKEEEDDDDDLDNVPLALSRAKKGNEKQKGNNSNMKASSKVKKEVSSDDDFVMPTAQKKSAGAAGSNAKTPKVKKIKDEDLEDXXXXXXXXXXXGVKEEAKLALAIXXXXXXXXXXXVYGLPGQKHDPPEERDPLRIFYESLYEQVPTSDMAATWLMEWGLLPVDVARKCFEKKQGQKVKSPVKAIVAKRIPSSPAKTLPSSAKKLVMPSNSAGKLKSQKKRKASDDTDDDDDDDDFVASKAKTKRHKA

SEQ ID NO: 288423 - protein, 97 aa, Zea mays
  Clone ID: MRT4577_26132C.1.pep
KGSPLRPKSCPWSKWTRFGNPPGFGKRFWGRNRFGKNPDPGRYLCRACGSHFFGRGGVFGPNGKKTLCYRSPQTYVNGPLFVNGVNFSFWGCSPFLP

SEQ ID NO: 288424 - protein, 150 aa, Zea mays
  unsure (1)..(150): unsure at all Xaa locations
  Clone ID: MRT4577_26133C.1.pep
GTHALHGPGLNGRTDPCVFFRLEVRDPXKLRSILGSGMTNELRETHVEHAQTCALSGKYYIYYSDETRSIGAICNNIYXTEGXIPGEHFYSSESIDDSQKLLADALVKKVYDYWVYVIEYEGKGLLNPKLKKKSASTGQVETHAPEEEPT

SEQ ID NO: 288425 - protein, 97 aa, Zea mays
  Clone ID: MRT4577_26134C.1.pep
GCCPLWRLRCCCPWPLFWAGLVLLSLASLFLSVSSLRSLVGRVSFPSSFVSSLFPCSRSVFPPASRLCPVGCWSPSPGSLRSLSCWRSSAFAPSCRG

SEQ ID NO: 288426 - protein, 134 aa, Zea mays
  unsure (1)..(134): unsure at all Xaa locations
  Clone ID: MRT4577_26135C.1.pep
RIICCIEQNEEGRGNDDRVTLIKDYRGEIETELTTICDGILKLLESHLEADFTAPESNVYYLKMNGDYYRYYDEFKTEAERKDATENTMVAYMAAHDIAQDDLAATHAITLGLTLNLSVIYYEILNXTDRSCNL

SEQ ID NO: 288427 - protein, 76 aa, Zea mays
  Clone ID: MRT4577_26136C.1.pep
TSRAWRFIRLFLRVCRLQLRLGLKTCRNQRISRIFHSSVASGLVCDICCDEKPFFFFLLFLHGFCTLVSTSHSDKT

SEQ ID NO: 288428 - protein, 89 aa, Zea mays
  Clone ID: MRT4577_26137C.1.pep
CQKTPFFLDYPTHTHKLIRGLYLILWVIEGTRTGGLPIETCGSCQNELDAWCASVQNLHFATATPMVLHKHNHTCLGETLLYALHYVPC

SEQ ID NO: 288429 - protein, 330 aa, Zea mays
  unsure (1)..(330): unsure at all Xaa locations
  Clone ID: MRT4577_26138C.1.pep
MQYKNLGRSGLRVSQLSYGAWVTFGNQLDVKEAKALLQACRDAGVNFFDNAEVYANGRAEEIMGQAIRDLGWRRSDVVISTKLFWGGQGPNDKGLSRKHVVEGLRASLRRLDMDYVDVVYCHRPDASTPVEETVRAMNWVIDQGWAFYWGTSEWSAQQITEAWAVANRLDLVGPIVEQPEYNLFSRHKVESEFLPLYSTYGIGLTTWSPLASGVLTGKYTKGNIPXANSRFALDNYKNLANRSLVDDTLRKVNGLKPIAAELGVSLAQLSIAWCASNPNVSSVITGATKESQIVENMKALDVIPLLTPEVVDRIEAVVQSKPKRNVESYR

SEQ ID NO: 288430 - protein, 72 aa, Zea mays
  unsure (1)..(72): unsure at all Xaa locations
  Clone ID: MRT4577_26139C.1.pep
AKKGGHYFSQVLKKEVFXXXFPGAKHRGLKGKKHWGPTPKFKRFPKDQKFIFQKNKKEKLFLYKGPLALFSL

SEQ ID NO: 288431 - protein, 220 aa, Zea mays
  unsure (1)..(220): unsure at all Xaa locations
  Clone ID: MRT4577_2613C.1.pep
SSFGTGQKIXFCEKNGGTRAVIQYPDVNTAAVAKEALEGHCIYDGGYCKLHLSYSRHTDLNVKAHGDKSRDYTIPAGVIQGVPPGVQATSSGWQGNVQAAGAYAAPPGAPSQSHGANGHVQNWNPGNSVYPPAPGPGTYPGQMYSSPSQYAASGGFPNTPSTAPPHYAASGGFPNTPLPALPGAPTQQLHASQQMLPQHGNQSGGASGTSQPAPPASYYR

SEQ ID NO: 288432 - protein, 89 aa, Zea mays
  Clone ID: MRT4577_26140C.1.pep
YYIQSYPPTTILLTLTNLNNHYHHTTNYTQPYQYHTYYISIPSSIPTSYSTITYISIYIYIYSNIYILMNYSIIIIKHSHRALTSSQIS

SEQ ID NO: 288433 - protein, 46 aa, Zea mays
  Clone ID: MRT4577_26141C.1.pep
GCFLSRHDHVQEHGCGCRIRVPTRIRNSTSTSSVASGSSTGRALIH

SEQ ID NO: 288434 - protein, 245 aa, Zea mays
  Clone ID: MRT4577_26142C.1.pep
MDPHLSSHVHAAAAAASAFPDGKKLESDVLPPGVVTLDVEAGAPTNAAGADPRDGDDGDAGFDYMARAQWLRAAVLGANDGLVSVASLMIGIGAVNATRKAMLVSGMAGLVAGACSMAIGEFVSVYAQYDIEVSQIKRDGEEAARDSLPSPTQAAIASALAFAFGALLPLLAGVFVPSWAARVAAVCAATSVGLAGFGVAGAYLGGANMLRSGLRVLLGGWFAMLVTFGVLRLFGTVFHIQVSSA

SEQ ID NO: 288435 - protein, 122 aa, Zea mays
  unsure (1)..(122): unsure at all Xaa locations
  Clone ID: MRT4577_26143C.1.pep
MSDRREAIWWNSIISGDISNANLQEFMDCVCLMILSAPKHGXCTFSIVLNACGSVPALERVMXVXACGIRSHLGLDVVVXSALVDMYSECGRVCYSCKLFNSMTQMNEFPCHCMIYVLSKKK

SEQ ID NO: 288436 - protein, 242 aa, Zea mays
  Clone ID: MRT4577_26144C.1.pep
PRPASAFPNGKKAESTDVLPPRAVVTIDVEAGAPTNAAGDDPRDADGDAGGVDYMARAQWLRAAVLGANDGLVSVASLMIGVGAVSATPKAMLVSGTAGLVAGACSMAIGEFVSVYAQYDMEVSQIKRGDGGEEEEEGAARDGLPSPTQAALASALAFAFGALLPLLAGVFVPSWAARVAAVCAATSVGLAAFGVAGAYLGGASMLRSGLRVLLGGWFAMLLTFAVLRLFGTVFHIQVSSSV

SEQ ID NO: 288437 - protein, 105 aa, Zea mays
  Clone ID: MRT4577_26145C.1.pep
KKNAAAVAAPMVLGLICIHEMSPLFGRWIWGDFNMMKSPPPTSLNCIPLQTIYFFFLRLKRRLTQPAQPQPFIVGKSFSGGCQNLWVICPSCCFQGASSPSPHFL

SEQ ID NO: 288438 - protein, 61 aa, Zea mays
  Clone ID: MRT4577_26146C.1.pep
GVVFFDQNGTPSPVYIPTQAYNGIPDELGRNPIICYKKQRKFLLKLAPIENTQWIIIGRTL

SEQ ID NO: 288439 - protein, 70 aa, Zea mays
  Clone ID: MRT4577_26147C.1.pep
PPPARPSSVIWPSSPAVYWSPSISRAPLGCDQQACVPSGIRGHAIAADDPRPSSCRSTSSESRRASIAPR

SEQ ID NO: 288440 - protein, 756 aa, Zea mays
  Clone ID: MRT4577_26148C.1.pep
MTEGKKMTAEMKLTEETKLSEERKSMDSFMAEFVKSMSKTNTEKITKEILEGRYFRDMSIVRVGGDNTAPSPEKNEVVIYQSFRKIFPHQITPEAIMRMGIFVWAIRSQGLEPSAKCFCNMHELLYETKATGKEQYHNNFCCYGFIARPNASHPMPTFWKRSKVEVDDTVEACQRAFSTVCAHIGMKDLIQEHISFRVWPLVESWDMPKETTADSSEGGLVRLKYTFRFREKFGEPNDDWLKCIEATSDDLLGAYSKAEDNALSVAFGGWGKKRLNMVFDAIGFVYPDYRYPLRGQWKRKTAASATTVVPKSKKMKVLTHPPRYIESAKVPELGEGPSSTAKTRKTSSIVQSIEEPTVVPKVPTVRPAKAKDDKAEEPQVEKVIKNLEILSPTAEAKLPKMQKASTATPKRRMANVLDAVLETTKALSPAPTKKTAEAAKTPAKAKTGQAETEATEAPQAPVEAEAGPSAPIAAKPAALEEKSSGHIAPETPAPEALIETIDYIFRHASGKKLSEDEIAEARHYAQKLKYPKGALVFNRSNEYDFLYYLPDNKELSVCREIGRSIGFPKLEDGLLILSKDDLADNLAYNGMKLAEAKENCALAEANREISEYWQNYLEKRVEELWQSKERCFEKSLDCVKKIKASFAKVGAYSAEENFIQGDPEGVVEWINGEAETFEEILSDRGDVCAFSDDTKDPSAEAILMGGKFYNDIWVNGGREMAHEIIMKSEKDTHDARAEAKRAEEAAERERRIGIIS

SEQ ID NO: 288441 - protein, 67 aa, Zea mays
  Clone ID: MRT4577_26149C.1.pep
IIQTGIGAFVSASLMLPSPISPRPPCKRVYQERILWKAKNTQGLFVETCSSGNFIKLAQISKQTIAN

SEQ ID NO: 288442 - protein, 75 aa, Zea mays
  Clone ID: MRT4577_2614C.1.pep
LMPCMSTPREHHVGRVDLSLFQVAPDPSLRCVPLVQCDSLVLHLLVQCVRQEVVASVRPLLCLFSVYPCLDPGRT

SEQ ID NO: 288443 - protein, 115 aa, Zea mays
  unsure (1)..(115): unsure at all Xaa locations
  Clone ID: MRT4577_26150C.1.pep
VVVLDPFAGDVHSVSRERERRVEDGQSLHKGFRWGTAGDDDRRRRRHHHRQASELPQILCWSAPSFPPPTMMAASSTMSKXESAASYDMAEFDQSAIFLYLEDGHDQEQQRQTLN

SEQ ID NO: 288444 - protein, 38 aa, Zea mays
  Clone ID: MRT4577_26152C.1.pep
SSCAWSVFVDWTRCDFVSWAILYRDVSHGPCIIQGATN

SEQ ID NO: 288445 - protein, 79 aa, Zea mays
  Clone ID: MRT4577_26153C.1.pep
SGSINAHRQYYRILFGSPNHLYKSNNSSFDRVHPDEVPGTPRKELSISAVQMLHLYYQTNNSQWPHYNKLLFHLTLQET

SEQ ID NO: 288446 - protein, 78 aa, Zea mays
  unsure (1)..(78): unsure at all Xaa locations
  Clone ID: MRT4577_26154C.1.pep
ARTIIIILTWVWVRQDQKKRRQMKKLRKTPIEKGRGGMMSKXXPADSRGTRITACMRKNIHGWMDGRTGYFSSFFFFF

SEQ ID NO: 288447 - protein, 140 aa, Zea mays
  unsure (1)..(140): unsure at all Xaa locations
  Clone ID: MRT4577_26155C.1.pep
LRNENASLVSKIRKLNVCNNSISDLRNKNAMFGSQIEQLNVCRPWTSSVEHVSICTRCRDVHVDAMNDHLARIRNXYDQIAQLAAMINEHEIENEKFRFARSMLYNGIRPGIKDGLGFRQGRNGKLNXPKRGLSNFVKGK

SEQ ID NO: 288448 - protein, 54 aa, Zea mays
  Clone ID: MRT4577_26156C.1.pep
FLCNQTATKLGQNGSVLLGSSTKHYLRESTTSWLRWTKKLQPQLHRSRQAMQEQ

SEQ ID NO: 288449 - protein, 88 aa, Zea mays
  unsure (1)..(88): unsure at all Xaa locations
  Clone ID: MRT4577_26157C.1.pep
CEIRVLFXQPCPCSAAARDFAEXNYGDINGCEPSLPFVVTXCSGDQAHLCARYDMGGERXLKLHGLHGAQIANPLEELAMASESLKIN

SEQ ID NO: 288450 - protein, 105 aa, Zea mays
  Clone ID: MRT4577_26158C.1.pep
IPRPKNSPQKGSPLGKKGPLLFWPKKKQIFKPRQKKGSRFKTPKPGDPRGGNTLGFQGPGGGETPPKEKGFYKNKHPFLLNPSKRNWRGLNPRPPWGGEKKPAIF

SEQ ID NO: 288451 - protein, 140 aa, Zea mays
  Clone ID: MRT4577_26159C.1.pep
GRFKRTRLAGCSLFLYTNKAPLNGFPGARVTFDWGFPLGGGSHRVGFFWFLGNRTRGGGAPFKIFGGPPSRKPKGGKGRVGFCVFKKKINMGVAGKVASPRPKNWAWKIFLFLPPPRPNVRGPPFVPPFFFYGRGTSKGI

SEQ ID NO: 288452 - protein, 140 aa, Zea mays
  Clone ID: MRT4577_2615C.1.pep
MPPNAEDVHGSGGGGALATTAPAASKMDCFLTTVCTPLDLQFIDVSYRVKQTERSASKAPPGGRISHSGPGAPATAEERTILKGITGEARPGEVLAVLGPSGSGKSTLLSILGGRLVGRHSGTVLAGGRPPCRAVQRPTG

SEQ ID NO: 288453 - protein, 111 aa, Zea mays
  unsure (1)..(111): unsure at all Xaa locations
  Clone ID: MRT4577_26160C.1.pep
RTRVRDNESSASIFTYARSDGEAAGDASSTQQVLKDFHVHTYTAGETXEACEVARNSIELXLXTALSSYAEHDALKDDSTTTLMQHCYRSQHTLHMIIDSVGDNEAALSEV

SEQ ID NO: 288454 - protein, 89 aa, Zea mays
  unsure (1)..(89): unsure at all Xaa locations
  Clone ID: MRT4577_26161C.1.pep
ELGRKIQEKALSRIMISWNIGVLESGAVRTRSQXKRVILDQKKKQHPFIYLNVCTVGIVSTNSSYSTLYRSQHYWSYRRENYIGREDKK

SEQ ID NO: 288455 - protein, 37 aa, Zea mays
  Clone ID: MRT4577_26162C.1.pep
ALLVAKTRKLRELRCSACSSLNQSMYHVNQALVLYLL

SEQ ID NO: 288456 - protein, 139 aa, Zea mays
  Clone ID: MRT4577_26163C.1.pep
NPKKKVPPAFVPENFIRPGAGTPPKFFSPPPKTGFFGPAAFYPNQFGVPLYLSTTKSTFFDQKFFFPPLKNFKKPPPFALTAPSPPKGTFPTHIFYKKAPPRKKNFCKVIFLPPIKTNKKFFFLLFTGFFINFIKILSF

SEQ ID NO: 288457 - protein, 125 aa, Zea mays
  Clone ID: MRT4577_26164C.1.pep
GTPRAGRAGGHSTLQPTQSSAQEKGRKDEPEPLSRHLTPPIGRLRPTTRSCCRACRPLLSPLKPSPPPPPPPACLPSCRLPPGEDTAKRRTQKSKSFKEVEKFDVFALQNSSGCKLPSFFFLPPP

SEQ ID NO: 288458 - protein, 512 aa, Zea mays
  unsure (1)..(512): unsure at all Xaa locations
  Clone ID: MRT4577_26165C.1.pep
MGSLEARYRPAGAAEDTAKRRTQKSKSFKEVEKFDVFVLEKSSGCKFRSMQLLLFAIMSAAFLTILYTPSVYEHQLQSSSRLVNGWIWEKRSSDPRYVSSASIQWEDVYKSIQNLNVGEQKLSVGLLNFNRTEFDAWTHMLPESDFSIIRLEHANESITWQTLYPEWIDEEEETEIPSCPSLPDPSFQRATHFDVIAVKLPCSRVAGWSRDVARLHLQLSAAKLAATTARGNGGIHVLFVTDCFPIPNLAGGFNDFIICLVPRTKHVWXKFSPRLKXVQGLIETKHGLCXDSLACFKLAXKGTQNIPSHFLFFPXIMNNILSCAARLYTVDRRREAYATILHSASEYVCGAITAAQSIRQAGSTRDLVILVDDTISDHHRKGLESAGWKVRIIQRIRNPKAERDAYNEWNYSKFRLWQLTDYDKVIFIDADLLILRNIDFLFAMPEITATGNNATLFNSGVMVIEPSNCTFQLLMEHINEITSYNGGDQGYLNEIFTWWHRXSKHMNFLSIS

SEQ ID NO: 288459 - protein, 641 aa, Zea mays
  Clone ID: MRT4577_26166C.1.pep
MGSLEARYRPAGAAEDTAKRRTQKSKSFKEVEKFDVFVLEKSSGCKFRSMQLLLFAIMSAAFLTILYTPSVYEHQLQSSSRLVNGWIWDKRSSDPRYVSSASIQWEDVYKSIQNLNVGEQKLSVGLLNFNRTEFDAWTHMLPESDFSIIRLEHANESITWQTLYPEWIDEEEETEIPSCPSLPDPSVPRATHFDVIAVKLPCSRVAGWSRDVARLHLQLSAAKLAATTARGNSGIHVLFVTDCFPIPNLFSCKDLVKREGNAWMYKPDVKALKEKLRLPVGSCELAVPLNAKARLYTVDRRREAYATILHSASEYVCGAITAAQSIRQAGSTRDLVILVDDTISDHHRKGLESAGWKVRIIQRIRNPKAERDAYNEWNYSKFRLWQLTDYDKVIFIDADLLILRNIDFLFALPEITATGNNATLFNSGVMVIEPSNCTFRLLMEHIDEITSYNGGDQGYLNEIFTWWHRIPKHMNFLKHFWEGDEEEVKAKKTRLFGANPPVLYVLHYLGRKPWLCFRDYDCNWNVEILREFASDVAHARWWKVHNRMPRKLQSYCLLRSSLKAGLEWERRQAEKANFTDGHWKRNVTDPRLKTCFEKFCFWESMLWHWGEKSKSNSTTTRNSAVPATTTTTPAAASLSSS

SEQ ID NO: 288460 - protein, 137 aa, Zea mays
  unsure (1)..(137): unsure at all Xaa locations
  Clone ID: MRT4577_26167C.1.pep
DLLVYVHKVALENGLILVDTKFDVGKAPDGTIGMIDDVYTRDSSAYWIANXYENIYKCGLVPGNVXDKEFLKLWVRTLMLYEDASMTXASEELFCELTWRCIFLFETFTKTKLWMLKTHEPNNERISRNDAQGLREL

SEQ ID NO: 288461 - protein, 117 aa, Zea mays
  unsure (1)..(117): unsure at all Xaa locations
  Clone ID: MRT4577_26168C.1.pep
PGRPKPSVGIKLIASSLKTSPQLKGLTVALVFLGLVGGAASSPGGGCGCQPPPFILPPPFYLPPRFFLPPKNKPQPWHYPTQPPXLSPCQQFGSCGVGSVGSPFLGQCVEFLRHQCS

SEQ ID NO: 288462 - protein, 125 aa, Zea mays
  Clone ID: MRT4577_26169C.1.pep
LSAPHGPPVPPWGGLLGSCLGGGPRAFPPGQKGLSPQGPPGGPPGKVPNRPKPGGFFPTPLFNGGGPPKGLVQGAIFWARNPFRGPWFAISPKGSGLGWVLGRVFFKTRPWYLILPQPPKGWVLW

SEQ ID NO: 288463 - protein, 132 aa, Zea mays
  unsure (1)..(132): unsure at all Xaa locations
  Clone ID: MRT4577_2616C.1.pep
GPTPEKNNPQGQGLMKILARAWGPPHWGPPNGNTLFRVPRAWASWEFTPGALPAFWWGQVVPPRDLALLGKDPKLGSFXPQPKEGLANLVLXKNPKTGPXKKILCLDVGAHVNFPPRGVPPPFFAPGFITFL

SEQ ID NO: 288464 - protein, 63 aa, Zea mays
  Clone ID: MRT4577_26170C.1.pep
HHLPNLKPTGRDAESAARWEWVSSSGAREPSPWTVGMKRCPTLRAAWRSCRVGCRSCRVGWRS

SEQ ID NO: 288465 - protein, 78 aa, Zea mays
  Clone ID: MRT4577_26171C.1.pep
LPHFFFLSPSYTRTGPFYTTRGKHYTLTSQKNAWPVQLTHQNAVYHDSVVLILHHTVNKPVHHTLPKDQPSLITHATP

SEQ ID NO: 288466 - protein, 283 aa, Zea mays
  Clone ID: MRT4577_26172C.1.pep
MASAVCGVTARAHLPSAVPAAARKLFFRCRAASTMNEASASSPDAEEKKTTTVFVAGSTGRTGKLVVEKLLAKGFGVVAGTTDVSRARGSLPQDPNLQLVRADVTEGVDKLVEAVRGVDAVVCATGFRRSFDPFAPWKVDNFGTVNLVEACRKAGVARFVLVSSILVNGAAMGQLLNPAYIVLNLLGLTLVAKLQAENHIRKSGIDYTIVRPGGLTDQPPTGNIVMEPEDTLYSGSISRSQVAEVAVEALVCPESSYKVVEIIARTDAPNRSLKDMYAAIKQN

SEQ ID NO: 288467 - protein, 112 aa, Zea mays
  unsure (1)..(112): unsure at all Xaa locations
  Clone ID: MRT4577_26173C.1.pep
GQEGGAITEGTKKSYPVPRKIXKRQQGRALDPYFXEPFGRGGLLGCLFARPGQGGPAYGFLLEGKEVGFFIKKLPRKKGQGVAFLSLFFTRTAKYFFLGGFVGSFYAYFLGA

SEQ ID NO: 288468 - protein, 140 aa, Zea mays
  Clone ID: MRT4577_26174C.1.pep
YAIPIDTIKVVAERVRDKSQAVKCYTMERLADIYKLYCQRDSDSSTNSDDFEWIPGKILRCLYDKEFRPESIDSILSGSLFSPEYQMKGRVKHWITAATYFDKVEMKALEQILLHKQRLQQEMLKYISLREPSQEDAPDL

SEQ ID NO: 288469 - protein, 228 aa, Zea mays
  unsure (1)..(228): unsure at all Xaa locations
  Clone ID: MRT4577_26175C.1.pep
MSLEDEKPVFAAAAVPNWVMLERVVFRRDDESFPDGSEAPVRAAGVTTWNARFRIAFDLAEPPRISRLFAQLPTFPKNEFPLAIVATDRHRVLFRVGTMMSVSLVQDFFIYSASAAHTSSXHGAPALCRXPDMDYSRRDGRLPRERASRGRRLLAVRSMGLLCRGEEEFAVAELQVYKHSCYMAFADIYLFLKSAGKWDSMRXHPLQHRXDVIWQLCLWADDTVIPVT

SEQ ID NO: 288470 - protein, 135 aa, Zea mays
  unsure (1)..(135): unsure at all Xaa locations
  Clone ID: MRT4577_26176C.1.pep
NQLFSAGVRCLMRCGSDDAYERRRLXLIIGSREAVPIXRCFKWKCLXVTRWHDGLXCRWPNRASTGETELTGSGSGSQLCAXHTXRLKPFLHQVNSETVLTNXRVSSDYAGYASAHTVLQCQELVGLKTHYGPPI

SEQ ID NO: 288471 - protein, 116 aa, Zea mays
  Clone ID: MRT4577_26177C.1.pep
DASSTYKSPNLSSQRFPLAPLISQSVSRSHVSRGREAFLRRRCRPQLGDARARRLPQGRRVLLGRKRGHRGDRPASRPVSRRHHDVRKSGSGILHLQHLRCRHFLFADCAPALCRA

SEQ ID NO: 288472 - protein, 46 aa, Zea mays
  Clone ID: MRT4577_26178C.1.pep
RPSRPTNRPSRSARTTSKSSNLKTLTISNTNRVEHPNRAQRNDQPD

SEQ ID NO: 288473 - protein, 142 aa, Zea mays
  unsure (1)..(142): unsure at all Xaa locations
  Clone ID: MRT4577_26179C.1.pep
KKGHPKKLLGFVKXARVFFIKKIFSPGFFFPQGWVPTPGFNPGALGGINFGKNPPSPKIFGKNPVSQLGGGTLGPPGGKPPGPQTNCLALKTFFQPRKKGGVFFFKGIKFPNPLPKGGLNNPPLFKKGRRPNFLVSKPWVPF

SEQ ID NO: 288474 - protein, 171 aa, Zea mays
  unsure (1)..(171): unsure at all Xaa locations
  Clone ID: MRT4577_2617C.1.pep
MNLSIPNPSTGRQKKLEINEXPKLRGFYDLKISHXHTGDALGEECKGNAFKSMAVXHKSGSPMKLGILTSGRARLLLHRGAPCFRRYVMRNGERKMKNCPXCIVEHNDLSXIHMLIDRKGENDLSGLADTENPMMRRPKRTSMIRKLVDLAYDDNVHEYENAYRRXTFTTE

SEQ ID NO: 288475 - protein, 47 aa, Zea mays
  Clone ID: MRT4577_26180C.1.pep
ALSCLYACKCALKAESQKTQSNEQCHYSVDRDLLRYPADKAKGIKTP

SEQ ID NO: 288476 - protein, 64 aa, Zea mays
  Clone ID: MRT4577_26181C.1.pep
MVNDATYSDLVCHMAAMFRFCYIFKFLHVICAVYFLFIFYIILFFYFFFLFIFLSYFFYFIFFV

SEQ ID NO: 288477 - protein, 109 aa, Zea mays
  Clone ID: MRT4577_26182C.1.pep
FGSRTGLSTRVFCMPCGVARTGISGEDLWAIYENEKDAQSVIDCVSKTMTSLMTRVDTENATGIGTEVFFYMDENSQDDMLTLNENKAQAHSVECRMKAIEHVTHALVN

SEQ ID NO: 288478 - protein, 97 aa, Zea mays
  Clone ID: MRT4577_26183C.1.pep
MCYQVWEHEVDGNTTYQVCDGSGVDPNCCRSVFALFWSASDHLTYMGVEIAADDWSTCRIVLGRGVEQLKGSLPNNIVTSGRSVDVVIANDDTLQID

SEQ ID NO: 288479 - protein, 73 aa, Zea mays
  Clone ID: MRT4577_26184C.1.pep
MIQVVLNDRLGKKVRVKCNEDDPIGDLKKLVAAQTGTRPEKIRIQKWFNIYKGPITLKDYEVHDGMGLELYYN

SEQ ID NO: 288480 - protein, 73 aa, Zea mays
  Clone ID: MRT4577_26185C.1.pep
MIEVVLNDRLGKKVRVKCNEDDTIGDLKKLVAAQTGTRPEKIRIQKWYNIYKDHITLKDYEVHDGMGLELYYN

SEQ ID NO: 288481 - protein, 73 aa, Zea mays
  Clone ID: MRT4577_26186C.1.pep
MIEVVLNDRLGKKVRVKCNEDDTISDLKKLVAAHTGTRPEKIRIQKWYNIYKDHITLKDYEVHDGMGLELYYN

SEQ ID NO: 288482 - protein, 73 aa, Zea mays; identical to SEQ ID NO: 288480
  Clone ID: MRT4577_26187C.1.pep

SEQ ID NO: 288483 - protein, 73 aa, Zea mays; identical to SEQ ID NO: 288480
  Clone ID: MRT4577_26188C.1.pep

SEQ ID NO: 288484 - protein, 87 aa, Zea mays
  Clone ID: MRT4577_26189C.1.pep
DSTGRLAAYGGTRRHRHTRQEYRNGGSLILESLDNQRMGNLRVAMGGLQYLGEWLCLRGRTPEQRLSNEYAILDCAMLCRKVVGLPH

SEQ ID NO: 288485 - protein, 71 aa, Zea mays
  Clone ID: MRT4577_2618C.1.pep
NLQLMSMLSASSASRGGGTGSGGGALTVRVAAAEDDDEDETERTSSSGSSIPHGSSIAKFCLSIGSLPPPR

SEQ ID NO: 288486 - protein, 73 aa, Zea mays; identical to SEQ ID NO: 288480
  Clone ID: MRT4577_26190C.1.pep

SEQ ID NO: 288487 - protein, 53 aa, Zea mays
  Clone ID: MRT4577_26191C.1.pep
FLAALFFYFFLGVFFFFFFFFSLKNLRQSQTGLLNKHRVVVTTQLHLDKMLPT

SEQ ID NO: 288488 - protein, 94 aa, Zea mays
  Clone ID: MRT4577_26192C.1.pep
GPLGGPPIAGFMIPHKGLAHHWGFVCHKKLGAGKNCFGNLGVCSWEKKSSWVPEDHEGWGQTGNSLVSANYVWAMDMGWAVHPPPKKESKNSLF

SEQ ID NO: 288489 - protein, 168 aa, Zea mays
  unsure (1)..(168): unsure at all Xaa locations
  Clone ID: MRT4577_26193C.1.pep
SLGGLAXAPGDHSLHNAFSTYRERLQAGSILHRETQRPRGLGWETFSTRTRXRNAIKGMNGKELDGRNMTGNEAHTTSVRVGGGKVYGAGREGXAYGAGVRXRDGGGRYGGGGRYGDGCLHRGGGAGYREGNRGGGYGDYDGXNWRNCTAEAARPDYAERYRDDDPNA

SEQ ID NO: 288490 - protein, 115 aa, Zea mays
  Clone ID: MRT4577_26194C.1.pep
AGAQQPVHYTGNGGKGEPLELTDSRSATKGKKIGEGIQIQLTGGGKLWNKNTLGRPQKGNCFLQTGFANDTIKNNVAKQCTCGTPIGKCLLKPPCLNQFKTLPRPLSELTSTRSS

SEQ ID NO: 288491 - protein, 119 aa, Zea mays
  unsure (1)..(119): unsure at all Xaa locations
  Clone ID: MRT4577_26195C.1.pep
WAPCWXAXVWAPCWXAXAWAPCWXAXAWAPAPCWXAXAWAPCWXPXAWVPAPCWXVXAWAPCXXAXAWAPCXYXGGXLXXXPXXGSXAAAXXAVAXAVXGCAAVXCXPAXCPVALAXAA

SEQ ID NO: 288492 - protein, 50 aa, Zea mays
  unsure (1)..(50): unsure at all Xaa locations
  Clone ID: MRT4577_26196C.1.pep
NPYEQTPALATRTPNEQXTTDTGPKLTAPHTTKPTIRPPSLPTNTLVYSP

SEQ ID NO: 288493 - protein, 48 aa, Zea mays
  Clone ID: MRT4577_26197C.1.pep
STLRLTHGTPVTNCNNMLPFNQLALTNPAVFYQQPIIGGALFKISYEL

SEQ ID NO: 288494 - protein, 528 aa, Zea mays
  Clone ID: MRT4577_26198C.1.pep
MRAPPSAGGFNSPWTLAIRAAADQGRPRRAIALYLASLRSSCRPCPFALAAVLKSVPRLPEHAVLPAAASLHAHLLRLGLLSHPYPHAALSHLYSHLLPPHHNHARGLLDDAPTPLNRHSLVSSNSLLASLLRAGDIPAARAMFEAMPARDVVSWNSMVAGLAKAGHLDEAIEMFDQMPETNVASWNALVSGFMAQGHLAQAQELFERMPTRNNVSWITMISGYAKAGDVQAAANLFDRMGSKDLYAWNAMISCYAQNGCAREALGIFNRMLKPHIWVVPNEKTFSSVISACSQLGDLRFGLWVESFMGYVGVDLDDHLRTALVDLYTKSGRMDRAFDLFRGLRSRDVVSYSAMIVGCGMHGKLNEAVGLFKEMSKARIDPNAVTFVGLLSAYSHAGLLEEARACFTSMTSRYRINPSMEHYTIMVDILGRCGKLEEAFQLVMQIPVCPDASVWGALLLACRLHNNIELGEVVASKCFELEPQESGYYILLGNIYAQAKKWDKVKGLRKMMAERGLSKTPGSSWVHVA

SEQ ID NO: 288495 - protein, 263 aa, Zea mays
  Clone ID: MRT4577_26199C.1.pep
CSRTRGVEEGKHYLDIMVSKYRLKPWQEHYACVVDILGRSGQTEEAYEFIKTMPMDPKSAVWCALLGACRVHRNYGLAVVAANKLLELEPDNPGNYILVSNVFAEMGKWNNAKETRTRMAERGLRKNPACSWIEIGNNIHTFTSGDYCHRDSEAIHLKLSEITEMLRREGGYVEDTRFVLHDTSEEEKIDMLHKHSERIAIAFGLISTRPGMPIRIAKNLRVCGDCHEFTKLVSKLFERDIVVRDANRFHHFSGGSCFCEDFW

SEQ ID NO: 288496 - protein, 83 aa, Zea mays
  unsure (1)..(83): unsure at all Xaa locations
  Clone ID: MRT4577_2619C.1.pep
RRHMRSISFIIKAGRQDPPIILRVDRDTGYSDRXESPESARSMRTHXDRSNKCKLAHSIMRHXVTKTLEVHLXPLYQRIGWPL

SEQ ID NO: 288497 - protein, 82 aa, Zea mays
  unsure (1)..(82): unsure at all Xaa locations
  Clone ID: MRT4577_261C.1.pep
PFGPPACAFLAPLRGLPPFCSCLLAGPCSLRPWPPSLCCPAPLLGLVPFPSWLACRRPSPVCPPWFSSXPPPXCWAFPVRTT

SEQ ID NO: 288498 - protein, 397 aa, Zea mays
  Clone ID: MRT4577_26200C.1.pep
MGDAGEIQLQIAGIRCQEAGDDHGQRAESGGACPGPATEAPRPPLSKRLAWWAVVLINVVFILGGQSVATLLGRIYYDQGGNSLWMQTVVQSCGTPLAIPLLLYFRFRVRPTSSSAVAASRPPLVKLAAIYAGLGVLLAADNLMYSYGLLYLPMSTYSIICASQVSFNAVFAYFLNKEKFRALVLNSVVLLTFSAALVGVNHGSDETGSSIPKGKFPAGFALTLSASALFSLILSLTQLTFDEVLKSDALQTVLEMQFWSNTAAACVSVAGLFASGEWRTIAGEMEAYKKGEVAYAMTLASTAFSWQLCTMGLMGLVAAVSSLFTNVISTVGTPLSPVLAVIFLGDRMDGVKLMAMLIAVWGLLSYVYQHYLDDRAKAKRITEKSDEQYQAAKISVE

SEQ ID NO: 288499 - protein, 84 aa, Zea mays
  Clone ID: MRT4577_26201C.1.pep
TPRGVCPAGAFCSLVARKDQRVRRCALRDVAHGPDPRESACARARVSLAPVNVSMTRDFAVQYARVTWRLSGGVSVCHRTNSGT

SEQ ID NO: 288500 - protein, 59 aa, Zea mays
  unsure (1)..(59): unsure at all Xaa locations
  Clone ID: MRT4577_26202C.1.pep
XRVGSVSLFLWRVAKNHTLLFLECAYLATPYNAKSKKTARIYSTDRSLSVWSDVIFSDL

SEQ ID NO: 288501 - protein, 79 aa, Zea mays
  Clone ID: MRT4577_26203C.1.pep
KVPRPQYNEKFDKFIKGNRQTKVYILTVPKIWQFWVGRFYRPFFGLYIGARNICGFFYMGQDKTSPLFVQGKAKYIACM

SEQ ID NO: 288502 - protein, 63 aa, Zea mays
  Clone ID: MRT4577_26204C.1.pep
PPTNASQLLALEPLPVPNTCLLSPDAVSRPFRHWLGAFCFQQTELVEFPLRSVTRTIGDIHRE

SEQ ID NO: 288503 - protein, 72 aa, Zea mays
  unsure (1)..(72): unsure at all Xaa locations
  Clone ID: MRT4577_26205C.1.pep
VVFFFFFFFFFFFFFRGKTITQKYKGAGQKRGHIAVVYIHPQKNXXTRAGFGYSLLDYSPIKMGGGGGLSRP

SEQ ID NO: 288504 - protein, 115 aa, Zea mays
  unsure (1)..(115): unsure at all Xaa locations
  Clone ID: MRT4577_26206C.1.pep
FSSCQLRTFRTPWKISKDCSGAQFLVGQXNLNLPGXPTVPLIMFGPGTGLAPLRGFLQERLAXKQAKVKLGLAALFFVGKIRKMAFIYEDHLIIFVESXGALSELIVRFFREGPP

SEQ ID NO: 288505 - protein, 54 aa, Zea mays
  Clone ID: MRT4577_26207C.1.pep
RQLFWDAGSTFLHENSGNKAPSAFYFFFHETRPYPGKLNALLRIKVGSLDRITR

SEQ ID NO: 288506 - protein, 248 aa, Zea mays
  Clone ID: MRT4577_26208C.1.pep
MRFQMIPLLAVASCATVNASPVQHEPRAAGCSSYTIINTRGTGEMQGPSSGFRTMNSQITSQVSGGKIYNTVYPADFSQNSASGTRDIVRKVNSVLSSNPSECFILEGYSQGAAATVNALSQLTGSAKDAVKGVFLIGNPLHKRGLECNVDNKGGDTTKNVSGISAFGGGGIPQDWVSKTLDVCIYGDGVCDTTHGSGINGPHLQYPRDSSTQDLGTKYVVKQLTGSTSTFTMVGSRHRVPCNRYSFT

SEQ ID NO: 288507 - protein, 78 aa, Zea mays
  Clone ID: MRT4577_26209C.1.pep
MQQPEPADLPGWAFPPRAGPAPAAVRGAHHRRARSEVAFRLPDDLGLGGGGGPDGDAFDEIGSEDDLFSTFMDIEKIS

SEQ ID NO: 288508 - protein, 84 aa, Zea mays
  Clone ID: MRT4577_2620C.1.pep
STKKSSLAIMLHYYNRNRTRLKMSIYISISHSLSTLMKSHFFESSSTFLFSPPFLESKAYTDLMASTSRSTTIQPFILCHVKMK

SEQ ID NO: 288509 - protein, 256 aa, Zea mays
  Clone ID: MRT4577_26210C.1.pep
MARAIVLAALLLAATASSTTATTLTIHNLCPHPVWPLVTPNSGLPSISDNTARLDPNALLTLSFPPTFWAGRVAARTGCDAAASGCWTGAAPPATVVQVTVHDGTNQDQAAYSVSLADGFNAPVVVSPQAAGGGQCPALGCPVDLNCDCPPQQRAAEGAACRGPPEYFKSRCPLTRTTPTDVEPVPQSCRAPGELKVVFCQATIVTGGVAAAAEAEDGHPNRRRRQLDYWPRQTSSSTGPASLNRYLSRFLLSCVC

SEQ ID NO: 288510 - protein, 79 aa, Zea mays
  Clone ID: MRT4577_26211C.1.pep
SSVLKNPRSNVRRLYNPVTDPAILILIAMVHLGIMLSPSPFEILSLLDSPQTIISHVESTRLHLSRQANAKPITEGINT

SEQ ID NO: 288511 - protein, 153 aa, Zea mays
  Clone ID: MRT4577_26212C.1.pep
MDASDELRSLEATGIYRLAGSRAAFVDPVRLLGESYRRFRLVPSAYYSRSFGPSRQGGEAQAEGTAPSPDRKKRKRKRQTKARELNAVERIAEARHQEARPLLISAHNSLLDAKYLLEYLPGMIKGDECRPELETSSENNFVELAGSCRAPFY

SEQ ID NO: 288512 - protein, 561 aa, Zea mays
  unsure (1)..(561): unsure at all Xaa locations
  Clone ID: MRT4577_26213C.1.pep
MSLRPSERVEVRRNRYKVAVDAEEGRRRREDNMVEIRKSRREESLLKRRREGLQAQVPAPPSGVEKKLESLPAVVSGVYSDDNNLQLEATTQFRKLLSIERSPPIEEVIKSGVVPRFVQLLTREDLPQLQFEAAWALTNIASGTSENTKVVIDHGAVPIFVKLLGSGSDDVREQAVWALGNVAGDSPKCRDLVLANGALMPLLAQLNEHAKLSMLRNATWTLSNFCRGKPQPSFDQTKPALPALARLIHSNDEEVLTDACWALSYLSDGTNDKIQAVIEAGVCPRLVELLLYVKMLCNNSMMITWIVFVICTSSLSFIXCADTTCSHPSPSVLIPALRTVGNIVTGDDQQTQCIIDHQALPRLLNLLTQNHKKSIKKEACWTISNITAGNKDQIQAVISAGIIAPLLQLLQGAEFDIKKEAAWAISNATSGGSHEQIKYLVSEGCIVPLCDLLVCPDPRIVTVCLEGLENILKVGEHDKTMGATGDINVFAQMIDDAEGLEKIENLQSHDNNEIYEKAVKLLETYWMEEEDDAMATAGEAAPAVFDFSQGGNPPGGGLNLN

SEQ ID NO: 288513 - protein, 526 aa, Zea mays
  Clone ID: MRT4577_26214C.1.pep
MSLRPSERVEVRRNRYKVAVDAEEGRRRREDNMVEIRKSRREESLLKRRREGLQAQVPAPPSGVEKKLESLPAMVSGVYSDDNNLQLEATTQFRKLLSIERSPPIEEVIKTGVVPRFVQSLTREDFPQLQFEAAWALTNIASGTSENTKVVIDHGAVPIFVKLLGSGSDDVREQAVWALGNVAGDSPKCRDLVLANGALMPLLAQLNEHAKLSMLRNATWTLSNFCRGKPQPSFDQTKPALPALARLIHSNDEEVLTDACWALSYLSDGTNDKIQSVIEAGVCPRLVELLLHPSPSVLIPALRTVGNIVTGDDQQTQCIIDHQALPRLLNLLTQNHKKSIKKEACWTISNITAGNKDQIQAVISAGIIAPLLQLLQGAEFDIKKEAAWAISNATSGGSHEQIKYLVSEGCIVPLCDLLVCPDPRIVTVCLEGLENILKVGEHDKTMGATGDINVFAQMIDDAEGLEKIENLQSHDNNEIYEKAVKLLETYWMEEEDDAMATAGEAAPAVFDFSQGGNPPGGGLNLN

SEQ ID NO: 288514 - protein, 306 aa, Zea mays
  unsure (1)..(306): unsure at all Xaa locations
  Clone ID: MRT4577_26215C.1.pep
PTRPCRGKPQPSFDQTKPALPALARLIHSNDEEVLTDACWALSYLSDGTNDKIQAVIEAGVCPRLVELLLHPSPSVLIPALRTVGNIVTGDDLQTQCIIDHQALPRLMNLLTQNHRKALRKXACWTISNITAGNKDQIQAVISAGIIAPLLQLLQTAEFDIKKEAAWAISNATSGGSHEQIKYLVSEGCIKPLCDLLVCPDPRIVTVCLEGLENILKVGQHDKTMGATGDTNVLAQMIDEAEGLEKIENLQSHDNNEIYEKAVKLLETYWMEEEDDAMATAGEAAPAVFDFNQGGNPPGAGGLNFN

SEQ ID NO: 288515 - protein, 109 aa, Zea mays
  Clone ID: MRT4577_26216C.1.pep
HGRGISVVAADVPNVDLVIHYELPNSSEIFVHRSGRTGRAGKKGSAILMHSSKQHRDLKGIEHDAGCRFTELPSFKVEAGAADMYSDMGKGSDRFGSYGGTMRSRSGDF

SEQ ID NO: 288516 - protein, 527 aa, Zea mays
  Clone ID: MRT4577_26218C.1.pep
MSLRPSERVEVRRNRYKVAVDAEEGRRRREDNMVEIRKSRREESLLKRRREGLQAQVPAPPSGVEKKLESLPAMVSGVYSDDNNLQLEATTQFRKLLSIERSPPIEEVIKTGVVPRFVQSLTREDFPQLQFEAAWALTNIASGTSENTKAVIDHGAVPIFVKLLGSGSDDVREQAVWALGNVAGDSPKCRDLVLANGALMPLLAQLNEHVKLSMLRNATWTLSNFCRGKPQPSFDQTKPALPALARLIHSNDEEVLTDACWALSYLSDGTNDKIQSVIEAGVCPRLVELLLHPSPSVLIPALRTVGNIVTGDDLQTQCIIDHQALPRLMNLLTQNHKKSIKKEACWTISNITAGNKDQIQAVISAGIIAPLLQLLQTAEFDIKKEAAWAISNATSGGSHEQIKYLVSEGCIKPLCDLLVCPDPRIVTVCLEGLENILKVGQHDKTMGATGDTNVLAQMIDEAEGLEKIENLQSHDNNEIYEKAVKLLETYWMEEEDDAMATAGEAAPAVFDFNQGGNPPAAGGLNFN

SEQ ID NO: 288517 - protein, 87 aa, Zea mays
  unsure (1)..(87): unsure at all Xaa locations
  Clone ID: MRT4577_26219C.1.pep
STDLKVQLGFKWFGVRLPQIKIRVVSMKVDLILNIRIGTAKFPYTVLYLNTHYVKVSTKGITXKGIPTRFTFQLCFRSARPVVALAV

SEQ ID NO: 288518 - protein, 140 aa, Zea mays
  Clone ID: MRT4577_2621C.1.pep
AKRWIIKWGVAFTAVIAVVWPVLSLPAGRYSAGYFTMWAVIAIAWGTVGSAVIIFLPLVESWDTICKVCEGMFTNNPVFERLGEMNLRLKAIMGDMPEAEERYQEMQKEKDLGTMEMVHPASGTRPSMVANDDEDNLSLA

SEQ ID NO: 288519 - protein, 49 aa, Zea mays
  Clone ID: MRT4577_26220C.1.pep
FPYKKPPVSKVQKLQSSLAFPQTQGPKFFRGVQKKTPPPTKKCPLRLGH

SEQ ID NO: 288520 - protein, 111 aa, Zea mays
  Clone ID: MRT4577_26221C.1.pep
AGRPAGNPQSHSSTHTNTYNFFEDLLHQQLSTCLPALAATTRPLPAAPAALAASTKFPLPSPTTLGHDYHTRRPLRAMLPGYDTGGHQMRAQRASRTDRYNGKERKKYETC

SEQ ID NO: 288521 - protein, 97 aa, Zea mays
  unsure (1)..(97): unsure at all Xaa locations
  Clone ID: MRT4577_26222C.1.pep
AXEPRLFPCLGKGKRATQAHHQFLACIXCSXPITRAQTPAQGTTQNLXLNGNLGXGXKXGXARFPGGIHTMYXXHFTPQDSRLLSASLPKASLHCTX

SEQ ID NO: 288522 - protein, 149 aa, Zea mays
  Clone ID: MRT4577_26223C.1.pep
MKSRSMASSAALLVLALALVAATAPQVAEAKKKRAAESGEAAEAKKIQDDFCSTLCEGKKGTDLVVCKESCALSQQSNLVLYGRIQCKGKCTEQKGITAPQMKVCQEACDKDYVVKAAEVTKACNTTCAKEKQPLLSENCRRSCTPPPS

SEQ ID NO: 288523 - protein, 59 aa, Zea mays
  Clone ID: MRT4577_26224C.1.pep
ILCIVRRSSGLFFWSSKNCPGCAQCYIQVTSTRFRVYVKHNRPVSEYSQVACLGALWGT

SEQ ID NO: 288524 - protein, 144 aa, Zea mays
  Clone ID: MRT4577_26225C.1.pep
MKKVASSSAVLFVLALTLVCAPLIAEAKKKRVAAAAAEEKKVQDNFCSTLCEGRKGMDLVVCKESCDLSQRSNLVLYGRIQCKGKCTEQKGITAPQMKVCQEACDKDYVVKAAEVTKACNTTCAKEKQPLLSENCRRSCTPPPS

SEQ ID NO: 288525 - protein, 74 aa, Zea mays
  Clone ID: MRT4577_26226C.1.pep
AGPGPTRTGAMRDISPRGLNHWTTLDMMGALAYHLHKRDRERHNLWQREKSISRSPAKSYNYHIMLSLFAKKKK

SEQ ID NO: 288526 - protein, 83 aa, Zea mays
  Clone ID: MRT4577_26227C.1.pep
KKMPGFLKLSPQRSLFTPCRHLVNVLKIFFFALLRGAYIAPAHCVWPAIKFHSPQRTWVAPFPFKPENNPPPEGPVSNRSGVD

SEQ ID NO: 288527 - protein, 136 aa, Zea mays
  unsure (1)..(136): unsure at all Xaa locations
  Clone ID: MRT4577_26228C.1.pep
MSTAPASPRPPTFLFSPSYLRAAPAPTAALLPVTKVAIMVRSASNRGWLRAHANYNVKLITPVGEVELQVPDDVDILDQAEEDGIDLSYSXRAGACSSCAGKVVFVSMDQSDQSYPDYGQIAAGWVVTCQAXPTSD

SEQ ID NO: 288528 - protein, 63 aa, Zea mays
  Clone ID: MRT4577_26229C.1.pep
RFSSHLKQLFKHYNSNCFCRDCEPSPHCLLYSLRAEPSSSWFLDSCLMLSPSSSESGAAYASS

SEQ ID NO: 288529 - protein, 153 aa, Zea mays
  Clone ID: MRT4577_2622C.1.pep
MADVDVEPEVAAGAPKKRTFRKYSYRGVDLDALLDMSTDDLVQLFPARARRRFQRGLKRKPMALIKKLRKAKKDAPVGEKPEPVKTHLRNMIIVPEMIGSIVGVYNGKTFNQVEIKPEMIGHYLAEFSISYKPVKHGRPGIGATHSSRFIPLK

SEQ ID NO: 288530 - protein, 39 aa, Zea mays
  Clone ID: MRT4577_26230C.1.pep
SVTLLIITHLTSIYISHNYVFTLLVRTSNTFKPHLIDPS

SEQ ID NO: 288531 - protein, 42 aa, Zea mays
  Clone ID: MRT4577_26231C.1.pep
LLLYMEAGHVRSSGEDLQLSGFTPARILIPPPPPVQRHPHLR

SEQ ID NO: 288532 - protein, 63 aa, Zea mays
  Clone ID: MRT4577_26232C.1.pep
AKWPVKTQILMDFGGPLCQVKLMFYLGKALKKGFNRTVSLLNPVHIKTHPAKLTILLYKEGTL

SEQ ID NO: 288533 - protein, 113 aa, Zea mays
  Clone ID: MRT4577_26233C.1.pep
VLKHASTKDHKSPFFLSKVNFTFKYILHNALHMHQELYNTIPWPLSDSTNCTTTCSSSGTDLSDTIDDTKGPILSFPCCHSFLFKYKDKVGSGPLLSLPNAAIVPSNLYLSRL

SEQ ID NO: 288534 - protein, 76 aa, Zea mays
  unsure (1)..(76): unsure at all Xaa locations
  Clone ID: MRT4577_26234C.1.pep
QFVLEVIHPGRANVSKGGVEERLAKMYEGEDPXTIFXLQFRTHFGGGKSTGFGLIYDNLESAKXFEXQYAHRNVLH

SEQ ID NO: 288535 - protein, 129 aa, Zea mays
  unsure (1)..(129): unsure at all Xaa locations
  Clone ID: MRT4577_26235C.1.pep
SGXEXFLDAREXQFIAFASINSGMRVPGTQYAPTKANVRRWQLERTVRGTLMAIIDERLAAAKEAKGYGSDLLGLMLEANXXXXGGKRQQQAMSMDEIIDECKTFXFAXXHETTSHXLNWAMFSXXSNX

SEQ ID NO: 288536 - protein, 471 aa, Zea mays
  unsure (1)..(471): unsure at all Xaa locations
  Clone ID: MRT4577_26236C.1.pep
MAASHAPASVAAATDGVIEENVMAILDSSGIKDSRDLHDDRAAFLEAVRSTCLASDNPSVPSWRMYDGVFQILQNSSSLELAVASFHLLTELGKQYPRTYVADSGGHQSLVVVKESWVPFLFGNGAVSSEIGGNVRSSDHLFDPSRFSLLIEAIVEPTNGTDDNNGIKAIENMMLXQYLVNTLEADFVPRQIATKESLDWVIFRESLLSMLLGSRKLVFKSFVKNCMCILLNQYYHEAKDDYEDIIPSERETESTSYHNFSLNYLSFELKKTLISLRKLFVMVMKLDLTRKEADTLGLTSRADGFRNSIMDIILDELTYNSSYLSPFLLAFVERKWKLEIILQYFSKNCGKGAVRTRRSDNSQEDLKLENVLSFFLTATSAKAIVRKMSAEIAQLLLTHAYQACLSAEDANSNSADTPEKVGATLQEISSNFIAAFQNIRKVSPDIQISPFEKEALFTAATLVRKLKSKER

SEQ ID NO: 288537 - protein, 112 aa, Zea mays
  Clone ID: MRT4577_26237C.1.pep
KAGSIFDPTETKTKGRKRWPKPRSEPTPPNPKSIKGATKTNTHPSTELQRQNQQPKYKGHYEKKKNPVQVTYWKKTTKKHALKKCKTCLTSFFFPQKGTGGGQMTPVGPQKP

SEQ ID NO: 288538 - protein, 89 aa, Zea mays
  Clone ID: MRT4577_26238C.1.pep
VMKLDLIRKEADTLGLTSRADGFRNSIMDIILDELTYNSSYLSPFLLAFVDQKWKLEIILQYFSKYCGKTGGERQATWLSRPEKRGLTL

SEQ ID NO: 288539 - protein, 121 aa, Zea mays
  Clone ID: MRT4577_26239C.1.pep
PIVRSVLGGRVGHKKIETGNVLNFFVTATSAKAIVRKMSAEIAQLLLTHAYQACLSAEDANSNSADTPEKVGATLQEISSNFIAAFQNIRKVSPDIQISPFEKEALFTAATLVRKLKSKER

SEQ ID NO: 288540 - protein, 91 aa, Zea mays
  Clone ID: MRT4577_2623C.1.pep
VLRLGSGPECSCPRALQVPQFLLHPGYFVVVHGRRIGLGRPSLGFDLCGRFKSLSLRHVCVLLLVCARVSPSRVACPAAAPCSKKKMNIKK

SEQ ID NO: 288541 - protein, 80 aa, Zea mays
  Clone ID: MRT4577_26240C.1.pep
TFTAKPSQDRMHIGRIYHTRTKYTYQSKYIFPPTQRADTNQTLPPPDPRKGPTHVQLTLSRFRCRENLQPTSRREGSTLL

SEQ ID NO: 288542 - protein, 58 aa, Zea mays
  Clone ID: MRT4577_26241C.1.pep
RRRLHRHALLHDLPTTMYPSFPHAPSSLISRIEGRRRTLPGALTPAETTRQSTRHATP

SEQ ID NO: 288543 - protein, 80 aa, Zea mays
  Clone ID: MRT4577_26242C.1.pep
MPSKGPLQSVQVFGRKKTATAVAHCKRGNGLIKLLEPVLLLGKERFAGVDIRVRVKGGGHVAQIYAIRQSISKALVAYYQ

SEQ ID NO: 288544 - protein, 75 aa, Zea mays
  unsure (1)..(75): unsure at all Xaa locations
  Clone ID: MRT4577_26243C.1.pep
PVGVIKNRKQEQGQVLAHSRXDSLGHQFASRMGVVFASGXGNKPWVSLPKGKGINVSIIKDLRWRDAXAQSAAYA

SEQ ID NO: 288545 - protein, 56 aa, Zea mays
  Clone ID: MRT4577_26244C.1.pep
PFVINKTFDGPRLHPYEMAAGKTPELYTGSHDALTTKRRGQMVDMESNGTLATAYF

SEQ ID NO: 288546 - protein, 68 aa, Zea mays
  Clone ID: MRT4577_26245C.1.pep
KKNRSPTPIFRGGDPHWFFAYIFNFFYILQGKTIEHRAGGKLFLITKKALVFFRGGGALNYGGGAKFF

SEQ ID NO: 288547 - protein, 104 aa, Zea mays
  Clone ID: MRT4577_26246C.1.pep
PGAPYQGSLIFTALLAPSQVDWVITSHSSCRKLFLLPLYAQEQRCIMQANEAVPARVLSLFVFVACHLVPGSFFAWHSYTPGCPRWLNNNSGEGPGSLVVFAGV

SEQ ID NO: 288548 - protein, 127 aa, Zea mays
  Clone ID: MRT4577_26247C.1.pep
SDFKNHQLPLARIKKIMKADEDVRMISAEAPVLFAKACELFILELTIRSWLHAEENKRRTLQRNDVAAAIARTDVFDFLVDIVPRPPSDRSARLLALASWLSYMCMMSIVQCAMLCILYRNVVMELL

SEQ ID NO: 288549 - protein, 133 aa, Zea mays
  Clone ID: MRT4577_26248C.1.pep
GESPRGCPFFPPPRALGPRLKGCFRLFQMRFRLLLFSPNDPLSCGLLLMFGRFVNTPVLCFKACVGLPLWGLCAPMETLLSFCPLKSHNLGDFGPFLFQKKKKKKKKKKKKKKKVKKKKKKKKKKYSALLPLL

SEQ ID NO: 288550 - protein, 256 aa, Zea mays
  Clone ID: MRT4577_26249C.1.pep
MDNQPLPYSTGQPPAPGGAPVAGMPGAAGRHEKHLPLPLPPPPNPPRLTTLAAPESMDPNKSSTPPPPPVMGAPVAYPPPAYPPGVAAGAGAYPPQLYAPPAAAAAQQAAAAQQQQLQIFWAEQYREIEATTDFKNHNLPLARIKKIMKADEDVRMIAAEAPVVFARACEMFILELTHRGWAHAEENKRRTLQKSDIAAAIARTEVFDFLVDIVPRDDGKDADAAAAAAAAAAGIPRPAAGVPATDPLAYYYVPQQ

SEQ ID NO: 288551 - protein, 100 aa, Zea mays
  Clone ID: MRT4577_2624C.1.pep
FVCLLVSCFFFSVSGGPTPRGTLKKKQCKDCPNNHCSPATWKSPPPPGAKQVPSVHAQAGAEPSWSGSGIFYSTRTSSRKALTTGTLYLTCRRACPICFY

SEQ ID NO: 288552 - protein, 159 aa, Zea mays
  Clone ID: MRT4577_26250C.1.pep
IKGQDVALPKSKYEEDGIGIPGTSVWGSWWKDHQWGYKCCKQTIKNSYCTGLAGIEAAEASADLMKANMARKEAAEDEPVQHEEKRLATWGTDVPQDLVLNEKKLEESLKKETARRKEEKDERKRKYNVKWNDEVTAEDMEAYRMKRIHHDDPMKDFLN

SEQ ID NO: 288553 - protein, 98 aa, Zea mays
  unsure (1)..(98): unsure at all Xaa locations
  Clone ID: MRT4577_26251C.1.pep
MELCRFLIGNGRFSFLYYLLXYYLFLLLFFIVLLFFLXFFFLLWFLFLFLFYVFFFFILLFFLFFYFFXYFLFILFLFFYFFFFXFLLLFIFFFIFNF

SEQ ID NO: 288554 - protein, 104 aa, Zea mays
  unsure (1)..(104): unsure at all Xaa locations
  Clone ID: MRT4577_26252C.1.pep
ARGDQDRGVPERLAXATXXADANKXPLCFFSPIASLLPLGGGGGLXFXAXNPSLGSLGFNMHLCXRHTFIALVFSALFSPLFGPVVAAVPQGASAASSLASCGH

SEQ ID NO: 288555 - protein, 535 aa, Zea mays
  Clone ID: MRT4577_26253C.1.pep
MATASVTFKSREDHRKQLELEEARKAGLAPAEVDEDGNEINPHIPQYMSSAPWYLNAEKPSLKHQRKWKSDPNYTKSWYDRGAKLFQANKYRKGACENCGAMTHDKKSCMERPRNVGAKWTNVNIAPDEKVESFELDYDGKRDRWNGYDPSTYTRVIADYEAREEARKKYLKEQQLKKLEEKDTEKDDENAGSEDDEEDGLRIDEAKVDESAQMDFAKVEKRVRTTGGGSTGTVRNLRIREDTAKYLLNLDVNSAYYDPKTRSMREDPLPDADPNDKFYVGDNQNRLSGQALEFKQLNIHAWEAFEKGQDIHMQAAPSQAELLYKSFKIKKEMLKSEHKDKIMEKYGNAASEDAIPRELLLGQSEKEIEYDRTGRIIKGQDVSLPKSKYEEDVFINNHTSVWGSWWKDHQWGYKCCKQTIKNSYCTGLAGIEAAEASADLMKANMARKEAAEDEPVQHEEKRLATWGTDVPQDLVLNEKKLEESLKKETARRKEEKDERKRKYNVKFNDEVTAEDMEAYRMKRIHHDDPMKDFLN

SEQ ID NO: 288556 - protein, 68 aa, Zea mays
  Clone ID: MRT4577_26255C.1.pep
EHQSGSRSANELLPPSASFVKLSDMSRKEWSAFLEKFQELLPSALRTRKHSAGVGQRPMPRLGTSCQF

SEQ ID NO: 288557 - protein, 646 aa, Zea mays
  unsure (1)..(646): unsure at all Xaa locations
  Clone ID: MRT4577_26257C.1.pep
MSRDLDCPVQTQMAVAVLDRSFSSEYPGGSRTEGRQLSWKRVFVQTDNGSVLGIELERGENVQTVKKKLQIALNVPTDESSLTFGDLVLNDDLSSIRNDSPLLLKRNQIHRSNSTPCLSPTGQDVWQRDRSGPIEILGCSSPSSRMKQIAKDVIKAIMNGVDPVAINSGMGGAYYFKNIWGERVAIVKPTDEEPFAPNNPKGFVGKALGQPGLKRSVRVGETGFREVAAYLLDYDHFANVPPTMLVKITHTIFNVNDCVGCKSKVFCNKSESVSKIASLQEFIPHDFDASDHGTSSFPVSAVHRIGILDIRIFNTDRHAGNLLIKKVGPGADNFGEQTELIPIDHGLCLPECLEDPYFEWIHWPQSSVPFSVEELEYIAKLDPIKDAEMLRVELPMIREACLRVLVLSTVFLKEAAAFGLCLSEIGDMMSRQFTAKEEEPSQLELLCMETRKWVEEESYFFPTKPELXGDDDFTQFPLDSDAFEPPAFCKFGSVKTSSRNPLSKLDECDEEDGDLSEEEGEHGDVLTSGALPQKVPPISKLSSSMKGLGFIGKSKPYRTGGVPKGKVTGRTNYSGKASEHQSGSRSANELLPPSASFVKLSDMSRKEWSAFLEKFQELLPSALRTRKHSAGVGQRPMPRLGTSCQF

SEQ ID NO: 288558 - protein, 48 aa, Zea mays
  Clone ID: MRT4577_26258C.1.pep
GNSARWMNITGPFFEPLKSQHRRGPFGHQEGYIPRDPPPAYSYALADN

SEQ ID NO: 288559 - protein, 37 aa, Zea mays
  Clone ID: MRT4577_26259C.1.pep
ELKPSHWLIERMSRECLHGTYVPRNISCPWTQTSFPR

SEQ ID NO: 288560 - protein, 246 aa, Zea mays
  unsure (1)..(246): unsure at all Xaa locations
  Clone ID: MRT4577_2625C.1.pep
RKKKXYIPLPVTPADAATAAPNGARLYSISLPSPLKPAETTTVEVFYVLTHSLEPFPAEITQSESQLVYYRDSAVILSPYHVQEQGTYVKTPSSRVESFTRADPTSRSGPDVKYGAYSNQLPYAYSPIILHYENNHAFAVVEEFVRKVEISHWGXVQVTEHYKLKHGGAKHKGVFSRLEYQARQSISGASSFKNLLARLPPRVHSVYYRDEIGNISLIHLRSDSYXSELEIDPDIRFFGGWHCTFT

SEQ ID NO: 288561 - protein, 102 aa, Zea mays
  Clone ID: MRT4577_26260C.1.pep
MKGLGFIGNPKPYRTGGVPKGKVTGRTNYSGKASEHQSGSRSANELLPPSASFVKLSDMSRKEWSAFLEKFQELLPSALRTRKHSAGVGQRPMPRLGTSCQF

SEQ ID NO: 288562 - protein, 114 aa, Zea mays
  unsure (1)..(114): unsure at all Xaa locations
  Clone ID: MRT4577_26261C.1.pep
VFMFHQKGTITNVPPSVCMGVFLCNPQIGGPHPPHWGLGPSVAGFQTGGKIRASFPCFFLGWMPMIFLFQFVYHAPPYSCVPFDGQESPCSCGILCIRCYLXVERMPPSFCPPP

SEQ ID NO: 288563 - protein, 115 aa, Zea mays
  Clone ID: MRT4577_26262C.1.pep
RPDSRTHDELSPEGKRTNHTKARGIAPPWDAYGAPPARRICAGDAPGRRIYAAAGGGRRRCGRSLPASARIRPAGDFISANPTDRQNSNLCQPSSIYIYQSKWSCDIELHLMQRW

SEQ ID NO: 288564 - protein, 606 aa, Zea mays
  unsure (1)..(606): unsure at all Xaa locations
  Clone ID: MRT4577_26263C.1.pep
PLSMCFRNINYYVDVPVELKKQGVAEDRLQLLVDVTGAFRPGILTALVGVSGAGKTTLMDVLAGRKTGGLIEGSITISGYPKMGQXFSRISAYGXQHDVSATCSSPCESPTDSPCPRLPFSFDADTQRAFVEEVMELVELNPLSGALVGLPGVNGLSTEPSKRLTVAVELVANPSIVFMDEPTSGLDARSAAIVMRTVRNIVNTGRTIVCTIHQPSIDIFESFDELLFMKRGGQLIYAGPLGAKSRNLVDFFEAIPGVPKIRDGYNPAAWMLEVTSTQMEQILGVDFAEYYRQSKLFQQTREIVEALSRPSSESKELTFATKYAQPFCAQYMACLWKHNLSYWRNPQYTAVRFFYTVIISLMFGTICWKFGSRRGTQHDIFNAMGAMYAAVLFIGITNATSVQPVISIERFVSYRERAAGMYSALPFAFSLVTVEFPYILVQSLIYGSIFYSLGSFEWTAAKFLWYLFFMYFTLLYFTFYGMMTTAITPNHTIAPIIAAPFYTLWNLFCGFMIPRKRIPVWWRWYYWANPVSWTLYGLLTSQFGDLDQPLLMADGVTSTTVVAFLEEHFGFRHDFLGAVAAMVAGFCVLFAVVFALAIKYLNFQRR

SEQ ID NO: 288565 - protein, 156 aa, Zea mays
  unsure (1)..(156): unsure at all Xaa locations
  Clone ID: MRT4577_26264C.1.pep
LRSAPPPVRVRVREVLRGSVWGVGVSETRLRAVEYRCLVCGLGCANXDDHCLHNAXYSTYWEDLESNIILDRETHTSFGFCFITLYTEEAMPNAIEGMNGRELDGPYITVXKAQSRGGRGRGDRCYCGGRGGGGYGGGRRFDGRCGYCPGGGVYGG

SEQ ID NO: 288566 - protein, 81 aa, Zea mays
  Clone ID: MRT4577_26265C.1.pep
ALLLFYHSYSCCSCAPPMSGCWAPSYGFVKSCRLNGFLCRTRQSFPPLPISGGAPFRFFMCFSSILRFCLILWLPGDKEVL

SEQ ID NO: 288567 - protein, 153 aa, Zea mays
  Clone ID: MRT4577_26266C.1.pep
MADSNLPRRIIKETQRLLSEPAPGISASPSEENMRYFNVMILGPAQSPYEGGVFKLELFLPEEYPMAAPKVRFLTKIYHPNIDKLGRICLDILKDKWSPALQIRTVLLSIQALLSAPNPDDPLSENIAKHWKSNEAEAVETAKEWTRLYASGA

SEQ ID NO: 288568 - protein, 109 aa, Zea mays
  unsure (1)..(109): unsure at all Xaa locations
  Clone ID: MRT4577_26267C.1.pep
RSTTRPHTLMETPGIASNRQLILTRPGHKLLVGWYCDTINMNSNARQMLVNACXFLETTVFLCLVAYEMSSVIYXSWNFTEEVLPDYLIKRDMAVEDFLSPYKVLLLEE

SEQ ID NO: 288569 - protein, 48 aa, Zea mays
  Clone ID: MRT4577_26268C.1.pep
IFSSGAKKRQPELCLTSTHHARFILRSSKVCMVYTHLVKIHDGGRTPS

SEQ ID NO: 288570 - protein, 130 aa, Zea mays
  Clone ID: MRT4577_26269C.1.pep
RLGFLISIYLQGFRGGLSRRSKNACGQQGSYSNKLFYTLNMPIIFYSALITKLYFIFQLFYREDRGNFLGNLLGKRKEAEYSGHSISGGGLAYYVTAPSRLADVLANTFHALVYVGFMLAACALFLKTWI

SEQ ID NO: 288571 - protein, 86 aa, Zea mays
  Clone ID: MRT4577_2626C.1.pep
PPQALVPPSIIPLWPTDPVHAARQAGLVVSRGEGPWWWPPVTYRWQLQEPRFGKASKLVLFHQQIRSVCLYINRPRFGPLYSYCAF

SEQ ID NO: 288572 - protein, 115 aa, Zea mays
  unsure (1)..(115): unsure at all Xaa locations
  Clone ID: MRT4577_26270C.1.pep
VPIRWPRSRDEVWKANIPHPYLAAEKSDQRWMVVNGDKINFPGGGTHFHTGAXDXQRFSPAVVXMLNFPNGTLNNGGNIRNVLDVGCGVASFGAYLLSHDVLAMSLAPHDVHENQ

SEQ ID NO: 288573 - protein, 63 aa, Zea mays
  Clone ID: MRT4577_26271C.1.pep
RPGPRGGPCSPARSQLFFCAPTAFAQFWQNKTAWVGGNVYFPRGPYWILARGCLAPSLKKRGV

SEQ ID NO: 288574 - protein, 51 aa, Zea mays
  Clone ID: MRT4577_26272C.1.pep
TRLEPSLDPTKTAGRSMLGNCLAPALSQQLNSFRNKLLTELKEGFTPSNTA

SEQ ID NO: 288575 - protein, 60 aa, Zea mays
  Clone ID: MRT4577_26273C.1.pep
GLAPKLYQPAQISKRKFFMVQTPALPYINPRFYICADCPKREVNKGEGFFYKGWNVRTLK

SEQ ID NO: 288576 - protein, 50 aa, Zea mays
  Clone ID: MRT4577_26274C.1.pep
IGHYQSVVELSAEVVEHVEKYKATLRRFFKSRGKWCVVFERNYKSHHLQL

SEQ ID NO: 288577 - protein, 77 aa, Zea mays
  unsure (1)..(77): unsure at all Xaa locations
  Clone ID: MRT4577_26275C.1.pep
DPXSFRVILLEIMGKKKNGVLFQMELLDLNSILLIDLVXLSFVRPPLQFFLPLTKKKKKKEKKNKKKKKKKKKKKGG

SEQ ID NO: 288578 - protein, 88 aa, Zea mays
  Clone ID: MRT4577_26276C.1.pep
TCVCTDPLHAAWSVTRDTSWHAGWLGDALADAGPVTADGLHEGLHLAHHLPEQLLERRLRERLRAQGHAQHDAARALPSPQQPHQARH

SEQ ID NO: 288579 - protein, 73 aa, Zea mays
  unsure (1)..(73): unsure at all Xaa locations
  Clone ID: MRT4577_26277C.1.pep
KPFSVVAGWMMGQPMDLNFXLFETASLLITVLVVALLLQDGTSNCFKGLMLILCYLIVAASFYVYADPNIDGV

SEQ ID NO: 288580 - protein, 125 aa, Zea mays
  Clone ID: MRT4577_26278C.1.pep
RSTVVGASLVASHHRGFFLGHSVYSTRRTWCSWCIAKGPCSPLGFRSLSNARPCSRTHCWSVVSVPSTGPLLFVAWPSVHGFALDLPWCHVQASIYRRRRPPRRSPRLARLPSVAAVIGAIIVHV

SEQ ID NO: 288581 - protein, 91 aa, Zea mays
  unsure (1)..(91): unsure at all Xaa locations
  Clone ID: MRT4577_26279C.1.pep
LLWLLSVVCVGSWPLLWLLLPRGAXWLCSGSFGVACXACLCLVVFCSLSXLSGWLFCVLLVAPPALGLVLWCSLSCCASRSCFRGGLSVFV

SEQ ID NO: 288582 - protein, 86 aa, Zea mays
  unsure (1)..(86): unsure at all Xaa locations
  Clone ID: MRT4577_2627C.1.pep
XAKEPPRPGLPPAWDPAPIPQEPPAGGLDSPLRAAAPEVPTKQAKLYGPAMLRGHMVAVAALAYCPRSIRSHNVLFVTVDPPAGTY

SEQ ID NO: 288583 - protein, 82 aa, Zea mays
  Clone ID: MRT4577_26280C.1.pep
GQFLLGKLPFGVRIFPLSALLGVPYFLLGGFIYRWFVFFYPFFFKQIYQELPKFFYFFFLPVLQFRPFIKFILTFSKQKVFF

SEQ ID NO: 288584 - protein, 227 aa, Zea mays
  unsure (1)..(227): unsure at all Xaa locations
  Clone ID: MRT4577_26281C.1.pep
RSILSTDISSIEKVTYCLKYXITMIDNAAYPRPAHQAIPAAEVLTGTTEQRLSSIRVHKADDNRRGLPDLLFCXHGDLKQIPGEIHFDQSLXHKTNQVNPFEDVSRRQKPPSTQAEKQPLTGAAADHETTTSGHDDIAMRXSKYYXTPARCAIRRRVLKIGPNESSQLAIDLNAQGLSRYAIICQENGLMPIVEPEILADGPHDIDRCAYVTETVLAACYKALNEHH

SEQ ID NO: 288585 - protein, 89 aa, Zea mays
  Clone ID: MRT4577_26282C.1.pep
DSMQKLLPLYRVITTMRASGMVGQLASALMIRWIVVRSQTASPPLQAMQRIWKPLSGKCCLMGLDQHLTPRLSTTSKTGTCHPPEHPPR

SEQ ID NO: 288586 - protein, 149 aa, Zea mays
  Clone ID: MRT4577_26283C.1.pep
PSPVPFGASSPYFPLPRARPHLYCRAALAHAPIRWTPARHSTSCPSVLWRSPAVRAESLVRCSPTNSVMVSPLSLPHLIPPLSPPGHGCPPLRSIRGQAWPLRVLPSRGSSLRSGQPVWRPASAASSAQAPCSPRRGHVRRPGAVSRLA

SEQ ID NO: 288587 - protein, 102 aa, Zea mays
  Clone ID: MRT4577_26284C.1.pep
DRGLLTNQLKDELTSLRESFEAMKDALNKQSSINNDIQMISTSLQDQLGDLCSKIISFNKEANISGLEEASLLHELESKNYAAVMKRLESFHQQTCDKVLHL

SEQ ID NO: 288588 - protein, 160 aa, Zea mays
  Clone ID: MRT4577_26285C.1.pep
NTREMIRSRRPCPLVDYSSSFLHMALYIQHFSFITTPPHTQLPRSTVASAGGGGDGSSSGLQKSLGPEGGMILRGSRSPTTPCDVVDGGSTPSKQGRAFATVARSVAATSTNTATVAVALAAAVFLLLVMASVPSFVFVQESVPWGRRGFGLLRACNIYM

SEQ ID NO: 288589 - protein, 37 aa, Zea mays
  Clone ID: MRT4577_26286C.1.pep
FKFRLEFSNWPTTLAYKMACCYSIQFPCKFMINNFSL

SEQ ID NO: 288590 - protein, 31 aa, Zea mays
  Clone ID: MRT4577_26287C.1.pep
KELLTWKVSVNGCLNVLEVIVSWLKIVSGVS

SEQ ID NO: 288591 - protein, 213 aa, Zea mays
  Clone ID: MRT4577_26288C.1.pep
PEKISRARFVVAISSYGKSQLYRWCSLADWPKIQVVHCALAADYLQQEITPVPEVPQLVCVGRLCEQKGQLLLVQAVRQLRDNGIAVKLVLVGDGELRSPIEELIEQYQLEENITITGWASSAMVQQHLLASRAMVLPSFAEGLPVVIMEAFALGRPVISTYVAGIPELVKPGVSGWLVPPGSIPDLVEAMQSVLTMSCEQLTAMAAMGQQAV

SEQ ID NO: 288592 - protein, 103 aa, Zea mays
  Clone ID: MRT4577_26289C.1.pep
PRSHLPTPPPRLGIPPPLHLGVLSHPQAASDIYCYGWPMPCCWRIRNMLYFQTAAVTTRFISSSSGSLTSRPPWTMTNCCTRSTGSFSLWGSYADFSGEPTPS

SEQ ID NO: 288593 - protein, 159 aa, Zea mays
  Clone ID: MRT4577_2628C.1.pep
GAIPESIGELSELRVLRLDNNQFTGVIPASFRRLERVSELRVDGNRLVGPIPFGKEMMWRLGKKLRVGSNEGLCYDTKQQGLEGVVALAGVADCDSVRSRTTQHLVWSNSTVVSRGGGVYTVTSSAASASRNSGGGTRVETWLVFVCLHLAWFVACNCK

SEQ ID NO: 288594 - protein, 163 aa, Zea mays
  unsure (1)..(163): unsure at all Xaa locations
  Clone ID: MRT4577_26290C.1.pep
SGTDFSNVLSVFLVRLCGCSLSTPGMAVGVNLSAASAPAAAAPADEADDDDDLDLSVDETDEDKKAADERAAAARPLLKKKERGKSSVXLMDVKAWDDDTDMKKLKEAEHSAHMEGLTWGASXLTPVGYCIKKMTIMXTLVDYLVNIDTLIEDHLTQDPINEY

SEQ ID NO: 288595 - protein, 89 aa, Zea mays
  Clone ID: MRT4577_26291C.1.pep
THKCAKRNKVTNAQTKSPAVDKATAHLPTFPATDKATPARYKSPAVDKTTLDGTKSATGDRATAESAQCAAVDKASAARPKSPAIDQAT

SEQ ID NO: 288596 - protein, 31 aa, Zea mays
  Clone ID: MRT4577_26292C.1.pep
VRFKTCLDGWQSIISLLWSPVSDHPFNYQYA

SEQ ID NO: 288597 - protein, 101 aa, Zea mays
  unsure (1)..(101): unsure at all Xaa locations
  Clone ID: MRT4577_26293C.1.pep
GTTHPAHKPNICTTMPATRAHPTWQRPSRCPISQLFNHALEARRRLPFVQSVKIQIPPERHSSLFDRTKHLILKPRGGSDLDEKRISSGKRNAATFFTKXP

SEQ ID NO: 288598 - protein, 90 aa, Zea mays
  Clone ID: MRT4577_26294C.1.pep
KPVDAYHLSSPSRSRFPRNVIALKVGRYQFDGSETSRHKNKAALSRFELMRQLINQTLFDRTKHLILKPRGGSDLDEKRISSGKRNAATF

SEQ ID NO: 288599 - protein, 293 aa, Zea mays
  unsure (1)..(293): unsure at all Xaa locations
  Clone ID: MRT4577_26295C.1.pep
MALLPLPPCSPCHRRAAPLPAPTVASARHRRGSLRLAAAGACSGPTAARKPRPTAADRRRCECFDLHRRLVPYAEAYCWQKSIVERRKRLIDSGEDHSDTLIGLQHPPRYTLGTDSKEEYLHFDKEHAPFQGHRINRGGEVTYHGPGQLGMYPIMNLRDHKEELHWYFRALQEXIIRALKSAFSITAARVEGLTGGWVGDRKVAAIGIHGSPMIVYHGLALNITTDLAPFRMIDPCGIKDRGVGSIKEILQRVSDAEEIDDASLMDIVYDSMIKEFAELFQLSLDFSPGCSFQ

SEQ ID NO: 288600 - protein, 69 aa, Zea mays
  Clone ID: MRT4577_26296C.1.pep
GKKARAFPFAGAPFFFLPRLLNCPPPKKSVHFFLTFEGVGPGTHGTPSNHFLGKLGILNTTPPFYLFFL

SEQ ID NO: 288601 - protein, 46 aa, Zea mays
  Clone ID: MRT4577_26297C.1.pep
SSQKGRRASAGTKASMVAKSSLSNLNPTGTERSTVCIFQLGYCSLP

SEQ ID NO: 288602 - protein, 79 aa, Zea mays
  unsure (1)..(79): unsure at all Xaa locations
  Clone ID: MRT4577_26298C.1.pep
YESEPFNIGYSLEIVRKDCGXYKATTLIYGHHPTGTEVRYRWNSSDSCLNESAIRNGLYDCLQAYSDEHSKSAKKDLFI

SEQ ID NO: 288603 - protein, 61 aa, Zea mays
  Clone ID: MRT4577_26299C.1.pep
LEGNRKCFTPSKFNLSKKSFIFYISTKTMTINDLKNLSIQALISSIYKTKSCHREGDYPDH

SEQ ID NO: 288604 - protein, 91 aa, Zea mays
  unsure (1)..(91): unsure at all Xaa locations
  Clone ID: MRT4577_2629C.1.pep
AWRVGIEVGGNIERGSVEGGVFRLMTHEDGAQMRTRAGELKKAAAECTAEGGSSXXAXXXPPSFGGGGPPPLPFLPPPPPPPPPPPPPPPP

SEQ ID NO: 288605 - protein, 111 aa, Zea mays
  unsure (1)..(111): unsure at all Xaa locations
  Clone ID: MRT4577_262C.1.pep
FASGLGPVAWVXCSEIPPVRLRAQTSTIGKXLNPDHSFGHPPTMVTSYSLSYSMTIFGSFYLYARIAAAGWVFMSFFLPERMVQEPEGHRGAVRQGRGLAVCHRHPSSRPP

SEQ ID NO: 288606 - protein, 75 aa, Zea mays
  Clone ID: MRT4577_26300C.1.pep
QQGFIRPGRHDDPHKKNMPDDRGHACPDDDHKNILIRPNTHPLNRAGDQMRKKKRPVRTGPCLHPGGKAHTNTYR

SEQ ID NO: 288607 - protein, 83 aa, Zea mays
  Clone ID: MRT4577_26301C.1.pep
MMLEEIWMMLEMCFGVVHLSRIKSLVYGAKVEAAIAIGFNDFITYALRGIGFYQKDNMEIKKANGNGTLIPEQIFEKTRRSSR

SEQ ID NO: 288608 - protein, 123 aa, Zea mays
  unsure (1)..(123): unsure at all Xaa locations
  Clone ID: MRT4577_26302C.1.pep
FFFFFFFFFFFFFFFFFFFFFCLFFKNGSPNXRTTSTPGHTEVWGRSYRRAMAKEESKVHRLMKMQVDNSAQFPSAADHDAPLGFAWATIGPEEPELNRHGTAPDYNHPCGDLANNTPLIPGV

SEQ ID NO: 288609 - protein, 65 aa, Zea mays
  unsure (1)..(65): unsure at all Xaa locations
  Clone ID: MRT4577_26303C.1.pep
HLPSPIIIYISFHYITTPKKHYSTTPTPTNNNSFPRDNFSITSSNXPSIYILHQQLLIYNDSSLL

SEQ ID NO: 288610 - protein, 95 aa, Zea mays
  Clone ID: MRT4577_26304C.1.pep
RTTRSNGDMEQRRVPPHRAFASLPSAENSRDHVCIVRLYCERRCVPRNFASVESESRVRGVGPTEDARHATDGPKPAERGEGFEMLQVLRNLISH

SEQ ID NO: 288611 - protein, 44 aa, Zea mays
  Clone ID: MRT4577_26305C.1.pep
VEQNISYKSTGGFVSSKFPNTSHFTHSSLDVKAYSTSYLAKHGC

SEQ ID NO: 288612 - protein, 108 aa, Zea mays
  Clone ID: MRT4577_26306C.1.pep
LVMSGLGIFLCASICPQGGSPLFFAPSSICPVYFHMSCLNTKLITSQLIICSPSKQGANKWANFYPNPQPVTGQLAEEPHLVWAKSVYQPLKHQKCPDSIIISSGTHP

SEQ ID NO: 288613 - protein, 153 aa, Zea mays
  Clone ID: MRT4577_26307C.1.pep
KFFHFPTAAVEVPPLSANTRREGFSIQMGKAGIQAENGGGKFNCLKKGIQAKGKMPGKKTMGGGDDVFNTFFRETGVGNHAPRVVFVDLKPTVIKEGRMGTNRQFFHPEKFIRGKEDAAKNFARGHNTIGKEIVDLGLDRIRKLANNCTGLQG

SEQ ID NO: 288614 - protein, 93 aa, Zea mays
  Clone ID: MRT4577_26308C.1.pep
GEAPQGGKTVFCLRRLLCFGRSFWSGLVWCACALSCFFMVPTCDSCFAPCFSFVLYCPCPIKWYVFGVVLCLFFPLEDYFWFCCLCNAFEPLI

SEQ ID NO: 288615 - protein, 51 aa, Zea mays
  Clone ID: MRT4577_26309C.1.pep
WPLSLLKYFTQHKAITKTAPPCNMTRHSRIRWAYRCRSRIIGDIISARHRY

SEQ ID NO: 288616 - protein, 146 aa, Zea mays
  Clone ID: MRT4577_2630C.1.pep
IRSNKSSSSSSSSIIMASIKGHGVPMSTATMRVLATLYEKDLQFELIPVDMRAGAHKQEAHLALNPFGQIPALEDGDLTLFESRAITQYLAEEYSEKGEKLISQDCKKVKATTNVWLQVEGQQFDPNASKLAFERVFKGMFGMTTD

SEQ ID NO: 288617 - protein, 81 aa, Zea mays
  unsure (1)..(81): unsure at all Xaa locations
  Clone ID: MRT4577_26310C.1.pep
IASGSLFFFFXSTSIVLCGAYLIPAARRLSRSQGPVLEQSVKPKKKGPNETKNARTLLSPCPSLAWRGVRTLLCPFMQCNN

SEQ ID NO: 288618 - protein, 58 aa, Zea mays
  Clone ID: MRT4577_26311C.1.pep
PTRSLSPFSLPLSRARGDYSNGGLPPPPPTPVSHLFFLPLSVNKLSTHFIIPSKPKRF

SEQ ID NO: 288619 - protein, 536 aa, Zea mays
  Clone ID: MRT4577_26312C.1.pep
MAEKIAAFLACQPFFLLGFASVISLPVRVELSCPRPARCPRVSSPVDDHQLECRCLYKCVLFRARGHMSSALSGAHLGFRGREEGISVRRSIQGMANYTAYCIALKAKDHHDLRDMHSLSACAKYLWSTSRATVIRNEVLVVLSAISLLFMTTFGPLRRRSRNSFVQNGFMVAYTLSSSLISYTLGSMYSSAVKSSMYPIWASSLYLLFCSADSITSYCLNGNNQQKEQLILFLLFQIYVSQITNGSDSNGSLVFSVAAFKFVERFWAYQLATGSWNLNKMVADYMYEEQSRSGSSYDPTSMKGYHYLVDWPLDESKLEARMSYAKELTVDDAQIIDIERIFMCSELSSELKDVCLSFSLFLLLRRRFFGFVCVEASQRKTHDFVFKGVLSKNQDGTLNYDRIFRLIEVELAFMYDFFFTKYAVLYYGSKKVSAIWSLASASFMSVTIYKLIESVLSNQNRIEFVGTTTSDVTTTSDVVVTILIVACIVLLEFIQVLLFFSTIWCRVSFCLPLCSRTSNEHKERLLHETVSKFCCM

SEQ ID NO: 288620 - protein, 186 aa, Zea mays
  Clone ID: MRT4577_26313C.1.pep
GNPRENFKGPLVKRGSPPPPPPKENPGAPQKKTFFFPPFFFLKKKKGGKIGKPPFFFFFGENRGQGFKKKKENCWGDPLGGHPGVFPLLRGFGKKKGLRKTAPLLKFFKTGAFFFGPHPFFFFGKPPPKTFKPPLAFGAQRPFFWAPLAKHTLGGGGGGKVSQRRNPQNRLKRGGGGPQKKFLRFF

SEQ ID NO: 288621 - protein, 159 aa, Zea mays
  unsure (1)..(159): unsure at all Xaa locations
  Clone ID: MRT4577_26314C.1.pep
ASGRSSAATVGSEHSGQQARVHVTRAAPRPARSCARALVHHVIEPAXDAXGLRSPQRAGGGIPCHHVPHAWSCPVAWAWAWLPVTVADVLRRGRAHGATRGASLQPAARACDPVKHSCAARGKAEKKQEASLLLPLCTRPYVSDTACAHAHQLTVTLLA

SEQ ID NO: 288622 - protein, 76 aa, Zea mays
  Clone ID: MRT4577_26315C.1.pep
RFLNDQPVRQPAEMRTSPAPTKTAPLRPPPSQLRSPSLCHQPPTRPTAVQDNLISKEHRNRVARVEQRKAGEVYDE

SEQ ID NO: 288623 - protein, 102 aa, Zea mays
  Clone ID: MRT4577_26316C.1.pep
LHPGVREVFPGPPPPKGGFSGWKNWSKNGNFFPGGVFSPPSPPTGVLPPPALFPQSGVSRTLNPPLKKALGLPPKRQVGPFIPFFAPKMLAVMFPPRPPLLG

SEQ ID NO: 288624 - protein, 635 aa, Zea mays
  Clone ID: MRT4577_26317C.1.pep
MALEAGSSGGGGGGWGGGFRSLMRRKQVDSDRVRAEGQPQLAKELNVPELVAIGVGSTVGAGVYVLVGTVAREHAGPALTISFLIAGIAAALSAFCYAELASRCPSAGSAYHYSYICVGEGVAWLIGWALVLEYTIGGSAVARGISPNLALFFGGQDSVPWILARHQLPWFDIIVDPCAAALVFVVTVLLCVGIKESSFAQGVVTVLNACVMIFVIVAGSYIGFQIGWVGYKVSDGYFPHGVNGMLAGSATVFFAYIGFDTVASTAEEVKNPQRDLPLGIGVALAICCALYMAVSVVIVGLVPYFAMDPDTPISSAFARHGMQWAMYVVTSGAVLALCSTLMGSLLPQPRILMAMARDGLLPSFFSDVNKQTQVPVKSTIVTGICAAALAFAMDVSQLAGMVSVGTLLAFTVVAVSILILRYVPPDEVPLPPSMQESFRLNQECDEERDRGLLGVGNCNLSQTKDVIVVVESVKDPLIDKRLHKGKMDETKRRKIASLSIGSVCVGVLILASSASATWLPFLPICIGCTIGVVLLLAGLSLLSWIDQDAGRHSFGHSGGFTCPFVPVLPVLCILINTYLLINLSGDTWMRVGIWLLLGVLVYAFYGRTHSSLIDVVYVPAAQADEIYRSSSGYVS

SEQ ID NO: 288625 - protein, 99 aa, Zea mays
  Clone ID: MRT4577_26318C.1.pep
MALEAGSSGGGGRGWGGGFRSLMRRKQVDSDRVRAEGQPQLAKELNVPELVAIGVGSTVGAGVYVLVGTVAREHAGPALTISFLIAGIAAALSAFCYAE

SEQ ID NO: 288626 - protein, 43 aa, Zea mays
  unsure (1)..(43): unsure at all Xaa locations
  Clone ID: MRT4577_26319C.1.pep
RDLKLVRMLKLGLSIDEAKSAEAETXMPPLEDAPGENKMEEVD

SEQ ID NO: 288627 - protein, 130 aa, Zea mays
  Clone ID: MRT4577_2631C.1.pep
MATGEQAEDAIVADVVGNGKGEEVRAMGDDAEQQRDGGKVSMKSLLWHGGSVWDAWFSCASNQVAQVLLTLPYSFSQLGMLSGVLLQVWYGLMGSWTAYLISVLYVEYRTRKEKEGVSFRNTSSKWFESS

SEQ ID NO: 288628 - protein, 293 aa, Zea mays
  Clone ID: MRT4577_26320C.1.pep
ELLFSQPRILMAMARDGLLPSFFSDVNKQTQVPVKSTIVTGICAAALAFTMDVSQLAGMVSVGTLLAFTVVAVSILILRYVPPDEVPLPPSLQESFRLNQECDEERDRALLGVGNCTLSQTKDVIVVVESVKDPLIDIPLHKGKMDETKRRKIASLSIGSVCIGVLILTSSASATWLPFLPICIGCIIGVVLLLAGLSLLSWIDQDAGRHSFGHSGGFTCPFVPVLPVLCVLINTYLLINLGGDTWMRVGIWLLMGVLVYIFYGRTHSSLTDVVYVPVAQADEMYRSSSGYVS

SEQ ID NO: 288629 - protein, 88 aa, Zea mays
  Clone ID: MRT4577_26321C.1.pep
GGADNDPAKQGRRGGRERDQAHAGGPPQEQRGRGHRRPQPQGGAHPRQRGGTRPWPTTRPAGGGNSYRNNQSGSTRGHSRRWRLTHRT

SEQ ID NO: 288630 - protein, 150 aa, Zea mays
  unsure (1)..(150): unsure at all Xaa locations
  Clone ID: MRT4577_26322C.1.pep
MDETKRRKIASLSIGSVCVGVLILASSASATWLPFLXRYVLXCTIGVVLLLAGLSLLSWIDQDAGRHSFGHSGGFTCPFVPVLPVLCILINTYLLINLSGDTWMRVGIWLLLGVLVYAFYGRTHSSLIDVVYVPAAQADEIYRSSSGYVS

SEQ ID NO: 288631 - protein, 65 aa, Zea mays
  Clone ID: MRT4577_26323C.1.pep
MKKEEAASPEAATEVLLLLSSSLEAGPRQPQPQLQPVWADKHTAPTTPRLQKAHVALQALKRAVT

SEQ ID NO: 288632 - protein, 82 aa, Zea mays
  unsure (1)..(82): unsure at all Xaa locations
  Clone ID: MRT4577_26324C.1.pep
PXXGRPGCDATSSRSTTSRRTSCGGYRISFRFLLCGQSVLRASDGGRTRYYRAWLWLVLWDVLDSADTPRCTKEGARRKMIA

SEQ ID NO: 288633 - protein, 358 aa, Zea mays
  unsure (1)..(358): unsure at all Xaa locations
  Clone ID: MRT4577_26325C.1.pep
MDTVEKIVEDFASDIAVSPFSSGTSLREMIRAIRACKTAAEERAVVRRECAAIRTAISENEPELRHRNMAKLMFIHMLGYPTHFAQMECLKLIAAAGFPEKRVGYLGLMLLLDERQEVLMLVTNSLKXLIWGQXDLNHTNQFIVGLALCALGNICSAEMARDLSPEVERLMRSREVNTKKKAALCSIRIVRKVPDLAENFRGLAASLLKEKHHGVLISAIQLCTELCKASKDSLEYLRKNCIEGLARILRDVSNRSYAPEYDVSGIVDPFLHIRVLKLLRILGQGDADCSEYMNDILAQVATKTESNKNAGNAILYECVQTIMGIEATSGLRVLAINILGRFLSNRDNXIRYVALNML

SEQ ID NO: 288634 - protein, 60 aa, Zea mays
  Clone ID: MRT4577_26326C.1.pep
ALKSAAALSFWGFLLTKGVFNHHTHQWKTQYPQTKPIQITTFFQFKPRLDLPPKHIGSQH

SEQ ID NO: 288635 - protein, 258 aa, Zea mays
  Clone ID: MRT4577_26327C.1.pep
MAFSRLIPSRSRLLSTLLHTPGPIPTPRAAAAATTTPLGPFLRNFASAARRAGPSSRPRTADIGARARQLQTRRLWSYGLAFACTAGFVVTVLATFQDQLVFYVTPTDALSKFTADPSKSRVRLGGLVLEGSVAHPSSSSPEIEFVVTDLITDVLVRYEGALPDLFREGHSVVVEGLLKPYTDDLRRDDGRKVTEKARECACFLRGTEVLAKHDEKYMPKEVGEALERNKKRLEAEAEAAAAQGSNVAAAAEGAKASS

SEQ ID NO: 288636 - protein, 125 aa, Zea mays
  Clone ID: MRT4577_26328C.1.pep
EKRVLITLLRFHTPTFIYPALRPSAGTKKASWCGRPTVEREACTGWAPSRLYELLDGRRQRIRCDACTHSSRVPARARACRAIGSQHDHGSCGSANAREVRAGGCPQARPFRLSVGKLFHYSCLR

SEQ ID NO: 288637 - protein, 819 aa, Zea mays
  Clone ID: MRT4577_26329C.1.pep
MMMASQSNQAVAPSATKLELPITGGSSYEPANKKQKKEAQRRVQHVGVQGPFVKSKWSHIPITFSQEDLQLKDYPHNDAMVISYLIKGVSGRHIVALGKITMPITFGYVHNTKTEQVVFDIVDMEYPYNAMIGRGTLNAFEAILHPTYLCMKKPSNQGPIAVHGSQEAARRAKGNWTDSKAIHNIDEAEAHQQYKHKRDKAVSADQPKPMLLCEDIAEQKVLLGSQLSDEQEKTLLRFLFNNKDVFSWSANDLCGFNRDVIEHSLNVDPTIRPRKQRLRKMSDDKVEGYHQIWMKKENEPKTSFITPSGTYCYLWMPEGLNNAGVSFSRMTAKVLHSQIDKNVLTYVDDIIVKSTKQENHIADFQETFANFRKAGHKLNPEKCVFGVKKGKFLGCLLSTKGIEANPSKIEAILRMKPPKSREEAPFLLYVAASHVAVSSALVQEKQDGQAKKQVPMYFVSEVLSPSKKNYTGLEKKLKATGIRSEILKSESQVILGHVDKSSKARDPKLEKYLDTVQRMEASFEGFSVKNIPRGENEHVDLLAKSAAHGLPLPSEVFFETIKAPSAELIERAVLRILPVHNEDWRTKIVSFLQGNCLSNDEAYNKRMEARTRTYVTIEGELYAQGVCSPLLKCLSRTEGQELMKEIYVGLCGAHIGARPLLGKAASDAVDLVQKCENCEKCARDQKQPSSLTQLIQPAWPLQRWGLDLLGPLPPAKANLKYVVVAVEYFSKWIKAKPLATITSAIVQKFFLQNIVCRFGVPKIITVDNGTQFDAETFKAFYDQIGTKIHFASVRHPESNGLVERANGIIKTGIMKSIFN

SEQ ID NO: 288638 - protein, 130 aa, Zea mays
  Clone ID: MRT4577_2632C.1.pep
QEGCWLFTLGAPPGFWPRPRPSPRGNRGLGFYTGPGDPPFPFFEKKPNCFPPKAENNGIKMGGPGIKKRGRFFGGRGVVAQVLLPFPPLKLGARFAPPFWGSVAPQKNPAKSPRLDNKGKFGGLGFRAPF

SEQ ID NO: 288639 - protein, 97 aa, Zea mays
  Clone ID: MRT4577_26330C.1.pep
LFSLRGPRGAPPFGVFWFVPPLVLVVPPFRVVVFLPGLFVFRPPRFPPQMPFVPLNFFRGFPGRAPPLLLARPGHGLLPGRGVSPSVAAPQRVVPPF

SEQ ID NO: 288640 - protein, 168 aa, Zea mays
  Clone ID: MRT4577_26331C.1.pep
TGEKIQDGVDHSTHIVSRNRPSLAETEDNCALRETDSEENSPLGEADRCKLSSDSKRRQEIVASDGFIAVKRKRKQPEEHITNKNLRHLTGGEKQKRNLKENVSIPDQKVLVQEQTRRPLADRTKFSEVNGAPAPEPSSKWKCPRKGKPYVGRPMKQLRLGQWVRRMN

SEQ ID NO: 288641 - protein, 190 aa, Zea mays
  unsure (1)..(190): unsure at all Xaa locations
  Clone ID: MRT4577_26332C.1.pep
SSVVQSEAPHAPASGRVFYGGVEGVLFHEPTTQTASSGVVEPAAGLGYSQAAQTPPRCYKIDFPTYDGSVDPLNWLNQCEQFFRGQRTLVTDRTWLASYHLKGAAQTWYYALEQDEGMPTWGRFKEVCTLRFGPPVRGTRLSELARLPFTSTVQDYADRFNAMLGHTRKLDAQQKAELFVXGLPDHIRTD

SEQ ID NO: 288642 - protein, 255 aa, Zea mays
  Clone ID: MRT4577_26333C.1.pep
MAVRVWLSAILLAFLLAASPFAQVARAQSEEDAAMQEVVDGADLGYVGDDTPVSSEEPLSPAPGVETVCVFPKNAGKIVPAGEETELLVGLQNEGESTLNVVAVHSTLHLPYDHKMYGQNLTVQSFYNASVPVSVQATFPYTFAVSKFLQPGAYDLVGYIVYEIDQHPYQNVFYNGTIEVVEVGGLLSVESVFLITLGIALLGLLGLWAYGQVQQLSKKTKKGPKVELGTGTTDANMDEWLEGTAFAKDKAKKNK

SEQ ID NO: 288643 - protein, 100 aa, Zea mays
  Clone ID: MRT4577_26334C.1.pep
QLTDLVTEMQNQIRREREEIRQVRWEIRQEIRQSRLERQRQQQQPPPPPPALPSYINTYINYYDRRDQKVNLARSVANKSCGGLRRSIGPKVLPINHASC

SEQ ID NO: 288644 - protein, 54 aa, Zea mays
  Clone ID: MRT4577_26335C.1.pep
CIIMQIIAVVPIELSKFNLESEVCLTFKGGFSVIHSIPFIYRSSTFCTVWLTSL

SEQ ID NO: 288645 - protein, 56 aa, Zea mays
  Clone ID: MRT4577_26336C.1.pep
RTCDARPPNHNNKILAGKDYPRQYPTRVYGIQLSDMSLHNMKHTDVLIIPVIVAHR

SEQ ID NO: 288646 - protein, 93 aa, Zea mays
  Clone ID: MRT4577_26337C.1.pep
NHIRFGIQINLIQFVHWRHAIYTKRKVNAIHPYRVTDYLEKEGYFSYTNLNFIFFISLRTQLHTYKQTCPCIHYAQCHTIRHVDRCRICLCGS

SEQ ID NO: 288647 - protein, 375 aa, Zea mays
  Clone ID: MRT4577_26338C.1.pep
ILENKYKKEWQADEESCHRSPLTVTKFYMEEQLAKAYTINMFRKFQDELKATMYCDGMPIKVDGRLVTFEVKECSYMEDGKDTESRTYEVYFCKEEPKVEIECECGFVQFTGILCRHALSVLKLQEIFEIPKDYVLDRWRRDYKKLYYNAKKPNEMPLSDIVERSDYLFTQCSQLLNLGFVSESRYLVALKLLREMERSLLDDGLPARDRQPMLLSFEADAPENGQGLFSPQFSEGVKNSQSAHAKRRGRPLKKVTESTDDTVTQPNKEQDFLRSSFVTENTNMIQGPSSASHLEGPHMGVQGGIDLMDGIPNLSFGNHFGMDINHQHQVPNHQRMQQNNFIQVQAEPHGFGNQWVYHPMLQDNPVLRTPARRAG

SEQ ID NO: 288648 - protein, 97 aa, Zea mays
  Clone ID: MRT4577_26339C.1.pep
MQLPFKGNKLPPLQDPLWVFSQGKGPIWKGGKTPPNGFQIRGRSPGNKEFRPGDPPKPQIGFSLFQPHPQKGLGSILPREPLGGLYFLGGGGNFGKV

SEQ ID NO: 288649 - protein, 98 aa, Zea mays
  unsure (1)..(98): unsure at all Xaa locations
  Clone ID: MRT4577_2633C.1.pep
KLGLIFVERRIPPLARFKKGKKKXPPPRKLEXPPASPLGAKGGDPPPPCFKKEFGESFLFLDAVKRTRAPPFFYVSLEKPENPFGVLNCRLKVTGKCF

SEQ ID NO: 288650 - protein, 77 aa, Zea mays
  Clone ID: MRT4577_26340C.1.pep
QHRSGHAAREAHSFRVRSSLGSSSCPTPTPGLSSTYPPVNSRWPAATTTTTGGAWPLRASSSHSVTGAGASCTKAPW

SEQ ID NO: 288651 - protein, 162 aa, Zea mays
  Clone ID: MRT4577_26341C.1.pep
PAGPTFHALDSSARKTTGAPPPLVRDCRRRRPYFLHRSVPMWRLETSTGSRRILADLAYARMGASVLAEVYWSLEFVGKPLWVGVNVAAVSVTDCNLADGEYVLIPEQGPIQEEDQEQATEAAIEDLPAAPAIEGCPRCNHCSGEDEAMEGDFQESQEYDEF

SEQ ID NO: 288652 - protein, 49 aa, Zea mays
  Clone ID: MRT4577_26342C.1.pep
ISKMEHKYSTSVNKLTGLNLHTNFSIRVTLFLFLFFFFPGPGRPRKRPP

SEQ ID NO: 288653 - protein, 64 aa, Zea mays
  Clone ID: MRT4577_26343C.1.pep
CLRKVICLGSKSADLFKLKIKLEIVNRTNGSHYIYFSLKILQFMDVKHVEIFGDSLLIMQQVAI

SEQ ID NO: 288654 - protein, 371 aa, Zea mays
  unsure (1)..(371): unsure at all Xaa locations
  Clone ID: MRT4577_26344C.1.pep
MAGGKEAHGWAARDVSGHLSPYHFSRRVQRDDDVTIKVLFCGLCHTDLHVIKNEFGNAKYPVVPGHEIVGVVTDVGSGVTSFKPGDTVGVGYFVDSCRSCDSCSKGYESYCPQLVETSNGVSLDDDDGGATTKGGFSDALVVHQRYVVRVPASLPPAGAAPLLCAGVTVFSPMVQYGLNAPGKHLGVVGLGGLGHLAVRFGKAFGMKVTVISTSLGKRDEALGRLGADAFLVSRDPEQMRAAAGTLDGVIDTVSADHPVVPLLDLLKPMGQMVVVGLPTKPLQVPAFSLVAGGKRVAGSAGGGVGECQAMLDFAGEHGITADVEVVGMDYXQYRHPAPREERCQVPLRCRRRGQQDWRLGITIPSVLSIDV

SEQ ID NO: 288655 - protein, 44 aa, Zea mays
  Clone ID: MRT4577_26345C.1.pep
LALFSSKTLLFCRIIVCCMLFFTPQEKNSFSLNMLFFFRVGFLF

SEQ ID NO: 288656 - protein, 446 aa, Zea mays
  unsure (1)..(446): unsure at all Xaa locations
  Clone ID: MRT4577_26346C.1.pep
GGGGAPWTGLLTRGWPTTPLFRFWTCSNQWAKWFLLACPPNRSRGLPLTFFPAGKAWPGIPAAGDDDVTIKVLFCGLCHTDLHVIKNEFGNAKYPVVPGXYTCSPTPKPFHFASEDRDLLRRPQQSNKLTTLGSLILSGXHEIVGVVTDVGSGVTSFKPGDTVGVGYFVDSCRSCDSCSKGYESYCPQLVETSNGVSLDDDDGGATTKGGFSDALVVHQRYVVRVPASLPPAGAAPLLCAGVTVFSPMVQYGLNAPGKHLGVVGLGGLGHLAVRFGKAFGMKVTVISTSLGKRDEALGRLGADAFLVSRDPEQMRAAAGTLDGVIDTVSADHPVVPLLDLLKPMGQMVVVGLPTKPLQVPAFSLVAGGKRVAGSAGGGVGECQAMLDFAGEHGITADVEVVGMDYXQYRHPALREERCQVPLRCRRRGQQDWRLGITIPSVLSIDV

SEQ ID NO: 288657 - protein, 72 aa, Zea mays
  Clone ID: MRT4577_26347C.1.pep
LSYCYLYAIFRWSCQVWGLGHFTLGSSYVNTDPLGSSNSTQVIGPSSQDPTSFSQFSINAVRLPTRAPHTHG

SEQ ID NO: 288658 - protein, 95 aa, Zea mays
  unsure (1)..(95): unsure at all Xaa locations
  Clone ID: MRT4577_26348C.1.pep
AETRGQEQRGSRRSRRRSPSQSSSLPPFLFPXIMVSRXGXXGGGQSSLGXLVGSGETPKPAVAPPAVSAPPAACGXXLLRNHCCKPDGTISCCGV

SEQ ID NO: 288659 - protein, 131 aa, Zea mays
  unsure (1)..(131): unsure at all Xaa locations
  Clone ID: MRT4577_26349C.1.pep
NTHNHKKHTTTKQARPQRDHETNTDEPSKAXKPAQHQRKKKKMVPXQMQHKPHNREPDCEDTGTTTKEPTTSQRTPQQHNQTAQSPTRXPRRIRPGEAQQQTWHPQTTRSSPTTERTRTAPPPHPSKPNPA

SEQ ID NO: 288660 - protein, 81 aa, Zea mays
  Clone ID: MRT4577_2634C.1.pep
PRVFFFFFSSHYVFFISCALHLASGVAATVIDYSIPCSIASIEQGIKMYVKNLWLKVRRTYDSPEVLPYSIGIQPRSWPRP

SEQ ID NO: 288661 - protein, 123 aa, Zea mays
  unsure (1)..(123): unsure at all Xaa locations
  Clone ID: MRT4577_26350C.1.pep
YFQFPRQWAPVYSDLALGPQRKRQXCIXLSVNLIGPKVYVCTNMADVAKRPATGLWLVLAGRKSYKLPVHPQQRXSLIQIIQLEDELYKYQSLECDRIYYEPGGPWKQYSNVCTGLVESDDLC

SEQ ID NO: 288662 - protein, 82 aa, Zea mays
  Clone ID: MRT4577_26351C.1.pep
SAVFLCIYRGRGWTRYKQISRVNSANLANNYSKKLGTFFFFARAVRPHHQCGPSGFEAGPSVRSFLLSNNMIHDPLGLIWVL

SEQ ID NO: 288663 - protein, 157 aa, Zea mays
  Clone ID: MRT4577_26352C.1.pep
MSWNSKTWSWVKKYFSINPLSTDGMPVVGKFRTPAVASRPEKYVYPKSKASNISNNYYFQRDTRRNYPRLAVYTQKEVAGLLEGASVKPSLTPELASDVATTTETKPLVEVLNSRQLYSVNKLPPTSNFGLKPKWKISEDFVPPNDGSYFPMKVITT

SEQ ID NO: 288664 - protein, 77 aa, Zea mays
  unsure (1)..(77): unsure at all Xaa locations
  Clone ID: MRT4577_26353C.1.pep
RELSTPHTTLLXRGGGDADGARPLPSPNRPCRLNTLTPTPTRPRSMLIRTTTCPQPRVGRHPVPAAAAHGGRATTSA

SEQ ID NO: 288665 - protein, 62 aa, Zea mays
  Clone ID: MRT4577_26354C.1.pep
FFFFFFLGFWVFFFFFFFTKKGRVQFPSILPESNWGLNSGLTLGFFQTQQNSWFGGGVGVDL

SEQ ID NO: 288666 - protein, 51 aa, Zea mays
  Clone ID: MRT4577_26355C.1.pep
STEHRAAILPDIYSLRDMNLQSIYCTFELGKSLRNPFNYGCFFYFTPSPCL

SEQ ID NO: 288667 - protein, 44 aa, Zea mays
  Clone ID: MRT4577_26356C.1.pep
LMFRHGHKFLEDVQNKTISWLGEPSLQQGCLGPLRSNELYDSSS

SEQ ID NO: 288668 - protein, 62 aa, Zea mays
  unsure (1)..(62): unsure at all Xaa locations
  Clone ID: MRT4577_26357C.1.pep
ILTADXRLXXVGDIRADLRDYEVLASLIPARLPQYIPDPLNYPHPTVIPTTADTRRVASSPA

SEQ ID NO: 288669 - protein, 128 aa, Zea mays
  unsure (1)..(128): unsure at all Xaa locations
  Clone ID: MRT4577_26358C.1.pep
LLMLLGHWACAASVSILRHCXTSYSLLCSLIPTXPMMHTVCXHSVILPXSTQRAIARGIIPLSRSVLQQXSPLTLPXPSGHLLSHNISARHLHQRWLANLAFYLSQQQLPMWHNSAHYIRALQLHQLG

SEQ ID NO: 288670 - protein, 119 aa, Zea mays
  Clone ID: MRT4577_26359C.1.pep
AAAAAAAAAGQLPHPHHQPSHPHPPPVPSPGILPSPSSFLNLLSPTPRSPYPLLSPGFQHPPPLTPNFPALSPLAGTGILGPGPMPPPPSPGLWFPQSPSGLLSPSGFLPSLSPRWRDI

SEQ ID NO: 288671 - protein, 330 aa, Zea mays
  Clone ID: MRT4577_2635C.1.pep
MASLPCSQIKLSKVLVRRKFHESGQTNLPSPLHWKPLRPGRFENLVLRCTKNLSWETSLPYASAEDDASIIKGTGVVEPIDTEEAPQIPILQSDEDVVEVKNEPSWHLKAFKLPMWLVGPSILLVTGIVPTLWLPLSSVFHGPNIAGLLSLVGLDFIFNMGAMLFFLMADACGRQENSIFDLKRQIPISYRFWNLAATIVGFVVPFALFFASRRGTLQPQLPFVPFGVLLGPYLLLLSVQMLTEMLTWHWKSPVWLVAPVVYEGYRVLQLMRGLQLADEISAPDWMVQSLRGLVSWWVLVLGIQLMRVAWFTGLNFARNSSYGASGDMNQ

SEQ ID NO: 288672 - protein, 500 aa, Zea mays
  Clone ID: MRT4577_26360C.1.pep
MMMDAARIVEYFKGKCILVTGSTGFLGKILVEKILRVQPDVRKIYLLVRAVDEPSAKQRVQQEVIDTELFGLLREKHGKGFQQFVEAKVVALAGDIVYDGLGLEAAVLDALAKDVDVIVNIAATTNFYERYDVSLDVNVLGVKHLCMFAKQCARLRMLMHVSTAFVSGFREGLILEKPIKPGESLREGTYLDVDAELRLVKEVKKSLAANGDGDGDSTERKAMKELGLRRARHFGWSNTYVFTKAMGEAVLGQQLRGGDVPVAVMRPSIITSVRRDPLPGWMQGTRTIDSIIIGYAKQNLSCFLADLRLVMDVIPGDMVVNAMMAAVVAHSEAFAPPLPQVVVYHATSSLRNPATYDVLYQSGRRHFYENPRVGKDGRVIPTREMYFFTSIARFHLYMTLIYKVPLEILHLVNLLLCGLLSRLYNDLNRKYKFVMHLVDVYGPFAFFKGCFDDINLERLRLAMAMKTPEDQMFNFDPKTIDWDDYFTRIHIPGILKYVCK

SEQ ID NO: 288673 - protein, 81 aa, Zea mays
  unsure (1)..(81): unsure at all Xaa locations
  Clone ID: MRT4577_26361C.1.pep
RIQLASEERLMADVKXSYSKLEXHGCAHRYXHNFANYQFQYDDSVAEQCGDRQVAEWRTQMYAVTSTNQAARPERYRDEWD

SEQ ID NO: 288674 - protein, 115 aa, Zea mays
  unsure (1)..(115): unsure at all Xaa locations
  Clone ID: MRT4577_26362C.1.pep
KPPFSPRFPTPPLRGLLPGPNPPXSVFVVFPPGGPNPSLNSGSPPQKKLLGPPVPXLPGFLISRAPPPPRVSPPLQPFFLGPGPLVPPGPPGPPPPPXPGMGPGVPPVVSPWGRL

SEQ ID NO: 288675 - protein, 213 aa, Zea mays
  unsure (1)..(213): unsure at all Xaa locations
  Clone ID: MRT4577_26363C.1.pep
MMMDAARIVEYFKGKCILVTGSTGFLGKILVEKILRVQPDVRKIYLLVRAVDEPSAKQRVQQEVIDTELFGLLREKHGKGFQQFVEAKVVALAGDIVYDGLGLEAAVLDALAKDVDVIVNIAATTNFYEXILIKQDVEKNVVCFERLRRCMHGYGYYXRYDVSLDVNVLGVKHLCMFAKQCARLRMLMHVSTAFVSGFREGLILEKPIKPGES

SEQ ID NO: 288676 - protein, 82 aa, Zea mays
  Clone ID: MRT4577_26364C.1.pep
SGIYLIFQIILTLQLIYPHLENFPFDMSKPSHTDVQTLSPQLDPPSPYPGYPRFAPIPPTTTPPPSHLITTSAHTLSAPLHF

SEQ ID NO: 288677 - protein, 42 aa, Zea mays
  Clone ID: MRT4577_26365C.1.pep
LLSPDYALLNRLQSYEAIFYQFKLQKLLLLLSFTHTLYHSII

SEQ ID NO: 288678 - protein, 83 aa, Zea mays
  unsure (1)..(83): unsure at all Xaa locations
  Clone ID: MRT4577_26366C.1.pep
VCNSTLSIFASGEAAIVARLSTLFXGNTWYMGKFVVRQLAKLGNQITIASTMVGLVECKVYAYKVGLDVIKLLERMQIRQEGW

SEQ ID NO: 288679 - protein, 109 aa, Zea mays
  Clone ID: MRT4577_26367C.1.pep
DKNKYKNKKKKKKQKNKQKTGIHGGTYIRGGHPLYTSLPLFSLPFYLNSLLSFPLFLIPSPLFYTLVTLKTLPYKTLSFPNLSPFHKIPFFPIIPIPKTLSTIFPSQNF

SEQ ID NO: 288680 - protein, 70 aa, Zea mays
  Clone ID: MRT4577_26368C.1.pep
EPPRSTIFSLSINVRKILTGVTSYIRSRIHADVIHGVVAVSSGMYTTGTRRTATERACSSHTHMGGIKLD

SEQ ID NO: 288681 - protein, 385 aa, Zea mays
  Clone ID: MRT4577_26369C.1.pep
RTRGRTRVRSRGKEVKQEGVHSGVASEDKKFLESIFALMQKEETFSGQVKLMEWILQINNVTVLSRFVTMGGLTIMSTWLSQAAIEEQTSVIHVIFKVLLHLPLHKALPVHMSVVLQTINKLRFYRTQDISSRARNLLSRLSKVLVRIQALKKPQKDLICKQRISEILRDESWKSEVDITEEVLALTDGANESRKPEPRKTPMLLTASAIETNKRSSVQTKSKQKRKVLLVEQPNKKATWKNANSVRNTSTNNSRPLSADDIQKAKMRAMFMQEKRGKIDINKLSDKPQAMDTKKAAGLVNSNPSAMPISPHTSAAQPVDPSPSTSKQSTDPQPDNTEISGGLKLNIGSKNNVIEKLDCKRVLWQIPPGIFLLCAPQFAILLNVE

SEQ ID NO: 288682 - protein, 109 aa, Zea mays
  unsure (1)..(109): unsure at all Xaa locations
  Clone ID: MRT4577_2636C.1.pep
FVDWCPTGFKWGIKYQPPSVGPGGDLAKVQRSVCIISHSPSVVEGFFRLGPKFGLMFPQGAFVPWYVXKVWKKVSFFRALXDLAALQKEFQEVGXSFIXGEDGPQGYQY

SEQ ID NO: 288683 - protein, 431 aa, Zea mays
  Clone ID: MRT4577_26370C.1.pep
MGNCVASGGTTTVTAAGAAGEDGRRRGRRWKAPREEQLGSVPGRIFSNDGRSRTAAVFTQQGRKGINQDAMLVWDGFGGEEDVVLCGVFDGHGPHGHLVARRVRDAMPLKLMSAVRASKAGLDMPAAAWRKAFARAYKTMDKDLRSHATLDCFCSGSTAVTVLKLGSDLYMANIGDSRAVLGSRDGGDGGMVALQLTIDLKPDVPSEAERIKKCRGRVFALQDEPEVPRVWLPFDDAPGLAMARAFGDFCLKDYGVISVPEFFHWSLTEKDQFVILASDGVWDVLSNQEAVDIVSSSPSRSKAARSLVEAATREWKTKYPTSKIDDCAVVCLYLDGKMDHERDSTASMDNMSLDEGSAADPNEAQEQEPALTRNFTVRTVAGSAHEKALSGAVDAVVAGAAHDQSWSGLDGVTRVNSLVQLPRFSDEKAIG

SEQ ID NO: 288684 - protein, 201 aa, Zea mays
  unsure (1)..(201): unsure at all Xaa locations
  Clone ID: MRT4577_26371C.1.pep
MEADALLHAPMTSSSSSSSSSSDSVGGSCVVNGAQELPSNTGKPHKNVKRKRTASPSAAPGGGVAPAPPEAAIADDDCGGRRRKRGSAGTRHPTFRGVRMRVWGKWVSEIREPRKKSRIWLGTFPTAEMAARAHDVAALAIKGRGAHLNFPHLAHDLPRPXSTSPXDIQXRAAKAAAAAADADVXVEQCESSHAVETPSSS

SEQ ID NO: 288685 - protein, 59 aa, Zea mays
  Clone ID: MRT4577_26372C.1.pep
DLLICIYIHRSQTQRTTTYARLITSHQCNPLASFLVPSKIRPSLKSRKIKLTHAYGTGT

SEQ ID NO: 288686 - protein, 85 aa, Zea mays
  Clone ID: MRT4577_26373C.1.pep
AHLGLKDLIQITIPTLCWITHYRTGTFLSRQRYGSRVADRSDLKAGVPFVGPLNRGADLPEGDPSRRGQRSLDHQPQGPRPLRVQ

SEQ ID NO: 288687 - protein, 121 aa, Zea mays
  Clone ID: MRT4577_26374C.1.pep
MSATGVLWPQRAVAMSSDAVAEARKGRLKQRYDKEFRLVAGCVPYRVRVNKKDDDEVVGNPCSISLGDDTGTAEVEVLMISTPNRADMVFPKGGWEDDEDVYQAASREAMEEAGVKGVIHK

SEQ ID NO: 288688 - protein, 46 aa, Zea mays
  Clone ID: MRT4577_26375C.1.pep
KKKKKKKKKKKKKKKKKKKKKKKKKKKKKKKKKKKFKKKKKGGGRF

SEQ ID NO: 288689 - protein, 134 aa, Zea mays
  unsure (1)..(134): unsure at all Xaa locations
  Clone ID: MRT4577_26376C.1.pep
ASMXXCGSKKGAAXXGVXWRLAXLLQXWXXSSXPTRRXGPXXPAGRXTXXTXWLALXPSXREXSGWPIPVRRHPLXGEXXVSSLPMLXTAAMXLPMHWPNLHDVISGLALFVICVGRNTRTVRWCSTYCMCMVI

SEQ ID NO: 288690 - protein, 87 aa, Zea mays
  Clone ID: MRT4577_26377C.1.pep
HNADAYAPNISLAGPTTIVLTYSCTSKPERVDTTLPGTFYSTHGASTQYTCTSRFQQFNFRGSRPPGHSPTPRVRPRVRPRVRPRVR

SEQ ID NO: 288691 - protein, 54 aa, Zea mays
  Clone ID: MRT4577_26378C.1.pep
FSSVVTYCRSSPSLVSRVVKGKRECNVIVVHLYCIVKLGRKGKNCSPGIILKKA

SEQ ID NO: 288692 - protein, 54 aa, Zea mays
  unsure (1)..(54): unsure at all Xaa locations
  Clone ID: MRT4577_26379C.1.pep
RTPLQRSLGVAPRLHYLWLLGPCIFYAFMPPLFSINYQLIRPWLCVPXVKKKXR

SEQ ID NO: 288693 - protein, 106 aa, Zea mays
  Clone ID: MRT4577_2637C.1.pep
LLPVRLCCCTAALVLHVQLLPVRLCCCTLALVLHVAPSIRQQQAPDSDELGGGAGTVPAMLWDSDSDDEVRVVDHPTERHAATQAEKGKAMADANASSSGADVVLD

SEQ ID NO: 288694 - protein, 45 aa, Zea mays
  Clone ID: MRT4577_26380C.1.pep
AAKMGGGEYRATLTAVPTSGGEDTLTASTSLLPATNSVPVHQAFH

SEQ ID NO: 288695 - protein, 135 aa, Zea mays
  Clone ID: MRT4577_26381C.1.pep
MEQGQGWRRRQIPAFGRWNQHTDEAGYLESAVQAGLVRPGHCYHDDGGNEVVLFRSSASPPPHKPAKKVRSTMEGHGHHHQVQVEAGSRKQRPFVAGDGSRSRAAKPRPRVVRAAVDEDLYIVPSDMSRKKKGYR

SEQ ID NO: 288696 - protein, 98 aa, Zea mays
  Clone ID: MRT4577_26382C.1.pep
ERSIYIGRADRVTVAKAKAIGLPSRPKWPTQTQILARVVHHLRYGRALRTAGRRHQCDTRKEARQRAAAEASACMHALALLARPEYSALLLCLVQCST

SEQ ID NO: 288697 - protein, 63 aa, Zea mays
  Clone ID: MRT4577_26383C.1.pep
MRETLETLHALYENLKLNILRKEDLGCLASLLCTVASSLGEHSYVDYYCRDFPLNLIESPSLV

SEQ ID NO: 288698 - protein, 64 aa, Zea mays
  Clone ID: MRT4577_26384C.1.pep
FKFLLSNMKFQLCFALSAILACSMSFAVPLGEQLRKLYSSSSGILQELNQNTNEILTNRSLSVA

SEQ ID NO: 288699 - protein, 75 aa, Zea mays
  Clone ID: MRT4577_26385C.1.pep
SFVLPLATPLAASLRVKGSKQQARGGRQGEAAYRCRDGLVREREEGSRRGGGCSYMAGTGRISTAPVPTRGGSRI

SEQ ID NO: 288700 - protein, 79 aa, Zea mays
  Clone ID: MRT4577_26386C.1.pep
CHVVFVPLCEHPPVPLVVVVTVLDGFLSVSGRYLLSLLPRLHDVLSEAVSMLPLPASRGDAVASHIGRVLSQGMANELL

SEQ ID NO: 288701 - protein, 200 aa, Zea mays
  unsure (1)..(200): unsure at all Xaa locations
  Clone ID: MRT4577_26387C.1.pep
FVKNIIKKXNGQKFVYKFVSYPEILKMDPLTVGRAEGDCEALSCGEVGGGARDPESGGREKPPQPGARASSRNDYIHSGLYSSFTLNSLNSSNKKLFKPIKIESPAEKLAEKKPPPEPTPSVIRFVTTPSVPEPPRTPTPPLSPNPEVDTDIDSVASQPMELPENLSLEPKDQDAALLEKDKTSNSSRSKKPKGLELAPI

SEQ ID NO: 288702 - protein, 180 aa, Zea mays
  Clone ID: MRT4577_26388C.1.pep
MLRHAARRLVSRAVAPPTARRALATAEVPAEAVEDSTFVEAWKKVAPNIEPPATPLFLMQPRPPTPATIPTKLTVNFVLPYKSEIANKEVDMVIVPATTGQMGVLPGHVATIAELKPGVLSVHEGNDVSKYFVSSGFAFVHANSIAEFTAKLGSASTDLEKAEAQIGVDVHSALNAALTG

SEQ ID NO: 288703 - protein, 75 aa, Zea mays
  Clone ID: MRT4577_26389C.1.pep
ALLNLLCMFFICFQLFGAHRQNNRPKKFTLTGATFDANMHFRVCKGGKIFSPSSFFAFWSSGGPSKSMLAPQMYS

SEQ ID NO: 288704 - protein, 54 aa, Zea mays
  Clone ID: MRT4577_2638C.1.pep
QLFKFTHKTSIPNEKVKFKTLNIPYQNSKTFCRYTTSNLTSYIHPMSYTIFIAT

SEQ ID NO: 288705 - protein, 30 aa, Zea mays
  Clone ID: MRT4577_26390C.1.pep
LCMVFIKVLVQQIRTPVIARMGLWPPSLFA

SEQ ID NO: 288706 - protein, 203 aa, Zea mays
  unsure (1)..(203): unsure at all Xaa locations
  Clone ID: MRT4577_26391C.1.pep
MLRHAARRLVSRTAXGAHRPXALVTAEVPAEAAEDSTFVEAWKKVAPNIEPPTTPLFLMQPRPPTPATIPTKLTVNFVLPYKSEIANKEVDMVIVPATTGQMGVLPGHVATIAELKPGVLSVHEGNDVTKYFVSSGFAFVHANSIADIVAVEAVPVDQIDPAFVQKGLAEFTAKLGSASTDLEKAEAQIGVDVHSALNAALTG

SEQ ID NO: 288707 - protein, 203 aa, Zea mays
  Clone ID: MRT4577_26392C.1.pep
MLRHAARRLVSRAVAPPTARRALATAEVPAEAVEDSTFVEAWKKVAPNIEPPATPLSLMQPRPPTPATIPTKLTVNFVLPYKSEIANKEVDMVIVPATTGQMGVLPGHVATIAELKPGVLSVHEGNDVSKYFVSSGFAFVHANSIADIVAVEAIPVDQIDPALVQKGLAEFTAKLGSASTDLEKAEAQIGVDVHSALNAALTG

SEQ ID NO: 288708 - protein, 47 aa, Zea mays
  Clone ID: MRT4577_26393C.1.pep
IIIAVIPDKKSTIMRELSIENQSPLIMYHYRVGVAGRSTLDITLLRA

SEQ ID NO: 288709 - protein, 56 aa, Zea mays
  Clone ID: MRT4577_26394C.1.pep
VLVKVGLPDGGVPPHVPPKQFQVPAQESQIAQQPDMLMDNIGLPDGGDQPQSPAVP

SEQ ID NO: 288710 - protein, 54 aa, Zea mays
  Clone ID: MRT4577_26395C.1.pep
QPELSCSHFIELYRSARVRRGGFYWNRHPSDVNGDPPGGIRGGKGLSACIPSVS

SEQ ID NO: 288711 - protein, 241 aa, Zea mays
  unsure (1)..(241): unsure at all Xaa locations
  Clone ID: MRT4577_26396C.1.pep
HSANSHRHADTQQDPGEYGHPYPRVDQYGNPVPPVDQYGNPLPREPVSGFGAIAPPYSAGDSAAGHVAAPVKYGADAKYPHDGTGSGGGTAPTGVAYSSGGVAPAETALASYEXAWSTSSRPGRSTRLVWPRSSSRPAGRXTFGMASQLQPTGEEHTTLGEKLRRSGSSSSSSEDDEQGGRRKKSIKEKIKEKLPGTHKHEEQKAGHVTTTTTGTHAAGTHEKKGFMEKIKEKLPGHHHAH

SEQ ID NO: 288712 - protein, 139 aa, Zea mays
  Clone ID: MRT4577_26397C.1.pep
MAEYQGEYGHPYPRVDQYGNPVPPVDQYGNPLPREPASGFGAIAPPYSAGDSAAGHVAAPVEYGADAKYPHDGTGSGGGGGVTAPTGVVAYSSGGVAPAETALASYEEGMVHLQPTGEEHTFGMASQLQPTHGEEHTFG

SEQ ID NO: 288713 - protein, 141 aa, Zea mays
  unsure (1)..(141): unsure at all Xaa locations
  Clone ID: MRT4577_26398C.1.pep
DKTYLVFVSGSCGENARKPHTPSAIVIGGGFAGLAAADALRNASFQVILLESRDRIGGRVHTDYSFGFPVDLGASWLHGVCEENPLAPIIGRLGLPLYRTSGDDSVLFDHDLESYALYDTNGRQVPQEFVEKLGKVXGEDT

SEQ ID NO: 288714 - protein, 148 aa, Zea mays
  Clone ID: MRT4577_26399C.1.pep
SCFFDLLIQINKIRQKIGNTRNGCTRQIQLQCNGDRFINMSNMLFPDSRVKLSVIGDSKCQLECMKKCSCTAYTYSVLDGCSLWYGNLTNMQDGYNNGSGAGTLYLRVAASELESTNSSGHNLVWIAGVLPSIGFLIFCLILFIWIRR

SEQ ID NO: 288715 - protein, 151 aa, Zea mays
  unsure (1)..(151): unsure at all Xaa locations
  Clone ID: MRT4577_2639C.1.pep
MGRTIKKARKAKPKKSKKKTEASSSSNHAVASGPAKVWQPGVDALEDGEELQFDPEAYNYLRGFGIGWSCLXLFIFIGLSHLFLVLISGVRTIYDLFSITKTFCCSFDVVRDQLGLVRSEFPHTLYGVAGTQVALVFTPSKSRHCFFFCKN

SEQ ID NO: 288716 - protein, 80 aa, Zea mays
  Clone ID: MRT4577_263C.1.pep
FAKTKADPSFWGKISQGGPQGIFGKAPWKLSPQRLMTLPRVSGFWKYVTPLEGGGTPPSIEMFFPLKDRSLASQGPLSFD

SEQ ID NO: 288717 - protein, 120 aa, Zea mays
  Clone ID: MRT4577_26400C.1.pep
MTDSIVKTTGAQTKREKRVAILPRFDPRRHGSLSSPSLEALEGVGGHRQGALNTQVGSADIRKGVLQGNCSSEFNDHVKPQFAADQAPMRAILDEPVAEDSGVQFVKVAEQELIEGKLCP

SEQ ID NO: 288718 - protein, 74 aa, Zea mays
  unsure (1)..(74): unsure at all Xaa locations
  Clone ID: MRT4577_26401C.1.pep
LEGAFPDTMTKCAELLSRSVEVDFVDINVGCPIDLVYMKGGGCXLMNRSTKFQQIVRGMNQVLDMPLTVKIRTG

SEQ ID NO: 288719 - protein, 70 aa, Zea mays
  Clone ID: MRT4577_26402C.1.pep
GRGLAHLGPRMKFNRPGDRPYPNWEIIPCKNPKSGPICIGCPNLSNFQKIVACLISHSPGLIGNLVSPFA

SEQ ID NO: 288720 - protein, 85 aa, Zea mays
  Clone ID: MRT4577_26403C.1.pep
LHPRLQGLPIISETVPILWRCQCQSNIHNTLFTHNDLTFYAKRYILFMQLLCRFGFMPYLSTSYSTLYLPPAITPHARSINSAPM

SEQ ID NO: 288721 - protein, 67 aa, Zea mays
  Clone ID: MRT4577_26404C.1.pep
DTISFFGVHRMTGTWTWVSGFCGTGKYVGAKGFAKVAVVRPGGVAASGALLETDGVESVLQFTVFLV

SEQ ID NO: 288722 - protein, 78 aa, Zea mays
  unsure (1)..(78): unsure at all Xaa locations
  Clone ID: MRT4577_26405C.1.pep
SFFEASNEYLGKIPYKVEXFLTXKAFXALDDRFKVSGIPHLVIPDAKTGEVYTTHGAQSLNEYIIYAYPITPYPFNEL

SEQ ID NO: 288723 - protein, 37 aa, Zea mays
  Clone ID: MRT4577_26406C.1.pep
DPVVGRGLCVKIIKERMPRRKVVGPLARSLKGSRTSG

SEQ ID NO: 288724 - protein, 55 aa, Zea mays
  Clone ID: MRT4577_26407C.1.pep
LNSLSHKVICLLGGSHLSKPYSSYLTLLPPSRVSYQVTTHNTSSYPDISIPLTTP

SEQ ID NO: 288725 - protein, 110 aa, Zea mays
  unsure (1)..(110): unsure at all Xaa locations
  Clone ID: MRT4577_26408C.1.pep
KCRLYSEDKSSVSFGRNHAGIIKKTLILKVLIALSTVHSYPVCNSSPSLVKTQQSTCKSELYLAVATLLPXMLWHCSYHCNFCKPYVLQWLIGYINLLAVIFSKKSKNLL

SEQ ID NO: 288726 - protein, 278 aa, Zea mays
  Clone ID: MRT4577_26409C.1.pep
MAVLKSIAVVAACAAAVDAAAIQPRQYKTLVDSQSLRNALHIDNLYARAEKLQEIAYSTPGKNRVIGSQGHEDTVEYIKGELEAFSDYYDVYTQDVPLSIGYNATLSANNKTIEAFAVTLAPGGNVTGPLVAIPSLGCNEEDFPETLEGSLALIQRGNCSYGEKVQLAAAKGALGVVAWNNAEGTLEGYSLQVLYPEGDFVPVAGITLGQGESLLAQLEAGVDITVDMWTNATVYNTRNLIAETKAGDHDHVIHVSGHSDSVTAGAGINDNGSGSMSI

SEQ ID NO: 288727 - protein, 91 aa, Zea mays
  Clone ID: MRT4577_2640C.1.pep
CPRSATAGDFLYYCHCVPALRHCHDVRLACATCHTASPGVTQGPRQPPSQAGLKRTHTWPYGWYSSMASSSAGCVPVNTLVLDADSFGRLG

SEQ ID NO: 288728 - protein, 108 aa, Zea mays
  Clone ID: MRT4577_26410C.1.pep
FHDQKCCHVLLIDIINTVLQCSMTQSLTTKASGEFVSISAETAFQEWPRSTSCSSKVYRHQHLDSGALIDMDVAVYTGSRILIVPRMSCRALAFTSCVPTSEAVHVRI

SEQ ID NO: 288729 - protein, 78 aa, Zea mays
  Clone ID: MRT4577_26411C.1.pep
VDAPNTLQNMFLTKSLFDLVLTHDLTYCRSSNPSNRFNNRGGFQAGRSRGQFQSWGRGRGQFQSRGRGRAQFQGRRRG

SEQ ID NO: 288730 - protein, 132 aa, Zea mays
  unsure (1)..(132): unsure at all Xaa locations
  Clone ID: MRT4577_26412C.1.pep
QQAIAAGNIPLSPWLQQSTAVSLVQTLVQTITAQDLQKLVLPGINQVTVANLSPYSQQQQFLACNQLSTXNRAVYLEQQLXPFSQLATVYYXQQQLLAFNQLDTLNPDAYLQQQILLPYKQLAATSRAYFLT

SEQ ID NO: 288731 - protein, 112 aa, Zea mays
  unsure (1)..(112): unsure at all Xaa locations
  Clone ID: MRT4577_26413C.1.pep
KRFAFAWSLCTPGHRPDKFGAHKGSQFGEKRKLISFDRKRRGGAPSGGRRLHCWEAGGSPPCPPLRTPSFPREARPLGTHLWFSSYRVGGFSLITFNLYLXXLXGYFLLCLS

SEQ ID NO: 288732 - protein, 133 aa, Zea mays
  Clone ID: MRT4577_26414C.1.pep
HINAIFTCYSFIHRRGKEGRYAYQHFLYEIEKDQCIPLIERAWQIPTIPTSTLLTREENRANAQHQSGLTSYTGNCHASEAAEGNRNYKTYINNTALLCTIPYAMCSGLSKLTGTDSATYLGHAGRKFIFHCP

SEQ ID NO: 288733 - protein, 80 aa, Zea mays
  Clone ID: MRT4577_26415C.1.pep
PPRGGSPPKGIVKGASLIIKGFCVGPKKRVGPPPQSPLKKTSRRGLEEIKLKFIDPSSKFGEGGFQPTNKNQRFFGKPKG

SEQ ID NO: 288734 - protein, 129 aa, Zea mays
  Clone ID: MRT4577_26416C.1.pep
PWGWNPVPCGNLRQGGDPGSRGSKQPSSPRKGKRLVTFYFYPPTFEPMKLKKPLGTLTFYKKKKLEKKILRVIRPVIFFCSLGGRSIPFGGGQARGLQNAGGPDFCKFCTNVKPVPVFVFPNVAGAGPG

SEQ ID NO: 288735 - protein, 51 aa, Zea mays
  unsure (1)..(51): unsure at all Xaa locations
  Clone ID: MRT4577_26417C.1.pep
TLNGSPYXSPXXXFFNSSKNSNSIFFLXTXXFHLXPFNLLKHSHLYFFINN

SEQ ID NO: 288736 - protein, 50 aa, Zea mays
  Clone ID: MRT4577_26418C.1.pep
FLTQAPTRRGARGEMRCATQEALSGHANIAGCGNFQQARTVRRARTRPVG

SEQ ID NO: 288737 - protein, 214 aa, Zea mays
  unsure (1)..(214): unsure at all Xaa locations
  Clone ID: MRT4577_26419C.1.pep
MEKGMDPALLDNIIARLLEVKSLKPGKNAQLSESEIKQLCAASKEIFLAQPNLLELEAPIKICGDVHGQYSDLLRLFEYGGYPPQSNYLFLGDYVDRGKQSLETICLLLAYKVKYPENFFLLRGNHECASVNRIYGFYDECKRRFSVKLWKTFTDCFNCLPVSALIDEKILXLHGGLSPELNKLDQILNLNRPTDVPXDTXXXLCXDFLWXSDP

SEQ ID NO: 288738 - protein, 68 aa, Zea mays
  Clone ID: MRT4577_2641C.1.pep
RRLYIIQKTSHSHANSHWLTEAIWNAVQSTNNVGTPVSLFCRCWRCHHMSAARKLPDKETCQSEKQQQ

SEQ ID NO: 288739 - protein, 59 aa, Zea mays
  unsure (1)..(59): unsure at all Xaa locations
  Clone ID: MRT4577_26420C.1.pep
RRRRPWLWSIRRWCPGVSAVRFGSRSSARKRSRGVLVFAIAVCVPXVATXRPVWCCGKM

SEQ ID NO: 288740 - protein, 191 aa, Zea mays
  Clone ID: MRT4577_26421C.1.pep
LFLHSRGARRGETSNCPARCLIQNPPERPLDLHSSPSCALLTLDAPGRMTRIALRSENRPHVGAPLHRQANSASRLEHRQSRHTSLPPATLVSGGCVPALARSSKSSRVWAGEPRRVPCSICRAARCTQPARHLRRAPALPRPSHPCVEESTFTFSTARGSPDEASSVDRGSFPSFEESTIKRWRPSDLVL

SEQ ID NO: 288741 - protein, 147 aa, Zea mays
  Clone ID: MRT4577_26422C.1.pep
LFCTKLLLYSKDGTFVSVKKKKKKNMRLASLQPFLEHWREPFTWCGAGIVVGDLCAVGSAKVAASAPTVRQHGAASLFADPQLATPPAAASELLAPLAFLLPFNRQAFPGSITQLGDVCRYLHIGNDRCDRFRFSGDAWSGSPDQSK

SEQ ID NO: 288742 - protein, 105 aa, Zea mays
  Clone ID: MRT4577_26423C.1.pep
CLPAMMAEGRTYHRRGVSINGEHHDVIAYSCQRPTAVPSGIVGSPDGRSPCLARTSVTSQLLQTSRSRENMYTDHTSTCDGLWHLSCAMLTSLMKARAAPRSLLR

SEQ ID NO: 288743 - protein, 502 aa, Zea mays
  Clone ID: MRT4577_26424C.1.pep
QFPSTSSNNAEVLKRKGDVEFELQLEMALSATAAETQNNKLATHMNQLTVSLQDSSSPLKKLRQNVEALSSSSAVWSRSAGAPLYWAEVYCGGQASTGRWVHVDVVNNLIDAEQNVEASSAVCKKPLRYVIAFAGNGAKDVTRRYCLQWHRIAQGRVNSEWWDNVLAPLKQMELAATNNYEDMELQTRALTEPLPTSQQAYKDHHLYALEKWLHKNQIFHPKGPVLGFCKGHPVYPRSCVQTLQSRHGWLREGLQVRENELPAKVVTRPKRTFNAQSVQSSGNEDGLKPTLELYGEWQLEPLQLPHAVNGVVPKNERGQVDLWSDKCLPPGTVHLRLPRLFQVAKRLGIDYAPAMVGFDYRSGRCLPVFDGIVVCTEFRSAILEAYAEEEEQRRAVEKKQEEAQALSRWYQLLCSIVTRQRLKDSYKTPSHGIGNEGLPENDNVHRSTLSSRSSEREPSSSKLQTDHDHDHEFPKEDQSFDEETFVRTKRCPCGFSIQVEEL

SEQ ID NO: 288744 - protein, 89 aa, Zea mays
  Clone ID: MRT4577_26425C.1.pep
MALDAKALQEAREAAAVPVGVALDDDAGTVRRRRRSSSWNGGASPAPVPVPVPVPVLLRSDDDRKVKRELVAWAKAVASVAVRESMHCC

SEQ ID NO: 288745 - protein, 35 aa, Zea mays
  unsure (1)..(35): unsure at all Xaa locations
  Clone ID: MRT4577_26426C.1.pep
YRWSDSVKIWLXXGVVGLLKVFKPHYXXEGWGKKT

SEQ ID NO: 288746 - protein, 72 aa, Zea mays
  Clone ID: MRT4577_26427C.1.pep
HASEFINSHSQALKETKRMACRFYFYPSRPMVCYVPVQIPTPTDTASPSMAGANAAGSLTVALVLTLAVANF

SEQ ID NO: 288747 - protein, 69 aa, Zea mays
  unsure (1)..(69): unsure at all Xaa locations
  Clone ID: MRT4577_26428C.1.pep
KKKKKKKKLIKKKKKKKKKKEKIKKKKKKKKKNKXKYKKKKKKKKIKKKKKKKRALLFKVPNFISPPFT

SEQ ID NO: 288748 - protein, 143 aa, Zea mays
  Clone ID: MRT4577_26429C.1.pep
DTRTVLCCRLVASSPTFVVSSSRRFGYTRSSGGIDTGWPASTRGRPDCTGRLSLWCLLLIHTQVYLLLSCCPCEGRISGIVDSPNAVTTLAIPKAIFDQDIKPKRVKGRPLGGPQLRRLPDLLSCSNHGRLPATQDRSGTSAP

SEQ ID NO: 288749 - protein, 90 aa, Zea mays
  unsure (1)..(90): unsure at all Xaa locations
  Clone ID: MRT4577_2642C.1.pep
TSPSPPPKTSPGFSPERFSPRXPPPMGGPVSPPPPXNPGVFFCPSKGFPSSPPGGKRPFSPGPPPSNWVPPQFTPPSFLPVPQPGFLVSP

SEQ ID NO: 288750 - protein, 94 aa, Zea mays
  unsure (1)..(94): unsure at all Xaa locations
  Clone ID: MRT4577_26430C.1.pep
ERPPGSGTFSXALLWVLLIFVASTSKDKVYISHWSMTPTLFLLGAQELRVPVSNGLQYARASMVRGLESYTLILPARYPRQVTSLILISNASWT

SEQ ID NO: 288751 - protein, 56 aa, Zea mays
  Clone ID: MRT4577_26431C.1.pep
NKKENYNNYILYFLTVNLLLRTTKNSDASNPLVQLHKKPQPTHLKAYLITSRSKRI

SEQ ID NO: 288752 - protein, 47 aa, Zea mays
  Clone ID: MRT4577_26432C.1.pep
IMSAEPPQQMNNITTTDKYQPTNQRTSRARASLGTTKQEKIVVFSGP

SEQ ID NO: 288753 - protein, 76 aa, Zea mays
  unsure (1)..(76): unsure at all Xaa locations
  Clone ID: MRT4577_26433C.1.pep
LPYLWARTPLVMLRVSMRALFQSDRYEXAWWTASGSLDVXVSTPCFWIXSAKGSTFVLIGCXDYDYAGCWADCKST

SEQ ID NO: 288754 - protein, 167 aa, Zea mays
  unsure (1)..(167): unsure at all Xaa locations
  Clone ID: MRT4577_26434C.1.pep
MLASVIILLWITQMNVPIRTGELNDFWPRKKXEGTLREDCDAGLYDTESIYFDGGYRHGRYHLHLSGHPLDAVGADIRDWQPQRIQSFISINNGKKPLRPSLPSAPSGMRHEPTVQQEHSELQQRLAHDPYENWQTNGFXYINDHSASFDHYDKLERHSYYYNSMYY

SEQ ID NO: 288755 - protein, 65 aa, Zea mays
  unsure (1)..(65): unsure at all Xaa locations
  Clone ID: MRT4577_26435C.1.pep
STHPSTAPKGRPCGGGGYXWRGEVIRLNSTGWALGARSTRTMSAAVASVATCLLYRLISLEGAQN

SEQ ID NO: 288756 - protein, 46 aa, Zea mays
  Clone ID: MRT4577_26436C.1.pep
PKPTHTSIFFIPTTKPNIMTLKIWDGAYLNVYNTDAIDSQTIQYIT

SEQ ID NO: 288757 - protein, 104 aa, Zea mays
  unsure (1)..(104): unsure at all Xaa locations
  Clone ID: MRT4577_26437C.1.pep
GARPKRTLPGREEXPQPPQPRYAANSRVKVFGLIKLHRFVIKPVTRHWTAGKNVSPWFFPFLFPFCPPRPLFCWTNFSFFAPSGPLSLFQASLIQVKKKGFFLP

SEQ ID NO: 288758 - protein, 43 aa, Zea mays
  Clone ID: MRT4577_26438C.1.pep
GENALGNPYSNSNRKALRVLDISVGRCDQLAGAATRRDCQLNT

SEQ ID NO: 288759 - protein, 123 aa, Zea mays
  unsure (1)..(123): unsure at all Xaa locations
  Clone ID: MRT4577_26439C.1.pep
MSTALQRTTPGTDQSFCRKKTAVDEAYTKXSAALIKDNGAEIELIRPKMLRLKVFELILVXGARTLKDIDMTIRIPGGGKTRQINSIQQGXGKGLAAYYQKYVDQAAKKEDKDMFTRHDSTLL

SEQ ID NO: 288760 - protein, 179 aa, Zea mays
  unsure (1)..(179): unsure at all Xaa locations
  Clone ID: MRT4577_2643C.1.pep
HVCITRIDEETNELIISEKEAWAVTCLREGTLLQGTVRKLFPYGAQIRIGETNRGGLLHISNMTHGKLRSVADVLKVGETVKALVIKSTPGRTARGTKDLESEPGLLITNKEKVFSEAEEMARRYREQIXATATXPLPRKTPVTXAVPFDDESRSYANWKWLKFSKSDDVPNPKSGVES

SEQ ID NO: 288761 - protein, 127 aa, Zea mays
  unsure (1)..(127): unsure at all Xaa locations
  Clone ID: MRT4577_26440C.1.pep
AARFLNQLQGEAPKLXPSNESLPESLKSFKAXKSQLRDEKTRLKAXKERLEQMLKGVVSPPAVGGPGPFVPPPGAVGPSFPPPPAGFAQAGKFVPYPSYPPPGGFWQWIPPTSLDTTKGPAPWPPVA

SEQ ID NO: 288762 - protein, 87 aa, Zea mays
  Clone ID: MRT4577_26441C.1.pep
KKVLQPRTRVVKSGAPCEFKAFPKGGPGNIKRGIVMSKGPPPGVSVGVLPPCSRNFSPPCLDNSKMSCPPEIFGLPLAGPKKKKKPK

SEQ ID NO: 288763 - protein, 100 aa, Zea mays
  Clone ID: MRT4577_26442C.1.pep
QRPKSRILLGHFFAPDLQITWGKNPPGTKGPQTKTEIPIIYHPRPLKTKVETPPLPPEMKPKQGPPRPGGPPMEARRGGPPRSWARTRRASPGAGRICPF

SEQ ID NO: 288764 - protein, 100 aa, Zea mays
  Clone ID: MRT4577_26443C.1.pep
SSRPRRMRLEEIPTSWTWPWRLILGMVPGFRIRSSAWARATRLVLLSVSCGSCFTRRTYTYSLLCVYAHVSCGRDRSCGMQTREMYIDVCSSPLRGEKTN

SEQ ID NO: 288765 - protein, 93 aa, Zea mays
  unsure (1)..(93): unsure at all Xaa locations
  Clone ID: MRT4577_26444C.1.pep
VVHRAISFDFVCSTKKITTDNXYGNGGGLTINFYINSLKGHGXGLYHIDDKYGANLDGYRTLYNDDDXSHTVDVYFGRTTELMIWAVTIAGIL

SEQ ID NO: 288766 - protein, 69 aa, Zea mays
  Clone ID: MRT4577_26445C.1.pep
KRCYSRLRLPIGIPKKGPVFFVPGKKKEPPIGPPGFLGGVFNSFLCPILKTFCGGQSIPPFPKNPLPRV

SEQ ID NO: 288767 - protein, 56 aa, Zea mays
  Clone ID: MRT4577_26446C.1.pep
KRKAETALVMLVEGRDSIALHFHINMSSLISAPYSDRCTLSLFHAHASFGLMTLVV

SEQ ID NO: 288768 - protein, 50 aa, Zea mays
  Clone ID: MRT4577_26447C.1.pep
MDAKKKKKKKKKNLGFGDDGADFGEEHVQVPPGATLEYIVQVDRVSIAPA

SEQ ID NO: 288769 - protein, 162 aa, Zea mays
  Clone ID: MRT4577_26448C.1.pep
RPETAVWVDLSHHMDGAPSGSLGSIMACASGVILFVDSYEVICSIVCRRCPLASCASSPARSDRIFCSFTWSTRSWWSCGKCCCRTSPPRGSPKMSRRWSWCSAQAGRMRADRCGSSWCTWQWHMHFHDVWQEQVDAQRPFHLHERYDRFRQSIISSCVLVG

SEQ ID NO: 288770 - protein, 119 aa, Zea mays
  unsure (1)..(119): unsure at all Xaa locations
  Clone ID: MRT4577_26449C.1.pep
FFPPKVSSKAPPPAFAPPRHFFFLAVPPFPPXFSPPLNFFPPPXFPPVTKPRSFCPCPXDIRARGPIPVXNRAPHTPSPPPAPPVRSPPPSPPPRLPPPPPPPPREDQKKKEKKLQTSL

SEQ ID NO: 288771 - protein, 322 aa, Zea mays
  unsure (1)..(322): unsure at all Xaa locations
  Clone ID: MRT4577_2644C.1.pep
PDDWVTWPDPPPPAVDDSFASSDGRGAARPEAPKVQTVSPTSLGAAGSNNGYDPGRIPASVFQHRTSVSQADWSMASNESLFSIQGASDLYPGSRSHFDFFYDEAMAEADSRLPSLAEGAEXGRARVQGVRGGAAQRGARRQXGCGNDAKRAAVFRSHESGSGSSSSNFSFAFPILAXDVAEEERPRQQRAVPAAGEGGPAAAAAGRAAAAGAPRVGLHGDDDGGGAAEGRRRVLLLRLLLVRLLLVLPVPVVAMRLLHLLLPQLLPVRLVHMRDPGVGGRSLVARNFIWSHENEIRVARTCLCFRRIIRQTGFGVGMCTSA

SEQ ID NO: 288772 - protein, 71 aa, Zea mays
  Clone ID: MRT4577_26450C.1.pep
ITFEDISPACIIVCITRSPLLFFRIFFPGTSVVRAHLVVVFSLPLLLWRLSDTLFRLNEKNRPQFLFYNPR

SEQ ID NO: 288773 - protein, 168 aa, Zea mays
  Clone ID: MRT4577_26451C.1.pep
SAGWRSTVSGGVERNRQNYFAKSIDTDQVSDRISRDETRAGSPEQPVSRAGSQSPGIAAQEKGLSCGCGRAGSQPLGTSVLRRRIDRFGAVGSRTIGDSEMEVGTAVGRPPNRMTGWGPGGPGLGCARAHPDHPVGPPMGEGRGERSGRPVFIKEEGKGRRRREMVGR

SEQ ID NO: 288774 - protein, 79 aa, Zea mays
  Clone ID: MRT4577_26452C.1.pep
IRLELLSPTSWSGCTERWCREIEIRRPRVGAPPPATAAMAGTVTVPGLTNPFMPAFWEELYILCSQCTHLYCLEFEAIL

SEQ ID NO: 288775 - protein, 79 aa, Zea mays
  unsure (1)..(79): unsure at all Xaa locations
  Clone ID: MRT4577_26453C.1.pep
FGSFALESFVGVGKLYAARAHDLLSAAPRHSEAREVVAEGGGRRRSLIGKGGLTXVMDTFVISNSWLKNLRLQPIIXNL

SEQ ID NO: 288776 - protein, 151 aa, Zea mays
  unsure (1)..(151): unsure at all Xaa locations
  Clone ID: MRT4577_26454C.1.pep
KAARRGRPATGRWRRTAGVPRIDRLGAWAPGRSRRTRSRRHGRAERAYSRASTRLGRARRXGRAPAAMGEHREPGRGRSRARPRQGAGIEPRCEQGTSHGEQRGTAARAMGGVPASSKQSRARRPRATTRKEQRSGASSEGAMACLAMETR

SEQ ID NO: 288777 - protein, 39 aa, Zea mays
  Clone ID: MRT4577_26455C.1.pep
GRDPDISNIHHLVPSHNLNQDEVHSPHSGCFRHLPPSRS

SEQ ID NO: 288778 - protein, 190 aa, Zea mays
  Clone ID: MRT4577_26456C.1.pep
MQESLAGPPSQQNPPEGLPTLTTPLLPLPLSGKGFLPYLGCAHYLQRTQGSRGKIPKTQKFLDWTAEGQLAELSGGHLPAIEEVASPPTEKSGSAAALELRRALPTSLAFNRSRKDHGQCPDAQATLIDPYPVRFQGPSEDEDAGQLRRPAYSVARLRRARQGMPRFISGKKEGGSASYAPRNRGDHGGG

SEQ ID NO: 288779 - protein, 63 aa, Zea mays
  unsure (1)..(63): unsure at all Xaa locations
  Clone ID: MRT4577_26457C.1.pep
YATXAVDPEEGXSLGTIXAPIAIGFIVGANILVGGAFDGASMNPAVHFGRDLNSWEWGYKGVY

SEQ ID NO: 288780 - protein, 73 aa, Zea mays
  Clone ID: MRT4577_26458C.1.pep
GTIKKIIKADVRGCKNGFYKTCDHFFLNELIDYNVLNFIVLDIFILLYNVFWCNVQVDVTFARRLRAQIEFKN

SEQ ID NO: 288781 - protein, 225 aa, Zea mays
  Clone ID: MRT4577_26459C.1.pep
MAAMNVSRAIGAALRSPASSPVAEAAAAAKAKDAEKLRFIDEMTCNVDSVQERVLAEILARNVDTEYLKNCGLDGAADRDAFRAKVPVVSYDALQPYIQRIVNGDRSPILSTHPVSEFLTSSGTSAGERKLMPTIKDELDRRQLLYSLLMPVMNLYLSGLDKGKGLYFLFVKSETKTPSGLTARPVLTSYYKSEQFKNRPYDPYHNYTSPTAAILCADAFQRCML

SEQ ID NO: 288782 - protein, 80 aa, Zea mays
  Clone ID: MRT4577_2645C.1.pep
SGQAFFFRGPLQVTPKGLGCFSQLALLVPHLHNGSRVLPYPYQISLQGPPPFFGQKQSRPKVYSFKTGEISPGGSVFWEK

SEQ ID NO: 288783 - protein, 122 aa, Zea mays
  unsure (1)..(122): unsure at all Xaa locations
  Clone ID: MRT4577_26460C.1.pep
MPPPLQPPLLLRLHLLFRSETQIPLLRRRPSCDAPHCRTRRVGGGGSGLRHRFWRNIVQKGDTVVDATCGXGNDNDTLALLKMVADKTGRGCVYGMDIQESAIENTSSFLKMAVDDEHHVWV

SEQ ID NO: 288784 - protein, 111 aa, Zea mays
  unsure (1)..(111): unsure at all Xaa locations
  Clone ID: MRT4577_26461C.1.pep
FLYSGDDPAATRPIAGPGGLEAAAVGFVTGKRKATEVAXRRFWRNIVQKGDTVVDATCGXGNDNDTLALLKMVADKTGRGCVYGMDIQESAIENTSSFLKMAVDDEHHVWV

SEQ ID NO: 288785 - protein, 290 aa, Zea mays
  Clone ID: MRT4577_26462C.1.pep
MAGKEILHKVKDKVKDAFSSSGPETGKGKTKLSGKRVKHGYHLVKGKSNHPMEDYLVAEYRQVGEHDLGLFAIFDGHLGHTVPDFLSSHLFNNILSEPEFLSDPETAIRNAYQLTDQKILENAAELGRGGSTAVTAILIGSDKFVKLVVANVGDSRAVISKNGVAKQLSVDHEPNMERQTIEQKGGFVSNLPGDVPRVDGQLAVARAFGDRSLKKHLSSDPYVVEQTIDENTEFLILASDGLWKVMSNQEAVDEIKDCKDAQAAAKHLTEQAVNRKSKDDISVIVVKFMC

SEQ ID NO: 288786 - protein, 67 aa, Zea mays
  Clone ID: MRT4577_26463C.1.pep
ILGLQVHVLCLYQPHRIQCSVNLSDLSSMVFGNVIHGLWRDPRPGRTQHGYCRFSRSNRDIWWIDHG

SEQ ID NO: 288787 - protein, 46 aa, Zea mays
  unsure (1)..(46): unsure at all Xaa locations
  Clone ID: MRT4577_26464C.1.pep
NELSXIPGRHQAGWDTPPRGAGTRGGXAPLGPPTRSSCPPPSTGET

SEQ ID NO: 288788 - protein, 45 aa, Zea mays
  Clone ID: MRT4577_26465C.1.pep
LYFQFQQVRRYLLHRVLLRKCQIAKYQLENKQFVSLEIKYFIYLE

SEQ ID NO: 288789 - protein, 141 aa, Zea mays
  unsure (1)..(141): unsure at all Xaa locations
  Clone ID: MRT4577_26466C.1.pep
RVRPTPVRLKGHFDYSFASAWSPDGRTFATGNQDKTCRIWDARNLXKSLHVLRGNLGAIRSIRFTSDGQFMSMAEPADFVHVFDVGSDYTRRQELDFFGEISGMSFSPDTDMLFVGVWDRTYGSLLQFGRLYNHSYLDSLC

SEQ ID NO: 288790 - protein, 106 aa, Zea mays
  unsure (1)..(106): unsure at all Xaa locations
  Clone ID: MRT4577_26467C.1.pep
VGYGFREGGYMKLADKILQTYNGTHMPGTEHTYRKNCASIKSEKRRPEPRTDHSNLVRDLAPDVTXHLLQETFQVNYPSVRGAEVVTDTNTGRSKRYGSVKVPHEN

SEQ ID NO: 288791 - protein, 118 aa, Zea mays
  Clone ID: MRT4577_26468C.1.pep
CSFRWGCGPFLFSFPPVLADLWRALIISSWVASPFVLVLSSCQFYRFPCLVLAISHVLGCLGVPVSSPCLLRVSPLGWPWASPPDPLPLPVRFFCGNLWVFRACPCVKTGKHSKKPPN

SEQ ID NO: 288792 - protein, 450 aa, Zea mays
  unsure (1)..(450): unsure at all Xaa locations
  Clone ID: MRT4577_26469C.1.pep
LGTSRPAGAASFPISPNRSSVLLRRSDQRCSLLVTPAGCCSCLRHGRMAFLFNKFQEAIRTIAKSPMFARDPRHLQFEADVNRLFLYTSYYRLGENADEKDAEEIIDLASKASIADQQKQVQDNVHYELTHMCQAMDSILCPDTINDPSKGPSEAHNHSQRSGLSFAVGGAASANKQSAIIPATRPLTRAELSKKFRDHFGYTLDIGPSGIPHKDAGQGLFLSGQANAGAVLAIYPGVIYSPAYYRYIPGYPRIDVCNNYLITRYDGTIIDAKPWCFGGETRALWDGSDLVDYNAMAPKGSENNSDRVWRMLSKPLEKGXKGKXGEVLERRNPLAFGHFANHPPKGSSPNVMICPYDFPLTEKDMRVYIPNITFGGQETIRMKRFGSFYFKSGGSDNQAGDSLVLKTLVLVSTRSICDEELFLNYRYSNSKRRPEWYSPVDEEEDKRRWS

SEQ ID NO: 288793 - protein, 70 aa, Zea mays
  Clone ID: MRT4577_2646C.1.pep
SMTTSNQQNKFHHFWIIIIKTMERSKFICFLNQFLNTKVRAFHKEANKTNFTILELEHFIRKPTKQISQF

SEQ ID NO: 288794 - protein, 129 aa, Zea mays
  unsure (1)..(129): unsure at all Xaa locations
  Clone ID: MRT4577_26470C.1.pep
KIQAALPQGPYAVNLIHSPFDSSLEKGNVDLFLEKGVTVVEASAFMTLTPHVVRYRAXGLSRNADGSVNIRNRIIGKVSRTELAEMFIRPAPEHLLEKLIASGEITQEQAELARRVPVADDIAVEADSG

SEQ ID NO: 288795 - protein, 177 aa, Zea mays
  Clone ID: MRT4577_26471C.1.pep
TPPSPRRRSPSLPPHFLSVRTVLPSCSGVPTSVARFSSLPPAAALVYATVEWVGCSTSSKSYYRLGENADEKDAEEIIDLASKASIADQQKQVQDNVHYELTHMCQAMDSILCPDTINDPSKGPSEVHNHSQRSGLSFAVGGAASANKQSAIIPATRPLTRAELSKKFRDHFGYTLD

SEQ ID NO: 288796 - protein, 257 aa, Zea mays
  unsure (1)..(257): unsure at all Xaa locations
  Clone ID: MRT4577_26472C.1.pep
FSTTPIPVAAASFPISPNRSSVLLRRSDQRCSLLVTPAGCCSCLRHGRMAFLFNKFQEAIRTIAKSPMFARDPRHLQFEADVNRLFLYTRLVPLIKLQEVSGSPSSWRFCYTXSLAKPFVKVPFPEFLLLCXSYYRLGEDADEKDAEEIIDLASKASIADQQKQVQDNVHYELTHMCQAMDSILCPDTINEPSKRPSEAHNHSQRSGLSFAVGGAASANKQSAIIPATRPLTRAELSKKFRDHFGYTLDIGPSGIPH

SEQ ID NO: 288797 - protein, 49 aa, Zea mays
  Clone ID: MRT4577_26473C.1.pep
VPKFFFNGDGKIAPPPFYKRDPLNGRKRFFLRWEKFALKAKKILGGHPF

SEQ ID NO: 288798 - protein, 103 aa, Zea mays
  Clone ID: MRT4577_26474C.1.pep
GGRGPFLIYYFSTFHLPSFLRGARVLRPNVYLSCVEQHYENTYKGRFFIGKPWPPYAPAGTTFFFHVSLRRSSNPWGRGPWKLERATPGDTFPPRKGSLPFYY

SEQ ID NO: 288799 - protein, 75 aa, Zea mays
  Clone ID: MRT4577_26475C.1.pep
SLFHNRSYRSFVTKLGLPKLGMHFAASDDHLVREAALSGLLELSQDQTSGNALPDQDKLKRDPEEPNRRDQCDGL

SEQ ID NO: 288800 - protein, 115 aa, Zea mays
  Clone ID: MRT4577_26476C.1.pep
SQIHAEISKVKGLTAQEAAAAAAKAVAEAEAAIAQAEAAAREAEAAEAEAEAAQVFAKAAMKALKCKMLHIPWCGLTHAHHQQSWLEMIALLLCFLPVFFVTVHNFRLVNLEYAG

SEQ ID NO: 288801 - protein, 90 aa, Zea mays
  unsure (1)..(90): unsure at all Xaa locations
  Clone ID: MRT4577_26478C.1.pep
RVXPTPSVLPVPLLVSGPYALLPAGVCSRGPAIGSENVHVRKFIEPLGSGGSSIVVSSDERSGTVLLLVSRNTATFLKEYPDYIVYTTPT

SEQ ID NO: 288802 - protein, 81 aa, Zea mays
  Clone ID: MRT4577_26479C.1.pep
QKSSSHLVHSYARYLTTSQGDHFVARALLSPADPTLTLNALTKSTDNDLILLLLYTDVTPSAWRYDCRVTGSAQRGLPRMR

SEQ ID NO: 288803 - protein, 139 aa, Zea mays
  Clone ID: MRT4577_2647C.1.pep
SKSNDLQQKLRHLNYELKELRYRVEIKNPYATQSRWMKNDQVSNSSGLVENQQRAMPTASEHLEEAEQVNVGVNLNNPAEGVPAALLDVGKPCSTDNGISSTSVIEGNKSLGLSEQPSKIITDQTDRDSICRGSNSCEK

SEQ ID NO: 288804 - protein, 109 aa, Zea mays
  Clone ID: MRT4577_26480C.1.pep
MSDGEETISNPPVAEAEDVEVPAESSGGQMSVNDALKGVLKIALIHDGLARGLREASKALDRRQAHMCVLNESCEEEAYKKLVIALCSEHDIPLIKVPDGKVLGEWVGL

SEQ ID NO: 288805 - protein, 329 aa, Zea mays
  unsure (1)..(329): unsure at all Xaa locations
  Clone ID: MRT4577_26481C.1.pep
MEEAEEIVDSVNERNDDLLSAWCEMVNNKVTPLPATPLHILPAITTFCVSGYECYHLRYWTEITSETDPDHPYFKPCEMMQVFSLGLSSPLTHPVNIYGYFSVRDNWEPLRNYLFKRSRADPAMISQGCSFLPLCSPCRGIYVLQFFLVDIELWIKEEGEASADKLLFSGYVEIDTXGLXERMLRGRFQGDYLGLNMEFAFLGHSIETLIEVEAEAKQPTDVRISALTSGFDEEISLYDGKFCGSGSMFKHFVAVKKQEELHVVLKMDGSPYKWTFKAGAGVAAAPEHPVPGFTQYFVMNVSFRTRGKTASTWQWSCISNNVCISEIDP

SEQ ID NO: 288806 - protein, 124 aa, Zea mays
  Clone ID: MRT4577_26482C.1.pep
EMNSAESFYATPGAWQKSSYSGNGRNTKYDEGHGYWGTVEVDGDGADYMDDDASTNGPRQERDTSYHARQRNSRGSAAFRLRQHGHSFSWRESSDQNFLDGETQGSKEQGRGSSKNQQKHADTT

SEQ ID NO: 288807 - protein, 103 aa, Zea mays
  Clone ID: MRT4577_26483C.1.pep
RKHGLDGANKPGQRKRVKDWKTLFFHFAPSPRTKPSVFYLSIMSTRGKHGILNLLKAAASCNNPLVILLPIFCRQILGPTIPVFSACLCIFPVQSVKPEETKT

SEQ ID NO: 288808 - protein, 39 aa, Zea mays
  Clone ID: MRT4577_26484C.1.pep
WKNLANNRTKLNGERYALCSGALNAKGVEVTLIQTVTLA

SEQ ID NO: 288809 - protein, 89 aa, Zea mays
  Clone ID: MRT4577_26485C.1.pep
PGLFLSSEQSQSLILSQAVFKNKKRIHLKGHAVSGSEGKCLDVVTTLQQMGIYNEESDEDRPSILSQKKLSVTHDPHCYVQINHTPPFI

SEQ ID NO: 288810 - protein, 121 aa, Zea mays
  Clone ID: MRT4577_26486C.1.pep
FDASSAYSSRANNELKLNNASYVTCDLLGSIILARNESAGRQELHHQLLPIIHSRNHCHPLCLPDRVDFFVSPTAIRLGLCTVSPARSYVFFSYTKRKQPFFVGFFYPMFSVPEDGVARTL

SEQ ID NO: 288811 - protein, 113 aa, Zea mays
  Clone ID: MRT4577_26487C.1.pep
TVQSCGPSMMAQKKLSVEVVRHLREKDRSAKTTSLERRSASNIQDDQEIMAAMLKSLHISNDQYAETKPCKVATASIFFDGAELDRSNLRHVVCEKTMQSSLRASSCALVREC

SEQ ID NO: 288812 - protein, 62 aa, Zea mays
  unsure (1)..(62): unsure at all Xaa locations
  Clone ID: MRT4577_26488C.1.pep
IXXXXXHNKANCLRIKGTKFFTRVVQIYMSWSITILQEFFQNFXRKGYWKQLLNFRLGFVKL

SEQ ID NO: 288813 - protein, 135 aa, Zea mays
  Clone ID: MRT4577_26489C.1.pep
RRLSLARAAADGRPPMSIMWQAPAFAVLGAGEVFATIGILEFFYDQSPDGMKSLGTALAQLAVAAGNYFNSAVLAAVAAVTTRNGEAGWIPDDLDKGHLDYFFWFMAVLGVVNLLHFLHCSVRYRGSGNNSTYSS

SEQ ID NO: 288814 - protein, 38 aa, Zea mays
  Clone ID: MRT4577_2648C.1.pep
KKKKKKNKKKKKKKKKKKKKKKKKIKNKKNKKIKGKFL

SEQ ID NO: 288815 - protein, 131 aa, Zea mays
  unsure (1)..(131): unsure at all Xaa locations
  Clone ID: MRT4577_26490C.1.pep
QITWGGTLNKVKRNLKKAAPNIPIQLRINAKLSQSTGHVTGEINEKLQERSQIALAEIAAQLHIGSELVISILEPRLGTIVKGRLXGGQLYTPAYVSRITAMVRGAAGGITXATNLASVWNSLQQQLHEMH

SEQ ID NO: 288816 - protein, 100 aa, Zea mays
  Clone ID: MRT4577_26491C.1.pep
GRFFFFFFPFFFFFFFFFFFFYSFYYFFIQRKPLKTPLNTPRQSQRKGPAKSLTKPWTYSDNKPPFKQCSPQTTLTWRVTRSYPQEKAKSNYDHSNTINR

SEQ ID NO: 288817 - protein, 104 aa, Zea mays
  Clone ID: MRT4577_26492C.1.pep
RLNPCVVALPPNSHQGDVPILRHHVPLEAPSFLRSSAPSRPLQCFTLDIPAPSIPFPIPVPFPSSTRPFTDPLLRSLLIVHIDPCILYRSPSPFQNRRYRFPSP

SEQ ID NO: 288818 - protein, 150 aa, Zea mays
  unsure (1)..(150): unsure at all Xaa locations
  Clone ID: MRT4577_26493C.1.pep
TIGSAYIGASSRTSCNRPLPLHQCLALRPASACAMNMPCPCDELDGLHSAGTGLTTMMGTGGLYXPYPQYPRQPQGTPMGAAPXYSLGGQTSAMYQTLRLHSCQTLKRMMDVRTDMHDLRMTMHLERAAASSINHDEPAXLRQPEQPLQA

SEQ ID NO: 288819 - protein, 385 aa, Zea mays
  Clone ID: MRT4577_26494C.1.pep
KSAFWGHLLRHVMQQGQKNMVEFFDLLLSPASKILNTWFESEVLKATLATDAVIGAMAGVHTPGSGYVLLHHVMGETGGQRGVWAYVQGGMGSVSSAISKAALEAGVQIVTNAEVSQVMVNETSGMVEGVALVDGTEVHSPVVLSNATPYKTFVDLVPSSVLPEDFLCAIKAADYSSATTKINVAVDRLPQFQCCNTNLEGGPEHMGTIHIGSESMEEIDVAYREAADGISSKRPVIEMTIPSVLDKTISPPGQHVINLFVQYTPYKLSEGSWQDSNVRKAFAERCFSLIDEYAPGFSSSVVGYDMLTPPDLEREFGLTGGNIFHGAMGLDSLFLMRPAKGWSDYRTPVKGLYLCGSGAHPGGGVMGAPGRNAAAVVLEDHVKTK

SEQ ID NO: 288820 - protein, 265 aa, Zea mays
  Clone ID: MRT4577_26495C.1.pep
RLHAVLSNLGMVSPVNSGERLFVGEIVVGEISALQKAVTDSMNNYKKVELAQASVDGVKVDGLDTNLAVMKELLSPVSELWRVLLLLTSWDEPMKSMLFCFLFSYIIIRGWVIYFIVTVLLFSATFMFLTRLTNQGKQMSEVKVVSPPPLNTMEQLLAVQNAISKIEELVQDANIVLLKIRALLLAFPSQATDRAILALVLMALSLAIVPTKVLLLLVFLEVSTNNSPLRRASTERCTRRLREWWFSIPAAPVVVEKEKEDKKTR

SEQ ID NO: 288821 - protein, 63 aa, Zea mays
  Clone ID: MRT4577_26496C.1.pep
PTRKRITFPKKKKKKKKKKKKKKKKKKIKKKKKKKKKKKNLKKKKKKKKKVFPCQGGRLKGNF

SEQ ID NO: 288822 - protein, 104 aa, Zea mays
  unsure (1)..(104): unsure at all Xaa locations
  Clone ID: MRT4577_26497C.1.pep
TATGRWPGPLKVSIRGRGLRVATSCNLRASGSPLKYSKTGVGKFSKHLGRGSDLLVTIKRVRTFFLKTFFVKKNRKKKNKKKNKKKKKKKKNKKXKKKKKKKAA

SEQ ID NO: 288823 - protein, 90 aa, Zea mays
  Clone ID: MRT4577_26498C.1.pep
VGRRWVGMGFQNGGGVCGPCPSSDMLLAAAITSLLGSGVVVTTNFDDVWHPSLAYDHFVYDCHLLKLLSLLHLSAEGSCQGPSSCTARPS

SEQ ID NO: 288824 - protein, 175 aa, Zea mays
  unsure (1)..(175): unsure at all Xaa locations
  Clone ID: MRT4577_26499C.1.pep
MRKSIRIHIGQADIQDXNACWELYWLEHGIEADGQMPDDTTIGGGDDALXTVFSETXRGKPEPRAAFVDLEPTAIPEARTETYRQLFHPEXLLAXKEDASNNFGXGHYPFLGDXDDLCLDRIRNLAXDICTGLQGLLDFNAAAGGTASGLGCLLLXRLSXIDYGMKFKLVITAYP

SEQ ID NO: 288825 - protein, 84 aa, Zea mays
  Clone ID: MRT4577_2649C.1.pep
LAHAICQSIRRTQSPSAMTHQFSHCLASVSFSLAWICFARFLLFFFQFIGVPFPLSFLSSALHLFKGHTYLIPRLDFFFASTLP

SEQ ID NO: 288826 - protein, 68 aa, Zea mays
  Clone ID: MRT4577_264C.1.pep
TWGKGLPPPILKDLQKSVTKNEVTRPPYKPNITIGAPPTPKKNTLSGDPKGCTPSQRKNTQEGSTPLF

SEQ ID NO: 288827 - protein, 349 aa, Zea mays
  unsure (1)..(349): unsure at all Xaa locations
  Clone ID: MRT4577_26500C.1.pep
LCRRVRCAQDRGKDLGGFIEEGFGPQGLGIVSIAGVPGYPELRKRLLRLAPRIVSLPDDVKKQLEDPDSRYHFGWSRVEEKFESERWDTAKGSYFANPVFDVPTTDDELVTRYPSYCRPNIWPKDHLPELEIAFKGLGKLMLEVGLMLAHHCDRYVIQRGVGQYIGESLEKTLARSRCPKGRLLYYFPKSFSKQDEVSSWCGWHTDYGFLTGLTCGLFTRKSEEVPCPDIGTGLYVRTRDNQVVKVTLVDDELVYQIGETAEILSRGHLCATPHCVKXLPSRENASDVGRSTFVLFIQPNWDEPLKLPSEIRYHQECIPPTRTLAYGEYSERVLASFSGKSVEQTLMPQ

SEQ ID NO: 288828 - protein, 54 aa, Zea mays
  Clone ID: MRT4577_26501C.1.pep
HHSTRVCQLSIHTPVVPCGQGACQQGSGVAAGATLPCLGSNPVCAPLSKKKKKG

SEQ ID NO: 288829 - protein, 86 aa, Zea mays
  unsure (1)..(86): unsure at all Xaa locations
  Clone ID: MRT4577_26502C.1.pep
FRRPHLSCLTLSYTTPSTPVRPWGACNATTDPTFCRSSLPPRGKGDLYKYGRFSVAESLAGARXYEHLVDRYLARHRHLYWSAIAA

SEQ ID NO: 288830 - protein, 106 aa, Zea mays
  Clone ID: MRT4577_26503C.1.pep
MPPSTYFMTARSDHNLNFSVHEQDSTMLPNEQLTYAGAGQIDLLPAETLSRDKLPENLLELQGLQNISNLQSNLVAPRGVSAQFNTWGLSSTVEHSWTFRTASCLI

SEQ ID NO: 288831 - protein, 130 aa, Zea mays
  Clone ID: MRT4577_26504C.1.pep
LGTSRPAGNTIFQSIHTRTYETRGPLSTNAELRRNEWLTTNKRTTATEEVHDKGPVRLRAPLCESPPKIPQREVRGGKRGIMRRGQPPPPSWQIRRPLLPGVPDHGSRGHQHLTSGEFHQRRESFLARGN

SEQ ID NO: 288832 - protein, 114 aa, Zea mays
  unsure (1)..(114): unsure at all Xaa locations
  Clone ID: MRT4577_26505C.1.pep
RELRTTECELGTVASLNAVSSLEDVPPFDTYXGPYTQYRFLGNLXQITSKYRPTITPIGHGAYRIFCSALNSETNEMVPVNKIINSFDNHMDAKRTLLENNLLRHLDHENVITI

SEQ ID NO: 288833 - protein, 93 aa, Zea mays
  Clone ID: MRT4577_26506C.1.pep
RPTPVSAMCHVWRFSLLEYPFSCKGAWFTVISCEVWLASCMKSFSLKLQGLFLRFSSSITSFQQVIPTLFWVRTPWSPLKMSPFRLRCGAGSR

SEQ ID NO: 288834 - protein, 530 aa, Zea mays
  Clone ID: MRT4577_26507C.1.pep
MSGGGGGGGEDRISILPDGVIGEIVTRLPTADAVRVQVLSRRWRHIWISCPLNLDLGSPNYYTDYKRVVSGILAAHPGPCRRLKVDWPYDDGESYNHWLQSPALVGLQELGIEPEYSSLWLDKKTLPRGDNTRALPERALFQFAPTLRLLRIGYHTFPSVGAVAALRLPHLELISFCCVDISEATLHWMLAACPVLRTLVLDGCTGFATVRINSPTHYKFAISPADSSITNDYDPYFLDYDYENPTVRVTTWQVIIEDAPLLEKLVLCRRSAAVESFQLLVVSAPRIRVLGSLSFSIPKLEIGGTVFQPTVRRVNRVGPDDVIMEKRLLMQAVMLATTLRTVKILALEDADSIDVVSDYLKCFPCLEKLYISASQGYRSAGSYDKQNPIECLERHLKMVALDGYDGMGPHVKFAQFFVRNAQLLELMKFRIFRNYHCEPGKTKAWIEDQQRQLQVRSMTSRPVKFKFVHDSRYNQDVYCGEDISDLSEHIHDDPFDQWFESEKEAPRHAEGKEDAIVWNSSQRLDSFDQS

SEQ ID NO: 288835 - protein, 106 aa, Zea mays
  Clone ID: MRT4577_26508C.1.pep
NFVRRCTATSKTRGRCASFVRWATARTGARLFGSCPPPLWAARSARWRGSRRDSISTSPCPPWRVPPSITRSGLSSSVLTSAAVQTKYYVAGNDGKEQIHALPLKK

SEQ ID NO: 288836 - protein, 92 aa, Zea mays
  Clone ID: MRT4577_26509C.1.pep
LVDLLRNAVHPATGKTGHPATGLSRPQPPRDKIRAHGPLWENKSGLLYSRATGIEKHLNTSDGPDRATEQGDEGRHRHARGTSLDRHGARQR

SEQ ID NO: 288837 - protein, 56 aa, Zea mays
  Clone ID: MRT4577_2650C.1.pep
QHSCEDHILAGEWRLVNRLYVTEEGAISESVPGNIQCVFKALEQHLYTSEGILESY

SEQ ID NO: 288838 - protein, 35 aa, Zea mays
  Clone ID: MRT4577_26510C.1.pep
CSPASYFTYLWNYSWVVHWTYPKLIAHKRVIVVST

SEQ ID NO: 288839 - protein, 99 aa, Zea mays
  unsure (1)..(99): unsure at all Xaa locations
  Clone ID: MRT4577_26511C.1.pep
TGENPGRPTRTXHTXXAVLLDNXAIYDICRLCLFIKRPTXYTNLNXLVSQVISSLTASLKFHGALNLDFNDFQTNLVPYPSIHFMLSSYAPYISAEKAY

SEQ ID NO: 288840 - protein, 49 aa, Zea mays
  unsure (1)..(49): unsure at all Xaa locations
  Clone ID: MRT4577_26512C.1.pep
GRVFLSIWSRLRGPNPNDPFVPEIVPMYKTPRAKFXSPPRSWTQKYPMG

SEQ ID NO: 288841 - protein, 74 aa, Zea mays
  Clone ID: MRT4577_26513C.1.pep
KPQCLLLAHRRPTFSYHSQCILFSVSYMFLINIFDISKFLIWPFSTLFFLHLLFLNPISTIYLLFHPYSFYPQN

SEQ ID NO: 288842 - protein, 86 aa, Zea mays
  Clone ID: MRT4577_26514C.1.pep
KRPRPPVATCRTSTEVAAPWNRSWYIKFVDAHRVRHRVLELRGGTSLLDVNPLDGDRDRDLDLLQVNGGQLRRDLLVPSQLWASPD

SEQ ID NO: 288843 - protein, 70 aa, Zea mays
  Clone ID: MRT4577_26515C.1.pep
KMEKNGKEKKRLLRTVSLMSFRGIGGLFGRLCLLATATGHHLRRLFGQQKRVDIWEKICDYGGGKSSPSP

SEQ ID NO: 288844 - protein, 53 aa, Zea mays
  Clone ID: MRT4577_26516C.1.pep
IMNVVLNWYMRAVRSNSISSNVAVQQNLFIPKHDHRILRHAKRDCLLAVPSQS

SEQ ID NO: 288845 - protein, 65 aa, Zea mays
  Clone ID: MRT4577_26517C.1.pep
NTTNLISIISNYFIGVSEIIPINFNAWEITNGENPVTWGSLATLLLLGLSCGSNNPVDHLYRWQG

SEQ ID NO: 288846 - protein, 45 aa, Zea mays
  Clone ID: MRT4577_26518C.1.pep
LLAMLQDKNMQIYQYTRFQGVRFRSVYSKHFLFVFLCLKVHLLHM

SEQ ID NO: 288847 - protein, 96 aa, Zea mays
  Clone ID: MRT4577_26519C.1.pep
DLSPCMCERKATVPSHCNSNQPYRLHTHNIGNVKIPLHLNPPFPTYTFSLLASATRIRLALTVTINILLTRTGNGISFAFQYQMSWPPWPCVLPLP

SEQ ID NO: 288848 - protein, 57 aa, Zea mays
  Clone ID: MRT4577_2651C.1.pep
GESVVLSSHLDDCHKVFSMFLLFFTLPFFLLLIKRNFKVNGMVGSHRLRTRSPPSIS

SEQ ID NO: 288849 - protein, 59 aa, Zea mays
  Clone ID: MRT4577_26520C.1.pep
MIVGAKVLFRGTHWLRFWAQLQKDEADGVLIKNVCRRLESVAMQFCVNFGWRFSNRIAL

SEQ ID NO: 288850 - protein, 77 aa, Zea mays
  Clone ID: MRT4577_26521C.1.pep
QGQGFQTQLHQEPKEALFFCPVFFQGISSLNVPLEAFCYAKFFFYSQEYRPPFPKRFNTQFCSLWFLNSFSSLPVLL

SEQ ID NO: 288851 - protein, 147 aa, Zea mays
  Clone ID: MRT4577_26522C.1.pep
SSCLHSWLRLLLLWLSPGCLRVCCLIFSRSCQSASFCLCLRCPLVRLVLFSLFPFILSLFPLLLPFPAFGLLSLSLFLSGDGCVRSPPPWLACDGGPLRFVCGLGVVLVVVPCVWLGGFVVLFGACRALVAVALSGARLLALARVHP

SEQ ID NO: 288852 - protein, 35 aa, Zea mays
  unsure (1)..(35): unsure at all Xaa locations
  Clone ID: MRT4577_26523C.1.pep
PRPMRSSRHLSQXRAQSILIWLRGRTHLNSHDTIS

SEQ ID NO: 288853 - protein, 74 aa, Zea mays
  Clone ID: MRT4577_26524C.1.pep
CTLLFLLSRIKLISIHPFPNLPLNYPPVPSPDNHPIPTPLEAASPFPSQDISVLSLTIPIPPAVASCSSRAFSA

SEQ ID NO: 288854 - protein, 112 aa, Zea mays
  Clone ID: MRT4577_26525C.1.pep
LRTQKKKKKNCEFIGKNPKNPKKKKKKKKKGRPHKRTQAPAPGRAPPKPPEGATKNQPTGRRNHRRGGENPGVPQRKPLAAHPPFAGGRNPEGARTDRPTQQLPSLKGKGDP

SEQ ID NO: 288855 - protein, 104 aa, Zea mays
  unsure (1)..(104): unsure at all Xaa locations
  Clone ID: MRT4577_26526C.1.pep
PKWRAEPLDSRCSAISSPGQHTAAWCGTAVSNRGDRETADGRMGEQWRSXDRGWRMADERTADGRAVEWRSGGRAVEGWRSAXWADGGVCVRRAASPRVVPGAA

SEQ ID NO: 288856 - protein, 80 aa, Zea mays
  Clone ID: MRT4577_26527C.1.pep
HFESCLQQKSTTTTTKEAKMAPVGMTYYEKAQSTFKPPLIANDNAFLGDISSSEKNDADKPISCGLYRLEKGTPLVYEYT

SEQ ID NO: 288857 - protein, 507 aa, Zea mays
  Clone ID: MRT4577_26528C.1.pep
MHKLGIKDKNEAARIVALVKNQTTMAPKKASATGAAALQPLDPNQETLSLREARSQKRKAVSPTPQEDELDQEIREMEMLHQQVQRKKEKMARLAELQRQIDEASEEVRHLTQDEQNRRPQHKDLHQEDFFNEDDWYENFHHGNFAFDDASPLSAELQATPWPPSYKPPQLPIFDGHSDPKQFLMSYKATVSSYGGNIAVMAKSFVMAVRSIAQTCFQGFRTKPVTAQALFQCTQDHEEYLQAYVRRFLRLRAQAPTVPNEIVIEVMIKGLWPGPSAQYFARKPPQTLEKLLQKMDEYIRADNDFRQRREEAFRFSEMTRGFGGRFYPRHVRSIHNSTQNDDKGSQQQRPQGSSQASGQQQSSFRPPAPRGRGARGFGGRFGDQPRRTFCLFCGENKGHTTRMCQVTIQKQKEIAEAAAQQGQPKQIMHTASYHSPYIPEYVGNHPAVSVASASQPQASWQQPPPPPPLQQGQQPEGGQYAQHQRDFREQSEARTVNSTVPESKHIY

SEQ ID NO: 288858 - protein, 458 aa, Zea mays
  Clone ID: MRT4577_26529C.1.pep
MAPKKASATGAAALQPLDPNQETLSLREARSQKRKAVSPTLQEDELDQEIRDMEMLHQQVQRKKEKMARLAELQRQIDEASEEVRHLTQDEQNRRPQHKDLHQEDFFNEDDWYENFHHGNFAFDDASPLSAELQATPWPPSYKPPQLPIFDGHSDPKQFLMSYEATVSSYGGNTAVMAKSFVMAVRSVAQTCFQGFQMKSVTAQSLFQCTQDHEEYLQAYVRRFLRLRAQAPTVPNEIVIEAMIKGLRPGPSAQYFARKPPQTLEKLLQKMDEYIRADNDFRQRREEAFRFSEMTTGFGGRFYPRHASGQQQSSFRPPAPRGRGVRGFGGRFGDQPRRIFCLFCGENKGHTTRMCHVTIQKQKEIAEAAAQQGQPKQIMHTASYHSPYIPEYVGNHPAVSVASASQPQASWQQPPPPPPMQQGQQPEGGQYAQQQRDFREQSEARTVNSTMPESKHIY

SEQ ID NO: 288859 - protein, 42 aa, Zea mays
  Clone ID: MRT4577_2652C.1.pep
TLYNIYYAPSTHSYPLNPPHLSFLFFYRSQTKCVTKLYQGSL

SEQ ID NO: 288860 - protein, 625 aa, Zea mays
  Clone ID: MRT4577_26530C.1.pep
MAGPEKTVVWFRRDLRIQDNPALAAAAKGGSVLPIFIWCPSDYGQYYPGRCSRWWLKQSLVHLGKSLELLGCPLVLIRAEDSTLAALLECVRSISATRVVYNRLYDPISLVLDNKIKNELPAHGISIQSFNGDLLYEPWDVYDENGQAFTTFNKYWEKCMSLPIEISQYLAPTRLVAAPGLANVRCCSIDDLGLESSKDVESSNALLSRAWSPGWRNAENMLEEFVSYGLLEYSEHGMKVGGSTTSLLSPYLHFGELSVRMIYQLVKMRQVKWQNEGKSEAEESVRLFLRSIGFREYSRYLCFNYPFTHERSFLGNLKHYPWLLDEGRFKSWRQGMTGYPLVDAGMRELWATGWTHNRIRVIVSSFAVKFLQIPWIWGMKYFWDVLLDADLESDILGWQYISGSLPDGHELSRLDNPEVQGQKYDPDGEYVRTWIPELARMPTEWIHSPWAAPNSILQVAGVELGFNYPKPIVELHMARECLDDAISTMWQLDTAAKLAELDGEVVDDNLNNIRNFDIPKVVLNKKLSPSTSSMEHRVLSTNGKDEKSQPTEVKALYKQIIRDDMMNDSNMDDTCSTANLKVTRKRSSSDSYFQKTADRDGTSKVEDNDSEDSGTSISRPSKKAA

SEQ ID NO: 288861 - protein, 191 aa, Zea mays
  unsure (1)..(191): unsure at all Xaa locations
  Clone ID: MRT4577_26531C.1.pep
IRADNDFRQRREEAFRFSEMTRGFGGRFYPRHVRSIHNSTQNDDRGGQQQRPQCSSQASGQQQSSFRPSAPRGRGARGFGGRFGDQPRRIFCLFCGENKGHTTRMCHVTIQKQKEIAEAAAQQAQPKQVMHTASYHSPYIPEYVGNHSAVSVASASQPQASWQQSPXPPPMQRGPQPPRSQHTYLRRRRRH

SEQ ID NO: 288862 - protein, 654 aa, Zea mays
  Clone ID: MRT4577_26532C.1.pep
MAGPEKTVVWFRRDLRIEDNPALAAAAKGGSVLPIFIWCPSDYGQYYPGRCSRWWLKQSLTHLGKSLELLGCPLVLIRAEDSTLAALLECVRSISATRVVYNRLYDPISLVLDNKIKNELPAHGISVQSFNGDLLYEPWDVYDENGQAFTTFNKYWEKCMNLPIEISQYLAPTRLVAAPGLANVRCCSIDDLGLESSKDVESSNALLSRAWSPGWRNAENMLEEFVSYGLLEYSEHGMKVGGSTTSLLSPYLHFGELSVRMIYQLVKMRQVKWQNEGKSEAEESVRLFLRSIGFREYSRYLCFNYPFTHERSFLGNLKHYPWLLDEGRFKSWRQGMTGYPLVDAGMRELWATGWTHNRIRVIVSSFAVKFLQIPWIWGMKYFWDVLLDADLESDILGWQYISGSLPDGHELSRLDNPEVQGQKYDPDGEYVRTWIPELARMPTEWIHSPWAAPNSILQVAGVELGFNYPKPIVELHMARECLDDAISTMWQLDTAAKLAELDGEVVDDNLNNIRNFDIPKVVLNKKLSPSTSSMEHRVLSTNGKDEKSQPTEVKALYKQIIRDDMMNDSNMDDTCSTANLKVTRKRSSSDSAFNVPSCSSSLVMESRIHHNEPSSVLYSGYFQKTADRDGTSKVEDNDSEDSGTSISRPSKKAA

SEQ ID NO: 288863 - protein, 505 aa, Zea mays
  Clone ID: MRT4577_26533C.1.pep
MAPKKASATGAAALQPLDHNQETVSLREARSQKRKAVSPTPPEDELDQEIRDMEMLHQQVQRKKEKMARLAELQRQIDEASEEVRHLAQDEQHRRPQHQDLHQEGFPNEDDWYDNFHHGNFVFDDASPLSAELQATPWPPSYKPPQLPVFDGHSDPKQFLMSYEATVSSYGGNAAVMAKSFVMAVRSVAQTWYSSLRPGTITSWQKLKDLLLTSFQGFQTKPVTAQALFQCTQDHEEYLQAYVRRFLRLRAQAPTVPNEIVIEAMIKGLRPGPSAQYFARKPPQTLEKLLQKMDEYIRADNDFRQRREEAFRFSEMTRGFGGRFYPRHVRSIHNSTQNDDRGSQQQRPQCSSQASGQQQSSFRPPAPRGRGARGFGGRFGDQPRRIFCLFCGENKGHTTRMCHVTIQKQKEIAEAAAQQAQPKQVMHTASYHSPYIPEYVGNHPAVSVASASQPQASWQQPPPPPPLQQGQQPEGSQYAPHQRDFREQSEARTVNSTVPESKHIY

SEQ ID NO: 288864 - protein, 68 aa, Zea mays
  unsure (1)..(68): unsure at all Xaa locations
  Clone ID: MRT4577_26534C.1.pep
RDPDRAAILRVKEIKKGRRAMFSMFAFFIRAXVPGEGPVENLAKPLRAPLGKNLFPVISGAPEGTPSL

SEQ ID NO: 288865 - protein, 74 aa, Zea mays
  Clone ID: MRT4577_26535C.1.pep
NNGHPKNFFSYVIFWFESSTRNVKKQQSILLQACKQTAKPRASTPTELTLLGHPKQQSFLLQACRGVGISDSLA

SEQ ID NO: 288866 - protein, 733 aa, Zea mays
  Clone ID: MRT4577_26536C.1.pep
RMLVVSEPLLIGGDYYSRVEGWGIISNLCKAAWLATMMAAMRPSIDNIHDLVRHNTARAFSVVFFALGIPALLPFLKAVCQSKKSWQARHTGIKIVQQIAILMGCAVLPHLKSLVEIIEHGLSDENQKVRTITALSLAALAEAAAPYGIESFDTVLKPLWKGIRSHRGKVLAAFLKAIGFIIPLMDALYASYYTKEVMQVLIREFQSPDEEMKKIVLKVVKQCVSTEGVEADYIRNDILPDFFKHFWVRRMALDRRNYKQLVETTVEMANKVGVADIVGRVVEDLKDESEPYRRMVMETIEKVVANLGASDIDARLEELLIDGILYAFQEQTSDDANVMLNGFGAVVNALGQRVKPYLPQICGTIKWRLNNKSAKVRQQAADLISRIAIVMKQCQEEQLMGHLGVVLYEYLGEEYPEVLGSILGALKAIVNVIGMTKMTPPIKDLLPRLTPILKNRHEKVQENCIDLVGRIADRGAEFVPAREWMRICFELLEMLKAHKKGIRRATVNTFGYIAKAIGPQDVLATLLNNLKVQERQNRVCTTVAIAIVAETCSPFTVLPALMNEYRVPELNVQNGVLKSLSFLFEYIGEMGKDYIYAVTPLLEDALMDRDLVHRQTAASAVKHMALGVAGLGCEDALVHLLNYVWPNIFETSPHVINAVMEAIEGMRVALGAAVILNYCLQGLFHPARKVREVYWKIYNSLYIGAQDALVASYPALEDDGDNIFSRPELAMFV

SEQ ID NO: 288867 - protein, 562 aa, Zea mays
  Clone ID: MRT4577_26537C.1.pep
MPTASNPSILSAVDTKREERMAEPNPELSDLITQTKKKNIVPKFTEIFPVEDTAYPYSAFITSVRKDVIKYCTNHTGIVQPVLPLEKNVPELWFYTELKTKTRSITLAIRMDNLYLVGFRTPGGVWWEFGKMAPKKASATGAAALQPLDPNQETLSLREARSQKRKVVSPTPPEDKLDQEIRDMEMLHQQVQRKKEKMARLAELQRQIDEASEEVRHLTQDEQNRRPQHKDLHQEDFFNEDDWSVAQTWYSSLRPGTITSWQKLKDMLLTSFQGFQTKPVTAQALFQCTQDHEEYLQAYVRRFLRLRAQAPTVPNEIVIEGMIKGLRPGPSAQYFARKPPQTLEKLLQKMDEYIHADNDFRQRREEAFRFSEMTRGFGGRFYPRHVRSIHNSNQNDDKGSQQQRPQCSSQASGQQQSSFRPPAPRGRGARGFGGRFGDQPRRIFCLFCGENKGHTTRMCHVTIQKQKEIAEAAAQQGQLKQVMHTASYHSPYIPEYVGNHPAVSVASASQPQASWQQPPPPPPMQQGQQPEGGQYAQQQRDFREQSEARTVNSTVPESKHIY

SEQ ID NO: 288868 - protein, 134 aa, Zea mays
  Clone ID: MRT4577_26538C.1.pep
CHPSSQHGLLLTRERDKNLHLQHMGTKNKASWFGDIKAAPVLDVASLKSTMKKVRRLSGPVMSWTPRACYFGRRCPHVSFFYVLVKTIHEIFLHENSPPSLTLQELSMYILFLALLGMIECILVRLISCLFQLI

SEQ ID NO: 288869 - protein, 104 aa, Zea mays
  Clone ID: MRT4577_26539C.1.pep
GLGCEDALVHLLNYVWPNIFETSPHVINAVMEAIEGMRVALGAAVILNYCLQGLFHPARKVREVYWKIYNSLYIGAQDALVASYPALEDDGDNIFSRPELAMFV

SEQ ID NO: 288870 - protein, 70 aa, Zea mays
  Clone ID: MRT4577_2653C.1.pep
TASHETTQCPNHTQVVHTVNLGNTSFCLTTHPGGKHTSNTTLIQTTVETALRVTAAILENKHAVKAATDS

SEQ ID NO: 288871 - protein, 118 aa, Zea mays
  Clone ID: MRT4577_26540C.1.pep
MAAPLTAVRARLLLLPVTCTAAGTTGRPAPPSKSSRPRLLPPGTTRCRCSRPPMEAVAPVSAAAVAALLLLPADAALAVGGELGILEGRSFALLHPLIMGGLFAYTLWAGYLGWQWRR

SEQ ID NO: 288872 - protein, 183 aa, Zea mays
  Clone ID: MRT4577_26541C.1.pep
MAEVEQQQDTPKLFNRWTFDDVQVNDISLNDYLAVNATKHAMYLPHTAGRYSKKRFRKAQCPIVERLTNSLMMHGRNNGKKVMAVRIIKHTLEIIINSGPREDATRIGSAGVVRRQAVDISPLRRVNQAIYLLTTGARESAFRNIKTIAECLADELINAAKGSSNSYAIKKKDEVERVAKANR

SEQ ID NO: 288873 - protein, 99 aa, Zea mays
  unsure (1)..(99): unsure at all Xaa locations
  Clone ID: MRT4577_26542C.1.pep
FSMFCHFERFYMMLFYIDLCCHYFFAIHFFLXFVMFCTYMPLYIIFYYFLYAFLFFFFFFFFFLFFFFFFFFFFFCISWQPIRSMLLFCGSTHASAHAS

SEQ ID NO: 288874 - protein, 113 aa, Zea mays
  Clone ID: MRT4577_26543C.1.pep
HTAGRYSKKRFRKAQCPIVERLTNSLMMHGRNNGKKVMAVRIIKHTLEIIHLLTDANPIQVVVDAIINRYSLTTSCPHSRSRLITVKPTRYYMLIPFSMLDPPPPPNRVCIPV

SEQ ID NO: 288875 - protein, 189 aa, Zea mays
  unsure (1)..(189): unsure at all Xaa locations
  Clone ID: MRT4577_26544C.1.pep
MACAAAHMFVYNATLCACDPGYYLXPIPRGGGNASSASTSCVSLPRSGDGFGDWQVGSVGASRNQSFYFLTPVLSLDVVRRLTQSQAVILWVALLTLLSWLAFCAAARFAGQDPERHKKLFGARFWVSRLDCIFDNNHYANDQQVLRKRKTELGGTFSVATLILFLGLVIVLLYQAINRRNAQVHRVKP

SEQ ID NO: 288876 - protein, 515 aa, Zea mays
  unsure (1)..(515): unsure at all Xaa locations
  Clone ID: MRT4577_26545C.1.pep
SPYLPFPFSHSHAAPCRPPPRSRGLVAVAIPPRSATRRAHRLQISRLRCSSPSPRPRRGEERRSPLRLYETVLQDRPLARRTHKLGGGGGDMKGSTIPSVAIMPSPLFLWRFKVVLFLLWGLCCCKIGWDSVMRMSVDLRDLFLYEAFLYYNPLLLVALMIWLWGVNLWVFAQSSVNYAKVFDLAQTHLSHREIWRCATWLTLIVPTSMTAYLYLYSHGEVSLAASQPVLLYAILLMILLSPFDMFYLSSRFYFLRTVWRIILPLQAITFPDFFLADIFTSMSKVFSDLERSVCRMVNRQVATIAWFEADSICGSHSVAIPLVLVFPYLWRFFQCLRQYKDTKEKTCLFNALKYSTAIPVIFLSALKYHVYPDQWVGFYRPLWLISSVVNSLYSFYWDIKRDWDLSILTRIFMFKNPSIWTNLLYGQNWVFYWVLGSNLVLRCTWTYKLSAHLRHNYLTVFTIAALEILRRWQWVFFRVENEWNKMTAKQNLEMSSDMPSEGDRLLDSSXPHSVS

SEQ ID NO: 288877 - protein, 60 aa, Zea mays
  Clone ID: MRT4577_26546C.1.pep
HSYSDSWTPCPPKSSQAPYRAARLIAGKHHQPCKRIIYAIHTPRNKLILCTFSNTNFLYH

SEQ ID NO: 288878 - protein, 199 aa, Zea mays
  Clone ID: MRT4577_26547C.1.pep
MAEVEQQQDTPKLFNRWTFDDVQVNDISLNDYLAVNATKHAMYLPHTAGRYSKKRFRKAQCPIVERLTNSLMMHGRNNGKKVMAVRIIKHTLEIIHLLTDANPIQVVVDAIINSGPREDATRIGSAGVVRRQAVDISPLRRVNQAIYLLTTGARESAFRNIKTIAECLADELINAAKGSSNSYAIKKKDEIERVAKANR

SEQ ID NO: 288879 - protein, 612 aa, Zea mays
  unsure (1)..(612): unsure at all Xaa locations
  Clone ID: MRT4577_26548C.1.pep
MAVMAEVVSTTGAALRSPATQQPAAAGAAKGTDAEKLQFIEDMTSNVDAVQERVLGEILARNADTEYLSSRCGLAGATDRATFRAKVPMATYEDLQPYIRRIADGDRSPILSGHPVSEFLTSSGTSGGERKLMPTIEDELNRRQLLYSLQMPVMNLYVPGMDKGKALHFLFVKSETKTPGGLAARPVLTSYYKSNHFRNRPFDAYNNYTSPTAAILCADAFQSMYAQMLCAXRAEVLRVGAVFASGLLRAIRFLQLNWQELAHDLRTGTLSAKVTEPSIREAVAEVLRPDADLADFVEAECGKESWEGIITRVWPNTKYLDVIVTGAMAQYIPTLKYYSGGLPMACTMYASSECYFGLNLRPMCDPSEVSYTLMPNMCYFEFLPMGGAVDASQLVDLGRVERGREYELVITTYAGLNRYRVGDVLQVTGFHNSAPQFRFVRRKNVLLSIESDKTDEAELQRAVERASALLRPHGAAVVEYTSQAYTKSIPGHYVVYWELLQAKGGAAVDGETLEGCCLEMEEALNAVYRQSRVADGSIGPLEIRVVRPGTFEELMDYAISRGASINQYKVPRCVTFPPIIELLDSRVVSSHLSPALPHWTAGQRSGSGSGSD

SEQ ID NO: 288880 - protein, 219 aa, Zea mays
  unsure (1)..(219): unsure at all Xaa locations
  Clone ID: MRT4577_26549C.1.pep
QHRKRNPVPTTAEQRLRLLMLFVISASAVTATILPXQCPQAAIALLFPPYLSPTVXKVCENPMIKPYRIQQGIKEGXIPASHLDPPTMIKHYDSSNLGGINXDQKIRDQQRQQLGLANPADYSQQQXFLXFNQLTALNSAXYLQQQQLPISQIPDDYPQKXLPSNQLAEXNSPAYXIQQQQLLPFIQLAGESPDTFLTQPQVLPPYQHTETNGGTLIQL

SEQ ID NO: 288881 - protein, 117 aa, Zea mays
  Clone ID: MRT4577_26550C.1.pep
GHFMRTHPLQQLSDSCSHGNHEYSSTSSRFRLDKYVSKTTDERTCIDNHWCWPSLMHHVSTFLFLEPCHSVTVPTFISILLRCQCFPSCHHYPHCCCQNSGNSPLGLLSSPLPPCNR

SEQ ID NO: 288882 - protein, 100 aa, Zea mays
  Clone ID: MRT4577_26551C.1.pep
NLQVNDISLNDYLAVNATKHAMYLPHTAGRYSKKRFRKAQCPIVERLTNSLMMHGRNNGKKVMAVRIIKHTLEIIHLLTDANPIQVVVDAIINRYSLNLG

SEQ ID NO: 288883 - protein, 614 aa, Zea mays
  Clone ID: MRT4577_26552C.1.pep
MAVMAEVVSTTGAALRSPASQPLPAAVKNADAEKLQFIEEMTSNVDAVQERVLGEILARNAGTEYLAKYGLAAATTDRATFRAKVPMATYEDLQPYIRRIADGDRSPILSGHPVSEFLTSSGTSAGERKLMPTIEDELNRRQLLYSLQMPVMNLYVPGMDKGKALHFLFVKSETKTPGGLAARPVLTSYYKSNHFKNRPFDAYNNYTSPTAAILCADAFQSMYAQMLCGLCQRQDVLRVGAVFASGLLRAIRFLQLNWEQLAEDIEAGSLTPRVTDPSVREAVAGILRADPELAALVRSECSKGDWAGIITRIWPSTKYLDVIVTGAMAQYIPTLKYYSGGLPMACTMYASSECYFGLNLRPMCDPSEVSYTLMPNMCYFEFLPMDSAAASGGDASQLVDLARVEVGREYELVITTYAGLNRYRVGDVLQVTGFHNSAPQFRFVRRKNVLLSIESDKTDEAELQRAVERASALLRPHGAAVVEYTSQAYTKSIPGHYVIYWELLAKGPAGGAAVGEGTLERCCLEMEEALNTVYRQSRVADGSIGPLEIRVVRPGTFEELMDYAISRGASINQYKVPRCVTFPPIIELLDSRVVSSHFSPALPHWTPGQRSDSD

SEQ ID NO: 288884 - protein, 56 aa, Zea mays
  unsure (1)..(56): unsure at all Xaa locations
  Clone ID: MRT4577_26553C.1.pep
IGAGRIGSXYARMMIGGFKMDLMYYDLDXATRLENFVTAYGQVLKANGEEPVTWKK

SEQ ID NO: 288885 - protein, 47 aa, Zea mays
  Clone ID: MRT4577_26554C.1.pep
IISRYRTFYIGWRGYIVDAGARACYFEKHLDTFTHSMINANLRYIVA

SEQ ID NO: 288886 - protein, 83 aa, Zea mays
  Clone ID: MRT4577_26555C.1.pep
EFFSGHTSLHAEDQEKNCSTTSGVSNDVDLALSIADVEAAIRQAEDEADYMALKKLEEEEAVDNQEFSEEAAGRQEEDELVNE

SEQ ID NO: 288887 - protein, 71 aa, Zea mays
  Clone ID: MRT4577_26556C.1.pep
SPEKCIKIPSNVNKIHASEEHPKGHTVIHKLNLMVGLVFGLREYSFIPKDKIAPRQSAVGYQVLKMCLLFM

SEQ ID NO: 288888 - protein, 43 aa, Zea mays
  Clone ID: MRT4577_26557C.1.pep
GDTVQPINGRIRLCYVRDPKRRPFSHSSVINHHRRRCRLSTPS

SEQ ID NO: 288889 - protein, 96 aa, Zea mays
  unsure (1)..(96): unsure at all Xaa locations
  Clone ID: MRT4577_26558C.1.pep
IVISTTPDLXRGXLDKTAPXDCCIVTSIDADSXXAXFDKTAPGVRLXTSGQYEFEAGSXLPPPDSQRAPRWTRRLQCVAFLTYARQGRDGTLPNRQ

SEQ ID NO: 288890 - protein, 56 aa, Zea mays
  unsure (1)..(56): unsure at all Xaa locations
  Clone ID: MRT4577_26559C.1.pep
NITSATTCKVLXNXXWAGKPIHFSFSFDXISXSSYLEXXKRTLNMIPSEATKTKLL

SEQ ID NO: 288891 - protein, 95 aa, Zea mays
  Clone ID: MRT4577_2655C.1.pep
PRVRHQVFEMPPLTVEEALEQLDNVGHNFYCFRDEATGQVNILYRRKEGGYGLIIPKEDGNFDNKDTVGVAQPPPPPPPAAPEPSLAVHTAADNN

SEQ ID NO: 288892 - protein, 121 aa, Zea mays
  unsure (1)..(121): unsure at all Xaa locations
  Clone ID: MRT4577_26560C.1.pep
PAPGLPWVSSLGSPAGLYLPLFFRWSWLVALHLVVVPPLLPRCLGLPALLFPLPFVSFLSFCCLVELSLLSAFWAWVVWFVVPCAVFPLRVGASPSSFVVRGHRPXXSMFTPGSRPPLGLK

SEQ ID NO: 288893 - protein, 105 aa, Zea mays
  Clone ID: MRT4577_26561C.1.pep
FSPIWGAKTHFFRQKPGYPRGKKIPVPFMGGPLAKGQLFFFPPPPFFWSRPFFPGREKKDFSLSFYPGPPFCWPGGLPFFGWVMGWDLPVKNGPCVGLNYFLRVP

SEQ ID NO: 288894 - protein, 100 aa, Zea mays
  Clone ID: MRT4577_26562C.1.pep
KKWGGLFPQTGFSENKILKEFGAPVPLQVYPWEKKIFFPPHFCVGGPPAAWGENFLKKKGGGASGFFGRPRVLAPPLGSFFKALGGFFFLGKTVKKKIPP

SEQ ID NO: 288895 - protein, 115 aa, Zea mays
  Clone ID: MRT4577_26563C.1.pep
SSPIHTILNLLLLRTQTILGPYLSCTVAYSPIQNLISQPANWQIHTLLTHISAPTMTDRHSLSRTLLTHISHSPTISFHIQSRIYTPTASSSHTRIRIQIHSHHTSYATGSFLNP

SEQ ID NO: 288896 - protein, 114 aa, Zea mays
  Clone ID: MRT4577_26564C.1.pep
RARAGSCGRRSARRAGGATPPSSPPASPTSRGSGRSRREPPVAGSPCPCPRTDRSASSRFPDQGLISREVYAEQNTCARIEMNLPSSTFGSKLYRTDRSITSRARRLEAFIHVF

SEQ ID NO: 288897 - protein, 139 aa, Zea mays
  Clone ID: MRT4577_26565C.1.pep
SNCHRAPPHSPCTTRTTPRTGHLRLTPIITTISDLQIKQHGTLPISLLYISKRIHVLIESSTPRSRSITPYAYAKLPSQLPTKFPMMSSRRLSSSLHLQDYSQHITPSLITDNDYIFQDSSSDAPDSKTNFFSAYNMTP

SEQ ID NO: 288898 - protein, 182 aa, Zea mays
  unsure (1)..(182): unsure at all Xaa locations
  Clone ID: MRT4577_26566C.1.pep
SRDTPKYXTTSNNKGSSSDDNDDLTSLFANLTKYQNKKINELIETINEKDDILECREDLLVKEIFFVKLKDAYALEIEKXCENLSKELIICIDSISCLRTENANLIAKIEELNDCKPSTSTIEHVTICTRCRDVNIDAMNDHLAMIKEQNDHITKLNDKIAEDELENEKFKFCPVESRLRGG

SEQ ID NO: 288899 - protein, 96 aa, Zea mays
  Clone ID: MRT4577_26567C.1.pep
GYVRQIKFKVTVLGVVSIISSRVLSRSSPSPLPPRLAATAIDDGHLGSASALAAYPFERHTSSGQPWPRSCSRLVPPLIVVVPSRRLVSTTSEDCR

SEQ ID NO: 288900 - protein, 128 aa, Zea mays
  Clone ID: MRT4577_26568C.1.pep
KTRDHLPPALCKPCSVDGLSETVCVPGLSFFFFFASDKQGPKTSRVSERLATGTDWPNARGGTCQKSCEKRKRATAGRCRWSRATEGGGRVRRKERKAGDRRAAACRRLPPHSTYPRARALPDSDQPP

SEQ ID NO: 288901 - protein, 123 aa, Zea mays
  Clone ID: MRT4577_26569C.1.pep
SANEEESLRLNPRGPIAATATATPIRPPQLLPARLLLPVASSAERNTGFWSPRRRGFRPRRRPTSHHHHHRRSRGHLPDARVEGSSEQRIQNEVQRLLAGVGRTSHNNNLWPSFMYRGCKENT

SEQ ID NO: 288902 - protein, 106 aa, Zea mays
  Clone ID: MRT4577_2656C.1.pep
MFFFFVGGVEQGAGRVLKEAAGRCLRCGGAADLVETEKVLKLFFVPVWRWPGKDPAYLCRECGLLAPGSLGAESGPSLLLREARCGACSRAVDPQFRFCPFCGSAL

SEQ ID NO: 288903 - protein, 102 aa, Zea mays
  Clone ID: MRT4577_26570C.1.pep
FGSSTDTPFLVKLEADTNGGLLKNKGRETTKRDQAIVAKGQAGPQAHHRGAQPAEHQADDRIPQKEQARPGGGRASGAPHHQRDPGEPEEPPLDRRPSPGSK

SEQ ID NO: 288904 - protein, 92 aa, Zea mays
  Clone ID: MRT4577_26571C.1.pep
GTSRPAGFSSPSPRLALLCLGDDCATAAAAARLRRALCRRRFPTRYTTHPIFPYFCAKNRGPNDPNLSYLAISTRIRSIYKPNRIRGGDGEE

SEQ ID NO: 288905 - protein, 140 aa, Zea mays
  unsure (1)..(140): unsure at all Xaa locations
  Clone ID: MRT4577_26572C.1.pep
LSPKKIVADFSDEDDNADNGLRNVCFLDQIDPDRAGFPGWIDWTALPVVSXFAPYILDGEIGLDYRSYLATCCXNMVMMNNYAYXSELSYXLPLDKKRRXLPVSLEMHVCKRFYMHSEVGAAVSWDDALRSLMILLILTD

SEQ ID NO: 288906 - protein, 41 aa, Zea mays
  unsure (1)..(41): unsure at all Xaa locations
  Clone ID: MRT4577_26573C.1.pep
HIKVKYLXFSSLXSTSSLXXMHASSIFKVAMXLLNYACNHV

SEQ ID NO: 288907 - protein, 222 aa, Zea mays
  Clone ID: MRT4577_26574C.1.pep
MANDGDDGQSQDYLFKIVLIGDSSVGKSNLLARFARNEFYPNSKSTIGVEFQTQKLVIDGKEIKAQIWDTAGQERFRAVTSAYYRGAVGALLVYDISRRQTFDSVGRWLNELHNHSDMNVVTILVGNKTDLKHAREVSTAEGQALAEAQGLFFMETSALDSSNVAAAFQTVVKEIYSILSRKVFQSLEQKKSELQSLSSGKAVVLQGEANQTSSGGRWCCSS

SEQ ID NO: 288908 - protein, 89 aa, Zea mays
  unsure (1)..(89): unsure at all Xaa locations
  Clone ID: MRT4577_26575C.1.pep
GMRPHAVXNTSWAMLALIGAGQAERDPTTIDRAAKVLINLQLADGEFPQQEIIGVFNQNCMIGYSQYRNIFPIWALAEYRTRVHVARKK

SEQ ID NO: 288909 - protein, 145 aa, Zea mays
  unsure (1)..(145): unsure at all Xaa locations
  Clone ID: MRT4577_26576C.1.pep
CLLCPPLSLSPVYSRRTTRCRASHYSLSLIYYSEQSKERDVEERRNQETISLSCPSSWPACTRGSIGRIGAEWIRSGDRSLMKRMVILRRCHPPPPPAVLFGGCCRSAGGVRYGECRRNHAGKLGGAPRGTGGRGVFXGGGGGGG

SEQ ID NO: 288910 - protein, 91 aa, Zea mays
  Clone ID: MRT4577_26577C.1.pep
EYSFNGDLSGDQNVASFSTEKLRNRLHVEGVGEAVIKDCEQIIQSEFSQYQTQMKQRCEEYLSFIGSLPREVEVVNSVDSTVPEKSQLELF

SEQ ID NO: 288911 - protein, 334 aa, Zea mays
  unsure (1)..(334): unsure at all Xaa locations
  Clone ID: MRT4577_26578C.1.pep
MRTQTAMATTLLFLALLLVPHLAAATPGHQRRLLQSHGADDGSDVFVDPSYAFANPRLRDAYVALQAWKRAILSDPRNLTASWSGPDVCSYYGVFCAPSQADHYLTVVAAVDLNHADLAGHLPEALGRLADLSVFHVNSNRFCGLVPASFHAMHLLHELDLSNNRLVGAFPDVVLRLPSLRYLDLRYNEFEGPVPKELFDLPLDAIFINSNRFRFQIPDNVGNSPASVLVLANNDFGGCLPASVANMSGTLNEIILMNTGLKSCVPPELGMLTALTVLDVSHNQLMGAIPAELANLHSIEQLDLGXNXLTGDVPXEGICHLPHLQNFTYSYNYI

SEQ ID NO: 288912 - protein, 61 aa, Zea mays
  Clone ID: MRT4577_26579C.1.pep
LSIKTHISLPEASDYLKELDAGGWLLHTLKNAINYSFNVSDKSIRKLSSSREPAYACTCMP

SEQ ID NO: 288913 - protein, 114 aa, Zea mays
  unsure (1)..(114): unsure at all Xaa locations
  Clone ID: MRT4577_26580C.1.pep
LFLFTIKKTPPSAXAWPYISLTDPKTXSSINSHSTTRTTYQIKTQTLQILINTKFNVIHTLHTSNSNNISNSSTNLIKKSLPSIHNNNTTNHININSFKHHNINKFNYITIFTT

SEQ ID NO: 288914 - protein, 71 aa, Zea mays
  Clone ID: MRT4577_26581C.1.pep
RCCRSSLRGLPLHPGFILAGDNLIAKCPSWFWCILYSSRPALVIFIPRYVFYANLNVLLCSITRSRVRSAL

SEQ ID NO: 288915 - protein, 552 aa, Zea mays
  Clone ID: MRT4577_26582C.1.pep
MSSGGEKMLLFGSFTEDETKLLQGQPLKSPTKSVSKECERTEIQFGTLNFSVLNLEKISTSSVVLPAKSAKGETSAITKENACNNEKKAAGSSLSNGGPVLANGCPPVNVPANNGLFENVKTEAVVPPVIPVKIISNPTPQMTLETHKDGTKPTESRKLNKEREITENGSPIVDKHIVAAPAEEAVTSLNKKASQNMPLLPHGLRNTGNICFLNATLQALLSCSPFVYLLQDLRNRRIPKVGYPTLSAFVELISQLDVPDESVIKKNEKVITVAAKPLNPAMFDAVLRNFTPDVPAGITARPRQEDAQEFLSFAMDRMHDELLKLNGDGLNSKEGMVVSSADDDAWETVGRKNKSAIVRTQSFVPSELSAIFGGQLQSVVKAASNKASATVQPFLLLHLDIFPDAVQTLNDALRLFSTPESLEGYRTAAGKAGLVTARKSFKIHALSKIMILHLKRFSYGNHGSTKVYKPLHFPSVLVLSRDLLSSPSQEGRKYELVATITHHGRDPYRGHYTAHAKHADGQWLRFDDDAVVPVGEKDVLHDQAYVLFYKQV

SEQ ID NO: 288916 - protein, 141 aa, Zea mays
  unsure (1)..(141): unsure at all Xaa locations
  Clone ID: MRT4577_26583C.1.pep
MDVGAAVALPTSAPSPPNLLAIPLSPLSYLHRWHVAHPQTHWPPRRDAKGHHEKVEKILEAMYGVVYKELIDDSNEIIALKKILLELDDEGVXSXAIREISLLKEMNHSNIVMLXDAVHXSEKGIYLXYEDLNLDLKKVMD

SEQ ID NO: 288917 - protein, 768 aa, Zea mays
  unsure (1)..(768): unsure at all Xaa locations
  Clone ID: MRT4577_26584C.1.pep
MQQITRRDILSILGVEFSDFVFLPSMGASGGFLVAWKRNVGHTGLTRIDDHCVSVQFCKNDGTSWWLTCVYGPQSDADKILFLQEIKEIRVACAGPWVIAGDFNLIYNASDKNNTNLNMAMMSRFRKLKETSRRLHSWSDKKVGHVASQLALAKELLHKFETAQDHIMLSPAENWLKNKLKMQSLLLASFKRTMDRLRSRISWLKEGDANTKYFHMHARHRKRKNLVTKLKDGDNILTSHHEKAGVVDLFYSKLIGHEVERDRSINLEALELPVHDLADLELPVSELEIWETIKTIPSDKATGPDGFTGRFYKVCWNIIKQEVMNVVAALWNRNSLNLSKLNSAYITMVPKVEGADQVKDFRPISLVHIFAKLVTKILANRLGKKLNNMVSPIQSAFIKGRAEEAGLLQQLCLRKKLQRISIYADDVALFLHPTHSDISITLDILELVGDVSGLHNNTHKSNIYPIRCSDEIILDVQHMLPCDIASFPCKYLGLPLSLHRLSNQQLWHLVDKIANRLPNWKADLLNRAGIRILVQQVLTRMSVHTAMAIDFPMWVIKEIYKIRKGFLWRGRREVKGGHCXHRPQLVPTAAPHLAARQTSKTRLISGIELQPEIDYKHTLSIASNGVYSAKTACEGLFLGSVRFEHYKRIWKSWAVPKCRLFLWLVAHKRCWTTDRLAKRGLNHPEKCLLCDQEEENIDHLLVQCSFSREFWYLLLRKFGLHSLAPQPTANSFLGWWEVVGGAVHGLTKKGLNSLIILGAWTLWNHEPE

SEQ ID NO: 288918 - protein, 74 aa, Zea mays
  Clone ID: MRT4577_26585C.1.pep
LFSLVHGYMTHAFVFYSFLFYIHGSIESFFVLQCSSQYIQCSREKVSHYHKINIADSFILMHTNNYAHPSTCLQ

SEQ ID NO: 288919 - protein, 68 aa, Zea mays
  Clone ID: MRT4577_26586C.1.pep
THGFSMDFHPITGWFGINNVIGWVGFNFPLVFLVGCGMDIKVIRFGYRCEWIGFFAISRPRWNGPSSS

SEQ ID NO: 288920 - protein, 893 aa, Zea mays
  unsure (1)..(893): unsure at all Xaa locations
  Clone ID: MRT4577_26587C.1.pep
MRFRERRNASAGQEQGPKKRRITEDSNMCHQCQRNDSGRVVRCQGCAVRKRKYRYCVKCIKRWYPHLSEDDFANNCPVCQNNCNCKACLRGDITRANSRKKKKLLQINSGGYSVSEQDKIKFSMRIVHFLLPWLKQFHQEQMQEKSAEAATKGIDADKLEVPLTICGKKERIYCNNCRTSIVDFHRTCNKCNYDLCLQCCQELRRGLVSGNDXARLMVEASKIFYRELVMIKSXSKGPSDGQNDMLIDSVVPGENNTSSLRQWSVNKDGTIPCPPNAFGGCGSSLLELKCLFKEKFIAELLEKANSALNNEMEVKIEGSKCPCFTESGDMDDGISRKSSCRENSCDNYIYCPTATDVQNGSLDHFQEHWLKGEPVIVRDTLALTSGLSWEPMVMWRALREKKEKVERLSVLALECLGWCEVCNILMTVNSXRNNKTFXPDDLPLLLKLKDWPPHSSFEERLPRHGAEFMSALPFREYTDPKWGPLNLAVKLPDNVNKPDLGPKTYIAYGVSKELGIGDSVTKLHCDMSDAVNILTHTDEIKLKAKRIAAVEKKKRXRNEDSNLPRKQVEAFNGVXYVGMPTAPSESNKEPRPEECVNELGIKQPVQHVASEEQEGVQDDAKADANVMNVSFGKGKSEDSFGTINGTNSGDKIESPSGLAERTLTQPTTKGCSKQRGRSSNGRGNRTKKIEEGNASGLIAVAPESEDDDDAPFIDGNQAEGGALWDIFRREDVSKLHDYLMKHADEFRHCNFEPVKQVTHPIHDQCFYLTIEHKRKLKEEYGVEPWTFEQKLGEAVFIPAGCPHQVRNLKSCIKVALDFVSPENVRECIRLTEGFRLLPKWHKVNEDKLEVKKIALHAFNQAIKDITDESSNSNERMKPNGYTWSRAHKILMCW

SEQ ID NO: 288921 - protein, 149 aa, Zea mays
  Clone ID: MRT4577_26588C.1.pep
NSARGIYCPTATDVVITSLDHFQEHWLKGEPVIVRDTLALTSGLSWEPMVMWRALREKKERVERLSVLALECLGWCEVDVNIHMFFAGYSSGLVGPDDLPLLLKLKDWPPHSSFEERLPRHGAEFMSALPFREYTDPKWGSLNLAVKLP

SEQ ID NO: 288922 - protein, 243 aa, Zea mays
  unsure (1)..(243): unsure at all Xaa locations
  Clone ID: MRT4577_26589C.1.pep
MSDAVNILTHTDEIKLKAKRIAAVEKKKRRLGMKILWISDIRGALSVGVLTYYLQLWDLISGIELQPEVDDKHIFSIAPNGVYSAKSTYEGLFLGSVTFGHYKRIWKSWALPKCRFFLWLVAHKRCWTTDRLAKRGLNHPEQCLLCDQEEENMDHLLVQCSFSREFWYLLLRKFGLHSLAPQPTANSFLGWWEVVGGAVLGLTKKGLNSXILGAWTLWNHRNKCIFDGCNPSMSLCLRAADGK

SEQ ID NO: 288923 - protein, 128 aa, Zea mays
  unsure (1)..(128): unsure at all Xaa locations
  Clone ID: MRT4577_2658C.1.pep
MFCSTSQLYTIHNSYIILFNLHYISFEYLPFIDLSLXKLVFKLKYLYYIINXIFIFYILLYLLFLFLFFQLLPFXFYFVYFSFLIFYPIFLFIFLFYXYFLFFYLNXIYNFYFFSILXYFLIFFFYLS

SEQ ID NO: 288924 - protein, 84 aa, Zea mays
  Clone ID: MRT4577_26590C.1.pep
QDPEVASHGGGSICACGGNRSSVMDDDYGVRGTQERSQLLLAAMITAALFSVKPYRISPPARVTRNTTDGCDCGLDGPNAIDVL

SEQ ID NO: 288925 - protein, 34 aa, Zea mays
  unsure (1)..(34): unsure at all Xaa locations
  Clone ID: MRT4577_26591C.1.pep
GXGLEAQAPVKDSGAKNDRAARVYDQVKKRSGLA

SEQ ID NO: 288926 - protein, 129 aa, Zea mays
  Clone ID: MRT4577_26592C.1.pep
PTRRMKLLLRRRMEIFINILAGSTITLEVVSADINDNVGVTLHDKEGISPDKQLLNCARMHLDDSHTVSNYNIQLDSTRHMQLLLKSRMHIIINTLVDSTNTLDVVSADINDNVGVTLDDQEGISADQQ

SEQ ID NO: 288927 - protein, 104 aa, Zea mays
  Clone ID: MRT4577_26593C.1.pep
LFVAKDESLWKCVNVTNTKSKNPIEELGTVYNYISSPDGRSAMMNSQSRYQAAMILKRSCMQQYALGDILQVLHIVVVRKKWLVPHSSGWQPLSLKRNSGSCNY

SEQ ID NO: 288928 - protein, 65 aa, Zea mays
  Clone ID: MRT4577_26594C.1.pep
VLIQQCPPFPSFPFQDRRLFQFFPFFKEGENTESVRRDIQKKRQMHVNYMSFPNSMQTLGNLRKI

SEQ ID NO: 288929 - protein, 99 aa, Zea mays
  Clone ID: MRT4577_26595C.1.pep
KQLLVDPRRRRRGIRAPGGRHRIISGDLAGPRSVQHVRLGQILMFFWDRLQLRVESAGGCARRESDGRKGPKGTVGNRQRETHRAEAEARHEAPVEEAV

SEQ ID NO: 288930 - protein, 137 aa, Zea mays
  Clone ID: MRT4577_26596C.1.pep
PPQAAVQIATSEDQEEPWRTLKPAPLDGRAGAGAAASRATESLRLCWGSAAAARRLFLVFLMRPWFLTTMSAREVGKPVWTGRGPGGRIDARRRRRRHAPPGASAGSLASPSAADAGEHWRRGVSGEALRVRVAGGS

SEQ ID NO: 288931 - protein, 136 aa, Zea mays
  unsure (1)..(136): unsure at all Xaa locations
  Clone ID: MRT4577_26597C.1.pep
VLLDVSHPRPFDFHHHTLPPAVPSNQQPSTIPVENAPVPHHNRWPEYSGGVGLSYSSHRPPYGQHQPPGNLDSGSNLVYPSFQRYPSNLPVSNNIGPLSDADLTKSSIXPHYNPFASTFDKTDPSLDIGPPVSPNA

SEQ ID NO: 288932 - protein, 150 aa, Zea mays
  Clone ID: MRT4577_26598C.1.pep
PPGPEKRNPFLPSQAKGKKKKKGGKKKLRPLVGGASQLGGHLFSLFPPPPGGVPQGGGGPQVLDFPPPPLPGVNPGVFFPLFPPPQEHLVFFPFPPRPRFWDWGLFKCPIPPFFVWSCFNPVVFCPRPPPLLFLSPRPPFFCNNKFRVFF

SEQ ID NO: 288933 - protein, 89 aa, Zea mays
  Clone ID: MRT4577_26599C.1.pep
MAAGGNGAGGDTRAAFARIYKTLKEELLTDPAFEFTEESRQWIDRVTIPLYLSLSLSLPSFLPFSVPVSWLDPCGVRRAVRGLPVPFVT

SEQ ID NO: 288934 - protein, 75 aa, Zea mays
  Clone ID: MRT4577_2659C.1.pep
SYMGWASSGSKVTFAFFTVHTSSMWSREFPSASVVLPLLAGEHLGFYEFYRLALDPIFANWVAIDEGYMDWPSEK

SEQ ID NO: 288935 - protein, 76 aa, Zea mays
  unsure (1)..(76): unsure at all Xaa locations
  Clone ID: MRT4577_265C.1.pep
LLAGTRRGTRALLAGKTLVLDPXKRIRATEALEHPCMCAVYDPSANPSAQVPIDLAIDKNLGVHRITEMMWHEMIH

SEQ ID NO: 288936 - protein, 45 aa, Zea mays
  Clone ID: MRT4577_26600C.1.pep
YRILYGCHYKTCGIVHVDHPQVIHEGCYQNVYLYGISQSQVLAHD

SEQ ID NO: 288937 - protein, 154 aa, Zea mays
  unsure (1)..(154): unsure at all Xaa locations
  Clone ID: MRT4577_26601C.1.pep
ADYDTFLFTYKFRNDGHXEKLCDHGSDAGLHARLAEDPDSLVDCXETCAKMIMDMGFGXITTKANVHYQKIVMHTCHNIXGVVSNHAGLDAEHXKVVVNIEHWHPDIAQGVHGLFTKTREEIGAGDQAHMCAXATDETSELMCLSHVLGTKFGA

SEQ ID NO: 288938 - protein, 122 aa, Zea mays
  unsure (1)..(122): unsure at all Xaa locations
  Clone ID: MRT4577_26602C.1.pep
RGSGRFGAFCSRXPAXCLLASAXVGFXXXAXPGLVSVALPVPXPXXXRWXLXXXVWAVXLCAXALLXRXXLXFAXCXPPSXXCGVVXXLXWXXXAFVXSVSASPACFXCSLLLXGWSRVVFL

SEQ ID NO: 288939 - protein, 74 aa, Zea mays
  Clone ID: MRT4577_26603C.1.pep
NLPPPPPKKFLSRKKFFGGLAQKVGLFPKKWLFFTPGLYKKKFFPPPGSPWGEKPFGKRKRGLAPGEREKGYNF

SEQ ID NO: 288940 - protein, 107 aa, Zea mays
  Clone ID: MRT4577_26604C.1.pep
PGQKGQAPLGKGIRVKNRWPGASLVGGIVGQSTNGGLGLDSETVFKKIPPPGGGFPMGPPNVGSPFFPFLATKLTPILPGYVSPPPFRQADPKTHVFFKPGALLLIY

SEQ ID NO: 288941 - protein, 142 aa, Zea mays
  Clone ID: MRT4577_26605C.1.pep
MASQSVQCFGKKKTATAVAHCKAGKGLIKVNGKPLSLVQPEILRFKVYEPVLILGLDKFADVDIRVRVSGGGHTSQIYAIRQAIAKSIVAYYQKFVDEHSKNQLKQALVQYDRTLLVADNRRCEPKKFGGQGARSRYQKSYR

SEQ ID NO: 288942 - protein, 92 aa, Zea mays
  Clone ID: MRT4577_26606C.1.pep
SPALNRASYRCIQGRVQVFIPGFIFFFFFFLTFFFFFFFFFFFFFFFLTICDSFLLSHIKFIIIEYTRYMKIILLSTALYSFFIAIHDLVLR

SEQ ID NO: 288943 - protein, 67 aa, Zea mays
  Clone ID: MRT4577_26607C.1.pep
VIFPLSARCLTREFVCMDKGHPVLQEQYDESPCKKTHLRVTRSLHGTKHMLYGNNAPRTRWAPGIRT

SEQ ID NO: 288944 - protein, 94 aa, Zea mays
  Clone ID: MRT4577_26608C.1.pep
LNKKKKKKKKKKKKKKKKKKKKKKKKKKKKKKKKKKKKKKKKKKRKKKKKKAPKAPARQKTRKPPGVQKFKKKLIKTPPPKGGPETKSPQKGIK

SEQ ID NO: 288945 - protein, 85 aa, Zea mays
  Clone ID: MRT4577_26609C.1.pep
HASARSFVRRLGFFNFRWCLQLRIGWIIYLNMFLVWSELDHHENMEVTYQSDSHHQDLQRFIRGWVVVDVCKQNSSIFLSFSISE

SEQ ID NO: 288946 - protein, 148 aa, Zea mays
  unsure (1)..(148): unsure at all Xaa locations
  Clone ID: MRT4577_2660C.1.pep
WSDLQALRLEQEACLSDCYPTERYTILIPNEDFHAXQVNFSXPCNGDRSLRXDGNLLLTTHLKQYYDHXNCIEILLENNLCITREXNLDGSCPAAGSKNSCTNNYDXKILPKSVLMDFXVXHDQASRXTLFNSKFFXLNMDRCNRMLI

SEQ ID NO: 288947 - protein, 74 aa, Zea mays
  Clone ID: MRT4577_26610C.1.pep
KGLMELRDGKIMARFLVEANKNVTRMDIFLSLVQLLQQNSRNRSSDQLVKVMNNGIPSFVDHQQSPASIPVWPC

SEQ ID NO: 288948 - protein, 46 aa, Zea mays
  Clone ID: MRT4577_26611C.1.pep
AGRDLDLSVLERGHCSLIRCYESQSYPGKSVGGQRSYGSMLVLTFS

SEQ ID NO: 288949 - protein, 212 aa, Zea mays
  unsure (1)..(212): unsure at all Xaa locations
  Clone ID: MRT4577_26612C.1.pep
MGSSRKITSLLLMFCLAVLVRAEYAKYKDPKQPLAVRINDLLGRMILAEKIGQMTQIERVNATAEAMSKYFIGSVLSGGGSVPAPQASAQAWASMVNEMQKGSLSTRLGIPMIYGIDAVHGNNNAYRATIFPHNIGLGATRDPMLVKRIGEATALEVRATGISYAFAXCIAVCRDPGWGRCYESYSEDPKVVQSMTTLISGLQGDAPSDYTG

SEQ ID NO: 288950 - protein, 73 aa, Zea mays
  Clone ID: MRT4577_26613C.1.pep
YERQSAHVLKLQSPCRAVLSLFDKIFCGASLKPGYAALFRGPDIIFKGWSNFATHPGMKQASPLRYRTGGANL

SEQ ID NO: 288951 - protein, 97 aa, Zea mays
  Clone ID: MRT4577_26614C.1.pep
QQWSKIYPLALLRFCERTSVIIHKLTALVIFTVPPPYFNGLEHPLCKPIGYNKRLRRASYNNQLPIATTILGTSNNTNHRTHSNNSLPPEPPSQVNL

SEQ ID NO: 288952 - protein, 98 aa, Zea mays
  Clone ID: MRT4577_26615C.1.pep
MGAKQLAEAVGFAEQLGYPSGYTISGGGPEDYLYRYSDSLETEVYRYMANNIGFPKLEAILSMMPFKDFLDCLTYMHWKGLILSKELKNKKNIESEAS

SEQ ID NO: 288953 - protein, 66 aa, Zea mays
  unsure (1)..(66): unsure at all Xaa locations
  Clone ID: MRT4577_26616C.1.pep
QHSVWYNXVKQGLIXDPVFSFWFNRHADEREGGEIAFGGMDSNHYKGDHTFVPVLXKGYCQFNMGD

SEQ ID NO: 288954 - protein, 193 aa, Zea mays
  unsure (1)..(193): unsure at all Xaa locations
  Clone ID: MRT4577_26617C.1.pep
MAKKVATLLALNLLFFAFADACGCRCGGSCPSPGGGGGGGSGGGSGGGGWEKGXXXGGSGGGGSGGGGSGGGGGSXGGGGSGGGGGGSGGGGGGGGGTSGRCPVDALKLGVCANLLNGLINATLGTPPRTPCCTLIQGLADLEAAVCLCTVLRANVLGINLNLPITXSLLLNYWVRPCPLGAPVLLITPIDPS

SEQ ID NO: 288955 - protein, 184 aa, Zea mays
  Clone ID: MRT4577_26618C.1.pep
MAKKVATLLALNLLFFAFADACGCRCGGSCPSPGGGGGGGGGSGGGGGGSGGGGSGGGGSGGGSGGGGSGGGGSSGGGGGSGGGGSGGGGGSGGGPTSGRCPVDALKLGVCANLLNGLINATLGTPPRTPCCTLIQGLADLEAAVCLCTVLRANVLGINLNLPINLSLLVNYCGRRVPSGFQCF

SEQ ID NO: 288956 - protein, 140 aa, Zea mays
  unsure (1)..(140): unsure at all Xaa locations
  Clone ID: MRT4577_26619C.1.pep
MAKKVATLLALNLLFFAFADACGCRCGGSCPSPGGGSGGGGSGGGGGSGGGPTSGRCPVDALKLGVCANLLNGLINATLGTPPRTPCCTLIQGLADLEAAVCLCTVLRANVLXINLNLPINLSXLVNYCGRRVPSGFQCF

SEQ ID NO: 288957 - protein, 145 aa, Zea mays
  Clone ID: MRT4577_2661C.1.pep
RPRVRSDSDCPKVDERRPVARSLGRKKALASSKKQSRSSKKPLSTFHSTPKKKMLDNVFIFNEKCTPKTVDQGETNKATESRGSRSPDSAKKRVNRKQTYLSPTEDEGIKSSETSFAKGYKSHKWPSDIDVPDKSPVEHMGRKSN

SEQ ID NO: 288958 - protein, 113 aa, Zea mays
  Clone ID: MRT4577_26620C.1.pep
KKKKKKKKKKNLEILTGKFPANYLRQGRQGNADLAGWVQSVVTEERTGEVFDKDITGARGCESDMVKLLQVGLACCDADVDRRWDLKTVIARIDEIREPEPAAAAAASESSSS

SEQ ID NO: 288959 - protein, 465 aa, Zea mays
  unsure (1)..(465): unsure at all Xaa locations
  Clone ID: MRT4577_26621C.1.pep
LLQHCSRLLLLDVPKLKTLPCLPPSXRKVSICGLTLLTFVTKNQLEQHDSRENIMMADHLASKLSLMWEVDSGSSVRSVLSKDYSSLKQLMTLMIDDDISKQLQIIETGLEEGDKVWMKENIIKAWLFCHEQRIRFTYGRAMELQVVLPLGLCKLSLSSCNIIDEALAICLGGLTSLATLELEYNMALTTLPSEEVFQHLTNLDMLILSGCWCLKSLGGLRVASSLSILHCWDCPSLELARGAELMPLNLASNLSIRGCILAADSFINGLPHLKHLSIDVCRSSPSLSIGHLTSLELLDLNGLPDLCFVEGLSSLHLKHLSLVDVANLTAKCISQFRVQESLTVSSSVLLNHMLMAEGFTAPPNLTLLDCKEPSFSFEEPANLSSVKRLDFSLCEMESLPRNLKSLSSLESLHIGRCPNVASLPDLPSSLQRIAIWCCPVLKKNCQEPDGESWPKISHLRWKHIY

SEQ ID NO: 288960 - protein, 250 aa, Zea mays
  Clone ID: MRT4577_26622C.1.pep
PKKKKKKKKKKKKKTRGRQGPRCSDSYTQQIREAHALGTCSLVCRYASDLATAVLRTVRSTMAKKVATLLALNLLFFAFADACGCRCGGSCPSPGGGGGGGSGGGGGGSGGGGSGGGGSGGGSGGGGSGGGGSGGGGSSGGGGGSGGGGGGGSGGGGGGGGGTSGRCPVDALKLGVCANLLNGLINATLGTPPRTPCCTLIQGLADLEAAVCLCTVLRANVLGINLNLPINLSLLVNYCGRRVPSGFQCF

SEQ ID NO: 288961 - protein, 158 aa, Zea mays
  Clone ID: MRT4577_26623C.1.pep
MAKKVATLLALNLLFFAFADACGCRCGGSCPSPGGGGGGGGGSGGGGSSGGGGGSGGGGSGGGGGSGGGPTSGRCPVDALKLGVCANLLNGLINATLGTPPRTPCCTLIQGLADLEAAVCLCTVLRANVLGINLNLPINLSLLVNYCGRRVPSGFQCF

SEQ ID NO: 288962 - protein, 68 aa, Zea mays
  Clone ID: MRT4577_26624C.1.pep
NELPEPVFLRLGWRRPFPDPKTSGVEPGLGGPPRSYALRQVNLIFSGPVAGRNYRNRNWGWLPPQDWQ

SEQ ID NO: 288963 - protein, 84 aa, Zea mays
  unsure (1)..(84): unsure at all Xaa locations
  Clone ID: MRT4577_26625C.1.pep
RQKILDXSEAEKARKELLELEALSMAVESTGTAKAEAESRAEAARIEGEGSVLQAKLKAQALAIETEAELQRVQXVRELELVYA

SEQ ID NO: 288964 - protein, 61 aa, Zea mays
  Clone ID: MRT4577_26626C.1.pep
EQRQSLPPWALKPGYLSQRQFFYPMLRDFEKFHVFWFTYQGFVLVFPLMKNGYAMQKNRLL

SEQ ID NO: 288965 - protein, 117 aa, Zea mays
  Clone ID: MRT4577_26627C.1.pep
AHVSEGSTQKPSPVTAASFHARRGRVCSPAPSLEASPPPCCTLSGSLSGSLSSLTRSSPLYREADPPLSHQSAACSHRRLVRSLSLYLSLEVSPLLSHRFAACWIDAGGVPPLPLPP

SEQ ID NO: 288966 - protein, 66 aa, Zea mays
  Clone ID: MRT4577_26628C.1.pep
IKGAVSSLDVEPPLCVSRPVWPCPSGKVACPFFFVNTQQRCVSLFYKRIKVFTLIKNQSGRFRPAP

SEQ ID NO: 288967 - protein, 45 aa, Zea mays
  Clone ID: MRT4577_26629C.1.pep
TLQSSLISSQLHFYYVERSCSAYYSVLQLVINPLFFLCFFIVQAW

SEQ ID NO: 288968 - protein, 350 aa, Zea mays
  Clone ID: MRT4577_2662C.1.pep
PTRPPTRPVDYFATAVTIIVVAVPEGLPLAVTLSLAFAMKKLMNDKALVRHLSACETMGSAGTICTDKTGTLTTNHMVVDRIWVSEVSESVSSSGNGLEDLSSAAVSRPATLGLLLQGVFENTSAEVVREKDGGQAVLGTPTERAILEFGLKLEARRRDAGDRSCTKVKAEPFYSVKNVMAVLASLPDGRYRWYVKGASEIIAQMCDAMADGHGNRVPLSQCRRKDVLGTINSFASDALTTLCLAYNEGDGFTDDAHSPAGGFTLICIFGLQDPVRPGVKDAVKACMSAGIVVRMVTGDHINTAKAICKECGILTDGGIPIQGSEFTNNSPQEMTDLIPKIHVMDRSLAL

SEQ ID NO: 288969 - protein, 60 aa, Zea mays
  Clone ID: MRT4577_26630C.1.pep
LHSLGDPVIVLGVVHIFKGMSILVVDHRCTQATSLLISVLCTVTVTLESVKCGVVLSRRK

SEQ ID NO: 288970 - protein, 87 aa, Zea mays
  unsure (1)..(87): unsure at all Xaa locations
  Clone ID: MRT4577_26631C.1.pep
TVRSSLVHHSHTLQTECHSIHQQRKDHLLGLFLPLFEIRTWLTPFVEISRSLDGSSLRRVCRSSRSICFFFPXXREIAPVTFPRIDG

SEQ ID NO: 288971 - protein, 90 aa, Zea mays
  Clone ID: MRT4577_26632C.1.pep
VGVIVSRHVARLVDSMIHSVCLNVRLSRPICRRYPTVLYTMHYSVYLFCSALYSTSNNVDRQWDRLCNKTGNRSAPRDLPPAMRVLDVSL

SEQ ID NO: 288972 - protein, 253 aa, Zea mays
  Clone ID: MRT4577_26633C.1.pep
RSLSSPAASRTPNLKSAVAPSPSPSTRRAPADAASASITAESKARFEAYNRLQAAAVAFGEKLPIPEIVVIGGQSDGKSSLLEALLGFRFNVREVEMGTRRPLVLQMVHDPTALEPRCRFQEEDSEEYGSPMVVATAIADLIKQRTESHLRKIQAAVSSKPIVMRAEYAHCPNLTIIDTPGFVLKAKRGEPESTPDEIRSRVKSLATPPHRLVLFLQQSSVEWCSSIWLDTLKEIDPTFRRTMIVISKFDNRL

SEQ ID NO: 288973 - protein, 78 aa, Zea mays
  Clone ID: MRT4577_26634C.1.pep
STAPHIAYRICLERWHWRTKEARVRKLQLLRSLMSLQLIEEHPSDSAVHVTPRAVRAQHERVHGGADTSRHGSCRCID

SEQ ID NO: 288974 - protein, 69 aa, Zea mays
  unsure (1)..(69): unsure at all Xaa locations
  Clone ID: MRT4577_26635C.1.pep
MRKKTKRTTPNFSSLQTGYHIVLGNDDELSIRCFFLILFNXLFFPSASWGITNNEVLMTSNMARMXDID

SEQ ID NO: 288975 - protein, 160 aa, Zea mays
  unsure (1)..(160): unsure at all Xaa locations
  Clone ID: MRT4577_26636C.1.pep
SRYSQLTGSSSARKKVVAAYLLAVLSGNASPSPVDSIAILRTFACEFDNERMELLLTXLTGKDITELIGEGTQEARLRTNEQNLSVNNAIDKPSXTAAASTAEAHIEETPNTRTKSXDDFGFNLFDYAAQPSQHYVSAVKPHENHSHVQITTLLYAGKVL

SEQ ID NO: 288976 - protein, 103 aa, Zea mays
  Clone ID: MRT4577_26637C.1.pep
MEADAAHNRMGETGDEEVERDHGMVGAGVSYDGHRGARGDEGCLGRRLRRGTSCDRAPAPCRSVHHIIIARGEGESGGKLKEITQQHKYVEVTPLAHKSTTLT

SEQ ID NO: 288977 - protein, 67 aa, Zea mays
  Clone ID: MRT4577_26638C.1.pep
PGAVVVGDREDAGPHRYGLVYLYEKRAQGLLYSVEPDDRHVQLMKLLLWQTECKNNLTCQQRTHVVN

SEQ ID NO: 288978 - protein, 84 aa, Zea mays
  unsure (1)..(84): unsure at all Xaa locations
  Clone ID: MRT4577_26639C.1.pep
RFAFSFYTDCLPQRAVSSERRARXYXQINNKPYPKSSYCRGVPDPKIRIYHVWMKRKGCYYFPYCVHLVFLENENVSIFSPQSS

SEQ ID NO: 288979 - protein, 110 aa, Zea mays
  unsure (1)..(110): unsure at all Xaa locations
  Clone ID: MRT4577_2663C.1.pep
QEVFQREAEGYRXLAQAKENGPANIVSCDMFGDDKNAPEPSFDLQPFSSIWGTQLNSDYVFDESSGSSLGYYYDPNTGLYCYATTGKWYRFDEETKEYKEVVFEVATEKV

SEQ ID NO: 288980 - protein, 237 aa, Zea mays
  unsure (1)..(237): unsure at all Xaa locations
  Clone ID: MRT4577_26640C.1.pep
MDPNTKLILDEMQRQFAEQDARIARRFEESDGCWEARISAVEVQAARMEQAVDTRLAEVERRTADRFSIVEKLAGDLDEWRPSIEXRXDDLWLEVNKLARHWDRSVLEHASSSPGLIRLPSAAPRPPADEAAFRPNRHHVDNTIRETGFGVVTTLTLAPVKGTSVPPQYPSHDTFHGPIRDRSCTHDPGYSQTGQLPKMSFPCFDGTXPRLWISRVESYCDMYGGDPTIWVWVAMMY

SEQ ID NO: 288981 - protein, 148 aa, Zea mays
  unsure (1)..(148): unsure at all Xaa locations
  Clone ID: MRT4577_26642C.1.pep
MGAHATAAAAAVLLVATCVAAAAAAPLQQHEPGRISGDAVGVLDDDPVGKLKVFVYEMPRKYNRMLLDKDSRCLHHMFAAEIFMHQFLLSSAVRTLDPEEADWFYTPAYTTCDLTPQGFPLAXRAPRIMRSAIRYVATTGAFWNRTDG

SEQ ID NO: 288982 - protein, 89 aa, Zea mays
  Clone ID: MRT4577_26643C.1.pep
AGAELYLGPHKTRLTNRAEDHDTDPRRTVSPRSEAAFIRQEPHTRTDRTGAYFDRNGHQTIGASDLPRRCLQHAYGAIDLPKPMCHCVN

SEQ ID NO: 288983 - protein, 87 aa, Zea mays
  Clone ID: MRT4577_26644C.1.pep
TNYNYTHLNLLYEKYNDQRSGILAFPCNQLGGQDPRTNEENVHLACTPFKAEYPIFDKVNVNGDNTAPIHMCVKCSTGMLFGDNITW

SEQ ID NO: 288984 - protein, 156 aa, Zea mays
  unsure (1)..(156): unsure at all Xaa locations
  Clone ID: MRT4577_26645C.1.pep
EGAGEARRRGCAAPARRHLAPPCSDLAPSSCVASISPSLWPGIDPEETRPGFVSGLGGKRKSKPGRVYFRLRPKRTGTVTPTKFQSEPIYSARNQARNGPIRRKRTGPYGDWFMSSFLEGRTRSKFRPLFLRGPIWLYTSTPKKKKKKGRXLELSF

SEQ ID NO: 288985 - protein, 53 aa, Zea mays
  Clone ID: MRT4577_26646C.1.pep
GAQKKKKNRLRQRRESQASRKEEPDAANGDVTINNRRAPVGQLSAPLSRAALA

SEQ ID NO: 288986 - protein, 73 aa, Zea mays
  unsure (1)..(73): unsure at all Xaa locations
  Clone ID: MRT4577_26647C.1.pep
VKVGAPAKSKVLDDDASARFEDACSILEKDAVNVSLENLKSXPFVKERLEKGTLKLVGSHYEYVNGKFATWEP

SEQ ID NO: 288987 - protein, 208 aa, Zea mays
  Clone ID: MRT4577_26648C.1.pep
MRRYSPPHRSPPRRGYGGSPAHRSPPRRGYGGSPPHRSPPRRGYGGRGRSPPRRGGYGGRKEQGSGSLLVRNIPLSARAEDLRVPFERFGPVRDVYLPKDYYSGEPRGFAFVEFVDPYDASEAQYHMNRQVFFGREITVVLAAESRKRPEDMRTRTRVRGYSGGHEGRRSSHYGRSRSRSRSASPRPRGGGRARSRSYSPAPRREMTT

SEQ ID NO: 288988 - protein, 146 aa, Zea mays
  unsure (1)..(146): unsure at all Xaa locations
  Clone ID: MRT4577_26649C.1.pep
PPYVTDGEFFLEIPGDTAQAIKALQAVSNHILXAVVDRTAPASFETTHTDMRQDHTGAWSDMSHARYGSALVHEPPSAADESMIPGYRDAASLEREPLLEHNIXMADAXLYGRDAAQSTLRPPERHGAGPLLTHKSQCLQVPLTYC

SEQ ID NO: 288989 - protein, 93 aa, Zea mays
  Clone ID: MRT4577_2664C.1.pep
MGSACCVAAKDHTIPSTSRTGGESLNRNAVCSPTWSFQWDSWGRVAGEIEDPSFHTSHRVSRNVSMELKGSLSSERGNLSDWGSTLDNSVTPM

SEQ ID NO: 288990 - protein, 125 aa, Zea mays
  Clone ID: MRT4577_26650C.1.pep
MQGMGDFIGEMTQMMTRPRPMRQESFEELQQLFVDMFQSDIDSGFCNGTAKGHQVQGQAKSRTCSPRSPPTTIVKEAEVSSCNGFNKRGSSAMDSGKPPRPVECGAGQSQAGFCFGLASDERSCN

SEQ ID NO: 288991 - protein, 81 aa, Zea mays
  Clone ID: MRT4577_26651C.1.pep
AASSCLGHWGWTTSLSCTQPVWSQCRLTPWLLNCCWSGGLKQVVAVASTPRVFYSGVRSESLLMQFMGIRGLCWYHFIAPL

SEQ ID NO: 288992 - protein, 336 aa, Zea mays
  Clone ID: MRT4577_26652C.1.pep
ASQQQQQGGEEQGEREFEEMLLREHSVSTDMGSLDWKRMKIPPVLTSSQSARLFKTMQPMKESLREELQRDPTDAEVAEATGMTVHQLRRRLDVGRAARNKLIKHNLRLVPYALNKYYPDMGGDERFDELCQAGANGLITAIDRFEPRGGFRISTYALFWIRHSIVRAMTLSSFTRFPFAMESDRQEIGRAREELAFDRGRPPTDEEVRARVGLSPQRYRDVLRMARPTYSLHARNRVTQEELIGEVTDAEAVGVDAGGKHDALLRLAIDDLLDSLKPKESLVIRQRFGLDGRGRRTLSEVAGNLSISREMVRKYELKALMKLKHPTRVEYLRRYM

SEQ ID NO: 288993 - protein, 443 aa, Zea mays
  Clone ID: MRT4577_26653C.1.pep
MRSPRIPGRRDAASPQTPKGFNPGDPVEVVPDEAGLHGAHFAAVVVGPSAKPRGYTVEYDSLLESEGSDRPLREALPARSLRPRPPPPPAPASEAPPAEHAAVDALIDDAWWLGVALARAGAPSKVRVCFPETREVMEFDAADVRPHLEWVDGEWRSPDNMEIPKTMPYAKGMQIEVSKLEDNSVVAWSPAVVAKIIWKNNLLVDYTLSKCYGTTLSEEIVDVKHVRPRPPQASEISFCINDEVEAFQGDCWWLGVITNVLPEFKYTFKSTHLGTEVEVNQKFLRLRYDWVGDQWEQESKNVPKAKFTQGVKVEVCSDDEGFRGAWFEATVVKAVGSKFLVEYATLKADDGTKPLKESVEARHIRPCPPDIPATDGFKLLDEVDAFCNDAWWVGVVSKVLGEKRCTVYFRPWKEEMEFEHAQLRLHCDWMGGRWMRASPALEM

SEQ ID NO: 288994 - protein, 88 aa, Zea mays
  unsure (1)..(88): unsure at all Xaa locations
  Clone ID: MRT4577_26654C.1.pep
CTQPNRQPXKYFSIRSMTSLGHLLGKWVXYPRNXXLCPPIGLTKXXLXXLPFXFPQYXXSXXRCXFNGCEXXPXLFKTLPGILYRXNR

SEQ ID NO: 288995 - protein, 102 aa, Zea mays
  Clone ID: MRT4577_26655C.1.pep
MKSSPHLVLILCLQAALVMGVFAALAKENAMVESKAIDINPGQLKCCTNCNFSFSGLYTCDDVKKDCDPVCKKCVVAVHASYSGNNKFRCTDTFLGMCGPKC

SEQ ID NO: 288996 - protein, 54 aa, Zea mays
  Clone ID: MRT4577_26656C.1.pep
THLIIIYFINIFSYKVVVIASIKVNGHFFFSPPYPPLFYIFLFIVLFFFFGRVG

SEQ ID NO: 288997 - protein, 82 aa, Zea mays
  Clone ID: MRT4577_26657C.1.pep
EREEKGAQLVALELLLASRDRAARAQLVVALASIPPPSFSFDDMDMHPSPAGVSRIGCCFLIAIVTQLVLLLLRCCVCTFVH

SEQ ID NO: 288998 - protein, 82 aa, Zea mays
  Clone ID: MRT4577_26658C.1.pep
KLTSRVHRSWVRHSWDGLCYCHLMTGYKPTVGRQARISRLMMAELLCRYTNKYTHNKRPYVDIMYQKFWTTDCKYKNKRLPV

SEQ ID NO: 288999 - protein, 63 aa, Zea mays
  Clone ID: MRT4577_26659C.1.pep
QELVHTMVHHRLGVVADDQLRRVRLEGRGRGLHVRDGGGKVNTKRATCELLAMWIRGTRATHP

SEQ ID NO: 289000 - protein, 71 aa, Zea mays
  Clone ID: MRT4577_2665C.1.pep
MLEMSLNTAEFILLDLYIYGILQPKMQSKHKTEKNINTLIHDEDVRNKVLADLLNIKQRGIRKLGNHVDWH

SEQ ID NO: 289001 - protein, 58 aa, Zea mays
  unsure (1)..(58): unsure at all Xaa locations
  Clone ID: MRT4577_26660C.1.pep
PTCXEKKKKGRKGKKKKKKKKKKKKKKKKKKKKKKKKKKKKKKKKRGGLFKGSKFNYF

SEQ ID NO: 289002 - protein, 68 aa, Zea mays
  unsure (1)..(68): unsure at all Xaa locations
  Clone ID: MRT4577_26661C.1.pep
CFACPFGAASPCAWXRSVGPLVLLGFPRLRCCALRSLLCPSAARLGPPPGRXGRPLSRVLPPSACGFV

SEQ ID NO: 289003 - protein, 33 aa, Zea mays
  Clone ID: MRT4577_26662C.1.pep
FIHHSVSGTKCTDISKTQIKSVLILFHHHLSNT

SEQ ID NO: 289004 - protein, 91 aa, Zea mays
  unsure (1)..(91): unsure at all Xaa locations
  Clone ID: MRT4577_26663C.1.pep
LPILMANPRVFLEVTFGGSPAVLIVMELYANXVPKTAENFRALCTGEKXWASPXKPFHYKGFTFYRFIPYFMCHGSDFTRCICSCCKSIYC

SEQ ID NO: 289005 - protein, 71 aa, Zea mays
  unsure (1)..(71): unsure at all Xaa locations
  Clone ID: MRT4577_26664C.1.pep
VTRRNVKELKDLQKDPATSCSAGXPAGEDMFHWQATIMGPPDSPYAGGVXIIYLNFXPPNKPPLPPLPPPQ

SEQ ID NO: 289006 - protein, 95 aa, Zea mays
  Clone ID: MRT4577_26665C.1.pep
DKHTLHSLAAAAAAVVKPGKGGEMKIADNEVKTEQDENSEERDFPKIRRLSDLYCRPSEDSTEISQPMPARLPDKFQEQRPEKRLVHPREEVGRR

SEQ ID NO: 289007 - protein, 62 aa, Zea mays
  unsure (1)..(62): unsure at all Xaa locations
  Clone ID: MRT4577_26666C.1.pep
ALXYXXKPGFAXNNXXPXANQTETXASXRPXRNAPPSRAVAPERTSGAAXPPEAGAKLLIRL

SEQ ID NO: 289008 - protein, 98 aa, Zea mays
  unsure (1)..(98): unsure at all Xaa locations
  Clone ID: MRT4577_26667C.1.pep
SLGLAAVPAAIVVLGALLVPDTXSSLILRGDADGARASLQRLRGPGAETGAELKDIVRAVERARRDDEGAYGRLCAKGYGARGWAALGHKQMGLPGKV

SEQ ID NO: 289009 - protein, 41 aa, Zea mays
  Clone ID: MRT4577_26668C.1.pep
LPLHDYCTVIIGGVWFPQYRILLKLQEIIRRPFRLLFVVGL

SEQ ID NO: 289010 - protein, 53 aa, Zea mays
  Clone ID: MRT4577_26669C.1.pep
FHLLSCFVHFLCFSFAALVVHNFVTGLLQAVHFDSLYLFLYLKPAVLLVLLDV

SEQ ID NO: 289011 - protein, 85 aa, Zea mays
  unsure (1)..(85): unsure at all Xaa locations
  Clone ID: MRT4577_2666C.1.pep
TQRCKPNREREREGGEEKRMYNQPPGIQEARAIVWLSPTAVLLHRSDPCVPSFADESVEWGIPESHVQYMQSYYHSPILRRTXAR

SEQ ID NO: 289012 - protein, 66 aa, Zea mays
  Clone ID: MRT4577_26670C.1.pep
YNGKWLTARATWYGQPKRAGAPDNGRAGGIKNVNLCTYKGITACGNVPIFKDRKGFWLSLEVRIQG

SEQ ID NO: 289013 - protein, 74 aa, Zea mays
  Clone ID: MRT4577_26671C.1.pep
PIPSFTPGLISNKSPPITFLNSCPILMSNGTLPLSFHLNTLVFFYYYIVPATIFLILSFLYFYYLYLSFFYTFA

SEQ ID NO: 289014 - protein, 71 aa, Zea mays
  Clone ID: MRT4577_26672C.1.pep
KSQTYCLTAGLPLDVETFLLPSKHKPHKGITSRDYSSQCVESRNHPRPYSTAWRRALGTRNRPWTGPRTCC

SEQ ID NO: 289015 - protein, 77 aa, Zea mays
  Clone ID: MRT4577_26673C.1.pep
VPLALPRVVMNTVPRFRRLIWVVHDYMSRLLLFFKWENPSFRGGSVFFLNFLPPILVWMGHCAMPFCLFTHMQCLNG

SEQ ID NO: 289016 - protein, 98 aa, Zea mays
  unsure (1)..(98): unsure at all Xaa locations
  Clone ID: MRT4577_26674C.1.pep
HFQQHQGGHXQYSGHNHEQQPQQQYQGHDKQQQPQQPQKYQQGQEKTQQQQCHCQEQQQTTRCSYNYYNSSSNLKNRHEFLRQQCNPLVNAFLQSRLI

SEQ ID NO: 289017 - protein, 65 aa, Zea mays
  Clone ID: MRT4577_26675C.1.pep
MAVEVTGCFTAGSAVPMVSVDSMKDHLLSKANSRWKSNAVPTQPGHSIATALCRSSHGTCNIGLV

SEQ ID NO: 289018 - protein, 144 aa, Zea mays
  Clone ID: MRT4577_26676C.1.pep
IIRLEWFARCTLAADMNVIYRRIHQHLSLFTSLCGANNAQHQQSRKQLYLNDSRQCASAKVLQACTCSDPWAVTVRRQIRSSWMSKPSGGSACSSHEAASMGSRSQLTSPRLTQSARSPKRAAAAKEAHSAERRSCHAEQTDAG

SEQ ID NO: 289019 - protein, 215 aa, Zea mays
  Clone ID: MRT4577_26677C.1.pep
MDDNEREKENENEKEKHYGTDVEDEEEDEEGNKRVVVLGPQVPLKEQLELDKDDESLRRWKEQLLGQVDTEQLGETAEPEVKVLDLTILSPGRPDLILPIPFQADEKGYAFALKDGSPYSFRFSFIVSNNIVSGLKYTNTVWKTGVKVETQKMMLGTFSPQLEPYVYEGEEETTPAGIFARGSYSAKLKFVDDDGKCFLEMSYYFEIRKEWPGTQ

SEQ ID NO: 289020 - protein, 36 aa, Zea mays
  Clone ID: MRT4577_26678C.1.pep
WIIDPDIFIFYFARLPLCNKDSDYIVSFISIHLVIL

SEQ ID NO: 289021 - protein, 34 aa, Zea mays
  Clone ID: MRT4577_26679C.1.pep
KSKCRIVIFVYFFNQTEFLKDYCRCLKRKKSCFI

SEQ ID NO: 289022 - protein, 39 aa, Zea mays
  Clone ID: MRT4577_2667C.1.pep
TPSGHYVVHVLKAGRWPFFTATKVPVSVDLPKEMGYLYF

SEQ ID NO: 289023 - protein, 38 aa, Zea mays
  Clone ID: MRT4577_26680C.1.pep
FLVHRGEDLTVPCRPTHAQFLGNGGYNDRGFLLSNGYC

SEQ ID NO: 289024 - protein, 89 aa, Zea mays
  Clone ID: MRT4577_26681C.1.pep
LCGLKKNQLIRRTLHPFQEMLKRCLTSGCSAVLWTIWKIRNDNCFNGKNVINVANIFIQCCFSLNSWALLQKEMPRRMLEDEKQANPKN

SEQ ID NO: 289025 - protein, 94 aa, Zea mays
  Clone ID: MRT4577_26682C.1.pep
GSPFGTALLLQENKGGDFGLPDLNKTLGLGNKNQTQFLPGGSNFIDSPPRGHTGISKPQALLKSWGCAQSLTTRWGKNQACEPFFTWERQNIFF

SEQ ID NO: 289026 - protein, 64 aa, Zea mays
  Clone ID: MRT4577_26683C.1.pep
PSFASCSRNRDGPSLHALTRRFGCCPNAWSFRTVEQPQYISFIPCPFIRSKVTSLVIRCAWPAM

SEQ ID NO: 289027 - protein, 81 aa, Zea mays
  Clone ID: MRT4577_26684C.1.pep
IGGVTSHGKGSRSTGCGGYQLQRLSRGGDDAVLSVAAACWRSLYNLVIFRLPSGPISGLFLSSCWSVRETELTKVSISIRS

SEQ ID NO: 289028 - protein, 52 aa, Zea mays
  Clone ID: MRT4577_26685C.1.pep
LVTYDTTRIPDCTWDPESPATSASYLTLQGYPRFHTSMLSGVCTVRGGMVEQ

SEQ ID NO: 289029 - protein, 129 aa, Zea mays
  Clone ID: MRT4577_26686C.1.pep
MKIFTLGGENVPQTKSVPVLSVAAACWRSLYNLVIFRLPSGPISGLFLSSWTKVSISIRSWHGKQQNWAGEEPQAIYNRLKTLVNQVRNLGSIKWDDHKMVKVILRSLVFLNSMQIQLICDDPRYKLIP

SEQ ID NO: 289030 - protein, 120 aa, Zea mays
  Clone ID: MRT4577_26687C.1.pep
KKKVGFMKIRPRMEIKLVVGLWYRRVLWFVPINTTEDMLSIPALRGMKFRTRSKTIVRSHIRPSTVSNAIGSVSRFLYRTSIRPYVTFLLHTTCTAQLFVCSGCNGPNVYWLNAVNSMDG

SEQ ID NO: 289031 - protein, 120 aa, Zea mays
  unsure (1)..(120): unsure at all Xaa locations
  Clone ID: MRT4577_26688C.1.pep
WVPRGRPGPLSAPAPAPACAHTLXPALAPANLAYLAPAPANLAATVISTPAPPPIQQQAPPPXAARERELNSTDDVPAIVVVSVHGPRRRRAQQVPSPSTPSRAPAPVTTVVPSPRPRIL

SEQ ID NO: 289032 - protein, 70 aa, Zea mays
  Clone ID: MRT4577_26689C.1.pep
VWKKKKRFFMSNITSRNTLYNKGKDHIRKEEERGEQRSEDKFSFDLPGGEDLLRLFCVLKRAQTGLCCVF

SEQ ID NO: 289033 - protein, 416 aa, Zea mays
  Clone ID: MRT4577_2668C.1.pep
MPPMEAAEDVVIVGAGLAGLAVALGLHRKGVRSLVLESSPSLRASGFAFTTWTNAFRALDALGVGDKIRRQHQQAQALRVMASSTGEIVQEVDLTQQGKRGPNEIRCVRRDLLLQALEEELPRGAIRYSSRIVSIEEEDGNGDKVLQLTDGSVIRAKVLVGCDGVNSVVAKWLGLATPSYSGRSAARGFARYPDGHGFEPKFLQFVGHGFRSGMLPCNDTDIYWFFTWTPSENDKGVDESAAKMKQFVLAKLRGSNKVPAEALAAIDRSEMSDVLAAPLRFRSPLSLATASIARGSACVAGDALHPMTPDLGQGGCSALEDGVVLARCLGDALLPPPAGSGSGRGKEDRVQAALREYAWIRRWRSVELVATSYTVGFVQQSDSAVVSFLRDRLLSGVLARRLLKMADYDCGTLESY

SEQ ID NO: 289034 - protein, 81 aa, Zea mays
  Clone ID: MRT4577_26690C.1.pep
HYHESQNITGETRIKQRRLGVHRSTPKPFFLTASVFWWAETTTQVTTILFRSEGTAAGGVGDDGGRAGVQTFSGRSMRAVL

SEQ ID NO: 289035 - protein, 121 aa, Zea mays
  unsure (1)..(121): unsure at all Xaa locations
  Clone ID: MRT4577_26691C.1.pep
NIATDDTRRQAGRAQSRARGAGGAXAAKGADETTKPANQEDSAESKARKXDQXXRTDKGQEKAQARQXRNNEEXKRSQAXXTETERSEDRKTESDGNTRTRKQHDDSTADGNTNERAGRTR

SEQ ID NO: 289036 - protein, 105 aa, Zea mays
  Clone ID: MRT4577_26692C.1.pep
TQPVSPPVLTGDLRGDMACVDDVRKLKVLVNADTNDDALTAPNTGAHGIALCLTEHMSYAIYYRINDIMQIIMATTLDLTHQALDRLLPHQMSDYKCIFRAMDGL

SEQ ID NO: 289037 - protein, 89 aa, Zea mays
  Clone ID: MRT4577_26693C.1.pep
LRIPIARPVRGVVAFATIVPSKHTRAVPTHSAVKGERKRDGDVQALSLLPVWHTKAKTPERNQGLLHVSISMREVQTSPQPCSFYYSNS

SEQ ID NO: 289038 - protein, 152 aa, Zea mays; identical to SEQ ID NO: 218998
  Clone ID: MRT4577_26694C.1.pep

SEQ ID NO: 289039 - protein, 152 aa, Zea mays; identical to SEQ ID NO: 218998
  Clone ID: MRT4577_26695C.1.pep

SEQ ID NO: 289040 - protein, 214 aa, Zea mays
  Clone ID: MRT4577_26696C.1.pep
MSTPARKRLMRDFRRLQQDPPAGISGAPHDNNIMLWNAVIFGRYPRNTWGTRYLVATGTKTHLAPHDCFSMFRPFNLSCPYWGAFGSFSYRLKFVFGAYVSAEHRVIITKLKGTFKLTLQFTEDYPNKPPTVRFVSRMFHPNIYADGSICLDILQNQWSPIYDVAAILTSIQSLLCDPNPNSPANSEAARLFSENKREYNRKVREIVEQSWTAD

SEQ ID NO: 289041 - protein, 59 aa, Zea mays
  Clone ID: MRT4577_26697C.1.pep
SRIINFLILPPRPSPRVGLFFFPLPTFISFYALARQASFAWIHPLLHRRCSRTTLAVAL

SEQ ID NO: 289042 - protein, 131 aa, Zea mays
  Clone ID: MRT4577_26698C.1.pep
MSSEEGAQVTCFTEDLHDVTLHFQIVRFSKQIYVWVGCNTAKFGHLYAAATTRPDNRVSVTSVLGGTSDNTGSSMARRLVLKTGLNIVLACNIPKDSPILEAAAERKLVEKLKGLGYIKTPAVEANTSSAQ

SEQ ID NO: 289043 - protein, 181 aa, Zea mays
  unsure (1)..(181): unsure at all Xaa locations
  Clone ID: MRT4577_26699C.1.pep
MSTPARKRLMRDFRRLQQDPPAGISGAPHDNNIMLWNAVIFGPDDTPWDGGSLIRNCAGGTVEIHGALRYLXHRNRDSSGTFKLTLQFTEDYPNKPPTVRFVSRMFHPNIYADGSICLDILQNQWSPIYDVAAILTSIQSLLCDPNPNSPANSEAARLFSENKREYNRKVREIVEQSWTAD

SEQ ID NO: 289044 - protein, 92 aa, Zea mays
  Clone ID: MRT4577_2669C.1.pep
MPPMEAAEDVVIVGAGLAGLAVALGLHRKGVRSLVLESSPSLRASGFAFTTWTNAFRALDALGVGDKIRRQHQQAQAYVVVTTTTRVFPRAC

SEQ ID NO: 289045 - protein, 603 aa, Zea mays
  Clone ID: MRT4577_266C.1.pep
MLARVAAEIAALPEPRGPMRRLCGDLARRIRLLAPLLQHLQDRDLDDALRLADALGAARDLLRAVHDGSKIYQAMQGDAVLQRFATVNSHIHLALDALPYKTFDLPEEVLEQVDLVHSQFKRAATTAAPPDAQLSKDICFALADKAFDPRVLTRISDKLQLHSMADIKKESLALHEMVISSGGEPDACVDEMSSLLKKLKDCVVTEAPTTETPNAQSTSIKHTSPIIPDEFRCPISLELMQDPVIVSSGQTYERSGIQKWLDSGHKTCPKTQQLLSHTSLTPNFVLKSLIAQWCEANGIELPKNKANSRDKKAAKSSDYDHAGLVSLMNRLRSGSQDEQRAAAGEIRLLAKRNVNNRICIADAGAIPLLVNLLSSTDPRTQEHAVTALLNLSIHENNKASIVSSHAIPKIVEVLKTGSMEARENAAATLFSLSVVDENKVTIGGAGAIPPLINLLCDGSPRGKKDAATAIFNLCIYQGNKIRAVKAGIVIHLMNFLVDPTGGMIDEALTLLAILAGNPEAKAVISQSDPIPPLVEVIKTGSPRNRENAAAILWSLCCTDIDQTRAAKAAGAEDALKELSDSGTERAKRKASSILELMRQAEEA

SEQ ID NO: 289046 - protein, 81 aa, Zea mays
  unsure (1)..(81): unsure at all Xaa locations
  Clone ID: MRT4577_26700C.1.pep
EGRVSVTSVLGGTSDNTGSITERLXLHVPVLKTGLNIVLACNIPKDSPILEAAAERKLVEKLKGLGYIKTPAVGANTSSAQ

SEQ ID NO: 289047 - protein, 152 aa, Zea mays; identical to SEQ ID NO: 218998
  Clone ID: MRT4577_26701C.1.pep

SEQ ID NO: 289048 - protein, 169 aa, Zea mays
  unsure (1)..(169): unsure at all Xaa locations
  Clone ID: MRT4577_26702C.1.pep
MSSEEARASFSELVVGSPTRTEGETYSSGDMSSEEGAHVTCFTEDLHDVTLHFQIVRFSKQIYVWVGCNTAKFGHLYAAATTRPDNRVSVTSVLGGTSDNTGSSMARRLXGCTLHVPVLKTGLNIVLACNIPKDSPILEAAAERKLVEKLKGLGYIKTPAVGANTSSAQ

SEQ ID NO: 289049 - protein, 218 aa, Zea mays
  unsure (1)..(218): unsure at all Xaa locations
  Clone ID: MRT4577_26703C.1.pep
LPSDPFSSSESSFALSCSLSEASSSSSSSSESLGAPIPKPSSAMSSSSSPKPSKSPSTEVSEEXLLSSLLCPLLVPSAXSMMSSTSTAVLFFPDSCATVPLSFPQPSNSSTNPVSISPTANSKSLAMSSFCSMSSPGCGVTVSSSSSSGSGSGSACFPFFPFFLSFFAFFEATSLGLTPRSGSSVYFLFLPAPASFALAAADSSAPPSSDTSSWSEMV

SEQ ID NO: 289050 - protein, 66 aa, Zea mays
  Clone ID: MRT4577_26704C.1.pep
KGPPGGGNWPFGGGAGAGKKKKKKKKKKKKKKKKKKKKKKKKKKNKKKKKAKKKKKKKKKKLVPRP

SEQ ID NO: 289051 - protein, 110 aa, Zea mays
  Clone ID: MRT4577_26705C.1.pep
YDVPHLDNNLTGTRFYRYMQKGLGQRMHVQQWVKRRVRGSSMPFQAQSFIEPSTGEVNPPVTSENLSANSQAVNDVGAVEGTDMNEKSVQKPKKKKKKKKKKYSALLPLL

SEQ ID NO: 289052 - protein, 53 aa, Zea mays
  Clone ID: MRT4577_26706C.1.pep
EHAPHLSYGAVVVTRRRVRRPEVNTTTPIRGSHVLSFRLHQPYHRTSIIITTH

SEQ ID NO: 289053 - protein, 38 aa, Zea mays
  Clone ID: MRT4577_26707C.1.pep
VHYKDYEPCPRKLILKRRLVAPSPPRQQEDVWLTTLLE

SEQ ID NO: 289054 - protein, 47 aa, Zea mays
  Clone ID: MRT4577_26708C.1.pep
FSMKEGIQLVGMLGEHQMTYLIWLQQPATRILVVNSSNAFILAACAP

SEQ ID NO: 289055 - protein, 102 aa, Zea mays
  Clone ID: MRT4577_26709C.1.pep
ARARREILRYGSLGIALSCLFVAVRNWKAMQFASPKGLLNFLMGGNSSVFARNEGESLSSRVQQIKKYLAEFESGGSATYVPEFPRKLDWLNTAPLQFGRVI

SEQ ID NO: 289056 - protein, 26 aa, Zea mays
  unsure (1)..(26): unsure at all Xaa locations
  Clone ID: MRT4577_2670C.1.pep
VQLCNGLYYKAFXTTCDISYTIVSRL

SEQ ID NO: 289057 - protein, 66 aa, Zea mays
  unsure (1)..(66): unsure at all Xaa locations
  Clone ID: MRT4577_26710C.1.pep
VDPKKSPKEKKTPLGGEMEKLRPXQTKTARMEKKKDPDKRVKPPPPVVMPGLNKGATFFRPKKMGL

SEQ ID NO: 289058 - protein, 52 aa, Zea mays
  Clone ID: MRT4577_26711C.1.pep
LCFLRCPSCQLSIICTSSNLTYGTRYLLYLLIQYFLLWHRVLFCRAGCSAVA

SEQ ID NO: 289059 - protein, 109 aa, Zea mays
  Clone ID: MRT4577_26712C.1.pep
LRISVQAGFLLPVATMSLAWAIYIRRLAYARSLCLNTTVGKWGFTIFTLLSQFMLKGLTLAFLMVDDINFFYDQSPESMMSLCTDMYFTVFGIVNFFSRLLLYTVTRVT

SEQ ID NO: 289060 - protein, 42 aa, Zea mays
  Clone ID: MRT4577_26713C.1.pep
TRQSESEILAPSRRYKSHLHPPLLLILDPSLRTPPLVADPKG

SEQ ID NO: 289061 - protein, 48 aa, Zea mays
  unsure (1)..(48): unsure at all Xaa locations
  Clone ID: MRT4577_26714C.1.pep
ISRPAESLTARPWLKTRMPYPSLLTVRSNMGRGGSGGGYGMRVFXHGR

SEQ ID NO: 289062 - protein, 114 aa, Zea mays
  unsure (1)..(114): unsure at all Xaa locations
  Clone ID: MRT4577_26715C.1.pep
AEADRPPXPFEIALVTIHKQLGQRIFYIFPALPLNPIATTSIAQVHLPTLAHRTQALFKIHHDGVNDIILHDLNNAKYIIESIASAHPQNHFNPKIDECPKETPKELDFNHQFI

SEQ ID NO: 289063 - protein, 202 aa, Zea mays
  Clone ID: MRT4577_26716C.1.pep
AAQLKDSAARKRDRTEAAHSTQDHTSYCCAAQWASACRATRRTRAPRRRGWCSPAASSGSTPRRPRPGRRCRRPAARAPGSSATPTGWRSRAPSPSRRSPPARSSRPGRSTSCSPPRCGAAASPARRSPRSPSGPARRSSRPRSRPRPAAGSGAARWRRSCSRSQRRSTRRRTRSRPSRRRSRTRSGGWRAGAGGRPGSPPT

SEQ ID NO: 289064 - protein, 120 aa, Zea mays
  Clone ID: MRT4577_26717C.1.pep
PPPKIQGPTLGPCKKHFFTPKNRTWNNGLKKQMGGEKGPSFLTPQKNPNYFFPPPPSQINWAPFSNPPQPGPWNLKKRGTWGPPWRPQKRRFLLVRPGGPSPPRSETPKRGRGVFFYCPP

SEQ ID NO: 289065 - protein, 44 aa, Zea mays
  Clone ID: MRT4577_26718C.1.pep
AGSRFTASCFFPPRAFSARTARSSTASLLADRFLSALSTIEPLS

SEQ ID NO: 289066 - protein, 113 aa, Zea mays
  Clone ID: MRT4577_26719C.1.pep
GGPRLRGGRARGRRGHRPLTGGGPRAAGRVSSPGQIGPPGGGNHSPLGMARRPLSRKRVDRMGRELKLGLGGGRPQAPVRNRPKGSCAGIKFLGGIKRKQNNREKGGREKRNQ

SEQ ID NO: 289067 - protein, 43 aa, Zea mays
  Clone ID: MRT4577_2671C.1.pep
QGQVHRLQVQRRGFQRCTLAELSIPILSLVLKNTIGNIPSFTF

SEQ ID NO: 289068 - protein, 77 aa, Zea mays
  Clone ID: MRT4577_26720C.1.pep
RFPPPKKRNSDPVLANTKWDSPSPSGGGQTRKFIFWKQPFKEVKIGPQTKPGDFFEKFKKNTRALKNTHNNGQGGLL

SEQ ID NO: 289069 - protein, 81 aa, Zea mays
  unsure (1)..(81): unsure at all Xaa locations
  Clone ID: MRT4577_26721C.1.pep
GRTYNRKFALPKFSGVYHETGEPLIESMDDAAEFIESRVYAFDKQNEPVYDDXFKEGLVVNLSSEKPPKEVAVKVLIALSK

SEQ ID NO: 289070 - protein, 43 aa, Zea mays
  Clone ID: MRT4577_26722C.1.pep
GPSRPGRASKGALPGRHFPFKNPPPLQFLGSYRPLLGRFFFRG

SEQ ID NO: 289071 - protein, 111 aa, Zea mays
  unsure (1)..(111): unsure at all Xaa locations
  Clone ID: MRT4577_26723C.1.pep
KPQPLIFGPASIVGGGLPSERERMPAPVFQPSYRMPPMSIXKTGLGEIKMMEKWQKRAPEVMKKSTSAWPKDGTSSAQKDEGPQEEKTKGWGDWKDDNPCGAGNKKLPPCG

SEQ ID NO: 289072 - protein, 76 aa, Zea mays
  Clone ID: MRT4577_26724C.1.pep
KKNLAPQRKILLRKKSCGLLTTPIFFFPQRVCFSPEKKQHSVFFCEFTHCECNSYKQETGQGADLSNKEYEKMKSK

SEQ ID NO: 289073 - protein, 73 aa, Zea mays
  Clone ID: MRT4577_26725C.1.pep
WLCAMIIVCTLVSTDPFWVSDCLSIHTLFIQHGNVGIYITYLAGANLSEPACSWLTEAARAEFRAYVRVHATS

SEQ ID NO: 289074 - protein, 59 aa, Zea mays
  Clone ID: MRT4577_26726C.1.pep
APKVLQAIQLMTKNRVKHIRVFDGPGILGMVSLGDFVGPGVAQPKEEFNRLNDSIQGGF

SEQ ID NO: 289075 - protein, 560 aa, Zea mays
  Clone ID: MRT4577_26727C.1.pep
PGSSAGSSSGVMLPGVGASLGEICRDYMNGRCTKVETDCKFTHPPQQLLMSMLAATSSVSALGHAPLAPSAAAMAAAQAIMAAQALQAHAAQAKAAGGASGSVHKADEADALKRTVQISNLSPLLTVDYVKQLFGLCGKVVDCTITDSKHIAYVEYSKPEEATAALGFNNKNVGGRPLNVEMTKSLPSKANNNLPMMMQQAIQLQQMQFQQALMMQQSIATQQAAARAATMKSATEAAAARAAEISRKLKAEGFGADNMEEKHAKGKSRSPSPSTRRSKSRSRSPIKYRRSRRSRSYSPPVRRSREQRSRSPSKSRHSKYGSDRSHRDDKDRYSRSGRRESERSRDHHSSSSRRNRSKSRSPRHKKPSRVDSRSPKKQREESLSPSKSRSARAGSRSPHHHKGSKSSPTRDRHSRHSRHSRSRSPGRKHRHSDKRDSRKSEIQDDKRRSHRGSRHDKDESSVKDEGERSHRSNRGDKDERSVKDPVEDKGMDTKVVAHKRSSTVSEDEILNNNSSNHKKYRHEVGLEVDGNDVCSAAADLDRKHETGVDGSLGGAAESAM

SEQ ID NO: 289076 - protein, 405 aa, Zea mays
  unsure (1)..(405): unsure at all Xaa locations
  Clone ID: MRT4577_26728C.1.pep
MDRPINICTSPRMPLSLYEQQTIKEFWRKKQEEIEAIEDFGEHTIPVTCLKKVICAKKGKMMMTSDTPTFMTKACKIFVQELSLRAWMCANSHNRSIILDSDIAEAIASIESYDFLNDVLCVHLEKYKSDPXSTIYKKSSXNRVINQSPTPLQPLSHQYQMTQFIPQSTRYCPFIHIPPILPQTNAIHMHLPLPLPPITYMTKDLVFFGKRISSNDDAIDLVTPPQLLPEALSNIPNKCYMCNIASADTYCVGSAKTCNFVAEDGDMAFHFPYVPSKPIQLSTSLSTTNSGCSIYTDITELNHIKLKVTHIENSTYGINPEATFDVNDGQQHAGDETTAANHMHTEHGELDAEFVTTTNANADDNNINWEVDMASDSMLMEFWRDVMMKEDPTSLPDIISTNDTI

SEQ ID NO: 289077 - protein, 86 aa, Zea mays
  Clone ID: MRT4577_26729C.1.pep
KFRPQGSTYFLLLLLRQICDMVTIARYLNVTLIVPELDKASFWADPRYYFPFFLSIPILFSVPFLKRTVFFGIFFRSDFQDIFDVR

SEQ ID NO: 289078 - protein, 105 aa, Zea mays
  Clone ID: MRT4577_2672C.1.pep
IISLLSSPSIDTTSLMAPAPSTHVWPASQEYIRTAFASAARGDPLRAAVRVYVDESRPPDALQRQVASLARERYVRSRTVAKFLRRGEFPDLVMIPKHFALLHST

SEQ ID NO: 289079 - protein, 73 aa, Zea mays
  unsure (1)..(73): unsure at all Xaa locations
  Clone ID: MRT4577_26730C.1.pep
PIIQNEMHFFYHNIPFINNTTHLXPNKHHHTNLKLTNSNNHTRNIISVPITAENDLGHYLFFLLLLPDTWVNP

SEQ ID NO: 289080 - protein, 46 aa, Zea mays
  Clone ID: MRT4577_26731C.1.pep
INPYSFFLTITSYTLVYFKRISPPSHNPFYLPSPILQTSQLKFHLT

SEQ ID NO: 289081 - protein, 109 aa, Zea mays
  Clone ID: MRT4577_26732C.1.pep
GVFQAQLKEFKWGLSLLGVAKFPGGAPNKLSKIKVGGPPMGGVLPVFSQKQKSALGWGSKKKKLFPLAPPPKKTRPIRGALPKHQLSFKPEREKKREKFFPLRKYPLKA

SEQ ID NO: 289082 - protein, 51 aa, Zea mays
  Clone ID: MRT4577_26733C.1.pep
WRNHGIWARNWGVMWYIYPHASVVLGIRQEAARHASGTRLQGPETSAAGCH

SEQ ID NO: 289083 - protein, 115 aa, Zea mays
  Clone ID: MRT4577_26734C.1.pep
MAVQIVGFDGVEIHGAHGYLLEQFMKDKVNDRTDEYGGSLENRCRFALEVVEAVVNEIGADRVGIRLSPFAEYSESGDSNPKELGLYMMNALNKYGILYCHMVEPRMKTRGEKTE

SEQ ID NO: 289084 - protein, 133 aa, Zea mays
  unsure (1)..(133): unsure at all Xaa locations
  Clone ID: MRT4577_26735C.1.pep
MAVAAPASDAKPRLNVPPSMAAALRLDPVGLGAGPSMPSPLRRLAEPSQTPLPSKTTYSDPFIPXCRSSSRLQNFALFDSLFSPARDDTPYSRLFGAGFFGPVSPNPTTATSEASAWPNTNLFRLRKDNSVPT

SEQ ID NO: 289085 - protein, 356 aa, Zea mays
  Clone ID: MRT4577_26736C.1.pep
VHLRGLPGTRTAALAKRSRPGPRAHGHGRGSLPLFPRPHAAHAASVSVRSSGAIETPRHAPPLLPCTFLPPKARARGPKTSAFSCPPACLLVIAAAHEPPAPCRPALYGSAPTSPRGARKRSRQKPPPRRARRSGMASTVTFNPVSAQAALIQKPRNLGAISYAGLKMPASVSSGSESSFLGWNASLRAAVTPRIVPKAKSGSQISPQASYKVAVLGAAGGIGQPLGLLVKMSPLVSELHLYDIANVKGVAADLSHCNTPAQVLDFTGPSELANCLKGVDVVVIPAGVPRKPGMTRDDLFNINASIVKTLVEAVADSCPEAFIHIISNPVNSTVPIAAEGLEQKGVYNPKKLFGVT

SEQ ID NO: 289086 - protein, 394 aa, Zea mays
  Clone ID: MRT4577_26737C.1.pep
MASTVTFSPVSTQAGLIHKPRNLGATSYAGLKVPSFGSESSFLGRNASLRAAVTTRIVPKAKSGSQISPQASYKVALLGAAGGIGQPLGLLIKMSPLVSELHLYDIANVKGVAADLSHCNTPAQVLDFTGPSELASCLKGVDVVVIPAGVPRKPGMTRDDLFNINASIVKSLVEAVADSCPEAFIHIISNPVNSTVPIAAEVLKQKGVYNPKKLFGVTTLDVVRANTFVAQKKNLKLIDVDVPVVGGHAGITILPLLSKTRPSVTFTDEETEELTKRIQNAGTEVVEAKAGAGSATLSMAYAAARFVESSLRALAGDPDVYECTFIQSEATDLPFFASRVKLGKNGVESIVSADLEGVTECEAKALDALKAELKGSIEKGVAFASKQQEAAASV

SEQ ID NO: 289087 - protein, 62 aa, Zea mays
  Clone ID: MRT4577_26738C.1.pep
ACIVIKVKCAGHEKKFVACFLRNRVTGYGVCRVCECWGGNEYFIIRYYPCAYLNCGPKKLCI

SEQ ID NO: 289088 - protein, 73 aa, Zea mays
  unsure (1)..(73): unsure at all Xaa locations
  Clone ID: MRT4577_26739C.1.pep
KIHGGAILNGXYSIQNGPNXALKQKXTMQXXRSCXXKTQXFPLXTRHXNRYQXFPXXEPXIAXCNXNKTKXMA

SEQ ID NO: 289089 - protein, 103 aa, Zea mays
  Clone ID: MRT4577_2673C.1.pep
ARAGPLPPVSLALAPTPTPSLISRREEDAAVGGAADGSCPWIASIGGNRVGGSWCEGKGGAPRRRSGLKPELGTNVSSCFFFFLCPRRRTGLMNHDVSVVWDR

SEQ ID NO: 289090 - protein, 83 aa, Zea mays
  unsure (1)..(83): unsure at all Xaa locations
  Clone ID: MRT4577_26740C.1.pep
GKRFGIDKPLIQLWAGQSLIPVTYAGAVSTIDDLXRIKNASKSRFYITLRSTLHISEGHLPYKDTDLRHNKQSIDAQLSKNIW

SEQ ID NO: 289091 - protein, 83 aa, Zea mays
  unsure (1)..(83): unsure at all Xaa locations
  Clone ID: MRT4577_26741C.1.pep
ASXSSSTRCCIYLRDMKKRIDMMERGEEEAIAGWKQIKEVGVRVLEAVAAARAPEELLGEADVAAHGADRGCGGDSAGHLDRV

SEQ ID NO: 289092 - protein, 138 aa, Zea mays
  Clone ID: MRT4577_26742C.1.pep
IIQEYYIGAGDTSQYVCSVCCLVGIALVWIIDDHAGILEGLFYYQRSYLSFLQSGGIPDKSEVAKVLTGQRFMHVVGVSRSKRFPHPVIHDEVRLSPAVSEQTSQEPATRMSVGSGRLPVDGNRKSRELASESSIAAR

SEQ ID NO: 289093 - protein, 41 aa, Zea mays
  Clone ID: MRT4577_26743C.1.pep
KKKSRFVEHGLNVKPFTYTVVPSSGTSVFENELYLTCKFIH

SEQ ID NO: 289094 - protein, 41 aa, Zea mays
  Clone ID: MRT4577_26744C.1.pep
GYRPISHLTDLGEQKKVHPKTRLWFALMRPPSWLSKSSSFS

SEQ ID NO: 289095 - protein, 51 aa, Zea mays
  Clone ID: MRT4577_26745C.1.pep
SIAIKSWYNLSSGIILKVLNMRWCPDDRSSQIVSSLDRAFSQSINILPKCW

SEQ ID NO: 289096 - protein, 81 aa, Zea mays
  Clone ID: MRT4577_26746C.1.pep
FSSLQKGVSLSAGLSIKAGRPTLFISLLLFFLNRLLLYSITLRSLFSYSHSFYRPSLSLSLSDSRLFLVYLFSYILFILLF

SEQ ID NO: 289097 - protein, 50 aa, Zea mays
  unsure (1)..(50): unsure at all Xaa locations
  Clone ID: MRT4577_26747C.1.pep
FVXCGGXCXXXWPRARQXPCREGPXAGPXXXRXXXGAWXPSLIMPXACRS

SEQ ID NO: 289098 - protein, 127 aa, Zea mays
  unsure (1)..(127): unsure at all Xaa locations
  Clone ID: MRT4577_26748C.1.pep
MPSCPACDSLVGDLMEVAVPGDNPEIVDHEKAEDIEVADEEISSMDLIKMREIVGAYLGSTIKNAVVTVPDYFNDSQRQDTKDDGEIAGLNVLRIINEPTAXAAIVYGLDKKATTDAEKNVLIFDPW

SEQ ID NO: 289099 - protein, 47 aa, Zea mays
  Clone ID: MRT4577_26749C.1.pep
RLDGARHRAQKGCGIADMKMYPKISCDIRDSLRVRKSVHVSVGGRVG

SEQ ID NO: 289100 - protein, 164 aa, Zea mays
  Clone ID: MRT4577_2674C.1.pep
SFWDNPHPILEIRIRFFSRQIPRLEENGWMSGGGGANDRGSNWMAASPAHSLSGHCLSVPLLSEYFLSPPLYADAARAALHHQMLVRTVRYLRQAHVAGWCTVRAKIHGSVEGQSGGQMEAYPLPAVHPTPFCWLLLGFLGVLWWGSPVVGIACHGGAALLVLN

SEQ ID NO: 289101 - protein, 75 aa, Zea mays
  Clone ID: MRT4577_26750C.1.pep
EHEIMVALYVNIFVDSVQYATSKWFYNLVTSSPVVVHAGHCSVSVCHVEPLLPQGVTPSCAYTGVHNDYHVTHAS

SEQ ID NO: 289102 - protein, 71 aa, Zea mays
  unsure (1)..(71): unsure at all Xaa locations
  Clone ID: MRT4577_26751C.1.pep
ALPVIGERPYPLLYHGIVEXCRCRAWVHRCRAQGTAXXRRAPGSAGPTTRKAPGTXRRXRRXPPXTTHFAG

SEQ ID NO: 289103 - protein, 161 aa, Zea mays
  Clone ID: MRT4577_26752C.1.pep
EWVSEVRRAPRGGSFGRGLHHPRPPEVNRVSVNQVGEENQSHDRHERSGSYPRLTYQVCLAIVGRLPPDTLRFRTGSPRGNPPEVPRRLTRPVAAAQHGVRGRASWFIRTGSPVGAYSCGYFPCHTGSSRSADRMPRLSHIRRTDVEERCQVGLSRGGCSF

SEQ ID NO: 289104 - protein, 77 aa, Zea mays
  Clone ID: MRT4577_26753C.1.pep
FWLLPKRPKGDCLPSQLVWLPQGFSNSIFLKDRQLICIPPPFGGIGPLKSKPQRPAILLKIAKFGPRGVPAQGPPAN

SEQ ID NO: 289105 - protein, 167 aa, Zea mays
  unsure (1)..(167): unsure at all Xaa locations
  Clone ID: MRT4577_26754C.1.pep
MALTAAPASGDSQSGPQRNYQVVVAATCDMGIGKGGVLPWKLLGDLKFFKELTLTTTDPAKKNAVIMGRKTWESIPVKSRPLPGRLNVILTRSGSFDFATVENVVICGSMKSALELLASTPYCLSIXXKVFVIGGXGQVLRDYLNGPACEAIHLTDIQSSIECDTFI

SEQ ID NO: 289106 - protein, 74 aa, Zea mays
  Clone ID: MRT4577_26755C.1.pep
RIEKKAPPKFMPGAPVCLIQQKMIGQSFSRAAFFALRNPGGEGQSFWQLAPASPLRGAPGPFPFMYGEGWPFLS

SEQ ID NO: 289107 - protein, 73 aa, Zea mays
  Clone ID: MRT4577_26756C.1.pep
KHHCLTCVHELEESTYNALSAPAVCHFNITKRLINHSWKMKSVSRILYIGRSDHLNTLEVPYLQTLHALPNNE

SEQ ID NO: 289108 - protein, 54 aa, Zea mays
  Clone ID: MRT4577_26757C.1.pep
GMYDRNTIVIFNSIFIERLITSDSLLTIWSIAKGFNNLSGKITVNSGNTILVLH

SEQ ID NO: 289109 - protein, 105 aa, Zea mays
  Clone ID: MRT4577_26758C.1.pep
MQYQHAGSRSRMPPFARGGGAYSRGRKQFYPPSPLPSAALSLPLQNKYEVLMEAGRLAAEYLLAKGVLPPGSLQQRSGTVVPGGWGQLPPPPPLSVTLEAQAYHG

SEQ ID NO: 289110 - protein, 40 aa, Zea mays
  Clone ID: MRT4577_26759C.1.pep
SVVGVFEVNFIEPSHDKQDFERNPLFIRIETRLRQVIIDF

SEQ ID NO: 289111 - protein, 34 aa, Zea mays
  Clone ID: MRT4577_2675C.1.pep
CCSAVWFHIYVPYMFIISLHYSVLCIKHNIPFIA

SEQ ID NO: 289112 - protein, 184 aa, Zea mays
  unsure (1)..(184): unsure at all Xaa locations
  Clone ID: MRT4577_26760C.1.pep
PRDELYWERGTSYCRELWPKRWSLSSLGGNPGKGSFETPHKKGKSLPKILGGGGEKNLGGEKKKGEGGCFFXXXKKEERGVFFFFFFFFLKKKKKKKKFFFFFWAWRPPPAXXXGKKKKERGGGRRSPLLFCFWLVGGGGDAHTHPPPPTPLFLFFFFFPXAPARGEEGGGGRARTIFFFFFFN

SEQ ID NO: 289113 - protein, 87 aa, Zea mays
  unsure (1)..(87): unsure at all Xaa locations
  Clone ID: MRT4577_26761C.1.pep
SSSPVRKLQYRPPAPSPPPFHPPPQRLPASPSEPPAELRFHKEPQKPPPXPPAPKPPPPPEPPPPLKPPWWPLYPPPRVRERVGGRV

SEQ ID NO: 289114 - protein, 263 aa, Zea mays
  unsure (1)..(263): unsure at all Xaa locations
  Clone ID: MRT4577_26762C.1.pep
PRGRPGREKSPNLSTPSRCTWLLRHSLLSSFTLPGGRPPLLPSPTAAAAXAPQPPPMASSPXQRSRPPFPAASIAPPPPPPHAVPAHLTFVGRPWTPCSAPELPTPATILPMAXSDRPLLTLALGVAPXAPSPPGPAHRQPRAPLPHVPYRQAVSPVSSSHSNSALRRLAVLSSPVDSSNPDVFTSCAPPRFAQPLRDVVHPLDVDAVPRAPSVRRNAQPTDSTRVSNPIRLGCSICILWSTLITLWSMSHIYVCEYVCMDSS

SEQ ID NO: 289115 - protein, 46 aa, Zea mays
  unsure (1)..(46): unsure at all Xaa locations
  Clone ID: MRT4577_26763C.1.pep
LDQIRSDLTRPVLLIDRVCLCRLTKMGALVWEKVVHRXPGXWXASS

SEQ ID NO: 289116 - protein, 70 aa, Zea mays
  unsure (1)..(70): unsure at all Xaa locations
  Clone ID: MRT4577_26764C.1.pep
PPXPGQCCFQLHNQPQTQQHPIYSCEHDTNYILHLCLLFLKHSETLTTTFLRRIATDPRQQQLARPKLLK

SEQ ID NO: 289117 - protein, 83 aa, Zea mays
  Clone ID: MRT4577_26765C.1.pep
GEKPFPEGGFKTGPVAPPKFLESPPPVIAGKQYYPVSVFPRTGGGKKGGKPQFFGAPFFGGKFFFFKGRAGPKRWFKGPRKGV

SEQ ID NO: 289118 - protein, 242 aa, Zea mays
  Clone ID: MRT4577_26766C.1.pep
RPAAPAPSPTAAAALSSSATSHGLVSLLQRSRPPFPAASIAPPPMPSLLTSPSSAVLGRRARRPSSLRRPPSFPWQELRSAPADLGTRRGSKQRLLPQDRLTVSRELLSLTSPTDKQVRPSPNPLSSARMDSSLLTPACAVSPVSSSHSNSALRRLAVLSSPVDSSNPDVFTSCAPPRFAQPLRDVVHPLDVDAVPRAPSVRRNAQPTDSTRGLEPDSARLFDLYFVVYSNYALVDVAYICV

SEQ ID NO: 289119 - protein, 110 aa, Zea mays
  unsure (1)..(110): unsure at all Xaa locations
  Clone ID: MRT4577_26767C.1.pep
AFGPSEFSDAVTIFGGGGQAGTWGKALGAKVYYCNNMVEQELLGGGLLVVQRFCFXKTLVXSSPKFVFPRFSGXNVESAPPPLKKGSKLGNFFFWEEEADAMEKKAGVLI

SEQ ID NO: 289120 - protein, 36 aa, Zea mays
  Clone ID: MRT4577_26768C.1.pep
FKRKKKLDKNMYNTYSLQSVNSLVKYILSSVLSSKT

SEQ ID NO: 289121 - protein, 203 aa, Zea mays
  Clone ID: MRT4577_26769C.1.pep
LRDTALKNIMNHIHYEDESTRYLCVCPVNKALNMICCWVENPNSDAFKRHLPRIYDYIWLAEDGMKLKVYDGTQAWDTAFIVKAYCSTDLVHEFSPTLRKAHEFIKSLQIPENQPDHENYYRHRSKGSWAHSTLDNGWSVSDSTAEAIQALLLLSKFSSNLVGDPIKEERLFDAVDCLLSFMNKDGTFSTYERKRTASLLEVL

SEQ ID NO: 289122 - protein, 31 aa, Zea mays
  Clone ID: MRT4577_2676C.1.pep
CILRLGYFHILDLSSRVKLNPFICPSPTRIR

SEQ ID NO: 289123 - protein, 69 aa, Zea mays
  Clone ID: MRT4577_26770C.1.pep
SMKEVLVKSPLWKKTSMEGYSSGHRKDPKGGRYLSTIFNLRAQHPLNNATFSYFGVKGYCPGLSSRITN

SEQ ID NO: 289124 - protein, 128 aa, Zea mays
  unsure (1)..(128): unsure at all Xaa locations
  Clone ID: MRT4577_26771C.1.pep
RTLLDPYLALTEATLIKTPSYERFSPHHLPASSAHSNYRASHLSSTTLSTKIGNHNGVQMISPVEITLRDLLPSDFTFSAATSSHQTDGASNEDRTGHSDWDHXRHNPAERILNESTSDIGANXYHMY

SEQ ID NO: 289125 - protein, 568 aa, Zea mays
  Clone ID: MRT4577_26772C.1.pep
LLTYLGDSVDHGSGSSGLKSPLASRPSSFPGIGVPSEALVRWHMRLEYFAYETLQDLRIGKLFEIIVDYPESSPAIEDLKLCLEYTGQHSKLVDSFISSLRYRLLTAGASTNDILHQYVSTIKALRTIDPTGVFLEAVGEPIRDYLRGRKDTIKCIVTMLTDGSGGSGSGTGNAGDNLLEELNRDAENQENADYDDHANIDEKQAWLNSESWEPDPVEADPLKGNRNRRKVDILGLMVSIIGSKDQLVNEYRVMLAEKLLNKSDFEIDSDIRTLELLKIHFGESSMQKCEIMLNDLIDSKRTNSNIKTSLLKSSQTVPGQEEAEVSHDVLDATIISSNFWPPIQIEDLVVPASVDQLLSDYAKRFHQIKTPRKLLWKKNLGTVKLELQFDGRSVQFTVAPVHAAIIMRFQEKSSWTSKALATEIGIPMDSLNRRISFWTSKGVLTESAGPDADDRTFTVVDSMSDVNKDSIVNERMAEYQMTEEEGESSVASVEEQLKKEMTVYEKYIVGMLTNFGSMSLDRIHNTLKMFCIAEPSYDKSLQQLQSFLSGLVADEKLETRDGLYLLKR

SEQ ID NO: 289126 - protein, 354 aa, Zea mays
  unsure (1)..(354): unsure at all Xaa locations
  Clone ID: MRT4577_26773C.1.pep
MRHFCLLLPRNSLRTNSNIKTSLLKSSQTVPGQEEAEVSHDVLDATIISSNFWPPIQIEDLVVPASVDQLLSDYAKRFHQIKTPRKLLWKKNLGTVKLELQFDGRSVQFTVAPVHAAIIMRFQEKSRYSKNCIIACIICTLLTKSIELSSWTSKALATEIGIPMDSLNRRISFWTSKXAHMYQRIIVALFFLCEICLSSCRTCXMTVGAXHYYCILAVADSFCDVXXGVLTESAGPDADDRTFTVVDSMSDVNKDSIVNERMAEYQMTEEEGESSVASVEEQLKKEMTVYEKYIVGMLTNFGSMSLDRIHNTLKMFCIAEPSYDKSLQQLQSFLSGLVADEKLETRDGLYLLKR

SEQ ID NO: 289127 - protein, 80 aa, Zea mays
  Clone ID: MRT4577_26774C.1.pep
SGGRSSPRREREHGREEEEEREEEQGGGGGQNARSYRHVKSRIIEGSVIVNPAVHPTASVAGEDKNLAVLCFEVNASFDD

SEQ ID NO: 289128 - protein, 55 aa, Zea mays
  unsure (1)..(55): unsure at all Xaa locations
  Clone ID: MRT4577_26775C.1.pep
FGWHYGIVIMLDERGSKIWFFRKAEXLVVGFFFFINLTRLCVICFFQKIKFYSCY

SEQ ID NO: 289129 - protein, 89 aa, Zea mays
  Clone ID: MRT4577_26776C.1.pep
NPSRHTRAKSLPPRPPNPLRRISSRESKFPSIRGRLGRGLAVALVIPRVRASRSGIHTGRHVEVLPLPAAGLRAKPSGRAPRSRGGDDR

SEQ ID NO: 289130 - protein, 97 aa, Zea mays
  Clone ID: MRT4577_26777C.1.pep
TGQHSYLTGQTNPMEPGGFTDPKKPDSRATKQPAPTTPTIRTRGGGQTRPTDPGHRGGEFPTPNLAAEAIKRGAPAFGGAHHVQRGDGFATGGLRGG

SEQ ID NO: 289131 - protein, 218 aa, Zea mays
  unsure (1)..(218): unsure at all Xaa locations
  Clone ID: MRT4577_26778C.1.pep
MSGEGDGTAIGIDLGTTHSCVGVXKYDRGEIIVNDQGNRTTPSXVGFTDSERLIGDAVKNQVAMNPINIVFDANRLIGRRFRDSSVQTDIKLRAFKVIPGPGDEPMIYDQHIGEEKQYAPXEISSMVXLIKMREIAEAYLGSTIKNAVVTVPAYFNDSQRXGTKDAALIAGLNVLRIINEPTAAAIAYGLDKKATSVXEKNVLIFDLGGGNFDVSLLT

SEQ ID NO: 289132 - protein, 108 aa, Zea mays
  unsure (1)..(108): unsure at all Xaa locations
  Clone ID: MRT4577_26779C.1.pep
YEILSLFFLYKYGRQAHKNWTPPXRLPCRKQSTRKCSRKGSVPLGGGSTDEQQPQLHLHCKQXSFPDIXAATQKLQSSGADHDFFDLEKLSFVAPLPLHMRLSWKICP

SEQ ID NO: 289133 - protein, 111 aa, Zea mays
  Clone ID: MRT4577_2677C.1.pep
VPLGVNALKLLLLFVFGATLFLFYNLMDAVTVFIWEAAGSIHLLLLLLLCFLASSLMPYLAQVRLMVGLLKSVGTGDLTTADVERILDAKTVTAAPSMAPSCGLYLANVKY

SEQ ID NO: 289134 - protein, 100 aa, Zea mays
  Clone ID: MRT4577_26780C.1.pep
RPPGGGGQRILPDGGGKPPVTTPKGQVPVYVAGKGKGSQSFRYVVPVVYFNHPTFGKLLREAKEKFGFKHPGVIRIPCPPAGFKGAGALPPGAKKGFARW

SEQ ID NO: 289135 - protein, 68 aa, Zea mays
  Clone ID: MRT4577_26781C.1.pep
GPQGKKNGGPKKNLAGPQRITGKNRGPFWPEFSTNPFLDPTRGAPKGASPKIKPPLYKKMRGGKNLRG

SEQ ID NO: 289136 - protein, 236 aa, Zea mays
  Clone ID: MRT4577_26782C.1.pep
SMLLSKALKMQQDFEDKKHEVIIENLESKIKEQTAAVEKNFELQATEGLLAEAEAKITELNTKLLRQSEQFEQEKQDLNVKLEAEAQQNSDLKRLLTGLQEKCLEFSNKCIQRLRRIFHSVGASSETFTPSAEDLPKTFDHIEGEIDELDEVIAGHGDFCAWVASRGTAAAFLKAGCDHGKIVNRPNFTLSPSILDDIPDLARSISNRFIKMIWTKGGREKAGDEARSHLEPDDEA

SEQ ID NO: 289137 - protein, 55 aa, Zea mays
  unsure (1)..(55): unsure at all Xaa locations
  Clone ID: MRT4577_26784C.1.pep
LDVSLMLRRFLIRSRIVSCSTWFAWCLQMSSVQWYYGVLELPGKNGCDGVVEXQH

SEQ ID NO: 289138 - protein, 60 aa, Zea mays
  Clone ID: MRT4577_26785C.1.pep
FGSSLMQGLVFFHARQLRPHGALQPAARWPAVAVTCWGDAMVTVFVNPQGQPPGLGAVSR

SEQ ID NO: 289139 - protein, 91 aa, Zea mays
  Clone ID: MRT4577_26786C.1.pep
GRTTSVKHQVIPANWEARTASTGRWVTLELTLHSTDLCDLNQSAVVPVHGISHTCIGTYCRVAATSRLLQWSRDEQSSRHPPSTSSSARSS

SEQ ID NO: 289140 - protein, 50 aa, Zea mays
  Clone ID: MRT4577_26787C.1.pep
ASLHVSFKSCLSFLGSRCYVTLWFDMPIPIVKLYPLKKKKIKGGKPNSEL

SEQ ID NO: 289141 - protein, 86 aa, Zea mays
  Clone ID: MRT4577_26788C.1.pep
IGGRKSRGGRIITETPLWGYTAQPQQKVTQGAPQPHNKTVFPLPPLFTHHSGGPGGAPTPRTTKTPEGWSKIGVPPSRDKKRPPPP

SEQ ID NO: 289142 - protein, 128 aa, Zea mays
  Clone ID: MRT4577_26789C.1.pep
RWAGTAGGRTEEGVRVPGGWWDCGRNARGISRAEGWVLLGIWGRMIGRGGDASAPRFNRLGDDSIETSSLYEYCIYYTHTQLTTGSSCSSRARAAPMAMETNRLAVAEQTSRGARPTRPRTRGRGRVF

SEQ ID NO: 289143 - protein, 216 aa, Zea mays
  unsure (1)..(216): unsure at all Xaa locations
  Clone ID: MRT4577_2678C.1.pep
MSSSNNSVSAALSGTTPVFRLRVWQLIAIAVGIVMAILLVIALCLSLRRKKKTVKGFDNTSLAEIPIVSKEINVDRVDAQSLHDGEAPFMPVQDKYSQTKGAGQLGGRRSVDVDAFSQFSSVYNVEKGGSSYSEDYSHSSSGPARKGSSPYAYSASPLVGLPELSHLGWGHWFTLRDLECATNRFAKSNVLGEGGYGVVYXGRLVNGTEIAVKKTL

SEQ ID NO: 289144 - protein, 225 aa, Zea mays
  Clone ID: MRT4577_26790C.1.pep
MGISRDSMHKRRATGGKQKAWRKKRKYELGRQPANTKLSSNKTVRRVRVRGGNVKWRALRLDTGNFSWGSEAVTRKTRLLDVVYNSSNNELVRTQTLVKNAIVQVDAAPFKQWYLTHYGVEIGRKKKAAAAAKKEPAEGQEAEVAAAATEEAKKSNNVQRKLEKRQQGRTLDSHIEEQFSGGRLLACISSRPGQCGRADGYILEGKELEFYMRKLQKKKGKGATA

SEQ ID NO: 289145 - protein, 106 aa, Zea mays
  unsure (1)..(106): unsure at all Xaa locations
  Clone ID: MRT4577_26791C.1.pep
TRPIAMSRTRHKLLSSGQILSYFWEATDIRTSLSXESFCPGGRLVPRPLPLFGRLPAAGGGCXWPRARSRAWRCLGLGWCLREIVFRSXFPPPSEPDAFWXGPGVP

SEQ ID NO: 289146 - protein, 53 aa, Zea mays
  Clone ID: MRT4577_26792C.1.pep
VQAKAHQLISSNPLLRFSVVHNVKAKPTVKEVKRTTSSPSLSSCLEKGLLPNC

SEQ ID NO: 289147 - protein, 126 aa, Zea mays
  Clone ID: MRT4577_26793C.1.pep
KKPPVVPIGKPPFPRGGGLLLSPRAPRFFLLKRGLLASANKVVFPPLWGPPVFTFFAPAFFLLWIFQGSLFPPVVAFASFSPSFFCLSPLGTLGSLRGPAINSLGSPPVLPSFPVGGFNKKYQIRH

SEQ ID NO: 289148 - protein, 72 aa, Zea mays
  Clone ID: MRT4577_26794C.1.pep
LNESHMYPWHTETTVNPALMVLTLKSNGMTEYNELLHIDAGMLDHLLHEKHGYHVSRWNHNAQQNDKPAGSD

SEQ ID NO: 289149 - protein, 54 aa, Zea mays
  Clone ID: MRT4577_26795C.1.pep
LGSHCCMLQVEGCELEQLSSCSCAVSWWLSHMVMHVLMPFSLVMPPGAGKHYPA

SEQ ID NO: 289150 - protein, 81 aa, Zea mays
  Clone ID: MRT4577_26796C.1.pep
VKLQKRTGKEVVNHVGHNFVNGIVHFDIEVINDLVGAKVGGEKDVAIICGRGERKGSVSEREGSGSPPSCLKMIGKSDGGG

SEQ ID NO: 289151 - protein, 95 aa, Zea mays
  Clone ID: MRT4577_26797C.1.pep
YSTPLQPGGQSGFLPSGAAAHEMLLPMVDSQLPVVNFGSLPPAPPPAPPPLSLLPVGPALQPPSLAVRPPPAPATRVLPSPARPFPASLGRAELH

SEQ ID NO: 289152 - protein, 87 aa, Zea mays
  Clone ID: MRT4577_26798C.1.pep
HHMRLRFPLEPCCRVLRLKFGETRELLCCLVLRLNDQNPHGYRTHPTSLTCAPPPPTTLTIYDPLLHVLASVIVPRCQSPWLLIWLL

SEQ ID NO: 289153 - protein, 184 aa, Zea mays
  Clone ID: MRT4577_26799C.1.pep
MAGKGSYVPPQYIPLYSLDAEEDRVPAVEENHATRPKLNQDPTQWSSGICACFDDPQSCCIGAICPCFLFGKNAQFLGSGTLAGSCTTHCMLWGLLTSLCCVFTGGLVLAVPGSAVACYACGYRSALRTKYNLPEAPCGDLTTHLFCHLCAICQEYREIRERTGSGSSPAPNVTPPPVQTMDEL

SEQ ID NO: 289154 - protein, 95 aa, Zea mays
  Clone ID: MRT4577_2679C.1.pep
ATATMAGCDPPAAVLHATTAVPIYASIVGTPISSYLRENTTTTSHGMTQSPDMCRQHTEEMAPVVIISIYDDASLLAMQLKGTIRYCSTVTLFVE

SEQ ID NO: 289155 - protein, 60 aa, Zea mays
  Clone ID: MRT4577_267C.1.pep
GQQFFIAIILSSISTFNKSILEGYTCHSNGIRRFSLTVIFFSTTLEKDMSSQFLGVISES

SEQ ID NO: 289156 - protein, 133 aa, Zea mays
  unsure (1)..(133): unsure at all Xaa locations
  Clone ID: MRT4577_26800C.1.pep
MAGKGSYVPPQYIPLYGLDTEEDRVPAVEENHATRPKLNQDPTQWSSGICACFDDPQSCCIGAICPCFLFGKNAQFLGSGTLAGSCTTHCMLWGLLTSLCCVFTXGLVLAVPGSAVACYACGYRSALRTKYIF

SEQ ID NO: 289157 - protein, 115 aa, Zea mays
  unsure (1)..(115): unsure at all Xaa locations
  Clone ID: MRT4577_26801C.1.pep
MYGRAFMLRYCGSPPPALRRGLARCGTTLRAVAPTETEVETSQGQPANRTCEQKTQHYDGGHKRLLKSHDLYQDILDTNEYPRESESXKDLREITAQHPWNLMTISAVEGQWLNM

SEQ ID NO: 289158 - protein, 72 aa, Zea mays
  Clone ID: MRT4577_26802C.1.pep
TVSGSLVQNPCLQLYKQHRGVVRAQEQKYVKMPTGKGSTSHQATHQSLSDNIHSYQLKIKAHPSSELEVESH

SEQ ID NO: 289159 - protein, 115 aa, Zea mays
  Clone ID: MRT4577_26803C.1.pep
QIAMMCDTNWCTFCDNAISPYSDSLYCSESCLRHDALLHHPMLGYDYAELQGFPHVGSSEIAKRRRSSTHSSLPNQKLPSLSSSFSSTFSDEPFTTIIYQPKPRHVSSTDFMEQT

SEQ ID NO: 289160 - protein, 240 aa, Zea mays
  unsure (1)..(240): unsure at all Xaa locations
  Clone ID: MRT4577_26804C.1.pep
MVCRVTSPPEVDLLHCSTCATPWHSPCLSKAPALADAASWSCPDCSLDSATVAAPSAPANTLVAAIRAIESDNTLSDQEKARRRQALLAGDAPDVADDDDAVDDTFEIVGKNFSCVFCMKLPERPVTTPCGHNFCLKCFQKWIQNKKRTCGKCRAPIPAKMAEQPRINSALVEVIRMAKISKNHNSAGSAVPYHYMRNDDRPDKAFTTDRAKKAGKANASSGQIFVTIAPDHXXPILAEM

SEQ ID NO: 289161 - protein, 153 aa, Zea mays
  unsure (1)..(153): unsure at all Xaa locations
  Clone ID: MRT4577_26805C.1.pep
MAGKGSYVPPQYIPLYSLDTEEDRVPAVEENHATRPKLNQDPTQWSSGICACFDDPQSCCIGATCPCFLFGKNAQFLGSGTLAGSCTTHCMLWGLLXSLCCVFTGGLVLAVPGSAVACYAAGYRSALRTKYNLPEAPXCGDLTTHLFWHLCAI

SEQ ID NO: 289162 - protein, 88 aa, Zea mays
  Clone ID: MRT4577_26806C.1.pep
PGLFLSSPFVQQQPPRDRGPSPAETRTLLLLLLVETRMLLLLALFGSPVSIAIGSPSLHRDLHGWAPGRTRTGGRRWASHFDLISFVS

SEQ ID NO: 289163 - protein, 67 aa, Zea mays
  Clone ID: MRT4577_26807C.1.pep
SQVLALSDADFYLAARLGDLRSWRPALVNCCRFQDHFCLSLYYLQWHRTTMLQKEEKIPTLVEKKKK

SEQ ID NO: 289164 - protein, 297 aa, Zea mays
  Clone ID: MRT4577_26808C.1.pep
MGLREIESTLPPGFRFYPSDEELVCHYLYKKVANERAAQGTLVEVDLHAREPWELPDAAKLTASEWYFFSFRDRKYATGSRTNRATKTGYWKATGKDREVRSPATRAVVAMRKTLVFYQGRAPNGVKSCWVMHEFRLDSPHTPPKEDWVLCRVFQKRKDSEQDNGGGSSSPTTFAGASSQGVVLDLPDDQQPSMTMAGAYVAVDHHQPGSSAVGFALPPHAQDNGLGDGGLDALLMNGATMWQYSSSALADHFPPEEVTAAPMMGLGSRGGGDGCSFFYDSGFDDMANMGFPQGWMG

SEQ ID NO: 289165 - protein, 62 aa, Zea mays
  Clone ID: MRT4577_26809C.1.pep
DEVGQQRPFDFLELRCHQKFTNLRVTLIKHYRKHDHPFHPSLDRKCGIDSRGTASHWNRTRE

SEQ ID NO: 289166 - protein, 79 aa, Zea mays
  unsure (1)..(79): unsure at all Xaa locations
  Clone ID: MRT4577_2680C.1.pep
CLLEATEPGTNVFRDDRDTLAALLRAVPPKMXEPSSXRKATRKAWDSIKXVCVGTXRVKEANANRLQREFGDLAFKPGE

SEQ ID NO: 289167 - protein, 80 aa, Zea mays
  Clone ID: MRT4577_26810C.1.pep
LFVSDTLRYAFPLETQESVLRLHDHYSTDSLMVTSNIPILPVVKTADLFVVEQSLRSVSSVRYPASARVPADAIHSPGAA

SEQ ID NO: 289168 - protein, 57 aa, Zea mays
  Clone ID: MRT4577_26811C.1.pep
IGKVFVGVFVGEGVSESEEEIRFEIEEIGVGGLPQYCVNGREGFIKVVGEVVVELEY

SEQ ID NO: 289169 - protein, 40 aa, Zea mays
  Clone ID: MRT4577_26812C.1.pep
LLFIIRIQCEQSFYCVCLRLLCPIWLYDQSLSPFPHFRSV

SEQ ID NO: 289170 - protein, 159 aa, Zea mays
  unsure (1)..(159): unsure at all Xaa locations
  Clone ID: MRT4577_26813C.1.pep
MAMDPPSRNKASWENYYRTIYTNRXSMAEMHDETSMVTYDGHKVEGPTAIDDNIGSLDFDVCNYHIDTVDCQPSPPHGGMLLFASXGSIRTRPEDYPIIFSHEFHLLPKDDAFFTXNDVLHLNYEVNTDVYSCHERNREDLCAETMNTDCLHYSDVRRI

SEQ ID NO: 289171 - protein, 135 aa, Zea mays
  unsure (1)..(135): unsure at all Xaa locations
  Clone ID: MRT4577_26814C.1.pep
MVIASMRPMAGLLLVLNFFMYMMAMAVCELSINHVMNYGFFMEAGLQLPGDLFPIYFPVVYVVCVFFFIFGVIAGVVGAVXVLAGFHHVRAWNAESLPGASYAGFIAWTLTLFAMAMAVKDIELHGRNATLLCME

SEQ ID NO: 289172 - protein, 205 aa, Zea mays
  Clone ID: MRT4577_26815C.1.pep
MAGGGPAASALSSPWRALLQRALDANAHLRHSTYFQLATVGAAGRPANRTVVFRGFQELCDKIQINTDARTNKIGEIKSCPFGEICWYFTDSWEQFRISGSIDVIDASTTDPAKLQHKEKAWFSSSVKSRSQYLGPQPGIPVLDDEHVKDVHLDPLAGPVDAFCLLVLDPEKVDYLNLKSNQRLIFTRRQKDDGSNDWMAVKVSP

SEQ ID NO: 289173 - protein, 100 aa, Zea mays
  Clone ID: MRT4577_26816C.1.pep
CQTLCNYLKNKQRDAQNSTTENSHEASDMFVHPSTVAIPTIQGGYVNAPMPPFNMYLSSSEMDAQGVQGGYPSLLLGVDQGAASVVKKLQFDGLPNNENI

SEQ ID NO: 289174 - protein, 241 aa, Zea mays
  Clone ID: MRT4577_26817C.1.pep
MGLDYYKILGVDKGATDDDLKKAYRKLAMKWHPDKNPNNKKEAENKFKQISEAYDVLSDPQKRAVYDQYGEEGLKGQVPPPGAGGAGSTFFSTGGDGPTVFRFNPRNADDIFAEFFGGSSPFGGMGGSGMPGMRAGGSRFSSSIFGDDMFGSAFGGGGPDGHGMHTGGRAVKAPAIERKLPCSLEELYKGTTKKMKISREIADASGKTMPVEEILTIDVKPGWKKGTKIPFPEKGNETPHT

SEQ ID NO: 289175 - protein, 164 aa, Zea mays
  unsure (1)..(164): unsure at all Xaa locations
  Clone ID: MRT4577_26818C.1.pep
RGCSRFPLKARSPVPWRSRSPESSPPGXPHEKPPRKPPGAPQDPPPPPQPKGPGQXPGGSLRLLRGXTPPRVEPGPPXGGGPPLKIILFPPFFPPPPGXPDNSPXPPGGFVSPPPPPRISXPREPKMYSLPPPEPWKPRVFLKKKKKKKKKKKKKKKKKKKKPQ

SEQ ID NO: 289176 - protein, 362 aa, Zea mays
  Clone ID: MRT4577_26819C.1.pep
MGLDYYKILGVDKGATDDDLKKAYRKLAMKWHPDKNPNNKKEAENKFKQISEAYEVLSDPQKRAVYDQYGEEGLKGQVPPPGAGGAGPGGATFFSTGGDGPTVFRFNPRNAEDIFAEFFGGSSPFGGMGGGGMGGSGMGGGMPGMRSGGTRFSSSIFGDDIFGSAFGSGPDGHGMHAGGRAVKAPAIERKLPCSLEELYKGTTKKMKISREISDASGKTIPVEEILTIDVKPGWKKGTKITFPEKGNETPNTIPADLVFIIDEKPHPVFTRDGNDLVVTQKIPLAEALTGYTAHVTTLDGRSLTVPISSVIHPGYEEVVRGEGMPIPKDPSRKGNLRIKFDIKFPARLTADQKSGVKRLLGQ

SEQ ID NO: 289177 - protein, 89 aa, Zea mays
  Clone ID: MRT4577_2681C.1.pep
LFPCPNKGPRLRTEVVRRNAHIQNQKPKLAKHVIYVYGLKFVGEVSYKAFGRTCTVQIMKRNMLFFNTRAGAQLTSEQRELPFVPSIQF

SEQ ID NO: 289178 - protein, 83 aa, Zea mays
  Clone ID: MRT4577_26820C.1.pep
MDIDSEPPAESKPTQMDLEDQADAEGKGNDEELADSIGGLSIAPGRTNFKKKPVIVLVIGMAGTGKTTFMHRLVCHMQASTNM

SEQ ID NO: 289179 - protein, 38 aa, Zea mays
  Clone ID: MRT4577_26821C.1.pep
PTRPSFTTTNLTNSSESSYMENFYDHDSNTTIQMTIYL

SEQ ID NO: 289180 - protein, 259 aa, Zea mays
  Clone ID: MRT4577_26822C.1.pep
GRPGREVLPEHRASACCADISWRERSVEMPPGPGVADQAPPPRSPLRGNGAMPPQSPLRIKQDGKFYERLLTRESSAANLSFRYYWAEPGAVPFVWESQPGTPKDVARTAAGALPAITPPPSYLLRHGNVAVGRQVAAASVARRDQKSGGRAAARSGKKRRCRLKRIRIGFVAGIFRRLSLGKRWRQRPAPPAKVWSSSSSSRWLFSSVATETGEHSLHQVQDEIAVPAHPKQHRTVPVPCRCSFSAMWLLRFRNSFGH

SEQ ID NO: 289181 - protein, 101 aa, Zea mays
  Clone ID: MRT4577_26823C.1.pep
NNNNSVIYSLGFISQCVARQQLQFQYYSMHCLQKHEQRRTRAVYQLSTPLTDNLEMVVVLFDLLLQHPLLEAVGTASPCTSVSCSGAGHSMKVPFPAVLYK

SEQ ID NO: 289182 - protein, 70 aa, Zea mays
  unsure (1)..(70): unsure at all Xaa locations
  Clone ID: MRT4577_26824C.1.pep
HQQQLLPFSQLVGVSPGAFXTRQHVLPFYLHPAPSVGTLLQVQQLLPLAHLDLSKPAVFCLKPIIGGALF

SEQ ID NO: 289183 - protein, 90 aa, Zea mays
  Clone ID: MRT4577_26825C.1.pep
GPGQIQPLFTPTNKGNRSGRFYLVPRLNPNNSSNFKAQFPVIQNLTIEHWLNPLNSLNQGQLALPHHLVGSLQWLCLHKTGRVWSAAEFR

SEQ ID NO: 289184 - protein, 42 aa, Zea mays
  Clone ID: MRT4577_26826C.1.pep
AEGAHGNPGLLRPLRLEVPFAPGQMFPEKRAKKLGWVPNVLF

SEQ ID NO: 289185 - protein, 105 aa, Zea mays
  unsure (1)..(105): unsure at all Xaa locations
  Clone ID: MRT4577_26827C.1.pep
TSSFLITEVSTPYFFILQPXAWWGEGVHVSIACDSARLVACRCHGSSTFHGFRSRARRYFPDPCFVAFGPCPCRGLVLSPQPPRALCLSAPVLGSRIACPLGLNL

SEQ ID NO: 289186 - protein, 75 aa, Zea mays
  Clone ID: MRT4577_26828C.1.pep
NFFLSGFTLKPVPFFLELKMGFWGVKVLFSSLAKQACAFFFLVLALYPSFFSFFLVGPPGLGTVFSTRFFFFSPP

SEQ ID NO: 289187 - protein, 86 aa, Zea mays
  Clone ID: MRT4577_26829C.1.pep
AGGVFAPIEKAPQRGPGVEWTKAQEKPFKAKVVGAFPKKGSPFFSPFRFWGPGVFDPFYPRGVFSLCLSPLAKPVSENPKNGVFRM

SEQ ID NO: 289188 - protein, 134 aa, Zea mays
  unsure (1)..(134): unsure at all Xaa locations
  Clone ID: MRT4577_2682C.1.pep
MXPKXEKKPAAKKPXEEEPAAEKXPVGKKPKVEKRVPAGKSVGMEGGEGKRXXXKGKKSXEXYKIYIFXVXXQVYXDIGISSKXLSIMXPFINDIFEKXAXRGRQCXXFXKKSTIXSRXIXDLFXFVLPGSSPV

SEQ ID NO: 289189 - protein, 95 aa, Zea mays
  Clone ID: MRT4577_26830C.1.pep
REPARAGHLPRVPPALAHSGRRPHGGPRLHYQGRRRRSRHLAPPPVLVCMHCIYRMHCLVDLAKLIRNVGRPCRSCRVAITALNATICARLVSTF

SEQ ID NO: 289190 - protein, 101 aa, Zea mays
  Clone ID: MRT4577_26831C.1.pep
PKNSCKLVVRKKLDRPPVFFFLVRWASRIGHVKMVNAFSIKGYGAQPLFGFWGPKNSPMGIFPLGPPGPKKVCIIVALVKSQAVETVPKINALFPSRFKPR

SEQ ID NO: 289191 - protein, 119 aa, Zea mays
  Clone ID: MRT4577_26832C.1.pep
MAAVMPATPTTPMTATTTVPLPNYQVSGAGAAAAAPRHGASGSGSVGAFFGVLAAVLVLTVLSCVFGRVCAAQAEGPDESYDCTRLALWRRSAHRRRPVLPAAETKQPAASQPLPLPEP

SEQ ID NO: 289192 - protein, 161 aa, Zea mays
  unsure (1)..(161): unsure at all Xaa locations
  Clone ID: MRT4577_26833C.1.pep
HHQLRLLITDGTASGYKHDTDESASGAEAACGGEAALGIAWAFGXMIFVLDYCTAGISGGHINPAVTIGLFLVRKVSLARTLIYIVAQCLGGICGVRLIKALQSAYFDRNRGGGNSIASGYSRGTXLSAEIIGTIGLGYTGITATDPKRNARESHXRVLAP

SEQ ID NO: 289193 - protein, 54 aa, Zea mays
  unsure (1)..(54): unsure at all Xaa locations
  Clone ID: MRT4577_26834C.1.pep
RQGGSCCASVMSKSSESASSREEGEPRPHSSGPRCQRPGREPTRXADAWDPHPG

SEQ ID NO: 289194 - protein, 42 aa, Zea mays
  Clone ID: MRT4577_26835C.1.pep
LEDTLYLGTQSKLTVLLGNTRWWSYTRGLFPQNSPTRVQLFR

SEQ ID NO: 289195 - protein, 77 aa, Zea mays
  Clone ID: MRT4577_26836C.1.pep
SKLVQPYPPGGPICQNFIRWGGVWARGGKNPPRPRFWSWGGKTNGLLLKWTKKSRGVSILKKGQGGKTRGGSPPPVF

SEQ ID NO: 289196 - protein, 115 aa, Zea mays
  Clone ID: MRT4577_26837C.1.pep
ERNISWGREQQSAAFSQQNLYQDTQNKFNKELVETNLDSDIRRARNAQQLAGFRTDATVSGMNFVSGRGGLGHPDAPRGASLPPRSASTQTNSPKVYLTRPTGYYTGPLSNEERI

SEQ ID NO: 289197 - protein, 69 aa, Zea mays
  unsure (1)..(69): unsure at all Xaa locations
  Clone ID: MRT4577_26838C.1.pep
MASNGISPTYVCVARVARTPMGAFLGXLDSLXATKPASILIQSALQRTNLDPIPQHDVYFGNLSSANIP

SEQ ID NO: 289198 - protein, 106 aa, Zea mays
  Clone ID: MRT4577_26839C.1.pep
LARARAAVARRPATRLAALLWYQGEADTSTRQAADAYTPRMEALVRDVRRDLGMPDLLVIQVGLATGQGRFVDIVREAQRRVSLRNVRYVDAKGLPVANDYTHLTT

SEQ ID NO: 289199 - protein, 71 aa, Zea mays
  Clone ID: MRT4577_2683C.1.pep
NCGPWAHGRIGEKGPQSGGPKTAFYFASQLHVVLWRGFLTPLGPKINQGKSWRSYTVGRTDDAFPCRLLWN

SEQ ID NO: 289200 - protein, 46 aa, Zea mays
  Clone ID: MRT4577_26840C.1.pep
CLGHRKQQMGPTAKAREAYTAGNVVVAGKPYNQFPDPGPPLTYVHC

SEQ ID NO: 289201 - protein, 632 aa, Zea mays
  Clone ID: MRT4577_26841C.1.pep
MGNSLACFCCGGGAAGRRRHVAPAALPSDPAYDEGLGHSFCYVRPDKVLVPFSADDDDLVADAKAAAAAEEPTTFRAISGAALSANVSTQLSTSVLLLLPDESSSAAAASSSSSGFESSESFAAVPLQPVPRFPSGPICAHGGGFLSGPIERGFLSGPLDAALMSGPLPCAATSARMGGGAVPALRRSLSHGGRRLRNFTRALLARADKFQDSMDLGSAAAAACGAGSAGLQWAQGKAGEDRVHIVVSEERGWVFVGIYDGFNGPDATDFLVSHLYAAVHRELRGLLWDQCEQEEQRDTDPDQPMSTTASYHQDQPANGRRARRSRPPRGADDDQRRWKCEWERDCSSLKPPTQRPPRSSSENDHLAVLKALARALRKTEEAYLDVADKMVGEFPELALMGSCVLAMLMKGEDMYLMNVGDSRAVLGTMDSVDLEEISGGSFDGLVGDGTPLLSALQLTSEHSTSVREEVCRIRNEHPGDPSAISKDRVKGSLKVTRAFGAGFLKQPKWNDALLEVFRIDYVGSSPYITCNPSLYHHRLSTRDRFLILSSDGLYQYFTNEEAVAQVEMFIATTPEGDPAQHLVEEVLFRAANKAGMDFHELIEIPHGDRRRYHDDVSVIVISLEGRIWRSCV

SEQ ID NO: 289202 - protein, 591 aa, Zea mays
  unsure (1)..(591): unsure at all Xaa locations
  Clone ID: MRT4577_26842C.1.pep
MAKPCDSSHHGVVDNSSNGSQARREEAGKLGPSWYFSRREIEENSPSRRDGIDLKKESSIRKLYCKFLQELGMALKMPQVTIATAMVFCHRFYLRQSLAKNDRRIIATVCIFLAGKVEETPKPLKDVIVVSYGIINKNDPKASQRIKQQKEIYDKQKELILLGERVVLVTLGFDLNINHAYKPLVEAIRRFNIDKRSPLPQVAWNFVNDGLRTSLCLQFEPHHIAAGAIYLAAKFLKVNLPSDGDKIWWQDFDVTPRQLEEVSSQLLELYEQNRTTQAQSSQGSEAEGSSAGVCNQRSTVKSEANSKEPSAHGHLQAXDRQICSTRXTGASGHHDDGQSNSDKHISGHKMLQNDNFNHGGSREKNKSGTKTGTVMDKLHNDKKFSPGHHYSKASHESHNPVEEHQPHGSDDNSNETRDGVGGNEAPVVSTSRMDAMNKIDKDKVKAALEKRRKSKGGFATKVNVIDDDDLLERELEQGVELAVEFEKINQDKKQNSSDGSMHPPDLENADELMENGHHVKQSLPTTAEDMGCPMDSKERHPPALHKQNDVSEHKSQQLDDTLKHQKSCDHPQPVGSPEQDGKDYKRPKLDG

SEQ ID NO: 289203 - protein, 47 aa, Zea mays
  unsure (1)..(47): unsure at all Xaa locations
  Clone ID: MRT4577_26843C.1.pep
MDLRIASELRVFVKMRRQDPSVLHTVDMRLLTAXAASMGGIVPAASH

SEQ ID NO: 289204 - protein, 55 aa, Zea mays
  Clone ID: MRT4577_26844C.1.pep
PMLGALLAFCPFLFEKTAVVFHWKTLTPKQGRCQQLYGPSQLTDFTVRPRFNLMR

SEQ ID NO: 289205 - protein, 40 aa, Zea mays
  Clone ID: MRT4577_26845C.1.pep
KLTEPMRFLMTMTNLEYMSRFDQYHTHDELHVVSVVGLIL

SEQ ID NO: 289206 - protein, 300 aa, Zea mays
  unsure (1)..(300): unsure at all Xaa locations
  Clone ID: MRT4577_26846C.1.pep
MAKPSDSSHHGVVDNSSNGSQARREEAGKLGPSWYFSRREIEENSPSRRDGIDLKKESSIRKLYCKFLQELGMALKMPQVTIATAMVFCHRFYLRQSLAKNDRRIIATVCIFLAGKVEETPKPLKDVIVVSYGIINKNDPKASQRIKQQKEIYDKQKELILLGERIVLVTLGFDLNIDHAYKPLVEAIRRFNVGSKSSLPQVAWNFVNDGXLVLPLLSFEIAVHSCVSTTLNIVHCXLRTSLCLQFEPHHIAAGAIFLAAKFLKVKLPSDGDKVWWQDFXVTPRQLEEVSSHMMELCGQI

SEQ ID NO: 289207 - protein, 79 aa, Zea mays
  Clone ID: MRT4577_26847C.1.pep
GKNANYDSICPDNLNISSFPRVLYFLSEDSKTKEADSTSRSQITIRYLKHPHYNILNKKHKGRGKNETTGWTDADRRTR

SEQ ID NO: 289208 - protein, 113 aa, Zea mays
  unsure (1)..(113): unsure at all Xaa locations
  Clone ID: MRT4577_26848C.1.pep
SGLGFLAWYLAGKLKAFDRKGHIAKLCLVFLPLLVASLVAVSRVDDYWHHWQDVFAGGIIGLLVFDALLYLAFRTPFTIKSQSWSXFSYFFSGLTGASFCYLQFFPYPFDNDA

SEQ ID NO: 289209 - protein, 90 aa, Zea mays
  Clone ID: MRT4577_26849C.1.pep
RKHQKTPKISSLPPPFPLSTAGEQVWITPTLICYMLNKTLYRSGFPKNINDQYLTNLELHIYTDQCSIPNPKMMTNCLLKNTNLTHQCMI

SEQ ID NO: 289210 - protein, 90 aa, Zea mays
  Clone ID: MRT4577_2684C.1.pep
GRVGGAASPHSGPPRCCSRRHVRGQDCLSATFRGGRTFGRCNNLPALSASLHWTYHPKNGTVDVALRAPSNASRWVAWGINPHRGCSMRL

SEQ ID NO: 289211 - protein, 127 aa, Zea mays
  unsure (1)..(127): unsure at all Xaa locations
  Clone ID: MRT4577_26850C.1.pep
SGRALPLPAPLLSRAGKNAAVAATFLSLRGRLSHAHTRKLSSPFLGAPASLLRSLAPTPVGGRYSRRTLADGAMAPLMPGGTPKKAVGVTKLALDACLARPKPSVCPAVGAQGVXNCLGLCKVFYAN

SEQ ID NO: 289212 - protein, 164 aa, Zea mays
  Clone ID: MRT4577_26851C.1.pep
PAGIPVRSFPNCMLPLPAAPTSFPDVSKTNAQPIVCCVKQRPRLAITSPPSTSVQQEPALGVPPTPCSDKPQASDMPSVHRTLAVVPFGMHFMCPWLARPLSLRATLTATAPHGHTSIAPASHQRYSSSSPHDCTMRTHDVIPVNPCTPTPTRNCMACCGMRHN

SEQ ID NO: 289213 - protein, 180 aa, Zea mays
  Clone ID: MRT4577_26852C.1.pep
RPGTHRCPGQAAPSPCHHVPAIDVRAAGACARSSAHAVLRQASSLRHAKRPSHSRCRAVRHAPVRILYVPLSPRPYCYVALLHTVLVPSMCPWLARPLSLRATLAATAPHDHASIAPASHQRCSSSSPHDCTMRTHDVIPVNPCTPTPTRNCMACCGMRHNWSSSPPLHACNNHSTHNGF

SEQ ID NO: 289214 - protein, 102 aa, Zea mays
  unsure (1)..(102): unsure at all Xaa locations
  Clone ID: MRT4577_26853C.1.pep
LPVSGAFHPPLMLPAVAALTQALKAVDIKKPLVSVYSSVHGHRYRHPGHIHKLLAQQLVSPVKWEQTMHAIYERXKGRGFPQTFEVGPGRQLGAILKSCNMQ

SEQ ID NO: 289215 - protein, 54 aa, Zea mays
  Clone ID: MRT4577_26854C.1.pep
PHASARFHVGRNTGLFDRVLLGFYEFLHTTCRSALPALGIPLQQRVEIGMLYKA

SEQ ID NO: 289216 - protein, 103 aa, Zea mays
  unsure (1)..(103): unsure at all Xaa locations
  Clone ID: MRT4577_26855C.1.pep
ARNSARAGVSPPVAHGTASGTKKEGSFLPMLGFSAGTLGVTHNEAQEDHLKSAETASVQQAEAIXADRKCTEAKADHLDKIKKHVGMPSEHAQKVRQGNTTTK

SEQ ID NO: 289217 - protein, 74 aa, Zea mays
  unsure (1)..(74): unsure at all Xaa locations
  Clone ID: MRT4577_26856C.1.pep
VRPASGKDTLVFLCAXSQDGGPNWAGMFTDYLSEAKEVSGIENIMVLESGFNEWEVSGQPVXKCTNAHCIGTCS

SEQ ID NO: 289218 - protein, 177 aa, Zea mays
  unsure (1)..(177): unsure at all Xaa locations
  Clone ID: MRT4577_26857C.1.pep
MCLSSIIAEQVLSDQKMVDVLCKVICIADSLDLTEMEHLLLLGAYMNAIAARRAFRFLVSSIILRDDIRGIVPRKTLIKDYPLEIVTALNDISAAILKMLEMHLAAAPTALKLQAVYLYRLLDYFSYXAECNSGDAIKDLAENTMEKYKAAHDIALXSLLSTHPIKIALXINFSVLY

SEQ ID NO: 289219 - protein, 82 aa, Zea mays
  unsure (1)..(82): unsure at all Xaa locations
  Clone ID: MRT4577_26858C.1.pep
HQNLTSRRMHLVGSLGVIXSTDADRKGQLXWLPAPVVCGYGFAWVGHFFFKKNRPATSRHPIYSLMGDWVMFKDICTGKIPL

SEQ ID NO: 289220 - protein, 32 aa, Zea mays
  Clone ID: MRT4577_26859C.1.pep
PLIWNKSMLHLCPLFNSKPRLKVVPRSSKYQK

SEQ ID NO: 289221 - protein, 55 aa, Zea mays
  Clone ID: MRT4577_2685C.1.pep
KKLLPPFPFFFFFFLKNFFFGAPPKKKKKKKKKKKKKKKKKKKKKKKKKKKKKPP

SEQ ID NO: 289222 - protein, 73 aa, Zea mays
  Clone ID: MRT4577_26860C.1.pep
PIPISTHAVPRTNPQPSSSASLTTSSNSTMGNLPPYSQNPPHYISTYKKPALIMNHSLNNYKSPTYHYSHPQC

SEQ ID NO: 289223 - protein, 807 aa, Zea mays
  unsure (1)..(807): unsure at all Xaa locations
  Clone ID: MRT4577_26861C.1.pep
HSRSCSRFCRSPLSPPDLYHHPTPPHAHTQPRNGSFPRLNVPVPVVPQSERFLFQRVCSRGYHLFRCIARYGYKDKKQEHHRAGDGAAAAVVGAVSRGGSFESEDDEDDEEEEDEEKKGRKRLIRTVPSVDWFDVEGNEVSVAQQLDDSEEFDFGRTMFLALQTLAVVFGDIGIGPLYTFDVMFNKYPILGEEDVLGALSLVLYTLILMPLVKYVLVVLWANDDGEGGLFALYSLICRNAKVSLIPNQVQSEKRMSSFRLKLPTPELERSIKVKEKLESSLLLKKVLLGLVLFGTSMFISNGVITPAMSVLSAVSGLKVGLPNTSQDAVVMISIALLVVLFSVQRXWLSLGGCLLCATGSEAIFSNLCYFPVRYVQYMFVLLVLPCLVLAYLGQAAFLIANQKSSEHVFFSSIPSGVFWPVFLVANLAALIASRTMTVAIFQCLKQSIALGCFPRLKIVHTSRKFMAKIYIPVVNWFLLVSCLGFIILFRNIYDVGNAYAIAELGVMIMATVYVTIIMLLIWESNITKVLSFVITFLFLELIFFSSALSSVGDGGWALLIFASVLLMIMFIWNYGSKLKYDSEVKQKLPKDLMRKLGPNLGTIRAPGLGLVCSDIVKGVPAIFGHFLTSLPAIHSIIVFVCIRNVPVPVVPQSERFLFQRVCSRGYHLFRCIARYGYKDKKQEHHSVFXDVPLLADYVPSTELIHEXACSTPQHDPVLDYAQNLELELAFIEQSKRSGVIYLIDNPIIKARKDSWFFKKLMINYFFAFLRNNCRRAIMLMSIPHSNMMTSSIIPSSRPGRTHGSSRS

SEQ ID NO: 289224 - protein, 421 aa, Zea mays
  unsure (1)..(421): unsure at all Xaa locations
  Clone ID: MRT4577_26862C.1.pep
GDDGEGGLFALYSLICRNAKVSLIPNQXRSEKRMSSFRLKLPTPELERSIKVKEKLESSLLLKKVLLGLVLFGTSMFISNGVITPAMSVLSAVSGLKVGLPNTSQDADVMISIALLVVLFSVQRYATSKVGFAIGPSLLLWFXCLGGIGIYNXEXYGSTAFRAFNPLYIIYYFGRNPFQAWLSLGGCLLCATGSEAIFSNLCYFPVRYVQVLXQANESFDFVXYFKASPWPPGGSRSDNSRCLACFARLGVKAVVMFTCSPYRLKNTASFAPSYLQLIFQKLTDWCXLINSYLTLQXMFGLLVLPCLVLAYLGQAAFLIANQKSSEHVFFSSIAGGVFWPVFLVGNLAALIASRTMTVAIFQCLKQSIALGCFPRLKIVHTSRKFMAKIYIPVVNWFLLVSCLGFIILFRNIYDVGNAYGK

SEQ ID NO: 289225 - protein, 325 aa, Zea mays
  Clone ID: MRT4577_26863C.1.pep
YRESNITKVLSFVITFLFLELIFFSSALSSVGDGGWALLIFASVLLMIMFIWNYGSKLKYDSEVKQKLPKDLMRKLGPNLGTIRAPGLGLVCSDIVKGVPAIFGHFLTSLPAIHSIIVFVCIRNVPVPVVPQSERFLFQRVCSRGYHLFRCIARYGYKDKKQEHHSVFERLLIEGLEKFIQREAVELSLQSEDDIDSDEEPPTPVKIITAPNGSLYSLDVPLLADYVPSTELIHEASCSTPQHDPVLDYAQNLELELAFIEQSKRSGVIYLIDNPIIKARKDSWFFKKLMINYFFAFLRNNCRRAIMLMSIPHSNMMQVRMTSYV

SEQ ID NO: 289226 - protein, 43 aa, Zea mays
  Clone ID: MRT4577_26864C.1.pep
SHRNVGIRRKGIQMCNVSTIDLSVHSNLGVLPNNTINGGASSN

SEQ ID NO: 289227 - protein, 183 aa, Zea mays
  Clone ID: MRT4577_26865C.1.pep
SRLFSSFPSLPRSAPPRSKTLGGARIPDPASGSPSASARARRPSLPASPMDPAGPRVATDPAGSGAAPPREELDRRGGACSGAAAAEGSASRLAGAGLGDPRAGILESSGQAEAYLHTCTMDVSQLTAEGVTQCGARVSLLPQIGALQSETPCLTLGRDSSAESMEKLHDSESLPCCKENIGT

SEQ ID NO: 289228 - protein, 139 aa, Zea mays
  Clone ID: MRT4577_26866C.1.pep
MKFTGILSALALTSAVSATTVSYDTGYDDKSRPMTAVSCSDGSNGLITKYGWKTQGNIPTKYVGGVNIIAGWNSPNCGGCYRLEYKGRKINVLAIDHAASGFNIGLDAMNALTGGQATALGRVNAQVYHADPSACGLKK

SEQ ID NO: 289229 - protein, 51 aa, Zea mays
  Clone ID: MRT4577_26867C.1.pep
RKLARPLQLPSFLIVVHPSPCMKAPPMRHLGWTCRPGSEQCSGGSNRSRHG

SEQ ID NO: 289230 - protein, 93 aa, Zea mays
  unsure (1)..(93): unsure at all Xaa locations
  Clone ID: MRT4577_26868C.1.pep
PTHALYISRRLLVLCFPPCPQCRLNLNAVPFPHQNPXSSPHHHSVHYPIPLLLSPSLLPSHLMFFSHNAFLYLYPIYSPTSMTSSNNVTTHYE

SEQ ID NO: 289231 - protein, 88 aa, Zea mays
  Clone ID: MRT4577_26869C.1.pep
KPNNPTQILTKKPFLTTKKPGSKVILPLYRPKTKTINDGKKAPKLAHVAPQLTRFKLKTNLGTLGIKKSPQGTGKPLHQLQKKTSRPP

SEQ ID NO: 289232 - protein, 54 aa, Zea mays
  Clone ID: MRT4577_2686C.1.pep
RGARLARFQGRAPHSSVFTPEKRSRNCASRVWYRERPVWISQNAGAYLEAAGEK

SEQ ID NO: 289233 - protein, 86 aa, Zea mays
  Clone ID: MRT4577_26870C.1.pep
KHIFFSRGQTTFCFKTRVFGESSIFFPKLGLFPPDVGPNLNFFGPIGSPPSSFFFWPRGGGFFFPVYKPIYFGCGGPPGGATPSPF

SEQ ID NO: 289234 - protein, 33 aa, Zea mays
  unsure (1)..(33): unsure at all Xaa locations
  Clone ID: MRT4577_26871C.1.pep
VRYYSFXSFSFLXRIRESLQNCRKVLXISDQFC

SEQ ID NO: 289235 - protein, 82 aa, Zea mays
  Clone ID: MRT4577_26872C.1.pep
SPNGAPSSRGFGVPQFYKGCGEGALPQAFLFLNPPPRPTGLFFFYQFFCPVLFVVPAPPLCSSVASFPASLPGIRQSDQSRV

SEQ ID NO: 289236 - protein, 83 aa, Zea mays
  unsure (1)..(83): unsure at all Xaa locations
  Clone ID: MRT4577_26873C.1.pep
MHTIMGTSPMILATMLVVAILGFTACFGATDTDSDGPIRFPTSSGAGDRSGXCCDYPTKDPIIRXPPTSAGTTLLDKCSDYCQ

SEQ ID NO: 289237 - protein, 143 aa, Zea mays
  Clone ID: MRT4577_26874C.1.pep
QERGLVRGLIPHIIQNGCCCLQYADDTIFLIQDCLESARNLKFILCLFEHMSGLKIKFHKSEIFCLGKAKDIEDLCADIFTCHISNLPIKYLGVPIDNKKINKSLWCPMLEKMKKRLAGWQGRFLSLDGRLTLLNSCLSNGPL

SEQ ID NO: 289238 - protein, 73 aa, Zea mays
  Clone ID: MRT4577_26875C.1.pep
NSPCQIFHNISWGVYISSVGYGLPSSVSSLRHRLCSCVNPAVGFTPSWITFSAFELASRMVWAFEVTRTISPG

SEQ ID NO: 289239 - protein, 94 aa, Zea mays
  Clone ID: MRT4577_26876C.1.pep
MSTAPRRSFQGRGAMPSGTGYCRRGRAPGSVDTAKPLRKPDFTTDDQLRPQTHGHTLTGSVIAVRTELDKPYTHLGTQPRRTSALVRDSTGTES

SEQ ID NO: 289240 - protein, 114 aa, Zea mays
  unsure (1)..(114): unsure at all Xaa locations
  Clone ID: MRT4577_26877C.1.pep
THRTSLRSARAPSKLHNTCTDSLLAXPIILVLXLLSELMARSHVKPEGTXKYHSFHPAXTIPRYLTKAPLDRPDTPLGNAITXPMAMLYNIIRAWAVLTPHNHMILEYLGRIPH

SEQ ID NO: 289241 - protein, 96 aa, Zea mays
  Clone ID: MRT4577_26878C.1.pep
RCNCLPVCLQFSLPMPQGGRDAITKNPILREDQLPQKVLHPKLKKSNKDDDFLGVVDIFSHGGDKKAPLKPPVRKALAMFSGKRNPNDNHFSRKKY

SEQ ID NO: 289242 - protein, 66 aa, Zea mays
  Clone ID: MRT4577_26879C.1.pep
YTVPSSPIPLSSRDGRLRGHKASRVRGPPGADRGRGAGIGGGGRGQPHQDHRDQSEHKRQQIMKEG

SEQ ID NO: 289243 - protein, 73 aa, Zea mays
  unsure (1)..(73): unsure at all Xaa locations
  Clone ID: MRT4577_2687C.1.pep
GRDKILFQWGLWLDIGGFFFYVTPGVGLFSNFGXVCLIIGVFVFFFIPSGEKKKKKNFKKKIKKKKFFLFSIY

SEQ ID NO: 289244 - protein, 83 aa, Zea mays
  Clone ID: MRT4577_26880C.1.pep
MRIRCLSSQSPGSVMQVTFTLFCRFFPVRWSSGGSWLTRVKLVESVLENAQGVAREAADSGDAVEHDVVMWSIRWVSCASSKE

SEQ ID NO: 289245 - protein, 110 aa, Zea mays
  Clone ID: MRT4577_26881C.1.pep
GRPLNTPANGRREGEEAMGVTKEDVEAAITSALSPSNLVVTDTSGGCGASYEIEVVSEKFEGKRLLERHRMVNTALAPHMAEIHAVSIKKALTPAQAQPQPEPAADKPQA

SEQ ID NO: 289246 - protein, 107 aa, Zea mays
  Clone ID: MRT4577_26882C.1.pep
THRRRGGEEAMGVTKEDVEAAITSALSPSNLVVTDTSGGCGASYEIEVVSEKFEGKRLLERHRMVNTALASHMAEIHAVSIKKALTPAQAQPQPQPQPEPAADKPQA

SEQ ID NO: 289247 - protein, 109 aa, Zea mays
  Clone ID: MRT4577_26883C.1.pep
LFSFFSSFFSFLLYFIFFFFLFLFFFFFFFFLTKNGGHSFILLFISFIHCTQDKNYLFLFPTTLTGHWHDGQIKKKAHGGKSPCGWEKQPFLEGGLRSSWHSNRFGHLE

SEQ ID NO: 289248 - protein, 159 aa, Zea mays
  unsure (1)..(159): unsure at all Xaa locations
  Clone ID: MRT4577_26884C.1.pep
MCDYFLPRMEGDQAGGGDLTDIVRSGGAIPGNAADTPSTAAADEWQLQGDATMLFPPLPSSTTASEVGCAAVFGTDPFSGLVDPFSTDYSSGADFLDAMPDAMAKVGFDTTAICGGSGSGSGCRGGGGGQLIDMSRKQHPLLPRGLQMPAXGGVLTPRV

SEQ ID NO: 289249 - protein, 81 aa, Zea mays
  unsure (1)..(81): unsure at all Xaa locations
  Clone ID: MRT4577_26885C.1.pep
AFPITITVSRSIPSYFARIYPFSIYRNLPVVIRFRLFRLPIPAEQKIMRVKTVRGFFRPLPTIFTLRYWAVXKFSNNRFLC

SEQ ID NO: 289250 - protein, 644 aa, Zea mays
  unsure (1)..(644): unsure at all Xaa locations
  Clone ID: MRT4577_26886C.1.pep
MGARATSPPPWRRHCLCRALHFLVLLLWGTSEANEEQAMLPPRGWNSYDSFSWIVDENAYLQNAQIMTEKLLPHGYQYAVIDFLWYRKYVDGAYTDSYGFDNIDEWGRPFPDVQRFPSSRVDRGFSQIASKVHGMGLKFGIHLMKGISVQAVNADTPILDIKTGKPYLEDGRQWTARDIGLSHRTCAWMTHGFMSVNTNIGAGRAFLRSLYRQYADWGVDFVKVDCIFGTDYSPEEIITISELLQEIDRPIILSISPGTAVTPALAENITDHVNMYRITGDDWDNWKDVSSHFGVSSSFAAAKKIGATGLRGRSWPDLDMLPFGWLTDPSVNQGPHRKCNLTLDEQKAQMALWSMTXSPLMYGGDLRNLDDSNXNIITNSGLLKINHYSRNNMEFHYVHSERTSNGEHSGHFRSPYPVRVTKNDGIFVSLTACSDNAAKGWYMFPQDGKPDHICRNYEILNDKNVSFCLGKTKRFLASDVLTMDTKEHQSKFHISVTNTDDTCLDASAGRRQTASEIRLPMFSACRWHAKQMWELNANGNLVSSYSRLCATVESRDEGGTSGGRAWIATGSEGEIYLAFFNLDSMSRKMTVEISDLGKVLGRNLLEKNPCSYTEVWSGKNFGPVKEEISAVVHSHGSMVFEIIC

SEQ ID NO: 289251 - protein, 131 aa, Zea mays
  Clone ID: MRT4577_26887C.1.pep
MIKMSHFASEKQNVFLHRRIHPIYKQISAHLMICINTFIHCRDVLTMDTKEHQSKFHISVTNTDDTCLDASAGRRQTASEIRLHMFSACRWHAKQMWELNANGNLVSSYSRLCATVESRDEGGIYYITFLF

SEQ ID NO: 289252 - protein, 53 aa, Zea mays
  Clone ID: MRT4577_26888C.1.pep
GVLWSLQLATEGGAMGRGRWTERSTINAALEARTRKSYSFACTNPYALTRSFI

SEQ ID NO: 289253 - protein, 76 aa, Zea mays
  Clone ID: MRT4577_26889C.1.pep
VQGFQARPYKTPNAIEGAPGYSCARFSCPTQVFSCWSAGSGRFGSPAPWVSPRPSGLVLLPLIYLASGSVLPLPFD

SEQ ID NO: 289254 - protein, 49 aa, Zea mays
  Clone ID: MRT4577_2688C.1.pep
DVSQRERRSQSVWNQKEEEHPEPGESDLRPSDRHVDVTQKYLALRSTSL

SEQ ID NO: 289255 - protein, 48 aa, Zea mays
  Clone ID: MRT4577_26890C.1.pep
TPQNPFFKPETPFFQKKKKKKKKKKKKKKKKKKKKKKKKKKKKLEGGP

SEQ ID NO: 289256 - protein, 138 aa, Zea mays
  Clone ID: MRT4577_26891C.1.pep
GNAVVRSIPLVYGVIRGKCSALTSRSGIVFASPPFARFCVAWEVIAPCAAIVPTAMVFLQQLIGLSAPLFRYPSRLGENFSVCPHYAMKGPGTLWPLRLVLYGFTAWFCVHLPNHNPGRPGAFIYRPRTCLSYRLFVV

SEQ ID NO: 289257 - protein, 75 aa, Zea mays
  Clone ID: MRT4577_26892C.1.pep
LSVGVSHSVVLAPCTVLFLKKYGWICACCLPYCMLGFIWAFRCPALKAKNLFASLSSILRGRVRGALFLKLLFCP

SEQ ID NO: 289258 - protein, 89 aa, Zea mays
  Clone ID: MRT4577_26893C.1.pep
AFRDINPQAPTHILIIPKVKDGLTGLSKAEERHIEILGYLLYVAKVVAKQEGLEDGYRVVINDGPSGCQSVYHIHVHLLGGRQMNWPPG

SEQ ID NO: 289259 - protein, 42 aa, Zea mays
  Clone ID: MRT4577_26894C.1.pep
TTKSHEKSKKIDILLSALPIYQILNSNLSSSREIKKRKLYPI

SEQ ID NO: 289260 - protein, 247 aa, Zea mays
  Clone ID: MRT4577_26895C.1.pep
MSSEKEAALAAVLDDSPTIFDKIIKKEIPSTVVYEDEKVLAFRDINPQAPTHILIIPKVKDGLTGLAKAEERHIEILGYLLYVAKVVASQGFFGGFIYRLSTELPVPAATTCGDPSLTMSSEKEAALAAVLDDSPTIFDKIIKKEIPSTVVYEDEKVLAFRDINPQAPTHILIIPKVKDGLTGLAKAEERHIEILGYLLYVAKVVAKQEGLEDGYRVVINDGPSGCQSVYHIHVHLLGGRQMNWPPG

SEQ ID NO: 289261 - protein, 76 aa, Zea mays
  Clone ID: MRT4577_26896C.1.pep
VMPTEIILFHNVVLYRRACIVQWSLSHQVTGLKHPLSICRGRLASVYRSPCLTHVEASDTGSAPLLMLFFIILHLK

SEQ ID NO: 289262 - protein, 188 aa, Zea mays
  unsure (1)..(188): unsure at all Xaa locations
  Clone ID: MRT4577_26897C.1.pep
QVATDAVSSIRTVASFCAEKRVTTIYDDKCEASKKQGVRTGMVGGLGFGFSFLMLYLTYGLCFYVGAQFVRHNKSTFGDVFKVFFALMLATIGVSQTSALASDSTKAKDSAVSIFALLDRKSQIDSSIDVGSTLDEVRGDIDFRHVGFKYPSXPDIQIFSDFTLHIPSCMTVALVGESVSGKSTAISL

SEQ ID NO: 289263 - protein, 36 aa, Zea mays
  Clone ID: MRT4577_26898C.1.pep
PQHSQTRHGPTRLTSARLLSLHKYARESQSEVRRIS

SEQ ID NO: 289264 - protein, 103 aa, Zea mays
  unsure (1)..(103): unsure at all Xaa locations
  Clone ID: MRT4577_26899C.1.pep
MVISKKKRREMCEDIFREGVLYDKKDYDLAKHAELGVPNLEGIKLMRRFRXKQHGRQTFSWXQDYYRDLTXDAIQHPRSFRNLXRQAAPNTPKKSSQPQPRPP

SEQ ID NO: 289265 - protein, 95 aa, Zea mays
  unsure (1)..(95): unsure at all Xaa locations
  Clone ID: MRT4577_2689C.1.pep
RSRVLPPXXXXRPXXGPPXGRRXRXPRXSXASXPSPGVXXVVLRXVXSLSSPSXXSSPPXAVCCXXCGXSPLLFSVSLRVCVCGXXLAXGLXRVL

SEQ ID NO: 289266 - protein, 186 aa, Zea mays
  Clone ID: MRT4577_268C.1.pep
MLARVAAEIAALPEPRGPMRRLCGDLARRIRLLAPLLQHLQDRDLDDALRLADALGAARDLLRAVYDGSKIYQVRAVALLAPQSNSIQPMNEHHDEPTNQAMQGDAVLQRFATVNSHIHLALDALPYKTFDLPEEVLEQVDLVHSQFRRAATTAAPPDAQLSKDICCALADKAFDPTVLTRISDKL

SEQ ID NO: 289267 - protein, 150 aa, Zea mays
  unsure (1)..(150): unsure at all Xaa locations
  Clone ID: MRT4577_26900C.1.pep
LEAGRHLSSDDLLNEDLDCLMSDSTDDDLDKLADEYDRIXATSSGGGSSXASRMRLFLFPAKTEISSTLGSLHHNSSKSDNWXNNALNSYITDSLEGITRGISTXDPSKTXLLGLDDDSSVYSPNRRTNAGHMEXQNSRQRKLTDQQQRY

SEQ ID NO: 289268 - protein, 30 aa, Zea mays
  Clone ID: MRT4577_26901C.1.pep
HVFWGRIRSTWENKIFNVAGNPIPCNKLVN

SEQ ID NO: 289269 - protein, 104 aa, Zea mays
  Clone ID: MRT4577_26902C.1.pep
MSFSKRVAVAAALALALQLILASHLAAAGAKKDETIAPLQTCETMIKVPCWGKNAICIPICIAMRYTGGFCDVATCMCTKQCLAAAEAEADGASQQAVATPRLN

SEQ ID NO: 289270 - protein, 65 aa, Zea mays
  unsure (1)..(65): unsure at all Xaa locations
  Clone ID: MRT4577_26903C.1.pep
RXXRADHTLPPQTHFNKFYPPLIRTXRMAQKDQIFLVQLQFLKVLSPDALPEQLFLGTRGALQPC

SEQ ID NO: 289271 - protein, 95 aa, Zea mays
  Clone ID: MRT4577_26904C.1.pep
FPGRPTLSFLSEIDYPAKMPDPDAHQKENEKLWTLKESYVKALVRGYSRNPSQLLTTEGEAQTAETKFLFHPKYRTVLNLSMTDCKIIERSDLLN

SEQ ID NO: 289272 - protein, 103 aa, Zea mays
  Clone ID: MRT4577_26905C.1.pep
QFFSTTSLPQPNLFFGSHIISYFFIAGSLHRPFRLARGCQGAFTRPRAPLLPSHPIFTVRVNGRDCMHAGSTFGRCWRVSAVAGDSTNLLVNDIDSLWYYTLT

SEQ ID NO: 289273 - protein, 146 aa, Zea mays
  unsure (1)..(146): unsure at all Xaa locations
  Clone ID: MRT4577_26906C.1.pep
QEFQHILRSMNTNAYAKQNIMFSMTSIKGASXAFSNIXWKKADINMNKRIKELTPDELHSLMTDGANPRHVKVSECLLSMNKDDKDIWFSQACSKGLDMKLKDDRERLNKITNHRXLRHYWGLRVRGQHTKTTGRRAKTVGVSKKR

SEQ ID NO: 289274 - protein, 209 aa, Zea mays
  Clone ID: MRT4577_26907C.1.pep
YSLIVEEPYKHKYPYDWRSKEPTIFRATEQWFASIRLERDAAMDAIRRVTWVPSQAQNRIVAMTSSRSDWCISRQRTWGVPIPVFYHVDSQEPLITEETIEHIKAIVLKKGSDAWWYMTTEELLPDRYRDKASEYRKGTDTMDVWFDSGSSWAAVLAKRDGLNFPADIYLEGSDQHRGWFQSSLLTSIATTGKAPYSSGITHGFVLDEK

SEQ ID NO: 289275 - protein, 71 aa, Zea mays
  Clone ID: MRT4577_26908C.1.pep
VNFFSVYELFHWVLAQGWKLFVISPSGLVGGFTLFFLRGGCKKQGPCLMLFLGWVLLKKKKKKNNTKKIFF

SEQ ID NO: 289276 - protein, 128 aa, Zea mays
  Clone ID: MRT4577_26909C.1.pep
LLCNAPRFVPTVANHDLHHIQWDVPPRQHPHPLALADMPAMLASGAPFARKFPRDDPVLDAIDDGLLARPRPANATAAFVPGGWCGADAECRAVDNDWVLRPGPGAQRFRRLIDRIVRSEAFPNRQCK

SEQ ID NO: 289277 - protein, 168 aa, Zea mays
  unsure (1)..(168): unsure at all Xaa locations
  Clone ID: MRT4577_2690C.1.pep
DAWVFNNMDTDRSGTITVEELKDGLAKLGSKISEAEVQKLMEAVDVAHASAHASAEFLTAMMNRHKLEKEEDLFLAFQHFDKDDSGYITRDELEQAMAEYGVGDEASIKEVLDEVDKDKDGRIDYEEFVEMMRKGSYXPEEALFSWWERLCIYVSANVSSTSNEASLT

SEQ ID NO: 289278 - protein, 155 aa, Zea mays
  unsure (1)..(155): unsure at all Xaa locations
  Clone ID: MRT4577_26910C.1.pep
DLSSLAELRPLPYAHTGSCYEGRLATRNYMTRSLCSTMSDTGAITGSALWTAVCARATAAIGSTNLPIAGTMPGGSCDALMTAVAPTXRAKLVIQNHYDXLKAGRLSETTKGXIVDCFTRTNNEEGGSFMGTGDTANEILDLRTKTTLFVLDDHL

SEQ ID NO: 289279 - protein, 210 aa, Zea mays
  Clone ID: MRT4577_26911C.1.pep
GGYSEEIIDSLRISDAPESDLVDGMKSNGSIADKGRVSEWLWTLHRIVVDVVRTDSHLDFYGESRNMARMSDIPRVRGRVDPSTGYCQGMSDLLSPFVVIYEDDADAFWCFEMLLRRMRENFQMEGPTGVMKQLQALWKIMELTDAELFEHFSAIGAESLHFAFRMLLVLFRRELSFEESLIMWEMMWAADFDEEAVRHLEENCLEPLLV

SEQ ID NO: 289280 - protein, 1262 aa, Zea mays
  Clone ID: MRT4577_26912C.1.pep
KRSRQKLRFKEARDNKYAYDVIGSKDAIEENFGSAYTKKGKSKGTKVGLGVKQHKFHMMYGFDPQEYNLIRFVDPLTGATLDEQIHADIRLVQEHFDVLREEAVANDTIERQHIYSSPGLQAFFIQNGSANALRVDLTPHSPLRVVTNNNIAGFPEYEGTLRQTGTAITVPVNQVPVANETGVAHESKSMMIGLGDYTPISQQLCLVQNDSDGVKRNVFSIGYGSYLISPAHLFKYNNGEITIKSSRGLYKIRNSVELKLHPIAHRDMVIIQLPKDFPPFPMRLKFSTPTRESRVCLVGVNFQQNYSTCIVSESSVTAPKGNGDFWKHWISTVDGQCGLPLVDVKSKHIVGIHSLASTSGNTNFFVAVPENFNEYISNLVQTNKWEKGWHYNPNLISWCGLNLVDSAPKGLFKTSKLVEDLDMSVEEQCKVTETWLTECIQDNLQVVAKCPGQLVTKHVVKGPCPHFQLYLSTHDEAKTYFAPLLGKYDKSRLNRAAFIKDISKYAKPIYVGEINYDIFEKAIERVIKILKNVGMQQCVYVTDEEEIFNSLNLNAAVGALYTGKKKDYFKDYSNEDKAEIIMRSCERIFNGQLGIWNGSLKAEIRPIEKTMLNKTRTFTAAPLETLLGGKVCVDDFNNQFYSHHLEGPWTVGITKFYGGWNRLLEKLPEGWIYCDADGSQFDSSLTPYLINAVLHIRLQFMEEWALGAQMLQNLYTEIVYTPIATPDGSVIKKFKGNNSGQPSTVVDNTLMVILAFNYAMLSSGIEEDEIDNCCRMFANGDDLLLAVHPDFEHILDGFQNHFGNLGLNFEFTSRTKDKSELWFMSTRGIKCEGIYIPKLEKERIVAILEWDRSNLPEHRLEAICAAMVEAWGYPDLVQEIRKFYAWLLEMQPFANLAKEGLAPYIAETALRNLYLGTGIKEEEIEKYFKQFAKDLPGYIEDYNEDVFHQSGSVDAGAQGGNSGSGASASAAGSGSGTRPPSTGSAAQGNTPPASGGSSGNNGGGQSGSNGTGGQAGSSGTGGQRDKDVDAGSTGKISVPKLKAMSKKMRLPKAKGKDVLHLDFLLTYKPQQQDISNTRATKEEFDRWYDAIKKEYEIDDTQMTVVMSGLMVWCIENGCSPNINGNWTMMDGDEQRVFPLKPVIENASPTFRQVMHHFSDAAEAYIEYRNSTERYMPRYGLQRNLTDYSLARYAFDFYEMTSRTPARAKEAHMQMKAAAVRGSNTRLFGLDGNVGETQENTERHTAGDVSRNMHSLLGVQQHH

SEQ ID NO: 289281 - protein, 75 aa, Zea mays
  Clone ID: MRT4577_26913C.1.pep
KKKKKKKKKKKKKKKKKKKKKKKKKKKKKKKKKKKKKKKKKKKKKKKRGGRFKGPKLTSPGLQRKSFFKGTPKLN

SEQ ID NO: 289282 - protein, 133 aa, Zea mays
  unsure (1)..(133): unsure at all Xaa locations
  Clone ID: MRT4577_26914C.1.pep
AYGRGSSRGRKALKKQLGTKAVGSLTLRSGGGKKPHRLRPGTAALRERRKPQEEQGRCMIRMVXQGLKEQTSQDLKTELHYQRSGGSALLDADRDYLVXGLLEDTNLXDIHTERDTXMRKDMHVARRIRVERA

SEQ ID NO: 289283 - protein, 126 aa, Zea mays
  unsure (1)..(126): unsure at all Xaa locations
  Clone ID: MRT4577_26915C.1.pep
MMQRPLLRPEEYSLKETSPHLGGAAAGDKLTTTYDLVEQMQYLYVRVVKAKELPNMDITGSCDPYVEVKLGNYKGQTQHFEKKNNPEWNQVFAFXKERIQSSVVEIVVKDKDHVKDDFIGRVIFDL

SEQ ID NO: 289284 - protein, 56 aa, Zea mays
  unsure (1)..(56): unsure at all Xaa locations
  Clone ID: MRT4577_26916C.1.pep
VRXLCLDRMEWMADGVSCALYKISDPLQVPSVPQKFRIACVPLVSRSSKAFRAIQT

SEQ ID NO: 289285 - protein, 45 aa, Zea mays
  Clone ID: MRT4577_26917C.1.pep
KFYEWTFQLLFSTAFHVDQSFGFETSLKEIVLLIPSWQLTGFYQF

SEQ ID NO: 289286 - protein, 46 aa, Zea mays
  Clone ID: MRT4577_26918C.1.pep
KGWGQSNPLSLLLSKPQKIKTPSAWKKPFLLLIPEFSVINITLLFP

SEQ ID NO: 289287 - protein, 314 aa, Zea mays
  Clone ID: MRT4577_26919C.1.pep
MKRYGLQLRTKPPSSSSSRAPPPPARPLAAFADDDDDDVEAEILRQAAKKRSLQKVEEQQKKAMEEDPSVYAYDELYDEMKEKEARPKMQDKVVRESKYIAQLKEKAELRKREQDIIYERKLQKERSKEDHLFGDKDKFVTSAYRKKLEEQQKWLEEERVRQLREEKEDVTKKKDLSDFYFGLVKNVAFGAQTHDNTKSGHPLKADNKPEDTNTSSLDAEASEPSPKRRRESSIESERTKSMDMEEPSASRMRDSTAAASTEKNAADVSSNAKEIPQNIQPAKVTDDHYKRSDGALAAARARALARKKAKDQQL

SEQ ID NO: 289288 - protein, 140 aa, Zea mays
  unsure (1)..(140): unsure at all Xaa locations
  Clone ID: MRT4577_2691C.1.pep
GGXANTEKEGRPXPXTXAXEPXPXXEGTTRXXXAKXXPXAQRARXAXNHRGGRDNIFFFXXXXXDRPAXDREKXXPPHKXXXXEHNNQXKXEXXEQNKXXDSNXEGPXXHPEEPTKKQNXEEXXAXTXAXNKAXXGDTKE

SEQ ID NO: 289289 - protein, 47 aa, Zea mays
  unsure (1)..(47): unsure at all Xaa locations
  Clone ID: MRT4577_26920C.1.pep
LAGVVATQSMVITTPCPWPLLXERPPFIPVFRIQLGGRCRRVAVLSS

SEQ ID NO: 289290 - protein, 65 aa, Zea mays; identical to SEQ ID NO: 264737
  Clone ID: MRT4577_26921C.1.pep

SEQ ID NO: 289291 - protein, 74 aa, Zea mays
  Clone ID: MRT4577_26922C.1.pep
MSGRGEGSKGLGKGGSKRHPKELRHNIYGITKPAIRMLAMTGGMKRISALIYQETHRLLKIIFEHLMLHPFIYT

SEQ ID NO: 289292 - protein, 65 aa, Zea mays; identical to SEQ ID NO: 264737
  Clone ID: MRT4577_26923C.1.pep

SEQ ID NO: 289293 - protein, 65 aa, Zea mays
  Clone ID: MRT4577_26924C.1.pep
LFAKLLEKRNVEDLILSVGSGGGAAPVAAAAPAGGAAAAAAPAVEEKKEEAKEESDDDMGFSLFD

SEQ ID NO: 289294 - protein, 608 aa, Zea mays
  Clone ID: MRT4577_26925C.1.pep
RPGFKPDKIRKIKLRHTKHLTTLAFHPTERTVAGGDVTGRILIWRCFGNSKFSESSVQSKEDDGRDGVRGDDDADTCTTWHWHSSSVRFLKFSSDGAYLFSGGLEGVIVVWQLDTGKRRYKPRLGSPLLFFVDSPDSSISCVSCTNNQVYLLKMPNMEVMRSIAGIKLPIASPNLGGSNRAVYGFDYTNRLVAIPTEDYCIQFYNLFENAEVSEVQVCERNFQPIDDITMYISMVSLAIDGDLMCTVDVKLPEEGLGGLVTLKFWNHGSRAGHYFLSTVIYEPHSDDGVSSVAFRPGRNMAVSSSFGGNFKVWVQSLSSQSNDERNCSGWRCQSVGSYKKKPMTSAAFSADGSVLAVAAESTITLWDPDNNALVGVIAETLSPVTNLSFVGTSVFLMSLCQSSRPQIALWNVSNLSMQWSYSIYAEAACCSPDGSEFAVLALLSCPDGEASTQQDGVILLFDAESSNPIASWSVKKASGGSISFVKGDVPLDANADSSRDKEPMLLVYVNGSHEYAIFDPRESEEVVISKNKHKKIQAEEPAPIGYASIYGELTKLEPKKEVSDVPFVPSDRPWETIFSGSSHVLPPLTKLCSAFLSSLLEKRPVANE

SEQ ID NO: 289295 - protein, 162 aa, Zea mays
  unsure (1)..(162): unsure at all Xaa locations
  Clone ID: MRT4577_26926C.1.pep
MAAAGDAGEKKMITLKSSDGEEFEVEEAVAMESQTIRHMIEDDCADNGIPLPNVNSKILSKVIEYCNKHVQAKPADGAAAGAGAGASDAAPAAPAEDLKNWDAEFVKVDQATLFDLILXCQTVADMIKGKTPEEIRKTFNIKNDFTPEEEEEIRRENQWAFE

SEQ ID NO: 289296 - protein, 133 aa, Zea mays
  Clone ID: MRT4577_26927C.1.pep
LATHGVLASKKAAWRCVGAAASPAGVSSDDGDGPPPAGGYLHRGWAGHHPEGDWPSCERHPPWWNPSVATLVYGSHGVAMHWPHLHGGIFGVTLFVSLVGRNTRAERRGSPFCMWMGKDIGQEEIKGWGGCVP

SEQ ID NO: 289297 - protein, 84 aa, Zea mays
  Clone ID: MRT4577_26928C.1.pep
QKGTHILVDTFQPLQEAAAVVFLVAAAAALSLSLSLSISLLLPLAAFAYAEQGKAQASQASERDEGDNARAETQESKGEGLLSG

SEQ ID NO: 289298 - protein, 89 aa, Zea mays
  Clone ID: MRT4577_26929C.1.pep
KKLSAAACRLITHTKEAQVEDTCGMCHPPTTVHRRGMKGYMPINRDVQARRLVPVREYTIMPHETFHASAHASAHATTHAATHAGRTRG

SEQ ID NO: 289299 - protein, 124 aa, Zea mays
  unsure (1)..(124): unsure at all Xaa locations
  Clone ID: MRT4577_2692C.1.pep
PKGWKRAAPPRGLQGGRFPPPPLDESVFTEPGGVTLHERIPLSPATLLGWGVGKKTKPPKKKREGPGGPLLESLAFACGLYAKKVPFLPNKKNLQALFLPSXGGENPKKIKKNPQKKKKKKKKE

SEQ ID NO: 289300 - protein, 62 aa, Zea mays
  Clone ID: MRT4577_26930C.1.pep
PHGGPHVRFAAKGWAVFLGIYPNSPGLWLDWGPMGALLLHFSGLTCPGPTIPPDFKKSFKAF

SEQ ID NO: 289301 - protein, 132 aa, Zea mays
  Clone ID: MRT4577_26931C.1.pep
MPTGGCMCGNVRYEVQGDMEAQILCHCYDCRKISGTTYSTNALHSKDGFKILQGTPKEHKKTADSGNNITSFFCGDCGSTMWRESDSYTGKMIIKVGTLDDHSILDNFSTKMELFTKNRPKWVGTQEGAAQK

SEQ ID NO: 289302 - protein, 52 aa, Zea mays
  Clone ID: MRT4577_26932C.1.pep
GNFRGHTTRIAYLPLPWNLPIQNHHPSINHETMNYPANSLFKILHPTKKKPL

SEQ ID NO: 289303 - protein, 66 aa, Zea mays
  unsure (1)..(66): unsure at all Xaa locations
  Clone ID: MRT4577_26933C.1.pep
GLXMXCWFDXRYWAXNXSVQCLNRTQAYAVGECFHXTXTXIXXXIGXIXLAXXXXXXCXHMLXDXX

SEQ ID NO: 289304 - protein, 51 aa, Zea mays
  Clone ID: MRT4577_26934C.1.pep
NDTDATFTYFRAYPISMLNDLDKPFHGENSYSIFKQVSLTNTIAVLHTGLI

SEQ ID NO: 289305 - protein, 53 aa, Zea mays
  unsure (1)..(53): unsure at all Xaa locations
  Clone ID: MRT4577_26935C.1.pep
LLVRIYKLVAVEKEKAEVHXAPTGSSVQFSWMLGPPYFLQYVWTSSTPLFGLR

SEQ ID NO: 289306 - protein, 35 aa, Zea mays
  Clone ID: MRT4577_26936C.1.pep
LMLSTYSWTVFSHLTEQMSAIESRLEMAAHLCMAP

SEQ ID NO: 289307 - protein, 118 aa, Zea mays
  Clone ID: MRT4577_26937C.1.pep
VFTLVELAAVSIFDTSDAYTNKPSSYSPIAITIWQFCSKEPRTICSCPPTSSKSDPQNDRIGHTRTPRRETESPLFFFFLLLISTTTSTAWISSTNGTAHPRRRRRRSRAAVKAAYQP

SEQ ID NO: 289308 - protein, 199 aa, Zea mays
  unsure (1)..(199): unsure at all Xaa locations
  Clone ID: MRT4577_26938C.1.pep
PRVRPRVRPRVRPRVRPRVRSNLFQHRFKINRPLFLXRIMKXVEQHDDYFEQKRNAAQLIXGISCFQKVIAVFRVLTYRVAADATDEYVRIGESTALESLRMFVKAVIEVFGVEYLRSPNEKDIEQLLALGNERCFPGMLVSLDGMHWRRKNRMPLLQGQFFGHRHTPTIILEAVALLDLXISHAFLXLPGSLNNINVL

SEQ ID NO: 289309 - protein, 77 aa, Zea mays
  unsure (1)..(77): unsure at all Xaa locations
  Clone ID: MRT4577_26939C.1.pep
MFRMFCFLEXMGVDKKTTGKILCRSPEIFASNXSNTLKKKIXFLSXFGVSKHHLPRIIRKYPELLLLDLNCTLLPRY

SEQ ID NO: 289310 - protein, 159 aa, Zea mays
  unsure (1)..(159): unsure at all Xaa locations
  Clone ID: MRT4577_2693C.1.pep
MSSTTGKKKTCDPFSTNXCDDIEARSSLCALXSPKTLVYSRLDTKIASEGLKHTDYDACLPDLYRLSXTPYSKITLRAEHKYLYNELTIFMGMISTTDTLTSLSFNLSTLVEAHDDDITIDNYMMRMVCIVFANTRPSHIERTCYAHASHMRHIPRRHS

SEQ ID NO: 289311 - protein, 249 aa, Zea mays
  Clone ID: MRT4577_26940C.1.pep
KLGIRLEVALLPYPVPASFVLFGDGVKNPSYNDLVQRVADGFFDAAVGDISIVTNRTRVVDFTQPYVESGLVIVSTVKAKNSNEWAFLKPFTPGMWAIIGAFFLFVGAVVWILEHRFNPEFRGSPRRQMVTIFWFSFSTMFFAHRENTVSTLGRFVLIIWLFVVLIINSSYTASLTSILTVQQLSTGIQGLDSLLSSNDPIGYQVGSFARSYMMDELGVPASRLRELAIDSYADNLQRGPSNGGVAAIV

SEQ ID NO: 289312 - protein, 50 aa, Zea mays
  Clone ID: MRT4577_26941C.1.pep
VNFEPIKRAPLIFFFIFIYFFVFFIYYFFLFFFLFFFFFKFYFFFFFFFF

SEQ ID NO: 289313 - protein, 112 aa, Zea mays
  Clone ID: MRT4577_26942C.1.pep
QLGLSFGPRSAGRPSKVARYTWLQSSPGSSPPSLAPVMGLFSLVSGPRGCPPLPGGVLCCSLPCVFFRAVGAAVGFFFVPSRVSDQVSVYLHVVLLSYALCEPPAVSAVREF

SEQ ID NO: 289314 - protein, 139 aa, Zea mays
  unsure (1)..(139): unsure at all Xaa locations
  Clone ID: MRT4577_26943C.1.pep
RNRPSRVIDDFYGRLLGLCRGGEHTISLXENLGIPNFDLSALDAPFSEKEXWDTICLIPLDKAPGPDGFTGEVYKVCWDIVKVDVMAAFSAVGCRRFINFHVLNTAYITLIPKFEGADQVKDFRPISLVHSFPRWKDCL

SEQ ID NO: 289315 - protein, 115 aa, Zea mays
  unsure (1)..(115): unsure at all Xaa locations
  Clone ID: MRT4577_26944C.1.pep
CFINPPSFKKRFPKWVWEEVNPSNGKAGERIQPVVLNMSSVVNMALSGLPALEKIPKGLVFFGLQMAIPSPGWKPFQKIKVSQVVARVGQAXVFLSSSXPVEACLPAHKGPPLAF

SEQ ID NO: 289316 - protein, 105 aa, Zea mays
  Clone ID: MRT4577_26945C.1.pep
MSSGRRSSRTRRAGSSSLSSSSTSRSISEDQISELLSKLQALLPESQARNGGAHRGSAARVLQDTCSYIRSLHQEVDNLSETLAELLASADVTSDQAAVIRSLLM

SEQ ID NO: 289317 - protein, 130 aa, Zea mays
  Clone ID: MRT4577_26946C.1.pep
ELSGQIIEAMLQSCARLCWHSALGECLSRTKIVKEGRSSSSFGQSSAKVSLYKSAVKLTGNATRPYSRLRCTPMPTILLAQSIAYSSLANRSRRHPQGTLHTFEVPFLVSSHTVAGAPLNAACPSRVTCD

SEQ ID NO: 289318 - protein, 72 aa, Zea mays
  Clone ID: MRT4577_26947C.1.pep
CITSTYQNSIRNTAEGYVLVNNWVPQLINMSSLRRLLAIMNWSSRSFRLLLHRTILVSGSQTINEKDQIQHK

SEQ ID NO: 289319 - protein, 98 aa, Zea mays
  Clone ID: MRT4577_26948C.1.pep
LGEAPRISLGIILAPPIMGITLGGRGQNSQLLPPPGLDKIDPPEKPGQFSTQIAKHAPFVCKPPKPKKSMGVSPHRRPPQNEAPMNFPPFFWWVGFFY

SEQ ID NO: 289320 - protein, 109 aa, Zea mays
  unsure (1)..(109): unsure at all Xaa locations
  Clone ID: MRT4577_26949C.1.pep
PNSDQGETGLLEETADIRLMGLICDTKGDHKTALDHLLMAIMYMVDNGQETKEDSVDXKXGDIYLXSSCQYDKAEYAYQKALTVLNTSKGENHATVVYVYVRLTDLDNK

SEQ ID NO: 289321 - protein, 61 aa, Zea mays
  Clone ID: MRT4577_2694C.1.pep
AIPVRSDHSGYRLHEYKVTYLFPCLQASNNAHNKTPVHKNKQASFKLFTIRHEIILPSCRI

SEQ ID NO: 289322 - protein, 52 aa, Zea mays
  Clone ID: MRT4577_26950C.1.pep
RAQRCQFKLGEPQAVYVPKPHPFLFTRCSGSLPDNSGRCSSEWRFLGVTDPA

SEQ ID NO: 289323 - protein, 437 aa, Zea mays
  unsure (1)..(437): unsure at all Xaa locations
  Clone ID: MRT4577_26951C.1.pep
MASESSPPPAGAPPPGLGDKLAVFWDEGMLAHDAGRGVFDSGRDPGFLDVLDQHPENADRVRNMVSILRRGPIAHFLSWHSGRPAHASELLSFHSSXTPKAEIPSLTSFSGILIDQTLAFSRGFRCKIYSXRTPAKIFLWFEEYIEELVQTNATGAKKKLCEGTFLNPGSWGAALLAAGTTLSSAKHILDGQGNLAYALVRPPGHHAQPDHADGYCFLNNAGLAVQLALDSGRAKVAVVDIDVHYGNGTAEGFYRTDTVLTMSLHMMHGSWGPSHPQSGSVDEIGEGKGLGYNLNIPLPNGSGDAGYEYAMNELVVPSIDKFQPQLLFLVVGQDSSAFDPNGRQCLTMEGYRKIGQIMRRLADRHCNGQILVVQEGGYHITYSAYCLHATLEGVLDLEAPLLDDPIAYYPEDDKYTMKVVDMIKSYWKESVPFLKEI

SEQ ID NO: 289324 - protein, 391 aa, Zea mays
  Clone ID: MRT4577_26952C.1.pep
MASESSPPPAGAPPPGLGDKLAVFWDEGMLAHDAGRGVFDSGRDPGFLDVLDQHPENADRVRNMVSILRRGPIAHFLSWHSGRPAHASELLSFHSSEYIEELVQTNATGAKKKLCEGTFLNPGSWGAALLAAGTTLSSAKHILDGQGNLAYALVRPPGHHAQPDHADGYCFLNNAGLAVQLALDSGRAKVAVVDIDVHYGNGTAEGFYRTDTVLTMSLHMMHGSWGPSHPQSGSVDEIGEGKGLGYNLNIPLPNGSGDAGYEYAMNELVVPSIDKFQPQLLFLVVGQDSSAFDPNGRQCLTMEGYRKIGQIMRRLADRHCNGQILVVQEGGYHITYSAYCLHATLEGVLDLEAPLLDDPIAYYPEDDKYTMKVVDMIKSYWKESVPFLKEI

SEQ ID NO: 289325 - protein, 54 aa, Zea mays
  Clone ID: MRT4577_26953C.1.pep
KKAPPPPPLVPLKKKNPHKKKKKKKKKKKKKKKKKKKKKKKKKKKKKKKKKKKK

SEQ ID NO: 289326 - protein, 78 aa, Zea mays
  Clone ID: MRT4577_26954C.1.pep
NSDQFMDWFLPPAGIGVNECLILSPPSHVINLSLPRFGFDSCTPNPCFFGFCTLARKQMSRGFWIGGPPPKKILKTPH

SEQ ID NO: 289327 - protein, 623 aa, Zea mays
  unsure (1)..(623): unsure at all Xaa locations
  Clone ID: MRT4577_26955C.1.pep
MALKHEFIEPSIGESTGITHRSGLGAAKAKLSRWLQDLQRLRQARKEGAASIGLIVSDIAKYLEGKDLELHASRQVGLLDFIASALPASHTSKPGACQVTVYLLRLLRVLLSLPANRTYFLVQNLLPPIIPMLSASLENYIKVAASNSGSSNLLSNKTSAETTESSGEVLDGFLWTVAMIVGHVHINGEQLQMQGGLIELIVAYQIIHRLRDLFALYDRPQVEGSPLPSSILFGLNLLSVLTSKPGNFSTIDWESCKCRTLGGNIVQEYEYLSSQDSLGCQSMTLDQFGDAKSPTIYSELAEDSKSCKQHDLSIPVDRKLVDEASKDLLVMAAGLNNSAMQPSDLGITTEKHSGNPSQGDENNTVDSFLEGRKTNNVCALYSSSGKGNEMNLKQPAMLLLSALAETGLVTLPSLLTAVLLQANNNRSSSEQTLAILPSNFEEVATGVLKVLNNMARLDITLLQHMLSRSDLKMEFFHLISFLLSHCXTNGECQTXVGLLLLESLLLLGYFSLFHAGNQAVLRWGKSPTILHKVCDLPFVFFSDPELMPILAAALIAVCYGCDQNLSVVQQEISTDMLRCLLKSCQTSGSNSPDSIAVDGSGNNSTESILDIRNSRSCIELHVA

SEQ ID NO: 289328 - protein, 96 aa, Zea mays
  Clone ID: MRT4577_26956C.1.pep
FRTIQLLQYYFRRLWIRFQSCKMTPKFKEVMLYAPSLEAKLCSRHYQTVNLDMLDVTPVREAAYETMNSGGQNEISLFTGGEMTSNGMESFTGINS

SEQ ID NO: 289329 - protein, 50 aa, Zea mays
  Clone ID: MRT4577_26957C.1.pep
GLAIPQICFQQFLSLQEKVHFKTLRFSNASPILFFQDAKNALFSPMLIFL

SEQ ID NO: 289330 - protein, 92 aa, Zea mays
  Clone ID: MRT4577_26958C.1.pep
IAASFPMVGAAWCSSHCLDAIRCGSVHRRIHPSHTCSPDDEATTTVPEIQAAVIKHRSPRSHMCDHHTRDPSHGERHGEPAKPTPHIRTHRR

SEQ ID NO: 289331 - protein, 59 aa, Zea mays
  Clone ID: MRT4577_26959C.1.pep
ENCQKSKIFFIAWSPDTARVESGMIYASSKERFKRELDDIQVELQSTYYRVVGHDTIPG

SEQ ID NO: 289332 - protein, 50 aa, Zea mays
  Clone ID: MRT4577_2695C.1.pep
LSPTPLPVNSLHINHKEYVVTICIHSNHLVYGCLCVRPKNKLPISNYLFG

SEQ ID NO: 289333 - protein, 208 aa, Zea mays
  Clone ID: MRT4577_26960C.1.pep
KTQPPRTTNKPTKKMVNTSHSRSVRGTLSHPNRSPSSSQPPPSLSDATSLTPENASLPLPPHDSAPPPSPSQTSTSSSSSPADAAPTPSTPYRTLGTAAGGGDKRAVGNRAANPASKDSAKDVAGDAVKDMLPPKGNATQSKTQDGKRDEEPHSRRVRGTLANKKPEARVEKTMLGDPASLIPEGEKTEGGMDKGAESEGVVKRESKL

SEQ ID NO: 289334 - protein, 87 aa, Zea mays
  Clone ID: MRT4577_26961C.1.pep
KVSRDVDVISAHHSGGPTGVAAENSGLPPHGAIESTARAEIVDGAPDADIAERGRDRAIVDSAPRRLIAQSITLSAERGMLCAGLVA

SEQ ID NO: 289335 - protein, 103 aa, Zea mays
  Clone ID: MRT4577_26962C.1.pep
QVRRAPPIFLCGRRSAPSSGACPSAQLRPRAAPWCLDPAQRAPCSHHRVRISLPNRPLSSSPSSSPWSSPLPQLGLRRTALVKEDPLPSPLLACVSCSSLFLR

SEQ ID NO: 289336 - protein, 131 aa, Zea mays
  Clone ID: MRT4577_26963C.1.pep
SYEKDDNISRSWKPSYSAGRGRGDLPNYTSQALPKSPAPSGYGRGKLDNDFAKFPNSRGKFTSGTSAISSGSSRPFHLGLLSDRPGGISDRSAFRYSRLKLLDIYRTCDVTDFKLSVDCLEDSLCSCKRMF

SEQ ID NO: 289337 - protein, 284 aa, Zea mays
  unsure (1)..(284): unsure at all Xaa locations
  Clone ID: MRT4577_26964C.1.pep
MLRGSAALLRRLAPRISGGGCGNTTHRRLLPPIAPFLRARFLSAPTTSSPPSSSSAACHEEDAEDRDLPEISNGDAGARLSISVDRSGLYNPTXLLCQNAAEHSHEPSSESELVKHIKSIIKFRSGPISIAEYMEEVLTNPQSGFYINRDVFGESGDFITSPEVSQMFGEMIGVWAMCLWEQMGKPAKVNLIELGPGRGTLLADLLRGSAKFANFTKALSINLVECSPTLQKIQYNTLKCEDEHVGDGKRTVSKICGAPVCWHASLEQVPSGSPXIIIXHEIYD

SEQ ID NO: 289338 - protein, 138 aa, Zea mays
  Clone ID: MRT4577_26965C.1.pep
SGRFFFFLALIGDCLVSGQSSRSRSVAARSMLRPHVASFPLRAQDASPQPHPHVASFPSRVSALRFPFPHPRLQSLLAWPHAVSLRVTARTEARPNRCRTRRGRVGRNSDLLLFSKDRSVGEASAAIYRLPSNYQIPH

SEQ ID NO: 289339 - protein, 49 aa, Zea mays
  Clone ID: MRT4577_26966C.1.pep
MIPALMRSKYQLLRRRSYSYAFGQPERKVAILGAAVGIGQPLSLIMKLI

SEQ ID NO: 289340 - protein, 58 aa, Zea mays
  Clone ID: MRT4577_26967C.1.pep
WNSCPKYHLAFHFVDLFVLDLTSSWILRHWIFYSPKQGFDNQHICQRHNSNQQPIRTD

SEQ ID NO: 289341 - protein, 113 aa, Zea mays
  Clone ID: MRT4577_26968C.1.pep
KKKNLLLKFKMTGGQPKTVLFFKKGTRLKQTLGQHVTPGRGGDKFTRGIHFIQGGAPDSFSGIGARATVISAYNPIMAVHVLVHNGPGTPCVPCGTSPKTFFFFWENFPKKPK

SEQ ID NO: 289342 - protein, 45 aa, Zea mays
  Clone ID: MRT4577_26969C.1.pep
LARLSKKINSSILSPTFYSLSHVLQHLHCQNPVVTHLNRLNHILL

SEQ ID NO: 289343 - protein, 57 aa, Zea mays
  unsure (1)..(57): unsure at all Xaa locations
  Clone ID: MRT4577_2696C.1.pep
LWWSQTATNAEPMMYCDLFLMHGYHRLVLITNKDYSRISCLTRHSTSRRGXGGVFKP

SEQ ID NO: 289344 - protein, 385 aa, Zea mays
  Clone ID: MRT4577_26970C.1.pep
MLSTTSPVPLLDTPAPSTDADAKNGTASRRRARLLLLCANYAALLGGSVASSLLSRYYFAHGGCDRWVATLVQSVGFPVLLVPVYAGRPASHSQSQSQPRPFAWLTRRPLLVAACVVIGVLMGVNNLLFSYSSSYLPVSTSSLLLSTQLAFTLVLAAAIVRHPLTFSSLNAVVLLTLSSVLLALRSSSAERPDGGSRASYLAGLAVTLGAAGLFAAYLPVMELVYRRAVSGGFRMAVEVQVVMQAAATALAVAGLAAAGGGWRGELARWDLSPAAYWAVVAALVVTWQACFMGTAGMVYLTSSLHSGVCMTAVLTANVIGGVVVFRDPFGWEKAVATVLCVWGFSSYLYGEYSTTQQAQEEGDRKVAAASDGGGAGHKSVASDVV

SEQ ID NO: 289345 - protein, 172 aa, Zea mays
  unsure (1)..(172): unsure at all Xaa locations
  Clone ID: MRT4577_26971C.1.pep
HEALGTHLNFSSAYDPXTDGYTERTNQILEDMLRACALQDKSGWDKRLPYVEFSYNNSHQANLKMSLFQALYGRNCXTLLHWDQPGKRQVFGPDIFLEAKENIGMVQENMKTAQSRXQSYVDTRRTXVSFEVGDYVYLKVSPIRVVRRFGVKSKLAPRYIGPYQIKSPASLE

SEQ ID NO: 289346 - protein, 107 aa, Zea mays
  Clone ID: MRT4577_26972C.1.pep
PPYITIPRLAYSLYVSRTPSLISLRMMLPATPLLLLPASSRALIDSCALRSTELLSRSRSIVPQLTSASSTSQSYRGLAAAGACWLVTLVSLPPPSRSLSDFFFIFI

SEQ ID NO: 289347 - protein, 66 aa, Zea mays
  Clone ID: MRT4577_26973C.1.pep
VACGGENGGFFPRTTKGRSLLHSPNHYNNASKIHSWGYEFSPLTQLEPTPQFLRLGGNFKKNIPSY

SEQ ID NO: 289348 - protein, 96 aa, Zea mays
  unsure (1)..(96): unsure at all Xaa locations
  Clone ID: MRT4577_26974C.1.pep
HAFRCISRATCLNYSCSPTLGCCGHMLSMAAHXNNEQANGEHHDDMGITLSLLNIPPYPDITIFQSGXLTLRSVTICLYNSGTTTHGNRTRHVAVH

SEQ ID NO: 289349 - protein, 102 aa, Zea mays
  unsure (1)..(102): unsure at all Xaa locations
  Clone ID: MRT4577_26975C.1.pep
VPVRCSRVVPRVRVVGGSRRSSGVSLLFLVCLCRLXGPAPSLGLWVRRLACCCPACFGVGALLLSWLVPGCPARLLPFRGPXXRXFSXXGAXKXFLVGGGRS

SEQ ID NO: 289350 - protein, 716 aa, Zea mays
  Clone ID: MRT4577_26976C.1.pep
MAPLPAPPTAASASAFLFSPPRSPSRYLHPKPKPTATILCSSTSAATAAGSASPSLSQQLEPLSRTLLHDKPTPIADRPTPEPTWVNPTKPKPSVLSLRRHRRRSPPANTSSTPLQPLLRALRALPEDADLAGTLDAFFLQQQGQGAAPSPSDALLLLNYLHPSWRKSLSLLAWLRALPAGAFPLDTIYFNVALKSLRAARQWPHAERLALDMLDAGVPLDNITYSTLITAARRCRQFAKAVEWFERMYAADGVLPDEVTYSAVLDVYAQLGMKEEVLALFDRARGSGWKPDHVAFAVLAKMFGEAGDYDGIQFVFKEMREVGIKPNIFVYNALLEALGKTGKPGLARNLFEEMIDQGVEPNARTLTALAKIYGRARWGRDALQLWDKMRELKLPADSILCNTLLSMCADVGLVAEAEQLFNEMKDPECRDVPKPDKWSYTAMINIYGSNGDTDSALQLFAEMLKGGIEPNIMSYTIVIQCLGKAHRIQQAVEVLESGLEKGLKPDDRLCGCLLSVIALSSGEEMEMVLSSLQTRPQNLVKLIRVLGDAQVGGDDITEELKSVLNSAAPEVRRPYCNCLIDVCRNHGFPPQRAREVFHLAQTYGLYSKLQSRKDEEWSLDLRSLSVGAAKTAFDDWMQTVSERWAQQKDLPESFSVYTGSSTHKFAQGLASAFAAHLDQMAVPFHASESQAGSFISSRDDLVSWLQMSRSSAVVAG

SEQ ID NO: 289351 - protein, 37 aa, Zea mays
  Clone ID: MRT4577_26977C.1.pep
TNALPPQKKKKKKKKKKKKKKKKKKKKKKKKKKKKPK

SEQ ID NO: 289352 - protein, 183 aa, Zea mays
  unsure (1)..(183): unsure at all Xaa locations
  Clone ID: MRT4577_26978C.1.pep
MSGKALLVVAVVLLVGVASRCSGSRGLHQQGDHVAEQKYGTGNGYGGGGGGYGGDGGGGGGYTPGYSGTGTCDYWKSHPDAIXRASGRWAASSAPWATRAAPSSGAXQTLQDALCNARADGYGDLLREGAAAYLNSVXXAAAGKYAYTTQQVKDCIAAALSSEAAAAAQAAMFNKANYACHYY

SEQ ID NO: 289353 - protein, 182 aa, Zea mays
  Clone ID: MRT4577_26979C.1.pep
SMKTFSERQHPAFIHATMTISCTQICHVDSTYLRLVYEAFVATCTSDDDWFSSSKRFRWLSWRIIIKKTPWTFTGKSTPCSRMTGLLLASFDSSDTCRDPVSVVKQVSRSLLGSVLSYIVLDDLLRYNMPATYTLPLSPRWSSAQLVLFSHLFPSPASFSTSSSLSAWSSMFGSLTGPLVPC

SEQ ID NO: 289354 - protein, 67 aa, Zea mays
  Clone ID: MRT4577_26980C.1.pep
GNLDQPHNHVSHMGILRARPFFPHMDPSKACLTTGATLSPTPPGSSPPSYAPEVLSYHPVRGVSAHL

SEQ ID NO: 289355 - protein, 88 aa, Zea mays
  Clone ID: MRT4577_26981C.1.pep
PKKKKKKKKKNTEQEEKEYQKPPRPPAAGGRSKNNRLPPGGGKWQTQAYPIPSNLNGGALVSSFTLTRIELPTHPGAQNKQRRGLAKP

SEQ ID NO: 289356 - protein, 67 aa, Zea mays
  Clone ID: MRT4577_26982C.1.pep
FYTSGLGFYASILCISEFCLVLSSMIAVYLVMGSVKLRQEYRTVKHFVLLDCLCLLQTSCKFYMACG

SEQ ID NO: 289357 - protein, 94 aa, Zea mays
  Clone ID: MRT4577_26983C.1.pep
GGDPGGMPCPCHSGAGVAPLVGSVDLCSVWLCAPAGFVLGGRVPLGPWSGGPLVGFFFSVHAVFGCCSPLVGIGPSPGQKPKKKLKKTNKKKEG

SEQ ID NO: 289358 - protein, 41 aa, Zea mays
  Clone ID: MRT4577_26984C.1.pep
TEKLVVTLTWSIGLDADISPVAKSTSDPYGFCLIYESSRDI

SEQ ID NO: 289359 - protein, 63 aa, Zea mays
  Clone ID: MRT4577_26985C.1.pep
PRIPSVKKNPHRNKKKLGVLETKNLWVKPDWGLKNPKKTEVKPPLTKKVSPVKLNRTKFARAK

SEQ ID NO: 289360 - protein, 57 aa, Zea mays
  Clone ID: MRT4577_26986C.1.pep
KRMCTVRIGLPFILPSRCPALWMNKHPSDVRVLPPMISIQGLRSHGKTANISFKNTK

SEQ ID NO: 289361 - protein, 140 aa, Zea mays
  Clone ID: MRT4577_26987C.1.pep
MRFSVAAASAALLALAEARITGIQVPKEIKAGEAFEAIVVRENYIQSVFDSSIVFGYSANPYPGTIGQVLDSTPLGKAESNKIDNLKVKLTIPESTQKGKGVVSAALLSVYGASGSPTLSEYNVTVTIGDKTSTDYGSSS

SEQ ID NO: 289362 - protein, 270 aa, Zea mays
  unsure (1)..(270): unsure at all Xaa locations
  Clone ID: MRT4577_26988C.1.pep
MAAMDAVMQRVLDQLSQXEESITDAMIGRCSELEQRIEASEHKVETRFISLEMDQARFEEWRPDVEKRLDNMFLNSXRATRLLERGTFTAEASKPGLIVSSGSAFRRSPAGFHNADGPDGHCVEHNHREREFGRIPTQPHGPVKGKIPDPHFQRFGXSLILLPDFTRPHEGHRDPEDFKXGYGSLPRLNFHVFDGDNLQLWKSSCENYFDTYEVDPSHWXIRVTTMHFSGRXVGWLQAXGRXRVRFLSWXSEFCAQIHSXXXHDQHQSLD

SEQ ID NO: 289363 - protein, 55 aa, Zea mays
  Clone ID: MRT4577_26989C.1.pep
LVVPETVIKSHIAKSARHICEFIHSAQRYGFLQSALYVSANVMKTGVLSNIQVLS

SEQ ID NO: 289364 - protein, 63 aa, Zea mays
  Clone ID: MRT4577_2698C.1.pep
SSSPSPPWPPRSWRPPQPPRPPPRPPPPTPRPPCPSPRPPSPPPPSATSSARSALDAWFVLDL

SEQ ID NO: 289365 - protein, 937 aa, Zea mays
  unsure (1)..(937): unsure at all Xaa locations
  Clone ID: MRT4577_26990C.1.pep
MLVRLGFVVVASVAALTLQRANXVGPGTAKTMSKQGKGXDKANNSEHGEKEEEKEEVKTISGIINSARSLDDDDDDMLSEIESLLSGDIDIPIPSDRFDVNGRSRYNNAYMANEASEIEKLRSLVREMEEREAKLEGELLEYYGMKEMETDIAELQKQLKIKTAEINMLNDTINSLQAERKKLQDDVACGEVANKELEAARGKIKELQRQIQLEAGQTKGQLMLLKQQVIGLKAKEEEAGKKEAEVQRKLKKLKELEVEVLELRRKNKELLYEKRDLIVKLDAAEGKITESDVVANAREEINKLRHTNEDLTKQVEGLQMNRFSEVEELVYLRWVNACLRFELRNYQTPSGKVSARDLNRTLSPKSQERAKQLMLEYAGSERGQGDTDLDSVVSSMPSSPGSEDFDNMSIDSSSSRYSFLSKRSNLMQKFKRWGRSKDDSSSLASSISGSPRRKPKGPLEALMLKNAGDGTAITTYGKRDPNDVLDDENVASSFQLMSKTVEGFADEKYPAYKDRHKLATEREKAIKEKAGQARAQRFGGGHSSALISSPKGALPPKLAQIKERSPAANAESSEQSSDNQNNTLVVSQMKLANVEKRATRVPRPPPPRSTTASGATSIASGVQTPRAPGAPPPPPPPPGKVGGPPPPPPPPGALPRNLGGGDKVHRAPEIVEFYQSLMKREAKRETSLGSISSNVSDARSNMIGEIENRSTFLLAVKADVETQGEFVESLANEVRAASFINIDDVAAFVNWLDEELSFLVDERAVLKHFDWPESKTDAIREAAFEYQDLIKLQNRVSSFTDDPQLACEEALKKMYSLLEKVEQSVYALLRTRDMTVSRYKEYGIPFDWLSDSGVVGKIKVASVQLANKYMKRVASELDALEGTEKEPNREFLLLQGVRFAFRVHQFAGGFDAESMKAFEELRSKMTTQASAPPISQG

SEQ ID NO: 289366 - protein, 109 aa, Zea mays
  unsure (1)..(109): unsure at all Xaa locations
  Clone ID: MRT4577_26991C.1.pep
RKWRLTSPNCADNTGAKNLYIISVKGIKGRLNRLPSACVGDMVMATVKKGKPDLRKKVMPAVIVRQRKPWRRKDGVYMYFEDNAGVIVNPKGXEMXGSAITGPYRKECA

SEQ ID NO: 289367 - protein, 119 aa, Zea mays
  Clone ID: MRT4577_26992C.1.pep
LGQLFQLRPVKICPSFPAYTGETEKKPVLLWVKQMWGGSCQGNDMLHPVGLITPLVIFLGKPSGPAPPIPVIPCLANGPTGFQATSLSLCTSRPGQSSSHEEAFFPPCCSNSGSPFFDE

SEQ ID NO: 289368 - protein, 226 aa, Zea mays
  Clone ID: MRT4577_26993C.1.pep
MDGCDCIEPLWPTDDLLVKYQYISDFFIALAYFSIPLELIYFVKKSSFFPYRWVLIQFGAFIVLCGATHLINLWTFTTHTKTVAMVMTIAKISTAVVSCATALMLVHIIPDLLSVKTRELFLKNKAEELDREMGLIRTQEETGRHVRMLTHEIRSTLDRHTILKTTLVELGRTLGLEECALWMPSRSGSSLQLSHTLRHQITVGSSVPMNLPVVNQVFSSNTDLLH

SEQ ID NO: 289369 - protein, 109 aa, Zea mays
  Clone ID: MRT4577_26994C.1.pep
VSSKKGRKYIRASCLCKKRCRCRKCCKGSQARLYVFNFKLYNQCSNGIQRSIKERRAAMIRHVGGVVGEVRVGVVGGGQGGEESVQGRHVQVDAHERSGRVRIERADEN

SEQ ID NO: 289370 - protein, 134 aa, Zea mays
  Clone ID: MRT4577_26997C.1.pep
GPGQETTHECHCFHGRLPSGGGGAARPQRSRLAWQKQHATRSGRSLETLTAAFSPAKPPRRGGPSTPRSTTGGGRTTCSRHPYRTIRSVAACYTPTGTEATTPRPGSAAPPKCTPSWQLVARTTQEQRLQDALF

SEQ ID NO: 289371 - protein, 104 aa, Zea mays
  Clone ID: MRT4577_26998C.1.pep
PPGGVSFRSTPYSGKAKCRFGQPFIPRMAGLFQPGSTGKRPRGGAFFFGNQKQKAGGSKGAGVVGTPPGGWLWPRVGYTRPHWWRLAPLSLKNGGLFSQKRGSF

SEQ ID NO: 289372 - protein, 131 aa, Zea mays
  Clone ID: MRT4577_26999C.1.pep
KKKFCYSLVPEALKKVFLCMSKEAKSEGIAARWLGLSNFPEGLFLGPRVSPVSQKVGGFFCCNLEKLSEQKKLIFFRAQRLFNKACFLMVFSPGPSLRGGGIGSPGKGRERFSPLTPFPCRPGLGSPTARR

SEQ ID NO: 289373 - protein, 65 aa, Zea mays
  unsure (1)..(65): unsure at all Xaa locations
  Clone ID: MRT4577_2699C.1.pep
GNDIAAGDVEYRCFVGGLAWATSNEXSLENAFVYYSENLDYKGIIDRETGRSCGFSFVTLSSLNF

SEQ ID NO: 289374 - protein, 56 aa, Zea mays
  Clone ID: MRT4577_269C.1.pep
GLVLIIFDGVLGGIIYFIIRGANQPIRTVNWEALRGNKRVLPDNTLTYRPVTNTGL

SEQ ID NO: 289375 - protein, 133 aa, Zea mays
  unsure (1)..(133): unsure at all Xaa locations
  Clone ID: MRT4577_26C.1.pep
PKQNSRQLLYYHPPALQLSNAKKLKKRQVGKGLMQGXGSKRHRKAVNDNIQSITKPLIHTVNNRGGVYGISCVIYKETRGVLNIFLENVIHXDVTYSEHARRETGTDMDVNLLTSSSQGTHALQMLRVRRLPF

SEQ ID NO: 289376 - protein, 51 aa, Zea mays
  Clone ID: MRT4577_27000C.1.pep
SPSTPQNTTTNRSLRSFHLLISKVPTVSIKNQFDLFLHTFQSYDKDNPKNN

SEQ ID NO: 289377 - protein, 131 aa, Zea mays
  Clone ID: MRT4577_27001C.1.pep
SYCQDSLVAHFEYHKKAITSIEWSPHEASSLAVTSEDHQLTIWDLSLERDTEEEAEFRAKMKEQANAPDDLPPQLVFAHQGQRDLKEVHWHPQIPSMIISTAIDGFNVLMPSNIDTTIPGSTDTAMPPAEP

SEQ ID NO: 289378 - protein, 129 aa, Zea mays
  Clone ID: MRT4577_27002C.1.pep
LFSRNRHDWPRPICAFFNRQTSGQPSRFLTPNETYSSPARIPSMYLRVHTSTHMAYQLLVITGYTNHACIIFHNLQGSCQCHMDIAQMGNDVYGLQPLRFQYLHTPSICMVVGGRKPWAGHGHHRRDLS

SEQ ID NO: 289379 - protein, 99 aa, Zea mays
  unsure (1)..(99): unsure at all Xaa locations
  Clone ID: MRT4577_27003C.1.pep
FEYHKKAITSIEWSPHEAXSLAVTSEDHQLTIWDLSLERDTEEEAEFRAKMKEQANAPDDLPPQLLFAHQVVLHMLALEWLSSFLAVSFFLHNCVACKL

SEQ ID NO: 289380 - protein, 47 aa, Zea mays
  Clone ID: MRT4577_27004C.1.pep
NLDQKRKGSGHQDLFIPDPCLNQKSCSSGLFCPGPCPNQEIMQFGGT

SEQ ID NO: 289381 - protein, 27 aa, Zea mays
  Clone ID: MRT4577_27005C.1.pep
NDVHVGYYVWALFRVVTLRRVFGFPVI

SEQ ID NO: 289382 - protein, 88 aa, Zea mays
  Clone ID: MRT4577_27006C.1.pep
MAVQAQHLLNPAFLPHDMGHAFRALEGATVGGGGSAFLDELGFGGCAPAPAPAPFEVAAFGDTQPRSELTCNGGGGDNSKNASLQVLL

SEQ ID NO: 289383 - protein, 134 aa, Zea mays
  Clone ID: MRT4577_27007C.1.pep
VGSVLETPRSLRAPRLSVNTGQYRADRRTWNRCVQCGYRPASRYQSLARSGFLGGALLAAPKTLSVTTKSMKAAVGKNSPRAGLCPLSKVRMTQCGVNGRVRGVGHPGRALLHAIIGISPRPFACSRFVGRWLS

SEQ ID NO: 289384 - protein, 339 aa, Zea mays
  Clone ID: MRT4577_27008C.1.pep
MAVQAQHLLNPAFLPHDMGHAFRALEGATVGGGGSAFLEELGFGGCAPAPAPIEVAAFGDTQPRSELTCNGGGGGDNSNVFLPRKRARVAPGFLDDAHQQGLVLPLPVPVPRPRVRVFAGDVQSREAGCGAASTSGRAAATTNGVLSLLYRQGMEIDALVRLETERMRAGLQEARRRHARAVAAAVQRAAAGRLRLAEAELGRARRRNAELEERLRQLAAEGQAWLGVARSHEAVAAGLRATLDQLLQQQQPGAGVGGGEAEDARSCCFETSPPGPVADDCDAASRGSSPPSCKSCGGGDASVLLLPCRHLCLCRACEAAAEACPVCGASKNASLQVLL

SEQ ID NO: 289385 - protein, 54 aa, Zea mays
  Clone ID: MRT4577_27009C.1.pep
NWTITLQGKLLDPTIRVHLFNHQHSIGSAIVYSVTGNLVTISPTHLTLSKTANG

SEQ ID NO: 289386 - protein, 56 aa, Zea mays
  Clone ID: MRT4577_2700C.1.pep
SYIRPFGSIRNTHSTVHTSGDSTHVHSCSLVHEELLKSNRTLCSTRHAGVRAFLYG

SEQ ID NO: 289387 - protein, 111 aa, Zea mays
  unsure (1)..(111): unsure at all Xaa locations
  Clone ID: MRT4577_27010C.1.pep
SRPARCSRGCDLFNSRSGCPPHELGLLQKATGINTGANRHTGTTPARTACLRKVEQVNQAGNLXYGEVPDTLWRPGYSTLKNPTLVRNYTTGEGSGCWDLSKEGRHNVDRN

SEQ ID NO: 289388 - protein, 86 aa, Zea mays
  unsure (1)..(86): unsure at all Xaa locations
  Clone ID: MRT4577_27011C.1.pep
DGVHPARDHRRPGGDAGVLPDAAAGHLPDDVLLCGRAIWPALPIHARLLRSGKRCLLRWINYLRPNLXRGNFTAAEEEALIKLHAS

SEQ ID NO: 289389 - protein, 35 aa, Zea mays
  Clone ID: MRT4577_27012C.1.pep
VKLAFSFICESSILAIWLLRSLTFLHHIRDIKDPE

SEQ ID NO: 289390 - protein, 132 aa, Zea mays
  Clone ID: MRT4577_27013C.1.pep
KAGPRHRRRSPSRCFVVVVVVVVVQGLFTLLTAHRFLRPPRGRYVPVDEQNRTEQGRATGSVLSVPSCPAPFLHRSGDKAFFRLTATPALDVVSYLAAAPIILRAAAGARGRLDRPILHPAATNSARRNTTT

SEQ ID NO: 289391 - protein, 100 aa, Zea mays
  unsure (1)..(100): unsure at all Xaa locations
  Clone ID: MRT4577_27014C.1.pep
FGFFTRPAFLLQQQILPFHLQSVXNIGAFLRQQRVFPFYPQGVGYINAFLRHEQLLPFYPQNVANIVVLLQHQQLVACSQHALTNPTTVLRPSTIGGAIF

SEQ ID NO: 289392 - protein, 192 aa, Zea mays
  Clone ID: MRT4577_27015C.1.pep
PPFQNEDEPAAGAVPSRAPAAPGHLLRVGSRASERHPRLSSPSASPTRRLLASEVKSSTPYHHREFQPIHFRGLLPSALFKPSATATPTTPPAASPASSPSPPTIHASKRRRRETEATGNTPLRGGRGPAPRRRSSTPPPLSLPAAEFDPLDPDADPPPKLLTADEVRLCKQALKALDKKVGKPATLTQGVS

SEQ ID NO: 289393 - protein, 90 aa, Zea mays
  unsure (1)..(90): unsure at all Xaa locations
  Clone ID: MRT4577_27016C.1.pep
MWCGRYVDEEVVWEIEGHHLRSAAIAGHDGAXWAQSTAFPPSRPEEMTHIIKDFHEPAFLAPIGLFLGPTKYLAPQGEPGAGVRGKKRIW

SEQ ID NO: 289394 - protein, 232 aa, Zea mays
  Clone ID: MRT4577_27017C.1.pep
PGLHANYHPNHPGAHHIIQPGYNGYSYRPPTRPNMPSNMQNIGHWGANPGCPQPSSDPQDLVRYILGALEVLKTEKIPPTEQYITDCICYGDANLPKFDVKKALQVAMQHQAVVKKKLGKMSLFLRKDEDLWKCVNIMDDNAKYPKETLDTVHAFMSSAPAYPEIKSSQSRYQAATMFKKTCLKHLALAEVLQVLNVIINTKKWLVPHSSGWQPLSFNIIVADATTAASVKA

SEQ ID NO: 289395 - protein, 58 aa, Zea mays
  Clone ID: MRT4577_27018C.1.pep
LVKRLFAHEATTSSWADPSPGAVTAGGRVCKPFAEAFGSRPHLFFGLICQEPRQRYFF

SEQ ID NO: 289396 - protein, 136 aa, Zea mays
  Clone ID: MRT4577_27019C.1.pep
ATHIIFPVPTCTHCSKHGWTDPVSVKFSVSTFEAWQQSLTCKQTALKTVMLLAARLPIVWWPLLALPGKVWSSSKRLPASLLPPLDGGMFIVMLANYYGASCKSYWLLILPSAQVDMLPESKLFDDSIKCFDMLLS

SEQ ID NO: 289397 - protein, 99 aa, Zea mays
  Clone ID: MRT4577_2701C.1.pep
GGRQLGLKLHRKPSPFHRLLLARYYTTLWTVLEVKWPQGFSTLLINIGHRETAACEAPSIRLKEMETSKSENWQGRIVATCLQLAGHWQVHESMPARMN

SEQ ID NO: 289398 - protein, 649 aa, Zea mays
  unsure (1)..(649): unsure at all Xaa locations
  Clone ID: MRT4577_27020C.1.pep
MGEYAAVKTSVWWDIENCHVPRSCEAHLIAQNMSSALAAAGYTGPITISAYGDTNCVPNHVQHALSSTGIALNHVPAGIKDASDKKILVDMLIWAIDNPPPANYLLISGDRDFSNALHKLVMRRYNILLAQPPNVSQVLTAAAKHVWLWKDLVAGEPPRAESPYISSIANGSVDHSNTSNNMGSDSSDAPHNSTQGQNSIPGDQQKGGNSKADKQYKVKQPRKNQSDNVSKPTRTDEASVDGVSDSSKGSTATEPNQSQSSSSSLPSSDLHDGGGAQVDELNTQKNQPSSQSKKPKKSXFPSKECSSRLLPWXKPGVSVESSSKNGAPDVTSNGRPKYQKPQSSHQPRQQNPVNHRPHGGSGNFQSSNSHRSNSCPAPAGHNGIPTAPLQFWPSGPPYHGPPINYPDMSRLNISEYPRGIHNNQGLHANYHPNHPGYNDYSYRPPTQPNMPSNMQNIGHWGANPGCSQPSSDPQGLVRYILGALEVLKTEKIPPTEQYIADCIWYGHGDANMPNFDVKKALQVAMQHQAVVKKKLGKMSFFLGKDENLWKCVNIMDDNAKYPKETLDAVHAFMSSAPGYSEIKSSQSRYQAATMLKKTCLKHLSLAEVLQVLNIIINTKKWFVPHSSGWQPLSFNIIVADATTATGGKA

SEQ ID NO: 289399 - protein, 155 aa, Zea mays
  Clone ID: MRT4577_27021C.1.pep
LILIMSNLLLTPPRSNLPNNNIPIIMTPRRTLTMLITTIRSLTILTRNIKPTPHLPHRLIIALRNERTMTHTRLIINIRRLPNSTPMPPHTINQKRRALLLNMLRRLLLSSLLHHMHLLLNRLPLFLLILIFQQNLLLTTTTYLQAHKSAQRFQA

SEQ ID NO: 289400 - protein, 52 aa, Zea mays
  unsure (1)..(52): unsure at all Xaa locations
  Clone ID: MRT4577_27022C.1.pep
CGYLXKTPYCIDDSAALPKLLPVPSQTLFRLQGQGNSCTCNMLQQTLPVNGA

SEQ ID NO: 289401 - protein, 85 aa, Zea mays
  Clone ID: MRT4577_27023C.1.pep
RLHRSVIAQHLLFLSHDAGHCYRTTSTNTARGCDAPPHGLPPTPYPTLEAILGYADHHPWVLHRRHLRKEHHQPGRDLFAPTYEE

SEQ ID NO: 289402 - protein, 105 aa, Zea mays
  Clone ID: MRT4577_27024C.1.pep
LGGGVKKKREGEKRGLKLTTKAATASNNHHRGGKLKKNDACFPACQIRTHHQDTYDAFSAARALNNPLSRWSAPRRRRRRRRRRARSIEARRTTTQKARTKERAK

SEQ ID NO: 289403 - protein, 83 aa, Zea mays
  unsure (1)..(83): unsure at all Xaa locations
  Clone ID: MRT4577_27025C.1.pep
PHRSTHALQKSPNGTMLLAYLMLREGFTLAKGCNLLNKVHPAAQTNDGFGKALLALDKKLHGXVFMDWQHKRPEMKVCTIFNK

SEQ ID NO: 289404 - protein, 97 aa, Zea mays
  unsure (1)..(97): unsure at all Xaa locations
  Clone ID: MRT4577_27026C.1.pep
GRSHVLRRSSATCWFPPHAEEEGASGEGDYQKRENSHLHMHTLVELCAIVAGANALHEKHKDEKDPQNEPXHRVKEDXSASPAMGSCGVRLCHEHRW

SEQ ID NO: 289405 - protein, 68 aa, Zea mays
  Clone ID: MRT4577_27027C.1.pep
FYQMGFKAIDKKRWGFLSKGAEKAYGGNCLVSWEKVQHPIQMMRNVFGQVYRSKSHVLPKHSMCMLPT

SEQ ID NO: 289406 - protein, 73 aa, Zea mays
  Clone ID: MRT4577_27028C.1.pep
MAVTITWVKARQIFISRGNPTVEVSTLQTHKSPACANAPAAICTEDQDTKIASFIKARHVRKVYFSEISKMKH

SEQ ID NO: 289407 - protein, 82 aa, Zea mays
  Clone ID: MRT4577_27029C.1.pep
TIGIMTWNVLLMCVPIMRIIEDYFRFIFMQKTSSRMWKLMLGLCLPGVIEIFRCTEIRFLLNICQDTLLLRFNYFLRIKSSW

SEQ ID NO: 289408 - protein, 59 aa, Zea mays
  unsure (1)..(59): unsure at all Xaa locations
  Clone ID: MRT4577_2702C.1.pep
AKASPQGGQRAGHEQGKTAHKKPPPPPQKHXERAPRARDTTKVRPTKQAANQKKAAPFP

SEQ ID NO: 289409 - protein, 45 aa, Zea mays
  unsure (1)..(45): unsure at all Xaa locations
  Clone ID: MRT4577_27030C.1.pep
MAVTITWVKARQIFISRGNPTVEVDVGLSDGSYXRGGVPIGASTL

SEQ ID NO: 289410 - protein, 237 aa, Zea mays
  Clone ID: MRT4577_27031C.1.pep
MRPSIVLFGDSITEEAFGEGGWGASLANHYSRSADVVLRGYSGYNTRWAARVAGRAVASIAGPVSAVTVFFGANDAALPDRACALQHVPLAEYKDNLRAIFALLKKRWPSVVVILITPPPVDEDGRLRYPYAHDFSGLPERTNAAAAGYARACVEVARQCGLRAIDIWSRMQRFPGWEKSFLRDGLHLTPRGNRVLFEEVVFALKDANLSLEALPADLPLFSDIDPDNPVKSFEDQE

SEQ ID NO: 289411 - protein, 36 aa, Zea mays
  unsure (1)..(36): unsure at all Xaa locations
  Clone ID: MRT4577_27032C.1.pep
LIISFCIXHKWEHNQYIRIIFTHXIXLVNKNRKLEL

SEQ ID NO: 289412 - protein, 57 aa, Zea mays
  Clone ID: MRT4577_27033C.1.pep
SLTVKLQTLFKNQKQQNMMINFWEGGFISLRIKIKLDIAKSSQQHIQRTYSLGTTWG

SEQ ID NO: 289413 - protein, 91 aa, Zea mays
  Clone ID: MRT4577_27034C.1.pep
LHHPRASSCHNPHLMQASRIRRFCRAWQPASNLQPDAAPHPQLPHLSYSRSTHTKPTSPSPGPDASTHHQAPSPTVLALKHHLRIDAGVSH

SEQ ID NO: 289414 - protein, 179 aa, Zea mays
  Clone ID: MRT4577_27035C.1.pep
SSDHGAKPSCKEVISSKSKPTKLLVEKSSPCINVDYEYVNLLADTPGIKRGLESPSAWKSPWYIDMHMHFQGFVSPADRTYDALGLVNRLSKHSAAAAVEACEMLASGNTTSDKENKDNTDGKELVTRKSQIKIMAEARVLDFDESPTPARTADKKLGSCHRRSVSSPILPSPNLRSFR

SEQ ID NO: 289415 - protein, 441 aa, Zea mays
  Clone ID: MRT4577_27036C.1.pep
MPSITHYVLDRLLETRSPVHVQKVVPKPPPPPPDKATPVPVSTARTRSSLASLYATPENTTLPDLPSSFPGTWSPYLINHKRRGASLARTFSQGDAGREVSQPNLPVMLPALPRGCEPTQVQEPEFVFQQAGNGQAEGDSGVEEAPINGKNEMLLKGKGSVTAKNEHEQPEFEFHRGNLEALVRPVNVGRPLIGGAPKNDESDTFLELQDSMSVASNTETWRKPSSPLGTSVGTPGAEFYDAFEEISSDGGTRSSRAMDDDLREMRLSLLTEIERRKQAEEALEIWQKEWKKLSHHLSHVALSLPSPSIAEDTDDSSVDPGAELCQQITVSQLVAAAISQDFARAEVESEMETVIATKNFEIARLSDRVQYYEAANREMSQRNQEAIEMSRQQRKGRKKRQKWFWASVGLAVTLGATAIAWSYVTPSQPQASADPSSAASQ

SEQ ID NO: 289416 - protein, 153 aa, Zea mays
  Clone ID: MRT4577_27037C.1.pep
KEKKLSHHLSHVALSLPSPSIAEDTDDSSIDPGAELCQQITVSQLVAAAISQDFARAEVESEMETVIAAKNFEIARLSDRVQYYEAANREMSQRNQEAIETSRQQRKERKKRQKWFWGSVGLAVTLGATAIAWSYLPSSQPRASADSNSTVSD

SEQ ID NO: 289417 - protein, 200 aa, Zea mays
  Clone ID: MRT4577_27038C.1.pep
SSIPMPSITHYVLDRLLETRSPVHVQKVVPKPPPPPPDKATPVPVSTARTRSSLASLYATPENTTLPDLPSSFPGTWSPYLINHKRRGASLARTFSQGDAGREVSQPNLPVMLPALPRGCEPTQVQEPEFVFQQAGNGQAEGESAVEEALNGKSVMLQKGKGSVIAEIEQEQPEFEFCQSLEALVKPVNVRRPLNGEAPK

SEQ ID NO: 289418 - protein, 78 aa, Zea mays
  Clone ID: MRT4577_27039C.1.pep
GENKLTRSTVFLAPGDRNSKCKGGCFCLNHSNIFNINRTRFWLKIVRDGPQNPHKDGDLYGGLGYMGQGWNGLLFTGH

SEQ ID NO: 289419 - protein, 107 aa, Zea mays
  unsure (1)..(107): unsure at all Xaa locations
  Clone ID: MRT4577_2703C.1.pep
GATSSYLQINQVAVAYLTPYSQXQQQLLPFNPLATLHPALQLPLSLEVPSLTLHTTXDFSWCPHTTMTLLQTPNTSIRQLPLLPFNQLALTNLAVFYQQPIIVGALF

SEQ ID NO: 289420 - protein, 95 aa, Zea mays
  unsure (1)..(95): unsure at all Xaa locations
  Clone ID: MRT4577_27040C.1.pep
MYAVGKVGSLISRSVYTVSGPFHPFGGAVDIXXVVQQQDGSFKSSPWYVRFGKSRGVLKXGRKVVDISVNGVDAGFHMYLDSNGEAYFLRNADPN

SEQ ID NO: 289421 - protein, 67 aa, Zea mays
  unsure (1)..(67): unsure at all Xaa locations
  Clone ID: MRT4577_27041C.1.pep
PECKKTTFPGLDAYASIERDDIVLRSYIDRRFYQHVISENDXSXATYLHAGKLLSLYITGDKERAIS

SEQ ID NO: 289422 - protein, 272 aa, Zea mays
  Clone ID: MRT4577_27042C.1.pep
MANLTNGFASLQCAGAMHVDKGHMQASGLPFLSFRRCAQLDISRLGSVPRFMGATSATVSQHHVRQRISAIRASTLSCLQDDATKFFDFVVIGSGVAGLRYALEVSKHGSVAIITKAEPHESNTNYAQGGVSAVLCPSDSVESHMKDTIVAGAYLCDEEIVRVVCTEGPERVKELIAMGASFDHGEDGRLHLAREGGHSHNRIVHSADMTGREIERALLQAVHNDDNISLFGHHFAIDLLTCQKNGEIYCYGVDSIDIETQKVVRFISKVTL

SEQ ID NO: 289423 - protein, 103 aa, Zea mays
  Clone ID: MRT4577_27043C.1.pep
EGRERQTGGLPEREKEELMPYPLITAQGSSLLEREPRCWPPSSCTFGVSRTRTVRVPSPTWSAEHARCVIVRLELYSLSKTIPEFVMGIQLKNLSTPPGHYLR

SEQ ID NO: 289424 - protein, 288 aa, Zea mays
  Clone ID: MRT4577_27044C.1.pep
NKFKHSGETISRKFMEIFCCVVGMSNQYTRPKDPNFRNVHDRIRNDPRIWPHFKDCIGAIDGTHICANPPPQDFLRYLGRSGKATQNVMAVVDFDMRFTFASIGQPGSMHDTSVLYNALQIDEDIFPHPPLGKYYVVDAGYSNRPGYLSPYKGQRYHVPEWRRGPAPSGEQEMFNHLHSSLRNVVERVFGVWKMKWRILLNMPKYPMVKQKMIVAATMCLHNFIRQHHALDKDFERCDRDQDYVPTIPARYRNQALSQSLLDTTSHANDRTMDRFRDDLALAISSSRA

SEQ ID NO: 289425 - protein, 110 aa, Zea mays
  unsure (1)..(110): unsure at all Xaa locations
  Clone ID: MRT4577_27045C.1.pep
VTATPLGTGEIKRWGPRGQNILFTTVLFPQAQRVNFRPWRVGCCPPVFFITRPPWVSCKNCVHPRPQQTHASPTMGWGSMKTVPPPRLYFKLILRKKRGLFGGPXXKPPK

SEQ ID NO: 289426 - protein, 127 aa, Zea mays
  Clone ID: MRT4577_27046C.1.pep
PLLGGHRFLPVSLVKGKTPLGPISHTPFPRGLAVSFFPLARRVFLLESGPFAPPLFFGFVPPFGPPGFSFFFSGFFFFCYCARFPFPPGSGFSLVFPPLFFGSLSGPLVPLRVPVRVSRVAPRARFP

SEQ ID NO: 289427 - protein, 155 aa, Zea mays
  Clone ID: MRT4577_27047C.1.pep
MQIFVKTLTGKTITLEVESSDTIDNVKAKIQDKEGIPPDQQRLIFAGKQLEDGRTLADYNIQKESTLHLVLRLRGGAKKRKKKTYTKPKKIKHKHKKVKLSVLQFYKVDDTTSKVTRLRKECPNSECGAGVFMANHFDRHYCGKCGLTYVYNQKA

SEQ ID NO: 289428 - protein, 155 aa, Zea mays
  Clone ID: MRT4577_27048C.1.pep
MQIFVKTLTGKTITLEVESSDTIDNVKAKIQDKEGIPPDQQRLIFAGKQLEDGRTLADYNIQKESTLHLVLRLRGGAKKRKKKTYTKPKKQKHKHKKVKLAVLQFYKVDDATGKVTRLRKECPNADCGAGTFMANHFDRHYCGKCGLTYVYNQKA

SEQ ID NO: 289429 - protein, 50 aa, Zea mays
  Clone ID: MRT4577_27049C.1.pep
YHRTVLNIGFLCSTQVDQGTLCNTKKHCVLRYRHKLNTAELNFKIHFTER

SEQ ID NO: 289430 - protein, 73 aa, Zea mays
  Clone ID: MRT4577_2704C.1.pep
PTSFKQRIGRISYNIRSHNSYSLHSFHIFPNHNSYTLLSCITLIHITIHSNNHQIHHYYPITHFEHLHTSSTI

SEQ ID NO: 289431 - protein, 155 aa, Zea mays
  Clone ID: MRT4577_27050C.1.pep
MQIFVKTLTGKTITLEVESSDTIDNVKAKIQDKEGIPPDQQRLIFAGKQLEDGRTLADYNIQKESTLHLVLRLRGGAKKRKKKTYTKPKKIKHKHKKVKLSVLQFYKVDDTTSKVTRLRKECPNTECGAGVFMANHFDRHYCGKCGLTYVYNQKA

SEQ ID NO: 289432 - protein, 61 aa, Zea mays
  Clone ID: MRT4577_27051C.1.pep
HTVMIPLSGPYTISVTHFDKFMRWISLTNEHAAGPPLNHYHLQNLIGKATGELHAQDRAHS

SEQ ID NO: 289433 - protein, 155 aa, Zea mays; identical to SEQ ID NO: 289427
  Clone ID: MRT4577_27052C.1.pep

SEQ ID NO: 289434 - protein, 53 aa, Zea mays
  Clone ID: MRT4577_27053C.1.pep
ATFKTPCFILYVYKYINRRGGLGTKAPACPLGSALIMCYYSTSFIMDHQIDLK

SEQ ID NO: 289435 - protein, 165 aa, Zea mays
  unsure (1)..(165): unsure at all Xaa locations
  Clone ID: MRT4577_27054C.1.pep
MRTPASSPKMQIFVKTLTGKTITLEVESSDTIDNVKAKIQDKEGIPPDQQRLIFAGKQLEDGRTLADYNIQKESTLHLVLRLRGGAKKRKKKTYTKPKKIKHKHKKVKLSVLQFYKVDDATGKVTRXLRKECPNTEXGAGVFMANHFDRHYCGKCGLTYVYNQKA

SEQ ID NO: 289436 - protein, 57 aa, Zea mays
  Clone ID: MRT4577_27055C.1.pep
GWKRPQQMAAPPNKWTGAVPRRETDGLDSLRTDALNDKGEVGLIAFLCGFVLSKKAQ

SEQ ID NO: 289437 - protein, 155 aa, Zea mays
  Clone ID: MRT4577_27056C.1.pep
MQIFVKTLTGKTITLEVESSDTIDNVKAKIQDKEGIPPDQQRLIFAGKQLEDGRTLADYNIQKESTLHLVLRLRGGAKKRKKKTYTKPKKIKHKHKKVKLSVLQFYKVDDATGKVTRLRKECPNTECGAGVFMANHFDRHYCGKCGLTYVYNQKA

SEQ ID NO: 289438 - protein, 172 aa, Zea mays
  unsure (1)..(172): unsure at all Xaa locations
  Clone ID: MRT4577_27057C.1.pep
VALLRRSXPRACXLXPLVGAFCRXAAWCCLSLFXXVRACGSPSWSLXSFVLPGFRFLLSRSSRSPGXGSLXFLLWSLXFVXXALLXVXVSVCXASLVCFPXXGSLPPPPVKKSLSPPGXXGAFGCLFWXPVLWLRARWRGGGAGALGGRSPSPSWAALLCCGSPPRPPAGAC

SEQ ID NO: 289439 - protein, 199 aa, Zea mays
  Clone ID: MRT4577_27058C.1.pep
MGDWDPRGRPGRASLHPSPAAANPSPAAVVATAAARRRPPIAAKMQIFVKTLTGKTITLEVESSDTIDNVKAKIQDKEGIPPDQQRLIFAGKQLEDGRTLADYNIQKESTLHLVLRLRGGAKKRKKKTYTKPKKIKHKHKKVKLAVLQFYKVDDATGKVTRLRKECPNTECGAGVFMANHFDRHYCGKCGLTYVYNQKA

SEQ ID NO: 289440 - protein, 155 aa, Zea mays
  Clone ID: MRT4577_27059C.1.pep
MQIFVKTLTGKTITLEVESSDTIDNVKAKIQDKEGIPPDQQRLIFAGKQLEDGRTLADYNIQKESTLHLVLRLRGGAKKRKKKTYTKPKKIKHKHKKVKLAVLQFYKVDDATGKVTRLRKECPNAECGAGVFMANHFDRHYCGKCGLTYVYNQQA

SEQ ID NO: 289441 - protein, 68 aa, Zea mays
  unsure (1)..(68): unsure at all Xaa locations
  Clone ID: MRT4577_2705C.1.pep
HCLDDKMSDLYVNMGCTTSIDFICSLSSVLTDESVRRRIXNMHQRLRLLEQQMQTLSRLKLSKLLTMC

SEQ ID NO: 289442 - protein, 137 aa, Zea mays
  unsure (1)..(137): unsure at all Xaa locations
  Clone ID: MRT4577_27060C.1.pep
HKKWNTVDTNRGPTVYKIQALGILLAMSACVDNATXLFIKAXQASITSLLAKYLPXRLXSACEKSAFQHYTLQQAVAERKISLSPLQPEQSTGLSLEQSXMLQTIMAQYLQQLLLXVINQXALSYLSPYSHYQQFLP

SEQ ID NO: 289443 - protein, 67 aa, Zea mays
  Clone ID: MRT4577_27061C.1.pep
LRPLYHPIEPHMMIMRRTTGQTFTYRADLICIRRAVFSVVCYINRFSGTKVFTPRGESRAGGISLSP

SEQ ID NO: 289444 - protein, 41 aa, Zea mays
  Clone ID: MRT4577_27062C.1.pep
SSKLHHLLHSSFANVLCTCFPEFTSHQIMIASHPLTPLNSC

SEQ ID NO: 289445 - protein, 88 aa, Zea mays
  unsure (1)..(88): unsure at all Xaa locations
  Clone ID: MRT4577_27063C.1.pep
PGLGRFCSXFWLGLASGGPPFCRPGRRLRRCWPCLLPCGAXSWRRWSSWAGLLRAPCCGGWGWRRRSPCRPCSVSPGCSXQRSGFWPL

SEQ ID NO: 289446 - protein, 62 aa, Zea mays
  Clone ID: MRT4577_27064C.1.pep
DLIAPLFCLNYGLLFYQSCTRCKVLGLFLYNENFGALLIILIYLGDRTCFHEVIQIFFEANG

SEQ ID NO: 289447 - protein, 170 aa, Zea mays
  unsure (1)..(170): unsure at all Xaa locations
  Clone ID: MRT4577_27065C.1.pep
MGGGEAHHHHLFHHXKGEEQEEQLAGGGFCLSAXYTDAGGGGVFFSXXNXSSSXLKEEKQLKHKQHLCEAGAXAAGAFALXEKXXAXKDPEHAHRLQIXEEVSAAAAVGSGGFAFLWPPGEGKGLKDSQGAGGXKKRHFLGWLVLPCRRPFPGASRAWVGVVSGSRPVVR

SEQ ID NO: 289448 - protein, 97 aa, Zea mays
  unsure (1)..(97): unsure at all Xaa locations
  Clone ID: MRT4577_27066C.1.pep
LYAKKDYNLAKHPQIDVPNLQVIKLMQSCKFKEYVRXTFSWQYYYWYVTNDGIEHLRNYLDLPFEIVPATLMKCAKPPGRPFGSDPPGDRPRGPCPF

SEQ ID NO: 289449 - protein, 42 aa, Zea mays
  Clone ID: MRT4577_27067C.1.pep
RYPNIQQEFTLLPHHVTTLRYSGEILLNARVTMLYRITVCIN

SEQ ID NO: 289450 - protein, 79 aa, Zea mays
  Clone ID: MRT4577_27068C.1.pep
MLLLIISYHHKLIQEKNRRWCLLQNVLTCIYPDKFICTLALDSPFWYNLQRISLIHGGILLFATFHVLNSRTPILWLFF

SEQ ID NO: 289451 - protein, 205 aa, Zea mays
  unsure (1)..(205): unsure at all Xaa locations
  Clone ID: MRT4577_27069C.1.pep
MGRLLPLALLVLLSAAAAAPQLAGAAKAEHSLGIIQKDIIQTVNKHPNAGWTAGHNPYLANYTIEQFKHILGVKPTPPGLLAGVPTKTYSTSEKEDLPKEFDARSKWSGCSTIGKILDQGHCGACWAFGAVECLQDRFCIHHGVNVSLSVNDIVACCGFLCGDGCEGGYPIFAWQYFXKNGVVTDECDPFFDHVGCQHPACXPAY

SEQ ID NO: 289452 - protein, 117 aa, Zea mays
  unsure (1)..(117): unsure at all Xaa locations
  Clone ID: MRT4577_2706C.1.pep
CIAGEWASYHLVKLSILKLPGLNDDGGTHLLAGLGAGFCGVCAGCPVDGANSRMXGESXYTSSLDCYGKTLKNDGPLALYKCXLPHFARLGSRNVPMSLTLPQVDELLVWKATCMLS

SEQ ID NO: 289453 - protein, 107 aa, Zea mays
  Clone ID: MRT4577_27070C.1.pep
KGLAARLLKVGRFICSETWRVTISVQSCHPFVRRYAAAYCAISGQGLAGFSIQRIDCGHKKVFPVGRCTALSSVVTFSVASPKPLPPTASNGSVPLRMRPPLGVRLD

SEQ ID NO: 289454 - protein, 61 aa, Zea mays
  Clone ID: MRT4577_27071C.1.pep
AYLELPRFVGKFRFSPCDQENGIHVISRPLLKPLSVRPTLIFQYRSLRTGDLNPILAGPFP

SEQ ID NO: 289455 - protein, 99 aa, Zea mays
  Clone ID: MRT4577_27072C.1.pep
GAGCRGFGGASSGSTGYENTPYVSFLCSLSRMKSDNFLFGKVFWARNWMASRPSVAFPHLLFLRFFRRLDWLCRCSGSFGSGGCGSRRDDDGEVVHYRR

SEQ ID NO: 289456 - protein, 217 aa, Zea mays
  Clone ID: MRT4577_27073C.1.pep
MAGRMVRSCVQTALKAANSVVGIAGMAVILYALWMLRAWYREVADLQQHLPVPWCIYTFLGLGIFLCLLTCSGHIAAETANGHCLSCYMTIVFVLIMLEGAITMDVFLNSNWEEDFPADPSGKFEDFKHFVRSNFEICEWVGLSVVAAQVLSIILGMVLRTLGPDRETDYDSDDDVTVPARLPLLINQSQHGSYYAEPNTSGRSDSWKLRILDKVNN

SEQ ID NO: 289457 - protein, 136 aa, Zea mays
  Clone ID: MRT4577_27074C.1.pep
CAYLPYTVTHEHNNNNKTAVAFRRNIMITHAPLCVHAACHTWMEHQTRRNIIPGLRRKTPPRPTLGLPLGTISASPDAELALGHRLHLARARPRLPAPPRTPQTTTLLTVAHVRKDSTILGKTFASSELGSDLDTL

SEQ ID NO: 289458 - protein, 130 aa, Zea mays
  Clone ID: MRT4577_27075C.1.pep
YMTIVFVLIMLEGAITMDVFLNSNWEEDFPADPSGKFEDFKHFVRSNFEICEWVGLSVVAAQVLSIILGMVLRTLGPDRETDYDSDDEVTVPARLPLLINQSQHGSYYAEPNTSGRSDSWKLRILDKVNN

SEQ ID NO: 289459 - protein, 104 aa, Zea mays
  Clone ID: MRT4577_27076C.1.pep
KGLMSYLLSSQRTLTGVPRLPRDVLWLVYIFGFRAGLPQSKVSSNRRQGWVLTTIGCRLSAGAERELTWQRSHRVLKGWNPSGSVPSSPNIQDACVEATGAQVG

SEQ ID NO: 289460 - protein, 191 aa, Zea mays
  unsure (1)..(191): unsure at all Xaa locations
  Clone ID: MRT4577_27077C.1.pep
MGLGCFGCFAPEVDEDLKPSKPDDSSGTDARRKVAPDVANGYAHSFTFKDLLVATGYFNHANFIGEGGFGKVYKGKINGQMVAVKQLTQDGVQGRNEFLVEVLMLTMLNHRNLVSLVGFCAQGDERLLVYDYMPFGSLESHLFDVPLGKKPLDWNTRVRIAVGVAEGLSYLXHVADPPVIYRDMKAANILL

SEQ ID NO: 289461 - protein, 48 aa, Zea mays
  unsure (1)..(48): unsure at all Xaa locations
  Clone ID: MRT4577_27078C.1.pep
SVKTSFXLHTEQIRSYLCDALNFDILPISTKSISHLANTNTFIQNIFF

SEQ ID NO: 289462 - protein, 40 aa, Zea mays
  Clone ID: MRT4577_27079C.1.pep
NGVIILVYCPRIRVQDDQADNRDNFSSLHKLRDQKQDCNQ

SEQ ID NO: 289463 - protein, 439 aa, Zea mays
  Clone ID: MRT4577_2707C.1.pep
QTYKPPEMYGPYYVNAHPYAFHDKTSRAVLIGIVTGSVLLVVGLTLVVFYAVNQKKRAQRLVSINNPFASWGSLGEDIGAAPQLKSAKFFSLEELKLCTNDFREINAIGAGGYGTVYRGKLPDGQLVAIKRSKEGSMQGGLEFKTEIELLSRVHHNNLVGLVGFCFEKGEKMLVYEFIPNGTLSEALYGMKGIQLDWSRRLKIALDSAKGLAYLHDHANPPIIHRDVKSTNILLNEKMTAKVSDFGLSLLVTDSEEGQLCTNVKGTLGYLDPEYYMTQQLTAKSDVYSFGVVLLELIVGKPPIHNNKYIVREVKMALDEDDGTHYGLKDVMDPVLQKIGGLFGFPRFLKLALQCVEEVATARPSMNSIVREIEAIMLDNGLTPGSMSTSSSFSIESRTMKVGPKHPYSSSSMSTSTFDMDSRAFEYSGVFPSSHGSLKP

SEQ ID NO: 289464 - protein, 69 aa, Zea mays
  Clone ID: MRT4577_27080C.1.pep
PRFRIWHRETYNSLSTLERDRQEISLEWNYLNELHVMLQQSDWVMAGYNEQNSVGIQCVDCRLINKEKG

SEQ ID NO: 289465 - protein, 112 aa, Zea mays
  Clone ID: MRT4577_27081C.1.pep
MVAAKKTKKSTDNINNKLQLVMKSGKYTLGYKTVLRTLRNSKSKLVIIANNCPPLRKSEIEYYAMLAKVTVHHFHGNNVDLGTACGKYFRVCCLSIIDPGDSDIIKTTPGEQ

SEQ ID NO: 289466 - protein, 136 aa, Zea mays
  Clone ID: MRT4577_27082C.1.pep
MLHPTKYAAMLAEKMQKYGATGWLVNTGWSGGRYGVGKRIRLPYTRKIIDAIHSGELLTANYQKTEVFGLEIPTEINGVPSEILDPINTWTDKAAYKENLLRLGGLFKKNFEVFASYKIGDDSSLTDEILAAGPNF

SEQ ID NO: 289467 - protein, 112 aa, Zea mays
  Clone ID: MRT4577_27083C.1.pep
RGGGPEWSPLHFNGRMCPPESPSSSSVFPGDRSDRSLSIISTSKQWTGMHIGRASPHGVFGPVRRRSCPAHWQQCSCRSRICRRPLCQYARRAGKRVGGLCSSSRIRVRTRC

SEQ ID NO: 289468 - protein, 95 aa, Zea mays
  Clone ID: MRT4577_27084C.1.pep
PAGISSSSVFLGVRGHSPDPNRPPREPRRSPTPLPSLQGNCDHPSSRFHSPFTSSVCYVYEHTIYYGLYGGFDSQIWPSIIVAPSPRSSNCGICL

SEQ ID NO: 289469 - protein, 40 aa, Zea mays
  Clone ID: MRT4577_27085C.1.pep
MYVTTIQISHIILFFIIYLQYNKHTRYIHTTILVYKSELI

SEQ ID NO: 289470 - protein, 103 aa, Zea mays
  Clone ID: MRT4577_27086C.1.pep
PAGNLVTGSGPRPNFTRPDQFASASNTSALCKETQPHRAHPCPQRRRCVGLPRRTPRAERGSPRSKPLVREKHVSAGGTATRSVDCNGEEEVIVLFHMADYGS

SEQ ID NO: 289471 - protein, 95 aa, Zea mays
  Clone ID: MRT4577_27087C.1.pep
RRSDDCTVACAYMDAKTLVKLVCTITDLKSELHAAFRCAPDAAAVALHVVELFLHNKTFVRTNKVWANCVELVPMVPVFVTKPSADTTEQAKRMA

SEQ ID NO: 289472 - protein, 78 aa, Zea mays
  unsure (1)..(78): unsure at all Xaa locations
  Clone ID: MRT4577_27088C.1.pep
RVLECDLAYAPLPYRQKDCADLGAGRVXPDQLDPLERWKQVLEPGLQGLQHQVYRLLXVHDLPQELLLALTHYYLVQE

SEQ ID NO: 289473 - protein, 98 aa, Zea mays
  Clone ID: MRT4577_27089C.1.pep
EFQGEGVHHVRSLTASKEGEEGWWCSLRRGAVDGRSWGRLLFERGKMGEVEHCCHHGRAISSSWKASPLEVRGRRRVYFLSLGLSSAVLPVCPLYSLF

SEQ ID NO: 289474 - protein, 89 aa, Zea mays
  Clone ID: MRT4577_2708C.1.pep
WVLLLSLECSQTLLLEENNQSLLSFTCIVCSVCRAAAIWDTLCSGIYEPNSTELPQILGFRCGWTTVTNPITNMPDHDPLALSGELYLQ

SEQ ID NO: 289475 - protein, 380 aa, Zea mays
  Clone ID: MRT4577_27090C.1.pep
PRVRLTSSGKKFMSIVVDVLDLILPMTIVHFGGAILNKFIQLFDRYVETLIKVLPGPSEDDNLLESKEPIELKAESDAQQLTLIGTAYTVADELLPAAVSKFFDIQAEKKGAGGSSEGLGPGSIYAMEYKEWKRNLQHSLDKLRDHFCRQYVLGWIYLEGKSRLDAKMYLGRKDDDLLFDPDPLPSLPFQALFGRLQQLASVAGDVLLGKDKIQKVLLSRLTETVIMWLSNEQEFWDIFDDRSVQLQPSGLQQLILDMHFIVEIAVCGRFPYRPVQQLVSTIITRAVAAFSARGVDPQSVLPEDGWFVDTAKAAIHKLMLGVSGSESEPEPDAEEHIALHGEVSDSEESSGASTVGSEDSFASAKNDDLESPVYFTDPES

SEQ ID NO: 289476 - protein, 69 aa, Zea mays
  Clone ID: MRT4577_27091C.1.pep
QLAYPGTCLAQFDIHTTKIGLTTGRGTASKGAANKSLEQQRRLTLSFYKSGHNNRAGVLMRYLWRRNGN

SEQ ID NO: 289477 - protein, 413 aa, Zea mays
  Clone ID: MRT4577_27092C.1.pep
PQPKRPHPMAGAPAPKLPSFPGPVAQAGGGFVSALKPKAEAGNDEAAAAVDQLAEAARLAEAGDAFGAREILARLNYRLPAVPTAGTPLLRSAFYFKEALRVALSPTGEALAPPAVSTPYDVVLKLGAYKAFSEVSPVLQFAHLTCVQAVLDELGAAGRIHVLDLDIGMGEQWASLMQELAQRSPAATLKVTALVSPASHHPLELNLIHENLSGFARELGVFLQFAAYNVDALDPAELVAITSGDAVAVHLPVGSAHVAAMPAVLRLVKRLGAKVVVSVDRGCDRTELSFSTHLLQAFQSCVSLLDSIDAVGGADAEAVGRIERFMVQPDVERRVVSRHRAAVAVDKPPPLPWRTVLASAGFVPVQASTFAESQAEALLKRMALMGFRVEKRGGALCLYWQRGELVSVSAWRC

SEQ ID NO: 289478 - protein, 81 aa, Zea mays
  unsure (1)..(81): unsure at all Xaa locations
  Clone ID: MRT4577_27093C.1.pep
FPQCQVLQQQCCHRIRQVEPLHRCQATYGVVLQSFLQQQRQDELKAVMSAQVAQQLXGMCGMQLQQPGSXPSGSAAGGVYC

SEQ ID NO: 289479 - protein, 80 aa, Zea mays
  Clone ID: MRT4577_27094C.1.pep
HPIATAICPTKTNILSSPHQRLQPAGRPGDAPKSRFVLQKSGSIFMLQGSSLLKAFATCSSCVAIAPNNYASSYTVTLTN

SEQ ID NO: 289480 - protein, 59 aa, Zea mays
  Clone ID: MRT4577_27095C.1.pep
IFVLCFFEFVPHSQPLSPGLFGKSVSTFGNIVVVLLLLLVKTCRAFTDHFLSYFMEVGT

SEQ ID NO: 289481 - protein, 90 aa, Zea mays
  Clone ID: MRT4577_27096C.1.pep
IFFYPGPGSIKGGFFFFAGFPPLLAFFFWPFPRGFVSPSPPGSFFLPPLAQKKKKKKKKKKKKKKKKKKKKKKKKKKKKKKKKKKKKKNT

SEQ ID NO: 289482 - protein, 48 aa, Zea mays
  unsure (1)..(48): unsure at all Xaa locations
  Clone ID: MRT4577_27097C.1.pep
MSCNCASSCGCGSSCKRGKKDPDLEDTSTAAQATVXVLAVXPDKKAPP

SEQ ID NO: 289483 - protein, 125 aa, Zea mays
  Clone ID: MRT4577_27098C.1.pep
MVAMGVDEDEERRLDERPMHQGCMAGFLHLFDRPQILSGRRLHSSQRRLTSVSSGSATPSERSMPLDRAPSSPGTTPPAAPRPSLQLSPLDLKEGAGGGGFGPPQAWRLPRLSLDSRAVVDARGK

SEQ ID NO: 289484 - protein, 118 aa, Zea mays
  unsure (1)..(118): unsure at all Xaa locations
  Clone ID: MRT4577_27099C.1.pep
SPLSLRTGALADWLAPMGDKKLGEIKPKEEEPAGLEXSPDVKKPLVDKRVXSGKLAARYAGXKMGENMVDMSVETYHIYMLHVLKHVHHDIVICFHAMFIMNFFINDIFDKLGGEVAK

SEQ ID NO: 289485 - protein, 71 aa, Zea mays
  Clone ID: MRT4577_2709C.1.pep
ANLKFLIISGCRIYTFSRRVVFFYGIDQLHTKTCDSGNGNRNHWVSLQDAKRLTTLACMDKNHTVRIGFFT

SEQ ID NO: 289486 - protein, 110 aa, Zea mays
  Clone ID: MRT4577_270C.1.pep
NFLVDPPRGMIDEAPTLLAILAGNPEAKAVISQSDPIPPLVGVIKTGSPRNRENAAPILWSLCCTDIDQTRAAKAAGAEDALKELSDFGPERAKRKASSILELMRQAEKA

SEQ ID NO: 289487 - protein, 64 aa, Zea mays
  unsure (1)..(64): unsure at all Xaa locations
  Clone ID: MRT4577_27100C.1.pep
DFSPPNFLQLVKALCPXPKVPLGPVPPPKTFWEWAGLFKIFFXGKAKKVLGCSFFFVKGSGEKF

SEQ ID NO: 289488 - protein, 172 aa, Zea mays
  Clone ID: MRT4577_27101C.1.pep
MARDDDGAPAPGVPGQVYLPAWRRAYDRLVKMLRQAYAQAEELSVEREHLISELQFLQSASRERQEISQVRLQQICKDKELSKRVLEAETAARLGGKELQIHCHQKLAELAESDLENFKSCISNLAAENTELKEKLKMVESQVQISTDNSDHEKSGKYTKEELQKLKKAYRQ

SEQ ID NO: 289489 - protein, 73 aa, Zea mays
  Clone ID: MRT4577_27102C.1.pep
HNYYKIVGVFCQFPLKSFHPLGTKTLKPRGCPSFLIKKKPPIFLVGFSPPRLCYTPLKTDLIIFLFRKTAPFL

SEQ ID NO: 289490 - protein, 43 aa, Zea mays
  Clone ID: MRT4577_27103C.1.pep
RRFILEFEVVLVTNSQNFEGCIECIKFLKVSQADLVRKSGSSR

SEQ ID NO: 289491 - protein, 70 aa, Zea mays
  Clone ID: MRT4577_27104C.1.pep
CSQAVVALCVPLGLTMCVLRYCNDLLAPDHRDLLPRKLFPVTIRPLVSHLVGTRPANAAVTATTATRTRG

SEQ ID NO: 289492 - protein, 87 aa, Zea mays
  Clone ID: MRT4577_27105C.1.pep
YGFGEKFRLICGGLVPPRGPFGVLCGGHGGQGPPWCSFVYYLVPGSAAKQGGCPALSSDSCLLLHSWRDTLVQQLEAHGPALRDLVT

SEQ ID NO: 289493 - protein, 216 aa, Zea mays
  unsure (1)..(216): unsure at all Xaa locations
  Clone ID: MRT4577_27106C.1.pep
SSGRPGRYDAARAAAVAAAEAHSAAIVAKKEAIAAVKYAAIAREKFEGAVDSVKNSTFVYANATDKALDNVELKYHVSIKNSLXYVIQEMRRQSTLLHTINSICSSILEVXGGKIGKVVGHLDHVCKMLEKTSIVCEQDLENKCPSWDLFDPPSDVEDHPDVDEEGYSSEDPELWEMAFEDRKWDENKVAVSLAEHCRIMGYNYEEIYDRTSAATT

SEQ ID NO: 289494 - protein, 83 aa, Zea mays
  Clone ID: MRT4577_27107C.1.pep
MFAMHPASKPRGPSRPAWMAPNAKKKPAAKKPAEEEPAAEKAPAGKKPKAENRVPAVTTACQEGGEGKRVRTKGKKSAETYMI

SEQ ID NO: 289495 - protein, 55 aa, Zea mays
  Clone ID: MRT4577_27108C.1.pep
WAINWVTLMQWVVRCFAREHLLLSRWLGCLLFNSYLRDLSMSSGKAMALCFFLVH

SEQ ID NO: 289496 - protein, 119 aa, Zea mays
  Clone ID: MRT4577_27109C.1.pep
QGQPERRPPSQRRRCARARSPAPCLRAFAARETSTPPDPGAFIMGTAGAAAAHKNVGALGAVSDGARGSSGGVPGGHVFRLFLEAADLVPRDSRPSSSVVPVAILVLGLRFGVSPRPAR

SEQ ID NO: 289497 - protein, 101 aa, Zea mays
  Clone ID: MRT4577_2710C.1.pep
KKVLCGFTGAVSGKKKKKKKKKKKKKKKKKKKKKKKKKKKKKKKKKKKKKKKKKKGGPLLRDQIFLPGACKEKVFFWGPQNKINGPVFKTVGIGKTWGFPN

SEQ ID NO: 289498 - protein, 124 aa, Zea mays
  Clone ID: MRT4577_27110C.1.pep
GILNYNVGLIYRLNKLVTKENITICLSFNCARHRKNDFYSQPSITISLLFFPPPPHTSYGRETQHYIISLSSTNPNRRNPFTMVLRLPQTLWGPGLIFTSLRPKKKGKLFFSYKYNLCDSPTTQ

SEQ ID NO: 289499 - protein, 284 aa, Zea mays
  Clone ID: MRT4577_27111C.1.pep
GYLEAGRGPFEMYKGKKILVGRDKLDVVRGVVQKLQAFHKFLAEYPEWRNKVVLIQVTAPALNDSPKLERQVSELVSHINGEFGSLSFTPVHHYHQIIDRDEYFALLSVADLALITSVRDGMNTTSMEYIICQNKFNKSPLILSEFTGTAGRMRSAIQVNPWNIFGVAKAIDYALRLTDEEKRARHDQLYHQVVMHTSHTWAAGLVKQLLTRLHGEHSAHLTPPLDRKEMVEKYRNAKKRLLLLDYDGTLTPIVKVPEMALPSTRLLKALEILSQDEKDVIYII

SEQ ID NO: 289500 - protein, 220 aa, Zea mays
  Clone ID: MRT4577_27112C.1.pep
MIQLLFVVLVAEASLTAALLFKTPLRKLAVLVIDRLKRGRHAPVVVKTVAGVILALLASTLYSMTQIAGSTSDSDSGGGPTPTDQVLFSRHLLEACLMGYSLFLALVIDRLHQYIRDLRRFKKDLEAVRKHNKMLEETKHGNSEEAKKYQEEIATLNKEMKKLKLQVQEKTEEVHVSEDKALAIQKQSEGLLTEYDRLLEDNQHLRTQLLSIDRRLSNSS

SEQ ID NO: 289501 - protein, 133 aa, Zea mays
  unsure (1)..(133): unsure at all Xaa locations
  Clone ID: MRT4577_27113C.1.pep
RRSPPPALGPRPHSRAPPTSSAPAPPPPPPPPTPLPAPXPSANPKPAPKRPSPPPPPXQPPISPRTRPSSPPPPPPPAAPSRMAPRPPPLSRAPAAKTRSLPSLPSPSTSTAASRPRWAPARAPTCTSLTTHP

SEQ ID NO: 289502 - protein, 100 aa, Zea mays
  Clone ID: MRT4577_27114C.1.pep
RIAALYGISFGAVLFSLTADVEERCSPLAAFSLPFARASDGAEPASLLTTAAAHQRVLCSRAPSNACRASPSLVKMDLSTRFRRTEQCVMFIAEMCVFGM

SEQ ID NO: 289503 - protein, 105 aa, Zea mays
  unsure (1)..(105): unsure at all Xaa locations
  Clone ID: MRT4577_27115C.1.pep
TQLGGKTPRPRGGNPRPGFCRRGAGGRGPQKQPGGAPLFEGPVGKGAAPPXPSCSLKSPRGGXPPFGGXPLQKPSXPGTEPTPRSGGEASPPXGDPGAGGSGPPP

SEQ ID NO: 289504 - protein, 120 aa, Zea mays
  unsure (1)..(120): unsure at all Xaa locations
  Clone ID: MRT4577_27116C.1.pep
LVRSFGSSGFPLFAPWSRVLPGIVGVFPFPPVPPFGPDXPGLPGLALGAVGAPAGPAPPFPGSPRRPPPPAGPPPPPPPPPPAPPLSPPSRPVXSPLGPFVPPPXPSVFCRSGGTRFLQF

SEQ ID NO: 289505 - protein, 135 aa, Zea mays
  Clone ID: MRT4577_27117C.1.pep
MASWCQGKILPIAYSSTGADYEASSTFRPRISSPGKAAQDYRQDQSTVYKYEIQVALRLSSPVAASAPLPSPVCDGYRPPLPATATPVASTGATGLAARGRARYIKGYPRAPLTSSSMCTRYVLFMIIVGYRGRI

SEQ ID NO: 289506 - protein, 89 aa, Zea mays
  Clone ID: MRT4577_27118C.1.pep
YIIQPNLVLEFHSPTWYRRYVSRFSSSGRHPVLPHHYHRQEAPRRRVATLFSADDVLSSKAHYDAPEHPLSAPAPSTPLLRFTVIHVPP

SEQ ID NO: 289507 - protein, 150 aa, Zea mays
  unsure (1)..(150): unsure at all Xaa locations
  Clone ID: MRT4577_27119C.1.pep
PPQGKTKKRVXMVRALKKRFXGVAPYEKRNPKLLKVGKDKRALNLFKKKLGPPKRAKKKKKELAGVPKKIRSVGPPPHKKKKKAFQVHGAPQNLCSSVFFSIHVDPNKHVKVLCFDPAHGILPPPKPPGFMFRTSLWDLAPFPGEKKKNE

SEQ ID NO: 289508 - protein, 125 aa, Zea mays
  Clone ID: MRT4577_2711C.1.pep
KGPPRGRRGNKNPGNPFYRPQTQKQRGKGLRPPKDFSGKPPRGTGDLTGPKKEAPHNEVFYQKAIPGSRDQKSWEILGKPPPKSWGNLQNPNLGPPTKKVFGGGATREIGFLGWGLKREEKGLSL

SEQ ID NO: 289509 - protein, 56 aa, Zea mays
  Clone ID: MRT4577_27120C.1.pep
HNVVPVEDAPKYMTGGFVLEMPPASSASNKIFITFNCIHIFTHTSVQKYFSQYGTV

SEQ ID NO: 289510 - protein, 175 aa, Zea mays
  unsure (1)..(175): unsure at all Xaa locations
  Clone ID: MRT4577_27121C.1.pep
AALYHLPSEYLMGLDLRXNLPLXLTIYISYLIFLMVYHIIFLGLWYLGFVYRMAXKNQRCFTIIQNCAVISIACCVFYSHCGNRTVSRDKSIDRRTASWIVFSLWTKHDDNTLISRLLRMHKFKEQICSSWFAPDGSTSDYPLLSKWAIYGKLSSNGSSSSKEISPVYSLWPTFM

SEQ ID NO: 289511 - protein, 162 aa, Zea mays
  unsure (1)..(162): unsure at all Xaa locations
  Clone ID: MRT4577_27122C.1.pep
AASLIIYNEWFSYVLAASLXLAAGVMVWARQRKIGELCSEVIIDASSSSSSDKTTMDSIVEAQRSLQKVHRYIVTANVAILRLWSIALARSPKHTETVIWMLAVSAAVVAVVPFRYILIGLVAGSFASNTRVARAVMNPQGGRRWREWWESIPAVPVRTVHS

SEQ ID NO: 289512 - protein, 95 aa, Zea mays
  Clone ID: MRT4577_27123C.1.pep
TGWVRETRVPKSPQNQTGSSGSRDTGYSCIIIHYTHTHTGGGRGGNHNRLDCLKKPLPLPDRAAHPRAPGPAPEAKTNKLGGGGGGSSASSLGSP

SEQ ID NO: 289513 - protein, 48 aa, Zea mays
  Clone ID: MRT4577_27124C.1.pep
AQIFVGGLDPNVTEGMLKQVFTPYGDVVHVKIPVGKRCGFVQYANRLV

SEQ ID NO: 289514 - protein, 115 aa, Zea mays
  Clone ID: MRT4577_27125C.1.pep
QGLPPRIKSALPNELRTTSAPQLTVDQIRARMEKTLKWLAPMAINTTCARGFFLRFSEWAKSGTESVGRRLGQADRVETLYHADKARTEDRILELVVWLHHLVSQSSRPALQKGH

SEQ ID NO: 289515 - protein, 126 aa, Zea mays
  Clone ID: MRT4577_27126C.1.pep
MAEDNSAAWPQADQALSQEILDLVQQATHYRQLKKGANEATKTLNRGISELIILAADTSPLAILLHLPLLCEDKNVPYVYVPSKMALGRACGVARPVIAASITTNEASDLMGQIRTLKDKVERLQI

SEQ ID NO: 289516 - protein, 86 aa, Zea mays
  unsure (1)..(86): unsure at all Xaa locations
  Clone ID: MRT4577_27127C.1.pep
TLGSLQTSYPSGNFSHPSSFKLPRSKGSIGHASRSRFALARAPREVVFCNLSPRGLPSSYLRGPLPEKPQQPPPPPPXPPPPXPPP

SEQ ID NO: 289517 - protein, 228 aa, Zea mays
  unsure (1)..(228): unsure at all Xaa locations
  Clone ID: MRT4577_27128C.1.pep
HGLDLHFAVKARRFTHRSSSAMAFELASSRPSAVPGSALLAASSGARSLARVAPAPARAHLPARPASRARAASSSLTPARPCARLSDAQRRPPLFPSNTLQLLPLLARPTAPSSMARISRPSSSLPSSSPGLWPSSLRTXLPQLAEFPRGVHLPARPLWRCGAPAWPLPIPQPRPAPVAHPSDATRSHLLGPGGAHCLLCPWCALTSTSLLXGVFPAVDLLVCRVRLL

SEQ ID NO: 289518 - protein, 131 aa, Zea mays
  unsure (1)..(131): unsure at all Xaa locations
  Clone ID: MRT4577_27129C.1.pep
PFIILKPQTSLCAVLKIIAPKPXINPHDLTPLKPPNVYGSIESTSVQLCYPTHPDMIVLSNYILIMIGXQTAAVICLSRSTKSTIIPLIXRFYHPTSXQFILIVPNLQSFNFTSLQTHIRLITHNPIIFST

SEQ ID NO: 289519 - protein, 256 aa, Zea mays
  Clone ID: MRT4577_2712C.1.pep
MATASGRLIAQAPAVPAILLLVGTSGKAVASIKCARELFAGKQWGFDDSDDPESPPSNTDRGGNCSVGEPMETSTGGDGDHNGSGVPWKTTRGSQSQTRLPSWAVVHHGGYWANILALALAPVEGHLPAAYREITRLVSLHAEAGHVFVNCAEGLGLKPHPAAPWERWMDLREAAVCHAHDALLALSSAAAAATAAEDFLRWQFPESPRGKGWWSAARQLVEDAWRSLGEAKNAARLMDNAVLCEFFTTWMILTRA

SEQ ID NO: 289520 - protein, 71 aa, Zea mays
  Clone ID: MRT4577_27130C.1.pep
PLLRVTTPVGAFLALGKVGRCQDFARFFGGGRAPTRSALFVGVAPNQRVGSGPQEPLGAKFQWPRGDPMCF

SEQ ID NO: 289521 - protein, 53 aa, Zea mays
  unsure (1)..(53): unsure at all Xaa locations
  Clone ID: MRT4577_27131C.1.pep
HIDALVSLIVITAXGQGVEVESPAVASSPTPDDAESHALCAEEDYIYSVDLLL

SEQ ID NO: 289522 - protein, 55 aa, Zea mays
  Clone ID: MRT4577_27132C.1.pep
HSSPNLVLLTVTYTGHARRMTRTPMDLVYALQGPPPTLYWLMRSATTVRISTDWS

SEQ ID NO: 289523 - protein, 54 aa, Zea mays
  Clone ID: MRT4577_27133C.1.pep
PQKSNPSYRLVCINWDNQHPSVLCNTVSPIPPPKERPTLFCAKKNILALCFPQA

SEQ ID NO: 289524 - protein, 162 aa, Zea mays
  unsure (1)..(162): unsure at all Xaa locations
  Clone ID: MRT4577_27134C.1.pep
XARDATPHRHSVIDYWRALQSALCLAPSFSAFIDRCNAPQRHSHHTHVQMHCTNGRRRGPGPDCRSRRGGCCCCCSGSGGCPCGRSLETPNDETAAPAEHNDVVHAKEPVTIEADTESKEVEVEDDDADEAEPTEGEPKELQPEDAAPLAQTEAAADPARGC

SEQ ID NO: 289525 - protein, 129 aa, Zea mays
  Clone ID: MRT4577_27135C.1.pep
PRADGVQPLQQWPPGWPPFRPCYHFLRGTVVPLKGSSYVLAWSDACSSTISVFFLGVAYGYAPSVTVKKKAWFPTVQFRRMAFSGCPRSFVVPPRFFCCVWTMTVLLLQGSYSFSPRAPIWFAGGPVRL

SEQ ID NO: 289526 - protein, 163 aa, Zea mays
  unsure (1)..(163): unsure at all Xaa locations
  Clone ID: MRT4577_27136C.1.pep
MAKTGDPTNGIENHRKHYIRAMWQTVMRLXDTKYTXFKPMGRGVYGTVXHTIXAETNENRALGGIPQRYQXREDALRTLTELRLLRHLRYVNAIALKDITKPEHKDRLRDVCLDYEHTDTDPYQIIKCALLLXNDHXTGYLFXQLFLGQAYLYLXNXLHRDLK

SEQ ID NO: 289527 - protein, 144 aa, Zea mays
  Clone ID: MRT4577_27137C.1.pep
WGKTSQLLTVVSSGFWPRFMFPCVSSPTVPVLLRPFSPLFPRLASWGPWGPLFIGKAVRGGRLPSFPRVFGVFRGLKREVCGSVLSFSGGGGGSGVSRLCRSCGGGFLGFCSPVFLSSALRGSYRVVGSAVPVLVALCGFPLTL

SEQ ID NO: 289528 - protein, 97 aa, Zea mays
  Clone ID: MRT4577_27138C.1.pep
EETRGTPNVNASKSSVEESFSLTEPFKHVAGHHCLWCSGNSIGVLLMVWSSAGRRDNATADPLPCSGSYTVAVLCWATKGLRLPSRTGLGFAGRAKE

SEQ ID NO: 289529 - protein, 59 aa, Zea mays
  unsure (1)..(59): unsure at all Xaa locations
  Clone ID: MRT4577_27139C.1.pep
VGQAELRVNGAEVGDHVVGAGGGVHLGLLAGGRREHDGVGXVXGPDGEGLKRSDAGSTR

SEQ ID NO: 289530 - protein, 114 aa, Zea mays
  Clone ID: MRT4577_2713C.1.pep
PQVLDLSSNHLTGAIPTALNNLHFLFKFNVSDNDLEGPIPTTGQLSTFPSSSFEGNPKLCGPMLARHCGSAEALVSTKQTEDKVLKVIFAIAFAAFFGVGVLYDQTVLSKFFWL

SEQ ID NO: 289531 - protein, 93 aa, Zea mays
  Clone ID: MRT4577_27140C.1.pep
SNRLTIAFDNRYLPTSFSSIYAQSPYMYTSSIAHTHNLYSHYDTIINCKQDTASHDYLPIDAPHDFTSFEASFIYTPNFEPLQILLSQIISIS

SEQ ID NO: 289532 - protein, 49 aa, Zea mays
  Clone ID: MRT4577_27141C.1.pep
RGDNYICYSIHFYCRRASGTTCYRLQNRNTVRRYMESISILHPININLR

SEQ ID NO: 289533 - protein, 41 aa, Zea mays
  Clone ID: MRT4577_27142C.1.pep
APGVEVLGAFGIADERDGIRLEGAHLRLEAPEPEVALVVGA

SEQ ID NO: 289534 - protein, 99 aa, Zea mays
  Clone ID: MRT4577_27143C.1.pep
VVKIINKLMWLASVCTTVAFISSSYIVVGRHFRWAALLVTLIGGVIMAGVLGTMTYYVVKSKRTRKIRKKVKSTRRSGSSSWQHNSEFSDSEIDRIYAI

SEQ ID NO: 289535 - protein, 506 aa, Zea mays
  Clone ID: MRT4577_27144C.1.pep
RGDPRAVRQIIAEIDAQMTGTGEEFDSDVAEIRAAIVNEANEMEATALLIAAEKGFLDIVVELLKHSDKDSLTRKNKSGFDALHVAAKEGHRDIVKVLLDHDPSLGKTFGQSNVTPLITAAIRGHIEVVNLLLERVSGLVELSKANGKNALHFAARQGHVEIVEALLHADTQLARRTDKKGQTALHMAVKGTNPEVVQALVNADPAIVMLPDRNGNLALHVATRKKRSEIVNVLLLLPDMNVNALTRDRKTAFDIAEGLPLSEESQEIKECLSRAGAVRANELNQPRDELRKTVTEIKKDVHTQLEQARKTNKNVYGIAKELRKLHREGINNATNSVTVVAVLFATVAFAAIFTVPGGNANDGVAVAVHATAFKVFFIFNAVALFTSLAVVVVQITLVRGETKAERRVVEIINKLMWLASVCTTVAFISSSYIVVGRHFRWAALLVTLIGGVIMAGVLGTMTYYVVKSKRTRKIRKKVKSTRRSGSSSWQHNSEFSDSEIDRIYAI

SEQ ID NO: 289536 - protein, 62 aa, Zea mays
  Clone ID: MRT4577_27145C.1.pep
MDEPPPQSDDDRKLSAMEHVKKRHEEKGFLYACAFMFCCCFCCYEACEHCLECFCCCGKKDE

SEQ ID NO: 289537 - protein, 235 aa, Zea mays
  Clone ID: MRT4577_27146C.1.pep
MAEMKSPTKAEPATPAEAAQSDRHSLLEHSREFLDFFWDIAKPDQETRLRATEKLLEYLRTRPNDSEMKYALKRLITGLGVGREAARPCYSLALAQLLQSFEDIPLCDILDQIQEKYSLQAMNKAMMRPSLFANLFGVLALFQSGRLVKDKEALMKSVQLLKILSQHPNHLQGQPIKALVDILSEVPESMFQEILPKVLKGNMKVILRSPKYLELFLLAKQRVPTKLESLMGSVD

SEQ ID NO: 289538 - protein, 96 aa, Zea mays
  Clone ID: MRT4577_27147C.1.pep
LVLHGVLGSLVRLSWSSLELILHITISSGFSLIARVIRTSSEVLHGFITGYIHISWLLGGRLAGESTRSPAPPPPPKLGRVFRRGSTGFVRTPRSR

SEQ ID NO: 289539 - protein, 62 aa, Zea mays; identical to SEQ ID NO: 289536
  Clone ID: MRT4577_27148C.1.pep

SEQ ID NO: 289540 - protein, 55 aa, Zea mays
  Clone ID: MRT4577_27149C.1.pep
SFKNTSLRKLFHGVAVRSANMCFYNYSKCSPGPGFLRMAGFRVFSPQKMNNVHQM

SEQ ID NO: 289541 - protein, 42 aa, Zea mays
  Clone ID: MRT4577_2714C.1.pep
CNPFFFVVAVVIIFPRSRACQPTFYSYGSIALVKKLGHSRRI

SEQ ID NO: 289542 - protein, 60 aa, Zea mays
  unsure (1)..(60): unsure at all Xaa locations
  Clone ID: MRT4577_27150C.1.pep
YGTVYPELCLATLGEISDIHKKPLPDVICASGNRTXDVLVATSSGCSHYLQERALEARNR

SEQ ID NO: 289543 - protein, 77 aa, Zea mays
  Clone ID: MRT4577_27151C.1.pep
ITSHLFSFFFSNLCITSFITIQHCTVLYPRHPCFLFAVCDMTKGVVYLGGAAGSRARGGRAVLVVNRPCSLESRPRR

SEQ ID NO: 289544 - protein, 127 aa, Zea mays
  Clone ID: MRT4577_27152C.1.pep
MANHGAAALLLIASVLAAAALSGADARLTVRPNMAAALRAANGRFAVRPGTKVTLRRDAHGGYVVDVAAVPDLTCNTVRGVQADETCFSVAQGAGLTQDQFLAFNPNINCAKIFVGQWVCLDATTSA

SEQ ID NO: 289545 - protein, 64 aa, Zea mays
  Clone ID: MRT4577_27153C.1.pep
MSEYKNVVGGRLKLKGKALDVKEGGVKKKKKKHQLEESSQIEHDELHKAAVYCLQNEQEHCLVL

SEQ ID NO: 289546 - protein, 152 aa, Zea mays
  Clone ID: MRT4577_27154C.1.pep
MKLEICSFSGHKIYPAKGKTYVRVDSRTFRFINGKAASYFLQRLNPRKIRWTVIYRRLNKKGMTEEVQKKRSRRTVKHERAVVGASWDAIRAKRNQKPDARAAARQAAISKSKDAKKAAAAAKKAANPAGSQARVSKQQAKGFAPKAAATSR

SEQ ID NO: 289547 - protein, 47 aa, Zea mays
  Clone ID: MRT4577_27155C.1.pep
MGRLFLMHLDGNVYSCKHCKTHLGVASDIISKAFQCKHGKAYLFHKV

SEQ ID NO: 289548 - protein, 89 aa, Zea mays
  Clone ID: MRT4577_27156C.1.pep
RSRGLPPGVPGRKETPSQDQVAWPGPGPRGTPPGQQPEEAQGPACPWPPGKSAFGDGGKPFRRLRPACLGCVRASEPCCARESSRRTDR

SEQ ID NO: 289549 - protein, 415 aa, Zea mays
  Clone ID: MRT4577_27157C.1.pep
MAASNGEGHGRFDVIVVGAGIMGSCAAYAASSRGARVLLLERFDLLHHRGSSHGESRTIRATYPQAHYPPMVRLSRRLWDEAQADAGYTVLTPTPHLDLGPRDDSALVASMRNGGATEVVAGDESSSWPWAGVFRVPDGWTAARSELGGVMKATKAVAMFQALAVKRGAVLRDRTEVVDITSSKRGEGEGSIISVRTSSGEEFHGTKCIVTVGAWTSKLIKSVTGLELPVQPVHTLICYWKVRPGREQELTPEAGFPTFASYGDPYIYSTPSMEFPGLIKIAMHGGPPCDPDGRDWSTGAGDLVEPVARWIDAVMPGHVDTAGGPVVRQCCMYSVTPDDDYVVDFLGGEFGKDVVIGAGFSGHGFKMGPAVGRILAEMALDGEASTAAEAGVDLRPLTIGRFAGNPKGNLSASQG

SEQ ID NO: 289550 - protein, 79 aa, Zea mays
  Clone ID: MRT4577_27158C.1.pep
WRHPRGNADARSSGLVGDGRRSAFQWGISSVRAMVLAFSTMPRCWARNKRGGEESRFAPACSSLAWLSRDTRKRRGWRG

SEQ ID NO: 289551 - protein, 79 aa, Zea mays
  Clone ID: MRT4577_27159C.1.pep
EIKKAIKAAFEGPLKGIMGYVEEDLVSPDFPGDSRSSIFDAKAGIALNDPFIKLVFWCANEWGSSNRVVDLIPPMFKTQ

SEQ ID NO: 289552 - protein, 59 aa, Zea mays
  Clone ID: MRT4577_2715C.1.pep
NSSCRVWLFNGRLHHERTEMEGPSVYLDLALTFLVLRLRRRTRFFLHLALIFADVSRTC

SEQ ID NO: 289553 - protein, 192 aa, Zea mays
  unsure (1)..(192): unsure at all Xaa locations
  Clone ID: MRT4577_27160C.1.pep
RLERQQQPPLPPPPPLAAPRDKHQEFMSHKXPTFSSSPDRLHADDWLKLVENMLNIAQCNDQEKVLYALGRLTGPAADWWDSYIAAHANANTVTWAEFSTQFRNYHIPVGLMKIKKKEFLSLKQGNMLVSEYRDKFIQLSSYALGEVADDERKQEHFMDGLIGPLQYQLVSHTSPSFQRLLDKAIAVEHKRA

SEQ ID NO: 289554 - protein, 75 aa, Zea mays
  unsure (1)..(75): unsure at all Xaa locations
  Clone ID: MRT4577_27162C.1.pep
PLGILHRAXAAXLTRXHSLRERLXATFSSHPXELIALFXRYVHQGKGMLQRHQLLAEFDALFDMXQEKYAPFEDI

SEQ ID NO: 289555 - protein, 68 aa, Zea mays
  Clone ID: MRT4577_27163C.1.pep
ERPPPVEASGDDGISITIIGDAAAGLFVAVITAPVGRRLLGRAGCSPRVQGRRRGSGSGSGHSHWSRP

SEQ ID NO: 289556 - protein, 47 aa, Zea mays
  Clone ID: MRT4577_27164C.1.pep
HDSTQISIICVAMHEGLPQTINNSLDDLSIKGYHQLLDNDYMQPNEH

SEQ ID NO: 289557 - protein, 44 aa, Zea mays
  Clone ID: MRT4577_27165C.1.pep
AVRLVSRYASSDGLEDERLTVRGAMRTSYALSIAVTINYIFTRP

SEQ ID NO: 289558 - protein, 119 aa, Zea mays
  Clone ID: MRT4577_27166C.1.pep
MLKSGIQQALRASMRRPAIRRSAFQPMKKSFAPALSTRFASTDAVKEGKIHSVVGAVVDVKFDTEQLPAILNAITTQNGDQKLVLEVAQHLGENIVRCIAMDVTEGLVRGAQGDDPANP

SEQ ID NO: 289559 - protein, 54 aa, Zea mays
  Clone ID: MRT4577_27167C.1.pep
YNIVVPRFASWISLSGYEYISCLSYDTASVGSSITSPTVLAAPIQPCLNSSGSS

SEQ ID NO: 289560 - protein, 56 aa, Zea mays
  Clone ID: MRT4577_27168C.1.pep
VKTHTLYVLFSGHQVVVEVITDNDEPSQWFGTPHLKNNIGGWMVFHSLKVKLNCPI

SEQ ID NO: 289561 - protein, 184 aa, Zea mays
  Clone ID: MRT4577_27169C.1.pep
IRLEAVAALPTRAFAARPRGSAASDAESQCVICLEEYEERDVLRVLPHCGHDFHMACIHVWLEQNSTCPVCRISLLDNPNSEHNAPPPPPPPLPGVAVTMSSPGSPEPPGSDPCRCLFAGAGHSSRASSEAPPRHEPDQENQVASGPSVDGGANSNGMPLSEVNPTPPESNSQTVRKQQPGPCK

SEQ ID NO: 289562 - protein, 134 aa, Zea mays
  Clone ID: MRT4577_2716C.1.pep
MTPLLLLRLLCLVPLVTAACAEAKLPADFTTLLAAKFSLADPGSALDAWDSRLSPSPCRWPHILCSNRSVSDAPAVASLLLSNLSLAGAFPSSLCSLRSLVHLDLCFNCLTGPLLPCLAALAALTHLGLGGGEL

SEQ ID NO: 289563 - protein, 397 aa, Zea mays
  Clone ID: MRT4577_27170C.1.pep
MQPDCRSPPVVTQNDDRQPCGGEERAGSWPPPALSFKDVHHPCWGGGQAELGPCLSHGLATRFFLQHSGEKGVHQPYGGGKLPPAAWSGCGCPSTARATVAPRAGRSHPRPFLRRRSHRGVVQHVVRRRGGVRVPGLSCPHSHSEDGSEDLLVRAGAAAIRWCGVGAQVAAVVGAEVVSAIAARGGGRCRCWCSGCRRAARSLLPRSPSGVEDSVIDTVKRHAQAMALQQRARAEGFETALNKSVKNCKALAQAAEQKEADRMAMSEAISAFCRTFGLDDIPSGSSPQSHLRALGGHVRNRLRGALYHGVRRAFVVLASHYDVDLERVSEGYCLPDEEEVTLAGVQRLDAVAEGPSAALASSFEVEILPPVSPSDAGPDSAEGGNDAKGVAPPPADT

SEQ ID NO: 289564 - protein, 209 aa, Zea mays
  unsure (1)..(209): unsure at all Xaa locations
  Clone ID: MRT4577_27171C.1.pep
MLRHWSSTPASYILAEQRGAESRGRERQLRRLAMGEQGRPSSNRIRDIVRLRQLLKKWKQIALSPKAGKSGGGGGSHGVPKGFFTVCVGKEMERFEIPTELLGHWAFEELLKEAEEEFGFQHEGALRIPCDVKAFGGILRLVXQEGRGGCGSLLFFAAWDDDLVQMMSFLSFPTSPFFYPPHSLFLVFRGEERRKSPQIGRICEIRTRG

SEQ ID NO: 289565 - protein, 82 aa, Zea mays
  unsure (1)..(82): unsure at all Xaa locations
  Clone ID: MRT4577_27172C.1.pep
IMSQLIHYVLGSPHMQMAVWGDICSSTSPKEPLPKSWCSLRMHQXLSCALVVDLSYGTLDLSYAQHVPACILGITFSSKLQI

SEQ ID NO: 289566 - protein, 112 aa, Zea mays
  Clone ID: MRT4577_27173C.1.pep
MAFFKYMFFCMRHFCVLNNHCIFISVLFIRGAGGKKPQVAPTKKRKKSPASFAKKKRRASTKTEGPAHQKSRGTYHAPPGPEKTPSGGKKKKNRQAGPKKRTGVKTTKKTPP

SEQ ID NO: 289567 - protein, 99 aa, Zea mays
  Clone ID: MRT4577_27174C.1.pep
AKQVFFFFGGIPNLSEEIRREHMGAGKTSLNNIKNGKGPSFPFGPPAQKKKMGAKMAQITGRRTADNPFSGGNQGHTSQAQAKTNFWAGLRPPGGFLFS

SEQ ID NO: 289568 - protein, 57 aa, Zea mays
  Clone ID: MRT4577_27175C.1.pep
TEPKTIVLYYMLPCPFLVVVAVALSLGLSRPVYSRCSSQIISKEGLLYRASIGVQSF

SEQ ID NO: 289569 - protein, 72 aa, Zea mays
  unsure (1)..(72): unsure at all Xaa locations
  Clone ID: MRT4577_27176C.1.pep
YQLQLHICYSFVVSDIRTRRARRLEARSCRRRASCRHLVALYCTTTTRLPLGGREGNRATSLHFCLWXAAVP

SEQ ID NO: 289570 - protein, 87 aa, Zea mays
  Clone ID: MRT4577_27177C.1.pep
SVILVLLSTCSPYVSRVSVHAAGVLGLLRVLMVILVNGGPITSIVAEVAKVLPKRRAGPIIVHMSACTQVAFHEVLSAAPCDVLRAF

SEQ ID NO: 289571 - protein, 114 aa, Zea mays
  Clone ID: MRT4577_27178C.1.pep
ICKRRSTTIIVYLSCQTRPDQTRVPLRPARSGIGQCLRIPLRQIFFLQNIHSLCAVFVLEATRNTTLFFAFRKPHICTGTCIHGHPRHRHPVAAAKRRHTTAPACDSVRTVSFD

SEQ ID NO: 289572 - protein, 98 aa, Zea mays
  Clone ID: MRT4577_27179C.1.pep
IEVSHLYFTLLSMNRGIPPLLRMCPSTGTMSPRVCSALYTKLITMNCMKIYCYNFLPSPKHLGSTEPLTMVQGKRISPTGCIPKTKKKLCTDGQAPSR

SEQ ID NO: 289573 - protein, 237 aa, Zea mays
  unsure (1)..(237): unsure at all Xaa locations
  Clone ID: MRT4577_2717C.1.pep
MIANNLILLSALAASAVAAPSGVVKRQSNEDNLWQVPVRRDPKDPSQDRWTQINSVITPIDKAADDNRKFSYYPFLYNMGGTLFLLFSGAPKDVDGMGQDVRISYSTNGKWSKPEVAFPPALLPNQTTIETSEYYCKRGIPQRALQALSIVYIGGGESDATYYAVAQSSDNVCPGHFEPAGRLARKLNRDPLSGSTFAGEPCWLDFTEYTGDHAWTETVYGEKXQMKVCEDKDKIIA

SEQ ID NO: 289574 - protein, 61 aa, Zea mays
  Clone ID: MRT4577_27180C.1.pep
TKRISMGSQATHPGLPCIALSAVRRLSFLIVLNLCGYISSELNRWKLHKIPPIQEYEWIAT

SEQ ID NO: 289575 - protein, 62 aa, Zea mays
  Clone ID: MRT4577_27181C.1.pep
GFKVYTETFPLCAKAVACLNLDCPTISKKTFFMTDKSIYKAGDYCVETYTLTQNRRLEEFSL

SEQ ID NO: 289576 - protein, 74 aa, Zea mays
  Clone ID: MRT4577_27182C.1.pep
MAASKRLLLAALCVVAVALLAEQSESHGLKEYVGSDSTPEMQTFFKPRGRGAPERPWTRPTCPPPPWPQSRRPL

SEQ ID NO: 289577 - protein, 250 aa, Zea mays
  unsure (1)..(250): unsure at all Xaa locations
  Clone ID: MRT4577_27183C.1.pep
MEFPSSSSLLLILLPPVLYISYXREEPXKKKPTTHGLRRHPLLGHLPAFLKNRDRFLEWSTELIVASPDLRMGFWIPGMTTGIVTGNPADVEHILRTNFANYPKGERAISMLVDFLGHGLFNSDGEQWLWQRKNASLEFTTRSLRGFLVDSVQAEVGNRLLPLLRRAADGAGAGGVVLDMQDVLERFAFDTICMVSFGHDPCCLADGGALTEGASDFMRAFGEAQDLIVSRFLDPVAASWKXQRWLNVGK

SEQ ID NO: 289578 - protein, 636 aa, Zea mays
  Clone ID: MRT4577_27184C.1.pep
MATTAHPALLLLIVLACAGAASGFYLPGVAPADFRKNDLLAVKVNQLSSIKTQLPYSYYSLPFCRPDTIVNSAENLGQVLRGDRIENSPYVFEMMEPKLCQIACKVVLTEQGAKDIMEKIHDEYRVNMILDNLPMVVPIERLDRDAPPFYQQGVHVGVKGHYAGSNEFKYFIHNHYSFLVKYNKDAQTDLARIVAFEVKPFSLKHEFDGDWKGNATRLKTCNTQSEHLIVNSDGPEEVKANKEIIFTYDVNFEESSIQWSSRWDTYLRTPDDHWFSIVNSLTTVLFLSVMVAMIMLRTLYRDISKYNQLEDQEEAQEESGWKLLHGDVFRPPANADLLCVYVGTGVQFFGMLLVTLLIAILGLLSPSNRGGFMTAMILLWVFMGLLAGYSTARLHKMFGGLEWEKVAIKTVLVFPGVVFVIFFALNMLLWGVKSSGAVPFTTMLALVFLWLGISMPLIFVGSYLGFRKPAIQGPVRTNKIPRLIPQQPWYMNPAVSVLVGGILPFGAVFMELFFILTTIWMHQFYYIFGFLFLVFVILIVTCAEITIVLCYFQLCSEDYQWWWRSYLTPGSSALYLFLYAAFYFFTKLQITKAVSGVLYFGYMLIAAYAFFVLTGTIGFYACFWFTRLIYSSVKID

SEQ ID NO: 289579 - protein, 43 aa, Zea mays
  Clone ID: MRT4577_27185C.1.pep
IYLITLKKNTEGGVALNIWPVNHQKEKLLAFIGALYQKDELTH

SEQ ID NO: 289580 - protein, 87 aa, Zea mays
  Clone ID: MRT4577_27186C.1.pep
YYTEGFLVDILNSHKLLCSSPAPTHGELRPSSACSAASCSCSFQPSNSCIFSAILMQQQAAAGTVVLTSRPPPPLEVDDRTRPKTRV

SEQ ID NO: 289581 - protein, 99 aa, Zea mays
  unsure (1)..(99): unsure at all Xaa locations
  Clone ID: MRT4577_27187C.1.pep
FXTRALPCRAALHCTSVYRTLHPQIGACGLHLHHLTKSSIRLRWRFPKRGTGRPIAFACGAISYIILMSSLLCSALECTARQYPLPQQDTNCDLLRDHL

SEQ ID NO: 289582 - protein, 192 aa, Zea mays
  unsure (1)..(192): unsure at all Xaa locations
  Clone ID: MRT4577_27188C.1.pep
GLRGVTRALLRLQALRGVFVAGLVLQARRDGNRAGVGGGGGGRRNSKAGGTIDELLSLQETDPGYYTDTVIKGIVSVSSLSCESTTLVXISTMMRLLLQILLSAGTDTTALTMEWAMAQLLTHRDAMQKARAEIDANVGTSRLVDESDTTHLPYLQCVVKETLRLCPVGPVIPAHEAMEDCAVGGFLVRRGT

SEQ ID NO: 289583 - protein, 112 aa, Zea mays
  unsure (1)..(112): unsure at all Xaa locations
  Clone ID: MRT4577_27189C.1.pep
DFGLARQADHGXSPDATAGGGTMGYLAPDYLLTGRATXITYVFSFLVLALEVACGRXDLSAPPARPRAXLVEWVWSLHGEARLLDAVDTRLXRVRGRXARRVLLLGLACSSP

SEQ ID NO: 289584 - protein, 68 aa, Zea mays
  unsure (1)..(68): unsure at all Xaa locations
  Clone ID: MRT4577_2718C.1.pep
XASNLKNTSIRTVSETRPTAYRYLVNSQWSKALSCIAGFRIRFGSDITFGSLPCLPWILWSDVRDILA

SEQ ID NO: 289585 - protein, 137 aa, Zea mays
  Clone ID: MRT4577_27190C.1.pep
AACTTIVGIRNMTTPSVVSLPPMLAVTIPISYSILSPPLSRAAAVGLGARVAGGLGVGVLAASGKKQPKPLGRLRRPRPPHRRSPRRSLCSHLAAGVGLGRGVRKMNVPGLLMLYRMVEIMLGIPRRSVESEPWDAE

SEQ ID NO: 289586 - protein, 101 aa, Zea mays
  unsure (1)..(101): unsure at all Xaa locations
  Clone ID: MRT4577_27191C.1.pep
MHNNVPTKAAKRGCLLMLLGLSASAATATILSQCSQAPIASIIPTILSSKKYSIXKIPIFNXYMIFQALASSILPLSLLXFLQQSSALLQQLPLVHLLAQN

SEQ ID NO: 289587 - protein, 118 aa, Zea mays
  Clone ID: MRT4577_27192C.1.pep
EHPPVRVLRIINSTCHSLVFKQMPNKQSGWGLKTKNPPPTPLPNPKRTNHITIYPDHTIKNLTHYTLHLISTHYPKMTPPNTRRTPQTCTHTHTITASKSSRPYTPTIPKNNNKKPNN

SEQ ID NO: 289588 - protein, 98 aa, Zea mays
  Clone ID: MRT4577_27193C.1.pep
EAYRHMKFEGGVHRVQRVPKTEKQGRVHTSTMTVAILPQPTEINLVINPKDLRIDTKRASGAGGQHVNTTDSAVRIVHLPTGVVSECQQERSQLRNKE

SEQ ID NO: 289589 - protein, 76 aa, Zea mays
  Clone ID: MRT4577_27194C.1.pep
KLSISPTPRKKRSLASEQGAVIACHSKAEFVAHLTKAQVSRLAGGLQLHCRLERSMPSHRPTVRRSRPSCSTHADV

SEQ ID NO: 289590 - protein, 66 aa, Zea mays
  Clone ID: MRT4577_27195C.1.pep
HGTYENSHPGSGDGSTHYEYLSDITRRVDRLGTFQAEEPLAESQYNTDRLFLVGKGQEGKIDAFFI

SEQ ID NO: 289591 - protein, 76 aa, Zea mays
  Clone ID: MRT4577_27196C.1.pep
CCFDIHMYLTGLESKIVVCRIGVGVLPNMQKKISHLAIHFSRMTMNLLGKLGEENTFSYRDTNFLNNPTWVNISMK

SEQ ID NO: 289592 - protein, 67 aa, Zea mays
  Clone ID: MRT4577_27197C.1.pep
YLFMLNSHLNGLNRRGKSLCGVYTNNIFFCLSLHDQYTTAILLLYYCFCFMKICKDDITRYMYFLNC

SEQ ID NO: 289593 - protein, 204 aa, Zea mays
  unsure (1)..(204): unsure at all Xaa locations
  Clone ID: MRT4577_27198C.1.pep
RGGSEGDSAVELGNSARAVLEIYNEEIYDLLVGSGATAKGNTPKAKLEVMGKKAKNASYISGNEAGRISREVFKVEKRRTVKSTLCNERSSRSHCMIILDVPSVGGRLMLVDMAGSENIEAAGQTGFEAKMQTAKINQGNTALKRVVESIANGDSHVPFRDSKLTMLLQDSFEDDKSKILMILCASPDPXELHXTVSTLELVLS

SEQ ID NO: 289594 - protein, 49 aa, Zea mays
  Clone ID: MRT4577_27199C.1.pep
FIGCFRNGGATDYKLGREGKPPPPPPQTTRVAMVRNMESVSRKKEGSFV

SEQ ID NO: 289595 - protein, 116 aa, Zea mays
  Clone ID: MRT4577_2719C.1.pep
AMLIHSRREQTNPASVPGPSEGRCAGVSENTQRAVPMQGRRRRRRVSSQEDCSGRTEREALRQGRSRWWYSLPSGHVQTLIHLFFLKGVLSTSFRLCSVSSQSMWIERDWMDLNLK

SEQ ID NO: 289596 - protein, 41 aa, Zea mays
  Clone ID: MRT4577_271C.1.pep
RTRWGYRFRFTPGAEASRSGFLLRSISQHLQVDTIMLDVNA

SEQ ID NO: 289597 - protein, 83 aa, Zea mays
  unsure (1)..(83): unsure at all Xaa locations
  Clone ID: MRT4577_27200C.1.pep
HAPPCVPNGYWAVGNGPVDGYFLFAETVDKDXQIRNHSDKKALTCSPIKNSTSKHGVILMSLCIVRFLLVPLPHSTATAHCTS

SEQ ID NO: 289598 - protein, 90 aa, Zea mays
  Clone ID: MRT4577_27201C.1.pep
PEKKKKAFLPCSRALVPVHYKGAGVLVFLLVCILSFSHQFCFTPELNANLLFVVTKPNRSSPPRGQGFPQVFLTVYYLFHARQRIPRRRR

SEQ ID NO: 289599 - protein, 430 aa, Zea mays
  Clone ID: MRT4577_27202C.1.pep
GQNKITRNGRGAVARVECTLRGKRLDGGVSVLSVRKRQIFVASVQRWYPKTSTKTRAAEGRPPIKNFLLSIWGGVFASHGSSSGSNDPIGDLEAQVDQLRAELRHRNDLWVADGERTNELRTEIHHLQDQLVDQDLALDWAVNSRSPAWAKEARARACVEELSSAVDNLQPAGHQITWDEFKLAFREHYIPEGVLHMKQEEFMKLKQGGDTVTQYLNKFNHLYQYAIDQVNTDIKKRNCFMRGLNDRMQRKMATCIDLTYGRAVSTALAVEAKYAGSGKSKGIGGDRPNQGPEKRQKLVIQPFNPNCSSLHPPSFPFKQPVFIRPTAAPTSTNQSGAPGTRFPALPSSSTGCFNCGKSGHFIKDCPYPRQNQSNNQQSSGSSKGNAATNTAAKNTRKTRRIYYTQVATTPEGEPVMMGTFLRAPRGGVNR

SEQ ID NO: 289600 - protein, 43 aa, Zea mays
  Clone ID: MRT4577_27203C.1.pep
EFFAEHGTSSTRPRILVGSLVHGEVKNGWVWSPQTRGWHSALE

SEQ ID NO: 289601 - protein, 71 aa, Zea mays
  Clone ID: MRT4577_27204C.1.pep
CYLGPKWTGIGGPPFSSECSTKAAPKGLLMGLYKKNTCLFVMGMEPQSPNGGAMVQISGRGCCPKGEDFFP

SEQ ID NO: 289602 - protein, 99 aa, Zea mays
  Clone ID: MRT4577_27205C.1.pep
KSIIGNFAVRSHHAPNENILAGRKSSFLRITLELGINAKDNLYPQDLSRAKHFCKSYFDTSSSIYKGMDIKVGNASNSFQATPINLMHISLDLECAKII

SEQ ID NO: 289603 - protein, 78 aa, Zea mays
  Clone ID: MRT4577_27206C.1.pep
GYNGDPNRFTQLRISNHTTYVSRNSCICLSFPRILHCMNRSAPPESTPPLLDGPLPGGYVPLSPSLHSQCAIVFSCME

SEQ ID NO: 289604 - protein, 204 aa, Zea mays
  Clone ID: MRT4577_27207C.1.pep
YLSLPSPYLSTAFSLPSDMPRRCILESKRKSHHCSSVEIPAVSSYLLLGFLPSSFSQLSSLSALSRIQPRRPCSSLFQSGQPSAPSPTHGAPGRAARPIPSPTGAPYNSSSHLPVSPMGERPAEVSPWPALGLCYFFQAAAPYPLFSSPVRAHPAQPLFSTRLVCAPSHPLSIRPWPLCRGLLPRAQFFPPLGVPPMAVACLFP

SEQ ID NO: 289605 - protein, 116 aa, Zea mays
  unsure (1)..(116): unsure at all Xaa locations
  Clone ID: MRT4577_27208C.1.pep
TSYVENAHDDAEDRLDLYANLNTPQREKLSEIIGALHEKDELLVSQDDCHIKENKKHVXVKNAYTQAAEIREKLTRELRTGHDIIXHLRNETAKSIAKIAKLDERDDSIVRLRNDN

SEQ ID NO: 289606 - protein, 60 aa, Zea mays
  Clone ID: MRT4577_27209C.1.pep
DPLLLLPLSSTPLAEQSTVSLALAMRCLTNKTIVDVATRAFISYCCCVLRPSAVAVVVIA

SEQ ID NO: 289607 - protein, 434 aa, Zea mays
  unsure (1)..(434): unsure at all Xaa locations
  Clone ID: MRT4577_2720C.1.pep
RLPDGRIKVWIHVADPTCLVKPHSIIDREAMHRGTSIFLPTTTFPMFPERLAMNSMSLQQGKECKSVTVSVILNLDGRXFYLQLIXLLSEWVLFLFPLSLTFLFLFFKRNFXECSAFIDIPHSVCAVNSIAEYTLENSVIKPTYMLTYESATVLLYMNLEEEEELRILQEAARIREQWRRSQGSIDTAMIEPRIKVSNPDDPEPNINLYVEDQANPAMQLVSEMMILCGEAVAAFGFDNNLPLPYRGHPQSNTAVSVFSHLPEGPARSFANISVLRAAEMDFQKPVPHGVLGIPGYVQFTSPIRRYVDLLAHYQVKAFLRGDSPPYSAGDLEGMTFIASMHVKVARRLHSNSLRYWLLEYLRRQPKGRKYRALILKFVKDRMGALLLVEVGMQVTTTISRGKAGDQVSVTVETAHPRDDILSPREVVEDTKVSE

SEQ ID NO: 289608 - protein, 80 aa, Zea mays
  Clone ID: MRT4577_27210C.1.pep
VRNTRADPRVRTPCPYSGTYRAWIWEASLLSLSSRFPAYVRWSLCRQDGVTSSPQSLALICTRAKHASPLRGDHCPHHCG

SEQ ID NO: 289609 - protein, 166 aa, Zea mays
  Clone ID: MRT4577_27211C.1.pep
NCTRSRLLALAHHCVELLNTTVSSSCIAVPALGSPTSLLPTGPAALSATARRLPRNSPAVACLLADVLPRRIRSATASSTSPRRPRTRFQAIAPNAHLQSAIEFHLISRWPGIFEGFLDRNSAAVVWRSELPLRRPVNSRHFRSSSRPHYWFVRSLKLSELPAEGV

SEQ ID NO: 289610 - protein, 214 aa, Zea mays
  Clone ID: MRT4577_27212C.1.pep
CPSHSCSQPALLSARSPQYLPRLDTPFCCYHLPVTISSFVEFACWESVDHGWNCTRSRLLALAHHCVELLNATVSSSCIAVPALGSPTSLLPTGPAALSATARRLPRNSPAVACLLADVLPRRVRSATTSSTSPRRPRTRFQAIAPNAHLQSAIEFHLTSRWPGIFKGFLDRVALVLCSLKSSQQKECKFKKKWLLKRNLLQCLFIKWMELSNW

SEQ ID NO: 289611 - protein, 68 aa, Zea mays
  Clone ID: MRT4577_27213C.1.pep
MGGSNREGGKAKPLKAPKKQNKDLDEDDLAFLEKKKADEKARKELAAKAGGRGPLNTGTQGIKKSGKK

SEQ ID NO: 289612 - protein, 87 aa, Zea mays
  unsure (1)..(87): unsure at all Xaa locations
  Clone ID: MRT4577_27214C.1.pep
IFTPSGRSSARSRERAPHDRDNLRGILAMVRVSMVTMAFLVSWRTSSEQRQLMVGEKVXIGLQTQGSPHISSEPRLGPEARRQLPRP

SEQ ID NO: 289613 - protein, 40 aa, Zea mays
  Clone ID: MRT4577_27215C.1.pep
KKKKKKKKKKKKKKKKKKKKKKKKKKKKKKKKKYSALLPL

SEQ ID NO: 289614 - protein, 111 aa, Zea mays
  Clone ID: MRT4577_27216C.1.pep
THTVGRMLATLELRSTPVDTRGYETLIRLVDNTCSDSFDLYNGLFMYNKNSTELLNRLEWAMDSVKKRLFDGLHDVLRKQLFEGSPHAPQRLLPLLLQRAQVAVLPMSYVY

SEQ ID NO: 289615 - protein, 87 aa, Zea mays
  unsure (1)..(87): unsure at all Xaa locations
  Clone ID: MRT4577_27217C.1.pep
PRISSSVGMRRXLXXPIXLIGDAKDAYMDEPGPGLDPLLRKSLWSAAKQAKQDTEIILTTHSMEEAETLWDRLRLMVDGKLQSIGPP

SEQ ID NO: 289616 - protein, 103 aa, Zea mays
  Clone ID: MRT4577_27218C.1.pep
KKKNFWFFFKIKKNPQPKKTKWPGGFLVKPWGGPGKNPYPRGQRNSVATQEKKNPQKNPGKKTKFLRGGPVFFWFLKQGEKGRDPPLKNKPKQNWGLYPPLVF

SEQ ID NO: 289617 - protein, 210 aa, Zea mays
  unsure (1)..(210): unsure at all Xaa locations
  Clone ID: MRT4577_27219C.1.pep
FGSSATTGSAPLTAVQLLWVNMIMDTLGALALATEPPNDDMMKRPPVGRGESFITKVMWRNIVGQSLYQLAVLGALMFGGERLLNIHGADSKPVVNTLIFNSFVFCQVFNEINSREMQKINVFRGMFGNWILVGIIAATVAFHVVIVEFLDTFASTVPLGWQLWLVXSVGLGSVSLLVGAVLKCVPNEPDDGVRASPNGYAPLTGGPDNI

SEQ ID NO: 289618 - protein, 59 aa, Zea mays
  Clone ID: MRT4577_2721C.1.pep
LSMCMQSRLICFGLFTYCVCSLPCMYLGNLYRSSQFEYVAAMLSRVRMHPIQASAHAST

SEQ ID NO: 289619 - protein, 70 aa, Zea mays
  Clone ID: MRT4577_27220C.1.pep
ILSKGRTPDLSARPHPSRSRSVSLTNTAGAAASPTEVLSYAERPEPSEATMHPVGDAEAQHTRWHTWSTY

SEQ ID NO: 289620 - protein, 61 aa, Zea mays
  Clone ID: MRT4577_27221C.1.pep
HVLLCCMCLDLMSAIVRCGAPLTFLTAHQYGGLSITCLLHAGVSFLCPPQSLSILCPPQRC

SEQ ID NO: 289621 - protein, 77 aa, Zea mays
  Clone ID: MRT4577_27222C.1.pep
SSVALRRILYMALRLLAPISRSWWPRSEFGFLWCCVGLLCCLGTSRSPPPVLCGSLNKKCPLLVLPYWCGSDLVLPN

SEQ ID NO: 289622 - protein, 204 aa, Zea mays
  Clone ID: MRT4577_27223C.1.pep
ATTGSAPLTAVQLLWVNMITDTWALAWATDAPVGDFMKRPPVGRGESFITKVMWRNIVGQSLYQLAVLGALMFGGERLLNIHGADSKPVVNTLIFNSFVFCQVFNEINSREMQKINVFRGMFGNWIFIGIIAATVAFQVVIVEFLGTFASTVPLGWQLWLVSVGLGSVSLVVGAVLKCVPVEPDDGVRASPNGYAPLPGGPDNI

SEQ ID NO: 289623 - protein, 50 aa, Zea mays
  Clone ID: MRT4577_27224C.1.pep
LLQGDVNLKEVDRVCKADCCHIQGNESAGPTIAVVVQLLEGLYDLECATT

SEQ ID NO: 289624 - protein, 59 aa, Zea mays
  Clone ID: MRT4577_27225C.1.pep
ERIPIPPRSRLWPCSRPAVTRPPIGKTGKRKGTGHGFPASPYAAHVSGLSRINMECNVR

SEQ ID NO: 289625 - protein, 56 aa, Zea mays
  Clone ID: MRT4577_27226C.1.pep
PTRMRLVGLVIPGRPGGLLDQPGNCGPDHEGIQALRIGSNVTAWGTDGHSMSPVRN

SEQ ID NO: 289626 - protein, 148 aa, Zea mays
  Clone ID: MRT4577_27227C.1.pep
MATTTTTILLLLLVAATAVSAADLSVYHNVHPPSPSPLESIIALARADDARLLFLSSKAASSGGVTSAPVASGQTPPSYVVRAGLGTPVQQLLLALDTSADATWSHCAPCDTCPASVGVQLVVLLVYATLSAITDVTRGKKNCFVTGS

SEQ ID NO: 289627 - protein, 160 aa, Zea mays
  Clone ID: MRT4577_27228C.1.pep
LSSLRPSAWRLPLLPSSSSSSSSQPLPSRRPTSPCTTTCTRRPRPHSSPSLRSPAPTTRGSSSSHPRRPRPAASPPLPSPPAGGAPPVTLHMDGGVDLTLPMENTLIHSSATPLACLAMAEAPQNVNPVVNVVANLQQQNVRVVVDVAGSRVGFAREPCN

SEQ ID NO: 289628 - protein, 431 aa, Zea mays
  Clone ID: MRT4577_27229C.1.pep
MATTTTTILLLLLVAATAVSAADLSVYHNVHPPSPSPLESIIALARADDARLLFLSSKAASSGGVTSAPVASGQTPPSYVVRAGLGTPVQQLLLALDTSADATWSHCAPCDTCPAGSRFIPASSSSYASLPCASDWCPLFEGQPCPANQDASAPLPACAFSKPFADTSFQASLGSDTLRLGKDAIAGYAFGCVGAVAGPTTNLPKQGLLGLGRGPMSLLSQTGSRYNGVFSYCLPSYRSYYFSGSLRLGAAGQPRNVRYTPLLTNPHRPSLYYVNVTGLSVGRTWVKVPAGSFAFDPATGAGTVIDSGTVITRWTAPVYAALREEFRRQVAAPSGYTSLGAFDTCFNTDEVAAGGAPPVTLHMDGGVDLTLPMENTLIHSSATPLACLAMAEAPQNVNAVVNVVANLQQQNVRVVVDVAGSRVGFAREPCN

SEQ ID NO: 289629 - protein, 296 aa, Zea mays
  Clone ID: MRT4577_2722C.1.pep
MPGTLHVVVDFLSTQFGLPFLPPSKSSSADFRQGANMAITGATAMDAPFFRSLGLSDKIWNNGPISFQLQWFQQIATSVCGQSCKSYLGNSLFVFGEFGGNDYNAMIFGGYSIEQARKYVPKIVNTISRGIDKLIGMGATDIVVPGVLPIGCFPIYLTIYQSSNGSDYDSLGCLNSFNDLSTYHNALLQKRVDIIQSRHRKTARIMYADFYSAVYDMVRNPQSYGFSSVFETCCGSGGGKYNYQNSARCGMAGAAACSSPASHLSWDGIHLTEAAYKHITDAWLRGPYCRPPILHN

SEQ ID NO: 289630 - protein, 346 aa, Zea mays
  Clone ID: MRT4577_27230C.1.pep
HVLKYDRDLILHNALLDMYCKCGSLEDADALFHRMPQRDVISWSTMVSGLAQNGKSVEALRVFDLMKSQGVAPNHVTMVGVLFACSHAGLVEDGWHYFRSMKRLFGIQPEREHHNCMVDLLGRAGKLDEAVEFIHGMSLEPDSVIWRTLLGACRMHKNASLAAYAAREILKLEPDDQGARVLLSNTYADLRQWTDAEKPWKAMRDRGMRKEPGRSWIELEKRVHVFIAGDLSHPCSDTIIQELNRLIGRIKSLGYVPQTEFVLQDLPTEQKEDLLKYHSEKMAIVFGTMHAVDGKPIRIMKNLRICGDCHAFAKLVSKSEGRVIVIRDPVRFHHFQDGACSCGDYW

SEQ ID NO: 289631 - protein, 125 aa, Zea mays
  Clone ID: MRT4577_27231C.1.pep
RGGFFGFDPLFPDLFPPLKILIVPTKFVFFKPKNRCRFLNFRFFFPSFGGWWFKKGAPPNFFFSNPKNFFLYHRFGVLVSPTPQQGYIKKAGAKKKGKISHPARGGVETPSFFFFLAKKNPFFPP

SEQ ID NO: 289632 - protein, 97 aa, Zea mays
  Clone ID: MRT4577_27232C.1.pep
PLPLPIYSVCSTTEFRKAFLPCSRAVGPVHYKGVGVLVFLLVCILSFSQSLFYSRAECQPLACGDQTQPFLTSPWIRFPTSILGRVLLVPCSAKNSY

SEQ ID NO: 289633 - protein, 72 aa, Zea mays
  unsure (1)..(72): unsure at all Xaa locations
  Clone ID: MRT4577_27233C.1.pep
RPFRRHIVFFFLEGVWPTKIPVCFSGKVCPFLGVGFPPPPHRISPPNYGPYPVWMDXIFGPPRDPNYIPKKA

SEQ ID NO: 289634 - protein, 101 aa, Zea mays
  unsure (1)..(101): unsure at all Xaa locations
  Clone ID: MRT4577_27234C.1.pep
AVDSXFEALNINKYDVALTVDPLYHQTTAQFNQRCAHGLTTHNLILYRRSPLLSHSLKAPYKRILTDMHTDHAATLYHSFPTEPIHEMATQKHPCNDISPP

SEQ ID NO: 289635 - protein, 110 aa, Zea mays
  Clone ID: MRT4577_27235C.1.pep
SEYRWSAQYKFPLVQLNFVSTPLFLQALRRFGPTLPPLEICASAYTGSGSITRAGARSLWASRLGQHGSNVLLPAARGFMTASLPFAMLSIEEAHSSGVIVVSYHVASGT

SEQ ID NO: 289636 - protein, 173 aa, Zea mays
  unsure (1)..(173): unsure at all Xaa locations
  Clone ID: MRT4577_27236C.1.pep
MSRKHFFPNPEGVVLHTLRSLCARNKHMALDEANRVVYNLSHRPNEVSIVSGGGSGHEPAWSGFVGDGMLSAAVCGDIFASPSTKQVMAGMRNVPSTEGIILCITNYTGDMLHFGLAREKGQALGYKVDVVCMAEDAALXRAQSGKVGRRRLAGNLLVXQLIGGASLQGWAFE

SEQ ID NO: 289637 - protein, 141 aa, Zea mays
  Clone ID: MRT4577_27237C.1.pep
LPLGETGEGHQGSPGKTRPGPGGGPNIPKKKWKKTWPKKRQKPLPGENRIRSKIQKRKDRGAKRGNPGGPKGGGKLPEMGGGNRPGHQQEKLGPHAVKGSPQTGGKGGFSLGHRGGLHLNEGNGKARRALHPGAQEGWTQR

SEQ ID NO: 289638 - protein, 58 aa, Zea mays
  Clone ID: MRT4577_27238C.1.pep
GFNPTQTFLVPTKFNNHFVGRVYLYMKSLPFHFLSSPPWPEKQGFLIGGNPPLGGAFF

SEQ ID NO: 289639 - protein, 106 aa, Zea mays
  Clone ID: MRT4577_27239C.1.pep
AAPDVTLLKVSLNPVLDITPGVIVGGRHRRGCSSLEKGLVFFSALGALKERAWSWVIFPTDLGSSQHTSPPRGVFGLRCFTHELSQIPCGVLTARFGYGGPEGFFP

SEQ ID NO: 289640 - protein, 378 aa, Zea mays
  unsure (1)..(378): unsure at all Xaa locations
  Clone ID: MRT4577_2723C.1.pep
MGSQRQRHRAVTGLPAAGARMLALLCASSWVLVLATAQNYSAIFNFGDSITDTGNLCTSGRPSQITFTQAPYGETYFGTPTCRCSDGRVVVDFLSTQFGLPFLPPSKSSSADFRQGANXAITGATAMDAPFFRSLGLXDKIWNNGPISFQLQWFQQIATSVCGQSCKSYLGNSLFVFGEFGGNDYNAMIFGGYSIEQARKYVPKIVNTISRGIDKLIGMGATDIVVPGVLPIGCFPIYLTIYQSSNGSDYDSLGCLNSFNDLSTYHNALLQKRVDVIQSRHRKTARIMYADFYSAVYDMVRNPQSYGFSSVFETCCGSGGGKYNYQNSARCGMAGAAACSSPASHLSWDGIHLTEAAYKHITDAWLRGPYCRPPILHN

SEQ ID NO: 289641 - protein, 204 aa, Zea mays
  unsure (1)..(204): unsure at all Xaa locations
  Clone ID: MRT4577_27240C.1.pep
MGSLANNIMXVAGVVLAALVAGGTCGPPKVPPGPNITTNYNGKCLTARATCHRQPNGAGAPDNGGACGIKNANLPPYRCMTWCGNVPIFKDCKGCXTCYQARCNEKPECSGNPVTAYITDMNYQPIAPYHFDLRGNAFRSLXAKPGLNDXIRHCGIMHVQLRMVRCKYPVVHNIVFHIEKGCNLNYLLRLVKYVADDGDIMLME

SEQ ID NO: 289642 - protein, 53 aa, Zea mays
  Clone ID: MRT4577_27241C.1.pep
MELGGGGRGGFLLLSATSSVAVRALRAISDANQRKFAKPCGACKAYGCYSCTL

SEQ ID NO: 289643 - protein, 71 aa, Zea mays
  Clone ID: MRT4577_27242C.1.pep
FLHPERGVQLKQIRAATGTFDSNRTQKYSRQHHWPHKADIELWINKAGALPSHHHLQHPRERTDRKLRIYL

SEQ ID NO: 289644 - protein, 93 aa, Zea mays
  Clone ID: MRT4577_27243C.1.pep
PVQDPQKMTEIIVKALEITGQRGIINKGWGGLGTLSEPKDFVYLLDNCPHDWLFLHCKAVVHHGGAGTTAAGLKAACPTTIVPFFGDQPFWGD

SEQ ID NO: 289645 - protein, 55 aa, Zea mays
  Clone ID: MRT4577_27244C.1.pep
RSSHSSFIKPSSSHATVSHSDRVHTQKFHEVKFTRSVIYRDLSSHISCFTSSADA

SEQ ID NO: 289646 - protein, 163 aa, Zea mays
  unsure (1)..(163): unsure at all Xaa locations
  Clone ID: MRT4577_27245C.1.pep
FVRSAHTHNQISPKTRRHLRXKKQXXXKTXTGKXXTXEGEXXDTXDNXKAKXQDKEGXPPDQQRXRGGGKQXEDGRTXXDXNSQKESTXHQGXRPRGGRQNXGKTXTGKTKTREGEAXDRXDNDKAKNQDKEGKPPXDQERXXXQGRTXEDGRTXGDXDXQKE

SEQ ID NO: 289647 - protein, 50 aa, Zea mays
  Clone ID: MRT4577_27246C.1.pep
MKNVECNMINRRGCCLIWGSFFVSRKCMVLCPAVDLKNIFCLPVCVPKRR

SEQ ID NO: 289648 - protein, 96 aa, Zea mays
  Clone ID: MRT4577_27247C.1.pep
EVTAPKWLQRGGLFPSGKGSGNPANGARTEKATWAALNINLRVKKGPKASKFGKGEAVEKGFGRGLRALENQRGPGQPYYGNSQPRWSSLGEPVTR

SEQ ID NO: 289649 - protein, 90 aa, Zea mays
  Clone ID: MRT4577_27248C.1.pep
YISKKKKKKKKKKKKKKKKKKKKKKKKKKKKKKKKKIKKKKKKKKKKVFSLPGAGLLKGAKFWKISFKIWGPVGTLLFKRANFPLLRGVF

SEQ ID NO: 289650 - protein, 61 aa, Zea mays
  Clone ID: MRT4577_27249C.1.pep
HFSPLFAISQHLAHCYLHPVNSFMHLWLAVASYADIDLICRAIARGLLFMQGPTIVARVMP

SEQ ID NO: 289651 - protein, 285 aa, Zea mays
  unsure (1)..(285): unsure at all Xaa locations
  Clone ID: MRT4577_2724C.1.pep
VKFIRQPDDEEDAELAAQLEKQFHTEVATPSRLNHPNVIKPVGACSSPPVFCVITEFLSGGSLRAFLHKFAPNKLRPVPNFSMXDRAPKQQFLTNKQRNSPIVKXPKNNTVELLTXVKTYKYHFNLHTMRIHQLRKATHPFYQKPSWKILKLRVRYRQRRVHSSTYLYEYACXTIPYEELNPFQAAFAVFDKNVRPAIPTSCPTPXRLLIEQCWASHPEKRPDFSQIVQILEKFICVPDRDGTLDNMPSSICQETHDHKNWLAHWVQRLKHSQPDLYGPPPPKLL

SEQ ID NO: 289652 - protein, 95 aa, Zea mays
  Clone ID: MRT4577_27250C.1.pep
RFFCSYPDLINLAKMVIDSDERKRTRQCCMYSFCLGWVICIAIYSHHMAYKERLFGSPFPWKVRSKMPGNWCNMKFIYLCSARKIYLGNTFGQNT

SEQ ID NO: 289653 - protein, 65 aa, Zea mays
  Clone ID: MRT4577_27251C.1.pep
QNSRQQPKRINMLRKQLHCMVTATKMSYTAILAMLPAGYMISEFKYSKHCHSSDESDNTQVKSFI

SEQ ID NO: 289654 - protein, 53 aa, Zea mays
  Clone ID: MRT4577_27252C.1.pep
TCTRGKHELGQKQNYMFGLKLIKKQLGDPHQYPFDYIIAPLGNKQLTQTSFMP

SEQ ID NO: 289655 - protein, 137 aa, Zea mays
  Clone ID: MRT4577_27253C.1.pep
ALFFFFFFFFFVGAWLILCCLLCFCCVVGALCLCRARSWGLASHIVGGGGGEIFFSRPLCCIDGPSWLLRHMWKALGSHAGKVPGASLVLSGGCWMPLSLLLVGRPPCPPLRGEFLRTSAVVLSASALGAEAWACLG

SEQ ID NO: 289656 - protein, 50 aa, Zea mays
  unsure (1)..(50): unsure at all Xaa locations
  Clone ID: MRT4577_27254C.1.pep
NKCKFKSNPSEIYYICXSDRNKNTLMCEVFGSHLRYVLSFFHLLRFQTID

SEQ ID NO: 289657 - protein, 88 aa, Zea mays
  unsure (1)..(88): unsure at all Xaa locations
  Clone ID: MRT4577_27255C.1.pep
MVEQTEKAFLDQLWVFLSSVKSGEANNPAKVDNRFWNSMGLGFTTAREAXLQGTYFDQKCPFARTVSIRXRILAGTCHSANMNRTIIG

SEQ ID NO: 289658 - protein, 49 aa, Zea mays
  Clone ID: MRT4577_27256C.1.pep
SFSPATSCKLSAHAASNVVSQLSRSCQGCSDHSCTVRFIHRYYSCPLQM

SEQ ID NO: 289659 - protein, 85 aa, Zea mays
  Clone ID: MRT4577_27257C.1.pep
QVNCCILGMALARAARRKTQPQSTKRNTCTSTRVRQAGVQIQTCDIPNLCSYTYTYYRNTLVRKYFDQILVKPDDSSIQTRLTSV

SEQ ID NO: 289660 - protein, 71 aa, Zea mays
  Clone ID: MRT4577_27258C.1.pep
PLHPPTVSLKAWLGCGCGLVACLPTTWCLIVRYHGPPPLLYFIAVRVPCFPPCLPRKFLSFESLGLGLLTH

SEQ ID NO: 289661 - protein, 37 aa, Zea mays
  Clone ID: MRT4577_27259C.1.pep
QNIKLNTEHFLFFLLFSSLGLALFQFLGMVLAYIPTT

SEQ ID NO: 289662 - protein, 106 aa, Zea mays
  Clone ID: MRT4577_2725C.1.pep
VGLHFRHGAASSLAMALFAAARRATASSGPGLLRGSDSPGSHRSADLVRTLGVAVEPPKPRAMSSSAGHATRPGSNAELPSAIPLRNQLGRRPARTTTALQSCCFF

SEQ ID NO: 289663 - protein, 51 aa, Zea mays
  Clone ID: MRT4577_27260C.1.pep
APEGQAARPGPPPAKGRWAKRDLSQASFRLVTGPVCSSRAGRKTTSQVISI

SEQ ID NO: 289664 - protein, 94 aa, Zea mays
  Clone ID: MRT4577_27261C.1.pep
FLIKKALPSSFPHFFCCCCCQAARPSCPSAPNSYVPDFTRSRIYMTSLDLKLYLHTKKRGRSVVKSPKLIAIAGTDQAGRAGWWMVGMGTDLYK

SEQ ID NO: 289665 - protein, 97 aa, Zea mays
  Clone ID: MRT4577_27262C.1.pep
FINQRGFLFLFLGFRWNCFCPSVHATKKEKKFPRPMENLYKRVATCKRSVESVSRTKQQQQLGCSVRQWMSCVCERETSICGVFPFFPLFSPDYCML

SEQ ID NO: 289666 - protein, 109 aa, Zea mays
  Clone ID: MRT4577_27263C.1.pep
DRLPNYSPDLPLPNLIQRLTNPPSPREEKGQGQTGDQILILDQIIQEGPSLFFSPFSSCCCCQAARPSCPSAPNSYVPDFTRSRIYMTSLDLKLYLHTQPGRKICGKIT

SEQ ID NO: 289667 - protein, 292 aa, Zea mays
  Clone ID: MRT4577_27264C.1.pep
MASLSCASTLPWTPASYPRPSAGRCLTASRRAPSLVIVAQGKVKKYPQVILTDDIEEVGKKGDTMKVRAGFYRNSLLPKGKAALLTPAVHKQNTIVASENENPPLMPAIMTPGGALDLATVLLGNRIIFIGQYINSQVAQRVISQLVTLAAIDEEADILIYLNCPGGSLYSILAIYDCMSWIKPKVGTVCFGVVASQAAIILAGGEKGMRYAMPNARVMIHQPQGGSEGNVEEVRRQVGETIYARDKVDKMFAAFTGQPLDMVQQWTERDRFMSSSEAMDFGLLDALLETRY

SEQ ID NO: 289668 - protein, 41 aa, Zea mays
  Clone ID: MRT4577_27265C.1.pep
GVDRKDLNSYGSRRGNDEIMARGTSANNKIANKTIYGEVGP

SEQ ID NO: 289669 - protein, 87 aa, Zea mays
  unsure (1)..(87): unsure at all Xaa locations
  Clone ID: MRT4577_27266C.1.pep
QQRQQPLKPGAVANPXGATFLQQQQQLVPYXQFPLLTPAMQQPNVGGASFRLHMRWTRQWCPQTDMCFLEIINTSALRFIWITTTPP

SEQ ID NO: 289670 - protein, 85 aa, Zea mays
  Clone ID: MRT4577_27267C.1.pep
VHAFYHPAWGLMLSATGLARSGHVTIEQTYWLLSFSGNAVRKNLGHGEVLYDRLFSSLLCFVASFSIYINKPPQKKRRAAAVSEL

SEQ ID NO: 289671 - protein, 90 aa, Zea mays
  Clone ID: MRT4577_27268C.1.pep
GKNCPHLGGKGPLVYQGENRFRAKKKQNQFGGTGRRLALPETRPGQPLRVLYNPQAFSFPQKKTGGGGGSSRFADAPRFRGTWGGGTPCC

SEQ ID NO: 289672 - protein, 57 aa, Zea mays
  Clone ID: MRT4577_27269C.1.pep
SFGFNEKKKKKKKKKKKKKKKKKKKKKKKKKKKKKNQKKPKKKKKRALGRNHPKGKF

SEQ ID NO: 289673 - protein, 43 aa, Zea mays
  Clone ID: MRT4577_2726C.1.pep
ASMVLPTPLIWLRVVFQNLQSYICTTGHGTFISSVPANQRSLY

SEQ ID NO: 289674 - protein, 211 aa, Zea mays
  unsure (1)..(211): unsure at all Xaa locations
  Clone ID: MRT4577_27270C.1.pep
GPLELDAWQMEQTKLFQALLFNSLFGKLFIGSKASKTPREFILKKDDVFLWNKENMYLLLPVDSTLDSHKSVCINWSVIDVVATAVGFMRSIYSDGKCNLTDKLNYEKNGEDLIHLANKSCKGNDLKNMVVLAIHTGKIYTIVVVSDLCANSKFDGTTDKKEAKFRTFAEYFEKKYSIFLCHPLQPLLVLKPTHNPHNLLSSKNRDEDXCC

SEQ ID NO: 289675 - protein, 75 aa, Zea mays
  unsure (1)..(75): unsure at all Xaa locations
  Clone ID: MRT4577_27271C.1.pep
VSARLRAWWVVSLGPRFRSFRXFGXXXLVXRCWXLAGRVGLAGFGXXVCGPLRRLXPLLRGVAPGVIIRVGKNGF

SEQ ID NO: 289676 - protein, 83 aa, Zea mays
  Clone ID: MRT4577_27272C.1.pep
PNARPTCGPGKCLPMRIALLSHHKVYPPGPPSTMDPLEFIFTPHLSLRRTGLQDCLNHAYRWETDDLHRPDRGGGSARVIADL

SEQ ID NO: 289677 - protein, 186 aa, Zea mays
  Clone ID: MRT4577_27273C.1.pep
GSSSVPSARPPARFSLPLSLHPTRETAGSSRTGGGAASIRPRAARPGPAPAASPELHFGANSGSHRFALENRAVNEATFRCPDELGWKPQRTPIISSDGNILHARQTTLPLKEISKSLQQMGYDVMPSDDAGRFVCNYVYYHSLKFAEKHGITSLFVHFPLFLAIDEEVQMQFVASLLEVLASLNF

SEQ ID NO: 289678 - protein, 115 aa, Zea mays
  Clone ID: MRT4577_27274C.1.pep
ASLDGFITPRYTSVFLPAGGRQVLDLRVPGRIWSKQCQWRPPPLSFRWLVVMLALPCLPFPPIIRGQLSVQLLPMIRAPSPCSVCAFPPPRFCLPAVFASHHDYRGLPLSCVVHN

SEQ ID NO: 289679 - protein, 223 aa, Zea mays
  Clone ID: MRT4577_27275C.1.pep
MGSEGPSPVTTTVHVTGFKKFHGVADNPTEKIVRNLASFMDTRGLPKGLVLGSCTVLEAAGQGALGPLYQLLESAVVSGRGRGMPAQERVILLHFGANSGSHRFALENRAVNEATFRCPDELGWKPQRTPIISSDGNILHARQTTLPLKEISKSLQQMGYDVMPSDDAGRFVCNYVYYHSLKFAEKHGITSLFVHFPLFLAIDEEVQMQFVASLLEVLASLNF

SEQ ID NO: 289680 - protein, 145 aa, Zea mays
  Clone ID: MRT4577_27276C.1.pep
MASLSMACGDVSFCHPFRSSSPKVSLRSSVHFATSLSSSHSISGLRAVLPLKISTVASPNSQKLHSFTVFAHKGYKMKTHKASAKRFRVTGRGKIVRRRSGKQHLLAKKNNKRKLRLSKMTEVNRSDYDNVIGALPYFEVNRKAT

SEQ ID NO: 289681 - protein, 125 aa, Zea mays
  Clone ID: MRT4577_27277C.1.pep
WLGTLGFPGPGFFRRPVFDVGGLWRCVLVWHGRVSYVGIWGPGASRGVFGPPPFLAWLWFPPPSIFVGFDWHGGFFFFFRGRFLVFFFWGPVFGWVFLGFFCCRVGFGFPSVCVMKTSLCGRGRG

SEQ ID NO: 289682 - protein, 98 aa, Zea mays
  Clone ID: MRT4577_27278C.1.pep
MSDENANGTPGEQAPANSEHLNIKVTDNNNEVFFKIKRTTKLEKPMGAFCERQGKATSSVRFLFDGTRVQPTDTPDALEMQDGDTLEVHQEQVGGSSL

SEQ ID NO: 289683 - protein, 116 aa, Zea mays
  Clone ID: MRT4577_27279C.1.pep
LWVWSRIVRAMATSIQRLRKHKPSMSPRMAQPPAGSMPPTRRWSCRLKQHMSYRRAMPPGPSNAYVPSPCWLPEPYTVISSALHDASATDYTYTPQCCERACYSMSGLPPYKAHHH

SEQ ID NO: 289684 - protein, 65 aa, Zea mays
  Clone ID: MRT4577_2727C.1.pep
GSFVVASVVICLRRIGFLCRLIGLCEESLDRSDRLPIVPFFVDWSVTLCPSFVQDLYLFNIVSVA

SEQ ID NO: 289685 - protein, 87 aa, Zea mays
  unsure (1)..(87): unsure at all Xaa locations
  Clone ID: MRT4577_27280C.1.pep
KGIIHSLFLEIYKLNFYFYFTLTNIVLMFLFIFRRWWVPKYNYSLGTLYFDFYYYSPKSDFGRYKSYPLKNNLVLEIXKKKDTIGMV

SEQ ID NO: 289686 - protein, 55 aa, Zea mays
  Clone ID: MRT4577_27281C.1.pep
WHAHTDETLTGYTINVVANAYYDMDLALVSIEHTEGIPAKQQLVISVPKHHKDWR

SEQ ID NO: 289687 - protein, 120 aa, Zea mays
  Clone ID: MRT4577_27282C.1.pep
LKFFNGQAPDGVKSFGSALCMASISLGNYVSIMLVSVVTSLTARYKRPGWITGNLNSGHLDRLYFLLAALSLVDLAVYVACAMWYKGIKLDDGDGDNRRKVSAHVPLATAYSPSGLQFSG

SEQ ID NO: 289688 - protein, 124 aa, Zea mays
  Clone ID: MRT4577_27283C.1.pep
PRARGRGEGRGGQGGGDAHDPPKELKEMNAAPGLDEGHASPGEEYRAIHAERSPRRPTIKATGAPGHGAKTHDGSAKENPTKSAEATRRHRTAQPDLVKSGEKAEGDAASEKPAHQKAGTPTPT

SEQ ID NO: 289689 - protein, 56 aa, Zea mays
  Clone ID: MRT4577_27284C.1.pep
RAIDSVYLYHRLIITQYASCSNMLNVAAITTWGDTATMWIHRLHALIAMALAKGLA

SEQ ID NO: 289690 - protein, 106 aa, Zea mays
  Clone ID: MRT4577_27285C.1.pep
GIGVFCNFTHFAGVFVLVNCFKGFTVQGYVLFSAWLLMHVMVFLGRGLVSKIGGVCLGCFFSRGVCVCLAVVCSCGFKGRFFCTFGGIGGVRGCISTIFPKIEKVR

SEQ ID NO: 289691 - protein, 86 aa, Zea mays
  Clone ID: MRT4577_27286C.1.pep
NPRHFSSLHLLQRATSSCKGARAMAWQTTRVLFVSNGFALPTRSIEDGRLPEPFACFIACSTPLHLLPRSLLLCLSFRWEGGALLD

SEQ ID NO: 289692 - protein, 69 aa, Zea mays
  Clone ID: MRT4577_27287C.1.pep
PFRLLTVSLLAFVALCGRSFIWLLRRLQICTHLNGPLVLIYLYRQVFKVCLSLVGGLLFRWLACSCLCL

SEQ ID NO: 289693 - protein, 75 aa, Zea mays
  unsure (1)..(75): unsure at all Xaa locations
  Clone ID: MRT4577_27288C.1.pep
LISNSGRTPSARXDMXGSXASYLFCRQCGTEREAADKQAVQKTLELAMTRAMMSRTDRCSSILCAVVGDQEDARV

SEQ ID NO: 289694 - protein, 80 aa, Zea mays
  Clone ID: MRT4577_27289C.1.pep
RDPEPPKKTTTTPRQRRSRHKDSWNPIPVVAPVNYPGLNVFVWVPCTGISFIFPPPTQKPPPCSCILWGIICRHPPPLFI

SEQ ID NO: 289695 - protein, 45 aa, Zea mays
  Clone ID: MRT4577_2728C.1.pep
HPLMLQLFEIVLMVVDSKTERDTPMTQFWLFVFFFKEPVPFIIFP

SEQ ID NO: 289696 - protein, 59 aa, Zea mays
  Clone ID: MRT4577_27291C.1.pep
FGLWSHMILHAITQSSVEIRTRTLERADAARKKRKTEQRESVREKAKEREIRDVPLRAC

SEQ ID NO: 289697 - protein, 88 aa, Zea mays
  Clone ID: MRT4577_27292C.1.pep
LDFSPLNKTRVNGHVLGKKATLSVPKKYNIYFTKCYVQFALAFHAILTIISSIKTNGLTQCWLYFKLFFHNLIDAIKPQFPRNMFPNK

SEQ ID NO: 289698 - protein, 107 aa, Zea mays
  Clone ID: MRT4577_27293C.1.pep
RALHRPFLSSLYDVRASQAGAEAAGCVKRLIGTNPPVDDESGSDRSSPHELVPGSCAAIPHYLGATASLHHRAFSPAKCYGWQHPLGSGGLPAYVPATSPQGLALSR

SEQ ID NO: 289699 - protein, 121 aa, Zea mays
  Clone ID: MRT4577_27294C.1.pep
GKGGRDPNHGHVHEEYAAFRGFPGQNKASTLGHSHRYQREKQSPNTHTQGRLHWCRLARGKKPPPPRAPEKPLSQGVLGQPGVFLISGSLIRGSTPLHPPSNEAKRRHLQWSQLNFTSAKE

SEQ ID NO: 289700 - protein, 128 aa, Zea mays
  Clone ID: MRT4577_27295C.1.pep
CGKITYIHCKAGRGRSTTIVLCYLVKYKNMTPAAAFEHVRSKRARVLLTHSQWKAVQEFSKKNTDLPALTSGPATASPARDEAPVTVADLNGNNAPEFLAEDASLSRRNTTPSRPTIKMLSCLFPSRI

SEQ ID NO: 289701 - protein, 127 aa, Zea mays
  Clone ID: MRT4577_27296C.1.pep
MVLAGCCEALIAIFLPPLAVLLRRGCSGSFLLNILLTCLGWIPGVVHAWVVIVAEPSRHHSRRPSHSTTYTNHHSSSHARHHHHHHHHGDGHHHSSHTGRHHARPARRSYDRPAYRDGYDVAPAPAR

SEQ ID NO: 289702 - protein, 339 aa, Zea mays
  Clone ID: MRT4577_27297C.1.pep
VLLCSASSHGGLADLAPAAALPLPRLALLYRSGGGEAAAAAGAESQVKFDFSPFLIEYKNGRVKRLMGTNVVAASSDALTGVTSRDVTIDASTGVAARLYLPSFRASARVPVLVYFHGGAFVVESAFTPIYHAYLNTLAARAGVVAVSVNYRLAPEHPLPAAYDDSWAALRWVLASAAGSDPWLAQYGDLFRLFLAGDSAGGNIARIKGVALLDPYFQGRSPVGAESADPAYLQSAARTWSFICAGRYPINHPYADPLLLPASSWQHLGASRVLVTVSGQDRLSPWQRGYYAALQGSGWPGEAELYETPGEGHVYFLTKLGSPQALAEMAKLVAFINRD

SEQ ID NO: 289703 - protein, 119 aa, Zea mays
  Clone ID: MRT4577_27298C.1.pep
TLLLISELSSGLRPCQERCVLAKKAGEQAAFWDEEQDDKGSGAGSPDGCDGNLGGNRGDDAGGGGDHLHHLRHLLLPLPVREAVPGGRPDHRLRQGPAPIHVRGQRGVPRRPQRGLHRG

SEQ ID NO: 289704 - protein, 354 aa, Zea mays
  Clone ID: MRT4577_27299C.1.pep
MVASRILLPLLLSLFLGSHCCTGAAAAKRQLLQARRAGDPSSQSQVKFDFSPFLIEYKNGRVKRLMGTNVVAASSDALTGVTSRDVTIDASTGVAARLYLPSFRASARVPVLVYFHGGAFVVESAFTPIYHAYLNTLAARAGVVAVSVNYRLAPEHPLPAAYDDSWAALRWVLASAAGSDPWLAQYGDLCRLFLAGDSAGGNIAHNLALRAGEEGLDGGARIKGVALLDPYFQGRSPVGAESADPAYLQSAARTWSFICAGRYPINHPYADPLLLPASSWQHLGASRVLVTVSGQDRLNPWQRGYYAALRSSGWPGEAELYETPGEGHVYFLTKLGSPQALAEMAKLVAFINRD

SEQ ID NO: 289705 - protein, 122 aa, Zea mays
  Clone ID: MRT4577_2729C.1.pep
PAGENASDKPKGNRKLDDPMQATQNRHGSPTGAVAESCSPSECTALDKLEKASQTVEGASSIVQDIEALSTILTPIKIWLTNTPSSTRELNIDGANQSLRIIKNLIDAGSCQSYAAIDISLL

SEQ ID NO: 289706 - protein, 208 aa, Zea mays
  Clone ID: MRT4577_272C.1.pep
MGKRSVPRYPEDEDKGGCCGCLCWCCCFLLFIVAALAGTAAYFFFVYKPKAPSYSVSNMSVSQFDFSTSDLTLYVKLTASVRAENPNEMITIRYGEGSHTVVSYRGTPLCSGKLPAFFQGYKNVTVMDISMEGRHGFGSGLQQALEESEKAGDIPLDIFVSVPVELQLGSVDLRQIKVNVHCALVLDSISPKKKPNIKSATYQANVEF

SEQ ID NO: 289707 - protein, 67 aa, Zea mays
  Clone ID: MRT4577_27300C.1.pep
RGTASYSSLQSIIFFSIEASLYYRPGTRSSDVGRGERALPRGPRVRQGPRAVTLLSPAVRQRNQCIV

SEQ ID NO: 289708 - protein, 146 aa, Zea mays
  unsure (1)..(146): unsure at all Xaa locations
  Clone ID: MRT4577_27301C.1.pep
FXFFFFCFGVFFFFFFWASRDQFIEHQFNKHCTPNIFFFFPYPGQNPGGGGEGXKAPPQTGNQGKRXXTTGLNTPTGTSYSYPQDVNWAKNTHHHHHQXTTLSINKTRGXLAFSFSRHHSYSHPPLGLAPATQKASGGRXRXLLSP

SEQ ID NO: 289709 - protein, 78 aa, Zea mays
  Clone ID: MRT4577_27302C.1.pep
TTRADTLAVCIADTSVVALICLIRISHTHSIRFVFLSRNSGDPHTECATQSWTGHMTACSIRGTMRATSRASESYNNF

SEQ ID NO: 289710 - protein, 41 aa, Zea mays
  Clone ID: MRT4577_27303C.1.pep
KIQAHWTRSIREIIALPLGSHSYYPSSMNFTSMGFSHKPIC

SEQ ID NO: 289711 - protein, 122 aa, Zea mays
  unsure (1)..(122): unsure at all Xaa locations
  Clone ID: MRT4577_27304C.1.pep
AELGTSILFFGCRNRNMDYRYEDELQTFLEEGALSELIVAFSRXGPTKEYLLHKMVEKAIEIWNIIXNGGYLYMCGDAKGMARDVHKMLHTIVQEQRSLDSSKTESYVKSMQMEGRYLRDVW

SEQ ID NO: 289712 - protein, 126 aa, Zea mays
  unsure (1)..(126): unsure at all Xaa locations
  Clone ID: MRT4577_27306C.1.pep
DNSRYGDSGSAQWGTLVDGSLSALLMCCDIDIPNRAKGLEDPERLARETVCNGNEIXEALDELFKKNIXAXVSPAPRSKGQFQRALPPTNRNCSLCADRAFNSFDTKHEASHEIEEVGRALCVLHP

SEQ ID NO: 289713 - protein, 95 aa, Zea mays
  unsure (1)..(95): unsure at all Xaa locations
  Clone ID: MRT4577_27307C.1.pep
SARTPRHVTTVSGVFRLCLPXRFWTPRASSPLLLGASSSSHVCAPEGPNLRGHRLPALGSCVTNRCLRFANRGIKAWEQSFSCQRGGSGRGQHIL

SEQ ID NO: 289714 - protein, 109 aa, Zea mays
  Clone ID: MRT4577_27308C.1.pep
GTRPHAQPQHATVIAVSPAIARFPLPPAPLPLVGSSTSAASLSSVARGHFLVGNAMSTFSSPVACTICARVCARNPRTQGSSATSARIMCDQSLLAICEPPDQGVGAKL

SEQ ID NO: 289715 - protein, 202 aa, Zea mays
  unsure (1)..(202): unsure at all Xaa locations
  Clone ID: MRT4577_27309C.1.pep
MAPSGVVAVSTFMGTRLPDPGPHTSXCGPRLPFPRGGNLNPAPNKVGKTSTSFDRSMRFPGAVAPNYLNLSVDAKYECYPVVPSHILXYLHCELNIAXHNLGQNEDPEIIGSLFQASEVNATRLKPYSGRVXGIPRVREREVMHXRWDRLDTLKALYFEWLTGVTWDDAVQVXMVDXASYLTQTMPVSISTILCIEVTVIGY

SEQ ID NO: 289716 - protein, 80 aa, Zea mays
  Clone ID: MRT4577_2730C.1.pep
SAALNLLVTLNGSGLYASFPDALASSLPLLQVVVEMADVDAVRGGGRQERRADEEEGAGPAPPELSRRLHYYCLQCADFF

SEQ ID NO: 289717 - protein, 118 aa, Zea mays
  Clone ID: MRT4577_27310C.1.pep
FLLIVVISTVATWPQIVKTRRGDACLRQPVVSRCRYTISMLFDPDVVLSVVFGKNGGLEQISIRKGYVDMCTVDATTLTKISDVSPSSVLSDYSLIPLDLEELSALEVLFFVASILLL

SEQ ID NO: 289718 - protein, 618 aa, Zea mays
  Clone ID: MRT4577_27311C.1.pep
MGSVTDGFLWKELLHRVVAAKRRSEIDETDSESNSFDKNDDMSKDEMTVLGGRGEDVVRVDECNDGGDVTKVKKRRRGVTKPVKVEGGSKSKSKVWEVFDKVNVPNPSDKENPLLKAKCKYCKKLYSYAQGSTTTTLSRHMKNCGKYQKYIEEKLDQTLLNFAPSATGESGSGLPTISSPKDYNHEQVKKLVAKMIIVHEYPFRMVEHTWFNILMKYMNSLYEFNGRKTIRVECLKLDPPHKGYVIGQAAYECVTAWKIEDKIVSFTLDNAANNDSVIRGLRARFAARQGNAFIAKYFHVRCCAHIINLVVNDGTTTLASLIENLRLTVKYLKKSPSRMHKFVEICRSLALQVGEGMRLDVSTRWGSTYKMLRTAIAYKEAIKTYADSDLNYKWEPTTEEWDLFVAIEPILASLAKVTTALSASSYPTAKLFYPHIVDVKIALKAAMSSTDLNMRKMGTATTEKFNKYWEEKNNVMVIATILDPRYKMRYIAWCFGKIFDACQVDLEIEEVRGELEKLFEDYEMQHRERKAAQTDKEFDLLNWWKVNSHRFPVVSRMAKKFLTVPTTSVSSESTFSTEGRTLDDYRNSLSPSMVEALEQDEEDDVENISFPKSLVESN

SEQ ID NO: 289719 - protein, 88 aa, Zea mays
  unsure (1)..(88): unsure at all Xaa locations
  Clone ID: MRT4577_27313C.1.pep
XXXFHTKIPKSPLFLVFLINXXTYNRIXKSLHXXQNCSNLFKLQNKKSSGPVTKAWEFKPKVCWSYAHKVXDTMCLFDILIFLILAFI

SEQ ID NO: 289720 - protein, 64 aa, Zea mays
  unsure (1)..(64): unsure at all Xaa locations
  Clone ID: MRT4577_27314C.1.pep
VRFFKKIFYSNIGKVGWICLHLFKDKLSPALXFEPFFLGXQAFLSGPNSNDPFLDNLSKPWKTH

SEQ ID NO: 289721 - protein, 63 aa, Zea mays
  Clone ID: MRT4577_27315C.1.pep
SSCRTPRSWASRVTSCRHTLLVDRDKLAKALASVTTDNVLSSVENHVLVSYFDRIKLDDFNTH

SEQ ID NO: 289722 - protein, 48 aa, Zea mays
  Clone ID: MRT4577_27316C.1.pep
SPVTRTNCKIYFREKSIYQSIWRGSKTLVCCMRAEQELFRIVTCTIDC

SEQ ID NO: 289723 - protein, 41 aa, Zea mays
  Clone ID: MRT4577_27317C.1.pep
VARPSAQRAAQSPRLAPPPPSRQAAPPPSLHQPCVSSSSAR

SEQ ID NO: 289724 - protein, 58 aa, Zea mays
  Clone ID: MRT4577_27318C.1.pep
ACSHIQQLGSMLDGNNYHLCCKTCINHMYQQDEGHRSILMSSLRTSIRNTTTSISLYT

SEQ ID NO: 289725 - protein, 73 aa, Zea mays
  Clone ID: MRT4577_27319C.1.pep
MGGLANTHKSYAYFLHLQVKFMRTRASNSDYRVRMMLLNQDIYKSHTPRFRVGVRFTDMDMPVLIICVSIARD

SEQ ID NO: 289726 - protein, 63 aa, Zea mays
  Clone ID: MRT4577_2731C.1.pep
CAPALGVRTCPPNVPKPNVLSQTRPVHWLYAIGLKMNHACYCIIVYPALPSFSLLAVYSNNSL

SEQ ID NO: 289727 - protein, 71 aa, Zea mays
  Clone ID: MRT4577_27320C.1.pep
RVTILSSNSLERVNWEVIVVKDDLVNAFCLPGDKDVVFTAMLNKFRADAEVATVVGHEVRSLVCRLMCGLG

SEQ ID NO: 289728 - protein, 111 aa, Zea mays
  unsure (1)..(111): unsure at all Xaa locations
  Clone ID: MRT4577_27321C.1.pep
MSRNREREGRNTCMKFPRDWVRRDLGGGGFGLIGWKGPTSGPGNNGNRLTGXLFLYRIGQELGQVSKTPTRNSQVWLGLGTRDLGLWIXLTFGQXIGYKGRTEDYFEKRSG

SEQ ID NO: 289729 - protein, 92 aa, Zea mays
  Clone ID: MRT4577_27322C.1.pep
LLYPIFLAACYLAAATLARRAPTQRGLPPIPFPSRFTSFWPPPYHAQTTPISHLTHLRFYPLPLTSSSRTGFDWWLIFSLDEAHYPFIILID

SEQ ID NO: 289730 - protein, 99 aa, Zea mays
  unsure (1)..(99): unsure at all Xaa locations
  Clone ID: MRT4577_27323C.1.pep
MSEAVAILSLSASAVVEDVLRQHGCRLSDRDLASRRAEEAAGRRNEAAGWLRRTVGAVAARDLPEEPXEEEFRLGLRNGQILCGALNRVHPGAVPERWS

SEQ ID NO: 289731 - protein, 189 aa, Zea mays
  Clone ID: MRT4577_27324C.1.pep
FGTSSPAAIFQPAFLDLAFGAAFAVFLRLEMPRIWEIYPLGRVVHQFMNAFTDHRDSEILIVSHFSLLLGCALPKWMSSGLNDRPLAPFAGILSLGIGDTMASMIGYKYGVLRWSKTGKKTIEGTAAGITSVLAACSILVSLLASSGYILSQNWLSLLIAVTLSGLLEAYTAQLDNAFIPLVFYSLLCL

SEQ ID NO: 289732 - protein, 42 aa, Zea mays
  Clone ID: MRT4577_27325C.1.pep
SSLFAVCELNIMVETVHPLSRTQHHGGNLLYTSDWKERHFQA

SEQ ID NO: 289733 - protein, 131 aa, Zea mays
  Clone ID: MRT4577_27326C.1.pep
CLGPNPVYKAHHNTNYGHQSEVYTMDLCRSNLVLLGSGSVERIEEEDDGGSASRLIWEMFSLLMANLSPRSSQSLIRGLSVMFVCVALRSFRVVYSVCILLRGRSFCSERILWNGFTWNVSFICIKTDEQE

SEQ ID NO: 289734 - protein, 54 aa, Zea mays
  unsure (1)..(54): unsure at all Xaa locations
  Clone ID: MRT4577_27327C.1.pep
SGFSPPDPTPFXSRIPRMLKLGLSINQVEEAPKAYTNMPPLEDDPGENKMEEVA

SEQ ID NO: 289735 - protein, 79 aa, Zea mays
  Clone ID: MRT4577_27328C.1.pep
TRPKARDNRCLNEFIAMASRGVAGAAYSSSSLSSPSPLARLISRRGLAGAADGHGSAKVPLWKDPLSPSKWKEEHVSLP

SEQ ID NO: 289736 - protein, 43 aa, Zea mays
  Clone ID: MRT4577_27329C.1.pep
AGTALPNIDIPPWVLTRLKSIIRLSTTLPNHTLPARRPQPIFI

SEQ ID NO: 289737 - protein, 77 aa, Zea mays
  Clone ID: MRT4577_2732C.1.pep
MAVRSADVSFRCRMESSPLIIIIIIIHSEAKKKKKKKKKKKKKKKKKKKKKKKKPNLKDTKHTKKYNKHNRHQKKIH

SEQ ID NO: 289738 - protein, 53 aa, Zea mays
  Clone ID: MRT4577_27330C.1.pep
ACAAMAVIGSMVISVERLVCKHRLVKVHRVSVRYRISVQVLLTYNWYVDLYSV

SEQ ID NO: 289739 - protein, 73 aa, Zea mays
  Clone ID: MRT4577_27331C.1.pep
KNMKYIIVTVREHSEHQNRIGHLCIPYLTHIIHPRCCSNDAIAYIKLLRSTHTNPLLTQKFHYRGLHFITLRN

SEQ ID NO: 289740 - protein, 382 aa, Zea mays
  Clone ID: MRT4577_27332C.1.pep
MPQMPQVDLVCGASGAGAGAGDRKVSCETVIAGGSGDASPPPPPPPDPDFPPDSITIPIGDDAAFSELNPMYERDDSTKGSTNPKSAAAAVANPIVAAKTRSNSTRAAGGAPPPPASGTTFFGLPARIRPTFSRRRPSQSQSQSQSQGRILRDKRAGGEVEPRSPKVSCIGKVLSDRERHGRRRGWWHGVAAMFRCDGCARVARGASRNMAALEDDGVEQQQQQQAGVAGMRRFKSGRRAASWGDEALATAAVGDVDEGMEMPDSQDAEQWSRRPLSATDLGAELGLNLRNGFFSARLFSVSSSYRNAAARTIARPRPGFPAHRAPAPAAAPRAPAAPCAPAADTAARPPPPPTPQRARHRRRAPARFRNITLQGRCCQIFY

SEQ ID NO: 289741 - protein, 73 aa, Zea mays
  unsure (1)..(73): unsure at all Xaa locations
  Clone ID: MRT4577_27333C.1.pep
FLQHGYILLVSYVDSHRLSVWFPLHRTGLVRSMWLTRCGAFYVSYIACLPNMVVMAPADEPXLTHMVQRAAAD

SEQ ID NO: 289742 - protein, 69 aa, Zea mays
  Clone ID: MRT4577_27334C.1.pep
LGGRKVTCSFEDEVIRPGHERVIRPEGMPVPGRKDGARGDLRVKLEVVFPTELSDEQRAGLAEILRGSC

SEQ ID NO: 289743 - protein, 99 aa, Zea mays
  Clone ID: MRT4577_27335C.1.pep
GVQRVGDDLVLRAEVPLAGALTGWSLSFRLLGGRKVTCSFQDEVIRPGHERVIRGEGMPVPGRKDGARGDLRVKLVVVFPTELSDEQRAGLAEILRGSC

SEQ ID NO: 289744 - protein, 69 aa, Zea mays
  Clone ID: MRT4577_27336C.1.pep
RARIKKGLSQPFMFMIGQFQMTCLQSFFRLSRVGFLKATFLFSKEGFQDPLGALGWLTFKRTPLSLLTP

SEQ ID NO: 289745 - protein, 79 aa, Zea mays
  Clone ID: MRT4577_27337C.1.pep
KCCCRLLLLGMLWWCWFPVCVCVALPYCVPCPGLYFPYPLLLTGGCYPLKKNPWFFCGGKKKKKKKKKKKKKKKKIKIY

SEQ ID NO: 289746 - protein, 84 aa, Zea mays
  unsure (1)..(84): unsure at all Xaa locations
  Clone ID: MRT4577_27338C.1.pep
MGGCLAGEPDTANRIRLQGERQKMELTVTKLLTHVLVKKEMHILMVVLDTAGMTTILYKLNLGEIVYTHPXTIGFNAETVEYNN

SEQ ID NO: 289747 - protein, 64 aa, Zea mays
  Clone ID: MRT4577_27339C.1.pep
FGSSSCSPSCRTVEALPTGGPVGPRPPNQEGRAQTSDHRRPGPRLHVARAILTHAAAPRSRMTG

SEQ ID NO: 289748 - protein, 93 aa, Zea mays
  Clone ID: MRT4577_2733C.1.pep
GGFFFLARQLSPGSVLGFPSSPLLSSPKLCPPPFFEICVANLPPPFIFFGPGFFRGYHPPFFFVAPWARGLCCFPWFVRLVVVHPPWFDWLGV

SEQ ID NO: 289749 - protein, 83 aa, Zea mays
  Clone ID: MRT4577_27340C.1.pep
NREKRENVVTISPLPCPSPRPPPLGLQLVIVGVHRRPEIMWGWVVTRTADRRPLNSSSVVRRIHKSAPIVPAPFSSSSSVKSR

SEQ ID NO: 289750 - protein, 122 aa, Zea mays
  unsure (1)..(122): unsure at all Xaa locations
  Clone ID: MRT4577_27341C.1.pep
MNSGYPPYQQIPRARGYRQTPAKLDNPNPSPAMGGYTLKSQQVYACASSKCSPGVAAXANMRAPHFHLPAGPKKSLLDRIASDTDIYTRSLNGIVAAAAASVDAGAHCRNVGVVPSGMPRMY

SEQ ID NO: 289751 - protein, 244 aa, Zea mays
  unsure (1)..(244): unsure at all Xaa locations
  Clone ID: MRT4577_27342C.1.pep
MPTPPLRGAGLLLRICLFLCLSLRPRLASSEPDADKAALLAFLSGVGRGATARARINWSTTHLACSADGPGPGWTGVTCSADGARVVALHLPGLGLSGAVPPGTLGRLTALQLLSLRSNDLSGPLPADLLRLPALEGLHLHRNAFSGALPAALAGLTALQVLDLSFNAFDGAVPGALANLTRLVALDLSNNSLSGRVPDLGLPALRFLNLSNNRLDGTVPASLXRFPDAXFAGNXLTRPAPAQA

SEQ ID NO: 289752 - protein, 104 aa, Zea mays
  unsure (1)..(104): unsure at all Xaa locations
  Clone ID: MRT4577_27343C.1.pep
CXXVPXXFPYLVSRILEAWAXNHXVIXLFPCXXKLXYPLSQCPAADIXXAXXAXKVXKAXGVXXNEGELXXHXXIXXLRFKLPXAXXSRENXCXVPACXXNEXX

SEQ ID NO: 289753 - protein, 62 aa, Zea mays
  unsure (1)..(62): unsure at all Xaa locations
  Clone ID: MRT4577_27344C.1.pep
MAPKAEKKPAAKKPADDEPAAEKAPAGKKXKRSXRVSAGKSAANEGGYGNMGEIKGKSIVET

SEQ ID NO: 289754 - protein, 242 aa, Zea mays
  unsure (1)..(242): unsure at all Xaa locations
  Clone ID: MRT4577_27345C.1.pep
SLCSFSSVSSCRAQGSAVKIGTWGGDGGSPCDITVAPRRLESITIRWGKVLDWIAFSYRDQSGKLHTAGPWGGNGKGEGTETVXFFFLFFAFALTSRHEDPSIYIXTCCTQITLEASEYVTGVAWSVGPFKFKNVERCITSIKVVTNLRSYGPFGHGVDSTHHSLPVIDGSVVGMFARAGDFLDAIGFYVLPDALPALKPTTDPAEQEEKEKDSGHEQNGKAKSNQEENEDSKNEKDKPCLS

SEQ ID NO: 289755 - protein, 210 aa, Zea mays
  Clone ID: MRT4577_27346C.1.pep
SLCSFSSVSSCRAQGSAVKIGTWGGDGGSPCDITVAPRRLESITIRWGKVLDWIAFSYRDQSGKLHTAGPWGGNGKGEGTETITLEASEYVTGVAWSVGPFKFKNVERCITSFKVVTNLRSYGPFGHGVDSTHHSLPVLDGSVVGMFARAGDFLDAIGFYVLPDALPALKPTTDPAEQEEKEKDSGHEQNGKAKSNQEENEDSKKREDKP

SEQ ID NO: 289756 - protein, 150 aa, Zea mays
  Clone ID: MRT4577_27347C.1.pep
GMLGHPPRGFVAYWAPGPSLQGFRVFPGPDVGPCVVALRPPFRPSVSGFSDDPRFGALVPFPGSEERSEGSSGLRGPGGSLVLPGALGLAFGLAPGRCLNSFPVCPGPGRLPMFRSLVCCCQGSKVQTAFVGFLLFGPNSVTFFLFGLFW

SEQ ID NO: 289757 - protein, 158 aa, Zea mays
  Clone ID: MRT4577_27348C.1.pep
SARGLTLRAPSEQLESIFSKEPFAEPSIPDLDDPMEELSIDDIEIDDEVAVALAQAASSTSQGNKRTAVEEERAKLFEGSNSADKPRMRTQQEILTKYRFGGDAAAAAAHAKDKLMQRQEKLERISQQTAELQNGAENFASLAQELAKTMENKKWWKL

SEQ ID NO: 289758 - protein, 174 aa, Zea mays
  unsure (1)..(174): unsure at all Xaa locations
  Clone ID: MRT4577_27349C.1.pep
SLCSFSSVSSCRAQGSAVKIGTWGGDGGSPCDITVAPRRLESITIRWGKVLDWIAFSYRDQSGELHTAGPWGGNGKGEXGDGEFFFAFALTSRHEDPSTSCTCCTQITLEASEYVTGVAWSVGPFKFKNVERCITSFKVVTNLRSYGPFGHXVDSTHHSLPVLDGSVVGMFARA

SEQ ID NO: 289759 - protein, 88 aa, Zea mays
  Clone ID: MRT4577_2734C.1.pep
AHLSDDHHLSSNQLSWLLVSLPWLNLGRPTDHIIKDLRQLVGDNDLNHLGGGALALSNVLNSLVDQHAHPYAVSCVDQAFMHRRMHSY

SEQ ID NO: 289760 - protein, 140 aa, Zea mays
  Clone ID: MRT4577_27350C.1.pep
PGGEKKWACACPPPGVWKFWARSSSPPLGFSSPPVFAPWSFGSVCCSPSSAPSPGSFTRFNLFVPFTPPPPGTSLVTFSYHSQMARSPCFFGPCFCSPPLPFCCVPLFVLFSKLNPSFALLLPVNSFFESSHLGGFLPFF

SEQ ID NO: 289761 - protein, 45 aa, Zea mays
  Clone ID: MRT4577_27351C.1.pep
SNAFPFFRVQIVISLETSKIIQGIPHVFHYARIEMTKAIILLPCS

SEQ ID NO: 289762 - protein, 263 aa, Zea mays
  Clone ID: MRT4577_27352C.1.pep
IVAETSLMSLLRWSYKTGMEKSTSSSNGQVTLVNGSEFAIISLMASENDLRIPESLPCLHDKVLAAAAEALMSFSTDQRRKQNPAAGIIGGFIKGMKGKAEENAKMRESLTLRAPSEQLESIFSKEPFAEPSIPDLDDPMEELSIDDIEIDDEVAVALAQAASSTSQGNKRTAVEEERAKLFEGSNSADKPRMRTQQEILTKYRFGGDAAAAAAHAKDKLMQRQEKLERISQQTAELQNGAENFASLAQELAKTMENKKWWKL

SEQ ID NO: 289763 - protein, 136 aa, Zea mays
  unsure (1)..(136): unsure at all Xaa locations
  Clone ID: MRT4577_27353C.1.pep
SLCSFSSVSSCRAQGSAVKIGTWGGDGGSPCDITVAPRRLESITIRWGKVLDWIAFSYRDQSGELHTAGPWGGNGKGEGTETITLEASEYVTGVAWSVGPFKFKNVERCITSFKVVTNLRSYXPFXXHGVDSTHHQ

SEQ ID NO: 289764 - protein, 238 aa, Zea mays
  Clone ID: MRT4577_27354C.1.pep
MSCRAQGSAVKIGTWGGDGGSPCDITVAPRRLESITIRWGKVLDWIAFSYRDQSGKLHTAGPWGGNGKGEGTETITLEASEYVTGVAWSVGPFKFKNVERCITSIKVVTNLRSYGPFGHGVDSTHHSLPVLDGSVVGMFARAGDFLDAIGFYVLPDALPALKPTTDPAEQEEKEKDSGHEQNGKAKSNQEENEDSKNEKDKPGLVVVRFLLQKMNPNLCRISGCALVVSLFSYCSNYY

SEQ ID NO: 289765 - protein, 279 aa, Zea mays
  unsure (1)..(279): unsure at all Xaa locations
  Clone ID: MRT4577_27355C.1.pep
MVHREPAEAAAAAAAGGETSISTQPPSSSQQAAPPPAVLVYKVGYPPRRSLATEFTSTLRETFFHDSPLKQCKDQSVSTKLQMGLQLLFPVLGWGRTYSLSMFKGDLVAGLTIASLCIPQDIGYSKLAYLDPEYGLYSSFVPPLIYAAMGSSKDIAIGPVAVVSLLLGSLLQKEADHDKDREEYLRLAFTATFFAGITQAALGFLRLGFLIDFLSHAAIVGFMGGAAVTIALQQLKXVLGIKSFTKGTDIVFVMESGWGSIRHGWDWQTVAIAFTFLAF

SEQ ID NO: 289766 - protein, 63 aa, Zea mays
  unsure (1)..(63): unsure at all Xaa locations
  Clone ID: MRT4577_27356C.1.pep
VKLNSRKNLPMISVVLPVRXLXEVYKIQCIQXXYFSKVLGWNLVAGCIXTDVPCYGAISNGFV

SEQ ID NO: 289767 - protein, 63 aa, Zea mays
  Clone ID: MRT4577_27357C.1.pep
PSVPLPVPPSAGPGSRPHRRQHHPPPASQQAFVGLGLAPTVPPQLGEGNSKPRTKVLEMVVAS

SEQ ID NO: 289768 - protein, 131 aa, Zea mays
  unsure (1)..(131): unsure at all Xaa locations
  Clone ID: MRT4577_27358C.1.pep
GDPPPPKVPPKAPPGGLPGPPPPFWGPGGXVRDSPPGLPPXVQPLGTAWTPXKDGAPGVPPPCGQPRCRPYXPCPIPPSSPGPVFPSISQFGPRGFFFLKKGFCFGPPHVKWLFCPPVFFCCLLSPPFFFL

SEQ ID NO: 289769 - protein, 64 aa, Zea mays
  unsure (1)..(64): unsure at all Xaa locations
  Clone ID: MRT4577_27359C.1.pep
RTXXXRAHTLARATPTTGGTHRLRARNXPXARPPGARRHGSSTRPKQDASTHRKRAAKRTHTRK

SEQ ID NO: 289770 - protein, 43 aa, Zea mays
  Clone ID: MRT4577_2735C.1.pep
TLPFAEKDLVLVQVGQVCRHVKVLKVKAPNKNIQFYSIGTLLL

SEQ ID NO: 289771 - protein, 93 aa, Zea mays
  Clone ID: MRT4577_27360C.1.pep
MPPLSLGRQKQARSTCARLSPSGSRAVSCHCLRMVECGLVGYSFAVTEWRGRDQPQDLDFIDDCLFMLDELQECLLLAERLGPEWSSCKRCPV

SEQ ID NO: 289772 - protein, 95 aa, Zea mays
  Clone ID: MRT4577_27361C.1.pep
SRVWSVARAWSMLSATTVLLQQGGGLSDLSGLKSSASLPMRRNATSDDFMSAVYFRTHAVGTSGWPWRAPTDAKLKVAINGFGRIGRNLLRCWHG

SEQ ID NO: 289773 - protein, 92 aa, Zea mays
  Clone ID: MRT4577_27362C.1.pep
KKIESSRHNTSSLRQGSEFLTAGREENCVPSWWVCSSPAKSPRRMPGEMTDGGLGTWRRRRRSRSRCHERERESKRERTQGECDYAKRFFFF

SEQ ID NO: 289774 - protein, 112 aa, Zea mays
  unsure (1)..(112): unsure at all Xaa locations
  Clone ID: MRT4577_27363C.1.pep
PRRFVCKPPPPGVLSLANPGAHPHGFPFFFCPVGAPWLCGKPVVFGPVVXGIDVVKALQKVGPPHGSPPKVVKVPCFGPPPQIPLIWAGRPPPPRHRRPPPGPFLWVLIKWG

SEQ ID NO: 289775 - protein, 218 aa, Zea mays
  unsure (1)..(218): unsure at all Xaa locations
  Clone ID: MRT4577_27364C.1.pep
KKFLKTAVHSLIPIPQHILIRSDVLTDQRRSRNYITTFELNITHQWTAGTSSAAFWKHSITFAKKSIFYSSLWSEEYMSKSEHFPSSRAHTDLLGSIEQFVLQLVSRILEDRRGVSGSRMTARSRVTLSSDRLXVPIAVHSCAGGRLGFGDRCWRMGSSSRPSRRRPPCRRSIMSMCARGQGASVRRTVRSDWGARAVSLLVFRTYGENRNPGPAGLE

SEQ ID NO: 289776 - protein, 52 aa, Zea mays
  Clone ID: MRT4577_27365C.1.pep
PTSRASHASLGHRWHASAPCRAAPLPEQHRSTPDPWAAKAAWRKGHHHQPYS

SEQ ID NO: 289777 - protein, 65 aa, Zea mays
  Clone ID: MRT4577_27366C.1.pep
LLYPGHHMPFVPVGPMNPSYTAAFYRANKVVRSSLEILPGHSVGFFNSQNFPMRCTVLVRKKQKG

SEQ ID NO: 289778 - protein, 283 aa, Zea mays
  unsure (1)..(283): unsure at all Xaa locations
  Clone ID: MRT4577_27367C.1.pep
PGKRPRPPLPAALERRPRWXEDEEEAGLEDEEEATVTLSVEKDALECDICCLPFQSEVFMCKNGHSVCAKCCIRTNGKCWTCSERIGDIRCRPLEKLLAAATTSCMFKSNGCYDVISYLEKVTHEETCQRAPYKCPVHGCAYSGLRLGYHVAQDHGHDDDGLASVVFIYGKAVATVRKDEPFRVLLQRNTERVFLLLNGHDLLQGRSLSLLCLGPRFQDGVEVELKYKMEVSGGAPGALTLSASGTIPFARRLDGFQAKGFLFVPDAYWGSAGSISVTVRIYV

SEQ ID NO: 289779 - protein, 46 aa, Zea mays
  Clone ID: MRT4577_27368C.1.pep
CVRLIARNLSGKKIFSSEGWRARCLSGIHMSVRDYNVLTAKYTQHC

SEQ ID NO: 289780 - protein, 187 aa, Zea mays
  unsure (1)..(187): unsure at all Xaa locations
  Clone ID: MRT4577_27369C.1.pep
MGTGGVALVVAALAVVLVSSVWTALAHLVWRPYAVARAFARQGIRGPPYRVLVGNGKEVXAMRAATSGDTLDLASHDYIARVMPQYRAWVSLYGKVFLTWSGSTPALFVGSHDMVKRVLFDKAXLYGKTDPGPTILSLMGRGLVFTDGDDWSRHRRVVHPAFAMDKLKSMTGAMAACAAEVIRXWEA

SEQ ID NO: 289781 - protein, 119 aa, Zea mays
  unsure (1)..(119): unsure at all Xaa locations
  Clone ID: MRT4577_2736C.1.pep
PIFPPPPPPLGGKRXXRRTPTRGKNKRAGKGPPDQGXAPKGRTQTGGPTQGKGNSNNPRGPPRPXKGAAPEGNPXPGSPKKPQATRPPAXPGPRPSPGPPRPRATGTEGTTTARPKTEG

SEQ ID NO: 289782 - protein, 111 aa, Zea mays
  Clone ID: MRT4577_27370C.1.pep
FFSQQGPRPPGIVGGCPNFLFWGGRPPLNGVFLFGSWPGGHFPFFGGRGDKFFYLLLPGGGPPTFTPVGRGGVLFFCFGQKKKKKKKKKKKKKKKKKKKKKKKTKKKKKKR

SEQ ID NO: 289783 - protein, 65 aa, Zea mays
  Clone ID: MRT4577_27371C.1.pep
KKKKSPHPPQSVQKGVPKFVKTPFFPKNLFIMNPTCPPWFLRHPPPFYPDQTCGVFNFLFPPPLV

SEQ ID NO: 289784 - protein, 61 aa, Zea mays
  unsure (1)..(61): unsure at all Xaa locations
  Clone ID: MRT4577_27372C.1.pep
NEWIAGNVVITKASPVAIRPSELGRTPTPPPAVGGYTIVPLAASTVPATSFVRXMRALLXS

SEQ ID NO: 289785 - protein, 37 aa, Zea mays
  Clone ID: MRT4577_27373C.1.pep
GLITSITTCKTLHMITTPSIKLYLSAQPITVFQFITT

SEQ ID NO: 289786 - protein, 530 aa, Zea mays
  Clone ID: MRT4577_27374C.1.pep
MGNRASRHHRQAAEQQPATPTLPKPQPQIQPPPPPPPTQTQQYQQAPPQSQQKPKPAADVGAVGRVLGRPMEDVRATYTFGRELGRGQFGVTYLVTHSETGQRFACKSIATRKLVHRDDIEDVRREVQIMHHLTGHRNIVELRGAYEDRHSVNLVMELCEGGELFDRIIAKGHYTERAAASLCREIVAVVHSCHSMGVFHRDLKPENFLFLNNKEDSPLKATDFGLSVFFKHGETFKDLVGSAYYVAPEVLKRKYGAEADIWSAGVILYILLSGVPPFWAENEDGIFDAVLRGHIDFSSDPWPSISNGAKDLVKKMLRQDPKERLTAAEILNHPWIREDGEAPDKPLDITVIGRMKQFRAMNKLKKVALKVVAENLSDEEIMGLKEMFRSLDTDNSGTITLEELRSGLPKLGTKISESEIKQLMEAADVDGNGTIDYAEFISATMHLNRLEKEDHILKAFEYFDKDHSGYITVDELEEALKKYDMGDDKTIKEIIAEVDTDHDGRINYQEFVAMMRNNSPEIVPNRRRMF

SEQ ID NO: 289787 - protein, 595 aa, Zea mays
  unsure (1)..(595): unsure at all Xaa locations
  Clone ID: MRT4577_27375C.1.pep
MGGRASRHRAQPHDQSSHPPPRPPPKQQQQQQGQQHPSNRPNKPKQQQQPPPPRPPPPHQAPPASAAAPGAATVGRVLGRPMEDVRASYTFGRELGRGQFGVTYLATHKPTGHRYACKSIATRKLAHSDDVDDVRREVQIMHHLTGHRSIVELRGAYEDRHSVNLVMELCEGGELFDRIIAKGHYSERAAASLCREIVAVVHSCHSMGVFHRDLKPENFLFLNNKEDSPLKATDFGLSVFFKXCGCGFDLTDSPGXLDGFRPSIAKTSVYIWNNGNGIIHHFCCVLCIRYYPLSQIIGETFKDLVGSAYYVAPEVLKRKYGAEADIWSAGVILYILLSGVPPFWAENEDGIFDAVLRGHIDFSSDPWPSISNGAKDLVKKMLRQDPKERLTAAEILNHPWIREDGEAPDKPLDITVIGRMKQFRAMNKLKKVALKVVAENLSDEEIMGLKEMFRSLDTDNSGTITLEELRSGLPKLGTKISESEIKQLMEAADVDGNGTIDYAEFISATMHLNRLEKEDHILKAFEYFDKDHSGYITVDELEEALKKYDMGDDKTIKEIIAEVDTDHDGRINYQEFVAMMRNNSPEIVPNRRRMF

SEQ ID NO: 289788 - protein, 302 aa, Zea mays
  Clone ID: MRT4577_27376C.1.pep
MDDAGDTFKDLVGSAYYVAPEVLKRHYGAEADIWSAGVILYILLSGVPPFWAENEDGIFDAVLHSHIDFSSDPWPSISNGAKDLVKKMLRQDPKERLTAAEILNHPWIREDGEAPDKPLDITVISRMKQFRAMNKLKKVALKVVAENLSDEEIMGLKEMFRSLDTDNSGTITLEELRSGLPKLGTKISESEIKQLMEAADVDGNGTIDYAEFISATMHLNRLEKEDRILKAFEYFDKDHSGYITVDELEEALKKYDMGDDKTIKEIIAEVDTDHDGRINYQEFVAMMRNNTPEIVPNRRRMF

SEQ ID NO: 289789 - protein, 53 aa, Zea mays
  Clone ID: MRT4577_27377C.1.pep
KKKKKKKKKKKKKKKKKKKKKKKKKKKFVPRPRHPRGKIMKISIKLGAGGASI

SEQ ID NO: 289790 - protein, 89 aa, Zea mays
  Clone ID: MRT4577_27378C.1.pep
IDSHAGGRRLTSQQRDDRVKILIYRPGQFCGSIDRSVVRQLIKLDIYIGDSSNELLAKWVPPSSFTASGSPSSSHCPRPWSLSGTETRG

SEQ ID NO: 289791 - protein, 56 aa, Zea mays
  Clone ID: MRT4577_27379C.1.pep
LTNETVTIVTHPFQFQASCTCLRRLRISPSMTLIKQTIPSFSMVGGEAVHHIFIYQ

SEQ ID NO: 289792 - protein, 86 aa, Zea mays
  Clone ID: MRT4577_2737C.1.pep
SFLGLYKRKNSLAGKPKKKSASTISTSSNPTALQQAFLITLANICTMRHSTGADGRQISPLSADRAFCAPEQRLVHEACQGPTEQG

SEQ ID NO: 289793 - protein, 96 aa, Zea mays
  unsure (1)..(96): unsure at all Xaa locations
  Clone ID: MRT4577_27380C.1.pep
MKGKEEDVRLGANKFSVRQPIGTAAQGAADDKDYKEPPPEPLLTPVXAVTWSFYRSGMAEFDHRLPVVSLKMIGEKDDDRSTSKGATAGIHGMPGY

SEQ ID NO: 289794 - protein, 59 aa, Zea mays
  unsure (1)..(59): unsure at all Xaa locations
  Clone ID: MRT4577_27381C.1.pep
KSRLHDSYKLVRLFCENFFDPPTKNLTTMNTGAPTLLRGFDDFXYQPIKQIIXSCINDQ

SEQ ID NO: 289795 - protein, 64 aa, Zea mays
  unsure (1)..(64): unsure at all Xaa locations
  Clone ID: MRT4577_27382C.1.pep
YLMVRDIILFSRYFEWVAQLQKVSLPQRKGYGVTDCSLVSRXVELRETPKNLLLLGDKGALYPV

SEQ ID NO: 289796 - protein, 53 aa, Zea mays
  Clone ID: MRT4577_27383C.1.pep
DRNLGYLTAFPNPLFKGGLNFFSLGPPQGLLTSCNLFSLDNLFLTFPGKIGLI

SEQ ID NO: 289797 - protein, 229 aa, Zea mays
  unsure (1)..(229): unsure at all Xaa locations
  Clone ID: MRT4577_27384C.1.pep
MQCRGAARSSSWASSSPPPPPPPFRPSRPSVSCPRPWSDHESPGLRSPLPFVHPCTRSLALLSRACDNNWATAAAAAAALRQVRRTGVLPWLQAKIVDPVLQVIRRGAEPKQLAFSAALGVTIGIFPICGTTVILGAVAVAMLGSRCNAVTLMVLNLAATPIELSLIVPFLRLGEAVTGSGHFPLTADALKNVLTGHASXDVLMSIVHAMLXWLIAAPIVLVVLYAVSF

SEQ ID NO: 289798 - protein, 175 aa, Zea mays
  unsure (1)..(175): unsure at all Xaa locations
  Clone ID: MRT4577_27385C.1.pep
MGSLLTRTGVLPWLQAKIVDPVLQVIRRGAEPKQLAFSAALGVTIGIFPICGTTVILGAVVVAMLGSRCNAVTLMVLNLAATPIELSLIVPFLRLGEAVTGSGHFPLTADALKNVLTGHASKDVLMSIVHAMLGWLIAAPIVLVVLYAVSFPCFKVLVNRFXGIPSSPRTPIKAV

SEQ ID NO: 289799 - protein, 160 aa, Zea mays
  unsure (1)..(160): unsure at all Xaa locations
  Clone ID: MRT4577_27386C.1.pep
HGSTAKIVDPMLQVMRRGAEPMQLAFSAALGMTIGIFPLXIVPFLRVGETITGSGHFPLTDNALKNVLTGHASXDVLLSIVNAVXTTCLQSVLLMHRIGARFLLCCDIDIIAIVDNXLGWLIAAPFVLAVLYAVSFPCFKVLVNRFGSIPSSPRTPFKAV

SEQ ID NO: 289800 - protein, 72 aa, Zea mays
  Clone ID: MRT4577_27387C.1.pep
QIYLGSPRGLHKLISRQIFFWGKNCCFKPLKLSDKKSGKIPQKSFVVFKNEKNIAGYVNGFYSRTPLSVKQV

SEQ ID NO: 289801 - protein, 327 aa, Zea mays
  Clone ID: MRT4577_27388C.1.pep
NFAESNRLGEGGFGAVYKGILRDGQEIAVKRLSQSSGQGIQELKNELVLVAKLQQKNLVRLVGVCLQEHEKLLVYEYMPNRSIDTILFDPERNKELDWGTRFKIINGIARGLQYLHEDSQLKIIHRDLKASNVLLDSDYTPKISDFGLARLFGGDQTREITSRVVGTYGYMAPEYAMRGHYSIKSDVFSFGVLVLEILTGRRSSGSFNIDQSVDLLSLVWEHWTMGTIAEVMDPSLRGKAPAQQMLKCVHIALLCVQDSPVDRPMMSTVNVMLSSSTSSLQAPLKPVFFIPKSGYYSTVYSESYPTASQTTGAVSPNEVSITELEPR

SEQ ID NO: 289802 - protein, 80 aa, Zea mays
  Clone ID: MRT4577_27389C.1.pep
INRDSVETMIGRMFDNISSVKSAYIQLQEDRSRYDPDEIQGADKLVIEELTDLSELEHAYREEHPKPIAASPQDSRLLSE

SEQ ID NO: 289803 - protein, 81 aa, Zea mays
  unsure (1)..(81): unsure at all Xaa locations
  Clone ID: MRT4577_2738C.1.pep
PXRPTHPXEKKILLYPFYFLKQKINKYGAIFKKKKLQNKKKKKTIPNNWAPPSKGSNLPSPSFQLFTFFLGSPKSNPLPPF

SEQ ID NO: 289804 - protein, 90 aa, Zea mays
  Clone ID: MRT4577_27390C.1.pep
NNQIVAEDKLIPYSIRYVPTSCPGRKADSRASGWATCRGTGTGTAAAGPSRRRTRPPAAPRRWSPATTERGLPLRRQPPPPRPGRRVRGR

SEQ ID NO: 289805 - protein, 65 aa, Zea mays
  unsure (1)..(65): unsure at all Xaa locations
  Clone ID: MRT4577_27391C.1.pep
NRHCRGSLEVPHKARYCLVVSRPVIEKRVHPIFYGSLFNHSPVLFSPQRVFHSFSVTSXCFPGGK

SEQ ID NO: 289806 - protein, 143 aa, Zea mays
  unsure (1)..(143): unsure at all Xaa locations
  Clone ID: MRT4577_27392C.1.pep
PRVRPRVRTMQKVLVYIVTMSSNFMDLEPNTTRISQFILNSSRHTLSSNYLATVAPNTSKSMVFDRNWQKKAIVSVMEAGGVNWLVELLRVIRRLNLKEQWTDLSLHXITLYSLKSTISENVRAQNHFRSIGGTGGLLNGLGL

SEQ ID NO: 289807 - protein, 162 aa, Zea mays
  unsure (1)..(162): unsure at all Xaa locations
  Clone ID: MRT4577_27393C.1.pep
VPVQHGGACVXQRQCQFRRQSAEPGAGAEERRLGHEPGAGSRPNRCLCGHRDDVLARAAGRRDTCAACSNAPFSPFSNQEFNDAIHVNPPASVGRSRCRHGGADRARGRSSTQGRCRDLVYGAGQHVIRRRLHRTRCGQDQFHPGPLLPAAHIRCVDLRTGT

SEQ ID NO: 289808 - protein, 64 aa, Zea mays
  Clone ID: MRT4577_27394C.1.pep
LGNFPKGLPVGVQRVAAYQGHRSVFSETPKGLLVFGGPFFPCLPRTVVWCFKKFLHYCYPPHKY

SEQ ID NO: 289809 - protein, 59 aa, Zea mays
  Clone ID: MRT4577_27395C.1.pep
KPWKVCFLCVCGTSVLNNIGCYCCIINRFSCIPIFQMCRCLMGFQRKKTPKKILGRPKM

SEQ ID NO: 289810 - protein, 124 aa, Zea mays
  unsure (1)..(124): unsure at all Xaa locations
  Clone ID: MRT4577_27396C.1.pep
RSLPSETPSARAVVSLCTIAVRKNKRISNGKNGGKKKTVDPFSKKDWYDIKAPXVFNVRNIRKTLVSKTQGTRIAFXGLNHKLFXVCLTDLYXTKIXAYRKIRFQSEXIQCRNLHTNFLGFFFT

SEQ ID NO: 289811 - protein, 57 aa, Zea mays
  Clone ID: MRT4577_27397C.1.pep
FTDLHNYINMGGVFDRHMGELQMLVENSEILFEAFNLKTRRDTSILTIGQSLEDASL

SEQ ID NO: 289812 - protein, 77 aa, Zea mays
  unsure (1)..(77): unsure at all Xaa locations
  Clone ID: MRT4577_27398C.1.pep
HSGPGVAPGDGTGHXGELGKPPHTKQAIQIGGRTGCKTAVCLLIRRASPLSVARPIGNLFAQGVSRCSQKKKNTTPQ

SEQ ID NO: 289813 - protein, 90 aa, Zea mays
  Clone ID: MRT4577_27399C.1.pep
DFEVIQFPLRMRDWLKNILMQLYEANSEHAGYLNEKQRNKVKKIYLDEKRLLAGDHPIDLLLRDFKKNYHMYVYPVHWQFSELDQHPMDR

SEQ ID NO: 289814 - protein, 106 aa, Zea mays
  unsure (1)..(106): unsure at all Xaa locations
  Clone ID: MRT4577_2739C.1.pep
ATETKQKSILYDERSVHKVXPITKHICLVYSGMGPDYRVLVHRARKLAQQYYLVYQEPIXPTAQLVQRVASVMQEYTQSGGVRPFGVALLICGWNDGRPYLFQSDP

SEQ ID NO: 289815 - protein, 51 aa, Zea mays
  unsure (1)..(51): unsure at all Xaa locations
  Clone ID: MRT4577_273C.1.pep
GGLFMVQRGGTVVFLPPPPLEKLVCQMYVLTIEIIGYCIXSLSINKNPLAC

SEQ ID NO: 289816 - protein, 351 aa, Zea mays
  Clone ID: MRT4577_27400C.1.pep
MSHPSHVKKGMPYVRLGKSGLKVSRIILGCMSYGSKEWQDWVLEEEEAFRHIKAAYDAGIQTFDTANVYSNGVSEIILGKAIKKLNIPRNDIVIMTKVHGAVGRAPGVNFLKSKENPEEVGYVNQRGLNRKHIFESVEASLERLQVKYIDLLQCHRFDNDTPIEETMQALHDVVQAGLVRYIGMSSCWAWQFHAMQNYAINNKLTPFISMQNQHNLVYREEEREMFPTCKYFGVGMIPWSPLARGFVARPLGQQTVRGGCDMFINQYDKNHPNNRKIVERVEEVAKKMNISMAQVAVAWTLQKDGVAAPIVGTTSLDNLKDIIGGVNVKLSEEDVAYLEELYQPQAIIGHA

SEQ ID NO: 289817 - protein, 281 aa, Zea mays
  Clone ID: MRT4577_27401C.1.pep
CHLNPQSTTTDTCSVSLPIHVANSSSPPANPCPPYPMVLQQMVRLKVLDLLISVLKEFLVLKGEAASAVHGKEGGDDPVLQAIAASLLQRKWKEFKQSDESWKEAPRNFVNLGGIDEDISAMVGILKRGLGVGCIHSWLSSNQMQRATATGGLPGAHMVATGQFRTPAMNAMVQEAHRHLAREASAHDAGTSIVCKRAVELLDGINKRFDLWCKLDQELPRTNQPSPHQEEGHESRDLTAVLRGDINRARQHDIYLAADHAIKQWRSFLTCVEKTHLKRDI

SEQ ID NO: 289818 - protein, 104 aa, Zea mays
  Clone ID: MRT4577_27402C.1.pep
GPKFFLLNLFFLLRVFQGAPLGALCCFFSRGGKNPGVFFGPFKKNGVNGAQSLFPSGFWNPPQKVFFFSKNQKKGVVWARFYFLTGLFFLVKLGGAWFAPLETK

SEQ ID NO: 289819 - protein, 125 aa, Zea mays
  Clone ID: MRT4577_27403C.1.pep
MVATGQFRTPAMNAMVQEAHRHLAKEASAQDAGTSIVCKRAVELLDGVNKRFDLWCKLDHDLPRTNQPSLPQKKGHEFRDITDVLHGNINRARQHDIYMAADHAIKQWRSFLPSVEKTHGHGPDK

SEQ ID NO: 289820 - protein, 72 aa, Zea mays
  unsure (1)..(72): unsure at all Xaa locations
  Clone ID: MRT4577_27404C.1.pep
ADLSYPSDPIRALGRGEYVWGRVSXPWHRCPHLTLSWTCRRILPPLAVHSTGDEPYSYWCANNVGPSDNRYG

SEQ ID NO: 289821 - protein, 131 aa, Zea mays
  unsure (1)..(131): unsure at all Xaa locations
  Clone ID: MRT4577_27405C.1.pep
CSGFHQIKMAEGEEYKTAFKSHNGHYEYNVMPYGVIGGPATFQTVMNVILEPLLHKCVVVFIDDILIYSKTWPEHLXLEYIKAVLSILQDNKFHVKLSKCAFAKSQISYLGHIGCVWFPGLAEAWLELELG

SEQ ID NO: 289822 - protein, 46 aa, Zea mays
  Clone ID: MRT4577_27406C.1.pep
VRNARNSARGTILYFSPKTSAVPSNHVKDKGSNNLLIEELCYGRAL

SEQ ID NO: 289823 - protein, 85 aa, Zea mays
  Clone ID: MRT4577_27407C.1.pep
SSTNATINNSFTNNSTQPAVKGVHGQSLDYIRSSLILLSFIRKGRARARAAVSTVVLRGHAQRRAHPGGVRLRSGIIRGLGLGLC

SEQ ID NO: 289824 - protein, 164 aa, Zea mays
  Clone ID: MRT4577_27408C.1.pep
KAFLNPPKVFPSPKKFGQGKKPGKGGPPFWKSLGLGFQAPRGAIEGAPLAKKSPFPGTVFFKGRIFVGASPRGKMNRTFLVCRNPPPFVKKTPRVGKRASHISGPIFPRFRVKEGGPVLLGPGRPPSKTGGVKVVKVLPPGSPPAGKKALPPPRGYRLCSPSSL

SEQ ID NO: 289825 - protein, 105 aa, Zea mays
  unsure (1)..(105): unsure at all Xaa locations
  Clone ID: MRT4577_27409C.1.pep
TLVRVYNEVRGDHPMFEGALIMRKGAVAFDICRAICGDWDRQFKYALVRGRSAEHSPRCVGINLRVXDEDVIQLVKKKLWPFDFGDLYKHCMIIKKKKKIKVLDR

SEQ ID NO: 289826 - protein, 80 aa, Zea mays
  Clone ID: MRT4577_2740C.1.pep
NSARGERTSLEFFFFFFFFFFFFFFFFFFLLRPAQNNHRVLQNYAANPAAFTFTCQVLNYKVITTSKRGAKSPPPSRLLV

SEQ ID NO: 289827 - protein, 175 aa, Zea mays
  Clone ID: MRT4577_27410C.1.pep
MASKAIRRRPTEKERERHMETTMPESVTAPLLGNSAQGNKSEGYEPIPDFWDGKSRECLHWVHIVSTFITQSARKIVNAISEFGSFLARFFGCSRAPQSSQNAQTMLIHLSPLQEERLKFLRQRLNVPFDCSAVKHQDALKELWRLAYPNRELPPLKSDLWKEMGWQNSDPATDF

SEQ ID NO: 289828 - protein, 140 aa, Zea mays
  Clone ID: MRT4577_27411C.1.pep
PNMLLLSALRPTLKSLTPITQIHLTLIRRIRRRNQHLITLMEISIMTERTIRSSLNQATMNYNGHKRTTNRNLGRHRPRDLMRDELRRNTLNITSMTMRLTITSTIRLNKSPTSIPIRIMLSSVESGVFLGQAHKSAQRS

SEQ ID NO: 289829 - protein, 84 aa, Zea mays
  Clone ID: MRT4577_27412C.1.pep
LLLLRAGESVCVHRGGTLSGAAEARTMDTQKDVQPPKQQPMIYICGECHTENEIKSRDPIRCRECGYRIMYKKRTKRLVVFDAR

SEQ ID NO: 289830 - protein, 63 aa, Zea mays
  Clone ID: MRT4577_27413C.1.pep
QPTSGTAAKALVTAQGPRATFPRQRVRCSRLQIPQSAQPASSAAALISPSLYTEPTKLQRGRN

SEQ ID NO: 289831 - protein, 79 aa, Zea mays
  Clone ID: MRT4577_27414C.1.pep
SPSPFTRIIQAKKFFSCPMVPIHNLQASTWKGFSNLLAVTNYTHTHQNVHSQSCDALKRLDILLDVILNPHYQFLPLVL

SEQ ID NO: 289832 - protein, 80 aa, Zea mays
  unsure (1)..(80): unsure at all Xaa locations
  Clone ID: MRT4577_27415C.1.pep
LPVLNSIEIDAQNEWSALPNGRSGLSNXACVAIQCLCMYAYIVATAVVVREAPMFTSFVGRMEAIVADAKRHYRFTTTGG

SEQ ID NO: 289833 - protein, 57 aa, Zea mays
  Clone ID: MRT4577_27416C.1.pep
IRLPFAVNMGPVLLSSFVYYLCIFQVHRYVEGLCWAMRYYYQRVCSWQWYVNIDHLL

SEQ ID NO: 289834 - protein, 60 aa, Zea mays
  Clone ID: MRT4577_27417C.1.pep
YILQLHRCHSKARCHQCYKAVRTFNTLLVEKIFHRIVMVNHLQTVGLHVFCSNLIVKLTR

SEQ ID NO: 289835 - protein, 51 aa, Zea mays
  Clone ID: MRT4577_27418C.1.pep
RLKTRANHGNITLLVSAYAKIVQSYCRWLRLIEPRATVSKDVLIYMPVLPC

SEQ ID NO: 289836 - protein, 79 aa, Zea mays
  Clone ID: MRT4577_27419C.1.pep
FVCSPYGPTSSLPHVYGPLYLTLLLYISTSNLLTSKPLLTMRPCYRPTKPSPLTSPTRRWGTNNLAELPPHPHRGLESN

SEQ ID NO: 289837 - protein, 182 aa, Zea mays
  unsure (1)..(182): unsure at all Xaa locations
  Clone ID: MRT4577_2741C.1.pep
MAKLMNKLVDSFEHDEILDVGCVRAVLAELVLTFLFVFTGVSAAMAAGKDRSFSPFMKRTWLCTRAGSDGKPGDAMPMATLAAVAIAHALAAGVLVTAGFHVSGGHLNPAVTVGLMVRGHITKLRAVLXVAAQLLASSAAYXLLRXLRGXLVTPWLALGWVFSPVLGLGVGGVLTFLPAFGP

SEQ ID NO: 289838 - protein, 92 aa, Zea mays
  Clone ID: MRT4577_27420C.1.pep
PPSALCGSLRLLGPLRLTLSRGIPERAAAEIASIWGLVVGEETEERGMRICLDLNLRSRSRAAALFFFFFFFFFFFFFFFFFFFYIVSNHII

SEQ ID NO: 289839 - protein, 66 aa, Zea mays
  Clone ID: MRT4577_27421C.1.pep
PPFLLRFFPSLLLSSPSPPASPLSLLRDHGHASHDSLSLRRPSFLLRFFIPSLLSTAGMVLATLAS

SEQ ID NO: 289840 - protein, 167 aa, Zea mays
  Clone ID: MRT4577_27422C.1.pep
EASKPLIASGAVTCHVSSLLGAARRRRCGSSWLAWRGPCLLCLTRTRMAPPLPISRGSSAGALAPACRSASGARPGPGVPGIPAARGRIGGGGLAGSSCHGWRGRGLRRAAREMRAAAAAMTAARRERISGGGRTGGAGSSCHGWRGRGHGEATRGTRAATGTTAAR

SEQ ID NO: 289841 - protein, 249 aa, Zea mays
  unsure (1)..(249): unsure at all Xaa locations
  Clone ID: MRT4577_27423C.1.pep
MVVSLVLPFALLAGILLLSGHALAGPETAAEPGEMVLTLDAGNFSEVVAKHQFIVVEFYAPWCGHCKQLAPEYEKAAAVLRDHDPPLVLAKVDAYNERNKEIKDKYQVHAYPTLKIIENGGKDVRGYGGPRDADGIVEYLKKQVGPASVELSSAEAAQASIGDKGVTLVGVFPEFAGVEYEMFMAVAERKRSDYDFFHTSDASIXLPRGDGAIRGPXVRLFKXFDELFVDSQDFDTDALEKSXEVSGFP

SEQ ID NO: 289842 - protein, 285 aa, Zea mays
  unsure (1)..(285): unsure at all Xaa locations
  Clone ID: MRT4577_27424C.1.pep
EAGRDIVRPRPPSPQRSDTMSMLLQFLFLSLILLAASKXGGDGQQFAYSGFSTSDLVVDGATTITSNGLLELTNGTDQQTGHAFYPTPLRFTRSPNGTEXFTGALPGQFLGLTDIRNDGNASNHFFTVELDTIENKEFGDINANHAGANVNGLRSLNSSSAGYYADGDVDAGEFHNLSLISREAMQVWMDYDATASSITVTMAPSKAARPERPLFTATHNLTGVVTDAAYVGFSSATGTINTRHYVLGWSFAMNGPAPAIDVSRLXQLPRMGPEPVSRALEIVLP

SEQ ID NO: 289843 - protein, 31 aa, Zea mays
  Clone ID: MRT4577_27425C.1.pep
KLNIHNYINSSTHTKLDLYIGLLNKLSPKRT

SEQ ID NO: 289844 - protein, 241 aa, Zea mays
  Clone ID: MRT4577_27426C.1.pep
VPSEPAGDLCLTAIRYHVHASTVPLSQPHPTRRLHYTGGDGQQFAYSGFSTNDLVVDGATTITSNGLLELTNGTDQQTGHAFYPTPVRFTRSPNGTVQSFSTSFVFAILSVYTDLSAHGMAFVVAPSRNFPGALPGQFLGLTDIRNDGNASNHFFTVELDTIENKEFGDINANHAGANVNGLRSLNSSSAGYYADGDVNGGEFHFHNLSLISREAMQVWMDYDATASSITVTMAPSKAARP

SEQ ID NO: 289845 - protein, 62 aa, Zea mays
  Clone ID: MRT4577_27427C.1.pep
RSSFFFFFFFKIQRYIFLRKQVLSLSLALTMQTYLTLIHHTDKHRPHIYRTNKLCQHGRLRF

SEQ ID NO: 289846 - protein, 47 aa, Zea mays
  Clone ID: MRT4577_27428C.1.pep
GRWAGRVGGRVGGRVGGAQAQADSSGTDTGLVQPIVYRPSKTTCRLC

SEQ ID NO: 289847 - protein, 121 aa, Zea mays
  unsure (1)..(121): unsure at all Xaa locations
  Clone ID: MRT4577_27429C.1.pep
CDELLHSLTGFPESTTSRQGEQGQWASXSALETVAEVWSPTQTRGRAQGMAGNTSASLERIEDGGGREGGDIPDLIHAHLHRNLDLTEKVVGHGPHLRLEGVPSRLAVLAAGTGGARRIAF

SEQ ID NO: 289848 - protein, 125 aa, Zea mays
  Clone ID: MRT4577_2742C.1.pep
MQVTPVHALGRGISPMQGLVMEVILTFSLLFVTYAMILDPRSLVRAIGPLLTGLIVGANSLAGGNFTGASMNPARSFGPALATGDWTNHWVYWIGPLLGGPLAGFVYESLFLVQKMHEPLLNGEI

SEQ ID NO: 289849 - protein, 65 aa, Zea mays
  Clone ID: MRT4577_27430C.1.pep
KRLQLRGGRSAQMRAELGAEDASGSGRAHGEWNQRRTPTGSRRPEPSRKRRIAVEGRTASGIGSR

SEQ ID NO: 289850 - protein, 176 aa, Zea mays
  unsure (1)..(176): unsure at all Xaa locations
  Clone ID: MRT4577_27431C.1.pep
TQPLWLSSTMALSSTCFVGKAXNVPSASALSSRLXVTSAHRRVAEGQVQLAASGXSCWYGPDRVLYLCPLSGEAXSYLTXEFPGDYCWDIAXLSGDPEIFAENRXLEVIHSRWAMLGALVCVFPXLLARNGVKLGXAVWLKAWSQIFSEGVLHYLVNPRLIHAYSILAIWAVMSCS

SEQ ID NO: 289851 - protein, 45 aa, Zea mays
  unsure (1)..(45): unsure at all Xaa locations
  Clone ID: MRT4577_27432C.1.pep
ALKRGQGVVVPSRVPLLTILVAFGTSALGIVYGTLXDSWDPDKER

SEQ ID NO: 289852 - protein, 43 aa, Zea mays
  Clone ID: MRT4577_27433C.1.pep
CHKITLVRSCNKPLQNVHYQNMHKSDNVVFLTHVWMTTRWIGA

SEQ ID NO: 289853 - protein, 129 aa, Zea mays
  unsure (1)..(129): unsure at all Xaa locations
  Clone ID: MRT4577_27434C.1.pep
DLRIPCFDGALKQTSSLPAFSSSPSLPPRTTGGRKSAPATGALTRPXRFLPETELLPDTHKHRKNTELLITELICQGVTHSIIDELLMDLHFPSFRVSDLQEGGEVLLVGLYYYNSLCLILFKGATTPA

SEQ ID NO: 289854 - protein, 92 aa, Zea mays
  Clone ID: MRT4577_27435C.1.pep
SSFLARHPRQSVTSLRSVPHRVARHLLASPGWSVHDAPHSRIGLGGQRSNQQVSARPLGHSDVMRCKEKFALAPSARKQEASARSRSLSCRR

SEQ ID NO: 289855 - protein, 192 aa, Zea mays
  unsure (1)..(192): unsure at all Xaa locations
  Clone ID: MRT4577_27436C.1.pep
GIRREESQRRSSPPGEGSLEHNEDECHDTYGPILCINNCGFFNSAVTMNMXSICHEEMITEQELAMLDVSSIDSITNENYRLHGXTGAGMNTATCAAQTEMPTMNVQQPDDAARPSSGGGGDLHRMKVWTNRRSACRKRVGITAFNCPSAKLYCALHRYSDKHEXKIYYRTAAMDGIADASPMDNAHKLYKI

SEQ ID NO: 289856 - protein, 40 aa, Zea mays
  Clone ID: MRT4577_27437C.1.pep
CGYISVHFSSSFLLYASLVFVCQVVILSCKFTAVVLSDAG

SEQ ID NO: 289857 - protein, 105 aa, Zea mays
  Clone ID: MRT4577_27438C.1.pep
QGPETQTTTKKNNPGKGRGSTMATKTLTKTRKKRGKFGDQIKHQQKHYPWENHRQKHHSIPHSSAPGTAPRKGRQLGRHPGQAALWGKKSHKNWPHRQSKQPRRE

SEQ ID NO: 289858 - protein, 128 aa, Zea mays
  unsure (1)..(128): unsure at all Xaa locations
  Clone ID: MRT4577_27439C.1.pep
AAAXTTARNQWANKGFGSXILSGGQQDRGAADEPDGEEDDDYKHMTDAMCRVYSNAPREFTIIDRGRRNSVCLHRKGFEELYVFSPGSQYQWYGKYAYVVVGPAMLEPVMLKPGDTWRGAQYLRNPNL

SEQ ID NO: 289859 - protein, 255 aa, Zea mays
  Clone ID: MRT4577_2743C.1.pep
MAKLMNKLVDSFEHDEIPDVGCVRAVLAELVLTFLFVFTGVSAAMAAGSDGKPGDAMPMATLAAVAIAHALAAGVLVTAGFHVSGGHLNPAVTVGLMVRGHITKLRAVLYVAAQLLASSAACVLLRFLSGGMVTPVHALGRGISPMQGLVMEVILTFSLLFVTYAMILDPRSQVRAIGPLLTGLIVGANSLAGGNFTGASMNPARSFGPALATGDWTNHWVYWIGPLLGGPLAGFVYESLFLVHKTHDPLLNGEI

SEQ ID NO: 289860 - protein, 61 aa, Zea mays
  unsure (1)..(61): unsure at all Xaa locations
  Clone ID: MRT4577_27440C.1.pep
RGPVPDFPHASRRNDISGGGGSQAGEGEGPREGAPAMAHLTXYRNYGKTFKTPTRSYEKER

SEQ ID NO: 289861 - protein, 55 aa, Zea mays
  Clone ID: MRT4577_27441C.1.pep
NSSGNFRVRESPRFSPPRAGSHRSGRLPAPCRGVCACHPLSSTTTLRHREVDSKR

SEQ ID NO: 289862 - protein, 113 aa, Zea mays
  Clone ID: MRT4577_27442C.1.pep
KRHRKSGTPCSALINQRRDQLNARPHGPHAHVDAAEQTQSEPQETGFQAEETTTDGGDTSAAAVLDVTKASAGVRFLHEYWNGRRVDDGFPSCCRYLYKLVAGDVSDVPRPGR

SEQ ID NO: 289863 - protein, 87 aa, Zea mays
  Clone ID: MRT4577_27443C.1.pep
WENGYRLAPCNKAVGVAGILTTKLVTFPVPNALAFCPFSFFPSAGSPFYPLNLKIRNRFRVTGLRFMGPRPLKNEIVNGVSDRPVGH

SEQ ID NO: 289864 - protein, 209 aa, Zea mays
  unsure (1)..(209): unsure at all Xaa locations
  Clone ID: MRT4577_27444C.1.pep
MSAAVEEQMVVKAIREECPWESLPKRLQSTLHTKDEWHRRIVDYCIRKRLQWNTCFARRVYREGEYYEEMMRYLQRNLALYPYHLADYICRVLRISPFRYYCDILFETMKNEQPYDSIPNFTAADALRLTGIGRNEFIDTMNKCRSKKLMWKLNKSIAKDLLPTQPVDFPIXAWXWGVCLVNFTLERVKKLSEEEXSTIDKICKEEANS

SEQ ID NO: 289865 - protein, 62 aa, Zea mays
  Clone ID: MRT4577_27445C.1.pep
SHAWTYARSDRKYTGVSTFGALTHMSDPTYAHSADGLPPYHVEGATDLHSRRWRSGPCGART

SEQ ID NO: 289866 - protein, 49 aa, Zea mays
  Clone ID: MRT4577_27446C.1.pep
PPALVGAGSASHESSSCIDSSDTHLYAPMAAAAAGGVDSVGGELGECAE

SEQ ID NO: 289867 - protein, 98 aa, Zea mays
  Clone ID: MRT4577_27447C.1.pep
MKPSYDTPQAKTVFLYNKSNAEILLPHHKSTSIDGGEKKAKKKAKKSVETYNIYIFKVLNQVLPDIGISSKAMSIMNSFINDIFEKLAADAINLSLYN

SEQ ID NO: 289868 - protein, 58 aa, Zea mays
  Clone ID: MRT4577_27448C.1.pep
RVSKCMYYKMCLKSIKRIPFAMDLSVLVDDVETEEIGGEDGIGQEPQSVDVGRVLLYS

SEQ ID NO: 289869 - protein, 80 aa, Zea mays
  Clone ID: MRT4577_27449C.1.pep
LICFFSLSGSPSITQAYPLSWRLYQPIQIPPVDIRLLIFTMAIAGSRPPLPDNPLAPTAKTSTPTLSSIETRTGPADSDS

SEQ ID NO: 289870 - protein, 256 aa, Zea mays
  Clone ID: MRT4577_2744C.1.pep
MAKLMNKLVDSFEHDEIPDVGCVRAVLAELVLTFLFVFTGVSAAMAAGSDGKPGDAMPMATLAAVAIAHALAAGVLVTAGFHVSGGSHLNPAVTVGLMVRGHITKLRAVLYVAAQLLASSAACVLLRFLSGGMVTPVHALGRGISPMQGLVMEVILTFSLLFVTYAMILDPRSQVRAIGPLLTGLIVGANSLAGGNFTGASMNPARSFGPALATGDWTNHWVYWIGPLLGGPLAGFVYESLFLVQKMHEPLLNGEV

SEQ ID NO: 289871 - protein, 129 aa, Zea mays
  Clone ID: MRT4577_27450C.1.pep
IMVDPFIGNYIEDLFKNIRTQVLFKFINPYTRIRIPFFLQELIFPKKNLNHLLVSLILANRIQGPIDQVNNFLKLEKRSKGFRKSNPFPNWNTQLKSFYQTFSNKFFLTESWLLYFCPPKIFYTLFWGF

SEQ ID NO: 289872 - protein, 123 aa, Zea mays
  unsure (1)..(123): unsure at all Xaa locations
  Clone ID: MRT4577_27451C.1.pep
WPLVVGRVRLGCCRCSAPPALWSLLVWLVXPXAPCLVASVFAXVGFSXWWGSCXWCXCWFGGLXASXGVSPGSLAAAGSSXXALLXSSPCVEKKRXXDGGXPAAGSVPLLVNRFSLASVRDPA

SEQ ID NO: 289873 - protein, 83 aa, Zea mays
  unsure (1)..(83): unsure at all Xaa locations
  Clone ID: MRT4577_27452C.1.pep
MGKPCVFFDIAGGGAPGGPIGIELYPHQGAKNGENFPALCTGQKGLGXSGKRFNSKGSTFNGVFPKLWCKGGDLTRGNGTGGR

SEQ ID NO: 289874 - protein, 39 aa, Zea mays
  Clone ID: MRT4577_27453C.1.pep
SALCRKWSSVAQARRSTELAVLSIRRRLIDLLTRALGLL

SEQ ID NO: 289875 - protein, 208 aa, Zea mays
  Clone ID: MRT4577_27454C.1.pep
MVSLKPQKRLAAGVLKCGKGKVWLDPNEVYEISMANSRQNIRKLVKDGFIIKKPQKIHSRSRARRAHEAKQKGRHSGYGKRRGTREARLPTKILWMRRMRVLRRLLRKYREAKKIDKHMYHDMYMKVKGNMFKNKRVLMESIHKSKAEKAREKTLSDQFEAKRAKSKASRERKIARREERLAQGPREPAAAPVSATAPAAAAPKKAKK

SEQ ID NO: 289876 - protein, 208 aa, Zea mays; identical to SEQ ID NO: 289875
  Clone ID: MRT4577_27455C.1.pep

SEQ ID NO: 289877 - protein, 144 aa, Zea mays
  Clone ID: MRT4577_27456C.1.pep
MEELVVFRHLALGWANVEPDTPVKVGTRFCICYKELIPWVTLPLQIAYVTDVDSDTSKGCSRSKMFAFGSGTLQGHLLAGEERFSVQVDEEERVWYEVLSFSKPAHVLATLCYPYVQLRQKHFAQQSGQALVRHVSTCSSKQKQ

SEQ ID NO: 289878 - protein, 216 aa, Zea mays
  unsure (1)..(216): unsure at all Xaa locations
  Clone ID: MRT4577_27457C.1.pep
MVSLKPQKRLAAGVLKCGKGKVWLDPNEXSRDLTXAQGYQGMANSRQNIRKLVKDGFIIKKPQKIHSRSRARRAHEAKQKGRHSGYGKRRGTREARLPTKILWMRRMRVLRRLLRKYREAKKIDKHMYHDMYMKVKGNMFKNKRVLMESIHKSKAEKAREKTLSDQFEAKRAKSKASRERKIARREERLAQGPREPAAAPVSATAPFAAAPKKAKK

SEQ ID NO: 289879 - protein, 100 aa, Zea mays
  Clone ID: MRT4577_27458C.1.pep
EEPYSSPVTRDRSAPHLLVTVVRYRMTAKLYLALVAVSVTHMVVRAHAQGFLNAEALDLLAPKATGRKSQTGEVLWCNTLVLAQFYSKSNDIRVAGSTMF

SEQ ID NO: 289880 - protein, 51 aa, Zea mays
  Clone ID: MRT4577_27459C.1.pep
ARDAAIWKTMIWFTRHLCTYGNYLNICFICIFIHSSDTLLKNATNLLNKHL

SEQ ID NO: 289881 - protein, 153 aa, Zea mays
  Clone ID: MRT4577_2745C.1.pep
PKSSNINLAYTTKMLICQSRLRPYQCSQLRYLVTPFISRTNTNNNFSYQDQVDTISQEWQWISGSVVLSSPWRATHRDSAQITWLKIRKNANNSWIWFFVTSVELGFTLYSVHSSIFTKPPHTHAIADSWYMSMLKSWAAIDNTRRTVGLEDN

SEQ ID NO: 289882 - protein, 112 aa, Zea mays
  unsure (1)..(112): unsure at all Xaa locations
  Clone ID: MRT4577_27460C.1.pep
LSGAQVYQVAASTMAISSTEMAGTPIRGESFREGRITMRKTVGKPKVVASGSPWYGPDRDKYLGPFSGETPSXLTAEIPGDYGWDTVGMTAEPKIFDRNRELEVMHSSWAML

SEQ ID NO: 289883 - protein, 114 aa, Zea mays
  unsure (1)..(114): unsure at all Xaa locations
  Clone ID: MRT4577_27461C.1.pep
MDPEVVRNSLKTTVAADKITVCTTTRLHLYEHSVLIGVSIXTYERGELLXFFDDTPGLVSPAEYLRLGDTVTLANQVGSDGVLSSGLTMGGVSLDIIAYSVDAAAMGXEIEVEG

SEQ ID NO: 289884 - protein, 78 aa, Zea mays
  Clone ID: MRT4577_27462C.1.pep
CRQHHGAYWKASMRVRGRFKGCERPAYTWENLWLIIGAASSPYIRLSTPEAGPWRQMAMNNIPTLANMPALASLLKRI

SEQ ID NO: 289885 - protein, 50 aa, Zea mays
  Clone ID: MRT4577_27463C.1.pep
MDPKGKGMVANDKKNESVLNEPREDKPTDSGSSQKKREGKKKRRIKKIIY

SEQ ID NO: 289886 - protein, 76 aa, Zea mays
  Clone ID: MRT4577_27464C.1.pep
LGVQLISPCPRLGLDLRRAGPARQPISLSDPDPMGGEVPDPLPIGIYLGSTYSCVGVGHPDRVEILGVGRGNRTTP

SEQ ID NO: 289887 - protein, 98 aa, Zea mays
  Clone ID: MRT4577_27465C.1.pep
QKTLIQTVYRQRNPQHPSKIGGREQTSTGPAIYRIQTGTLGRIYAAAKETHPTPLCQRLLHSALDKQRPGKANALTNNTEQWRRPTSGDDEPLSDQQR

SEQ ID NO: 289888 - protein, 57 aa, Zea mays
  Clone ID: MRT4577_27466C.1.pep
RVNIFPRMYDYKSAKGEDFLENTIGVHQLKQDLRWAHTLEHFNVTRLEPSSMLLHNF

SEQ ID NO: 289889 - protein, 90 aa, Zea mays
  Clone ID: MRT4577_27467C.1.pep
SARGQIHMQICGDHTFIHAFERPNVITGIHTSDRIETRPSTRESAFADRPGPTGVHGGRSRDTYFKMTYQGPSVCVNAGNPLSPQDQPWS

SEQ ID NO: 289890 - protein, 74 aa, Zea mays
  Clone ID: MRT4577_27468C.1.pep
GSIKSNSTLTPHAAHNLHAHDSSLITLQLALRRWRLLYWRCLGPRSAHLHPDRSSDCRPFISTWNYQSPQHLLY

SEQ ID NO: 289891 - protein, 73 aa, Zea mays
  unsure (1)..(73): unsure at all Xaa locations
  Clone ID: MRT4577_27469C.1.pep
RVYLMSHXLAVLGLARSRAPPYPNPKVKTAFRTKTMKVLPDQNQINRDPPEKKFKGVVKSYEAIKSERKTGVS

SEQ ID NO: 289892 - protein, 55 aa, Zea mays
  unsure (1)..(55): unsure at all Xaa locations
  Clone ID: MRT4577_2746C.1.pep
XXWLYRIKWALIFYLCRPGIYHNLHGYRYRVGSKGSEFEIKIEIXXSRFKIDHXT

SEQ ID NO: 289893 - protein, 408 aa, Zea mays
  Clone ID: MRT4577_27470C.1.pep
MGQKRALLVGINYLGTDGELKGCLNDVARMRRCLVGRFGFDEADIRVLADADPSTPPPTGANIRLELERLVAGARPGDALFFHYSGHGLQLPAETGEDDDTGYDECIVPCDLNLIKDQDFTDLVAKVPDGCRFTMVSDSCHSGGLIDKTKEQIGNSTKQNRTQQRREREMKPPPPAPGSALRVSLARIVRGVLESLGCIHCSRCRVQQQGNSNSSSISNRSLPLSTFIQMLRDKTGRHDVGVGSIRTTLFHHFGDEASPKVKRFMKAMLLGKLRHDGKEAEEQSRVPREAEVEETLAQDAHSVEEVYAGPAAAAAAARVPPRNGVLISGCQTDETSADATTADGMSYGALSNVIQTILAGDGKKRGVALAVTNRELVVRARELLSRQGYTQQPGLYCSDEHATLPFIC

SEQ ID NO: 289894 - protein, 143 aa, Zea mays
  unsure (1)..(143): unsure at all Xaa locations
  Clone ID: MRT4577_27471C.1.pep
LLSGWGGGGGXIFYSVGGXLXFXXXXSWIFCALGGADSGCFRVLRWGLLXXIYALGWGLLFLRIFKTGNGLRLAVGFVSGCCXXWACXVGASWWGFXILLVAGVSIGFLLVVFAGEFILVPCGCVVVGWGGGGRSGGSKLSFG

SEQ ID NO: 289895 - protein, 40 aa, Zea mays
  Clone ID: MRT4577_27472C.1.pep
MCLKKKKKKKKKKKNKKKKKKKKKKLVQKKKKKKKKKSLY

SEQ ID NO: 289896 - protein, 66 aa, Zea mays
  unsure (1)..(66): unsure at all Xaa locations
  Clone ID: MRT4577_27473C.1.pep
PFREEMIETYLGTIAKDGGSSDEAKKRMYDHTPTTHVXIGCXKTDDMPYRLLGMTAVIHIQPDTYL

SEQ ID NO: 289897 - protein, 80 aa, Zea mays
  Clone ID: MRT4577_27474C.1.pep
KRVEAINKDPRFKNPFRGGQFPYTLFFPNPSDKGDNPGVPPKGIPHSISLLFDRVLASVSPKKTKLTVIPVCPPFPFFHK

SEQ ID NO: 289898 - protein, 51 aa, Zea mays
  Clone ID: MRT4577_27475C.1.pep
LQRIHMGVQGGPPDNNVGDQINEHMLSSNQIMGLHAIPTLEPKPVLCTPKL

SEQ ID NO: 289899 - protein, 141 aa, Zea mays
  unsure (1)..(141): unsure at all Xaa locations
  Clone ID: MRT4577_27476C.1.pep
EQETADKGDGPAIGIYLGTTYXSCVGVRXDDRVEIIANDQGNRTTPSYVVFTDSERLIGDAPKNHVAMNPITTAFDVKRLIGRRLRDASDHSDIKLWLFXDLSGPEEKPMIVVQHLGEDKLSAAEEISSMSLIKTHDIAEA

SEQ ID NO: 289900 - protein, 81 aa, Zea mays
  Clone ID: MRT4577_27477C.1.pep
KKTVDQPPGTGAGSMQALALHKGIGTPMLRCLDAWNLWRWTIRTCIYGITLRLTILSRHTECWTLYTTPLLQLSELPLHIP

SEQ ID NO: 289901 - protein, 214 aa, Zea mays
  Clone ID: MRT4577_27478C.1.pep
MDDTEREKEKEKEKHDCGTDVEDEEEDEEGNKRVVVLGPQVPLKEQLELDKDDESLRRWKEQLLGQVDTEQLGETAEPEVTVLDLTILSPGRPDLVLPIPFQADDKGYAFALKDGSPYSFRFSFVVSNNIVSGLKYTNTVWKTGVKVETQKMMLGTFSPQLEPYIYEGEEETTPAGIFARGSYSAKLKFVDDDGKCFLEMSYYFEIRKEWPGGQ

SEQ ID NO: 289902 - protein, 89 aa, Zea mays
  Clone ID: MRT4577_27479C.1.pep
DDAHDPVTRDMAQSDTTALDHSGAHARWRRQPLMALPEGRGRRRHKGDRRQEELHENTCTKLRISVKLVVHSYTGSKHQQTDRDGEREL

SEQ ID NO: 289903 - protein, 108 aa, Zea mays
  Clone ID: MRT4577_2747C.1.pep
MVTLGHAKIRPIKKQIVFQELGQKRTNHQREPRGEKKNPPKKKNCLNRAHQKGRTQLWRSPTKTVFKTLERTFLGKPNILKGGRLIIRTSKKKTGKHLGGPSLKKHHS

SEQ ID NO: 289904 - protein, 116 aa, Zea mays
  Clone ID: MRT4577_27480C.1.pep
LVTTPTKFPTSPWPGFLVEFFTRVVNVPCSAKISDTLHAFDWSSTTRWPRDRARLLRFPPSVTGLWCPRSEFTPMPGSAMVRRSRGCCCRRLRCTAQINQTLVCRSSRDHVGVETL

SEQ ID NO: 289905 - protein, 240 aa, Zea mays
  Clone ID: MRT4577_27481C.1.pep
MYTNSSPTSLLLGILSILLSTHPHVIASQSPRDNGVRARSLSTCLLASGVRNFSMAGSPGYATIFDFSIQNLRFAAPGFRKPEAVVLPTSRRGLQRAVLCARSASLAIRVRSGGHSYEGQSYTVSGGVLDGKAPFVVIDLMNLNKVRVHAASATAWAESGATLGEPYHAVAHSSPSNRSSLAFTAASCSTIGLGGHISGGGFGPLSRKFMLAADNVLDALLVDAVGRVLDRRAMGRDVFW

SEQ ID NO: 289906 - protein, 91 aa, Zea mays
  Clone ID: MRT4577_27482C.1.pep
RYITVHTLSCLLSIQPFFACQNQNNSHAAPAGPRGTSHHDGLCAGCIGPRQARGGCDGEGAGAQGRRPRAAGVPGAGPAAAGPLHVEARRR

SEQ ID NO: 289907 - protein, 56 aa, Zea mays
  Clone ID: MRT4577_27483C.1.pep
IQFGIYPSSENKVVKSTGPRKLSRSGNTKYLLFPDWHFFKNHKNVIKSSLRPSHLS

SEQ ID NO: 289908 - protein, 41 aa, Zea mays
  unsure (1)..(41): unsure at all Xaa locations
  Clone ID: MRT4577_27484C.1.pep
SKRRCYCRGFMQPMARXIILGLENFFTRRFPLLEDIAQRLF

SEQ ID NO: 289909 - protein, 75 aa, Zea mays
  Clone ID: MRT4577_27485C.1.pep
MRQQRGGVGAGRREDDPGLLTRAVDRAFRFVRLAEFEIFFVLFFLIAFFLFKDLMSQPQYNQLFVKKPDLDNPWP

SEQ ID NO: 289910 - protein, 56 aa, Zea mays
  Clone ID: MRT4577_27486C.1.pep
RDLELFFFFFFFFFFFFFFWAGILINFYKTACRLYHVYYYNMFNMPRFSTWTWQPE

SEQ ID NO: 289911 - protein, 91 aa, Zea mays
  Clone ID: MRT4577_27487C.1.pep
FFFFFFFFFFFFFFFSKDQFQNPIPLRGSDFPKKNYFIFSWENRNPLEKRKFQPTPKLKTKSLNGVSPFVPTTKLSFSDSRTEACDLHPST

SEQ ID NO: 289912 - protein, 94 aa, Zea mays
  Clone ID: MRT4577_27488C.1.pep
GRFFFFFFFFFFDISKDPLAHKRGNLVACPTGWSRVKLSHTNNPLIVNSQEPSAKLLISTRKQEKNRSLGATVMTYGTLCSPINTRLMRAEDPL

SEQ ID NO: 289913 - protein, 118 aa, Zea mays
  Clone ID: MRT4577_27489C.1.pep
PSLRGPRCQQTSCFQGFCQRGKPVGSLGGCAPGYQKGWFKTKLGLGPLNGAPQGFERGFPGSGNFSQWRGCGVKNGGKLSFFFQNFPSPPKTPRWANCPGVFGGFFRPPGLLMGASRG

SEQ ID NO: 289914 - protein, 126 aa, Zea mays
  Clone ID: MRT4577_2748C.1.pep
EYKLFFFFFFFFFFYLPGRPARGANPKAQAHHTRGPHQGTQPGEKTGKTDARGRMLSENNSPQQTNPKQKPETPGGQTGGPNERNSVEQTGRFQGRKPSRPTGITKRPNHGEKPLGKGALLQGPRH

SEQ ID NO: 289915 - protein, 76 aa, Zea mays
  Clone ID: MRT4577_27490C.1.pep
GGGRVLLAKWRMRRTCRIQAPSSMTMSYAWHAGNDPKPVSITVYATVRDFSRCGGAATTGSQSSGHIIRPFYSRWT

SEQ ID NO: 289916 - protein, 44 aa, Zea mays
  Clone ID: MRT4577_27491C.1.pep
GLAMLPILGFFFQGLVPGVGPFQNLFDPLADPVNNNVLPTLKFP

SEQ ID NO: 289917 - protein, 102 aa, Zea mays
  Clone ID: MRT4577_27492C.1.pep
ALLFFFFCNTQSCSGQPYETNLLTKDMTSPEKREITFKRLLNQTFDRGICTGNKLIIWVENPMNNCTCLYKLKGPKNRSKPFIDQEFKPVTKRTGNGPNQGL

SEQ ID NO: 289918 - protein, 131 aa, Zea mays
  Clone ID: MRT4577_27493C.1.pep
MSHVVASGGGGAARGRSRSLGSSSRAGGAGAFVRAGPDGNEMYVRADKIDLKTLDVQLEKTRSQVWLDHQRSEASPRPETPLLGWEIDLGKLDIQNQIAHGTFGVVYRGTYDGHDVTMKDLDWGHDGQDTA

SEQ ID NO: 289919 - protein, 145 aa, Zea mays
  unsure (1)..(145): unsure at all Xaa locations
  Clone ID: MRT4577_27494C.1.pep
GTQSFIPDSNSMPXACSQPPYTAPGSHHGSPQIGSSHLSYPGCQGNLQQPYPGGYGMARQLSNTSMPGYYSQQQMIPPQAQHQGMPVTKQPSMPPPHPHNAGVPQAQFTPPXTTAAAPRGXSQVYGHLPTYGNPASLPQKPATGL

SEQ ID NO: 289920 - protein, 101 aa, Zea mays
  unsure (1)..(101): unsure at all Xaa locations
  Clone ID: MRT4577_27495C.1.pep
KNSADTTIYSIEKSVSEYKDKVPAEVTKEIESAVSDLRAAMAEDDLDKIKQKLEAANKAVSKIGEHMQQGGGSGSAGGSGSRXGGDQTPEAEYQDAKEAKM

SEQ ID NO: 289921 - protein, 403 aa, Zea mays
  Clone ID: MRT4577_27496C.1.pep
FDGALLEYLVSEFKKSDNIDLSKDKLALQRLREAAEKAKVELSSTMQTEINLPFITADASGAKHFNITLTRSKFESLVSNLIERTRIPCVNCLKDAGISAKEIDEVLLVGGMTRVPKVQEVVSQIFNKPPSKGVNPDEAVAMGAAIQGGILRGDVKELLLLDVTPLSLGIETLGGIFTRLINRNTTIPTKKSQVFSTAADNQTQVGVKVLQGEREMATDNKLLGEFQLEGIPPAPRGMPQIEVTFDIDANGIVKVSARDKATGKEQEITIKSSGGLSEVEIEKMVKEAELHSQKDQERKSLIDLKNSADTTIYSIEKSVSEYKDKVPAEVTKEIESAVSDLRAAMAEDDLDKIKQKLEAANKAVSKIGEHMQQGGGGGSAGGSGSGGDQTPEAEYQDAKEAKM

SEQ ID NO: 289922 - protein, 395 aa, Zea mays
  Clone ID: MRT4577_27497C.1.pep
MSLIRGMGNVAKRWKELNGLNYWKGLVDPLDLDLRRNIINYGELSQATYTGLNRERRSRYAGSCLFNRRDFLSRVDVSNPNLYEITKFIYAMCTVSLPDGFMVKSLSKAAWSRQSNWMGFVAVATDEGKELLGRRDVVVAWRGTIRMVEWVDDLDISLVPASEIVLPGSAANPCVHGGWLSVYTSADPGSQYNKESARHQVLNEVKRIQDLYKPEETSITITGHSLGAALATINATDIVSNGYNRSCCPVSAFVFGSPRVGNLDFQKAFDSAADLRLLRVRNSPDVVPKWPKLGYSDVGTELMIDTGESPYLKAPGNPLTWHDMECYMHGVAGAQGSSGGFELLVDRDVALVNKHEDALRNEFAVPPSWWVVQNKGMVKGKDGRWHLADHEEDDD

SEQ ID NO: 289923 - protein, 160 aa, Zea mays
  unsure (1)..(160): unsure at all Xaa locations
  Clone ID: MRT4577_27498C.1.pep
AGFRGFRPPGGPPXFQGGLNPPPVVPFXSGAPSPXPSVPVLLLRGGGPPFFFLPPAPPGSLSPGGPFPPPPEGGVPPAPPPGVGPLPPAGGPPGPLFPRPPAPVWVSARGAWVFPAFFFPPGPCPFFFSPPALCRPFFLNRHVARGGAIPSYIKPTNWHD

SEQ ID NO: 289924 - protein, 116 aa, Zea mays
  unsure (1)..(116): unsure at all Xaa locations
  Clone ID: MRT4577_27499C.1.pep
MAASEAGAATATSVTPKRGRVDLHCLXQCSIQIEEAXATRQLVAIDFSATXCPPCRTMNPIIGDMAKKSPDDDFAVHVDVNEMNTIAGQFCGEDMAIFLLMKEGDVEDRVLGAPKA

SEQ ID NO: 289925 - protein, 64 aa, Zea mays
  Clone ID: MRT4577_2749C.1.pep
EDKLTNCGHQITIMEYAGFPFPTVALKVYTSDLTSLFLWTCPRCKGYTKGFEVIYRDHSTCGEG

SEQ ID NO: 289926 - protein, 155 aa, Zea mays
  Clone ID: MRT4577_274C.1.pep
PPPPTGGVPPWGPGEGKTGVFLGWGPYTAKPPCWAKKTTGAAWPISPAPKGSSSRGKKAHLVVFPAPAFPFPRGFRGPTRFDPFGPFWDPPFSKGSPPPRGEKAIFVPREKKDKNFPPPLWKPPWGGFFNQRPFKGCLGPRGLTPRGVPWGDPNK

SEQ ID NO: 289927 - protein, 80 aa, Zea mays
  unsure (1)..(80): unsure at all Xaa locations
  Clone ID: MRT4577_27500C.1.pep
MTTCHMMQNMSNAGLQGERPSXQSYSVDWTTLFTKLVLKKWVSTTTHAENAGTXDESGMLDDELVIFKIIQDLHILVTHG

SEQ ID NO: 289928 - protein, 106 aa, Zea mays
  Clone ID: MRT4577_27501C.1.pep
WGQLSPRSKKVTPKFQTWERRVNKSLQKGSVEVGPTLFCLKTGYGFYVTKQGCGLGTSKFGVGGSNFFFNVSRIVLGRIGCFWRYGEKGSRFFFYFKNPSHFIFWG

SEQ ID NO: 289929 - protein, 102 aa, Zea mays
  Clone ID: MRT4577_27502C.1.pep
SPRAISLAIRVSLSSSVFTSNQDSRNTSDEYQRISYTILSEHQMVNLSHASRSDDQWWEASHSRQGQRSKMLTRVFALSLQRSAKKREEHDRRAAAFMGYEM

SEQ ID NO: 289930 - protein, 59 aa, Zea mays
  Clone ID: MRT4577_27503C.1.pep
LPAKKSTHHGHSWLDTRSRTCNTPPRLPNLTAPDYMLTYTTDANNGLHILYRPPPCPVN

SEQ ID NO: 289931 - protein, 66 aa, Zea mays
  Clone ID: MRT4577_27504C.1.pep
PCQDHHICIALVFSRSTLLLSEDVLLRRGARLRYYARISTPPHETMRRPSPWIAKPTSSSLSWGTR

SEQ ID NO: 289932 - protein, 135 aa, Zea mays
  unsure (1)..(135): unsure at all Xaa locations
  Clone ID: MRT4577_27505C.1.pep
PPPXSSSGKWPLNRPKFGGGGNVLGLLKSGAGQGPIXPFCHLLKGPSGFWGPVCLWPALKGNVPGVVFDGPFKVNALVHYCGKGGAQGFMGGLAPGGFPFGTVWGGNLASPCLGPLFWGPAGFSRFLWGPLGFPA

SEQ ID NO: 289933 - protein, 74 aa, Zea mays
  Clone ID: MRT4577_27506C.1.pep
MVSAAFILENSWAFFSAKPRISIIRQFFYRVTRSVVRWLISRVGFICILVLFKTQYRCFPLASHGRVLLVNLEH

SEQ ID NO: 289934 - protein, 79 aa, Zea mays
  Clone ID: MRT4577_27507C.1.pep
TALSRFFTGQGGPEWFFVPGPPVVFKCSINCVCYFLLRLFFPKKKKKKKKKKKKKKKKKKKNKKKKKKKKKSTLRCYHC

SEQ ID NO: 289935 - protein, 83 aa, Zea mays
  Clone ID: MRT4577_27508C.1.pep
SCLLPRATASRLNTTDSPVAPTTNVVEAQTPDAVEDDTINHLLVDPSSYEAAEHLLHLPTLLAHTKESATPSPILPVKPWAFR

SEQ ID NO: 289936 - protein, 73 aa, Zea mays
  Clone ID: MRT4577_27509C.1.pep
LMVLMPWKFNGCYSLFVIDHVKKHVTFIDFTPTQDWYKHMPYKRFAEAIIMALKKYKITYSKKCSGWEEDIFK

SEQ ID NO: 289937 - protein, 104 aa, Zea mays
  Clone ID: MRT4577_2750C.1.pep
GISGGTQGSAQGSAPGSAPGSDFVVGLFQGPEVPGGRIESGSALPNLAPRGLDPEKIKVCWVGLKGSPGSGSPPPFRVRIPCHSRGFSLSPFPPKGGMGPNVFF

SEQ ID NO: 289938 - protein, 83 aa, Zea mays
  unsure (1)..(83): unsure at all Xaa locations
  Clone ID: MRT4577_27510C.1.pep
LAAGKDSAGVVGSPPGGAINPSSKHRNTHTVRPCFLCGGDGRMFSYYKRRGLLAALLRCTALHCTGGGEWRPRXXLPLALLAV

SEQ ID NO: 289939 - protein, 125 aa, Zea mays
  Clone ID: MRT4577_27511C.1.pep
MAAAPSVRTFTRAEVLNAEALNEGKKDAEAPFLMIIDNKVYDVREFVPDHPGGSVILTHVGKDGTDVFDTFHPEAAWETLANFYVGDIDESDRDIKNDDFAAEVRKLRTLFQSLGYYDSSKAYYA

SEQ ID NO: 289940 - protein, 126 aa, Zea mays
  unsure (1)..(126): unsure at all Xaa locations
  Clone ID: MRT4577_27512C.1.pep
TYEMRCGPRKYMSQKLWGAXMYESGGIMIQXKRAALFGNALDEKGGENFKIDYMMGGXSWCLEECMVLPIERGKLLIQNXDEMIKCDRLXXPYKGIADCXKRTNKDEGLYYLWRGNTDKDRRYFPT

SEQ ID NO: 289941 - protein, 51 aa, Zea mays
  Clone ID: MRT4577_27513C.1.pep
SRTMLGETQIGRHLLRLQHKGTHFSQRCAPYVEYQIPYLPSPSHVPIHCTG

SEQ ID NO: 289942 - protein, 59 aa, Zea mays
  Clone ID: MRT4577_27514C.1.pep
FEDTIQGKTVFTSYGTTLYQLFLLFTTSNNPDVWVPAYKSSRWYCLFFVLFVLVGVYFV

SEQ ID NO: 289943 - protein, 346 aa, Zea mays
  Clone ID: MRT4577_27515C.1.pep
YEPTRDCSQGLCSMYCPQWCYFVFPPPPPAFDIAGPGGGGGDDDSSGPTFSPLVIAIIGLLASAFLLVSYYTVISKYCGTFSSLRNMVFGSRRGRGRGRGGGGGGGGGGDSGAQVPWGAMPPDGLDETLINKITICKYKRGDGFVDSTDCSVCLGEFRDGESLRLLPKCSHAFHLPCIDTWLKSHSSCPLCRCNIAFVTVGVGAVSPEPEPERRAPREDRDWRRDNPELVLTVGGPSSDPVRGAPQSQSQNAVSGSGGDDGQDALARKDCPERSEEGSGNAEIKEDCALPAVRAASSLSDTHREGRMSIADVLQASLEDELTMARESGLLAGSSGRCPCHGEHSKD

SEQ ID NO: 289944 - protein, 159 aa, Zea mays
  Clone ID: MRT4577_27516C.1.pep
PVACAETGVTLISPFVGRILDWYKKSTGKEYTAETDPGVKSVQRIFNYYKQHGYNTIVMGASFRNTGEITELAGCDYLTIAPKLLEELKNSDAKVPKKLDAAPADQAKEEKVSFVDNEAAFRWELFNDPMAFDKLHEGIRGFAKDGDACKEMLREKLRA

SEQ ID NO: 289945 - protein, 80 aa, Zea mays
  Clone ID: MRT4577_27517C.1.pep
KCGSEDEAEVEERRLKKLAQRAKFDAQYDGSELSDDEVDDVKKKSRREQSNEGGYFDKLKEDMELRKQMNISELNDLDEE

SEQ ID NO: 289946 - protein, 72 aa, Zea mays
  Clone ID: MRT4577_27518C.1.pep
FPSLHISPHQSFLFETNILLPYSIQHTNTSTITSLTSYLSPSHYTILNIPHILSYLLPHNIYSHQLYKTNLT

SEQ ID NO: 289947 - protein, 36 aa, Zea mays
  Clone ID: MRT4577_27519C.1.pep
RSTFYRHYGKTFTQPRRPYEKERLDAELKLVGAYGL

SEQ ID NO: 289948 - protein, 77 aa, Zea mays
  Clone ID: MRT4577_2751C.1.pep
QPKGQAQRDGTDVADAGRFRCQPNGTDAKKDSPRDVERGFALQIGQLVDRHPLQLGHEYYVQLIRCKKLDVHYRELH

SEQ ID NO: 289949 - protein, 96 aa, Zea mays
  Clone ID: MRT4577_27520C.1.pep
HGVDDDGDDDGDDGGTDGPRHSASADYFIPSQVFLEAERAQSIAYHLKIEEQRAKVHDNENIGTTEPGEHKRPRTAENSSNEEETSSEGNMRVHAV

SEQ ID NO: 289950 - protein, 50 aa, Zea mays
  Clone ID: MRT4577_27521C.1.pep
KFGVCVRLNHKMVLFNKKCRLLFGCQKRKWQTGLCVAQLCIWSMISGKKI

SEQ ID NO: 289951 - protein, 48 aa, Zea mays
  Clone ID: MRT4577_27522C.1.pep
LISKQQLVEYKWHSTTTTNMLSDLSYKCSSELIGPLDHDLTGDIIPVR

SEQ ID NO: 289952 - protein, 224 aa, Zea mays
  unsure (1)..(224): unsure at all Xaa locations
  Clone ID: MRT4577_27523C.1.pep
MHGCKRLNHTPPPMPPPPPPPPPPPAPPPXPPPPPEPRPLPLPAPAPPPXPPPAPPPXPPPEPLPAPAPPPYPPPVPPPAPPPXPPPAPPPYPPPLPPPAPAPPPXPPPAPAPPPPPRPPPPPSPPPRPPPEPPPRPPPPPAPPPAPPTXPPPSPPPSPPPPPAPLPAPPTXPPPSPPPSPPPPPKPPPAPPPAPPPKPPPFTPPNPTPCPKPPPLPYPPPPPS

SEQ ID NO: 289953 - protein, 145 aa, Zea mays
  Clone ID: MRT4577_27524C.1.pep
MINSKMLVQLAKKWQHMAALGRRRLTMTTTIKDGNLYCTSAIANKGHCIVYTADGKRFEVPLAYLSTNVFVELLRMSEDEFGFTSEDRITVPCDAEVMEYVMCLLRRKPSEEVERAVLNSVVMPCNCMSTMTMVSKGLNQSLSIF

SEQ ID NO: 289954 - protein, 96 aa, Zea mays
  Clone ID: MRT4577_27525C.1.pep
TPNLSSRSYTKSGSPVWPTRLGSFTTQHLFFSDGLVFLINTPFSSPVLSYVTVLGVVLPFRSLIPSISLVFSVAYFLLVRYRPIIGRLLRSGDPSV

SEQ ID NO: 289955 - protein, 246 aa, Zea mays
  unsure (1)..(246): unsure at all Xaa locations
  Clone ID: MRT4577_27526C.1.pep
MGRQFFVGGNFKMNGSIKSITDIVENLNKGKLDPNTEVVIAPPALYLLLTREHLRKGLEVAAQNIFDKPNGAFTGEISAEQLKDSGITWTLVGHSERRQILQENDDFIANKTKTATDNGLGVILCCGESLEQREAGETVSVVTKQLKAVADKVKDWSKIVVAYEPIWAIGTGKVATTEQAQEVHAALREWLKKEVSPEASEXARILYGGRVSEKXCNELXQEANIDGFLVGGASLKPAFVDIITLT

SEQ ID NO: 289956 - protein, 86 aa, Zea mays
  Clone ID: MRT4577_27527C.1.pep
VNSNSNSLQPVPQQLPPKFSTTFCFGPSTPPRFTHGPRLLPFIFPVTSVPIPREGLSAWRRPFRCSGWVVAFPGRQRWPRPAWPSA

SEQ ID NO: 289957 - protein, 118 aa, Zea mays
  Clone ID: MRT4577_27528C.1.pep
NHHLKGPRPPPPKVFNLRGVQKPTLFFSEMFNFPPNPFSFLPPLECPFPLQTPPNSRLAPKKKTPGRKKNPPGFFFFFFICQNLAPNFPPPKNFCPFVDRFPPLTPTLTLWPPPFFSP

SEQ ID NO: 289958 - protein, 78 aa, Zea mays
  Clone ID: MRT4577_27529C.1.pep
RCTSFVRFQFGERVRSPVTDCSFCKRTIKNFTFIFGFSPSSDGRKASFPASLVYCVEAPFVWLVFLVDNECSGPPFSV

SEQ ID NO: 289959 - protein, 50 aa, Zea mays
  Clone ID: MRT4577_2752C.1.pep
RPRSIVCLVGRSTAICTVSSFQGVPVTSPYGVILSQLLSMESPQLYPQKN

SEQ ID NO: 289960 - protein, 94 aa, Zea mays
  unsure (1)..(94): unsure at all Xaa locations
  Clone ID: MRT4577_27530C.1.pep
TRTNIENAHNLSFFLTEHPKGGYLIFREHLHSINDLSPKTKEIFSYPPSPXDFXTFQHHNPHLLWDPHIIQLQLRKDPYHDLLQDTNPSSSKQN

SEQ ID NO: 289961 - protein, 43 aa, Zea mays
  Clone ID: MRT4577_27531C.1.pep
FRPQDVFVHATLPLHCLYRPLDIILVWYEALIFLCSVELHITK

SEQ ID NO: 289962 - protein, 32 aa, Zea mays
  unsure (1)..(32): unsure at all Xaa locations
  Clone ID: MRT4577_27532C.1.pep
LTYXTPTFXXLFCVXXLXFKNKLADXTNIREH

SEQ ID NO: 289963 - protein, 620 aa, Zea mays
  unsure (1)..(620): unsure at all Xaa locations
  Clone ID: MRT4577_27533C.1.pep
MSMYGRDPWGGPLEICHDSATDDDRSRNLDIDRGALSRTLDETQQSWLLAGPGDPGRKKKKYVDIGCLVVSHKLFVWTLGVLLAAAVFAGVVAGIAKAIPRRHRPPPPPDDYTVALHKALMFFNAQRSGKLPKHNNIPWRGNSCMKDGTXSDPAVRRSLVGGYYDAGDAVKFNFPAAFSMTLLSWSVIEYSAKYDAAGELGHVRDIIKWGSDYFLKTFNSTADSIDRVIAQVGSTATSPGSTQPNDRYCWMRPEDIDYPRPVVECHACSDLAAEMAAALAAASIVFKDNKAYSQKLVHGATTLFQFARERRGRYSAGGSDAAKFYNSTSYWDEFVWGSSWMYLATGNSSYLTLATHPKLAKHAGAFWGGPDYGVFSWDNKLTGAQVLLSRLRLFLSPGYPYEETLSTFHNQTSIIMCSYLPIFKSFNRTRGGLIQLNHGKPQPLQYVVNAAFLASVFSDYLEAADTPGWYCGPHFYSIEVLRSFARTQIEYILGKNPLKMSYVVGFGNHYPKHVHHRGASIPKNGVHYGCKGGWKWRDTKKPNPNIIVGAMVAGPDRHDGFKDVRKNYNYTEATLAGNAGLVAALVALSGEGHGVDKNTMFSAVPPMFPSPPPPPAPWKP

SEQ ID NO: 289964 - protein, 227 aa, Zea mays
  unsure (1)..(227): unsure at all Xaa locations
  Clone ID: MRT4577_27534C.1.pep
MSMYGRDPWGGPLEICHDSATDDDRSRNLDIDRAALSRTLDETQQSWLLAGTADQPRKKNKYVDIGCLLVSRKLFVWTLGVLLAAAVFAGAVAGIAKAIPRRHRPLPPPDDYTVALHKALMFFHAQRSGKLPKHNNIHWRGNSCMKDGLSDPAVRRSLVGGYYDAGDAVKFNFPAAFSMTLLSWSVIEYSAKYDAVXELGHVRDIIXKWGSDYXFLKTFNSTADSID

SEQ ID NO: 289965 - protein, 93 aa, Zea mays
  Clone ID: MRT4577_27535C.1.pep
AGYNTAPIHCNLSLTPTIPPIFGDPFHFCLPTHKCIFYLSTIISNNNTHLDTSINKILFSFFPSHQPRAAFSLFSNSNHTEWVLERENPYLGS

SEQ ID NO: 289966 - protein, 174 aa, Zea mays
  unsure (1)..(174): unsure at all Xaa locations
  Clone ID: MRT4577_27536C.1.pep
HACVYRAAITRSTSAFVAVCEYGAHVACAEYVMKAEHDAYCPLXGLAFSNSLEIXEGXVCRRINIGSMNIQHTPLLPVRWAATYEDRPXEXYPWFAHCPDYVISSDLVKDVMNYHKNQRMKLLKRKYLNYRVWXDDMTLRLYLMDTMHXLSXCADGCFPDYHTAHYQLPWLQLC

SEQ ID NO: 289967 - protein, 41 aa, Zea mays
  Clone ID: MRT4577_27537C.1.pep
ISLLPSTMVMWCYLLFGGKSQQPMRTFLRPPNFFTKTEETP

SEQ ID NO: 289968 - protein, 188 aa, Zea mays
  unsure (1)..(188): unsure at all Xaa locations
  Clone ID: MRT4577_27538C.1.pep
GGGASQVVNGPKGLPKLLFCKPFYKGFFKIRQLNGRFFQAGGAFSCRGGFFQLEWFXPLGFGPSAPNGWGSAVFPGLAHSLARARGSNPLGFWKFFPPWVFRVARAVSPGFFFLGGRFPWQGFNPFCFPKLFLWVLGVFPFFDPLAFEILGCRGKKKKKKKKKKKKKKKKKKKKKKKKKKTHAAAHAA

SEQ ID NO: 289969 - protein, 103 aa, Zea mays
  Clone ID: MRT4577_27539C.1.pep
SSTFIHDCTYELKSTGLLNGGGGPFHERKTSGENYPREFSFPACTTWNGYGKLVADASVPGPIDGPANGLGTCFLGLQYRGKHRCLILRLPSTVQFTPCRIVL

SEQ ID NO: 289970 - protein, 53 aa, Zea mays
  Clone ID: MRT4577_2753C.1.pep
FMEPFYHILLEVQILSIVYLKCQAVPTSFAFDTGCMIYSLMMGIVMTDARFHR

SEQ ID NO: 289971 - protein, 187 aa, Zea mays
  unsure (1)..(187): unsure at all Xaa locations
  Clone ID: MRT4577_27540C.1.pep
MAIPLPCKALPRHDGTKGSGQAYDGDDQPSVAAELRALWGMAAPVTALNCVVYLRAMVSVLCLGRLGPLDLAGGALAIGLTNITGHSVLFGLASGLEPLCAQAFGSRNHELLTLSLQRAVLLLLLAALPIALLWLNVGPILVALGQDPTISAHAASYAAFALPDLAAGAVLXPLGVYLRSQGITRPM

SEQ ID NO: 289972 - protein, 46 aa, Zea mays
  Clone ID: MRT4577_27541C.1.pep
HASQIQGIKPAHTGLYNAANLGGQPQSKGGTNFEHYQPTNIKKEGG

SEQ ID NO: 289973 - protein, 110 aa, Zea mays
  unsure (1)..(110): unsure at all Xaa locations
  Clone ID: MRT4577_27542C.1.pep
VFLARAMYRHLSSSVCHXSCXHSLRLTFQLSCLVYTAISVMIVVSIVPPISIFFQCXPRRRSTFLSTITSSSAGTVYALMXPRLSAPRYRALRALLLVGIGLYGVVPAAR

SEQ ID NO: 289974 - protein, 107 aa, Zea mays
  Clone ID: MRT4577_27543C.1.pep
KPDLGIYQGGSANMIFRRHRGNTAHIPIWDGRLNNGGPFFGIKNLPGRSQRKPLLLGMCRKRPHCTKLGSAQPLGNQFDAYQKTPYSHGPPPPPLGRRLGGPKNSGP

SEQ ID NO: 289975 - protein, 73 aa, Zea mays
  Clone ID: MRT4577_27544C.1.pep
GIAWMLGPPLHLAMPKPCFPLEKEILLPKPRTMPKGLLIAQFCQACHWFLGSPLTLISPKATDPAFGLSSDAV

SEQ ID NO: 289976 - protein, 54 aa, Zea mays
  Clone ID: MRT4577_27545C.1.pep
GQALSPYLLARARVECGRRESPRAGLAPSCEGLREARGGVLGVSAGLAPKFTKC

SEQ ID NO: 289977 - protein, 268 aa, Zea mays
  Clone ID: MRT4577_27546C.1.pep
VTVSFFLPSCFGLPKLLPPLRHAIHPARRLEKVDIRSPRSVAKIVGTAICLAGAASMAFFKGPALLGAALPSTTSDNSDWVKGGIYLVGNAICVSIWYILQVPVCKSYLDPVSLATWMCLLATLQCAAMALFLEPNNYLEIWKLNSLWEFPCILYGGVFASGANFFLQSWCIAVKGPLYSAIFTPLSAVITATLSTLFLNEQLHVGSVLGAVTIIAGLYVVLWGKAEDANGGQVGSKQTADADGIAVTVDTPTNLSEPLLPTVAEPVF

SEQ ID NO: 289978 - protein, 51 aa, Zea mays
  unsure (1)..(51): unsure at all Xaa locations
  Clone ID: MRT4577_27547C.1.pep
VVSKGRGDXTXXSGLSKNXRGLAPRAVXXAXXDXXRMKLSHDGFIAACADG

SEQ ID NO: 289979 - protein, 103 aa, Zea mays
  Clone ID: MRT4577_27548C.1.pep
MRTSRVVVIRPWRESLRLMLLSPRRELDRHRLWSADYSASCTRPALAAPSTSGRPVPTPSAHAALLLECRLSRIAEAVDGGSRREPQQEQLQQERYRVVVALV

SEQ ID NO: 289980 - protein, 63 aa, Zea mays
  Clone ID: MRT4577_27549C.1.pep
ASEAPQATLRELLGLLIGPGEGRGLASHRRLFEENLLAKGLRPVRMPCQRHPNLSASGLNVLS

SEQ ID NO: 289981 - protein, 101 aa, Zea mays
  unsure (1)..(101): unsure at all Xaa locations
  Clone ID: MRT4577_2754C.1.pep
LXIPNTHSFFYRNKLFTHHTNTIHHLHNKQQQPIPSKPLSLLPHHHILLKLITFTTTLITTIIISLYNHTNLIPIQLSDSFSPSNFPLTSKLHLMSHFNYF

SEQ ID NO: 289982 - protein, 73 aa, Zea mays
  Clone ID: MRT4577_27550C.1.pep
LLFVQISTYDIRTTYQVQTKDAGGRNFLKISCFKTTLPTTLFTLICTLCTDRLVCNRYVSPVDGYELMIYNTQ

SEQ ID NO: 289983 - protein, 52 aa, Zea mays
  Clone ID: MRT4577_27551C.1.pep
SGSWKFLPYLYVSYARLFAFLALLPTLSSRVTCLARAEHVCQCWQDERLPRL

SEQ ID NO: 289984 - protein, 53 aa, Zea mays
  Clone ID: MRT4577_27552C.1.pep
VRRIGSARSSAQCLQVCSHALTLQWPVHPRMRFSSASETYFMHVIQMALPHEG

SEQ ID NO: 289985 - protein, 87 aa, Zea mays
  Clone ID: MRT4577_27553C.1.pep
SQGKHNFGKVQSKRGKVDSLDSDGLPYVGASLQSGDIVIGKVTESGEDHSAKLMHAEKGMVDKVVLSANDDGVNFATVTLRQSRSPC

SEQ ID NO: 289986 - protein, 104 aa, Zea mays
  unsure (1)..(104): unsure at all Xaa locations
  Clone ID: MRT4577_27554C.1.pep
AASAGNAGAAAVVAVVLAARAAVVVAVVAAAAGRVVPVVRPVRAVPAAVERVELGSIQFKEVLVRLLGLAVEARGEGLPAVFPGFPKAQVELPAAXVAARRARR

SEQ ID NO: 289987 - protein, 67 aa, Zea mays
  unsure (1)..(67): unsure at all Xaa locations
  Clone ID: MRT4577_27555C.1.pep
MACTNNAMRALFLLVLFCIVHGEKEESKGIDAKASGPGGSFDITKLSASGHGKTNRTNAVHXAWASA

SEQ ID NO: 289988 - protein, 211 aa, Zea mays
  unsure (1)..(211): unsure at all Xaa locations
  Clone ID: MRT4577_27556C.1.pep
SSQRISWRRPSRSWRRSGRRSKRWPGASRPCRRSSATPWRNLRGSRRGTTRRPPEPRSSTWRSTRASTSXRGRREANGAAATGRCRRSRRAPEEEVRXRSLTRRRSPPPPPPRAGRHRCRTXVMXRCTARRPTSSTSRTRITTGSRGSRGRCRPGTRPPRRWRMREGRRRSRSSRSWARSSCGGRKAAKXPRRRGVLIHQYMHTYMHASME

SEQ ID NO: 289989 - protein, 41 aa, Zea mays
  Clone ID: MRT4577_27557C.1.pep
THLPTWSGFGFLVIYHLEGSCYGNLVPFIQQLCKEAVGSRS

SEQ ID NO: 289990 - protein, 126 aa, Zea mays
  unsure (1)..(126): unsure at all Xaa locations
  Clone ID: MRT4577_27558C.1.pep
PLSIEFPPLRAQGGYFPACPFCSCAFRPLIPFGPRIFFFNPXSQCVLQCCRSPPRSGVSFSSRPPRGRVSAPLFFLETTIGPSGLVAPSSLVVGAACFSKNNSLSPVLQGPKNYMMGNKAKIVNKL

SEQ ID NO: 289991 - protein, 42 aa, Zea mays
  Clone ID: MRT4577_27559C.1.pep
IRSLELMHLWRSYLIMTVSGSHPQHLIKPIPRTYVVSCEKRE

SEQ ID NO: 289992 - protein, 48 aa, Zea mays
  Clone ID: MRT4577_2755C.1.pep
TVRDGAAFSSAKPRGGSPALGAGSQSRPCSSLVRARVFVVLSDVVSRF

SEQ ID NO: 289993 - protein, 123 aa, Zea mays
  unsure (1)..(123): unsure at all Xaa locations
  Clone ID: MRT4577_27560C.1.pep
KKKKKKKKKKKKKKKKKKKKKKKKKKKKKKRAFFPNRRVVFKAITCXLPTFPKPYGGPPKIIVHGVFGYQINPYQGKKASALLVNFFNKCQANPTHXNKISQGGLHLIKKKYTXNLYSKRLIT

SEQ ID NO: 289994 - protein, 90 aa, Zea mays
  Clone ID: MRT4577_27561C.1.pep
VEHASGKIVDGGSTTSPDVAGGRQASSGCRYLKIRPCKTPDIWRVPGTGQGQKVHSRGMETSQSNILRRTGRIRDHGEDVRVKGHARTRV

SEQ ID NO: 289995 - protein, 110 aa, Zea mays
  unsure (1)..(110): unsure at all Xaa locations
  Clone ID: MRT4577_27562C.1.pep
PPHPPDSLLPSSYILAFAFAPSTDAFGRLAVFTNNYCPFCGRAIHMVQNVIQSYKAIXLDKLTDACDLHSALNDRTEHHSVTSGCFHDHHIGDCDDTMPLNNDVKLPPLL

SEQ ID NO: 289996 - protein, 129 aa, Zea mays
  Clone ID: MRT4577_27563C.1.pep
CPHSWKNLPNLTSFHPARSPSPQLTLAARCVRRCWATVVLHHRRSSRTSAPLQSWSGHPSTASSNTPKLAASPPPRCRLCAQIAIRFQASRNRGSSVGDQVIWLFEFYKVGDPEHLFGEGCLWCNLCSR

SEQ ID NO: 289997 - protein, 53 aa, Zea mays
  Clone ID: MRT4577_27564C.1.pep
RRGVTLPSHTSNHKSNLFSEPTCQPSPPALTSIQLLCCLTHIKLPARTPTYAP

SEQ ID NO: 289998 - protein, 190 aa, Zea mays
  unsure (1)..(190): unsure at all Xaa locations
  Clone ID: MRT4577_27565C.1.pep
METRLFIALQCVQCATMQVKQQKRSSNKWXCVVCNQRQSVLHVHARGYRAADLRRFVQDTNLARGRREFAPLAEPDXWTXLAAVEEGDVFPIEKSQTEWSEYLDDPGETGKGCGGLGADASDGESDEGIEVITELPQKRPKVRPRKAQSDVVGKRTKLSTHPTLCNKRQQIKQGSSPHCATTTAEAQGSK

SEQ ID NO: 289999 - protein, 239 aa, Zea mays
  unsure (1)..(239): unsure at all Xaa locations
  Clone ID: MRT4577_27566C.1.pep
METRLFIALQCVQCATMQVKQQKKSSNKWVCVVCNQRQSVLHVHARGYRAADLRRFVQDTNLARGRREFAPLAEPDXWTXLAAVEEGDVFPIEKSQTEWSEYLDDPGETGKGCGGLGADASDGESDEGIEVITELPQKRPKVRPRKAQSDVVGKRTKLSTHPTLCNKRQQIKQGSNPHCATTTAEAQGSKWTKYLDTSRFGGRKCFDTSGLHWTEHDESATTEATTDVVVDDEVHPDFI

SEQ ID NO: 290000 - protein, 166 aa, Zea mays
  Clone ID: MRT4577_27567C.1.pep
MAQLPPRVPTAVHRWPEGGHHGAAAWADDFAEFAALRRGAHRRSLSDSVAFVEVAPAAGEFDRLDDDQLMSMFPDEAAAGGGGGGSSAAGSENNGGSSDSYAAASTELIRDPKRVKRILANRQSAQRSRVRKLQYLSELERSVTTLQNEGSALSPRVAFLDQQRTI

SEQ ID NO: 290001 - protein, 99 aa, Zea mays
  unsure (1)..(99): unsure at all Xaa locations
  Clone ID: MRT4577_27568C.1.pep
KGLLRRTSRFLFFWRSCNFCYDISCLNFKISFAQFRCGEKFLYLSHRVVFGLSHMPLKYSLFFFSTNGFDFPCLGFLKKKKKIXXXFFKNQHNLKNTXX

SEQ ID NO: 290002 - protein, 278 aa, Zea mays
  unsure (1)..(278): unsure at all Xaa locations
  Clone ID: MRT4577_27569C.1.pep
MAQLPPRVPTAVHRWPEGGHHGAAAWADDFAEFAASRRGAHRRSLSDSVAFVEVAPAAGEFDRLDDDQLMSMFPDEAXPPAAAAAGRPRQGPRTTAAAATXGDRRGGGGPAAGGTSTTTSCNGFDGGEHNEAADAQATGQAAAAAAASTELIRDPKRVKRILANRQSAQRSRVRKLQYISELERSVTTLQNEVSALSPRVAFLDQQRTILTVGNSHLKQRIAALAQDKIFKDAHQEALKKEIERLRQVYEQQNLKMSAGAAASDHGPPPVRAEKELMS

SEQ ID NO: 290003 - protein, 58 aa, Zea mays
  unsure (1)..(58): unsure at all Xaa locations
  Clone ID: MRT4577_2756C.1.pep
ELKVKELKTAPLPMFPMLGFLVQPIVPGKGPLEPLAPPIAHPVNNNXWXYPPNFAPXK

SEQ ID NO: 290004 - protein, 152 aa, Zea mays
  Clone ID: MRT4577_27570C.1.pep
TERTRRRKKRREKGGVSFSLTVPRSRKKTAKTPGAGPRTDRRTRAREGRQQKKKVEICFGAGAGAGESVSPWVDQLASSSRDASPVTTFLLACGGCGLSLLAASGRHGDGGTTTVAFLSSPPSGMPSSPAAFGFSPNRGSNTPDKAGTGVAS

SEQ ID NO: 290005 - protein, 68 aa, Zea mays
  Clone ID: MRT4577_27571C.1.pep
NSLLARCALSLHSFPGSPLTSRLSRPFCAVASGSPQLRKDCPTTSSPCCFAEETATASTPGSSSNSCS

SEQ ID NO: 290006 - protein, 89 aa, Zea mays
  Clone ID: MRT4577_27572C.1.pep
AWFVLEQRGTRARAINIYGVCPCGRGLDYFSIFVPGDNMYAASLLFSPSMMHKMFGFMLSRVEILIPRDALHLGRGVFQMDPGFWVTFG

SEQ ID NO: 290007 - protein, 56 aa, Zea mays
  Clone ID: MRT4577_27573C.1.pep
GQSQSNFAFVFPSGDYLKGPDKGYSFPKTTLAKLKVLGHNNGQKGAGTGPTYVKLD

SEQ ID NO: 290008 - protein, 145 aa, Zea mays
  unsure (1)..(145): unsure at all Xaa locations
  Clone ID: MRT4577_27574C.1.pep
RRADGNNPKRPHRGANGLNNGKPAGNADKSGVSIPTPTGTSHARGQGRQKPSPRATAAARRSHRPHRRGRRPEHRAESRDDPATTASSSRAPGVRAWQLNKSAPWAPDAXHAHHTKDAPPPPKREXRRVTHRKKQTQREPGAPKR

SEQ ID NO: 290009 - protein, 64 aa, Zea mays
  Clone ID: MRT4577_27576C.1.pep
TLSYQPILVWCPQLTLEAQRKYVTNSNITNSLCSKGECSIPYILNILLFNWHTLCFASDHISTN

SEQ ID NO: 290010 - protein, 117 aa, Zea mays
  Clone ID: MRT4577_27577C.1.pep
LEAGGHLCPTQPIYSLLQQSLPVALLPPPGCSCTCCSIGSAARGMSTTTPTNAASQQGDDAAAGRADKKPAQETVTKTVQTVEVRSSAGQPDEEGVLKPVKVVHEIPAKDSSGVKQD

SEQ ID NO: 290011 - protein, 62 aa, Zea mays
  unsure (1)..(62): unsure at all Xaa locations
  Clone ID: MRT4577_27578C.1.pep
RVIVRQRKRXRRKAGVYMYFEDNAGVIVHPKGEMKSSAITGPIGKACADLWPKIASAANAIV

SEQ ID NO: 290012 - protein, 44 aa, Zea mays
  Clone ID: MRT4577_27579C.1.pep
HGGGLLLTVTQFTTMHTLVSTCHRPARNLTCQAFPVYTNSRIGC

SEQ ID NO: 290013 - protein, 128 aa, Zea mays
  unsure (1)..(128): unsure at all Xaa locations
  Clone ID: MRT4577_2757C.1.pep
YRLQGPCLDVMAPIQFFRTYSIGASRGGWKKKKQGPRGFSFFCCAASTFEVAAVYGRLVHAGCEXEAAVVHGVLPLDAAVVVICDVAVDREGQGRRAHDCTVAEKLQHPAAILDDVGLCGRIRRERHC

SEQ ID NO: 290014 - protein, 178 aa, Zea mays
  unsure (1)..(178): unsure at all Xaa locations
  Clone ID: MRT4577_27580C.1.pep
QKIDTLLSKNSGQKALPRADXAPSPDMSHQLGHXMGLTRRSXLPDVMLDRFDVPXYITGEASAFYGCDPFGLADXRNDLSKQLGYELIHARWGMLGAAGAVIPEACQQFGANCGPEAVWFKTGALLLDGNTLNYFGNSIPINLVVDVIADGILVGGAEYYRITNGLDLDXKLHPGVPF

SEQ ID NO: 290015 - protein, 138 aa, Zea mays
  Clone ID: MRT4577_27581C.1.pep
MALASATVSSPSRIIRCFSSSTDSRPPLPLPLASRACSWHRLVVGRVGRPRALLGGFSDAGASESDDEEEHGLRGGKRDGEVDDALELSAPAVGPERWDVLGLGQAMVDYSGMVDDEFLERLSIEKGARNGINHEERG

SEQ ID NO: 290016 - protein, 172 aa, Zea mays
  unsure (1)..(172): unsure at all Xaa locations
  Clone ID: MRT4577_27582C.1.pep
PRVFFFFFFFFFFFFFFFVGFFFFFPGFIEKKGRHKNRGGHKRRGDEGAKGGGGEQTPKTRRKRTKKAKDGGRKALKQPNSPPAQPYPGGEPGPTTKRKAKGTDPGTGGQRTNPPGGPGHQGPPRLLGKGAGRARRGLGGGRGXPGASLRPTHPQTGRASPGNPGSTGGGAG

SEQ ID NO: 290017 - protein, 90 aa, Zea mays
  Clone ID: MRT4577_27583C.1.pep
RIPRCQNLHQSFQHHPLAQTYPVVRLRTYSNPLPHSRLLTAMSIRRGEERRRDWLDGGRRCREAEEGAPAAKGGALTRGNRSRRHAVHGK

SEQ ID NO: 290018 - protein, 89 aa, Zea mays
  Clone ID: MRT4577_27584C.1.pep
PPTPPENSSPLTTRMTPPTIIRPPPPPRGNAEAGAAAAAIPISSRRMPAASRSSLFAEAMGSRQRRWIEHEREGRGGTVKEPKESGWFF

SEQ ID NO: 290019 - protein, 89 aa, Zea mays
  Clone ID: MRT4577_27585C.1.pep
VTRRDGPQATAERIRASTVPDPANYFARSKTTDTGHFTRPGRYRFLRRLEGTSEEDGGRPIIRRTQGDLRLPICVRWEAHIAAIGTEAW

SEQ ID NO: 290020 - protein, 196 aa, Zea mays
  unsure (1)..(196): unsure at all Xaa locations
  Clone ID: MRT4577_27586C.1.pep
IRHEGTIIALQYEFIMKGPLHHFLGIVVVRLLDGLFLQQRQYILDILECADMLGCKRCATPVDTQAKVYGDNAPVSDHTTYHNLGDALXYLTFTQPDIVYHVXQVCLYMHDLWKSHPSAVKWILWYLPGTVDYWLHLXSAPHTXLVVYTDTDWXXCHDTRQSTFGFVGVFLGPTSYIDPLNVSSWPARALRMGIGL

SEQ ID NO: 290021 - protein, 123 aa, Zea mays
  Clone ID: MRT4577_27587C.1.pep
HKSIYSSCGEPPESHMYSYTHRNGNLTVLVKRLVPQHHLPGESEGKVWMWTRCSRCDHEHGVSKPTPRVLISAEARNLSFGKFLELSFSSHSAARRLSICGHLVNRDCLRFFGLGSKVAMFRY

SEQ ID NO: 290022 - protein, 73 aa, Zea mays
  Clone ID: MRT4577_27588C.1.pep
NPSGLKQPCQVLCVSACKSESKLAPGAFAYRLRRLTLVRLRRKGPCHCSQTARPTGRGGPPPSSLPNGRRAES

SEQ ID NO: 290023 - protein, 73 aa, Zea mays
  unsure (1)..(73): unsure at all Xaa locations
  Clone ID: MRT4577_27589C.1.pep
GLVLEIISRPPVKIFIYDGCSRPNTAAQLRLHYFXDDDCLPAPNDELYDKWLLQFISFMIIHNPGRLRHTSTS

SEQ ID NO: 290024 - protein, 67 aa, Zea mays
  unsure (1)..(67): unsure at all Xaa locations
  Clone ID: MRT4577_2758C.1.pep
TELLLIHTDQSFAXTARNDCYKRARNTYTLFPLSISVLLLPILLAYVFSVTFAYEIHIPLAYISVTE

SEQ ID NO: 290025 - protein, 71 aa, Zea mays
  unsure (1)..(71): unsure at all Xaa locations
  Clone ID: MRT4577_27590C.1.pep
RGTSNKEDHQCPASXSGVQTLNQCPSEGALAMXLNLCSARILSLSPSLYICARVHQLVNXSASLPEGGRPL

SEQ ID NO: 290026 - protein, 70 aa, Zea mays
  Clone ID: MRT4577_27591C.1.pep
NAQLCANNGRHNITPYYAPWSFCKCCYSYQRTKLLECSYRFTCSTVHYTSGALHHVLNRVLNTTGSNSLC

SEQ ID NO: 290027 - protein, 74 aa, Zea mays
  Clone ID: MRT4577_27592C.1.pep
LPLWVWGPFFFFCSSKKHHQLTTNPKQIIALHTTTQNLNRNQTKNSMNTAPKTPTARTLTSRALKTQNTGTIYL

SEQ ID NO: 290028 - protein, 140 aa, Zea mays
  unsure (1)..(140): unsure at all Xaa locations
  Clone ID: MRT4577_27593C.1.pep
MAAVAIHQFAECITCHAWSPDXSRHDQMVSGIDWSKSSNKIVTVSHDRNSYVWTQEGSDWVPTLVILKLNRAALCVQWSPKENKFAVGSGAKSVCICYYEQENNWWISKVIRKKHESSVTSLAWHPNNIYLATSSTDGKC

SEQ ID NO: 290029 - protein, 376 aa, Zea mays
  unsure (1)..(376): unsure at all Xaa locations
  Clone ID: MRT4577_27594C.1.pep
MAAVAIHQFAECITCHAWSPDQSMIAFCPNNHEVHIYKFFTDKWEKLHVLSKHDQMVSGIDWSKSSNKIVTVSHDRNSYVWTQEGSDWVPTLVILKLNRAALCVQWSPKENKFAVGSGAKSVCICYYEQENNWWISKVIRKKHESSVTSLAWHPNNIYLATSSTDGKCRVFSTFIKGVDTRGSKSSTSTDSKFGEQIAQLDLSSTWVFGVRWSPSGKTLAYAGHNSMIYFIDEVESSPVAQNLALRDLPLRDVXLFVSERTLIGVGFDCNPMIFAADDTGLWTFIRFLDERKAAPSASKASQLSEALGKLYGQSKQGTSSDTVEPSKPRGGAHENCITCIVPLRKGSDGSIKRFSTSGLDGKIVVWDLENHVSIAK

SEQ ID NO: 290030 - protein, 112 aa, Zea mays
  Clone ID: MRT4577_27595C.1.pep
SRGKGIGPRIFKSIPQADTNMRAQGHRSSQPCIFAAGTPTKKNSSRGTLNGAQLYKKNTQVQPIHHFPKKRNKRPILASSLATGPLHAGGPNILSHFLHKGPPFLFGGPPFL

SEQ ID NO: 290031 - protein, 91 aa, Zea mays
  Clone ID: MRT4577_27596C.1.pep
MNFNITNPSTVCQKKLEIDDYQNLRAFYDRMISHEVSGDALGEEFKGYVFKIMGGCYKQGFPMKQGILTSGRVRLLLHMGTPCLRGYGKRN

SEQ ID NO: 290032 - protein, 103 aa, Zea mays
  Clone ID: MRT4577_27597C.1.pep
WQVQGLNSEQHAPGKRRGGSLQSSAKPNLASKMMMQVGAEIRNTTLLNNRQPETRSDGSGTALTTAPDTNPAHSQSDSNASIQGAVAVVPTTPTSSLKSIAHA

SEQ ID NO: 290033 - protein, 73 aa, Zea mays
  unsure (1)..(73): unsure at all Xaa locations
  Clone ID: MRT4577_27598C.1.pep
MTEVLLNDRLGKKERAKCHEDVTIGDLKKLVAGQTATRPYKXRILKWYGIYKDHITLKEYDMHDGMGLELYYN

SEQ ID NO: 290034 - protein, 39 aa, Zea mays
  Clone ID: MRT4577_27599C.1.pep
SAVLMKVLIKNNFLPQFAILKPSSLAQFPIYSYCICSHF

SEQ ID NO: 290035 - protein, 46 aa, Zea mays
  Clone ID: MRT4577_2759C.1.pep
SAFPCDNSGAVPIGVIHFLRSMTIISFINHVHLYMVCKMIILSRWQ

SEQ ID NO: 290036 - protein, 190 aa, Zea mays
  unsure (1)..(190): unsure at all Xaa locations
  Clone ID: MRT4577_275C.1.pep
GGLXXISSLKXLCWALRMRXLWLHKTDPDRPWANLPIQVSKKARSFFSTVLVSEVGNGAHTLFWTDKWLLDQKMSNLAPRLFAIIPKITANKRTVLEAPTNRKWISDIKDALSVGALVDYLNFWGLLLXIVLQPEVEDKHVFSIAADGKYSAKSSYEGLFARSISFGHYHMAWKTWAPPTYQFFLWLATN

SEQ ID NO: 290037 - protein, 221 aa, Zea mays
  unsure (1)..(221): unsure at all Xaa locations
  Clone ID: MRT4577_27600C.1.pep
TSRPRRDPGWPRSCTGSTTTPRTAPCSSATTAARTTSRRPSPTSTASSGSPPTPSSWSSSRGSPPRSAAPPPARTPARTCPRTATRTTSSTSASTSRSCSASRWTSSPRHPDPCPQASPCHPPTXSASYGAPEGPASASGPSAGDAPAYGASASGPTADAPXRAXXPASSGPSSAPAPSSSESSGAPGPSSSDGSSSAPAPSSSDGSSSAPAPSSGDDGSA

SEQ ID NO: 290038 - protein, 76 aa, Zea mays
  Clone ID: MRT4577_27601C.1.pep
CIVRLQGLCSCSRPSIARAPTYQQLINRSPWLCSSSRPSCLAHLSRVPPRGWPCSPSRSCCFPARHPLRCRLLARD

SEQ ID NO: 290039 - protein, 288 aa, Zea mays
  unsure (1)..(288): unsure at all Xaa locations
  Clone ID: MRT4577_27602C.1.pep
TSRPRRDPGWPRSCTGSTTTPRTAPCSSATTAARTTSRRPSPTSTASSGSPPTPSSWSSSRGSPPRSAAPPPARTPARTCPRTATRTTSSTSASTSRSCSASRWTSSPRHPDPCPQASPCHPPTPERPPTGRRRRSEVPRXTRRHLRGPCQRQRAISXDAPAXRQRQRXTADAPAXRRRRRRRPGPLAHPRHRRLSPPAHQGRRRLMGPPAPRRHRRLMGPPAPRRHRPATTDQLERERXRSLGHFVPTQRRRSLLPITNWPSVYSSQCVMIITDATTYRTDNGYVAT

SEQ ID NO: 290040 - protein, 33 aa, Zea mays
  Clone ID: MRT4577_27603C.1.pep
ELRYNVYDKLIVQSKVLDRPKHYTFFKENGENN

SEQ ID NO: 290041 - protein, 51 aa, Zea mays
  Clone ID: MRT4577_27604C.1.pep
RHGHASSSRPVVICCVEHSRCRCWSVYMLMASSTRKKNESVCCNGFFFRDI

SEQ ID NO: 290042 - protein, 69 aa, Zea mays
  unsure (1)..(69): unsure at all Xaa locations
  Clone ID: MRT4577_27605C.1.pep
KKQKNVNRKKKRFSPPQXSHPKXLKPLTKSLKRQSVKTNFLLTGFNKKKSKAPCSKKKKKKESPHGSLT

SEQ ID NO: 290043 - protein, 265 aa, Zea mays
  Clone ID: MRT4577_27606C.1.pep
MSMDFGAPADDPKAFRNICRDRILKDLLKPDKDKETKSSWKVLIMDKFTVKIMAYACKMAEITDAGISLVEDLFKRREPMPSMDAIYFLQPLKENVIMLLSDMSGRCPLYRKAYIFFSSPIPKDLVTYIKNDSSVIPRIGALREMNLEFFTIDMQGFVTDHDTALIDLYGPSEQNSKKFNDTISTMATRIATTFASLKEFPCVRYRAPKGDASTTTKFDMVPKWLATAVWEIVSKYKSTIPEFPQKETCELLIVDRPIDQIAPVI

SEQ ID NO: 290044 - protein, 63 aa, Zea mays
  Clone ID: MRT4577_27607C.1.pep
PPLRTSTLVCALLAQQKCPGQLQTVRSHGNDAKYAVLQHISAPKPAIASCCLFSIHVSYICRA

SEQ ID NO: 290045 - protein, 80 aa, Zea mays
  Clone ID: MRT4577_27608C.1.pep
WASYFVHFETSTPYLGGDTAIFTVYLHGLQVMRSITDNITEEKLLEEIDEISLLPMYADRMQQAHTKMAQQQRRRLPPQC

SEQ ID NO: 290046 - protein, 63 aa, Zea mays
  unsure (1)..(63): unsure at all Xaa locations
  Clone ID: MRT4577_27609C.1.pep
QTLYWSATWPREVEALARQFLQNPYXGSPELKANHSIQQIVEVISDHEKYPSVQVIQVPKVHT

SEQ ID NO: 290047 - protein, 34 aa, Zea mays
  Clone ID: MRT4577_2760C.1.pep
GGGGLFLIVNCKNNNDGSKTTMIKLVVPDRTHLG

SEQ ID NO: 290048 - protein, 81 aa, Zea mays
  Clone ID: MRT4577_27610C.1.pep
ERHWRCRLSLGVAFCWYLSLRRTRSACWGAHLYYAAGLYANDQQYYFSNLRSAGVKVLRVWLDGESSGSSKAPRFAPIPTS

SEQ ID NO: 290049 - protein, 648 aa, Zea mays
  unsure (1)..(648): unsure at all Xaa locations
  Clone ID: MRT4577_27611C.1.pep
MAGKGEGPAIGIDLGTTYSCVGVWQHDRVEIIANDQGNRTTPSYVAFTDSERLIGDAAKNQVAMNPVNTVFDAKRLIGRRVSDPSVQSDMKLWPFKVIAGPGDKPMIVVQYKCEEKEFAAEEISSMVLIKMREIAEAYLGSTIKNAVVTVPAYFNDSQRQATKDAGVIAGLNVMRIINEPTAAAIAYGLDKKATSVGEKNVLIFDLGGGTFDVSLLTIEEGIFEVKATAGDTHLGGEDFDNRMVNHFVQEFKRKHKKDISGNPRSLRRLRTSCERAKRTLSSTAQTTIEIDSLFEGVDFYSTITRARFEELNMDLFRKCMEPVEKCLRDAKMDKSTIHDVVLVGGSTRIPRVQQLLQDFFNGKELCKSINPDEAVAYGAAVQAAILSGEGNEKVQDLLLLDVTPLSLGLETAGGVMTVLITRNTTIPTKKEQVFSTYSDNQPGVLIQVFEGERTRTRDNNLLGKFELSGIPPAPRGVPQITVCFDIDANGILNVSAEDKTTGQKNKITITNDKGRLSKDDIEKMVQDAEKYKSEDEEHKKKVDAKNSLENYAYNMRNTIQDEKIASKLPADDKKKIEDAVDAAIQWLDANQLGEVDEFEDKMKELEGLCNPIIAKMYQGAGADMGXGGMDEDAPAASGGAGPKIEEVD

SEQ ID NO: 290050 - protein, 196 aa, Zea mays
  unsure (1)..(196): unsure at all Xaa locations
  Clone ID: MRT4577_27612C.1.pep
LASGGSLHCHRNLLSDGRASSASSSLPTPPACTSXAALSPPSPAAAAAAAAASGAASSSSAAAFGSSLAPSLQWPCSRRTRQPAQARSRSCSSEHGCARRSGAAEASSEPPTISISTSTSLSTTAAVSSSTTPCSSSFSPRSSIAAPPVVVRFYFLAFNSVPSPHSPALGAARSRSSSTVVPGLPFPEVCSGPRLK

SEQ ID NO: 290051 - protein, 73 aa, Zea mays
  Clone ID: MRT4577_27613C.1.pep
IQGGATFWTNNAFAYIIGRPMLPLPELVTKGIEDLMWHWGVLTHELLHVHLAWQRDLLCCQYPHPFLKTHSDG

SEQ ID NO: 290052 - protein, 34 aa, Zea mays
  Clone ID: MRT4577_27614C.1.pep
IALLISPIRLRECYTEETRMPKSLCHSRWSSRER

SEQ ID NO: 290053 - protein, 172 aa, Zea mays
  Clone ID: MRT4577_27615C.1.pep
MSASMSRYAPPTRRAYTAVRAAPAAAARRPAGTHTHIHQINKRTRTNTSPPIMASRSSIVLATAMLATLFAVGLCTTPLTFQVGKGSKPGHLILTPNVATISDVEIKEHGGDDFSFTLKEGPTGTWTLDTKAPLKYPLCIRFAVKSGGYRIADDVIPADFKAGTTYKTTLSI

SEQ ID NO: 290054 - protein, 69 aa, Zea mays
  Clone ID: MRT4577_27616C.1.pep
SRVFDVTIPASPILPTIPTGPITRSRAKKIHQEVHALLYEFQLNTNENFMLPTSCMLILLRFIKEEGQN

SEQ ID NO: 290055 - protein, 98 aa, Zea mays
  Clone ID: MRT4577_27617C.1.pep
KKKKKKKKLKKKKKKIRQGYKILKNTKKKKKKLITKHKFTTFDYCLNLVYQLTLNPTNHQISIYLNITLIASQANTVADLPTLAHPELHLLHSIYLCI

SEQ ID NO: 290056 - protein, 63 aa, Zea mays
  Clone ID: MRT4577_27618C.1.pep
FRKIETAADHPHLSIPETEAGKTRNQYPRLINRSLMAVSVEAPVVVVGLAAYRVYPARKNASG

SEQ ID NO: 290057 - protein, 212 aa, Zea mays
  unsure (1)..(212): unsure at all Xaa locations
  Clone ID: MRT4577_27619C.1.pep
AGSIPNNPHLPLILRLRRPRVGWGTSGSTSLLFPQGSSSRSRVRVSTSLGFSAXPGRVRSRAGAGGXRRGSLRGGRAGRGKFXRAKPRVNIGAIGDVDHGKTTLTAARTVGLASGGGSAPXKCGEIDAGPEGRARGITINTATGECETETRHYAHVDCPGHADYGKNMITGAAXMDGAILVGSGADGPMRXTKEHILLAKGGGGPKIGVFLN

SEQ ID NO: 290058 - protein, 56 aa, Zea mays
  Clone ID: MRT4577_2761C.1.pep
RVRCAPSNPTAAKTDSVDRSRSYIGIQQLVCWCGIYMRYQTLTTPSTNQYFLILAS

SEQ ID NO: 290059 - protein, 117 aa, Zea mays
  unsure (1)..(117): unsure at all Xaa locations
  Clone ID: MRT4577_27620C.1.pep
QRSGYAXDISRCLAPXLALLVGAQHNRXXIIPNSAQTCSSVPFIPNSSSHLVTFNGGFEQIQPCXXPTRLQLAXLRRGRLKQQPHCPHWQQXXPWHKSKPXKPSXTQPAXQQFLPSN

SEQ ID NO: 290060 - protein, 111 aa, Zea mays
  Clone ID: MRT4577_27621C.1.pep
MEEDARQGRLFRMAADSDRTYTMVVTGGGVGKAAKGHSSDRVGILHPIRGRINAGRNQAPHKGSSCAEWGDLFSTIDRGPERLRVKQHPWNSITSGALTGAPESSLKGPLA

SEQ ID NO: 290061 - protein, 72 aa, Zea mays
  Clone ID: MRT4577_27622C.1.pep
AVCFCNRAAAYQALGQVTDAIADCSLAMVLDTNYPKAISRRATLYEMIRDYGHAANDLRKLISLLEKKVNVS

SEQ ID NO: 290062 - protein, 380 aa, Zea mays
  Clone ID: MRT4577_27623C.1.pep
KLDVIRRYGVFKELVLTYQHSHSRKSCLFTVYLVQKDSSLFEQTHFSGRYWRPYLFCKSYFLSGKLDEAVELLKKHEQVTPVKESDVNTYQENFSSLSAIIRELLSLKAAGNESFQAGRYSDAVKQYSAALACNSESRAFSAVCFCNRAAAYQALGQVTDAIADCSLAMVLDTNYPKAISRRATLYEMIRDYGHAANDLRKLISLLEKKVNVSGISPKAFNKHKDIKQAHARLSHIHAEAKNDTPLNLYLILGVEPSCSSADIKKAYRKAALRHHPDKAAQLLVRNENAEDGFWRDVIKEVYADADHLFKTIGEAYNVLSDPDKRQEYDFEENLRNARRVSSSRSMRRSPEHNYSDRGFNPRQWQSSRASRWYSKSDDYW

SEQ ID NO: 290063 - protein, 76 aa, Zea mays
  unsure (1)..(76): unsure at all Xaa locations
  Clone ID: MRT4577_27624C.1.pep
PRMRMEASYFQDQLRLDHMLVRLLLSATGYILYLTSFTSMIRFTHNLSTTLMXRTYLTFYDARSCHFQLRSHNCSF

SEQ ID NO: 290064 - protein, 153 aa, Zea mays
  unsure (1)..(153): unsure at all Xaa locations
  Clone ID: MRT4577_27625C.1.pep
MTNTRSARTTPRTRSPSPSADSDGENDGTPASGPAFSWGKLWRLTVPAYLMCIGFLNPENLEGDLQAVAAEPYQLLWMLLGATIMXALMQLLSARVSVFTGNCLDEFCRQEYPPXDTRALWTVTELAXLMGAHLQEEIGTAXIAIKIRLGRAI

SEQ ID NO: 290065 - protein, 149 aa, Zea mays
  Clone ID: MRT4577_27626C.1.pep
LRCARAEATGEPRPTIGKPRSRCCPAPLRYSWRRRLVGAVIAPGIAHWSEGGSRTRPSSWIGGSTHLPPVMFNSFAFISFLRPCTVESGPVHPPSRLEFLDGVVSPSIYSYLRRRESVVVRSLMRSFARFTIHRAMFGSVEICRGRILG

SEQ ID NO: 290066 - protein, 96 aa, Zea mays
  Clone ID: MRT4577_27627C.1.pep
TGLSLSTTNNLATLPEGLSTSTEYEPWFPMQLKLFLAIRHCSLYTGKTFLLDIKEPSASPNACSIIINQIASSTNINIFQNPQRMIPPTARCRKCF

SEQ ID NO: 290067 - protein, 60 aa, Zea mays
  unsure (1)..(60): unsure at all Xaa locations
  Clone ID: MRT4577_27628C.1.pep
IHGEAYSCPXCCGRXHLTQGGPLVGDGASGSGPIGVKDKPYWIIKTXWGKTWGENGIVQR

SEQ ID NO: 290068 - protein, 299 aa, Zea mays
  unsure (1)..(299): unsure at all Xaa locations
  Clone ID: MRT4577_27629C.1.pep
MFHGHGMEKIHLPPGTKAIRDICVLPGGHVVFASLGRKLSIFSVATNNVVLQYDLPAPGWSCSGDYTTSSHIYAGLQNGMLLVFDIRQTSAPLHSSMGLSTHPVHTIHCAVDGSGSRKVFSASSIGPCVWDAXRKQPSLVSGMENQGVCISLACSSPSSDVLVASYRPRVELPDAIATSQASTPQSPAPTGSGKLGCHTFLRRTTATSFARDHICSGSVSELRMSKSAIIPCRDNQHLFAYGDESLYGVRTWRLPSFQRYTDLKPHRQPVLDLRYAESSTGERYLGCLSAEKLQVFTIR

SEQ ID NO: 290069 - protein, 122 aa, Zea mays
  unsure (1)..(122): unsure at all Xaa locations
  Clone ID: MRT4577_2762C.1.pep
FPPSRARWRGWACGSPWSCRPGQDPSPSPRSRSRLWSLSGRGHLRFPCRRHWPGSSRGRGVIVVAGAWSGRAKGASSSWHXDEGGDGAKRGVVGVARMPFFFFFFFFFFFFWKNFFXRPXLD

SEQ ID NO: 290070 - protein, 244 aa, Zea mays
  Clone ID: MRT4577_27630C.1.pep
MNLLDYKSRPILSLTSIFAAWKSFLLAIALGASIGPDYDTSTSLFFAIVHGASSPRSLATRLTRWDALYFMHDAVKGKVYEQEWAFGIALVAIVISHVSHLVAVLALYQLTIVLCNDRKLAYLASVVHVLSPAGLFISAPYAESPFACMSFVGNLLYAISLKSSPDSLKRNLAVVGAGLSYGISCTLRSDGFFGGVLFAVETVKCLLALRNGFPISKILRLVAPLIGGILVAGGIVAPPVLAWM

SEQ ID NO: 290071 - protein, 154 aa, Zea mays
  unsure (1)..(154): unsure at all Xaa locations
  Clone ID: MRT4577_27631C.1.pep
RPPQNKRPPGRGGGGDGRRNXAXADPAHKPEEDXDTDGXXKESXXRXHTTPRAGXRRQRARRTXAXTXGXRTKRTXTTKXRATXRSKXATGXGXAEGAXPTRARTRRSTGTXXPGPRGRPSTPAQQRKKKPRTPTTRXSGGERRGREHPPAPGP

SEQ ID NO: 290072 - protein, 62 aa, Zea mays
  Clone ID: MRT4577_27632C.1.pep
KKKKNPPPPPKVCLSFFFFFLTSIGQYIHSNQYFIKTIAYMLVIPHMMNRVVVLLAKAASCR

SEQ ID NO: 290073 - protein, 197 aa, Zea mays
  unsure (1)..(197): unsure at all Xaa locations
  Clone ID: MRT4577_27633C.1.pep
MRKDTPPPLVPPAAREWNLPPNAPACMERQLEAARYRSDGSLLLGVSSLSGRCWVGSLWFFKDPSAAPNEGFCSAGVQTEAGVADLTWVGDKGILVASDSGAVELWELDENETLIVSKFCKYEHDDIVSTVTVLSSGTQAVSGSKDCCIKIWDLAQQVSLNSYRAHAGQVTCVAASPHXDSVFLSCXEDSRILLWDT

SEQ ID NO: 290074 - protein, 36 aa, Zea mays
  Clone ID: MRT4577_27634C.1.pep
PSPRTDVGYNHPVDASTDATTIVTHTTIVSLLSLHL

SEQ ID NO: 290075 - protein, 54 aa, Zea mays
  Clone ID: MRT4577_27635C.1.pep
LYFFFFCFLNISCLNSHFIYTHYKFYSYIITINHLFKFALKKNPTFLFHLHLFS

SEQ ID NO: 290076 - protein, 48 aa, Zea mays
  Clone ID: MRT4577_27636C.1.pep
DLKIALSRETIIELVYPRGYLFPLYPYFPCSGGWWSCVVKSSLCTLFI

SEQ ID NO: 290077 - protein, 198 aa, Zea mays
  unsure (1)..(198): unsure at all Xaa locations
  Clone ID: MRT4577_27637C.1.pep
MATRIQFENNCEVGVFSKLTNAYCLVAIGGSENFYSTFESELADVIPVVKTSIGGTRIIGRLCVGNKNGLLLPHTTTDQELQHLRNCIPDQVVVQRIDERLSALGNCISCNDHVALTHPDLDKATEELIADVLGVEVFRQTIAGNILVGSYCAFSNRGGLVHPHTSIEDLDELSTLLQVPLVAGTVXNRGSEVIAAGM

SEQ ID NO: 290078 - protein, 71 aa, Zea mays
  Clone ID: MRT4577_27639C.1.pep
LWIRRATPFLVNRVRMFTIPSTFTATTCELKKKYSCNIAGPKYREILGPKGHHCHELAIAACPAQASVLSR

SEQ ID NO: 290079 - protein, 106 aa, Zea mays
  Clone ID: MRT4577_2763C.1.pep
RNHIHVCLICLESQTDTTSILKYLSLASLFLNQTETNKKELRSISLRICCHLPYLLKLLCIFPTLADPKLPSLLKMLKWTQNQLDEKAAYPRIRDFCPAAKKNPSI

SEQ ID NO: 290080 - protein, 115 aa, Zea mays
  unsure (1)..(115): unsure at all Xaa locations
  Clone ID: MRT4577_27640C.1.pep
IFPKGNKIWIFRSFFFFFFFLFFFFFFFFFFEHHISQVRSVPKILEYLDQHHKFLWYRSGFNIAIKCDYSTNNTAEVFKNWVKXHKDLPVCIWLEXIREMTMEXFHRRRRIGQKP

SEQ ID NO: 290081 - protein, 63 aa, Zea mays
  unsure (1)..(63): unsure at all Xaa locations
  Clone ID: MRT4577_27641C.1.pep
DNMAALLVAXNTLKIIPFKLPSVGPLYVLFLMKSIFICCIYFHFLMDIRIFHFYFNEPFVILH

SEQ ID NO: 290082 - protein, 82 aa, Zea mays
  unsure (1)..(82): unsure at all Xaa locations
  Clone ID: MRT4577_27642C.1.pep
SRDXASSRGAREFVEREVIDFARRNPGVVIYVNSRPCCVTRVVXRXLNGAVREESIHCKSVEEISTLVQKLADQSGLDVIRI

SEQ ID NO: 290083 - protein, 61 aa, Zea mays
  Clone ID: MRT4577_27643C.1.pep
PKPVQKPKPKPMPKPKPKPCSKPKPLLKPEPMPKPEPKPEPKPNEPKPKPPPKCKPPTAHN

SEQ ID NO: 290084 - protein, 101 aa, Zea mays
  unsure (1)..(101): unsure at all Xaa locations
  Clone ID: MRT4577_27644C.1.pep
SITHYAFXADSFKRRCAPPTFXXSXPTFLLYPILKNTPSSPKIILFSLLRHINHISTCKSTLPPVRTQIVSTSIHNSKQNSSNTNILTIHIYIHVSNSITS

SEQ ID NO: 290085 - protein, 157 aa, Zea mays
  unsure (1)..(157): unsure at all Xaa locations
  Clone ID: MRT4577_27645C.1.pep
IPPCPMGCANHWGDLXPDNKKKLRGRLCPTCAPLERFFTWXSPPKLCALLCITGDTEECTIHVVQLVARILVSPSTLLICRDHPSRQKAHPIGYASRNWGPLWAFQQNIKVSDFCSLGQRPTGSGSSSVVLGGHVYSPLVLFQKCCLGVSAIIKLLV

SEQ ID NO: 290086 - protein, 193 aa, Zea mays
  Clone ID: MRT4577_27646C.1.pep
MASPSSSSFPSRKALSKIACRRLQKELTEWQVNPPAGFEHRVTDNLQSSLAAAASSRPGEPSSVAKGRYRMKQQQKRWVVDVAGAPGTLYTGETYKLQVDFSEHYPMEAPQVIFLHPAPMHPHIYSNGHICLDILYDSWSPAMTVSSICISILSMLSSSPAKQRPADNDRYVRNCRNGRSPKETTWWFHDDTV

SEQ ID NO: 290087 - protein, 69 aa, Zea mays
  unsure (1)..(69): unsure at all Xaa locations
  Clone ID: MRT4577_27647C.1.pep
LGDPTQNAIKTGPFYGXHSQYTPPISCCIGGGKGAQQGTLPVPAGCTDQTAKNFDPTARSDDGSCLYTF

SEQ ID NO: 290088 - protein, 85 aa, Zea mays
  Clone ID: MRT4577_27648C.1.pep
FGFRGGFPGDCVVITCRLISFWWDFGKLLFGNKGEVSWELGSRWASPFFVSFWFGGSFFELVIRGIPLFLGLFWGSRWNKKVWNF

SEQ ID NO: 290089 - protein, 154 aa, Zea mays
  unsure (1)..(154): unsure at all Xaa locations
  Clone ID: MRT4577_27649C.1.pep
MASFHRPLSAMAVAAFAAVSSIELPDKLSHHNRLPDDVVSLPASKPEAITAPSALPLSGLQFMPRNLQAFDPAKAPVASLPVIQTVYQYARLAKTSPEQEVALPAIPSSSSDALYRWHLPDPRACHGSPDRSQTVVVLLGWLXSKQKHLKRYAD

SEQ ID NO: 290090 - protein, 34 aa, Zea mays
  Clone ID: MRT4577_2764C.1.pep
FVAPSYSQASVFFCSVSSDCRWMRFMLKKGRECI

SEQ ID NO: 290091 - protein, 47 aa, Zea mays
  Clone ID: MRT4577_27650C.1.pep
YPSCPHQNLMDGLYTHTNAGGGILMLQDDQVSWLNLIKGSDSGEWVD

SEQ ID NO: 290092 - protein, 76 aa, Zea mays
  unsure (1)..(76): unsure at all Xaa locations
  Clone ID: MRT4577_27651C.1.pep
RLGRGFXFQEGSAHAPLEAPPAWPGVFGKGGYPGXRGLFLVNQAKGANFKSHGAPGKKNLGPGLVYLEKLLGPPLG

SEQ ID NO: 290093 - protein, 87 aa, Zea mays
  Clone ID: MRT4577_27652C.1.pep
CCSSTQRLVPRVIATARVALMQERLCMIQARSRAPNLCTEILLSPASISCAYLPSTKLSKMYYLKPWSVSHVRSLTLCAKQPRRIVA

SEQ ID NO: 290094 - protein, 130 aa, Zea mays
  Clone ID: MRT4577_27653C.1.pep
LTISHTKFNRHSCFGERNCTGCSKDIKSVQKPKTCATRLHCYLEGSRLQEENRSSSPSIFNTCCVPGVVDPWLRNCEQHTMRRHCLAYIGEEEEHAHGNDDDDGGLRPRAQVGRELGADLVHADEHLVLP

SEQ ID NO: 290095 - protein, 157 aa, Zea mays
  Clone ID: MRT4577_27654C.1.pep
FPLCIPFPPPQDSVYVSRLQWPTPPITPSTHTHFTPILGLVTSHTRAQRTGRRRAERYGDETRARENEAPRQEIHGWRLKTTRRPARAGRSPTAKVADARRELSWSSEQKQGEDGEGSRLEQGIPASSPWEPLGAIEEGAAGRSPGPASRYPIRPAS

SEQ ID NO: 290096 - protein, 32 aa, Zea mays
  Clone ID: MRT4577_27655C.1.pep
GVSRLHNINYYPNYGNDSSYKILSSTTRVPTV

SEQ ID NO: 290097 - protein, 97 aa, Zea mays
  Clone ID: MRT4577_27656C.1.pep
LPSWTPPNKTSSNPTYLPPKKPKTISRTLSNFQPSSSFIKLLCGGIDPQKKSRGPQLKPPFFPPQIFLIPRTPHLAPLTPHQKNTPLGPLTTLRILK

SEQ ID NO: 290098 - protein, 36 aa, Zea mays
  Clone ID: MRT4577_27657C.1.pep
IIITVYILISSSLSWGNPPTIYYTSPRPSTPRSYHG

SEQ ID NO: 290099 - protein, 63 aa, Zea mays
  Clone ID: MRT4577_27658C.1.pep
AKRAVTNPSLVLRWSPYAQLTSMTGGLAPTSSFFTLDSGFKDKGNISNMSGAFTAPSALTSNY

SEQ ID NO: 290100 - protein, 114 aa, Zea mays
  Clone ID: MRT4577_27659C.1.pep
PGSSLQPMQLSVPELVQEPQERGDATPAQGELRVVPVVDVAAGLRLPPVATASDGAVDRAENSVRPDGARTVGAGVHLSRSAVTVAVIGRGRAAHGLHLVKEPAEAMRALHHRL

SEQ ID NO: 290101 - protein, 76 aa, Zea mays
  Clone ID: MRT4577_2765C.1.pep
SAKVLPVGTAQSMVDALTRCSELSGLLASWKRCDSIGIPALKQAKKGSLGGIKESFVWTDSLLTDMPITHASDALT

SEQ ID NO: 290102 - protein, 85 aa, Zea mays
  Clone ID: MRT4577_27660C.1.pep
ATAPGQKQTPLEPPPRTRSGHFKQKKLPLPYDPATPLPEIQAKSCPGVFVATYSAMANITPNQEELACADTCTHGCPKVPHPEVG

SEQ ID NO: 290103 - protein, 94 aa, Zea mays
  unsure (1)..(94): unsure at all Xaa locations
  Clone ID: MRT4577_27661C.1.pep
VHVSTLPVPCVEPLDVPELAVAVSVSTALTELAECCVYSAQVVTESATTHLIEPRXLCMRQDTAGGLDTDAFDGLACPMGHLTLTKQESPCFVM

SEQ ID NO: 290104 - protein, 163 aa, Zea mays
  unsure (1)..(163): unsure at all Xaa locations
  Clone ID: MRT4577_27662C.1.pep
MDTTQDHFQDAALQYLVNPLLDASQISDGIDGSSHDNRPPIPGQSCEIYNFLDETIVPSTPPKSHPYLLVXIGSGVSFFQVSENNQCQRISGSXFGGSALCGLLLLLTRARTYEDMLEQAEKGNNANVDKLIGDIYGMDYNRIGMKMTVXGFERFAKVFSPGA

SEQ ID NO: 290105 - protein, 75 aa, Zea mays
  Clone ID: MRT4577_27664C.1.pep
SFNRQWFLAARSFKFPVGGLFLSPSFNCPPFGLLKFELFGANLAGLNKGPPLKPHSHESGIPRALQFKAAALSRG

SEQ ID NO: 290106 - protein, 47 aa, Zea mays
  Clone ID: MRT4577_27665C.1.pep
SQRLSRLLCVSCPRQRWETSDMKKRGTLTRTRSRTRGRTGGSDPNFR

SEQ ID NO: 290107 - protein, 67 aa, Zea mays
  Clone ID: MRT4577_27666C.1.pep
LFIYWGRNNLFRSGVRTHARNIHVNTGVALCVYNFYLGGNTIGNLIDRPKDYSRFYGNGWNWCWRTA

SEQ ID NO: 290108 - protein, 86 aa, Zea mays
  Clone ID: MRT4577_27667C.1.pep
PNPRKVLIIGGGDGGVLREVVKHPSVESVVQCEIDEDVIQVSKKFLPGMAIGYSSSKLTLHVGDGFEFMKQNQDAFDVIITDSSDP

SEQ ID NO: 290109 - protein, 128 aa, Zea mays
  Clone ID: MRT4577_27668C.1.pep
VGAWRQALRNAQSQLQHQIIRIENLELMLKYGVDVWKLQNRQMESVLSRMQKMAVEYNERVENVNRERKFHQQNTGGQLHALKMEWQELCQKNIAIQAACVDLQNHIDQLKLEAKELGMPMDDNSGRI

SEQ ID NO: 290110 - protein, 39 aa, Zea mays
  Clone ID: MRT4577_27669C.1.pep
RLRNSIAQRRPFLKKMRAHLHVGVLQRGPLPVLRDHCGL

SEQ ID NO: 290111 - protein, 138 aa, Zea mays
  unsure (1)..(138): unsure at all Xaa locations
  Clone ID: MRT4577_2766C.1.pep
SPRELXQTEWSSSCFTFCAATSACAIAGASNADGKAEPTWYQSRHSXPPRILHMSNTNVGATSDHMYXTDATLLKEMDMDAYRFSISCPTILPKGTXEGGINPDGIKYYRNLINLLLEHGIEPYVTIFHWGVPQALEE

SEQ ID NO: 290112 - protein, 55 aa, Zea mays
  Clone ID: MRT4577_27670C.1.pep
PLTKGPLLFSHYSSLSKKPFYFVTFFLVPYPMILLILAMFVPCVTILSSLSNPSP

SEQ ID NO: 290113 - protein, 254 aa, Zea mays
  Clone ID: MRT4577_27671C.1.pep
MASSATREVLMLEAPPPSDPAAGPWRAVPDAEAIDALPYIDGDYGDAAVKREVDRLVEEEMRRGKRKPADFLRDLPPVPTAGFENHPMLAKEYERVRAGKPPFMLDMSRYGLEPPPMNKRNDVGAWRQALRNAQSQLQHQIIRIENLELMLKYGVDVWKLQNRQMESVLSRMQKMAVEYNERIENVNRERKFHQQNTGGQLHALKMEWQELCQKNIAIQAACVDLQNHIDQLKLEAKELGMPMDDNSGTDPQAS

SEQ ID NO: 290114 - protein, 305 aa, Zea mays
  unsure (1)..(305): unsure at all Xaa locations
  Clone ID: MRT4577_27672C.1.pep
PSAPTRAPTRAAALEDILLCNTKRVILDLKPGAQFREKLFLNISKPFITFRSDPKKPAVVVWNDTAATNGKDGKPVGTVGSATLAVESDYFTAYGVVFRNDAPLAKPGAKGGQAVAVRLFGTKTQIYNCTIDGGQDTLYDHKGLHYFKGCLIRGSVDFIFGFGRSFYEDCRIESVVKEVAVLTAQQRSKSIEGAIDTGFSFKNCSIGGVKGGQIYLGRAWGDSSRVVYSYTKMGEEVVPVGWDGWXSPSRRAXIYYGEFKCFGPGADAKKKKRVGWALDLTEAQAKPFVGTHYVLGDTWIQPPPK

SEQ ID NO: 290115 - protein, 81 aa, Zea mays
  Clone ID: MRT4577_27673C.1.pep
ESLPPNSKLIIERQSSYIFIHKEPDRVYRNSTNQGILAYSVATHKARHQSRDPCLFCTAHKARHQSRDPSLLCYSAQGKAS

SEQ ID NO: 290116 - protein, 67 aa, Zea mays
  Clone ID: MRT4577_27674C.1.pep
WHSQHSGNTQSETLIHAWRKNEFQNLTYRKPTRKPSRLIFKLNRTRAIMFGLQILIVITPLLTDFCY

SEQ ID NO: 290117 - protein, 89 aa, Zea mays
  unsure (1)..(89): unsure at all Xaa locations
  Clone ID: MRT4577_27675C.1.pep
LYKRTIVRIDGGWFGSWAPERMLWDHIIYKPMRAMLGGRVTFGLCGGAPMXSDTQRSMNILIGVPGGQGYGLTETCAGAAFTEWDDTSV

SEQ ID NO: 290118 - protein, 109 aa, Zea mays
  Clone ID: MRT4577_27676C.1.pep
GTLGVASPGYVSMLLGGALSFNLIFPSNEPDIWRLMGMWSIWMFTIPSLRARDCSNKDSEALNYLFLLIPLINVMIPFFVKSFAVVWSADTVAFFVMYAWKLGWLQRLK

SEQ ID NO: 290119 - protein, 242 aa, Zea mays
  unsure (1)..(242): unsure at all Xaa locations
  Clone ID: MRT4577_27677C.1.pep
MLSTPAAGWRFRRGGLPWRLHTCSCLASPLSSRGGEPEKARPLLAERYRDGVVKRYISDGSSKLQLRLEKHESPVNGVEDENADSLIPQAILDFVLPAGFPGSVSADYLDYMLLQFPTNVTGWICHVLVTSSLLKIXQAVGVGSFTGTSAAASAAAIRWVSKDGIGAFGRLLIGGRFGALFDDDPENVRMYAGNCGXAYKHIELSTTLATXYFPPLASLXGNLAKAVARRFKXDPSFSPLSK

SEQ ID NO: 290120 - protein, 277 aa, Zea mays
  Clone ID: MRT4577_27678C.1.pep
MAAAVSRAICVQKPGSKCSRDREATSFARRTVAAPRPPRAKAAGVIRSDSGAGRGQQCSPLRAVVDAASIQTTKKSKWRLSLPRASYNGSGSGAAAAEPSTVGDTLEREEGGGTEAGASADESSNRKQPPPVDPKIEKELKKVVQKTAATFAPRASTKTKNPAVPGSTLYTVFEVQGYVSMLLGGALSFNLIFPSNEPDIWRLMGMWSIWMFTIPSLRARDCSNKEKEALNYLFLLIPLINVMIPFFVKSFAVVWSADTVAFFVMYAWKLGWLQRLK

SEQ ID NO: 290121 - protein, 68 aa, Zea mays
  Clone ID: MRT4577_27679C.1.pep
VHGPPPRPPPPPPPPPPPPPPPPPPPPPLFQKGGNGWILTGGVTGFTKGPFPRKVKWFFILTRVPREF

SEQ ID NO: 290122 - protein, 271 aa, Zea mays
  unsure (1)..(271): unsure at all Xaa locations
  Clone ID: MRT4577_2767C.1.pep
MARHPGVDWSTTALFQQVRVVGVRPGALQRSWIILSACAVVQLPVYLFTEPLLVALGQDPDISAVAGTVALWYIPVLFSFVWAFPLQMYLQAQIKNMIITYLAMLNLGLHLALSWLAAVHLRLGLAGVMGSMVVAMWIPVFGQLAFVFFGGCPLTWTGFSSAAFADLGAIVRLSLSSGVMLXSKASHCGLWVWMVSIRIVVFFSFSLELWYNTILVLLTGYMKNAEIALDALSIWXNIKGTLMIMSTDHSTLSSLASCFTKCAALTSMVGR

SEQ ID NO: 290123 - protein, 50 aa, Zea mays
  Clone ID: MRT4577_27680C.1.pep
ICCFSRILHQRHWNLTQHCQKRYTLLIILQIVSPRQNLPPSLYSLRISGT

SEQ ID NO: 290124 - protein, 45 aa, Zea mays
  Clone ID: MRT4577_27681C.1.pep
LQVEMLSLQGKRKLMTCKGTTNAHTSTGPKDKMPQSKVHRLGGVA

SEQ ID NO: 290125 - protein, 144 aa, Zea mays
  Clone ID: MRT4577_27682C.1.pep
APAPSPPGAPHQQQRSCLRPRLLPRTARPLRGVRAAQVAAQGRHRQEGPPAPRGLTKAKPCHRRHDRMHAMPPRAMLSFFVLRFIRQRITRASVAPARHWPFAASAIDGGQILGLPDKTEDTTTKGGRAGRPASTIDQIRVFLQ

SEQ ID NO: 290126 - protein, 56 aa, Zea mays
  Clone ID: MRT4577_27683C.1.pep
IRLGKYKNLGLPRVIIRHNNCHLAPAYLGPSLLEGADDPDTNGCRGTAPLSSTTIR

SEQ ID NO: 290127 - protein, 75 aa, Zea mays
  Clone ID: MRT4577_27684C.1.pep
GSPESQARDHCNTICPYPYSDPELAHHRHYANSTERPKRWTQTRLTWTMQGKIALHSSSTYNHKYPLNILLDCTA

SEQ ID NO: 290128 - protein, 76 aa, Zea mays
  Clone ID: MRT4577_27685C.1.pep
TYHVVQLLWRLKFLANVHYSLLQYVVCLLIYKENMIGILHAHKCVVEDYVFAHFHATRMVHTHEDSHARDHLICDN

SEQ ID NO: 290129 - protein, 43 aa, Zea mays
  Clone ID: MRT4577_27686C.1.pep
QLLLHALYYHHRGVSIKGRGHFHYNLLLHSLFPLLLQLYLLCD

SEQ ID NO: 290130 - protein, 77 aa, Zea mays
  Clone ID: MRT4577_27687C.1.pep
NLSWPGGVKKVSTTSTGQNHQPLRKPFTSGSFPIRAQWHARLGHQSPPVVQSILYLNKIQSSPESPKKKKKKKKNIK

SEQ ID NO: 290131 - protein, 134 aa, Zea mays
  Clone ID: MRT4577_27688C.1.pep
MASGDGKPRSEEEWRAVLSPEQFRILRLKGTELPGTGEYNKFYGDGAYNCVGCGTPLYKSTTKFDSGCGWPAFFEGLPGAIHRTPDPDGRRVEITCASCGGHLGHVFKGEGFKTPTDERHCVNSVSIKFTPASS

SEQ ID NO: 290132 - protein, 137 aa, Zea mays
  unsure (1)..(137): unsure at all Xaa locations
  Clone ID: MRT4577_27689C.1.pep
LHRAASPTRLLLALASEDDRHFLPDEMTIRTKNSGIAGKYVTRHGASLPTQIKKMEVSQHSKYFXEFCGQLVVHIKASGICRCYDCXKVKAWGDYTMYTAMAVTVITTILAPAIADPSMIARNLKTSTWIFVDQPRV

SEQ ID NO: 290133 - protein, 104 aa, Zea mays
  Clone ID: MRT4577_2768C.1.pep
MQLGMASALETLCGQSYGAKQYHMLGIYLQRSWIILSACAVVQLPVYLFTEPLLVALGQDPDISAVAGTVALWYIPVLFSFVWAFPLQMYLNRTGVSTTNRATG

SEQ ID NO: 290134 - protein, 97 aa, Zea mays
  Clone ID: MRT4577_27690C.1.pep
ELEITALHINLHATDGNKSKTYGPGAHSDLRALAQSGIKIGRIDDVTPVATDNTRISDIEQKDLNFSTDLLPCTEVAVTSLYGYHILNYYAYYRLNY

SEQ ID NO: 290135 - protein, 55 aa, Zea mays
  Clone ID: MRT4577_27691C.1.pep
STLQRIIIIQMIPSIHFKFSFILTFFILIFCPIFFLNKSLHSSNLPFFYFQFPLY

SEQ ID NO: 290136 - protein, 43 aa, Zea mays
  Clone ID: MRT4577_27692C.1.pep
IPGQTHESRLMPGANLNPSHCAHLHMMQHPRMHLYCKNRQMLR

SEQ ID NO: 290137 - protein, 47 aa, Zea mays
  Clone ID: MRT4577_27693C.1.pep
SHWPSARIRQRLSQWLACCRLLRNINIMTGEHLKTFYLQIKYESRLN

SEQ ID NO: 290138 - protein, 114 aa, Zea mays
  unsure (1)..(114): unsure at all Xaa locations
  Clone ID: MRT4577_27694C.1.pep
DVHASVELGSCIAGALHAFVELLMNWTIHXSRHANVITLGFIMARNXALGILPNVVIFADIGGFRTGLLLGFLLLAPPEFRXMESHEVTLTXRCSEHKACQGILGVVGLXVLLL

SEQ ID NO: 290139 - protein, 86 aa, Zea mays
  Clone ID: MRT4577_27695C.1.pep
STSFLFIRHLRFWVILVFIGQTWCSSESCFTKSPSHGFEVTSSHFRGKSLPWFIPFRDPTHVGASDIVSTLFISLHSFQSMHILLS

SEQ ID NO: 290140 - protein, 116 aa, Zea mays
  Clone ID: MRT4577_27696C.1.pep
VMFMHPPSMSGMPSFFLLCISHDLVNKEMYCCPVSHIYLLCAPLDKLTIDHSLQYVRSKVFPSKKRNNDDPQVTSVNYITYKDQSTTIYLLSTKHAPQMYIHKCLRNKTTNTSCLQ

SEQ ID NO: 290141 - protein, 178 aa, Zea mays
  Clone ID: MRT4577_27697C.1.pep
AKAGRDERRGKFREVSQGKRGGSACTDTNRQENAPGSCERGKQIGRKMGTQPWNKGVASRAKNRRGKKSERKGDGQVGDRIRQSKDQSMDWSRDMRVRRELRRVRLTVNTMTGRIGRPRAYAGKETYQGVELCLWIWPSFFPLSLPCLPRRWRRRDLVGRHTLQMSGQPRADLRAELL

SEQ ID NO: 290142 - protein, 348 aa, Zea mays
  unsure (1)..(348): unsure at all Xaa locations
  Clone ID: MRT4577_27698C.1.pep
MAVLSAADASPVSAIGFEGYEKRLEITFSEAPVFVDPHGRGLRALSRAQIDSVLDLARCTIVSELSNKDFDSYVLSESSLFIYPLKIVIKTCGTTKLLLTIPRPGQKWHVFYATEYPEQPMVNLEMCMTGLDKKKASVFFKTNADGNTTCAKEMTKLSGISEIIPEMEICDFDFEPCGYSMNAIHGSAFSTIHVTPEDGFSYASYEVMGLDATALSYGDLVKRVLRCFGPSEFSVAVTIFGGRGHAGTWGKALGAEVYDCNNMVEQELPGGGLLVYQSFCAAEDAVATSPKSVFHCFDGENVESAPPPMKKDYKLANLLCWEEEADAMEEKXAGVLDEKDGLLGSICF

SEQ ID NO: 290143 - protein, 66 aa, Zea mays
  Clone ID: MRT4577_27699C.1.pep
AGVVSFPAVSNALPGPGATAAARVATIAATTICRSVGEPSHVDNHQPSWCCHSRYANSGLVRLPPS

SEQ ID NO: 290144 - protein, 34 aa, Zea mays
  Clone ID: MRT4577_2769C.1.pep
HQTKLSTDSNEPCRRFHSFRISIIHCTMHRHLIY

SEQ ID NO: 290145 - protein, 144 aa, Zea mays
  unsure (1)..(144): unsure at all Xaa locations
  Clone ID: MRT4577_276C.1.pep
AWFYQQQLWLQQLQLSIVQEHVLSPLDKTSPKTRNFQHMCFNSRISSIINMVTESTPNPLVALPNPFQFFQVSRHTSPMVFSHHHHTSSSQDLFCDGSVICDWKTSFAAASISRCTRCHEISRRQTGWLMAENTTTELEAANXM

SEQ ID NO: 290146 - protein, 124 aa, Zea mays
  Clone ID: MRT4577_27702C.1.pep
ILSPFPPFPGFFFFFFFFFFFFFFGGGIQEGCNPRFWGGQHHFLGTTLGGPGPFENGANSILLTGVKTTNSLPWDTPGGFPKKNAQTGPLFVPLLGGPPFGEIPPFVTALFFKPPWGLGPPPGF

SEQ ID NO: 290147 - protein, 105 aa, Zea mays
  Clone ID: MRT4577_27703C.1.pep
SAHTPPARQPTHSTKTSTTTHKPPKIGATNAQPSSRTHTTSFQTYPSPNIMSRKHFSPSGKKTTPLVSPNLEFFMRSRYCFMCTNQSLSHRKRINTRKCPSARPP

SEQ ID NO: 290148 - protein, 44 aa, Zea mays
  Clone ID: MRT4577_27704C.1.pep
PTTSKTQVFSLQYPNLRTRAYNMWVYLYLHLNSNHLPYTNIHTP

SEQ ID NO: 290149 - protein, 148 aa, Zea mays
  unsure (1)..(148): unsure at all Xaa locations
  Clone ID: MRT4577_27705C.1.pep
PGRSLPXRRALWAAAGLVLSPFLVPXCWXGRSVRAFSLXRPPGXGAFLAGRFGWXXXGFSPSVRCXXAPPPLCXPPLSGXLRPLXPSSGRRXCAXFFXXSPFXRGXXAGXFFFFFFFFFFSFFFFFFFFFFFLTXFXYPAYSALLXLL

SEQ ID NO: 290150 - protein, 70 aa, Zea mays
  Clone ID: MRT4577_27706C.1.pep
SIPISTPYPLRSLLQSQALLRSPLRSPRRPRHITSLLWTPTHYGFRSLILRLRGAVHCMLCLCLTLVAFQ

SEQ ID NO: 290151 - protein, 239 aa, Zea mays
  unsure (1)..(239): unsure at all Xaa locations
  Clone ID: MRT4577_27707C.1.pep
MDFSLLRSLDALKSSHHFLPLLLPTVTTSHYRAMSSATNLRLLSWNCAEDPLDFGAFADTAFLLLQRRAATRKRAVSSEAVQVRAVDKLGVGAAEGDEKSRAAKKGNSNNHSDNKTVKIMTYNVWFREELELIRRMNAIGDLIQHHSPDLICFQEITPNIYLLFEKSDWWQAYKCSLPHNMAMERPYYCMQMSRLPVKSFDRKPFLNSKMGRELCVADVTVGGSIKLVLATXHLESPCP

SEQ ID NO: 290152 - protein, 213 aa, Zea mays
  unsure (1)..(213): unsure at all Xaa locations
  Clone ID: MRT4577_27708C.1.pep
IFDFFPVNVGGGCAKNASSWHYNTREHILRSPAFGEHFKSGNSNNHSDNKTVKIMTYNVWFREELELIRRMNAIGDLIQHHSPDLICFQEVTPNIYLLFEKSDWWQAYKCSLPHKMAMERSYYCMQMSRLPVKSFDRKPFLNSKMGRELCVADVTVGGSIKLVLATSHLESPCPGPSTXDQMFSKERVAQASESLNTLRAFRNXILCXDMNWD

SEQ ID NO: 290153 - protein, 93 aa, Zea mays
  Clone ID: MRT4577_27709C.1.pep
LRLLGYVSGEVGSSCVFGPNMPASQGIAFVHHIPSVWAPCALIHWASTACNVHEGSCSLPLSQGFSVPQPSVPVPILTRFSCPYKIPCESTAT

SEQ ID NO: 290154 - protein, 65 aa, Zea mays
  Clone ID: MRT4577_2770C.1.pep
SRVQVLNLPFVKWIKHLLCYCETRGRSSANSDVILRLLLPVNLLLFKPSNCSFADLMFLTCPPPP

SEQ ID NO: 290155 - protein, 67 aa, Zea mays
  Clone ID: MRT4577_27710C.1.pep
ARRPPSATLREKREVMGRTGSRGQVTQVRVKFLDDQNRLIMRNVKGPVREGDILTLLESEREARRLR

SEQ ID NO: 290156 - protein, 61 aa, Zea mays
  Clone ID: MRT4577_27711C.1.pep
LPVAQGPAARAEMSPARLVEDRDQLVNLLKGFVTHLHEADGVEGLAGHGKDDEDRKENLDE

SEQ ID NO: 290157 - protein, 52 aa, Zea mays
  unsure (1)..(52): unsure at all Xaa locations
  Clone ID: MRT4577_27712C.1.pep
PPPPRKGREAGTRKSGRPXKKEGYGKNNYPQGKQIIQTXTELAKARIKGGTA

SEQ ID NO: 290158 - protein, 65 aa, Zea mays; identical to SEQ ID NO: 264737
  Clone ID: MRT4577_27713C.1.pep

SEQ ID NO: 290159 - protein, 65 aa, Zea mays; identical to SEQ ID NO: 264737
  Clone ID: MRT4577_27714C.1.pep

SEQ ID NO: 290160 - protein, 141 aa, Zea mays
  unsure (1)..(141): unsure at all Xaa locations
  Clone ID: MRT4577_27716C.1.pep
LQEYEDARCLRYLNFPSEWTWDSSNRVWTXKQRKQKLGGRIXYLPCTSGELFSHRMLLTVVTGXPCFEDVRCYNGVLYGTXARGLVRDDNEWFKIFEVAIVWVTPFQLRHLFMTILLHYEITRYWPSKAEYISSSFYTYLS

SEQ ID NO: 290161 - protein, 74 aa, Zea mays
  Clone ID: MRT4577_27717C.1.pep
EKGTGLPKLAHDAFPILCIGPKKKKKKKKKKKKKKKKKKKKKKKKEEKKYAMIPPVNEKKEAELLQKNKYGPIG

SEQ ID NO: 290162 - protein, 68 aa, Zea mays
  Clone ID: MRT4577_27718C.1.pep
ENLSPSKNTLHFHPITQSPTLLSRNHPYKFTYNTTPRNIIFRVKHYSTNFLPSNKIQTFKPSTPPFKL

SEQ ID NO: 290163 - protein, 63 aa, Zea mays
  Clone ID: MRT4577_27719C.1.pep
AATEFLRLKSPGTRLCHDVTEMQGRKACGNTPVKAFSLCLMCFFLVWVFFFVFFFFSSTKSAK

SEQ ID NO: 290164 - protein, 318 aa, Zea mays
  Clone ID: MRT4577_2771C.1.pep
MARHPGVDWSTTALFQQVRVVGVRPGAICICMQLGMASALETLCGQSYGAKQYHMLGIYLQRSWIILSACAVVQLPVYLFTEPLLVALGQDPDISAVAGTVALWYIPVLFSFVWAFPLQMYLQAQIKNMIITYLAMLNLGLHLALSWLAAVHLRLGLAGVMGSMVVAMWIPVFGQLAFVFFGGCPLTWTGFSSAAFADLGAIVRLSLSSGVMLCLELWYNTILVLLTGYMKNAEIALDALSICLNINGWEMMISIGFLAATGVRVANELGAGSARRAKFAIYNVVVTSFAIGLVLFVLFLFFRGSLAYIFTESQAVAG

SEQ ID NO: 290165 - protein, 82 aa, Zea mays
  Clone ID: MRT4577_27720C.1.pep
FWMGMAGLCSYFKSPQPLVLNSASPPPLFGQGGYGFIWGMVSRGLSFFVGPPPSGMGILWSLPPWKWGVWCFPFGLGHKRSF

SEQ ID NO: 290166 - protein, 89 aa, Zea mays
  Clone ID: MRT4577_27721C.1.pep
TGVFGFIWYRSASQSNNYSKWGSLVWTEAWGFSISCSSSPKKIGGGVKNLSPITGPFRFSIPSCNCWRGPCSRQWRCRPMVNGPTRTCQ

SEQ ID NO: 290167 - protein, 33 aa, Zea mays
  Clone ID: MRT4577_27722C.1.pep
PSTRRYINILYICRIQYYFMSHVRDICILSLCR

SEQ ID NO: 290168 - protein, 115 aa, Zea mays
  Clone ID: MRT4577_27723C.1.pep
KYTSQSPVSGFTLRSWVAGKSIAPVAIAGPAGAGLRCLHGALALPMATPDSDLQEPHSPSPPHPMLMPKVTLATRWAPKPPLPLLLTPIHHLVLTNAASLSGPGCQDLVSLSPSL

SEQ ID NO: 290169 - protein, 96 aa, Zea mays
  Clone ID: MRT4577_27724C.1.pep
KIGCTLMINIWGFLKAWLNQVMMASFVTMKTELNMTVEQNLCKETNKASTDQELFQNSKVRTCNKKSASENSKKNDVSPPAVPGQQKLIQKSKAPR

SEQ ID NO: 290170 - protein, 65 aa, Zea mays
  unsure (1)..(65): unsure at all Xaa locations
  Clone ID: MRT4577_27725C.1.pep
SWATYPCGLLPSTTGLSPESYTVWYPVVSRDXXXGLIMXAYHHHEALGAHVXGVRAXQGTSVIDA

SEQ ID NO: 290171 - protein, 267 aa, Zea mays
  Clone ID: MRT4577_27726C.1.pep
MMRRRAMTMTIAAVLCLLLFSGRLAAAEKTFRGGGGGGYGGLEAGGGGGGGGYSTPSEAAPSTPAAGETTTPSSGGGYSTPSEAAPSTPAAEETTTTPSSGGGGYGGATGKASSGGGGLDPDGDPEVGLNGKAIEEIVNEHNVFRAKEHVPPLVWNATLARFSQQYAETLKGNCQQIHSSSPYGENLMEGTPGLTWKITVDGWSEEKKNYHYNSDTCDPGKMCGHYKAVVWKTTTSVGCGRIKCNSGDTIIMCSYWPPGNYDGVKPY

SEQ ID NO: 290172 - protein, 83 aa, Zea mays
  Clone ID: MRT4577_27727C.1.pep
WEWEQQSKERSGGGPLLKLGCFGRYDARRVYMQDRLALWLKLKAGLKHASLVLDTERKRKNWHGRRDTYTLRPSLRWTLKRSW

SEQ ID NO: 290173 - protein, 65 aa, Zea mays
  Clone ID: MRT4577_27728C.1.pep
QNPQTQQTSDLTMSYTPNTPATPTPEAKTKSRTPLDTHTIPKTTVNVAATSLPTEAPTQPTPITT

SEQ ID NO: 290174 - protein, 150 aa, Zea mays
  unsure (1)..(150): unsure at all Xaa locations
  Clone ID: MRT4577_27729C.1.pep
NIPFFFKEGDSLKPTVTGVLMVVFPPDPIGNKDYFGPAPLQDKARQNSSTKGPTGXKKEYLFSKEKALTSLNPEKDLVIKLANQVRKGVHKTKEAKIPGGKGFLKTQAPFVDPAGVSKRTVVGSKKRKPWTLGLYSEITSNFCKVVALKE

SEQ ID NO: 290175 - protein, 354 aa, Zea mays
  unsure (1)..(354): unsure at all Xaa locations
  Clone ID: MRT4577_2772C.1.pep
MEEEQSSGGWGEEATNKAPLLEPRAASDHQHRNGTSAGDGAGAGKAEAEWSALPLRRRVWEENKRLWVVAGPSIFTRFSSFGVTVISQAFIGHIGATELAAYALVSTVLMRFSNGILLGMASALETLCGQSYGAKQYHMLGIYLQRSWIILSACAVVQLPVYLFTEPLLVALGQDPDISAVAGTVALWYIPVLFSFVWAFPLQMYLQAQIKNMIITYLAMLNLGLHLALSWLAAVHLRLGLAGVMGSMVVAMWIPVFGQLAFVFFGGCPLTWTGFSSAAFADLGAIVRLSLSSGVMLCLELWYNTILVLLTGYMKNAEIALDALSICLNINGLXEMMISIGFLAATGVRVANEL

SEQ ID NO: 290176 - protein, 193 aa, Zea mays
  Clone ID: MRT4577_27730C.1.pep
VPPGSAGNLLPRQIFPRRRGGYFLEAAPFFFTATKLHLRRSSSSVPSRSARSVLSARPSSSSLRAPHLAALSSSSPATASPSSLCERLLPGRVLCSVVPSAGQVPPSRRPCSVFSMAPDPLQARSSRRARCFLRTPVLAWPTAQASYSLAAAPLSCLLCSPRALLSAAASPAQLGLQLPRSSPVFPAPGLQLA

SEQ ID NO: 290177 - protein, 272 aa, Zea mays
  Clone ID: MRT4577_27731C.1.pep
MSRAAAARTMDEEAEYLETARADRSVWLMKCPPVVSRAWQAASASSSDAANANPVVAKVVLSLDLLRQEERPEEPTLQFKMELAQTNTGNTPKSYSLNMFKDFVPMCVFSESNQGKLSCEGKVEHKFDMEPHSDNLANYGKLCRERTQKYMVKSRQVQVLDNDHGMSMRPMPGIVGLISSSSKEKKKQAPAKPSDAKRTRRDRTEMENVIFKLFERQPNWALKALVQETDQPEQFLKEILNDLCVYNKRGPNQGTHELKPEYKKSTGDTDTA

SEQ ID NO: 290178 - protein, 269 aa, Zea mays
  unsure (1)..(269): unsure at all Xaa locations
  Clone ID: MRT4577_27732C.1.pep
MAEEAKYLETARADRSVWLMKCPPVVSRAWQAASASASSSDXLTPTPLSPRSSFPSTCSAQKNAXERPEEPTLQFKMELAQTNTGNTPKSYSLNMFKDFVPMCVFSESNQGKLSCEGKVEHKFDMEPHSDNLANYGKLCRERTQKYMVKSRQVQVLDNDHGMSMRPMPGLXVGLIPSGSKEKKKQAPAKPSDVKRTRRDRTEMENIIFKLFERQPNWALKALVQETDQPEQFLKEILNDLCVYNKRGPNQGTHELKPEYKKSTGDTDAA

SEQ ID NO: 290179 - protein, 63 aa, Zea mays
  Clone ID: MRT4577_27733C.1.pep
ARNSARAELQDLGRWYILYHLAKWHGYTNNSELDPGAATVKKHEGAAAAPVNSLSDIKCRLLN

SEQ ID NO: 290180 - protein, 78 aa, Zea mays
  unsure (1)..(78): unsure at all Xaa locations
  Clone ID: MRT4577_27734C.1.pep
MSLVTAEIIAKAEXITGDELCQEKSKVLLKEGGLPNGLLPLKDIEECGDERDSGFVWLKQKKSTYHKFEKIGNAGSYA

SEQ ID NO: 290181 - protein, 108 aa, Zea mays
  Clone ID: MRT4577_27735C.1.pep
NFPTIPSLLLFLTYFLSSFTITLFEYPTPHSKKTYCLREDKNFPQKRQRGPPAKPPHWEGPQGSPSLYGGEPPPLGAFFGTKKNPPPPGPPQILKGGMGFKNFQPAPS

SEQ ID NO: 290182 - protein, 33 aa, Zea mays
  Clone ID: MRT4577_27736C.1.pep
HPARSTPRDLEPKSGGEVAETSSHGDRRKCGSA

SEQ ID NO: 290183 - protein, 112 aa, Zea mays
  Clone ID: MRT4577_27737C.1.pep
NGKVWPLKKRGKAFYFKKKKPPGKGAFIPFGEGQQIFFLLTQLGITPPWQRGRERDPPSHVFKEGPLKQDPEGLRAWPVTSKFLGIEKNGRGLNPKQAKLFNFFQSHPIYGF

SEQ ID NO: 290184 - protein, 97 aa, Zea mays
  Clone ID: MRT4577_27738C.1.pep
KDRSVPPEYQGGIKVGTGRVCLSSLCVGWCAQFVSVLGADPQTFTDNKKGIADTKGQPRQRSYVLSLIGSGALSVCCHLLWASTFITTKGRLRMRVC

SEQ ID NO: 290185 - protein, 50 aa, Zea mays
  unsure (1)..(50): unsure at all Xaa locations
  Clone ID: MRT4577_27739C.1.pep
DEAYEFYSMYAGKXGFSVRRASMTVNNENVITRRMFVCSKEGFREKKSGA

SEQ ID NO: 290186 - protein, 90 aa, Zea mays
  Clone ID: MRT4577_2773C.1.pep
KKESFRKIGWDTNMSYYTPRNTYLVWCRTRVHILFKRHQELYRPIPNLFVCKVCATLTLDRGATNPTPDLVHRHIIYLTTTHKDAPTPPY

SEQ ID NO: 290187 - protein, 123 aa, Zea mays
  Clone ID: MRT4577_27740C.1.pep
RPVGPPVFFLVSAPFGPPSFFDFAPPLGSRGFSLWASGFPRGVDFSPVSPFFGATVLPLFSPPLVPGFAPLEPPPGGLEFPFKKDRPGSLKKIKKKKKKKNKKKKKKKKKKKKKKKKKKKSLY

SEQ ID NO: 290188 - protein, 59 aa, Zea mays
  Clone ID: MRT4577_27741C.1.pep
LTPDAQRAQKEAQSQCFRMWRVPWARENDAAFGGADPVGGSRGSGGEVGHKVFLLGFAC

SEQ ID NO: 290189 - protein, 80 aa, Zea mays
  Clone ID: MRT4577_27742C.1.pep
GWGDSLWCCFLKPGLRQNGKQNMGFFGRVSGYKGNFVNGFPFFFTDSWIGPHISIRKLDGYPGWITGIGLKLSKNMENFV

SEQ ID NO: 290190 - protein, 92 aa, Zea mays
  unsure (1)..(92): unsure at all Xaa locations
  Clone ID: MRT4577_27743C.1.pep
VNAVDISPTHNTVVLXGGQDAMNVTMAARRAGKFEAKFYRKILQEEIGGVKGHFGPINALAFNPDGRSFSSGGEDGYVRLHHFDSDYFSIKM

SEQ ID NO: 290191 - protein, 326 aa, Zea mays
  Clone ID: MRT4577_27744C.1.pep
MRPILMKGHERPLTFLRYNRDGDLLFSCAKDHTPTVWYADNGDRLGTYRGHNGAVWTCDVSRDSARLITGSADQTAKLWDVSTGKELFSFRFDAPARSVEFAIGDALAVVTTDNFMDHVPTVQVKRIAEDIDDQTEESALVITGIKGRINRAVWGPLNRTIITAGEDATVRIWDSETGQLLKESDKESGHQKTISSLSKSLDWSHFITGSLDKSAKLWDTRTLTLIKTYVTERPVNAVDISPTHDTVVLGGGQDAMNVTMTDRRAGKFEAKFYHKILQEEIGGVKGHFGPINALAFNPDGRSFSSGGEDGYVRLHHFDSDYFSIKM

SEQ ID NO: 290192 - protein, 324 aa, Zea mays
  Clone ID: MRT4577_27745C.1.pep
MRPILMKGHERPLTFLRYNRDGDLLFSCAKDHTPTVWYADNGDRLGTYRGHNGAVWTCDVSRDSARLITGSADQTAKLWDVSTGKELFSFRFDAPARSVEFAIGDALAVVTTDNFMDHVPTVQVKRIAEDIDDQTEESALERGGGRINRAVWGPLNRTIITAGEDATIRIWDSETGQLLNESDKESGHQKTISSLSKSLDWSHFITGSLDKSAKLWDTRTLTLIKTYVTERPVNAVDISPTHDTVVLGGGQDAMNVTMTDRRAGKFEAKFYHKILQEEIGGVKGHFGPINALAFNPDGRSFSSGGEDGYVRLHHFDSDYFSIKM

SEQ ID NO: 290193 - protein, 68 aa, Zea mays
  Clone ID: MRT4577_27746C.1.pep
LFLGKNWYSFTISKKIITRKNIKKNPGGQKKGETQVYLVGVTAPFKGGKPFGPFSLKKPPTPGERRIG

SEQ ID NO: 290194 - protein, 104 aa, Zea mays
  Clone ID: MRT4577_27747C.1.pep
IASDLELVKNTRLIRGCLRPNWSSFLVQVLLVGHDARRAGSAPLGGSGSLLLVLRRCCSGQAALSSARGICAHMAMKRSLNCCLELSFSLHGFQSSFDLYSLFI

SEQ ID NO: 290195 - protein, 259 aa, Zea mays
  Clone ID: MRT4577_27748C.1.pep
LLPRATAMATELLSPLIPHPQRRRALAVVVAAPLLALLLAAVAFSRSPVAAPVSSSRLVDLTLLAGARGKGAVCLDGTPPGYHLRRGFGSGAHNWLVFLEGGGWCNTTQSCSERKMTNFGSSKYMGAVNFTGILSNDHTENPDFYNWNTVVIRYCDGASFAGDAEGGDLDGTKLFFRGLRIWKAVVDELMGKGMDAAKQALLTGCSAGSLAALLHCDNFHGRFPHEVSVKCLSDAGFFIDEKDLSGERSMRSLISGVVH

SEQ ID NO: 290196 - protein, 272 aa, Zea mays
  unsure (1)..(272): unsure at all Xaa locations
  Clone ID: MRT4577_27749C.1.pep
TLYLASSPPAAPAATTPNHTAKERDATPSRGLPATAAATTPPPPPARRSLVRAVPEGTGSAAKMPTVTCNACNAAFEEEEEQRLHYRSEWHRYNLKRKVAGVPGVTEALFIARQIVLAEGSNSTVAPPMSYSCALCGKGYRSAKAHAQHLTTRSHLLRASQEPNASTAAVVKPLPERVPRRAPSAMEEDEDEDEDEDEEEEWVEVDPSELESTSNMQVDEDSKSDDEMADLXMLDPSVCFMCDLKHDNIEDCMIHMHKKHGFFIPDSEYLKD

SEQ ID NO: 290197 - protein, 87 aa, Zea mays
  Clone ID: MRT4577_2774C.1.pep
MADQQYKPTEHGGLKQDGTPDKRVGTGEFAQGKVDPHEAGKQGGATSGTGSTDSSTGSSGSGGSAKGEFAHGKVDPVEAGKKGGQTS

SEQ ID NO: 290198 - protein, 294 aa, Zea mays
  unsure (1)..(294): unsure at all Xaa locations
  Clone ID: MRT4577_27750C.1.pep
MLPELLHLSTMSTGHGGGISSQAPVRFYHGRRHPVKLXRKINCAMKDGNVEEALQSLSNYKKLHGLPEPRVLNSIIVSLSYMSSRRWLQRAFDMVLSVYQINRNLLNCGSLMRLALALARDQMPIPASTVLRIILESRKLPDVDMLSMSFLHMLKSQVGSYLATDVLIETCESFLDQVTDRREMKKLDPIKSNATLFNMVLESCVTFKCIIKAQKIMELMSLIGVVADVNTVVMASHVFEMVGQRDELIQMKRSIDSFTSLTFLQYYLHFYDSLLSLHFKYNDMDAAAKFLIDL

SEQ ID NO: 290199 - protein, 227 aa, Zea mays
  unsure (1)..(227): unsure at all Xaa locations
  Clone ID: MRT4577_27751C.1.pep
MRPILMKGHERPLTFLRYNRDGDLLFSCAKDHTPTVWYADNGDRLGTYRGHNGAVWTCDVSHDSARLITGSADQTAKLWEVSTGKELFSFRFDAPARSVEFAIGDALAVVTTDNFMDHVPTVQVKRIAEDXTTETEESALVITGIKGRINRAVWSPLNRTIIXAGEDATIPIWDSETGQLLNESDKESGHQKTISSLSKSLDWSHFITGSLDNXCKLWDXRTLTLIR

SEQ ID NO: 290200 - protein, 67 aa, Zea mays
  Clone ID: MRT4577_27752C.1.pep
PPFSFRSAARLEPDTDRRGLLHRVAVCLDGTPPGYHLRRGFGSGAHNWLVFLEVTECSLPIVSSCYV

SEQ ID NO: 290201 - protein, 112 aa, Zea mays
  unsure (1)..(112): unsure at all Xaa locations
  Clone ID: MRT4577_27753C.1.pep
AKLWDTRTLTLIKTYVTERPVNAVDISPTHDTVVLGGGQDAMNVTMPDXRAGKFEAKFYHKILQEEIGGVKGHFGPINALAFNPDGRSFSSGGEDGYVRLHHFDSDYFSIKM

SEQ ID NO: 290202 - protein, 89 aa, Zea mays
  Clone ID: MRT4577_27754C.1.pep
EGFRNLWGGPSWLGGGFLTYLKNGVTVGFGPRVRARYPFGLGVGAPVVPFGCPRYETRRGEIEQGFCSRENPKKKKKKPKKKKKKKKIN

SEQ ID NO: 290203 - protein, 65 aa, Zea mays
  Clone ID: MRT4577_27755C.1.pep
LLLKGWPILSSLVAPVFPGLAGKDTRGGNLVQGVILKRWSRGLGLLDMFLGQVLRRKNGPILRSK

SEQ ID NO: 290204 - protein, 104 aa, Zea mays
  Clone ID: MRT4577_27756C.1.pep
MATELTAAQLRAYDGTDPSKPIYVSVRGKVYDVTSGRGFYGPGGAYAVFAGREASRALGKMSKDEADVSGDLSGLTDKELGVLADWETKFQAKYPVVARLAADA

SEQ ID NO: 290205 - protein, 66 aa, Zea mays
  unsure (1)..(66): unsure at all Xaa locations
  Clone ID: MRT4577_27757C.1.pep
MSLLSGRIKLNLSEPTXKIIAEYIWVGGSGMDLRSKARTLPGPLSDPAKLSKWNYDGSSYLSSSNG

SEQ ID NO: 290206 - protein, 60 aa, Zea mays
  unsure (1)..(60): unsure at all Xaa locations
  Clone ID: MRT4577_27758C.1.pep
RAGAASNGEQQQEVXFVFMNFDPVYERLRAERSSKEGSATLDAYLSHKHDKLLAKLLQPD

SEQ ID NO: 290207 - protein, 104 aa, Zea mays
  Clone ID: MRT4577_27759C.1.pep
MATELTAAQLRAYDGTDPSKPIYVSVRGKVYDVTSGRGFYGPGGAYAVFAGREASRALGKMSKDEADVSGDLSGLTDKELGVLADWEIKFQAKYPVVARLAADA

SEQ ID NO: 290208 - protein, 50 aa, Zea mays
  Clone ID: MRT4577_2775C.1.pep
PTRPSIFNLGWIPIPGGVASLWDRNNQGHLNSLNLACISCALQVHEKPNR

SEQ ID NO: 290209 - protein, 39 aa, Zea mays
  Clone ID: MRT4577_27760C.1.pep
ASILISIGQMFVFRDTSFSLMVLKRHYPLISRIRSILQY

SEQ ID NO: 290210 - protein, 468 aa, Zea mays
  unsure (1)..(468): unsure at all Xaa locations
  Clone ID: MRT4577_27761C.1.pep
MFFCLLLTYIYIFFAFQDAKEGTTTGVSAKDRAKTVMTLASPDSKPEDLNRPGHIFPLKYREGGVLKRAGHTEASVDLAMLAGLPPVAVLCEIVDDADGSMARLPKLRVFAEKENLKIISIADLIRXLNSQSFSFWYLTCCYXTVVSIXSISITIEQFSLRLFHNYAETVFAGKKKEKRSXVFSGRCLHFSLYPSCNIXESDVLNMVARIILIPMAGYVHASSVFLCAVAGDPXILIAMLANFICCRYRRKRDRLIERASVARLPLKWGNVHAYCYKSVIDGIEHIAMVKGDIGDGQDILVRVHSECLTGDIFGSARCDCGDQLAMAMEMIEKTNTPLPAXLRGHEGRGIGLGHKLRAYNLQDDGRDTVEANEELGLPVDSREYGIGAQILRDLGVRSMKLMTNNPAKYSGLKGYGLSIAGRVPLITPITSENRRYLETKRTKMGHVYGLANAQANQANGSQSTEENH

SEQ ID NO: 290211 - protein, 87 aa, Zea mays
  Clone ID: MRT4577_27762C.1.pep
LTSIASQVHESTTRTSIDSLSPSALNFEPFRKDIDDFNNRIAAWGDYWHAAFDTFPNPEPFQTPLVCLLRDYIRLYSNSVFLHRMIV

SEQ ID NO: 290212 - protein, 118 aa, Zea mays
  unsure (1)..(118): unsure at all Xaa locations
  Clone ID: MRT4577_27763C.1.pep
TQASGRDGPYTLNITAPANKQVKVSSGVAEVTINKAVRAVKPLPVXSVDKGVLPLELFGGKGAPPGPPGFQGKPKKGGSLDAPSGWAGSEDPAPTGAPGAKAVGWKFSGLPPVLGCLL

SEQ ID NO: 290213 - protein, 119 aa, Zea mays
  unsure (1)..(119): unsure at all Xaa locations
  Clone ID: MRT4577_27764C.1.pep
NDQAICACVIAKPKAFNSPYSHTTVIFGEAEIVDQTSQLLTKTEDLITASDLIQMIFSXAETAVPGXQDDNVKEVDXTRVEAKDIELVMTQSYFLTPKAVXALKDSNGDHVTDIIGLPT

SEQ ID NO: 290214 - protein, 42 aa, Zea mays
  unsure (1)..(42): unsure at all Xaa locations
  Clone ID: MRT4577_27765C.1.pep
ILISWTKKKKKKKKKKKKKKKKKKKKKKKKKKXEKKKKKKAP

SEQ ID NO: 290215 - protein, 50 aa, Zea mays
  Clone ID: MRT4577_27766C.1.pep
ERNARTNNSLSLNRLMHVNFIFKNRVLRYLSVLANFSGYLSIKKTFWVVK

SEQ ID NO: 290216 - protein, 159 aa, Zea mays
  Clone ID: MRT4577_27767C.1.pep
ASRVHYSLSVWSISWIGSGKHLVDRGSREAGRVVVGWKTYIVRVVVMWKVQKMRAVIKMYHGGSLYLQEQTGVTLGVFIHVFPVYHSVVDSVVGVRYGEAVIGLRVRAVYRSGKSIYRAFRHADAHSEVGSRCGRCRRTEEEMVYLSIYSRTAGSSAAQ

SEQ ID NO: 290217 - protein, 80 aa, Zea mays
  Clone ID: MRT4577_27768C.1.pep
VQCSICLWQYMQGEMLRVMPHRTHRCHLTYIHTRLRRTTSGPQWRWRCIKTLVNTPISTKLCTLVTMPENGGDSGRYTLG

SEQ ID NO: 290218 - protein, 97 aa, Zea mays
  Clone ID: MRT4577_27769C.1.pep
LYFSFFFFLFWLGLFKCGWGSFKGTTNILFLTQSPGWLPPKIKGKITTGGSPLVSGGGRIGHNFLLRLGEDFFGPPAFCFMGQSQTGKWSKNSFPFT

SEQ ID NO: 290219 - protein, 77 aa, Zea mays
  Clone ID: MRT4577_2776C.1.pep
RATKFEELLQSRLEMFFSDNNQIYLYKMICLVSYVSYGCFNTLTPCQIEVCVPYYLQTQKVVDTHICEVKVDTFGIN

SEQ ID NO: 290220 - protein, 270 aa, Zea mays
  unsure (1)..(270): unsure at all Xaa locations
  Clone ID: MRT4577_27771C.1.pep
MGIPSDDVVQIRHADAAGEPTVVTVSCPDKTGLGCDLCRVVLLFRLSVVKGDMSTDGRWCYIVLWVLPRGGRPVPVPWDLLKDRLLQLCPVAPPFGFDNAYLAAAGLQDLAPPPPKLFLLKLCCFDRMGLLHDVTRVLCELELTIRRVKVSTTPDGSVLDLFFITDARELLHTKSRREETQDKLEAVLGDSLTCCEIDPAGEDMLSCLQSWASLTPAITEQMFNTEEQPISTRGGTISVTMDNSLSSVPLLFGFQCGXHKGLLYDIMRTV

SEQ ID NO: 290221 - protein, 276 aa, Zea mays
  Clone ID: MRT4577_27772C.1.pep
MSFKRRFSQRSPIGSATASAPSPLVKAASTAPSPLSRNSLFGCVDSGSTCGDEKSSSAKEDFCKSGVSENTPAKFASTPARLMAPTPGLKTPKRPISATGYDTPPLRTAKRSARAKLFTTPTKNNSTGGESQSASVSGASADDDLLSFLPQSLLQSVKEKEDRALVEKESGFADQVRRQKLIASLPSTFDVVFLIYQSRQRSVMTKQELVHKIIASSPKIADRSEVEGHLTLLKELVPDWFSEKTARSGDALCCVDATLSQSEIRQRLYAAAAAAE

SEQ ID NO: 290222 - protein, 128 aa, Zea mays
  unsure (1)..(128): unsure at all Xaa locations
  Clone ID: MRT4577_27773C.1.pep
RSPPTHSPVASKLISPERRREPPFQLRPWLPSPDPLSPLRXIKIKMAXWNPEKDLLAMVTDDSKVLLHRFNWQRLWTISPGKCITSICWSPDGKIIALGTEAGLILLHDVEVCIWMMIKNVGVYCIFV

SEQ ID NO: 290223 - protein, 89 aa, Zea mays
  unsure (1)..(89): unsure at all Xaa locations
  Clone ID: MRT4577_27774C.1.pep
RTIAMTSSEERSSPQMVPSSSASSFSVHQTELRMVLGSRYKYGFQVDPGYRRSXMRKIDDEEAVVARLRPLRESESLATKVLSPRGLCE

SEQ ID NO: 290224 - protein, 102 aa, Zea mays
  unsure (1)..(102): unsure at all Xaa locations
  Clone ID: MRT4577_27775C.1.pep
MCVAIKRARACIMMANTRSGITMKYECMLQTXSLTLTCCKXLITNRIDYKTKDIVADYTRARATSYXNYQTDFLXNGKGFPIYEYNFVTVDDVQKSTIFYIL

SEQ ID NO: 290225 - protein, 60 aa, Zea mays
  Clone ID: MRT4577_27776C.1.pep
KHLSAPPHGTEIFKIRLYIRRPGKEGTTIVCVVGSSPLGLSNLVVLSTTICCCCYFVFFF

SEQ ID NO: 290226 - protein, 117 aa, Zea mays
  unsure (1)..(117): unsure at all Xaa locations
  Clone ID: MRT4577_27777C.1.pep
MLSAPDQICIITDVTTATKILVLVALAMIAGTINACMPHSIMQXGLTTXIDYPYLILQQLHALPLQPIPAILHHMMTHTIMQPLTFHHMIITIILTIMIINNDDDTMTMRHSISRLC

SEQ ID NO: 290227 - protein, 80 aa, Zea mays
  Clone ID: MRT4577_27778C.1.pep
GLVPISAPGQISVLKCREGVGEGRRDVPGASCGYSDIGARGDAYTGEEKLALWWLYKARGGGLGDSGLHILHFILVGWPM

SEQ ID NO: 290228 - protein, 72 aa, Zea mays
  Clone ID: MRT4577_27779C.1.pep
MAKVHPNAAGSVVATAAALGRATTEADEEPSTVLTVWRKSLLFTCNSFTVNDASSDLSFSVHCYAGSTRSWR

SEQ ID NO: 290229 - protein, 102 aa, Zea mays
  Clone ID: MRT4577_2777C.1.pep
RGRRRSFPQSPGLFRRPVALHRLCPWNTGAVNGCGVAAHRRAGAGLLLRRRQRHTGDVLGVRSGATLRESTDDGCGCGVRHGGESKGQMWCAEGGREGEHGG

SEQ ID NO: 290230 - protein, 61 aa, Zea mays
  Clone ID: MRT4577_27780C.1.pep
PPGRRLEIRFGVHYPLLCKCHIEGDDWGELTIGASVNRPSQISKGADVIFLPNGHGPLLLG

SEQ ID NO: 290231 - protein, 105 aa, Zea mays
  unsure (1)..(105): unsure at all Xaa locations
  Clone ID: MRT4577_27781C.1.pep
AVLGFTFSFHDVDYITGGSMPYRERCLYHRHGVDVEMLICLQVMNGNLGINESCHQQGEALRVGRVRQIACEPCRLVLXVDTWAERYRSTDESVIGSGQDPAPRA

SEQ ID NO: 290232 - protein, 367 aa, Zea mays
  unsure (1)..(367): unsure at all Xaa locations
  Clone ID: MRT4577_27782C.1.pep
MGTGAVAVAAPDRAKQRRAGGHLWKKALLHFSLCFVMGFFTGFAPSSSSSWKSAAATPQHHPPHRPGDRLAASRVAVDARATLSPPAEAADALSAGATVDLGDDEEDAAQRPPXLIVVTTTRSGPGERRRRRGELLRLAHTLRLVRPPVVWXVVVEPGGDAPATAEVLRGTGVMYRHLAFKPEDNFTTADAEAHVQRNAALAHVEKHRLAGVLHFADAAGVYDVGFFEQIRQIEAFGTWPVATMSAGEKKVVVEGPLCSASKVVGWFSRDFNDGTTRSVTYNTEADLNPAGAAGTRAHTIDVSGFAFNSSILWDPERWGRPTSLPDTSQDSIKFVQEVLLEDRAKLKGIPSDCSQIMVWQYSVPSSR

SEQ ID NO: 290233 - protein, 384 aa, Zea mays
  unsure (1)..(384): unsure at all Xaa locations
  Clone ID: MRT4577_27783C.1.pep
VAITRAYHRALEASVARSFPDNGCISCMCHNSDMLYSARQTAVVRASDDFYPRDPASHTVHVASVAYNTVFLGEFMQPDWDMFHXVDTLVVCVVSPVSFRFTVVSRHPLIDICHRQSLHPAAEYHGAARAIGGCPIYVSDKPGNHNFELLRKLVLPDGSVLRAQLPGRPTRDCLFSDPARDGESLLKIWNLNKCGGVVGVFNCQGAGWCRVTKRTRVHDASPGTLTGTVRADDVDAIARIAGDGGGWDGETVVYAHRTRELVRLPRGVALPVTLGPLQYEVFHVCPLRAVVPGVSFAPVGLLDMFNAGGAVEECDVITDDGGKAMALRVRGCGRFGAYCSREPARCLLDSAEVEFSYYADTGLVSVDLPVPEQELYRWTLKIMV

SEQ ID NO: 290234 - protein, 90 aa, Zea mays
  unsure (1)..(90): unsure at all Xaa locations
  Clone ID: MRT4577_27784C.1.pep
HAFADTWAFTXDAAAGSQIGEGPSSRPPNTVRAAGLAVATAYEFNSPLLTGARWIINRFPRHCRCLGWIGFNSPTPPSRYLPSFGYFLRH

SEQ ID NO: 290235 - protein, 51 aa, Zea mays
  Clone ID: MRT4577_27785C.1.pep
IPVLLFLPSISQYIINIYIPFHSYFHIHKSNSLIYERRTTSKTFSKDVFIN

SEQ ID NO: 290236 - protein, 187 aa, Zea mays
  unsure (1)..(187): unsure at all Xaa locations
  Clone ID: MRT4577_27786C.1.pep
MEVGDLHKVWEVRALKIKPDATAARATLDRVARQVQPIMRRHKWRVKVLSEFSPRNPRLLGLNVGAGVEVKLRLRRAGRDHDFIPYEEVLDTMLHELCHNERGPHDAQFYKLWDELRKECEELVSKGITGTGQGFDGTGRRVGGFTVHPPPPSLRQATLAAAQKRARNGALLPDSXTKLGGNSEIMS

SEQ ID NO: 290237 - protein, 65 aa, Zea mays
  Clone ID: MRT4577_27787C.1.pep
LKLIQFIGTRFYIGETGKTLQLPTYITLQHKPLWPGGLIEKMTHIIGLAITARSAMGIHAPCCIT

SEQ ID NO: 290238 - protein, 38 aa, Zea mays
  Clone ID: MRT4577_27788C.1.pep
VFLYLLMCAQLGVYEFVGIYIKFTIATMSIEKILFLYL

SEQ ID NO: 290239 - protein, 85 aa, Zea mays
  unsure (1)..(85): unsure at all Xaa locations
  Clone ID: MRT4577_27789C.1.pep
SRFYDVLFMVDAIDXGSMGHLNEFHGXKLVSATKEGLNLDNSDDEKKRKEDLMEKFYGLCKVIKDVLGDKVDKVVVYDRVVDSPM

SEQ ID NO: 290240 - protein, 91 aa, Zea mays
  Clone ID: MRT4577_2778C.1.pep
YDEIAINDETVVDSKEYATKFATFEKHSDEKITPYSNLLGCPATGGFYGDVGSIGCKTTTDIHGGRRVYGGGVPHGKDFIKADCSGVHAVR

SEQ ID NO: 290241 - protein, 257 aa, Zea mays
  unsure (1)..(257): unsure at all Xaa locations
  Clone ID: MRT4577_27790C.1.pep
RFLIEPLMRTRVSFETGFFLLGGHAIYLGPDDIQMGKREETRDVARVLSGYNDIIMARVFAHQDILDLAKYASVPVINGLTDYNHPCQIMADALTMLEQIGRIENTKVVYVGDGNNIVHSWLLLASAXAFVCACPKGFEPDANTVEIARSAGISKIEITNSPREAVKGADIVYTDVWASMGQKEEADYRKQKFQGFTVDEALMEIAGPQAYLMHCLPAERGVEVTDGAIEAPNSIVFPQAENRMHAQNAIMLHVLGA

SEQ ID NO: 290242 - protein, 139 aa, Zea mays
  unsure (1)..(139): unsure at all Xaa locations
  Clone ID: MRT4577_27791C.1.pep
MAGLQRSATTFRRSGSSGLVWDERFLTEAEADADAEAKAGAAEDAEQPELRHSRSVGMLRRAGGGGDSRXARRARRVGRSRRSRRGAATSRXRTKDVAPDMDPPSPRVSGCAFCAVFRGGSGGTGRRAQARRRSKPRKK

SEQ ID NO: 290243 - protein, 373 aa, Zea mays
  unsure (1)..(373): unsure at all Xaa locations
  Clone ID: MRT4577_27792C.1.pep
MAAAAISGGHLVLSTPTSTRRPRSLPLRPPSARPIDASSASAARRGVAAAAVSSPAAVPSTGKDAKQLPKDFLHINDFDKDTIMKILNRAIEVKAMIKSGDRSFQPFKGKSMAMVFAKPSMRTRVSFETGFFLLGGHAVYLGPDDIQMGKREETRDVARVLSGYNDIIMXARVFAHKDILDLAKYAPVPVINGLTDYNHPCQIMADALTMLEHVGRMKPLRXVYVGDGNXIVHSWLLLAAVLPFHFVCACPKGFEPDAKTVEIARSAGISKIEITNDPREAVKGADVVYTDVWASMGQKEEAEYGKQKFQGFTVDEALMEIAGPQAYLMHCLPAERGVEVTDGAIEAPNSIVFPQAENRMHAQNAIMLHVLGA

SEQ ID NO: 290244 - protein, 287 aa, Zea mays
  Clone ID: MRT4577_27793C.1.pep
MTPAAAISGSSSHVVVSSARLRQPFTLPPRTACPIAAAASPVTRRGVAVAAVSSPVVSAAAGKDAKQAPKDFLQIIDFDKDTIMKILNRAIEVKALIKSGDKSFQPFKGKSMAMIFAKPSMRTRVSFEAGFFLLGGHAIYLGPDDIQMGKREETRDVARVLSGYNDIIMARVFAHQDILDLAKYAAVPVINGLTDYNHPCQIMADALTMLLALSTCVANATIFPQCSQAPIASLLPPYLPSIIASVCENPALQPYRLQQAIAASNIPLSPLLFQQSPALSLVQSLVQ

SEQ ID NO: 290245 - protein, 72 aa, Zea mays
  Clone ID: MRT4577_27794C.1.pep
RRRNGGYASWVVLQCSRRSGCEPQHQLAAKNTLLIVVTEICKDKCINDFRKKATLKAACHSTKQSTKNTECT

SEQ ID NO: 290246 - protein, 373 aa, Zea mays
  unsure (1)..(373): unsure at all Xaa locations
  Clone ID: MRT4577_27795C.1.pep
MMAAAAISGSSGHLVVSSPRFRQPLTLPSRSGRPIAAAASPVARGGVSVAAVSSPAVSAVAGKDAKQAPKDFLHINDFDKDTIMNILNRAIKVKAAIKSGDRSFQPFNGKSMAMIFAKPSMRTRVSFEAGFFLLGGHAIYLGPDDIQMGKREETRDVARVLSGYNDIIMARVFAHQDILDLAKYAAVPVINGLTDYNHPCQIMADALTMLXEHVGRMRNTKVVXFGDGNNIVHSWLLLAAVLPFHFVCACPKGFEPDAKTVEVARSAGISKIEITNDPREAVKGADVVYTDVWASMGQKEEADYRKQKFQGFTVDEALMEIAGPQAYLMHCLPAERGVEVTDGAIEAPNSIVFPQAENRMHAQNAIMLHVLGA

SEQ ID NO: 290247 - protein, 75 aa, Zea mays
  Clone ID: MRT4577_27796C.1.pep
SLHCIAYNVHSYFSPEPLGFWKKKFLGPPHYRANPGRSKLSFLPAIVLAVLFSGVVRVHKQKESRKNMGHFSIQE

SEQ ID NO: 290248 - protein, 372 aa, Zea mays
  Clone ID: MRT4577_27797C.1.pep
MTPAAAISGSSSHVVVSSARLRQPFTLPPRTACPIAAAASPVTRRGVAVAAVSSPVVSAAAGKDAKQAPKDFLQIIDFDKDTIMKILNRAIEVKALIKSGDKSFQPFKGKTMAMIFAKPSMRTRVSFETGFFLLGGHAIYLGPDDIQMGKREETRDVARVLSGYNDIIMARVFAHQDILDLAKYASVPVINGLTDYNHPCQIMADALTMLEQIGRIENTKVVYVGDGNNIVHSWLLLAAVLPFHFVCACPKGFEPDANTVEIARSAGISKIEITNSPREAVKGADVVYTDVWASMGQKEEADYRKQKFQGFTVDEALMEIAGPQAYLMHCLPAERGVEVTDGAIEAPNSIVFPQAENRMHAQNAIMLHVLGA

SEQ ID NO: 290249 - protein, 364 aa, Zea mays
  Clone ID: MRT4577_27798C.1.pep
MESPEACSSGDASPVSPAAPAAERPSEAAALRALVDRVRAGEVDAAREVRRLTRASARHRRKLAAAVDPLVAMLRSAAPEAGEAALLALLNLAVRDERNKTKIVDAGALEPLLGYLRSSDPNLQEYATAALLTLSASSTTKSVISASGAIPLLVEVLKEGNHQGKNDAVMALYNLSTITDNLQAILSVQPIPPLIKLLKGSKKSSKTADKCCALLESLLAFNQCPLALTSEEGGVLAIVEVLEEGSLQGREHAVGALLTMCESDRSKYRDLILNEGAIPGLLELTVHGTPKSRMKAHVLLDLLRDSPYSRPKLQADTLENIVTNIASQIDGEDRGGKAKKMLAEMVKVSMEQSLRHLQRRASFA

SEQ ID NO: 290250 - protein, 123 aa, Zea mays
  Clone ID: MRT4577_27799C.1.pep
MVRALESIGPRPGTGARPRQCEGARPWRHACPMQARLPRRAWARGAAARPRRPLRGCGSAAPALTAWARLHGGSVQAGCPAYEGGMAVRRPWPQPRRWCCGSSPDPGAGAGVAARPLRTAQLG

SEQ ID NO: 290251 - protein, 95 aa, Zea mays
  Clone ID: MRT4577_277C.1.pep
ENGLDGHHLQPRRKKRKKKKKKKKKKKKKKKKKKKKKKKEKKKKYKEKTEKIKKTLKKKKKGGPGGPPRDFRPGPLGGHLFFLGGAKIRGGRTGE

SEQ ID NO: 290252 - protein, 257 aa, Zea mays
  unsure (1)..(257): unsure at all Xaa locations
  Clone ID: MRT4577_27800C.1.pep
MRIEHGVPMDDSNQISSLSKVDDTSKMQSNSSFTDHIQKPNADSSYLSAKFTEKTGGSTYESKRNSWGRTSARKGLSTEEAGCCSDNDEAHIAKLENKKTHLQSKLTEEVKENTVLQANLERRKAALHERRVALEKEVENLRDQLQKERNLRASLESGLMNMRRGQVSXSHXIDTKTKADLEEVAAAEADIMNLKQKVSDLRGQLNYQVQLSSTSLCESCNKRAINADKLVEGEQNAGLSPQIGFSVEAPPIQGSNL

SEQ ID NO: 290253 - protein, 84 aa, Zea mays
  Clone ID: MRT4577_27801C.1.pep
KNLLFSRSVNNPRCFWGVWNSHRQRGCGVGGVPIRSYNKVRLSVAFFNENKRLHRVFKVIPSNEKKTRVFLGKKKKTKKKKHTN

SEQ ID NO: 290254 - protein, 146 aa, Zea mays
  unsure (1)..(146): unsure at all Xaa locations
  Clone ID: MRT4577_27802C.1.pep
CISIHICQPDIHVXNACWELDCLEHGIHADGHMPRDQTIGGGDDAFNTXFFYETDAGKHVTRXVIVDLCRPLTSYEAXRADTXSQIXHPXHIISXKDDXADNNFCRVHYTIXTQIADLXIDRIMKLAHNWTVLQRFLAFNGSDAIT

SEQ ID NO: 290255 - protein, 169 aa, Zea mays
  unsure (1)..(169): unsure at all Xaa locations
  Clone ID: MRT4577_27803C.1.pep
VAEFGFPVPDDENRXEFALDLIREFESSPTGTKPLVDFHRTWQHMHARSHGQGSXALLVSRWXTAPTMPLKEAISASISRGKLVLGSDGVAGEAASVRTRTYANPFWVEMKVLTKRSAINTRRMPELFLIRLGAVVVTGAILATVFFRLDQSPKGAXQERLXLFGIAMW

SEQ ID NO: 290256 - protein, 129 aa, Zea mays
  Clone ID: MRT4577_27804C.1.pep
GGCPPPRGCLLGLLCWARLVPSCSGWPPIWPAGWCSSRSCPFPGRREGCLCVLLVARRWGCFFRFPGPPPCLFFFFLVLPPSFRCLVFPSLFWPLNPAWGPGRFLRSCCSLYVFWSIEKNQREHYILPP

SEQ ID NO: 290257 - protein, 65 aa, Zea mays
  Clone ID: MRT4577_27805C.1.pep
GNRLGKPVSNCPNPNVVKNHPTKGGGAYKNSFKLPLPQPCQYVAKFGGLNGYTENKRFIVEAVAP

SEQ ID NO: 290258 - protein, 39 aa, Zea mays
  Clone ID: MRT4577_27806C.1.pep
TNGIRGCDTSFRALHAPVQVNDLHLNSIILPGIYNEGHF

SEQ ID NO: 290259 - protein, 98 aa, Zea mays
  Clone ID: MRT4577_27807C.1.pep
STAAAAASPSHGVVEPRKQEELGSGSRLLRRRGRGGGGGGLAAPRSHRAPANTLPRAPTDPRAGEGCPPLLDLHTSLPCASAWVRVAHARRPVGARTG

SEQ ID NO: 290260 - protein, 34 aa, Zea mays
  Clone ID: MRT4577_27808C.1.pep
MYIILPVAYPQVAPEIELPTLDGKTHKMYRGGKI

SEQ ID NO: 290261 - protein, 174 aa, Zea mays
  Clone ID: MRT4577_27809C.1.pep
SSTRGRHYYRTRSNHPIRQHFIDARTHDIGQFYRTISLLSSSLAFSQATLASEDEGSYSGRGPRFCAHRGVAHAATRTQALARGSEVWRSSNGGQPSPARGSVGAARGGVGWCAMGSGSSKATTSSSSPTAAEAGGEVKRPNGSGKGRRGRTLLPLPSSSCFRGSTTPREGDAA

SEQ ID NO: 290262 - protein, 111 aa, Zea mays
  Clone ID: MRT4577_2780C.1.pep
WWPRSALARSLEETEGMYRVVSKEWAHQDRENAHGKAQERRPRASRPSQHLHLLVLKPKRIGNQHLVSLVILKNHLLPNVVQRPLNSQTHETQKYRKPKYSHSSILFPGYN

SEQ ID NO: 290263 - protein, 90 aa, Zea mays
  Clone ID: MRT4577_27810C.1.pep
GMNSKERDSRNIFVNETQTRGSRGGGIHDYARGRKGSGYSGGDLHNSRCRLLAQATLDTVTENATMEGQPDTAIATMTADTVTTTETRRT

SEQ ID NO: 290264 - protein, 398 aa, Zea mays
  Clone ID: MRT4577_27811C.1.pep
MEGNLPPQTMVPGGGPFDLGQPFHFAVQPQALQVYQDVFAAPAASQMPELGNVVKASLSDEEEGGDGHLDRGKAAAASQWHRVKWTSGMVKLLVSAVSYIDEDVDADHGTSSGRRKHAVLKRMGKWKLVSSAMTERGFAVSPQQCEDKFNDLNKRYKRLTEILGRGRACQIVEKPELLEQLSLSGKLREEAKKHLNSKHLHYEEMCSYHNRNRYCLLDDPVLQRSLRMALRAPAEQGKQCLFGYDDEDDQMLLSDDDDDYDDDELNDDLEAGAEDHGPHRVHATEKLKHDHEGHCGSHLSEVAAIDMNRMNFEGSGGPSSEKNLSYMRVQIERQRLKIKSQMLRIEQRHFKWLKFSKEKDRELQKMKLENERMALENERLELELKLKEIEIGIKPKRI

SEQ ID NO: 290265 - protein, 66 aa, Zea mays
  Clone ID: MRT4577_27812C.1.pep
GVLVSVNGRREKETERERGRTKPSASSPAVPSHIYSASVAPSPLKLTSMKGLEAFLAQEGGNLGHF

SEQ ID NO: 290266 - protein, 149 aa, Zea mays
  unsure (1)..(149): unsure at all Xaa locations
  Clone ID: MRT4577_27813C.1.pep
KILALLALLFLSVSATTAFIIPQCSLAPNAIIPQFLPSVTSMGIEHPIVQAYRLQQALAASVLQHPFAQLLHQFLXHLTILTFFSHLVATVFLLFLPSISLVHLFFSFLSFVFFLSFFFCFLFLFFFFYFIFLFFSLFLVFFIFFLFFF

SEQ ID NO: 290267 - protein, 92 aa, Zea mays
  Clone ID: MRT4577_27814C.1.pep
KELEKEPQFFKTGYFGLVKMVPPKPLGVGTFFQDPPFGRFSGRDKRPTGAVGVLKRVGKKGPPGAQVSKASPQKKRFFWGGLGLPVGSPGGA

SEQ ID NO: 290268 - protein, 247 aa, Zea mays
  Clone ID: MRT4577_27815C.1.pep
RNNGDGHGQARPSHGPRGRPLLGSAGDLGRRAGVPCDSWRLAVETYNKRDWTTVPASCERYVGHYMLGGHYRRDSRVVIDEAIAYAEGLKLGGNGKEVWVFDIDETSLSNLPYYATHGFGTKLYNATSFNEYVLEGSAPVLPETQRLFKKLVSLGIKPVFLTGRTEDQRAITVTNLRRQGYSGWMTLLLKPVGLKATAIAYKSGERQKLQDAGYVIVGNIGDQWSDILGAPEGARTFKLPDPLYYIG

SEQ ID NO: 290269 - protein, 62 aa, Zea mays
  Clone ID: MRT4577_27816C.1.pep
QVYPSSFIRHHRLSQLSMGILMLYSTRNFSMKNKRPDSLGKHIAYLPHTETLPQSYIFNVNQ

SEQ ID NO: 290270 - protein, 219 aa, Zea mays
  Clone ID: MRT4577_27817C.1.pep
MAMATAKLVLLMVLVAGSSSGGSAWGPLMSRLRMPTARSSVVEMAAERLQEDYVVSAAAPLIHALRPLLGSAGDLGRRAGVPCDSWRLAVETYNKRDWTTVPASCERYVGHYMLGGHYRRDSRVVIDEAIAYAEGLKLGGNGKEVWVFDIDETSLSNLPYYATHGFGTKLYNATSFNEYLLEGSAPLLPSSQRLFKKLVSLGIKPVFLTGRTEDRGASP

SEQ ID NO: 290271 - protein, 98 aa, Zea mays
  Clone ID: MRT4577_27818C.1.pep
DDDDLYLIPHRHCSPVIKLCICAVLFYFVEARNPVFCVEKASRSTLVGCSERCTNRNRHRPYKHRLGLFMVSRCMSLSVDSINYFEWMCVKCFGYAHW

SEQ ID NO: 290272 - protein, 416 aa, Zea mays
  Clone ID: MRT4577_27819C.1.pep
MEAAVAAALKSPTAARPSWRPAAPGATSLPFDRRRSFAFGSIKGLGRQQLTSRTRRRSSVVRASWSPSESLPPSSSMAPLRMESPAGQLLSQILHTHPHLLPAAAEQQLELLQTDREAEKNKDKESDAGDKLAPTGVDLVLYRRIAQVKEKERRRTLEEILYALVVEKFVEAGVSLVPALSRSIDSSGRVDQWAETVEGRLQRLHSPEAYEMIENHLALILGQRQSDATIAAISKLRVGQVYAASVMYGYFLKRVDQRFQLEKTMKSLPWGSEEEDGALYQVMTTDSMPSAQSSSSHPEMGSWTAAPDFNAGGPSESIKPCRLRSYVMSFDPDTLQRYATVRSKEAFGIIEKHTEALFGKAEIVVTPGGTVGSSKDEHIRISFAGLRRLVLEAVTFGSFLWDVESFVDSSYHFVTS

SEQ ID NO: 290273 - protein, 106 aa, Zea mays
  Clone ID: MRT4577_2781C.1.pep
RPSWWPRSALGRSLEENGGMYRVVSKEWDHEDREDDHGKAQGRRRRASRPSRHLHLLVLKHKRIGNQQLVSLVILKNHLLPNVVQRLLNSQTHETQKYRKTKYSHS

SEQ ID NO: 290274 - protein, 46 aa, Zea mays
  Clone ID: MRT4577_27820C.1.pep
VMLPLNYMNKFGSGVGSYGLMNKDGKPYLVKFHWKPYLWFEMLARH

SEQ ID NO: 290275 - protein, 97 aa, Zea mays
  Clone ID: MRT4577_27821C.1.pep
NISFPTKFPFGCAFHLRSSLSLFPSMVQTKCFLLYHADILLYLQKCKRLDVCHSTEAAYHTVVFASALGFTSFIYEGYVVSYRKGIFCPLVQPSALN

SEQ ID NO: 290276 - protein, 101 aa, Zea mays
  Clone ID: MRT4577_27822C.1.pep
LTAKKKKKKKKKKKKKKKKKKKKKKKKKKKKKKKKKKKKKKKKKKKKKKKKGGPPFKKNKILLPGEEKKNFFFWAPKIKFPGPFLKTGGREKPGGTQNKSL

SEQ ID NO: 290277 - protein, 257 aa, Zea mays
  Clone ID: MRT4577_27823C.1.pep
MPTITHYVLDPFLETGSPAQAEKATPKPPPSPPDKATPVPVAPIRAQTSPASLYATPESTTLPDSPSSFPGTWSPYIINHKRRGASLAKTVPQGDVGSQGSQPKLPVILPALPKGGEPTAVEEPEFAFQQSGNDQAEGDSGVDEAPINGKNEMLLKGKGSVTAKNEHEQPEFEFHRGNLEALVRPVNVGRPLIGGAPKNDESDTFLELQDSMSVASNTETDDAGTQEWWWKPSSPLGISVGTPCAEFYDAFEEISSD

SEQ ID NO: 290278 - protein, 108 aa, Zea mays
  unsure (1)..(108): unsure at all Xaa locations
  Clone ID: MRT4577_27824C.1.pep
RVRGRLGPGALFREQTGPTEEDMDEGDIDHRQRKLGQRKLPQGSQXYQAGGIAADTYDEDDDSDDDNQTEYGMVIDEQGHSDQSSSGLGCRCRELLNREVLRRNYRGY

SEQ ID NO: 290279 - protein, 113 aa, Zea mays
  unsure (1)..(113): unsure at all Xaa locations
  Clone ID: MRT4577_27825C.1.pep
MAERLSQLRAQALQVLEFASKTACSYYEELMEKNXTHVRRSIPPPSINDMDALXKQLFYTRLARLPGRYESFWXSIDGVKSXWKIRKDLQGEDLEIATLFAVELYRMCLHKSY

SEQ ID NO: 290280 - protein, 140 aa, Zea mays
  unsure (1)..(140): unsure at all Xaa locations
  Clone ID: MRT4577_27826C.1.pep
VKAKIHDKEFIPPDQQLLGFGAKQLEDGRTLSDYNIHKESTLHLVLRLIGGMQIFVKTLTGKTITLEVVSSHTIYNVKAKIQDKEGIPPDHQRLIFAFKQLXDGRTLADYNIQKESTLHLVLRLSFGHQVMGRLNCLCSC

SEQ ID NO: 290281 - protein, 78 aa, Zea mays
  Clone ID: MRT4577_27827C.1.pep
IDGQGSLIRRSPSERHYAVLLLPRFPASTTPYHPLLLLLAKLKAMIKEVAGWKLSPLAACKENFQHKLTVEAHSLKPV

SEQ ID NO: 290282 - protein, 146 aa, Zea mays
  unsure (1)..(146): unsure at all Xaa locations
  Clone ID: MRT4577_27828C.1.pep
MAFSGRIKQLVKKYGKVAAGVHLSVSFASIFGLYAAINNNVDVEAVFRRFGIXPALPSTGRPHPXAPVSRDEHLQHASLPPCPSEVLQEESEQRQPRNRTMELVALSGGPLGLALLCNKALLPVRIPITIALTPPVARALSRWKLG

SEQ ID NO: 290283 - protein, 106 aa, Zea mays
  Clone ID: MRT4577_27829C.1.pep
PTRAVAVRTRSAGPADRAMEDHNHDTAADCSHVAGGDGDQRAPYPLRPDSGCRQAYGMNRIDPFQAPRAAGGGWRYSSRGLPAILTRSWPGVICDQHIDARRESSR

SEQ ID NO: 290284 - protein, 130 aa, Zea mays
  Clone ID: MRT4577_2782C.1.pep
VVALCQAPFLLDDPHVGLMFPADAIARAKHYLAMAPGGLGAYSDSRGIPGIRKEVADFIHKRDGYPSDPELIYLTDGASKGVMQILNTIIRNEMDGILVPVPQYPLYSATISLYGGSLVPYYLEEEANWS

SEQ ID NO: 290285 - protein, 42 aa, Zea mays
  unsure (1)..(42): unsure at all Xaa locations
  Clone ID: MRT4577_27830C.1.pep
PXRXRWSTRWILSSLXSXXNXXXKXLXXPPYSPIFPXASRYP

SEQ ID NO: 290286 - protein, 172 aa, Zea mays
  Clone ID: MRT4577_27831C.1.pep
MCPTGRYLGLDLSGAGGDLRPAFDVLDADRDGRISRDDLKSFYAAAGPAAGDRFDDDDLAAMIAAADADRDGFVQYDEFERLLAGRAAAAAAAGGAGRRSAMEGAFRLMDRDGDGMVGFEDLKAYLDWAGMPAADEEVRAMIRVAGGGDGGEGVGLEALAGVLAVDLEGIAF

SEQ ID NO: 290287 - protein, 213 aa, Zea mays
  Clone ID: MRT4577_27832C.1.pep
NSTGAFFFLINGPEIMSKLAGESESNLRKAFEEAEKNAPSIIFIDEIDSIAPKREKTNGEVERRIVSQLLTLMDGLKSRAHVIVMGATNRPNSIDPALRRFGRFDREIDIGVPDEVGRLEVLRIHTKNMKLAEDVVEVPNVSWEDIGGLENVKRELQETVQYPVEHPEKFEKFGMSPSKGVLFYGPPGCGKTLLAKAIANECQANFISIKGPE

SEQ ID NO: 290288 - protein, 200 aa, Zea mays
  unsure (1)..(200): unsure at all Xaa locations
  Clone ID: MRT4577_27833C.1.pep
LKQSCLLSFDHLSLAKFDLKHVQRPLVSFGPNASTKLRTCSADVCKNLRLGSRVLTDFGADVLSTSNDNGSFSTSWLRNLSATSDSWRSSSKNTKKNTXMTSTISIIMHNQVXVPASILQLAGSAYLLRATAWEHYGSAPMVRMNVLVYATCFADAASSSELSLAYVKLIQQLAVFKGYSAAFCALKLAEKKFPSSTSLH

SEQ ID NO: 290289 - protein, 71 aa, Zea mays
  unsure (1)..(71): unsure at all Xaa locations
  Clone ID: MRT4577_27834C.1.pep
STWIVMCVHSVIRTEQRELTMEFGLSWLLLVAISKGVQCEVQLLESGVGLVQPGGSLRLXCASSGLTFSNY

SEQ ID NO: 290290 - protein, 64 aa, Zea mays
  unsure (1)..(64): unsure at all Xaa locations
  Clone ID: MRT4577_27835C.1.pep
HSSSRLTTPRAXLPFPXAVHEHHQHGYRRHEFFADLPSGRKQIPCSYAIGFRKKRLQPTEINRS

SEQ ID NO: 290291 - protein, 53 aa, Zea mays
  Clone ID: MRT4577_27836C.1.pep
GALPSAPAQRAASVFSLTLRPVIHTRTFWLADPVALLPMAHSCQDVVNFPRSR

SEQ ID NO: 290292 - protein, 59 aa, Zea mays
  Clone ID: MRT4577_27837C.1.pep
NPIKTNNFIRKYKLLFLHSLPFSTKQAYKGTTFSKPKKHLVTSVTPRPHVPQQNSKFPK

SEQ ID NO: 290293 - protein, 95 aa, Zea mays
  unsure (1)..(95): unsure at all Xaa locations
  Clone ID: MRT4577_27838C.1.pep
XNTSXSSTTATXGGXLKLQFQMPSHHILNAAAAIPHELEPPSFHSLLVSPDHHQAAKAHHRAVQLMDEHAADQVTDWRVLPQMAQGLHERIGRAR

SEQ ID NO: 290294 - protein, 60 aa, Zea mays
  Clone ID: MRT4577_27839C.1.pep
GCSQVKFEFKLEFKFLWLITSTYIWEIRDINSEYIYLYIFNLYIFLYPFSFSYFQTLISI

SEQ ID NO: 290295 - protein, 60 aa, Zea mays
  Clone ID: MRT4577_2783C.1.pep
NISDANQPISTNRAKPTPGWRWEDLFENIMFSKQPSHLPWIFLKRSSRLNPCVGLHGLHQ

SEQ ID NO: 290296 - protein, 40 aa, Zea mays
  Clone ID: MRT4577_27840C.1.pep
KKVSFSKSEGYNRVNRELKIIMFILVYISFYFFVLYPFLY

SEQ ID NO: 290297 - protein, 83 aa, Zea mays
  Clone ID: MRT4577_27841C.1.pep
IKKKKKKKIKCAGVLYVPCFLTLACVVFAFFYFHLNSFLWPSFYILLTCISLSLPILITLQYIHLFSAGFLSNLSAFFALSYF

SEQ ID NO: 290298 - protein, 172 aa, Zea mays
  Clone ID: MRT4577_27842C.1.pep
SSSSVGFFPGPTQPVFHLRRSLVAMASSPAMRLHVPGQLGLLPSTVPSPPCCSSPISLNPSTAPLSLASELQPWCTARWGSGTCTTASPWGDHQGLRCRRSLLRRTPCLLPPDPSLHRPCLSAVPMAGPRSRPHEASGVQVRRTGGRSSQPHSLLTSHLPRLVAARRRLSSA

SEQ ID NO: 290299 - protein, 88 aa, Zea mays
  Clone ID: MRT4577_27843C.1.pep
CFFSAFVFLVIFVPFCFSFCLSFSCSIQAKKFFNFYREKYSAYKKLTARLGKKIRTRLLSMSTVFINVTLGSKFIPQNTTWLNLDMYI

SEQ ID NO: 290300 - protein, 217 aa, Zea mays
  unsure (1)..(217): unsure at all Xaa locations
  Clone ID: MRT4577_27844C.1.pep
IIVRWCHVTSPSPQDRRSRRYPARPGLGSDIGTSEEMNKSTRARALGERRAYGRQPGRSAARGARARPRARCPSRQARPPPLAVAVWWNPRRTTSWQLHGFFPNKRRDEKRRDRSSAQLPGADGGHCSSLDRLAQGARESRQRARGHGIGRCMLQRARATTGELERWFRRDRAGPAHAPRASGSQDDTXLSPKSGRARPDSXXCACAAEXTCRVYRT

SEQ ID NO: 290301 - protein, 86 aa, Zea mays
  Clone ID: MRT4577_27845C.1.pep
RKELSNRDPRLTRQHSLHTRTKKKKNTNTHRRTLGAYFYRGGGGPHKTLTYHGRSHTNLGGPASHLTRQALNSQLTTPLENTQRHL

SEQ ID NO: 290302 - protein, 142 aa, Zea mays
  unsure (1)..(142): unsure at all Xaa locations
  Clone ID: MRT4577_27846C.1.pep
TEQGTRGGEKKKKRFFLLGVPVPKPLVGCLPACKRELVLGFKPFLKELRDLQKDPPTXCRAGPVGGAMFNGQAPFLGPPASPYAGGVFLGNINFRPDYPLKLPRVFLRTKVFHLNYTSIGEFCLAILKEQGSLVLTIFKVLF

SEQ ID NO: 290303 - protein, 78 aa, Zea mays
  unsure (1)..(78): unsure at all Xaa locations
  Clone ID: MRT4577_27847C.1.pep
MGFKRFLRELRDLQKDPPTXCRAGPVGEAMFNGQAPFLGPLASPYVGGVFLGTINFPPDNPLKLPRVFLRTKVFHPNF

SEQ ID NO: 290304 - protein, 280 aa, Zea mays
  unsure (1)..(280): unsure at all Xaa locations
  Clone ID: MRT4577_27848C.1.pep
LLWAIGYLEAGRCTVTVMPHMKRLTFDIISLLLFGLERSPLQDALAGDFARVMDGIWAVPVNLPFTAFSRSLRASARARRLIAGIARETRAKLERGEASRSSDLIACLLSLTDHSGARLLSEEEIVDNSMVALVAGHDTSSILMTFMVRHLANDPDTLAAMVQEHDEIAKNKGDGQTLDWEDLAKMKYTWRVALETLRLVPPIFGNFRRAMQDIEFDGYLIPKGWQVFWAASVTHMDTGIFHEPXKVDPSRFENQSAASAPACSFVAFGGGPRICVAWSS

SEQ ID NO: 290305 - protein, 310 aa, Zea mays
  Clone ID: MRT4577_27849C.1.pep
MAARQPPALMEELVEEILLRVPPDEPERLMRAAVVCKPWCRLVCGPGFRRRFRERHGAPPLLGIISNRMNEAGAKLACFVPTGSFRPPRAERINWLAIDSRPGRVLLRNSFSNAAVYVAVWDPITDELLALPKTPWMMPSSDTMYNYKGAVLCAADGCDHLDCHGGPFLVVFVGVGAHDNTMSSYVYSSEANAWSEQAHHQYLGHLWESVSSTLVENALYFVVNKSPGILKYNLGTRETTAISCPTMTNPHVALMVAEGGGLGCATIRSSKLCLWSQEVGPGGGHSGWALARTIELSTLVPAGHSIREFD

SEQ ID NO: 290306 - protein, 35 aa, Zea mays
  Clone ID: MRT4577_2784C.1.pep
QRDAHCTHPLSAHVVVDTLRATDTLDSVLSLSHLA

SEQ ID NO: 290307 - protein, 375 aa, Zea mays
  Clone ID: MRT4577_27850C.1.pep
MPLHHPKHRHHDEDLLPYRRSDDEAKPRRPYTPTFPSSPASTNRLLLFFAVACLVLAAASFAFAVSTSRNRQSLPQPPPTVAFRCGRAEDSLRSFLAASSHGNFSAGDREKVLAVVGVHTEHGNFSAARRAALRATWFPLNPEGIVSLEHGTGLSFRFVARRPKDKDKMEDLQKEADTYHDFLFIDADEATKPPQTMLAFFKAAYHMFNAEFYVKASDDIYLRPDRLAALLAKERPQHKTYIGCMKKGPVVNDPNLKWYESSWELLGNEYFMHASGSLYALSSEVVEALATAKSDSLRMFDYEDVTIGAWMLAMNVKHEDNRAMCDSVCTPTSIAVWDSKKCSGTCNVADKIKQLHNTTVCSKSPTLPPEVEEEE

SEQ ID NO: 290308 - protein, 225 aa, Zea mays
  unsure (1)..(225): unsure at all Xaa locations
  Clone ID: MRT4577_27851C.1.pep
MLQASSERPAGLLWVPGTSPWPTMDAGPSARAQEIARRREEMLGMLRDLPESEYELSLTDLVEKAGAEAEAXPKPRPRPPPPRQRTGRTRAPXRSAAAAGRHERRASARQRGSGGSSFRSSSDGVLLNFYMPRSLTRSFTAPRPARTPSFASGCRSPSVASDCNKRERDPDAETVKCWSLLWDRRWRKSSRRDPRAPPSEGESAIRAASAAILKAAKHSPPPPNT

SEQ ID NO: 290309 - protein, 262 aa, Zea mays
  unsure (1)..(262): unsure at all Xaa locations
  Clone ID: MRT4577_27852C.1.pep
MPPKKFGKKTKVTKASKVKRNPLFEKRPRNFRIGGDIQPVRDLTRFVRWPKYIILQRQKRVLLQRLKVPPALNQFQSTIDRNQATTLLKLLRNYAPETPEKRRERRLEAAKLKAENKAPADTKAPIALKYGLNNVTGLIEDKKARLVIIANDVDPIETIVWLPQLCRKQDVPFCFIRGKARLGKLVGLKNASCVALTGIRKEDQATFDNLVKTFKAQFNENVSLRKEWXXGGLLXHKSRQAQEAKQRAIEAEXLKKAALIVG

SEQ ID NO: 290310 - protein, 71 aa, Zea mays
  Clone ID: MRT4577_27853C.1.pep
KPRVYHENLGQISSSTLLNFFPRPKKSFFFDWTKCSFYPLIPHLTFWMFFGPVSFRPRIGPPMPSPILHSG

SEQ ID NO: 290311 - protein, 78 aa, Zea mays
  Clone ID: MRT4577_27854C.1.pep
FRKGCTPGRTGPEFPGSTNPSGNPWPDPWPRTCCQPPGPQRGQWSDGSAPTQKEFLRTFPRSLGKMGKIQGLTGSQGE

SEQ ID NO: 290312 - protein, 80 aa, Zea mays
  unsure (1)..(80): unsure at all Xaa locations
  Clone ID: MRT4577_27855C.1.pep
LAPSSQPQQFPFSVPARQPEQPRTGGGCFFYLFDTHSVQQPXXQGRVGAEELPEKRDRGKREALGQRNRRKKRPEPTHSD

SEQ ID NO: 290313 - protein, 116 aa, Zea mays
  unsure (1)..(116): unsure at all Xaa locations
  Clone ID: MRT4577_27856C.1.pep
METITNKLQNVMGTATGPYSGKTALLLGAGFVTRPTVDVLAKSGVKVTVACRTLEKAQGLAKGIPNTNAISLDVNNAEALDAEVAKVDVXISLIPYTFHATVIKSAIRTKKNVRPT

SEQ ID NO: 290314 - protein, 349 aa, Zea mays
  unsure (1)..(349): unsure at all Xaa locations
  Clone ID: MRT4577_27857C.1.pep
IPANDEASGNEVIADAHVLPAHASAYTDGVTLLAYLKATRLASGYITVPYTALDAKPAPFMAAFSSQGPNTVTPEILKPDITAPGVSILAAFTGEAGPTGLAFDDRRVLFNAESGTSMSCPHVAGIAGLLKAVHPDWSPAAIKSAIMTTARVQDNMRKPMSNSSFLRATPFGYGAGHVQPNRAADPGLVYDANTTDYLSFLCALGYNSSVIATFMAGAGDGHEVHACPARLRPEDLNYPSVAVPHLSPTGGAHTVTRRVRNVGPGGATYDAKVHEPRGVAVDVRPRRLEFAAAGEEKQFTVTFRARXVLPAGXYVFGRLVWSDGRGRHRVRSPLVARVVNTKKKHISIA

SEQ ID NO: 290315 - protein, 52 aa, Zea mays
  Clone ID: MRT4577_27858C.1.pep
SEFYKKNIDSFSFQKKQHPFFLKRFIAPQHAGRLFLFVKFKTFIYPNKLKSF

SEQ ID NO: 290316 - protein, 59 aa, Zea mays
  Clone ID: MRT4577_27859C.1.pep
NADNRGDFLYHTDILIIPPDILSHSMTCSTNLFELQLLLGQPLIKIKAWSSVLKWGAPH

SEQ ID NO: 290317 - protein, 127 aa, Zea mays
  unsure (1)..(127): unsure at all Xaa locations
  Clone ID: MRT4577_2785C.1.pep
MLNVHARTNGLHYLALLNSYPCVQRYLQPHXRDETTVLGAAGKARHDMAPPDAVEPLTKRTVNYYGHERSRTEAMAVGSNAVRERPIRIRWKRNEDLXQHLGXYKKSHEKAVLIEARSLITLRREIR

SEQ ID NO: 290318 - protein, 65 aa, Zea mays
  Clone ID: MRT4577_27860C.1.pep
SQRLHYSVLWGNDSCSLPPRLGMERLDDQLRSVACPETRLLFVKATAGTLAPDSCTKDIVVCSPH

SEQ ID NO: 290319 - protein, 47 aa, Zea mays
  Clone ID: MRT4577_27861C.1.pep
QEHPEWEIKNGAVFFQKAKESQPCKEIPSLQLINQTLSYARELERIV

SEQ ID NO: 290320 - protein, 57 aa, Zea mays
  Clone ID: MRT4577_27862C.1.pep
MGSPVCHASPEEHPEWEIKNGAVFFQKAKESQPCKEIPSLQLINQTLSYARELERIV

SEQ ID NO: 290321 - protein, 56 aa, Zea mays
  Clone ID: MRT4577_27863C.1.pep
MKVQCDVCAAEAASVFCCADEAALCEACDRRVHRANKLAGKHRRLSLLGPVAPSSL

SEQ ID NO: 290322 - protein, 126 aa, Zea mays
  Clone ID: MRT4577_27864C.1.pep
MNQLESSSVTRGRGKNKRIWTYYEDEELIKALYEISLDPKWKSEGGFKNGYCSVLENELKARLPGCGLSAIPHIESRVRHFRTKYGSIEVMLAKSGFNQMTMLFALPETLRREFILNMIADEAQRK

SEQ ID NO: 290323 - protein, 74 aa, Zea mays
  Clone ID: MRT4577_27865C.1.pep
GSFPLAEKLFNLVVTSTPCESLDHPMSGLLTVKWSWAKEVQRRRTPVKKGSVRKCRPHRQIGHASHLASSETRL

SEQ ID NO: 290324 - protein, 87 aa, Zea mays
  Clone ID: MRT4577_27866C.1.pep
TFRTEYYTMIVSVWSRRPVNLPTNKTAHADCDMMLRHKHRAIDCDWQYGAHTDNLQLLSVFTILPLLPYVLMDITLVSIPNKLFFFT

SEQ ID NO: 290325 - protein, 207 aa, Zea mays
  Clone ID: MRT4577_27867C.1.pep
SRPAGKHITRSATLSSPFATPTIYSRCLPSRRRLPRVGRRLPPHRLSPLTGCYYLVDAGYTNANGFLAPYRGQRYHLGGFTTQNPPHSAEEYFNLCHARARNIVERAFGRLKGRWGILRSPSFFPVKTQSRIIMACALLHNLILQNMSRDPFENDEEPAMDASFEVMDGEISEPEFITGVSTSNEWTDFRNNLAQGMYNRYRARSNN

SEQ ID NO: 290326 - protein, 48 aa, Zea mays
  Clone ID: MRT4577_27868C.1.pep
YDEYGVIHSILELIFIHQTFIHLFIVNVHEAHLAYNCPRHLIQFDYVC

SEQ ID NO: 290327 - protein, 101 aa, Zea mays
  unsure (1)..(101): unsure at all Xaa locations
  Clone ID: MRT4577_27869C.1.pep
SESGSRGRLSPEAQPPLLPIDARHNLHLCLAHHPPLVCATLILLLLGLSGLGLGSFLLIHRTGLRXPDIPQDWVSFLRSFGQLILCPRNGTVTGKWRGSHV

SEQ ID NO: 290328 - protein, 85 aa, Zea mays
  Clone ID: MRT4577_2786C.1.pep
RSRIETGGLGSGRRQSPSPRYAHRSQTCTRSPRHPQSPRYGKKSSKQRDQYPRNLQYRHVHTRSSCPPGQSGFPHWHHPLRTTSS

SEQ ID NO: 290329 - protein, 217 aa, Zea mays
  unsure (1)..(217): unsure at all Xaa locations
  Clone ID: MRT4577_27870C.1.pep
MAAAEENSSLFLIFILTMIALPLVPYTITRLCHAATKKAKTIHCRCSGCHRSGKYRKSIYKKISNFSTWSNLTILLLWIVVIFLIYYIKLSSREVQVFEPYSILGLEPGASESEIKKSYRRLSIQYHPDKNPDPEAHTYFVESISKAYQALTDPISRENYEKYGHPDGRQGFQMGIALPKFLLNMDGASGGIXLLGIVGLCILFPLMIAVIYLSRSS

SEQ ID NO: 290330 - protein, 792 aa, Zea mays
  Clone ID: MRT4577_27871C.1.pep
MRQSGLVVTEGTVEKGTSSAEAEQVDIEEENANEEEEYYSILIPSKPSHLDFEKSTVSEVDMPMMMKLGYFGEAEKKLVRFAGEKTTPTPKDDEVVVFKSFFRAGLRFPLNERIGEVLKNFEIYLHQLTPNAIVRLSIYIWALRSQGMNPDAEAFCRVHELHYQTKARADGLHENFGCYNFAYRKDTKAPVLSYHTKWPTSWKSKWFYIKVDEKKREKLMTTVMSPLALSFGMTRPLCNIKPGSACQLSVSEFRVVAEQISTRDLVQEYLANRTSPTLSEFSMPKLKGTKKTLELKQFKKPCQEWLEMIETMCNEVLGNYTKKEDQLKTAAFGTRPKRRLNWVMDALNFEYPDYERLSKGVKGTKRKRVVSVLSRQTARMVKEDEKTLKKRKSATSKKRRAATPEPKVAEMEEETPSTPSAAEVEEILKVMTESLPIKMLSPLGPQVTKLLQKKDEPSAAKKVARPKKQRIITVMQAIEETPPPASASKMTPATKADTTAEAAAAEATNLESTMSAIDKVLLDIATEETAAATEEIMVVAPEKEKRITEDASEEENFNLRNLIGEELSEAEKKELQEYATSCGYQPGALFFSGVDEEALGCIRDRTGAKIISTLSKCVGFPKLEANISSYRRQHIGGSLFYSNFKSMLLSKALRMQQDIEDKMNEVIIDDLEKKVKDHKASLEKRTSFFRQWRVFNSVGANSEKFEPLVEDLPGTFEHIENEVEVLDKVIAGHDDFCALLASHGTVVAFMKVNSPKLVPEIAEVAEPEIAEATEPEISEVAEQNLEMFELSL

SEQ ID NO: 290331 - protein, 87 aa, Zea mays
  Clone ID: MRT4577_27872C.1.pep
CLVPEYGGTAPNFLLFGLVPCSIEFSKKGKLCSNVGPSRSAKSLGRSRSLECSLSIQLAPEPITTVSWLVSAALRENYENVICLYLA

SEQ ID NO: 290332 - protein, 93 aa, Zea mays
  Clone ID: MRT4577_27873C.1.pep
QRVHTGERPYVCKECGKSFTKCSTLQTHQKIHTGAKPYKCRECNKSFTQDSHLRTHQRVHTGERPYICKECGKSFTRCSYLRAHQKNHTGRER

SEQ ID NO: 290333 - protein, 61 aa, Zea mays
  Clone ID: MRT4577_27874C.1.pep
GQSSHDIDRARDIFQASRQVFLKLKPKTRSTIFSRSKGQAHQSCPYRFFFFNLGPGPSPLL

SEQ ID NO: 290334 - protein, 51 aa, Zea mays
  Clone ID: MRT4577_27875C.1.pep
QQVSKELGIPQDQRQLPRGMPPDFAPPIEMASPNVRVGPTIFGAREPPKKN

SEQ ID NO: 290335 - protein, 59 aa, Zea mays
  Clone ID: MRT4577_27876C.1.pep
INQSVMWAERVGRKLILFLGKCAMPPANGHANLVDGQRFLRSKTVVVFKNILRINFLVS

SEQ ID NO: 290336 - protein, 161 aa, Zea mays
  Clone ID: MRT4577_27877C.1.pep
MMCSTAVLLVRTCVVLVCLAALARAPAKVHAAAGTGDGLLVIPTTASLSHCPSRCGDVQISYPFGIGPGCFRQGFEVTCDHTAPSPRLFFVSGNSSIQVTSLYVGVNMVWASAVGFNVTMSADVDTYTQSWEAPTGAIFDGNNNLYTNWLWVSTSTYLVII

SEQ ID NO: 290337 - protein, 136 aa, Zea mays
  Clone ID: MRT4577_27878C.1.pep
VALLLLVAVFLFLCRRNRQPHKHVQVASSVHEDEEDMRSSESLLYDLSTLRAATDNFSEENKLGEGGFGPVYKGTLQGGQDIAVKRLSATSQQGQVEMKNEVVLLAKLQHRNLVRLLGCCTEEHERLLVYEFLTNN

SEQ ID NO: 290338 - protein, 67 aa, Zea mays
  Clone ID: MRT4577_27879C.1.pep
HCQQTESQLHSRGDMLTGPVTTHRLRKTGSHESDRPLGLELTVSVRFAYPYTGPWASTPCIGPNSCE

SEQ ID NO: 290339 - protein, 98 aa, Zea mays
  Clone ID: MRT4577_2787C.1.pep
DLKLSFFYKRIVLDDKQLNSRKNRQIFLRSKRSNSGMYLLSFRERSKALKQDRKRRVYVCSVFDSTRNTKRSVSTTQDGLRRVLGIPGGGGAAREHVH

SEQ ID NO: 290340 - protein, 165 aa, Zea mays
  unsure (1)..(165): unsure at all Xaa locations
  Clone ID: MRT4577_27880C.1.pep
EMHCYTXTTLSKEFNKHDRKPSKYVIHCDEASKPKHLLPKYTSRHCDIKRILTSEIFFNPKMYNNDFTTPLKVDIHRILSCLRGSTXMFKDFHKTLRRGXLKMIWDARSPASNISDSXAHARGQPIEDDCGQIYPISRYACMRSXSELDSTAEFYDHCRTRAQHE

SEQ ID NO: 290341 - protein, 221 aa, Zea mays
  Clone ID: MRT4577_27881C.1.pep
RGTPYVRKGWLVRQVILYLIFTGLQGFIIEQYINPIVVNSQHPLMGGLLNAVETVLKLSLPNVYLWLCMFYCLFHLWLNILAEILRFGDREFYKDWWNAKTIDEYWRKWNMPVHKWIVRHIYFPCMRNGISKEVAVFISFFVSAVLHELCVAVPCHILKFWAFLGIMLQIPLIILTSYLKNKFSDTMVGNMIFWFFFCIYGQPMCVLLYYHDVMNRTEKAK

SEQ ID NO: 290342 - protein, 62 aa, Zea mays
  Clone ID: MRT4577_27882C.1.pep
LVRLLLSSISHCLPTQGLDSIPLGSAEKRSEYIRFFLLIFLMILSSSFFNSDLCSDPKFLLF

SEQ ID NO: 290343 - protein, 44 aa, Zea mays
  Clone ID: MRT4577_27883C.1.pep
SIMVCLWMILSYAYGLRHVGVGDGIRLSRCHGVGGLSEWADSHE

SEQ ID NO: 290344 - protein, 78 aa, Zea mays
  Clone ID: MRT4577_27884C.1.pep
APEGNSHLIWFHVFMLSPKQKTVLTPYFFSSFYQIPLIILTSYLKNKFSDTMVGNMIFWFFFSAYTGSQCVFYCITMM

SEQ ID NO: 290345 - protein, 82 aa, Zea mays
  Clone ID: MRT4577_27885C.1.pep
PRVGSPLNLRGRRFVLAPWPPPKVFRFWPAWEWEPPLSRGGCHPPLGGFGALNWPVFFPQEGGLLVGPFWLGPWGGGPLSFA

SEQ ID NO: 290346 - protein, 557 aa, Zea mays
  unsure (1)..(557): unsure at all Xaa locations
  Clone ID: MRT4577_27886C.1.pep
LRRRLRSGAAVAARASFAADSGDESGPGEPSSSRRRDNSGGASSAAGGRAGAGDFSAFTFRAAAPVHRKAKESPLSSDAIFKQSHAGLFNLCIVVLVAVNSRLIIENLMKYGLLIRSGFWFNATSLRDWPLLMCCLSLPIFPLGAFAVEKLAFNNLISDPATTCFHILFTTFEIVYPVLVILKCDSAVLSGFVLMFIACIVWLKLVSFAHTNHDIRKLITSGKKVDNELTAAGIDNLQAPTLGSLTYFMMAPTLCYQPSYPRTPYVRKGWLVRQVILYLIFTGLQGFIIEQYINPIVVNSQHPLMGGLLNAVETVLKLSLPNVYLWLCMFYCLFHLWLNILAEILRFGDREFYKDWWNAKTIDEYWRKWNMPVHKWIVRHIYFPCMRNGISKEVAVFISFFVSAVLHEVTYLLFHSSSAYINYIVLYFQMCPFEFRHAFXNLPAVDYLDEVLYIKFNISQSSPFRENYDTFCLHXHQLCVAVPCHILKFWAFLGIMLQIPLIILTSYLKNKFSDTMVGNMIFWFFFCIIPQXKFSDTMPMCVLLYYHDVMNRTEKAK

SEQ ID NO: 290347 - protein, 237 aa, Zea mays
  Clone ID: MRT4577_27887C.1.pep
PAGKTRKRIAVGAARGLLYLHEQCDPKIIHRDVKAANVLLDEHHEAVVGDLGLAKLLDHGDSHVTTAVRGTVGHIAPEYLSTGQSSEKTDVFGFGILLLELVTGQRALQLGKASGALHSQKGVMLDWVRKVHQEKMLDLLVDQDLGPHYDRIEVAEMVQVALLCTQFQPSHRPKMSEVVRMLEGDGLAEKWEATNRPGVAVAAGAPCHDALGYDHRNDSNGSVFFNDFHDNDSSLNS

SEQ ID NO: 290348 - protein, 36 aa, Zea mays
  Clone ID: MRT4577_27888C.1.pep
SLGTPRACMFPQVRLPGFAKLTFNGVLLKSCAPMMV

SEQ ID NO: 290349 - protein, 98 aa, Zea mays
  Clone ID: MRT4577_27889C.1.pep
MERVSPVEAVADAYDAARAAVVAAAEAHSAAIIVEKEAIAVVKYAGIAREKFEGVVDSVKNSTFVYANASDEALIIFLHTIYFLEIDLLFLHNLFIPA

SEQ ID NO: 290350 - protein, 85 aa, Zea mays
  unsure (1)..(85): unsure at all Xaa locations
  Clone ID: MRT4577_2788C.1.pep
HQLVMEGYKWHFNETVLTXNYCYRCGNVAAILELDEHLQKDFIIFEAAPQETRGIPRMKPXADYFLVTPPAPAPSNPSGPRTTVI

SEQ ID NO: 290351 - protein, 52 aa, Zea mays
  Clone ID: MRT4577_27890C.1.pep
PLDNSYRFERENEKKEAREGNTRIWWILEKEFYIPKFRVLQLSTSQSTYANH

SEQ ID NO: 290352 - protein, 126 aa, Zea mays
  unsure (1)..(126): unsure at all Xaa locations
  Clone ID: MRT4577_27891C.1.pep
NCXTTLKYTLXWKHGNYRXXCMAPXXLPIQXGXPRIRDXIDWVHHXXIXPDXXNXXPXYMYIILVTTIPRXSGYGIIMARHACLHLDDGKPFHQASTLRNXEPIISSVHPXXHHXVGPIILXXRKX

SEQ ID NO: 290353 - protein, 87 aa, Zea mays
  Clone ID: MRT4577_27892C.1.pep
VHSNQLDALDVKFKEKKSYMDKSTEGFNVCHQLEETARGIAMSQISRQPIHRWVVNEAEYVSHERRLLLALLEVGAGRPTGGEQRHG

SEQ ID NO: 290354 - protein, 183 aa, Zea mays
  Clone ID: MRT4577_27893C.1.pep
MALLPPLSPFSFLLLILAGALSFYCQCTHVQLSKFNRIFGKPKEQPNSNALITLDKLNECASCCPVEYGDDRCIPFSCPALLALKELGAILKGLLGRSCNQLHHPSLPFHLCHVVFSNHALTREVSRESIELREREMILEPPIHKSLFRKIVVALSRTEMLLAKQEDMVDVNMKLKLTSSQSN

SEQ ID NO: 290355 - protein, 187 aa, Zea mays
  Clone ID: MRT4577_27894C.1.pep
MEDLLNTEIGKNDYDWLLTPPGTPRVPALDAAEKAPSSTVTKHTITRPSSTTRASRFSTSETENGYSTFPTRPARSISVSRRAVQSTPVSSNSRSSVLNANISSVSSRPTTPSKRTATLTASKSSVPLSRPVPTRSSTPVKARLSTTTNTCPYTPVKNRPSCVYSTHNSGCSQDPVSTKLQIINSNL

SEQ ID NO: 290356 - protein, 79 aa, Zea mays
  Clone ID: MRT4577_27895C.1.pep
MAIARKASLRRFLAKRKDRWSSASSTAYDDRRQDDDDDEAEEEEEPPAPKKGKMAAAAREDPSSSSWLALGSMCSMHGR

SEQ ID NO: 290357 - protein, 133 aa, Zea mays
  unsure (1)..(133): unsure at all Xaa locations
  Clone ID: MRT4577_27896C.1.pep
AFLCSVASFAPAVAVAALWXASVSFCCVWCPSSRVFRSGPVWCALSASRSPVFCSPCGGLVPARRXSSPCGRLVVALWRALCLRVRLAAAPLVVRARLPVFCAXPPXAFRCCRAGFGFVACPAGTPRVRGRVG

SEQ ID NO: 290358 - protein, 133 aa, Zea mays
  Clone ID: MRT4577_27897C.1.pep
RTRACERTYAAQGHQPPPPPAAPPPPPTLSSTARTRPRSMAGMPTESATTGGPPPALRPMTTAARTTTTTTSHTSHGACVRAYVRSRTRRSRRRPRKARWRRRRARTLLPLPGSRSAACAPCTAADEGASGGY

SEQ ID NO: 290359 - protein, 45 aa, Zea mays
  Clone ID: MRT4577_27898C.1.pep
IIKKNHLNLGRAKGYYGKCFSINDIHSCADIAQQHKNNYLYTIKF

SEQ ID NO: 290360 - protein, 54 aa, Zea mays
  Clone ID: MRT4577_27899C.1.pep
DPIHGRQALIATRLPHSFLVRHPVAAIYCNASVSQYYQIMFPITPLIIKSIFSE

SEQ ID NO: 290361 - protein, 118 aa, Zea mays
  Clone ID: MRT4577_2789C.1.pep
DGWLGSALLLPALFLYLHGLSPKVSFLGGAGLLGLTCPRGPLDLTAPGCVLVPSPCAHVSALPVCPSLVPSAIIVWFSHPFSLKHSIPNHVFLLKADKILEICMVPQLGSSLYLRLEL

SEQ ID NO: 290362 - protein, 65 aa, Zea mays
  Clone ID: MRT4577_278C.1.pep
HWSGSWRIDDLLDRGDKETKKNGDGDNRTGTLDLDARFVVGGGLGGRGRDRIGTETRDKEPAARG

SEQ ID NO: 290363 - protein, 84 aa, Zea mays
  Clone ID: MRT4577_27900C.1.pep
NGSARAKLHFQHTGIFLPLLYLFFSKKRKKLFHPHEKVLKGELNKSRRRATRSKGSLWVGLHPCPNAHVNNQRGLSLSPSTHTS

SEQ ID NO: 290364 - protein, 177 aa, Zea mays
  unsure (1)..(177): unsure at all Xaa locations
  Clone ID: MRT4577_27901C.1.pep
ALVLDRSFWSALCTVHRPFPRVPESRIATQTERPGAEDYGRSQTWRCIHEGPDTIEELLDRHLVKKPAAGPDEESAEARRRLTSSRREALALYRDILRAARLFAWTDDRGVPWREVLRANARREFEDARGERDPEVVARLLIXGGRDAVQQALXDRLADAFTPRDRDRGGQAPWRKH

SEQ ID NO: 290365 - protein, 47 aa, Zea mays
  Clone ID: MRT4577_27902C.1.pep
KKIVEKAKKKKKKKKKKKKKKKKKKKKKKKKKKNKKKKKKKKKKNPH

SEQ ID NO: 290366 - protein, 71 aa, Zea mays
  Clone ID: MRT4577_27903C.1.pep
IILNQPINISLLTSFLFIFCFSLLLIIPHSLIKKYTYTFPIQNNYIFLLYFFSFFFSIQFLLLPIQTILFF

SEQ ID NO: 290367 - protein, 122 aa, Zea mays
  unsure (1)..(122): unsure at all Xaa locations
  Clone ID: MRT4577_27904C.1.pep
TKPAKPRRAQPATTSPQPGGAAHQPXTPDTXPAPKTRQHRSPRPPDTQPAPADHAAQKRAKSKPRTTPRARDATAPPPPRGRPRPXAGKKSTAPXEARPAQPDTHNPQPKSKHPHDTPAKNP

SEQ ID NO: 290368 - protein, 135 aa, Zea mays
  Clone ID: MRT4577_27905C.1.pep
ELRSNVYMWGYMWTRDSKKKCITKSTMIRNLEFYPRTAQHYLAIVVKKAFPKQGDVFGRPNPTNPPHRGMDRPKKASTGGRGITDPSANLAIEVEGQAISVASEGVHEAPHQIGELVIIPGHCPCHRGRRRRHRR

SEQ ID NO: 290369 - protein, 104 aa, Zea mays
  unsure (1)..(104): unsure at all Xaa locations
  Clone ID: MRT4577_27906C.1.pep
FLGQXLISWSSKRXAVVSCFSAEAKYRAVASVVSETSXLRHLLQEFHSPXTRSMLVYCDNVSTVYLFVNLAQHQHTKHVEIYLHFIHEHVAVGDVHVHHIPMSS

SEQ ID NO: 290370 - protein, 69 aa, Zea mays
  Clone ID: MRT4577_27907C.1.pep
LLPLDHSPLIYTRMAIMVNSISTTSLETYKIFIFNVLNHLAPRHCYFDQCHFHHELIYLRRFPHTNRRV

SEQ ID NO: 290371 - protein, 85 aa, Zea mays
  Clone ID: MRT4577_27908C.1.pep
DAWARGWWRASPPSSSSPRPRRRSPGRARKHRTRRRRPDQNQSRGVRGRPWGRWAARIRDPVKGVRVWLGTFPSAEAARRAYNHA

SEQ ID NO: 290372 - protein, 106 aa, Zea mays
  Clone ID: MRT4577_27909C.1.pep
PLPWPKINGGKILAGAPKKGGNTRACQINQGRVPFFLKKTKFSKKPNPGPPFLVDLDGGERPLEGPPGGQRGQKKKIFSGNPPELKIKPPPPIFFGGGREENKTPF

SEQ ID NO: 290373 - protein, 52 aa, Zea mays
  unsure (1)..(52): unsure at all Xaa locations
  Clone ID: MRT4577_2790C.1.pep
MPMSWALTVSVVDTVFAASXXRGVSACLSAATAVTRSPRTGVMGRFAFLLSA

SEQ ID NO: 290374 - protein, 150 aa, Zea mays
  Clone ID: MRT4577_27910C.1.pep
EADHKIPSTEVKLASEYYFYMETQTALAVPDEDNTLVVYSSSQYPELAQSVIARCLGIPFSNVRVITRRVGGGFGGKAFRSFQVATAAALCAYKLRRPVRMYLNRNTDMVMVGGRHPVKAHYTVGFKNDGNVTALHLDLLINAGDSNDAS

SEQ ID NO: 290375 - protein, 424 aa, Zea mays
  unsure (1)..(424): unsure at all Xaa locations
  Clone ID: MRT4577_27911C.1.pep
PASAQRPXCISGWNAPVYGALSAFLKDEAGKITKGPGGYMSGRGKVEITDVVEAASLAASGQPFEVVYYPRASTPEFVVKAASVQNAMRNQWCPGMRFKMAFETEDSSRISWFMGTIASAQVADPIRWPNSPWRLLQVSWDEPDLLQNVKCVNPWLVEIVSSIPPIHLGTFSPPRKKLRVAQHPDFPFEGQLLNPIFHGNPLGPSNSPLRCFSDIAPAGIQGARHAQFGLPLTDYQLNQLHLGFNRLGAMTPTPRISKGFVISSAPASESVSCLLTIGTPQATEKSDDIKRPHIMLFGKPILTEQQMDSGGSREGLSQDRKASELGLEDGHCKVFMESEDVGRTIDLSVFGSYEELYGQLADMFGIEKAEIMRHLCYRDAAGAVRHTGEEPFNDFMKVARRLTIIEGTEGRLQKPLVEYMVERA

SEQ ID NO: 290376 - protein, 136 aa, Zea mays
  unsure (1)..(136): unsure at all Xaa locations
  Clone ID: MRT4577_27912C.1.pep
VFGFFFFFFFFFCKAMRDCCDKSSRSMNKRRVFFTATERITNAPPPPMKQGRRTPLRFLRAQTVPKLAPDHAGKPGTTAGGTKKPATRRAGEPRVDAAGPGTDDGGGVXLNPGGGAVCPGGVTTGAPPGGGGGGPL

SEQ ID NO: 290377 - protein, 78 aa, Zea mays
  Clone ID: MRT4577_27913C.1.pep
GMVSDSKPSKSLLRALWCVSEPYSMWGLEDIYLIPEGGIIRPSSGLRIRSSGRCRSLYVYSLLSKNHGQTFFLFENWI

SEQ ID NO: 290378 - protein, 175 aa, Zea mays
  Clone ID: MRT4577_27914C.1.pep
HKESPTDIQRSSSKENMEAFTAFSMLFSLPPRFATAIMYRGHRLSAARRPEAKAIRCLPSCESQPSLHGTTFTTSSKQIQPDGIEGIHNHPTRNGSTLNTPNPTRGLSRRSDAEMVPVLRGCDTVSSPIPYPITEQSTVSTAQNITTDISSITKQRTCRNNNYWLHYKKGWLPGG

SEQ ID NO: 290379 - protein, 83 aa, Zea mays
  Clone ID: MRT4577_27915C.1.pep
SKLINLRWEGPSKLSIFLEAMSLERIQLPVHVTEADYFFNSGVQEKGLVKWTTRPDYLCHAWESAGLEVGISYLCCCCLYGLP

SEQ ID NO: 290380 - protein, 54 aa, Zea mays
  Clone ID: MRT4577_27916C.1.pep
GMNVCVCTCLVSPTKRVRTASVMVMYLRQCCEKLIDMQLMCVASKKKEKKQKKK

SEQ ID NO: 290381 - protein, 63 aa, Zea mays
  Clone ID: MRT4577_27917C.1.pep
MERDMADLRRRLLAVEELCRDRHSDGGCVVDATAADEAARSESAAAVVSPGACACEEADAMEK

SEQ ID NO: 290382 - protein, 57 aa, Zea mays
  Clone ID: MRT4577_27918C.1.pep
LQRGFRGKDWRGTSGIGQHPEDTTCCWGEDWECIPYTCGRTTMPSCREDRRANCSCW

SEQ ID NO: 290383 - protein, 75 aa, Zea mays
  Clone ID: MRT4577_27919C.1.pep
RCRCVEEPPPVCTSVPSSAPSPLNTPLLWWSSTNGRGLRLQAVCANPASNIRRISVSARRTKTNLLPLPRGGRSR

SEQ ID NO: 290384 - protein, 115 aa, Zea mays
  Clone ID: MRT4577_2791C.1.pep
LERRHLDDILAYVWIVDIKKKKKKKKKKKKKKKKKKKKKKKKKKKKKKKKKKKKKKKKKTPFGGETLGWFPGTTLAMETPKFWGNSQGPFPFPLGERAPKKAQKIFKIFPPGAQG

SEQ ID NO: 290385 - protein, 52 aa, Zea mays
  Clone ID: MRT4577_27920C.1.pep
KTACHGLSDLNNLTLGSQMFNKVKPKSKSSCLSIVFQQDLILYHTLTRIFIF

SEQ ID NO: 290386 - protein, 172 aa, Zea mays
  unsure (1)..(172): unsure at all Xaa locations
  Clone ID: MRT4577_27921C.1.pep
YRRMRLAELKEAAKTARFGTVQPITGSDFVREVSQAPXDVWVVVFLYKDAIPECGLLETCLEELATKYAETKFVKIISTDCIPNYPDRNVPTILVYNNSAVKGTYVGLQKFGGKKCTPESVALALCHSDPVLNDGQGGGDSSRNNVMEGVRRKFIEKVVSQLETREDEDDSD

SEQ ID NO: 290387 - protein, 78 aa, Zea mays
  Clone ID: MRT4577_27922C.1.pep
SYGSGRLPTAQILPQAVPISSSSTSGSSGNRVPLDDVVEKVATMGFSREQVRATVRRLTENGQNVDLNVVLDKLMNGR

SEQ ID NO: 290388 - protein, 167 aa, Zea mays
  unsure (1)..(167): unsure at all Xaa locations
  Clone ID: MRT4577_27923C.1.pep
MPPPPCVQASGDRMPAGHGLRSRIXDLFARPFRKKXYLPPHAYLRTYCIRGYNNVKANAPVHXAMTHKLYHGRSWRRWMIPNGSCGKNRTNWGNGRILRKGIRVRSRSAQTSSXTXRSLLRKGRKDQLKAHGSMRGAAIRSXRXPLGPSAGLMDQRTTWVPEGLIPY

SEQ ID NO: 290389 - protein, 56 aa, Zea mays
  Clone ID: MRT4577_27924C.1.pep
PRVRGRVGVCSIFIYSFSHFSRLAGAGYTLQGRLPLHTKKKAPLAHLSVMYAPFIF

SEQ ID NO: 290390 - protein, 233 aa, Zea mays
  Clone ID: MRT4577_27925C.1.pep
MERKRKEMEKGKSELRLAMEELRLCGSRDGAEEEEEVQVQQVKVQEQHKSSTMDLLYVSKQLIHVLDEIGPTLLVLRQDIQQNVQRLQDLHEKDCSKYACLTAIVTEEMEQGTAKKTKSCTRAIIWLSRSIKFSKYLLERLLETPESSLEEIVEEAYANTLKPWHGWISSAAYKVALKLIPEREFFVALLMGNCQDLEDLAEDARMLAYAVQPLLQEIDAISAKHNLDKMKSS

SEQ ID NO: 290391 - protein, 117 aa, Zea mays
  unsure (1)..(117): unsure at all Xaa locations
  Clone ID: MRT4577_27926C.1.pep
MASTGIGSVTIRFMLAPGVPTASSCICLVSFSSAPNRLGRRLVVLADYESPAEPAPTAEWDGAVATKPNAENPSSIGPNRGSKVNILMLQFYLYNGICNLFTVXQDPNTRYPVDGAV

SEQ ID NO: 290392 - protein, 82 aa, Zea mays
  Clone ID: MRT4577_27927C.1.pep
RCLASPRAWALSFLDYDWSTDSAGCGLPNCARCQAAMSSWDPSPATSTTSSKMASIPSLDSMNAFPHAEDHFVKKTYSFAVV

SEQ ID NO: 290393 - protein, 132 aa, Zea mays
  Clone ID: MRT4577_27928C.1.pep
KFCEIKLALREWCESANITIASMAEAMQKKYDKYWKKSNIALAVACFLVSRIKKKLVEYFMLKIYKDSAVAELTRFMDVVNQLFQSYLSSTRDVSITQTDLAASTSNSICINTDIDEFIYEDNDAAKGEINE

SEQ ID NO: 290394 - protein, 93 aa, Zea mays
  unsure (1)..(93): unsure at all Xaa locations
  Clone ID: MRT4577_27929C.1.pep
RCGKRSHSLSHQCIDSTYDKRSLGDHXGLICXEDLVHDIATDGPHLPEASTYLMPFKLKYPETKLDMNRKPYKAGGDSGXRGNKINELIEKLH

SEQ ID NO: 290395 - protein, 117 aa, Zea mays
  Clone ID: MRT4577_2792C.1.pep
IQFSNLLSKLNTYCICDIRVNPIDVRGKHLQRVAAATCNCARTEVLAAPVVSFSLPAPRATPASTVLRAPPAREPALARCELLPTARAPSLSPPRALPEAAVAWNPHFIAMADGDRE

SEQ ID NO: 290396 - protein, 271 aa, Zea mays
  unsure (1)..(271): unsure at all Xaa locations
  Clone ID: MRT4577_27930C.1.pep
MCWELGMAAAPQRRAAWAALLVLLALTAAVTATAKECTNIPTELSSHTVRARLQAAPAGAAEWRWRELFHEHLNPTDEAAWMDLMPPPGAAAAAQHQQHHRQEELDWVMLYRSLKGQQXARWGAAPPQPGARRSLEEVSLHDVRRDPDGDAAYGRAQQTNLEYLLLLDVDRLVWSFRSQAGLPAPGTPYGGWEKPDSELRGHFVGHYLSATAKMWASTHNGTLAGAMSAVVDALDECQRAGGTGHLSAFPAEFFDRFEAIXPVWAPYYTIH

SEQ ID NO: 290397 - protein, 64 aa, Zea mays
  Clone ID: MRT4577_27931C.1.pep
LQEFFFVESKPVGLLWKDIGGAALPERNVFQFNALEILGPASNKVQRPPRLLWYFRGTSPPNVF

SEQ ID NO: 290398 - protein, 168 aa, Zea mays
  Clone ID: MRT4577_27932C.1.pep
LSHADPPYKSLAALNCVVLGCANIWDINRAYETFVAIKEKFDLTPDIHSYNALLCAFGKLKQTGEACNVFQHVLTLGVKPNATTYSLLVDAHLANKDPKAALAIIDEMVDAGFTPSKDTLRKVRRRCSRESDFDSDEKVQSLAKQFNYRMGGENRREMLYSIEYNPVY

SEQ ID NO: 290399 - protein, 152 aa, Zea mays
  unsure (1)..(152): unsure at all Xaa locations
  Clone ID: MRT4577_27933C.1.pep
VRRTPPVGQGASGRPAAARRSGGLSHWHGPLGRERPIVGRGGRRAEAPVASLASALEAFRRGAGHGCFAPLAFLPXAMTNCVVQRFLSCYVELLSRRGHPWALPVLSGAGLAPCRVPCWWVVCRSLGGFCFPLVGGAFVARCVRPVPLSAWL

SEQ ID NO: 290400 - protein, 100 aa, Zea mays
  Clone ID: MRT4577_27934C.1.pep
FLTCLFLAAFVPVIRYNHTKRHREDGDRSCTRLRKQLRIIHRQAFSCDAHEALLLLPTSHPPMSPMTHPQALPICKTGNEHLAPSYMPTVSRYKNMPLSP

SEQ ID NO: 290401 - protein, 618 aa, Zea mays
  unsure (1)..(618): unsure at all Xaa locations
  Clone ID: MRT4577_27935C.1.pep
MAAVAAATSHLLRHHRNPHLLLLRAAISSSRALPQQPELSPDPTAGTPDLAGAAPLPPNPSTGSPFYTQNWRNPAAANPPSSLLPTVVAGXAPSGRXFMAAFYDAPDVTGLKETFAKYMAEQRWEDMKHLFDHWVRSLDAATGKPNHPDVDLFNHYLRANLMTRALPHEMLDLADHMLEFELQPNTASYNLVLKSMVASQETEGAEKLIERMLQTGTFPDDESYNLVVGLLIRQNLVDSSLKYLDLMLKSGYMLSLTVFTDYIRACMRSGRLDTLTSIIEKCKTTDKNKVLCPEWTWCIDIADAAFEANNSKLALFALEYLARWIARGENVKPPVQLSVNEGLVISALSAAGRTYNTDLLNAAWSLLRKSLRQKRAPTQETYLAKIYAHSSIGQLQRAFGTLREFENAYGNSEDIDLELFSPFTSLHPLVVACCKDGFSTLDSVYGQLENLIHADPPYKSLAALNCVVLGCANIWDINRAYETFVAIKEKFDLTPDIHSYNALLCAFGKLKQTGEACNVFQHVLTLGVKPNATTYSLLVDAHLANKDPKAALAIIDEMVDAGFTPSKDTLRKVRRRCSRESDFDSDEKVQSLAKQFNYRMGGENRREMLYSIEYNPVY

SEQ ID NO: 290402 - protein, 39 aa, Zea mays
  Clone ID: MRT4577_27936C.1.pep
VRKVGPRFWVVIYFQVLRHALKSESLLLGKLLLLESAFW

SEQ ID NO: 290403 - protein, 76 aa, Zea mays
  Clone ID: MRT4577_27937C.1.pep
MSPGPSDLCSRVQRTCRDDYQQSCWCGECTTWTGVWTCDDLLTKCAATCNNCLPVSTDKGAIKHRCRDFLPESLQL

SEQ ID NO: 290404 - protein, 248 aa, Zea mays
  unsure (1)..(248): unsure at all Xaa locations
  Clone ID: MRT4577_27938C.1.pep
MSAPPSLKPPATSAAAYPRASAAPRATGIRGACALPTRRLQCSASAAVAGASTEMADAPLDWAGRSLEELRSLPDHDTFCLMALSPLDGRYDRFVKELMPFFSEFGLIRYRVLIEIKWLLKLSQIPEITEVPQFSKEAQAFLIAIIENFCIDDAKEIKKIEKVTNHDVKAVEYFLKQRCSSNPEIAKVSEFFHFGCTSEDINNLSHALALKEXVKXSMFPAMIDXMHSIVVLATXXSGYPMXARTHGQ

SEQ ID NO: 290405 - protein, 113 aa, Zea mays
  Clone ID: MRT4577_27939C.1.pep
TRPALFVLETVEEEADADTERSSIGAASEDGDDEEEEEVASGGTKGAGAALACMDMGALDDALPIKRGLSNFFSGKSRSFVANLRDAASAGSSARGLAKPENPFNKRRRVLRY

SEQ ID NO: 290406 - protein, 172 aa, Zea mays
  Clone ID: MRT4577_2793C.1.pep
DRVNSLSKKSNTFFGLLEFSRINSDVTYTVCVQFGQFIAKFDDGSCVLVPHKYDEWVVDYQRCSLASLQKDFAARVNWGSNQEVEVSVFDKSINLETRLENDSVLRAFFDRCVDRRLYLFADVVDKSAQVISNSGLTVVSHSGCGKCSILFQEMATPKKQQVVTNQSTNISP

SEQ ID NO: 290407 - protein, 54 aa, Zea mays
  Clone ID: MRT4577_27940C.1.pep
RTRGRMSVDIQQGSSDARDLTFKPYFTSRFSTLANGLVRCIDTFYDHLPRSSLG

SEQ ID NO: 290408 - protein, 42 aa, Zea mays
  Clone ID: MRT4577_27941C.1.pep
NKAGDLFFISTGTVFFYAEKELQNGKACKLNAPYRHAVICIC

SEQ ID NO: 290409 - protein, 98 aa, Zea mays
  Clone ID: MRT4577_27942C.1.pep
GKTNFCPKNTKKVFLKSKLVDGGMNTWKTNFLPWTLYGLWWIFQPFWVFWLLQVVPRTHGSSSMFLFHWSGGIDPGETPFWGDMGEARATGFRQRPLF

SEQ ID NO: 290410 - protein, 67 aa, Zea mays
  Clone ID: MRT4577_27943C.1.pep
WSPKITYSLGPCVFTNVLGLGERTPAYNHNFNARLHTTSPFSRSMAVMSNKGSTPYRPYPTICPTSE

SEQ ID NO: 290411 - protein, 155 aa, Zea mays
  unsure (1)..(155): unsure at all Xaa locations
  Clone ID: MRT4577_27944C.1.pep
MPEYLGTMEDDIESPSEIPXNXWCPXSDFSXGDATSAXYQIEGAXNEDGQVERNWDHFCHNHPEKILHVMNSEIVANSDHMYKMDVLLLKEMGMDAYRISISWARILPNGIKEGGITPCGLMYYRKLINLVVENGIEPYVTIFLXDVPQALQEKD

SEQ ID NO: 290412 - protein, 83 aa, Zea mays
  unsure (1)..(83): unsure at all Xaa locations
  Clone ID: MRT4577_27945C.1.pep
NFSEWALSCINQKAPEFLSVVAFPWVFHSSQAGPPEVFHLMGVPFLGKEPLDPQLAKAALXGGSCFADQKCGASAPALRSPRE

SEQ ID NO: 290413 - protein, 232 aa, Zea mays
  Clone ID: MRT4577_27946C.1.pep
VDLKFATSEVDYTPIGGNDDNHTISASYVDAELSRLRQEQIYLGHERRKLESHAESVSSEMFAECQELLQMFGLPYIIAPMEAEAQCAYMEINNLVDGVVTDDSDVFLFGARNVYKNIFDDRKYVETYFMKDIESELGLSREQLIRMALLLGSDYTEGVSGIGIVNAIEVVHAFPEEDGLQKFKEWIESPDPSIFGKLHMEISGRSKKRKLDENDSNGKGKGLEPECIQGSD

SEQ ID NO: 290414 - protein, 62 aa, Zea mays
  Clone ID: MRT4577_27947C.1.pep
VRIGKSRDIGVGLGKYLLKAPFFFFNYPVGAPQGIKTLPGVPNPPAGFVWFNKKKGKNKTSK

SEQ ID NO: 290415 - protein, 69 aa, Zea mays
  unsure (1)..(69): unsure at all Xaa locations
  Clone ID: MRT4577_27948C.1.pep
TPSQAMRRPACRXGNRRSAPVTRSTTPRLRTSPAPGARRPHAVASARVAGSPLLYCKNEILRTAWVDTG

SEQ ID NO: 290416 - protein, 80 aa, Zea mays
  Clone ID: MRT4577_27949C.1.pep
KRPVHAGRLRWNFRGNQTVFVDGAPVDVLWDLHGWWFQDPPGCAVVMLRARSALENRLWLEEEARAPGFALLVQALRTPP

SEQ ID NO: 290417 - protein, 84 aa, Zea mays
  Clone ID: MRT4577_2794C.1.pep
TCPFFLFNKNRGVRFFLLKPGVFQICFVPGFVFLSTESILISLFKTSNKIPGFLKKKKKKKKKKKKKKKKKKKKKKYSALLPLL

SEQ ID NO: 290418 - protein, 133 aa, Zea mays
  unsure (1)..(133): unsure at all Xaa locations
  Clone ID: MRT4577_27950C.1.pep
GELACPTACRSSSTTGGGGRGEGGGGGEERGGEGRPCRLRAAILTVKNEDEKRTMEFAHRRRPSPESSRRFDRRTESTKMKPSTRQTQRYPRISPTTXXLKXIARWSWNPPKLWRGTDGAVVFFSCKWFCFSF

SEQ ID NO: 290419 - protein, 41 aa, Zea mays
  Clone ID: MRT4577_27951C.1.pep
LAVSSITNTPNSPKPSGIHNLLFPPIYYNYVIKHYTMSYVH

SEQ ID NO: 290420 - protein, 48 aa, Zea mays
  Clone ID: MRT4577_27952C.1.pep
RPFFFFFFFGVGENHYLDSLNWIGHKANMQGFDKDVDLKKPFLRAWPF

SEQ ID NO: 290421 - protein, 130 aa, Zea mays
  unsure (1)..(130): unsure at all Xaa locations
  Clone ID: MRT4577_27953C.1.pep
IAGSTSFLFGGRPSFFKGKXLDYSKTYFPTGKTAAXDATEMAXIRSGATHLXCTVNLVMGWMAAYLTLHISRNCRLSDPAHCLSTYNYLTQHHNCALQQLLPPLLAKYQHARIMCPDYYGAAMCFVKNPK

SEQ ID NO: 290422 - protein, 80 aa, Zea mays
  unsure (1)..(80): unsure at all Xaa locations
  Clone ID: MRT4577_27954C.1.pep
KKKLKKKKQKKKTKGGGKKKKXKKKRNHGGGKKGKQKVWRPETNPPRRRKKYPSKRHPKNKRXTKAKKFRQQKRIKIQKN

SEQ ID NO: 290423 - protein, 46 aa, Zea mays
  Clone ID: MRT4577_27955C.1.pep
NFVNLSGYVRPICAYGLLRTTFRMVVFTTLLFFDIGYLLCASVNCV

SEQ ID NO: 290424 - protein, 135 aa, Zea mays
  unsure (1)..(135): unsure at all Xaa locations
  Clone ID: MRT4577_27956C.1.pep
LPGWGVRSPPWGGWFTGCGSGGPGLASPAPGPGDSXPSPPSKSRILPGPPQXSQPGPRAAPTRVNPXPPAPPPLFCSXPPGFRFWAPASPGFWSLPAPPPPXPPPGGPSSPGPSPPPPPLCHPFPLTPSMPYSSI

SEQ ID NO: 290425 - protein, 81 aa, Zea mays
  unsure (1)..(81): unsure at all Xaa locations
  Clone ID: MRT4577_27957C.1.pep
MCGGAILSDIIPPPSPRRETDGHLWSESMKSRRAASVRRGAPVEHHDXXEDFKVELEEFEVESGDEELESEDESKPFLRPQ

SEQ ID NO: 290426 - protein, 85 aa, Zea mays
  Clone ID: MRT4577_27958C.1.pep
TYRTPLSHTASGTWKVNMNSHMNGRGVGSALTLYNSWDMACTIMAKKKSITDIQSITISTGWTHGNDKVLAISSLLAMALCLCFT

SEQ ID NO: 290427 - protein, 103 aa, Zea mays
  Clone ID: MRT4577_27959C.1.pep
MEVKFTGNNGLVKAVHGARRDRGVIGFRRGILLVPGSNSHRGGDDFTPGNTSKVSGLASRFNLLHRRRADVATLLLSFRSAGTVVWIGAVKGVQPYCNPLNWG

SEQ ID NO: 290428 - protein, 48 aa, Zea mays
  Clone ID: MRT4577_2795C.1.pep
SSGFGSCERACAACEFCCAQCGPRFLRNVALFSSCFGSFSKKKKKKGP

SEQ ID NO: 290429 - protein, 78 aa, Zea mays
  unsure (1)..(78): unsure at all Xaa locations
  Clone ID: MRT4577_27960C.1.pep
MEPERGLIAYEGPPPDSTDLLSSAWCSSAIQVLDTGGHKECSMALVEHPVMALGNDRNDXVAKSDXSIXXYNSSVSTA

SEQ ID NO: 290430 - protein, 63 aa, Zea mays
  Clone ID: MRT4577_27961C.1.pep
FLTCMLTRCHLLISTATDSVLTMQSSISYLITLMLDPRYLYDHILYCYYYFYLDFRNRAFFLL

SEQ ID NO: 290431 - protein, 68 aa, Zea mays
  Clone ID: MRT4577_27962C.1.pep
VQGANVSLRTNQLLCCNFFISLFGFRAKLRLTHFFPQIAVLGGSLLGTFLSEKIIAYIGGSLFLAFAA

SEQ ID NO: 290432 - protein, 121 aa, Zea mays
  Clone ID: MRT4577_27963C.1.pep
GTPVFGHQVLDWHPFVIASPATTVKKAGKAPLKSKSAAGSMERSNHSQVGVDRTVSGEWVRRVGAGAHPVAAQVAPVHPRPSLYRDLVPQLHLRLVVHGYRHDRPLHADLTALMRAHLEPN

SEQ ID NO: 290433 - protein, 79 aa, Zea mays
  Clone ID: MRT4577_27964C.1.pep
KPKGVSIPLIQKGLFPLKRQKLFPPAPQKGQKTGGVHLVDSPPCLSGGGFPKVCRLPPPVGFLFFKTPPPGVFNFGGQT

SEQ ID NO: 290434 - protein, 147 aa, Zea mays
  Clone ID: MRT4577_27965C.1.pep
TTDKCGVLMFIRYPSARSCCLVLVVLVVGVPQHDSSAAPPAPLPRQLVEHHAMAVGAEVPRRDALRGLGHDIRVQRMLIWFGTWKEHHGHGVYGSLRRRDAVVDSQSVGYDLSDLHAQSHSHASGWRTRTRCSMICFTDCLETCFRC

SEQ ID NO: 290435 - protein, 87 aa, Zea mays
  unsure (1)..(87): unsure at all Xaa locations
  Clone ID: MRT4577_27966C.1.pep
MATNICSLLKLLALSTCAANATTYPXQCSQAPIAXLLPPYLTSIIAPRWENPALKPYTLQQAVAASNIPXSPLVLQQSPALSLVHSL

SEQ ID NO: 290436 - protein, 92 aa, Zea mays
  Clone ID: MRT4577_27967C.1.pep
IVSDTIYQDSYAMIRSLIDYIESGSAGRSELFGESHSAPPFFFFFTVNCLYVNDTLWMRYYWLPKSALFFFKEEEKLMKRQVRSRRITQRGR

SEQ ID NO: 290437 - protein, 98 aa, Zea mays
  unsure (1)..(98): unsure at all Xaa locations
  Clone ID: MRT4577_27968C.1.pep
VNLFTPRDQISFGYVVHRLGGALKFFMFXTRGCEYNSLFILHGHTREHSSKVEWAKTTDEIVKKGLKESRGGLGLWTPYPADLSSVELPAVKRTSPAG

SEQ ID NO: 290438 - protein, 65 aa, Zea mays
  Clone ID: MRT4577_27969C.1.pep
KVGDYYMIHPKNHRFTSLSWNTAPEFKNLGKRNMGSDSTIDKEPRTPQSITEKTLNNLMVHRTRG

SEQ ID NO: 290439 - protein, 113 aa, Zea mays
  unsure (1)..(113): unsure at all Xaa locations
  Clone ID: MRT4577_2796C.1.pep
MKVLIVAIALVALAASADSSTSGGCCCQTPACHLPPXFYMPTPFYLPTQQHPQPWHYHTHPPQLIPCQQFGSCGVGSVCSPLLGQRVEMLRHXCRPAATPYSSTQCQALQQQC

SEQ ID NO: 290440 - protein, 71 aa, Zea mays
  Clone ID: MRT4577_27970C.1.pep
VTCAVVDAHEAAQRKVLEAEGVQVRSTATQSRGRGCAAPTCAVGQQLAYIARASSIDLLCLHHQSTASLAS

SEQ ID NO: 290441 - protein, 114 aa, Zea mays
  Clone ID: MRT4577_27971C.1.pep
MPRLFLFCLVSSQLAATAVTARPFATVLLHGGAMSRVAADAPYSAAAVALHAHSLLEESRFAGSPLSSHRGGHRPFDRAFAGGKIIVAGLAAAIVVAVFCYIRITRKKSVEPKV

SEQ ID NO: 290442 - protein, 114 aa, Zea mays; identical to SEQ ID NO: 290441
  Clone ID: MRT4577_27972C.1.pep

SEQ ID NO: 290443 - protein, 35 aa, Zea mays
  Clone ID: MRT4577_27973C.1.pep
FFIFFFNFSVFLFFFYFFLIFLHHNDDLYLIRTSG

SEQ ID NO: 290444 - protein, 94 aa, Zea mays
  unsure (1)..(94): unsure at all Xaa locations
  Clone ID: MRT4577_27974C.1.pep
MENRDLGREFSGHGMRAGTKNRGELHGKPGARMPXAGEDAARPAKLAGKQRPTQGKVRAAVRWAAAWVWRSGXTGEGGARARGTTGLGEVSCWR

SEQ ID NO: 290445 - protein, 55 aa, Zea mays
  Clone ID: MRT4577_27975C.1.pep
DKRALLRICFGQVRDMAFYSSIFKGKAFFYFSIPLRFDLRKNPMQCHSSSIQKEE

SEQ ID NO: 290446 - protein, 41 aa, Zea mays
  Clone ID: MRT4577_27976C.1.pep
HYTITVTTPNKTSRWNDKSFISKPHTGLTTGCIISFYQLPS

SEQ ID NO: 290447 - protein, 89 aa, Zea mays
  Clone ID: MRT4577_27977C.1.pep
NLPTHAPTRPPTRPPTLDLKKKKTKKKKCKILKNLKPKPHLQNQYYNTKIIPILYHHSLITHTFLFHLIPLQINLINQLLSNPIHSYLN

SEQ ID NO: 290448 - protein, 53 aa, Zea mays
  Clone ID: MRT4577_27978C.1.pep
LTTILNITFKSSPLKSPNANTSFQIPSTTNLNPTQPLNQKLLCPIPNTTPFLS

SEQ ID NO: 290449 - protein, 87 aa, Zea mays
  Clone ID: MRT4577_27979C.1.pep
SFSYPELSSKPKWWWRTLACVPYLLPLHNMWGHADAIYQLHPYLQRFSLPYAFIDTMALLPGWLFLAIFMTIYFFVVRRKWSPHFLR

SEQ ID NO: 290450 - protein, 61 aa, Zea mays
  Clone ID: MRT4577_2797C.1.pep
LPSSWLTLSVGCINCPSRHRGVSIRKAYIACSMLAINAFSPSLAFLDILGGVPSYPRKQPS

SEQ ID NO: 290451 - protein, 209 aa, Zea mays
  Clone ID: MRT4577_27980C.1.pep
AGPGAPSSASAPAANRPENRTEMTTSVPVPLASQPQAPQRKPRTYTPSPWGDFFLHHTPCTPSQLLSMKERAKVKEQQVRQIIQETMASSNLLRKLELVDTLQRLGVDYRYYEEIDQLLRSVYDDGDKDGGGSDDLYLTSLRFYLLRKHGYTTSSDVFEKFRDERGSVSSDDASCLLMLYDAAHTRTHGEEILDDIIAWSKSRLQIPAG

SEQ ID NO: 290452 - protein, 242 aa, Zea mays
  Clone ID: MRT4577_27981C.1.pep
MASRLARSAVGAARLRPSLPLRALPSMGMQARYNSNLPQEDPKKKAQTLLDSIPVPGNSPLTKAAVLSAGAGLSVAAISNELYVVNEESIVALSLLTIFWAVAKYAGPAWGDYAQQQLDKISGILNSARQDHTAAVKQRIESVQDLSSVIEVTKTLFEVSKETAQLEAQAFELEQKTAIAAEAKSVLDSWVRYEGQVKQRQQRELAESIIAKIEKELENPKTLKQILDQSVPDVERIVSQKA

SEQ ID NO: 290453 - protein, 63 aa, Zea mays
  Clone ID: MRT4577_27982C.1.pep
MKKGSQNPPPPPPWGVHGPPMFPKFGNMGLFPKKKKKKKKKKKKKKKKKKKKKKKKKKPKNKG

SEQ ID NO: 290454 - protein, 129 aa, Zea mays
  Clone ID: MRT4577_27983C.1.pep
ACPQLFKSFSGGRSIPGKSIRSGFRPNSESETGKGARCYSCYMAIPFMWVVRPPLESRIVRPHLCMRRHLKPIELCVHWGIVMCCVYKCVPEISLFAHWLVHVLSCVQKQTLQFVTPLDGPSLKDGIGW

SEQ ID NO: 290455 - protein, 65 aa, Zea mays
  unsure (1)..(65): unsure at all Xaa locations
  Clone ID: MRT4577_27984C.1.pep
ALAIRXTPXCSHXPSHRHXWXXXRSXPRXSRRPXXXPWWRXRXRPLXPXSLPXXMXRPMXXLRLL

SEQ ID NO: 290456 - protein, 87 aa, Zea mays
  Clone ID: MRT4577_27985C.1.pep
PCLFFLPRETENKFYWGAFFFKAPHPGPFHQWTTKIDFFPITLFPTLLYLPGKKLNACFNNLAGPIFPQNPPLCLKRLLPFPHSHYL

SEQ ID NO: 290457 - protein, 141 aa, Zea mays
  unsure (1)..(141): unsure at all Xaa locations
  Clone ID: MRT4577_27986C.1.pep
FRHEVPADRAPPGRRAGACAGSCSRSPGWLSGSPTCSSASPGSRRALTVGARVCAFPASARWSCSSLFLVGLFFLVVPPPPCELSVVICGGVFPLSSCARVQSACCFFVGSHCLDVGXVLPXXKSIXGSELPPKKKKKKAA

SEQ ID NO: 290458 - protein, 54 aa, Zea mays
  Clone ID: MRT4577_27987C.1.pep
LVRRSIICFIPYPFPSLSLTSTGTVIYTHSARNHHRTSLQSTSKYSPSFSNPLC

SEQ ID NO: 290459 - protein, 54 aa, Zea mays
  Clone ID: MRT4577_27988C.1.pep
PQSLQSAHHGVIQRALAKKEQIRAVLLCGLHHSRRAILGLQGARLHLHMHLCVT

SEQ ID NO: 290460 - protein, 86 aa, Zea mays
  unsure (1)..(86): unsure at all Xaa locations
  Clone ID: MRT4577_27989C.1.pep
MTLIYNRVLDAKFFVIKSCTDDHVHRGVXYKVWASTASGNMKLDSAYHAAKEKEEHCPIFLFFSVRTAHLLWFFAFPFEEKKSNST

SEQ ID NO: 290461 - protein, 41 aa, Zea mays
  Clone ID: MRT4577_2798C.1.pep
LMSSVYTNKTPSQINRTSLEDRIHISLYKNGLSKRPTFFVL

SEQ ID NO: 290462 - protein, 126 aa, Zea mays
  Clone ID: MRT4577_27990C.1.pep
MEDDEYEEGMEMGYGGHHQHGGGHAGYGAEEDDEVGYGGGGGEEMDEDADGDAEQQEDITQDDAWAVISAYFEEKGLVRQQLDSFDEFIQNTMQEIVDESADIEIRPESQHNPGRQAEFAEVVAPL

SEQ ID NO: 290463 - protein, 93 aa, Zea mays
  unsure (1)..(93): unsure at all Xaa locations
  Clone ID: MRT4577_27991C.1.pep
IQPNHQTPPATDXRGTPGPNRNHQHHQHKATQTPXHQXEXATPPHQCAGARVTKKTARRHEXXPPTTAREXDPPQQRGSQAPPKSENERPPPP

SEQ ID NO: 290464 - protein, 126 aa, Zea mays
  Clone ID: MRT4577_27992C.1.pep
PGGFGRFFFPPKTKPMFGVGPLPKGWDPPPSHVPPKFVQGSNNPFFRPKKPPALGWKFPPLGETPRGTVFSFQAPGVLVDFTKQAAPFFWGPLPLCQPKFLFFAKASPRPRVMLLKKPKPPSFPGF

SEQ ID NO: 290465 - protein, 106 aa, Zea mays
  Clone ID: MRT4577_27993C.1.pep
KTKIFKVASFAWVAFLSCRKKDTFPVCLARGPINFLFCSSGTAKPLNLTVQRPICLIEKQPKGLESNYGSLFIFKPTEFFGFRQEFGNPPRRPLKKNKPVSCEFFP

SEQ ID NO: 290466 - protein, 197 aa, Zea mays
  unsure (1)..(197): unsure at all Xaa locations
  Clone ID: MRT4577_27994C.1.pep
GEPPPPPPPAHIFPPHTGGGPSSPLQGGAPPWGKAPFGGRPLFGKTPPLGKKGGFPPQAILGWGNPRGFSPPPRVLTPRAQLLETPPLRGGLGPSKDXANPPPILRNFRKFPPLGGPPGRXLTLPPLLPPKGPPLGGKRXTPPARFLGGYFPRVLKPPAPVQPRAHARRPPKKKKKQKPPQKKKRKKKTKKKKKKTK

SEQ ID NO: 290467 - protein, 117 aa, Zea mays
  Clone ID: MRT4577_27995C.1.pep
MAAASYDRLAVAASAVVVAAVLEAAGLTMAGALGGNWGSLTKTGAAKHVPRGGFDDLEPTVINDATTGTYRQLFHPEQLISGKEDAPNNFARGHYTIAQEIVDLCLDRIRMLADNCT

SEQ ID NO: 290468 - protein, 206 aa, Zea mays
  Clone ID: MRT4577_27996C.1.pep
AVAARYAQHQHGLKRVMIIDFDVHHGNGTSDSFYDDPDIFFLSTHQLGSYPGTGKINEVGQGDGEGTTLNLPLPGGAGDYAMRCAFDEVIAPSAHRFKPDIILVSAGYDAHALDPLAGLQFTTGTFYMLASSIKQVTKELCGGRCVFFLEGGYNLQSLSSSVADTFRAFLDEPSLAAQFDDPAILFEEPTRKIKEAIEKAKSIHSL

SEQ ID NO: 290469 - protein, 103 aa, Zea mays
  Clone ID: MRT4577_27997C.1.pep
GFWKSNPRPFPNGTVAAEEGRGGGAYRRRDCSGEVVEDVREVLRITAMCGSPSGMVGVGRSACACGDARRRRGVRPNQGTIGQSNGSESFTGCYGRCGCKELE

SEQ ID NO: 290470 - protein, 219 aa, Zea mays
  unsure (1)..(219): unsure at all Xaa locations
  Clone ID: MRT4577_27998C.1.pep
LAEAFVXIYMGFDIAIERQSWXHIGFIFFSIIFILVARAANVFSCAYILNLARPPHCQIPRQYQQALWYSGLRGAMAFALALQSVHDLPDGHGETIFTATTSIVVLTVLLIGGSTGTMLEALQVVGDSNRYCQLYEESSNGNDTGYTGQNYDEGASTSSKFRSKLRDLRRSTSSFALLDRNYLTPIFTSQNGDCNDNTTESPNEELTIFRGPGDLEVHD

SEQ ID NO: 290471 - protein, 222 aa, Zea mays
  Clone ID: MRT4577_27999C.1.pep
PASAPRPQQQSHSQQRFDTPALKTFSTGRTASVGGNGDGGGKVRPVAGATGDGQSDESSHRQNGAVVLPQDVSQSQATPLASVSDSMAVEDAQAQQTVHDDELAIWKRISDEAARMQASVRAEELMDPETLEQLVAPVEAPKPDTVHYSPEHVATAQRYEQALSEEPNSSLLLANFAQFLYQVQGDLDRAEHFFKRAVRAEPADAEALGRYAAFLWQARDDL

SEQ ID NO: 290472 - protein, 82 aa, Zea mays
  Clone ID: MRT4577_2799C.1.pep
LFSRDISPFISRSLSLSVRRHSSDQLLDDSHHVKHSCAPTSVVVYCARVSSWHRVASDLNRRYQVQLIKGLPSRMYVCQPSS

SEQ ID NO: 290473 - protein, 61 aa, Zea mays
  Clone ID: MRT4577_279C.1.pep
QMVALFLDLCDPLMLFPLINICSMYCSVNKNTECLWSVHNYTPCFLFSLMQIWYTQLLTAS

SEQ ID NO: 290474 - protein, 70 aa, Zea mays
  Clone ID: MRT4577_27C.1.pep
VCLQSLGPLQFQWIINLCRCSILLFLLRRRTPVRALCCRCGSMPCSASTLGRDVVPSSSMFPLESNRPTR

SEQ ID NO: 290475 - protein, 411 aa, Zea mays
  unsure (1)..(411): unsure at all Xaa locations
  Clone ID: MRT4577_28000C.1.pep
MMIQHSSACQSHHLDAIMWRNRFMTSRREQKQIRSWDAQCSANQDQASIEKCNAPKNLPIPDNSLLDARILYCTSPALGHNKEAHPESNKRVPVIVDTLEKLELSPKHRGSQVLEIQNFNPASLDDVARVHSRSYITGLEKAMGRASDEGLILIEGTGPTYATETTFRESLLSAGAGITLVDSVXPPGHHAVPQGPMGFCVFGNIAVAARYAQHQHGLKRVMIIDFDVHHGNGTSDSFYDDPDIFFLSTHQLGSYPGTGKINEVGQGDGEGTTLNLPLPGGAGDYAMRCAFDEVIAPSAHRFKPDIILVSAGYDAHALDPLAGLQFTTGTFYMLASSIKQVAKELCGGRCVFFLEGGYNLQSLSSSVADTFRAFLDEPSGRVGFDDPAILFEEPTRKIKEAIEKAKSIHSL

SEQ ID NO: 290476 - protein, 51 aa, Zea mays
  Clone ID: MRT4577_28001C.1.pep
IAPTRRMLYDLVRIDTSTEGGEENNCLKGECYLPDGDETVAELSADYMSAT

SEQ ID NO: 290477 - protein, 136 aa, Zea mays
  Clone ID: MRT4577_28002C.1.pep
RRRKRPHQGANKRRSAGPTPEHTDKAQKQRQPWPSEITKPAAHDPRREQGAHHAAMTKTAHGQHLGRRRGNHKRTHEHNERGGKDNRYIHDSTQNKRRKGGNDTERREHCVPLQIRRSWTEGQGHKASRPRPGHSR

SEQ ID NO: 290478 - protein, 138 aa, Zea mays
  unsure (1)..(138): unsure at all Xaa locations
  Clone ID: MRT4577_28003C.1.pep
MAAREHHHHXLFHHKKDQEQLTVSSYGXCTQYTATTVTQEKSTCEHXYDXYKNEEKEHNLKQDLGXDGAIINPAFSLYQKHEAKKDPVHAHLLKIDDDVEATAHFDFRGFIYHQHHQKNNVHTDVEEDGGQNKHHLFD

SEQ ID NO: 290479 - protein, 236 aa, Zea mays
  unsure (1)..(236): unsure at all Xaa locations
  Clone ID: MRT4577_28004C.1.pep
MNDDGDVQGDELSASVQRRLDESSAVEGEDEEEEIGDDAEADDMAARMGRRLAALPGNAHESEPFTIFRVAGPMRDRNRHLYEPQMISIGPFHRGAGRHLAAMEEHKWRYLRDILARRYAEPVLLPAAEFAEMLLLDGCFLVEFFLKGQESAEDALIDASWAMQNVYNDMLLLENQLPFFVLERFYDLATGGLGRDYFVTNVLVNYLTVDXASARGTPRARAPPDGEIHHLLHLYY

SEQ ID NO: 290480 - protein, 539 aa, Zea mays
  Clone ID: MRT4577_28005C.1.pep
MDSPLMEPLLVPNNHSPGPVVAATPGEHGGAAVDESSTLVDAASGTDESHRALADADVKMNDDGDVQGDELSASVQRRLDESSAVEGEDEEEEIGDDAEADDMAARMGRRLAALPGNAHESEPFTIFRVAGPMRDRNRHLYEPQMISIGPFHRGAGRHLAAMEEHKWRYLRDILARPGGATLASYARAARSMEASARRRYAEPVLLPAAEFAEMLLLDGCFLVEFFLKGQESAEDALIDASWAMQNVYNDMLLLENQLPFFVLERFYDLATGGLGRDYFVTNVLVNYLTVDMCVGPRDPESTRPPDGEIHHLLHLYYYWFLPPEDRDGSGTGSKDKEDGEALEELMSTSADERMPWQLPPASELKDSGVTFRAKKSPRSMVDVTFDRRSGALEIPAVESYTNHAIFANLLAYEQSRGRWELQRLVSYVLLMASVVDARRDVEVLQRAGVFVRGDEETAAFYAHLGELCPPPEFVNNCYADLFRDVLEYCGRSWNRHRAVLVHDYFSNPWTSMSAAAAVFLLVLTVVQTVYTVLPYYSQN

SEQ ID NO: 290481 - protein, 65 aa, Zea mays
  Clone ID: MRT4577_28006C.1.pep
KIPPTIICEKHDQDLARFSKEGTTGPGACMIVPAACDWINAKRTRRRPARCIGHGQHEDLKTPWN

SEQ ID NO: 290482 - protein, 103 aa, Zea mays
  unsure (1)..(103): unsure at all Xaa locations
  Clone ID: MRT4577_28007C.1.pep
MNEINKRMNEWPQKKKKKKKKKKKKKKKKKKKKEKKKKKKLKKKKKKKKXKKKKKKGPWAPGPPFFFPFRGVNCPPGRNKGHSFSLGKFVSRSNSPPNSGPEP

SEQ ID NO: 290483 - protein, 93 aa, Zea mays
  unsure (1)..(93): unsure at all Xaa locations
  Clone ID: MRT4577_28008C.1.pep
LRVGPPGVLAXVVVVVVPRCFGPXRXXXVXXVXXLLVVGGPRVXXXXCXLXLPVXSPPPPXWVFPXXXXRWXXXRGXXXXFWXLXALRXXGRR

SEQ ID NO: 290484 - protein, 49 aa, Zea mays
  Clone ID: MRT4577_28009C.1.pep
APTKSGGKGYLCLLSFESSMSSRHSTLPRSSSYVWQFHPIWRFFSWKNT

SEQ ID NO: 290485 - protein, 273 aa, Zea mays
  unsure (1)..(273): unsure at all Xaa locations
  Clone ID: MRT4577_2800C.1.pep
MASPAPPLKDAVGVLDRDPFVALLAKLIGESQRLQNDPPALVPQEDLVAQHVVDALRPVSTDTGGGPLVVRKVSYTDGRSNVIVEYPGTVPDRVVSFVGMHMDVVPANPSEWDFDPFSLTFEGDDKEKLRGRGTTDCLGHVALVTQLMRRLGEVKPPLKHSVIAVFIANEENSSVTGIGVDGLVKDGLLDKLKTGPLFWIDTADKQPCIGTGGMIPWHLKATGKLFHSGLAHKXINSMXVNMDALXRIXXXXLHDFPAHXERELYXFAXSSTM

SEQ ID NO: 290486 - protein, 47 aa, Zea mays
  Clone ID: MRT4577_28010C.1.pep
HPARDASVTEAITRQRDTRTRAHTQLPTSAARRDGSSDVPRCAREAP

SEQ ID NO: 290487 - protein, 46 aa, Zea mays
  Clone ID: MRT4577_28011C.1.pep
MAGGKGHTLEEVAKDNTKDDCWLVIRGQGDNVTKPLQDHPGGDDAL

SEQ ID NO: 290488 - protein, 79 aa, Zea mays
  Clone ID: MRT4577_28012C.1.pep
WKGQFFPHFCPPVFFGWLKDPVPFFGLFLGLVWGLPAVGFSQGFHRGLWHSTKIGLFVFPGGVFMVTSECLNKFGQSPP

SEQ ID NO: 290489 - protein, 203 aa, Zea mays
  Clone ID: MRT4577_28013C.1.pep
LQPLRMVDERGGDEWSKATGNQGTNRYADDRRRGDGWGTAPSRDYSSARAPSDPDAWRRRGAGPSPRGVWNKSRRNRSRSRSRSRSRSRNRSRSRSRSIGRGRGRSRSPYIADRGSEWRVERGRTSGGPVRPCRDFVAGRCRRGSNCRFLHEDGGHRPFDDHYPADPRERYGYQSKEFMDTRGPNDYLRSRQSRDRYDDRPWE

SEQ ID NO: 290490 - protein, 89 aa, Zea mays
  Clone ID: MRT4577_28014C.1.pep
HVACGLLWIYLSPSAHLNLDGVGQMREHLGYAFFKVRLFRNCQHVVVEVWSCNSAWTMDSQQYVLKSCTIAKRVYYPGTRTLFFCTAGP

SEQ ID NO: 290491 - protein, 96 aa, Zea mays
  Clone ID: MRT4577_28015C.1.pep
KSKNRPTLWGMEKQSPKAPFGKHHQKAGGFFFNKRPMAPPKAPRPTHPLWFLIKGKTPSQTKGPKKTPVHGQKNFGWGLKKPEGKKPIMGPHGPGP

SEQ ID NO: 290492 - protein, 131 aa, Zea mays
  unsure (1)..(131): unsure at all Xaa locations
  Clone ID: MRT4577_28016C.1.pep
FGSSHLISGLSFVDPPGEMGMRILTSGDGEGLYLQPCCWLGAGRYEEHGCERSAAXEPKIINTGKRNRCLSCQQCDQXGDPCTGTDLKESWRXIHATQGEQYYYTHFAHRINSCDTEPNKLLACDTRLRPV

SEQ ID NO: 290493 - protein, 96 aa, Zea mays
  Clone ID: MRT4577_28017C.1.pep
ATAVTSVHEMENGFQIWAFSGKHLYKVSKDHFYQFIWRPRPPSLLTAEKEEEISRNLKKYSKKYEQEDQDAFNQLSEQDRKRRTQLRLNRNEAVWE

SEQ ID NO: 290494 - protein, 143 aa, Zea mays
  Clone ID: MRT4577_28018C.1.pep
HAASDFAFNPQLVSRTMVRLPCYTEKTLQVRTRCPEQSNSLFLLLNYRWNQHVACQQRRDGHQFHKDPLSRVRVQATGGTGHPQISKECKTRDTSISCRTGDWNIPVAFCEISDYTFKSSTTLPLHVTLMASYIITSPAVKIV

SEQ ID NO: 290495 - protein, 367 aa, Zea mays
  unsure (1)..(367): unsure at all Xaa locations
  Clone ID: MRT4577_28019C.1.pep
FGGALLSQVKCLVCXGESNKTDEIMDISLDLPGSSSVADALARFFKPEILEGANKYSCERCKTLTSAQKQMFMLRAPKVLVIQLKRFEGINGGKINRNIEFKETLGLSDCMYNKSQDPHPVYNLFGCIVHSGLSSESGHYYAYVKDVAIDQWFCCNDSHVSLSSSQNVLSEKVYILFYILNSKTQKPSRNGYSSTAAKPFSTNGIGISSTSSSETSKIPLVKQDGLCSTKGNVLMPLKNGKTASGPLIKPIHFKNSAAEKVMSNGKVNLTSKNNPEVNGTAKSSESNRCKTGQFVGPSKNNADNTISCGERGQQSERIQDANGNGQSIHHSQYFGEISNGNAMPTSAQQETSHGNGTPARQETNNSN

SEQ ID NO: 290496 - protein, 90 aa, Zea mays
  Clone ID: MRT4577_2801C.1.pep
HACPCGACYNGPNPTWASRSSEDVGWRDFVVGLRLAVKRAKGWAAPVILPPLVQRVDEGLKRRVASSPSPQQCLLQLHNLVAIQLVLTGN

SEQ ID NO: 290497 - protein, 129 aa, Zea mays
  unsure (1)..(129): unsure at all Xaa locations
  Clone ID: MRT4577_28020C.1.pep
FGSRGEAAGAHTVDAILPCRGYGSGSGLYLSTADSPDRPRLQPWRRVHCXMPKPASQHRDRLDTVPCSDDCTKQALDGAATAVATEAPMMGKVALGDVCTTYDRXVEDKTESWXKIANVAVSGHGLDDV

SEQ ID NO: 290498 - protein, 177 aa, Zea mays
  Clone ID: MRT4577_28021C.1.pep
MSDVEPLVLAHVIRDVLDSFAPSIGLRITYNSRLLLSGVELKPSAVVNKPRVDVGGTDLRVFYTLVLVDPDAPSPSNPSLREYLHWMVIDIPGTTGASFGQELMFYERPEPRSGIHRMVFVLFRQLGRGTVFAPDMRHNFNCKSFARQYHLDVVAATYFNCQREAGSGGRRFRPESS

SEQ ID NO: 290499 - protein, 91 aa, Zea mays
  unsure (1)..(91): unsure at all Xaa locations
  Clone ID: MRT4577_28022C.1.pep
MSPPPGPVFLISFPPKKPPRGGPLFCKPKPVSPISFAPFWGGFFDPPPPLPGFGGPKKKKKKKKKKKKKKKKKKKKKKKKKXKKKKKKKKK

SEQ ID NO: 290500 - protein, 111 aa, Zea mays
  unsure (1)..(111): unsure at all Xaa locations
  Clone ID: MRT4577_28023C.1.pep
WGRLPARALXPXFRPXVAGLPCLAXFAVCWAAXPVLASPAAXPVXAGGGXGXFAGFPXVRPAPFLRALXPPSRSWAARPPSRCAPRVCASLLFLAAVFCGLSAVLVPLLLR

SEQ ID NO: 290501 - protein, 105 aa, Zea mays
  unsure (1)..(105): unsure at all Xaa locations
  Clone ID: MRT4577_28024C.1.pep
MGTKKKHPRPGGQPKRPERPGGTXARSKNRTGGKPGAGAAPGSPGRNPGGAQGGQKGGGKXGGKNRGKRGPGGXATGNNSPQKKSXKRGGKPGGPKGGAKGQKGR

SEQ ID NO: 290502 - protein, 170 aa, Zea mays
  unsure (1)..(170): unsure at all Xaa locations
  Clone ID: MRT4577_28025C.1.pep
ATEVRDAVRAHGGEVFMFSLAEMPLVGSRGTLALRPGPPVAMQYGRARXDMVVESHDYGFEVREGEMLFGYQPMATKDPRVFARAEEYVPDRFLGEDGAQLLRHVVWSNGPETASPTLQDKQCAGKDFVVLIARLLVAELFLRYDSFDVQVGASALGSSVTITSLKKATF

SEQ ID NO: 290503 - protein, 69 aa, Zea mays
  Clone ID: MRT4577_28026C.1.pep
ESPPKKKNFGGKSQIYLAPGEKVKGTLYNPIQSSESNSAKGTFFQKRDLLLRVPKPIYPLEEPPWAKDP

SEQ ID NO: 290504 - protein, 87 aa, Zea mays
  Clone ID: MRT4577_28027C.1.pep
CSFGPKVCLRSPIVDGRVSLQNVDCRGIFPHGGARARVLVFGVLRIMLTRITRFTPFPPVSRLGAKSRVRPVSLAKSMTEDSHETRM

SEQ ID NO: 290505 - protein, 60 aa, Zea mays
  Clone ID: MRT4577_28028C.1.pep
NSRVWVGGKKEHDDGSEKWDNNWGEDGDDEEARGTPTKPGPNPWSKGLAPRRWAKKGWKD

SEQ ID NO: 290506 - protein, 248 aa, Zea mays
  unsure (1)..(248): unsure at all Xaa locations
  Clone ID: MRT4577_28029C.1.pep
MRLLCSSPPLLLSPWRRLPPPPPXAPSPPXTPPTARRPDPHDPPSSLGVSTMAALVPNPPLPRLLAPPXPPDQKRPAPLLKASXRWRRHPLPDPAQAPARLVPPRRPPPPQPSSLDLSLPRLSRSDPPLPRPSRLDSLSLWPDHGLHGWIRRCRSFPDRIRRYPFYSAAGTTTLTGVDARAASGLLGRAPRRPDDRGRKKVPDLLLLFFWCIALPIVDDRTSSPSEDRLHCVSPDHDTSTWLPRHTGL

SEQ ID NO: 290507 - protein, 69 aa, Zea mays
  Clone ID: MRT4577_2802C.1.pep
QKNHYPHLLLYVNKAKRFHGLLPPTIQLKNPSCHQVCIHRPKSARASYPESPKPPPPCRTASRGPLRFT

SEQ ID NO: 290508 - protein, 199 aa, Zea mays
  unsure (1)..(199): unsure at all Xaa locations
  Clone ID: MRT4577_28030C.1.pep
MALKQKGSDAAAADTSKRRRVGFAGIDAGTEANECMQVFIARNPDEVGSADSTPIEPFDLNHFFGEDGKIYGYTNLKINVWISAISFHAYAEISFQETSDGGKGITDVKPVLQNIFGENLVEKDEFLEAFSKECQCISDVVKNGNSIXHDASDEDDLSVQIVRVELQGAAAYLYSRLVSLVLLLVEGSTPIDITEHAWQ

SEQ ID NO: 290509 - protein, 48 aa, Zea mays
  Clone ID: MRT4577_28031C.1.pep
PSIPIQGILNHQHMSREHEDLYLLRINHLSSNPLQKNHCHMLANSTTH

SEQ ID NO: 290510 - protein, 76 aa, Zea mays
  Clone ID: MRT4577_28032C.1.pep
LHHTYKAGIWRPEIRPAATSICVVGLACSRRSLGNRYSRKAIYHAWLTEPMTIPKEKVESSAWVVSKTSPASASVP

SEQ ID NO: 290511 - protein, 110 aa, Zea mays
  unsure (1)..(110): unsure at all Xaa locations
  Clone ID: MRT4577_28033C.1.pep
GGRKHSFYRVMAAXEHSPXDSEHLKGLLYYNPLRRKNVMKRLLLKFDRTKHSMPAGKQSSDPXQSIIFRVGLLXPPPLLLMLRKHDPRERQPKHPVTRQPQDLSADMIIC

SEQ ID NO: 290512 - protein, 158 aa, Zea mays
  Clone ID: MRT4577_28034C.1.pep
KKKKKKKKKKKKFKKKKKKREKKRKKKKKKKKKGFGKPRIFAKPGAGHHGVPPPPGGPRLGLQGIPSRAPQNWGGGPLIVFRRRLFGPEVRGELFGTAPLKEPISKAIRDWVPKGEPPPYIWGSGAGPHPTPMMGGGSNRVLGKETRGQALPRWGGKP

SEQ ID NO: 290513 - protein, 104 aa, Zea mays
  Clone ID: MRT4577_28035C.1.pep
PVSAIRSWSPHLHDWSGQSDSVVDAARGALGRSLVCNALECLCVAIEGSFTCQQERCGESCRRFIAMPALSRSGRHLGPRQHDISKSMLSSRMLCDDQPGIIVC

SEQ ID NO: 290514 - protein, 54 aa, Zea mays
  Clone ID: MRT4577_28036C.1.pep
MGECEDPKEYRCWEELLPDTLGLIFRNLPLQEVLTVLPRLCKSCGLMVAGPYCW

SEQ ID NO: 290515 - protein, 93 aa, Zea mays
  Clone ID: MRT4577_28037C.1.pep
MAPIAVGDALPDGQLGWFDEKTYPENKHVKFLADGSGAYTKALDLELDLTDKGLGVRSKRFALLADDLTVTVANIEEGGQFTISGAEEILKAL

SEQ ID NO: 290516 - protein, 341 aa, Zea mays
  unsure (1)..(341): unsure at all Xaa locations
  Clone ID: MRT4577_2803C.1.pep
MLRSTHPPSPTSGSSDAAAMVGGGAAAGSGGAPSGAKLLQILNVRVVGSGDRVVVLSHGFGTDQSAWSRVLPYLTRDHRVVLYDLVCAGSVNPEHFDFRRYDTLDSYVDDLLAILDALRIARCAFVGHSVSAMIGILASIRRPELFAKLVLIGASPRXRRMRVNMMPTESIHPSIPIRFDQPNLWKQFEFVLNSRAXFLNDHDYHGGFELPEIQQVFDAMAANYSAWATGYAPLAVGADVPAAVQEFSRTLFNMRPDISLHVCRTVFNTDLRGVLGMVRSPCVVVQTTRDVSVPASVAAYLKAHLGGRTAVEFLQTEGHXLPHLSAPGLLAQVLRRALARY

SEQ ID NO: 290517 - protein, 404 aa, Zea mays
  Clone ID: MRT4577_28040C.1.pep
MEFGWQIVLGSLIGFFGAAFGSVGGVGGGGIFVPMLTLIIGFDPKSSTAISKCMIMGASVSTVYYNLKLKHPTLDMPVIDYDLAVLMQPMLMLGISIGVIFNVIFPDWLVTVLLIILFLGTSTKAFLKGIETWKKETVIQREAAKLLEQTAGEEAEYAALPTGPDVAANKKALTSDEAPSLIKNIHWKKVGLLSFVWVAFLVLQVTKNYTATCSPWYWVLNLLQVPVSVGVTLYEGFGLMSGKRVLSSKGSGQTTMKFHQVVVYGLFGIAAGLVGGLLGLGGGFIMGPLFLELGIPPQVSSATATFAMMFSSSMSVVEYYLLNRFPVPYAVYFIVVAFVAAIIGQHVVRKLINWLGRASLIIFILAFMIFVSAISLGGVGVSNMVHKIERHEYMGFEDLCKYDA

SEQ ID NO: 290518 - protein, 50 aa, Zea mays
  Clone ID: MRT4577_28041C.1.pep
LFLGNTCLYQRTLLRDRTICDSTSGALTLRGCWHHMACIHTQLTCVVSLL

SEQ ID NO: 290519 - protein, 470 aa, Zea mays
  Clone ID: MRT4577_28042C.1.pep
MGRKYYCHAVAALAVVFAAAVVVAADRRLSLVVGAAVAPEEVSLLRKVANLMWNGDGNSYQHVWPPMEFGWQIVLGSLIGFFGAAFGSVGGVGGGGIFVPMLTLIIGFDPKSSTAISKCMIMGASVSTVYYNLKLKHPTLDMPVIDYDLAVLMQPMLMLGISIGVIFNVIFPDWLVTVLLIILFLGTSTKAFLKGIETWKKETVIQREAAKLLEQTAGEEAEYAALPTGPDVAPNKKALTSDEAPSLIKNIHWKKVGLLSFVWVAFLVLQVTKNYTATCSPWYWVLNLLQVPVSVGVTLYEGFGLMSGKRVLSSKGSGQTTMKFHQVVVYGLFGIAAGLVGGLLGLGGGFIMGPLFLELGIPPQVSSATATFAMMFSSSMSVVEYYLLNRFPVPYAVYFIVVAFVAAIIGQHVVRKLINWLGRASLIIFILAFMIFVSAISLGGVGVSNMVHKIERHEYMGFEDLCKYDA

SEQ ID NO: 290520 - protein, 61 aa, Zea mays
  unsure (1)..(61): unsure at all Xaa locations
  Clone ID: MRT4577_28043C.1.pep
SGATPKVLWQVLAACXCHRKHARTATVAALGPTGFSKPSSLLPTTHHWRCPLLVCLLVVIQ

SEQ ID NO: 290521 - protein, 56 aa, Zea mays
  Clone ID: MRT4577_28044C.1.pep
VFTPRGTLGVSSDSARRPVLGSVVCVFELLVQLYSCCGVERTSSRPVHGSSAMLGQ

SEQ ID NO: 290522 - protein, 103 aa, Zea mays
  Clone ID: MRT4577_28045C.1.pep
NSNSPAFFGGLPIKVFKVFAGQSVILAKKLLPIPKLLLGPLREKRCYVAPFVIKEEALAVGESGEKVGPVAESWEKSCNRSKTWFCLKSQQRKIHKGSVCLFF

SEQ ID NO: 290523 - protein, 130 aa, Zea mays
  unsure (1)..(130): unsure at all Xaa locations
  Clone ID: MRT4577_28046C.1.pep
PERGGEXRGXPTRARKAGQGAGGADRARAQAAAAQASARRRGHSHADKEHKRRXXXXRNRGTAQQGRERKKAGGXEXEXKEREXAQQTKXREERKKTLRNESQRXRQXLKXXAGNRRGXGSXASGEAPGQ

SEQ ID NO: 290524 - protein, 72 aa, Zea mays
  Clone ID: MRT4577_28047C.1.pep
NQSENLSPWRMPAVGLHGHLWLIVILLVIHEEGRGNIGWEVFFFLCPVHLSVFQVFVPATLDYFDGPDKLKQ

SEQ ID NO: 290525 - protein, 90 aa, Zea mays
  unsure (1)..(90): unsure at all Xaa locations
  Clone ID: MRT4577_28048C.1.pep
MMGALDTFLFTWEDVNEGHPGKLCDQVXDAALDACLAEDPDRAVACETCTKTNRVMVFGEITSKANVNYEKIVRETCRNIGSVLSDGGLD

SEQ ID NO: 290526 - protein, 135 aa, Zea mays
  Clone ID: MRT4577_28049C.1.pep
RGMRLCLRSSALSSSFPHAPHVRTDSQIDTRADGAVEGALRSAAGCASSARSMVTRRRSPPPRTKLVRAPPFLIFIVSSLPRACLVCCSGRWCDCELMHGHCAKKTMKWLWTLLVGVAQAEVFTHVSGIKTVALT

SEQ ID NO: 290527 - protein, 234 aa, Zea mays
  unsure (1)..(234): unsure at all Xaa locations
  Clone ID: MRT4577_2804C.1.pep
MLRSTHPPSPSSGSSDATMVGGGAPSGAKLLQILNVRVVGSGDRVVVLSHGFGTDQSAWSRVLPYLTRDHRVVLYDLVCAGSVNPEHFDFRRYDTLDSYVDDLLAILDALRVPRCAFVGHSVSAMIGILASIRRPELFAKLVLIGASPRFLNDXDYHGGFELPEIQQVFDAMAANYSAWATGYAPLAVGXADVPAAVQEFSRTLFNMRPDISLHVCRAVFNTDLRGVLGMVRAP

SEQ ID NO: 290528 - protein, 131 aa, Zea mays
  unsure (1)..(131): unsure at all Xaa locations
  Clone ID: MRT4577_28050C.1.pep
RPDTYHMNKLCLEPTYFTVQAAGIVDNAATEFQKTNLMTRLTYTLDEIEVPFDVGSDGTLKSEDKDSIYYADVTVQFPVGERVPFLFNDQQLRVTGKLXSFRCAFLVPSYRGSFFLXDXNGRGGYTGYDNA

SEQ ID NO: 290529 - protein, 386 aa, Zea mays
  Clone ID: MRT4577_28051C.1.pep
HERSAPRRRDRLTRPLVSDLKGDWYPADMPESSMRSLQGYKAFICIALLLGDGLYNFVKVVAFTVKSLLGRSRLKNAKKEEDIPVLDEIQRNEIFTRDSIPTWLAYSGYLALSAVAVFAIPLMFHEMKWYYVIIAYLLAPALGFCNAYGAGLTDINMAYNYGKVALFILAAWAGKDSGVVAGLVGCGLVKSLVSISADLMHDFKTGHLTLTSPRSMIIAQAIGTAMGCVIGPLTFLLFYKAFDIGNPDGYWKAPYALIYRNMAILGVQGFSALPLHCLQLCYGFFGFAVAANLMRDLLPPKYGKWVPLPMAMGVPFLVGASFAIDMCVGSLMVFIWHIIDRSKASLMVPAVASGLICGDGLWIFPESLLALAKISPPLCMAFRSSH

SEQ ID NO: 290530 - protein, 44 aa, Zea mays
  Clone ID: MRT4577_28052C.1.pep
RGRDRVLASLPLSAAQKPVVVQRLEEAFAELIGAERAGTVGASL

SEQ ID NO: 290531 - protein, 87 aa, Zea mays
  Clone ID: MRT4577_28053C.1.pep
WHNRASQVLRNMTDQKNLIEPDLQEEGVLRVRYERELKEDTVPLLSSKINLVNCTKPETSPSNDHESNCERMQVDTNPTDKDILKIG

SEQ ID NO: 290532 - protein, 132 aa, Zea mays
  Clone ID: MRT4577_28054C.1.pep
MATEPATESVQCFGRKKTAVAVTHCKRGSGLIKLNGCPIELFQPEILRFKIFEPVLLLGKHRFAGVNMRIRVNGGGHTSQVYAIRQSIAKALVAYYQKYVDEQSKKEIKDILVRYDRTLLVADPRRCEPKKF

SEQ ID NO: 290533 - protein, 47 aa, Zea mays
  Clone ID: MRT4577_28055C.1.pep
WLKSTSNLSLPSLLSMPSIPAFPVGGPLFPTRWPSCIGLYPAPRLVS

SEQ ID NO: 290534 - protein, 49 aa, Zea mays
  Clone ID: MRT4577_28056C.1.pep
VCGIERGMIAHGSQPCPGRRQARKRSTGRSVATPTRSEPESVPVLTISL

SEQ ID NO: 290535 - protein, 97 aa, Zea mays
  Clone ID: MRT4577_28057C.1.pep
EKNTEFSALAGHEADWTVFVTAGAQEGLGEEQLRLARACCGARRRRRDAGEDRHGEHCGALVQARVPRKDLEWELFKYSQREERTHLTGCSAQKKYY

SEQ ID NO: 290536 - protein, 144 aa, Zea mays
  Clone ID: MRT4577_28058C.1.pep
SGYFLLHDRFFNLQQEGYMAEKKGAGRDAAAQGHSAARHGLLSALQGSLAIRRDREDGSPGRRARVHPRRDARLAGLGRDLGPGRGRGRDQARCMGGRSWNRWIHGDGGLWLLRRFWRGARHGYPCAGRRGEWGLVEHGSGWFF

SEQ ID NO: 290537 - protein, 108 aa, Zea mays
  Clone ID: MRT4577_28059C.1.pep
GGRWRVARRKGDQDEAGRKEWEVVRVIQSGLKEFERRSLSSGIFAGFRGRGEFVEKFRFGMKSLNKGDQESKVVPPVPRADSGAYRVRRSGPFLDQLGIQRDLCERVV

SEQ ID NO: 290538 - protein, 103 aa, Zea mays
  unsure (1)..(103): unsure at all Xaa locations
  Clone ID: MRT4577_2805C.1.pep
ALFFHYFXIPHYNHINNPSIFNHNPIFXTYILPPHXYFYSFXFFNPLNFTPTLXSKNNXLTNXYLSILPFLPFLIHHNFTXXNPFYNLLQHLSHPXHNTIIHT

SEQ ID NO: 290539 - protein, 67 aa, Zea mays
  Clone ID: MRT4577_28060C.1.pep
RGRKGPRATPLLATLGHFILGSSHRAGAGGKHQIMRMAYKRGGKRKGANLFGCQRVLGQIGWLILDF

SEQ ID NO: 290540 - protein, 57 aa, Zea mays
  Clone ID: MRT4577_28061C.1.pep
PKADEFEAKIKELESLCNPIFAKMYQGAGENMGGPGGMDKDPPPGNGGPGPKIKGVA

SEQ ID NO: 290541 - protein, 95 aa, Zea mays
  Clone ID: MRT4577_28062C.1.pep
NRKYAQLKPQNKTYSGNHNKSHMWETINKLFYMPSSKYSHEIYCNHRLAKHKRTSNVMFANNHQDLGLIKVPTNSQGSAQWSVNYTKHTVSRYCD

SEQ ID NO: 290542 - protein, 139 aa, Zea mays
  unsure (1)..(139): unsure at all Xaa locations
  Clone ID: MRT4577_28063C.1.pep
GDNAKISQGSHLRGCVAIYRPMQLNPRQTASQAAKRIVRRRRSARMTIQSCRLHVQLGPARPRCEARSLLGVVRAARSASLRAASSSAWASAAASASVASFGAAMPLPRSRSAGLTYDMMAGQGSAVQQAEIDASVIXG

SEQ ID NO: 290543 - protein, 40 aa, Zea mays
  Clone ID: MRT4577_28065C.1.pep
VALFNGRSLPVTLKLIRRRIWSLPNGCPSDLKFYWYRYPP

SEQ ID NO: 290544 - protein, 134 aa, Zea mays
  unsure (1)..(134): unsure at all Xaa locations
  Clone ID: MRT4577_28066C.1.pep
AGAAALCIGPKETERGGFCQTRRSNAYLKXRIQVEVPRXRAGQTDYRASIMLINQDINKHNTPKYRFVVRFTNXDITAQIISASIACDMVLASAYSHELPRYGLEVGLTNYAAAYCTGLXLMARXRVLKTLWVR

SEQ ID NO: 290545 - protein, 59 aa, Zea mays
  unsure (1)..(59): unsure at all Xaa locations
  Clone ID: MRT4577_28067C.1.pep
LKRFIFQRAIIKKWKMVKTIPLVKGLKFFGEIFGNXIGTAWCFYSALKSNGGSSLNLLF

SEQ ID NO: 290546 - protein, 113 aa, Zea mays
  unsure (1)..(113): unsure at all Xaa locations
  Clone ID: MRT4577_28068C.1.pep
RCSERGGFGRGFXGAAGXGDRGGRRGCRRXGPRKKKKNWSPLPNLDRFLKKTRSTKTKKTXLQLIPLKEQQNIQNLVPELKDQVNKNNPVQKQTPARQHNRFKGSFLLGQLQR

SEQ ID NO: 290547 - protein, 79 aa, Zea mays
  unsure (1)..(79): unsure at all Xaa locations
  Clone ID: MRT4577_28069C.1.pep
PYNYSYDPLGEYLTFINEGGSSVDGVWPNHPLPXLKGIGWFTXTGXNKTDHGXPLSFXHMGAGGDYPACPDLAYLSALM

SEQ ID NO: 290548 - protein, 126 aa, Zea mays
  Clone ID: MRT4577_2806C.1.pep
RYQPGGTICMVSSDDGDGSVCVGRRGPETAGLLLRFCTWKKALMRRRVPFCPSSARGAVAQPVSRERARVVMLSRACPCSGVGVTTHHAGQVLHAARRHQHRVLPLPAQVHRVLECPSYRRMPQCR

SEQ ID NO: 290549 - protein, 126 aa, Zea mays
  Clone ID: MRT4577_28070C.1.pep
MNEQEEEIPAASCFPLHDVHLMRFHCLRSRWCLNKHPGNCRFVHRRSKENMLDRKVGSSRSSPLASIDDSGFCCSQVPTTSYAIGTWKIYMYGTAVLVPDLHRRCTCHLGLITLKEHKWEVLVSPS

SEQ ID NO: 290550 - protein, 61 aa, Zea mays
  Clone ID: MRT4577_28071C.1.pep
HYKYQCCLGRPEISRWTCQRQKKKIQAFISFSQNLALSTTLVTTFNLWHMKWTLPTNFIRL

SEQ ID NO: 290551 - protein, 212 aa, Zea mays
  Clone ID: MRT4577_28072C.1.pep
LQPVHECDAYFFCLEDRALLCRSCDVAVHTANSFVSAHRRFLLTGVQVGQELEPDDLSLEQREAEASSPPPAKSEPTPPLYSESDFGWAAGAGAGATGSLTDWLAVEEEFDSPAPRLAEVAPRATPKRTPRAPAFGAGQGRIAGGVMDWPLGEFFRGVSDFNGGFSFGESGNSKADSGKLGDSAGGSPYYRSSEEERDANELFGQVPEIQWS

SEQ ID NO: 290552 - protein, 353 aa, Zea mays
  unsure (1)..(353): unsure at all Xaa locations
  Clone ID: MRT4577_28073C.1.pep
MKVLCSACEAAEASVLCCADDAALCARCDREVHAANRLAGKHQRLPLLAPGGQGAAAVSPPKCDICQECDAYFFCLEDRALLCRSCDVAVHTANSFVSAHRRFLLTGVQVGQELEPDDLSLEQREASSPPPAKSEPTPPLYSESDFGWAAGAGATGSLTDWSAVQEEFGSPAPRLAEAAPRATPKRTPRAPAFGAGQGRIAGGVMDWPLGEFFRGVSDFNGGFSFGESGNSKVSADXFFWIVDRVYCLVVFLTFCRRVSCHLGRPTAGSSGTARVAPRTTAXGGGAGRQXLFGQVPEIQWSVPALPSPPTASGLHWQHGGPDSGAFVPDICTPDGAGRCFPTASGAAKRQRNR

SEQ ID NO: 290553 - protein, 130 aa, Zea mays
  Clone ID: MRT4577_28074C.1.pep
IHSQHHRLIVPYAIGALYNHPLEGLLLDTLGGAISFLVSGMTPRTAMFFFCFAVLKTVDDHCGLWLPYNIFQHLFQNNTAYHDIHHQLQGTKYNYSQPFFSIWDRMLGTHMPYDLVSRKEGGFEARPSRD

SEQ ID NO: 290554 - protein, 107 aa, Zea mays
  Clone ID: MRT4577_28075C.1.pep
EKKGGMFHLRGPGLFFTRGPNNPQTKSCRGFARPAYCTGRPTPLDTYFKNIGRASFWNRCDRTKPFLGGHGNIRDHQPFFLMVLALRRVKSRGGPPPKLRLNFQDDD

SEQ ID NO: 290555 - protein, 35 aa, Zea mays
  Clone ID: MRT4577_28076C.1.pep
QYARTRDAGSSYVGTMAWMLTAGLLTMTMAFVVDR

SEQ ID NO: 290556 - protein, 148 aa, Zea mays
  Clone ID: MRT4577_28077C.1.pep
RGKKTGPFYWTTQVGGTGPGCQIFYMGGGLYITLQKPILAKLVGGGGPPKWGPPKKNFEENLKHPKPPGGGQACPKKKGHWALILVHPLIKQMQKQQSPMGVEKPGAFSKKKKFWGGLMFPKPVGRVFGGGGKLPKPTGGPPRGIGGR

SEQ ID NO: 290557 - protein, 208 aa, Zea mays
  unsure (1)..(208): unsure at all Xaa locations
  Clone ID: MRT4577_28078C.1.pep
FDRERRPFFFFFFLFTRRRPGPPPRPRRRGSRLHRRCRXPRLAAGRAGAPQPDSGRERSSAXPPTAPTPDAQAVKRRGRPCQVRTTAPPXRGRRRPRPPRRTRFASDPRRRRPRSWRRPRRRSSRLRLRRRPRRRRPRRTSSXPHVQLDGLLPTGAEAQDDDLQAAQQAGQRXPEPPAPRPAAPTSPPAAPRPSPAPARPPHPGSSIA

SEQ ID NO: 290558 - protein, 149 aa, Zea mays
  Clone ID: MRT4577_28079C.1.pep
AWGPFWGGVLGPPEGPFVSLGGVFEGSTGVPLGLLFSFPVTSSGGERKIVQGLPIDGFSRKKMDAPAPKLPGGKTLAFSCLGEIFPPPGGHCPPHVLNKKRNPPPLHRFSLQTFARSRAGGLRGFPRFFFCLGFARPFFFLESCRIACR

SEQ ID NO: 290559 - protein, 76 aa, Zea mays
  Clone ID: MRT4577_2807C.1.pep
TQIYPPPKKTKRVPKPPLFDVSPPPHHLFSPKLTLLLTTSKHLPRARKGPNIGNPQISPPCRPKLNPCVVFSPRTS

SEQ ID NO: 290560 - protein, 206 aa, Zea mays
  Clone ID: MRT4577_28080C.1.pep
MVSGSGVCAKRVVVDARHHMLGRLASIVAKELLNGQRVVVVRCEEICMSGGLVRQKMKYLRFLRKRMNTKPSHGPIHFRAPAKILWRTIRGMIPHKTARGEAALARLKAYEGVPPPYDRTKRMVIPDALKVLRLQPGHRYCLLGQLSKEVGWNYADTIRELEEKRKEKAKVSYDRRKQLAKLRVKAEKAAEEKLGTQLEILAPIKY

SEQ ID NO: 290561 - protein, 57 aa, Zea mays
  Clone ID: MRT4577_28081C.1.pep
MGKAKRASIFIRLVSAAGTGFFYVKRKNPRRITEKLEFRKYDPRVNKHVLFTEAKMK

SEQ ID NO: 290562 - protein, 38 aa, Zea mays
  unsure (1)..(38): unsure at all Xaa locations
  Clone ID: MRT4577_28082C.1.pep
LPVRSPRPGQTNTHPRLRPRSLPDTSGLRVASFAXARG

SEQ ID NO: 290563 - protein, 122 aa, Zea mays
  Clone ID: MRT4577_28083C.1.pep
CSSPLSPCSWISQVAGAQSGLQVVLVICLKAFPFAIDPRKELCFREAGDIHSFQSRDEIFSNNIMDMSSEYGPRRVHRMHKTIHILHAGVVFIVTGLFPWVNGASSFCFMVKAMFRKKSSLC

SEQ ID NO: 290564 - protein, 57 aa, Zea mays; identical to SEQ ID NO: 290561
  Clone ID: MRT4577_28084C.1.pep

SEQ ID NO: 290565 - protein, 57 aa, Zea mays; identical to SEQ ID NO: 290561
  Clone ID: MRT4577_28085C.1.pep

SEQ ID NO: 290566 - protein, 179 aa, Zea mays
  unsure (1)..(179): unsure at all Xaa locations
  Clone ID: MRT4577_28086C.1.pep
AALFCLPLRRTNPANTNALILKEFAPSIPEKNVTCLTRLEHNRALGQISERLNVQVSDVKNVIIWGXNGEFITTVQQRGAAIIKARKFSSALSAASSACDHIRDWVLGTPEGTFVSMGVYSDGSYGVPSGLIYSFPVTCSGSEWKIVQGLPIDEFSRKKMDATAQELTEEKTLAYSCLE

SEQ ID NO: 290567 - protein, 198 aa, Zea mays
  Clone ID: MRT4577_28087C.1.pep
HYGHDCGCSMTLSQDQLQINIWSVKKSTVRTADLCVILLNLFASCYLSCSPDTTKRTQQTLESAGTRLPGSQAAEVEQICSRCRRDRAALQQGPSTGAARSTGAAEHQEDEPGTVGRGSDGGLEEEWMTSARPEEDEQGTAGRGSAGRSPSSSTRRWTASPARRARFSRRTSRSAARARSEEDERPRKTTSRGQGTAR

SEQ ID NO: 290568 - protein, 173 aa, Zea mays
  Clone ID: MRT4577_28088C.1.pep
MAKDPMRVLVTGAAGQIGYALVPMIARGVMLGADQPVILHMLDIPPAAEALNGVKMELVDAAFPLLKGVVATTDVVEACTGVNVAVMVGGFPRKEGMERKDVMSKNVSIYKAQASALEAHAAPNCKVLVVANPANTNALILKEFAPSIPEKNVTCLTRLDHNRALGQISERLS

SEQ ID NO: 290569 - protein, 57 aa, Zea mays; identical to SEQ ID NO: 290561
  Clone ID: MRT4577_28089C.1.pep

SEQ ID NO: 290570 - protein, 96 aa, Zea mays
  Clone ID: MRT4577_2808C.1.pep
VKYVICNMLHIQYTCQGVHRHTICMRHSIEVYIYAAVTLVVVGVPNPSRKQHTTKHASLVPSPSKIHGDACMLTAPQHLMHVVVPTSCQCLPSRSL

SEQ ID NO: 290571 - protein, 121 aa, Zea mays
  unsure (1)..(121): unsure at all Xaa locations
  Clone ID: MRT4577_28090C.1.pep
VADDEWLNGEFITTXVQQRGAAIIKARKLSSALSAASSACDHIRDWVLGTPEXGTFVSMGVYSDGSYGVPSGLIYSFPVTCSGGEWKIVQGLPIDEFSRKKLDATAQELSEEKTLAYSCLE

SEQ ID NO: 290572 - protein, 59 aa, Zea mays
  unsure (1)..(59): unsure at all Xaa locations
  Clone ID: MRT4577_28091C.1.pep
STAHDESCWKDDFHHFICXPEDGRGGAAIDQRPRRTVRCNMGIGLWRPVLSVPVWRYCQ

SEQ ID NO: 290573 - protein, 73 aa, Zea mays
  unsure (1)..(73): unsure at all Xaa locations
  Clone ID: MRT4577_28092C.1.pep
SPPSTSCCLRSAFSMVNRPLPPRXFLPXFFFERSGLCFACFFTMSYMSPRLLKASRIRFSSPPPPFFSPKRPR

SEQ ID NO: 290574 - protein, 332 aa, Zea mays
  Clone ID: MRT4577_28093C.1.pep
MAKEPMRVLVTGAAGQIGYALVPMIARGVMLGADQPVILHMLDIPPAAEALNGVKMELVDAAFPLLKGVVATTDVVEACTGVNVAVMVGGFPRKEGMERKDVMSKNVSIYKTQASALEAHAAPNCKVLVVANPANTNALILKEFAPSIPDRNVTCLTRLDHNRALGQISERLSVQVSDVKNVIIWGNHSSTQYPDVNHATVKTSTGEKPVRELVADDEWLNGEFITTVQQRGAAIIKARKFSSALSAASSACDHIRDWVLGTPEGTFVSMGVYSDGSYGVPSGLIYSFPVTCSGGEWKIVQGLPIDELSRKKMDATAQELSEEKSLAYSCLE

SEQ ID NO: 290575 - protein, 123 aa, Zea mays
  Clone ID: MRT4577_28094C.1.pep
SSGHSSGRVGFWVGLLIGPVLWHGIWFARQVVLLVLLILVAPVDCPDRRCSRSCSPFAPLFLSHPWVFFRVVFRVVFLFCFVLCSGWVGLPFLYTFIPCLVSFFGFFTWVGPSLCIFLYFFPF

SEQ ID NO: 290576 - protein, 57 aa, Zea mays; identical to SEQ ID NO: 290561
  Clone ID: MRT4577_28095C.1.pep

SEQ ID NO: 290577 - protein, 332 aa, Zea mays
  Clone ID: MRT4577_28096C.1.pep
MAKEPMRVLVTGAAGQIGYALVPMIARGVMLGADQPVILHMLDIPPAAEALNGVKMELVDAAFPLLKGVVATTDVVEACTGVNVAVMVGGFPRKEGMERKDVMSKNVSIYKSQASALEAHAAPNCKVLVVANPANTNALILKEFAPSIPEKNVTCLTRLDHNRALGQISERLNVQVSDVKNVIIWGNHSSSQYPDVNHATVKTSTGEKPVRELVSDDEWLNGEFITTVQQRGAAIIKARKFSSALSAASSACDHIRDWVLGTPEGTFVSMGVYSDGSYGVPSGLIYSFPVTCSGGEWKIVQGLPIDEFSRKKMDATAQELTEEKTLAYSCLE

SEQ ID NO: 290578 - protein, 108 aa, Zea mays
  Clone ID: MRT4577_28097C.1.pep
CRCKFIVSASSWAAATSRVVAYDTRLLAGVASVPASGDRAGSQHGLILIRDHLPEALAAPVQGPRSAEISPVIYSKSGSGGGMAPFLHVVPGFHSSYTWALLALPLQL

SEQ ID NO: 290579 - protein, 239 aa, Zea mays
  unsure (1)..(239): unsure at all Xaa locations
  Clone ID: MRT4577_28098C.1.pep
RLRFRSGIPGSTHASEPYICXSECDKCFTQPSHLSIHRRIHSGEKPYKCSECDKCFTDKGSLRVHQRIHTGEKPYKCSECDKCFTDKSSLRVHHRIHAGEKPYKCSECDKCFTGKGYLRVHHRIHAGEKPYKCSECDKCFTHKGSLRVHHRIHAEEKPYKCSECDKCFTDKNGLRTHQRIHTGEKPYKCXECDKCSTRXSHLSIHQRIXTGEKLYKCSECDXCFTQHCHLSIHTIHSGE

SEQ ID NO: 290580 - protein, 86 aa, Zea mays
  Clone ID: MRT4577_28099C.1.pep
VLAVGFKRKQLGCPLVNSKALVQNFEDYTSYPRPGKIPRMTKRPPPPRLYTCMYIAVSHIGPYLELLFFSTQLSEYRMLNKHIMPL

SEQ ID NO: 290581 - protein, 74 aa, Zea mays
  unsure (1)..(74): unsure at all Xaa locations
  Clone ID: MRT4577_2809C.1.pep
MRLLVIQTFRGRIRETSLSLRVLMLQYGIVYKPTMTEHDTSLAXGFSWVVVIGMVRRFKLLTAAPTKSTALPTF

SEQ ID NO: 290582 - protein, 146 aa, Zea mays
  Clone ID: MRT4577_280C.1.pep
CISIHIGQAGIQVGNACWELYCLEHGIQADGQMPGDKTIGGGDDACNTFFSETGAGKHVPRAGFVDLEPTVIDEVRTGTYRQLLHSEQFIIGKEDAGNNFGRGHCTIGKEIVDLCLDRIRKLADNCTGLQSFLCCNAGGGGTGSGL

SEQ ID NO: 290583 - protein, 78 aa, Zea mays
  unsure (1)..(78): unsure at all Xaa locations
  Clone ID: MRT4577_28100C.1.pep
PRASTXESYASILSRQYEVNVEASVFSMVPNSWGSFSKCVFVVGRLDELDRVIEVDRIGVQPFDDQYLECWVSFGTHA

SEQ ID NO: 290584 - protein, 39 aa, Zea mays
  Clone ID: MRT4577_28101C.1.pep
ETTIPGSRAQGERWSQHRIFKGWARANEKGYETAHESKQ

SEQ ID NO: 290585 - protein, 172 aa, Zea mays
  Clone ID: MRT4577_28102C.1.pep
MARCQGTVESLCQGLLDLDDDKFGAMCSAFGYLQEWPDLGAAMRGANLAVPPAVATPSAGDGNDSSSCSVSGGLRKRRPDAYLDAKGGANGMNKRPRGKQQPSGLSEIAAAPGKGKQERPKAGTKKKKKNAAAAAAAGQKTDYIHVRARRGQATDSHSLAERVRRERISERM

SEQ ID NO: 290586 - protein, 149 aa, Zea mays
  Clone ID: MRT4577_28103C.1.pep
QGKPGQNIPYHSCARHKTTKGRGGKNKKKKNEKKQGAEKRNRKKKGRQKQKTKKEKKHEEKPGQPGKAKTGPAGAPAGPGPRPTRTHRHQGQRWEMGERGKRAQAPRPKGPGAKGGSLRCPKRDLTQIKRSEPTGRFTGRKPGGPGAPK

SEQ ID NO: 290587 - protein, 114 aa, Zea mays
  Clone ID: MRT4577_28104C.1.pep
KMLSNAKLFFPHNPPPPKEAFYYRMVFERFFPQKFVILPVPGGPSVGCSPPKPFEWAAQWSGNLAPSGRGALGVLFPPLEPQHDPEHVPAPFSPGSGKNPRPFRVAPPGVPLEG

SEQ ID NO: 290588 - protein, 97 aa, Zea mays
  unsure (1)..(97): unsure at all Xaa locations
  Clone ID: MRT4577_28105C.1.pep
YNSNILPPKRAFIIRVGTLPTLSASVATATIIPLCSQQHLIIETAAILKYPSTQSYXLQVAITTIILQPLALSDQQPHSLLQQPFLTNLYLQRIAAQ

SEQ ID NO: 290589 - protein, 99 aa, Zea mays
  Clone ID: MRT4577_28106C.1.pep
IRFSSASHSANSRFKIHSLKFNIKKKKKKKKKKKKKKKKKKKKKKKKKKKKKKKSKKNSNLRNNVKYENEIKKGGAPKKVQIKVSGKGKLKPLQKGPQI

SEQ ID NO: 290590 - protein, 81 aa, Zea mays
  Clone ID: MRT4577_28107C.1.pep
IEAESGGLFIGGVFYDMLNTSARREYPTVLADWWLGHASFLALFYRVSGSAARCMGFSLSGRCEVYVPPMRLCHTGRIFFT

SEQ ID NO: 290591 - protein, 72 aa, Zea mays
  Clone ID: MRT4577_28108C.1.pep
STNPVSTDNDKILTEHIYAYMYMKLSTRVVISQIPNDDDFFNLQEPAAVFWQQMYYALAVCVDPHYELIGSS

SEQ ID NO: 290592 - protein, 60 aa, Zea mays
  Clone ID: MRT4577_28109C.1.pep
MTKRVELSLEATLKGHTGWVTQVAGFQDKIISSSRDNSIIIWDLKNKDNIYPLRRLTGHS

SEQ ID NO: 290593 - protein, 67 aa, Zea mays
  Clone ID: MRT4577_2810C.1.pep
WGSKGLFSSVVLSNRQSPPHQAGQRQSQKQQRWQGRSSQHRPRALLKSFKLSAMRLWDWPLGGRRRL

SEQ ID NO: 290594 - protein, 85 aa, Zea mays
  Clone ID: MRT4577_28110C.1.pep
VDQPGSVFVFLPTQNTNSASPDITSCRFAQSIGKPWLAYSMVGRLRFHHRGWLYSRWPNSLAMMCRTTHGGGIHLQEEGRRRRRR

SEQ ID NO: 290595 - protein, 123 aa, Zea mays
  Clone ID: MRT4577_28111C.1.pep
MSSTSVRLRPPKAASTSIPAPTAIATGQDHKWRNGDDGYTSTADHTSRRRQVGIAARRLEIGRVSSWKLGSEVGGYPTEPPSKQIDAGSEPAAAGLARRYDLNVCPHHQAPADPGRPGQQLLE

SEQ ID NO: 290596 - protein, 51 aa, Zea mays
  Clone ID: MRT4577_28112C.1.pep
LYDTRSNQGKKVAPPVLYESWCPHEPDGRRTKSFSVNRSEAVMHVGLTLSL

SEQ ID NO: 290597 - protein, 56 aa, Zea mays
  Clone ID: MRT4577_28113C.1.pep
TCYLIKMKIFSIVGLALAANSMLASGNILRQQQLVIGQAVKPIVPDHYLPPPEAPV

SEQ ID NO: 290598 - protein, 113 aa, Zea mays
  unsure (1)..(113): unsure at all Xaa locations
  Clone ID: MRT4577_28114C.1.pep
SARARVKGGFFMHSPSVCGRRVCAYGGGDHGDTFPALMPGGHTAGPSSSGGGVIQPVHVDENVSSKDVARLPETIDALEEMAFYSXLDPDIIAHYQITHDSRGLVFGPPCAGK

SEQ ID NO: 290599 - protein, 85 aa, Zea mays
  Clone ID: MRT4577_28115C.1.pep
LLRGLHFSLKLMVGQLHLPSGGRWLDEYMDETARLWDACLALKLGLLSAERNCAAVLSAPPDRAGMTGLQKSLLLLSTSHTLMSG

SEQ ID NO: 290600 - protein, 71 aa, Zea mays
  unsure (1)..(71): unsure at all Xaa locations
  Clone ID: MRT4577_28116C.1.pep
DKRVKVLCLHGFRTRDSCLXKKPISKWNPSIFQQFEIGFPDVLFPSGGKTEKYVIFPPPYFERLQMNKEFT

SEQ ID NO: 290601 - protein, 206 aa, Zea mays
  unsure (1)..(206): unsure at all Xaa locations
  Clone ID: MRT4577_28117C.1.pep
EHCDMFHLDFLLXPVAHLEKKVVVTDXAHGTLVCGENGGGAAELFECEKDIDIGVGTLSKAAGCQGGFITCSTQWKRLIQSRGRSFIFSTALPVPVVASVHAALYVSSKETWRRSVIWRHVQYFASLTKLEITSPIISIVVGSEAGALRASRYLLRSGFHVTPIRPPTVPPNSCRLRITLSASHSSDDIKRLVDALTPWLPVKYGN

SEQ ID NO: 290602 - protein, 450 aa, Zea mays
  Clone ID: MRT4577_28118C.1.pep
MGQWDALVDAALARLEARSLLRATRPIALAAPTAAPRTFDGPGPWDHAAVEIRLDRDTLHQWLAEGDEAGGQEEQLDGNLILFSGNDYMGLSSHPAVREAAVKAAQDYGMGPRGSALICGYTTYHKLVEESLARLKKKEDCLLCPTGFSANMAAITALGSITSLLSPGRKPAEHERIAIFSDALNHASIIDGIRLLERQQEALVFVYKHCDMFHLDFLLSSCSLEKKVVVTDSLFSMDGDFAPFPELIKLRRKYGYLLVIDDAHGTLVCGENGGGAAELFECEKDIDIGVGTLSKAAGCQGGFITCSTQWKRLIQSRGRSFIFSTALPVPVVASVHAALYVSSKETWRRSVIWRHVQYFASLTKLEITSPIISIVVGSEAGALRASRYLLRSGFHVTPIRPPTVPPNSCRLRITLSASHSSDDIKRLVDALTPWLPVKYGNGSYATASKL

SEQ ID NO: 290603 - protein, 90 aa, Zea mays
  Clone ID: MRT4577_28119C.1.pep
RTHGHMAYSVIGLQVVQTGKGVRKAKLIGATEIAVASLDELAMMAVALVAGDAEHFCCLAALSGASVADDDCLFCAWLTNPTDDLMRLFP

SEQ ID NO: 290604 - protein, 75 aa, Zea mays
  Clone ID: MRT4577_2811C.1.pep
GGETTALFWGGRPKHIRGILFLLSPNKKPFKTGNKFTTKRGGELDGPQANFFFWGTHPIYRGAAGKTLTKGPGPV

SEQ ID NO: 290605 - protein, 97 aa, Zea mays
  unsure (1)..(97): unsure at all Xaa locations
  Clone ID: MRT4577_28120C.1.pep
RVRISGVAPVLRFWIAGGRFGGSRLTSPGLRRISFFLGQPKLNXLAVVFHRRAWETPGVPQLIGLAEHPLLAGWRISERARTVGLSNQLPSLIGNWA

SEQ ID NO: 290606 - protein, 208 aa, Zea mays
  Clone ID: MRT4577_28121C.1.pep
VEEDEFVAGMKTWLNEAKQKVAASGAYSNKFVNDYHARTREEHDQLVDRSDEAVESVENPGWCIAKAVGYLILGATICAAFADPLVDAVHNFSNATHIPSFFVSFIGLPLATNSSEAVSAIIFASRKKQRTCSLTFSEVYGGVTMNNTLCLGVFLALIYFRELTWDFSSEVLVILLVCVIMGLFTSFRTSFPLWTCLVAYLLYPLTLA

SEQ ID NO: 290607 - protein, 156 aa, Zea mays
  Clone ID: MRT4577_28122C.1.pep
MVRAEKLAGDGCSGGEGQVEVEVGMGMDGKGVTECRICQEEGKEAAMDSPCACTGAMDYHVVVPAETEMVWSASVLSVVCLLLFDFDRKTPFSSFVQATLQFTGFFLPCYVIARSCYALQHRKRRQVHFLFPTSPVDTTLPFDLLTRTSFCLTCKL

SEQ ID NO: 290608 - protein, 121 aa, Zea mays
  unsure (1)..(121): unsure at all Xaa locations
  Clone ID: MRT4577_28123C.1.pep
NHLNKIGTDGESKKVLFQGNVFPPKEFRPVQPKVTNSGQGLNFNNHHGPGKNRCQQMGPAYPKGLTHLAQAKAEFPAKDIIWAIHHNRCCLQNKKDLGLKFXRQGSNGLPEKRGKFGKEGK

SEQ ID NO: 290609 - protein, 37 aa, Zea mays
  unsure (1)..(37): unsure at all Xaa locations
  Clone ID: MRT4577_28124C.1.pep
PHPXRDSPXPSPKAKRXXQDARRSLHPAXITXXAISG

SEQ ID NO: 290610 - protein, 53 aa, Zea mays
  Clone ID: MRT4577_28125C.1.pep
LPPSHFCCECEVHGYVQEAIAWHAPTIVLACYGTVNTSSYLHFKGDASGKSHN

SEQ ID NO: 290611 - protein, 938 aa, Zea mays
  unsure (1)..(938): unsure at all Xaa locations
  Clone ID: MRT4577_28126C.1.pep
FXLYIPNXAYXLXFXCFRGXTVXWRNNHNXFFLEIESDIDEHSFEDFLVEEKRKELERLAAEEAERKRQPAERRKRGEERAAMEADRAQARSEVEMKKEKLRQLLSSASRYADNLWYIEPNTYRGGDRVRLYYHRSSRPLMHDTEIWMHGGYNNWIDGLSIAERLVKSHEKEGDWWYAEVTLPERALLFDWVFADGPPGNARNYDNNGRQDFHAIVPNNISDDIFWVEEEHRIFTRLQQERKEREGADSLMAERSAKIXAEKKDKIMRAFLLXQRQSVYAERLEVDAGTTVDILYNPSNTVLNGKTEVWFRGSFNRWTHPSGPLPPQKMVKAENGSHLRTXRVPLDAYMMDFVFSESEGGIYDNRNGMRFIIHQRMFLRARPPMHIVHIAVEMAPIAKVGGLGDVVTSLSRAVQDLGHKVEVILPKYDCLNLNSVSLSTGVKCPASSFLSLFYLSPHLSFISNXNFSVFFTSMKLSSFSFKSTXLWRENILNVCSFIFNLQYLFMLFVESFMCMDGXNGSWWIPIFFIMLASFGXVKDLRYQQSFTWRPPTRPGTEVKVWFGKVEDLPVYFLEPQNGMFWVGCVYGKNDESRFGFFCHSALEFLLQKGSSPDIIHCHDWSSAPVAWLYKEQYALNGMGNGRIVFTIHNLEFGAHHIGKAMAHCDKATTVSDTYSKEVAGHGAIAPHYYKFHGIRNGIDPDIWDPYTDKFIPVHYTSENVVEGKSAAKKALQQMLGLQQTDTPVVGIITRLTVQKGIHLIKHAMHRALERNGQVVLLGSAPDPRIQSDFTNLASKLHGEYHGRVKLCLTYDEPLSHLIYAGADFILVPSIFEPCGLTQLIAMRYGSIPVVRKTGGLYDTVFDVDNDKDRAQAQGLEPNGFSFEGADSSGVDYALDRAITTFYDARDWFNSLCKRVMEQDWSWNRPALDYMELYHSARKS

SEQ ID NO: 290612 - protein, 94 aa, Zea mays
  unsure (1)..(94): unsure at all Xaa locations
  Clone ID: MRT4577_28127C.1.pep
MNLRIPAANMKVEGPTRQGMRAHATNVNRRVGTIXLGRTICDCTFDKEKLAXIPKTVEPTAPKTLYKEKRLSHKNATHIKRETWTMKQTKQPNP

SEQ ID NO: 290613 - protein, 76 aa, Zea mays
  Clone ID: MRT4577_28128C.1.pep
PLSRGTLAALRGTVYYEFSCESSLRCLFGRVEGTREEMAVTEGVLLGMGNPLLDIYDGVDDALLTSMTSGGGAILA

SEQ ID NO: 290614 - protein, 663 aa, Zea mays
  Clone ID: MRT4577_28129C.1.pep
MAPAPASPSDGELLRSLHRLARDLSAAAETPAPFLRGALASITRRSKLLAAAFDDLVLCAATGDLPRSASLCLREVLFVLQRFNALATDCAARSRMRLLLHSDEIEEEVRELHQDLATLLDLLPVVELGLAEDVMDLLDLASRQCRRFAPSAQAEQALKARVLSLIQEIEREIVPDRERLQEILEEAGINDPPSCSKEIESLEREIGDRASERWTDAMIALVGLLRYAKCVLFSATPRPSDSRPDPEVDEEGEPPAPPPDFRCPITLDIMRDPVVVASGQTYDRDSISRWFDSGKSTCPKTGQVLTVLELVPNKALKNLIAKWCRENGVAMESSAASRSEPAQAVAANKAALEAARMTASFLVKKLSISFSPDAANRVVHDIRLLSKSGADSRAFVGEAGAVPLLVPLLYSEDAGLQLNAVTALLNLSILEANKKRIMHAEGAVEAVAHIMSAGATWRAKENAAAAVLSLASVHTYRRRLGRNLSIVEKLVHLVRTGPTSTKKDALAALLSLAGERENVGKLVSAGVAQVALSAISEEETAAAVLAALAKRGGAEAIVGIDGAVARLVAEMRRGTEWARENATAALVLLCRRLGARVVMQVMAVPGVEWAIWELMGTGTERARRKAASLGRICRRWAAASAADGERGSVCPAASVVPPAMMAS

SEQ ID NO: 290615 - protein, 1057 aa, Zea mays
  Clone ID: MRT4577_2812C.1.pep
MELVEGELGRFAVIRGEEPTQTYNRLKTLINKIRSYGSTRWTDHDVVRLMLRSFTIIDPHLVNLIRENPRYTKMTPEEILGKFVSRRMMVKEARYVDDALNGPLPVYEPQPVALKATSSKEALQSKVAQVEAAGLNEDEMALIIKRFKTALKGRKEYPSKNKAKGKRSCFKCGKTGHFIDQCPDNDNDQEQEKYGKKKKKKNYKKAKGEAHLGKEWNFNCSSSDSDDEGLAASAFDKSSLFPNEHHMCLMAKEKKGCQHYGRHSSIKDGLGFRKETKNLTSQKAPVLNKEKGKAPMASSSQKCHAYIYDRKFSRNAHRSNDHDAFNSHAMFASSSTFVHDRSRPRRNHVVHHVPRKVYASGGSSWIIDSGCTNHMTGEKKMFTSYVKNKDSQDSIIFGDGNQGKVKGLGKIAITSEHSTSNVFLVESLGYNLLYDKSETQGTLKRFLRRAQNEFELKVKKIRSDNGSEFKNLQVEEYLEEEGIKHEFSAPYTPQQNGVVEKKNRTLIDMARTMLGEFKTPKRFWSEAMNTSCHAINRLYMHRLLKKTSYELLTSKKPNVFYFRVFGSKCYILVKKEQVDLDDIDEDDVPTAAMRTMAIGEVPREEARDQGGAQEEQVMEEEAPLAPPTQVRATIQRNHPVDQILGDISKGVTTRSRLANFCEHYSFVSSIEPFRVEEALQDLDWVLAMQEELNNFKRNEVWSLVPRPKLNVVGTKWVFGNKQDEHGVVTRNKARLVEKGYAQVAGLDFEETFAPVARLESIRILLAYAAHHSFRLFQMDVKSAFLNGSIKEEVYVDQPPGFEDDRYPDHVFKLSKALYGLKQAPRAWYECLRDFLIANAFKVGKADPTLFTKTCDLFVCQIYVDDIIFGSTNQKSCEEFSRVMTQKFEMSMMGELTYFLRFQVKQLKDGTFISQTKYTQDLLKRFGMKDAKPAKTPMGTDGHVDLNKGGKSVDQKEYRSMIGSLLYLCASRPDIMLSVCMCARYQSDPKECHLVAVKRILRYLVSTPCFGIWYPKGSTFDLIEYSDSDYAGCKVDRKSTSGTCQFLGRSLVSWSSKK

SEQ ID NO: 290616 - protein, 318 aa, Zea mays
  Clone ID: MRT4577_28130C.1.pep
RDIVYTGLEVRAGTTVDVLYNPSNTVLNGKSEVWFRGSFNRWTHPSGPLPPQKMVKAENSSHLRTTVSVPLDAYMMDFVFSESEEGGRYDNRNGMDYHIPVSDSVAREPPMHIVHIAVEMAPIAKVGGLGDVVTSLSRAVQDLGHKVEVILPKYDCLILSSVKDLHYQQSFASGGTEVKVWFGKVEDLPVYFLEPQNGMFWVGCVYGKNDESRFGFFCHSALEFLLQKGSSPDIIHCHDWSSAPVAWLYKEHYALNGMGDDPIVFTIHNLEFGAHHIKEELLQSICPIFQQLSLRPYCTSFVHWKKNLKSLVSSMPSV

SEQ ID NO: 290617 - protein, 411 aa, Zea mays
  Clone ID: MRT4577_28131C.1.pep
MGRGGAVMEDGDREEGSYPTLLQRWSSSVWAVSGSGRLLWAGNEAWRAHVGMALVQVAYGGYHVLTKSVLNVGMNQIVFCVYRDLVALALLAPIAFFRERNVRRPVTPRLLASFALLGFTGIFGNQLLFLLGLGFTNASYAAAFQPAIPVFTFLLAAIVGVEVINIFTKHGVVKVLGTAVCVSGAVLMVFYRGPSLIGTGGAADATALSVVIDHSHAYNYAPQWLAAAMLRNGVEAWHLGVVCLIGNCFLMGAYLVIQAPVLIKYPASLSLTAYSYSFATLFMVVTGAFATSGLHEWALTATEILAILYAGVVASCLNYAIMTWANKILGPSLVALYNPLQPACSTLLSTMFLGTPIYVGSVIGGLFIIAGLYLVTWARYKEAQSALVAGYLRPLLLPTTKAEGSSFRGLH

SEQ ID NO: 290618 - protein, 490 aa, Zea mays
  unsure (1)..(490): unsure at all Xaa locations
  Clone ID: MRT4577_28132C.1.pep
MDYHIPVSDSMAKEPPMHIVHIAVEMAPIAKVGGLGDVVTSLSRAIQDLGHKVEVIFPKYDCLNLSNVKDLHCRQSFTWGGTEIKVWFGKVEGISVYFLEPQNGMFWVGCVYGKNDESRFGFFCHSALEFLLQSGSSPDIIHCHDWSSAPVAWLYKQQYVHNGLPNGRVVFTIHNLEFGVHHIGKAMAHCDKATTVSDTYSKEVAGHGAIAPHYYKFHGIRNGIDPDIWDPYTDRFIPVHXITECFHVYIFIDIHLAFTTSLDLXYTSENVLEGKSAAKKALQQMLGLQQTDSPVVGIITRLTVQKGIHLIKHAMHRALERNGQVVLLGSAPDHRIQGDFTNLASKLHGEYHGRVKLCLTYDEPLSHLIYAGADFILVPSIFEPCGLTQLIAMRYGSIPIVRKTGGLYDTVFDVDDDKDRAQAQGLEPNGFSFEGADSSGVDYALDRAITAFYDARDWFNSLSKRVMEQDWSWNRPALDYMELYHSARKN

SEQ ID NO: 290619 - protein, 78 aa, Zea mays
  Clone ID: MRT4577_28133C.1.pep
RKFPMKIIIFFHPMAKGETISLKILLKRIKSLLPPPPILGPLPLRKRSKIFKRLIFLIKSPTPLLKKENDPRFPRVVV

SEQ ID NO: 290620 - protein, 258 aa, Zea mays
  unsure (1)..(258): unsure at all Xaa locations
  Clone ID: MRT4577_28134C.1.pep
MSAAAIEAAGRRKGSCFLEVGRREIGSSFPRVSSRRISGSEHIVSSMSQYGKLHGHEGCVNTVSFNPAGDLLVSGSDDTNIILWDWLSKTKKLVYPSGHQDNVFHARVMPFTDDSTIVTVAADGQVRVGRLKEGGEVTTKLVGEHDSRVHKMAIEPGNPYIFYSCGEDGLVQHTXRVKLNSIVIDPQNPYYFSIGGSDEYARLYDMRKFQLDGSRYTNQPVDTFXCPKHLIKGASARVHITSIAYSYAQEILGSYNDE

SEQ ID NO: 290621 - protein, 105 aa, Zea mays
  unsure (1)..(105): unsure at all Xaa locations
  Clone ID: MRT4577_28135C.1.pep
PRRSLHGVRHAFGCGIRVTQAVGGRYYVEALFKHFADQCKVECHSDVFQIVRACTRPMPGCEILKPAPSANXEKXPLNIECLNDHTDARLFNQRVEEGKGIPVRP

SEQ ID NO: 290622 - protein, 53 aa, Zea mays
  Clone ID: MRT4577_28136C.1.pep
VVIQNYRVSQAGCVTGLAELLFSPGSCGTIRVIQIMQNRLTIKLVEYICRPRL

SEQ ID NO: 290623 - protein, 484 aa, Zea mays
  unsure (1)..(484): unsure at all Xaa locations
  Clone ID: MRT4577_28137C.1.pep
MAAAAIEAAGRRKGSCFLEVGRREIGSSFPRVSSRRISGSEHIVSSMSQYXKLHGHEGCVNTVSFNPAGDLLVSGSDDTNIILWDWLSKTKKLVYPSGHQDNVFHARVMPFTDDSTIVTVAADGQVRVGRLKEGGEVTTKLVGEHDSRVHKMAIEPGNPYIFYSCGEDGLVQHFDLRSDSATKLFTCCSFLNDRRRVKLNSIVIDPQNPYYFSIGGSDEYARLYDMRKFQLDGSRNTNQPVDTFCPKHLIKXASARGHITSIAYSYAREILVSYNDELIYLFQHNMGLGPNPVSTEPEFFNMLDQPQAYRGHRNFRTVKGVSFFGQHDEYVVSGSDCGNVFIWRKKGGELIRMMNGDKSVVNCIEPHRISPFMATSGIDNTVKLWTPAAKKLIMPLPKNAKQIIAANELERTVHISQATASLSSDVMMHVLRLLRRRDSEMYIENEPASADLASDDDEAFYFGFEDDAERNERENSDPRECNMT

SEQ ID NO: 290624 - protein, 51 aa, Zea mays
  Clone ID: MRT4577_28138C.1.pep
LGLPIYSLNLSPRVFFPSIVALARTPARRPYVKTPNSLDAWLDYSTLSPKI

SEQ ID NO: 290625 - protein, 76 aa, Zea mays
  Clone ID: MRT4577_28139C.1.pep
QIVSQGYVPEISIHVFQLGRYLGKYIGMENYIHSETHQRPIWESSPIQNKVAKNRFTDIFNFKCEKVGFKVTCSLG

SEQ ID NO: 290626 - protein, 60 aa, Zea mays
  Clone ID: MRT4577_2813C.1.pep
LSRTRGANDKLIFPMVRLLYFHKPTLDLLLFLDQVYQHPSLQHKGKLALVQDDLDTINQH

SEQ ID NO: 290627 - protein, 153 aa, Zea mays
  unsure (1)..(153): unsure at all Xaa locations
  Clone ID: MRT4577_28140C.1.pep
SRAGXRAGPPLERPASKPPAGGQYTGQRSQPGRSQCSASGGSHGARGQXLLVSCPRGCAAFPGAFXAAAWGSRSTPAVSRAVVXXXXRQKKNFLSPPLRGPGPSRGAGRPXGRCAWWCXPRPRRRGRRXGGALAXAXPARPWPXPGVRPPXCG

SEQ ID NO: 290628 - protein, 118 aa, Zea mays
  Clone ID: MRT4577_28141C.1.pep
KKRRLSFSKPPAPGTKGSALFTEEPPPRPLKRPTHRGVRSSVMFVAFFFPPPFFWPGTKARSFFRTAIRPWKKFFYPFVHYGRTFLRPESPNVWPKKKKKTNKKKKKNKQKKKKKKKK

SEQ ID NO: 290629 - protein, 38 aa, Zea mays
  Clone ID: MRT4577_28142C.1.pep
YAMNLYFQANGEHAFGCDFGQTGIVTTADPSYGGCKFM

SEQ ID NO: 290630 - protein, 64 aa, Zea mays
  Clone ID: MRT4577_28143C.1.pep
SVRSLHPSAASKELKRTPLQTLQIPVVPSSSRLTDHNQRPRMPWNPCSPPLDHINDALGYRKSA

SEQ ID NO: 290631 - protein, 167 aa, Zea mays
  unsure (1)..(167): unsure at all Xaa locations
  Clone ID: MRT4577_28144C.1.pep
MLYVNFYRTYGKTIKKPWSTYEKERLDAELNLRTENGLTCTRELWRMHDALSTIRTAARHLFTLGXKNPRRILEAEGLLPLMNRYGMLXDGQNEMDYGLSSSPLMNFLTRGLSTLVFEAGMSXTLHHARVLIKQRHVRLVGXIVDEPSFMTQXVVSISTVYFSLSRP

SEQ ID NO: 290632 - protein, 118 aa, Zea mays
  Clone ID: MRT4577_28145C.1.pep
MYPIFIKHDLYKIGSNHLLQSLCIHCTYIFSSHLVRLHYPAACNIISSINIFLHVYRLISVCRLSDIFACSVAYIMLSICSTAGCPFGSNCHFLHNFPGGYLAVSKMTNLGGPPVPAP

SEQ ID NO: 290633 - protein, 478 aa, Zea mays
  unsure (1)..(478): unsure at all Xaa locations
  Clone ID: MRT4577_28146C.1.pep
MGQEGMGYNSKGGGGGGGXRGRAADDGAAAAGRVAAPPXRSRKIHRTFNNLKITVLCGLVTILVLRGTIGLNLSLPSQPSDAEALADAKAVEDIDRILREIRSDSGPDPDDEGDFGAASGFNATALSATEAAAAYAAAVGKYALGPKISDWDAQRRRWLAQNPGFPATLAGGKPRIMLVTGSQPGPCDNPLGDHYLLKTTKNKIDYCRLHGIEIVHNLAHLDNELAGYWAKLPLLRRLMLSHPEVEWIWWMDSDALFTDMSFELPLSRYDGHNLIIHGYQDLLFEKHSWIALNTGSFLFRNCQWSLDLLDAWAPMGPKGFIRDQAGKVLTANLKGRPAFEADDQSALIYLLLSQKDKWMDKVFIENSYYLHGFWAGLVDKYEEMMENHHPGLGDERWPFVTHFVGCKPCGSYGDYPVERCLRSMERAFNFADNQVLRLYGFSHKGLESPKIKRFRDQTTRPINDVENLDMKAKISTIS

SEQ ID NO: 290634 - protein, 167 aa, Zea mays
  unsure (1)..(167): unsure at all Xaa locations
  Clone ID: MRT4577_28147C.1.pep
PPSPGVSGPVXPPIRPGGPLPRVPGPYGGGPRSFFQPQPQGGPPALMAAPVAPPPPAMCGFQLPPPGPCPFNPGAGGVFFLGNFGXGNKGMGPPPSPPXRGXVVPPFSGPGLRGVPPPPGGPGGPCPELPPLMGRDFFLGKRGFRPPIGGFGFPPPGGGGPPFFFRG

SEQ ID NO: 290635 - protein, 63 aa, Zea mays
  Clone ID: MRT4577_28148C.1.pep
SLDIVVSRGKAYLSAPNKIFSFAGAVKTHSDLVWTASVPRTKLGPVWVKVTCSKIFGRVVPLG

SEQ ID NO: 290636 - protein, 56 aa, Zea mays; identical to SEQ ID NO: 236257
  Clone ID: MRT4577_28149C.1.pep

SEQ ID NO: 290637 - protein, 528 aa, Zea mays
  Clone ID: MRT4577_2814C.1.pep
MDPKGKGIVINDKEKESFVNKPKDDKPTDSGSGHRRKEGKKKKTRHIKEIVYYDDSDESTSSQKDDDHNDYERRKPVNSNFSFDYSRIPQSSNSHLLSIPLGKPPHFDGEDYGFWSHKMRSHLFSLHPSIWEIVESGMNFDSSDSPMFINEQIHKNAQATTVLLASLCRDEYHKVSGLDNAKQIWDTLKISHEGNDVTLLTKMELVEGELGRFAMIRGEEPTQTYNRLKTLINKIRSYGSTRWTDHDVVRLMLRSFTVLDPHLVNNIRENPRYTKMSPEEVLGKFVSGRMMIKEARYVDDALNGPINEPQPLALKATRSKEALPSKVAQIEAAGLNDEEMALIIKRFKTALKGRKGQPSKTKAKGKRSCFKCGKLGHFIANCPDNDSDQDQGNKREKKKNYKKAKGEAHLDKEWDSDCSSSDSDNEGLAATAFNKSPLFPNECHTCLMAREKKVCTRDSTYASSSEDESSDEDEIDYSCLFKGLDRNKIDKINELIDALNEKDRLLEKQEDLLYDEHDKFVEAQKSMP

SEQ ID NO: 290638 - protein, 50 aa, Zea mays
  Clone ID: MRT4577_28150C.1.pep
PTPFFFFFLFPKCLGTYLLSLYHFDGSFRGLLSLPAMENAVTLRYTTDAE

SEQ ID NO: 290639 - protein, 69 aa, Zea mays
  Clone ID: MRT4577_28151C.1.pep
KGVKLSILYLASRGINCPIKRKSPTPLFFFFFVEKKQFGSCFLSRDVFTGEIAEQMQAEKEREPGGKQL

SEQ ID NO: 290640 - protein, 100 aa, Zea mays
  Clone ID: MRT4577_28152C.1.pep
CFLGRSQSKDQQTIDALEGYGPIMRCFANEAALTNNWISHATQDCLVPEGCTLSTSDPFIGRLETPVRSSPLEAEDPVLPCGLPYPHEPHDAGRPRRGCS

SEQ ID NO: 290641 - protein, 56 aa, Zea mays
  Clone ID: MRT4577_28153C.1.pep
LILTNYYVFIWGLLSFVSVGLFCPFWHLSFIVGVLLYYRLSALSLFPCCLSFFGFS

SEQ ID NO: 290642 - protein, 136 aa, Zea mays
  Clone ID: MRT4577_28154C.1.pep
NRGGQRAPKNPGLKKGKGDPWGIGAPGKLNKGGPLGGVGFPQGGNPKWGGFFGGIPGGWAPKNGGGGGNPKGPSPLIPLGPKKKKKIGGPKTGFWAQIFFKPPPQRGPPAKINISGGGLNGRRGTPPSGVYTGGGG

SEQ ID NO: 290643 - protein, 57 aa, Zea mays
  unsure (1)..(57): unsure at all Xaa locations
  Clone ID: MRT4577_28155C.1.pep
ALPNLSVFSVHLWYSARACIPXEVRDDQHADISWSQYGRYMVIASSSHGFMFPGREE

SEQ ID NO: 290644 - protein, 198 aa, Zea mays
  Clone ID: MRT4577_28156C.1.pep
MDAAEARRSSSASSSPEFEFWPLHPNPAASPSCADELFAGGVLLPLPVLTPKPASSNIGSGISQCVPVVEPEPGEAFLLATVSPPPASITSTALPTATGGGGRGVQALDRHLFQEAGAGSRGEGPGQGEGEAPPPRHKEKLASAARKPGLGSGVRGLNLSVTPASGTGTRSAGGARTSAGGGGLFGIKGLFLQEGALM

SEQ ID NO: 290645 - protein, 43 aa, Zea mays
  Clone ID: MRT4577_28157C.1.pep
SLHIKVQKLIASFLPIKFSCTLRINHHQLKFFCSLTQKSYIRL

SEQ ID NO: 290646 - protein, 111 aa, Zea mays
  Clone ID: MRT4577_28158C.1.pep
LTKTSGPPAPGLQEGEKLEDPYTRGLALNWCIIKKQVCLNTVVGNHRITANGQRMDLGIMEPTHLGPLKGGPEPCQPDEVTLGTPPRGLAYRQAPTRRDRIIFRRTIHTDA

SEQ ID NO: 290647 - protein, 292 aa, Zea mays
  unsure (1)..(292): unsure at all Xaa locations
  Clone ID: MRT4577_28159C.1.pep
MGQASRAHQLLASLAAIYVTLAISITQQQHVAGNMTDDLEIMWGNAKVVTDGSGQQAIALALDRSTSSAFRSKKTCQFCRVDIEIKLVPGNSAGTVTTFYMITENPWQFHDEIDIEFLGNSSGQPYTMHTNMYARGQGAREKQYKFDFDPTQEYHKYTIIWNKDWILFLVDDKLYRQIKNNQIDGAPYPYYYPMRVYATIWNADEWATQGGQVKTDWSQAPFTAYFRNYRAISCNSXWPPLCASQAPAGXDQQLDESRKQQLAQVDSSNKIYDYCTDSRRYKNGLPRECQVH

SEQ ID NO: 290648 - protein, 104 aa, Zea mays
  Clone ID: MRT4577_2815C.1.pep
MEFLAAYLLPCLGAGPAPTLPTKDDVRRILRSVSAEVEEDRLDLVFALLEVKDIAELIATGGEHLAYAPSGAAAAVVATPAAAEVEEEATKEEDEDIALFNLFD

SEQ ID NO: 290649 - protein, 89 aa, Zea mays
  Clone ID: MRT4577_28163C.1.pep
TPIHIICVPLPYFIVSYFRCLFRVIFGSACIEKFYWAPIHPPSGRRFGPTKYLPLILTRWLCLMLDFPKTTWLGRHGRSSESSPPLSTS

SEQ ID NO: 290650 - protein, 144 aa, Zea mays
  Clone ID: MRT4577_28164C.1.pep
MTMAQRTMCLLRRSIGFTAPQAQRALSTTAAGAEGAAVAEATAKEAKRRRKNLFDVVQFLPEWGIGYKVAKTTWRDVSYQITKINLYKDGRHGKAWGLRYKAGVQAADTPTRISGVNKRGWKYIKESQKKLQEAPKVDVAVAAA

SEQ ID NO: 290651 - protein, 88 aa, Zea mays
  Clone ID: MRT4577_28165C.1.pep
QHTVVSMRLLHQSYQPKHTPYNICLIHCGPFDSRDLIVLMKETILSVMVCLRAHTYAHTSSSPLFSISICHSLQVTYIIFTTYHVSWW

SEQ ID NO: 290652 - protein, 52 aa, Zea mays
  Clone ID: MRT4577_28166C.1.pep
LIRLVEMLRIEQHTALEASYIAMQTCKLSVVHIVYSQMTCNYDNLTHVVLSS

SEQ ID NO: 290653 - protein, 110 aa, Zea mays
  Clone ID: MRT4577_28167C.1.pep
HNEGTQALDTRLMQHQGSHCDVTKSIHCTTWACSIWEDQKRLVVILQATKIAKDSVTIEKTDLISLQNGYRPRYVHRSQLRRQHQCCRRKSGHGLVFDAPCWTRPHGRLD

SEQ ID NO: 290654 - protein, 33 aa, Zea mays
  Clone ID: MRT4577_28168C.1.pep
KDITYNYLMRLELHFYHEIHIRADNDLEGLRND

SEQ ID NO: 290655 - protein, 94 aa, Zea mays
  unsure (1)..(94): unsure at all Xaa locations
  Clone ID: MRT4577_28169C.1.pep
HPRSYSRAATATILPQCSQAPIACFVAPYLXPTVYSGWENPILQPYSIQHAVSHXVLPLLPSAFTPFMSLMXQLPMLHLLAQIIWAQLLTSIWS

SEQ ID NO: 290656 - protein, 1637 aa, Zea mays
  unsure (1)..(1637): unsure at all Xaa locations
  Clone ID: MRT4577_2816C.1.pep
MDPKGKGMVVNDNEKESIFNEPRDDKVNDSGSSQKKKDGKKKRHIRKVVYYDSDESSSSQKDDEYEEKKKTVNSNFSFDCSRIPHNSNAHLLSIPLGKPPHFDGEDYGFWSHKMRSHLFSLHPSIWEIVENGMQFDSSDNSMFINEQIHKNAQATTILLASLCREEYNKVSGLDNAKQIWDTLKISHEGNDVTMLTKMELVEGELGRFAMIRGEEPTQTYNRLKTLVNKIRSYGSTRWTDHDVVRHMLRSFTVLDPHLVNSIRENPRYIKMTPEEILEKFVSGRMMIKEARYVDESLNGPIHEPQTIALKATSSREALPSKVAQVEAAGLNEDEMALIIKRFKTALKGHKEHPNKSKTKGKRSCFKCGKVGHFIANCPDNDGDQDKEKKREKKKTYKKAKGEAHLGKEWDSDCSSSDDKGLAASAFNKSSLFPNEHHTCLMAKEKKVYTRDTITYASSSDDESSDDEIDYASLFKGLDRTKIDKINELIDALNDKNRLLEKQEDLLYEEHDKFVDVQKSLALEVKRNEMLSCELSTCHETISSLKSVNDDLNAKLEVANRSNSCEEHVVICNRXLNAQLKTSKNXIDKLKFASDAYTVGRHPSIKDGLGFKREAKNLTSYKAPISAKDKGKAPMANSVQKNHAFIYSDRKFSRNAYRNYSYDSYAMPASSSSIVHDMPRKNIIHHMPRRNVAHVPRKPSNEPSTIYHACNASFAICRKDKKVVARKLGAKCKGDKACIWVPKAIVTNLVGPNKSWVYASGGSSWFIDSGCTNHMSGEKKMFTSYVKNKDSQDSIIFGDENQGKIDLVQLVKQDKIETQGTVKRFLRRAQNEFELKVKKIRSDNGSEFKNLQVEEYLEEEGIKHEFSAPYTPQQNGVVERRNKTLIDMSRTMLGEFKIPERFWSEAVNTACHTINRVYLHRLLKKTSYELLTGNKPNVSYFRVFGSKCYILVKKGRNSKFAPKAVEGFLLGYDSNTKAYRVFNKSSGLVEVSSDVVFDETNGSPREKVVNPNDVDEYDVPTDAIRTMAIGDVRPQEHQEQDQPSSSTLVHPPTQDDEQVHQEEACDQGGAQDDHVMDEEAPQAPPTQVRATIQRNHPVDQILGDISKGVTTRSRLVNFCEHCSFVSSIEPFRVEDALLDPDWVLAMQEELNNFKRNEFWTLVPRPKQNVVGTKWVFRNKQDEHGVVTRNKARLVAKGYAQVTGLDFEETFDPVARLESIRILLAYAAHHSFRLFQMDVKSAFLNGPIKEEVYVEQPPSFKDERYPNHVCKLSKALYGLKQALRAWYECLRDFLIANAFKVGKADPTLFTKTCDGDLFVCQIYVDDIIFGSTNQKSCEEFSRVMTQKFEMSMMGELNYFLGFQVKQLKDGTFISQTKYTQDLIKRFGMKDAKPAKTPMGTDGHVALNKGGKSVDQKAYRSMIGSLLYLCASRPDIMLSVCMCARFQSDPRECHLVVVKRILRYLVATPCFGIWYPKGSTFDLIGYSDSDYAGCKVDRKSTSGTCQFLGRSLVSWSSKKQTSVALSTAEAEYVAAGQCCAQLLWMRQTLRDFGYNLSKVLLLCDNESAIRMADNPVEHSRTKHIDIWHHFLRDHQQKGDIEVFYVSTENQLADIFTKPLDESTFCRLRSELNVLDSRNSD

SEQ ID NO: 290657 - protein, 91 aa, Zea mays
  Clone ID: MRT4577_28170C.1.pep
TEASWLILIGGDRSSACDLERAWHPCGRSFCICRSSGVSAPRKACGHAIRSAMAIHVHTLAVTITVQSLYSQLGGLSLCERTPHCHPVPCL

SEQ ID NO: 290658 - protein, 77 aa, Zea mays
  Clone ID: MRT4577_28171C.1.pep
MAEIEIKTAPADFRFPTTNQTRHCFTRYVEYHRCLNAKGDDAGVCEKFAKYYRSLCPGEWVEKWNEQREHGTFPGPL

SEQ ID NO: 290659 - protein, 77 aa, Zea mays; identical to SEQ ID NO: 290658
  Clone ID: MRT4577_28172C.1.pep

SEQ ID NO: 290660 - protein, 424 aa, Zea mays
  Clone ID: MRT4577_28173C.1.pep
MNEAVQEAKLLRQVNALIVAHLRSQNLGQAAAAVAAATMTPISAAESVPANHLLRLVAKGLPRVRGRVGAVSAFDSAGFGVAVQPPGSSAVDFSIQDVKGSSKSFPKHEVKHVSDHKNAARCVKFSPDGKYFATGSADTSIKFFEVAKIKQTMVGDSKDGPARPVIRTFYDHTQAINDLDFHPESPILISAAKDSTIRFFDFSKTNARKAFRVIQDTHNVRSVCFHPCGDYLLAGTDHPVAHLYDINTFTCYLSANAQDSSSPINQVRYSCTGSLYETASKDGSLRIWDGVSAECVRPIIGAHGSSEAISAIFTKDERYVLSCGKDSRVKLWEVGTGRLVKQYAGAIRRQFRCQAVFNETEEFVLSVDEQNNEVVVWDALTAEKVTRLPSGSTGAPRWLDHSPVEPVFVSCGNDRSIKFWKQTV

SEQ ID NO: 290661 - protein, 163 aa, Zea mays
  unsure (1)..(163): unsure at all Xaa locations
  Clone ID: MRT4577_28174C.1.pep
HNVVSQKSLQRTKGGKKRGGGTQAXPTGQNRGRGGEGGEKGPXGGGKKGQNGAQRGXKSGRGGGGPGKQAGXKFFGDKQGQAPGAGKRGQKRXKGGXTGPRGTKGGRTRPRQKGGPKGXKGGGGPQGVFLGGGXGGRGQGXGGKGGGPGGAQARPPPREAGGE

SEQ ID NO: 290662 - protein, 370 aa, Zea mays
  Clone ID: MRT4577_28175C.1.pep
SLLLAEAKYTVDNLRNLSDSLSAAKKVDIAQSFLLPPNVQNEINEIQGKLNSSATDLAIKTTDNAAKIKKVLNRVRLALVVIAAVMLLLAFVGFLLSIFGLEFLVSVLVIIGWILVTGTFILCGVFLLLHNVVSDTCVAMEEWVAHPTEHTALDEVIPCVEPATANESLYRSRQVTFELVNVVNQVITNVSNRNFPPQLTPFYYNQSGPLMPLLCNPFTPDLRDRNCSRGEVTLDNATQVWKKYECQSTSVSGGAEICATVGRVTPSIYGQMTAGVTVSQGLYQYGPFLIQLQDCTFVRDTFTTINQGYCPGLERYSKWVYVGLVMVSSAVMLSLIFWVIYARERRHRVYSKQHQPYPVEDKPAATVPGA

SEQ ID NO: 290663 - protein, 67 aa, Zea mays
  Clone ID: MRT4577_28176C.1.pep
NTEIFITIATTSWYKRSIICGMHVFVTYLSYFLLLTKINWQRRQQASQAPKPRHYCYLPSSENDTEP

SEQ ID NO: 290664 - protein, 48 aa, Zea mays
  Clone ID: MRT4577_28177C.1.pep
YFSARGPDGGGRIQDGTASLGPCLPECSTESYFVDDSSGNTMTSCCAR

SEQ ID NO: 290665 - protein, 77 aa, Zea mays
  Clone ID: MRT4577_28178C.1.pep
MALPAPPVRLALLLLVALPFCAAHPGPGAFNAPRHFQTPALHSDGFGLVARRSIAEAPADINVTTNSSFVLAADRTY

SEQ ID NO: 290666 - protein, 118 aa, Zea mays
  unsure (1)..(118): unsure at all Xaa locations
  Clone ID: MRT4577_28179C.1.pep
YQHLISSSKHSVVSDTCVAMEEWVAHPTEHTALDEVIPCVEPATANESLYRSRQVTFELVNVVNQVITNVSNRNFPPQLTPLYYNQSXPLMPLLCNPFTPDLRDRNCSRGEVTLDNAT

SEQ ID NO: 290667 - protein, 172 aa, Zea mays
  Clone ID: MRT4577_2817C.1.pep
MDGPARSTSSHARILASLPISAATAPGSAPKTPTTPPVATAHQPSQPTTTSETSEMEEFLAAYLLPCLGADAATGQRVDVLPGPATALPTKDDVRRILRSVSAEVEEDRLDLVFALLEVKGIAELIYTGGEQLAYAPSGAAAAVVAAPAAAEVEEEATKEEDEDVALFNLFD

SEQ ID NO: 290668 - protein, 150 aa, Zea mays
  unsure (1)..(150): unsure at all Xaa locations
  Clone ID: MRT4577_28180C.1.pep
VEVSISFMGLVGYYQRXVKGFSMIVTPMSRLLQKDIKFEWTEKCQQSFDKLKTLLTEAPVLVLPEPGKEFVVYSDASLNGLGCVLMQDGKVIDYASQQLKPHEKNYPTRDLELAAIVFALKIWRHYLYGETCCIFXDHKSLKYLMTQKEL

SEQ ID NO: 290669 - protein, 153 aa, Zea mays
  unsure (1)..(153): unsure at all Xaa locations
  Clone ID: MRT4577_28181C.1.pep
MALPAPPVRLALLLLVALPFCAAHPGPGAFNAPRHFQTPALHSDGFGLVARRSIAEAPADINVTTNSSFVLAADRTYRRDPLNGFRKYPGGWNISEVHYFASVGYTAIXPLFAIALVWFXSFSWLCLGICCRHLLVPASHLXYSRTAYALSLI

SEQ ID NO: 290670 - protein, 69 aa, Zea mays
  Clone ID: MRT4577_28182C.1.pep
KKFFFFFFQPSKRGEPFNLKNPAPGKPKGFPRGKKTEKSGIFLKSPPFWAQTKGLTSFQSLKKKNGGNP

SEQ ID NO: 290671 - protein, 184 aa, Zea mays
  unsure (1)..(184): unsure at all Xaa locations
  Clone ID: MRT4577_28183C.1.pep
MRNSKPPSKLAMLMALLSLSFLLCYGVEKVHCSTVHEDNQDFHSLLDFKKGITNDPNGAMSNWTNNTHFCRWNGVKCTLTPPYRVTELNLTGNDLAGRISTSLGNLTYLSLLALXKKKXSGPIPPLNKLQNLSYLSLDNNFLNGVIPESLTNCSNLDTLGLSKXNLTGVIPPSIGSLTKLKLFS

SEQ ID NO: 290672 - protein, 82 aa, Zea mays
  Clone ID: MRT4577_28184C.1.pep
GTYTKLPKLTLALEKVCQLSFHHCLDISTVQFLVMQPCTLSLPYLCKVQVFLLVGLPSEVKIIYLGLSYDFLKQHRVHLDNK

SEQ ID NO: 290673 - protein, 73 aa, Zea mays
  Clone ID: MRT4577_28185C.1.pep
LCHRQVLSKDCCLFSNLDPQGLLPVPHVFESGLYLFWWFPVPVADCYLLRTEHKVISTLLWVLKRKKYSGCLF

SEQ ID NO: 290674 - protein, 34 aa, Zea mays
  Clone ID: MRT4577_28186C.1.pep
YCVSCTGWPGEGFRIHSKRAKFTLLVCGLEVLNN

SEQ ID NO: 290675 - protein, 46 aa, Zea mays
  Clone ID: MRT4577_28187C.1.pep
WSSPHAPGRRRQARAARATKRHRIILVAIWQVKRTRQAEQSRVLKK

SEQ ID NO: 290676 - protein, 60 aa, Zea mays
  unsure (1)..(60): unsure at all Xaa locations
  Clone ID: MRT4577_28188C.1.pep
MRTCDRRDTSKFGHVTLSXTAHRSGYYDETDEEHAQVATDTGDTLNGAPRINALQSAEKA

SEQ ID NO: 290677 - protein, 145 aa, Zea mays
  Clone ID: MRT4577_28189C.1.pep
LLHLLLNMFFFNFVISYLVCFARKKRGEKRKLGGGGGAKKGSKQKKKKKPPAAAPTGGGTPGVVKKKTPPLPPKKRRLARGTKEGPPASTQKGAPPKKALKKGFKKKKNTQRAEKKNNHEESHREKNKKKGAGGKKKKKRGAGGK

SEQ ID NO: 290678 - protein, 796 aa, Zea mays
  unsure (1)..(796): unsure at all Xaa locations
  Clone ID: MRT4577_2818C.1.pep
MAKEKKVSARDSPKYSTSCDEDSSDDEVDYSSLFKGLDRAKVEKINELIDALNEKDRLLEKQEDILYEEHDKFVSVQKSLALEIKRNEMLSSELSACHDTVSSLKSVNDDLNAKLEEANKSSSCVEHVNICNRCKDFDVDACDEHLMSITKLNDEVASLNAQLKTCKTNFDQLKFARDAYTVGRHPSIKDGLGFRKETKNLTSQKTPVLNKEKGKAPMANSTQRNHAFIYNDRKFSRNAHYNRSYDHDVFNSHAMIASSSTFVHGKPRRNHVVHHVPRRVCSGSSTIYHACNTSSALVYKNEKVVARKMGSKCKGDKTCIWIPKAIVTNLVGPNKSWVYASGGSSWIIDSGCTNHMTGEKKMFTSYVKNKDSQDTIIFGDGNQGKVKGLGKIAITNEHSISNVFLVESLGYNLLSGEHVLGLTNVXSKKIDLVQLVRQGNRWEALITARMXMTTSRPLELLHMDLFGPVAYISIGGSKYGLVXEMTFPASLGCSSCXDKSETQGTLKRFLRRAQNEFELKEEGVKHEFSSPYTPQQNGVVERKNRTLIDMARTMLGEFKTPERFWSEAVNTPCHAINRLYLHRLLKKTSYELLTGNKPNVSYFRVFGSKCYILVKKGRHSKFAPKAVEGFLLGYDLNTKAYRVFNKSSGLVEVFSDVVFDETNGSLRELVDLDDIHEDDVPTTAIRTMAIGDVQPQEQQEQDQPSSSTMVHPPTQDDEQVPQEEARDQGGAQEEQVMEEEAPLAPLTQVRATIQRNHPVDQILGDISKGVTTRSCFANFCEHYSFVSSIEPFRVEE

SEQ ID NO: 290679 - protein, 173 aa, Zea mays
  unsure (1)..(173): unsure at all Xaa locations
  Clone ID: MRT4577_28190C.1.pep
GNFRVRPTRAARRHGTTDGPSERGSGLGRPRAAAFFLSETSLRAAPAPTAVELPAPKVGIMGRSARSTRRLRGQATYNEKLITPEGKVELQVTDDMYILDQAEEDGIDLPYSCRAASXSSSAGKVVSGSGDQGDQSYLDDGEIADRWEMSCHANPTSERDNETNEEERGSPPE

SEQ ID NO: 290680 - protein, 216 aa, Zea mays
  Clone ID: MRT4577_28191C.1.pep
MARTSIPTHNDIAVPESVLKKQKAHQKTTDSQAAELKKKREANKQKREVIKERAAKYNQEYVKAERDIIEAKRAAKRDNSFYVPAEAKLAFVVRIKGINKIDPKKRKTLQLLRLLQINNGVFVKLTKATSEMLKIVEPFVTYGYPNLKTVRELVYKRGYGKVNKQRLPITDNALIEENLGKYGITCIEDIIHELYTVGPHFKAVSNFLWAPQLSSP

SEQ ID NO: 290681 - protein, 188 aa, Zea mays
  unsure (1)..(188): unsure at all Xaa locations
  Clone ID: MRT4577_28192C.1.pep
ANKQKREVIKERAAKYNQEYVKAERDIIEAKRAAKRDNSFYVPAEAKLAFVVRIKGINKIDPKKRKTLQLLRLLQINNGVFVKLTKATSEMLKIVEPFVTYGYPNLKTVRELVYKRGYGKVNKQRLPITDNALIEENLGKYGITCIEDIIHELYTVGPNFKAVSNFLWPFKLSSPXGGFRTRKFKHFH

SEQ ID NO: 290682 - protein, 163 aa, Zea mays
  Clone ID: MRT4577_28193C.1.pep
KKKKKKKKKKKKKKKKKKKKKKKKKKKKKKKKKKKGKKNIKNKNLKKKKKKGGGFFWGPIFFSGGWRVFIFFLGALILFSWAGFFNGGVGKTLGFPNFMGLEKFPFLPVGVFGRGAGPSFFSNFLAALLGIWPPLFRGFFRGGGGGFSPWVPFIFAGVLGPFF

SEQ ID NO: 290683 - protein, 92 aa, Zea mays
  Clone ID: MRT4577_28194C.1.pep
QIPPNFGVRGPIFFKKLFWPKKTPPGLKAAKGENFFQGKTGFLFPLKGFKNPLGGRAKGLAPITPPGTPIVEISQEKGPGPPKGGGPGGLDF

SEQ ID NO: 290684 - protein, 94 aa, Zea mays
  Clone ID: MRT4577_28195C.1.pep
GPRSVLVGPPPPTRGGPAPAKKEKGPGEPIFGFIFKKAPLVGGGPLPPKVGAGPAPPSRAKTTPGKKASGGDDNGTGGGFPPGGPGGLFAQKSR

SEQ ID NO: 290685 - protein, 56 aa, Zea mays
  Clone ID: MRT4577_28196C.1.pep
LKPLHKPLLHLHFNHSSYIQKNIYCARFLNITFKQNFGIWKGTFLGLHWNFCHLYS

SEQ ID NO: 290686 - protein, 100 aa, Zea mays
  unsure (1)..(100): unsure at all Xaa locations
  Clone ID: MRT4577_28197C.1.pep
MNYLTANTMKLVLVVLAFIALVSRVSCTQTGGCSCVQQQIHEQQHHSQQHHTQHHQHVPPPQHNQLQXHQLLQVHMQPLKHQXQREVYVQHRQQQPNHHL

SEQ ID NO: 290687 - protein, 103 aa, Zea mays
  Clone ID: MRT4577_28198C.1.pep
MAPATVLVLYPKTPTSTFNADYYLSTHMPLASKHWTKHGLKGYKVTELNADSPYAFVSVLEWESYEGFQAAIKDAGTKEIMEDVPNFSNEKAILVHGPVIATG

SEQ ID NO: 290688 - protein, 96 aa, Zea mays
  Clone ID: MRT4577_28199C.1.pep
LGRHNKAFVIHFLLSAAPLRSFVLQMHVVLHRQSVHAPYSSTYLANRRRSSCNSSKAAEHTHLIRTPTPRMAGGKKKSPLHDRGRSMFESRVLPAV

SEQ ID NO: 290689 - protein, 1811 aa, Zea mays
  Clone ID: MRT4577_2819C.1.pep
MNPLLPKKDDGNVYENKKTVNSNFSFDYSHIPQSTNAHLLSIPLGKPPHFDGEDYRFWSHKMSSHLFSLHPSIWEIVESEMKFDSSDSPLFINEQIHKNAQATTVLLASLCRDEYHKVSGLDNAKQIWDTLKILHEGNDVTMLTKMELVEGELGRFAMIRGEEPTQTYNRLKTLVNKIRSYGSTRWTDHDVVRLMLRSFTVLDPHLVNNIRENPRYTKMTPEEILGKFVSGRMMIKEARYVDDALNGPIQEPQTIALKATRSKEALPSKVAQVEAAGLNDEEMALIIKRFKMALKGRKEHPNKNKTKGKRSCFKCGKIGHFIANCPDNDSDQEKKSGKWEKMKNYKKAKGEAHLGNEWDSDCSSSDSDNEGLAATAFNKSSLFPNEYHTCLMAREKKVNTRNTSTYASSSEDESSDDDEIDYSCLFKGLDRTKVDKINELIDALNDKNRLLEKQEDLLYEEHDKFVSAQNSLALEVKRNEMLSCELSTCHETISTLKDVNDDLNAKLEVANKSNSCVEHVMICNRCKDVDVDACSEHLICISKLNDEVASLNAQLKTSKSEFEKLKFARDAYTIGRHPSIKDGLGIKKEVKNLTSHKAPISAKEKGKAPMARSAQKNHAFMYHDRRHSRNVYRSYDAFDSHAMVASSSSIVHDRNLARRNAINHMPRRNVVHVPRKTNSEPSTIYHALNASFAICRKDRKIITRKLGAKCKGDKTCIWVPKTICTNLVGPNMSWYLRPKPKFALQVYASGGSSWIIDSGCTNHMTGEKRMFSSYVKNKDPQDSIIFGDGNQGKIKGLGKIAISNEHSISNVFLVESLGYNLLSVSQLCNMGYNCLFTNVDVSVFRRSDGSLAFKGVLDDKLYLVDFAKEEAGLDACLIAKTSMGWLWHRRLAHVGMKNLHKLLKGEHVIGLTNVTFEKDRPCAACQAGKQVGSTHHAKNVMTTSRPLELLHMDLFGPVAYLSIGGSKYGLVIVDDFSRFTWVFFLQDKSETQGTLKRFLRRAQNEFEIKVKKIRNDNGSEFKNLQVEEYLEEEGIKHKFSAPYTPQQNGVVERKNRTLIDMARTMLGEFKTPERFWSEAVNTACHAINRVYLHRLLKKTSYELLTGNKPNVSYFRVFGSKCYILVKKGRNSKFAPKAVEGFLLGYVSNTKAYRVFNKSSGLVEVSSDVVFDETNGSPREQVVDLDDVDEEDVLMAAMRTMVIGDVRPMEQKEQDQPSSSTMVHPPTQEDEQVHQEEAWDQGGAQDDQVMEEEAQPAPPTQVRAMIQRDHLVDQILGDISKGVTTRSRLVNFCEHYSFVSSIEPFRVEEALLDPDWVLAMQEELNNFKRNEVWTLVPRPKQNVVGTKWVFRNKQDEHGVVTRNKARLVAKGYAQVAGLDFEETFAPVARLESIRILLAYATHHSFRLFQMDVKSAFLNGPIKEEVYVDQPPGFEDERYPNHVCKLSKALYGLKQALRAWYECLRDFLIANAFKVGKADPTLFTKTCDGDLFVCQIYVDDIVFGSTNQKSCEEFSRVMTQKFEMLMMGELSYFLGFQVKQLKDGTFISQTKYTQDLIKRFGMKDAKPAKTPMGTDGHTDLNKGGKTVDQKAYRSMIGSLLYLCASRLDIMLSVCMCVRFQSDPRECHLVAVKRILRYLVATPCFGIWYPKGSTFDLIGYSYSDYAGCKVDRKSTSGTCQFLGRSLVSWSSKKQTSVALSTAEAEYVAAGQCCAQLLWMRQTLRDFDYNLSKVPLLCDNESAIRMADNPVEHSRTKHIDIRHHFLRDHQQKGDIEVFHVSTENQLADIFTKPLDEKTFCRLRSELNVLDSRNLD

SEQ ID NO: 290690 - protein, 247 aa, Zea mays
  unsure (1)..(247): unsure at all Xaa locations
  Clone ID: MRT4577_281C.1.pep
MRECISIHIGQAGIQVGNACWELYCLEHGIQPDGQMPGDKTVGGGDDAFNTFFSETGAGKHVPRAVFVDLEPTVIDEVRTGTYRQLFHPEQLISGKEDAANNFARGHYTIGKEIVDLCLDRIRKLADNCTGLQGFLVFNAVGGGTGSGLGSLLLERLSVDYGKKSKLGFTVYPSPQVSTSVVEPYNSVLSTHSLLEHTDVAVLLDNEAIYDICRRSLDIERPXYTNLNRFVSQVISSLTASXLRFDG

SEQ ID NO: 290691 - protein, 149 aa, Zea mays
  unsure (1)..(149): unsure at all Xaa locations
  Clone ID: MRT4577_28200C.1.pep
TCACCRRRHARSNPVPPSPPASRXPSPISPVPELALPRRRPYTPPRPXNPPXNPLSSRPISRRRPRAVHPVAVRAQPPPPNVQPTSSSIPVLRLPGIHLWAPAASAPAAAGLHIWALAAAGAPSPGCRCCRPCYCLTSALCCWAPSPGS

SEQ ID NO: 290692 - protein, 77 aa, Zea mays
  Clone ID: MRT4577_28201C.1.pep
PLFPTKMHPPNFLAFYSNFTLNTKPRNPKHFWPKMGWPLFLAIQKPTNPTPPEKKTKICQGAANPNKSTLIFSLKSP

SEQ ID NO: 290693 - protein, 37 aa, Zea mays
  Clone ID: MRT4577_28202C.1.pep
KHKIHLVINKCTPSHWSPGPRDIEDDSSSVEHQYMHT

SEQ ID NO: 290694 - protein, 282 aa, Zea mays
  unsure (1)..(282): unsure at all Xaa locations
  Clone ID: MRT4577_28203C.1.pep
SRPAEFGTRPTRIAATTPHDILQPQPHSTGPAPQTTGGRGHLPASFSGHHRRPCKTCTDEAYLLIRRRGHGVLAVPHQVVDAHAVEHQLLPPQVPGRRGVLLIRLAPAARRSTSLRASRRGGGAYIQTRAPPLVGGAADGRRKRPFQLTAHDELQLQLQLQLDDELCGLDYELHGPQQERTTKRRLTAEQVRELELSFEEEKRKLEPERKSELXARRLGIAPRQVAVWFQNRRARWRSKQLEQDFDRLRAAHDDLIAGRDALLADNDRLRSQVITLTEKLQT

SEQ ID NO: 290695 - protein, 75 aa, Zea mays
  Clone ID: MRT4577_28204C.1.pep
LSFFAWRSRSLPPRPLFSPLSTISSGVEGGCFGRGAAPRSGSAGGGRDEVVGDEPAGAAVGQQWRHHRCHAAVPL

SEQ ID NO: 290696 - protein, 49 aa, Zea mays
  Clone ID: MRT4577_28205C.1.pep
IFDLFFFFEYNTGDGPLSKSPGRCLAQGSIGGTSGCKIVYLKTNARRPR

SEQ ID NO: 290697 - protein, 86 aa, Zea mays
  Clone ID: MRT4577_28206C.1.pep
SITIHISRLFTKSNLQHRVSIFKNHEAAACGTCFHRFTIKRILYTDRLYVFFFFFFFFSSYIFHNNNVPHINFINHHDNITFCINT

SEQ ID NO: 290698 - protein, 51 aa, Zea mays
  Clone ID: MRT4577_28207C.1.pep
YNRVLLLTLHRGPKTSLPAQHRLQELTRRPPMPKAAPRTTHPTLSTPPKTA

SEQ ID NO: 290699 - protein, 56 aa, Zea mays
  Clone ID: MRT4577_28208C.1.pep
LSRPWRPSPRGPWPSSPLGTTKPGVSRSPLNASGLAAALTCGPDRCPPSLVAPGNC

SEQ ID NO: 290700 - protein, 89 aa, Zea mays
  Clone ID: MRT4577_28209C.1.pep
GSSSIRPCYVPPQGTPTRPGGGQRQAQYTTHRLVVILRASRHRLQEATVVTTLPGLINSMLKLLRMVPTSSLVRYSLILCQVLYFLILE

SEQ ID NO: 290701 - protein, 1064 aa, Zea mays
  Clone ID: MRT4577_2820C.1.pep
VGYLSPKPKFALQVYASGGSSWIIDSGCTNHMTGEKKMFTSYIKNKDSQDSTIFGDGNQGKVKGLGKIAISSEHSISNVFLVESLGYNLLSVSQLCNMGYNCLFTNVDVSVFRRSDGSLAFKGVLDGKLYLIDFAKEEAGLDACLIAKTSMGWLWHRRLAHVGMKNLHKLLKGEHVIGLTNVTFEKDRPCAACQAGKQVGSSHHTKNVMTTSRPLELLHMDLFGPITYLSIGGSKYGLVIVDDFSRFTWVFFLQDKSETQGTLKRFLKRAQNEFKLKVKKIRSDNGSEFKNLQVEEYLEEEGIKHEFSAPYTPQQNGVVERKNRTLIDMARTMLGEFKTPERFWSEAMNTACPAINWVYLHRLLKKTLYELLTGNKPNVSYFRVFGSKCYILVKKGRNSKFAPKAVEGFLLGYDSNTKAYRVFNKSSGLVEVSSDVVFDETNGSPREQVVDLDDVDEEEVPTVAIRTMAIGEVRPQEQKEQDQPSSSTMVHPPTQDDEQVHQEEACDQGGAQDDQVMEEEAPQAPPTQVRATIQRNHPVDQILGDISKGVTTRSRLVNFCEHYSFVSSIEPFREELNNFKRNEVWTLVPRPKQNVVGTKWVFRNKQDEHGVVTRNKARLVAKGYAQVAGLDFEETFAPVARLESIHILLAYATHHSFRLFQMDVKSAFLNGPIKEEAYVEQPPGFEDERYPDHVCKLSKALYGLKQAPRAWYECLRDFLIANAFKVGKADPTLFTKTCDGDLFVCQIYVDDIIFGSTNQKSCEEFSRVMTQKFEMSMMGELNYFLRFQVKQLKDATFISQTKYTQDLLKRFGMKDAKPAKTPMGTDGHVDLNKGGKSVDQKAYGSMIGSLLYLCASRPDIMLSVCMCARFQSDPKECHLVAVKRILRYLVATPCFRIWYPKGSTFDLIGYSDSDYAGCKVDRRSTSGTCQFLGRSLVSWSSKKQTSVALSTAEAEYVAAGQCCAQLLWMRQTLRDFGYNLSKVPLLCDNESDIHMADNPVEHSRTKHIDIRHHFLRDHQQKGDIEVFHVSTENQLADIFTKPLDESTFCRLRSELNVLDSQNLD

SEQ ID NO: 290702 - protein, 166 aa, Zea mays
  Clone ID: MRT4577_28210C.1.pep
MATASVATSLPFGFLLPPRLFRGRLVRWRRQIRASASSNASNVAGGERKLGALKGKIQKNIGPNFVAGFCVGIAFLAAVARQITLRSREHDNKGAVADLVRRGQLKSGQRGTAKPRTFDDPFNNPLVKIDEGTSTAQMFGKEYRLAPVRLTKEEQEMHQKRRSRAY

SEQ ID NO: 290703 - protein, 319 aa, Zea mays
  Clone ID: MRT4577_28211C.1.pep
MATASVATSLPFGLLLPPRLFRGRLVRWPRQIRASASSNASNVAGGERKLGALKGRVGDLRALVASMPDAVGSIQKNIGPNFVAGFCVGIAFLAAVARQITLRSREHDNKGSVADLVRRGQLKSGQRGTAKPRTFDDPFNNPLVKIDEGTSTVQMFGKEYRLAPVRLTKEEQEMHQKRRSRAYQWKRPTVFLREGDSLPPDVDPDTVRWIPANHPFAAASSEVDEETAKQNVYQKDGIPSRVKAEHEALQARLEASNDVTRLPSDPRSIQRNERPMKLSGKPSENLQGSKFENQDRQLAIESGKHSSDGSLQSNEPEGQ

SEQ ID NO: 290704 - protein, 77 aa, Zea mays
  unsure (1)..(77): unsure at all Xaa locations
  Clone ID: MRT4577_28212C.1.pep
MATEAXNIWKATPATYCDEASAAANGMSCCWGEVLWPYYLXYIHDLQLQIRQKTHNLNRLEVHLNDLNFRVRMLRDD

SEQ ID NO: 290705 - protein, 323 aa, Zea mays
  Clone ID: MRT4577_28213C.1.pep
MQPKISAFFERQETDPDPISGDGEGNGQGNVGAATEAKRKANGCRLDGLVSKKRNYAQLHLELGQPDFVLHTCSVCGMMYARGNDEDEKVHRAYHKSYSEGVPFKGWKKETVIARSEGGDRVVLATDENSCMSKSKVREVITVVEKELGFGEGKLLHKLCKVYLYISAQRIVGCLVTEPIKTGHRVIPSSTEGSPNDLPVSSTERGKNGHTLEFGSISFKREIIRRHSRSVKNKEECQDPGAILCETEAVPALCGFRAIWVAPSCRRKRIASKLMDVARKTFCEGRTLGISQFAFSPPTSSGKGLACRYCKTSAFLVYKDGPV

SEQ ID NO: 290706 - protein, 50 aa, Zea mays
  unsure (1)..(50): unsure at all Xaa locations
  Clone ID: MRT4577_28214C.1.pep
QGDTQHXVPLTSHPSLSSLSHYNFHTPQTCXYNIHQYLPPLLSSIYLLEK

SEQ ID NO: 290707 - protein, 259 aa, Zea mays
  unsure (1)..(259): unsure at all Xaa locations
  Clone ID: MRT4577_28215C.1.pep
RAFRKPSSRPREASSSAQLCSPPPVCHTPCPTTTSPPRRQNPRQPPMPPHRLLPLLLLLLPLGVSGAAAAGGNATSAPLPCSELSRVCTAFIAFPTAGAGPANATVLESMFDAAPGDLTADAAASPRYAFVRKNCSCLPSRTYLANTTYTIPSSATTSFPNTTAADVAAAAYSGLAVPPPGGAAQRPPRPGAVVALHLLCGCSSGPWNYLLTYVGVEGDTVESLSSRFGASMDAIETANAMAGPDPITAGKXVYYIPLN

SEQ ID NO: 290708 - protein, 38 aa, Zea mays
  Clone ID: MRT4577_28216C.1.pep
IIPKHEGGTGSPPVPKQQIFHLILGEPNPLVALTGIFP

SEQ ID NO: 290709 - protein, 54 aa, Zea mays
  Clone ID: MRT4577_28217C.1.pep
FSMNMIFACNRRLTRVMPTNVVFDLLGMSPHISISIDMCTCDYYSCIILGLNPA

SEQ ID NO: 290710 - protein, 105 aa, Zea mays
  unsure (1)..(105): unsure at all Xaa locations
  Clone ID: MRT4577_28218C.1.pep
MSHFHPTQHASDNDFQMWQQQMMFKHLQEFQRQQQLQQSDHGARMQPSFGQFHAPAKPLPGDQLSTMSNEMVNNETMNSGWPHNFTGGDLSLTSNSQMXDNGSTN

SEQ ID NO: 290711 - protein, 42 aa, Zea mays
  Clone ID: MRT4577_28219C.1.pep
CKQCEKMVTVAAIDVRPSSIRRQHPMAAIVGIVKELYMLLVG

SEQ ID NO: 290712 - protein, 843 aa, Zea mays
  unsure (1)..(843): unsure at all Xaa locations
  Clone ID: MRT4577_2821C.1.pep
MSEEKKVVDPFLAGFYESMAKTNTEKITKEIMADLSEDSNDSDDYDVESGDEDSKDRPWRPSHTIFGKLTVKQSQIDAMKGRYFHDMSIVRVGGDNTAPAPEENEVVVYRSFMKAGLRFPLSKFLVEVLKIFQIFLHQITPEAIIRMSLFVWVVRSQGLEPSAKCFFNMHEWLYETMATSKEKYHNNFGCYGFVARSNASYSVPTFRKRWHEAWMEEWFYVMNNLIEREDIKGIIQCPIWSRFGLRRPTVAIENDVEACQKAFSNVYSFIGTRDLIQEHIAYRGKKRKTATSAISVVPKGKKINVLTHRPRYIETAIVPKFGEETSSAAEAEQAAPTARSVEESTIVLKVPIFEPVKAEDRAAKKPEFEKTIVLPEILSPPVQAELPKVAKAPATTPKRRRMASILDAVMETTRALTPAPVKKVAEAATTHIETEVGPSMPAETKPTVTEERAKQKSPDIGIAMENEVAKEAKSPAPKAPSEDLDYIIRHASGKSLSVKEFLEAKHYARELKYPKGALVFNGTDEDDFLYCLPDNKEISVCREMAKSMGFPKLEAGLSAMSKDDLADSLAYNSMKGLILSNVLRAQKNAEDESCTIALGNLRSEGIKLRNKVLEKDKILLSLVDKVKEYEVKFNXLNSKLIRPXEDLRKKLTEANENCALAKASQEISEWSTTRLEKNVEELRESKERCFEKSLDCVKKLKTSFAKVGAYSSKENFIRGDPEGVIDWIRREANAFEEILSDRGDIYAFTGARGIVAILEKAGCDHVKAAAQAEATFSTDDTKDPSAKATLVGGKFYSDVWVNGGRELANKIIKKNEKETHEAQEEARRAEEAAERERRICICF

SEQ ID NO: 290713 - protein, 124 aa, Zea mays
  unsure (1)..(124): unsure at all Xaa locations
  Clone ID: MRT4577_28220C.1.pep
AVGSGVXXGVPXWLSXXSXGAXWGXXGSSXLXXGXXLSGVAXCASSPXVXXGPXXVFPGLFGPXXACXPXAWXWVXXPXXSVCXXXPPPPPVARPPACXSPRLCGXXVRWGSXVLSSXVCLPVF

SEQ ID NO: 290714 - protein, 59 aa, Zea mays
  Clone ID: MRT4577_28221C.1.pep
QNGAPSGGTLKIGLTAGRNFPKLYNLNLVDTSYGAVIIFPAEQSLPFLSIGGTMCPINS

SEQ ID NO: 290715 - protein, 121 aa, Zea mays
  unsure (1)..(121): unsure at all Xaa locations
  Clone ID: MRT4577_28222C.1.pep
MKRNPRVTSSRRKXRKEHFTVPXSGCRVLMYSGXLSTELRHQHNVXCIPIRKDDEGQGVRGTYKGREGKVEQVYRRCCFIHDERDTRWKANXSTADGYIQPCKGMATKLKIDKVPKALLYR

SEQ ID NO: 290716 - protein, 84 aa, Zea mays
  Clone ID: MRT4577_28223C.1.pep
CSEQKITCPVGVLPKYMVCLYELSTSGGDIGRDDMVSAWLSQSGVFVSAGTASHSIVDETLAYDQVCKAHFRGLASQGLWTNLF

SEQ ID NO: 290717 - protein, 54 aa, Zea mays
  Clone ID: MRT4577_28224C.1.pep
DQDTVVVVANVITVYADGPQMDSESLCVAASRDGASFSSWTRPQPLLARGKHRL

SEQ ID NO: 290718 - protein, 114 aa, Zea mays
  Clone ID: MRT4577_28225C.1.pep
SAAATESVAADKKLAIFDKIFSAYHDARSCIRNDLASAGNAEDIKDDLNGLDKAVSAVLGLRTIERNQLLVSIGKSKFTKHRDEKNERITKPEELVRLYDLLIQVCLFSVTSSF

SEQ ID NO: 290719 - protein, 90 aa, Zea mays
  Clone ID: MRT4577_28226C.1.pep
VPGDGCLATGVVPLAIEGALLLDSQRGGGLLHMAPAAEKQMCHTATEFGKASDFPVGTLSNGAQLISWRCGNPPVISKHSPVGGLGSSGS

SEQ ID NO: 290720 - protein, 125 aa, Zea mays
  Clone ID: MRT4577_28227C.1.pep
RLEKHFGCIGDKHDATIRMHVHPIRLHKFFQHNVTITFYLGGITMSLDILLVVSYTYEFEVSVPAENFITTHFPMMQFTHDSLSQIILHIFLYGGQLIIKRRATHRHRCHTLTIGHLIMVTHLLT

SEQ ID NO: 290721 - protein, 53 aa, Zea mays
  Clone ID: MRT4577_28228C.1.pep
GRRLKNTGGICIAWVINLITTWVGRPKLLNILNPNMQPNQPRFLELVLATNKM

SEQ ID NO: 290722 - protein, 55 aa, Zea mays
  Clone ID: MRT4577_28229C.1.pep
TMHHIYHIVTDELLIGHLYLRCLHTMQRILAEMRHGPMNRTMSSLIILSISIWHV

SEQ ID NO: 290723 - protein, 130 aa, Zea mays
  Clone ID: MRT4577_2822C.1.pep
PHSSGKCRPANRGCENRPPVALAMSLSMSASKAAAGKTPFLAVFCGGGRRRAFYKVLRGGLREPLVYVLIDFTGLVWVPVSNRCRGGALLCDSLEKSSGLLVWQPIGTWCSFFPLRTTPSFFCVETSAGL

SEQ ID NO: 290724 - protein, 116 aa, Zea mays
  Clone ID: MRT4577_28230C.1.pep
PIPSFSLYNFFDGRPVRAFFLLCHLAKVAFNPLPFLLGSPGFFQSPPCKSTAIKFHLVDPISHCLRPLPRCFKNAFSTLAPPCPFFFYYFPFFFFFFFFFFFFFFHRLYTPPLATV

SEQ ID NO: 290725 - protein, 90 aa, Zea mays
  Clone ID: MRT4577_28231C.1.pep
MAPVRTWPTISRHVFCVSWCLHASPLYINNKAIKELESDRLKKKKNYFLWERIKKSEAELLAEKKCVAHLTGEGNAFCDLPEDTMLPGEV

SEQ ID NO: 290726 - protein, 94 aa, Zea mays
  Clone ID: MRT4577_28232C.1.pep
TGSTTSAAAYGTHLSPHVPHRVLSTSSTLTRDYNSLTRSEHSHSTTLPRDYSTLTSVSSHDSRLTAGVPDTPTRLVFSALGPTSLRVSWQEPRC

SEQ ID NO: 290727 - protein, 39 aa, Zea mays
  Clone ID: MRT4577_28233C.1.pep
ATFPATEEASQQGVLLHTAGLVIYSAEHFAKPTIAETME

SEQ ID NO: 290728 - protein, 171 aa, Zea mays
  Clone ID: MRT4577_28234C.1.pep
MAAAAATATAAATPEWATKEPCLMGIDEAGRGPVLGPMVYGCMYCARSYHDTLATLSFADSKTLKEEQREELFESLKMNSSIGWEVDVICSKVLSAKMLKRTKINLNEISHNSAMGLVRKAIDNGVLLTEVYIDTVGDPEKYRVKLTEKIPGIKFVVAKKADSLYPVVSGA

SEQ ID NO: 290729 - protein, 126 aa, Zea mays
  unsure (1)..(126): unsure at all Xaa locations
  Clone ID: MRT4577_28235C.1.pep
RNITRXHGSVAIDTGVVQATITRTVFDQNPVAVFAVSKSSCPRDVPARXGGGDDDSSIVVAAAAASSPPPAATAPEASESAQTPPTKLSSPPALRGGEHDYDTASAQGIGIGWWCIALVYLLPHLV

SEQ ID NO: 290730 - protein, 75 aa, Zea mays
  unsure (1)..(75): unsure at all Xaa locations
  Clone ID: MRT4577_28236C.1.pep
HRRHNLALSVRRRTKAVVLLLYSFYGCGGAFIGLCSVRGPXXGEQEVRSAPRELRRCWHVELRRLRHVGYGXTRG

SEQ ID NO: 290731 - protein, 103 aa, Zea mays
  unsure (1)..(103): unsure at all Xaa locations
  Clone ID: MRT4577_28237C.1.pep
LFLFFFFSPSWLGFRRGPTXLPXSPGPXXXPAPRAXGSPXGLTXGLPPKLDPPXGPSTPXPAPSXFPAPRPCXCPAAAPPLPPPSPGPPGAPGPPPGARGCPP

SEQ ID NO: 290732 - protein, 57 aa, Zea mays
  unsure (1)..(57): unsure at all Xaa locations
  Clone ID: MRT4577_28238C.1.pep
DETRASVSANIYLVLLKNTXCGVIFCISCVYMENNDKYRLQPQLRLKFWNCYVIRLL

SEQ ID NO: 290733 - protein, 39 aa, Zea mays
  Clone ID: MRT4577_28239C.1.pep
CLHAQHLKRLYQHDVCSTSRHQLNHASIYVSNHDPLVSH

SEQ ID NO: 290734 - protein, 1267 aa, Zea mays
  unsure (1)..(1267): unsure at all Xaa locations
  Clone ID: MRT4577_2823C.1.pep
MDPRGKGMVVNDKEKESFVNDPKEDKPTDSGSSHKRKDGKKKKTRRIKEIVYYDSNESSSSQKDDDNDYEKKKTVNSNFSFDYSRIPQSTNAHLLSIPLGKPPHFDGEDYRFWSHKMRSHLFSLHPSIWEIVESGMKFDSSDSPLFINEQIHKNAQATTVLLASLCRDEYHKVSGLDNAKQIWDTLKISHEGNDVTMLTKIELVEGELGRFAMIRGEEPTQTYNRLKTLVNKIRSYGSTRWTDHDVVRLMLRSFTVLDPHLVNNIRENPRYTKMSPEEILGKFVSGRMMIKEARYVDDALNGPIHEPQTVALKATRSKEALPSKVAQVEAAGLNEEEMALIIKRFKTALKGRKEHPXNKNKTKGKRSCFKCXDQEKKSGKWEKKKNYKKAKGEAHLGKEWDSDCSSSDSDNEGLTATXLNKSSLFPNEHHTCLMAKEKKXEDESSDDDEIDYSCLFKGLDRTKVDKINELIDALNDKNRLLEKQEDLLYEEHDKFVTAQNSLALEVKRNEMLSCELSTCHETISTLKSVNDDLNAKLEVASKSNSCVEHVMICNRCKDFNIDACSEHLVCISKLNDEVASLNAQLKTSKSEFDKLKFARDAYTIGRHPSIKDGLGFKREVKNLTSQKTSISTKEKGKAPMASSAQKNHAFMYHDRIHSRNVYRSYNDFDSHAMVASSSSIMHDRNLTRRNVVHVPRKTNSEPSTIYHALNASFAICRKDRKIVARKLGAKCKGDKTCIWVPKDIVTNLVGPNKSWVYASGGSSWIIDNGCTNHMTGEKRMFSSYVKNKDPQDSIIFGDGNQGKVKGLEKIAISSEHSISNVFLVESLGYNLLSVSQLCNMGYNCLFTNVDVSVFRRSDGSLAFKGVLDGKLYLVDFAKEEAGLDACLIAKTSMGWLWHRRLAHVGMKNLHKLLKGEHVIGLTNVTFEKDRPCAACQARKQVGSSHHAKNVMTTSRPLELLHMDLFGPVAYLSIGGSKYGLVIVDDFSRFTWVFFLQDKSETQGTLKRFLRRAQNEFEIKVKKIRSDNGSEFKNLQVEEYLEEEGIKHEFSAPYTPQQNGVVERKNRTLIDMARTMLGEFKTPERFWSEAVNTACHAINRVYLHRLLKKTSYELLTGNKPNVSYFRVFGSKCYILVKKGRNSKFAPKAVEGFLLGYDSNTKAYRVFNKSSGLVEVSSDVVFDETNGSPREQVVDLDDIDEEDVPTAAIRTMAIGDVRPQEQLEQDQPSSSTMVHPPTQDDEQVPQVEAHDQGGAQDDQVEEEEAPQAP

SEQ ID NO: 290735 - protein, 717 aa, Zea mays
  Clone ID: MRT4577_28240C.1.pep
PPRSTGPSSAPRVIVLVGLSSSANVGSLAKDLLAFAEGDDRKLKLSTIASPTYKLRTTVLQAPYGDLTTCMELAKVADLLAFVLPANSFYSGDLNSPIDEFGSQCLSVFRAMGLPSTAVFIRDLPADNKSRQELKKAATSFLSAELPEDCKFYLADTKDDLHKFMWLFKEQHLSSPHWRNQRSYVMSEQVCINPDENTGLCTLLVSGYLRAHNLSVNQLVHVSGAGDFQLGQIDVLKDPCPLSERKSSDVMETEDNGIQIVNTFVPDPSSQEPLLVENVPDPLAGEQTWPTEEDMEEVDINNKQRKLVKRKLPQGTSEYQAAWIVEDTDDEDNDSDDDNQTESGMVIDEQGHSDQGSDGSDIDAVSHFTEKFDGETIGDTEMADEENLTKDQIEAEIKKIKEANADDEEFPDEVETPLDVPAKKRFAKYRGLKSFRTSSWDPKESLPLDYARIFAFDNFTRTQKHVFAKIAELDGGMKNCAQVGSYVRLYVKNVPTDIASKLCHPSRRIPVVVSGLLQHESKMSVLHFSIKKHDSYEAPIKSKEPLIFNVGFRQFTARPLFSSDNINCNKHKMERFLHHGRFSVASVYAPISFPPLPLIVLKNRDGEQPAIAAVGSLKSVDPDRIILKKIVLTGYPQRVSKLKSIVRYMFHNPDDVKWFKPVELWTKHGRRGRIKETVGTHGAMKCLFNSSIQQHDTVCMSLYKRAYPKWPEQLYHV

SEQ ID NO: 290736 - protein, 87 aa, Zea mays
  Clone ID: MRT4577_28241C.1.pep
RSLKYLKNWTVEFTEKTAGKYKQEGKTYVVQDGDIILFKLKVSGGRIKCIMYENGSINSVLRLTPIFLIQQCLHPDQYFHFFKDASQ

SEQ ID NO: 290737 - protein, 60 aa, Zea mays
  unsure (1)..(60): unsure at all Xaa locations
  Clone ID: MRT4577_28242C.1.pep
GTRAKESLDLRAHLKQVKKEDIEKENRDVGDXRKNIDALSGMESRKKKCEGSAHGSHTVL

SEQ ID NO: 290738 - protein, 50 aa, Zea mays
  unsure (1)..(50): unsure at all Xaa locations
  Clone ID: MRT4577_28243C.1.pep
STVCSVFPCRIFVNHLKWSPSPSSVCITAXYMGDEVTDVSPISVGGSVNN

SEQ ID NO: 290739 - protein, 102 aa, Zea mays
  unsure (1)..(102): unsure at all Xaa locations
  Clone ID: MRT4577_28244C.1.pep
LPRDGSEEGFVHQSSIKSEGFRSLAEGEEVEFSVSEGDDGRTKAVDVTGPDGSFVRGGGGGXGXXXXXYCGGGGGGGGGCYNCGQAGHMARDCPSRGGRGGR

SEQ ID NO: 290740 - protein, 116 aa, Zea mays
  unsure (1)..(116): unsure at all Xaa locations
  Clone ID: MRT4577_28245C.1.pep
VGLATPIGGGGYGSRGGGGSGGGGRSYGGSWGGGRRSGGGGGPGACYKCGEPGHMARDCPSADGGGYGGGGYGGGGYGGGGGGGGGGRFGGGGXXGGDRSCYNCGEAGHIARDCPT

SEQ ID NO: 290741 - protein, 592 aa, Zea mays
  Clone ID: MRT4577_28246C.1.pep
ERTKRAHRGLGDHGLMGSWRKAYGALKDSTKVGLAKVNSEFKELDIAIVKATNHVECPPKERHVRKILLATSANRPRADLSYCIYALSRRLSKTKNWIVALKTLIVVHRLLREGDPMFKEEFLAYSSRGNILHIANFKDDSSQSAWDCSAWIRAYGCFLEERLECLRVLRYDIETERLVRYPQTSSKVHSKTRTLPSPELLEQLPALQQLLFRVVGVQPEGAACSNYLIQYALALVLKESFKIYCSINDGIINLVDMFFEMPKYDAINALAIYKRAGLQAENLAEFYDFCKQLELARTFQFPTLRQPPASFLATMEEYIREAPRPSIKSEESEEPKLLTYEQEAPEEPENAVEEEKEEPSQKPEPQPVPDPEPHPQQTTGDLLNLEAEVNPSALELEQSNALALAIVAPGDYKPPASQSMFDVNSSGWELALVNAPSTHTSQAVETNLAGGFDKLLLDSLYEDEARRQQIAGATYTGSLGAANPFCTNASDPFTMSSRFAPPANVQLALMAQNQQQYYQAQQYYQAQLYFQPQQQQYFQQHQQTLAMPMPNMYHHQYQYSVPTSGASNPFGDPFSDLAPMGAPAKQSNSVFL

SEQ ID NO: 290742 - protein, 250 aa, Zea mays
  unsure (1)..(250): unsure at all Xaa locations
  Clone ID: MRT4577_28247C.1.pep
MAAAARQRGTVKWFNDTKGFGFISPEDGSEDLFVHQSSIKSEGFRSLAEGEEVEFSVSEGDDGRTKAVDVTGPDGSFVRGGGGGGGGGGGYGSRGGGGSGGGGRSYGGSWGGGRRSGGGGGPGACYKCGEPGHMARDCPSADGGGGYGGGGYGGGGYGGGGGGGGGCFKCGEPGHMARDCSSGGGGYGGGXGGGGGGGCYNCGQAGHMARDCPSGGGGGGGRFGGGGGGGGDRSCYNCGEAGHIARDCPT

SEQ ID NO: 290743 - protein, 59 aa, Zea mays
  Clone ID: MRT4577_28248C.1.pep
VPASTSDSGSLSVGTSEQVPTAELGSAPTTSAASHSSTPRQCTRPAGDRLRRDHRRRAG

SEQ ID NO: 290744 - protein, 48 aa, Zea mays
  unsure (1)..(48): unsure at all Xaa locations
  Clone ID: MRT4577_28249C.1.pep
VIGLTVVGETRVIMVRCLFNLPVGXCRPPPPGFHTLKTRAGERYGVIR

SEQ ID NO: 290745 - protein, 91 aa, Zea mays
  Clone ID: MRT4577_2824C.1.pep
YDVKLRALRKLGSCIAGALHAVLTIKDQDRAQGRWGDSRRRWLQPPPLSTTPAGRMMQEIHPNGGRHNIRRMPRVSKPTTTGKALRLRIHA

SEQ ID NO: 290746 - protein, 267 aa, Zea mays
  Clone ID: MRT4577_28250C.1.pep
GCCSLPSLSWLSLRAPPPRIQAARQRGTVKWFNDTKGFGFISPEDGSEDLFVHQSSIKSEGFRSLAEGEEVEFSVSEGDDGRTKAVDVTGPDGSFVRGGGGGGGGGGGYGSRGGGGSGGGGRSYGGSWGGGRRSGGGGGPGACYKCGEPGHMARDCPSADGGGGYGGGGYGGGGYGGGGGGGGCFKCGEPGHMARDCSSGGGGYGGGGGGGGGGGGCYNCGQAGHMARDCPSGGGGGGGRFGGGGGGGDRSCYNCGEAGHIARDCPT

SEQ ID NO: 290747 - protein, 220 aa, Zea mays
  Clone ID: MRT4577_28251C.1.pep
TRPIKAFVIDVVTSGSDTSAAMAEWMLAELMNHPETLRKVVEEIDAVVGGGRIASEADLPQLPYLMAVYKETLRLHPAGPIAHRQSTEEMVVHGFTVPPQSTVLIHVWAIGRDPAYWEEPLLFRPERFMPGGAAESLEPRGKHFQYIPFGSGRRGCPGMGLAMQSVPAVVAALVQCFHWSTVDGGMDKIDMSESDGLVCARKKPLLLRPTSRLTPFPPVV

SEQ ID NO: 290748 - protein, 94 aa, Zea mays
  Clone ID: MRT4577_28252C.1.pep
DAWGGGGGGGGGCFKCGEPGHMARDCSSGGGGYGGGGGGGGGGCYNCGQAGHMARDCPSGGGGGGGRFGGGGGGGDRSCYNCGEAGHIARDCPT

SEQ ID NO: 290749 - protein, 249 aa, Zea mays
  Clone ID: MRT4577_28253C.1.pep
MAAAARQRGTVKWFNDTKGFGFISPEDGSEDLFVHQSSIKSEGFRSLAEGEEVEFSVSEGDDGRTKAVDVTGPDGSFVRGGGGGGGGGGGGYGSRGGGGSGGGGRSYGGSWGGGRRSGGGGGPGACYKCGEPGHMARDCPSADGGGYGGGGYGGGGYGGGGGGGGGGCFKCGEPGHMARDCSSGGGGYGGGGGGGGGGCYNCGQAGHMARDCPSGGGGGGGRFGGGGGGGDRSCYNCGEAGHIARDCPT

SEQ ID NO: 290750 - protein, 38 aa, Zea mays
  unsure (1)..(38): unsure at all Xaa locations
  Clone ID: MRT4577_28254C.1.pep
SALVEPNNSSIRSPFTSTCLAMPLRSHNYTPSITSTVX

SEQ ID NO: 290751 - protein, 78 aa, Zea mays
  Clone ID: MRT4577_28255C.1.pep
LSSGASRPPPVLRPARPLPDCPSATTTAHNAIDLALAGAEERAILQHIDNYARDAGRRGHLQSPVLGSGVSAQERPDP

SEQ ID NO: 290752 - protein, 112 aa, Zea mays
  Clone ID: MRT4577_28256C.1.pep
ADEFGKMPQYFQRISMGKTLPAIVQYSALNEGAEVWHVQLGDEEKQVIINGILVIEGLARVESRGQTRVTDRDFYVQLQKEEEKAKHGRLCIWQYGAVPDSDEERLWANMLR

SEQ ID NO: 290753 - protein, 73 aa, Zea mays
  Clone ID: MRT4577_28257C.1.pep
LLQFIPEIPGFRLRIRLKIGLAKGGNKRGGGLTPQVGEKAISWGMKRIFQGFPPNLMDTPNFFFSRGRPKHFL

SEQ ID NO: 290754 - protein, 79 aa, Zea mays
  unsure (1)..(79): unsure at all Xaa locations
  Clone ID: MRT4577_28258C.1.pep
SRSPAAPGPAPRRCCFGGSSPLPWRSSPRRCFVRAPFGVRSVLAPVVLXFVAGGCVLRRSCGSPSVSVCVAGRGRRRRV

SEQ ID NO: 290755 - protein, 48 aa, Zea mays
  Clone ID: MRT4577_28259C.1.pep
CCCCSFCYLNRTPFNSSSVSIDRVRFFQRLASVFCLSRYAAVCYCVWL

SEQ ID NO: 290756 - protein, 1318 aa, Zea mays
  Clone ID: MRT4577_2825C.1.pep
MEPKGKGIVINDKEKESFVNELKDDKPTDSGSGHRRKEGKKKKTRRIKEIVYYDDSDESTSSQKDDDHNDYEQRKPVNSNFSFDYSRIPQSSNSHLLSIPLGKPPHFDGEDHGFWSHKMRSHLFSLHPSIWEIVDSGMHFNSSDSPIFINEQIHKNAQATTVLLASLCRDEYNKVSGLDNAKQIWDTLKISHEGNDATLLTKIELVEGELGRFAMIRGEEPTQTYNRLKTLINKIRSYGSTRWTDHDVVRLMLRSFTVLDPHLVNNIRENPRYTKMSPEEVLGKFVSGRMMIKEARYVDDALNGPINEPQPFALKASRSKEALPSKVAQIEAVGLNDEEMALIIKRFKTVLKGHKGQPSKTKTKGKRSCFKCGKIGHFIANCPDNDSDQEMGNKREKKKHYKKAKGEAHLGKEWDSDCSSSDSDNEGLAATAFNKSTLFPNERHTCLMAREKKVCTRNSTYASSSEDESSDEDEVDYSCLFKGLDRSKIDKINELIDALNEKNILLEKQEDLLYEEHDKFVEAQKSLALEIKRNEMLACEVSTCHDSISNLKSINDDLNAKLVEANKSNSCVEYVEICTRCKDIDINACSEHLVSISKLNDELASLNAQLKTSKSNFDKLKFARDAYTVGRHPSIKDGLGFKREAKNLTSHKAPIPTKEKGKAPMATSAKKNHAFLYHDRRQTRNAYRSYNEYDDFSHAMFASSSSYVHDRNVGRRDVVHNMPRRNVVNIPRKVNEPSTIYHALNASFAICRKDRKVYASGGSSWIIDSGCTNHMTGEKKMFTSYVKNKDSQDSIIFGDGNQGKVKGLGKIAISNEHSISNVFLVESLGYNLLSVSQLCNMGYNCLFKNVVGTKWVFRNKQDEHGVVTRNKARLVAKGYAQVAGLDFEETFAPVARIESIRILLAYATHHSFRLYQMDVKSAFLNGPIKEEVYVEQPPGFEDERYPDHVCKLSKALYGLKQAPRAWYECLRDFLIANAFKVGKADPTLFTKTCDGDLFVCQIYVDDIIFGSTNQKSCEEFSRVMTHKFEMSMMGKLNYFLGFQVKQLKDGTFISQTKYTQDLLKRFGMKDAKPAKTPMGTDGHTDLNKGGKSVDQKAYRSMIGSLLYLCASRPDIMLSVCMCARFQSDPKECHLVAVKRILRYLVATPCFGLWYPKGSTFDLVGYSDSDYAGCKVDRKSTSGTCQFLGRSLVSWNSKKQTSVALSTAEAEYAAGQCCAQLLWMRQTLRDFGYNLSKVPLLCDNESAIRMAENPVEHSRTKHIDIRHHFLRDHQQKGDIEVFHVSTENQLADIFTKPLDEKTFCRLRSELNVLDSRNLD

SEQ ID NO: 290757 - protein, 92 aa, Zea mays
  unsure (1)..(92): unsure at all Xaa locations
  Clone ID: MRT4577_28260C.1.pep
APSRESNPXSSSPGTTMVGPYPTMEGGWAHNLNDASPALRPGDPPRFQDYSVGGQSPCPAFYLIKAPFREAGVGAPISSRITTGIRLARSLK

SEQ ID NO: 290758 - protein, 54 aa, Zea mays
  Clone ID: MRT4577_28261C.1.pep
RWVQSLLSRYYMRVITYYKLPCVCLSQALCDFSFPEQPLMGRLAWYHWVQVRFL

SEQ ID NO: 290759 - protein, 79 aa, Zea mays
  Clone ID: MRT4577_28262C.1.pep
SPICPAVGSFQVWPASWHPFPADIGILDEVHSWILCSCNGLMVGRYMVSSDSQKAHQRASWIWRHIEGTSSVTFKRSYF

SEQ ID NO: 290760 - protein, 127 aa, Zea mays
  Clone ID: MRT4577_28263C.1.pep
VKIGFIPKIKVKKGPPPGPFNAQCPIFKKEPVNVSLETPKPSPFVKEGLPNGPPKLMGGPYDFVSGGFPPWKKLKTRVKAIFPAPRLLHFHKNIYYTILYSSGPPHMPPTNVNAPGPICFLPPQKKK

SEQ ID NO: 290761 - protein, 156 aa, Zea mays
  unsure (1)..(156): unsure at all Xaa locations
  Clone ID: MRT4577_28264C.1.pep
RHTTRAPRKGQGKEEFEPWRTRRTAAANPSCCAPASARASSANSPSPSPRRPSFRPHTXTPGPHPPLIPHPQPXPLRPPPSPAPPSRHPPPQPPXKPKAKRPRPPDPPPPPPFPPPPXMPLPPEKTMTGPLXAPXSPXAAAGPSPPATPGTAXPRA

SEQ ID NO: 290762 - protein, 105 aa, Zea mays
  Clone ID: MRT4577_28265C.1.pep
SRGCSKTLAMAGAACKGACLHGMGGRKKKGPHYFFFTPGGGPRGGFRSGPGTGKAGRAKFWGALLRSLPPLITPFGLSLLPGGGRPPFSLLRGARGAPGGGIFSP

SEQ ID NO: 290763 - protein, 91 aa, Zea mays
  Clone ID: MRT4577_28266C.1.pep
AFSIVGQRDKRGPPPKQLSWGKPGVSQAHYCKKPPSFPNLGRSKKKASSRKQGDENVDPLKWHARARNLGSPRSPVLFFFFFFFFFFFFFF

SEQ ID NO: 290764 - protein, 45 aa, Zea mays
  Clone ID: MRT4577_28267C.1.pep
FCFYHTIVSSQGIGAILLTAKTKNKGPETPRLRLEHGTKLMLANT

SEQ ID NO: 290765 - protein, 72 aa, Zea mays
  Clone ID: MRT4577_28268C.1.pep
GAEGPSHMGSEGARNRGTGGSAPGCGERGSIFAGGGCPIRFGMPGVHPAVALAFIYGELCLLYPPNLFFYRP

SEQ ID NO: 290766 - protein, 97 aa, Zea mays
  Clone ID: MRT4577_28269C.1.pep
TGRNTTAHQKRGPPKKQSTEAYFGLPHASKSLLIFLDLGATVRKAAACRARAASTVPRYSPLSSLSSYRHHVLARVRYNSRPHHSASDLSGGTPPPA

SEQ ID NO: 290767 - protein, 69 aa, Zea mays
  Clone ID: MRT4577_2826C.1.pep
LLLVFAFLHKNYTIFQLGEKGAQQTKCGQYPWCHSFPKLKNHYCCLSSFSITSDFSFELNKSCILASFF

SEQ ID NO: 290768 - protein, 340 aa, Zea mays
  Clone ID: MRT4577_28270C.1.pep
MRVLMTLIFRVRDKKTGEIVALKKVKVDKENGREGFPLTSLREINILLSFDHPSIVDVKEVVVGGHDDDTFMVMEYMEHDLKGVMEAMKQPYSQSEVKCLMLQLLEGVKYLHDNWVLHRDLKTSNLLLNNRGELKICDFGLSRQYGSLLKPYTQPVVTLWYRAPELLLGAKEYSTAIDMWSLGCIMAELLSKEPLFTGKSEIDQLDKIFRILGTPNEERWHGCSKLPGFKGNFVKRPYNRLRDKFPAVSFTGGLTLSEAGFDLLNRLLAYDPEKRISAADALNHEWFREVPLPKMKEFMPTFPALNEQDRRIKRYMKSPDPLVEQQMKEQGSIGDHGLFD

SEQ ID NO: 290769 - protein, 227 aa, Zea mays
  Clone ID: MRT4577_28271C.1.pep
MAAVRHGGYRSFDVARRREFDLERSRRSKEYRHSSRHRDSDRHRDGSRGREVPNGYIRHRSPYAPLMSQPSKRKDDKEPGEVSSDSGSESGGRPPVLREDGGLGVYRDGGALPASKKRKHSPGFHDTNVSKLRAKDEVWSRRGPDAIAAELPLPSPPPMSAVGGCSPMDPEVLVVPNDAERMDAITEGEEDCAKKKKKKKKKKYSALLPLLKENPIGRWQSFLLLHL

SEQ ID NO: 290770 - protein, 195 aa, Zea mays
  Clone ID: MRT4577_28272C.1.pep
GSLLKPYTQPVVTLWYRAPELLLGAKEYSTAIDMWSLGCIMAELLSKEPLFTGKSEIDQLDKIFRILGTPNEERWHGCSKLPGFKGNFVKRPYNRLRDKFPAVSFTGGLTLSEAGFDLLNRLLAYDPEKRISAADALNHEWFREVPLPKMKEFMPTFPALNEQDRRIKRYMKSPDPLVEQQMKEQGSIGDHGLFD

SEQ ID NO: 290771 - protein, 262 aa, Zea mays
  unsure (1)..(262): unsure at all Xaa locations
  Clone ID: MRT4577_28273C.1.pep
MAAAPAATSLLIRHNRNPHLLLLRAAISSSRALSQQPELSPDPTTGAPDPAGAAPLPPNPSTGSPLYSQNWRNPAAANPPSSLLPTVAAGXLLRSAAPHGRLLXDKPDAAGLKETFAKYMAEQRWEDMKLLFDHWVRSLDAATGKPNHPDVDLFNHYLRANLMTGAVPHEMLDLADHMREFELEPNSASYNLVLKSMVADKESYGAEKLIERMLQTGTVPDEESYNLGVGLLIRQNLVDSSLKDLDLMLKIGYTPSLTVFLI

SEQ ID NO: 290772 - protein, 83 aa, Zea mays
  Clone ID: MRT4577_28274C.1.pep
KKRWKKFVPPGKAWLEKRVSSCLQKTSQKKKKKKSTIKWGGVEKKKKKKSCVKFPRQLLRRAFLVFGKNLVWSSGIIKKPIPL

SEQ ID NO: 290773 - protein, 110 aa, Zea mays
  Clone ID: MRT4577_28275C.1.pep
MAAARHGGYRSFDVARRREFDLERSRRSKEYRHSSRHRDSDRHRDGSRVFVVPNGYICHRSPYAPPKSRPSKRKDDKEPGEVSSDSGSESGGRPPVLREDGGLGVCRDGG

SEQ ID NO: 290774 - protein, 101 aa, Zea mays
  unsure (1)..(101): unsure at all Xaa locations
  Clone ID: MRT4577_28276C.1.pep
ERMEVSAGLRXXPXAXAAXLRGXXFVFVSXXXVXXWGRAGPPFFQYKAXAXRDPQRKXGXXKKKKIFFFFFFFSFLXXGFLXXGGGGXGGXXGXGGGXXGG

SEQ ID NO: 290775 - protein, 122 aa, Zea mays
  unsure (1)..(122): unsure at all Xaa locations
  Clone ID: MRT4577_28277C.1.pep
VGEHCSLALSKRGKGVVGIDSFNSYYDPSLKKAQRALMASHDXFVVEGDIKDGRLLAKLLDVVPFTHVIHLAAQTDVRYAMKNPAEYVKSKVEGLVSLLEECTDAEPQSAVVKASSSSVYGL

SEQ ID NO: 290776 - protein, 86 aa, Zea mays
  Clone ID: MRT4577_28278C.1.pep
LCLGKCTFQQEHKIKLQSRLSKSQSRCCKGHGKFDKHRTKLTELGGGAPGLQGSLLASRSDSSGGGVYPSRTGRLAGVVMETGVGM

SEQ ID NO: 290777 - protein, 119 aa, Zea mays
  Clone ID: MRT4577_28279C.1.pep
IAVRCVLENVCVASVDLFSQNSAVATAAREDGIQCVTLLTYLAAAQIYRTNRSRHYRVMVLDNAHHSTPAGFVSFFLLFTCLPVLHGLSPSPLRIVAAYIHLPSSSFVCFRFFGSTNTS

SEQ ID NO: 290778 - protein, 991 aa, Zea mays
  unsure (1)..(991): unsure at all Xaa locations
  Clone ID: MRT4577_2827C.1.pep
MDPKGKGIVINDKEKESFVNEPKDDKTTDLGSGHKRKDGKKKKTRRIKDIVYYDDSDESTSSQKDNDDNDYERRKPVNSNFSFDYSRIPQSTNAHSLSIPLGKPPHFDGEDYGFWSHKMRSHLFSLHPSIWEIVESGMKFDSSDSPMFINEQIHRNAQATTVLLASLCRDEYHKVSGLDNAKQIWDTLRISHEGNDVTLLTKMELVEGELGRFTMIRGEEPTQTYNRLKTLINKIRSYRSTQWTDHDVVRLMLRSFTVLDPHLVNNICENPRYTKMSPEEVLGKFVSGRMMIKEARYVDDALNGPIHEPQPIALKATRSKEALPSKVAQVEAAGLNDEEMALIIKRFKTALKGRKGQPSKTKTKGKRSCFKCGKVGHFIANCPDNDSDQEEGNKREKKKNYKKAKGEEHLGKEWDSDCSSSDSDNEGLAATAFNKSSLFPNEHHTCLMAREKKGLDRAKVDKINELIDALNDKNRLLEKQEDLLYDEHDKFVEAKKSLALEIKRNEMLSCELSTCHDSISSLKSINDDLTAKLEIANKSTSCVEHVVVCTRCKDFNIDACSEHLVSISKLNDEVASLNAQLKTSKSEFDKLKFARDAYTIGRHPSIKDGLGFKREAKNLTSHKAPIPAKEKGKAPMASSTKRNHAFMYHDRRQSNKSCNAYDAFDSHAMFASSSSYMHGKDMSRRHFVHMPRRNVVNVPRNVNEPSTIYHALNASFAICRKDRKIVARNIGAKCKGDKTCIWVPKTIVTNLVGPNKSWVYASGGSSWIIDSGCTNHMTGEKKMFTSYVKNKDSQDSIIFGDGNQGKDKSETQGTLKRFLRRAQNEFELKVKKIRSDNGSEFKNLQVEEFLEEEGIKHEFSAPYTPQQNGVVERKNRTLIDMARTMLGEFKTPECFWSEAVNTACHAINRVYLHRLLKKTSYELLTGNKPNXEEDVPTAAIRTMAIGEVRPQEQDERDQPSSSTTVHPPPQDDEXVHQKETCDQGGAQDVHV

SEQ ID NO: 290779 - protein, 82 aa, Zea mays
  Clone ID: MRT4577_28280C.1.pep
PRVRPRVRGRIVRARCLPGDGILTVSEKRHPDFKRMGDDLVLKAEVPLMDALTDCALSIRLLCGWKVSCSIPDEVVRTCYEK

SEQ ID NO: 290780 - protein, 74 aa, Zea mays
  unsure (1)..(74): unsure at all Xaa locations
  Clone ID: MRT4577_28281C.1.pep
IFGGNPRTRYVXKGDLFMKTAGNSPTRGQKGTTAQINRGDSPNETKVTNTGGKHTNGPKCEQGEKRERHQPKRK

SEQ ID NO: 290781 - protein, 141 aa, Zea mays
  unsure (1)..(141): unsure at all Xaa locations
  Clone ID: MRT4577_28282C.1.pep
MGYRAGDDYDYLFKGXLIGDSGVGKWNLLSRFTRGGLRLXSKSTIGVEFATRSIHVEDKVVKAQIWDTGGQERDXAITSAYYLGAGGALGVYDVTRDVTFXNVERGMRELRDHTDANIGMMLVGNKGDLRHXRGXPTEDAK

SEQ ID NO: 290782 - protein, 48 aa, Zea mays
  unsure (1)..(48): unsure at all Xaa locations
  Clone ID: MRT4577_28283C.1.pep
LARLLYFFVCVTRSMLFVFPFVFTTENVXQPNKISLFFAKKNQTQTKA

SEQ ID NO: 290783 - protein, 53 aa, Zea mays
  Clone ID: MRT4577_28284C.1.pep
NMQNASCKCRSLSPRVSCTHENCWFLSTPSDDQLHLAWRPTRLPTRPRTYVRT

SEQ ID NO: 290784 - protein, 154 aa, Zea mays
  unsure (1)..(154): unsure at all Xaa locations
  Clone ID: MRT4577_28285C.1.pep
MFDAGSRASLADHWGPDLLRGSPVLCPHETLHSLGDQCFFSTHTQPGWRPKIKREIXTMKLIKHPNMVQLHEVMASRTKIYMVLEFVDGGXNSGRLGEDESRIYFHQLINAIDYCHSRGVYHRDLKPQNLLLDSNGALKVSNFGLSAFAPQTNV

SEQ ID NO: 290785 - protein, 123 aa, Zea mays
  Clone ID: MRT4577_28286C.1.pep
PKDKKIKIKKCFSLPGGPFKGAIFEFFLPLGGVSPFFLGGPFPLLGGLFPFLWPAFYTFAFGKPLVFPTFFAWGPSPFPQLGFLQMGPPRSPFQKFGHLDWQCAPPFPGLLSPGVVGVPPTVP

SEQ ID NO: 290786 - protein, 151 aa, Zea mays
  Clone ID: MRT4577_28287C.1.pep
GLALVARCACRRGGGASVSVSATTSGGRSSAQAPSGLEKAAIEALPTVSVSSSLKQASRRDAADKEECAICLAAFVEGDQLRVLPRCAHGFHAACVDTWLAAHASCPSCRATIVSVVSPLCRRCGAACCDQQEETPMAAPEPAAAGRGLHA

SEQ ID NO: 290787 - protein, 63 aa, Zea mays
  Clone ID: MRT4577_28288C.1.pep
TLRIWLRFDHRKIREVSSESARLTHCIERPYKHQVVDIYISYTSKVLPNYNISKREAQLSRIC

SEQ ID NO: 290788 - protein, 84 aa, Zea mays
  Clone ID: MRT4577_28289C.1.pep
HVHETTWCMGARYTPGLILFLLGTTLKPMKNRAGMLHDLPFEIFQENNKARLLMFEWEILMVKGCLFGCLKKSLRHCWRSSFLT

SEQ ID NO: 290789 - protein, 99 aa, Zea mays
  Clone ID: MRT4577_2828C.1.pep
MTTTTTTLPTGRAVALLLLLLATTATEAANPCNPAQLTPCAGPALFGGAVPPACCAQLRAQQGCLCGYARSPNYGSYIRSPNAARLFAICNLPMPRCRY

SEQ ID NO: 290790 - protein, 65 aa, Zea mays
  Clone ID: MRT4577_28290C.1.pep
RVRTQQPASQQSCCCYCVQPVGGARRASLAAQQPCSELRSVCNLRAYRMSTQMSSPNADTPLLLL

SEQ ID NO: 290791 - protein, 74 aa, Zea mays
  Clone ID: MRT4577_28291C.1.pep
FGSRDAGATVFSPFLSLLSRVAQSRTGLFATTACCAPEEITDAGAQTPRLKDIAGSIEPDTQNYDTRYDPRLRL

SEQ ID NO: 290792 - protein, 64 aa, Zea mays
  Clone ID: MRT4577_28292C.1.pep
ASPAGRQWRIHSIIPRKRKRKMKMNRKRNPSPSLLQLVERLQQDGPELGEVDGDVLLHDGLSER

SEQ ID NO: 290793 - protein, 47 aa, Zea mays
  Clone ID: MRT4577_28293C.1.pep
SCSVRRWFYHGPLRWTRHQEEPVTAGLACYCHITGHNRLPLLAGFRH

SEQ ID NO: 290794 - protein, 55 aa, Zea mays
  Clone ID: MRT4577_28294C.1.pep
PCQHRCCSHCCLRCQPRPLSGPCLRVRLQFSGCLCWHVLRPSPAPSLWVFCPLSG

SEQ ID NO: 290795 - protein, 277 aa, Zea mays
  unsure (1)..(277): unsure at all Xaa locations
  Clone ID: MRT4577_28295C.1.pep
MRPLIHLHFTSKFLLFLSMATDAQHQRHSRNGGVHTGHHFLIVAYGIQSHLNPCRVLAHRLARXTASTAPGPXATVSLPVSAHRRMFPSSGDVDNDDKATDGVVSYAPYSDGLDDGSMARDGEARARSRQATFESLSAVVATLAARGRPVTCVVCSMVLPAALDVAREHGIPLAVYWIQPATVLAAYYHYFHGHGDLLASHAADPAYEVSLPGLHRPLRIRDFPSFLVDTTGSELAKVFNEAARELFEHLGDHGCTKVLVNTFDELEPAALAAMKEH

SEQ ID NO: 290796 - protein, 157 aa, Zea mays
  Clone ID: MRT4577_28296C.1.pep
MGRKLGLDRVLDCFSLSLCSSACACVHSVEEEEQEDEDERKALVSSQLEELVKLSRDLVGGAAKTLAFHLEPKTVELKVSMHCYGCAKKVQKHISKMDGVTSFEVDLEKKKVVVIGDVTPYEVLASISKVKFAELWVAPQQPQAASRCGKAPAGGVV

SEQ ID NO: 290797 - protein, 159 aa, Zea mays
  Clone ID: MRT4577_28297C.1.pep
MGRKLGLDRVLDCFSLSLCSSACACVHSVEEEEEEDEDERKALVSSQLEELVKLSRDLVGGAAKTLAFHLEPKTVELKVSMHCYGCAKKVQKHISKMDGVTSFEVDLEKKKVVVIGDVTPYEVLASISKVKFAELWVGPQPQQPQAASRCGKAHAGGVV

SEQ ID NO: 290798 - protein, 97 aa, Zea mays
  unsure (1)..(97): unsure at all Xaa locations
  Clone ID: MRT4577_28298C.1.pep
LAWYQMLWRNMCSSDMPFSARASLLVSRAPFRLEHFLPFLVRSQXKSXXXXXXGXPAPAXRPXXIXXLEXHVXXAEXXERTLEEXLEAKGXXLAXLK

SEQ ID NO: 290799 - protein, 70 aa, Zea mays
  Clone ID: MRT4577_28299C.1.pep
GPFTRTPPKANQGGKQGGETRGASLVTNTAAEKRSPESDAPINWNKHREQLSALEGKTKARKKKSGPFLI

SEQ ID NO: 290800 - protein, 900 aa, Zea mays
  Clone ID: MRT4577_2829C.1.pep
MDPKGKGIVINDKEKESFVNEPKDDKSNDSGSGHRRKDGKKKKTRRIKEIVYYDSDESSSSQRDDDHNDYEQRKPVNSNFSFDYSRIPQSSNSHLLSIPLGKPPHFDGEDYGFWSHKMRSHLFSLHPSIWEIVDSGMHFNSSDSPIFINEQIHKNAQATTVLLASLCRDEYNKVSGLDNAKQIWDTLKISHEGNDATLLTKMELVEGELGRFAMIRGEEPTQTYNRLKTLINKIRSYGSTRWTDHDVVRLMLRSFTVLDPHLVNNIRENPRYTKMTPEEVLGKFVSGRMMIKEARYVDDALNGPINEHQPLALKATRSKEALPSKVAQIEAAGLNDEEMALIIKRFKTVLKGHKGQPSKTKTKGKRSCFKCGKIGHFIANCPDNDSDQEQGNKREKKKNYKKAKGEAHIGKEWDSDCSSDSDNEGLAATAFNKSSLFPNERHTCLMAREKKVITRNDVTYDSSSDDESSDDEIDYSSLFKGLDRNKIDKINELIDALNEKDRLLEKQEDLLYEEHDKFVEAQKSLALEIKRNEMLSCELSTCHDSISSLKSINDDLNAKLEKSSKSTSCVEHVVICTRCKDFDIDACSEHLVSISKLNDEVASLNAQLKASKSEFDKLKFARDAYTVGRHPSIKDGLGFKREAKNLTSHKAPIYVKEKGKAPMASSAKKNHAFLYYDRRHARNAYNDFDSHAYDSYAMTASSSHVVHDRKVYASGGSSWIIDSGCTNHMTGEKKMFTSYVKNKDSQDSIIFGDGNQGKDKTDTQGTLKRFLRRAQNEFELKVKKIRSDNGSEFKNLQVEKYLEEEGIKHEFSAPYTPQQNGVVERKNRTLIDMARTRLGEFKMPERFWSEAVNTACHAINRVYLHRLLKKTSYEHLTGNKPNGSYFRVFGSKGYILVKKG

SEQ ID NO: 290801 - protein, 43 aa, Zea mays
  Clone ID: MRT4577_282C.1.pep
CMVGTKVGPLKFSDICYPWVCLAYHVMELNVSDVLQNKCWLFN

SEQ ID NO: 290802 - protein, 128 aa, Zea mays
  Clone ID: MRT4577_28300C.1.pep
FSGASHGKKHHNNTNKARKIFLHKQTKNTKKYPSIPAQIETASQPTIGQTQQEQNLQEIGKISRSRGISARFVMQAIPSKEAPPEGEQEGRGENAHLLNNERAEEDHGSSSGPCKEDPKHGDLGPPPD

SEQ ID NO: 290803 - protein, 69 aa, Zea mays
  Clone ID: MRT4577_28301C.1.pep
LRYARVAILASIGRTDVPDRFALLLRRKAADRVPAHNENQRLVHPAKPGEANATARDYRERRQPQKGTN

SEQ ID NO: 290804 - protein, 320 aa, Zea mays
  Clone ID: MRT4577_28302C.1.pep
MDQAAEESCVPPGFRFHPTEEELVGYYLARKVASQRIDLDIIQEVDLYRIEPWDLQERCKPQHAGGGHDEQTQEWYFFSYKDRKYPSGTRTNRATAAGFWKATGRDKPVLSSSTRTTRCSRVIGMRKTLVFYKGRAPNGRKSDWIMHEYRLQSNEHAPAQEEGWVVCRAFQKPIPNQRPFFPTSYAGYYDHNLSTTARLHVDGDRHFLAGSSAAAAALLQQPPGLAGSSFPQLYSDDDLESKKQLLSIPPLESPTAMACCSDAGGYAQRSSYDEHEMMMMMIQQGGGGGEQAAAAIDWNFLDSLLSATSQLHGPSGSLLQ

SEQ ID NO: 290805 - protein, 116 aa, Zea mays
  unsure (1)..(116): unsure at all Xaa locations
  Clone ID: MRT4577_28303C.1.pep
THQAERTSNDLTTTAAKRLALLAVLAVFVSGTNAVIIIQCXLVASGVITQLLPPATSMGCEHLAVEADMLQQAVVASGLQQPHCELLQQSLSHLTILAVITQQQQQLLPALMHLVM

SEQ ID NO: 290806 - protein, 99 aa, Zea mays
  Clone ID: MRT4577_28304C.1.pep
SCGPAPFVSSPPPPRGLRPRAAGECRWLPPRQRSSTAARRGQVTKKRRWRGGMMPRLCRRSSRMSRCGIRRNASRSCSPDACPNASLTAARSCSPHSMP

SEQ ID NO: 290807 - protein, 59 aa, Zea mays
  Clone ID: MRT4577_28305C.1.pep
HSLLSCRVSSIGLEVHPSLRSFSVLYVLLHSASTEFFRVSVCWIFGIQYVDNIRDSYCW

SEQ ID NO: 290808 - protein, 217 aa, Zea mays
  Clone ID: MRT4577_28306C.1.pep
MPEEAGNDGTGCFYFAGMVSFLVLVFGFLILVGAPEPGIFDVWVENGTLHAMDMVDSSSSNSTLTYSLSAVYGFRNKNYHRDAERVAKLAVAPMYGGQQLGPGSSLPAAFRVGYWETATVPWDVRGEQPAGAVVARTYADDAARGYYAIQVKLSLGLGGLRWCDCSCTLYFFAPLLPPSSSSPPRGVPNIFDGDDCWTTCKTSVLHDAEHAKQIKEQ

SEQ ID NO: 290809 - protein, 365 aa, Zea mays
  Clone ID: MRT4577_28307C.1.pep
MVAVAVDGLIRGADAVPAAEREAVRAAAAEAAAKGGEGESGKEEVREYESDMRKLEELLSKLNPSAEEFVPQSRRRVDGGAPRLSADAPVFVSPAIDYYARHHQLPPPPLLQQQQPMHVLQFVGGVGGVGMGGGGGMDSSSDGSANGQPNRRRRNGFIQGRRRMMGARPRRADREDSVRRTVYVSDVDQHVTEQKLAEVFSTCGQVVDCRICGDPNSVLRFAFIEFADDVAAQAALALGGTVLGFYPVKVLPSKTAILPVNPKFLPHTDDEKEMVSRTVYCTNIDKKIAEDEVKQFFEGTCGEVSRLRLLGDYVHSTCIAFVEFVQADSAILALNCSGIVLGTLPVRVSPSKTPVRSRSPRVTSY

SEQ ID NO: 290810 - protein, 86 aa, Zea mays
  Clone ID: MRT4577_28308C.1.pep
EGTCGEVSRLRLLGDYVHSTCIVNVEFVQADSAILALNCSGIVLGTLPVRQEHIFCMCSEVLIMVRVPVSHVFLLTLCSVLLVFAG

SEQ ID NO: 290811 - protein, 212 aa, Zea mays
  unsure (1)..(212): unsure at all Xaa locations
  Clone ID: MRT4577_28309C.1.pep
FLVPMGGSADPEAPSPSPTKPSPSSADGKPPRRCVQSKLSWGLVKPAGGGREGGGKGGGGEAGRGDAEAVPLVPAAGEAAATEVREGLEKGKKKRKPRKSEDGKKGSSSKQKQGQDQSNKDGVILVDESPQKKQRKGRKQDAILKEPNASRKRCKTSEAPDGPGSCQQLHISQIEASSPVAAPVIIDVDLMSTPSKAGHANSIDQDISXVES

SEQ ID NO: 290812 - protein, 37 aa, Zea mays
  Clone ID: MRT4577_2830C.1.pep
CRHTFSKSGLERETQAVSTYIHLSIIRFEALLLEQQL

SEQ ID NO: 290813 - protein, 238 aa, Zea mays
  unsure (1)..(238): unsure at all Xaa locations
  Clone ID: MRT4577_28310C.1.pep
TPRRRSSCRSPAASWTAGLLQESFSTRSCSSNLLHRLTLGFAPRRRRHDAAAAAAADARAAVCGWRRRGWHGWXGGGMDSSSDGSANGQPNRRRRNGFIQGRRRMMGARPRRADREDSVRRTVYVSDVDQHVTEQKLAEVFSTCGQVVDCRICGDPNSVLRFAFIEFADDVAAQAALALGGTVLGFYPVKVLPSKTAILPVNPKFLPHTDDEKEMVSRTVYCTNIDKKIAEDEVKQFF

SEQ ID NO: 290814 - protein, 78 aa, Zea mays
  Clone ID: MRT4577_28311C.1.pep
DIQPPTKYPLANREFETRLDTREWIFTWLERTLSSFWISPAPWRPATERTDAPGQCLAAPPLRCLGRAEDSPDPSKVY

SEQ ID NO: 290815 - protein, 98 aa, Zea mays
  Clone ID: MRT4577_28312C.1.pep
KAAPPASSCRSHTPSPPPSPIPPHRPWPPPPQLPPSPLPSPPPARRPHRGSGHPPPRQPSPLRRAAPIRSRSPPLTENWRVNRIENLFIIIGTVEGPK

SEQ ID NO: 290816 - protein, 108 aa, Zea mays
  unsure (1)..(108): unsure at all Xaa locations
  Clone ID: MRT4577_28313C.1.pep
LLYTFNPWLITVCRPKKKKKAPRARPRGRVPAHWRPGXXXXXXXPRPPPPPPPPPPPRXPPPXPPPPPPPPXPPXPPPPPPPPPPPXPPPXPPPPPPPPPXPPPPPPP

SEQ ID NO: 290817 - protein, 110 aa, Zea mays
  Clone ID: MRT4577_28314C.1.pep
TYTIEILTGLERPGGGDEFNKYYILSALSYPWIGELVWMFALVLLSINPKPIAVPFSHVMFNFPKNCVLHFIYMYQIWTLKLKQAFLFNSCCFFISFISKGMSRSISTKI

SEQ ID NO: 290818 - protein, 133 aa, Zea mays
  Clone ID: MRT4577_28315C.1.pep
AVVTTQSTRGTHGTKHLHDHLKICVLRKIKLTSQNKTMSQSSLRFSSQEGGKVSVESYTFDPEVARKELAAMIALHEYPLCIAEHIGFRRFVSACQPLFKMVSRNTIRKDIMDAYTKKKKKKKKKVLCVVTTA

SEQ ID NO: 290819 - protein, 87 aa, Zea mays
  unsure (1)..(87): unsure at all Xaa locations
  Clone ID: MRT4577_28316C.1.pep
PTEMTEERVRAYNGTDPLKAIYVYNRCKAFKVRFGRDFXGTGDAYARIAGXDRARXLSKMLNDEADVSVDLSGLMDKEIEEVVDCHT

SEQ ID NO: 290820 - protein, 126 aa, Zea mays
  unsure (1)..(126): unsure at all Xaa locations
  Clone ID: MRT4577_28317C.1.pep
YSPSFLVFITLRDTDIVWYINRLLTPTLLNAAMTXLRISDSSTTCSTELTILRALEASSPTKGXTPLSFSLLAPTYASKYMLIIARVRLHQPPTWPLDFMXLNSRTXLNPAGIIACFSPMYDASYF

SEQ ID NO: 290821 - protein, 64 aa, Zea mays
  Clone ID: MRT4577_28318C.1.pep
PCSDNPSTQSEMVKASRTHQSNVCSILFSLSLTQQRTLHGTWISVPCIFSNVASLLWPIEKQRT

SEQ ID NO: 290822 - protein, 84 aa, Zea mays
  Clone ID: MRT4577_28319C.1.pep
MQSAMFLAVQHDCRPMDKSAGSGHKSEEKREKMKRTLLKDWKTRLSYFLQNSSTPGKPKTGKKSKQQAFIKPSPEEAQLWSEAL

SEQ ID NO: 290823 - protein, 87 aa, Zea mays
  Clone ID: MRT4577_2831C.1.pep
PERPTRPTRPTTRSTSSMRRATYLQMSWVRGISTLTSSDATSNAPQHGTFHIMQRMRLKVRFILDYSTLHTLTPIHDHVVNNLKAGY

SEQ ID NO: 290824 - protein, 81 aa, Zea mays
  unsure (1)..(81): unsure at all Xaa locations
  Clone ID: MRT4577_28320C.1.pep
LPPTFHLPPPVHLPPPVHLAVLPLPPPXHLPPPPCHYPTQPSRPHPYPQPHPCPCQQPHPSPCHLHVTCRVXHTPILGHCV

SEQ ID NO: 290825 - protein, 119 aa, Zea mays
  Clone ID: MRT4577_28321C.1.pep
MATSQIISKRRKFVADGVFYAELSEFFSRTLSSEGYSGCEVRVTHQRTEVIIRATHTQEVLGEKGRRIRELTSLVQKRFRFPEGSVELYAEKVQNRGLDAVAQCESLRYKFLGGLGRSS

SEQ ID NO: 290826 - protein, 44 aa, Zea mays
  Clone ID: MRT4577_28322C.1.pep
RNQKMCLHVEIPSNVALYVKYPQMIFIKINLQFFYTSFVHQFVL

SEQ ID NO: 290827 - protein, 94 aa, Zea mays
  Clone ID: MRT4577_28323C.1.pep
MAAALQVFVAVVLMASALVSAEIGKKECTDVNYDCNRFPGSRKCGDSCRDKARAEGSSNYASACEPAVAPFKCCCTVKDPHHPWPPSSSSKTNA

SEQ ID NO: 290828 - protein, 80 aa, Zea mays
  Clone ID: MRT4577_28324C.1.pep
EVCPVHVWDRAGLGVVGQVCVLHGVYTLSPWGRLRMRIIICSGRRLGDRLNQQESPSPRDRGSPGVKRKIALAVDECVRS

SEQ ID NO: 290829 - protein, 353 aa, Zea mays
  Clone ID: MRT4577_28325C.1.pep
MRHGIVETHLKQQAPERPAPAPPEKYGVNAAGDKPRRPGCLARRFFSPSPRNFLGSTPYYTTGVFPFGCHSVLSQPAAGAMLYIVGLGLGDERDITVRGLDAVRSCSKIYMEAYTSLLSLGLDPAALANLEKLYGKEITVADREMVEERVDQVLSEAADTDVAFLVVGDPFGATTHTDLVVRAKKMGVEVKVIHNASVMNAIGVCGLQLYRYGETISIPFFTDEWRPDSFYEKIQNNRQLGLHTLCLLDIRVKEPTWESLARGKKVYEPPRFMTVNTAISQLFEVEEARGGYAYRRETLCIGVARLGSDDQKIVAGPMEKLLDVDFGPPLHCLIIVGETHPLEEEMLEFYMIK

SEQ ID NO: 290830 - protein, 209 aa, Zea mays
  Clone ID: MRT4577_28326C.1.pep
AEFGRLKKERDERMNRLISSRKHERETVRKLMFYLNLEEQRIEMLREEEEARKREAEERRKREEAERKAKLDAIAEKQRLREIELEEKAKATREKLLKGSEAVRAPDSAPVAQPPRESAAAPAAAAAAAAPAPAPSKYIPKFKRGGDSSSIPSGSRDEDRWGSRGPLRQDGPPARLDAPSSRQDTDRWRGSRFPSNSTSSSSTWSRSRN

SEQ ID NO: 290831 - protein, 83 aa, Zea mays
  Clone ID: MRT4577_28327C.1.pep
GTPRAGRDTPSIRNHRNRISLFAAAPDHAASAIPGGSRPCLPSLTAPRPSEHVSRAIRRNNTCAIVTYTTTAGGSYFREPRTY

SEQ ID NO: 290832 - protein, 60 aa, Zea mays
  Clone ID: MRT4577_28328C.1.pep
PMSYARAMGCSFTKGRTDVLTSKVTLLTHNVEAAQGGDAMDERSCMLHSYTLLPNLRHCA

SEQ ID NO: 290833 - protein, 94 aa, Zea mays
  Clone ID: MRT4577_28329C.1.pep
FWTAAGNASLRAPWRPPPLRVPASGPGWWNQQVSDISFPRMRWVQRKFIIFKLWADAKRFPQGVAPECKLRLRNQVCLDVRWASKPSPIPSCGK

SEQ ID NO: 290834 - protein, 114 aa, Zea mays
  unsure (1)..(114): unsure at all Xaa locations
  Clone ID: MRT4577_2832C.1.pep
SSDAERLAYQDLLSGDQLLVDSFTFKELXNGALWEVPGKWVTQGPVDVDIGPNPSPAGGVDECVDDTSVKVXVDIVDTFRIQEQPSFDMKSFVTYIKKYIKNLTALLEPEKADE

SEQ ID NO: 290835 - protein, 119 aa, Zea mays
  Clone ID: MRT4577_28330C.1.pep
YQTACKPALHKPQAKSRGSVSRSALRTRTPRSWAAAGRTTARAAAAGPRSSGCGGGEAQGPPARRPGQDRRRGRLRGLLLDVRGRIDSIDVGLKSNRQDRQPIGTLPDGTIGNTDLIPA

SEQ ID NO: 290836 - protein, 138 aa, Zea mays
  unsure (1)..(138): unsure at all Xaa locations
  Clone ID: MRT4577_28331C.1.pep
ERGWDWPLWGGPKPNRGGPPLGGPTIQQNPKGKTRHPLKKKGNPRPKGHFLKNRGGKSPQKGPAPPKQKKLGGPPQNPPPRGPRPPRGPPPQRPRRQSPPPHGAQEXFISPGDPPPPPKXPGPPWEKKPPGGQTWGEG

SEQ ID NO: 290837 - protein, 117 aa, Zea mays
  unsure (1)..(117): unsure at all Xaa locations
  Clone ID: MRT4577_28332C.1.pep
CSALCPLLGPWGSFPLLCALLPSLAWSWSSLWLCVPSRVPFCSRRWSWGGFVSLLLSFSGLSSGLLLLCAPLFRLRRCLSLVCRWGLPGSFPMLPPSPLVVWFLGXRVGRPGGSGPV

SEQ ID NO: 290838 - protein, 55 aa, Zea mays
  Clone ID: MRT4577_28333C.1.pep
EIQATTPRVRDNANLWWTHFSVKGAHVVVVFFLLFYFYELLTVFLVHTKKKTHIH

SEQ ID NO: 290839 - protein, 66 aa, Zea mays
  Clone ID: MRT4577_28334C.1.pep
FVCPKGRGPCVLRLYVQGKEVNGAGINSSLAVHQDTDGRATDVTLAWTVALGAPFTFATTSEHVYK

SEQ ID NO: 290840 - protein, 88 aa, Zea mays
  Clone ID: MRT4577_28335C.1.pep
LQRQKLKQFNRGGGKETPKLYPGHKKGVLNTKTGVDSQTNLGQQISFPPPRGRNNCPPWGGPPWNPFPGGPGPRGPRKNPPPPCPNRR

SEQ ID NO: 290841 - protein, 252 aa, Zea mays
  unsure (1)..(252): unsure at all Xaa locations
  Clone ID: MRT4577_28336C.1.pep
MSGLPPAARPLLPSPCASSSVVRAKAASACCSSLKQSRPGRSAAAPSTVAARQAAPLLAAALVLVAAPPGLPAAISPAFAQPVSEGAALFRKACIGCHDMGGNILQPGATLFLKDLERXPRNLSLTSGKLKNVLRFRRSRLLTRRQQTCCRNGVATEEELYNITYYGKGRMPXVLPSAVTNPFVLQSAKSYLFMRSKWVLICFVLXGFGEKCTPRGQCTFGPRLSEDDIKILASFVKSQAQNGWPKIEGDGD

SEQ ID NO: 290842 - protein, 52 aa, Zea mays
  Clone ID: MRT4577_28337C.1.pep
WILDCISNVATTAGSYNLKTYNLCCEAHKFGKGIELPLALLGMAGMNLLHIF

SEQ ID NO: 290843 - protein, 61 aa, Zea mays
  Clone ID: MRT4577_28338C.1.pep
ALMSLSNTTVYMWVTGDTYGHVLDHILMKTFIIDVADPTLMKTSQVLYTHAVYDIALLTLT

SEQ ID NO: 290844 - protein, 74 aa, Zea mays
  Clone ID: MRT4577_28339C.1.pep
GSQHLSTRSPSQTHGRTRHRHGLGDRLMRATGNSEENGEEEYAAISTRDDHADGIRLHSGISSLVRSESRPASR

SEQ ID NO: 290845 - protein, 50 aa, Zea mays
  Clone ID: MRT4577_2833C.1.pep
MGKKRTKGKTVPIDDSSETLEPVCRHIRKGLEQGNLKKALVTVEWNICQD

SEQ ID NO: 290846 - protein, 114 aa, Zea mays
  Clone ID: MRT4577_28340C.1.pep
YRLSRELLVAVASGWDKHVVIIDKIIPQAWKVRYLFLIFYVDSSIPSTCITASNYLYVQQSGSNMYLFCILHHCFSHYTVLVNNHSDAYQKLFTVWFEHILILYITPLFFIALK

SEQ ID NO: 290847 - protein, 121 aa, Zea mays
  Clone ID: MRT4577_28341C.1.pep
PSRRQFFRRRIHSTRLPRMIRVTTTGPRYLRTRTSVVETSKQRLRKRSLRNILNGRPHHRILLRLTTHHHHVTPLHSLPRFPLSPAHYLALALLLAKEKEPYARPAHPQAHQQAHKSDQRF

SEQ ID NO: 290848 - protein, 71 aa, Zea mays
  Clone ID: MRT4577_28342C.1.pep
GTQINIDLCIYSQVEAESSSHVRFEQSFQVISAVATPPSSSSATPATPPFSASTTTRQFFKSSVHKLVVHS

SEQ ID NO: 290849 - protein, 48 aa, Zea mays
  Clone ID: MRT4577_28343C.1.pep
MKVLIVALALLAFVVCVVSSTSGGCGCQTPLFHLPPLFYMSSPFYLSL

SEQ ID NO: 290850 - protein, 55 aa, Zea mays
  Clone ID: MRT4577_28344C.1.pep
NDSPFQNSARIIPIKDGGLLYLTRYQCTIPSRPRAHAPNALNNTTHAVLLNLTLF

SEQ ID NO: 290851 - protein, 38 aa, Zea mays
  Clone ID: MRT4577_28345C.1.pep
STCQLQGCRSSWPRMCAKPSDQVHMEIGIIIRLKLYRG

SEQ ID NO: 290852 - protein, 80 aa, Zea mays
  Clone ID: MRT4577_28346C.1.pep
RLTRSLFRESKTSILELLFLAQQIGACHVWTLPLVEASVWSCTAAPVAVLASREGEGSLVDARSRRPVEVCAFFFFPPAG

SEQ ID NO: 290853 - protein, 305 aa, Zea mays
  Clone ID: MRT4577_28347C.1.pep
MAYPRCRGVRGTPGCKGCLYMTEQTAAQFGKRKQWIMCPTCRQRTDIENIAFVVEKPWDKHEKSIEDLAESTISVQGSYGTKFEAVTRRILRITSTDGTAKVLVFSSWNDVLDVLEHSLAANNISYVRMKGGRKSQAALSQFKGQESNINVDKVNRAACKMQPVQVLLMLIQHGANGLNLLEAQHVILVEPLLNPAAEAQAISRIHRVGQDKSTFVHRFIVKKTIEESIYKLNRSRAVCSTINRKSKNFKDEPVLTLKDVESLFPMAGPDEPLEQADQNYGDSLRSLPPSVAAGLAAERRRLMEQ

SEQ ID NO: 290854 - protein, 52 aa, Zea mays
  Clone ID: MRT4577_28348C.1.pep
NIVPTMFFYNITALLMLAARFHVKCCLPPPIFPQCITMSLYCISFLSLVPSH

SEQ ID NO: 290855 - protein, 56 aa, Zea mays
  Clone ID: MRT4577_28349C.1.pep
NKMPLGAVRERGPAGLDQSQFLFMPSCIAAAWVFVSLAIRYSLHYNVSYRWSISSE

SEQ ID NO: 290856 - protein, 119 aa, Zea mays
  Clone ID: MRT4577_2834C.1.pep
PAPPEWQARPLGRQHGQGPAPAVGRPGRLGGTARSTAPRRGCLRGGCRHQHRPQRLNATRNWQPARGPPPPKGRRNVPRGQKRPVFAERVSQYEGASAWLDKQGASPTSSTGGPMSSST

SEQ ID NO: 290857 - protein, 55 aa, Zea mays
  unsure (1)..(55): unsure at all Xaa locations
  Clone ID: MRT4577_28350C.1.pep
TFLLHRISGLSSLDSCHLPRGPASTAACRLAARSPNSIRLFDLXXXXLXIRRGGY

SEQ ID NO: 290858 - protein, 129 aa, Zea mays
  unsure (1)..(129): unsure at all Xaa locations
  Clone ID: MRT4577_28351C.1.pep
SSHKSPSSLPRPSSPXSETTTTGGGLVSSITAAPSSVLSSITGSASSSASSESSSASSAASSAASESASSVSSSLSSASSAASSSASSVSSSLSSAASSASSASSSGSAAMATALPGLLGAAGLVAALL

SEQ ID NO: 290859 - protein, 71 aa, Zea mays
  Clone ID: MRT4577_28352C.1.pep
LPMLFEVKYYNLVGAYLNRKMTYRGKFYVITGKRRPLILAPIYHCVEFVLLKSPEGFFLKKTGLTRSKSFL

SEQ ID NO: 290860 - protein, 68 aa, Zea mays
  Clone ID: MRT4577_28353C.1.pep
SQKKNNLRFCIIARFLSYLVENCITDYIISWALFLFFHHMAKPHFLSSNMLTQCSQLWRKLHRVILKL

SEQ ID NO: 290861 - protein, 127 aa, Zea mays
  Clone ID: MRT4577_28354C.1.pep
SSYERGAGGDLPKPLVVAIRALRSFVGVGAVAACKVAAEDAVDCLSEGGVSRHQPGRLSLKKICREGAYWGAAAGAFETLEFGAELMRGRSDWKNAVLGGALAGADCVRAPRLLRLERVARMMARWM

SEQ ID NO: 290862 - protein, 69 aa, Zea mays
  Clone ID: MRT4577_28355C.1.pep
CVMLYTVRDDTVMSHMLGRYRCQVAIYAVDPCARAALRRAQRAEMRCLHSVSSGVASCCGRGSYVRRSL

SEQ ID NO: 290863 - protein, 33 aa, Zea mays
  Clone ID: MRT4577_28356C.1.pep
YATKIILTTTQENCTRSRRLFICSSEERNNVRY

SEQ ID NO: 290864 - protein, 106 aa, Zea mays
  Clone ID: MRT4577_28357C.1.pep
LKLADCGDGGVHDLHDSYGVVATRHDDPATAVPPPAPASAPRRRSRPSSPRALGASLNERRGTQNGHKGHGQGGAKARLPGRGDRRRRQASVGRGGLSLPEATSTS

SEQ ID NO: 290865 - protein, 64 aa, Zea mays
  unsure (1)..(64): unsure at all Xaa locations
  Clone ID: MRT4577_28358C.1.pep
XRCPPDIILYVDRLDTPREEANSLSLLRCITSVLGLSIWPRTIITLTHSGAASPEGPNGLEVLH

SEQ ID NO: 290866 - protein, 39 aa, Zea mays
  Clone ID: MRT4577_28359C.1.pep
IGLASIRVISSLLYSKVLLLAHNSSWLVYRAGAIRNEDF

SEQ ID NO: 290867 - protein, 47 aa, Zea mays
  Clone ID: MRT4577_2835C.1.pep
PRAASARERGPVPVAHRIFFHLYDTLLEAHLCRLIKPYSRVEIAHIA

SEQ ID NO: 290868 - protein, 248 aa, Zea mays
  unsure (1)..(248): unsure at all Xaa locations
  Clone ID: MRT4577_28360C.1.pep
MATAMRGSSLLRFGFRHASCLLFQSPRCPAPSLGLNLAVGRTGLIRLRCSAAGAGDAGGKKVSARLALTQQVLRNAEERAASAGSDPAPKITLDHVTVNFARSGGPGGQNVNKVNTKVDMRFNVKEAHWLGERIKERILQAEKNRINKDGELVISSTKTRTQKXYCSIILLVFFYCNXLIYHLRGNIEDALQKIQAIIDAASYVPPPPTEDQKKKIEKIAAVAERKRLQNKKVLSQKKEFRRNRTSWD

SEQ ID NO: 290869 - protein, 161 aa, Zea mays
  unsure (1)..(161): unsure at all Xaa locations
  Clone ID: MRT4577_28361C.1.pep
MARGITTMEVRADGVAVITIINPPVNALSLDVIASLQRNYAEALSRNDIKAIVLTGSKGRFCGGFDIAAFENKPKNEKPGSMSIDFLTDIVEDAHKPSVAAIDGIALGGXIXEVAMVCHARISTPSAQLGLPELHFGXIPGWEGXQRLPRLGXSAKALEMM

SEQ ID NO: 290870 - protein, 125 aa, Zea mays
  unsure (1)..(125): unsure at all Xaa locations
  Clone ID: MRT4577_28362C.1.pep
RTRGRTLGLNSAAYLQQQQLLLFSQLVAAYHQQFLLFNQLAVWNFFGYVQXXQLLPFSQLAVVSPDVFLTQXQLLPFYLHAASNVGTLLQLHHLLSFNQHALTNSTGFFQHPIIGGALFEMVYEL

SEQ ID NO: 290871 - protein, 46 aa, Zea mays
  Clone ID: MRT4577_28363C.1.pep
LPVLFVGINIYIYIFYSIFLSTTFLCIGKLREQLMLPLFKELKIMS

SEQ ID NO: 290872 - protein, 50 aa, Zea mays
  Clone ID: MRT4577_28364C.1.pep
KKTHENDYYRLPRPRIIAPIVRRTKGGAPVLRIQTRRWTCASGSLTYSRS

SEQ ID NO: 290873 - protein, 117 aa, Zea mays
  unsure (1)..(117): unsure at all Xaa locations
  Clone ID: MRT4577_28365C.1.pep
VSSVSCTQTGGCSCGQHQSHQQQHYTQQHDSQTQQLXPPPQHHQLLAXQQQHVHMHLHNHHRQQEGDVEQQQQQPQXSSXHQQQRAQHRPPCEGRPLVGLQSHGVVQHLEQCPEQHQ

SEQ ID NO: 290874 - protein, 130 aa, Zea mays
  unsure (1)..(130): unsure at all Xaa locations
  Clone ID: MRT4577_28366C.1.pep
SCYRARSPSPRRRRPLLLTGEISPGGRRXXXALPSDQRPGTRPXXXPHNSPTPXPNPPXFPPPATPTPAXSPPPPPPPXPPPPILXPPPPPPXRPPPLDXYPPPPPYAPPXXXPPPPPPPXLSPPPPPPP

SEQ ID NO: 290875 - protein, 48 aa, Zea mays
  Clone ID: MRT4577_28367C.1.pep
NRYANGTARNLTTRAAMILWPIGAHCVHEQLYKMGPLYNTARSLPASL

SEQ ID NO: 290876 - protein, 325 aa, Zea mays
  unsure (1)..(325): unsure at all Xaa locations
  Clone ID: MRT4577_28368C.1.pep
MPFGHTRLDVRRPPQSSYLCCSTTTVAVFVALCLVAVWMASSMLVTPAEFPPFQSKVRPLRPHDSPPATGSLTSADQGDGITTHDDPPPATQQLPPVTDSMDGENQQQELFTTERGPWSTKAEQSNKDAKEQTLTSSSPLSFRWALCNVDAGADYIPCLDNVAAIKKLRSTKHYEHRERHCPEKSPTCLVPLPEGYRNPIRWPKSRDQIWYNNVPHTKLVEYKGHQNWVKVSGEYLTFPGGGTQFKHGALHYIDFIQEAKKDVAWGKRSRVVLDVGXGVASFGGYLFDRDVITMSFAPKDEHEAQVQFALERXIPAISAXMGQKG

SEQ ID NO: 290877 - protein, 65 aa, Zea mays
  Clone ID: MRT4577_28369C.1.pep
RGRGRGTPHHLCCSEEALDPSIQYTVRWLLHLISSHWSRLLQTPLLLGVPPGTRCSHEVSRRRCG

SEQ ID NO: 290878 - protein, 124 aa, Zea mays
  unsure (1)..(124): unsure at all Xaa locations
  Clone ID: MRT4577_28370C.1.pep
PKLLRVCCKSCVHDGDSYSPLPSVRISHVHXXXXXXXXXXXXXXXXXXXXXXXXXXXXXXXXXXXXXXXXXXXXXXXXXXXXHSQHPSLVTTLTQLLTSPWPGQLSKDLATADRRRWQPDRQPA

SEQ ID NO: 290879 - protein, 59 aa, Zea mays
  Clone ID: MRT4577_28371C.1.pep
MCWFARSLEPRRRVGVPMSCAGQPGGCLLDYALVEEEIQWIPPTSLDTTKDPAHWPPVA

SEQ ID NO: 290880 - protein, 104 aa, Zea mays
  Clone ID: MRT4577_28372C.1.pep
PCSAGPLLVFHHSEVGKSIGSVLSSTPILKCWSLLIPSSSQKPLQRCWRPGVHADVNSPQPLPSWHCPKLARRDLPVVTMPVSLAISPWPGQLSKVHDHAMFVL

SEQ ID NO: 290881 - protein, 124 aa, Zea mays
  unsure (1)..(124): unsure at all Xaa locations
  Clone ID: MRT4577_28373C.1.pep
SARADYSAGFDGAAFLANIAGQDDQAAALAGXTTRLPACSVRLLPDCXNGVLTTAQFNSKTTRSELSTWECSKRPITSTHFGHXLSRSDWTVRHXPVRMTNASAVTRAXLVEQINTTADASDFL

SEQ ID NO: 290882 - protein, 238 aa, Zea mays
  unsure (1)..(238): unsure at all Xaa locations
  Clone ID: MRT4577_28374C.1.pep
AARGRPAGGCSTTRWWRRRSRAPSSSTWSTTRPSPRRTASRTTPAPRRRSRPESSAPPGTKXACREKLXRDRLNERFNELCAILEPGKPPKADKVAILSDAARLLXQLQGEAQKLKQSNESLQESIKSSNGWLIRLEVALQAERSELRDEKTRLKAEKERLEQMLKGVVSHAAVAAPGPFVPHPAAVAPSFHHHPAAFAQAGKFVPYPSYPPPAAFWQWIPPTSLDTTKDPAHWPPVA

SEQ ID NO: 290883 - protein, 180 aa, Zea mays
  unsure (1)..(180): unsure at all Xaa locations
  Clone ID: MRT4577_28375C.1.pep
KKEPRQEPDRKNRGDQPPQINTPDTRNQRGATRDQTAGHNTRPGKPNKQKKKTKKKQQQKKKKRNNKKQKRSKRKRKSKKRTKKTKKKTPKQKQRTKKKNQKKKTKKKQQTKKTQRSKKRRKKNKKKXKRKNKEKKKRTNDKKKKKKNEKHTKPKNTKQQXKKKQKRQRQRKKRTEKKTK

SEQ ID NO: 290884 - protein, 237 aa, Zea mays
  Clone ID: MRT4577_28376C.1.pep
MSCAGQAGGWLLDYALVEEEIQGSEFIYMVDDPAVSSVILGFDAPRKEDGVQDNPGAKKRSRPESSAPPGTKACREKLRRDRLNERFNELCAILEPGKPPKADKVAILSDAARLLNQLQGEAQKLKQSNESLQESIKSLKAEKSELRDEKTRLKAEKERLEQMLKGVVSHAAVAAPGPFVPHPAAVAPSFHHHPAAFAQAGKFVPYPSYPPPAAFWQWIPPTSLDTTKDPAHWPPVA

SEQ ID NO: 290885 - protein, 86 aa, Zea mays
  Clone ID: MRT4577_28377C.1.pep
LPVSNEIHVLPSSQNSNISCLLIRNTGSYFLLLELEPVQSLLFINRSFLFNITLLINAYSCDQCVFFRAFWLGGQLQKVVLRNLLS

SEQ ID NO: 290886 - protein, 142 aa, Zea mays
  unsure (1)..(142): unsure at all Xaa locations
  Clone ID: MRT4577_28378C.1.pep
DPSQDPKTLGSKPKGFVGGPNTSLXEGKNNTWKICNLGTKRGTPLAARGFYSTPKKXGRDKRPSRGNKTPRTEIALEGGLFEPYKKFNRLVKTTFKNLVGKKGSSSGGAKLAKQGFGLGTGFLGASTPHRGKETWVENRGGN

SEQ ID NO: 290887 - protein, 83 aa, Zea mays
  Clone ID: MRT4577_28379C.1.pep
YCPIGITARSVSGYFRSGMYAVCPPVFSYPAVDKGWPEDFKSELSGRIHSVAFHREEIMCLGLLKIKNIFDNVNNIIDLLMES

SEQ ID NO: 290888 - protein, 46 aa, Zea mays
  Clone ID: MRT4577_2837C.1.pep
PKESIIWFKHAMFKQRRYRMSTNWTCGFRCQQKVHSTNLHSIHDLD

SEQ ID NO: 290889 - protein, 199 aa, Zea mays
  Clone ID: MRT4577_28381C.1.pep
MGGFGTSRPASVALCAFLTFLNLFAVLLAVGAERRRSTGKVMPDEYDERSYCLYDTDASTVYGVSAFFVLLLQQAIVNVATWCLCFGPVLSSRGCAVTAFVLSWITFLVAEACLIGGSVRNAKHTKYLGYYMKHDLVSCAALRKGVFAAAAAMMIINLLASLVYYWSYSKAATGGFMKHQNEVGVGMTDYGLDKGVSGP

SEQ ID NO: 290890 - protein, 87 aa, Zea mays
  Clone ID: MRT4577_28382C.1.pep
QQQQGGSQSQKGKQQEEENEGSNILSGFAPEFLKEAFGVNMQIVRNLQGENEEEDSGAIVTVKGGLRVTAPAMRKPQQEEDDDDEEE

SEQ ID NO: 290891 - protein, 103 aa, Zea mays
  Clone ID: MRT4577_28383C.1.pep
AKLFSHVWLLGFPPKLWAACVGTLEFGKISKGLALFVSGFFNFPGGPFLDPGGFFFPVFYGVRSRVGAPLDLLNPCRSCGGFLGGAFEPFFFCCPFFSLGPPP

SEQ ID NO: 290892 - protein, 302 aa, Zea mays
  Clone ID: MRT4577_28384C.1.pep
MWKLVAAAVALIVLCACTTPARGGDDYTAFVYAGCSQGRYDPGSQYAADVDTALSSLVNSAGFVAYANYTSPGQLVGVYQCRSDLPAAVCGGCVRSAVSKLSSLCNAAAGAAVQLRACFVRYGNDSFLGRQDTTVLFKKCGGGESAGGDTGVVAMRDAALGALVAAAAPGAGEGSYRAGAAGYVQAMSQCVGDLGAKACTDCVSAAASQLKAGCGYASAGEVYLGKCYARFWSNAAPGGGGGEGTGTGGGLPVVGGGGGNVIGGGGVGGAGNGYGYGGFVPNTYGQHDESGKTLAIIIGLVA

SEQ ID NO: 290893 - protein, 121 aa, Zea mays
  unsure (1)..(121): unsure at all Xaa locations
  Clone ID: MRT4577_28385C.1.pep
LARRTDIESRNYRNTDRTEMLQQMGIDPATYMTRKPQAAYPSATDQEQDTVCSLEEEGEKAHAVMMALVTSIIGLKTEHIFTDEEEMLEHLLDYNDDFRNEAYYPDDGXLTMLRLLRGAGD

SEQ ID NO: 290894 - protein, 75 aa, Zea mays
  unsure (1)..(75): unsure at all Xaa locations
  Clone ID: MRT4577_28386C.1.pep
WFIXXGTGXKNPRGGKAGHFLDVRRPPDXSGXXXXXXNQLREHSAXNHAGSXSRHXSSXXAXSSXWPRRRCPTSG

SEQ ID NO: 290895 - protein, 71 aa, Zea mays
  Clone ID: MRT4577_28387C.1.pep
SEGDDSCVNFCPRKNAESHSRSLVKLWRVRMAVSCADLNCAARLQALDEYLISRSYITGYQASKHDLAGYT

SEQ ID NO: 290896 - protein, 73 aa, Zea mays
  Clone ID: MRT4577_28388C.1.pep
FGSSGSSGTFLHAESSAGTGTSEGPVEIHFWVDLSLGGGGAATGHPAAGNRWTLMMCWTTTSVVNDYRTCERN

SEQ ID NO: 290897 - protein, 66 aa, Zea mays
  Clone ID: MRT4577_28389C.1.pep
DKCVYEHLMFLGIIEELVKRHRQIDPAYVIQAFGLSETFPPAPLLQTYTEEFEDTVDNNGDATESL

SEQ ID NO: 290898 - protein, 119 aa, Zea mays
  unsure (1)..(119): unsure at all Xaa locations
  Clone ID: MRT4577_2838C.1.pep
RPLPSPLQLRRVDPKGATFTGGPVGVXPSLXLVQVKNVSHQKKKKCTNSHGTGDFPCAPCFASGMLLXPKPVFIIXGKKNWPKKKRCKKFFEPEKVMCPTCFCKKKAMANKQKPRIAPF

SEQ ID NO: 290899 - protein, 71 aa, Zea mays
  Clone ID: MRT4577_28390C.1.pep
SVDVVDWGIRNVNIIKEMSYIMVKKCVDIRKCIVRGLDVYKLYWDEEHYEVECMKDVGCRSDTWDCKNDHW

SEQ ID NO: 290900 - protein, 103 aa, Zea mays
  Clone ID: MRT4577_28391C.1.pep
TNTPKGTGSFPVVRSQSILTTKHRPTPLPLDFIPDPHSHGTRRLRRVLLLLLRGSDRRPHLRLRRRGDDGHGDYRQQQPDGGVLQGVRHISRQDSAPRDGPLQ

SEQ ID NO: 290901 - protein, 71 aa, Zea mays
  unsure (1)..(71): unsure at all Xaa locations
  Clone ID: MRT4577_28392C.1.pep
MADVTAMLPTATAXAXEAASAGPLPDPKRPPHFSLRVATTSGSDDDCGSRTRFTTSCSTNDLTITSIHEGR

SEQ ID NO: 290902 - protein, 187 aa, Zea mays
  Clone ID: MRT4577_28393C.1.pep
TPIHSPTRNRRPSPATSLRSSSGDPRPLVCALQEGLLPPETEGGQVELHRDLSRANSGGQPQARTFTYQSSSVTFGGINGAYYTTSKSRRTGSDGITVEESKEADTTTKEATHRISRGIHDKGHSLTRKLNSDGKVDTTQTLHNLNEDELAGFEQSWKGNAGHYLPDWNHNAGAPNSDNSEQGHSWL

SEQ ID NO: 290903 - protein, 309 aa, Zea mays
  Clone ID: MRT4577_28394C.1.pep
MDRGQNGRDDVFGRRDPFSGFGFGPHRSLFSGLLGGRDPFDDPFFTHPFGGRMMGDHDMFVPSPFGPMGGPFGDMRNGGFIEQAPPRGNRRRPVITEVEEDGGENAEHGNQQPNQDPYVQEPDDGIDETEGGQVELHRDLSRANSGGQPQARTFTYQSSSVTFGGINGAYYTTSKSRRTGSDGITVEESKEADTTTKEATHRISRGIHDKGHSLTRKLNSDGKVDTTQTLHNLNEDELAGFEQSWKGNAGHYLPDWNHNAGAPNSDNSGDRSSNGRDRRSASGWALPGTEQGRDPRRNGKPKSRVIPIS

SEQ ID NO: 290904 - protein, 79 aa, Zea mays
  Clone ID: MRT4577_28395C.1.pep
ARAPTWQGACVQYHSNVAVSRIICVCHNVVCIYISVLSVGLPVSCYELLGLILKCVWSGLVMVIGEHVPHVSRHRLCVF

SEQ ID NO: 290905 - protein, 41 aa, Zea mays
  Clone ID: MRT4577_28396C.1.pep
QFPTGLALLIEKKSRRIEISLYWLARAIERFFTWMTDAGLC

SEQ ID NO: 290906 - protein, 129 aa, Zea mays
  unsure (1)..(129): unsure at all Xaa locations
  Clone ID: MRT4577_28397C.1.pep
SSMTEXIEVIGNPTLPLMSSPPVEPHSGSQVAAVAASILPCSLACVALGSSLSLQWRRVTLKSFVIPSGPVRLHRITPGFISANQNLYKIEKQFRLEIVPGLYSVVTERPPHPKLSRALFRVILLCTAI

SEQ ID NO: 290907 - protein, 84 aa, Zea mays
  Clone ID: MRT4577_28398C.1.pep
LALGRKIHRVKALSACKHRKTRLMGCDLPSLDRWLYEYRQRALLGFPAQLFISAHDIMIHMLVALDSECPRPLDYLRSIHYFKP

SEQ ID NO: 290908 - protein, 112 aa, Zea mays
  Clone ID: MRT4577_28399C.1.pep
HFYLSISVCHLVSENGKEIQTSKLKVFGIMYQAIVGRSRPLFHTLKQRLQTTDPSQRRKHIVRSDTYKTPGPIPLASLRLQAPAWATAGGGIYATLFGVFRLLRSMRGLHYI

SEQ ID NO: 290909 - protein, 259 aa, Zea mays
  unsure (1)..(259): unsure at all Xaa locations
  Clone ID: MRT4577_2839C.1.pep
STRAAAAPRGGFQLWPPHPAQEHHHHFYAPNIIRFADDPAAGSSRGGRGSASGAGAGTISCQDCGNQAKKGGVHMRCRTCCKSRGFDCPTHVKSTWVPAAKRRERQQQQATGAAEPSKRHRDXYRCPAXSTTATTTSSGEQQQMAVVAERFPREVSSEALFRCVRLGPVDEPDAEVAYQTSVSIAGHVFKGILHDVGPEPSTVAAGGGFRHATEGSSPSTAAAGEGSVVGPVSSSAVVMDPYPTPGPYGAAHFFHGHPR

SEQ ID NO: 290910 - protein, 50 aa, Zea mays
  Clone ID: MRT4577_283C.1.pep
EHMLYVISTLADSATFIPMLSGVISLLFIGASYELLAHSSFRRVCSIDVF

SEQ ID NO: 290911 - protein, 65 aa, Zea mays
  Clone ID: MRT4577_28400C.1.pep
RKEYISRAHGYEQHCKIVWLEIRMVQDNMVQLMDLHTIMIMMFIDKKTVHGLVIDKIWLMLIVNI

SEQ ID NO: 290912 - protein, 51 aa, Zea mays [sequence omitted]

SEQ ID NO: 290913 - protein, 194 aa, Zea mays
  Clone ID: MRT4577_28402C.1.pep
LASAVYLQVSTISQALIFVTRSRSWSFAERPGFLLVFAFLVAQLIATLVAVYADWGFTSIEGIGWGWAGVVWLYNLVFYFPLDLLKFLIRYALSGKAWDLVIEQRIAFTRKKDFGKEERALKWAHAQRTLHGLQPPDAKLFPDRVNELNQMAEEAKRRAEIARLRELHTLKGHVESVVKLKGLDIDTIQQSYTV

SEQ ID NO: 290914 - protein, 72 aa, Zea mays
  Clone ID: MRT4577_28403C.1.pep
SYERGFGTANKMPGNLPLNQSTTLAPATLGLDGTAPTHLEEGNQLVGLQHNENHAKRMHGAASRGMPALAAS

SEQ ID NO: 290915 - protein, 73 aa, Zea mays
  Clone ID: MRT4577_28404C.1.pep
MLSGILTSGVGDFIQVYLLLSCCPCEGRISGIVDSPNAVTTLAIPTAIFDQKQKLLPAYRELMSRPYKQTTQF

SEQ ID NO: 290916 - protein, 141 aa, Zea mays
  Clone ID: MRT4577_28405C.1.pep
AVKQHAGGEWCHMKVCKCPIRFFRYKNTDSFLISYQKTVVKQVQCGGEIKKTTNLTAGGVQQTGGPSHVYCKQIGMRARPPRERIRQKKGAHLALASWVRMSFSVVDHVGQVGLGLRVLRVLRPQIGVHPEDVVSSTASYC

SEQ ID NO: 290917 - protein, 36 aa, Zea mays
  Clone ID: MRT4577_28406C.1.pep
FISDIKLQQIPYWHLSALKPFTRPLSQSNFGFSVFS

SEQ ID NO: 290918 - protein, 180 aa, Zea mays
  Clone ID: MRT4577_28407C.1.pep
MLLLTWYRGEQKKLNMPLLLWCGVFCTLLIPKWNSYDLGQKKKKKILWAITFITTLVFGIEIGVLVGVAFSLAFVIHESANPHIAVLGRLPGTTVYRNTLQYPEAYTYNGIVVVRIDAPIYFANISYIKDRLREYELNLPSSNKGLDVGRVYLVILEMSPVPYIDLSAGQALKDFGPGFQ

SEQ ID NO: 290919 - protein, 127 aa, Zea mays
  Clone ID: MRT4577_28408C.1.pep
MLVVLLTAALLALSSAQGTDEEVNNAETSDVPADSEQQPVDSGSDPPSADADAENVQEGESAPPANEEPPATSGSEEEQQQQEPTQAENQEPPATSGSEEEQQQQEPTQAENQEPPATSGSDEDHKQ

SEQ ID NO: 290920 - protein, 186 aa, Zea mays
  unsure (1)..(186): unsure at all Xaa locations
  Clone ID: MRT4577_28409C.1.pep
MRSAVILALSGSSLALPFGGAMNSMFGAKEAREAQAPPPENMPNFPGAGFPAPTGTGVPSFPMPTGGFPGGAPGGQPGGQPGGGFPGFPGGQPGGQPGGQPGGQPGGGFPGFPGGQPGGQHGGQHGGQNGGQNXGGFPGFPGGQHGGQPGGQPGGQPWGEGPPIPWRSARWSTRRPTRRSERWSET

SEQ ID NO: 290921 - protein, 58 aa, Zea mays
  Clone ID: MRT4577_2840C.1.pep
RFLNSPPPPPGCPLWLEPKNKGPFSPEKKKKKKKKKKKKKKKKKKKKKKKKKKKPPHH

SEQ ID NO: 290922 - protein, 227 aa, Zea mays
  Clone ID: MRT4577_28410C.1.pep
FRSTPLPHKHQFASCEYYHVTNNVTLYYSLVFLLLVTEMLIFCALIVPLPFTWRRRLFTFISESPIIAKLQYGMKITFVFILILFIDSVNRVYRVQIELSGSDDQGRSGVAAGGIERMEVQARKFYSQRNMYLCGFTLFLSLILNRTYVMILDVLRLEEEVKSLRGDPKANKNSALKNAGGPGEVGALRKELEAKGRDMENLKKQVENMQKEYTAWAMRLLARNRRT

SEQ ID NO: 290923 - protein, 56 aa, Zea mays
  unsure (1)..(56): unsure at all Xaa locations
  Clone ID: MRT4577_28411C.1.pep
KKNVFRAXXXXTPKPFPWKNPIPDTPEPPISLSHPTRQPPFSNQNPINPILPSQHL

SEQ ID NO: 290924 - protein, 147 aa, Zea mays
  Clone ID: MRT4577_28412C.1.pep
AQGSHELSPKDLDATECDMDFPPGFGPCWKSPESSLSPSLLEVNGSAKLDGKSESSTTLFSGPLAVVQRMLANELYISSKQSLFHYFEEVIADDITNCLCFGLESNIDQEQIGTPIHAPESPISAETSMHETANSIEMTGGDVLNIC

SEQ ID NO: 290925 - protein, 111 aa, Zea mays
  unsure (1)..(111): unsure at all Xaa locations
  Clone ID: MRT4577_28413C.1.pep
RGXRRRAAXAAPPRLRAPVRRRDRRAAVPVHGDDGTFLTPDFGSYASDDEQLSPCELPCIGCTGAPLDLSRAPSRVAVPRNSPTSNTTLFFLPALVTLLWLWQLCAVILDR

SEQ ID NO: 290926 - protein, 70 aa, Zea mays
  Clone ID: MRT4577_28414C.1.pep
AGQPPVPWRAGVRAAGTSSWGFIDCQTDTLTLWTSSRVMLVFRAQGPCESCMYRAILNTTHCRVLYRNAR

SEQ ID NO: 290927 - protein, 58 aa, Zea mays
  Clone ID: MRT4577_28415C.1.pep
LSQLTYTSILHHYHILYFHLNSITCPPNNIYLSMKTHPQPNQITFHYIPLLPTSLSPY

SEQ ID NO: 290928 - protein, 296 aa, Zea mays
  Clone ID: MRT4577_28416C.1.pep
CPVHGFGFGVDHDSDALHSMAVAPGGTFSFIEDEGVIQDAFAQCIGGLLSVVVQNMQVNVECVHPGVQLRSIKSGSYPSKVAAHGRNGSIDVGHLYADEERDFLLSVSLPHCREQTTLLKVACAYRDSLTNEEIKIQGGEVAILRPRSPVSEPVCMEVDRERNRVRAADAIEAARAAAERGALSDAVSILEDCRRILSETFSSRSGDRLCMALDAELREMQERMANRQRYEASGRAYLLSGLSSHSWQRATARGDSTDSDTLVYSYQTPSMVHMLQRSQNHCPSPQGPSQPRVLVK

SEQ ID NO: 290929 - protein, 131 aa, Zea mays
  Clone ID: MRT4577_28417C.1.pep
ERLSVEYGKKSKLGFTVYPSPQVSTSVVEPYNSVLSTHSLLEHTDVSILLDNEAIYDICRRSLDIERPNYSNLNRLVSQVISSLTASLRFDGALNVDVNEFQTNLVPYPRIHFMLSAAEGGSDDGDEEEEY

SEQ ID NO: 290930 - protein, 77 aa, Zea mays
  unsure (1)..(77): unsure at all Xaa locations
  Clone ID: MRT4577_28418C.1.pep
RSFPRLGFPKGFLVGKILPFSPGKSVGGVLQGGKRRRPVPCKLLVPAAAVNNPWNLSSPAFTTKYLMAVNNGQKKXK

SEQ ID NO: 290931 - protein, 80 aa, Zea mays
  Clone ID: MRT4577_28419C.1.pep
FYYFFFFFFLFFYILCLFFLTYYKRGRKIITLKKNINNPRSRVYLGGGGNSNPNITLNPLLTFIHNGGFQKMRTKTQFKG

SEQ ID NO: 290932 - protein, 78 aa, Zea mays
  Clone ID: MRT4577_2841C.1.pep
LGYFGSRSGRVPGSETMPSTEGEIVVFKAFFTVGIHLPCHRLGVFVSDPLEVLVDDGSGHTSTSVLRRRVVNLHLEPN

SEQ ID NO: 290933 - protein, 134 aa, Zea mays
  Clone ID: MRT4577_28420C.1.pep
QPDGQVPGDKTAGHHDDAFSTFFSQTGAGKHVPRAIFVDLEPTVIDEVRTGTYRQLFHPEQLISGKEDAANNFARGHYTIGKEIVDLCLDRIRKLADNCTGLQGFLVFNAVGGGTRGPGRPGEGLRGGRRRGRQ

SEQ ID NO: 290934 - protein, 120 aa, Zea mays
  unsure (1)..(120): unsure at all Xaa locations
  Clone ID: MRT4577_28421C.1.pep
MRECISVHIGQAGIQVGNACWELYCLEHGIQPDGQVPGDKTAGHHDDAFSTFFSQTGAGKHVXPRAIFVDLEPTVIDEVRTGTYRQLXYHPEQLISGKEDAANNFAAEGGSDDGDEEEEY

SEQ ID NO: 290935 - protein, 103 aa, Zea mays
  unsure (1)..(103): unsure at all Xaa locations
  Clone ID: MRT4577_28422C.1.pep
MKMRECISVHIGQAGIQVGNACWELYCLEHGIQADGQVPGDKTEGHHDDALSTFFSHTGAGKHVSRAIFVDLEPTAIDDARTGALRQRLHAGCLXSGEVDAPN

SEQ ID NO: 290936 - protein, 188 aa, Zea mays
  Clone ID: MRT4577_28423C.1.pep
PPGQVQTIKAQQLQQLVLPVITQVVLATLFPYYQHHHFFPFNHLFPLTPAVYLQHQLFPFSQLVIAYFHQQQFFPFNQLAALTPAVYLHQQILLPFSQLVAPTRVSFLTQHQLLPFYHQFGANPPPFLQLHQLLPFVQLALPNPAASYQQQIIGGAFFRLLISCNSIINFLDEAKKKKKKKKKACTSA

SEQ ID NO: 290937 - protein, 149 aa, Zea mays
  unsure (1)..(149): unsure at all Xaa locations
  Clone ID: MRT4577_28424C.1.pep
MRECISVHIGQAGIQVGNACWELYWLEHGIQPDGQVPGDKTAGHHDDAFSTFFRQTGAGKNVTRAIFVVLXPTVIHEGGTGTYRQLFHPEQVISGKEDAANNIFRGRYTISKEIVDLCLDRIRRLADNCTRPQGFLGFNAXVGGGTGLW

SEQ ID NO: 290938 - protein, 128 aa, Zea mays
  Clone ID: MRT4577_28425C.1.pep
MRECISVHMGQAGIQVGNACWELYCLERGIQADGQVPGDKTAGHHDDAFSTFFSQTGAGKHVPRAIFVDLKPTGIDEVRTGTCRQLFHPERLIRGEGDAANNFGRGHYTIGKEIGDLCLDRIRKRADN

SEQ ID NO: 290939 - protein, 192 aa, Zea mays
  unsure (1)..(192): unsure at all Xaa locations
  Clone ID: MRT4577_28426C.1.pep
MSSSMQSSYLPATTESVAKAQEAKDASESISILYRVLEDPSSSADALRVKELAITNLTNYLTKENRAEDLRNLLTQLRPFFALTPKAKTAKIVRGIIDAVAKVPGTSXLQISLCKEMVEWTRAEKRTFLRQRVEARLAALLLENQEYTEALTLLSGLIKEVRRLDDKLLLVDIDLLESKLHFSLXRNLPKAK

SEQ ID NO: 290940 - protein, 68 aa, Zea mays
  Clone ID: MRT4577_28427C.1.pep
MGVLLLLVLLLDAGVVLLAVLLAVEAPVAEEKRQDAGVILLAVLLLGSAPCSCWCSTTGACCLVVLGG

SEQ ID NO: 290941 - protein, 257 aa, Zea mays
  unsure (1)..(257): unsure at all Xaa locations
  Clone ID: MRT4577_28428C.1.pep
MRPAASALTSSFRAAAARPFAQVQGSSASVSRAFSVSARSAFAQPTEDASPAAGKKPQMKEFKIYRWNPDSPAEKPKLQSYEVDLSQCGPMMLDALIKIKNEMDPTLTFRRSCREGICGSCAMNIDGVNTLACLCRIPKDTASASKIYPLPHMYIVKDLVPDLTNFYKQYKSIEPYLKNDNVPEKGEYLQTQEDRKKLDGMYECILCACCSTSCPSYWWDQDXYLGPXVLMQAYRWMADSRDSYGAQRKGEMQNNMS

SEQ ID NO: 290942 - protein, 104 aa, Zea mays
  Clone ID: MRT4577_28429C.1.pep
VPHVIQTDSKRGEGEPPHTKRANTLRLSALSSSPKPAVEKVDRHARSVQLHRGRTPFQLRCNRRSSMEARATCHVTSTPVTTCKATAPPLAPMPHLLGTAEPVQ

SEQ ID NO: 290943 - protein, 74 aa, Zea mays
  unsure (1)..(74): unsure at all Xaa locations
  Clone ID: MRT4577_2842C.1.pep
FSWGLPXYSIINGPTLYIIKIFIMLIALSTFPIFFHWTNKIKNLLNRLQSLVKRSSSIFITQINTIHQISIETN

SEQ ID NO: 290944 - protein, 128 aa, Zea mays
  Clone ID: MRT4577_28430C.1.pep
MMGGIRSSLNDSSMGVLFLLVLLLDAGVVLLAVLLAVEAPVAGEEAGCGRRPPGRAPTGRRVVLLLVLDDWSLLPGGARRMSRGSDRVGDEDEMTDRIGWAGDEDEWMTDRMSWFARKLPARGWGLDH

SEQ ID NO: 290945 - protein, 76 aa, Zea mays
  Clone ID: MRT4577_28431C.1.pep
TPFDPAFGRKTTYPPGGGGGQKKIAFILEITLGCLLTRAAAVATHGGVFLYKDYNLPNHTIALWLGGGQDSTDTTY

SEQ ID NO: 290946 - protein, 87 aa, Zea mays
  Clone ID: MRT4577_28432C.1.pep
RTRGCTPWPRGRSPMVSKAPPRSWGPPPSPGTSTLLVNNGLPACVPPFLSQFSFQVGMDFYPPPGWAPLCTDPCVPFPVGINPPIGV

SEQ ID NO: 290947 - protein, 71 aa, Zea mays
  Clone ID: MRT4577_28433C.1.pep
SRRRKQTAGTVLNENTGGRRRRGGGGRRRRTQLFECGCWQSQRLWRSLASVGPEELASESSEREKGGGGGR

SEQ ID NO: 290948 - protein, 576 aa, Zea mays
  Clone ID: MRT4577_28434C.1.pep
MDIRRGPPPPRAALGGVEPRFRQVGFVTAAEPVRGAATPAPASPAASDGLSPVMIPPPLIPVPVAPASESLAPSSPPPDSSSRPDAVSDLDDDDDINVSWARPPPPAFPEPNKKNLTARKNEHAPPTPVSQKPKLSKAERRAIQESQRAAKAAAKEACLKSTAMASDANSKQPKTAKISLNKDVNQVNSPVAPQPRMQFDDTHRVVKAKKRSVVRQSEAQNRVELFRHLPQYAHGTIRHELESKLLQPDLMHPSVYKVGLQYLSGDISGGNARCIAMLLAFREAINDYSMPSEKILNRDLTAKISSYVSFLIECRPLSISMGNAIRFLKNRITKLPLAFSESEAKVSLQSDIDRFINEKIIVADKVIVSHAVTKIRDGDVLLTFGSASVVEMIFDNAHELGKKFRVVVVDSRPNHEGQGLLRRLVAKGISCTYTHINAVSYIMHEVTRVFLGASSVLSNGTVYSRVGTALVAMVAHAFGVPVLVCCEAYKFHERVQLDSICFNELGDPDAISRVPRDESLSNLKNWAENENLHLLNLKYDITPSDYVSMLITDYGMLPPTSVPVIVREYRREHVWI

SEQ ID NO: 290949 - protein, 63 aa, Zea mays
  Clone ID: MRT4577_28435C.1.pep
QPLTSHYNHFKLIHKDLQPKTASQIRKELGTKPQNTIYLQTKLTKRANNKTTPQESENSINHE

SEQ ID NO: 290950 - protein, 186 aa, Zea mays
  Clone ID: MRT4577_28436C.1.pep
EMIFDNAHELGKKFRVVVVDSRPNHEGQGLLRRLVAKGISCTYTHINAVSYIMHEVTRVFLGASSVLSNGTVYSRVGTALVAMVAHAFGVPVLVCCEAYKFHERVQLDSICFNELGDPDAISRVPRDESLSNLKNWAENENLHLLNLKYDITPSDYVSMLITDYGMLPPTSVPVIVREYRREHVWI

SEQ ID NO: 290951 - protein, 81 aa, Zea mays
  unsure (1)..(81): unsure at all Xaa locations
  Clone ID: MRT4577_28437C.1.pep
MGLAFGKLFSRLFAKKEMRILIVRLDAAGKTTXLYKLKNVEIVTNIHTIGFNVDTVEYENISFTVSEVGGQDKIRPLWRHY

SEQ ID NO: 290952 - protein, 598 aa, Zea mays
  unsure (1)..(598): unsure at all Xaa locations
  Clone ID: MRT4577_28438C.1.pep
MDIRRGPPPPRTASGGVEPRFRQVGFVTAAEPARGAATPAPASPAASDGLSPVMIPPPLIPVPVPVPVAPASESLAPSSPPPDSSSRPDAVSDLDDDDDIDVSWARPPPPAFPEPNKRHLTERKNEHAPPTPVSQKPKLSKAERRAIQESQRAAKAAAKEAGLKSTAMASDANTKQPKTAKISLKKDVNQVNSPVASDKKTGERPPDKDRKKDAPQPRMQFDDTHRVVKAKKRSVVRQSEAQNRVELFRHLPQYAHGTQLPDLESKFFQPDLMHPSVYKVGLQYLSGDISGGNARCIAMLLAFREAINDYSMPSEKILNRDLTAKISSYVSFLIECRPLSISMGNAIRFLKNRITKLPLAFSESEAKVSLQSDIDRFINEKIIVADKVIVSHAVTKIRDGDVLLTFGSASVVEMIFDNAHELGKKFRVVVVDSRPNHEGQGLLRRLVAKGISCTYTHINAVSYIMHEVTRVFLGASSVLSNGTVYSRVGTALVAMVAHAFGVPVLVCCEAYKFHERVQLDSICFNELGDPDAISRVPRDESLSNLKNWAENENLHLLNLKYXIVSCRYXSMLITDYGMLPPTSVPVIVREYRREHVWI

SEQ ID NO: 290953 - protein, 71 aa, Zea mays
  unsure (1)..(71): unsure at all Xaa locations
  Clone ID: MRT4577_28439C.1.pep
SCRGHVFLSALVSTPYALQASCYVGRYGSEAKGARPPFLAGCIRVPPRXSAPAIVVAAVMPFGFCPFPLVG

SEQ ID NO: 290954 - protein, 100 aa, Zea mays
  unsure (1)..(100): unsure at all Xaa locations
  Clone ID: MRT4577_2843C.1.pep
LVAPPGGDYVLLSPTGKDAPYXFEDVGSSNPARGFMDESLVGEINGLTIPSRTKYVPPKQPPSNQGKTPEFVIKIPPFLVPLAILGLAVSVWMYPQSGFA

SEQ ID NO: 290955 - protein, 38 aa, Zea mays
  Clone ID: MRT4577_28440C.1.pep
GGKKLVFFEKKKKKKKKKKKKKKKKKKKKKKKKKKKKK

SEQ ID NO: 290956 - protein, 295 aa, Zea mays
  Clone ID: MRT4577_28441C.1.pep
HRRNSVAGDLFFSTPGAQVSAKLASSSSCSHGAGLCPVPPTRPAASSTLLSGTLSGRSLDPSSCASLAPSLCTARPLLSLSLSCRSLLLRLSLSSSAAPSLLQLLPWRAQPKLASRAPPQPRISSSHGRSSPFPAAMFPGACLAVLYFQPMLFPMVVVPIVSLCSPVFFTLGLAQLVDAHLVFLLDPGALARLSGQRPNIAAQAMALVVLDPAIQLVVRPTASSLALASIASCSFHVQHCSGGRPPSVQRCSRLVGLCFPKISRCSNSRSWTSYLRLRQSLHIICILCSSPNKNP

SEQ ID NO: 290957 - protein, 211 aa, Zea mays
  unsure (1)..(211): unsure at all Xaa locations
  Clone ID: MRT4577_28442C.1.pep
MERVSPWLLLLVLLVAASGPGARADPQVPCYFVFGDSLVDNGNNNDIASLARANYPPYGIDFPGGATGRFSNGLTTVDAISRLLGFDDYIPAYAGANNDQLLSGVNFASAAAGIRDETGQQLGQRISFGGQLQNYQAAVQQLVSILGDEDSAADHLSQCIFTVGMGSNDYLNDYFMPAVYATSRQYTPEQYADVLVSQYXQQLRICTQRGE

SEQ ID NO: 290958 - protein, 95 aa, Zea mays
  Clone ID: MRT4577_28443C.1.pep
STSQGENRGAHPTRSPSRAQLTEGLTTPSSRRGRCTAPAKAPCQRWPAFPKMELSKVEPGTVTLLAATGCAMLTMHSTAHMAGTYMSALARTPRS

SEQ ID NO: 290959 - protein, 43 aa, Zea mays
  unsure (1)..(43): unsure at all Xaa locations
  Clone ID: MRT4577_28444C.1.pep
LRNTLXNHYISNFKQSVVIKGHTLVLVYSHNDMHKKLFLCMVV

SEQ ID NO: 290960 - protein, 102 aa, Zea mays
  Clone ID: MRT4577_28445C.1.pep
FAARGYGIEYIFTGYTCRNRILPRIETLALIVERHEYLQVDNRETANDAGGAAAISQEQLAADLPNRGELTTCSWRTRECTWTAHLHRKERFSERQEQRAPR

SEQ ID NO: 290961 - protein, 49 aa, Zea mays
  Clone ID: MRT4577_28446C.1.pep
LVRLSSSPRPISDNNLSVTCVRSLSRQYSASVKNALCTYKSIFGLSLSF

SEQ ID NO: 290962 - protein, 35 aa, Zea mays
  unsure (1)..(35): unsure at all Xaa locations
  Clone ID: MRT4577_28447C.1.pep
LGRGFSSASNFFQGGHPXAALLGLEFAAGGPPFRQ

SEQ ID NO: 290963 - protein, 63 aa, Zea mays
  Clone ID: MRT4577_28448C.1.pep
GFANKFPFWEKPAKTGGASQIKPFFFGGVGAYNTHLNTKLGCSKKGPPLIFLKLLKINTLFKK

SEQ ID NO: 290964 - protein, 100 aa, Zea mays
  unsure (1)..(100): unsure at all Xaa locations
  Clone ID: MRT4577_28449C.1.pep
FTAAFTQNDRPRRKHGKISTDEXXACPNVIHQMDLINQCTRIAIDENLVVSRQAERSSLPRAGGEANCCRCSCSRRSCSLTCGRRRCCRGPSCAAPSPGR

SEQ ID NO: 290965 - protein, 59 aa, Zea mays
  Clone ID: MRT4577_2844C.1.pep
GPFFFFFLLHSIGDEVVAAIRLLLCHSYPCPLQSQRIPPVLFSCHQYETDVCTIAYTYA

SEQ ID NO: 290966 - protein, 99 aa, Zea mays
  Clone ID: MRT4577_28450C.1.pep
AGTDEPSTGCRDGWPRTMAFPCRYGSVVVPLRLGRPGHASKGWHALRRGRNCCRHGPVVGQEQVPQDEALGGCCNEFVSGLGRRLPVNFGLLDRCLLIM

SEQ ID NO: 290967 - protein, 115 aa, Zea mays
  Clone ID: MRT4577_28451C.1.pep
LGDDGLDHSRTHYNILQAPHPVVPVLDLALKIPVTRVILWILETSLRRRVRGGNNSGHGAAHANPSKHAQVCPTSAARRRTRTGKETPWSEAIHPYIPCLVHRCRLRMEKAGIAA

SEQ ID NO: 290968 - protein, 115 aa, Zea mays
  Clone ID: MRT4577_28452C.1.pep
LGDDGLDHSRTHHSILQAPPPGPPVLLLALEIPVTRVILWILETSRRQVRGGNNSGHGAAHASPSKHAQVCPTSAARRRTRTGKETPWSEAIHPYIPRLRMLRIGCSKSPSRSVS

SEQ ID NO: 290969 - protein, 217 aa, Zea mays
  unsure (1)..(217): unsure at all Xaa locations
  Clone ID: MRT4577_28453C.1.pep
MPKPHSEAGTAFIQTQQLHAAMADTFLEHMCRLDIDSAPITARNTGIICTIGPASRSVEMLKEMIKSGMNVARLNFSHGTHEYHAETIKNVREATESFASDPILYRPVAVALDTKGPEIRTGLIKGSGTAEVELKKGATLKITLDNAYMEKCDENILWLDYKNICKVVEVGSKIYVDDGLISLQVKEKGADFLVTEVENGGSLGXQKGVNLPAAAVD

SEQ ID NO: 290970 - protein, 134 aa, Zea mays
  Clone ID: MRT4577_28454C.1.pep
GAVLVPEWSPLSSDMFLIPQCTVPGFPVHGRRCGPQLPQGRRGIATSGGGSFPPCMRREHQTSIQSLSCSTGSGRFHSIRGEMRDITGGCRTGIWRLAWCSRYAATQTCAAPPTGAAAPPTSAASPQLAATFLR

SEQ ID NO: 290971 - protein, 69 aa, Zea mays
  Clone ID: MRT4577_28455C.1.pep
FTHCDFAVLNIMIVAGDKTTGIDYPELVSVCDPSAHKSLTSTLHAYTPALTKRPMLRSVRAPTTCCIWK

SEQ ID NO: 290972 - protein, 83 aa, Zea mays
  Clone ID: MRT4577_28456C.1.pep
GVSVVFVFDLGVHADVEEVQSGDELVDVRVVQMPGEVRLVCVRSAVIGEGRCSHCKSTRMLLVFVVSISLSRSVRTAAKQVSQ

SEQ ID NO: 290973 - protein, 73 aa, Zea mays
  Clone ID: MRT4577_28457C.1.pep
CDTPPPPGRGVRRTATAWPSPLYTEPHGHVLQPLLVLGAGVSPAGHFPVQRVPPRLTRQGHYCSGITSSTAMG

SEQ ID NO: 290974 - protein, 84 aa, Zea mays
  unsure (1)..(84): unsure at all Xaa locations
  Clone ID: MRT4577_28458C.1.pep
DMPWXVPRTLMDLVEWYSGVSWVSSQHFFVLVFTAHVYGRFSILMLYRRDSELWLCESGNLFSIGVSLFLGCPLVSAPVAASVV

SEQ ID NO: 290975 - protein, 48 aa, Zea mays
  Clone ID: MRT4577_28459C.1.pep
APCIKLGGSPPSRYCNRSPTFYRPDLAMNVPLPMEKQSFFTNQTPGPP

SEQ ID NO: 290976 - protein, 45 aa, Zea mays
  Clone ID: MRT4577_2845C.1.pep
CREIAPKEDGRLISKRLKQRDLLLQAPESCKASSTSSQSRSMTDP

SEQ ID NO: 290977 - protein, 98 aa, Zea mays
  unsure (1)..(98): unsure at all Xaa locations
  Clone ID: MRT4577_28460C.1.pep
SGDTVACGTDDIHADDTNGSGYTRGYRGYGKLGHRQQKDEWRPGLVEFIQKHNGMTPNDIGSAGSVSTECTAGGGQMYMWGKMNNTGDDGRTXKPVMD

SEQ ID NO: 290978 - protein, 56 aa, Zea mays
  Clone ID: MRT4577_28461C.1.pep
WPHVMIIEQWPGFCVSGGGKPYYWFTVVCRFIEHGQGSRFQIFFSRFQGLVGGNRV

SEQ ID NO: 290979 - protein, 63 aa, Zea mays
  Clone ID: MRT4577_28462C.1.pep
SLLHPHEMHEGICFCIFIEEGFITFNEKCIYVYINHLLKPVTPCVLMQHLGKNNAISCWHMLL

SEQ ID NO: 290980 - protein, 105 aa, Zea mays
  unsure (1)..(105): unsure at all Xaa locations
  Clone ID: MRT4577_28463C.1.pep
SFRYPAAAVWVIYFMCSXPDGVLLYDVSTGIWRQFAXQMALYXTDHTLXAKSQPLFMLGGGVTKNPTTCKSILKLQKMTLLWKEVDRTPNCLKLRTLPLAHKQEM

SEQ ID NO: 290981 - protein, 142 aa, Zea mays
  Clone ID: MRT4577_28464C.1.pep
MSAATLPPGQEPHAVCVPFPAQGHITPMLKLAKILHARGFRVTFVNTEYNHRRLVRARGAAAVAGLTGFRFATIPDGLPESDADATQDPATISYATKHNCPPHLRNLLAGVDGVTCVVAYKLMSFSVDAARHVGTTATARSD

SEQ ID NO: 290982 - protein, 65 aa, Zea mays
  unsure (1)..(65): unsure at all Xaa locations
  Clone ID: MRT4577_28465C.1.pep
ARRGGLKTISGLIXKKTPGGLKIFLEKVIPDPVTYNEHAPRKTVPPMDVVYALKPQGRTLYGFGG

SEQ ID NO: 290983 - protein, 78 aa, Zea mays
  Clone ID: MRT4577_28466C.1.pep
SLQSCKPFGCPISNGCSSCGIINKAAPKKQQLAASAKKKSSRTAYLSALYDNLLCFVCYALNTCFIFGLILIPPSLLV

SEQ ID NO: 290984 - protein, 158 aa, Zea mays
  unsure (1)..(158): unsure at all Xaa locations
  Clone ID: MRT4577_28467C.1.pep
PGLKKGPWNKKVFFFSPPLTKIKSVFPXGSQGVKKTLFFSFLKKKGVGDKIFFLKREGKKKLVSIYSSEKIFXVPLFPKGLAPFLRIIKNPPFGGPTFIFFLPQKGFPKGALPFVKDXKTQFYLAXLEXGNLPIPVAFSKEIFSKGPPPRGGCFFPTL

SEQ ID NO: 290985 - protein, 56 aa, Zea mays
  Clone ID: MRT4577_28468C.1.pep
MVQITHAQVISLLKFACIILVFKLLMYSLLSSKLFHVQMTDVLSIDLSLNFQTSSW

SEQ ID NO: 290986 - protein, 41 aa, Zea mays
  Clone ID: MRT4577_28469C.1.pep
PGPEWIRLADEPGDLLSLRPTGASRKKAPRRAGMCRLIFIS

SEQ ID NO: 290987 - protein, 389 aa, Zea mays
  Clone ID: MRT4577_2846C.1.pep
VARRAKGLGMHVIAHDPYASADRARAIGVELVSMEEAMTTADFISLHMPLTPATNKMLNDEAFAKMKYGVRIINVARGGVIDEDALVRALDSGIVAQAALDVFTKEPPAPDNKLVLHENVTVTPHLGASTVEAQEGVAIEIAEAVIGALKGELAASAVNAPMVPAEVLSELAPFVVLAEKLGHLAVQLVAGGGGIKSVKVTYASARAPDDLDTRLLRAMITKGLIEPISSVFVNLVNADFTAKQRGVRITEERIILDGSPETPIDYIQVQIANVKSKFPSAISETGEITVEGRVKDGVPHLTKVGAFQVDVSLEGSLILCRQVDQPGMIGSVGSVLGEENINVSFMSVGRIAPRKHAVMAIGVDEEPSKVTLRKIGEIPAIEEFVFLKL

SEQ ID NO: 290988 - protein, 128 aa, Zea mays
  unsure (1)..(128): unsure at all Xaa locations
  Clone ID: MRT4577_28470C.1.pep
ACPTFLRGWSYFCVRRWRCLSEAPRGNPKGCEKIFKTKCAHCHTXEKGAGHKQGANLNGLFGRQERTIGGYSYYEGNIIIVGVWEEHTLYEYLLNPKKYLAGTXKVFPGLKKPHECADLIAYLSEATA

SEQ ID NO: 290989 - protein, 94 aa, Zea mays
  Clone ID: MRT4577_28471C.1.pep
PPPPKIKRGKKGLNYVRPPDSQRVHYLLGRKYPPKKFCSPFQFPGAQKGVFFRFRPLKKGKIWVCGPKPPKPWVKPQGFRPVCKPFLEGKCFFF

SEQ ID NO: 290990 - protein, 60 aa, Zea mays
  Clone ID: MRT4577_28472C.1.pep
RARGVLAPPSQTCETWKTRAPNKSFTPQGPNQKTNVLTLKPGFYMSPRGNGFVNPPRLLS

SEQ ID NO: 290991 - protein, 87 aa, Zea mays
  unsure (1)..(87): unsure at all Xaa locations
  Clone ID: MRT4577_28473C.1.pep
MDTIALPGLLSEVVPVLLVDGCMLDITYHHMTEQQARTIFGTARTXTNRSVHVCSDRLVPLVGTTXELRHQMTLTPSLSRKMIANVG

SEQ ID NO: 290992 - protein, 113 aa, Zea mays
  Clone ID: MRT4577_28474C.1.pep
PYVGTQERLCSTQSEYTFRNHNTICAYRCYSCMEPWSVLIAIDGDVNSSLVDRISDSAWCISIGVESLVISRRGSLRVLHTLVQLDRRRQGICNLWLYDWDVGEIASAAGATC

SEQ ID NO: 290993 - protein, 104 aa, Zea mays
  Clone ID: MRT4577_28475C.1.pep
GGLGPWKWPTAIAILANERSLLPAPVAAGGRAALFCVRGSLEVIRTACQSRGTYSYIQSDQSVAAVAACKRWRRRRRHDDGDGRGRRRHGSGLPLDGVQVQCDT

SEQ ID NO: 290994 - protein, 178 aa, Zea mays
  Clone ID: MRT4577_28476C.1.pep
FLFYFFLSLFFLFFFIFFFFFFFFFFFFFFFNQGPGGFLWRAYGKGDRVSTFCGALTGGGGEGNGSGDPGERISQHIVHGGRKQDVAGLGSQCSKAGREIRGGPTMAVFIYIYIYIYIYHIYIYGGGPPLGSKKKIAPPCSRKRGGRGGHKNMPSRGGLLRISHPPQGGGKLGPGSLP

SEQ ID NO: 290995 - protein, 159 aa, Zea mays
  unsure (1)..(159): unsure at all Xaa locations
  Clone ID: MRT4577_28477C.1.pep
KGGRGLHRLEKGPLKKKTPGTKKKKKKKGGPPHPKIRGRGPPRPLGTNRNQKGHPPPKKSRPGPRGTKKVPPPPRGEHRPPKGGGQQQWFPGGGPHPRGGAPTLRGPYTKNAAQEPKTRLKGRPPGGGVRGKKGKRPXPGGDQKKSENPGPVWEKTPPW

SEQ ID NO: 290996 - protein, 172 aa, Zea mays
  unsure (1)..(172): unsure at all Xaa locations
  Clone ID: MRT4577_28478C.1.pep
MASPRHRQDGDGPHDGAPTYAGMAKLVPALPLETRCPPFALRRYGGFWLPEAALRRGLPALHAGFAPRRADVLLASYPKSGTTWLKALAFATVRRAVHPPSSIDHPLRRRNPQDCVPFLEFDFDHGDMAELEALPSPXRVLATHLPYSLLPDRVVADDGARIVYVCRDPRTR

SEQ ID NO: 290997 - protein, 74 aa, Zea mays
  Clone ID: MRT4577_28479C.1.pep
GWHPRANGSVSRSSSVSLRADMQAQQVLIVLAEAVEVVLLGSALWHRTPLQPVVPILIKLVGQRACMSLEHVWP

SEQ ID NO: 290998 - protein, 780 aa, Zea mays
  Clone ID: MRT4577_2847C.1.pep
MDPKGKGMVINDKEKETFVNEPNDDKPTDSGSGHKRKDGRKKKTRRIKEIVYYDSDESSSSQKDDDDHDRRKTVNSNFSFDYSRIPHSSNAQLLPIPLGKPPHFDGEDYGFWSHKMRTHLFSLHPSIWEIVESGMKFDSSDSPVFINEQIHKNAQATTVLLASLCRDEYHKVSGLDNAKQIWDTLKISHEGNDVTLLTKMELVEGELGRFAMIRGEEPTQTYNRLKTLINKIRSYGSTRWTDHDVVRLMLRSFTVLDPHLVNNIRENPRYTKMSPEEVLGKFVSGRMMIEEARYVDDALNGPINEPQPLALKATRSKEALPSKVAQIEAAGLNDEEMALIIKRFKTVLKDRKGQPSKTKAKGKRSCFKCGKLGHFIANCPDNDSDQDQGNKREKKKNYKKAKGEAHLGKEWDSDCSSSDSDNEGLAATAFNKSSLFPNERHTCLMAREKKVSTPNTSTYASSSEDESSDDDEIDYSCLFKGLDRTKEDTVREARGAVEGRNILLEKQEDLLYEEHDKFVEAQKSLALEIKRNEMLSSELSSCHETIAKLKSFNDDLNAKLKVASKSNSCVEIVETCNRCKDFDIDACSDHLVSISKLNEELASLNAQLKTSKNEFDKLKFARDAYTIGRHPSIKDGLGYKREAKNLTSHKAPISTKEKGKAPMASSVQKNHAFMYHDRRQSRNSYRSCNAYNAIDSHAMFASSSSYVHDRNVGRRNAVHNLPRRNVVNVPRKVYASGGSSWIIDSGCTNHMTGEKKMFTSYVKNKDSQDSIIFGDGNQGK

SEQ ID NO: 290999 - protein, 100 aa, Zea mays
  Clone ID: MRT4577_28480C.1.pep
GEAFPEAWHSDAASVPGDGLASIRSKVYLTPKLWYLRVNVIEAQDLIPNDRARFPEVYVKAMLGNQVLRTRAPSRTLNPMWNEDLMFVAAEPFEEHLILS

SEQ ID NO: 291000 - protein, 51 aa, Zea mays
  Clone ID: MRT4577_28481C.1.pep
VINYSTLANEWKLFWSTVYPSISSIDASDGYHDNDIAMTTNLKHALIEFLR

SEQ ID NO: 291001 - protein, 61 aa, Zea mays
  Clone ID: MRT4577_28482C.1.pep
VQSDPAGRLVITGDPEQPDNPWGITSVKKVVNFPSRINSYQTFGGVTLYCQVFVRAPIGAF

SEQ ID NO: 291002 - protein, 81 aa, Zea mays
  unsure (1)..(81): unsure at all Xaa locations
  Clone ID: MRT4577_28483C.1.pep
MMQRPPLRPEEYSLKETTPHLGGAAAGDKLTTTYXPVEQMQYLYVRVVKAKELPKQDITGSCDPYVEVKLGXNYRGQTGHF

SEQ ID NO: 291003 - protein, 775 aa, Zea mays
  Clone ID: MRT4577_28484C.1.pep
MMQRPPLRPEEYSLKETTPHLGGAAAGDKLTTTYDLVEQMQYLYVRVVKAKELPNKDITGSCDPYVEVKLGNYKGQTGHFEKKNNPEWNQVFAFAKERIQSSVVEILVKDKDLVKDDFIGRVIFDLNEVPKRVPPDSPLAPQWYRLEDRNGHKVKGELMLAVWMGTQADEAFPEAWHSDAASVPGDGLASIRSKVYLTPKLWYLRVNVIEAQDLIPNDKTRFPEVYVKAMLGNQVQRTRALASRTLNPLWNEDLMFVAAEPFEEHLVLSVEDRVAPGKDEVIGRTIIALQHVPRRLDHRLLTSQWYNLEKHVIIDGEQKKETKFSSRIHLRICLEGGYHVLDESTHYSSDLRPTAKPLWKPSIGILELGILTAQGLLPMKTKDGRGTTDAYCVAKYGQKWVRTRTIIDSFTPKWNEQYTWEVYDPCTVVTIGVFDNCHLNGGEKANGARDTRIGKVRIRLSTLETDRVYTHSYPLIVLTPGGVKKMGEVQLAVRFTCSSLLNMMHLYSQPLLPKMHYVHPLSVIQVDNLRRQATSIVSTRLGRAEPPLRKEIVEYMLDVDSHMWSMRKSKANFFRITGVLSPLFAVARWFDQICHWKNPLTTVLIHVLFMILVLYPELILPTIFLYLFLIGVWYYRWRLRQPPHMDTRLSHAETAHPDELDEEFDTFPTSRPPDLVRMRYDKLRSVAGRIQTVVGDLATQGERLQSLLSWRDPRATALFVVFCFVAAIVLYVTPFRVVVFLAGLYVLRHPRFRHKMPSVPLNFFRRLPARTDSML

SEQ ID NO: 291004 - protein, 262 aa, Zea mays
  unsure (1)..(262): unsure at all Xaa locations
  Clone ID: MRT4577_28485C.1.pep
TRPDIYTEIPNDKTRFPEVYVKAMLGNQVQRTRALASRTLNPLWNEDLMFVAAEPFEEHLVLSVEDRVAPGKDEVIGRTIIALQHVPRRLDHRLLTSQWYNLEKHVIIDGEQKKETKFSSRIHLRICLEGGYHVLDESTHYSSDLRPTAKPLWKPSIGILELGILTAQGLLPMKTKDGRGTTDAYCVAKYGQKWVRTXRTIIXDSFTPKMGSTSFDEEFDTFPTSRPPDLVRMRYDKLRSVAGRSRPWSATLPRKASGCSRC

SEQ ID NO: 291005 - protein, 162 aa, Zea mays
  unsure (1)..(162): unsure at all Xaa locations
  Clone ID: MRT4577_28486C.1.pep
MMQRPPLRPEEYSLKETTPHLGGAAAGDKLTTTYDLVEQMQYLYVRVVKAKELPNXDITGSCDPYVEVKLGNYKGQTGHFEKKNNPEWNQVFAFAKERIQSSVVEILVKDKDLVKDDFIGRXIFDLNEVPKRVPPXDXPLAPXWYRLEDRXGHRVKGELMLA

SEQ ID NO: 291006 - protein, 126 aa, Zea mays
  Clone ID: MRT4577_28487C.1.pep
VMQRQRAKINVVLAHSSCHLPPTPPIFPNCPTPPRPSAQASYAYKRSICSLRCSVSSRARRKISHSDVVAQSLLRDYKGQLHFIPRLLSSQFLAPPFILVSCSFQSFFYVTHPMVHSPLRCAGLLQ

SEQ ID NO: 291007 - protein, 90 aa, Zea mays
  Clone ID: MRT4577_28488C.1.pep
EDCEKSFCFVLFNFWILHPPPPQKKNRIVSKKKKKKKKKKKNKYKKRKKKKKKNNKKKTKKKKSGGGPLKDPNFNTRALKIKIFFLGPLN

SEQ ID NO: 291008 - protein, 78 aa, Zea mays
  Clone ID: MRT4577_28489C.1.pep
KAQVSFQYESCGFKVLENAAADVSLSSKIDGKDRIEDGNRSMVQRFRSQLTHQMDALHKTVSSSVAVLSCNRRTTLMK

SEQ ID NO: 291009 - protein, 292 aa, Zea mays
  Clone ID: MRT4577_2848C.1.pep
AALDVFTKEPPAADNKLVLHGNVTVTPHLGASTVEAQEGVAIEIAEAVIGALKGELAASAVNAPMVPAEVLSELAPFVVLAEKLGRLAVQLVAGGGGIKSVKVTYASARAPDDLDTRLLRAMITKGLIEPISSVFVNLVNADFTAKQRGVRITEERILLDGSPETPIDYIQVQIANVESKFPSAISETGEITVEGRVKDGVPHLTKVGAFQVDVSLEGSLILCRQVDQPGMIGSVGSVLGEENVNVSFMSVGRIAPRKHAVMAIGVDEEPSKGTLTKIGEIPAIEEFVFLKL

SEQ ID NO: 291010 - protein, 58 aa, Zea mays
  unsure (1)..(58): unsure at all Xaa locations
  Clone ID: MRT4577_28490C.1.pep
XNLMPILLYFFIYARAVVLYFYLYPWYLLLNWHLKLVIFFLFSRSSKFQLPRQQQQRT

SEQ ID NO: 291011 - protein, 166 aa, Zea mays
  unsure (1)..(166): unsure at all Xaa locations
  Clone ID: MRT4577_28491C.1.pep
CHPRQGSPWRTREEHHFESRVDAXGCPSTYPXHAGTVRKNGFIVVKNRPCKGVEVSTSKTGKDGRAQCHFVAIDIFYXKKLEDSVPSSHNCGIPHGYRTEYQLIDISEDGFVMLLTSYGDTKDDRRLPSXDTLAAQMKEGFESAKDLVVTDQSAMIEEQICALRDV

SEQ ID NO: 291012 - protein, 290 aa, Zea mays
  Clone ID: MRT4577_28492C.1.pep
MARVSNAKKRQGAKPASALSSTDTSTAAKRKAEDDRPVRVYADGIFDLFHFGHARALEQAKMLFPNTYLLVGCCNDELTYRYKGKTVMTQEERYESLRHCKWVDEVIPDAPWVLTQEFIDKHQIDYVAHDALPYADTSGTANDVYEFVKKIGKFKETKRTDGVSTSDLIMRILKDYNQYVMRNLARGYSRKDLGVSYVKEKQLQVNMKINKLRETVKAHQEKLQTVAKTAGLNHEEWLANADRWVAGFLEKFEQHCHNMETAIKDRIQERLGKQLSKGIIAGLVQEPVTA

SEQ ID NO: 291013 - protein, 537 aa, Zea mays
  Clone ID: MRT4577_28493C.1.pep
MAASPPRKRLPAARLIFALLLLMSSVLPRDAGAVELGLKLPFSPGDVLPVLPRQVAWPVMNTLHSAVDLLPSFVAAVAPGSPAPAAWKGACFSENEAAIELTPGDRNGTDVGGAVLRLKTASAHSWACMDLYVFATPYRITWDYYFAAREHTLEIKSWEEEAELKYVKEHGISIFLMPSGMLGTLLSLIDVLPLFSNTAWGQHSNLAFLEKHMGASFEKRTQPWVANIRKEDIQSGDFLALSKIRGRWGGFETLEKWVTGAFAGHTSVCLKDEKGDLWVAESGYENEKGEEIIAIVPWDEWWAMALKDESNPQIALLPLHPDVRARFNESAAWEYARSMVGNPYGYHNMIFSWIDTIGDNYPPPLDANLVMAVMSMWTRLQPVYAANMWNEALNKRLGTEDLDLQGIIMEIERRGMSFDQLLTIPEQDEWVYSDGKSTTCVAFILAMYKEAGIFTPFSESIQVTEFTIRDAYMLKIFEDNPARLPGWCNADTDKLPFCQILGEYRMELPEYNTIEPYAKMNENCPSLPPTYKRPARC

SEQ ID NO: 291014 - protein, 51 aa, Zea mays
  Clone ID: MRT4577_28494C.1.pep
GSGFWRWESNISMRFMMVGICTSCLILCRVFLVFKINCTWKKVYHPHSTLI

SEQ ID NO: 291015 - protein, 78 aa, Zea mays
  Clone ID: MRT4577_28495C.1.pep
MPLGASAIALWGPVSRQAAALNYGITADDDAGMAALVPASSFHHQRVAAAAVAVDAADQGPARLTGAERGLADPWPPK

SEQ ID NO: 291016 - protein, 102 aa, Zea mays
  Clone ID: MRT4577_28496C.1.pep
NFSQEKQSSALGDTFFFLQKQPGDSLGEGAPRKRLFKSFHRPPRVGFLNICALSLSSGGLNLKHGSHDGKNPKQIIHVDAKMPRSQWFFLWAWYRCRRPKSE

SEQ ID NO: 291017 - protein, 100 aa, Zea mays
  Clone ID: MRT4577_28497C.1.pep
MPGNHQEGQGPPGASVCLWLVTVLLLLSLLGGGACLAAYILLPPHEAPAWLAAVGLALVALPWAFWIVTCAYRCAKVRANESRTMAVAPASGSMCSRSGS

SEQ ID NO: 291018 - protein, 56 aa, Zea mays
  Clone ID: MRT4577_28498C.1.pep
VFSPFTAGWLLIVRKPFWLRFHVWSSTRDKHYRWVYSTPKRLLVRFPPWKLVRLIQ

SEQ ID NO: 291019 - protein, 69 aa, Zea mays
  unsure (1)..(69): unsure at all Xaa locations
  Clone ID: MRT4577_28499C.1.pep
RVWMDLLETVRTIKNLRSYSVRIRALEVEXCLXKVGEDALTXKMTTAIAELTTDIGNKVLHGPMQHLRC

SEQ ID NO: 291020 - protein, 109 aa, Zea mays
  Clone ID: MRT4577_2849C.1.pep
RSWSRRCGARLPMAGAPPADAEEEEGKISLLLGPRMCSSSGRRTSAVDHPVKHRAQADDHPLDGGPEHAGPLVPRTVPHSGQLLVLSSGHCCLVLTRADLDLRLLCSDD

SEQ ID NO: 291021 - protein, 236 aa, Zea mays
  unsure (1)..(236): unsure at all Xaa locations
  Clone ID: MRT4577_284C.1.pep
MRECISIHIGQAGIQVGNACWELYCLEHGIQPDGQMPGDKTVGGGDDAFNTFFSETGAGKHVPRAVFVDLEPTVIDEVRTGTYRQLFHPEQLISGKEDAANNFARGHYTIGKEIVDLCLDRIRKLADNCTGLQGFLVFNAVGGGTGSGLGSLLLERLSVDYGKKSKLGFTVYPSPQVSTSVVEPYNSVLSTHSLLEHTXDWLSSFDXEAIYDICRRSLDIERPTYTNLNRLVSQVI

SEQ ID NO: 291022 - protein, 69 aa, Zea mays
  unsure (1)..(69): unsure at all Xaa locations
  Clone ID: MRT4577_28500C.1.pep
STXPQFXFDRLFQYHYIIFLSCRYYYYYFKGILGILYNLELHTIFPQYSISTINPYSSLSSCKNVIIIY

SEQ ID NO: 291023 - protein, 81 aa, Zea mays
  Clone ID: MRT4577_28501C.1.pep
QTRTRVVTKQSALSCLPPGAAAQPKRSSRVCLPVLREESEQCALGSSEHTSQVWRALSIWILSTSHRLSTLTGHVSSQPGR

SEQ ID NO: 291024 - protein, 59 aa, Zea mays
  Clone ID: MRT4577_28502C.1.pep
LYLVARHRLAIVGKNIIFDFLCSYKATSDLHESYTFTCNISVSLKHMNSDSFCSAGRDR

SEQ ID NO: 291025 - protein, 146 aa, Zea mays
  unsure (1)..(146): unsure at all Xaa locations
  Clone ID: MRT4577_28503C.1.pep
LACQXKTAHDSNVLHIARLPNRQLISCSEDGSVRIWELREKQQLAAEPVPTGFFNMWGFGRVSKQASQPVKKQQENATSCSLELIGDLIGHSSSVEMFLYFEDHGLVTCSADHLIILWKNGERESGLRSLRLFQKLEENGDLYLAV

SEQ ID NO: 291026 - protein, 123 aa, Zea mays
  Clone ID: MRT4577_28504C.1.pep
SAFCLEAPGPAATSSLLWCSSTPPFTRTVSRARSHVYLDYLGGRISDRLSEMDDVPDDIICGTHAEATCEDSPSVTPTTPNLGCQGAEEYRTGNEDNSSESAAINPPDEAGGEATSALEGRKP

SEQ ID NO: 291027 - protein, 69 aa, Zea mays
  Clone ID: MRT4577_28505C.1.pep
AVERVGPSPTEVGCMIQLGDDAGAVTAGSMWDLSQMHHRPNTDLAAGPPHQHCCRASLLRPPSPANAWL

SEQ ID NO: 291028 - protein, 95 aa, Zea mays
  unsure (1)..(95): unsure at all Xaa locations
  Clone ID: MRT4577_28506C.1.pep
SYRLHPARHLRCCPKANAVAXTDRISMLLLLTSSARMLTLHRRANTAKADHDAALAHTTEAEREATIAQTERAVTELHHDENAATDIDGNLGRVG

SEQ ID NO: 291029 - protein, 107 aa, Zea mays
  unsure (1)..(107): unsure at all Xaa locations
  Clone ID: MRT4577_28507C.1.pep
PLLALLDLVXSALNALIIAHGXLAPSAIMPQXLPPATAXGCEHASEQAYRLQLALAASALQQPIAQLQQQSLAHLTLQTIATHAQQQQMLPSLTHLSEVNPVTYLRQ

SEQ ID NO: 291030 - protein, 73 aa, Zea mays
  Clone ID: MRT4577_28508C.1.pep
KKTIWGFKKQSNLGTFFFKTTPLGFNSPGTPLVWDIKMVHRWPPTGVTIFAAPLALVLLKPLREIGDCRIRGP

SEQ ID NO: 291031 - protein, 84 aa, Zea mays
  Clone ID: MRT4577_28509C.1.pep
PNTSMVHWEVTIIAGEQKQANRRSIFGIAEQENQLCPKYRKPLRKLKLIQKNLHQCGRTKTEPVNVQYLALLGEKLHCPKGETK

SEQ ID NO: 291032 - protein, 216 aa, Zea mays
  Clone ID: MRT4577_2850C.1.pep
MFYDIYLYTLCYYICCLLGACMRCTRLCPLKPGVTYVEQPPGFEDERYPDQVCKLSKALYGLKQAPRAWYECLRDFLIANAFKVGKADPTLFIKTCDGDLFVCQIYVDDIIFGSTNQKSCEKFSRVMTQKFEMSMMGELNYFLGFQVKQLKDGTFISQMKYTQDLLKRFGMKDVKPAKTPMGTDGHVYLNKGGKSVDQKAYRSMIGSPRTLRCYHC

SEQ ID NO: 291033 - protein, 94 aa, Zea mays
  Clone ID: MRT4577_28510C.1.pep
ANPISKPIRGITFWQPPSPWRAHDSTILYGSKKNPQILQPNESLRPIRIVRLGHQISVHTFHFKLRSVDSTVYKECSPVHIAVSLSIPINHSEI

SEQ ID NO: 291034 - protein, 101 aa, Zea mays
  Clone ID: MRT4577_28511C.1.pep
ISALFTVVRLRAALLVIRSRAHVISYSPATTRGRDYSGSPTRHEAYRSSPANRLPQEHEEHIKRRSYSPARRYDADNGYEKRSPTTDRDRSTMHRMYPIRY

SEQ ID NO: 291035 - protein, 244 aa, Zea mays
  unsure (1)..(244): unsure at all Xaa locations
  Clone ID: MRT4577_28512C.1.pep
MTRLLLSCLALLLARAAVAREYAAVFSFGDSLSDTGNLCVDGIPDYLATAHAPYGMTYFGYPTGRVSDGRVVIDFIAQELGLPLLPPSKAKNATFRRGANFAITGATALDMAFFEEHGLARAVWSSGSLHTQIGWFRDMKPNICSSPQECRELFRRSLFVVGEFGGNDYGSTIFSFRPLEEVHALVPHVVDAIARGVEELIAEGAGDLXVVPGLLPTGCFPMFLSTFXRQPAAXGARSGCNRDS

SEQ ID NO: 291036 - protein, 70 aa, Zea mays
  Clone ID: MRT4577_28513C.1.pep
WIVTGSITFYHSDCSYGGKSDRWWPRMLLGQLTTVPIGCKKSKLGKAKVFSVTQGVNVTVGSIGIQIPST

SEQ ID NO: 291037 - protein, 53 aa, Zea mays
  Clone ID: MRT4577_28514C.1.pep
PSQVEVLEDLVIRLSRTSSSMCRENGRSISDMLLTRGFSGLGFKPTTQKVKFY

SEQ ID NO: 291038 - protein, 56 aa, Zea mays
  Clone ID: MRT4577_28515C.1.pep
HSSRFATPSVASPTAARIPFIRFARNTGAWHWVNYRKRLSAPRRHRRCESISTWHL

SEQ ID NO: 291039 - protein, 41 aa, Zea mays
  Clone ID: MRT4577_28516C.1.pep
HVLQTGNLLLSSKGIGWTVWKKRWFILTRTSLVFFRSDPVR

SEQ ID NO: 291040 - protein, 92 aa, Zea mays
  Clone ID: MRT4577_28517C.1.pep
PGFPPSKKNQAVAPYQGFVPGNGGLFIFTPLSRGPMILCSSGRDQPDGGPKNVVFAKQFFPFKSPPPPPLGFFWTIMEGPQNFPVQSLGPSP

SEQ ID NO: 291041 - protein, 54 aa, Zea mays
  unsure (1)..(54): unsure at all Xaa locations
  Clone ID: MRT4577_28518C.1.pep
THRHHEGAGGRFPLLALAASATMKHTCGGCDXQPPTTIHLPSPVHLRPPVHLAP

SEQ ID NO: 291042 - protein, 55 aa, Zea mays
  Clone ID: MRT4577_28519C.1.pep
SLHEAFHPHLSPFVLNLGATSFINVKDNRNTSWFELYRCLLPRPQCGGTDQINPT

SEQ ID NO: 291043 - protein, 137 aa, Zea mays
  Clone ID: MRT4577_2851C.1.pep
SRRTRVGQEYVIIFKGSTNSAFYISHHHPPYKRNTVFPTVKDTSSDSLTKTATISAFLKSPAEQLLDCLIPYTYSFGSAVRRFVPRLVIIPSVSYRLARELIVSVAVVGAARYFSNWFKRRQGGRSLGSQIWVCLSP

SEQ ID NO: 291044 - protein, 138 aa, Zea mays
  Clone ID: MRT4577_28520C.1.pep
YLIPARSFSPVIRDNRRSFHHLVAGRVLGPGMLLVAAGAGTPYAVVSCDQLTSDVAPGLVHPIRNAQSPSALRCMLQRSVITQQSPVVDREATCHWLQTMKDHLPGRVSMDNGQNIHDNRDVSVLLPISHTLDCTMIH

SEQ ID NO: 291045 - protein, 154 aa, Zea mays
  Clone ID: MRT4577_28521C.1.pep
RAVEQLWLHSNDFTGPMPDFSRFDNLWDLQLRDNELTGPVPESLFKLKALKNVTLTNNLLQGPMPQIPNQLHADIKADSERFCVQEAGKPCDPRVSLLLEVAAGFMYPKALATDWKGNDPCVFPGVSCIQGNITELIFTNKGLSGSISPSIGKI

SEQ ID NO: 291046 - protein, 132 aa, Zea mays
  Clone ID: MRT4577_28522C.1.pep
DLLSMFFQPSHHPSVPVSPSCPISGHGKPSGDLSFLERIWASSSLSHVEGGIRLWHVLPDLFLFSQMLGLAIGWYDWSGWGGGVARPALMRRKARGSRLPFCSLCVFPIPFFSPLRCGAGPSFTRPPLEVPM

SEQ ID NO: 291047 - protein, 204 aa, Zea mays
  unsure (1)..(204): unsure at all Xaa locations
  Clone ID: MRT4577_28523C.1.pep
VHVQQAPRKRKRAEQGQTTPPVLGTGAADVAAQFQQQLVDVDRLVLQHTAKMWAGLTEQRRRHARQVVATVEAAAAPRLRAKEEEIQRMRRVNWALEERVKSMYVEAHMWRDLAQSNDAAVTALRGELQQALDAQQTRRRADDADSCCCGENDVXHHRSRRGGERRGGRDVVVVGXVRACAVCGDSAADVLLLPCRHLCACAPC

SEQ ID NO: 291048 - protein, 173 aa, Zea mays
  Clone ID: MRT4577_28524C.1.pep
MERWRVNFCGGFEQLQTAKMWAGLTEQRRRHARQVVATVEAAAAPRLRAKEEEIQRMRRVNWALEERVKSMYVEAHMWRDLAQSNDAAVTALRGELQQALDAQQTRRRADDADSCCCGENDVFITGAGAAENEEEAGTSSSSGHVIRACAVCGDNAADVLLLPCRHLCACAPC

SEQ ID NO: 291049 - protein, 65 aa, Zea mays; identical to SEQ ID NO: 264737
  Clone ID: MRT4577_28525C.1.pep

SEQ ID NO: 291050 - protein, 168 aa, Zea mays
  unsure (1)..(168): unsure at all Xaa locations
  Clone ID: MRT4577_28526C.1.pep
LGRPWCTRTEDARLXRNMFWERQAMQTNPQAKDDKDYKDLAAQPLYXPRKLKNLTYXHSVLVEVAHTLLFLYMFIXLTVMDHSXPLCKSATVGMHGIDCSFSGMIFRLVYCTVGIFGVHINPAATFGLILARKLCLTMDXFYIIMHCLGAICGAGVVKVFQQGLYMGN

SEQ ID NO: 291051 - protein, 97 aa, Zea mays
  unsure (1)..(97): unsure at all Xaa locations
  Clone ID: MRT4577_28527C.1.pep
SERCKIKKWNVVSLWAWHIVRDSCAICRNHIMPLCIECQANQPSATSEERTVAWXVCNHAFHFHCITRRLKTRQVCPLDNTDWEFQKYGHYILGTVM

SEQ ID NO: 291052 - protein, 65 aa, Zea mays; identical to SEQ ID NO: 264737
  Clone ID: MRT4577_28528C.1.pep

SEQ ID NO: 291053 - protein, 65 aa, Zea mays; identical to SEQ ID NO: 264737
  Clone ID: MRT4577_28529C.1.pep

SEQ ID NO: 291054 - protein, 1536 aa, Zea mays
  unsure (1)..(1536): unsure at all Xaa locations
  Clone ID: MRT4577_2852C.1.pep
MDLKGKGMVVNDKTKESIVNEPRDDKPSDSGSSHKKRDGKKKRRIKKIVYYDSDESSSSPSDDDDKKKKPVNSNFSFDYSRIPFNSNAHLLSIPLGKPLHFDGEDYSFWSHKMRSHLFSLHPTSLCRDEYHKVSGLDNAKQIWDTLKISHEGNDATMITKMELVEGELGRFAMIRGEEPTQTYNRLKTLVNKIRSYGSTRWMDHNVVRLMLRSFTVLDPHLVNSIRENPRYTKMTPEEILGKFVSGCMMIKEARYVDEALNGPMPIYEPQIVALKATSSREVLPSKVAQVEAAGLNEDEMALIIKRFKTALKGRKEYSNKNKAKEKRSCFKCGKTGRFIANCLDNSSDQEQGKGGKKEKQKSYRKAKGEAHIGKEWDSNCSSSDSDDEGLAAXAFNKSFLFPNERHTCLMAKEKKXDDEVDYTELFKGLDRSKVDKINELIDALNEKDRLLERQEDILYEEHDKFVSVQKSLALELKRNELLSSELSTCNETVASLKSINDDLNAKLEVVNKSSSCVEKIVICNRCKDFNVDACDEHLISISKLNDEVASLNAQLKTCKSDFDKLKFARDGYTVGRHLLIKDGLGFKKEAKNLTSQRAPIFNKEKGKAPMASCIQKNHAFIYHRKVSRNTHYNRSYGAYDSHAMIASSSTFVHGRSRPRKGNVIHHVPNKMPNESATVFHACNTDFVLSCKNKKVVARKLGAKCKGDKTCIWVPKDIVTNLVGPNKSWVYASGGSSWIIDSGCTNHMTGEKKMFSSYVKSKDSQDSIIFGDGNQGKVKDVSAFRRSDGSLAFKGVLDDKLYLVNFSKEEADLDACLIAKTSMGWLWHHRLAHVGMKNLQKLLKGEHVLGLTNVSFEKDRPCGACQVGKQVGSTHHNKNVMTTARPLELLHMDLFGPVAYLSIGGSKYGLVIVDDFSRFTWVFLLQDKTETQGTLKRFLRRAQNEFELKVKKIRSDNGSEFKNLQVEEYLEEEGIKHEFSAPYTPQQNSVKGRNSKFTPKAVEGFLLGYDSNTKAYRVFNKSSGLVEVSSDVVFDETNGSPREQVDLDDVDEDDVPTDAIRTMAIGNPFRIEEALLDSDWVLAMQEELNNFKRNEVWTLVPCPKQNVVGTKWVFRNKQDEHRVVTRNKARLVAKGYAQLAGLDFEETFAPVARLESIRILLAYATHHSFRLFQMDVKSAFLPNEVHTRLAQAGSTFDLIGYSDSDYAGCKVDRKSTSGTCQFLGRSLVSWSSKKQTSVAISTAEAEYVAAGQCCAQLLWMRQTLRDFGYNLSKVPLLCDNESAIRMADNPVEHNRTKHIDIRHHFLRDHQQKGDIEVFYVSTENQLADIFTKPLDEKTFCRLRKSEKREKGKDLAGAAKTQRSLAHRTVWWCTRQCPENSAACAAPTAVPPVRVRLTAVKTGLRRHRKLRLAHPQGSDSTSTLEDGLRLARPQGSDSTSTPEGGLRLARPQGSDSTSTSEDRLRLARPQGSDSTSTPEGGLRLARPQGSDSTSTLDDGLRLARPPGPDSASTSEEPPPRPTLGSDRPRHKGASLPYP

SEQ ID NO: 291055 - protein, 69 aa, Zea mays
  Clone ID: MRT4577_28530C.1.pep
PSGSAGDGKVAIRNIRRDAIKAYDKLQKEKKLSEDNVKDLSADLQKVTDEYMKKIDSIQKQKEQELMKI

SEQ ID NO: 291056 - protein, 59 aa, Zea mays
  Clone ID: MRT4577_28531C.1.pep
GRLGTKSTHVLGKRDTGGMEPRSPRLHNHPSRSRPALNILWRTAVVAPSWIPFSKIPPP

SEQ ID NO: 291057 - protein, 76 aa, Zea mays
  unsure (1)..(76): unsure at all Xaa locations
  Clone ID: MRT4577_28532C.1.pep
VIFTMYLPHADHMLNSIFKRIAGLSTIPIMRLYAYLITVRXAYHTSPTKTQFNCRTDPSTLTGVSHWITIPYSLHA

SEQ ID NO: 291058 - protein, 76 aa, Zea mays
  Clone ID: MRT4577_28533C.1.pep
ANEEAVARVLARMFIQSSTDYIVKNCFTVEKPGRHHLNHCANLTWPAMGQISSMCLLIQCPTGDTASLCSITTKEG

SEQ ID NO: 291059 - protein, 199 aa, Zea mays
  Clone ID: MRT4577_28534C.1.pep
TVKITNLATGQLQATLVVAPTIARAIVWIGPDCLAIGGIDGHIRLWYPFTEQAPVLVTAHTDIVNSLSWDANSNLLASSSSDSTVKLWDVETGICHRIWREAVPVRWATWSPDGHTLAISREDGGIVLWNPHSDQAPRYLNGHPETVWSLDWNPDGAWLASSSHDATVRLWDVVTGRCRRILRSHQNWVWYARWHPHQP

SEQ ID NO: 291060 - protein, 92 aa, Zea mays
  Clone ID: MRT4577_28535C.1.pep
WGFFFFLLPEEFPSFTGRSLKAKLVRMGPKKSFCFFSPKLPRRKTARKFFFFFGPFSRGGGGDLLFFWSARESPLYARGPRWVSPRPVFSGV

SEQ ID NO: 291061 - protein, 143 aa, Zea mays
  Clone ID: MRT4577_28536C.1.pep
YLVQTSWKNLATYTSSSMEGFLSPSLSLLLSSLEDGILILPLAIRHLCDDRDERDEDRWLCILGASSSLEESSQVFTLVSTLPLLFLSTLPSSQLCQLHFCFVKHFQFSQPFLSTLSTSLLFCSFVSHFYFLMCWTLSTYKVS

SEQ ID NO: 291062 - protein, 167 aa, Zea mays
  Clone ID: MRT4577_28537C.1.pep
MAAALLRRALHLRRVLPSPLASAQRLSPAFSATPTPKTSQQNAAITTIDLSSDESRRRLLNRLVYRSKQRGFLELDLVLGTWVEQHVHAMDEPNIRALLQVLDLENPDLWKWLTSQEQPPEDLNSNPVTDNLIKHASPETRSTPGQPWVRGWDDIKKGKDGPSYGNQ

SEQ ID NO: 291063 - protein, 174 aa, Zea mays
  unsure (1)..(174): unsure at all Xaa locations
  Clone ID: MRT4577_28538C.1.pep
KTTGPDTGRAPKKGGRGTRARKPPGGDPPPQEDPPHPKXAHSEPPPRGGPPRTKTDPQGRHPKQGGGGAKFPRANPKKAPARGKKNWAVKNPVKITLGTPPKWEFWEAPSQGGACPPLKXQAPPPKXGNXRARQKKGAPKNPIFPLKKKKKKKKKKKKKKKNPQQKKKKKKNKT

SEQ ID NO: 291064 - protein, 57 aa, Zea mays
  Clone ID: MRT4577_28539C.1.pep
RPGNKIASTNELPKEPKSMRLLSGTNTDLSQRRTVTLNYLPSVERSQDTLYTDYGHQ

SEQ ID NO: 291065 - protein, 254 aa, Zea mays
  unsure (1)..(254): unsure at all Xaa locations
  Clone ID: MRT4577_2853C.1.pep
RRCSAEARREEALNHAAEAQRKHLPAITRHALEEQERPAESRGDLTILLYQIVLGCKFVASAVNKAGLAKLIGLAGETNVQGEEQKKLDVLSNEVFVKALVSSGRTCVLVSEENEAAIFVDAPLRGKYCVCFDPLDGSSNTDCGVSIGTIFGIYMIKDKDNATLEDVLQPGTHMIAAGYCMYGSSCTLVLSTGNGVNGFTLDPSLGEFILTHPNIKIXNKGKIYSVNERNARNWDAPTAKYVERCKFPQDGSSP

SEQ ID NO: 291066 - protein, 161 aa, Zea mays
  unsure (1)..(161): unsure at all Xaa locations
  Clone ID: MRT4577_28540C.1.pep
GKVGGYWFNQKANKELDDMNSISSSIGDGAKWMVNKIKGKMQKPLPEFLKEYDLPAGLFPQDATNYELNEDTKLLTVYIASPCEVGYNDSSVLRFATTVTGYLEKGRMTHVEGLKTKILIWTKVTEVRTEATKVHFAAGMNKTRNRDAYEVVRDGIXVDKF

SEQ ID NO: 291067 - protein, 95 aa, Zea mays
  Clone ID: MRT4577_28541C.1.pep
SEWPDGLGFLTQSVCRVVHRRPPRGGATGRSGELLLLLAVLLGHPPGGADQPQDFFWEVGQIRRGPAAQTNNEPNLSHPISPVPKKKTNRAAANK

SEQ ID NO: 291068 - protein, 106 aa, Zea mays
  Clone ID: MRT4577_28542C.1.pep
EDDRICRIFVFVLFKSASKQWQAPFNSLPYSYPLGYTKPCKPELGLRTWLPLLGPAYATWASFSEEWHAGSGVVDVTFVATSLTHWRVHACCHAHAAVLHHRRPFV

SEQ ID NO: 291069 - protein, 147 aa, Zea mays
  Clone ID: MRT4577_28543C.1.pep
MISGKAYKAVKDKCGFNGTYTEDCQNAMDLATQEKGNIDNWKDSPETMLPSIKKLISSGTRIWLYSGDMDAVCSFISTQYVLDNLGLPIEAAWRPWRVDNEVAGYVIGYKGLVFVTVRGAGHMVPYYQPRRALALFSSFLEGELPPR

SEQ ID NO: 291070 - protein, 279 aa, Zea mays
  Clone ID: MRT4577_28544C.1.pep
IQDRDFFITGESYAGHYIPELANLILSKNRATNVTSIKLKGVAIGNADLDDNLTLRASYDYYWMHAMISGKAYKAVKDKCGFNGTYTEDCQNAMDLATQEKGNIDDYDIYAPICQDASNPSKSSDSLVFGDPCTNHYVSSYLNRPEVQRALHANTTGLGYPWMDCSQQIFDNWKDSPETMLPSIKKLISSGTRIWLYSGDMDAVCSFISTQYVLDNLGLPIEAAWRPWRVDNEVAGYVIGYKGLVFVTVRGAGHMVPYYQPRRALALFSSFLEGELPPR

SEQ ID NO: 291071 - protein, 89 aa, Zea mays
  unsure (1)..(89): unsure at all Xaa locations
  Clone ID: MRT4577_28545C.1.pep
TGYSTGQWSKXCVVGADPSPSSSPTTAGCVRVRRRLVPRRACATRLXGDTTCGARCSGSFVRGTPQEERLGCVWCSKPRLSLSRASVRG

SEQ ID NO: 291072 - protein, 71 aa, Zea mays
  Clone ID: MRT4577_28546C.1.pep
YFSLVGSIKRGSNVLFLQIIDVNSDQVYAFVVYITKRGICSLYHKIMFLQIIRSHSYEINSDQVIASPSIV

SEQ ID NO: 291073 - protein, 51 aa, Zea mays
  Clone ID: MRT4577_28547C.1.pep
LVVPYAYAHMTAPIVGLEILKAATAINVCSFVRLHVLPYIVRDLGYRAFAL

SEQ ID NO: 291074 - protein, 39 aa, Zea mays
  Clone ID: MRT4577_28548C.1.pep
FSCRMSASFFQGTDLPLVTVYSLLNGLHILGVASHDKLE

SEQ ID NO: 291075 - protein, 82 aa, Zea mays
  Clone ID: MRT4577_28549C.1.pep
NSARGIPPSLLPSPRPRSPLAARLPAEIEEAPIARGLALPSTAPTSPRPLRLRSHTPRCGRRTPPWMSDRVDAPRVKEGLVP

SEQ ID NO: 291076 - protein, 443 aa, Zea mays
  Clone ID: MRT4577_2854C.1.pep
MDPKGKGIVINDKEKESFVNEPKDDKPTDSGSGHKRKDGKKKKTRRIKEIVYYDDSDESTSSQKDDDNDYRKTVNSNFSFDYSRIPHSSNSHLLSIPLGKPPHFDGEDYGFWSHKMRSHLFSLHPSMEEYNKVSGLDNAKQIWDTLKISHEGNDITMLTKMELVEGELGRFAMIRGEEPTQTYNRLKTLINKIRSYGSTRWTDHDVVRLMLRSFTVLDPHLVNNIRENPRYTMMTPEEVLGKFVSGRMMIKEARYVDDALNGPINEPQPLALKATRSKEMLPSKVAQIEAVGLNDEEMALIIKRFKTALKGRKGQPSKTKTKGKHSCFKCGKLGHFIANCPDNDSDQDQGNKREKKKNYKKAKGEAHLGKEWDSDCSSSDSDNEGLAATAFNKSSLFPNERHTCLMAREKKVSTRDSTYASSSDNESSDDDDIDYSCLFKGLD

SEQ ID NO: 291077 - protein, 70 aa, Zea mays
  Clone ID: MRT4577_28550C.1.pep
LSDSDDNTSSRLLASRNSFFPEQKITNHMLQRKVAKIIGSNSKARQGLLLSYRREQRQARFSPVGLYPLA

SEQ ID NO: 291078 - protein, 107 aa, Zea mays
  Clone ID: MRT4577_28551C.1.pep
FFFFFFFFFFFLGGGFFYFFAGTFRRTSGPYPENSKKLPKTMQISPKWGKLKTGNNPTQNSNRKQKGKSLQSQKRDQTKKKRVKLRAPKRDGKPKKPPDSKNPPTRG

SEQ ID NO: 291079 - protein, 108 aa, Zea mays
  unsure (1)..(108): unsure at all Xaa locations
  Clone ID: MRT4577_28552C.1.pep
GSAPLVLVAVSACSGRVRPLGVRRTFRCPVCSVLACPAPSFVPWWCSCSSVCVLFGCVAGLTVCVTACVGRGPGRLLLGPLSFVSVGPVGVSAGLFLYFPRGGVXXXR

SEQ ID NO: 291080 - protein, 73 aa, Zea mays
  unsure (1)..(73): unsure at all Xaa locations
  Clone ID: MRT4577_28553C.1.pep
GGXFFXGGXXKNNKPYDFFWEKKLGLQKLHLFRFHGWRPAIFFWAPRTLGFVIKFNGAFKKPPWGQKYFLTGT

SEQ ID NO: 291081 - protein, 285 aa, Zea mays
  Clone ID: MRT4577_28554C.1.pep
MHSQHLYPLPHRRLSNTMIGYLNLVTLVASIPIIGAGLWLAHGSAAVTCESALQTPLLAIGFIVLLISLAGFIGACYHVTWALWLYLLAMLLLVLALLGITVFGLAVTAGGGGGRQVPGRPYREFRITDYSAWLQRHVEVDRYWRAALACVVGSRACPRIAAWTPLDYLQHNLTPIQSGCCKPPTSCTYNEQGIPIAAPAQDEEDCYRWNNAPSVLCYQCDSCKAGVLEQVRRDWHTITILNVIVLVLLIAIYSCGCCAFRNARRADYTYGGMSSKTNPRWDYFW

SEQ ID NO: 291082 - protein, 188 aa, Zea mays
  unsure (1)..(188): unsure at all Xaa locations
  Clone ID: MRT4577_28555C.1.pep
AGLFQKRDYSAWLQRHVEVDRYWRAALACVVGSRACPRIAAWTPLDYLQHNLTPIQVGNYEYARVFFFLLLIKLQCKNAXSGCCKPPTSCTYNEQGIPIAAPAQDEEDCYRWNNAPSVLCYQCDSCKAGVLEQVRRDWHTITILNVIVLVLLIAIYSCGCCAFRNARRADYTYGGMSSKTNPRWDYFW

SEQ ID NO: 291083 - protein, 63 aa, Zea mays
  Clone ID: MRT4577_28556C.1.pep
QKKIWDALRVPPESDLALAQPFVDSAGIIVSNPDMTLCYAKKGPKSHLPKFVLSEPATLIPAG

SEQ ID NO: 291084 - protein, 334 aa, Zea mays
  unsure (1)..(334): unsure at all Xaa locations
  Clone ID: MRT4577_28557C.1.pep
FSLLPLPRPSGVKRCWRKTGYPTSTTRPHKAYPIELAQFHSADYVEFLHRITPDSQHLYASELTRYNLGEDCPVFDNLFEFCQIYAGGTXRVMTVSFHKYGDLFFPGTGDIKDIGEREGKYYAINIPLKDGIDDTSFTRLFKTIIAKVVETYLPGAIVLQCGADSLARDRLGCFNLSIEGHAECVKFVKKFNIPLLVTGGGGYTKENVARCWAVETGVLLDTELPNEIPKXNECIEYFAPDYTLKVPNLNMDNLNSKTYLSSIKVQVMESLRYIQHAPGVQMQEVPPDFYIPDFDEDELDPDERVDQHTQDKQIHRDDEYYEGDNDNDHDDGTR

SEQ ID NO: 291085 - protein, 74 aa, Zea mays
  Clone ID: MRT4577_28558C.1.pep
MTAADGESCAVVATAADIICSLRGADLAGWTPPWRKHEAACEGVREEEGGGGDKARDLAWPAVARGKRSRSRRE

SEQ ID NO: 291086 - protein, 114 aa, Zea mays
  Clone ID: MRT4577_28559C.1.pep
SCLLDGIPLGRPGTRFSYAHLEDHWTHSETALYLPRSSSNLASGMASKEIGVLTCFIAITALAFRPCASAVPMDGGWPNGISTLERPRHGSWIRRWRLRRPRRRRPTSVLVNDH

SEQ ID NO: 291087 - protein, 430 aa, Zea mays
  Clone ID: MRT4577_28560C.1.pep
MLEKDRISYFYDGDVGNVYFGPNHPMKPHRLCMTHHLVLSYGLHQKMEIYRPHKAYPIELAQFHSADYVEFLHRITPDSQHLYASELTRYNLGEDCPVFDNLFEFCQIYAGGTLDAARRLNHKICDIAINWAGGLHHAKKCEASGFCYINDLVLGILELLKYHARVLYIDIDVHHGDGVEEAFYFTDRVMTVSFHKYGDLFFPGTGDIKDIGEREGKYYAINIPLKDGIDDTSFTRLFKTIIAKVVETYLPGAIVLQCGADSLARDRLGCFNLSIEGHAECVKFVKKFNIPLLVTGGGGYTKENVARCWAVETGVLLDTELPNEIPKNEYIEYFAPDYTLKVPNLNMDNLNSKTYLSSIKVQVMESLRYIQHAPGVQMQEVPPDFYIPDFDEDELDPDERVDQHTQDKQIHRDDEYYEGDNDNDHDDGTR

SEQ ID NO: 291088 - protein, 225 aa, Zea mays
  Clone ID: MRT4577_28561C.1.pep
MNALVVTALVDMYCKCGSVDDARQVFDAARSQGLAKLSSWNSMMQGLAVHGQWREAVALFSELKSYGLSPDNVTFIAVLTAYGHSGMPDEAQAAFASMSSEHGVEPGIEHYGCLVDALARAGRLREAEDAIRAMPMAPDAAIWGALLSGCRLHGDAELGARAAREAVRCDPRDSGAYVLAASVLARGGDPGRGAGIRGRMREAGVGKVPGSSMIEVNGVVHEFVS

SEQ ID NO: 291089 - protein, 103 aa, Zea mays
  Clone ID: MRT4577_28562C.1.pep
MAATANVPSWRHAFAAAYSCDSQMPETEMHGELFANNCGYTVWSGLLSSAGSAPLPTTVFALAPSESRAVAAPAGWSGRLWGRTLCAADAATGRFLCTTGDCR

SEQ ID NO: 291090 - protein, 78 aa, Zea mays
  Clone ID: MRT4577_28563C.1.pep
VEVNICYNLFLTRSVMSNRPRRYMIRLPGTYMMIVEGWKNHHHGLGKILVLHVACTANRRQTWDNKGTGVDAEYQSGY

SEQ ID NO: 291091 - protein, 81 aa, Zea mays
  Clone ID: MRT4577_28564C.1.pep
MQNEEGKTVDLYVPRKCSATNRIITAKDHASVQINIGHLDANGLYDGHFTTFALSGFVRAQGDADSSLDRLWQKKKADIKQ

SEQ ID NO: 291092 - protein, 40 aa, Zea mays
  Clone ID: MRT4577_28565C.1.pep
SYITRPFTCEDEINSPVSPATLYKALITDTYNFIPKALDS

SEQ ID NO: 291093 - protein, 82 aa, Zea mays
  Clone ID: MRT4577_28566C.1.pep
KKNFVTLKRRPLFFFFFKNSNIKLKKDTTLQSQLPLKSKVKYIKIIKNFVCRALGTSLTFFRLGRDAQSYAPSAMRFRQQRA

SEQ ID NO: 291094 - protein, 144 aa, Zea mays; identical to SEQ ID NO: 196450
  Clone ID: MRT4577_28567C.1.pep

SEQ ID NO: 291095 - protein, 107 aa, Zea mays
  Clone ID: MRT4577_28568C.1.pep
NGNRGEKKKGKKGFFFLVSTTPFFPGGGPNPKLWKKRTQISPPKNLKPGGFLGGRVLNPKGLKGGGAKRNHPGGNPAKQIQNPKTPQMGQNKSGGFKKKGGPPICFV

SEQ ID NO: 291096 - protein, 559 aa, Zea mays; identical to SEQ ID NO: 285177
  unsure (1)..(559): unsure at all Xaa locations
  Clone ID: MRT4577_28569C.1.pep

SEQ ID NO: 291097 - protein, 1025 aa, Zea mays
  unsure (1)..(1025): unsure at all Xaa locations
  Clone ID: MRT4577_2856C.1.pep
MLLCTMIEDSLIGVVMLMMLLTLMPCLLLVLPICMVYASGXSSWIIDSGCTNHMTGEKKMFTSYVKNKDSQDSIIFGDGNQGKVKGLDVSVFRRSDGSLAFKGVLDGKLYLVDFAKEETGLDACLIAKTSMGWLWHRRLAHVGMKNLHKLLKGEHVIGLTNVTFEKDRPCAACQAGKQVGGAHHSKNVMTTSRPLELLHMDLFGPVAYLSIGGSKYGLVIVDDFSRFTWVFFLQDKTETQGTLKRFLRRAQNEFELKVKKIRSGNGSEFKNLQVEEYLEEEGIKHEFSAPYTPQQNGVVERKNRTLINMARTMLGEFKTPERFWSEVVNTACHAINRVYLHRLLKKTSYELLTGNKPNVSYFRVFGSKCYILVKKGRNSKFAPKAVEGFLLGYDSNTKAYRVFNKSSGLVEVSSDVVFDETNGSPREQVVDLDDVGEEEVPTATIRTMAIGDVRPQEQDKRDQPSSSTTVHPRTQDDEQEECDQGGAQDDQIMEEEAQLAPPNQVRATIQRDHPVDQILGDISKGVTTRSRLVNFCEHYSFVSSIEPFRVEEALLDPDWVLAMQEELNNFKRNEVWTLVPRPKQNDVGTKWVFRNKQDEHGAVTRNKARLVVKGYAQVTGLDFEETFAPLARLESIRILLAYAAHHSFRLFQMDVKSAFLNGPIKEEVYVEQPXGFEDEPYPDHVCXGKVDPTLFTKTCDGDLFVCQIYVDGIIFGSTNQKSCEEFSRVMTQKFEMSMMGELSYFLGFQVRQLKDGTFISQTKYTQDLIKRFGMKDAKPAKTPMGTDGHTDLNKGGKSVDQKAYRSMIGFLLYLCASRPDIMLSVCMCARFQSDPNECHLVAVKRILRYLVATPCFGIWYPKGSTFDLIGYSDSDYAGCKVDRKSTSGTCQFLGRSLVSWSSKKQTFVALSTAEAEYVAAGQCCAQLLWMRQSLRDFGYNLSKVPLLCDNESAICMADNPVEHSRTKHIDIRHHFLRDHQQKGDIEVFHVSSENQLADIFTKPLDEQTFCKLRSELNVLDSRNLD

SEQ ID NO: 291098 - protein, 67 aa, Zea mays
  Clone ID: MRT4577_28570C.1.pep
MAMEEAVKMTCRKKGGLRTVPFIFANEVAENLAVVGFSTNMLTYLTSQLHMPLGKAASTLTNFGGTS

SEQ ID NO: 291099 - protein, 93 aa, Zea mays
  unsure (1)..(93): unsure at all Xaa locations
  Clone ID: MRT4577_28571C.1.pep
MQPNFLRNFGWAPFLGLAKTPIARVSQKGKVFFWPRGKDGTKWEGKLRGAFGSPVWRVSGPLPGKKLPKAGGGNKXTPLKERVXGQWEEVIKV

SEQ ID NO: 291100 - protein, 76 aa, Zea mays
  Clone ID: MRT4577_28572C.1.pep
PSARGTGGSGCSPTPKAGAGGLPPEAGAPCVWGWPQRLHPVVSPLSHEYSCIFPSGAPQEHCSYCDSIRNGINQER

SEQ ID NO: 291101 - protein, 63 aa, Zea mays
  unsure (1)..(63): unsure at all Xaa locations
  Clone ID: MRT4577_28573C.1.pep
PPSTPAKNATHPSQDVGPPPPPXGWWGSPPPGRVXPPPIPPPLSCQPPPRFVFPPECFGGVCP

SEQ ID NO: 291102 - protein, 358 aa, Zea mays
  Clone ID: MRT4577_28574C.1.pep
MDIHVGSSPPRSDGATVARASTALTGQVALEVGELDARSLLSAGEAEVTPDSALQIVPADPPSSSHASAPPSLGLPLFLSKLQDFVDGISAQLKSCGATIPEQALSLMQWNPLLLQKQIDDLKASNAAALSDMAQRCSDLEEKYTQSLADLAQTSAFLDGARSLNSSLNAQLDSDKMAHEEEKRALVASRDNLDRLYRDASNSLTILERSHRFTMSDQDHHRHELQVSQDEVLRLGQLLSIKDSTIKDLRASKKLIAQELEAARLAIKPLEDSCTILKAQRDKAMDIAIRAGWILMRRPGVVVPDDIVVDVKAALDAASCPSSSVASVKELPAKMFRCSDVLQSTLFIESASFLEDVI

SEQ ID NO: 291103 - protein, 135 aa, Zea mays
  Clone ID: MRT4577_28575C.1.pep
MAPKAAEKKPVEKTPAGKKPKAEKKVPASKEGGEKKGKKKSKKSVETYKIYIFKVLKQVHPDIGISSKAMSIMNSFINDIFEKLAGESAKLARYNKKPTITSREIQTSVRLVLPGELAKHAVSEGTKAVTKFTSA

SEQ ID NO: 291104 - protein, 151 aa, Zea mays
  Clone ID: MRT4577_28576C.1.pep
MAPKAEKKPAAKKPAEEEPATEKVEKAPAGKKPKAEKRLPAGKSKEGGEGKKGKKKAKKSVETYKIYIFKVLKQVHPDIGISSKAMSIMNSFINDIFEKLAAESAKLARYNKKPTITSREIQTSVRLVLPGELAKHAVSEGTKAVTKFTSS

SEQ ID NO: 291105 - protein, 154 aa, Zea mays
  Clone ID: MRT4577_28577C.1.pep
MAPKAEKKPAAKKVAEEEPSEKAAPAEKAPAGKKPKAEKRLPAGKSAGKEGGDKKGRKKAKKSVETYKIYIFKVLKQVHPDIGISSKAMSIMNSFINDIFEKLAAEAAKLARYNKKPTITSREIQTSVRLVLPGELAKHAVSEGTKAVTKFTSS

SEQ ID NO: 291106 - protein, 49 aa, Zea mays
  Clone ID: MRT4577_28578C.1.pep
SELRESICYTNNIWIFHLYVSSRRQGNCLYSQFKHVILFLHEHRPILWC

SEQ ID NO: 291107 - protein, 143 aa, Zea mays
  Clone ID: MRT4577_28579C.1.pep
DLHALRKLGSCIAGALYSFVLKKHTDPAYSNMSDCRLLEPQLRESSVGKYHKALDLRSRCKDVPWTGTRSIPEMSIILHAKRLRSWILCVMAVVNGGRPEPHRIQEIGAVGIHSQCCIVIFLMDRYSAEERKRSTMLGISTSN

SEQ ID NO: 291108 - protein, 1462 aa, Zea mays
  Clone ID: MRT4577_2857C.1.pep
MDPKGKGIVINDKEKESFVNEPKDDKSTDSGSGHKRKDGKKKKTRRIKEIVYYDDSDESSSSQKDDDNDHEKKKTVNSNFSFDYSRIPQSINANLLFIPLGKPPHFDGEDYEFWSHKMRSHLFSLHPSIWELVESGMKFDSSDSPLFINEQIHKNAQATTVLLASLCRDEYHKVSGLDNAKQIWDTLKISHEGNDVTMLTKMELVEGELGRFAMIRGEESTQTYNRLKTLINKIRSYGSTRWTDHDVVRLMLRSFTILDPHLVNNIRENPMYTKMSPEEILGKFRFKTALKGRKEHPNKNKTKGKRSCFKCGKIGHFIANCTDNDSDQEKKSGKWEKKKNYKKAKGEAHLGKEWDSDCSSSDSDNEGLAATAFNKSSLFPNEHHTCLMAREKKVSTRNTSTYASSSEDESSDDDEIDYSCLFKGLDRTKVDKINELIDALNDKNRLLEKQEDLLYEEHDKFVSAQNSLALEVKRNEMLSCELSTCHETISTLKGVNDDLNAKLVVANKSNSCVEHVMICNRCKDFNVDACSEHLACISKLNDEVASLNAQLKTSKSEFDKLKFARDAYTIGRHPSIKDGLGFKREVKNLTSHKAPISAKEKGKAPMARSAQKNHAFMYHDRRHSRNVYRSYDAFDSHAMVASSSSIMHDRNLARRNAINHMPRRNIVHVPRKTNSEPSTIYHALNASFAICRKDRKIIARKLGAKCKGDKTCIWVPKAICTNLVGPNMSWVYASGGSSWIIDSGCTNHMTGEKRMFSSYVKNKDPQDSIIFGDGNQGKVKGLGKIAISNEHSISNVFLVESLGYNLLSVSQLCNMGYNCLFTNVDVSVFRRSDGSLAFKGVLDDKLYLVDFVKEEAGLDACLIAKTSMGWLWHRRLAHVGMKNLHKLLKGEHVIGLANVTFEKDRPCAACQAGKQVGSSHHAKNVMTTSRPLELLHMDLFGPVAYLSIGGIKYGLVIVDDFSRFTWVFFLQDKSETQGTLKRFLRRAQNEFELKVKKIRSDNGSEFKNLQVEEYLEEEGIKHEFSAPYTPQQNGVVQRKNRTLIDMAKTMLGEFKTPERFWSEAVNTACHAINRVYLHCLLKKTSYELLTGNKPNVSYFRVFGSKCYILVKKGRNSKFAPKAVEGFLLGYDSNTKVYRVFNKSSGLVEVSSDVVFDETNGSPREQVVDLDDIDEEDVPTAAMRTMAIGDVRPQEQKEQDQPSSSTMVHPPTQDDEQVHQEEAYDQGGAQDVHVIEEEAQPAPPTQVRAMIQRDHPVDQILGDISKGVTTRSRLVNFCEHYSFVSSIEPFRVEEALLDPDWVLAMQEELNNFKRNEVWTLVPRPKQNVVGTKWVFRNKQDKHGVVTRNKARLVAKGYAQVAGLDFEETFAPVARLESIRILLAYAAHHSFRLFQMDVKSAFLNGPIKEEVYVEQPPGFEDERYPDHVCKLSKALYGLKQAPRAWYECLRDFLIANAFKVGKAD

SEQ ID NO: 291109 - protein, 107 aa, Zea mays
  Clone ID: MRT4577_28580C.1.pep
ERIRCNKTVRDVRLDDARCISPRLQPVFERRLPQHIQPRDMYGPQLIVRPIFQEVHHAAGTARPHHCHDPFCTRRNIGHCTYLDSLLDAKLLYEQCQQKAMTRGASN

SEQ ID NO: 291110 - protein, 52 aa, Zea mays
  Clone ID: MRT4577_28581C.1.pep
FFPKNEKYVSLFTGGNSQDIVQERNKCRKQIKENLMAAAANGKDLEGVCLRY

SEQ ID NO: 291111 - protein, 119 aa, Zea mays
  Clone ID: MRT4577_28582C.1.pep
YRILPWRIWESDRSRWWCMYISHTAGELCSKKKTRTIRSISIFVSVGADERCGRYRAQTSQWLRSLERRSTSAMAVSSHLPAVAQVTDVGCRDRTFPVEVPRVGHSSSDIVQGRTQEEH

SEQ ID NO: 291112 - protein, 67 aa, Zea mays
  Clone ID: MRT4577_28583C.1.pep
CLEKNSDPCVICRSCSLAFAIVLSFILSCKQLNCNQGKRPQLCGGPYREVCSGLIEKEKLPRSKGPF

SEQ ID NO: 291113 - protein, 229 aa, Zea mays
  unsure (1)..(229): unsure at all Xaa locations
  Clone ID: MRT4577_28584C.1.pep
MKPSRAAMLAMVGLVAAVLSPAALSTAAPSLISLPNSDSPSYDFHDESCPNLWQMVHDAVEEAIKEDIGVVAGLLRVMFHDCFPQGCDASLLLSDKFWSELNMPQNNGIRRNAVYLIESIRVKVQDTCGPTVSCTDIMNLATREAVMHFEVPGYEVPLGLLDSRAPAPRENVEQLPGPDFNTTQLIESFQSRGFDITDVVALSGAHXXGRSSCGSFRNRFGENATLFVG

SEQ ID NO: 291114 - protein, 82 aa, Zea mays
  Clone ID: MRT4577_28585C.1.pep
SYDLQSYSADLYQVTLCITMDRPLLHITSKMSLFCMLYNIGAATLDDQILPLPRAKIMTTAFVDSKDATSHHLGDCVPKNLT

SEQ ID NO: 291115 - protein, 134 aa, Zea mays
  unsure (1)..(134): unsure at all Xaa locations
  Clone ID: MRT4577_28586C.1.pep
KLATPTLLAVGDCCSKLLLVERQASGPGACATSVRRFSRKAYSYQRRHLDVAPRSHTAPXLPRAXQTRRRXQAXRRFPPSTAPTRGALRLHARRGAGPSSRSXTGHSAXPRPSLPPAARXASXPRPDDLAXAPG

SEQ ID NO: 291116 - protein, 126 aa, Zea mays
  unsure (1)..(126): unsure at all Xaa locations
  Clone ID: MRT4577_28587C.1.pep
KCLPQQVKGRFQHNRDHAPPPPPLKPRGRPRKGPAPPQXGGGESPPPSPPHGGPPRKPGEPRAPPPXIVMGHPQTPXAQNFKTRKPDVPPQKKGGQKPLLGXPPQGPPTMHKVLGAKNPQKPPRTK

SEQ ID NO: 291117 - protein, 346 aa, Zea mays
  unsure (1)..(346): unsure at all Xaa locations
  Clone ID: MRT4577_28588C.1.pep
MPPTTAPAAAAALPSPSHRRLPAAKSVWLNPNLPSSHPLHQRHKSAAELQQRQHDDRTIDVPALVTALSAARTAPDLAAVLATHRPVSARLLGALLSRLPDPRRGVALLDLLAPDLPAPTLLIPYNLLLRSACRAGELRLASGLLLEMRERGVTPDAFSYSTLLAALTRAGHLDHALTFLPLMEDDAVAPDLILFSNLIHLALRGGDAPKALALFSRLRAAGIRPDLKAYNAAVAAYCKSDLLRDAKRMLLHDMPADGVAPDAETYSPILAALARRGRHLAAVSLFSHMRAVARVKPDISVVHIILNAYGQLDLAREADRLVWXMRRAGVPPSVVTYXTMLRVYGD

SEQ ID NO: 291118 - protein, 90 aa, Zea mays
  Clone ID: MRT4577_28589C.1.pep
SDSRRLMGLTLEQGIMPSSKLKLLPTLNTQLPIMFNGKDRAHRPLTNELVWAPANRWAIRSPTTIHPGISLISRNVNMRPNTLSILCRDF

SEQ ID NO: 291119 - protein, 59 aa, Zea mays
  Clone ID: MRT4577_2858C.1.pep
GHSHLSSSLSLRINGRSLSNHIRHAHGVGHSPASGVNFTIQDPRQNSSSLGRNGTVRIW

SEQ ID NO: 291120 - protein, 434 aa, Zea mays
  Clone ID: MRT4577_28590C.1.pep
VPIDAGKEQSSTTDCEAPTKLQNLVCSKSTQNHSQSHVKLGLSKEPGDICANITQYSHRKKHFAEHSAVNCNADQHCLAVIDDCIKRSGLNSAAPDFVPLAVRKSNTSDGSCSSSGTNVSGILKEINSLSEVLCNNYSDEIKLEEHDHSLLQSVIGNLQSYLHKASKVPAMVDSDKSGGLKACYAQNAVSKPVAGDYNGSFTADNGKGISISNLGDSSPLVGDLRKKSVTGYQQPALSNFPKELSWEERSQALIYKKLWFDAERTNCALKYQLKQTRVEIDLESSTAHIGGGPRNSSFHLCDVGVDPSSSYGSAITCPPMMLKGHPGERKSHNLLSAADHIQSGDSSALSRPKGYIAVPENIEDGYFLSGPEETGVRRHARPGLQSRPLGRLNTSTSDGMSSSYVTGRDDILRGSCEFGSSDWEHVLKEEIGST

SEQ ID NO: 291121 - protein, 193 aa, Zea mays
  Clone ID: MRT4577_28591C.1.pep
MAATLARRAGRSAATTLWGAARGFASVGSDIVSAAPGVSLQKARSWDEGVATKFSTTPLKDIFYGKKVVIFGLPGAYTGVCSQAHVPSYKKNIDKLKAKGIDSVICVAVNDPYVLDGWAKKLDAKDTIEFYGDFDGSFHKSLDLEIDLSAALLGRRSHRWSAFVDDGKIKSFNVEEAPSDFKVSGAEVILDQI

SEQ ID NO: 291122 - protein, 50 aa, Zea mays
  Clone ID: MRT4577_28592C.1.pep
IPGHRALVAVHLHPDSAGKPQGNAHLESNVWVLPRYRSLESVGRSPRTSG

SEQ ID NO: 291123 - protein, 217 aa, Zea mays
  unsure (1)..(217): unsure at all Xaa locations
  Clone ID: MRT4577_28593C.1.pep
MAACGGAGCGPQCSSSSSAGGQEDALVESMGRLSTASAAAACGKCDGGGAAVAVAGGVGMCAGCFRAHLFGKFKLSVTSNAMVRPTDAVLLAFSGGPASRVALQFIHEMQSKAIQSWEASNSQALPVFSLGVAFVDERSVISASLPGHEIQAAIEDIRSVVSGLSPGDKRVHIASLEEAFSFGSDDKAARLKEVGXVISDETVRDDFERRLRMLSLQ

SEQ ID NO: 291124 - protein, 511 aa, Zea mays
  Clone ID: MRT4577_28594C.1.pep
GYLEAGRAVIQPLLSSAFSSSTISAPPAAGRVREDESGLLSRRLLRLRFRSPAGTAAAAVERWAQDRVHVSQPELRRAIGMLRRERRYEQALEIFSWMESCSSLRLSSWDHAARLDLIAKAYSTSQAEEYYNKLQSPATRQAASFPLLHCYVMERDVQKAETFMAQLQSHGLPVDPHSFNEIMKLYVATCQYEKVLSVIDLMKRNNIHRNVLSYNLWMNACAEVSGVDSVQSVFQVMLNDETVKVGWSTYCTLANIFRKNGLNNEAQACLVKAEAKLSPAGRLGYSFVMTCYAALNDSDGVMRMWEASKSVPGRIPTAYYMAAMSCSIKVGDISQAECIFGKWEAGCRKHDVRVSNVLLGAYVRNRWIEKAERLHLHMLEKGACPNYKTWEILMEGYVQSRQMDKAVGCMKKGLSLLKSCHWRPPVELMEAIGKHFEEQGSADDAYRYIKVLQRFNLTSLPLYKSLIRAYINADVVPPNVLEMIAKDQIDMDEEMDRLIIIAGKIDITCNG

SEQ ID NO: 291125 - protein, 62 aa, Zea mays
  Clone ID: MRT4577_28595C.1.pep
VVHNRGVSFQQPSFMKLHPYRPVSISYSRLAPLGLARTVSHATIILAMGIKGTPLSLIPFCP

SEQ ID NO: 291126 - protein, 48 aa, Zea mays
  unsure (1)..(48): unsure at all Xaa locations
  Clone ID: MRT4577_28596C.1.pep
XXKHFKGSQKHPTKDWKFGAPRLIGQHNQIMGPEHVFYILQKQKNQRT

SEQ ID NO: 291127 - protein, 114 aa, Zea mays
  unsure (1)..(114): unsure at all Xaa locations
  Clone ID: MRT4577_28597C.1.pep
KEGKLMQYLKLDRVGFKARSXESXRDLFLKLGXSPEAHFTGTPAEPVYCFRPNINWCTLIYXDRVHQIIGAMQSSTATDVDNGNGILCIDHGIKLNPGTKLYNLDDTKAPQLCM

SEQ ID NO: 291128 - protein, 139 aa, Zea mays
  Clone ID: MRT4577_28598C.1.pep
MSSDSDLFVDAHDLWNRIKEKYSVTNCDAPTPYITCVTNHSEGEEQERRHPNDESTSSTGLFSTSDKCFIANNDGGDESRDEKEYEDDSEDESSSSQGTFSYIASTDINDRENETDDVEEEEILPFLQPSQQNGQSSLG

SEQ ID NO: 291129 - protein, 200 aa, Zea mays
  unsure (1)..(200): unsure at all Xaa locations
  Clone ID: MRT4577_28599C.1.pep
MDMALPIVNATTAALARVSAAFNAPLARAVVFGVHIDGHLVVEGLLIAVIVFQLSRKSYKPPKKPLSEKEVDELCDEWEPEPLCPPVKERSHIDPPILESAAGPHTTIEGKEVVNFASANYLGLIGNEKLIDSCVGSLEKYGVGSCGPRGFYGTIDVHLDCEAKIANFLGTPDSILYSYGISTIFSVIPAFCKKXDIIVA

SEQ ID NO: 291130 - protein, 1599 aa, Zea mays
  unsure (1)..(1599): unsure at all Xaa locations
  Clone ID: MRT4577_2859C.1.pep
MNPKGKGTVVNDKDKESFLNEPREDKPTDSGSNHKKKDGKKKRRIKKIVYYDSDESSSSQRDDDDEKKKSVNSNFSFDYSRIPFNSNAHLLSIPLGKPPHFDGEDYSFWSHKMCSHLFSLHPSIWEIVENEMLFDSTDNPVFINEQIHKNAQATTVLLASLCRDEYHKVSGLDNAKQIWDTLKISHEGNDATMITKMELVEGELGRFAMIRGEEPTQMYNRLKTLVNKIRSLGSTRWTDHDIVRLMLRSFTVLDPHLVNSIRENPRYTKMTPEEILGKFVSGRMMIKEARYIDEALNGPMPIYEPQTVALKATSSMEALPSKVAQVEAAGLNEDEMALIIKRFKIALKGRKEYSNKNKAKGKCSCFKCGKTGHFIAQCPDNENDQEDERHGKREKKKAYKKAKGEAHLGKEWESDCSSSDSDDEGLAASAFNKSSLFPNERHTCLMAKEKKVNARETPKYSTSSDEDSSDDEVDYTSLFKGLDRAKVEKINELIDALNEKDRLLERQEDILYEEHDKFVSVQKSLALEIKRNELLSSELSICNESISSLKILNDDLNAKLEVVNKSSPCVEHVVICNRCKDFNIDACVEHLNSIAKLNDEVESINAQLKTCKDDFDKLKLARDAYTIGRHPSIKDGLGFRREAKNLTSQRAPILNKEKGKAPMDSSSQKNHAFIYDRKFSRNAHYNRSYNAYDSHAMIVSSSSFVHSRNMPRNNVVHHVPRKMQNESATVFHACNTDFVLSCKNKKVVARKLGAKCKGDKTCIWVPKAIVTNLVGPNKSWVYASEGSSWIVDCGCTNQMTEEKKMFTSYVKNKDSKDSIIFGGGNQGKVKGLGKIAISSEHSISNVFLVESLGYNLLSVSQLCNMGYNCLFTNVDVSVFRRSDGSLAFKGVLDDKLYLVDFSEEAVLDACLIAKTSMGWLWHHRLAHVRMKNLHKLLKGEHVLGLTNVTFKKDRPCEACQVGKQVGSSHHSKNVMXHQDLWSYFTWTSSDPSPTSTSGEVSMXVIVDDFSRFTWAFFLQDKTETQGTLKRFLRRAQNEFELKVKTIRSDNGSEFKNLQVEEYLEEEGIKHDFSTPYTPQQNVKKGRNSKFAPKAVEGFLLDYDPSKMIGDTLKGIIVRDXIPLFFIHRTLTXSIFLHYLHNYPMMPDRYXALQLSRNEXWKLNPSGTSIYVXNRMKICSARAHHVSLPSRTAEALDTALATLXNLVLQQSPRLGCVGLLSLVHGXRLYQGRLWSPSRLDPMMHISYAXVPWSPDQSFSVGERSLGHHQPVVYLPDFXAYTYLSLGSSFLLAATSSLCKFWWQXLELLDGVLQRRETDRKSFTFIYDIFCALLQFGGIRDVIEGYDLVVSKFQCKQTRNPGHCNMPVEQFYYTNLLRNIFNIDRSGKREVFHKPAHMXVEFQDSHLLDKSCIXIQQQPLQCPVXRVHHGVIQGLSWFTKVRYHLTRIVSDFAEFRGGRRSPSGTCKFLGRSLVSWRYKKHTSVPLSTAEADYVSAGQCCAQLLWMRQTLRNFGYNLSEVPLLCDNESAIRMADNLVEHSRTKHIAIRHHFQRDHQQKGDIEVFYVCTENQLADIFTKPLDEKTFCRLCSELNVLDSHNLD

SEQ ID NO: 291131 - protein, 157 aa, Zea mays
  unsure (1)..(157): unsure at all Xaa locations
  Clone ID: MRT4577_285C.1.pep
PGSSLPATIFLVSSSTGGGGDQFIDDHIVEFKEVFSLFYKDRDGCITTXELCTDIHSLMQNPTEAERRDMINEVDAYGDSTIDFPELLNLMXARKMNDTYSEEELNEASRVSDKDQXDXIWCEQLRHVMTNVGDKLTDDEVDEMISEADAYGDGHIN

SEQ ID NO: 291132 - protein, 267 aa, Zea mays
  Clone ID: MRT4577_28600C.1.pep
MSEEQFLAVAVEAAKSAGEIIRKGFYQTKNVEHKGQVDLVTETDKACEDLIFNHLRKHFPDHKFIGEEESAALGATADLTDDPTWIVDPLDGTTNFVHGFPFVCVSVGLTIGKIPTVGVVFNPIMNELFTAVRGKGAFLNGSPIKASSQDELVKALLVTEAGTNRDKTTVDDTTNRINRLLYKIRSIRMCGSLALNMCGVACGRLDLCYEIGFGGPWDVAAGAVILQEAGGLVFDPSGGEFDLMSRRMAGSNSLLKDKFVKELGDTN

SEQ ID NO: 291133 - protein, 151 aa, Zea mays
  Clone ID: MRT4577_28601C.1.pep
LAEGKINMRGLNPAQGGVTGFFSDPGETGKGGGALQYTFRLITRRDGKKKDGDDFEILKQQGGGERTLYPCLLHFPTRVCWFFPPCRVAIRVATPQRAMTTGTIRVTKKPLNLSKDHGGGGNHPFRSAVVFGCRNSCFMGGGGCWGGWGTR

SEQ ID NO: 291134 - protein, 121 aa, Zea mays
  unsure (1)..(121): unsure at all Xaa locations
  Clone ID: MRT4577_28602C.1.pep
LLFFFFQIRSIRMCGSLALNMCGVACGRLDLCYEIGFGGPWYGLTKLIAVVFLKKQLHVFITSSQTANFPXDVAAGAVILQEAGGLVFDPSGGEFDFMSRRXAGSNSLLKDKFVKELGDTN

SEQ ID NO: 291135 - protein, 67 aa, Zea mays
  Clone ID: MRT4577_28603C.1.pep
KGRQGVIKPRNSPSCFFERGGPGKKTTGGLNRKFGRLFLILFNNLGRTKRSTKVGTHLVLRPPLGEV

SEQ ID NO: 291136 - protein, 53 aa, Zea mays
  Clone ID: MRT4577_28604C.1.pep
PGRKICLAFPVMSPRDYAHILRNYCGTGLVDRFHVPLCLCLILHEYRACVLFL

SEQ ID NO: 291137 - protein, 343 aa, Zea mays
  Clone ID: MRT4577_28605C.1.pep
MDDVPVWFVSLACLGALYIAKICWRPLAYLALCLRGPKDLHRYGSWAMVTGPTSGLGRSMAMELARRGLNLVLLDLDANNLQETSEAIKSVHPVKIRTVVLDLSLVATPEGDKAIRRLREAIEGLDVGILVNNAAVNTPGAVYLHEADIERFVRMIRVNLWGLTEVTAAVLPSMLARRRGAIVNVGSGSTVAVPSFPLYTVYSSTKKYVAHLSRSLYVEYKSKGIDVQYQVPFYVHTRMLSSAVKAKLRPWFVATAEEYTSTAARWIGNGPVCVPGAAQNLQWCLTGFVPDWVHDWYRIRLHLQHRAVLRGGRAAIASAHSRAEKAVTPDDDDANSVAPKISA

SEQ ID NO: 291138 - protein, 128 aa, Zea mays
  Clone ID: MRT4577_28606C.1.pep
YDVHVWFVSLGCLGGLYIAAICWRPLAYLALCLRGPKDLHRYGSWAMVTGPTSGLGRSMAMELARRGLNLVLLDLDANNLQETSEAIKSVHPVKIRTVVLDLSLVATPEGEMRSRYRFTHTHGSLLVA

SEQ ID NO: 291139 - protein, 42 aa, Zea mays
  Clone ID: MRT4577_28607C.1.pep
MALPEPTSSLAHRVFYLRVSRCEVNQSMLDTLALTHTPLTPD

SEQ ID NO: 291140 - protein, 148 aa, Zea mays
  unsure (1)..(148): unsure at all Xaa locations
  Clone ID: MRT4577_28608C.1.pep
MLSLVSWLLLFSDMYFVSSLLLAGTEEATDRRLTTRELVDECKTFFFGGHKTTPLALSWTLLMLAAHPDWQDAFAXGLARATXGRAIQAXGTAGPTRLTARGWVMTRRVRLYPPSPNVQRQALEDVQVAEGKGAAVVIPRGTNMWVDV

SEQ ID NO: 291141 - protein, 102 aa, Zea mays
  Clone ID: MRT4577_28609C.1.pep
TISSFICSSLVWCQNHLQERQLPSHGQELFLGSEALVLVASTMAKNSLISCAGGTISSTVSVAVGNDRPVFFPTRSDSRAASSPFALIDSRHLSPTVTCYLV

SEQ ID NO: 291142 - protein, 922 aa, Zea mays
  unsure (1)..(922): unsure at all Xaa locations
  Clone ID: MRT4577_2860C.1.pep
MDPKGKGIVINDKEKESFVNEPKDDKPIDSGSGHRRKEGKKKKTRRIKEIIYYDDSDESTSSQKDDDNDYKKTVNSNFSFDYSRIQHSSNSHLLSIPLGKPPHFDGEDYGFWSHKMRSHLFSLHPSIWEIVENGMKFDSSDSPMLINEQIHRNAQATTVLLASLCREEYNKVSGLDNAKQIWDTLKISHEGNDITMLTKMELVEGELGRFAMIRGEEPTQTYNRLKTLINKIRSYGSTRWTDHDVVRLMLRSFTVLDPHLMNNIRENPRYTMMTPEEVLGKFVSGRMMIKEARYVDDALNGPLHEPQPIALKATRSKESLPSKVAQVEAAGLNDEEMALIIKRFKTALKGRKGQPSKAKTKGKRSCFKCGKLGHFIANCPENDSDQEQGKNGKRENKKVYKKAKGEAHLGKEWDSDCSSSDSDDEGLAATAFNKSALFPNEHHTCLMAREKKVITRNANTYDSSSDDESSEDEIDYSSLFKGLDRTKIAKINELIDALNEKDRILEKQEDLLYEEHDKFVSAQNSLAIEVKRNGILSCELSTCNETISSLKGEINDLTAKLEVASNSYVENVTICTRCKDFDVNACSEHLVSISKLNDEVASLNAQLKTSKSEVDKIKFARDAYTVGRHPSIKDGLGFKREAKNLTSHKASIFVKEKGKAPMVSSAKRNHAFLYYDRKHARNAYNDFDSHAYDSYAMTASSSHVVHMPRRNFAHAPRKVVNKPSTIYYACNAPFAICRKGKKVIARKLGAKCKGDKTCIWVPKXICTNLVGPNKSWVLSPKPKFALQVYASGGSSWIIDSGCTNHMTGEKKMFTSYVKNKDSQDSIIFGDGNQGKVKGLGKIAISNEHSISNVFLVESLGYNLLSVSQLCNMGYNCLFTNVDVSVFRKSDGSLAFKGVLDGNLYLVDFAKKEVGLESTCLIA

SEQ ID NO: 291143 - protein, 66 aa, Zea mays
  Clone ID: MRT4577_28610C.1.pep
TPPNIEILILLEDFSTGLFRGHPHFKIYKLHSFNKNYSGPGVHPEISGRGLEGSQFFLLGGGLKLG

SEQ ID NO: 291144 - protein, 98 aa, Zea mays
  Clone ID: MRT4577_28611C.1.pep
MAVLEAAREWADSVIPPELAAAWWGDPLAVLADTVEGLVAGLLIIDLWPRSGGGTPIMPLATLVRPSSFKVDAYPGVLIAVSRHHIFWEKYWHVRRVC

SEQ ID NO: 291145 - protein, 47 aa, Zea mays
  Clone ID: MRT4577_28612C.1.pep
IRGSLARAALQELLSKGLIKLVSKHRAQVIYTRNTKGGDAPAAGEDA

SEQ ID NO: 291146 - protein, 46 aa, Zea mays
  Clone ID: MRT4577_28613C.1.pep
MLGAALVGLWLMLLLPPMPWVNEGAATMAPGACDLRVTASGEDTMY

SEQ ID NO: 291147 - protein, 147 aa, Zea mays
  Clone ID: MRT4577_28614C.1.pep
RRRRRSANCSLPPLRYPPSLAASPCSSSAPAVELSLDGGEDAAAPAYTSDSLILYFKAEGTMEERAIPKITESLEGMEGVKDLEVLIEEGIGSVVLTKETTVQATGVASNLVEAIQGAGFKLQTLSLSFDDFDEPAAGAGGTVQSCE

SEQ ID NO: 291148 - protein, 261 aa, Zea mays
  Clone ID: MRT4577_28615C.1.pep
MGTSRPAGVYLKSSAGMSHRKYEHPRCGSLGFLPRKRAARHRGKAKGFPKDDPKAPVHLTAFLGYKAGMTHVVRDLDRPGSKMHKKEVVESATVIETPPMVVVGVVGYVETPRGLRSLTTVWAEHLSDEVKRRFYHNWYRSKKKAFTKYAKKHAESGPKSSIARELERISKYCTVVRVLAHTQIRKTGLEQKKAHLMEIQVNGGSIADKVEFAKSHFEKTVDVASVFEQDENIDIIGVTTGRGFEGVTHRWGNKKLPRKTH

SEQ ID NO: 291149 - protein, 93 aa, Zea mays
  Clone ID: MRT4577_28616C.1.pep
MCLKYIPVLSLLFQLTKETTVQATGVASNLVEAIQGAGFKLQTLSLSFDDFDEPAAGAGGTVQSSEWANLWCRAWCQMHIIRSPDFVYPAPYL

SEQ ID NO: 291150 - protein, 101 aa, Zea mays
  Clone ID: MRT4577_28617C.1.pep
LWYHLNRFGVRFSLRFMLGSSRHSSRCRSRRSPLCHAAAPGTRRAAMPDTHHTSAPMHGHQAMPSPSAPDARRFARSPRAGIVDAWESTNREWRLAWDVWE

SEQ ID NO: 291151 - protein, 47 aa, Zea mays
  Clone ID: MRT4577_28618C.1.pep
IKKGFFAIEMSVGGSFMALTIAVILVVVFNSALELKSHGYLVGPIVL

SEQ ID NO: 291152 - protein, 91 aa, Zea mays
  Clone ID: MRT4577_28619C.1.pep
MYSAIRSLPFNGSVRYYQRSSDGTNLPNDACLVLTTDPKPLLLLTAELHERFVDANTQLCGPDKSTPKTILITIRSKSLTLYYLKSHLYKY

SEQ ID NO: 291153 - protein, 1663 aa, Zea mays
  unsure (1)..(1663): unsure at all Xaa locations
  Clone ID: MRT4577_2861C.1.pep
MDPKGKGMVVNDKEKESFLNESRDDKPTDSGSSHKKRDGKKKRHIKKIVYYDSDESSSSPRDDDDEKKKPVNSNYSFNYSRIPFNSNAHLLSIPLGKPPHFDGEDYSFWSNKMRSHLFSLHPSIWEIVEHGMQFDSIDNPVFINEQIHKNAHATTVLLASLCRDEYNKVSGLDNAKQIWDTLKISHEGNDATMITKMELVEGELGRFAMIRGEEPTQTYNKLKTLVNKIRSYGSTRWTDHDVIRLMLRSFTVIDPHLMNLICENPRYTKMTPEEILGKFVSGRMMVKEARYVDDTLNGPLPVYEPQPVALKATSSREVLPSKVAQVEAAGLNKDEMALIIKRFKTSLKGRKEYPNKNKARGKRSCFKCGLATSAFNKSSLFPNERHTCLMAKEKKDRLLERQEDILYEEHDKFVSVQKSLALEIKRNELLSSELSTCNESISSLKTLNDDLSAKLEVANRSSSCVEHVVICNRCKDFDINACDEHLACIAKLNDEMASLNAQLKTCKVDFDKLKFARDAYTIGRHPSIKDGXGFRKEAKXLTSQRXPISNKEKGKAPMXSSVQKNYAFMYNRKIASHNRRYDYDAYDSHAMFASSSNFNGRTRRNFVSHTPRKMCNKPTTVFHACNTTFVLSCKNEKVVAKKLGPKCKGDKACIWVPKAIVTNLVGPNKSWVYASGGSSWIINSGCTNHMTGEKKMFTSYIKNKDSQDTIIFGDGNQGKVKGLSKIAITNEHSISNVFLVESLGYNLLSVSQLCHMGNNCLFTNVDVSVFRRSDGSLAFKGVLDGKLYLVDFSKEEADLDACLIANTSMGWLWHHRLEHVGMKNLHKLLKGEHVVGLTNDKSETQGTLKRFLRRTQNEFELKVKKIRSDNGSEFKNLQVEEYLEEEGIKHEFSAPYTPQQNGVVERKNMTLIDMARMMLGEFKTPEXKTSYELLTXEQQEQDQPSSSTMVHPPTHNEEQVPQEEACDQGGAQEEQSVDEEAQLAPPTQVRTTIQRNHPVDQILGDISKGVTTRSRLANFCEHYSFVSSIEPFRVEEALQDPDQVLAMQEELNNIKRNEVWSLVPRPKQNVVGTKWVFRNKQDEHGVVTRNKARLVAKGYAQVAGLDLVEPFTPMARLESIRILLAYTAHHSFRLFQMDVKSAFLNGPIKEEVYVEQPPGFEDDRYPDHVFKLSKALYGPKQAPRAWYECLRDFLIANAFTVGKADPTLFTNTCDSDLFVCQIYIDDIIFGSTNQKSCEEFSRVMTQKFEMSMMGELTYFLGFQVRQLKDDTFLSQTKYTQDLLKRFGMKDAKPAKTPMRTDGHVDLNKGGKSVDQKAYRSMIGSLLYLCASRPDIMLSVCMCARLQSDPRECHLVAVKRILRYLVATPCFGIWYPKGSTFDLIGYSDSDYDGCKVDRKSTSRTCQFLGRYLVSWSSKKQTFVALSTAEAEYVAVGQCCAQLLWMRQTLRDFGHNLSKVPLLCDNESAILMADNLVEHSRTKHIDIRHHFLKDYQQKGDIEVFYISTENQLADIFTKPLDEKTFCTLRRSPIHPPLGALNPANGLCNGTRLVVRGFQRNSIDVENVLGQHVGKWIFLPRIPLCPSDEEMFPFQFKRKQFPAWLSFAMTVNKAQGQTIPNVGVYLPEPVFSHGQLYVALSRATTRSNIKILVIPAIDGRKSQGRV

SEQ ID NO: 291154 - protein, 253 aa, Zea mays
  unsure (1)..(253): unsure at all Xaa locations
  Clone ID: MRT4577_28620C.1.pep
MEAKKPYLIAVVIQLIYAGMFVVSKAAFDHGVNTFVFIFYRMAAASLLLLPVAITLQRKNVRSMSMGLLLKLFFYVLIGNTFSLNLYNVSMKWTSATVASASSNSMPVIAFCLALLLRMEAVSLRSRSGXXGAAGVALCAAGVLVLAFYAGPALSPVTRRRAAFFAAAHHATDKHHPASGGTAWVEGAFFMVLANVTWALWIVLQSALLKEXPNKMLVTVTQCVFSMTQSFXVAVVAERGDFSEWKLRFDISL

SEQ ID NO: 291155 - protein, 132 aa, Zea mays
  unsure (1)..(132): unsure at all Xaa locations
  Clone ID: MRT4577_28621C.1.pep
PGLGCXTSQIFVKFFELISKXIHRGFGKELXKKPKFFKNGYFGMVKIIPPKPMGGGTFSQDPPLGRFSVRNKKKTVFFGVLKNVEKKDPPGAKVTKGFSKKKKFAPLFKKGLFFQKGSEMFPFGKNFVFWGW

SEQ ID NO: 291156 - protein, 144 aa, Zea mays
  Clone ID: MRT4577_28622C.1.pep
MSGEEEENAAELKIGEEFLKAKCLMNCEVAIILEHKYEQIQQHASSESDPSSQVSQVFEKSLQYVKRFSRYKNPDAVRQVRETLSRYGLAEFELCTLGNLCPDTSGEATALVPSLKSGGRFVGDPGDEKIEKMLNDLSLIKKFE

SEQ ID NO: 291157 - protein, 144 aa, Zea mays; identical to SEQ ID NO: 291156
  Clone ID: MRT4577_28623C.1.pep

SEQ ID NO: 291158 - protein, 260 aa, Zea mays
  Clone ID: MRT4577_28624C.1.pep
MELPPWASFLGIVLATVMLLKALTGRRSRRMYNLPPGPKPWPIIGNLDLVGALPHRSIHELSRKYGPLMQLRFGSFPVVVGSSVDMAKFFLKTHDVVFADRPKTAAGKYTTYNYLSTVSLNVITRMVLGKKYLDKEEAAAAGGSVTTPEEFKWMLDELFLLNGVLNIGDSIPWLDWMDLQGDIKRMKKLSRRMSPGYSLGLKVIQVSLANLLHGFAWSLPAGVPMEELSMEEIFGLSTPRKFPLEAVVQPKLPAHLYAEP

SEQ ID NO: 291159 - protein, 90 aa, Zea mays
  unsure (1)..(90): unsure at all Xaa locations
  Clone ID: MRT4577_28625C.1.pep
STRTNTLLDGAGTTPRAGGGPIRAAIYSYGTQAYDLAYFSFSRIKESIVYREMTRRYRAHMITYADTXVVIXGSGFMDQCCAYELIEDHT

SEQ ID NO: 291160 - protein, 144 aa, Zea mays
  Clone ID: MRT4577_28626C.1.pep
MSGEEEENAAELKIGEEFLKAKCLMNCEVAIILEHKYEQIQQHASSESDPSSQMSQVFEKSLQYVKRFSRYKNPDAVRQVRETLSRYGLAEFELCTLGNLCPDTSGEATALVPSLKSGGRFVGDPGDEKIEKMLNDLSLIKKFE

SEQ ID NO: 291161 - protein, 261 aa, Zea mays
  Clone ID: MRT4577_28627C.1.pep
MELPPWASFLGIVLATVMLLKALTGRRSRRMYNLPPGPKPWPIIGNLDLVGALPHRSIHELSRKYGPLMQLRFGSFPVVVGSSVDMAKFFLKTHDVVFTDRPKTAAGKYTTYNYRDITWSPYGAYWRQARKMCLTELFSAKRLESYEYIRADEVRALLRDLHAASSSGRAVMLKDYLSTVSLNVITRMVLGKKYLDKEEAAVGAVTTPEEFKWMLDELFLLNGVLNIGDSIPWLDWMDLQGYIKRMKKLSKMFDRFLEHVV

SEQ ID NO: 291162 - protein, 244 aa, Zea mays
  Clone ID: MRT4577_28628C.1.pep
SNFTEPLYGPVPPSESAQAWQQPNTYDAAVQAQMAAAGYQGDWSSYVYAEQQLGYPEQYVQQSTQEYDVLADPSISQDPRFMTQADKDRGLGSVFKRDDQRLNQLREKDARERDPNFISDSYSECYPGYQEYNNEIAGSDDEDDLSKMDMGGRAKGRLHRWDFETEEEWAKYNDQKEAMPKAAFQFGVKMQDGRKTRKQNKDQKLTNDLHKINKILARKKGEKDGAEDGGHYDDDLPSSKKQRG

SEQ ID NO: 291163 - protein, 52 aa, Zea mays
  Clone ID: MRT4577_28629C.1.pep
FNFSINIDSPHCFSIKKNLFSVTFHHNQLNLFFSFICLFISLAHCFHFIDYF

SEQ ID NO: 291164 - protein, 985 aa, Zea mays
  unsure (1)..(985): unsure at all Xaa locations
  Clone ID: MRT4577_2862C.1.pep
IALQVYASRGSSWIIDSGCTNPMTGEKKMFTSYVKNKDSQDSIIFGDGNQGKVKGLGKKSISSEHSICNVFLVESLGYNLLSVSQLCNMGYNCLFTNVDVSVFRRSDGSLAFKGVLDDKLYLFDFAKEEAGLDACLIAKTSVGWLWHRRLAHVGMKNLHKLLKGEHMIGLTNVTFEKDRPCAACQVGKQDKSETQGTLKRFLRRAQNEFELKVKKIRSDNGSEFKNLQVEEYLEEEEIKHEFSAPYTPQQNDVVERKNRTLLDMARMMLGEFKTPERFWTEAVSTACHAINRVCLHRLLKKTSYELLTGNKPNVSYFRVFGSKCYILVKKGRNSKFAPKAVEGFLLGYDSNTKAYRVFNKSSSLVEVSSNVVFDETNGSPREQVVDLDDVDEEDVPTAAMRTMAIGDVRPLEQKEQDQPSSSTMVHPPTQDDEQVNQEETYNKGGAQDDHGMEEEAQPAPPTQVRTTIQRNHPVDQILGDISKGVTTRSRLVNFCEHYSFVSSIEPFRVEEALLDPDWVLAMQEELNNFKRNEVWTLVSRPKQNVVGTKWVFRNKQDEHGVXLESIRILLAYATHHXFRLFQMDVKSAFLNGPIKEEVYMEQPPGFEDERYPDHVCKLSKALYGLKQAPRAWYECLRDFLIANAFKVGKTDPTLFTKTCDGDLFVCQIYVDDIIFGSTNQKSCEEFSRVMTQKFEMSMMGELSYFLGFQVKQLKDGTFISQTKYTQDLIKRFGMKYAKPAKTPMGTDGHTDLNKGGKSVDQKAYRSMIGSLLYLCASRPDIMLSVCMCARFQSDPRECHLVVVKRILRYLVAMPCFGIWYPKGSTFDLIGYSDSDYAGCKVNRKSTSGTCQFLGRSLVSWSSKKQTSVALSTAEAEYVAAGQCCTQLLWMRQTLMDFGYNLSKVPLLCDNESAIRMANNPVEHSRTKYIDIRHHFLRDHQQKGDIEVFHVSTENQLADIFTKPLDESTFCKLRSELNVLDSRNLD

SEQ ID NO: 291165 - protein, 195 aa, Zea mays
  Clone ID: MRT4577_28630C.1.pep
SRASYQGCLARRRRTPRSSRSAKVHALPRRPPLLPSSPFSTTVQSLGARAARVFVLPLELTRKPVGEEFLKAKCLMNCEVAIILEHKYEQIQQHASSESDPSSQVSQVFEKSLQYVKRFSRYKNPDAVRQVRETLSRYGLAEFELCTLGNLCPDTSGEATALVPSLKSGGRFVGDPGDEKIEKMLNDLSLIKKFE

SEQ ID NO: 291166 - protein, 71 aa, Zea mays
  Clone ID: MRT4577_28631C.1.pep
RQAFNNQCCNFMITDGERLCFNAYNMYTRDDTCWLVTEPTTVDVTCHYGSFVASYVSFIRCELLIILLLYL

SEQ ID NO: 291167 - protein, 89 aa, Zea mays
  Clone ID: MRT4577_28632C.1.pep
IQLLGDYTAGYSDQQVHGITASAKTTLLYPAMEHIYILFLWRLFPHRDALPKRGWFTMTWTTPGCGYSYWRPASSRNCSTEMETLEMRE

SEQ ID NO: 291168 - protein, 131 aa, Zea mays
  Clone ID: MRT4577_28633C.1.pep
MAMDLDPVAKAFVDHYYRTFNTNRAALVGLYQKTSMLTFKGQKFQGPSAIAGKLGSLLFQACKHQIVTVNCHPSGPQGGMLVFVSGSIRTGPEEHPIKSSQLAEEPGCPPLCCGGRVVAIQVHSICCRPLG

SEQ ID NO: 291169 - protein, 61 aa, Zea mays
  Clone ID: MRT4577_28634C.1.pep
LIQLNHALLALCQSSPKQYKRLVNPTKKPSLINAWYTSSRLRNPRPLSRVENTFCTFHCTP

SEQ ID NO: 291170 - protein, 77 aa, Zea mays
  Clone ID: MRT4577_28635C.1.pep
EMGQQPLHCSNMLWACSVLRLAPLHRQLSRACPDEYLLRQKQQCLSLLYHTLCQCRLPAQDEPPYSVHSRSSRQTPE

SEQ ID NO: 291171 - protein, 77 aa, Zea mays
  Clone ID: MRT4577_28636C.1.pep
KAGESTKNQSLINAWYTSSRLRNPRPLSRVENTFCTCKLETGNTCDYDESHTRNLQLRMQHNESISITLKYTFHCTP

SEQ ID NO: 291172 - protein, 169 aa, Zea mays; identical to SEQ ID NO: 230322
  Clone ID: MRT4577_28637C.1.pep

SEQ ID NO: 291173 - protein, 102 aa, Zea mays
  unsure (1)..(102): unsure at all Xaa locations
  Clone ID: MRT4577_28638C.1.pep
KGVGLSPRRKVPPIVWVLGAHPSQKSRTEVFSFIGPEQAPTLVQHVGKRNRFDMLKTVADPAPTVSEASLITLAPLIKGVPIFSEKPWNQNQNLPMANSNYX

SEQ ID NO: 291174 - protein, 64 aa, Zea mays
  unsure (1)..(64): unsure at all Xaa locations
  Clone ID: MRT4577_28639C.1.pep
KHTHLGTRTNGRPDKRLRDKEQCCRPQESEVQSSXQVGYRHQEIKESRATRKKGXSDSTNRQST

SEQ ID NO: 291175 - protein, 94 aa, Zea mays
  unsure (1)..(94): unsure at all Xaa locations
  Clone ID: MRT4577_2863C.1.pep
IVARGPGSLRSHSRALLHHRVLRGTPLGGASRGDQRGTLRGATMGLFTGTXKATTPFEFRKRXHLLFSXRRGLYNRRPIICKTLSNQHWVPWLG

SEQ ID NO: 291176 - protein, 87 aa, Zea mays
  unsure (1)..(87): unsure at all Xaa locations
  Clone ID: MRT4577_28640C.1.pep
EGRAEGHAESSPAYXQKEQLLPFSQXLAGESPATFLTQPQSMPFYQHLAPNASTLLQLQQEMPFSQXLGLTXPAVCYQEPIIGRCPL

SEQ ID NO: 291177 - protein, 176 aa, Zea mays
  unsure (1)..(176): unsure at all Xaa locations
  Clone ID: MRT4577_28641C.1.pep
MDGNKDDAVKALRIGKDALDAGDTARALKFLSKAKRLDPLLPIDHLLNPLLNKDDPSSSPASSSSSSAPHPPPPPPSRAASSAAGADGLRERKQKGKKKGWGGEGGGDXPXVRTYTEEQLEVIHQIKKHARDYYKILGLEKDCTVEDVRKAYRKLSLKVHPDKNKXPGAEDAFKAV

SEQ ID NO: 291178 - protein, 69 aa, Zea mays
  Clone ID: MRT4577_28642C.1.pep
RPYSPSRSSLKDVGFIADHHDSQSTAFAPISCRSARSASRPTASSSIVPTHTCTPPWRLRQQAALQRRR

SEQ ID NO: 291179 - protein, 65 aa, Zea mays
  Clone ID: MRT4577_28643C.1.pep
SHVGPSEKPGSTPRSDVALVTLTIGPINDVNHCILLERSVQQVTSFSKQFVAVVPHVTNGGPMCQ

SEQ ID NO: 291180 - protein, 120 aa, Zea mays
  Clone ID: MRT4577_28644C.1.pep
GIPPDQQRLIFAGKQLEDGRTLADYNIQKESTLHLVLRLRGGMQIFVKTLTGKTITLEVESSDTWVSASSGALWCTSIWMSSSNKHLWFVCHESWLWLRWFNGPVVSSVLYPKLFCTSMA

SEQ ID NO: 291181 - protein, 390 aa, Zea mays
  Clone ID: MRT4577_28645C.1.pep
HLVLRLRGGMQIFVKTLTGKTITLEVESSDTIDNVKAKIQDKEGIPPDQQRLIFAGKQLEDGRTLADYNIQKESTLHLVLRLRGGMQIFVKTLTGKTITLEVESSDTIDNVKAKIQDKEGIPPDQQRLIFAGKQLEDGRTLADYNIQKESTLHLVLRLRGGMQIFVKTLTGKTITLEVESSDTIDNVKAKIQDKEGIPPDQQRLIFAGKQLEDGRTLADYNIQKESTLHLVLRLRGGMQIFVKTLTGKTITLEVESSDTIDNVKAKIQDKEGIPPDQQRLIFAGKQLEDGRTLADYNIQKESTLHLVLRLRGGMQIFVKTLTGKTITLEVESSDTIDNVKAKIQDKEGIPPDQQRLIFAGKQLEDGRTLADYNIQKESTLHLVLRLRGGQ

SEQ ID NO: 291182 - protein, 50 aa, Zea mays
  unsure (1)..(50): unsure at all Xaa locations
  Clone ID: MRT4577_28646C.1.pep
RPLSRPPPLYIPTPRPPWGVLNSAYGGSAXPHPAWTSGXPSVVARASCLP

SEQ ID NO: 291183 - protein, 76 aa, Zea mays
  Clone ID: MRT4577_28647C.1.pep
PLDIVVFMLRVTPPDVRRWREVEGGGDVKCPTPGAVMEWCHGGEDLHDLPHVRLGVGVTLQSLLRQVCDDMNVPRA

SEQ ID NO: 291184 - protein, 381 aa, Zea mays
  Clone ID: MRT4577_28648C.1.pep
MQIFVKTLTGKTITLEVESSDTIDNVKAKIQDKEGIPPDQQRLIFAGKQLEDGRTLADYNIQKESTLHLVLRLRGGMQIFVKTLTGKTITLEVESSDTIDNVKAKIQDKEGIPPDQQRLIFAGKQLEDGRTLADYNIQKESTLHLVLRLRGGMQIFVKTLTGKTITLEVESSDTIDNVKAKIQDKEGIPPDQQRLIFAGKQLEDGRTLADYNIQKESTLHLVLRLRGGMQIFVKTLTGKTITLEVESSDTIDNVKAKIQDKEGIPPDQQRLIFAGKQLEDGRTLADYNIQKESTLHLVVRLRGGMQIFVKTLTGKTITLEVESSDTIDNVKAKIQDKEGIPPDQQRLIFAGKQLEDGRTLADYNIQKESTLHLVLRLRGGQ

SEQ ID NO: 291185 - protein, 229 aa, Zea mays
  Clone ID: MRT4577_28649C.1.pep
MQIFVKTLTGKTITLEVESSDTIDNVKAKIQDKEGIPPDQQRLIFAGKQLEDGRTLADYNIQKESTLHLVLRPRGGMQIFVKTLTGKTITLEVESSDTIDNVKAKIQDKEGIPPDQQRLIFAGKQLEDGRTLADYNIQKESTLHLVLRLRGGMQIFVKTLTGKTITLEVESSDTIDNVKAKIQDKEGIPPDQQRLIFAGKQLEDGRTLADYNIQKESTLHLVLRLRGGQ

SEQ ID NO: 291186 - protein, 112 aa, Zea mays
  Clone ID: MRT4577_2864C.1.pep
MWCQSCKEGYDEEDAGTCKECYEEASETEEELKREIDDLRSRLLFLRLPSPTLDAASAPNCDLLLHAIPSTGAGGERDAGRTPDTPAVPAHRVILVGPLSFTTSSFLCAILV

SEQ ID NO: 291187 - protein, 305 aa, Zea mays; identical to SEQ ID NO: 246058
  Clone ID: MRT4577_28650C.1.pep

SEQ ID NO: 291188 - protein, 105 aa, Zea mays
  Clone ID: MRT4577_28651C.1.pep
SKGRAFVDVLGGRTGHMQAFAASISRVYGSWHYSMMVRFVLQYQQVFPCLGRQRTALVHLLHHGYTGYNERLIQFLGGLFFSGSLGCLHNRALIHYNNLDSEFLF

SEQ ID NO: 291189 - protein, 77 aa, Zea mays
  Clone ID: MRT4577_28652C.1.pep
IQIFVKPLTGKPIPLEVESSAPMDNVKAKIQAKEGIPPDQQRLIFAGNQLEDARTLADSTIQKESPLHLVLRLRGGQ

SEQ ID NO: 291190 - protein, 457 aa, Zea mays; identical to SEQ ID NO: 246082
  Clone ID: MRT4577_28653C.1.pep

SEQ ID NO: 291191 - protein, 146 aa, Zea mays
  Clone ID: MRT4577_28654C.1.pep
MAERLAPEKRHAFVHNGQKVFEWDQSLEEVNMYIELPKNVPTKLIQCVIQAGHVEVGIRGHPPYLNHDLMHPVKTDSSFWTIEDGELHITLQKREKGKTWASPIKGQGSLDPYAADQEQKRLMLQRFQEENPGFDFSQAQFSGTCP

SEQ ID NO: 291192 - protein, 168 aa, Zea mays
  unsure (1)..(168): unsure at all Xaa locations
  Clone ID: MRT4577_28655C.1.pep
LGTPHSPVPDLRSPRRSKMQIFVKTLTGKTITLEVESSDTIDNVKAKIQDKEGIPPDQQRLIFAGKQLEDGRTLADYNIQKESTLHLVLRLRGGMQIFVKTLTGKTITLEGEAFDTIDNVKGKIQDKGGIPSDQQRVIFSGKQLEDGRTLADFNIXKGSTPHLVVRLK

SEQ ID NO: 291193 - protein, 112 aa, Zea mays
  Clone ID: MRT4577_28656C.1.pep
PFASERTHSPGPDLRSPRRSKMQIFGKTLTGKTITLEGETSDTIGTVKAKIQDKEGIPPDQQRVIFTGKQLEDGRTLADYNMQKESTLHLVLRLMGGMQNISKTLTEKTITL

SEQ ID NO: 291194 - protein, 78 aa, Zea mays
  Clone ID: MRT4577_28657C.1.pep
NSTQHSIQPATCCLPPAFLPSPTSSIELSCLFHSTTLHSASSGVSLLLLTNPVVAFYQHVRLTLAPLQLHNCAIQPTV

SEQ ID NO: 291195 - protein, 80 aa, Zea mays
  unsure (1)..(80): unsure at all Xaa locations
  Clone ID: MRT4577_28658C.1.pep
LMPELSMXLWYAPCIELPGGLVLNGATLVAIKPSEEGTGDTVWNGAAGAAWVLDAFEEPYRTAVRMLLKQRTYSLEMNSF

SEQ ID NO: 291196 - protein, 53 aa, Zea mays
  Clone ID: MRT4577_28659C.1.pep
GRFFFFFFIFFFFFFFFFFFFFFFFFFFFFLKKWTVLNEAGPYGAIGGGEEPP

SEQ ID NO: 291197 - protein, 136 aa, Zea mays
  unsure (1)..(136): unsure at all Xaa locations
  Clone ID: MRT4577_2865C.1.pep
SCSGAWLCCCCLSRALCGGVYGFSCAQRLVFCLLVPSALLVCPRRFLLQRGFCAVLPCMPLLARPVSLRRAPRGPFLWACSRVGLGAGPGPPPGIRLRRPSSGAACARGCPCPLCLCXSGGRGAGFGRGVASLPSP

SEQ ID NO: 291198 - protein, 141 aa, Zea mays
  Clone ID: MRT4577_28660C.1.pep
APEMVSDLLKNPQTDPCSFSTPASLSSEYADYSSSIIAWYGKNQDDIMSAVKECPELASLASLVPVCEASATSAPASTGLTATTTGVVPPVVSSADETAKTPAATPTSGGSSPVETNGAVAREGGLLYVAAAAVAGVVAAL

SEQ ID NO: 291199 - protein, 77 aa, Zea mays
  Clone ID: MRT4577_28661C.1.pep
VFFLVWLLFSDIQGNLGLGFLGHGQSYAELILHERRAVPQLVLGSHLTNFLRPLRCPASSGGDYQARSLSSSISHLG

SEQ ID NO: 291200 - protein, 91 aa, Zea mays
  Clone ID: MRT4577_28662C.1.pep
FGSSTAGSHFFFPHQLTIFPKGLFDNTLRGKIIALLDQPVHSIAIVRADAQAGHSIDLVFLRLAYTYMHLEAVQALADYHILEEGLVYLVL

SEQ ID NO: 291201 - protein, 89 aa, Zea mays
  unsure (1)..(89): unsure at all Xaa locations
  Clone ID: MRT4577_28663C.1.pep
YQIRAHESRLYAXMLCQEISRSIDMISHSSRSSAHSLASIHSQSISTHLHVSASHVRREIDTTEHLYSTQLQHVTVITSLELSDRXVRR

SEQ ID NO: 291202 - protein, 183 aa, Zea mays
  Clone ID: MRT4577_28664C.1.pep
MSSPSKRREMDLMKLMMSDYKVDMVNDGMQEFFVEFRGPNESIYQGGIWRVRVELPDAYPYKSPSIGFINKIYHPNVDEMSGSVCLDVINQTWSPMFDLVNVFEVFLPQLLLYPNPSDPLNGDAAALMMRDRPAYEQKVKECCEKYAKPGDAGVTPEEQSSDEELSEDEDDSGDEEIMGKPDP

SEQ ID NO: 291203 - protein, 183 aa, Zea mays
  Clone ID: MRT4577_28665C.1.pep
MSSPSKRREMDLMKLMMSDYKVDMVNDGMQEFFVEFRGPNESIYQGGIWRVRVELPDAYPYKSPSIGFINKIYHPNVDEMSGSVCLDVINQTWSPMFDLVNVFEVFLPQLLLYPNPSDPLNGDAAALMMRDRPAYEQKVKEYCEKYAKPEDAGVSPEDESSDEELSEEENDSGDEEIMGKPDT

SEQ ID NO: 291204 - protein, 183 aa, Zea mays
  Clone ID: MRT4577_28666C.1.pep
MSSPSKRREMDLMKLMMSDYKVEMVNDGMQEFFVEFRGPNESIYQGGVWKVRVELPDAYPYKSPSIGFINKIYHPNVDEMSGSVCLDVINQTWSPMFDLVNVFEVFLPQLLLYPNPSDPLNGDAAALMMRDRPAYEQKVKEYCEKYAKPGDAGVTPEEQSSDEELSEDEDDSGDEEIMGKPDP

SEQ ID NO: 291205 - protein, 220 aa, Zea mays
  unsure (1)..(220): unsure at all Xaa locations
  Clone ID: MRT4577_28667C.1.pep
MSSSSPPPPXHVVEDMPHVLQLLSDGTVVRFADYDTLPPPSVPPAPLPVRWKDVVYDATHGLKLRVYSPSPPASCGKLPVLVYFHGGGYVLGTFALPSFHACCLRLAGELPAVVLSADYRLAPEHRLPAALDDAAAVMRWVRAQAVAAGGGDPWLADSADPGRVFVAGDSAGGNIVHHVAVRRLGSAXRARLDPVRVAGHVMLCPFFGGAERTASEAEFP

SEQ ID NO: 291206 - protein, 105 aa, Zea mays
  Clone ID: MRT4577_28668C.1.pep
CHNTGDMQHSNDTAISLSCIHSFFGANGLLGGVIHGLVHISTAPSFYVRRERVCEVVQVISMVIALRVYSVILALVGHVVGGDREGWFQRSRAQTIRPLMHDDDQ

SEQ ID NO: 291207 - protein, 140 aa, Zea mays
  unsure (1)..(140): unsure at all Xaa locations
  Clone ID: MRT4577_28669C.1.pep
SCVRTYIRIRMQYTLHYALQDRPHMLTAVMTSSTSTCTSTRPLTSPFTPTGRLTAAAPAGAAASALVRCLLLCLHILLRILLLXLSLLLLXTLSMIPDILLDYFLSDLVYAGALFCALLLFLWLFLFRLAFALPLPLALR

SEQ ID NO: 291208 - protein, 48 aa, Zea mays
  Clone ID: MRT4577_2866C.1.pep
IAIILAIILPPLGVFLKFGCGVGFWICLILTFLGYFPGLIYAAWAITK

SEQ ID NO: 291209 - protein, 116 aa, Zea mays
  Clone ID: MRT4577_28670C.1.pep
LSNYKKVVSGGVASNKYVRTRLNHVAGNNGLQLVSPPPSLCTDNGVMIAWTGIEHFVAGRFEDPPAADESDDMQYELRPRWPLGEEYSEGRSVARSLKTARVHPSLTSMIQGSLQK

SEQ ID NO: 291210 - protein, 46 aa, Zea mays
  Clone ID: MRT4577_28671C.1.pep
IMDALLYISHSIALISQCYVGVSLVHSKKHSFDAKVAYDLCKKKTT

SEQ ID NO: 291211 - protein, 236 aa, Zea mays
  unsure (1)..(236): unsure at all Xaa locations
  Clone ID: MRT4577_28672C.1.pep
GIGDRDASKVSVKKEEAANIKIVELAMHRWSGQFSRPFLFGLLNDGTLLCYHAYYFEGSESNVQCAPFSPHGGSPDIGNATDSRLRNLRFCRVSIDISSRDDIWWLXRXSLTIFNNVGGYEGLFLGGPRPTWVFVCRQRFRVHPQLCDGPIVAFTVLHNVNCCRGLIYVTSQGFLKICQLPSAYNYDNYWPVQKVPLHGTPHQVTYYGEQSLYPLIASVPQVRPLNQVLSSMADQE

SEQ ID NO: 291212 - protein, 106 aa, Zea mays
  Clone ID: MRT4577_28673C.1.pep
ATGGFSSRVVGRGGFSTVYLASLSSSRLGAVKVHCSSERLRRAFRRELDVLLSLRHPHVVRLLAYCDERDEGVLVFEYAPNGDLHERLHGGAGAGTLPWARRVAVA

SEQ ID NO: 291213 - protein, 92 aa, Zea mays
  Clone ID: MRT4577_28674C.1.pep
GAFFFFFFGPIMPIYTSLLQIISPQNYSSHHNHIAFLLLAATAMVVSLCMCKSTRLHAAQFMSVSSGTLYSGRHMYMVSFLELCTHSSGCGI

SEQ ID NO: 291214 - protein, 48 aa, Zea mays
  unsure (1)..(48): unsure at all Xaa locations
  Clone ID: MRT4577_28675C.1.pep
FHQRQPFLNPLAVASPLVAAFLXRHQFQPGKQFSLMACALSWQWPLVG

SEQ ID NO: 291215 - protein, 178 aa, Zea mays
  Clone ID: MRT4577_28676C.1.pep
PGLSDFGLAKVGPVGDRTHVSTRVMGTYGYCAPDYVVSGKLTMKSDIYSFGVLLLELITGRRIYDASRPKPEQSLLTWSRPFLHDKRKFHRLADPSLLGCYPSSALNQLVVISIMCLQDQPHVRPIISDVVIGLNHVASQPCTAERTLPACMTSPPSSGSPQLVSTPARRRGGRLIGQ

SEQ ID NO: 291216 - protein, 201 aa, Zea mays
  unsure (1)..(201): unsure at all Xaa locations
  Clone ID: MRT4577_28677C.1.pep
PALIPMGLFSHKKKDSIVGPSGYAYTDEGEDERRHSSSSSPRRSVDHSRTSTDQARRGSDHHAASEHTPVVAAAAAAPVVGSAHSERRESLNSTDVNHNRSEKFTSGVLPQAPSAPTTTTTTTETVVSPTPIVAARGLEGGRAEDAKREKIFETAKAPHHHPXRDKDSVLSEEDAKNAEHDHKYLQPXVHERLHRHXXXGD

SEQ ID NO: 291217 - protein, 70 aa, Zea mays
  Clone ID: MRT4577_28678C.1.pep
RKYKNHVAEANLTANGMNANVQSCRHDVDDVLLLLSPCEQAECANYICVANLVTMCKLKRACPRFYISLI

SEQ ID NO: 291218 - protein, 108 aa, Zea mays
  Clone ID: MRT4577_28679C.1.pep
DQRVLRYAFINVTAPGIPLHFTRRSTARIATSHLHRRWPHWRTPYAAMYALNAHVRNYNACNDEIWGYTVLVHCDGPNARDQVPFPGGNNARSQAGRNSPLIRGSETT

SEQ ID NO: 291219 - protein, 71 aa, Zea mays
  Clone ID: MRT4577_2867C.1.pep
MQTIKIKKNPPPPYSLKKKKKKKKKKKKKKKKKKKKKKKKKKKKKKKKKKKNKKKKKKKKKKSSALLPLLK

SEQ ID NO: 291220 - protein, 110 aa, Zea mays
  Clone ID: MRT4577_28680C.1.pep
MAKHHPDLIMCRKQPGIAIGRLCEKCDGKCVVCDSYVRPCTLVRVCDECNYGSFQGRCVICGGVGISDAYYCKECTQQEKDRDGCPKIVNLGSAKTDLFYERKKYGFKKR

SEQ ID NO: 291221 - protein, 114 aa, Zea mays
  unsure (1)..(114): unsure at all Xaa locations
  Clone ID: MRT4577_28681C.1.pep
MAKHHPDLIMCRKQPGIAIGRLCEKCDGKCVVCDSYVRPCTLVRVCDECNYGSFQGRCVICGGVGISDAYYCKECTQQEKDRDXKIGCPKIVNLGSAKTDLWXERRVRGGFKKR

SEQ ID NO: 291222 - protein, 85 aa, Zea mays
  Clone ID: MRT4577_28682C.1.pep
GKKTLGPFLNFFLLSAICWVKIPRKVRETLPFSTPFLIASSKIPNTKKELFAHFPFCQPCSTHGFAWIPPQLVIGKAPLMAFPFF

SEQ ID NO: 291223 - protein, 76 aa, Zea mays
  Clone ID: MRT4577_28683C.1.pep
MWSLVRQGLRWGRGRRRRRTARVVDESALGADGGDIDGGGAAAAGGAVVAPTLGGALARALLALACAVRLDGEDVG

SEQ ID NO: 291224 - protein, 59 aa, Zea mays
  Clone ID: MRT4577_28684C.1.pep
GNNSVQQISGIAMRRPLSNANQDSNSWYAIRNWSENKGRPVALCSRRRDGDHLSLTAQA

SEQ ID NO: 291225 - protein, 80 aa, Zea mays
  Clone ID: MRT4577_28685C.1.pep
SFGEHQHDHISVHQKDSLWGGRPYSSYHDIITTPTVTHTTEKMTCSLHIHLTPYLKHLITDHLPSSAITLRKPALFNISP

SEQ ID NO: 291226 - protein, 143 aa, Zea mays
  Clone ID: MRT4577_28686C.1.pep
SGGSSCSPGGPPPRGKGSSSPWRSPPLGPILFRSGNPPPPFFFLGSPRGPPRGGFSFRWGAPIQTTLRSFMAILFPRKLVYPGGSPPPPCFAGTLEGAHPPCPVCFSQPLRGPPNLNVLCSPILLLLFVPGIWAGPFHVAPPL

SEQ ID NO: 291227 - protein, 73 aa, Zea mays
  Clone ID: MRT4577_28687C.1.pep
NMQQKQDSTSVTKVQNLNSVPVPSPAPTTYYPFSETQTESQVVGYEEDLTGRQKIIDRVRSQSINVTSSSEIL

SEQ ID NO: 291228 - protein, 73 aa, Zea mays
  Clone ID: MRT4577_28688C.1.pep
DLLTKRYKEFVLPYGRNPNKQRHTITSTGTRLVWVPALTSHNSQQQRSLTINTWTEVKLCPLSHFFHAGDSLD

SEQ ID NO: 291229 - protein, 52 aa, Zea mays
  unsure (1)..(52): unsure at all Xaa locations
  Clone ID: MRT4577_28689C.1.pep
ADFVQGDQATIFDVILVANYLNIXGLLDLTCQTVADMIQGETPQKIRKTFNI

SEQ ID NO: 291230 - protein, 64 aa, Zea mays
  Clone ID: MRT4577_2868C.1.pep
MYLQYYINEKGDKVYTTKKESPLGVPTQSAHPARFSPDDKYSRQRYLLKKRFALLPTQQPAPKY

SEQ ID NO: 291231 - protein, 50 aa, Zea mays
  Clone ID: MRT4577_28690C.1.pep
TTNKNGNGQILTAERLLDLSYPIKPCNKRALEYITLLQMTDGRSILTVLK

SEQ ID NO: 291232 - protein, 43 aa, Zea mays
  Clone ID: MRT4577_28691C.1.pep
SLRVLTYSDMLHYIKVPLVLLNSKLPYTHIVMYLLHSNTANIN

SEQ ID NO: 291233 - protein, 57 aa, Zea mays
  Clone ID: MRT4577_28692C.1.pep
VDHGVRQRAHEVVVVERPVEAHGEAVAHQRVRHVEQLLRRVVVEPRATFLVADTFFV

SEQ ID NO: 291234 - protein, 74 aa, Zea mays
  Clone ID: MRT4577_28693C.1.pep
LSKKKQAIAVIEREARTWRLLQPRWRRRRTWGSRRQIYAWACPSGEVEGSRRWAARGGAIPSPSLRGAYLRPLT

SEQ ID NO: 291235 - protein, 133 aa, Zea mays
  unsure (1)..(133): unsure at all Xaa locations
  Clone ID: MRT4577_28694C.1.pep
PQACCKLARELALLALLLATELLRHATAAAAAAGSMERERGARMPSASSKPAPALAFARLSEAETTPAVVCGGVLLLLLELPXFALDRVLEELSPSLFAVMACVCSVLRDRCSLDALWGRFLPIKCGRVLGAA

SEQ ID NO: 291236 - protein, 89 aa, Zea mays
  Clone ID: MRT4577_28695C.1.pep
MSQTLRPLSVGFPIENRGSPVGMSALRSHLERMKHLTFVRRISDFHLLLKLATFLDAKSEMPTIAACVKTQSRMPEGYQFLIESFASQG

SEQ ID NO: 291237 - protein, 94 aa, Zea mays
  Clone ID: MRT4577_28696C.1.pep
GLGIKKILSLDFNYNACPPKLYKTIRFYFPFHPIETTLTTLTPFLKKFLFLPSRGNGNRNNTFHLLSGHLVFSPPVSRPRGKLTLSNFNCFSPL

SEQ ID NO: 291238 - protein, 95 aa, Zea mays
  Clone ID: MRT4577_28697C.1.pep
RTRGAGRDGHRRERTFGLFSRSSRALRAHSSDSTRVLLDMASTARLFRRHFTASTGSQGNTMSALERCSHLRARRSSALGTVRALVHVASSTSSA

SEQ ID NO: 291239 - protein, 107 aa, Zea mays
  unsure (1)..(107): unsure at all Xaa locations
  Clone ID: MRT4577_28698C.1.pep
HGLTRRLQPLLSPPWSPRRRTVSLCARPGSRRTLTPAPARSTSAGRACSPGLTEPSGGRHSRPFVPACVPYVCLRTTGRAGSFFFFFCFFSHLFSXTIYHLKARDLN

SEQ ID NO: 291240 - protein, 49 aa, Zea mays
  Clone ID: MRT4577_28699C.1.pep
KKRKLQRFCGFIYSTIVQHMRGYRVVQKSSDRNQASPRVRPRVRPSVHA

SEQ ID NO: 291241 - protein, 59 aa, Zea mays
  Clone ID: MRT4577_2869C.1.pep
SPAPHRRIACWVQSRDLFCHTSCPSYVNQRCVHQCSRMRNSNSPDRALLVTDLLAQSRK

SEQ ID NO: 291242 - protein, 133 aa, Zea mays
  Clone ID: MRT4577_286C.1.pep
GAASTSQSGQAGIQIENTGWERDCLEHGIQADGQMPGDTTIGGGDDAFNTFLSETGAGKHVPPAAFVDLEPTVIGEERTGTYRQLFHPEQIISGKEDAGNNFARGRYTIGKEIVDLLLDRIRKLADNCTGLQG

SEQ ID NO: 291243 - protein, 117 aa, Zea mays
  unsure (1)..(117): unsure at all Xaa locations
  Clone ID: MRT4577_28700C.1.pep
GTPLPPLPPPRAPAPLRLXSCLAXAASATAAPAAXAXHXTACPLTWRPPXPAXSXXWSXVXRPPRPAPAASRRPPRAAAXTAXPATAAXAAAAPAXAATEPARPARXWRTRVERTTT

SEQ ID NO: 291244 - protein, 261 aa, Zea mays
  Clone ID: MRT4577_28701C.1.pep
RGRLLRAVWSRQPPWHRRVRGAGGGGLTGRRDEPSSVVRGDGRRGLGLPLIRMLPVVKFTAASCDAGAGAGAGGVAPRISVSECAVCLSEFVERERVRLLPNCSHAFHIDCIDTWLQGSARCPFCRSDVTLPAIPSARRAPAAAAPVLPTSRRRDDALASESIVIEVRGERERWFSSSHGTTTTTPRRQPPKQQPPLPRCSKAAESVGDEAIDTRKTDAEFAVQPLRRSVSLDSSCGKHLYVSIQELLATQRWDDGDVGRP

SEQ ID NO: 291245 - protein, 103 aa, Zea mays
  unsure (1)..(103): unsure at all Xaa locations
  Clone ID: MRT4577_28702C.1.pep
RIGTATDTHRTLITGLDTYVRGLLLNAIGNQLRYPNCHSHXYSLITLYLFSEATQEITHHQNTRVHLERLILNQPHPXEVLITLIELXVYNPVTTFWSRSLTH

SEQ ID NO: 291246 - protein, 134 aa, Zea mays
  Clone ID: MRT4577_28703C.1.pep
PRGAFSESRLGARAPKKGPLGGPQSLGGSGAQNWGPRKLWYKPKGSRAPFYGTPVLVPPPKKPFAAGAAPLGKFPRLGRSICPPLFFFFFGPLFISPWQNGFRFKPRKGVLGKKKKKKKKQKKKGQQKSKNLQF

SEQ ID NO: 291247 - protein, 53 aa, Zea mays
  Clone ID: MRT4577_28704C.1.pep
RSAISWVDAGVENRADTMKNRIWHHWCAPTTEGLLIQDHNRQTLQCTSVYEEV

SEQ ID NO: 291248 - protein, 201 aa, Zea mays
  Clone ID: MRT4577_28705C.1.pep
MPPPPPTGEPKRRRLLSLMAVYPCESIAPAPLFSSLLALAADLASQGLGADAGAFPVLRRGLRQAVRIAGLLLAFLEEVQDVSVTKTAPLPSSAVLGLTELHVAMQKLRLLLTDCARRGARLWVLVNAGLAASELRVILGSVAAAMDALPKDVVDASVEAGELARLMSEHAWRVAVRPDASDERAARSVRSILEQFKSGVS

SEQ ID NO: 291249 - protein, 115 aa, Zea mays
  Clone ID: MRT4577_28706C.1.pep
FGGITLAINNALMAVSRGAHIEMMLAFANFPHLFIQPRLSLILNQVIHLNGSSNFQPRWRHFSWTKERVGLTFLDWAWVAFLASIFLPNWMVILPEKWPPHVGLLSFFKGDPQHE

SEQ ID NO: 291250 - protein, 102 aa, Zea mays
  unsure (1)..(102): unsure at all Xaa locations
  Clone ID: MRT4577_28707C.1.pep
SNISQLISQRLAPXRDDGPLRRGARAVLYFAEDNWKRVWVMALWLAINAGLFTWKFLAYRRHPTFDVMGYCVCVAKRGAETTKFNMALILLPVCRNTITWLR

SEQ ID NO: 291251 - protein, 45 aa, Zea mays
  Clone ID: MRT4577_28708C.1.pep
PPHYLFSSCSRKIWQPFSPKILIGNHLPISKGGTETAGNLVAMKS

SEQ ID NO: 291252 - protein, 179 aa, Zea mays
  Clone ID: MRT4577_28709C.1.pep
VPSGSGRALPPRRLPQVLGRPSIIPHTAGAVLAGAGRGEVLDHQRGIFLSSGSRSFGSYPASLQSIMDHDGTNLAVNEAVRSVQLLKIDGYSATATMSELDFIKSRRNLAGHEWEVLFYPQFSRYGGCIALKLVLVSEPPRDKDKLLRASLRCRLVCPSQPHFHASIEKSVFHVFTSDF

SEQ ID NO: 291253 - protein, 124 aa, Zea mays
  unsure (1)..(124): unsure at all Xaa locations
  Clone ID: MRT4577_2870C.1.pep
HSSAPGVWRRSITKGSDTTLDSPSSSSATSAGWLLHLHLHRSGDSSFHHXPRPRPGAGSSSEAGTTLGGVSYVSTPXPDDDAFDSGGDKYLLAKTYFDCREYRRAEHVLQNQSGGKRKMLVIRN

SEQ ID NO: 291254 - protein, 201 aa, Zea mays
  Clone ID: MRT4577_28710C.1.pep
MPSSRRPAIEARRSTLHYETFPTVPPRTRGRPPSTSPSPRHGRDSQDGHSNHESPLPTRQLIVLAIIALAEQTALNSISPYLPEMTASFPEVKQGQGGLYVGLIASSFALAQFTTNFFWGWLSDKIGRKPVIIMGTFMTMCCFLLFGFCTKLWHAILVQALMGFVNGNSGVVSTCLGEITDRSNQSRAFTYLPVVYGIGGI

SEQ ID NO: 291255 - protein, 57 aa, Zea mays
  unsure (1)..(57): unsure at all Xaa locations
  Clone ID: MRT4577_28711C.1.pep
NVETEVFQVAPSLHVVXLKKPKGNTLEFQNFYKTLSTKLKDVVWARDNEVQDRSSSP

SEQ ID NO: 291256 - protein, 113 aa, Zea mays
  Clone ID: MRT4577_28712C.1.pep
ETMYLRHRLGVKTVVMFTCSPYRLLFMFTCSPYRLTTKIVGAFGVYNKRWILEKIVDRTTELYLESFEGVSVGGERLDRRRRALGPRRPVGGPGGATLRANSNGAAHGPVPAA

SEQ ID NO: 291257 - protein, 168 aa, Zea mays
  Clone ID: MRT4577_28713C.1.pep
MGGGRELAAGRYFPLQRRRSSSRRRPLLVILLLAVVASGQASAASGSIFGGDSASSECSRACESQRCTAPLMRYGKYCGVSYTGCPGEAPCDALDACCMLHDACVQATDNDYLNMWCNQSLLDCVAAARPTAMADTFEGNRCNVTDVADEITAIVEAAVYARGILHKP

SEQ ID NO: 291258 - protein, 82 aa, Zea mays
  Clone ID: MRT4577_28714C.1.pep
VRDLPGSPFLARIVSVGLANCFLVQQAYMLRWLLIIVPPCRRGVVQLPMLFSPCFPPLCCFLGRAPPCCGRPRFFITHIMYA

SEQ ID NO: 291259 - protein, 198 aa, Zea mays
  Clone ID: MRT4577_28715C.1.pep
GAPKPRVRARRGQATDPHSIAERLRREKISDRMKNLQELVPNSNRTDKASMLDEIIEYVKFLQLQVKVLSMSRLGATEAVVPLLTQSQTENSGGGLLLSPRSGSGRQQQARGGSLPPSSSEVRDGAAFEQEVAQLMESDMTTAMQYLQSKGLCLMPVALASAISGQKGASSAAVQPENGGAKEMLRAVKPLASPIHGR

SEQ ID NO: 291260 - protein, 158 aa, Zea mays
  unsure (1)..(158): unsure at all Xaa locations
  Clone ID: MRT4577_28716C.1.pep
FFGPXNSAVGSLLVSFTVYIIPAMAHMVTFRSPHSRENAVERPPRFAGGWTGAYVINSFVVAWVLVVGFGFGGWASITNFVQQVSTFGLFAKCYQCPPHPAVASPLLAPPIAPSPSMPFGFNMTGMFAPMSAPSPAPAPAPMHFGSLHHHHRXHRHGL

SEQ ID NO: 291261 - protein, 163 aa, Zea mays
  unsure (1)..(163): unsure at all Xaa locations
  Clone ID: MRT4577_28717C.1.pep
IKKKKKKKKKKKKKKKKKKKKKKKKKKKKKKKNPVPWDPTFPQNKKNPRFLGPGKKGGGNVGGGKGGKGLGKGGGKAPRKGVPEKLPGFPKPGNRRXLVKGGGGKPFWGSFKRETRGGPKIFLEKVFGRGVTKPENGRRKTGPARDVLNPLKGRGGPLKGLGG

SEQ ID NO: 291262 - protein, 222 aa, Zea mays
  Clone ID: MRT4577_28718C.1.pep
MALPPPTIDLLLNLIDTRPQSILTSLAQHPQVSSARDAHGYSLVHAAASYNQLAVLRDLIQKFNADVNILDEDGETPLFAAEKIEVAKCLVEELGADTSIRNGDGQTAEDKIGEEEGEAHGVYQYLRSRRTGSEPIPAGLVETESVHPPPPLPGGVKVNMGTMEEDAAEAPDPEIRRRIEELAARDDYNSEEVQSQLRELVQDVVSGIGGEDGGRSVKRRVD

SEQ ID NO: 291263 - protein, 101 aa, Zea mays
  Clone ID: MRT4577_28719C.1.pep
GGGKKKRGPPKKKLVLKKTRDWGGKKKTPGRGRVKPPYCCLPGTLFRGGGARFVKIRGVFFFLGGGKKPRKLVWDGERNTPLKGEKKLKRGAVAPSSEKTG

SEQ ID NO: 291264 - protein, 81 aa, Zea mays
  Clone ID: MRT4577_2871C.1.pep
MVANGDAPARGSATVAASLRRRRTTSVAAAGRGGASSMLQFYTDEAAGRKMSPNTFLIMSIGFIAVVAMLHVFGKLYRTSN

SEQ ID NO: 291265 - protein, 83 aa, Zea mays
  Clone ID: MRT4577_28720C.1.pep
MRHAPSSPAMLLLLLLATFTYISCRAPKPDAATAARKHGGAVLWTVRPPPRTAPPDVGGDMGARAVQGESKRLVPQGPNPLHN

SEQ ID NO: 291266 - protein, 84 aa, Zea mays
  Clone ID: MRT4577_28721C.1.pep
EIHTSIPLSVQLTDELSFEFKEAFSLFDKDGDGCITSKELGTAMRSLGQNPSVAELLDMINERDADGYGTIDFPEFLNLMSRKM

SEQ ID NO: 291267 - protein, 151 aa, Zea mays
  unsure (1)..(151): unsure at all Xaa locations
  Clone ID: MRT4577_28722C.1.pep
HRDPMQFPKSPEPSTPKRTKRATTQPPQGGAKPPKEEEGEPPNPGNXGKPPRPPGKGGSPPHKGRERGGPTGPEGAGAGTPXRGGRRARGPQGQKQGDPRQRHPRNTLVKMPGPPGEPTQQGQGGQRQDAPEGPPALPAGEDPASPGGTRG

SEQ ID NO: 291268 - protein, 194 aa, Zea mays
  unsure (1)..(194): unsure at all Xaa locations
  Clone ID: MRT4577_28723C.1.pep
LHAXATTATEAAKAAPAQEQQANGNGNGEQKTRHXEXXHGGGRKSDDXXQXXXDTSXDPREPESXKEXRENTAKHPXNXXTTXADEGQXXNKXXKXXGAKKTXENGXNTGXXXXATAPAXPEDGTXXAXDXNRENHEXGXPGXNKAGXGHKNDXREGPAXPXPDDXXADKEQHGXXDHAXXDADKDNNXXHHER

SEQ ID NO: 291269 - protein, 27 aa, Zea mays
  Clone ID: MRT4577_28724C.1.pep
TYIRTPLISFTHHRIKEAVSRGLHNYA

SEQ ID NO: 291270 - protein, 92 aa, Zea mays
  Clone ID: MRT4577_28725C.1.pep
QKQTTYFNLAYRYSLSESRRQKNSRGSQGRRWCPRCDWPKSCCHKDTILANKKPTASSCSRAPGGGEHMLIQPKREGCLRFEPTSQLCVLIA

SEQ ID NO: 291271 - protein, 62 aa, Zea mays
  Clone ID: MRT4577_28726C.1.pep
GSATHCNRAEGRTFILEPYITNTEVHVYELNHTEYEATHGTHEVHVKLHRGQNVCANLYKGS

SEQ ID NO: 291272 - protein, 89 aa, Zea mays
  Clone ID: MRT4577_28727C.1.pep
TVVMLAYLLTGGFYVHNVPGFMVWAKYTSFTYYCYRLLIAVQYGGHLKRLLPPEAVDGEAGPGACVAALVAMFFGYRLLAYLALRRVRK

SEQ ID NO: 291273 - protein, 122 aa, Zea mays
  Clone ID: MRT4577_28728C.1.pep
QKAEALSVATLGILRYRTVKEGFHILPAHFKTILAFNLAEKLPKGDKILEALYGQLKQHCPRFRGGQDLGQSSSEELMLADPFPLSAYTMVTMGLLKLKEEDNAEERDFAVRDVHIGGTSSV

SEQ ID NO: 291274 - protein, 60 aa, Zea mays
  Clone ID: MRT4577_28729C.1.pep
SRHADGVALTGEACSAGDAPQSEQHGSHHPGHSPPRRRISHRRDRAQQGTSERWIDALIV

SEQ ID NO: 291275 - protein, 81 aa, Zea mays
  Clone ID: MRT4577_2872C.1.pep
MVANGDAPARGSAAAAASLRRRRTTSGAAGGGGGASSMLQFYTDEAAGRKMSPNTVLIMSIGFIAVVAMLHVFGKLYRTSN

SEQ ID NO: 291276 - protein, 121 aa, Zea mays
  Clone ID: MRT4577_28730C.1.pep
GQSNSTRREPLRMSSQTKNKDVCASKSIAKCTSQHRVGNTIMSSGKKVVSDDEFMVPSICYPRFYRQSTQDHADKSKPQSTTNPHKSPAMSKSSVECYSTVNKHLDKINETGRKLMNSPKG

SEQ ID NO: 291277 - protein, 452 aa, Zea mays
  Clone ID: MRT4577_28731C.1.pep
MASGATLSWVKTPFDTRRFHDLSNLSFRCRNPFGSIQPWWLQTDQDSSLIKVRVAADYSDSMPDSKYTRDRGYHPLEEVKERPKKKDLLLTDIETARTVVEANSKGLLVFPARVHNEPHGHVSWSEFQYVVDEYGDIFFEVPDSENILEDDTANNPVTVLIGMDGPIIGESSVAISDFSDYMDGENFMDVPDEHHTKIDTEITDILIEWGMPATMRAIHPIYFAKCLTKAIHNNNGEKMDSPSNGLSIVGYLRPAFIEEESYLRSMFHGDNGGYSSDWKVNETDEYNRETRPVSGTNRLIDDDKSRFDFNHAETRTDSMIYKLEIMTIELFSMYGKQFKIDPQDFQDSEPDILANSASSIIERIKENSDQCAAALRSLCRRKKGLTVEEASLIGVDSLGIDVRAFSGLEVKTVRFSFNAQALSERSAEKKIRRMLFPRYQRKNVKASTEDES

SEQ ID NO: 291278 - protein, 47 aa, Zea mays
  Clone ID: MRT4577_28732C.1.pep
EDQTLHVRTGAWPFISRCRDAYRLQGLNRRELRCWIKYQKVTLLATH

SEQ ID NO: 291279 - protein, 247 aa, Zea mays
  Clone ID: MRT4577_28733C.1.pep
MCPSSNLSSCRELGNHVTCSFTAQAIHNNNGEKMDSPSNGLSIVGYLRPAFIEEESYLRSMFHGDNGGYSSDWKVNETDEYNRETRPVSGTNRLIDDDKSRFDFNHAETRTDSMIYKLEIMTIELFSMYGKQFKIDPQDFQDSEPDILANSASSIIERIKENSDQCAAALRSLCRRKKGLTVEEASLIGVDSLGIDVRAFSGLEVKTVRFSFNAQALSERSAEKKIRRMLFPRYQRKNVKASTEDES

SEQ ID NO: 291280 - protein, 55 aa, Zea mays
  Clone ID: MRT4577_28734C.1.pep
DRMFLVLPLRRLPDIFREKWYLRNDFIDSSKNYTSYLFISTWPEYVPVLPLVYTS

SEQ ID NO: 291281 - protein, 452 aa, Zea mays; identical to SEQ ID NO: 291277
  Clone ID: MRT4577_28735C.1.pep

SEQ ID NO: 291282 - protein, 113 aa, Zea mays
  unsure (1)..(113): unsure at all Xaa locations
  Clone ID: MRT4577_28736C.1.pep
GQGPLKIHLGAHKIMGFHKFFVGKGVMVTRGRNPGGVGGVQNRGKPKGGFETNPLEGSMGPQFPPPMGKGFPLGKGNKPGGSLPQGKGFKLSLLXEQRRGGFFSQGVAKGKIF

SEQ ID NO: 291283 - protein, 463 aa, Zea mays
  unsure (1)..(463): unsure at all Xaa locations
  Clone ID: MRT4577_28737C.1.pep
MASGATLSWVKTPFDTRRFHDLSSLSFRCRNPFGSIQPWWLQTDQDSSLIKVRVAADYSDSMPDSKYTRDRGYHPLEEVKERPKKKDLLLTDIETARTVVEANSKGLLVFPARVHNEPHGHVSWSEFQYVVDEYGDIFFEVPDSENILEDDTANNPVTVLIGMDGPIIGESSVAISDFSDYMDGENFMDVPDEHHXGLLTSYFPCFHQIDTEITDILIEWGMPSTMRAIHPIYFAKCLTKAIHNNNGEKMDSPSNGLSIVGYLRPAFIEEESYLRSMFHGDNGGYSSDWKVNETDEYNRDTRPVSGTSRLIDDDKSRFDFNHAETRTDSMIYKLEIMTIELFSMYGKQFKIDPQDFQDSEPDILANSASSIIERIKENSDQCAAALRSLCRRKKGLTVEEASLIGVDSLGIDVRAFSGLEAKTVRFSFNAQALSERSAEKKIRRMLFPRYQRKNVKASTEDES

SEQ ID NO: 291284 - protein, 41 aa, Zea mays
  Clone ID: MRT4577_28738C.1.pep
CLTVLCIIILQILLVWFRSYLRHSLIRGRLTTRQYQSVTLL

SEQ ID NO: 291285 - protein, 150 aa, Zea mays
  unsure (1)..(150): unsure at all Xaa locations
  Clone ID: MRT4577_28739C.1.pep
MADASSRTDNSTVLDNDGKIYRLEQGQSGGAIMASNSSDRSDRSDKPLDQKTLRRLAQNREAARKSRLRKKSYVQQLESSKLKLAQLEQELQKARQQGIFISSSGDQTHAMSGNGAMTFDLEYTRWLEDXXXQIHELRTAVNAQCSDSDL

SEQ ID NO: 291286 - protein, 81 aa, Zea mays
  Clone ID: MRT4577_2873C.1.pep
MVANGDAPARGSAAAAASLRRRRTTSGAAAGGGGASSMLQFYTDEAAGRKMSPNTVLIMSIGFIAVVAMLHVFGKLYRTSN

SEQ ID NO: 291287 - protein, 65 aa, Zea mays
  unsure (1)..(65): unsure at all Xaa locations
  Clone ID: MRT4577_28740C.1.pep
IHLYNLRATEFLSLYPPLTXVTMFFMIQCCCXWVLFCYRNSITATYYYYDYXSFSYETFFFFCDY

SEQ ID NO: 291288 - protein, 71 aa, Zea mays
  Clone ID: MRT4577_28741C.1.pep
RSLHKPPHPGMEMKKIACAALDSGSVTVVLTAKAPARRISSGRRRYWSSPTNLPSLWRRCPPIRCGRRRRT

SEQ ID NO: 291289 - protein, 107 aa, Zea mays
  unsure (1)..(107): unsure at all Xaa locations
  Clone ID: MRT4577_28742C.1.pep
SFMVCEANANVGFLAFDQACNLDVGAXIADYAMSLLPNRQTGKMAILXGLASPREXSEPNGCVSAQGVAESVYTITNGSTSSESEPELGEARDSSAKTMGARLPMLP

SEQ ID NO: 291290 - protein, 61 aa, Zea mays
  Clone ID: MRT4577_28743C.1.pep
KLLYLDLCQIRHSVGRQLVHKDMLVAIELEYDLSVADLSQDIALLIMDDDEDPLSSRHPDS

SEQ ID NO: 291291 - protein, 182 aa, Zea mays
  Clone ID: MRT4577_28744C.1.pep
LGDDGLDLSRTRHSILHAPHPAVPVLDRDSCSCFTTATVDGGSAAVVSSDEKFSWVRSISPLRRIEEQSWASLRGGGPRRRCIERRRLHPAKTPSAAPATCFFSLREHGTVGRAASPSVNSQRRILERHPPRIFPDGGHARAFPHGRHAVDDERRSCFYLVTLAPNFLVRRWLLSHRLQSRP

SEQ ID NO: 291292 - protein, 105 aa, Zea mays
  Clone ID: MRT4577_28745C.1.pep
LYCFFVLKVMAVRIIKHTLEIIHLLTDASPIQAVVDAIINSGPREDATRIDSAGVGRRRDMYISPLMRLNQGLYLLTTGPREIAFQNIQTICECLADHFINGENG

SEQ ID NO: 291293 - protein, 197 aa, Zea mays
  Clone ID: MRT4577_28746C.1.pep
MECAAKGLAAEPCAGGVADRRCGGCGAVAYCSRVHQIIHWRVHKEECERFAEQMRHIDALSQFPFTFLEPPALNHEFPSARCLFLQSIKLHQKGLWKSECICGRDVAPLKGLSVEAEWNLQSSLCPCAEPKNPVSSALASWEAYYQWRSLPLHSPVAVLLHWPLTLYHCVQLCRTQTPRYDGQDTLCIHYLRPEKEL

SEQ ID NO: 291294 - protein, 82 aa, Zea mays
  Clone ID: MRT4577_28747C.1.pep
NKHETRLTLTARGGRLRTPYTYQQGGRGLGGYKNTGSIRIFYQQNTHAPATEEQIQKAFIYLPGFDALRQASIQGSTSIYLV

SEQ ID NO: 291295 - protein, 138 aa, Zea mays
  unsure (1)..(138): unsure at all Xaa locations
  Clone ID: MRT4577_28748C.1.pep
MGRNKEYSFAELEKEPYWPFEKLRVSITGAGGFIASHIARRLKGEGHYVVASDWKRNEHMPEDMFCHEFHLVDLRVMDNCLKVTTGVDHVFNLAADMGGMGVIQSNHSGIMCNNTMISFNMLEAARTNGXKRRFYASR

SEQ ID NO: 291296 - protein, 371 aa, Zea mays
  unsure (1)..(371): unsure at all Xaa locations
  Clone ID: MRT4577_28749C.1.pep
MALNKEYTYAELEKEPYWPFEKLRVSITGAGGFIASHIARRLKGEGHYVVASDWKRNEHMPEDMFCHEFHLVDLRVMDNCLKVTXGVDHVFNLAADMGGMGFIQSNHSVIMYNNTMISFNMLEAARINGVKRFFYASSACIYPEFKQLETVVSLKESDAWPAEPQDAYGLEKLATEELCKHYTKDFGIECRIGRFHNIYGPFGTWKGGREKAPAAFCRKALTSTGRFEMWGDGLQTRSFTFIDECVEGVLRLTKSDFREPVNIGSDEMVSMNEMAEIVLSFENKQLPIHHIPGPEGVRGRNSDNTLIKEKLGWAPTMRLKDGLRITYSWIKEQLEKEKAEGMDLSVYGSSKVVQTQAPVQLGSLRAADGKE

SEQ ID NO: 291297 - protein, 81 aa, Zea mays; identical to SEQ ID NO: 291286
  Clone ID: MRT4577_2874C.1.pep

SEQ ID NO: 291298 - protein, 86 aa, Zea mays
  Clone ID: MRT4577_28750C.1.pep
GGNQSKFCSPAITFKGATFNLFVGGGPLYKGAKPPGHKKYFWGGWPPTGGGGLLFLGGGFEWETLPRGPYMSQGWKIGKDKVGLPP

SEQ ID NO: 291299 - protein, 95 aa, Zea mays
  unsure (1)..(95): unsure at all Xaa locations
  Clone ID: MRT4577_28751C.1.pep
SKTITLYAESADTIHNGNANIQDKEGIPPNQQGVIYAALHLEDGHTLADYNIQKESTLQLLLRLRGGIQIFVKTXTGKTITLEEDSSDTIDNVKA

SEQ ID NO: 291300 - protein, 130 aa, Zea mays
  unsure (1)..(130): unsure at all Xaa locations
  Clone ID: MRT4577_28752C.1.pep
ARAGRGRERQRKKPRGRKGKEXXRQXXXXAEXXXXQXKXRXXXRRAXKKXXEXXKKAXXKGXKXQXAXXXAGKEXAXAEGXKKXRXPXQTXRAKXXXGXXPXRTXXGXXXXKXXEXXEEETRAQGKKDKN

SEQ ID NO: 291301 - protein, 78 aa, Zea mays
  Clone ID: MRT4577_28753C.1.pep
DNLRATTFIPNNLRNSFSGPTPVQGAPQGPKPVFFLQGGRNPGRVKRHWAKGGPPGETFFPGGSGGPSPEGTKPFLAP

SEQ ID NO: 291302 - protein, 470 aa, Zea mays
  Clone ID: MRT4577_28754C.1.pep
MASAADMEKKHLSVAITGHVDSGKSTVTGRLLTLLGGVSERELEKLKVEAAALGKESFIYAFVMDKQKDERARGITIACTSKEFFTPNFHYTIIDAPGHRDFVKNMLGGASQADVAVLMVPAEGGFTTAIAAGDHASKEVQGQTRQHARLLNLLGVKQLIVGVNKMDDGTVNWSEARFKEVRDEMRNMLIKVGWQKEFVETCVPVIPMSGWKGDNLLSKSENMAWWKGVDCKVDIKQKDTIHVDTLMDALDKLAQAPKRKEDAALRMPLSGCFKIKGVGDVITGRLEQGKVKDGDEVMFLPRHTDATPCVGKVFSVEMHHKKIPQAVAGDNVGINIKGLTKENMPESGDIMVVKSDKSLKAAKQFTMQAQVLDCPNPLKVGYCPVACVRTAKCAVKLVKINWVMHKSLGKEKVTDATEIKANYVAELVFEPTQQLVVEKYADCEGLGRVGLLEGNSLVMLGKVTNVVFRD

SEQ ID NO: 291303 - protein, 35 aa, Zea mays
  unsure (1)..(35): unsure at all Xaa locations
  Clone ID: MRT4577_28755C.1.pep
SSADGMCSNMSPPWNDMPAVPAXASSTTCVRSMTV

SEQ ID NO: 291304 - protein, 84 aa, Zea mays
  unsure (1)..(84): unsure at all Xaa locations
  Clone ID: MRT4577_28756C.1.pep
NICQFQVVMEALSGYLRSPRSGCELLIPDLQNQDQRPKTTARPQETKADEFMDGKNILLVTTISLWSSYSQHVAPXKPRSQLFV

SEQ ID NO: 291305 - protein, 133 aa, Zea mays
  unsure (1)..(133): unsure at all Xaa locations
  Clone ID: MRT4577_28757C.1.pep
ESSVTPSFVTLLEGGKRKRGRPKRVPDISVTPSSHSGLSVDVDSGDTSKRGRPKKIDTSLLHLPSLFSDDPRESADNVLMMFDALRRRLVQLDEVKQVAKQQQNLNAASIMMNAELRLSKNKXIGEVPGVEVG

SEQ ID NO: 291306 - protein, 77 aa, Zea mays
  unsure (1)..(77): unsure at all Xaa locations
  Clone ID: MRT4577_28758C.1.pep
GVKFLTWGAEAAPRRSTLREEQVPGELEHDKIYMGGVDRTGRPIIVGLLVKDYLAHRDMAEXKEFCGXLFQQICARS

SEQ ID NO: 291307 - protein, 195 aa, Zea mays
  Clone ID: MRT4577_28759C.1.pep
MGACVSSSKKRRSQRSCCIYRRYRGKVLTNTPIVRVGEVENLASSGAAVHLGTSAAARRRSDGSNVTFHLTQLQWRHSELDTENGNVVCQEEAWFDSVSILGSDSDEDFSSVNGDFPAMSNSTGTQLMQCEDASSIADAIQKFELIFDGSSVAQAVGQYLKRDANKIEAERPVASPRACDVSSGKVEDAKTRNEG

SEQ ID NO: 291308 - protein, 50 aa, Zea mays
  Clone ID: MRT4577_2875C.1.pep
TNKIMDFIKFDFGNVLMVTGGSNTGFLGVFKNRKKHKGSFKTFQFLFETF

SEQ ID NO: 291309 - protein, 87 aa, Zea mays
  Clone ID: MRT4577_28760C.1.pep
MENDRGEIVDLYVPRKCSATNRIIKAKDHGSVQISIAKVDENGRAIQGENHVYALCGFVRAMGESDDSLNRLAQRDGLLKSVWSGQR

SEQ ID NO: 291310 - protein, 125 aa, Zea mays
  unsure (1)..(125): unsure at all Xaa locations
  Clone ID: MRT4577_28761C.1.pep
TVPNGPNSRTVQIHAWAPQSPAPGRPLRLTVPSRRRACAAPTTRHNSQLKCCIKPSQLELWHRAAGLASARALIPDRVTPFSFDADGDDHPXEECGVFRVIGEPDTSSLXHLTVEAVXHRGEDGA

SEQ ID NO: 291311 - protein, 231 aa, Zea mays
  unsure (1)..(231): unsure at all Xaa locations
  Clone ID: MRT4577_28762C.1.pep
PAGKNAWWWLGMTLMILGXCNLVAYAFTDAILVTPMGALSVVICAILSSFFLKERLSFVGKVGCFDCIIGSVIIALSAPEQSSVASIQDMKKWVIAPGFLSFAGVIIVASLVIALYLGPKYGKRSMMVYLTVCSLIGGLSVVATQGLGAAVVAXLWLSRRPVXKEWFLYVLLVFVVVTLLTEIIYLNKALNLFNAALVTPTYYVFFTSSTIVTSAVLFQGFKGLPIPHHNP

SEQ ID NO: 291312 - protein, 93 aa, Zea mays
  Clone ID: MRT4577_28763C.1.pep
GGVTKPLQTFSRGKGRQNHSTQRPIQDTASVQETTRPLSPQNQKKRTQANPREKRTTVTHPYSLHLTTHPQHLHTKPQGHIPTKNRTPGLPQK

SEQ ID NO: 291313 - protein, 60 aa, Zea mays
  Clone ID: MRT4577_28764C.1.pep
LGTSRPAGRKPPMNLAHPFFVFFLLSFELFGMHCLSQSDHARTPSYLHSGSSETYMECLV

SEQ ID NO: 291314 - protein, 76 aa, Zea mays
  Clone ID: MRT4577_28765C.1.pep
ALGLPPRPSGGSPPLLFFAPPGVVFVAGIRAYIRQRVKKKKKSKRENEKKKKKKKFLIKKKKKNKKKKRKKKKKKR

SEQ ID NO: 291315 - protein, 136 aa, Zea mays
  Clone ID: MRT4577_28766C.1.pep
VTIGSEFGLFYLVKRGADAVAPPLELTDEDGPLKKAVIGTHGDTIHTLVERKNYKGAFMPGFQKVEYNIPFDESGLIAVDHVLGNDVKMEERVSYYENVMGFKQMIHFDDDDISTEYSSFMSKVMTNGSAIKFSIN

SEQ ID NO: 291316 - protein, 186 aa, Zea mays
  unsure (1)..(186): unsure at all Xaa locations
  Clone ID: MRT4577_28767C.1.pep
VRRQLXNIFNLPXRHHAHGRWIKKTPLSTLKTTFWRGNTFRQHFRISVNMPDSGSDSPEAGVKGETKSPVASRFTTEIDTRWGDILLLICFFVAGLVDSAAFNMYGCFVSMQTGNTIFVGLGVSHQPENLPGKAWSRCFLAIVCFAFGALFFSSFHRFFGPQKRWVLITSFLIQALLTGLVAILAT

SEQ ID NO: 291317 - protein, 123 aa, Zea mays
  Clone ID: MRT4577_28768C.1.pep
SQLSFQEWTQQMRDMLEARKRGDFAFRDKDFKAAIDCYTQFVDVGTMVSPTVYARRSLCHLMCDQPDAALRDAMQAQCAYPDWPTAFYMQAVALSKLNMQSDATDMLNEASQLEKKRQKNTKP

SEQ ID NO: 291318 - protein, 49 aa, Zea mays
  Clone ID: MRT4577_28769C.1.pep
NLLKGGMNFLISLKLLLKPWGGFTFKKSLKIQVKVLVGVLFFPTPCFCN

SEQ ID NO: 291319 - protein, 189 aa, Zea mays
  Clone ID: MRT4577_2876C.1.pep
VAMSAIISLGLIGAGTNNARIAGMLRNLSSYYYKDMSLLFCVRIAQGLVHMGKGLLTLSPFHSERFLLSPTALAGIVTLLHACLDMKPIILGKYHYVLYFLVLAMQPRMMLTVDENLKPLSVPVRVGQAVDVVGQAGRPKTITGFQTHSTPVLLAAGERAELATDKYIPLSPILEGFIILKENPDYREE

SEQ ID NO: 291320 - protein, 600 aa, Zea mays
  Clone ID: MRT4577_28770C.1.pep
HSPSAGTNSSIARATRFHLRTSTRGTLKAPAAAKAQPFACYNSPAVPKDANRGVTKKRSTQIVTAQQLDETSSRPGYHGIQGSGLVGGRVADAGRPDDDPAWFCLRVGCDQSHEQVDPEALDRSFFMRVMAARSPNVRLQKAISKKNQSSMLKCPHSAPPKQPRARFARLSAETETAGKAPAEPKPRVERICAMQASPIRTKTARVECPSERKKALTTPRSKAVRPRQELFHSVKHQKEPLAAAARKGTVVKSLFMSTTPKKEPVQTPAADKSKGAVSKVCSKLRKLNLACREVPSRYMSQPQPKIMKTAKKAEETTVAKSEKRGLESRTNAKKKILGRSVKRANAEPDGENRNGCSSAADENSLAETAGSHQERKVVLQELRIEVDASRCDNSDDNKENVSSAPSEEALDNSHYGSENRLLENNENVPVKENVALKVAKLQKKVHQEQAVKLKKTTNPRPFRLRTDERGVLKEAKPEKRQPFAENNSMAVLKDANREVAQMDKHTHCKGRDKPPTCGKKQKKQSAQIAVTAQQLGEPTRPAFNNGIQRKAVEPERVCRAASSTRTTKPARGLPAPPPSRTGKERKAAVKLSSRFQTAAA

SEQ ID NO: 291321 - protein, 84 aa, Zea mays
  unsure (1)..(84): unsure at all Xaa locations
  Clone ID: MRT4577_28771C.1.pep
SEHNGPAGEDDTAIERSEPRGEDYMTLKSKPGAQRHKFWDTQPAGXSRDTTDTSVPNSPIEPPTPIAXERADPHPMPDDYKWIN

SEQ ID NO: 291322 - protein, 193 aa, Zea mays
  Clone ID: MRT4577_28772C.1.pep
MSVDDCFVPFHSPLREPTAYDRWGKGPQPCWSQLDLDRCAGGSQGQGGVDRRILQFLNRPVAVPPRRLPPPLGPLPKLSKPPSQHKENLPEEPKQHHPAQAAVSSAASRGRYARSRAGWASKDGSTPCIRSRAACASKERSTPEGINMEEHGFRFQFTFPEPDYGEDGADFGEEEECVPRQRKPPEVRNALRE

SEQ ID NO: 291323 - protein, 67 aa, Zea mays
  Clone ID: MRT4577_28773C.1.pep
TETGVAQTNRGDECIRRGGKGSCTTATTRTRKDLANSWDRAAHALTEGGRSATHAKRRSMWDYQTGT

SEQ ID NO: 291324 - protein, 121 aa, Zea mays
  unsure (1)..(121): unsure at all Xaa locations
  Clone ID: MRT4577_28774C.1.pep
WRCIFSKEKTRGCAGIDRKPTRLIGSSQRRDLYLFIEHNTLLSTRPTSSVEEXITLYHKTHGKRSTSENICAPGRNILALKSTHSRVGAIPHPNLKSHTLKRARENLTTLRSSCSFIVQEH

SEQ ID NO: 291325 - protein, 134 aa, Zea mays
  unsure (1)..(134): unsure at all Xaa locations
  Clone ID: MRT4577_28775C.1.pep
LXPAXWAXPFXPXLGXLLXXXAPXXPXXSXXRGXXSXXXXPPSGALAXXXPXPLXRRRPRXXASCAXRSPPPLGXXPGLGGGSXGGAGXXGXXGXVVVXXGXASXPPAXSSLSLSPVGGGRRRRRPGRGXVAVA

SEQ ID NO: 291326 - protein, 62 aa, Zea mays
  unsure (1)..(62): unsure at all Xaa locations
  Clone ID: MRT4577_28776C.1.pep
MADSFANLNSEAGLKKLDEYLLTRSYITGYQASTDDLNAYTYLSTAXPSSKYINEPRCFNHF

SEQ ID NO: 291327 - protein, 51 aa, Zea mays
  Clone ID: MRT4577_28777C.1.pep
YPTQLISSDLSKPSTVFFFLYFYFNIMIAISSNEPDLFRIIVVTFYNILHN

SEQ ID NO: 291328 - protein, 61 aa, Zea mays
  Clone ID: MRT4577_28778C.1.pep
PQKTFCGAILFPSNTDREDKKMSLLLTLSTATLFIKSKEIRKSKNDHILIIVMYINDNLFA

SEQ ID NO: 291329 - protein, 90 aa, Zea mays
  Clone ID: MRT4577_28779C.1.pep
NLIGVKALNSENRIMAKFNSLVIRKGFNGFCLRTNSHFTKPLNCKVKVGNFQNFNLKAKNNLFPQFLDQLGSLIKVLFIIKSNKNCLKAK

SEQ ID NO: 291330 - protein, 81 aa, Zea mays; identical to SEQ ID NO: 291286
  Clone ID: MRT4577_2877C.1.pep

SEQ ID NO: 291331 - protein, 169 aa, Zea mays
  Clone ID: MRT4577_28780C.1.pep
EAIKGGDVKGVKKLLTQGVDSNYCDKQGFTLLHLAALFNQTEIALILMDHGANVESKNGQGVTSSAVTLPWHPPTLSGARQVVRMAGLHGYVGRGGASLPRVPRFVSLGSSCGATGGLLHHRANHLRRKLGLVAVLVVFTTVTGVVIIGPATGCNRGSIYTVENLYYPI

SEQ ID NO: 291332 - protein, 200 aa, Zea mays
  unsure (1)..(200): unsure at all Xaa locations
  Clone ID: MRT4577_28781C.1.pep
PAGEFQTNLVPYPRIHFPLVAYSPVISAAKAAHEANSVQEMTMSCFEPNNQMVKCDPRHGKYMATCLLYRGDVVPNDAHAAVATLKTKRTIQFVDWCPTGFKLGICYQAPENVPNGDLAKVSRAVCMLSNTTAIAEAWSSLSLKFDLMHSKRAFVHWYVGEGMEXEGEFSEAREDLAALERDYEEVATDSMGDEELEAEY

SEQ ID NO: 291333 - protein, 71 aa, Zea mays
  unsure (1)..(71): unsure at all Xaa locations
  Clone ID: MRT4577_28782C.1.pep
PKRQLNPKSRSNCDITGTQLKLTSIIYIFPLEXTSTTNNSRSKKGGYIHNKYICVESNSSILSQDTDIIIG

SEQ ID NO: 291334 - protein, 49 aa, Zea mays
  Clone ID: MRT4577_28784C.1.pep
PSLLTSSPQASEELLREHYVELRERPFYSRLVKYMGSGPVVAMVWQGLD

SEQ ID NO: 291335 - protein, 103 aa, Zea mays
  unsure (1)..(103): unsure at all Xaa locations
  Clone ID: MRT4577_28785C.1.pep
VNVSEFPAKVAXQLNDTHPTLAITELMRLLMDVEGLGWDEAWDITNKTIAYTNHTVLPEALEKWSQIVMRKLLPRHMGIIAGIVKRVKEMEVSTRNGLGGKIG

SEQ ID NO: 291336 - protein, 108 aa, Zea mays
  Clone ID: MRT4577_28786C.1.pep
RGPFSVTLCSGKIFRIVGGLHTTKEPVGGYVTLIDAPIPVKIHELSTQGLREGAKKYLCNTTTCSGDKKKVGVRQKKNRFPRPFAKKSHRQIITPRSVLIMSRSHMML

SEQ ID NO: 291337 - protein, 50 aa, Zea mays
  Clone ID: MRT4577_28787C.1.pep
DDRFTSVYCNRHAFIDYWNERILPGGSVRAKGQSEAQSGEDRRHRLKTAP

SEQ ID NO: 291338 - protein, 100 aa, Zea mays
  Clone ID: MRT4577_28788C.1.pep
MGPLGPTVSFSIMVMAKLSGAAQQQPEDERERKEGVRCGGVGGCGFRMPLHYPRYKKADYEAMPEWRVDCLLREYGLPADGDLDSKRRFAMGAFLWPDQY

SEQ ID NO: 291339 - protein, 95 aa, Zea mays
  Clone ID: MRT4577_28789C.1.pep
MGPLGPTVSFSIMVMAKLSGAAQQQPEDERERKEGGSGCGFRMPLHYPRYKKADYEAMPEWRVDCLLREYGLPADGDLDSKRRFAMGAFLWPDQY

SEQ ID NO: 291340 - protein, 139 aa, Zea mays
  Clone ID: MRT4577_2878C.1.pep
GSTQRSYTDGTNFLETLELVDDGDMRIRDKDGELAWRASDEPRHSSNLPFGQEPDGNGHSAELPQAADVGSGEAAFGAAAGVAGPELGQGEHDSASVFGAQPLVDNSPYDSRAWKEGRGAHIIAVWVALCVSAVLGGGL

SEQ ID NO: 291341 - protein, 73 aa, Zea mays
  Clone ID: MRT4577_28790C.1.pep
LRDGLARNEAVAVPLVNALRIGHRDAEGPCSAPKIHRRSAEPMCILLLSSSWCSRRFSLPRSVSHCITDVYGF

SEQ ID NO: 291342 - protein, 131 aa, Zea mays
  unsure (1)..(131): unsure at all Xaa locations
  Clone ID: MRT4577_28791C.1.pep
KKTTPRGKPKKLTGPYLKAPFFSGGSAGGGKXSPSPQKNGXGPKRGGPHXPPPGGNGKQXPPGXRGGPLEPGPPGANDKVNEVKNXSRGGPKKKGGGGPWGGPGPTNFARTPGSGAQGKPKTPWGSSPPPG

SEQ ID NO: 291343 - protein, 81 aa, Zea mays
  unsure (1)..(81): unsure at all Xaa locations
  Clone ID: MRT4577_28792C.1.pep
SEKYMKKIGGRKICXCMVKEEKQEYRXSVELQVFSXTNKIRRLAXHSELHRKDLSSVRGLRRLLGKRLRLLTYLPKKNRVS

SEQ ID NO: 291344 - protein, 134 aa, Zea mays
  unsure (1)..(134): unsure at all Xaa locations
  Clone ID: MRT4577_28793C.1.pep
QGRKGPTNPGGMNFTTDELRSLEKKFFFFFXAXGGGGGGFFFFLRLFCMGGGGRRPPRATRTCXAQASQIRQIRRXMGAIMINLAFTCDLEELGSEFIPVVVGVGIGRSASGLFPXLRCVFSRPGRDLTAPQFD

SEQ ID NO: 291345 - protein, 52 aa, Zea mays
  unsure (1)..(52): unsure at all Xaa locations
  Clone ID: MRT4577_28794C.1.pep
MAAGDTFLFTLESVNEGHPDKLCDQVLNAGLDAWLAEXPDSKGACETCTKTN

SEQ ID NO: 291346 - protein, 76 aa, Zea mays
  unsure (1)..(76): unsure at all Xaa locations
  Clone ID: MRT4577_28795C.1.pep
ARAEDYYNEIDMGYEDEPPXPEIEEGSEQELENNXNXAPDDIIXVRXHKEQDKTKRERKSTXYMTKYXRAFILSTR

SEQ ID NO: 291347 - protein, 49 aa, Zea mays
  Clone ID: MRT4577_28796C.1.pep
ERFFGKRRVIFPSNKQKTPIFFSSKNPHYYIILHYIIFKKVVRSFTKTP

SEQ ID NO: 291348 - protein, 183 aa, Zea mays
  unsure (1)..(183): unsure at all Xaa locations
  Clone ID: MRT4577_28797C.1.pep
LSPYLADGSAYVYAQEGASLAQEPENAYCDKVPPLLPERRMSKIXRTHLFKELTEGLLKTPDEYKNKELDILQMRLNEVTGEXAPTYNSEILXQHCDFPEHYDMEEPHVIFLYQETMHXHIYSKGDICLDMEYDFGPPTMTESSDVITIXSVCSVGGQXERAMDYDRYVMNCRNGSVPYETRW

SEQ ID NO: 291349 - protein, 54 aa, Zea mays
  Clone ID: MRT4577_28798C.1.pep
APNFQHVLVFPILFPSLLYLVSTNFFKANLFQFVSNGILFVAAKPKWKPFCWCL

SEQ ID NO: 291350 - protein, 36 aa, Zea mays
  Clone ID: MRT4577_28799C.1.pep
VFQTISLIYCRAHKIPSDSIRYFLNLHLSLQSFSLP

SEQ ID NO: 291351 - protein, 114 aa, Zea mays
  Clone ID: MRT4577_2879C.1.pep
MRAAPMDPAAGSAGQQRQNKASAGKKGKNGGGNGGRWPAVKPQKGFHNNWLKGPHLSSLSEFFTFVEAKGFIGIAEAMGFTHQGSLWPLMGEGYRDNHRISVTDPLLAQALWEC

SEQ ID NO: 291352 - protein, 92 aa, Zea mays
  Clone ID: MRT4577_287C.1.pep
TCSARLSIHRIQVHVSRTYQRLTVLIKTKIIKITPHHSHVYAHAANAMLVINSSPTVRCFSRGNMRRGRRLGRRGRLPPRRHRWWQEQPRRP

SEQ ID NO: 291353 - protein, 498 aa, Zea mays
  Clone ID: MRT4577_28800C.1.pep
AAAGALRTLSFKNDENKTQIVQCNALPTLILMLRSEDAAIHYEAVAIIGRLVHSSPKIKKEVLNAGALQPVIGLLSSCCTESQREAALLLGQFASADSDCKVHIVQRGAVRPLIEMLQSADVQLREMSAFALGRLAQDTHNQAGIAYNGGLVPLLKLLDSKNGSLQHNAAFALYGVADNEDYVSDFIKVGGVQKLQDGEFIVQATKDCVAKTLKRLEEKINGRVLKHLLYLMRVGEKSVQRRVALALAHLCAPEDQRAIFIDNNGLDLLLDLLISMSPKHQQDGSAALYKLANKAAALSPMDAAPPSPTPQVYLGEQYVNSSTLSDVTFLVEGKRFYAHRIALLASSDAFRAMFDGGYREKDARDIEIPNIRWDVFELMMRFIYTGSVQVTSEIAQDLLRAGDQYLLEGLKRLCEYTIAKDVNLDNVSDMYDLSEAFHAVSLRHTCILYILEHFNKICTRAGSAQLIQRVIPELRNFLTKALSSSRSPSTTDDRNLQT

SEQ ID NO: 291354 - protein, 50 aa, Zea mays
  Clone ID: MRT4577_28801C.1.pep
YLEVSKGFAKKIMEPSLREKTPSLTRNLSSNRCLISYCTNSSYVFSFGAV

SEQ ID NO: 291355 - protein, 110 aa, Zea mays
  Clone ID: MRT4577_28802C.1.pep
MDIERFFKRSRPGPNRLKGQSVKQRCTGYGEDCVLYTRCSSNRDGDPWLFNATLGGLSHITGWHEGGHILQVRDAGPVQGTAESADGDERYPLWRIHPGLLLAWDIESRH

SEQ ID NO: 291356 - protein, 108 aa, Zea mays
  unsure (1)..(108): unsure at all Xaa locations
  Clone ID: MRT4577_28803C.1.pep
FKGHFLNQEKDARDIEIPNIRWEVFELMMRFIYTGSVQINSEISQDLLRAADQYLLEGLKRLCEYTIAKDVNLDNVSDMYDLSEAFHAVSLRHTCILYILEHXNKICT

SEQ ID NO: 291357 - protein, 63 aa, Zea mays
  Clone ID: MRT4577_28804C.1.pep
VLVDVFWGALGGCFPVNEPSLSPLLFFKIFSPKKKKKKPPQTKKKKKKKKKKKKKKKKKKKLE

SEQ ID NO: 291358 - protein, 67 aa, Zea mays
  Clone ID: MRT4577_28805C.1.pep
QGQSRTTSSSPPCFHVHIGLDAQPDISIAFTFRLLLLRLGLGDRERAILKARLDLFQLGDLRQAEAP

SEQ ID NO: 291359 - protein, 179 aa, Zea mays
  Clone ID: MRT4577_28806C.1.pep
FFSIVYQIILIPSTGKRFYAHRIALLASSDAFRAMFDGGYREKDARDIEIPNIRWDVFELMMRFIYTGSVQVTSEIAQDLLRAGDQYLLEGLKRLCEYTIAKDVNLDNVSDMYDLSEAFHAVSLRHTCILYILEHFNKICTRAGSAQLIQRVIPEIRNFLTKALSSSRSPSPSDRNSQT

SEQ ID NO: 291360 - protein, 49 aa, Zea mays
  Clone ID: MRT4577_28807C.1.pep
WTNLKMVKSSECSVEGYSSSGRHLTNTNIVFIPGVLIEDPLTGHMPRHG

SEQ ID NO: 291361 - protein, 72 aa, Zea mays
  Clone ID: MRT4577_28808C.1.pep
KTVGNLEWGILDSQPHPKPIFSTGRSQIRKLAKFDAPEILYNTTNRDRSITRESPPPNQVRFKTSRPCSSQI

SEQ ID NO: 291362 - protein, 64 aa, Zea mays
  unsure (1)..(64): unsure at all Xaa locations
  Clone ID: MRT4577_28809C.1.pep
AAGEGSDRRRLWKTIFRGQRAPPLXTLTITRNPISCHTHCPFALNDNFSKGPLLLTIPDHVRFL

SEQ ID NO: 291363 - protein, 204 aa, Zea mays
  unsure (1)..(204): unsure at all Xaa locations
  Clone ID: MRT4577_2880C.1.pep
LLTEDSDEEDXSGRRAKHAQNQNNKPKSKVPNGSEADDTDGASRPKSAGLVDYDDDDDEDFNPPPKEPSRPAEDDVPLNISPLKRKPVNAVDGKHSDGEGRRRQKIETRISCAKIAAVTSTAIKHTDLQNKYASHLLTSATPSTEANGIFSEHGTNYEEQQHPMENTETSRQTGGDCIKDVGSMSPEKAVNTTNTSDSEPYSVR

SEQ ID NO: 291364 - protein, 540 aa, Zea mays
  unsure (1)..(540): unsure at all Xaa locations
  Clone ID: MRT4577_28810C.1.pep
MENTKLSSALFAGTHFDRKRFAADFARFRKGPALPSAATPSAPSPEKKRKRKSGKAKAKKNKKRAQDAAAAASSDFVEGFSVFKGLADNNAELRSEKVDMRKDDDSVAVRRRKEIEREFERAAVLRKRFDIHIAGQNAPAPLESFEELISRYGCDSYLVGNLSKLGFQEPTPIQRQAMPILLSGRECFACAPTGSGKTLAFLFPLLMKIKGQKXGVKAVILCPTRELAAQTVRECKKLVKGRKYYIKLMTKELSKSGNFKDMHCDILVSTPLRLDHAVKKRDLDLSSVEYLVLDESDKLFELGFVEVVDSVVEACSNPSIIRSLFSATLPDSIETLARTIMHDAIRVIVGRKNSASSLIKQKLIFAGTERGKLLTLRQSFQESLNPPVLIFVQSKERAKELYKELAFDDIRVDVIHADLSEQQRQDAVDNLRAGKTWVLIATEVIARGMDFKGVACVINYDFPESAAAYIHRIGRSGRAGRSGEAITFFTEEDKPFLRNIANVLVSSGCEVPSWIMALPKLKRKKHRVDRDPISYLPDEV

SEQ ID NO: 291365 - protein, 48 aa, Zea mays
  Clone ID: MRT4577_28811C.1.pep
TLVEPICTLYITRRVCQAVVVPTRMGHSAGYNYSRRVLNAHETKHEGA

SEQ ID NO: 291366 - protein, 129 aa, Zea mays
  Clone ID: MRT4577_28812C.1.pep
KKGVFWTPYLYNQKSPNPFKHWFWGPPPPRNKNKWGLKLDFLGTRDKNHGLRGPRDHPLQGGTQLGPQKMGGARNHRFYQKRGGKGNNIFWAQSGMVYSPKGGGALPTFGPGTRLKLKIPGRPPPLKRG

SEQ ID NO: 291367 - protein, 125 aa, Zea mays
  Clone ID: MRT4577_28813C.1.pep
PGPFSAGRAPFSWPPGKMSDRGPVGDLPGGFMAPSFCFHYGFLEEFVFVFIPSFFFSPEKVVFPPFFFLFTLLAFDHHSPAFVFLPLVPKVPVSQSAPPPSGVPPPCFPVPQIFVRLLVYQFPSI

SEQ ID NO: 291368 - protein, 52 aa, Zea mays
  Clone ID: MRT4577_28814C.1.pep
RVDGSVSMLISQSLTLLGDRLVIRLLHFSCSVWSLSPPYMYPPPSSSWLYCT

SEQ ID NO: 291369 - protein, 88 aa, Zea mays
  unsure (1)..(88): unsure at all Xaa locations
  Clone ID: MRT4577_28815C.1.pep
LHAYDTFLSEDDIRLNSAILTEAKHLPMYDKLARKSNGEYIAGSATRSYIKADHWMLQTSVAPGYMXCIGXTQAGEEMTKNSKAWKQN

SEQ ID NO: 291370 - protein, 171 aa, Zea mays
  Clone ID: MRT4577_28816C.1.pep
RPGRAPSRVTSFPAAGGDLHVVPFAGNEHPPTRIQKERTKVIRELSGLILTRGPKLCNFVEWRGYKVVYRRYASLYFCMCIDAEDNELEVLEIIHHFVEILDRYFGSVCELDLIFNFHKAYYILDEILIAGELQESSKKNVARLIAAQDSLVEAAKEEASSISNIIAQATK

SEQ ID NO: 291371 - protein, 68 aa, Zea mays
  Clone ID: MRT4577_28817C.1.pep
GAPLFSFCCGICLLFVAATNKGQGGGLLFIYLFIRGALLPPPKICHLKVLFKNVPNKKERRSKRAPPV

SEQ ID NO: 291372 - protein, 374 aa, Zea mays
  Clone ID: MRT4577_28818C.1.pep
IRLEALNKLKGKELELLLAILPDNNGPLYGDIKRICETDLGLISQCCLTKHVFKISKQYLANVSLKINVKMGGRNTVLLDAISWSIPLVSDIPTIIFGADVTHPETGEDSSPSIAAVVASQDWPEVTKYAGLVCAQAHRQELIQDLYKTWHDPQRGTVTGGMIRELLISFRKATGQKPLRIIFYRDGVSEGQFYQVLLYELDAIRKACASLEPNYQPPVTFVVVQKRHHTRLFTNNHKDRSSMDKSGNILPGTVVDSKICHPTEFDFYLCSHAGIQGTSRPAHYHVLWDENNFTADEMQTLTNNLCYTYARCTRSVSVVPPAYYAHLAAFRARFYMEPEMSENQTSKSSNGTNGGLVKPLPAVKEKVKRVMFYC

SEQ ID NO: 291373 - protein, 133 aa, Zea mays
  unsure (1)..(133): unsure at all Xaa locations
  Clone ID: MRT4577_28819C.1.pep
MAVEEAQQTVQDELVIWKRISDEAIRMQASVRAEELTDPEILEQLVAPVEAPKPDVTYSSEEHVATAQRYEQAVSEEPNSSLLLANFAQFLYQVQGDLDRAEHFFRRAVRAEPADAEALXRYAAFLWQARNDL

SEQ ID NO: 291374 - protein, 80 aa, Zea mays
  Clone ID: MRT4577_2881C.1.pep
SRCRTGFSQRIFWTCKRVFPRAFTWAYSYMNDGWCAYMIHVRNNRDSARLLTKKIMAIHVKNEFKGDLRTTHLITSLNTL

SEQ ID NO: 291375 - protein, 132 aa, Zea mays
  Clone ID: MRT4577_28820C.1.pep
QVIRELSGLILTRGPKLCNFVEWRGYKVVYRRYASLYFCMCIDAEDNELEVLEIIHHFVEILDRYFGSVCELDLIFNFHKAYYILDEILIAGELQESSKKNVARLIAAQDSLVEAAKEEASSISNIIAQATK

SEQ ID NO: 291376 - protein, 233 aa, Zea mays
  Clone ID: MRT4577_28821C.1.pep
MFKTTLVRDGRPWWSRPIELDLQDSPPQPFASVSRDFIPSGRRRPPRGAIRRQRAPAHQDPGLCCESAYPFTMINFVLLISRQGKVRLTKWYSPYTQKERTKVIRELSGLILTRGPKLCNFVEWRGYKVVYRRYASLYFCMCIDAEDNELEVLEIIHHFVEILDRYFGSVCELDLIFNFHKAYYILDEILIAGELQESSKKNVARLIAAQDSLVEAAKEEASSISNIIAQATK

SEQ ID NO: 291377 - protein, 75 aa, Zea mays
  Clone ID: MRT4577_28822C.1.pep
PRFRHGSQSHRTLDLLHCHYRSHLPSLLILPSHRLLLVHTAKQRSQHTHIRLLTSELDNSHHQFHHQILVLFPYI

SEQ ID NO: 291378 - protein, 82 aa, Zea mays
  Clone ID: MRT4577_28823C.1.pep
PPQKKKGGNPPFCIWVWVGGGLCPWGVGTWTPQLWGAPPASARFAIKAGPYVFFKKGGICCIKFAYQLRHRWPFGGEPGFML

SEQ ID NO: 291379 - protein, 242 aa, Zea mays
  Clone ID: MRT4577_28824C.1.pep
STHETLSQKLYEKFKNHKRFTKPKLSRTAFTIQHYAGDVTYQSDQFLDKNKDYVVAEHQELLNASKCSFVSGLFPQATEENTKSSKSSIATRFKIQLHELMETLSSTEPHYIRCIKPNSVLKPGIFENTNVLQQLRCSGVLEAIRISCAGYPTRKLFHDFLHRFRVLAPEILKEKNDEKVSCQKVLDKMGLQGYQIGRTKVFLRAGQMADLDARRTEMRNNAAKGVQSQFRTHVAREQFLVL

SEQ ID NO: 291380 - protein, 590 aa, Zea mays
  unsure (1)..(590): unsure at all Xaa locations
  Clone ID: MRT4577_28825C.1.pep
MPFGLKNAGATYQRAIQTCLADHWGKRVEAYVDDVXLRRYWWKLNPXKCVFGVPAGKLLGFIVSHREIEANPKKIEAIMRMEAPRSQKKVQRLTGCMASLSRFISRLGEKGLPLYKLLKKVDKFQWTLEVQEALDALKKFMTTPPVLKPPRRAMPDQPAEDLLLYISCTTHVLRHYFDDHKVIVVTGFPIGYILHNKEAIGRIAKWAYELGAHDIEFRPRTAINTQALVDFVSEWTEQQVPDNPEAAEVWRMYFDGSLKLQGAGVGILFIAPGGEQLKYALQLLFSASNNAAEYEALIHGLNIDISLGIKRLMQQHLPAQQLQTIPVTWPFACWGLDMIGPFKKAQGGYTHVLVAIDKFTKWIEYKPIASLTSAKAVEFIQDIIFRFGIPNSIITDLGSNFTSSEFFDFCEQRSIQIKYASLAHPRANGQVERANGMIPEALRKKVFDKNEKFVGKWIRELPYVVVLPADLRFGAPRLVFESIAEAEATRLEYIDVLEEERLNTVIQSARYQQTLRRYHDKTIRHRSFVVGDLVLRRILTGEGRHKLSPQWEGPFMVSEVTRPGSYRLTQMDGTEVGNSWNIEHLRKFYP

SEQ ID NO: 291381 - protein, 303 aa, Zea mays
  Clone ID: MRT4577_28826C.1.pep
MPFGLKNAGATYQRAIQTCLADHWGKRVEAYVDDVVIKTENLENFIEDLQLVFNSLRRYRHQGIEANPEKIEAIMRMEAPRSQKKVQRLTGCMAALSTVVERAEEGHTYPVQHPVYFISEVLGPSKKKYPQVQKLLYGVLLTAHKLRHYFDDHKVIVVTGFPIGDILHNKEAIGRIAKWVCELGAHDIEFRPCTAIKTQALVDFISKWTEQQVPNNPEATKGAGAGILFIAPGGEQLKYALQLLFPVSNNAAEYEALIHGLNIVISLGIKRLMVYGDSLVVISQINKDWDCSTDSMGKYCTAV

SEQ ID NO: 291382 - protein, 397 aa, Zea mays
  Clone ID: MRT4577_28827C.1.pep
MTFGLKNAGVTYQRVIQKCLVDHWDKRVEAYVDDVVIKTENLENFIVDLQLVFNSLRRYGWKLNPEKCVFGVPAGKLLGFIGAGAGILFIAPGGEQLKYALQLSFSASNNAAEYEALIHGLNIAISLGIKRLMVYGDSLVVISQINKDWDCSTDSMGKYCTPVQKLEDKFEGLEFHHVERDRNAAADALSKLGSSRAQIKYASVAHPRANGQVERANGMILEALRKKVFDKNEKFAEKWIRELPYVVWSLRTQPNRALHGNTPFFMVYGSEAVVPADLRFGAPRLVFESIAEAEATRLEDIDVLEEERLNTVIQSARYQQTVRRYHDKAIRYRSFVVADLVLRRILTGEERHKFSPLWEGPFMVLKVTRPGSYQLTQMDGTKVGNSWNIEHLRKFYP

SEQ ID NO: 291383 - protein, 749 aa, Zea mays
  Clone ID: MRT4577_28828C.1.pep
MPFGLKNAGATYQRAIQTCLTDHWGKRVEAYVDDVVIKTENSENFIKDLQLVFNSLRRYRWKLNPEKCVFGVPAGKLLGFIISHRGIEANPEKIEAIMRMEAPQSQKKVERLTGCMAALRRFISRLGKKGLPFYKLLKKVDKFQWTAEAQEALDALKKFLTTPPVLKPPHRATLDQPAEDLLLYISCTTHVVSTALVVERAEEGHTYSVHHSVYFISEVLGPSKKKYPQVQKLLYAVLLTARKLHHYFDDHKVIVVTGFPIGDILHNKEAIGRIAKWACELGAHDIEFRPRTAIKTQALVDFISEWTKQQVPDNPEATEGAGAGILFIAPGGEQLKYALQLLFLASNNATEYEALIHGLNITVSLGIKRLMVYEDSLEVISQINKDQDCSTDSMGKYCTAIRKLEDKFEGLEFHHVERDRNAAADTLSKLGSSRAQAEECNTLSQPESDSNDWREPIIRYIKNEEEPDDKAVAERIARQSVHYTLIGGALYKRGATGVLMKCISSVTRKPLLDEIHAGQCGIHAASRTLVGKVFRSGFYWPTAKSDAAELVQRCEACQFLSKQQHLPAQQLQTIPVTWPFACWGLDMIGPFKKAQGGYTHVPVAIDKFTKWIEYKPIASLTSTKAVEFIQDIIFRFGIPNSILTDLGSNFTSSEFFDFCEQRSIQIKYASVAHPRANGQVERANEAVLPTDLRFGAPRLVFESISEAEATRLADIDVLEEERLNTVIQSARYQQTLRRYHDKLYDIDPL

SEQ ID NO: 291384 - protein, 68 aa, Zea mays
  Clone ID: MRT4577_28829C.1.pep
CRFSFSCCLPPTDYPFSSSPPSVHCLTVLISQNIHSRTVCTLSNVGRWMRTVKDLLWSLRNGKSCCGQ

SEQ ID NO: 291385 - protein, 55 aa, Zea mays
  Clone ID: MRT4577_2882C.1.pep
AHVAIQISILRNTTKKNTYLNIISLCSPCVAGFTLAWCLFAGRNCGICSLLLRCC

SEQ ID NO: 291386 - protein, 120 aa, Zea mays
  unsure (1)..(120): unsure at all Xaa locations
  Clone ID: MRT4577_28830C.1.pep
GPFKGFFGHGNGFPSLKNLYLYNKXLAGVLPNQISNLTNPXILPLSKNKKIGAKFPKIVPLPRVIFLVLGKNNFLWRKPERLFKPPFFKELFLQRNPFQPGTQFKGTPKGVGMPYPPLLI

SEQ ID NO: 291387 - protein, 1044 aa, Zea mays
  unsure (1)..(1044): unsure at all Xaa locations
  Clone ID: MRT4577_28831C.1.pep
MCGVSTLTPRLRAIQWPPNFKVSNIEKYEPKQDPGGWLAVYTTAARAAGATEDVMTAYLPIVLGQDALQWLRHLPRHCIDDWSDFSRCFIANFQSLSDKPVQPWDLKSIRRRGDETLRSYLKRFQTMRNRIPEVAEAAVIEDFYRGSNDSAFVRAILQKAPTTSEQFFREADLYITADERAQDLIGGTKPAPSAPRRDANQQTDKRWEKRPREEVHAAGPPVSRARGAPRGGGPDEPRQPQQHEGGGGGAFPRVDGEVNVIFEGHGSQESKRQQKLNDRQILVATTSASTPYRWLEHPITFTQADQWLNFDHPGKYSLLVDPVIRESRVKKVLVDGGSSINVTFPRTLLGLEVALKELHESDTPFFGIVPTEGEYPLGHIYVSVTFGALENYKTEFLRFEVTSFDCGYNAIIGRPGLAKFMAIPHYSYMILKMPGPQGIITVRADFQDLNKHCPKDPFGLPIIDQVVDSTAGCSMLSFLDRYSRYLQIGLAKEDEEKTAFITPFGAFCYTSMSFGLKNAGATYQRAIQTCLADHWGKQVEAYVDDVVIKTENSENFNEDLQLVFNSLRRYLWKLNPEKCVFGVPAGKLLGFIVSHRGIEANPEKYEAIMRMEAPRSQKKVQRLTRCTTTLSRFISRLGEKGLPFYKLLKKLRHYFDDHKVIVVTGFPIGDILHNKEAIRRITKWAYELGAHDIEFRPRTAIKTQALVDFVSEWTEQQIPDNPEATELSFPASNNAAEYEALIHGLNIAISLGIKRLMVYGDSLVVISQINKDWDYSTDSMGKYIKNEEEPDDKAITEHITRLSAHYTLVGGTLYRRGATGVLMKCISSVTGKQLLDEXRRTLWNTRSIQNSGWESLQVXSIGQQQRVMRSSXVQSIITDLESNFTSSKLFDFCEQQSIQIKYASIAHPRANGEVERVNGMILEELRKKVFDKNEKFTGKWIRELHYVVWSLRTQPSRALHGNTPFFMVYGSEAVLPANLRFGAPRLVFKSIAEVEATRLEDIDVLEEERLNTIIQSARYQQTLRHYHDKTIRHQSFIVGDLVLR

SEQ ID NO: 291388 - protein, 265 aa, Zea mays
  unsure (1)..(265): unsure at all Xaa locations
  Clone ID: MRT4577_28832C.1.pep
WPFACWELEMIGPFKKAQRGYTHXKAVEFIQDIIFRFGIPNSIITHLGSNFTSSEFFDFCEQRSIQIKYASVAHPRANGQVERANGMILEALRKKVFNKNEKFARKWIRELPYVVWSLRTQPSRALHGNTLFFMVYGSEAVLPADLRFGAPRLVFESIAEAEATRLEDIDVLEEERLNTIIQLARYQQTLRRYHDKAILHRSFVVGDLVLRRILTGEGWHKLSPLWEGPFIVSEVTRPGSYRLTQMDGTEVGNSWNIEHLRKFYP

SEQ ID NO: 291389 - protein, 680 aa, Zea mays
  Clone ID: MRT4577_28833C.1.pep
MASLHEVRPLELSRQRLQLVAQPGTGTTVVDRRTRVEYRHSLRVSKPFNGPQTLKSPTLTNTSPTATVERAFSAMKIIKTELRNKMRNDWLNYRMPWDLKSIRRQEDETLRSYLKRFQTMRNQIPKVAEAAVIEDFYRGSNDSAFVRAILQKAPTTSEQLFREADLYITADEWAQDLIGGTKPAPSAPRCDTNQQTDKRWRRGLVKKSMPLDHPSLVPEGHPMEANEHWTTSSTPSARTTKICVTPFGTAETSSTPSGMADPSNLYHLPHHEEDLENLDNLSSRKGEEAERSHASMEKSMSSSADTGLGVALKELHKSDTPFFGIVLTEGEYSLGHIYMPITFGTPENYRTEFLRFEVASFDCGYNTIIGRLGLAKFMAIPHYSYMILKMPGPQGIITMRADFQGATKCFHVAIQVALATKPSMISSAQLVFNSLRRYRWKLNPEKCVFGVQAGKLLGFIVSHRGIEANPEKIEAIMRMEALRSQKKVQRLTGCMAALSRFISRLGEKGLPFYKLLKKVDKFQWTTEAQEALDALKKFLTMPPVLKPPHRATPDKPAEDLLLYISYTTHVLRHYFDDHKVIVVTGFPIGDIIHNKEAVGRIAKWACELGAHNIEFRPRTAIKTQALVDFVLEWTEQQVPDNPEVTELWQMHFDGSLKLQGADAGIEREMCLWAISKYFGD

SEQ ID NO: 291390 - protein, 79 aa, Zea mays
  Clone ID: MRT4577_28834C.1.pep
MNQQCTQITPSINILCTECPSVNFLKVNVNSSPMVARTENVRIVPTFKIYKGGVKVKEMICPSLHVLRYSVRHYSVSSS

SEQ ID NO: 291391 - protein, 552 aa, Zea mays
  Clone ID: MRT4577_28835C.1.pep
MAGEAKPSPSVFGYLIPFLDDVYSHVIAACELGAHGIEFRPRTTIKTQALVDFVSEWTEQQGTSAGILFIAPRGEQLKYALQLSFSASNNAAEYGALIHGLNIAISLGIKRLMEVSRPSIPSDQAEECNTLSQPESDSNDWREPIIKYIKNEEEPDYKAATERIARQSAHYTLIGETLYRRGATGILMKCISSITRRRLLDEIHAGQRGIHAASRTLVGKVFMFGFYWSTVKSGAAELVQRCEACQFLSKQQHLPAQQLQTIPVTWLFACWGLDMIGPFKKAQGGYTHVLVAIDKFTKWIEYKLIASLTSAKAVEFIQDIIFRFGIPNSIITDLGSNFTSSEFFDFCEQRSIQIKYASVAHPRANGQVERANGMILEALRKKVFDKNEKFIGKWIRELPYVVWSLRTQPSRALHGNTPFFMVYGSEVVLPTDLRFRAPRLVFESIAKAEPTRLEDIDVLEEEQLSTVIQSAKYQQTLRRYHDKAIRHRSFVMGDLALRRILTGEGRHKLSPLWEGSFMVSEVTRPGSYRLTQMDGTEVGNSWNIEHLRKFYP

SEQ ID NO: 291392 - protein, 78 aa, Zea mays
  Clone ID: MRT4577_28836C.1.pep
QSRDGTLSRSPRRLISRVQVTRLLIILYEAQIGLRSVSAPPQVTPTGSCKQSPRTPWGVASLFHIAISPQGRHLSLEA

SEQ ID NO: 291393 - protein, 83 aa, Zea mays
  Clone ID: MRT4577_28837C.1.pep
MSGSKVYTLEEVGKHNTKDDCWVVIGGKAHNVTKCPEDHPGGDDVLLPSTAKEGTDDSEDMAEGTTARGVMDAHPAGEIDAGH

SEQ ID NO: 291394 - protein, 67 aa, Zea mays
  Clone ID: MRT4577_28838C.1.pep
QGRYISSLPRDVRIELRTGGLSCFRHCTISVARAVLSEMFLIKLLSQSGWDSCSVCIIGIFRGIGVV

SEQ ID NO: 291395 - protein, 143 aa, Zea mays
  Clone ID: MRT4577_28839C.1.pep
LINFPLTFLFSNICTKQGAWGKQFGHRKKEKNPRENRAGKESQQKRPTDMGGTKLKLGPKNLFLPTLWPKGEEKNRGRGYNHMGATPGKNIEKKKKAENLSRKSPTNKKGWPTKNTRKKMGQKIIPREQRVQTAQNPWVQPGN

SEQ ID NO: 291396 - protein, 58 aa, Zea mays
  Clone ID: MRT4577_2883C.1.pep
VQLLLAQCCSHQPSFWHGQPGAVLVSKARSGTGHLMLSSGIACPVTRAMVPSGSARIR

SEQ ID NO: 291397 - protein, 260 aa, Zea mays
  Clone ID: MRT4577_28840C.1.pep
MARLSRRRFLLSLHVALLLLVPCSCQVGDSCSAARDCGVGLYCGDCAAAGRTRPSCIRDLAIQPTSIVKGLPFNRYSWLVTHNSFSIVGEPSRTGVERVTFYNQEDTVTNQLRNGVRGLMLDMYDFGGDVWLCHSLQGQCYNFTAFEPAIDTLKEVEAFLSENPTEIVTIFIEDYVHAPMRLSKLFTAADLMKYWYPISEMPTSGQEWPTVTDMVAKNHRLLVFTSDASKESSEGIAYQWSYLLENESGDPGIDPSTCPN

SEQ ID NO: 291398 - protein, 103 aa, Zea mays
  Clone ID: MRT4577_28841C.1.pep
RLTPHTVLPVIPRAFLHRQESTGNFVIGLQNCIHRRTRMELAMGHGREHRPAPRSSPTSSLILSYLYGIPAETFEFYSIEHNMKRARGASPPMTAMTNPNDDG

SEQ ID NO: 291399 - protein, 66 aa, Zea mays
  Clone ID: MRT4577_28842C.1.pep
GIGLFTMEQCPVPEHVCMLLATSFLGDLNSRGVYVRRYGQLIKLESDNNGKNFLYWMMTGICGWFI

SEQ ID NO: 291400 - protein, 65 aa, Zea mays
  Clone ID: MRT4577_28844C.1.pep
SAVAVSPLFVELDPASQMKESAPGELVHQTMECSVTVNRSVASVFGDMGARIHGFPAADTMVSSK

SEQ ID NO: 291401 - protein, 69 aa, Zea mays
  unsure (1)..(69): unsure at all Xaa locations
  Clone ID: MRT4577_28845C.1.pep
AGGSFWVYENHQATXDPLHAHRYKITDEVHVLVDETACDYVFHEHHQKKIYHKDADEATXEXKQHHLFE

SEQ ID NO: 291402 - protein, 85 aa, Zea mays
  Clone ID: MRT4577_28846C.1.pep
SRASEVRTVLRDGNKGARWSSVCISRGLTPALGSCQIDQRDLFQSQTPAQLLRKQHKAAPATLAVCYQVYACGSQPMVFTPVHLQ

SEQ ID NO: 291403 - protein, 74 aa, Zea mays
  Clone ID: MRT4577_28847C.1.pep
ALVMGSRPYTRGMCEGVEHVVRSMRPGGKRRVVVPPGLAFGDGGADFGEEHVQIPPGATLEYVVQVDKVSIAPA

SEQ ID NO: 291404 - protein, 84 aa, Zea mays
  unsure (1)..(84): unsure at all Xaa locations
  Clone ID: MRT4577_28848C.1.pep
RSLVPXXCGPVXAXXSPLVLRGLXRXAWXPCPLPXXPXFVXXXSVGSGXXVLLXRSVCXXXVXSACXSVAFVXVSAFVPCFLVS

SEQ ID NO: 291405 - protein, 115 aa, Zea mays
  Clone ID: MRT4577_28849C.1.pep
SEFGSWVIGAFFFTLDILANNGAFLMLMPSAEWAAGDYAPSMATNLEGSSHISQVGHPLILNSSPAGGVSIVNDCDTPAGLGYRRRDCAVPPQAGLNQMTRNLCGEWACNRRLAD

SEQ ID NO: 291406 - protein, 70 aa, Zea mays
  Clone ID: MRT4577_2884C.1.pep
LLDMVGNYFWMKGANTWLYHESMYKLSPLLQRVDVAFYVLEYQNDYIARARTLVVDVTERPPPCASCKPS

SEQ ID NO: 291407 - protein, 88 aa, Zea mays
  Clone ID: MRT4577_28850C.1.pep
FHKAGRDHSFLLFHGYVREKACSPPTSYASSDMCLPGRARDAPLVRGRRRPYFSCCCWRHLIRLNAVARTRDHRPQPAEVYYKLNGEL

SEQ ID NO: 291408 - protein, 80 aa, Zea mays
  Clone ID: MRT4577_28851C.1.pep
RVVMSISTGARSQIITSSLRVVFAYCIVLSGRRAIGAVARWLLGELGEPSPVCYSQWLVSVLGNPSECSARVFDAFSILP

SEQ ID NO: 291409 - protein, 73 aa, Zea mays
  unsure (1)..(73): unsure at all Xaa locations
  Clone ID: MRT4577_28852C.1.pep
VPSPRQLCFFGPXGPLATPVKKRRAWRXRXAPRVLLFXFSXSRSXACCXPXLXXRXLXVGLVPXSCSLAXVXX

SEQ ID NO: 291410 - protein, 113 aa, Zea mays
  unsure (1)..(113): unsure at all Xaa locations
  Clone ID: MRT4577_28853C.1.pep
TRHIHLYVTFLAHSILFKYDTVHGQWKHSDITLKDSKTLLFGQTPVTVYAIRNPEEIPXGEAGADYVQKSTGVFTAXDMATAHLKGGAKNVGISALSKDAPMLVVRVNEDIYT

SEQ ID NO: 291411 - protein, 186 aa, Zea mays
  unsure (1)..(186): unsure at all Xaa locations
  Clone ID: MRT4577_28854C.1.pep
MAMSKPQQGDPAGFLDLVGPDLSACVFARLQDPADLARAATVSRPWRRFVEGNGFLKKVCVRKFPELAVLTAAVEGAQIARXPPPPGPSXRAAXGAEANEHRIYSHLYGALVAASPPVDCILHCVGASSTDNFPDETIDNTLEPQDRVNNRFSYWSSAGQDDPDVPETLTYRVVSDICVVDEIRIQ

SEQ ID NO: 291412 - protein, 156 aa, Zea mays
  unsure (1)..(156): unsure at all Xaa locations
  Clone ID: MRT4577_28855C.1.pep
MMSGWYVEYRCFFVGLCWDTDDHSLHNAFSTYGEVLKAKIILDRETHRSRGFGFVTFSTEEAMRNAIEGMNGKELDGRNITVNEVQTRAGRVGAVGGYGGDRGGGVYCXDGRRDGGGGXGGVGGYGVGDGYCGGGVGYGVGNRDDGYGNSDVNWRS

SEQ ID NO: 291413 - protein, 50 aa, Zea mays
  Clone ID: MRT4577_28856C.1.pep
FFFFFFFLTIKNPPAFAFIFFCFRLSIGGPHGFLWSLKRMNNRSNHVQHI

SEQ ID NO: 291414 - protein, 56 aa, Zea mays
  unsure (1)..(56): unsure at all Xaa locations
  Clone ID: MRT4577_28857C.1.pep
KNHILHLLDFXISPFCQRCRIAMDXKCLSYXYLQQDLTNKSHLLLRPNPVHKKIPL

SEQ ID NO: 291415 - protein, 44 aa, Zea mays
  Clone ID: MRT4577_28859C.1.pep
RGKVPGPSKGEAGESARGFAWERRGFVGVRVGRVHGWPGFSLVP

SEQ ID NO: 291416 - protein, 81 aa, Zea mays
  Clone ID: MRT4577_2885C.1.pep
PFLPKSHPLLKEKLTSKHIHHTHTPLLKHIPILNNSERNDTPSKYATQPYHHMLPSLNLELYTYENTYLLSDDSRRPAKVS

SEQ ID NO: 291417 - protein, 90 aa, Zea mays
  Clone ID: MRT4577_28860C.1.pep
TMIIIWQDNWNTISLLRLTNLQWGGPNGGVAQRVKTNPPTHQTFPKQIEESVKRFNLVHLFCAKILLSKKRGGTVSNQWSHPYFFWEKTL

SEQ ID NO: 291418 - protein, 262 aa, Zea mays
  unsure (1)..(262): unsure at all Xaa locations
  Clone ID: MRT4577_28861C.1.pep
MDTASAPGLQYLLCLAWVAATLPIAAAALPIPRAAGGRFIHGLLCAFSSRGKTGRPSSSSSSKVLRRLYETEHVFHYSPSARMHIIGYLTGIFYYVAAPLSLASSCLPETIQYLRYQIAEFIVKGRAKMPDLAIVPSHLLKPLLKLRWCQWIGAIIFIWGSLHEIHCHAILGSLREHXDPDEYVIPCGDWFSRVSCPHYLAELVIYFXGMLIASGGSDISVWFLYLFVITNLSFAAVQTHKWYLRKFEDYPRSRYAIIPFVC

SEQ ID NO: 291419 - protein, 74 aa, Zea mays
  Clone ID: MRT4577_28862C.1.pep
PSLSLLLFCIQCKGKEVIYFGMLIASGGSDISVWFLYLFVITNLSFAAVQTHKWYLRKFEDYPRSRYAIIPFVC

SEQ ID NO: 291420 - protein, 103 aa, Zea mays
  Clone ID: MRT4577_28863C.1.pep
GSRRGHPPDKEPRLGREQPLEWSRALQVEKDSSCRNRARPGRHRIGMVAAAAAVEQGAAGSERGAASGVRQAWVCNGSWTEPRAARMRRRRRHFLCCSCRSES

SEQ ID NO: 291421 - protein, 359 aa, Zea mays
  Clone ID: MRT4577_28864C.1.pep
MALRGSIQMDTGSGPALQYLLCLAWVAATLPIAAAALPIPTAAGGRFIHGLLCAFSSRGKTVRPSSSSSSKARFTVPQKFFFHFYVVGVVVTTSLLLAIWFYAYMKMTPLIPEQSSYSTIASHLVGGSNSFHLANFWSSRPMEHKYRVWRTVFVLILMEIQVLRRLYETEHVFHYSPSAQMHIIGYLTGIFYYVAAPLSLASSCLPEAIQYLRYQIAEFIVKGRARMPDLSIDPSHLLKPLLKLGWCQWIGAVIFIWGSLHQIRCHAILGSLREHKDSDEYVIPCGDWFSRVSCPHYLAELVIYFGMLVASGGSDIPVWFLYLFVITNLSFAAVQTHKWYLQKFEDYPRSRYAIVPFVC

SEQ ID NO: 291422 - protein, 96 aa, Zea mays
  Clone ID: MRT4577_28865C.1.pep
MPESRDGRSEDLADLSGGVGGGGFFIRRVASPGALAVRGVRKPLARRYISPSRNKENLLPVWALRVTPTKRSPLPGWYPRTPLRDITAIAKCILGW

SEQ ID NO: 291423 - protein, 87 aa, Zea mays
  Clone ID: MRT4577_28866C.1.pep
VVAHSRLLRFFSGESPFPVYKASPTPHRDAWHLLNSLSCTTTRAEPVFFSLAEEPATFDLPNEDCDRRFEWQVSTSSTQIASLQTRL

SEQ ID NO: 291424 - protein, 227 aa, Zea mays
  Clone ID: MRT4577_28867C.1.pep
MPESRDGRSEDLADLSGGVGGGGFFIRRVASPGALAVRGVRKPLARRYISPSRNKENLLPVWALRVTPTKRSPLPGWYPRTPLRDITAIAQAIQRSRSRIAAAQQRSQRIEQSSQSVNVTTPAQAEQDAHIAEASHAVASGSGSTEREAVANPATVLADDNLNVSSLAAEGSLNTPSKPMDPALADKKLSGSIEKVEKLVRKNLKRTSRAAQASRRATQRRNLMSMR

SEQ ID NO: 291425 - protein, 188 aa, Zea mays
  Clone ID: MRT4577_28868C.1.pep
RRRRRIRAALGSVQLPLQTQACLTPEAAPLSDPAAPCSTAAAAASIPIRWRPGLARFLQLLSFSTCSALLHSSGCSLPNLSPEMPESRDGRSEDLADLSGGVGGGGFFIRRVASPGALSVRGVRKPLARRYISPSRNKENLLPVWALRVTPTKRSPLPGWYPRTPLRDITAIAKAIQRSRSRIAAAQQ

SEQ ID NO: 291426 - protein, 58 aa, Zea mays
  Clone ID: MRT4577_28869C.1.pep
SGRSGAALISVTFRVLADSSIQTEICHLDSMSYMGTAVLIAHGEDPSGAGEGERLGED

SEQ ID NO: 291427 - protein, 30 aa, Zea mays
  Clone ID: MRT4577_2886C.1.pep
PQQQVNFQFMEDLALFILQALIDKLNIKYI

SEQ ID NO: 291428 - protein, 192 aa, Zea mays
  unsure (1)..(192): unsure at all Xaa locations
  Clone ID: MRT4577_28870C.1.pep
DCLSSATSVTVGDGKPSLFWESAWLKGMTLRDAYPLFSISRGXNRSIQEALSNNSWIHDLNFHHDDFSSTHLHEYCHLWVEVNRVRLLKNTPDLTQWKLTPSGQYTSRSAYQAQFVGSTLTNFNNIIWRVXAPPKCKFFSWLAVQNRLWQPVDSVHQWWSNLAASAVRDKKGRTLIILVCWRIRCERNSRIF

SEQ ID NO: 291429 - protein, 156 aa, Zea mays
  Clone ID: MRT4577_28871C.1.pep
KAPPLPRICGKRWQKNLPIQHRQAPRVVKPQNQGRSPSLMGTRKPKKSSLKKKRRLFRSPHTQGFLKEWEGPLIGTPPPLFMSPVESSCPPPQCPLWEFLEHGNLRPPLWPVVWGKIKFGSIPNSQLGGSYPFPIAPMKPGGGFNREKCGKKLPVF

SEQ ID NO: 291430 - protein, 65 aa, Zea mays
  unsure (1)..(65): unsure at all Xaa locations
  Clone ID: MRT4577_28872C.1.pep
GILGAXXXXFFFFFFXXXXXXXXKGTTDTHAGLHRIIKVANCARNALNPRGESNVFYYTRDRVPT

SEQ ID NO: 291431 - protein, 77 aa, Zea mays
  Clone ID: MRT4577_28873C.1.pep
LRLGGGKLKNPVLTGGGGPQKGEKPEGPQGGFIRLKPGPFLGPKKLQGLMLKNEGPAGGFVHFKKKTLWEVKNCSKG

SEQ ID NO: 291432 - protein, 36 aa, Zea mays
  Clone ID: MRT4577_28874C.1.pep
LNLLHIPLLGTEGPTFLAYPPGRDGNHSDSAVKRVL

SEQ ID NO: 291433 - protein, 52 aa, Zea mays
  Clone ID: MRT4577_28875C.1.pep
VLSQEESPYLSLLAPSFFCPVSVRFISNSVLLWHHEFLGIKVSATDWHLNRS

SEQ ID NO: 291434 - protein, 105 aa, Zea mays
  Clone ID: MRT4577_28876C.1.pep
PHKKLQQLKGQKTHTKTTYGRTTGKHEKGQTKPNPAGRDSNKETRNTKPHTAENRNTPPSAATSLLTGQQPTAREERQHLSSKAKKHPQPGEPKGKASEPRRPPR

SEQ ID NO: 291435 - protein, 86 aa, Zea mays
  Clone ID: MRT4577_28877C.1.pep
TGDDQTRRQQLDVFFCHTCHETTCGWATATGGPIAWGYCRVMEHNPTVPPYYGLGPIQLTYEYNYRLVGQELYMNLVGNPDLVASE

SEQ ID NO: 291436 - protein, 94 aa, Zea mays
  Clone ID: MRT4577_28878C.1.pep
MARNPGCTVFIGNLDDKVPERVLYEILIQISGQDKPSLNGNIPVTPRLNSVPQPKPHQPMRSSDTPLPQHAAVNGRNAGYGIPPNHSYDTHTQG

SEQ ID NO: 291437 - protein, 94 aa, Zea mays
  Clone ID: MRT4577_28879C.1.pep
ISGQDKPSLNGNIPVTPRLNSVPQPKPHQPMRSSDTPLPQHTAVNGRSAGYGIPPNHSYDTHTQALSSGLPNRGLSNGTYEYSKRVFGSGLNDG

SEQ ID NO: 291438 - protein, 54 aa, Zea mays
  Clone ID: MRT4577_2887C.1.pep
MGSETFVEILLAILLPPVGVFLRYGIGVEFWICLLLTILGYIPGIIYAVYVLVA

SEQ ID NO: 291439 - protein, 190 aa, Zea mays
  Clone ID: MRT4577_28880C.1.pep
MARNPGCTVFIGNLDDKVPERVLYEILIQVGRVVDLHIPRDKETSRPKGYAFAEYETEEIAQYAVKLFSGLVRLHNKTLRFAISGQDKPSLNGNIPVTPRLNSVPQPKPHQPMRSSDTPLPQHTAVNGRSAGYGIPPNHSYDTHTQALSSGLPNRGLSNGTYEYSRRVFGSVLNDVSRRATREPIPYPSY

SEQ ID NO: 291440 - protein, 59 aa, Zea mays
  Clone ID: MRT4577_28881C.1.pep
AMGGFIPRAGRAFWYPLKKEVLEASTVGVNAGLKKGPFLLYLGGTPNYPHSLNEVVVFA

SEQ ID NO: 291441 - protein, 48 aa, Zea mays
  Clone ID: MRT4577_28882C.1.pep
VYLLENKTIVFLLCNSSYNRCENILDSNMIIQKSMDAFQMLDIATIIK

SEQ ID NO: 291442 - protein, 189 aa, Zea mays
  Clone ID: MRT4577_28883C.1.pep
MARNPGCTVFIGNLDDKVPERVLYEILIQVGRVVDLHIPRDKETSRPKGYAFAEYETEEIAQYAVKLFSGLVRLHNKTLRFAISGQDKPSLNGNIPVTPRLNSVPQPKPHQPMRSSDTPLPQHTAVNGRSAGYGIPPNHSYDTHTQALSSGLPNRGLSNAQAFVIRPIGSQGDQVIPFLLPTCCLVFAS

SEQ ID NO: 291443 - protein, 176 aa, Zea mays
  Clone ID: MRT4577_28884C.1.pep
MARNPGCTVFIGNLDDKVPERVLYEILIQVGRVVDLHIPRDKETSRPKGYAFAEYETEEIAQYAVKLFSGLVRLHNKTLRFAISGQDKPSLNGNIPVTPRLNSVPQPKPHQPMRSSDTPLPQHAAVNGRNAGYGIPPNHSYDTHTQAQAFVIRPIGSQGDQVIPFLLPGCCPVFAS

SEQ ID NO: 291444 - protein, 162 aa, Zea mays
  Clone ID: MRT4577_28885C.1.pep
VGRVVDLHIPRDKETSRPKGYAFAEYETEEIAQYAIKLFSGLVRLRNKTLRFAISGQDKPSLNGNIPVIPSLNSVPQPKPPHQHMRSSDTPLPQHTAVSGRSAGYGISQNHSYDTHTQAPSSGLPSRGLSNGTYEYSRRVFGSVLNDVSRRATREPIPYPSC

SEQ ID NO: 291445 - protein, 75 aa, Zea mays
  unsure (1)..(75): unsure at all Xaa locations
  Clone ID: MRT4577_28886C.1.pep
GPSRPAGEILLXVGRVVDLHIPRDKETSRPKGYAFAEYETEEIAQYAVKLFSGLVRLHNKTLRFAVRFFLLPHFT

SEQ ID NO: 291446 - protein, 102 aa, Zea mays
  Clone ID: MRT4577_28887C.1.pep
MASKRSGGERPLILLSSSERMAQTMLLTSGVTAGHFLRNKSPLAQPKVHHLFLSGNSPVALPSRRQSFVPLALFKPKTKAAPKKVEKPKSKVEDGIFGTSGG

SEQ ID NO: 291447 - protein, 190 aa, Zea mays
  Clone ID: MRT4577_28888C.1.pep
MARNPGCTVFIGNLDDKVPERVLYEILIQVGRVVDLHIPRDKETSRPKGYAFAEYETEEIAQYAVKLFSGLVRLHNKTLRFAISGQDKPSLNGNIPVTPRLNSVPQPKPHQPMRSSDTPLPQHAAVNGRNAGYGIPPNHSYDTHTQALSSGLPNRGLSNGTYEYSRRVFGSVLNDVSRRATREPIPYPSY

SEQ ID NO: 291448 - protein, 53 aa, Zea mays
  Clone ID: MRT4577_28889C.1.pep
MAEEDRQRRWRRRRFANLRSVRWRIDLGILPASPGASVDELRRAAADSRRRGA

SEQ ID NO: 291449 - protein, 41 aa, Zea mays
  Clone ID: MRT4577_2888C.1.pep
SNCLLAIYCVPALQVEFWICLLLTILGYIPGIIYAVYVLVA

SEQ ID NO: 291450 - protein, 77 aa, Zea mays
  unsure (1)..(77): unsure at all Xaa locations
  Clone ID: MRT4577_28890C.1.pep
LFLRVFXRFPLGTKSITPDLSNLPFTYPSPSIHSKYTTHDPLTTSSPTAIPPHPPIPFAYTSRFHTHQIFTSTDPYS

SEQ ID NO: 291451 - protein, 191 aa, Zea mays
  Clone ID: MRT4577_28891C.1.pep
MARNPGCTVFIGNLDDKVPERVLYEILIQVGRVVDLHIPRDKETSRPKGYAFAEYETEEIAQYAIKLFSGLVRLHNKTLRFAISGQDKPSLNGNIPVTPSLNSVPQPKPPHQHMRSSDIPLPQHTAMSGRSAGYGISQNHSYDTYTQAPSSGLPSRGLSNGTYEYSRRVFGSVLNDVSRRATREPIPYPSC

SEQ ID NO: 291452 - protein, 101 aa, Zea mays
  Clone ID: MRT4577_28892C.1.pep
ISHGALGVPFPVKKNFWFRFKGGGKTLKLGLGFKKIKPFFQGKVPVFAPPVWGAGLGSLFFSLWEFFFFPPPLNPGFFPKPPPKPPNIPGEKTPGPPRIFP

SEQ ID NO: 291453 - protein, 48 aa, Zea mays
  Clone ID: MRT4577_28893C.1.pep
MHDVILTSYVRDGIKLAKLYKISGICLANDLDIKTLHECIALTLVVVK

SEQ ID NO: 291454 - protein, 145 aa, Zea mays
  unsure (1)..(145): unsure at all Xaa locations
  Clone ID: MRT4577_28894C.1.pep
RFEFEAAAAELQYLYYHAVAVASVDLNAHRGLNLAGQCRTQALADGADPQHAYYTEDLTTYTARMSYTTPNSGVIYTVTNRVLNIXSTYYNXRVQPTXVTRELRHRLSSNWNTISFATHHAFNALTTMKARFIDHXLDSALIQHE

SEQ ID NO: 291455 - protein, 311 aa, Zea mays
  Clone ID: MRT4577_28895C.1.pep
MASPSVAVADRCVGAPTDGGVVGTAGWGRRAGDGGELETATAHSIRSHGTVTEQDPWCSAPDAGDLRAMIRVAEHEEETVVEEEVVSRAENPPAKNNFYFDICGVDPEPPATQCKPRGTTHTKTTQQKATGPRGVPWHLLAPRHEGSSSGSNDPIRDLEVRVERLASELRHGNRERARDSYHISELSAEVDRLQQEIVERDRAIDRAVNSRSIAWDCEANARALVVELSIALENLQAYNNTLHEEVYVLYDHLHPSVPSEVAAMGGGASRAAVGGPFGELDLFGAPPSMNLADDRSPEVDSGAGAAKDEDY

SEQ ID NO: 291456 - protein, 85 aa, Zea mays
  Clone ID: MRT4577_28896C.1.pep
GNQVHIIKQHTIINIFLIYRFTIILSQTRICFFQPSVISPTEGGAYTKRDIFHTCNDTVHVLACSSIHTHCLPTTGYFGIFKPCM

SEQ ID NO: 291457 - protein, 65 aa, Zea mays
  unsure (1)..(65): unsure at all Xaa locations
  Clone ID: MRT4577_28897C.1.pep
THTSXPPSPLFHTFXLVSLXXVALSVVRTTHTSXXXXRXGLXPPXLSSPLLAALLSLNPNHQWPK

SEQ ID NO: 291458 - protein, 68 aa, Zea mays
  Clone ID: MRT4577_28898C.1.pep
GNSKFKISVQKSTKKGLNSVIILGAWCIWLHRNRVVFDGDSPSLGRLQRSFLDESVCWVMDLWLMLGA

SEQ ID NO: 291459 - protein, 87 aa, Zea mays
  unsure (1)..(87): unsure at all Xaa locations
  Clone ID: MRT4577_28899C.1.pep
DQIKSNILIYHIVKTPISRYXSFPSCQPFHPLQMSPIXCFYLSLNYTNHKYLSSIKRSLLSFNLFSHSIFQHYITLSLNIHKILQSI

SEQ ID NO: 291460 - protein, 122 aa, Zea mays
  Clone ID: MRT4577_2889C.1.pep
MSSNISRVGFTKEVIQLGHFVEGLGYDSYCTLFCGGALTPLECIPDTHEIAILQEIMGIFDVPILEHKLTCLDKEKEKANHLQRSTTNMQSMVGSTNDTTSYCAPHMYDTLSSIEARPKQNP

SEQ ID NO: 291461 - protein, 212 aa, Zea mays
  unsure (1)..(212): unsure at all Xaa locations
  Clone ID: MRT4577_288C.1.pep
MRECISIHIGQAGIQVGNACWELYCLEHGIQADGQMPGDKTXGGGDDAFNTFFSETGAGKHVPRAVFVDLEPTVIDEVRTGTYRQVFHPEQLIRGKEDAANNFARGHYTIGKEIVDLCLDRIRKLADNCAGLQGFLVFNAVGGGTGSGLGSLLLERLCVDYGKKAKLGFTVYPSPQVSTSVGEPYNSVLCTHSXLEHTDGAILLGHEGIYDI

SEQ ID NO: 291462 - protein, 94 aa, Zea mays
  Clone ID: MRT4577_28900C.1.pep
LYERAFGDEEKRERFLKWRIQLLERGIREQLDFSPSGICSMVQVTDLKNSPPMLGKHRAVTRQALALLQDNYPEFVAKKVLYNFSLQSKILHFH

SEQ ID NO: 291463 - protein, 58 aa, Zea mays
  Clone ID: MRT4577_28901C.1.pep
KKKKKKKKKKKKKKKKKKKKKKKKKKKKKKKKKKGGPFLRNQGYLPLHSNIKFFFWGP

SEQ ID NO: 291464 - protein, 67 aa, Zea mays
  Clone ID: MRT4577_28902C.1.pep
PAQATVVLGVAPEKKAAPEFVEPPGESGEPAPPWGWGSSCKCAPCNCCSHRSAPRDMIIIYLAWGGG

SEQ ID NO: 291465 - protein, 131 aa, Zea mays
  unsure (1)..(131): unsure at all Xaa locations
  Clone ID: MRT4577_28903C.1.pep
RMYGHTFEAFKLTVADRDAILDALTYEEKEGGPDGQEVTKVAPAVTPEGKDCLDKNIRRRMTPQTVKNRADIEMKCFQCDGWLHIKHAMKDAEAAGSDNCAVTIKLXATPLYVMTTQTLDKDQGISDLTTA

SEQ ID NO: 291466 - protein, 99 aa, Zea mays
  unsure (1)..(99): unsure at all Xaa locations
  Clone ID: MRT4577_28904C.1.pep
KNAEKKVTXAXFKKAKEKVMHKKKPGVPDGLNXKPGRIPMPNSYPIVCVLAHLFIMGDMLPQYLLHTVLSGQENLVLINYPFIVSKKKKKKKTRGPLAX

SEQ ID NO: 291467 - protein, 80 aa, Zea mays
  Clone ID: MRT4577_28905C.1.pep
HLLSHVKQDVQNMKSKLIILESKLEQDENMKIRLREESKKHTQDMHELQQKMVFLRNKGTARSQMGFPLLFVVNVALIGT

SEQ ID NO: 291468 - protein, 196 aa, Zea mays
  unsure (1)..(196): unsure at all Xaa locations
  Clone ID: MRT4577_28906C.1.pep
MPVDVEAAMAPPQAASACSSSSIGRDSDECSPPGKEEEGEGEVQSAYEGGGGGSLAGLEALEEALPIRXSAKDITKSENAYSRKRKNLFAYXHVWXSHEPRAAQVYETAAPKRHASLSRNSLVTLASSSSRSSSSISIEEHELPEHLDSPRSPDGFISAPRSGSCVPDASVPRSLSMMDLHRLNRSSSSVRLKDGK

SEQ ID NO: 291469 - protein, 220 aa, Zea mays
  unsure (1)..(220): unsure at all Xaa locations
  Clone ID: MRT4577_28907C.1.pep
MPVDVEAAMAPPQAASACSSSSIGRDSDECSPPGKEEEGEGEVQSAYEGGGGGSLAGLEALEEALPIRRSISKFYNGKSKSFVCLKEAITFSGSAKDITKSENAYSRKRKNLFAYXHVWXSHEPRAAQVYETAAPKRHASLSRNSLVTLASSSSRSSSSISIEEHELPEHLDSPRSPDGFISAPRSGSCVPDASVPRSLSMMDLHRLNRSSSSVRLKDGK

SEQ ID NO: 291470 - protein, 81 aa, Zea mays
  Clone ID: MRT4577_28908C.1.pep
MIAANFRKCAFPLCDCSLYFLNTMLKSVVWNENQSNMCSVQCNLALFLMALKISISVSGVCNCNKVYTCIYTLLSDVSVVD

SEQ ID NO: 291471 - protein, 45 aa, Zea mays
  Clone ID: MRT4577_28909C.1.pep
IVGLISQFSFKTMSLLQMSHMQDEKHKLHQILICQTQTRPAITLK

SEQ ID NO: 291472 - protein, 87 aa, Zea mays
  unsure (1)..(87): unsure at all Xaa locations
  Clone ID: MRT4577_2890C.1.pep
MLLPAAIFPQSYQPPYHTFLSXYLLPALTLKCENPILQPYTIQHSMASRILPLSPMILQQSSGLLQPIHLVHLLAQNIMAQQLVLAN

SEQ ID NO: 291473 - protein, 68 aa, Zea mays
  unsure (1)..(68): unsure at all Xaa locations
  Clone ID: MRT4577_28910C.1.pep
DYLPYAALLVLRIYQDLSNAMAASEITDKLGXRSLRQRHWYMRSASATAGEGLDEGLHWLSSNIASKG

SEQ ID NO: 291474 - protein, 41 aa, Zea mays
  Clone ID: MRT4577_28911C.1.pep
SNYEVMPSLTISGEGLVTCYASRLLPDDRVKVQVDAWPDVW

SEQ ID NO: 291475 - protein, 73 aa, Zea mays
  Clone ID: MRT4577_28912C.1.pep
PTRPQELVKFQKKQPFCVTIVLFSSMIKSFAMVSLGCFHSVAYHCIGLYGTVTICYPMLNILLGAFDLIMNGN

SEQ ID NO: 291476 - protein, 96 aa, Zea mays
  Clone ID: MRT4577_28913C.1.pep
LCVRLFCSSPLTPALPFRTRWLCVSLLLPFALVQTKKRQRLAFSRPEGKKKDFLHFYGKYQHGLFFLQGGGDRFLKPTLSGMRGGSTRYLLLAFVP

SEQ ID NO: 291477 - protein, 238 aa, Zea mays
  unsure (1)..(238): unsure at all Xaa locations
  Clone ID: MRT4577_28914C.1.pep
MAVAVLLRQRALSSPHAVSCRNAVYTSGLFSNSDLHSKVNSTSLRFWRTYHNSGKFDLTDLTHPHMWYPKAREKKRNVFLHVGPTNSGKTYSALKRLEASSSGVYCGPLRLLAREVAQRLNKVNVPCNLITGQERNEIEGAKHSSVTVEMADMTTNYQCAVIDEIQMVGCKSRGYSFTRALLGLCSDELHVCGDPAAVPLIQRILXEXTGDVVTXQYYERLSSLXSLKSPLXSFSNIK

SEQ ID NO: 291478 - protein, 54 aa, Zea mays
  Clone ID: MRT4577_28916C.1.pep
RVCQCFISEASSKGDTSMIDRHPDLSYTVCFFGPTSFEVFVFYGPHNMRSGLDS

SEQ ID NO: 291479 - protein, 96 aa, Zea mays
  Clone ID: MRT4577_28917C.1.pep
HYCLFVQPASGCGQTLMPWHGHIQRKTMANQGHNNPAEHTQTNNGQTATPAMQTEIWETDTPNRTWTARTSRTRSKAIMPTSWTSVCMKGTRLATM

SEQ ID NO: 291480 - protein, 207 aa, Zea mays
  Clone ID: MRT4577_28918C.1.pep
MGAAGKPPPLVCFKWPWGPNPIPSASSSPSPCGDLELPWLFKSIRTLAQGLLIAGDIPSPASSPSGGVRGVQRRTGAAVVEVDRGDAEQRALAASLASGRPATVLEFYSPRCRLCASLQGLVRELQDGASGSASFVLADAEDDRWLPELLHYDIRYVPCFVLLDKHGRALAKTGVPTSRQHVVAGLHHLLRMQQPSGLEGNQNAPPS

SEQ ID NO: 291481 - protein, 72 aa, Zea mays
  Clone ID: MRT4577_28919C.1.pep
QRKWHLGISYKNPVAWYMNGRLQLVRYLLLNFGREFGLFYVCAVLVSTPDPVVLVCGPADLYAMALRHTRWY

SEQ ID NO: 291482 - protein, 41 aa, Zea mays; identical to SEQ ID NO: 291449
  Clone ID: MRT4577_2891C.1.pep

SEQ ID NO: 291483 - protein, 168 aa, Zea mays
  Clone ID: MRT4577_28920C.1.pep
NTNTSKLVGPKKQTVYERSGCRSIIDVSPSDDASEMKHWRTRMAAAMHSLPSLQDPSISLGKAGRWRFFQVDQSDPTTIRRGRARGKVGGRCLCHRQDQRSEEANSDFGIFRRAAGAGAGDARQQASAHRAPPSRVREKKTGPRKREGRGGRGCSERWRGDIVAANDP

SEQ ID NO: 291484 - protein, 144 aa, Zea mays
  unsure (1)..(144): unsure at all Xaa locations
  Clone ID: MRT4577_28921C.1.pep
LMELLKKGXPIQLPPVADRTFHLLKQKLVQAPVLGLPNDFSKGFVLETAVFMQSKNLVAYLNKHLCPRNQASSXECLAIFMAIIDEWRPYLQHRQIVIVLHLTEQRVTLRLXHKVLLKLIDLHYQIRTNRQRLYRATDLAHIYI

SEQ ID NO: 291485 - protein, 111 aa, Zea mays
  unsure (1)..(111): unsure at all Xaa locations
  Clone ID: MRT4577_28922C.1.pep
LMELLKKGTQFNXXXXADRTFHLLKQKLVQAPVLGLPNDFSKGFVLETAVFMQSKNLVAYLNKHLCPRNQASSXECLAIFMAIIDEWRPYLQHRQIVIVLHLTEQRVTLRL

SEQ ID NO: 291486 - protein, 166 aa, Zea mays
  unsure (1)..(166): unsure at all Xaa locations
  Clone ID: MRT4577_28923C.1.pep
LMELLKKGXPIQLPPVADRTFHLLKQKLVQAPVLGLPNDFSKGFVLETAVFMQSKNLVAYLNKHLCPRNQASSXECLAIFMAIIDEWRPYLQHRQIVIVLHLTEQRVTLRLXHKVLLKLIDLHYQIRTNRQRLYRATDLAHIYISRDSGRGELDNRQRIVIESSEY

SEQ ID NO: 291487 - protein, 158 aa, Zea mays
  Clone ID: MRT4577_28924C.1.pep
LTLSTYVSPLPCPSRVSVSSPRPCIYLCCCPVVLAVECAYWANPPAKQPWSRSRRAYVCAAITRGVPQGKMDAVNARHWLLLLARRPSPPLVLVRSSPVVHVHVHCSSLRVDGRGSGGWTWTDEDGPIDARAVVHDRWPGLGWIDACRVSILMDSYKT

SEQ ID NO: 291488 - protein, 82 aa, Zea mays
  Clone ID: MRT4577_28925C.1.pep
NKNNGLDPASVLSARACSHMFCGSACSSSKYRVPSESYHRHDRVPSQHRLIKFFSRSVSLYQSNKAKEQDLYGGIVWSAQTL

SEQ ID NO: 291489 - protein, 85 aa, Zea mays
  Clone ID: MRT4577_28926C.1.pep
AAMVHKAAPAQKRMPYPSLEVDNAVKVGARMKNTRSIRTCGTLDRPTTSEEGYRTPSTHQLGTTRREHAWSASSLKGLPYHTISE

SEQ ID NO: 291490 - protein, 74 aa, Zea mays
  Clone ID: MRT4577_28927C.1.pep
VLDRERSPFFFFFFFFFFLFCFFFGGAGKLARYNKKPTITFREIQTSVRLVLPGELVKHAVFEGTKAVTKFTFF

SEQ ID NO: 291491 - protein, 87 aa, Zea mays
  Clone ID: MRT4577_28928C.1.pep
SDISAPTPGEYTSTPPASHHWALATRDRVRLLRYVLAHTVHAALRLPKDQSLGVHLRPGAKLILDAQPPVAYSLEFGIFLWGNKDLF

SEQ ID NO: 291492 - protein, 235 aa, Zea mays
  Clone ID: MRT4577_28929C.1.pep
MRADEKPHAVCVPYPAQGHATPMMKLAKVLHSRGFHVTFVYTEHNHRRLVRSRGPGAVAGLPDFRFATIPDGLPPSDPDATQDQASICHSTTTTCLPHLKSLLGDLDNNRATGTPPVTCVVADSIMSFAVDAAAELGVPCALFWTASACGYMGYYNFRFLLDHGLTPLKGEEQLTNGYLGTPVTNALGMTRQMRLRDFPSFIRTTDRDDILLNFMIHELERASRAAAVIVNTFDE

SEQ ID NO: 291493 - protein, 114 aa, Zea mays
  Clone ID: MRT4577_2892C.1.pep
MGNAGSAPDQPKNSADGAGAADAESRRGPPSTVRFFPDAERHKARQPPPIKLEEEEGVPPPPATEEEMAPRNLWQVYALGAFIVLRWAWAKRKENQDRKDSPDAGDGNAPDRST

SEQ ID NO: 291494 - protein, 57 aa, Zea mays
  unsure (1)..(57): unsure at all Xaa locations
  Clone ID: MRT4577_28930C.1.pep
VLDPLYRNIEPMDEPTALHVCILLLDIPLALQDAXKAVDIVQYLERSFGVANTMNPN

SEQ ID NO: 291495 - protein, 167 aa, Zea mays
  Clone ID: MRT4577_28931C.1.pep
TVVATGVSSGLGFEAIKQLLSQQAQPCKVFLGARNTQSTIAAYDALAYDRSGHAVTVLPLELSDLQTVKTFSQQVLDKIGGEKIDYLLLNAAISEGAETPGPYGWRWCQSLVVNHFSQHYLTHLLKDKLVESKSRIVVVSSGAIRRITDPSILDEMLKGGSGAEYMN

SEQ ID NO: 291496 - protein, 214 aa, Zea mays
  unsure (1)..(214): unsure at all Xaa locations
  Clone ID: MRT4577_28932C.1.pep
AWRRVLACCGQMTAMLCGQAEIELYIESLANASSRSNPRISPNCNQNSWALGCQPGWACMVSGTEPSDGPSAELVPQRAESCRPCCPGFFCPRGLTCMMXWLFLLTCFKFTINCFPACPLGAYCPLGTLNDTTGLCDPYFYQITPGKSTACGAADSGADIATTNDIFCPPGHYCPSTTQKYNCSSGHYCRKGSTDEKKCFWKNTCQDNAIKENL

SEQ ID NO: 291497 - protein, 65 aa, Zea mays
  Clone ID: MRT4577_28933C.1.pep
AINIEIGTRTTISRTKPLFVRTLTMKSIPVIIYNKNTPAAKSSKSDKHKEVHPGLRTVETNLIYK

SEQ ID NO: 291498 - protein, 537 aa, Zea mays
  Clone ID: MRT4577_28934C.1.pep
MAARQPPPSSASAPAPAAGLSMKDYLKRYVSGPGTDGDQKRAKKKTKKKPKPAGGVLIVDEDPVWQKPVQVDEEPASSGDDKPLVDEDIEVKRMRRLEAIRAARPYNAIAEDGSGWVTVAAPEEQGGGSTHQRRNDTPLPERGRAPTREDLSPVRRRQRRDTPSPVHGDAAAKDFSPPMRRQRRDTPSPVHGDAAAKDFSPPRRRQRRNTPSPVHGDAAAKDFSPPRRRQRRDTPSPVPDGAAAKDFSPPRRRQRRQDTPSPKDSGAADQDDMSPPRKSRQREDLSPPRKGARHITEEPRDISPRKKRDISPSRKSTKEGASKQVRKSGLMTAEEVKEDIRKIKEAEMIKFASQDPSLVGKGAKAVFRDKEGRRISEEEMRKAKEPEKPKEIHIEWGKGLVQKREAESRLKEIEAEKSKPFARTRDDPELDNMLKERIRWGDPMAHLVKRKDPEFILEDLGDDEKMKESGFIVPQSIPTHSWLKRGVDAPPNRYGIKPGRHWDGVDRSNGFEKDMFKLKNEKQAMEQEAYLWSVSDM

SEQ ID NO: 291499 - protein, 117 aa, Zea mays
  Clone ID: MRT4577_28935C.1.pep
MAARQPPTSSASAPAPAAGLSMKDYLKRYMSGPGTDGDQKRAKKKTKKPKPAGGVLIVDEDPVWQKPVQVDEEPASSGDDKPLVDEDIEVKRMRRLEAIRAARPYNAIAEDGSGWVT

SEQ ID NO: 291500 - protein, 81 aa, Zea mays
  Clone ID: MRT4577_28936C.1.pep
MRLVGLVSLVAVIFLLSFRSLLHPQVLAGDGSAVTVTSRRRDRSQQHAEQWAEERKRMRWFMTRDYASARRHTPRNNRLDP

SEQ ID NO: 291501 - protein, 71 aa, Zea mays
  unsure (1)..(71): unsure at all Xaa locations
  Clone ID: MRT4577_28937C.1.pep
PPTQKTNLXQSPYXPTPLSLTIQFPLYILIHTSTPFPSISHISTINXLLHXLSFSTNKPISNFTHILFITF

SEQ ID NO: 291502 - protein, 265 aa, Zea mays
  Clone ID: MRT4577_28938C.1.pep
MGISHPLSDEYDALRGAVLSPDTTPPSSPLAHRHLLEHEVTRMDTLAGIAIKYGVEISDIKRANSLVTDSQMFAHKSLLIPLPGMPMPSLNACGQRTIRTCAPNHRQKRDAPKSRQQGASSAMNTLQRYYGLTPPQKGGNTMDSSTELSVYHKGGGFQSNLSETLLNPSAAPGTDSSWNFEALGFSATEGDGGAPKPEQDGSMRRRQKVEAESNAQGDFLVKAIKSLLISSVRLDTYAGSPGSSQKSGFRSMTVRKSPSAPSALD

SEQ ID NO: 291503 - protein, 177 aa, Zea mays
  unsure (1)..(177): unsure at all Xaa locations
  Clone ID: MRT4577_28939C.1.pep
ELYKPINCANTRAADRYALLPSQSPSHATARRSSRETLKHVCIQFSFSPTRFWLVLRADAGLGRPSSNGRVKESCLNVHLELDHIETPLSASAKLGALGDFLTVTDLKPLFWLEPXLPAYVSRRTLEINRLLIAFTRKSPWALDSASTFCRRRIEPSCSGFGAPPSASVAEKPGASK

SEQ ID NO: 291504 - protein, 69 aa, Zea mays
  Clone ID: MRT4577_2893C.1.pep
HHVQSRTSTSFGVSLTNNSQGGWDHSTMACSEHEGSQGSPDHTISPLKFHCHPKFIFMTGSGTHRLWPT

SEQ ID NO: 291505 - protein, 211 aa, Zea mays
  unsure (1)..(211): unsure at all Xaa locations
  Clone ID: MRT4577_28940C.1.pep
MAAVRSNRAHAHQHCRSEASCPTTSVAVAAARAGDAPRHRSQAPVQVSKGHHQMRRSAAFPPRRPGPGRRPPQRCDSDLNIRQHRTCSEVAGGTAAGCAAVCCCFPCVMVEVVVLATVRAPAALCRKAARVSKGGRRRSASVGQATEIYELPVDNAGVVVXRWTPAPSRRWRCRXPALQLEETGELEKEVWARFYGTGFWRSVSQLDDDDR

SEQ ID NO: 291506 - protein, 99 aa, Zea mays
  Clone ID: MRT4577_28941C.1.pep
GSDVVEAPAALSYVVKRSYGRRACSVREERGGAVVAEVQRKEAVGDDVFRLVVAGSRLGAPLSMALVIALDDMFRGGAGGGGWSTTRSLLRRKNSSMAI

SEQ ID NO: 291507 - protein, 38 aa, Zea mays
  Clone ID: MRT4577_28942C.1.pep
RKRRHILMLRIWKRNWSQQKVFPIVILWNYGSRRILPH

SEQ ID NO: 291508 - protein, 107 aa, Zea mays
  unsure (1)..(107): unsure at all Xaa locations
  Clone ID: MRT4577_28943C.1.pep
YATKSNQHGLXKTPGGKLVYQTTKKRASGPKCPVTGKRIQGIPXLRPAEYKRSRFLRTARPVTRAXSGLIRGTVRERIIRAFLVEEQKIVKKVLKIQKAKEKQASKS

SEQ ID NO: 291509 - protein, 57 aa, Zea mays
  Clone ID: MRT4577_28944C.1.pep
MAGGVVVSSGGGKDYPGKLTMFVLFACIVAATGGLIFGYDIGISGTAPSTVPAPLSI

SEQ ID NO: 291510 - protein, 58 aa, Zea mays
  Clone ID: MRT4577_28945C.1.pep
FLQGGLGHPGNIMSVGLISCYLVFLWSITCCKDFLLFEALVDFLLPSICSSLLRLYHC

SEQ ID NO: 291511 - protein, 41 aa, Zea mays
  Clone ID: MRT4577_28946C.1.pep
AGTQEKYNTTHVNLGSNGTTRTLLFGTSCISKVTLQNRVNY

SEQ ID NO: 291512 - protein, 51 aa, Zea mays
  Clone ID: MRT4577_28947C.1.pep
APPRLRYSDLAKLARSWASQRLYASICKNTGDNQDMVMEAQIHVSNKKKNT

SEQ ID NO: 291513 - protein, 91 aa, Zea mays
  Clone ID: MRT4577_28948C.1.pep
MPLSASPATPRAWGSGVHPTVARCHCRIRLNKLPYQTGSAPVLPATEDGPAVCTAVIDDCFQVSKDDLDRAADRPVEELICDARLRRSASL

SEQ ID NO: 291514 - protein, 36 aa, Zea mays
  Clone ID: MRT4577_28949C.1.pep
GQDRLGGQHRPSSGRSHPAVLYDRPLAESCRLEKLD

SEQ ID NO: 291515 - protein, 56 aa, Zea mays
  Clone ID: MRT4577_2894C.1.pep
LVPHLMASDFYLRLSRGGNTYNLSVPIYFFTNQTLQILGLVTADTDKLCWIIADLV

SEQ ID NO: 291516 - protein, 213 aa, Zea mays
  Clone ID: MRT4577_28950C.1.pep
MSPLVLLLLAHLLATATAAGAAPTRDDGPPAPSSSSPRVPATTPPWPDQFHAVVVTNLSARGGGLQLIDLYYDWPRGRDLNIVRDQLSGERRWSWNVEWSNGTAFLFDSASCRTFQFAVGLLPPDWKARGAAYLGRDRVDGFDCHVWSNFVFARYYEDVATGRPVSWNFNGLQRHVLSFEAGAVLQDSSKWQAPAYCFTNTNGSSANAAASSS

SEQ ID NO: 291517 - protein, 94 aa, Zea mays
  Clone ID: MRT4577_28951C.1.pep
LSPLSTIPSLLQNQVSRRASVRSEQSPETTSSERDMAKAEPMRQPNLSALPRAAPRRPPKRMVILVADRPGAGCRLARPSSQRRWCGVTRGRPD

SEQ ID NO: 291518 - protein, 149 aa, Zea mays
  Clone ID: MRT4577_28952C.1.pep
MQHCPPRTDGPTDHSAADSRAGVGVGGGGGGGGGHQAMGVVRAERKARSAVDRCRCLQEGRAARLVSSILCSPIPYSQADSGKARLSRSCAILVKAQERDVPGTAKPIRFRLVPHCRLPFITLAGPGLLFGVRAPFKMFGELHDAYATS

SEQ ID NO: 291519 - protein, 57 aa, Zea mays
  Clone ID: MRT4577_28953C.1.pep
VDRCSGRRCLPGRAEVQCVHQDGVTDGPALHRRRRLRPHLLQVTALRVYPLTEQLFL

SEQ ID NO: 291520 - protein, 72 aa, Zea mays
  Clone ID: MRT4577_28954C.1.pep
ASLSSRSCPTGLPSGASSGNISARTLVSTPRAESAERPRRVSCWLKVPRGPYSRHNSMAIGSAVFHWGVGVA

SEQ ID NO: 291521 - protein, 69 aa, Zea mays
  Clone ID: MRT4577_28955C.1.pep
CPSARTPSASPLAWRRSSLASEPTCIRHTLFVSHLILTLASLILGLWQSANLLIHTTRLPSIIPFKIYT

SEQ ID NO: 291522 - protein, 166 aa, Zea mays
  unsure (1)..(166): unsure at all Xaa locations
  Clone ID: MRT4577_28956C.1.pep
MTGIAMSESEEHHFXRTSTHGASNTYPQQDGTVRKNGFIDIKNRPCKVVXILPPRLERIGHAASHFADIDIFKGKKVEDIVPSSHNCDIPHGKRSEYHLIDICEXDGFVSLLTSYGNTKDDLTLPTDETLVGQIKEGCESGKDLVVTDHAETGDDQICAVDDDGPA

SEQ ID NO: 291523 - protein, 232 aa, Zea mays
  Clone ID: MRT4577_28957C.1.pep
PMPLAFPAPICGASDLPHRDSSHRSIDAASPNPSSQSTDRRRLQRAPPHPSLQGGHQAAPWHAFLWGTSPLRRSAPSSLPWLWCRRTPPRRFSSARGVGSIERDAIDDAAIDGGARHEDRDGGRERRQRCHGRRSHGGRVLCAKHASVPVMAAVAKEPVEVLVSDKRRWEHGGMDDFDHEFDRYLALLAPPHLLSPRPTSLSIPFVFTTFDSPRSVSEAVVRIEAMKECFRS

SEQ ID NO: 291524 - protein, 39 aa, Zea mays
  Clone ID: MRT4577_28958C.1.pep
IILSHSKEDREPPIENGCLPRTPTCSCYALLVHTIFTQH

SEQ ID NO: 291525 - protein, 116 aa, Zea mays
  Clone ID: MRT4577_28959C.1.pep
LSLSGLAGPTDQFLLLCRRDLRAHGADLRVNRGPVASLGTPLQTLSQAINKAHTTDVILPKFRESLAPRGGWGNCVRHRRRRSTSGLRMVFIAWDRGLVSGKGRAPMDALSSKARS

SEQ ID NO: 291526 - protein, 1594 aa, Zea mays
  unsure (1)..(1594): unsure at all Xaa locations
  Clone ID: MRT4577_2895C.1.pep
MDPKGKGMVVNDKEESLFNEPRDDKPIDSGLSHRTRDGKKKRCIKKIIYCDSDASSSSPRDDDDDSSSKKKTVNQNYSFDYSRIPYNSNAHLLSIPLGKPPHFDGEDYSFWIHQMCSHLFSLHPSIWEIVENGMHFDSTDNPVFINEQIHKNAQATTVLLASLCRDEYNKVSGLDNAKQIWDTLKISHEGNDATMITKMELVEGELWRFAMIRGEEPTQTYNRLKTLVNKIRSYGSTRWTDHDVVRLMLRSFTIIDPHLVNLIRENPRYTKMMSEEILGKFVSGRMMVKEARYVDDALNGPLLIYEPQLVALKGTSSKETLPSKVAQVEAAGLNEDEMALIIKRFKTALKGRKEYPNKNKTRGKRSCFKCDKTGHFIAQCPDNKNDLAQERHGKKEKKKNYRKAKGEAHLGKEWDSDCSSSDSDDEGLAASAFDKSSLFPNERHTCLMAKEKKVHIQDTPKYTSSSDEESSDDEVDYSDLFMGLDQAKVEKINELIDALNEKDRLVEKQEDILHEEHDKFVSVQKSLALEIKRNEMLSSELSVHHESVSSLKKLNDKLTANLEEVNKTSSCVEHVIICNRCKDFDVNACDEHLASITKLNNEVASLNAQLKTCKVDFDKVKFARDAYIVGRHPSIKDGLGFQKKTKNLTSQRTPILNKEKGKTPMASSPQRNHAFIYDRKIASHSHRSYDHVAYYDSNAMLASSSTHDYGRNRPRTMCNKPSTIYHTCNTSFVLTCKNTKVVARKLGSKCKGDKTCIWVPKVIFTNLVGPNKSWVYATGGSSWIIDSGCTNHMTGEKKMFTSYVKNKDSQDTIIFGDENQGKVKGLGKIAITSEHSISNVFLVESLGYNLLSDKLETQGTLKRFLRRAQNEFELKVKKIRSDNGSEFKNLQVEEYLEEEGIKHEFSAPYTPQQNAVNTACHAINRLYLHHLLKKTSHELLTGNKPNVSYFRVFGSKCYILVKKGRHSKFVPKAVERFLLGYDSNTKAYRVFNKSSGLVEVSSNVVFDETNGSPREQVDLDDVDEEEIPTAAMRTMAIGDVRPQELQEQDQPSSSMVVHPPTQDDEQVPQEEGHDQVGAQEDQVMEEEAPRVPPTQVLATIQRHHPVDHILVDISKGVTTRSRLANFCEHYSFVSSIEPFRVEEALQDPDWVLAMQEELNNFKRNEVWSLVPCPKQNVVGTKWVFRNKQDEHGVVTRNKAXLVAKGYXQVAGLDFEETFAPVARLESIXILLAYAAHHSFRPFQMDVKSAFLNGPIKEEVYVEQPPGFEDDRYPDHVHKLSKALYGLKQAPRAWYECLRDFLISNAFKVGKADPTLFTKTCNGDLFVCQIYVDDIIFGSTNQKSCEEFSRVMMQKFEMSMMGKLTYFLGFQYTQDLLKRFGMKDTKLAKTPMGTDGHVDLNKGDPKECHLVVVKRILRYLVSTPCFGIWYPTGSTFDLIGYSDSDYAGCKVDRKSTSGTCQFLGRSLVSWSSKKQTSVALSTVEAEYVAAGKCWAQLLWMRQTLRDFGYNLNKVPLICDNESAIRLADNPVEHSRTKHIDIRPHFLRDHQQKGDIKVYHISTENQLADIFTKPLDEKRFCRLRSELNVLDSHNLD

SEQ ID NO: 291527 - protein, 428 aa, Zea mays
  Clone ID: MRT4577_28960C.1.pep
MTAAGDSGSSPPRQSDVDSTNRTVYVGGLALAATSPHPHTLLPHHHMPQPRWVVIPYPPPHHPMVAAPPPPSLQFVKHFTPPSSVTPPPPTGSGGNGGEDNRTIWVGDLQYWMDENYLHSCFGSSGEVVNIKVIRNRHSGVSEGYGFIEFYTHVSAEKALQNFSGHVMPNTDRAFKLNWASYSMGEKRSEISSDHSIFVGDLAVDVTDAMLLELFSNKYRSVKGAKVIIDANTGRSRGYGFVRFGDDNDKIHAMTEMNGVYCSTRPIRVGPATPRRSQGDSGTSPPRQSHVDSTNRTVYVGGLDPNVSEDELRKAFAKYGDLASVKIPFGKQCGFVQFVNRVDAEEALHGLNGSTIGKQAVRLSWGRSPASKQSRGDSGHRRNGNCNGMYYGTPFYGGYGYASPIPHPNMYAAAYEAYPYYGNQQLVS

SEQ ID NO: 291528 - protein, 489 aa, Zea mays
  unsure (1)..(489): unsure at all Xaa locations
  Clone ID: MRT4577_28961C.1.pep
KGGGQVVDGRAEATPAGAPPRHCAPAGRLRRWRWRRVGAQAAEVPDGXPVLNSAAKLQRREIGGRQLAARGGGPAAAVPERFRNMQLQEEFDTYDDNANLFVKLQFLKRRSKINEIVAAKDIIFALANSGLCAAFNRVTNKRIGFLNLSPDEVIRSLFYNKNNDSLITVSVYASDNFSTLKCRTTPVEYIRRNQLDAGFPLFESESLKWPGFVEFDDVNGKVLTYSAQDGIYKVFELKNYSFLYSIPDENVQEIKISPGIMLLIYDRTPSYVPLKILSIEDGKQLKSFKHLLHRNKKIDFIEQFNEKLLVKQENENFQIFDVRSSELIEVSVSKFMTPSAFIFLYENNLFLTFRNRTVAVWDFRGELVTSFEDHLLWHNDCSTNNIYITSDQDLIISYCKSEAVAEDGTVVPVGSINISEIMTGRCIAKITANDPSLSVPGRRNGYSKRSSDWSTVPEALEDVTALFYDEDRNEIYTGNSHGLVHVWSN

SEQ ID NO: 291529 - protein, 109 aa, Zea mays
  Clone ID: MRT4577_28962C.1.pep
MAETDHGQDNCLDQEVPQEAERTSDKSNKSSGTEDVKSDLALDNVAEFEIQWEEISIGERIGLGSFGEVYRGEWHGTEVAVKKFLQQDISSDALEEFRAEVLGSIPIQQ

SEQ ID NO: 291530 - protein, 90 aa, Zea mays
  Clone ID: MRT4577_28963C.1.pep
ELIEVSVSKFMTPSAFIFLYENNLFLTFRNRTVAVWDFRGELVTSFEDHLLWHNDCSTNNIYITSDQDLIISYCKSEAVAEDGTGAVLKP

SEQ ID NO: 291531 - protein, 47 aa, Zea mays
  Clone ID: MRT4577_28964C.1.pep
ECIRSFSPCYIGYGVEDSIMSWLIRLTVCVAACISEHAVVGLICTLS

SEQ ID NO: 291532 - protein, 111 aa, Zea mays
  Clone ID: MRT4577_28965C.1.pep
EQLFFLMGGASLNQTPNTTNTNRARGETTYTYLRTGGARAINLALQEPRLKNFFPPHNAGPNPYLSTHVAPLSVSLTPVIHPHPLNRSCKRDQIQTHPPPPHFWTGEKKPG

SEQ ID NO: 291533 - protein, 92 aa, Zea mays
  Clone ID: MRT4577_28966C.1.pep
GKSNYRLHSTRITKENVQWIQKGIFFAINLFVANTAAAPYSRELHYLLTKKRMVTSNGSNIQLLTMLSAKPGKQKMYIYIKGMFGCRGFGTD

SEQ ID NO: 291534 - protein, 95 aa, Zea mays
  Clone ID: MRT4577_28967C.1.pep
LAAQRQEPGPEFTVRAWLMRSSSQLLRGRNYSAAYGLAQRKGDGLLGRDGILEPLQVHMRCSHSLAPARSTIMDMMQTLMAEVLHNDASASASSY

SEQ ID NO: 291535 - protein, 118 aa, Zea mays
  Clone ID: MRT4577_28968C.1.pep
SISDPSFNLHTASERDPSMREAEPGKEGARRHAGTTWPMQQPVAAIARHMALPVSVLRRPWSVCTGRSTPEKDGQRLQGHLSDAGRVPYVLTNGHLLSSSRPRVCSQAVFGCWIWPRA

SEQ ID NO: 291536 - protein, 85 aa, Zea mays
  Clone ID: MRT4577_28969C.1.pep
SSHSKEKRILGVAVTPLTGSSGGMEREGRRRTLAGAGYARYSYAINKKRRTRHGEATSLMTVMGKRTQLHCVNMQRTTLQLSVKT

SEQ ID NO: 291537 - protein, 1539 aa, Zea mays
  unsure (1)..(1539): unsure at all Xaa locations
  Clone ID: MRT4577_2896C.1.pep
MDPKGKGIVINDKEKESFANEPKDDKPTDSGSGHKRRDGKKKKTRRIKEIVYYDDSDESTSSQKGNDDNDYDKRKSVNSNFSFDYSRIPQSTNTHLLSIPLGKPPHFDGEDYGFWSHKMRSHLFSLHPSIWEIVESGMKFDSTDSPMFINEQIHKNAQATTVLLASLCRDEYHKVSGLDNAKQIWDTLKISHEGNDVTMLTKMELVEGELGRFAMIRGEEPTQTYNRLKTLINKIRSYGSTRWTDHDVVRLMLRSFTVLDPHLVNNICENPRYTKMMPEEILGKFVSERMMIKEARYVDDALNGPIHEPQPIALKATRSKEALPSKVAQVEAVGLNDEEMALIIKRFKTALKERKGQPYKNKTKGKRSCFKCGKEQGNKREKKKTYKKAKGEAHLGKEWDSDCSSSDSDNEGLAATAFNKSTLFPNERHTCLMAREKKNKLLEKKEDLLYEEHDKFVEAQKSHALEVKRNEMLSCELSTCHEKISSLRSINDNLNAKLEIASKSTSCVENVVTCTRCKDVNIDACSEHLARISKLNDEVASLNAQLKTSKSDFDKLKFARDAYTVYTSGGSSWIIDSGCTNHMTGEKKMFSSYVKNKDPQVSIIFGDGNQGKVKGLGKIAISSEHSISNVFLVESLGYNLLSVSQLCNMGYNCLFTNVDVSVFRRSDGSLAFKGVLDSKLYLVDFAKEEADLDACLFAKTSMGWLWHRRLAHVGMKNLHKLLKGEHVIDLTNVTFEKDRPCAACQAGKQVGGAHHNKNVMTTSRPLELLHMDLFGPVAYLSIGGSKYGLVIVDDFSRFTWVFFLQDKSETQGTLKRFLRRGQNEFELKVKKIRSDNGSEFKNLQVEEYLEEEGIKHEFSAPYTPQQNGVVERKNRTLIDMARMMLGEFKTPERFWSKAVNTACHAINRVYLHRLLKKTSYELLTSNKPNVSYFRVFGSKCYILVKKGRNSKFAPKAVEGFLLGYDSNTKVYRVFNKSSSLVEVSSDVVFDETNSSPREQVVDFDDVDEEEVPTAAIRTMAIGDVRPQEQDEQDQPSSSTMVHPPTQDDEQEACDQXGAQDDHXVEEALLDPDWVLAMQEELNNFKRNEVWTLVPHPKQNVVGTKWVFRNKQDEHRVVTWNKARLVAKGYAQVAGLDFEETFAPVARLKSIRILLAYAVHHSFRLFQMDVKSAFLNGPIKEEVYVEQPXGFEDERHPDHVCXGKADPTLFTKTCDGDLFVCQIYVDDIIFGSTNQKSCEEFSRMMTQKFEMSMMGELSYFLGFQVKQLKDGTFISQTKYTQDLIKRFGMKDAKPAKTPMGTDGHTDLNKGGKSVDQKAYRSMIGSLLYLCASRPDIMLSVCMCARFQSDPKECHLVAVKRILRYLVATPCFGIWYPKGSTFDLIGYSDSDYAGCKVDRKSTSGTCQFLGRSLVSWSSKKQTSVALSTAEAEYVAAGQCCTQLLWMRQTLRDFGYNLSKVPLLCDNESAIRMADNPVEHSRTKHIDIRHHFLRDHQQKGDIEVFHVSSENQLADIFTKPLDEQTFCKLRSELNVLDSRNLD

SEQ ID NO: 291538 - protein, 44 aa, Zea mays
  Clone ID: MRT4577_28970C.1.pep
LICIHGLPLPVSTRVRARQRVGHKVKWGHLSSIHLPSFYNISDS

SEQ ID NO: 291539 - protein, 120 aa, Zea mays
  unsure (1)..(120): unsure at all Xaa locations
  Clone ID: MRT4577_28971C.1.pep
MLSPLAIRSVSILAYLPRSAAPMAMGTQASGGTRQQXNASVSPREKPRDLSSXSRCRPPPPPDRPXPPATEEAVEAPKGFVAPQVDPSTPSPIFGGSTGGLLRKAQVEEFYVITWTSPKE

SEQ ID NO: 291540 - protein, 265 aa, Zea mays
  unsure (1)..(265): unsure at all Xaa locations
  Clone ID: MRT4577_28972C.1.pep
MVQSRRRSGNYRCPRRAALPAAALLLFLLAAVALLYVSPPPLADHPVLASSRRRRSAHTLLNSSGAGSMEEFERREISRAPTNGSAVRDDLWGSKLASKFYGCSNSSSRFLDSNITTQPERYLMIVTSGGLNQQRTGIIDAVVAARILNATLVVPKLDQASFWKDSSNFSDIFYADWFISSLSKDVKIVKELPHIGGKLRAPHRMRVPRKCTERCXLXNRVLPALLKKHVIXXTKFDYRXLANRLQMDLQXVRCRVNYHXALRFT

SEQ ID NO: 291541 - protein, 62 aa, Zea mays
  Clone ID: MRT4577_28973C.1.pep
AKQRSGKVALEPSTFVETTWKVNVSISSILVPNKTTYISLLANTRCYGVVDRKRNLKACHLP

SEQ ID NO: 291542 - protein, 191 aa, Zea mays
  unsure (1)..(191): unsure at all Xaa locations
  Clone ID: MRT4577_28974C.1.pep
ISSALCTWLLPRRLGASLLRTVSTLTKEKAAFSPSDPAMQRHVASGRPSGTDGSDFSYRMVVESRNHPPPTPPKPRFQRLFHNLAILXGYQRVAEGRSRLARLIXRAGRMRTMAVLLRLYTSLSSIAVAFSVTCIIRSELFLKVMKQNTEAITSYEMLDAVRVALGILLQMVVIATTTRLLQNMSPPKRAS

SEQ ID NO: 291543 - protein, 210 aa, Zea mays
  unsure (1)..(210): unsure at all Xaa locations
  Clone ID: MRT4577_28975C.1.pep
SLPLTKEKAAFSPSDPAMQRHVASGRPSGTDGSDFSYRMVVESRNHPPPTPPKPRFQRLFHNLAILXYQRVAEGRSRLARLILVQALHLVAGGLLLLLSLSKGAAVNKFAVLSMAAGFLAIVVGELGRMRTMAVLLRLYTSLSSIAVAFSVTCIIRSELFLKVMKQNTEAITSYEMLDAVRVALGILLQMVVIATTTRLLQNMSPPKRAS

SEQ ID NO: 291544 - protein, 133 aa, Zea mays
  Clone ID: MRT4577_28976C.1.pep
GGPPERERTIFYLEKEEGVLSFTRGGGPAHKNGDKGWSTQPMLKAQTTPTSTGPNKARGLSPDQPEHTQVRGSNPYQPPHDQRTRETLGAGAEETPRGGGGWEQVTNFWEKQKPGGGGKTTGPDPGGDPGAAP

SEQ ID NO: 291545 - protein, 194 aa, Zea mays
  Clone ID: MRT4577_28977C.1.pep
APAFCELSLPLTKEKAAFSPSDPAMQRHVASGRPSGTDGSDFSYRMVVESRYQRVAEGRSRLARLILVQALHLVAGGLLLLLSLSKGAAVNKFAVLSMAAGFLAIVVGELGRMRTMSVLLRLYTSLSSIAVAFSVTCIIRSELFLKVMKQNTEAITSYEMLDAVRVALGILLQMVVIATTTRLLQNMSPPKRAS

SEQ ID NO: 291546 - protein, 45 aa, Zea mays
  Clone ID: MRT4577_28978C.1.pep
GTPLTPTNPWRNVPMHISYYLNHCRHQTLARPHGIPQGAASKPCR

SEQ ID NO: 291547 - protein, 97 aa, Zea mays
  Clone ID: MRT4577_28979C.1.pep
SACARYWVQKRRYGILNIITPFSFFCRIWDLVRGELRHPHRHGGAVGPQPDSVRDLREQQVLLTVLYIIMIRSSACPHSVFATLSLLHICVLVCVNY

SEQ ID NO: 291548 - protein, 1506 aa, Zea mays
  unsure (1)..(1506): unsure at all Xaa locations
  Clone ID: MRT4577_2897C.1.pep
MDPKGKGIVINDKEKESFVNKPKDDKPIDSGLGHKHKDGKKKKTRRIKEIVYYDDSDESTSSHKDNDDNDYDKRKTVNSNFSFDYSRIPQSSNSHLLSIPLGKPPHFDGEDYGFWSHKMRSHLFSLHPSIWEIVENGMKFDSSNSPIFINEQIHRNAQATTVLLASLCRDEYHKVSGLDNAKQIWDTLRISHEGNDVTLLTKMELVEGELGRFAMIRGEEPTQTYNRLKTLINKIRSYGSTRWTDHDVVRLMLRSFTVLDPHLVNNIRENPRYTKMSPEEVLGKFVSGRMMIKEARYVDDTLNGPIHEPQSIALKATRSKEALPSKVAQVEAAGLNDEEMALIIKHFKTTLKGRKGQPSKTKTKGKRSCFKCGKLGHFIANCPDNDSDQEKGNKREKKKNYKKTKGEAHIGKEWDSDCSSSDSDNEGLAATAFNKSSLFPNEHHTCLMAKEKKVCTRDTTYASSNDDDSSDDDEIDYSSLFKGLDRIKIGKINELIDALNDKNRLLEKQEDLLYEEHDKFVSAQNSLALEVKRNDMLSCEISTCHETISSLKSINDDLNAKLEKSSKLTSCVEHVVICTRCKDFNVDACSEHLDCIFKINDEVASLNAQLKTSKSEFDKLKFARDAYTIGRHPSIKDGLGFKREAKNLTSHKAPISAKEKGKAPMASSVQKNHAFMYHDRRQSRNTYRSCNAYDAFDSHAMFASSSSYVHDRNVDVSVFRRCDGSLAFKGVLDGKLYLVDFAKEEAGLDACLIAKTCMGWLWHRRLAHVGMKNLHKLLKGEHVIGLTNVHFEKDRPCAACQAGKQEEDKSETQGTLKRFLRRAQNEFELKVKKIRSDNGSEFKNLQVEEFLEEEGIKHEFSAPYTPQQNGVVERKNRTLIDMARTMLREFKTPERFWLEAVNTACHAINMVYLHRLLKKTSYELLTGNKPNVSYFRVFGSKCYILVKKGRTSKFAPKAVEGFLLGYDSNTKAYRVFNKSSGLVEVSSDVVFDETNGSPREQVVDLDDVDEEDVPTAAMRTMAIGDVRPLEQKEQDQPSSSTMVHPPTQDDKQVPQVEAHDQGGAQDVQVEEEEAPQAPPTQVRATIQRDHPIDQILGDISKGVTTRSRLVNFCEHYSFVSSIEPFRVEEALLDPDWVLAMQEELNNFKRNEVWTLDEHGXVTRNKARLVAKGYAQVXRLYQMDVKSAFLNGPIKEEVYVEQPPGFEDERYPNHVCKLSKALYGLKQAPRAWYECLRDFLIANAFKVGKADPTLFTKTCDGDLFVCQIYVDDIIFGSTNQKSCEEFSRQLKDGTFISQTKYTQDLLKRFGMKDAKPAKTSMGTDGHTDLNKGVATPCFGIWYPKGSNFDLIGYSDSDYARCKVDRKSTSGMCQFLVRSLVSWNSKKQTSVALSTAEVEYVAAGQCCAQLLWMRQTLRDFGYNLSKVSLLCDNESPIRIAENPVEHSRTKHIDIRHHFLRDHQQKGDIEVFHVSTENQLADIFTKPLDEKTFCRLRSELNILDSRNLD

SEQ ID NO: 291549 - protein, 101 aa, Zea mays
  unsure (1)..(101): unsure at all Xaa locations
  Clone ID: MRT4577_28980C.1.pep
ASHSPFPFWQLREXARSPRPSQLQTKWQGEWXAPAPLXALRAGRVSATRTLDLTLXLRPIPCAFFLFFLATRDGPPSSTLXRLNLGFRFKVLXRLPEPKKL

SEQ ID NO: 291550 - protein, 114 aa, Zea mays
  Clone ID: MRT4577_28981C.1.pep
NPNGPKYHILWGGNSMGPAKKFWAHDGNPPRAIENPPYRAQDTRGRGKPYHPGITRQGIKNKFNLTAFQDKIGPEIKKGNLRFQPFAHPRPTRGGPCPQRNPRLGLCLGATITS

SEQ ID NO: 291551 - protein, 106 aa, Zea mays
  Clone ID: MRT4577_28982C.1.pep
EPPYTPIGIRTAATAKKKREGAPSDQEDRRHRQRIASSREDYNSVARMSQGRVPGSPSLRRASAGLGRRNPRCGHEDLMNHPANWNLKCQEKSRWFRRSHKARSSI

SEQ ID NO: 291552 - protein, 243 aa, Zea mays
  Clone ID: MRT4577_28983C.1.pep
MAERERKRKRAAEEWERRKRGRKREKERQVGWTSDPVEALGEDVMGRVMEFLDARSVARCTAVSCAWRGVAADNRLWAPMCTELMAGKAHIPRLTSIRTGSKLSTYSMVIMDGKRSRITKEDLCDHAWEYRFTIAAPDYWRNLDPSWKHTGPPMRRYFHPDGYHSADPHDAVWGGHECTYTVITSFVDDGQIREHYVRINRWPPMKVSRKDDWSWELSNHMYRYNSIPDSHRKGCTGPLFPVW

SEQ ID NO: 291553 - protein, 72 aa, Zea mays
  Clone ID: MRT4577_28984C.1.pep
NGQYSFYDLCLVLQMIVPGQESCLGWPTGCLTGKNIITKKKKKNYIFYYKKKKKNNIILKIFNKLLIFNVMN

SEQ ID NO: 291554 - protein, 92 aa, Zea mays
  unsure (1)..(92): unsure at all Xaa locations
  Clone ID: MRT4577_28985C.1.pep
MVNVPTTXKTYCKSKECRKHTLHKVTQYKKGNDSIAAQGKRRYDRKQSGYGGQTKPVFHKKAKTTKKIVLRLQCQGCKHVSQHSYKRCXHFE

SEQ ID NO: 291555 - protein, 96 aa, Zea mays
  Clone ID: MRT4577_28986C.1.pep
ATLPLHRTCSSRMGNGSTILGGYISYSYAEDRTKFAAGVQHSVDSSMYLKSCIGSDKVLRSVVSKSFGKSRLNLVAEVNFKDFRKLSRAGIYFSFP

SEQ ID NO: 291556 - protein, 134 aa, Zea mays
  unsure (1)..(134): unsure at all Xaa locations
  Clone ID: MRT4577_28987C.1.pep
RGLWCPPRAGSTHPAGSYSAPFPFPAYHAGWRFAAARGPPDTMATEKLRIKAESNPTETRLSYVAVRQWPKCGCYNSKFPWTYSSKDTCYLLQAKVKVDPEGXNSEIVDIXATELVVFPKXGMRCTCDDTEGVD

SEQ ID NO: 291557 - protein, 70 aa, Zea mays
  Clone ID: MRT4577_28988C.1.pep
RGVPPGQAWFPHTNRRGWSRRPCGSTWPLHTGNIEVNPIGPRANGSPPPRSPPPAVLSWGQLLERAGQFG

SEQ ID NO: 291558 - protein, 89 aa, Zea mays
  Clone ID: MRT4577_28989C.1.pep
MGLQEEFEEHAEKAKTLPESTSNENKLILYGLYKQATVGDVNTDRPGIFYQKDRAKWDAWKAVEGKSKDEAMNDYITKVKQLQEEAAAS

SEQ ID NO: 291559 - protein, 60 aa, Zea mays
  Clone ID: MRT4577_2898C.1.pep
PPSYAPPPKAVVGFFMAPPFIPPFMAMSGPPQVFILKGNSPVPFFFPPPPLRIYPFGSPL

SEQ ID NO: 291560 - protein, 96 aa, Zea mays
  Clone ID: MRT4577_28990C.1.pep
TIYMATSSRAAVVIVVLSLLLLASGLSLVHARTTMMHAEEKESTRSTSSSISSSTTLVLSKGKDKAEIAMANNRSRRIIMEVVEGSVPSPGIGHHN

SEQ ID NO: 291561 - protein, 89 aa, Zea mays
  Clone ID: MRT4577_28991C.1.pep
MGLQEEFEEHAEKAKTLPENTSNENKLILYGLYKQATVGDVNTDRPGIFYQKDRAKWDAWKAVEGKSKDEAMNDYITKVKQLQEEAAAS

SEQ ID NO: 291562 - protein, 53 aa, Zea mays
  Clone ID: MRT4577_28992C.1.pep
KVQIQFIHLFMTQHTGGKVFHIIDFTSNSLECSFLWLTGETRQEGQAMLRQLK

SEQ ID NO: 291563 - protein, 220 aa, Zea mays
  unsure (1)..(220): unsure at all Xaa locations
  Clone ID: MRT4577_28993C.1.pep
MSSSMTTSAPTTTYPYSYTTFTNASPEPFTTPTAIPSMFPWGGLPSSACPAPSNAPSSDPDVPYIRPDGKFGSCAISNVESVNDHSFWDMYDCCNTGKMTATGATLPCTSICYANEQRSFLEIGECLSKRNKIVVCSPPEDQRGEPKSSGSGESKSSSSASATKADTTVVSARPTAAAAQGAANTVAGGQGAASKAXLGGVWPHXLVVCCGHAAVIVAID

SEQ ID NO: 291564 - protein, 77 aa, Zea mays
  Clone ID: MRT4577_28994C.1.pep
TVFTASIMIINYTAAKLTHANGTSMAMKRVTVPSRYLDMPIGCSKDIAKMIGYNETVAMAILRDRGLANTQEELLLS

SEQ ID NO: 291565 - protein, 264 aa, Zea mays
  unsure (1)..(264): unsure at all Xaa locations
  Clone ID: MRT4577_28995C.1.pep
KSGNPDSFIGSFIRRFGRTGVYRTFMFSKPTVLVATPDACKRVLMDDDSFLEGWPRATVALIGRKSFLTLPCEEHRRLRKLTAAPINGFDALTTYLGFIDRTVVATLRGWSDAGEIEFLTELRRMTFKIIVQIFLTAADDATTLALESSYTDLNYGMRAMAINXXPGFAFHRAFKARKSWCXVLQGXVLNERRATKRLPAGSSVDMMDRLIEAEDEHGRRLDDXXXIIDILVMYLNAXMESSGHICMWATVYLQKHPEIFAKAK

SEQ ID NO: 291566 - protein, 79 aa, Zea mays
  Clone ID: MRT4577_28996C.1.pep
DKVLTSIICAVFLTRISRATTAYLQSVLNQETNDVAIENIRIACLKINGRSSTPATLALLRSEFVHFFFFCSTDSEIRY

SEQ ID NO: 291567 - protein, 113 aa, Zea mays
  Clone ID: MRT4577_28997C.1.pep
LHTRQPPRQRGKLRKRPTTKDATAAEDPRTAPTEAAAHAATRTQAPARGSEARRPSNGGQPSPARGTAGAARGGEGRPRWEQGAARTPTPPTQTTAAEAGGEAKRPNGTGKGR

SEQ ID NO: 291568 - protein, 54 aa, Zea mays
  Clone ID: MRT4577_28998C.1.pep
HTKHFTGGGWYLNWTGNKITPEKCWLLTNLTLNTPKTTVGTKRNAEVQFFTLTF

SEQ ID NO: 291569 - protein, 70 aa, Zea mays
  unsure (1)..(70): unsure at all Xaa locations
  Clone ID: MRT4577_28999C.1.pep
ILQLPDLRQNKACVPSLSKKKKKKKKKKKKKKKKKKKKKKKKKKKXKXKXXKKRGGPFKKNKFNLPLNAR

SEQ ID NO: 291570 - protein, 825 aa, Zea mays
  unsure (1)..(825): unsure at all Xaa locations
  Clone ID: MRT4577_2899C.1.pep
MDPKGKGMVINDKEKESFINEPKDDKPSDSGSSHKKKDGKKKRCIKKIVYYDDSDESSSSQKDEDDYEKKKTIWDTLKISHEGNDVTMLTKMELVEGELGRFAMIRGEEPTQTYNRLKTLVNKIRSYGSTRWTDHDVVRLMLRSFTVLDPHLVNNIRENPRYTKMSPEEILGKFVSGRMMIKEARYVDDALNGPIHEPQAIALKATSSREVLPSKVAQIEAAGLNKDEMALIIKRFKTTLKGRKEHPNKSKTKGKRSCFKCGKIGHFIANCPENDSDQEQEKKREKKKAYKKAKGEAHLGKEWDSDCSSSESDNEGLAASAFNKLSLFPNEHHTCLMAKEKKVYASGGSSWIIDSGCTNHMTGEKKMFTSYVKNKVSQDSIIFSDGNQGKDKSETQGTLKRFLRRAQNEFELKVKKIRSDNGSEFKNLQVEEYLEEEGIKHEFSAPYTPQQNGVVERKNRTLIDMARTMLGEFKTPERFWSEAVNTACHAINRVYLHRLLKKTSYELLTGNKPNVSYFRVFGSKCYILVKKGRNSKFAPKAVEGFLFGYDSNTKAYRVFNKSSDLVEVSSNVVFDETNGSPREQVVDLDDVDEEDVPTTAIRTMAIGDXRPQEQKEQDQPSSSTMVQPPTQDDEQVHQEEACDQGGAQDDHVMEEEAPQAPPTQVRATIQRNHPVDQILGDICKGXVEEALIDPDWVLAMQEELNNFKRNEVWTLVPRPKQNVVGTKWVFRNKQDEHGVVTRNKARLVAKGYAQVAGLDFEETFAHVARLESIRILLAYAAHHSFRLFQMDVKSAFLNGPIKEEVYVEQPPGFEDERYPDHVCKL

SEQ ID NO: 291571 - protein, 58 aa, Zea mays
  Clone ID: MRT4577_289C.1.pep
KTCVPFKCIYQSVKCHSEWVTCSVLVVQLPGYLTGHARRRCYSILCMFTQSPVIPSPA

SEQ ID NO: 291572 - protein, 410 aa, Zea mays
  Clone ID: MRT4577_28C.1.pep
MSALGTLSGGAAGVSGLLRLRRRAAPAPAIAAPSHLPAGTVKCAAAVPDAAPIVWGRQLRPALLLPAALLPSSSQPARRHTLQPPAAAAESAGEAKSVGFLEKYPALVTGFFFFMWYFLNVIFNILNKKIYNYFPYPYFVSLIHLVVGVVYCLISWSVGLPKRAPINGTLLKLLFPVALCHGIGHITSNVSFAAVAVSFAHTIKALEPFFSAAATQFILGQQVPFSLWLSLAPVVIGVSMASLTELSFNWTGFINAMISNISFTYRSIYSKKAMTDMDSTNVYAYISIIALIVCIPPALIFEGPKLMQHGFSDAIAKVGLTKFVSDLFLVGLFYHLYNQIATNTLERVAPLTHAVGNVLKRVFVIGFSIIVFGNKISTQTGIGTSIAIAGVAMYSYIKAKIEEEKRKKSA

SEQ ID NO: 291573 - protein, 210 aa, Zea mays
  unsure (1)..(210): unsure at all Xaa locations
  Clone ID: MRT4577_29000C.1.pep
PLRQQSCASSQQPQPQTEAYHFLPSPNQTPSSLPPPQPAVPSCQPLQPPASPPMTLLWPQSPPSRHPTPSIHPTLPSIFPPCPPDKPQPPXPXSPAGSSPPPPFHSTQSEPPPWPPPISPPAHPSHQKIQSSCPLAPPQGPPIGHPCWTRPPPPLPSPGAASSTACSPRQPPRAARRPRPWRSPPEPPAPLRPGANPGRRRGRHGARRPR

SEQ ID NO: 291574 - protein, 91 aa, Zea mays
  Clone ID: MRT4577_29001C.1.pep
VRVSPAAPERQEGSSLTLTCEAESSQDLEFQWLTEETGQVLERGPVLQLHDLKREAGGGYRCVASVPSIPGLNRTQLVHVAIFGPPWHGIQ

SEQ ID NO: 291575 - protein, 328 aa, Zea mays
  unsure (1)..(328): unsure at all Xaa locations
  Clone ID: MRT4577_29002C.1.pep
RPEGSIAEAYVANECLTACSRYFDDVDTRHNREGRNKERVDLSRXNFYVFQHGVELLGAPRITYLQDDYDKMVWYVLNNCSEVEPYIKMYKEELENEGIVDVEKTIEKQFSSWFKKHIARLRFVEGEGIDDDLYALACEPDLRVRIFSACLVDGVQYHTVDRERNRRTQNSGVMVEGTHNNECIDFYGCLKEIIELQYNSDLMEHRTPLXLXFQCDWFDTHSKKVNMKCDGYFRSINHSSRWYKNDAFILAAQATKVFYLQDIKNAGSWKIVQKFTHRHLWSVAENDIDEIPSASGLSYQDDTCVGFEVQVNEGDTEMIEHQDADGFC

SEQ ID NO: 291576 - protein, 155 aa, Zea mays
  Clone ID: MRT4577_29003C.1.pep
MGGDPDDGGDDSNSSHSTDLSEEQDSEGWVARPITRDTARGCHFHDALDTLLRQALDQRTWSIEYHCVVFQHNRRAYSDRWEATCLVRRPEDSLRGAEVSSEHYSISERDSAKAAMQDVARRALSHYFSVLGGVADGLDLRYCYILAPGMLISWP

SEQ ID NO: 291577 - protein, 54 aa, Zea mays
  unsure (1)..(54): unsure at all Xaa locations
  Clone ID: MRT4577_29004C.1.pep
PVCRGLPCDKDDLKYTAQALSXSAACVAGFFITADETILRDAREDTIGKLDEST

SEQ ID NO: 291578 - protein, 185 aa, Zea mays
  Clone ID: MRT4577_29005C.1.pep
APQSTPMARSPSLPQACLHRVPDPLLELALARKFSCVPPWCALLSVSLLATLAQPSVAPSSVRRGACSCARRPPDHLQTPAVELSRLSPTLSRVFQLGALLFCLPFAGRAHLPLLGRPRCCSLHVRNSLRAAAFSSPVASVVVKHVSKKSQESGENGANNMVFTKCTTGSSSQDLSVFVRVLGRV

SEQ ID NO: 291579 - protein, 260 aa, Zea mays
  unsure (1)..(260): unsure at all Xaa locations
  Clone ID: MRT4577_29006C.1.pep
RAEGSIAEAYVANECLTACSRYFDDVDTRHNREGRNKERVDLSRGKFYVFQHGVELLGVPRIHTSKXYYDKMVWYVLNNCSEVEPYIXIASLRFVDGEDIDDDLYALACEPDLRVRIFSACLVDGVRYHTIDRERNRRTQNSGVMVEGTHNNECIDFYGCLKEIIELQYNSDLMEHRTIVLFRCDWFDTHSKRVSMKYDGYFRSINHSSCWYKNDTFILAAQATKVFYLQDIKNSGNWKIVQKFTHRHLWRVAENDIDER

SEQ ID NO: 291580 - protein, 1175 aa, Zea mays
  unsure (1)..(1175): unsure at all Xaa locations
  Clone ID: MRT4577_29007C.1.pep
MDKFWINATLFSKPHLEGVSEFMNLGKEGVYANEEILCPCRKCLNQLSRHRGQVEDHLYLHGMASTYTRWMYHGEAMDDIINEIGDHEDEHVSFNDDVGMNQDEEDPDDRINGMVEELYTAEDQDKRXNLCLGDILQEMKQELQLLSTYMRISVITSSIFLXFLXVNSLRLFVRSELYVVLCLIFKKCPSFGEAKKLIRALGLGYVSIHVCVNNCVLFRKNYAKHDQCPICGESRWKDTNKRIPQKVLRHFPLIPRLKRMFASKEIAKQAQWHKFKRKHVENELSHPADGEAWKDFDRKYGQFAEDARNIRLGLATDGFNPFGKMSSSYNMWPIFLIPYNFPPWECTEQSNFIMGLLIPGPKCPGKDFDVFMEPLIEELLELWKGVTTWDALSGNNFELHAAVIWCIHDYPALSTLSGRVTKGYYACVHCDKNPCSKRIRNKICYVYHRRFLPKDLIWRRNKSFDGHSEQREKPEEFSIDELMQQLERVKDVRPGIHTKSKKRKREVEGQCWKRRSCLWDLPYWSSLKLRHNLDVMHIEKNICEYFLGTFLGIVGKTKDTINARLDLEDMGIRRHLHLKHNGDSYNFPHAPYTMNKTQKVDFCDFLRSVKFPDGYVSNLATCFSTDGCNLQALKTHDCHILLQRILPAAIRGIMSKDIYEALAELGXFFQHLCAKTLKLDVLQRMKVEIPIILCKLEKIFPPSFFDVMLHLAIHLPDEAILRGPVQYGWMYPVERRLYTLKRFVRNMARPEGSIAEAYVANECLTACSRYFDDVDTRHNREGRNKERVDLSRGKFYVFQHGVELLGAPRITYLQDDYDKMVWYVLNNCSEVEPYIKYXSLYVCHFYMNXIIASNIYHIRMYKEELENEGIVNVEKTIQKHFSSWFKKHVXSSSYPQHQXDLFSPWIFLCLQIASLRFVEGEDIDDDLYALACEPDLRVRIFSACLVDGVRYHTIDRERNRRTQNSGVMVEGTHNNEFIDFYGCLKEIIELQYNSDLMEHRTVVLFRCDWFDTHNKKVSMKYDGYFRSINHSSCWYKNDTFILAAQATKVFYLQDIKNSGSWKIVQKFTHRHLWCVAENDIDERPSSSGLSYQDDTCVGSEVQVNEGDMEITGHQDADESINVSASVVDEFRVQREEEVEEYETSDNEDETGWQYASDNEESITIVNDDDDFSDNE

SEQ ID NO: 291581 - protein, 74 aa, Zea mays
  Clone ID: MRT4577_29008C.1.pep
ELYASAVHIAWYIIHRALEARQFCQGWIHCSSCSSLTITDGSDIPTPDVMNRSARTGSYMLAKHYADATGYHIG

SEQ ID NO: 291582 - protein, 98 aa, Zea mays
  unsure (1)..(98): unsure at all Xaa locations
  Clone ID: MRT4577_29009C.1.pep
MAGTVTVSGSSPPXPPLLXDELDIVTPTIRNLDFLEKWRPFFQPYHLIIVQDGDPTKTIKVPEGFDYELYNRTDINCILCLKASCILFKHFACRCSVT

SEQ ID NO: 291583 - protein, 568 aa, Zea mays
  Clone ID: MRT4577_2900C.1.pep
MDKSETQGTLKRFLRRAQNEFELKVKKIRSDNGSEFKNLQVEEFLEEEGIKHEFSAPYTPQQNVVVERKNRTLIDMARTMLGEFKTLERFWSEAMNTACHAINRLYLHRLLKKTSYELLTGNKPNVSYFRVFGSKCYILVKKGLVEVSSNVVFDETNSSPREQVDLDIDEDEVPTAAMCTMAIDDVRPQEQDQPSSSALVHPPTQDDGQPFRVEEALQDPDWVLAMQEELNNFKRNEVWSVVPRPKQNVVGTKWVFRNKQDEHEVVTRNKARLVAKGYAQVAGLDFEETFAPVARLESIRILLAYVAHHSFRLFQMDVKSAFLNGPIKEEVYVEQPPGFEDDRYPDHVYKLSKALYGLKRAPRAWYECLRDFLIANAFKVGKADPTLFTKTCDGDLFVCQIYVDDIIFGSTIQKSCEEFSRVMMQKFEMSMMGELTYFLGFQVKQLKDDTFISQMKYTQYLLKRFGMKDAKPAKTPMGTDGHVDLNKGDIMLSVCMCARYQSDPKECHLVVVKRILRYLVATPCFGIWYLNGSTFDLIGYADSDYAGCKVDRKSTSGTCQFLGRSLVS

SEQ ID NO: 291584 - protein, 594 aa, Zea mays
  unsure (1)..(594): unsure at all Xaa locations
  Clone ID: MRT4577_29010C.1.pep
MTMMTPPPLEQQQEDDEMLVPHQELPVAGPEAAPQPMEVVAQTEPATTAESQPPEDPQTTRFTWTIESFSRLNTKKHYSDVFVVGGYKWRVLIFPKGNNVDHFSMYLDVADSGNLPYGWSRYAQFSLAVVNQVHPKYTIRKDTQHQFNARESDWGFTSFMPLSDLYDPNRGYLVNDTVVIEAEVAVRRMVDYWTYDSKKETGFVGLKNQGATCYMNSLLQTLYHTPYFRKAVYHMPTTENDMPSGSIPLALQSLFYKLQYSDNSVATKELTKSFGWDTYDSFMQHDVQELNRVLCEKLEDKMKGTVVEGTIEQLFVGHHINYIECINVDYKSNRKESFYDLQLDVKGCRDVYASFDKYVEVESLEGDNKYHAERYGLQDARKGVLFLDFPPVLQLQLKRFEYDYMRDTMVKINDRYEFPLQLDLDRDNGKYLSPDADRSIRNLYTLHSVLVHSGGVHGGHYYAFIRPTLSDQWYKFDDERVTKEDTKKALEEQYGGEEELPQINPGFNNTPFKFTKYSNAYMLVYIRENDKDKIMCNVDEKDIAEHLRIRLKKEQEEKEHKKKEKSEAHLYTIIKIARDXXLKAAFGXXIYFDL

SEQ ID NO: 291585 - protein, 172 aa, Zea mays
  unsure (1)..(172): unsure at all Xaa locations
  Clone ID: MRT4577_29011C.1.pep
MLPYQDLLSGNELLSDSFSYKELENXGSCWEVEVNCVTLGPVDVDIEANPSAIGXVDDDSADDTAVKVIDIVDTFRVQEQPLFXDNKSFVSYIKQYIRELSTXLLGTMTTLDEIKKAVEGATKFLLTKLNDLQFFVDESTKDKASVVFTYYKDGATNPTFLYFSHGLKEIKC

SEQ ID NO: 291586 - protein, 107 aa, Zea mays
  unsure (1)..(107): unsure at all Xaa locations
  Clone ID: MRT4577_29012C.1.pep
GTFISQTMHTHDILXRFGMKDAKLIKTPLATKGHLDLDIXRFQSDPNLCHLRAVKRILRYLVHMPHFGLWNPKGSTFDLVRYFDVDYAGCKNVILIPHKSKCNDAHA

SEQ ID NO: 291587 - protein, 132 aa, Zea mays
  Clone ID: MRT4577_29013C.1.pep
GLEFFFFFFFFFFFFFGNNMQLHIMLTETLQCHLHSIQENQNRGGSQFPSTLARKQRASTVINSISEEREHHSSKKKKRLKQSTQIQCEGQENESHKLASIKPGWTKIRVPDSTNTPCYTAHSEKHTGTAGD

SEQ ID NO: 291588 - protein, 117 aa, Zea mays
  Clone ID: MRT4577_29014C.1.pep
MQYILARSEFRSSLLGYHLALVSLTSNENCFLGPFRRFQALYVSENLVQSGGEIDELVGHTYLYLKEQLERPTMPPSSILHGTIIGEVFCSNLHKSEVHLFFFSVAVRFQCLMMIVD

SEQ ID NO: 291589 - protein, 465 aa, Zea mays
  Clone ID: MRT4577_29015C.1.pep
LLAADAWVIYSLHQFQNTLDSELFQTARMSPSSLRYYGIGLENGNYTVTLQFAEFDFEDSQTWKSVGRRVFDIYLQGERKEKNFDIRKASGGKSYTAVEKHYIVPVTRNFLEIHLFWAGKGTCCIPAHGYYGPAISALSATPNFTPTVRNSAQKKNSSKTGVIVGVVVGAAVLGVLALAGICMLRQKRRKLLLEQQELYSIVGRPNVFVYGELRTATENFSSNNLLGEGGYGSVYKGKLADGRVVAVKQLSETSHQGKQQFAAEIETISRVQHRNLVKLYGCCLEGNKPLLVYEYLENGSLDKALFGNGKLNLDWPTRFEICLGIARGLAYLHEESSIRVVHRDIKASNVLLDANLNPKISDFGLAKLYDDKKTHVSTKVAGTFGYLAPEYAMRGHMTEKVDVFAFGVVILETLAGRPNFDNTLDEDKVYILEWVWQLYEENHPLDMLDPKLAEFNSDEVLRAIH

SEQ ID NO: 291590 - protein, 68 aa, Zea mays
  Clone ID: MRT4577_29016C.1.pep
WGLGYKKFSFLCEGIKQKFVSFSSSRPCNYLVGVWVGLPKSRRLGTPLKRNFPCLSKRKYPCYLCSLS

SEQ ID NO: 291591 - protein, 91 aa, Zea mays
  Clone ID: MRT4577_29017C.1.pep
FQPLEFYPPGGRAIGVTTWQKGLSLQRVGSEAPEMWSAMGTARKPKRLITKGSFSPPPPFGVPFSFPPVLVFRFGRGAPNDYPSLGPKKVR

SEQ ID NO: 291592 - protein, 71 aa, Zea mays
  Clone ID: MRT4577_29018C.1.pep
VTWPLGSRRELVMEPAVQVEGRCNNPAVEVWVAHIVFFEDAGAVVGLAASVVLSMVACRLLSLRLRKELLR

SEQ ID NO: 291593 - protein, 34 aa, Zea mays
  Clone ID: MRT4577_29019C.1.pep
RKQRITETESRYQELQGQRSDVYSDLNTQRPYYK

SEQ ID NO: 291594 - protein, 111 aa, Zea mays
  Clone ID: MRT4577_2901C.1.pep
NFQKGCPGWPPKTWGGFFPPPSGRLGFKKGLDFIGRAEPPFCGFPQAPPLLKKKKLRPLKAQLCFCPPGPFFIFLPWGGADFDPPFVCLACQKIFSAQNPFPAKGWAPKCP

SEQ ID NO: 291595 - protein, 354 aa, Zea mays
  unsure (1)..(354): unsure at all Xaa locations
  Clone ID: MRT4577_29020C.1.pep
MVPGIATKTAARPVAWAPQPRNMFVFGAGFVGRYVSERLLAQGWQVSGTCTTVTTKRELEMLGMNASVFDGTEDSLENIHSLRQATHLLISIPPIPGVGDPLLINLDEDLRRILGHGNLEWLCYLSSTSVYGDCGGVLVDEXKGLVGSFLVHEVHFNRKLNXCCVCSHTVNPKSESAKLRYNAEKGWLNLIDDPKLSAFVFRLGGIYGPGRSALDTLAKSKSLSRKQKLRESKQYTARIHVADIYQAVLASMSIRCARKIFNVVDDDPAPRAEVFAFATSLIQRRYPDMITXKPLMPSLQXDYQEMIVPAEKRVSNARMKQELGVNLLHPTYRSGLQSILDAWQIQPPLPNTSQ

SEQ ID NO: 291596 - protein, 65 aa, Zea mays
  Clone ID: MRT4577_29021C.1.pep
MALHVPKAPGFAQMLKGGAKHFSRLEEAVYRNIQGCKELAQTTRTACGPNGMNKMVITRLEKVFV

SEQ ID NO: 291597 - protein, 98 aa, Zea mays
  unsure (1)..(98): unsure at all Xaa locations
  Clone ID: MRT4577_29022C.1.pep
NSMVMMAFACMTLSFLRGVEWALKTLTKEHMLGKVVVITGASSAIGEVRXGRVLVLVARREQRLFAIRDNARMLGAXNVPVNAADVLTQXDCRRLVAD

SEQ ID NO: 291598 - protein, 81 aa, Zea mays
  Clone ID: MRT4577_29023C.1.pep
WRHFVPLLTPFKVYSGSCQSRFYHSKESTLHLVLRLKGGMQIFVKTLTGNTITLAVDSWDTIHNVKAKIHDRECIAPDQHR

SEQ ID NO: 291599 - protein, 203 aa, Zea mays
  Clone ID: MRT4577_29024C.1.pep
MRFSPFLSNIIFTFSNITRVRPPLTSHLAYRPNLPLRSMSGIPILGALFGTSSSNNSKMSYPDQRSNDEWRAVLNKEQFRILREKGTEAPGSGTFDKHYPDEGVYTCAGCEAPLYKATHKFKSGCGWPAYFDSIPGAVVRHEDRTFGMARTEIVCSNCGGHLGHVFKGEGYDTPTDERHCVNSVSLNFSPNDKIVKDKPESKA

SEQ ID NO: 291600 - protein, 111 aa, Zea mays
  Clone ID: MRT4577_29025C.1.pep
MQKACNRTTVGHPFGFIASGGDWERGYFERDPSPRRKRALSPPTDQGFEGWPLGRVRQPPQSTRASSSLLIRGSKAGPRKGSTVAPEHSGSAPTTDQGFEGWPLGRVRQPP

SEQ ID NO: 291601 - protein, 71 aa, Zea mays
  Clone ID: MRT4577_29026C.1.pep
FVSWQLLNVYQYVSTFYVFCSSLGVYPTCVFSISVISVVGSSAGADRVMYGRSSDYCQYAPPSWSCANPVA

SEQ ID NO: 291602 - protein, 80 aa, Zea mays
  unsure (1)..(80): unsure at all Xaa locations
  Clone ID: MRT4577_29027C.1.pep
LHSAIINEQQAKGSKAPSHNASAHHGIYPSSTTIAALLRRGGRAAFSFNIAIEQRGQLKCHIGSSFGIRSASLLCGPXXK

SEQ ID NO: 291603 - protein, 60 aa, Zea mays
  Clone ID: MRT4577_29028C.1.pep
TENWTEEQTNQFQPTPETLDNHQIITPHGRPPNQLGFGTRGKPEETDLRLERHNEAGYMT

SEQ ID NO: 291604 - protein, 72 aa, Zea mays
  Clone ID: MRT4577_29029C.1.pep
AGHHTRPSPSLNAPQIRFPRPEKFNRPTGQRYSIQSQLGRKNSNPAEGMASENNFSYLTSGGGFPAGYPARN

SEQ ID NO: 291605 - protein, 1602 aa, Zea mays
  Clone ID: MRT4577_2902C.1.pep
MDPKGKGMVVDNNEKEFIFNEPKNDKSTDLGSSHKRKDGKKKKTRRIKEIIYYDSDESSSSQKDDDNDYKKTVNSNFSFDYSRMPHSSNSHLLSIPLGKPPHFDGEDYGFWSHKMRSHLFSLHPSIWEIVENGMKFDSSDSPMFINEQIHKNAQATTVLLASLCREEYNKVSGLDNAKQIWDTLKISHEGNDITMLTKMELVEGELGRFAMIRGEEPTQTYNRLKTLINKIRSYGSTRWTDQTYTKMSPEEVLGKFVSGRMMIKEARYVDDALNGPINEPQPLALKATRSKEALPSKVAQIEAAGLNDEEMALIIKRFKMVLKGHKGQPSKTKTKGKRSCFKCGKIGHFIANCPDNDSDQEQGNKREKKKNYKKTKGEAHLGKEWDSDCSSSDSDNEGLAATAFNKSTLFPNERHTCLMAREKKVCTRNSTYASSSEDESSDEDEVDYSCLFKGLDRTKVDKINELIDALNDKNMLLEKQEDLLYEEHDKFVEAQRSHALEVKRNEMLSCEISSCHETISKLRSINDDLNAKLEIASKSTTCVENVIMCTRCKDINLDAYSEHLACISKLNEEVASLNAQLKTSKSDFEKLKFARDAYTVGRHPSIKDGLGFKREAKNLTSHKAPIPAKEKGKAPMASSVQNNHAFIYHDRRQSRNAYRNCNAYDAINSHAMFASSSSYVHDRNVCRRNVVHNMPRRNGVNVPRKANEPSTIYHALNASFAICRKDRKIVARKLGARCKGDKTCIWVPKDICANLVGPNMSWVYASGGSSWIIDSGCTNHMTGEKKMFTSYVKNKDSQDSIIFGDGNQGKDKSETQGTLKRFLRRAQNEFELKVKKIRSDNGSEFKNLQVEEFLEEEGIKHEFSAPYTPQQNGVVERKNKTLIDMARTMLGEFKTPECFWTEAVNTACHAINRVYLHRLLKKTSYELLTGNKPNVSYFRVFGSKCYILVKKGRNSKFAPKAVEGFLLGYDSNTKAYRVFNKSSGLVEVSCDVVFDETNGSPREQVVDLDDVDEEDVPTAAIRTMTIGDVRPREQLEQDQPSSSTMVHPPTQDDEQVHQQEACDQGGAQDDHVMEEEAEPAPPTQVRAMIQRDHPVDLILGDISKGVTTRSRLVNFCEHYSFVSSIEPFRVEEALLDPDWVLAMQEELNNFKRNEWVFRNKQDEHGVVTRNKARLVAKGYAQVAGLDFEETFAPVARLESIRILLAYAAHHSFRLFQMDVKSAFLNGPIKEEVYVEQPPGFEDERYPDHVCKLSKALYGLKQAPRAWYECLRDFLIANAFKVGKVDPTLFTKTCDGDLFVCQIYVDDIIFGSTNKKSCEEFSRVMTQKFEMSMMGELNYFLGFQVKQLKDDTFISQTKYTQDLLKRFGMKDAKPAKTPMGTDGHTDLNKGGKSVDQKAYRSMIGSLLYLCASRPDIMLSVCMCARFQSDPKECHLVAVKRILRYLVATPCFGLWYPKGSTFDLIGYSDSDYAGCKVDRKSTSGTCQFLGRSLVSWNSKKQTSVALSTAEAEYVAAGQCCAQLLWMRQTLRDFGYNLSKVPLLCDNESAIRMAENPVEHSRTKHIDIRHHFLRDHQQKGDIEVFHVSTENQLADIFTKPLDEKM

SEQ ID NO: 291606 - protein, 100 aa, Zea mays
  Clone ID: MRT4577_29030C.1.pep
TTRRPLYTRGSPFCREGPRGQRPGSLRLLQALSFFGCGSSSQRGWRDTGHRATGEATTGARGSARVGGWVFFLSVSPNMGTRRRLKGGVCRVESWSLLTD

SEQ ID NO: 291607 - protein, 102 aa, Zea mays
  unsure (1)..(102): unsure at all Xaa locations
  Clone ID: MRT4577_29031C.1.pep
LYVCVCASAAGCRLGPVRTCLFLSLILSPFLSRVCVFVLIKMFLSSSSVHAWAVSSCMSIMCVSSCRSVRFDACCLHVCYYLVVCRVCLCLPGTGPRXHXHQ

SEQ ID NO: 291608 - protein, 116 aa, Zea mays
  unsure (1)..(116): unsure at all Xaa locations
  Clone ID: MRT4577_29032C.1.pep
GSATRSKDRGLWCQTLSTEEAIPNAMPGMNGKDLDGRDITVNQAQSXRAAGGGGGCGYGGGRGCSCYGSGGRRDGRGGYSGGGSYSGGEAXGGGGGGYGGGNLCGGYRTAXGNCRN

SEQ ID NO: 291609 - protein, 42 aa, Zea mays
  Clone ID: MRT4577_29033C.1.pep
RSLTVKTVSAVNPLLIGNFLVCLFIYWPLDFRIWQRGGFSCY

SEQ ID NO: 291610 - protein, 80 aa, Zea mays
  Clone ID: MRT4577_29034C.1.pep
MGRMHAPGKGLSQSALPYRRSVPTWLKLTSDDVKEQIYKLAKKGLTPSQIGVILRDSHGVAQVRFVTGNKILRILESKGL

SEQ ID NO: 291611 - protein, 117 aa, Zea mays
  Clone ID: MRT4577_29035C.1.pep
STHVLRLDRCAHDTNQKDNVYNGLFQDSGAYLEHRLAGVDRVQIKGLNAGTLDLTNNGWGHIVGLVGEQKQIYTDKGMGSVTWKPAVNDRPLTWYKRHFDMPSGEDPIVLDMSTNGQ

SEQ ID NO: 291612 - protein, 260 aa, Zea mays
  unsure (1)..(260): unsure at all Xaa locations
  Clone ID: MRT4577_29036C.1.pep
MAAAVHLRPLHSFAFPLPAVKAAPSWLPLQAKPGARRTGSRVALLVPSASAPAPASPSPSGKDGTTASAATKWVEWIPRAAAGAGSAVGPEQVLRLISGAAATPICQFVDSPRTFLHSVDPRVKLVWLLSLVVLPARSNIYMRFGLVVFLALISMWVLPNHVWKDQLGRVTLLSGFIFIMLGFGADGAPSLVQMRTPPPSVLGIPNIPCSTSXYSYTILKLGPLQFTRKGLSLASTSASLSFAIFQSASLCLTTTTPEQL

SEQ ID NO: 291613 - protein, 42 aa, Zea mays
  Clone ID: MRT4577_29037C.1.pep
FLSIFSLHILGPLSWFMFQGWRLLVLLWLARNCRKYRITEVK

SEQ ID NO: 291614 - protein, 156 aa, Zea mays
  Clone ID: MRT4577_29038C.1.pep
MSRSPHLPPRCPPLGPQITRRDDSMFTQSCRFPSGDTFFSEPPCWLDDLLADSGKAPKLPPLRRACSDSDAILDALSTFESPICRIEEGNQISGGEADDLLDAGEGGESGSVVEASCVYGPNSPRQKSRLTTSESSMVNAVLENDPATLAVLEHRC

SEQ ID NO: 291615 - protein, 80 aa, Zea mays
  unsure (1)..(80): unsure at all Xaa locations
  Clone ID: MRT4577_29039C.1.pep
APPEVAMHXLRDQGAPPLIEPAGGPPLRKTGKGGGPSMGGPSPIFGGRSPPHMRDPSRIRRYQALDAPEDEVPVLAYRRL

SEQ ID NO: 291616 - protein, 69 aa, Zea mays
  Clone ID: MRT4577_2903C.1.pep
FFGGANFKLFGAKDKTKPIAFLVGGQDFFLTRVYTDFFNWNTWGQGLPPKWWFYLPGKKQVRPLLNPPP

SEQ ID NO: 291617 - protein, 76 aa, Zea mays
  Clone ID: MRT4577_29040C.1.pep
PYKPSDCLVLMGDANSILGATVPADQQRAHLFMCNVIRDPRTYTLHTPDRHQILMALVLQPQSPCMHSCTSSWTLS

SEQ ID NO: 291618 - protein, 102 aa, Zea mays
  Clone ID: MRT4577_29041C.1.pep
PPGGGPGLNFKGGLFFLVVGGGGPPGPKKKLAPGPGGSFPNRGENPGGAPPPPPPNKLKRGPNWVGKKKKKKKKKKKKKKKKKKKKKKKKKKKKKKKKKKKK

SEQ ID NO: 291619 - protein, 48 aa, Zea mays
  Clone ID: MRT4577_29042C.1.pep
LNLGCFFYACGDLYLQHAPQRKSVQTEFEEIAKKHLTLSLKGLYARLN

SEQ ID NO: 291620 - protein, 60 aa, Zea mays
  Clone ID: MRT4577_29043C.1.pep
ITVDIVAWVTREIASYSHLFTPEIGCSVLPLVLLNEARREVQTSARLRVKSLWYPLSSPP

SEQ ID NO: 291621 - protein, 139 aa, Zea mays
  Clone ID: MRT4577_29044C.1.pep
HKRVTFSMLARRCFVPVLPSATRAHSRYLLGQGLLLPICSSDTVETAVAVVPGPARRRGWLRKLIPTNYLPRSSWCWRLTVLSATGASRFASSLSRFLRRKRRSNHPVRLLHAHLRRVPPPPRFATRARSSLGHHSHTP

SEQ ID NO: 291622 - protein, 62 aa, Zea mays
  Clone ID: MRT4577_29045C.1.pep
WLPNILPIMPLFFLQVLLRLAFFLMFTSSYSFPLSPIPLTSDFLLYVKNQFFLLLLDPTFNL

SEQ ID NO: 291623 - protein, 66 aa, Zea mays
  Clone ID: MRT4577_29046C.1.pep
LIIGPGERTRNSHQPPGGANNQPRGKHQANPKATRLFQVTGGEPSPPGETQGRPRRRLRGAGGPPP

SEQ ID NO: 291624 - protein, 53 aa, Zea mays
  Clone ID: MRT4577_29047C.1.pep
WHSGTNQHCEMVYAFNRHCERAKRARRRKLLASSDCTVLRSSLRTCALLICIV

SEQ ID NO: 291625 - protein, 67 aa, Zea mays
  Clone ID: MRT4577_29048C.1.pep
PPPVGFHSRIKFTCVNNENGGVCPKKFNVFGNWQRYYSKENILTPLKKKMTLPHNPKIVYLSEGTFF

SEQ ID NO: 291626 - protein, 50 aa, Zea mays
  Clone ID: MRT4577_29049C.1.pep
NCRIDPCVRGRDVNQQKYALITSIILITLSCTGQYNLFCPPHSFIARVHT

SEQ ID NO: 291627 - protein, 118 aa, Zea mays
  Clone ID: MRT4577_2904C.1.pep
MDPKGKGIVINDKEKESFVNEPRDDKSNDSGSGHKRRDGKKKKTRRIKEIVYYDDSDESTSSQKDNDHNDYEQRKPVNSNFSFDYSRIPQSSNSHLLSIPLGKPPHFDGEDYRFWSHK

SEQ ID NO: 291628 - protein, 43 aa, Zea mays
  Clone ID: MRT4577_29050C.1.pep
VAGLKQPLRICGGDLPWFIPSPDPLMLDLRHRHSVYPILVSTR

SEQ ID NO: 291629 - protein, 80 aa, Zea mays
  Clone ID: MRT4577_29051C.1.pep
HLLPCMRRMWPTMALGRIKLVAAGVHKEEETPGSWLWPRQEDWRLALPGFLARAFSSPLGQPTCGQHCRNLNRRARLRVT

SEQ ID NO: 291630 - protein, 156 aa, Zea mays
  unsure (1)..(156): unsure at all Xaa locations
  Clone ID: MRT4577_29052C.1.pep
MWWWWSTEGNISKGPIFRDTTRGAGGGTGVRGKXMAGNFLAAGYVLTVLNGTDSKTKGLVSGGASLGDSPGAAAGVADVIFLMVGFPSDVGSTALDHSKGAFFGLTQGGFLVDMTTSDPTLAAEIAGAAAAAGCWAVNAPVSGGDRGAGKATFSIL

SEQ ID NO: 291631 - protein, 140 aa, Zea mays
  unsure (1)..(140): unsure at all Xaa locations
  Clone ID: MRT4577_29053C.1.pep
PRVLVVPGFSGSISVRGVLVPVFPVGCLDLARPFGPVVVLPAHVAPARVRVRVLGSVLVVRPVLVCCSGFLGGCCGVGSWSVRAPRDSLYPSCSLSCRIGCSGPSCGWSSCVLCFVPSRPRAPLCCSPGLCNIKKNGXRS

SEQ ID NO: 291632 - protein, 110 aa, Zea mays
  Clone ID: MRT4577_29054C.1.pep
VVSSDVAEFVELGQGVSVFLGDPKNFVPSEIQSTSRFRIPLATEQSTPVYRNQRLPPGWENYDGWVGSEKSKSKFLIDFLHIDKKINHGGILNQQYKNQSINKQDKILIK

SEQ ID NO: 291633 - protein, 70 aa, Zea mays
  Clone ID: MRT4577_29055C.1.pep
PSLDYAANGKGSKGRWCIPAVNRSKSHYGLLSASTVVGLRPCRMKAGSLSRQYTCYGCMIEPGYLRKIVL

SEQ ID NO: 291634 - protein, 50 aa, Zea mays
  Clone ID: MRT4577_29056C.1.pep
SATSFLFRQAWWTISCVKSLSYPTLFSKLCKKDCISSFSKQCLRETLGKH

SEQ ID NO: 291635 - protein, 272 aa, Zea mays
  Clone ID: MRT4577_29057C.1.pep
HEVFVWMGQCVETKEKQKAFDIGQKYVQNAVAFEGISPDVPLYKVNEGNEPCFFRTFFSWDSTRSLVHGNSSHASVSVLFGMRSEGGNKSSGDGGPTQRASALAALSSALNPSSQGKQSDERPTKPSSTQAQSHSGQGSQRAAAVAALSNVLTAEGSHSPRHSRSSPTADAEKTELAPASPHQLETGPAEDVRTEPDVSQEQTANENGGQTTFSYDRLVSKSTDPVSGIDHKRRETYLVDNEFETVFGMTKEEFYEQPRWKQELQKKKADLF

SEQ ID NO: 291636 - protein, 639 aa, Zea mays
  unsure (1)..(639): unsure at all Xaa locations
  Clone ID: MRT4577_29058C.1.pep
MSTRITQVIQGYENHTFKSKFESWPVSNTSGSASTEEGRGKVTALLKQKGVDVKGISKTSVPVNDEVPPLLDGGGKLEGWCIDGSTKTALPKEELGKFYSGDCYVVLYTYHSADKKEEFYLAYWIGKNSVQEDQEAAFQIANTTFNSLKGRPVQGRMYPRKEPPQFVAIFQPMVILKGGTSSGYKKFVEEKGLKDETYCSDGTALIQISGTAVHNNKTLQVDAVATSLSSTDCFVLQAKNSMFIWNGNASSFEQQQWAAKVAEFLKTGVAVKHCKEGTESSIFWSSIGGKQSYTNRNAAPDVVIREPHLYTFSLRNGKLEVTEIFNFSQDDLLTEDMMILDTHCEVFVWMGQCVETKEKQKAFDIGQKYVRHAVAFEGISPDVPLYKVNEGNEPCFFRTYFSWDSARSVIHGNSFEKKLSVLFGMRSEGGNKGSGDGGPTQRASALAALSSALNPSSQGKQSDEKPTSSDDSEHTQRASAMAALSSALNPSTKPSSTQAQSHSGQGSQRAAAVAALSNVLTAEGSHSPRHSRSSXHQMQTRLNXPTSPHQLETGTAEDVRTEPDVSQEQTAKENGGQTTFSYERLISKSTDPVSGINNKRRETYLVDSEFETVFGMTKEEFYEQPRWKQELQKKKADLF

SEQ ID NO: 291637 - protein, 63 aa, Zea mays
  unsure (1)..(63): unsure at all Xaa locations
  Clone ID: MRT4577_29059C.1.pep
ASPAWEVVFGVFCKMFVRTEFFWFLIKXVLSAKRLFANMXXVGVVSHKRXSLTLVVPNFPREQ

SEQ ID NO: 291638 - protein, 498 aa, Zea mays
  Clone ID: MRT4577_2905C.1.pep
MDPKGKGMVINDKEKETFVNEPNDDKPTDSGSGHKRKDGRKKKTRRIKEIVYYDSDESSSSQKDDDDHDRRKTIHKNAQATTVLLASLCRDEYHKVSGLDNAKQIWDTLKISHEGNDVTLLTKMELVEGELGRFAMIRGEEPTQTYNRLKTLINKIRSYGSTRWTDHDVDRLMLRSFTVLDPHLVNNIRENPRYTKMSPEEVLGEFVSGRMMIKEARYVDDALNGPINEPQPLALKATRSKEALPSKVAQIEAAGLNDEEMALIIKRFKTVLKGRKGQPSKTKAKGKRSCFKCGKLGHFIANCPDNDSDQDQGNKREKKKNYKKAKGEAHLGKEWDSDCSSSDSDNEGLAATAFNKSSLFPNERHTCLMAREKKDKSETQGTLKRFLRRAQNEFELKVKKIRSDNGSEFKNLQVEEFLEEEGIKHEFSAPYTPQQNGVMKKMFRRPLYEPWRLEKCGHRNKMNEINLLPQQQCIPQLKTMNRFIKRRRVIKGEHKMIT

SEQ ID NO: 291639 - protein, 97 aa, Zea mays
  Clone ID: MRT4577_29060C.1.pep
MATSAALSTAANPTQLCRSRASLGKPVKGLGLSIGRERAHRSIACQEESSIYGDRLPDMETRNLMKVIPYCNNDVDAGGAATANLNIRTHRRGCPLR

SEQ ID NO: 291640 - protein, 61 aa, Zea mays
  Clone ID: MRT4577_29061C.1.pep
YVYSYSTDRRKHRSYMYANRKAQRIKILYHITCFKCLGPTTIYFYKFLSHRNRRSIKRDPQ

SEQ ID NO: 291641 - protein, 85 aa, Zea mays
  Clone ID: MRT4577_29062C.1.pep
VPCYRHGCQEQQPGRHEGRFLGAGTLTNGGFSGERADLVCEFNVLSFNFLTKTKKRSCYISLRIYTYGKIQIYTCSVLEGNHVRY

SEQ ID NO: 291642 - protein, 66 aa, Zea mays
  Clone ID: MRT4577_29063C.1.pep
PPPGCSKHYSPRGGHSHRATAVLGPPRPLPRRRHRCRSPFRVHRPTTSSSLDGANRHNTGQAAFSS

SEQ ID NO: 291643 - protein, 177 aa, Zea mays
  unsure (1)..(177): unsure at all Xaa locations
  Clone ID: MRT4577_29064C.1.pep
MMLPSTMVAVTTLHTTLHMTGHPITALPVTGVLTTDTMDTTSPTGLSTSSSTRASTPPSXKLINKYDDLVETXTAPRPTTPSLLPQTRPSRRSPITVATPRRRFSRTSSCTTSALTSTLPAVCSTATPSRLSSSPRSSATSSAXTXASLSRAPPSTSTASSSQSTSSAPRRRARRRL

SEQ ID NO: 291644 - protein, 105 aa, Zea mays
  unsure (1)..(105): unsure at all Xaa locations
  Clone ID: MRT4577_29065C.1.pep
KKQKNGEKKTKKPGKQKTLHKLAGDHWGPGGGGKEGKXKGPRGPGPPGRPXPAGPXGGGATGAPGSPGGGPGRPGCGDPQPGTGPRGAPGSPAGGPTPRGPRGKR

SEQ ID NO: 291645 - protein, 109 aa, Zea mays
  Clone ID: MRT4577_29066C.1.pep
LGAAHTHGRRFPSPWILLPATCVAQQPPVQGPALLLCLFRTGVRPAPCRDGLSLLPPLNIAPTARLRDAAHTQAILPGLLQEGLTSVPMSSPRTTSLTTLKCKEIGQEL

SEQ ID NO: 291646 - protein, 69 aa, Zea mays
  Clone ID: MRT4577_29067C.1.pep
MVTSRVQPIKLARVTKVLGRTGSQGQCTQVRVEFMDDTSRSIIRNVKGPVREGDVLTLLESEREARRLR

SEQ ID NO: 291647 - protein, 263 aa, Zea mays
  unsure (1)..(263): unsure at all Xaa locations
  Clone ID: MRT4577_29068C.1.pep
MLLLKIFTALFFYITSIVSAADTSAWKSRSIYFVLTDRIARSSSDTGGSACGDLGNYCGGTFKGLESKLDYIKGLGFDAIWITPVVSNKAAGYHGYWAEDLYAVNSNYGTAADLKSLVAAAHAKGIYMMVDVVANHMGPGAITNNRPEPLNQASSYHTACNIDYSNQNSIEICQIAGLPDINTTKSEIRTLLNTWVNWLVKEYSFDGVRIDTVKHVEKDFWPGFSAATGVYSIGEVFDGXPTYLAEYAKLMPGLPHYAVYYPM

SEQ ID NO: 291648 - protein, 107 aa, Zea mays
  unsure (1)..(107): unsure at all Xaa locations
  Clone ID: MRT4577_29069C.1.pep
ARVLAKVQGTTTKAPMLRVANQSPIALIKNPVPHGQSKHIQVKSPFVREXFKKKXLINVKFFRREDQLSAFLTKPLGKTKFLKLRSKIGLINVQQRAPQGLGGKCKK

SEQ ID NO: 291649 - protein, 1669 aa, Zea mays
  Clone ID: MRT4577_2906C.1.pep
MDPKGKGTVVNNNEKESIFNEPKDDKPTDSGSSHKRRDGKKKTRRIKEIVYYDSDESSSSQKYDDDYEKKKTVNSNFSFDYSRIPQCAYAHLLSIPLGKPPHFDGEDYGFWSHKMRSHLFSLHPSIWEIVESGMKFDSSNSPLFINEQIHKNAQATNVLLASLCRDEYHKVSGLDNAKQIWDTLKISHEGNDVTMLTKMQLVEGELGRFAMIRGEEPTQTYNRLKTLVNKIRSYGSTRWTDHDVVRLMLRSFTVLDPHLVNNIRENPSGRMMIKEARYVDDALNGPIQEPQTIALKATRSKEALPSKVAQIEAAELNDEEMALIIKRFKTALRGRKEHPNKTKTKGKRSCFKCGKIGHFIANCPDNDSDLEKKSGKWEKKKNYKKAKGEAHIGKEWDSDCSTSDSDNEGLAATAFNKSSLFPNEHHTCLMAKEKKGLDRSKIDKINELIDALNDKNRLLEKQEDLLYEERDKFVSAQNSLALEIKRNEMLSCELSTCHESISNLRSVNDDLNAKLEIASKSNSCVENVVTCTRCKDINIDACSEHLARISKLNDEVASLNAQLKTSKSDFNKLKFARDAYTVGRHPSIKDGLGFKREAKNLTSHKAPIPAKEKGKAPMASSAKKNHAFMYMIGDMLEMQIEVMMLLIHMFMILMPCLLLVLPISMIEICLGEMLFTLRRRNVVNVPRKVNGPSTIYHALNASIAICRKDKKIVARKLGAKCKGDKTCFWVPKDICANLVGPNMSWVYASGGSSWIIDSGCTNHMTGEKKMFTSYVKNKDSQDSIIFGDGNQDKVKGLGKIAISSEHSISNVFLVELLGYNLLSVSQLCNMGYNCLFTNVDVSVFRRSDGSLAFKGVLDDKLYLVDFAKEEASLDACLIAKTSMGWLWHRRLAHVGMKNLHKLLNGEHVLGLTNVTFEKDRPCATCQAGKQVGSAHRSKNVMTTSRPLELLHMDLFGPVTYLSIGGSKYGLVIVDDFSRFTWVFFLQDKTETQGTLKRFLRRAQNEFELKVKKIRSNNESEFKNLQVEEYLEEEGIKHEFSAPYTPQQNGVVERKNRTLIDMTRTMLGEFKMPERFWSEAVNTACHTINRVYLHRLLKKTSYELLTGNKPNVSYFCVFGSKCYILVKKGRNSKFAPKAVEGFLLGYDSNTKAYRVFNKSSGLVEVSSDVVFNETNGSPREQVVDLNDVDEEDVPTTTIHTMAIGDVRPQEQKEQDQPSSSTMVQPPTQDDEQVHQEEACDQGGAQDDHVMEEEAPQAPPTQVRATIQNHPVDQILGDISKGVTTRSRLVNFCEHYSFVSSIEPFRVEEALLDPDWVLAMQEELNNFKRNEVWTMVPRPKQNVVGTKWVFRNKQDEHGVVTRNKARLVAKGYAQVTGLDFEDTFAPVARLESIRILLAYAAHHSFRLFQMDVKSAFLNGPIKEEVYVEQPPGFEDERYPDHVCKLSKALYGLKQAPRAWLGKADPTLFTKTCDGDLFVCQSYVDDIIFGSTNQKSCEEFSRQLKDDTFISQTKYTQDLIKRFGMKDAKPAKTPMGTDGHVDLNKGGKSIDQKAYRSMIGSLLYLCASRPDIMLSVCMCARFQSDPRECHLVVVKRILRYLVATPCFGIWYPKGSTFDLIGYSDSDYAGCKVDRKSTSGTCQFLGRSLVSWSSKKQTSVALSTAEAEYVAAG

SEQ ID NO: 291650 - protein, 49 aa, Zea mays
  Clone ID: MRT4577_29070C.1.pep
EMHCSGCRVFIGANGVHFFVMLAVRDAALIARVYPYWVMDWPHHHLLQM

SEQ ID NO: 291651 - protein, 207 aa, Zea mays
  Clone ID: MRT4577_29071C.1.pep
MVSLKVPKRLAASVLKCGKGKVWLDPNEVSEISMANSRHNIRKLVKDGFIIKKPQKIHSRSRARRAHEAKQKGRHSGYGKRRGTREARLPTKVLWMRRMRVLRRLLRKYREAKKIDKHMYHDMYMKVKGNSFKNKRVLMESIHKSKAEKAREKTLSDQFEARRAKSKASRERKNARREERLAQGPREIPPPVSATAPTTGAPKKAKK

SEQ ID NO: 291652 - protein, 90 aa, Zea mays
  unsure (1)..(90): unsure at all Xaa locations
  Clone ID: MRT4577_29072C.1.pep
NFFFFFCFFFKGENFLNFFKFGGRLNFFLKGQFFLLGSFFKIHGPGFYNFLIGKTLAYPNXFALQQIPFLPVGVKGKRPPPFTFPKICTP

SEQ ID NO: 291653 - protein, 244 aa, Zea mays
  unsure (1)..(244): unsure at all Xaa locations
  Clone ID: MRT4577_29073C.1.pep
MMILALAAVLLATAARQPSPVMSTTTTNLTLHNLCPYPVWPLVTANAGNPSIXPTPTASRRGGWTATARAWRXLAFPPGAWSGRVVARTGCTGGDDNDEADAYDPLLPTPPLRCTTGDAPPVTVAQVSVGGTGGAAAYSVSLVDGFNVAVVVTPHGMPPEGAGPRRRCPTLGCAVDLGAECPPRARAPGGGCGAGATEAALFKHLCPDTRTNATDIEDTPQDCVDPGEIKVVFCPKPGSVSRQL

SEQ ID NO: 291654 - protein, 89 aa, Zea mays
  Clone ID: MRT4577_29074C.1.pep
SVSDMLSLCKKVRVTSNLAEKLFCLVRVLHHFAPQELADRHFSSDLTNDDATARCPIRKPIPSVLMPTMKNLHLLPNKVSLARAEFRAY

SEQ ID NO: 291655 - protein, 49 aa, Zea mays
  Clone ID: MRT4577_29075C.1.pep
GGVGDDIPDLARSISNRFIKMIWTKGGREKAGDEARSHLEPDDEAEGDT

SEQ ID NO: 291656 - protein, 80 aa, Zea mays
  Clone ID: MRT4577_29076C.1.pep
VVGGVVGVDVDAGRHAVQAVEECLLVAVGAPHLDVEFFAVPDARGIAPWSARAETREREMEGTERVVVALLVLKGIPGQA

SEQ ID NO: 291657 - protein, 110 aa, Zea mays
  Clone ID: MRT4577_29077C.1.pep
LVFRCHYRILMPCHARVRILGIGLDRSTSSMVANTFMRCPTSAGPPGPCSPSLTSALTPAGSPAALGRSRAPPSVSTYVFVCISSARVLRLRLVVRRQKNLLMYPPKYSQ

SEQ ID NO: 291658 - protein, 73 aa, Zea mays
  Clone ID: MRT4577_29078C.1.pep
LTCHEETSAMEPGLRYSMGSAQSPSAGCSNGVRSLNGRASSGADRDDTCNCLLRMTDRFEGGVSMANADNIPG

SEQ ID NO: 291659 - protein, 229 aa, Zea mays
  unsure (1)..(229): unsure at all Xaa locations
  Clone ID: MRT4577_29079C.1.pep
MACSTAARRHRRPLFTILVALSLLQVSAMIVPLDEQEGDRVGLLPGQPRSPAVSQFSGYVTVNERSGRALFYWFFEAQTSPAEKPLVLWLNGGPGCSSVGYGAASELGPLLVNSNGTGLEFNKFAWNKEANLLFLESPXVGVGFSYTNTSSDLKNLDDRFVANDTYTFLVNWFNRFPQYRXHDFYISGESYAGHYVHSFAXVVYEHNKHLEAKQRIHLXKGFIAGNAXD

SEQ ID NO: 291660 - protein, 1014 aa, Zea mays
  Clone ID: MRT4577_2907C.1.pep
MDPKGKGMVINDKEKESFVNEPNDDKPTDSGSGHKRKDGRKKKARRIKEIVYYDSDESSSSQKDNDDYDRRKTVNSNFSFDYSRIPHSSNAQLLPIPLGKPPHFDGEDYGFWSHKMCTHLFSLHPSIWEIVESGMKFDSSDSPMFINEQIHRNAQATTVLLASLCRDEYHKVSGLDNAKQIWDTLKISHEGNDVTLLTKMELVEGELGRFAMIRGEEPTQTYNRLKTLINKIRSYGSTRWTDHDVVRLMLRSFTVLDPHLVNNIRENPRYTKMSPEEVLGKFVSGRMMIKEARYVDDALNGSINEPQPLALKATRSKEALPSKVAQIEAAGLNDEEMALIIKRFKTVLKGRKGQLSKTKAKGKRSCFKCGKLGHFIANCPNNDSDQDQGNKREKKKNYKKAKGEAHLGKEWDSDCSSSDSDNEGLAATAFNKSSLFPNERHTCLMAREKKVSTHNTSTYASSSEDESSDDDEIDYSCLFKGLDRTKVDKINELIDALNDRNILLEKQEDLLYEEHDKFVEAQKSLALEIKRNEMLSSELSSCHETIAKLKSFNDDLNAKLEVATSLNAQLKTSKNEFDKLKFARDAYTIGRHPSIKDGLGYKREAKNLTSHKAPISAKEKGKAPMATSTKKNHAFLYHDRRQSRSAYRGYNAYDDFDSHHMIASSSSYMHGRNMSRRNAIHHVPRKNVSHASRKVVNEPSTIYCALNASFAIRRKDKKIVARKLGAKCKGDKTCIWVPKDICTNLVGPNMSWVYASGGSSWIIDSGCTNHMTGEKKMFTSYVKNKDSQDSIIFGDGNQGKDKSETQGTLKRFLRRAQNEFELKVKKIRSDNGSEFKNLQVEEFLEEEGIKHEFSAPYTPQQNGVVERKNRTLIDMARTMLGEFKTPECFWSEAVNTACHAINRVYLHRLLKKTSYELLTGNKPNVSYFRVFGSKCYILVKKGRNSKFAPKVVEGFLLGYDSNTKAYRVFNKSSGLVEVFSDVVFDETNGSPREQVVDLDDVDEEDVPTALYESW

SEQ ID NO: 291661 - protein, 83 aa, Zea mays
  Clone ID: MRT4577_29080C.1.pep
DKRISSCSGTGRGGKTPQEKHKQRELAIRRETSGKKSHPPDGGPALEHSKRARLQLNSAVPVEFAIHGWLLCSWRRKNRRECA

SEQ ID NO: 291662 - protein, 85 aa, Zea mays
  Clone ID: MRT4577_29081C.1.pep
MVSATTEAEVRESLGTKFGRLKEQAKDMASRHPVAGAAGVIAVSAVGAYFLWPVAAPAVVMMKETGSGGGNGSRASFLWTNDVYF

SEQ ID NO: 291663 - protein, 140 aa, Zea mays
  unsure (1)..(140): unsure at all Xaa locations
  Clone ID: MRT4577_29082C.1.pep
ASAGSGGHAXMQTIYTYRSIREASRWPSNYFFFFXXXXXXFGGGGGXXXXXXLLLLPGGGATPRGALPNXVRAXRVLAARRPRGPLLLPLLQALLRGGSFAAIFFLFCLFDGVLDLLGRVIPLFGLFFVGANKKLLVLAA

SEQ ID NO: 291664 - protein, 44 aa, Zea mays
  Clone ID: MRT4577_29083C.1.pep
SILNQDSRYLPYEETSNRLYFECCLVRSDWCIFYMTIRYHPSHN

SEQ ID NO: 291665 - protein, 138 aa, Zea mays
  Clone ID: MRT4577_29084C.1.pep
MGLYRNEWAEALGIEISSPRAKDGTMVVNRRTGFSNGKLMPSLSFKLWEAEAVVASMDHDGRASECLRDSVPELVFMASPTTTPSPRVSSSPKCELDAAAVKLQKVYKSYRTRRNLADCAVVIEELWGKALDFASLST

SEQ ID NO: 291666 - protein, 106 aa, Zea mays
  Clone ID: MRT4577_29085C.1.pep
GTKTGGEKGKSPKTKGFPLKKTFGPGAPNKAKAHWETQIMPQSFKFLDENILLNTGGYTSGEKIFVQIRDNKRDMLLKGKTPILMENWQTQTCFWRRKKKGGGAPK

SEQ ID NO: 291667 - protein, 113 aa, Zea mays
  Clone ID: MRT4577_29086C.1.pep
GPPLVPGPLGPFFWVPGFQKIPCFFLIAHLRFWRGTNTVLVVFSQPPFFLGTVLGPQGGFFFPIPPPWGFGPTGFFPPPHFSVCLMAPGGSVFQKFLFPPGWGPPFFLNPFFF

SEQ ID NO: 291668 - protein, 104 aa, Zea mays
  Clone ID: MRT4577_29087C.1.pep
YFFITYYSVYLIFFRVCSFFLFFFFFFFFFFFFFFFFFFNLRNVPFFCETQRYKPNKKEEEEEEKQGMADFTNGTISTPRTNPARAAPIQRARHQPPRHHPSIP

SEQ ID NO: 291669 - protein, 87 aa, Zea mays
  unsure (1)..(87): unsure at all Xaa locations
  Clone ID: MRT4577_29088C.1.pep
SAQTHTTTITTKCSQTPIASLLTPYLSPSMPSILXNPIIQPYKIQLAISAIILPISPSLLQQSSTILHQLPLVHILTHNIKAQPLPQ

SEQ ID NO: 291670 - protein, 73 aa, Zea mays
  Clone ID: MRT4577_29089C.1.pep
MAASMISSSALAVAPLGLTPLGRRASSFTVVFAKKMIYTDKPYVIVGWPDRRRRRQRVLGVKAMACTISSSST

SEQ ID NO: 291671 - protein, 35 aa, Zea mays
  Clone ID: MRT4577_2908C.1.pep
TSNLRLSSRVHFSWFFMHVVGPPQIGFSTTIRKHR

SEQ ID NO: 291672 - protein, 91 aa, Zea mays
  Clone ID: MRT4577_29090C.1.pep
GGKKKHLQALLGSILNYWSKKKVSRNGRGLAYRDLNPEQIFAMGWPTDRYIMGGLHGHAGFTWDQVGHQRACHQHSLLDAGSQRTSCLAHD

SEQ ID NO: 291673 - protein, 560 aa, Zea mays
  Clone ID: MRT4577_29091C.1.pep
MAALQSWRKAYGALKDTTTVSLANLNSDFKDLDVAIVRATNHVESPPKERHLRKIVAATSIARPRADVTYCIHALARRLAKTRNWIVALKTLVVIHRLLREGDPAFREEFLTFTQRVRILQLSNFKDDSSPVAWDYSSWVRTYGLFLEEKLECFRVLKYDIEAARLSKQGQGPEKGHSRTTELNSQDLLEQLPALQQLLYRLIGCRAEGVAKNNYLVQYALAQVLKESFKIYCAINDGIINLIDKFFEMPKHEALKALDVYKRAVHQAGNLSDFYESCQGLELARNFQFPTLREPPQTFLSTMEEYVKEAPRMMPVVEPLELPERLLLTYKPEEEVRDTVPIVAEKLQVVEEIAPVPSSQIALPPKPEIADTGDLLGLGDSTPTVLAIEESSALALAILPTGIDNSTTTTQQDSGFDPTGWELALVTTSSNAIPLSMESNLGGGFDKLTLDSLYDDGTYRQMQQQQLYGSAPPNPFMASDPLAVSNQVAPPPSVQMAAMATQPQHLPMMIEPNPFGPPQQHHAGVAPAANPFLDAGFGAFPAVNGMHPQTNPFGGAAQLL

SEQ ID NO: 291674 - protein, 83 aa, Zea mays
  Clone ID: MRT4577_29092C.1.pep
MLQAGNLSDFYESCQGLELARNFQFPTLREPPQTFLSTMEEYVKEAPRMMPVVEPLVISWALVNHLDFCMTPSHFITSSSLNV

SEQ ID NO: 291675 - protein, 95 aa, Zea mays
  Clone ID: MRT4577_29093C.1.pep
PTLPAATTDRRAPPSPTPEAPSRVTPSRPPSPRTALSAPTRRPRRRRSPAKASKSPPTPAKTAGRRPRYKSLLRGVDHEKKAHRTKTPLKVCRHK

SEQ ID NO: 291676 - protein, 47 aa, Zea mays
  Clone ID: MRT4577_29094C.1.pep
KHPVYHKGGSLMTLSGTLIQAMWKINHLHVGQWTLLCMSASILSTAP

SEQ ID NO: 291677 - protein, 35 aa, Zea mays
  Clone ID: MRT4577_29095C.1.pep
DDAVECLHQRLSVNACKPSYTRCSSLDIGLPSLQN

SEQ ID NO: 291678 - protein, 40 aa, Zea mays
  Clone ID: MRT4577_29096C.1.pep
IYNVQSISFSQIINHCNIAPSKKSPWRLKSSYKVALSLCQ

SEQ ID NO: 291679 - protein, 71 aa, Zea mays
  Clone ID: MRT4577_29097C.1.pep
ILRDLLGGHIMLPVRSVIDRFPYKPGSCVHVFIPRCYRCSTGIVPSPPVFLGFYIHAAPSQFLLSYGADDT

SEQ ID NO: 291680 - protein, 44 aa, Zea mays
  Clone ID: MRT4577_29098C.1.pep
APQVHGLRLRRQPGMTDLLLDGDRIYLTHSLLSRWDQPFFGDDL

SEQ ID NO: 291681 - protein, 139 aa, Zea mays
  Clone ID: MRT4577_29099C.1.pep
IKTHTEFRRQHDYSHGETCEDRIVGWRPRRSAGSEGYSGQDDRRERHCGQPAGCNRSISFINIGADAKAYEEGPKGFSQAATRYNIDLCKFHYSLTEISGTTGQTHNIDDLVKSQKCVTTKAATERIARTKAARSVSKK

SEQ ID NO: 291682 - protein, 256 aa, Zea mays
  unsure (1)..(256): unsure at all Xaa locations
  Clone ID: MRT4577_2909C.1.pep
MADMAKSGPAVMAAAGGRKQRSSRLQAHVPSWDSERALSHDVKTTRPCSIPRTARARTTAASRTTRPVALTLRQDKRHLWQAKQATLPLRHNDRVKKGKQRRLRCSDCCATRQGEADXSSRLASGAKGSSASPNPRARTPPRKTDSASADPRARTQPRLRKAVSASPDPRAWTPPRPRKTDSASPDPRARTQPRLRKAVSASPDPRARTQPRPRTTVSASPDPRARTQPRPRRSLCLARPRAHTDHVTGGPSLPYP

SEQ ID NO: 291683 - protein, 194 aa, Zea mays
  unsure (1)..(194): unsure at all Xaa locations
  Clone ID: MRT4577_290C.1.pep
MRECISIHIGQAGIQGGNACWELYCLEHGIQAEGQMPGDKTIGGGDDAFNTFFTETGAGKHVPRAVFVDLGPTVIGEVRTGTYREVFHPEQLISGKEEAANNFARGHYSIGKEIVELCLERVRKLADNCTGLQGFLVFNAXVGGGTGSGLGSLLLERVSVDYGKKSKRWFTVYPSPQGSTXSGGEPYNSGLCTH

SEQ ID NO: 291684 - protein, 174 aa, Zea mays
  Clone ID: MRT4577_29100C.1.pep
MLSSDHPSGPSCSSQSVVRGVGADPATFHAADSPELAHQDPADLVQPCPTFSIRDYVFDSRSKGIKRSWPFHPQSLELCLKRGVKDLLPPFEPPDLLRSRSFYTCVDSEQSAACLEADAFVDLVKAREAGLTNVNTTGINLQSCQSADESLWSSQYTPTEGGKTATDQGGNINE

SEQ ID NO: 291685 - protein, 60 aa, Zea mays
  Clone ID: MRT4577_29101C.1.pep
VFSSSPCPSVSYDGRPCTTACLLATSATHNARHGSSVLLRRLDCPVSSTRSLIMSSRPLD

SEQ ID NO: 291686 - protein, 73 aa, Zea mays
  Clone ID: MRT4577_29102C.1.pep
KSKGHPHEDLPDENAKPNKGPPSKVSPIDKNHSPLLFAPKQKVRLQVKIGKRYQFINCHVGGARILVTVPPTN

SEQ ID NO: 291687 - protein, 202 aa, Zea mays
  Clone ID: MRT4577_29103C.1.pep
PLGRGTLWWPCQRGCARRRTPRRDGGFTRVLHSGKPDGLMDEIPTFVVDPLPAGKDHGYVVLNRPWAFVQWLQKAKIEEEYILMAEPDHIFVKPLPNLAHDDDPAAFPFFYITPSEHEKIIRKYYAKERGPVTDIDPIGNSPVIIKKTILEKIAPTWMNVSIQMKEDEETDKVFGWVVEMYAYAVASALHGVHHILRKDFMI

SEQ ID NO: 291688 - protein, 149 aa, Zea mays
  unsure (1)..(149): unsure at all Xaa locations
  Clone ID: MRT4577_29104C.1.pep
LGGKKKFLGVGGPLKGQTPPIFNPQVMEALGPPGVFIKVGRGPPVDKPQMVGAFGDGGFGGPGLDVFXENPNVPEGLLGMDKVVFFPPVGRGPPKTGKAMAPLVLGNLGGPVPPKPLLTPVVCRSPVFFSKKQAPPPSTEWGFNSKVFF

SEQ ID NO: 291689 - protein, 375 aa, Zea mays
  unsure (1)..(375): unsure at all Xaa locations
  Clone ID: MRT4577_29105C.1.pep
MDAAVRKAAGAGIARAPALVLALVAAGAFLISYNFFTMLFHGGGGIGAAVTAGTRDPVVAMPAWMRAAADTEARRRPFHVALTATDAPYSRWQCRVMYFWYKRMQARPGGEAMGGFTRVLHSGKPDGLMDEIPTFVVDPLPAGKDHGYVVLNRPWAFVQWLQKAKIEEEYILMAEPDHIFVKPLPNLAHDDDPAAFPFFYITPSEHEKIIRKYYAKERGPVXDIDPIGNSPVILRRQXLEKIAPTWMNVSIQMKEDKETDKVFGWVLEMYAYAVASALHGVHHILRKXFMIQPPFDTKLQNTFIIHFTYGCDYSLKGELTYGKVGEWRFDKRSFPDRPPPRNLTLPPPGVPESVVTLVKMVNEASANLPRWDDGI

SEQ ID NO: 291690 - protein, 742 aa, Zea mays
  unsure (1)..(742): unsure at all Xaa locations
  Clone ID: MRT4577_29106C.1.pep
GPAKVEAVVSWPTPTNSKELRGFLGLTGYYRKFVQNFGVIAKPLTALLKKHVVFFYEHRIXTAFALLKSAXLSSAPVLGLLDFTKQFAIETNASRAGVGAVLLQNNHPLAYVSKPLGVKNMGLSAYEKENLAILLAVNHWRSYLQHGTFLIFTNQXSLTHLNEQRLKTPWQXCVFTKLLGLQYQVVYKQGSANRAVDALSRCPHSPLSLNAISVGTLQWLSNVVVGYHQDSHALXLLADLSNSSTTDGPYKLXEGIIRYKGRIWIVHNPTLQQQIIFSLHDSSVGHSGFPVTYSRLKHLFAXPAMKYVVRQYVYSCDICSRAKSDRSQYPRLLQLLQVPSHAWQVLSLDFIEGLPKSGKFDCIVIVVDKFSKFAHFIVLAHPFTAYKIAQVFLDSIYRLHGMHSAIISDRDRIFTSAFWQGLFKLSGTELRMSTSYHSQTDGQMARQRGVNQCLETFLRCFVSSQPSQWSKWLPLAEYWYNSSFNSSLGKSPFEVLYGYHPHHLGISTVDAIPLSDLQSWLXQRELMTHDVRHHLLCAQQRMKPQADKRLSERVFAVGDMVYLKLQPYIQNSVATRANHKLSYIYFGPYKVLQRVGSVAYRLQLPSSPSIHPVFHVSQLKPSVKSSILVSXLLYLIHVLDRRSFSWGGHNVDQXFECXWSGYDAALDTWEDEAALRQRFPSAAAWGQTPSYGGGLSASLGTVRREAGVVVGHGWVGVGSSHQESQCQVSRRGLGGIIGRPTL

SEQ ID NO: 291691 - protein, 107 aa, Zea mays
  unsure (1)..(107): unsure at all Xaa locations
  Clone ID: MRT4577_29107C.1.pep
SGLVVFSCRXVCFSFWSRWLPLARLPCRXVGSXAGRALCAGSVFCXCVLSPVPRACFPPFLLSXVVLLVCLSPSPVGVCACALVGCPXLAPRPALCCAAFLLSWRLA

SEQ ID NO: 291692 - protein, 59 aa, Zea mays
  Clone ID: MRT4577_29108C.1.pep
VTHCVGSCVKRVVVTVSSVLFFRAPVYPIISRWSFVCACRSFRDFAAHSGLSPILSVLI

SEQ ID NO: 291693 - protein, 71 aa, Zea mays
  Clone ID: MRT4577_29109C.1.pep
KKKARLPRCVIKMSTLMCPNCPSFIPVFIGSSDAMPVEYLLCQTLSALVLYLHMKFPYPSRLCVIQSTVIR

SEQ ID NO: 291694 - protein, 55 aa, Zea mays
  unsure (1)..(55): unsure at all Xaa locations
  Clone ID: MRT4577_2910C.1.pep
GRARRSPSSEVEVESKPWGRARRRPPSGVEVESEPWXVGRGGVRLPRWSPSPGVG

SEQ ID NO: 291695 - protein, 62 aa, Zea mays
  Clone ID: MRT4577_29110C.1.pep
FPIFLADGFSGVFPLSGLFTFPVSVGGPVSLFLITAVISLEYVSAYKWVCYKPVSVPTSWPC

SEQ ID NO: 291696 - protein, 49 aa, Zea mays
  Clone ID: MRT4577_29111C.1.pep
VVREMESCGGVGDLHCKGVGSCQSQVNKEPHEDIHVVMFDDPIYVLWIC

SEQ ID NO: 291697 - protein, 347 aa, Zea mays
  Clone ID: MRT4577_29112C.1.pep
RPGKAALVVNRMLQKKETPLLTEGFSRIMCCNDDGDIKKAVDLYNGLGPSDSLPSGVFGQKSKRPVQVGIMKFLKKTDASVVETSSGPKQALTEIKPAQQNPLPKQENVEAGFACSMEVEKGLNDKMENEEHAKGSDYCDVGSRTLAFPSISTADFQFDLDRASDIIVDTAANFLQKFDNIRLVLVDLSEKSRILSLVKQKAAKKSIDSNRFFTYVGDITQLHTKGGLQCSVIGNAANWRLKPGGGGVNTAIYSAAGESLQHATKKCADALRPGTSVVVPLPSTSPLHQREGVTHVIHVLGPNMNPMRPDCLKNDYTRGSKILREAYTSLFENFASIVRSYMGEQNN

SEQ ID NO: 291698 - protein, 226 aa, Zea mays
  unsure (1)..(226): unsure at all Xaa locations
  Clone ID: MRT4577_29113C.1.pep
ADSVKLSILNHPKLKLKSEHVRVIDRAKLRIYPAGTDKLKLQLELHNLKSILPKVIVKGIPTVERVVIDEVKVNNATERYQLLVEGTNLLAVMGTPGVDARKTKSNHIMETNQTLGIEAARRSIIDEIQYTMKSHGMNIDRRHMMLLADLMTYKGEILGITRYGIAKMKSRVLMLASFEKTAQHVFNAXYSGRQDQIQGVSECIMMDIAMQIGSRILKVRQGSTCA

SEQ ID NO: 291699 - protein, 68 aa, Zea mays
  Clone ID: MRT4577_29114C.1.pep
GRPRVRTFSSIQTFSPLTETNLIRSLFDYHHAPDLYVYVNRAPKWCCLCLQFISSNSREYAGLYIITP

SEQ ID NO: 291700 - protein, 239 aa, Zea mays
  unsure (1)..(239): unsure at all Xaa locations
  Clone ID: MRT4577_29115C.1.pep
RPGFFLRNILEIDKERMVAKVEPLXNMGQITRATCPMNLALAVVAELDDLTVGGLINGYGIEGSSHLYGLFSDTVVAMEGTLGFLVSAEIKLIPIKEYMKLTYTPVKGGLKEIAQAYADSLAPRDGDPAKVPDFVEGMVYTESEGVMMTGVHAWKEEAKKKGNKINCEGWWIKPCLYQHAQTALKRGEPEDDIRAGEYYHRHTRCLYWEGKLILPFGDQLWFMFLLGWLMPPXVSLLKA

SEQ ID NO: 291701 - protein, 44 aa, Zea mays
  Clone ID: MRT4577_29117C.1.pep
TQGFVRRVSVKLSLVTSVVDVHLKSSLGDCRRVTALNFARASFC

SEQ ID NO: 291702 - protein, 58 aa, Zea mays
  Clone ID: MRT4577_29118C.1.pep
IFFESFLILLKTELGRVMFIKSMRAKASHLFMLILTFSLFANSKCKRYFHNRLKPAKL

SEQ ID NO: 291703 - protein, 53 aa, Zea mays
  Clone ID: MRT4577_29119C.1.pep
TKLPFSGLLLYYAYSDYKLGACGYSWGAFGSMLGHLHPNGINHWLRTDGSLCW

SEQ ID NO: 291704 - protein, 92 aa, Zea mays
  Clone ID: MRT4577_2911C.1.pep
EVSELQAMAPVLDPEKRLFERAREIPNFASHAHKNENYDPEVAHFIEEEHLESLANTVRQYAGYANDLKNLYVGSKDINMDNYLYDQYLQKA

SEQ ID NO: 291705 - protein, 113 aa, Zea mays
  Clone ID: MRT4577_29120C.1.pep
PLIVPSGLQWIRMRWSAQLGSATISSTRFGKYGDASCMVFGQNIAYAFSEVSTCDGIFGVRVWLSYSPPPWFSGRHVFGYWGLPGPGPIIILWSVAPAVASSKSFRQLSSSMP

SEQ ID NO: 291706 - protein, 94 aa, Zea mays
  Clone ID: MRT4577_29122C.1.pep
AQLQVVGRGGDSGFQNTEALNSICIQKSGTMPVNRNDYLSVNRNWCYVSHFEYLYIPVVFIRLSPCDYCTHLSAFFYPLFIICYVRQMLNILRC

SEQ ID NO: 291707 - protein, 98 aa, Zea mays
  Clone ID: MRT4577_29123C.1.pep
TCSHNDTKGGIFKNVDCMYTSQRDDRMEGVPEANTDEEHVLSAFLLDANHLNVVINSEEVVCEGEDSKELLHSEDCKASSEKTDVNDGNVYGISDAVV

SEQ ID NO: 291708 - protein, 150 aa, Zea mays
  unsure (1)..(150): unsure at all Xaa locations
  Clone ID: MRT4577_29124C.1.pep
TLTXVILRMSTATTGPSPVATTPMEPPPSNSCSPPTISCLRGRVRRRKKTTSMIGLKSLQGHMECLQDSRVERVETITICYSSESSGHHKKYCACHCGPLRHRDSLWRWTTATSPSDCRLRYKTIMCWMLMTINRQLMKTPVSVVSYLYS

SEQ ID NO: 291709 - protein, 92 aa, Zea mays
  Clone ID: MRT4577_29125C.1.pep
PRGRPGRDSYRPDDEYVFLNSGTCCHFANTILLLLFFFFSRRSRNNMTITIEQPLLDAVQQRKVPGGGDPAELVLHAGFVLPEVHAFGNTFM

SEQ ID NO: 291710 - protein, 114 aa, Zea mays
  Clone ID: MRT4577_29126C.1.pep
PPALQIRHQTTMQPHRVLRFCNAANKRHALISPSATTTPTHRLILLKNHKNTLLITSRFLDQKEGAGRTDIYSNSERRTISRKDMVQVIHQILFLNMHYKCIRTTTLVLCHTED

SEQ ID NO: 291711 - protein, 217 aa, Zea mays
  Clone ID: MRT4577_29127C.1.pep
MAAGYRAEDDYDYLFKVVLIGDSGVGKSNLLSRFTRNEFSLESKSTIGVEFATRSLQVDGKVVKAQIWDTAGQERYRAITSAYYRGAVGALLVYDVTRHSTFENVERWLKELRDHTDPNIVVMLVGNKSDLRHLVAVQTDEGKAFAERESLYFMETSALESTNVENAFAEVLTQIYRIVSKRAVEAGEDAASGPGKGEKINIKDDVSAVKKGGCCSS

SEQ ID NO: 291712 - protein, 127 aa, Zea mays
  Clone ID: MRT4577_29128C.1.pep
PGPFRRPHGGVVVHPEQRGRVVVHPAAPGGIRSLPVAPRQGPYSERELHVRGGRPSPARPHQALEENVPRCAQGGRPPAHPPPKRATLLKARAHACDPLTMGHPRFLDFVVGPKTILAVQRCRLEFF

SEQ ID NO: 291713 - protein, 63 aa, Zea mays
  Clone ID: MRT4577_29129C.1.pep
SLWPYPATGLVLVAPSFRHASSSPLVRAAVSPHGPPTRPDAWADAGRTRGGRGATGFGRTQAT

SEQ ID NO: 291714 - protein, 54 aa, Zea mays
  Clone ID: MRT4577_2912C.1.pep
GPEKGRGQSAFKLHNRWEKRTVTAPFPLTQQAKKVFVTKTIKFLNPRISQAQRC

SEQ ID NO: 291715 - protein, 150 aa, Zea mays
  unsure (1)..(150): unsure at all Xaa locations
  Clone ID: MRT4577_29130C.1.pep
LEAGRAGRISPSCASTLLDASLPLRSQIRPVRLSRPQPVASGELGCTYGVLVLSDDGHARITXAQKIATIVRAANIEAESYXSALFAKLLEKRTXVEDLILSVGSGGGAAPDAAAAPAGGAAAAAAPAAEENKEEPXEESDDDMGFNLFD

SEQ ID NO: 291716 - protein, 71 aa, Zea mays
  unsure (1)..(71): unsure at all Xaa locations
  Clone ID: MRT4577_29131C.1.pep
VCNPVRKPRXFRGLPSAGKKFRGLGGKGPPPPKNRPSRGAPWEGNQALSLRRFRLAACWGLGFCPCPVIPH

SEQ ID NO: 291717 - protein, 117 aa, Zea mays
  Clone ID: MRT4577_29132C.1.pep
DVGCIVHVGAERATTPLTALVPHRRNILVEELVGGLALPDHFLLVDPLEAAVGVHALHVRRRPPDSLLSSGTTSKGSVSTATHDDIACEEWTELESLPVLLGSGSLIKTKVAEDVMV

SEQ ID NO: 291718 - protein, 69 aa, Zea mays
  unsure (1)..(69): unsure at all Xaa locations
  Clone ID: MRT4577_29133C.1.pep
XXGRPIFRKKYPQTLSPDFFFKPSLLFQDDFFINPDGPNLFXSLPHTIFPKPPKTSSLFALTINFFQFL

SEQ ID NO: 291719 - protein, 54 aa, Zea mays
  Clone ID: MRT4577_29134C.1.pep
TNQSQKQKIWIRNKSRRTNQRHKRKSGQQKKSVSKTKKSIKTCLSWGLNPQPQG

SEQ ID NO: 291720 - protein, 75 aa, Zea mays
  unsure (1)..(75): unsure at all Xaa locations
  Clone ID: MRT4577_29135C.1.pep
QRESSRLDMLQSQAREIGIKPGWVGVVRGFDRRGPWASTPMLPTLNSRHFQPGFSLSFTTNQAKGGARSXERDTG

SEQ ID NO: 291721 - protein, 72 aa, Zea mays
  Clone ID: MRT4577_29136C.1.pep
DLRKCDFFMWLDDYMKMIEAEGLAGGPNEYIGHQHVATANAKAISDLIAEVKEVNHNLSEMKKNVGRLLRYY

SEQ ID NO: 291722 - protein, 191 aa, Zea mays
  Clone ID: MRT4577_29137C.1.pep
MAISLSSELLSQPQKWQLLLLLALVSLVLFTRRLSNKGLKLPPGPARVPILGNLHQLGVLPHRSLRDLARKHGPVMQLQLGTVRTVVVSSAEAAREVMKTHDEDCCTRPVSPGMKRLSYGLKNVGFSPYGAYWHAMRKFFVVEPFGVRHVEAAWHARQHQVEKLMSTLSGFAGEPVALKEHILSLADGIIG

SEQ ID NO: 291723 - protein, 76 aa, Zea mays
  Clone ID: MRT4577_29138C.1.pep
WARDASEMGLQPAGPGGHETVVSRMQEGVLTGRLKFGCGVVWRKQDAIVHGACVFLGVWMWSGLWIEKKVGLIVSS

SEQ ID NO: 291724 - protein, 595 aa, Zea mays
  Clone ID: MRT4577_29139C.1.pep
MLPLLLALLTGAAPTVSASGDGCRVGCPLALAAYYFSAESNLSFIASLFGIADHNKLLPYNPGIVDPNYIVTGERVSVPFPCSCLGLPADPASTFLAGSLPYTLSGGETYDDVASEFANLTTASWLGVTNADPAGKLPAAGKINVTVNCSCGDKRVSPRYGLFLTYPLWEGETLSSVAEQYGFSSPAQLELLRRYNPGIGMDRASGKGIVFVPVKDADGSYRPLESDAGNILSGGAVAGIVIACIIILIAGIWLFAMYYRKQKMRKAIPLTCLEDSVQLSKVSQDEGIKVDRSIEFSYEELSDATNNFSMDHKIGQGGFGSVYYAELRGEKAAIKKMDTKASQEFLNELKILTRVHHTNLVRLIGYCVESCLFLVYEFIENGNLSQHLHGTGYEPLSWTSRVQIALDSARGLEYIHEHTVPVYVHRDIKSANILIDRDLRAKVADFGLTKLSEIGTTSQSLPSLRVVGTFGYMPPEYARYGEVSPKVDVYAFGIVLYELLSAKEAIVRSTEFTDAQGLVYLFEETLSMPNPMEALQEMIDPRLGGDYPIDSAVKIAYLAKSCTHEEPRMRPTMRSVVVALMALSSKDHELTRGHD

SEQ ID NO: 291725 - protein, 170 aa, Zea mays
  Clone ID: MRT4577_2913C.1.pep
IGYLEAGRGPLRPVSFPSSSLFPTAPFLGVYPARPGPNPKAAGRRRRRLLPLDTVKPPPSSSVSPGSGVQAAARAVSPPAPIWAPPALTPSDSPRAARPVPPRPVTRNFYSPVGSSSGSDEHIDLSTTLFGWKANRRAFLGFSEGSSQMWRPPESTTYCLRSPGSFRNPD

SEQ ID NO: 291726 - protein, 66 aa, Zea mays
  Clone ID: MRT4577_29140C.1.pep
TGCLRDLAPIVVLDRVFYSFLSPVRVMSAVPGAVCAFRSAPPPVVVSLFGGAYVTLPFLPAGFVPP

SEQ ID NO: 291727 - protein, 426 aa, Zea mays
  Clone ID: MRT4577_29141C.1.pep
MVLAPALLVVAALLAQPLGSRSGDDAGAANLHPVVLVPGYGSNQLQAMLTAAYEPPAPACAGSADQGWFPLWPNHTAMRDASQVPCFADQMSLVYDAGADDYRNADGVATRTPFFGSARALIGWDRLVQQLEGMGYRDGETLHAAPYDFRYAVAPPGHPSAVGDRYFRDLGRLIQESRLIHGRPAIVVAHSFGCALTYQLLLSRPLPWRRRYVKHVVLLGPALGGFAHGMRLLSAGMDYGLPNVPRPAMLRMARTQQSALWRLPTPLVFGDRPLAVTRAAAYSARNVSAFLEAIGFQEGVRPYLTRVLPMWEALPPPMVPVTSVVGFGVSTPETYVFGADGLEGEAEVLYGDGDGEINMVSLAAVERWSEVEGQVLKVVRLRGVHHDGFFSIDFALNSTLAEISEAGESVIEQIGIVSCQQKRSDY

SEQ ID NO: 291728 - protein, 192 aa, Zea mays
  unsure (1)..(192): unsure at all Xaa locations
  Clone ID: MRT4577_29142C.1.pep
MPWTPTCEFPHPFSHVKQPAGYRLSYQIVDSFVWLGIRDMINDLRKRKLKLRPVTYLSXTHAYSNDIPHAYIWSPYLVPKPKDWGPKIDVVGFCFLDLASDYEPPETLLRWLGSGDSPIYIGFGSLVSFYLLFRTNLMCLLFFLHVSHDYALKCFIYTWLNAVFILCILCWSVHSLFPIMWNKWKIELVGLL

SEQ ID NO: 291729 - protein, 249 aa, Zea mays
  Clone ID: MRT4577_29143C.1.pep
MARWPAAAVACALGAALLGMLAVTADEQGSNSKFTCTDTEKKRPGCTGTCPDRCPQSCISLCPSCQTYCPDQVQPVRPALFVFGDGFTDVGNNNYLENNEVGNPVRANHSYYGIDFPNSVATGRFSNGFNLADFIAKAMGFEMSPPPYLSLNSPTKMDAGFAGVNYASATSGIWRDIDTGLDIPLMDQVKNFADTIGQMGANRSQQDLSKMLSNSLFLVSTGTTDLYSIYNINNNGGSDTKTNVPHLIS

SEQ ID NO: 291730 - protein, 52 aa, Zea mays
  Clone ID: MRT4577_29144C.1.pep
ILWLKIYRPLQTAAGSALAASRERLKPKSSRWGLVGWVSDYSPSVLTVMMAS

SEQ ID NO: 291731 - protein, 98 aa, Zea mays
  unsure (1)..(98): unsure at all Xaa locations
  Clone ID: MRT4577_29145C.1.pep
GSRERPFAKGALIPEVVVDKRTGCGGGTGGHVAVRDIELSXYCDSCLLSFSIQCHVGYXPXGGTVSGLSKVFRASDDFAKRIGTRSRLAHEVLGALHA

SEQ ID NO: 291732 - protein, 96 aa, Zea mays
  Clone ID: MRT4577_29146C.1.pep
MSGLIDIWTLERERMLRAAGAARAFRSLGGGGRRDTARPDESAGSSSDDGAGAARVDAADERAAVSAAAAAAATTSTPGFVREDALLSILVDCFGQ

SEQ ID NO: 291733 - protein, 63 aa, Zea mays
  Clone ID: MRT4577_29147C.1.pep
SRGRSSCDLNCTFWGLLRTRRGLKTYSFNNNQQVRYSIALLLYDTANAKAKNMDFQNHIKAPS

SEQ ID NO: 291734 - protein, 76 aa, Zea mays
  Clone ID: MRT4577_29148C.1.pep
IPKPAPDKAQTSEVVQVEVPKIGEQLNAPINGEYRYHFRLMFSSVFRLAVPSVVWGFIATEACQSHGVSAGLSSCT

SEQ ID NO: 291735 - protein, 61 aa, Zea mays
  Clone ID: MRT4577_29149C.1.pep
LVCRVQFGFCQAVGYIPVSVIIWYDPSRLGSTRYERKMLIKTTCKKKKKKALGLEDRSLGK

SEQ ID NO: 291736 - protein, 311 aa, Zea mays
  Clone ID: MRT4577_2914C.1.pep
MPKDRSSRVSSYESRRAGASPYFSSSHGQSSSCRRSEESCGAAAAAAAKQAAEWEDVRCPVCMDHPHNAVLLVCSSHEKGCRPFMCDTSSRHSNCYDQYRKASKDSRTECSECQQQVQLSCPLCRGPVSDCIKDYSARRFMNTKVRSCTTESCEFRGAYQELRKHARVEHPTGRPMEVDPERQRDWRRMEQQRDLGDLMSMLRSGFNSNIEDDSGGLGDTEEGGEEAEMTPASITMVFIMPSRGSIMQYLSERSRTIILVSRRRASSSSGGDAEATAPDSEEGDDPMPSAEASAGSQHSSEQEEADGDPAQ

SEQ ID NO: 291737 - protein, 69 aa, Zea mays
  unsure (1)..(69): unsure at all Xaa locations
  Clone ID: MRT4577_29150C.1.pep
MKRNPRVTSSRRXKCRKAHFTAPSSVRRVLMSAGMSTELRHKYNVGSIPIRTVFEVQVVRGTYNGREGK

SEQ ID NO: 291738 - protein, 110 aa, Zea mays
  Clone ID: MRT4577_29153C.1.pep
HEELLRKLCLSTVQRYHHCSYQLYRDMSRVHKFYIPSLHSKGTTCVVCPQFCNMTMPRQEELCKVNQQLELQYSTTLIKKLSRTIIIVHNKGRICVSDMVANRVHFRNSW

SEQ ID NO: 291739 - protein, 125 aa, Zea mays
  Clone ID: MRT4577_29154C.1.pep
ARASGRVDAEVCFSSGHGYADARYEFSRVQVVNGVCNLSVFGGQARVCFLRTQGGQHSAPRCVPVNHACVCPPQRLGLENRSRPATACARCLRRASAMPRMSSKLCGVVCSWDLELVGHIDVSMI

SEQ ID NO: 291740 - protein, 119 aa, Zea mays
  Clone ID: MRT4577_29155C.1.pep
LGKLVSPKICVGQFNHQNYIGTRCKPNSLSVHIPRVTNLNSTVAAVRKALPSSLARAHYSAPPHSATGRHEGASAGYCCNLFQVPVHVLPFRLDGVHGIQVAAHVQVQCAEDVYLILWG

SEQ ID NO: 291741 - protein, 128 aa, Zea mays
  Clone ID: MRT4577_29156C.1.pep
RVGHISVEPILFCLPGWKRNRNMAAWHIETKATNHNRLRKLCLNTLGDRLTGSLKAICETLLRLFIATRTLDDLAIHTDLDEAIEEVLISTLNAVAHMNVIIPHVDKLDVTAMCRAQKTPCYWQHISS

SEQ ID NO: 291742 - protein, 108 aa, Zea mays
  Clone ID: MRT4577_29157C.1.pep
ASAYSSTRAHGKMVPYTTQVIVLVAWVLSVVAAFYTGSSVSPAADYSCDVTGASPSVSFYDKRVGFKVGVLDKLDNGISFIISGDIPESVASKHEESPRRGRPRPHGY

SEQ ID NO: 291743 - protein, 50 aa, Zea mays
  Clone ID: MRT4577_29158C.1.pep
QGKRGGFKKGRISLCLTLWRAHLSPKRPKKCFQRGTQSENQIFGQGGLSW

SEQ ID NO: 291744 - protein, 50 aa, Zea mays
  Clone ID: MRT4577_29159C.1.pep
MCLEKKKKKKKKKKKKKKKKKGRKKKKKKKKKKKKKKKKKREVITKDLSK

SEQ ID NO: 291745 - protein, 173 aa, Zea mays
  unsure (1)..(173): unsure at all Xaa locations
  Clone ID: MRT4577_2915C.1.pep
EIXYIFXXFLXXXXPYXFGIPGWDPXXRPXXRPRVXXXVXPHVXEXGGNLCKHXMLKKKKKXXXXXXXXXXXXXXXXXXXXXXXXXXXXXXXXXXXXXXXXXXXXXXXXXXXXXXXXXXXXXXXXXXXXXXXXXXXXXXXXXXSXXXXXLNSXIXXXTHXNDHYXFPFPXFLF

SEQ ID NO: 291746 - protein, 99 aa, Zea mays
  unsure (1)..(99): unsure at all Xaa locations
  Clone ID: MRT4577_29160C.1.pep
STLSHLITNGSRGFPFCPPALSASAATSXFIPQCSQHYLSPXSAVGYQYPTIQSFMVHDAIHASILQSLAFTLQHPYALLQQPSLXHLYLQRXICAHQL

SEQ ID NO: 291747 - protein, 100 aa, Zea mays
  Clone ID: MRT4577_29161C.1.pep
RDFFSKLKNPFFWGFKNPPNFGRGQQPQAFKGGVPPPPPGYKHRPGGGWPQENSNCPPPPLGKPPRQKKKKLLGGGNHSHFYCQKGGFSPHPKPGGPQCF

SEQ ID NO: 291748 - protein, 286 aa, Zea mays
  unsure (1)..(286): unsure at all Xaa locations
  Clone ID: MRT4577_29162C.1.pep
RPGLFLLETQVALAIPDEDNCITIYSSTQFVEITQDVVARCLGIPLHNVRVITRRVGGGFGGKAMKAIHIACACAVAAFKLQRPVKMYLDRKTDMIIAGGRHPMKTKYSVGFKSDGKITAVHLDLGLNAGIAPDLSAILPNTIIGSFKKYNWGALAFDIKLCKTNVSPKSTMRAPGEVQGSFIAEAIVEHVASVLSVDTNTIRRKNLHDFKSLAAFYGESAGEAPTYTLATMFDKLALSPDYQHRATMVEHFNSSNKWKEHXXISCVPXTYXVSLRAAPSKVSIMK

SEQ ID NO: 291749 - protein, 58 aa, Zea mays
  Clone ID: MRT4577_29163C.1.pep
GTSRLRLLVITLLVLYPALSASEHEAYPKVFIMIRKSVKAGCLFEYWIGIQRGLLPSS

SEQ ID NO: 291750 - protein, 166 aa, Zea mays
  Clone ID: MRT4577_29164C.1.pep
PSEPKVYFVIRLRGINEIAPKPRKILQLLRLLQINNGVFIKVTRATTQMLQMVEPYVTYGEPNLKTVRELIYKRGYGKINKQRIPLDNNAIIEQHLGKYGIISIEDIVHEIITVGPNFKQVSNFLYPFHLSNPTSGFRARKFTAFVEGGDAGKREHYINKLVRNMN

SEQ ID NO: 291751 - protein, 134 aa, Zea mays
  Clone ID: MRT4577_29165C.1.pep
SPGLLPQLYPGFCFFPFPPKVVLFWGRSLFFVSPLVFSPKPLKGENSVFPVVFQNCFKHKKSFFSPGRPPYVWFFFPPPKILCFFGWAQPAQRGPFNPPPSFVPLNWTWAGFVPVVLTLSPPPWEYPKFNPPPP

SEQ ID NO: 291752 - protein, 94 aa, Zea mays
  Clone ID: MRT4577_29166C.1.pep
ITGSCSWARHHARRFFTTNTRRGSSVPPQQTTTFRAFFVPPPTRDDCLVRILFEYLDYFLASLHHRVHTFCRDAHILQAGLQHVHHGHLYNDLA

SEQ ID NO: 291753 - protein, 72 aa, Zea mays
  Clone ID: MRT4577_29167C.1.pep
VRIFDLRAGGDKITHALRCICWRSKDIQVEAGNQALPEIAEILAKIKLTLHPWTLSLRGGHQERIRYGHLPS

SEQ ID NO: 291754 - protein, 183 aa, Zea mays
  unsure (1)..(183): unsure at all Xaa locations
  Clone ID: MRT4577_29168C.1.pep
MAMAKACSTVLPCLLLLAIVSLSLAAADGGGNNSTDPAGQVRLSCGSSASATDSDGRAWDGDSASMFLPSTNAGVAARASYQDPSLPSTVPYMTARVFASSHTYTFLVRPGRVFLRLYFYPADYGNRSASGALFGVTXAGGVTLLQDFNASQTALALDAAYLVREFSLNVNSSGRLEVPSPRP

SEQ ID NO: 291755 - protein, 40 aa, Zea mays
  Clone ID: MRT4577_29169C.1.pep
CTLYPSKKETHRSPYNKYAGDVSLMLNKPEAVLPRPFFVS

SEQ ID NO: 291756 - protein, 160 aa, Zea mays
  Clone ID: MRT4577_2916C.1.pep
PRKPHFCGTETRAGVPPLARRFDPIRHRPPPCHGSPVPLWRTCPTWAARPLLPQPRITSSETASRVTSTPSPPPRPPAPPTSPTSTASSSACSAPTQTRRSRAAGSSPRSPCTTGLSTSVHCSRSSPTSPVARPGPASRSPSSPPASPSLCTQISRAGRP

SEQ ID NO: 291757 - protein, 50 aa, Zea mays
  Clone ID: MRT4577_29170C.1.pep
ASMDLETNICFTHSNWNPYESISCVTNPNKLDCNHAKTCTCCVLLPFCTP

SEQ ID NO: 291758 - protein, 785 aa, Zea mays
  Clone ID: MRT4577_29171C.1.pep
MTTIEQPIAIDQVEPVNLNVDELVVDDDQPGFAPRCESARLDKPGCTSKKDDSNEIVEDSKSLENQLEICNAATMSDECSSRNANEDPSPINMSAECSSRTANEGFSPINGASHLAEESCLSDKSYNAISYENGNGPAKSSEEPDKSCNAIICENENEPAKSSDVVETRCVEALAPSSVGTVVTAEQKDNGHRASGEWHGDNVQVIGQQQKIYIIKVPKFAGDDLWNKIQAAQAHLDHLTQERDAINRRRQKQKAVCDQYREKLEAARREEREARTAHGDKKNDLNNVRSVLGKLHQANSAEELDELIAKKERTMQHETISLKEEKLPRVRINELKSQRKQLSATMGSKAEINEAFDQKDHIHERHKVLKKDSDVLLTNLKFLEENTRKIQKSFEDERTALRKLTEEHRAANEIRQKAYIEWTELRSEPSKKNEYFFRYRDDRNAAEIFRANGDINGLKSHCNSQIEGVMEMWNKNEEFRKQYVESNKVSTLKRLGTHDGRKLGPDEDPPVISSRRPSSIYPLSASSPGVATLASIPAPVVAAPAAVSAKEDSFPVLEAPQTSKRTKSKASDICAQTENNSVIVSEAEALEQTLKEKARLLEEQLELARKAEELARKEEELSKERAAAEKERLRMEQKAKAKEAEERKRRKAEKDKEKAEFKARKEAEEREKKKAKRDKKKGAAPADSSAIGDSHAAASATADTDSNASDNPREADVSQPAVAPRRPARPAAAIKQLNRLQPMPAPLRNRGRRKLRQYILIAAAVLTVLALFVAGNYIPRLRSHS

SEQ ID NO: 291759 - protein, 836 aa, Zea mays
  Clone ID: MRT4577_29172C.1.pep
MQIEGEATCGILEFEEVDKDGEDSLCNDCMVGVVSSNEETELPMKERTDEAVPSVNVGEPEQVTEDTSQDIMQGGLARGVFIGTIFVKPVSDPHVESSLVHKVKAEVHLVDEITAADLKAENMVEVKRTDREVDEIEVKAPGTHEIGNSSEVEPKEEFEMEVDDAVSLHEAAASASENGSEEKSSNIAVDQVEPVNLNVDELAVDDDQPSFNPGYGSAKSSDVAETKNVEAQVTEQKGNAHHASGEWHGDHTQVIGPQRIYIIKVPKFAGDDLWDKIQAAQAHLDQLTQERDAINRRRQKQKAICDEYREKFEAARQEEREARAAHGDKKNDLNSVRSVLEKLHQANSVEELDELIAKKERIMQHETISLKEEKLLIKEINELKSQRKQLSATMGSKAEINEAFDQKDHIHERHKVLKKDSDVLFSNLKVLEENTRKIQKSFADERTALRKLTEEHRAANEIRQKAYSDWTELRSEPSKKNEYFFKYRDARNAAETFRANGDINGLISHCNSQIERVMEIWNKNEDFRKQYVESNKVSTLKRLGTHDGRKLGPGEDPPVIPSRRPSNICPLSASSPEVITLASTPAPVLAAAAAVPSKENSFPALAAPQTSKRAKSKASGSSAQIKNKSVIVSEEEDLEQTLKEKAHQLELARKAEELDRKAEELARKEEELRKERDAAEKERLRMEQKAKAKEAEERKRRKAEKDKERAEFKARKEAEEREKKKAKRDKKKGAAPADSSAIGDSHAAASATADTDSNASDNPREADVSQPAVAPRRPARPAAAIKQLNRLQPMPAPLRNRGRRKLRQYILIAAAVLTVLALFVAGNYIPRLRSHS

SEQ ID NO: 291760 - protein, 139 aa, Zea mays
  unsure (1)..(139): unsure at all Xaa locations
  Clone ID: MRT4577_29173C.1.pep
TIPTPNRTTPLLKHHLPRRLPPTFPLLPHILPPXPPQPLDAPPPRIPTACTRRRGRSPQPPPTAAADPXPPPTSPTHRRRPXPPHPSELHPSPGSASPVDVRHRPPPGSRATTHHHQDAPPLRVDPVLPRVPQDEGTQG

SEQ ID NO: 291761 - protein, 106 aa, Zea mays
  Clone ID: MRT4577_29174C.1.pep
RPGANHACRRPACIKLKRDRIGTRSEGRSCRPAGRSSIEEPSCCCCYRTTPTMIRRTTVCLGLLLLLLTASTATAHLSIGDEDQYLNRRTQESRHRNQRGAQINDL

SEQ ID NO: 291762 - protein, 36 aa, Zea mays
  Clone ID: MRT4577_29175C.1.pep
RHSRFVSPYVVRPHGSVRRRFGSTRRTVLPEVDGRV

SEQ ID NO: 291763 - protein, 183 aa, Zea mays
  unsure (1)..(183): unsure at all Xaa locations
  Clone ID: MRT4577_29176C.1.pep
NSARGSSAPSRARAALLLERVTAALPPSRLASLPEQVFREAVELLRDRPVSRPATKAALQVLVRTAAWGRNRVKAVDAGAVPVLVDMLFDDGAERRACELVLAALDRLCGCADGRAELVAHAAGVAAVGRKALRVSEVATDKAVRVLRSVARHAXTSAVVQEMAXAGVAAMLCXVAQSEQYGK

SEQ ID NO: 291764 - protein, 82 aa, Zea mays
  Clone ID: MRT4577_29177C.1.pep
TLPSQDLVPCILLSFEFEHILMWRGSDWKSSLPPLENSYEVTKVQESFSGKESNEKVTHSGNGLIQIELVSVATSHKNWNLD

SEQ ID NO: 291765 - protein, 65 aa, Zea mays
  Clone ID: MRT4577_29178C.1.pep
PQIPAFKERKCVFHIRSTKPRWRSTNRRCGPSRPHSTATFVVFFRHDDTAGRGKQMNQIHISSCV

SEQ ID NO: 291766 - protein, 123 aa, Zea mays
  unsure (1)..(123): unsure at all Xaa locations
  Clone ID: MRT4577_29179C.1.pep
IPGSLMTDAPPLFFGLAPDGGVMXRVVPKNPPLPPRKGVVLSIDSPTHPCFRFPVFKGEGAMAPATNLLGGFGFSLPPAPKGVPPIPFPFHFDPACPLDVPAGGKTPGGKMGKPLPQGFRLNP

SEQ ID NO: 291767 - protein, 246 aa, Zea mays
  unsure (1)..(246): unsure at all Xaa locations
  Clone ID: MRT4577_2917C.1.pep
IKSRKRLSGNSGSLSQAASVPDFPIQVESLRFEVSRHTGRIHLYSCVPGHDSRPKPLCENFLPEELNSPLCSPSDVKXKNSSLEKDXPSFCNVFNAFIKEWLALRPIDQNKLLGKPLQLPLNLELCFLKDSINHSTEGILKGGSKRRAASLNDVSNPLPENAEWRQVVLRNGTCKERQYTQGWTIDDEPLCKLCQGLCNGRLAKSPEYFEDLFCSLACFQEYRLRTSGRALRQALFQIERGKCFQC

SEQ ID NO: 291768 - protein, 92 aa, Zea mays
  unsure (1)..(92): unsure at all Xaa locations
  Clone ID: MRT4577_29180C.1.pep
SPHGESTVRCPEIXSKWPALGFPLQTRPSSLTPEQVLVKLEQGGPTVCLSGVMGEDGPPPXGPLWIFGGVFMGAFPPGVGFGNDRIGFPEFA

SEQ ID NO: 291769 - protein, 45 aa, Zea mays
  Clone ID: MRT4577_29181C.1.pep
ITNQDLSTMACPKPTSSPSLCYLSLVCGHVRLLMMAVTASAQSTP

SEQ ID NO: 291770 - protein, 58 aa, Zea mays
  Clone ID: MRT4577_29182C.1.pep
RTLSSSVLTYPIFPPKSNSLIVLLQRPLLLNPWPYPNKSPCGKTPFFPNLYILKGPHL

SEQ ID NO: 291771 - protein, 70 aa, Zea mays
  unsure (1)..(70): unsure at all Xaa locations
  Clone ID: MRT4577_29183C.1.pep
VLLLVLLTGYAPTHSFLNXEGVDLPLCVQSLFLKEWTTSLSYQXLLIFQKLVEEIEPLLQLSIDCSLQHP

SEQ ID NO: 291772 - protein, 131 aa, Zea mays
  Clone ID: MRT4577_29184C.1.pep
IMDGHFVICFELLIHFTFLPRHSGPIKRAHDASLSHNSLSHGHQNKADTLARCATAASLPHWQQANNSFSPLGFSLLCTHLPSSPTQLQHASLPHQHNTSTPPFPADTTLHWCLPSTWLKKPINQIVQLID

SEQ ID NO: 291773 - protein, 90 aa, Zea mays
  Clone ID: MRT4577_29185C.1.pep
DRTIPLSVIAERTKLSISDVECLLMKSLSVHLIEGIIDEVDSTVHVSWVQPRVLGIPQVKALRDRLDAWVGKVHTTLLSVEAETPDLVAV

SEQ ID NO: 291774 - protein, 160 aa, Zea mays
  Clone ID: MRT4577_29186C.1.pep
INSLIGTKVEWVYHMLQAFNSGNLALYQELCRVHNAALTAQPALVQNERKLLEKINILCLMEIIFSRPSEDRTIPLSVIAERTKLSISDVECLLMKSLSVHLIEGIIDEVDSTVHVSWVQPRVLGIPQVKALRDRLDAWVGKVHTTLLSVEAETPDLVAV

SEQ ID NO: 291775 - protein, 99 aa, Zea mays
  Clone ID: MRT4577_29187C.1.pep
GSTKAGVIRVFNFRKKMAEMSGTQGTKNGPTISFTGSQLSFKTGPTTKVPMRWHIHRRQGSRRGSFTPLPWAGQFNRPGGVGGVHHPILGGRGELRLLA

SEQ ID NO: 291776 - protein, 403 aa, Zea mays
  Clone ID: MRT4577_29188C.1.pep
MPSSASARGGRGLLLPAAAEAVVVLILGAVAPAAGCYPRVFSFGDSLADTGNYPFVYGNDSGSGGAALRPPYGETFFHRATGRASNGRLVVDFIADTLGLPFVRPYLSGRSAEDFACGANFAVGGATALSPDFFRARGFDTMGNKVDLDMEMKWFRGLLDLLCPGNLAGCSDMMNQSLFLVGEIGGNDYNGPLLSGVPMEKIRAITPSVVAKISSTISELIRLGAKTLVVPGNLPIGCIPDYLMIFKSNKKEDYDPQTGCLRWMNEFSQYHNKLLVEQLKKLRRLHPGVTIIYADYYGAAMEIFLSPEQYGIEYPLVACCGAEGPYGVSPTTSCGLGEYKLCDNPERYGSWDGLHPTESAYKVIAMGLLLGSYTRPPIASTTTSCPQLMELGSSAEYKRLYDL

SEQ ID NO: 291777 - protein, 131 aa, Zea mays
  unsure (1)..(131): unsure at all Xaa locations
  Clone ID: MRT4577_29189C.1.pep
MPAGHGLCSRTCDLXFARPFRKXGYMPLTTYLRTYKIDYHVDDKENGAVHKGMPQKIYMGRAGHGRNDTKSAIGDKDNXHDTGSIIWKLIHVRSXHEEPSRXCTQPLSLRKVKNVNLNCHVEKHGEVINMK

SEQ ID NO: 291778 - protein, 84 aa, Zea mays
  Clone ID: MRT4577_2918C.1.pep
SPLERGDSPMVSEKLNCSHVNLAGGLDRVGKLSFQGKNNRPPPPILEQIDNRQEGALSKLLLTTFNFPGGSGKKKYTPSPRLRI

SEQ ID NO: 291779 - protein, 168 aa, Zea mays
  unsure (1)..(168): unsure at all Xaa locations
  Clone ID: MRT4577_29190C.1.pep
MHSSASARGGRGLLLPAAAAAVVVLLLGAVAPAAGCYPRVFNFGDSLADTGNYPFVYGNDSAKLRPPYGETFFHRATGRASNGRXLVVDFIADTLGLPFVRPYLSGRSAEDFAGXATFXVGXGATALXPDFFRERGFHNMGNRVDLDRRWKWFRGLLDLLCPGTXAGC

SEQ ID NO: 291780 - protein, 67 aa, Zea mays
  Clone ID: MRT4577_29191C.1.pep
ILLLYPLFAPTLMLTVTTTLLCKILIYFKAQRLVRLPHNHRDTFRHHFGLTFSLYQRMNMFVGYFYS

SEQ ID NO: 291781 - protein, 399 aa, Zea mays
  Clone ID: MRT4577_29192C.1.pep
MHSSASARGGRGLLLPAAAAAVVVLLLGAVAPAAGCYPRVFNFGDSLADTGNYPFVYGNDSAKLRPPYGETFFHRATGRASNGRLVVDFIADTLGLPFVRPYLSGRSAEDFAGGANFAVGGATALSPDFFRARGFHNMGNRVDLDMEMKWFRGLLDLLCPGNLAGCSDMMNQSLFLVGEIGGNDYNGPLLSGVPFEEIRAITPSVVAKISSTISELIQLGAKTLVVPGNLPIGCVPKYLMIFKSNKKEDYDPQTGCLRWMNEFSQYHNKLLVEQLKKLRRLHPGVTIIYADYYGAAMEIFLSPERYGIEYPLVACCGAEGPYGVSPTTSCGLGEYKLCDNPERYGSWDGLHPTESAYKVIAMGLLLGSYTRPPIASTTTSCPQLMELGSSAEYKRLYDL

SEQ ID NO: 291782 - protein, 190 aa, Zea mays
  unsure (1)..(190): unsure at all Xaa locations
  Clone ID: MRT4577_29193C.1.pep
MYKQQPEEDHIVCSRPDITSSGPIKVQDIQGLPKQPNQASNLQVVAGVPDLLIGQPKPQTIKTEPSSQENKAAHCVDLVSDDHESNKQGLGDAAVLSIVQKDSSNLKYGSVSHEHLKSEAQNPRHTVAENPNSTLGSAKVCTSFXWXLSXTPPELSHSLASKEPSSGNSDCSKKEELLSPTVSKHDPVKF

SEQ ID NO: 291783 - protein, 74 aa, Zea mays
  unsure (1)..(74): unsure at all Xaa locations
  Clone ID: MRT4577_29194C.1.pep
GSSCEFGSSCKCGKKYPDLDETITVVQASVVLRVSPEKKAAPVVLADWAETGEAEHCCNXRGNCKFDTCNCLSH

SEQ ID NO: 291784 - protein, 158 aa, Zea mays
  Clone ID: MRT4577_29195C.1.pep
MEEFAFPSFPLEQCNADFSASASPWLLVPGGVVGTAAVHEHDHRRSVSAVEQQAAGGDQQQLGGRHGSARFAVEDKMDMLWEDFNEELARAAQPCPLTRGTPSWAAAREPWLDGALETRKHAVVRRRRMGLLMMLRLLKKLFLAHKSGAAPSRKAPPI

SEQ ID NO: 291785 - protein, 163 aa, Zea mays
  unsure (1)..(163): unsure at all Xaa locations
  Clone ID: MRT4577_29196C.1.pep
MAVSAPVTLCPSDSRSLSSALVSSRSNKPSSLDAVRSRRLNLGDSAMPTQISTRQSLRFALPSNNARPISTAARMACFAKKQHIAAVPLCTLEAKRVAKSYGAESVGVFVDDDSSTILTASDSCNLDLIQLHGDSXRELLPLLWKNNRIIYVLNAXEDGKLSM

SEQ ID NO: 291786 - protein, 95 aa, Zea mays
  Clone ID: MRT4577_29197C.1.pep
LGPPFPRGPPLGWSRVAPLWLSPSFRVPFFSLGNGRGSACQVFVGIPVFPFWSFPKILFGAGFFLTPLVWVFFWGGPVFFHTPFFLNPRACCFFF

SEQ ID NO: 291787 - protein, 50 aa, Zea mays
  Clone ID: MRT4577_29198C.1.pep
DEGMFTFHQMFSTKALCKCDQVTQVVNVKPSIYRALWCCTSDEGMFTFHR

SEQ ID NO: 291788 - protein, 138 aa, Zea mays
  Clone ID: MRT4577_29199C.1.pep
LTSSNSTCLTFVSVRDSSLIAWYFTTVSHVNPHDSNKVYSAHLKHYVMIDLTKSVHIDNTAMFNELTPYDYVCYYIMAASVSRKIYLTHAIRVDRFQNTNGAHHMNCSRSPHFCKNICSISRNILHHLQDMNIIDVDP

SEQ ID NO: 291789 - protein, 81 aa, Zea mays
  Clone ID: MRT4577_2919C.1.pep
RPTAGVVGEFDGDDVPPVLTNGHDGVTRRSIAPDGHDAIAPRYCTSSASYTRNCQTVDANSSPVFLVLPTEGDYLLLLLRV

SEQ ID NO: 291790 - protein, 57 aa, Zea mays
  Clone ID: MRT4577_291C.1.pep
LHLFCALTVDFITITQPSISFYLSTKKKFSNISISMSPLLLTISLQNDLCVSSIVYK

SEQ ID NO: 291791 - protein, 118 aa, Zea mays
  Clone ID: MRT4577_29200C.1.pep
LDIPGLFRWANFPIISAGKPPPWGPGLGPPPFFGPQFGLLLKFTPGPGITLMFTPARGGEKFHCFPGRGPQSSPAWGSVFGTQNRGEAIKLKARKPVGLLFLESGIVGFPFRPNHGVA

SEQ ID NO: 291792 - protein, 111 aa, Zea mays
  Clone ID: MRT4577_29201C.1.pep
WGFPTNFLQKGFHLKTWVLVSKKIKALGLPYPFFGEWKFFKKLALSGGISLANVLTPWACQINCKGKSQVSLNWGGWNFLKNLKSNFWKNQRVLGEAPRPGQFYHGRFNHL

SEQ ID NO: 291793 - protein, 82 aa, Zea mays
  Clone ID: MRT4577_29202C.1.pep
RGGGGARKLRGGGPLFGAPGVYILGFGVVCWVELWGENIFSRGTVWAMITPGFNRASYRENGGASRARVGISGGNQGGGKVE

SEQ ID NO: 291794 - protein, 63 aa, Zea mays
  Clone ID: MRT4577_29203C.1.pep
CGVLTGRGGVNHSHLTLHGNTLFNRAQLSFKGHSKQDGAGKPRNTGCGGGHPPFQPAIALPKT

SEQ ID NO: 291795 - protein, 62 aa, Zea mays
  Clone ID: MRT4577_29204C.1.pep
IIRFSVWGYFSQCTGLLVQLEDSHLLQMRSSGWACRSVFWETTLESRLGDYRAVDGVKIVHA

SEQ ID NO: 291796 - protein, 223 aa, Zea mays
  Clone ID: MRT4577_29205C.1.pep
MAGAGIHPFHQQWPPQAAVPAPPAVPPPPPVPGAPDAAARPGSDEVRTIFITGLPVDVKERELHNLLRWLPGFEASQINFKGDQPMGFALFSYAHHAIAAKAALQDLVFDAETKSALHIEMAKKNLFIKRGVGTDANAMDQSKRLRTGGDYTHSAYAPPPFHPPPPAVSMWGTAGYMAAPPPYNPYAGYPVPTVPMTSPSPVPGPTAYAPVQNMKDNPPCNTL

SEQ ID NO: 291797 - protein, 62 aa, Zea mays
  Clone ID: MRT4577_29206C.1.pep
VDSCVLVDSEEVMRARIGGCGLHRLVSFGPHVRWPYTVPGLFDLLTLIFFILLSSHFLYYFL

SEQ ID NO: 291798 - protein, 62 aa, Zea mays
  Clone ID: MRT4577_29207C.1.pep
LFFFRDNSHCGRRTKTNFFANNTQTSLVITIYFPAYPNLSRRILLFQQQRGAGTWGPLPHTK

SEQ ID NO: 291799 - protein, 475 aa, Zea mays
  unsure (1)..(475): unsure at all Xaa locations
  Clone ID: MRT4577_29208C.1.pep
MACLEAPPRVELCPVSCQPRGLQLPPWRLSLSRSSSSCRSCTLVSRQLPICNAQSYADDLWVAAPHSPASVRSRLLAAEREEAKAVLSLFLRQKGLRSTLAARIVNKSDGFIEHLVSKLQIAYRSRYAEGRELSTPEIRDALLPYLEALSKEHGDSLVEVVENFPDPFAMEREALSSSMAFTPTSSNKQKAIARISTAASGAALPELVPYLLDLGMDHEEIKDIVRKFPAFAYYSVDRKIKPLVELLLELGVKNSSIPGIIKKRPQLCGISMSDNLKPMMAYLESIGVDKAQWSKVITRFPALLTYSRNKVQTTVSFLAELGVSEKSIGKILTRCPHIMSYSVDDNLRPTAAYFRSIGADAASLIQKSPQAFGLNVEAKLRPTTDFFLARGFSVEEVGVMANRFGIVHTLSLEENLLPKYEFFLAMEYPRCELXQVPAVLWVQPGPADKATVREDDWVWGEVDFEPDAFGLGCQV

SEQ ID NO: 291800 - protein, 195 aa, Zea mays
  Clone ID: MRT4577_29209C.1.pep
SRAWLAPVSLSLLAVPSLAPGLFPQPARSCSSSGAAELPHTRVPLVAARPSSSPSLLSARCVRPELPARADLSSLASSCARRAALYVTQLPQAPWCLLLSSAELLPEAFPPWRPAVHLLGRACPGRGEPPPAQAPWLAAPSFCSSSVPSSFLSYASLFFPLPTRATSASVPTRAAPLLLRALASLTAPLVPAQLD

SEQ ID NO: 291801 - protein, 55 aa, Zea mays
  Clone ID: MRT4577_2920C.1.pep
FSWFLQFCARSLLLTRVSPCPCFAHPPHEVAGFHVVEWVPGVGFSANSSGSPLSL

SEQ ID NO: 291802 - protein, 106 aa, Zea mays
  unsure (1)..(106): unsure at all Xaa locations
  Clone ID: MRT4577_29210C.1.pep
LSQWHRPLARELPNVGRGGQQAHAPVASLDSDLQAFIHNPTHGIFEPLAIQPSATTNXVNERFLSNXDELLSPRSHQEGQTNLTNDGLNPTHVIYGWTNNPSLGEF

SEQ ID NO: 291803 - protein, 83 aa, Zea mays
  unsure (1)..(83): unsure at all Xaa locations
  Clone ID: MRT4577_29211C.1.pep
AAAIVRHSEGAGTLGPCGLFVVGTTXMVITGDSXRSIRGKKGTEGSTIKNTGMSMIISVYDEPXAPALCXNMVVXERLVDYLI

SEQ ID NO: 291804 - protein, 81 aa, Zea mays
  unsure (1)..(81): unsure at all Xaa locations
  Clone ID: MRT4577_29212C.1.pep
SSSPQKPXSAREVSPDKRSNERSQSPRRSLSPRSPALQKASPSKEMSPERRSNERSPSPGSPAPLRKVDAASRSQSPYAAE

SEQ ID NO: 291805 - protein, 70 aa, Zea mays
  Clone ID: MRT4577_29213C.1.pep
HCPSGVYDYTRHAQNSSRNKEFYMLAMGMHNYCRFMYILHNYINHSSYGSNSCVISTRVNATLTQHLCYV

SEQ ID NO: 291806 - protein, 59 aa, Zea mays
  Clone ID: MRT4577_29214C.1.pep
TMLGPPNRALSYLTVTRSPFSGSSTKPVSVSLEFTLCHSYAPSLLISVTVLVYCILQVC

SEQ ID NO: 291807 - protein, 51 aa, Zea mays
  Clone ID: MRT4577_29215C.1.pep
FSSPSLLLLFFFLWTLYFISLAVVLNFPDCETPYVSPLLSFVIFSPFATLL

SEQ ID NO: 291808 - protein, 167 aa, Zea mays
  Clone ID: MRT4577_29216C.1.pep
KKKKKKKKKKKKKKKKKKKKKKKKKKKKKKKKKKKKKKKGGPLLRKPKLYFPGPGQGIIFFFGGPKINFLGRVLKRGGWEKPGGTQIKWVGNKSPFPKGGKKKRGPPRSPFQKFTHPKGERDPPLNRPINRGGGGGSPQGAPYICRPPSPRSLGFFPSFSAPGARFS

SEQ ID NO: 291809 - protein, 80 aa, Zea mays
  Clone ID: MRT4577_29217C.1.pep
PTSHYDELNISSTRQNPGKLLITMFHYAVTTFMSFPGSCESWIFPTIMQPVALATIPETKSLKRIQPNKSCWHGSHPFML

SEQ ID NO: 291810 - protein, 184 aa, Zea mays
  unsure (1)..(184): unsure at all Xaa locations
  Clone ID: MRT4577_29218C.1.pep
EPRVXPSLPTPGAMPPXPPPSSSSSSPPPSSPAPPQRRRRRRRPRRTRSRPSGPPSPSRPRPLPSSPRGAPPRHPPAASRASTAPAATSRRSPCRHSSCPPRRSRSPPSAPPCLPSPRCPCRRTPSRAPSTASSSAPRSRSSTSRSTASRAPCRTSRRWPGCAVSTSRSTASTARSRGARSIHA

SEQ ID NO: 291811 - protein, 38 aa, Zea mays
  Clone ID: MRT4577_29219C.1.pep
LELLKYGRHRVRNQDCTYRCAFCLSKKKQGYKIKDLLQ

SEQ ID NO: 291812 - protein, 234 aa, Zea mays
  Clone ID: MRT4577_2921C.1.pep
MARHGPQIHDQPLQEEDYIDMELSSPAAAKVVTNTASLLCYTTAMAASPQQSREFEFHMSAPVDHWEPIASPADELFYKGKLLPLHLPPRIQMVERLLEIAADKGLLSASTAPATPYQSCHVSPANSCYASGELNAEQYFSECASASIAAAEVEAACEKKPWSKKLKFIKNLNLGLKLKASKAYLKTIFATKAGDPDDKGGAPRANEFSTAQVKSWRKNPFGQIRSNRYTTSPI

SEQ ID NO: 291813 - protein, 50 aa, Zea mays
  Clone ID: MRT4577_29220C.1.pep
VGRDYPSAARAGLSPLLDVVMCAVFGSSVLPATLLKAPATAPKKKKKKRP

SEQ ID NO: 291814 - protein, 161 aa, Zea mays
  Clone ID: MRT4577_29221C.1.pep
HSRKKPLVSARFSRKATKPSPEGSRALRVARPRKEETLESTSHAFAEGRGPTLARRLKKSDTWDTRPGRRPSGGGSSGEVDPAAVAPAGAMRKAETFNDGGAGRSRPAPAALVRREPSLGQDELNRRVEAFIHKFNMEMRLQRQESLKRYNDMIGRGRGSR

SEQ ID NO: 291815 - protein, 103 aa, Zea mays
  Clone ID: MRT4577_29222C.1.pep
QQIDFAKIHAIDATVSSSQGPVIRNDNQVHKASTVHRSSERQGMNGRQITQVSNTERDDEARSIFPESSQDTHHNMDLIRQQADTSRISDDKNISGLLVESTK

SEQ ID NO: 291816 - protein, 50 aa, Zea mays
  unsure (1)..(50): unsure at all Xaa locations
  Clone ID: MRT4577_29223C.1.pep
FKQCAKNGTNVKTAFQRIAKNALKNEPEXALYVPQSVSVVGVIRGQRSSG

SEQ ID NO: 291817 - protein, 112 aa, Zea mays
  unsure (1)..(112): unsure at all Xaa locations
  Clone ID: MRT4577_29224C.1.pep
FKLILTTVRESLKNAQRQFTKTQDDXKSLHSVGHIIEEVLRPLDNERSIGNSSTGPRYTDGWPTKVHTNRLTSXTRTRLDMTTLTIMCTFTRXMGSPIYNTLDGNAANVTYS

SEQ ID NO: 291818 - protein, 115 aa, Zea mays
  Clone ID: MRT4577_29225C.1.pep
RLFACSNKIGRFVIEEVPGELMQEDLATDDVMLLDTWDQVFVWVGKDSQEEDKTEALTSAKRYIETDPANRDRRTPITVVKQGFKPPSFVGWFLGWDDDYWSVDPLDRAMAELAA

SEQ ID NO: 291819 - protein, 96 aa, Zea mays
  unsure (1)..(96): unsure at all Xaa locations
  Clone ID: MRT4577_29226C.1.pep
MACFARWLWQEEEQQQRAMDPCPFVRVLVGNLALRMPVAPPASGAGAGVHPSTSACYCTIRLGKMPVQSVXAPLVVTDGGEQTPASGALAAAFHLS

SEQ ID NO: 291820 - protein, 66 aa, Zea mays
  Clone ID: MRT4577_29227C.1.pep
AFIPIAECTTEHKENRQTPWGGRGSAIFYRLWNADPPPLIQAAGVVRNYRRPDNYHRRRMSDLLLR

SEQ ID NO: 291821 - protein, 66 aa, Zea mays
  Clone ID: MRT4577_29228C.1.pep
YSYNELSQMSFTCEVFFINDYFNLLHLIFLSLKSELKERRLNTSIMLPCFGPLSEFEQVTNKAFSL

SEQ ID NO: 291822 - protein, 99 aa, Zea mays
  unsure (1)..(99): unsure at all Xaa locations
  Clone ID: MRT4577_29229C.1.pep
MTTRMYSALTTAPSIDERLRLTNQGARYKLSHSIITDKLHTSDHTLPVIERFYYWNXKLTFSYXASLIITTCQSQLDTITRHFTTHPEYDLPEVNALAI

SEQ ID NO: 291823 - protein, 125 aa, Zea mays
  unsure (1)..(125): unsure at all Xaa locations
  Clone ID: MRT4577_2922C.1.pep
IGTLEAGRGNSQSQRPSARSRLSFAPPPLSFPXTPPHPPPVRPSTGESPPTQWRPPPRPXAPXRPPPPPXPPAPPPPXPRRPRPXPPPXPRAPXPPPPRLPAPPGGDSPGEVAYRRRRRHEEVVG

SEQ ID NO: 291824 - protein, 69 aa, Zea mays
  Clone ID: MRT4577_29230C.1.pep
MAERTNAMAAPRPLLRRMLSFREPLLVIPYLLSFLGAAASALARSHSSLLHSLARALFPPAPADDNAKY

SEQ ID NO: 291825 - protein, 173 aa, Zea mays
  Clone ID: MRT4577_29231C.1.pep
MDPYMTRLGAGATHQLSRAEAMPDRRSRFWQTDVQLAPRIDIICPLPRRPSRLPVLNSPKLNGALPLYRADPTFDIVDLILSKNDPDVDTDSSSQAGFFCGSPPARTDNPVINDPQFGKKTPSFSPLFGGSSSGKMTAGRVEVGSPSSCGASSPKVRIEGFACGNKEPPHCFA

SEQ ID NO: 291826 - protein, 152 aa, Zea mays
  Clone ID: MRT4577_29232C.1.pep
MAPPWGMPRGMADARRVSPGGLCERWWAELRLIARRSSWNAVVPLRCVIRDTALSIQDEGGHAQKDWAPTCGPRDIKNIELGSSNVGCRGNLLVPYRSRSAYPWRAGEASCGREDEYRVPPGTGALFASRPSRRAACWMTLTPPAIGWDGTH

SEQ ID NO: 291827 - protein, 127 aa, Zea mays
  Clone ID: MRT4577_29233C.1.pep
RLWDRAASGLICYETSGHMLRPTLRNVDRRGRLEATGIHTSWLTSRKLPPGHAITSSCPSSSSPYVVSTFVASHGLVESERRLSLPEVISYSQRYLMIPSSRENERTRGWRPLYRIGCSAGASRFPH

SEQ ID NO: 291828 - protein, 141 aa, Zea mays
  Clone ID: MRT4577_29234C.1.pep
WSRSCRPREELERRRGSGRQPRRATEGGRRRGGAVCPPRRCEGPRQPRPRPRMTQRAPAEPSKQGRAWLGRRRPSSFPQNTAAFTERNEGVGKRRNSNFGFSSLRPRSAVPRRNYSRRGRGTDRALTPLSRWGSSTVEGEK

SEQ ID NO: 291829 - protein, 209 aa, Zea mays
  Clone ID: MRT4577_29235C.1.pep
LSVAQRLNIATDVAQAITYLHEYKERPIIHGGIRSSGVLLTDALAAKVAGFGLAGTAASGSGSGSDATPARSAAGYVDPEYLSTYQLTDKSDVYAFGVLLVELATGRPPVERSRGGEARLTTKWALQKCRAGEAVVAMDPRMRRSPASVAAVERTLALAAQSVAAARDERPSMRRCSELLWTIRRDYHRQEEPRCGAVAAERSDEWVIR

SEQ ID NO: 291830 - protein, 428 aa, Zea mays
  Clone ID: MRT4577_29236C.1.pep
MAPPPQPKQLVLAASSADAGVAAWDLRTGAEDIRLRPCASRPRSLASVADRFLASAQALPAGGNSGTIHFYYWDKPQVAVKSFPAEPIRALIADQEGSYLIGGGSNGNIFLWEVSSGELLHTWHAHYRAVRCLGLYDYLLVSGSEDGTIKVWDLITVLDEQSRLEVQTPYLYSFSQHALPVTDIACFLGAIAISSSEDRTCKIWSLSEGRMLRSISFPTSIDSIALDPRSHIFYAGGRDGKIYVTAMGVDLSFHGRDESSILGALDDHSKAVTSLASSRDGLLLVSGSEDGNVRVWDTRCQQVTRKFKHSQGPVTNVLIVTPQRVNLPPLQPLRKVRSANGEAERQAVLFHRPENDVPIPGNKTFIFMERYLDELQKHGGSSRLFDFGPNAQNGTPNQQGTEWRDRYLELQDLFVHEVLHQMPSSRNP

SEQ ID NO: 291831 - protein, 270 aa, Zea mays
  Clone ID: MRT4577_29237C.1.pep
NSARGEPPSLWENPRAATMSWKPCAERCSNEPSDVPSVNETSGYIFIHAEGGLNQQRIAICNAVAIAKIMRATLILPVLKQDQIWKDQSKFEDIFDVDHFINYLKDDVRIVRDIPDWFTEKDELFTSIKRTVKNIPKYASAQFYIDNVLPRIKEKRIMSIKPFVDRLGYDNVPTEINRLRCRVNYHALKFLPDIEEMAVKLAARMRNKTGSINPYMALHLRFEKGMVGLSFCDFAGTREEKAMMAAYRQKEWPRRFKVTRTGLDTSVTLD

SEQ ID NO: 291832 - protein, 41 aa, Zea mays
  Clone ID: MRT4577_29238C.1.pep
GNVCIASFDWRCSGVCNPVERIKYVHSRCGEGEDAIWSASF

SEQ ID NO: 291833 - protein, 122 aa, Zea mays
  unsure (1)..(122): unsure at all Xaa locations
  Clone ID: MRT4577_29239C.1.pep
LEARACASSSPRFIMPWAXGXXAPXYHSTXVPTYKXXXEXSSFRLPXRVPGEVLPVVQRXGXSVTGRGWWRRXRXTEYPTRYQXRGGXXXALSTXSSTLXGEGPXRHFAXPAPFSHFFTXXA

SEQ ID NO: 291834 - protein, 185 aa, Zea mays
  Clone ID: MRT4577_2923C.1.pep
SKRLDKLMAPDCIIEDTAYYKPLDAKCTHIYFKRLMESMGEKVKFAIDEVCQGAGRTAAVMWHLEWNGYIIPFSRGCSFYICSVNGAVLLIRKIHIFNESPLKPGKWALEILNIVTNLFNVFPKPAEGFLKDPESVAQPFINLYKFYVEPFILPFLAYYTHFWTYVARGLSMVLHILYNLYKRLM

SEQ ID NO: 291835 - protein, 71 aa, Zea mays
  Clone ID: MRT4577_29240C.1.pep
KKGVGRLNKSLFLVLELLEFCRRVKKSIVVLKSHFASASGGATSIIYTLVVVGAASPRVGQGNLIVFGGVG

SEQ ID NO: 291836 - protein, 121 aa, Zea mays
  unsure (1)..(121): unsure at all Xaa locations
  Clone ID: MRT4577_29241C.1.pep
DSWQIAKXFAPDGSLXGDAWTSCRDNIRNCSSEQMDVLHGFRAELIRELKVAEGEREWGLFVDSCFTHCQTQSSDWWHSPTSPRLGNQTVAEAVGDWYFGRRRVVKQVDCEYPCNPTCSIQ

SEQ ID NO: 291837 - protein, 132 aa, Zea mays
  Clone ID: MRT4577_29242C.1.pep
VGIIHHWPSTYLASKVSCSPGVLLSLALPTDCMYPCAVLLLIMDGSHGSSLPPRRVLCLVPRPLAVLGQAVLMGPHGSGPLRLGDRCARSWHMESGSVAPVGGAAVAGRAQAPYWRLARDLPQARVRGAGLA

SEQ ID NO: 291838 - protein, 169 aa, Zea mays
  Clone ID: MRT4577_29243C.1.pep
MAKFGEGDARWIVQERADGANVHNWHWAERDCLDWSRALLSKLLAGLPVLSGEGGLTLRTTTLDKLDGEAYVNIRKGKVIPGYELSLTLAWEADATTESGVVKVTGTAEVPYLADENADEDPELRITVRGDDGPLARRAKDAFIAHGKPLVITKIRDYVAAMANGGPAK

SEQ ID NO: 291839 - protein, 308 aa, Zea mays
  unsure (1)..(308): unsure at all Xaa locations
  Clone ID: MRT4577_29244C.1.pep
MADATAALSARSKVQAFLEAARAGDLQSLKNLVAALDEDGTGAASVAAAVRDANKRTALHFAAIGCRTDVCEFLIGELGLPVDPKDDDGETPLIHATRQGHLDTVKYLLDHGADPSLATSLGATALHHAAGIGNTELMKLLLSKGVDVESESDAGTPLVWAAGHGNQDAVKLLLQHNAKPNTENDDGVTALLSAVAAGSLPCLEVLIEAGANPNVKAGGATPLHIAADSGNIEVIKCLLKAGADPNTCDDDELKPVQVAAWRNNHEAVELLLPLTSXIPGVSNWNVDGIIEHMLPKEFEEKSQLKEAT

SEQ ID NO: 291840 - protein, 145 aa, Zea mays
  Clone ID: MRT4577_29245C.1.pep
HHTHIANDDRRRAGAHIAALSAVADAARTSMGPRGMYKMIGSPDQAQQDIITNNDDTSLSRMALLQTDASMHEELSRSQEAVDGDGTTTGGSLAGALLRRTKSLLSPGAHPTAAVDALHRLARRSDGILRSMCVPVELSELGITH

SEQ ID NO: 291841 - protein, 481 aa, Zea mays
  unsure (1)..(481): unsure at all Xaa locations
  Clone ID: MRT4577_29246C.1.pep
MADATAALSARSKVQAFLEAARAGDLQSLKNLVAALDEDGTGAASVAAAVRDANKRTALHFAAIGCRTDVCEFLIGELGLPVDPKDDDGETPLIHATRQGHLDTVKYLLDHGADPSLATSLGATALHHAAGIGNTELMKLLLSKGVDVESESDAGTPLVWAAGHGNQDAVKLLLQHNAXWRASRWLPTCLSASSXCICFSLMIXPNTENDDGVTALLSAVAAGSLPCLEVLIEAGANPNVKAGGATPLHIAADSGNIEVIKCLLKAGADPNTCDDDELKPVQVAAWRNNREAVELLLPLTSPIPGVSNWNVDGIIEHMLPKEYEEKSQLKEAASLKSGLTQTIEVSSEAKKRSLEAKSRGDDAFRRKDYLVAVDAYTQATELDPTDATVLSNRSLCWLRAGQAERALEDAKACRALRPDWAKACYREGAAHRLLQRFEEAANAFYEGVQLEPENTELVNAFREAIEAGRKFHGVNTPNSTQ

SEQ ID NO: 291842 - protein, 62 aa, Zea mays
  Clone ID: MRT4577_29247C.1.pep
NNYEPKIYMGALHIHGYELFHPNRSLHYNYTQFQSHAPNLHRHLHLNPSHNTPITAFNEYIF

SEQ ID NO: 291843 - protein, 258 aa, Zea mays
  unsure (1)..(258): unsure at all Xaa locations
  Clone ID: MRT4577_29248C.1.pep
LSQALIRDDSCKQAHDSQDKGVPFHQSKLQWSAAAGDGSYATTRVDTRSKSKADPRPVQAALGDPLRQTSMPRILASGKAEVGADRTPDFQLSCKPEGDLNSGNVWSHRRAAGLDAAPRLNGQRPYPAASDGIEGDWSVVRPRYWWRKSWTSTERTRQYHQFDVKGTGLFKLKLKGKCYNCFSPDHLAFCCQAPSRCWLCLQSGHRARYCSRISYQGTFTAAGFFPKPVEQPSRTPTYHEARPWTDDLHKXLEHCGRT

SEQ ID NO: 291844 - protein, 151 aa, Zea mays
  Clone ID: MRT4577_29249C.1.pep
DKLAYCLCLLNFSTRSVMGSSGCSSEIVESNEDLDNAPVSGSSVLHINVKTEEKDGRRRGHPVEDELDQLLKAIDSRTYRRALSPGQAGADSLSKHAQKTPRSGSSQIAVTGICSKPVNMKQALRRHCISQASEMAAMKRLSMSPGVIEFI

SEQ ID NO: 291845 - protein, 96 aa, Zea mays
  Clone ID: MRT4577_2924C.1.pep
MAWRGAASRSIIAAVRARAASPSSTAASRLRSTAPLPAPSRRSVPAFAFATARPLAAMSGSPAAAVVKLTGHAATSVRACCELSQGTLFCRTCQDR

SEQ ID NO: 291846 - protein, 47 aa, Zea mays
  Clone ID: MRT4577_29250C.1.pep
AHSHSNSIYLSIGSYLRYTLTRSVISSSRSPIFTPLSNSLYLLLQQL

SEQ ID NO: 291847 - protein, 47 aa, Zea mays
  Clone ID: MRT4577_29251C.1.pep
WHIGLFPWQLFVFHLVHSNCPFEIKLVHQSFWQVARSEVSLCAVSTG

SEQ ID NO: 291848 - protein, 75 aa, Zea mays
  unsure (1)..(75): unsure at all Xaa locations
  Clone ID: MRT4577_29252C.1.pep
TEAFRETCFXCVHSSHRVEPFFCLSSLETVFFLNMQTDIFEPFTAYGEIGNIFTXKLDRIFLRKCFVMCAFISQR

SEQ ID NO: 291849 - protein, 54 aa, Zea mays
  unsure (1)..(54): unsure at all Xaa locations
  Clone ID: MRT4577_29253C.1.pep
FFYSSFTSYKFSTLSASCICIXPLSERNRSVSAVFKYLVVVFARRLFQCGPGVL

SEQ ID NO: 291850 - protein, 41 aa, Zea mays
  Clone ID: MRT4577_29254C.1.pep
KVSSTWDTRWELWSSGLTTRYTYHSIGSVGKEHMRPEGMCT

SEQ ID NO: 291851 - protein, 296 aa, Zea mays
  unsure (1)..(296): unsure at all Xaa locations
  Clone ID: MRT4577_29255C.1.pep
MAYRSAVLLPALLLAVAVVVASAAAGDGRWREEQARDRVPRVPGQAFNTSFAQYAGYVTVSEQRGAALFYWFFEAEKDPGSKPLVLWLNGGPGCSSIAFGLGEEVGPFHVNADGKGVHVNPYSWNKVANLLFLDSPVGVGYSYSNTSDDALKNGDARTATDSLAFLLKWLERFPQYKEREFYLTGESYAGHYVPQLAQAIKRHHEATGDKSINLKGYMVGNALTDDFHDHYGIFQFMWTTGLISDQTYKLLNVICNXKSFVHSSPQCHKIMDIASTEPENIASYNIFTPXTCHASF

SEQ ID NO: 291852 - protein, 317 aa, Zea mays
  Clone ID: MRT4577_29256C.1.pep
PTRCTQASSEHPLAKAILDYALHFHFFGKLPSSKDGIEQRKDKVLSQWLLEAEDFSAVPGKGVQCSINGKHVLVGNRSLMTENGVTIPPEAETFLIDLESNAKTGILVAYDGDFVGLMGITDPLKREAAVVVEGLKKLGVHPVMLTGDNWRTAQAVAKEVGIEDVRAEVMPAGKADVVRSLQKDGGTVAMVGDGINDSPALAAADVGMAIGGGTDIAIEAADYVLVRNNLEDVITAIDLSRKTFSRIRWNYFFAMAYNVVAIPIAAGALFPFTGLQMPPWLAGACMAFSSVSVVCSSLLLRRYRKPRLTTVLQITVE

SEQ ID NO: 291853 - protein, 388 aa, Zea mays
  unsure (1)..(388): unsure at all Xaa locations
  Clone ID: MRT4577_29257C.1.pep
MCCLQLKDMVLKFSGSSKQCKGTAGTQSFRSSGDRYRRPYPGFIDDTGFTPASKVLGEDYYPRTALAGAAGAAGGARTASSDTLDMGRSNRKSPGSSGWIPGTDEAAAGGDDVLALEDAAAPREWTAQVEPGVQITFGTIPTGGNDLKRIRFSREMFNKWEAQRWWGENYDRIVELYNVVMFSGRQQGCSTPVSSVDDLALRDSSYSRGGSTXGAARSQRRRRRRHCRRWQAKNRSPGARRTRQRQQGPPRHRTRPRIPPGXAAYFPSAAVPDPSDHVWAHHFNMLNSAAAAAGTSAAMGGGAPSSYDPSRATTSSRDEASVSLSNVSDLEATEWIEEDEPGVCLTIRELGDGTRELRRIRFSREIFGEDRAKVWWEQNRERIQAEYL

SEQ ID NO: 291854 - protein, 196 aa, Zea mays
  Clone ID: MRT4577_29258C.1.pep
NICVCFHARFSLPLISLPFSLRGNILSSLIPPPPGSDFSRLFFIFSLASFICSWLQRPHGALVPAQRKQLPWLPRLCSELPSPAALARPCSTSPHRDAPARVELPIEPPWRPSSQPARAPAALLQRRALRSCTPSVLFSSLVDLLSRSAPLSSLPRSSCARAVPARRAVLCPAHSHFSSPCSAHRAELPSAARACP

SEQ ID NO: 291855 - protein, 51 aa, Zea mays
  unsure (1)..(51): unsure at all Xaa locations
  Clone ID: MRT4577_29259C.1.pep
THTLCIRCGRRSFHLXKSTCSSCGYPDARIRKYNWSVKAIRASETDREPEG

SEQ ID NO: 291856 - protein, 731 aa, Zea mays
  unsure (1)..(731): unsure at all Xaa locations
  Clone ID: MRT4577_2925C.1.pep
MDPKGKRMVINDKEKECFINEPKDDKPTDSGSSHKKKDGKKKRRIKKIVYYDSDESSSSQRDDDDEKKKTDTLKISHEGNDATMITKMELVECELGRFAMIRGEEPTQTYNRLKTLVNKIRSYGSTRWTDHDVVRLMLRYTKMMLEEILGKFVSGRMMIKETRYVDEALNGPMPIHEPQTVALKETSSREGLPSKAAQVEAAGLNEDEMALIIKRFKTALKGRKEHPNKSKTKGKRSCFKCGKIGHFIANCLDNDSDQEQGKNGKRENKKVYKKAKSEAHLGKEWDSDCSSSDSDDEGLAATAFNKSSLFPNEHHTCLMAKEKKVSTRRTITYASSSDDEPSDDEVDYASLFKGLDRTKIDKINELIDALNEKDRLLEKQEDLLYEEHDKFVSAQNSLALEVKRNEMLSCELSTCHESISSLKSINDDLNTKLEITNKSSSCVEHVVIFNRCKDFNVDACVEHLTSIAKLNGEVASLNAQLKTSKNDFDKLKFARDAYTIGRHPSIKDGLGFKREAKNLTSQRAPIFNKEKGKAPMANSSQKNHAFIYDRKFSRNAYHNGSCDAYDSNAMIASSSFFVHGRDMPRRNVVHVPRKPSNEPSTIYHACNASFAICRKNKKVIARKLGAKCKGDKTCIWVPKAIVTNLVGPNKSWVLSGTIIRGTXRRLILSWXPISXSCKGLMGPIKKMFTSYVKNKDSQDSIIFGDGIQGMVKGLGKIAISNAHSISNVFCV

SEQ ID NO: 291857 - protein, 51 aa, Zea mays
  Clone ID: MRT4577_29260C.1.pep
QSHRSTNDKQGQEHQSRQTPIPRGQEVIAEHKRRVALHSTAAESAGCPRAP

SEQ ID NO: 291858 - protein, 275 aa, Zea mays
  unsure (1)..(275): unsure at all Xaa locations
  Clone ID: MRT4577_29261C.1.pep
MQCCLQLKDMVLKFSGSSKQCRGTPGGQSFRSSGGGRYLRPYPSFIDVTGFTPANKVLGNALAGAGAAGXGANRVVGYVGPDQEQXKTPQSRAAAAGDDVREWTAQVEPGVQITFVTIPSGGNDLKRIRFXCRRYAATTASLLNDNDSLRRPLILATELTPKWSYMLRTSXSREMFNKWEAQRWWGENYDRIVELYNVLTFSGRQQGCSTPASSVDDSASALRDSSYSRVGSASRGSPITVPPPPPPPVSSKERIARSASFRATAAGSSSAPRAA

SEQ ID NO: 291859 - protein, 110 aa, Zea mays
  unsure (1)..(110): unsure at all Xaa locations
  Clone ID: MRT4577_29262C.1.pep
DKTQNLNRAMMRRFQCLLMSXQLNATIGSKKYLXFNEQTPPTLVHLDXRFXTADWEDXFQTMCYKALXSFIFDDCPLLIGLQRKFSRQDVVPFKKLLAKIRSFLEEVVRS

SEQ ID NO: 291860 - protein, 116 aa, Zea mays
  Clone ID: MRT4577_29263C.1.pep
AVKLESDLKSLSEAYNSIEQANYRLDAEVKTLRQGGSVPYPDVEAIKAQAKEEAEKDSEAELNDLLVCLGQEQTKVEKLSTRLAELGEDVDALLQGIGDDTAIPDDDDDDDEDSEE

SEQ ID NO: 291861 - protein, 69 aa, Zea mays
  Clone ID: MRT4577_29264C.1.pep
FNHSCLWIQHARLVGQVVRCVVYCRFDLRAFFVSMWDRFMVAGPLAVLNFPIPLVWKGGRKLVGSSSRV

SEQ ID NO: 291862 - protein, 106 aa, Zea mays
  unsure (1)..(106): unsure at all Xaa locations
  Clone ID: MRT4577_29265C.1.pep
SPNCVGIFKPRYAPGKRRFRGPRIHEETLHKQKTGVGNVDQTTGAKIAKGFVLLXLTLLXTLRQLKDDLCKVMLPYTDLNLKEKKRYNLKDFDNVDGPXMAVTHLL

SEQ ID NO: 291863 - protein, 95 aa, Zea mays
  Clone ID: MRT4577_29266C.1.pep
RTRPTRKHRSIKAAMVFFSFTVKIVGGVHTYIPIYKVTYTRNKGKVTDRIWAKLLSFTNQPSFLKQKDIHETCDADRLANTPPLTTGTNSSVEKS

SEQ ID NO: 291864 - protein, 368 aa, Zea mays
  Clone ID: MRT4577_29267C.1.pep
MPPPPQANGGKVTPNLAMDAEATRMLNLTVLQRLDPAVEDILITAAHVTLYDFNIDLNQWSRKDVEGSLFVVKRNSQPRFQFIVMNRRNTDNLVEDLLSDFEYELQPPYLLYRNASQEVNGIWFYNQHDCEAVASLFGRILNAYAKVPPKPKVPTTKSEFEELEAVPTSAAIDGPLEPPLSSTAVVSNAPDESLVNYFNGAASIGSVPSAQMAGRAHPSNDTVTPSHVPLIVPSATPTHQMSHPLGGSSAPPLPLHDTNPHASQSANLLTPAFFAPPPPSSTSVTPPASSMMPTAPPLHPTSTAAQHPSYGTPLLQPFPAPSPPPSLTPAHNDGLVISRDKVKDTLQRLVQNDEFIDLIYRELQSVHM

SEQ ID NO: 291865 - protein, 162 aa, Zea mays
  unsure (1)..(162): unsure at all Xaa locations
  Clone ID: MRT4577_29268C.1.pep
YYRNGWLAYLCNSKAQVKRVLFKNVEKKKKKKKKKKRIHEEENVPIDMDGGQIICNLIAVHAGLERTIDLNEQLRVLRTRDTRVPKVQMLSGRQDVWDTPKGLAGKQTIIVSGHHGKLHIDGLRFIIDEXGGGYEDKPIAAIVFPSKTLIRSTEEAGTTSER

SEQ ID NO: 291866 - protein, 227 aa, Zea mays
  unsure (1)..(227): unsure at all Xaa locations
  Clone ID: MRT4577_29269C.1.pep
LNAYAKVPPKPKVPTTKSEFEELEAVPXSAAIDGPLEPPLSSTAVVSNAPDESLVNYFNGAASIGSVPSAQMAGRAHPSNDTVTPSHVLLIIPSAAPAHQLPPSVASSAPPLPIHDTNAHTSRSTNLVTPDFFAPPPSSSTPLAPPGASVIPTAPPLHPTSASVQRSQYGAPLLQPFPPPTPPPSLTPAHSERPVVTRDRVKDALQRLVQSDEFIDLVYRELQKSLV

SEQ ID NO: 291867 - protein, 92 aa, Zea mays
  Clone ID: MRT4577_2926C.1.pep
MAWRGAASRSIIAAVRARAASPSSTAASRLRSTAPLPAPSRRSVPAFAFATARPLAAMSGSPAAAVVKLTGHSATSVRACCELSQGQNGKDG

SEQ ID NO: 291868 - protein, 316 aa, Zea mays
  Clone ID: MRT4577_29270C.1.pep
MSAPSAPPRTVICVGDVHGYITKLESLWSNLQAALPADAFATALVIFLGDYNDRGPHTRRVLDFLLALPTRHPAQRHVFLCGNHDLAFAAFVGALPPPPDGSPFSATWDEYIHNEEHEGWFRGPGFEGMHVQGRRWGGVIKERWNPKKGLPYKGSIYDAQPTFESYGVAHGSPDLAKAVPEEHKRFLHDLVWIHEEENVPIDMDGGQIICNLIAVHAGLERTIDLNEQLRVLRTRDTRVPKVQMLSGRQDVWDTPKGLAGKQTIIVSGHHGKLHIDGLRFIIDEGGGYEDKPIAAIVFPSKTLIRSTEEAGTTSER

SEQ ID NO: 291869 - protein, 78 aa, Zea mays
  Clone ID: MRT4577_29271C.1.pep
KKNGYPMSLKKTSSNSNPCAVHQGQPREFFCPVILKKNCGGNCVIPQSGGDLPKKTLVGAVTKKKWLFWLGRCPSREM

SEQ ID NO: 291870 - protein, 58 aa, Zea mays
  Clone ID: MRT4577_29272C.1.pep
PTLLIPVRMSSCRAIVTNWLHSELAAIHHCYEPQTLGTGTPGCVVTQNTLARSKLFLG

SEQ ID NO: 291871 - protein, 58 aa, Zea mays
  Clone ID: MRT4577_29273C.1.pep
DLLHIIISYYMVLIVLNLHQIILHKQYYRHTLIFFVHKVHFDTINSSTNDLPPGPTHT

SEQ ID NO: 291872 - protein, 83 aa, Zea mays
  Clone ID: MRT4577_29274C.1.pep
LFYNNLYIFLGGFSFNFFFQTYILSLSSPCVEGGSLETTQPKNRTRREQPRGGGGPTLQRPLVATQKRAPPTWGGPPTKKEGR

SEQ ID NO: 291873 - protein, 98 aa, Zea mays
  Clone ID: MRT4577_29275C.1.pep
RHFLRSASEELEWGNFQLERGYADFCAYEFTRLFSPGSGDGTASVQDHNHCRRASAARQQDKGADQYQLGGRHGSARLGEEDKIDMLSEDSNEELARA

SEQ ID NO: 291874 - protein, 53 aa, Zea mays
  Clone ID: MRT4577_29276C.1.pep
WGTSEFGASPLGGRGLLRFCPPPNGLWLYNLQHSFCSKSPLLKKTPFSSRGPF

SEQ ID NO: 291875 - protein, 39 aa, Zea mays
  Clone ID: MRT4577_29277C.1.pep
INGFRRRENLRSGLSQWIDPGFVGVTFGRPEGKRNRCVA

SEQ ID NO: 291876 - protein, 97 aa, Zea mays
  Clone ID: MRT4577_29278C.1.pep
ITCTCGLYSLEGARLRDAGMPRMMEGARLRDTGKGSAAVVCGLPARRGARDRTCTGGVDAYSTTIISSRSPRIMYVTSRSFLPIAITHNVLFSLVFL

SEQ ID NO: 291877 - protein, 76 aa, Zea mays
  Clone ID: MRT4577_29279C.1.pep
AAGGRPSRNGLPIRKGLGKSRKGWRFKRPPGSWGWGPPLLGVGGVLRICPAKRKRFKLWKETFGKRRGPGLGRPIF

SEQ ID NO: 291878 - protein, 1297 aa, Zea mays
  unsure (1)..(1297): unsure at all Xaa locations
  Clone ID: MRT4577_2927C.1.pep
MDPKGKGMVVNDKEKEALFNEPRDDKPTDSGSSHKKRDDNKKRRIKKIIYYDSDASSSSPRDDDDSSSKKRTVNQNYSFDYSRMPYNSNAHLLSIPLGKLPHFDGEDYSFWSHKIRSHLFSLHPSIWEIVENGMHLDSTDNLVIINEQIHKNAQTTTVLLASLCRDEYNKVSGLDNVKQIWDTIKISHEGNDATMITKMELVEGELGRFAMIRGEEPTQTYNRLKTLVNKIGSYGSTRWTDHDVVRLMLRSFTVIDPHLVNLIRENPRYTKMTPEEILGKFVSGRMMVKEARYVDDALNGPLPVYKPQLVALKATNSREALPSKVAQVEADGLNEDEMALIIKRFKTALKGHKEYPNKNKTSGKRSCFKYGKMGQEKSGKKEKKKNYRKAKGEAHLGKEWDSDCSSSDSDDEGLAASAFNKSSLFPNEPHTCLMAKEKKDRLLDKQEDILYEEHDKFISVQKSLALETKRNEMLSFELSACHESISSLKSLNDELNAKLEKANETSSCVEHVVICNRCKDFDVDVCDEHLIAITKLNDEVASLNAQLKTCKSNFDKLKFARDAYTIGRHPSIKDGLGFRKETKNLTSQKAPVLNKEKGKAPMASSPQTNHAFIYDRKIANHNKSYVHTAYNDAHAMFASSSTFVHGRSRPRKNHVVHHVPRKMCNIPTTVFHACNTSFVLSCKNEKVVARKLGFKCKGDKTCIWVPKIIVTNLVGPNKSWVYAFGGSSWIIDSGCTNHMTGEKKMFTSYVKNKDSQDTIIFGDGNQGKVKGLGKIAITNEHSISNVFLVESLGYNLLSDKSETQGTLKRFLRRAQNEFELXRVEEALQDPDWVLAMQEELNXFKRNEVWSLVPHPKQNVVGTKWVFRNKQDEHGVLTRNKARLVAKGYAQVAGLDFEETFAPVARLESIQILLAYAAHHSFRLFQMDVKSAFLNGPIKEEVYVEQPSGFEDDRYPDHVFKLSKALYGLKQAPRAWYECLRDFLIANAFKVEKADPTLFTKTCDGDLFVCQIYVDDIIFGSTNQKSCEEFSRVMTQKFEMSMMGELTYFLGFQVKQLKDDTFLSQTKYTQDLLKRFGMKDAKPAKTPMGTDGHVDLNKGDKSVDEKAYRSMIGSLLYLCASRPDIMLSVCMCAIYQSDPRECHLVTVKRILRYLVATPCFGIWYPKGSTFDLIGYADSDYAGCKVDRKSTSGKCQFLGRSLVCWSSKKQTFVSLSTIEAKYVAAAQCCAQLLWMRQTLRDFGYNLSKVPLLCDNESAICMADNLVEHSRTKHIDIRHHFLRDHQQKGDIEIFHISTEN

SEQ ID NO: 291879 - protein, 86 aa, Zea mays
  Clone ID: MRT4577_29280C.1.pep
WDAGGTGRVDPRGRCLRNRARSASRRRRQQWRAYWSLGPTDRFYLLGPGIVTCVADVCTCTYTLTPIPSTSHPPSPPTSHLYLADT

SEQ ID NO: 291880 - protein, 62 aa, Zea mays
  Clone ID: MRT4577_29281C.1.pep
RLSSLSHLRLNRAHLDPRRASTRGGAWRGRPTAAARPVPMANQRTTSVERSGCIQPFSSLSD

SEQ ID NO: 291881 - protein, 55 aa, Zea mays
  Clone ID: MRT4577_29282C.1.pep
QLQFSIKTLFLIRTRWFIERLTIVGVDRPRAPWLPLLPSDRSIGERMLRRRRLCV

SEQ ID NO: 291882 - protein, 160 aa, Zea mays
  Clone ID: MRT4577_29283C.1.pep
MGHAAGLRAGTRYAFSRDFKKKGMIPLSTYLKQYKVGDIVDVVANGAVQKGMPYKVYHGKTGIVYNVTKSAVGVILQKQVGNRYMEKRINVRIEHVRHSRSREDFLKRVKLNFAKQQKAKETGEPQQMKRQPAMPRGERVVSLKDNKPENITPVPYETYI

SEQ ID NO: 291883 - protein, 48 aa, Zea mays
  Clone ID: MRT4577_29284C.1.pep
GAPAWLENGLIRAAPPKKANPPRGAQFPPESIFPPEGKKIILTFVRFI

SEQ ID NO: 291884 - protein, 146 aa, Zea mays
  unsure (1)..(146): unsure at all Xaa locations
  Clone ID: MRT4577_29285C.1.pep
MLPAVVPYKGSLREIDAGPMTSYYREKREGHWPSMAAGVAMDGAEATGRTGMRNGGDXGKGKCSGALDKNKXRSYDEQTKSMESMFTTHAKLDPRQKLQLARELCLHPHQVAIWFQNKRSRXKYKRLEREYLALRDDYHAXLLCNY

SEQ ID NO: 291885 - protein, 123 aa, Zea mays
  Clone ID: MRT4577_29286C.1.pep
MGAQLADACIALLSSYAFLAVSGQKFNAIFSFCDFMSDTGILCMNGPSAVLTLTQPTYCETFFVRATCRWSHSRLVVYFLAEKFRLPLLKPSKQGGSYFKHVANISIIGATTMDSGLFQFLGI

SEQ ID NO: 291886 - protein, 86 aa, Zea mays
  Clone ID: MRT4577_29287C.1.pep
TICLQVMCETGEGPTSPWISFRALFAAIQDNISSVARELIFHHYEELKESIITREEMVKKMIIVVGEKVLLEALKKLHYCVDRKIS

SEQ ID NO: 291887 - protein, 109 aa, Zea mays
  Clone ID: MRT4577_29289C.1.pep
ILDLRAGFHQILLQQGEEYKTAFQTYLGHYEFRVMAFGLTGAPGTFQKAMNHTLAPMLRKCALVFFDDILVYNVSLESNLHHLQQVFELLAREQWTIKLSKSSFAQDQF

SEQ ID NO: 291888 - protein, 87 aa, Zea mays
  Clone ID: MRT4577_2928C.1.pep
MAWRGAASRSIIAAVRARAASPSSTAASRLRSTAPLPAPSRRSVPAFAFATARPLAAMSGSPAAAVVKLTGHSATSVRACCELSQGT

SEQ ID NO: 291889 - protein, 135 aa, Zea mays
  Clone ID: MRT4577_29290C.1.pep
KKPQFFKNGYSGMVKIISPQPMVGGTFFQDPPLGRFSGRDKKQTGAVGVLKNVEKKDPPGAKVAKASSKKKIFDPLFMQGLLFPNGSEMVPFYINFVFCGCCLPCELFSFTIGGPFIWLRSILVFPPFANQKWFF

SEQ ID NO: 291890 - protein, 84 aa, Zea mays
  unsure (1)..(84): unsure at all Xaa locations
  Clone ID: MRT4577_29291C.1.pep
YLSTTTSLGEAFWRVSAVCLACLYCLTRTWETFLLVLVVYSAWICPXFELAFLRHLSWVLFLVENIVNSFFAIDIILTFFLAYL

SEQ ID NO: 291891 - protein, 81 aa, Zea mays
  Clone ID: MRT4577_29292C.1.pep
QAWEDGHHLGRFQVFALDWPRTWPTGPIEMFLAVGLRNEVVLRRFLWTDLVFRLMLQLTYLDVSGTPLVSLDHVVGANVNL

SEQ ID NO: 291892 - protein, 40 aa, Zea mays
  Clone ID: MRT4577_29293C.1.pep
LCRRVALVSSSSRHLYGVLVSDLTVSDYLHRSIHVETHLL

SEQ ID NO: 291893 - protein, 428 aa, Zea mays
  Clone ID: MRT4577_29294C.1.pep
ASGRTKHAARTRMAIVREEAVDTSISPRVSALRPSKTMAITDQAMALRQAGVPVIGLAAGEPDFDTPPAIAEAGMDAIRNGYTRYTPNAGTLELRKAICTKLQEENGVSYLPDEVLVSNGAKQCITQAVLAVCSPGDEVLIPAPYWVSYPEMARLADATPVILPTNISENFLLRPELLTDKINEKSRLLILCSPSNPTGSVYPKELLEKIADIVKKHPRLLVLSDEIYEHIIYQPAKHTSFASLPGMWERTLTVNGFSKAFAMTGWRLGYLAAPKHFVAACGKIQSQFTSGASSISQKAGVAALNLGYAGGEAVSTMVKAFQERRDYLVKNFKELPGVKISEPQGAFYLFIDFSAYYGSEVEGFGTIKNSESLCIFLLEKAQVALVPGDAFGDDKCIRISYAASLTTLQTAMSKLKEAVALLKPCVAA

SEQ ID NO: 291894 - protein, 257 aa, Zea mays
  Clone ID: MRT4577_29295C.1.pep
MADSMVASFWGPVTSTTELCEENYAHSSYIAEFYNTISNVPCVLLALIGLVNAFCQGFEKRFSVLHISNMILAIGSMIFHATLQLLLQQSDETPMVWEILLYMYVLYSPDWHYRSTMPTFLFLYGAAFAVVHFFARFQVVFKLHYVGLCLLCIPRMYKYYIQTKDVGAKRLAKLWVLTLTLGTLCWLVDRVFCKKLSHWYVNPQGHAWWHVLMGLNSYYANTFLMFCRAQQRGWEPRITHLLGFLPYVKVQKPEKRE

SEQ ID NO: 291895 - protein, 62 aa, Zea mays
  Clone ID: MRT4577_29296C.1.pep
LKKKTILALIILIFQNITLDLSLAMAIVHLSLAKKKCMHKEKKNFKYNKEFSHYQIHLSIIA

SEQ ID NO: 291896 - protein, 70 aa, Zea mays
  Clone ID: MRT4577_29297C.1.pep
RRFVRHVISVLHEIILRQLRGLLTILPHYTNFPPHRISRPDNAIKPDQSSQDDITVQNYEPRYTYNHLHT

SEQ ID NO: 291897 - protein, 73 aa, Zea mays
  Clone ID: MRT4577_29298C.1.pep
KISSPVIPVLVTWALGYIVAKLFFAVVEMSIDTIILSFCQDAEEHQGNAQYAPPALMETLDEQGELQRLTQGP

SEQ ID NO: 291898 - protein, 59 aa, Zea mays
  unsure (1)..(59): unsure at all Xaa locations
  Clone ID: MRT4577_29299C.1.pep
YFVNQVGSLLLYLFRKKVLQSTELTSSPNAQMQIQATTRATTTLSMLISCTDXCHHVIL

SEQ ID NO: 291899 - protein, 347 aa, Zea mays
  unsure (1)..(347): unsure at all Xaa locations
  Clone ID: MRT4577_2929C.1.pep
MTGEKKMFSSYVKSKDSQDSIIFGDGNQGKVKGKQVGSTHHNKNVMTTARPLEXFIWTSSDPSPTLASGEDKSETQGTLKRFLRRAQNEFELKVKKIRSDNGSEFKNLQVEEYLEEEGIKHEFSAPYTPQQNGVVERKNMTLIDMARTMLGEFKTPERFWSEAVNTTCHAINRLYLHRLLKKTSVEEALQDPDWVLAMQEKLNNFKRNEVWSLVPRPKQNVVGTKWVFHNKQDEHGVVTRNKARLVAKGYAQVAGLDFEETFAPVARLESIRILLAYAAHHSFSLFQMDVKSVFLNGPIKEEVYVEQPPGFEDDRYPDHVFKLSKALHGLKQAPRAWYECLRDFEST

SEQ ID NO: 291900 - protein, 90 aa, Zea mays
  unsure (1)..(90): unsure at all Xaa locations
  Clone ID: MRT4577_292C.1.pep
VVPGGALAKVQRPVCMISNSPSVVEVFSRIAPKFALMYPKGAFVHWYVGXGMEEGXFLXAREDLAALEKDFKEVGAEFHXGEDGPEGSES

SEQ ID NO: 291901 - protein, 58 aa, Zea mays
  Clone ID: MRT4577_29300C.1.pep
PAGSRQLSSSTIGSPIPDLPPIYRNTTRTHPRPRPERSHAKKLLESASLCFKVAPIYD

SEQ ID NO: 291902 - protein, 35 aa, Zea mays
  Clone ID: MRT4577_29301C.1.pep
AYPGGDSGVSIIRNTAHIKYKIQCSCLVILDSQPS

SEQ ID NO: 291903 - protein, 49 aa, Zea mays
  Clone ID: MRT4577_29302C.1.pep
RKKKPPLKMLFKGPPLGVNKGTYLGFLGGNVQTTPEAWKIIIKRFYYSL

SEQ ID NO: 291904 - protein, 69 aa, Zea mays
  Clone ID: MRT4577_29303C.1.pep
KPAPITPVPEAQKKKGERKFAKVRAYYFFPPHGFWSPKLPCPVVTGSSFFVPLGPIFVSPPTNGKLFPL

SEQ ID NO: 291905 - protein, 66 aa, Zea mays
  Clone ID: MRT4577_29304C.1.pep
EKKKKKKKKKKKKKKKKKKKKKKKKKKKKNRPLGSNPENSDTGPWGPSQLFLLRGAFLEPCLYPWQ

SEQ ID NO: 291906 - protein, 65 aa, Zea mays
  Clone ID: MRT4577_29305C.1.pep
NLSQSYAYLARRMPTLGVKIVNALPREHMTLHELHQDPRRPRMRTKEPSTIILLPNFYLVLLNIQ

SEQ ID NO: 291907 - protein, 92 aa, Zea mays
  unsure (1)..(92): unsure at all Xaa locations
  Clone ID: MRT4577_29306C.1.pep
TWVPPNFNKPRVKKCFYSKLGGAYPPKVVSNFAPVPPLCFQXKGDFGPKISFVVKALHPLLKGQGGGPTPGKHVGSKAWGLLPPPPLFLYKR

SEQ ID NO: 291908 - protein, 36 aa, Zea mays
  Clone ID: MRT4577_29307C.1.pep
IRHEVLVYSCLDTNTQRAHSLQPIPKPKPPRPKHPS

SEQ ID NO: 291909 - protein, 146 aa, Zea mays
  Clone ID: MRT4577_29308C.1.pep
PAGKANTLVTIDVCTREDGHILQEGWRSFPSGHSSFSFAGLGFLSLFLAGQLHVFRYAAGGRDLSRALVCLLPLIGAGMVAISRCEDYRHDVYDVCVGSALGMSIAYWSYRRHWPRLSSQKCDEPYPRPGVDTQPGCQRFTDDEEA

SEQ ID NO: 291910 - protein, 50 aa, Zea mays
  Clone ID: MRT4577_29309C.1.pep
ILPCNYSCLGCFRCFFFSHCFQKHGLHLLIKEDCNILITTSLPFKKIIYL

SEQ ID NO: 291911 - protein, 1310 aa, Zea mays
  unsure (1)..(1310): unsure at all Xaa locations
  Clone ID: MRT4577_2930C.1.pep
MDPKGKGMVVNDKTKESIVNEPRDDKPSDSGSSHKKRDGKKERRIKKIVYYDSDESSSSPKDNDEEKKKAYKKAKGEAHLGKEWDSDCSSSDSDDEGLAASAFNKSSLFPNERHTCLMAKEKKVNARETPKYSTSSDEDSSDDEVDYTSLFKGLDRSKVEKTNELIDALNEKDRLLERQEDILYEEHENFVSVQHSLALEIKMNELLSSELSICNESISSLKILNDDLNAKLEVVNKFSSCVEHVVICNRSSLNAQLKTCKCDFDKLKFAKDAYTVGRHPSIKDGLGFRREAKNLTSQRAPILNKEKGKAPMTRSSQKNHAFIYDRKFSRNVHYNRSYNAYDSHAMIVSSSSFVHSRNMPRNNVVHHVPRKMQNKSATVFHACNTDFVLSCKNKKVVARKSGAKCKGDKTCIWVPKAIVTNLVGPNKSWVYASRGSSWIIDSGCTNHMTGEKKMFTSYVNNKDSQDSIISGDGNQGMVKGLGKIAISSKHSISNVFLVESLGYNLLSGSQLCNMGYNCLFTNVDVSVFRRSDGSLAFKGVLDDKLYLVDFSKEEAVLDACLIAKTSMRWLWHRRLAHVGMKNLHKLLKGEHVLGLTNVTFEKDKPCAACQAGKQVGSSHHSKNVMTTSRPLELLHMDLFGPVAYLSIGGRELKMNIELKVKKIRSDNGSEFKNLQVEEYLEEEGIKHEFSAPYTPQQNGMVERKNRTLIDMARTMLGEFKTPERFWSEAVNTACHAINRVYLHRLLKKTSYELLIGNKPNVSYFRVFGSKCYILVKKGRNSKFASKAVEGFLLGYDSNTKAYRVFNKSSGLVEVSSDIVFDETNGSPREQVDLDDVDEDDVLTAAIRTMAIGDVRPQEQKEQDQPSSSIMVHSPTQIDEQVHIEEVWDQGGAQDDHVMEEEAPQAPPTQVRATIQRNHPVDQILGDISKGVTTRSRLANFCEHYSFVSSIEPFSVEEALLDPDWVLAMQEELNNFKRNEVWTLVPCPXQNVVGTKWVFRNKQDEHGVXLFQMDVKSAFLNGPIKEDVYVEQPPGFEDERDFLIANEFKVGKADPTLFTKTCDGDLFVCQIYVDDIIFGSTNQKSCEEFSRVMTQKFEMSMMGELNYFLGFQVKQLKDGTFISQTKYTQDLLKWFGMKDAKPAKTPMGTDGHIDLNKGDSDYAGCKVDRMSTSGTCQFLGRSLVSWSSKKQTSVALSTAEAEYVVAGQCCAQLLCMRQTLWDFGYNLSKVPLLCDNESAIHMADNPVEHSRTKHIDIRHHFLRDHHQRGDIEVFYVSTENQQADTFTKPLDEKTFCRLRSELNVLDSCNLD

SEQ ID NO: 291912 - protein, 71 aa, Zea mays
  Clone ID: MRT4577_29310C.1.pep
KKKNCPKMELDDYHFKLKIVLIGDKSVGKTTFLDAITSNFGKIAESEQSNELNTRVVGYVDDNTLFQIHYW

SEQ ID NO: 291913 - protein, 55 aa, Zea mays
  Clone ID: MRT4577_29311C.1.pep
KMLSMENYTISKKKEIYKCSRKCNDCCKDDQHKSVIIYMLLIVIVRVYKINSRVR

SEQ ID NO: 291914 - protein, 145 aa, Zea mays
  Clone ID: MRT4577_29312C.1.pep
MKGSLSHELETGLPAADVWEVYGGLLVGDLIPQLLPQVFSKVELVEGDGGVGTVLLVTLPPGTPGSEAFKEKFVKVDDKNRVKECLVTEGSFLDRGFKKYLVRIEIIGEDREASTIRSTIEYEVDQEHAGNPPVASTSGLAIAKR

SEQ ID NO: 291915 - protein, 62 aa, Zea mays
  unsure (1)..(62): unsure at all Xaa locations
  Clone ID: MRT4577_29313C.1.pep
DAPISITLDDTKPDGSLSGIIGXILAXRKAYRLAKLHKEIRKKKICELYAKVLGSQEALHPV

SEQ ID NO: 291916 - protein, 107 aa, Zea mays
  Clone ID: MRT4577_29314C.1.pep
HQASHSHIVFDFACTSLRSCPTPSQHPPSRVGHCRSLQAIKTMNECLVEEAKMVLQFGVHPSLDIHLPHIVHQDVVVHFGVQATSCLVEETKMSHGTSDTAPYKQLQ

SEQ ID NO: 291917 - protein, 111 aa, Zea mays
  Clone ID: MRT4577_29315C.1.pep
RNSLNLSCNKAAGTFERVERDLPPEIKPNPPTRSKNLEKLRPNLGVPKTQNPPNPKKISGPICLTMKGNFPKKNPFPPPPPKLFAPPQRKPAPSNFKKKKIGGNPPPGAIS

SEQ ID NO: 291918 - protein, 82 aa, Zea mays
  Clone ID: MRT4577_29316C.1.pep
AGRAGIAPYLWHRELASVQLSLVSIELCQATAMAAASGRAPSACALLLSCVPRASSILPHVVVCTQPCTYVSPVRVRTVRHT

SEQ ID NO: 291919 - protein, 68 aa, Zea mays
  unsure (1)..(68): unsure at all Xaa locations
  Clone ID: MRT4577_29317C.1.pep
TAKVFQLEGVXVXPGLKIQEGSPNARDFLKKGYILILGVTSSGDAXDSKDSLLLXKLVLSYKGPIITT

SEQ ID NO: 291920 - protein, 156 aa, Zea mays
  Clone ID: MRT4577_29318C.1.pep
MRECISIHIAQAGIQGANACWQLHCLQHAIQADGHMPGDKTIGGGDDAFNTFFSETGAGKHVPRAVFVDLEPTVIDEVRTATYRQVFRPEQLITAKEDAGNNFSRGHYTIGKEIGDLGLGRITNVADDCTALQGFLGFNAVGAGTASGLGSLLVEG

SEQ ID NO: 291921 - protein, 120 aa, Zea mays
  Clone ID: MRT4577_29319C.1.pep
PPKCALPGRRSMAETSKVAPPSCVPPKNNTDAISHAHTLTKDKRLQATIPNREEPNRNAPGGNLKQRERTPYCSKDKPYAGERHRRRSSIHLLLEGPPCVTNDGTRPREINAEDSPVEPK

SEQ ID NO: 291922 - protein, 122 aa, Zea mays
  unsure (1)..(122): unsure at all Xaa locations
  Clone ID: MRT4577_2931C.1.pep
GGGGGAPPPPPNQKKKFFFFFFFGGGFKTAPPPPPPPPAFFCIVGGGGGKKKKIFFFLXXPPPRVTPFFPKKGPLTKADVQAPDDLTENANVLKAEPDPDPNRPGNYDRSTQSPREKDKKKN

SEQ ID NO: 291923 - protein, 30 aa, Zea mays
  Clone ID: MRT4577_29320C.1.pep
MAQSSSASVKLLVLVVLPALLLLLVQAQGI

SEQ ID NO: 291924 - protein, 237 aa, Zea mays
  Clone ID: MRT4577_29322C.1.pep
MWSSAVYDVNTGGFSNNLHCLARCVSAVVGGSEYTRMAKEQRINSLSNGHTDELQETELLSRASAESNIKSAMQLYVKLSAGIVLDSWNDSSRPHIVPKLIFLDQLCELSPYLPRSTLEAHIPYTILRSIYHQLYGASQMGSEPTELSPRQSPLISLAHASPSMRPNRSDTTPRSHTYESGYHSSSGSQHDDGYEVDRRTGERQLRSMRRSGPLDYGASRKAKFVEGSSSGSHGAGS

SEQ ID NO: 291925 - protein, 104 aa, Zea mays
  Clone ID: MRT4577_29323C.1.pep
GSMYVPLRGRALVASGVLTRDGFWGCPLGRVCNWFRRGCSWVARLLLVDGPVLGMGPGVRYSGVGCFLRFWAISAFFLFLLCFLFSFLIIKFKIKSLNLKKRFI

SEQ ID NO: 291926 - protein, 127 aa, Zea mays
  unsure (1)..(127): unsure at all Xaa locations
  Clone ID: MRT4577_29324C.1.pep
MRECIGFHVSQVRLTAGNACXELYWLEDGILXDGXMPGDKSIAGEVCDQNTYFSDSGGAEDDPXTVRLLARPXTEINEVRTCAXQDLXDPEQFIKSEEDTCHNIGRGYYDVGIDIDDLRVVRIIELD

SEQ ID NO: 291927 - protein, 162 aa, Zea mays
  Clone ID: MRT4577_29325C.1.pep
MAVLVARQGRELQRYSQSTGGRIVVGCIPYRVRCDGELEVLAITSQKGHGMMFPKGGWEVDESMDEAARREALEEAGVLGDTEPVLGLWHYKSRRYVDQTYEGFMFPLRVADELHQWPEMASRKRTWATVQQVMDGCPHWWMREALERLVARHAVPVLQSAL

SEQ ID NO: 291928 - protein, 95 aa, Zea mays
  unsure (1)..(95): unsure at all Xaa locations
  Clone ID: MRT4577_29326C.1.pep
RPAQGLKXAGVLGDTEPVSGLWHYKSRRYVDQTYEGFMFPLRVADELHQWPEMASRKRTWATVQQVMDGCPHWWMREALERLVARHAVPVLQSAL

SEQ ID NO: 291929 - protein, 161 aa, Zea mays
  Clone ID: MRT4577_29327C.1.pep
MAAVLVARQGRELQRYSQSTGGRIVVGCIPYRVRRDGELEVLVITSQKGHGMMFPKGGWEVDESMDEAARREALEEAGVLGDTGPVLGLWHYKSRRYVDQTYEGFMFPLRVADELHQWPEMASRKRTWATVQQAMDGCPHWWMREALERLVARQAVLQSAL

SEQ ID NO: 291930 - protein, 272 aa, Zea mays
  Clone ID: MRT4577_29328C.1.pep
MGPLEAGRAHTPPYRNASSSCIGGEEEPRRGSRNGRSPPPRCRPHLPPPPPPGVAAATASLRLHRLPLPFRPLRSRSRSRSRSFTRVYAISSNDIRVGTNVEVDGAPWKVLEFLHVKPGKGAAFVRTKLRNYVTGNTVEKTFRAGSTLQEPSLSKETKQFTYKDGSQFVFMDLTTFEESRLNEADVGDKQKWLKEGMDCNLLYWNGKIIDFDLPITVRLTVTDTDPGASDSAQGGTKPATLETGAVVTVPSFVNVGDDILVDSRTGQYMNRA

SEQ ID NO: 291931 - protein, 199 aa, Zea mays
  Clone ID: MRT4577_29329C.1.pep
EIGDVLQYYDPPKRFPAWGFGARPIDGPVSHCFNLNGSTYQPEVDGIQGIMSAYISALRNVSLAGPTLFGQLISTAMAIASQSLAENQHKYFILLIVTDGVVTDFQETIDAIIKASDFPISIIVVGVGGADFKEMEFLDPNKGEKLESSTGRVASRDMIQFAPMKDMHGTGISTLQSLLAEVPGQFMTYMRTRETQTDS

SEQ ID NO: 291932 - protein, 1455 aa, Zea mays
  unsure (1)..(1455): unsure at all Xaa locations
  Clone ID: MRT4577_2932C.1.pep
MDPKGKGMVVNDKEKESFVNDPKDDKPTDSGSGHKRKDGRKKKTRHIKEIVYYDSDESSSSQKDDDNDYEKKKTVNSNFYFDYSRIPQSTNAHLLSIPLGKPPHFDGEDYGFWSHKMRSHLFSLHPSIWEIVESGMQFDSTDSPMFINEQIHKNAQATTVLLASLCRDEYXIRGEEPTQKYNRLKTLVXKIRSYGSTRWTDHDVVRLMLRSFTVLDPHLVNNIRENPRYTKMTPEEILGKFVSGQMMIKEARYVDDALNGPIHEPQTVALKAMRSKEALPSKVAQVEATGLNEEEMALIIKRFKTALRGRKEHPNKTKTKGKRSCFKCGKIGHFIANCPDNDSDQEQGNKREKKKAYKKAKGEAHLGKELDSDCSLSDSDNEGLAATAFNKSALFPNEHHTCLMAREKKVSTRDTSTYASSSDEESSDDEIDYSCLFKGLDRTKVDKINELIDALNDKNKLLEKQEDILYEEHDKFVEAQKSLALEIKRNEMLSCELSTCHDSISSLKSINDDLSAKLEITNKSTPCVEHVVVCNRCKDFNVDACSEHLVSISKLNDEVASLNAQLKTSKSEFDKLKFTRDAYTIGRHPSIKDGLGFKREVKNLTSHKASISAKEKGKAPVASSAQKNHAFMYHDRRHSRNVYRSYDAFDSHAMIASSSSIMHDRNLARKNVVHHMPRRNIVHAPRKVMNEPFTIYYACNTSFAICRKDKKVYASGGSSWIVDSGCTNHMTGEKKMFSSYVKNKDPQDSIIFGDGNQGKVKGLGKISISSEHSISNVFLVESLGYNLLSIDLVQLVKQDKSETQGTLKRFLRRAQNEFELKVKKIRSNNRSEFKNLQVEEYLEEEGIKHEFSAPYTPQQNGVVERKNRTLLDMARTMLGEFKTPERFWMEAVSTACHAINRVYLHRLLKKTSYELLTGNKPNVPYFRVFGSKCYILVKKXQNVVGTKWVFRNKQDKHGVVTRNKAXLVAKGYAQVAXLDFEETFAPVARLESIRILLAYATHHSFSLFQMDVKSAFLNGPIKEEVYVEQPPGFEDERYPDHVCKLSKALYGLKQAPRAWYECLRDFLITNDFKVGKADPTLFTKTCDGDLFVCQIYVDDIIFGSTNQKSCEEFSRVMTQKFEMSMMGELSYFLGFQVKQLKDGTFISQTKYTQDLIKRFGMKDAKPAKTPMGTDGHTDLNKGGKSVDQKAYRSMIGSLLYLCASRPDIMLSVCMCARFQSDPRECHLVAVKRILRYLVATPCFGIWYPMGSTFDLIGYSDSDYAGCKVDRKSTSGTCQFLGRSLVSWSSKKQTSVALSTAEAEYVAAGQCCAQLLWMRQTLRDFGYNLSKVPLLCDNESAIRMADNPVEHSRTKHIDIRHHFLRDHQQKGDIEVFHVSTENQLADIFTKPLDESTFCKLRKTTDQAKDGGKKSFEVPSAREKVKETRNPKPGVKKKTCKVKVDRVKSYGASRITT

SEQ ID NO: 291933 - protein, 73 aa, Zea mays
  Clone ID: MRT4577_29330C.1.pep
DAGVFFFCCLVRYHRTREEQFIETATVKIAKTIIFFGLRRTYRPDIAPASSSWRHRQLAEVEVVTIGLSEQKR

SEQ ID NO: 291934 - protein, 110 aa, Zea mays
  Clone ID: MRT4577_29331C.1.pep
VSLGKALQGACSTLLEPLFLLTAFWGDFYLGGPLSGRAGSGQRGLEPYGTRVFWSPFFSALLVKRKPLQGGPFSLFPPGPLAPRVFAPRVFFVQGFYRIEVSAQKNYPPP

SEQ ID NO: 291935 - protein, 79 aa, Zea mays
  Clone ID: MRT4577_29332C.1.pep
TEGKSCVWGGSVYLDVALNVSCMGGILTLVITGASHRLQKKVAEFVTLYQTFLVEVTLILYQGKVLFQMTHIDIQSNKS

SEQ ID NO: 291936 - protein, 77 aa, Zea mays
  Clone ID: MRT4577_29333C.1.pep
KKTTMARTLHLGESYFGKIGGKIYNPKFFKTPRPSGPKGGAGFFYTKPILNRGTMAANRNSFTQKRHKEGKGCFKDG

SEQ ID NO: 291937 - protein, 48 aa, Zea mays
  unsure (1)..(48): unsure at all Xaa locations
  Clone ID: MRT4577_29334C.1.pep
GQLKAKLAELRTRLLECPXGSSGCGDGSHVTKSGHGRAALXIGFPSVG

SEQ ID NO: 291938 - protein, 83 aa, Zea mays
  Clone ID: MRT4577_29335C.1.pep
AAKNPCYGPYGKGVLAKTLGGCGGSGSVHLMLKKVSSTCGEINTSSTSLGEVSYLNGAYYADAEIGKAAVERWPEKDGVDTIT

SEQ ID NO: 291939 - protein, 88 aa, Zea mays
  Clone ID: MRT4577_29336C.1.pep
YPQAYDKLFIPSLPPHPSLAKPLHLKKGQGLLENPNHDEQEEVAPKPLHPSQEGEFLPLSLPRTFKSRIWGPCPWSPQGPLTLIPPLP

SEQ ID NO: 291940 - protein, 104 aa, Zea mays
  Clone ID: MRT4577_29337C.1.pep
AEELEAQPVAPREPQRFKLSLGAAAQQRAQAATTRRTVAEVEGLLEDEEEGAATTKRTLVPIKFDNAAEASGLTDEERAPAVRQLAAEIPSDKEGLWKWNVRWE

SEQ ID NO: 291941 - protein, 41 aa, Zea mays
  Clone ID: MRT4577_29338C.1.pep
KWRWMGSIRLTRGRSRQRGDKATGAPDRGSVCSGGGTRDLT

SEQ ID NO: 291942 - protein, 48 aa, Zea mays
  Clone ID: MRT4577_29339C.1.pep
MGWPPSSGWGDRRRNVSVHVAIQPGRSFPLEYYPEAWRCKCGNKLFMP

SEQ ID NO: 291943 - protein, 970 aa, Zea mays
  Clone ID: MRT4577_2933C.1.pep
MEWVFLRKKILGDISVEYLGSISEKNLKGITREISGRASLRKFQDLNFWDATWTDHDVVRLMLRSFAVLDPHLINNIRENPRYTKMSAEEILGKFRFKTALKGRKEHPNKNKTKGKHSCFKCGKIGHFIANCPDNDSDQEQEKKRENKKSYKKAKGEAHLGKEWDSDCSSSDSDNEGLAASAFNKSSLFPNEHHTCLMAKEKKVNTRKSTYASSDDESSDDEIDYASLFKGLDRTKIDKINELIDALNDKNRLLENQEDLLYEEHDKFVEAQNSLALEVKRNEMLSCELSTCHESISSLKGVNDDLNAKLEIASKSTSREELVTICNRCKDFNVDACSEHLVCISKLNDEVASINAQLKTSKNDFDKLKFARDAYTVGRHPSIRDGLGFKREAKNLTSHKAPITAKEKGKAPMANSSQKNHAFIYDKKFSRNVHHDRSCNAYDSNAMFASSSSYVHGRDMPRRNVYASGGSSWIIDSGCTNHMTGEKKMFSSYVKNKDSQDSIIFGDGNQGKDKHGVVTRNKARLVAKGYAQVAGLDFEEIFAPVARLESIRILLAYVAHHSFRLFQMDVKSAFLNGPIKEEVYVEQPPGFEDERYPDHVCKLSKALYGLKQAPRAWYECLRDFLLSNAFKVGKVDPTLFTKTCDGDLFVCQIYVDDIIFGSTNQKSCEEFSKVMTQKFEMSMMGELNYFLGFQVKQLKDGTFISQTKYTQDLLKRFGMKDAKPAKTPMGTNGHTNLNKGGKSVDQKAYQSMIGSLLYLCASRPNIMLGVCMCARFQSDPKECHLVAVKRILRYLVATPCFGIWYPKRSTFDLIGYSDSDYAGCKVDRKSTSGTCQFLGRSLVSWSSKKQTSIALSTDEAEYVAAGQCCVQLLWMRQTLRDFGYNLSKVPLLCDNESAIRMTDNPVEHSRTKHIDIWHHFLRDHQQKGDIEVFHVSTENQLADIFTKPLDEKTFCRLRSELNVLDSRNLD

SEQ ID NO: 291944 - protein, 43 aa, Zea mays
  Clone ID: MRT4577_29340C.1.pep
MTWRMGPRFTMLLAMWLVCGSEPHPHATIIGSHGGRTVPLVFP

SEQ ID NO: 291945 - protein, 85 aa, Zea mays
  Clone ID: MRT4577_29341C.1.pep
TSVFFFICFAVGEILSMQFCKSSRLRICKMLWVFVKCLVSSASFYFSWRECRYLHRVLSCLNSFLQAFSQMRLSEASPHLASFWG

SEQ ID NO: 291946 - protein, 79 aa, Zea mays
  Clone ID: MRT4577_29342C.1.pep
LVSTCIRSQFDSCSLDGDVSGFVQFTKFILLNCKGIVSYISSRSCRTRITPSSCKSGSIKFFLFCHVAKYLASYDMSLP

SEQ ID NO: 291947 - protein, 103 aa, Zea mays
  unsure (1)..(103): unsure at all Xaa locations
  Clone ID: MRT4577_29343C.1.pep
RGGGGGGPXXXGRGGSEGDRCPIRHLEIVCRRSRGGSRHLWALRLLNLSLRWGGGGLFLFLERGLHLQISHLCCALATTLPFGLARAATSLLAGVYSSKLPGR

SEQ ID NO: 291948 - protein, 199 aa, Zea mays
  Clone ID: MRT4577_29344C.1.pep
MGPSRPAGSKQRSEAQSIHSNLFPKSSIRFSLTRRLEPNLTMSLIRRSNVFDPFSLDLWDPFEGFPFGSGNSSSLFPSFPRTSSETAAFAGARIDWKETPEAHVFKADVPGLKKEEVKVEVEDGNVLQISGERNKEQEEKTDTWHRVERSSGRFLRRFRLPENAKTEQITAAMENGVLTVTVPKEDAKKPEVKSIQISG

SEQ ID NO: 291949 - protein, 84 aa, Zea mays
  Clone ID: MRT4577_29345C.1.pep
FGPRIDEDPRSDFPNKGRERNPRKAKMIFRNWLLLLSPVVIWGGVAPPGLAGIFLLGGKEKFNGYLCPEGERLRQQDKTPMGRN

SEQ ID NO: 291950 - protein, 64 aa, Zea mays
  unsure (1)..(64): unsure at all Xaa locations
  Clone ID: MRT4577_29346C.1.pep
FPFGRTXSLHSPLHSXSFFYYLIATYPTGGTISGGGASSLILTTSFYHCASLNEDGPVRQGSYI

SEQ ID NO: 291951 - protein, 65 aa, Zea mays
  unsure (1)..(65): unsure at all Xaa locations
  Clone ID: MRT4577_29347C.1.pep
CLTTERTIFIFFYLFLVLFXLLVFIYFYFFIVFFFFSFFFFFFFFFFFFFFFFFFYVTLTNCRRI

SEQ ID NO: 291952 - protein, 287 aa, Zea mays
  unsure (1)..(287): unsure at all Xaa locations
  Clone ID: MRT4577_29348C.1.pep
MDGSSKRIGGGGDDMPSPDHDQNASPNVPPSAAGDGGASATAAAAPAAGRRPFTSLSQEEADLALARVLQEQERAYMMLTGGEYAISDAESYDYDEEEDGDGSDYEEEGEALDEDEQVGDAEAEGAEGDLDLDPSQYEDDGEGDVSDXSWRSSGSVXRAMEQDDAGDEEDDEDAEVHTQGAWEDVDPDEYSYEELIALGEVVGTESKGLAADTIASLPWVTYQAQDKQDGNMEQCVICRVEFDEGESLVALPCKHPYHSECINQWLQLNKVCPMCSAEVPTSVNKQA

SEQ ID NO: 291953 - protein, 111 aa, Zea mays
  Clone ID: MRT4577_29349C.1.pep
HTQGAWEDVDPDEYSYEELIALGEVVGTESKGLAADTIASLPWVTYQAQDKQDGNMEQCAICRVEFDEGESLVALPCKHPYHFECINQWLQLNKVCPMCSAEVPTFVNKQA

SEQ ID NO: 291954 - protein, 59 aa, Zea mays
  Clone ID: MRT4577_2934C.1.pep
MFIPHIIYTYLLSIHNFSSISFTGKNHNLCQKLLHDGETLTFFLQHRLVSTKLSPKPFP

SEQ ID NO: 291955 - protein, 78 aa, Zea mays
  unsure (1)..(78): unsure at all Xaa locations
  Clone ID: MRT4577_29350C.1.pep
TRCNAGTLMVLNLAVTPTELSEIVPLLRLDEDQTGTERFPSTSNTLSNAMTEHALKDDLMSLIHAMLGXAIAAPIVLV

SEQ ID NO: 291956 - protein, 133 aa, Zea mays
  unsure (1)..(133): unsure at all Xaa locations
  Clone ID: MRT4577_29351C.1.pep
MSALWLAPQYVLMGLSGAFGAIAQIEFYYAVLPKSMGSFVLALLFFGSGVASIMSTVIVKLVNVVTXQGRRGXAPWISDDLDQARYDSYYALLAVIDPPALVYLVVCANVFHESTQNMTLEAGADGQDGEARG

SEQ ID NO: 291957 - protein, 45 aa, Zea mays
  Clone ID: MRT4577_29352C.1.pep
WIHSTSRWQTLKHGNFSSKREMETYVAHRAASHTIYSGNNMAPTR

SEQ ID NO: 291958 - protein, 89 aa, Zea mays
  unsure (1)..(89): unsure at all Xaa locations
  Clone ID: MRT4577_29353C.1.pep
TXSSPPWRITWLRWPPLAPAPTLPLLTTPGLRLWACHHNMPRTKSTRTHDAPTCITVPAYSLTTTDYTTRPLTGSDGSNYKVYKDFRHQ

SEQ ID NO: 291959 - protein, 136 aa, Zea mays
  unsure (1)..(136): unsure at all Xaa locations
  Clone ID: MRT4577_29354C.1.pep
HPARRPQSAPPPPQPXPEIVIPKPPRPRPTPRIPQPPPPRAALVPXPPPLLAPPSRATTTTAGASPGRSSGESTRQASPXTAVPALVLASPPSKAWRSSSSSSLPGXSPPXPPIDLHPQASPGLAPAPMLHLPPRC

SEQ ID NO: 291960 - protein, 99 aa, Zea mays
  Clone ID: MRT4577_29355C.1.pep
APGLYKGCNMYLRDQQRSKLSPVGWDCPSLSSIQSGFGDSSSTTASRVPYQLRSIPQISFVATLSSAHTMTATLYQHVCIPMLFLLTLLDILYWLLICF

SEQ ID NO: 291961 - protein, 68 aa, Zea mays
  unsure (1)..(68): unsure at all Xaa locations
  Clone ID: MRT4577_29356C.1.pep
NXFIGGIRGRQGQFHTMYILLHIYTVKNKNRTLHIWAYSVRGTDACTLRFNTMCALDQGLTVLHMTYP

SEQ ID NO: 291962 - protein, 76 aa, Zea mays
  Clone ID: MRT4577_29357C.1.pep
MNLGFFDPDRMVIPEGLPVKAVDITGITVSRYDRSALGQVGATIKKCRPPEPYPVKGVIYMDEVDRRKEVIPRQKT

SEQ ID NO: 291963 - protein, 499 aa, Zea mays
  Clone ID: MRT4577_29358C.1.pep
YCLFVLYFSTYYYRTNAVMAALVAILMHLLVPALLLMRVVAVVAAGAPPFSCGGGGPSLGLPFCNTKLPAAQRAADLVSRMTPAEKASQLGDVANGVPRLGVPSYKWWSEALHGVAISGKGIHMDRGAVRSATSFPQVLLTAASFNDNLWFRIGQATGNEARAFYNIGQAEGLTMWSPNVNIFRDPRWGRGQETPGEDPAVASRYAAAFVRGLQGSSSNTKSVPTVLLTSACCKHATAYDLEDWKGVTRYSFRATVTVQDLADTFNPPFRSCVVDGKASCVMCAYTSVNGVPSCANADLLTKTFRGSWGLDGYVAADCDAVSIMRNSQFYRPTAEDTVATTLKAGLDIDCGPYVQQHAMAAIQKGKLTQQDVDKAVKNLFTTRMRLGHFDGDPKAHVYGNLGAAHICTQEHKNLALEAALDGIVLLKNSAGVLPLKRGSVASAAVIGHNANDVLALLGNYWGPPCAPTTPLQGIQGYIKNVRFLAGCHKAACNVAATPQ

SEQ ID NO: 291964 - protein, 465 aa, Zea mays
  Clone ID: MRT4577_29359C.1.pep
MAGGGLQGAKKRKREHAEGKTKPRKQVKGGGDGAKRKSHSAAGGYTAHGGAGEVVARKKTPVTPKEKRLAAKEMSEARKMKRRQHYSLEKELTKLWEKMRCHDVSKEERSKAVSQAIHKMDGKYLDIATSHVTARVLQTCVKWCSESERDAIFDVLQPHLLTLSCKKYAVFLVKKLIELASKKQFASFISSLHGRVANLLHHTIGAAVVDYAFQRGTQRQKRQLLLELYSPELQLFKDLTVQSSSCLIDTISKLGLQISSVLLHMTIVIDKILEKGTVEYLIVHTAILEYFTIADKTSASDAICQLIPLLTQGALIIDGDEPTNAPELPKKAKAKKKRSKEPLIVRIMQTREGLKLGISCLKYGSAKDRKKIIKSLKGHIMKLALSDFGCLFLICIISIVDDTKLVSKIVIQELVKHLKQLIFDKNGRRPLLQLLHPFCSRYLSPDDLACLNYNVPSLSSTEVET

SEQ ID NO: 291965 - protein, 116 aa, Zea mays
  Clone ID: MRT4577_2935C.1.pep
VATQNLELMYNYLKELLKELKCKTALQVVEKSLVCCHPGLRLRRFISKRWESYANTGVLAKQVTTTLASWRVFPWRTWLLLYRILLICAITYVYFSWFGIRIHIQLIYAFLSRCLD

SEQ ID NO: 291966 - protein, 185 aa, Zea mays
  unsure (1)..(185): unsure at all Xaa locations
  Clone ID: MRT4577_29360C.1.pep
TTKRKKTNKKQKKKTKKKQKKTKKKQKKKKKQADEKKKKKKXKKKKKETKPRKEQKKKRERKKKEKRQKKRKKKEKKKKKREKKKKKKEKKKNRRKKKKKKEKKKKKQKRKKKKKRKKKNKKKQGKKRKHQKTERDNKNNHQHGSDNNATDHTTHGGWIGTNVYINRTWVTHIPRPSHRTPPEPL

SEQ ID NO: 291967 - protein, 53 aa, Zea mays
  Clone ID: MRT4577_29361C.1.pep
NYGTNYSYGGSGSGDQEAYYPPSNNAINNQPSSGNNNNNNNNNTTSSSNTGFF

SEQ ID NO: 291968 - protein, 163 aa, Zea mays
  unsure (1)..(163): unsure at all Xaa locations
  Clone ID: MRT4577_29362C.1.pep
MVSACLTNWKKEIVMEYKRILQEFNDXLHKDPLTSCRASXAGENMFHWRRTIMXATDSAYAGAVLIMNIDLWPXLXFDAPKVTFERQVFHXNINNEXLVYLDFITQKSSPALTLXTTCLSIXSLLTNSIADQHLVYYFVNMYKTECPNYYFTACMWRINYVML

SEQ ID NO: 291969 - protein, 155 aa, Zea mays
  unsure (1)..(155): unsure at all Xaa locations
  Clone ID: MRT4577_29363C.1.pep
MNYIIGAFHTPCEISVPVSDAMTTNSTWVKMDNVNTTMVPVFQSLDSTIWRRSIDTHVXVLGLNSHVXLEVLRQIEVYFDRRNFYDVTSVGRXLHIPGDIYDTTTCPFEFSAVVMPYESYNGTNVTLKLILNDDSARNYDADISGYRHVXVRDYS

SEQ ID NO: 291970 - protein, 90 aa, Zea mays
  Clone ID: MRT4577_29364C.1.pep
PPGQLFYMVYYRGQTYRWNNGYMNTLWLAPVYLCNWGHACKKPLGRKNPCYFGNPLERMGPKEGPKGQKIICSIGRVECLNFGGGFWPLS

SEQ ID NO: 291971 - protein, 129 aa, Zea mays
  Clone ID: MRT4577_29365C.1.pep
NDLLLDERNTVYVMSGRRPEELDRVFRRVPNLGLIAENGCFLKDCGSDKWVEMADASQIINWKQSVKPIMQYYLERTPGSQIEERRCSLLFHYNNAEDFDTASRQASDCASHVNDACEAQRVHALAVDG

SEQ ID NO: 291972 - protein, 108 aa, Zea mays
  unsure (1)..(108): unsure at all Xaa locations
  Clone ID: MRT4577_29366C.1.pep
RAAARAGKKKKKKKKKKKKKKKKKKKKKFKHKKFLPFKGTILRGLLLTVCLLPGGLFGGWFXGVSFWPLYHFWGTFFMSLLFTGGRLGKPLGGPTLIFLWGIFPFLGG

SEQ ID NO: 291973 - protein, 33 aa, Zea mays
  Clone ID: MRT4577_29367C.1.pep
MFPFGPKKKKKKKKKKKKKKKKKKKKKKKKKKI

SEQ ID NO: 291974 - protein, 340 aa, Zea mays
  Clone ID: MRT4577_29368C.1.pep
MSSAAQQQQKAAAAEQEEVEHGPFPIEQLQASGIAALDVKKLKDSGLHTVEAVAYTPRKDLLQIKGISEAKADKIIEAASKIVPLGFTSASQLHAQRLEIIQVTTGSRELDKILEGGIETGSITEIYGEFRSGKTQLCHTLCVTCQLPLDQGGGEGKALYIDAEGTFRPQRLLQIADRFGLNGADVLENVAYARAYNTDHQSRLLLEAASMMIETRFALMVVDSATALYRTDFSGRGELSARQMHMAKFLRSLQKLADEFGVAVVITNQVVAQVDGSAMFAGPQFKPIGGNIMAHASTTRLALRKGRGEERICKVISSPCLAEAEARFQLASEGIADVKD

SEQ ID NO: 291975 - protein, 120 aa, Zea mays
  Clone ID: MRT4577_29369C.1.pep
KKGNTRHKCQGGHIKPGRGTKSWGGGGACSPRKSHYLPDNWGESNRQTIGKPRNERKQGAKGGGAQTTLTRLGGPPRPRIPPPQQQGHPGTGGTRTPKRSWCSQLRGTPSFALAPWGGHG

SEQ ID NO: 291976 - protein, 634 aa, Zea mays
  Clone ID: MRT4577_2936C.1.pep
MDPKGKGIVINDKEKESFVNEPRGDKSNDSGSGHRRKDGKKKKTRRIKEIVYYDSDESTSSQKDDDHNEYERKKPVNSNFSFDYSRIPQSTHAHLLSIPLGKPPHFDGEDYGFWSHKMRSHLFSLHPSIWEIVESGMHFDSADSPMFINEQIHKNAQATTVLLASLCRDEYHKVSGLDNAKQIWDTLKISHEGNDVTLLTKMELVEGELGRFAMIRGEEPTQTYNRLKTLINKIRSYGSTRWTDHDVVRLMLRSFTVLDPHLVNNIRENPRYTKMSPEEVLGKFVSGRMMIKEARYVDDALNGPIHEPQPLALKATRSKEALPSKVAQVEAAGLNNEEMALIIKRFKTALKGRKGQPSKTKAKGKRSCFKCGKIGHFIANCPDNESDQEQGSKREKKKHYRKAKGEAHIGKEWDSDCSSSDSDNEGLAATAFNKSSLFPNERHTCLMAREKKVSNQNNVTYDSSSDDESSDEEIDYSSLFKGMDRTKVDKINELIDALNEKDRLLEKQEDLLYEEHDKFAEAQKSYALEVKRNEVLSSELSSCHETIAKLKSFNDDLNARLEVASKSNSCVEIVGTCNRCKDFDIDACSEHLVSISKLNDELASLNAQLKTSKSNFDKLKFARDAYTIGRHPLN

SEQ ID NO: 291977 - protein, 58 aa, Zea mays
  Clone ID: MRT4577_29370C.1.pep
PLCSPPFFFFLTNIIIAYSFLSLCLAYMHDFAYTMSVCIMHEPVLANYMGRASGNGTC

SEQ ID NO: 291978 - protein, 80 aa, Zea mays
  Clone ID: MRT4577_29371C.1.pep
APQCGCLGVITTIVSIFVGLVRLHATHNRATGIVLFTIGHLDQSQARIHICEGNCFVHQGAATQKLTQGMTKQTADQQWI

SEQ ID NO: 291979 - protein, 100 aa, Zea mays
  unsure (1)..(100): unsure at all Xaa locations
  Clone ID: MRT4577_29372C.1.pep
HPLXKKKKKKKKKKKKKKKKKKKKKKKKKKKKKKKKKKKKKKKKKGGPFLGFQFFFPGVGRFKFFFGAPKIKLMGRGFPPRGLEKPGVSQLYCFGEIPLF

SEQ ID NO: 291980 - protein, 1372 aa, Zea mays
  unsure (1)..(1372): unsure at all Xaa locations
  Clone ID: MRT4577_29373C.1.pep
MSLRSTTSSAQRQQEAEVAAAQERERAAAAAAATAARAARLAAAELTAARAEVEAAEATDAARAAAAELEVLRGSRAGSYASVDDNTDEELRLAREAAREQAAQWAAAHPHGGARGGSPDRRRHADSAPREGARGGSPDGRRRAGGAPGGGDRVDGDRGLYRRRDSPSPDRYHGRRMAQAFVRDIGPGGGWPTLTKTNYIEWAAVMRVRLQVRQMWEAVRYGDVDYHEDRRALDALIAAVPLEMQFSLSQKRTAKEAWDAIAATRIGSDRARKTTLQTLRKEWENLAFKPGEDVDDFALRLNTLLQKMVQFGDETYDEERAVEKLFCCIPEKYKQIARSIESLLDLSTMTIEEAIGRLKVVDGDEPQAPSGPITIGGKLHLTREQWEACQGDKKKESSSTRGRKRGKQRKARGGTQAGARGHVEGGARGGAQGGVVGNKKPARDDGCHNCGKLGHWARDCRQPRRGQANVAQAEAEEALLLAHASIEPSPAAPAAAALLHLDESKARAFLGDGSNKDMIEGWCLDTGATHHMTGRREFFTELDSSVRGSVKFGDASGVEIKGVGSVVFTVTSGEHRLLTGVYYIPALRNSIISLGQLDENAREVAAEAVCGRKLRVLRTDNGSEFTAAEFASYCADEGVQRHYSASYNLQQNGVVERRNQTVVGMARALLKQRGMSAAFWGEAVVTAVYILNRSPTKALNGMTPYEAWHGRKPAVSHLRVFGCLAFTKELGHIGKLDDRSTPGVFIGYAEGSKAYRILDPRTQRVRTARDVVFDEGRGWAWDKAVDDGATPTYDFTIEYVHFEGAGGVGNSSPSRSTPALKSPPTPAPHSPALATTSSSPPRTPATTPATASSSPPPRVEHDPVELVTPLSRDEERVDACYDGESLRYRRVEGLLIDSSMPGPASRILAGELHLACDDGEPRSFAEAEKHAAWRAAMQSKMDAQEGIDFDDAFAPVARMESVRLLALSAQQGWHVHHMDVKSAFLNGDLKEEEGKVLRLRKALYSLRQAPRAWNAKLDSTLKGMGFTPSPHEATIYRRGNGGSALLVGVYVDDLVITGAKDAEVATFKEEMKATFQMSDLGHLSFYLGIEVHQGDSGITLRQTAYAKRIVELAGLTDCNPALTPMEERLKLSRDSTTEEVDATQYRRLVGSLRYLVHTRPDLAYSVGYVSRFLQRPTTEHEQAVKRIIRYVAGTLDHGLYYPRCPGEAHLVGYSDSDHAGDIDTSKSTSGILFFLGKCLISWQSVKQQVVAMSSCEAEYIXASTASTQALLLARLLGDLLGRDTGAVELRVDSQSALALAKNPVFHERSKHIRLRYHFIRDCLAEGSIKARYINTKDQLADLLTKPLGKIKFVELCSRSGMTQLSHKTTPKT

SEQ ID NO: 291981 - protein, 348 aa, Zea mays
  Clone ID: MRT4577_29374C.1.pep
MSASEGFLSAFPPCAGLYTQDWAGAIRLRRRGPCGYADSVAWLSEGDGAGARDPQGSETLLSITEKTVMTRGPWVSALVFPELGRADGKSDVGQGVGWASFAPQHRILGCYTAFLNGDLKEEVYVHQPPGFAIPGKEGKVLCLLKVLYGLRQAPRAWNAKLDSTLKRMGFMPSPHEAPIYRRGNGENALLVGVYVDDLVITGAKDVEVATFKEEMRATFQMSDLGHLSFYLGIERTTTEHDQAMKRIVRYVVGTLDHGLYYPRCPGEAHLVEYSDSDHAGDIDTSKSTSGVLFFLGKCPINWQSVKQQVVAMSSCEAEYIATSTASTQALWLARLLSDLSEEKSTCKM

SEQ ID NO: 291982 - protein, 550 aa, Zea mays
  unsure (1)..(550): unsure at all Xaa locations
  Clone ID: MRT4577_29375C.1.pep
MGARVAAAQIGADTLTALRARAHAAAAQTGVDAPAVLPAAATGSTEIAASTGGATLPPRIGTMVAAWPRPLSGTSVPAKMVQFGDETYDEERAVEKLFCCIPEKYKQIARSIESLLDLSTMTIEEAIGRLKVPQGGVVGNKKPARDDGCHNCGKLGHWARDCRQPRRGQANVAQAEAEEALLLAHASIEPSPAAPAAAALLHLDESKARAFLSDGSNKDMIEGWCLDTGATHHMTGRREFFTELDSSVRGSVKFGDASGVEIKGVGSVVFTVTSAREVAAEAVCGRKLRVLRTDNGGEFTAAEFASYCADEGVQRHYSAPYSPQQNGVVERRNQTVVGMARALLKQRGIPAVFWGEAVVTAVYILNRSPTKALNGMTPYEAWHGRKPAVSHLRVFGCLAFTKELGHISKLDDRSTPGVFIGYAEGSKAYRILDPRTQRVRTARDVVFDEGRGWAWDKAVDDGATPTYDFTIEYVHFEGAGGVGNSSPSSSCXTMSSSPPRTPATTPATASSSPPRTPAPXAHVEHDPVELVTPLSRDEERVDACYDGESL

SEQ ID NO: 291983 - protein, 625 aa, Zea mays
  unsure (1)..(625): unsure at all Xaa locations
  Clone ID: MRT4577_29376C.1.pep
MAAELVSYCADEGVQRHYSVPYSPQQNGVVERRNQTVVGMAQALLKQRGMPTVFWGEVVVTTVYILNRSPTKALNGMTPYEAWHGRKPAVSHLRVFGCLTFTKELGHISKLDDRSTPGVXTPAPMSPPTPAPRSPASATTSSSPPRTPATTPATASSSPXTYSSTDARVEHDPVELVTPLSHDKDRVDACYNXQEGIDFDDAFAPMAQMESVRLLLALAAQXGWHVHHMDVKSAFLNDDLKEEVYVHQPLGFAIPGKEGKVLRLRKALYGLRQAPRAWNAKLDSTLKRMGFMPSPHEAAIYWRGNGENALLVGVYIDDLVITGAKDAEVAAFKEEMKVTFQMSDLGHLSYLGIEVHQGDSEITLRQTAYAKRIVELAGLTDCNPALTPMEERLKLSRDSTTEEVDATQYRCLVGSLRYLVHTRPDLAYSVSYVSRFMQRPTTEHEQAVKRIIRYVAGTLDHGLYYPSDSDHAGDIDTSKSTSGILFFLGKCPISWQSVKQQVVAMSSCETEYIAASTASTQALWLARLLGDLLGRDVGAVELRVDSQSALALAKNPVFHERSKHIRVRYHFIRDCLTEGSIKTRYINTKDQLADLLTKPLGRIKFLELCSRSGMTQLSHKATHKT

SEQ ID NO: 291984 - protein, 840 aa, Zea mays
  unsure (1)..(840): unsure at all Xaa locations
  Clone ID: MRT4577_29377C.1.pep
KLRVLRTDNGGEFTAAEFASYCADEGVQRHYSAPYSPQQNGVVERRNQTVVGMARALLKQRGMPAVFWGEAVVTAVYILNRSPTKALNGMTPYEAWHGRKPAVSHLRVFGCLAFTKELGHISKLDDRSTPGVFIGYAEGSKAYRILDPRTQRVRTARDVVFDEGRGWAWDKAVDDGTTPTYDFTIEYVHFEGAGGVGNSSPSRSTPAPKSPPTPAPHSPAPATTSXTTTHSSXTPATASSSPPRTPAPTVPSPGTSSPTPARVEHDPVELVTPLSRDEERVDACYDGEPLRYRTVEGLLIDPSVPGPASRILAGELHLACDDGEPRSFAEAEKHAAWRAAMQSEMDAVETNRTWELADLPHGHRAITLKWVFKLKRDEAGAVVKHKARLVARGFLQQEGIDFDDAFAPVARMESVRLLXALAALEGWHVHHMDVKSAFLNGDLKEEVYVHQPPGFAIPGKEGKVLRLRKALYGLRQAPRAWNAKLDSTLKGMGFTPSPHEAAIYRRGNGGSALLVGVYVDDLVITGAKDAEVAAFKEEMKATFQMSDLGHLSFYLGIEVHQGDSGITLRQTAYARRIVELAGLTDCNPALTPMEERLKLSRDSTTEEVDATQYRRLVGSLRYLVHTRPDLAYSVGYVSRFLQRPTTEHEQAVKRIIRYVAGTLDHGLYYPRCPGEAHLVGYSDSDHAGDIDTSKSTSGILFFLGKCLISWQSVKQQVVAMSSCEAEYIAASTASTQALWLARLLGDLLGRDTGAVELRVDSQSALALAKNPVFHERSKHIRLRYHFIRDCLAGGSIKARYINTKDQLADLLTKPLGKIKFVELCSRSGMAQLSHKTTPKT

SEQ ID NO: 291985 - protein, 106 aa, Zea mays
  unsure (1)..(106): unsure at all Xaa locations
  Clone ID: MRT4577_29378C.1.pep
RSHLLSIILILAXMDGXPRSLPHSRPTSKARRTSMETALDAIGRSPPASRPDPRRSAMLPGAAAPQSIQAQALRHRTMATNVNLHSSSRAPAIYQQDPLGTADDYR

SEQ ID NO: 291986 - protein, 104 aa, Zea mays
  Clone ID: MRT4577_29379C.1.pep
TGRWVGTNLEKDTQKRGPNSPKGGSKFSKKRFVFFWFWFPAGIGAFFFVRGVNFTSLWFRGGSFLPVGPVLMGDKKSCFSPGIGFFSPGWGFPHWFFPPGDPKF

SEQ ID NO: 291987 - protein, 111 aa, Zea mays
  Clone ID: MRT4577_2937C.1.pep
MQPGCGLPPVVIYKDDHQPCGGEKRVGLWPPPALNFKDVHHPHWGGRRAELGSCLPHGLVTYFFLQHLEEKDVHQPCEGGELRLRGASRPASATSRRASCPLAWMVLSSLP

SEQ ID NO: 291988 - protein, 102 aa, Zea mays
  Clone ID: MRT4577_29380C.1.pep
SYQLLSKRARPSFHQLQQLQAHPGRVPPRWFHLPLLRALWPSSAAIRPPKPRFVPARPFSVPPGRKGEHPSPTGSVTCNLAGSSDGNDEDLKQRLKARPAAD

SEQ ID NO: 291989 - protein, 74 aa, Zea mays
  Clone ID: MRT4577_29381C.1.pep
CVAARNCDHPCATADLPGMIPAGAARGDGDRMQLGDADGGRLGCGEHHSIGFHCARNGRGNHPTHHCLQELIIA

SEQ ID NO: 291990 - protein, 109 aa, Zea mays
  Clone ID: MRT4577_29382C.1.pep
TLPEDQRHKQLHACTPLQVNSPNTSNHDIYTGHGHVVQCIIVTCMYFSVLLLIVFFLLPLFFFSTNTVFDAFFFFFFFLIFYQCLSKQSSVDTNICTPCLFFWLVGKPA

SEQ ID NO: 291991 - protein, 47 aa, Zea mays
  unsure (1)..(47): unsure at all Xaa locations
  Clone ID: MRT4577_29383C.1.pep
MMAGNFGYEYADPTRPQVYYSQAAAPPPTLPPQYQPVVSPDAGQAXH

SEQ ID NO: 291992 - protein, 37 aa, Zea mays
  Clone ID: MRT4577_29384C.1.pep
KKRVGIDFEILMHGSKIHRIVSQRWVLHVIQAASIHR

SEQ ID NO: 291993 - protein, 140 aa, Zea mays
  Clone ID: MRT4577_29385C.1.pep
PEGVSGYLLQDQEESSMYRGFLRDLKLPFPTTLPTLHCLTLQIDRVREEHDRAEWARDREARRNRTEARSGRGALGSIADDDAQSPDRASASLEAGRGEHETLTRTPAPAPAGEGGNGRAREEAEQCLSRPFFFLPAGLE

SEQ ID NO: 291994 - protein, 80 aa, Zea mays
  Clone ID: MRT4577_29386C.1.pep
IGLFHNNIWSSTRSIDTQRELYSILMRRNSHRFINSCTHEFPTSQRSLYLFYLMYKISADTVRFDSCAFRMATIETNSKI

SEQ ID NO: 291995 - protein, 102 aa, Zea mays
  Clone ID: MRT4577_29387C.1.pep
LEPPGLPTPELSLSLSLSLFLSLSLSLSLSSCSLPCTKSQLNRENYGERASLRTGDWPPPLIVQLRRQVEMPAPHGVDASEIRPRPKPLRRKLRIIAASTPH

SEQ ID NO: 291996 - protein, 65 aa, Zea mays
  Clone ID: MRT4577_29388C.1.pep
IYFVMLSGKRTSKGESRRGIVIHARSSVYVRELALAYVDDYSDASPPVYVNPVCNYLHERDLDAV

SEQ ID NO: 291997 - protein, 55 aa, Zea mays
  Clone ID: MRT4577_29389C.1.pep
KVNKKNQKGKKKTKFFILSKMHLTNKKKRTHLFYKIPKVVPYRTYHFMGFSHIIS

SEQ ID NO: 291998 - protein, 750 aa, Zea mays
  Clone ID: MRT4577_2938C.1.pep
MDPKGKGIVINDKEKESFVNEPRDDKSNDSGSGHKRKDGKKKKTRRIKEIVYYDSDESSSSQKDDDHDKQKTVNSNFSFDYSRIPYSSNAHLLPIPLGKPPHFDGEDYGFWSHKMRTHLFSLHPSIWEIVESGMKFDSSDSPSFINEQIHKNAQATTVLLASLCRDEYNKVSGLDNAKQIWDTLKISHEGNDVTLLTKMELVEGELGRFAMIRGEEPTQTYNRLKTLINKIRSYGSTRWTDHDVVRLMLRSFTVLDPHLVNNIRENPRYTKMSPEEVLGKFVSGRMMIKEARYVDDALNGPINEPQPFALKATRSKETLPSKVAQIEAAGLNDEEMALIIKRFKTVLKGRNGQPSKTKTKGKRSCFKCGKLGHFIANCPDNESDQEKGNKREKKKHYKKAKGEAHLGKEWDSDCSSSDSDNEGLAATAFNKSALFPNERHTCLMAKEKKVSTRNSTYASSSDNDSSDDDEIDYSSVFKGLDRITIGKINELIDALNEKDKLLEKQEDLLYEEHDKFLEAQKSHALEVKRNEMLTCELSSCHETISKLKSINDELNVKIEIASKSTTCVENVAICNRCKEFDIDACSEHIASIAKLNNEVASLNVQLKTSKSEFDKLKFARDAYTIGRHPSIKDGLGFKREAKNLISHKDPIPAKEKGKAPMDTSAKRNHAFLYHDRRQTRNVSHDAFDSYVYDSHAMFAPSSSYVYDRNATRINVVPKRNAIHHVPRRNVIHAPRKIANEPSTIYCALNF

SEQ ID NO: 291999 - protein, 55 aa, Zea mays
  Clone ID: MRT4577_29390C.1.pep
GYSHDSLRVDYGNKPLCSPRPHCTRECLLLSYINWALLIPSGIISHLTCNEIINL

SEQ ID NO: 292000 - protein, 85 aa, Zea mays
  Clone ID: MRT4577_29391C.1.pep
GVWGGRGAFRGSQGGRERRLRDRGPVTKPSKKAPRSCALRDQPCRSGFEKARLLDKIVEVTNVARDPLLRRRPSELLRAPTRSRP

SEQ ID NO: 292001 - protein, 156 aa, Zea mays
  Clone ID: MRT4577_29392C.1.pep
PLLSWSGFHQAVSTNRPPPPLPARTSLRRAQICPPLPACFYYLLTRRCGSCSVDARGLPLPGIQDRAVCSPSPAPSIPSEIRAGVSSRKPDHGQHPISRPIHAKTIMGPAYRALFSHLEFPFFSRIDELALFRFGGTRTVRCQIRAFCYHYICHEF

SEQ ID NO: 292002 - protein, 80 aa, Zea mays
  Clone ID: MRT4577_29393C.1.pep
GETFISVPPLPFLPAGKNSLWEKNFLFFYKPNGPFSLFSWGGGPNLTFFFTMGKLKRGGPPWYKDPFSQNQVFILGGPFF

SEQ ID NO: 292003 - protein, 389 aa, Zea mays
  unsure (1)..(389): unsure at all Xaa locations
  Clone ID: MRT4577_29394C.1.pep
MTTATAIVAGHGLALRRSLPLPNPPGRATTSVSLSARPVTPARRMIVPASPSPRSPRRCRSISXRAPPRHPLRLTXDEEVEAENKVDPQAEVCYLDPDVDPESIREWELDFCSRPILDARGKKVWELVVCDATLSLQFTRYFPNNAINSVTLRDALASVSEALGVPMPDRVRFFRSQMQTIITRACGDLGVKAVPSRRCVSLLLWLEERYEVVYSRHPGFQAGTRPLLALDNPFPTTLPENLFGDKWAFVQLPFSAVREEVESLERRYAFGAGLDLELLGFELDDSTLVPGVAVESSRAKPLAAWMNGLEICAMEADTGRASLILSAGVSTRYVYSGYQKTAASTQEAEAWEAAKKACGGLHFLAIQENLNSDGCVGFWLLLDLPPPPV

SEQ ID NO: 292004 - protein, 835 aa, Zea mays
  Clone ID: MRT4577_29395C.1.pep
LPPQLICQLHNVTMHADAETDEVYAQMTLQPLSPQELKDPFLLAELGTASNQPTNYFCKTLTASDTSTHGGFSVPRRAAEKVFPPLDFNQQPPAQELIAKDLHGNDWKFRHIFRGQPKRHLLTTGWSVFVSAKRLVAGDSVLFIWNDNNQLLLGIRRANRPQTVMPSSVLSSDSMHIGLLAAAAHAASTNSRFTIFYNPRASPCEFVIPMAKYVKAVYHTRISVGMRFRMLFETEESSVRRYMGTITGISDLDPVRWPNSHWRSVKVGWDESTAGEKQPRVSLWEIEPLTTFPMYPSPFALGLKRPWPAGLPSLYGGRGDGLTSSLMWLRDRANPGFQSLNFSGLGMSPWMQPRLDNSLLGLQSDMYQTIAAAAALQSTTKQVPPSAMQFQQPQNIADRSALLSSQILQQVQPRFQQIYPQNLNENKIQGHTQPEYLQQQLQRCQSFNEQKPPMHPQQQQQEPQQQQCVQTPQDQQMQEQKHLHNFHSLPDALSAFSQLSPATHSPPSALQTVPAFSHQQNFPDTNISSLSPSTGPSMHGMLGRLPSEAASSLPCVAINAHVSVSDPWSSKRVAVESVNPCRPHVSPQIEHLDMATCNMPQSSALAPLPGRECLVDEDGCSDPQNHLLFGVHIDSHSLLMQGGIPALQNDNSSGTIPYSTSNFLSPSDNDFPLNQPLRSAGCLDESDYLPCAENAEQANQQFATFVKVYKSGTVGRLLDITRFSSYDELRSEVGRLFGLEGQLEDPLRSGWQLVFVDREDDVLLVGDDPWQEFVNSVSCIKILSPEEVQRMGKPGIQLLSSAPSRRLGNGCDSYASMQEPRGLDAGMAPVGSVEF

SEQ ID NO: 292005 - protein, 293 aa, Zea mays
  unsure (1)..(293): unsure at all Xaa locations
  Clone ID: MRT4577_29396C.1.pep
HASAHAQEINAKDLHVTIXKRQHICRGQRKRYILISGWSVFVRAKRLVAGDSVLFIWNDNNQLIVVIRLANRPHTVMPSSVLSSDSMHIGLLDAVAHAASTNSRFTIFYNPRASPCEFVIPMAKYVKAVYHTRLYMSIKFQSKLLKCPCSYMGTITGISDLDPVRWPNSHWRSVKVGLETNTALFFLMPFYMPSHFFNCVMSEFRVRWWSLLSYIXSKHATNFRLNHAXGWDESTAGEKQPRVSLWEIEPLTTFPMYPSPFALGLKRPWPAGLPSLYGTSDSYTLSNSSSIQH

SEQ ID NO: 292006 - protein, 990 aa, Zea mays
  unsure (1)..(990): unsure at all Xaa locations
  Clone ID: MRT4577_29397C.1.pep
NSARGSLLLPSAPSQSQIPIXPPPPADPASSSRRRTAAGAMEKPCSLLVHFDKGSASMANEIKADLEGSDGPAKADAMRRAISLLLNGETLPQLFITIVRYVLPSEDHTVQKLLLLYLEIIDRRDPAGRALPEMILICQNLRNNLQSPNEYIRGVTLRFLCRLSEPEVLEPLVPSVLANLEHRHQFIRRHAVSAVSAIYRLPHGDQLIPDAPELVERFLASEQDASARRNAFLMLCACAQDRAVAYLLSNADRVAEWPDLLQMAVVDLIRKVCRSQNRANKGRYITIITSLLSATSTAVVYECAGALVSLSSAPTAVRAAANTYCQLLSSQSDNNVKLILLDRLNELRTLHRDVMVGVVMDVLRALASPNLDVKRKVLDLVLDLLTPRNVEEVVLYLKKEVVKTQAGDLEKGGEYRQMLVQAIHACAVEYPEVAGSVVHLLMDFLGDTNVAAAVDVVLFVREIIETNPKLRVSMIQRLIDTFYQIRASRVCSCALWILGEYSLSLSEVESTIATIKQCLGDLPFYTVSDEGEVTDSTNSAQAVVNTVTVSSRRPVVLADGTYATQSAATETISAPSVAHGSLASTLNLRSLILSGDFFLAAVVACTLTKLVLRLEEVQPSKVESNKACTGALLIMTSILQLGQSSYLPHPIDNDSYDRIVLCLRLLCNTGDDVRKIWLHSCRQSFAKMLAEKQFRETEEMKAKAQISHAQPDDLIDFYHLKSRKGMSQLELEDEVHDDLKAATGGFTKDADDANKLNRILQLTGFSDPVYAEAFVTVHHYDIVLDVTVINRTKETLQNLCLELATMGDLKLVDRPQNYTLAPESSKQIRANIKVSSTETGVIFGNIVYETSNVMERSVVVLNDIHIDIMDYISPATCADVTFRNMWAEFEWENKVAVNTVIQDEKEFLNHIIKSTNMKCLTPPSALDGECGFLAANLYAKSVFGEDALVNISIEKQHDGKLSGYIRIRSKTQGIALSLGDKITLKQKGGS

SEQ ID NO: 292007 - protein, 64 aa, Zea mays
  Clone ID: MRT4577_29398C.1.pep
VYHPIKRKVSVSPTPIQSQSDTLVSPRSSSPPSLESRADHLPNKLFFRLQSMELDADKLIATDL

SEQ ID NO: 292008 - protein, 128 aa, Zea mays
  Clone ID: MRT4577_29399C.1.pep
KFYFFSIQPSILTLLHHDLCFPRAAERIKLYWHTTSDNAKHKNKRLLLFLLPLTVGIQMHYQTRSIHTKAADIICGHCLFTITRSEGDWNPVITDTGCSACTAGKKPQLLPQLLARERLLSFFPPHEL

SEQ ID NO: 292009 - protein, 1402 aa, Zea mays
  Clone ID: MRT4577_2939C.1.pep
MSPEEVLGKFVSGRMMIKEARYVDDALNGPIHEPQPLALKATRSKEALPSKVAQVEAAGLNDEEMALIIKRFKTALKGRKGQPSKTKAKGKRSCFKCGKLGHFIANCPDNESDQEQGDKREKKKHYKKAKGEAHLGKEWDSDCSSSDSDNEGLAATAFNKSSLFPNERHTCLMAREKKVSTHDTSTYASSSEDESSDDDEIDYSCLFKGLDRSKIDKINELIDALNDKNMLLEKQEDLLYEEHDKFVEAQKSLALEIKRNEMLSSELSSCHETIATLKSFNDDLNAKLEVASKSNSCVEIVETCNRCKDFDIDACSDHLVSISKLNEELASLNVQLKTSKNEFDKLKFARDAYTIGRHPSIKDGLGYKREAKNLTSHKAPISAKEKGKAPMASSVQKNHAFMYHDRRQSRNAYRSCNAYNAFDSHAMFASSSSYVHGRRNVVHNMPRRNVVNVPRKVYASRGSSWIIDSGCTNHMTGEKKMFTSYVKNKDSQDSIIFGDGNQGKVKGLDVSVFRRCDGSLAFKGVLDGKLYLVDFAKEEAGLDACLMAKTCMGWLWHRRLAHVGMKNLHKLLKGEHVIGLTNVHFEKDRPCAACQAGKQVGGSHHTKNVMTTSRPLELLHMDLFGPVAYLSIGGSKYGLVIVDDFSRFTWVFFLQDKSETQGTLKRFLRRAQNEFELKVKKIRSDNGSEFKNLQVEEFLEEEGIKHEFSAPYTPQQNGVVERKNRTLIDMARTMLGEFKTPECFWSEAVNTACHAINRVYLHRLLRKTSYELLTGNKPNVSYFRVFGSKCYILVKKGRNSKFAPKAVEGFLLGYDSNTKAYRVFNKSSGLVEVSSDVVFDETNGSPREQVVDCDDVDEEDVPTAAIRTMAIGEVRPQEQDERDQPSSSTMVHPPTQNDEQVHQEECDQGGAQDDHVMEEEAQPAPPTQVRAMIQRDHPVDQILGDISKGVTTRSRLVNFCEHYSFVSSIEPFRVEEALLDPDWVLAMQEELNNFKRNEVWTLVPHPKQNVVGTKWVFRNKQDEHGVVTRNKARLVAKGYAQVAGLDFEETFAPVARLESIRILLAYATHHSFRLFQMDVKSAFLNGPIKEEVYVEQPPGFEDERYPDHVCKLSKALYGLKQAPRAWYECLRDFLIVNAFKVGKADPTLFTKTCDGDLFVCQIYVDDIIFGSTNQKSCEEFSRVMTQKFEMSMMGELNYFLGFQVKQLKDGTFISQTKYTQDQLKRFGMKDTKPAKTPMGTDGHTDLNKGDSDYAGCKVDRKSTSGTCQFLGRSLVSWNSKKQTSVALSTAEAEYVAAGQCCAQLLWMRQTLRDFGYNLSKVPLLCDNESAIRMAENPVEHSRTKHIDIRHHFLRDHQQKGDIEVFHVSTENQLADIFTKPLDEKTFCRLRSELNVIDSRNLD

SEQ ID NO: 292010 - protein, 161 aa, Zea mays
  unsure (1)..(161): unsure at all Xaa locations
  Clone ID: MRT4577_293C.1.pep
MRECISIHIGQAGIQVGNACWEFYCLEHGIQADGQMPGDKTIGGGDDAFNTFFRETGAGKHDPRAVFVDLEPTVINEVRTGTYRQIFHPEQLISGKEDAANNFARGHYTIGKEIVDLRLDPIRKLADNCTGLQGFLVXHAVGGGTASGLGSLLLKRLSVDY

SEQ ID NO: 292011 - protein, 89 aa, Zea mays
  Clone ID: MRT4577_29400C.1.pep
PRVRPRVRTRVRGGGFRNTIGMNVVLEACVRCGDVDRALRLFEEIRGPRGCGVDGDLRHPAQGMRLWYLFMHATLTHAIAKTHLVNCLF

SEQ ID NO: 292012 - protein, 85 aa, Zea mays
  Clone ID: MRT4577_29401C.1.pep
KVPFANMSPGQKAFSGVNKGVGPAIPPGCFPALGEIMTMGWGPNPKGRPPFPKNVRKLDQVEVEVLAPVRKGRFPCCIAQPKTLE

SEQ ID NO: 292013 - protein, 100 aa, Zea mays
  unsure (1)..(100): unsure at all Xaa locations
  Clone ID: MRT4577_29402C.1.pep
KMXXKXRXEDKXAKKERXXKRAQXEKEGKXXEXKKPXXXKXGXNXXXXXXEQNKXQRGGGXHDXXPXEXXXXXPAXXRKXEXPXXXXKGKXRXGXXGHKK

SEQ ID NO: 292014 - protein, 42 aa, Zea mays
  Clone ID: MRT4577_29403C.1.pep
MDIFEAIMQAIHDSLHSCARSHQVSWPMSTCILETLLLHDQA

SEQ ID NO: 292015 - protein, 89 aa, Zea mays
  Clone ID: MRT4577_29404C.1.pep
MNVQQPAHVAGPSEGAKAISKEGKVGPNRCRACRKRVALSGFNRRCGNLYCAVERYSHKRACKFDDRAGAMIAIDKANPVVKSSKLANI

SEQ ID NO: 292016 - protein, 80 aa, Zea mays
  Clone ID: MRT4577_29405C.1.pep
PCSSTTYTTQAFLRGSGGAYQHPFHALKYEASLLCVQPQFINIPSSQHNTLATHSILGPTSLNGGSIKPLTGITEQYPSN

SEQ ID NO: 292017 - protein, 185 aa, Zea mays
  Clone ID: MRT4577_29406C.1.pep
LPAPLASASCCFFPSSRAAASAPNQATRQQQQPCTAAALAPSGPVLPRSRRRPLPSYLIAHRSMAAKWAQKTVVIPAHRRGCHLITPKHTSASLTINENYDSDVQADTETFLNRIVPEGHNAPWKHTMEGPDDMPAHIKSSMFGCSLTIPITDGRLNTGTWQGIWLCEHRDHASPRKIVITLNGV

SEQ ID NO: 292018 - protein, 69 aa, Zea mays
  unsure (1)..(69): unsure at all Xaa locations
  Clone ID: MRT4577_29407C.1.pep
CRLFLRISGTSSSSSSSSSSSKHPTDCARSQPSASTSGMVSIGTSSGTXAQKDRHPDPSTTVAEAVSSS

SEQ ID NO: 292019 - protein, 216 aa, Zea mays
  Clone ID: MRT4577_29408C.1.pep
STPAGAIPSSTAPLAPASCCFFPSSRAAASAPNQATRQQQQPCTAAALAPSGPVLPRSRRRPLPSYLIAHRSMAAKWAQKTVVIPAHRRGCHLITPKILREIEGDLAGFKCGLAHFFLQHTSASLTINENYDSDVQADTETFLNRIVPEGHNAPWKHTMEGPDDMPAHIKSSMFGCSLTIPITDGRLNTGTWQGIWLCEHRDHASPRKIVITLNGV

SEQ ID NO: 292020 - protein, 40 aa, Zea mays
  unsure (1)..(40): unsure at all Xaa locations
  Clone ID: MRT4577_29409C.1.pep
VIAVVVPSSVHHDXVLAPEQDGHVRSDISGPFSAPTTKLV

SEQ ID NO: 292021 - protein, 99 aa, Zea mays
  unsure (1)..(99): unsure at all Xaa locations
  Clone ID: MRT4577_2940C.1.pep
NYLPRXAQDHIHYINRGREVQLYLDKSTGTGLHTQGSYLFGHFSMHMNLAGGDYPGTVTVFYLVTQNSGHDEIHFEFLANRTGHPYILQTNGLTGGNGE

SEQ ID NO: 292022 - protein, 455 aa, Zea mays
  unsure (1)..(455): unsure at all Xaa locations
  Clone ID: MRT4577_29411C.1.pep
SPRSPPPPIVHLPAVLNVVGYRGGGATSRPPTRYAPPFDSWGPQIKGLTGSLEPADDDALRPDEEAAGGDGDGIEVCCFDNRGAGHSSVPPNKSYYSTAIMATDALALMDHLGWKKAHVFGHSMGAMIACKLAATPHRLCSLALLIGGGPRLLPTATPRLLSLAFRFLRAKTPEDRALVDLESHYTTEYLDETVGRXTRRMVLYQEYVKGISSTGMQSNCGFEGQINACWTQNMTTKELDTIRSAGFLVASKHXETVGSCTRRMVLYQEYVKGISSTGMQSNCGFEGQVNACWTHKMTTKELDTIRFAGFLVSVIHGRYDIIAQLCHAKRLAERLLPVARMVVPHGAHLVSHERPDEVNNALMDLIKATKSAIKPEEWSAQPENTSETGALISARPITVTVRTDAGVDATAAVYNLLGKLQLSFLYLIGMIVMGFELMRNIVRVMKPVRVAAIES

SEQ ID NO: 292023 - protein, 128 aa, Zea mays
  unsure (1)..(128): unsure at all Xaa locations
  Clone ID: MRT4577_29412C.1.pep
ARNSARGVFFQEFVKGISSTGMQSNCGFEGQINACWTHNMTTKELDTIRSAGFLVSVIHGRLVLLTVDNLVQRMVHMHFMWLTLXFRYDIIAQLCHAKRLAESLLPVARMVELHGAHLVSHERPDEVK

SEQ ID NO: 292024 - protein, 53 aa, Zea mays
  Clone ID: MRT4577_29413C.1.pep
NKAKNPTLWNEKKQHEPGPFGMDRAPFFACETHSKESDPPFSPLKECAGPGYF

SEQ ID NO: 292025 - protein, 151 aa, Zea mays
  Clone ID: MRT4577_29414C.1.pep
DGKRFGVWFGSEIIKGLAGTHDSWGPQIKGLTGSLEPSDDEALRPDEEAGVGAAEAAPAEADDGIEVCCFDNRGVGRSSVLPNKSYYSTAIMATDALALIDHLGWKKAHVFGHSMGAMIACKLDVMAPHRLCSLALLNVTRGGFQCFPKVL

SEQ ID NO: 292026 - protein, 152 aa, Zea mays
  unsure (1)..(152): unsure at all Xaa locations
  Clone ID: MRT4577_29415C.1.pep
MMTSAMDPQAILGRSIATGRGAAAPGAGLRTLTAAASCCTLRITTISGGLKIGSPDVIIRRTEKENFLWTDMTMDVLHWEAYVATDTVQERNLVYRDXYLSSISAYDNRSLSWMRDRXARPATVSVANRDITDATSISEASQNIRGNCLNVI

SEQ ID NO: 292027 - protein, 38 aa, Zea mays
  Clone ID: MRT4577_29416C.1.pep
IHHSGIIDQAVTANADQDAYRSWSQIIRQGSPLRYQRT

SEQ ID NO: 292028 - protein, 310 aa, Zea mays
  Clone ID: MRT4577_29417C.1.pep
MPYCEVGRYADGDKWEGVRVYYRRYGRGATKVLLIIGLAGTHDSWGPQIKGLTGSLEPVDDEALRPDEEAAGGDGDGIEVCCFDNRGAGRSSVPPNKSYYSTAIMATDALALMDHLGWKKAHVFGHSMGAMIACKLAAIAPHRLCSLALLNVTGGGFQCFPKVDGQMLSLAFRFLRAKTPEERALVDLETHYTKEYLEETVGSCTRRTVLYQEYVKGISSTGMQSNCGFEGQINACWTHNMTTKELDTIRSAGFLVSVIHGRYDIIAQLCHAKRLAESLLPVARMVELHGAHLVSHERPDEVNNALMGSD

SEQ ID NO: 292029 - protein, 97 aa, Zea mays
  Clone ID: MRT4577_29418C.1.pep
PLSTGRPARYNLFFFFFFFFLEIGFFFFNIILHSHLFFLIFSLCFTKTNIIMVPRGFFLKTLTILHKYTTQITEFKWLIDCRNLNFKRVCSTPKTSF

SEQ ID NO: 292030 - protein, 86 aa, Zea mays
  unsure (1)..(86): unsure at all Xaa locations
  Clone ID: MRT4577_29419C.1.pep
MLTNVDMNWDXVXFEHFAEEFKDRYRIDVVRNVNSFMRLRAACEKAKKVLSANAETVMNIECLMEEKDVRGVIRKEDFEKLCAKLL

SEQ ID NO: 292031 - protein, 1721 aa, Zea mays
  Clone ID: MRT4577_2941C.1.pep
MDPKGKGMVINDKEKESFVNEPNDDKLTDSGSGHKRKDGRKKKTRRIKEIVYYDSDESSSSQKDDDDYDKRKTVNSNFSFDYSRIPHSSNAQLLPIPLGKPPHFDGEDYGFWSHKMRTHLFSLHPSIWEIVESGMKFDSSDSPVFINEQIHKNAQATTVLLASLCRDEYHKVSGLDNAKQIWDTLKISHEGNDVTLLTKMELVEGELGRFAMIRGEEPTQTYNRLKTLINKIRSYGSTRWTDHDVVRLMLRSFTVLDPHLVNNIRENPRYTKMSPEEVLGKFVSGRMMIKEARYVDDALNGPINEPQPLALKATRSKEALPSKVAQFEAAGLNDEEMALIIKRFKTVLKGRKGQPSKTKAKGKRSCFKCGKLGHFIANCPDNDSDQDQGNKREKKKNYKKAKGEAHLGKEWDSDCSSSDSDNEGLAATAFNKSSLFPNERHTCLMAREKKVSTHNTSTYASSSEDESSDDDEIDYSCLFKGLDRTKVDKINELIDALNDRNILLEKQEDLLYEEHDKFVEAQKSLALEIKRNEMLSSELSSCHETIAKLKSFNDDLNAKLEVASKSNSCVEIVETCNRCKDFDIDACSDHLVSISKLNDELASLNAQLKTSKNEFDKLKFARDAYTIGRHPSIKDGLGYKREAKNLTSHKAPISAKEKGKAPMASSVQKNHAFMYHDRRQPRNAYRSCNAYNVFDSHAMFASSSSYVHDRNVGRRNVIHNMPRKNVVNVPRKVNEPSTIYHALNASFAICRKDRKIVARKLGARCKGDKTCIWVPKDICANLVGPNMSWVYASGGSSWIIDSGCTNHMTGEKKMFTSYVKNKDSQDSIIFSDGNQGKVKGLGKIAISNEHSISNVFLVESLGYNLLSVSQLCNMGYNCLFTNVDVSVFRRCDGSLAFKGVLDGKLYLVNFAKEEAGLDACLMAKTCMGWLWHRRLAHVGMKNLHKLLKGEHVIGLTNVHFEKDRPCAACQAGKQVGSSHHTKNVMTTSRPLELLHMDLFGPVAYLSIGGSKYGLVIVDDFSRFTWVFFLQDKSETQGTLKRFLRRAQNEFELKVKKIRSDNGSEFKNLQVEEFLEEEGIKHEFSAPYTPQQNGVVERKNRTLIDMARTMLGEFKTPKCFWSEAVNTACHAINRVYLHRLLKKTSYELLTGNKPNVSYFRVFGSKCYILVKKGRNSKFAPKAVEGFLLGYDSNTKAYRVFNKSSGLVEVSSDVVFDETNGSPREQVVDLDDVDEEDVPTAAIRTMAIGDVRPQEHLEQDQPSSSTMPFRVEEALLDPDWVLAMQEELNNFKRNEVWTLVPRPKQNVVGTKWVFHNKQDEHGVVTRNKARLVAKGYAQVAGLNFEETFAPVARLESIRILLAYAAHHSFRLYQMDVKSAFLNGPIKEEVYVEQPPGFEDERYPDHVCKLSKALYGLKQAPRAWYECLRDFLIANAFKVGKADPTLFTKTCDSDLFVCQIYVDDIIFGSTNQKSCEEFSRVMTQKFEMSMMGELTYFLGFQVKQLKDGTFISQTKYTQDLLKRFGMKDAKPAKTPMGTNGHTNLNKGGSLLYLCASRPDIMLSVCMCARFQSDPKECHLVAVKRILRYLVATPCFGIWYPKGSNFDLIGYSDSDYAGCKVDRKSTSGTCQFLGRSLVSWNSKKQTSVALSTAEAEYVAAGQCCAQLLWMRQTLRDFGYNLSKVPLLCDNESAIRIAENPVEHSRTKHIDIRHHFLRDHQQKGDI

SEQ ID NO: 292032 - protein, 43 aa, Zea mays
  Clone ID: MRT4577_29420C.1.pep
HIYTAILAGAWFIIRLSSRLVPFWEIDWFPSCHSNKLRVFTIY

SEQ ID NO: 292033 - protein, 132 aa, Zea mays
  Clone ID: MRT4577_29421C.1.pep
MAGDSSSGKIKSGSKVSKVGGRKDIVESISGDREGSSSNNKDFPQKKRLIERNSTNEKGTFVPEKPVGKLKKQVQPNVVMDEHIKWNKESKDTTDVVSFTFTSPLVKPSAGLSRLVGKWDTRSNLDMDAGCD

SEQ ID NO: 292034 - protein, 71 aa, Zea mays
  Clone ID: MRT4577_29422C.1.pep
MGSSAPWAERESRLMGKVCNLYRGLETVISVVLTVKSSIWILVGCPHCNHCSGEDEGNTEDFQEFQDFEEF

SEQ ID NO: 292035 - protein, 105 aa, Zea mays
  Clone ID: MRT4577_29423C.1.pep
CHLQSVPEKFAKNFKGQITEEFHLKSPSSAETWHVGVEKHGDKLFLVSGWENFAKAHELEENDLLLFACSGNSSFEVLVFGASGCEKVSSLFGSGLGSGHVQTIQ

SEQ ID NO: 292036 - protein, 66 aa, Zea mays
  Clone ID: MRT4577_29424C.1.pep
VHFPQRALERRLSRGAVRGPDDRGASRLQLLCGDLLVSPDSSAPSHLSVWFRQLSSASGCSELVVS

SEQ ID NO: 292037 - protein, 86 aa, Zea mays
  Clone ID: MRT4577_29425C.1.pep
KKPNVHSFPVGGKKKKALGSPWAWPPYLGFFSITFKPLRLKLWVLRCLKGWIPQTTIYVIYCSFPPIFWLVPWVKKTVVVRVCNHV

SEQ ID NO: 292038 - protein, 152 aa, Zea mays
  Clone ID: MRT4577_29426C.1.pep
MLLSDDDGDDYDDDELHDDLEVSAEDHGPHSHRVHATKKLKHGHEEGHCGSHLSEVAAIDMNSMFFEGSGGPSAEKNLSYMRAQIETQRLNIKSQKLRTEQRHFKWLKFSREKDRELQKMKLENEKMELENERLELELKLKEIEMGIKPKRI

SEQ ID NO: 292039 - protein, 81 aa, Zea mays
  Clone ID: MRT4577_29427C.1.pep
PNKNKGGFKKTFVNKEEEHRGGRAALKKVGFFLGGGPGLLGGPHHGGPLNRPWKKPLPREGEAYLGEINLWPWAGYFFRRG

SEQ ID NO: 292040 - protein, 63 aa, Zea mays
  unsure (1)..(63): unsure at all Xaa locations
  Clone ID: MRT4577_29428C.1.pep
MTLPTPVVAXGVAAGAAALLLAAALAVAWWWLVIVRRRRRRDRSSDTGSSSEAPPPTWAEWGR

SEQ ID NO: 292041 - protein, 28 aa, Zea mays
  Clone ID: MRT4577_29429C.1.pep
THTIHSHTTIQLSIIHLNKLLPFFTTSN

SEQ ID NO: 292042 - protein, 119 aa, Zea mays
  Clone ID: MRT4577_2942C.1.pep
HLLYHFYSSTCTCACHSVPHYPVGYAIAGVHPGSLLSFILSVNTQVKPQLWPRSWHPLYLHILVHVLVRLPVGLVRGLVGRVSAVVTSVVAERHAACASCALVVRPVSVVRLLLALRRW

SEQ ID NO: 292043 - protein, 179 aa, Zea mays
  Clone ID: MRT4577_29430C.1.pep
ACRPVRSRSCFSPVLRFWPFCPRLPGGNETTSRFGRCFASWNWTPADPLLNPSSSTWSLTLHAFVNRQATPLVAGLSVAAAALSGRYMIRAWQAFRTQAAMPRVRRFYPGGFQGEMNRREAALILGVRERATVDKIKEAHRRVMVANHPDAGGSHYVASKINEAKDMLMGKGKSGSSIF

SEQ ID NO: 292044 - protein, 132 aa, Zea mays
  Clone ID: MRT4577_29431C.1.pep
MLRELELDAGRPAAQSVEFDMATPLVAGLSVAAAALSGRYMIRAWQAFRTQAAMPRVRRFYPGGFQGEMNRREAALILGVRERATVDKIKEAHRRVMVANHPDAGGSHYVASKINEAKDMLMGKGKSGSSIF

SEQ ID NO: 292045 - protein, 184 aa, Zea mays
  unsure (1)..(184): unsure at all Xaa locations
  Clone ID: MRT4577_29432C.1.pep
MRWRWSSRRRGRSSSPARLKVNLKPRPSPSPRRCGPWPSAPCPWRGRMRMMEDAVSLHPDLCTWAADGSPMHFFGVFDGHGGSHVSALCRDRMHEVVAEELAREGATFLRRRQESAASGSAAWSERAEEERAWRAALQRGFRRVDDMAALACACGRVARPSCSCPLRRXPPAFVGSTAVVAILR

SEQ ID NO: 292046 - protein, 133 aa, Zea mays
  unsure (1)..(133): unsure at all Xaa locations
  Clone ID: MRT4577_29433C.1.pep
MGQRLTYRXRHSYATXSNHTRVVXTPGGRLAYQYTKTSASGPVCPATPKKIQGLPHLRPAEXKRSKESRNPRTENSPLGGVMSGTAGRERIIRAFLVAEHXISNNVYKIHMTKDQRLQELLRYRHPYTVFNIP

SEQ ID NO: 292047 - protein, 100 aa, Zea mays
  Clone ID: MRT4577_29434C.1.pep
FHHSSGRPPTASCGWHHATCMSVISRSCHRLMGSSSTSRSQPSHEQRGQRAALWPRSRRREFGWPSTLDAAMEGSPSRAQHQSRACCRAMGEAGSAMAME

SEQ ID NO: 292048 - protein, 137 aa, Zea mays
  unsure (1)..(137): unsure at all Xaa locations
  Clone ID: MRT4577_29435C.1.pep
MYMSLVWQNKEAGTMAAAVAMMVCGGRAELASAGVLCAAAAMAAAQHASNVLSTNQPYNXPSKNRXDPNRVSASXATTYSNEPLSRRQQHTWTASGAPAGQNDQAARIQLIKMNKRATVPFMEGRIEAPCINGGLVL

SEQ ID NO: 292049 - protein, 71 aa, Zea mays
  Clone ID: MRT4577_29436C.1.pep
ILCVWHSSSIRCDTTSPSTSTSSVDPYRYAGHGRCRSSACVQSTLRHHVRGTGVQLAYSRELSFGESGPGR

SEQ ID NO: 292050 - protein, 107 aa, Zea mays
  Clone ID: MRT4577_29437C.1.pep
FLPSRRGNRRHPTHSFYYQTMAMIAARMADTTPGVIVDERVLGPGAGASAASSMLSTEAATMTVPVMLSISIPECGGGGARDRTERNGGADEGRARRASWPAGWLAS

SEQ ID NO: 292051 - protein, 121 aa, Zea mays
  Clone ID: MRT4577_29438C.1.pep
LLCTHALRSPNPICDFFIADHRWSIYNHFPHTRSLQITVREPSIALPWPSRTVRRGGPLDSLLCWSAGSSSSSSIALPAFEQVHRIIAFEAEKRTGKAVQALMRKSPRKLPKISLSRIMLF

SEQ ID NO: 292052 - protein, 74 aa, Zea mays
  Clone ID: MRT4577_29439C.1.pep
MAASSKTVAVLLAALLLALVASAVASRKLEEDAFLGSLSPAPAPAEGGAAGLASGKPGAWAVAALVSLIAFLAN

SEQ ID NO: 292053 - protein, 189 aa, Zea mays
  Clone ID: MRT4577_2943C.1.pep
YHHSSYFIRKSIAMTATGTSVSLLKFVGTVSLGLLTGVSYSISSLALPALLRLPSSASASHGLSTLSAALKTPVLALTSLASAPFLISFFLAPRSSRHPYLLYTAILATLSSVAILIPTPTPAPRRTASSAPRKSSRAKMEASYEVLGDAHSEPASDEDIEDINGEEVRAEVEGLTRSYLARTAISALG

SEQ ID NO: 292054 - protein, 47 aa, Zea mays
  Clone ID: MRT4577_29440C.1.pep
MASRRVVSSLLRSASRLRAASPAAPRPRGAPHRPGQDRDLGGGGLRY

SEQ ID NO: 292055 - protein, 149 aa, Zea mays
  Clone ID: MRT4577_29441C.1.pep
WVPRGRPGLGYILPKTPLQPLLLGQCSPSPGGHGALLLHLLPQHPPPAAPWLRAPLARRRAPLRTPCPAHSHEARQIGQPTSSTQIASLFCTSRGRSSLVSMTRGSVWHVLVLKISGFCACSKIHISSLEAPKNHGTCLVGFLMKFSTY

SEQ ID NO: 292056 - protein, 59 aa, Zea mays
  Clone ID: MRT4577_29442C.1.pep
HYSRAPLPFFFFFVYNTEKNPHARGYIYISHIIPTTHNIYRTTLLPQISTKIPTHSYKT

SEQ ID NO: 292057 - protein, 276 aa, Zea mays
  unsure (1)..(276): unsure at all Xaa locations
  Clone ID: MRT4577_29443C.1.pep
PRPGVDYPSEAVARCLDWVNVVAFGLHPXPRVRPTPRPSXAPLYDRASHFSASYGVVSWIDAGVPASKVVMGLPLYARSWFLRNKANSGVGAPVVAAGPKQRGSNATGVMSYAEVQKIAAAGGGGRRAVTTTFDNASVASYLSIGDVWVAFDGAAVVAEKLAFAAQRGLLGYFLWPVNYDDANLAVSRSALDAWMKNEISSNLKNDTGLRQTQGPVRLPPALQSPAGTPGPAPAPTSGSRSWLPWTKLDAFLRFGCANSCVLLVVTNLIWSCIWDY

SEQ ID NO: 292058 - protein, 35 aa, Zea mays
  Clone ID: MRT4577_29444C.1.pep
NGVSALEIEVVSFALADLLFTVHSYDLVLVFVVLY

SEQ ID NO: 292059 - protein, 412 aa, Zea mays
  unsure (1)..(412): unsure at all Xaa locations
  Clone ID: MRT4577_29445C.1.pep
RPGADRQGQFAENLIKGNAYXWLLNKVGMGGKGPSVLDDEGQGVLHLAAALGYDWAIRPTLAAGVNINFRDIHGWTALHWAAFCGRESTVVALIALGAAPGALTDPTPDFPGSTPADLASSNGQKGISGFLAECSLTSHLQVLNLKEANMAQISGLPGIGDVTERDSLQPPSGDSLGPVRNATQAAARIYQVFRVQSFQRKQAAQYEDKGGMSDERALSLLSVKPPKSGQLDPLHSAATRIQNKFRGWKGRKEFLLIRQRIVKIQAHVRGHQVRKHYRKIVWSVGIVEKVILRWRRRGAGLRGFRSQEGSVESSSGGTSSSSIQNKSSGDDYDFLQEGRKQTEERLQKALARVKSMAQYPEARDQYQRIFTVVSKMQESQAMQEKMPEESAEMDMSEFKELWDDDAPIPGYF

SEQ ID NO: 292060 - protein, 123 aa, Zea mays
  unsure (1)..(123): unsure at all Xaa locations
  Clone ID: MRT4577_29446C.1.pep
SIGQPFTERTRXMSSGRGEASKLDPHDELTDCPRQRVEFQSHDDATSMLSAPWRAPHTDRTSPGNAAGARRRRPTPWFSLYDGTPLGGTAAARARAPLSLSRVTARFSLPPFLLMAPTAPRYG

SEQ ID NO: 292061 - protein, 71 aa, Zea mays
  Clone ID: MRT4577_29447C.1.pep
TQPNKIEFGATKKKISSGKVGPVNMVVKKRPPPLYLVFFYIIVIFFHFTCSLFCFFLFFFSFFFFFFFFFF

SEQ ID NO: 292062 - protein, 115 aa, Zea mays
  Clone ID: MRT4577_29448C.1.pep
MGGGTVVCVTGGSGYLGSWLVHATLRSLADEKKTGLLRALPGAAERLRLFEADMYDADTFEPAIAGCHFVFLVATPLTHDPTSTKYKNTTEAAVDAARINPPQCALSGTVKRVIH

SEQ ID NO: 292063 - protein, 32 aa, Zea mays
  Clone ID: MRT4577_29449C.1.pep
KIKLVCPSYTKMCYCNLEYLHCSYVSFIYSCL

SEQ ID NO: 292064 - protein, 52 aa, Zea mays
  Clone ID: MRT4577_2944C.1.pep
SSQLRLENWITKKSCCLYNWRTHGLWGPLFLSRTVHDEKAPNCTHQLVRCAK

SEQ ID NO: 292065 - protein, 385 aa, Zea mays
  unsure (1)..(385): unsure at all Xaa locations
  Clone ID: MRT4577_29450C.1.pep
MGGGTVVCVTGGSGYLGSWLVRKLLGRGCVVHATLRSLGXLIPIIHAAPPRSPCISSDDRPSWACFVSLTYVXDEKKTGLLRALPGAAERLRLFEADMYDADTFEPAIAGCHFVFLVATPLTHDPTSTKYKNMTEATVDAVRIILRQCERSGTVKRVIYTASVTAASPLKEDGSGYKDFVNESNWTPLNLSYEFSNTHLDDYVRSKSLSEKELLSYSSFSSSSSSSSSSKEDDRPQALEVVTLACGLVGGDSIQTYLWGSYAAIVAPLTGQAVSHNALLFLQALLGSVPLVHVEDVCEAHVFCMEQESMTGRFLCAAGYPNMXDMVDHFAAKHPDLKIQLTQVTGEGVRIQPNTSKLEDLGFRFKYGVEETLDCSVECAKRLGEL

SEQ ID NO: 292066 - protein, 112 aa, Zea mays
  unsure (1)..(112): unsure at all Xaa locations
  Clone ID: MRT4577_29451C.1.pep
MANPRVFFDMTXVGGCSXAGRIVMEXYANEEPKTAENLRALCTGKKGVGKYSKPVHYKGFILHRVIREFMCHGGDFTRANGTGGEFIYGEKFPHEKFERKHTVPRVLFMVND

SEQ ID NO: 292067 - protein, 113 aa, Zea mays
  Clone ID: MRT4577_29452C.1.pep
MPVSRIAIGAPGELSHPDTFRAGVAEFISMLIFVFAGSGSGMAFGKLTDGGATTPAGLIAAALAHAFALFVAVSVGANISGGHVNPAVTFGAFVGGNISLLKAVVYWVAQLLG

SEQ ID NO: 292068 - protein, 76 aa, Zea mays
  unsure (1)..(76): unsure at all Xaa locations
  Clone ID: MRT4577_29453C.1.pep
LSLSALATTAASSLLKSSFAXGSRLASATRTTTPSSVAVATPRAGASPIRASISSSSTPSYDMTSLRFSPINESIV

SEQ ID NO: 292069 - protein, 27 aa, Zea mays
  Clone ID: MRT4577_29454C.1.pep
EIVVFSKLTNAYGRVIIERSENFYSAF

SEQ ID NO: 292070 - protein, 78 aa, Zea mays
  Clone ID: MRT4577_29455C.1.pep
RGRIMLGVTSACQRADSHSNHRPRGGLICRTRPQGRPVEVPACIRTAVQKGHPALEGMLHREPRAAPARSRTRGRRHA

SEQ ID NO: 292071 - protein, 102 aa, Zea mays
  unsure (1)..(102): unsure at all Xaa locations
  Clone ID: MRT4577_29456C.1.pep
EFKMGXEKVHMNIVXIGHVDSGKSTTTGHLIYKCGGIDKRTIEKFEKEAQEMGKGSFKYAWVLDKLKAERERGITIDIALWKFETEKRHYTIIDAPGHRDFI

SEQ ID NO: 292072 - protein, 273 aa, Zea mays
  Clone ID: MRT4577_29457C.1.pep
HEAKLEKADRFQRVKLEINEMIKERMATRSKVNEQDGSADDFQVANDERRALKTKYTMDTALEDKMCDLYDMYVEGMDEDKGPQSRKLYVELAELWPHGCMDNVGIKDAIYRSKERRRLLYSQQKVRSEERMKRKRLAATAKLPDGLAVAMQSGVAPQVAQPPITNPITYHTADYGQNPGLKYFDRARETSSSAIPDDGNRIAGEVKKKKRKPEYDPVDTQANLPRAPMPHGSEKQKPSKPADEASAGSLPSMATTQTVLGLPSVLGHNQQPS

SEQ ID NO: 292073 - protein, 119 aa, Zea mays
  Clone ID: MRT4577_29458C.1.pep
LFLLFFFFFFFFFFYTINQMGWDTFIMLVRRLLGVQHLLTPLFFPKLEGFFLVQPPVIYMEMPHNKNLPSFLCCPSFSFLPKNPGRCGSFNHSGVFTIYPRPLWEKSPAVCFSGGITQG

SEQ ID NO: 292074 - protein, 82 aa, Zea mays
  Clone ID: MRT4577_29459C.1.pep
GVKSWALKGGKPFFFFFQGGDFFPRRDKFSPPFEINKKGAIPYGSWPQVQKRGGRIFLQKILKKKKLFFWLGAFFPAQTGFF

SEQ ID NO: 292075 - protein, 105 aa, Zea mays
  Clone ID: MRT4577_2945C.1.pep
HPNKGERAQKTLSSKKSAKDRVKILPLSCLNRTPGVLFIPDPFQAAPLTQGQRRPNPGVQSLALLTKKTVLEDPPPTKTPKEKGGTNRTPRELKNHPRKNTLKLW

SEQ ID NO: 292076 - protein, 89 aa, Zea mays
  unsure (1)..(89): unsure at all Xaa locations
  Clone ID: MRT4577_29460C.1.pep
SQKRGLDFXFWVPLMLMGRVASIPVCQLSVHTDRDGTYHYNLGKALAPLRVEGILIXLGSGRATHNLRKIRPXTAPVPHRVFKFDTWIK

SEQ ID NO: 292077 - protein, 175 aa, Zea mays
  Clone ID: MRT4577_29461C.1.pep
SAARPRACAAAPRARAALSGAGAGPRRFLRARDWLLRPRAALGRSVRGVCVNAHRGSRPRQVPPPAGAPRLRRPWCAPPCIRRACARRQGRGLASGGPRCRERDRQHVCGAGGRGLRPRRVRVAARPPRRGRGPRSSGRTPDAGELEKAFGPVSKESQRERGFGPDLISWEHAGG

SEQ ID NO: 292078 - protein, 116 aa, Zea mays
  Clone ID: MRT4577_29462C.1.pep
DHGQVELQAATPRVGVQPPGGDSSPGSSACSSLMQSTTPRLRRCYDYYPHILLGQDGTPSAHATPLQSIRLLQSTEERIHLSAPVCDATPRYASDVRAQVQLRLVEHTINHAATVG

SEQ ID NO: 292079 - protein, 151 aa, Zea mays
  unsure (1)..(151): unsure at all Xaa locations
  Clone ID: MRT4577_29463C.1.pep
MARFQLAAVAMAMLLPRRRRRPRPPPRRXPKASPPPATPPPTPAPVSPPVPPPTMPPPXRPRPPPRPRPRRPRPPPRRPRPXPTPDVSSPPMPTEGPAPTPSAEAPPXPPAPPSPAPPPPPSGSPPPQPWPWPCSSPPSTERAGDLRRPLL

SEQ ID NO: 292080 - protein, 80 aa, Zea mays
  unsure (1)..(80): unsure at all Xaa locations
  Clone ID: MRT4577_29464C.1.pep
HREAGRQAHEGPMLXINDCGLLGSAATMNMCSKGHMVIIAKHDQAKLAVFCINSVGNSSYASMAPVPAGNDTTHTCGQVQ

SEQ ID NO: 292081 - protein, 55 aa, Zea mays
  Clone ID: MRT4577_29465C.1.pep
RFLEFFPMTILIRAHHLKFPLSISTISGRRILSWPYTLRLLKLSGPISLFSVSSV

SEQ ID NO: 292082 - protein, 57 aa, Zea mays
  Clone ID: MRT4577_29466C.1.pep
FLFFFVFCFFFFCKIKPGCFGLLPEGMCCCLPKFSPSKQRPNNCERPVSLLSLTYKS

SEQ ID NO: 292083 - protein, 178 aa, Zea mays
  Clone ID: MRT4577_29467C.1.pep
MGCLVLINFVLDSHLNYIMSTVQLLKGTVKAIDQRSRGFLWAGMWWEQYGDSAPSLQRAAVRITSQVCSTLTFQRDWGVILQNHYEKRNKLDKEALADQAYVHYNLTLHSEPKARRRPDADPIALDAVDMTSAWVEDSDGPILTQWLDRFPSALDGGDLNTRQFGGSIFGTNDNLFGL

SEQ ID NO: 292084 - protein, 89 aa, Zea mays
  Clone ID: MRT4577_29468C.1.pep
MEGKSRLPEVTIVPAARPLAGDGTGDAAKAAAGKEPVSPGTPSSVAAGRSSCEERRAVDGVTLPGWKLDALCQESCPSPAMRARFPYYF

SEQ ID NO: 292085 - protein, 208 aa, Zea mays
  unsure (1)..(208): unsure at all Xaa locations
  Clone ID: MRT4577_29469C.1.pep
FEHTVCIVLIEKKKKNGAQYNPESKFFRTIKEEFYQVLDKGLTTPDQRHDITAQVHAFRKAQGLFGSNIAKEARNNTPPGMWWEXYGDSAPSLQRAAVXRITSQVCSTLTFQRDWGVILQNHYEKRNKLDKEALADQAYVHYNLTLHSEPKARRRPDADPIALDAADMTPAWAEDSDGPILTQRLDRFPSSLDGGEPNTKQLGGSMFG

SEQ ID NO: 292086 - protein, 50 aa, Zea mays
  Clone ID: MRT4577_2946C.1.pep
MALGVLFHGAQLALDLAVAGMSLAVALGFFALITTLLCSAAFLHHSKPAA

SEQ ID NO: 292087 - protein, 89 aa, Zea mays
  Clone ID: MRT4577_29470C.1.pep
MEAKSRLPEVTIVPTARPLAGDGTGDAAKAAAGKEPVSPGTPSSVAAGRSSCEERRAVDGVALPGWKLDALCQEFCPSPAMRARFPYYF

SEQ ID NO: 292088 - protein, 62 aa, Zea mays
  Clone ID: MRT4577_29471C.1.pep
CHPEQVAPKISCRDLSSVMQCHPEQVAVYSFCALHFFPHQLDTTCRLSFSLFFCFSYCVLPY

SEQ ID NO: 292089 - protein, 165 aa, Zea mays
  Clone ID: MRT4577_29472C.1.pep
GRASPTTSEALPLQSCVSSKVLQDGPWKSRKNKEKNERMIQDKYFLRGDEWGVGDCSTEGMSDQEREDFISELKKRAGAEYLAEDVIQFQQHKYGHKFFTVAIWCMLLTPDGVLGCFPCSGFPFRARSCMYVSMYCVYKDLRALCITQMMNLWATACMVVSVYLT

SEQ ID NO: 292090 - protein, 49 aa, Zea mays
  unsure (1)..(49): unsure at all Xaa locations
  Clone ID: MRT4577_29473C.1.pep
NKQNNIKLYEHRASIMDNCEELXIPDWLDSIKGIDDSKDLPLNFSRATL

SEQ ID NO: 292091 - protein, 89 aa, Zea mays
  Clone ID: MRT4577_29474C.1.pep
MEAKSRLPEVTIVPAARPLAGDGTVDAAKAAAGKEPVSPGTPSSVAAGRSSCEERRAVDGVALPGWKLDALCQESCPSPAMRARFPYYF

SEQ ID NO: 292092 - protein, 45 aa, Zea mays
  unsure (1)..(45): unsure at all Xaa locations
  Clone ID: MRT4577_29475C.1.pep
TTPQHYQECIEXSIQHRPPFVYFMMSEVQTYLLLYMLPKDTSYLH

SEQ ID NO: 292093 - protein, 227 aa, Zea mays
  unsure (1)..(227): unsure at all Xaa locations
  Clone ID: MRT4577_29476C.1.pep
MEAADALPWAAQCAGMAVLASSLCLVALALVLLLLRRWPWCSCHVCRAYLTGSWARDFTNLGDWYAHLIRESATGTVHVHVLGCTVTANPANVEYMLKTNFDNFPKGETFAALLGDLLGRGIFNVDGHAWRYQRKMASLELGSVAVRSYAFGIIAREVEARLMPLLAGAADAGAVVDLQDVFRRFAFDTICKISFGLDPGCLERXMPMSKLADAFDTATRLCAMRGA

SEQ ID NO: 292094 - protein, 36 aa, Zea mays
  Clone ID: MRT4577_29477C.1.pep
QGLEEQIMFPSPLFAVQVPVITENVNHIRYTLLQLT

SEQ ID NO: 292095 - protein, 102 aa, Zea mays
  Clone ID: MRT4577_29478C.1.pep
PEGAVDTGLGWLARHTTSNLSTYRPVDGWTTCVPVLSRSCRLKVTRRNAFCRIRFFGGHTGFTARWMRSSSRRNTARPRLLIQGQGTGISPTTRLLARVRTR

SEQ ID NO: 292096 - protein, 66 aa, Zea mays
  Clone ID: MRT4577_29479C.1.pep
YRHSHISPVHHHLLYYLSVQFLFTLGCWFKLLGARTVSSLGSGQRILQGFTPLSFGEQGSSQWSRD

SEQ ID NO: 292097 - protein, 97 aa, Zea mays
  Clone ID: MRT4577_2947C.1.pep
AKILVANKCALGDTPQVPLEEGKALPKPEGLFFMETWPLDPPKVRPPFEIVIREISTHVSPKVLNSDLYKAKLSPTRVSIAGAPKNDPNQGTRFGFF

SEQ ID NO: 292098 - protein, 45 aa, Zea mays
  Clone ID: MRT4577_29480C.1.pep
ELGCHLMQHPLGWCKELNPEPLEHSVGVNVEFIEFIVRFPISSFC

SEQ ID NO: 292099 - protein, 78 aa, Zea mays
  Clone ID: MRT4577_29481C.1.pep
RVRGRVGSSSTASRQKPRPHQKRPSRPIPTASVAGISGPNSPGLESCTASRRKPYRPATSRTSLGLRRPNRTLSMTGR

SEQ ID NO: 292100 - protein, 195 aa, Zea mays
  unsure (1)..(195): unsure at all Xaa locations
  Clone ID: MRT4577_29482C.1.pep
LRSPSPGGGEEELPIASPSSPHTPDLTSPNCSTSPPATHTCSHGRHRDLSPLSTLDDGGGIXFSLDGADEVDPDLNLVKGRGGALLREKMVEAASDKFIVIVDETKLVDGLGGSGLAMPVEVVQFCWKYTLVRLQELFKEEGVEAKLRFEAXDKPYVTDNSNYIVDLYFKTPIKDALAAGQEIAALEGVVDHGLF

SEQ ID NO: 292101 - protein, 274 aa, Zea mays
  Clone ID: MRT4577_29483C.1.pep
MAATAISVRLHPTAARHVASARRARLGAVRAQSAPAAAAAALTQDDLKRLAAVRAVEQVKSGMVLGLGTGSTAAFAVAEIGALLAAGKLEKIVGVPTSKRTFEQAQSLGIPLSTLDDNPLIDLAIDGADEVDPDLNLVKGRGGALLREKMVEAASDKFIVIVDETKLVDGLGGSGLAMPVEVVQFCWKYNLVRLQELFKEEGVEAKLRFEGDKPYVTDNSNYIVDLYFKTPIKDALAAGQEIAALEGVVDHGLFLNMASSVIIAGTDGVSVKTK

SEQ ID NO: 292102 - protein, 142 aa, Zea mays
  Clone ID: MRT4577_29484C.1.pep
ICLQKYFNEITLYRFFFKRHAWVHVCTYLRFCKWTHALGQDLYWPKAVSDTVSSYIWIQHSLACDLLMHYLLRKAYGDHNPAGILLLTKNWKDHMSWLDAKPIGTFHAHPFFITGEVGLSLMDMTLRMTLRRTNKGLNPLTN

SEQ ID NO: 292103 - protein, 139 aa, Zea mays
  Clone ID: MRT4577_29485C.1.pep
TLLNLDFLLSLLLLYPLYFFSSSDIFTSFILLLAWTLLASIYFLDFSVLGICRSSSYYKQRGGMNKYWPLKKSQKQGYFSSKHRKTLYRRRVDVRTYVRAKNANASNNALLAYLYSLSLSTCLSLMYYCSFASIGWHSS

SEQ ID NO: 292104 - protein, 213 aa, Zea mays
  unsure (1)..(213): unsure at all Xaa locations
  Clone ID: MRT4577_29486C.1.pep
MVGSAKSSSCSHSRKRRPTSRSGTSKSVVRVPSSRYESTSCLRVRSTSEHVEASTLSMRARAKLASACAACALAMAWLASLLSSTSWHQRSILSPSRAATFSASLRHLLSAADFSRTVSACCTRSLSTSADTSAVRAPDATRSAKSAAXDSAAAXASLSRRDTVPASSLTAVTAEISPPALSALPFAPGTAADTVVATTGGTTASCPSPDPTR

SEQ ID NO: 292105 - protein, 159 aa, Zea mays
  Clone ID: MRT4577_29487C.1.pep
PRKEPQKEPPKRSRPEEKRRKRGKRRGKKRKKRAQRDGKGRGTPGGKPRETAAKTPRKRPLPSAHQAPKRVGKRARGGPVRACPPGRKGAKRQGDKRGHPQGIPRLSRANRGPKKATRDLKNSKELPLRGMQAGSFYFPLLFFFFFFFFPFFFFFFFFF

SEQ ID NO: 292106 - protein, 53 aa, Zea mays
  Clone ID: MRT4577_29488C.1.pep
SFPTTWFYLISIFTRLSTINSSLDKPSTSVFTQSNSSPLIAPPLILLLAVRIA

SEQ ID NO: 292107 - protein, 136 aa, Zea mays
  unsure (1)..(136): unsure at all Xaa locations
  Clone ID: MRT4577_29489C.1.pep
LAPLLSSTSWRRRSVLSPSRAATFSASLRHLLSAADFSRTASACCARSLSTSADTTAVRALDATRSAKSAAXLAAATPPSXSAGHSAXASSLTAVSAEISPPAPRALPFAPGTAADTMVATASGTTTSCPSPDPTR

SEQ ID NO: 292108 - protein, 237 aa, Zea mays
  Clone ID: MRT4577_2948C.1.pep
MGSARVAFVPLWEERNLIEHSGERALIALAEGAEFDNAWPIGRKRRQLQHAWFAGSAGFGTASGATSHRWAECDYLPAVRATVAPHAPGQLGRRSCSWVVLPSLRHDASVRRSVLARPGGLEWGSAGGQVAAVVGAEVVAAGEGLVADEIVGTICASGLRLFGFDSLSSPLEWGRGQGHCCSSVCPEVIAAAVWPPRAEVVVAAAVVGGESPGACRPAGPPMWRLFIPAGVEPEFRL

SEQ ID NO: 292109 - protein, 75 aa, Zea mays
  Clone ID: MRT4577_29490C.1.pep
RCSPLLSPPVQSHWSLIVLYVSIHHSVKKKQKKKYKKKKKKESPINDPRQSHARMRRQTHSLVKLIYNLALVLEL

SEQ ID NO: 292110 - protein, 88 aa, Zea mays
  unsure (1)..(88): unsure at all Xaa locations
  Clone ID: MRT4577_29491C.1.pep
FWWCRSLALPFPVLVFGLVENKHFNLGLIPGMSGVRFGVYAPYLLWWYVCVNMLVSPSMCVXLFVCAGIGVCKGRFGKFNLILILREI

SEQ ID NO: 292111 - protein, 56 aa, Zea mays
  unsure (1)..(56): unsure at all Xaa locations
  Clone ID: MRT4577_29492C.1.pep
ATSPGLVLRVVIQKSIVLDLSNAFFIEDEMAQGLRECGXYQGGREEKERANLRVAR

SEQ ID NO: 292112 - protein, 94 aa, Zea mays
  unsure (1)..(94): unsure at all Xaa locations
  Clone ID: MRT4577_29493C.1.pep
VAGTDKETTTRGHDDLGKRCAKYYEAGARFAKRRAVLKIGPNEPTQIAIDLNAQGLARFTIICQENRLVPIVEPEILVYGPXDFDRCAYVTGTG

SEQ ID NO: 292113 - protein, 178 aa, Zea mays
  Clone ID: MRT4577_29494C.1.pep
GHQQHAGGPYDSSTFWLNTACRSFSLMHLHTTVFFSSPCSQLHSRASSSSIYSRWGLMGASREKAAGDAVGARWRGSPKRRSAAARLAGHAAQLCGGRRSASRAWRAGARHRACSARASTMGVDGARRPWIWPPRLRARKGRDAQGLGHGGAVSTARCIGKTWTGLHFHGKEGSAGRR

SEQ ID NO: 292114 - protein, 54 aa, Zea mays
  unsure (1)..(54): unsure at all Xaa locations
  Clone ID: MRT4577_29495C.1.pep
VACSTVXIPGANICRSPTPGTPSARRCPPKLRAGEGGCHPLGMAYLIVLLTIYL

SEQ ID NO: 292115 - protein, 75 aa, Zea mays
  unsure (1)..(75): unsure at all Xaa locations
  Clone ID: MRT4577_29496C.1.pep
YHLLFTNQISSSCSPTCPCPLXSXAKMGIYTVPLHPGVSSATTFLREILGALSAPHGSAMMDLFALGLVSHTRPD

SEQ ID NO: 292116 - protein, 65 aa, Zea mays
  Clone ID: MRT4577_29497C.1.pep
GFVFFEHGSRMLLFGWGNWCHYLLMKGGGVVIIKGRGGGSFSKWFWGGGATVWPPFWGGSFWGPP

SEQ ID NO: 292117 - protein, 117 aa, Zea mays
  Clone ID: MRT4577_29498C.1.pep
MLTKLMPAVLLVLVALKLSAGARSDESPCGFPAIFNLGDSNSDTGAFPALFPAVQPPYGRTFFGMPAGRQSDGRLTIDFMAESLGLRYLSAYLDSLGSNFTQGANFASAAGTIRRVN

SEQ ID NO: 292118 - protein, 69 aa, Zea mays
  Clone ID: MRT4577_29499C.1.pep
VYNYAFNKTFSEFLNPFASSHFTTHCQLQFISILSVTTTLNHYITSYTTNTNNIILYFKLVFISNYSSS

SEQ ID NO: 292119 - protein, 243 aa, Zea mays
  unsure (1)..(243): unsure at all Xaa locations
  Clone ID: MRT4577_2949C.1.pep
GIGEPSRIGREERTGTPPITREETHRAAAAAASVWVQRSVLPIDTCLVTMRGSILYSSFRRISQGHPPKSSGFHRSSPLAAQRFGRSKRWIATSDGLPGEKMMLVNDLVCPVKYFTEEVPLLEPLDNNILLKTVGGPRGKTLVAWKARKTIRSLPELIAAYQLRGCTLGNHLRLENLKISRSSGRFVLIDTSEIGPTEKKGSFIQDWNLXGDVLDTIARRVLGVGTPYPRTLRKHQQYAVSGT

SEQ ID NO: 292120 - protein, 147 aa, Zea mays
  unsure (1)..(147): unsure at all Xaa locations
  Clone ID: MRT4577_294C.1.pep
MRECISIHIGQAGIQVGNACWELYCLEHGIQPDGQMPGDKTVGGGDDAFNTFFSETGAGKHVPRAVFVDLEPTVIDEVRTGDYRQLFHPEQLISGKEDAANNFARGHYTIGKEIVDLCLDRIRKLADTXTGLXGFLVXNAVXGGTAS

SEQ ID NO: 292121 - protein, 77 aa, Zea mays
  Clone ID: MRT4577_29500C.1.pep
GGGALFFFLCLYTARGPSMLPIKRFTPAHIVVSWRQDNQPTIRWSSGFRGVKPTLVDDRMEDVYKPPTISNVMFLRT

SEQ ID NO: 292122 - protein, 90 aa, Zea mays
  Clone ID: MRT4577_29501C.1.pep
RGRPRVRSPRVLYLSLARAATTRVVGYRRRPLRQLPSSSSGASPSTSSHFISGGAPHLNDGGIKKTCTQDQKPGGGWGPAGRLAAGGLLQ

SEQ ID NO: 292123 - protein, 292 aa, Zea mays
  Clone ID: MRT4577_29502C.1.pep
APAHSESPGVAQTTATTMAAAACYSPARIIISCSATTTSSPSSARTLRVAVVGGGPAGASAAEALASAGARTFLLERSPAGAKPCGGAIPLCMLDEFAIPRDLVDRRVTRMRVLSPSNLAADFSRALPPGAHIPMLRREVLDSFLRRRAVEAGAELVPGLVTSLSLPAGPADPYLVHYISSSPEGVGAGRSVLEVDAIVGADGANSRVAREVGAGDYTTAIAFQERICLPDAGMAYYDDLAEMYVGGDVSPDFYGWVFPKCDHVAVGTGTVAAKPEIKRLQSGIRARAGPKI

SEQ ID NO: 292124 - protein, 40 aa, Zea mays
  Clone ID: MRT4577_29503C.1.pep
QICPSYENITYIIAGSSQVDIFNDCILNPNNTTGSYVRQD

SEQ ID NO: 292125 - protein, 226 aa, Zea mays
  unsure (1)..(226): unsure at all Xaa locations
  Clone ID: MRT4577_29504C.1.pep
ILFLRTFVSRRPPTPGMIGSIDCMHWEWENCPTTWQGQYRGYYKKPTLILEAVASHNLWIWHAFFGMPGSCNDINVLHHSPVFDNLANGVGPSVSYQLNGQQYHMAYYLADGIYLSWTTLIXPISCPFSNKHKYFTAKHDEYQKDVERAFGVLQDKYQIIKNHARNWNPIDLKFIVDCVIILHNMGTEYEHGMEPIRIEDYEGGSRPNSSATSNSSVVGEGVGCNW

SEQ ID NO: 292126 - protein, 91 aa, Zea mays
  Clone ID: MRT4577_29505C.1.pep
PPPQNKRGAPLGETQKAIKGAPEGPPKGIMGYAEGDLVSPPFLGDSGWGIFDAKAGVALNAPFVKLVSWGANEWGYSNRVVALIPPMFKTQ

SEQ ID NO: 292127 - protein, 80 aa, Zea mays
  Clone ID: MRT4577_29506C.1.pep
ERSVRKVVLKENAMSRTVVRVKDGAVHGYRMRNGEKRWGSRKSGGGGVGEVGIRRRDAEKVVKVTVELVQRGKIVKPYGS

SEQ ID NO: 292128 - protein, 104 aa, Zea mays
  Clone ID: MRT4577_29507C.1.pep
TKNCWNTNTYQSPIGIQFVPCRLVALLISCVTDVRCYCLIACVLQMAYTPLDTLKWVVKEMEMNSVEVRQTVGHPTNSSYELQQLIDKILDLSDWLDMVAIQCA

SEQ ID NO: 292129 - protein, 93 aa, Zea mays
  Clone ID: MRT4577_29508C.1.pep
VHLFIDTGHSPYKITFMPFTFGNNSIVIHRGLNSLFIFKSVSISASTPKLSRSHLRRCINLRIVLGFSYCDSDSSPKVPVHTLCSRNTVKSCF

SEQ ID NO: 292130 - protein, 56 aa, Zea mays
  Clone ID: MRT4577_29509C.1.pep
NKRPHFPLIPSHAKGGILPTNKTLMGTKKTDPSPINRNKSWPTRGPTNSWHEPRDF

SEQ ID NO: 292131 - protein, 88 aa, Zea mays
  Clone ID: MRT4577_2950C.1.pep
GLPFPPVNQGNNFSGVNKYFLLSVDGAWQNCFPAPEFKIPLFFCFPPPMLFFLFWGGGACLSNPPWIPCSPSVSKALEIFRKGFWFSP

SEQ ID NO: 292132 - protein, 93 aa, Zea mays
  Clone ID: MRT4577_29510C.1.pep
PCDEKMILMSCKKLAVELKPCIVISCADGAMTLTVLHCDKEHGLFRSRCKNTVKLGKRKNVHAPCLVVDLPTLTDIALEDILRCGPPDKSVMP

SEQ ID NO: 292133 - protein, 213 aa, Zea mays
  unsure (1)..(213): unsure at all Xaa locations
  Clone ID: MRT4577_29511C.1.pep
RYLTLLDXMMDQGLEPNSLTYGIAIAGFCRGGNLSEAEVLFNIVEERGIDNINVLYGSMVCGYLHSGWTDHAYMLFLRVAKQGNMVDRLSCSKLINGLCRDEKVGEASTVCKMMLEKNVVPDVISYSKLISAYCQTRDMHNARLWFHDMVERGLSDVIVYTVLMNGYCKVGRLQEACELFVQMINLGIKPDVVAYTVLLDGHLKETLQQGWQG

SEQ ID NO: 292134 - protein, 118 aa, Zea mays
  unsure (1)..(118): unsure at all Xaa locations
  Clone ID: MRT4577_29512C.1.pep
HTADGPKXXEAHPAGKTXXXXDPKSGXHGEXXXAXPXKPDTKKTXAARGDETXXAXGAPRNXXKXXXXKXXAGTAXAAXXPAGEXEDEEDXXXXGXETEEDKKAXXEXAAXAKAXXKK

SEQ ID NO: 292135 - protein, 76 aa, Zea mays
  unsure (1)..(76): unsure at all Xaa locations
  Clone ID: MRT4577_29513C.1.pep
KKKKKKKKKKKKKKKKKKKKKKKKKKXRKKKFKRIKKLRRIVWGFSGRLFGSWVLALRWGNRVAFPYFFPVLSFAV

SEQ ID NO: 292136 - protein, 218 aa, Zea mays
  Clone ID: MRT4577_29514C.1.pep
MSLTAAPVAFIGLDELSVELAASFLRSGACVRSFTPEAERLPSAALAELNGLLQCASPVEAARDAALVVVQSDAGGVDELFFGVEGIAKGLCAGSIVLIHSTLLPSQLEKLEQELTDQKKDIFLLDGYIFTGLSDELKQHIIIVASGRQDIAERASKFFRGLYKTIYFAEGEFCTSRKIRMVNDLLEGIHFVASIEAMYLGVRAGIHPTIIYDIISNA

SEQ ID NO: 292137 - protein, 68 aa, Zea mays
  Clone ID: MRT4577_29515C.1.pep
TIDPVRISLYGFPLVSPCSVTDLFIAWGFWPMPRLYYCSVHIPPKLYCNRVVRVVLLLNKYIGVHLYP

SEQ ID NO: 292138 - protein, 83 aa, Zea mays
  Clone ID: MRT4577_29516C.1.pep
KRKDMPFDEKEKAWQQIRRGKYVEFNLVHDRGTAFGLNTPGSRVESILMSLPLTASWKYMYEPEPKSREQRLVDVLKEPKEWV

SEQ ID NO: 292139 - protein, 142 aa, Zea mays
  unsure (1)..(142): unsure at all Xaa locations
  Clone ID: MRT4577_29517C.1.pep
RLCISIVVLPREDSCSGSDAGSAGGSIYEPFPMRLEALQVLAHLARGYFSMTQVYLMELGEVICKCLGEADPSIQLHGAKLLEELGTSLIHQYKPDSSVAPDQRVPVPLVVTFWTAMLNGPLPRALQNAEHPTLXASACDAL

SEQ ID NO: 292140 - protein, 72 aa, Zea mays
  Clone ID: MRT4577_29518C.1.pep
IKVTPEMAFLHPTLDIPNFAPPCQHFTELHILLYSSTPAIEHTQFHLPASIFRACLVLVQTALHGSPCNPRL

SEQ ID NO: 292141 - protein, 64 aa, Zea mays
  unsure (1)..(64): unsure at all Xaa locations
  Clone ID: MRT4577_29519C.1.pep
PRVRLFLSHRIINILGGASRLVLLAVVALLGGGLLQQALAKGXGRRGHGGAANPHVAGMCPRTP

SEQ ID NO: 292142 - protein, 76 aa, Zea mays
  unsure (1)..(76): unsure at all Xaa locations
  Clone ID: MRT4577_2951C.1.pep
AALKSRPGTCRSPGPAQGVTPXAPPSPXPSKGVPPPAKPTNGIPPSPSPRGPNPPTPSSGPTPSTPSPTPTKGTVT

SEQ ID NO: 292143 - protein, 207 aa, Zea mays
  unsure (1)..(207): unsure at all Xaa locations
  Clone ID: MRT4577_29520C.1.pep
MASEINPKTEAFDAHDGSPRYDEKHGTTEPIQTPKGSWALRNGLTIESFKAHDDYAKGTVELSRDMKPRHLNMIAIGGSIGAGFFVGSGGALQTGGPGSLTIGFLIMGVMIFNVVYALGELAVMYPVSGGFYTYANRFVDPSWGFAMGWNYVMQWXXVLPLELTVCGTVIQYWAPDTSVAIWVSVFLXVIIIVNIFGTLGYAEEEFW

SEQ ID NO: 292144 - protein, 46 aa, Zea mays
  Clone ID: MRT4577_29521C.1.pep
TVNLQKKNFAYCGLMHTVQPLAYNFPIISSWQVRYQDFNHQYSFSQ

SEQ ID NO: 292145 - protein, 71 aa, Zea mays
  unsure (1)..(71): unsure at all Xaa locations
  Clone ID: MRT4577_29522C.1.pep
KGSGHKFLGKTVLQLPKISPKVTSRMVSAFSRXRRFHKTNQALDKAQLDMIVSANGLSKNVLEIASKSLRI

SEQ ID NO: 292146 - protein, 55 aa, Zea mays
  Clone ID: MRT4577_29523C.1.pep
SPPSTSTRSRDRRPPTLTVRLNVRKKTILRRLQLAGQAKLFFYPESIFTYVCLFK

SEQ ID NO: 292147 - protein, 187 aa, Zea mays
  unsure (1)..(187): unsure at all Xaa locations
  Clone ID: MRT4577_29524C.1.pep
SQVFIINPPGQIGNGFAPVVGFPPSPIAVKFVGLLSKIARRFGKELXKKPQFFKNGYFGMVKIFSPQPLVGETFSQDPPLGRFSVRDIKQTVSFGVLKSVEKKDPPGAKVAKASSKKKIFPPLFIQGLLFPNGGGMFPFPINFVFWGCCFPCELLSFTIGGPFFCLWSLLFFPLLPNKNVFFHFCLA

SEQ ID NO: 292148 - protein, 88 aa, Zea mays
  unsure (1)..(88): unsure at all Xaa locations
  Clone ID: MRT4577_29525C.1.pep
PGKPTHARPTXXVVKPHXXPSHSLSSXRKAAPSXXAPPLLXNNXXLPSXRHLLXXGNXXTQXXDGRGXXTLKEDXQXXYVRXVRCDVX

SEQ ID NO: 292149 - protein, 95 aa, Zea mays
  Clone ID: MRT4577_29526C.1.pep
FHLVTPRLVSSKFYSNSKMAVTKVIHAWYNVHYLNFAGSEDRALRGILVVLVGCVRAPSSEWAGAPTVCWCPGERHPLTPRSLVLVSHSYSRPAS

SEQ ID NO: 292150 - protein, 36 aa, Zea mays
  Clone ID: MRT4577_29527C.1.pep
CFVVNIVDFKFNECWCNGSLCWGVYLMVVKLRRRIS

SEQ ID NO: 292151 - protein, 97 aa, Zea mays
  unsure (1)..(97): unsure at all Xaa locations
  Clone ID: MRT4577_29528C.1.pep
MDGVRCMESPAAGDXPHSLXRTLGPTLLVSMGYLDFGKWLVAVEAGSRFGYDLVLLVLLFNLSAILCQYLSSCIGIVTKKNLAEVKIYSVLSCHCKL

SEQ ID NO: 292152 - protein, 136 aa, Zea mays
  unsure (1)..(136): unsure at all Xaa locations
  Clone ID: MRT4577_29529C.1.pep
TGPDKHSTSDSRSKPTXREARGKPARPGTTRTQTQTTGGRTPRRRXRARRNPXKETRKXTRTQSEERHTGRSTKRXPEGERRTPPPTQARSXSRARKRDKSRGRARAAXQRRKRXPRRSRRTXTRSNGRRARTRPP

SEQ ID NO: 292153 - protein, 123 aa, Zea mays
  unsure (1)..(123): unsure at all Xaa locations
  Clone ID: MRT4577_2952C.1.pep
PPHRKSRVCALPPIGLKMSPPLVGNSTPLQKMFPRVNEQFPAMFRRKAFFPWFPGQGMDKMEFPQAKSNMNALVAEFHQFQGPPPQDXEFQEGEEKKEKPLVFFPRAWAKNNIPCIPVSTPPF

SEQ ID NO: 292154 - protein, 115 aa, Zea mays
  unsure (1)..(115): unsure at all Xaa locations
  Clone ID: MRT4577_29530C.1.pep
MAIPETIWCENNYSSVRRIFDDVTVRYYMDDDHNIHMHDXTPASVGSLHTEHDEVIYLPERGKKIQIXDTSSSDRFQTPIIMTCVNQETGLREPSLCPMLEKWQRXHTMPDILNS

SEQ ID NO: 292155 - protein, 137 aa, Zea mays
  unsure (1)..(137): unsure at all Xaa locations
  Clone ID: MRT4577_29531C.1.pep
GQGRGPAIARLSPRQSSQSPTLPPIPPRPSRPSRPLGQKPLAKSPPXPIHPHPPPPTPPPPPGGPPPPPPRTPPPPPPPHPPPPPHTHPPPPPPPPHPPAPPLSTPPPPPFLAPPPPTPLPPHPHSPYPPPPPPPPP

SEQ ID NO: 292156 - protein, 116 aa, Zea mays
  unsure (1)..(116): unsure at all Xaa locations
  Clone ID: MRT4577_29532C.1.pep
LCWSNAAQTLSVLITKGMWAQPHTLIIISYEMNDXQPRFRTLYQIAXLAIKTAGVDLSXAGMEPIQTAERSNNVGXLTLSKRQHALYLHWAAHCLRATNXGCQDTTQFHTHXCYSN

SEQ ID NO: 292157 - protein, 91 aa, Zea mays
  unsure (1)..(91): unsure at all Xaa locations
  Clone ID: MRT4577_29533C.1.pep
MVLADDLLNPTAQSEARKHKLTTLVPASRSLLTDVKCPRCFTITTVXFSHAQTRIICAGCSTVLCQPTGGKARLTEGCSFRRKSMVSERPT

SEQ ID NO: 292158 - protein, 59 aa, Zea mays
  Clone ID: MRT4577_29534C.1.pep
LMCNNGRTHTSHMRAFQRPVACDARLRYRMRWRLKHGRSQPESTHTTPETDQRRACHTK

SEQ ID NO: 292159 - protein, 105 aa, Zea mays
  unsure (1)..(105): unsure at all Xaa locations
  Clone ID: MRT4577_29535C.1.pep
FPARPTRTLTRPVLLRLLDLLERHAXGVVTLYTWDNRMIWSCLLADVPMVXRCVRYYTGWADXIHCLIAPVDGAHHVLVLHXPVGIVLQIIPWILHLLMFDSKVI

SEQ ID NO: 292160 - protein, 63 aa, Zea mays
  Clone ID: MRT4577_29536C.1.pep
SHHTWTNCMSYQTCVSLRNEEPNFLKSSNYVLGILDGSLNRFTNFKVHSIESRKNITIHILES

SEQ ID NO: 292161 - protein, 82 aa, Zea mays
  Clone ID: MRT4577_29537C.1.pep
KLYLIHSSFYNYWPLYAPIDCHTGLINVHKPSALSAEHLEGHYISQVTPGHLREHTRSCHWVRQARPQHVHDLMSQTRSAPR

SEQ ID NO: 292162 - protein, 71 aa, Zea mays
  unsure (1)..(71): unsure at all Xaa locations
  Clone ID: MRT4577_29538C.1.pep
AVPFILFGARLGDLGRPNYNSXKTREGGGWGWGRERGGLSPKGPGERVFLSGGTWGPPEQRKNTPVFNWGG

SEQ ID NO: 292163 - protein, 238 aa, Zea mays
  Clone ID: MRT4577_29539C.1.pep
MAAALRSPASAKVSSPAAASKVRQASRVAVGGFRQHPRSRGGPVAVRASLFSPKPAAAKDARPTKVQELYVYEMNERDRESPAYLRLSAKQTENALGDLVPFTNKVYNGSLDKRLGITAGICVLIQHVPDRNGDRYEAIYSFYFGDYGHISVQGAYLTYEESYLAVTGGSGVFEGAYGQVKLHQIVFPFKIFYTFYLRGIPDLPRDLLCTPVPPSPTVEPTPAARAAEPHACVNNYTN

SEQ ID NO: 292164 - protein, 193 aa, Zea mays
  unsure (1)..(193): unsure at all Xaa locations
  Clone ID: MRT4577_2953C.1.pep
MMLRLLRLLSSLLLVAVASGYGPPSSRPSSRVVNGEDAVPYSWPWQVSLQYEKSGSFYHTCGGSPVAPVWGGTAGHCISSXWIYQVVLGEDVKEGPEQVIPINSEELFVHPLWNRSCVACGNDIALIKLSRSAQLGDAVQLASLPPAGDILPNKTPCYITGWGRLYTNGPLPDKLQQARLPVVDYKHGARWNW

SEQ ID NO: 292165 - protein, 206 aa, Zea mays
  Clone ID: MRT4577_29540C.1.pep
MTGVSTGLLTGLRRVMEQQRISTAFCRQSRVSSSTVSFSDLDEKGDMEYDDNSPNSKRELRPQGVDPNKGWEFRGVHRAIICGKVGQVPVQKILRNGHTVTVFTVGTGGMFDQRVIGPKDLPKPAQWHRIAVHNDYLSAYAVQKLVKNSAVYVEGDIETRVYNDSVNDQVKNIPEICVRRDGKIQLVKSGDSAANISLDELREGLF

SEQ ID NO: 292166 - protein, 74 aa, Zea mays
  unsure (1)..(74): unsure at all Xaa locations
  Clone ID: MRT4577_29541C.1.pep
KNVKTTPMRRQSKSPMSSFDNHXRLISSGFNLVMLIDELATHTCIIFSCADVPVFLSHVAMIHDTEKQGGTECI

SEQ ID NO: 292167 - protein, 248 aa, Zea mays
  unsure (1)..(248): unsure at all Xaa locations
  Clone ID: MRT4577_29542C.1.pep
MARVSANAVALVALVSVLLTYGCCAQSPLNYTGSLAKASKASWSWLPAKATWYGAPTGAGPDDNGGACGYKHTNQYPFMSMTSCGNEPLFKDGMGCGACYQIRCVNNKACSGKPETVMITDMNYYPVAKYHFDLSGTAFGAMAKPGQNDKLRHAGIIDIQFQRVPCNHPGLNVNFHVERGSNPNYLAVLVEFANREGTVVQMDIMESRNGRPTGYWTAMRHSWGAIWRMDSSRRLQXPFSLRIRSESG

SEQ ID NO: 292168 - protein, 52 aa, Zea mays
  Clone ID: MRT4577_29543C.1.pep
GPLPFPLRIRYLFIAGKLNRGCWDFHAPAKLLALFGVFWILENNPKPFYLFT

SEQ ID NO: 292169 - protein, 94 aa, Zea mays
  unsure (1)..(94): unsure at all Xaa locations
  Clone ID: MRT4577_29544C.1.pep
GAPRRAKKQGEPKTPTGNDSTPEGEPPDTTDNDKATTQDKEGNPPNQXRGGGGGKXXEDGRTXADHNTQKESTHHQGHRRRGGXQSHEKTPTGK

SEQ ID NO: 292170 - protein, 87 aa, Zea mays
  Clone ID: MRT4577_29545C.1.pep
LPNRTGIYAQDTPSPHRLRSRTPRDWVLYPYTSPNIVSIFVQVDHVTVNDSGVVPAVQLDVVPLVIPTGLEPFFIAEDIDTNLYIAH

SEQ ID NO: 292171 - protein, 55 aa, Zea mays
  Clone ID: MRT4577_29546C.1.pep
MAPKILVILVFLAVASPAALDAFDVIEMLDDKPTYSTFLKLLQDTKGTSEANQLR

SEQ ID NO: 292172 - protein, 98 aa, Zea mays
  Clone ID: MRT4577_29547C.1.pep
LRPPLQQILTKAIKSYMRTGTTSRIHKSTTGSQEMYDNIGGTNETNSRLTMLNYLNKAQTRDGSKTFTCARTSISSSAINHYALDLLTQNKEWPGHKT

SEQ ID NO: 292173 - protein, 89 aa, Zea mays
  Clone ID: MRT4577_29548C.1.pep
HIRHLAYKSHNHSSPSNVASLPLPLPLPLPSGAALAFDVCASLESLLLMAIVFPEEETLLFSLAVGPPWQCLAIWPSSRRIISSRTREH

SEQ ID NO: 292174 - protein, 492 aa, Zea mays
  Clone ID: MRT4577_29549C.1.pep
MSDHRAKRPSDGAATVASPAAKRARDPPAPALPTNKEAPDMAPKTRIFCDILASRADDEELNAELDKADIRVSIADVEQVLRFSYAHPRAAAAFFRWAGYRYLGHEHSPYSWNLLVDILGKNRLFEPMWDTVKSMQSQQLLSLATFASIFSSLAATPGGSPLKAFMDMPRYGMTRDTPALNSLLSALCRANRLDDARAAIPVARAEAGTRPDADSYAILLEGSEAAADLRVAREVFDEMVQAIGFYPDNVPAYDSFLTTLVSSDSSTALPEAMEYLNVLSRHGCSPGEKFFRAALAAHLDARQLRGAMNLWDDFVGRRGLVPDMEMYNTMIKLQGSLGHAELIVGYLDDMISNGVFPDTNTYNVVLQLLLKGKKHREAAAIFSEMVKNECWPNEGNCSLALRMFLDTHYWETGIKVWCCMVENGLPPLQECGNMLVAKLKDDRLPEACKYAEDMIDRGIKLSSATLSKLKQRLQRIKKGEIHDHLLAKWKAH

SEQ ID NO: 292175 - protein, 102 aa, Zea mays
  unsure (1)..(102): unsure at all Xaa locations
  Clone ID: MRT4577_2954C.1.pep
EEAKPXEXEAXXPAPGSNPTGNXAXXXAEPXXXXAPAPETEXXAEXXXXXAPAXETKPXAKXXXXXAPAXENKPXAEXXAAXXPXXDTKXXXEXXXXPAXDT

SEQ ID NO: 292176 - protein, 117 aa, Zea mays
  Clone ID: MRT4577_29550C.1.pep
QLHVLLALLAVSWQPEVDRSVGAQVGHRQLPTPTPQHPIHTQQTLRHAALYQEARGLGARHPYLFEKVKRSIYETREGCRLKQRLNSQGHVGNTSRHSAATTVHTLTQGSAAGPSES

SEQ ID NO: 292177 - protein, 71 aa, Zea mays
  Clone ID: MRT4577_29551C.1.pep
QKQLKLLNLSFSKSSSGTSCYHTTSQQGEHDGTTAHVKMIRSALVHPNLQRHLSAAEPAEASATMQGSISS

SEQ ID NO: 292178 - protein, 60 aa, Zea mays
  Clone ID: MRT4577_29552C.1.pep
KMSGNFSNDMSFRLSPKPVLFPFKTKQIFFYSLKRVGPMGAGHHLCGEHPRWKLIRTTMS

SEQ ID NO: 292179 - protein, 175 aa, Zea mays
  Clone ID: MRT4577_29553C.1.pep
MSLIRRTNVLDPFSLDLWDPFDGFPFGSGGSGSLVPRTSSDTAAFASARIDWKETPEAHVFKADVPGLKKEEVKVEVEDGNILQISGERSKEQEEKTDTWHRVERSSGKFLRRFRLPENAKAEQVKASMENGVLTVTVPKEEAKKPEVKSIQISGAMRWTAVCRAVVWSFARSSR

SEQ ID NO: 292180 - protein, 57 aa, Zea mays
  unsure (1)..(57): unsure at all Xaa locations
  Clone ID: MRT4577_29554C.1.pep
FXLGAFLIFSAETKDVPQQVKFDVTQTVDQNKMIYFSVSXXKMKRXDKTPFKTQIVV

SEQ ID NO: 292181 - protein, 27 aa, Zea mays
  Clone ID: MRT4577_29555C.1.pep
IFDDFSHYEKRQEEEESVKKERQGRGK

SEQ ID NO: 292182 - protein, 83 aa, Zea mays
  Clone ID: MRT4577_29556C.1.pep
AAAALSPNQSNIETNKRSPQMEQKWRKKNIFTDEVHIHLLHLPAERERQEWSWQEGGLATGGYNSRQWAKRPGPSPHRLSRGP

SEQ ID NO: 292183 - protein, 251 aa, Zea mays
  Clone ID: MRT4577_29557C.1.pep
MKFNIANPTTGCQKKLEIDDDQKLRVFFDKRISQEVSGDALGEEFKGYVFKIMGGCDKQGFPMKQGVLTPGRVRLLLHRGTPCFRGYGRRNGERRRKSVRGCIVSQDLSVINLVIVKKGENDLPGLTDTEKPRMRGPKRASKIRKLFNLSKDDDVRKYVNTYRRTFTTKSGKKVSKAPKIQRLVTPQVLQRKRARIAEKKKRIAKKQAEAAEYQKLLAQRLKEQRERRSESLAKRRSKLSAAAKASAATSA

SEQ ID NO: 292184 - protein, 159 aa, Zea mays
  Clone ID: MRT4577_29558C.1.pep
RFIFLIVCKRFSQEIPKINCLNPINSSVSRSSRRRFALFSALTDSPAIFFSECHLPAAMVELLFPCHGRAPPCTSPPWWLPTSTSPSFSLAEGTLELVAPHARACSLSVPISQAAATCPYVSPRSCSLGVIVKISLLCLAPSTLVGRSIKFLNQPACFE

SEQ ID NO: 292185 - protein, 100 aa, Zea mays
  Clone ID: MRT4577_29559C.1.pep
SHHLFHTINDLTTRSFNILSLLALLALFVSSTNAFIIPQCSLAPNSIIPQFLPPITLMILKHLTVQANIHHQSLAYSILQQLYYQLQQLFFINLTIQSIT

SEQ ID NO: 292186 - protein, 111 aa, Zea mays
  Clone ID: MRT4577_2955C.1.pep
RNERGEVFRKMNRSMGGDRAHCWNQPVGHAGPSPDSPSTISNFSSLPVLPPRPSATSVISPPPPSFVSGCVPDVLACGGRAGRRSWRWGVAAAAGHGEEEADPGAAGSVGP

SEQ ID NO: 292187 - protein, 87 aa, Zea mays
  Clone ID: MRT4577_29560C.1.pep
LTIYSVLVVIQIRLLQLDMQCASDAMSRRPLPAHPHGRKRCHRGLWARRSPGGRGSGARRRRAGIPCVAHASSTSYVAPLSKCTVLS

SEQ ID NO: 292188 - protein, 55 aa, Zea mays
  Clone ID: MRT4577_29561C.1.pep
VKIENEDKVLIPNHFLILCTSLVYQFGQLTRHQLNAATVTGPTNHGVTNMELSLN

SEQ ID NO: 292189 - protein, 45 aa, Zea mays
  unsure (1)..(45): unsure at all Xaa locations
  Clone ID: MRT4577_29562C.1.pep
GXGXXLEPKVVKGTDFNFKCQYLSRSTRGGGREHPNLYRAQTKVF

SEQ ID NO: 292190 - protein, 69 aa, Zea mays
  Clone ID: MRT4577_29563C.1.pep
CGYDWSYDFFYFFQYQQSELSVEFSLVAYLPFPGSLNRFQFQRIGFVVRLCKFVLQELFISLLSIFFNC

SEQ ID NO: 292191 - protein, 172 aa, Zea mays
  Clone ID: MRT4577_29564C.1.pep
MLRGTGHGGGDARRRALRSSRRHLPGWIWWLLGIFLLVGLMLFVLHHNQKEQFRPPVVDNGSAIQEVPREKVNFSEELLSSTSFARQLVDQMTLAKAYVILAKEHDNLQLAWELSSQIRNCQRLLSEGAVNGRAITKDEAHPIISRLALVIYKAQDSHYDISTTIHCIPGLV

SEQ ID NO: 292192 - protein, 202 aa, Zea mays
  unsure (1)..(202): unsure at all Xaa locations
  Clone ID: MRT4577_29565C.1.pep
PTSNIRSTRWYHTVADKIHSLLMXIHGLLERTDAATLLPHCXSQAAIGSLFLQILRPKYSXVCENAIHETYRIQRAMXADILPYISPVYTXNQYITSYSQPLTLXLHAIAHYNMREQQLQQLALANLAAYYQQQHVLAFNQLGXLKPGSYWQQHQLPFNQVPAAYTDQYAALNQLTTXHSSAYXQWQQLLPFSQLATMSPAT

SEQ ID NO: 292193 - protein, 82 aa, Zea mays
  unsure (1)..(82): unsure at all Xaa locations
  Clone ID: MRT4577_29566C.1.pep
TVVVRWRGNVCAPDPQAPQQGAPAPPPLSAVDLPPPPTQPGSRPPAASPRTSPLRRRQVXCXWRPHPGPPRLXXGLRRGGFG

SEQ ID NO: 292194 - protein, 146 aa, Zea mays
  Clone ID: MRT4577_29567C.1.pep
VQFPFTCSLPQNLPDLTTLPLVCASRRDRRSLLPTLFLPRKGALGLAGHPSRARHLPLRGRRRQRTLARAPRLWQRSSPPRRRIARRRPAASCTSVFVVDGGNTSHPPVTRGRSSGTLPFSPPHNMPTPSHRHCPNHPKGGHGDCA

SEQ ID NO: 292195 - protein, 49 aa, Zea mays
  Clone ID: MRT4577_29568C.1.pep
MAQTPAFNKPKVELHVHLDGAIKPETILYYGKKRGIDLPADTVEGLRNI

SEQ ID NO: 292196 - protein, 110 aa, Zea mays
  unsure (1)..(110): unsure at all Xaa locations
  Clone ID: MRT4577_29569C.1.pep
FNDQLHIFYPRHPTKTFCNYTMVIIHNPDNGTSRINLPSCSNNIAPXSSLPLFNHLFYXSRTNNPILNASNSHHKYRLKRNISPKVLYTFINPLXYPHCXCNHQHIFHTF

SEQ ID NO: 292197 - protein, 97 aa, Zea mays
  Clone ID: MRT4577_2956C.1.pep
PGGAGPLLLPGLKAPPPRFGFSPRKTFFPPFKGHPQKFLRFVSPPGPPKTFLGFKMGPFVYGLFPLSNFGTPLTLALKKFWPLETIRGFKRGGPPKG

SEQ ID NO: 292198 - protein, 153 aa, Zea mays
  Clone ID: MRT4577_29570C.1.pep
GSVHAPAVPSVLHLVRRLGAKLVVSVDRSCDRGELPFAAHFQSCVFLLESLDAVGTGPDITAKIERFLIQPRIERCLAERYRAAAAGDKTPPWRAMLVSAGFVPVQASSLAEAQAEALLKKVPVRGFRVEKRAGSLVLHWQRGELLSVSAWRC

SEQ ID NO: 292199 - protein, 136 aa, Zea mays
  Clone ID: MRT4577_29571C.1.pep
FPNEVDSFHNQLLKVQTDQAYAIFSDMGAAALVHNDSVQLRPIPWPSFRLCSEGHIKVLKMLLADQGAEQFFVMIWDLGGIDAMYQLGGKPKLKKGGMLGNVTSLSVLEELQLPENHEMQRRSLSPQFSLGWCRVG

SEQ ID NO: 292200 - protein, 68 aa, Zea mays
  unsure (1)..(68): unsure at all Xaa locations
  Clone ID: MRT4577_29572C.1.pep
MQIFXVKTLTGKTITLEVEAYEIIDNVKAKIQDKEGINPEQNRLIFTXEKNEEGSTLGEYNTQKDPPL

SEQ ID NO: 292201 - protein, 161 aa, Zea mays
  unsure (1)..(161): unsure at all Xaa locations
  Clone ID: MRT4577_29573C.1.pep
SLXEAVAPYASLRCRLPPDLPLPCLCSSIRLYYPPRRPCVGSHASPPWWRRQDRLLHDHVSPVFASSGVAPPPLCGRGRHMMEDTEEAVLVAGEHDRARGNREAVLLCLTRQIQERRVAEVRHQHRDSPLLHLHGAIRLPSLMLSQQGHNLQQTGASISVE

SEQ ID NO: 292202 - protein, 143 aa, Zea mays
  unsure (1)..(143): unsure at all Xaa locations
  Clone ID: MRT4577_29574C.1.pep
MDAASASSSWQDLPPRLQSYDNRAPLLLPVKIMDAAADDKPEISDDTAHQISVDPWYQVGFVLTTGVNSAYVLGYSGSIMVPLGWIGGTCGLLLAAAISMYANALLARLHEVGGKRHIRYRDLAGHIYGPEXYGLTWALQYIN

SEQ ID NO: 292203 - protein, 557 aa, Zea mays
  unsure (1)..(557): unsure at all Xaa locations
  Clone ID: MRT4577_29575C.1.pep
MKNDASYFWCWGKPPHHRAVLRRPRPPPPPSCPFYRPPPLRRLGKTCPRACNPTTTGRRSSCPSRSWTPPPTTSRKSPTIRPTRLALVRSSFLLICALLAYSFFPSSAKHKFSDPWYQVGFVLTTGVNSAYVLGYSGSIMVPLGWIGGTCGLLLAAAISMYANALLARLHEVGGKRHIRYRDLAGHIYGQSVXALHLHSLPILYRIVSLVSSSFYLISFYFRTEXYGLTWALQYINLFMINTGFIILAGQALKATYGLFSDDGVLKLPYCIAISGFVCALFAIGIPYLSALRIWLGFSTLFSLMYIVIAVVLSSRDGITAPARDYSIPKSSQSTRVFTTIGSIADLVFAYNTGMLPEIQATIRPPVVKNMEKALWFQFTIGSLPLYAVVFVGYWAYGSSTSGYLLNSVTGPVWVKAVANLSAFFQTVIALHIFASPMYEFLDTKYGSGRGGPFEIHNVAFRVAVRGGYLTVNTLVAAVLPFLGDFMSLTGALSTFPLTFVLANHMYLMVKGPKLGAIQKSWHWLNVLGFTALAVAAAVSAIRLIMRDSSTYHFFADL

SEQ ID NO: 292204 - protein, 482 aa, Zea mays
  unsure (1)..(482): unsure at all Xaa locations
  Clone ID: MRT4577_29576C.1.pep
YAHSWLIPSFHLLLHKHKFSDPWYQVGFVLTTGVNSAYVLGYSGSIMVPLGWIGGTCGLLLAAAISMYANALLARLHEVGGKRHIRYRDLAGHIYGPKIYGLTWALQYINLFMINTGFIILAGQALKATYGLFSDDGVLKLPYCIAISGFVCALFAIGIPYLSALRIWLGFSTLFSLMYIVIAVVLSSRDGITAPARDYSIPQSSQSTRVFTTIGSIADLVFAYNTGMLPEIQXHFLFLDNIFYCWPSICDILLQATIRPPVVKNMEKALWFQFTIGSLPLYAVVFVGYWAYGSSTSGYLLNSVTGPVWVKAVANLSAFFQTVIALHVRQDRRHHLCLLLLSNMKKNSYIIHPNSQIFASPMYEFLDTKYGSGRGGPFEIHNVAFRVAVRGGYLTVNTLVAAVLPFLGDFMSLTGALSTFPLTFVLANHMYLMVKGPKLGAIQKSWHWLNVLGFTALAVAAAVSAIRLIMRDSSTYHFFADL

SEQ ID NO: 292205 - protein, 87 aa, Zea mays
  unsure (1)..(87): unsure at all Xaa locations
  Clone ID: MRT4577_29577C.1.pep
LXLGFLXTXXVTSSRXILLARTWTYSLYYQVAACIHFAVTAPGLSLVLIYLFVDNSSVPVHEIALKCLNHNAIMCLQNSIALFKITL

SEQ ID NO: 292206 - protein, 432 aa, Zea mays
  Clone ID: MRT4577_29578C.1.pep
MDAAADDKPEISDDTAHQISVDPWYQVGFVLTTGVNSAYVLGYSGSIMVPLGWIGGTCGLLLAAAISMYANALLARLHEVGGKRHIRYRDLAGHIYGPKIYGLTWALQYINLFMINTGFIILAGQALKATYGLFSDDGVLKLPYCIAISGFVCALFAIGIPYLSALRIWLGFSTLFSLMYIVIAVVLSSRDGITAPARDYSIPKSSQSTRVFTTIGSIADLVFAYNTGMLPEIQATIRPPVVKNMEKALWFQFTIGSLPLYAVVFVGYWAYGSSTSGYLLNSVTGPVWVKAVANLSAFFQTVIALHIFASPMYEFLDTKYGSGRGGPFEIHNVAFRVAVRGGYLTVNTLVAAVLPFLGDFMSLTGALSTFPLTFVLANHMYLMVKGPKLGAIQKSWHWLNVLGFTALAVAAAVSAIRLIMRDSSTYHFFADL

SEQ ID NO: 292207 - protein, 798 aa, Zea mays
  Clone ID: MRT4577_29579C.1.pep
MEGEDPLALILSTTKFSSTKYERHSAGSEYASPLWWFDGGCFRRRARRRPRSTSEDDGDASQVVVADLRPIGCTRPPLRGIGENGRDQRLFHSIAEVGGNLPKVPFPGFDGDNPKLWQLRCHDYFTMYSVDPRVWIKIATMHFTGAAARWLQSVEYQLARVSWIEFGHMEEVADKKRDYRKFDVSYSSKNLSKSPLPLPLPPKAPQMSKPDDSTTVGAIKVVSTDDKLASLMAYRKAKGLCYKCGLSYTRGHRCVDNVQLHVVEELWQMIHGQSTENDDSSEELNAMSLSQATAEGFSAPKTMQFVGHIQGLDLLILLDSGSSHSFLSTQVVAHELLGAVWSLSGYEFKSNLPVLPLQTYDLIIGIIKCRQSEFSSLVILVKKKDNTYRFCVDYRHLNALTVKTRFLVPIIDELLDELHGAAWFSTLDLRAGFHQIRMAPQDQHKTTFQTHHSQFEFCVMPFKLIGARATFQGAMNKTLASLLRTCVLVFFDDILVYSPTWALHLQHMEMVLQLLTRDCWQVKLSKCSFGRQQIAYLGHIISQAGVSTDPSKVETVVSWPVPQTSKELRGFLGLAGYYWKFVRNFGVIAKPLTELLKKNTVFVWTSIHDTTFQALKQALPSAPVLAFPNFNKPFLVETDASGKGIGAVLQQDNHPLAFVSKALGATNLGLSTYEEYLAILLADVVDGYQADEEALKLLAALAISEHPPFSLHNGVIKYGNRVWLGTNVPLQTKACPSKWSSWLSVEEYWYNSCFHTSLGRSPFEILYGRNPRHFGLTVDDSVSHADLSSWLSKRDLML

SEQ ID NO: 292208 - protein, 86 aa, Zea mays
  Clone ID: MRT4577_2957C.1.pep
SGWYNRSLVLILSSRAINSVFVMGSSGEIDLSVGITMNNVDTIRTVRHVSNSKGFSFYFVVKALLVLYGRARVSYTRCSRIESYRA

SEQ ID NO: 292209 - protein, 88 aa, Zea mays
  Clone ID: MRT4577_29580C.1.pep
AQDVLCRYIHPLISCMSASINLGTANQKVAYMGVAGQSVNDALVSPQKIINVLPVMHNGHWPNASRCRYAPHRLTDGGACHSCKKLFS

SEQ ID NO: 292210 - protein, 65 aa, Zea mays
  Clone ID: MRT4577_29581C.1.pep
WYASIVLKASPLFNCWCPDLLSLLFIHSSQCNVIVIHNRFMTHLSCHYYCRTSKKKLSLCIRGIH

SEQ ID NO: 292211 - protein, 189 aa, Zea mays
  Clone ID: MRT4577_29582C.1.pep
SIVVDLACSGSLSKLRQIIIGVMAYRMVCAPQVIDLESGRGHPHVHSESLIHNGNDLSDQGGQYTVRVVGNAMNAGLSDTQGYYNMSMNHPHQPVHSSLPNLGVDSGFVFPPNMYNPCMSTSMNRYVSHAQSFGLPLNQVVSGSMDGSTRNENVSETARGFIKRKNAAVAGSCHFVNGSASSSSSSHTS

SEQ ID NO: 292212 - protein, 72 aa, Zea mays
  Clone ID: MRT4577_29583C.1.pep
DEFPRSRSSLGLADPIDVMPPHQHGHGALTLPQLDRGGLRTLELRTQMRSLLHNDQGAGQCHVLAAVKRNRR

SEQ ID NO: 292213 - protein, 80 aa, Zea mays
  Clone ID: MRT4577_29584C.1.pep
LCASGSGILEEKIGYHYLVSTTRKPVRVLCLLQWFALAAAATTTRRIPSLYLPSEDAMRRSAARGAEEEEPLRGVPCTWL

SEQ ID NO: 292214 - protein, 97 aa, Zea mays
  unsure (1)..(97): unsure at all Xaa locations
  Clone ID: MRT4577_29585C.1.pep
SFLIGXKDTXNLHPLHTPHHTHTCVQYTHSKGIERPSHLVCGKHAEPLTAHTCVNHTGKNPSEAWGVDPRDRTHAPSHTWRTNELGCGPVLAFNQFW

SEQ ID NO: 292215 - protein, 45 aa, Zea mays
  Clone ID: MRT4577_29586C.1.pep
RPVGDQAFARQKLPKMAYDYYASGAEDEWTLQENMEAFSRILSSG

SEQ ID NO: 292216 - protein, 56 aa, Zea mays
  Clone ID: MRT4577_29587C.1.pep
STFCIQASMVYPTPGVWWLLGLGFCSWMLQSYSILVQVCRVPINYKYVSKSMLINK

SEQ ID NO: 292217 - protein, 106 aa, Zea mays
  Clone ID: MRT4577_29588C.1.pep
SWRAPTINMVWHCASYNMPTKRAEVPAPTMGRICHELMAHGFVMNRSRGTAAAPAPTHCSLARGEKRVYMSFSILFILFEIGFPQRLMFNATKHQQLSVKDQISEI

SEQ ID NO: 292218 - protein, 53 aa, Zea mays
  Clone ID: MRT4577_29589C.1.pep
LFIIFHPTIQNCSMKAMVHHHILYYQPRICLFRLIMALSQILVVSNDRLRHLL

SEQ ID NO: 292219 - protein, 1656 aa, Zea mays
  unsure (1)..(1656): unsure at all Xaa locations
  Clone ID: MRT4577_2958C.1.pep
MDPKGKGMVINDKEKESFVNEPNDDKPTDSGSGRKRKDGRKKKARRIKEIVYYDSDESSSSQKDDDDYDRRKTVNSNFSFDYSRIPHSSNAQLLPIRLGKPPHFDGEDYGFWSHKMRTHLFSLHPSIWEIVESGMKFDSSDSPMFINEQIHKNAQATTVLLASLCRDEYHKVSGLDNAKQIWDTLKISHEGNDVTLLTKMELVEGELGRFAMIRGEEPTQTYNRLKTLINKIRSYGSTRWTDHDVVRLMLRSFTVLDPHLVNNIRENXVHQDVARRSTWEIRXGRMMIKEARYVDDALNGSINEPQPLALKATRSKEALPSKVAQVEAAGLNNEEMALIIKRFKTALKGRKGQPSKTKAKGKRSCFKCGKIGHFIANCPDNDSDQEHGSKREKKKHYKKAKGEAHIGKEWDSDCSSSDSDNEGLAATAFNKSSLFPNECHTCLMAREKKVSNQNNVTYDSSSDDESSDEEIDYSSLFKGMDRTKVDKINELIDALNEKDRLLEKQEDLLYEEHDKFVEAQKSYALEVKRNEVLSSELSSCHETIATLKGVNNDLNAKLEVASKSNSCVEHVMVCTRCKDFNVDACSEHLVSISKLNDEVASLNAQLKTSKSEFDKLKFARDAYTIGRHPSIKDGLGYKREAKNLTSHKAPISAKEKGKASMASSVQKNHAFMYYDRRQPRNAYRSCNAYNAFDSHAMFASSSSYVHDRNVGRRNVVHNMPRRNVVNVPRKVNEPSTIYHALNASFAICRKDRKVIARKLGAKCKGDKTCIWVPKTIVTNLVGPNKSWVYASGGSSWIIDSGCTNHMTGEKKMFTSYVKNKDSQDSIIFGDGNQGKVKGLDVSVFRRSDDSLAFKGVLDDKLYLVDFAKEEAGLDACLIAKTSMGWLWHRRLAHVGMKNLHKLLKGEHVIGLTNVQFEKIDLVQLVKQDKSETQGTLKRFLRRAQNEFELKVKKIRSDNGSEFKNLQVEEFLEEEGIKHEFSAPYTPQQNGVVERKNRTLIDMARTMLGEFKTPEVYLHRLLKKTSYELLTGNKPNVSYFRVFGSKCYILVKKGRNSKFAPKAVEGFLLGYDSNIKAYRVFNKSSGLVEVSSNVVFDETNGSPREQVVDCDDVDEEDVPTAAIRTMAIGVVRPQEQDERDQPSSSTTVHPPTQDDEQVHQKEACDQGGAQDDQVMEEEAQPAPPTQVRTEELNNFKRNEVWTLVPRPKQNVVGTKWVFRNKQDEHGVVTRNKARLVAKGYAQVAGLDFEETLYQMDVKSAFLNGPIKEEVYVEQPPGFEDERYPDHVCKLSKALYGLKQAPRAWYECLRDFLIVNAFKVGKADPTLFTKTCDGDLFVCQIYVDDIIFGSTNQKSCEEFSRVMTQKFEMSMMGELNYFLGFQVKQLKDGIFISQTKYTQDLLKRFGMKDAKPAKTPMGTDGHTDLNKGGKSVDQKVYRSMIGSLLYLCASRPDIMLSVCMCARFQSDPKECHLVAVKRILRYLVATPCFGLWYPKGSTFDLVGYSDSDYAGCKVDRKSTSGTCQFLGRSLVSWNSKKQTSVALSTAEAEYVAAGQCCAQLLWMRQTLRDFGYNLSKVPLLCDNESAIRMAENPVEHSRTKHIDIRHHFLRDHQQKGDIKVFHVSTENQLADIFTKPLDEKTFCRLRSELNILDSRNLD

SEQ ID NO: 292220 - protein, 75 aa, Zea mays
  Clone ID: MRT4577_29590C.1.pep
FGSSKWKKRHSAQSSCSNCTSCECNQLLRNRNMHLSGQWSNMFFGDSINNVSLNSRCLIVSDRRKSIFQKKKKPK

SEQ ID NO: 292221 - protein, 79 aa, Zea mays
  unsure (1)..(79): unsure at all Xaa locations
  Clone ID: MRT4577_29591C.1.pep
TFKKNPXLLADPNLSFFRDYLQSWGAKIPAAAPSFESPKKSSMDTGGGGGDDDDDSDMRDPTPERDELDEETVEPDLEL

SEQ ID NO: 292222 - protein, 81 aa, Zea mays
  Clone ID: MRT4577_29592C.1.pep
YPRVCPGHHTIAEQGAASLADRAMATWRGRCREALLLHLRSSYALLIATARRPLRGALLRVRCSGDASEEAAQDPRDHNGE

SEQ ID NO: 292223 - protein, 117 aa, Zea mays
  unsure (1)..(117): unsure at all Xaa locations
  Clone ID: MRT4577_29593C.1.pep
SYDFACARTRALGSALGRTHTNVFSLNASFAVHEHDLVMGTDVALGTSVDLGHPVTFATTLEQVYRTDIFANAGIFLCACHGMPEAVYTTYTXQGTDEDSAYNNTGQSMTGFISTTI

SEQ ID NO: 292224 - protein, 137 aa, Zea mays
  unsure (1)..(137): unsure at all Xaa locations
  Clone ID: MRT4577_29594C.1.pep
XXXXXXXXFFRFLFFFLFFFFFFYFSPQSAKFLVFKAQKNRNFSFESQNPPRGMPTPPFKHKKVFFTIFPNMIGPPQERGLLGLNRISLISFCKGANPLFSIPKLGSIKNKFFTPYKTWFQKIWGKGFPAPNFLPAP

SEQ ID NO: 292225 - protein, 125 aa, Zea mays
  unsure (1)..(125): unsure at all Xaa locations
  Clone ID: MRT4577_29595C.1.pep
FLCGGRAGGLAGLLVLPVVLFVALACLSPYSGRRRFLPFVLLSALCPAACLLLRLLPLGRRASVFCLAPVCSSFGRLGALCPAASLLRXLLLPFGPLAAVCRASFLSPRPVLPLVPLVAGVPGAL

SEQ ID NO: 292226 - protein, 48 aa, Zea mays
  Clone ID: MRT4577_29596C.1.pep
GDDALEQADTMMVTLPENQQNYVRYWLMETTVPMTLIGIWRYPRKTLG

SEQ ID NO: 292227 - protein, 94 aa, Zea mays
  Clone ID: MRT4577_29597C.1.pep
RSGFPGRSRVRPHIRAENAVLITMDIKSDRDAEHAKGNVNVDIDLYEGICTDILTLIIWKLYVTKLYSLKYSGNAVCTELMIVEIIMANPTRDP

SEQ ID NO: 292228 - protein, 227 aa, Zea mays
  Clone ID: MRT4577_29598C.1.pep
EIHHFTQDDLMTEDVFVIDCHSDIFVWVGQEVDAKVKSQAMDIGEKFIVHDFLMEKLSRETPIFIVSEGSEPQFFTRFFNWDSAKSHMHGSSYQRKLAILKGGLPPSLEKPKRRTPAFTGRGFGQDKSQRSRSMSTSPDRPRVRGRSPAFNMLTSAFENTSNTRNLSTPPIVVRKPFSKSGCPEHSRVSPKKSAISSLTRSFEGHMKSTIPNSVKVSPELKKATQEE

SEQ ID NO: 292229 - protein, 112 aa, Zea mays
  Clone ID: MRT4577_29599C.1.pep
MATSGLMVGESEPGCGLCPSLSLKDFHHQGWGGECAELSFGMGGGLLAAASALRSVLLLFDPPEQKSPSSPLLEQVTARRSSVFRCSAGLPPWSGVVRTCGGGTGVPFVMAL

SEQ ID NO: 292230 - protein, 57 aa, Zea mays
  Clone ID: MRT4577_2959C.1.pep
LWKDRNNIELQKYLRLDRRHKYKRDARVITSQREQYGGTIHLFIGTGHNPCKIIFVP

SEQ ID NO: 292231 - protein, 90 aa, Zea mays
  unsure (1)..(90): unsure at all Xaa locations
  Clone ID: MRT4577_295C.1.pep
RRGEYVSVEVNGPGHRGVQKKCYHMSAXRXWDVIMCSIGGGINKQVRGGLIRKGMHLRGEHVQTSRWIEELLSGHVKYDEVKVVALDRGE

SEQ ID NO: 292232 - protein, 76 aa, Zea mays
  Clone ID: MRT4577_29600C.1.pep
MGGGLLAAASTLRSALPLFGPPEQKSPSSPLLEQVTARRSSAFRCSAGLPPRSGVVRTCGGGTGVPFVMAHASVFA

SEQ ID NO: 292233 - protein, 131 aa, Zea mays
  unsure (1)..(131): unsure at all Xaa locations
  Clone ID: MRT4577_29601C.1.pep
QYARILNVAVLLTQKLRGPECAAMSESTALTSALSGSLDFDKYSIGPRVQYAKSESXCIAEEDGSYAPKEKSKKHEEKAVVKKRRTEEAQQAGLNAAAAQSNGTGYQASRMGKALQEPPALPNXIXLIQNL

SEQ ID NO: 292234 - protein, 68 aa, Zea mays
  Clone ID: MRT4577_29602C.1.pep
GPLPVLCGPPASAASCRPCARRGALGLQCWLGLALLASLLLCRSPWSPLGFVGPPVATATHLWCRRRG

SEQ ID NO: 292235 - protein, 100 aa, Zea mays
  Clone ID: MRT4577_29603C.1.pep
VSSINFFLPKKISIHVHVCVWSKRSHSHTSLFFSQLNVLPPNQNQRDANCKSETDRKNVSRFRSSDSDCCYNQKGMMWLVLESYPATQLLPFTLKILSSP

SEQ ID NO: 292236 - protein, 127 aa, Zea mays
  Clone ID: MRT4577_29604C.1.pep
PPNDSLVLDIRLKTRSQISTLATVPTPPAVIHARLCAWSGGGRVSSYSFAARRCTTSPCLQRYGIAVQAAQVRIRVIRRASWYLESQVPGQEQVPKDEALGGCFDVFVRGLGRRLPVNFGLLDPCFL

SEQ ID NO: 292237 - protein, 71 aa, Zea mays
  unsure (1)..(71): unsure at all Xaa locations
  Clone ID: MRT4577_29605C.1.pep
TILCLHITLSVILSSLISLSXRILQVSTATAESXHLRLXIRQVRFRCLCLCHESIKCVSSMSSSLXAIDSR

SEQ ID NO: 292238 - protein, 70 aa, Zea mays
  Clone ID: MRT4577_29606C.1.pep
QCARARTHARVHIHITGLVSVLFRRGDELSSQGKPGAYQSLAPDNDYRPQIIRGSYRDLTTSSKTPRVHP

SEQ ID NO: 292239 - protein, 99 aa, Zea mays
  Clone ID: MRT4577_29607C.1.pep
VMSIYGLFYLPPVRGRKQQTPTKFLGRRRPPTNQGKNKNGGGNPPRTGGERTGAHTHAPHEATQPKHRPKRLRLRLTNPAGPDGPNAPSPTKTSWRGIL

SEQ ID NO: 292240 - protein, 29 aa, Zea mays
  Clone ID: MRT4577_29608C.1.pep
FPGIRHCRSYSDVCISTLSNLTLCVFWCY

SEQ ID NO: 292241 - protein, 83 aa, Zea mays
  Clone ID: MRT4577_29609C.1.pep
GGMGRREGGNEEREEKEEREGGRKGDSSLVKRGGRQSLANEARAFETQPWFSSDPLRHLSLINFIYLFIDCGEVLSFADPTSR

SEQ ID NO: 292242 - protein, 84 aa, Zea mays
  Clone ID: MRT4577_2960C.1.pep
FVLSRQMAGGVVFLEKVLLGVCFFWEGGSCGRGGFSLMFVVGVLGCYLGEWALLLGGICGRLGVGFLLGGAVRLLLVVVVPRVV

SEQ ID NO: 292243 - protein, 32 aa, Zea mays
  Clone ID: MRT4577_29610C.1.pep
VIQLQGDQRKNVSNFLVQAGIVKKEPTKIHGF

SEQ ID NO: 292244 - protein, 38 aa, Zea mays
  unsure (1)..(38): unsure at all Xaa locations
  Clone ID: MRT4577_29611C.1.pep
PKLGQXVIKLQGDQRKNVSNFLVQAGFVKKEPIKIHGF

SEQ ID NO: 292245 - protein, 140 aa, Zea mays
  Clone ID: MRT4577_29612C.1.pep
MKHQQSTRLLLPQAAAAPADHPSPACCNRRSATEEIARGQSLVTQLRAIVLPALQADQRAELVAHMFQSVLDCSSKAMAELQLHHHHRRSPTPSARRPRDDDGDGLQVDDKKRVKRISSVLRCKEEEEEGVAGAAAAAKN

SEQ ID NO: 292246 - protein, 67 aa, Zea mays
  Clone ID: MRT4577_29613C.1.pep
LLSMLSLFAFLVQAFVSGKGPVDTLAFHLIYPVYSTACSYATNFVPGQSPIAYTFLSGCSVCIRLRI

SEQ ID NO: 292247 - protein, 54 aa, Zea mays
  Clone ID: MRT4577_29614C.1.pep
SQDCHQGPKLPCPTHQTPAPYFTGFKQNPEGEGTNQPKDGLCGILNTTTEPGTP

SEQ ID NO: 292248 - protein, 94 aa, Zea mays
  unsure (1)..(94): unsure at all Xaa locations
  Clone ID: MRT4577_29615C.1.pep
SETPRFGRLMCLLLEIGPAQLGTPAQVGLALSPGRRSRPHSRAPGHRCRCFRPPPSPPCSLIPPPCSAAQRRPPCSAAQRCXPSCTDRPAPPVP

SEQ ID NO: 292249 - protein, 101 aa, Zea mays
  Clone ID: MRT4577_29616C.1.pep
RLNKLVFLEDEAEDGLAKDIVVGGRRWAAHDVSGRHDKHGLARRPRPHEGHRHGCSFGAAERQRRHVQSEILSFRPSERSGRQQGNRRMALCLVRARTRGR

SEQ ID NO: 292250 - protein, 121 aa, Zea mays
  Clone ID: MRT4577_29617C.1.pep
HCSCRRMVNSRRLWSPKDEQAWVHDRFDEMDLHDFHGDNPKRKQGGVFRGRGGGQGGRTRGISRGNFRGSRTRTYYHDGSKNYSYVPKESHAYRDNTKNAHHSSHINGKNRVPKPSRDHYD

SEQ ID NO: 292251 - protein, 57 aa, Zea mays
  Clone ID: MRT4577_29618C.1.pep
GFQRSRRRWNEVAIVGWLGWLLVAFPASQGPGAPCPTCESIDRSPWKQPRPSRSLAS

SEQ ID NO: 292252 - protein, 81 aa, Zea mays
  Clone ID: MRT4577_29619C.1.pep
FVRWEATQGEVEWNEVSTPGSCCHADSVRYKALGKHNLVVVGHDGVVGHNKLKSGLRISVGAWDRGRREGKTYTRREDSRP

SEQ ID NO: 292253 - protein, 106 aa, Zea mays
  Clone ID: MRT4577_2961C.1.pep
MTPARRMPAMIGRNNGVAFGSSSALSLSQADFLDSHHLQQAFEQQLFEQIPAAAVDSSDNIIHGRSDALVDEFESKSCSENPDGTASGDDGQGDEDPYQRPNKKQW

SEQ ID NO: 292254 - protein, 117 aa, Zea mays
  unsure (1)..(117): unsure at all Xaa locations
  Clone ID: MRT4577_29620C.1.pep
VCCITPLSXXXXPXYLSPTLSXVCENPGGQLYRIQQAISCGILPLSPLFLQQSSALLQQLPLVHLLAQNIRAQQLQQLVLANLAAYSXQQQFLSFYQLPXLNSVLYLIQQSTNISFF

SEQ ID NO: 292255 - protein, 75 aa, Zea mays
  Clone ID: MRT4577_29621C.1.pep
PLLREHAIETANALALKKRVLVRIISGSAAAEPDTLAKMPQHAEKLYIGLTPTILERYLLSETDTAHPEGSTQHR

SEQ ID NO: 292256 - protein, 89 aa, Zea mays
  Clone ID: MRT4577_29622C.1.pep
YRIAIGGGARASAYGGKYTEQAPRCRSLYRGGVRAGVVIWPHPLNNKSTILIPQPSPPQSASSDENADPADGKGPGPGGEGPDPAWLRS

SEQ ID NO: 292257 - protein, 72 aa, Zea mays
  Clone ID: MRT4577_29623C.1.pep
MSHRKFENPTHGSLSFLPRKRTSRYLGKVKSFPRDDPKKPCHLTAFLGYKAGMTHIVREVEKPGSKLHKKET

SEQ ID NO: 292258 - protein, 36 aa, Zea mays
  Clone ID: MRT4577_29624C.1.pep
PFKALDIGYKTYTGENASPSEAHTTMAQWTAVHSAC

SEQ ID NO: 292259 - protein, 62 aa, Zea mays
  Clone ID: MRT4577_29625C.1.pep
FDLSNLPVGVSMQEGVDINLTLEQMTSLLQLCAVTCTWLRLSRLMLSKTSCLNLQTNRMLHI

SEQ ID NO: 292260 - protein, 50 aa, Zea mays
  Clone ID: MRT4577_29626C.1.pep
NLQRVLEILVRRSSFCNLETFSHVTQYPFHHLNQYRFGGALEIEGQMLGL

SEQ ID NO: 292261 - protein, 667 aa, Zea mays
  Clone ID: MRT4577_29627C.1.pep
MGQSLRVRDMSPKSPINHISDNNRSEYHLKQRYSYSTKECPGERNLDGPSKVRGLEKDRAEILRMLDELRDQVQQSCNATNGASGIAPSTAAADSNSSHGTSDRLSQLRQVAPQLHQNGSHHSPSLNVGSPSVSRVYAPLPAQQDCVRYAEPISHARASSYPASLYPWRNFDNYFFGQHDPDPLLSCRHDGFYHQAACSCLHCCHQEFLPIQGNHIGFHDQRAPYLLNNYGAYPVDSPLLGQQRYSARVTNTTLQQNHMRVNVSKKAAQTCEPVAGGAPFTICCNCYEVLQIPRKQSLSGNEYKLRCGSCSHAIIVKLDGNRLNVSEFALCTRLSDGQENDMGTDGQTQDNRSIPAYHLSVGSPASQERDLHSNLSESENNHTPLGTDSEGTSLSRDLPAEDSAVSHVPNLPHHSHSGSSPTEHFGVGSRSTHSEPEKVILLTESSKQTSVRGICVTNKMQSPNNEFDVPEYTDDTLNDQQDTDHPRTTKASDSFLTNLIKRSFKINNGLRNRRARVYVNGFPISDHVVRKAEKLAGSICPGNYWYDYHAGFWGVMGHPCLGMIPPYIPEFNFPMPKNCAGGNTSIFVNGRELHQKDLDLLVTRGLSDSPGRSYVVENSGKVSDEVSGEELYGLGKLAPTVEKMGRGFGMRIPRFIKRQANLVQLDF

SEQ ID NO: 292262 - protein, 39 aa, Zea mays
  Clone ID: MRT4577_29628C.1.pep
PCIVTRHHNKNMYKRLFSIHCVYKLGFVAAFYFAFPQPS

SEQ ID NO: 292263 - protein, 67 aa, Zea mays
  Clone ID: MRT4577_29629C.1.pep
PFKVKGLWLFRGPEIPKFVMDEVYDMELYEWTKVDLSDEAQKERVNAMIEDQEPFEGEALLDAKCFK

SEQ ID NO: 292264 - protein, 998 aa, Zea mays
  unsure (1)..(998): unsure at all Xaa locations
  Clone ID: MRT4577_2962C.1.pep
MDPKGKGIVINDKEKESFVNEPRDDKSNDSSSGHRRKDGKKKKTRRIKEIVYYDSDESTSSQKDEDNDYKQKTVNSNFSFDYSRIPHSSNAHLLPIPLGKPPHFDGEDYGFWSHKMRTHLFSLHPSIWEIVESGMKFDSSDSPSFINEQIHKNAQATTVLLASLCRDEYHKVSGLDNAKQIWDTLKISHEGNDVTLLTKMELVEGELGRFAMIRGEEPTQTYNRLKILINKIRSYGSTRWTDHDVVRLMLRSFTVLDPHLVNNIRENPRYIKMSPEEILGKFVSGRMMIKEARYVDDALNGPIHEPQPIALKATRSKEALPSKVAQIEAAGLNDEEMALIIKRFKTALKGRKGQPSKTKTKGKRSCFKCGKLGHFIANCPDNDSDQDHGSKREKKKHYKKAKGEAHIRKEWDSDCSSSDSDNEGLAATAFNKTSLFPNERHTCLMAREKKVCNQDNVTYDSSSDNESSDDEIDYSSLFKGLDRTKVDKINELIDALNEKDRLLEKQEDLLYEEHDKFVEAQKSYALEVKRNKVLSSELSSCHETIATLKRVNDDLNAKLEVASKSNSCVEHVEICTRCKDFDIDACSEHLVSISKLNDELASLNAQLKTIKSNFDKLKFARDAYTIGRHPSIKDGLGFKREAKNLTSHKAPIPAKEKGKAPMATSAKKNHAFLYHDRRQTRNAYRSYNAYNDLSHAMFASSSSYVYDRNVGRRDVVHNMPRRNVVNIPRKVNEPSTIYHALNASFAICRKDRKVYASGGSSWIIDSGCTNHMTGEKKMFTSYVKNKDSQDSIIFGDGNQGKDKSETQGTLKRFLRRAQNEFELKVKKIRSDNGSEFKNLQVEEFLEEEGIKHEFSAPYTPQQNGVVERKNRTLIDMARTMLGEFKTPERFWSEAVNTACHAMNRVYLHRLLKKTSYELLTGNKPNXEEDIPTAAIRTMAIGEVRPQEQDERDQPSSSTTVHPPTQDDEQVVPNGCEERFPQRADQGGGVRRATPWLRG

SEQ ID NO: 292265 - protein, 414 aa, Zea mays
  Clone ID: MRT4577_29630C.1.pep
MALVLHAGSSNKNAFKALIAADYSGIKVELVKDFQMGVSNKTPEFLKMNPIGKVPVLETPDGPVFESNAIARYVTRLKANNPLYGSSLIDYAHIEQWMDFAATEVDASIGKWLYPRMGFYPYAAVTEESAIAALKRAFGSLNTHLASNTFLVGHSVTLADIVLTCNLYMGFSRILTKSFTSEFPHIERYFWTMVNQPNFKKVIGDVKQAEAVPLLPKKIAPAKEQKPKEAKKEAPKPKEAEKPAEEEEAPKPKPKNPLDLLPPSKLILDDWKRLCSNTKTNFREVAIKGFWDMYDPEGYSLWFCDYKYNDENTVSFVTMNKVGGFLQRMDLCRKYAFGKMLVVGSEPPFKVKGLWLFRGPEIPKFVMDEVYDMELYEWTKVDLSDEAQKERVNAMIEDQEPFEGEALLDAKCFK

SEQ ID NO: 292266 - protein, 414 aa, Zea mays
  Clone ID: MRT4577_29631C.1.pep
MVLVLHANSGNKNAFKTLIAAEYSGVKVELVKDFQMGVSNKTPEFLKMNPIGKIPVLETPDGPVFESNAIARYVTRLKADNPLYGSSLIDYAHIEQWIDFAATEIDANIGKWLYPRMGFYPHAGVVEESTIAALKRALGSLSTHLASNTFLVGHSVTLADIVMTCNLCMGFSRILTKSFTSEFPHVERYFWTMVNQPNFKKVIGDVKQAEAVPLVPQKAAPAKVQKPKETKKEAPKPKVTEKSAEEEEAPKPKPKNPLDLLPPSKMILDDWKRLYSNTKTNFREVAIKGFWDMYDPEGYSLWFCDYKYNDENTVSFVTMNKVGGFLQRMDLCRKYAFGKMLVVGSEPPFKVKGLWLFRGSEIPKFVMDEVYDMELYEWTKVDLSDEAQKERVNAMIEDQEPFEGEALLDAKCFK

SEQ ID NO: 292267 - protein, 56 aa, Zea mays
  Clone ID: MRT4577_29632C.1.pep
VPHGPLWKFGQVHAPGMCFLVSIGPSVPVIPLAVELPFLALVPTSHHRMCPVANSG

SEQ ID NO: 292268 - protein, 93 aa, Zea mays
  Clone ID: MRT4577_29633C.1.pep
CKPCRLLCESSKNSAIVKSISGNNLEPVTDSGIRKTIGISRPPYPVYTDEEADGSDTEEDPDSSGRGEVIDTEPDDDSAVRQEDPELEEILSD

SEQ ID NO: 292269 - protein, 220 aa, Zea mays
  unsure (1)..(220): unsure at all Xaa locations
  Clone ID: MRT4577_29634C.1.pep
MFFEPELKLPRLIIDTVSNMAANLKWAPVLGLLDGYAAMDATTSAGNIVADWGHNGNECTLRDACNSGLYAYVNIVILTTFGNVQSPVLNLAGHCDPGXSGSCTGQSIDIHTCQWLEHXVLLSIGGCSGSYGLSSIDDINSVSDYLWDNFLGGSGSSRPLGASVLDGINFNIENGQYAHYDDLENALNVKXTSVLTAIPQCPYPDASLSTTLHTEQIDNE

SEQ ID NO: 292270 - protein, 102 aa, Zea mays
  Clone ID: MRT4577_29635C.1.pep
PLNQKGGLVPNLNPLVKEVFKAADDKRKEVLFKKKKDVGKVNGFATQHGKIYVAAAKKIINKGFGFPKKETERLPPMLEKSISPSKTEEFLVKKNLLLIFFL

SEQ ID NO: 292271 - protein, 62 aa, Zea mays
  Clone ID: MRT4577_29636C.1.pep
MSKKGGKAKPLKGPKADKKEYDETDLAYLQKKKDEEKALKELKAKAQKGAIGGSGLKKRGKK

SEQ ID NO: 292272 - protein, 63 aa, Zea mays
  Clone ID: MRT4577_29637C.1.pep
GKSQNCPCCLHEAGENLSSPDSSLLPRRSPLAPPLIPPMATPARGKKRLVVDVDLELDSEVEV

SEQ ID NO: 292273 - protein, 79 aa, Zea mays
  Clone ID: MRT4577_29638C.1.pep
SSQAPSDSRHWDLSLNLFSSTINCVQFVCLKPEVPFSSIIRWAIGRSVLQTPAANVPLSCYSLTYMRVCTRCIVYTSAL

SEQ ID NO: 292274 - protein, 70 aa, Zea mays
  Clone ID: MRT4577_29639C.1.pep
LLLPKWFFAIKIVRCHIAFFVPICLWQIYLLHLHPVVSSRKNTPVLNDPLSRALPSSLTSFPLFLFTCVL

SEQ ID NO: 292275 - protein, 946 aa, Zea mays
  unsure (1)..(946): unsure at all Xaa locations
  Clone ID: MRT4577_2963C.1.pep
MDPKGKGMVINDKEKESFINEPKDDKPTDSGSSHKKKDGKKKRRIKKIVYYDSDESSSSQRDDDDEKKKTVNSNFSFDYSRISQTSNAHLLSIPLASLCRDEYHKVSGLDNAKQIWDTLKISHEGNDVTMLTKMELVEGELGRFAMIRGEEPTQTYNRLKTLVNKIRSYGSTRWTDHDVVRLMLRSFTILDPHLVNSIHENXVHQNDARGNTRKVXSGRMMIKEARYVDEALNGPIHEPQTVALKATSSSEALPSKVAQVEAARLNEDEMALIIKRFKTALKGRKEHPNKSKTKGKRSCFKCGKIGHFIANCPDNDSDQEQGKSRKWEKKKAYKKVKGEAHLGKEWDSDCSSSDSDNEGLAASAFNKSALFPNEHHTCLMAKEKKVNTRSTITYASSSDDESSDDEVDYASLFKGLDRTKIDKINELIDALNEKNRLLEKQEDLLYEEHDKFVSVQKSLALEVKRNEMLSCELSTCHESISSLKSVNDDLNAKLEVANKSSSCIEHVVICNRCKEFNVDACVEHLTSIAKLNGEVASLNAQLKTSKNDFDKLKFARDAYTIGRHPSIKDGLGFKREAKNLTSQGAPIFNKEKGKAPMTSNSQKNHAFMYHDRKYSRNSHYNRSYNVFDSHAMIASSSSFVHDRDMPKKNIIHRRRNFVSHAPSKVCNGSTTVFHACNAKFVLSCINEKVIAKKVGAKCKGDKTCIWVPKAIVTNLAGPNKSWVYASGGSSWIIDSGCTNHMTGEKKMFTSYVKNKDSQDSIIFGDGNQGKVKGLGKIAISSEHSISNVFLVESLGYNLLSVSQLCNMGYNCLFTNVDVSIFRRCDGSLAFKGVLDDKLYLVDFSKEEAGLDACLIAKTSMGWLWHRRLAHVGMKNLHKLLKGEHVLGLTNVSFDKDRPFSASHDSPWISLTCIMHSDVFRPAQFSVRGELQRQLPTIHANASGYRK

SEQ ID NO: 292276 - protein, 45 aa, Zea mays
  Clone ID: MRT4577_29640C.1.pep
GKLQEMAVSEAKALVAVNDDIRGLRDRLMWMQAFLRHADPRRPTP

SEQ ID NO: 292277 - protein, 93 aa, Zea mays
  unsure (1)..(93): unsure at all Xaa locations
  Clone ID: MRT4577_29641C.1.pep
THASKISLYMVLRLRGGMQIFVKTLTGKTITLEVESSDTIDNVQAKIQDQEGIPTQQQGLNLAGXHLKEARTLADYKTQRENTLPRALPHRCD

SEQ ID NO: 292278 - protein, 30 aa, Zea mays
  Clone ID: MRT4577_29642C.1.pep
FTDAKINNVIERGFSPTLVITLLKDDNNVD

SEQ ID NO: 292279 - protein, 167 aa, Zea mays
  Clone ID: MRT4577_29643C.1.pep
PIIIKLCHLPMLAVADPLDAAPPPWADMAAAQNSPVAECKSPIPMSSLEPDPIHEASARKIRVRAKRSADHAAKYKGAGQLLASRHSERLRAKEPAHYVDMSTKASRLKSLKDELANCSKELKVQVKRRGLLRNRTLNAADLRALAGTVALSATATAELEQVLGHYA

SEQ ID NO: 292280 - protein, 104 aa, Zea mays
  unsure (1)..(104): unsure at all Xaa locations
  Clone ID: MRT4577_29644C.1.pep
PPPPPPYPPPXPPPPPXTVAAXPRSPPPPXPRSPPPXPRSPPPPXPRSPPPPXPRSPPQYPPRPPPLPPSGRSPPASGPPPGAVTRGPGRPCCRSDGVFAASRR

SEQ ID NO: 292281 - protein, 91 aa, Zea mays
  Clone ID: MRT4577_29645C.1.pep
SCASPPYTSGAACKALQLLAKGKVKPTELRAKTRKMHAKLREVFGEKSVSRSSSTSSISIGKKASKDSGNGPFENVSHPDSPYIHLRLKEE

SEQ ID NO: 292282 - protein, 155 aa, Zea mays
  unsure (1)..(155): unsure at all Xaa locations
  Clone ID: MRT4577_29646C.1.pep
IRFCLHPDLALSLSTTQHQAPCPPAISAAPNRGIRLRYGRRSPLLRPNSRLASSSASWLSVLRPRCPWKEGEDHGPRPGSKWMEIEESASAAPWHPLRPPPLPHLPARETIAIXPLPRAARDDPLPRDSRVFATHGVXXXADLLXHXRSXQXXCL

SEQ ID NO: 292283 - protein, 66 aa, Zea mays
  Clone ID: MRT4577_29647C.1.pep
WVKKLEKLTLVISIGFKFNREKKSFPNGNKKSSLPLSLGKKKKFSPGIMAKNVGLPQVLVQGWVWS

SEQ ID NO: 292284 - protein, 69 aa, Zea mays
  unsure (1)..(69): unsure at all Xaa locations
  Clone ID: MRT4577_29648C.1.pep
MKFGAAYLRSLSSLGTHSPSAEDLTXVLESVGCEVDNERMELLLSGXGGEDITELIAAGREKFVLVPCG

SEQ ID NO: 292285 - protein, 62 aa, Zea mays
  Clone ID: MRT4577_29649C.1.pep
HEKDIRSQKKDCKAFLFRFLLPAHWLAGVQHSFDQESPSIYLFTKNEKLGSYLSMENPTDKT

SEQ ID NO: 292286 - protein, 1022 aa, Zea mays
  unsure (1)..(1022): unsure at all Xaa locations
  Clone ID: MRT4577_2964C.1.pep
MDPKGKGIVINDKEKESFVNEPRDDKSNDSGSGHRRKDGKKKKTRHIKEIDYYDSDESTSSQKDDDHNDYEKKKPINSNFSFDYSRIPHSSSSHLLSIPLGKPPHFDGEDYEFWSHKMRSHLFSLHPSIWEIVESGMHFDSSDSPMFINEQIHKNAQATTVLLASLCRDEYNKVSGLDNAKQIWDTLKISHEGNDVTLLTKMELVEGELGRFAMIRGEEPTQTYNRLKTLINKIRSYGSTRWTDHDVVRLMLRSFTVLDPHLVNNIRENPRYTKMSPEEVLGKFVSGRMMIKEARYVDDALNGSINEPQPLALKATRSKEALPNKVAQIEAAGLNDEEMALIIKRFKTALKGRKGQPSKTKAKGKRSCFKCGKIGHFIANCPDNESDQELESKREKKKHYKKAKGEAHIGKEWDSDCSSSDSDNEGLAATAFNKSSLFPNEHHTCLMAKEKKVCTRESTTYSSSDDDSSDDNEIDYSSLFKGLDRIKIGKINELIDALNEKDRLLEKQEDLLYDEHDKFVEAQKSHALEVKRNEMLSCELSSCHETISSLRSINDDLNAKIASKSNSCVENVITCTRCKDINIDAYSEHLACISKLNEEVASLNTQLETSKSDFDKLKFARDAYTVGRHPSIKDELGFKREAKNLTSHKAPISAKEKGKAPMAKSTKRNHAFMYHDRRQTRNAYRSYNAYDDFNSHAMVASSSSYMHGRNMSRRNTIYHVPRKNIIHAPRKVVNESSTIYCALNASFAICRKDRKIVARKLGAKCKGDKTCIWVPKDICTNLVGPNMSWVYASGGSSWIIDSGCTNHMTGEKKMFTSYVKNKDSQDSIIFGDGNQGKDKSETQGTLKRFLRRAQNEFELKVKKIRSDNGSEFKNLQVEEFLEEEGIKHEFSAPYTPQQNGVVERKNRTLIDMARTMLGEFKTPECFWTEAVNTACHAINRVYLHRLLKKTSYELLTGNKPNXEEDVPTAAIRTMAIGEVRPQEQDERDQPSSSTTVHPPTQDDEQVHQKEACDHGGAQDDHV

SEQ ID NO: 292287 - protein, 119 aa, Zea mays
  unsure (1)..(119): unsure at all Xaa locations
  Clone ID: MRT4577_29650C.1.pep
PRVRPRVLSFRPDHINIQVRDQSDEVLARGFNDQIYDIFQLLPSNIHDAVSSATMPPEAIEITRKYMNKPVRLXLVKRDXLTLEGINHIYENVHNEYLKLDTLCDLYETLTIIHSVYLS

SEQ ID NO: 292288 - protein, 67 aa, Zea mays
  Clone ID: MRT4577_29651C.1.pep
RRRCVFVWSSEKKVLGFNLNVPINLSLLVKKMSGASIWVWSGFDSLNGPYQVFFFCQKKYFFVRTLI

SEQ ID NO: 292289 - protein, 83 aa, Zea mays
  Clone ID: MRT4577_29652C.1.pep
RPSGSKKTLERVLVGKKRKLTKLVGNSGRRAKNEGGIWPNKNCEKGKIPCKNYSGGRLPKRPFQSVPGEGHRGVVLQGWNLRT

SEQ ID NO: 292290 - protein, 99 aa, Zea mays
  Clone ID: MRT4577_29653C.1.pep
LAIPASSVLDDERHTMHAPMHDSYMHEWTHARVAPMYAADGDHHSSAPPLPDGGLLLILRCPEACDPERAQRAEAAEVVPHGQHRPFHLTGRQDLEHSV

SEQ ID NO: 292291 - protein, 53 aa, Zea mays
  Clone ID: MRT4577_29654C.1.pep
LKMGLSKPVKIFSHLGKPPSPVIVLPYPPHLIMTTFSCIVRKLLNDGKKVRPY

SEQ ID NO: 292292 - protein, 114 aa, Zea mays
  Clone ID: MRT4577_29655C.1.pep
TTIPMQKGEHHRTGLGVFPTQIKKRGRPNITLGKLGQWFGNPGGADSRGGKHRFHQKGGLSRGGQTPSGGWPGQPRGGDPPGGGGPAPSWELTPGGKRGGPKHRRGAFWGRTPW

SEQ ID NO: 292293 - protein, 76 aa, Zea mays
  Clone ID: MRT4577_29656C.1.pep
MTVTDGGEAYESQRVGRSIDIHRSLQILARVLCSTMIAATVGPVVHHYVVPGVIHPAEVEIKAGDHTDTAKVHRTR

SEQ ID NO: 292294 - protein, 61 aa, Zea mays
  Clone ID: MRT4577_29657C.1.pep
PKKMIINSPYLIPYSDSETLGADPSHGSNQCFHTTLIFPQPQNMASSSISFLYQKQPKLLL

SEQ ID NO: 292295 - protein, 135 aa, Zea mays
  unsure (1)..(135): unsure at all Xaa locations
  Clone ID: MRT4577_29658C.1.pep
HLLCRDLSPPPGPLADQRGQRDDPEALAPLITALRHWPGTETVPAPTKHSTPLLXDELALSLPTIRNLDFLEMRRPLFQPYHXLSLVPDGXDPIKTILVPEGLHYQLYYRXDLPRLLAPQAPXIPSKDSACRCFP

SEQ ID NO: 292296 - protein, 94 aa, Zea mays
  Clone ID: MRT4577_29659C.1.pep
SHSGYFFIFRAKLAFTILSLLARHIPEEKRHPKLGSQGQEILPPGNKLSLEGEGKPPVDQKQEDPHFFDAKTVARAHFWAPGERQHPLGGLGLL

SEQ ID NO: 292297 - protein, 1663 aa, Zea mays
  unsure (1)..(1663): unsure at all Xaa locations
  Clone ID: MRT4577_2965C.1.pep
MALGSGHKRKDGKKKKTRRIKKIVYYDDSDESTSSQKDNDDNDYERRKPVNSNFSFDYSRIPQSTNAHLLSIPLGKPPHFDGEDYGFWSHKMRSHLFSLHPSIWEIVESGMKFDSSDSPMFINEQIHGNAQATTVLLASLCRDEYHKVSGLDNAKQIWDTLRISHEGNDVTLLTKMELVEGELGRFAMIRGEEPTQTYNRLKTLINKIRSYGSTRWTDHDVVRLMLRSFTVLDPHLVNNIRENPRYTKMSPEEVLGKFVSGRMMIKEARYVDDALNGPIHEPQPIALKATRSKEALPSKRFKTALKGRKGQPSKTKTKGKRSCFKCGKVGHFIANCPDNDSDQEEGNKREKKKKNYKKAKGEAHLGKEWDSNCSSSDSDNEGLAVTAFNKSSLFRNEHHTCLMAREKKGLDRTKVDKINELIDALNDKNRLLEKQEDLLYDEHDKFVEAQKSLALEIKRNEMLSCELSTCHDSISSLKSINDELNAKLEIANKSTSCVEHVVVCTRCKDFNVEACSEHLVSISKLNDEVASLHAQLKTSKSEFDKLKFARDAYTIGRHPSIKDGLGFKREVKDLTSHKAPISAKEKGKAPMASSARKNHAFMYHDRRQSNKSCNAYDAFDSHAMFASSSSYMHGKDMSRRYFVHMPRRNVVNVPRKVNEPSTIYHTLNASFAICRKDRKIVARKLGAKCKGDKTCIWVPKTIVTNLVGPNKSWVYASGGSSWIIDSGCTNHMTGEKKMFTSYVKNKDSQDSIIFGDGNQGKVKGLDVSVFRRSDGSLAFKGVLDDKLYLVDFAKEEAGLDACLIAKTSMGWLWHRRLAHVGMKNLHKLLKGEHVIGLTNVQFEKDRPCAACQAGKQVGSSHHTKNVMTTSRPLEMLHMDLFGPVAYLSIGGSKYGLVIVDDFSRFTWVFFLQDKSETQGTLKRFLRRAQNEFELKVKKIRSDNGSEFKNLQVEEYLEEEGIKHEFSAPYTPQQNGVVERKNRTLIDMARTMLGEFKTPERFWSEAVNTACHAINRVYLHRLLKKTSYELLTGNKPNVLYFRVFGSKCYILVKKGRNSKFAPKAVEAFLLGYDSNTKAYRVFNKSLGLVEVSSDVVFDETNGSPREQVVDFDDVDEEEVPTAAIRTMAIGDVRPHEQNERDQPSSSTMVQPPTQDDEQEACDQGGAQDDHVMEEEAQPAPLTQVRAMIQRDHPVDQILGDISKGVTTRSRLVNFCEHYSFVSSIEPFRVEEALLDPDWVLAMQEELNNFKRNEVWTPVPRPKQNVVGTKWVFRNKQDEHGVVTRNKARLVAKGYAQVAESIRILLAYAAHHSFRLFQMDVKSAFLNGPIKEEVYVEQPPGFEDERYPDHVCKLSKALYGLKQAPRAWYECLRDFLIANAFKVGKVDPTLFTKTCDGDLFVCQIYVDDIIFGSINQKSCEEFSRVMTQKFEMSMMGELSYFLGFQVRQLKDGTFISQTKYTQDLIKWFGMKDAKPAKTPMGTDGHTDLNKGGKSVDQKAYRSMIGSLLYLCASRPDIMLSVCMCARFQSDPRECHLVAVKRILRYLVATPCFGIWYPKGSTFDLIGYSDSDYAGCKVDRKSTSGTCQFLGRSLVSWSSKKQTSVALSTAEAEYVAAGQCCAQLLSMRQTLRDFGYNLSKVPLLCDNESAIRMADNPVEHXRTKHI

SEQ ID NO: 292298 - protein, 247 aa, Zea mays
  unsure (1)..(247): unsure at all Xaa locations
  Clone ID: MRT4577_29660C.1.pep
SYNQLRLRRTQDLKXRLTVQFQGEEGIDAGGLTREWYQLLSRVIFDKGTLLFTTVGNNATFQPNPNSDFQTEHLSYFKFVGRVVAKALFDGQLLDVHFTRSFYKHILGAKVTYHDIEAIDPDYYRNLKWMLENDVSDLPYLTFSMDPDEEKHILYEKTEVTDYELKPGGRNIRVTEETKQEYVDLVAEHILTTAIRPQINGFLEGFTELVPRDLISLFNDKELELLISGLPEIDLDDLKANTEYIGY

SEQ ID NO: 292299 - protein, 661 aa, Zea mays
  unsure (1)..(661): unsure at all Xaa locations
  Clone ID: MRT4577_29661C.1.pep
FSLAAEAVKKLASVAASHRKFFSIELAGVAQSLSSSAVEELVTLKNTQMLGLSTCSMAGAAILRILQVLSTLTSCVMDSRHEQDLGQEEQSFLWDLNAGLQPLWQELSDCISATEAKLVHNSSFASHAPSVDALAVSASSSVSSPLPPGTQRLLPFIESFFVLCEKLQTNQPVAQSDYTVIAPEVKESAGSSSSPSLKTGGTCNVTFIRIAEKHRRLLNVFIRQNPSILEKSLSMMLKVPRLIDFDNKRAYFRSRIRQQHDQHLPAPLHISVRRAYVLDDSYNQLRLRRTQDLKGRLTVQFQGEEGIDAGGLTREWYQLLSRVIFDKGTLLFTTVGNNATFQPNPNSDFQTEHLSYFKFVGRVVAKALFDGQMVDVHFTRSXYKHILGAKXTYNDXEAFDPXYYRNLKWMLENDVSDLPYLTFSMDPDEEKHILYEKTEVXKAITGLAETFSACVSYYLSCXQFNKFSIQVTDYELKPGGRNIRVTEETKQEYVDLVAEHILTTAIRPQINGFLEGFTELVPRDLISLFNDKELELLISGLPEIDLDDLKANTEYIGYSAASPVIQWFWEVVRAFSKEDMARLLQFVTGTSKVPLEGFKALQGISGPQRFQIYKAYGSPGRLPSAHTCFNQLDLPEYTSKEQLEERLLLAIHEASEGFGFG

SEQ ID NO: 292300 - protein, 496 aa, Zea mays
  unsure (1)..(496): unsure at all Xaa locations
  Clone ID: MRT4577_29662C.1.pep
PETLHGGDEEIVAAVVSGALPSHHLESRLGDCRRAASLRREALRRMTGRGVDGLPLDGMDYQAILGQCCEMPVGYVQLPVGVAGPLLLDGKQYHVPMATTEGCLVASVNRGCRAIAASGGAVSVLLRDAVSRAPDVKLPSIKRAAELKAFVETITNFEILSAVFNRSSRFGKLQGIQCALAGYYCSDKKAAAVNWIEGRGKSVCEATVRGSCSTAACRAGGGHSVVRFRRFGIPGLLSSIGPADXKLQGIQCALAGRNLYMRFTCSTGDAMGMNMVSKGVEDVLGYLQNDFPDMDLISLSGNYCSDKKAAAVNWIEGRGKSVVCEATVKGGVVQSVLKTSVQKLIELNIVKNLAGSAVAGALGGFNAHASNIVTALFIATGQDPAQNVESSQCITMMEAVNDGSDLHVSVTMPSIEVGTVGGGTCLASQAACLNLLGVRGPNRDSPGANAKLLATIVAGSVLAGELSLLSALAAGQLVKSHMKYNRSSKDVPGAAS

SEQ ID NO: 292301 - protein, 94 aa, Zea mays
  Clone ID: MRT4577_29663C.1.pep
VPPPYRRTLVLSSRLSHLAFRSHMSLSPPETHVSSEGHRAVQREPRRVLDAKLLVPLPVVPREDDDQHSCASEEHLAERGDLHAVLLRVLQSYR

SEQ ID NO: 292302 - protein, 77 aa, Zea mays
  Clone ID: MRT4577_29664C.1.pep
PAGNEIGVEGIPHFAFLDKEGNEEGNVVGRLPKQYFLDNVVALASGNPSVPDARVVGQFSSAESRKVHQVADARSHG

SEQ ID NO: 292303 - protein, 103 aa, Zea mays
  unsure (1)..(103): unsure at all Xaa locations
  Clone ID: MRT4577_29665C.1.pep
PGLRHGFQADRSLDLLHCHHRSRLPSLRIRRAHGRTAGRTAAPPETALPRALFFFLVRVGTKVPMANLRFXCRPRRASSEVKGLSGLQDLLPKKAPWTRVGAH

SEQ ID NO: 292304 - protein, 70 aa, Zea mays
  unsure (1)..(70): unsure at all Xaa locations
  Clone ID: MRT4577_29666C.1.pep
GRXXQQSSGPGRRRCRCPQEASPTXXQRAVNYGHPVAHPSPXXSAASXXCLFPIRXCPHRXXNKSHXLNE

SEQ ID NO: 292305 - protein, 66 aa, Zea mays
  Clone ID: MRT4577_29667C.1.pep
RLSQGTPEHSSVWMVNSIYSPFQLTHDWIKRSLLEHCMIYKIPPVRMLQLKSVNEMDVVLVFCPIH

SEQ ID NO: 292306 - protein, 40 aa, Zea mays
  Clone ID: MRT4577_29668C.1.pep
LWPQVPPFNRGPVIKSRCPIGLKAPNCKAPIMGLVKSPVP

SEQ ID NO: 292307 - protein, 167 aa, Zea mays
  Clone ID: MRT4577_29669C.1.pep
RVILHREEERGRRQEFKPTISHHIVIESTTTEAMGSNGREHRCGVPRPPPLSLYRDWEEEEVVKVGRRQQSPLEQSTSISATAGIANKKRLSKQVSMKETTREVKWEKRRRQIQRQRSSMRLNEADDRAGSRTVCHVDSEASSSAERVSSKRITDEDLDELRGSMDL

SEQ ID NO: 292308 - protein, 52 aa, Zea mays
  Clone ID: MRT4577_2966C.1.pep
MDRQDESMSARPALEIEVLRFLYTTVGSLLAFYGLYIVFSCILLYVVIQDFP

SEQ ID NO: 292309 - protein, 42 aa, Zea mays
  Clone ID: MRT4577_29670C.1.pep
NATVTLEELRKHSIIVEWSIYQFNCLVIIELSKRQQIHLQYH

SEQ ID NO: 292310 - protein, 41 aa, Zea mays
  Clone ID: MRT4577_29671C.1.pep
QKGGSKTSSTIQSTPSGKRYKFVATGHGKYEKVLVEGRPAP

SEQ ID NO: 292311 - protein, 42 aa, Zea mays
  Clone ID: MRT4577_29672C.1.pep
LHEITRVPLNGQPHLPFGIHDAFPAMANKTRYASRALITNAW

SEQ ID NO: 292312 - protein, 73 aa, Zea mays
  Clone ID: MRT4577_29673C.1.pep
GGLHYSPHHTLLTYGLFSLHTTTLMRKLLFRPSPPERSQIVHYILRAEHGFLFNIYTNNKVQNGVPAPSFLRG

SEQ ID NO: 292313 - protein, 223 aa, Zea mays
  unsure (1)..(223): unsure at all Xaa locations
  Clone ID: MRT4577_29674C.1.pep
PQRCRASRRPAPAACRTSTAAGGSSAAASGARRRWPRPSRRARGGCGAGRTTXEVPAEAARHHEHAAAGPGRCCSAVVQHVAAPAAAVWSVVRRFDQPQVYKRFVRSCALLAGDGGVGTLREVRVVSGLPAASSRERLEVLDDESHVLSFRVVGGEHRLRNYLWVTTVHPSPAAPDAPTVVVESYVVDVPPGNTPEDTRVFVDTIVKCNLQSLATTAEKLAPV

SEQ ID NO: 292314 - protein, 87 aa, Zea mays
  Clone ID: MRT4577_29675C.1.pep
KTSPWGGVFNMAPRGPLGLPAKWGLAPPPDCYRCVSPPQPSGRAPGLPTCRGLGGPFPQGAGRGPYERVSFSLPPGPRPFLKGGGWA

SEQ ID NO: 292315 - protein, 75 aa, Zea mays
  Clone ID: MRT4577_29676C.1.pep
PFPMGFAVFLVPLAPIPIPGPGITPGGSLGPPVFSNQPHAWVAPWFFWVGPFMGVALVPFSPQVFIRGIPFKSRF

SEQ ID NO: 292316 - protein, 83 aa, Zea mays
  Clone ID: MRT4577_29678C.1.pep
KKSIINRPTTKFFMVKQTGQRMTKGKVKEQHFANLSTRHQKTFSQSQKFPTCSNWNTIYKYRELDQTQKDSSKYLKAQKIINR

SEQ ID NO: 292317 - protein, 120 aa, Zea mays
  Clone ID: MRT4577_29679C.1.pep
QWGGGRTFCLSLDLKFAPGSIFVDHLPSTLSVPHVTNQLSLQFFLSFLDRCVQGRQCRVLLKPVEIGEGSRCIFFCSHQKKKKKKKKKKKKKKKKKKKKKKKKKKKKKKKKKKKKKGGAR

SEQ ID NO: 292318 - protein, 1611 aa, Zea mays
  Clone ID: MRT4577_2967C.1.pep
MDPKGKGIVINDKEKESFVNEPKDDKPTDSGSGHRRKEGKKKKTRRIKEIIYYDDSDESTSSQKDDDNDYKKTVNSNFSFDYSRIQHSSNSHLLSIPLGKPPHFDGEDYGFWSHKMRSHLFSLHPSIWEIVENGMKFDSSDSPMLINEQIHRNAQATTVLLASLCREEYNKVSGLDNAKQIWDTLKISHEGNDITMLTKMELVEGELGRFAMIRGEEPTQTYNRLKTLINKIRSYGSTRWTDHDVVRLMLRSFTVLDPHLVNNIRENPRYTMMTPEEVLGKFVSGRMMIKEARYVDDALNGPLHEPQPIALKATRSKESLPSKVAQVEAAGLNDEEMALIIKRFKTALKGRKGQPSKAKTKGKRSCFKCGKLGHFIANCPENDSDQEQGKNGKRENKKVYKKANGEAHLGKEWDSDCSSSDSDDEGLAATAFNKSALFPNEHHTCLMAREKKVITRNANTYDSSSNDESSEDEIDYSSLFKGLDRTKIAKINELIDALNEKDRILEKQEDLLYEEHDKFVSAQNSLALEVKRNGILSCELSTCNETISSLKGEINVLTAKLEVASNSCVENITICTRCKDFDVNACSEHLVSISKLNDEVASLNAQLKTSKSEVDKIKFARDAYTVGRHPSIKDGIGFKREAKNLTSHKAPIFVKEKGKAPMASSAKRNHAFLYHDRRHARNAFRSNDVFDSHVYDSHAMFASSSSYKHDRDMCRRNVVHMPRRNFAHVPRKVVNKPSTIYYACNAPFAICRKGKKVYASGGSSWIIDSGCTNHMTGEKKMFTSYVKNKDSQDSIIFGDGNQGKDKSETQGTLKRFLRRAQNEFELKVKKIRSDNGSEFKNLQVEEFLEEEGIKHEFSAPYTPQQNGVVERKNRTLIDMARTMLGEFKTPECFWSEAVNMACHAINRVYLHRLLKKTSYELLTGNKPNVSYFRVFGSKCYILVKKGRNSKFAPKAVEGFLLGYDSNTKAYRVFNKSSGLVEVSSDVVFDETNGSPREQVVDCDEEDVPAAAIRTMAIGEVRPQEKDEQPSSSTMVQPPTEDDEQVPQVEALDQGGAQDDQVMEEEAQPAPPTQVRAMIQRDHPVDQILGDISKGVTTRSRLVNFCEHYSFVSSIEPFRVEEALLDPDWVLAMQEELNNFKRNEVWTLVPRPKQNVVGTKWVFRNKQDEHGVVTRNKARLVAKGYAQVAGLDFEETFAPVARLESIRILLAYAAHHSFRLYQMDVKSAFLNGPIKEEVYVEQPPGFEDERYPDHVCKLSKALYGLKQAPRAWYECLRDFLIANAFKVGKADPTLFTKTCDGDLFVCQIYVDDIIFGSTNQKSCEEFSRVMTQKFEMSMMGELNYFLGFQVKQLKDGTFISQTKYTQELLKWFGMKDAKPAKTPMGTDGHTDLNKGGSLLYLCASRPDIMLSVCMCARFQSDPKECHLVAVKRILRYLVATPCFGLWYPKGSTFNLVGYSDSDYAGCKVDRKSTSGTCQFLGRSLVSWNSKKQTSVALSTAEAEYVAAGQCCAQLLWMRQTLRDFGYNLSKVPLLCDNESAIRMAENPVEHSRTKHIDIRHHFLRDHQQKGDIEVFHVSTENQLADIFTKPLDEKTFCRLRSELNVIDSRNLD

SEQ ID NO: 292319 - protein, 81 aa, Zea mays
  Clone ID: MRT4577_29680C.1.pep
ALGWQHVPAHGDTGHGTGSERRARASNRCPPGRPRRCPLLRAFAGALTLNAGTDRAGWNYCAPGNLDRPLWSQDLTRVHGT

SEQ ID NO: 292320 - protein, 195 aa, Zea mays
  Clone ID: MRT4577_29681C.1.pep
MLHQHQHHYHGGVASLHSYLSNPDQAFHAHYYHHSNIIATPLPPTPSFHHLWPSTAQTFEQPVVHEAPAAVAAGNSPAGSGSADDGGGGGTAEAERRRRRMASNRESARRSRMRKQRQLTELWAQVVHLRGANRRLLDELNRAVRGCSDMRREKARLQKEKTDLGTKLQRLTQPQNAALPSSSSEPQPQHDAATE

SEQ ID NO: 292321 - protein, 58 aa, Zea mays
  Clone ID: MRT4577_29682C.1.pep
CEETRPFYYSYKSYSAMSSSFNLVLPSFQDIESPHSRRLHLSMPDNNLYYSIQRVYQT

SEQ ID NO: 292322 - protein, 69 aa, Zea mays
  Clone ID: MRT4577_29683C.1.pep
ACGLLGGFISGGPWLFYGLARLAPIFFFLVTTFISSHNALFVGFSRILGFFAFFGYCFLVLGTQASSFS

SEQ ID NO: 292323 - protein, 173 aa, Zea mays
  unsure (1)..(173): unsure at all Xaa locations
  Clone ID: MRT4577_29684C.1.pep
AGFFLXVSPDSIQLVAEHAAANNKVFLMNLSAPFICEFFRDAQEKVLPYADYIFGNETEAKIFAKTENIEEIALKISQLPLASGKQKRIAVITQGADPVVVAEDGKVKTFPVILLPKEKLVDTNGAGDAFVGGFLSQLVLGKGIEDCVRAGCYAANIIIQRPGCTYPEKPDFN

SEQ ID NO: 292324 - protein, 86 aa, Zea mays
  Clone ID: MRT4577_29686C.1.pep
QKDKSSTARSPNHFRAGIKGYHEAFWSKSQKNERPIKSASPRTGNVSQRQKSSSSGSTAPMRCLCAILSIPAFLYGQFEPKVCCVI

SEQ ID NO: 292325 - protein, 172 aa, Zea mays
  Clone ID: MRT4577_29687C.1.pep
AAKLPPGSASVCIKITALCPIALLEKASDLLRWQKRHPSLNLPWKTHDFPILSDSSPLHLTASEPPALSAEEERELELAHERVLAVCARCAERGVPLLVDAEYAAVQPAIDYLTLAGALACNAERSIVHGTVQAYLRDARERLETMARGVERARVRLGVKLVRGAYLAREAR

SEQ ID NO: 292326 - protein, 146 aa, Zea mays
  unsure (1)..(146): unsure at all Xaa locations
  Clone ID: MRT4577_29688C.1.pep
GRVGAYCVKGGPEKELKAMQYLERRECEYDQKISIDFYKEGDPLKPAVMGVLVFVSTPDPIGNKYYLGPAPLQDMARQIATXANGPTGYNRDYLFSMEKALASISPQTRRAGTRISHQPTGSRWRAPRSRRTRAAPPGPQTIFARV

SEQ ID NO: 292327 - protein, 194 aa, Zea mays
  Clone ID: MRT4577_29689C.1.pep
PTRPVPFAELLLPVALKIFPNMLPSTYEGQSSKDSKAKALRATRKDVSDFLRQTLKETGLPVSAENAQTAEFGEFFRKVRTTGEKPSPEEIIKVCKIFKDDLTLDNLSRPQLVSICRYMNITSFGTDNFLRYQVRVRMRQIKRDDRSIAYEGVESLSVPELQTACASRGLRTYGVSPGRLRDDLTSWLDLRLKH

SEQ ID NO: 292328 - protein, 936 aa, Zea mays
  Clone ID: MRT4577_2968C.1.pep
MDPKGKGIVINDKEKESFVNEPKDDKPTDSGSGHRRKEGKKKKTRRIKEIVYYDDSDESSSSQKDNNDYDKQKTVNSNFSFDYSRIPHSSNAHLLPIPLGKPPHFDGEDYGFWSHKMRTHLFSLHPSIWEIVESGMKFDSSDSPSFINEQIHKNAQATTVLLASLCRDEYHKVSGLDNAKQIWDTLKISHEGNDVTLLTKMELVEGELGRFAMIRGEEPTQTYNRLKILINKIRSYGSTRWTDHDVVRLMLRSFTVLDPHLVNNIRENPRYIKMSPEEILGKFVSGRMMIKKARYVDDALNGPIHEPQPIALKATRSKEALPSKVAQIEAAGLNDEEMALIIKRFKTTLKGRKGQPSKTKTKGKRSCFKCGKLGHFIANCPDNDSDQEHGSKREKKKHYKKAKGEAHIGKEWDSDCSSSDSDNEGLAATAFNKSSLFPNERHTCLMAREKKVCNQNNVTYDSSSDDESSDDEIDYSSLFKGLDRTKVDKINELIDALNEKDRLLEKQEDLLYEEHDKFVEAQKSYALEVKRNEVLSSELSSCHETIATLKSVNDDLKAKLEVASKSNSCVEHVEICTRCKDFDVDACSDHLVSISKLTEELASLNAQLKTSKNEFEKLKFARDAYTVGRHPSIKDGLGFKREVKNLTSHKAPISAKEKGKAPMSSSAKKNHAFMYHDKRQIRNAYRSYNAYDDFDSHDMFASSSFYVHDRNVGRRNVVHNTPRKNVVNVYASGGSSWIIDSGCTNHMTGEKKMFTSYVKNKDSQDSIIFGDGNQGKVKGLVESLGYNLLSVSQLCNMGYNCLFTNVDVSVFRRSDGSLAFKGVLDGKLYLVDFAKEEAGLDACLIAKTSMGWLWHRRLAHVGMKNLHKLLKGEHVIGLTNVQFEKDRPCAACQAGKQVGGAHHNKNVMTTSRPLELLHMDLFGPVAYLSIGGMYHG

SEQ ID NO: 292329 - protein, 255 aa, Zea mays
  Clone ID: MRT4577_29690C.1.pep
PSSPPLPPLSTSPPSELAGGLFARLVRKAAVGRFGVSWLAAAVACARAHANGGGIAVLQRVADRFGKHGGGGDEQQGESGAGVAAVAGAGAPELADGLLAAAVWLTRLLFRRVVASPAIALEAGSRRRSRVRCVRGNTRGEEWAMWALVGGGSGIVGGSRPHRPRYGPPSTDLRLGDGCHCGVHVGAQRRRCARRQLVSMSRVPGPVAVAQAGFSSGEWAVWRTRQGVPWFHVPNRKGRQPALALRAAAAAGTVP

SEQ ID NO: 292330 - protein, 70 aa, Zea mays
  Clone ID: MRT4577_29691C.1.pep
AGDSDPEDAAEDFETVTNGLAHSALDLVMPAIGKSEKPHPREKGICLLLEALAKEIPPYELLSAMGAAVN

SEQ ID NO: 292331 - protein, 115 aa, Zea mays
  Clone ID: MRT4577_29692C.1.pep
TGDAAVSLSLPLHHAHAHGPRPLPHPAPHHLHCAVPLRHHATSASAVTAPSPKPDVQAPSIGPLNPGLGGPRPTRSAPAGGRFFKRAGTGYPGTLAHPCLRSGTPRRAERQARAL

SEQ ID NO: 292332 - protein, 83 aa, Zea mays
  Clone ID: MRT4577_29693C.1.pep
RCRADPCCLRLEVVNVRQHGNSVMVPRWAGGNKSECLKVLVYVHLKYLNLYACLVLVSAITRASCHRPVPGWVIPQNVLKNNQ

SEQ ID NO: 292333 - protein, 133 aa, Zea mays
  unsure (1)..(133): unsure at all Xaa locations
  Clone ID: MRT4577_29694C.1.pep
KANTXXLECVXGMFKEDQHRGNSWSPLLSLPLCPMNTXGLQKPYWDQXKKLXRKYSIADERVLVLKSQLLFMPMMTLILQSKTIFLEGXIIWVGERRQPVTEILRAKDVARGACGGLMSRCAGFPSTGAHWLA

SEQ ID NO: 292334 - protein, 91 aa, Zea mays
  unsure (1)..(91): unsure at all Xaa locations
  Clone ID: MRT4577_29695C.1.pep
MVIVLVVCLALSAXANASGCEIPCPCAALQGLYGADAXLTTMMGAIGLDPYAEYLGQPQCNPLAAGPYYAGCGQPNAXLFHPLQQQCWQHQ

SEQ ID NO: 292335 - protein, 52 aa, Zea mays
  Clone ID: MRT4577_29696C.1.pep
KKKKKNKKKKRKQKTKRRKKKKKKKKKKKKYTKKKKKKKGGAPQLLISSPRK

SEQ ID NO: 292336 - protein, 382 aa, Zea mays
  Clone ID: MRT4577_29697C.1.pep
MQQMAMPSFAVTSPPSHGTTLWAPHARRPQRLHRRHVRSQVRAVAQAQLQYQKLGDSDLLISEVTLGTMTFGEQNTEKEAHDIIAYSFDQGVNILDTAEIYPVPMNKETQGRTDLYIGRWMQSKPRDKIILATKVAGYSERSTFLRDNAKVVRVDAANIKESIEKSLKRLSTDYIDLLQIHWPDRYVALFGEFSYNPTKWRPSIPFEEQLKALQELVDEGKVRYIAISKSIQYSYSLLGTCRFEVDLVEVCHPNNCNVGLLAYSPLAGGVLTGKYLDANADISKSRLNLFPGYMARYNDSLAKEATLEYVKLAKKHGLTPVQLALGFVRDRPFTASSIIGATTMEQVKENIDAFTSTPRPLPQEVLDGIEDLFKRYKDPAIL

SEQ ID NO: 292337 - protein, 283 aa, Zea mays
  Clone ID: MRT4577_29698C.1.pep
NKETQGRTDLYIGRWMQAKPRDKIILATKVAGYSERSTFLRDNAKVVRVDAANIKESIEKSLKRLFTDYIDLLQIHWPDRYVALFGEFSYNPTKWRPSIPFEEQLKALQELVDEGKVRYIGVSNETSYGVMEFIHAAKAQGLPKIVSIQNSYSLLVRCRFEVDLVEVCHPNNCNVGLLAYSPLAGGVLTGKYLDANADISKSRLNLFPGYMARYNDSLAKEATLEYVKLAKKHGLTPVQLALGFVRDRPFTASSIIGATTMEQVKENIDAFTSTPRPLPQEVL

SEQ ID NO: 292338 - protein, 62 aa, Zea mays
  Clone ID: MRT4577_29699C.1.pep
YLGRLLFVPIFPIPNRPVLFFSFQHLIILNGAWYSTLCVAKTPAFPKFFPRGDHPPFPAPYK

SEQ ID NO: 292339 - protein, 1361 aa, Zea mays
  unsure (1)..(1361): unsure at all Xaa locations
  Clone ID: MRT4577_2969C.1.pep
MDPKGKGIVINDKEKESFVNEPREDMSNDSGSGHIRKDGKKKKTRRIKEIVYYDSDESTSSQKDDDHNEYERKKPVNSNFSFDYSRIPQSTNAHLLSIPLGKPPHFDGEDYGFWSHKMRSHLFSLHPSIWEIVESGMHFDSTDSPMFINEQIHKNAQATTVLLASLCRDEYHKVSGLDNAKQIWDTLKISHEGNDVTLLTKMELVEGELGRFAMIRGEEPTQTYNWLKTLINKIRSYGSTRWTDHDVVRLMLRSFTVLDPHLVNNIRENPRYTKMSPEEVLGKFVSGRMMIKEARYVDDALNGPIHEPQPTALKATRSKEALPSKVAQVEAAGLNNEEMALIIKRFKTALKGRKGQPSKTKTKEKRSCFKCGKIGHFIANCPDNESDQEKGNKREKKKHYKKAKGEAHIGKEWDSDCSSSDSDNEGLATTAFNKSSLFPNERHTCLMAREKKVSTHDTSTYASSSEDESSDDDEIDYSCLFKGLDRSKINKINELIDALNDKNRLLEKQEDLLYEEHDKFVSAQNSLALEIKRNEILSSELSTCHESISKLKSVNDDLNAKLEIASKSTSCVEIVETCNRCKDFDIDACSEHLVLISKLNDELSSLNAQLKTSKSNFDKLKFARDAYTIGRHPSIKDGLGYKKEAKNLTSHKAPISAKEKGKAPYGYSSYVHDRNVGRRNVVHNMPRRNVVNRKVYASGGSSWIIDSGCTNHMTGEKKMFTSYVKNKDSQDSIIFGDGNQGKDKSENQGTLKRFLRRAQDEFELKVKKIRSDNGSEFKNLQVEEFLEEEGIKHEFSAPYTPQQNGVVERKNRTLIDMARTMLGEFKTPERFWSEAVNTACHAINRVYLHRILKKTSYELLTGNKPNVSYFRIFGSKCYILVKKGRNSKFAPKAVEGFLLGYDSNTKAYRVFNKSSGLVEVSSDVVFDETNGSPREQVVDLDDVDEEDVPTAAIHTMAIGDVRPQEHLEQDQPSSSTMVHPPTQGDEQVPQVEAHDPGGAQDVQVEEEEAPQAPLTQVRATIQRDHPVDQILGDISKGVTTRSRLVNFCEHYSFVSSIEPFRVEEALLDPDWVLAMQEELNNFKRNEVWTLVPRPKXNVVGTKWVFRNKQDDHGVVTRNKARLVAKGYAQVAGLDFEETFAPVARLESICILLAYAAHHSFRLYQMDVKSAFLNGPIKEEVYVEQPPGFEDERYPDHVCKLSKALYGLKQAPRAWYECLRDFLIANAFKVGKADPTLFTKTCDGDLFVCQIYVDDIIFGSTNQKSCEEFSRVMTQKFEMSMMGELNYFLGFQVKQLKDGTFISQTKYTQDLLKRFGMKDAKPAKTPMGTDGHTDLNKGXRPDIMLSVCMCARFQSDPKECHL

SEQ ID NO: 292340 - protein, 85 aa, Zea mays
  unsure (1)..(85): unsure at all Xaa locations
  Clone ID: MRT4577_296C.1.pep
DLAKVQRSVCMISNSPSVVEVFSRIAPKFALMYAKRAFVHWYVGEGMEKGXFLXAREDLAALEKDYKEVGPEFHEGEDGPEGAEY

SEQ ID NO: 292341 - protein, 60 aa, Zea mays
  Clone ID: MRT4577_29700C.1.pep
KNPFCCPMYQKKKFFYLLRGPLPIDGIVGYNPAPIFWSWGQANELNQWLVLFNKNNFSLP

SEQ ID NO: 292342 - protein, 76 aa, Zea mays
  Clone ID: MRT4577_29701C.1.pep
YEDTSCDIIIKSLNPFAPRITLTIILQRALQVPALSTANLDGYPHNLIVTTVRSGANPLPDKVGLFSKHKTTHCTT

SEQ ID NO: 292343 - protein, 149 aa, Zea mays
  unsure (1)..(149): unsure at all Xaa locations
  Clone ID: MRT4577_29702C.1.pep
MHGTRCATTAHTRVARATAHLMPLLTHARVLYHTICSTCRQWMGNLXLSRCCCMSRVLRCXPASSRLLKGTVRMCTNSTPGAKRWNTGELPRAPSKLQRASSVPQNRCAPCPRPLHPLKQITSPGEPYHKSCFKSSDRLCMHATYYYAG

SEQ ID NO: 292344 - protein, 61 aa, Zea mays
  Clone ID: MRT4577_29703C.1.pep
VRVVSNINAFLHQQQLVPFYPQNVANIVAFFQQQQLLPFSQHALLNRTPLLQPFSIGGAIF

SEQ ID NO: 292345 - protein, 105 aa, Zea mays
  Clone ID: MRT4577_29704C.1.pep
SIAPCSHSNCSSSCLLRMRIRDSSTASSSILSTPMDSCLCARHIAYYNHVKKRPLIRRPDYIHGCFLSVADSAASIPESADSKPSVDVAKTALGTCTTLIIKKRT

SEQ ID NO: 292346 - protein, 115 aa, Zea mays
  Clone ID: MRT4577_29705C.1.pep
ACHCCNSTCLHTTITSIVSRPFLTFAAWTGVAARTAPVGGVASASADQSASVPLLGAALSPTSAATSSTSRVYCDRLRRRVSDHLSPEYILSPAVRLTCMHFGFGSIDHSIVGVP

SEQ ID NO: 292347 - protein, 60 aa, Zea mays
  unsure (1)..(60): unsure at all Xaa locations
  Clone ID: MRT4577_29706C.1.pep
GPGRPTRXGPIVITGYLFLTSHLPPPPRGAFMQNWAAYSYNTRICPIPPYTRSDALNQCV

SEQ ID NO: 292348 - protein, 278 aa, Zea mays
  Clone ID: MRT4577_29707C.1.pep
MDPNPRAPLLLAIVVLALGVSVVASAEDDASGVSLGRRAGGFLHGLKKDALAEGDHGVALDEVGPGLFDALFASLSMILVSEIGDETFIIAALMAMRHPKSIVLSGALSALYVMTVLSTGLGRIVPNLISRKHTNSAATVLYLFFGLRLLYIAWKSDPKGSQKKEMEEVEEKLESGQGKSTIRRFFARFCTPIFLEAFILTFLAEWGDRSQIATIALATHKNAIGVAVGASLGHTVCTSLAVVGGSMLASKISQRTVATIGGVLFLGFSVSSYFYPPL

SEQ ID NO: 292349 - protein, 106 aa, Zea mays
  unsure (1)..(106): unsure at all Xaa locations
  Clone ID: MRT4577_29708C.1.pep
MKRCLCSNVEEETVSLVVMSATIRTVLSLAHSQDWPIHPLDVKNAILHGTVSETMYCSQPSGFVDPAHLDXVCRLTKSHYGLKQASRAWYNHFATYVQSISFVEAL

SEQ ID NO: 292350 - protein, 70 aa, Zea mays
  Clone ID: MRT4577_29709C.1.pep
LSTGRTWAIEDARFSRRSPMVHAHAMDTLTEKDLIQTLLYGKMNTVTANNVHLIDTEILHLCVTCQEILL

SEQ ID NO: 292351 - protein, 1751 aa, Zea mays
  Clone ID: MRT4577_2970C.1.pep
MDPKGKGMVVNNNEKESIFNEPKDDKPTDSGSSHKRKDGKKKKTRRIKEIVYYDSDESSSSQKDDDDYEKKKTVNSNFSFDYSRIPQSTNAHLLSIPLGKPPHFDGEDYGFWSHKMRSHLFSLHPSIWEIVESGMHFDSTDSPMFINEQIHKNAQATTVLLASLCRDEYHKVSGLDNAKQIWDTLKISHEGNDVTMLTKMELVEGELGRFAMIRGEEPTQTYNRLKTLVNKIRSYGSTRWTDHDVVRLMLRSFTVLDPHLVNNIRENPRYTKMTPEEILGKFVSGRMMIKEARYVDDALNGPINEPQPLALKATRSKETLPSKVAQIEAARLNDEEMALIIKRFKTALKGRKGQPSKTKTKGKRSCFKCGKLGHFIANCPDNDSDQDQGNKREKKKNYKKAKGEAHLGKEWDSDCSSSDSDNEGLAATAFNKSSLFPNERHTCLMAREKKVCTRNSTYASSSEDESSDEDEIDYSCLFKGLDRTKVDKINELIDALNDKNRLLEKQEDLLYEEHDKFVEAQKSHALEVKRNEMLSCELSSCHETISNLRSINDDLNAKLEIASKSTSCVEIVATCNRCKDFDIDACSEHLVSISKLNDELASLNAQLKTSKSEFDKLKFARDAYTIGRHPSIKDGLGFKREAKNLTSHKVPIPAKEKGKAPMASSTKKNHAFMYHNTRHARNDYRSYDSHAMFASSSSYMHDRDMSRRYVHHVPRKNIVHVSRKVMDGPSTIYHALNASFTICRKDRKIVARKLGAKCKGDKTCIWVPKTIVTNLVGPNKSWGYASGGSSWIIDSGCTNHMTGEKKMFTSYVKNKDSQDSIIFGDGNQGKVKGLGKTAISNEHSISNVFLVESLGYNLLSVSQLCNMGYNCLFTNVDVSVFRRSDGSLAFKGVLDGKLYLVDFAKEEAGLDACLIAKTSMGWLWHRRLAHVGMKNFHKLLKGEHVIGLTNVQFEKDRPCAACQAGKQVGGAHHSKNVMTTSRPLELLHMDLFGPVAYLSIGGSKYGLVIVDDFSRFTWVFFLQDKSETQGTLKRFLRRAQNEFELKVKKIRSDNGSEFKNLQVEEFLEEEGIKHEFSAPYTPQQNGVVERKNRTLIDMARTVLGEFKTPECFWSEAVNTACHAINRVYLHRLLKKTSYELLTGNKPNVSYFRVFGSKCYILVKKRRNSKFAPKAVEGFLLGYDSNTKAYRVFNKSSGLVEVSSDVVFDETNGSPRDQVCDFDDVDEEEVPTAAIRTMAIGDVRPQEQDEQDQPSSSTMVHSPTQDDEQVLAMQEELNNFKRNEVWTLVPRPKQNVVGTKWVFRNKQDEHGVVTRNKARLVAKGYAQVAGLDFEETFAPVARLESIRILLAYATHHSFRLFQMDVKSAFLNGPIKEEVYVEQPPGFEDERYPDHVCKLSKALYGLKQAPRAWYECLRDFLIANAFKVGKADPTLFTKTCDGDFFVCQIYVDDIIFGSTNKKSCEEFSRLNYFLGFQVKQLKDGTFISQTKYTQDLLKQFGMKDAKPAKTPMGTDGHTDLNKGGKSVDQKAYRSMIGSLLYLCASRPDIMLSVCMCARFQSDPKECHLVAVKRILRYLVAMPCFGIWYPKGSTFDLIGYSDSDYAGCKIDRKSTSGTCQFLGRSLVSWNSKKQTSVALSTAEAEYVAAGQCCAQLLWMRQTLRNFGYNLSKVPLLCDNESAIRMAENPVEHSRTKHIDIRHHFLRDHQQKGDIEVFHVSTENQLADIFTKPLDEKTFCRFRSELNVLDSRNLD

SEQ ID NO: 292352 - protein, 144 aa, Zea mays
  unsure (1)..(144): unsure at all Xaa locations
  Clone ID: MRT4577_29710C.1.pep
LSSPKRLYGYPPLANFSAGEFYFDGLRKPGNTIQTXGFVPTQTNVEQVXGENMLNVSLVRIYYAPGCQKTSHTHPRAMEIIFYLKNTLDVGXFVTTDNGVFTXSVTKVYVFLFTRXGIDNFQNNLRIQAPSYEATTSTVQTSCA

SEQ ID NO: 292353 - protein, 210 aa, Zea mays
  unsure (1)..(210): unsure at all Xaa locations
  Clone ID: MRT4577_29711C.1.pep
MDPNPRAPLLLAIVVLALGVSVVASAEDDASGVSLGRRAGGFLHGLKKDALAEGDHGVALDEVGPGLFDALFASLSMILVSEIGDETFIIAALMAMRHPKSIVLSGALSALYVMTVLSTGLGRIVPNLISRKHTNSAATXVEEKLESGQGKSTIRRFFARFCTPIFLEAFILTFLAEWGDRSQIATIALATHKNAIGVAVXASLGHTVCT

SEQ ID NO: 292354 - protein, 567 aa, Zea mays
  Clone ID: MRT4577_29712C.1.pep
ARVGKKAGGKSRARAEEKRAEKKSAQKKLARGRIAWRVQRRKKRAEKSAWRAQRRKKRAEKSAAENRRAEKKSAQRRKGRAQRRKGRAPEKKIDPCLLISCTRDFLLSIRGLGLKSVECVRLLTLHHMAFPVDTNVGRICVRLGWVPLQPLPESLQLHLLEMYPMLEHIQKYLWPRLCKLDQRTLYELHYQMITFGKVFCTKSKPNCNSCPLRAECKHFASAFASARLALPAPEEKRLATSEDPNVVEFCHQTYINSGAVGELEWSANYPKHAVCGNLQPFIEEPLSPEPEPENVEAKDGAIEDFFNEDPDEIPTINLNIEEFTQNLKNYMQANHVEIEYADMSKALVAITPEAASIPTPKLKNVSRLRTEHQVYELPDSHPLLEGFEQREPDDPCPYLLSIWTPGETAQSTNAPKTFCDSGETGQLCGSLTCFSCNSLREMQAQKVRGTLLIPCRTAMRGSFPLNGTYFQVNEVFADHCSSQNPIDVPRSWIWDLPRRTVYFGTSVPTIFRGLTTEEIQQCFWRGFVCVRGFDRTVRAPRPLYARLHFPASKVVRGKKPGAASVEE

SEQ ID NO: 292355 - protein, 278 aa, Zea mays; identical to SEQ ID NO: 292348
  Clone ID: MRT4577_29713C.1.pep

SEQ ID NO: 292356 - protein, 263 aa, Zea mays
  unsure (1)..(263): unsure at all Xaa locations
  Clone ID: MRT4577_29714C.1.pep
INLNIEEFTQNLKDYMQANNVEIEYADMSKALVAITPDAASIPTPKLKNVNRLRTEHQVYELPDSHPLLEGXETAQSIDAPKTFCDSGETGRLCGSSTCFSCNNIREMQAQKVRGTLLXFALSLINFYVLGIIYIYTKSAHCLDKFXQIPCRTAMRGSFPLNGTYFQVNEVFADHCSSQNPIDVPRSWIWDLPRRTVYFGTSVPTIFRGLTTEEIQRCFWRGFVCVRGFDRTVRAPRPLYARLHFPVSKVVRGKKPGAARAEE

SEQ ID NO: 292357 - protein, 608 aa, Zea mays
  Clone ID: MRT4577_29715C.1.pep
MKGFRIRPCVITRTLVWWCCKELLQNSTHKLVDTQKWPSKARQIGSKAKKVRGRPKTKTYDWDSLRKEVFSNGGDKQRNNDARDTVDWEAVRQAEVREISETIRERGMNNMLAERIKEFLNRLVTDHGGIDLEWLRDVPPDKAKDFLLSIRGLGLKSVECVRLLTLHHMAFPVDTNVGRICVRLGWVPLQPLPESLQLHLLEMYPMLEHIQKYLWPRLCKLDQRTLYELHYQMITFGKVFCTKSKPNCNSCPLRAECKHFASAFASARLALPAPEEKRLATSEDPNVVEFCHQTYINSGAVGELEWSANYPKHAVCGNLQPFIEEPLSPEPEPENVEAKDGAIEDFFNEDPDEIPTINLNIEEFTQNLKNYMQANHVEIEYADMSKALVAITPDAASIPTPKLKNVNRLRTEHQVYELPDSHPLLEGFEQREPDDPCPYLLSIWTPGETAQSIDAPKTFCDSGETGRLCGSSTCFSCNNIREMQAQKVRGTLLIPCRTAMRGSFPLNGTYFQVNEVFADHCSSQNPIDVPRSWIWDLPRRTVYFGTSVPTIFRGLTTEEIQRCFWRGFVCVRGFDRTVRAPRPLYARLHFPVSKVVRGKKPGAARAEE

SEQ ID NO: 292358 - protein, 101 aa, Zea mays
  Clone ID: MRT4577_29716C.1.pep
ISAIIGLDQPICCNRLSQSEVAFVHLEVSFFQPIWLQLSLPIGGRVIKKNIYFGGLRGFCGHSDVVSIHASWFRFFQGLCSRHLDLRLALASFASGSCAVM

SEQ ID NO: 292359 - protein, 81 aa, Zea mays
  Clone ID: MRT4577_29717C.1.pep
LHGKKIFCGFDHTITKSSFSTCLEEFLWRTHGILSPVSNNNNNNAFYSQASRDRLELKHNKIHKSRFRHMNRYFLCTQIQG

SEQ ID NO: 292360 - protein, 217 aa, Zea mays
  Clone ID: MRT4577_29718C.1.pep
MAFSSSLAPFFPPSGTFRAHPARRLRADAPGRFVASCLPPPDVVVTREQGKNARLISALEKHNVHPLELPLIKHVEGPDTDRLLDVLRNDKFDWIIVTSPEAAAVFLQGWKAAGSPKVRVAVVGEGTARVFHEVSESDDQSLELAFSPSKALGKVLASELPRSNRNSCKVLYPASAKAGHEIEDVLSERGFDVTRLNTYTTVGIVSLVWGYCFFSTL

SEQ ID NO: 292361 - protein, 77 aa, Zea mays
  Clone ID: MRT4577_29719C.1.pep
RGRKRPTIPGPLALGPPGTTKKREGARISPHGRRAPPLVYYRSRPLGCNLLAPPKKECLLGKKKVFCSVKNKIWGWD

SEQ ID NO: 292362 - protein, 1647 aa, Zea mays
  Clone ID: MRT4577_2971C.1.pep
MDPKGKGIVINDKEKESFVNEPKDDKPTDSGSGHRRKEGKKKKTRRIKEIVYYDDSDESSSSQKDNDDNDYDKQKTVNSNFSFDYSRIPHSSNAHLLPIPLGKPPHFDGEDYGFWSHKMRTHLFSLHPSIWEIVESGMKFDSSDSPSFINEQIHKNAQATTVLLASLCRDEYHKVSGLDNAKQIWDTLKISHEGNDVTLLTKMELVEGELGRFAMIRGEEPTQTYNRLKILINKIRSYGSTRWTDHDVVRLMLRSFTVLDPHLVNNIRENPRYIKMSPEEILGKFVSGRMMIKEARYVDDALNGPIHEPQPIALKATRSKEALPSKVAQIEAAGLNDEEMALIIKRFKTALKGRKGQPSKTKTKGKRSCFKCGKLGHFIANCPDNDSDQEHGSKREKKKHYKKAKGEAHIGKEWDSDCSSSDSDNEGLAATAFNKSSLFPNERHTCLMAREKKVCNQNNVTYDSSSDDESSDDEIDYSSLFKGLDRTKVDTINELIDALNEKDRLLEKQEDLLYEEHDKFVEAQKSYALEVKRNEVLSSELSSCHETIATLKSVNDDLNAKLEVASKSNSCVEHVEICTRCKDFDVDACSDHLVSISKLNEELASLNAQLKTSKNEFDKLKFARDAYTIGRHPSIKDGLGFKREAKNLTSHKAPIPAKEKGKAPMASSVQKNHAFMYHDRRQTRNAYRSFNAYDDFDFHAMFASSSSYMHGRNMSRKNAIHHMPRKNVIHAPRKVVNEPSIIYCALNASFAICRKDRKIVARKLGAKCKGDKTCIWVPKDICTNLVGPNMSWVYASGGSSWIIDSGCTNHMTGEKKMFTSYVKNKDSQDSIIFGDGNQGKIKGLVESLGYNLLSDKSETQGTLKRFLRRAQNEFELKVKKIRSDNGSEFKNLQVEEFLEEEGIKHEFSAPYTPQQNGVVERKNRTLIDMARTMLGEFKTPECFWTEAVNTACHAINRVYLHRLLKKTSYELLTGNKPNVSYFRVFGSKCYILVKKGRNSKFAPKAVEGFLLGYDSNTKAYRVFNKSSGLVEVSSDVVFDETNGSPREQVVDCDDVDEEDVPTAAIRTMAIGEVRPQEQDKRDQPSSSTMVLPPTQDDEQVHQQEACDQGGAQDDNVMEEEAQPTPPTQVRAMIQRDHPVDQILGDISKGVTTRSRLVNFCEHYSFVSSIEPFRVEEALLDPDWVLAMQEELNNFKRNEVWTLVPRPKQNVVGTKWVFRNKQDEHGVVTRNKARLVAKGYAQVAGLDFEETFAPVARLESIRILLAYAAHHSFRLYQMDVKSAFLNGPIKEEVYVEQPPGFEDERYPDHVGKADPTLFTKTCDGDLFVCQIYVDDIIFGSTNQKSCEEFSRVMTQKFEMSMMGELNYFLGFQVKQLKDGTFISQTKYTQDLLKRFGMKDAKPAKTPMGTDGHTDLNKGGKSVDQKAYRSMIGSLLYLCASRPDIMLSVCMCARFQSDPKECHLVAVKRILRYLVATPCFGLWYPKGSTFDLVGYSDSDYAGCKVDRKSTSGTCQFLGRSLVSWNSKKQTSVALSTAEAEYVAAGQCCAQLLWMRQTLRDFGYNLSKVPLLCDNESAIRMAENPVEHSRTKHIDIRHHFLRDHQQKGDIEVFHVSTENQLADIFTKPLDEKTFCRLRSELNVLDSRNLD

SEQ ID NO: 292363 - protein, 63 aa, Zea mays
  Clone ID: MRT4577_29720C.1.pep
NIRVIGSIRLFMDHLDYLYYFWILNYFWITQINYVLLALFWIIHINLWIIIFYDIIFLESSSG

SEQ ID NO: 292364 - protein, 72 aa, Zea mays
  Clone ID: MRT4577_29721C.1.pep
RDEAHPSMGAKAAHRRAVLDLEAQFTFFRSHDRHPVNAARKLVLYMCILFTNLLFFALLSMNCAMTMLELNR

SEQ ID NO: 292365 - protein, 91 aa, Zea mays
  Clone ID: MRT4577_29722C.1.pep
MANEQERMSKVQYDSVIGSNMWGEIKICKIHTDLNVVDPLTKPLPQPKYEAHIRYTDKGSCYAYKNCDGAVVYGCRNIGDAPSVPLLRRLA

SEQ ID NO: 292366 - protein, 102 aa, Zea mays
  unsure (1)..(102): unsure at all Xaa locations
  Clone ID: MRT4577_29723C.1.pep
RKGASFLRLQPMPMIFVSCAPKRFPPPTVCXFVKKQLALPAHTEVCGARNFFELGAVSLDAVGIVLSLAAPFVISVEESSALPFPPFGAPPALFVQLVAGQA

SEQ ID NO: 292367 - protein, 99 aa, Zea mays
  unsure (1)..(99): unsure at all Xaa locations
  Clone ID: MRT4577_29724C.1.pep
MLRCWVIMDGVTADEARLSEEVGAGAAMALEWVRAGVRAHGSVGRMLDPALIRSIKGAVSMPVMGKARIGRCSEVXILEGGDVEFMDKSVEVTPVEDAQ

SEQ ID NO: 292368 - protein, 145 aa, Zea mays
  Clone ID: MRT4577_29725C.1.pep
MSALLTNKPLLGPLVGLNVWTFAIEVLLYKRRIPALSKYGVTFDPATVKKQKAEKLPAFVQWPADNFNNLLEQPTQFYAVVLGLSFLDVKDKRTVGLAWAYVGLRVVHSLIHVSTNNPSIRFPVWLASSFAVAGLTAQAAWKLLF

SEQ ID NO: 292369 - protein, 73 aa, Zea mays
  Clone ID: MRT4577_29726C.1.pep
RIQEHQQKRQRRLSFLLGNLPALRSIRPRMKSDNQGDATRHTISNTPPTTLRGPRSQVPSAPNHARGHVESPE

SEQ ID NO: 292370 - protein, 617 aa, Zea mays
  unsure (1)..(617): unsure at all Xaa locations
  Clone ID: MRT4577_29727C.1.pep
MAEHAGPEDFAVESESSYATEDDEFNNVTGLDSPVTRVWESKSKGNATLSHIHHPLESPGFHRAKKNRSHVGKLKMSRTSSGRKRSRSXSEASYLARSGEILXSVGDSMDILNTSANDLKTHELDEDPEVESMARMFSSSNTSSLLLPSSDSAYSSNYCGANVLQDSYLKLRCEVVGASIVKSGSGMFAVYSISVTDANGNSWSIKRRFRHFEDLHRRLKEYAQYNLHLPPKHFLSSGLEVSVVRERCKLLDIYLKNLLQIPIVSSCIEVWDFLSVDSQTYIFTDTLSVIQTLSVSLDERSNGKNIKALNSSGALNGNSISGGQSLHGHIDDTVHKDSDIACDGLRFRKGNVNKNLGNGVSHTTDSVSNTTANHYQDNSGSDPEQNDHSFSIDSLNPKKLRSTETNDTSQIPESGGFSVSPNDWMAPNLSVPLFHLVDVVFQLQDGGWIRRQAFWVAKQILQLGMGDTFDDWLVDKIQLLRKGRIIAFAVKRIEQILWPDGIFMTKHPKRNSPPPPPGAQSNGMGNYLSDEQRIEAAHRANFVRELIIDKAPSPLVSLVGRKDYERCAHDIYFFLQSPVCLKQLAFELLELLVLSSFPELDGTVRKWHEDKEQFCAQ

SEQ ID NO: 292371 - protein, 149 aa, Zea mays
  unsure (1)..(149): unsure at all Xaa locations
  Clone ID: MRT4577_29728C.1.pep
AFDYNTLMRGHVSGGGGDRDPAAALRLYIDGLEAGVSPDSYTFPFVLKACAQLAALQXGRQLQAHIVKLGFQHDEHVQNSLISFYGKCGAPAMARLAFDRVEAEERTTVSWSALLAAYTKAGLWGECLASFGSMMLDGWRPDESSMVSA

SEQ ID NO: 292372 - protein, 213 aa, Zea mays
  unsure (1)..(213): unsure at all Xaa locations
  Clone ID: MRT4577_29729C.1.pep
QACAQLAALQEGRQLQAHIVKLGFQHDEHVQNSLISFYGKCVEPAMARLAFDRVEAEERTAASWSALLAAYTKAGLWGECLESFGAMVLDGWRPDESSTVSALSACAHLGAFDVGRSLHCALLRNTARLNTIMQTSLVDMYAKCGSIEKAAAVFDAMDDKNAWTYSAMLSGLALHGDGRKALAVFDAMVRERHAPDAATYXXVLNACSRAGLL

SEQ ID NO: 292373 - protein, 80 aa, Zea mays
  Clone ID: MRT4577_2972C.1.pep
FSNPSQHNLFKPLFPPILYPRVFVFVFLKSCPVRVFITTQSWSVPPSSWSAQALFYQAVFVKFTPSKKKRKKKNKNHNPI

SEQ ID NO: 292374 - protein, 103 aa, Zea mays
  unsure (1)..(103): unsure at all Xaa locations
  Clone ID: MRT4577_29730C.1.pep
HTCLSIPNGRSELAGXEVSWGLARFAGMXQDNGLVPIVEPQILLDGEHRMNRTLEVAQNXWPXTFYAMAENNVLYEGILLKPSMVTPGAEANDRATPEQVAAY

SEQ ID NO: 292375 - protein, 106 aa, Zea mays
  unsure (1)..(106): unsure at all Xaa locations
  Clone ID: MRT4577_29731C.1.pep
HGVPPHGVRPHGVRPXASAXXRGGRHLNPXXLIXXASQILXYHLAXASXAANRXLPFLDTATXLLPFLPASXAANXPQPPSYNXXTXLLXXLVQXXLLTXXPAAPP

SEQ ID NO: 292376 - protein, 62 aa, Zea mays
  Clone ID: MRT4577_29732C.1.pep
LVITRKGVEEPSEVKFFQDACNDGPQNLLIFSLIWTEEPFLFTDSFVKAVLHHIEGKPYPCH

SEQ ID NO: 292377 - protein, 107 aa, Zea mays
  unsure (1)..(107): unsure at all Xaa locations
  Clone ID: MRT4577_29733C.1.pep
GVSASVLGAFGGSSAVVGILATFVTPYLVKELGILKAGAAGLVPQSALLGAAVVVFXSLAPSHGGALFAFLGFIVRPPATHRHSLFSSRRGLSSYVRAELDRRTSTS

SEQ ID NO: 292378 - protein, 46 aa, Zea mays
  Clone ID: MRT4577_29734C.1.pep
MNVEKLKKMARAVRTGRKGSMRRKMKAVHKTTTTDDKRLQSTLRRI

SEQ ID NO: 292379 - protein, 100 aa, Zea mays
  Clone ID: MRT4577_29735C.1.pep
MASPRRIPSVPARSGNKENISQDGDAPLDFATLPKEGPATTRRKKKLAGFNLRKSIAWNPAFLTEKGVLDNSELSVLTGFQPMANRSLGSSIRSIMSPSC

SEQ ID NO: 292380 - protein, 124 aa, Zea mays
  unsure (1)..(124): unsure at all Xaa locations
  Clone ID: MRT4577_29736C.1.pep
MRSPGRRLRLPAPSRLVAAALLLAALTGGAVGADGYGRARRVYMKNKVLEMFYHAFDNYMTYAFPHDELKPLTKSFTDSLSELGNLNLEHLPQDYSGSALTLVDAISSDVGVGNLPEFEXGVLW

SEQ ID NO: 292381 - protein, 160 aa, Zea mays
  unsure (1)..(160): unsure at all Xaa locations
  Clone ID: MRT4577_29737C.1.pep
FFFFFFTPLQEDWVLCRVFYKSRTASTRPAAGPDEAGPLSSQLIGGLPMPXWPPLLTPPTCPSXVTPAAGGYYHHQDSGPADARHHLPPPPAQPFSRSSLSSLRDLLSSMVEGSDAAAAVRETELHLQLEGWTEAAYAQQQGGAMPAHPQQTWSPFLSSG

SEQ ID NO: 292382 - protein, 69 aa, Zea mays
  Clone ID: MRT4577_29738C.1.pep
SRLMLNQPWSEYTTLLLWTLCPAGLGVKETRTRSPLGHCSRRYELTAPALQRHISSIGCPEYNSLALYL

SEQ ID NO: 292383 - protein, 71 aa, Zea mays
  unsure (1)..(71): unsure at all Xaa locations
  Clone ID: MRT4577_29739C.1.pep
CVLQALNRKNHKPLFEELLKVKEXGMTQRTCIPEGWTFSMLPCKTLDDEATTKENFVAIGTIHTKVIRLWN

SEQ ID NO: 292384 - protein, 79 aa, Zea mays
  Clone ID: MRT4577_2973C.1.pep
MVDPFAPFRFLVASVASCRQDLVCRCLSRRCGRRSLLGLGGRRRRLRVRWRRWSRWMSRRCGCEMGGLWRRWSWSFSGR

SEQ ID NO: 292385 - protein, 100 aa, Zea mays
  Clone ID: MRT4577_29740C.1.pep
MARGGTAGAGAGGEGRAASEALTADSADEEGRRGSSSSASSDAASSFSCTYSPAPPDEWHKVAIIKTCMGWFGRRRRGPEAARRRRRGRQARRSLDGDDE

SEQ ID NO: 292386 - protein, 106 aa, Zea mays
  Clone ID: MRT4577_29741C.1.pep
NISVRASACGPFPIHWFIDLLGMANGLQLKRGPQRDSWSLGQFTGWNGLKKFLQFPPLEFRQRALVPGEVVRTFPPPAKAGPLPESKGKTIDAWATGIRTDRGVRI

SEQ ID NO: 292387 - protein, 40 aa, Zea mays
  Clone ID: MRT4577_29742C.1.pep
NLLLPSHNTFYHITTNQPIHFNTFLINQHLKPFKKIKTYY

SEQ ID NO: 292388 - protein, 108 aa, Zea mays
  Clone ID: MRT4577_29743C.1.pep
HASARSSNLLFPNKATTRKEGFKNSRRGKRTPANKPNKDHQINHLNSTHLLTIPDFYTSAYAKTYIHNDHSKDYTHQSNMLPLNGQAHPDNYRTSETEPMLAQTISES

SEQ ID NO: 292389 - protein, 88 aa, Zea mays
  unsure (1)..(88): unsure at all Xaa locations
  Clone ID: MRT4577_29744C.1.pep
KTRHRQRGEPGTERHNRKGRXPTERRRAXRENGNEQGNGQGERATRSARRKKAQQQSGRFNREKVWTQTGEMKLDGMLNQQQQGNEAH

SEQ ID NO: 292390 - protein, 134 aa, Zea mays
  unsure (1)..(134): unsure at all Xaa locations
  Clone ID: MRT4577_29745C.1.pep
TLFFFFFCFFPRCFSFFSSFFFFFFFFCFVLCCFLSRHKKLLPWNQPEGAPRKGAPPRGGGGKNPAGGCKQRGAQGTTAGAGKRGPXVGHGGGXATTRGGAKKPTGGPKHXGGXKRTTGGAGTRPGGPDEGYHP

SEQ ID NO: 292391 - protein, 110 aa, Zea mays
  Clone ID: MRT4577_29746C.1.pep
ARASASAAQLDRRYRCRTCALLSYDISVAPQTADRLGIRIVLAALSKTDEYTWSDRETNAQEPCIFEEERHAIFECGRHGNTTIEVLENKMSALETAQDRVVVAKGMDAH

SEQ ID NO: 292392 - protein, 101 aa, Zea mays
  unsure (1)..(101): unsure at all Xaa locations
  Clone ID: MRT4577_29747C.1.pep
MGTPKTAWEPCPNRILDDVXATFGMSSHAXYAFHLIKGIYNCNNWIRMFMGSQAEPMNNASVKGIFNECGSLLSTXNCCIVYARQKEDTWNYIIAGAFTGG

SEQ ID NO: 292393 - protein, 265 aa, Zea mays
  unsure (1)..(265): unsure at all Xaa locations
  Clone ID: MRT4577_29748C.1.pep
LCSFLLLFFLLGTSCVYIYNIYNSSSGATGQAARRGGRAPARVHGSPATPCEGQGCGVGAAGESARAPCCRLLPDALRVELDAGGRPPWRAFALLALLRRSVEEYHVYHSLYDDYVWVERFGDPLLHRHVAVASVWXLIALKLADDEIIPFNYVSYAXQLEECTKDIVDKCKGSPVNFSPLQNSIKQLESAASKIYKEKKLLQAENWSLKTSKHTLKVREINDRLMMAKRAFTNREGMVGRPWYKHMESSEAGEPLVPAARVDAP

SEQ ID NO: 292394 - protein, 140 aa, Zea mays
  Clone ID: MRT4577_29749C.1.pep
MQMAAAVAPTDAPASASAAAAPSRPHAHAAAAVAAASPHPHALHPHHHMPQPRWVVIPYPPPHHPMVAAPPPPSLQFVKHFTPPSSVTPPPPTGSGGNGGEDNRTIWVGDLQYWMDENYLHSCFGSSGEVPSLSQSLLLL

SEQ ID NO: 292395 - protein, 98 aa, Zea mays
  unsure (1)..(98): unsure at all Xaa locations
  Clone ID: MRT4577_2974C.1.pep
MANHFFHGMAALAVEVLVVLGGTASQTASVAFCNAWQLAACAPAITVRATPFGLCCFNLKAQQGCFCQFVKNPNYGRYINNPNARKVVSXCGVFLPRW

SEQ ID NO: 292396 - protein, 308 aa, Zea mays
  Clone ID: MRT4577_29750C.1.pep
MRAGDAFSNYRCRTMSMNYDGDRSEDRQSEEVQSAYKRDSDVGEEMIISSEYFNDENEWSWVNQDRNGDPFAESVSSLHTTQQILENEIRKLSELGKELEAEESTSGNKDQDVILLPYSEADVLELSEKMEHLEQKVKEASNTIREKDLMLSKLQILIGTADRAALEEELEEAAASIDQLETELERHLQEKLEAEIQCLLMLKARQNWQVRAVDQVALEEHRALSAGDKTRMLLKLRETESKIVMLKEQVDKLEVREKELNRTTEVLKMQSRTFRASLFGLVQLVMLCLSLKVFFARVSAPFDEVVPT

SEQ ID NO: 292397 - protein, 97 aa, Zea mays
  unsure (1)..(97): unsure at all Xaa locations
  Clone ID: MRT4577_29751C.1.pep
KKKLEEPPKEALEWLDNNQSAEKGVFEEKLKEVGPFFPPFVSPVYHRSGGPPGGYPSGGFSPAPPNLXMVLNGGGTVESRDPTPIFYRFLPAAKPFS

SEQ ID NO: 292398 - protein, 393 aa, Zea mays
  Clone ID: MRT4577_29752C.1.pep
PAASRLSTLRLLPDWAVSPAALLTVCPALAGLTSLHLTAVRPLSFRWLKLLPRLKSFALVNSAATVDSAGSSSDDADGEAEDVAGTLPLEKLSLCGIRSGDRGLGWLWRRCGSLKWLQLRACDGTGDGPASLAFAGCLAGLLALELRACRAVADRVLLLAADHCRTLTSLLVYDGGGSEALHRFIQQRAAGLHTLDLRLPLDLHNDHLLAIGADSVHNATHGLASLRLQSCVLITGDGLRSLARTAAGAGIEELALVSCDVVEREPGLLTFLSQSMPRLRRLNLSYNETLNDKVIGAMLSSCRNLIDIRLRGCRGLTGGSLLSLLRHCGQSLEILDISRCPGIAVGNVELFAQRAARLNHVIIEESAMSEELKAIAQKKGMKVGSLPCEGGPF

SEQ ID NO: 292399 - protein, 107 aa, Zea mays
  Clone ID: MRT4577_29753C.1.pep
LDSSIHLMSRHWSRLLQTPLLLGVHTFSARTRSFEINMDWKASGGAVHDSVLRQRGTVLTTRGCNCSKRLGHGEVSSWVSVVTRLSVGALSTRAPPSYWLGRGCIST

SEQ ID NO: 292400 - protein, 85 aa, Zea mays
  unsure (1)..(85): unsure at all Xaa locations
  Clone ID: MRT4577_29754C.1.pep
IAEKKQNLDIERPTYTNXLNRLVYQGIISLTASLRCDGALNVDXTEFHTNLVPYPRIHFMLYSHALDISAENAYHEQLYLAEITN

SEQ ID NO: 292401 - protein, 52 aa, Zea mays
  Clone ID: MRT4577_29755C.1.pep
AFMPSTYVTQTDRFLAAEAVTVCPVAPANGDAIPCYDCTKLYSLPVPVCCGS

SEQ ID NO: 292402 - protein, 96 aa, Zea mays
  Clone ID: MRT4577_29756C.1.pep
RHRDPDPVNNCFCRRITRLVTRLHSSTVREPLYLATIEQRNLFKHPHLSKEFSVCLSRIEPLRVKHVLSLLEYAGMEIVPQAGEQRHVIHKSGSTT

SEQ ID NO: 292403 - protein, 178 aa, Zea mays
  unsure (1)..(178): unsure at all Xaa locations
  Clone ID: MRT4577_29757C.1.pep
MEEQQPRPRPSIMFVLSSLAKNNPESVLALIAVLTVVALRHLISSWRQQARLPPSPTSLPVIGHLHLLRPRVHRTFQELASRIGPLMHIRLGSTHCVVXAPPEVASELIRGHEGSISERRXTAVARQFAYDSAGFAFAPYNTHWRFMKXLACXXLLGPRTVEQLRPVRRAGHRVPARR

SEQ ID NO: 292404 - protein, 85 aa, Zea mays
  unsure (1)..(85): unsure at all Xaa locations
  Clone ID: MRT4577_29758C.1.pep
QDSKENASVDYVGGGDDTGXVPAPAQQGPSEAKGKAKSKQHTAEMEERQPVDARVTVEYDHRGVCWVYLSLMPSLAFISYNSFAI

SEQ ID NO: 292405 - protein, 77 aa, Zea mays
  Clone ID: MRT4577_29759C.1.pep
MKPNLSNLSTCHTSRPLCLCEKGDNKRNKIKTAQLTHKKKPMMGRTGGGEVNGGGVPITAAGSSDPGCSHLYLTWAE

SEQ ID NO: 292406 - protein, 76 aa, Zea mays
  Clone ID: MRT4577_2975C.1.pep
TQTQHILPNKINRSLFSGKWSTSRKICFSCILFFKLPQNGESNQKHWCVCKPFFLKTTCSSKQLSDGGRHYRMQPS

SEQ ID NO: 292407 - protein, 71 aa, Zea mays
  Clone ID: MRT4577_29760C.1.pep
SVLTVSTLGVGPPPPMKRSCLGACLKHKFFYFWPFTNLNKNKRENKNIPYKKKKKKKKKGGRRLVSSSTRE

SEQ ID NO: 292408 - protein, 81 aa, Zea mays
  Clone ID: MRT4577_29761C.1.pep
LKRSPNDIHQHLLIRSLRYTMMFISTHTKRAASLLFLHDGYVTKLLLTTTTSVLHVCYCFPFISIRGIHTRILFSCGPPLA

SEQ ID NO: 292409 - protein, 324 aa, Zea mays
  Clone ID: MRT4577_29762C.1.pep
MCPTKPDRPGQAAAGSGEKSWREEAVAACSLRLVDLDRGTNGWASPPGDLFHLRARGYFSSGGGKRGKAPSAADWLLRPAGVDWLRSHARLDHVLARDDNRVAAAFRRARLRKDPSAHFLLAVNLQVPGRPDAYSAVFYFAAEAPIPPDSLLGRFIHGDDAYRNARFKIANRIVKGPWIVRATVGNYAACLLGRALTCRYHKGDDYLEIDVDIGSSAIASAILHLALGAVTSVTIDMGFLVESQSEEELPERLFGAVRIAQMEMSAAKYVELPPDEAMPETAGRAGAGFRVSSAKVVNHSRQQDHAGGKVGRSMSCPERESGGK

SEQ ID NO: 292410 - protein, 124 aa, Zea mays
  Clone ID: MRT4577_29763C.1.pep
INPQHTVPTIVDDGFALWESRAILTYLVNKFAPGHSLYPLDVQKRANVERALNFDGTTLYPAFGAVVYPILHQQIAFNPTSALPLYQKLEILDTLLGQHDYVAGDELSIADLSTLATVSSITAI

SEQ ID NO: 292411 - protein, 230 aa, Zea mays
  Clone ID: MRT4577_29764C.1.pep
GDNIKRGRIWHSSISWRFLGNIHKLRVIEPTSPWETSNKDEFMDMVKLELLDLSGNTTIQFLPSLSGAISLRTLILDGCIELQHVVPETLPPWLETFSFDGGYKQAKISCMTLACCARLVNFRLCGSVQNLEELDLSNTSIKTLDLSDKVVQVPCLERIILLGCERLRAVLWPKDGMPNLMVLGIDTRGGAEAASAKTVHDNFAISKEREEGCRAFVAVMEMRFLSVVGC

SEQ ID NO: 292412 - protein, 93 aa, Zea mays
  Clone ID: MRT4577_29765C.1.pep
GRAGLLQKKPNVFGSAQSHKPGQTRLGFTCEACSPAAAAMGHSNVWNSHPKNYGPGSRVCTAETWGAPKHGNNGSMDGDLKDSLYSYSYDKTM

SEQ ID NO: 292413 - protein, 167 aa, Zea mays
  unsure (1)..(167): unsure at all Xaa locations
  Clone ID: MRT4577_29766C.1.pep
GAKKKKLNPGFYRGIYPPNPRTGTPQFIGPPEKGTQRNFWKGGSHGTPQKLLDWRVQKPGRGGGPTQGNPSRNPXIPIPGXPNGEGPPLRGGPFRLQGEXWVKTPGKNQKHFPPNFWRPGKSQSGGKKKGPPKSGAPGTPENGKGAQRAPGGPKKNGNHPANLLGPP

SEQ ID NO: 292414 - protein, 56 aa, Zea mays; identical to SEQ ID NO: 236257
  Clone ID: MRT4577_29767C.1.pep

SEQ ID NO: 292415 - protein, 56 aa, Zea mays; identical to SEQ ID NO: 236257
  Clone ID: MRT4577_29768C.1.pep

SEQ ID NO: 292416 - protein, 56 aa, Zea mays; identical to SEQ ID NO: 236257
  Clone ID: MRT4577_29769C.1.pep

SEQ ID NO: 292417 - protein, 128 aa, Zea mays
  Clone ID: MRT4577_2976C.1.pep
PVQLQQVTSVRHMPALTRLAAPPALAAPSARRSSLTLPPPPRPPHCSSSWYSGRRSPSRPSATAGGAPRGGPLPEPEELDQLLLTALRAARIRDEESRRSDPLFIDPYAAILLSHDVAHHDMGYLDSH

SEQ ID NO: 292418 - protein, 141 aa, Zea mays
  unsure (1)..(141): unsure at all Xaa locations
  Clone ID: MRT4577_29770C.1.pep
TFGEVFYRMGLNHKEIVALSGGXTLGRARPKRNGWGXSKTKVPKDGPGAPGGQFWAFPWVKVGHSYFKAIEKKPGDPLLVLPTEAGLVEESSIKIYGSKXAKDQDPFFEGYPXGQAQINNFGAKFYPPKGISPQELWKEVA

SEQ ID NO: 292419 - protein, 56 aa, Zea mays; identical to SEQ ID NO: 236257
  Clone ID: MRT4577_29771C.1.pep

SEQ ID NO: 292420 - protein, 89 aa, Zea mays
  unsure (1)..(89): unsure at all Xaa locations
  Clone ID: MRT4577_29772C.1.pep
MATKSLXILALLALIVSATNAIIIPQCSIAPYYIIPQFLLSVTQKAFEHRPVXAYRLQXAIAASXLKPPIAQXXQHSLAHLTIHIICTQ

SEQ ID NO: 292421 - protein, 151 aa, Zea mays
  Clone ID: MRT4577_29773C.1.pep
ISLPRPRFSAAQPRADAPPSCFYLLPNYAARTGTRTKNPISPARPRSNQIPPNRGRGRGRGRGRVTSQPIEKTAEEQEQGESGGGRDRSRRKKTSSVTFLGPHVPVPCRFQQPHREGVPARRGGRETRANLIWPRAPRPRSLTVSTTRQQR

SEQ ID NO: 292422 - protein, 122 aa, Zea mays
  Clone ID: MRT4577_29774C.1.pep
FVRNKQSFSRAEPQKRKPGPDILARFETGPRPVGGSPLVFFFPWVLGTVNPFCIKNLGAKRPKKPVWRNFFLDLGSWHNHHGRVFLAPLTGGGLPVYAKEKHVFFKFLKPPLKPEHGGNHIQ

SEQ ID NO: 292423 - protein, 59 aa, Zea mays
  unsure (1)..(59): unsure at all Xaa locations
  Clone ID: MRT4577_29775C.1.pep
VTIPXLTYTCMPTYGNLKTGKVDQTLSLSGGKTTCIACHPTLTIMNNREGRQNWIRRGC

SEQ ID NO: 292424 - protein, 92 aa, Zea mays
  Clone ID: MRT4577_29776C.1.pep
PSYRPVYCCYLQEEHASHPDLFIKAIARVMVEKIDDAYVRGVVIAAARKDARPVHVHDAVHFEEEVDGAGPGGRVRAGGRGGAGRRDGSGRC

SEQ ID NO: 292425 - protein, 55 aa, Zea mays
  Clone ID: MRT4577_29777C.1.pep
QGANVAGYFAWSLLDNLKWLQGNLYKLGIVNVELQTMKRQPKVWAYWFRDMLKKL

SEQ ID NO: 292426 - protein, 83 aa, Zea mays
  Clone ID: MRT4577_29778C.1.pep
MDEEVGAAGRQQGKMYLLLLGTIALSLVTTPLIFKLIPMVMHLGILMCWFPSENSMQSEVSFTTLFAVFLLKSLTYGHCWLER

SEQ ID NO: 292427 - protein, 95 aa, Zea mays
  Clone ID: MRT4577_29779C.1.pep
RRASDGVSEERFATERRNWKDATLVKWRTFRRFFSSSFLVGSTSWLEPGEWGDTSRGRRSRWGGYRAVWRVRVAVTPLRLVGGNGAWTSGLHTSR

SEQ ID NO: 292428 - protein, 31 aa, Zea mays
  Clone ID: MRT4577_2977C.1.pep
AKIILHGFSGGSKIVVFITWSCFSIRCTLCY

SEQ ID NO: 292429 - protein, 102 aa, Zea mays
  Clone ID: MRT4577_29780C.1.pep
MDEQVGAAGRQQVGLSLAQIEEFAFVLLSRASHLHLVGGKMYLLLVGTIALSLVTTPLIFKLIPVVMHLGILMRWFPSENSMQSELPLQEKAVMLEAHNRSL

SEQ ID NO: 292430 - protein, 184 aa, Zea mays
  Clone ID: MRT4577_29781C.1.pep
MRPAAEFPTMSHGAPMGANANVPHSPWQSPVPYLFGGLAAMLGLIALALLILACSYWKLSGYLDADRGQRAGSSGEAGADGEKGSAAGAARPAAGFQEHVVVIMAGEERPTFLATPAASRAVVELGAAPGSGGSAEAPEEEEAHVDGDGGCGDCEHEVPRLGADAGTVSRSSEGTSSATTALAE

SEQ ID NO: 292431 - protein, 70 aa, Zea mays
  unsure (1)..(70): unsure at all Xaa locations
  Clone ID: MRT4577_29782C.1.pep
QNPXTAXPPPHHHQHHKXXKTDVHDAHHXHLLPQXVVQHHLDHLLLPLRSRSRVRFPPTQTLARLRFGVA

SEQ ID NO: 292432 - protein, 80 aa, Zea mays
  Clone ID: MRT4577_29783C.1.pep
SFWVGNGSDNLRPGIFLPAPKYVLLGHKKNHKSPSFWWCFPAGGKQNGFTLGRNNICMGVFSKKIKKTPPKKKKKKKKKE

SEQ ID NO: 292433 - protein, 76 aa, Zea mays
  Clone ID: MRT4577_29784C.1.pep
NKRKYKQGGEDNKILKKITKHKIKSLLSKKAHIVVSYIHIPTDHLSKSAITSFLRTTLNLSWPMVYTNFMACKAYG

SEQ ID NO: 292434 - protein, 74 aa, Zea mays
  Clone ID: MRT4577_29785C.1.pep
EQQSYWRTTTKPKRAQLPSQHDRSQQAACMSPRSSCCTDMETTVEVDAWNNLLWAWEHTIMRMCKYTDYTPETE

SEQ ID NO: 292435 - protein, 108 aa, Zea mays
  unsure (1)..(108): unsure at all Xaa locations
  Clone ID: MRT4577_29786C.1.pep
KANTGEGXAPRSPGIGGRGSDSVLPAVRGCPCTTPTPREFVSRSAGMGARASPSRGGNCDEREGRRRTAPDGEGGPAGDGVVLKEELGGESATPTRDETTRRWVGSPA

SEQ ID NO: 292436 - protein, 131 aa, Zea mays
  unsure (1)..(131): unsure at all Xaa locations
  Clone ID: MRT4577_29787C.1.pep
MWRVSVFNDALKSMYNAENIGKRQVMIRTTAKGIIKFLTVMHRHGYIXECEYADDHRSRKIMPELNGRMNKCGVIRPRCDISAKDIEGWTARMLPSRQIAYIXILTTSTGIMXHDEARRKSVAGKDLRFFY

SEQ ID NO: 292437 - protein, 81 aa, Zea mays
  Clone ID: MRT4577_29788C.1.pep
LNSGNDCDLNIMRSMLYISVSLLVYHFCLYDNEMWVLYSIGLLSTIQMFNDFFETESTDAHMSSLFGTLIWSRHNYYCILR

SEQ ID NO: 292438 - protein, 310 aa, Zea mays
  Clone ID: MRT4577_29789C.1.pep
MAAAVAAVAAATTAEDEARLLRLEEQAEHGGGGAWDYLCLARRLRARRPAHVLRVGLALLNNASARSGLASEQWTLYEQVATAAMDCQRLDVAKDCIGVLSKQFPGSTRVARLEALLFEAKSEWAEAERAYTQILEINPFDQIVHKRKIAIAKAQGNMSLAIGYLNKYLELFMADHDAWRELAETYVSLQMYKQAAFCYEELILSQPTIPLYHIAYAEVLYTMGGLENLQTAKKYYASTIQLTGGKNTRALFGVCLCTSAINQLTKGRNKEEDGSELQRLAAEVLLNNYKQQAPSKAPLISSLLKNMKLS

SEQ ID NO: 292439 - protein, 86 aa, Zea mays
  Clone ID: MRT4577_2978C.1.pep
PWEVGEGYWRGPLFGAFLPRGDWQDQCLPHPHIGSLKIGCPPENPVRSFLARKIPFSVFFPRKCCFTCGISPATEDLGLNVHVFVH

SEQ ID NO: 292440 - protein, 309 aa, Zea mays
  Clone ID: MRT4577_29790C.1.pep
MAAAVAVASATTAEDEARLLRLEEQAEHGGGGAWEYLCLARRLRARRPAHVLRVGLALLNNASARSGLASEQWTLYEQVATAAMDCQRLDVAKDCIGVLSKQFPGSTRVARLEARLFEAKGEWAEAERAYALILENNPFDQIVHKRKIAIAKAQGGMSIVIDYLNKYLELFMADHDAWRELAETYSSLQMYKQAAFCYEELILAQPTIPLYHIAYAEVLYTMGGLENLQTAKKYYASTIQLTGGKNTRALFGVCLCTSAINQLTKGRNKEEEDSELQSLAAEVLLKNYKQQAPSKAPLISSMLKNMKLS

SEQ ID NO: 292441 - protein, 75 aa, Zea mays
  Clone ID: MRT4577_29791C.1.pep
LFQRSLRDMKQISGYNSTRVFFEIGSLNHPTIAVLVTDFLMSMLGKDNKVIYRYRKLLLMIALLCAGATIRVRDT

SEQ ID NO: 292442 - protein, 75 aa, Zea mays
  Clone ID: MRT4577_29792C.1.pep
RTYVRTGGLRWLQVGRPVVFSLAAAGEAGVSNVLRMLRDEFELTMALSGCTSLAEITRKHIITESDKLSAIPSRL

SEQ ID NO: 292443 - protein, 185 aa, Zea mays
  unsure (1)..(185): unsure at all Xaa locations
  Clone ID: MRT4577_29793C.1.pep
MAMNLLAALAIAVFYTRLYMEELQSYDFLSYGVFVTGEVPTTAWVWMGAISALCLGVSILNLYALITLSSTYDEVPIGIPVGAGLTRSMELWDNFTYNATPDAPNLFYNVFGYDPAHSAFNFTTIGIPTSEDDALTYSQRIMTVAVSHLCHSTMGDSVYASLGXERWFVRQVFVRQPDAEHVHPP

SEQ ID NO: 292444 - protein, 77 aa, Zea mays
  Clone ID: MRT4577_29794C.1.pep
HNHSCCRGTSTGGPNAGTLLQLEHMVAIDPTLTITNPRLVLPAPHDCRCPVDRLVISYSTIVKLDIGCVWLARTKKG

SEQ ID NO: 292445 - protein, 134 aa, Zea mays
  Clone ID: MRT4577_29795C.1.pep
RTPARCGFYKRTKGFVVWFPRPSFLGLSMGGGPPCPCFFYLVFFPLLNSPDGPAFRAFSSLGRNRIFGGLNNGGPPPPPFRFFFFLVSRLVNLKGCCILKKKKKKKKKKKKKKKKKNQKKKKKKKTPQSGCYPA

SEQ ID NO: 292446 - protein, 194 aa, Zea mays
  Clone ID: MRT4577_29796C.1.pep
MQKRQERAPHVFILLSHPPFLAPTHCHCTCVVLCCVLQEEEEEEEHVLRSLPARFTTSIYGGDHQAFAKQKLPKMAYDYYASGAEDEWTLQENIFSRILSSVGEPRAACVHGGVRRGTDVFKALALGAAGVFVGRPVVFSLAAAGEAGVSNVLRMLRDEFELTMALSGCTSLAEITRKHIITESDKLSAIPSRL

SEQ ID NO: 292447 - protein, 369 aa, Zea mays
  unsure (1)..(369): unsure at all Xaa locations
  Clone ID: MRT4577_29797C.1.pep
MGEITNVMEYQAIAKQKLPKMAYDYYASGAEDEWTLQENREAFSRILFRPRILIDVSKIDMTTTVLGFKISMPIMVAPTAMQKMAHPDGENATARAAAAAGTIMTLSSWATSSVEEVASTGPGIRFFQLYVYKDRKVVEQLVRRAERAGFKAIALTVDTPRLGRREADIKNRFVLPPHLTLKNFEGLDLGKMDQAXDSGLASYVAGQVDRTLSWKDVKWLQTITTLPILVRGVLTAEDTRLAVANGAAGIIVSNHGARQLDYVPATISALEEVVKAARGQLPVFVDGGVRRGTDVFKALALGAAGVFVGRPVVFSLAAAGEAGVSNVLRMLRDEFELTMALSGCTSLAEITRKHIITESDKLSAIPSRL

SEQ ID NO: 292448 - protein, 48 aa, Zea mays
  Clone ID: MRT4577_29798C.1.pep
KGLKKVERLEANLPAMVGCVNPAWVLLLSIPNYFMQTTRISVSVCVEN

SEQ ID NO: 292449 - protein, 70 aa, Zea mays
  Clone ID: MRT4577_29799C.1.pep
KKKKKKKKNKRPADLKRCQANKHKHINKIINHIVLPALHFRGSWFTPPSLPKTIFFTKLNKIENLSLFPN

SEQ ID NO: 292450 - protein, 103 aa, Zea mays
  Clone ID: MRT4577_2979C.1.pep
NCTPSPPFFPFVMLNLYPLPRDILAPEALPGSKFGSSKVPRTWMLSRQFPLTLAQPPHRDFVGQFAPLSPGKIPIFGGVSLLQKNPKNKKTNKKKKKKKAAPI

SEQ ID NO: 292451 - protein, 79 aa, Zea mays
  Clone ID: MRT4577_297C.1.pep
ECPPNRSLTSYLIAKLIIIAGNCPPLRKSEIEYYAMLSKTGVHHYNGNNIDLGTACGKLFRTSVLSITDAGDSDILTAQ

SEQ ID NO: 292452 - protein, 36 aa, Zea mays
  Clone ID: MRT4577_29800C.1.pep
EHNEHTHEIIGSMKICNTWDVCFYERSICSQHVEYK

SEQ ID NO: 292453 - protein, 87 aa, Zea mays
  Clone ID: MRT4577_29801C.1.pep
KSLIFWYINYSSGNTGNSSAIGIFLYFWPLSFHPHQSFLSSQKTPGGFSAGIKPQILLSSHRPNGRSFLGVPPIVRGNGFRCHRRRK

SEQ ID NO: 292454 - protein, 143 aa, Zea mays
  Clone ID: MRT4577_29802C.1.pep
HTSVDAALLLLLGPPVGLLAALAFLTRPHARIALKDRHVFITGGSSGIGLAMATAAAREGARVSMLARNLARLEEARAAIHRDSVRDDVSVHAADVRYANAVIRALQEAVPVDILICNHREFVPQDLVRQDMDEINRIVDINL

SEQ ID NO: 292455 - protein, 137 aa, Zea mays
  Clone ID: MRT4577_29803C.1.pep
MPPKRIAKRRSPPEDAIPKSKKVKVSHRSHNTEPGLVLTLGQGDVGQLGLGESVLERKKPALVPLLQDVVQAEAGGMHTVCLSQSGQVYSFGCNDEGALGRDTSVEGSEMVPGKAELQEKVAQVVWVDSRSAALTED

SEQ ID NO: 292456 - protein, 147 aa, Zea mays
  unsure (1)..(147): unsure at all Xaa locations
  Clone ID: MRT4577_29804C.1.pep
GARXLAVAVRRXRPLVPXPRXLLPRALLXGVVVGXAGLGVVALGAALPGLGLAXRXCFWGXGRXAPGRXXAXRVPRGRPGGXVFSCRRGGVVPRSNQRVRERSRRDVLPPPGTPRRCARPVCALGPRRGARASGGRWVARIPAGPRR

SEQ ID NO: 292457 - protein, 77 aa, Zea mays
  Clone ID: MRT4577_29805C.1.pep
NSKLIVGNFIDDVCTTVFANVSVQFLERCPVTNIQVQKLWKIISPWHTLLKCVYLLCIKCSKFHSLIGLATHNTVVQ

SEQ ID NO: 292458 - protein, 299 aa, Zea mays
  unsure (1)..(299): unsure at all Xaa locations
  Clone ID: MRT4577_29806C.1.pep
GTRGSITRTRSPLSAPSSGIVAEQLIEKIRTVXRESEKYKAVILRIDSPGGDALASDLMWREIRLLANSKPVVARPGDVAASGGYYMAMAAPVIVAEKLTLTGSIGVVTGKFCLQKLYERIDFNKEIISKGRYAELNVNDQRPLRPDEAELFEKSAQNAYALFRDKAAMSRSMSVDQMESVAQGRVWSGHDAFSRGLVDSVGGLSQALAIAKQKANIPKDKKIQLVEVSKPSPSLPEILSGIGGSLLGVDRAVKGVLQDMTSLSGVQARMDGILFESLGDMSGENQLLLLVKDIMNYFD

SEQ ID NO: 292459 - protein, 84 aa, Zea mays
  Clone ID: MRT4577_29807C.1.pep
VVRCFPSRYDVKLRTRVMDLRAIKLGITSVLPVEVNVDPRKVNSLFFFFNVELFFCMFVYVSFGSALVSALFFFFYFFFFFLFQ

SEQ ID NO: 292460 - protein, 151 aa, Zea mays
  unsure (1)..(151): unsure at all Xaa locations
  Clone ID: MRT4577_29808C.1.pep
RFPRARQNFRLPQGFGPSGRVQGSTGVLTVTXKTSFGGGAGGGPPQWTQKGGGEKNPGGAKKRSPTPPSVVWNGEGLLFLWRGTPGGAPPRALSGPGRGKKKTFKGGQRAKIPRVCWDPAVTTFGVLQGRTFVXGAFSPQIGKKRYYFWVG

SEQ ID NO: 292461 - protein, 70 aa, Zea mays
  Clone ID: MRT4577_29809C.1.pep
MSKARNAVVATGLLLFAGAGLSFPFLFVKSKNKPIIDSTKPLPPQATFRGPYVNTGSRDIGPDRTNYPKK

SEQ ID NO: 292462 - protein, 105 aa, Zea mays
  Clone ID: MRT4577_2980C.1.pep
SRRGATSSSENFGKTLSAALTGSAQGNSRGGSNEHQGCQDPAAHCLHLHRRSNTPGVSASPPGPGALRPQLISVQMQSVSVAGVEDVAESTASVSPREKRRRSLQ

SEQ ID NO: 292463 - protein, 70 aa, Zea mays
  Clone ID: MRT4577_29810C.1.pep
MSKARNAVVATGLLLFAGAGLSFPFLFVKSKNKPIIDSTKPLPPQATFRGPYVNTGSRDIGPDPTNYPKK

SEQ ID NO: 292464 - protein, 49 aa, Zea mays
  Clone ID: MRT4577_29811C.1.pep
MFFAVFSLSQQNLPFSVENKWRLLAMMTVYFGSGFAAPFFIVRHQLLKK

SEQ ID NO: 292465 - protein, 51 aa, Zea mays
  Clone ID: MRT4577_29812C.1.pep
DREIAKTQPTELKKDCVDINGDSTQEGSFVMRRYVMSGNWTSGTSCTPDRR

SEQ ID NO: 292466 - protein, 105 aa, Zea mays
  Clone ID: MRT4577_29813C.1.pep
YLLPWNSVDLVAAVAALGSGHYEVKSVALNRSLSVPAIHSCYMPVQYILLIAAFSPSMASLMSSLYTGSVSVACLMCHALPSITCSSTPSTMLIRTITIAFPLTK

SEQ ID NO: 292467 - protein, 69 aa, Zea mays
  unsure (1)..(69): unsure at all Xaa locations
  Clone ID: MRT4577_29814C.1.pep
MGKMSCFSGLLSCKKKALEGKNKGAYAKKASGNDCPKVKPVEFMDMVVADXCGRRQQVPRQRSSVCMQQ

SEQ ID NO: 292468 - protein, 57 aa, Zea mays
  Clone ID: MRT4577_29815C.1.pep
VYILSLGAAQQLDLPLWVNMIVVSSVSTILQRYIASVEIKPSMTALLAEIGYHDSTA

SEQ ID NO: 292469 - protein, 91 aa, Zea mays
  Clone ID: MRT4577_29816C.1.pep
MVLRDISGKEAMAQWGHVGVARVGEDAARDGDQPMLIFFPKGSSPNASGPGGRRFTEDGDEDMAAAVLGLWGLWKTNEREVSSLLASNMEV

SEQ ID NO: 292470 - protein, 144 aa, Zea mays
  Clone ID: MRT4577_29817C.1.pep
ASGAGSTGPPQPALAPWFPCPAFRPGRFPVGQRQWPWPKRPGRKHWWRAQTRQVQPRIRPGTSTARGALRGSATAHRRLRLAGSRPQPPAGAAPALASARARPSGARPLLRAHPGGERDPCCERVPAASATPASHRLGAGSLFA

SEQ ID NO: 292471 - protein, 82 aa, Zea mays
  Clone ID: MRT4577_29818C.1.pep
LIDSPKKKKRKDAMGAKLVAHTTGTKGTEKNDLHRQYWTKGRSTQNRAPPLTGGTEKGPFAPQAERKALGKSKEKYPPNSGA

SEQ ID NO: 292472 - protein, 69 aa, Zea mays
  Clone ID: MRT4577_29819C.1.pep
IGTNKRYGGGSTRCLGKIMRACMLLVDARLCQLHVGSSIYISYLNMELTSTSPSQMKSTRDAGHLRSKT

SEQ ID NO: 292473 - protein, 62 aa, Zea mays
  Clone ID: MRT4577_2981C.1.pep
DNGSIIHTASFLRPAHEWWGGRSLCVSRYLQSSWAWQDSPTSPSSTLHARLSYWPFKLGSDA

SEQ ID NO: 292474 - protein, 100 aa, Zea mays
  Clone ID: MRT4577_29820C.1.pep
FSTACALACGVDEPCMLALMEGASTSVPFAEGNISREEASLDTECASSATFGNLCVAPWRICDANTVWLYSLGARFGVLRMAESPIAGRTMLLATDLLGN

SEQ ID NO: 292475 - protein, 135 aa, Zea mays
  unsure (1)..(135): unsure at all Xaa locations
  Clone ID: MRT4577_29821C.1.pep
RHWLDSSQHQTTRPAEAKGRKSTGGKAPGKQLETTAGRMSAPNTGGMKKTHRXYAPATGGLRDIRTYQKSTELLIRKLPLNSTYLRQITQDLMTYLHLQXAAKTSLREADKAYLLRVYQDTNLCSMHTKRVXIMP

SEQ ID NO: 292476 - protein, 76 aa, Zea mays
  Clone ID: MRT4577_29822C.1.pep
FDLRAQVEMSQDGGGCFANTQSLIDEIQEVWWEGLNAKTADNVGFRLDGLDGLIACLHKITDCTGYGAEEESMVGE

SEQ ID NO: 292477 - protein, 75 aa, Zea mays
  Clone ID: MRT4577_29823C.1.pep
YSKKIYILLSTYFLIFIGGALLYSSNFPSSSMATTFFFLVSPNFISLAVFLQLLDWVNPGFPNFFRLSQQPSFSS

SEQ ID NO: 292478 - protein, 51 aa, Zea mays
  Clone ID: MRT4577_29824C.1.pep
QRFSPPCQCIVVGLSQGLSRGPMSPYGLDRAPSTQIIVCGPFTSLLSKSSQ

SEQ ID NO: 292479 - protein, 666 aa, Zea mays
  Clone ID: MRT4577_29825C.1.pep
MSLSKPVSARRLVPALFPLAHADAASATASRRERRKDTFVATPPIPAPSPRAVRLAEPLPTLAPSRLAFHNRILALLSGPQADLPEAALLTRHALHSNCRPSSFTCAAVLAALLRARRLEDFFALHRFALQAAVPPTAATHVLYLSALAARRLADDALHHFRIIARPGSPVPPSPTAYRVVVECLVADHGRLADAVKLKDEMLTSGFVGPDPKVYSLLMAGFVGAGDGAKAVELYQELKDKVGGEPILDGIVYGTLMKAYFLMGTGEKVMECYKEVLCVESAVRFGAESYNEVVDALGQNGRLEDALKLFDRMLEEHDPPLRIAVDLRSFRVMVDAYCAAGRFEDAVAMFRRMGEWKLVPDVASYNNLIRHLQINQLIDKAEVLYNEMCESGVGADKETYLLLMEACFSVDRIDDGISYFDKMDELELKPDATAYHKLIDGLVGFSMVDKAQEYFNQMKEKGVNPSISSYETLLKAYIAADRLDDAVNVAKGILLNEKVLFSYGMRELLEGALRGDGRENDIAKLYEDVEREKAEAEARAAEEKARAEALAREERERRRAEIAAKDEAAAKASAAAIEAILAHKRKTENEGGAPAPDANTLDGGFLSKLGFKTAGEGALQGNPTESGDDGEGALHGNPTESGDDGEGALQGNPTERNGGNVQQGYL

SEQ ID NO: 292480 - protein, 117 aa, Zea mays
  Clone ID: MRT4577_29826C.1.pep
ELLGTSFLPSHAAAAPGRERRGGPCFTAVGRDREAAKRLLWPDGTLATHMAGWNHIFGSDTKGSIRSGLTHRPGHRGTRRTAGAAPPSTAGARAALDAGGLAALGRIQRSGGDSAGV

SEQ ID NO: 292481 - protein, 58 aa, Zea mays
  Clone ID: MRT4577_29827C.1.pep
NKPVKIGTRGFNNRFLRGFGNHIKAPFLVNVPRPGFVQYGNLESQKNETFFLLKMPRV

SEQ ID NO: 292482 - protein, 61 aa, Zea mays
  unsure (1)..(61): unsure at all Xaa locations
  Clone ID: MRT4577_29828C.1.pep
HGLTAGDVAAVVDEEACMYAMQLASSSILPMTLKNAIELGLLEVLQKEAXDETETPITRNC

SEQ ID NO: 292483 - protein, 112 aa, Zea mays
  unsure (1)..(112): unsure at all Xaa locations
  Clone ID: MRT4577_29829C.1.pep
KEEAGNVRARTNCSGGVXGGVSKGGIIFFKMGFXPPAPFGKKQKIFQRSIRMFXLLARGGHDPCVVPPAGSKGETKGGLVLKGQLMGQIAQGEKFSLNPALQKALGFFNRGF

SEQ ID NO: 292484 - protein, 70 aa, Zea mays
  Clone ID: MRT4577_2982C.1.pep
CNRWPWPQDHAGGISGLCQVCVCHLQCLDGPVSARFTVAVPVQPRYTLLLVSSIIVARVLSKPVLWIGFV

SEQ ID NO: 292485 - protein, 104 aa, Zea mays
  Clone ID: MRT4577_29830C.1.pep
GVSPVLGGWLGFTTSIFCNCGGPPPSPSWNSFQEGGLHLGWALRFPNGGRGVLHGIIWKSRGMAVFQVGGGEAQPPHKCNPPGSNSSLRVGVLKKKMKNIKLNY

SEQ ID NO: 292486 - protein, 115 aa, Zea mays
  Clone ID: MRT4577_29831C.1.pep
PLQQVEITHPSGGMARSPPWIIMAAAGGKPHLNQPVAVLATTTDWGASSALTEGKQERSCEWEIRHGSSMRHSSREREWVRRGPTSPHWRFSLELPSTSHVPIHRGLASTSLPHW

SEQ ID NO: 292487 - protein, 156 aa, Zea mays
  Clone ID: MRT4577_29832C.1.pep
MASGQTLLKRLSFASPHGGREPAIKAKEPEVWSAGGTDGLIGRGNRFDRGSLTYGDYHLCTDDSGHLPTNTAPANGGRPKAHRQVLTPVLALGTRTGPSQNTSAALAAYDVFCDPTVQSTAQGGPGRGRPARDQHPCGGRAAVLRPSGRRWHRKQR

SEQ ID NO: 292488 - protein, 63 aa, Zea mays
  Clone ID: MRT4577_29833C.1.pep
CEACPPVVPLFLSWLCYLVSLIGALVLFFPVLVWWFLLCVVCLLPVSLVLNASFSGFENADKI

SEQ ID NO: 292489 - protein, 98 aa, Zea mays
  unsure (1)..(98): unsure at all Xaa locations
  Clone ID: MRT4577_29834C.1.pep
MKGKKSAQSYDIYLFIAVNSAHTKVGSYCKAMFFLNSFMSDIIERLAVEDINIARYRKRTTITSREITTSVRXSLPGSLTXHCDSEGSNVVXTKFTSC

SEQ ID NO: 292490 - protein, 64 aa, Zea mays
  Clone ID: MRT4577_29835C.1.pep
TVMTSEKYSMRETSSVSLDILVMQTGPSVLILVLKLDLGYIYIVCATIVKQCPFNSAYQSSIQY

SEQ ID NO: 292491 - protein, 54 aa, Zea mays
  Clone ID: MRT4577_29836C.1.pep
KREPSVQTSLPKTEAHPKLVLKKRHRHHKLLFLTDLANSSTIGFTSRVSQPARA

SEQ ID NO: 292492 - protein, 123 aa, Zea mays
  unsure (1)..(123): unsure at all Xaa locations
  Clone ID: MRT4577_29837C.1.pep
LVSHCHLLRVQTYSSIHFAGSRVPDATRTTQAXSVEEDTGPSGAGAEPIXANIVLPNTSYDRTLFRLSPIKESIKNGEMTRDYKTDMITYANTDVAIVGAGSVGLNGADELYEDPAGSISIGE

SEQ ID NO: 292493 - protein, 122 aa, Zea mays
  Clone ID: MRT4577_29838C.1.pep
YLSNSLFSFPFLLLAAPMPQPQAICRPHNPEYKFHVGPCWRAGYMGDARCPKATCRERRPSTGKAASSNVILLKFVTAQRWCGAAANVEQGRCIPAWGCARAWRRSRAIFRGTALAWLGFGR

SEQ ID NO: 292494 - protein, 49 aa, Zea mays
  Clone ID: MRT4577_29839C.1.pep
SKKNPPSLVARVAVCSNAWLRRFLTGSATASTSRLSFQCLDCSNASASC

SEQ ID NO: 292495 - protein, 85 aa, Zea mays
  Clone ID: MRT4577_2983C.1.pep
FQSQELRVHPLIFEFARLIRHEISRICPLLHAPEATDSVVGQAQRILILDLGQFFGPGSSQADERRRRLGEAIHGSNKRADKARP

SEQ ID NO: 292496 - protein, 79 aa, Zea mays
  Clone ID: MRT4577_29840C.1.pep
TFAQGPKIPDPPFQTQHLESLNTSLKPGAHQKHIKCFKSASAIESTIPRLHDKPLVHTPFTNGNPHINLPRTALHTQFH

SEQ ID NO: 292497 - protein, 275 aa, Zea mays
  Clone ID: MRT4577_29841C.1.pep
MASSTHSSHVSKNHAYLYAHVKNAHNVHHASHYAHDACVDHVIPTRRHVVHNDIYSPHGMIASSSIVSFAHGRSRLRHNVAHARSCNVPKARNASHGPSISYRTSDASYVLYCKFGKVVAANVGPKRKSGKTCVWVYASVGSSWVIGSGCSNHMTGEKRMFSSYVKNKYSQDSIIFGDENQGKDKSQTQETLKRFLRRAQRIWRLEMCDHRSQKSKINPLLPIRRNPQVKMRNKDIKIMAIIKGELMKKTRMKKKVHKRRNLESAPPYKEAIRWT

SEQ ID NO: 292498 - protein, 38 aa, Zea mays
  Clone ID: MRT4577_29842C.1.pep
RITLSLGATKLEGLNSPYSKLNKKDEFSFFTLLQFYGF

SEQ ID NO: 292499 - protein, 67 aa, Zea mays
  Clone ID: MRT4577_29843C.1.pep
ITWPYIVTGLVWTKKPHLHQAPLGNLQTRPGSNGSSIYKTDYMGLLDLLQRIGSTMDYIGITEARKH

SEQ ID NO: 292500 - protein, 65 aa, Zea mays
  unsure (1)..(65): unsure at all Xaa locations
  Clone ID: MRT4577_29844C.1.pep
HKKKKKNKKKKKKKKKKKKKKKKKKKKKKKKKKKKEKKSDKXLKKKFKLNKKGKKKKKGGGCLKK

SEQ ID NO: 292501 - protein, 74 aa, Zea mays
  unsure (1)..(74): unsure at all Xaa locations
  Clone ID: MRT4577_29845C.1.pep
CAALYSYRKRIWKSWAPPKCRIFLWLVAHNRCWTADRLARRNLDHPEACXSCDXEMETINHLLLSCVSSSTSRS

SEQ ID NO: 292502 - protein, 61 aa, Zea mays
  Clone ID: MRT4577_29846C.1.pep
SRPGCEVCYLTKASSETSPTPRSRGNGRLVWWDTKPSAASMPRSLPQAWGRKRVAQGFLNT

SEQ ID NO: 292503 - protein, 209 aa, Zea mays
  unsure (1)..(209): unsure at all Xaa locations
  Clone ID: MRT4577_29847C.1.pep
PSRPAGIGAWPWGXQATWNWKEEDLPAAKQAWDYLYQAGINFIDTAEAYGDGRSEEIVGQFVRDLPRESFVIQTKYIGTAAGINNYIHPVEAPVKSLKGSLGRLGLEYVDIYLVHGPIHPQSIANVAKGMAECVEKRLTRAVGVANYEPEDVEKIQAELRKYKIPLASNQCEYNILRRSPELHDGIATCERNGLVFQSYSSLAQGRLTG

SEQ ID NO: 292504 - protein, 102 aa, Zea mays
  Clone ID: MRT4577_29848C.1.pep
MAIAVTSFSSRHSACMKGLENHMCWPSCACSKERAKSFATSASAPGSRNAIPIPSTAQKEREKGTKSIVCPWSRWNLGLDAEIREREYPRGVGIGVCVIPAG

SEQ ID NO: 292505 - protein, 61 aa, Zea mays
  Clone ID: MRT4577_29849C.1.pep
ISHHYQIENSDAITMGMRVTLTKLWHHSYPDTMSGQAPARASHVGGLGVGRPDDVFERRPE

SEQ ID NO: 292506 - protein, 92 aa, Zea mays; identical to SEQ ID NO: 249594
  Clone ID: MRT4577_2984C.1.pep

SEQ ID NO: 292507 - protein, 34 aa, Zea mays
  Clone ID: MRT4577_29850C.1.pep
MDQLYCQPNFSCSDSNVKQCWPISHASSALWCFR

SEQ ID NO: 292508 - protein, 58 aa, Zea mays
  Clone ID: MRT4577_29851C.1.pep
MEQLRQLGEVVGAIDALMAFEPELRVNPRQCRLLADACARALAGVTGEVRAHLRFEER

SEQ ID NO: 292509 - protein, 81 aa, Zea mays
  Clone ID: MRT4577_29852C.1.pep
ISWTSCEDNVLGGHHPIDGPLDCRKNTTAPPSLHQTEHSGLRLGTRTTRLIAEHPDYPGDGFDAVFNDTSREIAKIVGSSV

SEQ ID NO: 292510 - protein, 88 aa, Zea mays
  unsure (1)..(88): unsure at all Xaa locations
  Clone ID: MRT4577_29853C.1.pep
LCCPGRRGALVARGLVLPLPLGCPLLVGVVVGLGCRVVGPRVAAWRVXVAARXSGPPVDCVICVVDXXXWXGXXQCCLMLTAAGGQGF

SEQ ID NO: 292511 - protein, 139 aa, Zea mays
  unsure (1)..(139): unsure at all Xaa locations
  Clone ID: MRT4577_29854C.1.pep
TSFFLSFFFLLPAKTLLCENXLIQPYKKRTANTGGMLPLSPLFLQQSSGRLQXLPLVHGSRQNIRAHXLQQLXAANHAATSQQHFFHNQXAALISASYXXQQHHLPFNSLNAGCPAQFLSFNQLAALGSPDYLLKQQLL

SEQ ID NO: 292512 - protein, 147 aa, Zea mays
  unsure (1)..(147): unsure at all Xaa locations
  Clone ID: MRT4577_29855C.1.pep
MTATEVVLLGMSNPLLDISAVDDDAFLTKYDIKLNNAILVEEKHCALCDARSVSXTSNVEYIAGGATQNSIRDAXQWMLQTPDATSYMLCIEKDKYGEEMKNNAQAAXATAHYYEDETAPTAAXDVCAVGGEXSLIANLSAANCYKS

SEQ ID NO: 292513 - protein, 86 aa, Zea mays; identical to SEQ ID NO: 257102
  Clone ID: MRT4577_29856C.1.pep

SEQ ID NO: 292514 - protein, 86 aa, Zea mays; identical to SEQ ID NO: 257102
  Clone ID: MRT4577_29857C.1.pep

SEQ ID NO: 292515 - protein, 64 aa, Zea mays
  Clone ID: MRT4577_29858C.1.pep
AAPLFFFFEDNEQPYILILGPPQGSQHLLQHQVWKTTHNSRTDTHITRTVATIGRAGDKGSTLA

SEQ ID NO: 292516 - protein, 292 aa, Zea mays
  Clone ID: MRT4577_29859C.1.pep
MLLPRKLLPWRRSAQDAQALAGRLLRSSSSSFDPEDDDPPFTRVPKLPPRAPSTPPPKPKALAGKIRPDEPAHSDLPFDFRYSYSETDPTWRPIGFREPTRFSPFGPGRLDRPWDGTAAARVGDDASGDERSREEVLGEPLSEEEVAALVERYRHSDCSRQINLGKGGVTHNMLDDIHNHWKRAEAVRIKCLGVPTLDMDNICFHLEDKTGGKVVSRSINIIILYRGRNYDPQKRPGVPLMLWKPLAPIYPKLVQNVAEGLTFEETKELRNRGLNSPPLTKLRFGSMHSYII

SEQ ID NO: 292517 - protein, 113 aa, Zea mays
  Clone ID: MRT4577_2985C.1.pep
MADVLGMNSMGNYAGSTPPSASQMPKWESKVDCRSERFKTNYAEMSKLVDELHERLQLSLNQGPEAHVKKHLQAGHLLARERLELLLDPDSPFLELMPLAGWGKEKIPLGGSI

SEQ ID NO: 292518 - protein, 235 aa, Zea mays
  unsure (1)..(235): unsure at all Xaa locations
  Clone ID: MRT4577_29860C.1.pep
MRVSTVAVLASTLFGFASAQKFQQVEVGTPDSKLLFNPPTVDGFGPGDVIQFIFYPKAHSVTQSTFADPCTYNGTGINTGLQKYNDTXSPPCXSWNFTLPANSSTEKPLWFFCANTGHCQQGMVFSINPGKGKTADGTPTSHEAYVKKAMAVPIPGASGPSNSTSSTGGAGGANNTAAGNTAAGNGASNTAGTSAGAASASGSAPSASTTSSAGSVARNSAGALAAVGIALGLLL

SEQ ID NO: 292519 - protein, 48 aa, Zea mays
  unsure (1)..(48): unsure at all Xaa locations
  Clone ID: MRT4577_29861C.1.pep
KKKKKKKKKKKKKKKKKKKKKKKKKKKKKKNFGKKKKKKKXPLPGGPA

SEQ ID NO: 292520 - protein, 389 aa, Zea mays
  unsure (1)..(389): unsure at all Xaa locations
  Clone ID: MRT4577_29862C.1.pep
MLLPRKLLPWRRPAQDAQALAGRLLRSSSSSFDPDDDDPPFTRVPKLPPRAPSTPPPKPKALAGKIRPDEPAHSDLPFDFRYSYSETDPTWRPIGFREPTRFSPFGPGRLDRPWDGTAAARVGDDASGDERIREEVLGEPLSEEEVAALVERYRHSDCSRQINLGKGGVTHNMLDDIHNHWKRAEAVRIKCLGVPTLDMDNICFDIDDGSGGLLSVDRGGGEGRGRXSDSVKKKTSQHICVIXLMKLQLRSGTKMVNMAXDALXFDESRVYEFRPFEKVFXNKAQPVHLFNLYRLFLHCFVSINCTYNNSXTDFNMKRTTTXFKTVEVVRLDCTHVXHSGTTDCKKIGVKLRDLVPCIPILFKDEQIILWRGKVRQERSVSAECSSSPQ

SEQ ID NO: 292521 - protein, 124 aa, Zea mays
  unsure (1)..(124): unsure at all Xaa locations
  Clone ID: MRT4577_29863C.1.pep
EAVWFKTGALVVGGNTXLRYVCNNIPINLVVAVIAEVVLVSRAXYYPIINGLDLDDKLHPSGPFXPLGLTSDPDQAAILNVKDINNGRLAMCSMYAFFIQAYVTREGPVQNLSKHLNDLLRNNL

SEQ ID NO: 292522 - protein, 347 aa, Zea mays
  unsure (1)..(347): unsure at all Xaa locations
  Clone ID: MRT4577_29864C.1.pep
LEAGRVTVLCTAVQXNGEFLSRKLARXCWRRFRTSRKTTVVLARAFDALGINQRSVVSMPFEELALCIESPAVLQTTKALLDRLESRFVFSQSSTSSKPENIDHLLKHLGSPKRKIPLSNVGTSEATLKNAVGNYDSSTLSRYSQRIALCAYMILGHPKSVLSGQGEQEKFLMESATIFVRXFELLVKTVLDAXMVHAYWSWSVIDDATPVRSSYEESSSIVADLKKFRTQLLAFDKAWCAYLYHFVAWKAKDAKSLEDELIRAACKLELSMIQTCKITEGESDNLGGDLKAIRKQVAEDQKLLRESIQHLGGEAGIGMMESALFETRSKFFQAKEXGSPLQLQLQM

SEQ ID NO: 292523 - protein, 59 aa, Zea mays
  Clone ID: MRT4577_29865C.1.pep
NLASSGSHHFPGAGQLSIRLKASSRVPGGLDLGPGSKNFWTGLIVNGFLGGATSPPQWG

SEQ ID NO: 292524 - protein, 38 aa, Zea mays
  Clone ID: MRT4577_29866C.1.pep
AVETRLANSGTADESPGTAACCRPAGRSSASRRRCAGT

SEQ ID NO: 292525 - protein, 216 aa, Zea mays
  Clone ID: MRT4577_29867C.1.pep
WAHPAEIHPQSDPVDQHLLAHSPALETLASSPEKPADIPATTDHVNVHGHQDIGDGRTSTLLHQHNNDAHEAQQTLVNFDLPEQPKEHPQVQLGGASEKSAADEFAGKKEEKKVPSAVSSVEGSHDNFFLQHEKPSANREALELAGDKRKSREAPLEPTIVSTSSGHQHPHDDYNLDYEPEGVAVEEEYYPEVYNPYFTSNAANPFRPRPPTIPPK

SEQ ID NO: 292526 - protein, 34 aa, Zea mays
  Clone ID: MRT4577_29868C.1.pep
VKNAWECVKTAFSPLSGGDLSSVLSWMFDQYNSA

SEQ ID NO: 292527 - protein, 45 aa, Zea mays
  Clone ID: MRT4577_29869C.1.pep
KRCTSVYSVPPWMCIEPELWILIVDIIGIGLLLNMEKKKEKKGGV

SEQ ID NO: 292528 - protein, 92 aa, Zea mays; identical to SEQ ID NO: 249594
  Clone ID: MRT4577_2986C.1.pep

SEQ ID NO: 292529 - protein, 34 aa, Zea mays
  Clone ID: MRT4577_29870C.1.pep
AQYAVAPHPAPVIAISPKPIPNRKTSIISICSRG

SEQ ID NO: 292530 - protein, 149 aa, Zea mays
  Clone ID: MRT4577_29871C.1.pep
KEKGPRATTIIIKGAPPHPEKQGSPTPDGTHPTTTKVPSNPTQGKQQTAHQTTKKATPGKRRKQNLDREGKLTSGTKKQKQPPAAKKKKTFFFPPGKEKKKKRGREKNTTPQGPPPANKKTRSGAAAAHNWGEGPPSTARGTGLAWGGT

SEQ ID NO: 292531 - protein, 50 aa, Zea mays
  Clone ID: MRT4577_29872C.1.pep
LDKLLAPNIHFHHALCSRGTIIACRGPLSNKPSYMSDCIVHVGQCTQRPV

SEQ ID NO: 292532 - protein, 58 aa, Zea mays
  Clone ID: MRT4577_29873C.1.pep
NCALMCHLLSFTTGHDMVTFSYCYRTAVTNGSAIKHDGSYESNPAVQVIFFPVILCIL

SEQ ID NO: 292533 - protein, 76 aa, Zea mays
  Clone ID: MRT4577_29874C.1.pep
KTHPLILLKKGGMKKKESPTKTQCTMKSGKPKPRKNGLESKKKPTWNPKKTKPVIKRMGNFHLLALKKKNELKIHR

SEQ ID NO: 292534 - protein, 239 aa, Zea mays
  Clone ID: MRT4577_29875C.1.pep
MELFAAGDRRFPDPPRHDAGAEDSSMLVIRDALLSQLQKDRLRQEIILAELARIERAMALRAADAERASPRAPFSVVKLEEMPRSREAFGPADLIVAADVDKDMEEKKDSATSLQASSLIHRKKPAAEYLVRECLKTSCGAGNAAGRRQNAALHETKLQESTETRLPKETMPPLSKWRCDICRVEAPTEGHLQQHCAGHKHRSKVATLVVPRPMATVTKRGRLLLRIPETCVNTTKSYV

SEQ ID NO: 292535 - protein, 76 aa, Zea mays
  Clone ID: MRT4577_29876C.1.pep
PNLLDSCAQIKERFQNRKELVLTFQSAIGEEQNFPFKDVCPQVTSLAFETEPYCISTLNRKEMFHPKICTQAINLL

SEQ ID NO: 292536 - protein, 99 aa, Zea mays
  Clone ID: MRT4577_29877C.1.pep
IVSFFEGVNSSLTAAVVVVTGLIGANFVQVAMDKLGLNDPIARGIGTASSAHGLGTAALSAKEPEALPFCAIAYGLTGIFGSLVCSVPVVRQSLVFIAG

SEQ ID NO: 292537 - protein, 153 aa, Zea mays
  Clone ID: MRT4577_29878C.1.pep
AAQCASLWAHARALLVAPAVRVLVLLSLAMTVMILAEKLFVCAVCLAVRALRLGPDRRYRWEPIGGGVGDEEEESGSGHGAKYPMVLVQIPMYNEREVYKLSIGAACELEWPSERFMIQVLDDSTDPVVKPNFVLLRSHTTLSLIHPCRALLM

SEQ ID NO: 292538 - protein, 864 aa, Zea mays
  unsure (1)..(864): unsure at all Xaa locations
  Clone ID: MRT4577_29879C.1.pep
AEILPDSTVSQPKPQKTLSGQFRIGGMTCAACVNSVEGILKKLPGVKGAVVALATSLGEVEYDPSAISKDEIVQAIEDAGFDAALLQSSDQDKVLLNVQGLHFEEDVDVLHDILKKMEGLRQFGVNFANSEVDIVFDPEVVGLRQIVDNIETESNNRLKAHVQNPYIRAASNDAQEASKTLHLLRFSLFLSIPVFFIRMVCPRIPLISSFLLMHFGPFRIGDLLRWILVTMVQFIVGKRFYVAAYRALRHGSTNMDVLVVIGTTASYVYSVCALLYGAFTGFHPPIYFETSAMIITFVLFGKYLEVLAKGKTSDAIKKLVELAPATAILLLKDKEGKYSGEKEIDASLVQPGDVLKVLPGSKVPADGIVGWGTSHVNESMVTGESVPISKEVSSLVIGGTMNLHGVLHIQATKVGSGTVLSQIISLVETAQMSKAPIQKFADYVASIFVPIVITLSFLTFLAWFLCGWLGAYPNSWSAESSNCFVFSLMFSISVVVIACPCALGLATPTAVMVATGVGASHGVLVKGGDALERAQNVKXMDLGDFLTLVASAEASSEHPLAKAILDYAFHFHFFGNLPSGKDSIKRRKEEILSQWLLEVVDFAALPGKGIQCWINGKKILVGNRALITENGXNIPEEAERFLVDMELNAKTGILVAYDGDFIGLVGITDPLKREAAVVIQGLKKMGVHPVMVTGDNWRTARAVAKEVGIDDVRAEVMPAGKADVIHSLQKDGSVVAMVGDGINDSPALAAADVGMAIGAGTDIAIEAADYVLVRNNLEDVITAIDLSRKTFIRIRWNYFFAMAYNVIAIPVAAGALFPFTGVQMPPWLAGACMAFSSVSVVSSSLLLRRYRKPRLTTVLQITVE

SEQ ID NO: 292539 - protein, 173 aa, Zea mays
  unsure (1)..(173): unsure at all Xaa locations
  Clone ID: MRT4577_2987C.1.pep
MYITASIPLPLHTSLLPSIHKQHKWITSRDYSSTPLRLRSRRRRRRRYAPHLASFRVAKMTKRTKKAGIVGKYGTRYGASLRKQIKKMEVSQHSKYFCEFCGKFAVKRKAVGIWGCKDCGKVKAGGAYTMXSNSSPVRKPQFVSHGXSVNXCSTASAVTVRSTIRRLREQTEA

SEQ ID NO: 292540 - protein, 518 aa, Zea mays
  Clone ID: MRT4577_29880C.1.pep
WGTSHVNESMVTGESVPISKEVSSLVIGGTMNLHGVLHIQATKVGSGTVLSQIISLVETAQMSKAPIQKFADYVASIFVPIVITLSFLTFLAWFLCGWLGAYPNSWSAESSNCFVFSLMFSISVVVIACPCALGLATPTAVMVATGVGASHGVLVKGGDALERAQNVKYVIFDKTGTLTQGKATVTATKIFSGMDLGDFLTLVASAEASSEHPLAKAILDYAFHFHFFGNLPSGKDSIKRRKEEILSQWLLEVVDFAALPGKGIQCWINGKKVLVGNRALITENGVNIPEEAERFLVDMELNAKTGILVAYDGDFIGLVGITDPLKREAAVVIQGLKKMGVHPVMVTGDNWRTARAVAKEVGIDDVRAEVMPAGKADVIHSLQKDGSVVAMVGDGINDSPALAAADVGMAIGAGTDIAIEAADYVLVRNNLEDVITAIDLSRKTFIRIRWNYFFAMAYNVIAIPVAAGALFPFTGVQMPPWLAGACMAFSSVSVVSSSLLLRRYRKPRLTTVLQITVE

SEQ ID NO: 292541 - protein, 110 aa, Zea mays
  Clone ID: MRT4577_29881C.1.pep
LKKNSVSVTVLSVIFQSLSFSCYRLGILSSAELCSIRRLIAGTSNAKTAPSLDLCNPTMQKKYELTMLCRLLFLGNWRQVTFSPALYRIRNPFWLEECPVALPNGHVVRC

SEQ ID NO: 292542 - protein, 47 aa, Zea mays
  Clone ID: MRT4577_29882C.1.pep
YGSHDESDHDFDPCRVSMGKKRIVGQSERGLYDDPRQSADELDARKM

SEQ ID NO: 292543 - protein, 69 aa, Zea mays
  Clone ID: MRT4577_29883C.1.pep
FILHYKFIFHLGFVQSQTSLTLTMLVENILTSTSTNKFSIKIYCIKTGVKLHARERVHMHPRKFVKPVI

SEQ ID NO: 292544 - protein, 55 aa, Zea mays
  Clone ID: MRT4577_29884C.1.pep
RILLALLQTILSYVISLHLPDNYPSFKKPKISYFINIHHLMITKPIFILYIRTCH

SEQ ID NO: 292545 - protein, 121 aa, Zea mays
  unsure (1)..(121): unsure at all Xaa locations
  Clone ID: MRT4577_29885C.1.pep
RTRGLRDRQLAAQFHEMPLDLKMIRAEKAGFEILKSTTVDKLPNDLEGIAYXMEKLYILIDEIYRYLDDAGQRRAAPDHKIERLLSQSCASMPRFAPGADDQLLNDKIQDNLALVYLSSIT

SEQ ID NO: 292546 - protein, 150 aa, Zea mays
  Clone ID: MRT4577_29886C.1.pep
VHATSQILSRDDRESPISHRIGRNDSRNDYENQHSKDAGKSQYQIIHQEDFGSPGQKKHEDAISQQPQILTPVQTTALSMHNEKVSEMDSQNAPSSIGGLSMQSGDSSANIIAEQSLGQILQRHDPISHIPGPQTLPITTQPQNVTSSFA

SEQ ID NO: 292547 - protein, 208 aa, Zea mays
  unsure (1)..(208): unsure at all Xaa locations
  Clone ID: MRT4577_29887C.1.pep
QTAGHHSSSSPPPRFHRHHPLLLRSSLVKIPITSDLTPMNMNAXLKVNVPIVGKTALGLHVHQDRXSLLHVIAELLDRGVTWQLINSTDEDPNDDNHGNVLAXETXEHCLLNPPPLLYSENQFRDTFDCXEEKKGIAGDIIVKNNHGYEFFLENITLNDVPXHCTIVFDDNSXIYPHCKYRYNRVXFISNDTYLRSHMPWELKPYRDD

SEQ ID NO: 292548 - protein, 1169 aa, Zea mays
  Clone ID: MRT4577_29888C.1.pep
MASFNNQAGAASAPKLVLPITGGSCSEPANKKQKNEAQRRVQHVGVQGPFIKSRWSHIPITFSQEDLQLKDYPHNDAMVISCVIKGFLVHNILVDTGSAADIIFAKAFRHMQEPEDKIHDATHPLCGFGGRQIVALGKITMPVTFGFVNNTRTEQVVFDIVDMEYPYNAIIGRGTLNAFEAILYPAYLCMKIPSDQGPIAIHGSQEAARKAKGNWTDSKAIHNIDGAEASNDLCGVNRDVIEHLLNVDPSFRPRKQRLWKMSDDKAEGARNEVKRLLSVGVIREVKYPEWLANTVMVTKANGKWRICIDFTDLNKACPKDEFPLPRIDSLVDVAASSKLMSLLDCYSGYHQIWMKKEDEPKTSFITPSGTYCYLRMPEGLKNARGSFSRMTAKVLHSQIGRNVLTYVDDIIETFANFRQAGLKLNLEKCVFGVKKGKFLGCLVSTKRIEANPNKIEAILRMEPPSTKKGAQRLTGRLTSLNRFISRSAERNLPFFEVLKSAEVFQWGSTQQKAFEELKQYLIDLTTLTPPAPGAPLMLYVAASHSAVSAALFQEKIEGQLKNQAPVYFVSEVLSLSKKNYTKLEKVLYAVLMASRKLRHYFQAYHIIVPSSQPLKDIMRNKEATGRIGKWAAELNEFSIDYVHRSSIQSQALADFIADWTPGAQEEEASKDAEAWTMFCDVSWGTFGAGAAAVLIAPSKVRTCYAVKLDFSCTNNIVEYEALLLGLQKLKAMGIRRAVLKTDSQVISGHVDKSCKARDPKLEKYLDTVRRLEASFEGFSVKNIPRGENEHADLLAKSEAQGLPLPSEVFFETIKAPSVDLLERAVLNISPVYSEDWRTEIMSFLQGNFLSDDEAYNKRIATRARPYVIIEGELYKHGVCSPLLKCLSRAEGIELMKEIHAGLCGSHIGSRPLLGKVFCQGFYWPKAALDAAELVQKCEGCQKCARDQKQPSSLTQLIQPTWPLQRWGLDLLGPLPPAQGNLKYVVVAVEYFSKWIEAKPLATITLVTIQKIFWQNIVCRFGVPKAITVDNGTQFDAEAFKEFCEQIGTKIHFASVRHPESNGLVERANGIIMTAIMKLIFNQPRGKWPDELIKVVWSHNTTMSRSTGCTPFKLLFGDEAITPEEAKAGSIRTVASPEDEADYFVAKDAIEGIRLQAVENINKYQAETIK

SEQ ID NO: 292549 - protein, 846 aa, Zea mays
  unsure (1)..(846): unsure at all Xaa locations
  Clone ID: MRT4577_29889C.1.pep
MASFKAGVALAPKLVLPITGSSCSKPANKKQKMEAQRRVQHVGVQGPFIKSRWSHIPITFSQEDLQLKDYPHNDAMVISCVIKGFLVHNVLVDTGSAADIIFAKAFRQMQEPEDKIHDATHPLCGFGGRQIVAFGKITMPVTFGFINNTRTEQVVFDIVDMEYPYNAIIGRGTLNAFEAILHPAYLCMKIPSDQGPIAIHGSQEAASKAEGNWTDSKAIHNIDGADACEQYKYRREKAASADQPKPMLLCDIAEQKVLLGSQLSEEQEKTLIRFLFNNKDVFAWSANDLFGVNRDVIEHSINVDPSFRPRKQRLRKMSDDKAGGARNEVKRLLSAGVITEVKYPEWLANTVMVKKANGKWRMCIDFTNLNKACPKDEFPLPRIDSLMTKEDEPKTSFITPSGTYCYLRMPEGLKNAGGSFSRMTAKETFANFRQAGLKLNPEKCVFRVKKGKFLGCLVSTKGIEANPNKIEAILRMEPPSTKKGAQRLTGRLASLNRFISRSAERNLPFFEVLKSAEVFQWGSAQQKAFEELKQYLIDLTTLTPLAPGAPLLLYVAASHSEGNFLSDDEAYHKRIVARARPYVIIEGELYKHGVCSPLLKCLSRAEGIELMKEIHAGLCGSHIGSRPLLGKVFRQGFYWPKAASDAAELVQKCEGCQKCARDQKQPSSLTQLIQPTWPLQRWGLDLLGPLPPAQGNLRYVVVAVEYFSKWIEAKPLATITSVTVQKFFWQNIVCRFGVPKAITVDNGTQFDAEAFREFCEQIGTKIHFASVRHLESNGLVKRANGIIMTGIMKLIFNQPRGKWPDKLIKVVWSHNTTISRSTGFTPFKLLFGDEAIXPEEAKAGSI

SEQ ID NO: 292550 - protein, 95 aa, Zea mays
  unsure (1)..(95): unsure at all Xaa locations
  Clone ID: MRT4577_2988C.1.pep
TICLVVPPMGFNVLLFFLVRYAPTQFIAGVVLVRSCPVCTCFVMGSSCSGMCSVYLGWWGTKNLPMTPPLXFFVLGXAVFSDLXKKKKKKRAAAR

SEQ ID NO: 292551 - protein, 179 aa, Zea mays
  unsure (1)..(179): unsure at all Xaa locations
  Clone ID: MRT4577_29890C.1.pep
MPAMCNATSFQLLLRILNLRRYNGRILFVPAPGYEEVGDPVDQATGYETNGFSTGFQDDGRTGSNGETCGYVGPXSKKQAGLRWRSLDGPFVSVWLGNVPFASEDAMAAPKAEFADGYLDAAIIKDCPRWDVLGLVFQMKDGSYVNSPCVEYFKVKAIRIEPGLGALTTSTDGIIYSDG

SEQ ID NO: 292552 - protein, 1159 aa, Zea mays
  Clone ID: MRT4577_29891C.1.pep
MARVRSAARVSREGEEIEATETAPISKVMERSGLVVREGAADEGALDAEAEQTVVEEENVDESEEDYSILIPTKPSHLDFEKSTVGYFGEAESKLVRFAREDTTPASKNDEVVVFRSFFRAGLDTKAPVLSYYTKWPTGWKNEWFYIKADEKKRGKLMTMVMSPLSLNFGMTRLLLGVCFIAEDPGPFIKSKWSHIPITFSQEDLQLKDYPHNDAMVISCVMKGFLVHNVLVDTGSAVDIIFAKAFRQMQEPKDKIHDATHPLCGFGGRQIVALGKITMPVTFGFVHNTRTEQVVFDIVDMEYPYNAIIGRGTLNAFEAILHPAYLCMKIPSDQGPIAIHGSQEAARKAEGNWIDSKAIHNIDGVEACEQYKYRREKAALADQPKPMLLCEDIAEQKKEDEPKTSFITPSGTYCYLRMPEGLKNAGGSFSRMTAKVLHSQIGRNVLTYVDDIIVKSTKQENHITDLQETFANFRQAGLKLNPEKCVFGVKKGKFLGCLVSMKGIEANPSKIEAILLMEPSSIKKGAQWLTGSLASLNRFISRSTERNLPFFEVLKSAEVFQWGPTQQKVFEELKQYLIDLTTLTPPVLGAPLLLYVAALHSVPLKDIMRNREATGRIGKWAVELNEFTIDYVHRSSIQSQALADFIADWTPGAHEEGTSKDAEAWTVFCDGSWGAFGAGAAAVLVAPSKVKTCYAVKLDFSCTNNIAEYEALLLGLQKLRPMGIRRAILKTDSQVIAGHVDKSSKARDPKLERYLDTVRRLEASFEGFSVKNILRGENEHADLLAKSAAQGLPLPSEVFFETIKAPSVELMEKAVLTISPVHSEDWRTEIISFLQGNCLSCDEAYNKRMVARTRPYVIIEGELYKHGVCSPLLKCLSRTEGMELMKEIHAGLCGSHIGSRPLLGKVFQQGFYWSNAASDAAELVQKCEGCQKCARDQKQPSSLTQLIQPTWSLQRWGLDLLGPLPPAQRNLKYVVVAVEYFSKWIEAKPLATITSVTVQKFFWQNIVCRFGVPKAITVDNGTQFDAEAFKEFCEQIGTKIYFALVRHPESNGLVERANGIIMTGIMKLIFNQPRGKWPDELIKVVWSHNTTISRSTGFTPFKLLFGDEAITLEEAKAGSIRTVASAEDKADYSVAKDAIEGIRLQAVENINKYQAETIK

SEQ ID NO: 292553 - protein, 459 aa, Zea mays
  Clone ID: MRT4577_29892C.1.pep
MVAAADLEAAERVVAELREACAARLDEVAAAMEAEMRAGLREEGGSKIKMIVSFVDNLPTGNEEGVFYALDLGGTNFRVLRVQLAGKDRRVAKRESKEVSIPPHLMSGNASELFGFIASALAKYVAAAGEGDGRQRELGFTFSFPVRQTSIASGTLIKWTKAFSVDDAVGEDVVAELQTAMEKQGVDMRVAALINDTVGTLAAGRYNDEDVVVGVILGTGSNAAYVEEASAIPKLKLEGGELPKSGNMVINTEWGNFYSPCLPITEYDQALDEESLNPGEQIFEKLVSGMYLGEIVRRVLLKIASQSSILGDVSHTNLKTRFSLRTPDISAMHHDGTPDLRVVAEKLADNLRVRDTSLDTRKMVVEICDIVTGRSARLAAAGIVGILRKIGRAAPGDERRSVVAIDGGLFEHYAEFRKRLEATLVELLGEEASRLVEVKLTKDGSGLGAALIAAAHSQY

SEQ ID NO: 292554 - protein, 129 aa, Zea mays
  Clone ID: MRT4577_29893C.1.pep
CVCNVICLASFVVSQQAIRVLVVVQVRRRDQLRLLATAHMACILSSHYQAEVDQHLASLCARRHPCYLGYAPVPAVRSLIRSPVYLLVMRGMQDHMRRSPLSSALQLPVMPSAVRHGVHYSGQIRWTLF

SEQ ID NO: 292555 - protein, 116 aa, Zea mays
  Clone ID: MRT4577_29894C.1.pep
SVLGVCIRRSSLFLLPYAECGLLLEIDLLRLGEEKSSGFLLLFFVSVRRFLGLPFCNSSKSSWLLKLISLTKPRTSSSFSAFTELLDGAFCFFSAFLSPRNLRSLTIFPTRPPTRP

SEQ ID NO: 292556 - protein, 412 aa, Zea mays
  Clone ID: MRT4577_29895C.1.pep
MASFNNQAEAASATKLMLPITGGSCSEPANKKQKKEAQRREDLQLKDYPHNDAMVISCVIKGFRVHHVLVDTGSAADFIFTKAFRQMQEPEDKIHDATHPLCGFGRRQIVALGKITMPVTFGFVNNTRTEQVVFDIVDMEYPYNAIIGGGTLNDFEAILHPAYLCMKIPSDQGPIAIHGSQEAARKAEGNWTDSKAIHNIDGAEACEQYKYRRKKAASVDQPKPMLLFEDIAEQKRLRKMSDDKAEGARNEVKRLLSAGVIKEVKYPEWLANNTVMVKKANGKWRMCIDFTDLNKACPKDEFPLPRIDSLVDAAASSEFMSLLDCYSGYHQIWMKKEDEPKTSFITPSGTYCYLQMPEGLKNAGGSFSRMTAKVLHSQIGRNVLTYVDDIIVKSTKQENHIADLQETFANFR

SEQ ID NO: 292557 - protein, 187 aa, Zea mays
  unsure (1)..(187): unsure at all Xaa locations
  Clone ID: MRT4577_29896C.1.pep
EALLLGLRKLRAMGIRRAILKTDSQVIASHVDKSSKARDPKLEKYLDAVXRLEASFEGFSVKNIPRGENEHADLLAKSAAQGXPLPSEVFFEAIKAPSVELMERAVLTISPVQSEDWRTEIISFLQDNCLSSDKAYNKRMEARTRPYVIIEGELYKHGVCSPLLKCLSRTEGMELMKEXHAGLCRSH

SEQ ID NO: 292558 - protein, 167 aa, Zea mays
  Clone ID: MRT4577_29897C.1.pep
PRAQFAIASGSNSRSWGLPNLFRALRSASYWHVAHQYGRISGQIVLRRVTSCIIHGQLSVHGHIYLYSSKNQNLMRLTSWYNGQGKCTKSNPWNCLCVSCAVLIKFSVELMPDLNLVALHPSSKELCPLALRVTPLHAAYVPPVVSGMFIESGELHCVVIGVLSYHI

SEQ ID NO: 292559 - protein, 234 aa, Zea mays
  Clone ID: MRT4577_29898C.1.pep
MQEPEDKIHGATHPLGGFGGRQIVALGKITMPVTFGYVNNTRTEQVMFDIVDMEYPYNAIIGRGTVNAFEAILHPAYLCMKIPSDQGPIAIHGSLEAARKAEGNWTDSKAIHNIDGAEAYLESRGFGKCLMTKAEGARNEVKRLLSARVIREVKYPEWLANTVMVKKANGKWRMCIDFTDLNKACPKDEFPLSRIDSLVDAAVSGTMIRGTLKTPNSQLVTPINIKLLRPDGCD

SEQ ID NO: 292560 - protein, 84 aa, Zea mays
  unsure (1)..(84): unsure at all Xaa locations
  Clone ID: MRT4577_29899C.1.pep
LGQFSPICWLLLSIQGLKPQSRNLAQLSTTSRSNAILYIKKSMYCIRKCTLVHPRTLLNRKPDPRMXRHTPPLPNXTSLSSLLP

SEQ ID NO: 292561 - protein, 75 aa, Zea mays
  Clone ID: MRT4577_2989C.1.pep
TPGGTMDRLWGVQLTGSYLDPAIKYIYTPRRGGPFNFWAPFPGRAGRFNCNCRRSNPNWGPNCRCWNSNPRPWGA

SEQ ID NO: 292562 - protein, 69 aa, Zea mays
  unsure (1)..(69): unsure at all Xaa locations
  Clone ID: MRT4577_298C.1.pep
MFGNMXEIXIIGDLTGSNKNAHLKGNLVLMRKTVLGFDCTSIVVFLMDFLILVSLILFFFYLYSLFSNY

SEQ ID NO: 292563 - protein, 88 aa, Zea mays
  Clone ID: MRT4577_29900C.1.pep
RNADVISFGLRIPLIGTAIFAIQICTFWPPYILSMWYWKSPRNCDRMSLGFSYRRDKDALEFQVQHMLHFCAPYILRMWNRARTQSIV

SEQ ID NO: 292564 - protein, 599 aa, Zea mays
  Clone ID: MRT4577_29901C.1.pep
MAGDSVPVSTPRARRSHTLGIYVDRRVKATDSVLHLRTSPQHWRPPPVNSLPLIELMASFNNEAEVASATKMVLPITGGSCSEPANKKQKKEAQRRVQHVGVQGPFIKLKWSHIPITFSQEDLQLKDYPHNDAMVISCVIKGFMVHNVLVDTDSAADIIFVKVFRQMQEPEDKIHDATHPLCGFRGRQIVALGKITMSVTFGFVHNTRTEQVVFDIVDIEYPYNAIIGCGPLNAFEAILHPAYLCMKIPLEQGPIAIHGSREAGGKAEENWTDSKAIHNIDGAEACEQYKYRREKAASADQPKPMLLCEDIAEQKVLLGSQLSKEQEKTLIRFLFNNKDVFAWSDNDLCGVNRDVIEHSLNVDPSFRPRKQRLQKMSDDKAEGARNEIKRLLSAGVIREVKYPEWLANTIMVKNANGKWRMCIDFTDLNKACPKDEFSLPRIYSLVDAAASPELMSLLDCYSGYHQIWMKKEDESKTSFITPSGTYCYLRMPEGLKNVGGSFSRMTAKCVFGVKKASHSAVSAALVQDKLEGQIKKKLRHYFQAFHIIVPSSQSLKDIMRNIEATGRIGKWAAELNEFSIDYVHRSSIQSQALADFITD

SEQ ID NO: 292565 - protein, 59 aa, Zea mays
  unsure (1)..(59): unsure at all Xaa locations
  Clone ID: MRT4577_29902C.1.pep
KSNTACXXAHYKARSPCSTLXPNNVPAXETNIEPAFHISXXGDFXXIAXXSPIFESDXI

SEQ ID NO: 292566 - protein, 189 aa, Zea mays
  Clone ID: MRT4577_29903C.1.pep
RKLKAMGIRRAVLKTDSQVISSHVDKSCRARDPKLEKYVDTVRRLEASFEGFFVKNIPRGENEHTDLLAKSAAQGLPLPSEVFFETIRAPSVELLERAALNISPVHSEDWRTEIISFLQGNCLSDDEAYDKRIEARARPYVIIEGELYKHGVCSPLLKCLSRAEGIELMKEVHAGLCGSHIESRVDLQA

SEQ ID NO: 292567 - protein, 413 aa, Zea mays
  Clone ID: MRT4577_29904C.1.pep
MASFNNQARAASAPKLVLPITGGSCSEPANKKQKKEAQRRVQHVGVQGPFIKSRWSHIPITFSQEDLQLKDYPHNDAMVISCVIKGFLVHNVLVDTGSAADIIFAKAFRQMQEPEDKIHDATHPICGFGGRQIVALGKITMPVTFGFVNNTRTEQVVFDIVDMEYPYNAIIGRGTLNAFEAILHPTYLCMKIPSDQGPIAIHGSQEAARKAEGNWTGSKAIHNIDRAEACEQFKYRREKAASADQSKPMLLCEDIAEQRVLLGSQVSEKQEKTLIRFLFNNKDVFAWSANDLCGVNRDVIEHSLNVDPSFRPRKQRLRKMSDDKAEGARNEVKRLLSAGVIREVKYPEWLANTVMVKKANGKWRMCIDFTDLNKACPKDEFPLPRIVWQNLPSYWAHMHLSLSQRPQTAMHVH

SEQ ID NO: 292568 - protein, 40 aa, Zea mays
  Clone ID: MRT4577_29905C.1.pep
SLFGRLLQDVMLRCHCVNMSAQRTMAHRITLPRMDLAPDG

SEQ ID NO: 292569 - protein, 983 aa, Zea mays
  unsure (1)..(983): unsure at all Xaa locations
  Clone ID: MRT4577_29906C.1.pep
MVISCVIKGFLVHNVLVDTDSAADIIFAKAFRQMQEPEDKIHDATHPLCGFGGRQIVALGKITMLVTFGFVHNTRTEQVVFDIVDMEYPYNAIIGRGTLNAFEAILHPANICMKIPLEQGPIAIYGSQEAAGKAEGNWTDSKAIHNIDGAEACEQYKDVIEHSLNVDPSFRPRKQRLQKMSYDKVEGARNEVKRLLSAGVIREVKYSEWLANTVMVKKANGKWRMCIDFTDLNKACPKDEFPLPRIDSLVDAAASSELMSLLDCYSGYHQIWMKKEDESKTSFITPSGTYCYLRMPEGLKNAGGSFSRMTAKVLHSQIGRNVLTYVDDIIVKSTKQENHIIDLQETFANFRQAGLKLNPEKCVFGVKKGKFLGCLVSTKGIEANPSKIEAILRMEPPSTKKGAQRLAGRLASLNRFISRSAERNLPFFEILKSAEVFQWGPAQQKAFEELKQYLIDITTLTPPTPGAPLLLYVAASHSAVSAALVQEKLEGQIKKQAPVYFVSEVLSLSKKNYTELEKVLYAVLMASRKLRHYFQAFHIIVPSSQPLKDIMRNREATGRIGKWAAELNEFSIDYVHRSSIQSQALADFIADWTPVAQEEEANKDAEAWIVFCDGSWGTFGAGAAAVLVAPSKVRTCYAIKLDFSCTNNIAEYEALLLGLRKLKAMGIRRAVLKTDSQVISGHVDKSCRANDPKFEKYLDTVRRLEASFEGFSVKNIPRGENEHADLLAKSAAQRLPLPSKVFFETIRAPSVELLERAVLNISPIHSEDWRTEIISFLQAFKEFCNQIGTKIHFASVRHPESNGLVERANGIIMTGIMKLIFNQPRGKWLEELIKVVWSHNRTVSRSTGFTPFKLLFGDEAITPEEVKAGSIRTTASIEDEADYHVAKDTIDGVRLQAVENINKYQAETIKWRDRKVRLKNIKPGXWCFRXVANPDTVGKLQLKWEGHFLVVSSSRPGSYRLKDMDGNDIPRSWNADELRWYYV

SEQ ID NO: 292570 - protein, 90 aa, Zea mays
  unsure (1)..(90): unsure at all Xaa locations
  Clone ID: MRT4577_29907C.1.pep
FCGLCVVASWGWSCGGASSPCCAXRCWCWGFLFRSAFFGGLGLCRSGRAVRGPLPXPGSYCPXVLNTPPXXCVVRVPEPGWVKPGITSRS

SEQ ID NO: 292571 - protein, 77 aa, Zea mays
  Clone ID: MRT4577_29908C.1.pep
PPLHLPPPFYIPPPFYLPPQQQPQPWQYPTQPPQLNPCQQFRSCRVNNLSNPFLGHCTHFLKHQCNPAVTPYSSPQC

SEQ ID NO: 292572 - protein, 79 aa, Zea mays
  Clone ID: MRT4577_29909C.1.pep
FCRTLSLQLYTAVAHGAHVATMTQIVFIRCSTRANQSRYQPPRFIQLLRHPLPLPVVAIRGTHVLETHRAGHAVRSLRP

SEQ ID NO: 292573 - protein, 79 aa, Zea mays
  Clone ID: MRT4577_2990C.1.pep
HILGEQKSRSHHIVFCCLPYQSISYFQETLFSPLLITHLTPSGTYLPRFPAPNKSLRLLRPVLTRAYNLVSSITHTHPL

SEQ ID NO: 292574 - protein, 52 aa, Zea mays
  unsure (1)..(52): unsure at all Xaa locations
  Clone ID: MRT4577_29910C.1.pep
MFVKWMDRDGQYCLNVRCGLKNWSEISYAVVYIVIELQGSYMIWGWPNTSTX

SEQ ID NO: 292575 - protein, 163 aa, Zea mays
  Clone ID: MRT4577_29911C.1.pep
MVESLPTKRGCEGCGGWEWNNELAVGVVWKEPPESTTQSVGEGEGGEATREGGRASGRDSDGVAGKSVSEGEVTGGRSNHGGKEVGHGILWGEALHAGKGTGDHGCVEESCSSRREGDIANDNGMAARVSGVYEPDRHGLGVVAVGGHGKNLGRAMAAMAARK

SEQ ID NO: 292576 - protein, 85 aa, Zea mays
  Clone ID: MRT4577_29913C.1.pep
MIFVPIESGKTESRVFGHGLMAHLCFLAHVKPRPTLVHYVSLLPAVHAHNPQRPNPVADARKDKDLVLRRKPANGVGVNGYFRWV

SEQ ID NO: 292577 - protein, 61 aa, Zea mays
  Clone ID: MRT4577_29914C.1.pep
SRIGALWNIINGTVSREPNVRSFLTRPCQGWTKPMCIVRHTYCDQYHTTDAVMTVPVKLDT

SEQ ID NO: 292578 - protein, 562 aa, Zea mays
  Clone ID: MRT4577_29915C.1.pep
MALSASPAQEELLQPAGRPLRKQLAAAARSINWSYALFWSISSTQRPRVLTWTDGFYNGEVKTRKISHSVELTADQLLMQRSEQLRELYEALRSGECDRRGARPVGSLSPEDLGDTEWYYVICMTYAFLPGQGLPGRSSASNEHVWLCNAHLAGSKDFPRALLAKSASIQTIVCIPLMGGVLELGTTDKVPEDPDLVSRATVAFWEPQCPTYSKEPSSNPSAYETGEAAYIVVLEDLDHNAMDMETVTAAAGRHGTGQELGEVESPSNASLEHITKGIDEFYSLCEEMDVQPLEDAWIMDGSNFEVPSSALPVDGSSAPADGSRATSFVVWTRSSHSCSGEAAVPVIEEPQKLLKKALAGGGAWANTNCGGGGTTVTAQENGAKNHVMSERKRREKLNEMFLVLKSLVPSIHKVDKASILAETIAYLKELQRRVQELESRRQGGSGCVSKKVCVGSNSKRKSPEFAGGAKEHPWVLPMDGTSNVTVTVSDTNVLLEVQCRWEKLLMTRVFDAIKSLHLDALSVQASAPDGFMRLKIGAQFAGSGAVVPGMISQSLRKAIGKR

SEQ ID NO: 292579 - protein, 44 aa, Zea mays
  Clone ID: MRT4577_29916C.1.pep
RSIWRVQWNGPPNQMTGPLFIPWYITLFLASALGSPSLMQSADP

SEQ ID NO: 292580 - protein, 196 aa, Zea mays
  unsure (1)..(196): unsure at all Xaa locations
  Clone ID: MRT4577_29917C.1.pep
PPPAQPSPPSSRRRPFPLPRPPPPAPLPPRAXPVDPPVAPGRAPAPTPPPHPLHRPAPPSAPRXPPSWPPXGARAGGRSSPATPTAPLLRRSARRRCVPLRPLASHRAPSPLWPLCSYCARQKPLAPXANAPPPPTAPSSRVKSAPSSAAPXLPPQGRSPVFPYRCVLALLQLSSACTAAVHLVEDWSDAGRTLGR

SEQ ID NO: 292581 - protein, 73 aa, Zea mays
  Clone ID: MRT4577_29918C.1.pep
AFCQLGMLCSARQVEHLIHICSHRLECTHPAPSKENFSCWSEDRSVMQNGLLSNILCLMQIQHMLTVRYFTID

SEQ ID NO: 292582 - protein, 56 aa, Zea mays
  Clone ID: MRT4577_29919C.1.pep
SFWRCRIICCSKFYDTVKNKKKKVSNEVLSYYRAIANGYKKQYKVWSRVATTRVLE

SEQ ID NO: 292583 - protein, 923 aa, Zea mays
  Clone ID: MRT4577_2991C.1.pep
MDPKGKGIVINDKEKESFVNEPRDDKSNDSGSGHKRKDGKKKKTRRIKEIVYYDSDESSSSQKDDDHDKQKTVNSNFSFDYSRIPYSSNAHLLPIPLGKPPHFDGEDYGFWSHKMRTHLFSLHPSIWEIVENGMKFDSSDSPSFINEQIHKNAQATTVLLASLCRDEYNKVSGLDNAKQIWDTLKISHEGNDVTLLTKTELVEGELGRFAMIRGEEPTQTYNRLKTLINKIRSYGSTRWTDHDVVRLMLRSFTVLDPHLVNNIRENPRYTKMSPEEVLGKFVSGRMMIKEARYVDDALNGPINEPQPFALNATRSKEALPSKVAQIEAVGLNDEEMALIIKRFKTVLKGRNGQPSKTKTKGKRSCFKCGKLGHFIANCPDNESDQEKGNKREKKKHYKKAKGEAHLGKEWDSDCSSSDSDNEGLAATAFNKSALFPNERHTCLMAKEKKVSTRNSTHASSSGDDSSDDDEIDYSSLFKGLDRITIGKINELIDALNEKDKLLEKQEDLLYEEHDKFLEAQKSHALEVKRNEMLTCELSSCHETISKLKSINDELNAKIEIASKSTTCVENVVICNRCKDFDIDACSEHIASIAKLNNEVASLNAQLKTSKSDFEKLKFARDAYTVGRHPSIKDGLGFKREAKNLTSHKAPISAKEKGKAPMATSAKRNHAFLYHDKRQTRNRSYDAFDSYVYDSHAMFAPSSSYVYDRNITRRNVVPKRNVANVHKKVYASGGSSWIIDSGCTNHMTGEKKMFTSYVKNKDSQDSIIFGDGNQGKVKGLDVSVFRRSDGSLAFKGVLDSKLYLVDFAKEEAGLDACLIAKTSMGWLWHRRLAHVGMKNLHKLLKGEHVIGLTNVQFEKDRPCAACQAGKQVGGSHHTKNVMTTSRPLEMLHMDLFGPVAYLSIGGRKVRNPRDSQTLPQESSK

SEQ ID NO: 292584 - protein, 70 aa, Zea mays
  Clone ID: MRT4577_29920C.1.pep
RHETPSDGESDVRSRACWRDTSFESCPQVLDRFSSLRLPACVVGILVCSALFSPRAGWLNSGSQCGVDGV

SEQ ID NO: 292585 - protein, 217 aa, Zea mays
  Clone ID: MRT4577_29921C.1.pep
MAAGYRAEDDYDYLFKVVLIGDSGVGKSNLLSRFTRNEFSLESKSTIGVEFATRSLQVDGKVVKAQIWDTAGQERYRAITSAYYRGAVGALLVYDVTRHSTFENVERWLKELRDHTDPNIVVMLVGNKSDLRHLVAVQTDEGKAFAERESLYFMETSALESTNVENAFAEVLAQIYRIVDKRAVEAGEDAASGPGRGEKINIKDDVSAVKKGGCCSS

SEQ ID NO: 292586 - protein, 530 aa, Zea mays
  Clone ID: MRT4577_29922C.1.pep
MASFNNQAEVASATKLVLPITGGSCSEPANKKQKKEAQRRVHHVGVQGPFIKSKWSHIPITFSQEDLQLKDYPHNDAMVISCVIKGFLVHNVLVDTGSAADMIFAKAFRQMQEPEDKIHDATHPLCGFEGRQIVALDKITMPVTFGFVHNTRTEHVVFDIVDMEYPYNAIIGRGTLNDFEAILHPTYLCMKIPSEQGPIAIHGSQVAARKAEGNWTDSKAIHNIDGAEACEQYKYRREKAASADQPKPMLLCEDIAEQKVLLGSQLSEEQEKTLIRFLFNNKDVFAWSANDLCGVNRDVIEHSLNVDPSFRPRKQRLWKMSNDKAEGARNEVKRLLSAGVIREKANGKWGMCIDFTDLNKACPKDGFPLPRIDSLVDAAASSELMCLLDCYSGYHQIWMKKEDKSKTSFITPSGTYCYLRMPEGLKNAGGSFSRMTVKVLHSQIGRNVLTYVDDIIVKSTKQENHITDLQETFANFRQAGLKLNPEKCVFGVKKGKFLGYLVSTKGIEANPNKIEAILRMEPPSTKKGAQ

SEQ ID NO: 292587 - protein, 373 aa, Zea mays
  Clone ID: MRT4577_29923C.1.pep
MMKGPFIKSKWSHIPITFSQEDLQLKDYPHNDAMVMSCVIKGFLVHNVLVDTGSIADIIFAKAFRQMQEPEDKIHDATHPLCGFGGRQIVALGKITMPVTFRFVHNTRTEQVVFDIVDMEYPYNAIIGRGTLNAFEAILHPAYLCMKIPSEQGPISIHGSQEAARKAEGNWTDSKAIHNIDGNEACEQYKYRREKAASADQPKPMLLCEDIAEQKVLLGSQLSEEQEKTLIRFLFNNKDVFAWSANDLCGVNRDVIEHSLNVDPSFRPRKQRLQKMSDDKAEGARNEVKRLLSAGVIKEVKYPEWLANTVMVKKANDLNKACPKDEFPLPRIDSLVDAAASSELMSLLDCYLGYHQIWMKKEDEPKTSFITPS

SEQ ID NO: 292588 - protein, 36 aa, Zea mays
  Clone ID: MRT4577_29924C.1.pep
PCSRRASSPPSLCLPWMQCTSRTCLISTQRQTCAYP

SEQ ID NO: 292589 - protein, 397 aa, Zea mays
  Clone ID: MRT4577_29925C.1.pep
MGIRRAVLKTDSQVISGLVDKSCKARYPKLEKYLDTVRRLEASFEGFSAKNIPRGENEHADLLAKSAAQGLPLPSEVLFETIKAPLVDLLERVVLNISPVYNEDWRTEIMSFLQGNFLLDDEAYQKRIAARARPYVIIEGELYKHGVCSPLLKCLSRTEAITPEEAKAGSIRTMASAEDEADYSVAKDAIEGIKLQVVENINKYQAETIKWCDRKVRLKNIKPGHLVLWRVANPDTVGKLQLKWEGPFLVVSSSRPGSYRLKDMDGSDIPRSWNADELRRSTRAVSPEDVNVKNGHAPSSATRKRKKHGEARKTSLRGCRARRSCKKPFLRERSLQLRLGQPVCKYYKLNSKFKGKARFQERSSGAPRSYQGTKVAVSSNNIIEVINLTFDVFEGSW

SEQ ID NO: 292590 - protein, 621 aa, Zea mays
  Clone ID: MRT4577_29926C.1.pep
MALFNNQARAASASKLVLPITGGSCSELVNKKQKKEAQRRVHHVGVQGPFIKSRWSHIPITFSQEDVQLKDYPHNDAMVISCVIKGFLVHNVLVDTGSVADIIFAKVFRRMEEPEDKIHDATHPLYGFGGRQIVALGKITMPVTFRFVNNTRTEQVVFDIVDMEYPYNIIIGRGTLNAFEAILLPAYLCMKIPSDQGPIAIHGSQEAARKAEGNWTESKAIHNIDGAEAYVFAWSANDLCGVNKDVIEHSLNVDPSFRPRKQRLRKMSDGKAEGARNEVKRHLSAGVIREVKYPEWLAKTVMVKKANGKWRMCIDYTDLNKACPKDEFLLPRLDSLVDAAASSELMSLLDCYSSYHQIWMKKEGEPKTSFITPSGTYCYLQMPEGLKNAGGSFNRMTVKVLHSQIGRNVLTYVDDIIVKSTKQENHIVDLQETFANFRQAGLKLNPEKCVFGVKKGKFLACLVSTKGIEANRNKIEAILRMELPSTKKGAQQLIGRLASLNRFISRSAERNLPLFEVLKLDEVFQWGSAQQKAFEELKQYLIDLTTLTPRAPGAPLLLYVAASHSAVSAAFVQEKLEGQTKKQPPVYFVSEVLSLSKKNYTELEKLLYDVLMASRKLRHRS

SEQ ID NO: 292591 - protein, 39 aa, Zea mays
  unsure (1)..(39): unsure at all Xaa locations
  Clone ID: MRT4577_29927C.1.pep
YIFFFFFFFIWVFFKYRGTEQXLTTTNLTEPLPQGGLSY

SEQ ID NO: 292592 - protein, 712 aa, Zea mays
  unsure (1)..(712): unsure at all Xaa locations
  Clone ID: MRT4577_29928C.1.pep
MASSNNQAGVASAPKLVLPITGGSCSEPANKKQKKEAQRRVQHVGVQGPFIKSRWSHIPITFSQEDLQLKDYPHNDAMVIFCVIKRFLVHNVLVDTGSAADIIFAKAFRQMQEPEDKIHDATHPLCGFGVRQIVALGKITMPVTFGFINNTRTKQVVFDIVDMEYPYNTIIGRGTLNAFEAILHPAYHCMKIPSDQGPIAIHGSQEAARKAEGNWTDSKAIHNIDGAEACEQYKYRREKAASADQPKPMFLCEDIAEQKEKALTKFLFNNKDVFAWSANDLCGVNRDVIEHSLNVDPSFRPRKQRLRKMSDDKAEVARNKVKRLLSVGVIREVKYPEWLANTVMVKKANGKCRMCIDFTDLNKACPKEEYPLPRIDSLVDAAASSELMSLLDCYSGYHQIWMKKEDEPKTSFITPSGTHFYLRMPEGLKNAGGSFSRMTAKALHSQIGRNMLTYVDDIIVKNTKQENHIADLQETFANFRQAGLKLNPEKCVFGVKKGKFLGWLXVSTKGIRANPNKIEAILRMEPPSTKKGAQQLTGRLASLNRFISRSAERNLPFFEVLKSTKVFQWGSAQQKAFEELKQYLIDLTTLTPPAPGAPVLLYVAASHSTVSAALVQEKLEGQLKKQAPVYFVSEVLSLSKKNYTELEKVLYAVLMASRKLRHYFQAYHIIVPSSQPLKDIMRNREATGRIGKWAAELNEFSIDYVHRSSIQS

SEQ ID NO: 292593 - protein, 192 aa, Zea mays
  unsure (1)..(192): unsure at all Xaa locations
  Clone ID: MRT4577_29929C.1.pep
NNIVEYEALLLGLRKLKAMGISRAVLKTDSQVITGHVDKSCKARDPKLEKYLDTVRRLEASFEGFSVKNISRGENERADLLAKSAAQGLPLPSEVLFETIKAPSVDLLERAVLNISPVYSEDWRTEIMSFLQGNFISDDEAYHKRIAAIARPYVIIEGELYKHGVCSPLLKCLSIAEGIELMKEXHTGLCWI

SEQ ID NO: 292594 - protein, 54 aa, Zea mays
  Clone ID: MRT4577_2992C.1.pep
SLEGNKHICLLAGAFNFTCVMYNKKTAVQLHTNKNGNTRNSLLVTKNSSKLQTS

SEQ ID NO: 292595 - protein, 793 aa, Zea mays
  unsure (1)..(793): unsure at all Xaa locations
  Clone ID: MRT4577_29930C.1.pep
MSVLLFLLLRKCQCLPLLKLKPMVVICPLLTPMGVILLKLTPMGVLSVLLIKMMKKSVGTASAPKLVLPITGSSCSXPANKKQKEEAQRRDLQLKDYPHNDVMVISCVIKGFLVHNVLVDTGSAADIIFAKAFRQMQEPEDKIHDATHPLCGFGGRRIVALGKITMAVTFGFINNTRTEQVVFDIIDMEYPYNAIIGRGTLNAFEAILHPAYLCMKIPSNQGPIAIHGTNDLCGVNRDVIEHSLNVDPSFRPRKQRLQKMSDDKAEGDRNEVKRLLSAGVIREVKYPEWLANTVMVKKANGKWRMCIDFTDLNKACPKDEFPLPRIDSLVDAAASSELMSLLDCYSGYHQIWMKKEDEPKTNFITPSGTYCYLRMPEGLKNAGGSFSRMTAKETFANFRQAGLKLNPEKCVFGVKKGKFLGCLVSTKGIEANPNKIEAILRMEPPSTKKGAQRLTGRLASLNRFISRSAERNLPFFEVLKSAEVFQWGSAQQKAFEELKQYLIDLTTLTPPAPGAPLLLYVAASHSAVSAALVQEKLEGQLKKQAPVYFVSEVLSLSKKNYTELEKVLYAVLMASRKLRHYFQAYHIIVPSSQPLKDIMRNREATGRIGKWAVELNEFCIDYVHRSSIQSQALADFIADWTPGAQEEEASKDAEAWTVFCDGSWGTFGAGAAAVLIAPSKVRKCYGVKLDFSCTNNIAEYEALLLGLRKLKAMGIRRAVLKTDSQVISGHVDKSCKARDPKLEKYLDTVRRLEASFKGFSVKNIPRGENEHADCWGPSTSEGPQKHDLTMFSK

SEQ ID NO: 292596 - protein, 486 aa, Zea mays
  Clone ID: MRT4577_29931C.1.pep
MTSVVLSPLRKQGDVSRIPAALTAVLLQGPGTSPTATLSRTQGSSTSLTATLSRTQGSSTSPTATLACTQGSGTSLPDTLAPSYTPIVHLDPLLASIKDDEAYNKRIEARARPYVIIEGELYKRGVCSPLLKCLSRAEGIELMKEIHAGLCGSHIGSRPLLGKVFRQGFYWPKAASDAAELVQKCEGCQKCARDQKQPSSLTQLIQPTWSLQRWGLDLLGPLPPAQGNLKYVVVAVEYFSKWIEAKPLATITSVTVQKKFWQNIVCRFGVPKAITMDNGTQFDVEAFKEFCEQIGTKIHFASVRHPESNGLVERANGIIMTGIMKLIFNQPRGKWPDELIKVVWSHNTTMSRSTGFTPFKLMFGDEAITPEEAKAGSIRTVASAEDEADYSVAKDAIEGIRLQAMENINKYQAETIKWRDRKVQLKNIKPGHLVLRRVANPDTVGKLQLKWEGPFLVVSSSRPGSCRLKDMDGNDIPRSWNADELR

SEQ ID NO: 292597 - protein, 33 aa, Zea mays
  Clone ID: MRT4577_29932C.1.pep
KKKKKKKKKKKKKKKKKKKKKKKKKKKKKNPPP

SEQ ID NO: 292598 - protein, 56 aa, Zea mays
  Clone ID: MRT4577_29933C.1.pep
EGRAHRHLTPSTAAQNYNLGNTRLVFVRRPLDEHPLAWHSFRLSIFQFVHRHHPAD

SEQ ID NO: 292599 - protein, 53 aa, Zea mays
  Clone ID: MRT4577_29934C.1.pep
KKKGGNRKSAPIIARDSFSFDRIKHLKQGARTICALPKLLGRNQPYLWGVFCP

SEQ ID NO: 292600 - protein, 55 aa, Zea mays
  unsure (1)..(55): unsure at all Xaa locations
  Clone ID: MRT4577_29935C.1.pep
HTNSCVPSSTXIIFQRLNNYQRAFNLNTRPFPKPYPXIFIKLYKLVLLLFILTNL

SEQ ID NO: 292601 - protein, 52 aa, Zea mays
  Clone ID: MRT4577_29936C.1.pep
DDSRLRYSPTTATISRRFFKRRGRHTKSATTTTLLKISQAVLIFLHATYLLP

SEQ ID NO: 292602 - protein, 88 aa, Zea mays
  Clone ID: MRT4577_29937C.1.pep
EMPFEQKEEYPMNKEHCECYPYNIIVEDRRHDADSVYCDGILELHRLPPTCLFLLLVTHVAFHSQEEGQSITSIWRNLRLLLRGRNLL

SEQ ID NO: 292603 - protein, 62 aa, Zea mays
  Clone ID: MRT4577_29938C.1.pep
FSQQIWKNIKKCTSFFLRANLYRLQTRHAQGPDPHLAVEVRAGHPSLLVGAAAVYTACPGPF

SEQ ID NO: 292604 - protein, 127 aa, Zea mays
  unsure (1)..(127): unsure at all Xaa locations
  Clone ID: MRT4577_29939C.1.pep
MEGPSDSDGQVIPSTAGDPHLNSSAAPTDAAGSGSQHVATLRKLLFRRMLVGVNDGRYFLGLFHCVDKQGNIILQDAVEYRSARRSSPSGPREERXLXXILIPAXCRSSCHVDCFIEEQMALLSLCK

SEQ ID NO: 292605 - protein, 94 aa, Zea mays
  Clone ID: MRT4577_2993C.1.pep
CVWGLLFSLPGWFRLMAGGDGRLALRAARPSRGSALYRSIWGSSVAWLGDSLSGSWLGLDHPREPPAPGLVPCIWFVWLCVCHIPALYPPNPQP

SEQ ID NO: 292606 - protein, 87 aa, Zea mays
  Clone ID: MRT4577_29940C.1.pep
PHSIGLLCCIHDLLHLSPGSCLHGSPLKQFNPQIRSLSGLGRRASRWGITSTLGRQRESTRITVRLWMLKLFIWTIIISAYFCHLKM

SEQ ID NO: 292607 - protein, 72 aa, Zea mays
  Clone ID: MRT4577_29941C.1.pep
ACQASLFSCVGTCYFATCITFWSVVSSKYIRDCTLRFRQLSTCDADVQVMVETTLGKEELKDAVFMCTNRVS

SEQ ID NO: 292608 - protein, 58 aa, Zea mays
  Clone ID: MRT4577_29942C.1.pep
AATPVGPRVVVAVTAAAAAAEGTNVWAPPGFGRGILSIKRMGVPVASGPGLGAVPPLD

SEQ ID NO: 292609 - protein, 131 aa, Zea mays
  unsure (1)..(131): unsure at all Xaa locations
  Clone ID: MRT4577_29943C.1.pep
MERPIVLNDALKSMYNADKIGKRQDMIRASSKVIIKFLTAVQRHGXYIGEVEHVDDHRSGKIAVELNARLNKCGVISPRFDIXLKYIDAWTATLLPTXHVGYISLTTSAGIMDHEDVRRKNARGKVLGVFY

SEQ ID NO: 292610 - protein, 212 aa, Zea mays
  unsure (1)..(212): unsure at all Xaa locations
  Clone ID: MRT4577_29944C.1.pep
MEDGRSDAKEASMVELAASLEKVRQIEGGGDGDNVDGNKKLWGLLRLFMACMVSGGIQYGWALQLSLLSPYSQTLGIPHQYVSLTWICGPIAGFVVQPIVGYYSDRCTARMGRRRPFILVGCIIICVSVLLIGFSADIGRALGDTKEHCSVSTGPRWAAAATYIVGFWFLDFANNTVQGPARAMMADLFXGDHXPNVGQAVFCLWMAIGNVL

SEQ ID NO: 292611 - protein, 31 aa, Zea mays
  Clone ID: MRT4577_29945C.1.pep
CNLNIQGRKCWKRQLTNKLMKRMFMCHRHVT

SEQ ID NO: 292612 - protein, 160 aa, Zea mays
  Clone ID: MRT4577_29946C.1.pep
MGHSYGKRAGTRYAFSRDFRQKGMIALNTYLKVYHVGDIVDIKVNGAVQKGMPFKVYHGKTGVIYNVTKSSVGVIVYKKVKHRYIEKRINVRIEHIQPSRSREDFIKRVKANAEAKKQARADGVTVQVKRQPALPREAHTVSLTDNPPETVTPLPYETTI

SEQ ID NO: 292613 - protein, 76 aa, Zea mays
  Clone ID: MRT4577_29947C.1.pep
GAHLLSRNLEHCAIVCKQHNVHGQLATLWVCLRARRFRRRKSSCYSKLNRKRISFPQSPPLSLLPNKPYIKIFNFL

SEQ ID NO: 292614 - protein, 101 aa, Zea mays
  unsure (1)..(101): unsure at all Xaa locations
  Clone ID: MRT4577_29948C.1.pep
ALPAGWPAVEEGMEPRGGXVLLYATKXLDKISTAHXDHTMGFNIIMXDCRTPXMTIGAYADIDGAIIIWXLIKQKDLTLGYDAIKGVYLYMLYGGIMYPWK

SEQ ID NO: 292615 - protein, 60 aa, Zea mays
  Clone ID: MRT4577_29949C.1.pep
DCGIKRFVERQVCRTAYGYDCISFLFVLVWIYKYTHSTIISYITKHQKKKKRTKGVRFRG

SEQ ID NO: 292616 - protein, 89 aa, Zea mays
  unsure (1)..(89): unsure at all Xaa locations
  Clone ID: MRT4577_2994C.1.pep
TFLFHLGHLSNLXLCLHHKDPLVNVSSGACGVKIVKASWCSLFQWVHAICIPVKAPFPWQNGPLFKILRGPQKKKNQKKKKKKKKKKKX

SEQ ID NO: 292617 - protein, 38 aa, Zea mays
  Clone ID: MRT4577_29950C.1.pep
PGVLFEYKTKKATRERNIRPRSTASQVIGGHMLCRSKP

SEQ ID NO: 292618 - protein, 212 aa, Zea mays
  unsure (1)..(212): unsure at all Xaa locations
  Clone ID: MRT4577_29951C.1.pep
MASADLLRREEEFYESLFDSAKGDAAAAKTRGQMIERKIEALEDMATKVSNRRSRRWLNDRLLIELVPRLRVEEIKGLFAPPPFGEEAPLSAFCRTSVGEWDAFRSIDMDVEARFMQRMKQSSAKQKNLVNEDESIVLNAWRRIDCQTREAMKRNFLPELLEIYEERIRAFIEDTTDKDVLVLNVQDXXFQRLLFXHGVCEFYNVTSTTTGT

SEQ ID NO: 292619 - protein, 235 aa, Zea mays
  Clone ID: MRT4577_29952C.1.pep
MALANKLGGLLKKATRSNLSVYQAIRCMSSKLFVGGISYQTDDHSLRDEFAKYGQVIEARIIIDRESGRSRGFGFVTYTSSEEASAAITALDGKTLDGRSIRVNHANEKTGGFRGGGGYGGGGYGGGGGYGGGGGGGGDGGGHYGGGGGSGGYGGGDYGGNFTAGGSDSFANSNFGSDSSFGGNGAGGFDATGGSTGDDGFSGTPDDNFGGNKNEETMDDIFKDDEPDSYADKRS

SEQ ID NO: 292620 - protein, 247 aa, Zea mays
  Clone ID: MRT4577_29953C.1.pep
MALANKLGGLLKKATSSNPSVYQAIRCMSSKLFVGGISYQTDDHSLRDEFAKYGQVIEARIIIDRESGRSRGFGFVTYTSSEEASAAITALDGKTLDGRSIRVNHANEKTGGFRGGGGYGGGGYGGGGGYGGGGGHYGGGGGSGGYGGGDYGGNYSNRGGGGDYGVAGGGGGTFTAGGSDSFANSNFGSDSSFGGNGAGGFDATGGSTGDDGFSGTPDDNFGGNKNEETMDDIFKDDEPDSYADKRS

SEQ ID NO: 292621 - protein, 254 aa, Zea mays
  Clone ID: MRT4577_29954C.1.pep
MALANKLGGLLKKATSSNPSVYQAIRCMSSKLFVGGISYQTDDHSLRDEFAKYGQVIEARIIIDRESGRSRGFGFVTYTSSEEASAAITALDGKTLDGRSIRVNHANEKTGGFRGGGGYGGGGYGGGGGYGGAGGGGGYGGGHYGGGGGSGGYGGGDYGGNYSNRGGGGDYGVAGGGGGNFTAGGSDSFANSNFGSDSSFGGNGAGGFDATGGSTGDDGFSGTPDDNFGGNKNEETMDDIFKDDEPDSYADKRS

SEQ ID NO: 292622 - protein, 41 aa, Zea mays
  Clone ID: MRT4577_29955C.1.pep
VKQTKHPIKADPRASPDYKDMTNFRGTKKVGRLFGNCFGGC

SEQ ID NO: 292623 - protein, 89 aa, Zea mays
  Clone ID: MRT4577_29956C.1.pep
LIPNLEGYSIGRVLCFIELSTQSYAVCMTVTDLHQTQAPAILKNVNASTQRKLINCRLEARKDPEPKSWRILDNLLYDLATAWKVDLPM

SEQ ID NO: 292624 - protein, 52 aa, Zea mays
  Clone ID: MRT4577_29957C.1.pep
KLMETTIHTFIFPVFTYYAERLQLVLRSRLKTIILILSINHYTSLKNKKPPY

SEQ ID NO: 292625 - protein, 58 aa, Zea mays
  Clone ID: MRT4577_29958C.1.pep
HMLFTTFPRYGNVRYHIKGLVGQVRIEETWGRLNPPFLNTRKINDLEFPWIQTQPNKP

SEQ ID NO: 292626 - protein, 86 aa, Zea mays
  Clone ID: MRT4577_29959C.1.pep
HSCSCLSAAVVVLASAQVVLEETMPVRQKHGAPSSLPAPTSSRGAYHILPADVLHSRRTSLMPYVGARVPVSGDLRRRDLGRVLIA

SEQ ID NO: 292627 - protein, 41 aa, Zea mays
  Clone ID: MRT4577_2995C.1.pep
LLPCLHHGITLASFKWPTPLPPSGGVLLRVGKTKNYRAGTC

SEQ ID NO: 292628 - protein, 42 aa, Zea mays
  Clone ID: MRT4577_29960C.1.pep
PVESWGKLQVWPFVFQPGKGTFTPPLRAVQIIIIYPYLMTIK

SEQ ID NO: 292629 - protein, 114 aa, Zea mays
  unsure (1)..(114): unsure at all Xaa locations
  Clone ID: MRT4577_29961C.1.pep
KXXXXXXXXXXXXXXXXXXXXXXXXXXXXXXXXXXXXXXXXXXXXXXXXGXXXXXLCFKXXIAVRDTXVRLXRXRPPCXGFNFLQHFFFFYGGEKTHLGPFKKFQLIFLKITNL

SEQ ID NO: 292630 - protein, 41 aa, Zea mays
  Clone ID: MRT4577_29962C.1.pep
LNIYLARDTIDLAAVNNLLSVRQTQTFIYRSTPCAQTLNET

SEQ ID NO: 292631 - protein, 105 aa, Zea mays
  Clone ID: MRT4577_29963C.1.pep
MDQQNQVIEAPLLQQQREDGTSVQGGGEADSHGHRRGSNKLTCRAFVFLIYFEGAGGAYGAELAVKGGGLFFPLLGLLAFALAGGGSVMRVRVFCGCGPSGAFVG

SEQ ID NO: 292632 - protein, 222 aa, Zea mays
  unsure (1)..(222): unsure at all Xaa locations
  Clone ID: MRT4577_29964C.1.pep
MSHRKLXNARHGSLGFLPRKRSSRHRGKEKAFPRXTPREPCHLTAFLGYKAGMTRIVREGEKPESKLHKKETCEAVXTIIESPPLVIAGLGEYVETXRGLRTLNSDWCQDLNEQVRRRFYKNWSKSKKKAVREYALKYENDAGKKESQLQLGKMKKNGSAIRAIGRTQIRKMNGLKEKKAHLMEIXVNVRTIADKVHYGXDFXEKEVPVXDAALQKEEMIDI

SEQ ID NO: 292633 - protein, 64 aa, Zea mays
  Clone ID: MRT4577_29965C.1.pep
SSSKCIKSSTSLRAGLMPSELESMIPFNYMISLAKAFLKRFLFLRENTSYYLEKIGMSCKNGVS

SEQ ID NO: 292634 - protein, 108 aa, Zea mays
  unsure (1)..(108): unsure at all Xaa locations
  Clone ID: MRT4577_29966C.1.pep
AARGAGILDEYTAFTGPFTSISYHRLMKLHASSSRHTYNCDGHTCKYLGEDGFTYCVVAAEAVGQQSSIACMDRAKEDFTXRCGGGQDVPGVPNSLNREWGSTTYRDT

SEQ ID NO: 292635 - protein, 203 aa, Zea mays
  Clone ID: MRT4577_29967C.1.pep
IPSLPISTSKQSLWVNRMCFILQLFIILSPLFFFSQALKFVFLRIRQTRMEPSRHGILRIGCLFRLVALSLMATATPSSNCVLVNVPKTIGSSFSSLLIMTFVAPTLMMSPAVVLSNFLELVVAGDSNSGATNVGVLSLCHLPDLLTFMAKNSSMPLDLVPEDRIVDFPIGIALVELAYQMLKFVVPPKPGDTTTYKGGQEDM

SEQ ID NO: 292636 - protein, 131 aa, Zea mays
  Clone ID: MRT4577_29968C.1.pep
VPLFLRVFFLQRGCPLPPVDRNFQFCPMTFISQTPLSPILLRFSPFCPGTPVPPGPPGSSFYSVPPGGFSAPPLDRETPPPPQKRPARATQKPPGPGPPGTPEKPDKQKKQKKKKKKKQKKKKKKKKKPQT

SEQ ID NO: 292637 - protein, 71 aa, Zea mays
  Clone ID: MRT4577_29969C.1.pep
CLQGRTDFFFLGVVSTSSLPVQTCLFYLTNFKTHTTYTWNRKTKKDKENQEEQNLLQEQFSQASTFYTTSN

SEQ ID NO: 292638 - protein, 552 aa, Zea mays
  unsure (1)..(552): unsure at all Xaa locations
  Clone ID: MRT4577_2996C.1.pep
MALATNVAAAAGXAISGGSASQPRRASPSLLLLRRRCAVGAVHAAEPSKNPGVVPAAAKASTPTVVPENDTVPAPSLAPNASLRARWAVDSWRTKKALQQPEYPNQTELEEAVNTIEKSPPIVFAGEARHLEERLADAAVGRAFLLQGGDCAESFKEFTSANIRDTFRVILQMAVVLTFGGQMPVVKVGRMAGQFAKPRSDAFEERGGVKLPSYRGDIINGEAFDEKSRVPDPQRMLKAYYQSASKLNLLSAFATGGYADIQRVTQWNLDFTKHSEQGDRYRELAHRVDDALGFMGAAGLTVDQPLTTMIEFWTSHECLLLPYEQALTRQDSTTGLFYDCSAHMLWVGERTRQLDGAHVEFLRGIANPLGIKVSDKMEPGELVKLIDILNPTNKPGRITVITRMGAENIRVKLPHLIRAVRQAGQSVTWITDPMHGNTIKTPCGRKTRPFDSILAEVRAFFDVHDQEGSQPGGVHLEMTGQNVTECTGGSSNVTFDNLRDRYHTQCDPRLNASQSLELAFILAEKLRKRRMRRSSVASGLGGSILPLPPFGF

SEQ ID NO: 292639 - protein, 73 aa, Zea mays
  Clone ID: MRT4577_29970C.1.pep
LVFRFRRHIKGSWKAAICFFRWMLYVCYLLRKMIWVTINQLSRMAQQAPKGHPMGLCGNATHWFLLFTKSLQG

SEQ ID NO: 292640 - protein, 155 aa, Zea mays
  unsure (1)..(155): unsure at all Xaa locations
  Clone ID: MRT4577_29972C.1.pep
MQSPTLLAPLVRMPRRSTFYYVSLAGISSAGQPLSIPASVFAMDATSGSWGVFVDSGTDVTRLQSACYAVILDMLXVQGSPSLPRTSVVSLIDTCYHLSERTSVKVPAVSLRFEGVVALRLSEKNYLIAEDGGGSYCLWFTPTNAAVFIIGNMQQ

SEQ ID NO: 292641 - protein, 53 aa, Zea mays
  Clone ID: MRT4577_29973C.1.pep
GDLHGQRGDGIGGALGDELDKSDDRISDSAVVGAEACGSEPREIHESVNCRNA

SEQ ID NO: 292642 - protein, 70 aa, Zea mays
  Clone ID: MRT4577_29974C.1.pep
ALSFSLKIYFNKTNWDHPYSSRTWVGIGSTWQGSSNLAVFDITCILGQVALKSYTVVKGCFFCNAAVELE

SEQ ID NO: 292643 - protein, 63 aa, Zea mays
  unsure (1)..(63): unsure at all Xaa locations
  Clone ID: MRT4577_29975C.1.pep
RAPXAPVSXYMNVVLNLNVHAPNARVYPVVFVFHGFFSFPSCALGIGNIPNVVAFQQPQANPS

SEQ ID NO: 292644 - protein, 75 aa, Zea mays
  Clone ID: MRT4577_29976C.1.pep
PFLKYGFFAINWRIKCPRMKVSPPFLLPHQLCFPETEGIFDIMFYLEKINDIPLSLYPPRQITHLKRKMGPFFPR

SEQ ID NO: 292645 - protein, 73 aa, Zea mays
  Clone ID: MRT4577_29977C.1.pep
SRSCLFYTKNKYTSATANSCVGTSLPSLAGRAERNKTKPHAWEFTTDADLRITYHDDPVEVLNTPDPPQPSTP

SEQ ID NO: 292646 - protein, 62 aa, Zea mays
  Clone ID: MRT4577_29978C.1.pep
APDTGSLPNIVSCNLQDCSWMTCSTIEPAPVCPYLARLARGSSQEHWLESLAIRMVALVIIR

SEQ ID NO: 292647 - protein, 52 aa, Zea mays
  Clone ID: MRT4577_29979C.1.pep
GRYELDRSAGKIFGMTVSLNRLQGQFLVIYSRVRTDIIWWVHWSHIEQMMSV

SEQ ID NO: 292648 - protein, 141 aa, Zea mays
  Clone ID: MRT4577_2997C.1.pep
GSSTRPAPAPHFPLPLPHTRPHLRCHRRSRRAASAAAPSPITWCPAALSSHRRPPRSLRGAVAEIAICFRAPRNRRSSVGDQMIKLSEFYEVEDPEHLFGEDEQAAEDPEVQQVEIAEQELIEGEEQVVQEEPQGEEYDLI

SEQ ID NO: 292649 - protein, 90 aa, Zea mays
  unsure (1)..(90): unsure at all Xaa locations
  Clone ID: MRT4577_29980C.1.pep
RYITRGDGRCKVLDNGRMLTLTLXDRTYGSGLHSPHEYLLGKIDMQLRLVPGNSDGTATPYYLXNQGGPHDEIDFYFLGNVPGEPNTLHT

SEQ ID NO: 292650 - protein, 131 aa, Zea mays
  unsure (1)..(131): unsure at all Xaa locations
  Clone ID: MRT4577_29981C.1.pep
SVGYAYYKRSLKYFQTASRDYKSHLXEAPXIVHMYLFYMYQSVLEHNXCRGLFTPDSRVEIAHTSEMIXVWIGHVKKNLYKMILSQXFAGALDQGAXCIIMFEDXVTGRIFSGPLLETIXNVGKDVISLLC

SEQ ID NO: 292651 - protein, 77 aa, Zea mays
  Clone ID: MRT4577_29982C.1.pep
TFGHAESDDPSLLCALSPTKTLVHLLREDGGLPVARGSYHEEHGRSLHWSGRLSGRATNWWILGIDPKPCWNQSPAG

SEQ ID NO: 292652 - protein, 163 aa, Zea mays
  Clone ID: MRT4577_29983C.1.pep
MSAATSAAAAVSSSRPYPLLQPASRPALVSFPRRQLPSTSVALSASSQLSSRGSPLAPAANPKYHNAKVDAGDEDADGEELLRRFRWQVSRAGVMEEIRRRRRHEDARDKRKRKARSASLRYRRRRFKGPYPSIDDQGLKEQDEENDNWELPAGELPPYITGR

SEQ ID NO: 292653 - protein, 164 aa, Zea mays
  Clone ID: MRT4577_29984C.1.pep
MSAATSAAAAVSSSRPYPLLQPASRPALVSFPRRQLPSTSVALSAPSQLSSRGSPLAPAANPKYHNAKVDAGDEDADGEELLRRFRWQVSRAGVMEEIRRRRRHEDARDKRKRKARSASLRYRRRRFKGPYPSNDDQGLKEQDEEDNDNWELPAGELPPYITGR

SEQ ID NO: 292654 - protein, 94 aa, Zea mays
  unsure (1)..(94): unsure at all Xaa locations
  Clone ID: MRT4577_29985C.1.pep
GXXFYNMSTYILVFFSNXRATGAVKIFYILMLLALXACVANATIFPQYSHASIVVLFSSYLLSMTCFSYVKLYFSILHALISNFIIELTFIILV

SEQ ID NO: 292655 - protein, 271 aa, Zea mays
  Clone ID: MRT4577_29986C.1.pep
MEVATATEASAPAASGGAAGQSHPFPWLDAAISEPYYFLHLLAFFSYFAARSAALSADDGGELHDRLLRREIQAVLVFLVLFVVKIVKEETWEAVIADSLLYAKGLLLAVTLVIDCWLAFAYFLGFLVIYAVAQQPPYDGLGHSNHLTPLQLESLLTEEPTSRFWLVEFRTSFSAKCVQASSILPELSIAYSNKNISFGTIDLGHFPNAAAKFGISMWDHLPTYILFDKVTEVSRFPEITSESKVFVPKVTKKLLCQHFDLDRRLIGYLST

SEQ ID NO: 292656 - protein, 58 aa, Zea mays
  Clone ID: MRT4577_29987C.1.pep
KNRHFLHSKLYILLFSSIRNHHDTQFLSKFDFFSISARHSYSLCSLIFSTARSYKNSP

SEQ ID NO: 292657 - protein, 432 aa, Zea mays
  unsure (1)..(432): unsure at all Xaa locations
  Clone ID: MRT4577_29988C.1.pep
MEVATATEASAPAASGGAAGQGHPFPWLDAAISEPYYFLHLLAFFSYFAARSAALSADDGGELHDRLLRREIQAVLVFLVLFVVKIVKEETWEAVIADSLLYAKGLLLAVTLVIDWWLAFAYFLGFLVIYAVAQQPPYDGLGHSNHLTPLQLESLLTEEPTSRFWLVXVHVFNGILILLSPKFPVHSCPLYYFVKTCSLXCLQLLQMCHSHLIEGLEEPEKNFIWFDGLMETSXFLAQLRNLIXVETQLLYNFSAYHXNIVCLLRXTVSKSDYLMKFGVFSFLLVSEGTCRGFLFKNCPRSFLPIKLGVCFNFPGSLMTGYFYFNANXEFRTSFSAKCVQASSILPELSIVYSNKNISFGTIDLGHFPNAAAKFGISMWDHLPTYILFDKVTEVSRFPEITSESKVFVPKVTKKLLCQHFDLDRRLIGYLST

SEQ ID NO: 292658 - protein, 133 aa, Zea mays
  unsure (1)..(133): unsure at all Xaa locations
  Clone ID: MRT4577_29989C.1.pep
MAPPESVRATPLHHKRSLMMKLPERIDMVKTARVKELPPYDPDWHNIRSGYEERNIYLKQGFADDRFEKMFRGRXTNVSRPAXSSKISXGGITVIILLRLLEMRLIDFDPLAERRLPSQVNNRSGPADCKGCC

SEQ ID NO: 292659 - protein, 95 aa, Zea mays
  unsure (1)..(95): unsure at all Xaa locations
  Clone ID: MRT4577_2998C.1.pep
RDVVKYTGAVKQELGRHVGILGNTTLGAGRTHELNKEGRRLRRDRYTXVCAGTHEWARCVWLARLHCLRGMAILTHQHYESNRWLVCTEHKSAFY

SEQ ID NO: 292660 - protein, 61 aa, Zea mays
  Clone ID: MRT4577_29990C.1.pep
AFAKHCGFPPVEGWKRDLLSLSLASASDGAVESYRDSYHDSDLVREGLRSEGWWPWLPDPQ

SEQ ID NO: 292661 - protein, 46 aa, Zea mays
  Clone ID: MRT4577_29991C.1.pep
LESVDGWDFRCLIDMFRWSNHRRPRGFVPSSPYNVVSIWHSPELRT

SEQ ID NO: 292662 - protein, 66 aa, Zea mays
  unsure (1)..(66): unsure at all Xaa locations
  Clone ID: MRT4577_29992C.1.pep
NGAVLEYACLKGINGVSMTVECSFVQSFEAQIPFFGSKVRLGXNGVEAVLGLGEQVDIELERLEKL

SEQ ID NO: 292663 - protein, 165 aa, Zea mays
  Clone ID: MRT4577_29993C.1.pep
GKHHWVHRPRKMVGRSGKSASSTARKVLTVLLEKAMAKPTVNASREASGMAQSLEPTLTSSSSPSSSVELISTPRYLRIWRLALRCLLFTLVLMPPLLLYPVCESPPSPTRFLAKGTGSSCSTIEEGNSTNPGLGHIMRQSGIGKTYGMTASFAPLRTSMASVSQ

SEQ ID NO: 292664 - protein, 493 aa, Zea mays
  Clone ID: MRT4577_29994C.1.pep
MPPAIPSLVHPSRVRILHPGGSHIHGPVVYWMLRDQRLADNWALLHAAELAAASTPAAPLAIAFTLFPRPFLLGAHLRQLGFLLRGLRRLAADAHARGLPFFLLEGGPAELPSLVRRLGASALVADFSPLRPVREALDAVVQELLRDAANMAVHQVDAHNVVPVWTASGKLEYSAKTFRSKVNKVINEYLVEYPEVPQWAPWCMEQPKSVDWDALINSIFSEAENVPEINWCEPGESSAMEVLLGSKDGFLTKRIKNYDTGRNDPTKPHALSCLSPYLHFGHISAQRCALEAKKRRHLSPKSVDTFLEELIIRRELADNFCYYQPQYDSLAGAWEWARKTLTDHTGDKREHIYTREQLENAKTSDPLWNASQLEMVHHGKMHGFMRMYWAKKILEWTSQPEEALSIAIYLNDKYHIDGRDPNGYVGCMWSICGLHDQGWKERPVFGKIRYMNYAGCKRKFDVDAYISYVKRLVPRAKKRKTEEGESTVKESNV

SEQ ID NO: 292665 - protein, 48 aa, Zea mays
  Clone ID: MRT4577_29995C.1.pep
SKKSFLQNFSVTAGPQYNAQVMGPISFIFSVVKGKIKLPAPFLYKTQP

SEQ ID NO: 292666 - protein, 99 aa, Zea mays
  Clone ID: MRT4577_29997C.1.pep
GEARGRIIGFLGRETTKMQGGGGHCSNYGTTIDGPTSTGSEQRTRNPVPSQGRERTEQGTPKGKRHQDKAHQEMERDSEDAETEQAAGHGGGGRQGRAW

SEQ ID NO: 292667 - protein, 96 aa, Zea mays
  Clone ID: MRT4577_29998C.1.pep
MFCLQLQHHLTCIHLARRSDMSKKSGSQHSVTRIQTLHHADKAKTEHYMLELVALLHHLVIQVKNRGYGTSKSSRHDASSRSRKAAATDLRPETET

SEQ ID NO: 292668 - protein, 46 aa, Zea mays
  Clone ID: MRT4577_29999C.1.pep
RSRMSVQMYVRWVSVILHNCWLQASCTCHSSSTCVSVHPSDILQMA

SEQ ID NO: 292669 - protein, 121 aa, Zea mays
  Clone ID: MRT4577_2999C.1.pep
MSSLSMVEARLPPGFRFHPRDDELVLDYLSRKLGGGAGGAAVASIYGCPAMVDVDLNKIEPWDLPEIACIGGKEWYFYSLRDRKYATGQRTNRATESGYWKATGKDRAISRKGLLAGMRKT

SEQ ID NO: 292670 - protein, 66 aa, Zea mays
  Clone ID: MRT4577_299C.1.pep
AQAELLSSTHRSVSGENIPATPLLILLEFFFICCVRFLFRVLISLFSVSSGDRIYLTSARSSICWL

SEQ ID NO: 292671 - protein, 182 aa, Zea mays
  Clone ID: MRT4577_29C.1.pep
MAMAMPMAVARVTSLACAPRQAQHRRRHSLAPPCASGAVEVRVCTNRTCARQGGREVLAALAGLAPPAVDVASCGCLGRCGAGPNVAASVPGSTAVFGHVGTAARGAQLLEHLLGPAEFDAALGLTELATREKAEAALQKGNADEAEALLTEVWTGRIRQSAIVHALSVAGSEFDDYTCMFA

SEQ ID NO: 292672 - protein, 410 aa, Zea mays
  unsure (1)..(410): unsure at all Xaa locations
  Clone ID: MRT4577_2C.1.pep
MENHNPLHSQIAEVKMDISASASVASGNKFCKGGACDFSDSSNSSKDAKERSTSMRKLIIAVILCIIFMTVEVVGGIKANSLAILTDAAHLLSDVAAFAISLFSLWAAGWEATPQQSYGFFRIEILGALVSIQLIWLLAGILVYEAIVRLINESGDVQGSLMFAVSAFGLFVNIIMAVLLGHDHGHGHGHSHGHPHDHGHGDSDDGHSHHEXPEQGHVHHHEHSHGGAITVTTHHHHHHHDHDVEEALIKHEGTQSAGRAGKKPRRNINVHSAYLHVLGDSVQSVGVMVGGAIIWYKPEWKVIDLICTLVFSVVVLFTTIRMLRSILEVLMESTPREIDATRLESGLCGMEGVVAVHELHIWAITVGKVLLACHVTIARDADADEILDKVIGYIKTEYNISHVTIQVERE

SEQ ID NO: 292673 - protein, 50 aa, Zea mays
  Clone ID: MRT4577_30000C.1.pep
LLVRLLVRLRGGLIKYNVVGCQLIQGDSKWIQSEEPKTVQMLLYTIRGQG

SEQ ID NO: 292674 - protein, 190 aa, Zea mays
  unsure (1)..(190): unsure at all Xaa locations
  Clone ID: MRT4577_30001C.1.pep
FFFFFFFFFFFFFFFFFFFFFFFFFFGPKPRNGPKQGRGKKPKGPGKKTRRGPKKSRPPPLKKEGTPPKQRXTIGNHPQTPPLKTGGISKQKAKSAPLKTHPGTGPPGKPPGGKGHPPPPPKRGPPKKPRGHPRQGAGGKTRGPXPPPGLTPGPXKGGGPGGQGTRQPPWEKGRGPAQGSPRGPPGRRGR

SEQ ID NO: 292675 - protein, 104 aa, Zea mays
  Clone ID: MRT4577_30002C.1.pep
FVSYSLIPKVLRVDLNQMRDNNLSRNGSTSDSEDSSHCGVVPYLRCGCGRVGWTRFLPFLLLWARGFPRPRRPGRWCPGTRSSGRRGAARESCIWVRMTGASLG

SEQ ID NO: 292676 - protein, 390 aa, Zea mays
  unsure (1)..(390): unsure at all Xaa locations
  Clone ID: MRT4577_30003C.1.pep
MDPPRPAAGRSGGVGTGDSPVSWDDDDDDCSGGGGRVEGLAGLHIFDQEADEPPAKNSMANRLDTNCIPVANGCNTGTSVEKEPVNGLDPLHEHTGIWVPVSVPPMTAQDREEWHRGFSCNGRNFPEEEFSWELDEENIEMTMWDVFADMAVAAKDKVVSAATYEYGRYGMSAVSNFFLQEAWNDMAQTLADANTGIANELLETEPTKWLPDSAATSCMLCGVRFHPIMCSRHHCRFCGGVFCNGCSNGRSLMPPKFRTADPQRVCDVCGVRLESIQPQLMNQISRASQLPTRDVTDLSTLRSWLNFPWSHTMEYEIYKAANSLHSYFKVGRLKPEKXYPDTILRQAKGLAIVTVVKVGMMXVPYKLGSGLVVXARRVDGSWXPPPANQS

SEQ ID NO: 292677 - protein, 84 aa, Zea mays
  Clone ID: MRT4577_30004C.1.pep
RNLQTNSHQLVFKKSPLNPKINFWIPKKKKGPFFSRKHSNQNPPMIIGGLTMVEGHLMLKKCWQFTACGTFVNQIVNTTPEMLY

SEQ ID NO: 292678 - protein, 43 aa, Zea mays
  Clone ID: MRT4577_30005C.1.pep
MDVGLGPKKKKKKKKKKKKKKKKKKKKKKKKKKKKKNSRGGRY

SEQ ID NO: 292679 - protein, 111 aa, Zea mays
  Clone ID: MRT4577_30006C.1.pep
PVWGADRTSPVMNENLHSFRPRCVRTNMDFGAGAGYGQIVCGCDPGTWKAYVSQFMFLVVKFVPSWLRDIKLDTLKKIAAGLRSWHEHDLALSLLERGGPQAISVVVETFL

SEQ ID NO: 292680 - protein, 90 aa, Zea mays
  unsure (1)..(90): unsure at all Xaa locations
  Clone ID: MRT4577_30007C.1.pep
PDEQGCRGHLTMATDTAGPVPAGGHPXPRPDSLRPXRLHRLRLPAAAAAAADSSSLPGPSSMLPPLPDGGGRLVAELVCAFNELTERWGG

SEQ ID NO: 292681 - protein, 61 aa, Zea mays
  unsure (1)..(61): unsure at all Xaa locations
  Clone ID: MRT4577_30008C.1.pep
MAHSNVWNSHPKNYCPGSGVCRVCANSYGLIMKNGLMCCRQXFRSNVKDISXIKYLVKRPL

SEQ ID NO: 292682 - protein, 121 aa, Zea mays
  Clone ID: MRT4577_30009C.1.pep
PGDGAQKGWPPNFFHIRCLRTSNCHPARARQKTLLGLFVHQLTTTQGPLPPISFPANKLVRVCYGASLFFGWERGFGPGFILGAKSMCGFFFAWRCIGKLKMIGWRWSFKSPWFVQKRWVL

SEQ ID NO: 292683 - protein, 51 aa, Zea mays
  Clone ID: MRT4577_3000C.1.pep
VWGRKPHCASGNVFSLPSPKTRVIEKPDGFKPGQGPSSPCVIAVPPFGCPP

SEQ ID NO: 292684 - protein, 59 aa, Zea mays
  Clone ID: MRT4577_30010C.1.pep
CRELEQLHLGLYGTSDRLTLAKEGSPFLTQKWCHTLRELDLSGQGFTEQDLEQALAAFL

SEQ ID NO: 292685 - protein, 57 aa, Zea mays
  Clone ID: MRT4577_30011C.1.pep
TEHLLSTLMCTHPCFHKTTGATYAQVKKEKVSRRISRSSRTSTSSRIRLATSPSQLA

SEQ ID NO: 292686 - protein, 57 aa, Zea mays
  Clone ID: MRT4577_30012C.1.pep
KDMRINMAISAAFVCTLLLIHKKTQLLLTCSLFMVIHLYVSYMHCSFALLFLSEKLF

SEQ ID NO: 292687 - protein, 116 aa, Zea mays
  Clone ID: MRT4577_30013C.1.pep
KDDGASFRLVERSKVCRFRKEEGAGWNDMGWACERGKRGGARRAKEARFVRGSCGQGGKVRSARRRVRPGVAWLACQRLARESAAAPAQADSAAAGPSGEAARTPAAPRAAKRAVA

SEQ ID NO: 292688 - protein, 47 aa, Zea mays
  Clone ID: MRT4577_30014C.1.pep
MGKPVELVEFAGKPHGFYLHEPGSEATGELIGLVSRFLRSCKARAGA

SEQ ID NO: 292689 - protein, 103 aa, Zea mays
  Clone ID: MRT4577_30015C.1.pep
SVVASLQLTFQRASGRGRRGPDRGSSRIEKNFHSGQGGVPFLPSPTKLRELEAILTKLLRFIDFQNMHNANSYACSGSAPKNQDYGFRMNTLAADDAKDKNSQ

SEQ ID NO: 292690 - protein, 138 aa, Zea mays
  unsure (1)..(138): unsure at all Xaa locations
  Clone ID: MRT4577_30016C.1.pep
LPSXWRXXXXRWXXPLPWXSPXCPAXXCXXXLAPAXRXGXRWPGXXASLSXWSXXLALGXXGXXPRXPPXSVLVWAXCFSPPSWXRFLXXPXPAXRXXSXRXPRXXXXXCRVLXXXXAWPLXPASXXXXXXPGLLXPG

SEQ ID NO: 292691 - protein, 353 aa, Zea mays
  Clone ID: MRT4577_30017C.1.pep
RGCIWLFDSEDIDDSTYAFQGHQDEVFIVACSPTDSSLVASGGKDDRGFLWRIGSEEGALELTGHKDTVGTVAFSSDGNLLACGSFDGQINVWNTATRTLKGTLEGSGSGFEWLKWHSRGHLIIAGSEDCNVWMWNADHNAILNTFAGHSNTVTCGDFTPDGKLICTGSDDASLRIWDPRSAQSRHVVRGHGYHSDGLTCLSMTSDSQTVVSGSKDSSVHIVNLNSGQVVGSLAGHTSSIECLGISSSYGWVATGSMDQKLIIWDLTHQSSRCICEHDEGVTSLTWLGSSRYVASGCIDGKVRIWDSLSGACAREFSGHADVVQSLAITADGNTMVSASSDGSARVFDISMFK

SEQ ID NO: 292692 - protein, 79 aa, Zea mays
  Clone ID: MRT4577_30018C.1.pep
GELNNTLLFGGGQTSHNSTKGNTMNHSLLSHKRLTNSITDYLTPHYIPAAVWQGSKPNSSGAQWQMADLTKTSIGCQPG

SEQ ID NO: 292693 - protein, 109 aa, Zea mays
  unsure (1)..(109): unsure at all Xaa locations
  Clone ID: MRT4577_30019C.1.pep
FSIDRFAMNRSILLLLSFVCLLKSIQSVPIDYLFDEITNFVWSDFAADPLSKCQPDLDLTTEQLIRYHGFDSEAHSVITSDCYNLTIYRIVVPGAAVSEYRPVLIQHXL

SEQ ID NO: 292694 - protein, 144 aa, Zea mays
  Clone ID: MRT4577_3001C.1.pep
MSAYAPPTGEWTTGLCGCFSDCKSCCLSFLCPCIPFGQVAEVLDKGMTSCGLAGLLYCLLLHAGVAVVPCHCIYTCTYRRKLRAAYDLPPEPCADCCVHMWCGPCAISQMYRELKNRGADPAMGWEALSKKTTMAPVPMQDMTR

SEQ ID NO: 292695 - protein, 213 aa, Zea mays
  unsure (1)..(213): unsure at all Xaa locations
  Clone ID: MRT4577_30020C.1.pep
MADGKGRENSAVALKTSPSVPMARGLRGGSNPLEEWSGRVKAIEAGFRAWMAKQPIHIEAAVSTAVGAVQGGALGGLMGSLTADGGSPFPIPQPPSNANSDAMASFKQAQALAAGPLVQARNFAVMTGANAGISCVMRRLRGQEDIQGSMTAAFGSGALFSIVSGMGTPNPVLXAIXTGCXFAVXSGGXFMIGQKFSXXISEDTYYSXXQSML

SEQ ID NO: 292696 - protein, 93 aa, Zea mays
  Clone ID: MRT4577_30021C.1.pep
ACRYRSGINSRVDELTSRRPPFFFFFFEKSSYSTKLLVEPNMHHSYRGAWFLKSHNINALDGQRKKSLLKKHKIWVFTKKRCSSCPKLIVFES

SEQ ID NO: 292697 - protein, 109 aa, Zea mays
  Clone ID: MRT4577_30022C.1.pep
RALKNVGVSIFFSCQPIFFFFPEGGSLSTKRSITVGVRKNFLVQAPPPHFPGSGILTYHFLGVVVPSHKERFCSYFRCFVLQAGRHAKNLLACCQSICVQSLVQKINSL

SEQ ID NO: 292698 - protein, 57 aa, Zea mays
  Clone ID: MRT4577_30023C.1.pep
LPMSQLLSLDARDSPFGVSPCLYSPPNSNLLSPRFPKPRHILSIKKLEFIGKFPRAE

SEQ ID NO: 292699 - protein, 69 aa, Zea mays
  Clone ID: MRT4577_30024C.1.pep
PFLYVGVMTEMATVKQCPFTIAHTRKSSITRLCWQLPKLKGVAKMNYIALTYINLTLNLSSTINNISRR

SEQ ID NO: 292700 - protein, 59 aa, Zea mays
  unsure (1)..(59): unsure at all Xaa locations
  Clone ID: MRT4577_30025C.1.pep
LIYVVMDMLTHSLITQKQVVTPSHNELIAVGDGHSRTISDPAAGNYLIRPFDEAXDEPT

SEQ ID NO: 292701 - protein, 223 aa, Zea mays
  Clone ID: MRT4577_30026C.1.pep
GRESSPPPPSLDLSFLLHACLGEPSPLYTRRPGLRRRRVATSCRSTFTSAKGMDHMTMLGAGAPHQLSRAEPMPDRRSRFWQTDVQPVPRIDIICPLPCRPSRSLLLNRPSPKPNGALPLYGANPTYDIVDLILSKNDPDVDTDSSSQAAFFCGSPPARTNNPVIHDPQFGKKAPSFSPLGSSSGKMAAGRAEVGSPSCRSSSPKMRIEGFACGNKEPPHCFA

SEQ ID NO: 292702 - protein, 49 aa, Zea mays
  Clone ID: MRT4577_30027C.1.pep
LLQAEIELIRVLVTCCLVALIGRFEQHNPHARIAPTIQDRSLRARALSP

SEQ ID NO: 292703 - protein, 44 aa, Zea mays
  Clone ID: MRT4577_30028C.1.pep
RHLTRRLAHDLTHAHPAPCHHKLVLLLLTPETVSHMVNQCTTPP

SEQ ID NO: 292704 - protein, 80 aa, Zea mays
  Clone ID: MRT4577_30029C.1.pep
FFQRWNRPPMDSVMVHSGGRGGLQESRFIEKLVKNERQVEGLPDNCSRVMVWNFNLEPPRVNYPTGWALYKNLEPDMPVT

SEQ ID NO: 292705 - protein, 113 aa, Zea mays
  unsure (1)..(113): unsure at all Xaa locations
  Clone ID: MRT4577_3002C.1.pep
ASTIVLRGPDDDDMFHWKDPVXGPPDTPYVVCVFLENVXFSXDYPFETPKVSFRSXVFRPNFCSNGXMXLGFLTVEGRPALXTALSVRFLVCSLLSDPSPXDDPLEPDIALVS

SEQ ID NO: 292706 - protein, 70 aa, Zea mays
  unsure (1)..(70): unsure at all Xaa locations
  Clone ID: MRT4577_30030C.1.pep
PFSNSRGDATXSWYRRWSVYTINLESEFIRGGVYEGGGGNFIIYMPSPPKVFIGLANPSDLVFGAGRCLW

SEQ ID NO: 292707 - protein, 451 aa, Zea mays
  Clone ID: MRT4577_30031C.1.pep
MVSSRRNSGIILREGSVRDWSEFNNPSPSPKLLYSQSYVAMRGLLASVISLDFFLLSSKLKSVCAAMTSQRHSRSQERSKSKGLTCRRVAVHLLFFFMVGIFIGFMPLFSVDVYKKIVSENERLPFHDGVIEAEMMGTKVKELETVVVEKEVELIDEPQVQESPPVPAMLDDEADFAESSPALPAIEESDIPVKKLLIIVTITSVRPQQAYYLNRLAHVLKAVQAPLLWLVVEWPEQSYETAEILRSSGVMYRHLICRKNTTSVRKIAVCQRNNAIYHVKRHHLDGIMHFADEERSYSADVFEEMQKIRRFGSWPVAIHVGTKYRAVLEGPICKGNRVMGWHTVQTVQKKSSTRRFPIGFSAFAFNSTMLWDPQRWNRPPMDSVMVHSGGRGGLQESRFIEKLVKNERQVEGLPDNCSRVMVWNFNLEPPRVNYPTGWALYKNLEPDMPVT

SEQ ID NO: 292708 - protein, 38 aa, Zea mays
  Clone ID: MRT4577_30032C.1.pep
SDSRTPFRWEGNSTRASFLRLASYHPYGQEQDPYQWVR

SEQ ID NO: 292709 - protein, 142 aa, Zea mays
  unsure (1)..(142): unsure at all Xaa locations
  Clone ID: MRT4577_30033C.1.pep
PASAPRPPDMVALSGGHTLGVAHCANFKXRLAETDTLDAALGSSLGATCTANGDAGVATFDRTSTSFDTVYFRELQMRRGLLSSDQTLFESPETRGIVNMFAMNQPYFFYAFQQGMLKMGQLDLKEGDDGEIRHTCRVINSS

SEQ ID NO: 292710 - protein, 48 aa, Zea mays
  Clone ID: MRT4577_30034C.1.pep
HKRDLHSAFRHLLRLRLPRLYFTFGGHTHIPSLSFIHIMTTHSIIYTD

SEQ ID NO: 292711 - protein, 39 aa, Zea mays
  Clone ID: MRT4577_30035C.1.pep
SGKYSSLTYLITFQHDPLSTASVIILKPAPIKLPSIFSV

SEQ ID NO: 292712 - protein, 209 aa, Zea mays
  unsure (1)..(209): unsure at all Xaa locations
  Clone ID: MRT4577_30036C.1.pep
MDKEQQRHDELQAPLLPGDGGKAAAAAGSAYALVCSLVASAISVIYGYNRGVMSGAQKFVQDDLGISDAQIEVLIGATSIYSLVGSLAAGWACDCAGRRRTMALSAAMFFAGSAITSVAGGYAVLMAGQLVAGVACGFGLVVAPVYIAEMAPAASRGFLSSIPEIAGNTGILLSYIADSALAGFPNNVNWRLMIGVGAVPPLFLAXATL

SEQ ID NO: 292713 - protein, 43 aa, Zea mays
  Clone ID: MRT4577_30037C.1.pep
TKLSVTFTVKTLFDDLYNYTRDKSHHASLIGTLLLYNVMEAQT

SEQ ID NO: 292714 - protein, 556 aa, Zea mays
  Clone ID: MRT4577_30038C.1.pep
WFPSVAAWLGFADPAAAGSAARALSAEVVELVYRDLAAPGVGGGAAAEGLEIAELGISSKIVERLASKGITKLFPIQRAVLEPAMQGRDMVGRAKTGTGKTLAFGIPIMDAIIRHNEKYKPGKFPLAIVLAPTRELAKQVEREFLDSSPLETLCVYGGTPIMQQIRKLNYGVDVVIGTPGRVIDLLKRGSLSLAEIRFVVLDEADQMLSVGFDLDVETILERVPPQRQTLMFSATMPTWIRKLTQKYLNNPVTVDLVGEDDQKLAEGISLLAVSSENREKPAVLGELIKEHAKGGKCIVFTQTKRDADRLSHNMSRSFQCEALHGDISQSQRERTLAGFRDGRFNILIATDVASRGLDIPNVDLVIHFELPNSSEIFVHRSGRTGRAGKKGTAIVMYNYDQSRAVRVIERDVGCKFTELPKINVEGSDLLGGGFDSFGGGGGGYGGSNYGRSRGGFGGRGGGGGFGRSGGGGFGNSGFGRSSGGFGDSGFGRSGGGGFGDSGFGRSGGGGGFSDSGFGRSGGSGGGFSDSGSGRFGGGFGSSRSGSFGGFGDKDSR

SEQ ID NO: 292715 - protein, 283 aa, Zea mays
  Clone ID: MRT4577_30039C.1.pep
MAGSSTAAMDAAAAWWDDVNNSTLWQDRTFHALAALYGIVAVVALVQLIRIECRVPEYGWTTQKVFHFLNVIVNGVRSTEFVLRRDVQLVHPEILQHVLIDLPGLAFFTTYALLVLFWAEIYYQARAVSTDGLRPAFYTINGMIYVIQILLWLLMWWKPVQAVVILSKMFFAATSLFAAFGFLLYGGRLFLMLQRFPVESKGRRKKLNEVGYVTTICFGCFLIRCIMMCLSAFNKDADLDVLNHPILNFFYYLLAEIAPSSLVLFILRKLPPRRGIAQYHPIH

SEQ ID NO: 292716 - protein, 42 aa, Zea mays
  Clone ID: MRT4577_3003C.1.pep
AFADHFKMALDCFFAVWFVVGNVWVFDGHSSAHDAPNLYRCR

SEQ ID NO: 292717 - protein, 81 aa, Zea mays
  Clone ID: MRT4577_30040C.1.pep
CYMVVVLAEDCQVSDCQGPFQGSCLGLQWGSCRLASSSWRSSNVAAQASQETIDSMKRSMEENNSILHQLLRFNRGQVSPS

SEQ ID NO: 292718 - protein, 86 aa, Zea mays
  Clone ID: MRT4577_30041C.1.pep
DPYRFKKRTELYIADEGVHTYQFVYCGKKSQLNIGNVLPVGTMPEGTIVCCLEEKPGDRDKLARASGNYATVISYNPETKKTRVKL

SEQ ID NO: 292719 - protein, 351 aa, Zea mays
  unsure (1)..(351): unsure at all Xaa locations
  Clone ID: MRT4577_30042C.1.pep
MAGSSTAAMDAAAAWWDDVNNSTLWQDRTFHALAALYGIVAVVALVQLIRIECRVPEYGWTTQKVFHFLNVIVNGVRSTEFVLRRDVQLVHPEILQHVLIDLPGLAFFTTYALLVLFWAEIYYQARAVSTDGLRPAFYTINGMIYVIQVHDVTYTHMSSSNAXILLWLLMWWKPVQAVVILSKMFFAXQHYVLHCKSNEHLQHEIVAGLMALMESDHIGPFNLENPGEFTMLELAQSYFSATSLFAAFGFLLYGGRLFLMLQRFPVESKGRRKKLNEVGYVTTICFGCFLIRCIMMCLSAFNKDADLDVLNHPILNFFYYLLAEIAPSSLVLFILRKLPPRRGIAQYHPIH

SEQ ID NO: 292720 - protein, 55 aa, Zea mays
  Clone ID: MRT4577_30043C.1.pep
VGRPFFFFFRAFVIGVIADLEHRDKQAGSHQCLLNRDRAYLKTKRCGLEVKRRVL

SEQ ID NO: 292721 - protein, 41 aa, Zea mays
  Clone ID: MRT4577_30044C.1.pep
PHDIVVRPGSAVGAPAGPPSLQEGGPAHHGLRHVSSVGLQR

SEQ ID NO: 292722 - protein, 118 aa, Zea mays
  Clone ID: MRT4577_30045C.1.pep
AWPRFPGPPPRGSSPGSRGRGAPPPPDQVLLARPPLEGSPMGNPLFPALVIGRLPPFVKKNRRLRKKLEKVFNPNKALEKPPNGKLKKTRPAQKNLSPAQDNFQCPAPKKLPPLPAYA

SEQ ID NO: 292723 - protein, 49 aa, Zea mays
  Clone ID: MRT4577_30046C.1.pep
CTPRAPLVQSRQIGVQSNFLSEFDLLMWYRVSLITKFLYHYFALRNISR

SEQ ID NO: 292724 - protein, 136 aa, Zea mays
  Clone ID: MRT4577_30047C.1.pep
RCRLLFTKALFGGRCSSSSISSVPTSSPSAIPPPSSTSTEVWTSSVSAGDGLEQPLVECPPDRATEASQGAAVEGGGAPEAAASCGRRRGESSGMSWRRRQRTSWRRCSWRGGRKASEAGKQRLLSGFGERQRPIG

SEQ ID NO: 292725 - protein, 59 aa, Zea mays
  unsure (1)..(59): unsure at all Xaa locations
  Clone ID: MRT4577_30048C.1.pep
PIRQDWEPLCSRXKAPTRPAYNADKAFNSSRRACALIDTMKKLNTVTTKAAFSGTFLNT

SEQ ID NO: 292726 - protein, 40 aa, Zea mays
  Clone ID: MRT4577_30049C.1.pep
LYVFFGSKFRPKVHNPYFAINDKKKKAPAKALKLDNEFEL

SEQ ID NO: 292727 - protein, 504 aa, Zea mays
  Clone ID: MRT4577_3004C.1.pep
MAVGGDDDSMERDFAARLRLAHSPSPATPAAAASSSPTAAGGIAFRAPQEQFTADDFVLGKIYGVGSYSKVVRAKKKDTGRVYALKIMDKKFITKENKISYVKMERIVLDQLDHPGVIRLFFTFQDTYSLYMALESCEGGELFDQIVRKGRLSEDDARFYAAEIVDILEYLHGLGLIHRDVKPENLLLTSDGHIKIADFGSVKPTRDTPIKVLPNSTTERACTFVGTAAYVPPEVLNSAPATFGNDLWALGCTLYQMLSGSSPFKDASEWLIFQRIIARDLKFPEYFSAEARDLVDKLLDVDPGKRPGAGPDGYSSLKEHPFFRGIDWKNLRKTRPPKLAIDANVNEDEDSQDSNWLAHMGSVAVNQQSNTVGNNGAPSSSEVRSHISKLASIDSFDSKWQEFLDPGESVVLISKLKKINKLANKKIQLILTDKPQLICVDPSKMVAKGNIIWSDDPSELSVQVSDSSHFRICTPKKVSTFEDAKQRAWQWKKAIEDLQRCQRN

SEQ ID NO: 292728 - protein, 99 aa, Zea mays
  Clone ID: MRT4577_30050C.1.pep
MRSSEAMELLGFHPYSRPSPSEIAEAYSCSKDGRRSGSRMEVHVMRSGVPTSHGRSNRTLVKAPFLLITFAAVSFGAFSASRAYQRQKELCSSQNPFLP

SEQ ID NO: 292729 - protein, 91 aa, Zea mays
  Clone ID: MRT4577_30051C.1.pep
HAFAHASAHASAHAFAQAWAHASADAWEEDRRILPVNEHVAKRVDPRRRLHPGNRGHDFHCAAHSRVRAFLPLLLWVPYRSCSLDMTLNAM

SEQ ID NO: 292730 - protein, 62 aa, Zea mays
  Clone ID: MRT4577_30052C.1.pep
MRSRGHGSSWGFPPYCRPSPSEVKAAYRRMVMESHPDRVPTHLKSQAESKFKEIDANHSRIV

SEQ ID NO: 292731 - protein, 116 aa, Zea mays
  Clone ID: MRT4577_30053C.1.pep
MGEYAAVKTSVWWDIENCHVPRSCDPHLIAQNMSSAVAAAGYTGPITISAYGDTNCVPNHVQHALSSTGIALNHVPAGIKDASDKKILVDMLIWAIDNPPPANYLLISGDRDFSNS

SEQ ID NO: 292732 - protein, 62 aa, Zea mays
  Clone ID: MRT4577_30054C.1.pep
MRSSEAMELLGFPPYSRPSPSEVKAAYRRMVMEFHPDRVPTHLKSQAESKFKEIDANHSRIV

SEQ ID NO: 292733 - protein, 147 aa, Zea mays
  Clone ID: MRT4577_30055C.1.pep
CFCTHTPKDIQEFLFSLWYRAIHALFINATGSSRKSCSTPIDVNRLGALSTSSSASQRKEFKFPPRKAEVREMSMKSEFERRINVQAMKLSSHEITTIAGRPATSTNSQDVKSAVAAVPSSNASDSICKPAAGPVSAPPPPPRSGYS

SEQ ID NO: 292734 - protein, 97 aa, Zea mays
  Clone ID: MRT4577_30056C.1.pep
MASVACCASAAAPGLADGFKLQASCALDQFSLPNNVSVNYCDMLRRTTRENSATTRVEWDALGQVIRKARERLPYPEGASGEVSLLEYREVLRSNCL

SEQ ID NO: 292735 - protein, 268 aa, Zea mays
  Clone ID: MRT4577_30057C.1.pep
MATVGQSGALRRVTVHYASSPTRGAVVEVSLDDLDDELLQFVLADLLPGQEGLHQSILEGAHGSNQENYMRGAGSSAPSQEYHAQSSTAAAAAAASSRRNPGTDDAQIASDFEYATKLQQEMEGLSVDDDGDGISCVPSPSDSDDGHDHHDEEDEDEEDGNGGGDDDDDPDNMTYEQRQALVESVGSEDRGLSDELISYLQPWKYKASGFFSRKTNHDDCPICLSTFRNRETMITLPCMHHYHAACVTKWLRVNKTCPVCKYELFGPC

SEQ ID NO: 292736 - protein, 89 aa, Zea mays
  Clone ID: MRT4577_30058C.1.pep
MRSSEAMELLGFHPYSRPSPSEVKAAYRRMVMESHPDRVPTHLKSQAESKFKEIAEAYSCLKDGRRSGSMMEGELDSMMNMIHTIFVCS

SEQ ID NO: 292737 - protein, 130 aa, Zea mays
  Clone ID: MRT4577_30059C.1.pep
MRSSEAMELLGFPPYSRPSPSEVKAAYRRMVMESHPDRVPTHLKSQAESKFKEIAEAYSCLKDGRRSGSRMEVHVMRSGVPTSHGRSNRTLVKAPFLLITFAAVSFGAFSASRAYQRQKELCSSQNPFLP

SEQ ID NO: 292738 - protein, 55 aa, Zea mays
  Clone ID: MRT4577_3005C.1.pep
SISAYGKIVVSEIIADFSKCGSGSYAVCSCDRSWIYHRQGLRRCLWPAVERLVLR

SEQ ID NO: 292739 - protein, 43 aa, Zea mays
  Clone ID: MRT4577_30060C.1.pep
VYGLQSICCMIFNSFPPKSDPCILTKIWPYNAPESKVPQPTRH

SEQ ID NO: 292740 - protein, 167 aa, Zea mays
  unsure (1)..(167): unsure at all Xaa locations
  Clone ID: MRT4577_30061C.1.pep
RTTEAAPARTDTPPNHHTPEAKAKAEAEERREETPSKPEAEKKKTNDPRPDXLRRERKRNRPFHTGYAITGPITTKMTPNSTEEDLKNTKNVQEHKKKHRRTRRRRNARTASQPRHAPERKNQTPRPRHPKRKARTQSHTRNETKGKRNEPTANNPRPKKKKKKAPR

SEQ ID NO: 292741 - protein, 50 aa, Zea mays
  Clone ID: MRT4577_30062C.1.pep
VKAMIDLQDFVSWTWFAIAFIRAAGVIRLCLMVFLYSSVFIVRKFCPSPG

SEQ ID NO: 292742 - protein, 79 aa, Zea mays
  unsure (1)..(79): unsure at all Xaa locations
  Clone ID: MRT4577_30063C.1.pep
MASKLSFKRADSIAESMPDALRRSRYQMKKCFHRYVSKGRRLLKNQQLIEELDKSLDDKXEREKLLKXLLGYIXCSTQK

SEQ ID NO: 292743 - protein, 40 aa, Zea mays
  Clone ID: MRT4577_30064C.1.pep
NDKYEWDQTFDAFVHMVCIILRSGICTRTRIICMSALVAP

SEQ ID NO: 292744 - protein, 130 aa, Zea mays
  Clone ID: MRT4577_30065C.1.pep
HVCAVCQVIINGNAEIDLLDCVVPEKKKKKKKISCRIRHELIKKLRKAKKDAPVGEKPEPVKTHLRNMIIVPEMIGSIVGVYNGKTFNQVEIKPEMIGHYLAEFSISYKPVKHGRPGIGATHSSRFIPLK

SEQ ID NO: 292745 - protein, 75 aa, Zea mays
  unsure (1)..(75): unsure at all Xaa locations
  Clone ID: MRT4577_30066C.1.pep
YFYLRLKIPILLKQGLRYFAVRLFLLRRLLFSFAQVLINHGRAWYVAVKKKKKKKKKKKKKKKKXXXXXXKXKXK

SEQ ID NO: 292746 - protein, 97 aa, Zea mays
  unsure (1)..(97): unsure at all Xaa locations
  Clone ID: MRT4577_30067C.1.pep
MDGDYEMPPAGVDDMMGDEXMGDFGGDEGPVMKVGEEKEVGKEGLKKKLPKEGEGWETPAVSFLCHPTFFLGGGLSHPTPIFFYFIFPFFSFSFFLS

SEQ ID NO: 292747 - protein, 52 aa, Zea mays
  Clone ID: MRT4577_30068C.1.pep
QKKTLLFKLLMEHNLKLKLRGKPFFLQQQIQLELLLQQLTSTNFDRVLHLAK

SEQ ID NO: 292748 - protein, 72 aa, Zea mays
  Clone ID: MRT4577_30069C.1.pep
RWDIIMRGEFSHLVALGSLGDTKSPLGQEKRSYRQIYVTLYLKNEDQLPKDLLVVRGEDIYWKMRRTHLGST

SEQ ID NO: 292749 - protein, 127 aa, Zea mays
  unsure (1)..(127): unsure at all Xaa locations
  Clone ID: MRT4577_3006C.1.pep
SVWNPTDFILGAGAFAFHMAGGCNEVGKKPSTRDHLCLTFPDGAAGNINGVVAECSXYHMYMEDESLREEIRMDSYGLFIIWVHXLPIGPLTXSIVPYGMNFYKNFIKLTVESGIVPFGTINHWDTL

SEQ ID NO: 292750 - protein, 119 aa, Zea mays
  Clone ID: MRT4577_30070C.1.pep
IKQSRIIQGEQPGRLVPRMHAISLGSLPTSDAQGVTLTRAAIKRYTQSLHNLLCDSLVRPFNLTQKARGSRELTAGFDDDSKALRRSVASRKRCAEHQHDHTQPVVHIVEQLHARWSSG

SEQ ID NO: 292751 - protein, 60 aa, Zea mays
  Clone ID: MRT4577_30071C.1.pep
PPLPPTRSMLSSHRGPPPRVPLAHLPPQPLWGLPAAIPPSLFLLMSGESPRSSPPYLFME

SEQ ID NO: 292752 - protein, 27 aa, Zea mays
  Clone ID: MRT4577_30072C.1.pep
DTGSVCTVCVITRVVMDHDPHYAKLGP

SEQ ID NO: 292753 - protein, 101 aa, Zea mays
  unsure (1)..(101): unsure at all Xaa locations
  Clone ID: MRT4577_30073C.1.pep
MYVSVVGIKAKKGAAGRKAVVPXNNRCHASVKAGLQFPGGRIXGRYLKKGRYAQRVGTGAHDYLVAVFEYLVCEVLELDDNAAKDNNERPSHRLRAHLCSV

SEQ ID NO: 292754 - protein, 84 aa, Zea mays
  Clone ID: MRT4577_30074C.1.pep
DRSHNVNSTTLYTPAASKTQIKTNRYHRLKDRHKMMHIQMLLNSSLRRANKLNIAPQCTGYYCSGSRLKAYSSAEHKKKWATYL

SEQ ID NO: 292755 - protein, 85 aa, Zea mays
  Clone ID: MRT4577_30075C.1.pep
NIMRAYNSVYPSIVLLSMYRTICLLLSGVGAYLEFQLHKCLSSLYSLPTLSNSLLLTTKDCPICHQHVMFSLFCHLICLITALNY

SEQ ID NO: 292756 - protein, 127 aa, Zea mays
  Clone ID: MRT4577_30076C.1.pep
LLPFFFFFFLGGFLYFLGVFPYLFFNLFFVPSIGIKSTKRGLICRGAPYLSEQKKSVFSGSPLLKTKKKLVLTPKGAFPVSVGGKAPRKALKKKNRPRGPQKPTGYREGIFFQFLGPKRLKKKRREF

SEQ ID NO: 292757 - protein, 93 aa, Zea mays
  Clone ID: MRT4577_30077C.1.pep
TRPFTRPAPGRPGLLRRRRRPEVGPQDGHRAHRRDPGARARRRRRRRVVIIVLGEHPRVYLTKQIPPIDEQVVVRACLRYLRDEDLHTRRPCA

SEQ ID NO: 292758 - protein, 61 aa, Zea mays
  unsure (1)..(61): unsure at all Xaa locations
  Clone ID: MRT4577_30078C.1.pep
MDPIHGGDTVADGQLGRFDEHDHLEQASVHSLAGGKKGILYGGRGALTPTXGNQHVPRLIT

SEQ ID NO: 292759 - protein, 112 aa, Zea mays
  Clone ID: MRT4577_30079C.1.pep
RPEPWPTLIHLTLLPPRHLGLRLHLRPPPDPDRPRRPQIPFLSVGSSSDRPPILHASQAFKQGRSLTSCMDDAILQCWRYYDGPKPANLQVWNMTMHILDSTRLRFLALALH

SEQ ID NO: 292760 - protein, 91 aa, Zea mays
  Clone ID: MRT4577_3007C.1.pep
QLNNKTRAGALLFLSVHVSRFSFRGPPKLIPLPPWVCFGARPTEYFPLPPTCPCLNGGPCLGRDQKNFLSTHFWETKKGVDPPFFLEPNLG

SEQ ID NO: 292761 - protein, 204 aa, Zea mays
  unsure (1)..(204): unsure at all Xaa locations
  Clone ID: MRT4577_30080C.1.pep
ARQNIFASLMAPLVLCASADTATXFPQCSHAAIASFVAPYLSPAVCXVCDNPIVQPYRIQQAVAAGILPLSPLFLQQPTGLLQQLPLVHXLTQNIKAQQLQQLELGNLAGYSXQQHXLLAFNQLAALNSAAYLQQQLPFSHIAADYPQQFLPFNQVATLNSAGYLQQQQXLPPFRVLADVSPIALLTQQQLLPIYLHAAPNAGT

SEQ ID NO: 292762 - protein, 95 aa, Zea mays
  Clone ID: MRT4577_30081C.1.pep
WPAPATRTGQRRFGRCRAPLPVGGTTFLFFLHSVFVGLLSPFSDFFNAVLSQYQIHALHLHPNSVLLLSVFAYLCEAFLGVMPSVDSYGSSSGFG

SEQ ID NO: 292763 - protein, 74 aa, Zea mays
  unsure (1)..(74): unsure at all Xaa locations
  Clone ID: MRT4577_30082C.1.pep
HRHEEVQPPVWHLPQSLGIQLQLCLVHAVQPSLPLLMHRSSLVIFYCNIFTIHGRTXXVVILFTKVDSDATILF

SEQ ID NO: 292764 - protein, 75 aa, Zea mays
  unsure (1)..(75): unsure at all Xaa locations
  Clone ID: MRT4577_30083C.1.pep
TTATQKTVYKPWAGDXKTAXSATLNIITSSTVSDNAEGKVLSILNRKLTGKSFLVPTDHVSVVDLTNKLEKTATY

SEQ ID NO: 292765 - protein, 85 aa, Zea mays
  unsure (1)..(85): unsure at all Xaa locations
  Clone ID: MRT4577_30084C.1.pep
AKAXIXXXPDXGGNXXKXKEQSQAYDVLSDXXXREIYDQYGXDALKXXMXXGSSXDFXXPFDIFEXLFPGIYHLXGWYSRGRRQK

SEQ ID NO: 292766 - protein, 114 aa, Zea mays
  unsure (1)..(114): unsure at all Xaa locations
  Clone ID: MRT4577_30085C.1.pep
LLQPLSLARVIVYCAAQQTPPGQPPSTPNAPPANSTXPRRLPASNPPPAPQAPSAGNPPPVPTDTSPAVPTTPPTDQNTTAPAATTAPPAPTTIPPDPTTTAAYAPVSXPTAST

SEQ ID NO: 292767 - protein, 54 aa, Zea mays
  Clone ID: MRT4577_30086C.1.pep
PPHMLILSIVILPALRSLAILPTGNWSPALELLARCLLRGDSSHSLASGRSSTF

SEQ ID NO: 292768 - protein, 95 aa, Zea mays
  Clone ID: MRT4577_30087C.1.pep
RATPFRIRFYPFIELFSENQTKTPSEGLFFNTGEPSPNQTHGDQHQPPNQRPNLVRRPGPGLVPLKLGPRNLPSKGQHGPLPFLYGVLFYFIFFF

SEQ ID NO: 292769 - protein, 78 aa, Zea mays
  Clone ID: MRT4577_30088C.1.pep
PEGFFFLGGVPPLFSPPRGKVSPQGGFLIYPRGPLFWHCPIHLRGVCQGFFGQFIKPSGTGFFPPGILRGKPTRALLF

SEQ ID NO: 292770 - protein, 37 aa, Zea mays
  Clone ID: MRT4577_30089C.1.pep
LIMQASVSNIYRVHCYIHLKSNSRPDNPIEVVQITNP

SEQ ID NO: 292771 - protein, 143 aa, Zea mays
  Clone ID: MRT4577_3008C.1.pep
MAPGLKRFTDVAGDGTPRLDDAAGEELMCVERAASVALGSRAPEPPGTLFITTRRVIWLSEAEKGKGYAVDFLDITLHAVSRDPEAYPSPCLYTQIEAEADSDEEDGDFDSEANGDSQLPKISEMRIILADAAQLDSLFDAFC

SEQ ID NO: 292772 - protein, 190 aa, Zea mays
  unsure (1)..(190): unsure at all Xaa locations
  Clone ID: MRT4577_30090C.1.pep
RSSIEASRWSSNEDAARSSWLTRQQAPADLLAAGIRTPSATIMAIHLPGRXLDASESDVSEQLXNHGHLGYSHTNQWLLRPSWFAANDEVLCLFYAWLDNLGRLTQHHGLSRKGACDGLLHIXDYETLRDRXPYPARFMVAHLTGSYAFGLFYKTTXSLLVSSDPYDMVPLFCWITADCXVTFSDDIDML

SEQ ID NO: 292773 - protein, 153 aa, Zea mays
  unsure (1)..(153): unsure at all Xaa locations
  Clone ID: MRT4577_30091C.1.pep
SLMHHVPSSTFQETVXVSGGCIRAILSHPRTQLITRHAFLTGHKLGVIWLRNTLVSEKSSSKTLTVFVLFLLFICMLLTASTSISSGKALHRLNSASLLLILKSSFRSVKASPSCSADIFEGERSCSSAQKICLKYLFHDGPWVFCSIVHSGL

SEQ ID NO: 292774 - protein, 269 aa, Zea mays
  Clone ID: MRT4577_30092C.1.pep
MADSQAEAMKKAYAGIMLNMAQESAARVLAAERRAAALAAGLEAAKEDGVATLLRVKAIMEARIKEKELESLVHVKKIKELEEQLHGSQNVMSSPPPELQRAITELELTKKTLADERINSLPTSNNVYYNKNGSPLSKIHQQGGNILLKNKKFADKSDDTSLVPITEKENEAVENLEDMDRRSPDLPSLMVRNKKPKFYHNGCTQRIHALKQQTQSTDAFWKQNQKQVTALNSCSKARMNNAAKNPRSIMEQILQTNFLGKFKRMRSRR

SEQ ID NO: 292775 - protein, 95 aa, Zea mays
  unsure (1)..(95): unsure at all Xaa locations
  Clone ID: MRT4577_30093C.1.pep
DLSFFADXCLFWNESLLIFSFKAGRVPSATEFLVTIAVKYRMTNNFGILAFFCNXVLSSTSIIQXMGRMQTLEDATHDTYWYYHGTCVSPXXTHS

SEQ ID NO: 292776 - protein, 102 aa, Zea mays
  Clone ID: MRT4577_30094C.1.pep
FSPCLFLPHFPIPRASARATSGDLNIKHGRKDQRDRRRGKPERGVEGRIARCATDGDGCITTKEVGNVSAITGAEANGGACADMINEGYADGNRAHILTGFR

SEQ ID NO: 292777 - protein, 220 aa, Zea mays
  unsure (1)..(220): unsure at all Xaa locations
  Clone ID: MRT4577_30095C.1.pep
LYVISGVGGSLLSSLFMVSNMAVGAXGALFGLLGSMLSELITNWTIYENKFAALLTLVMIILINLAVGILPHVDNFAHLGGFMSGFCLGFVLLMRPQFGYINQKNSPLGFPMGVTKRKFKTYQVILLVISTMILVSGFTIGLVLLFQGFNASEHCSWCHYMSCVPTSKWSCNAPNNYCMSSQLGNQLNLTCESTGKTASYVLSDPNNSEAIKNLCVGLCS

SEQ ID NO: 292778 - protein, 37 aa, Zea mays
  Clone ID: MRT4577_30096C.1.pep
STRIKYVWSHFPATNWIYVHALKHKSNMSGHTFLLRI

SEQ ID NO: 292779 - protein, 35 aa, Zea mays
  Clone ID: MRT4577_30097C.1.pep
APSPNTPAHEFGRDGHVAPLLSLVARHRSSPGRVT

SEQ ID NO: 292780 - protein, 47 aa, Zea mays
  Clone ID: MRT4577_30098C.1.pep
LNWLNVLDPFIPAKALCGGAQFLCGKKMMLCAPKIKKKKKKKKKHQP

SEQ ID NO: 292781 - protein, 82 aa, Zea mays
  Clone ID: MRT4577_30099C.1.pep
VPGNSPPPPQGFLWAGFAPDLAVWQKDPGPPKFLGGDGGVNPPPSLLGIKGVRRVFLDGGMGSPLVFSLGNGGLGKKKKPIP

SEQ ID NO: 292782 - protein, 130 aa, Zea mays
  Clone ID: MRT4577_3009C.1.pep
IVALKKVRFDNLEPESVRFMAREILILRRLDHPNVVKLDGLVTSRMSCSLYLVFEYMEHDLAGLAASPEIKFTEPQVKCYMHQLLSGLEHCHDRGVLHRDIKGSNLLLDNNGMLKIADFGLASFFDPDRK

SEQ ID NO: 292783 - protein, 64 aa, Zea mays
  Clone ID: MRT4577_300C.1.pep
YKFTIYFALTLTPTEWLSGRRQILSHSCHTIDQNPHITGMQNVTHQLLSASIFHDPQGYDVSIM

SEQ ID NO: 292784 - protein, 69 aa, Zea mays
  Clone ID: MRT4577_30100C.1.pep
EGTQQVITRGHPSLHLIIKQDRSQPRQTSSLRLEPMVFRPKTQTRLTMDGEEQYVELEELCNKKLRADI

SEQ ID NO: 292785 - protein, 79 aa, Zea mays
  unsure (1)..(79): unsure at all Xaa locations
  Clone ID: MRT4577_30101C.1.pep
MQLSSDNVACIFLLGQVARLYPLDQKDMTPAHRPIEFGVPIPHGXEGETFARDYTPPQYLTLLLTDLGVLTPSVVSDEL

SEQ ID NO: 292786 - protein, 41 aa, Zea mays
  Clone ID: MRT4577_30102C.1.pep
TNSKTNKKNKKKKKKKKKKKKKKKKKKKKKKPKKKKKKKAA

SEQ ID NO: 292787 - protein, 192 aa, Zea mays
  unsure (1)..(192): unsure at all Xaa locations
  Clone ID: MRT4577_30103C.1.pep
HLPWGPLFLTPHREEPLEPSPGAGGEQKRRPRAGGGDKRGPLNREPPPAQKKTXXPAQWGPPPPRGGGKKPPPGEKEGGTKPPPGRHNPPPPXXPPGNPPXKKPPAGTPPPAAGGGVTPPPGGGPAXSLPRPRESPPXPPGGGQTRPSAXKPPXGXTPENKPPKRXSPPGPPPXSAPXTPGPPAGGGKKQPK

SEQ ID NO: 292788 - protein, 128 aa, Zea mays
  Clone ID: MRT4577_30104C.1.pep
MAGSHMSHDEFFAKLGELFDHRKGSDYGSIYLSQKRFTYGQDIPQPSEEEPSPDINPGKPLPLIIKATNGKGKRDRSKKVKLSTVVNPEDLEAFYVRYADVCKTGMTALKPRDRSKKKAKAKKKKAAA

SEQ ID NO: 292789 - protein, 57 aa, Zea mays
  Clone ID: MRT4577_30105C.1.pep
HLSPRLPKGAFGRHQLLLGSRSRLPPQPVEILGPPVGVGVLLWKCLGVRRFCTVANN

SEQ ID NO: 292790 - protein, 316 aa, Zea mays
  Clone ID: MRT4577_30106C.1.pep
AKRTSAADILQAYQLYMAAICFKRVVFVFSNNTIYNAALGKMKIHIVDYGIHYGFQWPCFLRWIADREGGPPEVRITGIDLPQPGFRPTQRIEETGRRLSKYAQQFGVPFKYQAIAASKMESIRVEDLNLDPEEVLIVNCLYQFKNLMDESVVIESPRDIVLNNIRNMRPHTFIHAIVNGSFSAPFFVTRFREALFFYSALFDALDATTPRDSNQRMLIEENLFGRAALNVIACEGTDRVERPETYKQWQVRNQRAGLKQQPLNPDVVQVVRNKVKDCYHKDFVIDIDHHWLLQGWKGRILYAISTWVANDAPSYF

SEQ ID NO: 292791 - protein, 83 aa, Zea mays
  Clone ID: MRT4577_30107C.1.pep
LNRSGGGPKQVNTKKVGKVQARNLRFKVYPFFWQNVFLYGQTVIKAGGHQSVFFSLWIGQARSRWVGFFLCKKTRMDPRLLFC

SEQ ID NO: 292792 - protein, 61 aa, Zea mays
  Clone ID: MRT4577_30108C.1.pep
ACDVLASAPTPMECPRGYGILTWTLRANMRFAWPSESAICSVDRGSMPDVPLFSNSQLLKY

SEQ ID NO: 292793 - protein, 69 aa, Zea mays
  Clone ID: MRT4577_30109C.1.pep
FFLYESLFRDEQFNTDQMHFNVYHSNMYRTHCRQYSRTILSSGFLLIQKYNPLSRYRHPHHCRLTHRLP

SEQ ID NO: 292794 - protein, 177 aa, Zea mays
  unsure (1)..(177): unsure at all Xaa locations
  Clone ID: MRT4577_3010C.1.pep
VGTLVWFLPSGHPPDGQPTPPPPTKPTHPPTPPPXPQPPPAAGPRPPTQPPPPXPEPEPPASKNRTQQPPPTDXPPPPTPXPKAPPQNPPPPTXKKKQPSPPRKRDPPTTPKGPPHSPPPETXPRNPEPPPPPAPXPHPGRRSRSNPPETARATSPLNPRARPPPTESPPXPGNPNP

SEQ ID NO: 292795 - protein, 103 aa, Zea mays
  Clone ID: MRT4577_30110C.1.pep
RARARLKRLVTGWQPPGPLSARRPSGLYARRAGAAPQPPRGGVRASLAGERPPSYGPTSWARWSVSAFGRGPQPRLSWRTALTRYRRAVRPRSGETPSGGRGF

SEQ ID NO: 292796 - protein, 113 aa, Zea mays
  Clone ID: MRT4577_30111C.1.pep
MATAEVQTPTVVAAAEAPEGETPPAAVAPEESAPAEAAADAEAEAGATAGPAELSAREKLAGHARTAVPWGLAPEPRALLRTALLAGLFGLPKSSSSPPRRPAPGDQQEQEQE

SEQ ID NO: 292797 - protein, 142 aa, Zea mays
  Clone ID: MRT4577_30112C.1.pep
MGTRGVALLLLAAVLLLQALLLASSEGLVRVALKKLPVDQNGRVAARLSAEERQRLLLRGANALGSGGDDDSDVIALKNYMNAQYFGEIGVGSPQQKFTVIFDTGSSNLWVPSSKCYFSIACYFHSRYKSGQSSTYKKNGKP

SEQ ID NO: 292798 - protein, 59 aa, Zea mays
  Clone ID: MRT4577_30113C.1.pep
SCGRADKLSDNFCSTSIPSKHRLECQSVGVPPLVLEINSATFSPPLRSTRKLEETIWWT

SEQ ID NO: 292799 - protein, 110 aa, Zea mays
  unsure (1)..(110): unsure at all Xaa locations
  Clone ID: MRT4577_30114C.1.pep
MGPRGVALALLAAALLQALAPAAAAAAAAAGGLVRVALKKQPVDQNARVAARLSAEERQRLLLRGANALGSAGGDNNSDVIALKNYMNAQYFGEIXGVRTPSQKVTGIFD

SEQ ID NO: 292800 - protein, 141 aa, Zea mays
  unsure (1)..(141): unsure at all Xaa locations
  Clone ID: MRT4577_30115C.1.pep
PCLSRASCFFSPLAGGPPGGGPRGPRGGGGRGGPGPRGGPPGGTXTGGFGAGGGPGAPQKKGPXRPGGEYGPQGAPGQRPPGPPGRGEPTPRGPXPSPPGAKIPRVSTPFFPETRGPCXRAGPQCPRGPRLQGSPGPRGRA

SEQ ID NO: 292801 - protein, 234 aa, Zea mays
  Clone ID: MRT4577_30116C.1.pep
MGPRGVALALLAAALLQALAPASAAAAAGGLVRVALKKQPVDQNARVAARLSAEERQRLLLRGANALGSAGGDDDSDVIALKNYMNAQYFGEIGVGTPPQKFTVIFDTGSSNLWVPSSKCYFSIACYFHSRYKSGQSSTYKKNGKPAAIQYGTGAIAGFFSEDSVKLGDLDVNDQEFIEATKEPGLTFMVAKFDGILGLGFQEISVGNATPVWYNMVKQGLISDPGFSFWFNDM

SEQ ID NO: 292802 - protein, 119 aa, Zea mays
  unsure (1)..(119): unsure at all Xaa locations
  Clone ID: MRT4577_30117C.1.pep
MGPRGVALALLAAALLQALAPASAAAAAAAAAGGLVRVALKKQPVDQNARVAARLSAEERQRLLLRGANALGSGGGDDDFDVIALNNYMNAQYFGEIGXGTPPQKFTXXFDTGSSNLWV

SEQ ID NO: 292803 - protein, 291 aa, Zea mays
  unsure (1)..(291): unsure at all Xaa locations
  Clone ID: MRT4577_30118C.1.pep
MGPRAVALALLAAALLHALAPASAAXGLVRVALKKQPVDQNARVAARLSAEERQRLLLRGANALGSAGGDDDSDVIALKNYMNAQYFGEIGVGXTPPQKFTVIFDTGSSNLWVPSSKCYFSIACYFHSRYKSGQSSTYKKNGKPAAIQYGTGAIAGFFSEDSVKLGDLDVNDQEFIEATKEPGLTFMVAKFDGILGLGFQEISVGNATPVWYNMVKQGLISDPVFSFWFNRHAGEGEGGEIVFGGMDSSHYKGDHTYVPVTQKGYWQFNMGDVLVDGKSTGFCAGGCAAIA

SEQ ID NO: 292804 - protein, 421 aa, Zea mays
  unsure (1)..(421): unsure at all Xaa locations
  Clone ID: MRT4577_30119C.1.pep
MHLFDLTGLRSALGCRRSANMGTRGVALLLLAAVLLLQALLPASSEGLVRVALKKLPVDQNGRVAARLSAEERQRLLLRGANALGSGGDDDSDVIALKNYMNAQYFGEIGVGSPQQKFTVIFDTGSSNLWVPSSKCYFSIACYFHSRYKSGQSSTYKKNGKPAAIRYGTGSIAGFFSEDSVTLGDLVVKDQEFIEATKEPGLTFMVAKFDGILGLGFQEISVGNATPVWYNMVKQGLISDPVFSFWFXRHADEGEGGEIVFGGMDSSHYKGDHTFVPVTRKGYWQFNMGDVLVDGKSTGFCAGGCAAIADSGTSLLAGPTAIITEINDKNCAAGVVSQECKTVVSQYGQQILDLLLAETQPTKICSQVGLCTFDGTHGVSAGIRSVVDDEAGKSKVHRPTWEQIFVGCVSASKRSRICCPY

SEQ ID NO: 292805 - protein, 217 aa, Zea mays
  Clone ID: MRT4577_3011C.1.pep
KSNLFIFVYCLIEDTITGSRSECKENTQSSPDQDSTVRKTFLGLGESGSQNSYILTKFALDLLRNRLKSIKLDKEDEQLVKMLDPFVDLLRKCMSSKHASVLSVTFRCFALLVKLPLPSLRDNAITIKNVLMEILQRAGNSNGHLVTSCFKLLADLLRGFRISLSDNELQMLVHTPMFVDLQTNPSPVALSLLKTIVRLKLVSHNIYDIVVKIGELM

SEQ ID NO: 292806 - protein, 511 aa, Zea mays
  unsure (1)..(511): unsure at all Xaa locations
  Clone ID: MRT4577_30120C.1.pep
MGTRGVALLLLAAVLLLQALLPASSEGLVRVALKKLPVDQNGRVAARLSAEERQRLLLRGSNALGSGGDDDSDVIALKNYMNAQYFGEIGVGSPQQKFTVIFDTGSSNLWVPSSKCYFSIACYFHSRYKSGQSSTYKKNGKPAAIRYGTGSIAGFFSEDSVTLGDLVVKDQEFIEATKEPGLTFMVAKFDGILGLGFQEISVGNATPVWYNMVKQGLISDPVFSFWFNRHADEGEGGEIVFGGMDSSHYKGDHTFVPVTRKGYWQFNMGDVLVDGKSTGFCAGGCAAIADSGTSLLAGPTAIITEINEKIGAAGVVSQECKTVVSQYGQQILDLLLAETQPTKICSQVGLCTFDGTHGVSAGIRSVVDDEAGKSNGGLKSDPMCNACEMAVVWMQNQLAQNKTQELILNYINQLCERLPSPMGESAVDCGSLASMPDIAFTIGGKKFKLXKPEQYILKVGEGQAAQCISGFTAMDIPPPRGPLWILGDVFMGVYHTVFDYGKLRVGFAEST

SEQ ID NO: 292807 - protein, 171 aa, Zea mays
  Clone ID: MRT4577_30121C.1.pep
SQLQPARLLCKQSNVHILPQSPQLVALLTMIRDRNTGRADFIFYSNRIIRLLVEESLNHLPVESQEITTPVSRTYSGVKFQGKICGVSIMRAGESMEQGLRDCCKSVRIGKIAMPRDEETSKPKLYYDKSPEDISDRWVLLLDPMLATGGSALMAIDVLKSRSVPEGHILF

SEQ ID NO: 292808 - protein, 518 aa, Zea mays
  Clone ID: MRT4577_30122C.1.pep
MGPRGVALALLAAALLQALAPASAAAAAAAAAGGLVRVALKEQPVDQNARVAARLSAEERQRLLLRGANALGSAGGDDDSDVIALNNYMNAQYFGEIGVGTPPQKFTVIFDTGSSNLWVPSSKCYFSIACYFHSRYKSGQSSTYKKNGKPAAIQYGTGAIAGFFSEDSVKLGDLDVNDQEFIEATKEPGLTFMVAKFDGILGLGFQEISVGNATPVWYNMVKQGLISDPVFSFWFNRHAGEGEGGEIVFGGMDSSHYKGDHTYVPVTQKGYWQFNMGDVLVDGKSTGFCAGGCAAIADSGTSLLAGPTAIITEINEKIGAAGVVSQECKTVVSQYGQQILDLLLAETQPAKICSQVGLCTFDGTHGVSTGIRSVVDDKAGKSNGGLKSDPMCNACEMAVVWMQNQLAQNKTQELILTYINQLCERLPSPMGESAVDCASLGSMPDIAFTIGGKKFKLKPEQYILKVGEGQAAQCISGFTAMDIPPPRGPLWILGDVFMGVYHTVFDYGKLRVGFAESA

SEQ ID NO: 292809 - protein, 510 aa, Zea mays
  Clone ID: MRT4577_30123C.1.pep
MGTRGVALLLLAAVLLLQALLPASSEGLVRVALKKQPVDQNGRVAARLSAEERQRLLLRGANALGSGGDDDSDVIALKNYMNAQYFGEIGVGSPQQKFTVIFDTGSSNLWVPSSKCYFSIACYFHSRYKSGQSSTYKKNGKPAAIRYGTGSIAGFFSEDSVTLGDLVVKDQEFIEATKEPGLTFMVAKFDGILGLGFQEISVGNATPVWYNMVKQGLISDPVFSFWFNRHADEGEGGEIVFGGMDSSHYKGDHTFVPVTQKGYWQFNMGDVLVDGVSTGFCAGGCAAIADSGTSLLAGPTAIITEINEKIGAAGVVSQECKTVVSQYGQQILDLLLAETQPAKVCSQVGLCTFDGTHGVSAGIRSVVDDEAGKSNGGLKSDPMCNACEMAVVWMQNQLAQNKTQELILNYINQLCERLPSPMGESAVDCGSLASMPDIAFTIGGNKFKLKPEQYILKVGEGQAAQCISGFTAMDIPPPRGPLWILGDVFMGVYHTVFDYGKLRVGFAESA

SEQ ID NO: 292810 - protein, 172 aa, Zea mays
  Clone ID: MRT4577_30124C.1.pep
AGPGPFTDIFLHLRAILISPARSSFPCSDFLSQRLYLHVHSLLQLGVLLCRGFLQLVFHLRPSPRPRRSPLMPALGSTRLPLPHAIRPAERFFPTARPSPHRDAPVLLIHGGSSSCARLDLPSARRTPQLPTLLAARALPAAAIPRRVPAPAPVPRSSRARVPLMAVALPSG

SEQ ID NO: 292811 - protein, 112 aa, Zea mays
  Clone ID: MRT4577_30125C.1.pep
ELHLTHLQPSLLYPRLRRPDHVGPTTPIPARVSTDLTIGGAAAAARDDDDDDFPCAPPSTGANRQKPDAKPAGLVLFGRTILTEQQMSRSGATSPAATGNSSTCWNAEKGPN

SEQ ID NO: 292812 - protein, 97 aa, Zea mays
  Clone ID: MRT4577_30126C.1.pep
CFHKSSNDFKMMPRHHSSGFSNGYPRADTFEISPHRFQPRATVPLHKKRKRTAIRIGIVVAIIVLLIFWFGQPKSVASLISLGILSGYEDLKLETVR

SEQ ID NO: 292813 - protein, 99 aa, Zea mays
  Clone ID: MRT4577_30127C.1.pep
VGLEVQRPVILPPLEAGSDRCSVKPASRHSCRFRSGETQAFARAPTSHYQLGTGRPASGTYRAQAQKAIAKHPHHLNAPARVTSSRYRTRPRPAPRGVP

SEQ ID NO: 292814 - protein, 179 aa, Zea mays
  Clone ID: MRT4577_30128C.1.pep
MRWGLRSSCKQRHKESLQPLEQESKGKSKASFSSFLPLAWLAKLTARNGVPATKVVHATSSAAKNTAQAATAFPSCFHKPASPSTASASRSSLSLASSSSSAADAEAAGIVPCRRDDATGGDTVAGIAPRRRSVGNDDARTEAATATARQLYHSRRHYSVGGDRDLAHLGHPGIPLRGP

SEQ ID NO: 292815 - protein, 64 aa, Zea mays
  Clone ID: MRT4577_30129C.1.pep
VITIEQECGLSRHLRKEWSVLSMYRLPVIDHQLSPGAASRRSSFLCKTIRPVVQTPPHLSSFEL

SEQ ID NO: 292816 - protein, 47 aa, Zea mays
  Clone ID: MRT4577_3012C.1.pep
PNKHQDFAFNLKIKRLPSSKPYRNSSSLKTPTVKRESLSIVLLPNKI

SEQ ID NO: 292817 - protein, 116 aa, Zea mays
  unsure (1)..(116): unsure at all Xaa locations
  Clone ID: MRT4577_30130C.1.pep
AHVVNFENLNTNNVVGGDVEGDITKVVYHFQNNLGNIVDGNTQIQIIHCELTKQLKPDHIFNIGAGKQALNNINLIAYLFNIQDNPLPXDKXERGIVLEINLNDLEPNLAXVSTEW

SEQ ID NO: 292818 - protein, 86 aa, Zea mays
  Clone ID: MRT4577_30131C.1.pep
MGAVTSTVAARFAFFPPSPPSYGVELPLPPPPPAPAAPELAGEEKGGGGGGGSVVVELTGVPRRANVEARRLRTKRGTQAVAIARA

SEQ ID NO: 292819 - protein, 161 aa, Zea mays
  Clone ID: MRT4577_30132C.1.pep
RPAPNPPSRRQFFERKEPPPPSPLLLHVAQVPDNCSLRVPVRAQVGGVEGRSETPEHRRESLARVLSLPRIRLHRGRESSPASTPRTIWLKSPKNSLEKPLSSSWLEVVCIATNAQEKMKPWKETSRSSKITTSFRHGLAATPSRLSVKAACIYVSFPHFD

SEQ ID NO: 292820 - protein, 196 aa, Zea mays
  Clone ID: MRT4577_30133C.1.pep
AREKKKKKKKKKKKKKKKKNQKKKKKKKKKTCTPEPKRGDPEAPNFRRRKRATVPGNLIWQIGRKTTSFLGNQFGTGNAKGQLTKEPNTLYNEHSYKTSGLANKKTVPTHPAVERDSVGALFTTKTKKQTTPAKLTHKFVMPREFRRMPKAVKNQVGDNYYRPDLTKSPFGRLSSVTRTLQVAKSGVKKKNRQPTH

SEQ ID NO: 292821 - protein, 1202 aa, Zea mays
  unsure (1)..(1202): unsure at all Xaa locations
  Clone ID: MRT4577_30134C.1.pep
MDAGRLPPGADPAAAVAPNAAPAAAAAPGAALAAGAPSRAAVTPGAGLAAGATHLAFTAAPLCAAGSLHAGLASPTAIGPPPPGLTAPRSDRTGGSPPFIDGLGPLRDATPMALRRGSPPGFPTMPVPAEHNPSLVAAIATIQAAVAASRERERATSLALEHERALGAALTTQMATAQRLLLGRPSVAREDPPTPPAAIPATGLDVDHIGALHAQAAGLHNIRALVSVVLDPASSHYPRWRGQVLLTLRRYALADHVLDDLDAPPTPSWCLMDSVVLSWLHGTITVELQDIIRDQADTARQAWLALEDQFLGNRDARALHLDAQFHLFSQGDLSVGEYCRQMKGLADSLRDLGEPVADRTLVLNLLRGLSPRYGHLKALIKRSVPFPTFHAVRNELLLEELTMANEAPTPASALYSAPTSGQPPSGGPATRPPSTGAPTRPPPTVPAAPRPTSTTDGGRRSRKGGRGSGGSSRGGSSGRGGGQAWPSFYNPWTGTIAMWPGQAPSTPRPPAPALLTTPHYGAPPYGVPVVPQAPPALLPPGTPTSTPWSPPAGGWDSASLAAAFSTMAMTPPPSDWVIDSGASYHTTPTAGTLSRSHSPLPSHPSSIVVGNGSTLPVTSVGASVLPGPFYLNDVLVAPHITHNLLSVRRFTTDNSCSIEFDPSGFSVKDLATRTLLARCDSSGPLYTLQXPPPPACXSTSCPGLHHXSTTWHRRLGHPGPDVMTKITSSLDLSCNRGHFEGLCHACQLGRHTRLPFTTSSSRAEQAFDLVHCDLWTSPVLSLSGYKYYLVILDDFSHFLWTFPLRLKSDTFTTLTHFFTWVSTQFRRPVRALQCDNGREFDNNASRSFFLTHGVQLRLSCPYTSAQNGRAERMIRTTTNMLRCLLFQASLPASYWAEALHTATHLLNRLPSKAVHHPTPHFALYGTTPSYDHLRVFGCACYPNTSATAPHKLSPRSARCLFLGYSPDHKGYRCLDLTSHRIIITRHVVFDEDVFPLAGSTPPTDLDSLLESDPVPPPPSAPRLAPLPAPRAAPTTSSAPRAAPSTPPVPRAAPSTPSAPRAAPSTPPAPRAAPMLLPAPRAAPSTPPAPRAAPSTPPAPRAAPSTPTXSPTPPSSTIVAATPLPRRPPTRAHRRTRPASPTPPSSITAVSRPLQLLPTLRWHPPTPPHTPRSPASDTHASTTSRGLETLPACLWPSIISVIQ

SEQ ID NO: 292822 - protein, 120 aa, Zea mays
  Clone ID: MRT4577_30135C.1.pep
MAVTAVAASLSVAQGLGKPLCAGRNATSRRAVALAPRRSATRMAVVRASSAHQKQHPAKEWAAAAAVAAALVLPEVAEAAPGISPSLKNFLLSIVSGGVVLVAIVGAVVAVSNFDPVKRR

SEQ ID NO: 292823 - protein, 486 aa, Zea mays
  Clone ID: MRT4577_30136C.1.pep
MGKSPAKWIKSVLFGKKSSSRSGSTKAKDLSKGASNKGAAAAGKEPVFSESSPVISEPVLVSAHNNETVREVAKGENSSVQEVPVTDVSQDLEKQGSVGSDTSNDAERVREERAAVKAQAAFRGYLARRAFRALKGIIRLQALIRGHLVRRQAVSTLRATWLIVKFQALVRGRNLRLSEASIQATMELSQQNLAGSKPGSWKEKLSSNAFARKLLSSPIVVEALHVQYDEMDPNSAFNWLERWTISHVWKPISQPRRVGADAKPHTRKASYAMETESVKLKRNARRSSAVPFEPSQTNTTIEIEKTRRNPRKLSSTPAESVPDGQLTELEKVKRSLRKVTSSMVETSKVPSPTTEIPDHQEVQCERPLRSAKQAPIHVENQEPQNVNLSDNAKMDILVPDIQPDVEVASDLVTITNEEKVDEPPSVVAPAAEIMPLQDINSDENALVNDVEERSKEEHSSTDSLEGNKRRSSFSAKPEYPENGSKN

SEQ ID NO: 292824 - protein, 90 aa, Zea mays
  Clone ID: MRT4577_30137C.1.pep
ISPKKPLTVSLSEYRFSFADPGAHERPPPPPPSTLLQRSASVRPSVRRFQILFPHLGFVWFVEELKLSYHHRVCLVSLSVVVKVLRRIEK

SEQ ID NO: 292825 - protein, 160 aa, Zea mays
  unsure (1)..(160): unsure at all Xaa locations
  Clone ID: MRT4577_30138C.1.pep
PPSRPQTRTPRRPGTEGPKAEKKPAAKKPAEEEPAAEKAPAGKKPKAEKRGPGGGGAGKEGGEGKRGRKKGKKSAETHKSXTXKGXKQGHPDXGSXXKARAXXNXXXNDXXEKHAAEAAKHARXNKKPTXTXXESQTXXRXXXPGERAKHAXXEGTKAXT

SEQ ID NO: 292826 - protein, 56 aa, Zea mays
  Clone ID: MRT4577_30139C.1.pep
AYVPLTICLSGLDRRSQAHDHSVRTGKSLDLEHEGTNGHIIDKKERFPGLPCNFCW

SEQ ID NO: 292827 - protein, 52 aa, Zea mays
  unsure (1)..(52): unsure at all Xaa locations
  Clone ID: MRT4577_3013C.1.pep
IIKHGKGDLKNIHNNRDHENTXHMKHVIHINKISIQTWLKKKKTKKKKKKAP

SEQ ID NO: 292828 - protein, 58 aa, Zea mays
  Clone ID: MRT4577_30140C.1.pep
MDKANKLSTGAWEKATKSRSHGFTALIVAVDYALLLVFDGLLVYLVRSRILYSAAGSA

SEQ ID NO: 292829 - protein, 59 aa, Zea mays
  Clone ID: MRT4577_30141C.1.pep
YIYIFNILVYYPESYERYSYTLHVCYREVSIRVCYKLYIRKVACKFIEPIFISHPMNLR

SEQ ID NO: 292830 - protein, 91 aa, Zea mays
  unsure (1)..(91): unsure at all Xaa locations
  Clone ID: MRT4577_30142C.1.pep
ERLLNXSIPIAERYRALLSLRSLRGDAPGRALLQGLDYGASVRYIHVSTKERAVRDPCNXLAHEAAFALRQMQDAEAIPALVAVLKELSLH

SEQ ID NO: 292831 - protein, 175 aa, Zea mays
  Clone ID: MRT4577_30143C.1.pep
GRGPSNPRLLEKIFYPGFWGETPFLWDPTAGGVYPRKPQNVFGPFFLSQRGFSPIYTSKRPKKTTFFPGFWRGGIRKGDDRTRERGGGTLKGFFLPEKPPGDPKNESLGKDPLVRGAKGQRDRPPKQKEPPRWGVPGGGFFVLGFLGVVRGFRPVAAVGTGQQLGRETGGADLGG

SEQ ID NO: 292832 - protein, 128 aa, Zea mays
  unsure (1)..(128): unsure at all Xaa locations
  Clone ID: MRT4577_30144C.1.pep
SLCWWSRPTLSRRGRQRRNRPPXWPIMDTLRPAARASKNSFVPGPGDVPRFLTKGRTLFMPNAAGRLIGRSVVSLALFLGPKGGVKKAQGLRIRSLLLSGRHLEPGFWSRRSGRVGEKARGGRASLLE

SEQ ID NO: 292833 - protein, 104 aa, Zea mays
  Clone ID: MRT4577_30145C.1.pep
VSSPTVLVMLIKPYPMIIVCPCTMLQIPLCYAAGIVVDVRAMSLAAVIHRIHLCDMHVMELRHRVKLLSPHHVSKLFPVGKPTQYPLIQQTTPVNTLCLTSGGR

SEQ ID NO: 292834 - protein, 104 aa, Zea mays
  Clone ID: MRT4577_30146C.1.pep
VLVVGSASTLKQDKHWNNLVESAKERNCLFKVPKPLAAFFAEDNLKTMKVERRPPPELNARVLEEINQEVVRQELMNVDDAADHADAGRDDDADMDADDGGGDD

SEQ ID NO: 292835 - protein, 182 aa, Zea mays
  Clone ID: MRT4577_30147C.1.pep
VGVISPYRHQVKLLKDSFRSTFGDQSKELIDVSTVDGFQGREKEIVIFSCVRCNKEQKIGFVSDFRRMNVAITRAKSAVLVVGSASTLKQDKHWNNLVESAKERNCLFKVPNALTAFFAEDNLKTMKVERRPPPELNARVLEEINQEVVRQELMNVDDAADHADAGDDDDADMDADDGGGDD

SEQ ID NO: 292836 - protein, 112 aa, Zea mays
  unsure (1)..(112): unsure at all Xaa locations
  Clone ID: MRT4577_30148C.1.pep
NRLSDLCTHSSPSQTLSSPNLSIIYPFHSHSLNCRMDIHTLSHMAIMATVASGIDIEANIEGFESSFLSLSRGLWHPRLCSLFPVYXXGYQWRWRAAVLTPLLSSPITSLPS

SEQ ID NO: 292837 - protein, 114 aa, Zea mays
  Clone ID: MRT4577_30149C.1.pep
QPPPVGSGGDIPQANIIVGILPDVPSPPHFLLGQVRGLHRHSCKMAAPPLAFFCANEANCSKGIPSTWPFCVSGQTMFCLKKKTQWFGRTDIIIGGKLLSHHRKQPGPILKSEC

SEQ ID NO: 292838 - protein, 171 aa, Zea mays
  unsure (1)..(171): unsure at all Xaa locations
  Clone ID: MRT4577_3014C.1.pep
MATKILSLLALLALFASXTKGFIIPQWLIGSKAIISQVLPTSTLMGFEHLTGPGIMHQQGLGGRGLPQPIGQMEQPFLAHLTIQAITTEQEQQVLPRLDPLTMGNPGGYLEEQVVGFNPIGLANGGGNQEPQPLQQVLATVNQIGMGNPGGLLQQQQLVLFNPVGGGQGPT

SEQ ID NO: 292839 - protein, 698 aa, Zea mays
  unsure (1)..(698): unsure at all Xaa locations
  Clone ID: MRT4577_30150C.1.pep
ERVHVACKEIITLEKQTKLLEEEEKEKREEEERRDRRRTKEREKKNRRKERLKGKDKDKEKILVRSKKPGLSTFSPSSQAAPSSNESQDVLDLRYSDSEEEDNVVVREHYPDSSADQSSSKDTDERSNEHECSATAEFVPSDCDGSFLCDESNSSRNLRFRWDFPEKDVSYWYEDCRVDSGDTQLQSRERIRNNTRSYNTVFNTNNRTRDKYNPCSCGHQEDFRYFSTATRSSRETKISRKTVAEKPRLQYRRCYPPESFAVSNGRVGGTPNKNTGPKQVWEPMDARKKIGNGRGSEITPETTGAADGSDQVECSKDISECEKLXGSVXETLAETCCEISAEACKSDQPCRQGEKNQSACSDGSKCVDKPNCCLTKDTVRTTNLTSSDSFSCLSEGDRDSSMSSMTSLSAQNVESSSTSDSDEYSDRNDSSPGDPPVKNVSRSLLEMCAGNGFREYQPKGLNPPNGNQFGFMVAPLQDQMLHQQKIHAPPYSSPFVGFHNHPLAVPTNGYLPYPQPGHFYPGLMTPVGCGVAGSQCVDFPMQYSNNIHPYSGPEFGFLPAKPVHKTPVSFHAVPVPPLAPLCRSEVPVVINQERQQGSAPPKFKQAVLVPENGCSAEDNTFKQKGDDTDSTPFSLFQFNLPIAPPTLATSKEEQSGAMPSMALPPAQITRAQLCSREETNVKEYNLFSGCNGVMFQLN

SEQ ID NO: 292840 - protein, 147 aa, Zea mays
  Clone ID: MRT4577_30151C.1.pep
LLCELDSICPIFCHLFANLNVETLVAAGTRGLDAGDRYLKPFVIPKPEVTVVPRAKDDDCLILASDGLWDVVSNEEACKAARRQIQLWHKNNGVTSSLCDEGDESNDPAAQAAADYLMRLALKKGTEDNITVIVVDLKPRKKAKSNS

SEQ ID NO: 292841 - protein, 78 aa, Zea mays
  unsure (1)..(78): unsure at all Xaa locations
  Clone ID: MRT4577_30152C.1.pep
ENPAGRTHSXAPTSDPHCFFTRTCDGLFRLFLHLRWLHCPSPSHYGLPISHSVPTSTNCSYTDAPAPPGQQIIALLFH

SEQ ID NO: 292842 - protein, 82 aa, Zea mays
  unsure (1)..(82): unsure at all Xaa locations
  Clone ID: MRT4577_30153C.1.pep
NGNPKDDFKLPTDXTLLAQNKERFXNGKEPVVTATSAKGEEQNCPLKKFGPKKLPPLGKLDPQTLIEKKNVSKISTKTTNWL

SEQ ID NO: 292843 - protein, 129 aa, Zea mays
  Clone ID: MRT4577_30154C.1.pep
TFLKKKKKKKKKKIVVHSPGAASKKGQICCSTPYLAGRLYQPAFRGDPIPLLGGGFSYYWPLVLHCREWKNPVVPHPNRLVHNPPFTWGGFVEEPPTHRPFQLFPTFGGEWPPPLRPLFARRSWGFPAL

SEQ ID NO: 292844 - protein, 57 aa, Zea mays
  Clone ID: MRT4577_30155C.1.pep
CALHSPGRRTPGSPPRGEAFACSALKAAGWVEAGHRASEALGSAEVNGKLTNKEPRL

SEQ ID NO: 292845 - protein, 73 aa, Zea mays
  Clone ID: MRT4577_30156C.1.pep
PTTSSPHLRSLPRTKPCPFILSHWTHFHASMNGINPNLGFLSYCNMYSYSMCMATVISSIFFSFLERYSFIHL

SEQ ID NO: 292846 - protein, 310 aa, Zea mays
  Clone ID: MRT4577_30157C.1.pep
MKVTVVSRSGREVVKGGIDLKDSAKVADLQEAIHARTKKYYPSRQRLTLPLQPGKGGKPVVLSPKASLLEYCEKGSGSLTVVFKDLGPQVYYSTLFFFEYLGPLIIYPMFYYLPVYKYFGYEGERAMHPVQTYAMYYWCFHYFKRIMETFFVHRFSHATSPLSNVFRNCAYYWTFGAYIAYYCNHPLYTPVSDLQMKIGFGFGVVCQVANFYCHILLRNLRSPSGSGGYQIPRGFLFNIVTCANYTTEIYQWVGFNIATQTVAGYVFLVVAAGIMTNWALGKHSRLKKLFDGKDGRPKYPRRWVILPPFL

SEQ ID NO: 292847 - protein, 393 aa, Zea mays
  Clone ID: MRT4577_30158C.1.pep
MLSHITPVGVGPTPPTCTLPSPAPPRDQIRRLRPSTPSPPPSPLLSSPLPRIHGRRQQAATRRSSRLSPRSAASLPRLPVGGRMKVTVVSRSGREVVKGGIDLKDSAKVADLQEAIHARTKKYYPSRQRLTLPLQPGKGGKPVVLSPKASLLEYCEKGSGSLTVVFKDLGPQVYYSTLFFFEYLGPLIIYPMFYYLPVYKYFGHEGERAMHPVQTYAMYYWCFHYFKRIMETFFVHRFSHATSPLSNVFRNCAYYWTFGAYIAYYCNHPLYTPVSDLQMKIGFGFGVVCQVANFYCHILLRNLRSPSGSGGYQIPRGFLFNIVTCANYTTEIYQWVGFNIATQTVAGYVFLVVAAGIMTNWALGKHSRLKKLFDGKDGRPKYPRRWVILPPFL

SEQ ID NO: 292848 - protein, 55 aa, Zea mays
  unsure (1)..(55): unsure at all Xaa locations
  Clone ID: MRT4577_30159C.1.pep
MPLECQVSKAQASKRXGEXXLADTCPDXADFRXRCRDXGXSVQSQRXXXKARVEQ

SEQ ID NO: 292849 - protein, 318 aa, Zea mays
  Clone ID: MRT4577_3015C.1.pep
MAARRGPHVIKLHDPNPPLLGRAPGAAPAAVPASSRDEGLLAQHLRASAAHPAFALIEERLAARDQDIQELLVDNQRFAATHVALQQQLIAAQHELRAVSVAATRARAEREGEVRSLADQAAHMEAEARAIAAARAEIDQVHADVQVLAAARTDLVNRLQVLREKLAHKKAEASKTDSVRPQIETMRREIQNGRAAVDFEKKAHSDNLEQSKAMEKNMIAVASEIERLRGELANAEKGATAVNPAAAVGNSGYAAPYGNSASTYTGMYGNPDATYTAQAYPDAYSTNQGHMHTVANPHYMSQPVPYGQYESQHTNVQR

SEQ ID NO: 292850 - protein, 53 aa, Zea mays
  Clone ID: MRT4577_30160C.1.pep
RASYIKCLADRCGKRMCGNTPTHNARREHLSQSLSSLIRHLTYIYCGVLTARF

SEQ ID NO: 292851 - protein, 70 aa, Zea mays
  Clone ID: MRT4577_30161C.1.pep
RPPFRHFFHPPKFFLFSQGAFAGTFPPPDLEFFKGDSCPTRDGGSTAPPAFFVGGRFLFSNVGGFKAVFF

SEQ ID NO: 292852 - protein, 58 aa, Zea mays
  Clone ID: MRT4577_30162C.1.pep
LLFLIIHQIIKFDVTSQSGTNSPFHGPYQKPMTKRNLWMYLVIDKLCQVGFTLAIFTY

SEQ ID NO: 292853 - protein, 107 aa, Zea mays
  Clone ID: MRT4577_30163C.1.pep
GVQNGPQGGPPHVPRTPPFLEPFRVKAPVPSRLVSFKGPPKNLKTIVPFVPFAYYYHYYHPARSPGGQVFLFSPTSPPKKKEKKPTRGGLIFFHPKMAGPPFWALSV

SEQ ID NO: 292854 - protein, 123 aa, Zea mays
  Clone ID: MRT4577_30164C.1.pep
MPSTIASLVRVLQSATSREARVGAAMLAESLLRNAVPDAWAAVADSEELVCLKGPVMRRKAAWTGCRGSRMSCLAAVAARPRRDGPAGGVGENTEQGCGAMGSTREGEGERGHDCGLHYRLNR

SEQ ID NO: 292855 - protein, 47 aa, Zea mays
  Clone ID: MRT4577_30165C.1.pep
LPWFILLNHAHQVSIYINIRPGHIHLLLHILTYQVTLIALSYRSDPP

SEQ ID NO: 292856 - protein, 71 aa, Zea mays
  Clone ID: MRT4577_30166C.1.pep
LKSTPTDRGGIEYKTSMGYTYMPPQSKTRHKPPIYLNPPLCMPMGPQKLGVRGTLTPGLPPMLTHPQAPTH

SEQ ID NO: 292857 - protein, 668 aa, Zea mays
  Clone ID: MRT4577_30167C.1.pep
LVQLQAVSDEARAMYNGGRAGLTFWSPNVNIFRDPRWGRGQETPGEDPAVSARYAAAYVRGLQQPYAAPNGGHRNRLKLAACCKHFTAYDLDKWGGTDRFHFNAVVAAQDLEDTFNVPFRACVEDGRAASVMCSYNQVNGVPTCADAAFLRGTIRGRWGLDGYVVSDCDSVDVFFRDQHYTRTPEEAAAATLRAGLDLDCGPFLALYAGSAVAAGKVADADVDAALLNTVTVQMRLGMFDGDPAAGPFGRLGPADVCTREHQDLALDAARQGVVLLKNRRGAKHNRDVLPLRPAAHRVVAVVGPHADATVAMIGNYAGKPCRYTTPLQGVAAYAARVAHQAGCTDVACRGNQPIAAAVEAARQADATVVVAGLDQRVEAEGLDRTTLLLPGRQAELISAVAKASKGPVILVLMSGGPIDIAFAQNDPRIDGILWVGYPGQAGGQAIADVIFGHHNPGAKLPVTWYHQDYLQKVPMTNMAMRANPARGYPGRTYRFYTGPTIYPFGHGLSYTQFTHTLAHAPTQLTVRLSGSGHSAASAASLPNATLARPVRAVRVAHARCEGLTVPVHVDVSNVGDRDGAHAVLVYHAAPSPSHAAPGADAPARQLVAFEKVHVPAGGVARVEMRIGVCDRLSVADRNGVRRVPVGEHRLMIGELTHSVSLGVEQLGV

SEQ ID NO: 292858 - protein, 140 aa, Zea mays
  Clone ID: MRT4577_30168C.1.pep
MASGSMKREISETHDTLRFGLNAGVKADLAPPHPLQSSIQSEAKFWADKKKFGTEAIYGSALNIRKDLDAQILSRFQRPPGALPSSLLGYEALTGSLDDFGFEDYLNMPQDFEGFRQPDMHHGMEVRLGLSKGPICPSFS

SEQ ID NO: 292859 - protein, 167 aa, Zea mays
  Clone ID: MRT4577_30169C.1.pep
RTRGGDVVEELLIGVGRRGEPAAHAAAPFKGGRAALQKLLHAAYKRGETSVEVRVRRSSASAQLQRQLVAGDSGELQVADDAASMQACIVPQESVGGIGRTRHYVLRSIRDPNFAVGLVDRMESECIAIRGSRSRGLVCALSKAQLQDGYRVYPWEKKMREVLPIPN

SEQ ID NO: 292860 - protein, 68 aa, Zea mays
  unsure (1)..(68): unsure at all Xaa locations
  Clone ID: MRT4577_3016C.1.pep
PQGQRGGGQADAGKRPRHREPQGAQREGXRNAERDRGKARERPRPPAGGHRPPPGKRTRRQEAPQAKG

SEQ ID NO: 292861 - protein, 238 aa, Zea mays
  unsure (1)..(238): unsure at all Xaa locations
  Clone ID: MRT4577_30170C.1.pep
MPPRPPLPLSAAGAAVAVLSVLLLTAEAVPFVVLHGIGDQCANRGVAEFTRLLADWSAADGHCLEIGSGTWDSWLMPLHQQXASTSTSTVFLSYLSICTKIIRIFVCSNCCKIHXILFSLYMSFFQQADAICNKVRXRFGASGPDDVLSSAACWVDRDIHHPCLPACLVICXQVKEMKELSGGYNIVGLSQGNLIXRAVLQYCDDGPPVKNSISLAXPHAGTASVXXCGSXIFCVIAD

SEQ ID NO: 292862 - protein, 78 aa, Zea mays
  Clone ID: MRT4577_30171C.1.pep
PLLPYFIENRPFFFHMNDRRAPPGRIDMDLYAHQVRKTDRNLLALCTDEKGGGKSGQAVHYIGWIFHRAIPPFMYQGG

SEQ ID NO: 292863 - protein, 140 aa, Zea mays
  Clone ID: MRT4577_30172C.1.pep
MASGSMKREISETHDTLRFGLNAGVKADLAPPHPLQSTIQSEAKFWADKKKFGTEAIYGSALNIRKDLDAQILSRFQRPPGALPSSLLGYEALTGSLDDFGFEDYLNMPQDSDSFRQPDMHHGMEVRLGLSKGPICPSFN

SEQ ID NO: 292864 - protein, 87 aa, Zea mays
  unsure (1)..(87): unsure at all Xaa locations
  Clone ID: MRT4577_30173C.1.pep
MRRRAFWTWKKDDASRVDYCYVEHVARACDADVHSENLVGPDRSDSELEVAEDTYVLDAVEEARLXLPYSIRATSCATCAVKLACGK

SEQ ID NO: 292865 - protein, 140 aa, Zea mays
  Clone ID: MRT4577_30174C.1.pep
MASGSMKREISETHDTLRFGLNAGVKADLAPPHPLQSSIQSEAKFWADKKKFGTEAIYGSALNIRKDLDAQILSRFQRPPGALPSSLLGYEALTGSLDDFGFEDYLNMPQDSEGFRQPDMHHGMEVRLGLSKGPICPSLS

SEQ ID NO: 292866 - protein, 69 aa, Zea mays
  Clone ID: MRT4577_30175C.1.pep
LFYELTLHSSTGQNIANPDPRYRSQPEKVHKRATGIMLRKDAIISRLTYFTGSLPRQCCQPFYYRLFLF

SEQ ID NO: 292867 - protein, 140 aa, Zea mays
  Clone ID: MRT4577_30176C.1.pep
MASGSMKREISETHDTLRFGLNAGVKADLAPPHPLQSSIQSEAKFWADKKKFGTEAIYGSALNIRKDLDAQILSRFQRPPGALPSSLLGYEALTGSLDDFGFEDYLNMPQDSEGFRQPDMHHGMEVRLGLSKGPICPSFS

SEQ ID NO: 292868 - protein, 76 aa, Zea mays
  Clone ID: MRT4577_30177C.1.pep
GKKRGFSPRADKNLIEFCLSGSSTGTMAYSMIVTSSWASWGFLSATFPSLTTRPTRTGSFFYSRSQNQNTPSLFFF

SEQ ID NO: 292869 - protein, 85 aa, Zea mays
  Clone ID: MRT4577_30178C.1.pep
GDECFIRLHASYARLADPDERARYDRASVVRSLIRAGPLGCGAGFRPLWWETDQSCLHRSILHIYVVAPACDRESRYALRGLVRS

SEQ ID NO: 292870 - protein, 103 aa, Zea mays
  unsure (1)..(103): unsure at all Xaa locations
  Clone ID: MRT4577_30179C.1.pep
ITIHSSLSPQRFDWKNSSXTQLNLLAEHPTTAIYINLYKAPTLQPSHQPPSLNPDXHSPYHAPYTPVQTFSTRIITHTIATSLSPVSFPFFPSYLITLSFSSP

SEQ ID NO: 292871 - protein, 58 aa, Zea mays
  Clone ID: MRT4577_3017C.1.pep
DISSTWPWTASSAYNCVDNIPPDIISQLLAFSNKFCYEGLKPTYDNRVAAMVRGLDDA

SEQ ID NO: 292872 - protein, 461 aa, Zea mays
  Clone ID: MRT4577_30180C.1.pep
MAGKKRKSGSEKPTKHRLPLGADADAVAEASKRRRSGATKQHQADEEASIPPSLSAKILREARKQQEEEMRADSSDEQRPSAVEATAGPSTSSSFPVPAADGENEGDDVDEFDGFDALSEYDGGEVEINEEDEKALAAFMSKDKAAERTLGDIILQKIREKDAEVATGEGRPRVKLDNSIIELYKEVGKFLSRYTSGKIPKAFKRIPSLECWADVVQLTEPENWSPNAVYQATRLFSSNMNTKNAERFYEAILLPRVRNDIRKNKRLHFALYQSLKKALYKPAAFNKGILLPLCRERNCTLREAVIIGSIIQKVSIPFLHASVALVKLAEMEYCGTTSYFIKLFLDKKYALPYRALDAVLAHFMRFVDDERIMPVIWHQSLLAFVERYKNELEKKDKEKLARLLDHQKHYLVTPEIRRELRGSCNRGEKDTNLHTLSPISVITKPIEEDKWDVPQVPMEED

SEQ ID NO: 292873 - protein, 94 aa, Zea mays
  Clone ID: MRT4577_30181C.1.pep
PCRSSLPRPSHWQRRQGQGLPLRASTATPLAYFVSAPSQSPPSVLASTISTSFKNSASDCFFFAAQSTCSYSGFFFFVSASELSRYGSFTTSTT

SEQ ID NO: 292874 - protein, 93 aa, Zea mays
  Clone ID: MRT4577_30182C.1.pep
FMCLFMCLTAPALTDHSHNSSNSRPQLEVNSLNSSPPRAIKGPPARSRQKTQSNAPPQPTLPELHPHRLLKKKKKKKKKKKKIKIKKKTTKKR

SEQ ID NO: 292875 - protein, 114 aa, Zea mays
  unsure (1)..(114): unsure at all Xaa locations
  Clone ID: MRT4577_30183C.1.pep
RQRAAAAATAPGTTTKEXSTAKQTATPPTRXAREATTPGKXEGGGXAXHTRXRAAKDXETIGGDRKRRLATSPWKWGWTXISSLXSLHDGVLFFXARSAYTQAAWMQKNAGRPG

SEQ ID NO: 292876 - protein, 454 aa, Zea mays
  Clone ID: MRT4577_30184C.1.pep
MGKKRKLEPKSAAGFTPVKASPTTRSATAKAAGLSEVLAPVEATMEKLPQGAGGEDVEEIEEVEVEEEVEVEEEEEGESDQASIQALLDSFPKDQLVELLRDAAIAHGDVLTTIRRVADADPAQRKIFVHGLGWDTTTDTLTEAFGPYGEIEDLKVVTDRNTGKCKGYGFILFRHRSGARAALREPQKKIGNRSTACQLASVGPVPGGAPNSAAPAPVQLQLPPVSEYTQRKIFVSNVGADIDPQKLLQFFARFGEIEEGPLGLDKVTGKPKGFALFVYKTIESAKKALEEPHKHFEGVMLHCQKAIDGPKPNKLGGAGGFFGAGASSGGKGFAGYGATSHSLPGTVGIVQPMSPLAPGLASLPGGISAAPGVDPALGQALTALLATQQGGGLSFNSILGVGANGSGLPPQGPTGALGGSSVQGMQGGYMGGYGGSGGYGGASSGGPGRHYMGH

SEQ ID NO: 292877 - protein, 78 aa, Zea mays
  Clone ID: MRT4577_30185C.1.pep
GPPVRDPPKPQAGARGQIKIIRASGEGKGSENLLNHEQNTRFFGGGGGFPGEGRAKKKKREFWKKIPSLEKAFQGVRF

SEQ ID NO: 292878 - protein, 61 aa, Zea mays
  Clone ID: MRT4577_30186C.1.pep
SPTTGSHHNNRTCPNLCLTLIVRLCHKIFALVHARATMSIAPNTVTMIAPTYLSSQRQEHY

SEQ ID NO: 292879 - protein, 40 aa, Zea mays
  Clone ID: MRT4577_30187C.1.pep
HAMILTLFYCYVNSGHFSQNHLCSISLFLSSLTNVKIRIL

SEQ ID NO: 292880 - protein, 62 aa, Zea mays
  Clone ID: MRT4577_30188C.1.pep
VNAPSLRPLTTSQKREDETIGRAPRTHPSVAVASSRPRSHRAVQLVLADGALFYSFASSSLI

SEQ ID NO: 292881 - protein, 56 aa, Zea mays
  unsure (1)..(56): unsure at all Xaa locations
  Clone ID: MRT4577_30189C.1.pep
RCXGAAPAADRXXRVQPLGXXSQGPSTRHLXVIDRLPNXXPWPFXXAAPXRAAFGV

SEQ ID NO: 292882 - protein, 118 aa, Zea mays
  Clone ID: MRT4577_3018C.1.pep
STKTHIASIWKTHKQWVLCNARSQLPQSSSLVEWQQMGLLLTDRKLRKKHKIVNCCHMILYNNKVRNDVVLIAFLRNIKFDDSDWTMYSCSINRNKKIRKIMQEENGSYLLGVPAAPP

SEQ ID NO: 292883 - protein, 56 aa, Zea mays
  Clone ID: MRT4577_30190C.1.pep
IKAKSTAGGGARSPNQNRQHPHLEDAAPNPPTPGPTPRRANCQPPGAPGGRHAHLP

SEQ ID NO: 292884 - protein, 105 aa, Zea mays
  Clone ID: MRT4577_30191C.1.pep
DNTVRTRSAPNSVRRVAHSYSRPTFCEHRECGRVGLRNRHSQRDTCTGVRAIRFLGSILATARFVRSTSTDQVPRRRHHSWDCTTYICQRRLRTSTSNIHTRCLV

SEQ ID NO: 292885 - protein, 60 aa, Zea mays
  Clone ID: MRT4577_30192C.1.pep
DSSSQRYAYSGEAADDDDEESQSLTKGDGEVGMVKIDKDRNAGVSSAFGLEDEAEEDKRE

SEQ ID NO: 292886 - protein, 166 aa, Zea mays
  Clone ID: MRT4577_30193C.1.pep
MGSLMSCLSDPIPSGNRSPPPQPKRRSSTSSRGRGGGGRDSAKASVSIDEEALTAAAALVLGQRGASGGLGAFERSASVRYSAKRQSQGPPLPRSCSTRPRSLADPELQPQQLLAKDLNTKDLETNVIVLVHGGGFGAWCWYKTISLLEDSGFKVNAIDLTGSGIH

SEQ ID NO: 292887 - protein, 67 aa, Zea mays
  Clone ID: MRT4577_30194C.1.pep
IPETVQRPAKRCNTDGFRSNIVQRPIRHFQNMFKYLMNNHNQKESPDWLHPPKKKKKPKKKKKKKKN

SEQ ID NO: 292888 - protein, 103 aa, Zea mays
  unsure (1)..(103): unsure at all Xaa locations
  Clone ID: MRT4577_30195C.1.pep
LHSQYVKGRDRSSCVRKYSESRSSLDYASDSEQSSVQATQSAQEKEMQGQMDRTHNRQDKYRGEDKSKSERECPHSKKGTLEENLSDHLRYGSKPKRXDYAGQ

SEQ ID NO: 292889 - protein, 74 aa, Zea mays
  Clone ID: MRT4577_30196C.1.pep
NGIRKRKCSVIREEFLGFQADRYTNKKNSHQNPFLLPFFTHRTHILISYACFHSPPTSSPESMKEFIQHRAERA

SEQ ID NO: 292890 - protein, 111 aa, Zea mays
  Clone ID: MRT4577_30197C.1.pep
TAEHLMLLEADNHVVNCLQPHPFDPILASSGIDYDIKIWSPLEESRIFNRKLADEVITRNELMLEETRNTITVPASFMLRMLASLNHIRADRLEGDRSEGSGQENENEDEE

SEQ ID NO: 292891 - protein, 49 aa, Zea mays
  Clone ID: MRT4577_30198C.1.pep
TLSREDTKGHLGHKESQNQGGYIQLITNYLIQIAPIWITQRKDVVFKRI

SEQ ID NO: 292892 - protein, 70 aa, Zea mays
  Clone ID: MRT4577_30199C.1.pep
MATCRCPEPAQCHHRPLLSTAKGYPKLHDRPRPAPGSVLAEVAGILCLTGPMVGAGILFYMRSLVSMVFL

SEQ ID NO: 292893 - protein, 77 aa, Zea mays
  Clone ID: MRT4577_3019C.1.pep
ETRQAARTTACSILREVLSTALDCVYEGEGSSPGAYGGIQEAGDSSYTVCSASYCVLLAVAAFSGRQQLPVSERNLC

SEQ ID NO: 292894 - protein, 120 aa, Zea mays
  Clone ID: MRT4577_301C.1.pep
FGSRGRVLVFIRHGHLPAALPAPAVPTTPMGGAWSVICSVLGRTSGPRAQGATTTCVLSVPHQLMLGNLAASSCNYRHGVQGGPPEHARHHRREIMHASGRSHILLWLDYQYHQRPLPRT

SEQ ID NO: 292895 - protein, 235 aa, Zea mays
  unsure (1)..(235): unsure at all Xaa locations
  Clone ID: MRT4577_30200C.1.pep
MDSSKSPQPLKKSRTSLSGTDGHQFENDELPSETASDKTPGLKFETVDKAQDEFGEDSSPLQQSAASNVSYRGSPCIGAFTIQCARCFKWRLIPTKEKYEEIREHIIQEPFDCERAREWKPDVTCDDQEDISQDGSRLWAIDKPNIAQPPAGWERQIRIRGEGGTKFADVYYTSPTARKLRSLVEVDRYLQENPEYGAQVLTLAHFPLQIPRPLRXDYVKSAPRTQCPDDDTPTK

SEQ ID NO: 292896 - protein, 211 aa, Zea mays
  unsure (1)..(211): unsure at all Xaa locations
  Clone ID: MRT4577_30201C.1.pep
MDSSKSPQPLKKSRTSLSGTDGHQFENDELPSETASDKTPGLKFETVDKVQDEFGEDSSPLQQSAASNVSYRGSPCIGAFTIQCARCFKWRLIPTKEKYEEIREHIIQEPFDCERAREWKPDVTCDDQEDISQDGSRLWAIDKPNIAQPPAGWERQIRIRGEGGTKFADVYYTSPTARKLXPLXVEXDRYLQEIQSMXAQGVTLAQXSSRF

SEQ ID NO: 292897 - protein, 322 aa, Zea mays
  Clone ID: MRT4577_30202C.1.pep
MRSLRAAQTLVSRSLFSARHLSGAASPATAAAAGARWCAAPAPPPRSPLPSSRVMPAGVAGAVSFSLTFATVAAAEAKAKERPQPDLLPQNVVLYQYQACPFCNKVRAFLDYHDIPYKVVEVNPLSKKELKWSDYKKVPILTVDGEQLVDSSDIINILQSRINPNDELTSDEEAKWRRWVDEHLVHVLSPNIYRTTSEALESFDYIAKHGNFSFTERFAVKYAGAAAMYMVSKKLKKKYNITDERASLYDAANTWIDALNGRDFLGGSKPNLADLAVFGVLRPIRYLRAGKDMVENTEIGDWYRRMEDAVGEPSRIQDAEGN

SEQ ID NO: 292898 - protein, 74 aa, Zea mays
  Clone ID: MRT4577_30203C.1.pep
RCNWKFRSGYTSNWRYLKVFEINNDAKMKRTMRRPLPSGRVSSTHAAMWATSAGIAGTTLLASRRLALCRGAPL

SEQ ID NO: 292899 - protein, 69 aa, Zea mays
  Clone ID: MRT4577_30204C.1.pep
PTRPRGHLIAADGSPFARQTGGGGDGVSACLLSCQWRRRGGGGTRGPTAFLAACTPLVVMMENPNWFIS

SEQ ID NO: 292900 - protein, 84 aa, Zea mays
  Clone ID: MRT4577_30205C.1.pep
FGFTGIGALGRRSFGRTGGSRASQDSGGAPLLSRLGVGIQKKSFLNNGGGHPKIRSSLCEFLKKKKEKTKHLTKKLNRKKKTKK

SEQ ID NO: 292901 - protein, 58 aa, Zea mays
  Clone ID: MRT4577_30208C.1.pep
LFLFVGTVRPVVLSAVQVSGCGSRRARTAVNGPAMALLLLPMTCASVEPLIRIPSLRT

SEQ ID NO: 292902 - protein, 69 aa, Zea mays
  Clone ID: MRT4577_30209C.1.pep
MGPEQGRRSNGGAAARSKEEGGAKVVRYRECQRNHAAFLGGHAVDGCREFMAAGADGTAAALACAACGC

SEQ ID NO: 292903 - protein, 96 aa, Zea mays
  Clone ID: MRT4577_3020C.1.pep
FWPPPPRPGFLKRPGFCPKGLVPPPQGRQKPPPPPFTPRAFLPPPPFLFFFKKGAGKPLQALFLFSVGLAPPLFSPPFFPPSSGALNQCVAFLIPV

SEQ ID NO: 292904 - protein, 102 aa, Zea mays
  unsure (1)..(102): unsure at all Xaa locations
  Clone ID: MRT4577_30210C.1.pep
QRWSCTGCRXPPGPHPSLLGQQQQYQQIPQQQHPQFSQPPPPNMPQLQAPAHMLSHSQGSRPTLPQLPPMGGPSVPSQVNPPLPPMPHPTVLFIDTFTMLLN

SEQ ID NO: 292905 - protein, 142 aa, Zea mays
  unsure (1)..(142): unsure at all Xaa locations
  Clone ID: MRT4577_30211C.1.pep
SFWLYVLVIAFIGHGGWAVPRIKDTDLSDDQTLERHFEIFTTVRTLYQTHILVHGDLREDIMLYLEGHLPIIDVSQSDDFDHHXGLDLLKEDCLHASDCYKKHGVAVMTVTGLCNLVIEQTXISDEHDDVYLIQANRQTLVN

SEQ ID NO: 292906 - protein, 160 aa, Zea mays
  Clone ID: MRT4577_30212C.1.pep
PVFDVLRLFPDDCAFPTVCGAYGVCTDMQCSCPHASADAWVDFRRPNRGCVTVAPVAGCGGSHPPARLVSLPGLAYFNDPATSLRALERVSDAACRKACLDDCACAAAQFVYGTDAGDGFCYLQSEVLSLETSRPEVVHYNSTMHLKVRATRRPSPSARF

SEQ ID NO: 292907 - protein, 1183 aa, Zea mays
  Clone ID: MRT4577_30213C.1.pep
FDAWADAWADAWAGERQSTRMRIRYLDAALRQDVSFFDTDVRASDVIYAINADAVVVQDAISEKLGNLIHYMATFVAGFVVGFTAAWQLALVTLAVVPLIAVIGGLSAAALAKLSSRSQDALSGASGIAEQALAQIRIVQAFVGEEREMRAYSAALAVAQRIGYRSGFAKGLGLGGTYFTVFCCYGLLLWYGGHLVRAQHTNGGLAIATMFSVMIGGLALGQSAPSMAAFAKARVAAAKIFRIIDHRPGISSRDGAEPESVTGRVEMRGVDFAYPSRPDVPILRGFSLSVPAGKTIALVGSSGSGKSTVVSLIERFYDPSAGQILLDGHDLRSLELRWLRRQIGLVSQEPALFATSIRENLLLGRDSQSATLAEMEEAARVANAHSFIIKLPDGYDTQVGERGLQLSGGQKQRIAIARAMLKNPAILLLDEATSALDSESEKLVQEALDRFMIGRTTLVIAHRLSTIRKADVVAVLQGGAVSEMGAHDELMAKGENGTYAKLIRMQEQAHEAALVNARRSSARPSSARNSVSSPIMTRNSSYGRSPYSRRLSDFSTSDFTLSIHDPHHHHRTMADKQPAFRAGASSFLRLARMNSPEWAYALAGSIGSMVCGSFSAIFAYILSAVLSVYYAPDPRYMKREIAKYCYLLIGMSSAALLFNTVQHVFWDTVGENLTKRVREKMFAAVLRNEIAWFDADENASARVAARLALDAQNVRSAIGDRISVIVQNSALMLVACTAGFVLQWRLALVLLAVFPLVVGATVLQKMFMKGFSGDLEAAHARATQIAGEAVANLRTVAAFNAERKITGLFEANLRGPLRRCFWKGQIAGSGYGVAQFLLYASYALGLWYAAWLVKHGVSDFSRTIRVFMVLMVSANGAAETLTLAPDFIKGGRAMRSVFETIDRKTEVEPDDVDAAPVPERPRGEVELKHVDFSYPSRPDIQVFRDLSLRARAGKTLALVGPSGCGKSSVLALVQRFYEPTSGRVLLDGKDVRKYNLRALRRVVAVVPQEPFLFAASIHENIAYGREGATEAEVVEAAAQANAHRFIAALPEGYRTQVGERGVQLSGGQRQRIAIARALVKQAAIVLLDEATSALDAESERCVQEALERAGSGRTTIVVAHRLATVRGAHTIAVIDDGKVAEQGSHSHLLKHHPDGCYARMLQLQRLTGAAAGPGPSTSCNGAA

SEQ ID NO: 292908 - protein, 73 aa, Zea mays
  unsure (1)..(73): unsure at all Xaa locations
  Clone ID: MRT4577_30214C.1.pep
MIEGEGPALGIDLXTTYSKVDEGQYDPVVIIGNNQWNRTTPGYANYTVTXLLIRNAPKNHVAKNPTNTVCYSK

SEQ ID NO: 292909 - protein, 341 aa, Zea mays
  Clone ID: MRT4577_30215C.1.pep
AVIIKVALDLGTRFYDSKTLVIRLNHGKLAEAICSWAGVSQDQRQNVAEFLSSTIVQYWPNEADRKSQWSLIRGQLLQDLRLSEEVVEKLHKADQRFCGSADLVLARLRGTLFYDESACKALDDLSALLRCLRVWSVEQPITTIDVLMPPSECYYTNLFFQVYSKEGNHGPGFHEKLLAVGGRYDWLVEQAWDETSKSKPPGAVGVSIALEKFLPNNPSSDLGLRRLLSRVEPSISVLVCSRGGGGLLTERMELVAELWKANIMAQFVPQEDPSLQEQYEYASEHDIKCLAIMTESGLSQTDLVKVRHLDFKKEKDVEREGLIKFLSDAMCSQYKNPTIWS

SEQ ID NO: 292910 - protein, 55 aa, Zea mays
  Clone ID: MRT4577_30216C.1.pep
GSTMANPDQTNGSRTAMDGNSVTNGQEPKPPGIVQNIHNYNGRNQLGGNLIKTSP

SEQ ID NO: 292911 - protein, 68 aa, Zea mays
  Clone ID: MRT4577_30217C.1.pep
SLKRRLSPAGPKFSQTPLEGKQKSPTLSPQAPSQWLLEPANRRNPPVNQQAIRQVSPARRRFHPAAYR

SEQ ID NO: 292912 - protein, 33 aa, Zea mays
  Clone ID: MRT4577_30218C.1.pep
ALSINLHGGFSGSLLFKMRKRHPTNRFYFKRYQ

SEQ ID NO: 292913 - protein, 265 aa, Zea mays
  Clone ID: MRT4577_30219C.1.pep
DYGPDHLMPPDQTPKVLFSTPKKSNLVRFYSQADELVKIDLQCHVQGDIVLECIHLYEDLDREEMVFRIMFNTAFIRSNILMLNRDHIDMLWNAKDQFPKDFRFEVIFSDMDIVTSHVTTEPVIHQEKQGLGVEEFAKVLDIFNHLDWLDGKKDTVPHTTQLKISAITDEPETFFDTREELESESSSGEIYSSSVVLKVGNELDMLVSTKPRHIPQDSSSANVQSKSQTTVQSPSRMRRTALLSPSRKFQPVLHHGTVFQYNHAT

SEQ ID NO: 292914 - protein, 85 aa, Zea mays
  unsure (1)..(85): unsure at all Xaa locations
  Clone ID: MRT4577_3021C.1.pep
ESFDALTNILFAXGTTGEPKTIPWTQQTPIRXSIPYXTHKDVRTXETWXWPTKQNWGMGPIINYSCFLTGATMAXYHGSTLGHEF

SEQ ID NO: 292915 - protein, 315 aa, Zea mays
  unsure (1)..(315): unsure at all Xaa locations
  Clone ID: MRT4577_30220C.1.pep
VLDYPGHYEGCALLTMEMIHCILKSSESWLSLGQHNLLLMHCQQGSWPILAFMLAALLIYLGHYSDEEKVLDMVYKQSSLELLEMISPRNPMPSQMRYLRYISTRNVMPEWPPADRALTLDCIILRMVPNFHGQGGFRPIFRIYGPDHLMPPDQTPKVLFSTPKKSNLVRFYSQVIVFCWVIHCSAFKLLANAVLYNNFPCYKSLEXNFDFFLNLPCXFTRKELTISDLRXELVKIDLQCHVQGDIVLECIHLYEDLDREEMVFRIMFNTAFIRSNILMLNRDHIDMLWNAKDQFPKDFRFEVSVYAKWRTRLLL

SEQ ID NO: 292916 - protein, 121 aa, Zea mays
  Clone ID: MRT4577_30221C.1.pep
VCLLGRRTAPPSAALERGQKRRRRSTSPGSACSSSAKPISSTSRKMDQFTEGEPSHGHEPFVYTEGIDLTQFDDDATFHNACNIDVNLQASENNTTPATQRNKIVKKTVTRRLANYSQAED

SEQ ID NO: 292917 - protein, 118 aa, Zea mays
  unsure (1)..(118): unsure at all Xaa locations
  Clone ID: MRT4577_30222C.1.pep
TVSPFLAWSCALSQPRSPPPTSFFAWSSSDLTPVAELEGHGESVSDLSFSPDGRLLADXPTSDDRTIRIWDLAVGGGAHLPKTLTGHTNYVFCVFFSPHGNVLASGSFGETVRVCVPL

SEQ ID NO: 292918 - protein, 52 aa, Zea mays
  Clone ID: MRT4577_30223C.1.pep
LFQHIVMELCAGGELFDRISAKGHYSERAAANLLRPLSGSRRECYSLWGVHR

SEQ ID NO: 292919 - protein, 51 aa, Zea mays
  Clone ID: MRT4577_30224C.1.pep
WCSIFKAEKKSDHDPRFALLGLIKGGYIKFTLMNVKKGFGRFPCGTWGGDT

SEQ ID NO: 292920 - protein, 146 aa, Zea mays
  unsure (1)..(146): unsure at all Xaa locations
  Clone ID: MRT4577_30225C.1.pep
SGEGKKGKSETKEQGGESERGGESGKKRGGGGRGEDGGGTGKKKRQGEKTKGKSRKRGKGRGERRRGKGESXERGKGEXKGEQEKKKXGKRTRKGEKPEGKGERAEGRLVAEQKTTENWGKKTDKRVDRNQGRGTQGKPGTGNGKP

SEQ ID NO: 292921 - protein, 88 aa, Zea mays
  unsure (1)..(88): unsure at all Xaa locations
  Clone ID: MRT4577_30226C.1.pep
MRASFAAGGEGVFQTAGASGGCGSSGECGERCPXLGGTSAAPQGTLLLWVGPXEKRAAXGLVEGPXXSLEGPHPCGCGSAFNCDPCDC

SEQ ID NO: 292922 - protein, 83 aa, Zea mays
  Clone ID: MRT4577_30227C.1.pep
PPLLLHLPRSAGAPSYSPWLTSAWHAGDGCSDCVQARALNDGISGFPFRLLAVLSRTRLGSSAHRAVTVRDGLDKVLQRSYRK

SEQ ID NO: 292923 - protein, 81 aa, Zea mays
  Clone ID: MRT4577_30228C.1.pep
GPVLIILGDVLLTAAAPYLWGCKERGRHPGPTNTHAKIQDPWNGGRQTTPKLARKLKRTSYADSDTVCKAGTNVDRGQPLN

SEQ ID NO: 292924 - protein, 112 aa, Zea mays
  Clone ID: MRT4577_30229C.1.pep
HGPACPFFGHPNPPAPCPCPLRQAWGSLDALVGRLRAAYEENGGRPESNPFAARAVRLYLCEVREHQARARGVSYEKKKRRKPQQLPGPGDSSGLHGHAHQPPPPPPAGAAC

SEQ ID NO: 292925 - protein, 79 aa, Zea mays
  Clone ID: MRT4577_3022C.1.pep
GCCLVFSSQGAATSGQGNLKVLVWDPGGYEYHSLGTSCISRGGECQLFSQEQWAYRETKSGDKRVRGPNVKVIETIWAK

SEQ ID NO: 292926 - protein, 468 aa, Zea mays
  unsure (1)..(468): unsure at all Xaa locations
  Clone ID: MRT4577_30230C.1.pep
MDANVVQRCLEAGGRDFLFHHTSSPPSPTSASAAASSSILQSLPLHVSFDRGYYLLVKAIQELRARKDGHVVTVGIGGPTGSGKTSLAEKVASVLGCVVIVSMEDYRTAPGVDDGISDVNAVDFDALARNLQDLVKGKDTMVPLVDFQEKKRTGWRELRISSSGVVIVDGAYALHSTLRSLLDIRVAVVGGVHFSLLSKVQHDIGDSCSLDYLIDSIFPLFRKHIEPDLHHAQIRIDNSFVCSFRDPYYKLKCKNESSDGKKLYSFEQNKVETENFIEMYLRPPXASEEMKIDDWIKVRQCGIRYYLSLGDQRIVDKYFIIRPKAEFEVGRTTLGGLLALGYNVVVSFKRTCTSVNIDQLLIAAETIDTLNETFLVLKGPSRKIVAAEASKLGIKGPWITKSYLEMILESKGVPRLNTPPPVSSKLLTESQEKKIAAPKPIRVSAENITNLDDLMQPTKLLHILKLLR

SEQ ID NO: 292927 - protein, 200 aa, Zea mays
  Clone ID: MRT4577_30231C.1.pep
MDMSPNPDSPSSGGGNGIGPSSGGASPSVGSMTPQSPSRYEAQKRRDWNTFGQYLRNHRPPLSLAQCSGAHVLEFLRYLDQFGKTKVHGPACPFFGHPNPPAPCPCPLRQAWGSLDALVGRLRAAFEENGGRPESNPFAARAVRLYLREVREHQARARGVSYEKKKRKKPQQLQGDSSGGLHGHAHQPPPPPPPPAGAAC

SEQ ID NO: 292928 - protein, 37 aa, Zea mays
  Clone ID: MRT4577_30232C.1.pep
SRTFSCSICNVGGNFQTRLQISPDQLDRKPSSHECKH

SEQ ID NO: 292929 - protein, 67 aa, Zea mays
  Clone ID: MRT4577_30233C.1.pep
NSFCVGSELLALESLLKRMFKRRELSWFSGSAMRCEMARIRSFSSLFFLLFALLSNEFVVAPSRESL

SEQ ID NO: 292930 - protein, 48 aa, Zea mays
  unsure (1)..(48): unsure at all Xaa locations
  Clone ID: MRT4577_30234C.1.pep
XFAFVATFDYQGFVFKNVNSPFTDQAINLSMHSSMIYHHQRDNLSPIS

SEQ ID NO: 292931 - protein, 47 aa, Zea mays
  Clone ID: MRT4577_30235C.1.pep
AFYTIYNCDLYQDEEMLGLSLYIHLSLLLMILNVNIAVVIGVNLHMA

SEQ ID NO: 292932 - protein, 126 aa, Zea mays
  unsure (1)..(126): unsure at all Xaa locations
  Clone ID: MRT4577_30236C.1.pep
YSSFIAIYPNLILWYSAYIFSFFFFIWFFLFFCFFFIFLXFCFIFFFYFFFSFLYIFFLYYFLFFLLFIFFFILYLFFYYFYIIYILFIFFFXFFFLYLFNFYFYFYFYFILFYFFFYFFFLYLFF

SEQ ID NO: 292933 - protein, 86 aa, Zea mays
  Clone ID: MRT4577_30237C.1.pep
TFYSPWGQMFPMFLLKYSVPPTKLYMGRHNRVPPAFIAQQLENPPLPKTRVLPMIPYQNNREVQKTPQKPLCSPLIRVHHAKELLL

SEQ ID NO: 292934 - protein, 76 aa, Zea mays
  Clone ID: MRT4577_30238C.1.pep
NVGMALIKQRSQLVWLFSMELVQGMVPGVLMTCKGRTGRRSVSSLRQVLHGSFVQASMIAVCGPPCCTGRAPGIDD

SEQ ID NO: 292935 - protein, 414 aa, Zea mays
  Clone ID: MRT4577_30239C.1.pep
MATSASTSGEWLKGALQELRERKGSSLEFDSDLISGLVSFCELAPPSDATSYLENFIGKEAAQDIIQEYLRRRGHIGSSNGTESFQSSNLQPYVKPSADAATTQTKKQTRTQKDSASSSSQSSKSQSEIAESQVPSKRGSKKKGAKVISLAEAAKGSIVFKQGKPCSCQARQHDLVSNCLSCGKIVCEQEGEGPCSFCGALVLKEGSTYAGLSDVGLPLSEAETAAEAYAKRLVDYDRNAAARTKVYDDQSDYYEMEGNSWLSSKERSVLKQQQEEAEEAAKIQKGKVIVTFDLVGRKVILNKDGSTEVETEHPIMRPPEEKDQSHRIQPNPTIREQPVFVETSPVKPKTDRAKQSKRLAKNGLCLEVTGRLQHDDKGMESILSGKVKKGDHLAYSSFGQAREGDDVECSPDFD

SEQ ID NO: 292936 - protein, 72 aa, Zea mays
  unsure (1)..(72): unsure at all Xaa locations
  Clone ID: MRT4577_3023C.1.pep
NTLPTLVGHIQTTFKRSGHPSSAQDKVGHQLAIDKVXQETAQFVDLYRAGSMSKSLTVTHTETREPGACRSR

SEQ ID NO: 292937 - protein, 92 aa, Zea mays
  Clone ID: MRT4577_30240C.1.pep
LLLATIPVLIVALLVLVVSNIIVTYTLPVMLNVVGLAGVFGVYAVVCVLALAFVFIKVPETKGMPLEVITEFFSVGAKQAKEEEEEEEAREG

SEQ ID NO: 292938 - protein, 88 aa, Zea mays
  unsure (1)..(88): unsure at all Xaa locations
  Clone ID: MRT4577_30241C.1.pep
NPFSHLTEGELEEYKRTIERKQQGLEENHELFSKSFISMEVPVMVXNGKDDMHDVEDELAKRVSRLSTSTTIENIEITIKSPEKIEEV

SEQ ID NO: 292939 - protein, 100 aa, Zea mays
  Clone ID: MRT4577_30242C.1.pep
THASEVTEEKTSPPLESQAETWLYFDICESEPDSPTNKENGEEGEVTEEKTSPPLESQAETWLYFDICESEPDSPTNKGEEVADFCCFCAKVVPNKENQD

SEQ ID NO: 292940 - protein, 59 aa, Zea mays
  Clone ID: MRT4577_30243C.1.pep
NSIFDNFSKLLFGQEQSFLRMGIFLYTERILYFYEALSKSLMVQEHHIILRNYDLRYFT

SEQ ID NO: 292941 - protein, 64 aa, Zea mays
  Clone ID: MRT4577_30244C.1.pep
IHKNKTGPPYMKKRSIIPNPQKEFWKGHPEYSILNLNTNTLLTLTTACNLQWRAQCPNDTITKR

SEQ ID NO: 292942 - protein, 136 aa, Zea mays
  unsure (1)..(136): unsure at all Xaa locations
  Clone ID: MRT4577_30245C.1.pep
AXMNEVLIYLETLVSTAQEILXLEALYKVVSGAMSHISDSIMTTLLNDGVKRFTVNAVLGIDIDLKTLEAFADDKFDSTGLSDLGKETTCRDCLVEIRQLTNLLLSSQPENFMNPVIRQRNYGSLDYKKLAIICEK

SEQ ID NO: 292943 - protein, 91 aa, Zea mays
  unsure (1)..(91): unsure at all Xaa locations
  Clone ID: MRT4577_30246C.1.pep
PGRAPALGPYVGGRDGDLHISPPSGVFSAPLSYQNFGVFLGLLWVVDDDLLSFALICPVGPNQNFFILQFGRFYWTGLLCPLLFLXSPLAL

SEQ ID NO: 292944 - protein, 99 aa, Zea mays
  Clone ID: MRT4577_30247C.1.pep
EAAPEPEAKLEAVTPSRSHELPPESESDAPASTGSQELKPWEQHAAVINLPRYDYRASGSLLLRSHSGFLITCPIKREKSATKEAIPILEEVIAHHVAP

SEQ ID NO: 292945 - protein, 158 aa, Zea mays
  unsure (1)..(158): unsure at all Xaa locations
  Clone ID: MRT4577_30248C.1.pep
PPVPPPPPSGSPPVGGRXPLGPPVLKMCIPPAGKSPXLFSGRGLRAPRGPPPXPGFFPVDMVQLGAPPPGKKGXPGVPXSQRGPGFPGSGPPPFPPPPGPPXSPGSPPPPHKKGGWPPDFPRXPPFPRSPGLFFPGFARFPPGSWGAVVLFLIFFLPP

SEQ ID NO: 292946 - protein, 77 aa, Zea mays
  Clone ID: MRT4577_30249C.1.pep
YELPPESESDSPAFTGTQELKPWEQHAVVINLPRYDYRASGSLLLRSHSGFLITCPIKREKSATNEAIPILEENHVM

SEQ ID NO: 292947 - protein, 223 aa, Zea mays
  unsure (1)..(223): unsure at all Xaa locations
  Clone ID: MRT4577_3024C.1.pep
MNDLFSSSSFKKYADSSVATSAGGAEAGGESVINLDKFFEDVEAVKDDMRGLEGMYKGLQSTNEETKTAHDARTVKSLRSRMDKDVEQVLRRAKAIKTKLEDLDRSNATSRKVPGCGPGSSTDRTRTSVVAGLGKKLKDLMDDFQGLRARMAAEYKETVARRYYTVTXEKPEDSTIEALISSGESESFLQKAIQEQGRGQVMDTISEIQERHDAVKDIERSLM

SEQ ID NO: 292948 - protein, 353 aa, Zea mays
  Clone ID: MRT4577_30250C.1.pep
MAAPEPEAKLEAVTPSRSHELPPESESDAPASTGSQELKPWEQHAAVINLPRYDYRASGSLLLRSHSGFLITCPIKREKSATKEAIPILEEYHANCCVSEHAEPCDVKNAIKKRKLCSEASGSLEEAVTNGNSSSVSESIGSTGNTSSPQSKVNDNVDRASNLSLVKLSRSGLLFFKFPSGGVHVVEMLTEILHSLRSGKLKSPQWCHRIFPIQETCILSEEDLHATVSKLFLDFSRSKTNEDKPIKFAVAYNRRGIDETEKNSNEGSNQQTLMDREQCFKVVAAAVKSVAENSVVDLRSPEVAVLVEMLPVSGVPLGSSVAGVSVLPAELISTKPRLCVRSLVPDAKAGKKK

SEQ ID NO: 292949 - protein, 88 aa, Zea mays
  Clone ID: MRT4577_30251C.1.pep
SPPRLDLLPTTRATAAPPRTSSFTDSDGLIGDAVNNQAAMNPIITVSNVNGRHLSGRGMDASEHERDQDADLPRHYWELREKTMYSYA

SEQ ID NO: 292950 - protein, 57 aa, Zea mays
  Clone ID: MRT4577_30252C.1.pep
RCCRINIVINCDMFIQDKYSLLLNKYNGFNFSQDQYTLDLASVKTRLLHIHAGPMVL

SEQ ID NO: 292951 - protein, 133 aa, Zea mays
  Clone ID: MRT4577_30253C.1.pep
RSSEFGSWQRNFALSRAQQPHAYARFLARFASQLGPPGWDVAANRIIRALPPETSLGPRQDAHGEPPQNSQRTPASSTNPSSEPTSTPIMPSKNDVLDHKPGPTSNRDVTAAVHLLRTQTAACTSASLDKSSV

SEQ ID NO: 292952 - protein, 71 aa, Zea mays
  Clone ID: MRT4577_30254C.1.pep
MAPKSRRGKAKGEKKKKDEKVLPVAIDITVNLPDQSHVILKGISTDRIIDVRRLLCVNTATCAITNYSLTH

SEQ ID NO: 292953 - protein, 808 aa, Zea mays
  Clone ID: MRT4577_30255C.1.pep
MRPFAESTLLGSLTHGQIPNSQWIFDSPANSDVESTLAGYLLELGSDKILGIPVCAYKDGKVIIDTAAGMLGKYDPRPVQPDSLFPVGKVLILEYMDGIRLNDNDSLEAYGVDKQKLVEEITRAYAHQIYIDGFFNGDPHPGNFLVSKEPPHKPILLDFGLTKRISESMRQALAKMFLSCAEGDHVALLSAFSEMGLKLRVDMPQQAMDIATVFFRQSTTASEAKENIKTLNDQRERNVKALQEKMKLNKKEVQRFNPVDAFPGDAIIFMRVLNLLRGLSASLNVRIVYLDIMRPFAESTLLGSLTHGQIPNSQWIFDSPANSDVESKLRGYLLELGSDKILGIQVCAYKDGKVIIDTAAGMLGKYDPRPVQPDSLFPVFSVTKGITAGMVHWLVDKGKLKYEETVANIWPNFGTNGKELIKVHHLLNHTSGLHNALGDVVKNDPLLVCDWEETLNQITKSTPETEPGSAQIYHYLSFGWLCGGVIEHASGKKFQEILEEAIVRPLHIEGELYVGIPPGVESRLAALTVDTEELQKLSGIRAGADVPAALLNNIAQMASGVPAIFNTLNVRRAIIPAANGHCSARALARYYAALAAGGSVPPPHSSGAMPPLGSHVHTPKFPTAPLKKKKKGAGKKKGAGGGSMGDLKVQDISGGSSDRNGYCQLRTSDADSEAGSGSGGGGRMFGSDRILDAFMGVGEYEGMAHRDGKFGLGFRRYDDAGSGSGRLRCFGHSGMGGSTGFCDVENGFAIAVTVNKLSLGSVTRGVVRLVLEELGLPVPDEYSATGEKGPDMMLNLTTTTTTTPPQLR

SEQ ID NO: 292954 - protein, 43 aa, Zea mays
  Clone ID: MRT4577_30256C.1.pep
KVLFSLKKKKKKKKKKKKKKKKKKKKKKKKKKKKKKYSALLPL

SEQ ID NO: 292955 - protein, 55 aa, Zea mays
  Clone ID: MRT4577_30257C.1.pep
STSRMGLALISAPKYHVMLCSTAYAPAGSGNPSLHAKLFHLRPGQLVNFNSAQIM

SEQ ID NO: 292956 - protein, 50 aa, Zea mays
  Clone ID: MRT4577_30258C.1.pep
HVNNGSQDKPRIPCILSLCVLIFLSPLVILHISSYILFCSIGVSRLFVSK

SEQ ID NO: 292957 - protein, 204 aa, Zea mays
  unsure (1)..(204): unsure at all Xaa locations
  Clone ID: MRT4577_30259C.1.pep
SWSPAPATXAAGPYAMPSPVQPSSKSTKETVKNALSRWGRKVGEATRKAEDLSRNTWQHLRTAPSIAEAAVGRIAQGTKVLAEGGPPDEQLRKSYACYLSTAAGPVMGVLYLSTARVAFCSDSPLSYEASGGDRTEWTHYKVAIPLQRLRAASPSANKTKPAXXKFIQLVSVDSLEFWFMGFVNYDGAVAHLQEALSGFRNLRA

SEQ ID NO: 292958 - protein, 67 aa, Zea mays
  unsure (1)..(67): unsure at all Xaa locations
  Clone ID: MRT4577_3025C.1.pep
MGAAVICPSLRVSKGRLGSVSDYXVHHCVCPVVVVRXYPDDACGDELRTVPENEPEFHAASDAQKEN

SEQ ID NO: 292959 - protein, 122 aa, Zea mays
  Clone ID: MRT4577_30260C.1.pep
IFFVRFEGPPPFHVAVSVLGKGNLLFFIIIIPLWALCITCFAHVWWGANGSFCGLKKGGRFSPPPDCKVALVGLALRFVRNREGKIYRFCFVPKKKKKKKKKKKKKKKKKKKKTRGGDPGTP

SEQ ID NO: 292960 - protein, 52 aa, Zea mays
  unsure (1)..(52): unsure at all Xaa locations
  Clone ID: MRT4577_30261C.1.pep
SQLISWAVRTAPSIAEAAVGRIAQGTKVLAEGGHDRIFRQXFSAPPAEQGYR

SEQ ID NO: 292961 - protein, 103 aa, Zea mays
  Clone ID: MRT4577_30262C.1.pep
VHFCKRMIFHPLAIYMNHGPAYAQSFYCLQVIWQNSHKSRQGRFYPLHVCACTVKFSFWLFQGHKVNNGLGFRSQAAASLHVRFDYDINVSSRKQTRTPNQII

SEQ ID NO: 292962 - protein, 220 aa, Zea mays
  Clone ID: MRT4577_30263C.1.pep
MQRDARSWSPAPATDAAGPYAMPSPVQPSTKSTKETVKNALSRWGRKVGEATRKAEDLSRNTWQHLRTAPSIAEAAVGRIAQGTKVLAEGGHDRIFRQAFSAPPDEQLRKSYACYLSTAAGPVMGVLYLSTARVAFCSDSPLSYEASGGDRTEWTHYKVAIPLQRLRAASPSANKTKPAEKFIQLVSVDSHEFWFMGFVNYDGAVAHLQEALSGFRNLQA

SEQ ID NO: 292963 - protein, 61 aa, Zea mays
  Clone ID: MRT4577_30264C.1.pep
LIQDWFILLEERVKSTHQQRRRQTGNRHFSRPQINGEAAKASGQQPIHDRRTLGRPAERLR

SEQ ID NO: 292964 - protein, 100 aa, Zea mays
  unsure (1)..(100): unsure at all Xaa locations
  Clone ID: MRT4577_30265C.1.pep
VWSTFDKDWANDYEHPHIXRMHYPDYVDLTAASMKFARQINTCLNLIKPTGLKLYSLSRIYMLTKMTTADERTYPETLGTYDIAKCPXRYAPCIGTLRPH

SEQ ID NO: 292965 - protein, 95 aa, Zea mays
  unsure (1)..(95): unsure at all Xaa locations
  Clone ID: MRT4577_30266C.1.pep
PGPNPRADPRAPRQGXGFLVVMGSGLALGPIEPPVAHGPTTIPKLGPGCEAFAVCGGRCFWVPPPAWALDRLDVQAVYPSLCVFGAPGTKFTVDS

SEQ ID NO: 292966 - protein, 73 aa, Zea mays
  Clone ID: MRT4577_30267C.1.pep
KGVNRMYMQRSPKVQSSLLNKSCCNACSHGGCSTVFRVIITYATLALHVVVSFIIHPARMSYCFIICCLIGMM

SEQ ID NO: 292967 - protein, 67 aa, Zea mays
  Clone ID: MRT4577_30268C.1.pep
MGRMHSRGKGISSSALPYKRTPTIWLKTATTRVEEMITKAAKKGQMPSQIGVLLRDQHRIPFVKSVT

SEQ ID NO: 292968 - protein, 102 aa, Zea mays
  Clone ID: MRT4577_30269C.1.pep
MTSSSALAVAPHGLPALGRRAFCFAVVCSKKKIKTDKPYRIGGGLTDDFDANGRKGKGEGAYQFVDKYGANVDGYSPIYYEDDWAPTGDFYVSWTTGRLNWG

SEQ ID NO: 292969 - protein, 65 aa, Zea mays
  unsure (1)..(65): unsure at all Xaa locations
  Clone ID: MRT4577_3026C.1.pep
PPVPAGGFVVTGXIYCDDCRAGFETNVSQAIQGATVEMECRHFDSQQVHDKGEATTGPGGWYKME

SEQ ID NO: 292970 - protein, 149 aa, Zea mays
  Clone ID: MRT4577_30270C.1.pep
RRSHSTSSRPCRIHPVRNLGHWFLKATRLPRIIMSGRDRLPRRFVEDGRGYVDARVAEDRRGHHPGIRVVDDRRGHHEIRVVEDRRAYPAVRGIEDRRGYPEIHERPLMRVAPRSHLDVLEEEIPLHEIDFRRLMADRHALAEERMELH

SEQ ID NO: 292971 - protein, 72 aa, Zea mays
  Clone ID: MRT4577_30271C.1.pep
GVGVGFYIFFFFFFFFFFFFFFFFFFFFFFFFFFFFWGRSKIPGGGKFPSGGGGGVFFFPPVPNKWGGPCTN

SEQ ID NO: 292972 - protein, 250 aa, Zea mays
  unsure (1)..(250): unsure at all Xaa locations
  Clone ID: MRT4577_30272C.1.pep
IKVTRSVRVPFSLGSYSDYADCDVIPMEACSLLLGRPWKYDTDSLHHGRSNHYSFMFKGQKIIIHPMTPDQIIKDDLARATKTAKQHAPKPSTPVNAEIKLHAPVLLATRADFDDLHDTHLPCIALVCSSMLVSFDDAPPLDIPLAVSNLLQEYANVFPMDXPPGLPPLRGIEHQIDLIPGAXLPNRAPYRTNPDETKEIRRQVQXLLDKGYICESLSPCSVPVLLVPKKDGSWCMCVDCRAINNITIRY

SEQ ID NO: 292973 - protein, 128 aa, Zea mays
  unsure (1)..(128): unsure at all Xaa locations
  Clone ID: MRT4577_30273C.1.pep
FGSSDFRQVSFPTRPAETQGGFYEVLGGLLPTPTNARHAKHENAGTKTTTLLAKRGNIVTYTKWGRSNPYRLTLSHSYEPTDFESPNAGXPTYHKIRTATTPATTDQLTTPKRAHEVPIFDDEVRPKL

SEQ ID NO: 292974 - protein, 114 aa, Zea mays
  Clone ID: MRT4577_30274C.1.pep
QVGDSQTVGAPAIDERKNSTNLTMTFPAQLKPELRTRLARIFLELDVQDEKWRSLAPKGGVHEVFTFRSATHRQLPKWNPQILVIVKVVCVAVSSVQKYTGSLGSELRQLMRGP

SEQ ID NO: 292975 - protein, 168 aa, Zea mays
  Clone ID: MRT4577_30275C.1.pep
MAAPSARARADYDYLIKLLLIGDSGVGTSCLLLRFSDGSFTTSFITTIGIDFKIRTIELDGKRIKLQIWDTAGQERFRTITTAYYRGAMGILLVYDVTDESSFNNIRNWIRNIEQHACDNVNKVLVGNKADMDESKRAVPTAKGQALADEYGIKLFETRAKTNMNVED

SEQ ID NO: 292976 - protein, 206 aa, Zea mays
  unsure (1)..(206): unsure at all Xaa locations
  Clone ID: MRT4577_30276C.1.pep
QAFFFFFFFFFRFFLFFFFFFFFFFFFFFFFFFFFFLFFLFSFGSFTASLITTIXGFDFNIRTIXELDGKPLKLQIWDTAGQERFLTITTAYYRGAMGILLAYDVTDESSFPIIRNWIRNIEQHASHPVNKVXVGTRSDMXRAKGLFPTAKGQALADEYGIKLFETSAKTNMNVEDAFFSIAKDIKQRLSESDSKAEPQTIRINKT

SEQ ID NO: 292977 - protein, 39 aa, Zea mays
  Clone ID: MRT4577_30277C.1.pep
IFGFVTKHSNAVANKGVVVVYFALMAIFMIACGVPIYGV

SEQ ID NO: 292978 - protein, 67 aa, Zea mays
  Clone ID: MRT4577_30278C.1.pep
HSCVLTQTHGTRTRAHTCCSVDAYVCFGVMIGAAKCSPYDMQTYNLIDTQSWHTIHVYPADMDVESY

SEQ ID NO: 292979 - protein, 162 aa, Zea mays
  Clone ID: MRT4577_30279C.1.pep
MLGLPAAPPAAAAPPNPKGKGRCSAAPPPAMTGRVSLAVPAAAVSLSLFLWSSPVNAGILSGFSGLESTPGPDLPRLEFLEKWNAENQKKYTEFDNRFKKSKVLQDLLEKSRKNKEKNERMIQDKYCLRGAEWGVGDCSTEGMSDQEREDFISELKKRAGAE

SEQ ID NO: 292980 - protein, 71 aa, Zea mays
  unsure (1)..(71): unsure at all Xaa locations
  Clone ID: MRT4577_3027C.1.pep
DANLDINPVIILERSYVLYSCCRTXVNHVLSHASPLLLSRHLLSHTIPLGHHNPVRTSAIPTSYDHRDASS

SEQ ID NO: 292981 - protein, 51 aa, Zea mays
  Clone ID: MRT4577_30280C.1.pep
TCVFCRNERMIQDKYCLRGAEWGVGDCSTEGMSDQEREDFISELKKRAGAE

SEQ ID NO: 292982 - protein, 84 aa, Zea mays
  unsure (1)..(84): unsure at all Xaa locations
  Clone ID: MRT4577_30281C.1.pep
MNNFKSLKAQPHKYSHKXTNISKKSRFFLHNLKKAQTRAEFPERSVTKLEKSIDDLKNNLYAQKLKYKPITXELDHPLNNITSK

SEQ ID NO: 292983 - protein, 58 aa, Zea mays
  Clone ID: MRT4577_30282C.1.pep
ITSFYGAPILKTPGPTHGIKRQTIWSGAGPGHRETGKGGDLPNELRGRAPGGFALARG

SEQ ID NO: 292984 - protein, 65 aa, Zea mays
  Clone ID: MRT4577_30283C.1.pep
HLKGGNYFAHTEGGFLLLLGRPETVCPSRQRPYWPRAWKELSFKVLAQSYETPLSLPSLLEQAFT

SEQ ID NO: 292985 - protein, 70 aa, Zea mays
  Clone ID: MRT4577_30284C.1.pep
EDHSFTLLLRHKQVYFMTASTNGRSEHSTEKACKEASHMHASEKGFSQSQQLRRQQRNFGCKPKEKVTKA

SEQ ID NO: 292986 - protein, 96 aa, Zea mays
  Clone ID: MRT4577_30285C.1.pep
PMSLTSVSMTWILGLGWHNLDPCPGGTPLLPLLNFSPHPVMVSRLPHSPLSTLNYPIGHLLEIQFPIFSSFPISTRTSVSGNRVVRNTMYGLDNSV

SEQ ID NO: 292987 - protein, 77 aa, Zea mays
  Clone ID: MRT4577_30286C.1.pep
GIPGEKILELKKLHLIFFPRNPFPFLGVNKTQAPQKLGTQGLPEAQKLGHQRGVLPGPFVLGKGPLNGLTPTPDLDR

SEQ ID NO: 292988 - protein, 98 aa, Zea mays
  Clone ID: MRT4577_30287C.1.pep
KSFFGLKQVQGPNSPKLNLALKALSLGHSEPLGEILKPGGGTGPNPGFGPPLAGTLDLGRFRGKLGPFGKKLFLPGLDWGPLKRGGPFPGNAQGGVEL

SEQ ID NO: 292989 - protein, 64 aa, Zea mays
  unsure (1)..(64): unsure at all Xaa locations
  Clone ID: MRT4577_30288C.1.pep
SLGFCGGARAAADVEYRCFVGGLAWATSNESLENAFASYGEILYSKVVSDXXTXRSHNFTFXTF

SEQ ID NO: 292990 - protein, 210 aa, Zea mays
  Clone ID: MRT4577_30289C.1.pep
MATAYAPMASQVMKSSLVVHSRPRGLSGAAALTRRPRFTVKAIQPEKATYQVVQPINGDPFIGSLETPVTSSPLVAWYLSNLPAYRTAVSPLLRGVEVGLAHGYLLVGPFALTGPLRSTPVHGQAGALGAAGLVAILSVCLTMYGVASFNEGDPSTAPSLTLTGRKKEADKLQTSDGWAKFTGGFFFGGISGVLWAYFLLYVLDLPYFFK

SEQ ID NO: 292991 - protein, 89 aa, Zea mays
  unsure (1)..(89): unsure at all Xaa locations
  Clone ID: MRT4577_3028C.1.pep
KKPPGVPPLSGGGGPQIKTFPQKGRKSPLRGKPPXPFQSRHKTFFKKIVNPPPSKKTQPPPVFFFGPRTLKPFKGGPRKVLALLKGGLF

SEQ ID NO: 292992 - protein, 211 aa, Zea mays
  Clone ID: MRT4577_30290C.1.pep
MATAYAPMASQVMKSSLVVHSRPRGLSGAAALTRRPGRFTVKAIQPEKATYQVVQPINGDPFIGSLHTPVTSSPLVAWNLSNLSAYRTAVSPLLRGVEVGLAHGYLLVGPFALTGPLRSTPVHGQAGALGAAGLVAILSVCLTMYGVASFNEGDPSTAPSLTLTGRKKEADKLQTSDGWAKFTGGFFFGGISGVLWAYFLLYVLDLPYFFK

SEQ ID NO: 292993 - protein, 142 aa, Zea mays
  unsure (1)..(142): unsure at all Xaa locations
  Clone ID: MRT4577_30291C.1.pep
SATKAXXXPQGXXXXRAXXPHFXPAGGGXGXEHPXGQAXRPQQAXAASGQQQPXAQXQQQXRAQXTXQTNGTQQPQQXPPAXSQQAAXNPDPHXQQQTXAANPQXPANRERNQQQQPXPQXTPAPXQQAKENXAPHRQQPQP

SEQ ID NO: 292994 - protein, 113 aa, Zea mays
  Clone ID: MRT4577_30292C.1.pep
FSPGIPPLPPLGLYFCQNNPGRPMFSLPNNPVKNKRGRWEPIKKGLSNLNINQWPPLTPPGGQAVFDSFPGVAPCPQRPPPFTRGGPTPPSVPWGWAPPPPRAGKALMAPPGV

SEQ ID NO: 292995 - protein, 421 aa, Zea mays
  Clone ID: MRT4577_30293C.1.pep
MPARARWRLLALPLALLLVAGSAHGLVKPEAAAAPKPPVPKAISDLRDAIVKGLGFQAEGLKVSGFDVRDALVGHAVAYEFDIEVGRKVLPVRLLEDVSRWDFVDLPIFRSQADADDTALAEIRRTGTGSIVEPTLPPFQLAGPMELWIQNGDDVRLALPHDVDAGTLKKVVLSDGAVVTVKGARAVSLRLPLELPLPLNRTTYKGRLSSLISIAQALRGAARSNQKPLLSLRVEGPVSLSSTPSMSPKDKLKLKRLAPGQVELSSQAGAIPAITEDEDEPHNPGLWPLLSLNGSDGSLQGFEELLASVLGKKAGEKGTFKLLKARASAQTYVKMAFTVEKKLAEGDVNWSNIPEWKTKPKRMRAHYEVLARVEEGQAIPERIAQVQPFQANEAMSESVLTGNVTRSKMEIVHPPPVYFTL

SEQ ID NO: 292996 - protein, 210 aa, Zea mays
  Clone ID: MRT4577_30294C.1.pep
MATAYAPMASQVMKSSLVVHSRPRGLSGAAALTRRPRFTVKAIQPEKATYQVVQPINGDPFIGSLETPVTSSPLVAWYLSNLPAYRTAVSPLLRGVEVGLAHGYLLVGPFALTGPLRSTPVHGQAGALGAAGLVAILSVCLTMYGVASFNEGDPSTAPSLTLTGRKKEADKLQTADGWAKFTGGFFFGGISGVLWAYFLLYVLDLPYFFK

SEQ ID NO: 292997 - protein, 184 aa, Zea mays
  Clone ID: MRT4577_30295C.1.pep
ARPWSFPVARFSVLCAQSRARRRAPDLAMERPHPPSPWSSPDRLQTHAHGSSPPQSTPRSSARPPLQFPQPSSHLPVAMPSRLQLWPRPAYLPQRSRLSLSPLVPAMAGRVFPQPQTLPARLLAPPMASISVVAALCSGDFYAQPSFSVYSQRARLLPLPGLRSSLTTLAHALLWSLVVLLPQQ

SEQ ID NO: 292998 - protein, 81 aa, Zea mays
  Clone ID: MRT4577_30296C.1.pep
LLLIASRERRSTSPRARPNHCTRETGDQPRQAVELGRHGALERCGSISSLLESSWLAVSVFPSLSLCSPFQFAYSPKTFLL

SEQ ID NO: 292999 - protein, 176 aa, Zea mays
  Clone ID: MRT4577_30297C.1.pep
MPARARWRLLALPLALLLVAGSAHGLVKPEAAAAPKPPVPKAISHDVDAGTLKKVVLSDGAVVTVKGARAVSLRLPLELPLPLNRTTYKGRLSSLISIAQALRGAARSNQKPLLSLRVEGPVSLSSTPSMSPKDKLKLKRLAPGQVELSSQAEAIPAITEDEDEPHNPGLWPLLSL

SEQ ID NO: 293000 - protein, 463 aa, Zea mays
  unsure (1)..(463): unsure at all Xaa locations
  Clone ID: MRT4577_30298C.1.pep
MPARARWRLLALPLALLLVAGSAHGLVKPEAAAAPKPPVPKAISXAPDLKRNSSRVVIPLSPRSDRIRSDWVMDXCDSGCGGXDLRDAIVKGLGFQAEGLKVSGFDVRDALVGHAVAYEFDIEVGRKVLPVRLLEDVSRWDFVDLPIFRSQADADDTALAEIRRTGTGSNXVEPTLPPFQLAGPMELWIQNGDDVRLALPHDVDAGTLKKVVLSDGAVVTVKGARAVSLRLPXSLSSTPRLELPXXPLNRTTYKGRLSSLISIAQALRGAARSNQKPLLSLRVEGXSMSPKDKLKLKRLAPGQVELSSQAGAIPAITEDEDEPHNPGLWPLLSLNGSDGSLQGFEELLASGRGKKAGEKGTFKLLKARASAQTYVKMAFTVEKKLAEGEVNWSNIPEWKTKPKRMRAHYEVLARVEEGQAIPERIAQVQPFQANEAMSESVLTGNVTRSKMEIVHPPPVYFTL

SEQ ID NO: 293001 - protein, 138 aa, Zea mays
  Clone ID: MRT4577_30299C.1.pep
MFTTTKSKLWCLISLQHDVDAGTLKKVVLSDGAVVTVKGARAVSLRLPLELPLPLNRTTYKGRLSSLISIAQALRGAARSNQKPLLSLRVEGPVSLSSTPSMSPKDKLKLKRLGPGQVELYSQAGAILAITEDEDEPH

SEQ ID NO: 293002 - protein, 69 aa, Zea mays
  unsure (1)..(69): unsure at all Xaa locations
  Clone ID: MRT4577_3029C.1.pep
CGVILKRRSLFLNYETEYPVLLSTLSFFFSFDFFYFMGSGSIYIIYMLPYAXXXMGISIKWVGGGGSPS

SEQ ID NO: 293003 - protein, 270 aa, Zea mays
  Clone ID: MRT4577_302C.1.pep
MKLVVEISDAADLAPKDGTASCNPYVEVDFDDQRQRTATKPADRSPYWNQTLVFDVRDPARFPSLPIDVSVFHDRRLQDHNALRPQTFLGRVRINGASVAPSPQEAVLQRYPLEKRSFFSRVSGDIAIRIYLVGDDVNNESVQVPAPPNHHHHPQQQQQQQESVAAAAATGDPERMVRSAFAPQQPSAVEQPAAAGNGGDEHEARPPRIFRSVPAAEPRRATLHAVAAPPPPPGQTVVMPKPAASAPPGPLRPGRDQAASAGQDGPARGR

SEQ ID NO: 293004 - protein, 48 aa, Zea mays
  Clone ID: MRT4577_30300C.1.pep
LLEAHIFSQPSSLAIVYKPYSYFISHRHLITLIFPYNNSTIYITCLSY

SEQ ID NO: 293005 - protein, 608 aa, Zea mays
  Clone ID: MRT4577_30301C.1.pep
MPAKVPFREPTPSNSSISRGGHFLGSSPNNPLPPARNGDPSFQGLHDDDRRPQNGDRRFHGHQKRNDMNSVRGHGHGWNSQPNWPSPVSNGFVPIQHGGAPGFHPPVHQFPGPPMFNLRPQMKLNQPGVSYPMHDAVDRFSTHMRPFGWPNHLDESCPPHMQVWNGGSGVFPGEPYIYGRQEWDQNRPHAGSRGWELTGDVSKGPNDVPDAELLVAKKDPDSAITAVSDSGGQHNLQPEADQKEIGRLTAENFEAKNHSKSSKSLESLQGVQHVTSMLTKNGAVFCKDYLARINVSHDLVESELYKRCISLLGDLGVTKASHLVRNEIQDNGNIGKMSTKYGNLNPFSSRYLKSDNTIFQRALALHKNQTRKGLTTASASVKMEEKMAVPEDDHDMELLEPVVSNPAPQRHTDVMEEGSVSKHELGDGIGRTIAATIGSGVLDAPPEISLPQPEVVVATTVITQPNKHMEDVLPPAIEDGALQATLEHAVGIPEVTPADVLLDVAPSAVGESGDDMEIIPSAMAEPQLGKEPAPVASPDSQEKPFMLDSETGMEVEVKVIDDNPGDGRVSSILGTKLDFAAIDGDSEALLVESRVNLSRIPNSPESTH

SEQ ID NO: 293006 - protein, 105 aa, Zea mays
  Clone ID: MRT4577_30302C.1.pep
GHNSIAWVLKGGSSLQVPTKTGKIPRDILVKTNAKKMGEGTHKTNWGKTGANNIFFPKGATTKAFIAPGAKTRPNKFNTRGGWRATFGVPFLKPLTFRPRVFLSG

SEQ ID NO: 293007 - protein, 55 aa, Zea mays
  Clone ID: MRT4577_30303C.1.pep
VLFRVLLCWLWLGRLLLALCVVTPGFGLPDLMWYLFVYQPACPVFCWSVVVGEAL

SEQ ID NO: 293008 - protein, 45 aa, Zea mays
  Clone ID: MRT4577_30304C.1.pep
DNSSNILTILPTSNRYTVNSFNSFANSLDRHIFTLQKIGDKDTTN

SEQ ID NO: 293009 - protein, 85 aa, Zea mays
  Clone ID: MRT4577_30305C.1.pep
QVAQLTEQLIVTTPQKRAFIEVPKELRMFPKWKVPWVPVVKNRCNFEADGNRNYPFGQGPGHQVLNNFGKLHLFDLPKRQTLSAS

SEQ ID NO: 293010 - protein, 116 aa, Zea mays
  unsure (1)..(116): unsure at all Xaa locations
  Clone ID: MRT4577_30306C.1.pep
EAKEIALEYFEVRFKQYDQKVYIELYFDSSPKVPAVENVMVXFPPSSKEINKNYLGPAPLEEMTRRIYLAGGPCGPGKEYVFELEHALHKLXVVDLHVQDXLTNAGREYSDAQLIK

SEQ ID NO: 293011 - protein, 97 aa, Zea mays
  Clone ID: MRT4577_30307C.1.pep
VDPSPIIKYKQIFSYTPLFLANAPKYFHKKFFPQIVPPLYHPVVANPVAAFPHLVPFNPQILFHSFGSSPQHHRFLFPLAGGYPLVVPFLRHQPFLP

SEQ ID NO: 293012 - protein, 50 aa, Zea mays
  Clone ID: MRT4577_30308C.1.pep
VCSLFRMGSRRVCSIRASIRQRRLEDLGWDLRKSRHLSSTILDLLMSSYM

SEQ ID NO: 293013 - protein, 52 aa, Zea mays
  Clone ID: MRT4577_30309C.1.pep
LKYLLLQCTLLYEFHSSLVFCYFFVLRLLIAHSYLYLSIYFIFCSFYLILFV

SEQ ID NO: 293014 - protein, 122 aa, Zea mays
  unsure (1)..(122): unsure at all Xaa locations
  Clone ID: MRT4577_3030C.1.pep
PPPPPPPPPPTPPPPPPPAPPPPPPPXTPPPPAPTHPPPPRPPPPPPPPPPPPPRPPPPPPPPPPRPPPAPPHTPPPPPPPPTRPPPPPPXRXPXXEKNPPPPTQGRREQTIRWKFLLWRPD

SEQ ID NO: 293015 - protein, 201 aa, Zea mays
  Clone ID: MRT4577_30310C.1.pep
MMDGRGDDNADFFSDFMVLRPDKGGVRSLLHLLCSCEVADNDAVDCPAGTEVAERWRRWAIFVSLAAQMLLLAVKRPLAALGSAVEYWMNLLTDNGGGVVGLVRNAVRGKVRTPDRRSSNYRSFIGLIDTRIELDRKIAAGDSTYNAALGIMAAKLAYENKLVIKTVVESHWQMTFLEFFNCWNEFSGAYTTQAFMLADRP

SEQ ID NO: 293016 - protein, 134 aa, Zea mays
  unsure (1)..(134): unsure at all Xaa locations
  Clone ID: MRT4577_30311C.1.pep
MSEERSRRAAFSAHIGQAGIQCAIARWELYWLEHGXQPDGQXPGDKTALHHDDAFSTFFTQTGAEKHVPRAXFDDLEPTVINDARTGTYRPVLHPXAAMSGXEAAAHNGRRSHYTIGQEIVDLRLDRIHKPADS

SEQ ID NO: 293017 - protein, 86 aa, Zea mays
  Clone ID: MRT4577_30312C.1.pep
PTSAGTQRYRCPRWPTLCPDIIGPMKARFSAPLTIRARLLYGIERLTDCCGRFTTEITHSRFTGVRYQRIDKGRPALKHTCMYKQV

SEQ ID NO: 293018 - protein, 50 aa, Zea mays
  Clone ID: MRT4577_30313C.1.pep
KKNKNKKKNFFIKNKKIKKKEIKKKPLFNIEDLSFIYSYMQLKCLYFGVP

SEQ ID NO: 293019 - protein, 191 aa, Zea mays
  Clone ID: MRT4577_30314C.1.pep
MATIATMALLKPAAKAAARSAPSTSSGSVSLRVRTGQAAKKAALSVSASSTLAGAFLAALASSPDAALADVAAADAGGDSRGQLLLVVVAPAIGWVLYNILQPALNQLNRMRSSQAVAAGLGLGAAAAAGMAAPPEASAAVVQDLAAIAAAAPADDSRGLLLLIVVAPAIGWVLFNILQPALNQLNRMRSD

SEQ ID NO: 293020 - protein, 74 aa, Zea mays
  Clone ID: MRT4577_30315C.1.pep
DVRSRRSIWLCNAIVPIYVCWAQRLYGTEAPPFMDAFYEYVKQCLLRVHNILMACFFTKTLKNPRYLKKKKKKI

SEQ ID NO: 293021 - protein, 53 aa, Zea mays
  Clone ID: MRT4577_30316C.1.pep
NLISQQQFQDLSKQMPSSTGSGMSQEIYVQLTPDDKEILDYIITEADSHLHSD

SEQ ID NO: 293022 - protein, 191 aa, Zea mays; identical to SEQ ID NO: 293019
  Clone ID: MRT4577_30317C.1.pep

SEQ ID NO: 293023 - protein, 190 aa, Zea mays
  Clone ID: MRT4577_30318C.1.pep
MATIATMALLKPAAKAAARSAPSTSSGSVSLRVPGQAAKKAAVSASASSTLAGAFFAALASSPDAALADVAAADAGGDSRGQLLLVVVAPAIGWVLYNILQPALNQLNRMRSSQAVAAGLGLGAAAAAGMAAPPEASAAVVQDLAAIAAAAPADDSRGLLLLIVVAPAIGWVLFNILQPALNQLNRMRSD

SEQ ID NO: 293024 - protein, 164 aa, Zea mays
  unsure (1)..(164): unsure at all Xaa locations
  Clone ID: MRT4577_30319C.1.pep
MGALRLASFTLRPAAAAAASGGATPSGPRAASFSSGGRGLPSLRLGPPRRRRGDLARPRAAGEAAAESYASALSEVGGXNGTLXQTGSDLEKRGKIFSDEARAEFFDNPTVPREEKAELIGEIAKASELQPHVVNFLNGGGDNFRACIVPXIGVXFENVYNSLT

SEQ ID NO: 293025 - protein, 142 aa, Zea mays
  unsure (1)..(142): unsure at all Xaa locations
  Clone ID: MRT4577_3031C.1.pep
MYSTYHCFASTKIHDAAPHDDHSRHMELDNGALSARIHHDMDEIHYNCLLCPTEDEEXDKHEDHXWVGVKHKLLWXPCAATSSHFILIILCIIIANAIPHNKTDSPAADQYNNAVNNALLFFNAHKSEHLPKNICHREWHEL

SEQ ID NO: 293026 - protein, 111 aa, Zea mays
  Clone ID: MRT4577_30320C.1.pep
MATIATMALLKPAAKAAARPAPSTSSGSVSLRVPGQAAKKAAVSASASSTLAGAFFAALASSPDAALADVAAADAGGDSRGQLLLVVVAPAIGWVLYNILQPALNQLNRMR

SEQ ID NO: 293027 - protein, 84 aa, Zea mays
  Clone ID: MRT4577_30321C.1.pep
PAGPGSPPRLACHCQQVPPPSLLCSRNASTRPAACHSCHGDHSHDGAAEARGLLLLIVVAPAIGWVLFNILQPALNQLNRMRSD

SEQ ID NO: 293028 - protein, 157 aa, Zea mays
  Clone ID: MRT4577_30322C.1.pep
MATIATMALLKPAAKAAARSAPSTSSGSVSLRVPGQAAKKAAVSASASSTLAGAFFAALASSPDAALADVVAAADVGGDSRGQLLLVSEAPAIYWLLHSMLFETLAHPFTKRGLLLRFLLLGGGSLLAYVSASASPDLLPIKKGPQEPPQAGPRGKI

SEQ ID NO: 293029 - protein, 76 aa, Zea mays
  unsure (1)..(76): unsure at all Xaa locations
  Clone ID: MRT4577_30323C.1.pep
MLLSIAEPISYVEVNGASIFPLMWGLMGDPXGLLMQDSQAWVSANFLMVLYLQPRIEKLICRRPVKSISFSKRSGV

SEQ ID NO: 293030 - protein, 121 aa, Zea mays
  Clone ID: MRT4577_30324C.1.pep
MATIATMALLKPAAKAAARPAPSTSSGSVSLRVPGQAAKKAAVSASASSTLAGAFFAALASSPDAALADAVVQDLAAIAAAAPADDSRGLLLLIVVAPAIGWVLFNILQPALNQLNRMRSD

SEQ ID NO: 293031 - protein, 35 aa, Zea mays
  Clone ID: MRT4577_30325C.1.pep
NKTPFPVHTQFLNTIIANIKPIFTTRTFTVLTKIL

SEQ ID NO: 293032 - protein, 57 aa, Zea mays
  Clone ID: MRT4577_30326C.1.pep
MAFTASDICKIIFAVLLPPLGVFLERGCGGDLCINILLTILGYIPGIIHALYIILKY

SEQ ID NO: 293033 - protein, 111 aa, Zea mays
  Clone ID: MRT4577_30327C.1.pep
TSAPLFFSENFYFPNYQALICWLKRTNSGGTTKGAPRRIVSNKKKDPGYMGPPSFFLGPGTVAPLKTQRDSLARCSNMPLNSKGRRRLPSYGGGDQLFSPPSLKGSYRGGT

SEQ ID NO: 293034 - protein, 128 aa, Zea mays
  Clone ID: MRT4577_30328C.1.pep
HDVFIFNIDSAYSHALCAPLAQMPSISMPATASRRAQKFSTLIVFGFRKCRITNTLAMDSKSERTAARPLGNSGLEVSSRSAASSSLAESSYWPESSRSLKISSKKSAHRRAFLISSALQVAAAPDEV

SEQ ID NO: 293035 - protein, 43 aa, Zea mays
  Clone ID: MRT4577_30329C.1.pep
DKNPHIQFDLILDKELDCRTHQKLVIENQTQSYVWNLVNRERS

SEQ ID NO: 293036 - protein, 133 aa, Zea mays
  Clone ID: MRT4577_3032C.1.pep
SSKSSSPPKGESNSSPSPPSKSSLSPPPPPKKSGSTSSSKDGKTKKSSSSSSSSDNTAAVITGVVLGVVGFALLLSIVACVCCAKKKKKRPPPMNMPFYTDEKGNVYYPNAGLPPMWQQYGSNGSIPPPGWHH

SEQ ID NO: 293037 - protein, 92 aa, Zea mays
  unsure (1)..(92): unsure at all Xaa locations
  Clone ID: MRT4577_30330C.1.pep
QQRCFLFKRGAPPQHTHQLMMSSRLVGPRRPLLAAKRRGGALPTTRGRRKTTKEVVVYXWRAEATNSTTPMKFFNIGLLETCSGGSFFPDYS

SEQ ID NO: 293038 - protein, 45 aa, Zea mays
  Clone ID: MRT4577_30331C.1.pep
DYVSTCKYDKESPDMEYMSTAAQPTVVLGMAPHKKAAPEFIKTTS

SEQ ID NO: 293039 - protein, 312 aa, Zea mays
  unsure (1)..(312): unsure at all Xaa locations
  Clone ID: MRT4577_30332C.1.pep
MARNEEKAQSMLNRFITMKQEEKRKPRERRPYLASECRDLADADRWRGEILREIGVKVAEIQNEGLGEHRLRDLNDEINKLLRERSHWERRILELGGRDYSRSSNAPLMTDLDGNIVAVPNPSGRGPGYRYFGAARKLPGXVWELFEKPPDMRKRRTRYEIHKRINAGYYGYYDDEDGVLERLEGPAEKRMREENVSEWHRVERVRREAMKGVMSGEVAAAGGRSGEAAREVLFEGVEEEVEEERKREEEKREREKGEEVGREFVAHVPLPDEKEIERMVLERKKKELLSKYASDSLLVEQEEAKEMLNVRR

SEQ ID NO: 293040 - protein, 61 aa, Zea mays
  Clone ID: MRT4577_30333C.1.pep
RSRISSWWWSLITILKKRPGPVVASALSWACWELKWRQSISTVGHCMAGTGSLQPGSLVSR

SEQ ID NO: 293041 - protein, 136 aa, Zea mays
  Clone ID: MRT4577_30334C.1.pep
LPRVGLCSSLGSPGVFALVFRVVCCLPLFLSLVFPSPSGVAVFVACGLGSSLLCFARAGRRAFCVCPFALPVPFLFRSGALVPRGFVPPAGNAGWPLCVCGLSPGVFLVLRGRGFSVGGSLPLFVWVPSCGRLVVF

SEQ ID NO: 293042 - protein, 72 aa, Zea mays
  unsure (1)..(72): unsure at all Xaa locations
  Clone ID: MRT4577_30335C.1.pep
PISAAXTLQTTAPTKKIKPSRSDRPDHAAGSTARRVGGSGRIRPGSGQCRGDLRRGGRAGSAAVRGWDGIRG

SEQ ID NO: 293043 - protein, 61 aa, Zea mays
  Clone ID: MRT4577_30336C.1.pep
GLSYQATSKAGAPPIPTQAAATGCLRISNLRTQLPISDQVLMAVLMLQLVQANVLQSSTCH

SEQ ID NO: 293044 - protein, 148 aa, Zea mays
  unsure (1)..(148): unsure at all Xaa locations
  Clone ID: MRT4577_30337C.1.pep
AAGAVARWRCRSAARPRPRAGTYTRASGSRTAAGGRACAEGLSRPRPPACAEPPKGPRAARRCCPHRRRAAWTPGSRAGRAPAPAMLVQPRSCRGPTXPPSCDGLPVCAEPPRGWRPLTCAARTPAGAPRAQAAGAGARRARRRPHAS

SEQ ID NO: 293045 - protein, 101 aa, Zea mays
  unsure (1)..(101): unsure at all Xaa locations
  Clone ID: MRT4577_30338C.1.pep
MAARGFCFLMLLGLSASVATATIFPQCSQAPIASFLLPYLSPAVCSRRNNPIVXPKRTNKAIXTSILPLSRWFLQQHASLLTELPLVHLGAQKIKAQQLQQ

SEQ ID NO: 293046 - protein, 89 aa, Zea mays
  Clone ID: MRT4577_30339C.1.pep
LLPVSLLNVLPTPAPNAQTASRRALGDSRFLLAPLVSRLPSGQWALRASRELVSLFTLSQASALYRLPAPQVRVVFLTGNTILPLAPEL

SEQ ID NO: 293047 - protein, 93 aa, Zea mays
  Clone ID: MRT4577_3033C.1.pep
EFGTAVFSTYPPVSVSGTGTLLLKVVRAFPGSMAWVTYFSAVAPGMSLVEKQWLVHGAHTSALQRLVLGPRLEAFSLPLLTLKKQGHLVSLNL

SEQ ID NO: 293048 - protein, 87 aa, Zea mays
  unsure (1)..(87): unsure at all Xaa locations
  Clone ID: MRT4577_30340C.1.pep
FSTLFLQFFCILYKFXYFLSFFFXFIYIFLIFYFIFFRCFFYLFIFFFYIYIFYFLLYLYYFFYFFSLILFFMLYYFILFYFIFLFF

SEQ ID NO: 293049 - protein, 95 aa, Zea mays
  Clone ID: MRT4577_30341C.1.pep
ALTTDHQHRPSARTTTARGGLHYVPCTERPSPHWVAPPRASTSCRPSKRRDHLRAYLHIGFSMTTSTSPILIWTTKKSIGTFVLQRSKNSRFGPS

SEQ ID NO: 293050 - protein, 82 aa, Zea mays
  Clone ID: MRT4577_30342C.1.pep
KKKKKKRKKPKNEKKTKGKIMKNIQKTEKKIGLCLWQGTTLRVIMWAKFHIHLGRAVYTLHFNGDQFGPYSGWSLPLNWAGF

SEQ ID NO: 293051 - protein, 50 aa, Zea mays
  unsure (1)..(50): unsure at all Xaa locations
  Clone ID: MRT4577_30343C.1.pep
KQSGAPQAGSSLAALXQNSPVHLKLVQVWLHLXIQLWSKTCSKLLIVMSA

SEQ ID NO: 293052 - protein, 177 aa, Zea mays
  Clone ID: MRT4577_30344C.1.pep
DQHDVIGGLVSETPGCISSIAWRIIGSNTLKVKVGGCALLVCAAKEHCQKQIEVLNDASLYIQLIHSLIDMIHMANTPAENVSSESISDIRISRHSKENYSDGETVCRTAVISGNMIPLWLLAVFSRHDSKTRAELLEAGAVEMLTEKISQNAFQYVVCESSTYFHYLLLLSSFDEC

SEQ ID NO: 293053 - protein, 159 aa, Zea mays
  unsure (1)..(159): unsure at all Xaa locations
  Clone ID: MRT4577_30345C.1.pep
MAALTQSAIDVVLGQLSKVVKDEVQLIGGVHRDMKFIKDEMDSMNGFLTHLNKMESEHDDQVRAWMKQVRETAYVAEDCVERYVRDMERXRQPGRVRGLRGHXLLALSKPKTFWELHQLGKQITELRTRVHDVGERRVRYDVKVPDKRNRMLVRNEAAS

SEQ ID NO: 293054 - protein, 39 aa, Zea mays
  Clone ID: MRT4577_30346C.1.pep
NALVIVSNTHWSYECSRITPFCGHDRSNAVCFSGLPSVC

SEQ ID NO: 293055 - protein, 81 aa, Zea mays
  Clone ID: MRT4577_30347C.1.pep
PEHDARRSAEISDTASIENCIVRWHQQSLSRDENVYMAELAEQAGMYEQMDEFMDNVQRTVESEEVTVDERNLLSDGYKNV

SEQ ID NO: 293056 - protein, 218 aa, Zea mays
  Clone ID: MRT4577_30348C.1.pep
PRGRPGRDPLYHSPHWPIVFVSTQNFFSPRASNLLPVCISVILLPSGAFDFFFPSISKSFANLQASISLPFARDVSCAFILIPVLQNLLSAIVSSTMLKMNVSLIVVVSLIATAMASPAPASRMTMKVRDSNSVRSFDRASRRSIMSARGDYGPPAPSPSFSGQPSPVNKAPGGSSDYKPDNGSSPTSPYGTAQDATSKSPDTEDTPDGSTDTKSDYG

SEQ ID NO: 293057 - protein, 114 aa, Zea mays
  Clone ID: MRT4577_30349C.1.pep
YKTLGTYGLWDPLFAKPLKRGLDTCQPIHGSYHFFHSYEAGSYARFSDLVCDVAYVTCANDTTILTPTAAYIHPPSFMYDATPPTRAGRKATMGLTYMSYYDAGQLCAPEGSET

SEQ ID NO: 293058 - protein, 139 aa, Zea mays
  unsure (1)..(139): unsure at all Xaa locations
  Clone ID: MRT4577_3034C.1.pep
AGYIRMERNENASTVKWGVRMMAGYPTKKGANPTRPLTSATTPTGGRDNVCEENFSCSVGNTWYXAYGYKNSCLVCGCCQIXGATWGKDHANXCPPSYPVCNXGAGTWXGSKNNPLSVKXLKRTLPKLSTXHEALDLGL

SEQ ID NO: 293059 - protein, 109 aa, Zea mays
  Clone ID: MRT4577_30350C.1.pep
LSVRPVKNKLLGVWFLQPVYPWGNFPKVPARPLPKGGEKALKARPRLGGRPTQKQTPKGFGSGPPPPGGNSPGYNVSRVCPAPAVTPFNCGTTPPPVKGGPGPLPKTGC

SEQ ID NO: 293060 - protein, 51 aa, Zea mays
  unsure (1)..(51): unsure at all Xaa locations
  Clone ID: MRT4577_30351C.1.pep
THLLMDIGIMAMPKGRXRDEKEWTELFPKAGFSESKILKEFGARVAFEVYP

SEQ ID NO: 293061 - protein, 27 aa, Zea mays
  Clone ID: MRT4577_30352C.1.pep
RLLWEWLLIYFSLVNKMFELDRLYDEC

SEQ ID NO: 293062 - protein, 228 aa, Zea mays
  Clone ID: MRT4577_30353C.1.pep
MAPAESGEKATSFAMACSLLSRYVRQNGAAAADLGLAIRAESDAKRTSTDMEKGETGKETMDLFPQIAGFGSEAATKEAPDAREPEKRQLTIFYGGKVLVFDDFPAEKAKDLMQMASKGSSVAQNPGLLPPSTAATVTDSTKIAAVPAAPIAVANAQKSAADIPQAPKASLRRFLEKRKDRLTAKAPYPGSPSDVTPVKKEMSDGQPWLGLGPQIANPDLSLSKEASQ

SEQ ID NO: 293063 - protein, 77 aa, Zea mays
  Clone ID: MRT4577_30354C.1.pep
EILIKKTKKKKKKKKKKKKKKKKKKKKKKKKKKKKKKKKKKKKKGGPRFKRTQFFFPHSHFYSFFLGPLKLIQWAGF

SEQ ID NO: 293064 - protein, 65 aa, Zea mays
  Clone ID: MRT4577_30355C.1.pep
RYSSSRRIYLICNIHCFSLTAKAPYPGSPSDVTPVKKEMSDGQPWLGLGPQIANPDLSLSKEASQ

SEQ ID NO: 293065 - protein, 176 aa, Zea mays
  Clone ID: MRT4577_30356C.1.pep
PTRPPTRLSIRPPTRPAPPRDTLRKPGVLQCSAKEKVLDPKKAQNIAILLRALNVTPEEVSDALLDGNTECLGADLLETLVKMAPTKEEELKLRNFTGDSSKLGSAERFLKAVLDIPFSFKRVDAMLYRANFESEINYLRKSFETLEGACDDLKSSRLFLKLLEAVLRTGNRMNVG

SEQ ID NO: 293066 - protein, 87 aa, Zea mays
  unsure (1)..(87): unsure at all Xaa locations
  Clone ID: MRT4577_30357C.1.pep
PEPIPGDWNGAGAHTNYSTESMRKEGGYEVIKAAIEKLKLRHKEHIAAYGEGNERRLTGRHETXPASNMDPYVVTSMIAETTIVWKP

SEQ ID NO: 293067 - protein, 129 aa, Zea mays
  Clone ID: MRT4577_30358C.1.pep
SKLNQVSCRFGGFRFCLRSCGGDLRPAATMAPAESGENATSFAMACSLLSRYVRQNGAAFQLNPLAIRAEWTWKRGRRGRRPWISSPRSLDSAPRLPRRKPLMRGIPLCSVWGFSSQPFSCHVSMVLLL

SEQ ID NO: 293068 - protein, 274 aa, Zea mays
  Clone ID: MRT4577_30359C.1.pep
LNWFEPQVMCDCYTPAGEPIPTNKRYSAAKIFSSPEVAAEEPWYGIEQEYTLLQKDTNWPLGWPIGGFPGPQGPYYCGIGAEKSFGRDIVDAHYKACLYAGINISGINGEVMPGQWEFQVGPSVGISSGDQVWVARYILERITEIAGVVVTFDPKPIPGDWNGAGAHTNYSTESMRKEGGYEVIKAAIEKLKLRHKEHIAAYGEGNERRLTGRHETADINTFSWGVANRGASVRVGRETEQNGKGYFEDRRPASNMDPYVVTSMIAETTIVWKP

SEQ ID NO: 293069 - protein, 95 aa, Zea mays
  Clone ID: MRT4577_3035C.1.pep
KATREKKIELHSRGLQNCNRPHHMCTSSLIVPTACHLTSTASRNCRRTTWTRRETSSPSSPLSWPPPSSIGGASMAPTLLSQLHWHRSTMALQCY

SEQ ID NO: 293070 - protein, 64 aa, Zea mays
  Clone ID: MRT4577_30360C.1.pep
MVKNYPTSGAEFSVAVYRARLKLRALISEKSCAPLMLRLAWDSAGTFDVGHRYRRAPWTTTHEH

SEQ ID NO: 293071 - protein, 44 aa, Zea mays
  Clone ID: MRT4577_30361C.1.pep
NGHSGQGESFKLCGIKHGRSGDYVQILHVPYEMPFPQTQMTPPG

SEQ ID NO: 293072 - protein, 82 aa, Zea mays
  Clone ID: MRT4577_30362C.1.pep
DRRVRSWAAGHVGKVLQRRQSPWSSGAPRSGDARCHRRPRWPRGWGGRKRPAMVGLRRGGGFAEEGHLKYYEAAPPKKAVEA

SEQ ID NO: 293073 - protein, 92 aa, Zea mays
  Clone ID: MRT4577_30363C.1.pep
CSSTRSTGRPWFSGRDRLSRPIATVGMCEEMTELVLTLSVSIAPGMMTNNHLRSMLLCPQEQRPNEQSSRRHRHSPAPPEEQVTRRSTPVPY

SEQ ID NO: 293074 - protein, 239 aa, Zea mays
  Clone ID: MRT4577_30364C.1.pep
MAAAAAAHVLVFPAPAQGHLNSFLHFSTGLLRAGLHVTFLHTDHNLRRLGTAAAEATVASPRLRFLSVPDGLPDDDPRTVDGLPELMESLRTKASASYRALLASLRAGGGGFPPVTCVVADGIMPFVVDVAEELGVPAISFRTVSACAVLAYLSVPKLIALGELPFPEGGDLDAPIRGVPGMESFLRRRDLPIQFRQLTSTYEEPLVKRAVGRRPPVHSWLQARALIVNTTTSPGEAIP

SEQ ID NO: 293075 - protein, 100 aa, Zea mays
  Clone ID: MRT4577_30365C.1.pep
GKTTVASSVYKNQKMRRTFGCHAWVTVSYTYQAEVLVREIMNQLIEQRACLASGFMTMSRMRLVEIIQNYLRDKKYFIVLDDVWHKDAWLVLSYAFARFK

SEQ ID NO: 293076 - protein, 122 aa, Zea mays
  unsure (1)..(122): unsure at all Xaa locations
  Clone ID: MRT4577_30366C.1.pep
KIRFESLTDKSKLDAHPELFIHIGPYGALNTLSIIYSGIGMTKSDLVNNLGTIXQFGVGFYFGYLVAERVVVTTKHYYDQQYVWEFHAGGSVTXVTRDTFGEQPCRGTKITLFLKEDQLEYL

SEQ ID NO: 293077 - protein, 101 aa, Zea mays
  Clone ID: MRT4577_30367C.1.pep
GVVRGSLFLGFNSKDGGINCGGVVPLFLPAFFLGQTSLVGCWFGPFHGLSVSGTLVFPALPVGPFGVETLFRKEWGGVLFLVRFLILGVLSVWREGGVFVC

SEQ ID NO: 293078 - protein, 166 aa, Zea mays
  Clone ID: MRT4577_30368C.1.pep
SRCHYKRNSGSTPAGTNNPPRWRACGATKPLVTRRRPLRQQRQRPPPRAAKQLQQRLPGRCCGRRALAHEGREPAIQVRGRRFGGAGGVGNLVGREAFSGCHHLNTAPAGARRPKAHRQVLAPALAGATPEHKRRPRGARRAGRPSSAAVDARKTWTWPARTRRDH

SEQ ID NO: 293079 - protein, 45 aa, Zea mays
  unsure (1)..(45): unsure at all Xaa locations
  Clone ID: MRT4577_30369C.1.pep
LADLLNISFLVIXFXYPPAINRLLHCHQDEMYPQIFNRAXQQXKL

SEQ ID NO: 293080 - protein, 97 aa, Zea mays
  Clone ID: MRT4577_3036C.1.pep
QLEVIPPVQGSLDWCVVIHTARCFNTLIMASAFYKFGYLQCKLRASGACTQPTCTVAASGGSGVHALSTMTRRNCRSRNMATTARGTTTMDVAARRR

SEQ ID NO: 293081 - protein, 235 aa, Zea mays
  Clone ID: MRT4577_30370C.1.pep
MASFAVATAPSLAAPAAKRRPAAGVTYVEGMKAYSGLKGLNKVTMLGVRKTADYSFAKVVASLSLAGRKRRGGAFGAQMRFYAYTVVTVAPRERAQRSQHNCRRTSVPIDEIHGGAPEERLLRAVCFGARREGIMAAVSSVSILPLASLRPLPLRRAARNVLEGGGRRASSPLLLARYGLWRGRPAAAVGGEAELALEDADAAMRVAADDDSITGTVVSVLLTLAFVGLSSSPSG

SEQ ID NO: 293082 - protein, 139 aa, Zea mays
  Clone ID: MRT4577_30371C.1.pep
MASFAVATAPSLAAPAAKRRPAAGVTYVEGMNAYSGLKGLNKVTMLGVRKTADYSFAKVVASLSLAGRKRSGGAFGAQMRFYAYTVGTVARHERAQRNQHNRRWTSVPIDEIHGGAPEERLLHAVCFGERREGIMAAVT

SEQ ID NO: 293083 - protein, 82 aa, Zea mays
  unsure (1)..(82): unsure at all Xaa locations
  Clone ID: MRT4577_30372C.1.pep
KLEEHNTDAYDVVVEDDEYYYDEDYEDDDELDGQEGDASGKSKYSMSEKKIRKAMLKLDMNPITVVNRXVTVKKSKNILFVI

SEQ ID NO: 293084 - protein, 207 aa, Zea mays
  Clone ID: MRT4577_30373C.1.pep
MASFAVATAPSLAAPAAKRRPAAGVTYVEGMNAYSGLKGLNKVTMLGVRKTADYSFAKVVASLSLAGRKRRGGAFGAQMRFYAYTVTAVARHERQHNRRRTSVPIDEIHGGAPEERLLRAVCFGERREGIMAAVSLVSVLPFAPLRPLPLRCAARNVLEGGRRKGLRVPCSSRGMGYGADARLLLAGGKSGVGPRRCCRDEGWLPTT

SEQ ID NO: 293085 - protein, 82 aa, Zea mays
  Clone ID: MRT4577_30374C.1.pep
ICDAQLPTNTRRIRTEPQLTCPKRGLTHMLRSLHHCALSIQDTCRARMHKKDLQPLDESLPHYCAPWGHLYSPMRPAPFYLP

SEQ ID NO: 293086 - protein, 161 aa, Zea mays
  unsure (1)..(161): unsure at all Xaa locations
  Clone ID: MRT4577_30375C.1.pep
LGTSRPARLCIAAGTSMEEHYLLRARDFSFWLSRTTDVDATLGVXLVFRGGEPGHFRGNTTYGSAARMGYCADPTWGDLCLSNCHXPSICSKVRADSLDSGTSLLAGTTAITAPVKLAMGEDGIVKSEWMENAMRYRKRILDMIVXSCDPERVVQRKGGCG

SEQ ID NO: 293087 - protein, 193 aa, Zea mays
  Clone ID: MRT4577_30376C.1.pep
MASFAVATAPSLAAPAAKRRPAAGVTYVEGMKAYSGLKGLNKVTMLGVRKTADYSFAKVVASLSLAGRKRRGGAFGAQMRFYAYTGLLATVARHERAQRNQHNRRWTSVPIDGIHGGAPEERLLRAVCFDERREGIMAAVSSVSVLPLAPLKPLPLRCAARNVLEGGGEKGFESPPPREVWAAARTPSCCCCG

SEQ ID NO: 293088 - protein, 100 aa, Zea mays
  Clone ID: MRT4577_30377C.1.pep
GRVKTDWSHAPFSASYRGFRADACVAVAGGKTRCGGGGGGGAVGTEGAGAGAPAGDWYNQELDLTLQQRMRWVQRKYMIYNYCTDPKRYPQGLPAECSMQ

SEQ ID NO: 293089 - protein, 53 aa, Zea mays
  unsure (1)..(53): unsure at all Xaa locations
  Clone ID: MRT4577_30378C.1.pep
PERVAYALQELQRAGAADAGVDDGEEGVAVGRQVXVAPAPGGVHVIRWSRRRS

SEQ ID NO: 293090 - protein, 64 aa, Zea mays
  Clone ID: MRT4577_30379C.1.pep
MDVCGPAPARARARVVGMAALHGHATKGNDFDDSTNDRLDDRPAGQWIRLAIDAESYASIIPRK

SEQ ID NO: 293091 - protein, 60 aa, Zea mays
  Clone ID: MRT4577_3037C.1.pep
IVLKEGQGIEFRDHDKNIKELERSGIKLGSLKTAGPFFFFFFSFFFFYFFLFFFLCFFFF

SEQ ID NO: 293092 - protein, 68 aa, Zea mays
  unsure (1)..(68): unsure at all Xaa locations
  Clone ID: MRT4577_30380C.1.pep
ETNXXNIVKSPNSRTQPNGSAKDILTSFXXSLRLSCKCLXYRNXXFPPMAXTSXXIXXHFLFPPIPFL

SEQ ID NO: 293093 - protein, 164 aa, Zea mays
  Clone ID: MRT4577_30381C.1.pep
AGQAAPLLRLSRHAPARVHAAAAAAAAAPAPASAQHYVGATQPRAAHGQRAHASRLGTARQQPNGSVEARPPVWGQPRQPAIRHKCGVKPRCQRIVAEDTGMAKAGAVEVLRIASTRRRVICSLVAVVIVFLQERSALVLGSRSVSERSISWRTRSIGGVKKES

SEQ ID NO: 293094 - protein, 65 aa, Zea mays
  Clone ID: MRT4577_30382C.1.pep
KKHFLFDLAKNRLHVSGDGNKGYIHGQLEETGNSRCHPGGVMQGGGHYWPFRTNIGFKTLKHPRE

SEQ ID NO: 293095 - protein, 74 aa, Zea mays
  Clone ID: MRT4577_30383C.1.pep
MNSDIVLFTLIGIHSHVTSGFSPSGITLRKCLLDDDHLGTILLCWHLFSRFFFRLIQKKNLVESPTHYIILQSS

SEQ ID NO: 293096 - protein, 78 aa, Zea mays
  Clone ID: MRT4577_30384C.1.pep
KDNFYSHYFILEICHPVQAWAECSEDQTGAKSKSDHDHRAHMVTQNTSKPLTTAQRNTNTEQFMLQSHTARLLQATAV

SEQ ID NO: 293097 - protein, 117 aa, Zea mays
  Clone ID: MRT4577_30385C.1.pep
VSKHTSSIGSELETTDPQSQGQTLEYKAHERTVYWAIKKFQGRTQHELRLKISLTQGCEDIRKEIGPLNLDFEIPMWNPSPVQIRFLRIIERGKSLNPQRWVRVITQGASYICRFAN

SEQ ID NO: 293098 - protein, 52 aa, Zea mays
  Clone ID: MRT4577_30386C.1.pep
VVIPTRYITSTKANGSQITSKAIRLICRPKNDQTVLIKLKLSANSHITHSEY

SEQ ID NO: 293099 - protein, 143 aa, Zea mays
  Clone ID: MRT4577_30387C.1.pep
LFSMAQAQSSLPPRAAPPLRPHLRREDSHSPHSSQPLLVESVAEVPEDPLKLGMVVGCGAKADAEARDSSPSDRRAWKSCIATSAPGAFLSISPVGGSHNPLMCPALPRYGSSAAVAGPLQVQAGAIRKSIPHFSFHICLLLI

SEQ ID NO: 293100 - protein, 110 aa, Zea mays
  Clone ID: MRT4577_30388C.1.pep
MAPTKKSKKSTENINNKLQLVMKSGKYTLGYKTVLKTLRSSKGKLIILANNCPPLRKSEIEYYAMLSKISVHHFHGNNVDLGTACGKYYRVCCLSILDPGDSDIITTVPQ

SEQ ID NO: 293101 - protein, 61 aa, Zea mays
  Clone ID: MRT4577_30389C.1.pep
MAIPAVVPVAAAYSCSSSLDAPPRAAVDEERAPSRAHVTAVGMCYRAFYFVGGNKCNLEAV

SEQ ID NO: 293102 - protein, 117 aa, Zea mays
  Clone ID: MRT4577_3038C.1.pep
QTQGPNVISLGIAALHMTLEATARRQARLDREQHADAFFQGKEDPKPLSKADYFFQTGFTCEKPFCSLQLCNGSSKEKEQNKHACKGIVIGGEVWVLFTTRTSCCARVGGRVRRPGN

SEQ ID NO: 293103 - protein, 59 aa, Zea mays
  Clone ID: MRT4577_30390C.1.pep
SHRLTQDLTQIQQETPWKPMLVSVLLSVPARFDTIPLTTTIHSLFTINMSRQIYDHNDS

SEQ ID NO: 293104 - protein, 73 aa, Zea mays
  Clone ID: MRT4577_30391C.1.pep
TPTHERKLRIRHNRVEPHPLSHKASDLRRLRRRFVRVEGRRQAMAATEGVLLGMGNPLLNISAVVDNAFLTKY

SEQ ID NO: 293105 - protein, 424 aa, Zea mays
  Clone ID: MRT4577_30392C.1.pep
MSSSSNGHYPANGAKILHRKEKNKEKVQLDKNSATWVCQKDRHYVEKLETELMNCYQEIDYLQDQLNIRSVEANFMGEHIHSLELKLTELEKFPERVRAMDNELIRSDSQCWLLMEEVRCKEEELQKAASQIEKLESTALDSQCEIESLKLDLTNLEQRLFDAERFSQHAGEHKAQFDKLLGEHELQLHEAQKTIHQLVWENKQLKELLPVRAPKQSPPGSGWKVNKTLENGVHAECESGDVILENMAKRNEESELLIEQLKEELREQKLKAKEDAEDLTQEMAELRYQITGMLEEEYKRRSCIEQAAIKHIQELETQVSKEKTKLSGALKRLQESHELARTQAMEIKKLKAALERLNSVTNLGTVCKSCSCGFSAMLVELSNCSIEGPSGSARSLNSNHIDEKSQNQALIEWRPREASDDEGG

SEQ ID NO: 293106 - protein, 42 aa, Zea mays
  Clone ID: MRT4577_30393C.1.pep
VVWTRQDDPRGPYPELVVPHLILLTPPTHSSGAFVGSCLTRI

SEQ ID NO: 293107 - protein, 119 aa, Zea mays
  Clone ID: MRT4577_30394C.1.pep
SFYHHWKTIIGVEVNCKRANQSHHATRAEATNHEPCCCGMDCCVDCNVFGEVIRCDVPGGMNISEVDLWKEEIGRLRLKERRKVALWDRRKVVPALHLGTGGKVKRMMHFLCVIGGHGG

SEQ ID NO: 293108 - protein, 48 aa, Zea mays
  Clone ID: MRT4577_30395C.1.pep
RSNTHWQRGILHSHVGAMRELCRHAHSTMTLHTCIHITLKSAFLQDDA

SEQ ID NO: 293109 - protein, 119 aa, Zea mays
  Clone ID: MRT4577_30396C.1.pep
PSRWTRRCCWQCEDDIQDRHHLPPGELRHHRPASPTSTTRGPSPTRPAEAVQPTSRASPSPPPTGTPPENASRTPQDPAPALRTGNSPSIPSIRGTTIHYTRTTSTKCATTNKDLHHAR

SEQ ID NO: 293110 - protein, 156 aa, Zea mays
  Clone ID: MRT4577_30397C.1.pep
LENNENVPLNENVALKVAKLQSKVHQEQPGKLKKTTNPRPFRLRTDERGVLKEAKPEKRQPFTENNSTAVLKDANRGVTKKRSTQIVTAQQLDESSSRPAVNSIQCRAVKPERVSRVASSTRRAKTASDLMAPSSRTGKKRKAATVKLSRIQTPAA

SEQ ID NO: 293111 - protein, 67 aa, Zea mays
  Clone ID: MRT4577_30398C.1.pep
RGAIAMTLNSLRIGPKACFLYPSIGREILSGYKENLTEVEYIEEEEEHNYEQAKRVDAIDECIEFMS

SEQ ID NO: 293112 - protein, 79 aa, Zea mays
  Clone ID: MRT4577_30399C.1.pep
PGKSRGVPPNVEGEMPHGFQKVGWKKVDVNFHWSFGPFLAPNNIQVKKGWLPNAGAGVFAPVGASIKQRGSGPCFPAIL

SEQ ID NO: 293113 - protein, 61 aa, Zea mays
  Clone ID: MRT4577_3039C.1.pep
CQSCRHMQQDDGPGSNFISWSNNLLFVLTLNSMSNIVKSPINEPCYLEFSIHHKVPRVTII

SEQ ID NO: 293114 - protein, 61 aa, Zea mays
  unsure (1)..(61): unsure at all Xaa locations
  Clone ID: MRT4577_303C.1.pep
SKHGVSCXFEVVRIDGTFEDFSYHKCVLGATKIIAPKKMNFYKSKYLKNGTLESGGFSENP

SEQ ID NO: 293115 - protein, 74 aa, Zea mays
  Clone ID: MRT4577_30400C.1.pep
MKAPSLLVQCFPGLLPSKATSCVPIISERDLHLPSPAVELIPSKSAHPYKYAGEKVDVQGLDVFKGKVSAADMI

SEQ ID NO: 293116 - protein, 55 aa, Zea mays
  Clone ID: MRT4577_30401C.1.pep
TYLHQHHLTQQTSGCEKRLSILELGEFIGPITSRQDERRRRRRKVAMRELFVNKA

SEQ ID NO: 293117 - protein, 95 aa, Zea mays
  Clone ID: MRT4577_30402C.1.pep
KTGRPQIAKRTIPLTKKRLFKDGWPEFYYWKLGRYVGQPARKFPTWSLPGYLVPQKLLEDPSPLGKIPLEKDKAMFKPVFKRSASWAKLDGGENF

SEQ ID NO: 293118 - protein, 150 aa, Zea mays
  unsure (1)..(150): unsure at all Xaa locations
  Clone ID: MRT4577_30403C.1.pep
RGSDHPPHGFLGLGAVFSEQTTRMASGGPSSEFLTNRAPARQSVVTTKQIFMNVXRSDEPPYKPDDCRRLDEXXDTLLYXHPREDTHIDYQPIQALTEYYCEQLPASDTHGAAILDMCSAWDIHYSPCYIQKKIVPMGMNEDELTKNFVL

SEQ ID NO: 293119 - protein, 73 aa, Zea mays
  unsure (1)..(73): unsure at all Xaa locations
  Clone ID: MRT4577_30404C.1.pep
MAAVTMAITSRALVGKPAXGTRDVFGEGRITMRKTAAKPKPAAGTRDVFGEGRITMRKTAAKPKPAAGGRLDR

SEQ ID NO: 293120 - protein, 46 aa, Zea mays
  Clone ID: MRT4577_30405C.1.pep
HKKNHPYIPKPYTSKHTSNPLLSFPLFLHHPSPSPPHSWHPQLIDP

SEQ ID NO: 293121 - protein, 52 aa, Zea mays
  Clone ID: MRT4577_30406C.1.pep
FFCNTNQKRGKGIKEYMRATKRILYCPEICTRSNTTKSSLTRIPGRLPPRRP

SEQ ID NO: 293122 - protein, 52 aa, Zea mays
  Clone ID: MRT4577_30407C.1.pep
ISTDESSVYANFLSFLVGVLRTLLRFEVSSISVRCLVYVCCVGLHYVRSAII

SEQ ID NO: 293123 - protein, 86 aa, Zea mays
  unsure (1)..(86): unsure at all Xaa locations
  Clone ID: MRT4577_30408C.1.pep
SQEARARLPTHATRPGRTIGDTDPNREQDATHGKNRSHDDAGDGNANXXAHPADXTPXXTTEXAGRGGGRQGAEKRAEKPQGKEGD

SEQ ID NO: 293124 - protein, 80 aa, Zea mays
  Clone ID: MRT4577_30409C.1.pep
LLRSPTFVLQSTGCPIPVANDPNAIAIPKRTPNTIVKKLSYITVDKQDKDPSPLFGGHQNWKQREESFKLNSTMKVTTCL

SEQ ID NO: 293125 - protein, 31 aa, Zea mays
  Clone ID: MRT4577_3040C.1.pep
LAKSRYPVPEPQLRRQLWQEVSSYMLPTYHQ

SEQ ID NO: 293126 - protein, 35 aa, Zea mays
  Clone ID: MRT4577_30410C.1.pep
CPAGVQAYPNSESYENCVLIWVLLYGHIIVPALRG

SEQ ID NO: 293127 - protein, 72 aa, Zea mays
  Clone ID: MRT4577_30411C.1.pep
KLSPSLDDVAIQLNIAFPFSVFLLFFLFITIWLSSISLFLITSQFNKRKQINTCNICKVFIIYTELEHSRVA

SEQ ID NO: 293128 - protein, 73 aa, Zea mays
  unsure (1)..(73): unsure at all Xaa locations
  Clone ID: MRT4577_30412C.1.pep
FNQYKLPKIPIWYCVFNYTKVLYYHHINRFHQNMHLPQDAYACVTRTIXHQHCFIFRGIALSRGRLGRRNPSR

SEQ ID NO: 293129 - protein, 42 aa, Zea mays
  Clone ID: MRT4577_30413C.1.pep
YTVEVELDARTLTGGCSTVSARSMVSASVARLAAARPMLGSS

SEQ ID NO: 293130 - protein, 190 aa, Zea mays
  unsure (1)..(190): unsure at all Xaa locations
  Clone ID: MRT4577_30414C.1.pep
LEAGREVVLSHTVLISVLGAGILGVKFRTXLLTSQASVLVPRKKIPPLLLLSVPGLAWATSSLADSLHQSRARHPAAVGVVVFSHRTPLALLVSVAAQKPSRPCYSSLCLHPAASAQATGRRRRVRSGRARPCLYIYQRSASYNCSPAPHRIQHRHSLKRHSLNNILLVALGIRHLTHFSLLWCVVSWSC

SEQ ID NO: 293131 - protein, 147 aa, Zea mays
  Clone ID: MRT4577_30415C.1.pep
EIFIYISRTIKPQFPTEASSNHLRRRLSSLALSSWVERAEEFQPTGSGSQWCTLGRTPALLLPVRVLPSIEPQPHLSSVAAAHWPATPPIARREPHSGEESVRRGKLIKLAVWSRRWGETVGGIGGEACTARAKREESSRGSKPRPG

SEQ ID NO: 293132 - protein, 108 aa, Zea mays
  unsure (1)..(108): unsure at all Xaa locations
  Clone ID: MRT4577_30416C.1.pep
FILITAFDTELDLRTESLPKFGKYRLXRELRSCFDLTGPRDYSSPEEMXQRLTXASSALRGVGGGXALQDCQENNGFGDLMDEDVLNNVXVRLKFSLTVWDLSLAVTP

SEQ ID NO: 293133 - protein, 147 aa, Zea mays
  unsure (1)..(147): unsure at all Xaa locations
  Clone ID: MRT4577_30417C.1.pep
PEVYPLFXATGVPVGICGFQFFRNIPGNPEVRVNKPGRALXFFLNPXEGRRFPMHGLKSFLPAKTPEFMPPVNNFFPAPNLSIFFGILLLLLASGVFTLCWQPNFLGPPLPFKSPFSAWLCLGICLMVDEFVRPCFMFIFLCHLDFP

SEQ ID NO: 293134 - protein, 38 aa, Zea mays
  Clone ID: MRT4577_30418C.1.pep
SSLTAAALTSFLWVFFYFGGFKSIYSHIIGENLIQLLA

SEQ ID NO: 293135 - protein, 54 aa, Zea mays
  Clone ID: MRT4577_30419C.1.pep
PLGVAQISLMPFIDRTLLGACEPPTASVQHITVPGCLSYVALHNLEPGMQVIAT

SEQ ID NO: 293136 - protein, 69 aa, Zea mays
  Clone ID: MRT4577_3041C.1.pep
RAAGCHGDRCLTARNCLSRDHTTQHPGLHNEGASLQVVTEGSLSHYYVVSSLLACFSKMKSVPVARAGM

SEQ ID NO: 293137 - protein, 56 aa, Zea mays
  Clone ID: MRT4577_30420C.1.pep
TLPSRTPLTRRKIITHPHDGRAPLPLSGARPLFILLLSIHYRLTHLCNRYLSLRLP

SEQ ID NO: 293138 - protein, 68 aa, Zea mays
  unsure (1)..(68): unsure at all Xaa locations
  Clone ID: MRT4577_30421C.1.pep
MTDAPXFLTCERLFKHEHYFHSSANHTYLKGRYDVITYVAIHLELCASIIVMIGGGRYNMSDGVGKKN

SEQ ID NO: 293139 - protein, 109 aa, Zea mays
  unsure (1)..(109): unsure at all Xaa locations
  Clone ID: MRT4577_30422C.1.pep
SWVGFVVVSVSVFLLLRCFLFVLCFXFLGFLGSFRWPCSSLCFCCLCFLPFLFLLFLGLSFLPCFWCAGPLSPLFCLVSPSFPVPFFXCFRPLLLACSVAWVVPGFLVL

SEQ ID NO: 293140 - protein, 83 aa, Zea mays
  unsure (1)..(83): unsure at all Xaa locations
  Clone ID: MRT4577_30423C.1.pep
CIGRTDFATMEPVWQVLHDWGKKRTWVLYAFMRHSLLVNVSHQHAHLIITTRWIIHIPPCMQAIPVCQVREAVLXTSHPEAAX

SEQ ID NO: 293141 - protein, 74 aa, Zea mays
  Clone ID: MRT4577_30424C.1.pep
FLCITGCIEATTSQNLPTDCSSNQDRNELGLNERVGSKSVNTNKKEDKRSLPNIRRQTRTSRNLQTFPSTRPSC

SEQ ID NO: 293142 - protein, 92 aa, Zea mays
  unsure (1)..(92): unsure at all Xaa locations
  Clone ID: MRT4577_30425C.1.pep
LQDLRENTEFTDHELQEWYKGFLKDCPTGHLTVDEFKKIYANFFPYGDASKFXEHVFRTFDTNGDGTIDFRELIIALSVISRGKLEQKLKWA

SEQ ID NO: 293143 - protein, 104 aa, Zea mays
  Clone ID: MRT4577_30426C.1.pep
AFGSRQTLTQSIRDRLQPYVDGKQHEFGDWASPEAPRLSQLAFGQHILPPFAYIYVRQSARQLVRTKLYMGEPFIAEWVRNKVRHVTSQVNPSAGSISLTHLLE

SEQ ID NO: 293144 - protein, 174 aa, Zea mays
  Clone ID: MRT4577_30427C.1.pep
YHQQLSLQLADFVRIPLEKAGGMMALVDVYCLFDRARGTELISPEDLLQACSLWEKVDVPVMLRKFDSGVKVIQTKTHSDEEVFARISSLAQKPDALQKGISPSDAAFTLGIAPALAKEHLLNAENKGLLCRDVSPDGFRFFSNLFNDIDPQNIHSQKPHGMYKAWISVAMASH

SEQ ID NO: 293145 - protein, 178 aa, Zea mays
  unsure (1)..(178): unsure at all Xaa locations
  Clone ID: MRT4577_30428C.1.pep
GRVGCQLADFVRIPLEKAGGMMXVGDVYCLFNRARGTELISPEDLLQACSLWEKVDVXISNEXPVMLRKFDSGVKVIQTKTHSDEEVFARISSLAQKPDALQKGISPSDAAFTLGIAPALAKEHLLNAKTXGLLCRDVSPDGFRFFSDLFNVIDPRNIHSQKPHGMYNAWISVAMASH

SEQ ID NO: 293146 - protein, 912 aa, Zea mays
  Clone ID: MRT4577_3042C.1.pep
MNPDNFTHKTNEAIVGAHEIAVEAGHAQLTPLHLAAVLAADKGGILRQAITGASGGDGAAGDSFERVLNNSLKKLPSQSPPPDSVPASTALIKVIRRAQSAQKKRGDSHLAVDQLLLGLLEDSQISDCLKEAGVSAARVRAELEKLRGGEGRRVESASGDTNFQALKTYGRDLVEQAGKLDPVIGRDEEIRRVVRILSRRTKNNPVLIGEPGVGKTAVVEGLAQRIVRGDVPSNLLDVRLIALDMGALVAGAKYRGEFEERLKAVLKEVEEAEGKVILFIDEIHLVLGAGRTEGSMDAANLFKPMLARGQLRCIGATTLEEYRKYVEKDAAFERRFQQVFVAEPSVPDTVSILRGLKEKYEGHHGVRIQDRALVVAAQLSARYIMGRHLPDKAIDLVDEACANVRVQLDSQPEEIDNLERKRIQLEVELHALEKEKDKASKARLIEVRKELDDLRDKLQPLTMKYRKEKERIDEIRKLKQRREELQFTLQEAERRMDLARVADLKYGALQEIDAAISKLESETGENLMLTETVGPEQIAEVVSRWTGIPVTRLGQNDKERLVGLADRLHQRVVGQTEAVSAVAEAVLRSRAGLGRPQQPTGSFLFLGPTGVGKTELAKALAEQLFDDENLLVRIDMSEYMEQHSVARLIGAPPGYVGHEEGGQLTEQVRRRPYSVILFDEVEKAHVAVFNTLLQVLDDGRLTDGQGRTVDFRNTVIIMTSNLGAEHLLAGMVGKNSMKVARDLVMQEVRRHFRPELLNRLDEIVIFDPLSHEQLRKVARLQMKDVAVRLAERGIALAVTDAALDIILSLSYDPVYGARPIRRWIEKRVVTQLSKMLIQEEIDENCTVYIDAAPGKDELVYRVDRSGGLVNAETGMKSDILIQVPNSSPRSDAAQAVKKMRIMEEDEDGMDEE

SEQ ID NO: 293147 - protein, 61 aa, Zea mays
  Clone ID: MRT4577_30430C.1.pep
LNAYKSDCKLATGACASRSPRPTLGRSRPKGPCHWLSPTGTRSAADPFGASFPTGGVVHPF

SEQ ID NO: 293148 - protein, 65 aa, Zea mays
  Clone ID: MRT4577_30431C.1.pep
IFYSLVIGYSFQDNIAQDSDLYNILRIVSLVGVVVSLSFAFCQGPVVSAPALVPHRLAKGAVGSL

SEQ ID NO: 293149 - protein, 54 aa, Zea mays
  Clone ID: MRT4577_30432C.1.pep
GEPYECVCGTPDYNSSSYLTSKYTLYRLPSHISNNQKPYGSPPNIFPKSRTRSS

SEQ ID NO: 293150 - protein, 40 aa, Zea mays
  Clone ID: MRT4577_30433C.1.pep
ELTKAKGLYSAGPFETRPLFVAPSSRCVHQRGQQYNTTHY

SEQ ID NO: 293151 - protein, 47 aa, Zea mays
  Clone ID: MRT4577_30434C.1.pep
GPSSGGRRDPTRRQENGKPLSPHPNKLLAVIGRGGAPHPVGGGFPRA

SEQ ID NO: 293152 - protein, 48 aa, Zea mays
  Clone ID: MRT4577_30435C.1.pep
DDHLMAIGNESNQMVLFLNLLTCSYGTKVERIEKVSHSQPLMKDSSKS

SEQ ID NO: 293153 - protein, 104 aa, Zea mays
  Clone ID: MRT4577_30436C.1.pep
SFLPHSSRGLQRRPPSLFAGGISPPSLFGGQRGVSALFFLEGWPRPPFFKGGRGSPISFCGGLVAFPLGCLGVWWPVSSGWGGCCLSVVGPFGLIGPFFGFASD

SEQ ID NO: 293154 - protein, 284 aa, Zea mays
  Clone ID: MRT4577_30437C.1.pep
MANPVEAIKAPCHVQLTCGTGWYHGLDTKVRLSIGKPRRRGVGHRLTLALAPAGHDVPGVDLGFGTSVDELRSDEEDEARGDGDGSSAAWMGTGVRKMAARRPWRGPLPPAGVSPQLTLADVLAKARTFHDHGGRGHAPGVLLAHASASSPAPSSVSAGRRTDSSFLASRPGMQDLGDRSACRAAGPGRAILICIEGRKAHFTFTDSLCSLFGNAGRPRGFTSPARAPPDGVHPLASAIQVTTPSTLEPVVVQAEFGAKTKSVVAMDRRGAGGHGRGSDRDVAS

SEQ ID NO: 293155 - protein, 356 aa, Zea mays
  Clone ID: MRT4577_30438C.1.pep
MVSLRCTTAHHSLLGSPTCLARPRRRACPVVRAAVAVEAGAQAKVSLIRIGTRGSPLALAQAHETREKLKATHSELAEERAIEIVIIKTTGDMILDKPLADIGGKGLFTKEIDDALLQGRIDIAVHSMKDVPTYLPEGTILPCNLPREDVRDAFICLTANSLAELPAGSVIGSASLRRQSQILYRYPSLKVVNFRGNVQTRLRKLKEGDVSATLLALAGLRRLNMAENATAVLSVEEMLPAVAQGAIGIACRSNDDKMMEYLSALNHEDTRLAVACEREFLAVLDGNCRTPIAAYAYRDNDGNCSFRGLLASPDGSKVFETTRSGPYSFDDMVEMGKDAGHELKAKAGPGFFDSLQ

SEQ ID NO: 293156 - protein, 49 aa, Zea mays
  unsure (1)..(49): unsure at all Xaa locations
  Clone ID: MRT4577_30439C.1.pep
IRHEASPDRALILLQQLRRRRCDYTSXESTSLCSLXDDAICETDGDITE

SEQ ID NO: 293157 - protein, 171 aa, Zea mays
  unsure (1)..(171): unsure at all Xaa locations
  Clone ID: MRT4577_3043C.1.pep
PGLPKKVETPPPPLENDNPLVPPRNKEGRSYPPFPVFAQKSCPPETFPAKGPGPPPRNPKKGLWPSTRANPLTPXLRPQKRERGPPPPFFXKLNAPPFSPPKKKNQNITGPNNVLKXFFSPPQTKKALLIPPPPFFLITKKNFFESFWVSPTWTPRGGTGGFFAFPPPETF

SEQ ID NO: 293158 - protein, 62 aa, Zea mays
  Clone ID: MRT4577_30440C.1.pep
WTLGLYLFCIFFFFFFFFFFFPRGRPSFRGPRGPPRNYRTVPGGPTNFPIGRGIKPMVKLWA

SEQ ID NO: 293159 - protein, 87 aa, Zea mays
  Clone ID: MRT4577_30441C.1.pep
SVRCLIPSLSHLMTMPASSPSVGSACDPPPPPPPPPPRAMKRELAFALQSLSEISASHGRTRSGRPISSLPDPSASASLKRRKRNLT

SEQ ID NO: 293160 - protein, 312 aa, Zea mays
  unsure (1)..(312): unsure at all Xaa locations
  Clone ID: MRT4577_30442C.1.pep
EILSLALPPGIPLALAQAHETREKLKATHSELAEEGAIEIVIIKTTGDMILDKPLADIGGKGLFTKEIDDALLPGKNEFAVHSMKDGSNITTXSTILPCDLPREDVRDAFICLTANSLAELPAGSVIGSASLRRQSQILYRYPSLKVVNFRGNVQTRLRKLKEGDVSATLLALAGLRRLNMAENATAVLSVEEMLPAVAQGAIGIPCRSNDDKMMEYLSALNHEDTTLAVACEREFXAVLDGNCRTPIAAYAYRDNDGNCSFRGLLSSPDGSKVFETTRSGPYSFDDMVEMGKDAGHELKAKAGPGFFDSLQ

SEQ ID NO: 293161 - protein, 92 aa, Zea mays
  unsure (1)..(92): unsure at all Xaa locations
  Clone ID: MRT4577_30443C.1.pep
LXFFFFFXXSKVDKPINFFSKSLFFKILSPTNGLFTVRLIHVPSIRMTRVKFITRYTPYLFRSIHFHWPPLGTPVFPSRSFKPTTFSLKGFD

SEQ ID NO: 293162 - protein, 119 aa, Zea mays
  unsure (1)..(119): unsure at all Xaa locations
  Clone ID: MRT4577_30444C.1.pep
RHFALXQSLKKYLYNHAAFTKGILVSFCQESFYTLPEAVIIGSKIQIVSIPFLHASVDLVKLPEMENCGTTSCFIKLFLDKKYALPCRALYAVLALIMRFVDDDRIMPVKWHQSLLAFV

SEQ ID NO: 293163 - protein, 125 aa, Zea mays
  Clone ID: MRT4577_30445C.1.pep
MTAHQTCCDDAVAAGTAPAARRRRLKLTRPSASLLMARKLRKKAAGSKRPRAAASRKRAMAIRRKMEALRLLVPLCGRDNGSVTGGAVERLDELLMHAAGYILRLQMQVRVMQLMVHALNDRPED

SEQ ID NO: 293164 - protein, 167 aa, Zea mays
  unsure (1)..(167): unsure at all Xaa locations
  Clone ID: MRT4577_30446C.1.pep
MGRRMEAPSSPACGGGVLLLGSLLLQARADDPYRFYTWNVTFGDIYPLGVKQXGGPQIDAVTNDNIIVNVFNNLPVPFLLSWQGIQQRRSSWQDGVYGTNCPIPPGGNFTYNMQFKDQIGSYYYFPSLLFHKAAGGYGAIRVLSRPRIPVPFDPPAXDFTILAGDWF

SEQ ID NO: 293165 - protein, 165 aa, Zea mays
  unsure (1)..(165): unsure at all Xaa locations
  Clone ID: MRT4577_30447C.1.pep
MKMSSPAALCVFVLLASLLAAARAEDPYRSYTWNVTFGDIYPLGVKQQXYVRRQCGGALLCIFVLFSYILFFLLLALFLLSRGWVQGILINGQFPGPQIDAVTNDNIIINVFNNLPAPFLLSWXGIQQRRSSWQDGVYGTNCPIPPGGHFTYNMHFKDXIGSYYY

SEQ ID NO: 293166 - protein, 548 aa, Zea mays
  Clone ID: MRT4577_30448C.1.pep
MGRRMEAPSSPASLVVVLLLGSLLLQARADDPYRFYTWNVTFGDIYPLGVKQEGILINGQFPGPQIDAVTNDNIIVNVFNNLPVPFLLSWQGIQQRRSSWQDGVYGTNCPIPPGGNFTYNMQFKDQIGSYYYFPSLLFHKAAGGYGAIRVLSRPRIPVPFDPPAGDFTILAGDWFKLNHTDLKGILDSGNDLPFPDGLLINGQGWNGNRFTVDQGKTYRFRVSNVGIATSVNIRIQGHSMLLVEVEGSHTMQSTYTSIDVHLGQSYSFLVTADQPPADYSIVVSTRFTTPVLTTAAILHYSSSNGAASVPPPPAPTVEIDFSLNQARSIRWNLTASGPRPNPQGSYHYGLVNTTRTIRLANSRATINGKLRYAVNGISFVPADTPLKVADFYSIPGVFTLGSMPDNPTGGGAYLQTSVMAANMRDYVEVVFENAENLVQSWHIDGYAFWVVGMDGGQWTPASRQGYNLRDAIARYTLQVYPQSWTAIYMPLDNVGMWNVRSESWARQYLGQQFYLRVYSPANSWRDENPIPKNALLCGRASGRRTRPL

SEQ ID NO: 293167 - protein, 193 aa, Zea mays
  unsure (1)..(193): unsure at all Xaa locations
  Clone ID: MRT4577_30449C.1.pep
MPSPAALCVFLLLALLLAAARAEDPYRFYTWNVTFGDVYPLGVKQQGILINGQFPGPQIDAVTNDNIVINVFNNLPAPFLLSWQGIQQRRSSWQDGVYGTNCPIPPGGNFTYNMQFKGQIGSYYYFPSLAFHXAASGYGGIRVLSRPRIPVPFDPPAGDFTILAGDWFKLNHTDLKGILDSGNDLPFPDGLLI

SEQ ID NO: 293168 - protein, 45 aa, Zea mays
  Clone ID: MRT4577_3044C.1.pep
VQPPHRVNEYDIVLKYKYDVCSSATKRPRVKKHVHVFRDNHHWGG

SEQ ID NO: 293169 - protein, 75 aa, Zea mays
  Clone ID: MRT4577_30450C.1.pep
NTYHNDFYITYTPGKPTSCPRTKCSYIIYIYSILLNPTLKKNNKTYSNNTVLLKTIPNAPYSVLENKLLQTPHLP

SEQ ID NO: 293170 - protein, 67 aa, Zea mays
  Clone ID: MRT4577_30451C.1.pep
PTRPLDREWPPLFFFFFFFFFFFLFMGHPTPAPVLSHKKDRLYTTGKKPDSSTNNNPTALLTYKLHN

SEQ ID NO: 293171 - protein, 42 aa, Zea mays
  Clone ID: MRT4577_30452C.1.pep
GPGVWFFMLRAVIMWDIDKSFPLSPGHYNVGVVSVLLGESWN

SEQ ID NO: 293172 - protein, 58 aa, Zea mays
  Clone ID: MRT4577_30453C.1.pep
VRPTFACVDVQLEVNECTSSRASLLVICQQASALMESCYAILVSSGYLMLIITRGTGM

SEQ ID NO: 293173 - protein, 82 aa, Zea mays
  Clone ID: MRT4577_30454C.1.pep
YCWRKTDFVLSPPVSNLYKLNHLQSCCPVDPLLLRSQHCKEKTTIRNILVKLCTSNTNTEKTGRNKKKCQNNNLYCNPYVQK

SEQ ID NO: 293174 - protein, 81 aa, Zea mays
  Clone ID: MRT4577_30455C.1.pep
LSRLFRTASRSGFRIPSALFLTMVAMVGMCKVVCSGAAKKATSRSSKAGLQFSVGRIARFSRPASNARESAPAPLSTSLPC

SEQ ID NO: 293175 - protein, 41 aa, Zea mays
  Clone ID: MRT4577_30456C.1.pep
GICIEYGIREGVKKEVLSMLRIAKYLKVSYAMDNTGYRHFS

SEQ ID NO: 293176 - protein, 105 aa, Zea mays
  unsure (1)..(105): unsure at all Xaa locations
  Clone ID: MRT4577_30457C.1.pep
PKGPKRTDASKTQSAARGAPKSTARAGAGQRRDGENPGGTQRKRRAAQPXNASGRKSEKARTERPAQQRRSPKGKRDAPRSGARSAAGAGGTRSGTATPASAQAP

SEQ ID NO: 293177 - protein, 53 aa, Zea mays
  Clone ID: MRT4577_30458C.1.pep
TFISGWYAYSVTFYAIFLDHLCQLLYRSVTSLSIASNCFFFQKQINLPHSFIM

SEQ ID NO: 293178 - protein, 120 aa, Zea mays
  unsure (1)..(120): unsure at all Xaa locations
  Clone ID: MRT4577_30459C.1.pep
SIILGTHLNFAGSSRYATAAPTAMAQKIDSLFNKKPAQKPNPDAASSFSPDISDKLAKWYGPDRKIYLPDSLLDLSDVPEYLTEXVPADYGYDPFGLCKKPKDFDKYQAYKLIHTKLANL

SEQ ID NO: 293179 - protein, 279 aa, Zea mays
  unsure (1)..(279): unsure at all Xaa locations
  Clone ID: MRT4577_3045C.1.pep
GETGSCRQCSRDRGRSAARWRLRPSEPRGXWRARRPRRHGRGGARTGKTGEHARXPGTRHGAGAEXTPREGPRHRRAGRTRRLSSIRHISTRPRRAMVEPRRIGRSREQDGCRSQRESRPTTSMAEGRASARELGTVEHAXPGRGGHGVQRTPAWRSAQRRXARARRRRASRALRPSELGXGRAGAPRRGGSLARARLPWANRGGSKSSREPWMEEWRKVRHAGERGSGAGRKWDGAREEAELACDVEARRRGAHHGHEGEMEVEDRLGRRPKKTSCRI

SEQ ID NO: 293180 - protein, 78 aa, Zea mays
  Clone ID: MRT4577_30460C.1.pep
LASVPQHGIGSRFLFQFHCKIEILGSWCGRRSAPTFEAYFIGCLELSQIYYYFIIISVFLVELSISVHYQYLSDSKRL

SEQ ID NO: 293181 - protein, 104 aa, Zea mays
  unsure (1)..(104): unsure at all Xaa locations
  Clone ID: MRT4577_30461C.1.pep
LGDLTNTXRAACGCSRAPRRPTSGSCARRSRRRISGQRWWSRWRARSPRTASSPTRWLPRSCNSCRGTSVYRFPRTSTCPSSKNGSFIKNIGRNSFTFRPYSSG

SEQ ID NO: 293182 - protein, 56 aa, Zea mays
  unsure (1)..(56): unsure at all Xaa locations
  Clone ID: MRT4577_30462C.1.pep
PTAPRLHYLSTKELCVKILWYPGPVPGIMTNIASFVDAYGXKVDLVDITDFLKELH

SEQ ID NO: 293183 - protein, 72 aa, Zea mays
  Clone ID: MRT4577_30463C.1.pep
PPFTQTVVQNGGVFHAVVVGHPNIATKTRGGAQTIGRQPVWTLVTRPSKHETDHERHENCLVGPSNVHVKSA

SEQ ID NO: 293184 - protein, 99 aa, Zea mays
  unsure (1)..(99): unsure at all Xaa locations
  Clone ID: MRT4577_30464C.1.pep
ESLNARYNRSSFDNPWFVIGVSYSGALSAWFRLKFPHLTCGSLASSGVVLAVYNYTDFDKQVGESAGPECXFFLQEITGLVDEKLRLESHSVKVLXGAQ

SEQ ID NO: 293185 - protein, 90 aa, Zea mays
  unsure (1)..(90): unsure at all Xaa locations
  Clone ID: MRT4577_30465C.1.pep
SLEAALLMLLVLAVSFTLIAQEDSMAHNTLTFLDGIKDVPVSENDLHLQELARFAVDELNKMASALLGFVKLAKAKTQVXVYGLMYYLTI

SEQ ID NO: 293186 - protein, 49 aa, Zea mays
  Clone ID: MRT4577_30466C.1.pep
EIKKKATRKNIKETKESNTKKIKICYILGIGILETLLDSNNHRREGDQE

SEQ ID NO: 293187 - protein, 156 aa, Zea mays
  unsure (1)..(156): unsure at all Xaa locations
  Clone ID: MRT4577_30467C.1.pep
ALHCILLAWHQSGLSPITARACAQCAQSSENQSNEDKXRGSLPPPPRRPHPSPSPTPPPPHPPHSIPSPSRRAPPPSPPSPHIXPTPAPNSARGDNDVCNTSDNGSVILLGKRTPSASGLPEDYPKDSDLQQPVLDSFSVVSSFQDNISGKKLFLV

SEQ ID NO: 293188 - protein, 137 aa, Zea mays
  Clone ID: MRT4577_30468C.1.pep
ISEVLFAKHHCCVCCAPPHHHPLSSHTPSPDQTNSITTTTKTTTTNTTLTNITITTTTLNNHLRTTNTNLNNQHNRSHNLSTTNNNNLRIEMRATTITSTTTKTTKTTPTLTTTTEQRSREQERRISILTYTTTLLL

SEQ ID NO: 293189 - protein, 229 aa, Zea mays
  Clone ID: MRT4577_30469C.1.pep
MLTQEFSSSIIKRVTMNPVSTKSLQAFAQCLKLNHVRFEVLETGKDVKTPSKLDEQLNPGLDGDEAEKHSLDCCTDTSPVMSKRTLSSPGSGPCQQYVNESTTSPQSTDNHPNDLPAPRSPEQSACFQNDNDSGSVGICQSSRRRGIDELCGKLQSFKVSSAVKGSYVAMGAPRPKPGDSTSRSAAALLRNIENTTAVKAGRPPVKPNADGKDSSRRALQPISGRPDSR

SEQ ID NO: 293190 - protein, 113 aa, Zea mays
  Clone ID: MRT4577_3046C.1.pep
KVRLRNQNSRTDAIEPIFLSMIAWKLLDSDYHWRGIGSGNGGNGSFLGFRSPGGPCGGVAGQSLPGVVAGGSLPEAAAGGLTSVAAAGVAGRAGGLPAGTEARLRLSFAICYR

SEQ ID NO: 293191 - protein, 237 aa, Zea mays
  Clone ID: MRT4577_30470C.1.pep
IRHEETVSGVAGSEILSLSLATPDYKHEDGFSEEAVCRTKNYTGTSSVDPRHLDMEGHSVYSEGGTEKSNLQDNLAFLSAESGKDEPIICHVEKLVDAHASSEPYTYQGPCQDLGRHEEQESCMSIPMQAKESGGVLRSSHTKGSVTAAQIDLAGDAHLIVSDNAAAKQVFSEKKEETKSISTSDIDILHEKSYSSGHDDHAACAAETQFYHSQKASICDGLKLGPSSLQVESLDAL

SEQ ID NO: 293192 - protein, 152 aa, Zea mays
  Clone ID: MRT4577_30471C.1.pep
DSSNQGDSSNPRDLTPNPRRGNSQKSPRHPTMTPRAPSSVYAKRRRGRRWPSSSHRGGEFGTGLHAQLGSTPRATTTVRHQAPMSIQRDISVLSAQPQSSPHEDTARCGARLRSSEALSWLRRRCDCDLNQLPAISIFSLLSDEHAMMATTV

SEQ ID NO: 293193 - protein, 69 aa, Zea mays
  Clone ID: MRT4577_30472C.1.pep
HTTFYMSSTFLFCFVRWINSVNMWYINGGGQKEDRPLSPQFFYLGCAPLAKNYCTKDPRQTLWRPPYHC

SEQ ID NO: 293194 - protein, 66 aa, Zea mays
  Clone ID: MRT4577_30473C.1.pep
TVESRQAQDLARSYGIPYIETSAKTRQGVEDAFYTLVREIRQHKLRKLNPPDESGAGCMSCKCVLS

SEQ ID NO: 293195 - protein, 148 aa, Zea mays
  unsure (1)..(148): unsure at all Xaa locations
  Clone ID: MRT4577_30474C.1.pep
LLPTDRTSRGNPILEPYRIPQAIAAGILPLSPLLLQQSSALLQQTPLVHXGGQNNRVPPLQXTXXANLXADAQQQQARPFNQXXXXNXXXXXQQQQXPXSQXXXAXPQQXXPXNQXAAXNXXXXXQQQQXPPXSQXXXXSXXTXXTQP

SEQ ID NO: 293196 - protein, 159 aa, Zea mays
  unsure (1)..(159): unsure at all Xaa locations
  Clone ID: MRT4577_30475C.1.pep
PGEPPGATKTPTRPEAPKAEKKPAAKKPAEEEPAAEKAPAGKKPKAEKRGPGGKXXAKEGGEGKRGKKKGKKSXETXKXXXXKGXKQGHPDXGXXXKARAXXNXXXNXXXEKXXXEAAKXARXNKKXTXTXRENQTXGRXXXPGEXAKHAXXEGTKAGT

SEQ ID NO: 293197 - protein, 74 aa, Zea mays
  Clone ID: MRT4577_30476C.1.pep
SAVTPHHHRGHQGDHCGAANIDTNHTINHNSDNRQLPLPDHHWLAMSSDYPFGPHSPTVRLHPLGVTNDPTGMQ

SEQ ID NO: 293198 - protein, 44 aa, Zea mays
  Clone ID: MRT4577_30477C.1.pep
FPVDRLSQSNLYDIFTITTHTTNVILNLLPLLTPDQLSTCLAHP

SEQ ID NO: 293199 - protein, 59 aa, Zea mays
  Clone ID: MRT4577_30478C.1.pep
PPRPSAVAVPQLSSPMALLKNSLMLPGRLRHAAAALTARRHAATLTEENARRNYTNNNF

SEQ ID NO: 293200 - protein, 83 aa, Zea mays
  Clone ID: MRT4577_30479C.1.pep
KVWRIGADDPRKAVHGLKVGLALALVSVFYYTRPLYDGVGGAAMWAIMTVVVVFEYTVGGSVYKCFNRVVATASAGVLALGVH

SEQ ID NO: 293201 - protein, 64 aa, Zea mays
  Clone ID: MRT4577_3047C.1.pep
PDVSSEWIVHQALGSLPLCVSRSLVSVPRPQSVHYCTACLCVLALPKRKIIARLRSMCKQLNHN

SEQ ID NO: 293202 - protein, 212 aa, Zea mays
  Clone ID: MRT4577_30480C.1.pep
MGSVSVCQANGNYPPPPPQAEAEQVVEDGVAVDRINGNYQPLELVAEAGQVVEEGDAGVTMEGVASIALLPTGAISGHFIRLPDSICYGLHGTPISCERECSRGEDYRLIKLTIIDFKSKREKVLVVECRGHDAARLQNIDHLHGWEDDIVGLVEKDHGNQKVLLSFECETLKADKDAEDHIAKYMPNLCGLDAVVNIGKMSISGINLDEDA

SEQ ID NO: 293203 - protein, 53 aa, Zea mays
  Clone ID: MRT4577_30481C.1.pep
PTNCPQGVLLKRHSLWKSLCFMTNLWVVGLLQLAVFCVCPKPHIYKSILGPLW

SEQ ID NO: 293204 - protein, 66 aa, Zea mays
  Clone ID: MRT4577_30482C.1.pep
PYYRYVLETSLGLNWDIPSRPVALPPCILFNNLEFLDTTQKHLMVPYKLIQLKVVSSIQKILAIYV

SEQ ID NO: 293205 - protein, 274 aa, Zea mays
  unsure (1)..(274): unsure at all Xaa locations
  Clone ID: MRT4577_30484C.1.pep
HSRLAGSTLLLLGSLILLQSSYLLRLHRLSSSSRRYTQLSVPLLHPQWRACRRRRPAGACRSCWRRSRSRSSWTCTCSRGAAHPRASYSTATTPRRAGPPPPAPTPPPRRSGASPARRTTSRPPPPATSSSRSLPAXAPPPPALQDPPRRRRRSSGDPTXSPPRCSSPAPSSWRPPTPPPSRLRRAAPTVAWSWTPSRLPPPPTTTTRSSSXAPSPSWTTRSTAPRSTATCCPRRPRTSSGTSWTRRTAPRCWPSCSPSPSTSSWTVTXTPTQT

SEQ ID NO: 293206 - protein, 134 aa, Zea mays
  Clone ID: MRT4577_30485C.1.pep
SRPFWFFGRWPKDFQGRRQKNSFGSGSAPPCGGCGLWTPSSPSGPPPAKIGSRCPGTRAPPSTGAGLFSPKIGGARSLRFFPRGPAEGSFHVPPAGPLFLSGRAPPNKQALAVFLHVLLGAPPPSGWNKINVGG

SEQ ID NO: 293207 - protein, 88 aa, Zea mays
  unsure (1)..(88): unsure at all Xaa locations
  Clone ID: MRT4577_30486C.1.pep
STLSSLASTASASATGSSLAGSSATAVRFSSSLLLVSCFLLVCRSLSCIMQEHQPTRRRPVGDATWLSMRHTCTXAAALPSHARRSSC

SEQ ID NO: 293208 - protein, 118 aa, Zea mays
  Clone ID: MRT4577_30487C.1.pep
DPPGTRSVPWIHLLLQCPFQAGIQGQQQKFDPRNRGVRSGAGQAPEHVLGPHQHGGANAPQQPRRPLDHQQEISLGPGTGDPGWLQSHSSYMAFGLYRVERGSVIRFAVNSLGSHVRM

SEQ ID NO: 293209 - protein, 105 aa, Zea mays
  Clone ID: MRT4577_30488C.1.pep
VSLTSVLLILFALAVSSRGGAQEDSMAINTMTLVNGIQDVPLSENDLDLQELDRFVVDEHNKKAHALLGFTMLVTAKTQLCAGTMYYMTIDEKDGEFNNLYYSDV

SEQ ID NO: 293210 - protein, 71 aa, Zea mays
  Clone ID: MRT4577_30489C.1.pep
LVTSEVPPFADLASGLNGSLLPRSIFSTWVHLLTAPTENKCPCNSLERLLALRYKIRKELRVDLLLPATQQ

SEQ ID NO: 293211 - protein, 51 aa, Zea mays
  Clone ID: MRT4577_3048C.1.pep
HKPHCYKIPHNLIYSEQPIAHNRTASVAANTTSEIYVLLGYRRPDSGGSRA

SEQ ID NO: 293212 - protein, 55 aa, Zea mays
  Clone ID: MRT4577_30490C.1.pep
MLPHTPKFRGTPGLEEIVTMMGGRALLLLLVSALLVHIRASDPLPHDPFDEDIQV

SEQ ID NO: 293213 - protein, 90 aa, Zea mays
  unsure (1)..(90): unsure at all Xaa locations
  Clone ID: MRT4577_30491C.1.pep
TLXSPXIXEMTXKPFLXISFVNFRSLXXRKAPPTXVPGGTEGGIRQGXXLRAAGVAPPTDGVGXXAVRLGCRASSXIFSVSLXGPSLLLS

SEQ ID NO: 293214 - protein, 113 aa, Zea mays
  Clone ID: MRT4577_30492C.1.pep
MPVTDHQSSSPSPFSFGRSLLSLRRDPTAMPSGEEADLEAFQRHVASTLAELLPAAEAGVGGSDATAGAGEEFLSAAWIRRLLEAFVLCQEEFRVFVAQARSCAGALSFGRAR

SEQ ID NO: 293215 - protein, 342 aa, Zea mays
  Clone ID: MRT4577_30493C.1.pep
MRVLAVFLLGAAFAAAAGGGGELPEFREAPAFRNGAACADAPTIHIAMTLDGTYLRGSLAGVLSVLRHAACPESVAFHFVASSASPARRLASLRRALAAAFPTLPATVHRFDARLVRGKISSSVRRALDQPLNYARIYLADLLPRSVSRVLYLDSDLLVVDDVARLWATDLGPDAALAAPEYCHANFTSYFTDAFWSHPEYTAVFANRTRVPCYFNTGVMVIDLDRWRSGGYTAKLEYWMEVQKQEARIYELGSLPPFLLVFAGEVKAVGHRWNQHGLGGDNVAGQCRELHPGPVSLLHWSGKGKPWLRLDAGRPCPLDALWMPYDLLRRRGARDDLLAAVS

SEQ ID NO: 293216 - protein, 178 aa, Zea mays
  unsure (1)..(178): unsure at all Xaa locations
  Clone ID: MRT4577_30494C.1.pep
MASQNLLSLPQLLLRPVQATVAKSAAMNEPFVVRVSSSPPAKDGGDRHLXFATKXTLCYLDATLAGDYGFDXMGLWDTEGTGXFMPPKWLSYGDEIDGRYSMLEAEDTFVQEIFIKMGMMLPYTALAWFETDVHDDRGGLELXVDSYTLINFNMGVMGLCEYRRLQYWNNSSSMGKQY

SEQ ID NO: 293217 - protein, 511 aa, Zea mays
  Clone ID: MRT4577_30495C.1.pep
GGGPGAMEYLTSVLSSKVYDVAIESPLQLASKLSHRLGVNIWIKREDLQPVFSFKLRGAYNMMAKLSREQLERGVICSSAGNHAQGVALSAQRLGCDAVIVMPVTTPEIKWKSVERLGATVVLEGDSYDEAQSYAKLRCQQEDRTFIPPFDHPDVITGQGTVGMEIVRQLQGPLHAIFVPVGGGGLIAGIAAYVKRVRPEVKIIGVEPSDANAMALSLYHGKRVMLEHVGGFADGVAVKAVGEETFRLCRELVDGIVMVSRDAICASIKDMFEEKRSILEPAGALALAGAEAYCKYYNLKGDTVVAITSGANMNFDRLRLVTELADVGRKREAVLATFLPEEHGSFKKFTELVGRMNITEFKYRYDFNAKDALVLYSVGIYTDNELGAMVDRMELAKLKTVNLTDNDLAKAHLRYIIGGRSEIKDEQLHRFIFPERPGALMKFLDAFSPRWNISLFHYRAQGETGANVLVGIQVPPVDFDEFKSHADNLGYEYMSENNNEIYRLLLRDPEV

SEQ ID NO: 293218 - protein, 603 aa, Zea mays
  Clone ID: MRT4577_30496C.1.pep
MAAAATTASPSASFPAASLRRDARRTSCVAAAAAATTAAEAGLAAVPAPPPTPMVRVVPESLQRESGCLVEGFRARGACAADGEGFGDAAGEGGGPGAMEYLTSVLSSKVYDVAIESPLQLASKLSHRLGVNIWIKREDLQPVFSFKLRGAYNMMAKLSREQLERGVICSSAGNHAQGVALSAQRLGCDAVIVMPVTTPEIKWKSVERLGATVVLEGDSYDEAQSYAKLRCQQEGRTFVPPFDHPDVITGQGTIGMEIVRQLQGPLHAIFVPVGGGGLIAGIAAYVKRVRPEVKIIGVEPSDANAMALSLCHGKRVMLEHVGGFADGVAVKAVGEETFRLCRELVDGIVMVSRDAICASIKDMFEEKRSILEPAGALALAGAEAYCKYYNLKGETVVAITSGANMNFDRLRLVTELADVGRKREAVLATFLPERQGSFKKFTELVGRMNITEFKYRYNSNAKDALVLYSVGIYTDNELGAMMDRMESAKLRTVNLTDNDLAKDHLRYFIGGRSEIKDELVYRFIFPERPGALMKFLDTFSPRWNISLFHYRAQGEAGANVLVGIQVPPAEFDEFKSHANNLGYEYMSEHNNEIYRLLLRDPKV

SEQ ID NO: 293219 - protein, 40 aa, Zea mays
  Clone ID: MRT4577_30497C.1.pep
MLFHILRLTHVTVKQLPANVAILLCIVCLIRFLDKEICFC

SEQ ID NO: 293220 - protein, 50 aa, Zea mays
  Clone ID: MRT4577_30498C.1.pep
TRVSAGVCHSAHGSGRQHGAASDPVGGLHARERRPWSQPTRYPSGPGTSL

SEQ ID NO: 293221 - protein, 60 aa, Zea mays
  Clone ID: MRT4577_30499C.1.pep
HWGYTTRSGGKDQRKKFNLKTLEEKGASIPTVHRIDTLVRTALSWFLASKVFTLLAGCLS

SEQ ID NO: 293222 - protein, 223 aa, Zea mays
  Clone ID: MRT4577_304C.1.pep
MENPWVIRTSYCSEEEGFPHLLRSCALRLGIRKKPEYVWKEYRENGMENNKNTPTWKKRVHALSGGDPIEDDPTIVYMAGYLHTLDNHYDELSSHCTHLNSRVESLEQQVKELTQEKASLQESLSIVEGEEANTREAYRTLKIDFDKKLKALAPKKKIQKKTTNQGCQTEKKKKKAPLALPPPRIDDWSDEEDVSLASLDDLLKAFGDTLDKELASTSKNALV

SEQ ID NO: 293223 - protein, 78 aa, Zea mays
  unsure (1)..(78): unsure at all Xaa locations
  Clone ID: MRT4577_30500C.1.pep
GGGPKNKQRCASSXPXPGPSRGWSLTAPSLRRGTWACFYLFYFTXLPSRGGGVASIACTFLTYNSKKITHLHNKFVSS

SEQ ID NO: 293224 - protein, 157 aa, Zea mays
  unsure (1)..(157): unsure at all Xaa locations
  Clone ID: MRT4577_30501C.1.pep
XPWXSFXXCSGFXXSXVSXXXACXAXXLPLAXLXXGXXFXGXXXXRXXLXXXXXFXXXXLXXXXVGPXXSCLSXAXGPFLXXXFLXXXXLXXXRXLPPRSXRLRSXXXRCWLXRRXXXCXSCXGRSGXLCXWXXXCPWXPRSRXXXGXXAGXXGHFG

SEQ ID NO: 293225 - protein, 98 aa, Zea mays
  Clone ID: MRT4577_30502C.1.pep
KLCRFVIGHLGPTVCAYFGFLTLGTGLILAGLAPSENLALVLFFGPLFGRYLHWGLSWESPIIQTAPLFLLANPNSLVTVLLALSCSFGALVSLWRSP

SEQ ID NO: 293226 - protein, 126 aa, Zea mays
  Clone ID: MRT4577_30503C.1.pep
MAAAKEKASVCCRDAPARVAGAPVVPMRAIAASPVGKVVALAAGGGERVSASAAGSSGAVIEEIAAVQPTTAKASSKGIPIMTRAQRCHPLDPLSAAEIAVAVATVRVAGRSPEERDSMRFVEAVL

SEQ ID NO: 293227 - protein, 58 aa, Zea mays
  Clone ID: MRT4577_30504C.1.pep
LGLIDKYNISRLIYDSMLKKNIMIIYLWYMVSIRRKDCAEPNAVAVEEKCISPEVICD

SEQ ID NO: 293228 - protein, 59 aa, Zea mays
  Clone ID: MRT4577_30505C.1.pep
SMYGQVRCHCIHHPFSPQCVQLSEAFFFWAEKKQNKPFFFWAGCFSKQLFNLEMFPRKG

SEQ ID NO: 293229 - protein, 114 aa, Zea mays
  Clone ID: MRT4577_30506C.1.pep
MESPPLTAEAIAYTEKKMDMALEDIIKMSKKKNPGGKKPPRQPIKKHPFQNGNSNKGNGKVQSFMESRSTIRQGVLAQRRSNLGGNQFPATKQAAKKAAVMPMHKGAIRWNKPR

SEQ ID NO: 293230 - protein, 234 aa, Zea mays
  unsure (1)..(234): unsure at all Xaa locations
  Clone ID: MRT4577_30507C.1.pep
MKAGALLALLAAPMAANAHYIFNILVVNGQTIGGEYAYARKNSNAYNPVITNDIVNSNDLRCNRGAVAGNTGTYTVKAGDKIGFKIFNNERIEHPGPGFVYISKAPGKVKDYDGSGVWTKVMESGLANPSAPGVDKSWANWDKDRLEWTIQKSIPAGEYLVRVEHIGLHEGHVGKAQFYMECFQLNIQSSGTGTLGPTVKIPGLYSANDAGIKFNKWKQPQSYPMPGPKLYAXQ

SEQ ID NO: 293231 - protein, 351 aa, Zea mays
  Clone ID: MRT4577_30508C.1.pep
MDMNSNANNSTAAAASAPINNQQEAVVSSPTRKEQARNPKKARAAPQQAGGSGEPRPRPPPDAAHSCPRCSSTNTKFCYYNNYNLTQPRYFCKTCRRYWTHGGTLRNVPVCGGCRRNKRASSSSSPFPGPSSTAATSAAMEKTVSTRLMLMATSTMAMPSPTAGLFVPDDMSPAFTPTTGGSGFDDLAGMDEQHQQGFLPFSPLSLSDQAPELAPGGGGDTTPSFLDMLTGGYLDGGGYGGMSGGSDAMDMPFSLPEMGPPTTDPMPFQLQWTSSELDNYINDDGGYAAGPAAGVQQQQQQQQQQINGGDHQKQDENKEAGNGKGNDDGGGGSSSVYSFWMNTSGSDGAEG

SEQ ID NO: 293232 - protein, 61 aa, Zea mays
  unsure (1)..(61): unsure at all Xaa locations
  Clone ID: MRT4577_30509C.1.pep
MGEYTWYCLLGGKTLMRQAEAARTYIDVRAAANPNRPIWFHESTAPAXFDGSLQGDSGFDP

SEQ ID NO: 293233 - protein, 140 aa, Zea mays
  unsure (1)..(140): unsure at all Xaa locations
  Clone ID: MRT4577_3050C.1.pep
MGGLFEYTLWAGIHGXQWRRVRTVQDKINALKKQLKPATTATPASVGAGSDSSSTTTPPPAAASKSPSPAEARIEELTDERKALLKGSFRDRHFNAGSLLLGLGVLESVGGALNTWFRTGKLFPGPHLFAGKXITVLWAT

SEQ ID NO: 293234 - protein, 231 aa, Zea mays
  Clone ID: MRT4577_30510C.1.pep
RGIPFAKQQQTRRPEMSRAVTTAQQRHDTALHIQIFSCDCCWITTTRGTNSQPLYATATRQGKSWCCMLLMAGTQFRVAKLTRGTRLRLQVIDASQDYLIITVVDSWLLSPGNHLHRGLSCRGLFLVSDGPPFRLLLVHSAMFTLRDGIAFLFSSLQFAERFVDKFLPPTRLLDDFDFCTASALDTAFITFDILGAFAARGRFSELLLALGGADLRTYSLFGYFSPNATGV

SEQ ID NO: 293235 - protein, 146 aa, Zea mays
  Clone ID: MRT4577_30511C.1.pep
MIQFTLYTQAKVVKDPPHIFPIYIYNLTSFQKIEESVDNKDYLIDVIGMLTQIGAPHVAGYNNSSIVRDIFIKNISDASLKITLWGDQASGFSTDNVCNQGNNKPIVIMFVGCLAKQFKGQSYLSGTAATTWYFNPDIPEAQEYYI

SEQ ID NO: 293236 - protein, 45 aa, Zea mays
  Clone ID: MRT4577_30512C.1.pep
TVTAEQEHVNDERKLAFRVSDYRTCTGISSTSNLAHQSHLQETQF

SEQ ID NO: 293237 - protein, 85 aa, Zea mays
  Clone ID: MRT4577_30513C.1.pep
AAPLCISLVDQAAAVFVQEVAAYVLGGAIVSEDGDAVLTGGGALGEEVVAGPHARSAGALTAPAVLVRPCRSFGLVRRDQKGLEN

SEQ ID NO: 293238 - protein, 54 aa, Zea mays
  Clone ID: MRT4577_30514C.1.pep
FTAPAVSTILGLGYEYTLYMTCRSINGILGVCKAPPDGCYVQASRRAAEHGTHE

SEQ ID NO: 293239 - protein, 185 aa, Zea mays
  unsure (1)..(185): unsure at all Xaa locations
  Clone ID: MRT4577_30515C.1.pep
SSQRKWDSRRSGKQGHKHYWNNNEVKTEPPSTSHSTSPADLLADLLGPLAIEGPPAVEQNPTQGLNSNQSPVGDLALATLDDQSNSVQPIVNVEEKFHILCTKDSGVLYEDPHIQIGMKAEWRAHHGRLVLFLGNKNTSALTSVRVLILPPSHLKMXLSSVPDTIPPRAQVQVPLEGANLRASRD

SEQ ID NO: 293240 - protein, 153 aa, Zea mays
  unsure (1)..(153): unsure at all Xaa locations
  Clone ID: MRT4577_30516C.1.pep
MPLMDNLEVQTYEIFEKDVVKYTQVLMVVGAGRGPLVXASLQAAEETGRKLKVYDVEKNPNAVITLHSLIKLEGWESLVTVISTSDMRCWDAPEKADVLVXELLGSFGDNELSPECLDGAKRFLKPDGISIPSSPLPLSLSIAATSWGWIVPK

SEQ ID NO: 293241 - protein, 241 aa, Zea mays
  unsure (1)..(241): unsure at all Xaa locations
  Clone ID: MRT4577_30517C.1.pep
MPLGQRSGDKSDSRYCGVEVLDFPAGEGLPAVLNHSLASAFDFILAPLVDPNYRPAPGAVLPVSASDLVLGPSQWSNHVVGKISEWIDLDAEDERLRLDSELTLKQEIAWASHVSLQACVIPAPRRSFCGNYARVVNQILQGLTNMNLWLRLPLEKSEPMDGDLDKIKNNNHTLQSEIADSWELWNSFRLLCDHSSQLCVALDISGTLPSMNSLGRWFGEPVRAAILXSDALVTTSLGDAY

SEQ ID NO: 293242 - protein, 47 aa, Zea mays
  Clone ID: MRT4577_30518C.1.pep
GLENNITVQNSFDTTIVIKCSLVYNVLLTPLCLAQPKCQNKRLRTRG

SEQ ID NO: 293243 - protein, 59 aa, Zea mays
  Clone ID: MRT4577_30519C.1.pep
RTLSNRRDRAGGPIGISVRLKWYWPWLTAFNNCRARSSWMTYSTSLWRRVSRERQTYHM

SEQ ID NO: 293244 - protein, 71 aa, Zea mays
  Clone ID: MRT4577_3051C.1.pep
FLKILCERVNRGNVFPPYFGLAPTPVCFQGPPKNFFGKLPMYPRIFRSLFTLFKQFVPRSESSSKKFWAPF

SEQ ID NO: 293245 - protein, 81 aa, Zea mays
  Clone ID: MRT4577_30520C.1.pep
SFGLESYVKMERKKNLKKKKPMTKKKPKLGPPPPPQKTPTKKKKKKKKKKKKKKKKKKKKKKKKKKKKKKKKKKKKKKKSL

SEQ ID NO: 293246 - protein, 104 aa, Zea mays
  unsure (1)..(104): unsure at all Xaa locations
  Clone ID: MRT4577_30521C.1.pep
MGPSRALINHLHTXAGPSITLMFPMNGVVCTMDSPYKANHEQWLNYXIIHSLGTXLMEMLAMPLLHCEPLLYTXQVLFAVWLTISHITGAVFVYEKLAREHFLY

SEQ ID NO: 293247 - protein, 94 aa, Zea mays
  Clone ID: MRT4577_30522C.1.pep
CVTVHLFIGTEHSLDKITFTSLTFTNDHKVRCRGLSSLFSFRSVPFFIIVLVLSRSSLHHSFGAGSYFLQTAPSFHTHPDHKAQAYCNNHCHTE

SEQ ID NO: 293248 - protein, 62 aa, Zea mays
  Clone ID: MRT4577_30523C.1.pep
TPNQAKHVLRHECVNHLMKIYYSRKIFIYLYYHFINIYYRTKQPGWYDQTKSTPKQKGKRLG

SEQ ID NO: 293249 - protein, 82 aa, Zea mays
  Clone ID: MRT4577_30524C.1.pep
IAGYIPQKMRHLHDSLCPKNKNFIQNGACKKLKSIFSRLLSSHLCLFEPLPADFPFDKSGLGWGLTQVLFHSTGPKTLPFSS

SEQ ID NO: 293250 - protein, 224 aa, Zea mays
  unsure (1)..(224): unsure at all Xaa locations
  Clone ID: MRT4577_30525C.1.pep
MTSSRSKSRSHSRSRSRSRSRSPQRRDRLRSERAPRRSRSHSRSRSPXSQRTAWIQGXVCKNCRRPGHFAKECPSAPTCNNCNLPGHFAAECTSKTVCWNCKEPGHIASECKNEALCHTCNKTGHLARDCPTSGGXVKLCNKCFKSGHVAVDCTNERACNNCRQPGHIARECKNDPVCNLCNVSGHVARVCSKXDSGFNTRNTYRVAPFRGGEARGGRKRRVDQ

SEQ ID NO: 293251 - protein, 100 aa, Zea mays
  Clone ID: MRT4577_30526C.1.pep
CLLGFFFFFFFFFFFFFFFFFFLTAPGTNLKNWGVTMGQSSAQNPPIFQNPPPLLKRGPPQTTQGTGSENRGKGNKKKGAKKRGDPPIGGGEGYIWRQDL

SEQ ID NO: 293252 - protein, 58 aa, Zea mays
  Clone ID: MRT4577_30527C.1.pep
APSVPRTTDHALSMRPTHNGQRSNIHQIKAHPRKARCCQHICCKQPSSAHTRPEPQPD

SEQ ID NO: 293253 - protein, 60 aa, Zea mays
  Clone ID: MRT4577_30528C.1.pep
SLFHTIGLKFAIKFILRLYLDHLLPTPFLRHWRPHGIELWGPKRTRSNFHIGRQLCQGYS

SEQ ID NO: 293254 - protein, 86 aa, Zea mays
  Clone ID: MRT4577_30529C.1.pep
MALQAALLPSTLSSVPKKCNLAVAAKDTAFLSVSHKKVQAASLSARTRMATTAPVATPGSITEANDWKKTARHGVAEITVASSLLG

SEQ ID NO: 293255 - protein, 108 aa, Zea mays
  Clone ID: MRT4577_3052C.1.pep
RERCWRQGKGKFTPISFFFRKRTTSFWPDQNKTYPNWRNDLESRVLKWGPPKTRLEQSPVSQGCSLRPYRGAASGGDFPKGGGRDLRGGNFLMLSRGGILGFFYKGWA

SEQ ID NO: 293256 - protein, 78 aa, Zea mays
  Clone ID: MRT4577_30530C.1.pep
HVHRNSAPEPKTIPPLPLLSPILTITKHCSSEAAPLVSGIAGASSSTPLHLRTLVTGELVSVEILNVFGVRHISGAYD

SEQ ID NO: 293257 - protein, 106 aa, Zea mays
  unsure (1)..(106): unsure at all Xaa locations
  Clone ID: MRT4577_30531C.1.pep
FSPPLFPFSPLAAVFFQQQQFFPFTQLVALTPPGFLHHQILLPFTPLAAASCVSFLSQPRFLPFFHPFGGSPPPLFQFHXLWPFVPPALANPAASFQPPLLGGALF

SEQ ID NO: 293258 - protein, 111 aa, Zea mays
  unsure (1)..(111): unsure at all Xaa locations
  Clone ID: MRT4577_30532C.1.pep
MSPNKVRVPPADRNPPNLGAGQRTKKNWGXGKAXDNANNAALVNQATYDKLLXEVPKYKHITPYILCKRLRINGYLAARAIIDWMARCLIKIPSDHLYQYIFTRATNTYRW

SEQ ID NO: 293259 - protein, 41 aa, Zea mays
  Clone ID: MRT4577_30533C.1.pep
LMAGKLINIFALDCRIQQSYLPVTSVGLGSADQDDRAVFRV

SEQ ID NO: 293260 - protein, 95 aa, Zea mays
  Clone ID: MRT4577_30534C.1.pep
EIEKGDDWEHEEIFTDDDEVVDVDIEQRPELADPEAAPPEIKQDDNEDELGCSDNLSKSGQELKRLLRRAAGENESDVDDKSTYEDDLPSPIPAP

SEQ ID NO: 293261 - protein, 61 aa, Zea mays
  Clone ID: MRT4577_30535C.1.pep
NPRYLPHDVSHKLYVGDIVDDFPLAVCTVSKPPTPTSQLHYGQGDNLTDHSPSGTYFLPLF

SEQ ID NO: 293262 - protein, 86 aa, Zea mays
  Clone ID: MRT4577_30536C.1.pep
IKSLVLWLQKRHAQKPCPFSSKIFFRCRHLMGRSRFPWVGCFFFFLGGEEIPPPLCFPLFGWCVVLTPLCRCVSPPQRKGGGFFSF

SEQ ID NO: 293263 - protein, 125 aa, Zea mays
  Clone ID: MRT4577_30537C.1.pep
GAPEKHLPQVFWAWARVFLFKRGFRLKFFWSPSWGERAKKIPFFFPIFPVMGREKPVVLVPQPIQWRAQKFPFFKGVLFSVFVGGGLCQKLFCPLKGPNFPFPWGFLLCFRFFWVCGLRLLFNAF

SEQ ID NO: 293264 - protein, 38 aa, Zea mays
  Clone ID: MRT4577_30538C.1.pep
YIEKMAVLHKGGVVLHGKTKKDNKRVKTTQIHERLKIG

SEQ ID NO: 293265 - protein, 127 aa, Zea mays
  Clone ID: MRT4577_30539C.1.pep
LFEKKCDPTFSSWIIGPGERIWCYLGFIQPAWVPPHQDQPNLQDSIRNQIEFYFSTNNLCHDPFLRRHMNNQGWVPIDLILGFNRMRAFTGLVDTNYILDAIRGFELLEVQGDNVRRRNDWMEWLLH

SEQ ID NO: 293266 - protein, 105 aa, Zea mays
  unsure (1)..(105): unsure at all Xaa locations
  Clone ID: MRT4577_3053C.1.pep
LKXDYANTAKRQKNGIEVQGKRLVVELSMDQDTVFFGNLCKEWTLEEFEELIHKAFKDVVSVDLAMASNLGSSNKKNINRGFGFVRFSSHAVLAKYYCLLFSFSV

SEQ ID NO: 293267 - protein, 132 aa, Zea mays
  Clone ID: MRT4577_30540C.1.pep
PDLSSTEDLSNIPIRQIDSPNSALSDLTSHTSGIEWLSPSILYPRPYSSNSPPKLIHQIRCISRLRRLTKLRLITRLSTGKINSPPRRLRVSTVGLPNTLTSPRRINKTIMTGANNKILPNWNLLTRTSTST

SEQ ID NO: 293268 - protein, 62 aa, Zea mays
  Clone ID: MRT4577_30541C.1.pep
VCGEPSALVGMHPLQHDGRGHHKQRALVQRPEDTDTVFNVPYTPHDRPRAGGITHLTNPSHC

SEQ ID NO: 293269 - protein, 164 aa, Zea mays
  unsure (1)..(164): unsure at all Xaa locations
  Clone ID: MRT4577_30542C.1.pep
LQSLGTKFPAAMAAAVARSGFRRMFSVSAFAPPKAPAARPKADPSPNLFVSGLSKRTTSEGLREAFAEFGEVLHARVVTDRVSGFSKGFGFVRYATTEEAAKGIEGKDGKXTLLRCWDYHCLLFLDGWVIFAEYAKPRPPPEETGMNSQPQQSWGAPSGSWGAQ

SEQ ID NO: 293270 - protein, 153 aa, Zea mays
  Clone ID: MRT4577_30543C.1.pep
SHLQSLGTKFPAAMAAAVARSGFRRMFSVSAFAPPKAPAARPKADPSPNLFVSGLSKRTTSEGLREAFAEFGEVLHARVVTDRVSGFSKGFGFVRYATTEEAAKGIEGKDGKFLDGWVIFAEYAKPRPPPEETGMNSQPQQSWGAPSGSWGAQ

SEQ ID NO: 293271 - protein, 68 aa, Zea mays
  unsure (1)..(68): unsure at all Xaa locations
  Clone ID: MRT4577_30544C.1.pep
MGEADAGTPCLEMTXWSGTTCGGYCSREDSDSELEQYFTGRTLLALRPPRFGGGARGCRRRPGAARWN

SEQ ID NO: 293272 - protein, 45 aa, Zea mays
  Clone ID: MRT4577_30545C.1.pep
DWGHVQEMVLQRTDGHILVVLKPFIRVHALARQLVEVRLVQEAEL

SEQ ID NO: 293273 - protein, 65 aa, Zea mays
  Clone ID: MRT4577_30546C.1.pep
CLYPCYRGIDFRLVSRENCRGRRKHRCQSDCIRSSNKHPHVQTGLHIELTNAPAASATTSQASFP

SEQ ID NO: 293274 - protein, 46 aa, Zea mays
  Clone ID: MRT4577_30547C.1.pep
DIIGGSTNSLNHSKERIIDRIQDRGMDVSFDKRIDNTNSAHTSKAK

SEQ ID NO: 293275 - protein, 70 aa, Zea mays
  Clone ID: MRT4577_30548C.1.pep
WFWCTGIWVQGLVLVPPIGRAVVCALATHCMSSQDPAVQLMLYYLLVHIGAGSQCAAFQNINGGGGLEPD

SEQ ID NO: 293276 - protein, 97 aa, Zea mays
  unsure (1)..(97): unsure at all Xaa locations
  Clone ID: MRT4577_30549C.1.pep
FKKKESGKPPALRDVNPWANELDLXNLEEAVPSVQMEGFTWGAPKFVLVGSGIKKMPFLLPIVAVFVPIAPLIGAPLTQEPINGXVQSWAIVAFPKI

SEQ ID NO: 293277 - protein, 367 aa, Zea mays
  unsure (1)..(367): unsure at all Xaa locations
  Clone ID: MRT4577_3054C.1.pep
MASPRGGFDEQDRRTEKGTEVFVGGLPRSATESTLXSIXIFSSCGEIIDARIMKDQSGHSKGYGFVRFAKRDYANTAKRQKNGIEVQGKRLVVELSMDQDTVFFGNLCKEWTLEEFEEXFTRHSKMLFRLTLXASNLGSSNKKNINRGFGFVRFSSHAAAARVIRIGSRTDFMLGDILHPAINWADKESHLDPDEMAKMKSAFIGNLPEDVNEEYLRKLFGQFGEVVRVAISRKGQCPVAFVHFAKRSELENAIEEMDGKTVRGPGRGPSFKIQVSVARPTADNDKKRSREEVRTRRSNASGDRRDYSHGRYGHDSLDRQVKAPRLSNYVADAADPYESAVNSLPSAVKEVLLRILRLKIGTRYDID

SEQ ID NO: 293278 - protein, 64 aa, Zea mays
  Clone ID: MRT4577_30550C.1.pep
CFVEILFPGSKWEASVKTRPKLNQKKKLAQSAKASAGQTSQGTYRGESDVRSRKSIFVFLCVCV

SEQ ID NO: 293279 - protein, 56 aa, Zea mays
  Clone ID: MRT4577_30551C.1.pep
KKKKKKNFLKKKKKKKKKRGHANYKIPALTSLICGRRVFGFPGPIPVLSPLVFYFW

SEQ ID NO: 293280 - protein, 320 aa, Zea mays
  unsure (1)..(320): unsure at all Xaa locations
  Clone ID: MRT4577_30552C.1.pep
MLELAQSNMKEMEKHISSLQEEVKGHQDKATDHQQIEESLRNTISELKVVQEALELSKSQVADLEQKLASQDADISKLTEELNLHCSSEESLKENNLKLQTELTTALEDLQSKLLSLQEMETKLDEQSKDGQTSEAALEKQNEQLLILQAGLDNLKDENETLQGSLADLNSKLSEKDSLLHQAEDELAKAQLVLSEALSQKEELELNLNSLNEQHGESKAFGENASQKIIELEAQIQAMRAAEEALNLELKEAEASVKAAEKKGSDLEQQLSEIENKLVASSEEIELLKERIQQEAAVSAERGMQLEETXDQCRGIQRKN

SEQ ID NO: 293281 - protein, 90 aa, Zea mays
  Clone ID: MRT4577_30553C.1.pep
CHTRVKTFRKAESEGTFLIRCGFHPQRPQLKPYRRHHLSFDHATNRVNIPCLWLCLANPKKTQKNKGRQQAAPRFSPLVTPQEWALNKPC

SEQ ID NO: 293282 - protein, 166 aa, Zea mays
  unsure (1)..(166): unsure at all Xaa locations
  Clone ID: MRT4577_30554C.1.pep
LCPFWPRCPXFFVVLPSSSFGACLRXRSRALCCPCGRACGXSGFXGGGPPFVRFWSWPCGXALCAPGSPPCSRSRSSWXGRCSRLRRSSWPFVLFSLSCPPLWWXGASAGGPAFWXWVVGVWAVAFGCPFGRWVGRGLGGCVGLPCGLRRGRAPGVGVGVRVAXRV

SEQ ID NO: 293283 - protein, 118 aa, Zea mays
  Clone ID: MRT4577_30555C.1.pep
NVYTYHLITKNWDHFCKDMCYKLTGNKIPKWVNRLARIGAICNCLLPESLKISPVGHDPNSRPEDCEKRRLRNPLSCFSSISSQRQLPPSSPFPTSPVKEPLAYSSSRKSSAPSLRNR

SEQ ID NO: 293284 - protein, 64 aa, Zea mays
  Clone ID: MRT4577_30556C.1.pep
SSGKIWAMTLVSKLRNESAGRPRRVSFGSKFYQARSAVTTAWKLGTLYSIGEWAWLDAIHVAGN

SEQ ID NO: 293285 - protein, 97 aa, Zea mays
  unsure (1)..(97): unsure at all Xaa locations
  Clone ID: MRT4577_30557C.1.pep
IRQRSRGPTRPPTPPLGFCFVTFSTEDSMLIAIMGMNRKEXIDGRTITVHEAHSLCGRGGGRGGYCDGRRDGRGYCGGGGSYRGGRGRYRGCGGYSG

SEQ ID NO: 293286 - protein, 57 aa, Zea mays
  Clone ID: MRT4577_30558C.1.pep
PTARMAPGLPAQLDLSSTLLRIRRHRQGRLRHELHGHLGVHGVHGHHRTDLGRLHGL

SEQ ID NO: 293287 - protein, 126 aa, Zea mays
  Clone ID: MRT4577_30559C.1.pep
RGGLPVTAPLAGADHVRGPCGTCLLEEATGMLTDDARRLVTDLLKMDNAWGCMPRVEDERRPQILRRQEARSGLDGQRGDCGAGPEGPPRRDPGLQQDAEDRRRGRQFLQWPDIIARRGQEGHGRG

SEQ ID NO: 293288 - protein, 73 aa, Zea mays
  Clone ID: MRT4577_3055C.1.pep
SILNTPIMQWRCRLHGQPCAVCSRARARDGDITYLFTLELYGRPNVHVLLIGKIYIHSAALTLRYCALTCFNT

SEQ ID NO: 293289 - protein, 61 aa, Zea mays
  Clone ID: MRT4577_30560C.1.pep
KISTLAVTGGLFMELAVSGTATGTTAHGRLVMVLVAWVLLCRPHESPGAPRLNFLSPNLPN

SEQ ID NO: 293290 - protein, 102 aa, Zea mays
  Clone ID: MRT4577_30561C.1.pep
SSFLLLLPVVVGPVPPPFGSGVVSGCVSGRPASSWCCSVGVASSCLGLSRVSRLVCGGRCSLLSGMGGFFPFVGWFPACFLNPRLGAAGCSTSPRIVPAGPA

SEQ ID NO: 293291 - protein, 225 aa, Zea mays
  Clone ID: MRT4577_30562C.1.pep
GTGCRSLLPDIDISTSPAGRILPFISRPLEQRFSHRSATHSLLASFTLALVSYALWFAMPVIPLVIVHALNIGYFAGWFLDCFTKSGVEMFYPLGVRCVCPGNRNLRISTGSAAEYWLMVFVVAIAVWTFQLNNTGGLVKNFNALIAAPSGVVELYNRKGGNEIIYAEYEGVWAGNRAPIKEEAPVIATNGQGFLVLRDDQVVKVGTEADSTIIVNRIRGREGEP

SEQ ID NO: 293292 - protein, 218 aa, Zea mays
  Clone ID: MRT4577_30563C.1.pep
PGNLAAAFWRCMASSEADDEADDSGALAAVGCLRAISTILESISSLPHLFLQIEPTLLPIMRRMLTSDGQDVYEEVLEIVSYMTFFSPTISLDMWSLWPLMMEALNDWAIDFFENILVPLDNYISRGTDIFLASKDPDYQQSLWDALQSIMMDENMEDSDIEPAPKLIEVVFQNCKGNVDQWVEHYLRITIARLRRAQKPYLKCLLVQVIANALYYKP

SEQ ID NO: 293293 - protein, 349 aa, Zea mays
  unsure (1)..(349): unsure at all Xaa locations
  Clone ID: MRT4577_30564C.1.pep
ILESISSLPHLFTQIEPTLLPIMRRMLTSDGQDVYXEEVLEIVSYMSFFSPNISLDMWSLWPLMMEALNDWAIDFFENILVPLDNYISRGTDIFLASKDPDYQQSLWDALQSIMMDENMEDSDIEPAPKLIEVVFQNCKGNVDQWVEHYLRITIARLRRAQKPYLKCLLVQVIANALYYNPALTLESLNKLGVAADIFNHWFAMLQQVKKSGARVNFKREHDKKVCCLGLTSLIALPADKIPAEALDRIFKATLELLVAYKDQVAEAKKENEEAADDMDGFDADEEDDDEVDSDKEMGVDDEDGDEISSLQLQKLAAEARGFHXADEDDDSDDDFSDDEELHSPIDEVD

SEQ ID NO: 293294 - protein, 138 aa, Zea mays
  unsure (1)..(138): unsure at all Xaa locations
  Clone ID: MRT4577_30565C.1.pep
MYHSTXGGVRGGRHQLNCDDEKVDKHRENYLGDRDKASDARCQKGKDLYWYTGDKKCDTEDALQDEIKRVNVEDEHAMREDVGLSPKRSYGTQGKRWDKHEYAELINRGSTAVDLLAWHSEAXQVHGLGLYKAPPYEG

SEQ ID NO: 293295 - protein, 75 aa, Zea mays
  Clone ID: MRT4577_30566C.1.pep
SSFTPRNGMYHLTLAVNRYVICLFWAAGSRCIDFLSCYWICVKHCLLWVMGLLQFVCFDLYTCFFFFCRFMVMDI

SEQ ID NO: 293296 - protein, 156 aa, Zea mays
  Clone ID: MRT4577_30567C.1.pep
MGGFSLSGATGLAAYREEDDEELFETSSSISGDSDDEGHQLSDGEGGAYDLSSVMAQLPVKKGLSRYYDGKSQSFACMSEVRCLEDLRKKETPYKKIKTSRSSVALDEEQDCHTPGRTNSSRAPGSCCANLVARNNGKNMLYRPPPVPVNKSGYRQ

SEQ ID NO: 293297 - protein, 133 aa, Zea mays
  unsure (1)..(133): unsure at all Xaa locations
  Clone ID: MRT4577_30568C.1.pep
KVSQFPGERGLFPPRGNFPNFAPSGKQNSTLLNPVLFFLTISPPPPGVGLPQKPILVPPKTGGFLGGRVNPLSFSPFXKKGKRVFFGPPKKTIWARKFLVGQIFFKCVPPKKKKKKKKKKKKKKKKKKKKKKK

SEQ ID NO: 293298 - protein, 37 aa, Zea mays
  Clone ID: MRT4577_30569C.1.pep
QTPKHHDIYSHFTDIYKPYDLLDQTIDPTCFRLYLKT

SEQ ID NO: 293299 - protein, 108 aa, Zea mays
  Clone ID: MRT4577_3056C.1.pep
MRGENNIVLLLLLLFAVISPNQVIGSACTPEQKAAILNQCEEYIKPGYPLILPSYASVCCDKVRDVPNRDMNCIVDLLTPPEKAKHGVDKIKRLKDLCDNSPHHQVVV

SEQ ID NO: 293300 - protein, 155 aa, Zea mays
  Clone ID: MRT4577_30570C.1.pep
MGGFSLSGATGLAAYREEDDEELFETSSSISGDSDDEGHQLSDGEGAYDLSSVMAQLPVKKGLSRYYDGKSQSFACMSEVRCLEDLRKKETPYKKIKTSRSSVALDEEQDCHTPPGRTNSRAPGSCCANLVARNNGKNMLYRPPPVPVNKSGYRQ

SEQ ID NO: 293301 - protein, 184 aa, Zea mays
  unsure (1)..(184): unsure at all Xaa locations
  Clone ID: MRT4577_30571C.1.pep
MGGFSLSGATGLAACREEDDEELCPTSSSISGDSDDEGHQLSDGEGGAYDLSSVMAQLPVKXRPASXLLTDIKTERGEVLNSFVVVLSRKGLSRYYDGKSQSFACMSEVRCLEDLRKKETPYKKIKTSRSSVALDEEQDCHTPGRTNSSRAPGSCCANLVARNNGKNMLYRPPPVPVNKSGYRQ

SEQ ID NO: 293302 - protein, 184 aa, Zea mays
  unsure (1)..(184): unsure at all Xaa locations
  Clone ID: MRT4577_30572C.1.pep
MGGFSLSGATGLAAYREEDDEELFETSSSISGDSDDEGHQLSDGEGGAYDLSSVMAQLPVKXRPASXLLTDIKTERGEVLNSFVVVLSRKGLSRYYDGKSQSFACMSEVRCLEDLRKKETPYKKIKTSRSSVALDEEQDCHTPGRTNSSRAPGSCCANLVARNNGKNMLYRPPPVPVNKSGYRQ

SEQ ID NO: 293303 - protein, 156 aa, Zea mays
  Clone ID: MRT4577_30573C.1.pep
MGGFSLSGATGLAAYREEEDEELFETSSSISGDSDDEGHQLSDGEGGAYDLSSVMAQLPVKKGLSRYYDGKSQSFACMSEVRCLEDLRKKETPYKKIKTSRSSVALDEEQDCHTPGRTNSSRAPGSCCANLVARNNGKNMLYRPPPVPVNKSGYRQ

SEQ ID NO: 293304 - protein, 57 aa, Zea mays
  Clone ID: MRT4577_30574C.1.pep
QIYTLETPYNMHGEHTSREQTCESPLVQISGLLGGPLVSCHHWPKVSAEGTSQPGAD

SEQ ID NO: 293305 - protein, 448 aa, Zea mays
  Clone ID: MRT4577_30575C.1.pep
MEMEGRKSKQSALCDEETVREMFDKVLLCTDKNCEFHSPMPADAQISGGYVKGSRNKRGRRRGRSGPGAEEEPVDLTTLLIHCAQAAAIDDHRNSSELLKQIRKHSSATGDAGQRLAHYFADGLEARLAGSGSSIYRSLAAKRTSTGDILKAFSLYVKACPFRILSHYVANTTILNATKSATRLHIIDYGIMYGFQWPVLMQRLSKRPGGPPYLRITGIDFPLSGFRPAERVEATGRRLHEYARMFNVPFEYQAIAAKWDTIQVKDLNMKSDEFVVVNCLYRMRSMVGRTVADDSPRTRVLNTIRKLNPHLFVHGIVNGTYNAPFFVTRFKEAMFFFSSIFDMLEANALRMDEHRLLIEREFFGREAVNVIACEGTERIERPETYKQWQMRNLRAGFRQLALDREIMKRARYKVSKSYQGDFLVDEDNKWMLQGWKGRIIYALSAWTS

SEQ ID NO: 293306 - protein, 121 aa, Zea mays
  Clone ID: MRT4577_30576C.1.pep
MHTCPATRRLRPGDRSFQHHLFIETAACEYFARDGFDDLEANVIDKVRTGTYTQYFHHDHVISDKYDAFKELLRGHYTIAKEIVDLWHDRLEKLADNCTVLQDFLSFNAVGERMTTVVATL

SEQ ID NO: 293307 - protein, 61 aa, Zea mays
  Clone ID: MRT4577_30577C.1.pep
LPVACVLVVITFAHWWHGRDLFNTWLFCLITGLVSDLTVLTMCFPRYHTLVTNLVHSSCLI

SEQ ID NO: 293308 - protein, 299 aa, Zea mays
  unsure (1)..(299): unsure at all Xaa locations
  Clone ID: MRT4577_30578C.1.pep
MALLRLQEQCSLLXSPSSHHPNPIDIPRNPRKNQLLVPNAAKIANASEIPVPRIPTSTSKAAILARKAALWRDALVPVAAAFASCPLPSLAAEGDGKVSLESIVVAIDDFNNRNPFFVAGVVFVWLVVIPLLQEYVFKXAIDAFRKLRDVPEVQLLDIRRGKSVRFMAPPKLKLIDKSTVQVEFDEEDEKGFVKEVLARFPDPANTVVCVLDNFDGNSSKVAELLVENGFKEAYAIKGGLRGPEGWQAVQENYLPPSVHVFPKKKRGAKLAHTDASNDGTYVQQEGSEESSAPPSSTLT

SEQ ID NO: 293309 - protein, 328 aa, Zea mays
  Clone ID: MRT4577_30579C.1.pep
MALLRLQEQCSLLRISSSHHPNPIDIPRNPRKNQLLVPNAAKIANASEIPVPRIPTSTSKAAILARKAALWRDALVPVAAAFASCPLPSLAAEGDGKVSLESIVVAIDDFNNRNPFFVAGVVFVWLVVIPLLQEYVFKKYKPVSAIDAFRKLRDVPEVQLLDIRRGKSVRFMAPPKLKLIDKSTVQVEFDEEDEKGFVKEVLARFPDPANTVVCVLDNFDGNSSKVAELLVENGFKEAYAIKGGLRGPEGWQPVQENYLPPSVHVFPKKKRGAKLAHTDASNDGTYVQQEGSEESSAPPSRFVVNTSAESKDVYPPPQWKYNCCKTCN

SEQ ID NO: 293310 - protein, 63 aa, Zea mays
  Clone ID: MRT4577_3057C.1.pep
RVIDKKKKKKKKKKKKKKKKKKKKKKKKKKKKKKKKKKKKKKKKKKKKKIKKKKKNKKKRKKN

SEQ ID NO: 293311 - protein, 80 aa, Zea mays
  Clone ID: MRT4577_30580C.1.pep
PSPPLLAATPFFSPLVGRPLPLWHPCSIAPSPKISPYTSRIREKEGHAELNRNRGSRRCSTPSPLEDFLAVNPNRLHFIS

SEQ ID NO: 293312 - protein, 384 aa, Zea mays
  Clone ID: MRT4577_30581C.1.pep
MADTDSAETEKEKMVADDGGKPAELSKSARKKLQKQERQAERKAARKAAEKERRRADIERRRREWEDALAAAPSDEARAEMVAARRETRRERVGRRAEERGARADRLRRAAEGAGQKVVLDLEFADLMRPNEIHSLTQQIMYCYAVNGRSANPAHLWLTGCSGEMATHLQRIPGYDKWIIERAARPYIEAFEDRKENLVYLTADAETVLDDLDMSKIYIIGGLVDRNRWKGITLKKSAEQGIQSAKLPIGNYLKMSSSQVLTVNQVFEIMLKFVETRDWKTAFFHVIPQRKRGEAETRDDVEKGGLDDNDGAAEGAADGDHSEEDLNKGFGEEEDDDGDEELEEEEADVSNKRQCVRVENGEAGDATVAEVEPNNGGGGGGGDR

SEQ ID NO: 293313 - protein, 105 aa, Zea mays
  Clone ID: MRT4577_30582C.1.pep
NVFLSFLALRNHLIMSTSRAFRNLTTRSSAEFSEGSFGLSRSRCRCHGGSVLSARSRAREGMPARDPDGDPRCAGADRGADRRGGRDCGVVHHDALQDRYHVHPS

SEQ ID NO: 293314 - protein, 145 aa, Zea mays
  Clone ID: MRT4577_30583C.1.pep
KEGLRLHPPLPLLLPRECRSSCQVQGFDVPAGTIVFVNAWAIARDPSHWDRPEEFVPERFESSSVDFKGTDFDYLPFGAGRRMCPGMAFGLVSMELALASLLYHFDWELPPGMTAADVDMTEKMGVTARRLHHLLLVPSARVPVT

SEQ ID NO: 293315 - protein, 117 aa, Zea mays
  Clone ID: MRT4577_30584C.1.pep
FFFFFFFFYPVVRPRPTLAYSMLWRPNGRGLDEGCNQPLSSGPKTYLNTTVFCLFYYIPFARNLHTLEPLALTLEVHKEARSKGGINNTLKTRNHSSTTHTSRNKSSQHNSMSSQLN

SEQ ID NO: 293316 - protein, 82 aa, Zea mays
  Clone ID: MRT4577_30585C.1.pep
CHDDTRRFVCSCPACSWPTDNVSCYIRSMIRMMLLWVFMIPLKSSSHDSIVPETRSTMDIGDELHSSILHASDKKARHQLVY

SEQ ID NO: 293317 - protein, 88 aa, Zea mays
  Clone ID: MRT4577_30586C.1.pep
GVALAAQKALYPANIGAVICDHACPTESLNVRIAFHCLCHIGGHNEQEKQDNARLKRVSRLHYLNRGTNIYMHASGIQELFIPNYFKS

SEQ ID NO: 293318 - protein, 71 aa, Zea mays
  Clone ID: MRT4577_30587C.1.pep
GRSYSAPSSGWASLFPVFNPPPPRPNNGLLAPPFCHLNSRDRQTDLVKDLAPAEPRQGTWFLVSPLWPPIS

SEQ ID NO: 293319 - protein, 161 aa, Zea mays
  unsure (1)..(161): unsure at all Xaa locations
  Clone ID: MRT4577_30588C.1.pep
ILPRDSQEHHXHYKADPRTRKTYPETTTTRRQNGLMVINNRTYTTVEGGTCTTAHHRHPKRHLHALDIFNEKKLEDTDHSTHITDTPYVNPTEYQTTEIADDGTVSHYTXDGNTNHDLRLPTDETFVAQIKEGLQSNKDLVVTVQYGMGXEQISTLNDAAP

SEQ ID NO: 293320 - protein, 45 aa, Zea mays
  Clone ID: MRT4577_30589C.1.pep
SNILTIHINPFCKNITNITFPNNSNNHPNQLPPYHFYLIYYKPHY

SEQ ID NO: 293321 - protein, 107 aa, Zea mays
  unsure (1)..(107): unsure at all Xaa locations
  Clone ID: MRT4577_3058C.1.pep
LLQRGFVRLAPPQPRAGLFVGXTPGHVVTKRELPPRPCXRXGKSXKRVSMVRGLXCGGGGFAPSAXRVAGLLLVGSVPRALVLAFGPGTRGGAPPPCPGRAARPAAP

SEQ ID NO: 293322 - protein, 311 aa, Zea mays
  unsure (1)..(311): unsure at all Xaa locations
  Clone ID: MRT4577_30590C.1.pep
MDHAADAHRTDLMTITRHVLNEQSRNPEPRGDFTILLSHIVLGCKFVASAVNKAGLAQLIGLAGETNVQXVRCLVFFFLFFGEIDRDVTMPLPWLLGVLXGEEQKKLDVLSNEVFVKALVSSGRTCVLVSEXDEEXTFVTLXLRGGDRLXCELVLSTGTGVNGFTLDPSLGEFILTHPDIKIPKKGKIYSVNEGNAKNWDAPVAKFVEKCKYPKDGSPPRSLRYIGSMVADVHRTLLYGGVFLYPADEKNPNGKLRILYEVFPMSFLMEQAGGQSFTGKERXSPIFLGSYDDVEEIKALYAEQAKSSSASS

SEQ ID NO: 293323 - protein, 198 aa, Zea mays
  unsure (1)..(198): unsure at all Xaa locations
  Clone ID: MRT4577_30591C.1.pep
LPQHNNAYLEPYQSYYHGTCIKQGHRLHFTTTGKSSCPCLEENWKRIWSMTLWLSICIGLSIWKLIQYRDXAVLHIMGYCVTTAKGAADTLKFNMAXLAFFPVCRNTITWIRSKTKIGAAVPFNDNIYFHKVISSGAVGGVVLHASAHLTCDFAMLLHAIDAVYEPMKPLLGDKTPPDYWRIVKGTERWTGRGHGLYL

SEQ ID NO: 293324 - protein, 87 aa, Zea mays
  Clone ID: MRT4577_30593C.1.pep
TLESCVLFHRSCTKIACHFIYLTPGACSLSLSLSLSLFNLRGSISLLPHLASTRCISVPSRDKHRTRATDLARHFYIRNPALLNSDP

SEQ ID NO: 293325 - protein, 122 aa, Zea mays
  Clone ID: MRT4577_30594C.1.pep
GKLSTCVIVSSARQALGAGARNEQLNIGQVHGRRGPPQYRLHVPIQATPHNLVHGGIPATLRLAGYVVVVARRGLCHSLHARPRTRPGRPALRPFLLEPAQDPGRPPLREWTAAEQRDLQER

SEQ ID NO: 293326 - protein, 39 aa, Zea mays
  Clone ID: MRT4577_30595C.1.pep
IPGSTLHTSRRPPFYWGGFISTALRVNPPQKATAMRPWF

SEQ ID NO: 293327 - protein, 87 aa, Zea mays
  Clone ID: MRT4577_30596C.1.pep
ANRAHNLFIYYLTTSPRAGYIILSQKQNLLTNTHLLTIHPSRFQQMHNTNKNTNIFTLTSNYSQIFTYLLITTSTAKYIQLLSHKNS

SEQ ID NO: 293328 - protein, 115 aa, Zea mays
  Clone ID: MRT4577_30597C.1.pep
VQSTRRLLPACAGAAPLIKVAVAACPARGRALGVWGGLSLACVLGSGLLFPKFCLVAVRLVPVCALFGWFGCLAVSVAAFFGGGPFVFFLVPRLLSRSVWLVCTGVCSILPPWVL

SEQ ID NO: 293329 - protein, 86 aa, Zea mays
  Clone ID: MRT4577_30598C.1.pep
VSTSDSICLFHRGVPCVPSFVRHEPFAFPSGKPDCQRHGASPNRGLDGYCTSPPVVVVARYVWSGILAVVVQDTGPSASYMMVVGH

SEQ ID NO: 293330 - protein, 119 aa, Zea mays
  unsure (1)..(119): unsure at all Xaa locations
  Clone ID: MRT4577_30599C.1.pep
PPPGEKPEPPPFRCRRGQNFGQFFFSPPFKSKGQEPPKKFFLVPPPQRGVWPQTGKVFWQGFFXKEGSIRQHYKEGGEPPTQKKIPKIQSKGRQKTLGKYIKPPPYYTVVLNKTTPVNF

SEQ ID NO: 293331 - protein, 85 aa, Zea mays
  unsure (1)..(85): unsure at all Xaa locations
  Clone ID: MRT4577_3059C.1.pep
KNGAFCTPPSPGGGPPRGAPPRSPKAGQRARVLFRXQPLCARWGKEFFACPSICFFFQKSLKARGSLKVGCSLGXPLFKKADFFF

SEQ ID NO: 293332 - protein, 57 aa, Zea mays
  Clone ID: MRT4577_305C.1.pep
VSDGAVEHCSGRFIFLLSCSLAHAYPTHQQQRAEARLAILILNSYALSLLAQTSLYV

SEQ ID NO: 293333 - protein, 283 aa, Zea mays
  unsure (1)..(283): unsure at all Xaa locations
  Clone ID: MRT4577_30600C.1.pep
AECWKHMDKREIIKNGIKSYIAICHYGKTELSVDSAGGTGHLNRHFKACLKKARQSFGADMQTQLNXAAXGTVSTWVYNPQLASEEIIKYIVSKDLPIMMGESPNFKNLIQCAFCPQYQPVSRTTXKIRSQYHKQLAVLKENFLKXQFSFALTSDIWTSSHQKTSYISVVAHYLDNLYCLHKRVMGFRVMYDSHTGTAIANHILEVVNDFNIRNKILYITLDNASSNTNAIESLTPHLQSYIDGYVVHQRSVCHIINLVVQDGITIVSKYLDNVPAYSALLPL

SEQ ID NO: 293334 - protein, 85 aa, Zea mays
  Clone ID: MRT4577_30601C.1.pep
GQHWARATTRAEKPNNIPYLTVRLEVTLHDRKNSEHQGVSVCKFHYLKAGRVTCAELRTGPRQYYQFLDMDCCASFDAGVKQQLG

SEQ ID NO: 293335 - protein, 322 aa, Zea mays
  unsure (1)..(322): unsure at all Xaa locations
  Clone ID: MRT4577_30602C.1.pep
MSAAPAAGGQGGGGIDAALLDDIIRRLLEVRTARPGKQVQLSESEIRQLCTVSRAIFLSQPNLLELEAPIKICGDIHGQYSDLLRLFEYGGFPPEANYLFLGDYVDRGKQSLETICLLLAYKIKYPENFFLLRGNHECASINRIYGFYDECKRRFNVRLWKVFTECFNTLPVAALIDDKILCMHGGLSPDLAHLDEIKNLQRPTDVPDQGLLCDLLWSDPGKDVQGWGMNDRGVSYTFGADKVSEFLQRHDLDLICRAHQVVEDGYEFFADRQLVTIFSAPNYCGEFDNAGAMMSVDETLMCSFQILKPAERKXKFMGPNKM

SEQ ID NO: 293336 - protein, 322 aa, Zea mays
  Clone ID: MRT4577_30603C.1.pep
MSAAPAAGGQGGGGIDAALLDDIIRRLLEVRTARPGKQVQLSESEIRQLCTVSRAIFLSQPNLLELEAPIKICGDIHGQYSDLLRLFEYGGFPPEANYLFLGDYVDRGKQSLETICLLLAYKIKYPENFFLLRGNHECASINRIYGFYDECKRRFNVRLWKVFTECFNTLPVAALIDDKILCMHGGLSPDLAHLDEIKNLQRPTDVPDQGLLCDLLWSDPGKDAQGWGMNDRGVSYTFGADKVSEFLQKHDLDLICRAHQVVEDGYEFFADRQLVTIFSAPNYCGEFDNAGAMMSVDETLMCSFQILKPAERKNKFMGSNKM

SEQ ID NO: 293337 - protein, 61 aa, Zea mays
  Clone ID: MRT4577_30604C.1.pep
VVGNVFSAIEINMTSSVHEHVFTMRAVYVVLACMLLVEVYVPAVSCVDVGYHHQGPLLSYG

SEQ ID NO: 293338 - protein, 771 aa, Zea mays
  Clone ID: MRT4577_30605C.1.pep
RLRCISRKPTRSSRQPECLHHRKKKKKQTIEEKQKLYTLLRSLNVNGGLASASISEPYTSTGQSFAGGAPVDGFYSPELRGEFGAGLLDLHAMDDSELLSENAASEPFEPSPFMPKEMDDDDYDVIAENQQGLVDNQSAFTNEKENTVVSARESNVAKIKVVVRKRPLNKKEVSRKEEDIIDVHNSQFLTVHEPKLKVDLTAYVEKHDFCFDTVLGENVTNDEVYRETVEPIIPLIFQRTKATCFAYGQTGSGKTYTMQPLPLRAAHDMVCLLHQPMYRNQHFKLWLSYFEIYGGKLFDLLSERRQLLMREDGKKQVCIVGLQEFEVSDVQIVKEYIEKGNAARSTGTTGANEESSRSHAILQLSVKKHIPVTETRRQRDRDAIEAKNTKHVGKMSFIDLAGSERGADTTDNDKQTRIEGAEINKSLLALKECIRALDNDQIHIPFRGSKLTEVLRDSFVGNSRTVMISCVSPSSGSCEHTLNTLRYADRVKSLSKGGNTKKEQFAVQSVSSGKESTYTSYPLSCEAEETMEQTQEIRPVDSSRKGVDSFTSNSSIEPEKNSYCMIPSYPHKGKEETSTRSGLNDRERGDLKYNQAGFNSKTHSLQESINSQEEVKVTKVSPPRRKANRDEKSERQVNYMKKESGPEISRTGVKQQQQLKQLQRPSSTSSSQVLSKQSEKEDMEINTILEEEALIAAHRKEIESTMEIVREEMNLLAEVDQPGSLIDNYVAQLSFLLSRKASGLVSLQARLARFQQRLKEQEILSRQKPLR

SEQ ID NO: 293339 - protein, 67 aa, Zea mays
  Clone ID: MRT4577_30606C.1.pep
YPNFNFLGESEVGWLFVQRIFWKETVFVRWPFLLLISLGYFYMQVTMEVERKQGIHTNPIEENKKKM

SEQ ID NO: 293340 - protein, 64 aa, Zea mays
  unsure (1)..(64): unsure at all Xaa locations
  Clone ID: MRT4577_30607C.1.pep
QQLNMTEPLSKVDSAVQGLSSSPPAKDDKKTRRQSSAAAPGVYNINDLEAEGTELELXTETQKT

SEQ ID NO: 293341 - protein, 145 aa, Zea mays
  Clone ID: MRT4577_30608C.1.pep
MSTPSLPISARLYPPWSGQGHPRRASSHARSAPARRLCCSLVVVAAELHFGCCPAELLPELPALVPRPFLFGRYFLSATRRFLFSHAAAHLHGCRRPSPQVEHRSPLLWRDRLPCPKLASIVSLTLCSSSPLRASSPVSHCNTPI

SEQ ID NO: 293342 - protein, 190 aa, Zea mays
  unsure (1)..(190): unsure at all Xaa locations
  Clone ID: MRT4577_30609C.1.pep
QMKQMSEDNQQLNYLKNKMXRQSRDLKAVEETLGVITQKLRETMEENVFVKRKAKEKHLEYEEEMKHQEEFFHSQIEGIHKATEDKEKRFEKLLQEERSKARRFDVDSGTTEEDRKLRKEHVQKFIDCQVKNVAEFEAERDELIKGHEEKKMKLKKQYMKKELELERDHDAALTALMEKHKPDTFEASSS

SEQ ID NO: 293343 - protein, 69 aa, Zea mays
  Clone ID: MRT4577_3060C.1.pep
WIGCMGTVFLCVIRSWDEWWSMKVCGHYPCGLRFVLLGKGCPVGLKQPPLLVVAGVCKKSGGMSSSRIQ

SEQ ID NO: 293344 - protein, 64 aa, Zea mays
  Clone ID: MRT4577_30610C.1.pep
NRKTKLRKNTTKVKNEHTSKTKDTTLKNPLYINESQSLYIQNYLYYIFESLCFVSHNVGFLYIR

SEQ ID NO: 293345 - protein, 63 aa, Zea mays
  Clone ID: MRT4577_30611C.1.pep
KVKVKLFLVFHQNKFYPQTPPTWFFPLFFFKKNQFFSCSILRFPKNPSFLKKPKFCPFIPLFF

SEQ ID NO: 293346 - protein, 124 aa, Zea mays
  Clone ID: MRT4577_30612C.1.pep
HGGYSSSRRTKSWTQKTPRHGDIQCKQSSSVWVPPQTPRATPTREPSVILPAAQGKTRWCQQARGVLVETCEHPIGKQRMRHKNDQQIIRCGHNRSKLLRREPPPHFFSLVSLFPLFFVFLLFL

SEQ ID NO: 293347 - protein, 93 aa, Zea mays
  Clone ID: MRT4577_30613C.1.pep
QLPLDPFYGSCLLVLSVVIVDPPVISSNFSQTLPNTNAATLSKIWQGCGCISSNQTPVTPLFFVFPQEPFLVESNVRSSLERSIIFELGNKTS

SEQ ID NO: 293348 - protein, 92 aa, Zea mays
  Clone ID: MRT4577_30614C.1.pep
NSTYACTTLSAIRPKLVISSLLVSLLKALWYRCLEHTNISVDMSLQRLALRDAGCHRASQLLAHCVSAQIFRSSSSEPRAHALYVTAPCTPP

SEQ ID NO: 293349 - protein, 88 aa, Zea mays
  Clone ID: MRT4577_30615C.1.pep
MSDLGRESLTDKATAALKPDSEKSTTEHLGDKFKGNADSAASTLQPQSEKSTTQKVGDTFSSNSNHNDQSLLDKAKNAVGLGTSNPTH

SEQ ID NO: 293350 - protein, 140 aa, Zea mays
  unsure (1)..(140): unsure at all Xaa locations
  Clone ID: MRT4577_30616C.1.pep
AAAPPAGLPESARLGESDMKPDLFEPLKVGQALKYMECDCFDHCVSTTVTLGLHPCEAXYTVRNIIGMVPGYRKTKYSDIGICIQYAVCTVNEDDLEVMGHMXNVGYHALIXLQNRALNIFHFIKNWVKIRCPAKDRVKK

SEQ ID NO: 293351 - protein, 84 aa, Zea mays
  Clone ID: MRT4577_30617C.1.pep
ENAASAIPNPSLSKNPSHSFRVRNGSLNSMRLRRVFDIFDCIGYGEITLDDMASALYALCLGAVCSGLEASVGGYIPAGSAGLH

SEQ ID NO: 293352 - protein, 154 aa, Zea mays
  unsure (1)..(154): unsure at all Xaa locations
  Clone ID: MRT4577_30618C.1.pep
MAKKPDRWYRSXIKNKTXPTYRYCRAVTDRKISIYHAAMKRKRADDLPYCEHLVSSETENDSRKALEADRFACKENMTKSEEKDAFHPKIFFYPLHALRINKTISRAGDDTMKXGMMVAHGNPQGTRVMEDIVHALLLGTCKDNNRCPWQQRSA

SEQ ID NO: 293353 - protein, 50 aa, Zea mays
  Clone ID: MRT4577_30619C.1.pep
SSTHTHALVYNNLQCSAVQCYRGNPSHSTPGSLFHDGRKETPPDTNPMRS

SEQ ID NO: 293354 - protein, 139 aa, Zea mays
  Clone ID: MRT4577_3061C.1.pep
VRMWNQRWHDRRWSFSANFRVLNYLEAAAVFLIPQVLALVLFIRILLPPHCRSGFVVRCPFIGEQCLIAHQVGERDGTPPEPPGSTSNIEFLFLTRRRPRLTVTATPAAGGRVEMRRDASLETHRGVLTFTACCRRAVP

SEQ ID NO: 293355 - protein, 121 aa, Zea mays
  Clone ID: MRT4577_30620C.1.pep
MEQDKRAKVLCLHGFRTSGSFLKKQISKWHPSIFQQFEMVFPDGLFPAGGKSEIEGIFPPPYFEWFQFNKEFTEYTNLDECISYLCDYMVKNGPFDGLLGFSQGATLSALLIGYRAQTTCL

SEQ ID NO: 293356 - protein, 244 aa, Zea mays
  Clone ID: MRT4577_30621C.1.pep
MEQDKRAKVLCLHGFRTSGSFLKKQISKWHPSIFQQFEMVFPDGLFPAGGKSEIEGIFPPPYFEWFQFNKEFTEYTNLDECISYLCDYMVKNGPFDGLLGFSQGATLSALLIGYQAQGKLLSNHPPIKFMVSISGSKFRDPIICDVAYKDPIKVKSVHFIGEKDWLKVPSEELASAFDEPLIIRHPQGHTVPRLDDVSVKQLSEWSSHVLEDLKSADVPEALDSGKPSDKEAAGAEFTENLVKA

SEQ ID NO: 293357 - protein, 82 aa, Zea mays
  unsure (1)..(82): unsure at all Xaa locations
  Clone ID: MRT4577_30622C.1.pep
GQSRKAIPSRKEGGKVIIGDFMIGPFGPMLETPLLMGLGLMPLPKGRPKDXKKWGGLFPKTGFSEYKILKEFGARVAFEVYP

SEQ ID NO: 293358 - protein, 224 aa, Zea mays
  unsure (1)..(224): unsure at all Xaa locations
  Clone ID: MRT4577_30623C.1.pep
CFLWFYTTLKTRSPLHPSLAILMDNHVPQVGYXQTPVGVWWEFGKDGDTHLLGDNPXPMRSWATYKAQXYQQXAKIFCFLMLLGLSASAATAYHFPTMLTSSYSFLSSPIPLTXVSSVCENPVVQPYXDPKRNRRMHLXKLVIIVCEGLRFFTVSRKVDEGFKKPQAVTISALEGKQVQKWDRISKAVFRWAVDPTAEIPDMKDLGIKDKNAAAQIVALVKDQN

SEQ ID NO: 293359 - protein, 20 aa, Zea mays
  Clone ID: MRT4577_30624C.1.pep
QLLSLHDRWNCYTATENAVV

SEQ ID NO: 293360 - protein, 69 aa, Zea mays
  Clone ID: MRT4577_30625C.1.pep
MKDAQTQGPKESLAAPIRAIRPSVKIDIPAQVKEASASASSELPSSATDNNAAMECSTSSKMFLAIMLL

SEQ ID NO: 293361 - protein, 120 aa, Zea mays
  unsure (1)..(120): unsure at all Xaa locations
  Clone ID: MRT4577_30626C.1.pep
HSFALSSQDWPKVSSYEGPPLCLSFXLPATKNHYLSYHPAWPTLTEPTPVSTKAIKKPVRHYPLSALKYTYQNDXKDSQLKPTKGYSFXPTLKVGGLXEIPKELKISRQKSNVRGPVPLE

SEQ ID NO: 293362 - protein, 47 aa, Zea mays
  Clone ID: MRT4577_30627C.1.pep
PTRPSILVHTPYLTMSSSHMGRSIFNLGITITFNTHFFSHSIHNITL

SEQ ID NO: 293363 - protein, 43 aa, Zea mays
  Clone ID: MRT4577_30628C.1.pep
GRYQSRCRRVRDNPAPRRMWPSGPSCRFKDPRLPWHIPHARER

SEQ ID NO: 293364 - protein, 44 aa, Zea mays
  Clone ID: MRT4577_30629C.1.pep
WGKVGCRSLTMNTPSESNRCKGTVSNVLVCRKKLHVVQATDHEP

SEQ ID NO: 293365 - protein, 128 aa, Zea mays
  unsure (1)..(128): unsure at all Xaa locations
  Clone ID: MRT4577_3062C.1.pep
YVNFYNSIXXTXSGLIEDFLRLLIIXSHVHLRLSPFSFFYHTPFRLILPYFLPLILSTVCLLFLNPLLLHPLRFCALHLIPLQIIFLPSSSLILFFRPPLPILYSPSSHALPYHLLLHFLHSLSLLSF

SEQ ID NO: 293366 - protein, 67 aa, Zea mays
  unsure (1)..(67): unsure at all Xaa locations
  Clone ID: MRT4577_30630C.1.pep
SPLEQHLFTLREXTHLAXSIPPLKGKLPNHRLFFTTKPHKHHSPTYKLPHHPTRLEPPPLKKKKKQK

SEQ ID NO: 293367 - protein, 55 aa, Zea mays
  Clone ID: MRT4577_30631C.1.pep
TYNQITICMVNVVAQKGSLRICNKIEQCIIFMSLPKWSGMLLKNKTVCIRVQLVR

SEQ ID NO: 293368 - protein, 48 aa, Zea mays
  unsure (1)..(48): unsure at all Xaa locations
  Clone ID: MRT4577_30633C.1.pep
PXGLRVAVWLXXCSXXSFRXGXAXXPWXXAXCXAWFPPWEXAALKXAA

SEQ ID NO: 293369 - protein, 118 aa, Zea mays
  unsure (1)..(118): unsure at all Xaa locations
  Clone ID: MRT4577_30634C.1.pep
PSSLLFIFSMFGSSMPFINSIPSAANQEWSMASPPAQEESVMEELNNVMKCAYEEGTEFGKEIGWVYNIATEDVVTGFRVHRTGWXRSMYCRMEPDAFRGTAPINLTERLCQILRWSG

SEQ ID NO: 293370 - protein, 74 aa, Zea mays
  Clone ID: MRT4577_30635C.1.pep
GRSLPNIGEWDANVPDTPNREPGIFNGALTENNGGNGQKTKWAFFDPNTERVQTNAAGPITNKKTLCVTASPTQ

SEQ ID NO: 293371 - protein, 96 aa, Zea mays
  Clone ID: MRT4577_30636C.1.pep
PTTVDFFWVCLQVLAPLPIGFAVFMVHLATIPVTGTGINPARSLGAAVIYNKDKPWDDHWIFWVGPLVGAAIAAFYHQYILRAGAIKALGSFRSNA

SEQ ID NO: 293372 - protein, 119 aa, Zea mays
  unsure (1)..(119): unsure at all Xaa locations
  Clone ID: MRT4577_30637C.1.pep
LNSTNPSATLLFNPKAFGDTINLFVERYIDQGITLVAGVETLDFIFGPTITLTIGAKFVPLTKPKKFPPYMISQEYSFEYRTDKIXMHVXIVHANHLALLFHNLISTGVTLFSYVKLIE

SEQ ID NO: 293373 - protein, 88 aa, Zea mays
  Clone ID: MRT4577_30638C.1.pep
KRSSDSGVASFVCCAKQRALALSLSQRRLYARFSFFSSVRYKMTNCVSANAGFVRYLVSAPERIDIVSVETRKRDEWNGAYALHIFND

SEQ ID NO: 293374 - protein, 124 aa, Zea mays
  Clone ID: MRT4577_30639C.1.pep
TISHKADVNVRRPQQCAQHRHLDSRRLRGLQVDLLVYPLDTVKTRMQSPDYKKLYTNGADAKVSRSMFRGVYQGIGSVILATLPSSGAFFTTYEGVKSILKDTILNLAMDTCFVNSHPLSCLCN

SEQ ID NO: 293375 - protein, 38 aa, Zea mays
  unsure (1)..(38): unsure at all Xaa locations
  Clone ID: MRT4577_3063C.1.pep
IYYYFXCIGPLNFKCXFKLIRSSLHLALYEVSXXYSRX

SEQ ID NO: 293376 - protein, 81 aa, Zea mays
  Clone ID: MRT4577_30640C.1.pep
MEMKEKGGKDSKDVKIKEKAGKESKDVEMKEKIGKESKDVKIKEKAGKESKDAEVKEKTGKDSKDVETKDKAEKDSEDVEM

SEQ ID NO: 293377 - protein, 150 aa, Zea mays
  Clone ID: MRT4577_30641C.1.pep
DKIRPLHKTVWLGRRQVHERARQNKHSNGQKVLWPSDRVQSQKTASAAVYKTPSLPEKKRIQQNAEQIWTAMLIMCTPTLGVGTASFNKRRGYLEGKLCKTIMVAGAIFSPARVDRDQVSPFSPPPFIRRASVFPPECREGGPALLVPGP

SEQ ID NO: 293378 - protein, 336 aa, Zea mays
  unsure (1)..(336): unsure at all Xaa locations
  Clone ID: MRT4577_30642C.1.pep
MEEVIVSLAEKEKTRKDSKGMEMKEKGGKDSKDVKIKEKAGKESKDVEMKEKIGKESKDVKIKEKAGKESKDAEXEREDREGLQRRGXKDKAEKDSKDVEMEEEAGKHSKDVNMKEKAGKESKDVEMKEKIGKESKYAKMKEKAGKESKDLEVKEKAGKDSKDVELKHEAGKDSKDVKMKEKAGKESKDSEMKEKIGKESKDVKMKDKSVKESKDVEMKEKPGKDSKDVKTKEKAGKESKDLEVKGEAGKESKHGEAKKPGKDSKDVKTKENAAGKESKDAEVKEKAVKDPKDVEMEGMAGKEPKDVEKLDGHTLSNEESDNDTLSVWKKRTAKAT

SEQ ID NO: 293379 - protein, 51 aa, Zea mays
  unsure (1)..(51): unsure at all Xaa locations
  Clone ID: MRT4577_30643C.1.pep
TLLTLLIFKTTTIPPLXILQLLLLIILVKPILNLTNKNQYIHSQISISNPL

SEQ ID NO: 293380 - protein, 119 aa, Zea mays
  Clone ID: MRT4577_30644C.1.pep
VRLSLGIDSQEDWRVGLPGSQTNTGGGAPPRRGVENQGDPPRRGTDWAWGVKPNQEGGCLTRGGPLQGKPGRAQTGPPQKRIGGRSRGMPPEKKPGGTVPQPAKTSRRGPPQKLSAEND

SEQ ID NO: 293381 - protein, 108 aa, Zea mays
  Clone ID: MRT4577_30645C.1.pep
GDCPSTQRYPGAAISTGDATATGGTCPPSPALRQIGGSSRRGNSSGERHGVDRAGATGGDAPLFASGRRASGSRGRGASIVLAAPDEEEADHGGKAFRAPEEEEDAFE

SEQ ID NO: 293382 - protein, 154 aa, Zea mays
  unsure (1)..(154): unsure at all Xaa locations
  Clone ID: MRT4577_30646C.1.pep
MQSNRRTEPTVTVVVLPTLLMTMMMSSHVHIDFAPDRAECSQHLEGLATCLTYVHDHATPTAPTPDXCSRLKAVLHSTRKCLCVLSKDRHHPNSTSQALLRLXLGLPVVCHAPANISDCPIVMYLPIGSQDDTGALANSKLYTEMELTGICTYW

SEQ ID NO: 293383 - protein, 141 aa, Zea mays
  unsure (1)..(141): unsure at all Xaa locations
  Clone ID: MRT4577_30647C.1.pep
QDQRVGWRAWLGVGSFNVTQCHMTSAAGTFWYIESQYQHAFRLGVKSDVPPLRRTPHTGVRSRXPTGPPHRGSXSVMRGTLSCILDQHACDWTLCEALLFTKVSLRVCELRRKDRPDLATVVLPELNRMSALREDSMNSRK

SEQ ID NO: 293384 - protein, 73 aa, Zea mays
  Clone ID: MRT4577_30648C.1.pep
NCPHSRTCMHDVGGSSGSPSALEDALNAMTNSFLQAAGQQATDERLGIGDAEKRETVFSLIFRPGSPRPLVST

SEQ ID NO: 293385 - protein, 110 aa, Zea mays
  unsure (1)..(110): unsure at all Xaa locations
  Clone ID: MRT4577_30649C.1.pep
EPHILSDLRRRGMNLIPFPRLHWVGVGLGGVTSWGSQQNRALTGPELTHEMGDAKNMMCAGDPCHGRYLTGSGMFRGKMSTKEVRXQMINVHNKNSSYFWEWIPNNGKAS

SEQ ID NO: 293386 - protein, 164 aa, Zea mays
  unsure (1)..(164): unsure at all Xaa locations
  Clone ID: MRT4577_3064C.1.pep
MSNDYPTESGEHSEVGXKDMIKLRCLIAXEDCSPLMXIRLAXDSTRTFXVAARTGGPFLTMKSTGKLDHGADETLNIAVWLFLCILEEISSLYYAYFXSIVPYIEXEVCYVAVIPFHPGREDKPHSXSDGRLPDATWVSDDLMQVFEKQMRVMLMHVHVDLSGG

SEQ ID NO: 293387 - protein, 60 aa, Zea mays
  Clone ID: MRT4577_30650C.1.pep
SSQAIEDDGHMTTVIRERWWRRRVRWQGTHGPSAGDASACAMYPDAWTVATTRVKTTVLA

SEQ ID NO: 293388 - protein, 59 aa, Zea mays
  Clone ID: MRT4577_30651C.1.pep
LYFFFLRRTRRFYHLIERSLVTQHRRMSTAPPPPHAMLVLKIHHGTESLMTKSQKKKKL

SEQ ID NO: 293389 - protein, 133 aa, Zea mays
  Clone ID: MRT4577_30652C.1.pep
PLRGRLLVPLGLLVPVGATSWLRWVWRSALFRGQCFPATFWMPFSSEAGVLPLPFLTFNCYGFWFGVLWGFACVFFRGLLGLPGGPFGVAGKGCCSGPPPPPCRGRTLAGVLPFRGLFLWVLEQFKAPCGASL

SEQ ID NO: 293390 - protein, 53 aa, Zea mays
  Clone ID: MRT4577_30653C.1.pep
SLPRPAFLPSVGANTSVRAGRFTPLLSAGHPMLWTMSSSTRIISHAQAERPAV

SEQ ID NO: 293391 - protein, 51 aa, Zea mays
  Clone ID: MRT4577_30654C.1.pep
FLNSLFDPLVLPHFLLHLVLLFFQPATYTQMNFFLPDAAILHLYPNIPFFS

SEQ ID NO: 293392 - protein, 77 aa, Zea mays
  unsure (1)..(77): unsure at all Xaa locations
  Clone ID: MRT4577_30655C.1.pep
MRRAEPVGKQADPERGITGYKGVRGPRGGKGVSKIRVPGSGERLGLGSYPTPEAAAVAHKTAVYFFRXXGGGPGNFR

SEQ ID NO: 293393 - protein, 89 aa, Zea mays
  unsure (1)..(89): unsure at all Xaa locations
  Clone ID: MRT4577_30656C.1.pep
MAVYGDGPCIGIDHGTTHSCVGVWERDRVEIXLRTTQGDLTTPACGDLTDSDRLMRDPVKNXVAMNPINTRFHAHAAINRRITDASVQS

SEQ ID NO: 293394 - protein, 318 aa, Zea mays
  unsure (1)..(318): unsure at all Xaa locations
  Clone ID: MRT4577_30657C.1.pep
MGSGNLVTKKVVRRPSSIDQDIKFDQSWVEDVACPICLDSPHNAVLLRCASYEKGCRPFICDTDQTRSNCLERFRGAHGXHCQCQPTPEPPPVPXSSQQHPYHYHLFVECKXNRPACPLCRGDVMGWFVIGEARSHLNQKRRCCEESRCSYVGSFHELQRHTQQKHPDSRPSAIDPARRADWENLQRSSDVVDVLSTIHAQVPNGVVLGDYVIEYGDGDEAGDDDYEVYHGVRASWWTSCIFCKAFCRSSPPGGVRRRTRTRERRSSGGSGTRSSSNRSRSSQERFTLDEVDDGYVVAGAMARVAVSGTMAARYRSVW

SEQ ID NO: 293395 - protein, 128 aa, Zea mays
  Clone ID: MRT4577_30658C.1.pep
ARQRPRDYKELFNLRHAQLRNHIERTIGILKMRFPILRTASHYPVQKQIDISVACCVLHNFIRLHNGDMSWPNNDIMEIDPRQIVDVPSGDNNYHSDIQAFNYSRDAGNQMRDHIAEQMWAQYSARRA

SEQ ID NO: 293396 - protein, 72 aa, Zea mays
  unsure (1)..(72): unsure at all Xaa locations
  Clone ID: MRT4577_30659C.1.pep
SLLQVAVLLKKKKKKKKKKKKKKKKKKKKKNKKKIKKKKKXKKKGGGRFKKSKFTYACIKTKNFFISEPKLN

SEQ ID NO: 293397 - protein, 618 aa, Zea mays
  Clone ID: MRT4577_3065C.1.pep
LPLSPLLALSTQATASALRSGSGRRRHRLLLPPLSSRLAPSPPVLRTPAGDPAHTDVEASKENRGACSLNNDRADALEEEANVSTARIGHVESADPGGSVGVEKEIFMAVNEESEGEQAGATLEDLFFFNGEEDDDSDWEPASRLVVNRWFCLNCTMPNVDKITYCMNCRELPGSVVDGYDVFKKQIAQTALLSADTGLLPVSTAIGFDERMLLHSELEVKPNPHPERPDRLRAIAASLAAAGIFPSKCALVPPREITKEELLMVHSPDHIESVEQTKNMLYSYFTSDTYANGHSACAAKLAAGLCADLASLIVSGRVRNGFALVRPPGHHAGVKQAMGFCLHNNAAVAALAAKRAGAKKVLIVDWDVHHGNGTQEIFDGDKTVLYISLHRHEDGNFYPGTGAAHEVGVLDGQGFSVNIPWSRGGVGDDDYIFAFQTVVLPIASEFAADITIISAGFDAARGDPLGCCDVTPTGYSWMTSLLAGSSNGRLLVILEGGYNLRSISSSATEVVKVLLGEGPNRASFVVSPSKEALSTVSQVLKIQQQFWPVLGPTYASLQAQQGSVSSNHSNELKKRKRPGGGPGPFWWKMGSKRLLYEALIEPRSRPRKLKGSTGSAAP

SEQ ID NO: 293398 - protein, 33 aa, Zea mays
  Clone ID: MRT4577_30660C.1.pep
LIKFYYHVLCARRYHNSYIAQYCTHHCNCAKSY

SEQ ID NO: 293399 - protein, 191 aa, Zea mays
  Clone ID: MRT4577_30661C.1.pep
MMAIKSLSMVEASLPPGFRFHPRDDELVLDYLAKKLGGGGGPVVVSIYGCPTMVDVDLNKCEPWDLPDIACIGGKEWYFYSLRDRKYATGQRTNRATDSGYWKATGKDRPISRKGLLVGMRKTLVFYQGRAPKGKKTEWVMHEFRMEGRDDPMKLPFKVIINYDDLISSLCILLFSVVCVDSFYSQFSNNI

SEQ ID NO: 293400 - protein, 72 aa, Zea mays
  Clone ID: MRT4577_30662C.1.pep
FLIASGRLTLLNFGGGLPQGPQFFYPLAGGNPLGGAFLQQQQLLPYNPFFFINPVLLGQPPLVGGALFLVSY

SEQ ID NO: 293401 - protein, 32 aa, Zea mays
  Clone ID: MRT4577_30663C.1.pep
NQTCSLRTSQDPSNPVRETYAMIASEFLGRLL

SEQ ID NO: 293402 - protein, 51 aa, Zea mays
  Clone ID: MRT4577_30664C.1.pep
FGFSSSTATSTSVVVAVGRSDPASVTWTKHPLVPGSIRFLRLIWSQGSSWP

SEQ ID NO: 293403 - protein, 58 aa, Zea mays
  Clone ID: MRT4577_30665C.1.pep
EGSKNHIAPYPGNPPRKIGGRSGPAPEEISKEREKKSFMFSERSVRLRKQLRVKLQQH

SEQ ID NO: 293404 - protein, 102 aa, Zea mays
  Clone ID: MRT4577_30666C.1.pep
AVSRLYVDLHEQMELTRVVEQCLHNPSLLICYGIHHNIEATHFIVRTIHLFILLVIWMSSIAFTVSAAAEGQSVSSDVCIILSLLIYRVSMSNTRSREYAVG

SEQ ID NO: 293405 - protein, 351 aa, Zea mays
  Clone ID: MRT4577_30667C.1.pep
MRLHAEVRDEMEEGSEVGAVTASAGLSPPPLIGAAAPVPRLVVGFALTKKKVKSFLQPKLLLLARKNGISFVSIDESLPLSEQGPFDVILHKITRKEWQKVLEDYHEEHPEVTVLDPPNAIEHLNNRQSMLEEVADLNLSNFYGEVCIPRQLVITKDPSSIPTSVAMAGLTLPLVAKPLVVDGTSKGHELYLAYDEASLSMLDPPLVLQEFINHGGILFKVYIIGETIQVVRRFSLPDVNTYDLLNNVGIYRLPRVSCAAASADDADLDPLIAELPPRPLLEKLGRELRGRLGLRLFNIDMIRELGTKDRYYIIDINYFPGYGKMPGYERMFTDFLLSLAQSKYKRYLSGT

SEQ ID NO: 293406 - protein, 91 aa, Zea mays
  Clone ID: MRT4577_30668C.1.pep
GAPKRGGHYAIRQGDSFEKPMGRAFWKINQVGKKGYYARGIKGVTPGVFLKKGGVKGWPMKCKRTPGRGKWGPQKEGGRGPNGKKILKNRP

SEQ ID NO: 293407 - protein, 59 aa, Zea mays
  unsure (1)..(59): unsure at all Xaa locations
  Clone ID: MRT4577_30669C.1.pep
GEEVYLLDAGSIMYSLCFSPNRYWLCADSVKTWDLESKHVVXDLKPDIRISKNQWLCRS

SEQ ID NO: 293408 - protein, 568 aa, Zea mays
  Clone ID: MRT4577_3066C.1.pep
FRFLPYSRSARRRRRRRSGRALGDGVIGFSSRLSPVASRPRLRSSAHRPVTLQKEIFMAVNEESEGEQAGATLEDLFFFNGEEDDDSDWEPASRLVVNRWFCLNCTMPNVDKITYCMNCRELPGSVVDGYDVFKKQIAQTALLSADTGLLPVSTAIGFDERMLLHSELEVKPNPHPERPDRLRAIAASLAAAGIFPSKCALVPPREITKEELLMVHSPDHIESVEQTKNMLYSYFTSDTYANGHSACAAKLAAGLCADLASLIVSGRVRNGFALVRPPGHHAGVKQAMGFCLHNNAAVAALAAKRAGAKKVLIVDWDVHHGNGTQEIFDGDKTVLYISLHRHEDGNFYPGTGAAHEVGVLDGQGFSVNIPWSRGGVGDDDYIFAFQTVVLPIASEFAADITIISAGFDAARGDPLGCCDVTPTGYSWMTSLLAGSSNGRLLVILEGGYNLRSISSSATEVVKVLLGEGPNRASFVVSPSKEALSTVSQVLKIQQQFWPVLGPTYASLQAQQGSVSSNHSNELKKRKRPGGGPGPFWWKMGSKRLLYEALIEPRSRPRKLKGSTGSAAP

SEQ ID NO: 293409 - protein, 38 aa, Zea mays
  Clone ID: MRT4577_30670C.1.pep
DPLVRDSSERSHSLSVSDRSLLHLDQSLSALALASIPI

SEQ ID NO: 293410 - protein, 51 aa, Zea mays
  Clone ID: MRT4577_30671C.1.pep
RLLISENLSFFSKDMIIVFVLLNVMIYLFYKVIKCLFKDLFILFHLMIICF

SEQ ID NO: 293411 - protein, 163 aa, Zea mays
  Clone ID: MRT4577_30672C.1.pep
KSSDFAYLTGMCPRESICSEMVLFLYIREKETLASPPARATERTPNPSRRGAAILTSPLLAAPLPEQDAGCSCGLRGRRRRGPLFSSPVDWGGRGCLVPRTSSSAMTGWRWRRIGPPDPIFPRLDPVAVRREVCDVRGAAGRRAAAAAGSGGTDGGRGPRPGR

SEQ ID NO: 293412 - protein, 89 aa, Zea mays
  unsure (1)..(89): unsure at all Xaa locations
  Clone ID: MRT4577_30673C.1.pep
WQVVLIICVPKIAKSSLEKDLVEGKRLYLLDAGSIMYSLCFSPNRYWLCADSVKTWDLESKHVVXDLKPDIRISKNQARTDKIMERPAV

SEQ ID NO: 293413 - protein, 74 aa, Zea mays
  Clone ID: MRT4577_30674C.1.pep
AEGTRELPYPAYAHKYNPKTLHKLVDPLLRVDEHERAQIMECVRVAQLCVDHRAKHRPVMSEVVTMLGMAASKG

SEQ ID NO: 293414 - protein, 48 aa, Zea mays
  Clone ID: MRT4577_30675C.1.pep
QKFPPLLQVTKHVSCCWNAIYSRSGAGIGSGRPIRHTPPINFYFPFYL

SEQ ID NO: 293415 - protein, 71 aa, Zea mays
  unsure (1)..(71): unsure at all Xaa locations
  Clone ID: MRT4577_30676C.1.pep
SXVRNARCRLHVRVHXVNSXRTXAQTLRLISGXRHXAXLXRHXHEXMXLFSLVVKXVXXRLHRLPHHXXSX

SEQ ID NO: 293416 - protein, 69 aa, Zea mays
  unsure (1)..(69): unsure at all Xaa locations
  Clone ID: MRT4577_30677C.1.pep
MDASGAGSMAINGAAGRKAGGPXKKSASRSXKAGLEFPVSRIGRYLMKGRGAQRVGTVARVYLGDVLEY

SEQ ID NO: 293417 - protein, 70 aa, Zea mays
  Clone ID: MRT4577_30678C.1.pep
APVIRIPLPSIRKRSSARPSNRPWVRNSPPSSSANISSGMVLHQTTELGSMHPHPCFILFSRGLKWMVLQ

SEQ ID NO: 293418 - protein, 61 aa, Zea mays
  Clone ID: MRT4577_30679C.1.pep
NCGYDPGKTCKKYQILMWSAIGQYQSCCPWLFCEAAQPSSLCHKNLGYFNVSPAYICNKQL

SEQ ID NO: 293419 - protein, 72 aa, Zea mays
  Clone ID: MRT4577_3067C.1.pep
GRFCRSEGRSVIWLRPGFNTESVPSGCCCVPLLLFNLVYCRGHGVWPAFLLNCLALAMSANPWFDGWMLVIT

SEQ ID NO: 293420 - protein, 180 aa, Zea mays
  unsure (1)..(180): unsure at all Xaa locations
  Clone ID: MRT4577_30680C.1.pep
MINAFLVFNGQGQPRLTKFYTQLETSIQQRLISEIFTLVSNRPAGSYNFLPXTYACRFWHLSHVLRGAERXPTLVTYRNYATLYFIVISTSTESPLALIDLIQVYVEALDKLFENVCELDLIFNFETLHSTLSEMIIGGVVIETNLDRIVSGGKAQGTVAKRPVNEGRRATWSGKGTWYG

SEQ ID NO: 293421 - protein, 87 aa, Zea mays
  Clone ID: MRT4577_30681C.1.pep
KKKQYKKKKKNKHKEGKKNRGGSIYNAPFFPPARLLYNCLFCGAPFFTQLTRLLSPPRLFNLWRSKTYCPARTSPFPTVKPLDGPPL

SEQ ID NO: 293422 - protein, 86 aa, Zea mays
  Clone ID: MRT4577_30682C.1.pep
MMEKQSRERQEGWRQQPQQQEEEVVMVMHSQVMRIKQEEDERAKVHETYQHHVSEMRRGLRDLDRQRSRSPLGRAARTAISIGGDS

SEQ ID NO: 293423 - protein, 76 aa, Zea mays
  Clone ID: MRT4577_30683C.1.pep
PNKRGPPQPFYYNNTKDNYYCMPAGGGGGKNPWLTFRGGATPTIYGGRANPSRAQGSNGAPPPKKGGGGPGPTRPR

SEQ ID NO: 293424 - protein, 84 aa, Zea mays
  Clone ID: MRT4577_30684C.1.pep
QGIKGVKLKMVFFNVGSVYPNRQASIESKSCKSLKLGCGFKQSFGGGRIFDPSSPLGKSGGPFGIPVPPGFCGLGPAPGLFLNF

SEQ ID NO: 293425 - protein, 65 aa, Zea mays
  Clone ID: MRT4577_30685C.1.pep
DGTRRFPNASVASGTSGPSRSERRRTSSRSSKAVVRSPCRDPSTPSLAMTTTKALNARRSYTAAA

SEQ ID NO: 293426 - protein, 49 aa, Zea mays
  Clone ID: MRT4577_30686C.1.pep
MHPHNRTMELKASSGGSLGLALLCNKALFPIRVPITIALASPVTRALSH

SEQ ID NO: 293427 - protein, 59 aa, Zea mays
  Clone ID: MRT4577_30687C.1.pep
RYMILEISVYISILLDRLLSPKYSRGWMLWSDSRCSVLPNWCCPITCRLLRLARWGENY

SEQ ID NO: 293428 - protein, 107 aa, Zea mays
  Clone ID: MRT4577_30688C.1.pep
PRVRPRVRGRVGEKKLVFYTKVKDAITSLNAKKTINKKNTRSRRQKKLKAYDLSALSESLPEPGAPKQKPEAKLNCKSRQSLVLREAAHLKVVLGKMQFQLDPFAAI

SEQ ID NO: 293429 - protein, 832 aa, Zea mays
  Clone ID: MRT4577_30689C.1.pep
ADSSSCSLVGSMADGGIVVAICQYGGEFTSGPNGNLTYKGGEAHAVDVTRDMPLENFKDEVSKVFHVDVTDMSLKYFLPNNYRTLITISCDRDLQRMVDFTTSATQVEVFLISRVENRSIVTYSGASASKPGSNAPGDKRKRPPSKNKVSKSNKKTPTPSAPGTSVQPSANNVKQPRPIAIETNDNRVFQLEFGSDVAFATPAGGASTAPDILDQQNLALVDTAHREPIGHFNDSGDSYVGSEITVDPQHGLDNPVMFWDDIIKGVGQEFDNVKDFRAQLCKYAIGKGFAYRFIKNETTRVTVKCVAEGCTWRMHASESSRNKKFVIKKMTDEHTCGGGNGEGQRRATRQWLTTVIKEKLHDNPMLKPKDLVKEIYEQYGVTLTYSQVWRGKEVAQKELYHAIRETYSHLPWYCERLTESNPGSIALLSPMVDTKFRRFFVAFHASLHGFANGCRPLLFLDKVPLKATNEYKLLVAAAVDADDAVFPVAFSVVEDENYESWVWFLMQLKFPVQNHSYAYNAMTFLSSGQKGLDAAVSQVFEDSHHAFCLHHIMEEFKGELRKGPWSQQIREGMIEDFTRAAQACSIEDFNTSIESIRNISTEAAEWIIASKPEHWSDAIFRGCRYDHFSSNIVDAFNNWIPTKKEGSIVLMVDSLRTKIMEIIETRREACKAWSGPLTPSMEFKAQEEVTKAGKMTVLCSSETVFEVRGNAIFVVNLANWECTCRRWQLSGLPCLHAVAVFNRIGRSFYDYCSKFFRIESYHMTYSGTIFPIPDMDTVDFSAGANLIPPPKPRTSDKPRRKRFNPNKIPTVIRLCSRCKQAGHNKATCEAIL

SEQ ID NO: 293430 - protein, 453 aa, Zea mays
  Clone ID: MRT4577_3068C.1.pep
PCNCRELPGSVVDGYDVFKKQIAQTALLSADTGLLPVSTAIGFDERMLLHSELEVKPNPHPERPDRLRAIAASLAAAGIFPSKCALVPPREITKEELLMVHSPDHIESVEQTKNMLYSYFTSDTYANGHSACAAKLAAGLCADLASLIVSGRVRNGFALVRPPGHHAGVKQAMGFCLHNNAAVAALAAKRAGAKKVLIVDWDVHHGNGTQEIFDGDKTVLYISLHRHEDGNFYPGTGAAHEVGVLDGQGFSVNIPWSRGGVGDDDYIFAFQTVVLPIASEFAADITIISAGFDAARGDPLGCCDVTPTGYSWMTSLLAGSSNGRLLVILEGGYNLRSISSSATEVVKVLLGEGPNRASFVVSPSKEALSTVSQVLKIQQQFWPVLGPTYASLQAQQGSVSSNHSNELKKRKRPGGGPGPFWWKMGSKRLLYEALIEPRSRPRKLKGSTGSAAP

SEQ ID NO: 293431 - protein, 419 aa, Zea mays
  unsure (1)..(419): unsure at all Xaa locations
  Clone ID: MRT4577_30690C.1.pep
MDDAGRPPPHAPVAVTASASASATAAPAPPQPSATAAVDRSSPDPDALYEEGMWQQMAMDSGATMQPGSYPERPGEPDCTYYLRTGLCRFGMSCRFNHPPDRNLAIASARMKGEYPERAGQPECQYYLKTGTCKFGPTCKFHHPREKAGIAGRVQLNTSGYPLRPXHCKYANTCKFHHPELFNVVPSSRGSPIYTSVHSSASAGPQSYTGTMPSWAFPRASFIPSPRWQSPSNYAPMIVPQGLVQMPSWNSYTGQLQSPGAQQTYGSSQQGEASTGNQGMLSPYRSSSFPVPQYALQRENVFPERPDEPECQYYMKTGDCKFGAVCKFHHPRVRSLPPPDCVLSPMGLPLRPGEELCKFYSRYGICKFGANCKFDHPTVVAPMVYAYGFSASASPASASTNVPMARRLLGSPPGSGYTS

SEQ ID NO: 293432 - protein, 80 aa, Zea mays
  Clone ID: MRT4577_30691C.1.pep
RAAKHPLAFIPFGLGARACIGQNLARLEAQLTVAVLLQRFEMRASPNYVHAPTVLMLLYPQYGAPVIFRPRRPARPAAAS

SEQ ID NO: 293433 - protein, 397 aa, Zea mays
  Clone ID: MRT4577_30692C.1.pep
MDDAGRPPPHAPVAVTASASASATAAPAPPQPSATAAVDRSSPDPDALYEEGMWQQMAMDSGATMQPGSYPERPGEPDCTYYLRTGLCRFGMSCRFNHPPDRNLAIASARMKGEYPERAGQPECQYYLKTGTCKFGPTCKFHHPREKAGIAGRVQLNTSGYPLRPNEKECAYYLKTGHCKYANTCKFHHPELFNVVPSSRGSPIYTSVHSSASAGPQSYTGTMPSWAFPRASFIPSPRWQSPSNYAPMIVPQGLVQMPSWNSYTGQLQSPGAQQTYGSSQQGEASTGNQGMLSPYRSSSFPVPQYALQRENVFPERPDEPECQYYMKTGDCKFGAVCKFHHPRVRSLPPPDCVLSPMGLPLRPGEELCKFYSRYGICKFGANCKFDHPTVVAPMVYA

SEQ ID NO: 293434 - protein, 319 aa, Zea mays
  Clone ID: MRT4577_30693C.1.pep
MSCRFNHPPDRNLAIASARMKGEYPERAGQPECQYYLKTGTCKFGPTCKFHHPREKAGIAGRVQLNTSGYPLRPNEKECAYYLKTGHCKYANTCKFHHPELFNVVPSSRGSPIYTSVHSSASAGPQSYTGTMPSWAFPRASFIPSPRWQSPSNYAPMIVPQGLVQMQSWNSYTGQLQSPGAQQTYGSSQQGEASTGNQGMLSPYRPSSFPVPQYALQRENVFPERPDEPECQYYMKTGDCKFGAVCKFHHPRGEELCKFYSRYGICKFGANCKFDHPTVVAPMVYAYGFSASASPASASTNVPMARRLLGSPPGSGYTS

SEQ ID NO: 293435 - protein, 133 aa, Zea mays
  Clone ID: MRT4577_30694C.1.pep
RRRCGEKTDSIVCGPESSMQGLLGCMESKPEKSCTRQVLKPTSVQICIILLCKKHLYLVLCWGLGPAPQQICKIDVWLGFRPEKMYILWIDKQKPDHFDPFIPSRHMTETFLEWGACSPERTSALCWISSVYR

SEQ ID NO: 293436 - protein, 415 aa, Zea mays
  Clone ID: MRT4577_30695C.1.pep
PPPPPPPATAAPAPPQPSATAAVDRSSPDPDALYEEGMWQQMAMDSGATMQPGSYPERPGEPDCTYYLRTGLCRFGMSCRFNHPPDRNLAIASARMKGEYPERAGQPECQYYLKTGTCKFGPTCKFHHPREKAGIAGRVQLNTSGYPLRPNEKECAYYLKTGHCKYANTCKFHHPELFNVVPSSRGSPIYTSVHSSASAGPQSYTGTMPSWAFPRASFIPSPRWQSPSNYAPMIVPQGLVQMPSWNSYTGQLQSPGAQQTYGSSQQGEASTGNQGMLSPYRSSSFPVPQYALQRENVFPERPDEPECQYYMKTGDCKFGAVCKFHHPRVRSLPPPDCVLSPMGLPLRPGEELCKFYSRYGICKFGANCKFDHPTVVAPMVYAYGFSASASPASASTNVPMARRLLGSPPGSGYTS

SEQ ID NO: 293437 - protein, 296 aa, Zea mays
  unsure (1)..(296): unsure at all Xaa locations
  Clone ID: MRT4577_30696C.1.pep
VESPRVRAIASARMKGEYPERVGQPECQYYLKTGTCKFGPTCKFHHPREKAGIAGRVQLNTLGYPLLPXVFSCQLHVLFYICLFVLLKRSLLYFXNEKECAYYLKTGQCKYANTCKFHHPELFNVVPSSRGSPIYTSVHSSASAGPQSYTGTMSSWTFPRASFIPSPRWQSPSNYAPMIVPHGLVQVPSWNSYPGQLQSPGAQQTYGSSQQGEASAGNQGMLSPYRSSSFPVPQYALQRDNVFPERPDEPECQYYMKTGDCKFGAVCKFHHPRVRSQPPPDCVLSPMGLPIRPVCC

SEQ ID NO: 293438 - protein, 135 aa, Zea mays
  unsure (1)..(135): unsure at all Xaa locations
  Clone ID: MRT4577_30697C.1.pep
ELGKYDVVFLAALVGMXXEDKAKVVAHLGRHMADGAALVARSAHGARAFLYPIVDPEDIRRGGFDVLTVYHPDNEVVNSVIIARKMDAHAKGLQNGHAHARGTVPIVSPPCKCCKVEANTLQKREEMATMTELSI

SEQ ID NO: 293439 - protein, 67 aa, Zea mays
  Clone ID: MRT4577_30698C.1.pep
RDYEKTHKETGFKKKKKILGARPPPSKGPQKTPALNSPLQKKKIIFGKIWAGGFTPPTHFLPPRGGP

SEQ ID NO: 293440 - protein, 327 aa, Zea mays
  Clone ID: MRT4577_30699C.1.pep
MEAQNVEVAALVQKIAALHAHIAKLPSLSPSPDANALFTSLVMACVPPNPVDVTKLSPDVQGMREELIRLCSDAEGHLEAHYADMLAAFDNPLDHLGRFPYFSNYIDLSKLEFDLLVRYIPGLAPSRVAFVGSGPLPFSSLVLAARHLPNTLFDNYDRCAAANDRARKLVRADKDLNARMSFHTVDVANLTDELGKYDVVFLAALVGMAAEDKAKVVAHLGRHMADGAALVVRSAHGARGFLYPIVDPEDIRRGGFDVLAVYHPDNEVINSVIIARKMDAHAKGLQNGHAHARGTVPIVSPPCKCCKMEANALQKREEMATTTELSI

SEQ ID NO: 293441 - protein, 51 aa, Zea mays
  Clone ID: MRT4577_3069C.1.pep
CNLLRANHQLSCVKKKKKKKKKKKKKKKKKKKKKKKKKKNKKGRSYFIETS

SEQ ID NO: 293442 - protein, 285 aa, Zea mays
  Clone ID: MRT4577_306C.1.pep
MENPWVIRTSYCSEEEGFPHLLRSCALHLGIRKKPEYVWKEYRENGMEKCSMAVYLGESRNYPNHPPFQITFIGHRFPDTCQSVARKALKQLCQNYGREIFETPLRYFPPSNKNTPTWKKRLQALSGGDPIEDDPTIVYMAGYLHTLDNHYDELSSHCTHLNSRVEFLEQQVKELTQEKVSLQESLSIAEDEEANTREAYRTLKSDFDKKLKALAPKKKIQKKTTNQGCQTEKKKKKAPLALPPPRIDDWSDEEDVSLASLDDLLKAFGDTLDKELASTSKNALV

SEQ ID NO: 293443 - protein, 166 aa, Zea mays
  unsure (1)..(166): unsure at all Xaa locations
  Clone ID: MRT4577_30700C.1.pep
PPRGAPPPPGGPTMRGAHQKIQPPPPAPGGEEKRPPGPITGEAFPXPPKPEASFSPPPGPGVPGPPPXPPRGCRPPPRWPKGPSGQNLCPXPAPPKARVKKTPRAPPGGPKPXLRFPGGGVPCSFWPAGPLGPPPKRCVGGGVLLVCFYFSQFVSPWVGWSRPVCF

SEQ ID NO: 293444 - protein, 66 aa, Zea mays
  Clone ID: MRT4577_30701C.1.pep
PQYLTFQSNINKIKERLIFHSNVTFQYATHNLLIIPDHIYSIITAPTYPKTILQFSYIYNIYTSNS

SEQ ID NO: 293445 - protein, 138 aa, Zea mays
  unsure (1)..(138): unsure at all Xaa locations
  Clone ID: MRT4577_30702C.1.pep
MIGLTWNCQGLGEKSKFEFLKELIRDEKVEFIGLQXETNKKQCSDPWLASIGGSKLYXWFSSPLNGKSGGLLVGFNSEVFDVRDHEAGEFMILTLVXCTRKRISSRIXINVYGAAQNENKSRFLCEFLSFCSRSQVPL

SEQ ID NO: 293446 - protein, 170 aa, Zea mays
  unsure (1)..(170): unsure at all Xaa locations
  Clone ID: MRT4577_30703C.1.pep
LRWVXSRDHWHKRRATGGKRKPIRKKRKFELGRPAANTKLGARRIHTVRTRGGNKKYRALRVDTGNFSWGSECCTRKTRVIDVVYNASNNELVRTKTLVKNAIVVIDATPFRQWYESHYALPIGRKKGAKLTEQEEAMLNKKRSKIVDRKYKARQRLAKVEPALGEQFQT

SEQ ID NO: 293447 - protein, 61 aa, Zea mays
  Clone ID: MRT4577_30704C.1.pep
KNTLYGNIIFFFLGHYNPGVCYFAKKIHWGPKKQGQQPPQIKPFSSLHPGKQPNPLFFTGG

SEQ ID NO: 293448 - protein, 91 aa, Zea mays
  Clone ID: MRT4577_30705C.1.pep
SHLGVQKPHADLKQLYFILSENKKEGERNPNIRTQYPRICKTSGREIKMIPIQRFRMEASRMRKRQASAPFNMAATDSLNLGNIALNLDAR

SEQ ID NO: 293449 - protein, 182 aa, Zea mays
  Clone ID: MRT4577_30706C.1.pep
MCDLVARTGRHLQRYENGRRLVAGCIPFRYRDINDGASDDEQKKLVEVLMISSQSGPGLLFPKGGWENDETVEEAAAREAIEEAGVRGDLVQLLGFYDFKSKQPEATCRAAIFALHVKEELASWPEQSTRQRSWLTVPEAAERSRYPWMQEALVTGFSAWLENWRNGGGGGGGGGCVDRTER

SEQ ID NO: 293450 - protein, 64 aa, Zea mays
  Clone ID: MRT4577_30707C.1.pep
KKKKKKKKKKKKKKKKKKKKKKKKKKKKKKKKKKKKKKKKKKFFFLAGTPLGGIFEIFFKIGGG

SEQ ID NO: 293451 - protein, 54 aa, Zea mays
  Clone ID: MRT4577_30708C.1.pep
SLNISYQHLLFYIIIAFNYASMVFLYGCLFPYLTPNHNSCYIPRISRLFLHRPH

SEQ ID NO: 293452 - protein, 154 aa, Zea mays
  Clone ID: MRT4577_30709C.1.pep
RCIPFRYRDINDGASDDEQKKLVEVLMISSQSGPGLLFPKGGWENDETVEEAAAREAIEEAGVRGDLVQLLGFYDFKSKQPEATCRAAIFALHVKEELASWPEQSTRQRSWLTVPEAAERSRYPWMQEALVTGFSAWLENWRNGGGGCADRTER

SEQ ID NO: 293453 - protein, 618 aa, Zea mays
  Clone ID: MRT4577_3070C.1.pep
MRPPSSGKKTEVSHSVGKCGVSDQACHGKCQSCGIDAKPFCAGVNEVSLLTGSHTDVEASKENRGACSLNNDRADALEEEANVSTARIGHVESADPGGSVGVEKEIFMAVNEESEGEQAGATLEDLFFFNGEEDDDSDWEPASRLVVNRWFCLNCTMPNVDKITYCMNCRELPGSVVDGYDVFKKQIAQTALLSADTGLLPVSTAIGFDERMLLHSELEVKPNPHPERPDRLRAIAASLAAAGIFPSKCALVPPREITKEELLMVHSPDHIESVEQTKNMLYSYFTSDTYANGHSACAAKLAAGLCADLASLIVSGRVRNGFALVRPPGHHAGVKQAMGFCLHNNAAVAALAAKRAGAKKVLIVDWDVHHGNGTQEIFDGDKTVLYISLHRHEDGNFYPGTGAAHEVGVLDGQGFSVNIPWSRGGVGDDDYIFAFQTVVLPIASEFAADITIISAGFDAARGDPLGCCDVTPTGYSWMTSLLAGSSNGRLLVILEGGYNLRSISSSATEVVKVLLGEGPNRASFVVSPSKEALSTVSQVLKIQQQFWPVLGPTYASLQAQQGSVSSNHSNELKKRKRPGGGPGPFWWKMGSKRLLYEALIEPRSRPRKLKGSTGSAAP

SEQ ID NO: 293454 - protein, 146 aa, Zea mays
  Clone ID: MRT4577_30710C.1.pep
KSKQPEATCRAAIFALHVKKELASWPEQSTRQRSWLTVPEAAERSRYPWMQEALVTGFSAWLENWRNGGGARRRAWTELRDDTTLKHQGAPRAEKPSASYFLALYLAWTRIFFQRLTAAYMHEGSLMLGSFCLLCRFITQDDSLLS

SEQ ID NO: 293455 - protein, 47 aa, Zea mays
  Clone ID: MRT4577_30711C.1.pep
QRRVLFFFFFFFFFGTHLRVSMWYLILVKWLYQTRSEGLTGYSDLSV

SEQ ID NO: 293456 - protein, 205 aa, Zea mays
  Clone ID: MRT4577_30712C.1.pep
PTRPPTRPPTRPDIANSWAGISRRITRSLSSSAAAVSLPCDAEEKRGARKVESSVAADVILATLVGKKRRKTWCRPKAREELPAAALGERGSSQKSDVGGGSVDHGAFQELCADAPVIQPGTKVVILCAESGVESRNNPTEGEEKEEVVEAATYRKQKRKIQENSEDICASAPSGISHRRTRKSSSSPAAVLLSPAVEKMEVADD

SEQ ID NO: 293457 - protein, 73 aa, Zea mays
  Clone ID: MRT4577_30713C.1.pep
TWFMKITSILEGKLYKMENIDYDGISMFESEEVRLDVLDWLWWYKFEFVDGLELNIVNPLFVEADSLRQLLGN

SEQ ID NO: 293458 - protein, 68 aa, Zea mays
  Clone ID: MRT4577_30714C.1.pep
NYSWHTRGKWDGPNRHSLIYSQGPRTPPSKQLVGHYTTQGLCMGVRGSLRDGMGAWEGSQILVEDLDA

SEQ ID NO: 293459 - protein, 251 aa, Zea mays
  Clone ID: MRT4577_30715C.1.pep
GRVTPHGAFAEYAIAHYYTTFHIPDSISYEEAATIPLAAYTSVCALFQELQLPDPWSPLAKLDEKRPLLVYGASTATAAFAIKLAAAANVHPIIAVGSQRSEFVKPFLDESKGDLLVDYTLHDTEDKLVAAIQDAIKKSGAPDGRCWVAYDSVSEDSTVRLVTKAIAGPPDANGRKPRMTNLLMKSNVEGVDPSVEIVHTKVSQVHEKNEKDQMLGLTWAAAFSRGLREGWLTAHPYIWKNGLQGLSESLP

SEQ ID NO: 293460 - protein, 137 aa, Zea mays
  Clone ID: MRT4577_30716C.1.pep
AMRGGQGRVSFRARRPLPLLTSLPPRAALPSAALPQRAPGEPAIQLHYLHIIEFLNASNEQTDVKKTKRMKNKKDSTRLKPRLSCNSVQNSGGLEDLSLTVYIVSFTRAYISLHWLLFLDLKFLLELLSGTLDSMMW

SEQ ID NO: 293461 - protein, 65 aa, Zea mays
  Clone ID: MRT4577_30717C.1.pep
PTGLPLLQITTIVTIQPVLFVGSCTCRGSNPSLQVPSFKLQMRCTRKWCPQTHVCFPKKIKILVA

SEQ ID NO: 293462 - protein, 154 aa, Zea mays
  Clone ID: MRT4577_30718C.1.pep
GPAAPKPKPAAAKPKAGTGAACHPPYFARIKEAITALNERTASSSKATAKYVRDKHRASLTANSKKMLSIQLLSSTHKGKLIKGKAPYKLSDAVMKASPKTKAKTTQADGAKTTRPKRAKAVAVKSNNAAIANPKKDVAAGTKHKVPEKKDKTK

SEQ ID NO: 293463 - protein, 75 aa, Zea mays
  unsure (1)..(75): unsure at all Xaa locations
  Clone ID: MRT4577_30719C.1.pep
PPPSSLGLLTAMLARRQRSLHLXEEGGAXXVHHRVSVVGAAWACMAIFCGGGGRRSRERERLFLRLQILMHHHLH

SEQ ID NO: 293464 - protein, 113 aa, Zea mays
  Clone ID: MRT4577_3071C.1.pep
EYKLFFFFFFFFFFFFFFFFFFYYLPPPGAAPKKKTTTPGAATKGPNLGTKKGGIKAKKNSPGKKISPHNNTQKKNRKNKKEKRGGPLKEETNNKRGGPKTRNPAGKKPGPPA

SEQ ID NO: 293465 - protein, 105 aa, Zea mays
  unsure (1)..(105): unsure at all Xaa locations
  Clone ID: MRT4577_30720C.1.pep
PLPPLSAKTNPTNPLTAYYPQPPPPFNLPPPLHFAASLQQPPLPLFIQLAXLSPASIFPQHHLXLPPHLHSSPNAATLLQLQHLLTFXQIPSTNPTTFYQQPIIG

SEQ ID NO: 293466 - protein, 101 aa, Zea mays
  Clone ID: MRT4577_30721C.1.pep
TQSPPLRVCVANALAAAAQISPPNGTPSLTIKYFLPYKCKIANEEILMALLVDPPDMGREMLIEMHHLLRRRHRRRRGRRIGRWTGARSILHRCPLYQSSM

SEQ ID NO: 293467 - protein, 68 aa, Zea mays
  Clone ID: MRT4577_30722C.1.pep
YWTDIVGGDGGLSERPSTGQSSGHAVCDADAAADGGGAGCISIYISLLMSGGSTNSAINITSLAILHL

SEQ ID NO: 293468 - protein, 77 aa, Zea mays
  Clone ID: MRT4577_30723C.1.pep
VDLLCEPFVIMRLSAEVDHLFGQGESTRVKESLTVVCKECSPVVALNQRSPKSARNFPEPGMILRSLRVRKGQLVKN

SEQ ID NO: 293469 - protein, 68 aa, Zea mays
  Clone ID: MRT4577_30724C.1.pep
RPLTTYTMFCISYHPRPMCGLVFCTGIPYCSFNKSLLLDFGFHNAHNKPSLWLQPRNFNIQHIQPYTP

SEQ ID NO: 293470 - protein, 131 aa, Zea mays
  Clone ID: MRT4577_30725C.1.pep
KKTKKKKKKKKKKHKQEKGITLYMKQPNIHFSNQSIYILFTSLTLFNTHLNLPSSHSFFPSYPYFNYPPSLSPFPTLAHPLLLLPLPPFLFLSPPLLVYFSRHYFPFLFSSSLLLFSSPSSPFSFLFSSTS

SEQ ID NO: 293471 - protein, 67 aa, Zea mays
  Clone ID: MRT4577_30726C.1.pep
EKEIARIPIDLNVNPGASIALPPEVSTQANPCFADVLRRNSEIQDNSKHIELKTDLVEHIWHRYGPK

SEQ ID NO: 293472 - protein, 30 aa, Zea mays
  Clone ID: MRT4577_30727C.1.pep
PPSIIMLSIVKIGGLAGTPRVYDGIHVTRV

SEQ ID NO: 293473 - protein, 154 aa, Zea mays
  Clone ID: MRT4577_30728C.1.pep
RSTRRPARPRRSDQGRADDARARDGRSRVDRAARARLSGVTAQGRRSIRILIHGEERSMSIFEIASWIALGTVPITALVTVVRSIYTGNWIWTRFLLLPVILTALLLCFDMTRPQPVTIVNLIAALPFLLAAFCLVNMLAGLCTGGLPETETIK

SEQ ID NO: 293474 - protein, 60 aa, Zea mays
  Clone ID: MRT4577_30729C.1.pep
GELIIFPRHHTLTTKRPLNKLELLGGDFLLGYLLFTRIRDDDGALTKRGADGAPTRIGPG

SEQ ID NO: 293475 - protein, 129 aa, Zea mays
  unsure (1)..(129): unsure at all Xaa locations
  Clone ID: MRT4577_3072C.1.pep
MDYFKKTPPPMGAPIPGPPQREPKKGPPQPGGAPPPRGXQKKKPGGGQQMVPPEKGPPPGGTPPRGKKKPGPPXGGPPQNPPPPIGXGNPRSKKAPGFPPPSGIKTGPNWGNNRGGRVVGPQTPTGGPK

SEQ ID NO: 293476 - protein, 101 aa, Zea mays
  Clone ID: MRT4577_30730C.1.pep
DHCLLSPCPQCLHNDLLKPMERKRKKRRRDEEGEGKPHPLLAWTSNSCRRPVMVCGKTKKIVNFICFLCKRNNIGTYGPFYDLNLYLHFLLCGENNNSSSS

SEQ ID NO: 293477 - protein, 69 aa, Zea mays
  Clone ID: MRT4577_30731C.1.pep
TFHILVGTLFLWYSTCFPTLKESSLFILGVKQNGSVLYFFHRTFKTYNIGTRKCRRINTNDADVHWHNT

SEQ ID NO: 293478 - protein, 96 aa, Zea mays
  Clone ID: MRT4577_30732C.1.pep
GTSATVGRRIASCSGGDHSSRRDGSLAWATATNRHGQRRRARQGSPSSPEHLSSSVGHRAATMLCKRRARRCDARLSCLGMEALTPSCQKSCSVCR

SEQ ID NO: 293479 - protein, 285 aa, Zea mays
  Clone ID: MRT4577_30733C.1.pep
MSGGGQAAVSFLTKVAKVAAGLGLTASAVSTSLYTVDGGQRAVIFDRFQGVLPAVVSEGTHFLVPWLQKPFLFDIRTRPHSFSSTSGTKDLQMVSLTLRVLARPDVERLPEIFTNLGLDYDDKVLPSIGNEVLKAVVAQFNADQLLTDRPHVSALVREALVRRAGEFNIVLDDVAITHLAYGHDFAQAVEKKQVAQQEAERSRFLVARAEQERRAAIVRAEGESESARLISEATAMAGTGLIELRRIEAAKEIAAELARSPNVAYIPSGENGKMLLGLNATGFGR

SEQ ID NO: 293480 - protein, 285 aa, Zea mays
  Clone ID: MRT4577_30734C.1.pep
MAGGPAAVSFLTNIAKVAAGLGAAASLASASLYTVDGGERAVIFDRFRGVLPETVGEGTHFLVPWLQKPFIFDIRTRPHNFSSNSGTKDLQMVNLTLRLLSRPDVQHLPTIFTSLGLEYDDKVLPSIGNEVLKAVVAQFNADQLLTDRPHVSALVRDSLIKRAREFNIILDDVAITHLSYGADFSQAVEKKQVAQQEAERSKFLVAKAEQERRAAIVRAEGESESARLISEATAIAGTGLIELRRIEAAKEIAAELARSPNVAYIPSGDNGKMLLGLNAAGFGGR

SEQ ID NO: 293481 - protein, 284 aa, Zea mays
  Clone ID: MRT4577_30735C.1.pep
MAGGPAAVSFLTNIAKVAAGLGAAASLASASLYTVDGGERAVIFDRFRGVLPETVGEGTHFLVPWLQKPFIFDIRTRPHNFSSNSGTKDLQMVNLTLRLLSRPDVQHLPTIFTSLGLEYDDKVLPSIGNEVLKAVVAQFNADQLLTDRPHVSALVRDALIRRAREFNIILDDVAITHLSYGIEFSLAVEKKQVAQQEAERSKFLVAKAEQERRAAIVRAEGESESARLISEATAMAGTGLIELRRIEAAKEIAAELARSPNVAYIPSGENGKMLLGLNATGFGR

SEQ ID NO: 293482 - protein, 176 aa, Zea mays
  Clone ID: MRT4577_30736C.1.pep
DPRGRPGRVEPLYKKVSFSFMIPTLIFLGVLYASVSARFIFFRIFDNTRHKNEHTVVGWGVWAAILLVTWIFAFIIAEVIPFFSDLLSLMSSLFDSFFGFIFWGVAYFRMRKVDGGLELVKQGNIRAILMAILNVAIILIGIFFLTAGTYASVQSIVDAFNAHQVGGVFTCVSNGL

SEQ ID NO: 293483 - protein, 83 aa, Zea mays
  Clone ID: MRT4577_30737C.1.pep
LSRYRNQLNIAYHDHTCATTSSLAVFRRLVVSRERGMPTRTAHLLGIHAASSPSMRFTIGDPVRFTIIVDRDLVPARPASRVP

SEQ ID NO: 293484 - protein, 90 aa, Zea mays
  Clone ID: MRT4577_30738C.1.pep
FKERSVPSLGGGLKNITFCPQKHFPMSKDLGSKTRGARKFPKTLLGGLYTRFSRPKNLRSFGYWMGAHPPICRFPFVHVGPDIWSPLSFV

SEQ ID NO: 293485 - protein, 34 aa, Zea mays
  unsure (1)..(34): unsure at all Xaa locations
  Clone ID: MRT4577_30739C.1.pep
SPXLSHKXFXPCXFLNTVTNNMSILFWRELVSSC

SEQ ID NO: 293486 - protein, 125 aa, Zea mays
  Clone ID: MRT4577_3073C.1.pep
TPYSPFTCPSCIMFPRVAFGLGTVISHQFLSTVLCACCRAHMCRMTRYAGPFFRDFFTADSDWLAGVCFLSWSIKLSTLLCLDLAADRRHSNCMTLASSPVNEIFISLSRRWDVGAGSVRRAQHA

SEQ ID NO: 293487 - protein, 66 aa, Zea mays
  unsure (1)..(66): unsure at all Xaa locations
  Clone ID: MRT4577_30740C.1.pep
GIIYRAKRCLXKKKKKKKKKKKKKKKKKKKKKKKKKKKKKKKSLKILKGQMLENTKNISSPIHYTV

SEQ ID NO: 293488 - protein, 70 aa, Zea mays
  Clone ID: MRT4577_30741C.1.pep
GREHLPPVEMPHDPKVVGYWRCAKAGERMVAGPPWAPAGPPGGPVHSGWCCSAQETAVPIQPLEQLALMS

SEQ ID NO: 293489 - protein, 49 aa, Zea mays
  Clone ID: MRT4577_30742C.1.pep
KGGFFLNPIPKKFGSKLGGGRWKKKSLMVRFAGPQKLLELAKVFLKCNF

SEQ ID NO: 293490 - protein, 103 aa, Zea mays
  unsure (1)..(103): unsure at all Xaa locations
  Clone ID: MRT4577_30743C.1.pep
GNAPTNLEQKFLHQIVPALNQLNVGNPVAFFQKVFPFNPLIIWKFFGGLPQRPQFFYPLAGGNPLGGAFLKKKKFLPXNRFFFINPFFWGQPPLVGGALFFFS

SEQ ID NO: 293491 - protein, 102 aa, Zea mays
  Clone ID: MRT4577_30744C.1.pep
LTKICDGILKLLETHLGPTSTDDQFNVFYVKMKGDCYRFLDVFKTGAVRQDAVLNTIVAYIAAHDIALAELATTHPIGLGLALNFSVFYYEILNAPDPHLHV

SEQ ID NO: 293492 - protein, 117 aa, Zea mays
  Clone ID: MRT4577_30745C.1.pep
YATCDGPDVAGASAVGSAVVSAAASAATAAGSPALGAAAARASGAPSAASAGRPSQVAAAAGAPGAFSTIPGVGSGPDSMLFNAPKSSTLSPRNACALAVSARSLTTSRPCRPHIRS

SEQ ID NO: 293493 - protein, 399 aa, Zea mays
  unsure (1)..(399): unsure at all Xaa locations
  Clone ID: MRT4577_30746C.1.pep
YATCDGPDAAGASAVGSAAASAVIFAATAAGSTALGAAAAEASGATSATSGGRPSPAAAATEAPDASPAVSGVGPRTGPGTASAGPGSGSDSTSFNAPKSSTLSPRAXSXAVSARSLTTSRPYAPHSRSXMAPADSFTTGSSTLKISRSKSSSAWSKTSKCRHPSWESAFIAPSQVTREAYDINPSTTVGSACNSSCTHSRQRSPASRSGTLNSPVPAPSSRYVSMSCLRVRSASARATASALSMRLSRAVSRSCSCSARSLAILPSARAILASACAAFSLARASLVSLLSPASWRRRSAFSFSNTATLSVSLRHLLSAADFSRTASACCVRSLSTSADTAAVRAPDAVRSAKSATAAKADASPPALRAPPFAFGTTAAVVVAATGATIASWPSSDPTR

SEQ ID NO: 293494 - protein, 117 aa, Zea mays
  Clone ID: MRT4577_30747C.1.pep
YATCDGPDVAGASAVGSAVVSAAASAATAAGSPALGAAAARASGAPSAASAGRPSPAAADAEAPGAFSAVPGVGSGSDSMSFNAPKSSTLSPRNACALAVSARSRTTSRPCRPHIRS

SEQ ID NO: 293495 - protein, 182 aa, Zea mays
  unsure (1)..(182): unsure at all Xaa locations
  Clone ID: MRT4577_30748C.1.pep
LLSGAGTREITSPPSPRLRNRDTTHTSAATAEGARLKKKRHPPQIRRAAAPWPSCGTPRRRPAPPVPHPSATPRPRPRPRPWSRPPASTAAXRPPPPAKVVTPAPLPLPPRAXTPGPPRLPPPTGFSSPQSPASRSLRSSSRLSSGHASSVLGSLIASSRIIFVTFHRDIRLAAYARAAAGP

SEQ ID NO: 293496 - protein, 206 aa, Zea mays
  unsure (1)..(206): unsure at all Xaa locations
  Clone ID: MRT4577_30749C.1.pep
TRPAMQPTELVDPYMQSLSATPSVKSECASPRNSGLFEELLHEPHALRSGKSQQPSVRSSSSSAGTPYGTMVSSEFDMGQEYWEEQPGSLLSEYAHFSGNYLAECAPPVSAASTDIFPLPKISPESPSMGSGEQALEPKHESAASRXHLGNLRHDALFSGNTAHSSSFNDTITMLIGDVPVLGDGIVLDSSSWDNMPHAFQMAEFK

SEQ ID NO: 293497 - protein, 96 aa, Zea mays
  Clone ID: MRT4577_3074C.1.pep
KIPRGKEFPFYQKTCFSFRKRKRTRSLYSRSCAERVALSLLDLSNLKRIIVTCPKKCIKSKWRCLPLRQMSAQESNLARPASKRTLIATLGVPVSS

SEQ ID NO: 293498 - protein, 161 aa, Zea mays
  Clone ID: MRT4577_30750C.1.pep
SKSSSDDSSIHSTELPESAQSKNSNADPPHSLPSSAVEAAKNLVVAVVCAGLKSGTCDGPDVAGASAVGPAAVSAVVPATTAAGSSALGAAAAEALGAPSATSGGRSSSAAADAGAPDASPAVSGVGSRATPGTASAGVGSRSDSMLFNAPKSSTLSPRAA

SEQ ID NO: 293499 - protein, 52 aa, Zea mays
  Clone ID: MRT4577_30751C.1.pep
APSPLGAGAALELVQQQGLGQRRGSRPLLAGVCSPRRPCCAASARWLPLLKE

SEQ ID NO: 293500 - protein, 102 aa, Zea mays
  Clone ID: MRT4577_30752C.1.pep
YATCEGPDAAGASAAGSAAVPAVVSTASTAGSPALGTAAAGASGAPSSTFGGRSSPAAAGVGAVSGVGSRATPDAASAGVGSGSGSALFSAPRSSTRSPRNA

SEQ ID NO: 293501 - protein, 100 aa, Zea mays
  unsure (1)..(100): unsure at all Xaa locations
  Clone ID: MRT4577_30753C.1.pep
NKIDRQVSFIQAPASCLLQNAYEYXEICDAPXLLIIFSNXRGKLYDFCNATIITNTLERYDKNSYGGPNTVALTNENELVQMTHNDYLKLKASVHNLHRT

SEQ ID NO: 293502 - protein, 147 aa, Zea mays
  unsure (1)..(147): unsure at all Xaa locations
  Clone ID: MRT4577_30754C.1.pep
AVWLAGSGCVLGXGPVVSGLSRLSLLWSGLCRCLPASSGPGAPAACXVGVVWSGSSVAVVLLLVGRGASRGRCGVVGXGALGAGLPSSSGXXLLLACVWLRLFRCAFLPGARVGGFALCLSGVCSVALVSCSRCXGSGSPRAPRVAG

SEQ ID NO: 293503 - protein, 424 aa, Zea mays
  unsure (1)..(424): unsure at all Xaa locations
  Clone ID: MRT4577_30755C.1.pep
TCDGPDAAGASAVGSAAASAVIFAATAAGSTALGAAAAEASGATSATSGGRPSPAAAATEAPDASPAVSGVGPRTGPGTASAGPGSGSDSTSFNAPKSSTLSPRAAXPSPSXRSLTTSXRTHPTAGRXAPADSFTTGSSTLKISRSKSSSAWSKTSKCRHPSWESAFIAPSQVTREAYDINPSTTVGSACNSSCTHSRQRSPASRSGTLNSPVPAPSSRYVSMSCLRVRSASARATASALSMRLSRAVSRSCSCSARSLAILPSARAILASACAAFSLARASLVSLLSPASWRRRSAFSFSNTATLSVSLRHLLSAADFSRTASACCVRSLSTSADTAAVRAPDAVRSAKSATSCSRRDAWLSASVTSANRRDAAPASSLTAAKADASPPALRAPPFAFGTTAAVVVAATGATIASWPSSDPTR

SEQ ID NO: 293504 - protein, 138 aa, Zea mays
  unsure (1)..(138): unsure at all Xaa locations
  Clone ID: MRT4577_30756C.1.pep
RYRVGEKRXXTXEXTXXGGEXAADATDHPXQETXRXXXPSAKGAKXXTEKXTTRTKXXGXXEXXEPTEQXRARTEKKGRXXXXRXXXXXXAARRKNTGGXGQERXPXXQGAQXEKDPNNTTIFVGGQDPKVTEDTLKQ

SEQ ID NO: 293505 - protein, 57 aa, Zea mays
  Clone ID: MRT4577_30757C.1.pep
RQDRYLTISEKSDIVVAVIKSSRIRQRDLTWGYDVMKGIYRYMLSGVYICHLKVTGS

SEQ ID NO: 293506 - protein, 67 aa, Zea mays
  Clone ID: MRT4577_30758C.1.pep
PTVVTPGTDLYELCKTGSYSNYPPELLERHCGKIPGFGPTLDSSAFGHQTIMLCLLLPYGDSKAYLS

SEQ ID NO: 293507 - protein, 201 aa, Zea mays
  unsure (1)..(201): unsure at all Xaa locations
  Clone ID: MRT4577_30759C.1.pep
GTKEIPMXFCLWSTGVAQTDFCKRLAAKLDGQNNRHALETDTHLRLHGAPLGDVYAIGDCATVQNNVSDHIVNFLRTTAWEKGKDPESLHISYSDWRGIAKRVKQRFPQASNHLRRLDKLFEQYDKDKSGTLDFGELRELLFQIDSKLTSLPATAQRANQQGEYLGRKFNKIAQAAPGMALNNVDYGDLDDAVYRAFEYKH

SEQ ID NO: 293508 - protein, 57 aa, Zea mays
  Clone ID: MRT4577_3075C.1.pep
NTLFYKGLQFNIGGNNCLKRFPPLNKGGMDNNTCRRAHSFKKGRAIRLGIGLPGAMP

SEQ ID NO: 293509 - protein, 128 aa, Zea mays
  Clone ID: MRT4577_30760C.1.pep
RTLLDKEEWSRTQLSFSELLLSIFNLWCSGLLDHLLVHGVQAVARASLDEVRTHVGGQRRSAIPGISDLESARHRHKHVCRSPAKLLGTTLGWNGDMTPCQQWRPGLPSLRPLSLSLSPPTTATDVVV

SEQ ID NO: 293510 - protein, 233 aa, Zea mays
  unsure (1)..(233): unsure at all Xaa locations
  Clone ID: MRT4577_30761C.1.pep
MLRVQRVQICLSTKQSDACHHPSFLLEGFLMEPMITVSETSLPNMVRLMTSKFFVIGISYQTDFHSLRDEFAKYGQVIEXSCPLLHLPWLYFLLTSYASICPARIIIXDDESGRSRGFGFVTYTSSEEASAAITALDGKTLDGRSIRVNHANEKTGGFRGGGGYGGGGYSGGGGYGGGGGGYGGGGGYRGGGGGRGAQVTGAGGAQTSLARVHAAAAWSEATSRRRGSASATS

SEQ ID NO: 293511 - protein, 208 aa, Zea mays
  Clone ID: MRT4577_30762C.1.pep
MAAPPVAAALSALHEAQETHGHDDSRAGHARGHWRPAEDAKLKDLVALYGPKNWNLIASKLHGRSGKSCRLRWFNQLDPRVNRRPFSAAEEQRLVAAHRAHGNKWALIARLFPGRTDNAVKNHWHVLTARRQRERTGAPPRRRKPSSSSPAAHHHRAPSPLPFCAGKATRPRSVRRRRRRRRVRRVRVVHLLRRPLLPRLRVRPRRPL

SEQ ID NO: 293512 - protein, 67 aa, Zea mays
  Clone ID: MRT4577_30765C.1.pep
ADLELFVGELFFGGKKSKVLYFYQWKNPQNRGIFISLPKSFWEVNYPPVFPPPYVPSPGVCILIPYG

SEQ ID NO: 293513 - protein, 87 aa, Zea mays
  unsure (1)..(87): unsure at all Xaa locations
  Clone ID: MRT4577_30767C.1.pep
CENQMVQPYSTQRAMNGSIXLDHPRHLQQPSALLQNVPSVALCVTQNIKAQQLQQLVLGNLAGYSQQQQLIAFNQLAELNSSSYLVQ

SEQ ID NO: 293514 - protein, 48 aa, Zea mays
  Clone ID: MRT4577_30768C.1.pep
TTLYERWSTFGSTYLAMWTNRPDVFLGMITCGTWAAPIVMELTAIPEA

SEQ ID NO: 293515 - protein, 96 aa, Zea mays
  Clone ID: MRT4577_30769C.1.pep
ILGATTLTNATAGPFCPGGEHSTHTRNAVPAQSQIPRQLIMARPGIVGACVARPLLLVLSAARAARRDAANAADSDFLLKFCRTTQHLSVCKESLA

SEQ ID NO: 293516 - protein, 67 aa, Zea mays
  Clone ID: MRT4577_3076C.1.pep
GYIQAVRFLQFLGKRGGLNKILKGPCHCCFPRWVVVAPAPPKFWWLVGNFRYAFFEAFRTNGVEMGS

SEQ ID NO: 293517 - protein, 581 aa, Zea mays
  unsure (1)..(581): unsure at all Xaa locations
  Clone ID: MRT4577_30770C.1.pep
MHAYVSSEFGSSVNWEIDASETQTTIPGSSEVQNDHAGKRTSTVDDSSSSCSSDSVPSVTVNGSYKGGXLDKRQILMRFRGNNRRNKDTEARAGFAQGGSCSSHNGFIGSGSNASGHSKERHEPEDDKVVLQRKQHAQWNIDIISSSKSRMAESSFSSVSSIKKQPQPNFLLESTNSLNHRGSEASGTVTSTTTAGASSTPATQLVLNKGPVSSAATQNEKPLPLQVLVPSKSEVQKQASLTGSATTEAFSVSRPLTAPQVPAAKQSAPVTSTAQNAPFLSRSMSAVGRLGNEPSANAPSFVPRSRTYRNAMMEKSSGGGSCFTHQQGSSEQAVAPWQSMFTSQPFIRPSETLSWKEETLLRSGFTFGTVKPESLNPYQGREENSQQASSNSSDCAPSSSNIRSEIEKLNLSGRPRSKQLLSEISTRFTPYQPQGLVADEFPHLDIINDLLDEEQSDRRRVLQPDFVQQSYMPHGASTPDYGEPYLFDQSEQYFDEEPPRFYSPLSSAPRRLRDLSYSHFDLPSHSSSSQFDDLMMSQWPYSRTDISMPSFGSDTSGYPYQVWDLANGSSRYPSYRPANGH

SEQ ID NO: 293518 - protein, 66 aa, Zea mays
  Clone ID: MRT4577_30771C.1.pep
HRRISLVNLGCTLPGMSKRNPNSLIVPKSRLPELYFKPKKASQVNFAKLSVKNMEVSRLTTEVVCF

SEQ ID NO: 293519 - protein, 92 aa, Zea mays
  Clone ID: MRT4577_30772C.1.pep
PPNARSCFKFQKFLNCRPKLTNPPFFAGASFYCYANPWGPPLFVSPPLFRGLAPLGVKKLGPPPPPFFGPCSKIVPCSLLGPHPLPNFCFWP

SEQ ID NO: 293520 - protein, 50 aa, Zea mays
  Clone ID: MRT4577_30773C.1.pep
DSLQKGLCLFLIKKRLHIQTYFFHIFSSRGQHISRWQWHLEHSCQLNMVL

SEQ ID NO: 293521 - protein, 232 aa, Zea mays
  unsure (1)..(232): unsure at all Xaa locations
  Clone ID: MRT4577_30774C.1.pep
PPPYPPPPPPPGPPPPXPPPPPPXSRPPSSPPPRXPPPPPSPPKACLSPXPPPPGRSPPPKVLPGINPPPAVFPAPGGQAPXGGRPSPSSPPPPPPRGPTXGPGGAPPTPPPSPFXPPPDKIRLGGRAHCGRHPXFPGGFPPSPGXPAPLGSRRPEGGPSPSPSPPGPPQWGRNPLPAFFFFFGKGRFWPPCFLSPYNPSTKNLKRIGGPPHPHIWGASKKTATLIQRGGVT

SEQ ID NO: 293522 - protein, 64 aa, Zea mays
  Clone ID: MRT4577_30775C.1.pep
LIYSITVIFNRLMCCQLVTDEAWRPLMTTPNYGAHTIVDTPTSNSAAQVSYDRDYKETCGTHVL

SEQ ID NO: 293523 - protein, 100 aa, Zea mays
  unsure (1)..(100): unsure at all Xaa locations
  Clone ID: MRT4577_30776C.1.pep
MFSGCAFSPSKAPSSLPKAYPSPNLFFFGLIKLTTIEGLIHSFXEFGELLHAPVLTDLVIWFSNGFCFVMGSTXLRWTQWNIMXKDGNFLYGWLIFFGIP

SEQ ID NO: 293524 - protein, 77 aa, Zea mays
  Clone ID: MRT4577_30777C.1.pep
AAAQVCASDDASCPCQRGERQTNERQPFWHLGRRQRLVEPQASSAWQLGEEQDLYQQPHARTARRPRLICPLHARVG

SEQ ID NO: 293525 - protein, 101 aa, Zea mays
  Clone ID: MRT4577_30778C.1.pep
AVGTIVLVEPGGACTTGFQFSRQLVCRSGPRSAVGEGSSTHPARIAGDPGQIEYLSAQRVWVFLADCCLRPRFSGRSRSRAVEASLHAVRPGVRACVGGRV

SEQ ID NO: 293526 - protein, 51 aa, Zea mays
  Clone ID: MRT4577_30779C.1.pep
LSEYGVGTAPCPTITDGSQAWSNDRPSRMTIGPPPRRSYPRPSPSPRAIRG

SEQ ID NO: 293527 - protein, 77 aa, Zea mays
  Clone ID: MRT4577_3077C.1.pep
RYLTCRVAPMRSQKPDNTRSGRSGEATAAQSTVADKRCEGTAAVAALAERPRSIRRQNILAAIVVHYCAFYVASWSQ

SEQ ID NO: 293528 - protein, 237 aa, Zea mays
  unsure (1)..(237): unsure at all Xaa locations
  Clone ID: MRT4577_30780C.1.pep
MATTAADATAAVPKEQQPANGSAAATTGGEQVTRHSEVGHKSLLQSDALYQYILETSVYPREHECMKELREITANHPWNLMTTSADEGQFLNMLLKLIGAKKTMEIGVYTGYSLLATALAIPDDGTILAMDINRENYELGLPCIEKAGVAHKIDFREGPALPVLDALLEDEANHGTFDFVFVDADKDNYLNYHERLMKLVKVGGLLGYDNTLWNGSVVLPXDAPCAVHRYYATRLEL

SEQ ID NO: 293529 - protein, 109 aa, Zea mays
  Clone ID: MRT4577_30781C.1.pep
MNVGLFCSSSNNMTVPNCSHLHNFYSDVAFFITSQVGTVTAICVTCFLIRCVVVALSAFDADVSLEVLDHPVLDFFYYMFAEILPSALVLFVLRKLPPKRVSAQYHPIN

SEQ ID NO: 293530 - protein, 72 aa, Zea mays
  Clone ID: MRT4577_30782C.1.pep
GVVGSLWWRLLLPSDPVDLFCRVAAISGVWYGSERCTIRESWVYRRWMSFPPIVGAWWFLFRRLKCIVYQPR

SEQ ID NO: 293531 - protein, 64 aa, Zea mays
  Clone ID: MRT4577_30783C.1.pep
VVDPKNRDALPLPGPVHGAASPAPPPAGAFAAAANNHTAGRKVEMKQHAWLLYQKIKKRKRRPS

SEQ ID NO: 293532 - protein, 101 aa, Zea mays
  Clone ID: MRT4577_30784C.1.pep
RAFTGRVLFLVKAGVLLGRACRTGLMAIKLGGQKKKCVARGIQVGGKGRVFKKEKAVNFCYIKFIFRCLYSLVYLFACMSTPPCFFLYGLPIIYFFFFFFF

SEQ ID NO: 293533 - protein, 134 aa, Zea mays
  unsure (1)..(134): unsure at all Xaa locations
  Clone ID: MRT4577_30785C.1.pep
MRDVNPEEGTKDYSFLLMSSDKMELPERVDIVNTARXKELPPYDTDWNYIKSAFIARNIYVXKDMAVFAFXKNYIVSDRNGSRPPHFYKSSGDGAHDLLHQLYMIGILHDHPKGVRLITNQRRHHLNQVPGNRA

SEQ ID NO: 293534 - protein, 62 aa, Zea mays
  Clone ID: MRT4577_30786C.1.pep
PTRPPTRPARRRPRLASRHVTMSRRRQRCCKRCERSICSTTTARIRTGSRTRGSLRNVPQTR

SEQ ID NO: 293535 - protein, 148 aa, Zea mays
  Clone ID: MRT4577_30787C.1.pep
MASKRILKELKDLQKDPPTSCSAGPSGEDMFHWQATIMGPPDSPYAGGVFLVNIHFPPDYPFKPPKVSFKTKVFHPNINSNGSICLDILKEQWSPALTISKVLLSICSLLTDPNPDDPLVPEIAHMYKTDRSKYETTARSWTQKYAMG

SEQ ID NO: 293536 - protein, 47 aa, Zea mays
  Clone ID: MRT4577_30788C.1.pep
VFCSIDHKFELMYAKRDFEHWYLGDGMEEGEFSEAREDLAALEKDYE

SEQ ID NO: 293537 - protein, 80 aa, Zea mays
  Clone ID: MRT4577_30789C.1.pep
ARLPGPGTYWVDRRMRSQCRRSRPLHTPGRLVPCFRSWHVSLGRGVSLRAYGRECCHGRKKRPRGAERPRRGKRLVQTRP

SEQ ID NO: 293538 - protein, 77 aa, Zea mays
  Clone ID: MRT4577_3078C.1.pep
KFGMFVLVDGSKCSPIRAQSCMIVSSADVLLRMSFLIRVCISQYATEIITNNNTIFLSVLRLSIIIWPLKVNRLQDQ

SEQ ID NO: 293539 - protein, 48 aa, Zea mays
  unsure (1)..(48): unsure at all Xaa locations
  Clone ID: MRT4577_30790C.1.pep
ARNSARSGWEASYFELVTSHASGVRFKGXSALMPTTGDIGTVIEDLTT

SEQ ID NO: 293540 - protein, 81 aa, Zea mays
  Clone ID: MRT4577_30791C.1.pep
SAAADGAGCRWPCARRKGVAERGGPDDQDQVRALDPGGQVRPCRLHQMKLSVLPDLGARALLSLTYVSGLPASFGPDTLLW

SEQ ID NO: 293541 - protein, 102 aa, Zea mays
  Clone ID: MRT4577_30792C.1.pep
MVGASARPSAGRDGGPETALPKLQLLPCWLDGAVVKLVAADGDGDDLLAGSASSGKRRPTAQAAAGLARGVKALLSEVAEMIRTKFGRSIPAAKFGHVAYIR

SEQ ID NO: 293542 - protein, 90 aa, Zea mays
  Clone ID: MRT4577_30793C.1.pep
FSWQPNAPVPYFRATHKTLLDLDPRVVHSNDADASTGIAAVEQESGFDGLQVDPRHETEFRYVKEIFRKSSFSTETLFDEWCSQNISVLQ

SEQ ID NO: 293543 - protein, 160 aa, Zea mays
  unsure (1)..(160): unsure at all Xaa locations
  Clone ID: MRT4577_30794C.1.pep
MGNCGTREENAVVAAHAQVQQVHLLQHSDKNALADRKHTRTSSDVSDPPTPRKIEDAKNISIYNNVIAFTLFELETITKSFRADYVLGEGGFGTVYKGYIDENVRVGLKSLPVAVKVLNKDGHQGHREWLTEVNFLGQLRHPNLVKXLMGYCCEDDHRLL

SEQ ID NO: 293544 - protein, 474 aa, Zea mays
  unsure (1)..(474): unsure at all Xaa locations
  Clone ID: MRT4577_30795C.1.pep
MGKLAARLRAFSRNRWLVLVAAMWVQSMAGIGYLFGAISPVLKARLGYNQRQLAALAVAKNVGGYVGVVAGTLSAALPAWAMLLMGAAQNLLGYGWLWLIVTGQAPPLPLWMARASDRASFVFVYAVCLLLASYLAGVKLVQDFLQLSDGVVVSLTVVLLVLLISPVAVPVALTLTPEAECPIREALLSSSEPLTGEGNASQESPPCASESGGRPAPYLGENFTMMEALVKADFWLIWVSFLLGSGSGLTVMDNLGQMSQALGFEDAHIFVSLTSIWNFLGRIGGGYFSEIIARQRAYPRHIALAFAQVLIAAAHFLFAMAWPGTIYIGTFLVGLGYGAHWAIVPAAVSELFGIKHFGAMYNFLALANPTGSLVFSNLITSTLYDYEAEKQARQRRRRVMAELLASSPRSLHSAGLFAGAVVEEEDXIKCEGPACFLVSSLIMSVLCVVGAGLSLVTVHRTRRVYARLYRSVRT

SEQ ID NO: 293545 - protein, 76 aa, Zea mays
  Clone ID: MRT4577_30796C.1.pep
ARQPGLSSVGTRQCCAPPDRDSRSVSSPCGRFIWRSLSPLVAWAALAVAFALAIHQYVLSGSVYSVVATSSVATVL

SEQ ID NO: 293546 - protein, 233 aa, Zea mays
  Clone ID: MRT4577_30797C.1.pep
MGKLAARLRAFSRNRWLVLVAAMWVQSMAGIGYLFGAISPVLKARLGYNQRQLAALAVAKNVGGYVGVVAGTLSAALPAWAMLLMGAAQNLLGYGWLWLIVTGKAPPLPLWMMCVLIFVGNNSATYFNTASLVTCVQNFPASRGPMVGILKGFLGLTSAILTQVYAVTRATDQASLILIIAVGPSLVAVAVMLVVRPVGGHLQARASDRVSFVFVYAVCLLLASYLAGVKLVQ

SEQ ID NO: 293547 - protein, 125 aa, Zea mays
  Clone ID: MRT4577_30798C.1.pep
IGGSLGSIASYLHNMPCAGKELGETSERLYGSSLYRISHWLTPPLQSSVLRIIIYPSRFNPEEATVVIYPTVHTLIFDFHTSKEMMLQINRRKRHHSSITSPQPTNDILLRTRKHSNRHLMRHLR

SEQ ID NO: 293548 - protein, 74 aa, Zea mays
  Clone ID: MRT4577_30799C.1.pep
GVYFASELVAGTMCFVRNDRPDVSCLNHTLADRLRRLLKDHYGSPVPRMLDMRESLILHVRKQGELDGCRRANI

SEQ ID NO: 293549 - protein, 480 aa, Zea mays
  unsure (1)..(480): unsure at all Xaa locations
  Clone ID: MRT4577_3079C.1.pep
VLWPRLVANKLFRKTSGSHAFVADFPAADDDDDIVFGTEADGGGGCSPDADASRCVKRARPHERNKTLKYKLFASTWNVGGVAPPDGLDLSDWLDGGDDDGPYDMYVLGFQEVVPLRARNVLGADKKRVGMRWIELTRAALNRSHSQRSRGGGGGKQKVHPVRDGGGGELGREYRCVVSKQMVGILLTVWVRSDLRRFVRRPSVSCVGCGVMGCLGNKXYIVLYLVTPEYMVAAGAASLAKLISKRSRNEWQGGVSVRFWLHDTSFCFVCCHLASGGREGDEAHRNADAMEILSRTTFPRGHALNLPLPQNILDHDRVILLGDLNYRISLPEAKTRLLVERQDWKTLLENDQLRAEVCRGGAFQGWSEGPIGFSPTYKYHPNSDAYYGCATAARGRNKRRAPAWCDRVLWRGAGLAQTRYDRCESRLSDHRPVRAVFAVEVDAPGDLNSLRSFFMSERFDRDQMLLRKDDVNSARFADTL

SEQ ID NO: 293550 - protein, 73 aa, Zea mays
  unsure (1)..(73): unsure at all Xaa locations
  Clone ID: MRT4577_307C.1.pep
LAPITRPTYFFFFFFNIFCCVLFFYFFFILFFFLFYFFLTFFFFFFCNRVPKAXEHWRGRWGKIKNLTPNILL

SEQ ID NO: 293551 - protein, 76 aa, Zea mays
  Clone ID: MRT4577_30800C.1.pep
MSCNCGSSCGCGSSCKCGKKYPDLEETSTAAQANVDLGVAPDNKAAPYFLQGAVDSGKAFQGCSCGGNCNCDPCIC

SEQ ID NO: 293552 - protein, 92 aa, Zea mays
  Clone ID: MRT4577_30801C.1.pep
TNRCLALVAVLMDTANMTIHTNNTTGNQLRMASGMALNSSIYTVDTLTVLSLHSNSQLSGRIKREDRPNWQHEAAWRQSPLSTHSQHVSRRG

SEQ ID NO: 293553 - protein, 116 aa, Zea mays
  unsure (1)..(116): unsure at all Xaa locations
  Clone ID: MRT4577_30802C.1.pep
IKSHLYVFDIARMQLLPRRIPVDSTLLHDHHSHVTRPTAWLSHINVTXYLDPMSTNKDSTYAVAXMAAVADRCIHYEGEFRLIMNIIVNALIPLPHNQSGNRPIGSSTXAAERSGL

SEQ ID NO: 293554 - protein, 84 aa, Zea mays
  Clone ID: MRT4577_30803C.1.pep
TQNHYEIHKGTLIMLAKQTDMKSTKESMEPNKEPKEDKTNWPAKTKSEPKARGKKKGQTRSTPKAERKAARSATYIQTNAKNVG

SEQ ID NO: 293555 - protein, 185 aa, Zea mays
  Clone ID: MRT4577_30804C.1.pep
MAGGGGGFLDLERHFAFYGAYHSNPVNVFIHALFVWPIFLTALLLLHIAPFPRAAAVFTAVYGAFYVSLDRRSGALAALLCLLCWGASSALAARLGFSLGWKVVLVAQLFCWTMQFIGHGVFEKRAPALVDNLVQALLMAPYFVLLEILHKFAAYEPYPGFHANVQKLIDAKRKEWADKKAKKMS

SEQ ID NO: 293556 - protein, 57 aa, Zea mays
  Clone ID: MRT4577_30806C.1.pep
SVLLLIPFISLHEAPIAYYHPLLLLLFFFFISHYFNLHIIIYFILFYFIILFSLYFS

SEQ ID NO: 293557 - protein, 49 aa, Zea mays
  Clone ID: MRT4577_30808C.1.pep
ATRPTTRLDSADVIIIDGHVYTIVTVVNSQLFGDINVLKSVPIQVTDDV

SEQ ID NO: 293558 - protein, 97 aa, Zea mays
  Clone ID: MRT4577_30809C.1.pep
IQSSPEFGLYVATLVLAIEVKRRGSETRRECSSRLLCTYPVYGDLTKSMCVFSRTSVPDGSGREQGQGCEDCPRARGSWRSRAEVSRETHPSTRANT

SEQ ID NO: 293559 - protein, 491 aa, Zea mays
  unsure (1)..(491): unsure at all Xaa locations
  Clone ID: MRT4577_3080C.1.pep
QKQAEVLWPRLVANKLFRKTSGSHAFVADFPATDGDXMSSLVERSSTAAXSPDPDDADASRCVKRARPQPQPQERNKKTLKYKLFASTWNVGGVAPPDELDLSDWLDGGGGDDDDGPYDMYVLGFQEVVPLRARNVLGADKKRVGMRWIELTRAALNRSSSSHAQRGGGSGGGSGSGDGGGGGRQKVHPVRDGGGGGGLACRDYRCVVSKQMVGVLLTVWVRSDLRRFVRRASVSCVGCGVMGCLGNKGAVSVRFWLHETSFCFVCCHLASGGRDGDEAHRNADATEILSRTAFPRGQALNLPLPHKILDHDRVILLGDLNYRISLPEAKTRLLVERQDWKTLLENDQLRAEVRRGGAFQGWSEGPIAFSPTYKYCPNSDAYYGCATASATADARRHKRRAPAWCDRILWRGEGIRQARYGRCESRLSDHRPVRAVFTVEVGAPAPGSNLNSLRSFFMSERFDGAGSRSPAADQLLRRDDDVNSARFSDAL

SEQ ID NO: 293560 - protein, 107 aa, Zea mays
  unsure (1)..(107): unsure at all Xaa locations
  Clone ID: MRT4577_30810C.1.pep
THSDYFSKPGSSDWMEKYDTVSMTLSPILTXSHFIKSNLNLTLIPYPNHINSXSHIKFMIRAKPGMKXYQLXSIFLHHIYMYXNLXHYSYTCICSTLHNSTVLHYRH

SEQ ID NO: 293561 - protein, 89 aa, Zea mays
  Clone ID: MRT4577_30811C.1.pep
KRTKAYSTSAVVAPYWHSGPSPTCRGRSSPHGPMPRQWWRGGPHRSQVGDQAAVRRVLGLTALQLATNHITSFYEMVLMTKFLHVQSER

SEQ ID NO: 293562 - protein, 47 aa, Zea mays
  Clone ID: MRT4577_30812C.1.pep
LGCQCHMGPSVLTMKIYLRGRGGLGHLYSECLHSFGLWIIKAFLGCI

SEQ ID NO: 293563 - protein, 63 aa, Zea mays
  Clone ID: MRT4577_30813C.1.pep
CVHLPPFLFIYFEKYPYSHISSIHIYVNYTVRMHPLSCLVLPMYNKKTHKKKKRSRPRSCHIV

SEQ ID NO: 293564 - protein, 133 aa, Zea mays
  unsure (1)..(133): unsure at all Xaa locations
  Clone ID: MRT4577_30814C.1.pep
HSSADAWEILGAEKALFRALKTKHSTPXTLAIRYDALGDGEDNSIGTESRLKLETRLQVLEGRELGKSAGSTKGKPKIEVYEKDRKKGTGALTTPAKTYNPAADLVLTEETPKKSEWASKKRKHNEVGTEPIA

SEQ ID NO: 293565 - protein, 58 aa, Zea mays
  Clone ID: MRT4577_30815C.1.pep
LMVPSLRSLMSHSSIGKGLVFYSPQTKTNRHQLKMQQRQQRMRQLVMTIIFDPHENTN

SEQ ID NO: 293566 - protein, 60 aa, Zea mays
  Clone ID: MRT4577_30816C.1.pep
TRRARVPPCRNQAHGSWLNPPPELPLGLPAMEGLLHPQSKPPGRELQEQIHYSGLTRAGN

SEQ ID NO: 293567 - protein, 273 aa, Zea mays
  unsure (1)..(273): unsure at all Xaa locations
  Clone ID: MRT4577_30817C.1.pep
VGARLIAHGGSLLNLAKQPGSTIXXILGAEKALFRALKTKHSTPKYGLIYHASLIGKASQKHKGKISRSLAAKTALAIRYDALGDGEDNSIGTESRLKLETRLQVLEGRELGKSAGSTKGKPKIEVYEKDRKQGAGALTTPAKTYNPAADLVLTEETPKKSELASKKRKHHEVQTEPSAELAEGAVQEDRKKKKKNKESEEAPAAEGDGEKKKKKKSKDVGEEPAVAAAAATEGEKKKKKKKSDADGEGVTTQTEESGKKDKKKKKKRHADDE

SEQ ID NO: 293568 - protein, 562 aa, Zea mays
  Clone ID: MRT4577_30818C.1.pep
MLVLFETPAGFALFKVLDEGKLDKVEDLWKEFTTSDSARKVVELKAFNKFENTSDALSAATLIIDSKPSKGLRKFLQKHCEGETLAVADSKLGNAIKEKLKIDCLHNSAVMELMRGLRNQLTELITGLGAQDLGPMSLGLSHSLSRYKLKFSPEKVDTMIIQAIGLLDDLDKELNTYAMRVREWYGWHFPELTKIVTDNIQYAKVVKMMGNRANAVNLDFSEILSDEELETQLKEAAVISMGTEVSDLDLSNIRELCDQVLALSEYRAQLYDYLRSRMNTIAPNLTALVGELVGARLIAHGGSLLNLAKQPGSTIQILGAEKALFRALKTKHSTPKYGLIYHASLIGKASQKHKGKISRSLAAKTALAIRYDALGDGEDNSIGTESRLKLETRLQVLEGRELGKSAGSTKGKPKIEVYEKDRKQGAGALTTPAKTYNPAADLVLTEETPKKSELASKKRKHNEVETEPLAEPAEEAIQEDGDQEDRKKKKKKNKESKEAPAGEGDGEKKKKKKSKEVEEEPVVAAASEVKKKKKKSDADGEDVAMQTEESGKKEKKKKKKAC

SEQ ID NO: 293569 - protein, 105 aa, Zea mays
  Clone ID: MRT4577_30819C.1.pep
APVGPLFPFFLGPRPILGLGQLITSLTVLLISGNVGWVVPFPSSGAACFCVCPFAFALVPKNPVFLPFSLFWALRALHFLSGFFCSSPQKKNVKKKKKKKKKNKT

SEQ ID NO: 293570 - protein, 216 aa, Zea mays
  Clone ID: MRT4577_3081C.1.pep
RPRGLGFQGGGPLRARNVLGADKKRVGMRWIELTRAALNRSHSQRSRGGGGGKQKVHPGGGGGGGELGREYRCVVSKQMVGILLTVWVRSDLRRFVRRPSVSCVGCGVMGCLGNKGGVSVRFWLHDTSFCFVCCHLASGGREGDEAHRNADAMEILSRTTFPRGHALNLPLPQNILDHDRVILLGDLNYRISLPEAKTRLLVERQDWKTLLENDQL

SEQ ID NO: 293571 - protein, 198 aa, Zea mays
  unsure (1)..(198): unsure at all Xaa locations
  Clone ID: MRT4577_30820C.1.pep
MRIEERGVFALPYILDSNLSSLPPLIIFVTTGVHSPRSTTSVSVQHLDHIGHDGIIVFKTCXELCWPENGISTDRQMTAEKTIGRGDDAFSTFFRESGAGKXTPRAAFCDLKTTVIYEVTTVTYSXLVVREHVISGXKDVTNNLARGHXDHRXEIVEMWLDRMNFVSYRXTGLQRFLLFNSVVGRASSGLGTIILERL

SEQ ID NO: 293572 - protein, 104 aa, Zea mays
  Clone ID: MRT4577_30821C.1.pep
LGRPFNLFVCAVLRGPSRVFSFLKEGVLWLFPISFFSLEGGTSFGGFPKKGFPLFWGFLRVKKNCSSYKKIFFRPKPKILKGCFFVVFPNKFWGESLEFFFTHP

SEQ ID NO: 293573 - protein, 63 aa, Zea mays
  Clone ID: MRT4577_30822C.1.pep
CFTYFLSRITCYCSSPLSHVFIHSHVSIAISVTCCTGLRSCFPFFFIIPRLWFRCFKKILKGG

SEQ ID NO: 293574 - protein, 50 aa, Zea mays
  Clone ID: MRT4577_30823C.1.pep
NVFWLKEKRRKFYFCPLFKRSNGCKKRVHYKTKKGGGCLLIWVYGKEVKM

SEQ ID NO: 293575 - protein, 93 aa, Zea mays
  Clone ID: MRT4577_30824C.1.pep
MGFIMDFAENVYPPLMGEPAKPVQVWREHVSNMKEGCQPLKSAGSLPLGPVGFWTLDGLNSQLFWGPQITQSSGRWGPCRNFMGRRSGSPPFC

SEQ ID NO: 293576 - protein, 57 aa, Zea mays
  Clone ID: MRT4577_30825C.1.pep
RRYFERVIRWFGKPTSAFVSIFGCRLYQLPTAVPVQRHAMEMILLCSSISQKLLVGR

SEQ ID NO: 293577 - protein, 531 aa, Zea mays
  unsure (1)..(531): unsure at all Xaa locations
  Clone ID: MRT4577_30826C.1.pep
MTVEKRMFSYEKNDDPQRAITFRDGNQGLVKGLDKITISHDHSISNEKSQTQEKLKKFLRQAQNEFKLRIKKIRSDNGTEFKNSQIEGFLEEEGIKLEFSSPYTPQQNIVLERKNITLLDMVRTMLEEYKTSNRFWVKAINTTWYSINRLYLHRILKKISYKLLTDGFLLGYDSNTRAYRVFNKSTRLDEISCDIVFDETSGSQVKQVDLDELDVEEALYIALRNMSIGYVCPQEPEEPSQAQDQPSYSIQASPPTQDEELAQEEEYQDQDNEPPQEEVIDQXGDEVDQEKEDEQEIQDQRPHHPRVHQAIQRNHPVNSIFXTKYIQDILKKFGMKNAKPIKTPMGTNGHLDLDTGIYTPKFGLWYPKGSTFDLIGYSDVDYVGCKIDKKSTSGTCQFLGRSLVSWASKKQNSVALCTAEAEYVAAGRCCAQLLWMRQTLRDYGDKLSKVPLLCDNESDIRMADNPVEDSRTKHIDIRYHFLRDHQQRGDIEIAYISTHNQLADIFTKPLDEKTFNKLRNELNVLDSRNFD

SEQ ID NO: 293578 - protein, 52 aa, Zea mays
  Clone ID: MRT4577_30827C.1.pep
NATWVLLVLKKMAFSWGITHPLTYSTTARFGKKKTNFRGSFPPVFFICDIFV

SEQ ID NO: 293579 - protein, 208 aa, Zea mays
  Clone ID: MRT4577_30828C.1.pep
EKSQTQETLKKFLRRAQNEFGLRIKKIRSDNGTEFKNSQIDGFLEEEGIKHEFSSPYTPQQNVFGSKFFILVKRGRNSKFAPKAVECFLLGYDLNTRAYRVFNKSTRLVEVSCDIVFDETNGSQVEQLDLDELDDEEALCITLRNMSIGDVCPQEPKEPSQAQDQPSSSIQASLPTQDEELAHEEEDEDQDNEPPQEGIDQGGDEADK

SEQ ID NO: 293580 - protein, 86 aa, Zea mays
  unsure (1)..(86): unsure at all Xaa locations
  Clone ID: MRT4577_30829C.1.pep
ILXETTTLFNSSLVYIQDHVQNIKHLKTRCSTWTNLQPYFIREIVSPHIFVINYQGTTERLDAHTVSPNDWLKSTDSCGAATRVFC

SEQ ID NO: 293581 - protein, 104 aa, Zea mays
  Clone ID: MRT4577_3082C.1.pep
LLFPHLRSQAPRDGMAEMSSHNLLRLVRMIRYDGKTPTCYGSLYAVDYCEITSISYLEQTENPTLKLHSIGIRTQLLSIFLNMGTGTIRISSLTRVTLRTECCR

SEQ ID NO: 293582 - protein, 67 aa, Zea mays
  Clone ID: MRT4577_30830C.1.pep
KLQSSSTYLDVICWTVDVAVLYLVHKLHTSLMDLTEKCHPSRPPKSLKRKSCWKLAIDSSRTCPRAE

SEQ ID NO: 293583 - protein, 73 aa, Zea mays
  Clone ID: MRT4577_30831C.1.pep
GGILGPPVFFFQRNPFGAPKGGMWGGNYQAQKKTGETRLPCLHINIFAPHNVWAPKGNAKSNSYKNKNGFNQK

SEQ ID NO: 293584 - protein, 70 aa, Zea mays
  Clone ID: MRT4577_30832C.1.pep
RLPQLHPIPPPGVGAITNKPTHTWMEMKKIICTVLVTDSSTTLLALEAPAPSLTNSLFVAHPLSPLPITP

SEQ ID NO: 293585 - protein, 90 aa, Zea mays
  Clone ID: MRT4577_30833C.1.pep
FSGSYLCNVDREKRETFKTNPREMVSEKPSGQLGSLVLYRYQKLNILDQEKENRERSALLPPVTVVNYVFLHSKKKKKNTKKKKKKKKNL

SEQ ID NO: 293586 - protein, 126 aa, Zea mays
  unsure (1)..(126): unsure at all Xaa locations
  Clone ID: MRT4577_30834C.1.pep
PSNAKELFNLRHSTARNVIERTFGLLKMRWAILRKXSYFDLQNQIRIINACCILHNFVRDRQRDMDDLLLGQVDQVISVESHDVQSEVSMITNVQSSNQWTNFRDTKANQMFDDYQARRGQCYGEG

SEQ ID NO: 293587 - protein, 132 aa, Zea mays
  unsure (1)..(132): unsure at all Xaa locations
  Clone ID: MRT4577_30835C.1.pep
VPYNGLLGALXNKGEVRKTVKLLDXMVEVGLEPEPFAVHPLINGFCXKGGAPGAPEIWLWMGKRXKRAKVVPYHVFFQDFFQVGEMGQANVGLNXMLEKGLDTNRVPFEIINSGLIKKGFGPDISGYAADVF

SEQ ID NO: 293588 - protein, 105 aa, Zea mays
  Clone ID: MRT4577_30837C.1.pep
YGNYGNQKKRGVILETKKIKTPRGPEGPKKAKGTKGNQKPRGGQKKKTGELRPKGRERKKVIGHDLKKKGQRKGRGKRTGERRGRNKKRNSGKGRVETTQHTGQK

SEQ ID NO: 293589 - protein, 166 aa, Zea mays
  Clone ID: MRT4577_30838C.1.pep
RPPQLGMYSLVHPAKSHQSPALGVHPGGSTRLKIQSSRLKPSLATVPSLYATQAERCSGSVLSPPCCWPWNSWALGRIVLSLPSYASTSRACWGDEWHFLCRCRSSVAAAPVCSRKETSCYASSHGYWRWSPSAPPGVCPFSQAPACSHGCALSRSVLLLPLLMLR

SEQ ID NO: 293590 - protein, 618 aa, Zea mays
  Clone ID: MRT4577_30839C.1.pep
MEPFFLFVGLALVLCFLTPYYRHLQSKKTSPLEPTEWPIVGHLPGLVANIHHFHDWATGVLAGVGYNFEARAGRTGVRYFITCDPSNVRHIFTSNFANYPKGEEYAAIFDVLGGGIFNADGESWRRQRVKAQMLMTGPRFRAFTARCSRDKVERSLLPFLAHHAADDGRTPPCDLHDVFLRLTFDMTCTLVFGVDPGCLAFGLPVVPFARAMDDALETLFLRHIIPMACWKLMHVLEVGQERKMAAARRTIDSFVAATVAKRRADKLKGCECCVSNSYDLLSSFICHEEDGSSENDDDVFLRDTTVNLLLAGRDTTGAALSWFFYLVSKNPRVEQKILDELTPIAASRRTKGAEDAAHAASGMVTFDADELGSLVYLHAALSECLRLYPSVPFEHKVADKVLVFNYSMGRMEGVWGKDCTEFRPERWLNEDGTKLRYEPSYKFISFNAGPRTCLGKEMAFVQMKAVAAAVLWNFAVEVVPGHVVEPKLSIILHMKNGLAVKVTRRDGTGRRRRRRACVTPLAFLWSRLGPAPRGVSPARLCALRGAWAFTLHDTFQYACGRTWHMVSSCTLASAPMGMGLLGMVYIFHSYMVLLVTLYVSGSFHPTLSVCVHSFHFLE

SEQ ID NO: 293591 - protein, 228 aa, Zea mays
  Clone ID: MRT4577_3083C.1.pep
MTTRSSPGSAPSLEITSFCQGPPRSVPDKQIQPVHSPIPVSPVPLCHLAVGMTTGSTPGSAPSQRKRNSTKDSVALYAVQCYKCYKWSTVPKEEFETLRENFTKDPWFCSRRPDSSCEDDADIEYDSSRIWVLDKPNIPKPPPETERLVVMRGDYSKMDTYYVMPNGKRARCAGDVDKFLEANPEYKDRISASDFSFAPPKVVEETVSHNPAWQAAKAKKQEKAEAQK

SEQ ID NO: 293592 - protein, 87 aa, Zea mays
  unsure (1)..(87): unsure at all Xaa locations
  Clone ID: MRT4577_30840C.1.pep
VTKPFRYPFPXERVPPSPCYYSPGWGTWGPFPFQLAWRGSNPPKTLFLFSFIRPGGPLSPCSSLGEEKLPLXRAILPWPKPNQGGDF

SEQ ID NO: 293593 - protein, 538 aa, Zea mays
  unsure (1)..(538): unsure at all Xaa locations
  Clone ID: MRT4577_30841C.1.pep
PFFLFIELALVLCFITLYYRHLQSKKTSPLEPTEWPVVGHLPGLVANIHRFHDWATGVLAGVGCNFEARGGRTGLRYFITCDPSNVRHIFTSNFANYPKGEEYAAIFDVLGGGIFNADGESWRRQRVKAQMLMTGPRFRAFTARCSRDKVERSLLPFLAHHAAADDEGRPTPCDLHDVFLRLTFDMTCTLVFGVDPGCLALGLPGVPFARAMDDALETLFLRHITPTACWKLMSVLGVGQEKKMAAARRTIDCFVATTVAKRRADMLREGEGEGVCSSFDLLSSFICHEDDSSENDDDDDVFLRDTTVNLLLAGRDTTGAALSWFFYLVSKNPRVEQKLLDELAPIVASRRRAGGAAADAAXHGDLRRXELGSGLVYLHAALSECLRLYPSVPFEHKVAAAADVLPSGKELKAGDKVLVFNYSMGRMEGVWGKDCMEFRPERWLNVEGTKLRYEPSYKFISFNAGPRTCLGKEMAFVQMKTVAAAVLWNFAVEVVPGHVVEPKLSIILHMKNGLAVKVTRRDDGTAPSSSCVRHTACF

SEQ ID NO: 293594 - protein, 67 aa, Zea mays
  Clone ID: MRT4577_30842C.1.pep
PRTRELISLTFPQSMEQHRISGLHLQTTIIAVMAISLHNHYLVHRKKILPNQHTARPILHLECNTYL

SEQ ID NO: 293595 - protein, 94 aa, Zea mays
  Clone ID: MRT4577_30843C.1.pep
MAPRRRRFISFRFSMSGTRSAEMLLVAWPAMLRWRRWESMIEASPVGPGEEDGEAEVHELGSVHRNSAPPLRRGGGEGDSRTSPTTTTTTTIGR

SEQ ID NO: 293596 - protein, 64 aa, Zea mays
  Clone ID: MRT4577_30844C.1.pep
YTSRITFRTLLFISHFSMQLISTCSGKHLVIPKDMIWVIAVLRRSTTSSFPPCITILVLLDRMA

SEQ ID NO: 293597 - protein, 67 aa, Zea mays
  Clone ID: MRT4577_30845C.1.pep
LSAACFCIKEVVRCLRTEYDAKRTSTDMEKGGDRERDHGSLTPDRWIQNGRLALKKPMLRRSHRSAN

SEQ ID NO: 293598 - protein, 43 aa, Zea mays
  Clone ID: MRT4577_30846C.1.pep
FTHLTPRRNVVSPTPPGGSVSDALNEPSTWKGIYLSRKDVWGS

SEQ ID NO: 293599 - protein, 132 aa, Zea mays
  Clone ID: MRT4577_30847C.1.pep
IEQTGRFYPFLPINHRFTKTGGGRFSPSNGLVMAAAETSHPGRLQRILFCSENTRGGARMPEQWWWLLQVRQGGHSGRRATPCSSSATSKLCPWIAEARPGTSTGAGSAAAPGTASARALLAMVVTPAPVGA

SEQ ID NO: 293600 - protein, 60 aa, Zea mays
  Clone ID: MRT4577_30848C.1.pep
PGTQHPMVVSKTQPGGIYSLNINTHNLINNTRVEPINELASEHRATSPKICSEEKTCHQP

SEQ ID NO: 293601 - protein, 95 aa, Zea mays
  Clone ID: MRT4577_30849C.1.pep
PPAGRSFPGPGSYSPAPGPFPGKGFCPPPPAGGFFPPARGWYPPQGSFPPLVFLWRSKGSPLQVGPNFRAPVDSRTPLGLLVIFLKLFSFQGGVW

SEQ ID NO: 293602 - protein, 482 aa, Zea mays
  unsure (1)..(482): unsure at all Xaa locations
  Clone ID: MRT4577_3084C.1.pep
VLWPRLVANKLFRKTSGSHAFVADFPXPMTMTISSLERRPTAAAGAAPTRTPAAAXRARPHERNKILKYRLFASTWNVGGVAPPDGLDLSDWLDGGDDGPYDMYVLGFQEVVPLRARNVLGADKKRVGMRWVELIRAALNRXFAAQQGRRLRRRRRRRQAEGXPVRDGCGGELGREYRCVVSKQMVGILLTVWVRSDLRRFVRRPSVSCVGCGVMGCLGNKVSIYSPVLGYSRIWWPPRHLAKLSXKRSRNEWQGGVSVRFWLHDTSFCFVCCHLASGGREGDEAHRNADATEILSRTTFPRGHALNLPLPQNILDHDRVILLGDLNYRISLPEAKTRLLVERQDWKTLLENDQLRAEVCRGGAFQGWSEGPIGFSPTYKYHPNSDAYYGCATAARGRNKRRAPAWCDRVLWRGAGLAQTRYDRCESRLSDHRPVRAVFAVEVDAPGDLNSLRSFFMSERFDRDQMLLRKDDVNSARFGDTL

SEQ ID NO: 293603 - protein, 494 aa, Zea mays
  unsure (1)..(494): unsure at all Xaa locations
  Clone ID: MRT4577_30850C.1.pep
MADKAASPEKKSWADVEEEEEAKAKATAASSSSSITEPAVEEQAKQIEALSLAPSVDDAAGEEGPPLLDDSDDSQIQAVISGGTVYESATTFEDLKLSPELLKGLHDEMGFSRPSKIQAITLPMILTPPYKDLVAQAHNGSGKTTCFVLGMLSRVDPQHKIPQAICICPTRELAQQNKAVLMRMGKFTGITCACAIPPAQKDYMPISKMAPITDQIVIGTSGTLIKWITHKKLATRDIKILVFDEADHMLAEDGFRSDSERMMRDIQRSAGGCQVLLFSATFNDRVKDFVTKVIRDGNQIFVKKEELTLEKVKQYKVQVPDESXKIEVIRDKIFEFGQKVGQVIIFVRTKQSTKNVHNALTREDYVCSSIQGSLDQSEREKIIQEFKDGYTKVLISTDVLARGFDQAQVNLVINYDMPIKFGTRDEPDYEVYLHRIGRAGRFGRKGAVFNLLCGQTDNVVMKKIEDYFQHSVPEVRNWQREEDFEAALKDAGLL

SEQ ID NO: 293604 - protein, 51 aa, Zea mays
  Clone ID: MRT4577_30851C.1.pep
FQFNLFYFNFPYQKILFFFLFFFFLYFFFFFYFFFFFFFFFFFFFFFFFFY

SEQ ID NO: 293605 - protein, 86 aa, Zea mays
  unsure (1)..(86): unsure at all Xaa locations
  Clone ID: MRT4577_30852C.1.pep
QKPRLFIFFFYFFSLFFGGGGFSINLFSPSSPPACRSMTSTDTPPELRWAPSPCPMTSRRSSPPSLVGGGTXSTRQSCPPPVPPSS

SEQ ID NO: 293606 - protein, 99 aa, Zea mays
  unsure (1)..(99): unsure at all Xaa locations
  Clone ID: MRT4577_30853C.1.pep
MRGGGGGGMMDDEERVGHAEIPTSFGPELRACLRCRLVKTYDQXIISLMDPSRSWAARWLRIGRFIPGCYTLAVAEELPEEYQGICQDNNVQYVPPKRV

SEQ ID NO: 293607 - protein, 145 aa, Zea mays
  unsure (1)..(145): unsure at all Xaa locations
  Clone ID: MRT4577_30854C.1.pep
MRGGGGGGMMDDEERVGHAEIPTSFGPELRACLRCRLVKTYDQFRENGCENCPFLEMDREHDNVVNCTTPNFTGIISLMDPSRSWAARWLRIXCLCVDLTENRSDFSXGRFIPGCYTLAVSEELPEEYQGICQDNNVQYVPPKRV

SEQ ID NO: 293608 - protein, 70 aa, Zea mays
  Clone ID: MRT4577_30855C.1.pep
HCMVWCHYIIQKHIKIHLFHVSTYTKNIGPCCRFRSCSDGYGYMAGNSNYSDEDYANSTELQALEVRRGS

SEQ ID NO: 293609 - protein, 79 aa, Zea mays
  Clone ID: MRT4577_30856C.1.pep
DMPIKFGTRDEPDYEVYLHRIGRAGRFGRKGAVFNLLCGQTDNVVMKKIEDYFQHSVPEVRNWQREEDFEAALKDAGLL

SEQ ID NO: 293610 - protein, 129 aa, Zea mays
  Clone ID: MRT4577_30857C.1.pep
MRGGGGGGMMDDEERVGHAEIPTSFGPELRACLRCRLVKTYDQFRENGCENCPFLEMDREHDNVVNCTTPNFTGIISLMDPSRSWAARWLRIGRFIPGCYTLAVSEELPEEYQGICQDNNVQYVPPKRV

SEQ ID NO: 293611 - protein, 98 aa, Zea mays
  Clone ID: MRT4577_30858C.1.pep
NAARKGLPIKRILSPDMPIKKIVPLHFEIWHLNLIQIPPPGNWVWKKLFKIVLQKKHQFNFSFDKNGSFSIWSPPKFEPPLTVCGTNKIVYSDQQVAP

SEQ ID NO: 293612 - protein, 39 aa, Zea mays
  Clone ID: MRT4577_30859C.1.pep
THSLYPLNCSNVHNSASFLIFDFSGSSTRYPAACLTGDP

SEQ ID NO: 293613 - protein, 64 aa, Zea mays
  Clone ID: MRT4577_3085C.1.pep
PPYAPRAVCNCCYGYHFLAMLASSYNTTFSSVSHTSAAFHIPKPIHLTPPVHLPPPMHLPHPDH

SEQ ID NO: 293614 - protein, 81 aa, Zea mays
  Clone ID: MRT4577_30860C.1.pep
KTKNCFITPQAGGVEIYLSQKNLGFPPSILIIPLSFSPMLPSPKPQNLVLYLLYFLHRGIFAYPYHKFKYSFLPLRIWGGI

SEQ ID NO: 293615 - protein, 48 aa, Zea mays
  Clone ID: MRT4577_30861C.1.pep
PTRTHPVRFLSPVSFLGSLDHLKHLSFSRPMGSYAAESDLQDHPLRLY

SEQ ID NO: 293616 - protein, 39 aa, Zea mays
  Clone ID: MRT4577_30862C.1.pep
RGTVPGGRLTIHHGVVFSRRMIGISHIGGNPSSRSYIGL

SEQ ID NO: 293617 - protein, 229 aa, Zea mays
  Clone ID: MRT4577_30863C.1.pep
MPGLTIGDTVPNLELDSTHGKIRIHDYVGDGYAIIFSHPADFTPVCTTEMAAMAGYAKEFEKRGVKLLGISCDDVESHRQWTKDVEAYGGKQQQQQATTTKVTFPILADPARDAIRQLNMVDPDEKDAAGRSMPSRALHVVGPDKAVKLSFLYPATTGRNMDEVLRAVDSLLTAAKHGGKVATPANWKPGECAVIAPGVSDEEARKMFPQGFETADLPSKKGYLRFTKV

SEQ ID NO: 293618 - protein, 88 aa, Zea mays
  Clone ID: MRT4577_30864C.1.pep
QLYGINHVAVLLHNDCLYLSQEIFGFAFEYRTDFPNSMKEHAVFVDLAPRFQLLAEEILQRQVHLDEYNLKEAIDGADGFQNTHQMKQ

SEQ ID NO: 293619 - protein, 93 aa, Zea mays
  Clone ID: MRT4577_30865C.1.pep
VLHSPHAGTLPPTAVSSNLELPGLCRRQHLPESNGRRRIVFHRRHRESATSQSVVGTAVPQTTTLSAVPQSTRCCSAALHREFKARPPELDWD

SEQ ID NO: 293620 - protein, 42 aa, Zea mays
  Clone ID: MRT4577_30866C.1.pep
ISTAIIIMNHCRHLSEHSCRFHFSMETQAHLAVFQEPLLEML

SEQ ID NO: 293621 - protein, 91 aa, Zea mays
  Clone ID: MRT4577_30867C.1.pep
NFSIPTSPSKKIQSHLPLQPAQRCARAHRAEVAPCAPAAATVRSCARHAGHGCLAPSRLQPLGLGVWQLPSRWPPPPTPARVSAAASSLVS

SEQ ID NO: 293622 - protein, 140 aa, Zea mays
  Clone ID: MRT4577_30868C.1.pep
NPFGGRKTPQPSALWKTLVGTPSKSLHLFLGHIGTHNKKSNLWRPLLKKGNARNTVVLTRPRGRHGLNTLKKLGLCSKPCEKEKKGVLKVLSQSLKKNFLYEPKKHYPLLGGPPRIPQQKTQDPGVIVLKNINVEHPLKK

SEQ ID NO: 293623 - protein, 84 aa, Zea mays
  Clone ID: MRT4577_30869C.1.pep
YDVNNLESVSFGYITYRMEWMAWNAINKIVKQVRSNRYNGKEGRDVRLGLPGLGVVWLVSYIDRIGSVKNVCAPRPFRLSRSTR

SEQ ID NO: 293624 - protein, 108 aa, Zea mays
  Clone ID: MRT4577_3086C.1.pep
MSNWMPPSEISPFSRIVKLKPTLLESANVLLAALLRAHPLSSANLRDVRARAELDLARADMEIGHGGDPAAAVDLRLLLALLATRDGRAYDALRLYAEAARDAPFRPR

SEQ ID NO: 293625 - protein, 87 aa, Zea mays
  Clone ID: MRT4577_30870C.1.pep
LSLGALVVTCDTCVGRTWLSYVSIWLRAPSWLGSAACSYITTVLGALLVGLVPWRLDIIYKGGALTTISKGCTKLYDKEQTLGYGKT

SEQ ID NO: 293626 - protein, 106 aa, Zea mays
  Clone ID: MRT4577_30871C.1.pep
SRSKNNLIRELVEAATLLQQFIRLAARAAVLVLHLLTNGPIICVAVPPGKLNRSVSAARMKYSYAHLLRQTGAWNVLPQHRVDDIVVAVLSRLVVMPAILWRVSLF

SEQ ID NO: 293627 - protein, 132 aa, Zea mays
  Clone ID: MRT4577_30872C.1.pep
PFSPSSKGECQTSYPPLLRAPGASGPPGLRDSGTREQFSGLPDSCNGRRLAGSPPAKGQGSWHLAITKGSDMYSYNDWPTLITTHRKSRRVPGLARTTPEYRAFRGEVPAPIQGSPPGTRTFSHPPRRLPFL

SEQ ID NO: 293628 - protein, 48 aa, Zea mays
  Clone ID: MRT4577_30873C.1.pep
NGFVCRIQAVINLFHVRELCAGELISTLGHRVGVCMGVGCVSHRVTCG

SEQ ID NO: 293629 - protein, 293 aa, Zea mays
  Clone ID: MRT4577_30874C.1.pep
MLRVAGRRLSSSVSWRPAVAAARGPLAGAGAPDRDDGSARGRSQTRFSIDSPFFVTARVLLAKNTTVGTVLKVKEKNYGFSSTETLVPGNQDAGLADLPATVAAVKNPNPKVVYDEYNHERYPPGDPSKRAFAYFVLSGGRFIYASLLRLLVLKFVLSMSASKDVLALASLEVDLSSIEPGTTVTVKWRGKPVFIRRRTEDDIKLANSVDVASLRHPEQDAERVKNPEWLVVIGVCTHLGCIPLPNAGDFGGWFCPCHGSHYDISGRIRKGPAPFNLEVPTYSFLEENKLLIG

SEQ ID NO: 293630 - protein, 262 aa, Zea mays
  unsure (1)..(262): unsure at all Xaa locations
  Clone ID: MRT4577_30875C.1.pep
MLRLAGRRVSSSVSWRPAVAAARGPLAGAGAPDRDYGSARGRSHTRLSIDSPFFVTAQGFXAGLADXPATVAAVKNPNPKVVYDEYNHERYPPGDPSKRAFAYFVLSGGRFIYASLLRLLVLKFVLSMSASKDVLALASLEVDLSSIEPGTTVTVKWRGKPVFIRRRTEDAIKLANSVDVASLRHPEQDAERVKNPEWLVVIGVCTHLGCIPLPNAGDFGGWFCPCHGSHYDISGRIRKGPAPFNLEVPTYSFLEENKLLIG

SEQ ID NO: 293631 - protein, 114 aa, Zea mays
  Clone ID: MRT4577_30876C.1.pep
GNRETHHFIYCMHDKAKLNWNKGGGATGLENMPPKPLGGEKKKNLGSKPHTSFLWGGPKKRGPRFLKWGKKFFGGVFGGGELVKPIGKLLYGGGADIGGGKVNKDKTFGESGKP

SEQ ID NO: 293632 - protein, 273 aa, Zea mays
  Clone ID: MRT4577_30877C.1.pep
MLRVAGRRLSSSLSWRPAAAVARGPLAGAGVPDRDDDSARGRSQPRFSIDSPFFVASRGFSSTETVVPRNQDAGLADLPATVAAVKNPNPKVVYDEYNHERYPPGDPSKRAFAYFVLSGGRFIYASLLRLLVLKFVLSMSASKDVLALASLEVDLSSIEPGTTVTVKWRGKPVFIRRRTEDDIKLANSVDVASLRHPEQDAERVKNPEWLVVIGVCTHLGCIPLPNAGDFGGWFCPCHGSHYDISGRIRKGPAPFNLEVPTYSFLEENKLLVG

SEQ ID NO: 293633 - protein, 53 aa, Zea mays
  Clone ID: MRT4577_30878C.1.pep
RRAASQCSKMLRFIVRAIVAGKGPVLKHRWPHGGPGEQQRLGLGIQFCYRQVR

SEQ ID NO: 293634 - protein, 331 aa, Zea mays
  Clone ID: MRT4577_30879C.1.pep
MLRVAGRRLSSSLSWRPAAAVARGPLAGAGVPDRDDDSARGRSHPRFSIDSPFFVASRVLLAKTTTVGTVLKVKEIIMQDQHYAKQKNTETWLLRRLGVQVYPRSHRVLVTPYRLEGFSSTETVVPRNQDAGLADLPATVAAVKNPNPKVVYDEYNHERYPPGDPSKRAFAYFVLSGGRFIYASLLRLLVLKFVLSMSASKDVLALASLEVDLSSIEPGTTVTVKWRGKPVFIRRRTEDDIKLANSVDVASLRHPEQDAERVKNPEWLVVIGVCTHLGCIPLPNAGDFGGWFCPCHGSPYDISGRIRKGPAPFNLEVPTYSFLEENKLLIG

SEQ ID NO: 293635 - protein, 192 aa, Zea mays
  unsure (1)..(192): unsure at all Xaa locations
  Clone ID: MRT4577_3087C.1.pep
IDVAATDFCTGKKYDLEFKSTKKSGQNFKTADDMIEIYSQLCSEYPLVSIEQPFDKDDWEHSKXLTTLELCQVAGDDLLMSDPERIKRAVNEYTCNALVLKANQVGTVTEAIEVVKQAKDAHWGVMVSHRSGDTEDSFIADLAVGASAGQIKAGAPCRGECLTNYNQLLRIEGELGSEGVYAGENWRTVNTS

SEQ ID NO: 293636 - protein, 68 aa, Zea mays
  Clone ID: MRT4577_30880C.1.pep
FLHSNYKTLKSLMGTGLQHRIEPKLHVLLPRPTTRADRRCPDYPRPWLQRNMPLRSADNQNLRSMVGT

SEQ ID NO: 293637 - protein, 273 aa, Zea mays
  Clone ID: MRT4577_30881C.1.pep
MLRVAGRRLSSSLSWRPAVAAARGPLAGAGAPDRDDGSARGRSQTRFSIDSPFFVAARGFSSTETLVPGNQDAGLADIPATVAAVKNPNPKVVYDEYNHERYPPGDPSKRAFAYFVLSGGRFIYASLLRLLVLKFVLSMSASKDVLALASLEVDLSSIEPGTTVTVKWPGKEVFIRRRTDDDIKLANSVDVASLRHPEQDAERVKNPEWLVVIGVCTHLGCIPLPNAGDFGGWFCPCHGSHYDISGRIRKGPAPFNLEVPTYSFLEENKLLIG

SEQ ID NO: 293638 - protein, 72 aa, Zea mays
  Clone ID: MRT4577_30882C.1.pep
GKAYSTTGERYFTKKHDLMMCPYINNTNDHYLSGDYKLDHYMKIPPWTMSMAQAVVDDLGQTSVTTYNPESS

SEQ ID NO: 293639 - protein, 91 aa, Zea mays
  Clone ID: MRT4577_30883C.1.pep
VLPPVQGVANKLNPAPPPKIKSSFWGGTFQFRLALVLGFLYLWSPPKPPFLVFWPWVVSFSPRAGRLRPPKTGLLLPSRALFPGINKADCC

SEQ ID NO: 293640 - protein, 135 aa, Zea mays
  unsure (1)..(135): unsure at all Xaa locations
  Clone ID: MRT4577_30884C.1.pep
LAXQLTGGEDAEFNEAFSLFDKDGDGCITTKELGTVMRSLGQNPFFFFSSDMINVVXGGGNGTIXFPXFLRGGGGKMTGTDSXEELKEAFRVFDKDQNGFISAAELRHVMTNLGEKLTCEEGDEMIREAVVVGDG

SEQ ID NO: 293641 - protein, 111 aa, Zea mays
  Clone ID: MRT4577_30885C.1.pep
PQVPHAGPNPLLLFCLVLVFFPPPPPGVPGLLFSNSIEKLKFNSPLLLPTLKINFSFSLLFHSLVGVIYLPTYFLGFCLFLNLFLFPGFNFTSQSLPFYLFLTYFFPPLLF

SEQ ID NO: 293642 - protein, 58 aa, Zea mays
  Clone ID: MRT4577_30886C.1.pep
HASGPHPNSSSARVLGRYRGIPLLRAASRTPFLLARSDPRDGGAAADKKDREKAGQAS

SEQ ID NO: 293643 - protein, 46 aa, Zea mays
  Clone ID: MRT4577_30887C.1.pep
KKNKITEKGAQQPSASRTMPSMSLPSLDYMYLISRISILSLPCSSK

SEQ ID NO: 293644 - protein, 73 aa, Zea mays
  Clone ID: MRT4577_30888C.1.pep
AGRGLSFRNQDLRTFHERPQDVYKGLVEFEHLDSRKRESTPSSVFPQKICTSNGLCFTKFLTDQSYCMNTFCN

SEQ ID NO: 293645 - protein, 142 aa, Zea mays
  unsure (1)..(142): unsure at all Xaa locations
  Clone ID: MRT4577_30889C.1.pep
GRPQGPGRKSTGGPSXDALNTLFKETRARKSTTPALFVDLEPTVIDEGRTGAYHQLFYPEQLIIGEEDAANNISRGDYTIGKEIVDLCLDRIKKIVDNCTGVQGFLVFNNVCGGTSSLLGSLLLERLSVDYCKKYKLGCTEC

SEQ ID NO: 293646 - protein, 95 aa, Zea mays
  Clone ID: MRT4577_3088C.1.pep
SEHAKVVQRRLSHDTHPASSRAALLCCSSRVDDSLLPTEVRDIRLAPACSTDPKHRLLLLPLCSIGSSGGRLAPYTRQPPYCDAAFSPSSDVAGS

SEQ ID NO: 293647 - protein, 60 aa, Zea mays
  unsure (1)..(60): unsure at all Xaa locations
  Clone ID: MRT4577_30890C.1.pep
PSFMLVIVLYRGAGNATFVNRHLTGXFDTNYEPTIGVEVHPSHFTTICGKIRFYGWNTAG

SEQ ID NO: 293648 - protein, 285 aa, Zea mays
  Clone ID: MRT4577_30891C.1.pep
MEAGAAAAATAIYPLHRCKTIHLVRHAQGVHNVEGDTDHSAYMKPDFFDARITPLGWNQVDLLREHVKESGLAEKIELVICSPLSRTMQTAVGVFGGESCSNGVSVPPLMVENAGRPAVSSLNCPPFLAVEACRERLGVHPCDKRRSITEYRALFPAIDFSLIESDEDVLWVPDVRETFESLAERGMKFIDWLWTREEREIAIVTHSGLLSHTLRMYSKECHPTVTQEVSKYFANCELRSLVLVDRSMLGSDGPSYNNYPGKMKIPAGLDLPSDDKKQPLQNQSG

SEQ ID NO: 293649 - protein, 101 aa, Zea mays
  unsure (1)..(101): unsure at all Xaa locations
  Clone ID: MRT4577_30892C.1.pep
RGMKFIDWLWXREEREIAIVTHSGLLSHTLRMYSKECHPTVTQEVSKYFANCELRSLVLVDRSMLGSDGPSYNNYPGKMKIPAGLDLSSDDKKQPLQNLSG

SEQ ID NO: 293650 - protein, 308 aa, Zea mays
  Clone ID: MRT4577_30893C.1.pep
MEAGAAAAATAIYPLHRCKTIHLVPYTFSTLPACLICSSSHPYASSLTLSHTHTHQFSHVHEHHHHITQVRHAQGVHNVEGDTDHSAYMKPDFFDARITPLGWNQVDLLREHVKESGLAEKIELVICSPLSRTMQTAVGVFGGESCSNGVSVPPLMVENAGRPAVSSLNCPPFLAVEACRERLGVHPCDKRRSITEYRALFPAIDFSLIESDEDVLWVPDVRETFESLAERGMKFIDWLWTREEREIAIVTHSGLLSHTLRMYSKECHPTVTQEVSKYFANCELRSLVLVDRRSVLHLQTHPFVLAPT

SEQ ID NO: 293651 - protein, 97 aa, Zea mays
  Clone ID: MRT4577_30894C.1.pep
DGVRALNSRLWSYSQGLRRSASTCKGAQVRVLSFGCCSREGRPSSALAQRQAMWSVECPPCLDIGFDIIDCVNAPLQGMVLQSMSHKDGMPPGGGAQ

SEQ ID NO: 293652 - protein, 76 aa, Zea mays
  Clone ID: MRT4577_30895C.1.pep
LKGSSSWLLSPYIWPKMPSALESSGLFNPLVGGYLGLTVHPQWIRGISSRLACISVQKQKSLVLLIVGCMIAHSLL

SEQ ID NO: 293653 - protein, 46 aa, Zea mays
  Clone ID: MRT4577_30896C.1.pep
GRAKLELHYTRSGGLEKTTFYFASHLERVWSINNGKRCPLCLCVRS

SEQ ID NO: 293654 - protein, 48 aa, Zea mays
  Clone ID: MRT4577_30897C.1.pep
VDERVVSDTCEHSLVLEAALTASARRARPMIRTFMVSSSAIWRRLVCC

SEQ ID NO: 293655 - protein, 296 aa, Zea mays
  unsure (1)..(296): unsure at all Xaa locations
  Clone ID: MRT4577_30898C.1.pep
MSPPLLSRLRLVTVDVTGTLIAYRGQLGDYYCMAAXKHAKMPCPDYGRVHEGFKLAYPDMGRMHPCFGHAAAMPAAAWWRMCVRDSFEFVRAGYDYDDETFDRIFRRIYSTFGSAAPYAVFPYXARRFLRWXAREEGLVVGIVSNAEHRYREXVVLPALGLNQGSEWDFGVFSGVVGVEKPDPRIYEAALRQAAGGGGGVAPGEALHIGDSMRKDYARPGAERWRRSGAPVLPDLVAAQEWLAGGARSQGGIEGQLAPGRPVLLARSSKCLGQQTRIGAIIPALGITECPDIDVVV

SEQ ID NO: 293656 - protein, 122 aa, Zea mays
  Clone ID: MRT4577_30899C.1.pep
MAASSGDHSASGDVGCASGECSTPFVSAPSSPARDPSFSAVGCFYSAPASPGTADEYGFQFDFDFSSRCPSPAAAAMSSADELFQNGQIRPMRLASFLLRPQVLPPLNGGVPAGNPPPQPPS

SEQ ID NO: 293657 - protein, 98 aa, Zea mays
  unsure (1)..(98): unsure at all Xaa locations
  Clone ID: MRT4577_3089C.1.pep
HALAPDKEARVCPGRRCHVSNQGSSPVKRRGRHCFAWWAFSALKTQRXYXCLEQRPLNLSASXLLLSSVSGHPSSSGRRNPYLRSASTFLAGPGNRRA

SEQ ID NO: 293658 - protein, 150 aa, Zea mays
  Clone ID: MRT4577_308C.1.pep
MGSSTPSTVVVEEWRKMINGGGGQKRRNPNIIRFQHHIESDPKFFDKLWRASISTTSTLVGFEEAMEELHAKVYKGLSIDQLRQQCNIRILPDMMLDHNDHSLVGCQKNTYRYSTTDGKPYQILVFLSYPTETGLKRSARRGAGLSDSMV

SEQ ID NO: 293659 - protein, 82 aa, Zea mays
  Clone ID: MRT4577_30900C.1.pep
YIVPLQYEAGQVVINNLPTPLLAEGVGLIQEPLESPLIRHGKALQLTRGHAAAVTLQFFCRPPGRREVANAIGDPILSYPAQ

SEQ ID NO: 293660 - protein, 77 aa, Zea mays
  Clone ID: MRT4577_30901C.1.pep
AYFIDGYAGVDCGVHRAQRALAAGRLGLDVRARRRWRRPPSPVGHALIDRSSPAADSRPYVSRCKTKDIICSTHMTS

SEQ ID NO: 293661 - protein, 114 aa, Zea mays
  Clone ID: MRT4577_30902C.1.pep
LRVLEVALPRGVEEAEDAADPRFPFRLRLPQRQQHVFHRCLRPRCTRWAATPSRSPKKCHRRGLSRGGRRSRGSRRGCRWAGLHRLQRRAGHGSGGGGDGDGGEGGRRKRSEPA

SEQ ID NO: 293662 - protein, 53 aa, Zea mays
  Clone ID: MRT4577_30903C.1.pep
SRVFRAKLFTNESMPSLFHLFSKGGFVETFIFEGTAPCALPQRQSIMSNKHTL

SEQ ID NO: 293663 - protein, 77 aa, Zea mays
  Clone ID: MRT4577_30904C.1.pep
CGALKLINTLNFEIESYTGVVLAFGYEGSSHSGRTNRRQTGSSRACSATSAATTPSCAMRQSSCSGSPQADRRVQLW

SEQ ID NO: 293664 - protein, 131 aa, Zea mays
  unsure (1)..(131): unsure at all Xaa locations
  Clone ID: MRT4577_30905C.1.pep
LTDGTFALVEKLDGSNSWVPAYDDDDWSLRFKWSRPSKLSPRSFATLEWTVPGDAPSGVYRLRHFGASKPLIGSIKHFTGTSRAFAXCVRLHTVALRSTAHLSENRHRVIYLLCIPATVYGHVFPIVFTCS

SEQ ID NO: 293665 - protein, 825 aa, Zea mays
  unsure (1)..(825): unsure at all Xaa locations
  Clone ID: MRT4577_30906C.1.pep
MEASSSLRFQVSGFSLSKIWLCLFLVLALQNCSPALSDSPYLVGMGSYDITGPAADVNMMGYANAEQIASGIHFRLKARAFIVAEPNGKRVVFVNLDACMASQLVTIKVLERLKARYGDLYNENNVAISGIHTHAGPGGYLQYVVYIVTSLGFVRQSFDVIVNGIEQCIVEAHNNLHPGKIYVNKGDLLDAGVNRSPSAYLNNPXAEERGKYKYNVDKEMTLIKFVHDESGPIGSFNWFATHGTSMSRTNSLISGDNKGAAARFMEDWAEQNGIPKQAAHVNHDGLESLHMTSRLPRRVSPIIPEPNEITDDLVQLASSYEASGGRRLSSSSITKRIRSTQQNRPKFVSAFCQSNCGDVSPNVLGTFCIDTGLPCDFNHSTCNGKNELCYGRGPGYPDEFESTRIIGNRQFQKAVDLFSSASEEIQGKIDYRHTYLDFSQLEVNVRTSTGGQQVVKTCPAAMGFAFAAGTTDGPGAFDFKQGDVKGNPFWRLVRNLLKTPGKEQVECQAPKPILLDTGEMKEPYDWAPAILPIQIIRIGQLAILCVPGEFTTMAGRRLRDAVKAVLTSDNSGEFNNIHVVLAGLTNTYSQYITTFEEYEIQRYEGASTLYGPHTLSAYIQEFQKLATAMVANKEVPTNFQPPDMLDKQIGLLPGVVFDSTPPGVEFGDVSSDVPASSTFRKGSVVNATFYSACPRNDLLTDGTFALVEKLDGSNSWVPAYDDDDWSLRFKWSRPSKLSPRSFATLEWTVPGDAPSGVYRLRHFGASKPLIGSIKHFTGTSRAFAXCVRLHTVALRCVRRHTCQRIDTGSYIYFAYLPQYMDMFSL

SEQ ID NO: 293666 - protein, 137 aa, Zea mays
  unsure (1)..(137): unsure at all Xaa locations
  Clone ID: MRT4577_30907C.1.pep
EDNANKDAEGAANNVDKYKHKHIPPTCSXEGNDDIINLYENTLFNTYXTTNCQHYFSNAKHYKLVIIVTYDDXKXETLWKIXTVNAKLTQRLTMLEPKQAKYYKQNYLSHQGCELYCTLIELEAXDMDPAENMLEYL

SEQ ID NO: 293667 - protein, 64 aa, Zea mays
  unsure (1)..(64): unsure at all Xaa locations
  Clone ID: MRT4577_30908C.1.pep
SKNDRAQRKPALPSVEPAKKNNSTLHKFFEFPRVRXLVTRYHTTTDHSLCSIRDIYTHTNNLKF

SEQ ID NO: 293668 - protein, 41 aa, Zea mays
  Clone ID: MRT4577_30909C.1.pep
MGINSPSLGSSLPRPLTGSSTTNSNEGKEQSKSNEWVRPGI

SEQ ID NO: 293669 - protein, 91 aa, Zea mays
  Clone ID: MRT4577_3090C.1.pep
EHSCPVSHQRLGDPSRNCQVAAPTHQPLALNCTGRGGDGKGCLVPTKAGGWGGCWPSEMQWSVQPGVKLGEGVSEGSAPPQRTRREAACVP

SEQ ID NO: 293670 - protein, 83 aa, Zea mays
  Clone ID: MRT4577_30910C.1.pep
SLKFKSLGFLRSEEEKNEGVGGKEEARPPQCVFDYSLRNHRLIRLDFPRGSTGNLLNQLLGIGGLTEGQSYGNLNLGMPVSLP

SEQ ID NO: 293671 - protein, 516 aa, Zea mays
  unsure (1)..(516): unsure at all Xaa locations
  Clone ID: MRT4577_30911C.1.pep
MGFSGQNVSCLYYFIMSYFPWLTILVVLPIFAGSLIFFLPHKGNKIVRWYTIAICLLEFLLMTYAFCYHFQLEDPLIQLKEDSKWIDVFDFHWRLGIDGLSLGSILLTGFITTLATLAAWPVTRNSQLFYFLMLAMYSGQIGLFSSRDLLLFFIMWELELIPVYLLLSMWGGKRRLYSATKFILYTAGGSIFFLIGVLGMGLYGSNEPGLDLERLINQSYPTTLEILLYFGFLIAYAVKLPIIPLHTWLPDTHGEAHYSTCMLLAGILLKMGAYGLIRVNMELLPHAHYLFSPWLVIIGAVQIIYAASTSLGQRNFKKRIAYSSVSHMGFIIIGIGSITNIGLNGAILQILSHGFIGATLFFLAGTACDRMRLVYLEELGGISIPMPKIFTMFSSFSMASLALPGMSGFVAELVVFFXGLITSPKFMLMPKMLITFVMAIGMILTPIYLLSMLRQMFYGYKLFHVPNKNFVDSGPRELFLLICIFLPVIGIGIYPDLVLSLSVDRVEVLLSNYYTK

SEQ ID NO: 293672 - protein, 116 aa, Zea mays
  Clone ID: MRT4577_30912C.1.pep
GFVSGLDLCYTRGPQGPVGIGSFLGGHRPDNQRGGLSRRSRGKIRPPGRELQAFDFPPRPPFKTQARVAFVWGGPDPRVPVTPEPAKVGRLFFGGRLKRRGSPPGGFFPAGHGVGF

SEQ ID NO: 293673 - protein, 71 aa, Zea mays
  Clone ID: MRT4577_30913C.1.pep
NEVNCGPYVSIVQTAFQLLAFTQLASVCKLFVDIQHPAWLFELLLQKKCQACIQVRSQAVRLELSAMLNIA

SEQ ID NO: 293674 - protein, 64 aa, Zea mays
  Clone ID: MRT4577_30914C.1.pep
LHPFFTTTLPNIIPTKHVPANPIKIYNIIPNLQHLHHPTNSQHQCVETLLSYQTKPYDYLTYFY

SEQ ID NO: 293675 - protein, 61 aa, Zea mays
  unsure (1)..(61): unsure at all Xaa locations
  Clone ID: MRT4577_30915C.1.pep
EGLFWGASKLVPVGYGFKKLQIMMAIVADLVFVNPFFXDYLWGGPVYEEVQRWAIVAFTKI

SEQ ID NO: 293676 - protein, 72 aa, Zea mays
  Clone ID: MRT4577_30916C.1.pep
APRARNGPPLAWVFAPQLFMLGCCFGERPSRLNPALGFRPFCSPPPLFLVPCLSAWGFAAPFFAPILDFLWG

SEQ ID NO: 293677 - protein, 79 aa, Zea mays
  Clone ID: MRT4577_30917C.1.pep
NQQKMPGGGIKAGQVNKGFGVVNRRPPTKVLQHPPKLGGKPQGNLRLAPERKETRAQRGGGPNHPYLVGGGPPATNSPS

SEQ ID NO: 293678 - protein, 93 aa, Zea mays
  Clone ID: MRT4577_30918C.1.pep
GKSMSPGRGGRQRKNGPGPKGVPRGPKKSGVRAWKNHGHRCRGGERGIRPRSPRETSFDYKGESQGGGKRELTHFTGGKFTARLTAEKTGPQA

SEQ ID NO: 293679 - protein, 168 aa, Zea mays
  Clone ID: MRT4577_30919C.1.pep
VSQKFWGLFSNEGLEQDPPGPLPKLPVGVPSHGKVSKLAGKEKFSHNRGRVLGKKSDFLPPLPPPKRGPCREGQGCFPLWPPLGGPVFVFGALEVPISGFLLYPPPPPRGLPFFSHKKKPCARGETGRKKNKIFFFRGAAFCIQNGLAPVWGSFCCLLRCKAGNVSQF

SEQ ID NO: 293680 - protein, 45 aa, Zea mays
  Clone ID: MRT4577_3091C.1.pep
NVLFLPNGTCSVFIEPSHSQYYLLKLARGQAELHAQEQSLQGHHE

SEQ ID NO: 293681 - protein, 143 aa, Zea mays
  Clone ID: MRT4577_30920C.1.pep
VPRAGREVLSPACLEPVSAGRRLPRIGKTPGERSPESRPRASFPTGGATKSPLCSDVQLYSRAGHHRASTISGLLSSARHLHPWLENCIGAIDGTHVPITIAEDKAPPYRNRKGSLSQNVMLACEVNVAMKRWAYSVLSGSNT

SEQ ID NO: 293682 - protein, 244 aa, Zea mays
  unsure (1)..(244): unsure at all Xaa locations
  Clone ID: MRT4577_30921C.1.pep
MGSWEELARQFLLEEEDDEEFFFILLSAILPFLSEEKRSIHTSSLSGAQKVKEILEGHESWCKSEFRMEPEIFRATSEFLRREGLLRDTRGVNVEEQLGMFMYMISHNASNQMLQKAFQHSGETIHRKISEVFDIVPTLTQRFVKLPNSIQTHPKIITDSRFMPXFQNCIGAIDGTHVPITIAEDKAPPYRNRKGSLSQXVMARPRRALDSILLWNENLSTEHGRTGHPTATNLWPPTAAATNL

SEQ ID NO: 293683 - protein, 80 aa, Zea mays
  Clone ID: MRT4577_30922C.1.pep
GSKHPTPKAQIIQPIHNQPYPFLPKDFPKYFFHNLSTTFSPNTYPPSYINSPQRKTPSHENTQKPHQPLKTPPQFTPHKT

SEQ ID NO: 293684 - protein, 60 aa, Zea mays
  unsure (1)..(60): unsure at all Xaa locations
  Clone ID: MRT4577_30923C.1.pep
EIDLKIXHGDTNLPPRRRPSTASATTFRCFWRTAVSIAXSTSASGRTXVALHHLGLPGTR

SEQ ID NO: 293685 - protein, 99 aa, Zea mays
  Clone ID: MRT4577_30924C.1.pep
ILALFLRPKKDHKYRVYWNVYHHSVGYTVIVLGIVNIFKGMNILGVEQRWRTAYIAAVCVLLIAAAALEAVTWGVVLRRRKAESKTFNSASNGHLPHSV

SEQ ID NO: 293686 - protein, 113 aa, Zea mays
  Clone ID: MRT4577_30925C.1.pep
SNPIITYQVLSYSYLGLSFKYIPIHHQIPIHNSIHRLSHLLHYLNQNTFDHHKTILIPYKLQNEPLLTYQTIHYYSHIANKIYMLNISKLQTQELITLHKAHLITLYNPYIIS

SEQ ID NO: 293687 - protein, 42 aa, Zea mays
  Clone ID: MRT4577_30926C.1.pep
HHSRRHTQSPPSHHPLGAYINNTQKKLRSAHISLEPLHVYDT

SEQ ID NO: 293688 - protein, 165 aa, Zea mays
  unsure (1)..(165): unsure at all Xaa locations
  Clone ID: MRT4577_30927C.1.pep
MNSNLTVKSRNNMADGEPQKEKLIVETYIPADPGPYPQDKPKQNSVRFTPTQIGAIISGIQPGLTMVVGPPGTGKTDTAVQILNVLYHNCPSQRTLIITHSNQALNDLFEKIMQRDVPARYLLLGQGEQELATDLDXSRQGRVNAMLVRRLELLGEVSKLARSLR

SEQ ID NO: 293689 - protein, 101 aa, Zea mays
  Clone ID: MRT4577_30928C.1.pep
FGAFGIVKGLLKIPGGIMAFGLGSPVKDRGSKGPFGEVKPTLRGKVLFGFQIAPQIIRFVSKWKGSGVYFWGFPQEKRQKVFFFIFKTNVGWKKGWFFCGP

SEQ ID NO: 293690 - protein, 250 aa, Zea mays
  unsure (1)..(250): unsure at all Xaa locations
  Clone ID: MRT4577_30929C.1.pep
WVPRGRVGSHPIWRCSPPRHAATTACSSAPAFSPPLPPHTLSLPTPSQTPTPTPSPPRXPVRTPPDEQFAAWVTRLRPGFTASDLAAAITAEEDPDLALALFRWAALRPGFRHAPESYLAALTAASSGRRPAAAEALVHDVFAGACAPDLRLFNACLRFCCARRSLFQLAFDMFNKMRAMPAAAGCRPDVETYTLLLTAVVRRVRRPPASMVYLHAVRSLYRQMKASGVVPDTFLLNLIIKAYARWVEAK

SEQ ID NO: 293691 - protein, 64 aa, Zea mays
  unsure (1)..(64): unsure at all Xaa locations
  Clone ID: MRT4577_3092C.1.pep
GXXRWVPRAGRAGILLLTGRQTSVPPQRPLKLARAGLVLLTVTKAATGTREGSKAQHFEAFCGC

SEQ ID NO: 293692 - protein, 38 aa, Zea mays
  Clone ID: MRT4577_30930C.1.pep
SLVRPPVRILGGIFKHLRGLYWNPPNYLSTGTLMNSHS

SEQ ID NO: 293693 - protein, 76 aa, Zea mays
  Clone ID: MRT4577_30931C.1.pep
KERKEKKGFLYDHSDTQQYSYFDHTGLIKSLLPTWCLGFCSWNNAGPPCLMCNHARKCYQSCRDSCSTTLWIRVTM

SEQ ID NO: 293694 - protein, 254 aa, Zea mays
  unsure (1)..(254): unsure at all Xaa locations
  Clone ID: MRT4577_30932C.1.pep
SACWFWNTLLSVAFLSVAIFATAFLYAVRRPSLPKNAPPLATEAWPIIGSMQFFTQRWDFFQRQMAHSPTGNFSFYAGDKPVIGMSGDEPRRIFFDSKQLGFVEGYGALLGGSPTVNKQQNNPLSEPESSSDGFGNYFSKRLIAMLKGPVLAQGLPQLLEDVRASIKDLAAKETKTIDPFDNIYRLVFQLTMRTVACVEIASDHEMLRKVLGLFETIESTATPLSIMYSWMPWXSKFRRTYSGAKLYMIFQDII

SEQ ID NO: 293695 - protein, 137 aa, Zea mays
  unsure (1)..(137): unsure at all Xaa locations
  Clone ID: MRT4577_30933C.1.pep
HADHNFPCTRYLLIITSSSANNKQCAPRLAXCLLALAMADIVVAPCTAQNSPHDYVDPHNAARADVRAPPVSWDDTVXAYPHSYAAQSQGDCKLIHYGGPYGDNLFWGSDGADWPTSDATHSCLSKNHHHHHDTNSC

SEQ ID NO: 293696 - protein, 56 aa, Zea mays
  Clone ID: MRT4577_30934C.1.pep
GNNKIRKLVERQIIGLDATYKPEKLTLSGLFSDEKRKELSARAREAIKHKSEHRCT

SEQ ID NO: 293697 - protein, 57 aa, Zea mays
  Clone ID: MRT4577_30935C.1.pep
FCLSIYKASASCDSLCKIRGSVYNLAPRNAPPSSCNNNQCYFSLHNFVALFVCTQSR

SEQ ID NO: 293698 - protein, 73 aa, Zea mays
  Clone ID: MRT4577_30936C.1.pep
GGTEAGAAHVRAGSTAYTMHLSKGLLTEGPEGLCPHMPQLHRTHQSDRQGASAVYGRDGGAHVTSDHASWPRC

SEQ ID NO: 293699 - protein, 102 aa, Zea mays
  Clone ID: MRT4577_30937C.1.pep
PGGGDEHRPHWGIIPAHPGRWAVGGLRAVWWPHCEEWIFKTLHSPAFVSAPSSWTQLQGSLGSGLRGWSPHLQSLVCPGRRPAEPPAGAGAPDRRRKPEGAL

SEQ ID NO: 293700 - protein, 2005 aa, Zea mays
  unsure (1)..(2005): unsure at all Xaa locations
  Clone ID: MRT4577_30938C.1.pep
MASNNNVHIGKPPHFDGNNYDYWKITMSMHLRAMVVKVWPIIRVGFLLLKEDQPSISDNVNIHTSNLGMNVFYYALDINXCNCILNLTTAPYIWVKLLEIHEGTSFLQIAKLYXVKXGFEHFIMKEEESVSDMFNRLYEIVKELKGLGFYVPDVDFSGKFLRSFPEKYETIVTMLVRSDLSTTSPTEVLGEILTQDIFKKSQADALSLAKKVKNESIALKAKASXQLKKKIXDEENESESDGDMALFVRKFNKFMKMKRGQPRRGQTSRRNAFNDRKCFECGEPGHIAMNCPSKKKKGKDESDKKKKKYYNKKKDGKAYLVEWDSDDSSDDDDDDTSSKLNAGIAIKEAPSLFSSPPWPLAKGGAXKXITDLNDIKDDDDIDDVDDDGYSYDDLVRMLGEADDYMHKEKEKFKTLKELYKNLQVSFEELKTSHNDLKENCEKLADAQKSSIVHEVEVVTKDVGVTCDLLDSLTSEPLPTNSICDKCKISLNDNIALDESKIIVENEVLVDRINTLTHDLEKAYGGKTKLDFILGSQRCSLNREGLGYVPKKGKNAFVKQKTLFVKECDKVCHKCHKKGHVKKNCPKFKHVSSTCFEHCYVLSHNAKGVHAKFVGTSIVGNKKKAIWVPKTLVTNIQGPKQVWVNYKAGGNHWVLDSGCTQHMTGDMKMFTQMSEEDCSNYDSITFGDNRKGKVKGLGKIAISNDHSISNVLLVEYLNFNLLSVAQLCDLGFCCNFTVEDVIISSVDGSNLKFKGFRHENLYLVDFSSNEAKLTTCLFSKASLGWLWHRRLGHVGMKQLNRLTKHDLVRGLKDVKFEKNKLCSSCQADKSNVFETFKSFAILAQNQFDFDIKKVRSDNGSEFKNARIDQYCDDKGIKHEFSSKYTPEQNGIVERKNRTLIDMARSMLAEYSISDSYWAEAINTACHSSNRLYCHKLLKKTPYELLIGRKPNISYFRVFGCKCYILRKGSRLSKFEKKCDEGFLLGYSSNSKAYRVFNKTHGIIEEAYDVEFDETNGSQDESENLDDVGGTQLIDAMKTMAIGEIKPKEDDDENSVVVIPSSSTINEEDHQGQQLNETMDTHDQGTSRPSVPPNASTSNYQTVSRIHHSIVKDHPVDQIVGDISKGVQTRSRIASFCEHFSFVSCMEPNRVDEALLDVDWVNAMHEELNNFARNEVWELVERPKNHNVIGTKWVFRNKHNEDGVVVRNKARLVAQGYTQIEGLDFGETFAPVARLEAIRILLAYACAHNIKLYQMDVKSAFLNGKISELVYVEQPPGFEDPKRPNHVFKLSKALYGLKQAPRAWYERLRDFLLSKDFKIGKVDTTLFTKRIGKDLFVCQIYVDDIIFGSTNELFCEEFGKIMSKEFEMSMIGELSFFLGLQIKQLKDGIFISQSKYLKDMLKKFGLENAKPIKTPMATNGHLDLDEGGTMVDQKLYRSIIGSLLYITASRPDVMFSVCMCARFQASPREIHLKAAKRILRYLKYTPNIGLCGFGGLRKKLAGRFKSKRPRGNDDDYTPTTDSEAQSSAGGTESMDAEDFPHVHPDYPIDIQGWTYPKRRFSMAEYCSRRTVNQYTLPSDTNIQFFHTQLQFDVFWGTLVDTNFHKHQVIDWSFLLSQSVMEGLIPKFETCGLYQFMGQRTDFNEMAVKQFLATSEIDIEEESITWMTGFKRYSASFADFAAANSLDYGTISAGMDLYTEDNFEDFVQFYELARLGIPRRFGETAGLRHHPAVINKIARVTILPKSGDKSKIRDKFWNIIQHIMNGEVMNIVLFMMRQLNDLKMDKNQNLAYAPYIMALIKSKTRFEGPCEIVHTPFRPFKNEIGFLTRPLTPFPDDEEDPGYEGGAAPNVEGQQMPPPPPPPQPQHYWEPAPGYFDPYFHNMQQELETHIDTRFDGLMSHVDHRLDDMQSRFDSNWDALNSEFSEFRDQIHTNVTDPIMSRLNNMQQSFQDNMGALSSQFDNLSTNDNMHDISQRQQQLQQDFGQFSSLFDTFSTHYYNMHPPPSDQ

SEQ ID NO: 293701 - protein, 1581 aa, Zea mays
  Clone ID: MRT4577_30939C.1.pep
MVLSMDAQFDVTQEWLDRVKIARKGLRGTKRRQLSDIDDVDDDGYSYDDLVRMLGEADDYMHKEKENFKTLKELYKNLQVSFEELKTSHNDLKENCEKLADAQKSSIVHEVEVVTKDVGVTCDLLDSLTSEPLPTNSICDKCKISLNDNIALDESKIIVENGVLVDRINTLTHDLEKAYGGKTKLDFILGSQRCSLNREGLGYVPKKGKNAFVKQKTLFVKECDKVCHKCHKKGHVKKNCPKFKNVSSTCFEHCYVLSHNAKGVHTKFVGTSIVGNKKKAIWVPKTLVTNIQGPKQVWVNYKAGGNHWVLDSGCTQHMTGDMKMFTQMSEEDCSNYDSITFGDNRKGKVKGLGKIAISNDHSISNVLLVESLNFNLLSVAQLCDLGFCCNFTVEDVIISSVDGSNLKFKGFRHENLYLVDFSSNEAKLTTCLFSKASLGWLWHRRLGHVGMKQLNRLTKHDLVRGLKDVKFEKNKLCSSCQADKSNVFETFKSFAILAQNQFDFDIKKVRSDNGSEFKNARIDQYCDDKGIKHEFSSKYTPEQNGIVERKNRTLIDMARSMLAEYSISDSYWAEAINTACHSSNRLYCHKLLKKTPYELLIGRKPNISYFRVFGCKCYILRKGSRLSKFEKKCDEGFLLGYSSNSKAYRVFNKTHGIIEEAYDVEFDETSGSQDESDNLDDVGGTQLINAMKTMSIGEIKPKEDDDENSVVAIPSSTTINEEDHQSQQLNETMDTHDQGTSRPSVPPNASTSNYQTVSRIHHSIVKDHPVDQIVGDISKGVQTRSRIASFCEHFSFVSCMEPNRVDEALLDVDWVNAMHEELNNFARNEVWELVERPKNHNVIGTKWVFRNKHNEYGVVVRNKARLVAQGYTQIEGLDFGETFAPVARLEAIRILLAYACAHNIKLYQMDVKSAFLNGKISELVYVEQPPGFEDPKRPNHVFKLSKALYGLKQAPRAWYERLRDFLLSKDFKIGKVDTTLFTKRIGKDLFVCQIYVDDIIFESTNELFCEEFGRMMSKEFEMSMIGELSFFLGLQIKQLKDGIFISQSKYLKDMLKKFGLENAKPIKTPMATNGHLDLDEGASPREIHLKAAKRILRYLKYTPNIGLCGFGGLRKKLAGRFKSKRPRGNDDDYTPTTDSEAQSSAGGTESMDAEDFPHVHPDYPIDTQGWTYPKRRFSMAEYCSRRTVNHQSVMEGLIPKFETCGLYQFMGQRTDFNEMAVKQFLATSEIDIEEESITWMTGFKRYSASFADFAAANSLDYGTISAGLDLYTEDNFEDFVQFYEPARLGIPRRFGETAGLRHHPAVINKIARVTILPKSGDKSKIRDKFWNIIQHIMNGEVMNIVLFMMRQLNDLKMDKNQNLAYAPYIMALVKSKTRFEGPCEIVHTPFRPFKNEIGFLTRPLTPFPDDEEDPGYEGGAAPNVEGAQMPPPPPPPQPQQYWEPALGYFDPYFHNMQQGLETHIDTRFEGLMTHVDHRLDDMQSRFDSNWDALNSEFSEFRDQIHTNVTDPIMSRLNNMQQSFQDNMGALSSQFDNLSTNDNMHDISQRQQQLQQDFGQFSSLFDTFSTHYYNMHPPPSDQ

SEQ ID NO: 293702 - protein, 249 aa, Zea mays
  Clone ID: MRT4577_3093C.1.pep
MQRISLRLLRSSYTAASASLSTTSSSLRGLAVSHGGWTTRPSLQPPVRTAAPVELTRWPPRRGYSQFASGFTPLKPKPLGSILDIERAKGLSPDHLVAAWDDYHLGRGHIGASMKAKLYHLLEQRSASCRHFVIPLWKGSGYTTMFMQVQMPYMVFTGLEDYKARGTQASPYYTVTHYTEFAETKDTVLIRGDVVFTSKLTDSEAKTLLETAHSFYLNDVRYRLVERFNKETHDFEFGDVLKVLDMPTM

SEQ ID NO: 293703 - protein, 80 aa, Zea mays
  unsure (1)..(80): unsure at all Xaa locations
  Clone ID: MRT4577_30940C.1.pep
NQCLVSEEAHVHFAVLVGVFYAVRLSVVVIAGVVGLIVLCVEVPISLDXVYGAEKICIVPGVVSASSVRAGPRGLRGCGP

SEQ ID NO: 293704 - protein, 220 aa, Zea mays
  unsure (1)..(220): unsure at all Xaa locations
  Clone ID: MRT4577_30941C.1.pep
RAXWLGLAMXRGARXNNAPVXLRRRRPKRQREPAPRPTGXRRRRRHRXWRPGQSRQPRGXXGREXXLAXWCSGTLNCATPRGAVHRXSCVSRRLCGPSXERVPVDGRPLRLAGRPRMGWPRWRAXGAAPGAPSWAXWPALAKLXSSSAAGXRRRAVRXPLHXACPCLFQDVTSRSFLVAPVAGCDPALPCRTPCEHAVPRRPTTTWVAYRGVXPGIHALP

SEQ ID NO: 293705 - protein, 89 aa, Zea mays
  Clone ID: MRT4577_30942C.1.pep
HLQVLSSIPLGSEFSGLVKKFPSLCSIRSRVTMSCAPPFGWAVPEWTVDAGPLVMGARVQGFLVRDHCFGNIGRAGFPYGRVFHLRYIS

SEQ ID NO: 293706 - protein, 982 aa, Zea mays
  unsure (1)..(982): unsure at all Xaa locations
  Clone ID: MRT4577_30943C.1.pep
WVGIQNARIDEYCDDKGIKHEFSSKYTPEQNGIVERKNRTLIXMARSMLAEYNISDSYWAEAINTACHSSNRLYYHKLLKKTPYELLIGRKPNISYFRVFGCKCYILRKGSRLSKFEKKCDEGFLLEYSSNSKAYRVFNKTHGIIEEAYDVEFDKTNGSQDESDNLDDVGGTQLINAMKTMAIGEIKPKEDDDENSVVVIPSSSTLNEEDHQSQQHDETMDTHDQGTSRHSVPPNASTSNYQTVSRIHHSIVKDRPVDQIVGDISKGVQTRSRIASFCEHFSFVSCMEPNRVDEALLDVDWVNAMHEELTNFARNEVWELVERPKNHNVIGTKWVFHNKHNEDGVVVRNKARLVAQGYTQIEGLDFGETFAPVARLEAIRILLAYASAHNIKLYQMDVKSAFLNGKISELVYVEQPPGFEDPKRPNHVFKLSKALYGLKQAPRAWYERLRDFLLSKDFKIGKVDTTLFTKRIGKHLFVCQIYVDDIIFGSTNELFCEEFGKMMSKEFEMSMIGEFSFFLGLQIKQLKDGIFISQSKYLKDMLKKFGLENAKPTKTPMETNGHLDLDEGGRFKSKRPHGDDADYTPTTDSEAQSSAGGTESMDTEDFPHIHPDYPIDTTGWTYPKRRFSMAEYYSRRTVNQYTLPSDTNVQFFHTQLQFDVFWGTLVDTNFHKHQVIDWSFMLGQSVMEDLIPKFETCGLYQFMWQRTDFSEMAVKQFLATSEIDIEEESITWMTGFKRYSASFADFATANSLDYGTISAELDLYTEDNFEDFVQFYEPARLGIPRRFGETAGLRHHPAVINKIVRVTILPKSGVKSKIRDKFWNIIQHIMNGEVMNIVLFMMRQLNDLKMDKIQNLAYAPYIMALIKAKTRFEGPCEIVHTPFRPFKNEIGFLTRPLTPFPDDEEDPGYNAGAAPDVEAEQMPPPPPPPQPQQYWQPGPGYFDPYFHNMQQGLQTHIDTRFEGMMTHVDHRLDDMQSRFDSN

SEQ ID NO: 293707 - protein, 881 aa, Zea mays
  Clone ID: MRT4577_30944C.1.pep
MATYFHVALSRPARTWLMNQAPGSICSWEELCARAEARRKKRNKNCGHERLQFAVSVVAAAAGSQGERSKRPRPQGSSGGTCPVHPNSRHRAADYREIIKLARRVSERREQSSKDDSPSHRRPGQKGADRKAAAAEGRDLGYQSPEGDLKDVFTRDSDSSDDGDRRKKLYVMYDRSWELISRRSVKSLRWEVLSTVPGVPKTAPHQRWRGTTISFGASDCPNNMAGAGVLPLITAPIVANIITLPVTFGTEENFRTENVQFDVTEVNLPFNAIIGRPVLYRFMAIAHHGYLVLKMSSPVGILTVRGDRTAALAAVEKLHTLAAKIARPDDGGRGPSVPSARAPSKAPKVQPSGADGGPAKTVQEPSHMPGIPREVIEHQLKVYPDAKPVHHPVWLANPVIVPKANGKLRMCIDYTSLNKACPKDPYPLPRIDQIVDSTSGCDLLSFLDAYFGFHQIRMAKEDRRHTTFVTVDGLYCYVVMPYGLRNALPTFVQAMSKTFGDLIRDKVEIYVDDIMVKTREGSTIVEDPTLVFSKLRATRTKLNPEKCIFGVSAGKLLGFLVSYWGIEANPEKIKAIEVMRPPAHIKDIQKLTGSLAALSRFISRLAERALPFFKLLWKSSPFAWIEEVEQAFRELKQHLASLPILVAPEPGEPLYLYIAAAAEAISMVLVAERAAQEGQKPGNLGPATETRTVQKPVYYVSEVLHEAKARYLETHKLLYAVLVASRKLRHYFQAHKVVVVTSFPLRAILYNPNATGNIAKWAAELAEFQLDFETRHAIKSQVLAGFIVEWTPPPCAPGGPDPAPDPTPAERRGPIFTEPHWTLFFDGSARQQSAGAGVVLTDPGGDQLRYVVCLEFKATNNMAEYEALIFGLSAALSLGVL

SEQ ID NO: 293708 - protein, 103 aa, Zea mays
  Clone ID: MRT4577_30945C.1.pep
TWVLSPVSLIIFLQLTTCMISVRGSSSSSRTLTSSPPCLTPSALIITTCILRRVISKASPLWQLMPKGERSDEKLSGVSFRGSWWFYVDTKTMHMHFIFFVPF

SEQ ID NO: 293709 - protein, 957 aa, Zea mays
  unsure (1)..(957): unsure at all Xaa locations
  Clone ID: MRT4577_30946C.1.pep
MATYFHVALSRPARTWLMNQAPGSICSWEELCARFVANFACAYQRHGVEAHLHAVRQEPGETLRVFISCFTKLTNAXSHRGPCMTLGTTGQGYQDGQLGFRYXGGGKKKKEKQELRPRKAXQFAVSVVAAAAGSQGERSKRPRPQGSSGGTCPVHPNSRHRAADYREIIKLARRVSERREQSSKDDXRRPTAGQVRRELTERPRLRRDETSATSRXGDLKDVFTRDSDSSDDGDRRKKLYVMYDRSWELISRRSVKSLRWEVLSTVPGVPKTAPHQRWRGTTISFGASDCPNNMAGAGVLPLITAPIVANMWLHHVLIDGGADLNVISHAAFRQLQFDVTEVNLPFNAIIGRPVLYRFMAIAHHGYLVLKMSSPVGILTVRGDRTAALAAVEKLHTLAAKIARPDDGGRGPSVPSARAPSKAPKVQPSGADGGPAKTVQEPSHMPGIPREVIEHQLKVYPDAKPVHHPVWLANPVIVPKANGKLRMCIDYTSLNKACPKDPYPLPRIDQIVDSTSGCDLLSFLDAYFGFHQIRMAKEDRRHTTFVTVDGLYCYVVMPYGLRNALPTFVQAMSKTFGDLIRDKVEIYVDDIMVKTREGSTIVEDPTLVFSKLRATRTKLNPEKCIFGVSAGKLLGFLVSYWGIEANPEKIKAIEVMRPPAHIKDIQKLTGSLAALSRFISRLAERALPFFKLLWKSSPFAWIEEVEQAFRELKQHLASLPILVAPEPGEPLYLYIAAAAEAISMVLVAERAAQEGQKPGNLGPATETRTVQKPVYYVSEVLHEAKARYLETHKLLYAVLVASRKLRHYFQAHKVVVVTSFPLRAILYNPNATGNIAKWAAELAEFQLDFETRHAIKSQVLAGFIVEWTPPPCAPGGPDPAPDPTPAERRGPIFTEPHWTLFFDGSARQQSAGAGVVLTDPGGDQLRYVVCLEFKATNNMAEYEALIFGLSAALSLGVL

SEQ ID NO: 293710 - protein, 118 aa, Zea mays
  Clone ID: MRT4577_30947C.1.pep
MDAEDFLHVHPDYPIDIQGWTYPKRRFSMAEYCSRRTVNQYALPSDTNIQFFHTQLQFDVFWGTLVDTNFHKHQVIDWSFLLSQSVMEGLIPKFETCGLYQSEAAAAPAGLWPVLLPV

SEQ ID NO: 293711 - protein, 1078 aa, Zea mays
  unsure (1)..(1078): unsure at all Xaa locations
  Clone ID: MRT4577_30948C.1.pep
MGRSFSSTAAPVRPAALAAPPLLLFLLLGLLGAAAANVGDSCSTSADCGAGQWCFDCEPQLSGSHCVRSAATNPFQLINNSLPFNKYAYLTTHNAYAIVGEPSHTGIPRVTFDNQEDTNGVRALMLDTYDFKGDVWLCHSSGGKCNDFTAFEPALDTFKEIEAFLAANPSEIVTLILEDYVHAPNGLTNVFNASGLLKYWFPVSRMPPSGQDWPLVSDMVATNQRLLVFTSVSSKQSAEGIAYQWNFMVENNYGDDGMDAGKCSNRAESAPLNDNTKSLVLMNYFPSLPVKFTACLQHSQSLVDMVSTCYGAAGNRWANFVAVDYYKRSDGGGAFQATDLLNGRLLCGCQDIRACSQAFPKSTYNGIEYVVPEQPHKQQLNKKNPTWTLIKEKRGIRLSFREETTSARALMSRDVKTVYSPPLANVLDPTSGIGAEDSIVCGLIIPEWNKMASNNNVHIGKPPHFDRNNYNYWKIRMSMHLRAMGGKIWPIVKDRFVVLKEDEPSISDNENILTNDQAMNVFYDALDINEFNRIKNLTTAHEIWIKLMEIHEGTTIVKSAKLYVCKGKFEQFIMKEDESVSDMFNRLNEIVNELKGLGFNVLDVDFTHKFLRSLPEKYETIVTMLVRSDLSTTSPTEVLGEILTQDIFKKSQADAISLAKKVNNESIALKAKASXQLKKKIXDEKNESESDGDMALFVKKFNKFMKMKRGQSRRSQTSRRNAFNDRKCFECGEPGHIAMNCPNKKKKGKDEDDKKKKKFYNKKKDGKAYLVEWDSDDSSDDDDDDTSSKLNAGIAIKEAPSLFSSPHCLMANGDAKVKIFTDLNGINDDDDVDDDGYSYDDLVRMLGEVNDYMHKEKEKFKTLKELYINLQVSFEELKTSHNDLKENCEKLAEAQNSSIVHEVVVVTEDVGVTCDLLDSPTSEPLPTNSICDKCKISLINDNIALDESQIIIENEVLVDRVNALTYDLEKAYGGKAKLDFILGSQRCSLNREGLGYVPKKGKNAFVKQKTLFVKECDKVCHKCHKKGHIKKNCPKLKNVSSTCFEHCYVLSHNAKGVHAKFVGTSIVGNKKKAIWVPM

SEQ ID NO: 293712 - protein, 225 aa, Zea mays
  Clone ID: MRT4577_30949C.1.pep
MGGGATNLPPGFHFFPSDEDLVVHFLRRKAANLPCRPDIVPTILLHRYDPWELNGTALQAGNQWYFFSSHAHAHAHAAAGQTRTSPSGYWNPAGADETVVLASSGRVVGLKKTLVFCTGEPFRGFRTNWVMHEYHLQDGPAGCNVGGSSGATTPSSSSSSGSSRRSQRKRVHSSTESINSWVICRVFESSCGSQVSFHDEGTELSCLDEVFLSLDDYDEVSLPNN

SEQ ID NO: 293713 - protein, 64 aa, Zea mays
  Clone ID: MRT4577_3094C.1.pep
YWYYYSSTSTVVSGMACIRTGCDSSNVMLVPVIRTSRRCLPVLLVPVMYRCCYQCYKYLGHWFV

SEQ ID NO: 293714 - protein, 36 aa, Zea mays
  Clone ID: MRT4577_30950C.1.pep
TFRFSEFFRKAARALTNSCWLTSGTVTAVILRHPRR

SEQ ID NO: 293715 - protein, 99 aa, Zea mays
  Clone ID: MRT4577_30951C.1.pep
FRFQSSPVGALQEAPKASLVGLFEDTNLWAIPAKGVPFMPKDIQLGRRIRGERALTRRAPLPPGGVVVALAPLVGPGPLLVPLPGGKGLLGPLGLFLES

SEQ ID NO: 293716 - protein, 106 aa, Zea mays
  unsure (1)..(106): unsure at all Xaa locations
  Clone ID: MRT4577_30952C.1.pep
MDTSMRQGAIQEQLAEAQEAQQRANAARGAHPTWRTQTKEEAXREIAIHRAQMEAEDQRQVTVRSGDSGANGKRVEEETTEKPGQLNQQGACIYPDVYNXLVRHVS

SEQ ID NO: 293717 - protein, 256 aa, Zea mays
  Clone ID: MRT4577_30953C.1.pep
MTGFKRYSASFADFATANSLDYDTISAGLDLYTEDNFEDFVQFYEPARLGIPRRFGETAGLRHHPAVINKIARVTILPKSGDKSKIRDKFWNIIHHIMNGEVMNVVLFMMRQLNDLKMDKNQNLAYAPYIMALIKAKTRFEGPCEIVHTPFRPFKNEIGFLTRPLTPFPDNEEDPGYDAGAAPDVEAEQMPPPPPPPQPQQYWQPGPGYFDPYFHTMQQGLETYIDTRFEGMMTHMDHRLDDMQSRFVGMRSTLSF

SEQ ID NO: 293718 - protein, 1921 aa, Zea mays
  Clone ID: MRT4577_30954C.1.pep
MASNNNVHIGKPPHFDGNNYDYWKIRMSMHLRAMGGTIWPIVRDGFVVLKEDEPSVSDNENILTNDQAMNVFYDALDINEFNRIKNLTTAHEIWVKLMEIREGTTIVKSAKLYVCKGKFEQFIMKEDESVSDMFDRLNEIVNELKGLGFNVPDVDFTHKFLRSLPEKYETIVTMLVRSDLSTTSPTEVLGEILTQDIFKKSQADALSLAKKVKNESIALKAKASKAIEKEDSNDEENESESDGDMALFVRKFNKFMKMKRGQPRRGQTSRRNAFNDRKCFECGEPGHIAMNCPSKKKKGKDESDKKKKKYYNKKKDGKAYLVEWDSDDSSDDDDDDTSSKLNAGIAIKEAPSLFSSPHCLMAKGDAKVKIITDLNDINDDDDIDDVDDDGYSYDDLVRMLSEADDYMHKEKEKFKALKELYKNLQVSFEELKTSHNDLKENCEKLADAQKSSIVHEVEVVTKDVGVTCDLLDSLTSEPLPTNSICDKCKISLNDNIALDESKIIVENEVLVDRINTLTHDLEKAYGGKKKLDFILGSQRCSLNREGLGYVPKKGKNAFVKQKTLFVKECDKVCHKCHKKGHVKKNCPKFKHVSSTCFEHCYVLSHNAKGVHAKFVGTSIVGNKKKAIWVPKTLVTNIQGPKQVWVNYKAGGNHWVLDSGCTQHMTGDMKMFTQMSEEDCSNYDSITFGDNRKGKVKVEDVIISSVDGSNLKFKGFRHENLYLVDFSSNEAKLTTCLFSKASLGWLWHRRLGHVGMKQLNRLTKHDLVRGLKDVKFEKNKLCSSCQADKSNVFETFKSFAILAQNQFDFDIKKVRSDNGSEFKNARIDQYCDDKGIKHEFSSKYTPEQNGIVERKNRTLIDMARSMLAEYNISDSYWAEAINTACHSSNRLYCHKLLKKTPYELLIGRKPNISYFRVFGCKCYILRKGSRLSKFEKKCDEGFLLGYSSNSKAYRVFNKTHGIIEEAYDVEFDETNGSQDENDNLDDVGGTQLINAMKIMAIGEIKPKEDDDENSVVVIPSSSTINEEDHQSQQLNETIDTHDQGTSRPPIPPNASTSNYQTVSRIHHSIVKDHPVDQIVGDISKGVQTRSRIASFCEHFSFVSCVEPNRVDEALLNVDWVNAMHEELNNFARNEVWELVERPKNHNVIGTKWVFRNKHNEDGVVVRNKARLVAQGYTQIEGLDFGETFAPVARLEAIRILLAYACAHNIKLYQMDVKSAFLNGKISELVYVEQPPGFEDPKRPNHVFKLSKALYGLKQAPRAWYERLRDFLLSKDFKIGKVDTTLFTKRIGKDLFVCQIYVDDIIFGSTNELFCEEFGKMMSKEFEMSMIGELSFFLGLQIKQLKDGIFISQSKYLKDMLKKFGLENAKPIKTPMATNGHLDLDEGVACGQSDSLQQHSLNVSSSRGFGGLRKKLAGRFKSKRPRGNDDDYTPTTDSEAQSSAGGTESMDAEDFLHVHPDYPIDIQGWTYPKRRFSMAEYCSRRTVNQYALPSDTNIQFFHTQLQFDVFWGTLVDTNFHKHQVIDWSFLLSQSVMEGLIPKFETCGLYQFMGQRTDFNEMAVKQFLATSEIDIAEESITWMTGFKRYSASFADFAAANSLNYGTISAGVDLYTEDNFEDFVQFYEPARLGIPRRFGETAGLRHHPAVINKIARVTILPKSGDKSKIRDKFWNIIQHIMNGEVMNIVLFMMRQLNDLKMDKNQNLAYAPYIMALIKSKTRFEGPCEIVHTPFRPFKNEIGFLTRPLTPFPDDEEDPGYAGGAAPNVEEQQMPPPPPPPQPQHYWEPAPGYFDPYFHNMQQGLETHIDARFDGLMSHVDHRLDDMQSRFDSNWDALNSEFSDFRDQIHTNVTDPIMSRLNNMQQSFQDNMSALSSQFDNLSTTDNMHDISQRQQQLQQDFGQFSSLFDTFSTHYYHMHPPPSDQ

SEQ ID NO: 293719 - protein, 842 aa, Zea mays
  Clone ID: MRT4577_30955C.1.pep
MPSQREQDGSTGHLFIGTGRSPCKITLMPFAFINNSIGILRGLIMPFTFGSNSIVIHRGLNSLFIFKSVSFSATTPKLSCSHLRRYINLRIIWASPTVISTRVQRYLFTHYTPETLLNLVFEDLRKPKAPNSVIISSVDDSNIKFKGFRYENLYLVDFSSSEAKLTTCLFSKASLGWLWHRRLGRVGMKQLNRLTKHDLVCWLKDVKFEKNKLCSSCQAGKQVANTHPNKSQISTHRPLELLNIDLFGPTSFVSIGGNSYCLVIVNDYSRFTWVYFLRDKSNVFETFKSFAILAQNQFDFDIKKVRSDNGSELKNARIDEYCDDKGIKDEFSSKYTPEQNGIVERKNRTLIDMARSMLAKYNVSDSYWAEAIITACHSSNRLYCHKLLKKTPYELLIGRKPNISYFRVFDCKSYILRKGSRLSKFEKKCDEGFLLGYSSNNKAYRVFNKTHGIIEEAYDVEFDETNGSQDESNNIDDVGGTQLKNAMKTMAIGEIKPKEDDDENSVVVIPSSSTLNEEDHQSQQNDETMDTHDQDTSSHSVPPHASTSNYQTVSRIHHSIVKDHPVDQIVGDISKGVQTRSRIASFCEHFSFVSCMEPNCVDEALLDVDWVNAMHEELNNFTRNEVWELVERPKNHNVIGTKWVFRNKHNEDGLVVRNKARLVAQGYTQIEGLDFGETFAPVARLEAIRILLAYACAYNIKLYQMDVKSAFLNGKISELVYVEQPLGFEDHKRPNHVFKLSKALYGLKQAPRAWYERLRDFLLSRDFKIGKVDTTLFTKRIGKDLFVCQIYVDDIIFGSTNELFCKEFGKMMSKEFEMSMIGELSFFLGLQIKQLKDGIFIS

SEQ ID NO: 293720 - protein, 128 aa, Zea mays
  unsure (1)..(128): unsure at all Xaa locations
  Clone ID: MRT4577_30956C.1.pep
TESLLXLRAQNLLALLGVKGSRRALLTSLTXKGDRDTVLVTXRVVDTSAGKDGVRSIGLRAGDEVVTVIVLEEVVLRDGTLVVLAAGAERLMRRMVSHHALIHAHYIGARALSWKRCGVKEHLLCLWY

SEQ ID NO: 293721 - protein, 63 aa, Zea mays
  Clone ID: MRT4577_30957C.1.pep
ALARPPYENSRSHRSSTDNLRLSRPPCAAPSIISCRPSHFSQLYTRIMLVSGARPTQALMRFS

SEQ ID NO: 293722 - protein, 60 aa, Zea mays
  Clone ID: MRT4577_30958C.1.pep
GFCFFTYYTLLFRAQRKKFVSKLQLRTPAFSYNIPKDREENFNIELDASSFAMGGSTEDT

SEQ ID NO: 293723 - protein, 40 aa, Zea mays
  Clone ID: MRT4577_30959C.1.pep
VPKRAQKKKKKQKKKKKKKKKKKKKKKKKKKKKKKKKKKK

SEQ ID NO: 293724 - protein, 79 aa, Zea mays
  Clone ID: MRT4577_3095C.1.pep
TLTTREYNPQPAVGCSNNLQAAQNDIWPWHNEQTVLERRLLAQPRRLQLASTNMVKVTRYSRCYPTRMNVSYTLAKAAK

SEQ ID NO: 293725 - protein, 72 aa, Zea mays
  Clone ID: MRT4577_30960C.1.pep
KIQFFFLRGNYIYGGQHIKTEGFFSGSKSNQLFVKPNPLLKGLDRILLQTTQDLMVDDPFFHKRTVPHISLE

SEQ ID NO: 293726 - protein, 53 aa, Zea mays
  Clone ID: MRT4577_30961C.1.pep
GLLYLSENWKPQFTFRHCKAYLIVVFRMQTLTLNNLCLFENFLNHCTKPTFSN

SEQ ID NO: 293727 - protein, 89 aa, Zea mays
  unsure (1)..(89): unsure at all Xaa locations
  Clone ID: MRT4577_30962C.1.pep
MDASVAGRTANKGAPARKVVAPRKKSVSRIIKAALQCLIRRIGRYLKKGEAXSSVGTQAYVYLGNVLEYLATHVLELAGNAVKDNKKTR

SEQ ID NO: 293728 - protein, 62 aa, Zea mays
  unsure (1)..(62): unsure at all Xaa locations
  Clone ID: MRT4577_30963C.1.pep
LEVLSEQQFVDCDHECDSSEPDSCHSGSNGALMTTAFSYLHKAGRXESDNDYPYTGSDSLCK

SEQ ID NO: 293729 - protein, 204 aa, Zea mays
  unsure (1)..(204): unsure at all Xaa locations
  Clone ID: MRT4577_30964C.1.pep
VGSXQLFLSGFVADPLPRISHLGDTSHQPPQPFSMXCLPKTAGAGDGVGEFVATSARPPPLALRSSPRLRQSAAGATLDLSSPAAGDDVRTTNLHRSPAGGRKPEVPKTRWKALRRSPARRNEDASGHWREMDRGGAMAVSGVRRGGCGAEGCQRPIAAVPGAGCAVLGWRCPRRDGRRRGRRGQGHASVHRPGPAGERGLGHG

SEQ ID NO: 293730 - protein, 150 aa, Zea mays
  unsure (1)..(150): unsure at all Xaa locations
  Clone ID: MRT4577_30965C.1.pep
MLVPWGGVGCCLSAAALYLLGRSSGXRDAEVLRSVARTGSLKDLAAILDTASKVLPLVVAVSGRVSSDTPLICQQSGMRGVIVEETAEQHFLKHNDAGSWIQDSAVMLSVSKEVPWYLDDGTGRVYVVGARSAAGLILTVASXEVFEESG

SEQ ID NO: 293731 - protein, 197 aa, Zea mays
  unsure (1)..(197): unsure at all Xaa locations
  Clone ID: MRT4577_30966C.1.pep
TVCRLGVRRRRWRSSTKTTATFCAPAAXVIRKIMRIQITADAECYLVAALCPQGDPLAXYTWRLDAPHDTLYVHARWXFFRTWRISGTIYVISLNXSGGECRTCLMITSSAMVYQENLMTAXGRTDPNMNLELVIQNCRLVPXDQKLLLDRFKHLYSLCRPCKEVSCLGIMESTINDLLXTEGYMLWDGDSSIKTLY

SEQ ID NO: 293732 - protein, 52 aa, Zea mays
  Clone ID: MRT4577_30967C.1.pep
PYNPTYLFILTLSQSLTHLLLFILSFHTQSPLNLTHNLSLVPIPLLPPHLIT

SEQ ID NO: 293733 - protein, 131 aa, Zea mays
  unsure (1)..(131): unsure at all Xaa locations
  Clone ID: MRT4577_30968C.1.pep
MLFLFLIFLGFCLHLRLGEPLFWGAEPPEKPXPPNTGAPPPPAGLFAPLTWGRPLPXPPNGPRRGPTWEPRPRPGGPGAPPPPGGRHRGAPPGQSYPPPQGGGQKGGAPPGGGAPAPPKVKGTPPGKISPG

SEQ ID NO: 293734 - protein, 45 aa, Zea mays
  Clone ID: MRT4577_30969C.1.pep
IHYPSFYNFVTDKTLSLPNLTTFHHIHLPTPYLIPNIPTPINSSN

SEQ ID NO: 293735 - protein, 52 aa, Zea mays
  Clone ID: MRT4577_3096C.1.pep
KLVGPPTLPFVEVVFNHPPEVTTSVVNHQQHEGELAAAAAPPLPDDDDDLIE

SEQ ID NO: 293736 - protein, 76 aa, Zea mays
  unsure (1)..(76): unsure at all Xaa locations
  Clone ID: MRT4577_30970C.1.pep
LPFTPSKKXFLSKIHMYNTLRGGILYWERWNINFTNLPSIQSSFLTLDTKPRPLIPIYLQFFTYNILHRYTTNIIT

SEQ ID NO: 293737 - protein, 62 aa, Zea mays
  Clone ID: MRT4577_30971C.1.pep
SLLLFDLAWHELRGVMLNIHNQQTLSSSPHVCDLEIARDIKGKHEYVDLESYQQLQNAKSRS

SEQ ID NO: 293738 - protein, 99 aa, Zea mays
  Clone ID: MRT4577_30972C.1.pep
EFQRYAELVMAHLVEEINDSDYFSDGVPKEMMRVDDVLVRIANISLIEEKMAATGPGKITNIFPNYLLYEFQGLSGGRIWKAEHDLLLLRGILKHGYAR

SEQ ID NO: 293739 - protein, 699 aa, Zea mays
  Clone ID: MRT4577_30973C.1.pep
DLLEDYLSYRKWTYERIDGKISGADRQIRIDRFNAKNSTRFCFLLSTRAGGNSARLATADTVIIYDSDWNPHADLQAMARAHRLGQTSKVMIYRLVSRGTIEERMMQLTKKKILLEHLVVGRLTKANNVNQEELDDIIRYGSKELFEDENDESRQIHYDEAAIERLLDRDQVDGDESVEDEEEDGFLKGFKVANFEYIDEAKAQAEKEEARRKAAAEAENSERNYWDELLKDRYDVQKVEEHTAMGKGKRSRKQMAAADEDDIHDLSSEDEDYSLEDDISDNDTSLQGNISGKRGQYSKRKSRNVDSIPLMEGEGRTLRVLGFNHAQRAMFLQTLNRFGFQNYDWKEYLPRLKGKSVEEIQRYAELVMAHLVEEINDSDYFSDGVPKEMMRVDDVLVRIANISLIEEKMAATGPGKITNIFPNYLLYEFQGLSGGRIWKAEHDLLLLRGILKHGYARWQYISDDRENGLFEAARRELHLPSVNEIIGAQLNEANGNLEGAQEGQANTTSMSHYKEIQRKIVEFLRKRYHLMERALNMEYAVIKKKIPVPDDITEQGVPAGHAPFIPDISELLRELPNLEPISTNELVSEGTAGQLQVPHLYNKMCGVLEESGAYALSSFFGDKSASSSLANSLRQFETVCENVVEALRPHQNGTGSAIKEELVDAATKAAAAAAPQQDSGHDAPHGQSSTAKADMEIDG

SEQ ID NO: 293740 - protein, 104 aa, Zea mays
  Clone ID: MRT4577_30974C.1.pep
LKGGLVRICLFGLDDTDQNLMLGARLNQFLGGGFPSLPLSWRGARPLPGDLPRLLLDSTPPPLEYPRPSPMKRARPPLLAPFIPLLGFLSSHNMAAHLLNGGSL

SEQ ID NO: 293741 - protein, 117 aa, Zea mays
  Clone ID: MRT4577_30975C.1.pep
GGGGQKHTKQREGGKRNKTFTLGARGIINFFFSNRQATTYPGKLNINPNGRICLGLKSCRTSRKWAPLSFPRLWGRGFGGRPGCYPSQAYTTPEETAITRMAGPSSSPRGGLRRIRR

SEQ ID NO: 293742 - protein, 121 aa, Zea mays
  unsure (1)..(121): unsure at all Xaa locations
  Clone ID: MRT4577_30976C.1.pep
MSASQSSMSGAGEPGARAVVWFRWDLRVEDNPALAAAARAAXGEVVPAYVWAPEEDGAYYPRRLXSRWWLSQSLKHLDASLRRXGAARLVTRRSNDAGAALLDLVRCTGATHLFFNTSTVR

SEQ ID NO: 293743 - protein, 106 aa, Zea mays
  Clone ID: MRT4577_30977C.1.pep
TVYNKMILQNPPVIRSVINIRTDGHKTIKHHNRNIGLRKFVETMLFQTLYGGPAHRIALQHQSLFPQFPSQLSFGIGLGLAHTMLQELETVLPLPRSRSERSLSES

SEQ ID NO: 293744 - protein, 121 aa, Zea mays
  Clone ID: MRT4577_30978C.1.pep
GNLSFTAPDIPLYFYVLMQIHNMRCGGCMPKLQRGSPFAGSGSDYGAGTRVVGFTCMVLHDYAIISERSSGAERLRRAAGRVAGANFFSHGVSSKQCSGHPGRRLLEGDRIEKRGGQTDIQ

SEQ ID NO: 293745 - protein, 88 aa, Zea mays
  unsure (1)..(88): unsure at all Xaa locations
  Clone ID: MRT4577_30979C.1.pep
GAPVPAAAXXXALXASWASPLPGRXPRLARRPRXAPGPAXXXGAXGPXLRRSCRRRXXGXASPAAAAXRSPCPRRPSLPXPLLRFLWR

SEQ ID NO: 293746 - protein, 81 aa, Zea mays
  Clone ID: MRT4577_3097C.1.pep
RFSRPPLSPGCRPFPRGKLPASKPVGSISGFDFSPGAGAAPPKVKLAGPPSGPPSKGFPPKKNCQGLKIKQSLVRVKRGVF

SEQ ID NO: 293747 - protein, 51 aa, Zea mays
  Clone ID: MRT4577_30980C.1.pep
KKKKKKKLNKKKNAAPPWKVYIITSSILQHNYSIISPKKNKLPAILQQLHY

SEQ ID NO: 293748 - protein, 87 aa, Zea mays
  Clone ID: MRT4577_30981C.1.pep
MLAAVMDYFSSCWGPRSGAGHREKGSDAAGRQDGLLWYKDVGQLVTGEFSMAVVQANQLLEDQSQVESGSLSLADTGPQGTFVGVYD

SEQ ID NO: 293749 - protein, 243 aa, Zea mays
  unsure (1)..(243): unsure at all Xaa locations
  Clone ID: MRT4577_30982C.1.pep
MLAAVMDYFSSCWGPRSGDGHRGKGSDAAGRQDGLLWYKDAGQLVTGEFSMAVVQANQLLEDQSQVESGSLSLADPGPQGTFVGVYDGHGGPETSRFINDHLFXHLIRFATEHKFMSADVIREAFQATEEGFLSLVSKEWSXKPQIASVGSCCLVGVICAGGGDVANLGDSRAVLGRLVKATGEVLAIQLSSEHNACYEEVRQELQSSHPDDPHIVVLKHNVWRVKGIIQSIRLEGWQHHCSR

SEQ ID NO: 293750 - protein, 128 aa, Zea mays
  Clone ID: MRT4577_30983C.1.pep
MLAAVMDYFSTCWGPRSRAGHRGKGSDAAGRQDGLLWYKDAGQLVTGGFSMAVVQANQLLEDQSQVESGSLSLADYGPQGTFVGVYDGHGGPETSRFINDHLFNHLRRFATEHKSMSADVIRKAFQET

SEQ ID NO: 293751 - protein, 125 aa, Zea mays
  Clone ID: MRT4577_30984C.1.pep
RRPQGTQLARSLALIVQISNALSASSFTLRTLPVELVLGFLESTEQVPQIWSAIRAPARQQQGLVGLAAALRDQRESVRLRSWIKKKNLPLAPLQRARSLSPSLSVQSICKSRSESEVSPLWCGY

SEQ ID NO: 293752 - protein, 66 aa, Zea mays
  Clone ID: MRT4577_30985C.1.pep
YSNFLFSAHNITPVSRRSAWCRDIKQIMQHQFVASKKKKKKKKKKKKKKKKKKKKKKKKKKKKKKY

SEQ ID NO: 293753 - protein, 57 aa, Zea mays
  Clone ID: MRT4577_30986C.1.pep
HLFNRNIHESNGYSPSEFLAFLFFFLHLTACESCLTPFFFFMVLYIIRLLMLLYRQP

SEQ ID NO: 293754 - protein, 124 aa, Zea mays
  Clone ID: MRT4577_30987C.1.pep
AVVAMTSVPHILEVTKLFLRTRGRTRGVLQTAVATEEKLSVHSITLVPPSCVVRRRWHPPVSNRTSFGYFALCISTQPEGMRGAVRNKILPWTRTSRRLHEQQMLGIVPKRVPLFIAYSRDNDQ

SEQ ID NO: 293755 - protein, 131 aa, Zea mays
  Clone ID: MRT4577_30988C.1.pep
IHQSGRPFIKPLINPPQTKTRRGRKREATPRGQQEQPGAETQTSEPAHLKKRWGAPRKTAPGTKASAREGPHGNPPYFQAPGPSTNNQQNNGKRKGPTPGLLNRAHKAQKGTRGRQKSENGGSTKEGGTQP

SEQ ID NO: 293756 - protein, 292 aa, Zea mays
  unsure (1)..(292): unsure at all Xaa locations
  Clone ID: MRT4577_30989C.1.pep
MHAMKKLDKSCSHHILMIHVLWFSNYNVWRERCLIHLITSVGSVSLVNLICAGTLYVGNLGDSRAVLGGPVKSTGEFVALHLSXEHNACYQEVRQELLSXHLDNPHLVALKQIIXRQKDPLRILRAIGDVIVKKTEYSKKQLHSMDRGGANDLRALISVDAVILEPETQTNARFVKLPSVGLWERLHTKEAVDLVEISPQQRDXRRLGRAEMQEAAKKRAMRYSGLKKIDRGVSRHFRDDITVVVVFLDLNAMSKASWSKSPSVSILGGGVTGQCVGPRIFPQLSARLNSTY

SEQ ID NO: 293757 - protein, 64 aa, Zea mays
  Clone ID: MRT4577_3098C.1.pep
GWCDAHDESLGGGGGHLHGHVRVNLAASSAAVAAHAAGAARAVAAQHAVICQSLSTSQARTRMI

SEQ ID NO: 293758 - protein, 130 aa, Zea mays
  Clone ID: MRT4577_30990C.1.pep
MVMLMNVSLTEGEGASCQQKGRRTPGLKDCSLSSALGRQGEQNDGTFSVRIDDCQWSCANTIVAKLAVALAPMPFMRVLLDRFVAATSGVFPDNQELQDIGKLSGSVLGQWGAVDDPESMLHHIHWAVMR

SEQ ID NO: 293759 - protein, 59 aa, Zea mays
  Clone ID: MRT4577_30991C.1.pep
VVRSPSVTVCWPHVALFVVASSLVTMVCCLWLLLPALRTARWLLNCALWLSRRGSAVCT

SEQ ID NO: 293760 - protein, 399 aa, Zea mays
  Clone ID: MRT4577_30992C.1.pep
MLAAVMDYFSSCWGPRSGAGHRGKGSDAAGRQDGLLWYKDAGQLVTGEFSMAVVQANQLLEDQSQVESGSLSLADPGPQGTFVGVYDGHGGPETSRFINDHLFNHLRRFATEHKFMSADVIRKAFQATEEGFLSLVSKEWSLKPQIASVGSCCLVGVICAGTLYVANVGDSRAVLGRLVKATGEVVAMQLSSEHNACYEEVRQELQSSHPDDPHIVVLKHNVWRVKGLIQISRSIGDVYLKKPEYNREPLHSKFRLRETFQRPILSSEPQITEHRIQPNDQFVIFASDGLWEHLSNKEAVDLVQSSPRNGIARRLVKAAMQEAAKKREMRYSDLKKIDRGVRRHFHDDITVVVVFLDSDAMSKASWSKSPSVSLRGGGVALPAKSLAPFSAPARLNSTY

SEQ ID NO: 293761 - protein, 91 aa, Zea mays
  Clone ID: MRT4577_30993C.1.pep
TRAHDHSHNHHYSSIFNHTPPISARVNFNREQTHTLHCPTVHVNQNCNPTVPSSTPPPGLATLPDFLLQSFYFCYHSGASMRGSHDQPTRH

SEQ ID NO: 293762 - protein, 90 aa, Zea mays
  Clone ID: MRT4577_30994C.1.pep
EVGRGVYSMLFTRRMEAYEISASCVMVSKVDIRDHQSFATRFANAVHQRINRRHRSCRLPARVARKRGRKKSSNSIQELDDFLRPLLSLL

SEQ ID NO: 293763 - protein, 280 aa, Zea mays
  unsure (1)..(280): unsure at all Xaa locations
  Clone ID: MRT4577_30995C.1.pep
MLAAVMDYFSTCWGPRSRAGHRGKGSDAAGRQDGLLWYKDAGQLVTGGFSMAVVQANQLLEDRRHXLLIYLPVGPQAAISAENGQWSPRLNSMLXLLAPIACTGVSPGHTXGPALSRAHGCFGAQVISQRSQAWPKYCPRHGWDPTPCHLXGFATEHKSMLADVIRKAFQETEGFLSLVTKEWSFKPQIASVGSCCLVGVICAGPLYVANLGDSRAVLGRLVKATGEVLATQLSAEHNACYEEVRQELQSSHPYDPRIVVLKHNVWRVKGLIPAHKNLYS

SEQ ID NO: 293764 - protein, 82 aa, Zea mays
  Clone ID: MRT4577_30996C.1.pep
IGSTTSSRSEQQRLLRSSRGRRKVIIFKNQASASKDRLHRGFVHPRARARSGLHRPPGRPSSPLGCFCPRGPTRNKKLRSRF

SEQ ID NO: 293765 - protein, 399 aa, Zea mays
  Clone ID: MRT4577_30997C.1.pep
MLAAVMDYFSSCWGPRSGDGHRGKGPDAAGRQDGLLWYKDAGQLVTGEFSMAVVQANQLLEDQSQVESGSLSLADPGPQGTFVGVYDGHGGPETSRFINDHLFNHLRRFATEHKFMSADVIRKAFQATEEGFLSLVSKEWSLKPQIASVGSCCLVGVICAGTLYVANLGDSRAVLGRLVKATGEVVAMQLSSEHNACYEEVRQELQSSHPDDPHIVVLKHNVWRVKGLIQISRSIGDVYLKKPEYNREPLHSKFRLRETFQRPILSSEPQITEHRIQPNDQFVIFASDGLWEHLSNKEAVDLVQSSPHNGIARRLVKAAMQEAAKKREMRYSDLKKIDRGVRRHFHDDITVVVVFLDLNAMSKASWSKSPSVSLRGGGVTVPAKSLAPFSAPARLNSTY

SEQ ID NO: 293766 - protein, 49 aa, Zea mays
  Clone ID: MRT4577_30998C.1.pep
MAAKLSADLLFQMAKVRRSIYTLNKDLPISTTRIHEIVKDATLHTPSSF

SEQ ID NO: 293767 - protein, 399 aa, Zea mays
  Clone ID: MRT4577_30999C.1.pep
MLAAVMDYFSTCWGPRSRAGHRGKGSDAAGRQDGLLWYKDAGQLVTGGFSMAVVQANQLLEDQSQVESGSLSLADYGPQGTFVGVYDGHGGPETSRFINDHLFNHLRRFATEHKSMSADVIRKAFQETEEGFLSLVIKEWSFKPQIASVGSCCLVRVGCAGTLYVANLGDSRAVLGRLVKATGEVLATQLSAEHNACYEEVRQELQSSHPDDPRIVVLKHNVWRVKGLIQISRSIGDVYLKKPEYNREPLHSKFRLRETFQKPILSSEPQITEHRIQPNDQFVIFASDGLWEHLSNQEAVDLVQSSPRNGIARRLVKAAMQEAAKKREMRYSDLKKIDRGVRRHFHDDITVVVVFLDSDAMSKASWSKSPSVSLRGGGVTLPAKSLAPFSAPAQLNGTH

SEQ ID NO: 293768 - protein, 367 aa, Zea mays
  unsure (1)..(367): unsure at all Xaa locations
  Clone ID: MRT4577_3099C.1.pep
MARKHGWQLPAHTLQIIAVTVFFLLVIAFYAFFAMFLGKQVLEYVVIGVYTAVVFSVAMLYIRCTSINPADPGIMSKFDNXSSMHLEVLPTYRXDLPVKAGIGAGTISPSATSTCRNSVDGHSNAGALAAGDTNXFKVSAANKSXSCLLGGLVCFLFGKEDCRKYDDSENQVDGEGALFCTLCDAEVRKFSKHCRSCDKCVDGFDHHCRWLNNCVGRKNYFTFLALMATSLLWLAIEIGVGIGVLVICFANKNSERIIQDRLGNGLPRPAFATIVAFFTLLSLVACIPLGELFFFHMILIRKGITTYEYVVAMRAMSETPQEEEEHEEEEGVNIVYSPTNSATTAFSGASSLSLHYKGSWGTPSRFL

SEQ ID NO: 293769 - protein, 43 aa, Zea mays
  Clone ID: MRT4577_309C.1.pep
PRRGVRSPSGPGFTKPGALGFIESYELRRTSVPRMKTYKDYKP

SEQ ID NO: 293770 - protein, 111 aa, Zea mays
  Clone ID: MRT4577_30C.1.pep
MGADYYKVLGVDRGASDDDLKKAYRKLAMRWHPDKNSTNKKEAETKFKEISVAYEVACPSLSLSMCLSCQDYYCSKFLAFGASIHPLSLSLWFMLTNKTACLLYRPALWTQ

SEQ ID NO: 293771 - protein, 98 aa, Zea mays
  Clone ID: MRT4577_31000C.1.pep
KSTVIFCSKKTMVASNRASIQVIIRTVEKGKNKNKEGVGCKAASLEIKTVSTIPPASQFRLFTTVLLVGDAMGMMHCITRGSSTCIYIYETACIAQSS

SEQ ID NO: 293772 - protein, 134 aa, Zea mays
  unsure (1)..(134): unsure at all Xaa locations
  Clone ID: MRT4577_31001C.1.pep
MAGRAVGVLLADKTQPWQCFKSCARGCHHHHDNGASALADFLSGVTGECKNISCHNEACFKDLPAITYPQCAIATCLGHPHHSRKKTACLKDCCEKCFINNGPPAPGPPVPXXXXXXXXAPAPGPSPTPPSPPN

SEQ ID NO: 293773 - protein, 234 aa, Zea mays
  Clone ID: MRT4577_31002C.1.pep
MAPSQLLGSTDLWRPVAAARGGGWATAAVLLLLLASHLAVLLVRLRRRLRGGGRNAHPEAAVAPAPASTPPGSASASGIEGLVTEGDLRQLVGSLGLGAHEPEREGWEHVISKSSDDVSYKAWCDKPTAGPPKYLSITTYERCSAEQLRDFYMDNEYRMEWDNTVKKHEQLQYDENSGVEVGRTIKKFPLLTPREYILAWRVWEANDKSFYCFIKESQHPLNLRPRKLIRVQLL

SEQ ID NO: 293774 - protein, 161 aa, Zea mays
  Clone ID: MRT4577_31003C.1.pep
MARRAVGVLLAVAALLAAATARAADDDDKTQPWQCFRSCSRGCHHHHHDHDNGAAAVADFLSGAAAKVSAAVTRECKNNSCHDNACFKDLPAITYPQCAIATCLGHPHHSRKKTACLKDCCEKCFINNGPPAPGPPVPGPPAPGPPAPAPGPSPTPPSPPN

SEQ ID NO: 293775 - protein, 192 aa, Zea mays
  unsure (1)..(192): unsure at all Xaa locations
  Clone ID: MRT4577_31004C.1.pep
LAWTVDRDTSQLDGARAVGVLLAVAALLAAATARAADDDDKPQPWQCFKSCSRGCHHHHDHDHDNGAAAVADFLSGAAAKVSAAVTRECKNNSCHDNACFKDLPAITYPQCAIATCLSHPHXVHGQTPHQNNRGAARDIILYYSRKKTACLKDCCEKCFTNGPPAPGPPVPGPPVPGPPAPGPSPTPPSPPN

SEQ ID NO: 293776 - protein, 129 aa, Zea mays
  unsure (1)..(129): unsure at all Xaa locations
  Clone ID: MRT4577_31005C.1.pep
GSPGLGVLGERLVQAAFDVQYRCFVGCLAXATDDYSVHNAFSTYSEVLESNIXLRRETHRSRGFGLRTFCTXGIYEIALEGMNVXELDCHHITVNKAHSRRSRGRGCIWVRQVAEEASITGSDHTNIAV

SEQ ID NO: 293777 - protein, 69 aa, Zea mays
  Clone ID: MRT4577_31006C.1.pep
CGGSKAESGSVAAGRTGSTSAAGAAGRGARRQNGGSVSSRAGVLSLESGRRAGHSLIGPRLCDSSCRRR

SEQ ID NO: 293778 - protein, 158 aa, Zea mays
  unsure (1)..(158): unsure at all Xaa locations
  Clone ID: MRT4577_31007C.1.pep
MAAPGPVWMEYINFRKPTTVYMPDKESHRMTTVRKVYQKAILVPTNHVEQLWKDYLNFENSVSRTLAKGLIYEYQPKFNSAKAVYRERKKYIDDIDWNVLATPPTGSYKEEQQCMAWKRLLVXEKGNPQRIDATTANRRITFTYEQCLMYLYHHAGYM

SEQ ID NO: 293779 - protein, 193 aa, Zea mays
  unsure (1)..(193): unsure at all Xaa locations
  Clone ID: MRT4577_31008C.1.pep
SQKQQQHKKEDDHKEKKKKRDKIKANHQKRNNNIKKEKERTNKEKIEKEKKPKKKKEIKQKKENGKKKRKKQKHDPTREHEQXKKTKKKKTNKKITKKQKKQKKNKKXKKKKRKKKKKKNKRITDKKKQKNKIYXKFKINXKKLYXEKIXNKKKXKLNKKKKKKKKKIKKKKINNKXENNKKKMKRNRKKKKK

SEQ ID NO: 293780 - protein, 94 aa, Zea mays
  Clone ID: MRT4577_31009C.1.pep
YNIASTEHGRADWESLSQALVRNGGGHNLPEGELGPQMVVFKHLVQMGVLAELLFVHEAREREKEEVTCHGLRGPCCRSSSGRSPSGNWFTSPC

SEQ ID NO: 293781 - protein, 92 aa, Zea mays
  Clone ID: MRT4577_31010C.1.pep
CQFLLLADTGMTNTYPLLDDAVPKNEYIHIEKPHLNDAELPTYHTVTQVPNTDHLPPLHILPEMTNPDIATVLRHCEIAQVKPTSSPHDGYI

SEQ ID NO: 293782 - protein, 129 aa, Zea mays
  Clone ID: MRT4577_31011C.1.pep
SPTHTPTHSFTLSPNQKSLVSASSILLLPTPPITTLLILIFFSFSLKMPLITILIYIPNTYILLLSFFTTKTLYLLPYHYPIFFYTFSITSYHFFIHSKFKQQTLFFIFIFHSIIIHSLYYTSSFLFYF

SEQ ID NO: 293783 - protein, 126 aa, Zea mays
  unsure (1)..(126): unsure at all Xaa locations
  Clone ID: MRT4577_31012C.1.pep
MNKHNLRLVQLASELILIXIIPXLFLSQVTTISHIKREKIPPNHRKGILCMFPWQCVVYVFSNFVWLVIHRFSNGFIQFLGEPYRLMTASGTHGRIKFMVDIPIIKNTQVLRIPVLKDPKMLSKKH

SEQ ID NO: 293784 - protein, 78 aa, Zea mays
  Clone ID: MRT4577_31013C.1.pep
WRRRPRSSTRGRGQQLLIDNLVGYDTIPTNSLVISPGHGYLYNFEMKELNGLSYGHETPEGPTKFGALEDGATIFKSC

SEQ ID NO: 293785 - protein, 118 aa, Zea mays
  Clone ID: MRT4577_31014C.1.pep
MGVESPPAVEISFHTPDIRWTATSKSTWEGSAAIPKLREVRGRADLVCCCGDDDAITYDEAEATESDARVGRAHAAARVCGEHVERKQLRSRWHRNESRLVVTRAWKERSGVVGEEEE

SEQ ID NO: 293786 - protein, 75 aa, Zea mays
  Clone ID: MRT4577_31015C.1.pep
MNMDDIIYNIYDLETVNAAAASVSPGPADPSQVDLEVAVQRMGVWKEISTAGGLSTPILPPPSPLPALTLTVPQR

SEQ ID NO: 293787 - protein, 62 aa, Zea mays
  unsure (1)..(62): unsure at all Xaa locations
  Clone ID: MRT4577_31016C.1.pep
TXYRRSYRQSHSTAYRNAQRIQASRSRMPHPHPHPSLRSRHLASMLSSRRPKMAIGAGELHG

SEQ ID NO: 293788 - protein, 44 aa, Zea mays
  Clone ID: MRT4577_31017C.1.pep
RQDPFRFLNIRHVHIWLAHSATHICARAAPCRTSLVRAVQVSIH

SEQ ID NO: 293789 - protein, 134 aa, Zea mays
  Clone ID: MRT4577_31018C.1.pep
FFFFFFFFFFCFFFFFCCFFFFFFWESRKQPFFMEGFHRRFIHTWLLIGGDPVAHLGVGVYRWAKGGATKEHMFMGHIFGTKSRGGVVTKRQPRFCNPLKRKNSEANCPPKPGLLIKHSIFFLDGIQLSPRRQD

SEQ ID NO: 293790 - protein, 110 aa, Zea mays
  Clone ID: MRT4577_31019C.1.pep
MVTKILSLLALLARLASATKAFIIAQCSLAPRFIITQILPPVTSMGSEHPAVHAYRLQHAIAVGVVQQPIYQLQQQSLAHLTVHTIVTQQLQQLLPALIQLAMENPAVYL

SEQ ID NO: 293791 - protein, 102 aa, Zea mays
  Clone ID: MRT4577_31020C.1.pep
ETVKRRMKPDLQCTQLEEPKQDSLSRHIMKLQTLRLRTGSSKLLPSNPQRTRFHFTIASKLISMGESSGSPNGSWCQKSLWRMVGIAVHPGIMNLINGLVVI

SEQ ID NO: 293792 - protein, 36 aa, Zea mays
  Clone ID: MRT4577_31021C.1.pep
YFIERQVNHRIGPFELHANSLYRSQNGYDKFNGRYT

SEQ ID NO: 293793 - protein, 47 aa, Zea mays
  Clone ID: MRT4577_31022C.1.pep
VPENVLRFSNQFYFMIAQRLDLIPPIHIGVLSKKKKKKKKKKKKKKL

SEQ ID NO: 293794 - protein, 1628 aa, Zea mays
  unsure (1)..(1628): unsure at all Xaa locations
  Clone ID: MRT4577_31023C.1.pep
MPPRTRLTARKSTGPIGVPRHQLAPRHESSSSGSNDSIGDLEARVSRLQAALQHRTDAWVADEDRINELRRDIRHLQDQLADRDLALDWAVQSRLLACAKEARAQAQIKELSSTVDNLNVKWKVSLAHYVYFKCYLPQMSTRTRGQDAAGTSGGRDVTPNPPPVPPTLAEAIAALVNATADNTRFLREKAGQQQFQQQAGRGYQQGPRETTYLDFSETHPPLFIKAEDPLEADEWIRVIEQKFGLLRCSETQKPLFAAQQLRGPASTWWGNFVATQPVNHQVTWEEFKAAFREHYIPEGVLHMKQEEFMKLKQGGDTVNQYLNKFNHLSQYAIDQVNTDLKKKNCFMRGLNDRLQRKMAACIDLTYGKAVSTALSVEAKYASSGKNKGFGGERPNQGQAKKQQXCDPAFKPKSXTFSRPPLFPFKQPIIIRPNNTPTTPNQPGAPGTRFPALPSSSTGCFNCGKSGHFIKDCPYPKQNQSNAPQGSGRSAQPKGNIVGKNTKKTGRVYYTQVATTPEGEPVMMGTFPVASHPAIILFDSGASHTFISKKFVEQHHIACHESKEGFKIHSPGGHIFTREVAYEVPVTMAGRNFPANMIVLKGQDIDVILGMNWLTQHKAILNTELRTVRLSYNQEEILLSLPVTNPAKASGRIYEAIVPEIKNIPVVCEFPDVFPEDLPGLPPERDVECVIELKPGTTPISRRSYRMPPNELAELKIQLQDLLNKGFIRPSSSPWGCPAIFVKKKDKTLRMCVDYRPLNEVTIKNKYPLPRIDILFDQLTGARVFSKIDLRSGYHQIRIRPKDIPKTAFTTRYGLFEYLIMSFGLTNAPAHFTYLMNSVFMPELDKFMVVFIDDILIYSKNEEDHAQHLRIVLTHLREHQLYAKFSKCAFWLEEIQFLGHVLSAKGIAVDPSKVKDILEWKPPTTVHQVRSFLGLAGYYRRFIPDFSKLVKPITSLLKNDIKFNWSSKCNEAFEQLKALLTTAPVLAQPDITKPFDVYCDASGSGLGCVLMQEGRIIAYASRQLRRHEEHYPTHDLELAAVVHALKIWRHYLLGNICHIYTDHKSLKYIFTQSELNMRQRRWLELIKDYELEIHYHPGKANVVADALSRKTSCHCLMVKTSENTLCQEMEKLNLGIIQQGTLNQLKLESIILQRIIDAQKDNLGMKHIREKIRAGVAKCFKEDDQGVIWFKNRIVVPKNEELRQQILDEAHLSRYSIHPGSTKMYQDLKQHYWWTKMKIEIARYVAKCDTCRRVKAIHMKTAGPLQSLPIPTRKWEDISMDFIVGLPRTAKGYDSIWVIVDRLTKIAHFLPVRAKYTVATYAALYIGRIISLHGIPKTIVSDRGPQFVSKFWEELHKSLGTKLLHSSAYHPQTSGQTERVNQILEDMLRACVLDFSQKWDECLPLAEFSYNNSYQESIKMAPFEALYGRRCRTPLNWSEPGERYFFRPDMVKEVEEKVHKIIHNMKKAQTRQKSYADRRRQPLCFLVGDYVYLKVSPMKGVSRFGVKGKLAPRYIGPFLVIEQCGPVAYRLQLPETLSAVHNVFHVSQLKKCLRVPDRTIEVTDVVLEPDLTYSKHPIRVLDQKDRVTRRKTLKFYKIQWNQHSEDEATWETQDFLNKNFPGFLASCNL

SEQ ID NO: 293795 - protein, 83 aa, Zea mays
  Clone ID: MRT4577_31024C.1.pep
PAPMCDMDNLMICVLNEPDWPSFCTHRYRQNLAFTKLTGLAGYMAYPRSRYSNYARSYRRSYHLRNLVVNWDWPFMPTLTHIV

SEQ ID NO: 293796 - protein, 351 aa, Zea mays
  Clone ID: MRT4577_31025C.1.pep
MKIEIARYVAKCDTCRRVKAIHMKTAGPLQSLPIPTWKWEDISMDFIVGLPRTAKGYDSIWVIVDRLTKIAHFLPVKVTYTVATYAALYIARILSLHGVPKTIVSDRGPQFVAKFWEALRNSLGTKLLHSSAYHPQTSGQTERVNQILEDMLRACVLDFSPKWDECLPLAEFSYNNSYQESIKMAPFEALYGRRCRTPLNWSELGERYFFRPDMVKEVEEKGVSRFGVKGKLAPRYIGPFLVLEQCGPVAYRLQLPETLSAVHNVFHVSQLKKCLRVPDRTVEVTDVVLEPDLTYSEHPIRVLDQKDRVTRRKTLKFYKIQWNQHSEDEATWETQDFLDKNFPGFLASCKL

SEQ ID NO: 293797 - protein, 162 aa, Zea mays
  Clone ID: MRT4577_31026C.1.pep
ICFPGVKQDGVREHCKFAILMHHFRFSFQEGQKSIIQGVRSSGLRATTSRRSRRARAQARAVPMELGIAGDIVVAEGGGLAVAEIRAHEMARDLRQTAATTCGKVGHWHESVVVVASRRQKSRFMWLRMRSPPYSFSRSATTSSSRHGRSLLLRNHRPPLTP

SEQ ID NO: 293798 - protein, 206 aa, Zea mays
  Clone ID: MRT4577_31027C.1.pep
PFSTLSVQLESRTDRRPHLSTRRRSLLRGCRRTSQVIRPTCTCPCLKDLRRLCMCTKQLNRICPSAPRTSDKRLTTKIAGLSKHNSHTNTCSGNKLHDEALGQLKGPRSVGQQSERSLIDTDGRPFLLSVWSRFIPTIFPFLVPGRGTLFRMMNPRGLPGINTKSVLLDDTRLASTSHSSTIRSFSFGFIHQSHLEIIPVVVLHIT

SEQ ID NO: 293799 - protein, 946 aa, Zea mays
  Clone ID: MRT4577_31028C.1.pep
MATCIDLTYGKAVSTALSVEAKYASSGKNKGFGGERPNQGQAKKQRFVIRPSSQNRTFSRPPSFPFKQPIIIRPNNTPTTPNQPGAPGTRFPALPSSSTGCFNCGKSGHFIKDCPYPRQNQSNAPQGSRRSAQPKGNAVGKNTKKTGRVYYTQVATTPEGEPVMMGTFPVASHPAIILFDSGASHTFISKKFVEQHHLACHESKEGFKIHSPGGHIFTREVAYEVPVTMAGQNFPANMIVLKGQDIDVILGMNWLTQHKAILNTKLRTVRLSYNQEEILLSLPATNPAKTSGRVYEAIVPEIKNIPVVCEFPDVFPEDLPGLPPERDVEFVIELKPGTAPISRRSYRMPPNELAELKIQLQDLLNKGFIRPSSSPWGCPAIFVKKKDQTLRMCVDYRPLNEVTIKNKYPLPRIDILFDQLTGARVFSKIDLRSGYHQIRIRPEDIPKTAFTTRYGLFEYLVMSFGLTNAPAHFTYLMNSVFMPELDKFVVVCIDDILIYSKNEEDHAQHLRIVLTRLREHQLYAKFSKCAFWLEEIQFLGHVLSAKGIAVDPSKVKDILEWKPPTTVHQVRSFLGLAGYYRRFIPDFSKLVKPITSLLKNDIKFNWSSKCNEAFEQLKTLLTTAPVLAQPDITKPFDVYCDASGSGLGCVLMQEGRVIAYASRQLRRHEEHYPTHDLELAAVVHALKIWRHYLLGNICHIYTDHKSLKYIFTQSELNMRQRRWLELIKDYELEIHYHPGKANVVADALSRKTSCHCLMVKTSENTLCQEMEKLNLGIIQQGTLNQLKLESIILQRIIDAQKDNLGDYVYLKVSPMKGVSRFGVKGKIAPRYIGPFLVLEQCGPMAYRLQLPETLSAVHNVFHVSQLKKCLRVLDRTVEVTDVVLKPDLTYSEHPIRVLDQKDRVTRRKTLKFYKIQWNQHSEDEATWETQDFLDKNFPGFLASCKL

SEQ ID NO: 293800 - protein, 226 aa, Zea mays
  Clone ID: MRT4577_31029C.1.pep
MLIDGMRSVVATVSGYHGDERHRLVNLIAETGASYVGSMSRSITHLVCWRLEGKKYDIARRLGTRVVSHWWFTECLREGRRLPEDPYFMVSGEEAGPVPELPSRSRKQVKKNAIMEDRVFQELPDDFWDTPRARASYKVKLDDSDSDFESALLEQKNHSPDVKKRRKRMKHVNTSTDRDVLTCRIMCHVSWQDSAFFSPVIERPRAHSSIRGNLSHLLSHEVPIRM

SEQ ID NO: 293801 - protein, 135 aa, Zea mays
  unsure (1)..(135): unsure at all Xaa locations
  Clone ID: MRT4577_3102C.1.pep
MGTATMATAVGAAMLLYFVLSRRLAGEDVSAXGGGGGVGSGKRRRGRALRRPGQPPATXIEAXGTLAETLXXTYSETLGKGXIGDLPFGIKYLMRRQGNLNVASVYAGSDCIELKGPQIMEKXIVLTGVNELGLS

SEQ ID NO: 293802 - protein, 1510 aa, Zea mays
  unsure (1)..(1510): unsure at all Xaa locations
  Clone ID: MRT4577_31030C.1.pep
MPPRTRLTARKSTGPIGVPRHQLAPRHESSSSGSNDPIGDLEARVSRLQAALHYRTDAWVADGDRINELRRDIRHLQDQLADRDLALDWAVQSRLLMCAKEARAQARVKELSSTVDNLQIYCNTLHEEVHILYSQLHPSEPAQPAEAEAGPSHVAGRALGGELDLFEPPSSLSNVKWKVFSGTLCLLQMFLPQMPTRTRGQDAAGTSGGRDVTPNPPPVPPTLAEAIAALVNATADNTRFLREMAGQQQFQQQAGRGYPQGPRETTYLDFSETRPPLFVKAEDPLEADEWIRVIEQKFGLLRCSETQKPLFAAQQLRGPASTWWGNFVAIQPVNHQVTWDEFKAAFREHYIPEGVLYMKQEEFMKLQQGGDTVNQYLNKFNHLSQYALDQVNTDLKKKNCFMRGLNDRLQRKMATCIDLTYGKAVSTALSVEAKYTNSGKNKGFGGERPNQGQAKKPAPKGNAMGKNVKKTGHVYYTQVATTPEGEPVMMGTFPVASHPAIILFDSGASHTFISKKFVEQYHIAYHESKEGFKIHSPGGHIYTKEVAYGVPVTMAGRNFPANMIVLKGQDIDVILGMNWLTQHKAILNTELRTVRLSYNQEEILLTLPATNPAKASGRVYEAIILEIKNIPVVCEFPDVFPEDLPGLPPERDVEFVIELKPGTAPISRRSYRMPPNELAELKIQLQDLLNKGFIRPSSSPWGCPAIFVKKKDQTLRMCVDYRPLNEVTIKNKYPLPRIDILFDQLTGARVFXKIDLRSGYHQIRIRPEDIPKTAFTTRXFMPELDKFVVVFIDDILIYSKNEEDHAQHLRIVLTRLREHQLYAKFNFSKLVKPITSLLKNDIKFNWSSKCNEAFEQLKTLLTTAPVLAQPDITKPFDVYCDASGSGLGCVLMQEGRVIVYASRQLRRHEEHYPTHDLELAAVVHALKIWCHYLLGNICHIYTDHKSLKYIFTQSELNMRQRRWLELIKDYELEIHYHPGKANVVADALSRKTSCHCLMAKTSENTLCQEMEKLNLGIIQQGTLNQLRLESIILQRIIDAQKDNLGMKHIREKIRAGTAKCFKEDDQGVIWFKNRIVVPKNEELRQQILDEAHLSRYSIHPGSTKMYQDLKQHYWWTKMKIEIARYVAKCDTCRRVKAIHMKTAGPLQSLPIPTWKWEDISMDFIVGLPRTAKGFDSIWVIIDRLTKIAHFLPVKVKYHVNVYAELYIARILSLHGIPKTIVSDRGPQFVSKFWEELHKFLGTKLLHSSTYHPQTSGQTERVNQILEDMLRACVLDFSLKWDECLPLAEFSYNNSYQESIKMAPFEALYGRRCRTPLNWSEPGERYFFRPDMVEEVEEKVQRIIHNMKKAQARQKSYADRRRMPLYFLEGDYVYLKVSPMKGVSRFGVKGKLAPRYIGPFLILERYGPVAYRLQLPETLSAVHNVFHVSQLKKCLRVPDRTVEVTDVVLEPDLTYSEHPIRVLDQKDRVTRRKTLKFYKIQWNQHSEVEATWETQDFLNKNFPGFLASCKL

SEQ ID NO: 293803 - protein, 183 aa, Zea mays
  Clone ID: MRT4577_31031C.1.pep
MASSAGDLPEVKFKRTGSLGSSDYVRADKIDLTSLDIQLEQQLNKKWGKTNIKPQGPKADWEIDLAKLEIRHVIAQGTYGTVYRGTYDGQQVAVKLLDWGEDGFATEAETTALRTSFKQEVAVWHKLSHPNVTRFIGASMGTTDLKIPVNDNGARANLPARACCVVAEYLAGSTLKQYLIKTD

SEQ ID NO: 293804 - protein, 54 aa, Zea mays
  Clone ID: MRT4577_31032C.1.pep
SSNRNNRPNQKILLYVTAFLTSVAIKCMNYWASVKLDRNLDNFAIQYIRASDWE

SEQ ID NO: 293805 - protein, 491 aa, Zea mays
  unsure (1)..(491): unsure at all Xaa locations
  Clone ID: MRT4577_31033C.1.pep
MLIDGMRSVVATVSGYHGDERHRLVNLIAETGASYVGSMSRSITHLVCWRLEGKKYDIARRLGTRVVSHWWFTECLREGRRLPEDPYFXCGEEAGPVPELPSRSRKQVKKNAIMEDRVFQELPDDFWDTPRARASYKVKLDDSDFESAXRTNVKKRRKRMKHVNTSTDRDVLNLQDNVSSVMARQCLHISSHRTSQSTSKHKGNLSRLLHNEVPIRMGERNNLTENSENDSLSDSFSEPQTSDTLCIEAQRKSSAPSSSLRRSTLDSLYEFGETSRHEPAGRTKLDNVELRETSRSLLPFDLSGQEPAFCTQEQVDKCSLGTLADNKPMEKSSNMERQPELSCVICWTDFSSTRGILPCGHRFCYSCIQGWVDCLASRGKVSTCPLCKASFTWISKVDEAGTSDQKIYSQTIPCEASTDVFVPGNVGYDFSRPTSGQGACYQCHFREPEELLLSCHVCRSQWVHSYCLDPPLTPWTCMHCRDLRMLFHRYR

SEQ ID NO: 293806 - protein, 1570 aa, Zea mays
  unsure (1)..(1570): unsure at all Xaa locations
  Clone ID: MRT4577_31034C.1.pep
MRRVKAIRNKSTTKDEVTNSRAKEEDMTKRKKSVDHVAIENRERMMLQYALSVALNGVFTMHTLESLFLSRVRKRQIFVAFAPRWYQMRKNKTEVREDSVLHLGSFAYNLSGGVCASLGLYNITTLHSLLALVYCNTLHEEVHILYSQLHPSEPPHPAEAEAGPSHVAGCALGGELDLFEPPPSLRCRPGLEDRTQPELLGGRDVTPNPPPVPPTLAEAIAALVNATADNTRFLREMAGQQQFQQQAGRGYPQGPRETTYLDFSETRPPLFVKAEDPLEADEWIRVIEQKFGLLCCSETQKPLFAAQQLRGPASTWWGNFVAIQPVNHQYAIDQVNTDLKKKNCFMRGLNDRLQRKMATCIDLTYGKAISTALSVEAKYANSGKNKGFGGERPNQGQAKKQQFVIRPSNQNRPFSRPPSFPFKQPIIIRPNNTPTTPNQPGAPGTRFPALPSSSTGCFNCGKSGHFIKDCPYPRQNQSNASQGSGKSAQPKGNAVGKKYKEDGACILHSSGYYTGRRASDDGKKFVEQHHIAYHESKEGFKIHSPGGHIYTREVAYGVPVTMAGRNFPANMIVLKGQDIDVILGMNWLTQHKAILNTELRTVRLSYNQEEILLTLPATNPAKASGRVYEAIVPEIKNIPVVCEFPDVFPEDLPGLPPERDVEFVIELKLGTAPISRRSYRMPPNELAELKIQLQDLLNKGFIRPSSSPWGCPAIFVKKKDQTLRMCVDYRPLNEVTIKNKYPLPRIDILFDQLTGARVFSKIDLRSGYHQIRIRPEDIPKTAFTTRYGLFEYLVMSFGLTNAPAHFTYLMNSVFMPELDKFVVVFIDDILIYSKNEEDHAQHLRIVLTRLREHQLYAKFSKCAFWLEEIQFLGHVLSAKGIAVDPSKVKDILEWKPPTTVHQVRSFLGLAGYYRRFIPDFSKLVKPITSLLKNDIKFNWSSKCNEAFAQLKTLLTTAPVLAQPDITKPFDVYCDASGSGLGCVLMQEGRVIVYASRQLRRHGEHYPTHDLELAAVSELNMRQTRWLELIKDYELEIHYHPGKANVVADALSRKTSCHCLMAKTSENTLCQEMEKLNLGILQQGTLNQLKLESIILQRIIDAQKDNLGMKHIREKIRAGVAKCFKEDDQGVIWFKNRIVVPKNEELRQQILDEAHLSRYSIHPGSTKMYQDLKQHYWWTKMKIEIARYVARCDTCKRVKAIHMKTAGPLQSLPIPTWKWEDISMDFIVGLPRTAKGYDSIWVIVDRLTKIAHFLPVRAKYTVATYAALYIDRILSLHGIPKTIVSDRGPQFVSKFWEELHKSLGTKLLHSSAYHPQTSGQTERVNQILEDMLRACVLDFSQKWDECLPLAEFSYNNSYQESIKMAPFEALYGRQCRTPLNWSEPGERYFFRPDMVKEVEEKVQRIIHNMKKAQTRQKSYADRRRQPLCFLVDDYVYLKVSPMKGVSCFGVKGKLAPRYIGPFLVIEQCGPVAYRLQLPETLSAVHNVFHVSQLKKCLRVPDRTVEVTDVVLEPDLTYSEHPIRVLDQKDRVTRRKTLKFYKIQWNQHSEDEATWETQDFLNXEFPRLFSLL

SEQ ID NO: 293807 - protein, 1540 aa, Zea mays
  Clone ID: MRT4577_31035C.1.pep
MPPRTRLTARKSTGPIGVPRHQLAPRHESSSSGSNDPIGDLEARDQLADRDLALDWAVQSRLLMCAKEVRAQARVKELSSTVDNLQMPIRTRGQDAAGTSGGRDVTPNPPPVPPTLAEAIAALVNATADNTRFLREMAGQQQFQQQAGRGYPQGPRVTTYLDFSETRPPLFVKAEDPLEADEWIRVIEQKFGLLRCSETQKPLFAAQQLRGPASTWWGNFMAIQPDNHQVTWDEFKAAFREHYIPEGVLHMKQEEFMKLQQGGDTVNQYLNKFNHLSQYAIDQVNTDLKKKNCFMRGLNDRLQRKMATCIDLTYGKAVSMALSVEAKYTNSGKNKGFGAYHYPPNNTPTTPKQPGAPGTRFPALPSSSTGCFNCGKSGHFIKDCPYPRQNQSNASQGSGKSAQPKGNAVGKNTKKTGRIYYTQVATTPEGEPVMMGTFPVASHPAIILFDSGASHTFISKKFVEQHHIAYHESKEGFKIHSPGGHIYTKEVAYGVPVTMAERNFPANMIVLKGQDIDVILGMNWLTQHKAILNTELRTVRLSYNQEEILLTLPATNPAKASGRVYEAIVPEIKNIPVVREFPDVFPEDLPGLPPERDVEFVIELKPGTAPISRRSYRMPPNELAELKIQLQDLLNKGFIRPSSSPWGCPAIFVKKKDQTLRMCVDYRPLNEVTIKNKYPLPRIDILFDQLTGARVFSKIDLRSGYHQIRIRPEDIPKTAFTTRYGLFEYLVMSFGLTNAPAHFTYLMNSVFMPELDKFVVVFIDDILIYSKNEEDHAQHLRIVLTRLREHQLYAKFSKCAFWLEEIQFLGHVLSAKGIAVDPSKVKDILEWKPPTTVHQVRSFLGLAGYYRRFIPDFSKLVKPITSLLKNDIKFNWSSKCNEAFEQLKTLLTTAPVLAQPDITKSFDVYCDASGSGLGCVLMQEGRVIAYASRQLRRHEEHYPTHDLELAAVVHALKIWRHYLLGNICHIYTDHKSLKYIFTQSELNMRQRRWLELIKDYELEIHYHPGKANVVADALSRKTSCHCLMAKTSENTLCQEMEKLNLGIIQQGTLNQLKLESIILQRIIDAQKDNLGMKHIREKIKAGVAKCFKEDDQGVIWFKNRIVVPKNEELRQQILDEAHLSRYSIHPGSTKMYQDLKQHYWWTKMKIEIARYVAKCDTCRRVKAIHMKTAGPLQSLPIPTWKWEDISMDFIVGLPRTAKGYDSIWVIVDRLTKIAHFLPVKVTYTIATYAALYIARILSLHGVPKTIVSDRGPQFVAKFWEALHNSLGTKLLHSSAYHPQTSGQTERVNQILEDMLRACVLDFSPKWDECLPLAEFSYNNSYQESIKMAPFEALYGRRCRTPLNWSEPGERYFFRPDMVKEVEEKVQKIVHNMKKAQARQKSYADRRRQPLCFLVDDYVYLKVSPMKGISRFGVKGKLAPRYIGPFLVLEQCGPVAYRLQLPETLSAVHNVFHVSQLKKCLRVPDRTVEVTDVVLEPDLTYSEHHIRVLDQKDRVTRRKTLKFYKIQWNQHSEDEATWETQDFLDKNFPGFLASCKL

SEQ ID NO: 293808 - protein, 69 aa, Zea mays
  Clone ID: MRT4577_31036C.1.pep
YLLPQVPPDSLYQYLQAISHNPALSSFASLAFQASTISNCVMYGSYRTSLSYYRGTVNSRVKLTYLKTV

SEQ ID NO: 293809 - protein, 159 aa, Zea mays
  unsure (1)..(159): unsure at all Xaa locations
  Clone ID: MRT4577_31037C.1.pep
YLEFARAVSDNKPXLFFPLSXGQAPGWGCYXCSDSXASPSVTLGLHPGGLPCRNISVMVTCYDKTKYTGIWSAIXYSACALKVEVLVVIGHSCCRGIRALLSLQDGAPDTFHFVEDWVNIGFIAKMKVKKEYASVPFYDQCSILXKEAVNAFLENLKIY

SEQ ID NO: 293810 - protein, 1028 aa, Zea mays
  unsure (1)..(1028): unsure at all Xaa locations
  Clone ID: MRT4577_31038C.1.pep
MPPRTRLTARKSTGPIGVPRHQLAPRHESSSSGSNDPIGDLEARVSRLQAALQQRTDAWVADGDRINELRRDIRHLQDQLADRDLALDWAVQSRLLMCAKEARAQARIKELSSTVDDLQVYCNTLHEEVHVLYSQLHPSEPAPPAEAEAGPSHVAGRALGGELDLFEPPPSLRTRAQDASGTSGGRDVTPNPPPVPPTLAEAIATLVNATADNTRFLRVMAGQQQLQQQAGRGFQQGPRETTYLDFSETRPPLFIKAEDPLEADEWIRVIEQKFGLLRCSEVQKPLFAAQQLRGPASTWWGNFVAIQPDNHQITWNEFKAAFREHYIPEGVLHMKQEEFMKLKQGGDTVNQYLNKFNHLSQYAIDQVNTDLKKKNCFMRGLNDRMQRKMAACIDLTYGKAVSTALSVEAKYGNSGKTKGFGGERPNQGQAKKPRFVIRPSTQNRPFSRPXHFPSSSLLLSAPTMPPLPQSSRVPQALXPALPSSSTGCFNCGKSGHFIKDCPYPRQNQSNASQGSGNSAPGKGSTSGKNTKKTGRVYYMQVATTPEGEPVMMGTFPVASHPAIILFDSGASHTFISKKFVEQHHIAYHESKEGFKIHSPGGHIYTKEVAYGVPVTMAGRNFPANMIVLKGQDIDVILGMNWLTQHKAILNTEFRTVRLSYNQEEILLTLPATNPAKTSGRVYEAIVPEIKNIPVVCEFLDVFPEDLPGLPRERDVEFVIELKPELKIQLQDLLNKGFIRPSSSPWGCPAIFVKKKDQTLRMCVDYRPLNEVTIKNKYPLPRIDILFDQLTGARVFSKIDLRSGYHQIRIRPEDIPKTAFTTRYGLFEYLVMSFGLTNAPAHFTYLMNSVFMPELDKFVVVFIDDILIYSKNEEDHAQHLRIVLTRLREHQLYAKFSKCAFWLEEIQFLGHVLSAKGIAVDPIKVKDILEWKPPTTVHQVRSFLGLAGYYRRFIPDFSKLVKPITSLLKNHTKFNWSSRCNEAFEQLKVLLTSAPILAQPDIEKPFDVYCDASGSSLGYVLMQEGVDLL

SEQ ID NO: 293811 - protein, 108 aa, Zea mays
  Clone ID: MRT4577_31039C.1.pep
QDSIFFHGGGFQKNWVQKNSIWKGKNFYKFKKPGYLKGHPSIKNLKRGFPYLKRPTPPAFNSFPNKTNFYPGKTLRGGKRRPLGEHFPSGPWKKPSLPRVYSAASLWG

SEQ ID NO: 293812 - protein, 78 aa, Zea mays
  Clone ID: MRT4577_3103C.1.pep
ILIELLRDLGGGGGGACVEVFPTWRTPITRQVYPIGTRRRLACSDHLTPVRVTIHDKTKLISTTAEDYPYPLEGKKKD

SEQ ID NO: 293813 - protein, 279 aa, Zea mays
  Clone ID: MRT4577_31040C.1.pep
MDFIVGLTRTTKGYDSIWVIVDRLMKITHFLPVKTDHPVIVYAQLYIARILSLHGVPKTIVSDRGPQFVSKFWEELHKSLGTKLLHSSAYHLQTSGQTERVNQILEDMLRACVLDFSPKWDECLPLAEFSYNNSYQESDYVYLKVSSIKGVSRFGVKGKFAPWYIGPFLVLEQCGPVAYQLQLPETLSAVHNVFHVSQLEKCLRIPDRTVEVTDVVLKPDLTYSEHPIRVLDQKDRVTRRKTLKFYKIQWNQHSKDEATWETQNFLDKNFPGFLASCKL

SEQ ID NO: 293814 - protein, 315 aa, Zea mays
  Clone ID: MRT4577_31041C.1.pep
MDPPSSDIVVDTPYFRIYSDRRIDRLVGTDTVPAGFDPTTGVTSKDVVVDSDAGVYVRLYLPDTATGSDDSKKLPVLVYFHGGGFVTHSAASPPYQSFLNTLAAKAGLLIVSVNYRLAPEHPLPAGYEDSFRALRWAASGSGDPWLSHHGDLGRIFLAGDSAGGNFVHNIAVMAAASEVPVRIRGAVLLHAGFGGRERIDGETPESVALMEKLWGVVCLEATDGLNDPRINPLAAAAAPSLRNLPCERVLVCAAELDFLRPRNRAYYEALAASWRGGTVEWFESKGKEHVFFLYNPGCGEAVELMDRLVAFFAGN

SEQ ID NO: 293815 - protein, 1647 aa, Zea mays
  unsure (1)..(1647): unsure at all Xaa locations
  Clone ID: MRT4577_31042C.1.pep
MPPRTRLTARKSTGPIGVPRHQLAPRHESSSSGSNDPIGDLEARDQLADRDLALDWAVQSRLLMCAKEARAQARVKELSSTVDDLQVYCNTLHEEVHVLYSQLHPSEPAPPAEAEAGPSHVAGRALGGELDLFEPPPSLSNVKWKVFSGTLCLPQMFLPQMPTRTRAQDAAGTSGGRDVTPNPPPVPPTLAEAIAALVNATADNTRFLREMAGQQQLQQQAGRGFQQGPRETTYLDFSETRPPLFIKAEDPLEADEWIRVIEQKFGLLRCSEVQKPLFAAQQLRGPASTWWGNFVAIQPDNHQVTWNEFKAAFREHYIPEGVLHMKQEEFMKLQQGGDTVTQYLNKFNHLSQYAIDQVNTDLKKKNCFMRGLNDRMQRKMAACIDLTYGKAVSTALSVEAKYANSGKTKGFGGERPNQGQAKKPRFVIRPSSQNRPFSRPPSFPFKQPIIIRPNNAPTTPKQPGAPGTRFPVLPSSSTGCFNCGKSGHFIKDCPYPRQNQANNQQGSGNSAPGKGSTPGKNTKKTGRVYYTQVATTPEGEPVMMGTFPVASHPAIILFDSGASHTFISKTFVEQHHIAYHESKEGFKIHSPGGHIFTKEVAYGVPVTMAGRNFPANMIVLKGQDIDVILGMNWLTQYKAILNTEFRTVRLSYNQEEILLTLPATNPAKASGRVYEAIVPEIKNIPVVCEFPDVFPEDLPGLPPERDVEFVIELKPGTAPISRRSYRMPPNELAELKTQLQDLLNKGFIRPSSSPWGCPAIFVKKKDQTLRMCVDYRPLNEVTIKNKYPLPRIDILFDQLTGARVFSKIDLRSGYHQIRIRPEDIPKTAFTTRYGLFEYLVMSFGLTNAPAHFTYLMNSVFMPELDKFVVVFIDDILIYSKNEEDHAQHLRIVLTRLREHQLYAKFSKCAFWLEEIQFLGHVLSAKGIAVDPSKVKDILEWKPPTTVHQVRSFLGLAGYYRRFIPDFSKLVKPITSLLKNDIKFNWSSKCNEAFEQLKTLLTTAPVLAQPDITKPFDVYCDASGSGLGYVLMQEGRVIAYASRQLRRHEEHYPTHDLELAAVVHALKIWRHYLLGNICHIYTDHKSLKYIFTQSELNMRQRRWLELIKDYELEIHYHPGKANVVADALSRKVACHCLMAKTFENTLCQEMEKLNLGIIQQGTLNQLKLESIILQRIIDAQKDNLGMKHIREKVKAGTAKCFKEDDQGVIWFKNRIVVPKNEELHQQILDEAHLSRYSIHPGSTKMYQDLKQHYWWTKMKIEIARYVAKCDTCRRVKAIHMKTAGPLQSLPIPTWKWEDISMDFIVGLPRTAKGYDSIWVIVDRLTKIAHFLPVKVTYTIATYAALYIARILSLHGVPKTIVSDRGPQFVSKFWEELHKFLGTKLLHSSAYHPQTSGQTERVNQILEDMLRACVLDFSPKWDECLPLAEFSYNNSYQESIKMAPFEALYGRRCRTPLNWSEPGERYFFRPDMVKEVEEKVHRIIHNMKKAQARQKSYADRRRQPLCFLVDDYVYLKVSPMKGISRFGIKGKLAPRYIGPFLVLEQCGPVAYRLQLPETLSAVHNVFHVSQLKKCLRVPDRTVEVADVVLEPDLTYSEHPIRVLDQKDRVTRRKTLKFYKIQWNQHSEDEATWETQDFLDXEFPRLFSLM

SEQ ID NO: 293816 - protein, 60 aa, Zea mays
  Clone ID: MRT4577_31043C.1.pep
ILVWATAPFLFGRWGNKGKSPGAYIFVPLFISKNFLGVEFISVPPPLTLKINHLLGNLRT

SEQ ID NO: 293817 - protein, 502 aa, Zea mays
  Clone ID: MRT4577_31044C.1.pep
MPSPTIVLLPMWATGHFSSMLEAGKRLLFCSAGRTAAYSLTVLVTPPPMAASSEASSSQQAHCEMMATVDGIVFHHLPAIEHRTDLAHPSEYIRLYAPQVKEAIAGLAAPVAAVVVDFFGTPLLDVAHDLAVPAYVYFASTGAMLALMLRLPGIQEELASRLREEGGVVDVPGMPPVPVASMPSPDVNDYTWFAYYGRRFLETRGIIANTAAELEPGVLASIAGGRCTPGGRAPTVYPIGPVLSPKPRVVVDARSSSSAQECIRWLDAQPPASVVFLCFGSMGWMNAEQAREVAAGLERSGHRFLWVLRGPPAGSGSGHPTDANLGDLLPDGFLERTKAQGVVWPGWAPQLEILAHAAVGGFVTHCGWNSVLESLWHGVPMAPWPLYAEQPLNAFELVACMGVAVDLRVVGTGRASSVVEAAELERAVRSLMGGSEEGRKAKEKARKMKAACRKAAEKGGSAYAALQAVVQDTRPTTSPARHPNNKHASRSDTKIRYEFVNI

SEQ ID NO: 293818 - protein, 113 aa, Zea mays
  Clone ID: MRT4577_31045C.1.pep
AVPAPHRAPPFHCGDFMKSSILRAGVVALACALGLSACGGGSGDLYLTGAVYNVTKDGLVLTNNGGNDTAVVYPYTSFQFSNRVSTDDQFNIEVKSRPSNAEKCEVTGGHARA

SEQ ID NO: 293819 - protein, 106 aa, Zea mays
  Clone ID: MRT4577_31046C.1.pep
ENGGSPGKGPKFTKTNGAGNNGYKQVNLAGTTGGPKKQKMRGGPAQRGPETSYQACTAPKKTKRGQAGKGPRMLNALRRQPLGRAAPAFKNPGKGAYPGGGKKKTF

SEQ ID NO: 293820 - protein, 49 aa, Zea mays
  Clone ID: MRT4577_31047C.1.pep
KNQNKKAFLPLFNKFWAKCLWVPPGFFGNKGACPFFKNWKTKERGAQCP

SEQ ID NO: 293821 - protein, 42 aa, Zea mays
  Clone ID: MRT4577_31048C.1.pep
KLTGKLKREVILGSSSIDDPAQYITKLKMLTAQELSLDDLQI

SEQ ID NO: 293822 - protein, 76 aa, Zea mays
  unsure (1)..(76): unsure at all Xaa locations
  Clone ID: MRT4577_31049C.1.pep
YLVISDKXNVCLGVLNGGPIGPPTRPPTRPVSLRGKLVAYDNDKNEVGWVDFDCTNPRKRSRIPSFLRRALRNQLL

SEQ ID NO: 293823 - protein, 56 aa, Zea mays
  Clone ID: MRT4577_3104C.1.pep
QEYACPKHAYLAFNFYLGMPIITMTSGQKHYSDDTDFILPASSVGTGPQLKGGSKA

SEQ ID NO: 293824 - protein, 416 aa, Zea mays
  Clone ID: MRT4577_31050C.1.pep
TSFLLPLYPKPPRRGGDDWPQNSTLFPHPLAGNLFPEGLYYTAISLGSPPRPYFLDVDTGSHTTWVQCDAPPCASCAKGAHPLYRPARTADALPASDPLCEGAQHENPNQCDYEISYADGSSSMGVYVRDSMQFVGKDGERENADIVFGCGYDQQGVLLNALETTDGVLGLTNKALSLPTQLASRGIISNAFGHCMSTDPSGAGGYLFLGDDYIPRWGMTWVPIRDGPADDVRRAQVKQINHGDQQLNARGKLTQVVFDTGSTYTYFPDEALTRLISSLKEAASSPRFVQDDSDKTLPFCMKSDFPVRSVEDVKHFFKPLSLQFGKRFFFSRTFNIRPEDYLVISDKGNVCLGVLNGTTIGYDSEVIVGDVSLRGKLVAYDNDKNEVGWVDFDCTNPRKRSRIPSFLRRALRNQLL

SEQ ID NO: 293825 - protein, 83 aa, Zea mays
  Clone ID: MRT4577_31051C.1.pep
GEGLRTRSLSQASISLTPKSASRYVLPNLKVSTPRQNSETVLIVLKLDKSMRYTFVQNRLINKVGTCLRTLPYFVCMYIYCHT

SEQ ID NO: 293826 - protein, 172 aa, Zea mays
  Clone ID: MRT4577_31052C.1.pep
GSQRRRYSVILQFLETLGTDTLTIWCSGVQQTDSFFRSIGMSMMTISTMDFSHRALRSLAALQEDGGRVLCGVALLFEVLDVLVSVVGCVLGSGLSTHQGDPRYILEPKMPDAVSMQHRLPPDRRGGSRLRGASRSRPWSPIRCAPASSILSLGIRLKPLSASPDAVLPAGS

SEQ ID NO: 293827 - protein, 72 aa, Zea mays
  unsure (1)..(72): unsure at all Xaa locations
  Clone ID: MRT4577_31053C.1.pep
MERGDKYGFFXTPRGFFGTGTIKVPGLFDSPFVSVFDNVFQHVFFDSYPPPQKAYRIIVKGIFFNYGQVPLG

SEQ ID NO: 293828 - protein, 66 aa, Zea mays
  Clone ID: MRT4577_31054C.1.pep
NEIFYRGVLFNLDPPPFGVRGPYVFKKFIPYPCGVEPFCCLGPQGGEERFFIYSPRVVLLSPVPQN

SEQ ID NO: 293829 - protein, 69 aa, Zea mays
  unsure (1)..(69): unsure at all Xaa locations
  Clone ID: MRT4577_31055C.1.pep
GPGEGPPXKXXEXGHPKAPRGPAPPREGFVRXFSMRPPGKTRVPGLWMRPGWAGGKSPHQPRGGWGXRA

SEQ ID NO: 293830 - protein, 65 aa, Zea mays
  Clone ID: MRT4577_31056C.1.pep
SIWWFLHSSCLYSNGQLNTWILAASSFPGLLYLPLAAQSCFVLLILCYLPRLPVRKPDLVRPTFC

SEQ ID NO: 293831 - protein, 87 aa, Zea mays
  Clone ID: MRT4577_31057C.1.pep
LSWAGTRDSELSTILGRERIYIVNCARWITFDNNLNTLAESTTSTTCGATQSDVTPSNRLLFLCTACSHRAFLYVPICLRDHSLRGA

SEQ ID NO: 293832 - protein, 131 aa, Zea mays
  unsure (1)..(131): unsure at all Xaa locations
  Clone ID: MRT4577_31058C.1.pep
EVDVSAAFDXATQGARAEGRVREGFAHPAVDGIVLWTAMGANATCYQMCLTDADFTNLPAGDVVDRLLGEWQTKEVLGATDDRGSFNFSAFYGEYRLSVTYLNRTADATFSLPRSDDTKHINIRLPPGPAA

SEQ ID NO: 293833 - protein, 409 aa, Zea mays
  Clone ID: MRT4577_31059C.1.pep
MPLLEEMMESSYIRTYLQQMAASVSTASCDPSSGADEVECRDEAAALRLKMVFVVTILVAGATGVAIPLVGRRCHGHGASSSSSSTGGAFVLVKAFAAGVILATGFVHMLHDADEALTDPCLPAAPWRRFPFPGFVAMLAALGTLVFDFVGTHMYERKKHHADAEEAAVVVGNASASANASGHDVIVALLQDGALVASTGSSIGRDGGGHKDPMHIVGMHAHAAAHRHSHAHGHGPCDDCHDGHDEEPSQARHVVVSQILELGIVSHSVIIGLSLGVSQNPCTIKPLGAALSFHQFFEGFALGGCISEAQFKSFSALLMAFFFAITTPAGITVGSGIASFYNPNSPRALVVEGILDSISAGILIYMALVDLIAADFLSKRMSCNLRLQVGSYIALFLGAMAMASLAIWA

SEQ ID NO: 293834 - protein, 79 aa, Zea mays
  Clone ID: MRT4577_3105C.1.pep
ARLMDDSGCARILGYPKPLAGPTAPCKGAVGDKKRMFVGHLPGLFGIGEPFRGLFSGQCRPPLRALPGGSSKTPHFGPK

SEQ ID NO: 293835 - protein, 123 aa, Zea mays
  Clone ID: MRT4577_31060C.1.pep
DHATQAGYLEDVLREGFGHPAVDGIVLWTAMGANATCYQMCLTDADFTNLPAGDVVDRLLGEWQTKEVLGATDDRGSFNFSAFHGEYRLSVTYFNRTADATFSLPRSDDTKHINIRLPPGPAA

SEQ ID NO: 293836 - protein, 156 aa, Zea mays
  Clone ID: MRT4577_31061C.1.pep
MPLLEILELGIVSHSVIIGLSLGVSQNPCTIKPLGAALSFHQFFEGFALGGCISEAQFKSFSALLMAFFFAITTPAGITVGSGIASFYNPNSPRALVVEGILDSISAGILIYMALVDLIAADFLSKRMSCNLRLQVGSYIALFLGAMAMASLAIWA

SEQ ID NO: 293837 - protein, 440 aa, Zea mays
  unsure (1)..(440): unsure at all Xaa locations
  Clone ID: MRT4577_31062C.1.pep
MRCVHVSLCSLGASVVAASVSTASCDPSSGADEVECRDEAAALRLKMVFVVAILVAGATGVAIPLVGRRCHGHGASSSSSTGGAFVLVKAFAAGVILATGFVHMLHDADEALTDPCLPAAPWRRFPYPGFVAMLAAFGTLVFNFDGTHMHERKKHHXMRRKPPLLGNASASANASGHDVIVALLQDGALVASTGSSIGRDGGGHKDPMHIVGMHAHAAAHRHSHAHGHGPCDDCHDGHDEEPSQARHVVVSQIXLELGIVSHSVIIGLSLGVSQNPCTIKPLGAALSFHQFFEGFALGGCISXLISSTSFCDLDQQLVIXADVSVFVFVVLCSLPNKMQAQFKSFSALLMAFFFAITTPAGITVGSGIASFYNPNSPRALVVEGILDSISAGILIYMALVDLIAADFLSKRMSCNLRLQVGSYIALFLGAMAMASLAIWA

SEQ ID NO: 293838 - protein, 68 aa, Zea mays
  Clone ID: MRT4577_31063C.1.pep
GVYPRFFWGRPSPSFLEPPLWRKKWSFSPKKFIGPGECFQGKGGGNFFFPPPPFLSIFLGSPMGGPGT

SEQ ID NO: 293839 - protein, 56 aa, Zea mays
  Clone ID: MRT4577_31064C.1.pep
SNLSQSHRRSQDQQPISLIEGVGVYHVLDIINFHPSTSPPVAGPVFQGWVFKIDRS

SEQ ID NO: 293840 - protein, 53 aa, Zea mays
  Clone ID: MRT4577_31065C.1.pep
ALSVSFTSTLGRHWLISPPFSPRNGSKDAMRVSNTSANGSAKNRVRLIALVSS

SEQ ID NO: 293841 - protein, 57 aa, Zea mays
  Clone ID: MRT4577_31066C.1.pep
SLYTHVHRSMVQATFPSLGHFYGDVALSDFSFCLGSDEPIQQPKHPTLGPPCLKGKG

SEQ ID NO: 293842 - protein, 106 aa, Zea mays
  unsure (1)..(106): unsure at all Xaa locations
  Clone ID: MRT4577_31067C.1.pep
DVERHFTDTIEIATDNHHIYSCRLEELVSLHHYSDDLADAQKTAEVKPDWAKGYSRLGAVYXGLGDADSAVAAYEKVLALEPXNEGLKAGLEDAKKAAXRPAASRP

SEQ ID NO: 293843 - protein, 86 aa, Zea mays
  Clone ID: MRT4577_31068C.1.pep
WLGDHDCIIINMPHPFAQVTGRALYLHFASCCTHMSAFYTQTAFIACLGTTETAFAANCATWGILYNHADVLPHVAKVYIMCAASE

SEQ ID NO: 293844 - protein, 53 aa, Zea mays
  Clone ID: MRT4577_31069C.1.pep
VRQGGVYGRRASHYQHLRRRVPAWVNGSHLAHPCRVCLQVKARVRAQAFQDQG

SEQ ID NO: 293845 - protein, 77 aa, Zea mays
  Clone ID: MRT4577_3106C.1.pep
LFMMHQRQSSPYHCIHRPTTHRLQWVSYADLHDAYGCHIDQPVAMRGMPHRSNHPDLSTTSLVSNVTINMTEPSRYS

SEQ ID NO: 293846 - protein, 122 aa, Zea mays
  unsure (1)..(122): unsure at all Xaa locations
  Clone ID: MRT4577_31070C.1.pep
MYGCLDDSSGLLQNTGENDLXTRTFVKVYKSGSVGRSLDITRFSNYAELREELGQMFGIKGQLDDPDRSGWQLVFVDRENDVLLLGDDPWESFVNSVWYIKILSPEDVHKMGKPGNDPRYLS

SEQ ID NO: 293847 - protein, 179 aa, Zea mays
  unsure (1)..(179): unsure at all Xaa locations
  Clone ID: MRT4577_31071C.1.pep
MDVDKQETMEETILVGDDLMRGPPSPVIPKEIASHVLEDVELCDGILKNLFLCLQINDIEPFCQDEIVLYRQCAEKRDKEIRERMQNSEYKLGFSMPLKXAKERATQLVTSEFGSRRRMILASGLEGMEGFRQRWSLHGQLEDTRKRLEALNHGMEKRENQSSTAERTKSPAGKKWFFW

SEQ ID NO: 293848 - protein, 211 aa, Zea mays
  Clone ID: MRT4577_31072C.1.pep
EQQQQQAWKQKFMGSQSMSFGGSVSLNSPTTKDGPVDNKIGRDVQNQTLFSPQVDSSSLLYNMVPNLTSNVADNNISTIPSGSTYLQSPMYGCLDDSSGLLQNTGENDPTTRTFVKVYKSGSVGRSLDITRFSNYAELREELGQMFGIKGQLDDPDRSGWQLVFVDRENDVLLLGDDPWESFVNSVWYIKILSPEDVHKMGKPGNDPRYLS

SEQ ID NO: 293849 - protein, 179 aa, Zea mays
  Clone ID: MRT4577_31073C.1.pep
MDVDKQETMEETILVGDDLMRGPPSPVIPKEIASHVLEDVELCDGILKNLFLCLQINDIEPFCQDEIVLYRQCAEKRDKEIRERMQNSEYKLGFSMPLEEAKERATQLQSEVTLLERRMILASGLEGMEGFRQRWSLHGQLEDTRKRLEALNHGMAKRENQSSTAERTKSPARKKWFFW

SEQ ID NO: 293850 - protein, 727 aa, Zea mays
  unsure (1)..(727): unsure at all Xaa locations
  Clone ID: MRT4577_31074C.1.pep
YCGGFHVGISSSKSILVCGRLERRSLLCRTKIFGLKSVAETDLCKTLTASDTSIHRGFSVPRRAAERVFPPLDFTQQPPAQELIARDIHDXQSQCRHVFMTQXKEHCTXTGWSVFVSAKRLVAGDSVLFIWNEKNQLLLGIRHATRPQTVMPSSVLSSDSMHIGLLAAAAHAAATNSRFTIFYNPRASPTEFVIPLSKYIKAVFHTRISVGMRFRMLFETEESSVRRYMGTITEVSDADPVRWPSSYWRSVKVGWDESTAGERPPRVSLWEIEPLTTFPMYPSLFPLRVKHPWYSGLAALHDDSNALMWLRGVTGEGGFHSLNFQSPGIGSWGQQRLHPSLLSNDHDQYQAVVAAAAASQSGGYLKQQFLHLQQPMQSPQEQCNLNPLLQQQILQQASQQQMVSSDAQNIQSVLNPGAIQQQLHQLQQMQHTHNDQKQKIQPDQQYQVASSAVLPSPTSLPSHLREKFGFSDPNVNSSSFISSSSNENMLESNFLQVSSKSVDLSRFNQPVVSEQQQPQQQQAWKQKFMGSQSMSFGGSVSLNSPTSKDGSVDNKVGRDVQNQSLFSPQVDSSSLLYNMVPNLTSNVADNNISAFPSGSTYLQSPMYGCLDDSSGLLQNTGENDPTTRTFVKVYKSGSVGRSLDITRFSNYAELREELGQMFGIKGQLDDPDRSGWQLVFVDRENDVLLLGDDPWESFVNSVWYIKILSPEDVHKMGKPGNDPRYLS

SEQ ID NO: 293851 - protein, 179 aa, Zea mays
  Clone ID: MRT4577_31075C.1.pep
MDVDKQETMEETILVGDDLMRGPPSPVIPKEIASHGLEDVELCDGILKNLFLCLQINDIEPFCQDEIVLYRQCAEKRDKEIRERMQNSEYKLGFSMPLEEAKERATQLQSEVTLLERRMILASGLEGMEGFRQRWSLHGQLEDTRKRLEALNHGMAKRENQSSTAERTKSPARKKWFFW

SEQ ID NO: 293852 - protein, 112 aa, Zea mays
  Clone ID: MRT4577_31076C.1.pep
DNVLRSSIHSKLYSLSWSWSRYCACTLESGGPPTRHDLFAIWYKKSSGYTLFLLSDVCTQSKPVRCPLCHINASVRKTLKSRAPWWMQWSSSVARPLAVAPTPCLLKIKHRD

SEQ ID NO: 293853 - protein, 71 aa, Zea mays
  unsure (1)..(71): unsure at all Xaa locations
  Clone ID: MRT4577_31077C.1.pep
AISACPRARPPLALSXVQLPLQTMVGLFMPDLSRSPRPPGPHFVTLAPFIHPPARPSLHFLMTVGHHNLLG

SEQ ID NO: 293854 - protein, 86 aa, Zea mays
  Clone ID: MRT4577_31078C.1.pep
HASDLFDALRHLNLRACPRLQFVLPVWVSSFPRLEMLHIADCTDLRHVFVLDEEHREERIAFPNLKAMHLHNLPSLWQICEASMLM

SEQ ID NO: 293855 - protein, 66 aa, Zea mays
  unsure (1)..(66): unsure at all Xaa locations
  Clone ID: MRT4577_31079C.1.pep
AGDIKGKGSDTXEPLKHSRGAIWRKDSDKPIXGPITSRLTTVGGTKTVYYDVIQTDWKPNTAYTTK

SEQ ID NO: 293856 - protein, 55 aa, Zea mays
  Clone ID: MRT4577_3107C.1.pep
GPGVDKAPLLKLDAVQVFWGLEGEAFGSAAVEKLGNEKFLYLAKDRIMQVVNLSP

SEQ ID NO: 293857 - protein, 246 aa, Zea mays
  unsure (1)..(246): unsure at all Xaa locations
  Clone ID: MRT4577_31080C.1.pep
MSLFTHSDQDDELRISSIFTRAPRPPAPSMSSPFSAASVAAGSEAAAGTRKLPVLLFDVMDTLVRDPFYHHIPGFFQMSMKELLESKHPTAWSEFEKGLIDENEMAKKFFKDGRSFDLQGLKECMVRAYEYIDGVEDILCCLKKNNYEMHAFTNYPVWYQLIEDKLKLSKYLSWTFCSCRTGKRKPSPEFYLQAADQLNVDPASCVFIDDRMINIEAALSVGNGXGLQFKSAEALQKDLCXFGVNI

SEQ ID NO: 293858 - protein, 207 aa, Zea mays
  Clone ID: MRT4577_31082C.1.pep
KKKKKKKKKKNKKKKKKKKVNKKKIFLNCSSETAYLFSLHLQCHNNFKKIRGNTRIYDAFFVLCVPQTVTKSYAKNELAKKFFKDGRSFDLQGLKECMVRAYEYIDGVEDILCCLKKNNYEMHAFTNYPVWYQLIEDKLKLSKYLSWTFCSCRTGKRKPSPEFYLQAADQLNVDPASCVFIDDRMINIEAALSVGMVGLQFKSAEAL

SEQ ID NO: 293859 - protein, 255 aa, Zea mays
  Clone ID: MRT4577_31083C.1.pep
MVSLLPRAPSLAFLAKSASSQRPPAPSMSSPFSAASVAAGSEAAAGTRKLPVLLFDVMDTLVRDPFYHHIPGFFQMSMKELLEAKHPTAWSEFEKGLIDENELAKKFFKDGRSFDLQGLKECMVRAYEYIDGVEDILCCLKKNNYEMHAFTNYPVWYQLIEDKLKLSKYLSWTFCSCRTGKRKPSPEFYLQAADQLNVDPASCVFIDDRMINIEAALSVGMVGLQFKSAEALQKDLCALGVELSPLVCEGEAQVQ

SEQ ID NO: 293860 - protein, 50 aa, Zea mays
  unsure (1)..(50): unsure at all Xaa locations
  Clone ID: MRT4577_31084C.1.pep
MAGCFSHGSFPKVEKXKTGLLDNNKPSAGFFPGDHPPPKAWWTEPPEHWN

SEQ ID NO: 293861 - protein, 54 aa, Zea mays
  Clone ID: MRT4577_31085C.1.pep
PAPRYYPRPRALKWAINNSVILDGHVRARGRTKHAVPSHHPVEERRSNGHSLPT

SEQ ID NO: 293862 - protein, 63 aa, Zea mays
  Clone ID: MRT4577_31086C.1.pep
FLPVGFRPLPGLEIRPPKENPCPLVTYGPFLLFLPAAKTSPRGLTPLAPLLDHLPPLGKARFL

SEQ ID NO: 293863 - protein, 65 aa, Zea mays
  Clone ID: MRT4577_31088C.1.pep
TTYDATTRLDAMQCQLVSQVWTPSCAAEPRYLTGGAGVSMARGAAKCDHDLVAGASGGSVMVRLQ

SEQ ID NO: 293864 - protein, 54 aa, Zea mays
  Clone ID: MRT4577_31089C.1.pep
YKNGVCFFRKTKYFSINNTYSFLSQKRAFHGIPKNTPVVAPVLFLQIFPRAWRV

SEQ ID NO: 293865 - protein, 54 aa, Zea mays
  Clone ID: MRT4577_3108C.1.pep
VSCMKCSELRSCRMAACCTSEVAKATEFYDVRVPVEGPVSFQTEPLAHVSGLTC

SEQ ID NO: 293866 - protein, 64 aa, Zea mays
  Clone ID: MRT4577_31090C.1.pep
MHSGDYVEDYEERAPLQALQADDAFLDMLLPSKNAGDNCLTDTHDVTGHQTYSEIDGHNCTLND

SEQ ID NO: 293867 - protein, 441 aa, Zea mays
  Clone ID: MRT4577_31091C.1.pep
MEAHASRGRRTLEEIRQKRAAERMQHAVPIAASHVDSHGNQRAGAELLARVQELENGNTELERENKMLLSKIAEKEVEKDALVNRLNDLERNVVPSLKKSLNDISLEKDAAVVAKEDALAQLRSMKKRLKEAEEEQYRAEEDSASLRAQLNTLQQQMGHTYSGYTMGTSSEESVAMEKEIQDLQAQLKQESLLRQQEQQQLAEQSQLRQQEQEKLAKEQTRIASLEAEKQQLEDQITMLTKKATEDASEFAARKAFSMQDREKLEQQLHDMALMIERLEGSRQKLLMEIDSQSSEIEKLFEENSALSASYQEAIDVTVQWENQVRDCLKQNEELRSHLEKLRLEQVSLLKVSNIATQSDGQTENSISNPPQMVIENISLKDQLIKEQSRSEGLSAEIMKLSAELRKAVHAQNNLARLYRPVLRDIESNLMKMKQETYATIQ

SEQ ID NO: 293868 - protein, 85 aa, Zea mays
  Clone ID: MRT4577_31092C.1.pep
PWGRSCDTARWEVTLYVRSRLWLQRSGLGLMKSVDAGVAQKRDVHGECSSLPIVKVPNHVPEAVLGADEGDDQDAIISRCVRTRA

SEQ ID NO: 293869 - protein, 128 aa, Zea mays
  Clone ID: MRT4577_31093C.1.pep
ENLPTLTKFQVRDCLKQNEELRSPLEKLRLDQVSLLEVSNIATKSDGQIENSISNLPEMVTENISLKGQLIKEQSRSESLLAEIMKLSAELRKAVQAQNNLVRLYRPVLRDIESNLMKMKQETYATIQ

SEQ ID NO: 293870 - protein, 50 aa, Zea mays
  unsure (1)..(50): unsure at all Xaa locations
  Clone ID: MRT4577_31094C.1.pep
PAGKNLKKKKKKKKKKIYLVLGYFGLWVEIGTXFFRWPKILXFLGAGIHS

SEQ ID NO: 293871 - protein, 82 aa, Zea mays
  Clone ID: MRT4577_31095C.1.pep
SHPIFSDPDATNKPLLKMLVNVLVSCHFQDAGGKQFFRWLPFISRVLSRSFNLYHTLVYPIPTGSSYKLGANGEKDWLGLVW

SEQ ID NO: 293872 - protein, 118 aa, Zea mays
  Clone ID: MRT4577_31096C.1.pep
MEAHASRGRRTLEEIRQKRAAERMQHALPIAASHVDSHGNQRAGAELLARVQELENGNTELIDEKGVEKDALVNRLNDLERNVVPSLQKNLNDISLEKDAAVVAKEDALAQLRSMKKR

SEQ ID NO: 293873 - protein, 82 aa, Zea mays
  Clone ID: MRT4577_31097C.1.pep
MDKLKTVSQTYQNGHREFSLKGQLIKEQSRSESLLAEIMKLSAELRKAVQAQNNLVRLYRPVLRDIESNLMKMKQETYATIQ

SEQ ID NO: 293874 - protein, 73 aa, Zea mays
  Clone ID: MRT4577_31098C.1.pep
ELALCFCQPNRRFRCMFQHTISHPSQGHQISYRHISALAHHPTNNNHVRPPLLRLLTRQLILHQVLQASQLSI

SEQ ID NO: 293875 - protein, 442 aa, Zea mays
  Clone ID: MRT4577_31099C.1.pep
MEAHASRGRRTLEEIRQKRAAERMQHAVPIAASNVDSHGNQRAGAELLARVQELENGNTELERENKMILSKIAEKEVEKDALVNRLNDLERNVVPSLKKTLNDISLEKDAAVVAKEDALAQLRSMKKRLKEAEEEQYRAEEDSASLRAQLNTLQQQMDHTYSGYTMGTSSEESVAMEKEIQDLQAQLKQESLLRQQEQQKLAEQSQLRQQEQEKLAKEQTRIASLEAEKQQLEDQITMLTKKATEDASEFAARKAFSMQDREKLEQQLHDMALMIERLEGSRQKLLMEIDSQSSEIEKLFDENSALSASYQEAIDVTVQWENQQVRDCLKQNEELRSHLEKLRLEQVSLLKVSNIATQSDGQTENSISNPPQMVIENISLKDQLVKEQSRSEGLSAEIMKLSAELRKAVHAQNNLARLYRPVLRDIESNLMKMKQETYATIQ

SEQ ID NO: 293876 - protein, 56 aa, Zea mays
  Clone ID: MRT4577_3109C.1.pep
RASYYLRLYLLELTPPTHRVHFVIWSQRTYNKLEAVYGCLNSPSKKNKGPFLPWTT

SEQ ID NO: 293877 - protein, 359 aa, Zea mays
  unsure (1)..(359): unsure at all Xaa locations
  Clone ID: MRT4577_310C.1.pep
MRECISIHIGQAGIQVGNACWELYCLEHGIQPDGQMPGDKTVGGGDDAFNTFFSETGAGKHVPRAVFVDLEPTVIDEVRTGAYRQLFHPEQLISGKEDAANNFARGHYTIGKEIVDLCLDRIRKLSDNCTGLQGFLVFNAVGGGTGSGLGSLLLERLSVDYGKKSKLGFTVYPSPQVSTSVVEPYNSVLSTHSLLEHTDVSILLDNEAIYDICRRSLDIERPTYTNLNRLVSQVISSLTASLRFDGALNVDVNEFQTNLVPYPRIHFMLSSYAPVISAEKAYHEQLSVAEITNSAFEPSSMMAKCDPRHGKYMACCLMYRGDVVPKDVNAAVATIKTKRTIQXVDWCPXWLQCGINYQP

SEQ ID NO: 293878 - protein, 161 aa, Zea mays
  Clone ID: MRT4577_31100C.1.pep
RTISWSRACTSTSRCVTFVGRPTRRSQQGATALPATPGRARGSPIPSTPQTGPGRPRSRTTATRWSSHGKASKSRRHPRSPATLVLLTMFRSSACGVLTASAAATVLSTASPMFGVSRRVRRSLKDATGGFRSQMLQLVPVSSCCGKIGCCFKLVFKRLDS

SEQ ID NO: 293879 - protein, 137 aa, Zea mays
  unsure (1)..(137): unsure at all Xaa locations
  Clone ID: MRT4577_31101C.1.pep
SAAATQSVGADRKLAIFDKILSDSHDAGSXIRNDLCPAGNAEDIKNNLNGLDKALTAVLGLRTIEPTQLLVRIGKSNCPTHRDEXNERLTKPEQLXVRLSDLLIQECWDNAAPTLKTYLSCLSYTSCEAIFLKVQPN

SEQ ID NO: 293880 - protein, 74 aa, Zea mays
  Clone ID: MRT4577_31102C.1.pep
LADDDWRAHAITRIISLQDYGCINSALNRLTQISKNLEPDKLGHQYIRLLSPPTPDSLISDLLNHIANNMNQMA

SEQ ID NO: 293881 - protein, 66 aa, Zea mays
  Clone ID: MRT4577_31103C.1.pep
RWGRTSTCSRCQQPTSNQQSPTDINGADECYVLQYLLGLICLPSYADGPRHLGTSNDHHWDDSTQD

SEQ ID NO: 293882 - protein, 103 aa, Zea mays
  Clone ID: MRT4577_31104C.1.pep
LLSWPMAFEQSHHCLAHPPRRWSPLSLSLPVLCWPPRPWSRPQLGLLPMPLGRPSPCCRSPMARPWSLLLARLRSASSSSSPSPSLSAPWSSPGRDLALLPVA

SEQ ID NO: 293883 - protein, 45 aa, Zea mays
  Clone ID: MRT4577_31105C.1.pep
LFAFLSVSLHVIFYPFCELCFFFFLFLPVTFSFLLSIFSFLHFFY

SEQ ID NO: 293884 - protein, 70 aa, Zea mays
  Clone ID: MRT4577_31106C.1.pep
NRKGPPPFYDIVKGMPSSFFFKVCNVQNFPAPLGTKKEGYWDFFLELVKKTLLTPPPVFRFKVFYIDFPC

SEQ ID NO: 293885 - protein, 39 aa, Zea mays
  Clone ID: MRT4577_31107C.1.pep
STPWLSLITARYYAFLILLTDPFSTLPRPRSALLHRQLH

SEQ ID NO: 293886 - protein, 99 aa, Zea mays
  unsure (1)..(99): unsure at all Xaa locations
  Clone ID: MRT4577_31108C.1.pep
MLCYMLKQIELEAIEIKNGSERLKXVKTLKIFTKDELGKITMNNSLSLGNAXFGEVHKGNLPDKTEVAVKASNEVTQGTLDKFVEEVEIQSKVMQTTSS

SEQ ID NO: 293887 - protein, 38 aa, Zea mays
  Clone ID: MRT4577_31109C.1.pep
PRGTARGSWWRRAGRGTRRRGRRLPAPPLRTSRACCCR

SEQ ID NO: 293888 - protein, 244 aa, Zea mays
  Clone ID: MRT4577_3110C.1.pep
WSFTPGSPDLLYGKRKLREVYALRGGGFEGRASVPMLWDAERCEVVCNESIEIVKFLCDLAGDGAGDLDLWPPELRQDIDRWYSIIYPSVNNGVYRCGFAQSQEAYDAAASELFGALDRLEAHLAGCRYLCGDRLTLADVCLFTTLIRFDLVYNTLFRCTRRKLAEYPSLHAYTRDIYQMPKVAETCDMEAIMAGYFKTLFPLNPGGIQPHPPATCDRESLLRPHGREALSSAAGTPLEAAAVS

SEQ ID NO: 293889 - protein, 70 aa, Zea mays
  unsure (1)..(70): unsure at all Xaa locations
  Clone ID: MRT4577_31110C.1.pep
SNIRYLCKKKKKKKKKKKKKKKKKKKKKKKKKKKKKKKKKKKKKRKXKKHKNDKNKVTKIKYRNTKFKKN

SEQ ID NO: 293890 - protein, 40 aa, Zea mays
  Clone ID: MRT4577_31111C.1.pep
ACNIDRASEVTVTRLVVFFVQTQRKQWKKKSTMRVSVPIV

SEQ ID NO: 293891 - protein, 92 aa, Zea mays
  Clone ID: MRT4577_31112C.1.pep
LGRFGSIKMRVCLTMLPQTFTQFCCPSMMRPCYGVLAGLLLLGRFSCSLIFGFLFPWVLSWHLCTGSFLDLFSYLLNILKRGSPTCSRKKNQ

SEQ ID NO: 293892 - protein, 228 aa, Zea mays
  unsure (1)..(228): unsure at all Xaa locations
  Clone ID: MRT4577_31113C.1.pep
EVCGSAKTSRRXKKALKDYLLYGKSLPHLQDGSTGSFANSHAIPRFKTFRKGPQTHWSSNSWQGVHNHRKNKKDKERFCNFFHDDHHVHPDDIFEAVFGAHYGFTWSQISWEGFHFRDKSFRFRWSGRESRRERIPCDSEDEESADESRETASVGSHAHRVILGLQPCGPLTLEDVKTAXGHLRCGGTLTGTRGHHRCVSKQIQAMAEEKFKLCVNAYNSLCSVLKAA

SEQ ID NO: 293893 - protein, 75 aa, Zea mays
  Clone ID: MRT4577_31114C.1.pep
LECQILEASTLRTQHILLSCVFSRNIWWQVWCKVGLHYLAPGPENMIFQDWWSNAEGQVFKEKRKGFNTLVILVA

SEQ ID NO: 293894 - protein, 125 aa, Zea mays
  Clone ID: MRT4577_31115C.1.pep
MSSELEKNFAVMFPACSIAAKLHIVLSTTILDVHREGMLHFRKAARVLIGMLLKIDGDHFPETLCRMCMINAGQGFLILWGTAKSFLDPKTTAKIHAVGNKHQSKLLDVIDASVPPEIPGGTCRC

SEQ ID NO: 293895 - protein, 109 aa, Zea mays
  Clone ID: MRT4577_31116C.1.pep
FNIHSICTMKTTYHISIFVHGSSRLLRTFHLRILKILHKRLRSKTLFPEAGDDDLLTGCGCGCIGFTCSNSAAARDESLPAVAPTRGGGRRRRRRVDGISSPVRRNGNA

SEQ ID NO: 293896 - protein, 64 aa, Zea mays
  unsure (1)..(64): unsure at all Xaa locations
  Clone ID: MRT4577_31118C.1.pep
DSXVPHRTLSGAPATSAGRWVLTVGALTGGASGLSGGAPDRSCRLSGAPSARARVLCVVTTASR

SEQ ID NO: 293897 - protein, 118 aa, Zea mays
  Clone ID: MRT4577_31119C.1.pep
HNGFPYNQSIQQDLLYCARLGLVLNSPSDFYFVAHHRAEQKSDPFLRCRRRGSSSASDRGQEMDAVVSVAGVVGVAVRGSGRRSQHEQDQGEDDGGDAAFRRMEPRLVVLCACSSVLS

SEQ ID NO: 293898 - protein, 409 aa, Zea mays
  unsure (1)..(409): unsure at all Xaa locations
  Clone ID: MRT4577_3111C.1.pep
MWATSPPPLPVQLRRPPHPRFIARRRNKRLDRIAASQDPLTALTRVLWGGALPPAQLVVAVRHGWTTAWQLLMRQLAPSDPATGGFARAPARFPAVVGKPSSRLHLYVGLPCPWAHRALVVRALLGLEARLPVSVAVPGDDGAWSFTPGSPDLLCGKRKLREVYALRGGGFEGRASVPMLWDAERCEVVCNESIEIVKFLCDLAGDGAGDLDLWPPELRQDIDRWYSIIYPSVNNGVYRXQIVNCSNWILWSSLLVAFKLSTAATDNYVILXKLSIPRCGFAQSQEAYDAAASELFGALDRLEAHLAGCRYLCGDRLTLADVCLFTTLIRFDLVYNTLFRCTMRKLAEYPSLHAYTRDIYQMPKVAETCDMEAIMAGYFKTLFPLNPGGIQPHPPATCDRESLLRPHGR

SEQ ID NO: 293899 - protein, 61 aa, Zea mays
  Clone ID: MRT4577_31120C.1.pep
AVFDYIPRHRSVQPSLFRRQSSGKENLALERNPVPINATHREALLLQPTDKRAAVARHEIP

SEQ ID NO: 293900 - protein, 144 aa, Zea mays
  unsure (1)..(144): unsure at all Xaa locations
  Clone ID: MRT4577_31121C.1.pep
LVSMDRLDMMDNINCRRVMTNKTRIEAQSSSSVDRDREKEEDEAQQDEVAEAMKAPLLGWNHNHHEAAGGIGNNRRRLLSKQLSMKETTREAKWEKRRRQILRRSSMVSLNDGXSGSSKSIIDERHYCHHVMRSSSECVMRRPD

SEQ ID NO: 293901 - protein, 103 aa, Zea mays
  Clone ID: MRT4577_31122C.1.pep
AVRTPPVPGYCARSSTAVHKHDGKASRVPTLLLVNSMNNETLQDHGIVRFDVSVRGVRGGIHMHNDSTRKARKTASARSFCLYATQAPLPRQRGCTDIHTNTL

SEQ ID NO: 293902 - protein, 128 aa, Zea mays
  unsure (1)..(128): unsure at all Xaa locations
  Clone ID: MRT4577_31123C.1.pep
QDSLQASHLAQGGSSDIRERLLKAVAALAGSNVNGTLCFSHEGYSATTVTGRIFCLKXXLHGFHVHALGNTCNGCIATGPLFNPAGDDHCTLXDLDRHAGYHWNWTALEETLEYDDMTVNLISHARPY

SEQ ID NO: 293903 - protein, 378 aa, Zea mays
  Clone ID: MRT4577_31124C.1.pep
MAVEKKVVNPTLAGFYEAMEKTNTEKITNEILAGLSEDSGDSESFDLESGNEDAEDRPWRPSHTMFGKSTIKQSRIDAMKGRYFRDISIVRAAGDSTAPAPEVDEVVVYRSFMKAGLQFSLSKFLVEVLKTFEIYLHQITPEAIIRMGIFIWAMRSQGLEPSAKCFCNMHELFYETKATGKEQYHNNFGCYGFVPRSDVSYPVPTFRKRWPGAWMEEWFYVKNNLVEREDIKGIIQCTIWCRFGISMPATALGNEIEACQKAFNSLCTFIGTRDLVQEHIAYRGKKRKAIASAISATPKGKKIKNLTHRPRYIETTSVPKLTEGPSSAVEPELPAPAEATTGSAEELILKTAAEQTEAEIADVLNCPAEAKAKTTEKP

SEQ ID NO: 293904 - protein, 377 aa, Zea mays
  Clone ID: MRT4577_31125C.1.pep
MADAEDIQPLVCDNGTGMVKAGFAGDDAPRAVFPSIVGRPRHTGVMVGMGQKDAYVGDEAQSKRGILTLKYPIEHGIVSNWDDMEKIWHHTFYNELRVAPEEHPVLLTEAPLNPKANREKMTQIMFETFSVPAMYVAIQAVLSLYASGRTTGIVLDSGDGVSHTVPIYEGYALPHAILRLDLAGRDLTDSLMKILTERGYSFTTTAEREIVRDIKEKLAYVALDYEQELETAKSSSSVEKSYELPDGQVITIGAERFRCPEVLFQPSFIGMEAPGIHETTYNSIMKCDVDIRKDLYGNIVLSGGSTMFPGIADRMSKEITALAPSSMKIKVVAPPERKYSVWIGGSILASLSTFQQMWISRAEYEESGPAIVHRKCF

SEQ ID NO: 293905 - protein, 100 aa, Zea mays
  Clone ID: MRT4577_31127C.1.pep
PTRPLHLRVSGQPLRYISPDYPVGHRTVQCAREQWLRNATVDSNGRLQREQCADSSRRVRAAPEGALDSEQYLSGAAPDCPVTQAVRAPTVKIVRTLTVG

SEQ ID NO: 293906 - protein, 224 aa, Zea mays
  Clone ID: MRT4577_31128C.1.pep
MADAEDIQPLVCDNGTGMVKAGFAGDDAPRAVFPSIVGRPRHTGVMVGMGQKDAYVGDEAQSKRGILTLKYPIEHGIVSNWDDMEKIWHHTFYNELRVAPEEHPVLLTEAPLNPKANREKMTQIMFETFSVPAMYVAIQAVLSLYASGRTTGIVLDSGDGVSHTVPIYEGYALPHAILRLDLAGRDLTDSLMKILTERGYSFTTTAEREIVRDIKEKLAYVALD

SEQ ID NO: 293907 - protein, 92 aa, Zea mays
  Clone ID: MRT4577_31129C.1.pep
LYAHHCDVADHPRYVGFEVQVPALQGGIQECVESRRTSKAQELPLNTPDNSPKSAQVLSRTPVPPARVFGTCPGRKDLRDFMMFEAFNNLAS

SEQ ID NO: 293908 - protein, 91 aa, Zea mays
  unsure (1)..(91): unsure at all Xaa locations
  Clone ID: MRT4577_3112C.1.pep
FTSIFLXNKLWIXSFKLSAHPHLILXKTFXLPTKKKKPTCNPHLLVYLIYRPLNYNQFFLFFKKKKKNXCLFSQKTQKKKKFGXFXGSKLT

SEQ ID NO: 293909 - protein, 251 aa, Zea mays
  unsure (1)..(251): unsure at all Xaa locations
  Clone ID: MRT4577_31130C.1.pep
MGGIEPDHEIKHSHEYRALTTYLSXKPQPLSNAQESFCKPTEESFMSSQSASEVETHLWRVWKAVVATATQTPHDSPAQQKLADFVLELRNRPTLERXGKVCKVWEAAVWKDLPILGPQMREAWNDAATDHSHHHARTAWINLNAFTATLVNTIHSRSITFPPDNDFSLYAIWTIRMALEDTDGQXKTDXTSLEAAAAWFAYAAPTLWKLSSEGXEFQGKIAKQGQAMXGKEWRGFSEXXVGSLKEDEGER

SEQ ID NO: 293910 - protein, 40 aa, Zea mays
  unsure (1)..(40): unsure at all Xaa locations
  Clone ID: MRT4577_31131C.1.pep
GFSLLXVXXXXRPPLGGAARALAACSAALRSLGSPAVQWR

SEQ ID NO: 293911 - protein, 48 aa, Zea mays
  Clone ID: MRT4577_31132C.1.pep
KIKRDARDKTNQHEQRERTGHLYIGTGRSRRKNTYMTIMITKDRRTNV

SEQ ID NO: 293912 - protein, 143 aa, Zea mays
  unsure (1)..(143): unsure at all Xaa locations
  Clone ID: MRT4577_31133C.1.pep
FWPPGVTHPGGLGPPLLGPPPGGPFSLAGFPFGKGPSPGGFCPKSLPPGVGPFXFKPLPSLVPPLFSGPCSPPYFCGLVPPLGSPPFPLLPPAPFPPGIAPXRISPRPPPPPPVRPGPPPPPVRKARAPPGPGTKKPGKTQET

SEQ ID NO: 293913 - protein, 46 aa, Zea mays
  unsure (1)..(46): unsure at all Xaa locations
  Clone ID: MRT4577_31134C.1.pep
RRFFAFCEGGEKEQEPQAXPTSGAFYMHDDRFQEENRGRRRCVWMA

SEQ ID NO: 293914 - protein, 109 aa, Zea mays
  Clone ID: MRT4577_31135C.1.pep
SGLDSHNERTHWHSKCHYKRNSGSPPQVRTTPLRGGRPAEQRKADEWCAVTRSSSGDDDAFCSEGPSSGNADLRLDAAARRPPPVPKLVRQGRAEGHRVGGQPVAGPGH

SEQ ID NO: 293915 - protein, 62 aa, Zea mays
  Clone ID: MRT4577_31136C.1.pep
CSSKTSPCIKITVSIATHGAMPLACQLSVVLHTHGQVHRHCSSYCFKRTGTLHCVSTKPQWS

SEQ ID NO: 293916 - protein, 59 aa, Zea mays
  Clone ID: MRT4577_31137C.1.pep
SLALSRWRAPPWASRSLVGLWSLLSVSRSRLFFYRFVLCVNVKKREKAPRLSRSSRGLG

SEQ ID NO: 293917 - protein, 45 aa, Zea mays
  Clone ID: MRT4577_31138C.1.pep
VGGGQDLISFTRKTVRTTGNTRLLQAEIVQIFLGRSHHHLTDYLK

SEQ ID NO: 293918 - protein, 124 aa, Zea mays
  Clone ID: MRT4577_31139C.1.pep
TQTRSTHYRMIQPSGSAVHTHSAKEDREIAVPLLFQRAACALPPRAEIVLHILFDEMANICSYNGCLWRQDQPWPSLPSNAQTLTWLQDTCPSPRRRTEAVTHCRSTQLRSTIMLISAHMQSAV

SEQ ID NO: 293919 - protein, 55 aa, Zea mays
  unsure (1)..(55): unsure at all Xaa locations
  Clone ID: MRT4577_3113C.1.pep
RGLNFFFXHNCKQRTNQHISGNTKSTAPNKESSKSDVRSPDRHEFRYVQLELQVR

SEQ ID NO: 293920 - protein, 46 aa, Zea mays
  unsure (1)..(46): unsure at all Xaa locations
  Clone ID: MRT4577_31140C.1.pep
RQITDSSVNCAQYHCQILRARHDPQRXRRSYASTRREDGILSLSSS

SEQ ID NO: 293921 - protein, 63 aa, Zea mays
  Clone ID: MRT4577_31141C.1.pep
VDVRKSGHGASFWVKSYVLWFRSGRQSLSFSQIYCPGTSDAPYLGCCKVSSRRPVIMCRTEFR

SEQ ID NO: 293922 - protein, 213 aa, Zea mays
  Clone ID: MRT4577_31142C.1.pep
MGGKDCGNHGEDDLRRSCRRLLAILLVLALIVGVIALIIYLVVRPTHPRFYLQDASLQQLDLSNSTSPSSSLLSTTLQVTLASRNPNERVGVYYDRLDVYASYKYQQVTVAAALPPVYQGHGDVDVWSPVLSGPGVPFAPYLADALRQDCQAGYLVLQVKVDGRVRWKVGSWISGHYHLFVTCPAFLVTAGGNGAPGASGFRFQTTTYCHVEV

SEQ ID NO: 293923 - protein, 66 aa, Zea mays
  Clone ID: MRT4577_31143C.1.pep
GNPRDFKQYRSDQQGNGSNDAGGGNQLLRLPKTGVQHRADRGDKHQLHLKGGRVGELQGGGPTQGT

SEQ ID NO: 293924 - protein, 96 aa, Zea mays
  Clone ID: MRT4577_31144C.1.pep
GIEIILLLLSLSSFHGGAAAGIVLVEMSVQPLFACLVLQLFGWPPLFVRCRGRTGIHHHIVRILLWMHKKILSSTALSPPPQGLLTNTMPKLMIKI

SEQ ID NO: 293925 - protein, 213 aa, Zea mays; identical to SEQ ID NO: 293922
  Clone ID: MRT4577_31145C.1.pep

SEQ ID NO: 293926 - protein, 218 aa, Zea mays
  Clone ID: MRT4577_31146C.1.pep
MGGKDCGNHGEDDLRRSCRRLLAILLVLALIVGVIALIIYLVVRPTHPRFYLQDASLQQLDLSNATTTTTTSASSSLLSTTLQVTLASRNPNERVGVYYDRLDVYASYKYQQVTVAAALPPVYQGHGDVDVWSPVLSGPGVPFAPYLADALRQDCQAGYLVLQVKVDGRVRWKVGSWISGHYHLFVTCPAFLVTAGGNGAPGASGFRFQTTTYCHVEV

SEQ ID NO: 293927 - protein, 77 aa, Zea mays
  Clone ID: MRT4577_31147C.1.pep
MGGKDCGNHGEDDLRRSCRRLLAILLVLALIVGVIALIIYLVVRPTHPRFYLQDASLQQRDHGPWLCCSSCCRCLVW

SEQ ID NO: 293928 - protein, 179 aa, Zea mays
  unsure (1)..(179): unsure at all Xaa locations
  Clone ID: MRT4577_31148C.1.pep
MGGKDCGNHGEDDLRRSCRRLLAILLVLALIVGVIALIIYLVVRPTHPRFYLQDASLQQLDLSNSTTTSSSLLSTTLQVTLASRNPNERVGVYYDRLDVYASYKYQQVTVAAALPAVYQGHGDVDVWSPVLSGGPGVPFAPYLADALXQDCQAGYLVXQVKVDGRVRWKVGSWISGHYH

SEQ ID NO: 293929 - protein, 64 aa, Zea mays
  Clone ID: MRT4577_31149C.1.pep
HFKHLQTSAGRASKMYVFAQLTTEGTYSRMDDADTKNVQWSELAALGERACARHSHSMVSYGTN

SEQ ID NO: 293930 - protein, 120 aa, Zea mays
  unsure (1)..(120): unsure at all Xaa locations
  Clone ID: MRT4577_3114C.1.pep
QPQPQHYFVEXHQHHQVDMXTQKHQHHHDVYVQQLHRQPENLQQLHQQLLQHHLCEGQQHHYQQSHGHVQHLEQCHVQHEGQSRELHHXQHFQGHDRHIQPQQPDAYHQGQEKSQQQHCH

SEQ ID NO: 293931 - protein, 68 aa, Zea mays
  Clone ID: MRT4577_31150C.1.pep
MAASAGGGAVRALSQKEQDIQMMLAADVHLGTKNCDFQMERYVFKRRTDGMFFPPASLPFCLSACESM

SEQ ID NO: 293932 - protein, 47 aa, Zea mays
  Clone ID: MRT4577_31151C.1.pep
RDYKFIPARLILNLYPHLLPATGSICYPNLLPAGLWYPWGTPAGTVI

SEQ ID NO: 293933 - protein, 52 aa, Zea mays
  unsure (1)..(52): unsure at all Xaa locations
  Clone ID: MRT4577_31152C.1.pep
HASVEGGPKLGRPXLXHSHGDMGGNPPSFTXRGGYSGTSKFRPYPTDALRSR

SEQ ID NO: 293934 - protein, 89 aa, Zea mays
  Clone ID: MRT4577_31153C.1.pep
SCPIDVQKWHPDKCSSFSISVKHMEEAKEKFQEIQGAYSVLSDANKRLLYDVGVYDDEDDEDSMQGMGDSIGEMTQMISQVRPMRQESF

SEQ ID NO: 293935 - protein, 51 aa, Zea mays
  Clone ID: MRT4577_31154C.1.pep
LRGLAEPMSLREFPRPWDACAPKVFTEYAHQTGGASFSSTYGFWKICVGPC

SEQ ID NO: 293936 - protein, 58 aa, Zea mays
  Clone ID: MRT4577_31155C.1.pep
WFGVMCGVGIGPPWMVVLVVLGIPPIIVLVRLRVPPNNSSCHLKVYPDFMRLSINYFD

SEQ ID NO: 293937 - protein, 76 aa, Zea mays
  Clone ID: MRT4577_31156C.1.pep
RRSRGASAIWMFELWIGESFACSPVRNVGLGVEVYPPALYMAAAGRTKRRLGANRRFKPKSQNAIRLSVALGFISS

SEQ ID NO: 293938 - protein, 210 aa, Zea mays
  Clone ID: MRT4577_31157C.1.pep
PRVRRVGGRVGGRVGGTAVRTLRDDLPDVFVRESNYDIYREDITFVDPLNTFHGIDNYKTIFWALRFHGRLLFREIGLDVSRIWQLTENSIVVRWELWGTPRVPWESYGCFSGTSRYKVDRNGKIYEHKVDNLALDFPRSVAKVGSIADMVVATPSPNLTFWNVVGTGDGCSWTKLYEAVLEAVEREEHSSTGIGVGALGPVGCGCGCSF

SEQ ID NO: 293939 - protein, 100 aa, Zea mays
  Clone ID: MRT4577_31158C.1.pep
VGERRGFSDPIFFFPRPLIFKRFPQRGDWALLNNVRPPPIFILIFGFSPFRAPPGRGLFSVFFSGQKIKGGPVFFLKKKKKKKKKKIIFFILEQIRIPFN

SEQ ID NO: 293940 - protein, 180 aa, Zea mays
  unsure (1)..(180): unsure at all Xaa locations
  Clone ID: MRT4577_31159C.1.pep
MPSDQLSRDENEHMXAKLADQAQTDYDRARFMDQXASTVDSEELTAYDRNLLSVAYNNVIGARRTSWRIISSIEQKEEGLSHDDRATLIKDYRGKIDTDLTNICDGILKLLETHLVPSSTAPESKGFYLXCMVHYYTYLAEFXTGPERKDAADNTMVVYYAAQDIALSAIAPTLPITVGL

SEQ ID NO: 293941 - protein, 45 aa, Zea mays
  Clone ID: MRT4577_3115C.1.pep
SIRRELVNAVLISLDDKGSPFESYARHGQASMSEVLEGYQRQFWE

SEQ ID NO: 293942 - protein, 288 aa, Zea mays
  Clone ID: MRT4577_31160C.1.pep
MAFLLPKLTTPSCKLPPSPLLKPQLAQPVHGGGKIQGSVFGSVAAQVAAPGHLSLLLLLSASQQAAAPAAKSTATKNRGKGGGDPQRSDFYLNLGTAVRTLRDDLPDVFVREPNYDIYREDITFVDPLNTFHGIDNYKTIFWALRFHGRLLFREIGLDVSRIWQLTENSIVVRWELWGTPRVPWESYGCFSGTSRYKVDRNGKIYEHRVDNLALDFPRSVARVGSIADMVVATPSPNLTFWNAVVTGDGCSWTKLYEAVVEAVEREEHSSTGIGPVGCSFGCGCGCSF

SEQ ID NO: 293943 - protein, 80 aa, Zea mays
  Clone ID: MRT4577_31161C.1.pep
SLSSRRPPFLFFVFFSMLFGFETNLCLFKAGKPSRTSWEIDNLPGDRTQAKDAATMFGKHGGDYVTSKWDRSVCLGDRLL

SEQ ID NO: 293944 - protein, 107 aa, Zea mays
  unsure (1)..(107): unsure at all Xaa locations
  Clone ID: MRT4577_31162C.1.pep
PASEVAXKDVVQVTELLMNELLRLDAVVADGDVKAQRRMQVKRVQKYVETLDAVAARNAATVRKSGAKPAPPAAPPQQQQARQTRWEMLDLLSLVPXTSLVLSTTTV

SEQ ID NO: 293945 - protein, 72 aa, Zea mays
  unsure (1)..(72): unsure at all Xaa locations
  Clone ID: MRT4577_31163C.1.pep
LFLPGRMSFISHMEEGVTHYISTTFYRSQAYCPVPKEIVTVSVDGSXLYKTPKLLPPPRLGFSGXVLFFLGP

SEQ ID NO: 293946 - protein, 72 aa, Zea mays
  Clone ID: MRT4577_31164C.1.pep
GGGCFFFFFFLDPHFCWILTYYGHPLHILGHDHFKHFLGHGPFNREVFSGDSPCQKYKFPVFTRLSFHFLWK

SEQ ID NO: 293947 - protein, 63 aa, Zea mays
  Clone ID: MRT4577_31165C.1.pep
AHVAECSRVTDMVSTMTGARRMGNHGANSHKVRSPRSKSVIRRLNALTSWAYQAVIFRLLAQG

SEQ ID NO: 293948 - protein, 80 aa, Zea mays
  Clone ID: MRT4577_31166C.1.pep
YFFFLNKCLIYLIYFQNVGHLNNYNTSRLLRQSTNNRCKEDTKTPSGGKQDKGEAKTGRAGQQTRKTTRNTPNSPRNRAP

SEQ ID NO: 293949 - protein, 59 aa, Zea mays
  Clone ID: MRT4577_31167C.1.pep
ARGLKGGFKHPGPPVGCASLRRVFLPLKVFTQFRGVCKFLINPRRGPPEILKFAGADKN

SEQ ID NO: 293950 - protein, 107 aa, Zea mays
  Clone ID: MRT4577_31168C.1.pep
PAGTSSRSPTSSRRPRAGAAEPKLRPAPKTEGKDRSAAQPAAANVDSEESRAEVVGGGSFHSINDGVLLTFYMSRAPTWSFIVRLARTPSSASICRSPNVASDCRKR

SEQ ID NO: 293951 - protein, 130 aa, Zea mays
  Clone ID: MRT4577_31169C.1.pep
ASWIVLSSFLRCAPKMSLFQEAIFVQAGLSSCSLIPSYTHPTPYIKLNKGGRHGRCTPPHPQLDEINKNMGSMYMEAAMAGRICLLASWIYVVLSSTTTSNQALGSSHSLISHLLNHLLKKQTKRATTCF

SEQ ID NO: 293952 - protein, 119 aa, Zea mays
  Clone ID: MRT4577_3116C.1.pep
QLFLLNGFLRRDVPGGLSSRRNGCSHPSHHRLSSVSLTCCRRRGICRRYRQGRQHPNPSPSTQSSSSCLVTAFPIIVVVTVAVSIRPPRISPTPPPPQLRRQLFDSRCFLRCQYSVRLD

SEQ ID NO: 293953 - protein, 134 aa, Zea mays
  Clone ID: MRT4577_31170C.1.pep
KKKKKKKKNKKKKKKKKKKLKKKKKKKKKKKKKKKKGKKKKKKKKGFSLPGGPFKGAIFANFLHPGGRWALLLGGPFPPLGGRFPIHGPCFYTVGPGKTLGFPTLFPLKHIPFFPVGVLAKGPAPFAFPKSCPP

SEQ ID NO: 293954 - protein, 210 aa, Zea mays
  Clone ID: MRT4577_31171C.1.pep
MTQGSDEGAGAAHPSWPSGADADTPVAPTAGAAAAMTLGSILTVSGILLLFVIFAFALASLQYCFESRRDRDRDARTGRPAGSSRGGMMRASRGGGVDPELLRSLPVTVYRAPPQGSDKGRQQGVVLECAVCLAELQDGEEARFLPRCGHGFHAECVDMCLASHTTCPLCRTTVTKPDASPPTPSLALPPVPPEPANYYATASLPATSVL

SEQ ID NO: 293955 - protein, 88 aa, Zea mays
  unsure (1)..(88): unsure at all Xaa locations
  Clone ID: MRT4577_31172C.1.pep
MSDDSDRQRQCRRGVTVDVELDAAMALADMAGVGPPGGDQHPPVQLAPPTTTTTTXEDEEELASTRLSLELGKVGIQAFPCSSSSSAG

SEQ ID NO: 293956 - protein, 65 aa, Zea mays
  Clone ID: MRT4577_31173C.1.pep
KKCLPPKQMWEKSPYIKFYFLGFERKKPCQILTGFDRERTVFVRNNFFPLKNRGGRAFFQKKRFG

SEQ ID NO: 293957 - protein, 356 aa, Zea mays
  unsure (1)..(356): unsure at all Xaa locations
  Clone ID: MRT4577_31174C.1.pep
ARPGSGKKKKKKNRRRWLLEAWLPCSQQQWLLXAFAAVATSVRAIGVCYGVLGSGLPSKSDVVQLYKSNGIASMRFYFADQDLLTALRGSGIALALDVGNGKVGELAADPASAASWVRDNVQAYYPDVDIRYVVVGNEVVPGAAPVLQAMQNVHAALASAGLAGSVKVSTAVKMDAVDDSSPPSRGVFRDPAAMSPIAQFLAANGAPLLANVYPYFAYEYSDGGIDLDYALFQPSPTTVTDPANGLVYTNLFDAMVDAVRAALDKAGAGGGVDVVVSETGWPSADGNGATVDNARTYNQNLIDHASKGTPRKPGPMEVYVFAMFNEDQKDGDPTEKKFGLFSPDKTPVYPINFAGN

SEQ ID NO: 293958 - protein, 49 aa, Zea mays
  Clone ID: MRT4577_31175C.1.pep
RTRGHEHNCWRCSLWRTLTIHFFSLERDLYHTKHMTLFAIRVYLNRTKR

SEQ ID NO: 293959 - protein, 97 aa, Zea mays
  Clone ID: MRT4577_31176C.1.pep
AYRLRVDPQIKGEDDSMSDNDDSGSVDEDEDASRSDDGSDGSQKLKFLENESSMTRRKEKNAHGSPNKCSEIDESYSGEKWLLALMEGEYSDLSIDE

SEQ ID NO: 293960 - protein, 76 aa, Zea mays
  Clone ID: MRT4577_31177C.1.pep
GIPGSTHSFGSRSPSHHYFTSHHTTVSIRSLAKYTKAFSTALNRALQLLAACADAFKPASRVFHANGLNTMQWHGH

SEQ ID NO: 293961 - protein, 240 aa, Zea mays
  Clone ID: MRT4577_31178C.1.pep
MTMKSSSGGHVIGVQVTSKAHGIEEVSRDDPSFSKGGDVDADHLAVSLTHPSPYASFGYKHTGSKGQVTHWVSKLSRRAQGFREHVTLGPKLSETVKGKLSLGARILQAGGVERVFRQAFSAADDDKGERLLKALQCYIYTTGGPIAGMLFVSTRKVAFRSDRPITVTSPGPRGGTARVTYKVAIPLRRIRRVRPSENVHRPEEKYIHVSTVDGFEFWFMGFVSYQRSCKYMQQAVSEMR

SEQ ID NO: 293962 - protein, 83 aa, Zea mays
  Clone ID: MRT4577_31179C.1.pep
ISCRSASSSMAFVFSAASLAFTVTCEDLNLLDKNSFKHISKSSMRVRTGLTVSSQAALKANDAVEITKVNSSISCRSTSSSMT

SEQ ID NO: 293963 - protein, 67 aa, Zea mays
  Clone ID: MRT4577_3117C.1.pep
GKVGPNRCSPFRKRVGLTGFNSRCGNFFWALPPYSAKHDCKFYFRAFARGPLSKGNPVVKATKLPKI

SEQ ID NO: 293964 - protein, 129 aa, Zea mays
  Clone ID: MRT4577_31180C.1.pep
RWLRMGDLEISGADRMVKRTAASRAGVTLNRCADPTSPGDGRHADLCDLYQCAATHGAAGTGTRMKNAKTAAAGTEMARHLTDDTEDAFAGLLELDDDDHAEGWRRALERAPGAPWGDAGLWNGRLEGL

SEQ ID NO: 293965 - protein, 112 aa, Zea mays
  Clone ID: MRT4577_31181C.1.pep
MAAPARRLLLLVVTVAGALALPVAAQIKEESFKEDPRSSIMFEKFGLTGRHETADINTFKWGVANRGASIRVGRDTEREGKGYFEDRRPASNMDPYVVTGMIAETTILWNGN

SEQ ID NO: 293966 - protein, 357 aa, Zea mays
  Clone ID: MRT4577_31182C.1.pep
MASLTDLVNLDLSDCTDRIIAEYIWIGGTGIDLRSKARTVKGPITDPIQLPKWNYDGSSTGQAPGEDSEVILYPQAIFKDPFRKGNHILVMCDCYTPQGEPIPTNKRYSAAKVFSHPDVAAEVPWYGIEQEYTLLQKDVSWPLGWPVGGYPGPQGPYYCAAGADKAFGRDVVDAHYKACLYAGINISGINGEVMPGQWEFQVGPSVGISAGDEIWVARYILERITEMAGIVLSLDPKPIKGDWNGAGAHTNYSTKSMREAGGYEVIKAAIDKLGKRHKEHIAAYGEGNERRLTGRHETADINTFKWGVANRGASIRVGRDTEREGKGYFEDRRPASNMDPYVVTGMIAETTILWNGN

SEQ ID NO: 293967 - protein, 357 aa, Zea mays
  Clone ID: MRT4577_31183C.1.pep
MASLTDLVNLDLSDCTDRIIAEYIWIGGTGIDLRSKARTVKGPITDPSQLPKWNYDGSSTGQAPGEDSEVILYPQAIFKDPFRKGNHILVMCDCYTPQGEPIPTNKRYSAAKVFSHPDVAAEVPWYGIEQEYTLLQKDVSWPLGWPVGGYPGPQGPYYCAAGADKAFGRDVVDAHYKACLYAGINISGINGEVMPGQWEFQVGPSVGISAGDEIWVARYILERITEMAGIVLSLDPKPIKGDWNGAGAHTNYSTKSMREAGGYEVIKAAIDKLGKRHKEHIAAYGEGNERRLTGRHETADINTFKWGVANRGASIRVGRDTEREGKGYFEDRRPASNMDPYVVTGMIAETTILWNGN

SEQ ID NO: 293968 - protein, 75 aa, Zea mays
  unsure (1)..(75): unsure at all Xaa locations
  Clone ID: MRT4577_31184C.1.pep
YLIFIRRLAWATSNESLXNAFASYCEILNSKVITDRKTARSRCFGFFTFSCDNSILDAIENMNCKDLDSRNITCN

SEQ ID NO: 293969 - protein, 85 aa, Zea mays
  Clone ID: MRT4577_31185C.1.pep
PFRMSAVDDARRNVYHDTRPCASYHHRHPHGQGGRREVWRVLCVRQLLLPSAIPVAGPGDVLILETSLKRDLPQGVLVILPALIV

SEQ ID NO: 293970 - protein, 65 aa, Zea mays
  Clone ID: MRT4577_31186C.1.pep
RYLRSWTHKCTAKVRAREILAGRGKLFYGPCWSDMSRVPTHLVFSCIGGFKAQSRQRAPTRQIGS

SEQ ID NO: 293971 - protein, 64 aa, Zea mays
  unsure (1)..(64): unsure at all Xaa locations
  Clone ID: MRT4577_31187C.1.pep
MLFMHHCRYEEIPNLTSGCTEFVESAQQILEXRKLNQTLLANHTTLLDLLEIPQLMDTYATFIL

SEQ ID NO: 293972 - protein, 222 aa, Zea mays
  unsure (1)..(222): unsure at all Xaa locations
  Clone ID: MRT4577_31188C.1.pep
KQAFAAXKGVTPLFFSFFLLVSSXFKPSTVHIFKVGFXXQHKGLRFALLSQGLTRLFCDRSFLFFPCXNFSPDIISSXFPXVLASSXXPRKWQSRXXSXXIXXRXXKEFWXXPAXXPSFHLVYDSRTARGLVRPRPRDWKGDXXREKKKNSRPSPRKAGRRKGXXTNEHLRAKGDRGGGGAAXRRGXHWAXXWXLGXFLSFSLXWISLPWLMVEHAPPPPGV

SEQ ID NO: 293973 - protein, 49 aa, Zea mays
  Clone ID: MRT4577_31189C.1.pep
AHRLWTREARRFSIITQRTVRILALLWHLCLIFLVLVAILDDGVKKRQG

SEQ ID NO: 293974 - protein, 48 aa, Zea mays
  Clone ID: MRT4577_3118C.1.pep
QLASSSRQLSNSCMYCSSRPYCSSQRTVATALASLKNSHVPLIVYQGL

SEQ ID NO: 293975 - protein, 154 aa, Zea mays
  unsure (1)..(154): unsure at all Xaa locations
  Clone ID: MRT4577_31190C.1.pep
PPPTQRSRRRGGAGGAPRNPPGDRAPTTERAEAKRRSXPXRRRAQXRXGKQKQPEGQKRRXAERGDXGQRQDGPXTXRSPGPPRKSEPQTXXRRXKAPAPQPKQRXRXAXRRGRGRGXPGPAXRPGGQAPPARPRPGXRRAPPPAAPPPARPAP

SEQ ID NO: 293976 - protein, 61 aa, Zea mays
  Clone ID: MRT4577_31191C.1.pep
TMRRTFPLYSAEVNVIADSIVDTEVVDRTSGLRGRHPTRPPKRPRTRGRTRGRTRGLTLWV

SEQ ID NO: 293977 - protein, 101 aa, Zea mays
  Clone ID: MRT4577_31192C.1.pep
MAAAAGAGGGAGGKVSFKIILTSDPKLPFKVFSVPEAAPFTAVLKYAAEEFKVPPQTSAIITNDGVGINPQQSAGNVFLKHGSELRLFPRDRVGAAVVPSY

SEQ ID NO: 293978 - protein, 497 aa, Zea mays
  Clone ID: MRT4577_31193C.1.pep
MGGGGGGGGGGKSEKARRSSARVRLWVARASTVLLWTCLVQLAAYRELWAPSVLSRWPGCLNQPHVARRPSERVADAGQTQAARALVVLPPKRIYRNNGYLMVSCNGGLNQMRAAICDMVTIARYLNVTLIVPELDKASFWADPSDFQDIFDVDYFIASLRDEVRILRQLPPRLKRRVEMGSLRSLPPVSWSDIGYYRRQILPLVKKYKVVHLNRTDARLANNGLPVEMQRLRCRVNYNALRFTPEIEDLGRRLVRALRRNGPFVVLHLRYEMDMLAFSGCTHGCSSMEAEELTKMRYAYPWWKEKVIDSDAKRKDGLCPLTPEETALVLQALGIDRGYQIYIAAGEIYGGQRRMAALTSAYPNVVRKETLLPWEVGLFQNHSSQMAALDYMVSLESDVFIPTYDGNMAKVVEGHRRYLGFRKTVLLDRRRIVELVDEYRNGTLSWTDFSSAVMASHTSRMGEPSRRQTVPDRPKEEDYFYANPHECLHQPEDVSAL

SEQ ID NO: 293979 - protein, 54 aa, Zea mays
  Clone ID: MRT4577_31194C.1.pep
PIKNPSPNITITRHQQVFSYIFLLTRAGFIPVRELYNFIFNSQFYSSVIINPYS

SEQ ID NO: 293980 - protein, 320 aa, Zea mays
  unsure (1)..(320): unsure at all Xaa locations
  Clone ID: MRT4577_31195C.1.pep
VNQFLRDVRELRXRGRKEKXHKEAQAVLAAAAAAIASSSRNSTVRKDAKEDAPKSSPKLAAGSSRVGQRTSLPQANDSSKSSNSKISSDKKSGSFHMPISSKENGLYCDVCMRTETLLNRIFVCSRCKAAVHIDARNLENSIGPWNCELCEDEDISSEATSTTVSDKSHCNGKLPFAQCGMCHGTSGAFRKTVDGKWVHAFCAEWLLDTKYVRGQDSPVEGMENLVEGKDTCCLCLCNVGMCLRCSSGDCNITFHPTCARSSGLYMNTKGFGTTSQHKAYCDKHSVEQKEADAQQYGPEELRSMKRMRYQMQELITHCHL

SEQ ID NO: 293981 - protein, 141 aa, Zea mays
  Clone ID: MRT4577_31196C.1.pep
MRGLSASRGHFAERVVRTPRPSTLYPPSRLRYSRRPPHWHCLTELLVIWYRNHNLVVVKQSSCLDSGAFVAAVPAAQKIESSSSRYLFRACDEGVVEPRPILSVGSRLVQTLDWIALVQIKVGSLVFRHGSCLTLLSRFFC

SEQ ID NO: 293982 - protein, 96 aa, Zea mays
  Clone ID: MRT4577_31197C.1.pep
LPFEPTSLGSWGSHFGPPPTPHNRPPLNPQTNPTPNYPGLSISPPKCRKIPNSARHSEAQALGPPPTGHLSKGRAFEPPGAGEQRPKTGTRSDGTW

SEQ ID NO: 293983 - protein, 152 aa, Zea mays
  Clone ID: MRT4577_31198C.1.pep
MAKITTMAAATAIALVLLPVGRGEEMPTAAHPHGLSFESPLALSPAAYDFFHPRARARRAHGVAPVPALASRGQEQLRESAVRGTSASIAKADLDEEAVAPVETHWRHNHKVTGVFVSAAAAALVAIGVAYAVVRRRVVAARGGAGAPKPNA

SEQ ID NO: 293984 - protein, 88 aa, Zea mays
  unsure (1)..(88): unsure at all Xaa locations
  Clone ID: MRT4577_31199C.1.pep
KNGXXEENXXXDXKKGEXTRGPXQGKPXAXXXXTDNXXXGXATGKTKPQKAXXRGAXKXKGSXXAAQKXTPDNXPKXAKXEKTRASNT

SEQ ID NO: 293985 - protein, 159 aa, Zea mays
  unsure (1)..(159): unsure at all Xaa locations
  Clone ID: MRT4577_3119C.1.pep
MATSDKKTRGYVPWNDEMDKVLLDTFVDYYNKGDRCQNGWKSHVYTACCEXVCEKCNVTITKENISSRSKTFDKHYNIINGLLSTSGFGWDWEKNKLKVDSDTVWDEYVERNKEAKGYRHKVVKFWDLLSLVYSKDQANGEGAKTAAESSKEMAKEYDT

SEQ ID NO: 293986 - protein, 189 aa, Zea mays
  unsure (1)..(189): unsure at all Xaa locations
  Clone ID: MRT4577_311C.1.pep
LAISGASDWLDGFLARKMGINSVFGSYLDPLADKVKLTLSRFISMLIGLLSXVQYLWCCLXLIGCVAVAMVEKDLLHPGLVGLVVVRDLLLVGGAFYKRASSLGWKWNSWSEFVNLDVIHREKVEPLFISKVNTVFQLMLVAAALLQPEFGTEETQNYIALLSWLVATTTITSTIGYGVKHYRIKPRSR

SEQ ID NO: 293987 - protein, 98 aa, Zea mays
  Clone ID: MRT4577_31200C.1.pep
PTYWPSFYRGFVPRPNVVVNRLSKYPTKSGSCSDTRLSSSNGGFTPAKAVAFAPSSGVPFPFAFFDGLFARSCVLNARSCVLPRNGLKTGFKKKNPNV

SEQ ID NO: 293988 - protein, 92 aa, Zea mays
  unsure (1)..(92): unsure at all Xaa locations
  Clone ID: MRT4577_31201C.1.pep
NPNQNILKWSYLFNLYLKLSPPXWKTPPPPWYCIRKKVCNYCCIQMLVYSDFRVQRYVYTTILHVHIGNDAKLKKKKKGRPPRLELADAGST

SEQ ID NO: 293989 - protein, 122 aa, Zea mays
  Clone ID: MRT4577_31202C.1.pep
ILTFVAGNMFEYVPPADAVLLKWILHDWKHEDCVKIMRRCKEAIPAKEAGGKVIIINMVVGYPVTQPNHSKEAQVLLDIYMMGSDGMEREENEWSLIFSEAGFSDYKITPTNGIRSIIEVYP

SEQ ID NO: 293990 - protein, 50 aa, Zea mays
  unsure (1)..(50): unsure at all Xaa locations
  Clone ID: MRT4577_31203C.1.pep
XXRQRRTHGVPDCGLQPSPRRRTMWLHARWLLTALLLLQHRVTERDVLHH

SEQ ID NO: 293991 - protein, 197 aa, Zea mays
  Clone ID: MRT4577_31204C.1.pep
RQRAKNYFFPSLSHHSQISRSLLPFISLNPAAHLAVLAFRRSLSRSGSFLFAVVLASPRPLSCKLLLGHPWLDSTPPAPPPGAGFAGCLSAPDPSGSRIRRKGTAFVGSPGPCRRVWRFGGEAGLWFSSCVGLARRCFVERGTAAGMRGGGHCARRGGVCPGGSGGFSGSSSLSGSCSSSFTTTKRSSSGRPSCKVA

SEQ ID NO: 293992 - protein, 117 aa, Zea mays
  unsure (1)..(117): unsure at all Xaa locations
  Clone ID: MRT4577_31205C.1.pep
THYFCSSGAKRPNGGGELLSSPCVCVCVCVSXVHAACTSLCCVYSDIEIENVFFQIKPKGDRSFCWYSSDPLLAPTSPPKKATGRLASVLVISLGLLRLFFGCVRSALVPSFGERPA

SEQ ID NO: 293993 - protein, 130 aa, Zea mays
  Clone ID: MRT4577_31206C.1.pep
GVCAPWGAHQPLFWRQKHGLAAFFGAPRQKGPAPFGQGIKVKNPLAGGSLLGRVLGQFNNGGLGLGFQTGFQKISPPGPGFPMGPPHVGFPFFAFLATKVNPIPSGFVWLPASRPADSKTPLLFKRGALL

SEQ ID NO: 293994 - protein, 48 aa, Zea mays
  Clone ID: MRT4577_31207C.1.pep
HQKPIHYPAFNNITTAKPILLPYVNTLLYTPVSTAEKTSPMALPISLP

SEQ ID NO: 293995 - protein, 187 aa, Zea mays
  Clone ID: MRT4577_31208C.1.pep
MTPPAAASPGRKSPAAVLFLCVVTISLLMFILLASYTPRLQPHGRSPHRRLKLHPKNSAAVASSYGAGAVHDSGGNRHAAPFDPAIAELERRLEDKEWEREHYRILHGDAEKDDHMKEWEEFLKEEEDFINDDDRFNVSDRIRALFPKIDLSPKDGFVSLDELIRWNLDQARSDQLHRSAREMELYD

SEQ ID NO: 293996 - protein, 61 aa, Zea mays
  Clone ID: MRT4577_31209C.1.pep
FPGKRAPPLHFYFPPEKRMNKRIGPTKNWTSPPLHIYGYLFTPALSLASPLSMGNMPTMGA

SEQ ID NO: 293997 - protein, 96 aa, Zea mays
  Clone ID: MRT4577_3120C.1.pep
QFKLNSRVTAGDERRNRLAGRGSPVNRPRQRYRGDKSGQRTWVPEVPRSARSGRQLDWSLPHCWWAICSFIAAWDHVSVEPGWVGVRWGESFAPTL

SEQ ID NO: 293998 - protein, 74 aa, Zea mays
  Clone ID: MRT4577_31210C.1.pep
HIQDRMHVCMRMHMRMQIIYMTVSTSDISRDIMTDGMSFIMNVIKKDFIHVCIHKYKLMMGSIICADEHVVEHV

SEQ ID NO: 293999 - protein, 87 aa, Zea mays
  Clone ID: MRT4577_31211C.1.pep
ANPLTKTRNFLVKLKKLAKFCSYWELIFFKNKKNFFFKKAWGEPKTSIFFPPLFFTQIFFLKCGPSVLLMWRVVGLSLPPNYLLYIF

SEQ ID NO: 294000 - protein, 94 aa, Zea mays
  Clone ID: MRT4577_31212C.1.pep
KSGLPPASRGEAPWNKEGLGGGGFKYLVGAWTPPVFENLALAGFFFNSPPPNKKNRGGVVRVSFPLGMAPPPPRGLLPPAGLGKTPGNPGPVFP

SEQ ID NO: 294001 - protein, 78 aa, Zea mays
  Clone ID: MRT4577_31213C.1.pep
YYGGGQARANFCQKKGRQHRAPPRKNKSRSQGRPQMAPLSNLNIINNPSTTQDFLCLFENPPSLHIWNRSLQGRNFAG

SEQ ID NO: 294002 - protein, 30 aa, Zea mays
  Clone ID: MRT4577_31214C.1.pep
SHHMPLGSREDFRGERYLENRTSVYRPKRD

SEQ ID NO: 294003 - protein, 413 aa, Zea mays
  Clone ID: MRT4577_31215C.1.pep
MRAAAASLVLVPRLALFVLLLSGSGVPTALSKSTLESCASSSACPALLSYTLYADLKLAELAALFAADPLAILAANAIDFAVPDPGDRILPAGLALRVPVPCACSDGIRKATSARYVARAGDTLASVAGSVYGGLTTADWIRDSNGMAEEEDAALDAGTTLFVPLHCACFGGADSGAPAVFLTYPVAEGDTVPAIARRFRTTGNDLMSVNDLATADVAAGDIIVVPLPACASSFPAFASDAGLAVANGTYAVTANRCVQCSCGPGNLDLFCVPAPLADSTCSSMQCSNSSMMLGNFTLLMTSAGCSVTSCSYGGYANGTILATLTTSLKPQCPGPHQFPPLMPPPTSSFFETYLGPSPTPMASEGGMGPQMAGMAPTSSPPVSSGPPTAGSHVGRPCTGRLSLPRRQPAVVDW

SEQ ID NO: 294004 - protein, 71 aa, Zea mays
  Clone ID: MRT4577_31216C.1.pep
MPPPTSSFFETYIGPSRPRMGSEGGMGPQMAGMAPTSSPPVSSGPPTAGSHVGSDALAQVAYLCLVASLLW

SEQ ID NO: 294005 - protein, 57 aa, Zea mays
  Clone ID: MRT4577_31217C.1.pep
VNQRGNKYCFLEAKKKKKKKKKKKKKKKKKKKKKKKKKKKKKKKKKKKKKKKRGRPL

SEQ ID NO: 294006 - protein, 169 aa, Zea mays
  Clone ID: MRT4577_31218C.1.pep
MRSKNFAVSIGQLISVAARPVNNGEASRVCTEFGQISYQFPDDIKLTMSAALHGPSVVPRKRKPTAGGCVGLELEIDEDSRIGAWIELNKKSSSRLLRWALTLSDTPEGDLGWGVSLRRGTEEKPQLFQVEGFLNLHLGKAAAVQPGIVFNVDGRRCRPGLVFHSSWSL

SEQ ID NO: 294007 - protein, 111 aa, Zea mays
  unsure (1)..(111): unsure at all Xaa locations
  Clone ID: MRT4577_31219C.1.pep
FCRITQFCAVVVLNSIFLLKLCKGISPPKKKIKKKKYLGGGGSKFFFRRHRYPRVWARAPCLHLPLPLQHPFSPLTAVTLWCIMLTNNIYAQQQTTSLXYPKPMLFYFSAN

SEQ ID NO: 294008 - protein, 36 aa, Zea mays
  Clone ID: MRT4577_3121C.1.pep
LLVGSLDNARVFSISIALSSYSNYLSLISECTNIDD

SEQ ID NO: 294009 - protein, 118 aa, Zea mays
  unsure (1)..(118): unsure at all Xaa locations
  Clone ID: MRT4577_31220C.1.pep
FLIPHTVXISARGKPSGRCCPVRPILSLKRTAATYPVAISHVSNRATCTQLIRHWRHPMSNRTAERIMYAHATDDRRCAAPPTATYTQPCSVSSAQSRPCTLPKKEELTLDPRQRSTE

SEQ ID NO: 294010 - protein, 76 aa, Zea mays
  unsure (1)..(76): unsure at all Xaa locations
  Clone ID: MRT4577_31221C.1.pep
KEGVPLGARKGFFFKPGFRAIWVGIFGGPXIQAEIIGGAXLETXWTKGVREAPNRLQKWEANKTRGPLLGGVRNAK

SEQ ID NO: 294011 - protein, 102 aa, Zea mays
  Clone ID: MRT4577_31222C.1.pep
KRGLKKGGPKKGPLRKRVQGILMNPPGGQPRQGLPNNRGPKRGPIKEKGALKGGLQKDMAPGHLFWQLNFPRETPEGFGGASGLDQGLPGGFFGAGIVRGGG

SEQ ID NO: 294012 - protein, 86 aa, Zea mays
  unsure (1)..(86): unsure at all Xaa locations
  Clone ID: MRT4577_31223C.1.pep
EFQGASNFQEWRPSSCQTXIHTXTYLTKXWNKXMPXPIKTPHGNQCASRPRHGRLYILQVHKGSTQTNKRLKLGIKFKGAKKPSMP

SEQ ID NO: 294013 - protein, 357 aa, Zea mays
  unsure (1)..(357): unsure at all Xaa locations
  Clone ID: MRT4577_31224C.1.pep
MVTLPPHTPLSNPNRNRLQPAPGSARSMAPPLARLILILLAAAVPLLAAPTAAVFPKEALPTKSGYLPIPPVNASLFFAFYEATDPVTPPASTPLLLWLRGGPGCSSLVGNFFELGPYFVNPDGETLSRNPFAWNRRFGLLFIDSPLGTGFSAAPSPADIPTNQSVIAAHILAALQSFYALDPALRARPFFLTGESYAGKYIPAAGAHILDANRALFFALRVNLRGVAIGNGLTHPVAQVATHADSAYFLGLLNARQKRELEALQSEAVSLTRAQRWAAASDARGRVLSWLQNTTGLATLYDYAKQRDYATAAVGAFLNRAEXKAALGARGDVAWEGCXHAVGAAMHADVMRNVLPQ

SEQ ID NO: 294014 - protein, 81 aa, Zea mays
  unsure (1)..(81): unsure at all Xaa locations
  Clone ID: MRT4577_31225C.1.pep
PGRLDCREEQYPCTRLXSIHRPSTQCLNEVCFYSLRRMRVIDEEIWVHTVCAQXELLRSELFRDKFSGCGVMASRRLCQYV

SEQ ID NO: 294015 - protein, 72 aa, Zea mays
  unsure (1)..(72): unsure at all Xaa locations
  Clone ID: MRT4577_31226C.1.pep
MGKTPMRMKAVVYSLYLFQQKVMPSLRKDITTKIHHMVTKNWISXTLLLTYVVRTYQYSIXYKEQEKLFNRY

SEQ ID NO: 294016 - protein, 59 aa, Zea mays
  Clone ID: MRT4577_31227C.1.pep
HAVPCDHGLHIAEPVLQRLWGRATGSAVAVTAAQRLYLEGLPCGELHPTAVPGLHHVPV

SEQ ID NO: 294017 - protein, 76 aa, Zea mays
  Clone ID: MRT4577_31228C.1.pep
PFIFFFQQTAQSSDSLIKRRVSTPSLTFERSFVAIQRLKHISYSQAPGSGRNKNEALRIDLGIARLQSRKGTLSQI

SEQ ID NO: 294018 - protein, 116 aa, Zea mays
  Clone ID: MRT4577_31229C.1.pep
YPMKYNSIFSGLNVLVKEEGPSSLWRGWGGKFFGYGVQGGCRFGLYEYFKKRYSDVLVDSNKSTIYFLSSASAQIIADVGLCPFESVKVRVQTQPMFAKGLVDGFPRVYATEGLSG

SEQ ID NO: 294019 - protein, 62 aa, Zea mays
  Clone ID: MRT4577_3122C.1.pep
CCSYTFFFLKEHRHTCLTPNCHGLSTRKFSAALVQWHCGIRQIKDYPRLYCWCLQILPGLHN

SEQ ID NO: 294020 - protein, 36 aa, Zea mays
  unsure (1)..(36): unsure at all Xaa locations
  Clone ID: MRT4577_31230C.1.pep
TCCLSPPMAEPXEGSWSCHLCLRHLKEKASAYITLT

SEQ ID NO: 294021 - protein, 36 aa, Zea mays
  unsure (1)..(36): unsure at all Xaa locations
  Clone ID: MRT4577_31231C.1.pep
SHHLTEDHAXXSSNNSRXXGTXXXVACTFFFYFYYL

SEQ ID NO: 294022 - protein, 123 aa, Zea mays
  unsure (1)..(123): unsure at all Xaa locations
  Clone ID: MRT4577_31232C.1.pep
GDSHHQQFLPFNQLTAXTLDLYLRQHQLPYILLSADYPQHFLTCQHTXGLNSTAYLQQQQLLPFRQLXGVSPTAFLSQPHLVSNYQHAGPNAXALLLPNTVVSLNQLGLADPTAFCLQPLVDG

SEQ ID NO: 294023 - protein, 116 aa, Zea mays
  Clone ID: MRT4577_31233C.1.pep
SSGDTCPHSDDVAEKPATERAGATAGRRFLVCQRGHNTRQWHPWPGSQSHGATHTTNGEAGMRTAAPNPIPGITRHYAPVKDSSSDRRRHLSLAAAESLSSPPMVRSVHRRAWLVE

SEQ ID NO: 294024 - protein, 118 aa, Zea mays
  unsure (1)..(118): unsure at all Xaa locations
  Clone ID: MRT4577_31234C.1.pep
GRGLAPGHVLVVGAHVVHPRGVCFRALSGEPVPVFLGGVGGEPYXLASGVFFSRCGGFPYLFPRAWGRARLGACPLFSLGFVVLFGAQQAKKKKKGPKKKKKGRPPSCALVDPGFFSG

SEQ ID NO: 294025 - protein, 185 aa, Zea mays
  unsure (1)..(185): unsure at all Xaa locations
  Clone ID: MRT4577_31235C.1.pep
MTNTRLYAXNLAPRTLSRDVDYVFTIYXGRILEVDWNRDYAFIEFDDPRDSDDDHYDLNGRLINVSRIITEFPKVDARGYAGSRDYMMNXPPPRTCHCFNCRMHAHCAXRDCKDDDCSNKRYRYSESCHIERNXCHNSPRNLXRPYKSYSRSPSPRDGRDRSSQLQXSPDYIRSRSPSGSFMGGR

SEQ ID NO: 294026 - protein, 201 aa, Zea mays
  Clone ID: MRT4577_31236C.1.pep
MSDLKASVVETQNGFHVEGYEKIEYDFTFLDGVFNPANNNLAKCYERWGRCLAVMDLNIFNIYGDEMQKYFDHYNLPLTIHKTMIGEKAKSMETLLSIVDSMTDFGIIRKEPVLVVGGGLVTDVAGFACAAYRRNTNFIRIPTTVIGLIDASVSIKVAVNYGNYKNRLGAYHAPMHTFLDFSFLKTLPEGQLTCWTSTARS

SEQ ID NO: 294027 - protein, 78 aa, Zea mays
  Clone ID: MRT4577_31237C.1.pep
TIQGDRSSLTRCATIITLGCATMIYAMTTPTFGEGNGTILFFTTWTSTRASKPWCLVLVPLVPAILARKHTEVCFLFA

SEQ ID NO: 294028 - protein, 253 aa, Zea mays
  Clone ID: MRT4577_31238C.1.pep
MSDLKASVVETQNGFHVEGYEKIEYDFTFLDGVFNPANNNLAKCYERWGRCLAVMDLNIFNIYGDEMQKYFDHYNLPLTIHKTMIGEKAKSMETLLSIVDSMTDFGIIRKEPVLVVGGGLVTDVAGFACAAYRRNTNFIRIPTTVIGLIDASVSIKVAVNYGNYKNRLGAYHAPMHTFLDFSFLKTLPEGQVRNGFAELIKISTCAHKPTFDLLDKYCEKLITSRFGREGDDKEVLQAADEINRAGIHEMLKL

SEQ ID NO: 294029 - protein, 129 aa, Zea mays
  Clone ID: MRT4577_31239C.1.pep
PSTVAYVMYPLLSVSALSYIISDRAVMVGVSCLAVTSLCKCAWRITGFVGQCRSSMFLGRSCSRSLLKHRSAYPPRRGGRRGPGEPQPRLLRVVVLRYPVRPQLAARPEGPGSSVVQCHGQVDTPHQAE

SEQ ID NO: 294030 - protein, 180 aa, Zea mays
  Clone ID: MRT4577_3123C.1.pep
MSNLMSPCIFWSLLFLGLAASFQVVNSEQLHSKNSKATQGAVAHVSGKQDVIGTFQFSSSEESDWVNIVISMRGLLQYNLTEGFAFHIHEHPVVDNNCSSTLGHFHILNTKPSCTSQVPNYCQPGELSARHGNLPGLVDVFTERYNDNALELTGANSIIGRSIVIHGANMSRIACGCIES

SEQ ID NO: 294031 - protein, 107 aa, Zea mays
  unsure (1)..(107): unsure at all Xaa locations
  Clone ID: MRT4577_31240C.1.pep
SDFQFTLFEFFIFMLRKTQRNSNXYNXSLANVSRSRICSHNSFCCGRPNVHSIACEFXRSHFFYDGXHTSXEAHEHFSHLFFEPNSNGFHPINIXHLITYPVKTYMF

SEQ ID NO: 294032 - protein, 100 aa, Zea mays
  Clone ID: MRT4577_31241C.1.pep
MESGQPNCAAADKTQNSSVPPVEGAAGGGTSYGWVDGGLQASSLGNGAIDPTKIHSADLLHVWPMPSSAKVSQQEAPRPLEHVNLLAARNERESFQIALR

SEQ ID NO: 294033 - protein, 72 aa, Zea mays
  Clone ID: MRT4577_31242C.1.pep
EILIVEKTLESINHTHCTTWGISLLSARKVPCTSVTMGDLNVVYRTANNKTMAICTNAKGRTKGWLKELACF

SEQ ID NO: 294034 - protein, 82 aa, Zea mays
  Clone ID: MRT4577_31243C.1.pep
LPHELINTANLLNLSLALSGGSRITAEHCHANSYLKNDLLSLISDHDTSVTFPRNAYMTNTDDSCRIISYADDDRLCSRATK

SEQ ID NO: 294035 - protein, 31 aa, Zea mays
  Clone ID: MRT4577_31244C.1.pep
PNLGVEFYERERLILTNASTVLLNLSTYSIY

SEQ ID NO: 294036 - protein, 101 aa, Zea mays
  unsure (1)..(101): unsure at all Xaa locations
  Clone ID: MRT4577_31245C.1.pep
HKLKKLKQTGHSHLYRTPTRMASWSSPSSAAAASGARFGPFPSRAQRLVAYPSLARGTPASTLVLRPHPDGRGHXLLAHTGSSSSRRRXVRAEDEGLNIAN

SEQ ID NO: 294037 - protein, 72 aa, Zea mays
  unsure (1)..(72): unsure at all Xaa locations
  Clone ID: MRT4577_31246C.1.pep
TPKGDWVPRGRPGFFFYLLAQRSPSLVGVATTWRPSLPXYXRWPDHLRXLRRRRSPSIXNRIKRLXLQRDGX

SEQ ID NO: 294038 - protein, 126 aa, Zea mays
  unsure (1)..(126): unsure at all Xaa locations
  Clone ID: MRT4577_31247C.1.pep
ILMLRGWCKKGKSCISLHEREGLGSAKAGLLAPVGSGNHRGSEEGSQVQHKSDLKVPQFKGSEGSSKDEMYRNLIYAFGKDNQTSVNLAGKHSLLSTGVSQRMSVSIGDSLAEKPTAHAXELAQNL

SEQ ID NO: 294039 - protein, 52 aa, Zea mays
  Clone ID: MRT4577_31248C.1.pep
MHCFLVCNPLPPVYMSVQTLHVPAACIIRNTPWYSTQASTLTYVISLMLKER

SEQ ID NO: 294040 - protein, 31 aa, Zea mays
  Clone ID: MRT4577_31249C.1.pep
VDPMDYLLEIICALCIIFKYFLDISFLIRWI

SEQ ID NO: 294041 - protein, 171 aa, Zea mays
  unsure (1)..(171): unsure at all Xaa locations
  Clone ID: MRT4577_3124C.1.pep
PRGRPGTASIPLVQXCVFLVASPPAVRVTPRVSRRYSLTPMAAPPAASLVTRAALPPRLRPTTASPLGPAVLGPSSRRRYLRLRRSPSLAGTAAAAASSPSVPSSFPGPGPGIGDVLAVYHSTPRPPASPSCSETCGTRTRRIISWVYILVLVARSSIRAEQKCFHRIESH

SEQ ID NO: 294042 - protein, 203 aa, Zea mays
  Clone ID: MRT4577_31250C.1.pep
SRESDRMELELGLAPPNPHQPLAAAAEFVGLLSSSAGSCGNKRVLGDAFGAAKAATLPLFVCEDGDGGGGDRDRDGVVDHEQQSNNVPRKKRLVGWPPVKCARRRSCGGGYVKVKLEGVPIGRKVDVSIHGSYQELLRTLESMFPSGNQQDHAEDEVVVSHERRRRHPYVVTYEDGEGDWLLVGDDVPWEVFVKSVKRLKILA

SEQ ID NO: 294043 - protein, 185 aa, Zea mays
  unsure (1)..(185): unsure at all Xaa locations
  Clone ID: MRT4577_31251C.1.pep
MSSTDRSRKFESGWQKRKKKQRIEKLIQYXQGDMDMFVTKQSQVSSDNPTPDQGQATDNNIDIDPNRIDPLENNVEVEEALPNNTNTQIGNNSEDLNPSSDAGDSFQPDIFDPRYWDSLNIKQVDILAQNGPKRDLSIQKGPKDRFSRRFSSLFYNRILSNGESCDRDWLVYSKELDRAFCFSCK

SEQ ID NO: 294044 - protein, 103 aa, Zea mays
  Clone ID: MRT4577_31252C.1.pep
GPLPPPSVPCGRCERPGLRAGRFGPCPDVDAAVLGRGMLHWSLFASAGVVFDVEPFLWLLMVLARFSCRYASRLSGLSPRFRSGFFLGKIAAALARGFRRFVA

SEQ ID NO: 294045 - protein, 125 aa, Zea mays
  unsure (1)..(125): unsure at all Xaa locations
  Clone ID: MRT4577_31253C.1.pep
MATCCSISLPSSPWLLLLAVLIIGDAAAVMAVPPTRPLLRIAEPPTAPGTAAGPAGASRPGGGRGGRPPDRSVAGAEVILAGFAAAVMIIVFCYIRVTRRNSGGGGGGGVGXGREAAALVRILPS

SEQ ID NO: 294046 - protein, 35 aa, Zea mays
  Clone ID: MRT4577_31254C.1.pep
CTTLQVCIPFLFNKNTFFMEREAVILLSMGRWKQL

SEQ ID NO: 294047 - protein, 77 aa, Zea mays
  Clone ID: MRT4577_31255C.1.pep
HTTPKNEALAFLREKKTKVRLINFTLSTSLKTPFLQGIFILLRKNELIYLAEIEIPPKNDVPKLVLSNPIFLKEFLF

SEQ ID NO: 294048 - protein, 42 aa, Zea mays
  Clone ID: MRT4577_31256C.1.pep
LATFRKRIRYLPGDAGERHQPFKEGAIAYILNYTLCFLASCS

SEQ ID NO: 294049 - protein, 65 aa, Zea mays
  Clone ID: MRT4577_31257C.1.pep
HTGGMGPKLEQLGLGQVFLFPKELERVGKKFEGFGLGVELISLKPLQSIWGGQNLFNLIPFPQPI

SEQ ID NO: 294050 - protein, 117 aa, Zea mays
  Clone ID: MRT4577_31258C.1.pep
SLACLLFPASASRISQVRGCYGSGNLCARPLLQSICGRFASYVCLFPRSLKSLVERLPPLYVGAPINERIQFSFRDTWFLIWVVHLHWFFAGAGQELIGILWLGLFPCVRKWFLTAL

SEQ ID NO: 294051 - protein, 86 aa, Zea mays
  Clone ID: MRT4577_31259C.1.pep
QRLFCRPPHVWPRPFVWSPYGCEAAATFFASEKMPPGFHGEPSVGCAIILIVVWVLLHFRACILCSAGGFFPLSQKRLKTLSHPQS

SEQ ID NO: 294052 - protein, 246 aa, Zea mays
  Clone ID: MRT4577_3125C.1.pep
MAAPPAASLVTRAALPPRLRPTTASPLGPAVLGPSSRRRYLRLRRSPSLAGTAAAAASSPSVPSSSPGPGPGIGDALGDVEIYSAATGEPVLFRDLWDQDEGVSVVALLRHFGCPCCWELASVLRDTKERFDSAGVKLIAVGVGTPAKARILAERAYNLLGLYFGVGRTFFNPASAKVFSRFDSLKEAVKNYTIEATPDDRAGVLQQGGMFVFKGKELLYARKDEGTGDHAPLDDVLNICCKVPVT

SEQ ID NO: 294053 - protein, 74 aa, Zea mays
  Clone ID: MRT4577_31260C.1.pep
SQTKILSEKPMISRRRLPKKLGKKPTLPPPCKKGGPPRKRTKQTPPLSWIPHTSMRAPYGQRPGRKHPPRMVAL

SEQ ID NO: 294054 - protein, 131 aa, Zea mays
  Clone ID: MRT4577_31261C.1.pep
RKRGSRARRARDHRQLARSPIAMDPCAFVRVTVDQLLLKLPAVPRPSSSAGVYPSNSPCFCTLTLQDHPSSLSRTALLPLACASGPAAAAAHADPVVLSLDADAVRRLSARPAAELVVFVHAGPTGTTCGM

SEQ ID NO: 294055 - protein, 72 aa, Zea mays
  Clone ID: MRT4577_31262C.1.pep
APGCSLPLLRNPASPSSMFHQSLKKASTTYRKVLDSNIILDRERQRPDGFHFFTFYMDEEMRNPFNSMNTKE

SEQ ID NO: 294056 - protein, 83 aa, Zea mays
  Clone ID: MRT4577_31263C.1.pep
GGAHRCINSIWAGLLGQNITPGGQDLKDYSKKKKFLLKPFYLRNKGKSCHFFMKGHLPAENQRGSGRVGDSSLKVNSWPWGPI

SEQ ID NO: 294057 - protein, 37 aa, Zea mays
  Clone ID: MRT4577_31264C.1.pep
DTRIIRFSSLQRYSYLIQILHTLITDLDTSTVILRQC

SEQ ID NO: 294058 - protein, 52 aa, Zea mays
  unsure (1)..(52): unsure at all Xaa locations
  Clone ID: MRT4577_31265C.1.pep
GSQFDNLQSINTICEKKVNPDRSILRKHRGWAYYLYAFXQLSSPHLATQRLP

SEQ ID NO: 294059 - protein, 163 aa, Zea mays
  Clone ID: MRT4577_31266C.1.pep
MAESSHQHVMAGPASLDPRRAEAASKHVRALNTQFASWVQLQLQNHPAELWEDGLKDYISHASEIMEKFKDVVNWLRQNQAGSIVVSSPSSLKDDKSNLPAADDSKLLVQPSSDNKQKAPIMASSSSSFQNSSLPNLFSSPSQQKTPDYSGMFADKKNTSSDS

SEQ ID NO: 294060 - protein, 469 aa, Zea mays
  unsure (1)..(469): unsure at all Xaa locations
  Clone ID: MRT4577_31267C.1.pep
MTTRGAKRAATSDPAAPDLPSKRVMDGPSFDVHRAESSHQHVMAGPASLDPRRAEAASKHVRALNTQFASWVQLQLQNHPAELWEDGLKDYISHASEIMEKFKDVVNWLRQNQAGSIVVSSPSSLKDDKSNLPAADDSKLLVQPSSDNKQKAPIMASSSSSFQNSSLPNLFSSPSQQKTPDYSGMFAERTDSSXASFQIXTHIIGGKNDVGKPLLNALIYKGIKRILQKNTVASIFHTSDADSSKTIRFGGNKGIIGDTNTTSGDSSNPFQFDANNGFPTSNAPSIFSSVAQSFNQQRPPLFSMNQQSVLPGNQNTSEASADADEDAEPEKPSSPSVKKAEEKGVVVVHETKCKVYVKHDDATKGWKDIGVGQLSIRSKEGTEKASKESTPTIVIRNDVGKILLNALIYKGIKMNLQKNTVASIFHTSDAQSSESAGDTVVARTYLFRLKNVEEATKLSTAIKENAPSD

SEQ ID NO: 294061 - protein, 469 aa, Zea mays
  Clone ID: MRT4577_31268C.1.pep
MTTRGAKRAATSDPAAPDLPSKRVMDGPSFDVHRAESSHQHVMAGPASLDPRRAEAASKHVRALNTQFASWVQLQLQNHPAELWEDGLKDYISHASEIMEKFKDVVNWLRQNQAGSIVVSSPSSLKDDKSNLPAADDSKLLVQPSSDNKQKAPIMASSSSSFQNSSLPNLFSSPSQQKTPDYSGMFADKKNTSSDSSKPAFQFGGNNVIFGGKKDAPVDSSKPFQFGPNNGIFGDKKDTTSDSSKPFHFGANKGIFGDKNTTSGDSSNPFQFGANNGFPTSNAPSIFSSVAQSFNPQSPPLFSMNQQSVIPGNQNTSEASADADEDAEPEKPSSPSVKKAEEKGVVVVHETKCKVYVKHDDATKGWKDIGVGQLSIRSKEGTEKASKESTPTIVIRNDVGKILLNALIYKGIKMNLQKNTVASIFHTSDAQSSESAGDTVVARTYLFRLKNVEEATKLSTAIKENAPSD

SEQ ID NO: 294062 - protein, 115 aa, Zea mays
  Clone ID: MRT4577_31269C.1.pep
MNVRYERGDDFKKKAEKNLSGCAPIDSNDNDAADLFDPAVDASEVAKNCYQSCIRLSPDCLICVCKNIEGVAVPQNTSEAPKIATKSCHLRKVRTRYNCLCIFSCRIDAPNTACK

SEQ ID NO: 294063 - protein, 135 aa, Zea mays
  unsure (1)..(135): unsure at all Xaa locations
  Clone ID: MRT4577_3126C.1.pep
HHHHHLXYHHTQDKEPIPAGGPRGVPLXYTPATTTRAXGAAVYDSDKYTKEEKEHNHKQHLCQADSINASTLTLYKNHEANKDPXHPHRHKILEVGQGAAAIRSRSSPFHEHHKKKKDHXDALEAGGXKNHHFFG

SEQ ID NO: 294064 - protein, 50 aa, Zea mays
  Clone ID: MRT4577_31270C.1.pep
GWPPLTTCASDPIRPLLICSSLQHSTNNPSLVVPSFRFLMSYSSIIKFFV

SEQ ID NO: 294065 - protein, 42 aa, Zea mays
  Clone ID: MRT4577_31271C.1.pep
TLLISIEMISTIQLKISGLYIVVISSYATAASSARRMLLVNS

SEQ ID NO: 294066 - protein, 78 aa, Zea mays
  Clone ID: MRT4577_31272C.1.pep
WLYYYNYPGSLSIALKDQYNLLFIPKKKKNGLPLYIIQTYLHFLATSYLFYFVPYIQFTFQYFTTFLLLKPWPYSTYS

SEQ ID NO: 294067 - protein, 65 aa, Zea mays
  Clone ID: MRT4577_31273C.1.pep
SRPCTGRRCLSFLGLYKINFERGPPCEPEAPELVSGQTEGKPPGGQGDPGGLAEPLGPRGRAGRP

SEQ ID NO: 294068 - protein, 70 aa, Zea mays
  Clone ID: MRT4577_31274C.1.pep
KKKKKKKKKKKKKKKKKKKKKNFKKKKKKKKKENHKKKKKKKKGFFPGPAPPWGGFLGFSFPRGAVGASF

SEQ ID NO: 294069 - protein, 137 aa, Zea mays
  Clone ID: MRT4577_31275C.1.pep
PIQLFPHSFFLNLGGKLSPGKKANHPPGKGGRLEAGGGPSKRTSQTHVNLPRPTKPGGRANPPTLQWPNPQATFPFRPPWFLQTKPTTPPEPNRISTPHPLINPPNFLVTPFAGGKPSNFQKKSNLPFPPLIMGPTA

SEQ ID NO: 294070 - protein, 81 aa, Zea mays
  Clone ID: MRT4577_31276C.1.pep
LLLPILCMLRTVWWQHSVIQNCLYRSRRRSSGSLAKESRFRSPLPLLTNLYVLRTAHGATSEYLIIQFVVVSAQAGHGRVG

SEQ ID NO: 294071 - protein, 81 aa, Zea mays
  Clone ID: MRT4577_31277C.1.pep
MQNEEGKTVDLYVPRKCSATNRIITAKDHASVQINIGHLDANGLYDGHFTTFALSGFVRAQGDADSSLDRLWQKKKVDIKQ

SEQ ID NO: 294072 - protein, 73 aa, Zea mays
  Clone ID: MRT4577_31278C.1.pep
GPIFPGGPPVPPGPWINPVLLGVLGSARPFPFHSIYGWPVNYPGPQVKGYGQKRGGWVPGVSLPDVSLKVLTK

SEQ ID NO: 294073 - protein, 81 aa, Zea mays
  Clone ID: MRT4577_31279C.1.pep
MQNEEGKTVDLYVPRKCSATNRIITAKDHASVQINIGHLDANGLYDGHFTTFALSGFVRAQGDADSSLDRLRQKKKADIKQ

SEQ ID NO: 294074 - protein, 261 aa, Zea mays
  Clone ID: MRT4577_3127C.1.pep
MAAPPAASLVARAALPPRLRPTTASPLGPAVLGPSIRRRYLRLRRSLSLAGTAAAAASSPSVPSSSPGPGPGIGDALGDVEIYSAATGEPVLFRDMWDQDEGVSVVALLRHFGCPCCWELASVLRDTKERFDSAGVKLIAVGVGTPAKARILAERLPFPLEYLYADPDRKAYNLLGLYFGVGRTFFNPASAKVFSRFDSLKEAVKNYTIEATPDDRAGVLQQGGMFVFKGKELLYARKDEGTGDHAPLDDVLNICCKVPVT

SEQ ID NO: 294075 - protein, 98 aa, Zea mays
  Clone ID: MRT4577_31280C.1.pep
MQETATSSSPLPSLSNGYQPLPPLYLGFLAIWAASGFSWAFTTWRNRHYHQANNLQWILSLVPLIKALQMALSFLFWYSCVQLQTCSLWMSVGAYVAG

SEQ ID NO: 294076 - protein, 87 aa, Zea mays
  Clone ID: MRT4577_31281C.1.pep
SSCPFSSLFYSISNRESFTSLLFALFCLREKEIPIGPGPISLYHVCFQARVQRENESIDEAEDPPTRKEIESCIVPGHEVKECFPLG

SEQ ID NO: 294077 - protein, 133 aa, Zea mays
  Clone ID: MRT4577_31282C.1.pep
IMKLFSTMQGFVSVSGREESACNKMLPFTIWTAFFANVLTGSALVQFEIFLNPKELPSKLAVLVPAQASFFIAYVVTSWTSITSELTQITALFCHLGGKCAKCCKRDYSKAPSMPYYREIPRILLFGLIGLAY

SEQ ID NO: 294078 - protein, 102 aa, Zea mays
  Clone ID: MRT4577_31283C.1.pep
ISVLGLLTGGDFSSYSIRPRLFGAASVVPGGTQVSYSLNLASRFGILFLTKLKVVSPVRLFWAPGVFCFHVPPPVPRVLQSHVSMMSFLWSVAGISYKKTPV

SEQ ID NO: 294079 - protein, 80 aa, Zea mays
  Clone ID: MRT4577_31284C.1.pep
NTRFFITSLLMFACPMARSKGLTSHFTHLLLLGFQHSNIVRPRYISIPIPHYHIIFLPPFCHVIHPVIFLCCLLHVIILT

SEQ ID NO: 294080 - protein, 51 aa, Zea mays
  Clone ID: MRT4577_31285C.1.pep
WLPASDTYGDEQDQVCSVVKRPFTSAELRKVKSYMVDKEAVVAQEQSLFTE

SEQ ID NO: 294081 - protein, 94 aa, Zea mays
  Clone ID: MRT4577_31286C.1.pep
GHGGNNILPKKRWNVYNFYNREKVQKDQAPAVREEQLQREAEPPRESHLPLAALPRNRGPVHTETPSDSTSYPAGPVDTANALPFPADALSSPA

SEQ ID NO: 294082 - protein, 33 aa, Zea mays
  Clone ID: MRT4577_31287C.1.pep
LCSLWRWLSESYLDLSNVGAWSIPFYLLAFCHY

SEQ ID NO: 294083 - protein, 42 aa, Zea mays
  Clone ID: MRT4577_31288C.1.pep
LHLAASDHPSHLKMISLTYSRISSCSTQIDCIRERTLRSSTV

SEQ ID NO: 294084 - protein, 74 aa, Zea mays
  Clone ID: MRT4577_31289C.1.pep
YRPPLSWKSPLTSREPPRVPLFSSIAVWFYSQVRVWCNSFFLPPPPFFFFFKSCKSVTGNTEFKSITCRPSLSH

SEQ ID NO: 294085 - protein, 136 aa, Zea mays
  Clone ID: MRT4577_3128C.1.pep
MWARSSCATFTDARPGHNLARAASPTRRLLALASGDARHFLPDEMTKRTKKAGIVGKYGTRYGASLRKQIKKMEVSQHSKYFCEFCGKFAVKRKAVGIWGCKDCGKVKAGGAYTMNTASAVTVRSTIRRLREQTEA

SEQ ID NO: 294086 - protein, 98 aa, Zea mays
  unsure (1)..(98): unsure at all Xaa locations
  Clone ID: MRT4577_31290C.1.pep
HANXGQFVTLQQRKVANPVRARSLPIFSCPGPCTGTAILCSTHTPEGEAAGPWFFLEYLSKPALPFYCGVPGSSGGAQYAINPPLYRFAKLVPLFESH

SEQ ID NO: 294087 - protein, 657 aa, Zea mays
  unsure (1)..(657): unsure at all Xaa locations
  Clone ID: MRT4577_31291C.1.pep
GRFPHFGSEKLIVDSTPYVSDDCPPSVTFSMGKXQDAGNGSGSLSRLSGLGRAARRQLAATLDEFWGHLFDYHGKLTQEASTKKFGILLGIDLRTPSTSVRTDKQAAEILKSPLVRDSMRGAAFLSSSVDMMSPKNETSNLELAYGLQRGPGMGLSSWSQGMQLPNTQLQSSSNSLLEQSARLNSNFSSSYSDNNQFYQPATIHGYQLTSYLKQMNASPSLYSSMPLDPQRLPKSSVSAVPNYADSMMHARNHNLLASLGGTTTQLPATSRVGSMMPERSYYDPSSVDGNENAGSPAYSKKYHSSPDMSGIIAASRAALLNEAKLGAAIGPQSYLSRLAAERSQYASSTARPAAPLAFDELSPPKLQSDIFSAQSSMRPSARSLWAKQPFEQLFGMSSAELSKGDFNLPGRSGGVAKDDFSYKESETKLLQSLRLCIMKLLKLEGSGWLFKQNGGCDEDLIDRVAAAEKLLMQGTAENQLLLHGGDLQQHSSDQAGIQYMRTLPNCGEDCVWRASLVVSFGVWCVRRVLDMSLVESRPELWGKYTYVLNRLQGILDPAFSKPRGALTICTCLQKDTRVRNSPPHSGLTAMGPVPTPLRGAFTTAGVVLEMIKDVEAAVSGRKGRSGTAAGDVAFPKGKENLASVLKRYKRRLASKGQ

SEQ ID NO: 294088 - protein, 177 aa, Zea mays
  unsure (1)..(177): unsure at all Xaa locations
  Clone ID: MRT4577_31292C.1.pep
MAASVDAAAALAVTPPAVEEAGGAVEQARTLIGALNLLSRNLPLPPDVLRAVSSIYHDGGAGDDEEEEGGEREAEKEGNMEMTAAEEGYPVDVATKGSSLIEELEDAIYKNKKTPISYSELAALKEGRFNASIQHRLAELEGLPCTRGXEDLXMKCLLEXYGLKLLDLQKKVRSDIS

SEQ ID NO: 294089 - protein, 92 aa, Zea mays
  Clone ID: MRT4577_31293C.1.pep
VGKTYIEGPDHFGDNPSKQKTNPLWGGKNRVMNGQKKSGGWLRTETDLFCLVQTARLLSGSPTPCFQLMGLGVWEGAPRKDGLWPNGVRGFF

SEQ ID NO: 294090 - protein, 75 aa, Zea mays
  Clone ID: MRT4577_31294C.1.pep
HITTDLDHQHQRALILPLTNDNNRDLLFLPNPNLTEEFLSDTSDWSYVLIYKFSTDLDSATSYKLAGCCAYSTSE

SEQ ID NO: 294091 - protein, 72 aa, Zea mays
  Clone ID: MRT4577_31295C.1.pep
LSRRVFPVLCTWVSRGQHMQQIGAIIRILDPTTLSTNACFLPLNYRMAIWHRLPCCGLSFLRRPVPTSFSDL

SEQ ID NO: 294092 - protein, 64 aa, Zea mays
  Clone ID: MRT4577_31296C.1.pep
QRCLVECTTYSQQVAVILRYFMCGHGQAMRILLSNTWSDLTHIISSRVGGPAIGSSMSQASFEI

SEQ ID NO: 294093 - protein, 82 aa, Zea mays
  unsure (1)..(82): unsure at all Xaa locations
  Clone ID: MRT4577_31297C.1.pep
PQGKQVQNWARFSKAAFEWVPPPPPLFPPIQKFGLKVKNQPAGFVALFXNQTPAPAAIVASVDKDGGGAFLMHRPFLVCCCP

SEQ ID NO: 294094 - protein, 103 aa, Zea mays
  unsure (1)..(103): unsure at all Xaa locations
  Clone ID: MRT4577_31298C.1.pep
RPASSXLPAVPFPPASFXAGGWXXSVLKTKXWWRMGRRTCLXXECXAAAWQXPAQXRSDXXSGACFAGERGECQLRCFXSFTNRXXVCXXRKMGHQYXXVLIK

SEQ ID NO: 294095 - protein, 87 aa, Zea mays
  Clone ID: MRT4577_31299C.1.pep
VAKGLKVYKYLHHLGVPSQKLHPSLRDAGLTSSMAMYLEAVIGTKRCVMLEVCHAAAMERGWKQRAFLPASFPNLSPGTTVSSLWHR

SEQ ID NO: 294096 - protein, 157 aa, Zea mays
  unsure (1)..(157): unsure at all Xaa locations
  Clone ID: MRT4577_3129C.1.pep
VNCQKLKLPEGCGYEFQMQYGSIGWSVGALLGYAQGANHKRVIAFIGDGSFQVTAQDVLINNGGYTIEVEIHDGPYNVIKNWNYTGFVDAIHNGLGKCWTSKVKSEEELTAAIETALGEKKDCLCFIEVIAHKDDTSKELLEWGSRVXAANSRPPNP

SEQ ID NO: 294097 - protein, 451 aa, Zea mays
  Clone ID: MRT4577_312C.1.pep
MRECISIHIGQAGIQVGNACWELYYLEHGIQADGQMPGDKTIGGGDDAFNTFFSETGAGKHVPRAVFVDLEPTVIDEVRTGTYRQLFHPEQLISGKEDAANNFARGHYTIGKEIVDLCLDRIRKLADNCTGLQGFLVFNAVGGGTGSGLGSLLLERLSVDYGKKSKLGFTVYPSPQVSTSVVEPYNSVLSTHSLLEHTDVAVLLDNEAIYDICRRSLDIERPTYTNLNRLVSQVISSLTASLRFDGALNVDVNEFQTNLVPYPRIHFMLSSYAPVISAEKAYHEQLSVAEITNSAFEPSSMMAKCDPRHGKYMACCLMYRGDVVPKDVNAAVATIKTKRTIQFVDWCPTGFKCGINYQPPSVVPGGDLAKVQRAVCMISNSTSVVEVFSRIDHKFDLMYAKRAFVHWYVGEGMEEGEFSEAREDLAALEKDYEEVGAEFDEGEDGDEGDEY

SEQ ID NO: 294098 - protein, 39 aa, Zea mays
  Clone ID: MRT4577_31300C.1.pep
TPFPPRGGWEKKKKKKKKKKKKKKQKKKKKKKKKKKRAA

SEQ ID NO: 294099 - protein, 128 aa, Zea mays
  Clone ID: MRT4577_31301C.1.pep
PAVSGDGTPPRVRHAVPSRPRSFPSLKPIESTDARPDTPAPLSPVATASRAGRALSRHLAAAAPPQLAYHPTSHRRRRRRPAPNHKSRRTPLRSAAGRPPPPARLHLRIRSPAGSVQSGIAAGNKNFN

SEQ ID NO: 294100 - protein, 179 aa, Zea mays
  Clone ID: MRT4577_31302C.1.pep
GLASRRDDETIECGKELENDDGPSRGVRARPTDSLRAETSRRGGAERRQASQARDELRGRAARVQRTGKARAGLGHRRGNPKLRPAGHRAEVQRAQGDAPCRGDSAGSGKRSAGHGKGRTTGRDAGRSGRAGRATAVNNRGTTLGQGQATAGQRVGGSSRRARQGGKRVRGLRAEEQGE

SEQ ID NO: 294101 - protein, 71 aa, Zea mays
  Clone ID: MRT4577_31303C.1.pep
FMPISISFFLVLSTVVWIAYGALKKDVFVAFPNVLGFVFGLAQMALYMAYRKHAATLVIIPEQSKEEVNEG

SEQ ID NO: 294102 - protein, 130 aa, Zea mays
  Clone ID: MRT4577_31304C.1.pep
EKEREGQARFDLLRDRVGSDRQIQERGGTAVGLRQLLRPEGVLPVSLSAVAGTWALRKCRAKVPLRGAGPRPAAPGGAAARRRRLQARSPGDGEGRAGGSCWERARGRGRGAEPRRWLGEAALAGARESG

SEQ ID NO: 294103 - protein, 89 aa, Zea mays
  Clone ID: MRT4577_31305C.1.pep
VRIPVASHTSQTMNTKKNVVLCCLLFVLVLHADHALAKCGYTTPLIPFCKAWMCKAECWTEAKLTGGKVTQQKCMRGGIKGWCYCEFCI

SEQ ID NO: 294104 - protein, 83 aa, Zea mays
  Clone ID: MRT4577_31306C.1.pep
FLLLHLILYNTSKKKTPFSLQPQFIYLTKTTPFIYPKPYTGHTKHNNLIYKHKNTFTPPNTKKNTISHNILTHSTKYKALLTK

SEQ ID NO: 294105 - protein, 62 aa, Zea mays
  Clone ID: MRT4577_31307C.1.pep
MAATVGMAKVLLLLVFLIQIINVLTISAAARPLKAGAGIEMVVDMFGDKKQSGSNGSSHCCN

SEQ ID NO: 294106 - protein, 144 aa, Zea mays
  unsure (1)..(144): unsure at all Xaa locations
  Clone ID: MRT4577_31308C.1.pep
LASLGKRNLTTGMRWRLQPAPAPALLLVLATIAAVVGGGGGPHFFFYXXXXXXHXXNPNNXXTPPPPPXQXPXHXLKNKTXXNKKKQTNXXRGGGVLQIRGWLGGGAQISGPTVRRGRAVNREPSWPESKKGEPQGSLPASPGP

SEQ ID NO: 294107 - protein, 64 aa, Zea mays
  Clone ID: MRT4577_31309C.1.pep
GLVGKNQLLLTPNGVLYGQPEIRKGVLPRLLEEILSTRIIVKHAMTKLSPSQHVLHTIFNARQL

SEQ ID NO: 294108 - protein, 50 aa, Zea mays
  Clone ID: MRT4577_3130C.1.pep
TSFFFFFFFFFFFALKPKLFYDHAYIIGHTTHDKECRLTAFLHIYIYRGG

SEQ ID NO: 294109 - protein, 67 aa, Zea mays
  unsure (1)..(67): unsure at all Xaa locations
  Clone ID: MRT4577_31310C.1.pep
FKFVPCHIELIQKQGESSVTVLVYIKCHPMEXSVFSSSKRALTSPYCNKRHVHCCSTPRTLVIVRLV

SEQ ID NO: 294110 - protein, 79 aa, Zea mays
  Clone ID: MRT4577_31311C.1.pep
GLNLSFAYIDVSRGSVSYQTGPERFWQEYDDAKRMRSYYAVLMITWCMAMLDETAAATSLYVKRQQRLMTKETRKEGDL

SEQ ID NO: 294111 - protein, 65 aa, Zea mays
  Clone ID: MRT4577_31312C.1.pep
KMRAVQILGDVSSPQTVTTDSIPEPKPQGSEMLIQATPPESQATKSTGPSSTTPLHAFQGTRYPE

SEQ ID NO: 294112 - protein, 80 aa, Zea mays
  unsure (1)..(80): unsure at all Xaa locations
  Clone ID: MRT4577_31313C.1.pep
STKPKSPRNHAPQASSPKIFNTXTPXXSPITCVSHXKXTCQLSLFSXIHPPQQXXWNILYNKPXYREKAHSIYSSSXXSP

SEQ ID NO: 294113 - protein, 76 aa, Zea mays
  Clone ID: MRT4577_31314C.1.pep
SCNTEQPKALFVYIGLHPELFRLIKKKKKKKKKKKKKKKKKKKKKKKKKKKKKKKKKKKKKKKGGGPPIGIFFPRK

SEQ ID NO: 294114 - protein, 46 aa, Zea mays
  Clone ID: MRT4577_31315C.1.pep
ILLEKKNQHQQHGYGLTLFAAEEQRRLGVRRWLGCTVVTCARRWIG

SEQ ID NO: 294115 - protein, 49 aa, Zea mays
  Clone ID: MRT4577_31316C.1.pep
IFILDSCESCVGSQVYSLYGICRNSRLWTCCSYPADILSCCQETILRAQ

SEQ ID NO: 294116 - protein, 58 aa, Zea mays
  Clone ID: MRT4577_31317C.1.pep
EYPPPKACSSNTQEGLLAFISSHNKGCKMECSLFYKCFGEFLLGGIQNILEPWLKNFG

SEQ ID NO: 294117 - protein, 375 aa, Zea mays
  unsure (1)..(375): unsure at all Xaa locations
  Clone ID: MRT4577_31318C.1.pep
RTRGLRELEALTNEIDEESQIVGEVLRIKELLLHKXEDHSDATLFDSLRRLQLMQLSVSTLKATEIGRAVNRLRKHNSRKIRHLVCTLIEGWKVLVDEWVSTTNAALTENSPGSSNPSVVDEEEEGLPSPPLDEGAFFATQTTSIQLSEFFDEMDEDGNLRHSNDPSLGNKRGNNGGRLASHSTVARQDPPRSYPGVVERVQPRRLELARQEPPMRQANPQTLQSSSLQAKPHGALNKQSNNPSSYESGPGRPVKAAQQRPFGDMKPKQTREHVAIERKPMASQTDKSRPGARPSAGAKLELAKPKVYDDGLDNNRKLEAAKRRLQERYQEAENAKRQRTIQVMELGDIPKPKNQNRQPVVKSRNSLRNWANGRR

SEQ ID NO: 294118 - protein, 42 aa, Zea mays
  unsure (1)..(42): unsure at all Xaa locations
  Clone ID: MRT4577_31319C.1.pep
VVNFIALFHLLSLXRVLCIIPTCVVCCDQXIIQSLPEGNPYC

SEQ ID NO: 294119 - protein, 59 aa, Zea mays
  unsure (1)..(59): unsure at all Xaa locations
  Clone ID: MRT4577_3131C.1.pep
MTAGXIVGSLVGSFAIAYLXDTFIXDKKAFGXSTPKXVXEKEWWQATXTKFQAWXRTAG

SEQ ID NO: 294120 - protein, 44 aa, Zea mays
  Clone ID: MRT4577_31320C.1.pep
ISKKIEKNIKSSLFASTRQLKKGYKRKITIVDTIVFNRQVFNTR

SEQ ID NO: 294121 - protein, 54 aa, Zea mays
  Clone ID: MRT4577_31321C.1.pep
HRIPYTLVPSNLGIHNILEFFCEGVCYSLTALGLLSSVLYTSLLHTCNTITNHM

SEQ ID NO: 294122 - protein, 70 aa, Zea mays
  Clone ID: MRT4577_31322C.1.pep
QWFVIYICPCELDKCVSRWQRSSTTHQRAMHIVNSLFSPLSLGFWYGEVYYLSIHMCRHFELKCMHACRE

SEQ ID NO: 294123 - protein, 37 aa, Zea mays
  Clone ID: MRT4577_31323C.1.pep
YNIFIFFFFFLFFLFLLFPFFFFFFFLILFFFFPTRP

SEQ ID NO: 294124 - protein, 101 aa, Zea mays
  Clone ID: MRT4577_31324C.1.pep
MPRLIDGDSPPFLRRAMALAKMVFGGDVPYHGWRGSIVPTSFSRQAGTPSKYPKHVEEQMAKNQVKAAVQRKTGPSYQRRTTEALRTGAPDQGSMCTRPSY

SEQ ID NO: 294125 - protein, 287 aa, Zea mays
  unsure (1)..(287): unsure at all Xaa locations
  Clone ID: MRT4577_31325C.1.pep
SRNALLQPSPEHXPEYQELPPAIPDCFTPNFVDHLHRSFNGPQLSAIHWAATHTAAGTSNGVVKKQEPWPFTLVQGPPGTGKTHTVWGMLNVIHLVQYQHYYAALLKKLAPESYKQVSGSTSTSSXTVAAGAIDELLQSMDQNLFRTLPKLCPKPRMLVCAPSNAATDELLARVLDRGFIDGEMKVYRPDVARVGVDSQSRAAQAVSVERRTDQLLMKGHEEVIGWLHQLKAREQQLSQEISYLERELNIVAAAGRSHGSVGVDPDGLAQKDRNRDILLQKLAASVE

SEQ ID NO: 294126 - protein, 197 aa, Zea mays
  Clone ID: MRT4577_31326C.1.pep
MESPPLTAEAIAFAEKKMDMTLEDIIKMSKKKNPGGKNPPRQPIKKRPFQNANTNKGNGKVQRFMESRSTIRQGVLAQRRSNLGGSQFAATKQAAKKAAAMPMRSGAVYWKKPSASTLVQRRSVGDAFQNTKVKESQNHAAPRTMDALFARMKAQRMRTAPQQQANPASGRDFNQQRRVQQQQRRGRAYGGRVVGNQ

SEQ ID NO: 294127 - protein, 147 aa, Zea mays
  unsure (1)..(147): unsure at all Xaa locations
  Clone ID: MRT4577_31327C.1.pep
EVCERKLDEYLLTRSYITGYQASKADLAVXYTAFXSLLPSPKDINSARWLNHIDALYRLHGITAKGQGVXVESHAAPSDPSPYLAEPHALIAHEDDDDDVDLCDEETEYEKNAAEERARTAKALGKKKESGKSSVLLDAKPWDHETD

SEQ ID NO: 294128 - protein, 224 aa, Zea mays
  unsure (1)..(224): unsure at all Xaa locations
  Clone ID: MRT4577_31328C.1.pep
MAIRAGRSPLLHLLALAFLILAASPCLQARVDHRKQKLGRVAVRKKMEVVQQDDEALVKLENAGIERSKAVDSAVLGKYSIWRRENENEKADSRVCLMRDQMIMARIYSVLAKSRDKLDLYQELLARLKESQRSLGEATADAELPKSASDRTKAMGQVLSKARDLLYDCKEITQRLRAMLQSADEQVRSLKXQSTFLSQLAAKTIPNGIHLSSMRLNDDFISLS

SEQ ID NO: 294129 - protein, 100 aa, Zea mays
  unsure (1)..(100): unsure at all Xaa locations
  Clone ID: MRT4577_31329C.1.pep
WLLFLVVDVFNFLFLFFFVLLVVYFFFCFIXFFFVFIFFFLFFFFLLXLFMFFSFCYLFXKIXIKYYCLFLLLRLFYXYFYFYLVIXKFLFYGYVFVLMG

SEQ ID NO: 294130 - protein, 58 aa, Zea mays
  Clone ID: MRT4577_3132C.1.pep
HPSCSSSADGISLVVSDRGFPIRCFSGKKNAPGLSYGICKCVCMSRLLMLLDSVQVYL

SEQ ID NO: 294131 - protein, 194 aa, Zea mays
  Clone ID: MRT4577_31330C.1.pep
MAIRAGRSPLLHLLALAFLILAFLILAASPCLQARVDHHKQNVSSGRKDGPHLLGRSKEITHMKLRRVAVRKKMEVVQQDDEALVKLENAGIERSKAVDSAVLGKYSIWRRENENEKADSRVRLMRDQMIMARIYSVLAKSRDKLDLYQELLARLKESQRSLGEATADAELPKSASDRTQSMGQVLSKARDLLY

SEQ ID NO: 294132 - protein, 59 aa, Zea mays
  Clone ID: MRT4577_31331C.1.pep
LFRSRHRAPLVPETVLLSPATATRRAAAARLPPPQSPRTRRRRRNILSLSPFTMSLRLS

SEQ ID NO: 294133 - protein, 298 aa, Zea mays
  unsure (1)..(298): unsure at all Xaa locations
  Clone ID: MRT4577_31332C.1.pep
MGVVSHRRAEQCQCTGRHHSPLVPLPPKAGTSPPFPSSNLFRSAPSRLAMAIRAGRSALHLHALAFLILAASPCLQVQALVDHRKQVSDWGRQPNFELQNMSSSQRDGSHLLGRSKEITHRKLRGRIGVRNKMEVVQQDDEALVKLENTGIERSKAVDSAVLGKYSIWRRENENEKADSRVRLMRDQMIMARIYSVLAKSRDKLDLYQELLARLKESQRSLGEATADAELPKSASDRIKAMGQVLSKARDLLYDCKEITQRLRAMLQSADEQVRSLKKQSTFLXQLAAKTIPNGIHCL

SEQ ID NO: 294134 - protein, 207 aa, Zea mays
  unsure (1)..(207): unsure at all Xaa locations
  Clone ID: MRT4577_31333C.1.pep
MSAAASSLLRPAPKWGGAPSHRRLVEEHLASLPHGLPRLRHVQELHAQLLKQGLHRDPHTASKLIASYALLRRVPACRCVFSAAVALPNSPFPSSTTLLTKTLLRAYALNSLPHAALAVFLDVPLRQRGTFTYSFLIKALAAAGLTPVRGAHAHVVKLGSAEDTFVGNALIDAYSKXRXLSDAKKVFDEMTTRDVVSWNTXMAAMVR

SEQ ID NO: 294135 - protein, 96 aa, Zea mays
  Clone ID: MRT4577_31334C.1.pep
IPQYNPPFFFFNFFIIFFFFFFFFFFFFFFFFFFFFFLNELFQCNQQQWRVIFHTYTKFEPCIQSTTVHRSTEPAGTHVQHEHEHLKKQDIDGRVG

SEQ ID NO: 294136 - protein, 47 aa, Zea mays
  unsure (1)..(47): unsure at all Xaa locations
  Clone ID: MRT4577_31335C.1.pep
RPSXPPRPRRRGRRGTGRWAGSVGGRAWLGVLLVFCRQLPGRPSRFP

SEQ ID NO: 294137 - protein, 74 aa, Zea mays
  Clone ID: MRT4577_31336C.1.pep
PSNHRAICRKSSTCFPSGKRERHSTHYPAGILYRHRNSPPAVAAGASSDLKLACPRRRDSPCQDLPVIRITSYF

SEQ ID NO: 294138 - protein, 82 aa, Zea mays
  unsure (1)..(82): unsure at all Xaa locations
  Clone ID: MRT4577_31338C.1.pep
ISFIYSRAQKNPIDTMRGVVSLPLALLAFAASATFTHTSGGCGCHHXRGITARDCTRYCIGFTGPARVTDAYARVIAESSIR

SEQ ID NO: 294139 - protein, 171 aa, Zea mays
  Clone ID: MRT4577_31339C.1.pep
PYLLPRLSLPFLAATHSVNALLPHLSPTPAMDPAPFPAPPPCSLSPHPHLTFAHSHDGIRLCAARAPPALRSSMGTWMGRGRGGDGLCYRAALPSTSQLGAPPSTLVLRCSWLSIVKHKGGGEITRDKLLVKDGIDHMLILHDFFFDLSLCTNVVQCEDEELRNMTLRAFR

SEQ ID NO: 294140 - protein, 75 aa, Zea mays
  Clone ID: MRT4577_3133C.1.pep
SEKPLLWKHLQGRNTTFFGCSHHYWHAFMSATIYLVLPMWGITSTSWALAPHLSPFQDTSLTKLTVEGNASLSIK

SEQ ID NO: 294141 - protein, 106 aa, Zea mays
  unsure (1)..(106): unsure at all Xaa locations
  Clone ID: MRT4577_31340C.1.pep
FIFYRDNWRCKGYVVYLVRVRRGGRKRPLPKCIIYGXPKHQGITQLKFXRYKRSLAEERARRKLGGLRVLNSYWVNEVELLFMERSVDSHCPGMVVRMAERALCHQ

SEQ ID NO: 294142 - protein, 188 aa, Zea mays
  unsure (1)..(188): unsure at all Xaa locations
  Clone ID: MRT4577_31341C.1.pep
TSTLPSINSLARWFGEPVRAAILQTEAFLTNAKGYPCLSKRHQSLLTGFFKHSVQVIIYGRSNHNVXQYLNECSQVMRATQKIPXRHALTPYLEYIAYLYQKMDPLPEQERIEINYRDFLQSPLQPLMDNLEAQTYETFEKDVVKYTQDSRRIFKVKCSVNRMQKKLKAATIRQKKCSQRCPQRSAST

SEQ ID NO: 294143 - protein, 207 aa, Zea mays
  unsure (1)..(207): unsure at all Xaa locations
  Clone ID: MRT4577_31342C.1.pep
TSTLPSINSLARWFGEPVRAAILQTEAFLTNAKGYPCLSKRHQSLLTGFFKHSVQVIIYGRSNHNVXQYLNECSQVMRATQKIPXRHALTPYLEYIAYLYQKMDPLPEQERIEINYRDFLQSPLQPLMDNLEAQTYETFEKDVVKYTQPENFQSKMFGEQDAEKVKSCNDKAKKMFPKVPSKISFNIVLSQLLKTMMISRNCCLPSL

SEQ ID NO: 294144 - protein, 79 aa, Zea mays
  unsure (1)..(79): unsure at all Xaa locations
  Clone ID: MRT4577_31343C.1.pep
MATSAALSTAANPTQLCRSRASLVKPVKGLGLSIVLERAQRSILCQAASSIFSDRLPYMXKRKLMNXLLLGAISFPTVG

SEQ ID NO: 294145 - protein, 70 aa, Zea mays
  Clone ID: MRT4577_31344C.1.pep
DSSMSTSLSKVSQYRWLDFYSRIISPVSIHILTTQAKGIDILCAFTETTYYLQDPPYCVLFIEFLLHLSC

SEQ ID NO: 294146 - protein, 120 aa, Zea mays
  unsure (1)..(120): unsure at all Xaa locations
  Clone ID: MRT4577_31345C.1.pep
FLFLLSLLLRLRTYPSKTKLPIPYSQNHHFESNTNASTFKTYPQHTSTIPNNPFIYIKNHSSIVLNNFTLNTFNHYHPIFHFFFIYIFNGKKLEDXSPSLHKFYIPHFNPTQYYPDLYFL

SEQ ID NO: 294147 - protein, 117 aa, Zea mays
  unsure (1)..(117): unsure at all Xaa locations
  Clone ID: MRT4577_31346C.1.pep
ETNLRHSCKRIMDMVSSQHPWFGMEQEYTLMGTDGHPFGWPSNGFPGPQGPYYCGVGADKAYGRDIVEAHYRACLYAGIKITGTNAEVMPAQWEFQIGLCERIRMGDHLWVXRFDLH

SEQ ID NO: 294148 - protein, 88 aa, Zea mays
  Clone ID: MRT4577_31347C.1.pep
RKGEGNRGHRGLGGGSWLPPALAWSCPWPPVPSTGARLCGPSPHLSGLALRGSGTSCIMFSVFSSPFDADASVPSLDSVTAAGALGFD

SEQ ID NO: 294149 - protein, 90 aa, Zea mays
  Clone ID: MRT4577_31348C.1.pep
LPSDSHPKKLSKEVSIAKPRSVRPASAWHLASWPMRCRTCASASSPLGRFLVLSSFGVFFYFASFFLVLVCFLMFSFFCCIFFFYFILFY

SEQ ID NO: 294150 - protein, 217 aa, Zea mays
  Clone ID: MRT4577_31349C.1.pep
SPTRIFLEETSLVARPGLAMDDIQERMAARLRHLGIRVRSVEEDERCVIPMGGPLPVLPQRVVGIGGTAGMVHPSTGYMVARTLATAPIVADAIVRFLDTGTGNGMGGLAGDALSAEVWKQLWPANRRRQREFFCFGMDVLLKLDLEGTRRFFDAFFDLEPHYWHGFLSSRLFLPELLMFGLALFGNASNSSRLEIMAKGTVPLGKMIGNLIQDRDG

SEQ ID NO: 294151 - protein, 128 aa, Zea mays
  Clone ID: MRT4577_3134C.1.pep
HASTAQASYPISRSRPLAKPARVSRATHAGEPGSHPAATGRHAALALTPKHVLYSHLVWISTNEPRGHWDRHQHKKRWACGIYHLPVNLLQSSIFLNERMKPFYQCLVYPLTGPMAGGVGGTGKRPAR

SEQ ID NO: 294152 - protein, 224 aa, Zea mays
  unsure (1)..(224): unsure at all Xaa locations
  Clone ID: MRT4577_31350C.1.pep
RRKANTQTQTQTHPLLLSSLRLPPTPPKPPTLARTERGGGGGXRRXGEMVFFALLVGAELDGLTNLQPRGGCDDPSYPYYFKLRCESCGETSAKTTCVSLNEVVELPTGKGTSNLLQKCKLCSRDGSVVMIPGQGTPLTAEQSQKGEMTCLMVFECRGYEPIEFAFGNGWKAESVHGTPFDIDLSEGEFDEYDEKGECPVALSKLQSTFKVVKKQGFHGKTRYV

SEQ ID NO: 294153 - protein, 142 aa, Zea mays
  unsure (1)..(142): unsure at all Xaa locations
  Clone ID: MRT4577_31351C.1.pep
MAKNWXMVSGHDWESGEIVRGKVRVVIGENSXAPFMVRLAXHSARTPDVADEDGEAFGXMKXRAELDLAANAKMNIALRMLSSVXGPLPTLSYGDFYQIAGVVVVKVTGGTEIRFHSGREDXIAXPPEDRLPDDTKECDHLR

SEQ ID NO: 294154 - protein, 40 aa, Zea mays
  Clone ID: MRT4577_31352C.1.pep
SSFPPMLCGSGNVTDQGLQFVRKLPLASDAADSWGSIRVD

SEQ ID NO: 294155 - protein, 54 aa, Zea mays
  Clone ID: MRT4577_31353C.1.pep
KVWCLIKVYWEGILVMVVDFPFALGVKILVYHAWALAGTKYWVPGNKQWGSFGY

SEQ ID NO: 294156 - protein, 62 aa, Zea mays
  Clone ID: MRT4577_31354C.1.pep
HFLIEFYYLICSCSLQDERWRPLFYQAPLDSASCRGCIKFEALQILYSVQIHVGVCRSFSSQ

SEQ ID NO: 294157 - protein, 94 aa, Zea mays
  Clone ID: MRT4577_31355C.1.pep
GRRQPVHETNLVTTDNTNTSKTVSYMAVKVFTKICITIATPQAEHQVEGALLLEGRKGGIVEIRVKKDRDRDRGLSPRAPNNTRRWSRVPRPAG

SEQ ID NO: 294158 - protein, 82 aa, Zea mays
  Clone ID: MRT4577_31356C.1.pep
ILGIIQHTYASHLDIMSGLLCKYSPARSFRYKAIDFNSFPATSCRGTQALMAVGKGSQPIRWHATLSLIPASCCPEHGGATG

SEQ ID NO: 294159 - protein, 74 aa, Zea mays
  Clone ID: MRT4577_31357C.1.pep
CSRLLRPLYARDYQVVLCQLMVLWFALRSQVQRFMQHLLWGGGLCCPAVSVFVPSITMRHGGGVSLQPSKKKHH

SEQ ID NO: 294160 - protein, 57 aa, Zea mays
  unsure (1)..(57): unsure at all Xaa locations
  Clone ID: MRT4577_31358C.1.pep
CXHQAKGVGGGRLHYQLALPWTKYAVYHHRGGIILPNLLYLNTANRARACSLIYSIQ

SEQ ID NO: 294161 - protein, 137 aa, Zea mays
  Clone ID: MRT4577_31359C.1.pep
HRDVKTTNILVDGDWVAKVSDFGLSKSGPTTVNQTHVSTMVKGSFGYLDPEYFRRQQLTDKSDVYSFGVVLFEVLLARPALDPALPREQVSLADYALSCQRNGTLLDVLDPTIKDQIAPECFKKVADTVEKCLAEQS

SEQ ID NO: 294162 - protein, 101 aa, Zea mays
  Clone ID: MRT4577_3135C.1.pep
KKHAGRVARHEEWEKVFISQKKKKKKKKKKKKKKKKKKKKKKKKKKKKKKKKKKKKKKKKKKKKKKKKGGGFFKETNFKTPAVNKIIFFLGPPNKNNGPGF

SEQ ID NO: 294163 - protein, 101 aa, Zea mays
  Clone ID: MRT4577_31360C.1.pep
MSVKRFGNCLLSSYDNMFAYLKALEISAQGYFMHPGAAVLMETMSTGTVLIIANQSMEDCECLFDAVNGLTVINCDLGYVMVIPQNQLHLDSHEARQRYRR

SEQ ID NO: 294164 - protein, 186 aa, Zea mays
  Clone ID: MRT4577_31361C.1.pep
MARILLEAAAGSGPPTNSINSDMILILAGLLCALVCVLGLGLVARCACSWRWAAASRSQPAADATKAANRGVKKEVLRSLPTVTYVPDSGKAKAAAGADECAICLAEFEEGQAMRVLPQCGHAFHAACVDTWLRAHSSCPSCRRVLAAPADLPPGEPCRRCGARPGFRALWKAPAPCSAEGPTFLA

SEQ ID NO: 294165 - protein, 62 aa, Zea mays
  Clone ID: MRT4577_31362C.1.pep
SSIPPPSCGRVSLDLMCFLKLIYHLVFWTLFILQVLNYSIQGIESLFMVSCHYINVKRLILM

SEQ ID NO: 294166 - protein, 124 aa, Zea mays
  Clone ID: MRT4577_31363C.1.pep
MAPQAKKSGKAQKQTKKYIIDASQPASDKIFDVAAFEKFLQDRIKVEGRTNNLGDNVVVKQQGEGKIEIIAHNELSGRYLKYLTKKFLKKQQLRDWLRVVSTSRGVYELKFFNVVNDEADEDDE

SEQ ID NO: 294167 - protein, 55 aa, Zea mays
  Clone ID: MRT4577_31364C.1.pep
PVKTISTLSFLHTIFSLNSHEYHHCVNTHQPLYNILIITSMSSPNPKHNLFSCFI

SEQ ID NO: 294168 - protein, 126 aa, Zea mays
  Clone ID: MRT4577_31365C.1.pep
AKVIFQQKKSGKAQKQTKKYIIDASQPASDKIFDVAAFEKFLQDRIKVEGRTNNLGDNVVVKQQGEGKIEIIAHNELSGRYLKYLTKKFLKKQQLRDWLRVVSTSRGVYELKFFNVVNDEADEDDE

SEQ ID NO: 294169 - protein, 51 aa, Zea mays
  Clone ID: MRT4577_31366C.1.pep
SDRDNNEILNRIAMHLGSALSACFFSVMIYEVAAAVPSGELQRGLCVVAPA

SEQ ID NO: 294170 - protein, 72 aa, Zea mays
  Clone ID: MRT4577_31367C.1.pep
ERQSTVLGGGIFKSSKPDENKRPIRKLKEFSHWYRLTANKLKNPKKNDWTTNTYQYPGRSTRRPPQQWYPHP

SEQ ID NO: 294171 - protein, 347 aa, Zea mays
  Clone ID: MRT4577_31368C.1.pep
WIQTVDIDTELPVYCPLEVTVAETDYYDETNYCEVTPCLLPERSVLKSIRVCGPRYWPQVIKLAPEDKPWWRSGDKTNPFNGGVLYIKRKVGSCSYSDDPIGCQSLISRAMHEVCDAPSASCSNQPNSTNGSYFRVDQLVSTFSANPSLIAFAKLCSVSWKSRCNSNFQEFCSQVLYECMSKDRPSLLQAYISFYTTIELMWEHLKTGNFPFYNSLFLPNLKVALAYNEALVDSRITNGGIIHSTFLESLMKRVGDIFAELPNLKDNLHRYLSTGTWPDTQNDVVVLSWYLQWYNIPPAHVVASAVEKVRPRVPAGVSMLPLLRLLLPTTHLVGLMEIEKVQIVMEC

SEQ ID NO: 294172 - protein, 39 aa, Zea mays
  Clone ID: MRT4577_31369C.1.pep
MPKLKFLFPSKKKKKKKKKKKKKKKKKKKNWRLVPSCRI

SEQ ID NO: 294173 - protein, 251 aa, Zea mays
  unsure (1)..(251): unsure at all Xaa locations
  Clone ID: MRT4577_3136C.1.pep
MVKGAARYEPGPAFQESGEQGKLEIPASGSTEFWLIQWPLNHVNASDFNGKEASLKLNDDGNLGNLESSSGKSYELVSFAAQQPDATVFIPSGSEMKAVGKISRRVCLVRYPEPEELEKEKPSFGSLTPGSRRSAGSSRKTMSRFSGFSKNRSSQGSALSLGQEKRSSQGSALSQGEQSAEPTPKHKQKRRDSXXXXXGHSNVAAKSXEGSQXRGAGSNTTSXXPQTPVEKSKXEKXELGLKSHKWQAAVP

SEQ ID NO: 294174 - protein, 73 aa, Zea mays
  Clone ID: MRT4577_31370C.1.pep
KRNRTFYHSVQNTHLPFPEGHSLPGGKILLMFLLQRKITGGLKPHAVTNSKATNFFKGRLFLLAGITLLTTIY

SEQ ID NO: 294175 - protein, 82 aa, Zea mays
  Clone ID: MRT4577_31371C.1.pep
RPGRDYCYHQMCYGIMRSSTIFCTKMCYGLNREHARENKEQAGPTCQRPNGQNTKRQATIAALISSRDRMYVFEKKKKKRPL

SEQ ID NO: 294176 - protein, 105 aa, Zea mays
  unsure (1)..(105): unsure at all Xaa locations
  Clone ID: MRT4577_31372C.1.pep
PTRPARITCMTFPRNCLRRARTLIGFGLIAXMGPSSVPAINGNSLTGFFFSSIGQNLANFPTPPPVTSKFWLGLGTWHLGLLIGLTFGQIGFKGRTEDYFKKGSG

SEQ ID NO: 294177 - protein, 201 aa, Zea mays
  unsure (1)..(201): unsure at all Xaa locations
  Clone ID: MRT4577_31373C.1.pep
RRIPSFVHPTPPALCCRSPCSRRPARCYRQIKNKPYPKSRYCRGVPXPKIRIYDVXGCKRKGGDEFPYCVHLXSCQNENVSSEALDAARIACNKNMTKSAGKDAFHLRVRSHPFHDLPIHKMLSSAATDTVQTGMMXAFGXPQDTCATVDIAQVLLSDLCKDNNAAHASEALRRAKFXFPGRQDIIDSREWGLTKLQRADY

SEQ ID NO: 294178 - protein, 75 aa, Zea mays
  Clone ID: MRT4577_31374C.1.pep
TSCTPIICHLAAFSNRPSALHLLTRNPIRRVTGHDLLQFKLHYGGAGHASDERLMLITSIDSSIRYFLWRLLTWV

SEQ ID NO: 294179 - protein, 61 aa, Zea mays
  unsure (1)..(61): unsure at all Xaa locations
  Clone ID: MRT4577_31375C.1.pep
KFGVTSGSSELAXVGSIFLQLKLVVKKGNQTENADIELTLPQFYSFLHEMXRVRTSMECFC

SEQ ID NO: 294180 - protein, 62 aa, Zea mays
  Clone ID: MRT4577_31376C.1.pep
FTCSKKKKKSGHRKKKKKKASKNLEVSIGEMLIDFVPDVAGLSLAESGGFVNVSCCSPANVA

SEQ ID NO: 294181 - protein, 78 aa, Zea mays
  Clone ID: MRT4577_31377C.1.pep
TPCTGWPAVLNKGTVEDWDPRVQIVSGAEFVDSVTHGRFASGGGGFAETQADPMDRSVARLLLQLPSYRKTAPPHRRP

SEQ ID NO: 294182 - protein, 63 aa, Zea mays
  Clone ID: MRT4577_31378C.1.pep
SDTWIFHFFNTTLPTLLLSILPLFNLWSAILIIPPFSIYPTVLLLSKTTLIYHPIPPTSISEF

SEQ ID NO: 294183 - protein, 75 aa, Zea mays
  Clone ID: MRT4577_31379C.1.pep
TRPWPHHRLRLVQPCTTRLHKTSIAGCLPCDRCQYHSMGLNNKAGASNMGITLACTGLLEVEGDIMDTECIVMCL

SEQ ID NO: 294184 - protein, 87 aa, Zea mays
  Clone ID: MRT4577_3137C.1.pep
FGSCTDRFFAMAYYQPKCRLSLRLVWLNLHDSTGQRAPIDPLVNANLYAIWVTISVGSAVCMNCKAKSKAKAINPFFIEAGDASANN

SEQ ID NO: 294185 - protein, 197 aa, Zea mays
  unsure (1)..(197): unsure at all Xaa locations
  Clone ID: MRT4577_31380C.1.pep
MMDQRWRPTVNEREFIEQALQSDLRVDGRRPFDFRKLTISFGREDGSAEVLLGETCVMGYVTAQLVPPYKDRPNEGTLAIFTEFSPMADPAFEPGRPGEAAIELGRVIDRGLRESRAVDMESLCVVAGKHVWSVRVDLHILDNGGNLIDAANIAALAALSTFRRPECTXVGGDDGQQVTVHDPEVMDPLPLTIHHLP

SEQ ID NO: 294186 - protein, 34 aa, Zea mays
  Clone ID: MRT4577_31381C.1.pep
GSRHQSLCMIFYLSSSSSLLVRVISRDLHSTVPS

SEQ ID NO: 294187 - protein, 71 aa, Zea mays
  Clone ID: MRT4577_31382C.1.pep
TARFVWVFMNKKGGRIVVFVFRTGPKEKNWPALVGEGVLKIQRGYFIFKGLGPRGLKFFFGKSYLVCGFGF

SEQ ID NO: 294188 - protein, 59 aa, Zea mays
  Clone ID: MRT4577_31383C.1.pep
SMPPATRCPTTIMSSSSVEDRACHPLPGNGQSCRPLSASHRSDAITTLGCIQEPAYQRS

SEQ ID NO: 294189 - protein, 94 aa, Zea mays
  unsure (1)..(94): unsure at all Xaa locations
  Clone ID: MRT4577_31384C.1.pep
CSEFGSSAIARPMCMTDSCLFAPGAAGYKIWDIQWHETNVDSSNMXKDKTTLMSNSXGTVALEIDDEKITVDEIIDMDXLIELEAILSRTSFHV

SEQ ID NO: 294190 - protein, 113 aa, Zea mays
  Clone ID: MRT4577_31385C.1.pep
EPQVLGGNPLPTPYAKLFFKGGGRKLRVFKKIGVPSWGDGFDFFCGDPPGNDNPLFEFISKPPRPGLFLAKELLGFFNFTLPGVFTTKGFNEKSLFLAWKNVQFQLGFRGGLS

SEQ ID NO: 294191 - protein, 106 aa, Zea mays
  Clone ID: MRT4577_31386C.1.pep
FLCLFKGIHYFLSRAVGIPFSEGNTFTLSTTRNEGGNSNITTTRGKPTEKANSPLIPPPSGRTPPWGKTSGEKRPKGWRPPRAPPGTPPQPPGGAPPTTTGTKKKY

SEQ ID NO: 294192 - protein, 785 aa, Zea mays
  unsure (1)..(785): unsure at all Xaa locations
  Clone ID: MRT4577_31387C.1.pep
MQPDQPVISLRPGGGGGPRAGRLFSPAFATSVSGDFLRPHGGGASGISKIGDSHFEPRERVRYTRDQLLELREIVDVSEEILRIKQEIDVELHGEDQSWVRNDSTVQGQAQAQTQAQNRYAETDSRDWRARSAQLTPTNEEKSWDNIREAKEAYASSGRQQEQANRQDQLSSQFASKAQVGPTPALIKAEVPWSARRGNLSEKERVLKTVKGILNKLTPEKFDLLKGQLMEAGITTADILKDVISLIFEKAVFEPTFCPMYAQLCSDLNEKLPTFPSEEPGGKEITFKRVILNNCQEAFEGASNLRAEISKLTGPDQGMERRDKERLVKLRTLGNIRLIGELLKQKMVPEKIVHHIVMELLGSGTDKKPCPEEEDVEAICHFFNTIGKQLDENPKSRRINDTYFIQMKELTMNPQLAPRLRFMVRDVIDLRSNNWVPRREEIKAKKISEIHSEAEKNLGLRPGAASGIRNGRSSPGGALLPGGAFPMNRPGTGGMMPGMPGSRKMPGMPGLDNDNWEVARSKSMPRGDSIRXQGPLLNKPSTVHKTSSINTRLLPQGXAALIGKSALLGTGVPASRPLSFTPGPTPAQITPKPIRAAPAVVPAPDKQASAPKGNTAELQKKTIALLEEYFGIRILDEAHQCIVELQSPDYYPEIVKEAVNLALDKGTNFVDPLVRLLEHLYTKKIFKTQDLESGCLLYGTLLDDIGIDLPKAPAQFGEIIARLTLLGALRFEALEVILKKMEDTYNRKAVSNAFMKTLEANPSGQAILGSPAAAAVIDACNSLLE

SEQ ID NO: 294193 - protein, 66 aa, Zea mays
  Clone ID: MRT4577_31388C.1.pep
CSNGSNTALLESAGDRVVSKSVVQPLDSLPPAPVCAASAPRPPIRSVAAFSGISRRHESLARSEEP

SEQ ID NO: 294194 - protein, 63 aa, Zea mays
  Clone ID: MRT4577_31389C.1.pep
ENTIFIIYRGEQILNIQGEPFLGLLQNFRAPQNGLKNFKRKKRFLGEDLLQGGPGGLSPLFKP

SEQ ID NO: 294195 - protein, 47 aa, Zea mays
  Clone ID: MRT4577_3138C.1.pep
PFPYYFFSDEAERNFIGISSFSQEIHRKWEKNPTLQRRPKLDPNRGP

SEQ ID NO: 294196 - protein, 218 aa, Zea mays
  Clone ID: MRT4577_31390C.1.pep
MAVFSDLHTADGLKTLEAHLAGKTYVSGDAITKDDIKVFAAVPSKPGAEFPNAARWYETISAAVASRFPGKPVGVNLPAGSAPAAAAPAAEAEDDDDLDLFGDETEEDKKAADERAAAKASSKKKESGKSSVLMDVKPWDDETDMKKLEEAVRSVQMEGLTWGASKLVPVGYGIKKMTIMLTIVDDLVSVDSLIEDHLTEEPINEYVQSCDIVAFNKI

SEQ ID NO: 294197 - protein, 121 aa, Zea mays
  unsure (1)..(121): unsure at all Xaa locations
  Clone ID: MRT4577_31391C.1.pep
NKLFFSRPEANVSQGDADILFLWKKYELLHEKSEQKHVILGVITRTKKHWKNLDNHLNVIGKALLWAEKRPSTIEGLKASVQPIPGXWDCLNKMVRIFQSHCGSFTHYVLRHIRAFPNIFN

SEQ ID NO: 294198 - protein, 71 aa, Zea mays
  Clone ID: MRT4577_31392C.1.pep
AVRMHSPQTHWKTVREERKKPTEEEIRKICRDEKEALGQNEESPKQDLITIWQLSDLSFCPKYEMANSLLS

SEQ ID NO: 294199 - protein, 83 aa, Zea mays
  Clone ID: MRT4577_31393C.1.pep
GTGAQVILAPSTATPTHRPTNDPNTPPDGAVVLDYSCAIVADSTSATATASIRETDHGGEAYCLLPQHDPPKLCLLGPPDVLN

SEQ ID NO: 294200 - protein, 59 aa, Zea mays
  Clone ID: MRT4577_31394C.1.pep
ECFKRVARIRSMRDERTYCLTACDALIDTDNSSLHLQLSGSLDADDILCCSDDTRIWEM

SEQ ID NO: 294201 - protein, 300 aa, Zea mays
  Clone ID: MRT4577_31395C.1.pep
MQKKPDDAMEEEAAAAPGPEIGFWLAARRRLAPEDPFFAAGDLERELLAKHLALDLSEDDRNQLEKMEVASTCTVFCPIAGCGAHLDCLEEFEDHYVTRHTASCSVCSRVYPTSRLLSIHVSETHDSYFQAKVARGFPMYECLVEGCGMKLKSYKSRQQHLIDKHQFPKSFEFFKKARDSQRQRQKSQRRQTAHKGEETRDNSMDVDGKGARQPNRRYRLKQHDHSEPKENKQQHKEAQEDEMEVEQKIDELTSAVSRLSTADSTPASVTFGHRRSRGLTFVPRSIRQNKQAAVPAGSNK

SEQ ID NO: 294202 - protein, 107 aa, Zea mays
  Clone ID: MRT4577_31396C.1.pep
TILLLLLFLSPATAIGRVTYGHSPQLVAVRRPWGIYRFARTSLTGYEWKWVDRLTYRLPQPMASSLSSAEGVASCRHRIWDGGRSLVLACRSLQTRRWSEGGAAAGR

SEQ ID NO: 294203 - protein, 164 aa, Zea mays
  unsure (1)..(164): unsure at all Xaa locations
  Clone ID: MRT4577_31397C.1.pep
DTKVCXDQLSVVDXMSLLGLINYSMTTMVYYAGNSFPVIKNALCLHSELDYYNRKKVXLSTVTSSAANLYQATDDTVSSTGNVKVVDQDDKNYSLWAGTPGARICTVTKEVETHPLKFAILEVTAPIKFDSLFYATCTDNLIRLLELACCADFTFLDVFTGVLK

SEQ ID NO: 294204 - protein, 260 aa, Zea mays
  unsure (1)..(260): unsure at all Xaa locations
  Clone ID: MRT4577_31398C.1.pep
MPPVLLLVLAASLVALPSCQSLPVLAPVTKDPATSLYTIPFHDGASLVLDVAGPLVWSTCDGGQPPAEIPCSSPTCLLANAYPAPGCPAPSCGSDRHDKPCTAYPYNPVSGACAAGSLSHTRFVANTTDGSKPVSKVNVGVLAACAPSKLLASLPRGSTGVAGLANSGLALPAQVASAQKVANRFLLCLPTGGPGVAIFGGGPLPWPQFTQSMPYTPLVAKGGSPAHYISLKSIKVENTRVPLXSGRSXPGGVMLSTRLP

SEQ ID NO: 294205 - protein, 65 aa, Zea mays
  Clone ID: MRT4577_31399C.1.pep
LGGTGEISFPFHLLGPNVHRCIIVLFRFKCGEIFQHLHTPGNATRVSGPKLNFFGVFAYFPEVWA

SEQ ID NO: 294206 - protein, 39 aa, Zea mays
  Clone ID: MRT4577_3139C.1.pep
LATPIYMCFCSNNFNLIIETGTINAVGPVRLTLIGIEFY

SEQ ID NO: 294207 - protein, 257 aa, Zea mays
  Clone ID: MRT4577_313C.1.pep
DCVQRIGTIYDDSGVETFDLPGEPSLTLGRCFIEVENRFRGNSFPVIFANKSICQELRNLEDELEDSRFPDVSPDDQVHDARRLKPRDQVLHFLNELGWLFQKAAACTPSTKSDVSHSELIQFSTARFRHLLLFSNERDWCSLTKTLLEILTKRSMVSDELSHETLEMLSEIHLLNRAVKRKSSHMVHLLVQFVVICPDNSKLYPFLPNYPGPGGLTPLHLAASIDDAEDIVDALTDDPQQIGLSCWHSVLDDERLS

SEQ ID NO: 294208 - protein, 170 aa, Zea mays
  Clone ID: MRT4577_31400C.1.pep
MDTHVGKLIDSVGSIFRGSDVLPWCDPDIIAGFESEVAEAANEEQKTESLMRLSWALVHSRQPEDVNRGIGMLEASLDRSSSPEETREKLYLLAVGRYRTGDYTRSRQLLERCLEIQHDWRQAITLQRLVEEKTKRDGMIGMAIITGAFGVVGLVAGGIIAAASSSSRKR

SEQ ID NO: 294209 - protein, 78 aa, Zea mays
  Clone ID: MRT4577_31401C.1.pep
YNLVNFDLEGIGATPTPRSGEVDLPVVVLYCDSSVRGRTRWRPRVRRLGVLLLVPWGLGSSKAETRDGMTCYSRSMIT

SEQ ID NO: 294210 - protein, 123 aa, Zea mays
  unsure (1)..(123): unsure at all Xaa locations
  Clone ID: MRT4577_31402C.1.pep
MGQSYRKSLGATSRADQRADPKGAGSDAPTSPLTDNGTPIAPTPRRHKYGSTTPLHHHQAATPGAAAXPSPYPDGGASPLPAGVTTSPAQTTPRRFFKLPLQSTKPAKHIKATHAKRLSGGKP

SEQ ID NO: 294211 - protein, 153 aa, Zea mays
  Clone ID: MRT4577_31403C.1.pep
RHDIIFDSGTWALLTPSPSLSPSVCFRCCISSTCGVWVPGSVHDKFLIDGFPRNEENRAAFENVTKISPAFVLFFDCSEEDMEKRLLGRNQGRVDDNIETIKKRFKTFVDSTLPVIEHYNSKDKVKKIDAAKPIPEVFEDVKAIFAPYSLKAE

SEQ ID NO: 294212 - protein, 275 aa, Zea mays
  Clone ID: MRT4577_31404C.1.pep
MSMSVEIPMDRPAASAPPPGAVCDVVDEDEAAPPPGNARPTRVLISPIVPLPADGASADAALPPAYTGVLYLHRHKWPAVEDDPGKKREKWLKEMRGWLMVLAVLAASVTYQAGLNPPGGFWQQDDAEGNVAGTPVLQSKFPKRYTVFFYFNSTAFVTSVVIIVLLMNESFYHSEAKVEALEIIVVLDMAGLMGAYIAGCTREVSSSIYIIVLTLVVFLYVVYTAQFLPKLWGLVVDVPFLHKAAQGGALPVPQDILDGARPSAGIGRTKSAPAR

SEQ ID NO: 294213 - protein, 26 aa, Zea mays
  Clone ID: MRT4577_31405C.1.pep
LVALQEILQEWGVGSEIASPHPTTVL

SEQ ID NO: 294214 - protein, 104 aa, Zea mays
  unsure (1)..(104): unsure at all Xaa locations
  Clone ID: MRT4577_31406C.1.pep
VCFFFQKIFWGVLFFFFFFFFSFFLFFSFFPANLHTLFFFFLETHPPLVLSLGXPPYSXPKKCPPQLWVFPPTRGGSQKQTGWCATFVCSCERPPPRFFPPLWV

SEQ ID NO: 294215 - protein, 68 aa, Zea mays
  Clone ID: MRT4577_31407C.1.pep
GACCCHWLDDASRSVGHLAVVINLSINREHWQVLRILLQVLHFFYNGNKSSGFSHRMRIAITYCLLTQ

SEQ ID NO: 294216 - protein, 46 aa, Zea mays
  Clone ID: MRT4577_31408C.1.pep
LLTMVKENNYYQRDKVKESLLNYFKRSTSGKHIELLDWTFKKRLPG

SEQ ID NO: 294217 - protein, 122 aa, Zea mays
  unsure (1)..(122): unsure at all Xaa locations
  Clone ID: MRT4577_31409C.1.pep
FWSTSKERAGKERYFFYWASVSRCRNQTFMRAEVAICRSLACMICSTGSLLTMLCLSSLITKAKVICPIGNLAQGKKQKETEREKEDDTWRSLKFLEMAGVPELHLVERXHGEGRRXAGSNP

SEQ ID NO: 294218 - protein, 58 aa, Zea mays
  Clone ID: MRT4577_3140C.1.pep
GFISELLRPTEPNFYFGADRYILKEANKGPEEDTYYFSQRGGKRSDNKNIYIWRPTRG

SEQ ID NO: 294219 - protein, 56 aa, Zea mays
  Clone ID: MRT4577_31411C.1.pep
GSQLWRQGITGLYCPRCGVINKVLLHSVRGILWLYAGVGALQATVVYLIQCGSCPV

SEQ ID NO: 294220 - protein, 107 aa, Zea mays
  unsure (1)..(107): unsure at all Xaa locations
  Clone ID: MRT4577_31413C.1.pep
KKKRIQNQKKKKKKENALTKRAEGMAPRARXIATYNVCCVGGCFSSDILKAMEVDVTDGVNVLSLSLVGGSEEYYRDSIAVGAISAMENGIFMSCSAGNAGPGAATL

SEQ ID NO: 294221 - protein, 115 aa, Zea mays
  unsure (1)..(115): unsure at all Xaa locations
  Clone ID: MRT4577_31414C.1.pep
YALXLDMTARDLQSVAKSAGLPWTLAKGQDTFTPISAVVDDELRQKGPTSDMLFKIPFLISYISSIMTLMEGDVILTGTPEGVGPVRVGQKITAGITDLIDVEFDVQRRNRSFST

SEQ ID NO: 294222 - protein, 188 aa, Zea mays
  Clone ID: MRT4577_31415C.1.pep
MAAAAAQKLLEASTKIIGVGRNYIAHAEELGNPIPKEPVLFLKPTSSFLHAGVATAAVEIPEPLESLHHEVELAVVISRRGRDIPEASAMDFVGGYALALDMTARGLQSVAKSAGLPWTLAKGQDTFTPISAVVSNGFSSCAWSWLVSQDSMFYLFVFAFYNYTSINQYHIEVSQGRSTSQCGKGAKI

SEQ ID NO: 294223 - protein, 80 aa, Zea mays
  Clone ID: MRT4577_31416C.1.pep
LSACSSMKDKQKTRWPAKTDQPGPQRATRTPGPSRTLTYPSKNPIGNPLLAHAVKRVTLSCFRSFKNALPPSWTVLMVAS

SEQ ID NO: 294224 - protein, 108 aa, Zea mays
  Clone ID: MRT4577_31417C.1.pep
LVGRRRLGVASGSASSFCRLFFFFRSPLASTDEMMTVGVNIAAHFVWSHVASLAVPRWHRRYGRGKFAPSTPRLGIVVWRVLLLRLVQMYVYPLQSIYVRIKLSLILL

SEQ ID NO: 294225 - protein, 104 aa, Zea mays
  unsure (1)..(104): unsure at all Xaa locations
  Clone ID: MRT4577_31419C.1.pep
RNLIPKIQGIAHSLTLDKHTLRKNLKRMXHVVLXATGDGTNDAPTLHEADIMLAMGIARTDRANESACLILLDDNFTSIIIRSRRSRAGYINIQKVVHCYLTVN

SEQ ID NO: 294226 - protein, 74 aa, Zea mays
  Clone ID: MRT4577_3141C.1.pep
GNIFFPPGKNFSQYYPRLLNPPPFGKNVFPPGPAPKFPGVHPGFCNLKLKKKKKPPKKKKKKTPHWEKNGRNLS

SEQ ID NO: 294227 - protein, 63 aa, Zea mays
  unsure (1)..(63): unsure at all Xaa locations
  Clone ID: MRT4577_31420C.1.pep
IMLARANTLLRNTFYFTQINMXSTSGAYRKESMESFMFYCPFLSSNSIAVLFLVAVSLRLDHI

SEQ ID NO: 294228 - protein, 149 aa, Zea mays
  unsure (1)..(149): unsure at all Xaa locations
  Clone ID: MRT4577_31421C.1.pep
SESHPSGTSQEGGRQNPTPRRGTRHEKARGSTTKQDQARPHETRTRAPRPTDAGEEESEGTPREAATKASTKPQRKQRETTKQGTPPHQKQASDRTEEENNTXAHTEDHKADKKKSKAAGKKXKDXQAKKXNTRXRPDGKKKAXEKPTP

SEQ ID NO: 294229 - protein, 73 aa, Zea mays
  unsure (1)..(73): unsure at all Xaa locations
  Clone ID: MRT4577_31422C.1.pep
APANCKGIRSTCQSSXMVLVRYMMAITGCHVSLSAHYVPCSQYVGKWSDRFVASLPIPSGRYLPHFQVNTSYG

SEQ ID NO: 294230 - protein, 87 aa, Zea mays
  Clone ID: MRT4577_31423C.1.pep
PMPSRPRSEWRPRIIRHAARVLLVGSLPRLACTKSRRRCFPRPGHQLLRSRRGWLVASPILLSEANDDYIANTPRDRKIAYHVKMKE

SEQ ID NO: 294231 - protein, 94 aa, Zea mays
  unsure (1)..(94): unsure at all Xaa locations
  Clone ID: MRT4577_31424C.1.pep
GEXASLPPDIMVGFGKWDWSPLKMENPFAGGLDEVKVHLWHGVEDLYVPVQLSRYISERLPWVIYHELLRAGPLFPVADGMPDAIVRSLPLGDE

SEQ ID NO: 294232 - protein, 372 aa, Zea mays
  Clone ID: MRT4577_31425C.1.pep
MAGTDVAGSARGSDAALGKTGEPPAAARSGAAKKVALALLASFSALLYSQIQPPPSKIPGMPGGPPVTAPRTRLKDGRHLAYLESGVPKEKAKYKIIFVHGFDCCRYDVLNVSQGLLEELGIYLLSFDRPGYAESDAHPARTEKSIALDIAELADNLQLGPKFHLIGFSMGGEIMWSCLKYIPHRLAGVAILAPVGNYWWSGFPPDVFKEAWRVQFPQDQRAVWVAHHLPWLTHWWNTQKLFRGSSVKDGDPAMLSKEDRLVADKFEKRTYEKQVRQQGEHDSLHRDMMVGFGKWDWSPLEMENPFAGGQDEVKVYLWHGVEDLYVPVQLSRYISERLPWVIYHELPTAGHLFPVADGMPDAIVRSLLLGDE

SEQ ID NO: 294233 - protein, 87 aa, Zea mays
  Clone ID: MRT4577_31426C.1.pep
GSCRKKKKKKKKKKKKKKKKKKKKKKKKKKKKKKREIKKKKKKGALGPQFWSLLGGVNGPLGEKREKIVPWGKWFPVQIPPKNRAGS

SEQ ID NO: 294234 - protein, 64 aa, Zea mays
  Clone ID: MRT4577_31427C.1.pep
VNLSWIQVDNLIQVIEHGGLPWIVGPIWCDVQCTVVCLLYYIAVTLLSVVSFVSNALSDACMDV

SEQ ID NO: 294235 - protein, 156 aa, Zea mays
  Clone ID: MRT4577_31428C.1.pep
GPGHCICSICSSTSQRNFYVLLPRRLGPRVVSPGDSGATRRRHRPVLPRPRSTAAVAAPHAVTAANDRVAQPTLSRLFLFVFLAFSSSSSTRLLHGGPRSLLLSSPRRIWSSIGRILRFWWLLSLPTSSARVGEGEKRSGHGGLVCPRRWCEGRQI

SEQ ID NO: 294236 - protein, 150 aa, Zea mays
  Clone ID: MRT4577_31429C.1.pep
KNTSFFLHCNSSILKLATVYPIFAIFCAPIAWSPYIRSRRTRTHLPYGPKYPCCYSSHSLTYGSHKSASPSTFGHPPPHSGRSTRRFSALEQHDGKDEDAGVSSNGTLGEPVYDDSVVMVDDASPHAASTTPPLLPCNKWYVIAIVMLNR

SEQ ID NO: 294237 - protein, 52 aa, Zea mays
  Clone ID: MRT4577_3142C.1.pep
GIRADGRFQTGYCGSVDSLVGQWAIAGEADINPGQPSPWCSGSCIYWIPGRW

SEQ ID NO: 294238 - protein, 68 aa, Zea mays
  Clone ID: MRT4577_31430C.1.pep
REDLVHGYGRKLRREFLRRNRSVRAGASHVRALDAVPYRRANKRQLDDNEVSEKEQARLEGDKGELEP

SEQ ID NO: 294239 - protein, 145 aa, Zea mays
  Clone ID: MRT4577_31431C.1.pep
SSSMSVPVNSPLVSTLFLVRASFSSARRGIVPCCARPSRHCQIVGVAQLTNRILVSHRFHIYHGPHVSRPYSNLLARRLTVVYLEIPRRPTSRLSSSRRVCSYIYATLLYHRRSCHPLLDPHLTSSLQTRSRRRFVCHQEIPSVG

SEQ ID NO: 294240 - protein, 72 aa, Zea mays
  Clone ID: MRT4577_31432C.1.pep
VVLERVESNAQVILRVGRSMHLKWLLRVVWRTVVHASCISRRSLRNCCCFVCYGNYWRWRVCKWLESRGLRD

SEQ ID NO: 294241 - protein, 543 aa, Zea mays
  unsure (1)..(543): unsure at all Xaa locations
  Clone ID: MRT4577_31433C.1.pep
LREAGGSSIGSDRARAMGLAWMVAAAVAAVLASWAFNALVHLVWRPYAITRRLRAQGVRGPPYTFFTGSLGEIKRLRAEGAAVTLDVDDHDFIPMVQPHLRKWIALYGRTFVYWTGARPNVCVADVNVVRQVLFDRTGLYPKNLINPHISRLLGKGLVLTDGDDWKRHRKVVHPAFNMDKLKLMTATMSDCTRSMISEWDAQLQKEDQSGRGGHVHVEVELSSRFEELTADVISHTAFGSSYNEGKRVFLAQRELQHIAFSTIFNVQIPALKYLPTEKNLRTRKLDRQVRAMLMDIIEARLASKDTAGGYGNDLLGLMLEACASPPEHHGEMAPTTLSMDEIVDECKTFFFAGHDTTSHLLTWASFLLSTHPEWQHRLRDEVRRECGDDEVPTGDALNRLKLVNMFLLETLRLYGPVSLIQRKAGSDLDLGGIRVPEGAILTIRLATIXRDKEVWGEDAGEFRLERFENGVTRAAKHPNALLSFSSGPRSCIGQNFAMIEAKAVVAMILQRFALELSPKYVHAPMDLITLRPRHGLPMLLKRL

SEQ ID NO: 294242 - protein, 53 aa, Zea mays
  Clone ID: MRT4577_31434C.1.pep
AWMAGQIDSNLKKNLNSLAFVLNRNYSQMPVVIQLNPFEKHPVFNIRRIAENA

SEQ ID NO: 294243 - protein, 119 aa, Zea mays
  Clone ID: MRT4577_31435C.1.pep
GTRRRCASEHVSGIACHTNAELDAHMTKGQEAGKLLIIDFTANCRVPCRAIAPLFDEATNKFTHHVFMNGHVHEVTEVAADYETEATPTFHFGNNGNKVATIVSAMNEELLSQIDKDAP

SEQ ID NO: 294244 - protein, 63 aa, Zea mays
  Clone ID: MRT4577_31436C.1.pep
LRHQIGETAISFFVPLPGGARGAHPEGDQLSSGTSNYRRQLLANCSFPVTTPLDLCSHLDACN

SEQ ID NO: 294245 - protein, 49 aa, Zea mays
  unsure (1)..(49): unsure at all Xaa locations
  Clone ID: MRT4577_31437C.1.pep
YGPFNTYNLRSLSLQDYHVTQRMEXLHTHNXVNSEELIQRFGVCKHESH

SEQ ID NO: 294246 - protein, 317 aa, Zea mays
  unsure (1)..(317): unsure at all Xaa locations
  Clone ID: MRT4577_31438C.1.pep
MAIQEELNNFKRNEVWNLVPHPKQNVVGTKWVFHNKQDEYGMVIRNKAKLVAKRLCLSHKFGLEETFAPVAKLESIQILLAYVSHHSFKLYQMDVKSAFLNEPIKEEVYMEQPXGFEDDMYHDHVYKLSKALXVGKPDPTLFTKKCDGDLFICQIYVDDIISGSTNQKSCEEFSMVMMQKFEMSIMGKLTYFLGFQVRQLKEDTFISQMKYTQDFLKKFGMMDAKPIKTPMGTNRCLDLDAGGKSVDQKESTFDIIGYLDSDYAEFNVDRNSTSGTYQFLGRSLVSLSTKKQNFVALSTVEAEYVAVGXCCAXLLWM

SEQ ID NO: 294247 - protein, 283 aa, Zea mays
  Clone ID: MRT4577_31439C.1.pep
RPELAGQAPPLRPRSASPPLPAYLERGAGRAAAGARHSDPLLRAQHRPAANLVAAYKCPPVFYIITEFLPGGSLRSYLNNTENHPIPLEKTISIALDIARGLEYVHSQGIVHRDIKPENILFDEDSCVKVADFGIACEETLCDVLVEDEGTYRWMAPEMIKQKAYNRKVDVYSFGLVMWEMVSGRVPYENLTPFQVAYAVANRNLRPTISPECPSALGPLIEQCCALQPDKRPDFWQIVKVLEQSHSILSQGGCLDAQKSGTCQDPKKRLMQWIQKLKPTHGA

SEQ ID NO: 294248 - protein, 75 aa, Zea mays
  Clone ID: MRT4577_3143C.1.pep
LLGIVLGYLQQLSYLIPYLICYFNLHTVNNVIYSARLYTRSAGHRLNKTFSHPESLGIVLISPHTLNLYPTHAQA

SEQ ID NO: 294249 - protein, 63 aa, Zea mays
  unsure (1)..(63): unsure at all Xaa locations
  Clone ID: MRT4577_31440C.1.pep
NYLDKRVLRWVGPSEFSKKXTSLLGRAHALHMFESALGAXVYDCNNMVEQELPGGELLIYHSF

SEQ ID NO: 294250 - protein, 90 aa, Zea mays
  Clone ID: MRT4577_31441C.1.pep
PRPKPKQRGSEDDTNINGTEEDKPPELGLDRHQRNKEQHNPNRTLAWNYNQTKNSETRSARSEPITRWPYLRLTRREGGEQRREVKSSDT

SEQ ID NO: 294251 - protein, 109 aa, Zea mays
  Clone ID: MRT4577_31442C.1.pep
RGRPGYPLPTDSLSSLAYSQHKPDHLVPVLRPDVHAPPALHRRHHHTVHPLLYQVWLHVIAPNPPCVRQLGLTLLSSTLVPGLPHEGLNFTILLMLRLGSSIELQEDQP

SEQ ID NO: 294252 - protein, 160 aa, Zea mays
  unsure (1)..(160): unsure at all Xaa locations
  Clone ID: MRT4577_31443C.1.pep
SLAFHTHASPAHRPPPXPPAPGNLPXQPPPAGPAPAPXPPPPXPPADRGRPFFMPPPAPPGRSHSNEASPADPPIASASSSSSRLPPPPPPPPRPRPSPHPRXTATTTPPXPPPSPSPSXPPPRRPPSPXPPRWRPAWPRRRSCCCRRAAPALRCSCCLA

SEQ ID NO: 294253 - protein, 102 aa, Zea mays
  Clone ID: MRT4577_31444C.1.pep
MNVRGVFLALLALTTSASSSTSGGCGCQTPPFHLPPPFYMPPPIYLPPQQQPQPWQYPTQPPQLSPCQQFGSCCVCSVSSPFLGQCVQFLRQQYSPAATPYS

SEQ ID NO: 294254 - protein, 141 aa, Zea mays
  unsure (1)..(141): unsure at all Xaa locations
  Clone ID: MRT4577_31445C.1.pep
MAGAGGATAXAAGGGGAXDAGASRSGVGAGAAGAPVADPRAEALRCPRCDSANTKFCYYNNYSLSQPRHFCKACKRYWTRGGTLRNVPVGGGCRKNKRSRSSGGPGAGGRNGSSAAAAAAAAAVVVTFSSVPVTLALPLYT

SEQ ID NO: 294255 - protein, 107 aa, Zea mays
  unsure (1)..(107): unsure at all Xaa locations
  Clone ID: MRT4577_31446C.1.pep
MKLVLAVLAWIALVSSVPRTQTGHCAHKLLQIHELQHTSQQQRPQYLQPQLLTHHGXQLQHATATVSIAPLILQQXPEVHVQLPLRHPLHHNHQRSPPTTPRPSCAC

SEQ ID NO: 294256 - protein, 38 aa, Zea mays
  unsure (1)..(38): unsure at all Xaa locations
  Clone ID: MRT4577_31448C.1.pep
RWWQXXSHXLGRQVIXQGLQTXPCXXXHGPGFYYMHRH

SEQ ID NO: 294257 - protein, 131 aa, Zea mays
  unsure (1)..(131): unsure at all Xaa locations
  Clone ID: MRT4577_31449C.1.pep
MSSKKAKTKTTKKRPQRATSNVFAMFDXSQIQEFKEAFNMIDQNRDGFIDKEDLHDMLASLGKNPTDAYLDAMMNEAPGPINFTMFLTMFGEKLNGTDPEDVIRNAFACFDEEATGTIQEDYLRELXTTMG

SEQ ID NO: 294258 - protein, 132 aa, Zea mays
  Clone ID: MRT4577_3144C.1.pep
RDWDLKPSEPRGHTGEQEIGRDNMRLDPANSDVESKARSRPGRLAWLPAGKRDTPRKPTRPGRWGEFEAERRPGSRRGGHGEMELERGDGTGTSAGRSGEDGAGRERQQGGAHGEAVGTDKSWLPCVAEACV

SEQ ID NO: 294259 - protein, 241 aa, Zea mays
  unsure (1)..(241): unsure at all Xaa locations
  Clone ID: MRT4577_31450C.1.pep
MSHHIDFLSHHQNDQKKNAAPRGTFTSTSCECCFTVSISAYISIQGPIXVIQDLHTKMGSVFTISLFGLKKVTFLVGPEVTAHFFQGSESEIRQSDIYKVTVPVFGRGVLYDVDLATRSRQISFCLDSIKPMNLRGHVDSMVKEVEDYFTKWEQHGVVDIKHEMGNLILLIANRCLLGKQFRENMFEEVSTLAHDIFDNGFHLISLFFPYLPXPPHHRRDKXRAKLGEMIHEVVRSRRSSG

SEQ ID NO: 294260 - protein, 62 aa, Zea mays
  Clone ID: MRT4577_31451C.1.pep
WVVVFFFWVFFFFFFFFFFFLGNFKKIFIPFEQEGKIYFFLPVCLKKRFNLALRDLLPMNQF

SEQ ID NO: 294261 - protein, 44 aa, Zea mays
  Clone ID: MRT4577_31452C.1.pep
ERGPMTNPSMYSAVHAPSASPVTTPCPEAAVNDPAMESNDTTHS

SEQ ID NO: 294262 - protein, 197 aa, Zea mays
  unsure (1)..(197): unsure at all Xaa locations
  Clone ID: MRT4577_31453C.1.pep
MAQNVWEADKMLDSYIYDYLLKRNLQNTAKAFQAESNVPSAPVSIDAPGGFLFEWWSVFWDVFIARTNEKHSDSATSYLESIKAREQQQQSQHQIQTQQLSLQRHAQQHPQEQQQWRQQKQQQRSENTDFPTSAQNGTVAADPPARQNDTTAGTLSAKIFEDRMKITXQRDVSEETSMKARLTETICPLLESNPTTC

SEQ ID NO: 294263 - protein, 132 aa, Zea mays
  Clone ID: MRT4577_31454C.1.pep
MPMPGSSSARLVHLLASALCCAILLCADASVHDYTGERFVGLGNAFVLNGGSEGVYASPAADSFIRFEKVAFKRTPESAAAAGKDGNRTVTITAVILEAADRGAVGGSDFVAGGARALCCTPDMAKRGACTE

SEQ ID NO: 294264 - protein, 108 aa, Zea mays
  Clone ID: MRT4577_31455C.1.pep
PVQRQEGLLRPAQRLLCGHPRLHRTAGCSRPQQQEEAPRVRDSPAARAQGVLHRPEQAQQLQAPEEGEPVLRQGRRRLPTPTEAARGRQETLQQDQHHQGLPCETDAL

SEQ ID NO: 294265 - protein, 52 aa, Zea mays
  unsure (1)..(52): unsure at all Xaa locations
  Clone ID: MRT4577_31456C.1.pep
GQAGPCWQVYGGLGNALPLLCQRWXLGRRGPGSVRSGVRRREGAAAPREIRR

SEQ ID NO: 294266 - protein, 106 aa, Zea mays
  unsure (1)..(106): unsure at all Xaa locations
  Clone ID: MRT4577_31457C.1.pep
KVLLFSPNQFKLHKVRSVHFGQKGIPPLNPYGGRPIRYPDPLLEASDPLKXLEPHKIMVFLKFHLGNVVMAPGGGNLGRVGVLKHREKPKGSFEPPPVLLGAFCYV

SEQ ID NO: 294267 - protein, 96 aa, Zea mays
  Clone ID: MRT4577_31458C.1.pep
LCAFCPLLQLLRDIFSSASGVAGPTAARFSAVQDSPLSFRGVGSCPWLGHVFLKRAFDASGGRPRSPADEDEPFFDPSWYHLQVVYELLLRFVMSP

SEQ ID NO: 294268 - protein, 486 aa, Zea mays
  Clone ID: MRT4577_31459C.1.pep
MWKQFLGKISRKSPKSGGRGGSRPAKSPSSRGAANGAPPELSASSPAAAASPFPPPSGAETREDVFLRKLNVCCVVFDFAAERGKDSPEVERKRQVLVSLVDCVSEAEEPLTEAMLSACVRMFAINLFRVFPPKLRSGASAATDEDEPFFDPSWYHLQVVYELLLRFVMSPVVDVKVARKYMDNSFISRLLDLFDSDDPRERECLKTVLHRIYGKFMGNRPFIRKAVSNIFYRFVFETDHHNGIAELLEVFGSVITGFAKPLKEEHKLFLWKALIPLHKPKTVGVYLPQLTYCITQFIEKEPKLTGTVIRGLLKYWPVTNSQKEMMFLGELEEVLELTEMADFQKCAVPLFRRIAQCLNSSHFQVAERALFLWNNEHLFDLISQNCQVILPIIYPALERNARWHWNQSVLNVTMNVRKMFFDMDERLLLACQTNFQEEEKKRAASEERRRLVWEHLERNAAFHPVTGDIGFAVPPTSAPLVAPTMT

SEQ ID NO: 294269 - protein, 88 aa, Zea mays
  Clone ID: MRT4577_3145C.1.pep
PGRGPTPPPVGCSGHGAPPISPAFFSPSSLRAGATPGATKNPPTPPKTGAPLYPGGLGTRTRAPLGKAPRNRGPKFNRGTPNGGPLRG

SEQ ID NO: 294270 - protein, 87 aa, Zea mays
  Clone ID: MRT4577_31460C.1.pep
RIYDESVNNDEIAADLKEHVINHVMPDKYLDEKTIFHVKQSGRFVIGRPYGNSGLSGRAIINDTSRRLGTQSGGSFSRCDGTLVDGS

SEQ ID NO: 294271 - protein, 178 aa, Zea mays
  Clone ID: MRT4577_31462C.1.pep
FLWKALISLHKPKTVGVYLPQLTYCITQFIEKEPKLTGTVIRGLLKYWPVTNSQKEMMFLGELEEVLELTEMADFQKCAVPLFRRIAQCLNSSHFQDQLGRRCQKITSSRVKTLPKNLIRPLPVQDLEDEGFRRPALLIADAPLRSGRRELKGGSAMKRGESELGSGMIWRLAAGLLL

SEQ ID NO: 294272 - protein, 145 aa, Zea mays
  Clone ID: MRT4577_31463C.1.pep
CASKTATATATRRPWSRPRRRGRRCRGGRSARSCRGCTWTCGRPSTTPSSWTCCSGARAAAAWAWATSPRTTGLPSAPSSTRPRGPHSPSRICSGGWASSGASSTPSAGSRTTPASPTTRAAMSSSPRRPSGSAMCWFVRTAAAR

SEQ ID NO: 294273 - protein, 393 aa, Zea mays
  Clone ID: MRT4577_31464C.1.pep
MAPSCYDAAASMLLCAEEHSSILWYDEEEEELEAVGRRRGRSPGSGDDFGADLFPPQSEECVAGLVERERDHMPGPCYGDRLRGGGGCLCVRREAVDWIWKAYTHHRFRPLTAYLAVNYLDRFLSLSEVPDGKDWMTQLLAVACVSLAAKMEETAVPQCLDLQEVGDARYVFEAKTVQRMELLVLTTLNWRMHAVTPFSYVDYFLNKLSNGGSTAPRSCWLLQSAELILRAARGTGCVGFRPSEIAAAVAAAVAGDVDDADGVENACCAHVDKERVLRCQEAIGSMASSAAIDGDATVPPKSARRRSSPVPVPVPVPQSPVGVLDAAPCLSYRSEEAATATATATSAASHGPPGSSSSSSTSPVTSKRRKLASRCDGSCSDRSKRAPAQWTKE

SEQ ID NO: 294274 - protein, 79 aa, Zea mays
  Clone ID: MRT4577_31465C.1.pep
VYNKTNLLHMIVLWHIVVRHRHTNLITSSNSTQGKATATTKSHSKINTRPTPFYFFFFVFSPSVYKSLSACVCVFVLSL

SEQ ID NO: 294275 - protein, 134 aa, Zea mays
  Clone ID: MRT4577_31466C.1.pep
EKPVVEGGKHGREDGPHPTPRGSPVQTLSRGGPQVVTRALQRPLPMCALRRSTRDHGSAPPRARRRHNGDARAGSCDPVRDRRHVRRHVWLLGRLVDRSCDLRARVAALCSRWNFSRGLAGLPCAWASGFMRTR

SEQ ID NO: 294276 - protein, 64 aa, Zea mays
  Clone ID: MRT4577_31467C.1.pep
SIGGALFLHFFLFPMQERKRGPVNTKPQTLLLPLIVTQDHRSRSSLIYASTGELHRIPSGIPSR

SEQ ID NO: 294277 - protein, 55 aa, Zea mays
  Clone ID: MRT4577_31468C.1.pep
CTIALGPVLVSHQHLIVLFLIQSVEWIVLCLDCFSVRVKGIKSVPLVVNKEDALV

SEQ ID NO: 294278 - protein, 91 aa, Zea mays
  Clone ID: MRT4577_31469C.1.pep
KGGIQRGFFGLLYGDQPGGQKRHFGLPSNGGIGNPHSPKFSSFKFLGGGQNWQAKAIPFPYLKKTLFPWDLGDPPLLNTNPTTIYVCHFFS

SEQ ID NO: 294279 - protein, 116 aa, Zea mays
  Clone ID: MRT4577_3146C.1.pep
MAEAPETAAPTQPPPAPAASSPPPKSGIPPRYDLDAKWDACLDLSIRRVAYSSLGGAFAGLLLFRSPTTRWASVALGAGVGIGAAYTECSYLFNGAPKCSPKVSTIPSAHSDGGDK

SEQ ID NO: 294280 - protein, 63 aa, Zea mays
  Clone ID: MRT4577_31470C.1.pep
RESGQVKRAGHLNHTSKLPGVKAHIIASNHNLVCSPRGYMLLMINFSPSVKLSISSVFFNIMV

SEQ ID NO: 294281 - protein, 144 aa, Zea mays
  unsure (1)..(144): unsure at all Xaa locations
  Clone ID: MRT4577_31471C.1.pep
AWDLTKGAXXXXXXXXXXXXXXXXXXXXFADHMHSYNQDALVELPRSLPERMLAMELVQPTLVKHKHQHRQNELATXXXXXXXXXKRPSIGYACXXXXXXXXAKRXXGPAVREWKQGQKLRVISVGERLGYNGPGWGGDGRGRQ

SEQ ID NO: 294282 - protein, 91 aa, Zea mays
  Clone ID: MRT4577_31472C.1.pep
FFVTTLNAFFAVGIHTLYSLQIWVHSTVWHMSVLVILCALGRLSFSRSRVRRAHTSCSRATSTSYTDVRPIRQQAAAEAAIAHPRSGRLSL

SEQ ID NO: 294283 - protein, 53 aa, Zea mays
  Clone ID: MRT4577_31473C.1.pep
NSRTKHTRAKGNANKTRRGAGRGSSTRGGAPGEGCPRMINSRPGFDRVEGNRR

SEQ ID NO: 294284 - protein, 48 aa, Zea mays
  Clone ID: MRT4577_31474C.1.pep
GRFFSFFFRYGRLKFTPGTSHVKPTSTIPPHQKPGPIAPEKYIRQPAT

SEQ ID NO: 294285 - protein, 79 aa, Zea mays
  Clone ID: MRT4577_31475C.1.pep
TFMFHDVYVVGLDALPSWTQGSSPWTRLHKLTPSQDMPTLEHQQVLGHSARGEEGSGSVRAVGGWKSPAGEGEGEGGSC

SEQ ID NO: 294286 - protein, 67 aa, Zea mays
  unsure (1)..(67): unsure at all Xaa locations
  Clone ID: MRT4577_31476C.1.pep
NHYNYSXHPKETTGLSFKTQTKCDNRAGTGALVMYWQHLIIYLSTSLITPRALNNNISRTVLLQRPP

SEQ ID NO: 294287 - protein, 216 aa, Zea mays
  Clone ID: MRT4577_31477C.1.pep
MGRLQTESVKDAISQIDGDAKEKNRKFTETVELQIGLNNYDSQKDKRFTGYVNLPHIPRPKMNVCMLGDAQHLEEAEKMGLDYMDVEALKKMNKNKKLVKRLAKKYHAFLASEAIIKQIPRLLGPGLNKAGKFPTLVTHQESLESKVNETKATVKFQLKKVLCMGVAVGNLAMEEKQIQQNIQMSVNFLVSLLKKNWQNVRCLYVKSTMGKPYRVF

SEQ ID NO: 294288 - protein, 217 aa, Zea mays
  unsure (1)..(217): unsure at all Xaa locations
  Clone ID: MRT4577_31478C.1.pep
MSKLHSELLKDCISQIVQDAKENRKFTETVELQISLKNYDPQKDKRFSGSVKLPHIPRPKMKVCMLGDAQHVEEAEKMGLDYMDVEALKKMKKXKNKKLVKRLAKKYHAFLASEAIIKQIPRLLGPGLNKAGKFPTLVTHQESLESKVNETKATVKFQLKKVLCMGVAVGNLAMEEKQIQQNIQMSVNFLVSLLKKNWQNVRCLYVKSTMGKPYRVF

SEQ ID NO: 294289 - protein, 216 aa, Zea mays
  Clone ID: MRT4577_31479C.1.pep
FNKTSVPEPSRLHKRAYLEHPVWLPHGALDVEASHILPVLLQKGNKEVDAHLDVLLDLLLLHRQVANGNTHAKNLLELELDGCLSLVHLGLEGFLVSNQGRELACLVETRTKEAIIKQIPRLLGPGLNKAGKFPTLVTHQESLESKVNETKATVKFQLKKVLCMGVAVGNLAMEEKQIQQNIQMSVNFLVSLLKKNWQNVRCLYVKSTMGKPYRVF

SEQ ID NO: 294290 - protein, 96 aa, Zea mays
  unsure (1)..(96): unsure at all Xaa locations
  Clone ID: MRT4577_3147C.1.pep
VPWVPLVRAPSACAPPVWLGWVAAPGVVGPARPCVVRLGVSVXAPLPRGVPRGAGLXPSVFRPPVRLRLRLCFRWLAGVACGGXGRSCRSFCPCPF

SEQ ID NO: 294291 - protein, 221 aa, Zea mays
  Clone ID: MRT4577_31480C.1.pep
MPIDYCSKLHSELLKDCISQIVQDAKEKNRKFTETVELQISLKNYDPQKDKRFSGSVKLPHIPRPKMKVCMLGDAQHVEEAEKMGLDYMDVEALKKMNKNKKLVKKLAKKYHAFLASETIIKQIPRLLGPGLNKAGKFPTLVTHQESLESKVNETKATVKFQLKKVLCMGVAVGNLSMEEKQIQQNIQMSINFLVSLLKKNWQNVRCLYIKSTMGKPFRIF

SEQ ID NO: 294292 - protein, 50 aa, Zea mays
  unsure (1)..(50): unsure at all Xaa locations
  Clone ID: MRT4577_31481C.1.pep
CAYIQSPQAMTLICGYVSVEHDYLMLSPYYGHXRRESKMSLLPGKVSMTN

SEQ ID NO: 294293 - protein, 216 aa, Zea mays
  Clone ID: MRT4577_31482C.1.pep
MSKLQSESVKDAISQIVGDAKEKNRKFTETVELQIGLKNYDPQKDKRFSGSVKLPHIPRPKMKVCMLGDAQHVEEAEKMGLDYMDVEALKKMNKNKKLVKRLAKKYHAFLASEAIIKQIPRLLGPGLNKAGKFPTLVTHQESLESKVNETKATVKFQLKKVLCMGVAVGNLAMEEKQIQQNIQMSVNFLVSLLKKNWQNVRCLYVKSTMGKPYRVF

SEQ ID NO: 294294 - protein, 216 aa, Zea mays
  unsure (1)..(216): unsure at all Xaa locations
  Clone ID: MRT4577_31483C.1.pep
MSKLQSESVKDAISQIVGXAKEKNRKFTETVELQIGLKNYDPQKDKRFSGSVKLPHIPRPKMKVCMLGDAQHVEEAEKMGLDYMDVEALKKMNKNKKLVKRLAKKYHAFLASEAIIKQIPRLLGPGLNKAGKFPTLVTHQESLESKVNETKATVKFQLKKVLCMGVAVGNLAMEEKQIQQNIQMSVNFLVSLLKKNWQNVRCLYVKSTMGKPYRVF

SEQ ID NO: 294295 - protein, 583 aa, Zea mays
  Clone ID: MRT4577_31484C.1.pep
MSVPGAPAGGGSRSFDFGADDVLCSYDDFAASSEPKRPDPADSVPDFHDSRLGRPFVKPYEQESYGKEDVLSAVEKCMKKYADNLLRSLEGITSRLSQLEIYCYKLERSIGELRSDVLRDETDHRLKSLEKHLNEVHRSIQILRDKQELAEAQKELAKFQLTQDTSKKKEDVPTFIPEQKKPEENPDTSNQQLALVLPHQVNLPSLAPRASESVQQYKNQPVQPSDPTPPVPQQDRYVLSQAIVYYPQRQAPGIQDTQGQKLQPEVQYLPARPPAQDVPVHAPSQPPQAGNQTQPQPYPPYQQQWHQQSSQPAPAPVAQTQQTFSQTFPPPAQQPQLSNVQQFPPQPVQQPQSNAQQYPPPVQPQQSSPQLPQAMQPQHPPMQTQMRPQTPPNYPHYPPHQPLNPTPETLPGNVAMQGSYNTSVPSGANRPELPYSYGGAGIPLSQPLPQHNMQRHQLPPSSQGSFGPPPPSKGSYAGSPQYAPQGNPQGYSTGYAYPPNGPPAVQPQQMPPGGVGMSHPGSHMMRGHPYGEMMEKAITMGYPRDQVLNVTQRMAESGQSMDFNTLLDKLNEAGSGAPPPRAW

SEQ ID NO: 294296 - protein, 73 aa, Zea mays
  Clone ID: MRT4577_31485C.1.pep
TKNTTPAHGLSEGPMMVDGHMEDVLTNRPCAAGGDWVIMQVVQLLQAPTRSASSNPLGAGKSRRGWRGVDAAA

SEQ ID NO: 294297 - protein, 64 aa, Zea mays
  unsure (1)..(64): unsure at all Xaa locations
  Clone ID: MRT4577_31486C.1.pep
TRGFCAAEDAXVATSXPKSVFHCFDGENVXSAPPPMKKYYKLANLLCWEEXADAMQEKAVVLYE

SEQ ID NO: 294298 - protein, 176 aa, Zea mays
  unsure (1)..(176): unsure at all Xaa locations
  Clone ID: MRT4577_31487C.1.pep
FKGGGGXEITVAGNLAYTLXGMGARVGIFXADVFGPSVPSMGSPENRVLVMNXGGGYILPTEYLGVKMGCFGVAGQGRGIMRGPMGSGVINQVRTTTEWGELDCGVIDMPPGTGDIHLTLWQVAPLTAXRIVTTPQKRGFIEWAKGGRMCSKLKVPWVAGVKNMCYFEADGKRYYP

SEQ ID NO: 294299 - protein, 308 aa, Zea mays
  Clone ID: MRT4577_31488C.1.pep
MAKSGGESTVEVASSSSSPIPASASATRPKAKHRIEIEGYPVDGVSIGGQETCVIFPTLSLAFDIGRCPQRAVSQEFLFVSHGHLDHIGGLPMYVATRGLFRLRPPTIFVPACLRDLVERLFEVHRAMDQSELNHNLVPLEVGEEYELRRDLKVRAFRTYHAIPSQGYVIYSVKQKLKQEFIGLPGSEIKRLKLSGVEITNTVSTPEIAFSGDTTADFILDPDNADVLQAKILVVESTFPDDSISVEHAREYGHTHLFEITSQADKLQNKAILLIHFSARYTTEEIDAAINKLPPSFRSRVYALKEGF

SEQ ID NO: 294300 - protein, 122 aa, Zea mays
  Clone ID: MRT4577_31489C.1.pep
MADNRNLPPTWATTAGFGFLTLNSGVAIYRAWGDFASILLVTGSYSALLLLFRCLRDYERAAPGSPARARARRAVWPLTSLLTVAFAWKVAAAMPSAAAAAVVWALAVATTAGGFFALFVPG

SEQ ID NO: 294301 - protein, 93 aa, Zea mays
  Clone ID: MRT4577_3148C.1.pep
LALPAPPVGAPQPRPEGPPLKRLSPEEQAERRRLGLCFNCNEPYNRGHNRVCRRIFYLHGVELTAAAEELAGDDPQDGAPVFSLRAVTGMPIC

SEQ ID NO: 294302 - protein, 39 aa, Zea mays
  Clone ID: MRT4577_31490C.1.pep
KRHLKEFYPLITKLICCDQLDVRGALGDLFSKQLTPLMS

SEQ ID NO: 294303 - protein, 159 aa, Zea mays
  Clone ID: MRT4577_31491C.1.pep
AGAAASGRRLSLSIALTIDVMSRSGVLGYQSGKGVLLFGVALKAPTGGTFSLLFEGDRNCRAGRLTAPFTSTAPGDSTVLIKNPPPEMSARAGLLVVLTSSILKLIVLVFALSYSWCTESCTPCCFFCLFPAWLLLFDYDSKSLPRGRFSQLRSPHGNP

SEQ ID NO: 294304 - protein, 74 aa, Zea mays
  Clone ID: MRT4577_31492C.1.pep
IRHEASADIHRVLDLRAPVIVKVLKGMCIMDAQIFRRHLKEFYPLITKLICCDQMDVRGALGDLFSKQLTPLMP

SEQ ID NO: 294305 - protein, 106 aa, Zea mays
  unsure (1)..(106): unsure at all Xaa locations
  Clone ID: MRT4577_31493C.1.pep
LVCFRIVSXMTGITTIYNTGLNFGGPATMTLGWFVGGAFTMFLXASMAEICSSFPTSGGLYYWSARLSGKRWAPFASWITGWYADCPSAATHTHTPCISIASATFF

SEQ ID NO: 294306 - protein, 395 aa, Zea mays
  unsure (1)..(395): unsure at all Xaa locations
  Clone ID: MRT4577_31494C.1.pep
SVRVGVVSIALGALVHLIEVGGHQFSDGDWDTXLKSIRDASYTTQPLELLNSLRFQKSKHQQLLSREESNAQGNSYLDSQGEPSISDSNNGEHNHPEAGLQTILENSEDLPSPSGRTQPAVFPRGQSFGQRIMGNMMDNILVRSLTSKSKGRTDDIAPPSPVKAPDDEADKAEEEESPMMETVRSKCITQLLLLGAIDSIQKKYWSRLKATQQIAIMDILLSLLEFASSYNSPSNLRTRMHHIPPERPPLNLLRQELAGTTIYLDILHKSTVEQDEKDSIEETNGLNVESDDQEKIKYLAEGKLVSFCGQVLKEASDLQPSTGEAASADIHRVLDLRAPVIVKVLKGMCIMDAQIFRRHLKEFYPLITKLICCDQMDVRGALGDLFSKQLTPLMP

SEQ ID NO: 294307 - protein, 158 aa, Zea mays
  unsure (1)..(158): unsure at all Xaa locations
  Clone ID: MRT4577_31495C.1.pep
WLLHRVPHALLLRRPRGAPHRCQGGRLRRDRNLQELCRLHATVKRILGICFGHQHKKHDSYEAPIKSKEPLIFNVGFRQFXRPLFSSDNINCNKHKMERFLHHGWFSVASVYASISFLPLPLIVLKNRDGEQSTIAAVGSLKSVDPNRIILKKIVLTR

SEQ ID NO: 294308 - protein, 290 aa, Zea mays
  Clone ID: MRT4577_31496C.1.pep
NSARGLELLYSLGFHKSNNQQLLSREESNAHGNSYRGSRGEPSIVNNGEHSHAEAGPQTSLENSEGTTSRGLPSPSGRTQPAVSPRGQSFGQRIMGNMMDNLLVRSLTSKSKGQADDIAPPSPVKAPDDDETDKAEGEESPMMETVRSKCITQLLLLGAIDSIQKRYWSRLKATQQIAIMDILLSLLEFASSYNSPSNFRTRMHHIPLERPPLNLLRQELVGTTIYLDILHKSTVEQDKIDSIEETNGLNVESGDQEKIKYLAEGKLVSFCGQILKKASVLQPSTGEAAS

SEQ ID NO: 294309 - protein, 82 aa, Zea mays
  Clone ID: MRT4577_31497C.1.pep
AVVTTQSTFFFFFFFFFLAQIIYYCHKITTGLKYNVLNNAYMSPTLLYCIMEASSLVSSKSLGKTRCETIKLLPCVIQKYAA

SEQ ID NO: 294310 - protein, 41 aa, Zea mays
  Clone ID: MRT4577_31498C.1.pep
RDSTSNSATSRLCTSSPRLLHQHGQLLGLASGIVVCVLTTR

SEQ ID NO: 294311 - protein, 198 aa, Zea mays
  unsure (1)..(198): unsure at all Xaa locations
  Clone ID: MRT4577_31499C.1.pep
KKKKKKKKKKKKKKKKKKKKKKKKKKKKKKKKKKKKRAPGPPQVYGCFCLAPPGKRKGAPPGLGPPGGGPPQKTGGGPGGPRPRGPGGGPPPPREKTGGWGRFQGFSGGEQGEKTQRGKKKKGRGGKPXVPGPLGAPLAANSRGPIGXGIPKGPQKRPFPWGRTPQKPPLGRGTLSPPPGKKAPPPPGGGRPVFSPPK

SEQ ID NO: 294312 - protein, 70 aa, Zea mays
  Clone ID: MRT4577_3149C.1.pep
PKKIDRMCSGSLTSSEKPLVSCLNRRLPIADCCQRASNAYSYRIACSMTDHVRGDYVTARTPLTPDETYV

SEQ ID NO: 294313 - protein, 102 aa, Zea mays
  Clone ID: MRT4577_314C.1.pep
MRECISIHIGQAGIQAGNACWELYCLFHGIQADGHMPGDKTIERGDDAYNTFFSETGAEKHVPRAAFDDLEPTDIDEERTGTYRQLFHPEQLISGKEDAGNN

SEQ ID NO: 294314 - protein, 556 aa, Zea mays
  unsure (1)..(556): unsure at all Xaa locations
  Clone ID: MRT4577_31500C.1.pep
DQCTPRISLKAIALLRICEDRLAEGFIPGGAIKPIDVVPEEXFDVSEHYWFPMLAGLSDLTLDSRPEVRHCALEVLFDLLNERGHKFSSPFWESIFHRVLFPIFDHVRHAGRDGLSSSGDDWLRDTSIHSLQLICNLFNTFYKEVSFMLPPLLSLLLECAKKTDQTVVSISLGALVHLIEVGGHQFSDGDWETLLKSIRDASYTTQPLELLNSLRFQKSKHQQLLSREESNAQGNSYLDSRGEPSISDSNNGEHNHPEAGLQTILENSEDLPSPSGRTQPAVFPRGQSFGQRIMGNMMDNLLVRSLTSKSKGRTDDIAPPSPVKAPDDDDXKAEGEESPMMETVRSKCITQLLLLGAIDSIQKKYWSRLKATQQIAIMDILLSLLEFASSYNSPSNLRTRMHHIPPERPPLNLLRQELAGTTIYLDILHKSTVEQDEKDSIEETNGLNVESDDQEKIKYLAEGKLVSFCGQVLKEASDLQPSTGEAASADIHRVLDLRAPVIVKVLKGMCIMDAQIFKRHLKEFYPLITKLICCDQMDVRGALGDLFSKQLTPLMS

SEQ ID NO: 294315 - protein, 69 aa, Zea mays
  Clone ID: MRT4577_31501C.1.pep
KLWLKSSHYKRLPKGKQFPMENPRKKKVHPLQFVIGLERGPNILKATHMNVMASPCWLMKNPCKTGLRL

SEQ ID NO: 294316 - protein, 170 aa, Zea mays
  unsure (1)..(170): unsure at all Xaa locations
  Clone ID: MRT4577_31502C.1.pep
MHIANRTRRSRGGGRRTSRGRAQGRQENGRSLPPTMSYDQVLSPLFGAGGRSAWRAAQHGGGDAVTRQILKCTRWQLEETTDFVTCPYHYYCDSSYPGDYSAAVDVLVAAFAAYCFLSTLAFTVLDLVRGKRGSSSAASPAPGVRGIRRKYLVPXKPVPAPLVLLALAGG

SEQ ID NO: 294317 - protein, 641 aa, Zea mays
  unsure (1)..(641): unsure at all Xaa locations
  Clone ID: MRT4577_31503C.1.pep
HRSGPFPRHGRPRRSRLRHTRPRRPRLASPTPRSSTTVAATPPPRXAADSGPSTSTARFANPVVXSPPRAXIPAAPDVPAAHSESSVYHPVAIHLDPGHVHPMVTRRAAGVLRSVDRVILAADTTCTPPDAYPVPSSVRATLADPHWRRAMEEEYAALLANHTWDLVPCPPGTNVVTGKWLFRHKLTSDGSLDRYKARWVLRGFTQRPGVDYDETFSPVVKFATVRAVLSLALSRDWAIHQLDVKNAFLHGTLTETVYFSQPTGFVDADRPDLVCRLNRSLYGLKQAPRAWYSRFASYLASIGFVEAKSDTSLFIYRRGDDTVYLLLYVDDIVLTASTADLLHRTIVALQREFAMKDLGPLHHFLGITAERRPQGLFLHQRQYAIDILERAGMSDCKPCSTPVDTQAKLSEDDGPPVADATSYRSLTGALQYLTFSRPDIAYAVQQVCLHMHTPREPHLTALKRILRYLRGSLDYGLLLRPSPTSELVVYTDADWAGCPDTRRSTSGYAVFLGANLVSWAAKRQPVVSRSSAEAEYRAVANGVAEASWLRQLLHELHSPLQRATLVYCDNVSAVYLSTNPVQHQRTKHVEIDLHFVRERVAAGDVRVLSVPTTLQFADIFTKGLPSSVFLDFRSSLNICTG

SEQ ID NO: 294318 - protein, 117 aa, Zea mays
  unsure (1)..(117): unsure at all Xaa locations
  Clone ID: MRT4577_31504C.1.pep
TVVTDKXDXLIWDVVLFATGRTPNSHRLHMQAARVEIDRVAAIKVDEYFRTFAPSEWAVRDVTNQINLTAVALVQATSFAKTAFGGQQVQPDHRDEHLAAFCMPPLSVMGLYDEQAL

SEQ ID NO: 294319 - protein, 323 aa, Zea mays
  unsure (1)..(323): unsure at all Xaa locations
  Clone ID: MRT4577_31505C.1.pep
LTHGVQLRLSCPYTSAQNGRAERMIRTTTNMIRCLLFQASLPSSYXAEALHTATHLLNRLPSTAVRHPTPYFALYGTTPTYNHLRVFGCACYPNTSATAPHKLSPRSTRCLFLGYSSDHKGYRCLDLASHRIIISRHVVFDENVFPLAGPSPPTDLDSLLESDSVSPXPGAPPCAVTRTPCVLDVAARAYSRASRGPFDHACATRGPADPSRTMRGPADAHGSLCRPRARLPPPPXHVTTSAPADSGPSTSPVRFADLAVVYHPRASATLAAPDVPADRPEPPVYHPVAIHRDPGHVHPMVTRRAAGVLRPIDRLILVADTTT

SEQ ID NO: 294320 - protein, 138 aa, Zea mays
  Clone ID: MRT4577_31506C.1.pep
MAQWSSVAASLDRWIGLGLGPCRCGSPPAPSRAAMPRRGRARRNGGKVVGCASVPREQAELPPLAVDGTEEEGVGGCGACGGAGWVLCDFCQGKKNNVKSETGSRVYRRCPTCKAAGFILCPRCRVYKCVTFPESTES

SEQ ID NO: 294321 - protein, 67 aa, Zea mays
  Clone ID: MRT4577_31507C.1.pep
GTGKTPGTAICGKAPFVAPTGSQGPKRRNNRPRRRAGRPGPVSGQEDRECVRSRVKKKEWGWFKTVR

SEQ ID NO: 294322 - protein, 71 aa, Zea mays
  Clone ID: MRT4577_31508C.1.pep
TRPQYMVLWISGMSTNTNETAEPFAHYYKLSYGNLTKYFHATGTSKIRILRLLQSLQTCNSLGRLTPLPES

SEQ ID NO: 294323 - protein, 99 aa, Zea mays
  Clone ID: MRT4577_31509C.1.pep
DRSHLIGFWPLSHCIDRSLFHWSKTLPRVHFFSSQAQLLHNPHSDHNFFGTGRGNSQPQQHGAPPSVKAPPQISGCFAINEAHAKYRQYGPPGGGSFPR

SEQ ID NO: 294324 - protein, 58 aa, Zea mays
  Clone ID: MRT4577_3150C.1.pep
KVKSESIRVREATNTQKSTAIHTPPAKPGAQMNTTPVLIRTQLKSLRMTKECAKTECE

SEQ ID NO: 294325 - protein, 1091 aa, Zea mays
  unsure (1)..(1091): unsure at all Xaa locations
  Clone ID: MRT4577_31510C.1.pep
MEFDPWGLTIRHLPTHAVLARCDSSGPLYSLHLPSTPHTRVASSPVLTTTTTSSAIWHRRLGHPGPDVMSQLSGHSDISYTRGSSERLCHACQLGRHSRLPFSTSTSRAVQAFDLVHCDLWTSPVLSLSGYKYYLVILDDYSHFLWTFPLRLKSDTFTTLTHFFAWVSTQFRRPVRALQCDNGREFDNNASRSFFLTHGIQLRLSCPYTSAQNGRAERMIRTTTNMIRCLLFQASLPATYWAEALHTATHLLNRLPSKAVSHPTPHFALYGTTPSYDHLRVFGCACYPNISATAPNKLSPRSTRCLFLGYSPDHKGYRCLDLTSHRIIISRHVVFDEDVFPLAGSTPPTDLDSLLESDSVSPLXGASSCAVTCSSCSHDATARAHFRATRGPVDPACATRGHVDHACAMRGPIDPAXPRTAPSTSPAPRATPSILPAPRAAPSIPPAPRAAPSTPPAPRAAPSTPPAPRAAPSXTRLASPTPRSSTTAAXATTSASPDSGPXRARPASPTPPSSITAASWPHPPLSTFRRSTPSRPYTTRSPSTATPDXVHPMVTRRAAGVLRPVDRLILAADTSSTPPDASPVPSSVRTALADPHWRRAMEEEYAALLANHTWDLVPCPPGTNVVTGKWLFRHKLTSDGSLDRYKARWVLRGFTQRPGVDYDETFSPVVKFATVRAVLSLALSRDWAIHQLDVKNAFLHGTLTETVYCSQPTGFVDADRPDLVCRLNRSLYGLKQAPRAWYSRFASYLASIGFVEAKSDTSLFIYRRGNDTVYLLLYVDDIVLTASTADLLHRTIVALQREFAMKDLGPLHHFLGITAERRPQGLFLHQRQYAIDILERAGMSDCKPCSTPVDTQAKLSEDDGPPVADATSYRSLTGALQYLTFSRPDIAYAVQQVCLHMHTPREPHLTALKRILRYLRGSLDYGLLLRPSPTSELVVYTDADWAGCPDTRRSTSGYAVFLGANLVSWAAKRQPVVSRSSAEAEYRAVANGVAEASWLRQLLHELHSPLQRATLVYCDNVSAVYLSTNPVQHQRTKHVEIDLHFVRERVAAGDVRVLSVPTTLQFADIFTKGLPSSVFLDFRSSLNICTG

SEQ ID NO: 294326 - protein, 1231 aa, Zea mays
  unsure (1)..(1231): unsure at all Xaa locations
  Clone ID: MRT4577_31511C.1.pep
MWPGQAPSTPRPPAPALLTTPHYGAPPYGVPVAPQAPPALLPPGTHTSTPWSPPAGGWDSTSLAAAFSTMAMTPPPSDWVIDSGASYHTTPTAGTLSRSHPPLPSHPSSIVVGNGSTLPVTSVGASVLPRPFYLNDVLVAPHITHNLLSVRRFTTDNSCSIEFDPSGFSVKDLATRTLLARCDSSGPLYTLQPXPPACLHLLPWSPXSSTTWHRRLGHPGPDVMTKITSSLDLSCSRGHFEGLCHACQLGRHTRLPFTTSSSRAEQAFDLVHCDLWTSPVLSLSGYKYYLVILDDFSHFLWTFPLRLKSDTFTTLTHFFTWVSTQFRRPVRALQCDNGREFDNNASRSFFLTHGVQLRLSCPYTSAQNGRAERMIRTTTNMLRCLLFQASLSASYWAEALHTATHLLNRLPSKAVRHPTPHFALYGTAPSYDHLRVFGCACYPNTSATAPHKLSPRSTRCLFLGYSPDHKGYRCLDLTSHRIIISRHVVFDEDVFPLAGSTPPTDLDSLLESDPIPPPPSAPRLAPLPAPRAAPTTSSAPRAAPSTPPAPRAAPSTPPAPRADPSTPPAXRGPVDPACATRGPVGPAXPRTAPSIPPAPRAAPSTPPTPRAAPSTPAXSPTPPSSTIAAATPLPRHPPTRAHRRARPASPTPPSSITAVSRPLQPLPTXVAHSESSVYHPVAIHRDPGHVHPMVTRRAAGVLRPVDRLILAAATTSTPPDASPVPSSVRTALADPHWRRAMEEEYAALLANHTWDLVPRPPGTNVVTGKWLFRHKLTSDGSLDRYKARWVLRGFTQRPGVDYDETFSPVVKFATVRAVLSLALSRDWAIHQLDVKNAFLHGTLTETVYCSQPTGFVDADRPDLVCRLNRSLYGLKQAPRAWYSRFASYLASVGFVEAKSDTSLFIYRRGDDTVYLLLYVDDIVLTASTADLLHRTIVALQREFAMKDLGPLHHFLGVTAERRPQGLFLHQRQYAIDILERAGMSDCKPCTTPVDTQAKLSEDDGPPVADATSYRSLTGALQYLTFSRPDIAYAVQQVCLHMHTPREPHLTALKRILRYLCGSLDYGLLLRPSPTSELVVYTDADWAGCPDTRRSTSGYAVFLGANLVSWAAKRQPVVSRSSAEAEYRAVANGVAEASWLRQLLHELHSPLQRATLVYCDNVSAVYLSTNPVQHQRTKHVEIDLHFVRERVAAGDVRVLSVPTTLQFADIFTKGLPSSVFLDFRSSLNICTG

SEQ ID NO: 294327 - protein, 222 aa, Zea mays
  unsure (1)..(222): unsure at all Xaa locations
  Clone ID: MRT4577_31512C.1.pep
DLTXHCIISXRHVXFDEDVFPLAGSTPPTDLDSLLESNPVXPTPGAPPCAVTCTSCGHDATARAHFRATRGPVDPACATRGPVDPACATRGNVDPACATRGPDERGPLRQPRARXYHRREPAIPAALDVPTVRSEPSVYHPVAIHRDPEHVHPMVTRRAAGVLRPVDPHWRRAMEEYAALLANHTWDLVPRPPGTNVVTDKWLFRHKLTSDGSLDRYKALGP

SEQ ID NO: 294328 - protein, 980 aa, Zea mays
  unsure (1)..(980): unsure at all Xaa locations
  Clone ID: MRT4577_31513C.1.pep
MAASPDQFRGHARLPHFAAPLRYDLRLRPDLAACTFTGAAAIAVVVSAPTRFLVLNAAELDVDRASIRFQDLAPTDVAQFDEDEIMVISFDRELPFGEGVLTMDFTGTLNDQMRGFYRSKYVYNGESRNMAVTQFEAADARRCFPCWDDPAFKAKFKLTLEVPSDLVALSNMPVAMIRCLLFQASLPATYWAEALHTATHLLNRLPSKAVSHPTPHFALYGTSPSYHHLRVFGCACYPNISATAPNKLSPRSTRCLFLGYSPDHKGYRCLDLTSHRIIISRHVVFDEDVFPLAGSTPPTDLDSLLESDPVPPPHPVPRLAXTCSSCSHDATARARFRAXVAPSTPPAPRAATTIMPAPRAAPSVLPAPRAAPSTPPAPRAAPTILPAPRATPSTPAXSPTPPSSTIAAATPLPRXAPDAGPSTSAARFADPAXLSPPXPAPPAAPDVPVANSESSVYHPVAIHRDPGHVHPMVTRRAAGVLRPVDRLILAATTTSTPSDASPVPSSVRTALADPHWRRAMEEEYAALLANHTWDLARWVLRGFTQRPGVDYDETFSPVVKFATVRAVLSLALSRDWAIHQLDVKNAFLHGTLTETVYCSQPTGFVDADRPDLVCRLNRSLYGLKQAPRAWYSRFASYLASVGFVEAKSDTSLFIYRRGDDTVYLLLYVDDIVLTASTADLLHRTIVALQREFAMKDLGPLHHFLGITAERRPQGLFLHQRQYAIDILERAGMSDCKPCSTPVDTQAKLSEDDGPPVADATSYRSLTGALQYLTFSRPDVAYAVQQVCLHMHTPREPHLTALKRILRYLRGSLDYGLLLRPSPTSELVVYTDADWAGCPDTRRSTSGYAVFLGANLVSWAAKRQPVVSRSSAEAEYRAVANGVAEASWLRQLLHELHSPLQRATLVYCDNVSAVYLSTNPVQHQRTKHVEIDLHFVRERVAAGDVRVLSVPTTLQFADIFTKGLPSSVFLDFRSSLNICTG

SEQ ID NO: 294329 - protein, 79 aa, Zea mays
  Clone ID: MRT4577_31514C.1.pep
GPPPPQNLVRKKKGGLGNQPPAAWVPRWGLNRGLKTWLGWGFPWRPPLFYSGGVFVPRILKLGGGFIRGGPGLGGPQPK

SEQ ID NO: 294330 - protein, 235 aa, Zea mays
  unsure (1)..(235): unsure at all Xaa locations
  Clone ID: MRT4577_31515C.1.pep
GTYDTLRVFGCACXPNTSATAPHKLSPRSTCCLFLGYSSDXKGYRCLDLASHRIIISRHVVFDEDVFPLDGXTRPTDLDSLLESDPVSPXPGAPPCAVTHTPSGLDAATRAYSRAPHGPVDHACATRGPVDHACATRGPADPPXVDQACARRSPVDAHGSLRRPHARLSPPLXHVTTSAPADPGPSTSPVRFADPAVVYHRRESATPAALDVLVDHPEPPVYHPVAIHRDPGHVH

SEQ ID NO: 294331 - protein, 68 aa, Zea mays
  Clone ID: MRT4577_31516C.1.pep
PRIDHTVPALLVNRLTWLRGCLTKIIVKKSVKLLLSAHYERHEWLKSWWPIPIGIHDLAGRKLQECDS

SEQ ID NO: 294332 - protein, 558 aa, Zea mays
  Clone ID: MRT4577_31517C.1.pep
MVTRRAAGVLRPVNRLILAAATSSTPPDASPVPSSVRTALVDPHWRRAMEEEYAALLANHTWDLVPRPPGTNVVTGKWLFRHKLTSDGSFDRCKARWVLWGFTQRPGVDYDETFSPVVKFATVRAVLSLALSRDWAIHQLDVKNAFLHGTLTETVYCSQPTGFVDADRPDLVCRLNRFPYGLKQAPRAWYSRFASYLASIGFIEAKSDTSLFIYRRGDDTVYLLLYVDDIVLTASTADLLHRTIVALQREFAMKDLGPLHHFLGITAERWPQGLFLHQRQYAIDILERAGMSDCKPCSMPVDTQAKLSEDDGPPVTDATSYRSLTGALQYLTFSRPDIAYAVQQVCLHMHTPREPHLTALKRILRYLRGSLDYGLLLRPSPTSELVVYTDADWAGCPDTRWSTSSYTVFLGANLVSWAAKRQPVVSRSSAEAEYRAVANGVAEASWLRQLLHELHSPLQRATLVYCDNVSAVYLSTNPVQHQRTKHVEIDLHFVRERVAAGSWVHIPTVPRIDPPVLAMHNPLDCHDCVQKGDVFLIGFVGHRSVKVVTEIGALQELS

SEQ ID NO: 294333 - protein, 359 aa, Zea mays
  Clone ID: MRT4577_31518C.1.pep
MKLFIGLVLLFFVCSSFAGDVLELTPENFDTVLDGSRPALVEFFAPWCGHCKNLAPEYEKLATAFKKAGDKVVIASVDADKYRELGSRFDVKGFPTIFYFKSGNVAEKEQYNGDRSAEGMAKFINEQAGTNARIVKPPSFVKVLDATNFDSIVGDSSKNVLVEFYAPWCGHCKSLAPKYEELGAVYSNEKEVVIAKIDCDAEGNNAIASRFGVTGFPTLKWFPKGRKSEKEEEAYNGERTVEGFVNFINERAGTKRTIAGGFKEDYGRLSFFDDLVNTLVAGDNSAIAAAENKAKELTGQDREFADIYVRFMKVYQKRGSSFPKEEIQRLGRLLQGSGVTRAKRDEFVLKTNILTSFTD

SEQ ID NO: 294334 - protein, 122 aa, Zea mays
  unsure (1)..(122): unsure at all Xaa locations
  Clone ID: MRT4577_31519C.1.pep
WPPPPVTTSPPGLPPRPARVLPTSLLCTGQPQPPPSSTTTPPGLPPGPARVLPTSAPPDLASRATRHAPASSPVXPSPTRLTGHPPPGFPPTRPXSPTPPXSPPPXPPTPCCHPPSPPSRRP

SEQ ID NO: 294335 - protein, 166 aa, Zea mays
  Clone ID: MRT4577_3151C.1.pep
MMETPETISKGDTAKTVEVCSAHGITSNEFSELRERAVAAKATAYCPYSQFRVGATVLSSEGELTSGANVENAAYPVGTCAERVALGTAVTSGHRGFRAIAVATDIAPSASPCGMCRQFIREFCTLDTPIIMFDKNEDFVIAKLRQLLPMSFGPDQLPPPGAPGTR

SEQ ID NO: 294336 - protein, 99 aa, Zea mays
  unsure (1)..(99): unsure at all Xaa locations
  Clone ID: MRT4577_31520C.1.pep
INKRALFIPKIAMKFPRAACGCADPYADPGQGAQIRQIPPGIDRIGSESAQIDGVGRGAPTLADPSWRPMTRRTSSRGGRSRSXAHRRPRPRTGAPAVG

SEQ ID NO: 294337 - protein, 76 aa, Zea mays
  Clone ID: MRT4577_31521C.1.pep
NSKGSPACLCQNETKIYRRRRCNRVPGGGGGLGGGVEREPLTLGGWAKMVSDPGRTRRARGFPPKGRGSRCWGVPG

SEQ ID NO: 294338 - protein, 59 aa, Zea mays
  unsure (1)..(59): unsure at all Xaa locations
  Clone ID: MRT4577_31522C.1.pep
TXGMAXXVAXARICIVLXPIXDXIWXHXXXXXRCTSKXRFSTVNIIYTGIKXQNQXAXT

SEQ ID NO: 294339 - protein, 701 aa, Zea mays
  Clone ID: MRT4577_31523C.1.pep
SDNGREFDNNASRSFFLTHGVQLRLSCPYTSAQNGRAERMIRTTTNMIRCLLFQASLPATYWAEALHTATHLLNRLPSKAVSHPTPHFALYGTTPSYDHLRVFGCACYPNTSATAPHKLSPRSTRCLFLGYSPDHKGYRCLDLTSHRIISRHVVFDEDVFPLAGSTPPTDLDSLLESDPVLPTPGAPPCAVTCTSCGHDATARAHSRATRGPVDPACAPRGHVGHACATRGPVDHACVTRGPDDHACAKRGPVDPACAMRCLVDPACATRCLVDPACATRGPVDPGSLRRPRARLPPSAGHAATSAPADSGPSMSANRFGDPAVVYHRREPAIPVAPDVSAVRSEPSVYHPVAIHRDPEHVHPMVTPRAAGVLRPVDRLILAADTTCTPPDASPVPSSVRTALADPHWCRAMEEEYATLLVNHTWDLVPCPPGTNVVIGKWLFRHKLTSDGSLDRYKARWVLRGFTQRPGVDYDETFSPVIKFATVCAVLSIALSRNWAIHQLDVKNAFLHGTLTETVYYSQPTGFVDADRPDLVCRLNRSLYDLKQAPRAWYTRFTSYLASIGFVEAKSDTSLFIYRRGDDTVYLLLYVDDIVLTASTADLLQRTIVALQREFAMKDLWPLHHFLGITAERRPQGLFLHQRQYAIDILERAGMSDCKPCSTHVDTQAKLSEDDRPPVADTTSYRSLTGTLQYLTFSRLDL

SEQ ID NO: 294340 - protein, 121 aa, Zea mays
  Clone ID: MRT4577_31524C.1.pep
VGFFFIFFFFFPLFFFFFLSLGNWKTRKLEPYSIHYKGYQGPPGEWEKKKYLARRHFEKPGPNLSLFSPTKIPPGPELSPPELTKAPRVFFTRPPGWAPWWGTIFKGFNFSLIAGAFVPLP

SEQ ID NO: 294341 - protein, 192 aa, Zea mays
  Clone ID: MRT4577_31525C.1.pep
SSGRPGRFKKKKKKKKKKKKKKKKKKKKKKKKKKKKKKNFTYPKKTHKEKIVLFFVRGPVWGFFCNFPSGWLSFFLSFWGPFSLFLGGLYIPLAGVFQIGLGETPVFPHFIPLGVPPLFPFWLFSLLARSVGLSKQWPILFGNCAPPVRGHYPPFFWRFPPGGRFLFPPPYPPFFLFFSLLYLRVSPVFPKF

SEQ ID NO: 294342 - protein, 41 aa, Zea mays
  Clone ID: MRT4577_31526C.1.pep
NRSQSQCTHLVHPLLVCVSNTMYLPRLDRAYLNPKVKVRDL

SEQ ID NO: 294343 - protein, 99 aa, Zea mays
  Clone ID: MRT4577_31527C.1.pep
LFPRIDPLTCSRGHTSARPDFFISATLPYVSVSKSPYRSDLWWLKIQPMIFMGLTTSKSQVVPGTLRGFCFLYSSRCVRPCGIIGVGPFPSYSRCRSAL

SEQ ID NO: 294344 - protein, 67 aa, Zea mays
  Clone ID: MRT4577_31528C.1.pep
AKSRGSSHPPKNPFKRLTRTPPSHSRTKFDLCQNGARAAHSSKNELAPTAAATLRTRQGKRGRTRGR

SEQ ID NO: 294345 - protein, 76 aa, Zea mays
  unsure (1)..(76): unsure at all Xaa locations
  Clone ID: MRT4577_31529C.1.pep
GRVGVNLHGSAKNLPASCAXKAKXSPELWMFPQHVVPTMRTPLCILNASYDSWQAKNVLTPSSVDPNKTWXNCKLD

SEQ ID NO: 294346 - protein, 56 aa, Zea mays
  Clone ID: MRT4577_3152C.1.pep
RHSQVEMPCPHCRMIRLHHPTVNSLVSKAGSAPKADPVEPQHVCDHALGTGAHCFI

SEQ ID NO: 294347 - protein, 63 aa, Zea mays
  Clone ID: MRT4577_31530C.1.pep
SHSYFCMRCLRYKSALMLTTSYSLPNSEIPLINDSLHYSKTQLFIHIGYIHPLHHATYLYHPS

SEQ ID NO: 294348 - protein, 141 aa, Zea mays
  unsure (1)..(141): unsure at all Xaa locations
  Clone ID: MRT4577_31531C.1.pep
SLEKSYELPDGQVITIGNERFRCPEALXQPSFLGMESCGIHETVYSSIMKCEVDIRKDLYANTVLSGGTTMYPGIADRMQKEITALAPSTIKIKIIAPPERKYSVWIGGSILASLSTFQQMWISKQEYDESGPGIVHRKCF

SEQ ID NO: 294349 - protein, 37 aa, Zea mays
  Clone ID: MRT4577_31532C.1.pep
VPYRLIIDLTVHYDPRESCGNFLFYFSTMTFHKNGFT

SEQ ID NO: 294350 - protein, 93 aa, Zea mays
  Clone ID: MRT4577_31533C.1.pep
KMLLRSKIHFLPFFYGYVRIFQWTKFCYKRKSDGEALLVFDGTLLSIGTLGHVMVVMVMNLGVRRKMDFFGGEMLACLNQPKKKKKKKKKKEK

SEQ ID NO: 294351 - protein, 190 aa, Zea mays
  Clone ID: MRT4577_31534C.1.pep
MGSASSPPSHRRWSWGSALAGAATTAAATALVLCRPRDPRFELISISLSAFHFRPPAALDIGLTLTVHATNPNVVPVRYGPSTVSILYGGAHLGTARLDAGEQPATSCRLLHLPARLDGVELAHRARALLSDVARRHMELDAAVEIAGEAAVLLWSRPFSVRIDSHITVDPVFLEVVEQENRSEMQLYLA

SEQ ID NO: 294352 - protein, 43 aa, Zea mays
  Clone ID: MRT4577_31535C.1.pep
IYQTYLPLSSIKILFLFCPLIFNQFPPFLQTPYTRINPFYLPH

SEQ ID NO: 294353 - protein, 199 aa, Zea mays
  Clone ID: MRT4577_31536C.1.pep
YKYYLVILDDFSHFLWTFPLRLKSAHYHPHTLLRLGITQFRRSVRALQCDNGREFDNNASRSFFLTHGVQLRLSCPYTSAQNGRAERMIRTTTNMLCCLLFQASLPASYWAEALHTATHLLNRLPSKAVSHPTPHFALYGTAPSYDHLRVFGCACYPNTSATAPHKLSPRSTHCLFLGYSPDHKGSRCLDLTSHCIIIS

SEQ ID NO: 294354 - protein, 48 aa, Zea mays
  Clone ID: MRT4577_31537C.1.pep
PLVRPRVRPRVRPRVRKKKKKKKKKKKKKKKKKKIKNKKIKKKKNEKK

SEQ ID NO: 294355 - protein, 168 aa, Zea mays
  unsure (1)..(168): unsure at all Xaa locations
  Clone ID: MRT4577_31538C.1.pep
ENVFPXXGSTPPTDLDSLLESDPIPPPPXGSPPCAVTCSSYGHYDLFRATRGPVDPACATRGFFDPACATRGPVDPTCATRGPVDPACATRGPVDPACATRGPIDPACATRGPVDSGSIRQPRPRLPSXRGHATTSAPPDSGPSTSAARFADPAVVYHRRKPAPGAAH

SEQ ID NO: 294356 - protein, 861 aa, Zea mays
  unsure (1)..(861): unsure at all Xaa locations
  Clone ID: MRT4577_31539C.1.pep
RTGREFDNHASRSFFLTSGIQLRLSCPYTSTQNGXGQRMIRTTTNMIRCLLFQANLPASYWAEALHTATHLLNRLPSKAVSHPTPYFALYGTAPTYDHLRVFGCACYPNTSATAPHKLSPRSTRCLFLGYSFDHKGYRCLDLASHRIIISRHVVFDEDVFPLAXPSPPTDLDSLLESDPSPPXSQVPRLAPLPAPRAASTPRLAPIPAPRAVPSITPAPRAASSTTPAXARPTDPSRTMRGPVDXPRLASPTPRSSTIAAATSLPRXADPGPSTSPXASLTPPSITAVSRPHLRPPTSRQTAPSHRCTTRSPSTATXGHVHPMVTRRAAGVLQPNSARVLAADTTTTPPDASPVPSSVRTALADPHWXRAMEEEYAALLANHTWDLVPCPLGTNVVTGKWLFRYKLTSNGSLDRYKARWVLQGFTQHPGVDYDETFSPVVKFAIVRTVLSLALSWDWXIHQLNVKNAFLHGTLTKTVYCSQLTGFVDEAHPDLVCRLNRSLYGLKQAPRAWYSRFASYLASIGFVEAKSDTSLFIYRRGDDTVFLLLYVDNIVLTASTADLLQRTIVALQREFVMKDLGPLHHFLGITAEHRSQGLFLHQRQYAIDILERAGMSDCKPCSTPVDTQAKLSEDDGPPVANATSYRSLTGALQYLTFSRPDIAYAVQQVCLHMHTPREPHLIALKRIMRYLRGSLDYGLLLRPSLTSELVVYTDADWAGCPDMRRSTSGYAMFLGVNLVSWAAERQPVVSRSSAEDEYRAVANGVAEASWLRQLLHELHSPLQRATLVYCDNVSAVYLSTNLVQHQRTKHVEIDLHFVRERVAAGDVRVLSVPTTLQFADIFTKGLPSSVFLDFRSSLNICTG

SEQ ID NO: 294357 - protein, 77 aa, Zea mays
  unsure (1)..(77): unsure at all Xaa locations
  Clone ID: MRT4577_3153C.1.pep
SPTYHGYYLTDEPGVXHFVWQPNQESSVLVMSRAFDDYYIEDCGVILASEVTQRRIDNSDQFVILATVRVAFVPTCL

SEQ ID NO: 294358 - protein, 447 aa, Zea mays
  Clone ID: MRT4577_31540C.1.pep
MVTRRATDILRPIDRLILAANTTTTPLDASPVPSSVRTALADPHWRRAMEEEYAALLANHTWDLVPCPPGTYVVTSKWLFRHKLISDGSLDRYKARWVLRGFTQCPGVDYDETFSPVVKFATVRTVLSLALSWDWAIHQLDVKNAFLHGTLTETVYCSQPTGFVDKARPDLVCGLNRSLYSLKQAPWAWYSRFASYLASIGFVEAKSDTSLFIYLRGDDTVFLLLYVDDIVLTASTANLLQRTIVALQQEFAMKDLGPLHHFLGITAERRPQGLFLHQRQYAIDILERAGMSNCKPCSTPVDTQAKLSEDDGPPVADATSYRSLTGALQYLTFSRPDIAYTVQQVCLHMNTPREPHLTALKQILRYLCGSLNYDLLLRPSLTSELVVYTDADWAGCPDTRRSTSGYAVFLGTNLVSWAAKRQPVVSRSSAEAEYRAVANGVAEASSL

SEQ ID NO: 294359 - protein, 771 aa, Zea mays
  unsure (1)..(771): unsure at all Xaa locations
  Clone ID: MRT4577_31541C.1.pep
MIRTTSNMIRCLLFQASLPASYWAEALHTATHLLNRLPSKAVSHPTPYFALYGTAPTYDHLRVFGCACYPNTSATAPHKLSPRSTRCLFLGYSSDHKGYRCLDLASHRIIISRHVVFDEDVFPLAGPSPPADLDSLLESDQVSPPPSLDAAARAYSRATRGPVEXTPAPRAASTTPPAPRAAPSTPPAPRAAPMTPPAPRAAPPXRLASPTPRSSTTVAATPPPRXAADPGPSTSTARFADPAVPAPSRLCTTRSPSTATXGHVHPMVTRRTAGVLRPVDRLILAADTTCTPPDASPVPSSIRAALADPHWRRAMEEEYAALLANHTWDLVPRPPGTNVVTGKWLFRHKLTSDGSLDRYKARWVLRGFTQRLGVDYDETFSPVVKFATVRVVLSLALSRDWAIHQLDVKNAFLHGTLMETVYCSQPTGFVDADRPDLVCRLNRSLYGLKQAPRAWYSRFASYLASIGFVEAKSDTSLFIYRRGDDTVYLLLYVDDIVLTASTTDLLQRTIRQYAIDILERAGMSDCKPCSTPVDTQAKLSEDDGPPVTDATSYRSLTGALQYLTFSRPDIAYAVQQVCLHMHTPREPHLTALKRILHYLRGSLDYGLLLRPSPMSELVVYTDADWAGCPDTRRSTSGYAVFLGTNLVSWAAKRQPIVSRSSAEAEYRAVANGVAEASWLRQLLHELHSPLQRATLVYCDNVSTVYLSTNPVQHQRTKHVEIDLHFVRERVAVGDVRVLSVPTTLQFADIFTKGLPSSVFLNFRSSLNICTG

SEQ ID NO: 294360 - protein, 987 aa, Zea mays
  unsure (1)..(987): unsure at all Xaa locations
  Clone ID: MRT4577_31542C.1.pep
HIHSPTKTKEYGEDLLPFVLDALSEIAFHPKFSSSRVEKERRAILSELQMMNTIEYRVDCQLLQHLHSENKLSNRFPIGLEEQIHKWDPDKIRRFHERWYYPANATLYLVGEIDDIPRAVREIEAVFEHTLSENEGNPVPSANPFGAMASLFAPKLPGGFTSNLTGEKSPATDKLDELKLQHNPSFVPLXQRGECGGKCLTVKLXYITTPSLLRNFXSTTRLHKMKLGLVSCXKDLRSVLMKRIFLSALHFRINTRYKSSNPPFTSVELDHSDSGREGCTVTTLTVTAEPQNWRSAIKVAVHEVRRLKEFGVTMGEMTRYMDALIKDSEQLAMMIDSVPSVDNLDFIMESDALGHTVMDQLQGHESLLAVAETVTLEEVNTVGAEVLEFISDFGKLNAPLPAAIVACVPQKVHVDGAGETEFEIYPEEITEAIKAGLEEPIYREPELEVPKELITQSELDDLKSQCNPSFVPLTKEENAVKVFDSETGIAQRRLSNGISINYKITQNEARVGVMRLIVGGGRATEDSESKGSVIVGVRTLSEGGCVGNFSREQVELFCVNNLINCSLESNEEFIFMEFRFALRDNGMRAAFQLLHMVLEHNVWLEDAFDRATQLYLSYYRSIPKSLERSTAHKLMLAMLNHDERFVEPSPHSLQKLTLQSVKNAVMNQFVGGNMEVSIVGDFTEEEVESCVLDYLGTVRASSSLNTEERIEKISFRPFPSDVHFQQVYIKDTDERACAYIAGPAPNRWGFATEGNDLFNVIRISDADAEVSEPVSLDLTGKRHINVRSHPLFFGITLSLLGGYXYINSRLFTTVRDSMGLTYDVSFELNLFDKLGLGWYVIAVTSTPSKVHKAVDACKGVLRGLHSSRIVERELDRAKRTLLMKHEAETKTNAYWLGLLAHLQSSSVPRKDVSCIKELTTLYENATIEDLYIAYEHLKVDDSSLFACIGIAGAESGEDTNDDEPDVDLHGMGPMGGRGLSTMTRPTT

SEQ ID NO: 294361 - protein, 330 aa, Zea mays
  Clone ID: MRT4577_31543C.1.pep
MGEEREFVGARLDAGLRAARFSSPPSADEFAADVEPKNVPAVFRGVVKEWAASSRWDPLHGGLDYLLEKVGPDVAVEAMMSNTGHVFYGDLRSHERVSVSFSTFIQSCKSYLDHMNAASDSSKEQGMLGEPASSRETCSNSSENLEQVYLAQVSIMNAENKEGCSLQVLEGDIQEPIFLRGKSFSSINFWMNKGHLRSSTHYDPHHNLLCVVSGRKKVTLWPPSASPFLYPLPVYGEASNHSSVSVEEPDYSIYTRARYMKEYSETVILNCSDVVFIPEGWYHQVDSDDLTIAVNFWWKSRIMTQMLEHMDAYYLRRIMSNEDWRTRTCA

SEQ ID NO: 294362 - protein, 191 aa, Zea mays
  unsure (1)..(191): unsure at all Xaa locations
  Clone ID: MRT4577_31544C.1.pep
CGRFERPGSRKKKKKKIKQRKKKKKKKKKKKKKKPFWEKKKKKKAPRPAPPLKLGNPPGCGISIXTFSIPPTPRGGPDPISPYRESFYPPSWAAFLNRRDGKTPGFPQFNPFEKIPLFPSWVKTKKAPPNPLSQNLPTLNGKGNFKPLIFFKISRKFFVKPPLFLTQKAKIGKFPFNSKKKTKIGLSVFPF

SEQ ID NO: 294363 - protein, 93 aa, Zea mays
  unsure (1)..(93): unsure at all Xaa locations
  Clone ID: MRT4577_31545C.1.pep
SXXVGRFXXRXXKPTEPGDXWXSKIXXXXNFDXKDPLNXLVXLTVSPKRNXSLETRKKXXRESXKFNXHSRPXXSHQLRKRSXCNTHYLKNXR

SEQ ID NO: 294364 - protein, 63 aa, Zea mays
  Clone ID: MRT4577_31546C.1.pep
ARPIYDRAIRNDYRDINAYYQDRQALQSQYDLNDDRNANSRRARYTARTLVHISHETKLTSRL

SEQ ID NO: 294365 - protein, 172 aa, Zea mays
  unsure (1)..(172): unsure at all Xaa locations
  Clone ID: MRT4577_31547C.1.pep
MAAEDKETDSPQPPAKLPRLSCADTSAGVAASSPLVLGLGLGLGGGGERDADASPATATPKRPSALTFMQQQELEHQVLIYRYFAAGAPVPAHLVLPIWKSVAASSFGPQRFPSLMGLGNLCFDYRSSMEPEPGXRCRRTDGKKWXRCSREPWCPGPQVLASGARPPAGPRA

SEQ ID NO: 294366 - protein, 602 aa, Zea mays
  Clone ID: MRT4577_31548C.1.pep
MAVGGDANGGGGGVRQRQRGCSCTKADFFPEESFSSWSAYGRALRSTGPRLADRLTSRSLESTELHEVRARSGADMKRDLTWWDLVWFGVGAVIGAGIFVLTGQEAREDVGPAVVVSYVVSGVSAMLSVFCYTEFAVEIPVAGGSFAYLRVELGDFMAFVAAGNILLEYCIGGAAVARAWTSYFATLLNHQPSDFRIHASSLSADYSELDPIAVVVIALVCIFAVASTKGTSRFNYVLSIVHIAVIVFIIVAGLTKADAANMRDFMPFGVRGIFSASAVLFFAYIGFDAVSTMAEETKNPARDIPIGLVGAMTLTTALYCVLAVTLCLMQPYASIDKDAPFSVAFSARGMDWAKYIVAFGALKGMTTVLLVSAVGQARYLTHIARTHMMPPWLAQVHPRTGTPVNATVVMLVATAIIAFFTDLGILSNLLSISTLFIFMLVAVALLVRRYYVAGETTVANRNKLAACIIAILATSSATATCWGVNVNGWVPYAVTVPAWFASTVCLWAFVPQARAPKLWGVPLVPWLPSASIAINVFLLGSIDYKSFMRFGFWTAGLLVYYLFVGLHASYDTAKALAAESAMAKVEDGDGKPARGAVHNGEY

SEQ ID NO: 294367 - protein, 112 aa, Zea mays
  Clone ID: MRT4577_31549C.1.pep
SARDWYYNIILDRGIVYLETGYVVKLHRIATLAPAQQGFTFTHTNSSQNANIQRYTKTQLEMLPNMDTYLVHGFAGYLDSVLYKDDHVGMEPNTVTTNSVSWFPSFFPLRKP

SEQ ID NO: 294368 - protein, 53 aa, Zea mays
  Clone ID: MRT4577_3154C.1.pep
TSTGRTHERSHACIEAITVLLTMIYLHGSITTYMMPLYVSALAMAKRMLHYCT

SEQ ID NO: 294369 - protein, 510 aa, Zea mays
  Clone ID: MRT4577_31550C.1.pep
MAGWISSKLKAAETLLHQIDQQAAESLGKSPSASDLATLHSTTSRSADDLLDVPLPRRQPPSGPPPSLGLRLAAKRRSPPSQGPRRSASAAAMLAVQDQAGGEPTVGVVAEVKPETDRGDREDGKSVASESGSDEDFLWSGPTGAEDSEEERRREEERTRRRAERLAAMAARAIAEREDAVARLEGEKAGLEKLLAEREKEQAQEASELQTSMIETLEAVEIEKQRHHSTRMEALARLARLEVTNGELAKSLAREQWNLEVQVDQVAQLREEVELKKLTQDKYRRKLTKIQKTSAPPVDEIESLRRFKLEEEIIDAEYTLTCDRIVSLKDKARKIEESIELTRRDMVHPTEVEIELKKRLDQLTDRLIQKQMQVESLSSEKAALLMRIEVTRLLDNSTSSSASSNSSRLDIEAGAWQQSHSPTITFTNNHIRDRIRAGQQQLGSAIRQLDSIFSAGHIFLRRNPKAQVWALVYLVCLHLWVLYILTSHPTVSETRSGATFSLETLNKTST

SEQ ID NO: 294370 - protein, 147 aa, Zea mays
  unsure (1)..(147): unsure at all Xaa locations
  Clone ID: MRT4577_31551C.1.pep
KTTGPIHHRGHGRGGTHPKGDPPPGAQPTHPIPLIPPSTQPPPGPWPPRPGAVGPPXSGARTPPPPPLGTPPGPPXTPPNSSPGEGGPATSSLASPGPWVASPXPPPGGGPPWPPPPXGPFPRLAFPVPXGKPLEGPQECFPHEPAA

SEQ ID NO: 294371 - protein, 213 aa, Zea mays
  Clone ID: MRT4577_31552C.1.pep
MDGLLKGPPVGPDQVQQQQALTNSRIDLRAPAKPEAEAEADFAAQLRDAVPGAFTDLMNMDANGAVPDKAEKADNSMQKESGPADSDANVSSPRSKVADEDVEEVDKAWDRPSKRKSTEFDIAKSIELLASSFLKIEHARMEMYRETERMRVEAEIKKGEMELKRTEIMAKTHLQIARLFAKKLKQSSGKNGVSSSVTAEVDTLTKKGENGSG

SEQ ID NO: 294372 - protein, 249 aa, Zea mays
  unsure (1)..(249): unsure at all Xaa locations
  Clone ID: MRT4577_31553C.1.pep
MDKLAVSESKPAWRNEVQLDSVSEDGIGWSSIQTAQNQTSMKLAGMPICSFAAGGNCPYGEECPHMHGDLCAFCGKMCLHPYRPDERQEHIKLCEKNHKRLEALKRSQEIECSVCLDRVLSKPTAAERKFGLLSECDHPFCISCIRNWRGNSPTSGMDVNSALRACPICRKLSYYVIPSVLWYFSKEEKLEITENYKAKPKSIDCKYFDFGTGTCPFGTSCFYKHAYXXGRLEEVVLRHLDCDDGSTLI

SEQ ID NO: 294373 - protein, 60 aa, Zea mays
  Clone ID: MRT4577_31554C.1.pep
FLQIFFISSSLLLPARLLYIKKPSFLYLINHPSLLTHPNFFLNLPYSLSISLPLHPPKFT

SEQ ID NO: 294374 - protein, 35 aa, Zea mays
  Clone ID: MRT4577_31555C.1.pep
DGSPTIFVPNQNTIHIVICRSGIIVENHIKYLWSI

SEQ ID NO: 294375 - protein, 37 aa, Zea mays
  Clone ID: MRT4577_31556C.1.pep
SNYLGSLLTILLFTRKRAPPRQFAWAWHRGHPRLEPN

SEQ ID NO: 294376 - protein, 183 aa, Zea mays
  unsure (1)..(183): unsure at all Xaa locations
  Clone ID: MRT4577_31557C.1.pep
RREFAXDDFIRGHKHLLKRIHRRKPVHSHSLRTQASGPLAESQRRELEDEISRLRYEKSLLLADLQRQNQQQRGISWQMQSLESRLAQMEERQRSVVASLCDILRRRGVVRVPASAMETTDHSSKKRRVPIPKTDLFVAGEQPKVEEQQVLPFLQAVGAEAPGVSTIRVLDAEPFEKMELALV

SEQ ID NO: 294377 - protein, 46 aa, Zea mays
  Clone ID: MRT4577_31558C.1.pep
VTVRCFLRMQTAFSTQRLGIKFWVFSYSHLKEFSFQRATAGLLSTF

SEQ ID NO: 294378 - protein, 92 aa, Zea mays
  unsure (1)..(92): unsure at all Xaa locations
  Clone ID: MRT4577_31559C.1.pep
KKKKNVRYLRGXVXQIEWSKIQTPTDEVVVPYDTDASPPKDLEETKKLLDKLGEDKLSGGVGTTMGCTGPKGGVEDFFFCTXLDLSVIRMES

SEQ ID NO: 294379 - protein, 47 aa, Zea mays
  Clone ID: MRT4577_3155C.1.pep
REYLCTRLHIRVPANNSLTAPQGPLQVKLHLKDCDQVVRRALEVQNV

SEQ ID NO: 294380 - protein, 40 aa, Zea mays
  Clone ID: MRT4577_31560C.1.pep
IMSRIIQKARYKGQSPSYRAKARRSQISSNKKYKVNNVIK

SEQ ID NO: 294381 - protein, 95 aa, Zea mays
  Clone ID: MRT4577_31561C.1.pep
TLLVPVSSKHLGGSPHGHCWSGSVWSSSLGCMGHTGDRSRALFAFGVSGPASPPSSVSSRWRMRECLVPTVPSISRPPSTGYLAPNLVRQRDSHI

SEQ ID NO: 294382 - protein, 187 aa, Zea mays
  unsure (1)..(187): unsure at all Xaa locations
  Clone ID: MRT4577_31562C.1.pep
FGTRPGGTATHTPFRTQELEAPLDPGSDPEYRDFQFRFIPEVFELQMGGGVRNGDGKVTAEKVLGFEFDKVRISIASSDDEVDGEAPPRSSFSGASHPPEPVDEIDTVFVAVDGREKPVQKPIISWDASPPPSGAASPHSSIDSSGAAATTVTITSLAPSCTVTSRSVKTSVSISAAIDGXGWSNGT

SEQ ID NO: 294383 - protein, 105 aa, Zea mays
  unsure (1)..(105): unsure at all Xaa locations
  Clone ID: MRT4577_31563C.1.pep
CPGSCSRSAGPGASRRGCCCGWRRARSGRRGSRRWFGXRPPPAXXXRCRAPPXGPWRXAPGGCRPXRXCRRXPXSXVLXFXSASXVCWVGFACPRLVXXGXXWLA

SEQ ID NO: 294384 - protein, 231 aa, Zea mays
  Clone ID: MRT4577_31564C.1.pep
MDDYGNASAGTAPPQQYYCRSVSPPSRVSSSCSPPPPPPPPAVLQVVGNVPPTTVVLSPCAACKLLRRRCADGCVLAPYFPPTEPAKFTTAHRVFGASNIIKLLQDLPESSRADAVSSMVYEAEARLRDPVYGCAGAVCRLQKQANELKVQLARAQADLLNAQAKHTNLFALFCVEMANRRSNQQHPSPLTMMDGGGGGGFGAAAYYQQTTLYDSDLDSATWPDHEAQLWT

SEQ ID NO: 294385 - protein, 239 aa, Zea mays
  Clone ID: MRT4577_31565C.1.pep
MDDYGNAIVVTGTAAPLKYNCRSVSPPSSVSSSCSPPPPPPPPTPPAAVQVVVGNVAPTVVLSPCAACKILRRRCADGCVLAPYFPPTEPAKFTTAHRVFGASNIIKLLQDLPESSRADAVSSMVYEAEARLRDPVYGCAGAVCRLQRQANELKVQLARAQADLLSAQAQHADLLALFCVEMANRRGNRQQQQQPSPPTTTVDGGGGSEFGGAAYGQTFYDSDDLDSATWPDHEAQLWT

SEQ ID NO: 294386 - protein, 109 aa, Zea mays
  unsure (1)..(109): unsure at all Xaa locations
  Clone ID: MRT4577_31566C.1.pep
MTSGELACAYAALILSDNEIGVTDEKIDTIVNEYNIIVEPYWPELFAKRLEKRQVEDLIRSAASAGAAAPAGAAAPAGGAAXAAGPAAEEKNEXARTESXDDMVFTLFD

SEQ ID NO: 294387 - protein, 90 aa, Zea mays
  Clone ID: MRT4577_31567C.1.pep
LILAWDSTAGGKAWIMLAWHITAVGNMTLLGSEKNLIVCKHDRQAQLLDYNLTFWSQLRFRVPHSMIGTAMDSLIEIHVLIHTEGRRDHC

SEQ ID NO: 294388 - protein, 104 aa, Zea mays
  unsure (1)..(104): unsure at all Xaa locations
  Clone ID: MRT4577_31568C.1.pep
MATKISSLRTLTDLLTSSAHAIMIPQTSLTPKARIAQILTPLTEMGSXHADLLALLLLLALAMLALQLPIXQTQSSMLDTLTIXTNATQHQPQPLHPRLIHLHA

SEQ ID NO: 294389 - protein, 129 aa, Zea mays
  unsure (1)..(129): unsure at all Xaa locations
  Clone ID: MRT4577_31569C.1.pep
NFHRGVKQAFLFRERGGLWNFRAFFKGKRSLGPPSKILFWKAFFANGGPGNFLSPLGGXPPRGPLGAPAPIAGPCPFGPPXGPPPPRXAREGSYPPPWVEPPWPPVSPSFAPVFPPSFLTLPSPPPGGP

SEQ ID NO: 294390 - protein, 277 aa, Zea mays
  unsure (1)..(277): unsure at all Xaa locations
  Clone ID: MRT4577_3156C.1.pep
MDAVESAVAPAAPSMVENGSSSITVEEFEDLASLVKDDEASVSITVVGASGDLAKKKIFPALFALYYEGCLPKHFSIFGYARSKMTDAELRDMVSKTLTCRIDKRENCSEKMEEFLKRCFYHSGQYDSEEDFKELSKKIKQHEGPRVSNHLFYLSIPPNIFLDVVKCASKSASSVSGWTRVIVEKPFGRDSESSAALTKGLKQYLTEDQIFRIDHYLGKELVENLSVLRFSNLVFEPLWXRQYIRNVQLIFSEDFGTEGRGGYFDSYGIIRDIMQNH

SEQ ID NO: 294391 - protein, 116 aa, Zea mays
  Clone ID: MRT4577_31570C.1.pep
TGPTHSFDGSYIHSSTVSYVQDGMNIAEEEIYEPVQSFLMFKDLNEVIKRAISSQYGLTVGVFTNSLYTGNTLTLSLIAGTVCLNCLYVFDAAIPFGGYKISDIARQKGIDSLKNY

SEQ ID NO: 294392 - protein, 493 aa, Zea mays
  Clone ID: MRT4577_31571C.1.pep
MAARAKAAAVDDHDPMPPPLPLPWPRPAPLLVMLSLLATASYLALTRFPAALLPIAPRSRPHDAPAHAPGDSCAGFYAGAGPAREVWASVEEFGAVGDGATLNTAAFRRAVAELGARAVGGGGARLDVPPGRWLTGSFNLTSRFTLFLHRGAVILGSQDPEEWPLITPLPSYGRGRERLGPRHISLIHGEGLNDVVITGSNGTIDGQGHMWWELWRNRTLNHTRGHLIELVNSTNVLISSVTLSNSPFWTVHPVYCSNVVMKDLTILAPLDAPNTDGIDPDSSSEVCIEDCYIESGDDLVAVKSGWDQYGISFGKPSTNIVIQRVSGTTPTCSGVGFGSEMSGGISNVLVRDLHVWNSAQAVRLKTDVGRGGYITNITIASVAMEKVKVPIRFSRGADDHPDDRYDPAALPRISNVLVSDVVGVHLQRAPMLEAVPGAVYEGICFRNFSFRGIRRQQDSRWHCESVYGEAHDVFPAPCEEFRRDGSSSWCGLL

SEQ ID NO: 294393 - protein, 44 aa, Zea mays
  Clone ID: MRT4577_31572C.1.pep
ASSTRQLTAQLVPRLTIRQVCSEDQDRSFSDPPTVPAAWVAADE

SEQ ID NO: 294394 - protein, 433 aa, Zea mays
  Clone ID: MRT4577_31573C.1.pep
MGNRHLCCLCLLLLLGLASGQVLFQAFNWESWKQSGGWYNLLMGKVDDIASAGVTHVWLPPPSHSVSTQGYMPGRLYDLDASKYGTAAELKSLIAAFHGKGVQVVADIVINHRCADYKDARGIYCIFEGGTPDGRLDWGPHMICRDDTIYSDGTANLDTGADFAAAPDIDHLNDRVQRELTDWLLWLKSSDLGFDAWRLDFAKGYSPEVAKVYVDATAPTFAVAEVWNSMAYDGDNKPEYDQDPHRQALVDWVDRVGGAASPATVFDFTTKGILNAAVEGELWRLIDPQGKAPGVIGWWPAKAVTFVDNHDTGSTQAMWPFPSDKVMQGYAYILTHPGNPCIFYDHFFDWGFKDEIAALVAVRKRNGITPTSELTILEHDGDSYVAEIDGKVIVKIGSRYDVGHLIPAGFEVAAHGNDYAVWEKAGAEQVTRA

SEQ ID NO: 294395 - protein, 35 aa, Zea mays
  Clone ID: MRT4577_31574C.1.pep
GDLYSIHLPSFYNLITCKTLSLLNLISFHYILLSP

SEQ ID NO: 294396 - protein, 155 aa, Zea mays
  unsure (1)..(155): unsure at all Xaa locations
  Clone ID: MRT4577_31575C.1.pep
GRGNPHPILLLLHLFSPPLNHDTYSGRDTSRLILPVPRQSLRIHPSTATQSIPPLITHITPPPSCLTPXAAKGPKQSPEDAAAPQPPQIXLTSLLPPPLWSTLICLACTPSPTTSLSRRSRPRLKQPASSERKRPSKRSESVTQPPQRPSRPTTG

SEQ ID NO: 294397 - protein, 245 aa, Zea mays
  Clone ID: MRT4577_31576C.1.pep
DQRGGDGWRRAGGVLPRTMSEGTHLLVPILQKPFIFDIRTRPHSFSSTSGTKDLQMVSLTLRVLSRPDVEHLPDIFTSLGLEYDEKVLPSIGNEVLKAVVAQFNADQLLTERPHVSALVRESLTKRAREFNIVLDDVAITHLAYGQEFAQAVEKKQVAQQEAERSRFLVARAEQERRAAIVRAEGESESARLISEATTTAGNGLIELRRIEAAKEIASVLSRTPNVSYIPAGDNGQMLLGLNAAR

SEQ ID NO: 294398 - protein, 282 aa, Zea mays
  Clone ID: MRT4577_31577C.1.pep
MAGGGQAAISFMTRMAKVAAGLGVAASAASTSFYTVDGGERAVIFDRVRGVLPRTMSEGTHLLVPILQKPFIFDIRTRPHSFSSTSGTKDLQMVSLTLRVLSRPDVEHLPDIFTSLGLEYDEKVLPSIGNEVLKAVVAQFNADQLLTERPHVSALVRESLTKRAREFNIVLDDVAITHLAYGQEFAQAVEKKQVAQQEAERSRFLVARAEQERRAAIVRAEGESESARLISEATTTAGNGLIELRRIEAAKEIASVLSRTPNVSYIPAGDNGQMLLGLNAAR

SEQ ID NO: 294399 - protein, 64 aa, Zea mays
  Clone ID: MRT4577_31578C.1.pep
AHQAQGEHRGVLFHTMIVVCRSIVQHCSLPLVSISEPAYSVRYGITQKKCRSFFVEQAFFGFWR

SEQ ID NO: 294400 - protein, 89 aa, Zea mays
  Clone ID: MRT4577_31579C.1.pep
NSTPWFKEFGLDLLVWGYQFKPFFFGDPQRVLKAKGAFFPRKPWAFVPETGGIYSSGIFFFKKGCHNWGFLGSFAFYECPKLGAFKKVP

SEQ ID NO: 294401 - protein, 83 aa, Zea mays
  Clone ID: MRT4577_3157C.1.pep
GLQCRSHPTRPETGMGSPGLFFWNTPNKLNGRGFFFRRSRLFLRRGNRPLIWLVAPGLEPKRRRRKGLRWAAVNGDGALRGFG

SEQ ID NO: 294402 - protein, 39 aa, Zea mays
  unsure (1)..(39): unsure at all Xaa locations
  Clone ID: MRT4577_31580C.1.pep
ASHTXLXPHSPILIQIKELLLLLITLYCNLSSNTSLPLF

SEQ ID NO: 294403 - protein, 71 aa, Zea mays
  Clone ID: MRT4577_31581C.1.pep
PRVRGRVGEYTVAVRRMACALLDLMAEALNIPGGACHSARGTRPSRGGRYRQCASFRTQTWGHTTASRPAV

SEQ ID NO: 294404 - protein, 178 aa, Zea mays
  unsure (1)..(178): unsure at all Xaa locations
  Clone ID: MRT4577_31582C.1.pep
MKRRLSVAISLIGDPKVVYMDEPSSGFRPGSTPFLASSXKLANDSVXIAFSAHSMEEAEALCDRIGIMVNGSLQCIGNSKELKARYGGTYMLTVTAAAGEEAAVEQLVRSLCPAANGVYRISGTQKFEMPKQGLRISEVFQALERAKSWLNIAAWGLSDATLEDTFIKVASGSDASSV

SEQ ID NO: 294405 - protein, 68 aa, Zea mays
  Clone ID: MRT4577_31583C.1.pep
PPTRPLGNMKEMVGLSKDLLSWLEDMTSSGDLRSAFNVMWALTDVLEGGHSTCEGFVRAAMNASRSWS

SEQ ID NO: 294406 - protein, 51 aa, Zea mays
  Clone ID: MRT4577_31584C.1.pep
TRPPTIFKGTAVGKHSVIETRTPLDTFYLFFVPPFFFFFFFFFSDGVGGRG

SEQ ID NO: 294407 - protein, 58 aa, Zea mays
  unsure (1)..(58): unsure at all Xaa locations
  Clone ID: MRT4577_31585C.1.pep
GGRRTHTSRPYQENLLNMAEARREIVXALKIHRASSRRXATQVPAXQEPPLRQTPFAQ

SEQ ID NO: 294408 - protein, 125 aa, Zea mays
  unsure (1)..(125): unsure at all Xaa locations
  Clone ID: MRT4577_31586C.1.pep
SLITTFSQATRFTPVFLDYGVVFVLPTDLVYXSPRLQAYSKHNNQVSREDSLDQLEEARDIALLHSAKYQXSLWRYHERRVRPRGFQEGDLLPRIRQXTXGHHKLTPRWEGPFIITKVLKPGTYK

SEQ ID NO: 294409 - protein, 143 aa, Zea mays
  Clone ID: MRT4577_31587C.1.pep
AAFFFFFLVIHRQCLIIQKGWDRGTHTYACKRRINDGRKYKWVMRIAIAIIGRLISTLSRSLLFFCFGYTPRGSCCFLLLQLQVGAATIRACIHVGVEARSTGDEVIDLRAAVVPVAGLLRAPVQVLVHVADREMCRRSRRRQ

SEQ ID NO: 294410 - protein, 104 aa, Zea mays
  Clone ID: MRT4577_31588C.1.pep
MIRRTTVCLGLLLLLLAASTATAHFSIGDVDEYLNRRTQESRHRNHGGAQINDLISSAARFHANVDARAYGRRSNLQLQEEEAAATAGRVTKAEEQEASTQGGD

SEQ ID NO: 294411 - protein, 75 aa, Zea mays
  unsure (1)..(75): unsure at all Xaa locations
  Clone ID: MRT4577_31589C.1.pep
MPLLVSATNAFIIPQCSLASSAYITQFLSPVYXMGFEHPALQVYRLQLALAESVLQLPIAQLQSQXLVHLNLQTI

SEQ ID NO: 294412 - protein, 138 aa, Zea mays
  Clone ID: MRT4577_3158C.1.pep
RGRTRVDRACESSVDIYFRRQVELSTMYRHMEKHNYESAAEAIQAVRDNKLHAFIWDSAVLEFEASQKCDLVTTGELFFRSGFGIGMRKDSPWKQNVSLSILKSHENGFMEDLDKTWVRYQECDSRSNAPATLTFENM

SEQ ID NO: 294413 - protein, 103 aa, Zea mays
  Clone ID: MRT4577_31590C.1.pep
GRLTHPLSSAAVIAPSFAARVPTRDVVTRRSFNVRASLRKDNGNVAIAIAATRAGAGRAMAHQVQMAACYGRLVFEPSHFNVKAGDTITFKNNASFSHNVVFD

SEQ ID NO: 294414 - protein, 25 aa, Zea mays
  Clone ID: MRT4577_31591C.1.pep
LTRLGKLVHAGNKISHWSSRHRASE

SEQ ID NO: 294415 - protein, 69 aa, Zea mays
  Clone ID: MRT4577_31592C.1.pep
PRSARSVAADHGGEIAASPRLCVLITRGLERLSLAAISVSARSVGAGREMGGFHLHHTCVKARKVFVRD

SEQ ID NO: 294416 - protein, 81 aa, Zea mays
  Clone ID: MRT4577_31593C.1.pep
ARRRRTRWWGPELEPPRQAPRWPPRRQLVRRRRFSSSPLPESAGVGGRYGTDRTAVEKEGRARRASWLMAGWLADFVARVG

SEQ ID NO: 294417 - protein, 125 aa, Zea mays
  Clone ID: MRT4577_31594C.1.pep
GGPCAGVSFVVFFLFLPRAFWGFFGSPVPLSVWRAHGGAPLFPRPPWGFWPTGFAHQGRFLGAAQSCFAATGLGVQCVVSICGQGCVQGGLGVFHGFLLVGWGVSKCHFFYFFYFDLKILNIFQY

SEQ ID NO: 294418 - protein, 83 aa, Zea mays
  Clone ID: MRT4577_31595C.1.pep
FGVPRQGLGGCHPAPWPCGVKSVSLLWGNLGLPFFCFFECASRLSGKFWLLVLSKVGVGSVVHRRGFFFCPLFVILVQFRGSP

SEQ ID NO: 294419 - protein, 48 aa, Zea mays
  Clone ID: MRT4577_31596C.1.pep
VLAPLHSPKPKTTEKTTMSWGENLFWSFHSTCRVSTSAPLHSSPQKPH

SEQ ID NO: 294420 - protein, 142 aa, Zea mays
  Clone ID: MRT4577_31597C.1.pep
MAEGNSSSGGDLFSSGKLVAGAAVSVFQQKSVENVDKQEVAGAAAELLHAASAYGKLDDKPAGQYVEKAEGYLKEFSAGAGHATEQEQPAPAAEEGSKSSEGFGLGDVMKGAEQLVGGKQQGGGEESAGGGGLFKMAQGFLK

SEQ ID NO: 294421 - protein, 117 aa, Zea mays
  Clone ID: MRT4577_31598C.1.pep
ENGFHQRTSIFNFRITTCPPRPTSASFHLRGTEPITARNKAGSFQRCMVHLCTASLLALPVLLISSPEQLADADADESAVPESAKAWGLLRPAPPAILRTALWIVPPRVTERILSDA

SEQ ID NO: 294422 - protein, 202 aa, Zea mays
  Clone ID: MRT4577_31599C.1.pep
MRATGSLTAALKRERDRSYSYPRNKQRRIGAYPMAEGNSSSGGDLFSSGKLVAGAAVSVFQQKSVENVDKQEVAGAAAELLHAASAYGKLDDKPAGQYVEKAEGYLKEFSAGAGHATEQEQPAAAAGDDAAPKPPAPEAPKEPAAVPAPAAEEGSKSSEGFGLGDVMKGAEQLVGGKQQGGEEKGKEKKDKKDKGEKNDKEK

SEQ ID NO: 294423 - protein, 252 aa, Zea mays
  unsure (1)..(252): unsure at all Xaa locations
  Clone ID: MRT4577_3159C.1.pep
MAQILLHGNLHVTIFEASSLSHPGRASGGAPKFIRKFVEGIEETVGVGKGSSKLYATIDLEKARVGRTRMLGNEPVNPRWYESFHIYCAHLAADVIFTLKADNAIGATLIGRAYLPVGELLEGEEIDRWLEICDDNREPVGESKIHVKLQYFGVEKDRNWARGVRSVKFPGVPYTFFSQRQGCNARLXQDAHVPDNFIPKFALGDGKNYGHPGPGEDIPSRNTFLNPPPPPGAMAFSLSGLSLGPPCLCLRY

SEQ ID NO: 294424 - protein, 72 aa, Zea mays
  unsure (1)..(72): unsure at all Xaa locations
  Clone ID: MRT4577_315C.1.pep
SLRTSDKASTLSEESHFXENLEQNDQMFRPSWKDIFRMNQSELEAEIRKXVSRDSTLDPRRKAYLIQNLMTR

SEQ ID NO: 294425 - protein, 60 aa, Zea mays
  Clone ID: MRT4577_31600C.1.pep
KSCPFLRVGRISLKVVSPEIPRTVQLLKGFPSVVLSYLAIRPCAKAFVVPLIPVPGIFFF

SEQ ID NO: 294426 - protein, 81 aa, Zea mays
  unsure (1)..(81): unsure at all Xaa locations
  Clone ID: MRT4577_31601C.1.pep
NSVENVDKQEVVGAAAELLHAASAYGKLDDKPVGQYVEKAEGYXKPPAPEAPKEPAAVPAPAEEEGSKSSEGFGLGDVKKG

SEQ ID NO: 294427 - protein, 73 aa, Zea mays
  Clone ID: MRT4577_31602C.1.pep
REAIFMFFSYADRKGSTMHAVYVACCDVSESLTRSSRLFYVRLVFLISSIRTRLSSQCITSLRTYIRRENVAS

SEQ ID NO: 294428 - protein, 165 aa, Zea mays
  Clone ID: MRT4577_31603C.1.pep
MAEGKSSSGGDLFSSGKLVAGAAVSVFQQKSVENVDKQEVAGAAAELLHAASAYGKLDDKPAGQYVEKAEGYLKEFSAGHATEQEQPAAAAGDDAAPKSPAPEAPKEPAAVPAPAAEEGSKSSEGFGLGDVMKGAEQLVGGNKQGGGEESAGGGGLFKMAQGFLK

SEQ ID NO: 294429 - protein, 165 aa, Zea mays
  Clone ID: MRT4577_31604C.1.pep
MAEGNSSSGGDLFSSGKLVAGAAVSVFQQKSVENVDKQEVAGAAKELLHAASVYGKLDDKPAGQYVEKAEGYLKEFSAGHATEQEQPAAAPGDDAAPKPPAPEAPKEPAAVPAPAAEEGSKSSEGFGLGDVMKGAEQLVGGKQQGGGEESAGGGGLFKMAQGFLK

SEQ ID NO: 294430 - protein, 64 aa, Zea mays
  Clone ID: MRT4577_31605C.1.pep
SRSTHSSAAIMSLIPKTYPFCGSKLGLGMIPKSHILPISPPLPFYSSYLPFSLYLLPLFLHLNP

SEQ ID NO: 294431 - protein, 167 aa, Zea mays
  Clone ID: MRT4577_31606C.1.pep
MAEGNSSSGGDLFSSGKLVAGAAVSVFQQKSVENVDKQEVAGAAAELLHAASAYGKLDDKPAGQYVEKAEGYLKEFSAGAGHATEQEQPAAAAGDDAAPKPPAPEAPKEPAAVPAPAAEEGSKSSEGFGLGDVMKGAEQLVGGKQQGGGEESAGGGGLFKMAQGFLK

SEQ ID NO: 294432 - protein, 107 aa, Zea mays
  Clone ID: MRT4577_31607C.1.pep
QLFFVLDNVEGCSSLHRLVGNRSGRVGIEITSLGLVVVDEDCESQRCCATYRCCLRRGVSYCLTGRTHTQGWSSWGMPWASYVAWRRCSGCSSSCWPKPSVAAEVGD

SEQ ID NO: 294433 - protein, 222 aa, Zea mays
  unsure (1)..(222): unsure at all Xaa locations
  Clone ID: MRT4577_31608C.1.pep
MALANKLGGLLKKATSSNPSVYQAIRCMSSKLFVGGISYQTDDHSLRDEFAKYGQVIEXSCPLLHLPWLYFLLTSYASICPARIIIDRESGRSRGFGFVTYTSSEEASAAITALDGKTLDGRSIRVNHANEKTGGFRGGGGYGGGGYGGGGGYGGAGGGGGYGGGHYGGGGGSGGYGGGDYGGNXATGVGGGDLWSCWVEVEATLLLVATALPTVTLVLTVV

SEQ ID NO: 294434 - protein, 214 aa, Zea mays
  unsure (1)..(214): unsure at all Xaa locations
  Clone ID: MRT4577_31609C.1.pep
MAERKLDRPSALGKGGLSLGIEEDRAAAAMGFVDHSKDQHHLDNSIPLSPQWLYAKPADGKISLPHGSSLEPAEKEARMLEGTADRKERRRNVFDADSGLRWLEEERETSLLGRRERKKDVDRDVDNRKIDRRSDNVSARDNTDPRTAPSSERWNDGSTRSLGDEGRRDAXWSSRWGPDXQEKDSXVRQKGDAEKDEXHADNRXXPGKLLSESD

SEQ ID NO: 294435 - protein, 85 aa, Zea mays
  unsure (1)..(85): unsure at all Xaa locations
  Clone ID: MRT4577_3160C.1.pep
VRSHVRRRVSGRVGGFAVFLVHLTTXAITGTGINPARSLGAAVIYNQHHAWADKWIFWVGPFISAALAAIXHHLIFMAIAFRSRS

SEQ ID NO: 294436 - protein, 36 aa, Zea mays
  Clone ID: MRT4577_31610C.1.pep
KRTERRCVLTGSGRQVIMHTIQAALYAHTVNYTYSR

SEQ ID NO: 294437 - protein, 55 aa, Zea mays
  Clone ID: MRT4577_31611C.1.pep
DNFCLYDKKKKKKKKKKKKKKKKKKKKKKKKKKKKNQPGAAKKKGKKILPPGGRY

SEQ ID NO: 294438 - protein, 67 aa, Zea mays
  Clone ID: MRT4577_31612C.1.pep
LLQSLNSTVLLKRRICAKILITSITLAYTITLSNHFHSCIQCFFLSSSSFNQPFFICIILFPLTYLS

SEQ ID NO: 294439 - protein, 79 aa, Zea mays
  unsure (1)..(79): unsure at all Xaa locations
  Clone ID: MRT4577_31613C.1.pep
DVRGGASNDFCDRFATIGFNANLITYLTQQLQLTLVDASNTLNNFXASPNLTPIIGGLVADSFAGRLWTIVAGSVIYQL

SEQ ID NO: 294440 - protein, 60 aa, Zea mays
  unsure (1)..(60): unsure at all Xaa locations
  Clone ID: MRT4577_31614C.1.pep
VQTNCIDFTLPAEAFFAAEXEELRAYQFKPXYHFTFYPYXRDHACVGGGYRGPNKHKGTS

SEQ ID NO: 294441 - protein, 49 aa, Zea mays
  Clone ID: MRT4577_31615C.1.pep
YLWLHNREEASRKSPSAALIANKIRRDQLSELEADEQSHSLLRRCKNSP

SEQ ID NO: 294442 - protein, 199 aa, Zea mays
  unsure (1)..(199): unsure at all Xaa locations
  Clone ID: MRT4577_31616C.1.pep
MTTAPFVSPSLPRLHSARASPFPKPSVGSGGGVAFPARTYGSSLRLRSAVMSASGVGGNGSPMAPEESTVSSRLGEVKRVTKETNVHVKINLDGTGVANSSTGIPFLDHMLDQLASHGLFDVYVKATGDTHIDDHHSNXDIALAIGTALLQALGDRKEFTRFGXFTAPLDXAAVEVILDLSGRPSLSCGLAXPTERVDI

SEQ ID NO: 294443 - protein, 91 aa, Zea mays
  Clone ID: MRT4577_31617C.1.pep
RTECCPPVSGCGAPWGRRPCQEILVGATGSPWAGRTAILVEKSRSWRGAPLLCTERQLILVPFDGFRPLQNAAMVFRKMVKEKCMMDNKKP

SEQ ID NO: 294444 - protein, 86 aa, Zea mays
  Clone ID: MRT4577_31618C.1.pep
MVLVRKGKGGASLDKNKKGFIDEQTTSLEAMFATQAMLEPRQKLQLAQELGLQPRHEVMWFQNKRARLKSKLLERKHSALRDDYHA

SEQ ID NO: 294445 - protein, 113 aa, Zea mays
  Clone ID: MRT4577_31619C.1.pep
SSKKKKGKKKKKKKKKKKKKKKKKKKKKKKKKEGKQKNKKIKNGGGLFKGSMFFTPALCEITFFFGQLNLISGAGFLQSWAGKKLVFPNLNCLSKKHPFCRWGFKHKGPLKSP

SEQ ID NO: 294446 - protein, 121 aa, Zea mays
  unsure (1)..(121): unsure at all Xaa locations
  Clone ID: MRT4577_3161C.1.pep
HGCFXTEFPSXQGKPPAAGRRCCFTTVAHLTHPRDLARTDGPRSPAPHLIRARSCVHRCDAGAWGHLVGSISYPILNSSCLLRRSRSEHRTKIQSDTCDACLGSLTGYKTKPFSRPTLPQT

SEQ ID NO: 294447 - protein, 203 aa, Zea mays
  unsure (1)..(203): unsure at all Xaa locations
  Clone ID: MRT4577_31620C.1.pep
GGEFGPRKPAYGAKVXXXXXXXXRLDIPDEVWDAERFVGGGVILDTSTSVTSLVPEAYAPVTAALDRHLSHLPRVYELEGFEYCYKWTFTGDGVDPAHNVTIPSFTVEMAGGARLEPEAKSVVMPEVEPGVACLAFRKLPRGGPGILGNVLMQEYIWEIDHGKGKMRFRKDKCNTHHLHNSKGGEVYNNNNGNSSSTVVHRVN

SEQ ID NO: 294448 - protein, 62 aa, Zea mays
  Clone ID: MRT4577_31621C.1.pep
TTLYASQINISFLATNVIFTRVPYDFCLKVGKVLANLTTSPMSRQVCGSLAKECIPHLFQSQ

SEQ ID NO: 294449 - protein, 146 aa, Zea mays
  Clone ID: MRT4577_31622C.1.pep
HVGMYLVSVRIGTPALPYNLVLDTATDLTWINCRLRRRKGKHYGRQSMGQTMSVGGEGATAAKKEASKNWYRPAKSSSWRRIRCSQKECAVLPYNTCQSPSKAESCSYFQKTQDGTVTIGIYGKEKATVTVSDGRMAKLPGLILGC

SEQ ID NO: 294450 - protein, 538 aa, Zea mays
  unsure (1)..(538): unsure at all Xaa locations
  Clone ID: MRT4577_31623C.1.pep
MPGRSVVSILLLLLHGLLCLQLAALAEMDDDDVMEDGSCMHFSVSPPPAPPEDADERRDYFRAMQAKDLFRHEQMITMMGSDRNGSSRRRRAKESSKLPEVMSATSMFELPMRSALNIAHVGMYLVSVRIGTPALPYNLVLDTATDLTWINCRXGAARASTXRQSMGQTMSVGAGTMARRPRRRGXNWSRPAKSSSWRRIRCSQKECALLPYNTCQSPSKAESCSYYQQMQDGTLTMGIYGKEKATVTVSDGRMAKLPGLILGCSVLEAGGSVDAHDGVLSLGNGEMSFAVHAAKRFGQRFSFCLLSANSSRDASSYLTFGPNPAVMGPGTMETDIVYNVDVKPAYGPLVTGIFVGGERLDIPQEIWDAEKVVGGGVILDTSTSVTSLVPEAYAAVTSALDRHLSHLPRVYELDGFEYCYRWTFAGDGVDLAHNVTVPRLTVEMAGGARLEPEAKSVVMPEVVPGVACLAFRKLPRGGPGILGNVLMQEYIWEIDHGKGKMRFRKDKCNTHHLHNSKGGEVYNNNNGNSSSTVVHRVN

SEQ ID NO: 294451 - protein, 107 aa, Zea mays
  unsure (1)..(107): unsure at all Xaa locations
  Clone ID: MRT4577_31625C.1.pep
SWGVVLAGKVAVDVPGCSRVGIVAYARAGLVLYAGLPSVGAVVLARAGGVLLYLARPATVLVRLSVLVAGVGRVAVGASSVACVAGSPTALQLAPSXGFAVAHVCKG

SEQ ID NO: 294452 - protein, 41 aa, Zea mays
  Clone ID: MRT4577_31626C.1.pep
RNSFIAQSPQANRDDYRSLVSEVLTPYSATKYLIAKGITPS

SEQ ID NO: 294453 - protein, 97 aa, Zea mays
  Clone ID: MRT4577_31627C.1.pep
PESGPRIFKRGGAIRANKNGKSLKSAGFLCFSKKKTLPMFPQGSEGLCSFVTPKKGNPVQKTLGGGGNCGGIPNWGENGRVFPRFFFGVGCRCFFSS

SEQ ID NO: 294454 - protein, 65 aa, Zea mays
  Clone ID: MRT4577_31628C.1.pep
LKSMAATVLLTNQGSSLGYTDGRTPYRVFRATDPHRIRTAIVTMTGLVKLILEAGGPTVSVRASF

SEQ ID NO: 294455 - protein, 955 aa, Zea mays
  Clone ID: MRT4577_31629C.1.pep
MQLPGREAVATASPKRQGWDNGVATLGATDMAGQEKKMSEEKKMTEEKKITEEKKLYEEKKVADPFIVGFYESMAKTNIEKITKEIMEGLSKDSDDNDSYDVKSGDEDSEDRPWRPSHTIFGKSTIKQSHIDAMKGRYFRDMSIVRVGGDSTAPAPEENEVVIYRSFLKAGLWFPLSKFVVEAVRSQGLEPSAKCFCSMHELLYETKAIAKEQYHNNFGCYGFIARSNASYPVPTYRKRWPRAWMEEWFYVKNDLIKREDIKEIIQRPIWSRFGLRRPKVEIDSDIEACQKAFSTVCAFIGTRDLIQEHISFRVWPLVESWDMPKETTAESSEGGLVRLKYTFRFREKFDEPNDDCLKCIETTSDELLGTYSKAEDDALSAAFGGRGKKRLNRVFDAIDFVYPDYHYPLRRQGKKRKTAASATTTMPRGKKSAEEPIVVPKVPTVGPVEAKNDRAKEPKALTPAPIKKVTEVAKGQAKAEAEPTMPIETKAIAPEDKDDQQTLDTGMTAGQGMTEKAKSPAPEAPVDYIYRHAPGKKLSEEEILEGRHYAQKLKYPKGALVFNGTNEDDFLYCLPDNKEISVCRKIAKSMGFPKLEEGLSVMSKDDLADSLAYNSIKGLILSNALRAQKSTEDEGCIMALDNLRSEVIELRNEGLEKDKILISLVSKIKEDEAKYNAQAEAQKAEVEDLRRQLVEAKENCALAQANQEISEYWKNKLEKNVEELRESKEKCFEKSLDCVKNLKTSFSEVGAYSSEENFIRGDPEGVIEWISGEAKAFEEILTDRGDICAFSGAQGISAILEKAGCDYVKAIAQVEAAFSLDDTKDHSAEATLVGVKFYSDLWVNGGRELARKIIKKNEKDTHDAREEATQAEEAAERERRICIDFEFLASILALWLRINSLPTTAELSPPPEPYNPLADPEMKEALDIINMANSIIDEVVDKLLNEVAEKVLREE

SEQ ID NO: 294456 - protein, 73 aa, Zea mays
  unsure (1)..(73): unsure at all Xaa locations
  Clone ID: MRT4577_3162C.1.pep
SCWHRLVHHEYGCVHCVDVTGESVRALAMILSFLPVYVMLIVLISFARMGSGSVSTGLMCSTVCPPRLPATXP

SEQ ID NO: 294457 - protein, 94 aa, Zea mays
  Clone ID: MRT4577_31630C.1.pep
HIAQTVVLPVINAHALQFAVLCFVIGFPLESPDPSPVYLARSSGSVARTNRFCSSSSTSSDSMKAASKAVVRAPVSLHKSGQASNLAECSERVA

SEQ ID NO: 294458 - protein, 109 aa, Zea mays
  Clone ID: MRT4577_31631C.1.pep
FSFFFFLLFSPYLYGGYFFFSAALKEIFNFDFKGAKSILPNQTVKKPPPIIRKKNAPSGGGLRAGMGFGPEPSPSDQGVEELLGVNLPVLGKNHFLWRPRTRPPPPLDF

SEQ ID NO: 294459 - protein, 201 aa, Zea mays
  unsure (1)..(201): unsure at all Xaa locations
  Clone ID: MRT4577_31632C.1.pep
MPRQRRTETLPRGRGGKKLKAAGDLFIPTKPPSVYMVVGHDVTRPAYSVIKVNTFPDGGSGGDTPIPIPGHLARLEAKHCMSFVPVRSRHGSWIVGVGGNSPIDYGPETIVFDTSTHQVIPGPKLVSTKLRPILLPVGDKIYALTRQPAIKGGVNFVPWFEVLDLSQGRVVSVRLRNCKWEQLTRXPPAFPEKLSPRQYIF

SEQ ID NO: 294460 - protein, 360 aa, Zea mays
  Clone ID: MRT4577_31633C.1.pep
MEDLSDLGGHGHPGAAAWRPAAPSLASSSKVSVQVYTVPSSAATGREARGQGVAPMMHASSVAGHGGRAADLDPVKAKIVSHPSYHRLLAAFLDCHKVGCPPEAAEEIAAVAREREAWQRAAAGDVAHTRPDPELDQFMESYCELLVTWKEELTRPLREAEEFLTTVEAQLNSITNTGPTMGAFISSAAAADKTGVVDMSDDEQEEGSGMEAEVALGIDPCSDDKELKKQLLRKYSGCLGNLRKELCKKRKKDKLPKEARQKLLSWWELHYRWPYPSEMEKIALAESTGLEQKQINNWFINQRKRHWKPSEEMQFAVMDGFHPAPPNAAAFYVDARLVGATPAMFYARPDHGAHHGLWHN

SEQ ID NO: 294461 - protein, 60 aa, Zea mays
  Clone ID: MRT4577_31634C.1.pep
HAYIIYIITFCNLFLYNELSSLRRIYNSVVCIIFLLRIISKPTNVIIIKPKPHNVGSYSL

SEQ ID NO: 294462 - protein, 95 aa, Zea mays
  Clone ID: MRT4577_31635C.1.pep
LDDASAETPTRGTGKLSSHAAEEAETWCPWLVGSTQQFLYYLPRGEVFSMHPGCQFLNYGNGSISYTALDAQTVTSNKQRSGHGRSRSKPPAAAW

SEQ ID NO: 294463 - protein, 39 aa, Zea mays
  unsure (1)..(39): unsure at all Xaa locations
  Clone ID: MRT4577_31636C.1.pep
XFXXSXVLLLTRGVVIMLFVWPYIPVTVLGYLPVKICFF

SEQ ID NO: 294464 - protein, 64 aa, Zea mays
  Clone ID: MRT4577_31637C.1.pep
RRHSTDWIISRSKYTLQNTRVWTSSCRCRLTSSVLVVQVGVSHGRLCVQLVPARSRSRCLDLPV

SEQ ID NO: 294465 - protein, 99 aa, Zea mays
  Clone ID: MRT4577_31638C.1.pep
TTLLFLPSYPFPRKVSFLSLLVPPHPRLPSIPLSLAPSPLPSAPPCPCAPASPLSRSRSNIKNLYFFLSLIFLYFFFFFFTSTTSSLQPRPPPLYRRIP

SEQ ID NO: 294466 - protein, 47 aa, Zea mays
  Clone ID: MRT4577_31639C.1.pep
CYNSPSNHMVWITFLPKYIFQSLLYAAFDFLYQIKMSILLLTVRPPF

SEQ ID NO: 294467 - protein, 215 aa, Zea mays
  Clone ID: MRT4577_3163C.1.pep
SSRPSRPVHDTCPVEHAVMEVGSLVSAAAGGGGRGLDRFWLLGFGNNQAYLKSRAGQPSLEAVWELHPIVVPDGGLALSLRCNSDAEQARATRPWPFANGTAATGDSELITLSCAKVAATTPNVPPWLQGYQGQDTTRLASRSTSFQMQDWEPNSNGAAYHTSEITLSFSPQATNSPDASSISGSFAPSLMMSSEPWQFKLMQPCRNYGRGDPFA

SEQ ID NO: 294468 - protein, 59 aa, Zea mays
  Clone ID: MRT4577_31640C.1.pep
RNSASRTSYSFCPQPQAQIALNFRGRAPALETNPGKHNPLTSITSNIHTSPPDPSYLTS

SEQ ID NO: 294469 - protein, 123 aa, Zea mays
  Clone ID: MRT4577_31641C.1.pep
SVTRSAAARAGDSTCLALSRELREMRARVASRQQYELSGRAYVLAGLSSHAHQRATSRQVMSGGVAEATRGGESAQVRSGALETSGITMSYMTPAMLDMLGRSRRSRELLQQRQQQTELRRTF

SEQ ID NO: 294470 - protein, 91 aa, Zea mays
  Clone ID: MRT4577_31642C.1.pep
GYYVHPSSGGGQTVHLSTRTSPQTNIGLQGPRFLQMHGHQLIIVLPQGDVGLLNRGELTSTHRRWSPTIIGNIDRFYCLSPATPPPCSTHA

SEQ ID NO: 294471 - protein, 52 aa, Zea mays
  Clone ID: MRT4577_31643C.1.pep
IGSARMHLNWHQTYHNVVEHVPAFLLSKFWSLLSSLQFGTPINPRLLYLEIK

SEQ ID NO: 294472 - protein, 65 aa, Zea mays
  Clone ID: MRT4577_31644C.1.pep
KINNPPLKPFYKKDFMMFSKKKKKKKKKKKKKKKKKKKKKKKKKGGRRLVSSSTRELIPDRYLQA

SEQ ID NO: 294473 - protein, 83 aa, Zea mays
  Clone ID: MRT4577_31645C.1.pep
QFTQLQLRPLTKLVMMKTRFCLSMRRIASFLLGSSLVHLGSGWLLSFHTLVIFNMLPVASCHGQQTYQGEDTAENVCTTLGLV

SEQ ID NO: 294474 - protein, 144 aa, Zea mays
  Clone ID: MRT4577_31646C.1.pep
AERPALRRRHCSQHSRSAPVAAATLAATPAVRIDKSHHSRSTAAVCNKNLTSLYKRFSFFRFFHLSFPGPGQQINVLETARNRRRKDGAGETKLTFDWTRLVVCSHHAVLKQDYCRLYYPKARQKSSVNPTCRWRVGRPAIPRP

SEQ ID NO: 294475 - protein, 220 aa, Zea mays
  Clone ID: MRT4577_31647C.1.pep
PHFFKGISISPKKKKKKKKKKKKKKKKKKKKPALPPIAKAIRNKAELLKWDFPITRGQLASPELGCWAEVNGSLVAGAPLDGGHDRFETKASPTDLKNLKTRLEFMLPREASSSNQSKSIAYVGREGGGIIGAMAISNFLRKDANLPGERLQQESITTFLLSGDRGKAGTSIGRTLGIRNENIRSSLTPQDKAGFISTLQAKGHRVARVMKPKALWVFYH

SEQ ID NO: 294476 - protein, 223 aa, Zea mays
  unsure (1)..(223): unsure at all Xaa locations
  Clone ID: MRT4577_31648C.1.pep
QMLLDMAAEDMAAXKLPXAAEEAATVAXEKGKEIADEASENENLYVQNLVEEQLXKAEIDKLXEYAXSCGYKPGAXLLFGGVDDEKLDCIRDHTGAKVIGTLSKSIGFPKLETDISRYRRQHIVGSLFYSNFKVNYFSLNFYCFXMKTCLTKVVFAQSMLLSKALQMQQDFEDKKHEVIIENLESRIREQSDAFEKKNFELHATEGLWRKLKQKVSELNPRAE

SEQ ID NO: 294477 - protein, 60 aa, Zea mays
  Clone ID: MRT4577_31649C.1.pep
IKKKKKKKKKKKKKKKKKKKKKKKKKKKKKKKKKKKKKNKKKKNSFGPKQLLGENFPKFP

SEQ ID NO: 294478 - protein, 74 aa, Zea mays
  Clone ID: MRT4577_3164C.1.pep
QELLSGDELLSDASTYKELENRVLWEGEGKRATQGPVEGDIGATPYAGGGEDESVDDTPVKAGDNGDTYRVQEP

SEQ ID NO: 294479 - protein, 233 aa, Zea mays
  Clone ID: MRT4577_31650C.1.pep
FFGHLRTPCLDPDGRDGLFPWQGATGSTRPRGHVAGFARAGVGTGPPISTRRSPPVAPTPTLRPVAPPARTHDVVMSASSPGRPAAGSNIHTAASLDPPEQGSLQALPALAAGLLQPAPPSTRSAGPPRYSTALPTPPSSPPQYDPSLPWLSRLDPPLLRPSQLDSSSLWPNRRLHGWIHHCQDLPDRIHRYPFYSTACVATLTAQTCAMPLASLAGSSTTELAALLFVLPRR

SEQ ID NO: 294480 - protein, 76 aa, Zea mays
  unsure (1)..(76): unsure at all Xaa locations
  Clone ID: MRT4577_31651C.1.pep
SSQPTXLQQCGRGRLAGGGRXRRHLQRLQAGIRYHTYAFYACRALYVANKLNSSSTYPLLELFFKNQVHHIPYYNG

SEQ ID NO: 294481 - protein, 80 aa, Zea mays
  Clone ID: MRT4577_31652C.1.pep
GTPLSGLTRMPPLPPWSRYWAWNKDCHQGSLETEHALSSRRGAVKEAVLGLLLPSVSGFPVAKRIMKVESESSSRIPSVR

SEQ ID NO: 294482 - protein, 60 aa, Zea mays
  Clone ID: MRT4577_31654C.1.pep
CLQALNPVGGCTHGSSYLLHGPWLVHCIAVFASSIHSSEMTLSSIFRAFLLKLLCYLSFY

SEQ ID NO: 294483 - protein, 215 aa, Zea mays
  unsure (1)..(215): unsure at all Xaa locations
  Clone ID: MRT4577_31655C.1.pep
METFTQEHVIGIPLTSFAYADEERQGKSSCSAMVHKKDKKSSFIHRMNKLSHKTDSYMQGFKEHLTMGXTKNSETIKGKLSFSAKVLQAGGIDKVFREYFAVEKDEKPRKAFQXYFSTTTGPIARMLFISTKKIAFHSDRPLSFTSPKGGSTRVPYKVLIPTERMKXALVRENLYNPDETYIDVVTVDGFDFWFMGFVSYEKSFKYLQQVIMELR

SEQ ID NO: 294484 - protein, 72 aa, Zea mays
  Clone ID: MRT4577_31656C.1.pep
KIFGLKERLNDYKYDICGMMFYTISDKNIRYRHYSCPTSFVFDPRLSVFASENIHIRIRIQNYPYSNPNENK

SEQ ID NO: 294485 - protein, 40 aa, Zea mays
  Clone ID: MRT4577_31657C.1.pep
KQTLPYWCVPISTHNFTGAMHKFFYTGILLSLRGNVMGNL

SEQ ID NO: 294486 - protein, 108 aa, Zea mays
  unsure (1)..(108): unsure at all Xaa locations
  Clone ID: MRT4577_31658C.1.pep
TQEGDLHNSKVQDFTHLTHPVREHHTLNSHTLFSXXKLWTHALGYSQRTXYTSLDPHTLFSALXLIHCSFLLSSPLTRLPFSTKXSIYTQGSNATAXCXXPXRTVDSP

SEQ ID NO: 294487 - protein, 86 aa, Zea mays
  Clone ID: MRT4577_31659C.1.pep
APHASRLYSPIPDRLSTWAGNWFVNTSYASTSSCRYSLPYRSSRNGYLASRGGDRVLLHKGLVVKDIMLNTSFRRCCRCCGAHTPS

SEQ ID NO: 294488 - protein, 122 aa, Zea mays
  unsure (1)..(122): unsure at all Xaa locations
  Clone ID: MRT4577_3165C.1.pep
IRLEDTPRFDGPRGQLRLTGDTSPSGHIKRADQTCEGWDQGXFHTGQIAELHSVREVKIMAPRNNIYLAHQGEYSSNANMANISHHTSVVDSNXVFCNSIYYQLVATDINNKQALXRWCELN

SEQ ID NO: 294489 - protein, 83 aa, Zea mays
  unsure (1)..(83): unsure at all Xaa locations
  Clone ID: MRT4577_31660C.1.pep
ALKHLSHEAYWYFFKTLAFGSMDPETHPRLAQVAMEIARTQNRSINAAYIICYLMRNNFNIHFWXAGLRFFRVFVQKHVSRFG

SEQ ID NO: 294490 - protein, 637 aa, Zea mays
  Clone ID: MRT4577_31661C.1.pep
MNGHLEINSANLARVLREFSPEEVTANIYTVVDVLLHHIQCEVQRGHLAQDLLSKAITNLSFFIWTHELLPLDILLLALIDRDDDPYALRLVISLLEKPELQQRVKNFCNTRSPEHWLKNQHPKRAELQKALGSHLSWKDRYPPFFDDIAARLLPVIPLIIYRLIENDATDIADRVLAFYSSLLAFHPLRFTFVRDILAYFYGHLPIKLIGRILNLLGVSTKTPFSESFAKYLVSSNSSICPPPEYFANLLLNLVNNVIPPLSSKSKSNPADTTRSTFNKHHASSQPGGVGNTDGQRAFYQNQDPGSYTQLVLETAAIEILSLPVPAAQIVSSLVQIIAHVQAILIQSNSGQGMSGGLGQSSGLPTSPSGAAESSGPNQANSAATGINATNFVSRSGYSCQQLSVLMIQACGLLLAQLPPEFHMQLYSEAARVIKDCWWLADGSRPVKELDSAVGYALLDPTWASQDNTSTAIGNIVALLHSFFSNLPQEWLESTHTVIKHLRPVNSVAMLRIAFRILGPLLPRLAFARPLFMKTLALLFNVLGDVFGKNPQVSNPNPVEASEIADIIDFLHHAVMYEGQGGPVQSTSKPKLEILTLCGKVIEILRPDVQHLLSHLKIDPTSSIYAATHPKLVQNPS

SEQ ID NO: 294491 - protein, 262 aa, Zea mays
  Clone ID: MRT4577_31662C.1.pep
GGGGGWKDTGTGEHVEYDQRPDVFRGTVRYASVHAHLGRTGSRRDDLESLAYTLVFLLRGRLPWQGYQGENKGFLVCKKKMATSPESLCCFCPQPFRQFIEYVVNLKFDEEPNYAKYISLFDGIVGPNPDIRPINTDGAQKLIFQVGQKRGRLTMEEDDDEQPKKKIRMGMPATQWISVYNARRPMKQRYHYNVADCRLAQHISKGNEDGLFISSVASCSNLWALIMDAGTGFTSQVYELSPYFLHKEWIMEQWEKNFYITA

SEQ ID NO: 294492 - protein, 75 aa, Zea mays
  Clone ID: MRT4577_31663C.1.pep
KFLTLFSVSFNVFLDRPLLSVNGPSWPDSVDCLLAHAQQAAAAYDSASPSPSVPGTGAPHRTMVEVVEAVVVVVP

SEQ ID NO: 294493 - protein, 44 aa, Zea mays
  Clone ID: MRT4577_31664C.1.pep
VVLHHISPHHDMHAARAESKIQLLRLGVDHLPLSLTQCSRLHRR

SEQ ID NO: 294494 - protein, 38 aa, Zea mays
  Clone ID: MRT4577_31665C.1.pep
PALVARSRHAWCSPAECPIPLTSSGQRCSYPLMKPPIF

SEQ ID NO: 294495 - protein, 64 aa, Zea mays
  Clone ID: MRT4577_31666C.1.pep
ANPWKKTRSRIHAELQDGAVKTLHNITTGEDGVTTTRTLMSEPRQDQKGYTYNGPSGRDNLEAR

SEQ ID NO: 294496 - protein, 60 aa, Zea mays
  Clone ID: MRT4577_31667C.1.pep
YLVISICVRVNLQLVCNGILTSKIHTLRPRPSKKKKKKKGGRRLVSSSTRELIPDRYLQA

SEQ ID NO: 294497 - protein, 225 aa, Zea mays
  unsure (1)..(225): unsure at all Xaa locations
  Clone ID: MRT4577_31668C.1.pep
MPVDQPALSLCLYFLLSLSPPAPPDPSYTGIVMSGSEEHHFKSKADAAASINYPQHAGTVRNNGFIDIXTVPCKVVPGSLLSNTGKHDHAKCHFVAIHIFDGKKLEDISLPSSHYCDIPYXVTCTDYQLVDISEDVFESLLTSDDSTKDDLILPTDETLVFHITERFYSRKDLVVTVXSAMGNEPICALKDVAPKKLPCLWRPNPTASQLKSANIWITKPLLPTH

SEQ ID NO: 294498 - protein, 37 aa, Zea mays
  Clone ID: MRT4577_31669C.1.pep
HKLSHSTRKLLETRREERISNHTSKRVRARESLERRE

SEQ ID NO: 294499 - protein, 84 aa, Zea mays
  Clone ID: MRT4577_3166C.1.pep
KRKGAGRPHDNLYQGPALHRLGGSSLQYTLVDQREKLTSKAAPLKAQSIPQLRRYPLYLGITRTIEVEYTDATQRLLPEARTEP

SEQ ID NO: 294500 - protein, 89 aa, Zea mays
  Clone ID: MRT4577_31670C.1.pep
RAFNKAAGVSWSDAGSVFACSPPCSAGWPSAIGTLGVMGGETPGWVARGNRASIAHVGAAISCRTSSMSITASAASLLPPVMIALCRIP

SEQ ID NO: 294501 - protein, 250 aa, Zea mays; identical to SEQ ID NO: 231398
  Clone ID: MRT4577_31671C.1.pep

SEQ ID NO: 294502 - protein, 292 aa, Zea mays
  Clone ID: MRT4577_31672C.1.pep
MPINRIALGSHQEVYHPGALKAAFAEFISTLIFVFAGQGSGMAFSKLTGGGPTTPAGLIAAAVAHAFALFVAVSVGANISGGHVNPAVTFGAFVGGNITLFRGLLYWVAQLLGSTVACFLLRFSTGGQATGTFGLTGVSVWEALVLEIVMTFGLVYTVYATAVDPKKGSLGTIAPIAIGFIVGANILVGGAFDGASMNPAVSFGPALVSWEWGYQWVYWVGPLIGGGLAGVIYELLFISHTHEQLPSTLIFVFAGQGSGMAFSESSAVRSYPCACNTGSIGPRPAFNEQLAS

SEQ ID NO: 294503 - protein, 45 aa, Zea mays
  Clone ID: MRT4577_31673C.1.pep
SPIDLAQSNKVTSPKLGLRLLNRILTQSLQTLYSLSSTIFLRGTQ

SEQ ID NO: 294504 - protein, 48 aa, Zea mays
  Clone ID: MRT4577_31674C.1.pep
GRVGSRFTTFSHCVWSLLVKLKNNVSEIIHSAFLFEIAKCCEEISPNQ

SEQ ID NO: 294505 - protein, 194 aa, Zea mays
  Clone ID: MRT4577_31675C.1.pep
MRIVAYFAIEIRLSKIPHAIQCISSFLSNSEASHRQHKETIIYILWKLTDDEENLRLMSNTNGLALKIIGMLVDSDGEELHNSNHGTWCSNIALPGMEVIKRFTSVMKRSNSMQLPREILESTDAISTLESMLDCQQCKVEEELQKSVIMVLTQITSMETSLAVGDEVKKRLDQIQKRLILSLIAIFLDGGDGK

SEQ ID NO: 294506 - protein, 473 aa, Zea mays
  Clone ID: MRT4577_31676C.1.pep
MPPSPIVLPATALPAARLARVVAASESGGATPPRASPRRGRRGKPGFSRRSAIKKSFHQEQVVFSTPVSTDPTVAVIGGGASGLSCATSLAARGVRSVVFDTGMHGLGGRMATRFVDGGKQLVFDHAAQFFTASDERFQRLVNEWLDRGLVREWSGLIGELEAGGCFRPIPSLTPRYIGVNGMRPLADAMLPETDMIKVLRPCWISKLEPFNGLWRLFENEKPRGEYDAVVIAHNGKCANRLLSTSGLPLLTKQMKRLELSSVWALLAAFEDPLPIPLLDSNAAFEGAFVRDVDSLSWMGNNTRILFPMQTGAPECWTFFSTAAYGKRNKVPQENIPKLTAEKVKEDMLGGVEHALGLSEGSLQQPIYTRVQLWGAALPMNTPGVPCIFDPLGRAGICGDWLTGSSIEAAVLSGMSLANHIADYFVSTQDRPEEFAIGVHDDLNAVEGHDIGQFPGLDTQTPQVAEAQLTPSI

SEQ ID NO: 294507 - protein, 173 aa, Zea mays
  unsure (1)..(173): unsure at all Xaa locations
  Clone ID: MRT4577_31677C.1.pep
HSKLHKEPTKPDRNLEVVVLLALSAGAGSXAISTHSXEACIVHLPPPYHLPAVSHVSENPNLQPYRNQQPIGHVMLPXLPSLLQQSSALXQQPPLWHXLTQNIRAXQQLQQLALAHLAGYFQQQEIFPLNQLGSLHCACYLEQQQLPFSQVPGGYPKECLTFNQLGRLDSTAY

SEQ ID NO: 294508 - protein, 61 aa, Zea mays
  Clone ID: MRT4577_31678C.1.pep
LRMCKFNLLHYHLTNNINISLFALKDPTLKTHSFHLIPPLIVLPQTNSLTFNLQTYLLVKP

SEQ ID NO: 294509 - protein, 156 aa, Zea mays
  Clone ID: MRT4577_31679C.1.pep
MGARIGRGERWESSSAGGTREGRGRAADKPGTEQGAANWDRGIPGELAMGGAKGPGRARPVVAVRREGDHGAAQGASRHPDARHGGRWARAAASRRQNAGQGGRRAVGKLERRVEGEDELQEGDGNGCRGVAGHRFQQKSTTRKNPGDGIDPHPGA

SEQ ID NO: 294510 - protein, 174 aa, Zea mays
  unsure (1)..(174): unsure at all Xaa locations
  Clone ID: MRT4577_3167C.1.pep
AATDKSTICTQRRPDRERATAAAQPTGELAARAPTLGGACEARRDGGVVHGVVEGLRLRHPRPQLPGLLLRHHPHELPPRRLILRRRRGLQVVGLPRPPQQRRPPLXPSADPATAWTAPVXPRRRGARXRGRRXGRGTRRRMLRXRCHRHWIGSVWSRPSLPALAGLLFDCFGG

SEQ ID NO: 294511 - protein, 81 aa, Zea mays
  Clone ID: MRT4577_31680C.1.pep
RNRPFPDRPFQPLGPLNGGWAPPCSGPFTPGAGPVTPHLTRSLSRVLAPGPFPFFPSFLPPFSGFSRSVLNWGPPFRFPFC

SEQ ID NO: 294512 - protein, 98 aa, Zea mays
  Clone ID: MRT4577_31681C.1.pep
DAWTISSSTGVFFIPKGGHSHQTEWGGRTQRIWPFFHMRRKLLKDITAFWETSRLRHATRCLGALLSTLIWSGASPSIIFVMNILGIFRHQKLLTCAS

SEQ ID NO: 294513 - protein, 102 aa, Zea mays
  Clone ID: MRT4577_31682C.1.pep
VPTTGYENHEGLRFQLTIKLWGGVTWLCFHHPPAQRATRTHVDHQSYHNHQHYAHRSNHVRYTYHQTQYKITEHVWRRLPVHTYRRITSEHCMKLHFFYTGV

SEQ ID NO: 294514 - protein, 54 aa, Zea mays
  Clone ID: MRT4577_31683C.1.pep
QSMCHQINEIVRSYIKVIRHRQLQRQVHLPRTIHHPLPVHLPPHGTCAAAGSSA

SEQ ID NO: 294515 - protein, 42 aa, Zea mays
  Clone ID: MRT4577_31684C.1.pep
MPGTTYKLNTGATIPALGFGTWQDADAQVGAVKEAIKAGYRH

SEQ ID NO: 294516 - protein, 185 aa, Zea mays
  Clone ID: MRT4577_31685C.1.pep
HLTRLIIQPVNVYQYFKEKNTALPNAEVIHTNRSKASLTKPSVVTQLDRSTDSTNDTVRSLCGKSSAFRSRSIDQSAILLLEPLPRLLLLKKGNEHQKIQILACGMPSYLSYSRCISAVFHAKHEPLTCKPTWVCSKNSWGSQIRIPFYDHKHVNKLELRHKCVYSFNTHLLKTCAYAFSIRHVW

SEQ ID NO: 294517 - protein, 70 aa, Zea mays
  Clone ID: MRT4577_31686C.1.pep
TVHSCNLLGMEVEPSLSVKNQDKCSCAAVSFFFPSSAQLVANFMVIITYFVKNVISTTSDGSRLKKKKKK

SEQ ID NO: 294518 - protein, 123 aa, Zea mays
  unsure (1)..(123): unsure at all Xaa locations
  Clone ID: MRT4577_31687C.1.pep
MRGGGRMIDDEERVGHAEIPTSFGPELRACLRCRLVKTYDXTLLRWRRSPPPSSRLGLRSRFTSLPXRDGSRTGGFVSPGAVRSRRRLKIISLMDPSRSWAARWLRIGDPCSRVSCSLFASSI

SEQ ID NO: 294519 - protein, 58 aa, Zea mays
  Clone ID: MRT4577_31688C.1.pep
SSLFSSVTHVQHQAPSSDYTVLSCDYKISIGFLAIQESSCTESQLTPPTKKKRSRSGR

SEQ ID NO: 294520 - protein, 436 aa, Zea mays
  Clone ID: MRT4577_31689C.1.pep
LQHIFASSSHTYGGLTLDLHCNRLGPTALFQICECAVLTDRLEVLNLSGNRLTDACSSYLFTILKKCKALYSLNVEQCSITSRTVQKMTDALHEESVLSHLSLGKNNPISSNTMLNLLSKLASLTRFSELSLTGIKLNKLMVDKLCLLAQSSCLSGLLLGGTSIGPVETTRLTEALSCTSQDFLRLELSNCGLTTPDFTQICTNLSRINILELNLGGNPINLEGCDAVQRMLVNPQCSIRSLSLDKCNLGLAGIVRVIQSLPENSQLEELRVSKNTNLALETTTKYDEDMQEVSTASEQKQCNDPETTNDIAPGNIDFANMQVPDSEDEADNDAHRARSGSRRSCASSSQKNSYSSCQMIEELAKALISAKQLMVLDLSCNGLSEEAVQSLYSAWASVPRGDGMARKHVNKEVVHFSVDGMRCCGLKPCCRRDLQM

SEQ ID NO: 294521 - protein, 55 aa, Zea mays
  unsure (1)..(55): unsure at all Xaa locations
  Clone ID: MRT4577_3168C.1.pep
MAFADARLAEIAFSIXXILVFSKPGIKFQDITTLLLDPKVYRDTIDLFVERYKDQ

SEQ ID NO: 294522 - protein, 139 aa, Zea mays
  unsure (1)..(139): unsure at all Xaa locations
  Clone ID: MRT4577_31690C.1.pep
MRGGGGMIDDEERVGHAEIPTSFGPELRACLRCRLVKTYDQEXLRWRRSPPPSSRLGLRSRFTSLPLKGGFEDWGFRFSWCGPFSAAAKAERLNVVNCATPNFTRIISLMDPSRSWAARWLRIGDPCSRVSCSLFASSI

SEQ ID NO: 294523 - protein, 103 aa, Zea mays
  Clone ID: MRT4577_31691C.1.pep
MVLLFMQVETTRLTEALSCTSQDFLRLELSNCGLTTPDFTQICTNLSRINILELNLGGNPINLEGCDAVQRMLVNPQCSIRSLSLDKCNLGLAGIVRVIQSLP

SEQ ID NO: 294524 - protein, 101 aa, Zea mays
  Clone ID: MRT4577_31692C.1.pep
PRQVHRPAILFNKHLVFVVHGCGYQFADCEPRAHLPVASPVSILRNLSHQHHCHNTMVQVLHRARAHKLSTSACQHRLSSITKNDWTVARWSSALVLREVR

SEQ ID NO: 294525 - protein, 42 aa, Zea mays
  Clone ID: MRT4577_31693C.1.pep
FVYINRAKKKQSGGVYLMGMAGFPPTNVSNFNVVIFIALPFL

SEQ ID NO: 294526 - protein, 39 aa, Zea mays
  Clone ID: MRT4577_31694C.1.pep
LRHHMLHHDLIHSHDTSQIRSPSHAVGSTESSDNLVLIR

SEQ ID NO: 294527 - protein, 107 aa, Zea mays
  Clone ID: MRT4577_31695C.1.pep
LTHLFIEGYSIRFARQPDAFCSKTVVAEAPKGTFRLHATLITSPGKAKAISSPRCVSMSSAMRRMSRRLLGTFLLTRTMRYARPSTTVFLSTPGSPIRTGSARAMAS

SEQ ID NO: 294528 - protein, 171 aa, Zea mays
  Clone ID: MRT4577_31696C.1.pep
MGRQGNMEDDDFEANGILEEAFLHHSAKQASLLLSTIVERPIRAKLKIAKNIPQLQILFNTSKRKISMDILYPGVDDEDLVVNDDPRSTRASAMPLNLRKYSLMMRLSYTNLRKVASRRSLLIKELASSQHTMIDNNDILFDVIGDGNQDDKSLPEGIDVSRHEGQREGDN

SEQ ID NO: 294529 - protein, 187 aa, Zea mays
  Clone ID: MRT4577_31697C.1.pep
MAFTSCLLGSDAERKVAVAEVALRAVLCGLGALAAALVATDTQTRTFFSLQKKATYTDMKAMVLLVAAAATAAGYSLLQAARCCCCVALLRTSIRPRARLLLAWCVFACDQALAYALLAAVAAALQASVVAKQGLPQLQWMAICALYGAFCRQAGAGVACAVAAAVDAALLAFLSAFNLFRLYGAKA

SEQ ID NO: 294530 - protein, 200 aa, Zea mays
  Clone ID: MRT4577_31698C.1.pep
MARGARFLLVLALLAALLAVVLQLYRHRKPRLWMVEELSVYNGTNEELPILLAILGSVFDVTKGRSHYGPGGGYHHFAGRDASRAFVSGNFTGDGLTDSLQGLSSSEVNSVVDWRKFYFERYIFAGKLIGRYYDSEGNPTKYLKGVEVKAKRGTQLLEKQKSDEAKIPGCNSKWSQQEGGEVSILVPSPFFLTHGFISCC

SEQ ID NO: 294531 - protein, 97 aa, Zea mays
  Clone ID: MRT4577_31699C.1.pep
MIGHVQVLKKKKKKKKKKKKKKKKKKKKKKKKKKKKKKKKKKKKKDKKKKRKKKKKRGPKARGPQKKREPPGRQKWETKFPIPPNPKGGPGPQFPQY

SEQ ID NO: 294532 - protein, 70 aa, Zea mays
  Clone ID: MRT4577_3169C.1.pep
CYRTRGQEERGDAQDLQLKQVHIGIGIGHVSHELVHQRQLAGEAAKFIRHNKMATITSQDIKAVTKFTSS

SEQ ID NO: 294533 - protein, 36 aa, Zea mays
  Clone ID: MRT4577_316C.1.pep
MDVCLVPKKKKKKKKKKKKKKKKKKKKKKKKKKLEG

SEQ ID NO: 294534 - protein, 253 aa, Zea mays
  unsure (1)..(253): unsure at all Xaa locations
  Clone ID: MRT4577_31700C.1.pep
MTAPSSAPTIPGTFQAMARGARFLLVLALLAALLAVVLQLYRHRKPRLWMVEELSVYNGTNEELPILLAILGSVFDVTKGRSHYGPGGGYHHFAGRDASRAFVSGNFTGDGLTDSLQGLSSSEVNSVVDWRKFYFERYIFAGKLIGRYYDSEGKPTKYLKGVEVKAKRGAQLLEKQKSDEAKIPGCNSKWSQQEGGEVWCDAXYPRLVRRXGDIALTGXVXXRCAWFXENELDKAGLVVYEGCDYLSQSCKVN

SEQ ID NO: 294535 - protein, 115 aa, Zea mays
  Clone ID: MRT4577_31701C.1.pep
NTCDLHEHSFNCLAAQQDLARQHNLQWLSGWAVCYAASSGAGSDMEALLEFYRGIRQDPFRRQAIAWNPTSALDSCDCPVDWHGVQCIGGPILSIDLDGIDIAGNARSSVVARMP

SEQ ID NO: 294536 - protein, 105 aa, Zea mays
  Clone ID: MRT4577_31702C.1.pep
DFSSDTLILTNLSGLLLADNRPVPQPCSLHSSLHLQHCVLIHLLQCCLSAAELHGLAIVLRAMRRPEIHLEHLLGPYGAYVCVPSPGPRLTLFWILHVCTIVSEL

SEQ ID NO: 294537 - protein, 198 aa, Zea mays
  Clone ID: MRT4577_31703C.1.pep
MARGARFLLVLALLAALLAVVLQLYRHRKPRLWTVEELSMYNGTNEELPILLAILGSVFDVTKGRSHYGPGGGYHHFAGRDASRAFVSGNFTGDGLTDSLQGLSSSEVNSVVDWRKFYFERYIFAGKLIGRYYDSEGNPTKYLKGVEVKAKRGAQLLEKQKSDEAKIPGCNSKWSQQEGGEVWCDAGYPRLVRRPGDI

SEQ ID NO: 294538 - protein, 125 aa, Zea mays
  Clone ID: MRT4577_31704C.1.pep
MARGARFLLVLALLAALLAVVFQHYRLRKPRLWTVEELSLYNGTHEGLPILLAILGSVFDVTKGRSHYGPGGGYHHFAGRDASRAFVSGNFTGDGLTDSLQGLSSSEVNSIVDWRKFYSERYMKC

SEQ ID NO: 294539 - protein, 200 aa, Zea mays
  Clone ID: MRT4577_31705C.1.pep
MGSLVSCLSDPCQSGNGSPPPQARRRSSTSSRGGRGGGGRDSAKASVTIDEEAPAAAAALVLGQRGAGAFERSASVRYAAKRHGQGPPLARSCSTRPRSLADPELQPQQLLAKDLNTKDLETSVIVLVHGGGFGAWCWYKTISLLEDSGFRVNAIDLTGSGIHSYDTNKISSLSEYAEPLTSYLEGLGDAEKVILVAHDL

SEQ ID NO: 294540 - protein, 166 aa, Zea mays
  unsure (1)..(166): unsure at all Xaa locations
  Clone ID: MRT4577_31706C.1.pep
MTECISIHIXQGGIQVXNRAXELYCLEHGIHAEEHMPVDQTIAGGDDAXYNTFFSETVAAKHMPRDDFEELEPTGIYEVRSGTYRQLFHPGRLIRGHRRDDFHHFARVHYTSGKHIDDLSLDRITEIADDXLRPQCFLVFDAGAGGRGSGLGSLLLERMSVDYRKK

SEQ ID NO: 294541 - protein, 128 aa, Zea mays
  Clone ID: MRT4577_31707C.1.pep
HAHRELQNAALQAFFFLFNLFFFLFFFFLFLFFFFSFFFSIFFKISKSNISLFIGHTQPQKKPHTKTPQQPHQPKDTNNNSYPEKTSLVPPTNWLKQNNILIPTNKNHLSSISLLNTPSKILPSNNQR

SEQ ID NO: 294542 - protein, 76 aa, Zea mays
  Clone ID: MRT4577_31708C.1.pep
LLPRKLTCLSMYCCLRRTYARVCTPYEPADPSIYCFSQAGAKEISLFSRGLYRPLTKTASIQISPVPVSGLLPPTS

SEQ ID NO: 294543 - protein, 83 aa, Zea mays
  unsure (1)..(83): unsure at all Xaa locations
  Clone ID: MRT4577_31709C.1.pep
QSLTAVYIYMYYFAAGSTDEARFIYDQLTELGTKPDDSAVATLIVQYGQAKQLERAQELFDSASRARXFPDRALVCNAMVDAF

SEQ ID NO: 294544 - protein, 76 aa, Zea mays
  Clone ID: MRT4577_3170C.1.pep
QHAPRGGQPDRPKTHARPSTTGNTQPSPLLGNKARISYAVVVTPRTEGFRTALFFDRHTHKSQQERMMCDGEASQK

SEQ ID NO: 294545 - protein, 53 aa, Zea mays
  Clone ID: MRT4577_31710C.1.pep
FTIFIPLFAIFSGKSGFRITMEYFLNMWVSDICSSNAVGIGFIINICSQVLPT

SEQ ID NO: 294546 - protein, 73 aa, Zea mays
  Clone ID: MRT4577_31711C.1.pep
ATRLAIDFALVQPTASASAVTTSEQAPDLIDAAADYDLEDGSAHALLCDLAGLHTLARPDSYSHSFCQWTPCY

SEQ ID NO: 294547 - protein, 140 aa, Zea mays
  unsure (1)..(140): unsure at all Xaa locations
  Clone ID: MRT4577_31712C.1.pep
VEEIRRKARAEVAAMVRETITSIDYDEYLQELVDWVEVHKTEHVMEKGVLGLGSPTLNQTVFASFPLDTNFGFGDAAXLALPICDYGRLCSGYLSVGARPGGDGSWLLSAYIWPQMAAALESDGVFKPLTAEYLGLTVTP

SEQ ID NO: 294548 - protein, 468 aa, Zea mays
  Clone ID: MRT4577_31713C.1.pep
MPAVGSSDVSIRVLSRRLVKASDPSLQPHVVTFSNLDLYPDNVQASIVCLYPKLSTKSGPGGGFDAVVSTFEAVLPTLLNHFYPLAGRIVVNPSSGVPELHCHNQGAELVVGEVGVALGSLDYGLAEESLKKIMMPYPEDVTLSVQLLSFACGGFSVVWANNNLLNDGNAITMCVRMWSELARTGGSIATVGAVSVNHDRSMFRPRNPPAYSDALDAMFATYDDHRTVNALTAAASFVERLYYVEAADIAKLRDMATVTELQRPSRVQAVSAYLWKVLAAVVAACRVPEERCCMGWMVDARRRVKSPELIPAMRNYFGNVTAYALGGAAVEEIRRKPLAEVAAMVRDTITSIDYDEYLQELVDWVEVHKTEHVMEKGVLGLGSPTLNQTVFASFPLDTNFGFGDAALALPICDYGRLCSGYLSVGARPGGDGSWLLSAYIWPQMAAALESDGVFKPLTAEYLGLTVTP

SEQ ID NO: 294549 - protein, 41 aa, Zea mays
  Clone ID: MRT4577_31714C.1.pep
LYLIMQVIVGLVMCNLAQQAMRELDAENRGHVITYALAHAW

SEQ ID NO: 294550 - protein, 68 aa, Zea mays
  Clone ID: MRT4577_31715C.1.pep
VESKNCLVVEDSVIGLQAAKGAGMSCIITYTPSTASQDFKDAIATYPDLNNVRLEDLKLLLQKTLVTG

SEQ ID NO: 294551 - protein, 50 aa, Zea mays
  Clone ID: MRT4577_31716C.1.pep
YEQLAPLTSCKGGIGLPIRRLVDRPTATAYRYAAYLHICAILVHEHVAFE

SEQ ID NO: 294552 - protein, 55 aa, Zea mays
  unsure (1)..(55): unsure at all Xaa locations
  Clone ID: MRT4577_31717C.1.pep
MVPCFGFRWAPSYSVGSLLPSRASXFLXXXQIHDKCKPDLRMNVSIIIYARAADD

SEQ ID NO: 294553 - protein, 61 aa, Zea mays
  unsure (1)..(61): unsure at all Xaa locations
  Clone ID: MRT4577_31718C.1.pep
XTTCSRPGGGGPLMSSFTILLLSSFAATGAYPARXELQPIQMKNHHFSFFFYIPXPVGGGG

SEQ ID NO: 294554 - protein, 84 aa, Zea mays
  Clone ID: MRT4577_31719C.1.pep
AAAHGGRVPPLCISVGLGGPPCQKLFFLCRCMPRSRAVVRSPLLIFGCIDRSVCVCFVWRRSFIFCVAALPPSVVLAMVTKNVF

SEQ ID NO: 294555 - protein, 250 aa, Zea mays
  Clone ID: MRT4577_3171C.1.pep
MARYALLAAALLGFTVAQTPGTTPEVHPKLTTWKCTKRGGCKAQNTAIVTDSAAHPIHQKNNSTLGCGSWGDGPDPTACPTKEACAKNCIIEGISDYSTVGVFTKGADLRMDMYNPAGNFVSPRVYLLSKDEKNYEMLQLTGNELTFDVDMSKLPCGMNGALYLSEMRADGGRSKLNPKGAAYGTGYCDAQCFVTPWINGEGNVAKQGVCCNEMDIWEANSRSTSIAPHTCGKPSIFACTGDECGKTGLC

SEQ ID NO: 294556 - protein, 66 aa, Zea mays
  Clone ID: MRT4577_31720C.1.pep
GAARAMVVMLLGAAVSKLRDMQLHDLIQQQLQQRSHSATDAVHVHRPSGTGPRIDKPRKTCVHGPC

SEQ ID NO: 294557 - protein, 82 aa, Zea mays
  Clone ID: MRT4577_31721C.1.pep
HIDRSPRSTGAPYSLMPPRRGNQSIRRYIAIALCSVRCASDSPVHPRTEDNQGLPNRAPMAPKSLGAIKGPLDAMEHYTSIP

SEQ ID NO: 294558 - protein, 71 aa, Zea mays
  unsure (1)..(71): unsure at all Xaa locations
  Clone ID: MRT4577_31722C.1.pep
SLNSPDKACNVAEQAFDXALSELVSSGEESSKDSPMFMQLLKNNMWLGSRDRSENGAEEGKHAPKGDAGEV

SEQ ID NO: 294559 - protein, 71 aa, Zea mays
  Clone ID: MRT4577_31723C.1.pep
RNLFLMTYPCIQMLWHNSSLPWQTRDENQTKPNSTNKHPLWVAILGDYVLLVVYLPTSTSEETPIAARRIK

SEQ ID NO: 294560 - protein, 71 aa, Zea mays
  Clone ID: MRT4577_31724C.1.pep
FQQPQLFPFSQLVGVGPAAFFPHPQLLLFYQPGGPNGGPLFQLPQLLPFTPLVFSNPAGFFHQPLIGGAPF

SEQ ID NO: 294561 - protein, 921 aa, Zea mays
  unsure (1)..(921): unsure at all Xaa locations
  Clone ID: MRT4577_31725C.1.pep
MTTNTKRAYKLQEFVAHSSNVNCLKIGRKTSRVLVTGGEDHKVNLWAIGKPNSILSLSGHTSAVESVGFDSTEVFVAAGAASGTIKLWDLEEATINGICSDHTFNCIFVSLXVGVGLEAEQRRERCNLCFIELENAKNKLPSLTRRKGAVANAAQELALVXSGNHELTDDILDTXIRWDVLPSAGTEIGYQLPMEXHPSYSLLATGSASKTVKFWKGVLFELIRSTGPMLTGVRSMTFNPAAAILLCGLHESLKVFSWEPIRCHDTVDVGWSQLADLNVHEGKLLGCSFNQSCVGIWVVDLTRLEPYTMGTSTKVNGHSELKTVSSGTLPLQNDSGSRANIGRSSVLQNTENNLKTTSGRLSASQNSDSAPKETNSAPSSGLIPSTPHRAGVGSHNRSVGNSAFQSGGTTLKRSSLRNNSASNVHNFSKADVVPVIVPRTSSGGELATDSRSDAADVAPVLPKVTRRVEPATDSRKESNDVELVVPRASSRMEIADLAPISSSKSGRRLESAPDSKEESADTAPVVVSNPRANVRMEIVSDSAPALSKSNRKLDSGTNSKKESADAVIVPRTNSRMEMISDSRREPSAGRISPFRIQSRYAEPRKLAHARTDSNKVDSRSKITETEDFNCQIFLPRRNGVFQTISSEEPREDVKCGPVDRVGFSNSSEPNASVRNENYVPRMRKPGDNCYIEVSRAGRARSSVSNWEGRDQPPSHEEPTTSSSTLAPTGHPYSSRGSNQASEAPIIASDEDVISLIMERHDLFLSSTKSRLMKLQIIHQMWERNDIRGVLSAMDRMGDHAVCADMASVLMEKSETITLDLCTSILPVVTDLLESKIDRHLVVALELLVKLVRTFGPMIHSTVSSGPCVGVDLEAEQRRERCNLCFIELEKAKNKLPSLTRRKGAVANAAQELALVFQEIMS

SEQ ID NO: 294562 - protein, 209 aa, Zea mays
  Clone ID: MRT4577_31726C.1.pep
RTRGYKGHTRGVNAIRFTPDGRWVVSGGEDNIVKLWDLTAGKLLHEFKCHEGQIQCIDFHPHEFLLATGSADKTVKFWDLETFELIGSTGPETTGVRSMTFNPDGRTLLCGLHESLKVFSWEPIRCHDTVDVGWSRLADLNVHEGKLLGCSFNQSCVGIWVVDLTRLESYATGTSTKLNGHSELKTVSSGTMPLQNDSGSRANIGQSSV

SEQ ID NO: 294563 - protein, 47 aa, Zea mays
  Clone ID: MRT4577_31727C.1.pep
LNTSHTHSLGGDEELLICHSQTWSFLAGSETVLIANPLTPDSMKGPA

SEQ ID NO: 294564 - protein, 134 aa, Zea mays
  Clone ID: MRT4577_31728C.1.pep
MAGVVSRSRREARKAHFGAASDERRVRMAAPLSKSLKAEHGVRSIPVVKGDTVKVLRGTYAGREGVIASSYRRKWVITIEGVHRDKASGATVPIGVDASKCEVIGLKLNKDRKAILARKSNKKVEKSEDAEMKA

SEQ ID NO: 294565 - protein, 102 aa, Zea mays
  Clone ID: MRT4577_31729C.1.pep
YLSEEGFKVIGYRSAKYSELHAGVPSYMSSGPIYWSLRKLQWMPFISSNMIRKPDFSCSNDYLSSWNQPITILYNMSTLSVPFFLVNPFPNICKRTRPVYVL

SEQ ID NO: 294566 - protein, 113 aa, Zea mays
  unsure (1)..(113): unsure at all Xaa locations
  Clone ID: MRT4577_3172C.1.pep
CGARAGRAGITHSNPHSTSTSHGRCTQTHQASAPMAYYQEVDYCSEEVRSVAPAGFGRHGGGVQHHVVKENFEEVDTVARDGDNHHHHHGHHXAHYFELHVTIGQEDLDTCYD

SEQ ID NO: 294567 - protein, 57 aa, Zea mays
  unsure (1)..(57): unsure at all Xaa locations
  Clone ID: MRT4577_31730C.1.pep
KQWPEQGFTXRMMPKXKXHNKGSQXXYSTPHATXRDMETKAQXXFLGFLXASKCXNT

SEQ ID NO: 294568 - protein, 179 aa, Zea mays
  Clone ID: MRT4577_31731C.1.pep
FRSPPYALNAELAWTIPVGGMGSSASPPPPPTMPLLMIGGRGNLTIFITPPSPARTPRSAGATRRLLESPRSDISTPIPQREVPGPSVYPSPRNQESRRAESAEAIIPPPPAACENDALPPVHVTPPQYHKESALGKHDVSAVEFFWDAVGRVQEVHASLDQHVSTCSPVGSAQVTACA

SEQ ID NO: 294569 - protein, 67 aa, Zea mays
  Clone ID: MRT4577_31732C.1.pep
TEPRGRPDAPGEKATGEARPQTVRTARRRRSSIVPMALAGVPFIREYWNGRRGGGGVSYESFQRRAS

SEQ ID NO: 294570 - protein, 242 aa, Zea mays
  unsure (1)..(242): unsure at all Xaa locations
  Clone ID: MRT4577_31733C.1.pep
MDEHKLGYKGSDVLQELEILTINAKTAQEVILSKILEKNRATEYLNKFMNGSIDISAFKCQVPVVTYDVVQPYIARIAAGERSSILCGEQIVELLRSSGTSRGEPRLMPSISEDIYRRTYLYSLIMPIMSKYIRGLGEGKAMYLLFVKAETLTNAGIPVRSVLTSYYKSPQFLQRKHDLYNSYTSPDEVILCPDSQQSMYCQLLCGLVERENVVRLGAVFASAFLRCISFLESXWHDLTTDI

SEQ ID NO: 294571 - protein, 62 aa, Zea mays
  Clone ID: MRT4577_31734C.1.pep
QGGNHVLGKTIANIDPWSALGFIVICVTCSQSCPSKGASSYLYTRSEFIWGYRKKKDRGRPI

SEQ ID NO: 294572 - protein, 124 aa, Zea mays
  Clone ID: MRT4577_31735C.1.pep
MVTAIAVVSMVLGMLTAVTIANTSSAPSVGTPLWRPGLGPALRWGARGCAPRCEACGGYCKEYCRLCARWSHAKTIRKNISRSCCGTCADTRRTPCRCCSGSRTRRRAPMRIGTSARTAPTTDK

SEQ ID NO: 294573 - protein, 76 aa, Zea mays
  unsure (1)..(76): unsure at all Xaa locations
  Clone ID: MRT4577_31736C.1.pep
HASGERHWRLRRGRGRRGWVHFVAAMFRCDGCTRVAGRXSRNMATLDDDGGEEQQQQHAGVAAMRRFKSGRRAASW

SEQ ID NO: 294574 - protein, 165 aa, Zea mays
  unsure (1)..(165): unsure at all Xaa locations
  Clone ID: MRT4577_31737C.1.pep
QHEHVVRTTVEEHLEISIPRSVCMEMTNLALISSRGNMTTREDVEWVFTFPKIVRGACIVGRICNDIMSHEREQASLDHVASTVQTCMKQYGVTTEEANEKLRAVIEMAXMDIVQDNLEQERPIALLDTMINVARIADFIYKREDAYTLSFSVKGIIGSMYVYSV

SEQ ID NO: 294575 - protein, 87 aa, Zea mays
  Clone ID: MRT4577_31738C.1.pep
HDIVNYITESSYPAHEKITLTLPHTYSDCHISIYSNLHYLIQTIHITESDIPLSHNPTTLHHIRLVTTTHLKHLLLIDQSLIMILAH

SEQ ID NO: 294576 - protein, 87 aa, Zea mays
  Clone ID: MRT4577_31739C.1.pep
LWIASLRWRRRCSSSYCCSSRGARLRRHGAEVSGDMRARGSGGQATIMIRAKARVGGCPYCTVCRMWQTIRGVTCSPSAASWGRRPA

SEQ ID NO: 294577 - protein, 148 aa, Zea mays
  Clone ID: MRT4577_3173C.1.pep
ICGRVGLARAGHLEEAWDFIEEMPGKVDAVMLGALLAACRKCKNTEVGERVINRIMKLEPSNSWNYVVSSKIYATSDKMDESARMIGLMRERGVNKTPGCSWVEVNGKVLEFYASTEPQHGAEDMYQLMGVLVNEMRLKGYVPNLDLV

SEQ ID NO: 294578 - protein, 337 aa, Zea mays
  Clone ID: MRT4577_31740C.1.pep
NNGIITFEEWRDFLRLYPNEATIENIYHHWERVCLVDIGEQAAIPEGISKHVNASKYLIAGGIAGAASRTATAPLDRLKVIMQVQTTRTSVMHAIKDIWTKGGMLGFFRGNGLNVVKVAPESAIRFYAYEMLKEYIMKRKGENKSEVGASERLIAGGLAGAVAQTAIYPIELVKTRLQTYSGEVGYVPRIGQLSRDILVHEGPRAFYRGLVPSLLGIVPYAGIDLAVYETLKDVSKTYILKDSDPGPLVQLGCGTVSGALGATCVYPLQVIRTRLQAQQANSESAYRGMSDVFWRTLHHEGVSGFYKGILPNLLKVVPAASITYLVYEAMKKNLSLD

SEQ ID NO: 294579 - protein, 56 aa, Zea mays
  Clone ID: MRT4577_31741C.1.pep
MEDTRASYSMGQGLWRGHFGVTHLCTHRTSGEKLACKTIAKRKLAATEDMDNMRRK

SEQ ID NO: 294580 - protein, 92 aa, Zea mays
  Clone ID: MRT4577_31742C.1.pep
TNDQSLVIIINNLNMKGFTHERLFFFYLITESSSTETSLIVVESWLSKVRLTSESSLLAKAFLLTHSDTTWTWQHWHVIKSRHKSEIMINID

SEQ ID NO: 294581 - protein, 74 aa, Zea mays
  Clone ID: MRT4577_31743C.1.pep
FNPLIPEITFYLNNLALYKQNDYKYLTHIYLLLTFPYIQNFTPKNPFLTINFHFNTLCRRQFLYSLPEINHLSI

SEQ ID NO: 294582 - protein, 65 aa, Zea mays
  Clone ID: MRT4577_31744C.1.pep
HLGYHQHIQHQFVAVTEWTGGLYVSPTIAGSRPGGLIAGAWAAMMSLGLNGDKLILKFHQCVVMA

SEQ ID NO: 294583 - protein, 107 aa, Zea mays
  Clone ID: MRT4577_31745C.1.pep
ARTKPGSRQENTHVMHALESAHRGELGSEISTTTPMRGPLEKPEKEWRGGRSDEYGGATPSQRETELERNHIQGRPAMQWEQSQGNKGEEHGRSLQGQTNLIDKPRQ

SEQ ID NO: 294584 - protein, 113 aa, Zea mays
  unsure (1)..(113): unsure at all Xaa locations
  Clone ID: MRT4577_31746C.1.pep
LFFFFFFFFFFFFFFFFFFGGNRSYLSIGNQNGGNGHVPTHTRYKVTTWGGGAAGGAIEAVESVLNNHHLGIYPFIWSRAPVFLGXSPMPPPGLWPTAPHAIVWGRVNPGGAP

SEQ ID NO: 294585 - protein, 35 aa, Zea mays
  Clone ID: MRT4577_31747C.1.pep
QCIYSFCRRISMAGLSMRTVPHLADAIHAAVTQLK

SEQ ID NO: 294586 - protein, 43 aa, Zea mays
  Clone ID: MRT4577_31748C.1.pep
RKLGSFYQLKSTPPYEQKYWGRLTSVPNSTPINRLFFSLSPPS

SEQ ID NO: 294587 - protein, 272 aa, Zea mays
  Clone ID: MRT4577_31749C.1.pep
LDGSFGQLGTGDNLSRNFPFEVAYFNATHIEKLAFGMRHSLVLLKDNSVYGFGSARRGQVGKCASRIQKSYNVPRLIDGFPNCKIVNIYANGDHSAALDESGHLYVWGRALIGQHDDDQPSEILPSLSVSQVALGWHHALVLSAGELYTLGVYRHQKCDLPGLGNVLGQQSDTRATSSSHDCSSSLSVLETVPFLDGEQVAQIASGTEHSALVTDKGTVFTWGWGEHGQLGLGDTSDHVAPQRVNVGDNGQGMSGSFAVYCGSGFTVAVKSP

SEQ ID NO: 294588 - protein, 59 aa, Zea mays
  Clone ID: MRT4577_3174C.1.pep
MADGKKLGDVRDKLTEAHIALEDMVKQTYTLLWSLGRWLKGQSKPIWSTHWKFCGFLED

SEQ ID NO: 294589 - protein, 178 aa, Zea mays
  Clone ID: MRT4577_31750C.1.pep
IFVGQLRQLFGLKPSYFSQDMDVPTKFLVSEKGFTEWELDLLYRHHARSNLLSCLTTLESLSSLVHSLPRMIVMDEIGRQVELSLEAANLAQGNATLGISDSSAVSATRARALAEDAFFHPSIMSISYASVEHYFAIYMPFFAPVSLHVLLAAIKELKRYKAERAKYSAFLASQATSS

SEQ ID NO: 294590 - protein, 535 aa, Zea mays
  Clone ID: MRT4577_31751C.1.pep
MAEIAGDEAPTPPTISGEVSGDPHTSAATPAGSSNKPPLRATKPGVKRLILTASVLLSFLVGLPFLLKSTEIHRSPLPSDAITALAHRLHSTPPSFPCALHAVFLRSVPGRSDDASLYRRLERSISAQLQLLAATSTAGNVSVSVTVESAGGCSSSSGSVGSGWQCGTVSSADLVVGDEVFDELLHSALGSVGGDGSRVYTVVVVEIDDADGMRVVVGKHRHAWVVGKADEVKAVSVIGKVFAKYFMNGGIEEGEAGIGKGEFMPVGSDGNVVLSFSLLNADPSDWVYDWDFEKIGEKMLNPVVEALRPIAEINIESQVLYHTPKSSYSYFDDKLGGNFLSMGDIPFFVNSNEWHLDTSISATGRSKVLQFVVYIPSARECPLYLQLPDGGLSKTNAFISPMWGGVLIWNSPDCSLGSKKTHGTQKKMSSQELMEALEIFVGQLRQLFGLKPSYFSQDMDVPTKFLVSEKGFTEWELDLLYRHHARSNLLSCLTTLESLSSLVHSLPRMIVMDEIGRQVLPRTTLARWELISIDL

SEQ ID NO: 294591 - protein, 174 aa, Zea mays
  unsure (1)..(174): unsure at all Xaa locations
  Clone ID: MRT4577_31752C.1.pep
MVLAARSNGNGTGGGAQAPSTAPQPASPAASPPPASSTPPPPSSPAPKGASPPPASAPTTTPGTPPPPAPSASSPAPASSTPPPPSAPQTPPPPPPPPPPPPPASSASSPAPALTTPPPPSAPANAPQAPPPPSASSPSPSAHGATASSTGTPSSPPXPAPRSRTAPPSRWPRA

SEQ ID NO: 294592 - protein, 55 aa, Zea mays
  Clone ID: MRT4577_31753C.1.pep
NNYGPVLFKILFGGKLIFTRSVTGKTGAVIGLDMTYRVHSWVFKSHRLCARHNHF

SEQ ID NO: 294593 - protein, 87 aa, Zea mays
  Clone ID: MRT4577_31754C.1.pep
RLSFNLLGKKLLLRSLYHVTFDLFLQLTLSMVELRAFQETSDASQRSAATLPLSPSPSDSLPGGKYEVLVIKAGLRKVKILTDLVST

SEQ ID NO: 294594 - protein, 149 aa, Zea mays
  unsure (1)..(149): unsure at all Xaa locations
  Clone ID: MRT4577_31755C.1.pep
MIASSTCTRAMCFELIFVNSDYSSVAAEYGKILDRPVLNEPRTNNLHYSIPDLLLFRILHRCIFAVTQTDVEKIIDXHNTSPTVIDIPFKSPRCILVNNTAVPXASXHLAAMRGXMPHMLRDPDEIHPLLPSNAISDHATRLVCIPGPI

SEQ ID NO: 294595 - protein, 773 aa, Zea mays
  Clone ID: MRT4577_31756C.1.pep
MANGNNEVMGISQRKSCPKVHSSMCSELTMMLDKVSSILPSIEAARPGCKAGIQELCNLYNVVEKGRLIIIHCIDCSKLYLAITGETIVARCERIRDSLRRSLFLIQNMVPPALANQIAEVHNDLRDVKFLLDPMEEEAGKAMLQMLRQSDASEELELETFLQAASKLELTSPKEVLIERRAIKKLLGKVSGNDAKKEGVLKFFMYLIKKYGKIIRQDSGEQNADLRAESQSLTLSTPSCDASAPGKCYTPTDFQIYEDHSNMSGAATPPPEFCCPISTKIMHDPVIITSGQTYEREYIERWFNEGYDTCPRTQMKLENFSMIPNTCMRDLICNWCKEHGFTVSDFIPPNENAYSYLPEQLHGYSMSSLHNVSVPLIAGKANSYVIDHSNTSVALSDASFVSNASHARDMEDSKDISQFSWNADYQKYLSFHNFNQEMFLKFFHELSMLPFELQDKSIKDLKNVLDYGSEISYDMMSNGFVEAFLEFLRNDTGSYSVQDQEAGFRFFLAFISNSRAKVQSMHEESFHLITSFLDSELKVEALLTLLELIKHSSCPKSHVMASVVTPPLFKILASEDTEGLELSLKIICELSSDADIRSSLVSMGIISKLVPILTEGNFVERCLEILRNLSDMEEAVARITRTDRCLASVAEYLDTGSPTERQHAVVILLAVCSCSAEDCLLVMKEGVIPALVDLSVNGTEEAKGCSTKLLHLLRDMRRSDQFTNSCSQEVAATGMVVEDAPKNSVHKQPASKSSRFFQRKLNIFSKPRSLTLF

SEQ ID NO: 294596 - protein, 48 aa, Zea mays
  Clone ID: MRT4577_31757C.1.pep
GERRPRSRSSPGVPRCCFGDINTGYVYHIIEGHRNCLLENTSYARQEN

SEQ ID NO: 294597 - protein, 86 aa, Zea mays
  Clone ID: MRT4577_31758C.1.pep
KNQKPWDGGTKLKIFKGNYLLGFIFSNKKKEKPERDNAETPFKKRVNQGGRLEIGVFKTNFFPFKKKYLFRRTQCTINTKTYFLVD

SEQ ID NO: 294598 - protein, 100 aa, Zea mays
  Clone ID: MRT4577_31759C.1.pep
RAHTESPRKILSREPLVLPAPSMSARHTETRERERLQRDTHRPLFLRRKVIESRATVTCSRHARRCPSYAGEGIVPSRHDKKLVNILYTMTLTHATTTFL

SEQ ID NO: 294599 - protein, 63 aa, Zea mays
  Clone ID: MRT4577_3175C.1.pep
LTILVPRYVVGLVWGQLKSLNWAPLYGMSAAITRGFPNFISVYLIRRWSKWPIWNLGRAVRLA

SEQ ID NO: 294600 - protein, 103 aa, Zea mays
  unsure (1)..(103): unsure at all Xaa locations
  Clone ID: MRT4577_31760C.1.pep
RIPYLSRKRILCXEKPLPKIRNCGTLSLHLMPLRDGPLLRGSWFHPPPSNTLAGFSPSHSSPLNTNCTCTCCLYRLAPSLFSLRTVRNLSEKWVLYQFHLQSN

SEQ ID NO: 294601 - protein, 57 aa, Zea mays
  Clone ID: MRT4577_31761C.1.pep
MERKRNPIVFLDVSVGDEPDERMIFELFADVAPLVTENFRALCTGELGIGHKTKKPL

SEQ ID NO: 294602 - protein, 77 aa, Zea mays
  Clone ID: MRT4577_31762C.1.pep
NLRRHAPSRLSSRPIPYYHNIKGNILHFKKHFLQNMMIMYSGYILNAYTSLNIFGHHKHITKLLIFLDKPQFINILH

SEQ ID NO: 294603 - protein, 100 aa, Zea mays
  Clone ID: MRT4577_31763C.1.pep
MSIALHSGRGVGGGGAPRFGHVARCGYAASPPAVAGRGGSSLVGRYSDSPAAAAQWEWDGEEVEGGDCEVQSLYKGSVFDTMDALHEALPSKKGVCKFYN

SEQ ID NO: 294604 - protein, 189 aa, Zea mays
  unsure (1)..(189): unsure at all Xaa locations
  Clone ID: MRT4577_31764C.1.pep
HSPSRTVTWPLRRQPPTPPPPXTPVAPEPAAKVSLAPSDMVAPXPQQPTPPXPPPPAPVPPXPQPPTPPXPPPPAPAPSTAAADTAAPPPPPPPITTEPAAKVSHSPXTTWPPRRQPPRPSXSPIPPPPAPEIAAKVSHFPPPFPPQPDAPAPKRRKLEEXGSTLPPTTRSGPPLPXPPPPLRPGSRSY

SEQ ID NO: 294605 - protein, 78 aa, Zea mays
  Clone ID: MRT4577_31765C.1.pep
KTFFLYLIYGKIQIFFYVKKKKLKNRGTKKRMCIREHECEKKIYCYAIIVYGVTLTRPDEPYIKNKKGWKKNLETSSK

SEQ ID NO: 294606 - protein, 99 aa, Zea mays
  Clone ID: MRT4577_31766C.1.pep
MDDFVQGVVDDRGDNDEDLGEPSLVNLENAQLFKDFINRLNNDDLLFGSPYDCMVHIVEFEYRYGVKYNLQQHEYIVYITIHGMVRGGAKGGQAGALAP

SEQ ID NO: 294607 - protein, 96 aa, Zea mays
  unsure (1)..(96): unsure at all Xaa locations
  Clone ID: MRT4577_31767C.1.pep
GGPPQTXPPGGXDPPPHRGPGSKKGGPGGXDPQRVPFLARRGKPNFLNGFLGGVPRFGLLAPLAKRKVNGPFNLGVLWFSVPCAPVFRRFCPSFPC

SEQ ID NO: 294608 - protein, 263 aa, Zea mays
  Clone ID: MRT4577_31768C.1.pep
MLELRLVQGSLLKKVLEAIRELVNDANFDCSGTGFSLQAMDSSHVALVALLLRAEGFEHYRCDRNLSMGMNLNNMAKMLRCAGNDDIITIKADDGSDTVTFMFESPKQDKIADFEMKLMDIDSEHLGIPDSEYQAIVRMPSSEFMRICKDLSSIGDTVVISVTKEGVKFSTSGEIGSANIVCRQNQTIDKPEEATIIEMQEPVSLTFALRYMNSFTKASSLSEQVTISLSSELPVVVEYKIAEMGYIRFYLAPKIDDDEEMKP

SEQ ID NO: 294609 - protein, 168 aa, Zea mays
  unsure (1)..(168): unsure at all Xaa locations
  Clone ID: MRT4577_31769C.1.pep
MRVHGEVSDDEAAVAVVGETVPSSPPPASVVQPLVVGYALTKKKVKSFLQPKLLALARKKGIHFVSIDETCPLSEQGPFDIILHKDYREEHPEVTVLDPPNAIQHLHNRQSMLQEVADLNLSNGYGEVCAPRQLVIMKDPSSIPDAVAKAGLTLPXLVAKPLVADGTS

SEQ ID NO: 294610 - protein, 116 aa, Zea mays
  unsure (1)..(116): unsure at all Xaa locations
  Clone ID: MRT4577_3176C.1.pep
MGDSTATNPSSPTAAMDPDSEVVFDFPPYLCQYKSGRIXRPGGAPTVPAGTDPAXGVVSKDIRAGPASARVYLPXRAGKIPVVVYFHGGGFVVGSPARPGTHNYLNCLVARWGAVG

SEQ ID NO: 294611 - protein, 57 aa, Zea mays
  Clone ID: MRT4577_31770C.1.pep
SLQAHHLAQWQSPEITATIVKAVAVLAGTDVKGTIFFSHEEDGPTTVTGSISDLKPG

SEQ ID NO: 294612 - protein, 88 aa, Zea mays
  unsure (1)..(88): unsure at all Xaa locations
  Clone ID: MRT4577_31771C.1.pep
RYLSRIAGPTHESAHASAHASAHASGEQYHSPRKLLLAMIAEVRELSKLFMWKGEVLTGLTDXDDEGNEHLDYELSDVLLYLDRLSDM

SEQ ID NO: 294613 - protein, 68 aa, Zea mays
  Clone ID: MRT4577_31772C.1.pep
MAATLRLRILAAAATAAVVASSLVGVATASEAPGPSPASSTGAAAAAVTGPALAAGTLAVAAVGYLFS

SEQ ID NO: 294614 - protein, 343 aa, Zea mays
  unsure (1)..(343): unsure at all Xaa locations
  Clone ID: MRT4577_31773C.1.pep
MRVHGEVSDDEAAVAVVGETVPSSPPPASVVQPLVVGYALTKKKVKSFLQPKLLALARKKGIHFVSIDETCPLSEQGPFDIILHKLTSKEWQQVLEDYREEHPEVTVLDPPNAIQHLHNRQSMLQEVADLNLSNGYGEVCAPRQLVIMKDPSSIPDAVAKAGLTLPLVAKPLVADGTSKSHELSLAYVEASLPLLDPPLVLQEXVNHGGILFKVYIVGETIQVVRRFSLPDVNTYDLGNNDGIFRFPRVSCATNNAEDADVDPCIAELPPKPLLEKLGRELRRRLGLRLFNIDMIREHGRKDRYYVIDINYFPGYGKMPGYEHIFTDFLLSLVQSKYKRLSGS

SEQ ID NO: 294615 - protein, 91 aa, Zea mays
  unsure (1)..(91): unsure at all Xaa locations
  Clone ID: MRT4577_31774C.1.pep
MQKIRIVDPCIAELPPKPLLEKLGRELRRRLVLSKVLHISPMHFLTLINSSDPVKFXGLRLFNIDMIREHGRKDRYYVIDINYFPGQLSFS

SEQ ID NO: 294616 - protein, 94 aa, Zea mays
  unsure (1)..(94): unsure at all Xaa locations
  Clone ID: MRT4577_31775C.1.pep
LRVSLSVAPLLRRRCRVDGIVSGGRLYNMATASRPGLAVCVHSGLGLSHAGSRDGHHLGVAMVCGRXRPXFGSGARFSSKNERCACVGCGWKTP

SEQ ID NO: 294617 - protein, 90 aa, Zea mays
  Clone ID: MRT4577_31776C.1.pep
RAPRGPWGGSNDAEGGVDRDVSGRRERRVGAGSPSRRSPGGGGGGLPSLSRDLVHQLHLRRGVHGYRAGAALLADLLLTYPGSLGTLSLS

SEQ ID NO: 294618 - protein, 113 aa, Zea mays
  Clone ID: MRT4577_31777C.1.pep
YKGIKTPGRRPGDHPNPYPFFFGTTRKHPTRRHWSHSHRGRTGRVYHARPHQTKKHIPAVLHHCLGGPSGRSARGNNAYRNCMRGRAGFFLPRPTSEGFSTSGPQSVPSGFMW

SEQ ID NO: 294619 - protein, 88 aa, Zea mays
  Clone ID: MRT4577_31778C.1.pep
TKKETPAYSSLFPTIARNRRRTPSSSSAILCCGYGVSDKFLTVRRDSKARERSDIYDRTSISLPLSCFVNLLKHINKHINQTKGPGPS

SEQ ID NO: 294620 - protein, 69 aa, Zea mays
  Clone ID: MRT4577_31779C.1.pep
NHPVSYDLHNNPAFPINLHILPQQLCSGIPTWEKSQEMLLTLFAHTALDTYLLSEGLLSPLNSSCPVIS

SEQ ID NO: 294621 - protein, 84 aa, Zea mays
  Clone ID: MRT4577_3177C.1.pep
NPNTRGILYKGGYGIISLPAGILMNKNLYPLNSCRQDRVGPIQIGLPISKIYPHQCHYSHLIEPILAKINSSLHYHVVYDPTVM

SEQ ID NO: 294622 - protein, 64 aa, Zea mays
  Clone ID: MRT4577_31780C.1.pep
LLAVAILSWRSSREKGGGGFGETKKSPPRPKRPYLLFFSEDHQNCRLFCSSKGFKEGGWVYEKV

SEQ ID NO: 294623 - protein, 96 aa, Zea mays
  unsure (1)..(96): unsure at all Xaa locations
  Clone ID: MRT4577_31781C.1.pep
ISATCYRPISNNXYTNFTHCRAASDSTIRNYHHHMKSDPAHDPSYCVHHTAWHKDNVSCEAFDAARIALPQYMAKSAGLHGIHLRTQGHRVHERDI

SEQ ID NO: 294624 - protein, 263 aa, Zea mays
  unsure (1)..(263): unsure at all Xaa locations
  Clone ID: MRT4577_31782C.1.pep
MVSSMPLSSLLLLLSAASFGGGVRLGDGGYEDWRLGTATYVKEFQSHPLNDGGGACGYGDLDIFRYGRYTTGLSAALFGRGGACGGCYELRCVNHIQWCLRGSPTVVVTATDFCPANMGLADDDAGGWCNFPREHLELSEAAFLRVAKAKAGIVPVQFRRVSCDRAGGMRFTITGSAHFLQVLITNVAADGEVAAVKVKXLEDGVDPDGAELGPELAVRRXDLRAQPLSFEVTGGRGRTVTAYSVAPADWMFAQTFEGKQFAE

SEQ ID NO: 294625 - protein, 279 aa, Zea mays
  unsure (1)..(279): unsure at all Xaa locations
  Clone ID: MRT4577_31783C.1.pep
MASSMPLSSLLLLLLSAASFGGGVRLGDGGYEDWRLGTATYVKEFQSHPLNDAVGSXAGGGACGYGDLDIFRYGRYTTGLSAALFGRGGACGGCYELRCVNHIQWCLRGSPTVVVTATDFCPANMGLADDDAGGWCNFPREHLELSEAAFLRVAKAKAGIVPVQFRXGIWIWWWPCRVSCDRAGGMRFTITGSAHFLQVLITNVAADGEVAAVKVKGSRTGWIPMGRNWGQNWQCDADLRAQPLSFEVTGGRGRTVTAYSVAPADWMFAQTFEGKQFAE

SEQ ID NO: 294626 - protein, 71 aa, Zea mays
  unsure (1)..(71): unsure at all Xaa locations
  Clone ID: MRT4577_31784C.1.pep
PGSARLVVHTPLAGTPGSKSRRFGRRPAPWLDPRRVVLLFATLSSVGTLILLXFTLSMSRADSSGGASDAR

SEQ ID NO: 294627 - protein, 372 aa, Zea mays
  Clone ID: MRT4577_31785C.1.pep
MGNSSSSNRRPPGPSEPAEELSSYEAACRSDPELRTFDTTLQRRTSRAISTLAVGVEVRSMSLDSLREVTGCLLDMNQEVVRVILDCKKDIWKSPELFDLVEDYFESSLQTLDFCTALDKCLKRARDSQLLLHVALQRFDDEEDIDAAAAAPSARYARTLHELRQFKTAGDPFTDEFFAAFQAVYRQQLAMLEKLQQRKHRLDKKVKTIKAWRRVSSIIFATTFAAVLICSVVAAAIAAPPVAAALAAAAAVPLGSMGKWIDSLLKGYQDALRGQKEVVSTMQVGTFIAIKDLDSIRVLINRVELEISSMVDCVEFAERDEEAVKFGVEEIKKKLENFMKSVEDLGEQADRCSRDIRRARTVVLQRIIRHPN

SEQ ID NO: 294628 - protein, 57 aa, Zea mays
  Clone ID: MRT4577_31786C.1.pep
QPLHRFKTDDSEGSPKGHHIFRMKIRLPKVIYIMWWEGTLIYKSDISDMFPYRVSQP

SEQ ID NO: 294629 - protein, 125 aa, Zea mays
  unsure (1)..(125): unsure at all Xaa locations
  Clone ID: MRT4577_31787C.1.pep
LSDSGGPLHTLEYVYYHLMGTKGSFMDGYFDPGPHITGSDTMERFSETGHRDFXKGAQWFALTLTHALLILANNLHYNKFKLDCKPPEGLDCMADEHYLPTLVNMADPGGTTDMAMTEVDRFEGK

SEQ ID NO: 294630 - protein, 62 aa, Zea mays
  Clone ID: MRT4577_31788C.1.pep
RADPLVRLYQDPIHLCFPWTTSTSTGGAPTTRPWPYAITLMATPKFTSMNSHAFKTTIDPSL

SEQ ID NO: 294631 - protein, 200 aa, Zea mays
  Clone ID: MRT4577_31789C.1.pep
MQAMRPAAEGEAQEQAVRAEADEVKREVAKAHDEEEAVPEEKDVAVVGEEVEAEAETETETEGEAEAEVEVEEEVEVEAEAGASSAKKNRIQVSTNKKPLYFYVNLAKRYMQNYDEVELSALGMAIGTVVTVAEILKNNGLATEKKILTSTIGTKDEAKGRLVRKAKIEILLCKSENFNSIMSSKKSERPKPPAEEEIKV

SEQ ID NO: 294632 - protein, 131 aa, Zea mays
  unsure (1)..(131): unsure at all Xaa locations
  Clone ID: MRT4577_3178C.1.pep
MKGKAXDTSKKDEGRLXRPGAHGKRKRAGASAIVKRPPCALIVLMSEFRQEHXAVHXDNKSVATASKAPGEKWRAMSYKEKHPYVDXKSAQKKQDCEETRANCHNKESTSSENAITEDDDGSKDMLKTRMA

SEQ ID NO: 294633 - protein, 57 aa, Zea mays
  Clone ID: MRT4577_31790C.1.pep
VHIMSKLLSKVSCCSGGLRFSAFILPLPNRIVELCHCEYRRWGRCNGPVRQGHSFLF

SEQ ID NO: 294634 - protein, 96 aa, Zea mays
  Clone ID: MRT4577_31791C.1.pep
NTNLQYYLLCPLFVFFPCKESPFVSYQITLMAHRGRSKAMSEYTNIDEYILNQNSLTDLRQLVHFPAKELTSYSYNDRRGAIHACLGLLVRDLQTW

SEQ ID NO: 294635 - protein, 64 aa, Zea mays
  Clone ID: MRT4577_31792C.1.pep
MAWIRSLLSPLKKLWVRMHSDQNKKRGIYILYEDVKSCPCEDVQILWSILVESSHPPPPLRLKH

SEQ ID NO: 294636 - protein, 58 aa, Zea mays
  Clone ID: MRT4577_31793C.1.pep
ASRCPPKSPQRPSRRPAQVPETCIHFFPRLKGEALAFRKLCSKRNNHALQVLSPLSEE

SEQ ID NO: 294637 - protein, 44 aa, Zea mays
  Clone ID: MRT4577_31794C.1.pep
SNGGRAPLIGKRTPPPQYERPWHYLKHSFHSSLNNPRHMHSNPG

SEQ ID NO: 294638 - protein, 86 aa, Zea mays
  unsure (1)..(86): unsure at all Xaa locations
  Clone ID: MRT4577_31795C.1.pep
CRPETFRRLXRASELRADGSRXLVGPIPFGKEMMWRLGMKLRIGGNEGXCASAXQQGLEGVVALGGVADCDGVRSRTTQHLVWSYI

SEQ ID NO: 294639 - protein, 179 aa, Zea mays
  Clone ID: MRT4577_31796C.1.pep
QVPAHINGAAPAVEQPYYQHGRHPSYPSQVSTGTPNIPERAIHAPAFQPYAQPGFQPQAFVPQGYYYPPQNGAQPQYIPPAGMVPMFVPGAQQPGYVMPVSAPPVAAPPAPAGPPNMVAYESNGMTYYVDSNQLQYTAPPVENYAQPSYAVPGMGGMMTPGPDGAYYYPQQMQAPTFYT

SEQ ID NO: 294640 - protein, 126 aa, Zea mays
  unsure (1)..(126): unsure at all Xaa locations
  Clone ID: MRT4577_31797C.1.pep
IRHEGRGAPILATTAGEKKRAKRGHQLTAERKRRRTTNPSPRAPPSPRTMFFPTVLNYLXCXDSHEWLKDQGDSGAAGITDYAQYQLVDLDAVELPXAGLTVSQGKTFVSGQSVNGARHLLTTSWK

SEQ ID NO: 294641 - protein, 255 aa, Zea mays
  unsure (1)..(255): unsure at all Xaa locations
  Clone ID: MRT4577_31798C.1.pep
MMAPPISADALVEAASAVAAYPAIASAAVGSGDLRLSVSDMPMLSCHYIQKGLFFPPPPPGVLAASLVSSLVAALSRALGVFPALAGRLVTLHDDSIVIPXXXGDDAAVEFYHAVAPSLSLGDFLVPGADVPTRLTNGLFPMDRTVSYGGHGRPLTAFQLTVLGDGAVFVGFVANHAVVDGTSFWHFFNTXXXACAXGAPGPXPDFRRNFFGDSTAVLRFPGGASPAVTFDADAPLRERILHFSAAAINELKATA

SEQ ID NO: 294642 - protein, 223 aa, Zea mays
  Clone ID: MRT4577_31799C.1.pep
MMAPPISADALVEAASAVAAYPAIAPNRMLCKDAPAPAISVVSKQTVRPAGAWAAVGSGDLRLSVSDMPMLSCHYIQKGLFFPPPPPGVLVAALSRALGVFPALAGRLVTLHDDSIVIRCGGDDAAVEFYHAVAPSLSLGDFLVPGADVPTRLTNGLFPMDRTVSYGGHGRPLTAFQLTVLGDGAVFVGFVANHAVVDGTSFWHFFNTWAPRRSGRPRPVASR

SEQ ID NO: 294643 - protein, 67 aa, Zea mays
  Clone ID: MRT4577_3179C.1.pep
PGGGINCAFTIDKGFGFVKLNRCQIQIIPGGGDISKQNKQGLGPNGQETKEQYFWALERGWATSRKS

SEQ ID NO: 294644 - protein, 56 aa, Zea mays
  Clone ID: MRT4577_317C.1.pep
PSNVKGEEFQKKKKTQGIKTPKGGGAKGPLGPIGRLPPRAYKGRALLKCQPNLKQG

SEQ ID NO: 294645 - protein, 151 aa, Zea mays
  Clone ID: MRT4577_31800C.1.pep
MMAPPISADALVEAASAVAAYPAIAPNRMLCKDAPAPAISVVSKQTVRPAGASAAVGSGDLRLSVSDMPMLSCHYIQKGLFFPMYDGNDFGWGRALAVRSGRANKFDGKMSSFPGQAGDGSIDVEVCLAPDTMAHLLLDKEFLQYVSSPAP

SEQ ID NO: 294646 - protein, 499 aa, Zea mays
  Clone ID: MRT4577_31801C.1.pep
MMAPPISADALVEAASAVAAYPAIAPNRMLCKDAPAPAISVVSKQTVRPAGASAAVGSGDLRLSVSDMPMLSCHYIQKGLFFPPPPPGVLAASLVSSLVAALSRALGVFPALAGRLVTLHDDSIVIRCGGDDAAVEFYHAVAPSLSLGDFLVPGADVPTRLTNGLFPMDRTVSYGGHGRPLTAFQLTVLGDGAVFVGFVANHAVVDGTSFWHFFNTWAGLCRGAPVREPDFRRNFFGDSTAVLRFPGGASPAVTFDADAPLRERILHFSAAAISELKATANRSKRAGQEAEANGKLAHDDSRLEGRSGEISSFQSLCAHIWRAVTRARRLLAADKTTTFRMAVNCRHRLRPAISPLYFGNAIQSVATTATVAELASNDLGWAAARLNATVASHKDGAIRRAAAEWEAAPRCFPLGNPDGAALTMGSSPRFPMYDGNDFGWGRALAVRSGRANKFDGKMSSFPGQAGDGSIDVEVCLAPDTMAHLLLDKEFLQYVSSPAP

SEQ ID NO: 294647 - protein, 364 aa, Zea mays
  Clone ID: MRT4577_31802C.1.pep
MAIAFLVLNRTTHSAGRIPYPTLRTRAERSWVLQPPSPPRVPAMAHGGYPRRGAAVRRPKSSASAAVADRKRKRTAAAAKTTSLKNQIRSTERFLRKDLPDEIRVAQEKKLEELKRQQELQNQLVVQRTLQFRDRKIKFFERRKIERMIRRLEKQQRSNGDGVNNNLSKLREDLEYVRFFPKNEKYVSLFTGGNSQDIVQERNKWRKQIKENLMAAAANGKDLEETASDDDTLDVSDDDFFMSGSSSDEEADDEWTDKSAKEPASSASGRAASGMSSDEKNQRQRDARVLMPPPRSLAPNRGRHADKRAISSSSSTSNSTSGESFKNRRVPNRPGDNNSNLSSNSDVHKPRRKRRHKKKRKLQA

SEQ ID NO: 294648 - protein, 77 aa, Zea mays
  Clone ID: MRT4577_31803C.1.pep
SHCSTLQRRHTTAADASSANLHLPRRVPCWRTGQSRRRTNDAPVVGRIQPTEEEVTAGRARVTEDHEEERLLNLQCA

SEQ ID NO: 294649 - protein, 60 aa, Zea mays
  Clone ID: MRT4577_31804C.1.pep
HLLPINYSRKRQRRSRVSCRGHPVFARLSAVRILFWISAHVKNSHLVFCFCFPNQIVAEW

SEQ ID NO: 294650 - protein, 42 aa, Zea mays
  Clone ID: MRT4577_31805C.1.pep
TIKIKKKKKKTNTPNPSKNNGLNTHLAVTHSYPIDDRTSSHQ

SEQ ID NO: 294651 - protein, 76 aa, Zea mays
  Clone ID: MRT4577_31806C.1.pep
PKPQRTGWRADDFTHYCVLNFIIRSSTVTFKKMSFTKFSIIRIMWIYVGCSRLEMTSTECIVVIMMLTRYVCHLLE

SEQ ID NO: 294652 - protein, 100 aa, Zea mays
  unsure (1)..(100): unsure at all Xaa locations
  Clone ID: MRT4577_31807C.1.pep
SNVRRGAEKSDKGNKSEEGXNRFWESIGLGFETPREASEEAYIDEKCPFAGTVAIRRKSIAPTCRRGGMXYPSAGRRNYLHFGKNYQRDEKSHSNRCRSH

SEQ ID NO: 294653 - protein, 208 aa, Zea mays
  unsure (1)..(208): unsure at all Xaa locations
  Clone ID: MRT4577_31808C.1.pep
DNIAAYTVGAITSCMRLSAYLGTEXQRLSLNRCTHTFMKRINTHACSDFENNALQTQELLAKLSASLTGEELEIIGMLYLKALKLEVQLFSSKLDHLTCGNLYVNNVRDTLKKVIVFFQSKYLKSGSVVTFHFPAPTSAFPEPAAKDHLHDPGQGRRQNRGKERKRLRNDPDLEPRQRLRDVPQHRPQPGQPFRRAARRQRVIYTGRR

SEQ ID NO: 294654 - protein, 67 aa, Zea mays
  Clone ID: MRT4577_31809C.1.pep
QAMLWCYEHDCDSVNMLSGRCLFYFVICFFWGGGGPSSCFLYKDQAMVYFKWVSWKCRSWQVSSCSS

SEQ ID NO: 294655 - protein, 76 aa, Zea mays
  unsure (1)..(76): unsure at all Xaa locations
  Clone ID: MRT4577_3180C.1.pep
RGCCXAPVKLPWSGPRASAHQPECHARGSAALSTRFRPGYWSAQVRPDMHSLMVLLNGGSGGGGEKWEKGGNWGKL

SEQ ID NO: 294656 - protein, 100 aa, Zea mays
  Clone ID: MRT4577_31810C.1.pep
PSVARNTFFLLGRVLQQVFVDSLRFELPSLCILNSLAPFFYAPLVFAPLFSVWGLKLSAWRVYLNQPFRPALVTVLLLAPLFSLVRHSNLAVMLVSSDHA

SEQ ID NO: 294657 - protein, 147 aa, Zea mays
  Clone ID: MRT4577_31811C.1.pep
KKKKKRNDGTSSRPGRVFREPAVAHCLLSFYLAHPPPLAVSSLARTGVPIAVSLSPSCSRCCLLSTLVPAAASSSDFLFFTLAASSSPSLRPPQIVETTSTVETTGARSDGGDHANKLVAAFSARAPSSQEVNRLRRRMMMMSYFLC

SEQ ID NO: 294658 - protein, 117 aa, Zea mays
  unsure (1)..(117): unsure at all Xaa locations
  Clone ID: MRT4577_31812C.1.pep
PPSKHGPPRNTPQGXPPGSDRIPAPRAREGNPLQPQPQSGYHPCGXGPPPGRGLHRGGCQPAPWPPXGRPRRSPXAGGMPLSPQGPPGLARSPPNFPRAAFPVFPTGIVVPVQKKPF

SEQ ID NO: 294659 - protein, 144 aa, Zea mays
  Clone ID: MRT4577_31813C.1.pep
RRVGFPRLDCASLRLLREPAVAHCLLSFYLAHPPPLAVSSLARTGVPIAVSLSPSCSRCCLLSTLVPAAASSSDFLFFTLAASSSPSLRPPQIVETTSTVETTGARSDGGDHANKLVAAFSARAPSSQEVNRLRYTNKWVLELS

SEQ ID NO: 294660 - protein, 38 aa, Zea mays
  Clone ID: MRT4577_31814C.1.pep
NSHLDNSLEVISGLSPLGFPTLLPCCNYKRNSYAQLVV

SEQ ID NO: 294661 - protein, 52 aa, Zea mays
  Clone ID: MRT4577_31815C.1.pep
APGAILEEIRLIGHRWEIVTKLLPDQKVCQEESLVFDIRLLVLVIGIFRPLF

SEQ ID NO: 294662 - protein, 44 aa, Zea mays
  Clone ID: MRT4577_31816C.1.pep
HAFSPRFHLFYLISTTYLYTIPLGLTISADPVRLDFSSNFNQDE

SEQ ID NO: 294663 - protein, 60 aa, Zea mays
  Clone ID: MRT4577_31817C.1.pep
MVKRIYIYSYEEAKSLTPKAKLPAIGGDTGVKPDPSKLPPEFDVPQSDSDNSAPVAADKD

SEQ ID NO: 294664 - protein, 111 aa, Zea mays
  Clone ID: MRT4577_31818C.1.pep
RSLPSSSGSRSRLVSPHPLLLLLLKKWKVIYTDDEDDMMLVGDDPWSEFCRMVKRIYIYSYEEAKSLTPKAKLPAIGGDTGVKPDPSKLPAESDVPQSDSDNSAPVAADKD

SEQ ID NO: 294665 - protein, 677 aa, Zea mays
  Clone ID: MRT4577_31819C.1.pep
MAEAGVARGSGSAGDALFRELWHACAGPLVTVPRQGELVYYFPQGHMEQLEASTDQQLDQHLPLFNLPHKILCKVVNVELRAETDSDEVYAQIMLQPQTEQSEPTSPDPEPPEPERCNIHSFCKTLTASDTSTHGGFSVLRRHAEECLPQLDMTQNPPWQELVAKDLHGNEWHFRHIFRGQPRRHLLTTGWSVFVSSKRLVAGDAFIFLRGENGELRVGVRRLMRQLNNMPSSVISSHSMHLGVLATASHAISTGTLFSVFYKPRTSRSEFVVSVNKYLEAKNHKMSVGMRFKMRFEGDESPERRFSGTIIGMGCMPANSTSPWANSEWRSLKVQWDEPSAILRPDRVSPWEVEPLDRTNPQPPQPPLRNKRARPPASPSIAPELAPVFGFWKSPAEPAQAFSFSGLQRTQELYHSSPSSMFSSSLNVGFNPKYEGPTPNTNHLYWTMRETRTESYSASINKAPTEKKQESTTSGCRLFGIEIGSSAVSPVVTVASVGHDPPPPALSVDAESDQLSQPSHANKAMDAPAASSDRSPNETESRQARSCTKVIMQGVAVGRAVDLTRLDGYDDLRRKLEEMFDIPGELCASIKKWKVIYTDDEDDMMLVGDDPWSEFCRMVKRIYIYSYEEAKSLTPKAKLPAIGGDTGVKPDPSKLPPESDVPQSDSDNSAPVAADKD

SEQ ID NO: 294666 - protein, 208 aa, Zea mays
  Clone ID: MRT4577_3181C.1.pep
MENGEETFASPTAAAAADFEISINGEDSTPKLHNLADEMEALRAAKRDLEEKLDAVGHENRFLSSESRRLEVLVSQAREEVAAAEQVAATNESEAATLRAEVERLQGLLAAEKASHEEEMRRGARLGDQLQTAHQDRAALEEEIETLKGSATAEGKGGKEEEEGRDSVSARAGTPKDEGVVSPALVAAAAAGAAATAAIAVVLLNLKR

SEQ ID NO: 294667 - protein, 127 aa, Zea mays
  Clone ID: MRT4577_31820C.1.pep
MRGRLKPAPAPALFLVLATIAAVGGVQADPQVPGYFGFGDSLGDNGNNNDMGWLAGANYPPYGIDFAAGPTGRLRNGLTTVDAISGFLGFDDYIPAYAGASGDQFLTGVNFVSAEAGIRDETGQKLG

SEQ ID NO: 294668 - protein, 48 aa, Zea mays
  Clone ID: MRT4577_31821C.1.pep
EKLILLQVWIVNSRSKVWFIHRLVSLKLQMLGDAHVECVHAMELKINT

SEQ ID NO: 294669 - protein, 50 aa, Zea mays
  Clone ID: MRT4577_31822C.1.pep
SLRRTSFVLKTGNIQVTTVDGPIKDIDCLHAANDSHVVISRILYAKHYLV

SEQ ID NO: 294670 - protein, 75 aa, Zea mays
  Clone ID: MRT4577_31823C.1.pep
NHQNNIGFGIGYRGPGNLGTISPTHLALRKTGNGLNRFPKRFWQTMNGPIFLNLFGKNTFFLEVDFLLGGGFPFS

SEQ ID NO: 294671 - protein, 79 aa, Zea mays
  Clone ID: MRT4577_31824C.1.pep
LVSSRHVPPPWLLWAVACPSSSCILLLAVSGAANAAAAPGGMSIITYNEEHGARGLERTEPEEQAMYNQWVAKHGQTYN

SEQ ID NO: 294672 - protein, 61 aa, Zea mays
  Clone ID: MRT4577_31825C.1.pep
PGQDARPRISAQGEARGGSCCPPYVKAVAGSLGGEKEACCLQAIDGGKTRLQLDRTGAYRG

SEQ ID NO: 294673 - protein, 371 aa, Zea mays
  Clone ID: MRT4577_31826C.1.pep
MALPPGAGAVAPATPFAANPCRLRRASGPPAAALRLGPLFWPWEKVKIGPLSVSPMGFGTWAWGNQLLWGYQESMDNELQDCFNLALRNGINLFDTADSYGTGRLNGQSERLLGKFILEFEGRIKSPDDVVIASKFAAYPWRLTSGQFVSACKSSLERLQLDRLGIGQLHWSTANYAPLQERALWDGLVEMYEKGLVSAVGVSNYGPKQLLKIHSYLASRGVPLSSAQVQFSLLSMGDDQMELKSVCDSLGIRIIAYSPLGLGMLTGKYGASNLPKGPRSVLFRQILPGLEPLLSCLRRIAEKKGKTMPQVAINWCMCKGTVPIPGVKTVRHVQENLGALGWRLSSAEISELESAAMAAPRKMIQNVFQTA

SEQ ID NO: 294674 - protein, 506 aa, Zea mays
  unsure (1)..(506): unsure at all Xaa locations
  Clone ID: MRT4577_31827C.1.pep
MALPPGAGAVAPATPFAANPCRLRRASGPPAAALRLGPLFWPWEKVKIGPLSVSPMGFGTWAWGNQLLWGYQESMDNELQDCFNLALRNGINLFDTADSYGTGRLNGQSERLLGKFILEFEGRIKSPDDVVIATKFAAYPWXLTSGQFVSACKYSPDLFVSCTPPEFHSVQYRFSSKYLDLQTSTNALRITKQKLSVTXLSVYVTHGVSILRSSLERLQLDRLGIGQLHWSTANYAPLQERALWDGLVEMYEKGLVSAVGVSNYGPKQLLKIHSYLASRGVPLSSAQVPAGKQLALHVYITPSSVSHHLYSESSXVQVQFSLLSMGDDQMELKSVCDSLGIRIIAYSPLGLGMLTGKYGASNLPKGPRSVLFRQILPGLEPLLSCLRRIAEKKGKTMPQVSAYRAQNGLLKRFYDRTSLPARRNYDARSSKCSSXSKMMPRTTXQVAINWCMCKGTVPIPGVKTVRHVQENLGALGWRLSSAEISELESAAMAAPRKMIQNVFQTA

SEQ ID NO: 294675 - protein, 154 aa, Zea mays
  Clone ID: MRT4577_31828C.1.pep
DFELEMATAASSSSLEKSYELPDGQAITIGNERIRCPEALFQPSPLGMESCGIHETTFNSIMKCDVDIRKDLYANTVLSGGTTMYPGIADRMQKEITALAPSTMKIKIIAPPERKYSVWIGGSILASLSTFQQMWISKQEYDESGPSIVHRKCF

SEQ ID NO: 294676 - protein, 89 aa, Zea mays
  Clone ID: MRT4577_31829C.1.pep
PGYEYQNCLLVSSIITNGAAVFVLKKKKKKKKKIKKKKKKNKKKKKKKKKKKKKKTKKIKKKKMGDYYKGPNLLTTVMKCKRHLKGYSK

SEQ ID NO: 294677 - protein, 99 aa, Zea mays
  unsure (1)..(99): unsure at all Xaa locations
  Clone ID: MRT4577_3182C.1.pep
QKLRQQHQHTQQQFNSPNHLLSLLFDVALASSSPTGHQFRRLLPSFVPAASCFHRSQGNGRGPRLVRLLTCRFHRLAGRPMTHTSRKLTKLMGTDTXQF

SEQ ID NO: 294678 - protein, 68 aa, Zea mays
  Clone ID: MRT4577_31830C.1.pep
CQMPYKLRTHRCESGGSLTHTSRERSIRDNTAELQLKHLLESQTIKASPWSQCIGVVGYSKDACPGPA

SEQ ID NO: 294679 - protein, 113 aa, Zea mays
  Clone ID: MRT4577_31831C.1.pep
IYGYCPLTNNKNSYGKIQQTKDRRTGVRHHMALGQWTTNRYTGRIGVRRTSREPGKINDRLACLKNIQHPRGNARLQPKGPVPRDGHPTTQRESIDSTQALEPIPEQCLLGLL

SEQ ID NO: 294680 - protein, 69 aa, Zea mays
  unsure (1)..(69): unsure at all Xaa locations
  Clone ID: MRT4577_31832C.1.pep
TYIEVHGSSPGPHHSLACGVHPPLVITLDETFAMSLHQTIDLNIDMRLCVGRNGEDESGKLRRXGGPVS

SEQ ID NO: 294681 - protein, 52 aa, Zea mays
  Clone ID: MRT4577_31833C.1.pep
EPHLRFGTIILNRSIRHHLHVDPLQDQPAHIRATDLTDFKFQTAYDARSHSL

SEQ ID NO: 294682 - protein, 99 aa, Zea mays
  unsure (1)..(99): unsure at all Xaa locations
  Clone ID: MRT4577_31834C.1.pep
AWVDALMGLDAKSARTSAQMDAFLEQVIADHRRRXRGGHREGGDDHRDFVDVLLDVNEDEAHAGGATFDDVAIKAIIVAIIQDMFAAATDTSYTTLVWA

SEQ ID NO: 294683 - protein, 120 aa, Zea mays
  unsure (1)..(120): unsure at all Xaa locations
  Clone ID: MRT4577_31835C.1.pep
MAGRGKAIGAGAAXKKATSRSSKGGLQFPGGRIARFLQDGXHAQRVDAGAXSSLSCALEHLAAESSLELAANATRHNKKTRIVLRHIQIAARNDEDLXTKLLGGATIASGGVMPNIHQHL

SEQ ID NO: 294684 - protein, 581 aa, Zea mays
  unsure (1)..(581): unsure at all Xaa locations
  Clone ID: MRT4577_31836C.1.pep
MGEAEEAPGDSNGEALELLMSMASSSLACSVSQFPAKWQSIKDKLQLLCCSLNSLCGGGGDHDDDDDKEHPVLAELLRLASATVRSIQVVASQCSDGSYKGGRLRLRSDLDNLSCKLDAHMKQLKEMAVSSGAPSPSKAIVAVRPSAEASVGEKAFYLKDLFSRIRIGGTVQRSQALAAIRELLVEDELCAKVVALDVDDGVALLTGFLESTDARIQEEAAGAVAVVASSERYRGMLVKAGVIAPLVQLLENADTASELGKQRAAHALRELTENSDNVWAVCAHGGLTTLLHACAHAGSSSKLVSSSFAVLRNLSRVEEGKMCSWVEQXWVTELVKLFQKKEEVRKLGAVELLHAMALDDADVREEAVGMGVIQSLLQLIYPDLPYSYKAREVALAAIWFFCFSSANSLDDLISSDVLGWLLFYLNNGDYAVLECTLKILRHLSEVSEEYNRMMGRAGYLSALSGLLGAKSCRVREMAAQVLSSLLMLHPNRAIFIQDGDNLNRLLQLLDPAEGKLMAKDLILSAIMSLAETNSGRKKIVTSENFCSLKELAESGDFDAKKIVRKLSTNRLQTIFSKIWSV

SEQ ID NO: 294685 - protein, 75 aa, Zea mays
  unsure (1)..(75): unsure at all Xaa locations
  Clone ID: MRT4577_31837C.1.pep
QFTDVLYIFRERELIYDLFEAATGMRMMXHNYFRIGGVAADLPYGWMDKCLDFCDYFLQXVVEYQQLIYTEFPFF

SEQ ID NO: 294686 - protein, 156 aa, Zea mays
  unsure (1)..(156): unsure at all Xaa locations
  Clone ID: MRT4577_31838C.1.pep
MEHLAITAGYVLNIKAWKIMFSAPTTKDTSNANIAKQRLKMILFSDRCEVSDEAKKKIVENIIEALSEFVEIESRDNVQVDISTDAGLGTVYSVSAPVRRVKPEYQESEEXTEGKLSGVDFKDTGESSGSVDVTFDFFVPMRTNSLDFYQSAACNV

SEQ ID NO: 294687 - protein, 206 aa, Zea mays
  Clone ID: MRT4577_31839C.1.pep
PPTVAATDPLRRRWTSPQLLEPYDAASPLRRRCKLPAHKVSGQAAAVRVTADRCAFYGYRFPGWQVLMPWKFNGCYALFVIDHGKKHVTFIDFTPTQDLCKHMPYKRFAEAIIISSKKYKIAYNKKRSGWAEDIFGQTLFYRVNTSYFVLQAMIMWGSARRMKFDRDAKILRRNFVIDLLNYEDNSCRYAIPTNIQQRLINNAKKD

SEQ ID NO: 294688 - protein, 177 aa, Zea mays
  unsure (1)..(177): unsure at all Xaa locations
  Clone ID: MRT4577_3183C.1.pep
RTCQLTALSCPRVATALXKKGLDFEIGPVXLTTVGXRSPSFLDLNPXFGQIAALVHXDXEILFESRAINRYIADXYASQASNLLPVTATATXLDVRIXVXSHHFYPTRFAAGDSAAREDIAERXPDASGGVKTTVXLSKVLYVYEXRTSTETSTSAVTSSHSPTPPXASYLLYLSKT

SEQ ID NO: 294689 - protein, 225 aa, Zea mays
  Clone ID: MRT4577_31840C.1.pep
MAMSIFVGGDSGALIAPSASSLRPPFRLAAGPKGHFCTFPHGASSNHSRLCVEHQRCSRSSTQNYALSRKDFSPITQDVEGFLHNVVNMGFLDRLKLAWKIMFSAPTTKDTSNANIAKQRLKMILFSDRCEVSDEAKKKIVENIIEALSEFVEIESRDNVQVDISTDAGLGTVYSVSVPVRRVKPEYQESEEQYRGKIVGVDFKDTGESSGSVDVTFDFFVPNEN

SEQ ID NO: 294690 - protein, 76 aa, Zea mays
  Clone ID: MRT4577_31841C.1.pep
ARRMLESCLRITQDQTLARYYSASLITSIRAMFCINRHSHTIQSSTIYIALQQTEHRLARNPSSQVEAGYKASHTL

SEQ ID NO: 294691 - protein, 63 aa, Zea mays
  Clone ID: MRT4577_31842C.1.pep
TDTYTGQCIISKFSNQYLLTFKILIYKCYYILTYQEHDYTFINFIFLYYIIFLIYIYINYIIL

SEQ ID NO: 294692 - protein, 102 aa, Zea mays
  Clone ID: MRT4577_31843C.1.pep
MESYKERKIIFMAMASLARRKGYAVVLSSRSTFCLTSWRGFASGSDENDVVVIGGGPGGYVAAIKARQLGLKTTCIEKRGTSRGTWLNGRCILFKALLHSST

SEQ ID NO: 294693 - protein, 125 aa, Zea mays
  Clone ID: MRT4577_31844C.1.pep
LIESAAEMLYGLIHVRYILTSKGLAAMLDKYKNYDFGRCPRVHCSGQPCLPVGQSDIPRSSNVKIYCPKCEDLYYPRSKYQSNIDGAYFGTTFPHLFLMTYPHLKPQKPSQQYVPKVFGFKLHKP

SEQ ID NO: 294694 - protein, 132 aa, Zea mays
  unsure (1)..(132): unsure at all Xaa locations
  Clone ID: MRT4577_31845C.1.pep
PTRPEAVAICLALVNFLEDQPTAGRRVLELCAVHNLVMYSQRRXRAIAESGRVQVLLDLISSSNPDTCLRPATFAKLLFSSHTIHEYATSATAXAITAPIENDLWSXTESTNEEYLRALNALLNNFRRLRVT

SEQ ID NO: 294695 - protein, 97 aa, Zea mays
  Clone ID: MRT4577_31846C.1.pep
NETCTCGSGHQKLNEQCTVHFDRSGFWLNLLGLKNPNLIYVSVSCLFLVVNRWIPSYCVISVDPDQKPFSVRLINPNPKTLVCFYYLGFLGFGRDSL

SEQ ID NO: 294696 - protein, 128 aa, Zea mays
  Clone ID: MRT4577_31847C.1.pep
PAGTAVTDSRAKHGSPSRPDRDLLPRVSTPAREIAGFVEIFSATSKVRFNGNPHWPPGLPAHISLPICGPTPNAWLAPTKYSAWSKPPATCQERRERRQGHPHREKETIRRMGWYSYLAGGISGGFAG

SEQ ID NO: 294697 - protein, 114 aa, Zea mays
  Clone ID: MRT4577_31848C.1.pep
ILCRLLKTRRGIVSGRVALLPRSTEIQPRVARTTLAIFFSYPQPPQRQPAAWELFFLFFFLADRTSHFSLFFFPCTMAWQTDLGWLPLFLFFSCSVLCFFLPHRTAQTGELAAA

SEQ ID NO: 294698 - protein, 62 aa, Zea mays
  Clone ID: MRT4577_31849C.1.pep
VQHPSAPQSNVKTGRYVCTKHTNRELERSTWQIKNIVRLTDRQIPEGIYLVHDPSPSQIHNP

SEQ ID NO: 294699 - protein, 40 aa, Zea mays
  Clone ID: MRT4577_3184C.1.pep
IHIHDILSFTIFVAKEKDGKVIYTLVKKKKKKKKRKKKKE

SEQ ID NO: 294700 - protein, 85 aa, Zea mays
  Clone ID: MRT4577_31850C.1.pep
SVSVEFEAKSARDGAWYDVAAFLSHRLFESGDPEVRVRFSGFGAEEDEWINVRKCVRQRSLPCEATECVAVLPGDLILCFQVLSS

SEQ ID NO: 294701 - protein, 37 aa, Zea mays
  Clone ID: MRT4577_31851C.1.pep
PDPVAPEAPSTSKVFGNQPKSGGNSVKANTGESRYEG

SEQ ID NO: 294702 - protein, 98 aa, Zea mays
  unsure (1)..(98): unsure at all Xaa locations
  Clone ID: MRT4577_31852C.1.pep
MHDDIDIEAMLEAPSQKDENKLNSANGHXEERSLTEXQRLSRARIADRPGSISQDRWTRDXSTDPSKSRERERSTRXDGLRSRSRSRDRRFRGRYWSP

SEQ ID NO: 294703 - protein, 135 aa, Zea mays
  unsure (1)..(135): unsure at all Xaa locations
  Clone ID: MRT4577_31853C.1.pep
IQSDLNXNXRIAQTLTLHARAFKKNEHDSMKKFPSKSCPLXYGTGKIQEDAMRLFESGLHEFLESQNTGWSITSLSVTASKIFDIPSGTSSILRYIKGPSSAAALTIPDSPSSAAALAIPDSSFVPEDPSLGDVP

SEQ ID NO: 294704 - protein, 94 aa, Zea mays
  Clone ID: MRT4577_31854C.1.pep
MDAHWHRLAIVAALVLMASAAEEALAVQSPGALLAPRSSLDALPFVRLGTPEKKSTGTAAADARDGSDPSAVFDPDRMSKRRVRRGSDPIHNKC

SEQ ID NO: 294705 - protein, 75 aa, Zea mays
  Clone ID: MRT4577_31855C.1.pep
ASAKKLFPCKFFLVGVPVNGLPHRANLKLVLTNTKNCTPPQRGLVLCRQEPSRAARISYSFFSLFTAFFWSFFRG

SEQ ID NO: 294706 - protein, 53 aa, Zea mays
  Clone ID: MRT4577_31856C.1.pep
LTVILEGTVVCRSLISDPPPEQKTEKQQSTNNGRQAAGLLAHLRGALVSGHNG

SEQ ID NO: 294707 - protein, 83 aa, Zea mays
  unsure (1)..(83): unsure at all Xaa locations
  Clone ID: MRT4577_31857C.1.pep
SDPEEKSRNCWTVPDSINFKVRSKNFPHDKSXIPAASYLMELAAIDWFKDTKRMDNVAMHNGCVAQAAGEKGMHTLNVNIQIP

SEQ ID NO: 294708 - protein, 54 aa, Zea mays
  Clone ID: MRT4577_31858C.1.pep
QLRPSGISHPYVFRRQALITKGAIVLKNTRCPRIRIKCQGIGFFFSLNFWGNVG

SEQ ID NO: 294709 - protein, 85 aa, Zea mays
  Clone ID: MRT4577_31859C.1.pep
ETMFQRKSWATVELSKDTSPPFWVPLLTHPGADLVEHDDQTMQADLGVPGTLVRTKLTHTHQPSVINTLIDLQVHLPTFNDFHML

SEQ ID NO: 294710 - protein, 144 aa, Zea mays
  unsure (1)..(144): unsure at all Xaa locations
  Clone ID: MRT4577_3185C.1.pep
LQXASCCCWXPLTRAEWCSYRSLIGSQXWSWXLCVSSIAALSAPLXRFAQXTTGSAATEKKVXWRAGRAGRSLISGSXVSLLRSSLESTHSSRXDSLKLRFLIMDSRTRSDRLAGPVRLLDLLVFCCSDTGHGTWELFAVHFCG

SEQ ID NO: 294711 - protein, 401 aa, Zea mays
  Clone ID: MRT4577_31860C.1.pep
MDVEKDANVESLDEDQSDSGNEEAEESEDDAFEVNDGEDMNWRIGDGRGDEGMSHSLQRCNTFGGMEFENLNEGETVMKDELRFDDFPARASSERMTPSNLLQAMNSIPSTYNVAGNVHDLPSGDFLAMGADAHKNGVDLGPGSSYLFGNNGKRNIDDIDGYNGNMQVQEGFPRSNQQKRMRHSNSSNISPGSGFFNASFSVPIQNLMVEASRLYEQNEQKLQSLQFEKQHWSDMLQQKEAIIQSLNSARFEQQNKYQVELRRFEHDLNVMAHLVTTYKRALKQTRASFDEYRKKFPCNVPLYDDVAGGGGLVLSVRELEKRRCEEEQQKIAMVNDMIERFQYKWFSKLEEWGLSVNSLWSRMEGLYKEIELLKENRRSRFATPATEESLATEEPTPATEE

SEQ ID NO: 294712 - protein, 732 aa, Zea mays
  unsure (1)..(732): unsure at all Xaa locations
  Clone ID: MRT4577_31861C.1.pep
RCVEPLVGLLVSEANPAQLSVVRALDRLLDDEQLAELVAAHGAVIPLVGFLYGKNYMLHEAVAGALVKLGKDRPACKLEMVKAGVIESILDILHDAPDFLCIALAEMLRILTNNATIAKGPSVAKVVQPLFSLLSKADMGPEGQYSTLQVLVNILEHPECRADYNLTPRQTIEPVITLLXSPPAVQQLAAELLSHLLLEDHLQKDTITEQAITPLIQVLSSGLPNLQQRAIKALANLAIAWPNTIAKEGGVFEXSKVLLQSDPPLPHVVWESAASVLSSILQYSTEFFLEVPDAVQFRKSSVXFEALLVLERMTQQVAMAESGAVEALLDLLRSHQCEETAARLIXALLNNVRIREAKAAKNAIAPLSMYLLDPQTQSQQGRLLAALALGDLFQNEGLARSTDAVAACRALVNLLEDQPTEEMKVVAICALQNLVMYSRANKRAIAESGGVQVLLDLISSSNPDTSVQAAMFVKLLFNNHTIQEYATSETVRVITASIEKDIWSSGSANEEYLKALNALLSNFPRLRVTEPATLCIPHLVTSLKTGSEATQEAALDSLYLLRQAWSACPAEVFKAQSVAASEAIPLLQYLIQSGPPRFQEKAELLLQCLPGTLTVTIKRGNNLKQSVGNPSAFCKLTLGNNPPRLTKIVSTGATPEWDEAFAWAFDSPPKGQKLHISCKNNSKFGKKAFGKVTIQIDRVVMLGSVAGEYTLLPESKSGPNRNLEIEFQWSNK

SEQ ID NO: 294713 - protein, 280 aa, Zea mays
  unsure (1)..(280): unsure at all Xaa locations
  Clone ID: MRT4577_31862C.1.pep
SRPAGSRDNLQKDTITEQAITPLIQVLSSGLPNLQQRAIKALANLAIAWPNTIAKEGGVFELSKVLLQSDPPLPHVVWESAASVLSSILQYSTEFFLEVPVAVLVQLLRSGTESTVVGALNALLVLESDDSTSAEAMAESGAVEALLDLLRSHQCEETAARLIEALLNNVRIREAKAAKNAIAPLSMYLLDPQTQSQQGRLLAALALGDLFQNEGLARSTDAVAACRALVNLLEDQPTEEMKVVAICALQNLVMYSRANKRAIAEXGGVQVLLDLISSSN

SEQ ID NO: 294714 - protein, 164 aa, Zea mays
  Clone ID: MRT4577_31863C.1.pep
ACPVKVFKAQSVASEVIPLLQYLIQSGPPRFKEKAELLLQCLPGILTVTIRGNNLKQSVGNPSAFCKLTLGNNPPRLTKIVSTGATPEWDEAFAWAFDSPPKGQKLHISCKNNSKFGKKSFGKVTIQIDRVVMLGSVAGEYTLLPESKSGPNRNLEIEFQWSNK

SEQ ID NO: 294715 - protein, 36 aa, Zea mays
  Clone ID: MRT4577_31864C.1.pep
KSEGRIAPDGENAKLLGNHGRLEKRAPGKAFLEAVV

SEQ ID NO: 294716 - protein, 45 aa, Zea mays
  unsure (1)..(45): unsure at all Xaa locations
  Clone ID: MRT4577_31865C.1.pep
GLIKKKKKKKKKKKKKKKKKKKKKKKKKKKKKKKKXKIKKMGGPF

SEQ ID NO: 294717 - protein, 65 aa, Zea mays
  Clone ID: MRT4577_31866C.1.pep
ERALDPLQPYILRKDYIGSFPLQSYVIKALVKKKLNLTEILRVKVTKLLNRSPPLSQFSDLIALR

SEQ ID NO: 294718 - protein, 87 aa, Zea mays
  unsure (1)..(87): unsure at all Xaa locations
  Clone ID: MRT4577_31867C.1.pep
EARVRRRVPANPAAYLXQLLPFNQXTVSNSXAAYLQLRRQVLNALAGPNPLVTGFLQQQQLLXPYSQFSLMNPALSWQQPNRGGAIF

SEQ ID NO: 294719 - protein, 83 aa, Zea mays
  Clone ID: MRT4577_31868C.1.pep
LSATTRTGPKLFNKGLKFLVTEKGNKMEELKNPGQRHQWQGPPLSYSSFRARSAPQRPCHPWDKSGPCHRLAWKGGPNPLRKY

SEQ ID NO: 294720 - protein, 66 aa, Zea mays
  Clone ID: MRT4577_31869C.1.pep
GRLKTLLPLSVHVLCDLMFRLSSRSISDKQTARPWQPSAQPHTPYTGPVKLHTNILFVVAMNLHDA

SEQ ID NO: 294721 - protein, 67 aa, Zea mays
  Clone ID: MRT4577_3186C.1.pep
RTRPKRVFFLGSVGMEQCFRRLIYKWSVKSLITCHCRTGTPCTTVGSARKGRGGTDQWERDGECFAL

SEQ ID NO: 294722 - protein, 84 aa, Zea mays
  unsure (1)..(84): unsure at all Xaa locations
  Clone ID: MRT4577_31870C.1.pep
MGHSNVWNSHPKNYGPGSRVWXFQLVICSSCFDLTFGGLTHGCLMKXLSRVCANPHGLIRKYGLMCCRQCFRSNAKDIGFIKYR

SEQ ID NO: 294723 - protein, 129 aa, Zea mays
  Clone ID: MRT4577_31871C.1.pep
EVSHRPNSSAPYPFTPISPYRFFQPPALSSTRYHPASVLVAMPSPQLGVLLFRGLPLLQSELPSLLPMAAVVEFPAQASHAAVSSSPGLLPPFSMDAAPLWFLVAGHLCCSHVKSLEKLVEKKVKFNAP

SEQ ID NO: 294724 - protein, 41 aa, Zea mays
  Clone ID: MRT4577_31872C.1.pep
CLWSCSRVCANPHGLIRKYGLMCCRQCFRSNAKDIGFIKYR

SEQ ID NO: 294725 - protein, 56 aa, Zea mays; identical to SEQ ID NO: 236257
  Clone ID: MRT4577_31873C.1.pep

SEQ ID NO: 294726 - protein, 56 aa, Zea mays; identical to SEQ ID NO: 236257
  Clone ID: MRT4577_31874C.1.pep

SEQ ID NO: 294727 - protein, 65 aa, Zea mays
  Clone ID: MRT4577_31875C.1.pep
MAGMLQGVCCSAPWERFAPARRGGSSCCCCGAGEGRCCWAPMEQEGGGRPEVEEGRRAQGLWTPL

SEQ ID NO: 294728 - protein, 40 aa, Zea mays
  Clone ID: MRT4577_31876C.1.pep
PRVRLWRHKWAVHTIRQIPLAQVFAVKLYIELAQAQRIEL

SEQ ID NO: 294729 - protein, 56 aa, Zea mays; identical to SEQ ID NO: 236257
  Clone ID: MRT4577_31877C.1.pep

SEQ ID NO: 294730 - protein, 112 aa, Zea mays
  unsure (1)..(112): unsure at all Xaa locations
  Clone ID: MRT4577_31878C.1.pep
LGLXFXGVVXRVLVPLRLFFGLFXGLXXRFSXAASGLXXLVPCXLSXXXVLCPXXXSXRXLGVFGFXXSLSLRPFXCXSXWPPPRGXSLFFLSFPFPXFPSLSXVXVPGLAF

SEQ ID NO: 294731 - protein, 91 aa, Zea mays
  Clone ID: MRT4577_31879C.1.pep
MGDWVPRGRPGTFCSSRRRRRRRDGRKRRSKEHDAMGHSNVWNSHPKNYGPGSRVCRVCANPHGLIRKYGLMCCRQCFRSNAKDIGFIKYR

SEQ ID NO: 294732 - protein, 102 aa, Zea mays
  Clone ID: MRT4577_3187C.1.pep
MENQTQRESSIRRLSISVIKEESSYGINKRSQVKLKDNEYVELDVLNLETTDRSKDKGKKNFEGPIAREKVKKTEVPKARGEEDGLQEVKGVGAQGCLMRSS

SEQ ID NO: 294733 - protein, 106 aa, Zea mays
  Clone ID: MRT4577_31880C.1.pep
MTLRVACRRGFADQHAKIDSIMDLWDNVFDTHCRFDVHVMLVLIQVSICVSYRICISIIMAHINPHAASSASALFSAIVLVIGVMMPFKLGLNSMITLTLLAPLSI

SEQ ID NO: 294734 - protein, 56 aa, Zea mays; identical to SEQ ID NO: 236257
  Clone ID: MRT4577_31881C.1.pep

SEQ ID NO: 294735 - protein, 56 aa, Zea mays; identical to SEQ ID NO: 236257
  Clone ID: MRT4577_31882C.1.pep

SEQ ID NO: 294736 - protein, 67 aa, Zea mays
  Clone ID: MRT4577_31883C.1.pep
TDHSQAITLNPQLAEAYKARGKIYWQLGEQAQAIADLEAALALFSDQENLVSQREAWEQLQTWHGNP

SEQ ID NO: 294737 - protein, 56 aa, Zea mays; identical to SEQ ID NO: 236257
  Clone ID: MRT4577_31884C.1.pep

SEQ ID NO: 294738 - protein, 52 aa, Zea mays
  Clone ID: MRT4577_31885C.1.pep
IRFRCSKKKKKKKKKKKKKKKKKKKKKKKKKKKKKKKKKKKKNPLRPQPLPR

SEQ ID NO: 294739 - protein, 104 aa, Zea mays
  Clone ID: MRT4577_31886C.1.pep
QKIWKPGPRFSKRPFLGPLGGAHPVGAFFDPVKRVVNGFDLPIENIFQFWGRGPFFSKGDPVFWEANKPPPVLVEKGQKNFPTKMGKFFNQTPTFPEFSPQRIF

SEQ ID NO: 294740 - protein, 57 aa, Zea mays
  Clone ID: MRT4577_31887C.1.pep
HTVSWRWRRRRSRRVDLASTSPHRRHGGSVEGDRGPEKRGELTWARKGRQATSTMCV

SEQ ID NO: 294741 - protein, 285 aa, Zea mays
  unsure (1)..(285): unsure at all Xaa locations
  Clone ID: MRT4577_31888C.1.pep
PLWILKKXEKNLQRLVHLSSDLARHVAMVLENVQTSEENRKLGSVPSINTSSCGRPSTKEEINEVHQAKQKFVEGAKKEVRDRRARRMQSCEVTIHPITPATLLDSICWTISEPTSSASIYMDSSWSDDANEQQSTTYFDANGDVRDPDQPNDNFSRPLTRPERSELIFKNHFLTILFPVDRFGELGPSSKTFYNNGGFTCIQVLNHIYNFYQENMSTNEIDMALHTDSRHADRLRSLYSSAESAEKGLVAFKRIDFLGSRRSFEALKRINRENSSNVYELVIRA

SEQ ID NO: 294742 - protein, 232 aa, Zea mays
  unsure (1)..(232): unsure at all Xaa locations
  Clone ID: MRT4577_31889C.1.pep
MVMKMELEDDGALGGTAGTWTEEDRGLGAAVLGADAFAYLTKGGGAISEGLVSASLPDDLQNKLQELVESESPGTGWNYAIFWQLSRTKSGDLVLGWGDGCCREPRGGEVGAAASAGSDDTKQRMRKRVLQRLHIAFGVADEEDYAHGIDQVTDTEMFFLASMYFAFPRCAGGPGQAFAAGIPLWVPNSERKVFPANYCYRGFLAXAAGFRTIVLVPFESGVLELGSMQHIA

SEQ ID NO: 294743 - protein, 242 aa, Zea mays
  unsure (1)..(242): unsure at all Xaa locations
  Clone ID: MRT4577_3188C.1.pep
DFDNRNSHECTLILPSKYHADLLATQLIARMEKEGYDKADDQVVPSNPPGNLSGLSGMLADNTANEVKQEGGITQQLNAAAHANMVSGSPLQQLSANRMLPSGSSNQAVPMQQEYMQGATMSPRSQQLDQNLIQQQQHQQPQLQQNAQSQLQQQTSLPLNQMQRPQLLPASPLSQMLGPGSNLPMGSNHTSNTKATPASLQLHMMQQVQQQQPVQMSRKVMMGPGSSVNXGNMVNNEKXLSG

SEQ ID NO: 294744 - protein, 74 aa, Zea mays
  unsure (1)..(74): unsure at all Xaa locations
  Clone ID: MRT4577_31890C.1.pep
MAYGDRITTYEDXQRYXEQRYPHYAYGPLVVADQLGAAPMYELDRHQHDSFIEQTIRLEHDSHTIHVHQETLQL

SEQ ID NO: 294745 - protein, 47 aa, Zea mays
  Clone ID: MRT4577_31891C.1.pep
GKNLTTFVYQTNKFSKKPFIILLFWPIYLQALIKALIKKKRGKFKTL

SEQ ID NO: 294746 - protein, 50 aa, Zea mays
  unsure (1)..(50): unsure at all Xaa locations
  Clone ID: MRT4577_31892C.1.pep
MGFASKCVNGTQSMPFRNVSCVIEVLSPAXKKKKKKKKRASAPAIGIRYR

SEQ ID NO: 294747 - protein, 74 aa, Zea mays
  Clone ID: MRT4577_31893C.1.pep
GATGQTPEVKKPGQGAGRLPWGMRRGSQGGWEKATADKMGPGERLKGAQREKSWGTQRGPQTRRPQNDGPRIII

SEQ ID NO: 294748 - protein, 173 aa, Zea mays
  Clone ID: MRT4577_31894C.1.pep
PCHPSPPRSVNLDFLLSESPPPHTEISSSPIRPHRRVRHADISSSPRRPTPHARVVEAYSCLAPTSTHISTSPRRCPLAMPQHTSAATSISVPASRTVYNSLPGVVSPAMAPDSAPPLSSPSTFHLLSLPLWASSSSPRSGSHATHCLSVCTFGSVRSVNRILPFLFLWFPRR

SEQ ID NO: 294749 - protein, 79 aa, Zea mays
  Clone ID: MRT4577_31895C.1.pep
PRVRLKHWKDEFISTLQHYWLGTKLLWADVRISSRLLVKLASGKSLTRRERQQLTRTTADLFRLVPFAVFIIVPFMELL

SEQ ID NO: 294750 - protein, 72 aa, Zea mays
  Clone ID: MRT4577_31896C.1.pep
LDQVLRTCHLMWDVSEGKLMRESRLCMFPLLEMRAQLGGACGWSWCVADGPLGVVGAYPQPERCICFVVLSL

SEQ ID NO: 294751 - protein, 151 aa, Zea mays
  Clone ID: MRT4577_31897C.1.pep
VELVILPLGVLKSNSVAFSPPLPERKQTAIHRLGFGTMVKIVLYFPTCFWPEDKHFINFLPIPNSIPNPKLCRHLNRRQMAALKTYMNDLANYTSLMPIHGAPILIAYAANDSAEVFGKLTDQEAMEVLVCQLSHYFDVLVKGGATRPTRT

SEQ ID NO: 294752 - protein, 139 aa, Zea mays
  unsure (1)..(139): unsure at all Xaa locations
  Clone ID: MRT4577_31898C.1.pep
MNSRGKPSRPRPRNTGVMVSRGANLGANGGCGPPRRRKEILLVWRPNKRRPPTGFKTAASEGEEMITRVGKKEXMPSKKGVLFRDQHGIPLVKSVTGKKNLRILKAQGLAPKIPKDRHLPIKKEGRKRNHFGRNRKEKD

SEQ ID NO: 294753 - protein, 60 aa, Zea mays
  Clone ID: MRT4577_31899C.1.pep
QIHLLLRFPQIFIMPTQYHTFNTYKIQSSPHNNFIHTSNFPSFTPLLIHIHTNYFNTLIL

SEQ ID NO: 294754 - protein, 115 aa, Zea mays
  Clone ID: MRT4577_3189C.1.pep
MARAAAIPLVLVALVAAMLLVATDAAISCGQVSSALSPCISYARGNGANPTAACCSGVRSLAGAARSTADKQAACKCIKSAAGGLNAGKAAGIPSKCGVSVPYAISASVDCSKIR

SEQ ID NO: 294755 - protein, 455 aa, Zea mays
  unsure (1)..(455): unsure at all Xaa locations
  Clone ID: MRT4577_318C.1.pep
RDTVRECIWIHIXGSAGIQVGNACWELYXLEHGIQADGQMRGDKTIGGGDDAFNTFXSETGAGKHVPRAVFADLEPTVIDEARTGTYRQLFHPEQLISGKEDAVNNFARGHYTIGKEIVDLCLDRIRKLADNCTGLQGLLVFNAEGGGTGSGLGSLLLERLSVDYGKKSKLGFTVYPSPQVSTSVVEPYNSVLSTHSLLEHTDVAILLDNEAIYDICRRSLDIERPTYTNLNRLVSQVISSLTASLRFDGALNVDVNEFQTNLVPYPRIHFMLSSYAPVISAEKAYHEQLSVAEITNSAFEPSSMMAKCDPRHGKYMACCLMYRGDVVPKDVNAAVATIKTKRTIQFVDWCPTGFKCGINYQPPSVVPGGDLAKVQRAVCMISNSTSVVEVFSRIDHKFDLMYAKRAFVHWYVGEGMEEGEFSEAREDLAALEKDYEEVGAEFDEGEDGDEGDEY

SEQ ID NO: 294756 - protein, 163 aa, Zea mays
  Clone ID: MRT4577_31900C.1.pep
CGYARPPLEFFFFFFFFFFFFFFFFFFFFFLKAPHLFFPKGITIIKSFPTRSFTEGWLNLSQSPQRGSAKKAPRGLPSGWRQLKAPQHPNKGLKPPQFWLKAPQPHNYFWGGLRFNFPPKTSIRSLGGVIRGGFTKALGVLRKIGVKGGKSPWFKKKLPPPEG

SEQ ID NO: 294757 - protein, 85 aa, Zea mays
  unsure (1)..(85): unsure at all Xaa locations
  Clone ID: MRT4577_31901C.1.pep
MDRAGALAAGVEEPVRATFVLDRLGAEVLAVMSPVFICMALVVLLIFLLLPAVYGFAAGSPPSVIGVTIVYLXGPLPTPGPKASF

SEQ ID NO: 294758 - protein, 99 aa, Zea mays
  unsure (1)..(99): unsure at all Xaa locations
  Clone ID: MRT4577_31902C.1.pep
MSVTVETDGFVHSLPHGHGGYNSCAKDSVFFRGENRGCSTGYGDFILXWYSQMLLEHGYIILSGTTSVFGSAPVDVSVNVGGIHWDXGRRSQTPCLIAG

SEQ ID NO: 294759 - protein, 95 aa, Zea mays
  Clone ID: MRT4577_31903C.1.pep
SPRPFQWVNFRAGACGSPGSPSFPPGCSQKTRGPGHIQCPPGLGPPPHLGGRLFESRPPPCSSKTARQTALLFSQSPCTMLSKKTKGTPGYRTPP

SEQ ID NO: 294760 - protein, 57 aa, Zea mays
  Clone ID: MRT4577_31904C.1.pep
PPLLTWAILSELLFEGEEPDNPFKSPPGIGLYGGWKNCVPARAGFRALRPRASSSYS

SEQ ID NO: 294761 - protein, 73 aa, Zea mays
  Clone ID: MRT4577_31905C.1.pep
MAVVRAPLGAVAVAALVVAIFMPAAAAAQAPAPAPTSDGTSIDLGIAYILMLVALVLTYLIHPLDASSPYKLF

SEQ ID NO: 294762 - protein, 78 aa, Zea mays
  Clone ID: MRT4577_31906C.1.pep
GKEISNGNSTLIYGRYNVYPQTPESTDVLYHASHGLLKYSLSCHKVMLFTGYLNEGMHAVPTESPDQMSAECYTCLVS

SEQ ID NO: 294763 - protein, 36 aa, Zea mays
  Clone ID: MRT4577_31907C.1.pep
TIHTLETHYASLATDHRQAVGHDLSKAAAASDKQRN

SEQ ID NO: 294764 - protein, 222 aa, Zea mays
  Clone ID: MRT4577_31908C.1.pep
PAGKPSALPPPSRRIPSTAISARLRPEGTLSWLPVSCPPRRTRTRRSPRRHRISRQGQAGAGGHSQIPSSAAINALLLDPVIRCESPFSSPSRFHRRRGPLAGADLSQARHSGAGAVQGLDPAGQGEDDHAGWEQGPAGAEVRAGFEFWFMGFVRYQVSLHELEKAIEQANVRGQIHRLPFDGLALCFCVAIRSLEKAIELLRILEQLALLLLWRNLPRNKI

SEQ ID NO: 294765 - protein, 169 aa, Zea mays
  unsure (1)..(169): unsure at all Xaa locations
  Clone ID: MRT4577_31909C.1.pep
MGFVRYQVSLHELEKAIEQANVRGQIHRLPFDGLALCFCVAIRSLEKAIELLSKRKVQGRILLCGYSFNYISGTASIKKVSHTTRNLGAVGFVVAVENIYPGIKFDPVPVSIPRILITDVSKNXDLIDYYNSSTIIDWXGRATTFKATADILAPGNLIWAAWAPNGQMI

SEQ ID NO: 294766 - protein, 55 aa, Zea mays
  Clone ID: MRT4577_3190C.1.pep
RVLSTFELCSFALYYCLLFKYLLGEGVLRCATIIEVLLSCPVSVLALCTSNYNVF

SEQ ID NO: 294767 - protein, 134 aa, Zea mays
  Clone ID: MRT4577_31910C.1.pep
ARRVRGQHGSVDEAVQQLDAHSQLQGVHGATNARSTECLAGHSADPHPPPPRLSPPPPQMPPPPDPPPPPPPPQLPPPDPPPPLPPPPLPPPPPPDPPPPPPPGLGQDPPHLQPHASAKANKRRLRASRVATFF

SEQ ID NO: 294768 - protein, 120 aa, Zea mays
  Clone ID: MRT4577_31911C.1.pep
INVCISGSGDDAKSSNGEAARGGSNGGEKQGDESNGGGILSVVASRIGVAVSGANGDRSGSAEDGAKTSAGDPGHGSKGEEKGRGVNGGRIVEQIISNLPSDDQAPDADEASLLIAIIED

SEQ ID NO: 294769 - protein, 47 aa, Zea mays
  unsure (1)..(47): unsure at all Xaa locations
  Clone ID: MRT4577_31912C.1.pep
GPQGSLGRPPPPSHGIYLNSPKKKPENMYILEVKEPIFFLPPXTPHP

SEQ ID NO: 294770 - protein, 128 aa, Zea mays
  Clone ID: MRT4577_31913C.1.pep
MADAEDIQPLVCDNGTGMVKAGFAGDDAPRAVFPSIVGRPRHIGVMVGMGQKDAYVGDEVQSKRGILTLKYLSLHITLFPTLQQSVQQSEHLFRYPASSSSGMRVLIFYGTNVNHFINWAQNYLTLLH

SEQ ID NO: 294771 - protein, 81 aa, Zea mays
  Clone ID: MRT4577_31914C.1.pep
MADAEDIQPLVCDNGTGMVKAGFAGDDAPRAVFPSIVGRPRHIGVMVGMGQKDAYVGDEVLQTDHDKTKGSFEAADSVSTT

SEQ ID NO: 294772 - protein, 188 aa, Zea mays
  Clone ID: MRT4577_31915C.1.pep
PSEKKKKKKKKKKKKKKKKKKKKKKKKKKKGGRPFKGPRLSYRGACKLGGLAFGGPPTLFPGPWFYTVFVGEPLGFPPPKPLFTPSPLDNRGFPQRGPPGSPFPFARLRYCQWGPPFCPSLRGGGRGVYRNGPCSIAQPLGAGSFPFFPFLFLNRGLFPRKGFYWGPLLGPPGRFSREPFTWGSLLGG

SEQ ID NO: 294773 - protein, 39 aa, Zea mays
  unsure (1)..(39): unsure at all Xaa locations
  Clone ID: MRT4577_31916C.1.pep
MPGARPQXXELPVIAHVDMDCYYVQDEQQRNPALRRQPT

SEQ ID NO: 294774 - protein, 91 aa, Zea mays
  Clone ID: MRT4577_31917C.1.pep
RPDRWLTGAGGSFVPESLYKYPVFQAGLRVCLGKELAITEMKAVGVAVVRAFHVHVVGDSGSTACAPKFVSGLTASISGGLPVRISRRVRS

SEQ ID NO: 294775 - protein, 49 aa, Zea mays
  Clone ID: MRT4577_31918C.1.pep
RGEAKFNQRYSLVSKTNNVRRAKDDGLNREVSVKGVKVMMTDPALKTNS

SEQ ID NO: 294776 - protein, 66 aa, Zea mays
  Clone ID: MRT4577_31919C.1.pep
LLILYFLFFYFAFLFFSFFFLKKSPFYKDLEKSFLPNFEGPKVSPDNNNLFFSPILSVLDGAPGDT

SEQ ID NO: 294777 - protein, 129 aa, Zea mays
  Clone ID: MRT4577_3191C.1.pep
HPKKSSSKQPINTVYTNILSLLALCAFIESNTCAHYITQCSLSYSHNITHPLTTYTYVVLTYTRAKLYTIPKASAESVTPPTSALVTPLFVTYITIQNINTTPTPLSVLTVTHISVENCGLYVTQDVCV

SEQ ID NO: 294778 - protein, 59 aa, Zea mays
  Clone ID: MRT4577_31920C.1.pep
RNGWARCTHFCPRSSTTNLFSVFHDFSENLQKKKKKKKKKKKKKKKKKKKKKKKKKKSG

SEQ ID NO: 294779 - protein, 108 aa, Zea mays
  unsure (1)..(108): unsure at all Xaa locations
  Clone ID: MRT4577_31921C.1.pep
EPLHETVLHMIRRRPWTTRLENSIRLLSPTLDAPLVHGVISGAASAGRADLALQFFRFAYRRGGFSPEGATFALLVPALASRRMLNHARXLXLDTMPSFSVAPDEPTL

SEQ ID NO: 294780 - protein, 75 aa, Zea mays
  Clone ID: MRT4577_31922C.1.pep
MCAYCGKCADELMKNAAYIGTPGKGILAADESTGTIGKRLSSINVENVEENRGALREALVCFPGALHFISGVILF

SEQ ID NO: 294781 - protein, 90 aa, Zea mays
  unsure (1)..(90): unsure at all Xaa locations
  Clone ID: MRT4577_31923C.1.pep
RKSRNSXPHQSSEALRTPSSLLLSPRSYPMVKPRRATSQRIRVHEGRWLGDVPAWHRGGHRHHRLQQLLCTAHPPGGTNYESYNNKRTIG

SEQ ID NO: 294782 - protein, 89 aa, Zea mays
  Clone ID: MRT4577_31924C.1.pep
ILYTVRPFFFSFFLTQKKGVLRTICYSSKNTIKHFLVLQHVNNTLLARRDYSNATTYSHYKRGHACTGIGTDANHTNYLLLESLHSPTT

SEQ ID NO: 294783 - protein, 115 aa, Zea mays
  unsure (1)..(115): unsure at all Xaa locations
  Clone ID: MRT4577_31925C.1.pep
CSLNKQNPGIFTPEVIEALGPPGVLVNVGRGAPVNKPELVAALPNGPLGGAGLDVFQAKPDVPQALMALDNVVLAPPMGSGTHXTPKAMGDLVLPNLGGPPLNMPLLPPVVCPCQ

SEQ ID NO: 294784 - protein, 71 aa, Zea mays
  unsure (1)..(71): unsure at all Xaa locations
  Clone ID: MRT4577_31926C.1.pep
SDPSVRAAAVSRAVCVQMPGSKCLRDREATSFVRRSVVAPRPRDAKARRRHPXIRLRRGTGXNCSPVGANI

SEQ ID NO: 294785 - protein, 198 aa, Zea mays
  Clone ID: MRT4577_31927C.1.pep
DPRGWPGHPLSRSTLPPPRRPDTDSPWKAPRSTLSPPTTHQLSMEGCEPRRPQPRLSMEGRGPRRPRPRLSREGCGPRRPRPGHHVALHGRRSDPLSRSNHRARPNLGAPWKGVVHADPDPATTSTVHGDMERPTPVRKSHTSTVDLLIWTEGASQESQQPTASVVGGAQDAQLAAFVSAQLPDGQATPSNVSKNKSP

SEQ ID NO: 294786 - protein, 167 aa, Zea mays
  Clone ID: MRT4577_31928C.1.pep
TKKFDYFLALTPAGTPTPTRPPRGSPWKALRSTLSIQPPRAPQPRRSMEGRGPRRPRPGYHINGPRRHGEADTGEKVPHINGGPAHLDGGGIARVATADRISRRRRSGRPSSLLLSPRSYPMVKPRRATSQRIRVHEGRWLGDVPAWHRSPSPSAATASLHSPSTLT

SEQ ID NO: 294787 - protein, 128 aa, Zea mays
  unsure (1)..(128): unsure at all Xaa locations
  Clone ID: MRT4577_31929C.1.pep
RYKMNYFMNTNNISNLLPSHDKQHICNVITKNFHGXCFGVFFFLQXXXXXRXXGRNXATHPKXSRGXSXXXXEXXKXNKTXXXXXNTPNGXXXTXXRDEXQKXXNXXPXGEGPXKXXAXXXXXXXKEX

SEQ ID NO: 294788 - protein, 221 aa, Zea mays
  Clone ID: MRT4577_3192C.1.pep
MIQLLFSLLAAEAALVLALLFPTPVRRLALLAIDRAKRGRGPVMAKTIAGTMLLVLVSAFYSVAKIRRREGELGQLTPTDQVLASRHLLEASLMGYSLFLGLIIDRLHHYIRELRMLRKDMEAVTEQGRTLEAAKSGSTDEIQGYQKEVASLKEQVQELQNQSQKKTERLKTAEANSVALQKQSEGLLAEYDRLIAENRDLRDQLQSIDLRLSHSGGKKNS

SEQ ID NO: 294789 - protein, 30 aa, Zea mays
  Clone ID: MRT4577_31930C.1.pep
DTRRNFQYIGTRAQSLLKNSVLIRTENRPR

SEQ ID NO: 294790 - protein, 82 aa, Zea mays
  Clone ID: MRT4577_31931C.1.pep
MDNNFSRSVSSVPFYPDIKITHYTRNEVAVGYWGETKYTDDSARAAASAPGFFFARSIIFSFSSPFFFFFLFLNILFLYSSR

SEQ ID NO: 294791 - protein, 44 aa, Zea mays
  Clone ID: MRT4577_31932C.1.pep
TTGVGPGCPQKGSRVFPGVLGVSSYWRVGSMDRPEPGVNEDTEL

SEQ ID NO: 294792 - protein, 40 aa, Zea mays
  Clone ID: MRT4577_31933C.1.pep
KKILRSQQASIRLCWLSPSLPCGHRIITNFLVHDISDWCP

SEQ ID NO: 294793 - protein, 57 aa, Zea mays
  Clone ID: MRT4577_31934C.1.pep
RAGIHASAHYCIEQGSGYCSASRSCMSTGDEEESYTLTRLDPRTTVKNTICSGDQNT

SEQ ID NO: 294794 - protein, 51 aa, Zea mays
  Clone ID: MRT4577_31935C.1.pep
SSERPLVIFFLKKTIGVLYINPISLNLHCKVQMLLVRGIRIRGGLSTSTGS

SEQ ID NO: 294795 - protein, 53 aa, Zea mays
  unsure (1)..(53): unsure at all Xaa locations
  Clone ID: MRT4577_31936C.1.pep
SILASNTMETLLVHKDLNKSEGLDDLLVELEKEGVVIYGGPVAHDKXKVPXVD

SEQ ID NO: 294796 - protein, 54 aa, Zea mays
  Clone ID: MRT4577_31937C.1.pep
IYMSTKHVTLLSDDKTLGIWTCSEKQVVAMLDKFPTSYKQEKKEISMYPKSDIH

SEQ ID NO: 294797 - protein, 122 aa, Zea mays
  Clone ID: MRT4577_31938C.1.pep
GFYLGQQQIPFSPVPGAFPPQFFSFYPMGALDFPGFFQQPQLFPFSPVGGGGPGPFFIQPPVLPFFQAGGPKGGPLFQMPQMVPFNPLGFSNPAGVFPQPPLGGGPLLIFFGVKVQKKGFWF

SEQ ID NO: 294798 - protein, 86 aa, Zea mays
  unsure (1)..(86): unsure at all Xaa locations
  Clone ID: MRT4577_31939C.1.pep
NHISSPQTNTSLLCAICPHSCAPXENLPVGHLSHIAPSQARLTWRFFRDRLPKKKMHLVDMDTLLILLSLGQGNQHPRGQDITQYV

SEQ ID NO: 294799 - protein, 95 aa, Zea mays
  unsure (1)..(95): unsure at all Xaa locations
  Clone ID: MRT4577_3193C.1.pep
MPPILHPSHVVEGFDRMTRGQGRAANALAPKIGPLGLSPEXIGEDIAXYTDKDXKGLRVTVKLTVHNRXQSTLVVSSAAALXVICGLKEPERYSY

SEQ ID NO: 294800 - protein, 79 aa, Zea mays
  Clone ID: MRT4577_31940C.1.pep
CSPSRLQPLIRLAASHAAPSASRRARRLTRHPGISPPWRAHLKPSSDEHHTRLDYMQNSNMLIQISRLALTFTLLILIS

SEQ ID NO: 294801 - protein, 343 aa, Zea mays
  Clone ID: MRT4577_31941C.1.pep
SSLGFLNISSSSLSTLWMSGLCSLTKAVMNCPNLTELSLDFPKQNNDSTDLAALIDSLGRTCPNLRNMHVSSIRLCNEAVFALESANLRGLCMLSLVLGSKITDAAVASIVRSYSSLELLDLSGSGITDNGLGMISKAFPDTLTRLLLALCPNITSSGVQVAAAQLPLLRLMDCGNIICANPQPEAGRSYFGDLTGGIKFCSKLPVQKKQQQQQAACQKLIIKHGALKKLSLWGCSAIDALYVNCPELVDLNLNACTNLHPERLLIQCPKLKDVHVSGCRDMLIGAVRNQVLNEFAAAEPRLPCKRLADGSKRVHVPHFMIEQLEEQEKWGGPRKSQCTVHLT

SEQ ID NO: 294802 - protein, 67 aa, Zea mays
  Clone ID: MRT4577_31942C.1.pep
SVHVRLSSLVGLNGMSSAAGGCVGQPSAWVLVWKYGPLVQLYHLGLFDRKKKKKGRPPTRERVAPRI

SEQ ID NO: 294803 - protein, 91 aa, Zea mays
  Clone ID: MRT4577_31943C.1.pep
MPWLPSAPAPGHAHTLVEQKAVDEMVDGFGIGRLQELLGAAAGQAAEIDDMYAGMLSKLEKLAREVEKSNLRVLEQEKRNLLLRYKYAGME

SEQ ID NO: 294804 - protein, 87 aa, Zea mays
  Clone ID: MRT4577_31944C.1.pep
HAELLIMALNAGDDMSDVDRLKYASGGTALIRARRCACSMSALSGAGGMVYMVYRTVKGNWLHKQHTDPSQRHHVFKKRYAYPVVLC

SEQ ID NO: 294805 - protein, 54 aa, Zea mays
  unsure (1)..(54): unsure at all Xaa locations
  Clone ID: MRT4577_31945C.1.pep
NSLLKALVNGLFMPFLEYVDIXRRWGDXIVXCSLSNNHLXICALXDSMRKSKIG

SEQ ID NO: 294806 - protein, 131 aa, Zea mays
  Clone ID: MRT4577_31946C.1.pep
TRTVPNDKKGCLGCLGTHCNQALPKTALPMKAGKKTFHAGPGGRSQRGNLTTSYLPLFPRSKTLPGPDPDPVSATTLAQNCLSTCFGSGGTTSAVTPRRTRPFFGGTGLLPKTFLETAGKTPRVFFCFFGN

SEQ ID NO: 294807 - protein, 100 aa, Zea mays
  Clone ID: MRT4577_31947C.1.pep
CLSADAIVPHHSTMPLLSSHAFFYLSAKDLIQAVMMLLLADQKDLFLHSEPLVPSPSAGPDVERRSNGKVDLSSCFGAYDYREALPRQITKFLGTSMYVC

SEQ ID NO: 294808 - protein, 113 aa, Zea mays
  Clone ID: MRT4577_31948C.1.pep
SKECESLLKNEYKFLATHDKFCKDKVAHIQNFKDLFSKFEDDKEKLLVQYELQRKKEKATLSELEKTFSEKIANAEESLKKMKQDDKSIHILRKSIGSFLSGDPDDQSGQDDD

SEQ ID NO: 294809 - protein, 100 aa, Zea mays
  Clone ID: MRT4577_31949C.1.pep
HSSPSVLSCLLTIAVSAQQPGPSDYKVSRVRRRAGQGRAGDGGWVGLDWIGSVPPVDQSVYQIWARAAAAFPARSASRRPSRLLRRPPRRRCRARLPRRE

SEQ ID NO: 294810 - protein, 100 aa, Zea mays
  Clone ID: MRT4577_3194C.1.pep
IRTSGRELEEQLQVLPSSSSCWSDLEFCEKTRNWYCYGKAVAEQAAWEAARRRGVDLVVVNPVLVVGPLLQATVNASIAHILKYLDGSARTFANAVQAYV

SEQ ID NO: 294811 - protein, 28 aa, Zea mays
  Clone ID: MRT4577_31950C.1.pep
CPPNTPYSQQMLALTTRPPSPSADPGGT

SEQ ID NO: 294812 - protein, 138 aa, Zea mays
  unsure (1)..(138): unsure at all Xaa locations
  Clone ID: MRT4577_31951C.1.pep
DFADLKLSNRIDTLIIPKGLWALSQQPGSIVLVCPASQKGQVRVEHYNTGKTKFINAHTFRVACFAVXSKDGRLIATANTKGTLARIYNAPEGNVLQDVKRGADRALIYSSAFLNDSQYLAACSDKGTIHVSILKINV

SEQ ID NO: 294813 - protein, 75 aa, Zea mays
  Clone ID: MRT4577_31952C.1.pep
TGHSDTFNTDKTQTFTILRVSGPTLLNLPTPLQRFLVVKESRSGSYCFNKATYSHKAHGKETNGTHRCITRSALY

SEQ ID NO: 294814 - protein, 204 aa, Zea mays
  unsure (1)..(204): unsure at all Xaa locations
  Clone ID: MRT4577_31953C.1.pep
TKNQGTLQATKGSLAELQDENAKLNEELLKAQTTLKEKSERYEQERKXLQAKSEAEAEKNTNLQASLKDLWNKCSDFATHCVHRLKGIFNSVAASSKEIAPSAEDIPKTFEHIENEVDVLDEVITGHGDFCALLASRGTAAAFLKAGCTHAKIVNKPNFSQSRSDLVNIPGEARSIGNRFITQILAKGGRELAGDEARKLLDSV

SEQ ID NO: 294815 - protein, 161 aa, Zea mays
  Clone ID: MRT4577_31954C.1.pep
MVAHYTEEEIKKAHEILFNEGVKMRYQVAGQDYVDAALKKRNDPFAGAMQDFVTESCWGSIWTRPGLELKTRSFLNIAMLCCQNRGTELATHVKGALNNGGTEEEIREVILQAACYCGMPAGIEGFRVASKAVEEWKAEQVRKGQSQEGDLDLGHRAAMES

SEQ ID NO: 294816 - protein, 223 aa, Zea mays
  Clone ID: MRT4577_31955C.1.pep
MRWPLAISTRRRPLLLFVLLVVLYTIPGTFSSRQVTLDTVEIFSTHEWFGKPTVVFGCNGENKTDLPDVREVHTLYTFKGEESWQPLTELPEKKCKRCGLYEEDTITPDDVFDEWEMCSSDFKGGKYTRFKEGQFNATFLCPNCTASTGHGNREPSEDLETKKTSVVVIIIVSVLASVLLTIALFGGYKYWQKKKREQDQARFLKLFEEGDDLEDELGLTNEL

SEQ ID NO: 294817 - protein, 41 aa, Zea mays
  Clone ID: MRT4577_31956C.1.pep
MAGPKNGTPNANKKYPVICVTHAHRQGLPQLSTPSVASSWP

SEQ ID NO: 294818 - protein, 113 aa, Zea mays
  unsure (1)..(113): unsure at all Xaa locations
  Clone ID: MRT4577_31957C.1.pep
RIIHRRGLRQGDPLSPMWSILAIDVLGYLIKEAPNYGSMVPLIESSXHNRISIHADYVLIFLHPQAIDLLIXMDIIRIFGEASALKVNIAKSTIFLIHSTAENMHTIHNLLPC

SEQ ID NO: 294819 - protein, 163 aa, Zea mays
  unsure (1)..(163): unsure at all Xaa locations
  Clone ID: MRT4577_31958C.1.pep
MRWPLAISTRRRPLLFVLLVALYTIPGTFSSRQVTLDTVEIFTTHEWFGKPTVAFRCNGENKTDLPDVKEAHTLYTFKGEESWQXLPEKKCKRCGLYEEDTFKTDVFDEWEMCSSDFKGGKYSRIKEGQFNATFLCPNCTASTGTADIQYLFLSVCLDIFPMS

SEQ ID NO: 294820 - protein, 81 aa, Zea mays
  Clone ID: MRT4577_31959C.1.pep
RKSIEPMSSPYAPAIEGALGELIRVDELLRRRVRVVLSRELRGIGSRCLGCPNSAMSARPRRQMAAHNVVDTSSISVRAVL

SEQ ID NO: 294821 - protein, 153 aa, Zea mays
  unsure (1)..(153): unsure at all Xaa locations
  Clone ID: MRT4577_3195C.1.pep
MECVLDVIERDYSLVEDDTSDEHNILAHKNDDHKVLRLAHXKVMDASGNPGDSLLFTELIHNQLLDLYNITIISIPLSTAAAANYTRPQLXTSLRENPYMTNIILXAGYDEXADASLYYIDYIATVDNIDKGAIADAIHTSECIICSKMLTRT

SEQ ID NO: 294822 - protein, 90 aa, Zea mays
  Clone ID: MRT4577_31960C.1.pep
KITNYKCTFGLTESKGTGVMQKRMPSQREQYGSTVHLFIGKGLNPCTITPMPFIFANNSIVTLRGLICLFIFKSVPLFCYHAEAFLRTAS

SEQ ID NO: 294823 - protein, 132 aa, Zea mays
  unsure (1)..(132): unsure at all Xaa locations
  Clone ID: MRT4577_31961C.1.pep
SVAKYTTLSLCLLDIDITGLVALYKPSAPHIDHGIDLHIMLKLHTMGLRDYRYLNFILNQYIHTEWIDSPRSPHNLPNSSVITGNNIPFDKYPHKFDLVDADYIRYYGMHNFYHTMQNLEGEYXFMTSDHSY

SEQ ID NO: 294824 - protein, 91 aa, Zea mays
  Clone ID: MRT4577_31962C.1.pep
TAGDVEVLWSREGGVGDVSRDPRRLTGHAVAIGISHRACDTTAIRAATWAICWRPNPSEVTSHLKTKLVPGNLESKVLKKKPRLINLLLNP

SEQ ID NO: 294825 - protein, 56 aa, Zea mays
  Clone ID: MRT4577_31963C.1.pep
KHNEGGPCYRCFFPQAIGHQFFTVFVAVAFLIRLRCQFNRSIARKKKKSSKEPNEK

SEQ ID NO: 294826 - protein, 108 aa, Zea mays
  Clone ID: MRT4577_31964C.1.pep
RMKGRSTIMNFGRALELMKSGNKLSRQGWNGKNMCAVYRKGYRHAIPCNKLAHEARGLHEGDLFKVRRSVLLRWANGTHAMWVPSEYDTFSSRLHDCWIIQIKPLKGL

SEQ ID NO: 294827 - protein, 66 aa, Zea mays
  unsure (1)..(66): unsure at all Xaa locations
  Clone ID: MRT4577_31965C.1.pep
MNLELYCRRANFYSVAYLRLEKATKVCFKKKKKKKKKKKKKKKKKKKKKKXXXXKKKEKKKKKRGP

SEQ ID NO: 294828 - protein, 75 aa, Zea mays
  Clone ID: MRT4577_31966C.1.pep
MPLHQSLRCTTIKKKRKREKKNKKKKKKKKKKKKKKKKKKKKKKKKKKKKKKKKKKKKKKKKKKKKRKKKKKKAA

SEQ ID NO: 294829 - protein, 370 aa, Zea mays
  Clone ID: MRT4577_31967C.1.pep
MYDWLKLEDIYASLFLVKCDTLLNRANHRQGEKQTKTTKFCSGICLFFVLICVIWAPMLIYSSGNPTNIANPIVDVSVKIDIKALGGRLNLFKTTACEKIPWKYLKAYDDVDPLDYLGAYNVDDIQLICCQPDASTMWLIPPPVQNRFIQSLEEREMLFGKMELILNWDFLRARPKGKELVRYESPIEHCPSVDDVKRVLNGTANSFSIIDAYPRYFRVTGSGEVRRLEAAIDSVSGELLLNNGTPWWSFYDTNPSDLAGCQGLNGPMAIVVSEETPQGIIGETLSKFSIWSLYITFVLAVARFIRLQCSDLRMRIPYENLPSCDRLLDICEGIYAARAEGELEVEEVLYWTLVNIYRSPHMLLEYTKPD

SEQ ID NO: 294830 - protein, 115 aa, Zea mays
  unsure (1)..(115): unsure at all Xaa locations
  Clone ID: MRT4577_31968C.1.pep
GIKPDLGHLGPKAFPKVFKKGINETQVIKCSKGPFDKYMLCQLQLCPGGKGVLITCPAPHQDTCSKKILFRPFKKGRLKKKLNQGADPFQIPGVAMAMETPXRGLSLGLCQVCTE

SEQ ID NO: 294831 - protein, 134 aa, Zea mays
  Clone ID: MRT4577_31969C.1.pep
RFGEEKSRIQETSDAARSETTTLQTLKLQKVASISKKPGISSYSRPVSCARRVAISLRTATMGDPAGTRKPLMTLPSPFPASPNVEAATSNAPVECATGRAGAGPAARAWRGASAARAVCLSGLLDPPRACSQP

SEQ ID NO: 294832 - protein, 94 aa, Zea mays
  unsure (1)..(94): unsure at all Xaa locations
  Clone ID: MRT4577_3196C.1.pep
VISGYAQHGLTEHCLYLPREMNGHISPDATSMLGVLSXCRDAFIEAEVPRCFKAMTEHGVVPEIDHYLRMVHHLGHAWLLDEARDLIQTIPMPS

SEQ ID NO: 294833 - protein, 114 aa, Zea mays
  unsure (1)..(114): unsure at all Xaa locations
  Clone ID: MRT4577_31970C.1.pep
VPTGTISGRVWAHTACSFNGNSGSCQTGDFGGALACTLXGHPPLTLAKFTIGGSQNFYNISVIDGYNLPMAFSXSTGVRLVCTNPECPNAYHNPPDMKTHACGGNSNYQVPFCP

SEQ ID NO: 294834 - protein, 79 aa, Zea mays
  Clone ID: MRT4577_31971C.1.pep
AVSESSKTPKRPAFLLLHKQSNILCKNRNAVSESSKTPKKPAWLNHIPITAFVSVRMSALLRIGDTHVLCLGYVLVFFF

SEQ ID NO: 294835 - protein, 44 aa, Zea mays
  Clone ID: MRT4577_31972C.1.pep
KAYCFTPSIGCLQTPASGCLSSSYSDTLSIPRYIFTSSSIAIIS

SEQ ID NO: 294836 - protein, 188 aa, Zea mays
  Clone ID: MRT4577_31973C.1.pep
MAPEPEDDFLNEKNPRPLDEDDIALLKTYGLGPYSNSIKKVEKEIKEMAKKINDLCGIKESDTGLAPPSQWDLVSDKQMMQEEQPLQVARCTKIISPNTDDAKYVINVKQIAKFVVGLGDKVSPTDIEEGMRVGVDRNKYQIQIPLPPKIDPSVTMMTVEEKPDVTYNDVGGCKEQIEKMREGVELPM

SEQ ID NO: 294837 - protein, 235 aa, Zea mays
  Clone ID: MRT4577_31974C.1.pep
MAQMISTMPMLDAAPASSAIMPKLPPAACLDAPPASGITVVSRQHVRPDAASAVGDLTLSVSDLPMLSCHYIQKGLFFPAPDLPMSSVVSLLLSSLSRALAVVPALAGRFVTLPDDRIVIRCNDAGVDFLHAVAPGLSLDDFLVPDADVPTKHTKDLFPMDRTVSYEGHRRPLTSFQVTALGDGTVFIGIVANHAVVDGTSFWQFFNTWAAICRGESPKLPDFRRNFFGESTAVL

SEQ ID NO: 294838 - protein, 426 aa, Zea mays
  Clone ID: MRT4577_31975C.1.pep
RTQDSNLAAPSSANDLVPAAVPVPSTGTGSFSAFSPNNAPAPAVNPPSRPPTAPSTTAGEVQERRSMKWLYFIVLPLVVLLIGIACMLLLCRTKSGTTIGPWKTGLSGQLQKAFVTGVPKLQRSELEGACEDFSNIVSSYPQYTVYKGTLSSGVEIAVVSTMVISSKDWSKHSEGRFRKKIDSLSRINHKNYINLLGYCEEEEPFTRMMVMEYAPNGTLYEHLHVEGFDPIDWNGRMRIIMGVAYCTLHMHELSPPVTHPDIKSSAILLSEDGAAKIVDMSVWHEVYFRGNMPKDGDLVDHQERVAADPAGNVYSFGLLMLEIISGKPPYSEEKGSLSDLALECIRDNRSMSCLLDPSLKDHKEKDLETICDLVQDCIQSDPKKRPAMREVTTRLREVLSISPEAATPRLSPLWWAELEILSVEAS

SEQ ID NO: 294839 - protein, 60 aa, Zea mays
  Clone ID: MRT4577_31976C.1.pep
AHDAVINMKPMYDNKLKMKKTGPFNSAVWLSPCNASNYVVLIQHKIMCLKLHDVFLLIYP

SEQ ID NO: 294840 - protein, 269 aa, Zea mays
  Clone ID: MRT4577_31977C.1.pep
GYLEAGQPSYSDFISNSCYARFLSGLSGTSLFNSISLMAYNVFYTSLPVMTIIFDKDISETTVMQYPQILLHSQAGRLLNLTTFCGWFGRSLYHALVVFFITICAYSDEKSEMQELSMVALSGCIWLQAFVVTMDTNSFTCPQILLIWGNFVAFYMINLILSTVPSLQLYTITFRLCSQPSYWISMALTVAVGMGPVVAFRYLKNLYQPSAVNILQQVEQRNGSIRTSGNLESAGANLTNLLTGSRKNRDSNYRPLLSESAESVSASGS

SEQ ID NO: 294841 - protein, 164 aa, Zea mays
  unsure (1)..(164): unsure at all Xaa locations
  Clone ID: MRT4577_31978C.1.pep
MASLTDLVNLDLSDCTDRIIAEYIWIGGSGIDLRSKARTVKGPITDPSQAPGEDSEVILYPQAIFKDPFRKGNHILVMCDCYTPQGEPIPTNKRYSAAKVFSHPDVAAEVPWYGIEQEYTLLQKDVSWPLGWPVGGYPGPQGPYYCAXGADKAFGRDVXDAHYK

SEQ ID NO: 294842 - protein, 357 aa, Zea mays
  unsure (1)..(357): unsure at all Xaa locations
  Clone ID: MRT4577_31979C.1.pep
MASLTDLVNLDLSDCTDRIIAEYIWIGGTGIDLRSKARTVKGPITDPSQLPKWNYDGSSTGQAPGEDSEVILYPQAIFKDPFRKGNHILVMCDCYTPQGEPIPTNKRYSAAKVFSHPDVAAEVPWYGIEQEYTLLQKDVSWPLGWPVGGYPGPQGPYYCAAGADKAFGRDVVDAHYKACLYAGINISGINGEVMPGQWEFQVGPSVGISAGDEIWVARYILERITEMAGIVLSLDPKPIKGDWNGAGAPPNFSPKLIREAGGNQVIKAAIDKLGKRPKEHIPAYGEGDERPLTGRHETADINTFKRGVGNRGASIRVGPDPEKEGKGYFEDRRPGSNKDPXVVPGKIAETPILWKGN

SEQ ID NO: 294843 - protein, 53 aa, Zea mays
  Clone ID: MRT4577_3197C.1.pep
VELVVGASRSMSGTGWVPAPPSHEVGFGDNFSVSSCRYVVPRGVPGVAKVPSP

SEQ ID NO: 294844 - protein, 130 aa, Zea mays
  Clone ID: MRT4577_31980C.1.pep
GTPLFPWFPKKKRVSGQKIFPPPRGVLNNLFFGPFILPPRWGKTPQNSRVLKTISKKVWVFAPPRKGAPCWGGGFFKIKWKRPPNLLKRGGPPFPTKIFFFFFFCPEKFGRLGPLKTLKGLKKGQRGVFF

SEQ ID NO: 294845 - protein, 63 aa, Zea mays
  Clone ID: MRT4577_31981C.1.pep
AVRTLNFHSDIYNITAQCICITHEFDELIRLASISGCNISRFYVQYARKEVMSNLILLQKNKK

SEQ ID NO: 294846 - protein, 37 aa, Zea mays
  Clone ID: MRT4577_31982C.1.pep
MPGLGVLWKGWLELSVYLSSASHVAKIAAPVLFIYCP

SEQ ID NO: 294847 - protein, 100 aa, Zea mays
  Clone ID: MRT4577_31983C.1.pep
FGLDYVPVPSRRTDTEYALNTRYSKGVPSRTDCIPVRFTNYKVSIPGVDSATYLVIKHTVGYNDATGGRASGRNEPALKACTHYYAAGGASNLNVVHSTS

SEQ ID NO: 294848 - protein, 59 aa, Zea mays
  Clone ID: MRT4577_31984C.1.pep
KKKKQTKKTGTFKILWLPKNIPTFLSIHRFHTPPSHIIIFLYTNFNSFQSPLSLKLLLF

SEQ ID NO: 294849 - protein, 119 aa, Zea mays
  unsure (1)..(119): unsure at all Xaa locations
  Clone ID: MRT4577_31985C.1.pep
CCSVVGRCXGLLRPSFXPLGFCXLGVLRLRVVGWGAXFRPLPRAXLVCVLCPRGGPGSCSSLLGVAPFRFSLLCPVSGVPVLVGXXFGPCLGRCCXFSLWFVCCCVVCGGGGVPLAFLL

SEQ ID NO: 294850 - protein, 60 aa, Zea mays
  Clone ID: MRT4577_31986C.1.pep
KFYFWNRKRNGGGTVFVRLLTPKGESILDYSSRNPRLLFMIKTMFGKKKKKKKKKEKKKK

SEQ ID NO: 294851 - protein, 77 aa, Zea mays
  Clone ID: MRT4577_31987C.1.pep
PPPKIPTDSPSKMEPRIGYSYIFWTNPSYGLELFSLPTFITKKVLGGFPFLPKKPGRLFQLRRILMVGTFPRNFRPG

SEQ ID NO: 294852 - protein, 68 aa, Zea mays
  unsure (1)..(68): unsure at all Xaa locations
  Clone ID: MRT4577_31988C.1.pep
FYYVSMGMKLXPYMLLHILFISSHSKQWNISTLIGIHRTTFFLMTACYKAKMYQMYSTFHTLFPVFYH

SEQ ID NO: 294853 - protein, 415 aa, Zea mays
  Clone ID: MRT4577_31989C.1.pep
MVQLPSSGKRHAEPAMAPARRAATVKLEVEELGADERCPLSKRAKAALPMPPTPPQPQQDMYHNVLDEPSPLGLRLKKSPSLLDLIQMRLSQASNAGESSMDNSGSEPSKKKDNKSGASAAGERLKASNFPASILKIGSWEYVSRYEGDLVAKCYFAKHKLVWEVLEGGLKSKIEIQWSDITALKATCPENGQGTLDVVLARPPLFFKETDPQPRKHTLWQATSDFTGGQASVHRRHFLQCPSTLLSKNFEKLIQCDQRLYQLSQQPEITLDSALFEPRSSIFEDPVESKCAGFTNLKDEHEALPGFSGPVSPCAGSSISAKNENNDSIGMTAEYLSQTVGTGVGAVGVQAVGRNVNGAAPEFSIPHWWSQLKVPGLRPSMSVDDFVNHLGNCISEQITSGNPALANNEVPTKEN

SEQ ID NO: 294854 - protein, 354 aa, Zea mays
  Clone ID: MRT4577_3198C.1.pep
SARDPTKPSYQLDRRHHARPHNSTDAGAPAAAATAVPAGNGQTVCVTGAAGYIASWLVKLLLEKGYTVKGTVRNPDDPKNAHLKALDGAAERLILCKADLLDYDAICRAVQGCQGVFHTASPVTDDPEQMVEPAVRGTEYVINVVDESCWSDLEFCEKTRNWYCYGKAVAEQAAWETARRRGVDLVVVNPVLVVGPLLQATVNASIAHILKYLDGSARTFANAVQAYVDVRDVADAHLRVFESPRASGRHLCAERVLHREDVVRILAKLFPEYPVPARCSDEVNPRKQPYKFSNQKLRDLGLQFRPVSQSLYDTVKNLQEKGHLPVLGERTTTEAADKDAPAAEMQQGGIAIRA

SEQ ID NO: 294855 - protein, 535 aa, Zea mays
  Clone ID: MRT4577_31990C.1.pep
MVQLPSSGKRHAEPAEQTMAPARRAAAVKLEVEELGANERGPLSKRARPAQPMPPTPPQPQQDMYHNVLDEPSPLGLRLKKSPSLLDLIQMRLSQASNAGESSMDNSGSEPSKKKDSKSGVSSAGERLKASNFPANILKIGSWEYVSRYEGDLVAKCYFAKHKLVWEVLEGGLKSKIEIQWSDIAALKAICPENGQGTLDVVLARPPLFFKETDPQPRKHTLWQAASDFTGGQASMHRRHFLQCPSTLLSKNFEKLIQCDQRLYQLSQQPEITLDPTLFEPRCTIFEDPVESKCAGFTNLKDEHRALPGYSDSVSPCAGSSISAKKENNDSIRMPAEYPPQTVGIGVGAVGAQAVSRNVNGAAPEFNIPNWWSQLKVPGLRPSMSVDDLVNHLGNCISEQITSGDPALANNEVPTKETLEGIAQYLLGDTQGPPVTAAVERSLMARVDSLCCLIQKDTAPVAKPKPEPNDGDSIGVEASDGSDEEFTSAPTGKPTDATNPPAMSRKDSFGELLTNLPRIASLPQFLFKIPEGTEN

SEQ ID NO: 294856 - protein, 156 aa, Zea mays
  unsure (1)..(156): unsure at all Xaa locations
  Clone ID: MRT4577_31991C.1.pep
TCKVSLPHLYHRICDESRAIRLLLAPCADANDDAGNPLAAFAFTKQVARKAALLSDAGTGAVNYRPTSCSSRXLDARRSPXLNSTYLLVLDLAYQHLEREIAHDFKTHLMFQSYNVAALKEEMDAYLIDVFEDTNLCDIHVEGVYIMXEDIHVDRR

SEQ ID NO: 294857 - protein, 147 aa, Zea mays
  unsure (1)..(147): unsure at all Xaa locations
  Clone ID: MRT4577_31992C.1.pep
MGDPHGSEVIPRLEYAMEGXKKGSACVXFRPRTHTDLVAGNRAXSELSSXSGLLFPVADHPVVVVAGLSADGRGLSRFLRVECMSHSFFYEVPLPXICRFGLKLATKEHLCAQRIWKRPYGVGLLTAGNVLSQGVSCTYYCPSGNYF

SEQ ID NO: 294858 - protein, 46 aa, Zea mays
  unsure (1)..(46): unsure at all Xaa locations
  Clone ID: MRT4577_31993C.1.pep
TSQGWRCDQCGLPGVRVSTRLDNSNESTRRAYYKCXPCNRSLGLWP

SEQ ID NO: 294859 - protein, 64 aa, Zea mays
  Clone ID: MRT4577_31994C.1.pep
SSCADALIGAFGMDQRCYDSLGLPPGAGDLVLPAPSTWHLLGAKYELFDPLPEDAMSLQDGFAG

SEQ ID NO: 294860 - protein, 52 aa, Zea mays
  unsure (1)..(52): unsure at all Xaa locations
  Clone ID: MRT4577_31995C.1.pep
GGXRDPDRPGPXRHHEDAGRRDGXXXEXSPXRAVNXGQGXTQARXRXRPSPR

SEQ ID NO: 294861 - protein, 99 aa, Zea mays
  Clone ID: MRT4577_31996C.1.pep
GRVGKTLKVQAQVSEVKNIMLNNIEKTLDRGEKLSELQDKTSDLHSQAQEFKKQGVKIRRKTWLQNVKIKLVILGILLLLVIIVWVSVCQGFDCTKHET

SEQ ID NO: 294862 - protein, 142 aa, Zea mays
  unsure (1)..(142): unsure at all Xaa locations
  Clone ID: MRT4577_31997C.1.pep
DMLXLRCVPXXCLCXQAKPWXXXXFLLXXXLARGALRLALAAGGVLGLXXVGXVVAAXXXALXPVALXXXVPRLRXLGRPXLCGXAXXXGXGXGXRLASXRRXXPPWXLXPACFGLRAXXSPLXGXPPAVFPXVXXXXLVXA

SEQ ID NO: 294863 - protein, 61 aa, Zea mays
  Clone ID: MRT4577_31998C.1.pep
PPPREFPKDSTPLVKGCPKPGRKGFPKFPAGTAMGFVVMGFAGFFVKFIFFPIKNIFVGPG

SEQ ID NO: 294864 - protein, 115 aa, Zea mays
  Clone ID: MRT4577_31999C.1.pep
FLTHKHGHGTLAHACCLLTLTFVSFSWLMVLVASAYVQAAAGTVLQSSGEAIVAGAMGGGVHHHHPCVAADGDGAGAGPGPASVEAALRPLVGVDAWDYCVYWRLSSDQRFLEMA

SEQ ID NO: 294865 - protein, 78 aa, Zea mays
  Clone ID: MRT4577_3199C.1.pep
RSRGVNKDERARARRAAAGTTIIAVTMDPKRGPDVVVDESCWSDLEFCEKTRNWYCYGKAVAEHAAWEAARRRGVTWW

SEQ ID NO: 294866 - protein, 161 aa, Zea mays
  unsure (1)..(161): unsure at all Xaa locations
  Clone ID: MRT4577_319C.1.pep
SLHTSDKASTLSEESHFQENLEQNDQMFRSGWKDIFRMNQSELEAEIRKXVSRDSTLDPRRKAYLIXNLMTSRWIAAQQKSPQPSVEGHNGCTRRPGCVPSYRDPGKQIFGCEHYKRNCKLVAACCNKLFTCRFCHDKVSDHTMDKYFHYNHSFYRPHLSC

SEQ ID NO: 294867 - protein, 88 aa, Zea mays
  Clone ID: MRT4577_31C.1.pep
MGADYYKVLGVDRGAGDDDLKKAYRKLAMRWHPDKNTTNKKEAETKFKDISVAYEVARPSLSLSMSCQDYYCSIRRFRSIRCPCPCGL

SEQ ID NO: 294868 - protein, 204 aa, Zea mays
  Clone ID: MRT4577_32000C.1.pep
MAATYCAYPAASAAAAANPTRRRLQTLTAPGALPAARKPSRQPPSFLSFRRPNAALPPLRVAGADPQVVNGEDFPPMNDLIRLYKKAFLDGNEDVVSDIEKAITSMEEERSKAASQFESITAEIASGKNKFLRLNADLENFRKQTEKDRAKFTSNIQVELVQSLLPLVDSFEKTNVEVTLETEKEQKISASYQGIYKQLVETLK

SEQ ID NO: 294869 - protein, 152 aa, Zea mays
  unsure (1)..(152): unsure at all Xaa locations
  Clone ID: MRT4577_32001C.1.pep
MRWDAAEAEAALERIWDLHDRLSDAILAVSRAHLLLPAPPPXPCRPRPPPKGPTASAXRNGCVFVKGGAAGGGGEALAAAAEALAEARSLHAIRSALEDVEDHLEFLHTVQSQQRAERDAAIARLEQSRLVLAMRVAEHRGKKYKVIDEALA

SEQ ID NO: 294870 - protein, 60 aa, Zea mays
  Clone ID: MRT4577_32002C.1.pep
MPSRSSALRSPSYIHACCTSTRSARCSTSTMIISVLHEVRTSSALAMYSSRTAALRFDSQ

SEQ ID NO: 294871 - protein, 57 aa, Zea mays
  Clone ID: MRT4577_32003C.1.pep
TPITEVDRMHRHGMGIYLSALSYKRTSPIWLKTATTEVEEMITNACNTARCHLDSCL

SEQ ID NO: 294872 - protein, 260 aa, Zea mays
  unsure (1)..(260): unsure at all Xaa locations
  Clone ID: MRT4577_32004C.1.pep
LLYSSGKYQPEAQWPPRRRSSWGSRVSLRASSRPPRPSSSTCRRRPATTTATPPSTTWCSPTSRACSWRRARKTTSSTSTPTTPPSFARSSPSRRSSSTSPTAPAPAAPPPRPRPPPLPTPLPPPPPAPQXSASASPDDAPVQISRPPXPTSTAMPPPPRTITARGSSTATRWPKGRALTSSVTCCPATRTCSTWPSAKAWRRLASSCRPTSACRQSTRQWWEAGMLSASRKRGPHCHWEPGCGQAQQIDDAGAGGTQDV

SEQ ID NO: 294873 - protein, 96 aa, Zea mays
  unsure (1)..(96): unsure at all Xaa locations
  Clone ID: MRT4577_32005C.1.pep
PRDHSSYSDMFEEAIVALKQMISSSCGGIIKYVDGNHDTXLPTKLLKHLTAHLKKLDDALKLTKVKNSLKLPVTDANPKADKSKAPKVAPNPNPSS

SEQ ID NO: 294874 - protein, 43 aa, Zea mays
  Clone ID: MRT4577_32006C.1.pep
TFLGGGEVLAVTAMASINVHRIMTDPNNLILRILQSKAQHPDL

SEQ ID NO: 294875 - protein, 154 aa, Zea mays
  unsure (1)..(154): unsure at all Xaa locations
  Clone ID: MRT4577_32007C.1.pep
KIKPKKHKKNKKTQKKHKSQNQGKKPKKKKKAKPERSRGPTPDTRADPGKRDRPPQGDQHNKKGEKKEQGGTRGKRDPRAKSQTRSKLKKKKKXKQKKKKRESPKKERTQKNRVEPTNPFPDGKKGKPPPSKKGATPRERPGGFSPPRGDRQQP

SEQ ID NO: 294876 - protein, 82 aa, Zea mays
  Clone ID: MRT4577_32008C.1.pep
KKKKFFFSHKIGGGGKTKTVYLETNWQGDRSKKTKTLGGVYITPKGCKSITNLKLRESCKTGEFKGGGGDIFGGPLLNSHYF

SEQ ID NO: 294877 - protein, 83 aa, Zea mays
  Clone ID: MRT4577_32009C.1.pep
FYTFGERENVREHVPIRGPYRGSSGGSDMDSDLDIGTAVCTTVFPTESRYETTDWYTDRECLQERQAHPHIGADIKADGKHHD

SEQ ID NO: 294878 - protein, 371 aa, Zea mays
  Clone ID: MRT4577_3200C.1.pep
MTVVDAVVSSTDAGAPAAAAAPVPAGNGQTVCVTGAAGYIASWLVKLLLEKGYTVKGTVRNPDDPKNAHLRALDGAAERLILCKADLLDYDAICRAVQGCQGVFHTASPVTDDPEQMVEPAVRGTEYVINAAAEAGTVRRVVFTSSIGAVTMDPKRGPDVVVDESCWSDLEFCEKTRNWYCYGKAVAEQAAWETARRRGVDLVVVNPVLVVGPLLQATVNASIAHILKYLDGSARTFANAVQAYVDVRDVADAHLRVFESPRASGRHLCAERVLHREDVVRILAKLFPEYPVPARCSDEVNPRKQPYKFSNQKLRDLGLQFRPVSQSLYDTVKNLQEKGHLPVLGERTTTEAADKDAPAAEMQQGGIAIRA

SEQ ID NO: 294879 - protein, 112 aa, Zea mays
  Clone ID: MRT4577_32010C.1.pep
IVASSAPVMPLELGLGARDLQHLPRMGNPLLQRKQFKHIDVLAGSSLKIMSRPHAKIGGCCPILYVTKYYICDQSKGCNSFLKGTHSLGYAPSLVYKCNDLWNTISGCHILS

SEQ ID NO: 294880 - protein, 133 aa, Zea mays
  unsure (1)..(133): unsure at all Xaa locations
  Clone ID: MRT4577_32011C.1.pep
TRKSEPYDCECLKECDVHTIYXTQSGEPAGNXQGKHSPHEGLHKSLHMHHEITRRYLLDPRESTRIXCIDQRGAGRSTHYADGQHNTTWDXISDIEKLKEHPGIHKRQRMGGSWSXTLGLDYRHHHHAKETET

SEQ ID NO: 294881 - protein, 111 aa, Zea mays
  unsure (1)..(111): unsure at all Xaa locations
  Clone ID: MRT4577_32012C.1.pep
MNTFYKNLKLGIHEDSTNRTKIADLLRYHSTKTGDDLTNLMDYVTRMKEGQNXTLVMTGESNKAAENSPFLEKLNMRGFKALFMVDAIDEFSIGQLRXFEGKMLGSCTKEG

SEQ ID NO: 294882 - protein, 20 aa, Zea mays
  Clone ID: MRT4577_32013C.1.pep
VRKSNLIPWLTCLPVSRRSK

SEQ ID NO: 294883 - protein, 159 aa, Zea mays
  Clone ID: MRT4577_32014C.1.pep
WLPLPVTHRCDVYSFGMLVFEILGRRRNLELQHPAVTVSQEWYPRWVWQRFDQGKFGDVMAASGIHAKDGEKAERMCKVALWCVQYQPEARPSMSSVVRMLEGEEEIARPVNPFTYMASVHMVSSSSSGDGDGGSAAASSYSSKELRGGTRSAANNQGR

SEQ ID NO: 294884 - protein, 61 aa, Zea mays
  Clone ID: MRT4577_32015C.1.pep
AGANKSNPPLFGGIYPSLCVATTPFCLHALVWGTRGLKNIDVVVKNLERPRLDEIRDPTLP

SEQ ID NO: 294885 - protein, 103 aa, Zea mays
  Clone ID: MRT4577_32016C.1.pep
RIAQATHADAQACDTHALTRGLRIGAPCTGIYNGLLLQVMVVGTISCPSCLVHNGSRANPSTPAISSPREGASYTAPATVSTTRWGSSAYYPCASYSSAGGSL

SEQ ID NO: 294886 - protein, 123 aa, Zea mays
  unsure (1)..(123): unsure at all Xaa locations
  Clone ID: MRT4577_32017C.1.pep
VGLCTVHEHTSTERDVRSGSDFTSLNVSDMSAESIRRTQYPSFTDRPSNLRVFSFAELKSATRNFRRSLMVGXGGFGCVYRGVIKTSDDLNERIEIAVKQLNRKGLQGPILWKECFCSPCLFG

SEQ ID NO: 294887 - protein, 98 aa, Zea mays
  Clone ID: MRT4577_32018C.1.pep
MCVLFTPVFFCSFVNNPNLCGPGTTKPCPDAPPFSPPPPYNPTTPMQSPGDLFRLSNKILEFNRTFPSLLFHLNDILIGKMYTSKTSIMLSRLESGKE

SEQ ID NO: 294888 - protein, 147 aa, Zea mays
  Clone ID: MRT4577_32019C.1.pep
AFFKSLVPLWCRQIPYTMMKFACFEKTVELLYKHVVPKPRSECTKGEQLVVTFAAGYIAGVFCAIVSHPADTVVSKLNQEKGSSALDVAKKVGFAGLWKGLGPRIIMIGTLTAAQWFIYDFVKVVLGIPRPPPLEMPESLKAKLKEN

SEQ ID NO: 294889 - protein, 71 aa, Zea mays
  Clone ID: MRT4577_3201C.1.pep
MAMGGASEGTLLRALAGLAPAEMAHSCHDELAAQLASNFSGLACAPVWNNFVLRYAQDKDNLLREELSTMY

SEQ ID NO: 294890 - protein, 83 aa, Zea mays
  unsure (1)..(83): unsure at all Xaa locations
  Clone ID: MRT4577_32020C.1.pep
SFVNNPNLCGPGTTKPCPDAPPFSPPPPYNPTTPMQSPGSSSSTTGAIVGGVXAAGAALLFAGPAISFAYWRDRKPQEQAIFS

SEQ ID NO: 294891 - protein, 91 aa, Zea mays
  Clone ID: MRT4577_32021C.1.pep
LISFVNNPNLCGPGTTKPCPDAPPFSPPPPYNPTTPMQSPGSSSSTTGAIAGGVVAGAALLFAVPAISFAYWRHRKPQEHFFNVYGFKVSL

SEQ ID NO: 294892 - protein, 54 aa, Zea mays
  Clone ID: MRT4577_32022C.1.pep
RVPVPAAIGARSLRWFVCGSASWWCWCADGSARRPGCCLCAGSERAGRAVGEKA

SEQ ID NO: 294893 - protein, 59 aa, Zea mays
  Clone ID: MRT4577_32023C.1.pep
GECRRWTNGSSSSTTGAIVGGVAAGAALLFAVPAISFAYWRHRKPQEHFFNVSGFKVSL

SEQ ID NO: 294894 - protein, 85 aa, Zea mays
  Clone ID: MRT4577_32024C.1.pep
GVEILDLQKRGPNLYLIIKFYFFFILLIGGFFYFCICFFFFFFFFFLFFFFSARYTGWEMLYGLVWKAQPIPPRQNRDPLQNIVS

SEQ ID NO: 294895 - protein, 119 aa, Zea mays
  Clone ID: MRT4577_32025C.1.pep
MRCLPFLHGDAKEKDPVTKSASVRSMSTTSTERDVRSGSDFASLNVSDMSAESIRRTQYPSFTDRPSNLRVFSFAELKSATRNFSRSLMVGEGGFGCVYRGVIKTSDEPNEPIDIAANQ

SEQ ID NO: 294896 - protein, 44 aa, Zea mays
  Clone ID: MRT4577_32026C.1.pep
LGVNSLIGGSYIKLNLGFKLFIHSELGAVQQPCRSNTCRSMFNS

SEQ ID NO: 294897 - protein, 90 aa, Zea mays
  Clone ID: MRT4577_32027C.1.pep
KDLRTMHTKGLAILAHLLLYLQLINMFLILIGVHMYPVLLRYVVLHTLLASISHHLPLASSACTTMVLLLLVYFYYSDSLCGGYSAVCRH

SEQ ID NO: 294898 - protein, 41 aa, Zea mays
  Clone ID: MRT4577_32028C.1.pep
KKKKKKKKKRERGKKKKKKKKKRKKKKKKKKKGRPEKKKHN

SEQ ID NO: 294899 - protein, 79 aa, Zea mays
  unsure (1)..(79): unsure at all Xaa locations
  Clone ID: MRT4577_32029C.1.pep
MGGEPLLTSLSMENSNSHPCTLLSMDPAGSHPASAESSGGGGAVNGVGASADRXLFIIPRHESVRQGPPDINVPLAADP

SEQ ID NO: 294900 - protein, 41 aa, Zea mays
  Clone ID: MRT4577_3202C.1.pep
IISLRASGGCCKMNSMDLTPESTRPFTSSLVSSIACSLRRR

SEQ ID NO: 294901 - protein, 144 aa, Zea mays
  Clone ID: MRT4577_32030C.1.pep
GPRAKFWGPPSPKKQGMTAQNWGGGPKTPRLDSTFSFRARKGHKTNNPPGESQTTHKNLKLYRLKKAGPRAPGLNPNPKGQQLPRNKRGPLFTRAQRGGGGFPPPTPKQTPGPPGGRQRPKICKRPPRPRGGAQTQPRARPRPP

SEQ ID NO: 294902 - protein, 66 aa, Zea mays
  Clone ID: MRT4577_32031C.1.pep
KPASPGGPSSGSAASPTTPPPPSSASSTPGRCREDQYDDLEEHAVHVPVPGARVSSALAETGVRGR

SEQ ID NO: 294903 - protein, 125 aa, Zea mays
  unsure (1)..(125): unsure at all Xaa locations
  Clone ID: MRT4577_32032C.1.pep
MDPANNATNSQAMLHNSSGQEFPTQPPLWPRGFIHQHPMDCSMMGNINFPNPSHGPTTMWAPIQTCNTSSESTMLLASQSTVYWNHYMKLCQESSRFSSRKSFCRFXSQVQILVHHCRVQIPYLP

SEQ ID NO: 294904 - protein, 174 aa, Zea mays
  unsure (1)..(174): unsure at all Xaa locations
  Clone ID: MRT4577_32033C.1.pep
MGSGNGKVYATVVLIRLIYAGMHILTKAAFNEGTSTTVFVFYRHAVAAVFLLPFAFLEIRKRPAPPLNLRLCMKIFAHGFYGMAGTINLYCIGLKYASATSSSAIFNIVPVVAFLLAVMFRMETLKLRSVHGIAKACGILLCVAGVIVXLALYQGPQLKSPNHQQLLKQHAGAA

SEQ ID NO: 294905 - protein, 60 aa, Zea mays
  Clone ID: MRT4577_32034C.1.pep
PISLASLRHGMHFHTSEFSLSTVTRRTSSNTSCQEQKTHHPWPFVQCACIAGRGATRAGA

SEQ ID NO: 294906 - protein, 94 aa, Zea mays
  Clone ID: MRT4577_32035C.1.pep
HTMSHQHPFPSQIKLTVTVYKPQRPTQTLPSHHHLPRTLARTVAGRRARARAHTPHRTAGVTVRRYDPKCQKDGVQVQNGGERFRRSGALGGPA

SEQ ID NO: 294907 - protein, 89 aa, Zea mays
  Clone ID: MRT4577_32036C.1.pep
PGSWQWVGAPQAALGVASQWPGTTPGLKKRPGEVSELIFGNLHRKRCVVGPINEIIGTVFWANHPLLLDCREANNSPGQQQALLCNNLF

SEQ ID NO: 294908 - protein, 38 aa, Zea mays
  Clone ID: MRT4577_32037C.1.pep
SQPAALHARHDIWQKEVTVYLGDMYDHHIRSVCDFLYK

SEQ ID NO: 294909 - protein, 149 aa, Zea mays
  unsure (1)..(149): unsure at all Xaa locations
  Clone ID: MRT4577_32038C.1.pep
KKHNLIFSPFARNAHTARSPISDPRSPRRSKMQIFVKTLTGKTITLEVESSDTIDNVKAKIQDKEGIPPDQQRLIFAGKQLEDGRTLADYNIQKESTLHLGLRFLFCPPPLAKILTGKTITLEGEXTXTIHNVKGKIQDKGGDPLRDQQ

SEQ ID NO: 294910 - protein, 32 aa, Zea mays
  unsure (1)..(32): unsure at all Xaa locations
  Clone ID: MRT4577_32039C.1.pep
MFFPLNEIEEVVVFIPLNVLKRCXWSFSVDKE

SEQ ID NO: 294911 - protein, 26 aa, Zea mays
  Clone ID: MRT4577_3203C.1.pep
TKKMGHGHRVLVYCLKNKVGIKTPNA

SEQ ID NO: 294912 - protein, 242 aa, Zea mays
  unsure (1)..(242): unsure at all Xaa locations
  Clone ID: MRT4577_32040C.1.pep
SQDRRSIDKTLTXRKTITLQVESSDTIDNVNANIQDXESIPPHQXRLIFPDKQFEDGRTLADYNIQKESTLHLVLRLWGGMQIFHKTLTGKTITLHVESSDTIDNVKAKIQDKEGIPPDQQRLIFAGKQLEDGRTLDDYNIHKESTLHLVMRLMRGMHIFMKTLTGKTITLEAKSSDTIDNVKANIHDNEGIPPDHQSLVLAGKQLXDGRTLADYNIHNESTHHLTLRLXSGMQIIVKTLTG

SEQ ID NO: 294913 - protein, 62 aa, Zea mays
  Clone ID: MRT4577_32041C.1.pep
YHLNSILCPSFYNIFSFKTLPLPNLIPFQHIPLSPAFFIPNIPSPISLSNIFSSLISISTLP

SEQ ID NO: 294914 - protein, 82 aa, Zea mays
  Clone ID: MRT4577_32042C.1.pep
ISACYANDGGRWKNGTVIWQEINKKYLKNGDITQLKKSDKNSPVWNDLLKNKHIYLSHKTIKRKGRPRVSVIKTTFKRQNAN

SEQ ID NO: 294915 - protein, 207 aa, Zea mays
  unsure (1)..(207): unsure at all Xaa locations
  Clone ID: MRT4577_32043C.1.pep
LCQLGRVNHAIDVYHXIIASAPELNAYVHAAILRGLVRQGQSLAALRILREAVRKNYAVDSVCYTVVLHGLFRVHLVEEAFRLFDQMKNSGLAPNTCTYNVMLCGLCRTRDLHAVKQLLTEMECADAKMDSISFNTVAVLLIKSKRIDSAVALIRDMLNLGMKPSTKTRLLLSQSTVYKSVLVDNATPTVESDGSDSSSDLLVCSAS

SEQ ID NO: 294916 - protein, 59 aa, Zea mays
  Clone ID: MRT4577_32044C.1.pep
MGMGGRGVVGDRWSQRILWICALGSAVSIYFVAVERQAQNRARAVAEGLKGLDGAGDDV

SEQ ID NO: 294917 - protein, 86 aa, Zea mays
  unsure (1)..(86): unsure at all Xaa locations
  Clone ID: MRT4577_32045C.1.pep
RVIHFTPPRKKLSSGAPPGPPPPPFLSGPVPPPLXGGSCKRPPRPWIPQPPQRGXHVRELPGGPPGPPPPLFGGGREPPGAHGHPP

SEQ ID NO: 294918 - protein, 76 aa, Zea mays
  Clone ID: MRT4577_32046C.1.pep
NQTAPQQVNEGNISPEKVKNKFLHGELNFLCKLLLYLETLMVYVLLVAIELWSKEVAITVISKYERQEVEGHQLAI

SEQ ID NO: 294919 - protein, 247 aa, Zea mays
  Clone ID: MRT4577_32047C.1.pep
ELPHCRHQAQEWVFRCPKFCHPIPMNPKLLSGEMLKTHPPIVFYKDFPKGFKRLLKFARKNKGGPNAYGWASPPVVSEGEDDLEDPRGPSDGPNSTRGTFYGSKTKSIFSGQSTTGRFNFFNSDKLRERSGVAPSPRASRWFFSLSNFRSTRSNELKLRKGFPCLSPPPLGGFFPPPFRGFRLKKGFKFDCSGGAPLLCFPLVPRPLKKKKLPPMRAPKKKKKKKKKKKKKKKKKKKKKKTRERGPV

SEQ ID NO: 294920 - protein, 65 aa, Zea mays
  Clone ID: MRT4577_32048C.1.pep
QRLTRESYNGSQLLPGKNWGKSKKKDTFPGCKARGGIRFQIMKSPTVKGWNPTGPQGALGKKKSN

SEQ ID NO: 294921 - protein, 65 aa, Zea mays
  Clone ID: MRT4577_32049C.1.pep
RLLCCMAVTMNEVEPLYELYKKLSYPIVKDGLIHKVGIDPSIHSLVYCATDRLELKQGYKLNTSK

SEQ ID NO: 294922 - protein, 55 aa, Zea mays
  Clone ID: MRT4577_3204C.1.pep
PRARLYLNRCGVQEILCELALPRHSDYYTIGVITHTVGCWMLYLMNPLSPTTTSN

SEQ ID NO: 294923 - protein, 208 aa, Zea mays
  Clone ID: MRT4577_32050C.1.pep
TLRSSEVDLCHVVQCSGGIYARLPPPPTALQSKPTPTHLSMEGSARSTSRRPRPGHHTDPFCSMPQSMACGQHARTHGLPSTRGFLRHQRRHNPSRRHALTPLPTGKQPPSAPPRWYVRWAPCDAMPSPPPRTHCTPHIVLGAAHLAPDARRPRRCSPCPRCLRHPRILSDAHPTLDARFGCVRYPDARILAPPTPSVAEKVLGVPWR

SEQ ID NO: 294924 - protein, 53 aa, Zea mays
  Clone ID: MRT4577_32051C.1.pep
TYGRFTILVVILGPAGIYRPYCTLDPPVRSHKCSIKCSCLYLTCYCGRVGDRV

SEQ ID NO: 294925 - protein, 73 aa, Zea mays
  Clone ID: MRT4577_32052C.1.pep
SHQSRTMNMIINYQACDGGSTIINQAELAAIHRYCVVCVKQRETPPPPPAISLCMFGVSLCAHVRTCVYLHVG

SEQ ID NO: 294926 - protein, 199 aa, Zea mays
  Clone ID: MRT4577_32053C.1.pep
PCRRSPPPSMPIRPSLRLPAMELAPCPMPANLTSHGRPFLLPPYGQRPHLPWLPRSAKHPSQRAPLLPCTGGRRPSLELALAHPLVLVFVAGINALRLLPVSSSPPVVTTPSRLITFVSLLLPERNWRNLAKKKRTLSVASKPRRAPSSRPFPASSLSMVASLLSLINTRRSSSNMPDLCSLGNLDEKKALARRLPSAW

SEQ ID NO: 294927 - protein, 108 aa, Zea mays
  Clone ID: MRT4577_32054C.1.pep
TRAGGQIFYIGGGLYITLQQPILTNLVGWWGLPQLGPPQHNFEQHLKHPRPPRGGQACPMTMGHWSFILLHPLMKHMQKQQSPMRVEKPGAFSNIKNFLGGLMFPNPV

SEQ ID NO: 294928 - protein, 126 aa, Zea mays
  Clone ID: MRT4577_32055C.1.pep
LLHAAQPPLCFSRGASAIHIISLGRAVPLRRPGSFPDALGSLVCHLAGVPLHLACPSGPLFATLPWSSSHAQRRPTSLPMVVPSSFLPMVDGLTFHGFQDLLNIHSSAHPCFRFLVADAPSLELAP

SEQ ID NO: 294929 - protein, 132 aa, Zea mays
  unsure (1)..(132): unsure at all Xaa locations
  Clone ID: MRT4577_32056C.1.pep
NVDPGAVKELMATLVSRPSPLFDVNKLVKENRFYVFXVVPPPEFESKDPVXGFGSKPQGIQNLFGKGSRRGFPPSGTGFVGAPPRVFIDQDERGPFKTGRDSQDAPAPRVDVGPKLSKKQKDPGRFAPPVLP

SEQ ID NO: 294930 - protein, 129 aa, Zea mays
  unsure (1)..(129): unsure at all Xaa locations
  Clone ID: MRT4577_32057C.1.pep
MFGDWSVHALGSSKSLDNTSKECCLPVNLAAHICKQSYNHXKLGAAISWDDALRSGMRRFQHKYYNLFTCNWHLFVASCLNWLAYNGSLEWNVLNVAALVRIHGXWVDRMSTILATEQIIRNPELSIII

SEQ ID NO: 294931 - protein, 175 aa, Zea mays
  Clone ID: MRT4577_32058C.1.pep
MALEAVVFSQPQAAAGHFGYGRGDSTTYAVPWCDLLQGGVGGGGGGFGDLCAAGEWDLDIDTWAAAAAAAAPTVELGGDDWDWEALSRDYQSSDASTEYYHGGSRKAAAAPEPAGRRKRRRAKAVKNKEEIESQRMTHIAVERNRRRQMNEYLAVLRSLMPPSYAHRGDQASIVG

SEQ ID NO: 294932 - protein, 65 aa, Zea mays
  Clone ID: MRT4577_32059C.1.pep
QCRGDLRSCAPSASMNDDHFMRLRLGYRCVGSESPLFCFSSSCDGPVHNIWLAPFPYNVIRSCRP

SEQ ID NO: 294933 - protein, 92 aa, Zea mays
  unsure (1)..(92): unsure at all Xaa locations
  Clone ID: MRT4577_3205C.1.pep
GAPAGAWVWAVLAAXXGAPGFAXXPRXSRLSGRSPRPFLGAAGAGDPGKKGEAAMEAAIGKYPAPNQIEWHQSESWDLNSKCASRVQSTSNK

SEQ ID NO: 294934 - protein, 55 aa, Zea mays
  unsure (1)..(55): unsure at all Xaa locations
  Clone ID: MRT4577_32060C.1.pep
PRDDPKKALHFTAFLGYRRSITYIVREVDKPGSKLHMKVTCEAXVTIIETPSFSH

SEQ ID NO: 294935 - protein, 452 aa, Zea mays
  unsure (1)..(452): unsure at all Xaa locations
  Clone ID: MRT4577_32061C.1.pep
VTSIAGEFWFGFSWLLDQLPKLNPINRVPDLAALRQRFDRAGGGPAEGRRXLPGLDVFVTTADPFKEPILSTANSVLSILAADYPVERNTCYLSDDSGMLLTYEAMAEAAKFATVWVPFCRKHGIEPRGPESYFDLKSHPYMGRSQEDFVNDRRRVRRDYDEFKARINGLENDIRQRSDAYNAARGLKDGEPRATWMADGTQWEGTWVEPSENHRKGDHAGIVLVLLNHPSHSRQLGPPASADNPLDLSMVDVRLPMLVYVSREKRPGHNHQKKAGAMNALTRCSAVLSNSPFILNLDCDHYINNSQALRAGICFMLGRDSDTVAFVQFPQRFEGVDPTDLYANHNRIFFDGTLRALDGMQGPIYVGTGCLFRRITLYGFDPPRINVGGPCFPALGGMFAKAKYEKPGLELTTKAAVAKGKHGFLPMPKKSYGKSDAFADTIPMASHPSPTR

SEQ ID NO: 294936 - protein, 97 aa, Zea mays
  Clone ID: MRT4577_32062C.1.pep
PSKAREGKVVQVYPPRWVIHVEGITREKVNGSPVKVGIPPSKVLVPKFKLAKARKAFLARKARGRPPHKVKGKFSSDEVAATPLGGAAPGAFFQEMD

SEQ ID NO: 294937 - protein, 769 aa, Zea mays
  Clone ID: MRT4577_32063C.1.pep
MARVRSTARVTRDGEEAEAAETAPISEVMRRLGLVVTEGASDEEAPAAEVEQADIEEGDANEGEIDYNIIMPSKPSHLDFGKLTVSEANMTMMTKLGYFREAEKGLVHFGGEETIPKPENDEVVVFKSFFKAGLRFPLHGMVVEVLEKFGIYLHQLTPNAIVRLSVYIWALRSQGVEPLAEAFCRVHELHYQTKAREDGLHENFGCYNFAYRKDMKTPVVSYRTKWLTGWKSEWFYVKIDEKKEKLVQSPLKLIFGMTRPQCNMTSGIHAKMLSFGSRTKRRLNRVMDALHFEYSDYEQLNKGTEGQKRKRVVSVMGRQAARMVKEDEENLKKRKLSPELTTIASKKRKVAALKQKATDIEEETPATPFATDVAEILKVMTESLPIKLSPLAPHLTKLFQKKKEPSIVKKAAGPKKRRIITVIEAIEETPRPASAPKAPAVESATATEAAPTEVATAEAEPTEDANLESTLSNIDKILLDMAVEEGAIAAEEAAATVPEKEKEIAEDASEEENFNFQNLIGQELSKAEKEELRDYAISCGYEPGALLFGGVDDESLGCLRDRTGAKVIGTLSKSIGFPKLETDISRYRRQHIVGNLFYSNFKVASAQSMLLSKALRMQQDLEDKKHEVIIEGLENKIKDQVAALEKKDFELQTAEGLLAEDEAKIAKLNMELLSKSESFEQEKQKFDAKFEAEIKKVFNSVGAGYEKFSPSIEDLSGAFEHIEGEIDALDEIIAGHDDFYALVASRGTAVAFLKSGCTHGKIVNRPNFS

SEQ ID NO: 294938 - protein, 110 aa, Zea mays
  unsure (1)..(110): unsure at all Xaa locations
  Clone ID: MRT4577_32064C.1.pep
AHLRIRTSVAADLALLPISLRDCIVILSRGRMCRRQWLAPHPGLLCPLSLRRLGISFLFVPDKRFTXLLPFFLCAKHTTISDSVKTLERRDSRRLTKVFPNLPPIMGSIQ

SEQ ID NO: 294939 - protein, 206 aa, Zea mays
  Clone ID: MRT4577_32065C.1.pep
MARPPILSVALPSDTGRVLSIQSHTVQGYVGNKSAVFPLQLLGFDVDPINSVQFSNHTGYPKFRGQVLNGNQLWDLIEGLEENELLHYTHLLTGYIGSVSFLNTVLQVVDKLRSVNPDLIYVCDPVLGDEGKLYVPQDLVSVYQEKVVPVASMLTPNQFEVELLTGLRITSEQDGLKACNTLHSAGPRKVIITSALIEDKLLLIGS

SEQ ID NO: 294940 - protein, 127 aa, Zea mays
  Clone ID: MRT4577_32066C.1.pep
DLTKDDNVGLSTETPESGAEAQQNRNRLEHYPEATSTHDAVVYNTSIIPWGAWMKRMHLTETDKLIFLSSMDWQVQGLLRWTAMTGINPSSTTMWQTCFCEDSYLFSKHLRRAGGQEEPGRGVNQEA

SEQ ID NO: 294941 - protein, 89 aa, Zea mays
  Clone ID: MRT4577_32067C.1.pep
VPSVLFMIKQIGQHFGILTLISVDIGDEALKPYVGSRIYRKDVVYVLPRVGYLGCYRRYVCHRSVFAVHRGQWWCGGKMKSPDFTIHMC

SEQ ID NO: 294942 - protein, 260 aa, Zea mays; identical to SEQ ID NO: 194247
  Clone ID: MRT4577_32068C.1.pep

SEQ ID NO: 294943 - protein, 130 aa, Zea mays
  Clone ID: MRT4577_32069C.1.pep
VNLTRPDRCRSVSADLALCARSLLTVKPLVRGSRAASAPSNSCRCHHIGGQAASSVEEGATGLAGEDRASESDCSGRPRMRAPGNGNGVGRSELAHGSVQVHVEWPGVRHRGSVGTLVWRAQQASKSPTS

SEQ ID NO: 294944 - protein, 101 aa, Zea mays
  unsure (1)..(101): unsure at all Xaa locations
  Clone ID: MRT4577_3206C.1.pep
MARSGREAEPGEQLRHDGLLHTQCGTPAYVAPEVLRKRGYDGARADLWSCGVVLYVLLCGFLPFQHDNYVKLYQKIFKADYQVPPWVSGDARXLIARLLVV

SEQ ID NO: 294945 - protein, 67 aa, Zea mays
  unsure (1)..(67): unsure at all Xaa locations
  Clone ID: MRT4577_32070C.1.pep
SGFLAAGAVVSSFPAHRCLARDFRIKRKLAKKMRQNRPIPYWIRMRTDNTIRYNAXRKHWRRTKLSF

SEQ ID NO: 294946 - protein, 49 aa, Zea mays
  Clone ID: MRT4577_32071C.1.pep
VACSATDKEAWVVQPGVAMYPIRPPRRSNLQQWTFYRKEQNFRVDSCNN

SEQ ID NO: 294947 - protein, 289 aa, Zea mays
  unsure (1)..(289): unsure at all Xaa locations
  Clone ID: MRT4577_32072C.1.pep
PAGVLVRHHHLYHDHIVLRIIMSSAAARAEARRKAIQARGNERLAKLTTSARGEEAATTFANDDPPLAPLPDKGLREFVGEQTPIPTPPRRVPSNPQAGFGSNAPDPSAWSEEQQRQIMAALMGGAPFGAQPPQTQGRLPPIAGDASAEDPFAALMSAMGPMNAGGQAPTFDFSSAAAAPPKPKTMLERYMPLIHIVAAWMLLVYFVIWREPAVYSEKALSSVNGEGANWWQRWAELGWKSPADGWGVQLVPFFWAFTTLAIVLHSWRIFSGLDPVQPXMLLSLXVPHL

SEQ ID NO: 294948 - protein, 224 aa, Zea mays
  Clone ID: MRT4577_32073C.1.pep
MRATATAGGRAVFHLQHLRPRPPWRALPPAATTHLSRSAPARRADHRCLPKGFLSTLEPRISGVSLCRRAHATCSYSLDDKLQGELDDTQGEQRKLETVGAFQKIPMVMPATDILMSAQRKSRNVPPTKGIANIAKRERNKGAKQLDALMKELSVPLRTYTENFPKRRDLHPYERSLIELTFGEGYYEQAPGRVDTLRKRITSVGKQHASACAKSTTKREAEER

SEQ ID NO: 294949 - protein, 182 aa, Zea mays
  unsure (1)..(182): unsure at all Xaa locations
  Clone ID: MRT4577_32074C.1.pep
RLGPDDYFPWALARCCCCCQPEGCEPRPPQEAVRCSTSNTSARARHGELFLLLPPRTSPAPRQRGEPTTVASPREPKLCCNHKHYYWGFHCLFNFDTLFLTFSTGDAFNSGFLSTLEPRISGVSLCRRAHATCSYSLDDKLQGELDDTQXRTEKARNQLVRFRKIPMVMPATDILMSAQRXI

SEQ ID NO: 294950 - protein, 152 aa, Zea mays
  Clone ID: MRT4577_32075C.1.pep
PRGRPGRDLLIHTSPSPSRTRLTCLNKSRCPTPNSTLRLTDMEEGTSRNSHARECTTSRAQDSSRPLLPVPMMRTDYNCTQWSLHRRAISETVLHAATCLVHHPEHNDRRRAPEDTRARHAPDDQDHRAQHPRRWLWSFVRHDLHPRLLHLT

SEQ ID NO: 294951 - protein, 47 aa, Zea mays
  Clone ID: MRT4577_32076C.1.pep
NHLHLSPSAKAPSMTERPLLHVRPQQAHPVSITDPSYKAQARGQLHP

SEQ ID NO: 294952 - protein, 70 aa, Zea mays
  unsure (1)..(70): unsure at all Xaa locations
  Clone ID: MRT4577_32077C.1.pep
DEWXMKIYRVEGMVDQGLNRRPGPRFHRPGPRIRRPARPYVREKKMLPNNFRKSLDMMQCFVIESLKIHQ

SEQ ID NO: 294953 - protein, 77 aa, Zea mays
  unsure (1)..(77): unsure at all Xaa locations
  Clone ID: MRT4577_32078C.1.pep
HRPLQQGGGRSEFSGLTSSPSLPMRRNATSDDLMSGVFFRTHAAGXNGGPRRAPTEAKLKVAINGFGRIGRNFLRCW

SEQ ID NO: 294954 - protein, 50 aa, Zea mays
  Clone ID: MRT4577_32079C.1.pep
SLSEKAREQCRQRKPIKLKDRTLSLWQVYRVSLCVTSPTTAINARLQCAS

SEQ ID NO: 294955 - protein, 259 aa, Zea mays
  unsure (1)..(259): unsure at all Xaa locations
  Clone ID: MRT4577_3207C.1.pep
RPAGANFVCRTGRAHIRTKVPPGPHKENHVPRPPRSHALPEQLRHDGLLHTQCGTPAYVAPEVLRKRGYDGARADLWSCGVVLYVLLCGFLPFQHDNYVKLYQKIFKADYQVPPWVSGDARRLIARLLVVDPAKRASIAEIMCTPWFRKGFVPPVLSPPVTPKKQQLDEGAALFDNDDDDNSNSNHSGATSPRSCNAFQLISSMSSGFDLSGLFESEQKTATVFTXRAPAXTVVEKLESVARALGFEVTRGKGWKVRMG

SEQ ID NO: 294956 - protein, 75 aa, Zea mays
  Clone ID: MRT4577_32080C.1.pep
FLLGPSLVLLESWSNSNLRSEKYEPELMSTHTSVHLKHLFFGFICTSVTSVKSYCFSAVDLSENELLFFRQQRNS

SEQ ID NO: 294957 - protein, 79 aa, Zea mays
  Clone ID: MRT4577_32081C.1.pep
HLEGFLVGRSSIVCAVQETCQVFYFSLIRRWHITYSFNKGTIILFKSVKYLVEGRQQRPLYGSPFVDRALLLGHQHCIG

SEQ ID NO: 294958 - protein, 46 aa, Zea mays
  Clone ID: MRT4577_32082C.1.pep
GPFFFFFFERMTRFESISFAMTLTEWIACLIEWRPPVHMASSSVTI

SEQ ID NO: 294959 - protein, 62 aa, Zea mays
  Clone ID: MRT4577_32083C.1.pep
LTLVPKFIFLKLIVCSTISGDFILGGIILLIKSLILSTSRSSYIPIKNKSIHTISYKSNTLT

SEQ ID NO: 294960 - protein, 95 aa, Zea mays
  Clone ID: MRT4577_32084C.1.pep
INLFACCPHDSLNNYFEPFWGAGRKLHNTPAGQISLWGKDGPVPNPPTRPTMPFPGGGRPFFPPPITKGKLNGGGPRGPGTTFPKPKVFFWADPL

SEQ ID NO: 294961 - protein, 55 aa, Zea mays
  Clone ID: MRT4577_32085C.1.pep
GDFAEARSLWAQLLHSSAAPCLPAVAPRLLPASTSGSSIGETKFSGTTDANQFSD

SEQ ID NO: 294962 - protein, 210 aa, Zea mays
  Clone ID: MRT4577_32086C.1.pep
MATGAHAPPPRGRPAPLRPLGPLRRRREGSRPVPLRPGWLVAPQRGRYERSLSQASGYPLGAKSDAGELSFFSGAPGNSRGFTIDSPADNSWHSLPSNVPPFTLSKGRDSGLLPGAYSYSHIEPPQVLGQVTIASLSQDQERHQSSFSSGGAGAGGLLGSVKQENQPLRPFFDEWPGTRDSWSEMDDARSSRTSFSTTQLSISIPMPRCD

SEQ ID NO: 294963 - protein, 78 aa, Zea mays
  Clone ID: MRT4577_32087C.1.pep
SGLGLAGFDCKAQLEVCLCRSVIYLKADRARGRHWAHVWLRRGTARSRFKKRNSPYSRRRLLSVGIKMFFRRRTNGHH

SEQ ID NO: 294964 - protein, 134 aa, Zea mays
  unsure (1)..(134): unsure at all Xaa locations
  Clone ID: MRT4577_32088C.1.pep
TRGRATARKTHRHGHGTEQRXTGTSTPKPXPRRQRQGERRTGGGGGRRPDGGPGRGGRPAGAASPAXPAEPGAGXXAATTTGAPRGKRPRTRRAGGPPPXAARPPAADRPARDRPQEPGSTGPARRGTTHPQGP

SEQ ID NO: 294965 - protein, 389 aa, Zea mays
  Clone ID: MRT4577_32089C.1.pep
TSVLCVWLRSWSKNPAAPAQIFPASISLCAGPSHRSAREENPTVLDSSLRVSSAWSFLRSLRPSVAGTPFMAGARTALGPAACPNVDYLQLAPNLFSPCRVALSLLALLHGRRGLAGVVPVLAVVVPRAHVPAHAQLLSVCSVFFLERALFSPMASGISPCRSFHAALGLKLPCATCRASSSAKSLSPQAPALLSVSRTLCALAPSPSPEFFCSAPARFGLQLSARADPPSRLALWWSSSPSSPPVFNHVGLPGLFTNSATRCRVSSTSVPAPCSSMAASRVVRCSCACCREAPCSVLLRCVVVRAKLLAVDIESVTRVLDTVKRCVCLCPSPPDCDLALLLVSLRALLHCVDPSISLSPCARSFLKSLCAQLAPARRSSFSLTLGSDR

SEQ ID NO: 294966 - protein, 209 aa, Zea mays
  unsure (1)..(209): unsure at all Xaa locations
  Clone ID: MRT4577_3208C.1.pep
MARSRQEGEAGGEERKLVLGKYELGRLLGQGTFAKVYYARDLSAAAGTGSTSVAIKVIDKARLRRMEGMVEQLRREISIMRMVRHPNVVGIREVLASRSRVFVVMEYARGGELFAKVARGRLTEDHARRYFQQLVAAVGFCHRRGVAHRDLKPENLLLDEDGRLKVTDFGLAALPEQLRHDGLLXHTQCGXTPAYVAPEVLRKRRFHGA

SEQ ID NO: 294967 - protein, 367 aa, Zea mays
  unsure (1)..(367): unsure at all Xaa locations
  Clone ID: MRT4577_32090C.1.pep
MKKEIKKVDACNVTRLQVKNGTNNEPADRKGPHASLSACSVNSTSLKSVIAQGGPSIANKIISKLTEDMTVVTSIDGHPTKTWIVMTYKGGKVSIWDYQEKKTVMELKVNEESGKIARIAHGISQNFKETGVPHSVCSAKFIAQGKWLVVGNSDGYIYVYTYTDTKLKEAKKFRAHDNSVDVLAVHPTEAYLLSSSAYGKTIKLWSWGSDSIMNWVQIKTFNVKPTYPDGVRSLRFNPRDTNTFACVTYEDRVKVGDIKNPSGLTTILKGPLKADYCFSHTHPHLMVTLSRTSPDAQIRNLKTGKVDQTLSLSGGKTTCIACHPTLPILVTALDDGTVCFWDASIYRLEXSKNYGQLCSRFGFHRRY

SEQ ID NO: 294968 - protein, 130 aa, Zea mays
  unsure (1)..(130): unsure at all Xaa locations
  Clone ID: MRT4577_32091C.1.pep
HPFNRHLSRAYDISSGLAIGDGFCXVLAATQRPGTEGKRQFSGACXDQVRQVNXLFNDAESNDSEEVLILCGDHMFRMDYMDFVQSHIQRGACISICCLPNDDSXRASDFGLVKIDYTGRCISFNEKPKG

SEQ ID NO: 294969 - protein, 41 aa, Zea mays
  Clone ID: MRT4577_32092C.1.pep
VVWGGFFFFFFFFFFFFFFFFFFFFFFFFFFTWEFKNSRTH

SEQ ID NO: 294970 - protein, 67 aa, Zea mays
  Clone ID: MRT4577_32093C.1.pep
CGLNQHSPVTSYATLKNTPESSKRLQRPTFYPAHTMIVRQPVVKTRLPIHIQVHCALMLRRERPNFT

SEQ ID NO: 294971 - protein, 512 aa, Zea mays
  unsure (1)..(512): unsure at all Xaa locations
  Clone ID: MRT4577_32094C.1.pep
MARVALRLGARALAVLVLVSVALLPLVSSDDGHKHCEGVVRGWADSSTGRVKDGDKLSLKDLLFFLHIPRTGGRTYFHCFLKKLYTNAQECPRSYDKLRFDPSHPDCKLVVSHDDYSLTSKLPRERTSVVTILRNPVDRVFSTYEFSVEVAARFLVHPNLTSAKLMTTRVLKKSRAVSTLDIWPWKYLVPWMREDLFSRRDARGIDKVHSSKKVNAYDVEDMVMPLHQYINDPVAHEIIHNGATFQITGLTNNSYFDGAHEVRHCARKHPDLGRIVLEVAKNRLDQMLYVGLTEDHEESARLFAHMVGAQVLLQSGTLSLDLKXICTVRLTHTHPWWSPGMKKQANXNNTHGWQNNEALNSTSDEQGKGNMTVGKLMEAYETCIAKLRKSQSSRRKISLKKVEEANFSKEARKLVPEAILKQIISLNSLDMELYDHAKKIFTQEHLMLKAQQSMAGQHRQLAEQEEGWIGTMCSDGTCSPWVVVLLGLGITTILVLATLAVTTRKRTSKLKV

SEQ ID NO: 294972 - protein, 163 aa, Zea mays
  Clone ID: MRT4577_32095C.1.pep
RSRGPASCSLLSPLPSCPYSRVLLAPQSPRLGAAFAAGSGRGTVPRTVDGAGGAPVGRPRARGSRPRVSSDDGHKHCEGVVRGWADSSTGRVKDGDKLSLKDLLFFLHIPRTGGRTYFHCFLKKLYTNAQECPRSYDKLRFDPSHPDCKLVVSHDDYSLTSKL

SEQ ID NO: 294973 - protein, 83 aa, Zea mays
  Clone ID: MRT4577_32096C.1.pep
DMRRTVLVLRWNCGNEELYSLPVASLMSCALRCLFQEGWIGTMCSDGTCSPWVVVLLGLGITTILVLATLAVTTRKRTSKLKV

SEQ ID NO: 294974 - protein, 81 aa, Zea mays
  Clone ID: MRT4577_32097C.1.pep
RGVCQQSVKSAEAVAEVVDDRVEGVNQCVVEQQGVQLVCRWRWMRKLTYPLIMGHAQAQAVTRLAVNIKAGSPPGPSGPRR

SEQ ID NO: 294975 - protein, 105 aa, Zea mays
  unsure (1)..(105): unsure at all Xaa locations
  Clone ID: MRT4577_32098C.1.pep
SSRRSPPLGSLSSFXLFALSFAGWVPAASAASVXFRSRPRSVRFRARWFLRSGGSARGRVRSSVGAGGVVVRRRXRSAPLAAXPRGPGRRGGVXGXGMAXAGXXG

SEQ ID NO: 294976 - protein, 101 aa, Zea mays
  Clone ID: MRT4577_32099C.1.pep
SALGSVGCLSCIQCYGLRPKNLAAQGKGVSLCKAALSHLVWCVGLCTPVWLGSQALYPVCPLHITSALTSKSERTDINGWFQVFYTHLRGSVGSTQKKRGQ

SEQ ID NO: 294977 - protein, 107 aa, Zea mays
  unsure (1)..(107): unsure at all Xaa locations
  Clone ID: MRT4577_3209C.1.pep
RSGICASGAHNACQEYAESILNMNTSCFAQTMNACDGGLPTSSYDLRAESTGHSWIIVKEFQKTLDSASCGRLADRGLETXXNSVKRNILENGSNKPWSQQFRKHRK

SEQ ID NO: 294978 - protein, 219 aa, Zea mays
  unsure (1)..(219): unsure at all Xaa locations
  Clone ID: MRT4577_320C.1.pep
VISFFTACLRYDGALNVYVSEFHTKLVPYPTIHXFMLCSYAPAICCEKAYHEHLSVAEITYSACESSSMMAMCDSSDGMYMACCLMYRGDVVPKDVNAAVATIKTKRTIQFVDWCPTGFKCGINYQPTSVVPGGDLAKVQRAVCMISNSTSVVEVFSRMAHKLALMYAKGAFVHWYVGKGMEEGEFFXAREDLAALEKDYEEVGAEFYEGEDGDEGVEY

SEQ ID NO: 294979 - protein, 108 aa, Zea mays
  Clone ID: MRT4577_32100C.1.pep
RIVSFGNGQKFKTKIGAHRTDLLELQNGLDLRATNTLGLNDTAYTGSYGKGVQTGLLYSSGGIGGGGEILLRALEMVAAAELEVYVNDGDTLGPDGATVDGLDQAGAI

SEQ ID NO: 294980 - protein, 90 aa, Zea mays
  unsure (1)..(90): unsure at all Xaa locations
  Clone ID: MRT4577_32101C.1.pep
MSVSHAEXDIEISLCDGNSXEDERRRXKIGSLRRKAIHALKKRGXRRVDXRFPPAXISIEEVRXDAEEERAVGSFRGTPSAGFPSPKATD

SEQ ID NO: 294981 - protein, 96 aa, Zea mays
  unsure (1)..(96): unsure at all Xaa locations
  Clone ID: MRT4577_32102C.1.pep
RGWRTXPYACYHDPVAMAHIREYTLKPLSEPAVAPVCTRNNSVPGFLFSNGGFSGNLXHGYTDVLVPXSSGVRTHQFXGRVQLLLSGMKDEDITRK

SEQ ID NO: 294982 - protein, 74 aa, Zea mays
  Clone ID: MRT4577_32103C.1.pep
KARSAESGPTRATQGPDQAQPAKNDGPRTQTTAHPQRQPRAHAPPEQPQHPRAHAQPEPPPALNHTKRPPTTTH

SEQ ID NO: 294983 - protein, 151 aa, Zea mays
  unsure (1)..(151): unsure at all Xaa locations
  Clone ID: MRT4577_32104C.1.pep
NTPSAXDNSDTTDSHATSTAGSRCSKLPSSTKSGWPRQNEKKPSEVFRTDLITAMKIPDSYQLSPDDYYILADPWRQEWEKGVQVPCRAEAIPEPVVRILPPLEGPPAQASPSSTMLGEGSQPDWPGGSRYDWDEIDAYWLELINSELKEM

SEQ ID NO: 294984 - protein, 46 aa, Zea mays
  Clone ID: MRT4577_32105C.1.pep
TSPAALFQAPRSSSDPSPESMQQVAGLVLESRRSTSLQSSALKRTV

SEQ ID NO: 294985 - protein, 125 aa, Zea mays
  Clone ID: MRT4577_32106C.1.pep
VNVRRQRRNTGGSELGEGAYLPEAERNIPPNPAMASAREEAEKDMNGALDELLAKTGARPKEIGAPAENCSLYNPTPTLAAKDVNHYRRRGNVGSYNLGGMGCSAGNIAEDHTRDLRQGHRGTYT

SEQ ID NO: 294986 - protein, 109 aa, Zea mays
  Clone ID: MRT4577_32107C.1.pep
PSIVSKKMPLLLNVINNGAGPALGKARNNVLFMPHQFNPATILCTMGPHPCRLFTYWTTPIFALLPDRPLAVRSKQQKEVERGMQVAPQPKLHLPASCGLEEGLPNKPR

SEQ ID NO: 294987 - protein, 351 aa, Zea mays
  unsure (1)..(351): unsure at all Xaa locations
  Clone ID: MRT4577_32108C.1.pep
DAWGIDPESILAYKNAFSGCYKVPRSPTPYSGKLFTRSESETKRKSLIQDDRDLPISFLADSDSMFIACQGITIHYKVSDPAASLPSSPGFFSERDTHHDVISSSISPRRQRHESPPSASSNTRRVLNRSFSHQYHNTSLYAPLLVEPVASPTLLDDIPLMCIDDGNADGCLSHVGFDLEAGGQGKFAVVLVHGFGGGVFSWRHVSNLLARQLGCTVMAFDRPGWGLTSRPRRKDWEDKKLPNPYELESQVDLLISFCSEMGLHSVVLVGHDDGGLLALKAAEKLRTYGCDREVEVNGVVLIVVSLSREVIPAFAHILLHTPLRKXHMVLPLLRTEIRQGINRRAWDDATK

SEQ ID NO: 294988 - protein, 118 aa, Zea mays
  Clone ID: MRT4577_32109C.1.pep
DAGGTLHTLYSKQKQLEVYWATPLPIHKKLGGEAWAVGPPACPFQLPSVACSSQVEMLKEHILPYLNGLCCRRTDDDDEKLGFAVSGRSGRRAKIGVVQYVNRRQGCGLVQFSRFFFA

SEQ ID NO: 294989 - protein, 465 aa, Zea mays
  unsure (1)..(465): unsure at all Xaa locations
  Clone ID: MRT4577_3210C.1.pep
MARSGREADPGEEERKLVLGKYELGRLLGQGTFAKVYYARDLSAGAGTGHSCSVAIKVIDKARLRRTEGMVEQLRREISIMRMVRHPNVVGIREVLASRSRVFVVMEYARGGELFAKVARGRLPEDHARRYFQQLVXAVGFCHRRGVAHRDLKPENLLLDEAGRLKVTDXFGLAALPEQLRHDGLLHTQCGTPAYVAPEVLRKRGYDGARADLWSCGVVLYVLLCGFLPFQHDNYVKLYQKIFKADYQVPPWVSGDARRLIARLLVVDPAKRASIAEIMCTPWFRKGFVPPVLSPPVTPKKQQLDEGAALFDNDDDDNSNSNHSGATSPRSCNAFQLISSMSSGFDLSGLFESEQKTATVFTARAPAATVVEKLESVARALGFEVTRGKGWKVRMEAKAEGTNGRLAATAEVLEVAVDVTVVEFVHDAGDALDFNKFCAVDVRPGLTEIVWAWQGDSPAAAVGTA

SEQ ID NO: 294990 - protein, 43 aa, Zea mays
  Clone ID: MRT4577_32110C.1.pep
GPACAIARSGLFGWWRRCGSRVRERRARAVPTTYQYQCQTPAG

SEQ ID NO: 294991 - protein, 56 aa, Zea mays
  unsure (1)..(56): unsure at all Xaa locations
  Clone ID: MRT4577_32111C.1.pep
CMTQVSNKSLSLXHPGVLHTARFCEKDLHTAIDRXAWFAYPDHLCSPNYPLMQNLR

SEQ ID NO: 294992 - protein, 68 aa, Zea mays
  Clone ID: MRT4577_32112C.1.pep
MTTSRRLADRKSAKFQKNITKRGSVPETTVKKSNDYPVGPIVLGFFIFVVIGSSLFQIIRTATSGGLA

SEQ ID NO: 294993 - protein, 41 aa, Zea mays
  Clone ID: MRT4577_32113C.1.pep
LAVPENGHGISTCSKTDQHKEAKYFDCLCWYTNEHPMLQVG

SEQ ID NO: 294994 - protein, 125 aa, Zea mays
  Clone ID: MRT4577_32114C.1.pep
LPATMVELLFPLPWTCPSLHLPSMVAASIHLAELLPGQGHPGARRAPCPGLLLVRTHLSSYCRRAPYVSPSSCSFGGGVKISLLRLAPSMLVGCSTKCLNQPACFEQTCPRRRRPSLAIAIAFGA

SEQ ID NO: 294995 - protein, 93 aa, Zea mays
  Clone ID: MRT4577_32115C.1.pep
MKGIRALERVRTVWRSRSSIDTRARAMFYISNTGSFISNELRKYAELYKLFKPCQWYLQQPPHGQSSGAIEYRMKRGRQGGPEAITSRIQPIY

SEQ ID NO: 294996 - protein, 65 aa, Zea mays
  Clone ID: MRT4577_32116C.1.pep
QLIFPATSYAPTSHLMLTFAPSLGADFRPPLSEKNRYSPRQLSSPLMIPAATHSLRPISSSSSLT

SEQ ID NO: 294997 - protein, 59 aa, Zea mays
  Clone ID: MRT4577_32117C.1.pep
STCTGLIISNWMVSGIFIDDSLHKLLVFKEPKSYKPPDFAKHSCLSYWHRQHSNKCNYQ

SEQ ID NO: 294998 - protein, 42 aa, Zea mays
  Clone ID: MRT4577_32118C.1.pep
LQTEAGTLCNVRTWGTYLALGGFHMLTKKGTHFKIKRPSKTS

SEQ ID NO: 294999 - protein, 57 aa, Zea mays
  Clone ID: MRT4577_32119C.1.pep
RVLQAQEMLSKKNMSQLNEYAIGVLESSSNYLMPSFYCYPLDMDINLCHSYSTDGPH

SEQ ID NO: 295000 - protein, 150 aa, Zea mays
  unsure (1)..(150): unsure at all Xaa locations
  Clone ID: MRT4577_3211C.1.pep
MTPGSSAAGSGVVVPRNFRLLEELERGEKGIGDGTVSYGMDDADDIYMRSWTGTIIGPHNTVHEGRIYQLKLFCDKDYPEKPPSVRFHSRINLTCVNHETGVVXXDPKKFSVLGNWQRDYSMEYILTHLKKEMTSPQNRKLVQPPEGTFF

SEQ ID NO: 295001 - protein, 72 aa, Zea mays
  Clone ID: MRT4577_32120C.1.pep
NVQTDAHAYTVTEPLVYCLARLITHPSAISNVLTPITMRGGARNCPGCSLALRRGGAVLLLGDGFTLRGLAV

SEQ ID NO: 295002 - protein, 163 aa, Zea mays
  Clone ID: MRT4577_32121C.1.pep
DDAHYLEVKFRLWLKKLKDVGVPMLLAATNPPRTDLFIYVPRIELKPLAQYQIRDLMEKEAISLGSGLKPNQIAKLQSRAGGNPMLAKRAIEEGFLGIQNEAGDHGRYFDITPLLLLVGIVFICYRFIGLGTGNQSLYILAGIGGAIFLGVARLSYYLPKESR

SEQ ID NO: 295003 - protein, 59 aa, Zea mays
  unsure (1)..(59): unsure at all Xaa locations
  Clone ID: MRT4577_32122C.1.pep
YSMTISIKKKKKKKKKKKKKKLKKKKKKKQAAXTPINPPKNNINPPPGAQPDLHYTHVL

SEQ ID NO: 295004 - protein, 134 aa, Zea mays
  unsure (1)..(134): unsure at all Xaa locations
  Clone ID: MRT4577_32123C.1.pep
GDRWKLLQEFWAKATIHAGKSHYTTEQHMQHLENGGEFLTHIWALLSHAGLLNSNTGNLGXCTLSCCMILSLFKPMAEHPSVLLFFFPTSLLLLVCGVQLDQYIFFFFSRWHCLCVGFSYVCCMNNNKERMDRS

SEQ ID NO: 295005 - protein, 63 aa, Zea mays
  unsure (1)..(63): unsure at all Xaa locations
  Clone ID: MRT4577_32124C.1.pep
PRPGAHLXKSPGLVARLVGFFGGGPLTKEMFGLNFAGPPNRRPWLVGWPPISDMVRGKPPPLW

SEQ ID NO: 295006 - protein, 138 aa, Zea mays
  unsure (1)..(138): unsure at all Xaa locations
  Clone ID: MRT4577_32125C.1.pep
IDGPFVKLPQHLKAEYFLTFIKLVGTRFSLLLQCQMPPIRLQVVPNKGALGPNKQLLTVSPQVVENTKAFLKQEQXXAFYPQDVANXVAFLQQQQFLPFXQLSFTNLFLLRNNTFFFSVPLFIQVIAHTVTYHLYGDA

SEQ ID NO: 295007 - protein, 73 aa, Zea mays
  Clone ID: MRT4577_32126C.1.pep
TTASRTGKTNVKRTPLDSNRGLLSLCHTRTHKGPLLYSTTNSCLQKRDESYHAPLGTVVNFLGEREKDIGTTQ

SEQ ID NO: 295008 - protein, 81 aa, Zea mays
  Clone ID: MRT4577_32128C.1.pep
MTPQPINASPMDRKTEQTEGIYQRQLSGSGAASVSAHQIHLRMSRYTTTPACHSRSPMVDASLDSRQVSITACCEPTACAR

SEQ ID NO: 295009 - protein, 72 aa, Zea mays
  unsure (1)..(72): unsure at all Xaa locations
  Clone ID: MRT4577_32129C.1.pep
MLNMYYKVFPVNCPVGLXGSHLVMEKENITFTYEVEFVNSDIMLPSRSDAYLKIDDSKIHXFQFMNSLMVIL

SEQ ID NO: 295010 - protein, 164 aa, Zea mays
  unsure (1)..(164): unsure at all Xaa locations
  Clone ID: MRT4577_3212C.1.pep
MQIFVQTLTEKTITLEXEPFDSIDTRKGKIXQDTEGIHPDHKRLSSWQHSGPRTIADYYIQXESTLHRVLHLSRGKNHFXATMTVKTITLSAEXTDAIDTFWAEIHDMEDTPPDQERLIPAVLQIXDSRTLADYNXQNESTAHTAVACTGAVMQIFAHSLTALT

SEQ ID NO: 295011 - protein, 69 aa, Zea mays
  Clone ID: MRT4577_32130C.1.pep
RSRGFYSLRLRIDMASSDVHYLCFVGGLAWATDDHSLHNAFSTYGDVLESNIILDRDTQMSRCFGFVTF

SEQ ID NO: 295012 - protein, 52 aa, Zea mays
  Clone ID: MRT4577_32131C.1.pep
KKRLPLSFRGRCCRSLALARRLLKCGGQVSRCNAASSESSHCGVLVIELVPA

SEQ ID NO: 295013 - protein, 397 aa, Zea mays
  Clone ID: MRT4577_32132C.1.pep
MGSCFSLEGGRSESIAPAQRSQIPEDEQVEPTVTSELAIPVPEVAESVVMLEALRTGFITDQRPERHIRVRSFTYDEVCAATHGFEVDRFLGQGGFGQVYRGFLESTNQEVAIKRLDLQGQQGHREFVTEVLILSNVHHPNLVKLVGHCTSHDQRILVYEYMPLGSLNSHIHDLPPGQQPLDWSTRIKILLGAAKGLEHLHHNLNPPVINRDVKCANILLGAGYHPKLSDFGLAKLGPTGDNTHVSTRVMGTPGYCAPEYLMTGKLTVKTDIYSFGVVMLEVLTGRMARDERLPESERNLVAWALNFLRRRELDNLLDPALRGQCPQACLEHAFFVVSRCISESPNTRPSMRDVVASLTVISEFRNRNTRRLERGGRSTPTRTPDRNHRGDDQGEGS

SEQ ID NO: 295014 - protein, 106 aa, Zea mays
  unsure (1)..(106): unsure at all Xaa locations
  Clone ID: MRT4577_32133C.1.pep
MSCIRSPILKPMANVLQRGEWQNDWENHVNTLVKHLALHSCFNSXEDSKDGPSEQFCKLNGKWNGQWNGPLSAALVAVTVMVTGTVTSALASALLAVFFSFFATFV

SEQ ID NO: 295015 - protein, 428 aa, Zea mays
  Clone ID: MRT4577_32134C.1.pep
MGSCFSLEGGRSESIAPAQRSQIPEDEQVEPTVTSELAIPVPASVPTSAAGDVIEKFVFFLVISHRFAAQVAESVVMLEALRTGFITDQRPERHIRVRSFTYDEVCAATHGFEVDRFLGQGGFGQVYRGFLESTNQVPGQEVAIKRLDLQGQQGHREFVTEVLILSNVHHPNLVKLVGHCTSHDQRILVYEYMPLGSLNSHIHDLPPGQQPLDWSTRIKILLGAAKGLEHLHHNLNPPVINRDVKCANILLGAGYHPKLSDFGLAKLGPTGDNTHVSTRVMGTPGYCAPEYLMTGKLTVKTDIYSFGVVMLEVLTGRMARDERLPESERNLVAWALNFLRRRELDNLLDPALRGQCPQACLEHAFFVVSRCISESPNTRPSMRDVVASLTVISEFRNRNTRRLERGGRSTPTRTPDRNHRGDDQGEGS

SEQ ID NO: 295016 - protein, 59 aa, Zea mays
  Clone ID: MRT4577_32135C.1.pep
HTYSPCGVSACFLWFRTTLGGVLPVCRCILICQSPLGIIHISYCKRVRKNNPLLEFTTN

SEQ ID NO: 295017 - protein, 152 aa, Zea mays
  Clone ID: MRT4577_32136C.1.pep
MSGSQVGGGGLRGWSPFDVIRSFPSTPESLMSQIDAAIVSTEYARACALLDPSQVSASSPPEIDPEGQGDRGASPLPPACYDARVADEAYRAACAALGAGRPDAAVRSLRAALASCPPDKAAAVAKVRSMLAIASAQLHKQQHQAQQQQSRN

SEQ ID NO: 295018 - protein, 81 aa, Zea mays
  Clone ID: MRT4577_32137C.1.pep
TTHGSIFTAIATDSTTLKRNIEELTDSLTETLNLTTLRITKKTTTRWTQDRSGVSPNNHAWIIDTTDEIWDEIAEVSCICF

SEQ ID NO: 295019 - protein, 161 aa, Zea mays
  Clone ID: MRT4577_32139C.1.pep
MVAGLMNERLKALTTSFAQQMGREFHYCIKNMDREWNTAFNFSSDPAFLTACMKETDGDLPQRVCTAAEMKFYFESFLEGNGRKNYVRPNKNCNLTSWIDGCEPGWSCSAGKDQEVNLKDAANIPSRTLDCRGCCAGFFCPHGLTCMIPCPLGAYCPQSTL

SEQ ID NO: 295020 - protein, 142 aa, Zea mays
  Clone ID: MRT4577_3213C.1.pep
LICKLATVPRNFRLLEELERGEKGIGDGTVSYGMDDADDIYMRSWTGTIIGPHNTVHEGRIYQLKLFCDKDYPEKPPSVRFHSRINLTCVNHETGVVDPKKFSVLGNWQRDYSMEYILTHLKKEMTSPQNRKLVQPPEGTFF

SEQ ID NO: 295021 - protein, 246 aa, Zea mays
  unsure (1)..(246): unsure at all Xaa locations
  Clone ID: MRT4577_32140C.1.pep
PLQTWGGLLKTCFNGVNALSXVGILSIPYALSXGGWLSLLIFLTIAIICFYTGILLRRCVDSSSLVKTYPDIGELAFGRKGKIIVAIFLYLELYLVAIDFLILEGDNFPRLFPNANFHVAGLKVGSKQGFVLMFSLLVLPTTWLQSLNMLAYVALGGVMASVILIASVLWVGTFDGVGFXHKKGVPVDWTGMPTAMSLYAFCFIGHALFLMIYTWHEEHKNVPQQSYSSASFSALLAIASQVLLDT

SEQ ID NO: 295022 - protein, 151 aa, Zea mays
  unsure (1)..(151): unsure at all Xaa locations
  Clone ID: MRT4577_32141C.1.pep
RALRGGEVVLPVSSQVALANLSPYSQQQQFLPFNQLCTLSPAAYLQQQQLLPFSGXRTVYFXQQQFLPFNQLGRLXPSAYFQEQILLPFGQLATTRPTSFLRQQQLVPCYQRVVGNPATLLQLRQVRGFVQLALRNPGGFYQQHIIGGAIF

SEQ ID NO: 295023 - protein, 138 aa, Zea mays
  unsure (1)..(138): unsure at all Xaa locations
  Clone ID: MRT4577_32142C.1.pep
LLNIFYFRDNYHAEARFTMDSSVMGNPLXSVLILMGLLDAWCFLYLFRAYDQPVALFCRVFSDREKLMKVVYAYFVLLFFTSISSLIIYSLLVRVCLSAVHVAFTVPEYLFLDETNLCPGNTTSQLLISFLAAPSSSG

SEQ ID NO: 295024 - protein, 44 aa, Zea mays
  Clone ID: MRT4577_32143C.1.pep
LNKPTFYHSDVWSDLTAPIVKHWDQVITSFIAKGPCTHVSTLVH

SEQ ID NO: 295025 - protein, 71 aa, Zea mays
  Clone ID: MRT4577_32144C.1.pep
RPPIYGNHHFSKSQKQKLKGPQLCRGSIFYGAKKKEHSPVGRAIQLPISQRGDRKTREHPHALGAPPLPNA

SEQ ID NO: 295026 - protein, 142 aa, Zea mays
  Clone ID: MRT4577_32145C.1.pep
RKIKGPTMSFKQECNRHCPQRGVIPEHSKHSRPPIYRNHHFSKSHKQKLKGPQLCRGSIFYGAEKKDTFPGWEGDSASYFPGGGQENQRTLPCFKGPTPPKCLEERLLTGARTELFGLPPGFWRPPRTPPGEGELASCAFFP

SEQ ID NO: 295027 - protein, 67 aa, Zea mays
  Clone ID: MRT4577_32146C.1.pep
GMVRHDGNVRTRRDGPICVIEETRRRRSMPASSTQPDRYAPPQILYIISWPRMQGWFAMDPTVGHKR

SEQ ID NO: 295028 - protein, 67 aa, Zea mays
  Clone ID: MRT4577_32147C.1.pep
YCKNLNPFGALELQIKVPWGSRRPWMASSKETGRGNGARAPWEAAAPSREQAGGEVVEGRGCCAACL

SEQ ID NO: 295029 - protein, 78 aa, Zea mays
  Clone ID: MRT4577_32148C.1.pep
WEKGLVISRLKILTRTRQPKGRILSLPPSSIFQSPKGKDCLFGPGFLWIKHHKKKKSQTLFSFKKFWPPARRLSTGSP

SEQ ID NO: 295030 - protein, 88 aa, Zea mays
  Clone ID: MRT4577_32149C.1.pep
LSLRRVEARTDRRDEHIRRTRESCCTKKVLLDLILVRHYDKGPSTGRKQLLLDYTEAHTNALVLLGGARGSVLAASHSVSVYMAGALS

SEQ ID NO: 295031 - protein, 62 aa, Zea mays
  Clone ID: MRT4577_3214C.1.pep
VQLLVRARQAQGAAHQHGQAQQQQGLPTRRRRHVRCNQPSRETDTYRHCTLMIEQVATRCSA

SEQ ID NO: 295032 - protein, 73 aa, Zea mays
  Clone ID: MRT4577_32150C.1.pep
KGNKIGQFPQNLLKNGRVFKSLSRQDNPIQMAQFQQMDGFEKFKGPKRKKFAKQIYSGVIMGSTALNKGVNFP

SEQ ID NO: 295033 - protein, 68 aa, Zea mays
  Clone ID: MRT4577_32151C.1.pep
FQYTTNTANVTRSKSKCPQWFSGLGSIFYLLLLPRTRKRTAEPGWTRYWTLGRKTSRCSRGTRATPGR

SEQ ID NO: 295034 - protein, 74 aa, Zea mays
  Clone ID: MRT4577_32152C.1.pep
KPPVNNWGPPGISKETGGGRQKKKGPKNPPQTIPKRLQTLTQNGGKTHVSPKKGQKKSRGPPLKASGKGPPKSL

SEQ ID NO: 295035 - protein, 42 aa, Zea mays
  Clone ID: MRT4577_32153C.1.pep
KNPLCRIYLDTSHECPIQMRHVKPTDELLIGHSCEGPGLVIY

SEQ ID NO: 295036 - protein, 854 aa, Zea mays
  unsure (1)..(854): unsure at all Xaa locations
  Clone ID: MRT4577_32154C.1.pep
MNEVQINKKVLSDATNIAVTKGLLFPNVGHKCLIAKDDKKKKEKIKIITSYKNTFNLKEGKSTSVTQKQMLSQREQFFSFGLKSTFSTFPKMSQDNKAITETKLSLSKEKNLGFLESIAKTNTEKTTREILEGLSEDTGESDNYDMESGDEDSEDRPRRPSHTVFGKSSIKQSHLDNMRGRYFRDMSTVRADDGERTVPTPKENEVVIFRSFFKAGLRFPLSKFVVKVLKIYQVYLHQITPEAIIRMGIFVWAVRSQGLEPNAKSFCNMHELLYETKPWGKEQYHNNFGCYSFVARSGSSCPMPTFRKRWPGDWMKEWFYVKNDLKAREDVKDIIMRPIWQRFGLQKPNVEFDEAAEECQKAFDIWEMQKETISKPDEGGLVMLKYTFRYEGKFIEPDDDWLKCIEATSDKLLGPYSKTEDNALSATFRGRKKKRLNRVFDAIGFMYPDYRYPLKGQKRKSATSGKGDASVALSEAVPKRKRVKVLTHRPRFIEPASVPEFGGETSTTTEAKGPALTQKNEESTATPKAEKIGEPRAEGTKTSEILSPSAEVEVPKPQKGPAMTPKRKRMLTEKEKQEAQLYAQKLKYPKGALSFNGSGEEDFLYCLPDSKEISVCREMGRSFGFPSLEDGLPVLSKDKLADSLAYNNFKGLILSNALRAQKSAEDEGYTMALNNLRSEVIELRNEGLEKDKILNSLINKIKEDEATSKAQAETQKREIENLRKQPAEEKLKCAIAEADRDASDYXKIIGRKQLQNFXSKERCYEKSIECVGKVKTRFASVGAYSNEXTTSYWAIPKXIDWINGEAKAFEEVLSGHGDVCVFLGARGIAAILEKAGCEHGRFWPKPKLRSLLKI

SEQ ID NO: 295037 - protein, 119 aa, Zea mays
  unsure (1)..(119): unsure at all Xaa locations
  Clone ID: MRT4577_32155C.1.pep
MEIWEIIEPGGASMKRAHDRQALGALLRSVPREMWVTLGSKKTVKEVWEVVKNMCGVGHVKEAHAQRLLQEFENISSKDGELVDDFTLHTNVLVEAXLREMSMTHVVKKMLRMLPKHYS

SEQ ID NO: 295038 - protein, 431 aa, Zea mays
  unsure (1)..(431): unsure at all Xaa locations
  Clone ID: MRT4577_32156C.1.pep
MSQDNKAAAETKLSLSEEKNLGFLESIAKTNTEKITREILEGLSEDSGDSDSYDVESGGKDSEDRPWRPSHKVFGKSSIKQSHLDNMRGRYFRDMSTVRADDGERTVLTPEENEVVIFRNFFKAGLRFPLSKFVVEVLKIYQVYLHQITPVAITRMRIFVWVVRNQGLEPNAKSFCNVHELLYETKXRXKEQYHNNFGCYSFVARSGSSCPVPTFQKRWPGDWMKEWFYVKNDLKAREDVKDIIMRPIWQRFGLRKPKVEIDEAAEECQKAFGIVCSFIGTRDLVQEHIAFRVCPLVEQWEMPKETISKSDEGGLVRLKYTFRYEGKFIEPDDDWLKCIEATSNRLLGPYSKVEDNTLSATFGGRKKKRLNRVFDAIGFMYPNYRYPLKGQKRKSATSGKGDAVVALSEAAPKRKKMKVLTHRPHFIEPAS

SEQ ID NO: 295039 - protein, 84 aa, Zea mays
  Clone ID: MRT4577_32157C.1.pep
PYSSDESHLPGTLLPVLYESLDTITVSMDTKSSNPRLTTESLSLSSGSNFSTRPASVVSTPTLEAREFIGGVPPKVSTNPLLRE

SEQ ID NO: 295040 - protein, 143 aa, Zea mays
  unsure (1)..(143): unsure at all Xaa locations
  Clone ID: MRT4577_32158C.1.pep
LPERLKSKGLSCRRXLQFVVLFXMVGIFIGFIQLFFVDVYKKIVSKNKMLLFHEGVIETETVGTRVKESEAVVVEKEVELIDEPQIHXSPPVPSLLDDEXGFCLIVXAIRESDIPVKKXLIIVTXTSVRPHNXYYLNXLAHVL

SEQ ID NO: 295041 - protein, 107 aa, Zea mays
  unsure (1)..(107): unsure at all Xaa locations
  Clone ID: MRT4577_32159C.1.pep
SXRVGGRLGGGVGGEKKKKKRGGKKKKKKKKKERRNNYGSLLGVRFFDAPRFLFFFASLNIIFWGGGGGNYFNSTLPFPXPPFFILVAFPPFFGWCFPPVAPGDLFS

SEQ ID NO: 295042 - protein, 119 aa, Zea mays
  unsure (1)..(119): unsure at all Xaa locations
  Clone ID: MRT4577_3215C.1.pep
CNLHAIDCAQAYKHRDCENPGVTEHNRRGXHATLDLWRVSEXAPTDRACQHIAILKGEXDSPWSGSLXAAEVVVTRSDTCSLVTCLTSASFALIPLFVVTITGFSRRTFNRGLPIGFRL

SEQ ID NO: 295043 - protein, 160 aa, Zea mays
  Clone ID: MRT4577_32160C.1.pep
MEKEHIKMAMLRQEQTFRQQVHELHRVYQVQKQLMMQMQIAKTNSYGNEAAERQTKPTEKLEHRQWCGSSGKTEAKLAEDFSLELTLATGAGRRGEEEKPSNSDSEATMSSSTSAESEPGQGFAPKSDVTNLRFQNESSRHDAQVLQSPWRYQCLSLKMA

SEQ ID NO: 295044 - protein, 144 aa, Zea mays
  unsure (1)..(144): unsure at all Xaa locations
  Clone ID: MRT4577_32161C.1.pep
AGGVTPGQTCTHARTHTWRHTRGNRWRERRRKESSAVGLEDYLPVMAEGLVEDRLMRELESGFLLLMDPGRGLMTFHRLRRNTPLMGLGGMSDADLRGMLDEGHFDRHGALNXTEYCVLMERLIRELMDEPRPWLVDDVNQGVR

SEQ ID NO: 295045 - protein, 53 aa, Zea mays
  Clone ID: MRT4577_32162C.1.pep
RNVEQDWSIFFIISWTAKCKLMIECMYSALSLEHQHQYIAGSYCIKKYSILSL

SEQ ID NO: 295046 - protein, 82 aa, Zea mays
  Clone ID: MRT4577_32163C.1.pep
PRKGRCTPPLFFPKVCIGGGLCSRLGVMIPNVEPPGFFLGGLQCKSLLGGNIFRPRWFGVSPIQGIGPGNPPLKLFPRWELG

SEQ ID NO: 295047 - protein, 230 aa, Zea mays
  unsure (1)..(230): unsure at all Xaa locations
  Clone ID: MRT4577_32164C.1.pep
TIFYAPASRSAQAPYPRESCNCLPRCDVGREGQNFGWQVCAHGQTTSQRPKVTSSETRSRSPGIQGLPCFRRRRRAETLTRARGRRDRXSPRRLLRQPRRRAGPAPPRRSPGXTPPTPHPLRSPRVTRSPRPRSMXARPSRGPHEPQXIRSQMRHGSREGQKGTCSRXGSRRRRRCRAPTRRCAVLPPRSDRRRSPSSSASRPARAPRRGPARGRRRGIRWDRLTDVESP

SEQ ID NO: 295048 - protein, 98 aa, Zea mays
  Clone ID: MRT4577_32165C.1.pep
AHLDVFISLSTRRVLALSTTDQLVSLRTPRSREISFHAVREAPGEDRHTKRGSFSGPHCPPVPWSRATDSTERWWPDSVESSPAIQDRNSTERANFPH

SEQ ID NO: 295049 - protein, 162 aa, Zea mays
  Clone ID: MRT4577_32166C.1.pep
MKKVVLKLDVHDDRHKGKALKGVSGLHGIDQLGVDMKEQKMTIVGTVDPVAVVGKLRKLFPGVQIVSVGPAKEEKKDDKKDGGGDKKPAGDKKEGDKKDGGGDKKDGAKKDGGDKKQQEAKHPWPCTRPTATRTTGTRRRRRRRRATSSAAAEEDPNSCIIC

SEQ ID NO: 295050 - protein, 103 aa, Zea mays
  Clone ID: MRT4577_32167C.1.pep
LLWAIGTLEAGRGNMYFVNLERGLGLLSTDEELWTDPRTKPLVQLYASNPTAFFTDFGRAMEKLSLFGVKTGADGEVRRRCDAYNSGPDVGGAMPMAMPMPKM

SEQ ID NO: 295051 - protein, 60 aa, Zea mays
  Clone ID: MRT4577_32168C.1.pep
HYTVHHRHRSVSFITESCCCASSSCQVLSSGCTHNNLRLNAGFVGTSFVGFPKKMLKKPP

SEQ ID NO: 295052 - protein, 156 aa, Zea mays
  unsure (1)..(156): unsure at all Xaa locations
  Clone ID: MRT4577_32169C.1.pep
GAAAAAATHARAKPTNPPPRPTHPGAKTXXSXGAXTSXXXPRNPRXGEEXEXGEKGXXXGTXSXGRXXAXDXXXRXXTXTXXGXHXXXXEXRXXQXKXXXDKDXPEKPPXXRXHXRXNXTXXXHENRKXXPRKXXXXANXQRDHXEENXXTQXKKR

SEQ ID NO: 295053 - protein, 102 aa, Zea mays
  Clone ID: MRT4577_3216C.1.pep
LGAAAGAGCATGMSAAAVKPPISAAAAIRCPRAPAPHSRRVAHEHDKSWRQAGADCGCCGASVWEGERSPRREGFRMIFRRGRGGGRGSLLIRRRGRGRLVP

SEQ ID NO: 295054 - protein, 585 aa, Zea mays
  Clone ID: MRT4577_32170C.1.pep
STSELEGIAKRMVDTFYKNLPQSNYLDPQESMYGEELLSMASSILVQLYWRTRDLGYLLEAILILEFGLTVRKYVWQYKVTLVHLYSYLGALPLAHKWYTTLEVKNILLESVLHHILPQMLNSPFLQQTADLVKDYLKFMDDHLKESADLTCLAYRHRTYSKVIEFVQFKDRLHHSMQYLSAKSDSVMLHLKQKADSLDEVESILESVSHGTKLVELSNEDSMVDLTFNEDLDARPWWTPTSSVNFLSEPFDESSTPASYRAKMCKHKSNEKDGSKLKDVERKSLVPRLVYLSTHGCASFLRESESNGASSDATASGEMKTLLDKYARSIGYSFDDALSFVLGISHGKKAVKDLAPDIVSWMNFAVFINAWNLCSNVSVIPGTDKSSPNSWWIVDNLVKTCIDEQLADTNQILTSPGSNIPLLAWMVTEPISWHLLVIQSCMRSMAPQGKKKKKGGPSERPNTPHLQAIRSSVQCMADTLQRVQKCLSEQMKPEEQALDMLVSHLQGTGAEGPGQIARILDESAAAASSEIGGRIAHSLEPWSRAGVMRRIVGAENETIAELMKICTSKLKLLASASASLSLVLH

SEQ ID NO: 295055 - protein, 121 aa, Zea mays
  unsure (1)..(121): unsure at all Xaa locations
  Clone ID: MRT4577_32171C.1.pep
MKIQMKLLTNRKVTIDLAKKRQXKKLSEVKESSGKKKANTGSGHKSGPPKKIIKSPVKKVSSKVHEEKGSPNPKKKKKKKKKKKKKKKKKKKKKKKKKKKKKKKKKKKKKKKKKKKRGRPF

SEQ ID NO: 295056 - protein, 57 aa, Zea mays
  Clone ID: MRT4577_32172C.1.pep
DPSVKVTSLLIQKLHRLSRLIMLSPECFHVDSNVVFSTVHKLILYVGQLLAPLSRGL

SEQ ID NO: 295057 - protein, 140 aa, Zea mays
  Clone ID: MRT4577_32173C.1.pep
QRRVLFFFFFFFFFFLFFFFFFFFFTMIQPFYQCTVPLTKQPRDPMPIRVQLQGGGKPPLGLGTTQAGNSHGGCFLSHFPSFLPGPAAGPSRSLLSGTCLEEDDLVPRGPWGLTPASSGSPVLVGAWAQGLSSLAGRSRG

SEQ ID NO: 295058 - protein, 149 aa, Zea mays
  unsure (1)..(149): unsure at all Xaa locations
  Clone ID: MRT4577_32174C.1.pep
LKSRKFGLDMKIRWNSTYLMLKKLEGYEKIITVFVNANALDIDLVLTEADWYMVKHFREFLMPFYVATNVLSGVYYPTSCLVIDYIWLIAESFAKHKSDSLLCTVAAPMELKFLKYFDNISHIYCXATILDPRKKLDGVQSALEELVTC

SEQ ID NO: 295059 - protein, 127 aa, Zea mays
  Clone ID: MRT4577_32175C.1.pep
IFSQHVSSSNKASAQFFFFCKSTTSKHILCCAIGLCIPIFLFWILATSLSLDIFLTTIILTMISVLSTAIAFRSVTTRSPAPERGGPACTSRMGSVRMALPAASRRRPRGSSCAPRHSLSCPLSSSS

SEQ ID NO: 295060 - protein, 218 aa, Zea mays
  Clone ID: MRT4577_32176C.1.pep
GTSRPAGIPLPPPPTPPPPLSTTTTTTTTIMSSRPTVEPLQPPILAKYGSDYLQYTSHYLFYLRLRLSLDRDPIRLKRVRSRRHRYGDDNSYTRKVVPRIMTVEQLYERFQPKFTERIIGVDHPTPHETSFGLPMLFLPQHDTETPAPFAELVDDQNDEGCMPQDAAIRVANDDQVTMLGENEWVHEKIHEEPVVHMQNVKLTKNELFQKIAHATTAS

SEQ ID NO: 295061 - protein, 142 aa, Zea mays
  unsure (1)..(142): unsure at all Xaa locations
  Clone ID: MRT4577_32177C.1.pep
MTSTVTTTVGCGGLPVRPLSTATRGRPRRCXSNDKSVEVMRKFSEQYARRSNTFFCADKTVTAVVIKGLADHRDTLGAPLCPCRHYDDKAAEVAQGFWNCPCVPMRERKECHCMLFLTPDNDFAGKDQVISFEEIKEATSKF

SEQ ID NO: 295062 - protein, 73 aa, Zea mays
  Clone ID: MRT4577_32178C.1.pep
IVFFWLIQRSLFWSVGVCNNIGCFVVRNVYGIVVSRGNVFGMFWWGVGVLVFFGQVADGRVCGFRDSLWCTKN

SEQ ID NO: 295063 - protein, 152 aa, Zea mays
  Clone ID: MRT4577_32179C.1.pep
MTSTVTTTVGCGGLPVRPLSTATRGRPRRCAVRAQAAGADASNDKSVEVMRKFSEQYARRSNTFFCADKTVTAVVIKGLADHRDTLGAPLCPCRHYDDKAAEVAQGFWNCPCVPMRERKECHCMLFLTPDNDFAGKDQVISFEEIKEATSKF

SEQ ID NO: 295064 - protein, 108 aa, Zea mays
  Clone ID: MRT4577_3217C.1.pep
LFLPLKSDASSGSSSFVEKIWRTATNDIYYDIAPFTCSLLSDSCFCNAWRAAMHQQHQGPLQHYACTSSPPNCAIPPSLTLQLKMIPSCSGSLCQREREATRFKEAHL

SEQ ID NO: 295065 - protein, 68 aa, Zea mays
  Clone ID: MRT4577_32180C.1.pep
PNRITKCRLYPLYRFVPKKLGPKYLPGKKTRSPGEEVDKVVIPINQGKHIDPLLQCLNEWKGAPLPII

SEQ ID NO: 295066 - protein, 66 aa, Zea mays
  unsure (1)..(66): unsure at all Xaa locations
  Clone ID: MRT4577_32181C.1.pep
PARLRAPPPTLCITNTIPIANSPPPHQESQEHSRHLSALSPKTTNEKXHQXTSDCHWLLMSHESII

SEQ ID NO: 295067 - protein, 69 aa, Zea mays
  Clone ID: MRT4577_32182C.1.pep
CLRCSVVGVLGTNTAPSVCVVAAHFGPAPCCSVRGGLAAAAPSGHTRRTSPTSSCTGATLWARSSHVIS

SEQ ID NO: 295068 - protein, 167 aa, Zea mays
  Clone ID: MRT4577_32183C.1.pep
MQNRIQSHPAGASSSASSGGDGSGSGFCLSDIMEIDAGSGGDHKAPGSPRSKHSATEQRRRCKINERFQILRDLVPQSDQKRDKATFLLEVIEYVKFLQEKVQKHEACAGGDWSQENTKLAPWSSNRVPVDLMPGVAPTTKIGSAGNFLDNSIPTMPEMLQNAETVV

SEQ ID NO: 295069 - protein, 117 aa, Zea mays
  Clone ID: MRT4577_32184C.1.pep
SLSEDFVAKPPAEDRDIMGEVSKTHEAIQYLEKSIDTLQMELAAKRSINELHGESTGGGISKQRRRAFVVIGVNTAFSSRKRRDSVRETWMPQGEKLKKLEEKGIVVRFTIGHSATS

SEQ ID NO: 295070 - protein, 363 aa, Zea mays
  Clone ID: MRT4577_32185C.1.pep
MAMAFHFHPLVASRVHLSPHPFAAATGAPSPSSSVAIAAHYHHHGRRRFSAIVATATTTEFNFKAYMEERAVAVNRALDAAIPAGGLPAALHDAMRYALLAGGKRVRPALCLAACAVVGGPESWAMPAAAAVEMVHTMSLVHDDLPCMDDDDLRRGKPTCHVVYGEPIAVLAGDALLSLSFHHMASVGSYPPDVDPEKHPARVVRAIGELARCIGSEGLVAGQVVDLEMTGTSETVPLERLEYIHLHKTAALLEASVVIGAIIGGGTDEQIERLRKYARSIGLLFQVVDDILDVTKSSEELGKTAGKDLASDKTTYPKLLGLEKSREFAEELLSDAVEQLACFDKEKAAPLLHLANYIAHRQN

SEQ ID NO: 295071 - protein, 105 aa, Zea mays
  Clone ID: MRT4577_32186C.1.pep
NYSDIGADIRLSRDQEPAISSPHVPIHYAHRSKAELSACHRKRRGNHWIHTGAAPLLKALRPNSKAVSEASSTDDLLCSFGRTPRLASAVRYLCIPVTCTLAHQL

SEQ ID NO: 295072 - protein, 111 aa, Zea mays
  Clone ID: MRT4577_32187C.1.pep
PRGRAGQLPDGLPRAACRAAAGLRRALPVLQLHGPADGVRGRRMPHHRRAPRGQARRAVPEHHRRRLTGGLRCDVTRAGGHARSRHVTRHGWAGDGHPGWLAGWGRFVRLF

SEQ ID NO: 295073 - protein, 80 aa, Zea mays
  Clone ID: MRT4577_32188C.1.pep
VLMAAPTIACQFIEPIVILSFLACNLWNRRLSSRSTGLVSGGAVIYAYNSLLAMDMVLKFQTKTNKKRKKKKSLCPSARP

SEQ ID NO: 295074 - protein, 466 aa, Zea mays
  unsure (1)..(466): unsure at all Xaa locations
  Clone ID: MRT4577_32189C.1.pep
MAPPPPEDLQCAVNVKCAAPPALAAGDGELRWLRRCVEAAXEGFAIGAGLKGGLALFSVLVRIRSRRSPRSRKAGAMTNEEAVVLAVKETLSYATVMVRIAIYQMKPRNSSDILACXSSLRDFCMVTHVILAGPSMLLTXTXTQHTSVEQYILMRAAVLAAACGIKXKRFGXICKPLTWSHVNVFLMCLSSAQILLAYILKQYSLISSYNELXSSMTGKDLTILQGVKDVVNHTAFSNLVGIEKYYKSVGVDIKLDPNMKVPCSIVHGNQSCTGHVFSFLLQAYGRAVPVYVPVYLVPALVVHRQHLMKRPYSIIGKSFLGVARSSLFLSVYCASAWAWTCLLFRIFRRANTPLVILGTFPTGLALLIEKKSRRIEISLYCLARAIESFFTWMTDAGLCPPILQIKRADVVVFSIATSIIMHCYAQEREVFRSKYLNVLDWVFGVPPPPDSEDKNCYLPDEAKKCQ

SEQ ID NO: 295075 - protein, 228 aa, Zea mays
  unsure (1)..(228): unsure at all Xaa locations
  Clone ID: MRT4577_3218C.1.pep
MASTSPHRSSGGDPPSSSTPLISSPTSPASGSSGGPLGRLTSLRGAARFIRRTGSRRLMREPSVAVRETAAEHLEERQTDWAYSKPVIVVDMLWNVAFVAIAAAVVAASLGEIPAVPLRVWIAGYVLQCLLHILCVTVEYRRRRRDADQEGVGVDFKFXEEGASEDDVNNLSKFKFRTMSDADKLAVGIAAPVXGVMTECGTNPPVEHILSAEDAARLAHTSRVGSVI

SEQ ID NO: 295076 - protein, 88 aa, Zea mays
  unsure (1)..(88): unsure at all Xaa locations
  Clone ID: MRT4577_32190C.1.pep
SPNLYSKKEVYQVYVSKTSVRPERSFGVQKKKLRILGGYIVKALCGFDKNPVFPMLLCPKCLVLIIPHSVWDGRXAEKKKKKKKRPPA

SEQ ID NO: 295077 - protein, 101 aa, Zea mays
  unsure (1)..(101): unsure at all Xaa locations
  Clone ID: MRT4577_32191C.1.pep
IRSNSASHSIPVLSXLLRSDEPAYRYFAAQALSSLVCNGSRGTLLAVANSGAAIGLVSLLGCADVDIADLLELSEEFMLVPNPDQIALERLFRXDDIRIGA

SEQ ID NO: 295078 - protein, 179 aa, Zea mays
  Clone ID: MRT4577_32192C.1.pep
MAMAPAAATRAIGGSGPSHFISNSSFLSPPRPPPVRLPRRAGGRRAVLLGAGRRNGWGADGGSSSSSEGGRLVDEDMATLRRRIREARAESSEEDGIFDADDGGIPLPPTGWTELERHHPRELRGRRARRGRPSRGAPRERAPGARRRLAGGDAARRPGVAVPRVRAADPGPLIQSGPG

SEQ ID NO: 295079 - protein, 189 aa, Zea mays
  Clone ID: MRT4577_32193C.1.pep
MGTARPQQRRQNGHAIMADDDGASLARARCEIGCHRVLLINGNVRLHVTNVCFAEQMEAQQCLAIYQEMRKDGDNQDFYNLDLQPNRKESFNLFLEKVVEARIVQSVLRKIKEQYLLGHVELPLRIIITDHEKTSRAEAETNAVDIVQAIVTETSAVDVVQARAEAEISFDWTWKPPSCFIKIQSTNKI

SEQ ID NO: 295080 - protein, 39 aa, Zea mays
  Clone ID: MRT4577_32194C.1.pep
LVCSALVLVLPFIRLCKCPCPGHRFVLHPYLLCVLVGHS

SEQ ID NO: 295081 - protein, 76 aa, Zea mays
  Clone ID: MRT4577_32195C.1.pep
YMPEIVTMLGGSLVQSMNIPHYTWYTRFDQERSSSAHHCARTWIIDSTSLSLSEDMAAGGSTSNGKSNSRIFTVLA

SEQ ID NO: 295082 - protein, 102 aa, Zea mays
  unsure (1)..(102): unsure at all Xaa locations
  Clone ID: MRT4577_32196C.1.pep
AASTLPVTTPITPASNAMTPQYDYLFKLLLIGDSGGGKACVLLRVADESYLESYVSTMAADLKIRTVXQDGKTIXLLTWDTAGLXRFRTITNSYYRGAHAII

SEQ ID NO: 295083 - protein, 119 aa, Zea mays
  Clone ID: MRT4577_32197C.1.pep
MSSQDPPYDPYIPSGGAGGQQGGQNGNHRTAALQAEIDSTVGIMRDNINKVSERGARLDSLQDKTDNLAVSAQGFRRGANRVRKQMWWKDMKMRMCLIVGIIILLIVIIVPSVVATQKN

SEQ ID NO: 295084 - protein, 65 aa, Zea mays
  Clone ID: MRT4577_32198C.1.pep
LKGKNMLPYYNWEQQSYTLRCCLVLSVGVATLMESGCSGTRCMVRQSGICLVQFFMSCILFMVFD

SEQ ID NO: 295085 - protein, 74 aa, Zea mays
  Clone ID: MRT4577_32199C.1.pep
RVVFTHRCSCGPSGPSLSLYSCLFGYRLWFHRSVTLSQSSRPPAGVIENLADSLTCSKIFAVSIDSAPRLFLAH

SEQ ID NO: 295086 - protein, 99 aa, Zea mays
  Clone ID: MRT4577_3219C.1.pep
EELLDLFCRWRRPRSASDRGCRGGRQSLPSPTVARWPVCGLAALLVAAGTIYPCLARRRRLPPLAAAALGRVADDALDVAAVVVVVVACLLRLFGRVGR

SEQ ID NO: 295087 - protein, 119 aa, Zea mays
  unsure (1)..(119): unsure at all Xaa locations
  Clone ID: MRT4577_321C.1.pep
SLRTSDKASTLSEESHFQENLEQNDQMFRPSWKDIFRMNQSELEAEIRKXVSRDSTLDPRRKAYLIQNLMXQKSPQPSVEGHNGCTRRPGCVPSYRDPGKQIFGCEHYKRNCQLXAACC

SEQ ID NO: 295088 - protein, 250 aa, Zea mays
  unsure (1)..(250): unsure at all Xaa locations
  Clone ID: MRT4577_32200C.1.pep
MARVLLVLAASLVALAWPASCQRLPVLAPVTKDLATSLYTLPFHDGANLVLDIAGPLVWFTCQRGNLPAELPCKSPTCRLANAYPVPGCHAPGCGRHWHDDKTCTAYPYNPVTGACAAGNLVHTRFVANATDGRNPVSQVNVRAVAACAPRKLLASLPRGSTGVAGLAGSCLALPAQVASTQKVANKFLLCLPRGGANGDGVAIFGGGPLHFWVDPSDYTQSMDYTPLVAQQGXPAHYISVKSSAWTQPR

SEQ ID NO: 295089 - protein, 66 aa, Zea mays
  Clone ID: MRT4577_32201C.1.pep
GLTPYQASLSRVLPPGLGLSHPDYVTISAQRPPYSQDGLLPVRSTLLAESSCASSPPLIYMLTFSG

SEQ ID NO: 295090 - protein, 103 aa, Zea mays
  Clone ID: MRT4577_32202C.1.pep
CTPSLQLRRLVGPYVSLPRADWRLSLAHRPAELSASSWCLAVARTGQDGVGCVGQGRAGQGSRQAKLSGAGGWEVGQWGQGGRDSGCQLEARVSEAGGTRQPL

SEQ ID NO: 295091 - protein, 546 aa, Zea mays
  unsure (1)..(546): unsure at all Xaa locations
  Clone ID: MRT4577_32203C.1.pep
MNCGPPDQLPPGSAPSCFLNLNWDQSMAADQLDPALSSMVSSPASNSTAAAAVTDGRALHGISPQQQYGGTPLSSPPKLNLFHQTRPQFHHFPPPQVGGLPILENLMPMGHLDQFLADPGFAERAARLSGFDGRPGGSGYGRRXPGQFGIPDAGPIGALKELELGNGRDESSVSDPASGSAEMALNKGPSDGNAKKRKASGKGKGKDGPGSAAAGAAKEESSGKRCRSADESSGAEDNNPTTKGKAAQSSSENGGGRKQQGKESATKPPAEAPKDYIHVRARRGEATDSHSLAERVRREKISQRMKLLQDLXVPGCNKVVGKAVMLDEIINYVQSLQRQVEFLSMKLATVNPQLDFNSLPNLLPKDIHQPCGPPQYSHFPLETSGAPLPYLNHGSPLXGCGXTQGGSMHPLXNWPPPTRRRSPPAGLPAPDAASARPMNAPQHPFLNGASDAASXRSGLSGKTTFKAWFTWTSAKARRNXPPLPTATTXFIADSPHENGALRHGRGKRKKENPSPKLDAVVPPVHTEKRGHSSHRKQRALGGSNPT

SEQ ID NO: 295092 - protein, 245 aa, Zea mays
  unsure (1)..(245): unsure at all Xaa locations
  Clone ID: MRT4577_32204C.1.pep
PRVRKAVMLDEIINYVQSLQRQVEFLSMKLATVNPQLDFNSLPNLLLPKDVRGTRTHNMIARFALLRLVPSSHESYSXCLSVCDQIHQPCGPPHFPLETSGAPLPYLSQPHHGSPLGCCMDTQGGSMHPLDAAFCRPMNPQHPFLNGASDAASXRSGLSGKTTFKAWFTWTSAKARRSLPPLPTATTXFIADSPHENGALRHGRGKRKKENPSPKLDAVVPPVHTEKRGHSSHRKQRALGGSNPT

SEQ ID NO: 295093 - protein, 297 aa, Zea mays
  unsure (1)..(297): unsure at all Xaa locations
  Clone ID: MRT4577_32205C.1.pep
PRVRPRVRAPVPRPGALGKQGVALRISADSAAFVGCNFLGAQDTLYDHLGRHYYRDCYIEGSVDFIFGNALSLYSRCHVHAISASFAVKTQYFXTRNITFKNTSPVPKPGAAGKQAVALRVSADNAAFVGCKFLGAQDTLYDHSGRHYYKDCYIQGSVDFIFGNALSLYEDCHVHAIARTTGXLTAQNRQSMLEDTGFSFVNCRVTGSGALYLGRAWGTFSRVVFAYTHMDDIIVPNGWFNWGDPNRELTVFYGQYKCTGPGATYAGRVAWSHELTDDEAKPFISLSFIDGTEWVRL

SEQ ID NO: 295094 - protein, 362 aa, Zea mays
  Clone ID: MRT4577_32206C.1.pep
MGMPRARSLACIAVAAIALLAPTRGAEMVERQFVEWVRYMGGLRHSTFQQHALLDRASPSYSLVVDANPAFGDFTTIQAAVDSLPDINLVRVVIRVNPGTYTEKVSISAMRAFITLEGAGADSTIVQWGDTADSPTGAKGRPLGTFNSASFAVNAQYFLARNITFKNTSPVPRPGATGKQAVALRVSADNAAFVGCSFLGAQDTLYDHSGRHYYKECYIQGSVDFIFGNALSLYEDCHVHAIALDYGALTAQNRQSMLEDTGFSFVNCRVTGSGALYLGRAWGTFSRVVFAYTYMDDIIIPKGWYNWGDPNRELTVFYGQYKCTGPGATYAGRVAWSHELTDDEARPFVSLNFIDGNEWIML

SEQ ID NO: 295095 - protein, 63 aa, Zea mays
  Clone ID: MRT4577_32207C.1.pep
PRVFFPPPPRPSPSRPPSIGLLLFGGPFWNPPLQIRFRSVVSPLKLFFGHPKNMLPMWEEGYL

SEQ ID NO: 295096 - protein, 390 aa, Zea mays
  unsure (1)..(390): unsure at all Xaa locations
  Clone ID: MRT4577_32208C.1.pep
THSSADSCVPRARPLACIAVAAVALLSPTLGAEMVERQFVEWVRYMGGLRHSTFHQHALDRACTSYSLVVDANPAFGDFTTIDAAVDSLPDMNRVRVVXREKVTVSAMRAFITLEGAGADKTVVQWGDTADSPTGPKGRPLGTFNSASFAVNAQYFLARNITFKXYVAGTTHPCRVFPSTIYMCSLVLALARGXNTSPVPKPGAAGKQAVALRVSADNAAFVGCRFLGAQDTLYDHSGRHYYKDCYIQGSVDFIFGNALSLYEDCHVHAIARDYGALTAQNRQSMLEDTGFSFVNCRVTGSGALYLGRAWGTFSRVVFAYTHMDDIIVPNGWFNWGDPNRELTVFYGQYKCTGPGATYAGRVAWSHELTDDEAKPFISLSFIDGTEWVRL

SEQ ID NO: 295097 - protein, 148 aa, Zea mays
  Clone ID: MRT4577_32209C.1.pep
MLWRAVRSMDVIMHSSSFLLPKLYQPVNKPVKNYALVVLNQHLPRFMPRLWDHANLRICADGGANHIFDEMYQITNDEDKKSTRNKYVPEIIEGDMDSIRPEVKLFYSSQGSKISDKSHNQETTDLHKCISRTHHCTPDDEKPNVNQR

SEQ ID NO: 295098 - protein, 248 aa, Zea mays
  unsure (1)..(248): unsure at all Xaa locations
  Clone ID: MRT4577_3220C.1.pep
MIDAMQAVSLISCNIANAVPHLTRPSPHACAHTHTHTHTIYLSTYTLPACLQLQLQPITIYTQLASFTYRKHPDRQDQRQRQRCRQEAGRALHSPTPAETKVMAQLPPRAPGGAAPQDHWSAAGEFLGFAAARRGAHRRSASDSAAFLEALPMEDVIGGDGFDRLDDDQLMSMFSDVDAPAVSAGDAAQLMDVADADADXTGRPSSSRVAVDGVSVDLKRFKTIXLANRQSAQRSRVRKLQYISELER

SEQ ID NO: 295099 - protein, 267 aa, Zea mays
  Clone ID: MRT4577_32210C.1.pep
MLWRAVRSMDVIMHSSSFLLPKLYQPVNKPVKNYALVVLNQHLPRFMPRLWDHANLRICADGGANHIFDEMYQITNDEDKKSTRNKYVPEIIEGDMDSIRPEVKLFYSSQGSKISDKSHNQETTDLHKCISRIHHCTPDDEKPNLCVLVTGALGGRFDHEAANINVLYLFSDMRIVLLSDDCLIRLLPRTHRHELYIESSVEGPHCGLFPVGAPSTSTTTTGLKWNLSESKMRFGSMISTSNIVQSEKVTVESDADLLWTISLRNLT

SEQ ID NO: 295100 - protein, 57 aa, Zea mays
  Clone ID: MRT4577_32211C.1.pep
NWALTQRPRMTLDHWVQTFVDQAENKALDMLHVLDLCFIFWGSFGNFAQNCGIHDRV

SEQ ID NO: 295101 - protein, 55 aa, Zea mays
  Clone ID: MRT4577_32212C.1.pep
TGRKHRLLVISRRCTRVLVSLDAVVRAAEEVGFEAVVNESDVVNDISQVGRLLTS

SEQ ID NO: 295102 - protein, 139 aa, Zea mays
  unsure (1)..(139): unsure at all Xaa locations
  Clone ID: MRT4577_32213C.1.pep
MEPQGQQETADKKPVEDKDENKXRADKRXPSNVVGENKGKTNAETTVETDNIYCLXVLWREHPXLGFSSKGLCIMDSFINDICXKLAAEGVMVVRYDKKTTXPSLEIHTSVXRLVLTAQLAEYARIQSVSRLPTSSTSS

SEQ ID NO: 295103 - protein, 57 aa, Zea mays
  Clone ID: MRT4577_32214C.1.pep
FFFFFFFFFFFFFFFFFFFFFFFFFWTKEHRHFYQGANKNGPNYNTKTRIQAIALKS

SEQ ID NO: 295104 - protein, 101 aa, Zea mays
  Clone ID: MRT4577_32215C.1.pep
RAAQNQRREPPLLQIPRSFLRVREGRMTVRVVMRYLVNKLGLDDDSQLEITCRGQHLQPTMTLQQVRDTIWRPVPAEAAAVLPAPGSPSTSQVMTLHYGRC

SEQ ID NO: 295105 - protein, 80 aa, Zea mays
  Clone ID: MRT4577_32216C.1.pep
PKRSLAALFFFFCSKVVYLCAWSRIDDRGTVLWAINCEYGILFWEIVSYNSTHTPKLSKLGLRDYYKLVATALSSKRGPA

SEQ ID NO: 295106 - protein, 594 aa, Zea mays
  unsure (1)..(594): unsure at all Xaa locations
  Clone ID: MRT4577_32217C.1.pep
KDHFLCEDEACLAKKFVVFLSEAELKRHNAMEHGGRMSRSQRNAALQIPTSFIYRRNEQAQRRGRGRGRNALHDRFDSHISSSAQNGQATADRRLDSVSGSFQSLSIGSSSGGAEVGQGSRTGQVLEQLSFPPLLDPDIPDNNVDSFHDETSFPSLSEQQSRYALALSQSARGTARLGDESLFPPLPGSSGSNNNRGAGSVQQGLQSLAKSTLAARLQQRSKGPVKVLNTARPRPPENVEALSSSTQTWPTXSGPSPVWIFSASIWNSTNXRENAMPTISSNTVWNPVAPNKMKHSVSTPNLVSGGSSAQVSLSTAYGSNKSQDPPQGNQTLPVPEDFRAANKTLVERMRSALGMDEDRYSAFKEIAGEYRQGIIGTLEYLSYVEQFGLSHLVPEMARLLPDPQKQRELADAYYTNTRFKSLQENGGGTSSQEGNRKKKGKGKAPVTESSAANDVNSALADNILETVRRLQSNQQAREGGAEVLSKDGYRPSKGVQPAAGSSSNLDSDTSSNSKSSGAKDNIGKGGGNKQPKKTAKFLRARLGDNSLATLDLSRPSASPERPERELQGPETGLPARGAWKNGGGQKLFSSNGRK

SEQ ID NO: 295107 - protein, 129 aa, Zea mays
  unsure (1)..(129): unsure at all Xaa locations
  Clone ID: MRT4577_32218C.1.pep
MAHSVLLLSLSTRRPALGAAADDAXTPVIRLVVXGAYDIDLDLNAAPHLLSFWQWIGESYEDANEHAYRLSALKANLSRARLHQLLNPWTEQGCTILSLLTPSEVPRNYLGLXESSXAILRELYESEHE

SEQ ID NO: 295108 - protein, 106 aa, Zea mays
  Clone ID: MRT4577_32219C.1.pep
TTCCCKRSSGPDGSYKSTKRCWSRQSWHCNRAHFCWFASGSGPVADTNARCGGYGPVMGSAREGPTIINRLRSTIDRTRSRHASLCHYHPSRHADASRERAQKKSL

SEQ ID NO: 295109 - protein, 104 aa, Zea mays
  Clone ID: MRT4577_3221C.1.pep
VPARLGKHVPPPHKGHFLRHAKPWLGGFFSPPSRGPPKNQLREGGVLSVLDGNSERAAFVFPRQMEFPAPLYSLLVVKSKWKILAYYPNCNNEDRPIGMLFCNN

SEQ ID NO: 295110 - protein, 59 aa, Zea mays
  Clone ID: MRT4577_32220C.1.pep
AVFSLLSRFHSPSSSLRQAEASPSTASELVHPSSKSCLSYYVHLHLKAETSYDSKSDAW

SEQ ID NO: 295111 - protein, 59 aa, Zea mays
  Clone ID: MRT4577_32221C.1.pep
CIFYPFCLWGLIPLSPLAPFFSLSAALGGLHAVQCKSSPEYVQWRHVVALCAPRILTGR

SEQ ID NO: 295112 - protein, 61 aa, Zea mays
  Clone ID: MRT4577_32222C.1.pep
FFLGKTCRSEGTIIEFILYVYLKDGYLQRWACCSRQVQDLLKRTGCLAAIVAVVGRYLLMG

SEQ ID NO: 295113 - protein, 72 aa, Zea mays
  Clone ID: MRT4577_32223C.1.pep
APSSIAVVVASKWWCISSRPYCLPAADRAQQEAWYTRNGFGARPSCVSVCPSHQRRWAGCIVPRSEILQAGG

SEQ ID NO: 295114 - protein, 160 aa, Zea mays
  Clone ID: MRT4577_32224C.1.pep
FTLIIVHRLAGWQHEKYIQVLCSSATAITGCTHSQGDRDISNPNSPRSKSPRRQCQIETGIWLMHTQTKTQSTQAAVQHASTDCRLPVLHLQTGRQGDRQRQRGTWTCTDTQAAPVAHSPAILSLWRSTFHQMRMAIFFLYLQIDICQVHQIRRVVKVLE

SEQ ID NO: 295115 - protein, 89 aa, Zea mays
  Clone ID: MRT4577_32225C.1.pep
SQIHKYIAHKSHGMYIRLCILLRMTFTYTQTQLRIDPSPRTRLSKQTLSGRNNSSIYCTLNAVYTQIKHTHHDPSTYSFLGSVECKFDH

SEQ ID NO: 295116 - protein, 427 aa, Zea mays
  Clone ID: MRT4577_32226C.1.pep
IRHEELPVDRRVPSNWIKINSTKKAIRYHTPEILKNLDKLLLAKEELAVICRSMWHKFLTDFGKYYAQFQAVVESLAALDCLYSLAVLAKQNNYIRPIFVHDNEPSQIHIKDGRHPVLESLLGDNFVPNDTELHADGEYCQIVTGPNMGGKSCYIRQVALITMMAQVGSFVPASSAMLHVVDGIYTRMGASDSIQQGISTFHEEMNEASNILHNCSSRSLVIIDELGRGTSTHDGVAIAYSTLHYLLKEKKCIVIFVTHYPKILDIQREFEGSVGAYHVSYLATRKLLEVTGKQVETSPEANDLGEIIFLYKLVAGASDRSFGLNVALLAQLPSRCIKRASVMAAKLQEELSPREEIKLRRTTDAQTVDGPSESSAEVGLFCAHPYQRLAETCRRILLNITLAQSNNDVTNTLPSLKNAQEIAQKTI

SEQ ID NO: 295117 - protein, 151 aa, Zea mays
  unsure (1)..(151): unsure at all Xaa locations
  Clone ID: MRT4577_32227C.1.pep
MQKGLGLRTRHISRGEVAPREKESITDPSTPKPNPNAISYEHKAKTDHHFKLVEGELHVDPNKDSKERLYPGADATTFFTDVHYELSVXLAGDSRTVCDNRXNLLEQRCNLHLMDNTDRELLAQKAAPHRNLYIVRKDDTPCHDSACMNQK

SEQ ID NO: 295118 - protein, 136 aa, Zea mays
  unsure (1)..(136): unsure at all Xaa locations
  Clone ID: MRT4577_32228C.1.pep
FGSSEPFVKTPCFKTRKALIVGWDPRYQPLVIHCKRGQHRTACMIPCLRMLPIRCLSSVFDEYHQLXCVKARITDQTXSELCYVLSLRHLPPSHVQPQGACILDAPILMRHLQGYHPQLLHRLSREQSWNPLESMR

SEQ ID NO: 295119 - protein, 110 aa, Zea mays
  unsure (1)..(110): unsure at all Xaa locations
  Clone ID: MRT4577_32229C.1.pep
MDIFHSSSCQWSAWTAYKSSVGCNKKTSFSTXGFDLPXDWFRNPKDGYPCSRLDGNGDDDFVLPAKSDFSEQQGCSATXGRIQSHCRSLPAXASHEDAEFEXDMDEVRRI

SEQ ID NO: 295120 - protein, 53 aa, Zea mays
  Clone ID: MRT4577_3222C.1.pep
DNLSTIIRTILLDKKPEEIPLIVESLLNKVIQEYELRFANQNLMDEEKQNNLT

SEQ ID NO: 295121 - protein, 72 aa, Zea mays
  Clone ID: MRT4577_32230C.1.pep
DELQLLEGVPPVSRSCKEVNDFVGTKQDPLIPITKKTHRSCRLFWWIRFAFHYLFLPLIAWWVHQNLDNILL

SEQ ID NO: 295122 - protein, 194 aa, Zea mays
  unsure (1)..(194): unsure at all Xaa locations
  Clone ID: MRT4577_32231C.1.pep
MAKVGTDVMKKQRLGMVRSQLEKFACKHKKTSFSTVGFDLPDWFRNPKDGYPCSRLDGNGDDDFVLPAKSDFSEEQGCSATGGGSSPLAILASCPASHEDAEFEADMDEVSRILRSRFASPEAIVITMDCCPVRVSARLVSKVLSRFSNDWVAAFXFFMXGXTQEGYCHCADSYDMMVDILGKFKQFDLMCGLI

SEQ ID NO: 295123 - protein, 63 aa, Zea mays
  Clone ID: MRT4577_32232C.1.pep
DRRMRCMLQSNHVIKVYCVRSLGLLWRGKDIEPIFMLQSSIGQLTITWPQNRWVQNKLMERPD

SEQ ID NO: 295124 - protein, 80 aa, Zea mays
  Clone ID: MRT4577_32233C.1.pep
LFVRGHVVCQRFNETGKPVYFSTGKFIVLGRWLVNGNIDGDVYLNTYTYTKLKESKKLKAHDYNDEVWDSLLTATDLVYK

SEQ ID NO: 295125 - protein, 75 aa, Zea mays
  unsure (1)..(75): unsure at all Xaa locations
  Clone ID: MRT4577_32234C.1.pep
GVSKVGHNTPTALLSFSKGPRSCIGHKFTMIKAKPVVPMILQRFALKLSPKXVHAPMDLIPLRARKGLPMLLKRL

SEQ ID NO: 295126 - protein, 130 aa, Zea mays
  unsure (1)..(130): unsure at all Xaa locations
  Clone ID: MRT4577_32235C.1.pep
GRVGGRVGYSNVPHTKLVEVKGHQNWVKVSGQYLTFPGGGTQFIHGALHYIDFLQQSVRAISWGKHTRVVLDVGCGVASFGGYLFERDVATMSFAPKDEHEAXVQMALERGIPXISAVMGSKRLPFPSKS

SEQ ID NO: 295127 - protein, 152 aa, Zea mays
  Clone ID: MRT4577_32236C.1.pep
TAALVRRSGVQAGVRRHPHLLQRVAGAPLSPASSTHSATSRTRSAESSFRPGVTTNVTESMLARSGLNLVHVPLSDACPRMTTAATETVAPPFSTVIQAKNMDGVHVYNVISDVYSMDLVDEADNAQCMGAVSARILADTVWVDKVPLTVDD

SEQ ID NO: 295128 - protein, 143 aa, Zea mays
  Clone ID: MRT4577_32237C.1.pep
PAGPVGPVIPAHEAMEDCTVGGFHVERGTMVLVNAWAIHQDPKLWDAPEEFRPERFLDAAGTVTAVTTPMLPFGLGRRRCPGEGLALRLISLTLAALVQCFEWDVGEGGVVDMTEGVGLTMPMAMPLAAVCRPREFVKGMLST

SEQ ID NO: 295129 - protein, 90 aa, Zea mays
  unsure (1)..(90): unsure at all Xaa locations
  Clone ID: MRT4577_32238C.1.pep
PTRPQEILILLVGAMNFEVAMQMGSVTYHHLKDIILEKXGSDSCNIGDHGGFAPNISSISEGLDLVIAAIERAGHYGRIKLTIDVAATDF

SEQ ID NO: 295130 - protein, 112 aa, Zea mays
  Clone ID: MRT4577_32239C.1.pep
MGANLGAAAHNVPPAHMEFPGARGSDVRGFFAKDNVGATVHATTTRQGTYYGWCRVSFRLHARSWISSKHRHGNCGRSNHAQQWAWPRRCRWWTAAATQRTWENQILYWCSI

SEQ ID NO: 295131 - protein, 80 aa, Zea mays
  Clone ID: MRT4577_3223C.1.pep
DSCFPVPGLSSSSPAKQGHVTAALAGGSVWAPESARSPSTPCNVRFCAEGDNFMAQLVHCVPVPLKFIESYGQNFRVWCL

SEQ ID NO: 295132 - protein, 77 aa, Zea mays
  Clone ID: MRT4577_32240C.1.pep
PRVRAPFSPDQEDASVLWTESKDVGKGFRCIRMVNTPPQLDAFTGQDTGGTRTRGSEWQATTETAGQDSRTSDGFER

SEQ ID NO: 295133 - protein, 76 aa, Zea mays
  Clone ID: MRT4577_32241C.1.pep
SSQDCGLGTIAMYIEAAQPVSIQTGPVYSVRMSAWSSRASLESPICAHLPMSLSGLMCVRRIYIHELSYSAVIQRC

SEQ ID NO: 295134 - protein, 428 aa, Zea mays
  Clone ID: MRT4577_32242C.1.pep
MAAARACFVALALVAAFFVAGSAAAAAGNAGGRSQLTLRQRRRQLLRQRQVRSHLKRLNKAPLATIESPDGDIIDCVHISNQPALDHPFLKNHTVQMRPAYHPEGLYDDESKVASQRNAQTITQMWHQNGRCPEGTIPIRRTKEEDVLRASSVRRYGKKKRRSAPNPMSVDPDMLNESGHQHAIAYVEGDKYYGAKATINVWQPKIEQANEFSLSQLWILGGSFGQDLNSIEAGWQVSPDLYGDNNTRLFTYWTSDAYQATGCYNLLCSGFIQINNQIAMGASIFPISNYGGSQYDINILVWKDPKEGNWWLQFGNDYVLGYWPSFLFSYLADSASMIEWGGEVVNSEPDGSHTSTQMGSGHFPEEGFGKASYFRNVQVVDSTNNLKAPRGVGTFTEQSSCYDVQDGSNADWGTYFYYGGPGKNSNCP

SEQ ID NO: 295135 - protein, 80 aa, Zea mays
  unsure (1)..(80): unsure at all Xaa locations
  Clone ID: MRT4577_32243C.1.pep
FXFXFFFXFFFXXFFFFXFFFFFFFFFKEKSGRLMNPTSKKKSGLRDHNRKFSDPYKKFFLFLVTRQFFYMGDPNSKFKK

SEQ ID NO: 295136 - protein, 178 aa, Zea mays
  unsure (1)..(178): unsure at all Xaa locations
  Clone ID: MRT4577_32244C.1.pep
RLRYRSGIPGSTHASARNPFRVLNKNQKTLERKQFVEEGERKTADKKLRENNEQLLDQRKEQKPKSNSRMEKDPSSDLVATRQSGGDREEQEKSKFQPKTKKAEGMASKQGHXGEVLQGIPKGPHMSESESRGVPNKPETLREKETQLLVPSVPGQNPESKVQKEGHVSRGPLKNGEG

SEQ ID NO: 295137 - protein, 136 aa, Zea mays; identical to SEQ ID NO: 250043
  Clone ID: MRT4577_32245C.1.pep

SEQ ID NO: 295138 - protein, 89 aa, Zea mays
  Clone ID: MRT4577_32246C.1.pep
GGEGKLFWKPNLGQIHSCSWAGRGNRLACAYTMEKRMAASIQNCTQGSSLTCTYTLMMLRLQTKHLNPCGPAYTTHFFDTSNQLSLLPA

SEQ ID NO: 295139 - protein, 136 aa, Zea mays; identical to SEQ ID NO: 250043
  Clone ID: MRT4577_32247C.1.pep

SEQ ID NO: 295140 - protein, 129 aa, Zea mays
  Clone ID: MRT4577_32248C.1.pep
TITITINNRNHNHNSNSLLLQNSQCLLFLLKSSSLSPRLPSLLSCLSPQPLLPHTLRSRLPALTLVPLLLDEPRLSRPAPAPAPTTATASSSLDLFTTASMPMSTRPTFMMLSFTEESHGNLCVNGVLL

SEQ ID NO: 295141 - protein, 90 aa, Zea mays
  Clone ID: MRT4577_32249C.1.pep
AATVGTGAARGRTGSRRPLYMSPSPYMLDGGALPLKFDGCLLVHSPYLLGSGENVKTLSRGEHLGQGRLTMSNKTAYDLCPSNSMGLNRW

SEQ ID NO: 295142 - protein, 93 aa, Zea mays
  Clone ID: MRT4577_3224C.1.pep
AHNKSRRPLKVWLLSELRGPLHHLRRNALKVHVIGLFGFALTSVGISDSLLLVRMLRSSTRSNLVMFISVAIALPFVFFTGRPIMVNGVNGVR

SEQ ID NO: 295143 - protein, 71 aa, Zea mays
  Clone ID: MRT4577_32250C.1.pep
LVKSQCECYPLPPLLGNPSAILCICLLPHGPNNLLLLLKMIVFLLPFEQKIGCSCFRKASQSYTAWADPGS

SEQ ID NO: 295144 - protein, 35 aa, Zea mays
  Clone ID: MRT4577_32251C.1.pep
HFDAYIKSCPIILDLTSVAIYFAKNPLHHYPVPLS

SEQ ID NO: 295145 - protein, 86 aa, Zea mays
  Clone ID: MRT4577_32252C.1.pep
KYQFFTQFKSPNTIATFTNPFNITNAPNNQAATQISNNFHIISLFNPLINLHYPHITHYLITKTLPNFTTNHSKLVNYITYYITIN

SEQ ID NO: 295146 - protein, 132 aa, Zea mays
  Clone ID: MRT4577_32253C.1.pep
MASQQRQQQAGAAAAASSAVGFEDYLPVMAERLGEDGLMRELASGFRLLMDPARGLITFDSLRRNAPLLGLGGMSDADLRGMLAEGDFDGDGALSETEFCVLMVRLSPELMDEPRRWLDDAVDQAARFLFTS

SEQ ID NO: 295147 - protein, 144 aa, Zea mays
  unsure (1)..(144): unsure at all Xaa locations
  Clone ID: MRT4577_32254C.1.pep
KEVLECNLKNLGPCFQNPRPTKAFQKKEGANRGAKNRHTGAPHQKNSPPPKPPKKRGGLQRPQRRTPGRPPGXNPKSPGPPSIRDLEKTQPGXCQPGPPEKPQKRGHPPPQEMLFGPPQQNGHNYPPPQKTHKTILKPPKKKTL

SEQ ID NO: 295148 - protein, 85 aa, Zea mays
  Clone ID: MRT4577_32255C.1.pep
MGNIFANKPNITGLDRAILTLKTHRRKLAQFQQQLEKVIEAKKEAALQLVQQKKRDRALIALNKNKAQEELLKQCDTWQMNVEQQ

SEQ ID NO: 295149 - protein, 112 aa, Zea mays
  unsure (1)..(112): unsure at all Xaa locations
  Clone ID: MRT4577_32256C.1.pep
TTRTCQVMIQKQKEIAEVEARQNXPKQVLHTASCYSPYIPKYVGNQQPTTSAASASHSQASWAQFPPPXLAPAPSHDQQPEGHLRPQQXRDLQEQSEARTVNSIVPESRHIY

SEQ ID NO: 295150 - protein, 63 aa, Zea mays
  Clone ID: MRT4577_32257C.1.pep
YKLDHDPFLLEVPCVRLASMCLFQEVKRSMLICSLRCTPSLILSSEPIVLVWFPVKKTGFICS

SEQ ID NO: 295151 - protein, 53 aa, Zea mays
  Clone ID: MRT4577_32258C.1.pep
YNYYSSSSNLKYCQEWLRQHFSPLVMPFLQLRVFLPSNYHVLYLHCLFYTYLY

SEQ ID NO: 295152 - protein, 123 aa, Zea mays
  unsure (1)..(123): unsure at all Xaa locations
  Clone ID: MRT4577_32259C.1.pep
LKSNHPFRTIVVNPKGLGDTINLFGERHTDQRITLVADVKTIGFILGPTITLAIGAKFAPLRKPKKLPRDVIYEEYSMEYGTDNIEMYVATVQANHRTLXLNDLIATAQTLCSTVKLIERILT

SEQ ID NO: 295153 - protein, 82 aa, Zea mays
  Clone ID: MRT4577_3225C.1.pep
MQNEEGQITELYIPRKCSATNRLITAKDHASVQINIGHVDENGVYNGHFSTFALCGFIRAQGDADSALDRLWQKKKVEVKQQ

SEQ ID NO: 295154 - protein, 64 aa, Zea mays
  Clone ID: MRT4577_32260C.1.pep
GFCPKKSLFKFDPCISLRASWNKKGLHQIAFFCNRMAIGCNGHVKFSHGMEQAHFFIQWGGEFA

SEQ ID NO: 295155 - protein, 56 aa, Zea mays
  Clone ID: MRT4577_32261C.1.pep
TGPFARFLYHSAFTGEMTQGLSQSPNCFLESTFSSRLLFQKGPRILRGGEMGKRPF

SEQ ID NO: 295156 - protein, 99 aa, Zea mays
  Clone ID: MRT4577_32262C.1.pep
STSCRRPAPCRCTAHCRRTVPVISWCFAALVGRHAVPGEARDKDVVLPCRPISRGGALSASYARWHTAPVSNPPAESGLAPVGLPAESGSRPRRGPTRP

SEQ ID NO: 295157 - protein, 131 aa, Zea mays
  Clone ID: MRT4577_32263C.1.pep
YRLCVPCTQEVEDHHLCPTSLSLHDLHESSSRSIRNTLMTSRNYLFFLTPPCATVELRGSRPYRSSSHCSCICPHRYNAISLFTTVSIYYVQILITIDRVLITPSSSVAPYLHSNVFNSLLPAEVDSSISL

SEQ ID NO: 295158 - protein, 52 aa, Zea mays
  Clone ID: MRT4577_32264C.1.pep
KSGCKQPSILSDPDQGAWALLFFPPSTYDARGRPTLRVHDTCLVLYSTHCSN

SEQ ID NO: 295159 - protein, 48 aa, Zea mays
  Clone ID: MRT4577_32265C.1.pep
MKGLLKGLRYISQIFDAKEPEMQIGKPTDVKHVAHIGWDNASVTAPSW

SEQ ID NO: 295160 - protein, 78 aa, Zea mays
  Clone ID: MRT4577_32266C.1.pep
SCYLLVYIMKYITHQVMLLPRIGSTDLSLDFVWAGELIYCWHGCSHSTSEKSQLHGSSQTLDMFIFYHCCCKFGTHFF

SEQ ID NO: 295161 - protein, 69 aa, Zea mays
  Clone ID: MRT4577_32267C.1.pep
DSDSRRGIETRHHTSLQLATNAKDKNDNDNIHSASHHLPLFNGTTDPLLEEPHPGPRPGGFLIWARSLF

SEQ ID NO: 295162 - protein, 107 aa, Zea mays
  Clone ID: MRT4577_32268C.1.pep
MVNLWGLCKAKRRENYKILEKLWDNMLAGPRPETGLEKLRKGTTARLLVINKDADGGSYKRAQSMPSTPTTPVTPSSSSSSTTPRGAGNIWRNVFHPGSKLATKGMG

SEQ ID NO: 295163 - protein, 47 aa, Zea mays
  Clone ID: MRT4577_32269C.1.pep
LVVVSYTKKEEKSINLVPFSYPLVTKQLKFSYSNLVNMFAFLETKSD

SEQ ID NO: 295164 - protein, 150 aa, Zea mays
  Clone ID: MRT4577_3226C.1.pep
MSAYRRILSSRKVAWASGLSGIAGLFAYHVYLINSTFSRIVETQVLDCKNRPDYIYINYSIYKESLQKLQRRQEVNKNFVNIISNPFIKYWKSIKHSLAWRLLKMAQTGDKHDRIKAIHQLSMLSHMKVADFQHLAQICDARTAIALARS

SEQ ID NO: 295165 - protein, 67 aa, Zea mays
  Clone ID: MRT4577_32270C.1.pep
MVRRFVPPSVMSKHVWKDKPMNAPIVDTKEYNESDLAYFHNNKHEEKALKELMAKVQEGALGGSVLK

SEQ ID NO: 295166 - protein, 66 aa, Zea mays
  Clone ID: MRT4577_32271C.1.pep
GGTKSLLRPFNFFQFFGNNLKGENLSKKNFWGEKQGFYIFTFYYTVGGVAGIGRLIRKGSFRALEL

SEQ ID NO: 295167 - protein, 96 aa, Zea mays
  Clone ID: MRT4577_32272C.1.pep
SCYAIVPIFTIRSASPIRMHSNQILKFSIAIARVGHECSNIPCHGQGVSRMGWSCRMVVELRFDIYLPQVQAPCAQPQSAQVHPEFPQPPFILMSL

SEQ ID NO: 295168 - protein, 78 aa, Zea mays
  Clone ID: MRT4577_32273C.1.pep
AKYHSRLLVLSQGGFFCIEKVEFDDKKEKKVVVVRGKFDAEKLCKKVWLQGPGKIVKGIVIAEVWPIPVPPKECKPEA

SEQ ID NO: 295169 - protein, 118 aa, Zea mays
  unsure (1)..(118): unsure at all Xaa locations
  Clone ID: MRT4577_32274C.1.pep
PQLSNFLNCRLMSINFLPFILRNHWYGYFLSFWFRFPEVAGVGGSFVNWRNSTSALLGVVSLPFFPQLXXEIIVHLVVXPFLLPLLGGFXGFFLLVPFLXVLELLVLVVVLRGVLFGG

SEQ ID NO: 295170 - protein, 178 aa, Zea mays
  unsure (1)..(178): unsure at all Xaa locations
  Clone ID: MRT4577_32275C.1.pep
RNRRDHPRPPRAPTNRQRGGRKPTTAPAARRRAGRRTGAPKASRTRRWTPRSTRRLRRAPRTPTRXKRLNKTGKKGEPRKRHPPAKNSEPAPEAPPAPQPAGDSGKDAAAAAAAAAAADKKTEEXRRRSRKARAPRRRRRRRSRGRSRRTGPQRRSSPKQRPQRRRRKWRRKXPRRQR

SEQ ID NO: 295171 - protein, 85 aa, Zea mays
  Clone ID: MRT4577_32276C.1.pep
TKLQQSADSLTQKETECQQLSEKLKLAEEEAASYQSRATAATEEVEAMKVELEAFESEISTHEATIEELKVKVSDSESNAGMHSL

SEQ ID NO: 295172 - protein, 183 aa, Zea mays
  unsure (1)..(183): unsure at all Xaa locations
  Clone ID: MRT4577_32277C.1.pep
GRFPAPIHISPLYLPLPGDEGTRRRRKRALLCEKLFRRVFPKKEMPILMGGLDTAANIXILYSXQLGEISESIPTIGYSEERVEYNNISFTACDARHQDXYPPLWRDYSQNTRGLIFVVNSNDRDRVVKPKYDLHGMLNEDALLDAVLLVFAXRXDLPNGMNAAXITDSLGLHSLRQRHWHIQ

SEQ ID NO: 295173 - protein, 135 aa, Zea mays
  unsure (1)..(135): unsure at all Xaa locations
  Clone ID: MRT4577_32278C.1.pep
SKGETKKVGSSHXPVGGVFLRNSVGXXRGLDRNLGRDXXXXAXIPDPLAXPTXFXVRGKSGPYRPXSVFVWIXLSIYXRRLLPXXXRXTALRRPGAAYQQHSICXIERDSVCPRWCSLVAQXXILRKPGXKPXXL

SEQ ID NO: 295174 - protein, 209 aa, Zea mays
  Clone ID: MRT4577_32279C.1.pep
MGWATRFLAAVCFFAAGVLFVPEAIGSPSGAGAVTAAKLAHVLSFATSWGAALWATFIGGIMMFKNLPRHMFGNLQSKMFPAYFTLISACAAISVAAFSHLHPWKTASTVERYQLGFLLSALGCNLSNLLVFTPMTIEMMKKRHKIERDLSIGEEVGWSKNQQVAKSNPTLAAMNKKFGMIHGLSSLANIMSFGSLAMHSWYLASKLEL

SEQ ID NO: 295175 - protein, 123 aa, Zea mays
  unsure (1)..(123): unsure at all Xaa locations
  Clone ID: MRT4577_3227C.1.pep
EYWASYKKEKALAYRMKALESPKIIFARAKQYAEEHHAQEKELAQLKREARVKGGFYGRPDAKILNGGTIQGINAIHPKTRTILQLLQEKESYNGVLLKGNKATMNTAVXVDTYVEDGYPNLN

SEQ ID NO: 295176 - protein, 111 aa, Zea mays
  unsure (1)..(111): unsure at all Xaa locations
  Clone ID: MRT4577_32280C.1.pep
FASGGDPFSVFNAYLGLLLTLFQERXATFVSHDNPAWHAEEYGXLNLAQICGTIATHVKRHETAYTKIGEMLFDMDPDYTILXAFADMMRKDITMPSHLMYYGKDNILFEH

SEQ ID NO: 295177 - protein, 209 aa, Zea mays
  Clone ID: MRT4577_32281C.1.pep
MGWATRFLAAVCFFAAGVLFVPEALGSPSGAGAVTAAKLAHVLSFATSWGAALWATFIGGIIMFKNLPRHMFGNLQSKMFPAYFTLISACAAISVAAFSHLHPWKTASTVERYQLGFLLSALGCNLSNLLVFTPMTIEMMKKRHKIERDLSIGEEVGWSKNQQVAKSNPTLAAMNKKFGMIHGLSSLANIMSFGSLAMHSWYLASKLEL

SEQ ID NO: 295178 - protein, 649 aa, Zea mays
  Clone ID: MRT4577_32282C.1.pep
TQLTGSIPSSLSKLENLTAMSVNGNHLNGDLPDTFDSLNRLVNLDISSNNLSGVLPSSMKNLASLTSLHMQDNQLSGTLNVLQDLPLKDLNIENNLFSGPVPASLLNIPNFKKDGNPFNTSIVPSASPPSTGPAPTPAASKPAPTPAPTTSNSTPPAPAPSFPSRSPPPPKTTSNSSEGSTTRDSTSPSKKHSTSTLKIVGFVLAGVVLFIIIVLLVLFCLSKYQERRSRYDHNRSQQARVHHRVEPQIKPPPVQQSNDLKKGSGEVLDRRGHELSSSTAALAKKSPENQKEHVINFDRTDSDLFPVSLPPPPPPPPLPPIERVIANPIVPPEKRYSPPPKTSSSTSATSFSIASLQQYTNSFREENVIRESRLGKVYLAELPDGKLLEVLKIDNANGRISVDDFLEEVECILDIKHPNILELVGYCAEYGQRLLVYNHFSRTTLDDTLHDGEDTESALSWNARLQVALGSGKALEYLHASFQPPIVHQNFEPANVLLDKKFSVCVAECGLAELMPPSSVTQLSGRMRALLNYEAPELQDSGVVSERGDVYSFGVVMLELLTGRKPYDSSRPRHEQHLVRWASSQLHDIESLSKMVDPSIRGQCSEKALSRFADIISRCIQQQPEFRPPMSEIVQDLARLVNATGEESE

SEQ ID NO: 295179 - protein, 83 aa, Zea mays
  Clone ID: MRT4577_32283C.1.pep
NDWCLWPWQSRDSRKDGVQTPSSCRPPVQHPASHTPIWLLVGKMSPALYEPPSVLLRSRLCRRAPRPMTGLSVRKNAWAASSR

SEQ ID NO: 295180 - protein, 110 aa, Zea mays
  Clone ID: MRT4577_32284C.1.pep
VHLQQQYTDNLREENVIRESRLGRVYLAELPDGKLLEVLKIGNANGRISVDDFLEQIECISDIKHPNILELVGYCAEYGQRLLVYEHFSRTTLDDAIHDGKDTERALSWN

SEQ ID NO: 295181 - protein, 78 aa, Zea mays
  Clone ID: MRT4577_32285C.1.pep
WIQERPATATLGRMPRRVPGRETGRLLNRSRSDHGGDGRHGADADASGHQPGQSELTVSADTRHYRHYGTPVPTRVIA

SEQ ID NO: 295182 - protein, 96 aa, Zea mays
  Clone ID: MRT4577_32286C.1.pep
PWEGRAWAPAFCGFQGGPGPSKSSEKLGGLVHLLAEAVHHGLLPLPTARCFWQTPEIYDPGGLTRRACGDGLVFGTAASAYQVEGMAKHGGRGPSI

SEQ ID NO: 295183 - protein, 51 aa, Zea mays
  Clone ID: MRT4577_32287C.1.pep
RTVLVLHMYSKVTFRGGYLGPPPLIKGVLKNWTQVWFRLKNFGLKPTGRAP

SEQ ID NO: 295184 - protein, 160 aa, Zea mays
  unsure (1)..(160): unsure at all Xaa locations
  Clone ID: MRT4577_32288C.1.pep
KKKNRALSKFPTHYIKGDTKHKGPLQGIQGPQKKKKKRPGDPIFSQKDFFFKPRPNQFGKPFFPRGPAPSPPQNSNGLKGGPGEPFPLGPXNPKGERGLGAPPGQGGVAQPPFFGAHFAPKRGGFAPVPLEPPPPRVPGFKEHFLKPQRGFPRAVGPRRG

SEQ ID NO: 295185 - protein, 65 aa, Zea mays
  unsure (1)..(65): unsure at all Xaa locations
  Clone ID: MRT4577_32289C.1.pep
GTVLIALLIFILISTCLIFQIPAKARIIXLTNLHTSSLSILAHSNIYIPLLAIFLLSIRVHIYLR

SEQ ID NO: 295186 - protein, 44 aa, Zea mays
  Clone ID: MRT4577_3228C.1.pep
TRFTLRQRTRQTNQMVLATLQKMKSRLLTTTKACLITARKDWTG

SEQ ID NO: 295187 - protein, 65 aa, Zea mays
  Clone ID: MRT4577_32290C.1.pep
FSFGKDGFRSFEAGSQGVRLELHFRKRKGFKDQMSPFFEFKAKLNNFWGLVIMFHLPVYSSICLG

SEQ ID NO: 295188 - protein, 80 aa, Zea mays
  Clone ID: MRT4577_32291C.1.pep
DASPRLITPTRSPSTRVNLTPPGGKDTTKAQATTYNPNTYEPSFAEDEIDTLPGDIHTRTGNTRDGSRTTLNPTNRQAAN

SEQ ID NO: 295189 - protein, 519 aa, Zea mays
  Clone ID: MRT4577_32292C.1.pep
MAMAEKVKEKMLMLRSSDNQEFEVKESVAMQSMTLKKMVEDGCADKGIPLPNVTSHILDKVIEYCNKHAEPTGPGDAAGTTNRSAEDELNIFDADFVNVEHSTLLDLILAANYLDIKGLLNLARQTITDLINGKMPEEVCKTNIKNDLTIPSTSALATTMPSSERKQMEARFIAYMQETAEERMTGFAVRGEKYRKHGERPPQPPLEIVKYPALLERAWGWDSILPYCPVNSWPLYKTYLQEYYERNSREVLAHQVEANAASGPNLNGADENDLATLFNLCISREVQLLNLLKRRDQKHNVDEISLNEKLTNCARQITFVEYAGFPFPSVALKCIMAESDLLCMLLMCGTGMISQVNICSRIRKVAFRFMTYKGPGCFAAAATMMATTKEAKLMSGLLRNRCRENNGPFSRSVFIRKWTIAAMFRICEECSPVEESTGGYTATKLILDGSDDKNPCDKELVNKDNLLQRNKINQKYQGLFKGKTTKCRHPVQKQEPGDGATPASPSPANPISTVVQKLW

SEQ ID NO: 295190 - protein, 68 aa, Zea mays
  Clone ID: MRT4577_32293C.1.pep
ALKLIMLIGLVIISFGPSYSYTLLKLLYGERHSDGEAPVILRYYCLYIISLAMNGTSEAFLHAVANEN

SEQ ID NO: 295191 - protein, 162 aa, Zea mays
  Clone ID: MRT4577_32294C.1.pep
GRGHIRHATVVGRRRRYSRPGPGSEATEPDEISKLRDDIQKLQASEGEIKALSFNYAAMLKEKEEQLGKLRGENGSLKRSLESCKAVSANSNGTLERSPRVQRNAVQENSLNLTKQNGYGGGSSHSTQANGLHPMAGYQKGSISEEERSSFTTKHASLGMKS

SEQ ID NO: 295192 - protein, 72 aa, Zea mays
  Clone ID: MRT4577_32295C.1.pep
IRSSSHIDTSRLTLCTPTIVKRVSGQYRQSLVRCHAFCKNMFGCAPRVRGRAREVRVVCFLVRGKCYEFAII

SEQ ID NO: 295193 - protein, 511 aa, Zea mays
  Clone ID: MRT4577_32296C.1.pep
MAVAEKVKEKMLMLRSSDNQEFEVKESVAMQSMTLKKMIEDGCADKGIPLPNVTSHILVKVIEYCNKHAEPTGPGDAAGTTNRSAEDELKIFDADFVNVEHSTLLDLILAANYLDIKGLLNLARQTITDLINGKMPEEVCKTNIRNDLTIPSTSALATTMPSSERKQMEARFIAYMQETAEERMTGFAVRGEKYRKHGERPPQPPLEIVKYPALLERAWGWDSILPYCPVNSWPLYKTYLQEYYERNSREVLAHQVEANAASGPNLNGADENDLATLFNLCISREVQLLNLLKRRDKKYNVDEISLNEKLTNCARQITFVEYTGFPFPSVALKCIMAESDLLRKLLMCGTGMISQVNICSRIRKVAFRFMTYKGPGCFAAAATMMATTKEAKLMSGLLRNRCRENNGPFYRSVFIRKWTFAAMFRICEECSPVEESTGGYTATKLILDGSDDNNPCDKDLLQRNKINQKYQGLFKGKTTKCRHPVQKQEPGDGGLFEGECSRTSQHEVNGS

SEQ ID NO: 295194 - protein, 170 aa, Zea mays
  Clone ID: MRT4577_32297C.1.pep
MEEPNAGAAGAAAVEVADPAGDAGVGPSASPWRKTTPPPAASGEAAVMGAESWPALEEARQKAASEPPAKAAAGNAAGSDFVKGPQGSPLPSAPSQVASRMHKFDGHGNGNPNRNHQAHHRNGPRRRFPAANGAPPYPPPMHYPQHPGQPIFYPVVPSPMILQEYSYQPF

SEQ ID NO: 295195 - protein, 125 aa, Zea mays
  Clone ID: MRT4577_32298C.1.pep
GKTKEKPYDQTIISYNGLAGKKINNTLTTSTPSPTTMASIIPTPTMRHQTGEARGPINRGTETRPRNPEKKERTIPFKKHNLQRTQSFFPPPPRNSLAQIGIIIPSPCFGQNQGGGYPCPGPFPS

SEQ ID NO: 295196 - protein, 101 aa, Zea mays
  unsure (1)..(101): unsure at all Xaa locations
  Clone ID: MRT4577_32299C.1.pep
KNERPAGVFATLDDTLALHRKKEARGEPTKQAEAATSNITEVLNDSLESITQCIDFEAEMQNSEKLQESNKFKLKTQVQSSQRKQRRAXQGETEKTAQDTG

SEQ ID NO: 295197 - protein, 122 aa, Zea mays
  Clone ID: MRT4577_3229C.1.pep
LEAGRGYRAVLSPSWTLLCGDGSRRPPRRRRSAGGLTSQYVRLRVRSTYRYWSFTSVRSISVPSRDLVSITESRPHCTPDNVIRLSIERNGPDRAAVPGSGEQEVEIEVISPNEGGRRIFTS

SEQ ID NO: 295198 - protein, 44 aa, Zea mays
  unsure (1)..(44): unsure at all Xaa locations
  Clone ID: MRT4577_322C.1.pep
SVXTRKNMLQRTASTLLVTSGDIHPDLFKLRRLAWLAWTTVAAP

SEQ ID NO: 295199 - protein, 58 aa, Zea mays
  Clone ID: MRT4577_32300C.1.pep
LHTPSPSTLLPETHGSDIALASTTAAAVRRDASSISSKASYMVPTCVVVTRAPGRPRG

SEQ ID NO: 295200 - protein, 49 aa, Zea mays
  Clone ID: MRT4577_32301C.1.pep
CVLCKWCALPAGGDAPPTFGVNKGGLCILCQIVAHSPCGHINTKLFCPV

SEQ ID NO: 295201 - protein, 60 aa, Zea mays
  Clone ID: MRT4577_32302C.1.pep
SSDIGVQFFFLHMCIIMWRCHLFVETTYLEDRFMVTLCVVAYSTLVSYILCRPKCPKPNL

SEQ ID NO: 295202 - protein, 134 aa, Zea mays
  Clone ID: MRT4577_32303C.1.pep
MDHLPLTSPAAPAVAASLLPSQGGGRVLDAYKTTLATAASGAAYAVMARSMARELLPDELRAAWRWCAVFARARFGRGEKERHTIAIRDQVDTGYRENRLINDGRAYGALGNEPKADPTYLAACTTTTHWPPTA

SEQ ID NO: 295203 - protein, 64 aa, Zea mays
  Clone ID: MRT4577_32304C.1.pep
KREEGGWQMDRPGGRNLKSRRDEALQRGCEPAKRESAQRLGRSVRAGFFQIKRAKKRGKGRKLS

SEQ ID NO: 295204 - protein, 83 aa, Zea mays
  unsure (1)..(83): unsure at all Xaa locations
  Clone ID: MRT4577_32305C.1.pep
PXTAEMYNPRGGGAGXPPRRRRRPRASRPRRTLAATTLAPRRPRGRLQRASPGQRRPRVWGTVPPPTTTLPRXSFVGXGGGGG

SEQ ID NO: 295205 - protein, 187 aa, Zea mays
  Clone ID: MRT4577_32306C.1.pep
MDMDMEMPDPDELEWMESHGLVPEEEDAYFDDPDEGFVLAPGDSDQPCNSPQPQESAAPRANEAPGGLKRPPPPPPPEQDEEEERSKRRNVEQEDEDWLRYSPPPAPEIVVAEKTILRFASEIHGDSVPVTAPNGERVYAKLAMEGVVGRGISGTRQGVQFCNPYSNHKGLLSESFDSLTRRAEQEA

SEQ ID NO: 295206 - protein, 62 aa, Zea mays
  unsure (1)..(62): unsure at all Xaa locations
  Clone ID: MRT4577_32307C.1.pep
MAAKIFCLIMFLGLSASAATASILPQCSQAPIGYLVAPYLXHRCIXVCENAIVVPYRKQQVK

SEQ ID NO: 295207 - protein, 110 aa, Zea mays
  unsure (1)..(110): unsure at all Xaa locations
  Clone ID: MRT4577_32308C.1.pep
MIISQGATRNQDHELHSIKTVQHTLISCYLEQLIFWGRLQHYSQFPNLNDYLAFMLAPGEGKSIEAXQAVGLLLKNNLRTTYNSMQPXSQHYAKSEVLPYIGATNMAFRT

SEQ ID NO: 295208 - protein, 150 aa, Zea mays
  Clone ID: MRT4577_32309C.1.pep
LRNKLHTGQQLLRTSEPWRGGRTARVVTSTGGGTYQLKQIDLGTGEKINTSRNTCATTPFSYLWTEFVSREETFTEPNQRVVYIWAGITDYVGRHMELDHNLVNMNSGACQHSSTAGATQRGSHAHILCWLTCTVQRNTEPGQALHQNIT

SEQ ID NO: 295209 - protein, 156 aa, Zea mays
  Clone ID: MRT4577_3230C.1.pep
NLKRSSLSKKLVNRAQKWQIPFSLRNQRRNEPRQIWSSTVAAKGNIWGANRKEMIIILRRRSTLAHSSVLKWRHHELTPALQTEKITREGQKKRIHRFLSYSYPAPIVSCLQPPIYPPFFPPSPVHTRSFFFLINKNRFCLFVSGGGKNRPLVSKA

SEQ ID NO: 295210 - protein, 79 aa, Zea mays
  Clone ID: MRT4577_32310C.1.pep
RAVRNQFPSHRLCPLLLKCVAQRQPLFCVRVSFTNSSHATAPVGLVYRLLLTVVSSLLNALSCQFRYSLMPNHHECFSA

SEQ ID NO: 295211 - protein, 62 aa, Zea mays
  Clone ID: MRT4577_32311C.1.pep
VLFFYVSVFFYFFSFFGRAPTMTKLPFKGSRGVEIIFYNQNAWVFFNRIPRPHVKLHCLGGL

SEQ ID NO: 295212 - protein, 88 aa, Zea mays
  Clone ID: MRT4577_32312C.1.pep
TRRCPSHATYHRPGAGTATRVVSLPPCCSLDLVNCITEGGLKSGWPLDCSYLLIFTQAFETTTKHRSCKARLPTTVSKHQNLAGLGPV

SEQ ID NO: 295213 - protein, 258 aa, Zea mays
  Clone ID: MRT4577_32313C.1.pep
MKIIPVPCLDDNYAYLIVDESTKKAAAVDPVEPEKVLKAAGEVGAYVDCVLTTHHHWDHAGGNEKMRLQVPGIKVFGGSLDNVKGCTDQVENGMKLSLGKDIEILCLHTPCHTKGHISYYVTSKEGEDPAVFTGDTLFIAGCGKFFEGSAEQMYQSLIVTLGSLPKSTRVYCGHEYTVKNLKFMLTLEPENEKTKQKLEWAEKQREANQPTVPSTIGDEFEINTFMRVDLPEIQAKFSVNSPVEAMREVRKTKDNWRG

SEQ ID NO: 295214 - protein, 80 aa, Zea mays
  unsure (1)..(80): unsure at all Xaa locations
  Clone ID: MRT4577_32314C.1.pep
LAGVFPKPMTIKILAINSIYGRKLADTRTTVRYILMPMSADQMDMFGDKHLYHDLDLIDITTGQWDLYXFDAHSSYNRIQ

SEQ ID NO: 295215 - protein, 185 aa, Zea mays
  unsure (1)..(185): unsure at all Xaa locations
  Clone ID: MRT4577_32315C.1.pep
ACVYRARYYTVDLCFLFATSKLQRLTLYYCLLVLLALRDLIXHATVLPNCXHGTIDGVLLPYRGWMIATKWENRPLXPYMLERAMACRNFPVXHLLLQQLPALMLCGSSVQTIKAQDVQQLKLPVINRVALADLASYCQQQQLVAFNQPASTICYHLIAKNQHCWSHLLDGKCSILQHLRSDTDM

SEQ ID NO: 295216 - protein, 371 aa, Zea mays
  Clone ID: MRT4577_32316C.1.pep
MPRGAVSANSVATPVDGGYGDDNQKLTLIKLASMIEVAAKKGARDLNLQGKLMNQIEWLPDSIGKLTGLVTLDISENRILALPEAIGMLSSLAKLDLHANRIAQLPESIGDLSNLIYLDLRGNQLASLPASLGRLVKLEELDVSANHLTSLPDSIGSLTRLKKLIAETNDLDELPYTIGNCVSLVELRVGYNHLKALPEAVGKLESLEVLSVRYNTIRGLPTTMASLTKLKEVDASFNELESIPENFCFVTSLIKLNVGNNFADLQSLPRSIGNLEMLEELDISNNQIRVLPDSFGNLQRLRVLRAEENPLQVPPRDVALKGAQAAVQYMAEYVAKKATRSQPMKTKKTWAQFCFFSRPNKRKHDRIDTAS

SEQ ID NO: 295217 - protein, 251 aa, Zea mays
  Clone ID: MRT4577_32317C.1.pep
LLFVSSVRRIVDESTKKAAAVDPVEPEKVLKAAGEVGAYVDCVLTTHHHWDHAGGNEKMRLQVPGIKVFGGSLDNVKGCTDQVENGMKLSLGKDIEILCLHTPCHTKGHISYYVTSKEGEDPAVFTGDTLFIAGCGKFFEGSAEQMYQSLIVTLGSLPKSTRVYCGHEYTVKNLKFMLTLEPENEKTKQKLEWAEKQREANQPTVPSTIGDEFEINTFMRVDLPEIQAKFSVNSPVEAMREVRKTKDNWRG

SEQ ID NO: 295218 - protein, 77 aa, Zea mays
  Clone ID: MRT4577_32318C.1.pep
KFMLTLEPENEKTKQKLEWAEKQREANQPTVPSTIGDEFEINTFMRVDLPEIQAKFSVNSPVEAMREVRKTKDNWRG

SEQ ID NO: 295219 - protein, 260 aa, Zea mays
  Clone ID: MRT4577_32319C.1.pep
MTTATTPASVSASVASGGVSGSGSVGRPSPQNLSPLPVPFPSLSLSSAPFVISDDDEDVDEIVDPDGDSPIVDAPEVFSPPAPPALHAPAPAPPSPPPPITTPSQTPIPTPPSARTPTPTPPSARTPTPTPPSARTPASIAPPHPSPLSGRLRPVDEFLRRLGLLLRPDWLESCAAGIPGFDGLGGVEAQARRCFEQFLFADMNSCGAGVLPEGVGGMHAEFLDGPFVLQVDEVANISVPLKERYREAPAGPKRWLKLSM

SEQ ID NO: 295220 - protein, 124 aa, Zea mays
  Clone ID: MRT4577_3231C.1.pep
ACDYAHYRNKKRKERANALVKKHAGLPTSQLTKDYKKKLASFKQQAAKNAFDYPQPQQLLPFSQLAGVSPGTFLIQPQLLPLYHHAAHNAGTLLQLQQLVPFNQLAVTKKAGLYQQNIIGGALF

SEQ ID NO: 295221 - protein, 79 aa, Zea mays
  unsure (1)..(79): unsure at all Xaa locations
  Clone ID: MRT4577_32320C.1.pep
SDRAVLLPRDLLVQAXHDNTTHSLTQPSPSAGRPVVLEKRDVLRHSHSRLHDCSRFDNSALLERPLSSDSTDRPSAMLD

SEQ ID NO: 295222 - protein, 51 aa, Zea mays
  Clone ID: MRT4577_32321C.1.pep
AHHHIIPFYISSANTHKLSTTPSTQKNNISTKNPLPSQSNLKNSINITFYY

SEQ ID NO: 295223 - protein, 29 aa, Zea mays
  Clone ID: MRT4577_32322C.1.pep
KKQRKSYTFLLMKSTNTIDDIKKRYMKNR

SEQ ID NO: 295224 - protein, 68 aa, Zea mays
  Clone ID: MRT4577_32323C.1.pep
SKNSHIKTQTRTTLKSNRFYTKNRLNGILKHKCYSDTNTQLTRLHILPGLFSTTSLFIFLQTLNIMNH

SEQ ID NO: 295225 - protein, 46 aa, Zea mays
  Clone ID: MRT4577_32324C.1.pep
GRYSYGAAVNFRGVTSTNHMNYPPSNGCNIMKMQQIKPHDLFGRVG

SEQ ID NO: 295226 - protein, 53 aa, Zea mays
  Clone ID: MRT4577_32325C.1.pep
PDAPGDLLDGGILFSHGVHSLEQVYSISCSLIGREVVECLPHGRHDASSRRIL

SEQ ID NO: 295227 - protein, 72 aa, Zea mays
  Clone ID: MRT4577_32326C.1.pep
TGFPWWPSVPQVFFICNTTGSGGFCSFPNRPKLGRGPKRVKKCSPPLPGFYGGKSCFLQLFRLKIFSQCIIF

SEQ ID NO: 295228 - protein, 93 aa, Zea mays
  unsure (1)..(93): unsure at all Xaa locations
  Clone ID: MRT4577_32327C.1.pep
FLFKESNKTIFEEGEQSVRFCLNALIYRDXSQDIKVQGIIGTCXSLXKKGAMSSDTIVVQGNTSAWKTXGLDRRTGLTAFIDDSPSERIQPDR

SEQ ID NO: 295229 - protein, 970 aa, Zea mays
  Clone ID: MRT4577_32328C.1.pep
MHILSPATASTANAAFIHAAPVVIEEHWVCCDICQKWRLLPYEMNPSDLPKKWKCSMLQWLPGMNRCEISEEETTNALNALYVPAPANGIPAVGHPHVASTGLVTSSTPNMNGHIEQNRKRKNIPSDGNFVAEGSHQTQVSGHPMSNQHAPSKTKTYTDGIQYPAERDSVSKSVDPIIEKQRSKSKHHSSYSDGGDLVERPKKHSKVKSKRDLDHDEYKASKKKKKEERHHFDVDRILGSDLASGDVPDEAKALPAKSATSKGSGERTDLSSSKQKSASRHNRLETSKKARQDDLVGPEDESKGYFHQSDVQRSDLSSKKRIVKEWEESQHNSVAHVSKGAVKETYRDQNLKEAKLKSLNSEELFSMTSTKPPKVQHADQVLSYDGGRMNSELVEDNTLFSGKRGLPEQEKSLSDQALDLGEPASDVAYIQTSAVTSSSSKASVSQKKKQTTQAMKTSPIESLSSSPQRNSKIDKVSASHSRVSGKDGSLNANSSTVPTMAKQLNTEVRVASSDQWSSEPISVGSSRRKSDRDNGLVQLTQGHASDGIHLERGFNEDLQPESGRKDSNVKSSHIPKASHHLHSGEKNNYNTDGSPMQPGKHPVDPKTSVLDKCDSSMHESNKSTNSLQDRNGSTHCPPDGNPLLGLPSGKEKSYINSNKQDSQKPKPQMVCSPLKENKLDSHSTPLKPNGSKLTPQSRQYNAQNGGRHGTAKHAIPSPADTSSPARKDNTSTAYALKEARDLKHKANRLKGEGKELESTRLYFESALKFLHVASLLEPPSFDGLKQGDAAQSMYSDTAKLCNFVGHAYEKCKKMAAAALAYKCVEVAYLKAAYYKHPTASKDRQVLQAVVQTAPGESPSSSASDIDNLNNNGLSKASSSKDANSPQVAGNHLLLAARNQPHLMRLLAYTNDVNSAFEATRKSHMAIASAAGNHENGVDGLPSVKTVLDFNFRSVNDLLRLVRISMESISC

SEQ ID NO: 295230 - protein, 70 aa, Zea mays
  Clone ID: MRT4577_32329C.1.pep
HRTTADDIAKSVHHDGEQPNRATNAHIKSSPTLDTGLRFTIKGTLDQALTGTDLSALTAQAKNCTMGEWP

SEQ ID NO: 295231 - protein, 103 aa, Zea mays
  Clone ID: MRT4577_3232C.1.pep
IKDSHLPIYLPRERDERFSSIKYRGTQNELGEVFLLLLLQMTINDTTPTLPLQHVYDLHRAWTAHRREATPPSSERSPPTRIAEDSYQAIHSPWVVNASGKSA

SEQ ID NO: 295232 - protein, 139 aa, Zea mays
  Clone ID: MRT4577_32330C.1.pep
LHFLLTSIDCGFFTILYMIAWNGKHLRLDDKIKASEIVACRMKLTHMLIKSKQNSADPCNVVKKLDVNIKKYSVSSRKVITSKNLTMLMGLIDQEIEEINAKKRKRSGHPAGQPELKDDDGQLRANAVKARDAELGCEM

SEQ ID NO: 295233 - protein, 203 aa, Zea mays
  Clone ID: MRT4577_32331C.1.pep
MAPRPAPPLGQPWRPLPFSSHGRELHFPCRRAATSASKQPTPLASIDGRRPAQCPTPSPSQTDSDIHLPTPGEQQQITMAHFLSLLSMAPISSRVLLAAPLLHFFSLCSLCGVLTAPLPAFSLSPATSSKDSPLPSLLSDVPRVFNTMPARKMCCCSPVDARRVFAVFGADPLATSSTLATVKVALRALQFDEMLSHVDSPCG

SEQ ID NO: 295234 - protein, 36 aa, Zea mays
  Clone ID: MRT4577_32332C.1.pep
DSNQLEIYSYVPETVLTLLYMHNKQAMLTTAEIQNY

SEQ ID NO: 295235 - protein, 77 aa, Zea mays
  Clone ID: MRT4577_32333C.1.pep
PALHYVWHSCLRRNELYVCASSVCMFSLDLFSHYLILGLYSLFLCILSFFYFFSSLFFTFVVFFSLVLSLFFFNVIF

SEQ ID NO: 295236 - protein, 84 aa, Zea mays
  Clone ID: MRT4577_32334C.1.pep
RGQLYNDVQSTIASMGTYKKPKSSAYLTRGEAGQAQAPWKQGPTEPISAKRIEATRMKPWPRITVELTAAALSFMVLGKRPSKR

SEQ ID NO: 295237 - protein, 61 aa, Zea mays
  Clone ID: MRT4577_32335C.1.pep
KLGIRLEVSLLASGSKPVRQAHRPGICIELLADKGSRKRNHPMHPCGDPLVRRVRTNWGQY

SEQ ID NO: 295238 - protein, 106 aa, Zea mays
  unsure (1)..(106): unsure at all Xaa locations
  Clone ID: MRT4577_32336C.1.pep
LAVLVLVSVVLVVLAGVGCVADAAGPPRLPVGVFFVVALLSLAAVGFLRASLLVAPVCLPTFLRCSPSSAAXVLPRGPSDPFPQGGLVWGGVSIAWVAPVLPGRFL

SEQ ID NO: 295239 - protein, 122 aa, Zea mays
  unsure (1)..(122): unsure at all Xaa locations
  Clone ID: MRT4577_32337C.1.pep
MKKRAAEARPNLLADERDDIKVLQLSLRRIPASSRTKSRLLPMPHPRCMGTDGDCDCVISDDRTKSRSPSASELHESMSLQRLPDSEVMPLSTLRADYRPXESRRRLRVSHDLCVDERDILP

SEQ ID NO: 295240 - protein, 66 aa, Zea mays
  unsure (1)..(66): unsure at all Xaa locations
  Clone ID: MRT4577_32338C.1.pep
CVAAIIMLPPCLGTXXYVPXLLYAENLLCCXLAXELNPQIEVWFGEYKLXPKIGIGLXXKAQYXXY

SEQ ID NO: 295241 - protein, 82 aa, Zea mays
  Clone ID: MRT4577_32339C.1.pep
LYDFYGESWRALQAPIRYSGRDPRVRRPGRGADGGADSAVADGDVRSAGDDSMLVRCCRWCSLLKRLCAEVYPLASYLVRVI

SEQ ID NO: 295242 - protein, 160 aa, Zea mays
  unsure (1)..(160): unsure at all Xaa locations
  Clone ID: MRT4577_3233C.1.pep
EPLISKQWFVTMEPLAEKALHAVEKGQLTILPERFEKIYNHWLTNIKDWCISRQLWWGHRIPVWYIVGKKCEEDYIVARTEEEALAEAHEKYGKSVEIYQDPDVLDTWFSSALWPFSTLGWPDLSKEDYKHFYPSTVLETGHDILFFWVARMVMMGXEFT

SEQ ID NO: 295243 - protein, 52 aa, Zea mays
  Clone ID: MRT4577_32340C.1.pep
LAPCSFINLTVAAVPQKSTKVSLQGPSYFQSSRWQPWSRFRGSPPTLNSSSS

SEQ ID NO: 295244 - protein, 87 aa, Zea mays
  Clone ID: MRT4577_32341C.1.pep
TVQQSSLQQITCLGRHRLRIRAQSASVTTCPVKRDTNPRTNSAVPRNTGEGDAFLAALGEEAAAPPPPEWSIALPRQASKTKPGSKA

SEQ ID NO: 295245 - protein, 134 aa, Zea mays
  unsure (1)..(134): unsure at all Xaa locations
  Clone ID: MRT4577_32342C.1.pep
SDPRSNSESARGREVLRMRGTISREHXWEVRADLYFYXGPEEIEKDEQAAAEKAVTKEEFQGEWTAPAPEFTAAQPEVADWSEGVQVPSVPIQQFPTEDWSAQPATEDWSAARTAQATEWVGAXTEWSELSAGA

SEQ ID NO: 295246 - protein, 124 aa, Zea mays
  Clone ID: MRT4577_32343C.1.pep
HASEIEPGNASALTHCGMIYKDEGHLVEAAEAYQKARMADPSYKPASEFPAIVLTDLGTSLKPAGNTEEGIPKYCEALEVDNHYAPAYYNLGVVYSEMMQFDMALSCYEKAALERPLYAEAYCN

SEQ ID NO: 295247 - protein, 88 aa, Zea mays
  unsure (1)..(88): unsure at all Xaa locations
  Clone ID: MRT4577_32344C.1.pep
SALLKPTSIVEPDVAAVAANKSTFHKYSYRGVXDLDALLDMSTDYLVQLLRGRTRRRFQTRLKRKPMALIKKLRKGKKDAPACEKPEP

SEQ ID NO: 295248 - protein, 126 aa, Zea mays
  unsure (1)..(126): unsure at all Xaa locations
  Clone ID: MRT4577_32345C.1.pep
PPKPGGPAGXAFLPFTRPLRSVSGPGPARGGFQPXGAAGGVXIRDRGRGASGTGSSPRDLKRGVGNLPVSGXSAQLAGLFEQAGSVXRGEGGYYRMTGRSRRFXFVTMASXXEAGAAVQQFNGYTF

SEQ ID NO: 295249 - protein, 197 aa, Zea mays
  Clone ID: MRT4577_32346C.1.pep
PRVRSAALNSLFAIGCASGAFIGGVIADHLSKYFPDSARVMCAQFSAFMGIPFSWILLTVIPQSVDYWYAFAVTLFFMGITISWCATSANNPMFAEVVPPKHRTMIYAFDRAFEGSFASLAAPAVGLITEKIYGYDTKTVNLANGSAEGAYALSRGLLTMMIVPFGVCVLFYSPLYLVFKHDRENAKFASFKEQELV

SEQ ID NO: 295250 - protein, 145 aa, Zea mays
  Clone ID: MRT4577_32347C.1.pep
MAAAPKSIERLPARRVVPAEPTPAGPLRLSWLDRYPTQMALIESLHVFKAAPDRPAAAGASPAGTIERALARALVHYYPLAGRLVLSESGAQQAVDCSNAGVWFTEAQAGCTLEDVDYLEAPLMVPKDDLLPPTPAGEDERALGL

SEQ ID NO: 295251 - protein, 334 aa, Zea mays
  unsure (1)..(334): unsure at all Xaa locations
  Clone ID: MRT4577_32348C.1.pep
LNSARGPFFLFSFFGPRAPPRLSHHGLRRRRPLPEPLLAEPPPPPXASSPRRPSSSPHRRPPXADLSRLKSSIRDAATTPDALATLFLSGLPHPAFLADRPLFALSVHRLASAGRRDLVASVLSSSLTALPSPHPSEGFLLRLISLYSAAGMPDHSLAVFRLVKPASDRALSALLSAYHDNRLYDRTVRAFNTLPAELGIKPGLVSHNVLLKALVASGDVAAAHTLFDEMPDTAGVQPDIVSCNEILKGYLNAGDADAFDRLVKEIAGPKRRLKPNVGTYNLRMALLCSKMRSFEAEKLLDVMGANGVPPNRTSFNTVIKGSXXRGEVGAAMAL

SEQ ID NO: 295252 - protein, 49 aa, Zea mays
  Clone ID: MRT4577_32349C.1.pep
NQICFTKWGGISKRVFLRGKKKKKKKKKKKKKKKKKNQTEKKKKKKKKK

SEQ ID NO: 295253 - protein, 463 aa, Zea mays
  Clone ID: MRT4577_3234C.1.pep
AWEVLQTGSKARVVGSTNANEHSSRSHCIHCVIVKGENLMNGECTKSKLWLIDLAGSERVAKTDAQGERLKEAQNINKSLSALGDVISALATKTSHIPFRNSKLTHLLQDSLSGDSKTLMFVQISPNENDVGETLCSLNFASRVRGIELGQAKKQVDIGELSRYKLMVGRAKQDSKNKDAQIKSMEERIQILEAKNKAKDLLTMNLQEKIKELESQLLVERKIARQHVDNKIAQDHLQKQHGMKEENSYPRSPMAERNLNSTAEKAAAPKDLGGISKQMFSDSNTDTYSFKQLMSLGDEKENDPEAAVQLPPTTKARRVSLCNGGAHQRPLNPASRRTSLIPLPRRNSLLPMPVAKPAAAVLPLDKITENLSSPPLCSPPAVSNDRGSRSRRINSILRRSLQKKVVIRPSLAAQAGKKTAGAAAAARGTDSARRAARRVPVSDGAGGHKVQQNRDKERGWSNF

SEQ ID NO: 295254 - protein, 375 aa, Zea mays
  Clone ID: MRT4577_32350C.1.pep
MARLADLQRKIDEASEEVRHLTQDEQNRRPQYRELHQEGFVNEDDWYEDFHHGNFAFDDTSPLLAELQATPWPPSYKPLQLPMYDRHSDPKQFLMSYEATISSYGGNTAVMAKSFIMAVKNVAQTWYSSLRPGMITSWQKLKDMLITSFQGFQTKPVTAQALFQCTQDHEEYLQAYARRFLRLRAQAPTVPNEIVIEAMIKGLRPGPTTQYFARKPPQTLEKLLQKMDEYIRADNDFRQRREEAYRFSEMTRGFGGRIHPRHVRSIHSTQNDDRGSQQQRPQYSSQASGQQQNYPWPPAQRGKEYVGNHPAVSVASASQPQASWQQPPPPPPMQPAYPQGQQPKGSQHNHQQRDFREQSEARTVNNTVPESKHIH

SEQ ID NO: 295255 - protein, 533 aa, Zea mays
  Clone ID: MRT4577_32351C.1.pep
MSGDHAKTEIVTGDKPASSGRTLSRESSHKHKEESSSSNKTHRKDDKKKMMKKVVYYETDSSSPSTSSSSDSFVASKRHERKKYMQRKKEKMARLADLQRQIDEASEEVRHLTQDEQNRRPQYRELHQEGFVNEDDWYEDFHHGNFAFDDASPLLAELQATPWPPSYKPPQLPMYDGHSDPKQFLMSYEATISSYGGNTAVMAKSFVMAVKNVAQTWYSSLRPGTITSWQKLKDMLITSFQGFQTKPVTAQALFQCTQDHEEYLQAYVRKFLRLRAQAPTMPNEIVIEAIIKGLRPGPTAQYFARKPPQTLEKLLQKMDEYIRADNDFRQRREEAYRFSEMTRGFGGRIHPRHVRSIHSTQTDNRGSQQQRPQYSSQASGQQQNYPRPPAPRGRGARGFGGRFGDQPRKIYCLFCGEDKGHTTRMCHVTIQKQKEIAEAAAQQSQPKQVMHTASYHSPYIPEYVGNHPVVSVASASQPQASWQQPPPPPPMQPTYPQGQQQEGSQHNHQQRDFREQSEARTVNNIVPESKHIY

SEQ ID NO: 295256 - protein, 98 aa, Zea mays
  Clone ID: MRT4577_32352C.1.pep
SQVLLTRRSSRWRSETSCLCLQERHRTPPRLMAHHLLHRAEAEGRGMRTSNTHKINRARLNCLARSGLAIPNLLETHLCCRHPPPPGGQRSSTSPMEG

SEQ ID NO: 295257 - protein, 49 aa, Zea mays
  Clone ID: MRT4577_32353C.1.pep
RRVAHGSSTDVGVELELVRGQYIVDRNVGTHAIFFRFGDTFGVCYNLPL

SEQ ID NO: 295258 - protein, 44 aa, Zea mays
  Clone ID: MRT4577_32354C.1.pep
SSSCSCAPELVTSECRWRAPGAPRGCFPHSRRKCTVSFPPPASP

SEQ ID NO: 295259 - protein, 67 aa, Zea mays
  Clone ID: MRT4577_32355C.1.pep
VSAEFVPKPSRNKILQEGDDSWAGWIPVTRGRANSALMIWEPSPSIELSVCTQFHFLFLFRALHNAG

SEQ ID NO: 295260 - protein, 38 aa, Zea mays
  Clone ID: MRT4577_32356C.1.pep
RHWHNRQQLATCIVQDDLMLRRADVVEQAFVFCCRLHV

SEQ ID NO: 295261 - protein, 133 aa, Zea mays
  Clone ID: MRT4577_32357C.1.pep
RATGETPQAQGPRRHRLGYGQSPGSISSSPRLPRYCRAAVLYSCFYSHLATCCFALIVVQACESETHLRSTGDVKEREATLNQLGATHARAGVFDAHFIGNLINTCLYTWGAMNLCKCKLDRTAYILQRSQVP

SEQ ID NO: 295262 - protein, 69 aa, Zea mays
  Clone ID: MRT4577_32358C.1.pep
CEDHCNFFTTKRHRCNEQQFDLYSLDIVPRLRHDVSPREVNDMKLNMIGKVDNVNSSLQQYGLFPLVIL

SEQ ID NO: 295263 - protein, 83 aa, Zea mays
  Clone ID: MRT4577_32359C.1.pep
ERRPWLGGEEKDCSPPIQRLPSPRIRTRAKKLLSYGSSATLKNSILFQNFSFLLSPKSTLFPTKFLGIIHTPYTQTHFLNDPS

SEQ ID NO: 295264 - protein, 60 aa, Zea mays
  Clone ID: MRT4577_3235C.1.pep
MIFIKKKKKKKKKKKKKKKKKKKKKKKKKKKKKKKKKKKKKKKKKFFFEKGTIWGPPFLR

SEQ ID NO: 295265 - protein, 48 aa, Zea mays
  Clone ID: MRT4577_32360C.1.pep
SPRTCAQNRARARAKRCGGLFCSSCTQQRMVFRGQGDSPVRLCEPSNS

SEQ ID NO: 295266 - protein, 197 aa, Zea mays
  unsure (1)..(197): unsure at all Xaa locations
  Clone ID: MRT4577_32361C.1.pep
ITAWNLEDNFATENKPEEHYGNLVSITEVNGKDFTGLQSSLSDHHYIGNEEIQRKVSGVSGIVEFDKETVKEILEEXIRKVYRTRDKQETITNSQVDQSQLILLEKYEVLKLENGEILRKCMQLVEDSSNVVIISTDGINHEKVDTNTTSSDFTFEANHYQKEVTEGISAAAFTAQCNQVKVTTCFGTATEEQHTHP

SEQ ID NO: 295267 - protein, 297 aa, Zea mays
  unsure (1)..(297): unsure at all Xaa locations
  Clone ID: MRT4577_32362C.1.pep
MESLASQARPAAVLWLAGFFXAARLHRVVSFCASSKALSIRIAQCFLLNGLIFLGSLLTLTSVVIPTLLWILPERCNQTAGHLCEHRAAISIYSFLRSGLVEIFYVFWFYPLYVFSFILRNIXARYNDIAKHALDVVKSKSLVLTQSLDAHNITETKEQPEGFDXVIGYIPYFGKAMNFLLLSLMYAYYCFEYKWNFFAVSLHERLDFFESNWAFFAGFGAPCVLPIFFFSPLISYGFLAILYPLFVLTAAGTQAEQVIDALKPAHEGKLQRIPVFFVAKRLTTKVLQLFPVAQKEQ

SEQ ID NO: 295268 - protein, 318 aa, Zea mays
  Clone ID: MRT4577_32363C.1.pep
MESLASQARPAAVLWLAGFFQAARLHRVVSFCASSRALSIRIAQCFLLNGLIFLGSLLTLTSVVIPTLLWILPERCNQTAGHLCEHRAAISIYSFLRSGLVEIFYVFWFYPLYVFSFILSTIWYNDIAKHALDVVKSKSLVLTQSLDAHNVTETKEQPEGFDRVALGIGEQVYSILLLTIFFVEVSVIGYIPYFGKAMNFLLLSLMYAYYCFEYKWNFFAVSLHERLDFFESNWAFFAGFGAPCVLPIFFFSPLISYGFLAILYPLFVLTAAGTQAEQVIDALKPAHRGKLQRIPVFFVAKRLTTKVLQLFPVAQKEQ

SEQ ID NO: 295269 - protein, 84 aa, Zea mays
  unsure (1)..(84): unsure at all Xaa locations
  Clone ID: MRT4577_32364C.1.pep
EVFIPAVKSLLVEVEPGVXTKIXRSNKKNPXXVTPFPESPHLPRFPNLPNISPKNVKTTHNVYISPLPPPKIYTLLSPSSNTYY

SEQ ID NO: 295270 - protein, 104 aa, Zea mays
  Clone ID: MRT4577_32365C.1.pep
LPPLTTTPILLPTPKKDKFTLLVNKRKNACSSTNSHSTLENRNITILCEYQTGWQTSFTTITGHQIRLTMDQDHYECILGLIRNFNMMTSSICIIKLELMEASE

SEQ ID NO: 295271 - protein, 86 aa, Zea mays
  Clone ID: MRT4577_32367C.1.pep
GGGNKPGGKPRVGGPPSKKQPVPHVVWTAQKLPRFSGKGPLWNKQKFQSFKGGLTGQFRLSKKKKKKKKKKKKKKKKKKKKKTPPH

SEQ ID NO: 295272 - protein, 104 aa, Zea mays
  unsure (1)..(104): unsure at all Xaa locations
  Clone ID: MRT4577_32368C.1.pep
MMDQLSLVPYDGVGGDAPGGKYKECMRNHPGGMGGQAFERWGEYIGFLPDTLKCAQCGCHRRFHRRALAAXSPCAPPXFFXPPPPPALSAPPQKFYHHHHQQGA

SEQ ID NO: 295273 - protein, 96 aa, Zea mays
  Clone ID: MRT4577_32369C.1.pep
LLFGVYRSVPRQGVPCIQYRLIMTSSVTALDGTITRSMTLSSDRYRTIFVIVLAVAYLLLHVMFLLVYVILMSKVLKIQKKLEILKNIYELCNFYF

SEQ ID NO: 295274 - protein, 62 aa, Zea mays; identical to SEQ ID NO: 229833
  Clone ID: MRT4577_3236C.1.pep

SEQ ID NO: 295275 - protein, 199 aa, Zea mays
  unsure (1)..(199): unsure at all Xaa locations
  Clone ID: MRT4577_32370C.1.pep
ADGHLTPGVSGVXEHPILQPYETQQALGGGIIPISPLPPTQTSAISQQTPGAHIVAQNIGAQHPQQRALANRGVYSQKQQFLTFNQLGAVNCALYVQQPQLPFSQICGVYPQQFLTFNQVTAVNSCAYSQEPHLLPFTQLCGESPATFVTQPQVVALYQHAAPNAGTLLQVQQVVTFNQLAVTNPTAFYQQPIIGGALF

SEQ ID NO: 295276 - protein, 68 aa, Zea mays
  Clone ID: MRT4577_32371C.1.pep
RCAPQKITRGSVKQSGQQMYARRRTFAAKSMICLGCCYNTFFPPVAIKRMSSASSRGAGPRNRRRSAS

SEQ ID NO: 295277 - protein, 81 aa, Zea mays
  Clone ID: MRT4577_32372C.1.pep
VFQVARGPKFSIVYMKNIFRSSKGPPGKKKPGKPAPPPKVGFPVGPGFRPGGPVFQCRGFLIPGKRGKEPFKTPFLGEPNL

SEQ ID NO: 295278 - protein, 189 aa, Zea mays
  Clone ID: MRT4577_32373C.1.pep
ERPPGQVQAFFFFFFFFFFFLFFFFLNFLKVGKTPGKPQTSPKNQKKEKKRKKETQKRAPTKAGPWGERKRKREKKQKEGQKKEPAGEGASGRPKRQQERQKKEGSEERTREQTKQHPEWEQKERGKTQRTRPRPRKGPPPGQSPAKWQPPPGEPRGEQTRAKPGPKGNPGRNRNPPTIPPQIPTRKNR

SEQ ID NO: 295279 - protein, 37 aa, Zea mays
  Clone ID: MRT4577_32374C.1.pep
TYASVRGGHTFQAAAAIGPATGQYQWQQLPERLVHQS

SEQ ID NO: 295280 - protein, 72 aa, Zea mays
  Clone ID: MRT4577_32375C.1.pep
MELVEAAAAPATCCGRDGRKLVRCPRLQLDTKTATAIEQSTGESIADSAAAAEGAMRVKIVLSKQQLKQVAA

SEQ ID NO: 295281 - protein, 73 aa, Zea mays
  Clone ID: MRT4577_32376C.1.pep
KVEVAIYTTTNILVPKLDAFNIHKLTTRANPLYAYTKLDASSAHFSYLLPCAPRLSSRLSLEIPVTRMILQIH

SEQ ID NO: 295282 - protein, 91 aa, Zea mays
  Clone ID: MRT4577_32377C.1.pep
KKPQGLKHPGGAFSWGENLPNHSTQPFPPSVLGGGTLSQHPFRAALFAPFSRIYPYTHPHTPYFCTKGGAPTCRFFGFLKLKFLEKKAFLT

SEQ ID NO: 295283 - protein, 109 aa, Zea mays
  unsure (1)..(109): unsure at all Xaa locations
  Clone ID: MRT4577_32378C.1.pep
MAVALQMANRTDEKVDKHRENYLGHSVKAPVGILXXGKDLYWYTRDKKSDTEDALXEEIKRXXFEEEQAMRKDIVLANNLXNRTEGNRLDKHEYAELIKRGSTAEDLRA

SEQ ID NO: 295284 - protein, 57 aa, Zea mays
  unsure (1)..(57): unsure at all Xaa locations
  Clone ID: MRT4577_32379C.1.pep
LPNSPTPSPREXTSCSGVYVMAASSMKDERVSEHFTKQENNYDNVPHLNTSAMEALQ

SEQ ID NO: 295285 - protein, 103 aa, Zea mays
  unsure (1)..(103): unsure at all Xaa locations
  Clone ID: MRT4577_3237C.1.pep
KENECIGRLRLWQXFFANPYEWWDNRRSKPXGQLPYFKHKDTREKIWLRPDDPPWVRKQLELYDLEVAENGHRCKSRLSKKQNWKTQDFDYFDDEEVQHLAEA

SEQ ID NO: 295286 - protein, 36 aa, Zea mays
  Clone ID: MRT4577_32380C.1.pep
APVWNSPALGQGWCRPAWYRVKEINRSKNQRDQPKS

SEQ ID NO: 295287 - protein, 147 aa, Zea mays
  Clone ID: MRT4577_32381C.1.pep
MTSAFLKGMEEANKFLPTQDKLVIDLDPPDDPNRFVLPTPAADKLAPGLNAAAPTVHVAVVVKEEEAILAAPDAAPGSGGAVLGRGRRNRFDDEEDLELQRRSSKQSALEGDGDERDVFEKYILASPEMCTEQMQKLRIAMQEAAAK

SEQ ID NO: 295288 - protein, 45 aa, Zea mays
  Clone ID: MRT4577_32382C.1.pep
KMQTPSIYEQGITVDIITEFSHSCLKDTNNKTESVCHPYEKDKWP

SEQ ID NO: 295289 - protein, 63 aa, Zea mays
  Clone ID: MRT4577_32383C.1.pep
FGSRLGDSRLVDKHLRALVNIMPLYPCYTSTQKIPAQTLQSESMPKDTDRLCLGCTRPTVIHS

SEQ ID NO: 295290 - protein, 87 aa, Zea mays
  unsure (1)..(87): unsure at all Xaa locations
  Clone ID: MRT4577_32384C.1.pep
PLPHGKLPSPSPPTSPLXPRPLRSAAPRVFEDVDEMRVLFVCCDRMEMVVRYGLQKDDDKEWNDVGTVFITYDQRHMCYLPVNISVA

SEQ ID NO: 295291 - protein, 99 aa, Zea mays
  unsure (1)..(99): unsure at all Xaa locations
  Clone ID: MRT4577_32385C.1.pep
LSSALLYSSFYGLGSLSLLWTLSLXXXXLXXSGSLWLALFSLXLSLCHXLELSXLREWXWGLLXRXTXVMAVWLCXGTXSLCLTGASWLTLXDCALSGX

SEQ ID NO: 295292 - protein, 76 aa, Zea mays
  Clone ID: MRT4577_32386C.1.pep
LFDGNMHRHAADWDCTASHHLNLSRLDICQLLTEPRGVADRRTGGGGRCDYAPLARRGCSSFGGGFRAAGSDVRPG

SEQ ID NO: 295293 - protein, 115 aa, Zea mays
  Clone ID: MRT4577_32387C.1.pep
GIRWISLQAASLGNNIGRGKGHTNKPLVDVFILSCSAFFKRAPQIVVERHQARLGDLQLPGVHFFGAGWPVTPRWCCPPRKPKLGRGHAGLSVPKQSFKAVFPPKKLRKEPTKDH

SEQ ID NO: 295294 - protein, 35 aa, Zea mays
  Clone ID: MRT4577_32388C.1.pep
YRFKKKKKKKKKKKKKKKKKKKKKKKKKKKKKNTQ

SEQ ID NO: 295295 - protein, 132 aa, Zea mays
  unsure (1)..(132): unsure at all Xaa locations
  Clone ID: MRT4577_32389C.1.pep
IRPDEQWTYYPCQTLLARMLVTNSMTCLSVPXISEDEWLKQXYRLTQFDGHADNTLDDVTDRLHDSKEHDFAWKNDEARLALDALKLIFDVWVLNHESLCDLERAXKRNRWYMXKCDAKDIVQMIDVAAQAV

SEQ ID NO: 295296 - protein, 84 aa, Zea mays
  Clone ID: MRT4577_3238C.1.pep
VLDRRVPVHAALVLCQASGVVDDMLRPRRAAADETHHLRLPPPAQPRHRLGGCFTSPASLQLLAPFTFACLLARQVNRSHRPHP

SEQ ID NO: 295297 - protein, 231 aa, Zea mays
  unsure (1)..(231): unsure at all Xaa locations
  Clone ID: MRT4577_32390C.1.pep
MQGRAMGTSRLVRARVACRKHGDHGEGAETARRAESEXARGNREQQPASKEXVDKGAGAAMEETGQSTGKGERCGEGGRTEGAGARVKAGAGARRRARAADKQSRRELRPDSAEEGXSRFPWPSKEPARVRXQRHSGAEFGEELDRARASRERGRAEEPRARPWKMGTSCRGARRGSNAGSSVGRAEEGGEEAEREGLNSRERRGEKLQQLIAEGGKICRELSAEGGVVSR

SEQ ID NO: 295298 - protein, 65 aa, Zea mays
  Clone ID: MRT4577_32391C.1.pep
FLFIVVTLYLWGKPSFERYNLPLFFEQMNGLIHICRFCSSDLKIKAHSVLSNDSVNIPLASHRGA

SEQ ID NO: 295299 - protein, 60 aa, Zea mays
  Clone ID: MRT4577_32392C.1.pep
VEISSHNRLYSTPCSIQTQVMFDRTECPITPTIRRLTSSGYILSRLLRKLAPTVQQETTR

SEQ ID NO: 295300 - protein, 47 aa, Zea mays
  Clone ID: MRT4577_32393C.1.pep
ELGASYRKIIFFGRKRKLNWVLVKGQRLFFFFLFFFFFFFFFFFVFF

SEQ ID NO: 295301 - protein, 53 aa, Zea mays
  unsure (1)..(53): unsure at all Xaa locations
  Clone ID: MRT4577_32394C.1.pep
SWPFYLLGLPKGGFKLGSKFEGHLSRLTKGPVPWLSPSGGNHAFSXLFGPTPF

SEQ ID NO: 295302 - protein, 202 aa, Zea mays
  Clone ID: MRT4577_32395C.1.pep
MVRRQSREGRGLGWPACCLGFLLKLLAFLQAFAAVSALIYAAWILSRWARHHQLHLRDLLSPDLWFPSLVMAAGIFYCLLLLAGYLAAEINTGCCLCFYTIPAMAMMLLEAALAAHLALNQHWIQELPEDRTGELHNLLSFIHNNLDLCKWAALAIFATQALSLLLAMTLRAMLSARTMDYDSDEDFVVIRRPLLVAQPPAP

SEQ ID NO: 295303 - protein, 105 aa, Zea mays
  unsure (1)..(105): unsure at all Xaa locations
  Clone ID: MRT4577_32396C.1.pep
TRSPPPPAPRPTPSPPSPHSPRPPYPRTPHAPGPXAPSPGPTSPLLWIPHGAQPSPSSPPPPRLICPPESSLPSILSARHKTWAHQAPAHHPKSLSCNTLSIHRC

SEQ ID NO: 295304 - protein, 72 aa, Zea mays
  unsure (1)..(72): unsure at all Xaa locations
  Clone ID: MRT4577_32397C.1.pep
QIKNLIEAPDQDFEREXLHGGVAKLAGGVAVHPGGSPTGTGLKGEELRIEDALNATQAAVEGGIVVGGGCTF

SEQ ID NO: 295305 - protein, 102 aa, Zea mays
  Clone ID: MRT4577_32398C.1.pep
PVIFAGGQDRYSTGSDSASFPHTTPSMCLNPDLEGPPLEAYTIQGQYAIPQPDLTKLHQLAMQQSHFPMTHGNTGFSGIESSSPEVKGYWAGLDASAQTTSH

SEQ ID NO: 295306 - protein, 68 aa, Zea mays
  unsure (1)..(68): unsure at all Xaa locations
  Clone ID: MRT4577_32399C.1.pep
KIHRTKQIDTMRCMKIHFQLKVNLAKGAFHLLCLTVVEQVVVVLLNRHGSSLXCFSSELIRELLARYD

SEQ ID NO: 295307 - protein, 293 aa, Zea mays
  Clone ID: MRT4577_3239C.1.pep
MLRRLVGGAAAVRSPLPPPFCRLLHNGGGGGGCSSGEPESVAYRMSMLRRPSTVSKKGLTWNWCSLIGRLAAPVRPIDTSFLEVPRAYTFLSVTLSSPAPSSSSSNINVTLQLTGELANVGLKHLKHDDLVYVSGHLGSYHKVSPSGERHIVYKIYVRELNYVVDQNKKPQNDADSTSPPSMTSVTLQMLKENECIGRLRLWQVFFANPYEWWDNRRSKPWANYPDFKHKDTREKIWLRPDDPPWVRKQLELYDLEVAENGHRCKSRLSKKQNWKTQDFDYFDDEEVQYSAEA

SEQ ID NO: 295308 - protein, 189 aa, Zea mays
  unsure (1)..(189): unsure at all Xaa locations
  Clone ID: MRT4577_323C.1.pep
LSIAEIGVFVLAYLRGSNLSPFSQFLPPAARSTRTTTPCRECISIHIGQAGIQVXNARWELYCLEHGIQVDGQMPGDKTIGGGDDAFNTFFSETGAGKRVPRRCFSLTLCTLLXSHDGVELSAYXRSLFRPEQLIRGNEDARNNYAGGHYTIGGQIADLCLDAVGNLDDHCTGLRRFLGLYXIGGGTPI

SEQ ID NO: 295309 - protein, 128 aa, Zea mays
  Clone ID: MRT4577_32401C.1.pep
MEARLEPRVRPRVRRTLYREAIRARHGEGNDRAMSYQKVPEFYPPPGYSHPHPPPQAPPQGPDYPPPQQPPAGYQGYFNDGQQPYGYPPPQGWPLFAAAAWWTSAAAAASDIHAPEARWVLASRHGNI

SEQ ID NO: 295310 - protein, 56 aa, Zea mays
  Clone ID: MRT4577_32402C.1.pep
LLFICSGTTRRHDRTKLAAYKYLRSKQCRLGALRAPTMGTPGVPTPNATVERPLTR

SEQ ID NO: 295311 - protein, 194 aa, Zea mays
  Clone ID: MRT4577_32403C.1.pep
MFLSLAQSPACAVVSFPWRSSSQLIPRVPSRCTLACHAAVPKVPLPIASPASLGDDPSKWDPAECDALLRGGEQVASVLQEMVTLMEDMEMDGAFEPVAVELVAQGVIGKRVDEMESGFLMALDYMIQLAQKDTDDERKSILEVIKQTVLDHLTKKCPPHVQVVGLLCQTEKKESRHELLRRVAAGGGVFKNDK

SEQ ID NO: 295312 - protein, 141 aa, Zea mays
  unsure (1)..(141): unsure at all Xaa locations
  Clone ID: MRT4577_32404C.1.pep
RGRSWKIGRTLEREAIRARHGEGDDRAMSYQKVPESYPPPGYSQPYPPPQAPPQGPYYPPPQQPPPGYQGYFNDGQQPYGYPPPQGGXPSRSPPPXDHHHHHHGHHHHHHEDDDCCLGFLKGWLAALCCCCMMDECCCCCF

SEQ ID NO: 295313 - protein, 88 aa, Zea mays
  Clone ID: MRT4577_32405C.1.pep
MVLLESAQFSTELIRLFQKCRTSGSVYITLKKYDGRTKPIPKKGTVEGFEPADNKCLLRATDGKKKISTVVSSKEVNKFQMAYSNLLR

SEQ ID NO: 295314 - protein, 72 aa, Zea mays
  Clone ID: MRT4577_32406C.1.pep
RSVCLIHTFCSQFVKQTPCSHVLCPPYINPFVGGLLLNIFKWVRKKDSADPSAVFVLRVLMSSPPIGLQQQK

SEQ ID NO: 295315 - protein, 42 aa, Zea mays
  Clone ID: MRT4577_32407C.1.pep
NIMFLMNAPWYHIRQVNPGLVVHCGTTDSGQCLITKGLMIPG

SEQ ID NO: 295316 - protein, 73 aa, Zea mays
  Clone ID: MRT4577_32408C.1.pep
GFAPRGVAADPGPFPGFFLGGPKRGPLAMFSMFGFFARPIVPGKGRFGPLVGGIADPVLIKAWAYASNLVPGI

SEQ ID NO: 295317 - protein, 73 aa, Zea mays
  Clone ID: MRT4577_32409C.1.pep
FPGVTLFFGLVIQFTCPSFYNWEEGKTCGSPNFFLLMNCQFFSLFLLALRPEVLVFTNIVHFKLPWAYSFSFF

SEQ ID NO: 295318 - protein, 169 aa, Zea mays
  Clone ID: MRT4577_3240C.1.pep
ARVMAIAGGALKTNITTLGPLVLPVSEQLLFFATLVAKKLLSAKTKPYIPDFKLAFEHFCIHAGGRAVIDELEKNLQLSPAHVEASRMTLHRFGNTSSSSIWYELAYMEAKGRVRRGHRVWQIAFGSGFKCNSAVWHALRNVKPSPDSPWEDCIDRYPVELVDGLPTQQ

SEQ ID NO: 295319 - protein, 283 aa, Zea mays
  Clone ID: MRT4577_32410C.1.pep
FSSVLGTKKQRGCCLNFIELGINQKDLSGLECPFTKQEVKAAIMDLNPRKAPGPDGFMALFFQKCWDIVKGDVMLAIKAFECCNVRNLASLNNAIIILIAKGADAEEAKDYRPISLLSFFAKIIMKVLARRLQPMMKDLVLPSQSAFIKGRAIHDNFVFVKGMVRSLYLKKIPSVMLKLDIEKAFDSVSWEFLIEVLTAKGFGQKWRNWIVAMLASSSTRVLVNGELSEKIFHHKGLRQGDPLSPLLFVLVMDLLDAMVRTTVQAGVLGPFSRCIPNLRSHYM

SEQ ID NO: 295320 - protein, 175 aa, Zea mays
  Clone ID: MRT4577_32411C.1.pep
MPRVDGGGLRLRKKCSSERGPDAPEGNRANQGVSRVADGEAKLTEATDAAGAQRRSWNGRRASVSGGGAAWLRTQGERWGEGARLRAQMSRGNWASGVRALKGRGCAEVAEKRANVGPSTARVRGRELRDEGGMTGGVRRPAREDVRVLEENDADRPGPPSSGRERGGRGLGLLG

SEQ ID NO: 295321 - protein, 34 aa, Zea mays
  Clone ID: MRT4577_32412C.1.pep
LRRSCKHCNVMLKGVIPQIQNLSSNLHELLNLGI

SEQ ID NO: 295322 - protein, 69 aa, Zea mays
  Clone ID: MRT4577_32413C.1.pep
NIFLFDKHPSHRYSIEKETWANNTKKILLTPSSTVVLEAHFYTRAFKKPDFTRNRFSFFFDGETRTSNT

SEQ ID NO: 295323 - protein, 62 aa, Zea mays
  Clone ID: MRT4577_32414C.1.pep
FRPAVRQDSSGRQNGPPYPRSAVPVAAGNAAIRGEIELNEETVCNDINYITSLRTHGAGTIV

SEQ ID NO: 295324 - protein, 79 aa, Zea mays
  Clone ID: MRT4577_32415C.1.pep
VGFFFFFVFFFLGAQRNDGRWSLSQFGWGTGKSSGNRGRVTGTVLLTHRGSGGCVDYYHRLLGACTVCWGQGHSLFTRP

SEQ ID NO: 295325 - protein, 59 aa, Zea mays
  Clone ID: MRT4577_32416C.1.pep
GWFFFFFFFFFFFFTTAMKHYITTRYLFLARRTCNLAFAYTDHIPRDQHSGVYTMHVDC

SEQ ID NO: 295326 - protein, 60 aa, Zea mays
  Clone ID: MRT4577_32417C.1.pep
KIYFIYKGLYYYRSPWLRTGAHLKLRVVNITILRGGNGAHTQTFYGPWETTWWGGLFWGG

SEQ ID NO: 295327 - protein, 84 aa, Zea mays
  Clone ID: MRT4577_32418C.1.pep
NATNKKEWREYLKQAVHSVAAICSMACLAVYRIPEVMIYSNLNCDLKMNVDHMLMMVLKHLLQVGLGLLVVKSLGPGCLFFEEG

SEQ ID NO: 295328 - protein, 77 aa, Zea mays
  Clone ID: MRT4577_32419C.1.pep
VPGPLFEFFFFFFFFFFFFFFFFFFFFFFFWGPTKKGVIFKIFPVKKNWGGGNYKNRPRAQFFGLFWGGPPRGKAQN

SEQ ID NO: 295329 - protein, 111 aa, Zea mays
  Clone ID: MRT4577_3241C.1.pep
AILSVSLADAGASSGCPVVDHNVTIPQDVRLSLLHSIDYLLFFAGCSFGPGAGPDPRPPKPPSIEPVTCGESGDLGKPAAAMTFVLPRAEVPPGDWASACRKVFQVPVLKG

SEQ ID NO: 295330 - protein, 143 aa, Zea mays
  Clone ID: MRT4577_32420C.1.pep
MALRAMRPLLPAATFVMVAMASWGAHGGASDDASSLLAFKAELAGSGSGVLASWNGTAGVCRWEGVACSGGGQVVSLSLPSYGLAGALSPAIGNLTSLRTLNLSSNWFRGEVPAAIGRLARLQALDLSYNVFSDHQSAVKTFS

SEQ ID NO: 295331 - protein, 85 aa, Zea mays
  Clone ID: MRT4577_32421C.1.pep
ASADPTRQRRCSLATHAAFAVWRIPAGARLHNRAPASSMHGVQRLDFADFSGLMPGSCSVSAAAREASFYHVLGAQLVVKATGDN

SEQ ID NO: 295332 - protein, 47 aa, Zea mays
  Clone ID: MRT4577_32422C.1.pep
SFGCEGLNLFLCHTTTSCFSVFPFLMPAIVLTGLWFSHLLPNYTSIL

SEQ ID NO: 295333 - protein, 89 aa, Zea mays
  Clone ID: MRT4577_32423C.1.pep
TAVTMTVETMEKMKAPPSPVQFLCVVNDTNVVCEIITLHVLVCIALYTCVAPSPVSQPSPLEYLCAASTLQCAFMYSIVVVKSHMVRCL

SEQ ID NO: 295334 - protein, 172 aa, Zea mays
  unsure (1)..(172): unsure at all Xaa locations
  Clone ID: MRT4577_32424C.1.pep
IFCLLMLLGLSASAATATIFPQCSQAPIASLLPPYLSPXXSGXVGGAILQPYXIQXAITTDILPLSPXFLQQSSXLLQXLPXXHLLXQNIRGQQLQHLGLANLAGYFXQQEVVPFNQLGSLNCGCYFEQQQLPFRQLPGGYPQXFLPFNQLAGLNCPGYLPGGQLLPFNQLA

SEQ ID NO: 295335 - protein, 66 aa, Zea mays
  Clone ID: MRT4577_32425C.1.pep
SNFIFYFVFFFFFFFFLYFFFFFYFFFFFFVFEDTNIIIILNGNIRVGTHNYIPILIFHLHHVHVI

SEQ ID NO: 295336 - protein, 74 aa, Zea mays
  Clone ID: MRT4577_32426C.1.pep
NWMGLNPKQVKLLKNFFPIPSNPCVLGITEQGLRIQISYLSKTSSRTGLVKRSSAMLISIFLASNCIGSPFLAP

SEQ ID NO: 295337 - protein, 103 aa, Zea mays
  Clone ID: MRT4577_32427C.1.pep
GWAWPPCPFLHGALPFWPLFRVWMEKRGVSKPLGEGKPKKSLPAFAFSVFSDAPKFTPGSFEIQQGFLVFAKFFFCLLVFCKPIFSIFKGGPFFLSHQSFFFS

SEQ ID NO: 295338 - protein, 133 aa, Zea mays
  Clone ID: MRT4577_32428C.1.pep
PGSSHGRSTRLLRHLHGGGGKAPKRYAPVVGTVFHQLYHVRRLHDYHTDLFRERKTFQLLVPAGRRQIYTCDPAVVEHILRTNFANYGKGSFNYENMTDLLGDGIFAVDRYKWRQQRKIASYDFSTRALRDFS

SEQ ID NO: 295339 - protein, 73 aa, Zea mays
  Clone ID: MRT4577_32429C.1.pep
DRDCDIVAVDVKVKGYHAYQLLKYSCGAIWRKDRDIPIKGPLTVRLTTDGGTKCVYYDAIHVNWKVNSGYTDK

SEQ ID NO: 295340 - protein, 35 aa, Zea mays
  Clone ID: MRT4577_32430C.1.pep
WLCVAVLWVSGTFPYEAREVSIFFWRCSKVDYGVS

SEQ ID NO: 295341 - protein, 520 aa, Zea mays
  Clone ID: MRT4577_32431C.1.pep
MGEAQDYYNTSTALAGAAAAGLALLAVCSYYLLVGRRRGKAPKRYAPVVGTVFHQLYHVRRLHDYHTDLFRQRKTFQLLVPAGRRQIYTCDPAVVEHILRTNFANYGKGSFNYENMTDLLGDGIFAVDGDKWRQQRKIASYDFSTRALRDFSGAVFKRNAARLAGIVSGNAASGQPMEFQGLALRATMDSIFTIAFGLDLDTLGGSAEGSRFAAAFDDASEFTLLRYVNAFWKAQRFLGVGSEAALKKRVKVVDEFVYKRIRERAQELSDSKLATEDTVPDSRQDMLSRFIHTATNESGTVDYKYLRDIILNIVIAGKDTTAGALAWFLYMACKHPEIQEKICQEAAKATSASETAGVDEFAQSLTDEALNKMHYLHAALTETLRLYPSVPLDNKQCFGDDVLPDGSSVSKGDIVFYVPYAMGRMEYLWGKDAEVFRPERWLDQDGEFQQESPFKFTAFQAGPRICLGKEFAYRQMKIFAAVLLRFFVFRLRDGDKASVNYRTMITLHIDEGLHLTATAR

SEQ ID NO: 295342 - protein, 84 aa, Zea mays
  Clone ID: MRT4577_32432C.1.pep
PGLIPGHLSATSTLLHDLWGTPSTIHTITASIELLTPFLVTRMLLKDPISAYLHSRKNQRNHGLLAAQPITGEGVVCQYMSATI

SEQ ID NO: 295343 - protein, 98 aa, Zea mays
  Clone ID: MRT4577_32433C.1.pep
VIYNKETGQILMFGWVTIITIDEADKAIDMFNRYDISVRLLNVFLSFSMFTIIVRPFLLIFLFFLSLFFLFFFLVFFLIFFFFFLIYYFIFFLYLFFF

SEQ ID NO: 295344 - protein, 163 aa, Zea mays
  Clone ID: MRT4577_32434C.1.pep
MLYAIIFIVIFVIIIAIYIVRVSVATSRRAKLRNADPETRAAMMPDRPTFIATAREVGDRVFGPNQHGTTYDHGMRYERSDTGTFGYAQTNDRRAAVSRQDPEGGDPELPAYNDSTTMPMPPPATYSSPITARHESRSTHVPAPAVGEAPPKYDQAPPIVRGL

SEQ ID NO: 295345 - protein, 93 aa, Zea mays
  Clone ID: MRT4577_32435C.1.pep
ACVCPSRAASAFHVGCVSQCARNEFSYSDGMHGSLRNIPEHVGPIVGRPVHHLSLAAFFFLRITRSLPTGPIDRYVYVYPEPIRQYDTHSSVS

SEQ ID NO: 295346 - protein, 60 aa, Zea mays
  unsure (1)..(60): unsure at all Xaa locations
  Clone ID: MRT4577_32436C.1.pep
MDAGDSVVYPLREFAXDSIRLVKRCHKPDRMVFTKVAARTAIGFVVMGXLXFFCKHIFIL

SEQ ID NO: 295347 - protein, 76 aa, Zea mays
  Clone ID: MRT4577_32437C.1.pep
IRLEPNPLRSSASLLSRPPTPTAPIHATASVLELPQRGREREREGGREGGRVPHSRCLSWNALAWPLFLFLELAGF

SEQ ID NO: 295348 - protein, 60 aa, Zea mays
  Clone ID: MRT4577_32438C.1.pep
MAPSTIRKALSAAKDQASVSLAKVASNIGPDLDVLIVKGTSHDDEPAEERHIREILHLTS

SEQ ID NO: 295349 - protein, 220 aa, Zea mays
  Clone ID: MRT4577_32439C.1.pep
MMAAELVKQYSNITLGEDNKICDIKQALKALRKKILSLDFDNSMHVHDPQDSFEYLEVLRKIKQLSEKLRTLDPGGEAKQLDELTVYAYEISEMAMARLEEEFIYLLTHFKQPLEQEVLSFRSTEDGSVEDFSSSSFSEEPSDGKATPNDISGGPEYFVPDLIQPGALSAVKSIAKFMFLNGYDKECLQAYINSRQTAIDEYFGSLRLEKLSIEELMNTS

SEQ ID NO: 295350 - protein, 499 aa, Zea mays
  unsure (1)..(499): unsure at all Xaa locations
  Clone ID: MRT4577_3243C.1.pep
MPTGGVFSGSVNLKHVKLGYRYLLDHLLTLLLVPVMAATALELARLGPGELLSLWRSLELDLVHILCSAFVAVFAGTVYAMSRPRPVYLVDYACYKPPGSCRVPFATFMEHTRLISDDDRSVRFQTRILERSGLGEDTCLPPANHFIPPNPSMEASRAEAQLVVFSAIDDLLRRTGTKPKDVDILVVNCSLFSPTPSLSAMVVNRYKLRSNVRSFNLXSGMGCSAGLISIDLARDMLQVHPNSNXLVVSTEIITPNFYRGSRRDMLLPNCLXFRMGAAAILLSNXRREAPRAKYVLRHVVRTHKGADDRAFNCVYQEQDGEGKTGVSLSKDLMAIAGGALKTNITTLGPLVLPVSEQLLFFATLVAKKLLVSAKTKPYIPDFKLAFEHFCIHAGGRAVIDELEKNLQLSPAHVEASRMTLHRFGNTSSSSIWYELAYMEAKGRVRRGHRVWQIAFGSGFKCNSAVWHALRNVKPSPDSPWEDCIDRYPVELVDGFPAHQ

SEQ ID NO: 295351 - protein, 211 aa, Zea mays
  unsure (1)..(211): unsure at all Xaa locations
  Clone ID: MRT4577_32440C.1.pep
SNVLLDEYFEAIXXXFGLAKLLDHRESHVTTAVRGTVGHIAPEYLSTGQSSEKTXXXXXXXXXVELVTGQKALDFGRVANQKGGVLDWVKKLHQEKQLGVMVDKDLGSSYDGVELEEMVQLALLCTQYHPSHRPRMSEVIRMLEGEPGLAERWEASQGNVDTPKSVSSELLPPKYVDFAAADESSLGLEAMELSGPSDRPSGRQDRRIEPR

SEQ ID NO: 295352 - protein, 66 aa, Zea mays
  Clone ID: MRT4577_32441C.1.pep
WSSCRCSLLGAAHLMSRPCHTAIECNNSARESSHRHVSSMSSINSNCLGPSLYLRTPRRYTVNKMV

SEQ ID NO: 295353 - protein, 109 aa, Zea mays
  Clone ID: MRT4577_32442C.1.pep
PGPAIGLSSTVLLVSPCLKPRSPDDALPCADRIPFSSLRGDGRRVEAPPPSFRASHLTRPAYLSRSMRWLYMVALPAVALLALAGLACWLLCRKSAVSTIGPWKTGLSG

SEQ ID NO: 295354 - protein, 61 aa, Zea mays
  Clone ID: MRT4577_32443C.1.pep
INAAKRHMDRRGPHGEPINESTSSNKHLWFVCHKSWLWLRWFNGPVVSYVLNPKLFCSSMA

SEQ ID NO: 295355 - protein, 99 aa, Zea mays
  unsure (1)..(99): unsure at all Xaa locations
  Clone ID: MRT4577_32444C.1.pep
EGTWTSTGTTCTRAGGGSAARLVSCWCSSSSLRWLVRXAGRPAAASVVAEWRRLSMVTSARRDRELDASIARSAACPKTGRVRWDARSSAACLYAPPLP

SEQ ID NO: 295356 - protein, 92 aa, Zea mays
  Clone ID: MRT4577_32445C.1.pep
AGTDTRAAPATANPAGIFVSGQAWMSLFSTVGLVLEGCQEQRREPSFGRTLAIRHACLVPVLLSMCWGTSSHGIVTRQASMIPVRQCGSPCP

SEQ ID NO: 295357 - protein, 510 aa, Zea mays
  unsure (1)..(510): unsure at all Xaa locations
  Clone ID: MRT4577_32446C.1.pep
MDASSSLSLLALVTILSLLHSATTDAAAGLPAARPSHRRLLLLHQPDTNLAALPPPARVHVVPVDVHVPSHGTGSFPAASPGPHGGKNGPSEAAPATPATAAYLSRSMRWLYMVAVPAVALLALAGLACWLLCRKSAVATIGPWKTGLSGQLQKAFVTGVPKLQRSELERACEDFSNIVVSYPHYTVYKGTLSTGVEIAVVSTMITSSKEWTEHSESCFRRKVDALSRINHKNFVNLLGFCEEEEPFTRMMVLEYAPNGTLHESLHAEDFERIAWRGRMRIVMGLAYCVQHMHELSPPVAHPDMQSSSVLLSEDGAAKIADMSVWHEVISQGKTTTNGDEQASSAGLLAGNVYSFGALLLEIISGKLPTPYPAHERSLQMTSVTSYRRNTVMFLTTRRRTPNGDVISLLLLLLLLLLLLPXLVERVTNDDRSVASLLDPTLGGDHREDELAVIGEVIRACMQSDPRRRPSMREVAARLREAVGISPVAATPRLSPLWWAELEVLSAAEAS

SEQ ID NO: 295358 - protein, 117 aa, Zea mays
  Clone ID: MRT4577_32447C.1.pep
KVILLLSRFVIPKLHEQQPSVITCRQLQPKLFLPAGPSATKHGPNSRLVYFITIHTITSYEFVSSTTTKLDSTPRDRQPHPVEAIHQALGKRLAIAFFSSKFPRIYLHHKHTNIYSK

SEQ ID NO: 295359 - protein, 99 aa, Zea mays
  Clone ID: MRT4577_32448C.1.pep
EGTWTSTGTTCTRAGGGSAARLVSGWCSSSSLRWLGRAAGGPAAASVVAEWRRLSMVTSARRDRELDASIARSAACPKTGRVRWDARSSAACLYAPPLP

SEQ ID NO: 295360 - protein, 135 aa, Zea mays
  unsure (1)..(135): unsure at all Xaa locations
  Clone ID: MRT4577_32449C.1.pep
MDASSSLSLLALVTMLSLLHSATTDAAAGLPAARTSHRRLLLLHQQDTNLAALPPPARVHVVPVDVHVPSHGTGSFPAASPGPHXGKNGPSEAAPATPATAAAYLSRSMRWLYMVAVPAVALLALAGLACWLLCR

SEQ ID NO: 295361 - protein, 74 aa, Zea mays
  Clone ID: MRT4577_3244C.1.pep
RARALIFAVMSTAASLTASALCTAASLVSLSLSMRASSLTLALALPSGSMRRMLDVITLPHRAPLSWTLCCLDA

SEQ ID NO: 295362 - protein, 191 aa, Zea mays
  unsure (1)..(191): unsure at all Xaa locations
  Clone ID: MRT4577_32450C.1.pep
MDASSSLSLLALVTILSLLHSATTDAAAGLPAARPSHRRLLLLHQPDTNLAALPPPARVHVVPVDVHVPSHGTGSFPAASPGPDGGEAAPATPATAAYLSRSMRWLYMVXVPAFALLALAGLACWLLCRKSAVATIGXPWKTGLSGQLQKAFVTGVPKLQRSEXLERACEDFSNIVASYPHYTVYKGTLST

SEQ ID NO: 295363 - protein, 64 aa, Zea mays
  Clone ID: MRT4577_32451C.1.pep
LFFFFFFFFWWGFFYFFLVFKNITKLTGGKKPVSGNDLIKEKLGIVHFSWIYIFFWGGDSFSSN

SEQ ID NO: 295364 - protein, 62 aa, Zea mays
  unsure (1)..(62): unsure at all Xaa locations
  Clone ID: MRT4577_32452C.1.pep
TPTRSARCADSTMNNMKADAVFKGLQVAIKCQNSNREYXTKAVSEIQSYRAFSVPLFGDLHG

SEQ ID NO: 295365 - protein, 137 aa, Zea mays
  Clone ID: MRT4577_32453C.1.pep
LIGNKEPNPKAGQLKIHYRPGRPDQRGNPNTRAAGTREAPPGTKPAVTMAKNVPRGKLESPHNPAQQTSRNPKVESRGRPRREPTNNKGRAPTARCPPGKPGGPPTLKKRPTPGKRGLAYGAPFPYRSRTRKPGRSA

SEQ ID NO: 295366 - protein, 131 aa, Zea mays
  Clone ID: MRT4577_32454C.1.pep
MASRMGMVAIVSLFVCALAASTSVNANVWQTDDIPVVNSNMVRHSNMERQQQQGGFIGHRPRLASFNRASNQDGDRKRTVPSGPDHMHHSIPSHTPQHPPVYVQALYEDDRSRTSSGPSKSIGPPPLSDRY

SEQ ID NO: 295367 - protein, 53 aa, Zea mays
  Clone ID: MRT4577_32455C.1.pep
SVRFFNYCRLGNDFSTLYYYTLTSFLQVKKKKKTKKKKKKKPKKVKKRAKKIR

SEQ ID NO: 295368 - protein, 33 aa, Zea mays
  unsure (1)..(33): unsure at all Xaa locations
  Clone ID: MRT4577_32456C.1.pep
TRPSRVLYSYRTLRDXGLGSFYRMKITYYYNSR

SEQ ID NO: 295369 - protein, 125 aa, Zea mays
  Clone ID: MRT4577_32457C.1.pep
MAAVEVCVKAATGKPDTLGDCPFSQRVLLTLEEKALLDELQALDEHLKAHGPYINGENVSAADLSMGPKLFHLQVALEHFKGWKIPENLTNVHAYIKAFFSRESFVKTKPSEEHVIAGWAPKVNA

SEQ ID NO: 295370 - protein, 65 aa, Zea mays
  Clone ID: MRT4577_32458C.1.pep
RPPSLQGWQQLSTLHVCQPEGGCIGHRNPRADGAQREDFLTKPKNSLPRAIDLQDLEVLLGSPYA

SEQ ID NO: 295371 - protein, 214 aa, Zea mays
  Clone ID: MRT4577_32459C.1.pep
MAAVEVCVKAATGKPDTLGDCPFSQRVLLTLEEKKVPYEVKLVDLDNKPEWFLKISPEGKVPVFNGGDGECIADSDVITQTIEEKFPTPSLVTPVEYASVGSKIFPAFITFLKSKDASDGSEKALLDELQALDEHLKAHGPYINGENVSAADLSLGPKLFHLQVALEHFKGWKIPENLTNVHAYTKALFSRESFVKTKPSEEHVIAGWAPKVNA

SEQ ID NO: 295372 - protein, 64 aa, Zea mays
  Clone ID: MRT4577_3245C.1.pep
MGIGVRFQEPTSPRCGVYGPTKPCLRAHYILFNEYLVCQKLCCFFGSCSMRQILGFLALGKSRE

SEQ ID NO: 295373 - protein, 87 aa, Zea mays
  Clone ID: MRT4577_32460C.1.pep
SFAAGVNAIGGGLKMNVGGNASCTTNCLATLAQAVHEGFAMADGLMTTVHATTAAHMTVDGPIVNACIGGQEAVQHIILTSTRSVNA

SEQ ID NO: 295374 - protein, 60 aa, Zea mays
  Clone ID: MRT4577_32461C.1.pep
VVVGCAGTRCPLSLAAAGGNDTGWPPGLMSWFKIFIATNETRWFLAQHSAAGDRRERQGS

SEQ ID NO: 295375 - protein, 214 aa, Zea mays
  Clone ID: MRT4577_32462C.1.pep
MAAVEVCVKAATGKPDTLGDCPFSQRVLLTLEEKKVPYEVKLVDLDNKPEWFLKISPEGKVPVFNGGDGKCIADSDVITQTIEEKFPTPSLVTPVEYASVGSKIFPAFITFLKSKDASDGSEKALLDELQALDEHLKAHGPYINGENVSAADLSLGPKLFHLQVALEHFKGWKIPENLTNVHAYTKALFSRESFVKTKPSEEHVIAGWAPKVNT

SEQ ID NO: 295376 - protein, 197 aa, Zea mays
  Clone ID: MRT4577_32463C.1.pep
MKLLNQPISPGGHLVPAQPSTTAAAGRSHAHCPRWQAQTLRRDSSYVGVEHIDGTTASVPVPVPVPVAAPFKPLTLDFLRSLLDRNCSMAPAVPVGEASAPPPPQMVALRVLVTSAVELDARQAERIARKMRRLTGFVDLKVETAVDASLIAGFVVCYGTDDSHVIDLSVRGQLAALKSRVDSIDQTAHAHGHPHHH

SEQ ID NO: 295377 - protein, 217 aa, Zea mays
  Clone ID: MRT4577_32464C.1.pep
MNILNLQPINPGGHPAFPAAKESGHLTPASVRFDGVPVPAQSHAHCPRWQAQTLRRDSSYVGVEHEGTRTTASVPVPVPVPAVAPVPAPFKPLTLDFLRSLMDRSCSMSPAVAEYGEDSAPPPPQMVALRVVVASAVELDARQTELIARKMRRLTGFVNLKVDNVVDASLLAGFVVRYGTDDSHVIDLSVKGQLAALQNRVDSIDHQTAHVHGHPHH

SEQ ID NO: 295378 - protein, 219 aa, Zea mays
  Clone ID: MRT4577_32465C.1.pep
MFLFFVLAAIDFELLLFTCRVAMKLLNQPISPGGHLVPAQPSTTAAAGRSHAHCPRWQAQTLRRDSSYVGVEHIDGTTASVPVPVPVPVAAPFKPLTLDFLRSLLDRNCSMAPAVPDGEASAPPPPQMVALRVLVTSAVELDARQAERIARKMRRLTGFVDLKVETAVDASLIAGFVVCYGTDDSHVIDLSVRGQLAALKSRVDSIDQTAHAHGHPHHH

SEQ ID NO: 295379 - protein, 234 aa, Zea mays
  Clone ID: MRT4577_32466C.1.pep
MFLFFVLAAIDFQLLFTCRVAMKILNQLISPGGHPVSFPPAAAKESGHLVPAQPTTTAAAGRSHAHCPRWQAQTLRRASSYVGVEHIDGTTASVPVPVPVPVPVAAPFKPLTLDFLRSLLDRNCSMAPAVPDGEASAPPPPQMVALRVLVTSAVELDARQAERIARKMRRLTGFVDLKVETAVDASLIAGFVVCYGTDDSHVIDLSVRGQLAALKSRVDSIDQTAHAHGHPHHH

SEQ ID NO: 295380 - protein, 87 aa, Zea mays
  Clone ID: MRT4577_32467C.1.pep
FCTRAEYCRVPARDKHRNLSAREEQRSSSAVPGSEDLPIRVLYQGGQTDIVGLNGHQRRDGCTHKRRRPVDQYDDKYVSANKTLAAS

SEQ ID NO: 295381 - protein, 35 aa, Zea mays
  Clone ID: MRT4577_32468C.1.pep
LDYLQQLTHSYTHIKTSLCEQCSRQCKQCFWVNYG

SEQ ID NO: 295382 - protein, 88 aa, Zea mays
  Clone ID: MRT4577_32469C.1.pep
NPERWGPYLLRFIYETKYNPAKTLGALNQQTNTVQETVVINQSITITNDGGGIPTVPPPPKTAGMRTARKLACHSNQNCLETTNTSPH

SEQ ID NO: 295383 - protein, 46 aa, Zea mays
  Clone ID: MRT4577_3246C.1.pep
LLIIAFSKFLYRKRWNGTQIFVAAQVWRLEFIYTYLCSTLAQTVND

SEQ ID NO: 295384 - protein, 90 aa, Zea mays
  Clone ID: MRT4577_32470C.1.pep
TAGVSGISESEVVVIDIVITFELVSTVYARRSDPKKGCLGTIVHMGTGLIGGGNILAGRLLSDGSMNPGCSFVPHVAGSYSRGNWLYWLG

SEQ ID NO: 295385 - protein, 85 aa, Zea mays
  Clone ID: MRT4577_32471C.1.pep
FSQLCPSAAAGAHGPRCVSLQLLLRHAWSCPWMAEKMSPHGHGYAKPPPMLRRTPTPTIPSSSTSRRRAASKERVTPKSTESLEG

SEQ ID NO: 295386 - protein, 468 aa, Zea mays
  unsure (1)..(468): unsure at all Xaa locations
  Clone ID: MRT4577_32472C.1.pep
MGGGRKRRRRDGSETPSMHPRNRYAAAAPDFAALAELYPSFRPFVFISGSGRASVDFTDFSSTRELTRVLLLHDHGVNWWIPDGQLCPTVPNRSNYIHWIEDLLSSDLIPPISSSSERVKGFDIGTGANCIYPLLGASLLGWTFVGSDVTNVALEWAKKNVESNPHLAELIEIRNANAAPSESETVVREAASEKILEPAEDVAMPKPHILVGVVKESESFDFCMCNPPFFESTEEAGLNPKTSCGGTAEEMVCAGGELAFITQIIEDSVSLKNSFRWFTSMIGRKANLKLLISKVREAGASVVKTTEFVQGHTARWGLAWSFIAPKPRKIVXAPVLQQKNTXSFMLQGLRREHGAFQILKSTEAFFLASNLSCKTDSSVFSVDVTLSDEQIEAAILHGDDYAGSLEDSSAKLQCVVKGISFRITVFEQIPGTLLIKGSLLNKALSGTFSSLFSRLEDALRAECLSKAR

SEQ ID NO: 295387 - protein, 63 aa, Zea mays
  Clone ID: MRT4577_32473C.1.pep
MAGGRVGHPPPKGPSVVKEIFFGLPLGLIGGGMWKMPPWTDQRKTGPFYNMLAKGQIRVVVKE

SEQ ID NO: 295388 - protein, 81 aa, Zea mays
  Clone ID: MRT4577_32474C.1.pep
MGGFCSKGSAVDKSPSDTTLGPGREVDRHDRLVVKEEKKAVVGEAAAKRMQEEQHQQQQQQQQPAAPPLPVSVSQTAVPGA

SEQ ID NO: 295389 - protein, 66 aa, Zea mays
  Clone ID: MRT4577_32475C.1.pep
ARTVRGTGPDGPRPGAGLGGSCWNLDLVPWGEKILRCSGSTGHPGRPQTTWSRLRIKRSNRGRSLG

SEQ ID NO: 295390 - protein, 114 aa, Zea mays
  Clone ID: MRT4577_32476C.1.pep
GAFCRVFLAKKRVTGDLFAIKVLRKADMIRKNAVESILAERDILISARNPFVVRFFYSFTCRENLYLVMEYLNGGDLYSLLRNLCCLDEDMARTYIAELVLALEYLHFMNVIHR

SEQ ID NO: 295391 - protein, 105 aa, Zea mays
  Clone ID: MRT4577_32477C.1.pep
AWKNVKPHGCPFWPPKFHLKPFVIGSTKKKNQIDSTSFPLKKGGIHGQWWAFFIYKAKFRGINTELFCLSIGTFNLCTFANNNLILRCNGSVTGRRIHKSKCRQF

SEQ ID NO: 295392 - protein, 80 aa, Zea mays
  Clone ID: MRT4577_32478C.1.pep
SARGAATAVFAAAGDRGGVGGLKNTVSCRGRASIPSLRTGWTQILLLQTPQAPPICPWSAMTLIGLLSDADPYAAIAACP

SEQ ID NO: 295393 - protein, 70 aa, Zea mays
  Clone ID: MRT4577_3247C.1.pep
GGKVGNLGGSVPLFREKTKVPVPFWGPFSQGALKVFPQKVFKKPPVRGWFRGVSPPKGPNVFWLPFFPLF

SEQ ID NO: 295394 - protein, 108 aa, Zea mays
  Clone ID: MRT4577_32480C.1.pep
PTRNGEPMERTRDKPGKFDRNPGGDPTFPKGGRLKKGGNKGKKVYRGKKETRQKIKKKTKPEHKREKPGGQKGGATPKKRGGAKGTFTNGKTGGPNGIKKKAKPREKG

SEQ ID NO: 295395 - protein, 43 aa, Zea mays
  Clone ID: MRT4577_32481C.1.pep
RKEIYAGASPINAPRSGPGGGIHISIPDHIQYFYLHIGWRPPL

SEQ ID NO: 295396 - protein, 92 aa, Zea mays
  unsure (1)..(92): unsure at all Xaa locations
  Clone ID: MRT4577_32482C.1.pep
KFYVGHVVMVTGGRNPARVGVFKNREKPKGSFXPLPVGGSLGPQFSPRLGNVFPLGKGNKPWVSLPKGKGIKFGLLKKQRKGDSPPQVFANA

SEQ ID NO: 295397 - protein, 80 aa, Zea mays
  Clone ID: MRT4577_32483C.1.pep
LQPEASVIHHILTQPNSQVLNRVLQNTGTPCILSMYNVLNRSFELHVVLLLSAQHNHRLLQNYASNQPSSIHIHLPSPEL

SEQ ID NO: 295398 - protein, 61 aa, Zea mays
  Clone ID: MRT4577_32484C.1.pep
ENIGGTYLKFRSSPQAYLHSNKGYQTMETMRTPLPKFTATNYCPAHKPDNTTTWHLRVSFA

SEQ ID NO: 295399 - protein, 53 aa, Zea mays
  unsure (1)..(53): unsure at all Xaa locations
  Clone ID: MRT4577_32485C.1.pep
AVVLIXSKLRNVRVTVQLHQNNVGTPICSSFPAPVSVAPKCLCMVKGSQSIGF

SEQ ID NO: 295400 - protein, 49 aa, Zea mays
  Clone ID: MRT4577_32486C.1.pep
SSPRGKGYIVRLHCYQCQTAHLPLTNKPYQYAYRSNLIRVRCTSATPTC

SEQ ID NO: 295401 - protein, 72 aa, Zea mays
  unsure (1)..(72): unsure at all Xaa locations
  Clone ID: MRT4577_32487C.1.pep
GAFLSGGPPGFFVYGYRLDYYYGPSDMFGFIQTFFFFGYKARLCXPFFLSLGGXGFRPPLFFFPPLYQSFQC

SEQ ID NO: 295402 - protein, 97 aa, Zea mays
  unsure (1)..(97): unsure at all Xaa locations
  Clone ID: MRT4577_32488C.1.pep
CEWQQLLPLNQGASLRCAVLLQRQQLPLSQXICAGFPPHSFPFGHLSGLCSSACLLQAVLLPFGRLCWVSPPTFWSLPHVVACYQHAAPCAGSALRL

SEQ ID NO: 295403 - protein, 63 aa, Zea mays
  unsure (1)..(63): unsure at all Xaa locations
  Clone ID: MRT4577_32489C.1.pep
MVKYSTEPSRPTKAAKAMGRDLRVHLLXTRETVFALRKLPLTKARXYLEDVSAHKQAIPVRRY

SEQ ID NO: 295404 - protein, 113 aa, Zea mays
  Clone ID: MRT4577_3248C.1.pep
TKRPAAVLTTFLSVDTSPRHKLPALSMMLITTMNQIPVYDTLLLLDSAGSGTRCPADAPLTPDIPPHDHGSKTLPHEFSHPGNLEENPTAGAAFNVIQMKSLEHLVYAPSDPS

SEQ ID NO: 295405 - protein, 125 aa, Zea mays
  Clone ID: MRT4577_32490C.1.pep
IVSPFAGSGKTPLAWALFVEQHGRESIFILCSPAPPPFRVWLNGPPGPPLLPVNFPPPKEGAERKTFFNQVTFLGGLFPFAFYIGPVDFVSGVPVVVFFFPNLKNIGAFRGRRFVFCSCESKGCK

SEQ ID NO: 295406 - protein, 158 aa, Zea mays
  unsure (1)..(158): unsure at all Xaa locations
  Clone ID: MRT4577_32491C.1.pep
ETTEQASTXTQKXXXGPXXKDXRGGRXXXXNXXPSSXGAXKXXGKGRGGGGGKXXGXXXXXPTXRXXXXXXTXRXEKXATXEENKXAXKAEAEGSPKGXXXXXEEDXXXTXXQXDSRXSXXXAKXGXAXNGNXXKXXXXDDNEXGXSTRXXDPXRHTN

SEQ ID NO: 295407 - protein, 55 aa, Zea mays
  Clone ID: MRT4577_32492C.1.pep
NKLFFVFFVGTIPCNKCPLFMLHKGGHLVGQPSRAFPVKLSSFSPRNYKLFSVFC

SEQ ID NO: 295408 - protein, 105 aa, Zea mays
  unsure (1)..(105): unsure at all Xaa locations
  Clone ID: MRT4577_32493C.1.pep
QHCTFLHYSQQHIQLPISHLPGVISSTFFTNSQLLSFLLPAAPNAGTLLHMWCELPFILHAFTDAVGVTTHHRAFIRWSTPSLSEXSIHSMSITSQSQYNVFVVI

SEQ ID NO: 295409 - protein, 171 aa, Zea mays
  unsure (1)..(171): unsure at all Xaa locations
  Clone ID: MRT4577_32494C.1.pep
IVLVREDGHIMLSDFDLSLRCAVSPTLIRSSNPDAEXEALRKSSQGYCVEPACVEPSCITQPSCAAPTTCFGPRLFSSKSKTKRDRXPKPEVATPISPWPELIAEPSDARSMSFVCYIVFPLVDFFEGYFYTFLKFTSVIQQVLIVLISCNAFAKHCHFFCIPSVQNWKSF

SEQ ID NO: 295410 - protein, 171 aa, Zea mays
  Clone ID: MRT4577_32495C.1.pep
MASKAMPQILPETPGIPGTKQCSKGAPPFELPQTNNSCASALTVLPGTTTDLSKSSHKPELNEQKPDHRLKEPVDAASVKFPVEPSKKAVAEHGSTNGGSTSFQTCGGTSQGQAKVSASAKAADPPEIGDRGNSGRCRPSTSSDISDESSCSSMSNSTKPHKANDSRWEAI

SEQ ID NO: 295411 - protein, 639 aa, Zea mays
  Clone ID: MRT4577_32496C.1.pep
MQVLMTPSSRAAHDAELRNRSARAPKATVGSLLAVRRPGALHRGLQAQPPTPALACSASSARPRELPETNDISATKQSSKSGPPFDLPKTSHSRASALTVLPGTTTDLSKSSHKPELNEQKPDHRLKEPVDAASVKFPVEPSKKAVAEHGSTNGGSTSFQTCGGTSQAQAKVSASAKAADPPEIGDRGNSGRCRPSTSSDISDESPCSSMSNSTKPHKANDSRWEAIQTVRTRDGVLGLSHFRLLKRLGCGDIGSVYLSELNGTKSYFAMKVMDKASLASRKKLLRAQTEKEILQCLDHPFLPTLYTHFETDKFSCLVMEFCPGGDLHALRQRQPGKHFPEQAVKFYIAEVLLALEYLHMLGIIYRDLKPENVLVREDGHIMLSDFDLSLRCAVSPTLIRSSNPDAEALRKNSHGYCAQPACVEPSCVVQPSCAAPTTCFGPRLFSSKSKKERKPRPEAATPVNPWPELIAEPSDARSMSFVGTHEYLAPEIIKGEGHGSAVDWWTFGVFLYELLFGKTPFKGSSNRATLFNVIGQQLRFPEYPAVSFSARDLIRGLLVKEPQQRLAYKRGATEIKQHPFFEGVNWALIRCASPPEVPKPVEIERPSNHPSSPSGAAADDASVGAPQKGVDGYLEFGFF

SEQ ID NO: 295412 - protein, 128 aa, Zea mays
  unsure (1)..(128): unsure at all Xaa locations
  Clone ID: MRT4577_32497C.1.pep
KDVMSKNVSIYKSQASALEAHASPNCKVLVVANPADTQCSYLERSGPSIPXKNVTWLAXTGHNMALGRIFRSLTVQSSDGXNVIIWXTXSRLQYPVFYHASVDASTAEKPVRQHFFDDEWVIWLLHKK

SEQ ID NO: 295413 - protein, 45 aa, Zea mays
  Clone ID: MRT4577_32498C.1.pep
LPSSFRKNWKGRNLVLGAKKGSHSCDCPKAPKEFFFVLSWPLSLN

SEQ ID NO: 295414 - protein, 207 aa, Zea mays
  unsure (1)..(207): unsure at all Xaa locations
  Clone ID: MRT4577_32499C.1.pep
PENTSRXIVXNILESTWPAGKQQQAPVCKIERVLKVQSSDRTLERFEQYKESVRERASSDRGRKNNPRCVADGNELLRFHCTTFTCSLGLAGSTALCRAPCKLCAIVRDGFRVDDDGKIATMGTSGRAHDMAQVLSESDGDKRAMLVCRVVAGRVKKKASDEKKPSEDSGFDSVSPSTEGVCSDLDQLFVFNQRAILPCFVVIYSGY

SEQ ID NO: 295415 - protein, 57 aa, Zea mays
  Clone ID: MRT4577_3249C.1.pep
VRFHAQKKTEMPRRCSSTYDCLGGAGHQFFKQMLLNSQGNSYSATTISSWIHTCCWL

SEQ ID NO: 295416 - protein, 331 aa, Zea mays
  unsure (1)..(331): unsure at all Xaa locations
  Clone ID: MRT4577_324C.1.pep
WGYPSSARLHNVSHSXTLDHKQEEKLFQDISTVLSELSQLHDGLSYPLDVEAGTNDISSNEIDWARKRNELLTKLQGLCKSIRVTLSNHVHREELELWPLFDKHFSVDEQDKIIGHIIGTTGAEVLQSMLPWVTSALSLEEQNMMLDTWKQATKNTMFDEWLNEWWKGPSTSSDPSDKASTPSEESHFQENLEQNDQMFRPGWKDIFRMNQSELEAEIRKVSRDSTLDPRRKAYLIQNLMTSRWIAAQQKSPQPSVEGHNGCTRRPGCVPSYRDPGKQIFGCEHYKRNCKLVXACCNKLFTCRFCHDKVSDHTMDKYLHYNHSFYRPHLSC

SEQ ID NO: 295417 - protein, 57 aa, Zea mays
  Clone ID: MRT4577_32500C.1.pep
MFENQKKWKRRKIFLINRGGFLGLYEKVDKWVSLVGNRKGMNVKEWVHRRNGIGNMF

SEQ ID NO: 295418 - protein, 160 aa, Zea mays
  Clone ID: MRT4577_32501C.1.pep
GSSSCIRYCSSRSSRMRKCSSTEQLLCNGALVRYPTLSSASRLGAILVFVMTWSPSLSFSSSESSQSLPVFAGGGGFSEAEEGTVVDVLLVLFRYPPVSRFNHHWTFRVPEPFPSSHIYGHTHLLSDIAGSWAFCGSGDTLLGASGGGECPVCKSSYSCP

SEQ ID NO: 295419 - protein, 88 aa, Zea mays
  Clone ID: MRT4577_32502C.1.pep
SSSQNREPYRGTREYPGGWRSCQTPEVAPLHSRRLPMRSESRLMEMAILYAIRRSLTVSIWTCLSEGPTLILYSTSRMSLRRCPQSAW

SEQ ID NO: 295420 - protein, 54 aa, Zea mays
  Clone ID: MRT4577_32503C.1.pep
FLQNNILNQAHCMFSRLNYEHCHQCSVQKPESLDLEAGKNDNINHIRGTIVVFT

SEQ ID NO: 295421 - protein, 119 aa, Zea mays
  Clone ID: MRT4577_32504C.1.pep
QMEFSLFAPPLYLTTSSKQRLFEHFWNSGGARIGEDGALGWSEWLAKDEESRQKLSMQENSQETETGGWSGWFDPSLGNTETNDLSNKSLEPSLTDGNDAEDLDAEDSPAQDDVESLLK

SEQ ID NO: 295422 - protein, 29 aa, Zea mays
  Clone ID: MRT4577_32505C.1.pep
VDLVDHATKLIIARQQYCINMSKRSLSMP

SEQ ID NO: 295423 - protein, 124 aa, Zea mays
  Clone ID: MRT4577_32506C.1.pep
TGGNSRAATPFRTALIPPAATYNYWPNSYTRLGLNMALEGFPNHRRLQNCSNPASMANQSFLGLKKFLAGSGNPSYPGGPFLNPFGFGKTKKEINDLNLKEIKNGRLAMLAILGYLIQGLVTAF

SEQ ID NO: 295424 - protein, 169 aa, Zea mays
  Clone ID: MRT4577_32507C.1.pep
MPALIFRRRAAAAAPKPIQQYLAGLSTAVEHVIPEDNGHIAGREENKKRWVELPPFAPLDANATARAISRGDGGEGACSNATAIRWVRHCCPHVPASLVQKLFRLRKVKKNLVTADTSSTDSITLQLRLRRVSAKDELVPGDILFLPVNIQESSVTEKTKKFGNKNEID

SEQ ID NO: 295425 - protein, 33 aa, Zea mays
  Clone ID: MRT4577_32508C.1.pep
HAYWNMHTALIFCKSTHAHAYSSSSNVLYLPSL

SEQ ID NO: 295426 - protein, 67 aa, Zea mays
  Clone ID: MRT4577_32509C.1.pep
TNSNQEGQELKRRGSTTQRQPHTKTGQKQQEHKAAPKRTKHAANKAKAAGTTRLTKLGEKSYTAQKP

SEQ ID NO: 295427 - protein, 187 aa, Zea mays
  unsure (1)..(187): unsure at all Xaa locations
  Clone ID: MRT4577_3250C.1.pep
ITLTAMYAKFGCIVSARTLFDRVPTPRVNVVLWNAMISGYSKNGLANEAVQLFKQTRKVARSMTPDSVTLRSVIVACAQLGSVELAEWMDCYVQGSKYRDDVLVNTALIDMYSKAGSIARAHTVFERMDVQERDVVVWSALIGGYGVHGHVKEAVALFDDMKHAGVKPNDVTFLGXLSACNHARAVD

SEQ ID NO: 295428 - protein, 73 aa, Zea mays
  Clone ID: MRT4577_32510C.1.pep
LSRSSSSKTVSITQQLQRARDMTARSERRECVCVTSGTSCREHHAENSACDEAERREQRSARQGEGRERRSAH

SEQ ID NO: 295429 - protein, 73 aa, Zea mays
  Clone ID: MRT4577_32511C.1.pep
MSSTDCGGGGGGAKTSWPEVVALSVEDAKKVILKDKPDADIVVLPVGSVVTADYRPNRVRIFLDIVVQTPHIV

SEQ ID NO: 295430 - protein, 179 aa, Zea mays
  Clone ID: MRT4577_32512C.1.pep
MAPTKSHVLLAALLTVVAAVGQTPRAAEGFNIPGLGSMLNPIPVVAGVVPCSIGSSINPALVPGFPNANVQLMCGGTVVANATTSITGSFILTPVNATLGLFSSMLSGQCNVVVTTPLVACNASLAGATGTLTAPLQLLGSGTGIAGGGSSTIIATIAGQPFTIINGLIIFTTGLSSLA

SEQ ID NO: 295431 - protein, 63 aa, Zea mays
  Clone ID: MRT4577_32513C.1.pep
PLEFFFFFFFFFFFFFFFFFFFFFFFFFFFLTSKNLNYPFMDFWGFPSQNPQRGFGGKLKLPS

SEQ ID NO: 295432 - protein, 92 aa, Zea mays
  Clone ID: MRT4577_32514C.1.pep
GRAPTVLVSFVTEPVECGHRQQPCYARPASTGSPLLRSFMAKYKRRAATYQYHTTPVDRRHPDPDRAARGHARLPFGYAVLLTSMVMTDDNL

SEQ ID NO: 295433 - protein, 80 aa, Zea mays
  Clone ID: MRT4577_32515C.1.pep
PRLPSCAGRRLLIVAYASRGQRVPTAVAAGGAKRGRWRPEPMARTLLAASIHHVRHGSDRRGLVKSSTAVPAATPGVMWP

SEQ ID NO: 295434 - protein, 53 aa, Zea mays
  Clone ID: MRT4577_32516C.1.pep
IRVYFFNNTCRQKRMKGSFGIRHYCAKLAPSKPNKGGPESFFWQRAKPLKNHP

SEQ ID NO: 295435 - protein, 73 aa, Zea mays
  Clone ID: MRT4577_32517C.1.pep
LVEHPGASVTRRMAGWHNPFFSFVTVIYIRLLRCLVKGGGGEFHMSRGMVYFVISALPIKKASYSPDLFCCSR

SEQ ID NO: 295436 - protein, 117 aa, Zea mays
  Clone ID: MRT4577_32518C.1.pep
SPWVGGFFHSGGPSGFPSGNRAVSAPQLTRVCSFIRPPRLFCLCLALVCCGHCEGMPIFPWNLVWGWVRLVWARACDATCVRAGGCGCPCCALCRCFARPVFAFLCPLANHCLLCGA

SEQ ID NO: 295437 - protein, 114 aa, Zea mays
  unsure (1)..(114): unsure at all Xaa locations
  Clone ID: MRT4577_32519C.1.pep
MGTSSVNCYCRPISPSRSCPLLALAHAGRDYYVIPITRRNNERRRTKKIARNPXGXATLLYYGNPALFESRGIAXYVLRKHTAHVLXAAKIXQTAMTDERLDVESHQLIPPVLA

SEQ ID NO: 295438 - protein, 71 aa, Zea mays
  Clone ID: MRT4577_3251C.1.pep
MEMKKVACAVIAAAASAIVVLAVEATVPAPTSASSAAFPAVGAVLGAAVSSFFGYLLHYTEMRIGGRGRGL

SEQ ID NO: 295439 - protein, 154 aa, Zea mays
  unsure (1)..(154): unsure at all Xaa locations
  Clone ID: MRT4577_32520C.1.pep
LRTIEESQQELXSFLIAPASGDDDIGFNVHKFXISDIQFLDRNLRGSSSXVQHRTRTYTKVHKRRAARRANDTDRQNAYXELXHDXDRXFGIEGHLINQNRPGWKLVYDDHYVDVPLVVDYPCEDFLNCARCIRILSPHDERXMMLXIDYGDSF

SEQ ID NO: 295440 - protein, 86 aa, Zea mays
  Clone ID: MRT4577_32521C.1.pep
IELSCSGDFIVCAGELGQIVLRSMHSLGIVWRYDGNGKTITSLAVTPEECILAGTKNGSLLVFSTETSLLRRGSMQRNKIKPSTSG

SEQ ID NO: 295441 - protein, 84 aa, Zea mays
  Clone ID: MRT4577_32522C.1.pep
YSIIRINKCIMHLYLYFLNNASISMNQKLSYVMTYQWRFRTYAYLLHSHTPPPTKSSVIRSSSIPIPLLPVRVCSLSSAIEGTF

SEQ ID NO: 295442 - protein, 82 aa, Zea mays
  Clone ID: MRT4577_32523C.1.pep
KLVRNEKYITYDLHVHLYYNMVTGTFKQVYVLEIDYKCRILINEALSFLQDFPQTTRKISYLLAKIWNRFDIWPLIGSLEEP

SEQ ID NO: 295443 - protein, 56 aa, Zea mays
  Clone ID: MRT4577_32524C.1.pep
GPPHPSETYPFLKEGLPLFFLKPNRPPRQVYLRRGPDMEKVKTLASGNFTGPLTLA

SEQ ID NO: 295444 - protein, 31 aa, Zea mays
  Clone ID: MRT4577_32525C.1.pep
TASILNNGRPLYICLKSVLYLTVSLDFFFVF

SEQ ID NO: 295445 - protein, 55 aa, Zea mays
  Clone ID: MRT4577_32526C.1.pep
GGRIRVASQARRLFLPQLSPLGEVYFPYCLRFLARYRVSSGPGIKSGLSFYVTPF

SEQ ID NO: 295446 - protein, 78 aa, Zea mays
  unsure (1)..(78): unsure at all Xaa locations
  Clone ID: MRT4577_32527C.1.pep
GLNSTFFKVADVYGVLQFKVQFQMLVFTGLFFTKHIPXRPYRHNEYDRYIRSGRAYYXAXFSTMCGFFILWLVCTDHI

SEQ ID NO: 295447 - protein, 285 aa, Zea mays
  Clone ID: MRT4577_32528C.1.pep
MSRRWSRTIYVGNLPGDIREREVEDLFYKYGKIVDIDLKVPPRPPGYAFVEFEDPRDAEEAIAGRDGYNFDGHRLRVEAAHGGRGNASSHDRSSGFGGGGGARRGVSRHSEYRVLVTGLPSSASWQDLKDHMRKAGDVCFSEVYREGGGTVGIVDYTNYDDMKYAIKKLDDTEFRNAFGRAYIRVKEYNGKRGRSYSRSRSPSRSYSKSRSPSKSPRTRRSSSRSRSRSVSSRSRSPSKGRSPSRSPARSKSPNVSPANGEAASPKKQSPNRSPSGSRSPDAKPE

SEQ ID NO: 295448 - protein, 235 aa, Zea mays
  unsure (1)..(235): unsure at all Xaa locations
  Clone ID: MRT4577_32529C.1.pep
EPQRRESSHSAISAILVLPLLPFFSHFSPPTPLPPFNHTTREGISNHIGXASIHSGNTXSQMNWLEHGIHADGQIXSDNTIAASDDAFNXFLRETGAAKHVPRAVFVDLEPTAINEMTTGIYSHVFHPEXLIRAKEXVCMNFSRVHYTIVKEIDDXMCLDRVMNLAKNCTARQGLLVXFKAAGGGRASEIVSLLLKSMSVEYGNNSWLGFTEDPSPQVCTYVPEAYNSVLSTHSL

SEQ ID NO: 295449 - protein, 139 aa, Zea mays
  Clone ID: MRT4577_3252C.1.pep
SQPFFFFFFFFFFFFFTGFYFFFFFFFPPTANPPNRDPKTKPRKRPRPKPKTPKRHQTEDQRPPQRRTQTLRGRTSTKATGGTMGSTQKAPPPAAPKGKKKNPEDRKTELKPPKQGRPHNSNHKHKRHEATLQNQPATP

SEQ ID NO: 295450 - protein, 122 aa, Zea mays
  unsure (1)..(122): unsure at all Xaa locations
  Clone ID: MRT4577_32530C.1.pep
HQTEKFFFFKADRKEGVAGHLKXRTPTSPTNANKKLDAAYQDAYTQGSACPISLRYSPNTRAHFAGLTQMTGAAAFDNTLQYRPHDTLNHFFSVTLHILKDMLNNMVKHIILKNTVNKLSHK

SEQ ID NO: 295451 - protein, 45 aa, Zea mays
  Clone ID: MRT4577_32531C.1.pep
EGGNLIHDQILFMGTIIHWARFTNMFGGLLKFKKKNNQLAPDQQN

SEQ ID NO: 295452 - protein, 75 aa, Zea mays
  unsure (1)..(75): unsure at all Xaa locations
  Clone ID: MRT4577_32532C.1.pep
FAKATPLPPIAKIRTPRMILELRVMRNSVLPFESYKSLSLVEIFLRXSAKRSVLLDVYVSLFNGWGLPTLLDVVS

SEQ ID NO: 295453 - protein, 94 aa, Zea mays
  unsure (1)..(94): unsure at all Xaa locations
  Clone ID: MRT4577_32533C.1.pep
KILYSLKGTGSFDXRDQNDQWIRETEKKGGIFFFPAEMYPPFPLESANYIKPMLLFVGNPFWTPNNGPHNHLPEKKKSFKKITPRGGTQPVKPL

SEQ ID NO: 295454 - protein, 151 aa, Zea mays
  Clone ID: MRT4577_32534C.1.pep
MAQNVPDNYIPKYAQQDEWEDKELQKFAIEFYRISDKPEENQRWVDSFCEDARVQIGADKARGTNDLAQFRTRMWKLVKERKHTVLKVFPGRFPDSEPSESEVMILGEVGVTTTDGRLKQAAWSAHAVVKKVDGAWKFKEYRVWLQDEGLL

SEQ ID NO: 295455 - protein, 40 aa, Zea mays
  Clone ID: MRT4577_32535C.1.pep
SLEYADPSLKTYLLTLDYRLRRFFINIYPNPSHNITINLY

SEQ ID NO: 295456 - protein, 99 aa, Zea mays
  Clone ID: MRT4577_32536C.1.pep
HQPLMDLPPVLVCLMNHRHCSLWIFSASPRHPVVRYVSCSPGGWDVSSKHVECRAPLSNDGSHLCMMLPDDLAERYRCFWLLIVNGTSWSATSLIVFLL

SEQ ID NO: 295457 - protein, 101 aa, Zea mays
  Clone ID: MRT4577_32537C.1.pep
KSIPCTHSLLHDVKLKLQVFSVRAKKMIFLMRRRDPRSVGDPWPHTSREVHRGASDGGSRAQAMAPGERTSTAESEGREKSGCAMSCGGGGIVKTRARVRS

SEQ ID NO: 295458 - protein, 99 aa, Zea mays
  unsure (1)..(99): unsure at all Xaa locations
  Clone ID: MRT4577_32538C.1.pep
AKTGSAVVINAGQTNGAAGDLGCQDSTDSANAVAKLLNVSTNYILIQATDVNGQKIKKEALSNIITRPGASLASXVKXANSSAADITTTDLVSKSIAFH

SEQ ID NO: 295459 - protein, 39 aa, Zea mays
  Clone ID: MRT4577_32539C.1.pep
SSVPAVQPNTLPFLGFLPVQLHSVRLKRTQLPSLTVGFF

SEQ ID NO: 295460 - protein, 67 aa, Zea mays
  Clone ID: MRT4577_3253C.1.pep
MPQPQPQPSGGSPCLRTLCTLQLAVPAMARAPSSWTPHIAMALLDAADTAEDALAETDTEENGGGAC

SEQ ID NO: 295461 - protein, 77 aa, Zea mays
  Clone ID: MRT4577_32540C.1.pep
PRVRPRVRGRVGDRGQFCSITNYGQDPRLRARLDTNVMANLFECWPDMEYTISDCSQILLPFCFLGHFSLYVFNMNT

SEQ ID NO: 295462 - protein, 170 aa, Zea mays
  Clone ID: MRT4577_32541C.1.pep
MPLSPSRAAAATARLEAMQIGGYSGKEMRGEEHRAALRQKRLKKAKCFKWRPSKGDMDSKVEAGGAGSGQVCDDAVLCSLSTASFSGLVSWQRVRTLGKVAEGCDAADPPVPRKLRSAINKRAGRFTSAPSRHVKKRRHLSAISAQISSVGQETRSNGELVIYRTRRSNC

SEQ ID NO: 295463 - protein, 347 aa, Zea mays
  Clone ID: MRT4577_32542C.1.pep
MGARYLQNKRKQLLMFCCPCPKYPLTARSQPDKAVADSSNTNDASTSFSKGPTMEDDQTAVLPSAANELASQCACINKAVEQSNIVPNADQVAAAANQSSNSIPLLSANEQMQDLSMETAVNLPSPSKDTSINSVQKHHELQFDDSKCHPAQKPETPLWLVNSDQSEGVLLHEREKAKNNSAQEIVPLVQTLLPCTPAGYLVKPSSSKLAAPANTISESANFTTPGNQNKHPVLRNVGAPKAWKRSITHVYVSHVIQMHVNKEKAAASSSLQSQARPEERLLARCPRPPNGSSTTSHKAAAARDERLYTVHFDVRVPAHQPPAGICDAGAGRQKIVSGSSWQNLPAT

SEQ ID NO: 295464 - protein, 110 aa, Zea mays
  unsure (1)..(110): unsure at all Xaa locations
  Clone ID: MRT4577_32543C.1.pep
ERVGASGSHMSTEYRQVRARVQRARIGSVADSRRSKVIHYRAGHMLSYMMKQGMHFSTTRPSQVHPGRRXHKKKKKFLSPASPSNHTSARKARCMLSRPGFKTGCFGEIT

SEQ ID NO: 295465 - protein, 121 aa, Zea mays
  Clone ID: MRT4577_32544C.1.pep
MDGASKEPLRKDYYKVLEVDYDASDDTIKLSYRRLALMWHPDKHKGNSNATTKLQEINDAYKVLSDPTKRLEYDVSGCYEIDQYTLREYLTKFKGMILTCNGLGIDHSSKWARHLRELKPH

SEQ ID NO: 295466 - protein, 77 aa, Zea mays
  Clone ID: MRT4577_32545C.1.pep
HYILIIGMHRHYKRSGLCKSCPQRSCTRRRRISSMILLICLLVVFNLITMAHLPSCRVGAIGNNKAVLSVGVAFSIL

SEQ ID NO: 295467 - protein, 122 aa, Zea mays
  Clone ID: MRT4577_32546C.1.pep
MEFLSQMWSLLGLLTILQNVLPTQLLSLLHSLWQSLQDSLTPYSYFDVPEFLGSAAVEPNALYRHVQLYLHRSLLLSSPPPPRLTLSLPRSSAGSGGHAHGAALSPPSVSLSPNHSVADTFN

SEQ ID NO: 295468 - protein, 81 aa, Zea mays
  Clone ID: MRT4577_32547C.1.pep
RDPRWEDEFEFVCEDPPVNDKMHVEVISKPPKAGLIPGREPLGSIVFPLAQVFSPKRIIARSPLLASKNGPLQFGSQWRPS

SEQ ID NO: 295469 - protein, 97 aa, Zea mays
  Clone ID: MRT4577_32548C.1.pep
MDGASKEPLRKDYYKVLEVDYDASDDTIKLSYRRLALMWHPDKHKGNSNATTKFQEINDAYKVLSDPTKRLEYDVSGCYEIDQYTLRVRFSCPVARQ

SEQ ID NO: 295470 - protein, 57 aa, Zea mays
  Clone ID: MRT4577_32549C.1.pep
YIDQWHINAVFNSYTNTSILPPMIPIQETIASTANIKLTLSRSPYPKLASLQADEDS

SEQ ID NO: 295471 - protein, 68 aa, Zea mays
  Clone ID: MRT4577_3254C.1.pep
ILNSPIMITRSSLQINKTNIYVSLSHRKPNNILQITYSHNPLKYILLPTQKATMDGSVNACVNESMDA

SEQ ID NO: 295472 - protein, 145 aa, Zea mays
  Clone ID: MRT4577_32550C.1.pep
APPGGVWQANDGGHEAGDPVMHDNRRHRYLAFFYSNSASFVASVVVIVLRLPDSLHEKWWMDWWLGVMNTTIVLDLLGLLVAYAAGSSRSWKTSGYVSALVIAVLAYFVIHVVLSCFIRISKSRNTQNRGGTSQPNKQLQLAQIG

SEQ ID NO: 295473 - protein, 73 aa, Zea mays
  Clone ID: MRT4577_32551C.1.pep
LQTNFLASYSLVALVWETTHHGDTTYKRGTEKKAPTEWQQQQLSLRVRGKKRSFLMVGFGVSRCKPSLPLPLF

SEQ ID NO: 295474 - protein, 71 aa, Zea mays
  Clone ID: MRT4577_32552C.1.pep
HTMNGRVRTLLRVRFMMRWEHIMAQQHHTNNQHSTLIPARHHQGSRTEVKKKKKKKKGGCLRGLKSMHVRT

SEQ ID NO: 295475 - protein, 80 aa, Zea mays
  Clone ID: MRT4577_32553C.1.pep
KHTLMGLVFGRKILPLPCYHFQITGKPTLPLPFFLVCPKKKIKKWPPRCQLFQSVFFGLWQLPFLPVGKHIFLNGLSNLA

SEQ ID NO: 295476 - protein, 103 aa, Zea mays
  unsure (1)..(103): unsure at all Xaa locations
  Clone ID: MRT4577_32554C.1.pep
KFQVFFKEPPFSSIXSFXGASLPFFPTPPILFPRPQKAVRQRKPLKKGLPSPKKWPGFGFFKKPQSMVSPLCFLPPPPGPFPPPCSNFFFFINAPQKSPPPSL

SEQ ID NO: 295477 - protein, 164 aa, Zea mays
  unsure (1)..(164): unsure at all Xaa locations
  Clone ID: MRT4577_32555C.1.pep
KKKTKQDHRTRELTRTTAAPRQRRRRPGRQRATRATAXAGEPDXXERXNGQQRPNPXEXGXGPPGTNXTXXKRAXDEGGGADTAKTGFLDADNATNXTXXXAKXRAEPKGAARGRXXGRQNXEXXRDRXRETRPKEXKQXKKGXPDRXXXXASTEEHNKAAGQE

SEQ ID NO: 295478 - protein, 219 aa, Zea mays
  Clone ID: MRT4577_32556C.1.pep
MARSPPPSSSAGGAQYAQQFLNTALSQRGPSALPYAEDVKWLIRNHLVALAEAFPSLHPKAALFTHNDGRAAHLLQADGTIPIHHAGASYNLPAVIWLPEPYPRSPPLVFLSPTRDMVIKPHHRLVDSSGLVANAPYLRSWVFPSSNLVDLVRSLSHLFGLDPPLFTRNPPAAAQAPPPNPSPTQPPPRAPPPLPPSYSAWGCRRFSRRRPQFAPRPPP

SEQ ID NO: 295479 - protein, 268 aa, Zea mays
  Clone ID: MRT4577_32557C.1.pep
MGRGKIEIKRIENTTSRQVTFCKRRNGLLKKAYELSILCDAEIALIVFSTRGRLYEYSSNSVRSTIERYKKASASTSGTAPVTDVNSLQYFQQEAAKLRQQIQTLQNSNRHLMGESTGNMTAKELKGLESRLERGIGRIRSKKHELLLAEIEYMQKREADLHNENMFLRAKVAEAERALEQEAAEDQTMMVPAAVRGATTELKALPASFDASGYYQYQQHQHVVAAASAASSSQYAEQPQGQQEYHHQTALHLGYHVKIDSAADKGFL

SEQ ID NO: 295480 - protein, 31 aa, Zea mays
  Clone ID: MRT4577_32558C.1.pep
VWQKKFSGMGCMLNILTGAWNRFMCCSRLAG

SEQ ID NO: 295481 - protein, 53 aa, Zea mays
  Clone ID: MRT4577_32559C.1.pep
QGKINSLYDGSNLVYAFHRRANNVISGERRPITTGRVGTKGLSGDVITNVRSV

SEQ ID NO: 295482 - protein, 211 aa, Zea mays
  Clone ID: MRT4577_3255C.1.pep
MSKRQLTLQPCCHTAKRRRPPPSQLQQLRQHVYLVVDDWESGYSVRKIDIDAMYSDAGADLDDDDEAEPLPDPPVVRFYGRHCRLSHFGAYGTSILAILGPSDATRPIPIFDTKTLGVKLCSLPDGSSPKPLFASVGGEHYSMLGSSVYVLDALPPRRTEQGKQCSWTKSHKLAPFMSGEVVSFAVHPNDRLLFVSKAARTFVLDTSASPG

SEQ ID NO: 295483 - protein, 70 aa, Zea mays
  Clone ID: MRT4577_32560C.1.pep
EKIVLFAYLLYKFSVVFWGLNEILNGICVYGGYGNCFFELWVYVRFRARRRDFRLELERSYLVNSLFGAF

SEQ ID NO: 295484 - protein, 90 aa, Zea mays
  Clone ID: MRT4577_32561C.1.pep
MASARSWSRLFAVSAFLCLLAVHPAATVRREDMVLGRDRAPVPAEAPATGAVGSGNSWTAKPFATAKAVGAAQMSKWRVRRGSDPIHNRS

SEQ ID NO: 295485 - protein, 71 aa, Zea mays
  Clone ID: MRT4577_32562C.1.pep
PFVFLTFPRVRDLGHVLGGVCIAHDGVLPNSDPVMLLSNGPDRASSVGSKMTQSPMKAILSPRTAYVDCRY

SEQ ID NO: 295486 - protein, 117 aa, Zea mays
  Clone ID: MRT4577_32563C.1.pep
MATPNGLARIETTGKKKQDNGVWYDDSSAPVRAQTIDELHSLQRKRSAPSTPKRRRPPRPIKGGAHSPFAVAISEEERHTQQMQSISASLASLTRETGPKVVKGDPAAKGEAAAQGA

SEQ ID NO: 295487 - protein, 62 aa, Zea mays
  unsure (1)..(62): unsure at all Xaa locations
  Clone ID: MRT4577_32564C.1.pep
EKXGPRRGTVPPLPRPPTLSFFFAYSKPRAGAIQNKVGYIYYHYQNHFTTHIFKTTPYTNHF

SEQ ID NO: 295488 - protein, 65 aa, Zea mays
  unsure (1)..(65): unsure at all Xaa locations
  Clone ID: MRT4577_32565C.1.pep
MDLSVVNTALCDMSXSNITSLCDERLMKTACQASTTNEWPYCINVLVHLYIYDLNSARCFRKTLS

SEQ ID NO: 295489 - protein, 53 aa, Zea mays
  Clone ID: MRT4577_32566C.1.pep
HLKESIGLRNFFLSSKANVASFAKWWEIVAKEHTSTFNGLMNHLCHVESVESK

SEQ ID NO: 295490 - protein, 69 aa, Zea mays
  Clone ID: MRT4577_32567C.1.pep
MAAWMRSLLSPLRKLWIRMHSAQNKKGRGIYILYEDVKSCPCEDVHILWSILVDSSHSHPPPLSLRLKH

SEQ ID NO: 295491 - protein, 72 aa, Zea mays
  Clone ID: MRT4577_32568C.1.pep
GWLGSAEPKSRAKYRLCRGSGRRGFSARSLVMGELSFLRCQWNGPDATPPPANRPTRSLAGSSPRTSRDRKV

SEQ ID NO: 295492 - protein, 40 aa, Zea mays
  Clone ID: MRT4577_32569C.1.pep
HASAPSDPYQPGNQTFYDGRARVAGDGVNESIHSKNAKTD

SEQ ID NO: 295493 - protein, 114 aa, Zea mays
  unsure (1)..(114): unsure at all Xaa locations
  Clone ID: MRT4577_3256C.1.pep
GTTTRSEYITLHQLFTLNPADYLPRXMVXFIRIGSDYYHLQQLLPCYHMVALYPAAYMKGVILXLRKSQIATVRGASFLTQQQVLSIYQELATIITTLLPVPLLAPFVPLDLGK

SEQ ID NO: 295494 - protein, 85 aa, Zea mays
  unsure (1)..(85): unsure at all Xaa locations
  Clone ID: MRT4577_32570C.1.pep
LVAVNDPFISTDYMTYMFKYDTVHGQWKHHEVKVKDSKTLLFGEKEVAVFGCXNPEEIPVGSCGAEYFVESTXFFTDLENACIFT

SEQ ID NO: 295495 - protein, 249 aa, Zea mays
  unsure (1)..(249): unsure at all Xaa locations
  Clone ID: MRT4577_32571C.1.pep
PSPHDSKQGISSLSHGSTHPPLQFPLRLGLSFARALSRRSPWPACVPARASTIVNAVGASAPSSSPAIFLLLLLLAHGTLVTAPLTMDAIRAPTCPSSLIPCHGRALAPPLLXPLPRGEFPLHLPMALLPPCWSSGAHSPLSARPAQRPSPPSMASDPXLSPPRLELXMAHADPSPPFLGAESSPPRSPAVXPDPIRPTPARPELLCPKSGHPCLAVEAWSSLSSPTWPPSSPGQPPPFFCVCSSPFPL

SEQ ID NO: 295496 - protein, 140 aa, Zea mays
  unsure (1)..(140): unsure at all Xaa locations
  Clone ID: MRT4577_32572C.1.pep
KTHGLATRPPSQNAPRGPPANTRKPADEARSSPGAGGRQPTRGTPPHXPSATGRETTPAKTSTTPPGTAXQPARGPGREDGRERRRQDAAASRPPPRPRSASRPAAPQRRQPTPPPKAGRAPPXPSPASTHPPXPQPPRP

SEQ ID NO: 295497 - protein, 393 aa, Zea mays
  unsure (1)..(393): unsure at all Xaa locations
  Clone ID: MRT4577_32573C.1.pep
QVAPGGHGHGVCSLSWRGHRVLQGPSDEHVPAAAPRARAAGGGRXACSVDAIYSFGDSIADTGNLLREGPVGFFASIGSYPYGQTLRKPTGRCSDGLLIIDYFAMALNLSLVSPYLDKGADFASGANFAVAGATALDRAVLLQSGIMAPPASVPLSSQLDWFKAHLNATACPSLQDCAKKLAGALFLVGEIGGNDYNYGFLQGFRSIEAMKAYVPQVINAIMDVAKEVIELGATQIVIPGNFPIGCSPSYLSLFAASGDLDDRGCLRSYNAFAQHHNEQLQAAIDGLRKANTDVTVVYADYYGAFMHLLDHASLLGFEQGALLQACCGAGGAYNFNMNSMCGAPGTTTCADPARRVSWDGIHLTQQAYRAIALSLLMEGFAQPDDAVQEIWSC

SEQ ID NO: 295498 - protein, 50 aa, Zea mays
  unsure (1)..(50): unsure at all Xaa locations
  Clone ID: MRT4577_32574C.1.pep
MFGRAPKKRDHPKYYETLGVSKSVPQDDLQKDYRQAAIXNHPDTGGDPRQ

SEQ ID NO: 295499 - protein, 64 aa, Zea mays
  Clone ID: MRT4577_32575C.1.pep
MMFGRAPNKSDNTKYYEILGVPKGASHDDLKKAYRKAAIKNNPDRGGDPEKFKELAQAYEVLSD

SEQ ID NO: 295500 - protein, 192 aa, Zea mays
  unsure (1)..(192): unsure at all Xaa locations
  Clone ID: MRT4577_32576C.1.pep
MFGRAPKKSDNTKYYEILGVPKSASQDDLKKAYRKAAIKNHPDKGGDPEKFKELAQAYEVLSDPEKREIYDQYGEDALKEGMGGGGSHVDPFDIFSSFFGPSFGGGGGSSRGRRHRRGEDVVHPLKVSLEDLYNGTSKKLSLWRNVICSQSKGKGSKXSGASMKSPGCQGSRMKVTIRQXGPSLLQQMQPPL

SEQ ID NO: 295501 - protein, 523 aa, Zea mays
  Clone ID: MRT4577_32577C.1.pep
MAMAAVLANGDSQGRPQRNYQVVVAGTRDMGIGKDGVLPWKLPGDLKFFKELTLTTSDPVKKNAVIMGRKTWESIPVKSRPLPGRLNVILTRSGSFDFATVENVVICGSMESALELLASTPYCLSIEKVFVIGGGQVLREYLKGPACEAIHLTDIQSSIECDTFIPPVDFSVFQPWYSSFPVIESNIRHSFVSFVRVRKSVAETHESNGKESTEVDTKNDKFETENFSFLPKMVYDRHEEYQYLNLVEDIIRSGAQKNDRTGTGTLSKFGCQMRFNLRKNFPLLTTKRVFWRGVVEELLWFISGSTNAKVLQEKGIHIWDGNASREYLNSVGLAHREEGDLGPIYGFQWRHFGAEYTDMHADYTGKGFDQLMDVIDKIKNDPDDRRIILSAWNPSDLKKMALPPCHMFAQFYVENGELSCQMYQRSADMGLGVPFNIASYSLLTYMIAQVCDLSPGDFVHVIGDAHVYRNHVRALEEQIQKMPKPFPILKINPSKKDIDSFMASDFKLVGYDPHQKIEMKMAV

SEQ ID NO: 295502 - protein, 153 aa, Zea mays
  unsure (1)..(153): unsure at all Xaa locations
  Clone ID: MRT4577_32578C.1.pep
MFGRAPNNSDHTKYYQILAVPKSASQDDLNKAYREAAIKNHPDKGGDSEKFKELAQAYEVLSDPEKREIYDQYXEDALKEGMGAGGSHVDPFDIFSSFFGPXXGGGGGSSRGRRQRRGEXDVVHPLXVPLGDLYXATSKKLSLSRNVICSKCK

SEQ ID NO: 295503 - protein, 49 aa, Zea mays
  unsure (1)..(49): unsure at all Xaa locations
  Clone ID: MRT4577_32579C.1.pep
QNXKITGPHWWVSTYHWPQGKGIPNKWLYYEVQETLSLLGTPKHRAIPT

SEQ ID NO: 295504 - protein, 50 aa, Zea mays
  Clone ID: MRT4577_3257C.1.pep
LEIQRKRAYKPVVPQNSQQNFSSVERCSKSGNMHKQRALLSESIRSVLSY

SEQ ID NO: 295505 - protein, 125 aa, Zea mays
  unsure (1)..(125): unsure at all Xaa locations
  Clone ID: MRT4577_32580C.1.pep
KCSRICILLTMQQLHRRYQEETGITLESLCPGXIAVTGLFGEHMPLVRLLFPPFKXLVTXGFVSERQSGKRLAQVVSAHSLGXLGVFWXMNQGSXSLDTQLSHXVSDSDKAKQLWEISXKLVGLA

SEQ ID NO: 295506 - protein, 56 aa, Zea mays
  unsure (1)..(56): unsure at all Xaa locations
  Clone ID: MRT4577_32581C.1.pep
MAMAAVLANGDSQGXRPQRNYQVVVAGTRDMGIXKDGVLPWKASGDLKFFKELTLT

SEQ ID NO: 295507 - protein, 105 aa, Zea mays
  unsure (1)..(105): unsure at all Xaa locations
  Clone ID: MRT4577_32582C.1.pep
MFGRAPKKSDTTKFYEILGVPKSASQDDLRKAYRRAAIKNHPDKGGDPEKFKELAQAYEVLSDPKKREIYDQPGEDALKEGMGGGGTHVDPFDIFSXIFRALFGG

SEQ ID NO: 295508 - protein, 161 aa, Zea mays
  unsure (1)..(161): unsure at all Xaa locations
  Clone ID: MRT4577_32583C.1.pep
MADSEEHHFQSKADAEKYRTYPHEGGTDRNNGFIVIQNRPCKAVEASTSKTDKHAHAKCHFVAVYIFHGKKLENIVASSHHCXDIPHENRNDHHVIDISEDGFVSLLSSYGNTKDDLKLPTDETLAAHINEGYRKXKDLVVTVQTAMREEQMCALNDAGPQ

SEQ ID NO: 295509 - protein, 126 aa, Zea mays
  unsure (1)..(126): unsure at all Xaa locations
  Clone ID: MRT4577_32584C.1.pep
RALKEGMGGGGSHVDPFDIFSSFFXGPSFGGGGGSSKAKQGNRXGEDVLHPLKGSLEDLYNGTXKKLSVSRNVICSKCKGKGSKSGAXMRCPGCQGXCMKVTXIRELGPCMIQKMQEAVNECKGTG

SEQ ID NO: 295510 - protein, 87 aa, Zea mays
  unsure (1)..(87): unsure at all Xaa locations
  Clone ID: MRT4577_32585C.1.pep
AARLNFPDQLDGAXGGGGSGQPGGGAXDGAGLTAAAIRKKAAEVGARVDALHCGAGAGASPLLLSHRRRPKNPDLNREPTPDTSDDE

SEQ ID NO: 295511 - protein, 107 aa, Zea mays
  Clone ID: MRT4577_32586C.1.pep
GRRRPAGWLADTARREAKMPLKRFGGIGQGAFVNYGRGFGRLVVIVDVVDQNRVFVVAPALVGCQMNLKRFSLPAIKIDIKLVQKKTPLFKALVEAFLKSKWEISLW

SEQ ID NO: 295512 - protein, 104 aa, Zea mays
  Clone ID: MRT4577_32587C.1.pep
MFGRAPKKSDNTKYYEILGVPKSASQDDLKKAYRKAAIKNHPDKGGDPEKFKEFFFFYDAPSDPEKRGIYDQHGEDALNEGTRAGGSHVDPFDIFSSFFAPSFG

SEQ ID NO: 295513 - protein, 60 aa, Zea mays
  Clone ID: MRT4577_32588C.1.pep
CGIFYTVFWCLYATELFIFYCRIFCGCCLVILLIISFQAFVIKYFSIVSMLTFYEVTCWI

SEQ ID NO: 295514 - protein, 183 aa, Zea mays
  unsure (1)..(183): unsure at all Xaa locations
  Clone ID: MRT4577_32589C.1.pep
MFGRAPKKSDNTKYYEILGVPKSASQDDLKKAYRKAAIKNHPDKGGDPEKFKELAQAYEVLSDPEKREIYDQYGEDALKEGMGGGGSHVDPFDIFSSFFGPSFGGGGGSSRGRRQRRGEDVAHXLKLSLEDLYNGTXKKLSLSRNAICSKCQGXRSKPGASMRXPGCPGXSGLVGTVRRLGPF

SEQ ID NO: 295515 - protein, 66 aa, Zea mays
  unsure (1)..(66): unsure at all Xaa locations
  Clone ID: MRT4577_3258C.1.pep
LFPAKVLALGKVFEDNKFEHDALLXLVNRVLDILQDLHGPHLREFVQECYELSSKYKNDQYQARLG

SEQ ID NO: 295516 - protein, 194 aa, Zea mays
  unsure (1)..(194): unsure at all Xaa locations
  Clone ID: MRT4577_32590C.1.pep
MFGRAPKKSDNTKYYEILGVPKSASQDDLKKAYRKAAIKNHPDKGGDPEKFKELAQAYEVLSDPEKREIYDQYGEDALKEGMGGGGSHVDPFDIFSSFFGPSFGGGGGSSRGRRQRRGEDVVHPLKVSLEDLYNGTSKKLSLSRNVICSQCKGKGSKSGAFMRCPGCXGSGMKVTIRQLAPSMIPQMAAPCNEC

SEQ ID NO: 295517 - protein, 90 aa, Zea mays
  unsure (1)..(90): unsure at all Xaa locations
  Clone ID: MRT4577_32591C.1.pep
MAKYGEGDKRWIVEERADGTNVHNWHWADRACXEWARAAVFFLVGGLNILDREGGLRFRNGALEKVGGEGYLNLRKGQGIPGYQVLLTLF

SEQ ID NO: 295518 - protein, 466 aa, Zea mays
  Clone ID: MRT4577_32592C.1.pep
GFCCHRALLFKTLADSINLPCRIVKGCKYCKAGAGTSCLVRFGHDRECLIDLIGNPGFLSEPDSLLNGLSSISVSSPLRPPKHDSADISDNFKLFAKKYFLDCQSLNLMFSDPAAGTVIDLDEAMGSNLGLNSSHATNSDCQATFTHLKAGTRRSSQDGSFIMQRSSPEDTQSGLSDPFSDMSLEIEDLIIPWSELVLKEKIGAGSFGTVHRADWNGSDVAVKILMEQDFHPERLKEFLREVAIMRSLRHPNIVLLMGAVTQPPNLSIVTEYLSRGSLYRLLHRHAARENLEERRRLSMAFDVAKGMNYLHKRNPPIVHRDLKSPNLLVDKKYTVKVCDFGLSRLKANTFLSSKTAAGTPEWMAPEVLRDEPSNEKSDVYSFGVILWELMTLQQPWSNLNPAQVVAAVGFKGQRLEIPSSVDPKVAAVIESCWVREPWRRPSFASIMESLKLLIKTLPPNQLLEEN

SEQ ID NO: 295519 - protein, 291 aa, Zea mays
  Clone ID: MRT4577_32593C.1.pep
MDRLGANPANSCPLTPLGFLERSATVFGDCHSVVYHDTVFTWSQTHRRCLRLASALVSLGINRGDIVSVLLPNVPAMYEMQFGVPMSGAVLNNINMRLDARTVAVLLRHSGSKLVFVDPASLTLIRDALKQLPQGHPAPRVIPVEDPHEKGLPAAPPGSLTYEGLLEKGDPEFAWVRPASEWDPMVLNYTSGTTSEPKGVVHCHRGIFLITLDSLIEWAVPPQPTYLWTLPMFHANGWSFPWGMAVVGGTNVCLRRVDAAEVYATIAGRGVSHLCGAPVVLNMLANAPEGV

SEQ ID NO: 295520 - protein, 61 aa, Zea mays
  Clone ID: MRT4577_32594C.1.pep
SCDDAFHRQRDLSPVSCCPSFSSGMSSTKCQPASIRNRTAPTTPPTSPNPALPPTARQTTP

SEQ ID NO: 295521 - protein, 64 aa, Zea mays
  Clone ID: MRT4577_32595C.1.pep
HAYDHAYAETVELQIGLKNCDPQKDKRFSGSVKLSDIRCSKMNVCILGDAQDVEEDVKRGLDYM

SEQ ID NO: 295522 - protein, 96 aa, Zea mays
  Clone ID: MRT4577_32596C.1.pep
VLNTVEYLHAYMTSRHHMPEAPIKSPHHSSYHNIIKIQCTLRFRKALSKQIIMACRHAKQKCLVHCHFPPIKIWASINSCIAGIGSTRTTSSDTRA

SEQ ID NO: 295523 - protein, 95 aa, Zea mays
  Clone ID: MRT4577_32597C.1.pep
MVEQTDKAILNHPNLFLNSQKTGMGNKPRIDDDQSFKNIFHRFMTPAVAIEESYIVNKCPFSATISIRCKHIAKTSYTTNINRTIIVRTNYLHFF

SEQ ID NO: 295524 - protein, 58 aa, Zea mays
  Clone ID: MRT4577_32598C.1.pep
FSIFFLFIFFFFFFFFCFFFFFFFFFNPYVRRFWPSDVVPFTVVMTQFPSKRLLQHKH

SEQ ID NO: 295525 - protein, 32 aa, Zea mays
  Clone ID: MRT4577_32599C.1.pep
RPPVQTWTRTDQRCGGHIKTGLSTKHQPPIKE

SEQ ID NO: 295526 - protein, 72 aa, Zea mays
  Clone ID: MRT4577_3259C.1.pep
RDPQQAARGEPTKQDRFFPGSGAKTNPWRCLPFFDWVGFLFFINLLQGFCFWRPLTTRNLTGLPNSLGFMAN

SEQ ID NO: 295527 - protein, 523 aa, Zea mays
  unsure (1)..(523): unsure at all Xaa locations
  Clone ID: MRT4577_325C.1.pep
GTNNVTQHSTGSLRETERDREGVGRAPSPQPGGSPGAGPQPGVRERMSSHREPLRVQGGNACWELYCLEHGXGGDGQMPGDKTIGGGDDAFNTFFSETGAGKHVPRAVFVDLEPTVIDEVRTGTYRQLFHPEQLISGKEDAANNFARGHYTXSDLIGSSVGIDPRYSICNENHTXLDLLVXVGKEIVDLCLDRIRKLADNCTGLQGFLVFNAVGGGTGSGLGSLLLERLSVDYGKKSKLGFTVYPSPQVSTSVVEPYNSVLSTHSLLEHTDVAVLLDNEAIYDICRRSLDIERPTYTNLNRLVSQVISSLTASLRFDGALNVDVNEFQTNLVPYPRIHFMLSSYAPVISAEKAYHEQLSVAEITNSAFEPSSMMAKCDPRHGKYMACCLMYRGDVVPKDVNAAVATIKTKRTIQFVDWCPTGFKCGINYQPPSVVPGGDLAKVQRAVCMISNSTSVVEVFSRIDHKFDLMYAKRAFVHWYVGEGMEEGEFSEAREDLAALEKDYEEVGAEFDEGEEGDDGDEY

SEQ ID NO: 295528 - protein, 183 aa, Zea mays
  Clone ID: MRT4577_32600C.1.pep
MARPQNNQNPRVFLVLNIGGVTVGRVVIELFADKVPKTAENFRLLCTGERGVGKWSGKRLHYKGAAFHRVVPGFMCQGGDITAGNGTGGESAIGDARYFADEAFGAVRHDGAGVVSMANAGPNTNGSQFFITFADASWLDGRHVAFGRVVDGMDALRAIEKAGSISGRTMRHVVIADCGELKH

SEQ ID NO: 295529 - protein, 81 aa, Zea mays
  Clone ID: MRT4577_32601C.1.pep
LENPFLSQTYSLSTTSPFPQLPYYQKAPNQSPFQTFSHPYCQLEPPLYLPFNPAGLFVYPHFSHLIFHSLYPHSFPFFPFL

SEQ ID NO: 295530 - protein, 58 aa, Zea mays
  unsure (1)..(58): unsure at all Xaa locations
  Clone ID: MRT4577_32602C.1.pep
XPPPAPPHKTKKVIYKNLSIDKTKNSIMHTKQKQHTKQLITPYNDATKFHQTQDQITF

SEQ ID NO: 295531 - protein, 381 aa, Zea mays
  unsure (1)..(381): unsure at all Xaa locations
  Clone ID: MRT4577_32603C.1.pep
MHMSEATTVFEAVVPFMGESVTDGTLANFLKKPGDRVEADEPIAQIETDKVTIDVASPEAGVIEKLIASEGDTVTPGTKVAIISKSAQPAETHVAPSEEATSKESSPPKVEDKPKVEEKAPKVDPPKMQAPKPTAPSKTSPSEPQLPPKERERRVPMPRLRKRIANRLRDXQNTFAMLSTFNEVDMTNLMKLRSDYKDEFVTKHGVKLGLMSCFVKAAVSALQNQPIVNAVIDGDDIIYRDYVDVSVAVGTSKGLVVPVIRDADTMNFADIEKGINNLAKKANEGALSIDDMAGGTFTISNGGVYGSLLSTPIINPPQSSILGMHSIVQRPVVVNGDILARPMMFLALTYDHRLIDGREAVFFLRRIKDVVEDPRRLLLDI

SEQ ID NO: 295532 - protein, 437 aa, Zea mays
  unsure (1)..(437): unsure at all Xaa locations
  Clone ID: MRT4577_32604C.1.pep
MYYIIAIEFCRRCYYLPNPSPYQVWSRSFASDNXSHNSLLGQIVLTNVFLLMALLSSIFHSXGDKFEAVVPFMGESVTDGTLANFLKKPGDRVEADEPIAQIETDKVTIDVASPEAGVIEKLIASEGDTVTPGTKVAIISKSAQPAETHVAPSEEATSKESSPPKVEDKPKVEEKAPKVDPPKMQAPKPTAPSKTSPSEPQLPPKEXERRVPMPRLRKRIANRLKDSQNTFAMLSTFNEVDMTNLMKLRSDYKDEFVTKHGVKLGLMSCFVKAAVSALQNQPIVNAVIDGDDIIYRDYVDISVAVGTSKGLVVPVIRDADTMNFADIEKGINNLAKKATEGALSIDDMAGGTFTISNGGVYGSLLSTPIINPPQSSILGMHSIVQRPVVVNGDILARPMMYLALTYDHRLIDGREAVFFLRRIKDVVEDPRRLLLDI

SEQ ID NO: 295533 - protein, 114 aa, Zea mays
  Clone ID: MRT4577_32605C.1.pep
PIKWFYHQNFKIGGQICLHGAHGGSIRKKKAFYPNMGLNKRKACANFSRCPLQGCFQRKTLPLCQNEIVSTFMVKKSFTKIWVRRPKGFSFPKGSFLQKIKKIWGKFFPNPVIP

SEQ ID NO: 295534 - protein, 40 aa, Zea mays
  Clone ID: MRT4577_32606C.1.pep
KSPGEECNKVFLGINQGKLVDPMLECLKEWDGKPLPININ

SEQ ID NO: 295535 - protein, 88 aa, Zea mays
  unsure (1)..(88): unsure at all Xaa locations
  Clone ID: MRT4577_32607C.1.pep
QIEPVLIQLTVANPTAYLQQLLPFNQLVVXSNFAGCLQQEQQLLNPLAGGNPLVGTFMQQKQKLLPNNQFFLXMNPTLQQPIVGGAIF

SEQ ID NO: 295536 - protein, 100 aa, Zea mays
  Clone ID: MRT4577_32608C.1.pep
SHNLKNYSQNLGAWGDNFLKNTNPPGGGYTHPHFRSCNGNTKGGENICLKGGGLGLEELIVPMWCSTGAITFKPVVLKRGALSCRTGFPWGTPGLGGFGT

SEQ ID NO: 295537 - protein, 93 aa, Zea mays
  unsure (1)..(93): unsure at all Xaa locations
  Clone ID: MRT4577_32609C.1.pep
ELNESCKYTLSSAIECWSAAQAIVNVGIGSTEDVVIQKLCTXRMVHKDYTSDNSCSSDTETCSNISLSLAPEERCIQKIEEGTSVGTPEHPDG

SEQ ID NO: 295538 - protein, 484 aa, Zea mays
  Clone ID: MRT4577_3260C.1.pep
MDQARWECLHCPCARPCAAPGAARGWWCGELGVPLGSLVPPALDPAPGISPRLFPASGFRFAPSRVLFCRAGVCIPWIAVQGGSTYVHCKAGRGRTKSAYAPYLEESLKILIRHSGYFHEDVRLQAVISLKHILTAVRAIPPAHADVLEKQKDVLDTVLNIYIKTMTEDDDKEVVAQACMSVADIVKDCGFAAIEPYMLRLAEVTLVLLRQESSCQQVESDGEDDGDIDHDEVLMDAVSDLLPAFAKVMGSYFDPIFAKLFDPLMKFAKSPHPPQDKTMVVATLAEVAQEMGAPISAYVDKIMPLVLKELASSDATNRRNAAFCAGEICKNGGAAALKYYGDILRSLHNLFSNSESDDAVRDNAAGAIARMIMVQPQSIPLNQVLPVFIKALPLKEDHEESMTVYGCVCGLLLSSHPQILPLVPDVIHVFAQVVVSPDESDEVKTNIGKAISHLISVYGQQMQPILSALPPAHANALASFASRR

SEQ ID NO: 295539 - protein, 52 aa, Zea mays
  Clone ID: MRT4577_32610C.1.pep
PPFIRAPPPPFELLGKKIGTVYPPRGFFHSQPSILAKGLAIQFSPQQCILGG

SEQ ID NO: 295540 - protein, 72 aa, Zea mays
  Clone ID: MRT4577_32611C.1.pep
TLSHLSHSHTKFLTLSYSLHTYATYEQTIHYPAKKKKNNKKKKIKYFKKILLYIYNTLNYFNSLYLTHMVPF

SEQ ID NO: 295541 - protein, 93 aa, Zea mays
  unsure (1)..(93): unsure at all Xaa locations
  Clone ID: MRT4577_32612C.1.pep
VVHYAPADRDALAGVRWMLFNTLYSAETGAGKHVPRAVSVDLEPTVIDEVRTGTYRQLLHPEQLMMGLEDAPNIFARGHXYTIDKEIADLILD

SEQ ID NO: 295542 - protein, 114 aa, Zea mays
  Clone ID: MRT4577_32613C.1.pep
TRSGCSTPKPTAAPWSARRRGLPGSYSPPRPSGPEDLHFLLSTYGHRSSCHAWYPMKHLSSSKATFAMRGSVHPLTYSRLLAFDSSKDGDYGDRRQQCREYLEDRGAMWRLYKS

SEQ ID NO: 295543 - protein, 80 aa, Zea mays
  Clone ID: MRT4577_32614C.1.pep
MISIEKLPQGDDTTGSTVGRCGWLYYRRAAECLSVIARPDRAKVWQAGLTILMHGVRSSHATCVALVEPARRQIKPPADA

SEQ ID NO: 295544 - protein, 257 aa, Zea mays
  Clone ID: MRT4577_32615C.1.pep
FQLPGRTDNEIKNFWNTRKRRKQRCGSPLYPEYMLSQVSHKDMDFETLGESHGKKRSNDFSKEKVGDVQELVDELIVFEHLDYGKDIVFPIRPLKCHASTGSVQISGDIRKTFCPTDLNYVMTKNQSVPVGSAIGSGYPVYGGRLSTSGTIFGSIQTEIPSIQSSSYSPSNDWLAQCPSACIEQRIPMECNTISQSKAYLMMHSSSAFCAPEHDACSETQAPDLCSGSDVVFDPSQCYPVASFSDLGISDTPLTSVS

SEQ ID NO: 295545 - protein, 118 aa, Zea mays
  unsure (1)..(118): unsure at all Xaa locations
  Clone ID: MRT4577_32616C.1.pep
MRARPKDHFLYDKYIDMEEIPQLSVINTSSKEVELASVVFISKAIELPSDGNVVFEKIADHLHKVAYALVRSTXTIGGNIIMAQRLQFSSDIATALLAAGTTDTIQPVFKRLSLTFEE

SEQ ID NO: 295546 - protein, 97 aa, Zea mays
  Clone ID: MRT4577_32617C.1.pep
RYINWAVIYGYEARRRNYSLGGIKRVGIPMHACLKTSSHPMHACIYDVSGIQWHASRQKTTTGGRALRLGRRRGAGTSGGFGVERLVFLGAGGVAGL

SEQ ID NO: 295547 - protein, 247 aa, Zea mays
  Clone ID: MRT4577_32618C.1.pep
MRARPHFLWSRSRPSALASSSPWEPGDSRRETGSAQAHRYARHSPRPPHRTCTPPGMAATAHLTGVLGVSSPPLAPSHCSCSGAKKQSCSLRQGRQQRRRLRVARAVEVDAPSAGAPEPEEAEEPSVDFAFVSPRLLPDGTPDVHYRTARGGQKLRDIMLDGYIDLYGPYDKVLLNCSGGGVCGTCIVEVVEGKEMLSPKTDVEKELLKRKPKTWRLACQATVGNADSTGQMIIQQLPEWKIHEWDK

SEQ ID NO: 295548 - protein, 786 aa, Zea mays
  unsure (1)..(786): unsure at all Xaa locations
  Clone ID: MRT4577_32619C.1.pep
MLRDDRFCESSMCNADEIPRKCNELELKVQNFRTHTCESEEKFRKCQEELEQRNLELSALRRKINGLHSNELEVCESGATWKYQARIADLEDTEPETDTLKARFELQXGENDDLRRSKVEMQNFISEFQAEKSQLEERLSASLKESSITSKXLDEVRKDVLVLSSSRDSHVSTNKLLERNLVELESCKAGIELHVSXQEQENVELSKRISGLETQLTYVTNEKESSELQLHDSRSLIINLKDKVECQQSEMETQRLQFKQKQQESQRRLCEAQDDSEVLRRSNCKLQSTVESLIEECSSLQNLIADLKRQKLELHGHLTQKEQELDESKKKNFEFSKTVEFLEAKLLSLQKDISSKEQSLLSELENIFQEHMEQEERINRAHFMLNKIEKEKTLEVENLEREVVSLAAQVSSTHEERERDPLDAVLKVQSSRDEAKYGEGKLQDIRQQVSCYESQLEDLRKESKSKIKGLVDSLNASKQSEEMLTSDAEHMKKLMEAAKSNEDALRKTSNELELKLKSSDYVKQQMLEEISGLKLQAQKIMNLQDEVSKLQSSLDEAKFEKGKLEEFLRSVTEECQELKAQKAMLTDKVSYMQETLRNGEEENRNRIAMHAKLMRLESDLTALEASHVHEAELKNELSRIKRSNSEYQRKIQSLGQENEDLTRRVQIMEKGFERMSHAKENLGKQEIGGDNQEAIQSTIQLLEIKLAEALEENKIYRAQQKSSMSEGQPAGGDGKEGNTDRILQLEGELRDMKERLLNMSLQYAEVEAQRERLVMELKAIKKGRWF

SEQ ID NO: 295549 - protein, 85 aa, Zea mays
  Clone ID: MRT4577_3261C.1.pep
YSIPEGQGNHWPPNNLRAHTRLLIPLGRSDRQQDSSKMATITSLLPFMIQSYMSLTLSGAQSTLQSRGALHLRGRRGEDVSLCRV

SEQ ID NO: 295550 - protein, 119 aa, Zea mays
  Clone ID: MRT4577_32620C.1.pep
VVTLQPRLLPDGTPDVHYRTARGGQKLRDVMLDGYIDLYGPYVSHTDYMRGGGVCGTCIVEVVEGKEIRVAKRVGEKELLKRKPKTWRLACQATVGNADSTGQMIIQQLPEWKIHEWDK

SEQ ID NO: 295551 - protein, 99 aa, Zea mays
  Clone ID: MRT4577_32621C.1.pep
RVPAKGFRCGHLGFHFFLWTHVPSHRVGLCFGGLSAMLGVVSFVFSSVRVKCVMLFCLSFCPVIRNPVFVSLRGFVQVVVYLACRWPIYCSSLFVIKAH

SEQ ID NO: 295552 - protein, 519 aa, Zea mays
  unsure (1)..(519): unsure at all Xaa locations
  Clone ID: MRT4577_32622C.1.pep
YPRVRPGDSEVLRXSNSKLQSTVESLIEECSSLQNLTADLKRQKLEMHGHLTQKEQELDESKKRNFEFSKTVEFLEAKLSSLQKDVSSKEQSLLSELENIFQEHMEQEERINRAHFMLNKIEKEKTLEVENLKREVVSLAAQVSSTHEERESATLDAIQEVSVLRADKAKLEANLQDVSEQLRCYESQLEDLRKESKSKIKGLVDSLNASKQSEEMLTSDAEHMKKLMEAAKSNEDALRKTSNELELKLKSSDYVKQQMLEEISGLKLQVQKIMNLQDEVSKLQSSLDEAKFEKGKLEEFVRSVTEECQELKAQKAMLTDKVSYMQETLRNGEEENRNRIAMHAKLMRLESDLTALEASHVHEAELKNELSRIKRSNSEYQRKIQSLGQENEDLTRRVQIMEKGFERMSHAKENLGKQEIGRDNQEAIQSTIQLLEIKLAEALEENKIYRAQQKSSMSEGQPAGGDGKEGNTDRILQLEGELRDMKERLLNMSLQYAEVEAQRERLVMELKAIKKGRWF

SEQ ID NO: 295553 - protein, 272 aa, Zea mays
  unsure (1)..(272): unsure at all Xaa locations
  Clone ID: MRT4577_32623C.1.pep
ILASSXSHAASAEHELDENIYDNGIHEGNAYLLEQGVHQGAHGHSGVRFVSGIILKSKALAFERMLFRATRGNMLFNQASAGEPVTDPISGEEVEKAVFVVFFSGEQAKAKILKICDSFGASCYPVPEEMVKQRQIFNEVSARLSDLEVTLDAGIQHRNKALESIGSQLXWRWTIMVKKEKAVYDTLNMLNFDVTKKCLVGEGWCPIFAXSQIKXDCLQRSTIHSNSQVGTIFHEMGTIESPPTYFRTDKXTNAFXQENXDAYGVARYQEAN

SEQ ID NO: 295554 - protein, 99 aa, Zea mays
  unsure (1)..(99): unsure at all Xaa locations
  Clone ID: MRT4577_32624C.1.pep
KGCGVFVSGKPRVQRVXFFKFKGGAIFFXGPPVPLSIFSVVSLVFFTQGVFGFKVKFFLAWDPKGKQGPPLPFPYLVPIPGPKEKDEFFGPFAAEIQVA

SEQ ID NO: 295555 - protein, 68 aa, Zea mays
  Clone ID: MRT4577_32625C.1.pep
MTSQPRGVNRGPPKSPPPFFSIFFLHYFFICPFPCVIIIIVILFPFYFIFSSFIFFFFFFFFFFFFFF

SEQ ID NO: 295556 - protein, 74 aa, Zea mays
  Clone ID: MRT4577_32626C.1.pep
GKTKSKFLKPGGLFGPAPGVFLKQPEVSPRWGGRIALPQTNEARGEKPYSGGAQHLNGITLYLDLLGGVPEIFF

SEQ ID NO: 295557 - protein, 179 aa, Zea mays
  Clone ID: MRT4577_32627C.1.pep
HASDLPMLWWFSISGNNIQGRIPLGFAACQRLQVLYLGGLPHLTGPIPAILGNLTRITDIDVSFCDLTGHIPPEIGLLQDLKNLRLGNNRLTGPVPASLGNLSALSLLSVESNLLSGSVPRTIGNIPGLTQFRFSWNNFNGDLDFLSSLSNCRQLELLDIYNNSFTGPLPDQVGNLSHI

SEQ ID NO: 295558 - protein, 232 aa, Zea mays
  Clone ID: MRT4577_32628C.1.pep
MAAGGTADFFYRESQRLGYVARSAFKLIQMQKQHKLIAPGAAVLDLGCAPGAWLQVACQNLGPLEKGGIVVGVDVKKVKVPSAHCDSRVRTVCADVMTLMKRQARAMSPQERGFSVILSDMCPPVSGITTKDGAISCELGMRALSLAVGKIKLKDSNYSDTLEKYLSSTEPESDEDGVLRRGGNLVVKFLENEDISGFGKFCKVKFKKVSLLRPKATRPSSREIYMICEGLR

SEQ ID NO: 295559 - protein, 39 aa, Zea mays
  Clone ID: MRT4577_32629C.1.pep
SAPCLTSRRASLRPPEALLLVRHGSSYETVNPMICPPFF

SEQ ID NO: 295560 - protein, 77 aa, Zea mays
  Clone ID: MRT4577_3262C.1.pep
RTASNSISLLPRTPKLEHTVRTRKPGLMERSCHGYLSGEGGHLHWTKIQTCSDEENRALPYRRGALRTFVRDQQGHG

SEQ ID NO: 295561 - protein, 82 aa, Zea mays
  Clone ID: MRT4577_32630C.1.pep
SQLLVGNNLSCLIISFITSQIHRACSPLISHLLTAAFMHATFRACGLYSLVPPLGIHEQFLPLRNMPVQYCYFPILCSHALS

SEQ ID NO: 295562 - protein, 130 aa, Zea mays
  unsure (1)..(130): unsure at all Xaa locations
  Clone ID: MRT4577_32631C.1.pep
GGWGPPFLKKAPKPKGRGGVLGGFSFDNLGGAIFPWVRFPASLPISPPDGKTKRGNSPLVSGGLGPKPQQGGGKNFAMSPNRGTSGSFDWFPNFGPFSPSDGKPNKKGRVKTWAGXKAGLLFWRGALRGT

SEQ ID NO: 295563 - protein, 86 aa, Zea mays
  Clone ID: MRT4577_32632C.1.pep
QERRRESSGVHGLRPICGALRYLAFPYSSLQLFPSRRRWSRYENRERDTLVSAKLGLTDPGLTRRAGRLSHPTCSRRTRGRYARPT

SEQ ID NO: 295564 - protein, 706 aa, Zea mays
  Clone ID: MRT4577_32633C.1.pep
MGTANGQQPAEGAPSDKLRHVESMSELPSGAGKISGINAVVLGESLAAEENDLIVPSPEFSASALVSSPKQYREMYERSIKDPAGFWSEIAETFYWKEKWNPAEVCSENLDVTKGPVQINWFKGGKTNICYNAVDRNIESGNGDKVAMYWEGNEPGQDGKLTYSELLEKVCQLANYLKSLGVGKGDAVIIYLPMLLELPIAMLACARIGAVHSVVFAGFSADSLAQRIVDCKPKLVITCNAVKRGVKPIFLKDIVDAALVESEKNGVSVGLCLTYENQSAMKRENTKWQAERDVWWQDVVTKFPTKCDVEWVDAEDPLFLLYTSGSTGKPKGVLHTSGGYMVYTATTFKYAFDYKPTDIYWCTADCGWITGHSYVTYGPLLNGATVLVFEGTPNYPDSGRCWDIVDKYNVTIFYTAPTLVRSLMRDGTEYVTRYSRKSLRVLGSVGEPINPSAWRWFYNTVGDSRCPISDTWWQTETGGFMITPLPGAWPQKPGSATFPFFGVQPVIVDEKGQEIEGECSGYLCIKKSWPGAFRTLYGDHERYETTYFKPFAGYYFTGDGCSRDKDGYHWLTGRVDDVINVSGHRIGTAEVESALVSHPQCAEAAVVGVEHEVKGQGIYAFVTLVDGVPYSEELRKSLIMTVRNQIGAFAAPDKIHWAPGLPKTRSGKIMRRILRKIAARQLDELGDISTLAEPAVVDQLISLSNC

SEQ ID NO: 295565 - protein, 108 aa, Zea mays
  Clone ID: MRT4577_32634C.1.pep
DVWLYHDLLSGDKLLAHSFTYKELETGGLGDVEGHGVINRTAREIIDAGGDDELKEAFRVFDKDQNGFISAAELRHVMTNLCEKLTDEEVDEMIREADVDGDGQINYE

SEQ ID NO: 295566 - protein, 39 aa, Zea mays
  Clone ID: MRT4577_32635C.1.pep
NSARACSRLHEVILRDCLISQGSVLLFAPQKKQRRAAAK

SEQ ID NO: 295567 - protein, 96 aa, Zea mays
  Clone ID: MRT4577_32636C.1.pep
MSKIGSFVSGLVSRRSYGSVQHAMAVNAQASAAAAAATKAGVVAAADASGATNNKTKQDKFWMRDPKTGCWIPENRFEEVDVVDLRNRLIHVHHHN

SEQ ID NO: 295568 - protein, 79 aa, Zea mays
  Clone ID: MRT4577_32637C.1.pep
LLFEAGKNWQPLPWIRPQRESLVFFKWAQPFGRPKKAHFFPWDLTQNNACRGIQHPWIRRPCWMMHGTAGAGDKHSTYN

SEQ ID NO: 295569 - protein, 91 aa, Zea mays
  unsure (1)..(91): unsure at all Xaa locations
  Clone ID: MRT4577_32638C.1.pep
AQDPGPGAVPPVVFLSGGVNGPFIFKGLSPGVMFPLGGIGIILLDLPVDRPRPRSPPVFFXSPGPIPVFFSFPMALFFPRLKIPGPLWGGL

SEQ ID NO: 295570 - protein, 87 aa, Zea mays
  unsure (1)..(87): unsure at all Xaa locations
  Clone ID: MRT4577_32639C.1.pep
YLLVLFVLFVSXAAHALIIPQHXLVPSTIITQQLLPPTSMVFEHPAVQAYMLHQAITASDLHQPIYQLQQQSLAHLTIQTIASQQKR

SEQ ID NO: 295571 - protein, 51 aa, Zea mays
  Clone ID: MRT4577_3263C.1.pep
KVRIFLKLWVSPHPQGGNVLVKNVPAASSIPIIIFAISPLGGSGGSWFPRA

SEQ ID NO: 295572 - protein, 124 aa, Zea mays
  Clone ID: MRT4577_32640C.1.pep
TLFLDPKIPRKIPPQKGGNGNSAPYKKFLEGPKKKPGGKGGFLKNRFLNLKQQRGGGNPKAGGNPQLPGGLGPKQGRTLKQHKTDFGGKSQNPQGGKPGQFWGKPPPLALFGKKKRGKNNGGGG

SEQ ID NO: 295573 - protein, 78 aa, Zea mays
  unsure (1)..(78): unsure at all Xaa locations
  Clone ID: MRT4577_32641C.1.pep
LNPLFLIKFSGLPPRVXISQHINNNFSKQPFNLPLPNLPPHQHSPKTIHSTAMATVDRSIFFHSPVLKHPHSFFMLFA

SEQ ID NO: 295574 - protein, 65 aa, Zea mays
  Clone ID: MRT4577_32642C.1.pep
IYFLWGGGIKKPPALGPLFSRVLSYIGPPGIFGPTPLCGTKTNPGVLIAPVKPGVLGVKLLQTGS

SEQ ID NO: 295575 - protein, 61 aa, Zea mays
  Clone ID: MRT4577_32643C.1.pep
PHPPHTHARPVQVAATTTTPTAPSVSASGGSSTGAQRHRRRRVNVEAGRMTILQCYIYRTA

SEQ ID NO: 295576 - protein, 192 aa, Zea mays
  unsure (1)..(192): unsure at all Xaa locations
  Clone ID: MRT4577_32644C.1.pep
MESTGKILMERYEVGRLLGKGTFGKVHYAKNLESNESVAIKMMDKDKVLKAGLSEQIRREITTMRLVAHKNIVELHEVMATRNNIYFVMEYVKGGELFDKIGKSGKLTEAAAXSTSSSSLXAVDYCHSRGVYHRDLKPENLLLDENENLKVSDFXGLSALSESRXADGLLHTHCXTPXAYVAPEVISKTGYD

SEQ ID NO: 295577 - protein, 170 aa, Zea mays
  Clone ID: MRT4577_32645C.1.pep
MAGIGRNMVAPLLVLNLIMYIIVIGFASWNLNHFINGQTNYPGVAGNGATFYFLVFAILAGVVGAASKLAGVHHVRAWRHDSLATNAASSLIAWAITALAFGLACKEIHIGGHRGWRLRVLEAFVIILAFTQLLYVLMLHTGLFGGSGGYRDHDYGVGGAAGEPKGVTRV

SEQ ID NO: 295578 - protein, 443 aa, Zea mays
  unsure (1)..(443): unsure at all Xaa locations
  Clone ID: MRT4577_32646C.1.pep
MESTGKILMERYEVGRLLGKGTFGKVHYAKNLESNESVAIKMMDKDKVLKAGLSEQIRREITTMRLVAHKNIVELHEVMATRNNIYFVMEYVKGGELFDKIGKSGKLTEAAAXSTSSSSLXAVDYCHSRGVYHRDLKPENLLLDENENLKVSDFGLSALSESKGQDGLLHTTCGTPAYVAPEVISKTGYDGAKSDIWSCGVVLFVLVAGYLPFRAPNMMEMYRKIQNGDFRCPSWFSHKLKKLLYKILDPSPDTRISVQKIKESTWFRKGPVETRTVKEKILSENDTTNAAPAVAMRRKKNVHEDVKPPTVTSLNAFEIISFSTGLDLSGLFIRKECKKETRFTSDKGAVSIISKLEDVAKALNLRVRKKDNGVVKIQGRKVGRKGVLEFDTEIFEITASYHLIEMKQTGGDSLEYKKLLEEDIRPALKDIVWAWHGDDQQQK

SEQ ID NO: 295579 - protein, 143 aa, Zea mays
  Clone ID: MRT4577_32647C.1.pep
SHSFFIPRAFTFRFLHSPVHSLDLLVTHSTSRRFIDKRATSVPLCRVCPALVSFVSFFHPIKLSNNPRTVLHTLANSGLSSDESIYISATDNIKPSSSKPALLESTMPPPPDIPLTETEALLIEAYNRILNEPFEDKYEDLWE

SEQ ID NO: 295580 - protein, 170 aa, Zea mays; identical to SEQ ID NO: 295577
  Clone ID: MRT4577_32648C.1.pep

SEQ ID NO: 295581 - protein, 103 aa, Zea mays
  Clone ID: MRT4577_32649C.1.pep
PVAGCLASSGGCPVCRGLSFRGARSALPGAPSRAWARFGWPPPACFRAWSWARARRLRWRRGPGPPVFSPVVVRHRAAPRLSAPRLGYGRGAWPRAAVASASA

SEQ ID NO: 295582 - protein, 139 aa, Zea mays
  unsure (1)..(139): unsure at all Xaa locations
  Clone ID: MRT4577_3264C.1.pep
CLEHHIAWLQGSSDKLQDTWQEQHPTELGLENENNHMSILSIGVISMKSCERALLHVVCELCYRKNXRMSFENVHTMADLVYEVELIGFDDGNYVKYLTDITLDXSIATTDNKNIEANAYLKDKKLDEAMQQYDMAIAY

SEQ ID NO: 295583 - protein, 479 aa, Zea mays
  Clone ID: MRT4577_32650C.1.pep
TIGTHTQLPSCLLDFAERRSGRVLRRRRRRTRMVKSVLGDEEHLKAFEETLASPSSPPCQAQVGLVVGKLSSSSDRALIYALLPTPLTDAAAPACSLRAAPKSKPSKGGGKAPSSSDASLDFDVEWISEHARQVIRAICQACYGSASGVRLLVHISYSPRRWACRICEVASGSLRPCDFKYSKLLASLQTFRCTYNFEIRLTSVQAEPFKKIILKAISHLTEEVQNARALVDGQLFSEEMNISTEDPHQVDFLVPFKNAVPVEECSLEGVAGLIRFIGSVSALAYLGPKESISEAISDLKADIVTSLKSRLDIILDEADDGPATAEVEKSPSQKATQVIFHELREPYSFSFPRRVLIPWLSGTYVCDYLQQPETAEDAVDRFKEVIGALETAVERSSILEPESAAAACSVLESFWDMVPGSGSGGQGGSSKLKDSHSIQKDDSSKGQGGLNFSIVAALIVLLVALIAGLLFTGSAGYPI

SEQ ID NO: 295584 - protein, 338 aa, Zea mays
  Clone ID: MRT4577_32651C.1.pep
MIKFLPFLTFRLTFQARPKGKAGGPTIGTHRPNSQVACLISPSRRSGRVLRRRRRRTRMVKAVLGDEEHLKAFEETLASPSSPPCQAQVGLVVGKLSSSSDRALVYALLPTPLTDAAAPACSLRAAPKSKPSKGGGKAPSSSDASLDFDVEWIAEHARQVSRMLLGGMSVMGAYVWASEASFKATSPAVLSQVIRAICQACYGSASGVRLLVHISYSPRRWACRICEVASGSLRPCDFKYSKLLASLQTFRCTYNFEIRLTSVQAEPFKKIILKAISHLTEEVQNARALVDGQLFSEEMNISTEDPHQVDFLVPFKNAVPVEECSLEGVAGLIRFIGS

SEQ ID NO: 295585 - protein, 578 aa, Zea mays
  unsure (1)..(578): unsure at all Xaa locations
  Clone ID: MRT4577_32652C.1.pep
MASSTAASPLTCHHLGSVGARPRLPSLSISLRRRSSSSSKPTSLSHSLPSKHSLAPPPAAXPHPPVAVSPPYPPPPPPPXPAPDPVPVPAPAPAPAPAPAAPPKKPALQGAAIKPLLASIATGVLIWLIPPPAGVPRNAWQLLAIFLSTIVGIITQPLPLGAVALLGLGAAVLSRTLTFAAAFSAFGDPIPWLIALAFFFARGFIKTGLGSRVAYAFVAAFGSSSLGLGYSLVFAEALLAPAIPSVSARAGGIFLPLVKSLCEACGSRAGDGTERRLGAWLMLTCFQTSVVSSAMFLTAMAANPLSANLTAATIGEGIGWTLWAKAAIVPGLLSLVLVPLILYVIYPPEVKASPDAPRLAKERLAKMGPMSKEETIMAGTLLLTVGLWIFGGMLNVDAVSAAILGLAVLLISGVVTWKECLAESVAWDTLTWFAALIAMAGYLNKFGLISWFSETVVKFVGGLGMSWQLSFGVLVLLYFYSHYFFASGAAHIGAMFTAFLSVASALGTPSLFAAMVLSFLSNLMGGTTHYGIGSAPVFYGAGYVPLAQWWGYGFVISVVNIIIWLGVGGFWWKIIGLW

SEQ ID NO: 295586 - protein, 41 aa, Zea mays
  Clone ID: MRT4577_32653C.1.pep
GRIRAAAAKCRQELAEGYAISTVAGTAPSDGGCSTRPTTRP

SEQ ID NO: 295587 - protein, 120 aa, Zea mays
  unsure (1)..(120): unsure at all Xaa locations
  Clone ID: MRT4577_32654C.1.pep
KIIPXRGFFFIFVCAPLGASPLPFIVEGRGTRPGTRKRNSPTTSGSVATYNSLSVARWGQHATHSETTAGARNQHTEEGSPPRKPEPAPSRTPSPRSGEDKMQNIHIRPHYHPIFSNVGF

SEQ ID NO: 295588 - protein, 501 aa, Zea mays
  Clone ID: MRT4577_32655C.1.pep
MARLRCVFVVFVLLSSALRLPGDAIASRGHHGPAAHDYRDALVKSILFFEGQRSGKLPPSQRVSWRRDSGLSDGHSAKVDLVGGYHDAGDNVKFGFPMAFSMTMLAWSVVEFGGLMKSELQHARDAVRWGADYLLKATAHPDTIYVQVGDATKDHACWERPEDMDTPRTVYKVDRGTPGSDVAAETAAALAAASLVFRKSDPAYASSLVARAKRVFEFADKHRGSYSTGLAADVCPYYCSYSGYQDELLWGAAWLHRATKSPSYLSYIQTNGQVLGADESDNTFGWDNKHAGARVLISKSFLVQRLGALHEYKGHADGFICSMVPGTATDQTQYTRGGLLFRLSDSNMQYVTSSSFLLLTYAKYLAFAKQTVRCGGVAVTPQRLRAIARRQVDYLLGSNPMGMSYMVGYGAKYPRRIHHRASSLPSVAAHPARIGCSQGFTALYAGGANPNLLVGAVVGGPDMQDRFPDERNDHEHSEPATYINAPLVGALAYLAHSYGQL

SEQ ID NO: 295589 - protein, 84 aa, Zea mays
  Clone ID: MRT4577_32656C.1.pep
AAPVFASRVIQYRSRHIVDHHGVQALVTRYALLVLNGKRSRSIRPIETPQVIRRTHTRTEAYVHQESRPRYRPVKSVRRYPTTI

SEQ ID NO: 295590 - protein, 89 aa, Zea mays
  unsure (1)..(89): unsure at all Xaa locations
  Clone ID: MRT4577_32657C.1.pep
MTQLTAAAYKQHDAPMHDVGSGDGYESNNKARAGLCGLLXERKYVDLARAYQRLMEAPYSATLAHTANSLLADRVSALGVAAHRATASV

SEQ ID NO: 295591 - protein, 246 aa, Zea mays
  Clone ID: MRT4577_32658C.1.pep
MAGTVTVPGSSVPSTPLLKDELDIVIPTIRNLDFLEMWRPFFQPYHLIIVQDGDPSKVIKVPEGFDYELYNRNDINRILGPKASCISFKDSACRCFGYMVSKKKYVFTIDDDCFVAKDPSGKDINALEQHIKNLLSPSTPFFFNTLYDPYREGADFVRGYPFSLREGAPTAVSHGLWLNIPDYDAPTQMVKPRERNSRYVDAVLTIPKGTLFPMCGMNLAFDRQLIGPAMYFGLMGDGQPIGRYDD

SEQ ID NO: 295592 - protein, 135 aa, Zea mays
  unsure (1)..(135): unsure at all Xaa locations
  Clone ID: MRT4577_32659C.1.pep
MLGRAPXKSDNTKHYEILGVPKAASQDDLKKAYRKGGIKNHPDKVGDPQKLMELAQAYQALSDPQKREIYDQYGDDALKEGMGGGXSHVDPFDIFSSFFGPSVGGGGGSSXRRRHRMREDVVHPLKVSVGDLYNG

SEQ ID NO: 295593 - protein, 74 aa, Zea mays
  Clone ID: MRT4577_3265C.1.pep
TNNSRIAKYRPVSVDDNAQGRQPNTDEPRGSTLILVEVVATRILTVTLISALYPISFLFFGFVLCMYDDFPRDG

SEQ ID NO: 295594 - protein, 93 aa, Zea mays
  Clone ID: MRT4577_32660C.1.pep
DPQNKPIIFTMAHHRRMKNLTRLVEMYSRNKQLQELVNLIVVYSDHNNPSKDKEEQAEFKKMFELIEQYNLKGHIHWISTQMKRVHNGELYRY

SEQ ID NO: 295595 - protein, 290 aa, Zea mays
  Clone ID: MRT4577_32661C.1.pep
MSVDADIADSVTLARAILPGSKALACRTRRAVAPSASRERDGNWHWARVTVALVASTRYTAATDASPHLKCSICREVQGKHTRRRLTCDYGIETSAHDEERLRREYMTLARNSRTVKGLPHPKKPLRAYLLPSDNHWIAFEDQAMGWINVNDDSSLLAWVGVETGSLYRERKTGGAGLRNRQCRLMDMLPHLSQDQRAYRFYKMRGGNYDTSKQQVSLEIHYKWPEFQQGKLENMIEGALYDIIEDLCTFIMKDVIPIKGKYHDATSTLARPEFKVLTEISRISLSRDSY

SEQ ID NO: 295596 - protein, 46 aa, Zea mays
  Clone ID: MRT4577_32662C.1.pep
PTTLKVILLYLRTPQSPPLIKVYLNSNTNPIKNSSNPLLPLKQTKP

SEQ ID NO: 295597 - protein, 206 aa, Zea mays
  Clone ID: MRT4577_32663C.1.pep
LLLLSLSPSPFGSPFSFSWRRRLASTPQGVAERRGIPAAAFVEDVEAYLRQVGLDVNSALAFLQERLQQYKIVEMKLLAQQRDLQAKIPDIEKCLDIVATLQAKKDLGEALIADFELSEGIYSRAKIEDTDSVCLWLGANVMLEYSCDEANALLKKNLENAKASLEVLVADLHFLRDQQTITQVTISRVFNWDVHHRRSKQAVKET

SEQ ID NO: 295598 - protein, 101 aa, Zea mays
  Clone ID: MRT4577_32664C.1.pep
SLFMRRLALSLFQTPPRGGSIDRDPFCFPHSPTPSCPTNKTEVSVGFLRKAKSETIPGPGVRFVDFWRPLGGRGVMNFCKAIEGGLVVGFFRAGDSFGVWE

SEQ ID NO: 295599 - protein, 66 aa, Zea mays
  unsure (1)..(66): unsure at all Xaa locations
  Clone ID: MRT4577_32665C.1.pep
GAGSRPFSFVGGSPSLCVAVLVASVGALFVLSGSVRSWGVPVFCPPPGLCLXRVLICVGRPGSSGA

SEQ ID NO: 295600 - protein, 65 aa, Zea mays
  Clone ID: MRT4577_32666C.1.pep
FLPYQMVIESVPIRLRHTYITRSTPELNSTSPSCMHYIHAYMVHSFQCALLQERLNFAGPFAILS

SEQ ID NO: 295601 - protein, 63 aa, Zea mays
  Clone ID: MRT4577_32667C.1.pep
SHSSAHASALIYSHAIPDAGGDSSSLTCIASDHKHWQKFTLLLLKYSAAPMSNYTGRTIPKFF

SEQ ID NO: 295602 - protein, 58 aa, Zea mays
  Clone ID: MRT4577_32668C.1.pep
NQNLSFGTMHMGYILVSRKLQWEEGIPTPMVGRDEEIHLGVGQALSTLAEPNRREGNG

SEQ ID NO: 295603 - protein, 63 aa, Zea mays
  unsure (1)..(63): unsure at all Xaa locations
  Clone ID: MRT4577_32669C.1.pep
LLHTHVVSXGYFLLHMNGVFSCFGLKPKNWQIVSYHNFGLXXLXXLSXXVXXXXMXXKASPCV

SEQ ID NO: 295604 - protein, 74 aa, Zea mays
  Clone ID: MRT4577_3266C.1.pep
VTVRAEARKSVLIANTDGGGHARIGFYLDKELLADGHAVTVLTVGDEAYDKMKKPPFSRFSELTSAGGRTVWGD

SEQ ID NO: 295605 - protein, 209 aa, Zea mays
  Clone ID: MRT4577_32670C.1.pep
MRPPRLMMNYIGLLWSNQGALNLVLQDHHFSVFVSEDEGFNSVVSLIIDMISSLEKHLVDASHSIAEHGLRYIFLMNNCDFITQQVRSLDLPAWFPSDDSKIQGYIDAYLHASWTPVLSCLYVDIPFGPRRYASLSKFESQFNTICDSHRLWKVPDPELRKRLRKAIIEKVIPWYARYLEQRAATGRRTTSRSSTPHQLQEVLEELFEG

SEQ ID NO: 295606 - protein, 107 aa, Zea mays
  unsure (1)..(107): unsure at all Xaa locations
  Clone ID: MRT4577_32671C.1.pep
MAPPQPKXGLFVGINXGHVITKRKLTSLPCHRKGKSTKRVSMVMGLIRDVDGFAPYDNHMTELLKVGKDKPALKLTXRKLATHKRAGKRIEEMTGVLMRMRTGGYAH

SEQ ID NO: 295607 - protein, 265 aa, Zea mays
  unsure (1)..(265): unsure at all Xaa locations
  Clone ID: MRT4577_32672C.1.pep
MAAKLTRLHSLRERLGATFSSHPNELIALFSRYVHQGKGMLQRHQLLAEFDALFDSDKEKYAPFEDILRAAQEAIVLPPWVALAIRPRPGVWDYIRVNVSELAVEELSVSEYLAFKEQLVDGQSNSNFVLELDFEPFNASFPRPSMSKILIVTRLLPDAAGTTCGQRLEKVIGTEHTDIIRVPFRNENGILRKWISRFDVWPYLETYTEDVSSEIMKEMQAKPDLIIGNYSDGNLVATLLAHKLGVTQCTIAHALEKTXYPTRNL

SEQ ID NO: 295608 - protein, 159 aa, Zea mays
  Clone ID: MRT4577_32673C.1.pep
TIPMMFNVVILSPHGYFAQSNVLGYPDTGGQVVYILDQVRALENEMLLRIKQQGLDITPKILIVTRLLPDAAGTTCGQRLEKVIGTEHTDIIRVPFRNENGILRKWISRFDVWPYLETYTEDVSSEIMKEMQAKPDLIIGNYSDGNLIATLLAHKLGVT

SEQ ID NO: 295609 - protein, 169 aa, Zea mays
  unsure (1)..(169): unsure at all Xaa locations
  Clone ID: MRT4577_32674C.1.pep
YLSDARAGSLSTFFDVCGXVVGGVLEGHMSDRLNARAITRRELHLLRDPELLLDRMTGACXMAWNVSLXFVTVMIENGPYALITTAAYVDLCTHRWVNEHXRAVVTGTAIIDGTGSDGADIRAVVTGYVXAGAGAAVFTMLVADALLAGLILSKLMCAELQGKTHTSVS

SEQ ID NO: 295610 - protein, 43 aa, Zea mays
  Clone ID: MRT4577_32675C.1.pep
YDDSIHANNEIAGYRGCVAARSRATGISRSASGHVPTPPCAMV

SEQ ID NO: 295611 - protein, 802 aa, Zea mays
  Clone ID: MRT4577_32676C.1.pep
MAAKLTRLHSLRERLGATFSSHPNELIALFSRYVHQGKGMLQRHQLLAEFDALFDSDKEKYAPFEDILRAAQEAIVLPPWVALAIRPRPGVWDYIRVNVSELAVEELSVSEYLAFKEQLVDGQSNSNFVLELDFEPFNASFPRPSMSKSIGNGVQFLNRHLSSKLFQDKESLYPLLNFLKAHNYKGTTMMLNDRIQSLRGLQSSLRKAEEYLLSVPQDTPYSEFNHRFQELGLEKGWGDTAKRVLDTLHLLLDLLEAPDPANLEKFLGTIPMMFNVVILSPHGYFAQSNVLGYPDTGGQVVYILDQVRALENEMLLRIKQQGLDITPKILIVTRLLPDAAGTTCGQRLEKVIGTEHTDIIRVPFRNENGILRKWISRFDVWPYLETYTEDVSSEIMKEMQAKPDLIIGNYSDGNLVATLLAHKLGVTQCTIAHALEKTKYPNSDIYLDKFDSQYHFSCQFTADLIAMNHTDFIITSTFQEIAGSKDTVGQYESHIAFTLPGLYRVVHGIDVFDPKFNIVSPGADMSVYYPYTETDKRLTAFHPEIEELIYSDVENSEHKFVLKDKKKPIIFSMARLDRVKNMTGLVEMYGKNARLRELANLVIVAGDHGKESKDREEQAEFKKMYSLIDEYKLKGHIRWISAQMNRVRNGELYRYICDTKGAFVQPAFYEAFGLTVIESMTCGLPTIATCHGGPAEIIVDGVSGLHIDPYHSDKAADILVNFFDKCKGDPSYWDKISQGGLQRIYEKYTWKLYSERLMTLTGVYGFWKYVSNLERRETRRYIEMFYALKYRSLASQVPLSFD

SEQ ID NO: 295612 - protein, 802 aa, Zea mays
  Clone ID: MRT4577_32677C.1.pep
MAAKLTRLHSLRERLGATFSSHPNELIALFSRYVHQGKGMLQRHQLLAEFDALFDSDKEKYAPFEDILRAAQEAIVLPPWVALAIRPRPGVWDYIRVNVSELAVEELSVSEYLAFKEQLVDGQSNSNFVLELDFEPFNASFPRPSMSKSIGNGVQFLNRHLSSKLFQDKESLYPLLNFLKAHNYKGTTMMLNDRIQSLRGLQSSLRKAEEYLLSVPQDTPYSEFNHRFQELGLEKGWGDTAKRVLDTLHLLLDLLEAPDPANLEKFLGTIPMMFNVVILSPHGYFAQSNVLGYPDTGGQVVYILDQVRALENEMLLRIKQQGLDITPKILIVTRLLPDAAGTTCGQRLEKVIGTEHTDIIRVPFRNENGILRKWISRFDVWPYLETYTEDVSSEIMKEMQAKPDLIIGNYSDGNLVATLLAHKLGVTQCTIAHALEKTKYPNSDIYLDKFDSQYHFSCQFTADLIAMNHTDFIITSTFQEIAGSKDTVGQYESHIAFTLPGLYRVVHGIDVFDPKFNIVSPGADMSVYYPYTETDKRLTAFHPEIEELIYSDVENSEHKFVLKDKKKPIIFSMARLDRVKNMTGLVEMYGKNARLRELANLVIVAGDHGKESKDREEQAEFKKMYSLIDEYKLKGHIRWISAQMNRVRNGELYRYICDTKGAFVQPAFYEAFGLTVIESMTCGLPTIATCHGGPAEIIVDGVSGLHIDPYHSDKAADILVNFFDKCKADPSYWDKISQGGLQRIYEKYTWKLYSERLMTLTGVYGFWKYVSNLERRETRRYIEMFYALKYRSLASQVPLSFD

SEQ ID NO: 295613 - protein, 117 aa, Zea mays
  unsure (1)..(117): unsure at all Xaa locations
  Clone ID: MRT4577_32678C.1.pep
RATTPXAREREQGTARAAAQKKTHKKAEKPAREQSPQAEAKRHPAXPGEQNPGGSKKGNKPRGRGETSSPRPSAATAKPENTPRRKGHHPAPPPRGRDGNRRPPTPNRRPSRRQDAG

SEQ ID NO: 295614 - protein, 88 aa, Zea mays
  Clone ID: MRT4577_32679C.1.pep
MSTPSRRRLMKDFKRLQSDPPGGISGAPCSDNIMLWNAVIFGPGDTPFEDGTFKLLLQFDETYPNKPPTVKFVSKMFHPNVYANGELC

SEQ ID NO: 295615 - protein, 54 aa, Zea mays
  Clone ID: MRT4577_3267C.1.pep
TCEQWTSMSKFSCLNLCAACSVHTTRPMSINFYLIGLDQDSHSPVQINTKFYLI

SEQ ID NO: 295616 - protein, 66 aa, Zea mays
  Clone ID: MRT4577_32680C.1.pep
LRFDSFRTRFTLFFWLRRHPAPPFPCCFNCLNLAIGDIIFPPPRKFCFAGTDKLPKYCVCCSILLY

SEQ ID NO: 295617 - protein, 124 aa, Zea mays
  Clone ID: MRT4577_32681C.1.pep
EVLSAFPFFRLTSKTKALPWCQSPFPPHWPVCLSIWEAGFPVFLPGHGSWWPTGFLVFSSAPEPPPFFVSGLLLCGFGALYPFPPVPRFSRFSPVLPFPSLIPYLESLPAPGCGSRFARWAPCW

SEQ ID NO: 295618 - protein, 110 aa, Zea mays
  Clone ID: MRT4577_32682C.1.pep
GSPNASWIWRPGQNELRVNKARDRPGMRAYLFFNVIQLLIATASSKALHDHSGINLIEVGDHLPNGHAAPVERTFDDDALHVAGHRMQPIDQTNHDRCQRREVGTHRAHS

SEQ ID NO: 295619 - protein, 74 aa, Zea mays
  Clone ID: MRT4577_32683C.1.pep
VPGPGEYDAGANENEGERAERRPVAAGGGRFAGGEQVGLSVDAHDSWASGFRIVFFPVDGLANRLSHSLDSRDC

SEQ ID NO: 295620 - protein, 70 aa, Zea mays
  Clone ID: MRT4577_32684C.1.pep
PARVLTDPQFFMASPERPRGVRGSRRAITYNGTRSWPVPRRTLMKTALHMCTLSATACSPDRHVKRPFLY

SEQ ID NO: 295621 - protein, 216 aa, Zea mays
  unsure (1)..(216): unsure at all Xaa locations
  Clone ID: MRT4577_32685C.1.pep
AANGAWVQPFRLYDPRVPELLKLLHQDTFFPSEKFMMTEVIELLGSFGLKRNFGFSTLLDMARSVSLVQNSGQGDAFDYGQKLLAYLNILESKTSKMEGGETYLEDGNLEASEISETLEPNNHGDVCDPCDQTSVSLFSNFNYDMPEDLFWSELKNISWCPVHVAPLLKGLPWFISEDIIAPPVITRPKSQMWLVSSKMRILSADSCSMYLXRKLG

SEQ ID NO: 295622 - protein, 101 aa, Zea mays
  Clone ID: MRT4577_32686C.1.pep
IFSPAFIERGVRCRRCGGLAPQPSSPNRRLSTAPAPRPDLGRASPLTVESAARSHPPQLHLRCVPVQEERDGAGGEVEGRCGHWRRAGGERRSDSRVVGPS

SEQ ID NO: 295623 - protein, 91 aa, Zea mays
  unsure (1)..(91): unsure at all Xaa locations
  Clone ID: MRT4577_32687C.1.pep
MDGGPGEEGKHERHLVLAHKLFLVSHPSVDDLSKVALRSEVLHTVKSTDMATLFESTGXAGPVLEGDAALLAEMHGRSDKEIRKLHETIAD

SEQ ID NO: 295624 - protein, 76 aa, Zea mays
  Clone ID: MRT4577_32688C.1.pep
MAVARAPLGAVAAMAVAALVFAILMTAAAAAQAPAPAPTSDGTSIDLGIAYILMLVALVLTYLIHPLDASSPYKLF

SEQ ID NO: 295625 - protein, 80 aa, Zea mays
  Clone ID: MRT4577_32689C.1.pep
VSEVMMHRSVIQLRPISYAWSGRRAAQRRGRTRLLLVLLLRGEEREQGPAGRAAREKDVARSLSEASACVRFIGRVCGPG

SEQ ID NO: 295626 - protein, 120 aa, Zea mays
  Clone ID: MRT4577_3268C.1.pep
SKIDGKFTLPPPRSYETRCGGHAVFRFRPWVQRDLACTTRSQPTRSPGSSLTLFLAFASPRFHPPTSVRLRAPPNPRSRTGGSHVQAMGQRRRRRVGAGRRARRGGRARAGPDLSGPTRP

SEQ ID NO: 295627 - protein, 352 aa, Zea mays
  unsure (1)..(352): unsure at all Xaa locations
  Clone ID: MRT4577_32690C.1.pep
MRAAAAATATAAALLAPGLKLCAGRARVSSPSGLPLRRVTAMASAPNSSFRPEEARSPPALELPIPPLSKFKVALCQLSVTADKSRNIAHARAAIEKAASDGAKLVVLPEIWNGPYSNDSFPEYAEDIEAGGDAAPSFSMLSEVARSLQITLVGGSIAERSGNNLYNTCCVFGSDGQLKGKHRKIHLFDIDIPGKITFKESKTLTAGQSPTVVDTDVGRIGIGICYDIRFQELAMLYAARGAHLLCYPGAFNMTTGPLHWELLQRARATDNQLFVATCAPARDTSAGYVAWGHSTLVGPFGEVIATTEHEEATIIADIDYSLIEQRRQFLPLQHQRRXDLYQLVDVQRLGSH

SEQ ID NO: 295628 - protein, 209 aa, Zea mays
  Clone ID: MRT4577_32691C.1.pep
MRAAAAATATAAALLAPGLKLCASGARARVSCPSRSRLPLHRVAAMASAPNPSFRPEEARSPPALELPTPPLSKFKVALCQLSVTADKNRNIAHARAAIEKAASEGAKLVLLPEIWNGPYSNDSFPEYAEDIEAGGDAAPSFSMMSEVARSLQVTLVGGSIAERSGNNLYNTCCIFGSDGKLKGKHRKIHLFDIDIPGKITFKESKTLT

SEQ ID NO: 295629 - protein, 354 aa, Zea mays
  Clone ID: MRT4577_32692C.1.pep
MVATAAAAATATAAALLAPGLKLCAGRARVSSPSGLPPRRVTAMASAPNSSFRPEEARYPPALELPIPRLSKFKVALCQLSVTADKSRNIAHARAAIEKAASDGAKLVVLPEIWNGPYSNDSFPEYAEDIEAGGDAAPSFSMLSEVARSLQITLVGGSIAERSGNNLYNTCCVFGSDGQLKGKHRKIHLFDIDIPGKITFKESKTLTAGQSPTVVDTDVGRIGIGICYDIRFQELAMLYAARGAHLLCYPGAFNMTTGPLHWELLQRARAADNQLFVATCAPARDTSAGYVAWGHSTLVGPFGEVIATTEHEEATIIADIDYSLIEQRRQFLPLQHQRRGDLYQLVDVQRLGSQ

SEQ ID NO: 295630 - protein, 269 aa, Zea mays
  Clone ID: MRT4577_32693C.1.pep
MVAAAAAAATATAAALLAPGLKLCAGRARVSSPSGLPLRRVTAMASAPNSSFRPEEARSPPALELPIPPLSKFKVALCQLSVTADKSRNIAHARAAIEKAASDGAKLVVLPEIWNGPYSNDSFPEYAEDIEAGGDAAPSFSMLSEVARSLQITLVGGSIAERSGNNLYNTCCVFGSDGQLKGKHRKIHLFDIDIPGKITFKESKTLTAGQSPTVVDTDVGRIGIGICYDIRFQELAMLYAARGAHLLCYPGAFNMTTGPLHWELLQRAR

SEQ ID NO: 295631 - protein, 78 aa, Zea mays
  Clone ID: MRT4577_32694C.1.pep
TTLLYHQSIVTFRLQTNQGKIFMCEHTLCASSQLFIKHVSVITHTRLFTSRIHRILCPPQSACLKPKSCSHTTKKKDP

SEQ ID NO: 295632 - protein, 526 aa, Zea mays
  unsure (1)..(526): unsure at all Xaa locations
  Clone ID: MRT4577_32695C.1.pep
RGEWLNNLRFGVFGLGNXQYEHFNKVGKVVDQLLAEQGAKRIVPVGLGDDDQCIEDDFNAWKELLWPELDKLLRQEDDSSTAPTPYTAAIPEYRVVFVKPEDDMYINKSFALSNGHTVYDIQHPCRANVAVRRELHTPASDRSCIHLEFDIAGTGLKYETGDHVGVYAENCIETVEEAEKLLGYSPDTLFSIYADQEDGTPLCGGSLPPPFPSPCTVRTALTRYADLLNSPKKSALLALAAHASDSKEAERLRHLASPAGKKEYSQWIVTSQRSLLEVMSEFPSAKPPLGVFFAAICPRLQPRYYSISSSPRIAPTRIHVTCALVYGPTPTGRIHKGVCSTWMKHSTPLEDSKDCSWAPIFVRQSNFKLPADPTVPIIMIGPGTGLAPFRGFLQERLALKQAEVELGHAVLFFGCRNRKMDFIYEDELNNFVDXGALSELIVAFSREGPTKEYVQHKMAQKAAELWSIISQGGYIYVCGDAKGMARDVHRTLHTIVQEQGSMDNNSKAESYVKSLQMEGRYLRDVW

SEQ ID NO: 295633 - protein, 34 aa, Zea mays
  Clone ID: MRT4577_32696C.1.pep
LFSSTSYILHLKSSIILNTLGFIANFHKSTLIHI

SEQ ID NO: 295634 - protein, 148 aa, Zea mays
  Clone ID: MRT4577_32697C.1.pep
AEPRVRKTIEIDDERKTFIFYEKRMAQGVGADSLGDEFKGYVLRITGGNDKQGFPLKQGVLVPHRVKLLLSKGHSCYRPLRTGERKRKSVRGCIVCPDVRALHLVVVKQGENDIPGLTDEVLPKRLGPKRATKIPSFFNLDKSDDLRK

SEQ ID NO: 295635 - protein, 77 aa, Zea mays
  Clone ID: MRT4577_32698C.1.pep
PSPGGPYVVGCKKKCWTNPWHFLSFCNGGTPRVRPPWSLVGVPGCPPRGKAKTHAIISLFGWGHKKSPLWCPHQVVL

SEQ ID NO: 295636 - protein, 146 aa, Zea mays
  unsure (1)..(146): unsure at all Xaa locations
  Clone ID: MRT4577_326C.1.pep
SLRTSDKASTLSEESHFQENLEQNDQMFRPSWKDIFRMNQSELEAEIRKXVSRDSTLDPRRKAYLIQNLMTSRWIAAQQKSPQPSVEGHNGCTRRPGCVPSYRDPGKQIFGCEHYKRNCKLVAACCNKLFTCIFCHDKVSDHTMDR

SEQ ID NO: 295637 - protein, 63 aa, Zea mays
  Clone ID: MRT4577_32700C.1.pep
KHGFPLTPHIQLVLFSQTGYFLSTLMCTPPCFTTPPPPRLSPLSPVFRRKCWHHGGLLGVSSL

SEQ ID NO: 295638 - protein, 75 aa, Zea mays
  Clone ID: MRT4577_32701C.1.pep
ARRAEQAADNFHTRRRGYHVDQRLAFMPSPHPAVPGRPRIDLDGRLQSVVHCDRAEGYLSICPHMCACAQGNLRT

SEQ ID NO: 295639 - protein, 52 aa, Zea mays
  Clone ID: MRT4577_32702C.1.pep
QLKLLCFSRYGSCLGHLEKLKPNLLLDIHLHEHVESLYMDIRHKANFDLSCD

SEQ ID NO: 295640 - protein, 562 aa, Zea mays
  unsure (1)..(562): unsure at all Xaa locations
  Clone ID: MRT4577_32703C.1.pep
MECVTDMPLATLDSRPRKRQRLGWDVLPAEMYQVTRPRLGWDVGPAEMNQFALCGQEVVNAFSAAVLGLSSGCVSSQVNQEQPHDGSPPLRXKMTRMGIMFLXVGDNLTSRYKINAKMGEGTFGQVLECWDKETKEMVAIKIIRGIKKYRDAAMIEIGMLEKLGKYGESRSRXLLVQLAPICVLTFIRLLVYKLVYFXCVQIRNWFDYRNHICIVSTLLDYDNYALTQKYNHMVLKRWXFGLMVSXFERLGPSLYDFLRKNNYRSFPIALVREFAKQLLECXHVCAQFFLLPLLHYNAYTLVLCIICAALQPVINPLLMLVLQGVSNIMXFLYLPSLCXVAVMHELRLIHTDLKPENILLVSPEYIKVPDYKVSSQSPKEGSYYKQLPKSSAIKVIDFGSTTYDQHDQSYVVSTRHYRAPEVILGHGWSYPCDIWSVGCILVELCTGEALFQTHENLEHLAMMERVLGPLPYHMLKRADRHSDKYIRKGRLNWPEGCTSRESMKAVMKLSRLQNLVMQNVDQAAGDFIGLLQGLLKYDPASRLTAREALRHPFFTEGFGRRR

SEQ ID NO: 295641 - protein, 358 aa, Zea mays
  Clone ID: MRT4577_32704C.1.pep
PPLREDDRDGHYVFAVGDNLTSRYKINAKMGEGTFGQVLECWDKERKEMVAIKIIRGIKKYRDAAMIEIGMLEQLGKYDESRSSCVQIRNWFDYRNHICIVFERLGPSLYDFLRENSYRSFPIALVREIAKQLLECIAFMHELCLIHTDLKPENILLVSPEYIKVPDYKVSSRSPKEGSYYKRVPKSSAIKVIDFGSTTYDQQDQSYIVSTRHYRAPEVILGLGWSYPCDIWSVGCILVELCTGEAIFQTHENLEHLAMMERVLGPLPYHMFKRADRHSDKYIRKGRLNWPEGCTSRESMKAVMKLSRLQNLVMQNVDQAAGDFIDLLQGLLKYDPSSRLTAREALRHPFFTQGFWRR

SEQ ID NO: 295642 - protein, 327 aa, Zea mays
  unsure (1)..(327): unsure at all Xaa locations
  Clone ID: MRT4577_32705C.1.pep
CVAVMHELCLIHTDLKPENILLVSPEYIKVPDYKVYFVLLFTSPTQDLPCPVLVDFCCNRLVNIEYGXILFFSFXVSSRSPKEGSYYKRVPKSSAIKVIDFGSTTYDQQDQSYVVSTRHYRAPEVILXSIVFSEKLFLVQPDLVTFYDCVDHVXGLGWSYPCDIWSVGCILVELCTGEAIFQTHENLEHLAMMERVLGPLPYHMFKRXVRFMPLSHIICLRGQGSLNISAVRSGRCLVLINXVCSRHSDKYIRKGRLNWPEGCTSRESMKAVMKLSRLQNLVMQNVDQAAGDFIDLLQGLLKYDPSSRLTAREALRHPFFTQGFWRR

SEQ ID NO: 295643 - protein, 171 aa, Zea mays
  Clone ID: MRT4577_32706C.1.pep
PTRPAEAIDDGKIGPRDDPKIRSKILSEEFGWDKDLAKKIWCFGPETLGPNMVVDMCKGVQYLNEIKDSVVAGFQWASKEGALAEENMRAICFEVCDVVLHADAIHRGGGQIIPTARRVFYASQITAKPRLLEPVYLVEIQAPEQALGGIYSVLNQKRGHVFEEMQRPGTP

SEQ ID NO: 295644 - protein, 67 aa, Zea mays
  Clone ID: MRT4577_32707C.1.pep
FLSSWWSSVSRPFLVAALFCLRCLAGRPCLGSWVRAGFVLVSVPFVLGPGAGVLMVPPFLLVVLGLH

SEQ ID NO: 295645 - protein, 83 aa, Zea mays
  Clone ID: MRT4577_32708C.1.pep
VQSLFFLGQVISRTPETWRKIHSLKPWSANVKQKKNATFIFITPGGGLIFFFKTPSGGSFLPFIKMGGPTYLLSFIGRWGLVP

SEQ ID NO: 295646 - protein, 178 aa, Zea mays
  unsure (1)..(178): unsure at all Xaa locations
  Clone ID: MRT4577_32709C.1.pep
LGTSRPAEKKKITVSNNYFTHHNEVMLLGHSDSYVKDKAMQVTIAFNHFGEGLIQRVPXCRHGYFHVVNNDYTHWEMYAIGGSAEPTINSQGNRYLAPTNPFAKEVTKRVETAHTVWKRWNWRSEGDLLLNGAYFTPSGAGASASYSRASSLGAKSSSMVGTITLDAGALSCHKGAAC

SEQ ID NO: 295647 - protein, 50 aa, Zea mays
  Clone ID: MRT4577_3270C.1.pep
KMLSCDGADRLQTGMRGAFGKPQGTVARVHIGQVIMSMRTKLQNKEHVIE

SEQ ID NO: 295648 - protein, 142 aa, Zea mays
  Clone ID: MRT4577_32710C.1.pep
MALLDPPERLQPEVALNLVRNPLGWGVLAFARRIRVGVSPHDDLATEEFVFFVSKLPSGLALPNPSFLVLLLEGLGLQPLHVTPCFILQAAIIAYLRGMSVEATVLVWEAKLCARTPWTVAPYTRAPVAEWWSVQAHGTGPG

SEQ ID NO: 295649 - protein, 94 aa, Zea mays
  Clone ID: MRT4577_32711C.1.pep
SSFFFFFFFFFFFFFFFFFFFFFFFFLATKTTARGSFCHKTPSPKKKFMGNTRVYMPGKGHGGPALLIFKGLVRPARNNRGHPVKARKPNIFFT

SEQ ID NO: 295650 - protein, 44 aa, Zea mays
  Clone ID: MRT4577_32712C.1.pep
HCGKTATSSLMVMQYLIYNTTVQVNSNLYKKRQFKRLIYINQAK

SEQ ID NO: 295651 - protein, 31 aa, Zea mays
  unsure (1)..(31): unsure at all Xaa locations
  Clone ID: MRT4577_32713C.1.pep
CIFSWKSYRXVFDYVLDNLGQLYVNIIQPPT

SEQ ID NO: 295652 - protein, 130 aa, Zea mays
  Clone ID: MRT4577_32714C.1.pep
DLCCFTGQLSISTDEDPLPYETCLYRRQDPPPAHWGGLLEGRRTVSSGRKHGAPTLQLLARCYYRTDALDIRIGMLGCIAWGRLTSELTDINLAGLTVELSNIKPGAPAALFNELNTRRDACIVYGRSSA

SEQ ID NO: 295653 - protein, 65 aa, Zea mays
  unsure (1)..(65): unsure at all Xaa locations
  Clone ID: MRT4577_32715C.1.pep
CGGPPLMWGQYTPRFSVPYHGNMFGSLVPKKPVQLKPRYRGCRVPPVSMCFSVLCVFFKGXYLAX

SEQ ID NO: 295654 - protein, 71 aa, Zea mays
  Clone ID: MRT4577_32716C.1.pep
EKPATVSVEGIFELAFGEVFSRAAWHRVQREMAEGSNLVSFSTRVGPCNFGVETFGRSQNADEIVSAEKAK

SEQ ID NO: 295655 - protein, 78 aa, Zea mays
  Clone ID: MRT4577_32717C.1.pep
TWPPWALVEEVQAESHVPRYFVTGDYLVDNGHYIDIELMAHTNYPPYRINFDGGPTGRFSNGLTTEDSIYRFLSFYDN

SEQ ID NO: 295656 - protein, 109 aa, Zea mays
  unsure (1)..(109): unsure at all Xaa locations
  Clone ID: MRT4577_32718C.1.pep
QWDPSSRPGTTRHPPSLPPIPPPPPNPTRNRRHGXRRKXPPPGRRRNGRFTRXRRATERPRADATTQQHHPPQAEPETHQHENKHHHKPPPSSATAPLRSKKSRQPRRE

SEQ ID NO: 295657 - protein, 221 aa, Zea mays
  Clone ID: MRT4577_32719C.1.pep
ICGRRCSRISRFNKNIPIILLDDDNDDRGKELENSEALDQGLHSQNKRTFGKIDLNCTELRQQGLLCLDDSTIQRLPDLDLAVNARKQMSRPIERLFFTEEKDTIRGKQEHHEESSTMHAPYSNFFDLGPPWNTGSLKGPKGLPSEVKFGIMDRAPEFSLDLRLDSFTDNNSVAALRSDKLFLGSTSSTSRKLTEKLGMYSYKRQSAPWSEEELDFLWIGV

SEQ ID NO: 295658 - protein, 41 aa, Zea mays
  Clone ID: MRT4577_3271C.1.pep
FRALAFRAQSLRDRISHVIDAECITLKYGAMRNLNVCLKLV

SEQ ID NO: 295659 - protein, 89 aa, Zea mays
  unsure (1)..(89): unsure at all Xaa locations
  Clone ID: MRT4577_32720C.1.pep
ASTAAWANPFDFGSRQGLPTAASIKAMAHQIPRDPAFSRLAAHLXRHVLXSTREHGTPPLMPQQYTESVPQVMEFPHFRTTADPQGNSR

SEQ ID NO: 295660 - protein, 143 aa, Zea mays
  Clone ID: MRT4577_32721C.1.pep
AWNVWADLCAWLWVLRQGSIRRLLWCLLRIRCMILMVLLMFLVRGLLRRMIRSRRWYRIRKRVQRVRCLLLGFGFGVGILRTGLVCRRRLILRWTSRRSCVLMCMLIVSLVRRRVLVAVGAVLLGCVLPLFILCRMRLSPLLV

SEQ ID NO: 295661 - protein, 68 aa, Zea mays
  unsure (1)..(68): unsure at all Xaa locations
  Clone ID: MRT4577_32722C.1.pep
FKLGLLLILCLFEQXYLFTIFFFFLXNXHSGVLFGXXXXNYNFLNFLSKLFFIHSNFFFYPFTLSLFS

SEQ ID NO: 295662 - protein, 276 aa, Zea mays
  unsure (1)..(276): unsure at all Xaa locations
  Clone ID: MRT4577_32723C.1.pep
LCVGAKKTGRVGVFSYSSMINRFCKXGRTHDANEVYKNMMKDGCKPNSHVYIALINGFXSMHLPSMXXKIYIEMTGNGCCPTTLTYNTLIDGLCKAEKYQEASSLTKEMLERGFKPDIRTYGSLIRGLCRVKKIDAALCIWNEILDAGIQVDVIVHNILIHGLCSAGKVNDAFCIYLEMKEKNCSPNLVTYNTLMDGFYEIGSIDTAASLWTAILDNGLKPDIVTYNTRIKGLCSCNRTPEGVLLLNEVLATGIMPSVITWSILVRAVIRSGPIQI

SEQ ID NO: 295663 - protein, 102 aa, Zea mays
  unsure (1)..(102): unsure at all Xaa locations
  Clone ID: MRT4577_32724C.1.pep
MAKRLFPFLNRVLVXENLXQPKKTAGGXPPPETTKQXXXXKXXXXGXXERDKAGXXXPXXXKEXDXXXXPEXXGTEXKXAXXKEXXXXREHDXXGTPGQSSK

SEQ ID NO: 295664 - protein, 129 aa, Zea mays
  Clone ID: MRT4577_32725C.1.pep
PGQDKDGRKKVSYPATITLPPYQPTNNMRCPQEKRPTLGPPPRQNPLYPPNKNPGTIPGGAPNPHNPTGATKPPNEPFPLPDHQKNPYVNQARFNRKAGTLGKLPWNQNGPPAAPDACGGRLWSAPEFP

SEQ ID NO: 295665 - protein, 139 aa, Zea mays
  Clone ID: MRT4577_32726C.1.pep
MELQLYHSTTTLLLPLLLLLLLLLPSSSSSSSHGLRSADGSRAPHYRLKDPRPPKQIGDGEGAATAESLIGSRPPRCDGKCAPCGRCEAVQVPVAPRADSRGGEPRRRGGLFGSAEESYTDYKPLNWRCRCADRRALDP

SEQ ID NO: 295666 - protein, 123 aa, Zea mays
  Clone ID: MRT4577_32727C.1.pep
NTPGKDIPIIMGVAPPVSRVSLHRGQVACIHMVKSNKERLLSKPLCKKSHMKRYSTRVRKYPKRSRELSHISGVTHRQLLSHQHPSHCCSQKYTCPGFVSPKCAHRIAGWGHDEQFMFGVLFM

SEQ ID NO: 295667 - protein, 119 aa, Zea mays
  Clone ID: MRT4577_32728C.1.pep
MPSIRRRCLRKCAAFFLIIAGSRAPHYRLKDPRPPKIGDGEGAATAESLIGSRPPRCDGKCAPCGRCEAVQVPVAPRADSRGGEPRRRGGLFGSAEESYTDYKPLNWRCRCADRRALDP

SEQ ID NO: 295668 - protein, 73 aa, Zea mays
  Clone ID: MRT4577_32729C.1.pep
SYQGRLQWHPSQCLATLCGTCGGIYSADEFWIGCDVCEKWYHGKCVKITPAKAESIKQYKCPSCCNSKRPRPL

SEQ ID NO: 295669 - protein, 57 aa, Zea mays
  unsure (1)..(57): unsure at all Xaa locations
  Clone ID: MRT4577_3272C.1.pep
AWVSLXSAXTSLVVLKQRLALPFSWRQRRRSQLPKHNVSLVVLRTVFHMLVSTASCS

SEQ ID NO: 295670 - protein, 144 aa, Zea mays
  unsure (1)..(144): unsure at all Xaa locations
  Clone ID: MRT4577_32730C.1.pep
LRSIGTEFVAPCYYERALQHAYALAYKLQIAVAVSASQQPIAQSEQQLLAHVTLQTIGSQQLHQQRAGXLVHLTVVNRVTYXLXQQLVAYNKLALANGAAYHRQQQLAQAMPVLTELAMVNHDVYLQLLLCSPLALGNAPTYLQ

SEQ ID NO: 295671 - protein, 47 aa, Zea mays
  Clone ID: MRT4577_32731C.1.pep
KFISEIVLQMGGKACLGYSFHSRGAVSTGSFFLLLQMVPDPALLILV

SEQ ID NO: 295672 - protein, 118 aa, Zea mays
  Clone ID: MRT4577_32732C.1.pep
APCTPFTVGDQVVFNFVTGNHDVAEVDNIGYDRCSTTNPGHTFQIGRANVNLTCGTHYYMCGMSVHCSGVMKLGVTVSYGYGSGSGSPTPGGGSPSTPTPTTPSAPVPDTSAGAFVRL

SEQ ID NO: 295673 - protein, 95 aa, Zea mays
  unsure (1)..(95): unsure at all Xaa locations
  Clone ID: MRT4577_32733C.1.pep
GGGFFFLGGVEKGELXSAXTSEIGDTGKDKSPLHDRSPEVHSLEANLALIHALEPALLLLLLSAIGALPSTAAALVEVLSEGLLAEGLTGGLARP

SEQ ID NO: 295674 - protein, 79 aa, Zea mays
  Clone ID: MRT4577_32734C.1.pep
IGTLEAGRGAYYRQLKYGLISRRLLSSTRGRNHLPIYFALPDELARLPHLDGQSLNSPAKKRWLHVLCLLLYGQERIHP

SEQ ID NO: 295675 - protein, 85 aa, Zea mays
  Clone ID: MRT4577_32735C.1.pep
MANDATSFSTTTATKWLSNGPSSTLLGGLKIEYSMLFQIKNPSTERDTRCSVLEFVANEGFIHMPSWLMAHLGDLENEIVLLRST

SEQ ID NO: 295676 - protein, 77 aa, Zea mays
  Clone ID: MRT4577_32736C.1.pep
RNQPNLFLPANKVVGRKIKPINLLLKKPGTKFTSKGVGSFGVKIPSGISKVVLNNYALLLAPKKSKAFGQNEWGGLA

SEQ ID NO: 295677 - protein, 95 aa, Zea mays
  Clone ID: MRT4577_32737C.1.pep
TRLKQPRQRLMNWSRLTRTAGRRKKTLKEFFSRSPNSAPINPLSTLKDFATLICTKRRCHTVRMNLTHAVLSEQNKIYRVGSKQTEEPQMWRNEA

SEQ ID NO: 295678 - protein, 97 aa, Zea mays
  unsure (1)..(97): unsure at all Xaa locations
  Clone ID: MRT4577_32738C.1.pep
PLSAXLQYPLIPYQLPHTIYKHVSIFTLLHTTXSIQRIKLFSHSLDQSSHIPNSHLLSSLHLHPKPYPYIINIIYYSFFFTLTLLNTFYIYSPLTNH

SEQ ID NO: 295679 - protein, 165 aa, Zea mays
  Clone ID: MRT4577_32739C.1.pep
GKKQTPCQFLFGSQKNTIYPFPGPEKKFFLVPWFFRPRANPCWRPQGLAPGGGAPKTQILSFGPPGPPPVSFFFPRGFFSRKKKFGNGWGNLGGPQRKLSSFGNPLGGGKNKGPPGGGFESISFPPPGGFLARAPNQRAPFFFFFLCGSPGAGGGQPQCPPPPGT

SEQ ID NO: 295680 - protein, 312 aa, Zea mays
  Clone ID: MRT4577_3273C.1.pep
SLSALLLTPLACQPHTNHLCGRRRLQRQSLIRPRSAHTFSMAEQLASQDAPNPPAPAQRVLVTNTHGEKLVGLLHHMGSDKVVVLCHGFTGSKDYSLITDLAAALTKQGISVFRFDFSGNGESEGEFQYGNYKKEAADLHSVVLYLRQEKYDVAAIVGHSKGGDVVVLYASIYKDVPMVVNLSGRFHLEKGIEERLGKEFMDRINKEGYIDAKDKSGNVLYRVTKESLMERLSHDLHATSLSISKECRFFTIHGSADEIIPVEDAYEFARLIPNHKLRVIEGANHCYTAHRRELSDAVVEAITTSEAGETTP

SEQ ID NO: 295681 - protein, 248 aa, Zea mays
  unsure (1)..(248): unsure at all Xaa locations
  Clone ID: MRT4577_32740C.1.pep
MSAVEEDGCSLRCDLCDTEIVHSMAELLLRGLATASVDSTTGDIFKSASSVAAAVKTELENYMLVRTESLIREFVDGAQDHSDQLMKASTRPTEFLSDLIGDFVASKRNLLSHVSGFLSSESRLNRIKDFMQKMEMENVWTLDVRQATSETILESIDMKCIFHCPEKFVEQDKLVDHRSRCKFRVVGCENDGCSVSLSAIHSEEHDSICPFKXLPCEQLCEQHVMRSEMDKHLCTVCAMKLIXNCPST

SEQ ID NO: 295682 - protein, 274 aa, Zea mays
  unsure (1)..(274): unsure at all Xaa locations
  Clone ID: MRT4577_32741C.1.pep
SSSIPTXIHSLSTSLKEXPYFRTLFFQAYPIKXLIPLXSPAPTQQSIQLLYKTSLSIXLLSFYNPAVNYLSTTRVIPRLVKVLKQSTKEKVXRVPFXSFFNLXPKVPFAPQIINLKFPQIVQNLKAQAXTNKNLLDXLNQLEXXLKXNLXKLSSFNKYKQQVLLXHLNXSPXHKDPSFCXKNINNFKENYFXILQVLXTIIYTSSNTTXLAXPXYNLSQFLQYHPSGQIFXADLKPXXQVIXLXXHKNTKXQKNXLLFVQSLFLXTKYPSFLXA

SEQ ID NO: 295683 - protein, 43 aa, Zea mays
  Clone ID: MRT4577_32742C.1.pep
YTGWNCNSGPRYPSKALRPFGCRVGTPRTILKSLPFLRVRGVG

SEQ ID NO: 295684 - protein, 78 aa, Zea mays
  unsure (1)..(78): unsure at all Xaa locations
  Clone ID: MRT4577_32743C.1.pep
MVHLNLVPHYGKTSYKPRRPYEKERLDAELQPAGAYGLRRKRALRRAQYALSRLRNVARXLLPLXDARHPRRNPWRGE

SEQ ID NO: 295685 - protein, 78 aa, Zea mays
  Clone ID: MRT4577_32744C.1.pep
YHVDNSSSHAYKTRELGKFLGILTLYTKMKTRMMGKFPKFNNDLTLKDIPLQGPSFTWANLQADSVLVKLDSLVGTTV

SEQ ID NO: 295686 - protein, 81 aa, Zea mays
  Clone ID: MRT4577_32745C.1.pep
HTTPRKGIVPFGGGGPYEAVKFVLDGYRPVFRKNHSLELKVLVELCWFGEISLRPSFLEILKRLEKLKGHFFGGNPWHLFQ

SEQ ID NO: 295687 - protein, 355 aa, Zea mays
  Clone ID: MRT4577_32746C.1.pep
MASSLKFTVRRGPAVLVAPASATPRELKRLSDIDDQDGLRLHVPIIQFYRQNALMGGREPAPVIRDAIARALVPYYPFAGRLRELEGRKLAVDCTGEGVLFIEAEADVRLDHFGDELQPPFPCLEELIFDVPGSSEVLGSPLLLFQVTRLACGGFILGVRLHHTMADAQGLVQFLGAVAELARGAAGPTVRPVWGRELLEARDPPRPAFAHREYDEVPDTKGSIIPLDDMVHRSFFFGRHEVAAIRANLPPDLRSRASKFDLLTGLLWKCRTAALALDADEVMRMICVVTAHGGKSGVAIPKGYYGNAFALPAAVATAGDLVAKPLGYAVELVKRAKGEVNVEYMRSVADLMVLR

SEQ ID NO: 295688 - protein, 67 aa, Zea mays
  Clone ID: MRT4577_32747C.1.pep
GNITAPQKHLKAHRGVLKIATYLAGCCHLKVKPFNRGPKKCFDYAETRVGHTNGRRGKKIHPGACLK

SEQ ID NO: 295689 - protein, 247 aa, Zea mays
  Clone ID: MRT4577_32748C.1.pep
MASSGMNVVKYVFGLFNLAFMIGAGVLIYFGVQVFIGEITVEHEIISRHAQAQTVAIVLITSGAIVFVISFLGCWGAFRENTCMLLTFGSILGAIVFTQILLCTLIFVFREEVHEKATGELLPEIIRSYNFTDSADRLTKVVDDMQSRFHCCGVNGSDDWKTGIPFSCCSDYTPSLLDGTVQTVRYCPNDLRQPAYSQGCFSKVVNAVNAHYWYLASTVVSFALIQIMAVVLACCVAYSVKKHYQTI

SEQ ID NO: 295690 - protein, 161 aa, Zea mays
  Clone ID: MRT4577_32749C.1.pep
MATSGALSTAANATQLYRYRASLGKPVKGLGLSMGRESAQRNIVCQATSSISADRIPYMEKSKLMNLLLLGGISMPIVGMVDPYGDFFGPGGSGNAGGGTYSKDKLGNDITVEAWLNTHGSYDRTLTHALKGDPTYLSVEQDKTLGTYGINAVCTHLSCIV

SEQ ID NO: 295691 - protein, 474 aa, Zea mays
  unsure (1)..(474): unsure at all Xaa locations
  Clone ID: MRT4577_3274C.1.pep
PAGVNRHAERWRQEVAAAAAAVAVGSPXAASSSRRXGSGHVVTRMRGFDGPLPFYLETGYVEVDEQQGVQLFYYFVRSERDPYEDPLLLWLSGGPGCSGISGLAYEIGPLKFDARGQGEFPTLLYRPETWTKVSNIIFVDSPVGTGFSYAKSEEGLETGDTKQVKQLVIFLRKWLQDHPRFVMNPLYIAGDSYSGLIIPTLALEIDRSIELGEKIFSGLKGYIAGNPLTGGQFDTDSQIPYFHAMGLVSDELYKNARENCGGKYSAPLNAVCAEAVQAINNCTRDINKQYILDPACPDDDLLSPKTVAETDGTSRLMLESADFLLGSKCAEALYILSYAWGNDDTVQESLGIRKGTIGAWKRYSHALPYNYDIQSVVDYHSRLATKGYRALIYXGDHDAVVPHVGTQAWIRYLNLTIVDDWRPWYVGGQVAGFTRSYASGLTFATVKGAGHVAPLYKTLECQKMFITWISGNPL

SEQ ID NO: 295692 - protein, 116 aa, Zea mays
  Clone ID: MRT4577_32750C.1.pep
VNARGCSLPPWGAAHGAEEGHPLVAPTVADLSLCVQFLEKAPCMDDGLLLGLDPWRSGPGCQRPSIYRIGWQLLEGALWINGLCLSEPPWTLLELFLLRLVCASLHIAGTFYLYGL

SEQ ID NO: 295693 - protein, 95 aa, Zea mays
  unsure (1)..(95): unsure at all Xaa locations
  Clone ID: MRT4577_32751C.1.pep
EAGWFCTRXDPVTMRDLDRGTVPNYQRAQQLLEVQEKCLPSSRHRGPRSNLKKRALDQLRLVRPKPVGAPAGDSPDQLLLEPCAEPERSIRPYSL

SEQ ID NO: 295694 - protein, 83 aa, Zea mays
  Clone ID: MRT4577_32752C.1.pep
LGKIHSWAQKRIYNTLFKFPGGPSRQKNLGPFLGQPQPNGGLKNTTFNSFPGFYLLTSQFCWNIKFFLMLRPCPGENSPWWDR

SEQ ID NO: 295695 - protein, 73 aa, Zea mays
  unsure (1)..(73): unsure at all Xaa locations
  Clone ID: MRT4577_32753C.1.pep
RAHATLLRLLSTPSGDGNAARLDGPLTTSSWAAACARPPPSSPCYXSAGVHGCYRCCCDWRVGEILEVLNEKR

SEQ ID NO: 295696 - protein, 88 aa, Zea mays
  Clone ID: MRT4577_32754C.1.pep
PPPFSSPGKKKYFSPPIVGGPQSPLVPTHFFCLFMLKKNLNGAPGPWTHPGFGPVVFLCLTYPPPPWNESPQPKFFWALLKKKPMGFP

SEQ ID NO: 295697 - protein, 66 aa, Zea mays
  Clone ID: MRT4577_32755C.1.pep
SAAALLFFFFFFFNPFFFFFFFQKVPFPLNTGENPKTNFEKPKKNEISFIPSTTLLAVSDSKIQGQ

SEQ ID NO: 295698 - protein, 247 aa, Zea mays
  Clone ID: MRT4577_32756C.1.pep
DSRDGKSYSTNLAFTPPEYMRTGRITPESVIYSFGTLLLDVLSGKHIPPSHALDLIRDRNFSMLTDSCLEGQFSNEEGTELVRLASRCLHYEPRERPNVRSMVQALAPLQKDVETPSYELMDMPQAGASSVQSLPLSPLADACSRKDLTAIHEILEKTGYKDDEGTANELSFQMWTNQMQDTLTSKKKGDSAFRQKDFTTAIDCYSQFIEVGTMVSPTIYARRCLSYLMNDMAEQALSDAMQALVIS

SEQ ID NO: 295699 - protein, 70 aa, Zea mays
  Clone ID: MRT4577_32757C.1.pep
SKIMLLAACWKQAKEFDVACNYLYCQPTWKGLQRGECKLSKHGWRQSMAERKRRVRNADARKSPKESHLD

SEQ ID NO: 295700 - protein, 83 aa, Zea mays
  Clone ID: MRT4577_32758C.1.pep
ADSVAVHDLSKSCCRTLRVMFGTARDRSCDPLLKRYNQLASQMLQLSLRQLLHPTSGASSRAIVLQISAAPMPWVRARRWRAA

SEQ ID NO: 295701 - protein, 58 aa, Zea mays
  Clone ID: MRT4577_32759C.1.pep
GCELGPPAIALRLKSLLPSSRSASLAVRTGLCSSHRPCTWSCSADSLSCQQLASCYAS

SEQ ID NO: 295702 - protein, 210 aa, Zea mays
  unsure (1)..(210): unsure at all Xaa locations
  Clone ID: MRT4577_3275C.1.pep
GRVGFSGNGESEGEFQYGNYKKEAADLHSVVLYLRQEKYDVAAIVGHSKGGDVVVLYASIYKDVPMVVNLSGRFHLEKGIEERLGKEFMDRINKEGYIDAKDKSGNVLYRVTKESLMERLSHDLHATSLSISKECRXSLFRHNFPFTLINNNRAPNYSSTPYSCXYYWTLCXFFTIHGSADEIIPVEDAYEFARLIPNHKLRVIEGAKHW

SEQ ID NO: 295703 - protein, 158 aa, Zea mays
  unsure (1)..(158): unsure at all Xaa locations
  Clone ID: MRT4577_32760C.1.pep
IASKTNSVVRDLRQLVGSLGLGAREPEREGWEHVISKSSDDVSYKAWCDKPTVVANCVHALQQIWALEAANLVAERLRHCIANHWIKEFSEWPQCXVLELQSKILPYNNNKIFDIMNLLEDRLQHANEALGLGQQLMVIVHLLTLGYHLIQMLRIEIW

SEQ ID NO: 295704 - protein, 145 aa, Zea mays
  unsure (1)..(145): unsure at all Xaa locations
  Clone ID: MRT4577_32761C.1.pep
KRGGGGQCPLPGKKKQGVPPFGASWDKKFRVLWNPRAFNPPFGGGLFGISVRGRILCGFFVGGPKIFKKVLXIQKTKGKAAAKLIFPNGGAPPLFFPFEKLFWGGGKFGALFGPSPWGFKILGPESPSPFNCWEIGDLFPPVVFF

SEQ ID NO: 295705 - protein, 214 aa, Zea mays
  Clone ID: MRT4577_32762C.1.pep
LNSLIQWFAMQCLNLSATKLAASRAQICCNACTQLATTKQPFGRSHVTNISSFKQLRFDVRGLVAPGLVGDVVAALGDDVLPALPLWLACAQAQTAYQLPQIANNAICLGCYLDALDDLRPSRTSLNATGRRLSVAQEICGVRLLLACWPRRRLSVAQERRGCAAVVGASVALLELLDARERLLEAATGTEWAPRGRRRGQAAADESPWRAHTR

SEQ ID NO: 295706 - protein, 180 aa, Zea mays
  unsure (1)..(180): unsure at all Xaa locations
  Clone ID: MRT4577_32763C.1.pep
MTAEIMFFIRHTQNTSSPYSATMPLYEKNTYPGREHTSKDLLQASFIHLKIELGEAETHGAXMSCRAEVLPGKRLRGARNWGCLHMTIQTADLIETLTALVAEGRLGSCNSFCTHDHADAIIERXQNAAFRWKGETLEEHRGSTERCLYWSKVGGINLMINDQKDPTVMIHHGGKVDEDF

SEQ ID NO: 295707 - protein, 88 aa, Zea mays
  unsure (1)..(88): unsure at all Xaa locations
  Clone ID: MRT4577_32764C.1.pep
MQEFFIFLGLVWSLQFCSVRSLFVLVTSRCHPRSKXNIFXVSSVQKCEGCRARSAVLFLLPSGLICADTRSQPFQLYFCKIFTVSFGM

SEQ ID NO: 295708 - protein, 75 aa, Zea mays
  Clone ID: MRT4577_32765C.1.pep
LGIWAIQGGLSPPKLHRVLRTPEARSSKKPSPADAALGQAQFAKVASMLRLPEEHQPKGCLWAIYNLVRQIVLPA

SEQ ID NO: 295709 - protein, 120 aa, Zea mays
  Clone ID: MRT4577_32766C.1.pep
VCMQSPVTSPLLGAAQFFLDTSALFGHFSQPSKRVRAPCIFFFLASLNCSVRSLFVLVTSRCHPRSKENIFFVSSVQKCEGCRARSAVLFLLPSGLICSDTRSQPFQLYFCKIFTVSFGM

SEQ ID NO: 295710 - protein, 59 aa, Zea mays
  Clone ID: MRT4577_32767C.1.pep
STTESSWPSPTTSSSSSAGTTAPKMQQVYFKEPPGDDAGFFLVTYYPYEKIWCYSLLSY

SEQ ID NO: 295711 - protein, 138 aa, Zea mays
  unsure (1)..(138): unsure at all Xaa locations
  Clone ID: MRT4577_32768C.1.pep
MAGRDNDARQAAPLKGDKQQLRRRLKEAALLIRTIKGHVRWIFEEVAAGRTTSRVHHRYRNYCSSADSASTSPCACSXHPRPHGRPHSALQRRPXTSSLNVLMRMLFVEQHLLQQSKHCSNRDIYHMYASSVVEVAVV

SEQ ID NO: 295712 - protein, 372 aa, Zea mays
  Clone ID: MRT4577_32769C.1.pep
MVHRTSIADVHVMCMDLSPKKPNKASASDGGAYYDWSPADLPMLGVASIGAAKLCLTAGGLALPSYSDSAKIAYVLQGKGIFGVVLPEATKEKVISVKEGDAMALPFGVVTWWHNNADAAISDLVVLFLGDTSTGHKPGQFTNFQLTGSTGIFTGFSTEFVARAWDLTQDDAAKLVSTQPGSGIVRVKDGHKMPEARDEDRQGLVLNCLEAPLDVDIKNGGRVVVLNTQNLPLVKEVGLGADLVRIDAHSMCSPGFSCDSAYQVTYIVRGSGRVQVVGIDGTRVLETRAEGGCLFIVPRFFVVSKIADETGMEWFSIITTPNPIFSHLAGRTSVWKAISPAVLQSSFNTTPEMEKLFRSKRLDSEIFFAPSN

SEQ ID NO: 295713 - protein, 189 aa, Zea mays
  unsure (1)..(189): unsure at all Xaa locations
  Clone ID: MRT4577_3276C.1.pep
MASNTGASGWLRGKVKAVTSGDCLLIMGSSKAEIPPEKSITLSYLMAPRLARRGGVDEPFAWESREFLRKLCIGKEVTFRVDYTAPNIGREFGTVYLGDKNVAYSVISAGWARVKEQGPKGGEQNSYLAELLRLEEVAKQQGVGRWSKEPGAAEESIRDLPPSAXGEASGFDAKGFAGENKGKSLEGIG

SEQ ID NO: 295714 - protein, 105 aa, Zea mays
  unsure (1)..(105): unsure at all Xaa locations
  Clone ID: MRT4577_32770C.1.pep
ADLPMLGVASIGAAKLCLTAGGLALPSYSDSAKIAYVLQGKXRFFNPIKKSISVSHACVRLDVCTGKGIFGVVLPEATKEKVISVKEGDAMALPFGVVTWWHNNA

SEQ ID NO: 295715 - protein, 44 aa, Zea mays
  unsure (1)..(44): unsure at all Xaa locations
  Clone ID: MRT4577_32771C.1.pep
MGDSEEHHFESKADAGASKTYPXHAVTVRKNGFIGINNHPWLVV

SEQ ID NO: 295716 - protein, 84 aa, Zea mays
  Clone ID: MRT4577_32772C.1.pep
GTISFSEFVCVMTGKMIDTQSKKETYRVVNQGQGQVQRPPRNDRAGGPNWERDIAVGVASNIIASPISDFMKDRFKDLFEALLS

SEQ ID NO: 295717 - protein, 76 aa, Zea mays
  unsure (1)..(76): unsure at all Xaa locations
  Clone ID: MRT4577_32773C.1.pep
IPGSTSCLVGGRPSFLGGPVWKXEGDIAITPTYADTIAPILIIHYLLHARDGQDTPPSLDRMQYRPNRVHDMMKEM

SEQ ID NO: 295718 - protein, 40 aa, Zea mays
  Clone ID: MRT4577_32774C.1.pep
PVAPRMQSLPQHLSVCLVVLRLKLSHGRSVCPGPTRAAVV

SEQ ID NO: 295719 - protein, 59 aa, Zea mays
  unsure (1)..(59): unsure at all Xaa locations
  Clone ID: MRT4577_32775C.1.pep
LMLVTSLNPKXGYDNAAAVAKKAHKEGTTLKKAALDLGVLTEQEFHELVVPEKMIGPSD

SEQ ID NO: 295720 - protein, 66 aa, Zea mays
  Clone ID: MRT4577_32776C.1.pep
ALYSTPLHARSNLTSSPHGRPLSLRAASLLCRVVGTLRGSCKGCSLSGGLRLSTHAREAAVRLSLS

SEQ ID NO: 295721 - protein, 169 aa, Zea mays
  unsure (1)..(169): unsure at all Xaa locations
  Clone ID: MRT4577_32777C.1.pep
MSCNKNCLKVGHESSLEQCIVHPQGMMAEXYQFRVTIAXEVNKHGVQCAIIVKYSXHSSFYXKSITIDQVFDIGAISLVANSWVYLQYKCRFIRVFFSXDRYLSIQMPGRLKHYXRHDEVSIMRGGDQQGPXNSSXSVYRYDVDNXSGNPDAKNPRAVLVGSKHHPYPH

SEQ ID NO: 295722 - protein, 94 aa, Zea mays
  unsure (1)..(94): unsure at all Xaa locations
  Clone ID: MRT4577_32778C.1.pep
GPKVFQKRSPPKAVAPFSRFFQXSPNLRCPALEACMPPFFDELGDPNPCFPSGGPLPPFFNFGFQELKGVPPKVIVPLVPKPSKRQSLFMALRT

SEQ ID NO: 295723 - protein, 93 aa, Zea mays
  Clone ID: MRT4577_32779C.1.pep
KNCGGTPFLSVFQRAPQFQGCITKIYWSCPVSFKSFRGGDLGFWPKMSTKPKWGCFKDFNPLEFFVGQKGYPFSFFFPPPPVFYPPFSWGLFF

SEQ ID NO: 295724 - protein, 243 aa, Zea mays
  Clone ID: MRT4577_3277C.1.pep
FSSHRHRRCGGFVLRCRYVEVDEQQGVQLFYYFVRSERDPYEDPLLLWLSGGPGCSGISGLAYEIGPLKFDARGQGEFPTLLYRPETWTKVSNIIFVDSPVGTGFSYAKSEEGLETGDTKQVKQLVIFLRKWLQDHPRFVMNPLYIAGDSYSGLIIPTLALEIDRSIELGEKIFSGLKGYIAGNPLTGGQFDTDSQIPYFHAMGLVSDELYKNARENCGGKYSAPLNAVCAEAVQAINNVNNP

SEQ ID NO: 295725 - protein, 300 aa, Zea mays
  Clone ID: MRT4577_32780C.1.pep
VRGRPSSSSSPTFSLKASTKQRFDFTYQSNGPSASWNNDQRLRHPVDQRTMGFIQGRTSKQTSRVKTLLWLALSRLAAARRPRLARKSISRSDVGQLLALGHIDRALHRAEQLIEEDNMLEAFNIIELHCNRLIECAKQLDKPHECGDDIREAAAGIMFAARRCGDLPELTFARTILTNKFGGEFAEMPLLSPGVVDPMLVWKLTGNKGDMELKKKVVKEVAAENNVLVDFFELQEVEHGGSGNVPHHHKVSHEGIYQTDMDGSSEPSHDEDPCDTSNSDGASNGHPKQENTRTSVRTRR

SEQ ID NO: 295726 - protein, 115 aa, Zea mays
  unsure (1)..(115): unsure at all Xaa locations
  Clone ID: MRT4577_32781C.1.pep
DDPLQFHFTKDXLMEEYSIXTQVWKLSSCDMCELARNSVLMSGFSHKVKSHWLGPNYTKEGPEGNDIRRTNVPDIRVGYRYETLCQELALITQAVQSEMLETIPEEVGIVMSPGP

SEQ ID NO: 295727 - protein, 39 aa, Zea mays
  Clone ID: MRT4577_32782C.1.pep
GVEFQASEDGVRNREGQFFACVGIVPFPFLNFLFMFIVF

SEQ ID NO: 295728 - protein, 66 aa, Zea mays
  Clone ID: MRT4577_32783C.1.pep
FQYFCAYFNAGKLRPVLGYQANQFGCKTMYYLCCLHILFNVKIFIFSLKLCFFIDFHFFFFKKAGN

SEQ ID NO: 295729 - protein, 55 aa, Zea mays
  Clone ID: MRT4577_32784C.1.pep
MGVRVRLPVAQLAGSIQDNILAQILEIVVERTILTRGPYNMSILRGGGYGDLCKS

SEQ ID NO: 295730 - protein, 171 aa, Zea mays
  Clone ID: MRT4577_32785C.1.pep
MEVVSSELAWFALAFTVVAAAAAGRVVSAQNTAQDFVNLHNSPRADVGVGNMAWNTTVAAYAQSYANQRAGDCRLVHSGGPYGENLFWGSAGYAWTASNAVGSWASEKQYYDHATNTCSAPSGQSCGHYTQLVWRASTAIGCARVVCSNNTGVFIICNYYPPGNVIGQSPY

SEQ ID NO: 295731 - protein, 101 aa, Zea mays
  Clone ID: MRT4577_32786C.1.pep
YQAISRESLDACSKKHQNRGIQITRHSCSRARLQLRTARARCADHRDPARIDTANGNNPHLPRKVQARLRSHPSKTSQSNHSQSPNALCSLPLKLVASCRI

SEQ ID NO: 295732 - protein, 171 aa, Zea mays
  unsure (1)..(171): unsure at all Xaa locations
  Clone ID: MRT4577_32787C.1.pep
MAQSSFSLASRTKLSNGLSMPTIQLGVYLTSGKETYQAVRWALEAGYRGVDSAQMYHNERETGKAISDFLESEANVHSLKREDIHFTSKLASNSAYETARKAIKRSVKEAGLGYIDLFLLHSPYGGKQARLDSWRAVEDAIDDGEXRIGGASTYGVXHLPELLDSNPRIAP

SEQ ID NO: 295733 - protein, 50 aa, Zea mays
  Clone ID: MRT4577_32788C.1.pep
DGYIKRISEDQWFIQFEELIGFEAEVKYDEIVGSRLMCCLYLLIWFFFFF

SEQ ID NO: 295734 - protein, 75 aa, Zea mays
  unsure (1)..(75): unsure at all Xaa locations
  Clone ID: MRT4577_32789C.1.pep
EIQPPACAXSVPRDSDRXNCLPNRPAQRTXEQCAAFYARPPVNCAAFHCTPLVPAMPRRPLFSLAQVVVGGPVAQ

SEQ ID NO: 295735 - protein, 106 aa, Zea mays
  Clone ID: MRT4577_3278C.1.pep
EDHDHSYGDEEGEQESSSSSSQQVAPWRRRMFGRLLQQKFLLINSFTPQGGHVVVSWLSSNRWCCYCCDDVYEKKLQIICGEKKKKKKKKRRAAPPPQQVGRRLEE

SEQ ID NO: 295736 - protein, 67 aa, Zea mays
  Clone ID: MRT4577_32790C.1.pep
RESRDACSYLSSFPASTFSSFFGPSNIWKVSFACMRGHISFIMSPKLNSLSIILQLSKLIKPSLHPT

SEQ ID NO: 295737 - protein, 145 aa, Zea mays
  Clone ID: MRT4577_32791C.1.pep
FSESLVVTGQGLVVPCWAPQVEILAHAANGAFLTHCGWNSVQESLAHGVPLIGWPLSAEQFYNAKMLVEEMGVCVEVARGSDGVRRERITEVVAMVLGDTLELAALRRNAAAEAEKLIRAAGENDRNGSSVKVMQMFFNEMSHLF

SEQ ID NO: 295738 - protein, 34 aa, Zea mays
  Clone ID: MRT4577_32792C.1.pep
HTLTDHLVNYIFTSKFYRNGLLHCISFLSFVRSV

SEQ ID NO: 295739 - protein, 48 aa, Zea mays
  Clone ID: MRT4577_32793C.1.pep
SKQLDPLLFHLLRNLNYLRVKGLTRLTVGGAIWEGSRRRLIQTRCGAS

SEQ ID NO: 295740 - protein, 61 aa, Zea mays
  Clone ID: MRT4577_32794C.1.pep
KLNMLLTRAISSEAMSLRACLAFEDGYTVRGKGLGGVMVGDVFCKRGVFGEYAIACFLCTQ

SEQ ID NO: 295741 - protein, 47 aa, Zea mays
  Clone ID: MRT4577_32795C.1.pep
LSKPSSKVSSLPYYRFETMRLQFKSPPRQGIANPALLLFIRSARCVE

SEQ ID NO: 295742 - protein, 64 aa, Zea mays
  unsure (1)..(64): unsure at all Xaa locations
  Clone ID: MRT4577_32796C.1.pep
LRLEQHXXEGXXVXXXKXSCPALHEXXXRXXRXRRQHHQHYHATAAMPCCCXXPCSTVVYSLLS

SEQ ID NO: 295743 - protein, 67 aa, Zea mays
  Clone ID: MRT4577_32797C.1.pep
SSHSPRSLLPCKHTHARRGHVLSRCRVVHHHLLTPFMSSSPFLAWSFCCSVGFIITFFILFIYSIFF

SEQ ID NO: 295744 - protein, 70 aa, Zea mays
  Clone ID: MRT4577_32798C.1.pep
LNKACSWLNCVLKKKKKKKKKKKKKKKKKKKKKKKKKKKKKKKKKFLKKKKKKKKKKKKKKKFVPPRGGL

SEQ ID NO: 295745 - protein, 129 aa, Zea mays
  unsure (1)..(129): unsure at all Xaa locations
  Clone ID: MRT4577_32799C.1.pep
RGVLDSFTSFFSVLQHFSVYISGKYPSFDYISVTPPYLEVNYSTLLGQLARSPLVGKDCFIXSPMLRKPNCFPLCAFLTPSSILXLVEYPLKTDMAESCGNLVKVADRRFGRTNLLIYGPTWSEKKKKR

SEQ ID NO: 295746 - protein, 152 aa, Zea mays
  Clone ID: MRT4577_3279C.1.pep
FLLGSKCAEALYILSYAGGNDDTVQESLGIRKGTIGAWKRCSHALPYNYDIQSVVDYHSRLATKGYRALIYSGDHDAVVPHVGTQAWIRYLNLTIVDDWRPWYVGGQVAGFTRSYASGLTFATVKGAGHVAPLYKTLECQKMFITWISGNPL

SEQ ID NO: 295747 - protein, 44 aa, Zea mays
  Clone ID: MRT4577_327C.1.pep
CQSHHKQTIKFTHNIEHIMIVFTNAHNFEQSFTNPSYHTKQMRK

SEQ ID NO: 295748 - protein, 110 aa, Zea mays
  Clone ID: MRT4577_32800C.1.pep
GSSWGWGSNCKWGKKSPSLGETGPPGGAPFVFGVAPEKKAGPGFFWAPGGSGGAPPPLGLGNSCKWAPCNFCFLRLAPLGLFFFFLAWGGGWPIIRGAGVVPLHGFFLVF

SEQ ID NO: 295749 - protein, 170 aa, Zea mays
  unsure (1)..(170): unsure at all Xaa locations
  Clone ID: MRT4577_32801C.1.pep
KVRRRKLLSPKDRNVRPXMEVVRGAAFDILQSAGGSPASLRPGRWLDLYSGTGSVGIEAMSRGCSEAHFVEMDPWVISEVLKPNLECTGFIDVSQIHMLRVEKFLANAEKSHGKYPSFDYISVTPPYLEVNYSTLLAQLARSPLVGKDCLIVGLPSALVRCNAKHGSCGA

SEQ ID NO: 295750 - protein, 320 aa, Zea mays
  Clone ID: MRT4577_32802C.1.pep
MASSTLPASPFRMSLPGLRAPDPAKVKHVSVRAPARRLPVAASAAPSGAAAAAAAARERRRFLERYGLNPNDFEEDAEENPREERKDRRRRRQSGRGEQTAEAAVTPAKVEEPRETHKMLQVLGGKVRRRKLLSPKDRNVRPMMEVVRGAAFDILQSAGGSPASLRPGRWLDLYSGTGSVGIEAMSRGCSEAHFVEMDPWVISEVLKPNLECTGFLDVSHIHMLRVENFLANAEKSQGRYPSFDYISVTPPYLEVNYSTLLGQLARSPLVGKDCFILVEYPLKTDMAESCGNLVKVADRRFGRTNLLIYGPTWSEKKKKR

SEQ ID NO: 295751 - protein, 81 aa, Zea mays
  Clone ID: MRT4577_32803C.1.pep
SAHSCSQFHVAVVGECRHLLVGRGRIRLQRDHLLQRLRHIAESVGEWLVVLRDCLPGGHIPHSLRASDPVVSPSGSSGRFG

SEQ ID NO: 295752 - protein, 299 aa, Zea mays
  Clone ID: MRT4577_32804C.1.pep
VKPLYRDSLKMMNQHREEDALRGQAVKNQKAIWDKTLEIRFLLQKAFSTSNKLPQEPIRARFCNHDNQIEQAYDDLLNSSKQTLSSMMELQEAMLESNQATKGANEIPSASNGDNDEWSEVQRLQTRITTFRNTEIDKWQRKIQVTTGAAALKGKLHAFNQNISDQVAGYMRDPSRMINRMYLTNSAVSVFGKDVGEPGTAEEGHNMEGDPELIDDSEFYQQLLKEFLESCDKGASESAFYALKKQQVKKRKLVDRRASKSRKIRYHVHEKVTNFMAPEPMVLSPMAPKLFENLFGNAN

SEQ ID NO: 295753 - protein, 56 aa, Zea mays
  Clone ID: MRT4577_32805C.1.pep
FIWRRCVLQVGESATFFVRQRSRGNGRLYRALCSLVTRILTSIKYRTRSCLSRVVC

SEQ ID NO: 295754 - protein, 97 aa, Zea mays
  Clone ID: MRT4577_32806C.1.pep
IRAPSTRSIWAERFIFCTGHDMDTYRTVLSDQNLPTDQTSGPVADIKSTQPLTRAENCLAPTYTYYWDVPQLSHTRRRLLYRVITLWEYHTYLLNVL

SEQ ID NO: 295755 - protein, 78 aa, Zea mays
  Clone ID: MRT4577_32807C.1.pep
VVFRAPFPFILAPVLVVFLPLSAFFPPFTSPSFVLIKPVKYPFHPAPILLFVCIAWSSPLPGICFFYLFPLVLMVPLP

SEQ ID NO: 295756 - protein, 108 aa, Zea mays
  Clone ID: MRT4577_32808C.1.pep
LVSLSLYRPSLSLSSLYKSWSLPCRSSWLTQARSLPLFLSLSLSSLVIEPPDAVAGVRPRPRPPLGHARAPAPQTVRACASPSAAPCSTSFLLSLRSSMNCSNARTGG

SEQ ID NO: 295757 - protein, 100 aa, Zea mays
  unsure (1)..(100): unsure at all Xaa locations
  Clone ID: MRT4577_32809C.1.pep
GLIGIYHDWCDXFGTYPRTYDLLHADHLFSRLKNRCKQPVTIVVEMDRILRPGGWIIIRDKVEILNPLEEILKSMQWEIRMTFAQDKEGILCARTTMWRP

SEQ ID NO: 295758 - protein, 105 aa, Zea mays
  Clone ID: MRT4577_3280C.1.pep
AIAKQFWFSLLRSGGFQELCPSHDDVCFETWWRNSAARVGKPLSKGFNSLVILGAWSLWKHRNRCVFDNCNPSAAVVLAAAREELMGWRMAGAKALSFFHLEEVS

SEQ ID NO: 295759 - protein, 217 aa, Zea mays
  unsure (1)..(217): unsure at all Xaa locations
  Clone ID: MRT4577_32810C.1.pep
SVHENRLVSVRDNTPPGRYPSAPAAGAEREHLTWVPGLAPAHPYLELAGASPPTTAPTPTRPRSSSRRPXTCRRPXXPTPQDPLPXALPPXPPLTCPPPXPPPXPPPPPPDPXTQPPAPPXPPPXXXXPYTPPAPPPAPPHPLYPPPPPPPTVSTPXPXXPRPPPLLSHPSPPPPXPPTPPPPTPHPPPHPPXPXXTPPPPPPXPPSPHLPYPPTPP

SEQ ID NO: 295760 - protein, 57 aa, Zea mays
  unsure (1)..(57): unsure at all Xaa locations
  Clone ID: MRT4577_32811C.1.pep
GRPVLVIPPRLSPVKSXNPFPVFSDGLFVENGTPNELLAPAGIYPALVKSHLQGPNF

SEQ ID NO: 295761 - protein, 75 aa, Zea mays
  Clone ID: MRT4577_32812C.1.pep
RADQKTGEKRGKLGAGDLLLRSSCCGCLAGEQEPSSVNRNRISCRLWSRRGDQEPQSLVLEQGHRFVSRVTGASA

SEQ ID NO: 295762 - protein, 52 aa, Zea mays
  Clone ID: MRT4577_32813C.1.pep
LVLVFSSSWWTQCSTNFTHILLLVHAGKLDSHIGPVPPFLTGDDATCLILCN

SEQ ID NO: 295763 - protein, 69 aa, Zea mays
  Clone ID: MRT4577_32814C.1.pep
SVSLGTRLLLDSYYPYSISLAFLRKHISLAQTAAYSPVTKNASAWRESGTNQLSQACLCASICLSACVA

SEQ ID NO: 295764 - protein, 68 aa, Zea mays
  Clone ID: MRT4577_32815C.1.pep
GRFFFFFFLLLVLTEIGQLFSRKQAMQTFSDEQTIRNKNSRRKTSTWQQVQKDFQNWQEPRERVPPLL

SEQ ID NO: 295765 - protein, 114 aa, Zea mays
  unsure (1)..(114): unsure at all Xaa locations
  Clone ID: MRT4577_32816C.1.pep
SGFARRFLLTKVAVTAAYLSAISGRGKRPKGKPKGRAPRYLKELRDNIHGITRPAIRTLSKRKHVKRIYGLIYHETHDILKIFLKNVIHYADTYTQHARHMTXVNDMDVDYALK

SEQ ID NO: 295766 - protein, 47 aa, Zea mays
  Clone ID: MRT4577_32817C.1.pep
KKKKKKKHRKKKIWPSCSCCLFLFLRGVRALRRTHGHNGCLWEMVVR

SEQ ID NO: 295767 - protein, 213 aa, Zea mays
  unsure (1)..(213): unsure at all Xaa locations
  Clone ID: MRT4577_32818C.1.pep
ARHGTARPSSSXPRPHPHVRXLIRQMASPARRLLQTNSVQYPTLPAADPPSPLAVDSDVVVILAALLCALICVVGLASVARCARSRAAPAAARRGLRKKALRALPSLAYEDAVAARAADGAAEVLAECAICLSEFAPREEVRVLPQCGHAFHVACIDTWLAAHSSCPSCRRVLVVGDASSKRPPQPKRCRKCEAAMDEPSSSSGSAGDTPAGS

SEQ ID NO: 295768 - protein, 116 aa, Zea mays
  unsure (1)..(116): unsure at all Xaa locations
  Clone ID: MRT4577_32819C.1.pep
THXGRNATGEPRAAARADFFYXGLSASTVPSDKQNAYGDQGAQDAYSYYGSQAASALPVVPGHGHDRNGYSRPALXEYPWXGHHQRHSKXPQPGEVRDYHTDYGRAHGYSKHHLTH

SEQ ID NO: 295769 - protein, 68 aa, Zea mays
  Clone ID: MRT4577_3281C.1.pep
KIWFAITSHKPMTGAIQSLFLPVKDTTGPIATVGFRQVNPQTTFHHLRLKQATGKSMAPPRAVDLTQG

SEQ ID NO: 295770 - protein, 848 aa, Zea mays
  unsure (1)..(848): unsure at all Xaa locations
  Clone ID: MRT4577_32820C.1.pep
MADRVTIIPSHDPWPFSTVTVDDLEALVTDGLLRPLSSDPQPEWMVPPSGAASTPPPGYVLSFVSFHERGFEVPASRFMRALLHYYGVELHNPNPNSIAQVAIFAAVCEGFLGIDPHWDLWTHLFSVEPFDLTTGEKRVRMAVRAGGCILQLRQARAQQYIPAILVSSNKGWQHRWFYLQNDDGRLPSFTQRVVTAXAATGAMGSHARNRRISSPFWRPCRSCETXLTTAGVVAAIHRRRELGCHKPSLPPVPEDAVDRAARRVAVEKKKEKKDAKKAQARERMRARDALERRRRRQERDRLPREPSPEMPDNDDDDDDDEDDDMAEVDPQVVVTAPGRTVPSAPRAPVAGMVPKPAAGQTSAAPAGTEARGASPQARLALVRSGKRRHGSAGLAPRKALKTVPASAASAAPGHAGQLAFTQDAPKRGAQAARVAMGRAPQTDPSVEAVIVPGETAGAAAALSPPDGLPAPAPASAEAVAVLPVEPPFAADAEMVEAPLLEVGDRKPTSLAEEVPDASTAGGPDALEDGGAEPQPVLGSGDLIPARRDPNERRGQALRFWTRGASKPLFVLDDEREEQSRDELRECAEAAMGSLRSTMEVLSRNVPRILQDLSTAKSSFIHREADVWGSLRFLRTALAEATDRLSQQSAEAADLRLLCDELGAEAAAACAEAQRRQLELGQVIEFESALNESAKALAQAAEQKEADRVAMSEAISAFCQVFGLDDVPSGSSPQSRLQALGGHVRGRLREALHHGVRRAFAVLASHYDVDLERVSEGYCLPDEDEAALAEVQRLEAAVAGPSAVLASSFEVEILPLASPSEAGADLAEGGDGAEGRDEAEGAARPPGDA

SEQ ID NO: 295771 - protein, 51 aa, Zea mays
  Clone ID: MRT4577_32821C.1.pep
GRRPLLLMEEEGGRRFQRPPDPGLAGLIHLQVSGPPSPGRTTISTPRGLSL

SEQ ID NO: 295772 - protein, 465 aa, Zea mays
  Clone ID: MRT4577_32822C.1.pep
MKPGVDLEGSEMSSTSLSADDLLKRVAGTVGKQDVGALTQPAMRPDHGYVSLGLRIYKPVRPPVLEDAVGRAAQRITVEKKKEKKDAKKARARERMRAQDALEKLRRRQARDGLPREPSPKTPDDDDNDDDDDDDEDDDMAVRLGLSPDLRLGQGSSSQPPSGLAPSVSGAGTLGSRSEEQGQAEGVLDPLAEVVEVTPGSQTDPPVPQESSPVSAAKEVDPQVVVTAPGRTVPSAPRAPEAGMVPKPAAGQTSAVPAGTEARGASPQARLALVRSGKWRHGSAGLAPRKALKTVPASAAEFELALNESAKALAQAAEQKEADHVAMFEAISAFCQVFGLDNVPSGSSPQSRLQALGGHVRGRLREALHHGVRRAFAMLASHYDVDLEWVSEGYCLPDKDEAALAVVQRLDAAVAGPSAVLASSFEVEILPLASPSKAGADLAEGGNGAEGGDEAEGAAPPPGDA

SEQ ID NO: 295773 - protein, 940 aa, Zea mays
  unsure (1)..(940): unsure at all Xaa locations
  Clone ID: MRT4577_32823C.1.pep
MADQVTVVPPRDPWPFSTITVDDLEALVADGLLCPLSGDPQPEWMVPPSGAAPTPPSRYVLSFVSFHERGFGVPASRFMRALLHYYGVKLHNLNPNSIAQAAIFAAGWQRRWFYLRNDDGRLPSFSQRVVTAAGSNWXLWGRARETEESPAPSGXLQELRDGGHTATGVVAAIHRRRVLPLTEQRLLLSEMMPGVDLEGSQMSSIPLSADDLHRRVAGTVGRLDAGALTQPLMRPECGCMSLELWCHKPSLPSVPEDAVDRATQRVTTEKKKEKKDAKKARARERMWARDTLERHRRRQERDGLPREPSPETPDDDDDDDDDEDDDMAARLGLSPDLRLGQGSSSQPPSGLALSVFGAGTSGSQSEEQGQAEGVLDPLAEEVDPQAVVTAPGRTVPSALRAPEARMVPKPAAGQTSAVPAGTEARGASPQARLALVRSGKWRHGSAGLAPRKALKTVLASAAGAALGHAGRLASTQDAPKRGAQAARVVVGRAPQADPSVEAAVVPGETVGAAAALSPPDVLPASAPASAEAVTVLPVEPPIAADAEMVEAPLPEVGDRKPTSLAEEVPDAPTAGGPDALEEGGAEPRPVLGSGDLILARCDPNERRGQALRFWTRGASKPLFVLEDEREEQSQDELCECAEAAMGSLRSTMEVLSRNVPRILQDLTDLSTAKSSFIHREADVWGSLQFLRAALTEATEHLSQRSAEAVDLRLLCDELGVEEAAARAKARQQQLELGQLAEVSARAGALAEDLVVAVGSAQSAQATASEQRAQAEEFESALNESAKALAQAAEQKEADRVAMSEAISAFCQVFGLDDVPSGSSPQSRLQALGGHVRSRLREALHHGVRRAFAMLASHYDVDLERVSEGYCLLDEDEAALTEVQRLDAAVTGPIAVLASSFEVEILPLASPSKAGADLAEGGNNAEGGDEAEGAAPPPGDA

SEQ ID NO: 295774 - protein, 125 aa, Zea mays
  Clone ID: MRT4577_32824C.1.pep
EFVKLSIFGTVFEVTTRYVDLQPVGMGAFGLVCSAKDQLTGMNVAIKKIMKPFSAPVLAKRTYRELKLLKALMHENIICLSDIFISPLEDIYFVTELLGTDLHRLLQSRPLEKQFIQYFLYQILR

SEQ ID NO: 295775 - protein, 323 aa, Zea mays
  unsure (1)..(323): unsure at all Xaa locations
  Clone ID: MRT4577_32825C.1.pep
MADRVTVVPSRDPWPFSTVMVDDLKALVADGLLRPLSGDPQPEWMVPPSGAAPTPPPGYVLSFVSFHERGFGVPASRFMRALLHYYGVELHNLNPNSIAQAAIFATVCEAFLGIDPHWDLWTHLFSTEPFALTTGEKKVCMAVRXWLHPPVEAGARATVHPRHPCVXNKGWQRRLPLVLTVGISVRLQELGCHKPSLPPVLEDAVDRAARRVAAEKKKEKKDTKKAQARERMRARDAMERCRRRQDRDRLPREPSSETPDDDNDDDDDEDDDMAARLGLSPDLRLGQGSSSQPPSGLAPSVSGAXPSPGRPSCRGRLLARPRP

SEQ ID NO: 295776 - protein, 64 aa, Zea mays
  Clone ID: MRT4577_32826C.1.pep
NIILGISVSGPDPPRTCVVAPPLLHRVMYEPRPRSRMGSSCRRFVLPLKAQWAQPVRDGAIRPS

SEQ ID NO: 295777 - protein, 50 aa, Zea mays
  Clone ID: MRT4577_32827C.1.pep
GKGSFAKMSLFSNISLKTKFFTNPSGCKKKHPLIPVKCFIRQKVGLLEFP

SEQ ID NO: 295778 - protein, 301 aa, Zea mays
  Clone ID: MRT4577_32828C.1.pep
DLTDLSTAKSSFIRREADVWGSLRFLRAALTEATERLSQQSAEVADLRMLHDELGVEAAAARAEAQRRQLELGQVIGERDQSRNQAAEVESRAEALGGQLAEVSARARALAEDLAVAVRSAQSAQAAASEQRARAEEFESALNESAKALAQAAEQKEADSVAMSEAISSFCQVFGLDDVPSGSSPQSCLQALGSHVRGRLREALHHGVRRAFVVLASHYDVDLERVSEGYCLPDEDEAALAEVQRLDAAVVGPSAVLASSFEVEILPLASSSKAGVDLAEGGNDAEGGDEAEGAAPPLGDA

SEQ ID NO: 295779 - protein, 254 aa, Zea mays
  unsure (1)..(254): unsure at all Xaa locations
  Clone ID: MRT4577_32829C.1.pep
MADQVIVVPPRDPWPFSTVMVDDLEALVADGLLRPLCGDPQPEWMVPPSGVAPTPPAGYVLSFVSFHERGFGVPASRFMRAILHYYGVELHNLNPNSIAQAAIFAAVCEGFLGIGPHWDLWTHLFSAEPFASTTGEKRVSMAMRAGGCILQLRQARAQQYIPAILLSSNNGWQRRWFYLRNDDGRLPSFSQRVVTATGSNWRYGXRARNRRISSPFWRPCRSCETEGLPPRGWSPPSIAGGCFPXQSGGCCFRR

SEQ ID NO: 295780 - protein, 890 aa, Zea mays
  Clone ID: MRT4577_32830C.1.pep
MAVRAGGCILQLKQARAQQYIPAILVSSNKGWQRRWFYLRNDDGRLPSFSQRVVTAAGSNWRYGAPRERQKNLQPLLEALQELRDGGLTAAGVVAAIHRWRVLPLTERRLLLSEMTPRVDLEGSQMSSVPLSADDLHKRVAGTVGRLDVGALTQPPMRPERGCMSLELGFHKPSLPLVPEDAVDRVARRVAAEKKKEKKDAKKARSRERMRARDALERRRRKQERDGLPREPSPETPDDDDDDDDEDNDMVARLALSPDLRLGQGSSSQPPSGLAPSVSRARTSGSRSEEQGQADGVLDPLAEVVEVTPGSWADPPVPQESSLVPAAQEVDPQVVVTAPGRTVPSAPRVPEAGMVLKPAAGQTLVVPAGTAARGASPQARLVVVRSGKRRHDSTGLAPRKVLKTTPASAVGAAPGHAGRLASTQDAPKQGARAARVAVGRAPEADPSVEAVVVPRETAGAGAALSSPDVLPTPAPTSAEAIVVLAVEPPVVANAEMVEAPLLEAGDRKPTPLAEEVPDAPTAGGADALEEGGAEPRPVLGSGDLVLARRDPNERCGQAFQFWTRGASKPLFVLDDEREEQSRDELRECAEATMWLLRSTMEDLTDLSTAKSSFIRREANVWGSLWFLRVALAEATERLSQRSVEAADLRMLCDELGAEAAVACVEAQRRQSELGQVIGERDRSRNQAAEAESRAEALGGQLAEVSARAGALAEDLVVVVRSAQSAHAAASEQRARAEEFESVLNESAKALAQVAKQKEADRVAMSEAISAFCQIFGLDDALGGHVRGRLREALHHGVRRAFAVLASHYDVDLERVSEGYCLPDEDEAALAEVQRLDVATAGPSAVLASSFEVEILPLASSSEAEADLAEGGNDAEGGDEAEGAAPPPGDA

SEQ ID NO: 295781 - protein, 105 aa, Zea mays
  Clone ID: MRT4577_32831C.1.pep
WPKGTKACLQKPPLRGQTLGPCPLVKKNGDISRGTYTKTFGYGPPLPGWFCPRSLAGGQIGSVGPRLFFDRGTQGGGEGFKGTPSGEKGPPQKTQHGENGEGGRF

SEQ ID NO: 295782 - protein, 229 aa, Zea mays
  Clone ID: MRT4577_32832C.1.pep
MGSLRSTMEVISKDVPRILQATERLSQRSAEAVDLWLLCDELGAEAVTAHTEVQRRQLELGQVIEFESALNEFAKALAQAAEQKEADRVAMSEAISAFCQVFGLDNVPSGSSPQSRLQALSGHVRGRLREALHHGVRRDFAVLASHYNVDLERVSEGYCLPDKDEAALTEVQRLDAAAVGPSAMLASSFEVEILPLASPSEAGADLAEGGNGAEGGDEAEGAAPPPGDA

SEQ ID NO: 295783 - protein, 349 aa, Zea mays
  unsure (1)..(349): unsure at all Xaa locations
  Clone ID: MRT4577_32833C.1.pep
LEEGGAEPRPVLGSGDLIPARRDPNEWRGQALRFWTRGASKPLFVLDDEWEEQSRDELRXYAEAAMGSLRSTMEILSRDVPRVRGYRSTERLAQWSAEAADLRLLCDELEVEAAAARAEVASARTEAQRRQLELGQVVGERDQSRNQAAEAVGRAEALGGQLAEVSAWAGALAEDLAVAVGSAQSAQAATSEQRARAEEFESALNESAKALAQVSEQKEVDRVAMSEAISAFCQSRLQALGGHVRSRLREALHHGVRRAFVVLASHYDVDLERVSEGYCLPDEDEAALAELQRLDAVVAGPSAVLASSFEVEILPLVSPSRAGADLAKGGDDAEGGDEAEGAAPPPSDA

SEQ ID NO: 295784 - protein, 463 aa, Zea mays
  Clone ID: MRT4577_32834C.1.pep
LVNVIGSKALPQLPLIMKNIMLMSHQISCCPSGNYAHGSTRTAAELSNQDITVLLSALTTIEVIVEKLGEFVNPYLKEILDLVVLHPECSTQMHAKLDAKAARVRELLTVKVPVRLILSPLLNLYSLTANCGDASLTLAFSMLASLVGTMDRLAVGTYHSKIYEHCLAALDLRRQHPDSLKNINMVEQSIIHAIISLTMKLTEGTFRPLFLRTLEWAEAEVDESSSKKSLDRAIVFYKLVNKLAEKHRSLFTPYFKYLLEGSIQYLSEDDALGGSKHKKKKTKLVDVQVEQKDKLLGLKLWNLRALVLKSLHQCFLYDNDQKILDSSNFQVLLKPIVSQFVVESPKSVESVLDAPSIEEVDETIILCLGQMAVTARTDVLWKPLNHEVLMQTRSDEVRPKMLGLKVIRYMVQHLKEEYVVLVPETIPFLGELLEDVELPVKTLSQEILKEMETLSGESLQQYL

SEQ ID NO: 295785 - protein, 81 aa, Zea mays
  unsure (1)..(81): unsure at all Xaa locations
  Clone ID: MRT4577_32835C.1.pep
PESVRXIGDPCCCRAPSPRPDPHLSRSLCHFSFRFHGSPAIALPLQRAQAAASYRLFFTSARLFTFQSTSLFLILLNERHQ

SEQ ID NO: 295786 - protein, 82 aa, Zea mays
  unsure (1)..(82): unsure at all Xaa locations
  Clone ID: MRT4577_32836C.1.pep
KMATNFLAHEKIWFDKFKYDDAERRFYEQMNGPVAGASRQENGAXVILRDIARARESIQKSLAGXSGPGASSGTSXDHGDSS

SEQ ID NO: 295787 - protein, 48 aa, Zea mays
  Clone ID: MRT4577_32837C.1.pep
IHVSGGKWKANRRIKSRLWLNPLLTQLDPSTCYSHVQLKWMGPFKLPE

SEQ ID NO: 295788 - protein, 66 aa, Zea mays
  Clone ID: MRT4577_32838C.1.pep
DVCTYVCDNSFHDAFCGQPHIIAGYLLWGSLEQHTHPIFHIIFYFKPYSMNRTKQVYTTIYTIYWR

SEQ ID NO: 295789 - protein, 66 aa, Zea mays
  Clone ID: MRT4577_32839C.1.pep
STGDWHLLLDGDHSELHGDVPLSRSRARPCCTPLMDRAIHPLTPLSRPAWPLSRGQAVCALFNTTH

SEQ ID NO: 295790 - protein, 128 aa, Zea mays
  unsure (1)..(128): unsure at all Xaa locations
  Clone ID: MRT4577_3283C.1.pep
AWGNDDTVQESLGIRKGTIGAWKRYSHALPYNYDIQSVVDYHSRLATKGYRALIYSGDHDAVVPHVGTQAWIRYLNLTIVDDWRPXFTRSYASGLTFATVKGAGHVAPLYKTLECQKMFITWISGNPL

SEQ ID NO: 295791 - protein, 274 aa, Zea mays
  Clone ID: MRT4577_32840C.1.pep
MGQLLHLLDLAAARPPARRRRGVAVAVAGGRVKQGEAGRVIRVADPVREGRMPPPLLAAPATPSESPPVAGRRGDEDDEVRQRYYLNMGYAIRTLREELPDVLYKEPSFDIYRDDIVFTDPLNTFKGLENYKTIFWALRFTGRIFFKALWVDIVSIWQPAENIIMIRWIAHGIPRVPWDGHGRFDGASVYKLDKDGKIYEHKVHNVAMNPPTKFKVLPVHELIRSLGCPSTAKPTYFEASSQYLCAGPSYLRLAWIRCYISLCRMLSLANLGEG

SEQ ID NO: 295792 - protein, 29 aa, Zea mays
  unsure (1)..(29): unsure at all Xaa locations
  Clone ID: MRT4577_32841C.1.pep
VGLTYGPPCLEYEDYPALRQIMPDLHVXI

SEQ ID NO: 295793 - protein, 63 aa, Zea mays
  Clone ID: MRT4577_32842C.1.pep
PLRLWGSGSGESVWTRLRTGVRYSYLCRAGGVPSRIGSCRSSRRTALPCAPSAGRSGIIAFAT

SEQ ID NO: 295794 - protein, 228 aa, Zea mays
  Clone ID: MRT4577_32843C.1.pep
GDLGDVDRGGRRTRDYNELKRPPMSRSYSHNDRRALADGTVDRRRRSRSRSRTRGYYTGSRRDPDLRAGTRDLDRTKVTDSGAVPAAGGDGGMHNVDANEIPRQPKVPGSVVVSETDDSAVEAVAIEDKQMESDTAGLDHAQDMSEGEDSEFAEDISEDEDGEFAGSDLNDEDGDEMDNTQSQLSDVHVHTSESVEELDLRQSQLSNAEEGMGTCIAHVYACMVEPLA

SEQ ID NO: 295795 - protein, 82 aa, Zea mays
  Clone ID: MRT4577_32844C.1.pep
SGFCMHEHSSLWNIISGCCHGLAILGNSSGQECVSGRRVFQWSHQLFLSPISCDTMCSIFFVCKAQIPRGVLTVPAVISISP

SEQ ID NO: 295796 - protein, 109 aa, Zea mays
  unsure (1)..(109): unsure at all Xaa locations
  Clone ID: MRT4577_32845C.1.pep
KHAPTKAAKEGRKHTXXTARXATATRSPQGAQAPXDAPRPPHXXPAGAXEXENPXXQPXRXQQAXAXGXXPEXPGXXQQXTARXQQXXXXQEGAQNXRAQHPQQXXPAN

SEQ ID NO: 295797 - protein, 502 aa, Zea mays
  Clone ID: MRT4577_32846C.1.pep
MEALPADDQRPFEDLIMRDEKEPLPLGTRQVLNAAGPSEHHLKQSGYTVDRPTYFAGPSDPTQARTQNAQVAPCMAGPSGYNLEQFGPIMDCPVHYAGPSGYVADRLIPYVGPSEYVADRPLSYAEPSGYGMNRPAYYAGPSDSTRVHAQTAQVAPYMTESSGYSPRPFDPIANRLALYDGWSGYYPGSTIYIWTVRTHLRTVWPGCGPSGPLRRTVRQQYGAPPATHYNHAMPLHGHRAEYCSATREPERYPWESRQSDVRQLEISTHKLNGWSPDMAERIRDEVAGMFRDKLGVSMSSTGQSYRKPYNHRFDTVPYPQGTRIPDFSKFFGEGGKSTHEHISQFIAHLGELANGEAYHVRLFSLSLTDTAFAWYAALPPNSINSWEELERKFHEHFFLGEHELELADLAFVQQGPEESIQLAINEGQLAFQEMQVDTQPFPVNTIELTCKKVLVRPEMTDKGKGKDIVIGDPHMSNISQKEIARKAPDEKAKKSEGTGGQA

SEQ ID NO: 295798 - protein, 798 aa, Zea mays
  Clone ID: MRT4577_32847C.1.pep
MEALPADDQRPFEDLVMRDEKEVMRQWNEQRDKEEAELLHKLSERRKEAADKYLSHFTVDRHQKIVRQGEIDMESLLPPMQGPAVSTPDLSLTTFMDQRGDQLKQYVDESIKMHLRAYEKSAAPNFPSRESNTVPPTSNTSAVNGSPLTQPSYGMPMHAFVSPSQPQPLGTRQVLDATGPSEHHLRQSGYTADRPAYFAGPSDQMQARTQSTQVAPYMAGPSGYNPEHFGPITDRPVHHARPSGYVADRPPSYAGPSGYGMNRPTPGPFGPIADRPILYDRRSGYETTHVAPYTAGQSGYTFRPFGQVADHLASYAGPSGYAYAELRAAQYAQFPHSSQQHYGAPPATHYNHAIPPHGHRAEYYSATREPEGYRAGAGDINRTPNTHLKHTWEESRQSNVRQPEISTHKLNGWSPDMAERVRDEVAGMFRDKLGVSVSGTWQSYRKPYSHRFDTVPYPRGTRIPDFSKFSGESGKSTHEHIRQFIAHLGELADGEAYRVRLFSLSLTDTAFAWYASLPPNSINSWEELEQKFHEHFFSGKHELELADLASVRQGPEESVNDYIRRFRDTRNRCFQIHVAEKQLTGLAFNGLRRYLKEKLDGTQFFSLVHLHQRAMTCESRNKETSKSASHKMHLVGYDNSDDESTDVYTAELVWPGQAKPSACSALQSIRKNRQEEVKFTFNVAKCDKIFDELLKNGNIKLTHTIPPPDELKRRAYCKWHNSFSHATNDCNVFRRQIQSAINEGRLAFQEMQVDTQLFPVNTIELTCKKVLVRPEMADKGKGKGIVINNPRMSDISQK

SEQ ID NO: 295799 - protein, 35 aa, Zea mays
  Clone ID: MRT4577_32848C.1.pep
PWYPGFPTQPFYGKKEPPLCFTGITLSTRLLRLES

SEQ ID NO: 295800 - protein, 101 aa, Zea mays
  Clone ID: MRT4577_32849C.1.pep
GPPGPFDPYPRDRLPANLGQAPRDSFGAPPHKRVDMPGPFPPKWFKIGGNISPTLLAAPRMACPVFTPPAGNKISPRNLSIDLCKLIYMNKIKAPLLVFGP

SEQ ID NO: 295801 - protein, 553 aa, Zea mays
  Clone ID: MRT4577_3284C.1.pep
RCVVGAHLCPAFSAMANSTSSRSHCLIRISLTSFDAPERKRARNKLWMIDLGGSERLVKTKATGKRLKEGKAINLSLSALADVIDALQTKKSHIPYRNSKLTQVLKDSIGCESKTLMLVHIRPNEDDLCESICTLGFATRVRSIRLENEEPQEVKARKEHLLMELEKEISDLEQECEGIVRKIKKLKETMEHFKGHQPSAEANFDISHPSSEELKTVMPKNTKDSKNRRDVSSRLPRFMKPTASSQHRIDLNKHIPVSNKTKPPVPPKRRPSSVYAESVRLPVNAATWQSECSSECSISMTSDMNWIPSIQDGTECSQDTSEYETKQVIFSEHEKPPQSQVISFEESGEMQDKTKEMGIIDIDSWIHQQIIENTGICQCHTERTLDVIEVNEYETYNSNTASPVQKEFTNGSKPSLDEDSNLNLCPPTQNTEDSKETRAVNQFTKTELYTPPLKELCGSAKIKEHKNEKLGRHGSCRRSLQEELGNCKPEQPDKEPKADPNMQPEIEFHDNKHHIGKLTKFIQALRTAWIGALLGLGTMNLGLEQDFFKSLTL

SEQ ID NO: 295802 - protein, 822 aa, Zea mays
  Clone ID: MRT4577_32850C.1.pep
MAGSKDHTKISTTNIIKPAMEALPADDQRPFEDLVMRDEKEVMRQWNEQRDKEEAELLHKLSERRKEAADKYLSHFTVDRHQKIVRQGEIDMESLLPPLQGPAVSTPDLSLTTFMDQRGDQLKQYVDESIKMHLRAHEKSAAPSFPSRESNTEPPASNTSAINGSPLTQPSYGMSMHAFVSPSQSQPLGTRQVLDATGPSEHHLRQSGYTADRPACFAGPSDPMQTRTQNTQVAPYMAGPSGYNPEQFGPITDRPTHHAGPSGYVADRPPSYVGPSGYGMNRPTYYAGPSDSTRVHVQTAQVAPYMTDPSGYNPGPFGLIADRPVLYDRRSGYETTHVTPYTAGHSGYTFGPFDQVADHPASYAGPSGYAYAEPRTAQYAQFPHSSQQHYGAPPATHYNHTIHLMDIGLNIVRLQESLRGTGQSYRKPYSHRFDTVPYPQGTRIPDFSKFSGEGGKSTHEHISQFIAHLGELADGEAYRVRLFSLSLTDTAFAWYAALPPNSINSWEELEQKFHEHFFSGEHELELADLASVRQGPEESVNDYIRRFRDTRNRCFQIHVAEKQLTGLAFNGLRPYLKEKLDGTQFFSLVHLHQRAMTCESRKLTCKKVLVRPEMADKGKGKGIVISNPRMSDISQKEIARKASYEKAKRFEDAGGQAQLMNQTHQPSPNIVDGPAPMCGQSGAQTNGPANSAGQSTYDQRRQPLHKARKKTQGQSTYNRLIKVDPTFDQLLSKNTSKKTVPHDRSTKKPRSPAKTKRSNKTTRKATQQASPIHSMRPGYFPPIYSSSVYYPVQTWNGTMMNPWYMYSPFVYPDWGAPPFYSF

SEQ ID NO: 295803 - protein, 568 aa, Zea mays
  unsure (1)..(568): unsure at all Xaa locations
  Clone ID: MRT4577_32851C.1.pep
MSHDELADKEPSSSEEFQLAPTDSKFRSLSPAPIPIPASPGIRSLVDSVSDETVNVDLMASHQSENGSISTASSTVSLLESEKAAYEFLAQTPVRSTDAHLIEFSEALRTVAKALRQVAEGKAAAQAEAAEWKRKYELETAQKQQSKIRGYSSCISNNLDKLASQLTLETPAPDQLGCCGKHGICAHQVLQDEVPGPIPRSNHKVGGRKAPFKLSWGCNGDKNGQHKHDFVSFEKGDITTAERSNKQILLKWESPPQTVLFITKPNSSSVRVLCAEMVRWLREYKNVNIFVDPRVSKELLTEDSYYNFVQTWDNDDDIKMLHTKVDLIVTLGGDGTVLWXIIVQRTSSSSCRIRPWITGLHDTXPSEHYRELLDNVLNGPFSITLRNRIQCHVIRDAAKDEIVTEEPFLVLNEVTIDRGISSYLTNLEVYCDSSFVTCVQGDGLIISTTSGSTAYSLAAGGSMVHPQVPGILFTPICPHSLSFRPLILPEYVTLRVQVPYNSRGHAWASFDGKDRKQLSPGDALICSISPWPVPTACLVDSTTDFFRSIHEGLHWNLRKSQSFDGPRD

SEQ ID NO: 295804 - protein, 108 aa, Zea mays
  Clone ID: MRT4577_32852C.1.pep
LTRTSGSYRSSPTPVDLMAGSMDVVITALTLAYETTHRPAAQGRILCTVAPDRSRCRSLRLRPYGQRSARSSARSTKAVAAALADPLKVMISRATTSGKGTQCELIKT

SEQ ID NO: 295805 - protein, 43 aa, Zea mays
  Clone ID: MRT4577_32853C.1.pep
NLGPIYIYTQYNDKLCCDTMILVLSYFGICQFNIFQLHPESFV

SEQ ID NO: 295806 - protein, 91 aa, Zea mays
  Clone ID: MRT4577_32854C.1.pep
FSIHLNTLNNRFNKTKIYTIHESMTNMYLQKKKKKKKKDGRQLLRQIMPPLDSCPLPARNPCQPTPRRLTACPFHCHRRIRCYIDITRTYP

SEQ ID NO: 295807 - protein, 64 aa, Zea mays
  unsure (1)..(64): unsure at all Xaa locations
  Clone ID: MRT4577_32855C.1.pep
SLGRGVNICGFKRRLKRGKVFKELRIGFLDTCFFQHKRKKIYDVNKNKLYYKLNPKKKKKKXXQ

SEQ ID NO: 295808 - protein, 37 aa, Zea mays
  Clone ID: MRT4577_32856C.1.pep
GWLGRMLATVVWVASCWVHPFVARGVLACPSLHLHEW

SEQ ID NO: 295809 - protein, 140 aa, Zea mays; identical to SEQ ID NO: 256503
  Clone ID: MRT4577_32857C.1.pep

SEQ ID NO: 295810 - protein, 105 aa, Zea mays
  Clone ID: MRT4577_32858C.1.pep
HSWRPAVHGSKGKMGADDLTARCSRKKFVTRSFKACLQFPVNLIGLYLTKGQYVQRVNTVAYVYLVAVLEYLVGEVLELARNAANDSINTRIIPLHVLLAIRIDE

SEQ ID NO: 295811 - protein, 99 aa, Zea mays
  Clone ID: MRT4577_32859C.1.pep
AGGLQRRVRSYMVEDAGQRHGSPQAHHPSQHPLHCLHSRSMSLVTPLWRSKRCILIRKALVGGVRGTWRTKRLSLLLVGRVDRARYTGSGPAERAQLSP

SEQ ID NO: 295812 - protein, 139 aa, Zea mays
  unsure (1)..(139): unsure at all Xaa locations
  Clone ID: MRT4577_3285C.1.pep
KFFWGVFFFFFFFFFLSYNFRPFGLDPLNSPLFSVEPQGGPKRDPGGGGAKPWGPPTPPKRGGPKXQGEKRPKRIPGEKGIPGQNAPQKTTQKQKGKSPGAQRKNQPPKKGGDPTPPPQEGKPXGPPEKKNSQPPGKGG

SEQ ID NO: 295813 - protein, 74 aa, Zea mays
  unsure (1)..(74): unsure at all Xaa locations
  Clone ID: MRT4577_32860C.1.pep
NTKNSFVGXGSFTNSFFPPSCYKGTHLYQYLCRYPLPHKPTCANPIVFNLRRKKIIWSDRLDTGFPALPCRENF

SEQ ID NO: 295814 - protein, 299 aa, Zea mays
  Clone ID: MRT4577_32861C.1.pep
EAGRVFGQIGRYWKERIAQPLIISLAKGIEASLDPVPRIITPTQMISNATGVPLENILYLGGPNIASEIYNKEYANARICGADKWRKHLANFLRQPHFIVWDNSDLITHEVMGGLKNVYAIGAGMVAALTNESATSKSVYFSLCTSEMIYITHLLAPEPEKLAGPLLADTYVTLLKGRNAWYGQKLAKGELTLEMGDSIKGKGTIQGVSAVNAFYELLSQGSLSVMHPETKKAVAPVELCPILKTLYKILIKRELTTNSILQAIRDESMYDPRERIEMAQRQSLYRPSLLGLPKADAKA

SEQ ID NO: 295815 - protein, 45 aa, Zea mays
  Clone ID: MRT4577_32862C.1.pep
PTAQGGWHSWRVLIGGTLDVVVINSKKTSMLNGNLKSHIGRLSVG

SEQ ID NO: 295816 - protein, 239 aa, Zea mays
  Clone ID: MRT4577_32863C.1.pep
PIFWFWIQGFLVWGLPIVMIVVGGASWWLAGLAMEPVYRSYQQIQQFTADIAHELRTPITAIQATLETTLNAEPNAEETHSTLQTLKRQNYRLSHLIHDLLLLSRMDLTTVNPTQFTLCCLNDLVEDLTEEFASLAIAAGVLLSAKLDNQANIWVRGEEEQLYRLVGNLISNAIHYTPTGGEVTVMLETDKQQAIIKVQDTGIGIASENQSRVFDRFYRVDTARSRQRGGAGLGLAIAQ

SEQ ID NO: 295817 - protein, 53 aa, Zea mays
  Clone ID: MRT4577_32864C.1.pep
MTKFCLSFNRSNKTLLWPILIYILVILQRHGSVLSPNTSQLPYSDIQTKKISK

SEQ ID NO: 295818 - protein, 67 aa, Zea mays
  Clone ID: MRT4577_32865C.1.pep
KSGGGAKKAGGLPCKSSKKGSSLVPLPPSIKDSPPFFFKCKIYVPWSLDHVVSFAMFKGPCCLFGTH

SEQ ID NO: 295819 - protein, 87 aa, Zea mays
  Clone ID: MRT4577_32866C.1.pep
GCYTRDWNTMIKFSQDQMVQAHTCVHASENEINNHIKRKWSTEPIASTYLRKMLRNFDSHAHAANAPIEHRTQRKHKSRKKQRNFDR

SEQ ID NO: 295820 - protein, 122 aa, Zea mays
  Clone ID: MRT4577_32867C.1.pep
KGPPLGSGPLFPNCSPKRLGPFSLPHWFKRRKGGPNFQGFGAFPPPRGFWSFFLTLRDLPLGPSPGPPRCSFAPPSPGKFFFFFSPRGLIFLGAGFPLFYLFIFPSCKPPQVFFFCQPAPPL

SEQ ID NO: 295821 - protein, 47 aa, Zea mays
  unsure (1)..(47): unsure at all Xaa locations
  Clone ID: MRT4577_32868C.1.pep
XKKKKKKKKKLIKKKKKKKKKTKKKKNKXKNKKIFYKKKKKKRGGPF

SEQ ID NO: 295822 - protein, 67 aa, Zea mays
  Clone ID: MRT4577_32869C.1.pep
PQGDLLYIVALHVGGCDYHFYSHLLGDTPRMKINFRRGEKPDFKKIGQSLKSQHDNHLHFYVSNGHL

SEQ ID NO: 295823 - protein, 54 aa, Zea mays
  unsure (1)..(54): unsure at all Xaa locations
  Clone ID: MRT4577_3286C.1.pep
GGARXXRGRRRDXEGAAXRXXHTCXXWPRXRTGREXXTPLPRGWVGXXGTEKAW

SEQ ID NO: 295824 - protein, 61 aa, Zea mays
  Clone ID: MRT4577_32870C.1.pep
FFSLTKRNKNHAMDHKHLINTYLCVFSLSALVLMSVSALLQYKTSHQENCNKNTKTPSALK

SEQ ID NO: 295825 - protein, 99 aa, Zea mays
  Clone ID: MRT4577_32871C.1.pep
KNHPRVFFAVFPFFFFWGDFYSCLGAISKGLPLWAIKGETPSFKKVWAQFYLIYLFLAVKFYLAKAGLVFCSQTHCFFFTPCWGFTRLGQRPKPLFYAP

SEQ ID NO: 295826 - protein, 37 aa, Zea mays
  Clone ID: MRT4577_32872C.1.pep
KLQSGERSLLYEVGCAGCMCLGLQLESIETGYYINHS

SEQ ID NO: 295827 - protein, 102 aa, Zea mays
  unsure (1)..(102): unsure at all Xaa locations
  Clone ID: MRT4577_32873C.1.pep
AQQLTTTVLANLLLLSSNSSFXPFNQLGSLNLXFICNNNNYLQPATAAYPQHFFLQPTSSLNLCFYSSNNLPSAVVVEPVLLTTQLCVYQHVANVALYNQHC

SEQ ID NO: 295828 - protein, 62 aa, Zea mays
  unsure (1)..(62): unsure at all Xaa locations
  Clone ID: MRT4577_32874C.1.pep
TIAPISIGFIVGFRKTQDTAYYRSYIMPDMNNXPALINWEWGYQWVYWVGPLICSGLAGLIY

SEQ ID NO: 295829 - protein, 235 aa, Zea mays
  Clone ID: MRT4577_32875C.1.pep
MADLLSFLKTILEAGFSIMSALEKAGHNADDCRRIGQLLQTLSAIANAKYLQDNTTKGLKETLQRASEIVKTCNRKTLVSRAFKANQIADELRGVCIDILLNLNTVLLANVADIKKTVTYNNSMLAQILEICAANPDVRLLRQKIDRLAQTYCNSSDDDSYQNENKRETKRTDLDRPGFKTEKDNAPVDSKVPRASLSDGGSIKSTPVKSVIGQGGPSIVKKAHSSNPTDGDGSS

SEQ ID NO: 295830 - protein, 43 aa, Zea mays
  Clone ID: MRT4577_32876C.1.pep
LLFLERHQQIADSEAARYTQCGSETKILDGIHFIQQVAPDSSL

SEQ ID NO: 295831 - protein, 81 aa, Zea mays
  unsure (1)..(81): unsure at all Xaa locations
  Clone ID: MRT4577_32877C.1.pep
WIYSGSGKENPNDDGPENNPQFTTVYVGYLPHEATMNDVRLFFHSLXAGSIXEVRVTRDXGFGFVRYSTHEEAAFGIXMGN

SEQ ID NO: 295832 - protein, 108 aa, Zea mays
  unsure (1)..(108): unsure at all Xaa locations
  Clone ID: MRT4577_32878C.1.pep
MLVALSACVANTTISDEYSHAPIDALIAXYTXSLTALDCEIPGLXPYEIQLSIXTRHLXPLSHLFFEQSPALSLMQPLVQTIRLQQTRQLVLPEIIQVALANLCCYYY

SEQ ID NO: 295833 - protein, 51 aa, Zea mays
  Clone ID: MRT4577_32879C.1.pep
RRMYSSSLGPGRFIFYYLGGRLGPGGSFVNNIWVPPLEKSMDQKFCGVSNV

SEQ ID NO: 295834 - protein, 166 aa, Zea mays
  Clone ID: MRT4577_3287C.1.pep
MARSKLSVELLLALLVVLAAGPAMRLVEAASAHLHFYMHDVTGGPSPTAVQVVSGPRGNFGNTMVIDDKLTEGTSESSTTVGRAQGYYMVASVANLELLVNMNVVLTSGPYAGSSLTVVGRDDVSVPVRELSVVGGTGQFRMARGYVLWKTVTPAILDLEIFVNPS

SEQ ID NO: 295835 - protein, 152 aa, Zea mays
  Clone ID: MRT4577_32880C.1.pep
RAGAGAGAGAPRLGSIRRPRSVPCARNSWARCPARSLFSPAAASAAEGAARAGPGFHGSALAATGSGWACSSSRSRSLRLPRTTRAASSFSLSDISTAALRLQTRQRGAEPSERKDGEAQSFFFLQPSFGLAAEQMKEKKEKKKRDLTQSTN

SEQ ID NO: 295836 - protein, 90 aa, Zea mays
  Clone ID: MRT4577_32881C.1.pep
GRGVGDHPRGVTPAAAPLGQRDIRRCATVFLTRMKGKTVMFVGDSLGRNQWESLVCLLHAAALQSPTQLVSVDPLYTYKFLVCHVNTCTS

SEQ ID NO: 295837 - protein, 45 aa, Zea mays
  Clone ID: MRT4577_32882C.1.pep
RRRDQSTGKSVLISCASRIGLPSKSNKINPYMDITCYIFFENVEQ

SEQ ID NO: 295838 - protein, 79 aa, Zea mays
  unsure (1)..(79): unsure at all Xaa locations
  Clone ID: MRT4577_32883C.1.pep
MRKQVYQLMAASRNGDVQEASRKYCDLHDCPLYLXGLCPHHLVQLTKIDMGPRPKLNLLXLRIEYDEAKAKGSDNYDRE

SEQ ID NO: 295839 - protein, 67 aa, Zea mays
  unsure (1)..(67): unsure at all Xaa locations
  Clone ID: MRT4577_32884C.1.pep
MATKILLLLALHALIVSATNASIIPQCSLAPRARIAQPLKPSTXMGSNHTTVRAYXLQLALAASALQ

SEQ ID NO: 295840 - protein, 108 aa, Zea mays
  Clone ID: MRT4577_32885C.1.pep
VVVPANEELHLHGVRAAPKARARVRVRHRPLFSTSSSVRSMWNVAHDRVLSGGRRCGHLCRGGGVGDLAAVPRLALEGARVGRLERKLRASKVGLGPRVWLLGFEKES

SEQ ID NO: 295841 - protein, 128 aa, Zea mays
  unsure (1)..(128): unsure at all Xaa locations
  Clone ID: MRT4577_32886C.1.pep
TQPHNSTTPPSSAGLCRXFRXSCVGLVVSRGVCFGLSGSVGRVVLAGGLLGGFFACFALGWLVAVGAGLASCPVGSVRWRLVLPSGAAVXWVGSLAVFLRLLCRAGPGSLFAGAGAXFLRAVAGAGVL

SEQ ID NO: 295842 - protein, 81 aa, Zea mays
  Clone ID: MRT4577_32887C.1.pep
CIAVHSIRNHISKFLFYVLLFNTDSNIGINADFIITIPKHLNIYIRCVVYIYKNLMIFSIIDMYYFNVHVEFRFNISLTPK

SEQ ID NO: 295843 - protein, 55 aa, Zea mays
  unsure (1)..(55): unsure at all Xaa locations
  Clone ID: MRT4577_32888C.1.pep
LFVWGRFRMYGFLIIGFLVEVCLPRGIVQFVGXVFXDPKTLRFGCSVIVFSTLTT

SEQ ID NO: 295844 - protein, 157 aa, Zea mays
  unsure (1)..(157): unsure at all Xaa locations
  Clone ID: MRT4577_32889C.1.pep
MNSRAAEEVDLERIAQGDVIGTSRRRKSSPRLYILDILRLPSYHTSTPHVLAASGSTTTFAQWHHRLGHLCGSRLSTLIKSGCLGPTHAESSFHCKGCHLGKQIQLPYFTSDSHSAKPFDLIHSDVXGPAPFVSXGGHKYYVIFIDDHSRKKKKKKR

SEQ ID NO: 295845 - protein, 168 aa, Zea mays
  Clone ID: MRT4577_3288C.1.pep
ENGQLVTVSSMIEPTITTDTFGEPQESNCLPSAHDSIRRARLPRREGKGVNGGAVGVVALLAAAHMVVAIAMVVLQQLPGSLPPYCIAAARDCAVVGIMAVCAGVGLSDRRERAQLPLLCLLLLSEEAVVVTVNGWHPLLWLVRNGRCFRSLSWKRAPAPAPLRWTAG

SEQ ID NO: 295846 - protein, 111 aa, Zea mays
  Clone ID: MRT4577_32890C.1.pep
MATKRSVGTLGEADLKGKKVFVRADLNVPLDDAQKITDDTRIRASVPTIKFLLEKGAKVIHPGGGGRPKGVTPKYSLETIVTHLGDLLGGAMSISPTPIGSSVTLSRTRST

SEQ ID NO: 295847 - protein, 81 aa, Zea mays
  Clone ID: MRT4577_32891C.1.pep
VYHTIISGQGVGGFLLTANTRHLWAQKTKNTLVGRDQTHLGVQVASVALTEPGRTVLLLNRRNTWLSRDEHRHLWDTTCVS

SEQ ID NO: 295848 - protein, 57 aa, Zea mays
  Clone ID: MRT4577_32892C.1.pep
ACFDWYGVTLNNVLLIARVLRREDCAGMEWLYSSLLGLHPSLLLAWREGLAPSCVFE

SEQ ID NO: 295849 - protein, 955 aa, Zea mays
  Clone ID: MRT4577_32893C.1.pep
YRALPSCSPKRTSSVKNCFSNTYNIRKEGSRWIQSGPPLLLNRVKFVGKRTSCSVATEPPPAATEEPGMDVPKEIFLKDYKAPDYYFDTVDLQFQLGEEKTIVTSKIVVSPGVEGISAPLVLHGHDLKLISIKVNGTELKGEEYKVNSRHLMLSTPPAVVFNLEIVTEIYPQLNTSLEGLYKSTGNFCTQCEAEGFRKITYFQDRPDVMAKYTCRIEADKTLYPVLLSNGNLIEQGDLEGGKHYALWEDPFKKPSYLFALVAGQLGCREDSFVTCSGRNVTLRIWTPAQDLPKTAHAMYSLKAAMKWDEEVFGLEYDLDLFNIVVVPDFNMGAMENKSLNIFQSRLVLASPETATDGDYAAILGVVGHEYFHNWTGNRVTCRDWFQLTLKEGLTVFRDQEFSSDLGCRTVKRIADVSKLRIYQFPQDAGPMAHPIRPHSYIKMDNFYTVTVYEKGAEVVRMYKTMFGASGFRKGMDLYFKRHDGQAVTCEDFYAAMCDANNAQLPNFLQWYSQAGTPIVKVASSYDPSSQTFSLKLSQEVPPTPGQPVKEPMFIPVAVGLVDSTGKDMPLTSVYSDGSLQTVSTDGQPVFTTVLQFKKKEEEFMFKNIPERPVPSLLRGYSAPVRLDSDLSEGDLFFLLASDSDEFNRWEAGQVLARKLMLSLVADFQQQKTLVLNPKFVDGIRSILRNTSLDKEFIAKAITLPGQGEIMDMMEVADPDAVHAVRNFIKKELAVQLKDDLLAAVKSNRSSEAYTFNHDSMARRALKNTCLAYLASLNEPDFVELALHEYKSATNMTEQFAALAALSQNPGQVRDDALLDFYNKWQHEYLVVSKWFALQATSEIPGNVANVQKLLSHPAFDLRNPNKVYSLIGGFCGSPVNFHAKDGSGYKFLGEIVLQLDKINPQVASRMVSAFSRWRRYDKTRQALAKAQLEMIVSANGLSENVFEIASKSLAD

SEQ ID NO: 295850 - protein, 209 aa, Zea mays
  Clone ID: MRT4577_32894C.1.pep
FGTRRRASSHGCPPDPSPVRASAPPSATHLFSPLSPTSPMAWTATSLTLHSACKGRIARLLSPHRRSPLLRRPLPQTARHHMLPLPRPHSPSPNSTAPRRSHSPSLAISPHLRLVPRRSPSIFGTERKMDGNPIHRRQTLHILHSRHPPLLTRHHRWGYPPICWKESAPNQSPKSVPNPRWMRWWGDPPICVPSTCLHILHRRRPPTNH

SEQ ID NO: 295851 - protein, 134 aa, Zea mays
  Clone ID: MRT4577_32895C.1.pep
ILSLETSGFRKGMDLYFKRHDGQAVTCEDFYAAMCDANNAQLPNFLQWYSQAGTPIVKVASSYDPSSQTFSLKLSQEVPPTPGQPVKEPMFIPVAVGLVDSTGKDMPLTSVYSDGSLQTVSTDGQPVFTTVLQF

SEQ ID NO: 295852 - protein, 220 aa, Zea mays
  Clone ID: MRT4577_32896C.1.pep
MARRLISPAAACRGCGLVRTGFLPAISSFHYRALPSCSPKRTSSVKNCFSNTYNIRKEGSRWIQSGPPLLLNRVKFVGKRTSCSVATEPPPAATEEPGMDVPKEIFLKDYKAPDYYFDTVDLQFQLGEEKTIVTSKIVVSPGVEGISAPLVLHGHDLKLISIKVNGTELKGEEYKVNSRHLMLSTPPAVVFNLEIVTDIYPQLNTSLEGLYKSTGNFCTQ

SEQ ID NO: 295853 - protein, 96 aa, Zea mays
  Clone ID: MRT4577_32897C.1.pep
DLRNPNKVYSLIGGFCGSPVNFHAKDGSGYKFLGEIVLQLDKINPQVASRMVSAFSRWRRYDKTRQALAKAQLEMIVSANGLSENVFEIASKSLAD

SEQ ID NO: 295854 - protein, 152 aa, Zea mays
  Clone ID: MRT4577_32898C.1.pep
QNLSHRHSGNQDLEKSADQNCLNKDVEIEERELIEEDHNNIIYKSKLKQENVVLKSVIETSSAEQLQVNNATSKDATCNNRATRESDEKHILEVMEKMQKRRERFKEAIAPKKEVGDKKDLSALACSTDFIQNQRPARKRRWGGNCWMLEMP

SEQ ID NO: 295855 - protein, 122 aa, Zea mays
  unsure (1)..(122): unsure at all Xaa locations
  Clone ID: MRT4577_32899C.1.pep
TNNKAPERSSSASVPRGWGAGSQTXXXGEGPPXAPXAAXGGGRXAGGEAPGATGKSAYQTKALNXEEEVWGGGGLLFFFXRRXNKHKRRKTIGRKTVPPHTQDGKTXRRRNQGGRRPSRKQG

SEQ ID NO: 295856 - protein, 220 aa, Zea mays
  Clone ID: MRT4577_3289C.1.pep
MDSPRGPASFATQANALLRKNLCVQKRNLKTNIGITFFPILICVLLIVLQNVINSELDKPKYKCGCVCLETSANGRCVRKECGIQYSTLDQVGSCPIPSPPQWPALIQIPRADFRAARTFSQPFNDLPDPFCRDSWSCPATVLVTGKDRAVAEAISRGLFPVLSPSLNATDLLDLFSKIVAGSDTQPWYTQLLEPAFFSGRTLYVIQPECTPVMSQNIYI

SEQ ID NO: 295857 - protein, 454 aa, Zea mays
  unsure (1)..(454): unsure at all Xaa locations
  Clone ID: MRT4577_328C.1.pep
MRECISIHIGQVGIQDEKASWELYCLEHGIHADGHMPXDKTIGGGDDAFNTFXMETGAGKHDPRAVFVDLEPTVIYEARTVTYRQLFDPEQLISGKEDAANNFARGHYTIGKEIVDLCLDRIRKLADNCTGLQGFLVFHAAGGGTGSGLGSLLLERLSVDYGKKSKLGFTVYPSPQVSTSVVEPYNSVLSTHSLLEHTDVAVLLDNEAIYDICRRSLDIERPTYTNLNRLVSQVISSLTASLRFDGALNVDVNEFQTNLVPYPRIHFMLSSYAPVISAEKAYHEQLSVAEITNSAFEPSSMMAKCDPRHGMYMACCLMSRVNGVPKDVNAXAVATIKTKRTNQFXVNWLPXTGFKCGINXQPPSVVPGGDLAKVQRAVCMISNSTSVVEVFSRIDPKFALMYAKRAFVPWYVGEGMEEGEFSEAREDLAALEKDYEEVGAEFYEGEAGDEGDEY

SEQ ID NO: 295858 - protein, 119 aa, Zea mays
  Clone ID: MRT4577_32900C.1.pep
INPLSILITKIYLLHFPPKMGCPEIKKILSRITSLNKLGTGLHWLVLILLPVSSGVLFFLVAGGVLVDPHRDLPMGKASLATRAWSRGGLCTFDLGPTNKAGFSFLVPAASWEITPTEA

SEQ ID NO: 295859 - protein, 36 aa, Zea mays
  Clone ID: MRT4577_32901C.1.pep
DPFPGDKAPGGVHDGTEIVLWKWCEGPPQRWKIPPW

SEQ ID NO: 295860 - protein, 156 aa, Zea mays
  unsure (1)..(156): unsure at all Xaa locations
  Clone ID: MRT4577_32902C.1.pep
QLPRVQLEHQAKPSPRPGSSPSRCRSAPHHPAYRWRAHTSPPRRCTCTPAXAADPSSTSWSLTXSTPRRPARPPPSSRHRTAPRPRRPSRRAGSASGSPASRSPRSRRPPSPSPATAGTWPPSPPCPPPSASPTTGRRPPCPAPPAAGPSCSCPGW

SEQ ID NO: 295861 - protein, 68 aa, Zea mays
  Clone ID: MRT4577_32903C.1.pep
DAFFFFCGGTKSYGEAGLSETPRAGTCPPLRNVSHCPGITPPDLYWPVPQARFYPPAMATAMGAMDDT

SEQ ID NO: 295862 - protein, 108 aa, Zea mays
  Clone ID: MRT4577_32904C.1.pep
ALKRNQKRKPRGAKGRGKKGKPGGKKPKKPEGKGPREGGSQSHTRGGTSRKGEINGPYRVRPMAKKGVSLKGKKMGTARFFPTPPCEKGAQGNVNKPGKGRVGPLKTR

SEQ ID NO: 295863 - protein, 228 aa, Zea mays
  unsure (1)..(228): unsure at all Xaa locations
  Clone ID: MRT4577_32905C.1.pep
MGGKMAPLLAAARSHAAAXPGLRSHLAXPNNESCSRHHLPPSSPLSTKRRCNLNFTTRSARGGSQNGVRMLSASEIPHRDWVPSDFCFGVASSAYQIEGAWSEDGKGESNWDLFCHQPPEXRILDXSNSDIGAXSDHMYYADVRLLKDMGMDAYRISISCPIILTNGTRERGINPXGIWYYRNLINLLLDDGIQPYVTSFHCDVPRALEHKYGGFVHPGHKSIVDDYT

SEQ ID NO: 295864 - protein, 90 aa, Zea mays
  Clone ID: MRT4577_32906C.1.pep
IRHEAWKEGVATRPSTAATAPHSPPTLLLLLLLLLREQNGAQKGDREAAIDAEIVRVNDLPAHSSYAIHRMKVLNKLRHLLSIKVSLSAF

SEQ ID NO: 295865 - protein, 50 aa, Zea mays
  Clone ID: MRT4577_32907C.1.pep
KRDDRRSCCCCCAGSGGCCCCCCCCCCCCCCGGGGGGGGGTGGLACLCAP

SEQ ID NO: 295866 - protein, 51 aa, Zea mays
  Clone ID: MRT4577_32908C.1.pep
PCYTETETGDKKERKHTASDNLPFSQREINLHLFLLYSLIVTQQDMSPIYT

SEQ ID NO: 295867 - protein, 247 aa, Zea mays
  Clone ID: MRT4577_32909C.1.pep
IASAAAPTPAVVVSAPTPALHSPLGPLGELVACASGANFTPHIINVAAGEDVSMKVISFSQQGPRAICILSANGVIANVTLRQQDSLGGTVTYEGRFELLSLSGSFTPTDSGGGTRSRSGGMSVSLAAADGRVIGGGVAGLLVAASPVQVVVGSFLPSYQLDQGANKKPVIEITTVPPAPVGFTISSGDMDDAYSGSQHPRSAAAKGGSTTTALFKVENWTAPVPAPDQARKAPAPAPEAKVPVPGG

SEQ ID NO: 295868 - protein, 119 aa, Zea mays
  Clone ID: MRT4577_3290C.1.pep
FIIHGYWWWSGRPVRELRQYFKTGKTNSVTWRKNQLTSLIDLVHENEDAIFKALHKDLGKHPVEAYRDEVGGVEKSASKALICVEKWMAPKKSDIPFLFFPAKGEVLSEPLGVVLIISS

SEQ ID NO: 295869 - protein, 70 aa, Zea mays
  unsure (1)..(70): unsure at all Xaa locations
  Clone ID: MRT4577_32910C.1.pep
VGFINFFKFGFVRSWLSWSLLVLFVVLVVLMEWVLETCSFIFGCQELSGFGYGGXPFKGPNXXVFXKKPR

SEQ ID NO: 295870 - protein, 78 aa, Zea mays
  Clone ID: MRT4577_32911C.1.pep
GWVFFFFFFFFFFFFFFFFLGQKNYDSPKILFGILITRLKWVPRRPTLIGRGGGPKSHDESHPERDESTPPRARYKPS

SEQ ID NO: 295871 - protein, 82 aa, Zea mays
  Clone ID: MRT4577_32912C.1.pep
VDGIVVNSFEELEHGSVSRLAAATGKAVLSVGPVSLCGAAAPPSLLDSRANSDDARLCMAWLDAKRADSVLYVSFGSAGRMP
